United States Patent Application Publication US 2011/0191912 A1 - sequence listing, part 16

SEQ ID NO: 23648 - DNA, 3003 bp, Unknown
  misc_feature (1)..( 3003): 2750-1469P.txt file - cDNA_ID_2148150; gDNA_ID_1620472; Annot_ID_158036
aaattggaattccaccaggctttgatgttaatcacttaggtaaaaaaaattgcagccaatttgttttcttgtttaccaggctttgatttttttaccaggctttgattttaatgtcatcacagccaccgtgccaatttcatcgtgacttcttctaatatgtcctatggtaatgttgtgatcaggttgcgtgggtggctgtgatgacattcttaaacagttgatagacatctgtggaactggatcccgttctcaaggttagtgctttgttgttacgcaatacatatacctttgtattagacatcatacaatctttctttcatcatcttctgtcctaaatgagaatgcaagaactttagtatagtgtcttgcgaatagagaacatttaggctaaaaagaatcaatgatttgttcttgcagcaaggagaactccaggtactgcaccgtcaaacaatatccaaggaagcaacacaagacagagtaatgtctgcatacattgtcagcaacgaggacatgcttccacgaattgtccctcacgggttccagcatctcgaaattctcgtcctactgcaacaaatccgagaaacggtactgatccttgtataatagtttagcaaacaaagatcatcgattagcttttgctagtatgtactatatactagtcaaaattcaagcaaattgtccagaccaagtcttccttattgacatgtaatttatattctagtattgttggttataatgcagatgaaagtacagtatcatgtaacacttgtggatcacaatgtgttcttcgtacagccaacacagaagctaacaggggaagacaattcttctcatgtccaacacaaggctgcagtttctttgcgtaagagtctggttttaccccaatttcttcgcataatccatttttttttccttttacatcactcaacacatcagttttttgtttgcactgcttgtaaacagatgggaagatagcataaacaacagtagtgggaatgcaacaacagggtctaatagcggcgggagcggtagacgtggcagccgtggtcgtggccgtggaggtagaggcggccaaagcagtggaggacgacgcggctctggaacaagctttgtctctgcaactggagagccagtgagtggtataaggtgcttctcatgtggcgatccttcacattttgctaacgcttgtcctaatcgtaataactctaacggtaactatttctaagtctacttactacgaactttgactatgtatgtagcatgattaattagtgctactaacttaatttgggtttttgtattttattttattttattttatgaccactttttctctggaattcatcctaatttgcgtagatcactgttagctggatattttaaatataatatttcacgtgctattctgaatcactgaatagtttccacctattttatttataaatcttgaatagtcgtttttaatttttagttatgttcttagtgagctaatgtggatccatatttcatcattttttttgtattgtctcataattcataattcatacatcaactatatcactatgtatatgccattgatcttgagtctagacatggtcaagtaatagatattaacaaaatgcttaagctacaaagtttagtcctccgaatttgtttttagagatggtcaagtaatagatattaacaactgttaataacacaaaccacagtcgttttgctctgtaagaaaacgacacaacaaccggaataaacgccgttttgttgtttaaaaacggcacaccaattttcagtccattttgaacataaaagatttaaaattctcaaatcgaaattgagataacagaggatccggcgagcttctccggcgtaggattcgggtcattttcttcggcaactatgaaagggaaaaaaagagagagagaggtgattactgattaggccgtctcctgtggaacaagaacgcgtttcttcttacattcctcatcgaaggagttgttgtagccacttgaggtacttttcatactaatcttggaatttgtatagcttggttcggtatattgaacagtcaattaggtatcttgctgtgaatgatcaagtgggtacttatcattgcctcttcttagtagtctcattacaagactgaagtttggtctcaaaattgacaagcttctcgaagcatttgtccttggactataacttatagtcgagcttgttgtcccttctccagttgttatcttggttgtcgtctgtatatagaagattaaaacaactgttttgcttggagtataattgatactttacaatagaataataatgcacgaaattgaggtcgtgagagaatgaggaaagccaagttctcatgccatgtcggccatctctatcttgttgatttgagtacttagagtctattatagcttcaaagttacaaaaaggaccatcatttttaagccttgtagttctcactttgactaattcatggcttactttatttgttgcttcaaagacaaaacgaatattgagtttcttttttacttgaaataaacaaaagcaaagctgataggcttctgaaactaatattaaaagacaggccagtactaatagaagacttttttaatgaacaaatttcaaacttcaaagctttcaatgatcaaaaaactaatcatagcttgaccatttcctttttatattgttttcctggaaagaagaaaaaaaggtctgcacctcttctattctctctttttcctttcctgaaaccagtttcaaaggttgttttcttgcctagaattttcatagctatgtgtcttggatccagatccatagtttagtagggcctgtattcttctttcaaatatgcttgttatgctacatgatttgagtttttttggatggttttatggtatgtagtctttaagagatgtacaaagtgaggtttttgcagacatgattacatcttgtttgatgtcttctaatgaagatttaagggcttctgtgtatgcatgaatg

SEQ ID NO: 23649 - DNA, 3003 bp, Unknown
  misc_feature (1)..( 3003): 2750-1469P.txt file - cDNA_ID_2148158; gDNA_ID_1620472; Annot_ID_158038
ctctcatgctgattgctctcattgtctacctcatgagacgcccagtgagaacagtcgcttcttctgctcaagatggccaaccatcggaaatgtctttggacatatacttccctccaaaggaaggattcacgttccaagatttagttgcagccactgataatttcgacgagagctttgtagttgggagaggagcttgtggaaccgtctacaaagcggttcttccagccgggtacactctagctgtcaagaagctggcatcaaaccatgaaggcggcaacaacaacaatgtggataatagctttagagcagagattctaactcttgggaatatcaggcaccgtaacatcgtcaagctacatggattctgcaatcaccaaggatcaaatctgcttctgtatgagtacatgcccaagggaagccttggagaaatacttcatgatccttcatgcaacttggattggtctaagagatttaaaatcgctttaggtgcggctcagggtctcgcctatttgcaccatgattgcaagccgagaatcttccaccgggacataaaatcaaacaatatactgcttgacgacaagtttgaagctcatgtgggagattttggactagcaaaagtgattgacatgccacattctaaatccatgtctgctattgctggctcctatggctacattgccccaggtaaagtttttgcttttgtttgtgcaattaagtatccaatgagggaactgaaattaaactgttttaacaactttgcagaatatgcatacaccatgaaagtgacagagaagtctgacatctatagctacggggtggttctactggagctgctaaccggaaaagccccggttcagccaatagatcaaggaggagatgtggtgaattgggtgaggagttacataagaagagatgcattgtcctcaggagttcttgatgctcggttaacgctagaagacgagagaattgtctctcatatgctcactgtgttaaagattgcacttctttgcacaagtgtgtctccagtcgcgaggccatcgatgcgacaagttgttctcatgcttattgagtctgagagatcggaaggagaacaagaacatttggatacagaagaattgacacaaacaactaccccatgacacaatacacattcttgttgtatcttcttcttttttcacacgagattattcttctatgtaaccatggcgaataattattgtaaagtctatacgcacgcagctatatcaaaagatataagcagtatctatatctacaagttaccgttaggtttaattaattagtgttaatccaatcattatccatgggacccaaacggtaattaccgttgtctttttagtatgaacaggtaaatagtagtactctctaacattggatattgtttttggtcattggatcatttaatagatcataatttaatactatggaagtatccatgttataatcaacttgatttttcatagtgattaggtctataaattattgttaatttaatgaagacaccaataataatacggtcacttttgctctggaaatcataattagcgtagatcacggttagctggatttgttataaatataatatttcacgtgctattctgaatcgtgcccaccagattatatatctaatctcttctagtttttaattttagctatgtggtagtgagttaatgtggatctgtttttctcaatattaattttgttaaataattagtcctcttagtcttcacttctctagggatatgattttaaatcaaacgaaaagattcgagtcatactaagacttattcgtacgccatgaaagtttgaaaggtctttttttccttttcttcaaactgaaaattcaaaataaaggataggatatgaataatcgagaagttcatctttaagtaaatgtgattaatatcttagttataatatcataatgccaaacattatcttgcgtgtattaacaatatcattatggttagaattgagattcgttaacaatactcgaatcactatgagatctttagcgataggatgatatgtgtattcctaactcgatcatgaactttaatatgtgctagaaacatctaatgtagtttctgttttttctttgtcgttcccaaattccaatgtaaataaggtatctaattacctcataagataattcctagtagtctaatttagaatacttctttaacaaaaaaaacatccaaatatatacttttcacaatttctactgaatgtagtgtgttggtaagttatgtaacaaattattgaggaaaaccatcaaaacaactgtaaattaaaaccacctacaatataagaagaaacattaggtctcatcttttattttgttaaaacattaggtctcttcaccgacggatctatttgtgtcctctacttttagccattctttaagaaaaaagaaatgaaaaaaaatgagggaattggctaccctttattgaaaatgaaacatgcatgatttgttttcgttagagatgagaaatataatgacataataaataagaatccaaagtgaagaagaagttggaaaacaaaaaaaaaaaaaaaagagagaaaaagattcttttgtccattaaaagagaatgaatgataacgatgtccattattattctccgtcctcgtgcttaatttaattatcttcccctctttaattaaaactaattaactattagagaacaataaataattaaatagtatagtaagaatcggatcgtaaggtaaatcaacggctgagattcattcaaaccagaggacacaaaacatctcttctctctctcccactttttctcccggagacagttaacgtgattcgcccttttctctttgcccaagagctatacgacaatacctccaccacaccccacacacacacacgagagacagagagagagagagaggaaatttgctactgagagatacattcagtgagtgtgtgtctgtcaccgtggaggagaaacggaaggaggatagatg

SEQ ID NO: 23650 - DNA, 3000 bp, Unknown; identical to SEQ ID NO: 1951
  misc_feature (1)..( 3000): 2750-1469P.txt file - cDNA_ID_2148166; gDNA_ID_1620472; Annot_ID_158040

SEQ ID NO: 23651 - DNA, 3003 bp, Unknown
  misc_feature (1)..( 3003): 2750-1469P.txt file - cDNA_ID_2148185; gDNA_ID_1620472; Annot_ID_158045
aattgtcaactgatatgagtattttcgaattaggatgtgaaaatctgagattttttatttatgaaaaaatatgaaatggggatctagctagacgtgactgaaatcttcgatcttgttatctcttcggtttcaatgtttataggaattgggtttttgttttgtattttagtcagattataacaagtgaaattgatttgctttttttccaggaagtgaggaaatctctgttggtaactgacgtttggaacaaatcagatgatagtcctgttactgttgctgattatggttagtagtaaaattgtgtatcactcagaaaaatgatatctttctctgttatactctttagatttcgatatctttattggctcattaatgaaacaaagtcatgttgttttaggttcgcaggcggtggttagccttgtactggaaagggaactccagaatgaacctgtgtctttagtggctgaagaggtgccaaacatatacaaaataatacattgctggtttttcttgattgaactaagatggattttgtttatgactttgtaatttatgtgtaggattctggtgagttaaggaagattgctgctgagaccgttttggctcgtattacagagcttgtcaaagatactcttgcaagtgatgaatcatatgctattgcttctcctttgacttcggatgatgtgctcaacgctatagatcgtggtaaatcagaaggaggtcctaagggtcgccactggatcttggatcctattggtggcactagagggtgagttctcatatgttgttgatatttcactaagcacaaacttatagttagttacttttggatttgttttgcaacttcatctcgtttcattgttcaacgcctgtgtcagagactaatcaatctcagagtattgttgcattattgaactgtcgtcatagatttgttttgcaacttcatctcgtttcattgttcaacgcctgtgtcagagactaatcaatctcagagtattgttgcattattgaactgtcgtcatagatttgttttgcaacttcatctcgtttcattgttcaatgcctgtgtcagagacttatcaatctcagtagtattgttgcattattgaactgtcgtcatagagcatcggaacttaaatttaactataacctgcgaatttccattttgtagatttataagaggagaacaatatgcaataggattagcattgttggtggaaggcaaagtagtactaggtgtaatggcttgtcctaagcttccattggcatcaactgctggtaatgcactcaagtctttacctgaaaaagttggttgccttttctatggttcggttggcaatgggacttatgtccagtctctcagtgtcgactctcttcctgcgaaggtaaactacttgaaaccactctgtttccatgcatttactatcaaatcttttcatatattgctaaagaaatgatcaaatgcgctattaggtggaggttagcagcatagatgatcctgcgaaagcgagtttcttcgagtcataccacacacctgtccccatccataacaccattgctacggtaaaacatcttcctcacattctctatacgtatcttcttgcttactctaaattttactctgtttccgcggtgacagaaattggggataaaagaatctccaatcaagatcaacagccagactaagtatgcagctttatctagaggagatggagaggtttacttgaggtttactcgcaaagcaagacccgaatcaatatggaatcacgctgctggctcaatcattgtttcaggtaaacccatttagctcttacctacatagcttttggtctattatagttcatgaatgatcacacaacaaatccttgtatgaaactttcagaagcaggagggaaagtgactgatgcagcagggaatccattggacttttcgaaagggaagtatcttgattacaagagaggaatcgtcgttacgacgcagaaactgttgccaaggcttttaacagcagtaagagaatcaattaaagaagaagaagaggaagaagaaaaagctgcttctctaaaacttcactaacacgcaactgtaatatacttattattgttgtctttgggtatactctgttgtctctgtgtttttcacagtctatttattgaaaaccagaaacaaaaaaaaaactcacctttgatatatataagaaacactaattctcttttgaatatagtttttgatgttacgaagctcgtttaaaatgtattttaaatagtttatgtctgtaatctgagatacgttaatcaattttgaaagtttttaggaaggttggtaaaactagggaaaaaaacaaaaaacgtacgtagctagtgcctagtgattgctatggggataattaaactcgacaatagaaaaaagacagtgcctttttctggcatatatgaaacagacaaatgagaaggacctttcttaataagaaagacaaagaaaatttcttaattatgaaatagattactccagtcgaatcttctgcgaagtttcttgtgaaataattaaaacataatgtagtataaagaaagattagtgtattgattaggttaaaataagcccaatttgtttttttttgtttttttttggtaaacattttttttttctaagtatgttaaccatttctgatcagtcactctcgtcaagtcgtcttctaacgaatataattaaattatgacaaccgatgcaaaaaaatccgtgaaatattctacagaataataatccatattctttggtctacatattctatccatcctcttctttttttagcgtcaacttgttgtgtataattacgtgaaagatggtttgcaccaactccgtctcacacgatacactcggttatattatatcattcaacgatgttgactacgtcctgacttagagtacggctataaattgtttcaatatataaaaccattattagatagaataagcttttacatagtctattcttgaagcttttcaatg

SEQ ID NO: 23652 - DNA, 3000 bp, Unknown; identical to SEQ ID NO: 1949
  misc_feature (1)..( 3000): 2750-1469P.txt file - cDNA_ID_2148188; gDNA_ID_1620472; Annot_ID_158046

SEQ ID NO: 23653 - DNA, 3000 bp, Unknown; identical to SEQ ID NO: 1972
  misc_feature (1)..( 3000): 2750-1469P.txt file - cDNA_ID_2148203; gDNA_ID_1620474; Annot_ID_158100

SEQ ID NO: 23654 - DNA, 3000 bp, Unknown
  misc_feature (1)..( 3000): 2750-1469P.txt file - cDNA_ID_2148227; gDNA_ID_1620474; Annot_ID_158107
aattaactttacaacaaaccaacccacacaattgccaagattcacataatcaaatgcatttattaaacagtttaaaaataacccatagaattaataaacgttataacaatgtccttgggagacttttattctagtatcactttcctacatcaagttccaaattcatacgtgggttcgaaacacgggttccttctcttcttaatgggacctctccctaatggaaccgtcgccgacgtggacaacaacaacaacacatgaaacaaataagccaacctataaatcgaacaagttggattaaaagtatcaaaacaggaaatacaacccaaaatcccacataaatcaatagtatataacgaattatttgatcgtcggattgaaccagcacgatggcgaagaagaacgccgctgatatacaaagaaccgccaccaccataaatgttccgaggatagccattatcatccggttccttcatatacacaattatatcatcatataagtgtcttttagtttattctaataccaaacaatttctctacttattctgagtgtaccaaaattccattagataactatgatatatgtcatcaactttccatagttttaaagtccaatcaaatagcgatcgaattagtatttttaccaatcagaccagttttgttgaaatagctaatgttaagtcaaccattgtgccgacatagttggtatacttaaaaccgaaagtcaacaccaagatctcaatttagatgactatttttagttctcagtaatatcttgtcaaacacaagcgttacataaaaattccagacttaacatacaaacaagttataataatttacatactaagtagccttgttatatggagttgcacatatagtttatttattggtaccttagtcgtataccgctgatgacaaggagaatgagactcattgaggtagaaaatgacactgtactgctaataatcatcccaatatacgctatacgctttgaactctcatattccaataccgcagttcccgctctccccttacaaaacggtgcggttccggtttgatttccgaaagaacaattgtcactttgccatacgccaccgggaggattaaccataacttgaaagctcataccggctataaccgtagctgtaaccataagattccctctagttttctctaaccaatcgccttgacgttttagatactttacgaaccactctgatgatgattcttcgtatcgatgaccttcttgaccgttgatctccatgatttgaagcgatgaatgctttacaaaagagttataattcttaaaatttatatatgtaacttctctctttgtcgagattataaaggaaaaaaaagaacgagtctttttaaaaaaggaaagggagatagaaatttctggtttgatcagcaaaagtctaatttgaaaccatttgtttgttgatcacgtacgggaattaaaaacctactctttgagaactatatgattctgatcaagtcagtcaacgatagcgacattagggaagaagcgtcgtcgttattttttatatatttctaactaaatagagtttttgaggtttataggagaatcgcaagacctcaaatttgactctgggagatcatatctctcatttgtgtcactcttctttcaacgtgtcttttctttcatagtactacatttgtcatcttgtcattgtatctaatgacttatacgacttgtggtataaaaagataaagatatatagcggataaagaacagtcgttgcataccattcaacaaaccaaaattaagttgaagttgaacattagttaattgcggagaaaaaaactagaacattaattaattgcgcaacagtgaacagtgacattagtacatataaaatcttcaacataatgataaattaagctactaacaagtaacagagtcatgatctagtggttgaatattggcaatgttaattaatcgattgtatagattaattttcatctatctatccacaacgctagctcttttatgttcaactattacaaaagttgtaagtggcataagaaaactgtggtcgtacatcaacatcacacaccacgatttactcttttcttaaattttttattagatatacatacctgcaaatgttactcatataatattacacaaatatttgatacgtcagcttaaatatgtatctgggtaaggtgatcaggtgattatcaaaataaaataaaatagtacagcattacttgttttgttgctaggtaagtttgacgacgaataaaaatatatgtatccaagttcaccaaatcctacgctagctagttggacgacaagactttattttggactcgaaaaaaagagagagaacgtgttaaagaaccctaatcaaagaataaccgatccgatagtagtccactgtcaaaagtgaaaactagttgtgatgatatcagtccaatatacacttaacctgaaatatctatattaaaaacgaactaagaatttggtgtacttggatcaaaattttacatttgttccagcatagaaacttggtctagaaatgatgaaaaaattagaagataatagaatccatagttaaaaaaaacttaaaagaaggttatgtggccaaagctttaaagaagagtttagatactttggaggtagatcaatgtaaattgggatctttgcaaacagcgtgtgtttgttttctaagtttcaggcgaactacgtgtcgttttagctaagagaaaaagccagggtttagattccgtagtccgtagacgtcgttataacggtgtagatctttctaaacaaattaaaagtttggggtcaaaaaaaaaaactgtgaagatttctttatcgactcggacaaacaacaagggtctgttatgtaataaattcccgaaacataaccaaattagggtttaagcatttagtgagtttccagtaaacccttctctgaatcgctgccgcttcttcgatagactaaaagaatccaaacctcagtagccatg

SEQ ID NO: 23655 - DNA, 3003 bp, Unknown
  misc_feature (1)..( 3003): 2750-1469P.txt file - cDNA_ID_2148231; gDNA_ID_1620474; Annot_ID_158108
agcaaaccgcgaaagtggtgcaagctaacataaaatattttgcatccaagaaaatagtcataattttaccttgatatctcgcaatctgtacaatctgttgcggacaaatacagggtaagcctcagttgctgcttcagtttcctgttgcagaagccagtaaatatcttcaagaaaactccaatcccccttttcaatgatcttttctaagggataagcttcatttgcagtcgttgcagcggtattgtaaggaggaatgttgcgtgcaacagtagaactggtgccttcaagagcagctgtgttaacacctaactcacttagtttcccatcaaggaccttctgagtcgcagcatcatctcccatatataaggcacgcttcttcttatcctgcatagagacacacattctcactcagacatataatcctcccaacgaatctcacgacaatcagttctctactagtctggataccaataagacagatactgtaggaaacagtagaattggtgttttcagatgctgtagtaacatacccgagtaacagctttttttgtattataacgatcgcgttctcctgtttttagttcttcaagttctttgacgacagcacttcctgaagcttcttcctcatttgtttcttgagctttaactctaggctccaatctgattatctacaagtaacacaaaaccaaactcaaactctcaaaaatcatttcttttctattcacaaccatacactcaaaacattccaactaattcaaaccaattaatcaccaaaatcaaaacaaggtaacagaatttaaaccttattgtgagcaacaggaagaatcctcaaagttttagcctctctattaaaaacaccaactctataagtattcgtctgcatagcagcttgctcgcctgtgtaattagttccgacgaactcaactcttgcgcctggaggacttacaacaacctgaatcctcttcttagaatcatccttatgcttgtaaacagtaaccttgggagtttcatgaactctcttgcctgtttttggatctactttacaaggatcgtatcctgtagagaaataggcgacgatcggagagattctatcgggtctctcggcgacttgcgtgactttgagagtaactctcttgtcttcttcgttttcatcctctgtttccgttgctatttttttccctttcctttgcttcttttgtagttgttgtggtgtattgaaatcttcttcctcgtttctataatcattcttctcttcgccttccatggctactgaggtttggattcttttagtctatcgaagaagcggcagcgattcagagaagggtttactggaaactcactaaatgcttaaaccctaatttggttatgtttcgggaatttattacataacagacccttgttgtttgtccgagtcgataaagaaatcttcacagtttttttttttgaccccaaacttttaatttgtttagaaagatctacaccgttataacgacgtctacggactacggaatctaaaccctggctttttctcttagctaaaacgacacgtagttcgcctgaaacttagaaaacaaacacacgctgtttgcaaagatcccaatttacattgatctacctccaaagtatctaaactcttctttaaagctttggccacataaccttcttttaagttttttttaactatggattctattatcttctaattttttcatcatttctagaccaagtttctatgctggaacaaatgtaaaattttgatccaagtacaccaaattcttagttcgtttttaatatagatatttcaggttaagtgtatattggactgatatcatcacaactagttttcacttttgacagtggactactatcggatcggttattctttgattagggttctttaacacgttctctctctttttttcgagtccaaaataaagtcttgtcgtccaactagctagcgtaggatttggtgaacttggatacatatatttttattcgtcgtcaaacttacctagcaacaaaacaagtaatgctgtactattttattttattttgataatcacctgatcaccttacccagatacatatttaagctgacgtatcaaatatttgtgtaatattatatgagtaacatttgcaggtatgtatatctaataaaaaatttaagaaaagagtaaatcgtggtgtgtgatgttgatgtacgaccacagttttcttatgccacttacaacttttgtaatagttgaacataaaagagctagcgttgtggatagatagatgaaaattaatctatacaatcgattaattaacattgccaatattcaaccactagatcatgactctgttacttgttagtagcttaatttatcattatgttgaagattttatatgtactaatgtcactgttcactgttgcgcaattaattaatgttctagtttttttctccgcaattaactaatgttcaacttcaacttaattttggtttgttgaatggtatgcaacgactgttctttatccgctatatatctttatctttttataccacaagtcgtataagtcattagatacaatgacaagatgacaaatgtagtactatgaaagaaaagacacgttgaaagaagagtgacacaaatgagagatatgatctcccagagtcaaatttgaggtcttgcgattctcctataaacctcaaaaactctatttagttagaaatatataaaaaataacgacgacgcttcttccctaatgtcgctatcgttgactgacttgatcagaatcatatagttctcaaagagtaggtttttaattcccgtacgtgatcaacaaacaaatggtttcaaattagacttttgctgatcaaaccagaaatttctatctccctttccttttttaaaaagactcgttcttttttttcctttataatctcgacaaagagagaagttacatatataaattttaagaattataactcttttgtaaagcattcatcgcttcaaatcatg

SEQ ID NO: 23656 - DNA, 3000 bp, Unknown; identical to SEQ ID NO: 1980
  misc_feature (1)..( 3000): 2750-1469P.txt file - cDNA_ID_2148250; gDNA_ID_1620474; Annot_ID_158116

SEQ ID NO: 23657 - DNA, 175 bp, Unknown; identical to SEQ ID NO: 1956
  misc_feature (1)..( 175): 2750-1469P.txt file - cDNA_ID_2148290; gDNA_ID_1620473; Annot_ID_158051

SEQ ID NO: 23658 - DNA, 3003 bp, Unknown
  misc_feature (1)..( 3003): 2750-1469P.txt file - cDNA_ID_2148296; gDNA_ID_1620473; Annot_ID_158054
ctccaaggtgcagaatcatctccgttgttatggagtagactttgcaaattaaccatgtctaagtcctcgtagattgcaattctttgctctgtcgctatacagtatccacagagcgggaaaagatttgggtgattgatcctagcgagacgttcaaatgcaatcgagacttcagtatcagtcaatgtggttccacttgggataacttttagagctgctctgaatccaccgggtaagactgctccgtaagtaggaccagacttgccttcccacaacattgtgcctctgtcgaagttgaaagtcgcagcctttaggtctgcaagcgtcattttcattaatggcttgtcgatcattaccacagggatttgcgttgcttgcttgatatcagtggttgagtcgtgttggtctggggagttgggttctgtgttgtttatggctagctttgttgcccaagttcttgattttcttctaactctcaaggctacaagtatgagcagtagtcctataagtaagaacgccatggagattgctaaccccaaaccaatcttaagccctgtattcttcttgttgactttctttccttttgtaataattggctttgcagcgaaggggcagttgtttctaatattaatgaaggatctctggattgtttcttgggagaagttggggttgcaaaaggttagattgttgaaagagaagttaaacctttgcatcatggcgagtttctccaaaagcggccttgggatatctccgtctagcttattcaacgagagatcaagtacttcaatgttcttgacgctcagcataggcacgtggccagtgagattattggaggagagatcaagaaccttcagatgactcagccgcgagatttcacgcggaatgatattagtgagattggtccttgatagattcagataatgtagcgcagaaagcttgccgatttctgggaactcttgtgccctgaatcgattgcacgcgaggttaaggtgtcccagcttgtgagctgaactcaaaccattgaatatatggccgacaaagctattatcggacaagtcaagatgaatcagactagaccagttgtgtttgtggccgggtattaactgcaagatatgcccatcaaatcggttttcactgagatcaactgtttccacgttttcatgcaagactcctatcaatgaaccctgaaacagatttcgtgaaaggttcaagctttttagtagtgggaaagctgaaccaaaaccgacaggcagagactcgttgaggcggttggatgagaggtcgatggagagtagagatcggcaatggacaagttctggagggacgccaaactgaaagtcattgttgtggagcttgagagttgttagattgacaaggttgcttattgcggcagggattttgccagagatgctgttgaaagaaagatcaagggtgtgaagcgacatgaaattgccgatgttgctgggaagaggctcagaaatccggttggaggagagattgagactctcaagcaagctgagactccacaaatccgaggggagagacgtaatcttgtttccactgagatctaaagtttggagcttactcattttgccaatagtgttgtcggggatcgaaccagacaggtccaacccagaagccgaaatatgcaacacattctcactagagtcacagacgaccactcctggccatgaacacaaggaagaaaacgtatgagcttggggagaattgggtaatctcattgcggagaagaagctagagagatgataagcgtcggtgttgggatctaggctcgtcagatgcttgacgaagaaggagaagaacaggagagatccccatagagacaacctcataacttggtggtgtctgggactggagaaagttggatgggaaagctcagaaagaagacagactgtgtgaaaagaagaaaagacataatggaatcacggggcatagaggtgatgatagtttagaatacattgaaatccctttcacgtgcacagcttcaaaaaaaatcagaacttttagtcagaaagctatgaaatttcagaagaagaagataagagttgaatagtttgggggagttccggagttgagagttgagtttttggttgtatcgtatatggacactggagaaagtgggaagagaagagagagtcgttgaaagtcaaaaaaagggatatgtggagattataattaggtaaagtatttcgctagtgagttataagaaaaatatgataaatggaatctgtctcagaccttttgtgaatttttccaaatcccaaagttgtcaatggatttggtgagtggaggagtgggtggttgttgtggtttctcatttcagtagtgttttggttattaatgtaaaaattcacttttttaggggttttcacacttttttgactctgtcacagataccttggaaattgagaatcattcattcctctgattagcccctaaactggcgccttaatgtccgcaaataagagaaaataaaaacaagagccatcaatgtagtttaaaccaactcatcagattcatagctcattttctggataaaaatagccactcactattttaagcaatcttatgctaaaacagagctccaatagctatctgagtttcatcggattcaaagactgaaacttgcaattagagagaatgaagaaacaatgctagcaaaacagagtcgagatatcacaacttgtgcgccgaaaaggaaaagcccattaagaggaattaaatgggccgagagataaatgccggttcgtccgtagatgagaagacacgtgtcaggtcgggtagagagttggcggctgatcgtgggatccacgtcatacaacgcgccagctgaccttttcctctgttcgaagatcaatcaacatcaccttaacagattcataccaaaaaggagcatctttcgctacaaattctgtaatcaaacgaaaactcaaaagttgtcgatttttgaaattcgaagagaggttttaagactttgataaaatg

SEQ ID NO: 23659 - DNA, 3003 bp, Unknown
  misc_feature (1)..( 3003): 2750-1469P.txt file - cDNA_ID_2148327; gDNA_ID_1620473; Annot_ID_158065
acatctgcagcaatcaaaacactcaaaaatcaatccttctaacttgtaaagtagagacaaaatgttggatcgtataaggaacttacctttctctgacaacgaatactagataagatcgtcttcccggttacttgcaggttcagcatctcagctccgcctccgtcgccatgaaagtcacagttaacgcctttcccttttctttcttacgggcttgaagaaacccataacaccttattgggccattactgaagcccaaataacattaaaatcaattaaaaattgagttgagaaagggagagagagagtgatgataataatggatgacccccggcaaaaaagataagatttttacagattctgcctcgatcaacagactctaatcagcagcaaatgtggagcgtcaccggagcattgactgtggcggtgccgcctaccgccgccgcttgccgtacgaaaccctttctcatctcctcttcctttcccaagcagacaaagaaactccatctctcttcgccttctctgtctctaccatcatcacatttctcctcctctttcaaaaccgcagctacctccatcgagcaacagtcttctgttaacaaggtttctcttttctttctctctctctcttttcctcttgaccaatcaaaccaaacagcttacgttttctggatgattgcagggagagagcaccaagtaccatttcctggtagcaaacgctaaattcatgcttgacgaagaggagcacttccaggagcaattgtttgaacgtctccgttacttcggtgagcgtgaattagtgcaagacttctggcttgtcattgagcctaaattccttgacaatttccccaaaattactcaaagacttcgtcgtcctgctgttgctcttgtttccaccaatggcacctggatcacgttagaaccctaatcccaatctctctcttttcaaaattacgttcctcactccctccttatctaacgcatttgtgttttgcaatttgttgttttatggcaggtttatgaagttaagattggatcgtgttctgtatgattcctttgaagctacctctcttgatgaagctttggcctccaatcctaccactcttgagttcgataagcctaaaaattgggtggcgccataccccaagtatgaacctggatggtgggataccttcttgcctaaagtaacccaagaatctgcagtatagaactttgctttttgtcttgtttttgcattctccaatctcagctttgtcttagtgcttcaaagttttgtactactgagctcattatccaagtctatatctttcctagtgtagcttctattactcaaagttgcctgtttgatacgtcactgactcaaggttaagcatagaactagacaacaaaaagcatcctcacatttagctccatcaaagtcttaagggtgaccatatttgttgatttctcacgagaatattggcaagaaccttcagttaaagctctaggtattaagttgtctagtcacaggagggcaatatgcctactcgctgaagaactttgcaaaagatctgaattttttggttttcaaaacgatttgtggactcggaacatgttgttactcgttaggtctagtgactggagttgatcaaagtaagttgcacatgtttctgctgaatcaagtgttctatgttgtacttctggattgctctgtagtctgtatctaagcgtgtcctatcaatcttactgattatacatacttttatttgtgacaaagcagagtcagaaattatctttaactactccatgggaatatactaccaagttacaaatacagattttaacttttactatgggatgagtattgctacacttgcgggagatgcattcatgaaaaactatacactggtagctccacttgtgccattaagttactcttgtgcagctagatttgcaatttctgctagaggcttccacacgaactttctcctgcaggggaattggtaatggtcatgcaaattgcaaacatagatgattagtgtgtatggtaaggaatgatatactcaccagttgccacattcagcaataaccctgacgttaggacgaagagagggaagtaaagcgagaaattgaagctccgattttgagaggacctgagtgaaatggaaatatgagaaagagcatgtgggagaacagatcaaatgagagaaactcaaacctttgcttcgaggacccatacaacaagacccttggcactagggggaagagcagcgagcctgtaatcaacttctggtggataataccatcttgctataggttgtttcccaagatgagcctaaaagaagagaagatacatggttcacacaaaattatattgaaacaagattaaagtagaagatggatgaaagtagacatacagggcaaacagggtagttcttgagaagggtagtctcagggtcaccaaggccacgagcagagatgtcaagaaagtagtagccctgcattttgagacggttaagataacgaccttcgtaaccaccctcatgaggagcgtaaatggcgattgccttgtgttcttccacgtcttgaagccattgtccgatgtccggcttcaccaagtcacctccgatgtagtcagctatgctgctacatttcacaccagtgcttcttcttctcttactcctagtattcaccaaaaaggaaccaactgttttgatcttcttcacttgcgaggcttcaaaacacggtggtgccacacgttgtatacatattgcacggcttcccatttctttactaacaatgacttcttgtggaagtagctcataataaacattgcttgacgacgatgatgatgaaagaatggtggagaaacgacgactcactccacaaagggatagacattaatgggcttaaaatgtattgggctttatttattaggcccattaagcaccgccgaacgtcgtgacattgttagctagctcgccggagcaaaattcagtctgtgaaactttcggagaagaagggatg

SEQ ID NO: 23660 - DNA, 3003 bp, Unknown
  misc_feature (1)..( 3003): 2750-1469P.txt file - cDNA_ID_2148352; gDNA_ID_1620473; Annot_ID_158074
gaatttgatcactgatcggagattttcgtcttcgccggcgacattgcatccgctgaccagagaattaaaaaagttgcgactttgatcgcgaaagtttcaataatggaggtcattgatcaatgggttgctgaatttttcctccttcgacaacacaatcctagggcttcccctattaatctgatttcggcgctaaaattaggagattcctccgactgcataaagctcaagatatcttccgtcttgcgtgacatctccaattcattgatccgaggtacgattgatgagggaatgctcgatcttctcgagattcttgagaagcttctcttgcagcaacattcgctactcatggattctcacaagtctgcttattgctggacggctactgagtgtacgcttagatttatgtggccaatgtttgcttcggatggtttgttcaccgatgcgcttgagaggatatggacgaagaggattgggattttgaaggagagtggtagcgatttggtgacttgtgacttgttgaaatgggagagtgatttgaagaaggcccttggagatcctgagctctatcagcgaattcgtgagactaacatcaggtacactgccatttcctttctcactcagcttctcaaagaacagtgggcattacttgggagttcctctcttgaatcagtagctcaaagaaggtttcttaagcgcaaggctgtgaacgtagagggtgatgttgttgacaacagaggggatcaaagtgatgttgatgaaagcacgagacgttttgggagtgatactattgatatcgccaacgaggcgcgtggtgaaagggaggacgggaatgggattggtagagacaacgctaatgatggtgaaggaatggaatgtctggagaatgatgggattgataatgtgaatgcagcagacgaggagcacacagtgagtgcacaagatcaggaacatgagccaagtcttgataagggagacgaaatggctgctcgagagctgaaggaatatttagtagagattcaaggacacatcgacccttccactaggcaaggggaagaacctaacagtgcaattgatcactcagtagatgtcactcctccgcctactcgggtgaataggactggaacaggctgtcaagaccataacgaagcatcggtgagtgttagtcaattttccctcaagatgctttctaaaaatcttgttctttggttcatgaatttgtggtttaattgtgaaaacaggataatgtaaatgagaaaggttcggatagtcaggaaacatggtctagcagagttcggcctcgtcgaccaacccctgtaactctgagtgtatctccattaaagaaaggcggattggcgaaaccacatgtcaggagaccaaagaaattctggaagccagaagaagtggaagctctgagggaaggagtaaaagagtatgcaaacactctttgcctagtcccgtactctattatcaatattcaatagtgatacatcttggacctcattaagattataccactggctcattttgttgttgttgttgtgcaggtatggtaaatcatggaaagatataaagaatggaaaccctacagtatttgcggagaggacagaggtgaacatttccttattaacattcatactcaccatttacttgaacaagatatatgccaagtgtgagtgatgtaaatgttgtaacttggtaggtggatttgaaagataaatggaggaacttagtcggtgggtagaggtaacatcttttgtgaatcttgtgctatatgttttaaaatgctgtagagttatttacctttgtgtattgtgatatatcaactgtggagaacatggtggagaaagggccattcccatgttgtgtggtgaatgataatgatgaatgagcagaatataattatatgcttgtgggaaaaattctggctgcaacctctgtagtcagtcagtgtcaaacttatacggcttttcttgttttagatatattccatccttatcttcatttcctaattcctaccatgcttccctctctccttttccacgtgtcaactaacatctaaaccagaacaaaacagtagtcaaaaaatgcataaccattttgatctatgatattgcctgtcaaacattcggaccctccttagatattgcctgttaacattcagaccctccttagataaaaagcgaagtaatatgatgggagctctcatgcacatactttattggtgaatgcatatttgttacgtgttattagtttattacagaaccgtgaactccttgagggctgcaggaactggccgccaacaaaaacaaaacaattttcaacggtgatgtcactatcactctattctctacaacttcttgtcatgttccccacttctgttctgacttttccccttttctttgtcgttttatttttgttaacctcaatctatttattttggattgcttgtgttcaccaaactaataattggttcaattgaaaattgtgcagtttcctcaagaaacaaaactctttcctgaatatcgcatttcccagtatccacactttcttaactcttatcctctttgcaattgtgtttgtggttcacaaaataaacaagggcatcttttgagcatatttagccatgtgttttcaatgtggtacacgtttgatgatttttttttcatttttgtggtttgagtatcttgtattggcaagtaagatttgtcaaactttcgatttttagatttacaattgggtcaataaaaataaatatatgattttctataatatatgtgatgcaagcaaggttaaggcaaattgtctttattctttttatcccaaatgggtgattgacgccaacgactgttcaacatattttctgctgacgcttctttaatgaagtagcacgaagaagtaaacaggacgacttttggccaccggaaaatttctctgttataaaaacgaaagtctgtgtcctcttaaacatttttgggatcatcaatcggtttttggtcaaccatg

SEQ ID NO: 23661 - DNA, 3000 bp, Unknown; identical to SEQ ID NO: 1962
  misc_feature (1)..( 3000): 2750-1469P.txt file - cDNA_ID_2148369; gDNA_ID_1620473; Annot_ID_158079

SEQ ID NO: 23662 - DNA, 3003 bp, Unknown
  misc_feature (1)..( 3003): 2750-1469P.txt file - cDNA_ID_2148381; gDNA_ID_1620473; Annot_ID_158082
agacatggcaagcgtacgcttcctttcttttattaacaaaaaaacaatatataaaaaaaaaaaacgaaaagaagacctacgttgacgaagcaatcatggaagaatagtcggaggagggaagcagctatccgacgctctttggccacctctcgctgcaccacccgcctcaccgtagggagcagtgatggacagctgtccgaatagaagtcagtgcgtagttgggcctgtgcctgggatcccaacataacgataaacaacagcacaacgaacgcagctctctgacgactctgctcatagcactccatctttgtgtttttattttatttttgttttacttctgtttttctataggagttacgagggatcaagaagcaatcccgaggctgattgcttttatagaggtttacttccacgtaggtgtttttttatttactgtgccaaaatcctcacgtcacctctacggctctaccagactaccacattattgttcgcgttttccttttctttaagaacatttttgttgtttatcatctatataaaagttaaactctctactctctagtctctagtcctcgtaaagctaagctagttctatcaatagatataacacacgtttttatctgcccatactttattatatgcatgtcaatagccgtatcaacattgctatatacatatatataatatatacgttattaatttaaggtatatgaagcgtacatcgtaaataaaaatggtatctaccgtaatataaagagaagcgacgtccaattttggggcttgtgttatagatcaaattttgatactatatgataagtcgatgactgatgggaacataaaacatctaaattaatatcaatataataccatgatatgtaatagcctaataggtttggctgacgtgtattggttatatgaatccatgataagttgatgatactaatatttaataacataacacattatatgaaataaatgtgttacacttgattttttttttaaaaaatgtgttgcacttttaaatatattcatgcactatctttatataaacgtaaagaattctaaattaagacagacacatctttgaccaaaatattaaagacataataacacattctaaaatatattccagatccttatacagtcttcatgtcagtgagggattccgatcgatctcggtttttgacattggtatcttccaacttcgtttaattatttcccttcaaataatttgtgaacacgaaaggaaatgatcgagagagtgtgggcagagctagtgatgatcgtataattggggaggatgagataggtagaaacagcttacctatcaatgcatgcaaccaccaacgacattctcataaatatcagtctttctcacctttcaatttccactttcatgaagttttatatattttcaaaagaaagcgtacccctaagattagtttgtttatttttcaaataaatcatgttcacaactagtttactcctgcaaattttttgttattgctattatacttaccaaacacatatattatatatacagaaaagaggcttaaacaccaccttaaatgattttatccgttagaatcgctagtaatatttaacctaattaacgattttgtgctctgactttaattaattattgtaagctagtataagttttatccgctacgcacacccacacaaagaagaaaaaaaatactggtcatggaatatggggcaagggcaactatatgacatgctgttcaaattttaattggatgagaactagaagtctagaacgccaaaaccctaaagagtatcgttgatagctgatctacgtattcaaaactaaataaacacgccttagatttccgactaagtcacatgggataattagtgtgtggcttgcataagaagttgaatttcaaaattgggagacaaagttttttttctttcttcttttcgtttattttaaagcgatagtgagaggtagttaacagaacatactattattcgatcgaattgtctatcacccacagtaaccctaatctacaatcatcctcttcaaaaatataagaaaacgtacatatttaattattcacgtggattgttgaaaactgaaccacaaatattgtatttgtttttgttaaatcttgtaattttgctatgtccgctttttaggaataactttttcttttcgtgaacctctctatatagagtttttgttgttgttgttgatgaaagataataattatagttgataccaaaaaagaaagaaagatgataactatacgacagttcttcaagaaaataattctatattgtttgtgaacctttaatatgggttttttttagagttggtatgtagaattgacattttcttttctagcgttggtataatgagtaattttgttttttcggatcataaaagatatttatgaaatttgtaaaccttttataggatagtgtagtaggctcaacagattagattatagagttcttttggtatatagagactctgtaaaccttttatatttgggaatttctcactttgtgaaactttcatcatgaatagtacaaatgatgatatatactactaaattcaaaatgtacataatcgaattgatgttatattttgacatgatttcatatttaaataagaaacagaattagtgactacggaataattcacaccctcatccactcaaattattgatatttgaaaatctgggtctgataaggaacaaactaaaatatagaggaacttttgtgaatatttataaacgcgaccttcctcttagttgggccataaataattgggcctaaattaagcaaatccaatactaatggcccattattggtgggtaatatccgacaaattctctttacctctttctacgacggcgacgactgaatcgccaccgccttcccgctccgactcttgacttccacctgtttactcctttgctagaccgatcagacccatctgaagcttttctgtctagagtagagaaggagatg

SEQ ID NO: 23663 - DNA, 2734 bp, Unknown; identical to SEQ ID NO: 2002
  misc_feature (1)..( 2734): 2750-1469P.txt file - cDNA_ID_2148385; gDNA_ID_1620476; Annot_ID_158173

SEQ ID NO: 23664 - DNA, 3000 bp, Unknown; identical to SEQ ID NO: 2003
  misc_feature (1)..( 3000): 2750-1469P.txt file - cDNA_ID_2148389; gDNA_ID_1620476; Annot_ID_158174

SEQ ID NO: 23665 - DNA, 3000 bp, Unknown; identical to SEQ ID NO: 1999
  misc_feature (1)..( 3000): 2750-1469P.txt file - cDNA_ID_2148396; gDNA_ID_1620476; Annot_ID_158178

SEQ ID NO: 23666 - DNA, 3003 bp, Unknown
  misc_feature (1)..( 3003): 2750-1469P.txt file - cDNA_ID_2148406; gDNA_ID_1620476; Annot_ID_158181
aatatcgttccgtatagacgctttaatgtgcaagtatgtaactctaacaacctaattttcactttgacatttaggcaaaagtaaaattaaggttgtacttggtaaaatcttgataaagagattgaaagaaaggaatgtgggcatgaaaatgaaaaaaaaaaactagataaattgtgaaactgttaaattccctaaatttaaggaaagtaagaatggacatgggccgtccgatcagatatgtgacctaagatggctgagagagtagttgaatggctggggttcaatctctgttgtacacgtggctttatactactcgttaaaatccatgatcttcgagatttttctgacactcttaagttttggcaaccggctaaaaccagtcggaatgttcatttgacctaccccactcaataaacatttccaaagaaaaaagagattcgtatggacacaaagaatagatatttttaggtcattttcattttttcgcccgtaacctgtgttaagaacataatacgttgttacgtacattttatttctatttttaataaacaataatttcctttgattgtaaaagaatccccctttattggcttttgttctttcctatgtcttcttgtactcaaaatatattttgttttagactttcgaaattatccattttggaaacctatccatttctttgttgatctctttgtatcacattgctctcaagctatgtagtagtcttagagatttagacaatactaatgaatacaagataccataagatttgatacaatatgtttgtgttatcaacgtttgatcggatatgtgttttttttctacttatagctattcattcaatgaaaatctaaaagaaaattgagacacagttgatgcagagataattttctctagccttgatagatttttacaatgtgatattgtaggaactaggaaacacatgcttcatttttatttaggccatgaatgtttgtagtttttaaaatggtttttggattttggattttggtttttggtttttagtttttgattttcttggtttttgtttttggtgtagattttagtttcttaaaaaacttgaatggtaatttgtttagattttggtttttatgttaatggatagtattttttttacaaaacaaatctaaaaataaaataaaaaatgtgatcgattgtttttgagagagaaactcccaaaacatagattttggttttctttgaaaaattgttaaaacactcaaaaactagatttcctatattttaggaaaacttgttttctcaaaatcttgaatggctacaaaatagattttagaaaaaattaaaaccaaaaactagtttaaaaaccacactcattcaaggccttactaaaacttggctacaaacaaggcgaagataacatacatcattcaatttcaatagtaattaatgtgtcaaaaccttagaaattaaaacaaaatttcatcactatgtccagtaagaaaaactaaagctatcaaacctgatgttagtgatttttttccccatcatctttaactattttccatacacattcgtttttgtaataataacaacttcttaaaatgatataacttttgttactttatgcatgtaattgttgattatagctagcttctacacctttttctaacatgtgacacatttttttttacatgtgacacatttgttacgttggttggatacttgttatccatataaatcaataaaaagtcatattattctatctcactcttttaagtctttacagatttttgtttgtgaggaggacgtagctgcaaatataggacccgccattaaatgaaaacaaatgctttgtcttcaaagctatgaatatgtgacttcaaagtgttttttggtttttatgtgtcttcaaagttgtgaatataatagtgtagattcgcttttctttaccaatctttgtttgcagattaataataagatatactatataggatacaaaaacgaatttcgtttgattcattctataaatttgaattactaaatcactttagttgagtttgttcaaggataaaaagtgaaaccccaattaaatttgatgattttcagatgtgtttacaaaatgtttcgaagaacacgcttcaaattgatttaaccaagatgaacacatccattaaatcctcattccatgaacaaaatgcacctcattgtccctaggccttaacagatctatttagtactaatactgtatttaataacttatcttggtaaagaaatcacagaaaagcttaacacatacagtttaaaccgtaaatttatcatagtaaaactgtaaaagcactaatcataaatttaaaccaagctaataaaacaaaaacaagtagcacgtttttacttcaaaccggaaacaggcaaaaccggtatcaaattgccgagaaagatggaaggaataaataaatgttaaaatgttcctttgttgccactaacccacaggcttacgtcccatcatcattccccgttctctttttattttctctaatcgccgacgattatctctttcgtccggcgatagctattttgtctcttcaaatccccatagaccaatactcaactcttcatctccatgtctcctcaatctcatttctctccttagtgattgagctttttccttctttctctttggttattattccttctcctcctccgtcgtgtttttgattgatttcagaatctaaatctccgtttgatttctccatactcgtgctgattttcacctatgtaatgtgatttatgagctctgtttatttcaaatcgacggcgatcgttgaatttattgatcaatgtgtaagtaagagcttgaagaaatagtttttgttgttgttgtgaaagctcagagttttgtttgcttttttgttgacttttttgagattgatgctggatctcaatctcgacgtcgactcgaccgagtctactcagaacgaacgagattcgattactgttaaaggggtttctttgaatcagatg

SEQ ID NO: 23667 - DNA, 3003 bp, Unknown
  misc_feature (1)..( 3003): 2750-1469P.txt file - cDNA_ID_2148429; gDNA_ID_1620475; Annot_ID_158137
acatggctctcaacatcccaaaggaacgacccgaaagtaactgcctccaagacgagcctcttcattccaccgaagctgatctttatctgttcgtccttcgatgaatcgactgtgccctccggtgttattacaatctcaggcttaccaaacaatgcctctgtgtgcttctcgatgattccaactgcttctcttgatcttatagtggcgtatctctgcagcgtctccgcatcaaatgacatcacatatgaccttaatcgggatggtttaatctcgctgccgaagcccttagcactaactccgcccgcaaatgcaccaacctctgggtgagacgatacagccgcctgatatgttgccgtcccctcggcttgctcaacgcttgttttactttcatccgacccacccggaagaatcttcatcgtcttctcaagctgaaacctttggtccaccctcttcaagaaatatccatacatcacagaagcagcgtaaacttggccaactctgagcttgcttatctgtgcaacagagttcagatcacccattctgcttccaagaatcaaggcaagatggttgtgaatcatctcgtacatctcgggcgagtgaagccgctcgagtttctccactttggtcggccaagtatcaacccgaccagacggatctgaagatgggcttactgaaggtacaagtgatacgttagcttccatgaacttttgaaccaccaatgcatacaaaatctcttccaatgttcttcttctctcgttttccttcaactccgcaattctcctaaacaccaacaaaacattactcattcagaatcaaactcatgtacaacttccaatctatcgtatatacaaacagataatgagtaatccttaaattttagttatcatttatctagacacagagaaaagttcacatcacgtctccttcacttaatatgtcaagcaagttttagtcttttagatcgaagatctatacctgtagagaacgatgtcggttccaggtacagacgctgaatctttgttctgtccctgagagtcccgatcagtttgaagctgctcaagctgctgttcaacagctgcaggcacaagatgaggatggctcaccaaaatctgagacagaaactgaccagcaggcgattgcagctggagcggagcgatcggtttgggggaagaaccagatgaagcatcattagacgctgaagaagctctaaccacaaaacttctccgagttttagcagtcgttgttaagctctgtaatgatcttgaggatctagcagacgcgttttgctgcaagtacataattttttttttagtttttgctgattacgaggaacttcctggtaaaatctgattgaacataaccggagcagaatatttggagaatgattcgattttgaattttgatcataaaagtaggttaattgaatcaagtacaagagatttgggacatacccttaaacgaagttgaagtcttgaagaaccagaacgcgtgaatccagggccactggcggtaaggaacatagatccagaaccgttgtcggaagttctcgatggtacgatgggagatcgaaccaaactcgaggtcaaggcatccatggttactctctgagggtgaaaataagagagaagtcgaagttttggtcggaggaaggagataagaagaaactttagactagcttgagagagagaaatgtcgagaatggcgatcgattgatattactggtaaacagactttggtttagttttcctgagaaataatgagagtcggatttgattatttataataataaatgaaaggactcagaaaattatatttttcgtttaaatattttgagaccatggaaattatttgaggccgtgtttatgttgtgtgttcttcgtttcgtttgtagtttgtacaataacgatattttaaaaaaaaaaagacgaattattctttttgtagcgtcattgaaatatcgaacacaataatatcactatctaattacctgaactagaaagttcgatagtaaaatccttgcagtccttaaaactctaaagtctaaaccaaatacttttctcttctgttttcttattcaatcaaaaactttttagaaattactggatgattaggtatatagtattttgccattttggtctaaaactttacatcatatttagttatttaccaatctagaatggtctctaggtttttaactttttaactttttaactttttttaactaatcttagaagcctactttacgcaaactaacgagaaaaagtagagtcaaactaacgaaggaagagaaacgttgagagccaccaactgatgttgtgtccattcccacttacacgtattatttatgaaacgttttgtttgttttgtgacgcatgggctctttaccccacttgggctcaagaatcgtatacactagaaaacaaccttaacctcacggtggatccgttacgttacgtgttcgcaatttccacgtagtcgacatataaattgagtaattctaaaactatccattttccgaaatttgttggtaaatcaagcattagttgatagagacagagaatcttaagttatatccactccgttggacaaaaaaaaattaaaaataactcaaggagataagatagagaagaaaataactgttaaatacattgattaaaactaaactaatatatttttaaatattatggattagggaagatgggtctattattatttgggtgattaatgtattattaactaattatgaactttaactaaaaacgtcaattattttcacgtggcatgaagttgaagaaccgaccaattattacaacacactcttctcttacatctctatcttcttaagttctttcctttgttcttcgatttgatcaccaactctcacatatttcgaaatcgtcacactttgttgcgtgtcgtcttctctctctcataattcttgagtttcacgtctcaagatttgatcacttctgccaattttccagattgatctctctaattatg

SEQ ID NO: 23668 - DNA, 3000 bp, Unknown; identical to SEQ ID NO: 1995
  misc_feature (1)..( 3000): 2750-1469P.txt file - cDNA_ID_2148441; gDNA_ID_1620475; Annot_ID_158141

SEQ ID NO: 23669 - DNA, 3003 bp, Unknown
  misc_feature (1)..( 3003): 2750-1469P.txt file - cDNA_ID_2148461; gDNA_ID_1620475; Annot_ID_158147
ttttagaagctattcaatgtccgctctgcctccaaacactgcaccagttactggacccataaaaacacagagctctaaaccatcatttgatattgaagattgggacagttactcaggccaaacggtacgaaacggtcagaagtctgggactgaagagctcttgtcttttcggggtgtcgcattggagcgggataggttttctgttcgttgtggactcgaaggcatctgcatccctggtagaaggtggaggaggaaactcgagatcattcaacctattgagataaactcttttgcagctgactgcaatacagatgatcttctctgcgttcagataaaggtttgtctctgcatctctgttaatttttggtgttattgtggtcaattttttttctgggatgcatcctaacttaccttttttactggcagaatgtggctcctacccatgctccagatattgtaatatacatagacgccataacaattgtttttgaagaagcagggaaaaatgcttccccttcttcagtaccaatagcatgcattgaagctggaaacgagcacagtttgccaaatttaactctcaggttagctttttttcttaaattcctcgtaattattttattttgtattgaaattctcccatcaatcttcttgataaaaattgatagatttagatatcagcattttgctttagtccagtaagtctcagaagtcttcagtgatgtccaatacaaaataacccataatattaggtaatcttgggtagtgaccaagaaaccatagaacaagttattgaatctaacaagtctctgagagtaactattctcaacaagcaccgtggtttggaggctaaaacagctagaataccctttcaggaacattatagactgcagttacccacccttaggttttcttgcaatctttcaggaaaggtgaggagcactcattcatcgtaaagcctgcgttttctgttgggagtaatctgaagccctctgctgcacgaaataaactcaaatcatcgagtttgtctcttccaactgtaaattttgaaagaaaagggagcggtttaagtggtgatcagtatgcggttatggtgtcatgtcggtgcaactacacaggtagatccacattaccgtggtttgtagccatgtttttttcttttgtccattcatatctatagctgtttcatcaatgctgttttatgttggactcagaatcaagactgtttttcaaacaacggacaaaatggagaccacgagtttcgagagacctgatgatctctgttgcgtctgaaatgtcaggagagccttgtggtccccatgggagagcctctcaactacccgttcaggtcattctctctctttatctctctctgacattccctagataataaatgggacaatgcatgaactaatggaaggagttcgcatctgcaagtgacagtgactgctagtgtttacccaaatgactgaaggtttaattagatgttgttgctaaattgtggttgcaaaagttgctaaaaactatgcaactctggcttcgtatatatgaataagaaaccatgcaacagttacaaagccacctatttgcaatgtggtcatattcttcaaaattagccaatttctaaatctgcaaataccaatcccaatggcatcttttattctacctcatactttttctctactggtttcagattttaactcttcaggcatcgaatttgacttcagaagatctatctttgaccgttctcgctcctgcatccttcacatcacctccaactgtagtgtccctaaactctacgcctacgacccctataagcccattcctaggattctctgatttcaccgagagagtacaaaacgagaaacgcaacactacagtgcgtaaacagcaatcgttacccccaattccactggagacaaggacagagaacaacacaaatggtgaatcttccaatccttcagatgttgttccaaagagcggcttaggttgcacacatctctggctacaaagtcgagttcccttagggtaaacatctgataataatatccaatgagcttctggtatgggtttaccattataaattgataacgatattcctaaatgcatcagatgcgttccttcgaaatctacggcgacaatcaagctagagctactccctttgactgatggcataatcactctggatactcttcagatccatgcaaaggagaaaggttagctaaaaaaatctctagtctctcagcaaagagactataaacactttgctgcgtcttctttctttccgtgaaaacatcagtggttccatatgaagaatgcaaatctcgaagctttaatatgttttggagtgaatcataatcataaaatgttagatgctcgtgtttaatgactgaaacaccaatgaacttgtgtgtgtgacaggtcgtagatacattccagagcagtcactgaagataaacgcaacttcaagcatttcctctgggattttctagtcttttacccaatgccacttttgcctttttctttagagccaagaagagtcatcaaacacagagcagttctatcttcagcatctccatagagactcatccaaagattgtgtgttgaaaaatcgattttggtttccatgtttcgaaggtttgaagaaaagttgttgtaataccccacttgtgctgaaccatgtgtttgcgttctttagcttgctttttgtaattgattgattctgaaattcgcatagagacagaagacgcaaccattgttatcgaatttacatttgttatttgcttataaaatcagataattaaccaaaacttttcttcaacaaatccaagtatggctaacaaatgaaggacaaaaagttaggtgcaccggagcttaatggtgcacccgaatgcaggggataacagctctacaaatctgaagccattttcacggtgaccccaaagtcgtcgtggaggcaaaaaccctttacctccgggatcaaaatcttggggagagacgaagatg

SEQ ID NO: 23670 - DNA, 3000 bp, Unknown
  misc_feature (1)..( 3000): 2750-1469P.txt file - cDNA_ID_2148469; gDNA_ID_1620475; Annot_ID_158149
acgtcggattagggagtttcttgatgagaggaaaaggaaagtgtttttgtggatggataggtgaagaagaagaaagtgacaaatgatttgctttttgaaatgattgtgcttctttaagctaaagtcctcttggccatctgttacactatttctttccatgtctcagagagctttgatatttttgataaatttgatttaattgtttctagttatgggaataatcaaaatcctttacagagacattttttttgtaaactttgggtaaaagctgagacatgttggatggtagcaaattaaaatttacgaaaagaggataaattacaacaaagtaagcttttataggtactattgattttttcataggatacctgaaaaagggtagagaaactacatctaaattcacgcgaatactctgttacgatcatgtatagagtttttttttggggtcaaactgaatatgtttagagtatattttatttattttcttgttatctgatgatatctttgtctttctcttattgtcaaaagcatataatccgacttatcaaattttttattttataactgactaatcaaatatttttttacttaaaatattattgataattagaaaattagatccaaattctacatttgttcttttctctaatctctatagttttggattttagttggtaacttttgaattcctgaaagtaaatttggtaacttttgggtagtaatttgattttcaaaaagtttagaaatgcattaaagtgtaaaaaacgaaaaacaaaaacccccaagataaatagttttttgtttggggggtaaaaatgataaatagtttgggatgtggatgacgtcaacattgatcagttacgagattacgattttataactcttttaaccaaagctaatcacttcaccctctgttttgtttctccccaatcaaaaatctcaatcccaatcacttcgcttctaatcttaaagcctttaatttagtcttcgagccctctaatggcggatcagagcaaaaacactccagagatcttcgagctcaacaatggcaccatgcaggtcaagatctcaaactacggcaccaccatcacctctttgtctgttcccgacaagaacggtttgttctcttcttcctcctttcaatgatgatctctgttttgtctccaaatcctaatcctctgattatcgtctttgtttttcttatttgaagggaaactgggggatgtagttctcggattcgactcggtggatccatatgtggtaatttctctcgaattcacctaatccttgaactgatctcgacatagattcaatcaatctgatcgaaactctaatcactgcctctggatctcatgaatagagtctgaatcataatttaagaaatgtatatggtcattcatgtaccttgttgaatgactttgtgatgaactatcaaaataagatggactttgtaacaatgttaatgaatatgtgtgttttatctatgaatatgattgttacagaaagggcttgcaccatactttgggtgcattgttggtcgtgtggcaaatcggatcaaggagggaaaattcagtctcaatggagttaactacactttgcctatcaacaagcctcctaatagtctccacggtctgtataaacaattctcttctctgtatactttctctataactttctgtgaactaaataggatttggaccgtaaaatgttactctatctgtacaggtggtaacaagggtttcgataagaagatatgggaagttgcagggcacaagagagacggcgaaaaacctttcatcactttcaaatatcacagtgccgatggagaagaaggtaatgacatatcctttctctagcatttgatttctgtgggattagattagctatataatgttttgcggttcccctccacaggttaccctggtgcggtttctgtcacggcgacatacactctcacgtcagccacgacaatgagacttgacatggaagctgttccagagaacaaagatactcccatcaacttagctcaacatacatactggaacttagcaggtcatgactcaggaaacattctagaccataagattcagatatgggggtctcatatcacgccggttgacgaatacacagttcctacaggagagatcttgcctgtaaagggaactcctttcgatttcactgaggagaagcggataggcgagtctattggagaggttggtatcggatacgatcataactacgtgttggactgtcctgatcaagagaaggaggggctgaaacacgcagcgaagctcagtgatgctgctagctcaagggtactgaacttgtggaccaatgtgccgggaatgcagttttataccgggaactatgtgaatggagtggttgggaaagggaatgcggtttacgggaaacatgcgggtgtgtgccttgagacgcagggattcccgaacgcgattaaccagtcgaatttcccgtctgttgtggttaaggctggtgagaagtacaatcacacgatgctgtttgagttttcagcttgagtttatagatggacgttttaggtgttagatgatgggaataaagggccggttcatttgattcactgggctggaaaaagagtgattttaattttatctctttgggggagaataataaaaccaaactgtttacattatattaaagttactttattttttcatatcttctaaacatttggcccatttgtgaaattgtgaattgtgcagcgaatgaatctcccattgttcacatgaacttggaaaaaaagagcaattagtgtatttgagtaattctgatggcaattatgtctacacgcatgtcttttgggcggtgagaaacacgcgccactaaagaagcaaaagcctatgggccccaaaaaatatcaaccatccatctctgtaatctcttcgtcctcccttaaatttttgtttcattatttttttcactagtaaccacggcttgtgttgtggcttaaacacagaaatg

SEQ ID NO: 23671 - DNA, 3000 bp, Unknown; identical to SEQ ID NO: 1986
  misc_feature (1)..( 3000): 2750-1469P.txt file - cDNA_ID_2148473; gDNA_ID_1620475; Annot_ID_158150

SEQ ID NO: 23672 - DNA, 3003 bp, Unknown
  misc_feature (1)..( 3003): 2750-1469P.txt file - cDNA_ID_2148477; gDNA_ID_1620475; Annot_ID_158151
aagggaggacgaagagattacagagatggatggttgatattttttggggcccataggcttttgcttctttagtggcgcgtgtttctcaccgcccaaaagacatgcgtgtagacataattgccatcagaattactcaaatacactaattgctctttttttccaagttcatgtgaacaatgggagattcattcgctgcacaattcacaatttcacaaatgggccaaatgtttagaagatatgaaaaaataaagtaactttaatataatgtaaacagtttggttttattattctcccccaaagagataaaattaaaatcactctttttccagcccagtgaatcaaatgaaccggccctttattcccatcatctaacacctaaaacgtccatctataaactcaagctgaaaactcaaacagcatcgtgtgattgtacttctcaccagccttaaccacaacagacgggaaattcgactggttaatcgcgttcgggaatccctgcgtctcaaggcacacacccgcatgtttcccgtaaaccgcattccctttcccaaccactccattcacatagttcccggtataaaactgcattcccggcacattggtccacaagttcagtacccttgagctagcagcatcactgagcttcgctgcgtgtttcagcccctccttctcttgatcaggacagtccaacacgtagttatgatcgtatccgataccaacctctccaatagactcgcctatccgcttctcctcagtgaaatcgaaaggagttccctttacaggcaagatctctcctgtaggaactgtgtattcgtcaaccggcgtgatatgagacccccatatctgaatcttatggtctagaatgtttcctgagtcatgacctgctaagttccagtatgtatgttgagctaagttgatgggagtatctttgttctctggaacagcttccatgtcaagtctcattgtcgtggctgacgtgagagtgtatgtcgccgtgacagaaaccgcaccagggtaacctgtggaggggaaccgcaaaacattatatagctaatctaatcccacagaaatcaaatgctagagaaaggatatgtcattaccttcttctccatcggcactgtgatatttgaaagtgatgaaaggtttttcgccgtctctcttgtgccctgcaacttcccatatcttcttatcgaaacccttgttaccacctgtacagatagagtaacattttacggtccaaatcctatttagttcacagaaagttatagagaaagtatacagagaagagaattgtttatacagaccgtggagactattaggaggcttgttgataggcaaagtgtagttaactccattgagactgaattttccctccttgatccgatttgccacacgaccaacaatgcacccaaagtatggtgcaagccctttctgtaacaatcatattcatagataaaacacacatattcattaacattgttacaaagtccatcttattttgatagttcatcacaaagtcattcaacaaggtacatgaatgaccatatacatttcttaaattatgattcagactctattcatgagatccagaggcagtgattagagtttcgatcagattgattgaatctatgtcgagatcagttcaaggattaggtgaattcgagagaaattaccacatatggatccaccgagtcgaatccgagaactacatcccccagtttcccttcaaataagaaaaacaaagacgataatcagaggattaggatttggagacaaaacagagatcatcattgaaaggaggaagaagagaacaaaccgttcttgtcgggaacagacaaagaggtgatggtggtgccgtagtttgagatcttgacctgcatggtgccattgttgagctcgaagatctctggagtgtttttgctctgatccgccattagagggctcgaagactaaattaaaggctttaagattagaagcgaagtgattgggattgagatttttgattggggagaaacaaaacagagggtgaagtgattagctttggttaaaagagttataaaatcgtaatctcgtaactgatcaatgttgacgtcatccacatcccaaactatttatcatttttaccccccaaacaaaaaactatttatcttgggggtttttgtttttcgttttttacactttaatgcatttctaaactttttgaaaatcaaattactacccaaaagttaccaaatttactttcaggaattcaaaagttaccaactaaaatccaaaactatagagattagagaaaagaacaaatgtagaatttggatctaattttctaattatcaataatattttaagtaaaaaaatatttgattagtcagttataaaataaaaaatttgataagtcggattatatgcttttgacaataagagaaagacaaagatatcatcagataacaagaaaataaataaaatatactctaaacatattcagtttgaccccaaaaaaaaactctatacatgatcgtaacagagtattcgcgtgaatttagatgtagtttctctaccctttttcaggtatcctatgaaaaaatcaatagtacctataaaagcttactttgttgtaatttatcctcttttcgtaaattttaatttgctaccatccaacatgtctcagcttttacccaaagtttacaaaaaaaatgtctctgtaaaggattttgattattcccataactagaaacaattaaatcaaatttatcaaaaatatcaaagctctctgagacatggaaagaaatagtgtaacagatggccaagaggactttagcttaaagaagcacaatcatttcaaaaagcaaatcatttgtcactttcttcttcttcacctatccatccacaaaaacactttccttttcctctcatcaagaaactccctaatccgacgtcgttcgttttaattcagtgacacaatctcccacatcttcaaaccctttgaaaccagcgattacagagatg

SEQ ID NO: 23673 - DNA, 3003 bp, Unknown
  misc_feature (1)..( 3003): 2750-1469P.txt file - cDNA_ID_2148485; gDNA_ID_1620475; Annot_ID_158153
tcctcctatcagtatctaaaatttcaactgtctactggttggttcggtttcaattgttttcagagtatagttttgattacttgcatctttgcaggcatcgacacagttggcggggtaagagtgcctgctggatactgtggcgttcttggattcaaatcttcttatggggctatttcaaacaccggaatcataccagtatcttcaagtcttgactctgttggtatggatatataaatctttgaattatactgtttgtggtggaatgatttggatcttatataggctaggtttcaattgttgtataatcacattgcaagatttagatgcctttgttcgtatgactaatttatatttaggaccattaaatgagcattacgttgattctgatcaatagattttggcttcaggatggtttgcccgcgatccaaacaccctacgtcgtgttggccatgtactcttgcaacttccatttgccactcaacggaatccaaggcaaatcatactagctgatgactgttttcagctgttaaagatccctgtggatcggattacccaggtggtgaccaaatcagctgaaaagctttttggaagtatgccctttactctccctgaagatcctccagtctctgttagaaattctgattataatagcattatcttgttttatatttaggacaattgctaaagcatcagaacttggagacctattttgaaactaaagttcctagcttgaaagagttcgctaggacaaaagccattgctaacacgaaggtctcaacatcgagactactggcgaatgtgatgcagctccttcaaaggtgtgcctattgtttattcacctacagaggatgaaaatatcttagttttgaacactctataacaatattggcattgtaggcacgagttccttcaaaatcatggggattggatcaacacagtgaagccagccattgatcctgtgattttatcacaagtgtgtgagaacccagaactaaccaatgaagagactgagaacctgaatgctatcagaaacgagactcgagtggctattggttcacttctcaaggtattcctgctcttccatgacatgtccacaacttgagcgagttagtttatatgtctcttgactaatctctaatggttcccaactctgtaacgttatgtatcaaggatgatggcattctggtaattccaacattgccagctgttcctccaaaacttggtagcaaggagataacatctgaagactatcaaaaccgagcttcaagtctgcttagcattgctagcatatcaggatgttgtcaggttaaatctctctctttctctctctcacctgccatgctagtaaagttcccctcacacatgttaaaagcaaccactgaccagtcagtgttagcaaaaccaatccacagtatatgtgtcttacatttatcgtgctgatgattcaggtgactgtgccactcggacatcatgagaaatgccctatttcagtttctttcataggaagacacggtggtgaccgctttttactagatacagtgcagacaatgtatccatctttgcaagagtactcgagtattgttaccgatcccaaatcttctaaaaaggctatcaccaaagaagagtcagccgagattgccaaagagaaggtcaattaatatccattgcatgtctcattttcttaatggcattatcatccataatctaatgtggttattatatctttgtgtcccgtgattatgtaaaccagggtaaccaagcgttcaaagagaaactatggcagaaagctattggtctatactcagaagctataaagctaagtgacaacaatgctacctattacagtaacagagctgctgcatatcttgaacttggagggtaaatgtttctcagatccttaaaaatactttttagtgagcaaatctttctatgtggcattgccttgacaaatcatttacatacagctttcttcaagccgaagaagactgtaccaaagccatcaccctcgacaagaaggtaactttcattaaaacacagaaacaggtttctcttgaaaaaaaaacactctttactttgtaagaacacacaacacaaagatcgtttttgatttctttcagaatgttaaagcctatttacgaagaggaaccgcaagagaaatgttaggcgattgcaagggagccatagaaggtaagctttaaagaacataatctgattgttttttcgccttgtagaatctggcagaatataacataaactctgcagatttcagatacgcacttgtgctggaaccaaacaacaaacgagcgtctctctcagcagagagactgagaaaattccagtgagcttcttttgtccgtacctcaccgatcattgagaaaacgtttgttccttagaatttgtccaagagtataggccaattttgtcaacacttgtcttttgcgtctgatatttaggcattttatctagagataccttttgcaagtccgccgagaatggaaaattataatatccgatgtttattttaaacgttctctaaaattggatatcaaaaagtaatgttaatcttaaacaccggataccggcattcccggtcgacttctagtcagcgtagcgtcaaaaataaggtcatgtctttaactatcttgtctttatcattttcttttctcgcacgttatctcctccccacgactcaaaaaaaataaacagaaaaaaagaggagtagaaaccaaagagacctgccctaatatttagcgatgatagtttgaacggaacgaaatctgacgaaagaaactaaagagacctttgaattatcttcacgggtgagttggttcgtttaaccttttttctttatctcggttgtgcttttccccgagaattaaacgtgtgttggttgcagcgttaacaaaaaaaaagggttgtagaaagtgagtaaggaagaaataatcaggaacattaataaaggaaatgacaacggcgtgtccggcgaggacaagctcactaatg

SEQ ID NO: 23674 - DNA, 3000 bp, Unknown; identical to SEQ ID NO: 2024
  misc_feature (1)..( 3000): 2750-1469P.txt file - cDNA_ID_2148532; gDNA_ID_1620479; Annot_ID_158261

SEQ ID NO: 23675 - DNA, 3003 bp, Unknown
  misc_feature (1)..( 3003): 2750-1469P.txt file - cDNA_ID_2148544; gDNA_ID_1620473; Annot_ID_158067
aaatattccacgatcgttggggaaagggggctcaaggtcagtattttgatgttatatctggaatgcatgattgagttatggggagttagtcacccgtcgtttttgtcattgtcataatcaaagtaaaacaagctaagtcaatcaggcttccaagtcaaagttcacctgttgaaaacttgatgaagaatatgatctaataaactagtttcgcaggactgtaacaatcatgaaaaataaaagatttaactgattgaggttttctatataatggcaaagagtagcattgatgagtgaccatcctgagtttgagtagagtcatatattgatggggtttttgtattgtgataaccatggagtggtgttgtgtgcagttgagtggtggagagaaacaaagagtggcacttgctcggacatttttgaaatcccctgcgattctgtaagtaactttgcacagaagcagcattgagtttacttatgtgattatgtacgtgtctagtcctcacatacatagagatggttggtgtacacaggttgtgtgatgaggcaacgagtgcgctggacagcacaacagaggcagagatactgaacgcactcaaggcactagcgagtaacaggacatctatcttcattgcccacaggctgaccactgcgatgcaatgtgacgaggtttgtagtaaatagtgtttgtcaacttagctcaaagaaacaatgtttttgcataactgaaacttttggttgcgggcagatcgtagtactggaaaacgggaaggtggtggaacaaggcccccacgacgagctattgggaaaatcagggagatatgcgcagctatggacacaacaaaacagcagcgtggatatgcttgatgcagctatcaaattggaatagtgaacctcagagccaaatgtgtaaaatttatatttatctcattgattttctatggagcttatatagttaatagagtcccaaagaacacaaaacaaagggaataataaatagtggtgaatgatataattttaacacgagtttttgttgagcaagtaaacttacgataaaaaaatgatcaattttattagttaaagcccaaataggcccaactagttattaattaattaacaagaagaagtccgtgatttcgaaattcaaacgaagcgccatttctttctcctcctaggaaactctgcaatggccatggcctatgaggaagctcgcaagctccgtcttcaagagaatcacaagcgatttcaagttacccttcatcgttaccgcgtttcttcttctcctccttctctgattcgtttatcaattttgattattgaatctcaggatttaggaatttcccagatttctaagactctgactcagattacaaagaaaacgcctcaggtttcgtgttttttccttccatttctgcttcattcctagtccaattttgtagctttaccacaatttcagcttcttcagcagcgtaatcacaaacccatcgataaagccctcttagctactgctgaaccaagacgctcttcccgtgttcgtaccgtaatttcttcctatcgcgatgatgtaattttcccagctttctcttacttctgtaatagatttttcacagcaatcaatcaacccaatcccttgtctcttttcaggtcgtcgtagacactggtcgtacttcgaatctgaggagatcgcgacatagctctacatgggcgacgtaagtgccctgctccacaattttgccctaaaaaactatcctttcatctgatcaattagttaaaattcatcagctacatttctcgacctctccatgagtgcaagtttgcatcttatgaagaaaaggttggagcattcaaggctgcagagaagttccagaggagccttaaatctccacatccttactttgtgaaatctatggttcgctcccatgtttacagttgcttttggctggtacgttcgttcacaacacttgtgtgtgtttcttcttcaaggatttcgtgttagtaccttacttgacctacatgggtttgcttgcaaatttcaaggggcttccttcaagattctgtgcagacaattttcctgaggaaactatggaaatagaactagaggatgaagaaggcgaagtgtatgaagcagtgtacattggtagaagagctggactcagtggtggttggaaaaggtttgctcttgatcataaattggatgatggtgatgctctactctttgaattggttgaaccaaagaagttcaaggtatgtatgtgtcttgaacaagagtcatgtggttggagttagttgacattctcacatgttgattataaaatgtttgcttggtgcagatctatgtgtttaaaggaaatgagaacgctaatcttacaagcgccagaaagagaggcagagcaacgacgccaagtgaagaagaagaagaagaagaagataaggatgttgaagaatcaggtgatgaggaacacagctcaagagccactaagagatcatccgtaaggttactaaggaagaggaaagcataagagagctttcttttgtctacatgccccatatatttttttggtttttgagtgggctgctaatactactaatactaatggcatatttgtaagtttatcaacccaaggtaaactttgtttttttcaatttgaaagtagaactgaaactctgatgagcggctttggttcggaaatttaaattgtttcctctcagttttggttactaggcgatgatgagctatatacttctgatgataccatttagaccaactccgtcacaaaataaacaaattaaaatggagagagtaaacgggctattaaatatcaaaactgggccttactatgacaaaaggcccatttaatctattttccttttatttagatgagtcggctcacaaattaacatttcttttcctctactccaaagatatctcggttcgcaaaagtctatttaatttcatagcaatctcacttttctcttcccccaccctcaaagatctctcaaagaatg

SEQ ID NO: 23676 - DNA, 3003 bp, Unknown
  misc_feature (1)..( 3003): 2750-1469P.txt file - cDNA_ID_2148570; gDNA_ID_1620478; Annot_ID_158227
ataaatgggatattcccataaaatacggatagatacagaaatgatacgagtcaataatatgtctaccgttttcctgaccatcacacattttcttagatttgttagtcaaacagtctaatctcacaaaattactaccaacctcgtcagaaatattttattcttatttataggaattttaggtacaaaataaatgataataaatgtaaaagggcactttataatttggttcagagttaaaaaattcatatgcaaattttgtatcgtgtgtaaaatttagcttagaaaataatatgactgatttgaccgtgccgccaaacaataagagagagtgattttctcagaaataattgaatcaagcaaagactttaccagtaaggtccattgaaatgaattggggcatgcttacgaaacctaacttataatagaaagaaataaacgctccaatttggaccagaaaagccgacttaagatggcgggtcaactctactacctctcctcgttccatttatctatctttagatattttgacattttgtattcgtcttgctcttggctttttattttatcgatatgtattctacaattatctgaatattcaacgtttgattattcgctaaaacttaaataattaattttatattcgatttattccataagaaattgattacataatgtgactgttactgttaatgtttctctcttaatatcatcaaaagtatgtaattgatgagaaatgaaaacaaaatggtagaaaatgagaagctcgaagaaacagaaatgtggatgaaaaattgtattgcttttacagtttactctttgctaaagtagtatagctgaaacatttattttgtattactttatttggctaaaaataaaataaatttggacataaattatttcaattattttagattacgctaacaaaacaatctagtcacactaactcacgatcaaatccaaaagcattagcaccatttcttattttcttaaaaaatatatattttatctaatcatatttacctattttggttttggacgtcaaaagtattccgaaaacaaactcatatttagtttctaaagacttttttaatcgttttcttgtgggatatatagaagcaacgcaagagaaatggtcaaaaatacggattatttactatacatatgcaggaatctagtttagttattttctaatggttgaataatttacactacatacagttgtcgacagttcaacgtaaccaacattttttacaacgaacaaatccaaccgcttaattaaaagattctataaatcttacccaattttttctataatattattcatatctattctatagagttggaaatagtgtcatagattatatgttaatttagagtgaagcatcgtgcgtggttgaaaatgatctagttcacatcgtgtgttataagagtgaaacatcgtgcatcaccaaaggtgatctgatttagattttgtatatctcaattatcaagttacacggattttctaagacaatttatttcatatacagcatgttcttatcaaaataaaattaaaatatatatacaccatgtttttacacacatagactgaagaatcaaataatactaaaagttgacgatcgagatacacagtggcgggcgcacaccgcttagagttgcacgcattgcgattggacagacaacctaaattggctgtacaatcagaatttttgtgcagcttttacgatttatatcttcttttttttgtcaactatcatctacatataataattatatatttctaggataagatacgaactttcgtcgtcaccttcgatgaacaaatattataggttgatcaaaagcataaacttaacgagcagccatgtttgagaagtcgtaattggaatgttgtcattaatagcttgaaagaaacatgtaagtaacgcagtgagttcatgtttattcttgtcgaattccttattgagtctttacaaaagaaatgtcatggtggacctttttggaaaacaaggtgggtacatttgcctatattttttaatcaaagcagaatatttatcgaaagacaaagtaaaaacaagtggtattgtgtgaactaatgcaagttgatcagtgactatagttaaagacaattcgaatccgattcattctgtaattatctgaaaatcaattacttttatttactttgtgtgtcggtcgcggttattgaatcgtatatatttatatattttgtcggatattgaatcgtatataataaggtggatatcacatattttcttttaccatattaatagttatgttgcatctatttatcggacgggagatgcagaaaagtatatgatttgaaatctgttgaaattcaatataaagcatttatatatccaaatttcctatttctaaatagaatagttgtaagtgatcgaaaaaaaataaaaatagaatagttgtaagcttataacaaatcaaatcagttatttacacgaaagtactattttatatatatattttagatacaatatacatattttgggatatattcaattaattatttaattttaatcagtattggtaatatttttaaacaaaaattataacaactttagtttttgttaaaaatcatctaaacctaaaatcatttacagaaactgaactaaccctataatattttagcctagtgaccaatactaacatccaccttgcatcgaagtactgtatcaaaccaaatctaatattgaaatggtcaaggagaatccatttattagtggaccttcataatacaacaaagaaagaaagaaaacgaaactcaaagagacaaattaaaagagtcaaagttcaaaatatgtactctttattttattgtgtttaataactttgtatttattataaaccaatccatatatatatacacatagaccatccaccattttcactcaaaccttctcacaaaaaccaacccaaattctttctatatattaaaaaaaaatcaacacaaaggaaaaaaaaatg

SEQ ID NO: 23677 - DNA, 3003 bp, Unknown
  misc_feature (1)..( 3003): 2750-1469P.txt file - cDNA_ID_2148580; gDNA_ID_1620478; Annot_ID_158229
taatgcaaaaaatctcttattagtgattaagaattgataagttaccttcttgagtattttgtctgttttcacctaataagcaatggtattctcttgaatctgattcatttggtatatgctcagatgggagattcaacatttctcgatagaatgcttctccagcttcgctccacttgcaagtaatgagttcgtttcgttaattctataactgtgtagaaaaccaatcatgataatgggttgatctttctgttaaaatgaaggtattacagcggttaccctaaggatctcgggccatcgcgggttctccattttacatcagaaagagagtttgtccaactccttcaccagggctatcctgtggttgtcgcattcaccataaggtaacttagcatttcccaaaacctttcaaactacactatattcaatcacgtgcgtcttcttctataaaacaggagtaactacacacaacatcttgaccggatgcttgaggaagctgctgctgagttctatcccaacataaaatttatgcgtgtgagtcgatgtaaagctgtataaaagaatacaaagaaaatagctggtaaaccatgaagtgactgttgtgtttggattgtttcaggttgagtgtcccaagtatcccggattctgcataactcgccagaaaaatgaatatcctttcattgaaatattccatagcccacaacatgtatagttctaaagtcttgtatttccggtacttaacctgtttaaatcacgaaatctcctttgttgttgtatctcgttaaatgaaaatccatctgatgcaggccggtaatgaaggaaaagtacaggatccaaatatcactcggtattcagtgaaagttgtacctgtaagttgaagcatcacacattgtcttttatacatattcatctattgcagagtctaaaagacgatatttttccttgtttgtttcgcttggcagtacaattatgatatgagtccctacggattcagagaattctttaagcgccagggggttcgtacttcggatcccaaatgaagcaacttgaaggttggttcgtattcacaagcttttatgagtgtatcaatgacttctgtgatctaccaacgactgaactattgtattactaaatttcctttttgccttcagaagaagaataaaattcttatgatatatgtctgagaatgttccaagttctactatttccatgaatcaataatcagagcggtgtaaaatttaaatgttaaagtaaaaaaaaaggcattagatatgactcttatacatggtatgtgaatttcaaacttagtcttatatccagatttcacacttttaaccattcaaacatcgaaattcagcctcgtaatcagttctagaacatcctaaacatcatttcccactcctaaataagaggcgaaccttctgaaataataattttaaaacttaatacaattagtgactatatatatagttaatgattttagttggtaacgagcgatgttaggttaaaaactttagtgcgaatcgtgcgatcagtaactatatagagttaataaatttagttgataatgggtggtgattttagttggaatggggttgatgttagattttatttgatacttttttttttgtcatcgatttaatttaatacgataaaatggttttatatagttaggaattttagttgagaacggatggtgttgtgtcgagtcatcgtctctttatttcaaccattatctctttagctctatacttctatccatgccataaatgatttacgtaggaagatccattattttcttcaggtctatagtttttgttcttatattagtatggctgacaacaacaaaaaacgaatatgcatgaatctttgagagcaattccctaacagtctaaaatttaatacagccatgttcttatcgatgggatcacattaatgatacaaagaaaatgtcaaaaaaattggatctgcctactgctttgatctaaccactactgcttcttccccataacactatttactacgtactcgaataattgaatgttcccttgacctatatgtctttttcattttcaatgttttatggatttcgtggccaatacaatagtagaaagttatataattttaattttaaataaaaaaaattgtggaaaggaaaaacaacgaaactgtttgatagagcttaaaacaatgaaacctagaacttgtaaagttttatgttctacacatatatagttcgtgactacgtgtatataacaaagcgcattaaaaatgaaattgtagaatcaggtaaaaatgatttacgtatcgtattggtgagaatgatttagctataactatgatatattggtaccattattttgtgtcattcttcttatatattaaaacatgattatcttctaaatccgtttctgatatttttctgtttggcgttttcttctttcgatagacatccgtcttttaacttgtctttcacttacaagcaacttacttttgctttgctaatggatttaagatgattaaaaccccatacttcatagttatatactagtagtattaatttattttccggtgagtattataaggttgtgagactgtcaatttgtcatgctcctttaaaagtaaaaaaaattttacaaagtaatattttgtatacgacaaatcgtcattctcatactactatatatacaacacacacatcgaggcttgagcaaaatagtctacgcgtttccttttcccttgtaatatttgctttttaaaaagattttgctttatcaggtaaacctctttggatgttttcgttctatcaatagcacccaatgcctaattttaatatacctttctagtttcttttatttgttcatcattaaggttcgatttctctctacttacaatcaacaacatcaaaaaagacttgacaaaacgctttagatcactcttcttcttattttgtttcattggttttgtttctgtgtgcaaacgcgcagaaaaaaaggagaagaaatg

SEQ ID NO: 23678 - DNA, 3003 bp, Unknown
  misc_feature (1)..( 3003): 2750-1469P.txt file - cDNA_ID_2148592; gDNA_ID_1620478; Annot_ID_158233
tttaaggaacaaagatttcattaagggacaagaatcacagtgaaagcttttaaaagagagaaagttgttataatctcctcacatgaaagaatgttggcaggtaatgttcatccgcgatgcagttcttgtttgcttctactccaggctgaggattttcaaatcagaatcagagtaagacaaaactgaaacttttctcaagtttttgaaaaccctgaggactcttgatattagcaaaagagatatgcttgagatgaaccaaagcttggtgtctttatgaacaatttcttacaacggaactcagtcatatatggtaggctgtaacatgcaaacaaaaactttggtataaaggaataccgaacttactctgcaatactcccggaatttcgagtagtagagaccatcagccatcactattacagcgtgttgacgcttcattgtgaaccactaccaccagaagagaaaagtgggaattacacatttacgtaatttcaacaataccattaccaaacagacttagagaagcaacaacttaagaacaatccacaactgagagattaagttaacagtttttcacctgtgcaccctttctgaaatcttgccttgggatctcaggtaacatgtgatccatgtgtctgccagtcccatgaggaccaagatcctcaaaacttgagagagagaaacaagtattggtgaatattaatggagaagtcaaatttagcaatagaaagaatagatacacaaagtttctgagagtcatttatttacctatcaatgaagctgacatttgcgtgcatcaaatatcgataggtgtagtcaaatgtatgcaacggtatacaactgcaacattaaaagagatacatcaagtaaacagaacgtagctggaaattaaagtaatgactttgtgcaaattcaataagtttatgaaataacctttctgaaagaagaacaaagtgctggttatcaggatcttcaagagcatttgctagaagccgtctctcagcatcaaccatagaaatccttccccaagtgacatgatcactatgaatttcacggtctgaaaagtgacggctaatgtgaactggtcgtaacctggaagggtggatgtaaatagagaatcttccttcttgacccttcacaatacagagcaaaaccgtcaaataccataacacagcaatcaaataaaatcaagaaatgtctcggaacttgttccaacctggaaaaacttatcccaaagcttctcaaatggcaaagtaccaggagtcaaaaacataaaagcgattttcgatttagcggttagagcaggaggtagtctcagtatatctttgatcacaactcgagctgctacttcttcatcagtgaatttcctgacatgaacaggaagccatccagagagcgcagcttgacagcctctactagacaaacccgcacaagcagagctcttactgttgttgtgttgtggatacatgtaagtgatcaccaaaagcacacttgtgatacagactaacaaaacaatcaacaatggcttctttagagaagatcggtgtcgtggagacaaatgcagattctctcccattgtgaaaaaaaagtttgaatctttaacttctttacattgagcaaaacctgaaaaaattccaatcaaagaacattaaagcttgaatctttgtcacttaccaacactcttgagaaacaagggagtataattcgaagtctcccacacgtttggtgaatcaaaatcaacggatttaaagaaaagaaaacctaatttaaaggagaaaagaaattcacgttgttcttgtgattgagaaagatactcacccccacgtacgagagcaattatgcttcactgcaaaaccaaaatctgaattaataagcaaaactctatcagattcgatttttttacagaaattgtaatgaagagtggaccaaatgcatttaatcagtgaagagagttattattacagttacctgagaatttggagctggggagagaataaaaaaaaaagaatctttgtctgagcccagatctcaaaatgaaagctttgatgatccttctttatatcaaagagtgaagagaaagataacgagacagtgttggattttgtttgcttttggaataagtatattaatgtgttgtaatgaagaacatacaaaacaaagtaaagtgtttgacgattcagatcctcgatttgttttctctctctttgcttagaaataaagaaatcgatgaacgagtgtgtttacaccattttcttcttaaaaaagaaaaaggtctaaaactgttttaattatcttcttctgagatgtatataaacaaacccctcaacaccagtcgatttttccaatcatggtggaatcagaagaaactagagatagaaaggtatatgcacgcataatttttattttatttttgttgataataattactatgtagtaagaaaaaacaaatcttaaaatttttttcctatcttttatgctttggaggcttttcttctccgtaatttttttgtttttcacaaaaaaataataatctaaaagttaaatttggaaatgacgatttaattactaaccggatcacttgtctctatggacataatttcactcataaagcttaaattatagtgcacaaaaaaaaaaacagcttaaattattctgggactaactaaacaaataattgaatgccaaaaataagaaattcaatttttgtgcctaccaaaaaaaagaaattcaatttttgttagttattggcccgttgctttaagaagttttggctcagtttcactgttaagctaaggcccaagacagtaaggctagagcaacaaaccaaaccgaaaaatcggaaaaattcactgatcttgttggttaaccggtggaccacaaccggttaacaaacatcgtttttatttttgttttgggctctaaaccctaaaagaaaccttcaacgccgttcgtttcttcttcttcctcctctgctacagaatcgttttgctctagacgctaattatg

SEQ ID NO: 23679 - DNA, 3003 bp, Unknown
  misc_feature (1)..( 3003): 2750-1469P.txt file - cDNA_ID_2148614; gDNA_ID_1620478; Annot_ID_158239
tcaggtaaattcatttcaacactagactaacatatactatgaatctaggttttagaatctccgaaaatatcaaccaattaatgttacagaaaaattgaagacatgaaaaagaaaatttaataattgttaaaactgctaacaagtgatatgctataagaggatctatctcattaaacttggtgtcagataaaaatgataatcatgggatattttgggaatggttggataataccagtacggatgtcgatgatggagaatatgtacgttaaaatatacaaattgataaaagaatttatagaaaagggaatcatttgaatttctaaaagtaatacagaaaacaaatcgccatttttttcttacagacacaaaagatacaagctttgtcttcaattggtagttaatataatatttatttgtttttttatatggttacatgcatatcttgatcatgtccagtgaggacttgtcttgaatatattggctaaaaataacattttctgtattattttattgttcatcatttgtccaaatcctcttgatcttctcgatttaatattatatcaacacacccaattatttcaaacccccacttatatgtataaaccaaaaattatacataatatacaaaatctacttccataagacttaggattctatattttatcagtaacacttaatatgtaaattcttgaacatattaatatatcaatcttttgagttaatactacagcatggtaagatactaagatcttttcttttactatttcatatagtggcatttatattaatgatttttttttaaaaacatcaccttctcagagaataaaggactctcaagtaagagattaaaatattacatactagtaaatccacaagaattatataaaattagctattgttttgtctgtctgttagagagagaacaattagatggacatacaaagctaatttagcatatgaaaacctctcagctttttccttgcctccttccttcacaaatatcacagcctgtcaaaattagcctttaagaactatttaacttccatcactatatattatttgtttattaatcctttttaatttaagcatttccttagctgtgaataccccattatccctctctccttctctttcctttctctctgaatatctctctatctcttcttccacacagctttagtcctatatttgattgttgacaaaacaaagcctatagtaatctctcagctattggattatgctttgaagctaaattggtaaagaagcatatagtaaggtaagtgtgcgtcttgaagaatttctcttaagtgagttttgtggcatgagtatagaacatgtgatcaatgagcttctttggagaaaatcacagcttgaccactcttcttttcaggtaatttatatagaatttctttatatgtattcgtgtatatatgtccataaacagattccggatattgctggtgctttctatttagatagatatattttctatatatgtatgtgtgtgactgcgtataaggaaaaaagtcacaaatttggcttttttcagttgattgaaattttaatacctcaagtgtatagagagagctaaaataattttttgatagcgaaatagatattttgtctagaaatatacacacatacattaggaaaaaaaaaagaacgttttcttttaaccaattttattgtccttgtcttatcctattgggtatctaatttggttctctacaattatagctaaatagacatgatcttttcatgtctttgtgtacttgtgagcgtgtgtataatagatacgtaagtacatgtgtcacatatatttatatttatttatttatatgttttagaaaaaaagataggaaacaagtataagtggaaatttaggtgatatagtcctctccgcatgaatgcgaaaacataatgaacgatgtgaccaatttatatacattatgtaattaattccaattttaatagaaaagaaacttaggtgatacagtcttcctcgcatgatcatcaatttacactaaatagttaaaattcctatttgttgactttaaattgactgctcgaccagtgtttgttgttgcttttttccatgtctctatgactctatcttattatgttaatcattctcatatctttaactttaacccacaaaaaaaaaatcattctcaaattctaaataagtcatgcttatccatagaaaaggaaacaaaatcgacaacttgttttttttccaaccttcaccacatattttatatttcttgcaattttacaactcaaatcattctattttaaactttagtagagaaaatgatattattgtactataccgcatcaattatttcactgatttgaaaataaagtattatttccgaatgcttactgcagaagatatcctatctaagtatttttacatcaatattttactataacacaagagataatttagatattttgaattggttatgaatgtggataaattcaaatagaaaagctttgtaatgttatcttactaaaacaagccgtgtctagtgttgtcatgcttggctctacttcgatttgatctgactaattagctaattgaaaataattaatcatcttccatctctatgattaataacaataataaagaaataaaatcataaatccaacaatttgtggtctaactagttctatccattgatttagtgaacataaagacatttgattcgatttaaaaaaaaaaaaaatacttggctttaagacaaaacaccatgagatagagaatctaatcaaattcaaaagtgtgtcccactagtcaaccttcttttgtctataaacccctcacttcacgaactagtggcttctgacgattactccatcaatttcatactcacatgtatacatacacatacacacaacactcactcacatatacaatttaagtagagttagggttttctaatgtgtttcatcactcatcaaatggttatgaaactatatgactacgtttcaggcatg

SEQ ID NO: 23680 - DNA, 3000 bp, Unknown; identical to SEQ ID NO: 2018
  misc_feature (1)..( 3000): 2750-1469P.txt file - cDNA_ID_2148618; gDNA_ID_1620478; Annot_ID_158240

SEQ ID NO: 23681 - DNA, 3000 bp, Unknown; identical to SEQ ID NO: 1958
  misc_feature (1)..( 3000): 2750-1469P.txt file - cDNA_ID_2148624; gDNA_ID_1620473; Annot_ID_158064

SEQ ID NO: 23682 - DNA, 3000 bp, Unknown; identical to SEQ ID NO: 1984
  misc_feature (1)..( 3000): 2750-1469P.txt file - cDNA_ID_2148671; gDNA_ID_1620475; Annot_ID_158136

SEQ ID NO: 23683 - DNA, 3000 bp, Unknown; identical to SEQ ID NO: 2026
  misc_feature (1)..( 3000): 2750-1469P.txt file - cDNA_ID_2148685; gDNA_ID_1620480; Annot_ID_158269

SEQ ID NO: 23684 - DNA, 3000 bp, Unknown
  misc_feature (1)..( 3000): 2750-1469P.txt file - cDNA_ID_2148687; gDNA_ID_1620480; Annot_ID_158270
tcttttgttaattccttttattttctactgtgcatcacgtatatttgattaactacaatgaaattcgtttaattaaaatagttgaggggacaaatttaactataatataaaaaaatctagtgtaaatcactaatattacggctaattttcgaaatctaaaatagttaaggggacaaaaccgtaaactttccataaatagtttggtaagaaaaagcaaataaatatagtttcattttttgtaaataaaaaaaaagaaaaagaaacagaatctccccgtttctcgagcactcttaagttctctctctctcacagagttagctttacgccttcaacgagaaccacacaagaacacaactacccaaaacgctcattttctttttccccggagattttagctccgtcgtcgtaacggacccataattcccggcgacggattctaatctcattttcagctaattataaactatgcttcctgtctcaaatccttccagtcctgaacatctcctcaaaaaatccagaaccccagactccaccacctccattgatcgtaagaactcatttaactcgcttcactcggtcggaaaccgctcttcctacatcgccgcttctcgtagccactgcacatggctgatcctctctcttctatctctccaactgatcctcttcctcactctccgatccatcccttttcctcaccgtcacatccccgaaaacttcccttctcccgccgccgtcgtcaccaccaccgtcacaaccaccgtcatttctgccgcctcttccaatccccctctctcatcctcctcatctgacgaacgatgcgattcaggtcgagtcttcgtctacgacatgccaaagatcttcaacgaagtgattctacaacagtgtgataatctcaatccatggagctctcgctgcgacgcactttctaacgacgggtttggtcaagaagcgacgtcgttaagcaacgtgatccctaaagatttggttcaatcatggttttggactgaccaattcgtaaccgaaattattttccataaccggattttaaaccaccggtgtcggactttggatccggaatcagctacggcgttttatataccgttctacgctggactcgcagttggtcaatatttatggtcaaattacgcagcggctgatcgtgaccgtcattgtaagatgatgacacagtgggtcaaaaatcaaccttattggaatagatccaacggttgggatcatttcattactatgggacgcatcacatgggattttcgcaggtctaaagacgaagattggggatctaactgtatttatatccctggtatgcgtaacatcacgcgcctccttattgagcgtaactcttgggatcattttgacgtcggtgtaccgtaccctaccggattccaccctagatcggactccgacgtcgtgaattggcaagattttgttcggaatcgacgtcgtgagacgttgttctgtttcgctggagctccacgcgccgggattgtgaatgattttagaggattgcttctccgtcactgtgaggaatcgcgtgggaagtgtcggacggtggattgtaccgtcgggaaatgctcgaatggttcgtcggcgattttggagacgtttctcgggtctgatttttgtctccagccacgaggagatagcttcacacgccggtcgatatttgattgtatgttggccggttcgattccggttttcttttggagacgaagcgcttacatgcagtatcagtggtttttaccggataaaccggatagttattcggtttttatagaccggaacgaggtaacaaacggcacgacgtctataaaggaagtgttggaacggtatagcaaagaagatgtgaggaagatgagagaaagagtgattgatttgataccgaatttggtttacgctaagtctccgaatgggttagagactttcaaagacgcttttgatgtggcgatagatggagtttttaggagattcaaggagcaagagaaatggtacaaatggagatgatgattggataaaattatttatttatttaataaggatttttcaagtttttagctccagtaaagttatgattacacttgtaaatttatgatttttgttttgagagatgaataagttgtgttagttgaatttttggtagtagtcaagtaagtaagttgttctatgtgttgaattctcatttatatattctcttttggagacaatttatagttttctttctgattcctacttactttacagtctcgatgttgataggctaaatagtttttgagtgttttatatatctgtaatctcttgagctaatttggtaggtgggaagtgaaaaatcaaccagaggcccgcatctttgcacgtagaagggttattttattaagtaagttgtacgatgataaaaaggtggtaggtaggagaagtagaatttgattttgggggttaggtttgatcatcgtgtaatactcgtgacacgttgattactctaggtaaaattgagatatatgctcttgttttctttgggaaagtttaaatctgttactttccaataaatccaatatctgtaacaagtaaagaagctggatcagttttgtcatgtcttttgccaatatatgtagtaagtatataacaaaattggttacaatgaacgggagataagttcacctaactaacatggccttaagaaatgatagatacttggtgtaaattgaatatattctatgcttcgaaaataatactagtactcaaagtaatagtaacacagaaaaaaaatagtacacttcaaatactcgacaatcacttttcttcatgaaagatattttcgtagtctagtgcttctatatgcttgctatatcactatatgcttgtttgtggattgtgttgtgccaagtgtaactgagtaagtatgaaggtaagttaatataacaagggtaacttctcaagttctctatttaaccctcatctcccagatctcttttcaagaagacaacaatg

SEQ ID NO: 23685 - DNA, 3000 bp, Unknown; identical to SEQ ID NO: 2039
  misc_feature (1)..( 3000): 2750-1469P.txt file - cDNA_ID_2148690; gDNA_ID_1620480; Annot_ID_158271

SEQ ID NO: 23686 - DNA, 3000 bp, Unknown; identical to SEQ ID NO: 2036
  misc_feature (1)..( 3000): 2750-1469P.txt file - cDNA_ID_2148698; gDNA_ID_1620480; Annot_ID_158273

SEQ ID NO: 23687 - DNA, 3003 bp, Unknown
  misc_feature (1)..( 3003): 2750-1469P.txt file - cDNA_ID_2148705; gDNA_ID_1620480; Annot_ID_158275
tcttagaaagcttgaagagttacatagagagctttacacacttcaagaacaaaaggttttttctaaactttaccttaaatttgatttcatttcttgatcaaaaagttaactaatactttactgtttattttggctcagaggaaccgggtgaaacagattcaagataatataagaactcttgaatcgctttgttcggttcttggtttgaattttcgagaaactgttaccaagattcacccaagtttagtagatactgaagggtcaagaagtataagtaatgaaacacttgacaagttagcttcatcagtacaacaatggcatgagacaaagattcaaagaatgcaagaagtgagttagaatgtttttaaacattttaccatcttaaaaactctgctctttgtttcttatatatatatgctatcttatggattacagcttcaagatctcgtgacaacgatgcttgagttttggaatttaatggatacaccagcagaagaacaacaaaagttcatggatgtatcatgtaatatagctgctactgtttctgaaataaccaaacccaatagtctttctatagatttgctagaagaggtaacttcacaacaactttacatcaaatctttttgtaaacttactgagactattttcgccgatggattgcttaatgttttaaataggttaaagctgagctatgtcggttggaggagttgaagtggagcaaaatgaaagaacttgttctaaagaaaaggtcagagcttgaagagatatgtagaagaacacacattgttcttgaagaagaagatatcgcggtagagaatgtaatcaaagccattgaatcaggagatgtgaaccctgaaaatatactagaacagatcgagtatcgagctgggaaagtgaaagaggaagctctaagcagaaaagagattcttgagaaagctgataaatggttgaatgcttgtgaggaagagaattggcttgaagagtataatcaggtttgtcttttttttattcattaaagattcagttctgacattttgccgttacttaatgtttttttgtataggatgaaaaccgatacaacgctggaaaaggatctcatttaatcctcaaacgcgcagagaaagctcgtgcacttgttaataaacttccaggtttgatataaatgatcccaacgtacacattgtcatattgatgaatgcttatcttactaaaaatctttttcactcttcttagctatggttgaagcattagcttccaagattacaatatgggaatcagagaaagaatatgagtttctctttgatggtgtatgatcttatcttcttctctcaaaaaaaaacccctcttcttctcttttctcctttttctcttttatatacttcatttgatctcttaatctgattttcttcattcagaatcgcctactttcaatgctcgaagagtatacggaactcagagaagagaaagaacaagaacgccgcagaaagagggtattagttttacatgcaaatcatatttttaatcaaattttctattgttccaagaatcaccaagaacaatgtttgtaggatctgaagaaacatcaaggtcaagtgacatcagagcaagacaaaggaagtgttacgaagccccaaagcgcgaaaaagggtcttaaagtgtcaactaacaagagatttgtctcatcacctcatactcctcaaactgattcgcctcactcagcaaaatcgaatcaatcgtttagtactcctctatcacgccatggctgaaaaagatagagctaagatttcaaaaacagtctttttatagatcaactagtaatagtttctttcttatatacacactgtcacacatgttatgtacaagtatagttctaatgcaaccatagaaacaagacatgctaattcaaatagagggtctcgaaactgatgattcttgatcatttgtaatctgtcaaactcaggatccaagtgtgtactatacactgattgttttgcggaaagattagtttgactttgaccaaccaatatacttgctgcaaaaaaaaatgtcaattgtttcctaacatttttttaaaaccaaggaatacttttagttggtcgattttgtaattaacatcatcggtatagattttgacgcatagttagtcttattacaattagtgaattagctgagaaataaatctaaatcttgagcttatctagaaaattaattggtcttagtaaggtattcaaagcaataatctttggtcaaccttatttcaaaagtgatttactggaaaaaagacaaaggagattgtcagaagttttggtattctttattttattttccttttcttttcgaaatttcactttaatttttcttcgtatttccgtttattttattacaaatattaaatttccaagacggacgtggatctttccctaaaccgaaatcaatactttgatttttgtaattattatatcgattttcaactaattaaatccttaatattcctattaaataatacaactgtctacatgacatttttttatatatattatcgtttcttttcctgaaattttccattttatttatttctttgcaaaaaccctaaaaattcattcgtctaagagagaaaaattatcttctttttcttgtgaatttttttttggggatattgcatgtaattttttggggatttttgaggtttaatctccattgaaagaagctctggcatttctctgctacagtgttggttttcagctgcagaattggtgaaaaagtaaatctagaaactgtaatcaaatttctctgctttgatctttggtccttttgagctactatttcatatctcttgttccttttattgttcttagttattattacaaagaagaagaagaaaaaaaagaaacctttacttcttcttcatctgaaaaagctcattttttttttttttggaatcagagtttggtgaatttcaggagcagagtatttaagtaattttggggaattagtgagaaaatg

SEQ ID NO: 23688 - DNA, 3003 bp, Unknown
  misc_feature (1)..( 3003): 2750-1469P.txt file - cDNA_ID_2148717; gDNA_ID_1620480; Annot_ID_158278
ataaatcataagacacagtgttgttttaatagaatcatgatcttgtattagaattctctgttatgtttaagaaggttccttcatcgtttgaaacgaattgaaagatgatttagagaatcttgtcctaatttgttgtggtatgttaaaagttgtggtgcgtttggcaaagctaaaataaaagtatgtttgtttttgtctaggaagcattatatcaacggaggtgatgcgttactcgcccgcgaaccagaagcggaggtcgaagcggaaacagaagcggaaggagaggcgcatagcatgtctcaaagccggtaagcaaacgtgattccaaaaatgaggtgttttggaagcgtagtgaaaccacatgactctagtttggaaacgttggtggtgtggatcggaagcgtcgatggtgacttgcaattctaattttgggtttataatttgttttgtggcccaacttaccttggtcaccataagcatttaatgtttggtattttaggttatttcatttttgctaatatattcaaacaaacatataaaataaaaagacaaatcaccacccatgatattaaaaaaaaaacactaataaaagatgatgtctcctggaatggtcgacgcagaatctgtagccactcactgttctttatcgttgtctcctcctcaacattatcccaatcccacgttcgcttaattttttaatttttaggttggattttatttttcatcaaccatataaaatcattgaatagacccattcttttatcccaacctttgaattctttacctcctcccacttacaattattcgagatttagtttgaatacatgtatacttccggtgatttgatcttggtcggaaaaaacaatcttttacgacttttctgaagtatgtcgcgacgataaagactattgaggattcatgtctacgtctacggtttcaaaatgtcttataatgtctactgtgtagtacatgcatcgaactccaattatacctacacgtacgtatttaataaagttttgtgctatttaaatttgtatacgatctaaacatttctaatgtattttgaacgtcggaccagtaaaatatatgaaatcgatcgaatgtagtagaatttagaagttctctaaatatttgttttgctattttttgttatgtttttgtcaaacttttgatatttttctttcttatctctttgttcatgatctacaattatcaaatcaaccaataggaactgtttcgagttgcacttggaccacaatatcccacactaaattaaaacttgaaccagatcaaaatctcttcggacctttgccctttggaccagttcggtccaatttaacctttcaatacccttatcttgatagagtactataaagaaataataatgacagatgcatgaaactagttcaagtggaaaaagcatcgtgcactgatatatcttcatcaattgcaagaacatgtctcaataaacccaaaactattcaaacattttttctgaatcatatctatcagcatgggacactgtggctctttgtgcctttggattcaacgcatccttcacaatcttttttttgtaactgcatctcattatcgcattagtagcaatcaccacctatatgaaatacctctttatatgtatatgatatcgatttaaaagtatttagtaaaaatcgattaatgttttctacaataagattagtcagacgcgattgccaaatccataaatccaaaaagaattatatagcaattgatatactattactataggatatattatagagtggatatgtttcaccataagcttaacattaatttctcaatcttggtttgcacaatgattaatgcataattagattaagtgtatatgaagcttcatggaaacccgtacgtgagaggacggtcactagattgtacaatcaagaacgtaatatatatatatccattaatctaaaccgtacgttgtagctaattagttttgtgaaatcgagaatctaatcttgtaagaaaaactgtaggcttgttgtcagaacaaacatggacccatgttctctatgtccctaagatgtgtaccaatctcaattcacttcttttgttgcactattttttaaaaaataacttttattttatattttgagatctccattgcccctgctgcactagacattacagctcattttttccttataattcaatccctagctatttttctttcttattagtttaaactaatcatatttgggtaattagcgttgaaactatctatcatatcaattttaatgatacatatgcaatactttatgtgagtatatgcatgtatgcatgttccaacatccagattaatgactaacgtttaagccctgattttttcagagaaattttgtgttgtacctatgtttgtattacacacaatatttaccattgtttaacatgtacacatgtgtttataaatctccgtacactataatgcatatttgaaccatatatgacagaaagttttccactagttctaattacattttgttgccctttcctactcgtctattgcctatagaaatattattttagttatgattaagaattgggatgcacattccgaaattaattattaaatgccactatgaagaacccttgaacatagtctaattcaattttaagatcataaggaacattaacagtgacaatagctaaggtctctcgacaatgagacaatccgctttttaaatatatacatataagagataccatattgtatacatatgcagatacaattacaacttgaccaaatttattcaatttctccttctctttatatcaataagaaactattcatgatactggaccagcctgtttgaatcttgtcccatccacaaatctcccaatatataaataaagaaccttcacccgtaaaaccaaaaccatcaacaacttcaaagctttctaagcaagagattgagagaaatcggattttctttctaagactcaaaatatctaaaaacaataatg

SEQ ID NO: 23689 - DNA, 3003 bp, Unknown
  misc_feature (1)..( 3003): 2750-1469P.txt file - cDNA_ID_2148748; gDNA_ID_1620480; Annot_ID_158289
gagtttattatagtatctctgtaattctatattagaatggtatgtaatatgaacaaaattaaaaatggaaccaaatggagaatttgtatgtaagtttggtgggggcaacaggaattgaaatggggccagcaccgaaggcgataaggagcttttttgccgcgatgatgttccctgtgttattacgtaaccactcatctcacgccacgttattttattactgtttttttaaaacaattatttactctgtagttcacttcttttttcctttacgatgttgttatgggttatccattaaaaaaaaaaatatttgtaaatcgtctatttaaggaaaataaaataaaacacttcatatcatgttatgtagtaccaaattaacaaagtattaacttcaaattaattcgccaaaaagatgttatgatgtgatgcattctttaatatagattaaactattggtgatttgtttttctatagttaatcactagcaagaacatttttcttttatgtttacagtttttagattataaaaaaatggtgtaataagaacatgtcaaatcaaatgtatttaatttgttaatatagatttgtgtataaacaattggtagttttgataattcaatttttcagcaatcatcataataatactttacaagaaaagctaaatcatctgaaaattttatatgaatacgtacggtttaattcccaatctacaacttttttagttggatttattataaccgtttttctaaaacaaaacacattaaaatttataagtgaagatccaatgggttcaaaccttttaattctcaataaatatacatagattctcgaagatatcctatcaacttgtaaaagttgtttaatcaatcttttgtttgatgaaatcttgttcaactgttgatttggttaagttttatagctgaaatgtgtataagtgtttctgaacctttttaattactgctaaatcaatttatgtcttacaaacttgccgatgtatcatgtatgttcattaggggtgtcaaaatgagccagctcgctcagctcagctcatgatgaacttaaatcttttatgagccagctcagctcaactcatttattatatgagcttcaaaatacaaactcggactcagatcatctagatcacgagctaaatgaggtagttcgcgagctaatgcaaataaatgaaaaaatttaaattttctaaaatttttatgtaaattatatatttttaaaaatatatttctatttttatagattatataaatatttatgttttgattgttgactttttgtgtttattactaatatttattttcagaaattattatgtaacttatatattttctaaaatatatttctattatttatagaaaaatatatatatactttgattgttagttttttgtatatattacttcaaaaaagccaaactcatgagctagctcatgttcattaaagctcgctcatataactcgtgagctaaataaagttcgatcactaaactcatttattaaatgatcctaaaaaatagaattcgcgctcatgaataactgagtcgagttgagccagctcatgagctatcagctcattttgacaccattaatgttcatataataatcgtaatccatcatgaccaattaggcaattaagacatactataacaaaacatttttttttttttcgtcaaacattgttttgttaaaggtttcaaaaagaacatgcgtatcaatttcaccaaacgaatctaataaatagcacgaccatcggatattatattgctatttgacgatcaacgtacgttcgattaaaaaaagtacggggattgtttagtttaatccaagtgtagtgttatttagacttcgagtaacatcaacgcgggagaagaaacgcatgggatgaatgtgtaaagtggttaactttcaacaatgtttcttaattgctaagatgtttaaaacgagtttacatgaattcttgtgttacttatcgaattatcttttatgagataattagtacactaccttattagggctccatttctttttctatctaggcctaggtcgatcagtactgtgtatgttacacatatgatattaaaaaaaaaattgattctataataatcttcataactaaaggcaagtatagtttatttgaaaacgtctcattcaatagttggtagagatagttctaaaagatcacattacttctctatcacacagagtgtagaaaagtgaaaacttatgcaacacttcaggtagaaagagaaaagacagtgatagcttagttataattaaagacccccaaaatccaaatagaatcttctcttaaataaactattgaaaaaatattcacaaaaaaataaaaagcacatttccttttgcttgcatcacgagagcttttgtctctctttacatttatgtgcctatatataagcctagagaatccaccatcatcggagtactcgttgtctttcatgatctcaacataaacaagacaaaacgcttttgtctcttgtctatctaaattaaatctacgaggaaacgaagagaagcaacaaaattcgatattttagaagtcttgcataaataagaagaaggtttcaagtaagtttctttcagtacatagagaaaccatgtatatgatttatgattgtcaagatgttacacagtcgtatatataattataagtatttcataaaagtaatttatgaaaccatgcacataactaacttttgtttttgattttgtaaattgagtagtttttgtttttattatcatttttatgtgtttatagttggttcagccgagatattatgagtaaccaaacgtaacctttttcataatgaaacggatcaaatatactttaatctttttcctacatatgcttagttacttgaaaacttgatttcacattacttctatgcatatcttttctatgtaccgcgcgatgataaagtatgtgttacaaattgccacattgcagaaaatataaaattaaaaagatcaaatg

SEQ ID NO: 23690 - DNA, 3000 bp, Unknown; identical to SEQ ID NO: 2030
  misc_feature (1)..( 3000): 2750-1469P.txt file - cDNA_ID_2148752; gDNA_ID_1620480; Annot_ID_158290

SEQ ID NO: 23691 - DNA, 3000 bp, Unknown; identical to SEQ ID NO: 2051
  misc_feature (1)..( 3000): 2750-1469P.txt file - cDNA_ID_2148790; gDNA_ID_1620481; Annot_ID_158309

SEQ ID NO: 23692 - DNA, 3000 bp, Unknown; identical to SEQ ID NO: 2049
  misc_feature (1)..( 3000): 2750-1469P.txt file - cDNA_ID_2148805; gDNA_ID_1620481; Annot_ID_158313

SEQ ID NO: 23693 - DNA, 3003 bp, Unknown
  misc_feature (1)..( 3003): 2750-1469P.txt file - cDNA_ID_2148840; gDNA_ID_1620481; Annot_ID_158323
atttgcaacgaattgcaaaaggcaaaacacttcccaaactattagccagagtttgccatcaccgcccaatgtgtccacacacaatttacccgatacaccgcaaaatataccgaggaaaagaacgatgaaacttatcggcattgtctgcttcgtacctgatgatcgtttgtttagaaagtaagtgaagacaatgatcattaacacaccgaaaaatatctgcacccaaactcgaacccggcagatgaaggtgttgaagcctgagttaatcgatgaaacttgtttaggaacccaccacgacgaacttttctcctcggattggtcgcatactgaggtagcatcctcgattctctttattgaaaaattgtaaacgccaagtaccatagaagccaacatgctgaagacacttacgaggagccaatccatgattcttgtgaccatctcttcttttcttgtatcttctaattcggttttgaatttctccgctctgaatgcagctttcgaaacatccaactctagcgccgctttccccaggttgtttgattcaaattttaatcctagcgccgtctctttgcaccttaactctcttatttgaagaccaatctccacggtctttaggtcgtttgctcgtgtttgctcttttaaaaacctttcgtctgtggtcaaagccattgctgaacttctaggagggacacaagagagttgtagagtctcttcgaaaagggcaagctcattcatcaaagaggttgctgttgcactgccttgcatcacttcataagcagacgtagcagatgaagtctccctctcaaatagctcggtgtctgagcatccgtctatggtagagcgatctaaattacaactcccaccatcattattgtttgactgatgtggatttgcacattcattggtcaatttaaggatctttagagtactgctgaatgtttgctcaaagttggtcgcaaaggaaccaagcttattaccataaacctgtaaccacaacattatgaatcagaaagtctataaatataaaaatgcggaaaacatagagggggattttagcttacattggctaatgattcttcgacaagagtagcaaagatctggagagcataatcaatgaagttcttgtatcactaccaaaacgatggcaaaagaaagattgaacagaaactgagaagaaatcatttgaagttcatactacttacctcaacaagatcatcaacataaacattctgacctgcggcattctttctcgcaataacctagagaacaataaaacagagtagaaacagagtaagaactacagagcatatgcaagtcaatgactttggcggctaggtaggatgaaatttggtgaaatcacaatcagaactacaaatccgagtagaaactagaaaggctcaagctttaaggcaagtgagagagaagacaatataaatttgcaatgttacattgaagctcgatcatagagacccccaagaagaacttcagcttctattgattgactctgattataatttgaggagaagatcctctcttcgattcagggtgaagaattcacgcaagtactgagagaagaaaattcagattcaatccttttgactctgattcagatcctctcctctgtccagttttgaatcaacaaagcctaaattgaaagactttgtatttaatactatctaaagatcaaaactttcaacacaaccaaaacctagtattcacgcaaggtcaactataggaacaacccgtaccagcaaagccaatttcgtatcaaaacagttatgtgatgcaataaagatcaaagtttggaaattgatcgaaccatattagcaaaagcggcaagtgaaaagcccagaggcttcgccaatttttcagcttgtcgttcaccaacgcttcgtcgagccatacctaaccgcatagggtttcgtaatctatgaaccactctcgtaacccttttagtagaatttgaattagaggtagaagatgtagaacaataggacgaagaagcttcgtcgttgtccataatctctttcttctttcccttgagttttctcttttccaaattcgatggattcgtatccttcttcttcttcatcatcatcgtctcatctttatgtacgtcaccagattgatgatttggctttgaattcgccggattggtgatttgattttggggttccggcgaaggagggaggaggagggcttccatagccttaaaatataacttatggggtaaatttgcaactttgagaaaagtatttaagttgtaagactttggtcgcttcgtgactagtgaaaagtttcgaatttccaactttttcctctgatttaatttgtatttttaaaaattcgtcataattagcttaatataggaaaaatacttgaccaaatatctgaattaacttgtaagttcaacgaattcttcaaattatacaatgtatatgttaatgtcaattaaataggtaataatatgtttactcgatttttagcgataatttgatgtttctaggtgctttctgttcaatgaataggatcggttcagtacttaattgaactaaaagtcatacatatagcttaggaccagattaacataccaagtagtcgagtttaggaccgaaccaatcagtttggtttgaagatggaccataaaagtgtttggaaaaaggaacaataaaaaaaatcgcacaatgtttgtggctccgataaataacacgatgaggtgtcttaacacaaccaatcaaaacacaagaacatctccttcactaatctcatcttatgccacgtgtccttttcatatccaccccttttattttatcataatttttttttttaacattctctgtggttcgtcatgaacctcaaaaaacctctcactgcaaagtgccaacaaacaacaagtcttcaccttcttcttcttcttcttcttcaaaatctcttgtacgcaaataatccatgagaaactagggtttaacttgagatctctcttccgaagtattaccatcaatg

SEQ ID NO: 23694 - DNA, 3003 bp, Unknown
  misc_feature (1)..( 3003): 2750-1469P.txt file - cDNA_ID_2148847; gDNA_ID_1620481; Annot_ID_158325
tttgttatccagctatgctttggaattgttgcggtttcgggaagctggagtggaagttgtagtaaaggtacttgcaaggcttatctctactatatatatgatcttatcacatagctttatattcatattcaatcaaattaactattgtaggacctgagaaagagatgggacaggcaatcacaagcattctacaatctatttagacaagcggatagagttgaaaagctagctgtagtcattgaacgacttgtaagaaactaacactctcacccaccacaaactcccattctacatgaatttctttctaatgagtttactttcatcctcaggagcaaggtgatttgaagcttagggtccgagcgctagagtctgagagggcatttcaacgcgttgcagctgttcaaaaaacagtaggaagtgtaagtagagctttccattctcatgtcttttttacatcaaaatctcttcaagtcgttctttgaaagcatttcatgttttctgttttatgtgttaaagttggtttcttttcctctttttgttaaacccattgtgtttctctacaggctgttgctgcaggaagtttagtcaatctcgcaacaattttgtatctgaattctataaaagtaagttggtactcttgttctttttttttcacctataaacctctttgtctgctcaaattcaccaacgttcttgtttctttgtgttctcagacacctgcaactatagcatatacagtatgtgctttcttcagcctccaagttctaatcggaatcataaaggttaagaagttcgatcaacgggaaaaactaatcactggaacagcttaagaacttgcttggtatgtcatgatttatcacctcttgatgtttacaagttacattatcagactcaaattctcacactcattttttggcttaatttgtacagaagaaatgtattaaagcttcttcaatctccataaacccttttgtgcatttcacaggagtgttaacaatttcactggtctgcaaataaaattatcttatggaagcttgagaggcaagagatggtcaactagtcaaaccaccaccactctctcatctctgtcttcttaaagttcgataataatttttggagaggagactctggttgttcatcaacagagtggtcatgagccacatgtattgcttgtgtatagagagatttagaaattaggaactttttcgtataaatatactcattgtactcagctactcactagactcatctctgttttagtaatattttgaatactgtatctcaaataaattaatcttatcaaatagaaaccatagttgaaaagtcatgaatgattcttaactgtacaaaataataagctttggtaaaaccctaaactttcgtttccaagatgcaatttctagcttctctcgtttccaattccagaaagtttggtcggagatgggatcgagctctctcgttgcatcatttctcttcgaatgcgacaccagcttcgatatcaaatccagcgttcgtcgagtttctcagggacaatgggttccagaaacctctagcaattgccatcgcaatgcgttaccctaacctcaaatccctagaacaacctcggtcagtgattcaaatgcttaaaagttacagtttttccgatacccagatccagaaatcgatccgggtccatcctcgaatgatgttctacaacgtggagaaaattctagaacccaaacttcgattctttaaagatattggatttactggctctggtcttggtaagttcgtctctcaaaactcatcagtcgttggtgtaagtctagtgaagaaattgattcctaccgttgagattctgaaatcgattgttgccccaaaacatgaagaccttcctgtcattcttagtagatgtggttggcttcttctcagtagagaccctaacttgtttctcttaccaaacatctcataccttgaaacctgtggaattgttgggtctcagcttgcttctttacttagaagacagccaagaatcttcaatctctctgaggaaaaactcagaggatatgtctctcgtgctttggatcttggttttactttgaactcgaggatgcttgtgcacgctgttatctcgttaagttctttgagcgagaaaacgtttgatcgaaaggttaagttgtttatggctaatggattctctgaagatgagataacagatattatacgaagatctccaggtttgatccggtgctcagaagataagcttacactggggtttgagttttacttgaagagaatggggttagagagggaagctttggcgaaacgtccttgtgtgttgtcgtataatcttgagaagagggtgattcctaggcttaaagttttgcagatcttgagggaaaaagggttgttgttaaaagaggagaagaagaagaagaacatggttggcattgttgagatgactgaggaagcttttctagagaaatatgttgtgagatttggagatgagattgctgaggaactgctggttgcttacaagtgcgtgtgtttagtcgatgaaacgctacttgatcgtatcaagatctaattgtagatttcacaagtccaaacttgaaattttgtcattgtatccaaacttcgctcatccgtaactgtgttgaacattataatttggaagtaactcttaaatcaccctttattacgagcttgaagcttctcatataataatgggattcatatgaagcgattctttttctatttcagcacttgagcaaaaactcaagattgtcaaagcgtcttaaaaatttgactcatgaatttaaccggtttgattttggttcgttgtaataaccggtttaaaccagagattgattccggataaaaaagcttaggtttttccgcgaagccgacactgtaaggtagggctaaaaccttagaatagccggagagaagaaggcgagaagaggagcgacaagggcgaagctgcagaattcttcggtaattttcagattcggttgaataatg

SEQ ID NO: 23695 - DNA, 3000 bp, Unknown; identical to SEQ ID NO: 5335
  misc_feature (1)..( 3000): 2750-1469P.txt file - cDNA_ID_2148886; gDNA_ID_1620780; Annot_ID_167890

SEQ ID NO: 23696 - DNA, 3003 bp, Unknown
  misc_feature (1)..( 3003): 2750-1469P.txt file - cDNA_ID_2149274; gDNA_ID_1620482; Annot_ID_158364
tcgattatctttctccatgaatgtgaataaagatcgtatattcagacataatcacacggaataagagaataagtttaaccaaagaagaaaaaaaacaaatcttttgcaaagtaaagatcaagactcttggacaaggctcgtggccaccacagaacagctcacttcaaactcagcttcatcttcatcaacccaactcaccaatccataaaccacgttctcttgtaaccctcttggactctccaatctcacagtgtagcttagcttctcgtttttctcgctgaacattagtttctttggctctacgacgacgtttagacccttcaagcctctcactctcacgatgtagcttctctttgcttctcccacgtttgtcaatgtcctcttaaagatcttgggactgctttgatcagacgtgaagtaggcaatgattgaagggtaattgagatatggagatggctttttacaagcgtcggagatattcgatctcgtgatgatattgatcaattttcttgattgttttgcctcgtgacaaaggaagtttatgaaatcttgtggagttgtatcatagattaggccagggtttaagactttgttcgtactcacatgccctgctccaacggctaatgggttgtctaaagtcaaagccgttgtcataattgcagattttatagccgatggactccaatttggatggacttgctttataagcgcagcgactccagctacatgaggtgcagccattgatgtcccggttaagagattgaatccgctgaataacggtagtgctcgagttccggtgatttgctcaaccgacggccaagcagagagtataagtgtcccaggagctagaatgtctggtttcaggatttgagggaagcttgtgaatggaccccttgagctgtatgtgccaacttctggcgctggttttgtcccgattaccgttttacgaaactccagctttgcggtcgcgttgtttttgttgcttgatgcgtagctttcaatagtttctcggtgttttgagccgatgaatgctactggaaactggaattttattgtgtcttgctcctcaagtaacttatctgttattaaaactactgctgcagctccggtggatctgatttgatgaagtttgctaccgatgtttatgttttcgttacagacaacaattctgtttgcgagagtcttgttttcaacgctgccagattcgatgtaagttactggaaactgaaccgaagggaactctccaggaaacagagatggaaaactgaaactaactctgtttccaaacgttagggttccttgaaattgcctaccaattgttcccgctccaaccgtcataatccacggcgctccgttaatcaaactccagtaatatggcccgtcgttaccgccggaagtaaccacgaaaacgcctttttgaatcgctgcaaaagatgcgactgcgattggatcattttctagaccgaaaccatcattgtcgtcatcatcctcaaaactcaatcctagcgacagagatatcacatggactccatctcgaatcgcttgatcaatcgctgcgattacatctgatgagtaaatcccttcttcccacgcggctttgtagattgctagatgcgcgtgtggtgcgattcctgaggcggttccttgggcgtaagagaagtaagacgcgttcttaacatgattcccagctgcaatggctgcaacatgagtgccgtgtccgattgtatcgtacggtgaagagtattggccaatcttggtttctctcaaatcagggttgttggcgaacaaacccttgttgaataccttagcaccgattagtttcttgttgcacaaggaagaagaattgaattcacatgctcctttccatttagacggaaccgaaccaaccccatcgtcgtgaaagctgggactatcgggccaaattccggtatctataataccgattactataccagctccataattcgagaccggccatgtaccggatgtcgaatttaaaccgataaactttggagagaaagtggtatgaagcttaaccggtaaatctttggtgaacgagacatacccgggtttgtgtttaagacgttggagctcagagttggtgagaaccgcgctaaacccgtgaaccgaatcggtataagcgtagataatctttggttttctattggttataactgaagtaagagttgtggaaaaccagctccgatgatcggaaaatggcaacggtttagcggataagtccatgtggatgatgtaaggagaggtctccgccgttacaatcgctacgaaaaatgagaacaccagaataattacgacggtcatccccatgtctgagcaagtttttttctctggtctcttcaaagtgaaatgaattttggtgttagtaagaaacaattatagtgttgttgttaatagatgtttagtttttattatgacaaaaaagttgcagagaatgtaacctttacttggcttttgcttttgttaaagtggttttaggtggtcggcaacacatcatctctcatcattgtttttttttcttttctctttcaattgggctttatcatagagaacaatgattttggatatgaacttattagtagtttcagcaatagtttagactttcgaatcggtaaatatcagtaacttagaactcaggctgaaactttgattcttttactgtatttagctagattctacacttggtggactccatcagcaattacttcacagaccgaggtagctcctacaactctctgatgcttgatctcgttcaaatagatgtctcataattgcttcttttttgtttttgtttttgggctttattaaagaggagtaaggcccattaagagaacccgtttgtttgttggattcggatttggcaaatggatagcgccaaaatcgtgtcgattttcccgccatctccatttcttaatctgggttcttaaacctaaatcagttactcagcttcaccaaaccaccaaattgaccggatttgtaaaaatg

SEQ ID NO: 23697 - DNA, 3003 bp, Unknown
  misc_feature (1)..( 3003): 2750-1469P.txt file - cDNA_ID_2149290; gDNA_ID_1620482; Annot_ID_158373
cagggacattactatcaacaggttctaaaacatcactaaccgaaacggatttagctgaagcgtggatgaatttgacacctgagccatcacaatcgacgtaaaacgacgccgttccagcatcttcgttctcgaccttgacaagacgaccagcgaatgggtagaagatcttcaaagcgacagagagagatgatttcaactgagagattatatgggtttccgggtcgggttgaggaaagagaagacctctttgtgggtattcggatcgaagaaagaagagatcccatggagtgagatggatcttaacccgatccgattcctcgttgtagctctctggtcgaacaatgctcttagagatcactactacttcatctgccattttcttttctcgagtagatagatgctgataaaattcactagtccactactagtggagtgtataatttctttatctttatattttctgtttttggaatcaaattcagacatgacataccaaactagtgaactacaacgtgtttcatgttatttatttggttatatagttaagcccattaattgtccctagcccctaggcccattatcaacctatcgtcgaagtttgatggaattttttacagagctcgacggaatgttgcaaccccagcggcgagtgtttccgattccgttcaggtacgttactatatatataagaatctctaaattcgttgaattatccgaatctgtttgttcatggtgatgttgtgaaccgaacacgaaagaattgcataggcttattattgtattaatttgaaaaacgagagagaattggtgtttggcttagttaaattcacattgctaaaccaaatcatctcatacaatgcttacatattcgttaaattcagcatctttgactaatttttccactacctgaggcagtaaacaagcctgaaaatcaagacttgcttctccaattcctttgaaaacaacgagtcttccattgagatacggtggtccagctcttgcagctatcggtttaccccaaccgaaatcattacagtacacatcgaaccggtgagagtttgtgacaactaaatctttgctaccaacagaaaccggaatcttgatatttttcacccaattctctgcaaatgctttggctttttcatcagtttgtgacagctccatgttgttgatttgcattgcagcccagcctagtccatggtccagcagctctccaaccgtgaccgtagctatcccggtttggcttacattcccaaaacactcttcttctagtggcggatttagccgttgcctcatgtttataggtaacctgcaatgagtctcttcctctcggctcatgccactgtgtttaaccattgaacgccatatatatgctaacaccgcttgaatagaagagatcttttgatcagcctcgtcgttggctttagcgtcaagtttcaaaacattctcttttgtaacatgaaacatcttctcttgtagattggttggtgttgttacataactagttggttttgtttcagggtctggaatatggattggataatcaatctcgtcaaagaaccaacctttaaggtgaagacgacgttggaaagtttgggatcctgaagaatctttcgagcaaatctctgaccatgcattgatgaacttccagattgaagtggcatcagccacggtagagttgtaaccaaaaccgatgaaaaccccgtccttcatctctgtcacttgaaccataagtagagatcttgagacaccgtggtagttcttgatccccgttgcagggaaaaaggaagcgaaaaacccggggacagaaccggataactcaaggacatcactgagctcgatgtttttagccactgcgtgaacaaactccacacctgaaccatcgcagctgatgaaaaacgagacagtatcgtcgtcgttctttagcttcacaagacgaccagctaaaggatagaaacgatcaagtgcaacagagagtgaagcttgtaattgtttgacttcaattttgtgaaagagaagacctctttgaagataaccaaaacgaaggcgagagagatcccatggagtcagctgaatcttcttcacagaagtcggtttcttaaggcttctgggattaactatgctcttcgagattaccaccaattcttcttccatcgttttacctttttcttaatcagtgaggttttgggttacgtgaggttttcaaatgagtacatatattgaaagcactaattaaaaaaagaccaagatccaagaaacaagttacatcacactttaataatgtttgtgactctgtgtggcctgagttgtttttcattatttgctttgtcattttgtgaaatttccacgtgtataacaacaaactttaagaatatgttaggaaagtgaataaagaatctctatgattggtcgtatttagcatgacttaatcttttttttttgttaaagtatgactatatcattaacaaaaaagaagaaaaaatgactttatctttcgttgatgtagacgtacgagtaataatgtatgtcaataaatttaacaattataaagcagtctttatttagtgtagaatacgaacagagcgatacatggatcattatcaaagtttaaagttaaactggtgttaccgacttaccgttaccatatatctcaatacatggatatatatttcttataatataaatagataagtgtgtgaaattattttcttaaaaagataaataatcataactacagtattataaatacacaaattaagaaatatgtaacgtgtttaatccttggtttgatcagaacttttaattatccgatgtgtataaattttgaagaagggcctatagttttgtttcttgatgggccaaatcaggcccaataatgtcgtacatggttgttcttcatgtaccggagattcggcggcgacgaaaccgtcctcattgcgccgccgcaactacccgacaaacaactagctttcgtattacttccttgtatctgatttgataatg

SEQ ID NO: 23698 - DNA, 3000 bp, Unknown; identical to SEQ ID NO: 2054
  misc_feature (1)..( 3000): 2750-1469P.txt file - cDNA_ID_2149310; gDNA_ID_1620482; Annot_ID_158379

SEQ ID NO: 23699 - DNA, 3000 bp, Unknown; identical to SEQ ID NO: 2063
  misc_feature (1)..( 3000): 2750-1469P.txt file - cDNA_ID_2149406; gDNA_ID_1620483; Annot_ID_158401

SEQ ID NO: 23700 - DNA, 3003 bp, Unknown
  misc_feature (1)..( 3003): 2750-1469P.txt file - cDNA_ID_2149413; gDNA_ID_1620483; Annot_ID_158403
gtagggagaccgaaaacatgtatttacctcgaagagagcttcagctagcaatactatccttgagatgctagctcttgcatttgtttcatcggttgttgctgttgtcgaaccacggttagtaactgcacggcatgtgcagcgacctgcttgatcttgacctgataagacacaagatctatcatgatggactgcgacattctcaaaccggcttcctaatctttgaagagcgcgaacctgtggaattagttatatcagttagttagatcttgagttgatcagacacatcaaggaagagagaatcaatgagtttcaaacctgagatcttattctcctccttctttcaaggaaatctgatctgtgttctaataaaccttgatacctcccttctctcacaagagcagctggtgtctcatgatcctgaatgccgaataaggtccttcgaatgctagaagcggaacgatttagtatagacgttgaagtcacaggagcatcctctgctgctgcggtttcagcagagaagagatcagtatcttcttctccctgatgtggcgagggacggaatgcgaaatcagagagtgaagatcggcgaagaactctatcacggagtcttccaacactcagagttctactaaatctaacattgcgctcaatagaaggttctcgtacaacatgtcttctatcaagaagtccagcataagtactatccataccattaactactctcggagaacgtaagctaccatcttccccaaatctcatggcatcaatatctctaactacattgtcaatcacaggaattctcggagactcaactctatcattgagcctaatagcagattctgaaggtgaagtaacaccatcttctctatgagaagaagagactggataagtcgtgttgaaggatcttgaacttgaagctctgctaagtctagagcttatgttaccaggaatgaatttgaaatgcgaaaaaactcgacctggagtagaagattcttgaatcgaaccgctaacatttctcatctgtacattgcttacactagcttcctcttcttcttcttcaacaccacactcatcatcaagctcaagctcatcacaatgtctttcgttttcagatttcttatcatctttcaattctttatcatagcaatctgatgcatctcttctcgattccattctacgccgtgtaacacttccatgactcttcctcatccatccattacacacctgaagaaatcaaaactcatgaacttgacctaatttcagatttgaccaaaataaattaaatatcaaaaccagacctgttcatcattatcatcatcactgtaatgagaagtagaagatgaagcaagacaagaagagtgaagaccacaaaaaagactctttgatcttcttctccttccaccaccactagaagacgacggaggaggttgagccacgtcagaagcttctctcgccatcgccgacgagcctagacatgatttgctccggccagatcccatcttcttctcaaaagcaaacaactttctgctaaaattacatcattgacacaagacccacaagtcttttccccatcttcttcaaatccaccaatcgaagaaacctccaagtcaaaatctaaagatcgaaactttttcctcagatctttacattgaaacccgaattcgtcattgacaatgcagaatcaaaagccctaattattgaatccccagatctgaaactcgatcgagattgcaagaatacctcgaaatctgaactttttttattgcgagaaattaatgtaggaactaagctatgtgtgttgtctttgaatcaaagagaaatgctttgaagaaaaggaaagatttttaggtgatcggagtaatcgaagaaggagacaaagcacctatctgcgatagagagagagacttttacgggaagagtgtgtcttgatgttcgaacgagagggaacaaaaaaccaaactcaccatttctttatttttctttcttttctttttcaaactattataacattcttttgttttcgttcgattttttaatcttttttgcaatcataattggacttcattgaggactataattgagaaaaaagctttgaaatggtcattgaacagtgatcacttagatgaaaaatagttgtaaccaaaccaaactagaatattcaaactatactcaaaactgaaattttgttgacaaagccttttggttttataaattgcgaagcagaaatacaaaatcgaaccaaaatcgaaccaaaatcgaatctatattctcaaaaattaaaatataattgaactacactaacttcaaagaaagaaagaaaaaagatatattaaaaatagaaaaaaaaaatgagttgaaaaaagtaaatcacaataaactaaaatatacaaatcatttttttttatgaagtgattgttttcagtattttacaatttagatatagtggcattctagcttcagaagatttttgttggaccggccctgtaaagtcgatttaaagaccaaacaaaaactaattttaacatgataaaatcgaatcaaataaacggaaattcattaacattttatttataattataatgttaattttactaaaacctacctaaaataaaaacctgagtcaaaatatgtaaactaattttaacatgattttggtttgatttactaaaccaaaatcaaatcaaaagacaaattatgtatttatgttattcagtttttcttttctaaactaataaaaccatgaaaaaaaggattggaaacaaaaccgtaaaacccatcgtgtcattcctaacaaacccatcagtaattcagtatcactttgtcaaaactggtcacattggctattgttgaacaaaaaaaaaagagaggtttttgaccaaaaaaaaaaaaaaaaaaggaggggttaatattgacgattttgataatgagagacttttaacgtaatttataataattaccgacgttgatttgtaaatccataaagttacaaaaaaatctcaaatg

SEQ ID NO: 23701 - DNA, 3000 bp, Unknown; identical to SEQ ID NO: 2064
  misc_feature (1)..( 3000): 2750-1469P.txt file - cDNA_ID_2149420; gDNA_ID_1620483; Annot_ID_158405

SEQ ID NO: 23702 - DNA, 3000 bp, Unknown
  misc_feature (1)..( 3000): 2750-1469P.txt file - cDNA_ID_2149460; gDNA_ID_1620486; Annot_ID_158482
tttactttgaaaccctttcttttttttgttaaagacatttaaaccttttcaaaagtaatacagtactattattgacgtcacgtactgttaaataatttccatgttttttcattacgttttaatgcattaacggtaacagattgcatatacattcgtgatcatcaatttccatgttttcttctggttttttgtttttgttttttgttttatgcgttaaaattcctataacgtgttttgattaatggactgacccgatttggtaagaaatgaaaaagttggcaaaaacttttttgagcctgaaaagcaaacccaagattgagaagtgatgcaactgcaaagtcatgtaaaaaatgaagagtacaattcatttgtgtacagttttttttttccccatctagatacttaccgttaaagtaaccaatagtaatatttcatttttatcccgacaccaatagtaatattatttactaattttattattactcaaaagaaaacaaatgacttttttggcatgtgatagtacagtaaagggaaactcaaatttcaacaatcacttttcttcatttgattttatcccgtctgtgtagatttttttggcccttaatatacatgagacatatgagatttatcctcgtttatcaaaaaaagaagagatttatcctcacatccatacaattttcattattgtgctcttttgtgcacactaatatacaatgttttgcttgttttggattgttgtagtttaaacaaggtgtaactaatggaaaacacatatgttttggtcacaaaccaattgttatctttgttgtctatgaagtttctatcgtctatatatatggtctctttcagttcgatcgagggagtagataatctataaagcgtaaatcatttctctcagtgcataacatcttattcgactttgtacactgtgatattgaaaaaacgtttctaacaatagtgatatcataagatgcattgaccaaatcctatagtatgtgttagaaaattgggagttatatatagatcataatctgatcccatataaaaagctactaaatatagcagaaaattaatatcaattattattttttccttagatcatttagttagcttaagaattgttacaaattgatgggccaattttaaattttgaaaaataaagatggattgtctctttgtgtgtgggggtcctcaatgatctgtataatctgatgagaaggaattgaataagtttggcaatactaaggtgggatgttttcttcctttaccattctaaacctatctcttctctctattcatctcctctctctagatctctgatctcttctccctctgcctcgcttcctatctctcaatcatggatcatttcgttctctatcctctgggaggattattgatggatcacatgcagttgaaaggatcacgagttacatatagcatatatactacgttttcaagagatcttgaatttgttatgccaattgagtaaactttgattatcaggaaataaaccaacgaatcagtgttggacttatttgaacttttaacaatccatgttatatgattgatggcttatcacaacaaagtctataattttaggtactaactaacactactcgtaggggaattttaagaagatccactgacttatctgaaagataaacactaactatttgtcatttctatttatttatttatttttgacgttttttcacgtaatgctaattgactcttttttgtttctcattttttttttttaattttttatttgtcaatagacatatttacagacgctagttagatattcattttaaataagagaagtttgtttttttttggttgagaaaataagagaatgtaatatactttctaaaatttatcaatcaatatttattctaaatttgttttgactgatacgatttaataaaatctagtaaaaattcatagagctgaaaatctaacctttttagtgattcttcatgaatacagtagatttttagtttaacggtatatatacatatgaaaagaacatgagaaatccaaattttgacttttttttttttctttttctataatagagccttgatgagatctaggaaaccctagatttgaaaagacaacaagtaaaaggatcttatttgtttcaattattatcatgatttgtgtggctctcactctccaatatttatataaattagggttttatttttaattttctgtgtctctctagtggggtaaggaaattacagatagggtttgttttgaatggggccgtccagtaccattccacatacacacagtttgtctcatgtgtttggtttgtatgggtgccatggactcacgtgaacctctaaattaattaattatatatatacatatacatatattttcaactttcttaatgtaaatattgaccatttactattactgatcatttcagttatttatttgtatccattttcttaaatcaatccaagaaaaaaacaacaagctttctttactagctcatcaaggattactggatcgcatgtccgttatagcatatgcaaataaaattatggattcgaatctcataatactttatggtcatttgagaaaactagaagtttagagcttttttttctaaattagaaaaaaacatataaaaaggacattaaaaaaattaaaatcattggtatgacatccggacttgtccgaaagtaggattttaaaacagtattttatccatgtcttctaaaattcactgtacaagttgatgtatacagagacataagtaccctaactctagactcacgtaaaccatttattaaactgatatattttatatatgaatataatagagaccatgtgtgtttggctcgtgtctcatctcattgcctttaaaaaggatcaaacatagtatagcttggactctttttgccgtctatgatctctctcaatctctcatcttagctttctttctctctctctttgtgtcttcatttgtttatctcatcaatg

SEQ ID NO: 23703 - DNA, 3003 bp, Unknown
  misc_feature (1)..( 3003): 2750-1469P.txt file - cDNA_ID_2149470; gDNA_ID_1620486; Annot_ID_158485
caccatgcaatatgcgacttaaaatttgacttattaaaaaaaatttgaatattatttttgggacaacgacattcatcactattaaatgaatccatttttatatggtatgttacattaatcagcatgtttatctcactgtcacacagtaaccttcaataaaaagagatcatcttccatcctaaaaacggatcacatggaatctcatataatttcagcaccacgcattcgatatgagctttataattcaaatgacaattatattaatcatcaattatcattatactacacaatcttatataataatctttctagtttacaaccaatatttgaaaagttgtgctaatttttataaacgtaaatgatcttcaaacaagattcgagctcattttaacaacgttaaaacaataaaaataacctttgaatttggaaagtgatatgttataaaaaaaaaaattattatttcacaaaaaaattgtgtaatactaagaaaagtaaatatatgattaagaccattgacgtatagtctagcctaagtgtctgaaaatagaagccagaaataataatttcctttcacaaaatcgtggattatattggtttcgtgatcgagttagttaggtaactatcattttataacaagaataaaaataaacttctttttgagttttgtagataaacatcgtaattcattagttatcgaatataagatttggtagttgattatgacatcaaagattgaatattcgatgacgcaaattgaagttgaaaatatatatatttcttttcacgttgaaattgaaatatagacctcgacacttggggtcgtccatttatacataattatctaatttaggtaacaaaagattagtgacccatatatttatagaaaaaaaaaagagtaaacagaaccaacttgtgacccactaggacgaaacattgttgcgtgacgtggctaactaatctacttggctggaataactgaatgaaagacagtttatccatctggataataatgaggatcgaatcagaaaggcttgtgaggttataaattaaaagtagtaaaggctttccacacacataacacgcacggaggtttggtttctgtctgaaatcaaactgtagttattgtgggttccgatttaaattatgacgtggaatgatcgtataaatgttataataacatgttatttgttaaaaaaccagcacaaaatcattgatatatatatcattattaggatcgtgtacgtaagtgcaattccacattcaaccactagaggttattttacttaattaatagaaagtgtaaggttagttagtgcatatataccttttacatcaaccaaaaataaatgtatgtatttattattatgtgatatctttgctaatggttatatatctttcaatatagtatttgattggcagtattgtacagtagaatgaaaaatctgatgaatgctatattaagcattaacccactggtaacaagatttgagacagccatctcaattatcagaaagcaacaaaaagagtcaaccaattctgattattaatttgatttagcgatagatgcatggaaaatctgagatgcatgacttacattattagccttagttactttatttgaaaagaaagatataacttatttttcaagctaccgtttgttagcaactacgacatatatttttttataattattttgttgaacatactgaaaatataaaaagaccggtttcaaattatattaaaacgaagagaatatgttttccagtaaatttctatatcaattatatggactagctagacgtaagctattcttgtatgcaccccggtttaaataaattatatgtatgttcacccaccatattttccgtacatattcaagatgtttaaacttggtaaaacaaatgttattgtaactaaaaccaaaatgaaccttaatttgattaccatatagttagcttacaatttccggagattagtgtagattttcagctcagaatatagaggcgcatatgtctttgagtctttctaatttctttaggccaagtccggtggaaggtggagctttaattacgtaatgaatgcggcaacttgactttcgttctcaagagtcaagatgaaaccaaagatgtgaactaatatatctcatcacattactacaatcttacataatgaaaaaaaattcaacttaagaaagtatatccatacacaatggcttttcgcttacaaaggaaaagaaactttgttttgtactctaaactttttttatgaatcaaactaaagttaatacattttttttgcttgcaacaaagtttacacatacaagttctatcatattcaatttgatcttctgttttttattttgggtcaacaatagcattaaaacatacttaaacacagtttttttcaaccatcatttctatgtaatactattaatttccataaatttttgttttatcacatacttattcttactcttgattattatttaattttcatcatcatttcagaatatttttatttctaactttcatttttttttttaactcactttcacataaatttttactccattgaatatcctatttacaacttctgaaaattaaatattttctagattttattttattttttcctaatattgttaacgcccctcatctcatgggtgaactacctagtcaataacagaacaaaataaaaagttataggaaaatgagaaaaaaatactcaaaaaaaaaatcaaaatagtaggttgtgacgtttcaaagtcacccgcacaaagcaaagagattagaagactctcttctatctttaaatcccttctcagaatagataacagatatacactccatcaaatctatacctacatcaacctttatatagttatatgtatcaccctctctctttctctcccttatatatataactccaaaacaatcatttaatccaaacccaacatatccttttaacagaatcttctttatctgaaaatatctaaagaaaatg

SEQ ID NO: 23704 - DNA, 3003 bp, Unknown
  misc_feature (1)..( 3003): 2750-1469P.txt file - cDNA_ID_2149497; gDNA_ID_1620488; Annot_ID_158525
agtcatctaatctataaactaatccttgatccctaaaccaaagacttaaactttgactcattgatttttagatcaccaccaagctaaaggatctagattcaaacattcaaaagacccaacaaataaaaatcaggacttttcaaaaattgaagtgcaaaatctcaccaattcattaccactgctgctggaagaaaccatctttgaagaatcatcctcagagttcaaatctctagtctttctacttccccagccagcagttagatcggtgactgtagattcctcagccgcggagacgtctttattgccggaatgttcagagcgagtaaagactcgaccggagttaacagctaaacggagaccagagcgaacggcgtcgtttacagggaaaggccaaatctcggagagagtgtaagaagaaggattagctgcagagaaggaggaatcgttcactagtggagggtccatttccgatgatcgtaaaaagggttgacccagatttaggacccggatccgagaagtgaggaacttgatagaaaaaaagaaggaaaaggtttgagctttgcgaggtcttgtcttgtttatagggttgtgtgtgaggtggacaaatagagagagagatcggagaaggtaagacagatgtgggtagtgataatgcgccactagtatgcaatggaagatgatttatcaccaatactttcagaaaatctcattaattacacagcttacatcaaatattttgccgtttctgttataaaaaaaatattacaatggtaaaattttcgtttcgtttagaaacaaaattgaatagaaaagatatattatggcgcaataacctaaataatttctatcaaaaataaaaaataaaaatctcacaattatgtcttttagttatcctttgattaaattattttttactgtgaacaactttggtaattttactgtgaacaacttaaatacaccaaaggacaatgcatctctcttagaaaaaaatacatactagcaaaaccaaatcatgttactttggtaatttcattctgacgtgtttaaggaaaaaacgtatatgtttggattaaaaatttgatcttcgtaccatatgtccatcctagtaagtactcgatcgcctatgtttacaataatattcaccaattagtgtttttttatttaacatagatctcccacttcatagtcatatgttttatgaaagttagttgtgtaaagtgaagggaaccacacaccggtacgtaggatacgatcgaggatgtgacaatgggccatatatttaaattttaaatgcttaatcacaaaagccaaaattctagctaaatatataaaacgctaatatgaaggatagatgacatgtgttttagtctttttgtttgcatgtcaacgttcttcacgttaaatttttaaaaattcagaagctatagttttattatgttcaatgtagttttagcctttttggtagatgacatgttcaaggtagttgcggaaaaatacaaggagccaagagtgtcatttttcgtttcgatgatttcaaccttcatttgttgtgtttattataaaagtttgtatttttgaatgatgaatacagagatatcaaacgtttttaagaatacagtatataacaaacaaaaaagctctaaaactattcactgagttaaaacttttaaaagtcaattctatagcattgaatgctctaaatgtgtagcaagaaaattgtttaaagaccaacaaattagaaattgatgtttttctgcaaaacttttttaattattaattttattatcgaattaagtggaatatgtttatattttgatgaaataatgaaaaggtggaaaagacaagtgtagaaagagaagacacctggatgcaaaggtgtcacacatgaagcccaattcctctctttccatttttcccataaagcttttttgctctactcatcaagatacctctaataaaaaaacaagaaacactatttttttgttatcaatttcttctgttcatttcagtttggtcatgaaattaagaaaattaatagagagaaaagtcaaaaataaaaacatgagcataggagtactatgtgacttcattggtgatggaatgacacagttggccgatttagcaccgactaagtagacattaatcaataatagtttaaatttcaaaataagaatcatatctactaaacaatcaaatacatatgattccatctactattattgtttttttttaatttataaatcatatagtactaattaactaataatttcacattctgtctcgtgtaatcaagacaaccttttcgatttgtttttttggtcgatttgcttaaccttaaaaatcttattacttcaattataagattaaaattcgacaaaaacataacgtttttcctttttattctactggtggtggaaataatcatctagaataataaaattactttaatttgaaaagataaatccaacgaatctataactttaatcgaaaactaaataaaataaggaaaaagagaagatttaaaagcgaagaaaagattcgaaaaagagagagagagagatggaccaaaacggcggtttattcagacgtcagcagcactaactaagaaagaggagagagctttaactcttccccttgctgcttccttctccaaattctcctgacgcgtttctgttcatcttacgattttacacgtctctctaaagatttaaattttcgactttacgtttctttcgggttttgaattttctcactaaagatttgtcttttccatagaaagttcttgaattttctctcttcgtgttcaaagggtttttcagaatttatagtaacccaccaatctactgattgtctccgttcatcgtaatctctcaagatttgatttttatttgttttttgaaattttgaattttgagattctgttcctctttgatcatcatcactagggttttctgtttccagttaaaaaaaagtttggatttttcttcgtataatttaggaatg

SEQ ID NO: 23705 - DNA, 3000 bp, Unknown; identical to SEQ ID NO: 2102
  misc_feature (1)..( 3000): 2750-1469P.txt file - cDNA_ID_2149513; gDNA_ID_1620488; Annot_ID_158530

SEQ ID NO: 23706 - DNA, 3000 bp, Unknown; identical to SEQ ID NO: 2104
  misc_feature (1)..( 3000): 2750-1469P.txt file - cDNA_ID_2149519; gDNA_ID_1620488; Annot_ID_158533

SEQ ID NO: 23707 - DNA, 3003 bp, Unknown
  misc_feature (1)..( 3003): 2750-1469P.txt file - cDNA_ID_2149529; gDNA_ID_1620488; Annot_ID_158536
gcacagacatcaaggaaagcatataatatgttgattttgaactcgttttctaggattgtttctttattctgtagctttgaatttgttccaactgaaattgtggtcattgttttgtcaaaaaaaaatgtggtctttttacatatatcagaaaaatgatgtttttacaaatctcgtacttgtgtgacaaaaaaaggtatatatatatatatatatatatatctacatatatatttttgcagtcattttgtgaaataaatcttggagttgtatattatttacaatggctgacattggcttttaattattgattttcttttggcaataaattgattaataaacaaaaaatattccaaatatattccaatcccatatatcacgcagatttctccaaaatttgaactaaatttcggaaattatttaaaataaaaaatatttgacaaaccaaaatacaattgcaatcccttaaaatgagcaaaactcacctaaatacattccttatcagtttactaaatcttatttctccaacatttgaattagatttcgacaactatttaaaacaaaaatttgtttgacaaactaaaatataattgcaatcccgtaaaatatttttttaaattagcggtgtaccgcagatttttttaacgggacgggtttggtagaacgggtttggaaggatgttacttaataacaattgtaaactataaaatataaatattttataaataaatataatttagataaatataatttacagacttttatatatactaattaaaaaaaaaaaaattatctacgcggtgtaccgcgggttataatctagtatgtcttatgcttgttagaagaaagtcggatgttttgttcttaaattttgaatacatgccactaccatgtgtttctaaaacaaaaacgaaaccatctttaccatctctagttttattaaatcgggttagttggttaaaattcgttattaaattaatttataacttattaaatagagataaactgttatcataaagcaaggggaaaaaaaaactaaatcgagcaaatacttgaaaatatgtgacgcacaaaacatagtatatattataatgttaataggtttgctattctggcatcaattatggttttacgtaaagttcagacgttttatttttttatttaaggattcttacatatgtttatgtttgttttttttttttttttttttttttttgagcaactacttatatatgtttgctgtttttgtccgaaggccaattagttttcctttaacacttgaagaatatatatttttctctgacataaaaattctaaaatagttcaacttgtacaagtaacggaatactaaattgcatgtcgttgttgttatcaataactttagattaacgcaaagtgtaggaacaaagaaccaaaaatagtaaataagtgtacatgtttgaaaacggataacaacgaatactaaaagatcatataacaaacgacgacggaagtagtagtggtagtagcagcggcagcaaggtccagtcaaaatcacttggcatttggctaacaaagtcatcgtaacgtactataaacaataatatcaacttctcttatgcgtaatgcatttccatttatttagattcctatattatctgcagaataaaatataacagaaaagaaaagatgacaggactacgaataagcatggtaaattctgaacccattgtttctcagtggggaatttttgagtaataataattgatatcaaatctgaactatagtacaaattttgttttttccctaaaggatatggaaatatggatttcgaaaattttggtacgaataataaagccaatcatcggactggaaaccatttttgtcggaatttttcaaaattcattcggctgatttaatgtaacaaatactcatatataaagcaaactgaaactaagaaaacaaaaaacctcaaattgaagaagaatcttagtatataataaaatagggtttggttatggtcaatttgagtccaatattcttttcagaaaaaccaagtgagaatctaaccgaattatttcccgactttattcggtacctcgaactcgtaaaccgaataaaccgattcggctacaggctctgtttcgctttcttgttggtcaattataattgaactagagtcaatcaatatcaatgtttgtggtcaaataattgaaaatgggcttttgtatcaacaactgttggcccaatttaaaaatggaaacccaaacatctttaccaaaatatccaatccataaacttggatcgttaagtagattttacatactttattgttatgatttattcacatgttgtcacggcccagtgttccctatagtttgattggattgtgtctaagctattgatttcctttaccaatttcattagccggtccatctattggaggaaaccttaagctacaatttattttctttaccaattccacatatacagtttaggataaaagcgaaattgtcttttttcaaacacgttctcttccttttgttaacaagcaaaataacatgtgctcttccaattttcattttcagcaacccttcatgaatgggcccaaagcctgccacaaacatgtgcacaatattacaaactctaaaaacaaaaacaaaataaaacattcttttttcccaatttgtattttaatatcaatttgaatcaaactcatagttttaaaactcaattttgtaatcgaaaacaatttttttttttttttttaaggaaacttacacagtagagaaagaaacggaccattttaaaattttgaatttcgtaaacaaacaaaatagtagcccttattagataattgggaaaaaaaaacaagaaacaaacacagagaggagtgagcaataataaaagctcactcactcacacttttattcatttctctgaaaacccttaaatctccggatttcgattcccgaggctcgaaaaaaccctaaatctcttctccgttcactcatccaaccgaagatg

SEQ ID NO: 23708 - DNA, 3000 bp, Unknown; identical to SEQ ID NO: 2095
  misc_feature (1)..( 3000): 2750-1469P.txt file - cDNA_ID_2149557; gDNA_ID_1620487; Annot_ID_158499

SEQ ID NO: 23709 - DNA, 3003 bp, Unknown
  misc_feature (1)..( 3003): 2750-1469P.txt file - cDNA_ID_2149576; gDNA_ID_1620487; Annot_ID_158505
tatcttcatcttcttccttgcacttttctgtttggtttacggggtaatctaaaactttgttgtgtggccattatcagcaaaccacatcatacgagctcaatgctctatctcaagaatggagacagctctgtgttaagaatatggagattcagtctgcttgtgccatgcttgagacacagatcgattcgttcaagaaagaagctgctgaaaggtgaggaaaatgttgtcttacttctttatatcactcgtaagagttgaattttaagcgtaaaactgaaactcgtggggttgtgtgtttcaggggttggaacttagaagagaaactagagaacgtcgagccacttcaaatgcaatgaggcgcctcccttgctcttaagtaacataggttcagagcaaaacaactgttggtcagtttggtttgagttgtgggttaagagaatcaaagacgagacagtttcagttatttgccagttttgtgaaatcctctgctctcctgtcaagtggtgtgtgggacaagtaattgcttttgaaagtatcgaaactctttaatttatcgagcataacgtttacgatttgaaatacaatataaatttttgtatttagaaacatatattctctctctatattaagatgttgcatcccttattctcctataatcagaatgcagaaaagctcctccgtccatttttttcttcttggatagattcaaaccaatataatatggttcttccatgatattacttcttgtggtttcgtgtggtacaaattgaattttctactcaaatttgaatatatccatgcataatgcataatgcattgtattgtaaatgatccttgagcttccctttgtttaatgttaattagacgcacaaaaaaatgtatagataaaagttaaagtgacggagccattgctcataaacattatttttcttaatcttataccaattttcacaaaacataaaaattatgcatttcctaccgactaccaatcctttaaataaatatatttgtatatacgtatttgacataattttcaatttaaatattacaattaaaccaaaaaaaaaaatcacatattggaaggtgcacacgtacgtcgtcatgcgacccaccaacgaggctataagacacggaactcgttagaatgtctctttcctacttaacaaccttcttatattgccttttaacaaagaaaaaaaatccttcctatattgctattattattatgatgcatcttattatcacctaattaattaatggaaaccccatattctttctcaacacatttcaattggatgttgaggtagtcaccgcacgtttttggatgattataaagtaaaagcttctcttaagtagatttagtccttcatccatagtaagactcaagttatagcaaaacaagcaacaacaaaactaatcattactgattgaaaatatgcaccatgcattatgcaataattaattgtaaccagtagattggtgatgatacaatttcagaattagaccagtcacgatccgcatatgacattatgatcacaattcacaaaacatatttactaacaattatctaaaaagttttgacatgtatatgtaaattgtttgtcatccattgacataagattgggtaacgattgctatgtatgtcttaactactctataagttttttcaacggagttagtcctgataagatggggatgcttaaaacttcataagaccatatatacatcaattattgaattcaaatatacaaagaaaaagaaaaaaaaagaatgtaatgagagattgttggaaaaagtccaaagtcgacaatcgaacaaccaagtttcacataagtctagaaaaacttcaccaactgttagttgattcatagctatcaggccacatttgattctgcctcattcgttaataggtctcaaggaaacaaaactaaacaattagcaatcaatcatttagattttggttgtgtctgtcataacagtcaactacaaactttctttcattttcattattttattaaagaaaagtactagttatgaacttctaatcaatttccatatgttcaatatttttatttaaatatatgtttctaactacaatctatatactctttttgtgtaagttgtagttgtgataatatgtttgcttgtttttttttgtcaaccacacattattatatataatgtatgaaaataaaaattcttcattgataatctaatttggaaaagaaaaaattgcaaataaaactaacatgtcctttaactatggctgaacaagctaagatgatttataaagcaaaataaattcgtccacggaaggtttgagaaagtggataatttctcggggttacgggacatttgatcagcttagaacaattgtctcgaagtctaaaacttttttatcctattggaataataatgatatattgaaaatttggaaatgtcacaaaccacaagaaagaaagaggttaataaaccacagagaaacacaatgctcatgaaaatcaaattcatgcttgacaattttattaatcatttgttattttattttggttgttcgttataattaatatctattaatttatttgaaatgaagctaaaaagaaaaatcgtggggagcattcattaagctgcttactaagacttgttcttcgactaatacttcatgccctccaaatccttcctctccaatgccgacactcgcctgatttataaaattaataagatcctcttcttttaataatacactaatgttcatctaatttttattttttaaaatctataacacctaaacgttctttccttgatcctgtcttaaaatccagacatttatagagacaataaacacacgaccaatgtcgtaaaagaagttcttaaatactttacacaatcctctccgtctttcacattcattcatccctctacattagcacgaagattggtttcaagagttttcttgtaacccaagaaagaaaaagtttgtgtaacttgagaaacaacataatg

SEQ ID NO: 23710 - DNA, 3000 bp, Unknown; identical to SEQ ID NO: 2088
  misc_feature (1)..( 3000): 2750-1469P.txt file - cDNA_ID_2149588; gDNA_ID_1620487; Annot_ID_158508

SEQ ID NO: 23711 - DNA, 3003 bp, Unknown
  misc_feature (1)..( 3003): 2750-1469P.txt file - cDNA_ID_2149596; gDNA_ID_1620487; Annot_ID_158510
attcttccttgtactcatatgaaagaacaaaaaaaatcggacaacaatatgactccttgtagtacacaagtgaagttgagactagattctttcatgtacatattttatcaaagagtctgagaaacgataaacagagacccatataactcaaatgatttctacataggctcagttttaagtcagcttaaaacaggagcaattcttcagggcttgatctcaagttttaatgtcatccaatatatgttattgcttatcttactaatgtttcatcaattgctcatcttgctagtgttccatcaagcttgggtttgacgtggtttaaacaatttctgcaatagcaataaagagcatagaatcatcgaccattctagtaaacagagaactatataagcttgatcaatcacaggcttacctttcttagagcatcaatcgaccgcactttctcatctctcttttcacaaaagcactctccacaccagctggagaaatccttgtgatgagttttgagctctctaaatacagaactgcaaggaacaacacgaaagacaagcttaataagaaaccaaataaaaatggaaagtcaattgcaatgtaaaaaaagatgcatggcagtctagaggcaagttttagatgctatttaccttctgcaccatagaagcatattgacccgatgcccgcatgttgtggctctggcaccatggcggtggcggccacggtgaagcacagcttgtccaggtatatgacaataatcatatgtttcctgctttcgcagaaaaaaaagagttgtttatattagctatcagccatatacagaatgttagaagacaagaaagcaacagaaaagagtggcatacatctgcctttgttgctgtgttcacatgtttttcacaccgtgtgcctctgaaaaatagctcccctcccacaaattgattacccaaacaaacattcagcgttacttctgaatcatccacatgaaagcctgaaaatttatataacatctgataattttcagccagaataacgtgagtattggaatatatctgcatttaggacaactagtcaggtcatgggaaattatacaggatatgtcaaagggtctcacctaaatcaacatccctatctttcccatattcaacaacaaaaccatggtgagagtccagagttgctccacccacatcactgaagaatactgcaaaacaaaagattcgaagtagctttttagttttaacactgtgaacatattaaacagactttccaataatagactatgtaatggatttaaaaatatattgcctttagagatgggacgtataaacccctccatgagtttgtcaagcatggtgtctagaccaaagtcgtcaagcacagcaccgtatttattcatggtgtttggtctcattatccggaatttggtctcacccacccacctttcaaaattgtctatctgcatggtcaaacaagagcaaatgaacaaaatacgaaggataagagaaaaacaaaaaatggatgcacattacctcggctagcatcatctcacaaaagctaggctggagcatgtcaaagacgaaaacaccaggagacggttcagatattatatttctgaagctttcctctgtgttttcatttatcgccttaaggaaagcaggaacgaaacatactgtgggaactagagtatacaactccttgtgaagtggctgcagtagaaaaacacttcaaactactaacaaatgactggagcagagcaatacagaacacaagaaagctcaagaaaggattcacacctgataatttgttgtaatcttcagcctatagtcactgtgcctttgagcctgtagcatcagccaaacaaaactacttaataaaactcttgagctcatattgacattttcaaaccattcatgcaatatcttctaccaaccatcatctaaccagattgaaatttccataaccacttaactaaaagtgaaaccagttcatagtagcaattagcaaaagctcaaattttcataatgaagtgtagcttctaaagcaattcacagtcatcaatacaagtaaaaacaaaattcaagagagaaaggtccaaatctagtacttactctggaacgctctccatgaggaagatgcctaagcataatatcagtcatgaatttgattttctcatcacgattcgagacgagcatattcggaggcaagtacttctccagactagaatataccgagtttgggaaatcaagctgcagatcttcataactatcgggtctatgctcgttgttagggtttagccttagtctctggcaagaaaccatcgtagaggtagctctcaatgtcgtgggagccgccgaatgagaattctgacctgcaattgttccgttaccttccaccgtcgtcgtcgtcgtctcttgcgaaccttctcgctgctcacttgacattactaaagaaggcagagaattcaagtgagaaaaaactagggtttcttcttcacactacattccaaaagcaaaaaatcttaaaggggaattgaaatcgactttttaagctctcgatctggagattctgatttttgagttcccgttgaagttagggtttctgaatgttccctcgaagatttttttatcttttatttatttgttaatattacgcacgaaaccaccagtcatacgccttataagaagagttaaatgattttctagcccatctattaggcggcccattaaataattcgaaccggttatttggtttaaactgaaattaccggtataatcgtggaattgaaatcattcgactttgagttgtctgttagtgcgttattggttaacacgtgagagatatcgatagtctcctctggagtttgttaagttcacacgtgtgaatgaaagctttcgctctcaaagcttggtgctttttcgtctcttgcctctgccaaaatcttttggccgccatcgatctttccgatcacggaacaaccgtacgaattgaaagtatctctgcggcgaagtagaaatg

SEQ ID NO: 23712 - DNA, 3000 bp, Unknown; identical to SEQ ID NO: 2109
  misc_feature (1)..( 3000): 2750-1469P.txt file - cDNA_ID_2149658; gDNA_ID_1620489; Annot_ID_158560

SEQ ID NO: 23713 - DNA, 3003 bp, Unknown
  misc_feature (1)..( 3003): 2750-1469P.txt file - cDNA_ID_2149752; gDNA_ID_1620490; Annot_ID_158584
atttatgttattttccgttaatgttgtccatgttaaacataacacctttaattttattttgtccttaaacgtgacatttatattgatggaatctctatacttttaagaggaaaaaaataaaaaaaattggaaaagagaatggggatgagtaaattgaaaatgatgtcataaataaagtttgtcgtgtcgatagatgaggtggacagattcataggaatggtcacatttatgatgaagtcgacatattggtttcgtagttaggccacctgctcttctcttcataactcttaagttgcttaaacctatttggtctttatcgtcaaccgcttgtcggagaatgtgttaatttttattagctccgaccgcatcaagttagttaaccatgttagttatgtttgtatgatcgacaatgtgtattttgtttttttaatagtgtgggaagcatctttatatatgtcttgcatatctcttttcgaactaatccctttaacaattttataacttttgatacaaatgacataaaaaaaacattcatcaactacttatggatattaactagtcactttatacatagtgttagcttcaccatttgttctacctacctaacatttaaattacatgtggttggtggcagaattgatatattgcttcattttttttttgtaaaaaatatatttcataattcctttactataaactatacactgttgcatgtaacaaaatatttatacattattcaattgtatgcgtatatttttgaaagaggtataatttaatagagaaacactaaacatatatagtcgtcaactttttggatgcatagttcgattcgtttatcagtgttgtgtgttgttacatatttattcgtttttggtcctcctagacatagaatgacactgataagaagtcattaaaattatataatattaataactattcaaaggtattttgttgttgtcaaaaacaaaaacatttgaaagatttcttaccaaaaaatatgttaattcttgaaagggtcaacattttgttttcctcactcctattaaatccaagttcaaaccaaattatatttaagtatttaactaatgtcgtaagattactatttgtttttttttaatgagtaattacggttggccgccgcatatggaaattagaaaacaaacttggtgcagttcaattcaacaaatgattcatcatcaatggcgtcacgttacgtgtccactgtccaatgattcaatttccattactaatttttaacacatataaccaaagcttgactatgaaacgtatcaaattagtaaaccaatctccgactaattaactactttatataattatagtttaacccccaaaactaatcagatattaagactaaccccatctattaattttgacagctgtcttaacagcggatttgtggaggctcgtagaggttttttttttttttttgtattaaatttaaagtagccatcaaagattgttttcatctatggtggtacacactttaagtagttttcttgtgtcacatattacacgtaacaatcaactaccaaaccccacatatataaaaatctaaaatttatccacttataatttttatttatttttaattattattttagttgaatgcatttaaaaattttctttttatgaaaccgttggttttttaatattaattttttttacagatattcgagatggacgaagattatctgactaaaatattaaggctttgagattattgggtaaactaaatttattgcttataaccaataagatgaattagttacacgttattaacttgaatttttctaatcacaaattggaagtttgctacttacttagcttagtagtttaatcaattcaaaggtaataatagagtctaatggtaacaatagattttatatttgaacatgaagattctaaaaactgacaaaatattttcattttcttaaatttcttaaattatacatatatatatatataaattttttatataatgtgagaagatatgataaccaataaaattttgctttcatatttttattgacaaaaactccaaatatgacgaaaccgcacggtacaattttaatagaaacaaatatatctatataataatatccgcagttgaatcgcatgtctccattgggagcctaataacaacccaactaataacataattattttaatacttagtttacatattaacatttttaaaaattgttggcttaaaataaaataaaagataaaataatgaaaatgaaagattctttttaaaaaaatgaaaaatctctcttatctaaaaagcaaaacaaattttttctttctaaatctggacccaaaccccatatctctcctctataaatataaacgtctcgtctcttaaaaaaatcgtataaactcttatatactttctctagccgccacattttaatagaaataaaaatatttctataataatatttgtagttgaatcgcacgtctccattcgaaacttaataacaacccaattaataacagaattattttaatacttagtttacatattatttcttttttaaaattactgattcaaaataaaaaaaataaaaaaaaaaatttaaaagaaggaaaaatctctcttatctaaaaaagcgaaacaaaattttctctctcttataaagctggaccaaactccatctctctcctctataaatataaacgtctcgcctcctgagaaaaacgtataaactctcacactctccctagccgccacctaccctccgccgcctccttttcgccgcctgcttcgctccgccgcgcgcagcgcttttagtctttttctgagactgtttccgaagaatctctctgttaggattttgtttgattctggtcgttatccagatcagagaaatccgtgatccttttttctctctcactttcttctctgaaataggaaaaacaaaaaacaaatctgataatcgaaactgatcactcactgctgattccgtaacctaaaaaatg

SEQ ID NO: 23714 - DNA, 3003 bp, Unknown
  misc_feature (1)..( 3003): 2750-1469P.txt file - cDNA_ID_2150159; gDNA_ID_1620686; Annot_ID_164604
atatacacattcatgtacagttatggtgttatcacacaaccgaactgagtagtttattgacttgtaatagtgtcgctactttacctttttccaaaaataatgcatgtgtgaggagttgtcgacgatgatgaaaaaatgacttatgatattcttacgaaataaatctcactaaaatttgaggtttttttttttttttttgtcgtaaaatttgaggtattaacccaacatatttggatgatgcaaataaaaactttgaaagtaacaacgttaaatagcataagacattcgttttttcactaagcaaaacagtcgtgttgtacaatttaaggtaacaaaaccgtaaaaactgaaacacatatcaagagattatttgacattttcgaactgtgttacgttcttgactccagtattcacatctagacgagacgttactgtttattgtaaccaataatgtatatatgtttggtattcttatataagtttcttattgtttttttgcattgccaaagtgttttatgtgtctcagtgatcaacatcataatttgtatcaaagtcactgatatctttcttctcaaatctagtactgcataatataattttttcttagtaaatgtgctacaattttataattgttaaacttagcgtcactcatgagtcatgaaagctgatgaccaaaatcatacaggatataatatatgttgggaagaaaagagatctggagcaacacctactaagttcgctgattagttttctaatagttacttttaagtattactaataaactattacttcctctgtagtcaacgaaataagtgtagttaactttcatttgatttcttaaaatataaactttcattatttgatttaattcttttggcctaccacaagcttttgggtgtgtacatgtgggtgcatgtatttaaatatgtaacacttgtttttttatattcataaaatgggaaatgctgtacttgcttattaattactcactatttacatattccaactttgaaatattgttgattggtgaaaaaggtacttcataataatttaactaaattgtaccatcatatattcgtctaagaaaaactcaatcttttatcattgttgatttcacacacaattccaaatttgacacgagttatataacatgatacccatattcaacaaaccactagactctatatttatctttagttttaaaaatttgtcctcaatattaaaattaaggggttggttatatatatcaagaaaaataaaaagattccatgaggtggctttaatagttctgattaaaggtgttaattaattaacaagatgaataaaaggttccatttaagagtaaagtatatgataacagtgtgggggatgatattggttcaccttaataaagcgattgcaataattttatgtataactaacgaaaagtttataccgtttgattaagaaaatgagaaggtcatgtccctctctctctctctttctcttgtatttaaatcaaaagcaatctctaaccatatccaaaatcccccctaattccgggttttctttttataacaagtattaatttggacttggttcccacttatgtttcttctttttttttgccaaccacttatgtctcttttttataatcctaaacttttcatatgttttttgaaatgtcccatctagattcagttagtggattttactcaacttgtaatacgattctactacataagatgagtgaaagagttaacatgcgcttatttttaaggttgaaaatcgcaatgtacactctctagaattatagtataaaaataaaaaaaaatctaattcagatttttgattgttacaggctaacagcaaaattaatatggatttaaaagattaatactggaaaataataataattaaaagagttttaattaaaacttcccccccccccccccctcaatcccacgattaattaaaaaaggaaaccaccgaataaccgtaattactataatgacgtggcacttagatttcgaatagccgctgtaataaatattaaaaacgttttgtcattttcctttttctcttctcaaagaaaaaaataatcactctctctttttttttttttaattcacagacagaatcaaaacttgtgtagaccgagaatccatctctcacaaaccccaaaccaaaaaaaaatcaaaaaaaaaaatcaagaacaaatcgaaatctcaactctgtgaaaacctcgtccttgttcttcttctgcttctcccattccttcgatttttgcttcaatggatgtttgatttgctctctgactgcgtttggtgagcaacaagtccgtcttagtgtttatgttttgttttcttgcctgatttttcttctttcttctctatttggttgctgtctcaaatggcggatgttcttatgaatctgtggaacttatctacttgtctgttttcatttcatggttttgagtgtcggtagatcgaaactacaactgtcacttaccgattcactagtgagctcactaccactagatttagttttttgtctgcattagatttgcttccactcccaggtttgatttgcgtttctccgatttgtttacttagatcgattcagtaatcacaagttaggttttttctttctgttttttttttttcctgtgtggatatttgctctcgttgatcctgtggtgtaggcagaaaatgttgattagatgatttgaaaaaacctgacttatagggattatcttcggatccatatacaccattatgagtagactatgtatatgtattggataaacaagtgcttctatgttcaacactataaaaatgtagcttcaatattcgtcactgacaatgctgattgatgtatagctcatttcagaaacactagaaaaagctctgatttaagtgaatgctattttaggtatactctacaatacggttttattagtggtgtgctaattccttttctgtctcttctatattttgttgatttgtagtttactatactatg

SEQ ID NO: 23715 - DNA, 3000 bp, Unknown; identical to SEQ ID NO: 3039
  misc_feature (1)..( 3000): 2750-1469P.txt file - cDNA_ID_2150159; gDNA_ID_1620621; Annot_ID_162303

SEQ ID NO: 23716 - DNA, 3003 bp, Unknown; identical to SEQ ID NO: 23714
  misc_feature (1)..( 3003): 2750-1469P.txt file - cDNA_ID_2150159; gDNA_ID_2926202; Annot_ID_201909

SEQ ID NO: 23717 - DNA, 3000 bp, Unknown
  misc_feature (1)..( 3000): 2750-1469P.txt file - cDNA_ID_2150189; gDNA_ID_1620692; Annot_ID_164830
aatggggggttaatgttcagccgttatctggttcacctgcaaactttgctgtctacactgcgatacttagccctcatgatcggatcatggtaaagaacttttgcactcttcatctccgctttacttgtgtgcttgatatagattgaatataatggcttgttttatacgattagggtttggatttacctcacggtggtcatctgtcgcatgggttcatgaccgctaaaaggcgtgtatctggaacttcaatatactttgagtccatgccttatcgacttgatgaatcaacaggtaatgcatttcttatgagaagggtctctgaaactacttttgtatgaggctatttcctgatgtctgaatatttgaacaggcattgttgactacgatatgctcgagaaaactgctacacttttcagaccaaagcttattatcgcaggagctagtgcatacagccgagattttgactatcctcgcatgaggaaggtagaaacacaacctgatccttgaaaacacctttcatgtttctgtctacttttggctttcaaatataaatctgttatttcattttcctcacaatttgtatgaatttctgaagatcgcagactcagttggtgcttttctgatgatggatatggctcatatcagtgggcttgtggctgcttctgtggtagctgacccttttgagtattgtgatattgttacaacaacaactcacaaggtatgtatgttccgaaatatgaaacatgatttccatttgtatttagacaaaaagcgtttccagattatctgttagtaacacacttttaccttactagtctttgagaggtccgagaggtggcatgatcttcttcaggaaggatccaattaatggggttgatcttgaatctgccgtgaacaatgctgtcttccctggtttgcaggttgagatattcaccattatttttagctctcttagataattcttctcccaacgtgattaaaagttgtctgaattgtatatttgaagggtggccctcataaccacacaattggaggattagcagtctgcttgaaacacgcacaatcaccggaattcaaggcgtaccagaaaagagtacccacccttttacttgatcattaagttcttctgcaccggataaagtttgtaaattttgcttctaacaagaatcttttgctgcttgtttaggttgtgtctaactgtagagctctagctaaccgattggttgaactcgggtttaagctagtttctggtggcagcgataaccacttggttctcgtcgatcttagacccatggtaagtttacaaactgtattaatggcttgaataaatcaacttttttcttaaaccagaaaatcacttatgataatgcggtgtcagtctaacatttttgttgtggttagggtatggatggtgcgcgggttgagaaaatcttagacatggcatctattactctcaacaagaactctgtccctggtgagttcgtcctcctactctcggtcttcttcttcccatttgaaaagtcaattctgagagaagccctcttactcttttacaaaacagaaatgaagtcgataagtagaacttgtagaacacaactgttaaagaaatgcttaattgttgttatagcaaaatcatcaattgctatatttatatgtttgattcccctagagtagtgaaattgagacagtgttgttgtgtatgtgaaatggtgaaacaggggacaaaagtgcgttggtaccagggggaataaggataggatcccccgcgatgacgacaagaggactgtcagagaaagactttgtagtagtggctgacttcatcaaggaaggtgtggagataacaatggaagccaagaaagccgcgccgggttcaaagcttcaagatttcaacaagttcgtgacatctcctgagtttccattgaaagagagagtgaagagtctaaaggagagagtggaaaccttcacatctcgttttcccattcctggcgtttaagctataaacacacacagatatgctcttgttgtaccttaattattcacctttttcatctgtcttttagggtttttacttgcttgtgtcccaagtttaaagttacagttgaatcgagagaaattattttcaaaaataaatttatttgtggaacaatgattcgtctatgttcccaaatctcaatcaatatttagtataatcagttgttgtgaaagaaaaaaataataataatttgaaaaattgtttttagcgaagagagcaaatatttcgcgggatgtggcgaatatatctcacccaatctttctctttcatgcgttttttttgttgccttctccaaatattcatctctgcctcctctcagggatagactctctctctctctctctttctttctaaaactaaaacaaaagaaagagagagatcccaaattcaacgataacagattttatctgctttttttttttgtttcgtttcttctccctcgctccccaccggattatatatctcaccggaaatcggatctctcacgttggtcgatttttctattacggcggcggccatcgctttcttcttctcctccaggtgcgtgcgatcttactttcttccttgagactttggtttacgcatgcacctctgtgtctctgtctgtacgtacgtcattgatttcatttcggattttctcctttgtttgatcgatttgtatagttaaacaacattaatatggaaactcaagtgtttttaggctttgattcttctacctttccattataatcatctctgttgttaatttcattgcatggatccacacacaggaggccttcattggtattgctatggagggagttaaattcccatttggtgggattattaacgatttcaatggaagaagaaagtgttacaaacaagactggcttgctgccttcaattctggtgttaggtattatactttgttcatgcttttttcgttaacttctttcagaatttttttgcaaacttatcattgaacaatg

SEQ ID NO: 23718 - DNA, 3000 bp, Unknown; identical to SEQ ID NO: 18695
  misc_feature (1)..( 3000): 2750-1469P.txt file - cDNA_ID_2150218; gDNA_ID_2926212; Annot_ID_202687

SEQ ID NO: 23719 - DNA, 3003 bp, Unknown; identical to SEQ ID NO: 17033
  misc_feature (1)..( 3003): 2750-1469P.txt file - cDNA_ID_2150231; gDNA_ID_1620618; Annot_ID_162102

SEQ ID NO: 23720 - DNA, 3000 bp, Unknown; identical to SEQ ID NO: 17034
  misc_feature (1)..( 3000): 2750-1469P.txt file - cDNA_ID_2150231; gDNA_ID_2926212; Annot_ID_202679

SEQ ID NO: 23721 - DNA, 3000 bp, Unknown; identical to SEQ ID NO: 18669
  misc_feature (1)..( 3000): 2750-1469P.txt file - cDNA_ID_2150259; gDNA_ID_1620618; Annot_ID_162128

SEQ ID NO: 23722 - DNA, 3003 bp, Unknown; identical to SEQ ID NO: 18670
  misc_feature (1)..( 3003): 2750-1469P.txt file - cDNA_ID_2150259; gDNA_ID_2926211; Annot_ID_202643

SEQ ID NO: 23723 - DNA, 3003 bp, Unknown
  misc_feature (1)..( 3003): 2750-1469P.txt file - cDNA_ID_2150263; gDNA_ID_1620618; Annot_ID_162130
tgatcattaacttgtcatgggccttgtagctgccactagtttaaaaagaactattttcccccttaaatgtgcctttttcttgataatatacaggtagttacgttatggtttttagtactacgttatcatatagtataaaaataagaagatgcttaatattgttctataaaactataaaaggcatctaacaaacaggtttagcgtaagatgtactttcatctaacctatacatctactgaatctaaacaggtctaccacctactctaaacgcgtgccttaccaaaacttggaaaattttcaattttgattatcatgtgggtgaaaaacatcaaaaaattatgttgatgtattatctaaagtcattcacaattaatcaagaagtgtacttgttgtgagactgagagtagctttcacttgtcaatgagtaggtacctattcatttggccaataacaaaatgacaacaaaaatttacctaaaacttaaataatttagtgatttggtcagtaagcctaattaaaccctcaagcagtttacatcacaatcaagcttgaagcttttatttgatttggccaatgaaggagtttataaccctaaaacagttcacatcacaacaaaaccatttgactcgttttctgattaatttggccaatgacgagtcatcttgggcttcacatatggacattgatgttgtgtccatattacgacacacctttatcattttccatttcaaaaaaagaaaacaaaaacacccatgctattttttaaaacacacttaagaaacaaaaatcaaattaaatctttaacccatgatatctactaccaacaactaacaatattttacatcaagtgtgtcgtcaatagtagcactattatctaatttagatctagataaagccagataacactcttttgaactttccatgcttgaatatttcttctataatatcatcattaagaaatcttctcccattctttggcttcttttagaaaagatactctattagattttttagcgagtgaaagaagaataaaagatggaccagtcaacaaatggagacgaacaagtctttatacattgttgataatttgcgtttgcgaaggatgtggtcacaagaaaagaaagtattccgtccctctctctagctaatggcgtgtgatgtgactactacactctctcttctatacatgtttattttttccagaaatgtctgtttgaatataaactttttaagtgaaattgttgggcacaacagaaaactttaacaccaaaaaaaacgcgacataacatgttgcattgttgattagtttctttctactagagattagcattctcagactccgaacggtgactgcgttttacagtgcggaaaaaatgcggtacggtttaaatattaacgaaaatacataaatacatatgtataaatagagattttaatactgttatagcactgttgcggtacggttttgggtgcggttttgatcaccatttacagttttttttattcagattagatttctgtaggtaattttgattaaaatcttttggtgataacgcagtcttttcgtctggactggacccacgcgaggacccaaaatttgaccaatatgcgatccaataaacaaaaaaatggtaatttaaaatgaaataatccacatgtatgatgtcaaatgtattattttacattcacaattaaatacaggtcagcgaagtaattgttttgacaataaaaatggtaagaattacttggaacgtcatctaacatcattttaattaatactaacatcatcattttaagtaaacaatttttttagaataatagacagaaattaaggtggagttcatctttttgataattagcattaatccctactctaccatgtttataattgaaatcattatttcatattttgataattagaattaatccctactctaccatgtgtataattaaaatcacaatttcatgaaaaagatcaactaacttaaccaaaactatagtcaatgtcttttactgaaaaattcaagaataaaacaatcttagttacgtcactatcaatctccattagaaagaatggtttaaaatcattagtttttaacaaactctaatcatgattattaaaaaaaccaaagaagcaaggaagacttttattcaaaagattaaattttcttccatttaaaaaaggaataaaaagagatgtcaaaataattactacaaaaaacattagaatttgttggatatgtaattgacctaagaccataacgagcactcagacctcgtcctttcaatttagtctgcgcttgacacggcactcttaaaaataaacacggtgacgtagacgccgtcaccgtccaatctcatcgtcccttttttaattagcagctcaacgatttaaaatcgactgtcatttacaaaggctgtcatttcaacactcttcagtccttcttccttataatcctctcatcttctttttctccaggtttttaccaaccagttttttttttttcaaccctcgagatctttctttgcacgaacaaacctcgaaaaactcattctttatcttgacccatctgaaaaagtttctctttttttgtcggaataccatagagtttcattattttcgttttagggttctttttttgtaataaataattggaagcagaggagctatgctcaagttctcagatgaaattctcgcttttgatcatcagttcttgtttctctttctgatttacgctggatttgcaagggaaacactctgactttgtcaggactcttctgtgaaattctgcaagtttatgacttttctagtgctttttaactgtttgtgagtttgaagaaaacaaatttcaattgagttgctttggaatccgttgacataatagggtaagtcaattttcttactactaatatttatcccattaatgcttgagaattgttcctaatagaactctttttgctgtttgttaaatttgcagaatttagaaacttctcgtttagatg

SEQ ID NO: 23724 - DNA, 3000 bp, Unknown
  misc_feature (1)..( 3000): 2750-1469P.txt file - cDNA_ID_2150263; gDNA_ID_2926211; Annot_ID_202641
tcattaacttgtcatgggccttgtagctgccactagtttaaaaagaactattttcccccttaaatgtgcctttttcttgataatatacaggtagttacgttatggtttttagtactacgttatcatatagtataaaaataagaagatgcttaatattgttctataaaactataaaaggcatctaacaaacaggtttagcgtaagatgtactttcatctaacctatacatctactgaatctaaacaggtctaccacctactctaaacgcgtgccttaccaaaacttggaaaattttcaattttgattatcatgtgggtgaaaaacatcaaaaaattatgttgatgtattatctaaagtcattcacaattaatcaagaagtgtacttgttgtgagactgagagtagctttcacttgtcaatgagtaggtacctattcatttggccaataacaaaatgacaacaaaaatttacctaaaacttaaataatttagtgatttggtcagtaagcctaattaaaccctcaagcagtttacatcacaatcaagcttgaagcttttatttgatttggccaatgaaggagtttataaccctaaaacagttcacatcacaacaaaaccatttgactcgttttctgattaatttggccaatgacgagtcatcttgggcttcacatatggacattgatgttgtgtccatattacgacacacctttatcattttccatttcaaaaaaagaaaacaaaaacacccatgctattttttaaaacacacttaagaaacaaaaatcaaattaaatctttaacccatgatatctactaccaacaactaacaatattttacatcaagtgtgtcgtcaatagtagcactattatctaatttagatctagataaagccagataacactcttttgaactttccatgcttgaatatttcttctataatatcatcattaagaaatcttctcccattctttggcttcttttagaaaagatactctattagattttttagcgagtgaaagaagaataaaagatggaccagtcaacaaatggagacgaacaagtctttatacattgttgataatttgcgtttgcgaaggatgtggtcacaagaaaagaaagtattccgtccctctctctagctaatggcgtgtgatgtgactactacactctctcttctatacatgtttattttttccagaaatgtctgtttgaatataaactttttaagtgaaattgttgggcacaacagaaaactttaacaccaaaaaaaacgcgacataacatgttgcattgttgattagtttctttctactagagattagcattctcagactccgaacggtgactgcgttttacagtgcggaaaaaatgcggtacggtttaaatattaacgaaaatacataaatacatatgtataaatagagattttaatactgttatagcactgttgcggtacggttttgggtgcggttttgatcaccatttacagttttttttattcagattagatttctgtaggtaattttgattaaaatcttttggtgataacgcagtcttttcgtctggactggacccacgcgaggacccaaaatttgaccaatatgcgatccaataaacaaaaaaatggtaatttaaaatgaaataatccacatgtatgatgtcaaatgtattattttacattcacaattaaatacaggtcagcgaagtaattgttttgacaataaaaatggtaagaattacttggaacgtcatctaacatcattttaattaatactaacatcatcattttaagtaaacaatttttttagaataatagacagaaattaaggtggagttcatctttttgataattagcattaatccctactctaccatgtttataattgaaatcattatttcatattttgataattagaattaatccctactctaccatgtgtataattaaaatcacaatttcatgaaaaagatcaactaacttaaccaaaactatagtcaatgtcttttactgaaaaattcaagaataaaacaatcttagttacgtcactatcaatctccattagaaagaatggtttaaaatcattagtttttaacaaactctaatcatgattattaaaaaaaccaaagaagcaaggaagacttttattcaaaagattaaattttcttccatttaaaaaaggaataaaaagagatgtcaaaataattactacaaaaaacattagaatttgttggatatgtaattgacctaagaccataacgagcactcagacctcgtcctttcaatttagtctgcgcttgacacggcactcttaaaaataaacacggtgacgtagacgccgtcaccgtccaatctcatcgtcccttttttaattagcagctcaacgatttaaaatcgactgtcatttacaaaggctgtcatttcaacactcttcagtccttcttccttataatcctctcatcttctttttctccaggtttttaccaaccagttttttttttttcaaccctcgagatctttctttgcacgaacaaacctcgaaaaactcattctttatcttgacccatctgaaaaagtttctctttttttgtcggaataccatagagtttcattattttcgttttagggttctttttttgtaataaataattggaagcagaggagctatgctcaagttctcagatgaaattctcgcttttgatcatcagttcttgtttctctttctgatttacgctggatttgcaagggaaacactctgactttgtcaggactcttctgtgaaattctgcaagtttatgacttttctagtgctttttaactgtttgtgagtttgaagaaaacaaatttcaattgagttgctttggaatccgttgacataatagggtaagtcaattttcttactactaatatttatcccattaatgcttgagaattgttcctaatagaactctttttgctgtttgttaaatttgcagaatttagaaacttctcgtttagatg

SEQ ID NO: 23725 - DNA, 3000 bp, Unknown; identical to SEQ ID NO: 18665
  misc_feature (1)..( 3000): 2750-1469P.txt file - cDNA_ID_2150267; gDNA_ID_1620618; Annot_ID_162131

SEQ ID NO: 23726 - DNA, 3003 bp, Unknown; identical to SEQ ID NO: 18666
  misc_feature (1)..( 3003): 2750-1469P.txt file - cDNA_ID_2150267; gDNA_ID_2926211; Annot_ID_202640

SEQ ID NO: 23727 - DNA, 3003 bp, Unknown
  misc_feature (1)..( 3003): 2750-1469P.txt file - cDNA_ID_2150275; gDNA_ID_1620618; Annot_ID_162135
ctcagatcgtagcttattggtcaagattgatattattcaattgcagaactacccaaatttgggacaacatccaaaaaattatagttgaaaacaacccaatagagatatcgtccagtaaacttatctctagttactcaaaatataaagatatatttctgtttaatacgcatagtttttctagacaatgtgcttatgaattatgatctagaaaatcagatataatagctagtagtaactatttaaatacaccgatgatggaaacgaataagtgaatacaccgatgacggaataagtgaatcttgtaagtagggcaagcatggttatcaccgccatcattatgttcgaagcataatatttaatcatgtttttatttgcgaagttatttttactaatatagctattcaaactataagagactatagtattgatcaaagtgtgaattcgtcttttatatatttttttatcatctagggttcatgcatgctttacaaggcacggagttttaagcaagcacgcgtatacacacccacacgtttacatatctatatacatgtttgaagcgcgaataaatccagctaattttatttgaatgaaattttactaaacagaaaacgaatttgaatttatatttggctctaaaccaaaaaggtaagggtacacaattgaaattcattttaaaactaaaattaactgattaaattccgaatctaacttgtagaaaaagttggtgttgtcattaactaatgatttaatatgcttgcactcgttcatatcacaatgaattattttgtcgtaatagccctagtgcaggtaaattttcactatcataattaacaaaatagatatatatcaattgatttcatagttaatgagtaccaaaaaaaaatcgaatacatacatgtacattaattgatgctatacaacttaatatgggaagccaactacccatatatgaacaaatattaattatcttctaaatttcaatttcgactttaagaggggcaacgtagagtgataatcatatgagttgtcaacaaattaataaatggttcaaatcattaatcatgcatgccacgatatatctcgttatcgattgtggacaccaaatcgttacactagcgaatcggtatttattctattttattagggtgataataatacgtataaggaataaatatgttgtatatgcaccatacttgcgtcgtacttaattataagtgtaatgaaattataaatttcgacttgcaatggactatatatgcttgtgagaagaaaaaaacaaaaaaaaaggatactcaatatgatctggaacggtttaggctgtcctattcgtgacttaattagtgtccctttttaatttgattttttcttataaaaatgatctggaggaatggtgccaaatttggattaatacttatatgctcaaatcttgattaaactacaccaacagtgtcattttcaggctattattggaaacgtcagaacagttttacaaaatgccaatgattcacctgtttttactaggagtttttgtagattacatatgtttaatcaagttatttggataatcaaatatattgtcaatattgtaatttatgatttaaattactagtttcaagcaaggactacttttttttttgtcaaagagcgaggactacttttgtcaaataatactgttggcttttagctaaagttttacaatcatagcttaatacacatgtaaatgtattcataactagtggttaaaaactgctagcgaatttataattactcgttttgtcaccaaatatctttcattggatacatatatacacatcaattagaaaatgctaatgctagaatttgaacaaaaaggaaagaaatgggaaatagtagtacaagtaagagtgcgttacacttgtaactgattcattggccgaggcaactccacagtttcttactcttaccattttcactacatttgtttccctcttgggaacctttattttcttcttcttacatttattatcactcttttattattctttttgtttttgtccgtatattttagtttggttttttatagccttgcaaaaaacgacactggtatatctatactttttatctagatgactagaccaggtccgaataatccaagttttgtactactatagtataatattaaaactatgagattcctgcgtatctgtaatttaatttttataaattcattctaacgttataattatcaaagagagaattattttcctattttttcatggaaagtgatgaagatagtgtgctgcaatagtcggacccaccggagacgaagaagtgacaacaacgagtattgtgtatttcctattttaccctttccttttcgtttcgcgcgtcttcaccggcttaccggctacacctgtcctcctatatatcggtttcatcatttcattataaaattaatagcacaaataaaataaaacaagtcttattaaaatactaaaaattgttactgtatttaattagttgccgccgcgccggccgttacgattgcagcagcacgactgttttcagaactctttttttttattaacaatcaatcaaaattttttatttgttttagtattatatggagacaacaagcaataagttaaacagaaaaatcctaacgttcttatttttttactattaaataataattttgacatattacaaaattatgaattaacctaaaataaatagaattaattctctttttgtacgatgtagagagatgggaatattatatacccttttgaaataaagacgactcgaattagatttcaaattaaagctgaagaggtcctttttcgtcattttggagtttctttttgagacatttttcctcttttgattttcgctttttccgtccgcttgacttctgctgtttcagactctcaacaacggagagagccggagagattgaagaagaaaggagaaatatttgcgaacccccaagaatcgtttttgttgattgactctctcatg

SEQ ID NO: 23728 - DNA, 3000 bp, Unknown
  misc_feature (1)..( 3000): 2750-1469P.txt file - cDNA_ID_2150275; gDNA_ID_2926211; Annot_ID_202637
agatcgtagcttattggtcaagattgatattattcaattgcagaactacccaaatttgggacaacatccaaaaaattatagttgaaaacaacccaatagagatatcgtccagtaaacttatctctagttactcaaaatataaagatatatttctgtttaatacgcatagtttttctagacaatgtgcttatgaattatgatctagaaaatcagatataatagctagtagtaactatttaaatacaccgatgatggaaacgaataagtgaatacaccgatgacggaataagtgaatcttgtaagtagggcaagcatggttatcaccgccatcattatgttcgaagcataatatttaatcatgtttttatttgcgaagttatttttactaatatagctattcaaactataagagactatagtattgatcaaagtgtgaattcgtcttttatatatttttttatcatctagggttcatgcatgctttacaaggcacggagttttaagcaagcacgcgtatacacacccacacgtttacatatctatatacatgtttgaagcgcgaataaatccagctaattttatttgaatgaaattttactaaacagaaaacgaatttgaatttatatttggctctaaaccaaaaaggtaagggtacacaattgaaattcattttaaaactaaaattaactgattaaattccgaatctaacttgtagaaaaagttggtgttgtcattaactaatgatttaatatgcttgcactcgttcatatcacaatgaattattttgtcgtaatagccctagtgcaggtaaattttcactatcataattaacaaaatagatatatatcaattgatttcatagttaatgagtaccaaaaaaaaatcgaatacatacatgtacattaattgatgctatacaacttaatatgggaagccaactacccatatatgaacaaatattaattatcttctaaatttcaatttcgactttaagaggggcaacgtagagtgataatcatatgagttgtcaacaaattaataaatggttcaaatcattaatcatgcatgccacgatatatctcgttatcgattgtggacaccaaatcgttacactagcgaatcggtatttattctattttattagggtgataataatacgtataaggaataaatatgttgtatatgcaccatacttgcgtcgtacttaattataagtgtaatgaaattataaatttcgacttgcaatggactatatatgcttgtgagaagaaaaaaacaaaaaaaaaggatactcaatatgatctggaacggtttaggctgtcctattcgtgacttaattagtgtccctttttaatttgattttttcttataaaaatgatctggaggaatggtgccaaatttggattaatacttatatgctcaaatcttgattaaactacaccaacagtgtcattttcaggctattattggaaacgtcagaacagttttacaaaatgccaatgattcacctgtttttactaggagtttttgtagattacatatgtttaatcaagttatttggataatcaaatatattgtcaatattgtaatttatgatttaaattactagtttcaagcaaggactacttttttttttgtcaaagagcgaggactacttttgtcaaataatactgttggcttttagctaaagttttacaatcatagcttaatacacatgtaaatgtattcataactagtggttaaaaactgctagcgaatttataattactcgttttgtcaccaaatatctttcattggatacatatatacacatcaattagaaaatgctaatgctagaatttgaacaaaaaggaaagaaatgggaaatagtagtacaagtaagagtgcgttacacttgtaactgattcattggccgaggcaactccacagtttcttactcttaccattttcactacatttgtttccctcttgggaacctttattttcttcttcttacatttattatcactcttttattattctttttgtttttgtccgtatattttagtttggttttttatagccttgcaaaaaacgacactggtatatctatactttttatctagatgactagaccaggtccgaataatccaagttttgtactactatagtataatattaaaactatgagattcctgcgtatctgtaatttaatttttataaattcattctaacgttataattatcaaagagagaattattttcctattttttcatggaaagtgatgaagatagtgtgctgcaatagtcggacccaccggagacgaagaagtgacaacaacgagtattgtgtatttcctattttaccctttccttttcgtttcgcgcgtcttcaccggcttaccggctacacctgtcctcctatatatcggtttcatcatttcattataaaattaatagcacaaataaaataaaacaagtcttattaaaatactaaaaattgttactgtatttaattagttgccgccgcgccggccgttacgattgcagcagcacgactgttttcagaactctttttttttattaacaatcaatcaaaattttttatttgttttagtattatatggagacaacaagcaataagttaaacagaaaaatcctaacgttcttatttttttactattaaataataattttgacatattacaaaattatgaattaacctaaaataaatagaattaattctctttttgtacgatgtagagagatgggaatattatatacccttttgaaataaagacgactcgaattagatttcaaattaaagctgaagaggtcctttttcgtcattttggagtttctttttgagacatttttcctcttttgattttcgctttttccgtccgcttgacttctgctgtttcagactctcaacaacggagagagccggagagattgaagaagaaaggagaaatatttgcgaacccccaagaatcgtttttgttgattgactctctcatg

SEQ ID NO: 23729 - DNA, 3000 bp, Unknown
  misc_feature (1)..( 3000): 2750-1469P.txt file - cDNA_ID_2150283; gDNA_ID_1620618; Annot_ID_162138
tatccaagtttgttggttatttgagattactaaagatttcaacttttttgtttttgttttcgttttccagggcacttctttgtggaagggttgttgggtgttgtcattatcattctcctcactcggaagagttataaacctcccaagcgaccattgaccgagcaggttctgtctcagatcctttcttgatattggtttgatagatcacataggatttggttcgtggtgacatctttgatgtgtggtatagttgaaatgtattgagttttcggggttttttattactcaggaaatagatgagttgtgtgatgagtgggttcctgaacctcttataccgccaattactgaagacatgaagcatgagccaccagttcttgaaaggtaacgtagaagacttctatgtagttcgttgtatagccttattctgtgttatgcttaaagattttgttgggtccatacagtgctgctggaccgcatacaacagttaatggaaaagatgtggtgaattttgcctcagctaattatcttgggctcattggccacgagaagttgctggtaacgtgaagctactttgttttcaatacaatctctcttctgtttgaatagttttatttaagatttgtcttatgccaggaatcatgtacttctgcattagaaaaatatggggtcggttcttgtgggcctcgtggattctatggtacaattggtaagaagacaataattttctaaatagatactttggttcatccattggctcgcttggaaagggttcttactgtttgattacttctcttgactagatgtccaccttgactgcgaaaccagaatatccaaatttttgggtactcctgattcaatcctttactcttatggactttccacaatgttcagcacaattccttgtttctgtaagaaaggcgatgtcattgttgcgtaagtacacaatttcttataacatcgttctacttattagattacgttagtagaaatcccaggattacattgaacatctttgtttgaaacttttttatctcgatattaaactcattcttgtcttttctattttcttagtgatgagggtgttcactggggaatacaaaatggacttcagctttcaagaagtacaattgtgtacttcaagcacaatgacatggaatcccttcgaattacccttgagaaaatcatgacaaagtacaagcgctcaaagaacttgaggcgttatattgtagctgaagctgtatatcaagtacctggcagttttctttcttctcctgcttccatattttgaaaattctccctgaactgtgatgcttacccatttgcctttgggtatgttaaaatctacagaattcaggtcaaattgcgcctctggatgagattgtaaaactaaaagagaagtatcggtttcgtgttatattggatgaaagcaactcttttggtgtgcttggccgttctgggagaggtcttgcagagcatcatagtgtccctgtaagtatgattgacacacattttagtagtgttctcatttgccaaacctgatgctaaaaatttcacggcggtttatctttaaacagattgagaagatagatgttgtgactgctgcaatgggccatgcattagccacagaaggtggattttgcactgggaatgcccgcatcatcgattaccaggtaaacatcgatcatgctgattaactaattacaaacaaaattaaaaaactaccgataatagaaacttttctctgggacgctcaaatgcacagagacttagcagttcaggatatgtgttctctgcttctttaccaccataccttgcaagtgctgctatcaccgccattgatgtcattgatcaaaaccctgatatgttagttaagctgaagcaaaatgttgctctgttatggaaaggtttgatcttcaagttttaatctaatctagcaacaattagagtttgatttagtttgttatcttcctctaattgaaaaagaaatgctgggaacaacgcaggattgtcagatatcaaggggatgtcattaacaagcaaccgggaatcacctattgttttcttaaaattagagaaatctagcggttcagctaaagatgatttgcttctacttgagaaaatggctgaccgtgtaagttcattgtttctttgcaaaaccaaatctagaccctgtccccgtttcttgacatgactagatgcatgcaggctctgaaggaagactcattgttggttgtgagttctaaaagatcatttcttgataaatgccggttacctgtgggaatcaaactctacgtctcagcgggacattcggaatccgatcttcttaaagcgtcggagtcactgaagagacttgcttcagagcttctactcaagtcctgaaacaccgaaactcttttttcttcaagaacaacaacactgaagggaactctttgaacacatccgtgtgagatagtagacaacagaatccgcagagtcagtagcttgaagatgttcatagcagattcctaaactggttctccactttcagtgatgggcttgtggttgatctgaagctcaattgacgaaggaggattatcgaagacaatggcttcttgttcttacatttatttcatttgatcatctgagttctttttttttttttcctactcatacccttcaatgatcaagtagcttagtgttgttgccgaaattcaaaaactttcaatttatgggaaacaaaaaagttcatgtgctgacatcagcctcttaaggctttctgagtttcttgcggtaaaagaaagtgtttttgcctctctcaaatctcaatagtattgacacgtgtcagtataacactcgtgcataattgacacgtgtcagtataacactcgtgggcggtataatgtgaacgaaagagcgagggacaggtaatctctcttcctctgtttctaagtttgtataattagaactgcataacgaaaaacaaaaacaaaacagtgaccaaaaaaagaagaagaatcaatg

SEQ ID NO: 23730 - DNA, 3003 bp, Unknown
  misc_feature (1)..( 3003): 2750-1469P.txt file - cDNA_ID_2150283; gDNA_ID_2926211; Annot_ID_202634
gtctatccaagtttgttggttatttgagattactaaagatttcaacttttttgtttttgttttcgttttccagggcacttctttgtggaagggttgttgggtgttgtcattatcattctcctcactcggaagagttataaacctcccaagcgaccattgaccgagcaggttctgtctcagatcctttcttgatattggtttgatagatcacataggatttggttcgtggtgacatctttgatgtgtggtatagttgaaatgtattgagttttcggggttttttattactcaggaaatagatgagttgtgtgatgagtgggttcctgaacctcttataccgccaattactgaagacatgaagcatgagccaccagttcttgaaaggtaacgtagaagacttctatgtagttcgttgtatagccttattctgtgttatgcttaaagattttgttgggtccatacagtgctgctggaccgcatacaacagttaatggaaaagatgtggtgaattttgcctcagctaattatcttgggctcattggccacgagaagttgctggtaacgtgaagctactttgttttcaatacaatctctcttctgtttgaatagttttatttaagatttgtcttatgccaggaatcatgtacttctgcattagaaaaatatggggtcggttcttgtgggcctcgtggattctatggtacaattggtaagaagacaataattttctaaatagatactttggttcatccattggctcgcttggaaagggttcttactgtttgattacttctcttgactagatgtccaccttgactgcgaaaccagaatatccaaatttttgggtactcctgattcaatcctttactcttatggactttccacaatgttcagcacaattccttgtttctgtaagaaaggcgatgtcattgttgcgtaagtacacaatttcttataacatcgttctacttattagattacgttagtagaaatcccaggattacattgaacatctttgtttgaaacttttttatctcgatattaaactcattcttgtcttttctattttcttagtgatgagggtgttcactggggaatacaaaatggacttcagctttcaagaagtacaattgtgtacttcaagcacaatgacatggaatcccttcgaattacccttgagaaaatcatgacaaagtacaagcgctcaaagaacttgaggcgttatattgtagctgaagctgtatatcaagtacctggcagttttctttcttctcctgcttccatattttgaaaattctccctgaactgtgatgcttacccatttgcctttgggtatgttaaaatctacagaattcaggtcaaattgcgcctctggatgagattgtaaaactaaaagagaagtatcggtttcgtgttatattggatgaaagcaactcttttggtgtgcttggccgttctgggagaggtcttgcagagcatcatagtgtccctgtaagtatgattgacacacattttagtagtgttctcatttgccaaacctgatgctaaaaatttcacggcggtttatctttaaacagattgagaagatagatgttgtgactgctgcaatgggccatgcattagccacagaaggtggattttgcactgggaatgcccgcatcatcgattaccaggtaaacatcgatcatgctgattaactaattacaaacaaaattaaaaaactaccgataatagaaacttttctctgggacgctcaaatgcacagagacttagcagttcaggatatgtgttctctgcttctttaccaccataccttgcaagtgctgctatcaccgccattgatgtcattgatcaaaaccctgatatgttagttaagctgaagcaaaatgttgctctgttatggaaaggtttgatcttcaagttttaatctaatctagcaacaattagagtttgatttagtttgttatcttcctctaattgaaaaagaaatgctgggaacaacgcaggattgtcagatatcaaggggatgtcattaacaagcaaccgggaatcacctattgttttcttaaaattagagaaatctagcggttcagctaaagatgatttgcttctacttgagaaaatggctgaccgtgtaagttcattgtttctttgcaaaaccaaatctagaccctgtccccgtttcttgacatgactagatgcatgcaggctctgaaggaagactcattgttggttgtgagttctaaaagatcatttcttgataaatgccggttacctgtgggaatcaaactctacgtctcagcgggacattcggaatccgatcttcttaaagcgtcggagtcactgaagagacttgcttcagagcttctactcaagtcctgaaacaccgaaactcttttttcttcaagaacaacaacactgaagggaactctttgaacacatccgtgtgagatagtagacaacagaatccgcagagtcagtagcttgaagatgttcatagcagattcctaaactggttctccactttcagtgatgggcttgtggttgatctgaagctcaattgacgaaggaggattatcgaagacaatggcttcttgttcttacatttatttcatttgatcatctgagttctttttttttttttcctactcatacccttcaatgatcaagtagcttagtgttgttgccgaaattcaaaaactttcaatttatgggaaacaaaaaagttcatgtgctgacatcagcctcttaaggctttctgagtttcttgcggtaaaagaaagtgtttttgcctctctcaaatctcaatagtattgacacgtgtcagtataacactcgtgcataattgacacgtgtcagtataacactcgtgggcggtataatgtgaacgaaagagcgagggacaggtaatctctcttcctctgtttctaagtttgtataattagaactgcataacgaaaaacaaaaacaaaacagtgaccaaaaaaagaagaagaatcaatg

SEQ ID NO: 23731 - DNA, 3003 bp, Unknown
  misc_feature (1)..( 3003): 2750-1469P.txt file - cDNA_ID_2150393; gDNA_ID_1620832; Annot_ID_169712
cagagtgctatggagggtataagctttttgtcattaacatacaaatatagtcggattaactaatttcggaacttctaatgcgttatttgcatttgtgttgatctatatggctaatcttggatatgtataatgatgtgtaggtttggccatttcaagattttggaccacttggaccaaccccaacttagcatatgagttagcttggtcattaggccgatgagatcaccgaggcatattggtagtgtggttaatcgctgttgccgagtgagtctggctcttgattgactatgagatgcaggatcatcataccatccacaaagatgggagaatctaaacgctcaggaaaagtgagtatatggtttagactttagagcaagtaacattatgtattttggtctgtcactctatctgagagtggcctctgtatcaaaaagttaaaacaaagatctattgtggacctggacatggaatcggtatatcatcaaattcctagataatatccttttcaaaccaaattataattctctttttgcaaaatctttggaatgatcgcagcattgaaagtcttgggaaggataacacgacaggcattgtaacacaagttgtcttggacactgcgttgttgagagagacaactaatggactcagaatcaaaacataccaggtaaacaactaaaagcttgatcaaatctttaataaaacttcgatttggtttgatccgcatcaattttttctcttacgagcagggaggttctggttacgttcagggtattcgattcacaaacgtagagatgcaagatgttgcaaaccctatactcatcgatcagttctactgtgattcttcaactacatgttaaaaccaggtttccttataatatacaatacaaacttgtaattgtgattcttatatcgaaccaatactcagttatgttctcttcccttttttggtataaatgcagacctccgcggttaaaatcagccatataatgtaccggaacataaccaaaagtgcgaaagccatcaaatttgcgtgcagcgacacagtcccttgcagccacattgtcctcaacaatgtgaatcttgaaggcaaagacggtcaagtcgaagcgtactgtaattcagctgaaggatttgggtatggagtctactcgcacaacgacaaaggcttggaccagactcacaagtcagaggaagccgagactggccacgatgagctttgatggtgatgttcaaagtgttgttgtagtgagggatgataggtaaaatagtttaatgaagcatatggtacagtaaaatgatcttatgtttgtgttcataatcaaccataactaaggttgttgttaacagcatttgtccaccttttgtatcaaatatttttctttccccatacaaattcatgtgcaagtattttttcaacataaatttttgaacttggaagtttattgtttatgaaactgaaatacgtattgatatcggaaactaagttatatagtagatgtttagataagttagttaattgtcttagactttgggattagaggaacaagaacaacacatcacatggggactccaaaggtcgcaattgatatgaattgtttgatatgtctgtcacgtgtgaaaaactcttcctttcttcacaattatcattttctatatatatatatatatatatttgtcaaacaattattttctaattaatattcccaatttgtgtgtagctgtaaacatcaatgaccaatgccaacccattttatttactctttcaataacaactcaacaactacatcacctaagaataagatatagtcttggcttgcaatttgcctgtaatgtgaaatcaaatgatcgattatatggtataataatataatgataacatattaattccctcatatggtatgaatagtgaattggttttgtctatatccataagaatgaaaataaagaaataatttccttaaaacaaagaaataaccaaactatatgctataatggacccggagaatctaagtcgtgcgagaataatgattttgtttaccattaaaaacaaataattgttcatgctcattccatttccaaattattctgaacaaacaagatagagagagtgcaagttgtaagaagcagattttttttggtttttctctaaaaccaaactaaggagatctctaagttgtggcagagaagaaagcttctaaggtaaaatcacaaactctccactttttccaatatcttattgactcatattgcatttgctttcaagttctgataaatctctaaaaggtttatgacttttagaattactctttttgatatttaaacacattgttcatatgactatgcagatccagatcattgttttttttccagcttttgaaactaaacattcacaaatccaaccctacatcatattccttgtgacaacattgttgtttttttgttgtctatatgtttttcaagtaatacaagtatagaaaaagctttatctacaatattttcatcctgaaaagaagccaaaagcaaatttgttacaacattcttgataaaataacacgtcattagagaattaacaaagttttgaagcagagggaggaatgttcaatactagaaaattaagaccaaaaagtcaacatcacttttataagagaaaaaaacgagtacaactgtaacatttacttcgactttatctacgagagtattgaacaagtgggatgcaattgacaacctaaatcatggctcatagttacaaattatatatgactaatcattttccttttctcttaaagttgtttatagtttagacaataataataggagatgaagagaatgtgatgctactaactcttatttaaatgaggaatataaacaagatctggtcctgacattgttatgaatcttcaaactcaggacacaaaccaagatctcgtgtagaggaaaaaaaacctttcctccatgtttaagttttgagcttctggttggtttcaagtcctgtggagaaaaatg

SEQ ID NO: 23732 - DNA, 3000 bp, Unknown; identical to SEQ ID NO: 7438
  misc_feature (1)..( 3000): 2750-1469P.txt file - cDNA_ID_2150435; gDNA_ID_1621146; Annot_ID_173054

SEQ ID NO: 23733 - DNA, 3003 bp, Unknown
  misc_feature (1)..( 3003): 2750-1469P.txt file - cDNA_ID_2150519; gDNA_ID_1620793; Annot_ID_168383
ctttacgagcagcttttgtcggcgcacgttgcttgtttgagaatcgcgactccggttgatcagcttccgagaatcgatgctcagcttgctcagtctcaacacgtcgtcgctaaatactcagctttaggcgccgccgctcaaggtctcgtcggcgacgataaagaacttgaccagttcatggtatataaatttcagatttttttgttctataattttataattaacgatttcataattatacttagcacaaattttaataatacacaccgacttaggtttcttgatttttgaaatcttaaaatattaaaatcaagatttgtgtttttagggataaacaagactaaaatcccaaaaaaagagcttatgatataataatggtcatgatgatgaagaaaatacaaattttgttctttgtgtttattgtgtgtttgattaatgttttttttatggtgtagacacattatgtgttgctactgtgttcatttaaagagcaattgcaacaacatgtgcgtgttcatgcaatggaagctgtgatggcttgttgggagattgagcagtctcttcaaagcttaacaggtgagaaaatgaatcctgtgattagctcatgaatccaatagttagttttatgacattgacaagttttgtgttttattggtgagattaggagtgtctcctggagaagggatgggagcaacaatgtctgacgatgaagatgaacaagtagagagtgatgctaatatgttcgatgggggattagatgtgttgggttttggtcctttgattcctactgagagtgagaggtcgttgatggaaagagttagacaagaacttaaacatgaactcaaacaggtaataatcaacaaacttgttctttgaactagttcatgaactaacaatgtagagggctttgtcttgttgatgaaaagggttacaaggagaagatagtagacataagagaggagatattaaggaagagaagagctgggaagttaccaggagataccacctctgttctcaaagcttggtggcaatctcattccaaatggccttaccctactgtgagttcactcatctaacatctctttataacttcttcaagttcattcattgagccataaccaaatattggtttgtaggaggaagataaggcgaggttggtgcaagagacaggtttgcagctaaaacagataaacaattggttcatcaatcagagaaagaggaactggcatagcaatccatcttcttccactgtattgaagaacaaacgcaaaaggtattattatactttaatatagtcttgtaacataaccgaaaaacttatggatcggactcaaagaagactgaaacttttgtttgtctgatgaaagcaatgcaggtgacaatagcggaagagagcggttcgcgtagaaacaacaaacatatgatgtgaattggggaggtggaagatgggatttgaaagcagggttttagggatttaaagttgagaattttatggaggagtttggattatacagagagaggggacagtattagaaagtaactttttgtgcaattacatagtaacgtagtttggttatgtgattatgcccatatattttattaagtagcacacaaaccaaaaagaaaatatgaaaactgaagatgcaggcttttgtttaatgttttttgtttgtttgtctgcatgagttttttttttatgaaccatcagataatcatcatcatcatccataatatatcttgtgaataaagatagtgagagaggagaacattgggatgcacaagttttcttaatctactagtatatgttacgcattgaccaggtgcatatgttaatttgtatcgcaccacttggttagcttaatctatgtgactattatacagtatatgtttcgcattaaccgtacttaacccatcttatgattcttatccgcttagttcgtagtatttattgcgatgtcacattccaactcgtgatattggcttgataagtaaaagacattatacatggtagatgacgacaaaaaataaaacataccccatcttacataacgtagcttgctgcgtacttttgtaattgtaataatttgaaacgtgttcttttttctagtcaaaattgtttgtttatcctcatcttgttgtttcgtttgtcacgtttgtgatagccacaagttactgtaagttttcggcgagatttttctatcgatcacggagagattctgcacacattaacaaagataattagagtgtccttaagtattttggtcgcctctctattagaggaccatacaaagttcaaagactagtctcatgagaagcccattagtacattagattaaatctaggaaagtagattcatataagtagttttgtaatgaacatcaaagttgttaacttagagaattgtcatttggattgtataaatggtttgataaacgaagtctaacattagtatgtgttagtcttctaaattcaaataataatcggagttttggtctcttggacgatgcttcacagtgatattcaaaagtttaccgttatcacccaccaactagagaagccaaattaggtcttttaccaactgtagggtaaagaactgtcttcatgtaatcattataaccaccaccatcttgttatgctttgtttcttcttcaaattgcagctttcaatatacaacccggtttacgttctggtttacactttagacgtttcaatttacaaaattgggccgattgacagatattggacctggcccatcaatctaaaaatgcgctattttgaatcaaagacctatttaaatcttccgacgacgactccgttcacatagcagaaacagtggcgacaaaccctatcacggagccaacccgcattttcctctagctttcgcaccgcctctcgctctctcgccccaccggttcgtctctgacattttgtgcttgatttggccgttacaaaattctgattgctagttcatgagattcctttttgacaggtgacataaagatg

SEQ ID NO: 23734 - DNA, 3003 bp, Unknown
  misc_feature (1)..( 3003): 2750-1469P.txt file - cDNA_ID_2150527; gDNA_ID_1620793; Annot_ID_168385
aaaaattaaactttgatgacaaccggagctacaaacctctccggtgaagaatctttgccgtcgccgccgtcatcgaaattaagactatagtttttcagatcataagtgaaatcaacatctctcctcatcttcttcctgccactactaaaacttcttataaagtttttccactttggtcccgcgattttctcagaaatctcttttagccccttaagtttctcacttccccaattccctcttctttcttcctgcaaacaaccactccagccaccgcgactgcgagactcgtcgtctcctctccgccaccgggtgaaactgaaactacgaaagtacccacatccacaaaacgcagccgtttcttcataatcatcggagagcagattctctctatcagtggccatgataataaaaaacaaaacagcgagtttttgattaaaggaagagactcgatactatatataggtgaatgagtttaggacacgtggcgtgtcgaccgttgggtgatagtagtgatggggtatgttgttggactgttatgagaagagtgtgacagtgatgtgagaggagcgggattaggattcgctggctaatgatgaaagacagctgtgaaggcgggagcgaaacggttgctttcttttctcttttgtctttaaggataattatgaaacgatttattgatatgactaaatattaaaactttaaacaaattagaggatatctgaaaaagtgaaaagtgattacaattattattttaagaactggttgttgatgatgatgatgataataactgatagatatttttattttgatactatatatatatatatatatatattggtttcattttcatatatataagagagaaattttgaccaaaaaaatatgattctaaaaacgttgaattaccaaatatttgtactagtttggaatgaaattccatatttttagaattttgatatcaatttgcatcttcttgtttaggtgaattcttgtagtattgatttacatataaaatcccatataaaattccctacataacatttgaatctcgttaggtaatttttagattttcatcaatattgactactattaaataacacattattttcttgacaaaaaaaaaatgaaattactaagacaataacaccctgcatttggccatttactatcaaatatcgaatatttctagattataagttgattgaaattctatagaaatttatcatctaataactaactacatcatattggtttataaggttttattagctgaaaattatagttaaaaacaacgaataaagtagtactttcaatgatgaaaaaaaaaaagtagtactttcaatattgcaataagtaagattaaaaagtgtttaagtaagacaaaaaaagaaaaaggtaaccactaaccagcctggaaactgatgattagccgtggattaaaaagcaaaactggtgtttagagatttgctaaaccaaaccaaaccaactcacaatattataaaaaggctgtcccatgttgcctaaactaatctcattattataacgatgactcactgatcacccaataatcattatgtttttgtcctaatcatcataacaaagattgcattatgaaaagtttttgtttaattaattactcgatccaatctagagtacgcagttctatctctgatgtagcatgagatagattcaaacaagacttgactaagctgatcattagtccaaccatttcaagtgatatcttcagtttttgaggcttttagatgggcctaactagtccaacaatttcagtgatacctgcaatttgggttttgatatctttcacttatagatgtttcataaaaaatccaaatcttttttactaattacaattattatatattcaataaaatcatgcagttctatttcatgaatatttaagcatagagactcatgtatttttcttagaaaatattggcaaaatgagaaaagttaggatttaaatggtatgagaagatttgtaactaaatataaaataaaatattttagtacgtatgacctctagaaagaaaaaaagtcaacaaaattaaattcataaaccgcgtggagagaaaataaaggaagatcataacaaaacaaatcaaaaaatttgctaaatataatatccgacacatctatatatacatttttgcagccactttgtaaaataaatcatggagttgagatttatttacagcggctgccactagcatttaataattgtttttgataattagaaagaaaatcttctaattaaatatttgacatttaacaatcttcccaaaatctctctaccttacctacacgattaattactaaaataaaacttccaaaatatttaatattatttaattacttcaaaattatcatttttgatattgcttttctacatgattataatcatcaatccgtatagatatttgatagcatttaattactacaaaattacaaaatatttagacaataattcataaacatatcataaataagatcaacattaataaaataaatgagttttttttagaggacaggttggcagggtttggcaggacgttacttaataacaattgtaaactataaaataaaaacattttataatatacacaatttacaaacttttatatatattattttaaaaaataaattgttctcgcggtgtaccgcgggttaaaatttagtatgattgtaaattacaaaacttaccaatttaaccacttaaaccaaaaaccaaaaagagaaaaaaaaaatcattaaaaaagagtaatttaaggattccatatttaacttcaaaataaacctaaagtacctcgccgccaataggcgatggcttcaaatatgtagtttcttggaaatgcgttgattttttctgtaagactaagtcttcgtacataacgcacgactatatatatataataagtccttaagaactcaaaacaaagtcttctaaatcatttgggcgaaaagtccaaattaaatcaaaagatg

SEQ ID NO: 23735 - DNA, 3003 bp, Unknown
  misc_feature (1)..( 3003): 2750-1469P.txt file - cDNA_ID_2150531; gDNA_ID_1620793; Annot_ID_168386
aaaagtccaaattaaatcaaaagatgttcaaagttgcaagagcgtcacagtatttggcgatcaccggtgctggtatcgaagacatcaagctttccaagaagtcatgggtgtttccatggcaatcttgcaccgtcttcgacgtttctccggtgaactatactttcaaagtccaagccatgagcgcagagaagcttccttttgttcttcccgctgtttttacgattggtcctcgcgttgatgacgatgacgcgctgattttgtatgctaggttgatttctcctcatgataaagattcaaatcatgtccatgagcttgttgaaggtgttattgaaggagagactcgtgttcttgctgcttccatgactatggaagagatctttaaaggtaaaccccaaatttagggttttagatgttaagtttattggtgaatatgaggatgttaaggtagatttaatttatgtagatatttttcggatttgattggtgacataaagttgtagtaagactagggttttgtataatgatttggctaagtctctttaaataaatgtcagtttgattggttataactaagacatattttgtgaaagttttggttaaaagagtttttgattttatgtatttgaagggacaaaggagtttaagaaggaggtgtttgataaggttcaactagaattaaaccagtttggtcttgtgatatacaatgccaatgtgaagcagctcgttgatgtgcctggacatgaatacttctcttacttgggtcagaagactcaaatggaagcagcaaatcaggctaggatcgatgtctctgaggccaagatgaagggagagatcggtgccaaggaacggactggtcttactctccagaacgcagccaaaattgacgctgagtcaaagatcatatcgatgcagaggcaaggagaaggaacaaaagaagaaatcaaagtgaggactgaggttaaagtgtttgagaatcagaaggaggctgatgtagctaaggccaatgccgagcttgcgatgaaaaaagctgcttggactaaggatgctcaggtggctgaggttgaagcaaccaaggccgtggctttgagagaagctgagcttcagactcaggtcgagaaaatgaacgctttgactcgaacagagaagctcaaggctgagttccttagcaaagctagtgttgagtatgaaaccaaggttcaagaagcaaattgggaactatacaacaagcagaaacaagcagaggcggttctatacgagaaacaaaagcaagccgaggcacagaaagcgcaagcggatgcggctttctactcaaagcagaaagaagcagagggacttgttgccttagctagtgcgcaagggacttatctaagaaccctcttagacgctgttcagaatgactattcttgtcttagagacttcttgatgattaacaatggtatttatcaagagatcgctaagactaatgcgatggcggttagagacttgcagcccaagattagtgtttggaaccatggtggagaacagggtggtggtagtgggaatgctatgaaggatatagctggactttacaagatgttgcctccggttcttgatacggtttatgagcagactgggatgcagccacctgcttggatcggtactctacgtggtgcggaaccgaagcaagtgactcgcagctaagagaatagtggcatggtttggtcgtttacttgtggttgaagatacatccatgcgaatgtaattttttattattttaatcctgttggaggacttggcttattcttgtgtgtgttttgaagtgtgttattgatattcttaattgaatcgtattcgtatatgttgaaaataaattaaaatgaggaataaccaaaaccagagaattatttcatttttatatattggagtcttgaactatttcaaattcaaagaacgatagctcgtcctttcgggaacaaccaaaatcaacgccctccgatatgtgggctaaataggagaaaactggttcggatggtggctagaaaataaaattttgcggttttggcggaaaaacacatcatgagaatggaaggtgttatgcgcatagtctgatgggaggtgatctagccactgactgactgactaagaattgtgttatgcgtgtagtctagcggaaggtgaaaggtaggaatagtcatttggagaattaggacgcgcttgggtcatcgaccaggacaggagcagctagctactagctgactatctgaagtcttcttcatgtgtagtttcttggaagtgggttgaagttttatcttattaggaatttgcaaaaagtctccgatcctattttattctaaaatatcatatgtcatagtcaaacaagtttgaagagattttggcaaactcaacgtcttattatcaaaatgaaaattgtaatgtatataagcttggtcatggtcaacatttaatataagatgtaactatatgctatacgtaaacatccgagattaggatctacatctattggtttaatgaattatgatttattttgtttggtttatatatggtgtacttatatactatagtttaccctaccaaaaagaaaaatatactatagtttaaaagattttgaattttatgtatttgctgtatcgtgtacatacatttttatttttttttgctaaaccgtgttcatacatataaatcttgaattttatcaaagacaatttcatcaaattttaacaaatatgattttttttgcaatacaattcagcttgacaaaatctaaatagaaagtcaagaatgaaacattcttcacaatcatcctttttttttgtgatatatacaagtttgtgaaatttctttaacatttctctaacagtgacagacaaagtcttgtaacatgtcaacgactatatgtaatatataaacacttctcacgaaacaaaaaaacaagtacagctactcattcttcgtctccaaaatcattttggcgaaaagcaatcaaatccttagatcctagacatg

SEQ ID NO: 23736 - DNA, 3000 bp, Unknown; identical to SEQ ID NO: 5473
  misc_feature (1)..( 3000): 2750-1469P.txt file - cDNA_ID_2150625; gDNA_ID_1620792; Annot_ID_168329

SEQ ID NO: 23737 - DNA, 3003 bp, Unknown
  misc_feature (1)..( 3003): 2750-1469P.txt file - cDNA_ID_2150649; gDNA_ID_1620792; Annot_ID_168335
aggtgatcatcaatcctagtttcagacatcagttttggtctctacagttatggaatagttttccttgtaagttgtctgtctatcttttacctgtaactgttgttagtgtcaggtgcttccaaagaagtgccatctcatggaaaattgtatcaaccaaaacacaattttgactcattgagatttgtccttcacagtaaaaaaatgttatagatttttgtagactcattaataaaagcaagtgttcatgcgccattgtatatttatttagttttggttaccaagtgatgttccagtggtaattacattccattgggcccaaataaacttcacaataaacaaatatgaaaaaccttttgtttcttgttcaagaaactcgacctaagcaataccagattctctaaaacaatacaaactgggttttctctcttatgccaaccttttcctgtcttgagtgaaaagcctagttgatacccatttaaacaaagatctataaagacaaaatttgttgaaaacttggctttccattaacaagtaattatttctttcacaatatcatactaaagatgaattatacgtatatttgtcgtaaataaacggagcgatatatcatagagaaatatcctaaaatagcactcaaacaagtttaatggacaattaaaataacattgtccacaaatttgtaaaattagctttagtgaatttactcagtaactattttataattatataaattaacaaaattaattacaatttgaaatcacgattaatttacaaacaatcgtgtgaaacgtcaatcgaatgttaataactttatattagttttttactatgaatttgtgtttttttagagttttagagattgtgtgttaaatttagtaacaaacttactttcatgctatttatgagaattgcatatttctagaccaattttttattattataattcatataattattcttgaattatttatgtgctatttgtgagaattaccaatttctagaccaatattttattattattcatataattaaacgtttattgaattattttagctctaaaaaatataatgaaatttagaattgttatagaaactttaaatgactcaaaactgatctttgtttttttgtcaaccacacattaattaaaaactgatctttgttaaacatctaaatattgaaaaacaaaaggattaccaccgcacctatcctgcatcgtcttgtaccatttgcattcatcagagccattatatattcatgtggctgtcacatccttatatacatttcaacttataaatttaattttgtacgtttagcagatgttggtgaattcatttattcaagcttaaggtttaactcgttcttgtctcctttaggttcataacatttaatggacaacaactactccaaatatccgtggactttaccacgcgacgcaccgacaattctctagccttttcattaattgatcagtaaaaacacttctataattttaattattctcagaaattttaaccggtagtaacataaacgtagatgatcgaaaaagatgaaatcgaggtctctgttttgtgtcgaattaatagatctataagaaatcaaacaatgaaaattaaatagatgaatgaaatatgttttgacgacgttttcacgtcactgtttaagttatctgttagtaaaatttgatagcatttaatttgaattgctatgtaactcggaataaattcgacggcaagaggtgtgggatgtgatcagtcttctaattaagtgtaatctttacaaaaaatcagtatgagttaatacaggtttataaatagaaagacatctacagtaaaacctctataaattaataatgttgggactgcaaaattttattaatttagaaagattttaatttatcgataaattaatatttattaatttatagagagattttcgtaatttagtaacttttcaaaaatttctataaaatttttttcattatagaaaatatctttcaaaaatcaattacaagtaaataataatatcatgtttagaaaacaacaccaaaagtttttgataaagtaaaatactataactaaatttaaataagaataaatacaaattttaagcaaaaaaatattagaattatatttcaaaataatttcttacatataatgtatatatagttgatatatttataaaattattaatttatgatattgatgggaccatatatttacataagattttttaaaaagttattatcttattaatttatcgatttgtgtcactttttacactgatcccaactcgggactggaagaatttattaatttatagaggttattaatttatcgagtattaatttatagaggtttaactgtatatgaataattgaatacacatgggacatcattatagttaccttagtacgattttatgcatttggttaccaaaatccactaggcttcgtaattggttgtgggtcagtgtccattcgatagtttgcattagcgataaacacttaaaacagtaaaacgtgatctatttttaaacaataacatttcttcttatcaaatattcacataattaatgaagaaaagagacgaattgataggcaataagaaatatgatcacttggtaccattgtatgcatggtatgaactgacatcaagtatttgtacgttgtagggtaattattaacattgtagaatgacaagtatgatcaaatggaaaaggattagttatatgtagcaaaactagtatttgtacttggactatcttgtcatgtagttttcctaacgctatatataatccaataaccccatgacacggaagagataggggacatacaataaatatcagtagagaggacgtgggaaaagcagagagttaagtgagtagttggagatagaaagatcagagacgaggaatctctctcccactctcactttctctcctattcttagttcgtgtcagaaacacacagagaaattaagaaccctaatttaaaacagaagaatg

SEQ ID NO: 23738 - DNA, 3003 bp, Unknown
  misc_feature (1)..( 3003): 2750-1469P.txt file - cDNA_ID_2150883; gDNA_ID_1620758; Annot_ID_167084
agatgcttgaatctacaaaacaagaacaatgatgcacagatcacttagtcaccgtagaagcattctgatctacttaagtgagttagtcttatatgcgtcgggtttctgacctgcttattacgagcttcatcatcttgacgaaaattcaattcctgaacaaaaatgaaaggcatttatcatcagtaatctctgttaagtaacccttctctaaaactgtcgaagaggaaaaagaaaagttgatgcttcacctcctcctcaaatttatcaatatttttgaataaagctgctattaaggcatcaaagtttgggtcgtctcttaaagaacgtcggcttgcacaatgttttctgcaagtaggacactcattgttcctgaaaatgcatttgccagttaatataatacagaacaagctttacattagactccctaaagaatgctgaacatgcaaatggaatgcataccccaatctcattgacttatcaatgcactctcggcaaaaccggtggagacattccatcacagtccttgttttccttataatccctaggaaatgaaaaccagtgctggcatcagtcgaatttagtaaagatagagtgaatgactatgtaaaaacagggtaatgagaaaagttggcaagcctgaacagtctacaatgactaccagctttatgttggttgatgaaagtagctgaagcctgatttttcttattaggtagttaaacattcacaataatggtgactgagaggcaactgaagctgattgactttgtaatataaatgtggagaagagtacctaaacatatcgagcattgcacgtccttacagatatccgctagatcaacaaccatatatctgcaagggaagtcaagactttatcaaataacaaagatcaccaactactgtgttgcctactataagaagtctgtctcagtcaaaaacttatgttaagctaaaaagagactaatcaacacagatcaatcctcggcatttaaacacaacagtatcaataacatgcaagcaagaaccaaacaatgcatcggatcaatgaaaacaaaacactgaggacatcagagaccacatgttccgcttaaaacctatcaaacacaacagtgaaaccaatcatcagaaaatgtcgaaagggaaaagaattgttactctgattctgataactctcctgctgaagaagattgacttctttccttagaatctgaaactgttaataccaattaaagactttcatgttgtacatactaacgcattgattgattcatgtatctcacatcacatacgtatataaatatatccacgactataaacaagagcaaaaaacgaaactttcaccttcttcttctcctaacgcttcctcatcctctgcttctacttggtcacgtttcacgtcgtcttcctcatctccactttcgtccttctcatccattttgtctggatcttcttctttctccacagcttcaggattgaatctttcagcttctgagttccgacccagttggtcatcttcttcctcggcggcggagaagctcttcaaggaaggcattgttgattgtttgataacagtgatctctgcttctaggaagagagaggaaaaagaataaagctttgacctttatctctccatctacgtctctctcttgtgggcttatttgtatttcctcgttctttgttgtttcggttcggtgccgatggaaagagagaaaggagaacaaaggaggacgaagaagaaagagagaaacttctttaccttttagcatacttatattattttataatattttttttttgttaattatattaagatccttgggaaaaaaaagtaaaaattatactaagatcccttatactaaaatcttattatacatgttgtgaattcttaagctaaacctcttattttctcacaaatccttaatcatatttttgtttttttggttcatactgacgcgtctaaaaagtttggactttcaccataatttttctaattttacgagataaaagatacaatatacgtttttgaagagacgtatattatccgattaccaaacaaaatcaaaattagaggatgtaattcacttccaaaagtgtaccacgcgtataattgacccgtctctacttctgcttggatatcacatacttagtttagattttttttttcgtaaaaggcaaaatatcaaaacttatttaggagaatttgaccacaaaatatttcatatgtatttctaaactaatataatttcttcttattttattgttactatattttttcttttttttgtaagttagaaacctattaaaaacactatttgggtgataagttattgaaatttagtgataacttttttcattatggtagattgtattagttaaagtaactttgatgatagatcttagttcaaattttttttttgtttctcatagtgtttgtagtaaatgatgtgttattgacttattgttaaacatatattggatatataaataatatatcatttaatatgtattgtcaatagctagctcaaaactacgaaatattggaattgaatacaaatgatattgaattgaagtaacacaacattgtcggccttcttctcgtgtgttagcctacttgccaacccaattccattatctccacactttgcattacatgtgacacatgtgtgaagtgtaaataatatatcaactatcaggcatcataattctttaaataaatcaagattggtaaaaaatattacaataatttaaacttttaacatttgttactaaaaatatcaacgataacacaatttacaaacgttaataaatttgttacagacaaggcaatttttattttcgaaaacataataaaatacattgggccatattaaatcggcccattaagttcactataacttagaacttagaagcctttattgcttccctctcaatttccattttttttttggttctttttttctttctgcaatcggtcgtcgtcgttgtgcttaaacccttaccggaatg

SEQ ID NO: 23739 - DNA, 3000 bp, Unknown; identical to SEQ ID NO: 5501
  misc_feature (1)..( 3000): 2750-1469P.txt file - cDNA_ID_2150917; gDNA_ID_1620796; Annot_ID_168474

SEQ ID NO: 23740 - DNA, 3003 bp, Unknown
  misc_feature (1)..( 3003): 2750-1469P.txt file - cDNA_ID_2150962; gDNA_ID_1620796; Annot_ID_168499
tttggaaaccctgtttcagacttgttcaccattcgagaagcagacatggtcttctaccgttagaaatactcggttgacatctacgagcacggaaagcgcgaggcgggttctgtgtattttgctataatcatccaagaacaataatctgaatctttgcaactaattattttgaacaaacctatcgaagatatttgattgcaactacatttaagtttggagattgtaagaagttaatttagttttcgttatcactctcttctcaaacaaaatgtaatgtgtatgtacacgttaaaacatatgtcccccatatatatctatatttctcgtacactgcaaatttactttctaacataactcaggtgataaattgatttgacagctaacgcttaccaacacatgtatgacattcaatacaactgtaattgccccaactaaatccacaatagtggttattaaagtgaagaacttactgactcttcccgacgattgactctcgaagataactaagaacatggctgactaatgttggtctgaccttggtccattgatacgatcaagcactcgtggaagagacattgtctacttataagtgtgcattttacatgttttgagcatccatttgttatcattattgcatcatatcaccactgttttataccatttctcatcatttgtcatcactttgcatgtttaggatagttttgcatgcatattgtatatttgtgttgatttcaggtgatttggagctgttaacgagctaattggaagaagcggacctgatcatgtcaaaccactcgacccccaggtcgagcagatgctccacgacatcaaaggaccacttgaccccctggtcgagtagaagacttcaccactcgactacctggccgagtaccaccatgagagtcactcgatcacttcactcgatcacaccactctaccatgaagtcgagtatcaccatcaccatcactcgattacatactcgattgccagctaatcactcgacctctcactcgaccacctgggtcgagtactgttcttaatccgtcccaatactgcgtcgttttgagtattagggtttcagaatatctcgctataagtagcatgtactttacattttcgtagggctaagttttattttccgcagacactgtgttcttgacattttgtaatctggatttctcttaatcaattcagtattcagcattttgttcttgatttcgtttactgttgttcatcatgttatcaccttgctattactctgttgttatcatgttttcattctattcaacgtgtatgttctctgcaatgatgtctgagtagtgaataagtttctgaggatgggttagagtagtttagaattctcagtatgctaggtggttgagtttgattgatatatcccttctggattagttgttcttaatgcatattgctttctgatcaactggaattggagcccagacatttctgcgcccaaaaggtgttcgatgaaatgtttgaaccactaattctagagattcgtggctctgtaccaaggtattggttgcagggagcgttttggctttaacttgttgattcgtaagcctgttaggttagctctcgtcaatggtgattaagtctgggactaagttaacttgagagtctctgttgcggtgacacttagatttggtttttgttgtctagggataatttattgagcatgtcaatcacctgtaaactgaggaaacaaacctactcaattaccccatcctcgtgaattctttatgtgattgatttctttgttacgctactgttgtttactgcatcttgtcatctgttgcttagtttctacaattctttcctgttactcgacctgatactcgaccacccagttgtctagcaacagactgtgcagtcgagtatctttgtttcggttactgcatgttactcgaccagtcactcgaccaccccagtgctctgcaacgagttgtgttggtcgagtgttttactgtatccgcttgattttctgttttctgcatgttcacttaggactgctagaacacaccaaaacctgttattgcttggcttgacttagtgacttctgatcacatcttgattgttagcatcacatccatttggattgacaacctaaaatactacaatgacatgattgatgttttaggataattgagtaaaaacctattatcaatttggcgctgttgccgattaggtgtttgtttgttacatttaagatttcaaacttgcttagatcaagttctttttcaattttcagttcagttactgactgtgtatttttgttgttgtctttttgatccaggtacacctctgctgtatgcaaactcgatcaccagagaaccagaacctctttttcaacaataacatcgaccacatggcttgcgaattcagagaaagaagaaacacagtccaccttttaccccaacaaccactcgaaatggctgacgaacagaatcaacagaatggtcctgccaacattggtgatgtagatgcaccatcgtcagaggaaaggaattgcacctcctgctatccagaacaataacttcgagattaagagtggtctcatctcgatgattcagggaaacaaattccatggtctaccaatggaggatccactcgaccaccttgatgaattcgataggctctgcaacctaacaaaaatcaatggtgtaagtgaagacggattcaagctctgtttatttccattctcgttgggcgacaaagcacacatctgagagaagaatctgccccatgactccatcaccacctgggatgattgcaagaaggcttttctagcaaagtttttctccaatgtcagaactgcaagactcagaaatgagatctctggcttttcacagaagactggtgaaagcttctgtgaagcatgagagcgtttcaagggttacaccaaccaatgccctcatcatggcttcaagaaagcctctctgctcagtactttatatacatgcgttttaccacgcatcagaatg

SEQ ID NO: 23741 - DNA, 3003 bp, Unknown; identical to SEQ ID NO: 20690
  misc_feature (1)..( 3003): 2750-1469P.txt file - cDNA_ID_2151223; gDNA_ID_1620774; Annot_ID_167624

SEQ ID NO: 23742 - DNA, 3000 bp, Unknown
  misc_feature (1)..( 3000): 2750-1469P.txt file - cDNA_ID_2151232; gDNA_ID_1620774; Annot_ID_167631
cgtacttgccggttgcagcattgtaaccgaatttcacgttatcgttggaaagcacctgccaatgaatagagacatctcttcaagcatctgacttgaaatctagagataaaaaagtgggaattatgttatctgttgttattaccttctcgctaactacacttccattaacaccagcattcttggcgattagttttagggggtaacttagtgctcttttaactatatccgctccaacctaaagggaatcatcagcaaagttagagaaaccgaaggttcatgagttaaaatctgaagacttgattgatttaccttttcttcatcattatcaagcgtggctttaatggcatcaaccttggaagcaagacgaagcagagtgcaaccaccaccaacaacaataccttcctcgacagcggcctgaagaattaaaatcctgattagttatagttcacgagtatgcaaataacacgcttctcaagcctcagaaatacaaaatcacctttgttgcattaagagcatcttcaactctcaacttcttctctttgagttctgtctcagtttgtgctccaacctttaaccaatacataacgagcttaacttaatatctctgaaacacatcttaatcagacaaaggaaacttaaatagtttttagtttacctgaatcacagcaactccaccagagagctttgcaattctctcattgagtttctccttctcgtaatcttgctccgcttgctgcacaaaccaattaccattgcaatgtaactacactatccacaaaaagtaaaagaggtcccatatatgctatactcttttactatacctcaataagatttttaatctgtgtaacacgctttttcactgcatcctgtgtgcttccatcacccactatggtcgaggtctcctttgtgaggacaacctttgaagcattaccaagaacctcttttccagctttgtcaagtgaaagaccaacttcctcacggatcacagttgctgcaagcgaagatagaaaattaggacaagataaaaactacaaatatatgcgtaaacatagggctcatcaatgcagacagaacttacctccagttagaatggcaatatcatcaaggtattggctcttgcgctctccaaaccctggagctctgagagctgctatcttcagtgtacctctaagcttgtttacaacaagagtcgctaaagcttcttgttcaatgtcttcagcaataattaatattgggtatccgcctctaattgcatcctccaaaacaccaacaagatcccttgcattggtaattttcttgtcaacgagaagtaactgcaatcataccaaaacattaaagatcgttgttatactcatatataaatatctttagtggctaaatagtctgccaacaaaattcatcttctactcagattcaagaaacatctaccttgcaattgtcgaactcgacggacattttctcgctgtctgtcacaaagtaaggagagatataaccacggtcaaattgcattccttctacgacgtagaggttgttctcggcacttttaccctcctcaagggtcaccacacctttcctgcccactttgctcattgcttcagcaatcatatttccaatttcgtcgttgttacccgcactaacagctgcaacatctgcaagttcactgtcttcaacctacatcgacatgacttacattcagaaccttttgaaaaagactcttaacatattaaaagaaagagagttctataaatttgaaacctccttagacattttcttgagctcggtaaccaaagcctttgctgtcttctcaatacctctggtgatcaaaacagggtttgcaccagcagctaccacctgaataagataatcttaaaattagtacaaaagtttttgaagtttcacatagagaaagctgaaagaagaatgttacacagaccttgacaccctcagcgataaaaccttgtgcaagaacaacagatgttgttgtaccgtcaccagccaagtcattggttttggcagccgcttgcctcacaagcttagcgccaatgttctcaaccgggtcttccaactcaacctacaggagaaagtttgaaactctaagactcagttgaatgagaacaaaaatcattatcagaggggtaataattccatacctctcttgcaacagtcacaccatcattaacaattcgtggtgatccatacttgctctcaagaacaacatttcgtcctttgggtccaagtgtaacaccaacaagatctgcgagcttgttgacaccagcctagtacaacacaaaattagaaaccacagaaaatgtaaacctttagctccggtttgggaatgaagtttccattaactttttttaaaaaagatacttacttgaagtctcctaatggtagtcccatctttgttgaaatgtaattcctttgctgcgcacacaattgcagaactggatcttctgggtctaggacacacactttgtctccttccaaatgagcttgaagacaacttgctgataagtttcttatcagatttgtgaccattcggagcaaccattgaaccaatagaagatgtggcagtgaaagttgacgccattttatccacttcaaagacagacaaaattcagcacttagataagatttcaaagatataaaaaagactcttcttttcatctatatacggttaacacaatcaatataacagaaagaaacaacaacccagtaagctaaagtaataaattttcacaacaaaccagaagaaaggcgacaccttcgaaagcagagctcaataagaacacaattgacaatctgaagaaacactaatccataaattttattacaaaacacccaaaatcatggaagtaatgaactaatacaagttttcaaaagcttacaacaaattcttatccaaacaaaacatacacacataaactgtggcactaaaaaatgcagaggataaactattccaagagtaaggattaagaaactaacagaagtagagagatg

SEQ ID NO: 23743 - DNA, 3000 bp, Unknown; identical to SEQ ID NO: 2136
  misc_feature (1)..( 3000): 2750-1469P.txt file - cDNA_ID_2151342; gDNA_ID_1620492; Annot_ID_158646

SEQ ID NO: 23744 - DNA, 3000 bp, Unknown; identical to SEQ ID NO: 7347
  misc_feature (1)..( 3000): 2750-1469P.txt file - cDNA_ID_2151370; gDNA_ID_1621141; Annot_ID_172819

SEQ ID NO: 23745 - DNA, 3003 bp, Unknown; identical to SEQ ID NO: 15925
  misc_feature (1)..( 3003): 2750-1469P.txt file - cDNA_ID_2151380; gDNA_ID_2926149; Annot_ID_197953

SEQ ID NO: 23746 - DNA, 3000 bp, Unknown; identical to SEQ ID NO: 7345
  misc_feature (1)..( 3000): 2750-1469P.txt file - cDNA_ID_2151380; gDNA_ID_1621141; Annot_ID_172824

SEQ ID NO: 23747 - DNA, 3003 bp, Unknown
  misc_feature (1)..( 3003): 2750-1469P.txt file - cDNA_ID_2151380; gDNA_ID_1620725; Annot_ID_165936
tgattttcaactcatagaaacagcataaaacataggggtaattagaagaagaaaaattatggtaatgtaaatttaaaataatgtagacaaaatcaattaagatgttgtatttgtttaattcttgaccgccactatatgtaaagcctattcttgttcgacgagcagtttgctatttttgaaggctttaaagatttgtttgtcggtcttcaaaaattatatatgattcttttttgtgttttgttctcattcaaacactaccgaaaatcactttccggtagatcatctatcatgaaattgctccagcacaaacatgcttaactgtaaagttttttcgatatgtttaatcgaaaagataagtgcatttcgtggatatagatgatctaattaatttttaaaactcttttcattcactactatatatcctgaaatcgggatgttacaatttatttctgaatttttttaagtgtctcctacataactagatatgttacaaccactatggatcttatttctaaaaagtattgaatacatcatgtctaaattgattaattctcaaatatactacattttatgctattttctgtaacttccatcagaatccaaaatttttttttaacataccataaattttaattttatgatttatgaaatatttatagattttattattttaatatttttaaaaaaatccaaaataatagtatctttttagctaaaatttcttttactgtattttaggatatttctctatctaattgtacaccatacatataaccataatttggtgtaattcagatttaaattaggatgacatcaaaattagtcaaaatcaaaatagcatctctattttattcttatacttccaaggaaaaaaaataaaagagctttaaacgtgtcgttatagctgtaaagctggtgatggaactggtaagttggtaactgcttcgaccaccgtacgaatatggtggttactggttaggctacacggtaatttcttttatttacctgcagtgagaaaggtaaataataatgagtgagagagtaatggataattctgaatttgtaatgtcattgtcattgttttgtcagtaagtgatgctttagttaactcatgtttatccatatgggccattctatgtttcatatatatatatatatatatatatatatatatataatatgttattttactttttataattttgattcttagtctttatcagaaaagaaaaagaattgattcttagttcttggatttatgaaaagtaaataattatgtgcaaagagattctttgataatttttcaatataataaaatattaagaatattatttaaaaaaaaaaaattgagggaagagattcatttgattttacgaaaacgctaaaacgagatggattaaatgttagcctttttcatgacaaatatgttgtaaagcataatcatgtacaaggtaaaataattttgggtttttagtgtttatgtcgtaattctataatttttctcaactacttttttctttgtataatttagcatttttaatatcaaacacttttgattccaaatacagtttatttttattttcttaagactacttaccaaacacacataaacggtttttaatatctaaagttaccaaatgtatgtatttcaaaaaacaatcatcagcaaatttagatgttttgaatttttattagaagaaatgcattgcatggttataattagaaaattaaaataaaatataaatcaggattatatgaccaaaaattgttttaacttttacttagcatttacacataaattaacagaaatataatattttttaaaaaataattttcttataataaaaattgttatattgaaattcgaatattaagatttggcaagtcgccaaaatataatcacactcaacaaatttatattgtctcactaattatctgttcataatacatatatcaaatgtataaatcttaatataataaattttaaactaatttcaactgtcatactaaacaagagtttatacaagtctttacctagtgttatactccctctggaaatgttaaagcttattgtttaagaaaacatattatacacctaaagaaaactatgcattcgttttgtgccatgtgttgttttactagtcgtgactcgtgattctccatatcattacgttaatcccaactctcaactattattatgttattttttactatagaatggaaacttgtagattacttatatgaaggttgattaaaatgtaattaaaatctgtatcttttttataaaaaaagtctcttcatatatgttttagttgatgagtgatggacaagtaaaaataaataaaataagtacatacgttttgttttagtgatataaatatatgatgccaaaaatgtacatatattttctggataaatattagagttgtagatccaggtttgctatgatctagctctgtccgaaaattgcagagcgtgatcttttctctgtagtacgaccgatttgttttactttatccaatcgttttaactttttcaccacggttaaaaaagttaaaatcagatctctaaccattttctcaacgaacctcgctaatatttctcatttaatcaaaatttaatcaccattaatcctttggttgattactcttttgtcctcttcttcttctctcttctctttcttggtggctctcttcttatagccactgttccctttttcattgtattcctcaaatctctttacttgatcgttggttctctcaaaaatcagatttttatttctgggttttgttcgattttgtgatcatggcggtcattgagagcgtcggagctaatactactgtggaagctggtggtttgatctcgccgtcgccgccgtcttccgtcaccagtcaagaatcaggagcttcttctaacaacgatcacggtggaaatggaatccatgatgagatcggagtccacgtggcgagatccgacggtggtgagagttttaagcgtgatatg

SEQ ID NO: 23748 - DNA, 3000 bp, Unknown; identical to SEQ ID NO: 2147
  misc_feature (1)..( 3000): 2750-1469P.txt file - cDNA_ID_2151453; gDNA_ID_1620494; Annot_ID_158683

SEQ ID NO: 23749 - DNA, 3000 bp, Unknown; identical to SEQ ID NO: 2143
  misc_feature (1)..( 3000): 2750-1469P.txt file - cDNA_ID_2151461; gDNA_ID_1620494; Annot_ID_158685

SEQ ID NO: 23750 - DNA, 3000 bp, Unknown; identical to SEQ ID NO: 2151
  misc_feature (1)..( 3000): 2750-1469P.txt file - cDNA_ID_2151501; gDNA_ID_1620496; Annot_ID_158702

SEQ ID NO: 23751 - DNA, 3003 bp, Unknown
  misc_feature (1)..( 3003): 2750-1469P.txt file - cDNA_ID_2151548; gDNA_ID_1620495; Annot_ID_158697
gaataaggtgttgttaccttcaaatgtgcgttgtggcgcttgccttctttccagcgacggatggtaccatcatttagtggtttaaacctgtctttgaatgacctgagatatagattcaacacaaaaaaaaattgttgagagagacgcccaaactattactaacaagatttgttgataatctgggaatcagaagtttcagcacgtacgaataaaacttaatcttgactttcttgacttttgatgtgattggagtcctaggtctccacttcttcttccattttgccattttttccttagaagtgatatttcgtacttgaacaaactgaaggcagagagaatcaaacgtacataagataagcaatcagatataaatcaatgttggtacttcgtagtgatgatactcaagcacaccgcctttatcatctggcttaacgaacatgatatcaaaatgcaagagctactatgaacaaataattctattttcggaaaacacgcaatcaaagccatgacgattcttctttcctatgatcaaacaaggggcacaaaattcaagaaccgtacacaataaatccgaatgttaagattccaaagaaaacatgtatgtatcttatgagattgagtaagctctttttttttttttaacaaaagagatttagtaggttaaaacttgcaacgtagtgatatatgcaagcactgacttgtatcagttggattcaaaacaaagtgcaagtaagcttattaacattctttgaattagtatttagtaatccatgttgttgattttgtttcaacagaacatatagaaaattcagaagaagctaaaactatataccaattcaaactatctagctcgtcactcgtcagatcttgtcctcctaagatttgtctcaatcagcagatatatataaagcaattgaagctaaattctggaaacttacgtgatgaggaacaaaggtagtgcccatggagctaacattcgacggaaaaactccggcggcgggaacgaagctccatttggtggaattggcaaaacctagggttgttgttgttaagtgacgactcggagaaggagaatggtgaatgagacggtgaggagaagcaccgtaaaaagagagattccgattagattggagagaaatggaacgtagcttagtgcaaaacctctgcattgtcgtctccaaggggaagaacaattttctgattgaaatgcgaattttataaaagagaagaagtgtgtgtgacaaagctttggggtttttgggaaatgattttgagtgtttggttattaggataactctattcttttttactctttttttttcttgtcatcattctcttttactttgataatggtaaaatgtctttgggaaaaaagccaaaaaaataccaaactaatttgttttttttttgtaggcgaaggggacaacgagtccccttcaaaatattattataaaattaaaccaaattacaaacaaatacgccgtgaatacgagatcccacgatagtcttcatcaaaaaaagatgagatacaatccgaacaagaatctagtaaatgcaaccctaaaaggcataaaaatgcataattagccaaaccatccgcaaagtgattcgcctccctatacacatgagacaattggaccaaccaatcctttgataaaaagccatagcacaagcgtgctaggaacgacaagggatgagtatcgcatatccccgtcttaagaaaccccgcaaccatcttcgaatcaacttccaactttaaccgagtaatcttgttctcccatgcataataaagcccatagtagaacccccaaagttctgctaaaggagccgtacatacccctatattaaaagcaaaaccttggacccagttccccaccgcatctctaatgaccccaccagccgtggctaaacccgggttacctcttgaggctccatccgtgttaagtttgaaccatccttcatccggtcttgaccaagcaatctgacgctccactctaaccctcttaatctgacctccattcgcaagacaatgtgcttgatacacatcttttgatatctctttcacaaactgggtacgatcacggcacttcctattctcaccaaaaacgttcccgcatctccactttcacgcccatcacattgccatactgaacactgtcccccacggtatcccctctctaaccacctgacttcccacgtttccataaatccactctagtaatgtttgagtgtaaaaaggtctctggagagtaggtggaacaatacggttccatatccccatcatcgccggacaatccctgagaatatggagaatagtttcatctccactcttgcaaacttggcaaatagctgtatcacataagtgtcttctctgtctctcagtgttagtcataataacctgatgaacaactagccaaagaaaaactcgcactctttccggtgtccgttaacagctgggtttgacaccgttaaaatttgacaccgttagatgattccgtaaaatttaacgccgttaaatgattctgtaacgtccgttaacggttgagtttgattccactaataatttatatctgagatattttgtgattacaaataattaaatgaggtatttttactctaatttaaaaatattgggtattaaacttttaaattaaaattagtttttttttttttttttccaaatgtttttatattctagtgtttatgcttattagctacgtagacaaattttgatacatttgggcctgtgtagctaaataaattgggcctttcacatgagtagataaaactaataaacctaaaagaaatcgtcttgttgaattcgccgtttggatctggctccattggaaaaaaaaactagaagcagatctgttgaagttaagccgagattcatcaattcgtgttatttgtctctcttgataagcaaaaaacatcgtacgaagaagaagaagatgaccttaattttttctgaatgaaatcttaaaattcccagaaagaagaatg

SEQ ID NO: 23752 - DNA, 3003 bp, Unknown
  misc_feature (1)..( 3003): 2750-1469P.txt file - cDNA_ID_2151611; gDNA_ID_1620493; Annot_ID_158672
atttcagttgtttcagaatatcaaactacagacaaagtaaaaaactgaagatagttcatggatttttccaaaaggatatggagagttgactaataagaagaggggcactatagtcatttcctagtggaaatacccactgttgtgtaaaagagagaatacatttaatgaaagtgaggttgtaaaaaatacatgtatttatgaaatggatgaaagttattgttgacataaacaatcagcaaaatcatctatccaacctcttcaccgtattgtaaacaatgttaatgtgtatctatgaaatagagtataaaagacaactttaaatttgatctagaagctgtaaatttcagaaatcaatttggatgttttaatggttttcttgttatgacaatcttaatgtatgtgagggtttgtactttgttgaatgcaaaaattatgagtgactgaaatagaggagaagaaaattggggatagagttcgatgaatatatgcaatcatttaggaccgagaaattaagagagggagtgggcaaaagggacagtgacattctctcggattttattcttgtatataactaaattacaaatccataaattccaaatgtattggtaacatcgattatctttgcaaatagcaacaaactcgcataatgaaagactcaccatgagccaaaactattaaatttcttttattttggagtttgaatcttgaaattagtacaaatagaatagtcttttttttccaaaagaaaaggtttaaagtatcttctcgagcactgtgttcttcttttctttaagttttcagtgtcataatttatacaaatttaggtaaagttactaacattttcttaactatttaaccttccatttcatgtcctagcaatttttctaaaaacgttgaaattgtttccactaccttttctgccaaatatctgcacttcaaacgcatctagtcatctaccattctacttgaccccggtaccatcttttggagatttagaatgtatgttatgcccattatcaataagaaaacatggaaatgtggaaagaactttataaactagagaataaagaaaagtaagtttggagcatagtgtttgttggcttctaaatatcacttgtacacaattacacattattaccaataaagagaaaatcacttcttaatatatatttttcttacataggcagaaagagaagagtgtttactacaaaagaagcacgcactgatttgtttttttcactttcacccattcattgctcttctacactcttttaaatctctccttttctcttcaactttgaaactgaaaaaggacataaaagatttggtgggttatgtttcttttctttggagccaataacggagcttagagattcttgcaacttttttcccccttgcatcctcctttactcaatagtaatttatgtgtattctgtatctcttcacaaaataataaacaaagactgtctttcaccacaaaatctcttgagaagctgcaaagttgggtaaaacttaaatgaaatgtacacttttttatatactacatatccgttttcagaaatagatttcataaactatgtgttccatatggatcccatttcaccttcaaaggccccctttacatttatgtatattaatgattatatgtttctcattgctcaagagaagattgcatcattgaataaaggaagaaagaaaaaacatagagagtgatttggttcatgtgggtcccaaggaagtggagtcatggttcctccaaatgccatgctcatgctcatgctcatgcacatgcagagacgcgtatagtctttctaagctgatatatcaactgagttattagatgcgacaaaatctacttatataatccactcgacttactttaacccaaaatttcactaaaacaaacgtgaatcacataacaaactcgcaaaactcaaccaaaacagttttgctgttgtatgttgaaaaatggcaagatataactaagttgatagatcgggtgctcatgggttattgaaaatcccccacactagaaacgaagggtggtatcaaagttatagtatagaggctgctgtaaaaaaagtggaccactatttttcacgcctaattttcttaattactctattattgttaattccgaagttacaaaccctaaattataaggctagcctttatatttatagcatgttcttctgaagctgatacagttttcaacacatgtatccatcataggagaaataaaaacaccaaaagaaactgaatcgaattgtgacgctttttcatgtgataatacacattattttgttttttgtgtgtgtttattttgcttaattttaacattttcatatgagtaccatagggaattaatcaagaaaagagtggtgtgtgactgaggtgatataatgtaaagtagagagtgttgacagatgtcatgataatgaaaaaatcaactgaaagatatatatgtttacacaataaatcaaaatttggatggaagggacaaaaggaagcatatataccgtccgatcatgtagaaaagagatagcaattacaccgacgagaatagtaacttggcaacgtcatgctttcttttcaagattatatgaattttcaaactttatgttcttccaaataattagacgacttcatggctctcacgttaccatttgagtacgtagtccactagcgtggtccaaaattctatatccatcattttttgttctttttcttttattttacaatcaatcaatctatggatgtacatataagtaaaagtctacgccaattggatgattaagaattaagataagcgtcgtgaagaaataaaaaataattgggccttgggctaaaggaatatttgagaagcatataaacaattggcccacaaggccacaaggatctccttcaaacgctcggaagtttccgctttggattcctgtcaccggcgatttcgtgggatgataacgacgccgagctatatttcgtgactgaagcaaagtgatg

SEQ ID NO: 23753 - DNA, 3003 bp, Unknown
  misc_feature (1)..( 3003): 2750-1469P.txt file - cDNA_ID_2151663; gDNA_ID_1620499; Annot_ID_158796
acattgattggtttattatatatgtagtataactaataatataaccttggtgggttgatcagttatgtgcattttcagattttagctactttatggtatttaaggatgttgttttggaccatctatggtaatagagatgaaatttgaaattgtccgaggaagatgacatgagtttttctcgacatgaaatccacaacttttggaattttagtacatgacaatgatctaatcttatatattcttatgtttgtttaaatttttatacggtttcaaattttgaattgtttagatgtgcgaatataagtgagtgtatatcaaaagtaccaatcttgtgtatgtatgtgtactgtttaaaccccaaaaaaaagtgttaatccaataaaatatacgaacgagaatatgcaaaagtagcgaagtggggctaatacagcttgtgggttcctttcttttgaatcaaaaagcttttgctttagcctaaagcattccgatctaaaggattcctgattttaagtaatcactatataaaccagtatgaaaggagcttttcctttatttatccttcctaaaaacattggtctctctagttttgtgtaagtttagatgatctacctcctttgtatggctacgtcaatatagtcatatagatagaagttgatactacttgttacataagaaatgtttaaatagtgtaggctaaaagcctaaaacgaaaggaacaacaaagtttgaagaaataatgacgataaatacataagatacaagagagttggagcaacgtcaaaccgaccaagaccaaatcacgtttccttttacgtgagacacaaatacgtaccaacgcattttggttgccctctcatccatacggacaccacacatacataaataaatagttcgaataataaaaccaacaaactaaaagaatagtaaagcataggataggttgtgttgtttgtcaaagtaaaagaatacacataatacattattattacggccacattgtgatttgtctcacaactaaaaccaagatgacagaactctagttagtatcgattccgcacgtgagatagaaatccttgataaggagcagaacatgcctatgatgatgtctcaagacatcatgtctgtacgaaactttttctttttaaagggataaaacaccattagactaaagtcaaaagaatcattctacagcatattccatgatttaaagttactaacagttagagtaacccactcgtttattcacgtccataagatctgaatccaaaattattagacatctactataaacatgcctcgagattcgggagtttaatttagaaaagcaaagctgaagagatatcacaccaaataacacaaaaagtaacgaccaaaattcaactaattgtaaatgataaaccgttttttgcggaataaataacttgagaatcttccaacacagaaaacaagaagagagaaaagtaaactggcaggtaattttaataggggacgacgacgaaacacaggacaatataaagaaacataaacttagagagtcgctgcgaccgaccacagtaacccaacgagagcttctctctcagcacttgacctccttcaaaccatgagcgaagtacaaaaatgttgggttagttgaaccctccttgtagtaagcaaagaccaaagtgctgtcatcatgcataccctccccaacaaagctgtaaaatcagacaacacaagcattgatgagatttcagatgaaatatatgtcatgtataacaagcaagatacgatagattggggtaacttacaattggaagtcactgagcctggggagcaaaaacttggtagctccctcaatacccttcttgaagacagcttgatcttcttcgctgagcttgggtgtcaaaagcttaatgtatttcttaatgtaagcgatgaatcccttcttgtcataagttggttgctcctgaagtctgaaggtgtcgacaatgtcaacaaccttttgagtagagtcatcaacaccttcatcctcaccaccttcttcagcagatggattggcaccaatgttaacatctacagctcccacagtaacccactggataacaaaatcaaaacccaattcagaacaggaaaacaaaaatttaacaaaatcaaaacaaaacttgaagtagaatcgatgacactgacctttccttctacttcccagaggattccattctcaatctccttgtaagggaaagagtcagacagaagctcatcacctgtaaatcaatagcccagactctttagtcattactcataagatcccaaacattaatcgatacaagcgaataaaccctaaaatccaatctacaacgaatcggtaagctcaattaaaggacgtttatatactaatgaatcacagatctaaccaaatcacataaactaatcccctaagatttgaattatcaatgcaaagagcagcaaatcaacgaaaaacctatgatgcgatgacagatctaacaattcgataacatgatttattccgatcggaagaaaaagatcgatagctacacagttcataccgagattaaggaattattgagcttaccggtgagaagatcttggtacaccaacatggtcgcttattgattgttttctctctccgatggatgcgaataaacgaaaatcgaaggttgcgggagagagacgcagcgacgaggggattctgaagtgaggtcctaagtttggtatttatagtcgaaactatagcgtagggttttcaggtaaatttacaattctcggtaaattacaattttgggctttaactgtttccaattttctattttttaccctttccttttttttaaataaaggaaataaatctgaaccgacgcttaatgagccgggtttggtccaacgggtggggattcgagtgttgggctacgtataaatagtgttcgggtcggataaaatcctatttccctctcttctcttccgtctttctcgttctgtttctgattgttcgtgtaaaaccctagaatg

SEQ ID NO: 23754 - DNA, 3000 bp, Unknown; identical to SEQ ID NO: 2173
  misc_feature (1)..( 3000): 2750-1469P.txt file - cDNA_ID_2151674; gDNA_ID_1620499; Annot_ID_158800

SEQ ID NO: 23755 - DNA, 2300 bp, Unknown; identical to SEQ ID NO: 2155
  misc_feature (1)..( 2300): 2750-1469P.txt file - cDNA_ID_2151725; gDNA_ID_1620497; Annot_ID_158713

SEQ ID NO: 23756 - DNA, 3003 bp, Unknown
  misc_feature (1)..( 3003): 2750-1469P.txt file - cDNA_ID_2151729; gDNA_ID_1620497; Annot_ID_158714
cttcattgataccctagtttttctatgtcaatatgactgactcgtaggtttttttttttctcattttgtttactataaattatcgtaatcaaattggaatttgtatcattttttttttgtagatgtcagtggacttaaagcgtggagaaactcttccaattcatgtaaatatgacgtttccatctttaccttgtgatggtaagagaaatccattgatcacttataagtcaagtctatattacttttcttccgccataccttctggaatacttgtcattgtagacgtaatcatttgattttttttctttttgtagtactgagcgtagatgctatcgacatgtcagggaagcatgaagtggatcttgatacaaacatttggaaggtaagatgaatccagatgctaatgcaaatcacaaatttcttcagatgttttcgtttccacctttttgaaattaccaaagttcattttgtttgattgcgcctaagacattatagctggtcatactgttcatatataggttaaacattatatttgaagggaactatttgaatatttctcttcgcatctttatctcacttcgtatggcattttgctctagttgtactgttttatactcatgttaattgctcactaattgtgaatatctgcagctccgtctcaacagtcatggtcatatcataggcacagaatatatatctgatcttgttgaaaaggggcatgagcatggccactcacctcacaagcatggtaacattctcaactttatgagcctttaccgagtttgtaccttttctgagagcttcttttcccttaactgttgttgaatgtaatttgtcttgaatcttttggaagaacagatagtcatgtgcactttgaaactaggttcatgtcaaaacttgtagtaacaatactcagatataactgataatatgatgtacgataatcaagtatgttgtatctggagaaccgaattactctaaattttgtgcttccaagcaaatattaataggaatcttacaagtctaattgaggcttcttagtaaggtgagtggtagatatgtaagagagccccagcgatagttttcatggtagctaaatgtttttgggtataagaagaaagacttaatcatgtatacactttatcttttctgcttgctgaagatggcaaagaagaacacaagaatgagactgaaaccgaagcattgaatattcttggctttgaccaagctgctgagactatgattaaaaaagtgaagcaagcattggcagatggagaaggatgtcgggtattaaccgtttctcttgtcattacacaaactagagattttgtgttcccggcgtttaagaaaacagagactaatatttggctattttccaggtttatggtgtcctagatgtacaacgggttgccggaaacttccatatttcagttcatgggctgaacatctatgttgctcagatggttggtatcctcatctcgctttattaaccatccccttactaagaacatgctttaaattcagattcgttaaagtagtttaatttagtaccgtatgatcattattgacgtttgtttccattgatttgtcaacagagaaagtataaagccagaatttaacttatcaataaccgataaattactctcataatttgtgtttgcacctcattcactgacttactacttgatattccttgttagtatataactagtctctttactctctgaacagatatttggcgggtccaaaaacgtaaacgtgagccatatgattcacgatctatcatttgggccgaaataccccggaattcacaacccacttgatgacaccaaccgaatactccatgacaccagtggaacattcaaatactatattaaggtgtttatccaaattcgttactcttcttgtactcgtatctctccgctggctgtatattttatatacttcattatttgtttactttgaagtttgaaatcatttacctgtatgatccattttgtttcacacaaatccgtatttgtaaggtaaggtcactaaattctttctaatatggcgcagattgttcccacagaatatagatatctttcaaaagacgtactgtcaacaaatcagtactctgtaactgaatatttcacgccaatgactgaattcgaccgtacatggccaggttagtcgatcaaacttcatttccagtatgcacctggttcttattactctctttctgttttctgatgtatctttttttcttccagctgtttacttcttatatgatctttcacctatcactgtgaccatcaaggaagaacgccgtagttttctccacttaatcactcgtctttgcgctgtattaggcggtacatttgctttgacaggttagtcccatctcagtcttgcctccaatactcaatctttcaaaatcttttgcctaatatagtttatctcataccttaaaacaggaatgttagatcgttggatgttccgctttattgaatctttcaacaagaagccgagtactagagcgtaaactagctgaaacagagacaaaacaatgagaaacaaaaaaaaccaaaggaaggaagaagaatctctcaaatcccaaaacttgtatctgccttcttcagacaacaacacccaccagagattccaggattgatgattacattactcagaaactctagaatccatggatatagtttttttttgagtctctcttatgtattactctgattatctctggttaaactagtagagttaatttgtaatttttattcaccttgcttcctgggattttaacatttttgcatcttttcacttgtctcagtaaaaaaacaaaattatactgtagctcaccgtaagataacgtacactcgtcacaggtgatcctgtcctcacaattctctctgatttcgcttactctttcactgaaaccctaatttggggtttttcagatttccttcaatctctcgtcgtcatttcttcgtctcaccgttgaatctgaaaatg

SEQ ID NO: 23757 - DNA, 3003 bp, Unknown
  misc_feature (1)..( 3003): 2750-1469P.txt file - cDNA_ID_2151733; gDNA_ID_1620497; Annot_ID_158715
cataatttgtgtttgcacctcattcactgacttactacttgatattccttgttagtatataactagtctctttactctctgaacagatatttggcgggtccaaaaacgtaaacgtgagccatatgattcacgatctatcatttgggccgaaataccccggaattcacaacccacttgatgacaccaaccgaatactccatgacaccagtggaacattcaaatactatattaaggtgtttatccaaattcgttactcttcttgtactcgtatctctccgctggctgtatattttatatacttcattatttgtttactttgaagtttgaaatcatttacctgtatgatccattttgtttcacacaaatccgtatttgtaaggtaaggtcactaaattctttctaatatggcgcagattgttcccacagaatatagatatctttcaaaagacgtactgtcaacaaatcagtactctgtaactgaatatttcacgccaatgactgaattcgaccgtacatggccaggttagtcgatcaaacttcatttccagtatgcacctggttcttattactctctttctgttttctgatgtatctttttttcttccagctgtttacttcttatatgatctttcacctatcactgtgaccatcaaggaagaacgccgtagttttctccacttaatcactcgtctttgcgctgtattaggcggtacatttgctttgacaggttagtcccatctcagtcttgcctccaatactcaatctttcaaaatcttttgcctaatatagtttatctcataccttaaaacaggaatgttagatcgttggatgttccgctttattgaatctttcaacaagaagccgagtactagagcgtaaactagctgaaacagagacaaaacaatgagaaacaaaaaaaaccaaaggaaggaagaagaatctctcaaatcccaaaacttgtatctgccttcttcagacaacaacacccaccagagattccaggattgatgattacattactcagaaactctagaatccatggatatagtttttttttgagtctctcttatgtattactctgattatctctggttaaactagtagagttaatttgtaatttttattcaccttgcttcctgggattttaacatttttgcatcttttcacttgtctcagtaaaaaaacaaaattatactgtagctcaccgtaagataacgtacactcgtcacaggtgatcctgtcctcacaattctctctgatttcgcttactctttcactgaaaccctaatttggggtttttcagatttccttcaatctctcgtcgtcatttcttcgtctcaccgttgaatctgaaaatgatcgccggagtattgcgccgatcttcactcccgtcgaggcagactctctccgccgcgttagcctccttcaattcgtgtatttcgcacaatctcactccagccaccaccggagcttccgtcagctctcgattcactctcgcgtcgtctcctaactcgtttggcatcagagcgaggaacatccacattagatctgagccgtcgatgattgttcccgcaggaatcgcgtcacaaggttacgccactgtcacaaaggatcgcaaaaacgagattaagaaagctaagattaaaatttctccagacaatgtcagaccattgagtaggaaggagatcgctctccaggtatatgcatttttgttcaaattcatagaatattattcaaagtgcttcatcagattcaaattcgaataggaatcggaatgtgaaattcattgaaatgatttagaactgttgtttatgttgttgttgttgtgtgtttggggttgaattgtagaaagaggcagcagaagaaagcacatcaaagataaaaggaacaaagatttgtatagcgattcggtcttttgttaacccggaaaagcaagcttggtgtcttcctcctcacactcgtaaagtcgcaatgcccgatacacgaactctgtacacggtgctaagatcgcctcacgtcgataagaagtctagagaacagtttgagatgaggttcaagaaacggtttcttgtcatcaaagctcagagtcatgagttgagcaagaagctgttttggttaaaacgttatcgtattcttggagctcaatatgaactccagttccattgcaagacccgtttggatatgactcaagtgttaggcaacatcaatggctccaccaccaatgcttactgagatggctaaagacatcattttgtagaagtttcaagacccaaccgggtactatgcaataatttcgaaccttacggatccatgaaaccagctttgcttcacatcagatcaagtagttattttcttgcttagtataaacatgtgtttttggacgattttgaaagatacaattgagtttcagttacagtgctttccatttattcattagccaatcaaagtctttatacatcaccaaggattgagacacatttagactgctaaaggtgtcattttgagaagttatagaaacctttgacccgaccatggaatgatgtcgaactttaaggatccaagagctcacattttaggtgtattcattcattaggcaattctaagacttttacattgtacataatcactaatgatttgagacatatggtataggttaatttgatagatctgattccgaacctgagctattgccaatttgccacactacacaaagttacaaaaaacagaactcattaactctttgcttcacattcaagaacacctttgggctcaagcaaaaaataataatcaactctgtttccttacacaagcttgcacgtgtaggaacataccatacactcacccgcaggtgattataacaaagttccctttatacccgcctttgattcttcttcttaaatctctaaacccttttgccgtctccctaaaaccctaattctcatttctggggtttcacatttcatcttcaccagaatccatcacactctctgaaatctgaaaatg

SEQ ID NO: 23758 - DNA, 3003 bp, Unknown
  misc_feature (1)..( 3003): 2750-1469P.txt file - cDNA_ID_2151741; gDNA_ID_1620497; Annot_ID_158717
gggatcaagcagccgttactctggtggttcagaccgctcatctggtttcggaagctttggttcaggcggttcttcaggaggatttggttcagaccgttcttctcagtcaagtggaaggagcagctttggtgggtttggatcaaacgatggtaaaagatcttactgagagaagtgttgtgttggttttgacccgactcagcaataatggagttgacttaggagagaactcggtatctcgagttgagtagtttacaaggagtcgagctatatataaattctgtagctacttcttgtctcataaaccaacataagttatatcattatttcatatcctctaattcatttttatttctcaatttgagtgaaatgtgtttcccttacttcgccacttccatttatgaatcttgttagattgtgagaaaaggaaataatgtggttgatcaaagattcaaatcatccctagttttgatttcttgttagatcttgcaagtttttggtagaaccatacacaagaaaaattgttttaagctttaattctcatatctgaccaacaaaaataaaacacagtcgacaattattgttcactacaaaaagcattactcttatgtttcacaactaattagccttcatttcgcaaaacttgatgcactgcatagcaagagcatgcaactagctgctgaacgaaaaggcttggctctgcatagctagcataataataccaagctccttgggtgtgatcccctttgcagtgaatccagatttagtttcatccagtcttataggcccaagaacgggttcttgtacacatacttggtgattctgagggttacaaagctgagatcccataaacgttgaaaggcgttcaggtggtggtataagaatcattgagatgagtaaaacagtcaacaccacccacaagggcatgcaaatcaatggtagccatctcaacaccatcccccagcttctccatttggagacattttgaaaaaaactcaagaacggcgcctgtacaaccgtcaacactcatccacagctgatctgaagtcagtaatactctggaagaagtatcagttttgaacattttaaaaattgatatttacgatttttttctttttagggtgttaaggaatggggattatcgacaaacaagtgatgaatcagattattaacaaaatatggcatttgttgggatgaacaaatacaaacaagtcggaatcggatcttgcaagtttttggatagaaaactaatacaaataagttgtttcaagctttaatttctcctatcggacaaacaaaaataaaacacagtcatcagtttggtttagtacaaaagcattactcttatgtttcacaactctcagcgttcaattcgcattacaatccacaaaagccttttgctttggcttatacaacataacgataggtaacataacgaccagccgtttcactcggacgaatgatcttcacgacttgcccacgttttagtccaaagtatcttgcgattggatcagtcacttggatccttggaagctaacaacacccacaaagttccaaacatttaataacacaacaaaaatttcatcaccaagaattcaaacaaagtttctatatactactaacctgtgtctccttcactgtgtatctctccagtaaagttttcttctcttcagtggtaagaacttgatgctcaggaacaagaacatgttctttaatgttcactagcatttccgcctcctgcagcatccaccaccaaatcatggtttagtaggattgtgatgtggatacatcatcatcaagagtcaagacacaaagtgatttgttttacctggaaaacttccagatgaaacttagaagagatctcactaatgcaagttcgagcaaacggggtcaagttctgttgcacaaccaaaatagctctgaacacattctctgatttcatcctgttcgtgtacattttcatcgtcttcacaccaactttcgcctcatcagggaagaatatatagagctacaacaagagcacatgaatcagcgactaaatcaaacacacataaacaatctttctaccatatccacagcttcttagagattaaagagatgacatttatctatacttttgtcaaaatctagctctctgtaacattccatgtctacttactattcacattcaacaactagataaataatgatagtctccagctaaagaacactaaagagaagctgataatcacattgaaggagagacatacaactacaaacctgatcactattatcatttcgcttagccttaagagtaacaagatcctctcttttcatgttatcaccatgtttcctaataaactgttgtttagtcatcgtaagttcagaatccgcgataaaatatccacgatcccttaacatctgcatcaacgtcttctggattctgtacaatcttttgagctcctcttccgtcaacatcttcttcaccaagttatctgcagctttaccaaaaccatatcaaaattagggtttttcaaaaattgacagaaacaattaagagtttatcaatctctttgagaatatatacacagatacgaaaacttacgaatagagacaaatccacagagatgattgaagaagcgatttacagagagaacgacagtggaagaagaagaagaagaagcggcgtttcaagctttctccttttacctcgaacccttttctcaattctattatattgaagcttttattgcatttgaaactcccaatttataccgactttatgttttaaccctcaactttattttcgatatttaaactccaatccttaatagcctgataaaggcccaatgggcttgtacgacccaacatacttaaaccctttagttgatttttctcaacttattacactgttcttgttggaactaaaaccctttgccttctttcttcatctctctaaatccctaattctccaaattttggggttttacattttccttatcaagagaacacctgaatctgaaaatg

SEQ ID NO: 23759 - DNA, 3003 bp, Unknown
  misc_feature (1)..( 3003): 2750-1469P.txt file - cDNA_ID_2151775; gDNA_ID_1620497; Annot_ID_158725
tcaatactaaaaattaggcatctacttattctggtttatttacacttgcaccaatattgacttaaacgataagatgccaaatcaagaaaaactttggcctctctagacttgttcagaacttgactatgtagtttgatctttaaaataaaataaaattcaaaatataaatattttatttatagtactatttgcatatggtttagctagttttcatagtattgtccttaaaattttaattcacttaaccaagtgtcgttagctcaattggtaaagattctaggcgaaccttagaggtcgtcggtttgagtgacgcttgggacgaaactaatattacatgatatggtttcgggcctgaaagattatgggtttcgatccagatcctcctagatttttttttttaaaaaaaaaaaaaaacataatccacttaacgtcaacgttgtggcggatatttggggtaaatcatcagcctctgataaatgtctttatccataaaggttatggtttttgcaataaaatctagtcgttgaccacaagaaaacttggataatatatatataacgactgaatttattcgataattttgaaagattatggagatggacgaagattaagttatggatggaaacaaggatactttataaaatttgacacaaatttgagtatacttacttattctttttggtcctataaaaagaaatgttaagtttaaatcctttagtaaggcatctctcgatcgattctttcttgtaattttcttcacatgcttttgtaatagacacgagttttgtcagcggtgtctcttttcttttactatttactgatttgttattataattatcacgtttggatttctctttccataaggttaggttttgcttatatatatgaataattaatggttgtttaatttcctactatgattataaaaaggaaaagtattcggtcattgttttctctttgacgataactttctcatatcagaagccatccaacaatttgaagcagttgcttttggtttttcctccacggcttgatgatatgaagtgattgaagatttgtcaacgaaactttggcaaaatggttttgcttaccaaaatgcaaaatcctatacgagaaacatcaccaaagatgttctctgtttctgtatttctttcgttttattcgtttatgtaaatgttacagcttgactttcttagtgtgctttgggtttagatgttgcattatttgtttgcgatgttgcatgcatctttggttagtgaattatttagataaaagcaaaaacataacaaaacaagacaaacgtagacataaaagcaatagaaacagatagacaaatatagtctatactctatatgaatagttgaccatcctacatatgtggaactaaaatagaatggcagtttaaagttgatttatgatggctggctacaagtaggatggtcaactattgatgtgtcaatctcataactctgtactatttccagttgtgcctattgccaatacataagagaatatgaactatttcattagcttataacatacaagttttacaaaaaaaaaaaaatgatctctcatatatggaattcatataatgacttatattagtatcattatcttctcactaattaaattcatatttgacgaaatgtacgtagtatgtttttaacaataaaagtccatttcatttggctagctatttcattttctgccaaatattaaagtctatcatcagatagtttcacgtaggtaggtacagaagagaatgtgaagaaaatacttttcaaaaagaccttgacttaggaaaaagtcattcaatttccacagatacttactatagaaactttttcgatcaaaaaaaggagaggaaattgctaagttatttcgcaccgtacgactcatattattccaaattatgtatgttaataagttacaacattattatatacacacattcactcatgtattcaataattgattctcaaaccattagctatgtacgatacatatgcttgtttcttcatacgacattattgtttatataggtttcactaaaaaaaaacatgcagacggaccagatattaaaatattgcaacaaaatttttcatactctaaatttacaattttgctcatcttatctaaagctataacacataacttaaagcaatatgatgaattcattgatatgtataccgtaaatggctaaaccgcgtgaaatatcttagcaggtaaaaaataaagggaatttaaatcatatttatatctttatattttaatcaaatctaaaacatcttctaagactattagaattgataaacaaaaaatatagttttattaatatatcccaaaactatacatgaaattgttattcatgtatagactgactcaaaacaaaatttagtaatgtttttttttttgtaaaactctacgttttaatttaaagactaaattcaactttgcaaaaatatatttgttactatttttatttatttttcgttgttaacgtatgacaactagttgtaatcaatttactaggtacagtggacaaaatattacattaacatccatatttcagattcatctccttttctccaaaataaaacaagattcaactccttttctttttctgaataaacacggttgatatatatttcagtacataccacttggtgtatagttttgggaaagaaaaaattactagagttggagaaagaatttattgtagcaaaaatgtaaaaccattgtgactgttcagctctagctagattcaatataaatatagtatcagatttgtgttatatgcataaaaagaacattcttataatcacacatctctctctcttcattccccaagcatagaatctctccctctctatctatctctctttcaccttttcttgattcttactcagagaaaattctgcaatatatatcgccatgatccacaccgacatcgcagagatcttatgcgtcaaacccaagacaacgaagaagacaaaaacaatg

SEQ ID NO: 23760 - DNA, 3003 bp, Unknown
  misc_feature (1)..( 3003): 2750-1469P.txt file - cDNA_ID_2151793; gDNA_ID_1620497; Annot_ID_158730
ctaacactattttatgatactgagagctttcattttcttttccatcttaaatcagacttgaagacatgttaataacattatattaatctataagggtataggaagcttagaatgcgacttgatcaacaagtattgccggaaagaaatcaaatatggtcttctatggcgaaatttcaaggcctcatctgttttctcatacatgatcatcagagagtcatgaattcatatatatggactaagaggtaagaaaaaccaaaaatgttaggaaactcatataaatgaagatgaaaggaaataagaagaggaggcggcagaagcggtgtaaggtggtgaaggtcagaaggtggtttcggcaagaagctagagctagagaacgatcgaggaggaaggaaagtctagaaagagagatggaaattttttgtaatgatggagaaaggtttatgtgttttggtttaaaccgcttccatgcatgtacttggcttcattcagttttcgatttaacgctaaacacacacaattaacttgcaaaattgtgaaacttggccaaaataagttgatagattttaaaaccagccacatatcccaaatcagcgctagcttagctaaggcttaaaccaccatcttacattgtcttggaatttataaaattatccgaaaatactacctttcaaaacgttagtaaattcacatatttactaagttataccaaactttaaaatttaacactttactactatttataattacatttcatgtcattcttataatttcttatggatcttatactctcataagatgtctaagttttccgaagggacaacacatcttggtagcgagggagattgtggagctctcacatgaggaagcagcatagcacgaagtatactaataacttgatacttataatggccttcatttggcttagacgcagctataacgcaataaatgacaatgtttcttttgttgacatttgtattggtgggatggtggccaccgactacttcaaccaatggattgaggcagatttggtttctgagacttggaatgatgcggttctttgtttgtttatcctaaaggacgattttccaagaatcctatgtatcaaacaatttactacaagaaacactattatttattaacatttaggatgtatacagtgatgccaacagagatatacaacaaaatctaccaagatggagctttctctcagccggaagatatagagaaaaacactaaatgcgtaccatctaaaatgtgtatctaaaatgtgtactatcagacgaacatcttccataacctgatttacaatcactagcagagtggtacatatatttctcttttaggcatatctatgtacctaatcttgatttcacgatattaagacaattattttaaaaccaactcaacaatcaataatacatgcataagattacaacattttaaaagtttgaactatctacaagctaaagctacaattaataattcacatgctagtcactccctttcaatccgtctagtttcatagctatggatttttgtattttaacttttacaaaatctatggatttgtgatgcgtacaaagagtagtgtgatatttgataagaaaatgaattgaagatgcgtgatcatacagagagtactgtccagttatatagagaagtgaatgcaaatttcaagagttacatgaatgcaacaattagatcttgataaaaaaatcaataatttagattgattcatatttttttttgataatgtaaaaaaaatataagacatgaaatgactaattaatgcaacgattagatcttggtaaaaaaaattcattactttagattgattcatatttttctaataatgtgataactgatataagacatgaaatgactaatcaatgcaacggttagatcttgaaaagaaaaagaactataacttagattgattcaaattaaattatttcttatgtcattaatagaacatctttctaaaaactttatgcttgattgaatatacatttcttgttgcacaaaaaaaaacaaaaacattatatacaagttcaattgctggtattcttttttttggtcatgtataaaccataacacatagaagaggaaaacaatttcacctttaaagcaacaatacagagtacatgatttagctatttcaaatacaacatttccacttagaagtttaggaacattttcgtgaatctgaaagataacaaagttaaacttaaagtaagagttatggttggtccaaatgtgtctctaacaccatcaccaaaaaagagactgtgttgctgccgtgactcagttccatgtgcctcctctttcactttctcacaacccgtgacacttaacaactatcactacacgacaaaaaaccaatccacaagtgtttcgataaacctacgactttttttgttttcgccttttggcatttccttcggttatctccgtaccggttttggaataacccggttcttggaatttagcttatccaaaaacaatcacagcttcataacaacgcatagcttatttatgtggtcttaaatccactctttagattctttgttcacacctgtcaagttgtataatatgcacaatttttcaaacattctttcttcaaaattccacaaatattagttgaccacaaaaattcaatagaagaattttggtatagttcgtacagatggaagttgaaattagttgaattgccgttttctatacgtacgaattttggtatttattgattagataaaccggaacaaaaccggtttagtaaaccgacgcatggtgttggtaaagtgtgattgggtaagaagcctaactagttgtctgttgataattgtcactaggtgggcacttaaagaaaaaaacacttgtttccttatatattcttctccctttaaacatttaatcttttcctcttctaccatctccacaaattccaaacatctctctctctttctctctcacacacaaaattgcagaagaagaagagtcatg

SEQ ID NO: 23761 - DNA, 851 bp, Unknown; identical to SEQ ID NO: 2193
  misc_feature (1)..( 851): 2750-1469P.txt file - cDNA_ID_2151809; gDNA_ID_1620501; Annot_ID_158883

SEQ ID NO: 23762 - DNA, 3003 bp, Unknown
  misc_feature (1)..( 3003): 2750-1469P.txt file - cDNA_ID_2151889; gDNA_ID_1620501; Annot_ID_158901
gaaggattgtgaatgaagctttgttgaatcattcattgcattagcttatgaatagcagagttagtggtcgtgtttttcgatctgtttcttcaatttgtcttctcttttgttgttgaagatttggttctacgtgaactggtcctttgattagattgctgaaagtagcgagtgattcagataatatagtatcttcacaccaaacttacagtttcacagactttcgattttaacaaaattttatcctatttcaaaccaaattttgttgaaagaagaagatcacaaagcaagatataaatgttaatcagtaatcaatttcccttttttcttccttttgcctccttgcttgatttgcgctgagcttggaacatacgagcacacaagtggatctcgaattttatcagtagtttttccgagatccacttctttgtaatatccatcctctccaatgatgtaagctgtgttgtgagtgggatacattacatctttgtctttagcaaagactacaacaactttcttctcttcgtcaatgatgaaactcgcatctgcaattccaaacttaaaatcagtgagtggttgcatatccactgctaagaacaacttgctccacatcacctcttcaggttcaatcttagtcgtaacccaaatctccatatgtaagttgtccttacgctgaaataacacagcaagttgctcttctctaacactagaaagactcacagtatctacatccatagggtaacacggcaaatgaagacgcggcccaaatctctccgatgtaaaattaaaacagagcaagaaataaacactatgtataagattactgctgatttctggaaacttgtctgtagcaaaccaataagtatttcccttgagagagacacctcgtgcataaaactctacttcccagtcggaagtgacatcgagaaccctccatgaattagactttaactcgtatatttcgtactcaacaaattcttcttcggcaaaatcaacgaatcgcaaaactttgtagcgtaggcttgatttacgcttctcgtatcctatagcacagatataccagtccattctatggtcaggactactgggtttgagccacaaagtttggctcctatacggattccaaaccacgaccctagtgtagtctttcgagatacataacagtaaaccgtcgcagtgatatacttcagatatatcgatctgatctgtaccgtttaggctaacaagtttagcttgacggtttatagacgggtcaaagccgttgtgaattccacggaggttgatgctcgttagataaaccttacaatgcaagaccatgacaaccttaaactcactttcccttgatgttgcttcctgagcaaggtgcttctttgtaaagctccgctttttggataatgttttccaatttttgcaggtaaatcgcgcttctctcaatgatttcaccggaaccctagagagtctctcctccaacaaatctcttggaagatcggacatcatcttcaaatctttcaaatttgaacaaggatcgatgtaacacaaattagttaggtttgaaacttcagtaaaaagctctcatgtttccccacaggaaccctaactcaagctgggccgaaacacaactctgccctctaaaaatttcccggaattattcatctttttgaactcttatttatatgactgtgatgtcgtttcatttatgggctttattattgggcttttagcccaactgtagttaaaaactttttagtgattctcatttgtatatggcgggggagatgatcgacggtcgcttcttgcggtggagatggaggaggaagactctcctctccgactgcggcgattgaaccgagagagccaccgaagattcgaaacctacaaaatatagagggtgatgtaatccagcgtctgagctcgctgagaacagcctcgacgccgattccaattcagtacggtggcttaaagctccttcaattctcagaccatggccaaggctctgtatcttttgctcactggttctaccattgtgagttcttcactaccacctgctttgaattcaactacaatctatctacaaaattctctagccgaaacctttcaagttttagcatgagacccttagcttcaattgtttttctcttggacactgtctaactttgattcttcttggaattgattaggaaatggctaagaaagttggagaagttatagaaaaatcctgcgtagagaatgggatcacaaaggtggcctttgaccgtgcaatttacacttaccatggctttagctgcttcagcaaatagaacacggtctccaattttaagtctttttttgttttgtccttctcagaaatttgcttgtatagaacccatgattgaaatttagattagtcggcttggaacagtgttaacttcttcctttttaatgtgttcatttgttcttactacttatgcatctcaagaatgtttatatcgtctatacgatgataatatatttgaaaatggttgatgtttacaaagcttcagaaggtaagacatcaaatgtgctgcttagttaagagacaggtacaagtgcttgcaaatttaggacagaaggacaaagacagagacgaaaacttcggcgcagtgaaggcagttcatatctgcgaagtatagatgcgatatggttggaagttaagtaactgatagtctataaatagaaaagtgcgaggtatatgcccaccctggagttggtatgtccgcttctatctcatctacctattattagcaaactatagacgttattagttttctgttttttccttttatatactcacttctttaatgtagattctgtttaataaaaacagtaacagaacagaataaaatcttgatttcttttttttcctcccattcaggtctcatacttcgtttggcaatgcaatgagggagcagccaaggcagtattgaagggtgaagcagtatctcgtttcttgaccaatcatcaacctgtaagtagatctccactaggatg

SEQ ID NO: 23763 - DNA, 3003 bp, Unknown
  misc_feature (1)..( 3003): 2750-1469P.txt file - cDNA_ID_2151897; gDNA_ID_1620501; Annot_ID_158903
tggtggaacatccaggaatcacactaactgtttacaaatttgtagctgcgagaggaacattgaagagattcgagaagagtgaacacgacgaaaaggagaaaaaagagaaagagactgacgaagagtttgtgagggagttgatgaatgatccaagaggaaatgagtcattggcttacgaggaaagagtcgttgagagcaaagacgatatcatcgcgacacttaaatcgatgagtaaatgcaatctcttcgtcgttggaagaaatgcagctgttgcatcgttggttaagagtacagactgtccagagttaggaccagttggacgcttgttgtcgtcatcagagttttccaccaccgcgtcggtgctcgtcgttcagggatatgatccagcagcagatacacgaccgctcgttgaggaagatgcagagtacgatcagtcttccagagatatttcagacttaactgcctgaacggattttattataaaaacaaaatttctctgtttttttttttgtctcatgaaatattttgatattctttttggttgggacttggagtgtctccattgttctttttctattttccttaaattgatggttgacattagatttgtgggcatgaaaatcgacctgtaatttcttaatattttgccttgaatgatcaaaggaataatatttttaagatccaacatttctagtcatcaccatggaatgtatccttgcccatgatggtgtcacctacatacctttttagggtgtaatgtgttcattgttattcagaaaaaatgtaacaaacggaaaaatgtctaatcttaaattacctcctgaagagatatgaatgcaaaaagggaccacaaccgccaatgacaccgacaagagtcaaaagagacgtcactaataaataaactaacacattttcgaacaagaatccataacgttaacattcactcactgtctatcacacacacacatgctgtgtacttcattattactctctctcacgctctctcttctcttctcttctcttctttaaaaatctcacaccaacttcattgacaaagagaagaaaacaactctcaaaaacaaaaacatgagctacactttctttctccttttgctctctcttgtccactccactttctcttcattagctcctacggatcgagccgcgctccaatccatcagagactctttaaccgacatgcccggttcagccttcttctcctcttgggacttcacagttcctgacccttgttcctccttctctggccttacctgctcttctcgcggccgtgtcaccggcttaactcttggccctaatctctcaggctctctctccccttccatctccattctaacccacttaacccaactcattctctaccccggttcagtcaccggtcctctccctcctcggttcgattccctccctctccttcgagtcatttccttaacaagaaaccgtttaaccggtcctatacccgtatctttctcatctctctcaaatctccacactcttgaccttagctataaccaactctctggctctctccctccttttctcaccactcttcctcgactcaaagtccttgttttagcctcaaaccatttctccaacaaccttaagcctgtctctagcccattgttccatttagacctaaagatgaaccaaatctccggccaactcccacccgctttcccgactactctccggtacttatctctatccggaaactcaatgcagggcacaatcaatgccatggagccattaacagagctaatatacatcgatctaagcatgaaccaatttaccggcgcaatccctagctcactctttagtcccacaatctcaacaatgttcctacaacgaaacaacttcacatccattgccacctcaaacgccacgtcattgttacctgagggctccattgttgatctgagccataactcaatctccggagagctaactcccgcgcttgtcggagcagaggctttgttcttgaacaacaaccgtctcactggagacattccagaggaatacgtcaagagcttaatcaacggtacaacaaaacagctcttcttgcaacataactacttcacgagattcccttggaactctggtctccaactaccagactctgtttcgctctgtttgtcatataactgtatggagacagatccagtcgttggtttgtccacgtgtccgatcgaagttgcacctctgctctcaagacctgcttcacaatgttcaagattctataatcacagctccactggttaaagatcagtttttctttgttatttttctcaaagaaatttgcaaaaaatgacaaagtttttcataagcgttatcgacaaaacaaaagtatgacattttaagaaattgaaccgttatgtctcctagtgttttcttaaaaaaatcaaaagttcataaaaaagatctgtaaaactgtggtcctcacgtgtaaatgagattgtagtgtttatggaatatataatttatagattggtccttttctctatttttcttcattgacatatatgccattttgatatgaaagaaataaacaacacaccattggttttctatatctcttctccttatcttcaaattgtcattatcttttaataaaaaaaggtacaaacttttattcagtttgtggtctggagagcactcaaaatactgtttacataaaatgattgaagataattagatccaagcatgatggatatggatatgagttaatggtgttgattaagaacttataaagtctaatggtgttgatttagtaaaacattaaatgccagataattagctgttaacagacataccgacaaagaattttaagtaataaagttagcataaagctatctgatttgtcagaatgtaaaaacgagtccaagttgactccttcgagctttgattctcgttccaataatacttcctccaccatctctcctcctctcgttagatctaagaaacagagaaaacaagagagatagaatg

SEQ ID NO: 23764 - DNA, 3000 bp, Unknown; identical to SEQ ID NO: 2214
  misc_feature (1)..( 3000): 2750-1469P.txt file - cDNA_ID_2151976; gDNA_ID_1620503; Annot_ID_158960

SEQ ID NO: 23765 - DNA, 3003 bp, Unknown
  misc_feature (1)..( 3003): 2750-1469P.txt file - cDNA_ID_2152010; gDNA_ID_1620499; Annot_ID_158809
atcattcaaaaacacaaacatatagttttttctaacctttttagcaaaaaggtaaaataatatttctggaacttacggaagatgataaaaaaaaaatatttgtggttttggtaatgtaatttatcaggattatttaattatctgtgtggggttaaaattgtaaattttgaactttggggaatccggtgaaaattttgaagttaacgtgaaagaggaggcagtgaagaaggagcaggcaacagagccggggaaacggaggaagaggaagaatgtttatagagggatacgtaagcgtccatggggaaaatgggcggctgagattcgagatccacgaaaaggtgttagagtttggcttggtacgttcaacacggcggaggaagctgccatggcttatgatgttgcggccaagcagatccgtggtgataaagccaagctcaacttcccagatctgcaccatcctcctcctcctaattatactcctccgccgtcatcgccacgatcaaccgatcagcctccggcgaagaaggtctgcgttgtctctcagagtgagagcgagttaagtcagccgagtttcccggtggagtgtataggatttggaaatggggacgagtttcagaacctgagttacggatttgagccggattatgatctgaaacagcagatatcgagcttggaatcgttccttgagctggacggtaacacggcggagcaaccgagtcagcttgatgagtccgtttccgaggtggatatgtggatgcttgatgatgtcattgcgtcgtatgagtaaaagaaaaaaaataagtttaaaaaaagttaaataaagtctgtaatatatatgtaaccgccgttacttttaaaaggtttttaccgtcgcattggactgctgatgatgtctgttgtgtaatgtgtagaatgtgaccaaatggacgttatattacggtttgtggtattattagtttcttagatggaaaaacttacatgtgtaaataagatttgtaatgtaagacgaagtacttataacttcttaactgttttgtggtagtcctgattcctgaaactaatgggaattagtttgtatatcaaacaggggttcctaacttgttattattaggttaggtggaataattctagggtttttattgacaaaaattaacaaatagtggtttttatggaaaaaggtgatggtaccagtatagtgggaatacacagaagaatttgcagcctttctcaattcttatacgtataattctcgtatgtctatgaaaagggttatacgtatgatgatttatgagtagtgagtacatacatctttttcactactttacatgtaatatttatggaaaaggtctgatccgtttgctctatcgagaattggaattgtgagatatcttgattttaacagtttcaagattaatgaagaacaaaaacaatggcaacaacttacaaattaacattcggaagaaagaaaaaaacttacaagtgagatcaaatttggatttagtattttagatgtaagttacaaatatttcataaactaataatctattaaaaaaaaattattcattgtattttactttataccgtaacctaaacaataaaatacaaatttataattgaaggattttaattgtttaaattactctttctaccatatttgtttttatttctttaaacttactctttctaccatgccatttaattatttttgattgcaaatattgtacgtacctttcaactgtgaactagtattatccttatccctatcgtttcccaaatttcgtcttacgtatagtattaatacatgcatgtgattaaatagaagataagaagatgttgatgtgttgagacttaagactttgatgcatgaacctctaaagcctagttggtaacttggtataataagatttgaagtgggtccataaaatgttttgaagattgacagaatctatttgtttcgcgatattgtctatttctttgacgttttagagaatcattagtaatttaattagtaataaactaataactaagcggcatcttttcgatgtgataaccaaaatcatataatgatgcgtgtcttagactcttcgatacatatgtagataagatagcctaataaatctcgattggtttctaaaatttgtgtttacttcatgttataaatagtaaacacaatactaatcgaatcatgatattcacggttacgacaatgagttgacaatcagatatacttcaaaagaattgtggttaatactaactaatataacttgttcgctcaatctatatatataaatatataatcaaccttcaatattatgaaaccagatgcttatatatatctacttcgtaacatttaatcatttatcatgcattcaggctgatcgtttacggtttacccaaattcaatatatggaaaaggtgatggcatagtgacgttattcaaatagagtaagtgaacttaagttagttctcttgcatagaaattcgagcatgacattatgtttgaattttaattaaaacaaactcttatgcaagaaattcgttgtgttatgttatgtcgtcaagaaatcgtagccgacagtataccatctctgtgtggttacttttctcaagcatccccaaactttattcttttcgatcccccacttggaattatccaaaatgattcgcatttatttgacttgcaatcaaataatgtaatccgtgtgcgtattgtatatatattttttcattgtcaatgcaaacgttattgttattcatcagttttcataaatgaaacaataatgggccaaagtaggcccatttataaagcgaacgggtcgaattatcaaaacatttctgtgtaagtgggtcttaacgaaattggagtggaactgaaattagacccaaaaaccctaaagaattgatatgtcttcgatttataagtaggtcatttttttttgccttaacaaaaaagccctaaacggagagaggcggagaggagaaggaagacggcgtgaagcaatg

SEQ ID NO: 23766 - DNA, 3003 bp, Unknown
  misc_feature (1)..( 3003): 2750-1469P.txt file - cDNA_ID_2152054; gDNA_ID_1620504; Annot_ID_158981
atgatgatcatcaattgagttaaagtagttagctttgccaccaaaagaatctgatatcgtaaggcatgaaaactaaactgataatagctctgccttaggttgcatattatctaattcaaaaccaagaacaacaacattcaatcaccaactaactaaacaagtgttagataaaaatggattgcagcatgacaagtgaaaaccaaaccaattgttgcagtttcagtgaacctttccttgtaagtagttttgccacaactgagttaaagttgttagctttccactcaaagaatctatcttaaattcctaacacttggttcaaacaaccaataacacaagattgcaattatcaactaaactaaaacaagtgttaaatagaaatgaactgattctcaaaattaggaaccttttctcgtgtggaaaccagtaggtttgcagtttttgcccttgtagaagtctctaggagctcgttttggggagaggatatcaagagaagaagctctctttcttctgaatgatcttccaatccccattaacaatcctcctatcgtcgtcattctccaacaatgtattagactgatatcagtcgttgatcttaaaaaaaaaaaggacctgatagaagagtgcaaatctcagagaggtcaaattaggggtttttgttcaagtgaggttgtaggttgaagacactgtaaacgatgtcgtatagggggtaaaattcggaaaattgttgttttcaggaaactatctgactctaaacaaatgaaactgaaaatataggggtcatatttacaaattagttatcttcgatttacgcacgtattatatgtttgttgtagatgtttattttctaagtattgcataacgcataatgttttcttgtatgattgtatcaagctattctactatgtgaacatccaattatcaagtgaatatatattccaccgcataaacatgttatcaattattttgtatatcgtttcgtgaaaatatcaaaccaaatctaccatttttagaatagcacaaaaaaggattaaggataatagaagaacagagtcctaacttaaagcttagtgaggaagcttcacactcgtattatcgtcaataaaacaaagacgagatacaaatgactcttcacactactattattgtttatcttgtgatgattcctttcctatcaaaatgtctgcagcaacttcactctcttgttgacttttatcttgtgatgattccttcctttccactatatcggctgcagtttcccactcctctaggcctttatcgtctgttgcttccataagtttccacacttccattatatgtccaccttgctttgccttgagtttgagcagtgcagctacccactcctctcgacctttaccagctaaaaacgaccctaacagtctaaggcccaaaggaagaaagcctgcgagatggacagcacgaactgcgagctcttcgaaatcagaaggtggataaggctgcttgaaagcaaaatgagagaagacttgaagagcttcatcatatcttaaagatctgacttcgtacacatccatcactccggcgtcaacaagcaaattcttgttctggctaataagaatgactctgcttcctggagcaaaccagttagcatattcaatgatccacttcccttgttccatgttgttcacatcatcagcgataaggagaattttccggtgtttacgccttgcttcggtaatttcatgtccatcgtgatatgagcttattattaccgttggatcttcttctccttcaaactttagaagcttgtctttcatgttttcaacattatctaggaaaacatgtgtctgaaagtttacaaagatctctgcataaatgtaccttgcaagtgttgtcttcccaacaccagcactaccccaaatgccaattgtacgaacctctttgttaacttctaaagccaacaagtcataaaccactttcatgtgacgatccattgcaacaagggcattcgaatcgtttgatccggagtagaacacgacaagagatatgtcacgagcaatttggttgagtagatctgactgatccattcctgcaagattttgagataatggatactcagcggcaaggttggtcaatttggtaagtgcagttctccaacttggcgccttctccggatgttgtctgcatatttcttccacattaaaagataaatctgtaagaaaaatgggtatgaccatgagtgaacctttttcctgaaactcgagtatcactaagagctcttctaggaagccaacggagcaaggtttcgtcgtagaggtcataacaaccgcgactctcgactcttccaaagccttgagtgtccgttgaccaattggtccgaatctcttctccaagcatctgtaggataaaaaagttctaatgccatttcgaatcaaaatattttgaaaatatccatggctagtctggcagcagaaactcaggaagacatccacctcccttccaagcaacaaagaagcagcagaagatgaagaagcagaagacattgctttggttaaaaacactaattctgcagctggactcgaacaacgaaaagctacacatgtgaaacagctttacaacaaacacaccacttataaaaaaaacactagtagctaatgtgaaaacaaacaagacaaaaaagacaaaaactttacgtagaaatatataaataaacagagcaatgatagatttcaaagtatttaaaagttcttaatagatatctatcaaaatgacagcatacaaagtagcatttggtttattctttatatttttttgccgaacaaaatcaaagattcactgctccaagacatgatccacttgcttgatagattaatttcttatattttccttgtttatgcatcaaaccaacattaaagaaacgacatctctcttatcttttgatctttcaggattcaaatgatcatcttgaaacagagcgttgaaacagagtatctttgagcctcttctaagccaaggtctttgacaatg

SEQ ID NO: 23767 - DNA, 3003 bp, Unknown; identical to SEQ ID NO: 20751
  misc_feature (1)..( 3003): 2750-1469P.txt file - cDNA_ID_2152105; gDNA_ID_1620788; Annot_ID_168210

SEQ ID NO: 23768 - DNA, 3000 bp, Unknown
  misc_feature (1)..( 3000): 2750-1469P.txt file - cDNA_ID_2152180; gDNA_ID_1620505; Annot_ID_158995
acttgattggggagaagatggttacgcgacaacggctgagacatctgctctacgtgcttcatttcgtcaagaagttgcggtttggcataagcttgaccatcctaatgtcacaagggtaataataataacctctttagtggtctatctttgtgtgtgtgtatgtaatgaatgagactctatggataaaaccagtttgtgggagcatcaatgggaacagcgaatttgaagataccttcatcagctgagacggagaactcgttgcctcaacgagcttgttgtgtcgttgtggagtatatccctggaggaactcttaagcagtatttgttccgaaacaggcgaaagaaactcgcttttaaagtcgtggttcaactcgctctcgatctctcccgagggtaatttacaaaactcattctttaatctccaagaaagaaacttatgatacaatcatgatgatggtgatttcatctatgtaggttaagttatttgcattcagagaggattgttcatcgcgatgtgaaaacagagaatatgcttttggattatcagaggaatctaaagattgctgattttggggttgctagagttgaagctcagaatccaaaagacatgactggagaaactggaactcttggatacatggctccagaggtacacaaaaacagagataacatttaagacaaaatgcggtttctttgtttggtttcaaaatctaatttatagtaatctgattaggttcttgatggcaagccatacaacagaagatgtgatgtttacagctttgggatatgcttgtgggagatttattgttgtgatatgccttatcctgatctcagctttgctgatgtttcttctgctgttgttcgtcaggtcagtggaacttataatataatcccaagttctgaatctttcaaagttatgaaatatgtaaaatttgtgaaacttaagtttgtctctcttggcttttggaatttcatagggttagttaatccggtttaggctagtttttagtctgatcggttaaacagaacagaatccaaattttggctcaatttcggtttggtttttccggtttcgtttattttggtcactactgtacaatgagagaatctgagattgttggtttgttgtcttaaacagaatctgagaccggatattccaagatgttgtccaacagcattggcgaccataatgaagagatgttgggaagctaatccggagaaacgaccagagatggaggaagttgtgagtttgcttgaagctgtcgacaccaccaaaggcggtggaatgatcccggaagatcagagacctggctgtttctgctttgtctctggtcgtggtccctaattttaccccctctctctttttacctttatttatttacttacttaccttcacattgaattttggagcaatgctctgttttttttcttcttctttaatctgtcaagataaaaaaagattttcattattaatatatatacacattattattatttctgtcactgtgaatatgaatattgtcgtttggtccaatatacattggaaaatcatataacatattttttgaaacgactgtgataagttaaggcctctgttttaatatacatagcatagtgtgtgcaaattttctctatttagtaagatgcatctttctttctatttgtaaagggtttactattagaatgcatgaaaaatgacaaggctatgacttgtttagtcacataaattgaaagagtagttatgagagaaagaagattaaggttacacttaatactgtttttaaagacaatcataagtcagagaaagggagtattaagagaggagatatatcactagatgtcactagttgggtgaatcttcgtccgcctccgctttctcaaccccggttttcacgtctcttaaatgtagtccattgcattttttggatctttttggttggtttgaatgtttgaccgacctttcttcgcggttcctctgtgtttttcataacttgcttattcccctgaactcttccctacatttcatgatcctcatttatagacacaattgcacatgtcaagtgtcaggactcaggaaaagatgcatctttcacttacaaatccaaccatttacattgaatagaatggaagatgttagattgaatgcaataaacatgttacaaattagtctcaataccacacatctagaattataacataagaagcatgacttatattcatattttatttctggatccgaagatgcacgtggtcaattggaattaggtcgaaagtccaaatgaaaatttggtggacaagatgttttggccgttttgatcactctggaatttagtcggatatgcccggatcacacatgcttgaaaagaagttcactcatttccctatcaaaaaacaaacccacataattagatgactaattagaaagataaaatattgtaaaataacgcattcaataaacctaataaataagataccaagtattttaacagagaaataagtctatttacatttacgcaaattgggagagacgtaatattgaggtgtatataaactacttataacgtggcacatagttggatagctgatttcccacacggcaggcaaaggaatcacatgtaacgttgctgtctgatccaaagtttactcattaaatatccacttactttttgttaacacaatctcacaattatccacttttggttagtactattttaatttctcttcaagataattcgctcgttttcctcgttacaaagcttataggtcggtacataatttattggtcgagccacagctatatttagttatttaccaacattaccataagggacatatatgtctttttcacatttcccgtatctcctcctatatataaagcttagtgatgtcgtggaaaaccaaccatatgaatctcacgatcaaagataatatctcatcatctatatagtatttgtctcgatattagagacgtacacactttgtttatactcaaatcaatatg

SEQ ID NO: 23769 - DNA, 3000 bp, Unknown; identical to SEQ ID NO: 2223
  misc_feature (1)..( 3000): 2750-1469P.txt file - cDNA_ID_2152183; gDNA_ID_1620505; Annot_ID_158996

SEQ ID NO: 23770 - DNA, 3003 bp, Unknown
  misc_feature (1)..( 3003): 2750-1469P.txt file - cDNA_ID_2152187; gDNA_ID_1620505; Annot_ID_158997
tgtgaagagaaatagacagacaaataatgtatatacaataagatgaaagaaatgcatttgtcgtctcatacttgtcccaagtccgattattatggttcaaaaaaagccaaataacaagagtgcaaatttattttgaaaatccaaacaatcgtcgtttgttctgtcttttgttttttaacgtttgttctgagttgtacactttctccttgaaatattcggtgttgacatccaacaaaatgcttagattcgaatatgaattatatatggagatggagaataattataaactaaaactatcctaccaaataaacattttggatcaattagttatcccaaacattttatcccatgggatcacacattttagatttctacatcattccctaaaaaatgtttaacaaattcaaaaattagaaagcaacaatcatttaaagtgcttgtatataatttagttgattttactaaagtcgtgcaattgattctcattacaaacaagttataagctagtcttgattttgacacaaagagaaagtgattattcagaaaaaatatatattatgtgggtagatgtgactgaaggatcctacattggatgattaatttacataaaatctagatataactctatggacttaaaaataataatggattctatgtataatggatgacaaagaacaaaaacgaaggagattctatagtacaaatacaaaggccaaatgatgactttggtaagatggcttttcttgtggccatttgtagtaagcaagatgatttttaatttacttaattaaaaatgtaacagcaattattttcttaatattccgttaataaacaacctgacatgcacaaacagttcatggaacagcttttgaatatcccaatacattaacacctgatttagtacattatacactgaaaattatatttaaagactgaccaaatatataatacatagatatcaatcaaaatgttatagaagatgcttctttttcttattttttgaagaaaaaaaaatgcattgttgtatgttttttatgtcacgtgatgtgtcatgtggcacgtgacagtgaagtagcagcatgaatgaagaatggtcgacattatgattatcgcatggagccacttttgccagaagaaatgttttcagctctatccatatcaatactcgaagacatatttactctatactttaataagtttttatttgttacaatcacttgactagtagttttagttaagttaagctccaaaaacttcttgaaaagctccggtagaaggatcatgccttcggtttcttaagccgtgatttgatggctaattgtatacatatcgtcacacataattcgtattttctttagccgaaaatcccccgcaacattactagaaaataaaatgtttaagtagatataatttcatttttcatcattcaaaagagaattttcgttccatatttccctttctatatctcacgattcacgtaccgatgaaaaggaccgttgctacgaacatttggagcattcgctttatggcgtcacgggaaatacattttttggctaggagaaataaatagctaaatttattttatttcagaaggtagctaatatattaaaacaacaacatatgtcacaaaaaaatattcatgcaattttttttcacagttcaccatgggtgcgtaataactgtattcacaatccatcatcatgtacagttatctttagaggtgacattaacttttcaacaactatttaacaagtagacgtacatacgtacgtgaaaacaatttcgttgcgagttgttagttacaacatacttggacgttgagaccattcacagtaactatatttcacatttccacttttacatgtgagtgtgtaacattgaggccattcacggtgactgtatttcttcaagttaaataaagttttgtttttgagctaaaccggttaaaaaatacacataccatattcaaatctttataaacttatataatccaactatttgcaaccatgtacacactattgtaacattctttggtaatgtcgatatactttaacgattcttataatatgggagatattttatgataatgccataaaattatcataaaaggcttgaatatctctgaacgttacatttaaaaagaaatattggaattatgattatgactataacttcgaataattgaccaattaatttcaatttaagtgtcatgatgattacacataagtgctttctcgtgattagcaatattcagccagcaatatattttattaattccaaatctccatgttaaacaaaagccttgtaagttgtaatctcataacgtgtgtttctttttcattccgttctagaatcttctttaatccaacacttaatactagtacttaattatcatgtattctcacgagataattacatttatcgagcacaaaaataagtttaatttatcttaacgaatcactgttaatacggtcaaataattataggtatatcaacaatgacaagtagtagtcaacagagtcagtaaaaaccacagagaaaagataggaatttatttctcttttttgttgttcatcatctttatatatacaaaacaaaacagaaggtgcagcgaaaaggaactgttgattattgcagttacttaaattttattttgcataaccaaagcaagaaaaaaaaggagcaaagattaaggtgatgtccgttactttattaaaagcaaaatcgatacgatatttatttttgtacagagagacaacagcgagtgaattgattctcaaagagacgtgtacgtagaggtgtatatatagacaacataaaagagaaagagagagacaaagacaagtgttggggtcaccttttgtggtctctgttggatttggtttggactatcttcacgagattatcctcatcttcccgcttcttctctcctttgaatctttcttcgttgttctttcactttcttaaagaggatgtgagattgtttttggtagttagaaaatg

SEQ ID NO: 23771 - DNA, 3003 bp, Unknown
  misc_feature (1)..( 3003): 2750-1469P.txt file - cDNA_ID_2152195; gDNA_ID_1620505; Annot_ID_158999
attcaggacaaattatagaagtggttccaaagtctttagcttcagtagacttgactccaataagccccaagaagaaaaggcaagtttgtcccgaaacttgcagaaacagatttatggtaaatcttttttctaacaatctgttggcatttgaaacatgcaggcgtaagtccgaacaatcaggagaaggcgactcgtcatgtaaacggtgcaactgcaaaaaatccaagtgtttgaagctgtaagttgaatacaccaatctttggcttgctttgaagtagttttttgttgagtctcttgtactgtgtttccctctgcagttactgtgaatgctttgctgctggattttattgcatagagccatgttcatgtataaattgcttcaacaaacctatccataaagatgttgtcctggctactcgcaaacagattgaatcccgcaatccacttgcatttgctcctaaagtcatcagaaactcagattccatcattgaagttggtgtaagtgttctcaatatttccttttacttatcatcctcaatacatttatctcattgaaaaggctataaaattctgcattggttcacaggaggatgcaagtaaaactccagcttcagcgcgacacaaacgaggctgtaactgcaagaaatcaaactgtctgaagaaatactgtgaatgctatcaggtatttccattaaactccatacacatcagtgtaagattcccttctgtggattggttctgattcattgatcgtgtagggcggagttggttgttctataaactgtagatgtgaaggatgtaaaaatgcatttggcagaaaagatggttagcttttacttctccactttatcataaacacacaagtctcttgatcttttatttgacaagagtacacaatttcttgcagggtctttgttcgaacaagatgaggagaatgaaacatctggcacacccggaacaaagaaaacacaacagaatgtcgagttgttcaaacctgcagctccaccttcaacaccaattccatttaggtaaagaaataatctcaaatacaatcaaatatgtgtccatttacacttctcctgattaactttattaacctttgttttcagacaaccactggcgcaacttccaatctcatccaacaacagactgctacctccacagtctcattttcatcatggagctattggatcatcttcctcagggatatacaacatcagaaaaccagacatgagtttgttgtctcattcaagaatcgagacaatcacagaggatattgatgatatgtctgagaatctaatccattctccaataactactctatctcccaacagcaaaagggtttcgttgtctcatcttgattcaccagagtcgactccatggagaagaaatggtggggggaggaatctgatacgttcgttcccaacgtttccttctctcactccacaccattaaaattctttgaatgtcaacttctagttggtagttttaacttacacagacaacatacgcaaacatttacaagtttagtagcagtattgcgttagtttttacaatggttgtgtaataaaaatgttaagtcatttatcaatatcttgacaacattcctcgtctaatatcacaaatgtaaccttatttattcaacaattttcatgtaaaaacaatcttcacaattaataatttattgactaactaataataatcttgttcaaagaggatgacaaaagagaaagaaaaccaaaaaacaagctggtcgactaattaagttgcactagacttggaacataagaccacacaattgggtaacaccttctgtctgattctccaagatccacttctttcatggatccatccactccaatgatgtaagctatgtagcgctgtattctgtagcctttatcaaaaacaacagcgactttcttctcctcgtcaatgaagaaactccccaaacaaaactgaaactgagggccaatgagttttcttatactcactgataagaacaccttgctgttccaagacaccgcgttgggctcaatcttagacgtgacccagatctccatcattaatgtatcccacggctgatataaaacagcaagctgctcgtctctaacattggatacactcaaagcatcttcagattcaacaaactgaaacggaagaggcaaaagtggtccaaatgtctctcttgtgaaatcaaaagagagtaagaaaaactcttcgtttgtttcacttgtttcgtaatacttctcttcagcaacccagaaggcatttcccttgagagacacgccactattaatagtccctaattgccagtctggagtgacatgaaaaaccctccatgaattagagttaaaatcgtagattatgaactcatgaaaatggggtctcaaacaagtaatacacctcaagattttgtgggatttgctgctcttgtcgtatccgagagcataagaatagctgtcgaatttgttgaactgatgtgtgggctcgattgaccgggtatgcccccaatacgggttccaaaccacgagcctagtcttggcttgggtgatgctgatgcataacaataaaccgtcgcagtgaaagacttgagatatatcatcaacttcgtcgcctaagctaataactttagcttcacgttttatacatgatgatgatgatgatgatgatgattcaacgacgttgttatcaagattgactctcatcaaataaaccctaaaattcatcatcatgaccaccataaagtaaagagtaaagcattaattgggccaaaaatgtaacgaatgggcctgagtgttataggtccaggtaagggaaagatgacgtcacttagtggatggactaaaagagtgatatgatttggacttcatagttcacactgtttcgcaccggcgcggacaaagttttttttttgttcgaaatccgacaacaaccctagattataaacaaaataaaccagtgtctgcatagaggcaatgtagatgtgatttttgctggaaaatg

SEQ ID NO: 23772 - DNA, 3000 bp, Unknown; identical to SEQ ID NO: 7394
  misc_feature (1)..( 3000): 2750-1469P.txt file - cDNA_ID_2152269; gDNA_ID_1621143; Annot_ID_172911

SEQ ID NO: 23773 - DNA, 3000 bp, Unknown; identical to SEQ ID NO: 7392
  misc_feature (1)..( 3000): 2750-1469P.txt file - cDNA_ID_2152288; gDNA_ID_1621143; Annot_ID_172919

SEQ ID NO: 23774 - DNA, 3000 bp, Unknown
  misc_feature (1)..( 3000): 2750-1469P.txt file - cDNA_ID_2152311; gDNA_ID_1621143; Annot_ID_56695
tttttatatattcgatataaattagctaaaactattttctaaaatggggatggtggagaccatagagtaccaatagagaagagctatcagaagttagtattgaccggaactaatctagaattgtgaaaattatacacacacacacacacatactaattcgagtacagctgaaacatttcaatagaaaaaatacccaatgatttaagagagagctgcattttaaattgttacttggaggactacgatgaagttataagttatttggataatctagctcatgtagcagcttttatgctggcagggcctttttagggtttggttgaacatgtgtgagagacatactttcaaatgatttctgagattcttattggataaggacactcttcttcctattattgtttgtgttaatcatcttatattgagttacctttatgtaatagtttttgataatgtttataatatgagtatgaaaagagtggttctaatctcatatgggtttccaacttatttccaacaaaaaaaacaaaaccagaaaatggattaaaaattagtaatgggccggcacagcccattaggtatattcacctacccaacatgttgaaccaagttaacgacttatagtaagattaactaacatgaaataaaacaagggtgagttaaaaatctataaatgcaccagcaaataattaaaaatttatatatgaaaactatttatttaggtaacatttttaattaaaatctatatgacaaatatactctttcaaggagatatgataaaaatcaggatagttagcatataaacgcattatcgagataatattgttagcgaaatatagatagagtttgatggatggatgaaatgacattgagtacaaaccaacttaatatgttaataatatatttgacgatataaaaaaattctcagttattgaaccaatgtttagatttcaaagactgatatatatgcgaagcgataacattattatttaaaggtaacaaaatatttagcatgaaaagcaaaaaagttgacttgcgactgaataatcatgtagaaaaaatacatgcatcagaatagttagcatataacgtattatcaggataatattgttagcgaaatatggatacttggataaagttttgatgtatggatgaaaagacttaggatacaaacctacttaacatgttaataatacagttgacgatataattaaattatcagctattgaaccaacgatttgatttcaaagattgtataattatgggaagatgataacattattattaaaaggtaacaaaatatttaacgtcaaaagcaaatatgatataagagtataaaggtattttcatgatggaaagagaaaactcaacagtaattttttcttggacttaattttgtaatattctgtgtatatagagtgataatacccttgaaatccacatatcaccaataaaatgtatatatatagcccctactagactactaatcttgtgtaacttatatgatttgtctattacaactttagaagtatttgaaaatacaattttgctaaatatgatttatatgatttatatgatttatcgcttttttagtggaatcgaactccaacaataaaaaaagcagaatcaaatagatttaatcactcgactaaatacacatctccacgtaatttatcgtttacatatagcaaacgaacattatatctgacgaccaaacctaaaataaatacagatggacatattcggaaacataatataccaaagcaaatagtattctaatcgtacagtattaagatgactctaatacacattgacttctttaaataataatataattttatattaatattttaaatcatatgtaatgtataatattaagatggtcttatatcttattatataaagtatggttttcaaagttactaatttataggatcgtgccacgtgtcaagtcaaacgatcggatttttacatgtgtcattaaaaatttaacttatgattacacccgcctaaataatttatttttgtatcttacactcgcctatttaggcgggcattatctagtttctaatatacattaactaactagtaactagtggtgagagtcataaataatttgaaaagtgccaattgagacacatgcatcaaaggggagtcatgtaaaatacttcgaagattcatctcaacataaaataaaataaaatcaattgattcgtcttcttatcctccaaaacattttatttttcttcgtcaattaattttgtggaaacaatttcctattctaatattttcacatttaaccgagactaaactctttttctctctctcttcctcaaataaactacttctaatttttgtcttcaacttaagaattataacaattatgaaagacctagtcagtttaccggcgaagctcgggtcgtatattatattttagcaaagaccttaattcttacattttttaaagacccaaaacaaatatttttaaccaaaaaaaagtctctctccatattcgtatacaaataaatacctttcatccatcagcttatagagaccaacatacaacaatactctctgttcttcatcttctctatcctgcaacaccaaaggttagagctctctctcctccctctctctatacagatttgctttaacttttatcaatgttttgagcactatattcttatataaactattgtaaacgtaaagagcatagtctggaaaactatagagttctattgtcttctaagttctaattagataattgtttttttgggtaaacaatagataatagtggtaacggcttctttattcacccatgaaatttgatcgtttaaatggccttcttgcttcactctagatcttgtttgatcatcggtttgaaaatggttttatcttttaataattcccaacgtaatgaaacacatattgcttttgatgcgaattactgactaagtaacacaatatgcctttatgtctcaagatacaaatctatccgatatg

SEQ ID NO: 23775 - DNA, 3000 bp, Unknown
  misc_feature (1)..( 3000): 2750-1469P.txt file - cDNA_ID_2152311; gDNA_ID_1621143; Annot_ID_172933
gtcctaatcgtttatgtatattatacctttttatatattcgatataaattagctaaaactattttctaaaatggggatggtggagaccatagagtaccaatagagaagagctatcagaagttagtattgaccggaactaatctagaattgtgaaaattatacacacacacacacacatactaattcgagtacagctgaaacatttcaatagaaaaaatacccaatgatttaagagagagctgcattttaaattgttacttggaggactacgatgaagttataagttatttggataatctagctcatgtagcagcttttatgctggcagggcctttttagggtttggttgaacatgtgtgagagacatactttcaaatgatttctgagattcttattggataaggacactcttcttcctattattgtttgtgttaatcatcttatattgagttacctttatgtaatagtttttgataatgtttataatatgagtatgaaaagagtggttctaatctcatatgggtttccaacttatttccaacaaaaaaaacaaaaccagaaaatggattaaaaattagtaatgggccggcacagcccattaggtatattcacctacccaacatgttgaaccaagttaacgacttatagtaagattaactaacatgaaataaaacaagggtgagttaaaaatctataaatgcaccagcaaataattaaaaatttatatatgaaaactatttatttaggtaacatttttaattaaaatctatatgacaaatatactctttcaaggagatatgataaaaatcaggatagttagcatataaacgcattatcgagataatattgttagcgaaatatagatagagtttgatggatggatgaaatgacattgagtacaaaccaacttaatatgttaataatatatttgacgatataaaaaaattctcagttattgaaccaatgtttagatttcaaagactgatatatatgcgaagcgataacattattatttaaaggtaacaaaatatttagcatgaaaagcaaaaaagttgacttgcgactgaataatcatgtagaaaaaatacatgcatcagaatagttagcatataacgtattatcaggataatattgttagcgaaatatggatacttggataaagttttgatgtatggatgaaaagacttaggatacaaacctacttaacatgttaataatacagttgacgatataattaaattatcagctattgaaccaacgatttgatttcaaagattgtataattatgggaagatgataacattattattaaaaggtaacaaaatatttaacgtcaaaagcaaatatgatataagagtataaaggtattttcatgatggaaagagaaaactcaacagtaattttttcttggacttaattttgtaatattctgtgtatatagagtgataatacccttgaaatccacatatcaccaataaaatgtatatatatagcccctactagactactaatcttgtgtaacttatatgatttgtctattacaactttagaagtatttgaaaatacaattttgctaaatatgatttatatgatttatatgatttatcgcttttttagtggaatcgaactccaacaataaaaaaagcagaatcaaatagatttaatcactcgactaaatacacatctccacgtaatttatcgtttacatatagcaaacgaacattatatctgacgaccaaacctaaaataaatacagatggacatattcggaaacataatataccaaagcaaatagtattctaatcgtacagtattaagatgactctaatacacattgacttctttaaataataatataattttatattaatattttaaatcatatgtaatgtataatattaagatggtcttatatcttattatataaagtatggttttcaaagttactaatttataggatcgtgccacgtgtcaagtcaaacgatcggatttttacatgtgtcattaaaaatttaacttatgattacacccgcctaaataatttatttttgtatcttacactcgcctatttaggcgggcattatctagtttctaatatacattaactaactagtaactagtggtgagagtcataaataatttgaaaagtgccaattgagacacatgcatcaaaggggagtcatgtaaaatacttcgaagattcatctcaacataaaataaaataaaatcaattgattcgtcttcttatcctccaaaacattttatttttcttcgtcaattaattttgtggaaacaatttcctattctaatattttcacatttaaccgagactaaactctttttctctctctcttcctcaaataaactacttctaatttttgtcttcaacttaagaattataacaattatgaaagacctagtcagtttaccggcgaagctcgggtcgtatattatattttagcaaagaccttaattcttacattttttaaagacccaaaacaaatatttttaaccaaaaaaaagtctctctccatattcgtatacaaataaatacctttcatccatcagcttatagagaccaacatacaacaatactctctgttcttcatcttctctatcctgcaacaccaaaggttagagctctctctcctccctctctctatacagatttgctttaacttttatcaatgttttgagcactatattcttatataaactattgtaaacgtaaagagcatagtctggaaaactatagagttctattgtcttctaagttctaattagataattgtttttttgggtaaacaatagataatagtggtaacggcttctttattcacccatgaaatttgatcgtttaaatggccttcttgcttcactctagatcttgtttgatcatcggtttgaaaatggttttatcttttaataattcccaacgtaatgaaacacatattgcttttgatgcgaattactgactaagtaacacaatatgcctttatg

SEQ ID NO: 23776 - DNA, 3000 bp, Unknown
  misc_feature (1)..( 3000): 2750-1469P.txt file - cDNA_ID_2152441; gDNA_ID_1621183; Annot_ID_174329
aagaatcaattttcactcgaataattaaagtaattagtttaaagattttactctatttctttccccaaattaatataaaattatgaaaattaatgggtttgtgtttttctttgtataggaaacgaaagatgagaagcaacgttcagtgttaacgaattcagcttcatcgagatcaaaaacatggaggccatcattgcagagcatctctgaagctacgagttgatgtttgggttttacgtgagggacaagaaacgtagtctctgtgtgtgaatcattcagaagatggaatctgaagaagaaagagatataaacattattgaataaactcttctcttatgttcctttctggttataatttacataggagatgaaaattttatagattaagatgtaaaaagaactatgcagagattaagaactaagtcccttttttgtcctgttaatgtatatatgtgctccatgtgaagaaatcaatcaaaaaatagattgtaaaaacatacgtttttgttggtgtttactggtttacacaaattcttggaataaagttcaaaaaactttagttaaatgagtccaaaaacatttgatttagatggttatgtgaggtataaatggttgtaagaattgcattgagttggattgatcattggtaggtacacatcctttcatgcatttatgggatggttttttaagaaaataaccaattttatttgagattattagttatttttcttcagagaagtagtagactttctcaaaatttatatttctttgaatggaaaatcaaattgaatttacattgtcttttttttttataactacttttttcatttttttagcaaatagtataacatagatgagctaagtaaaccaacaaggatgggcatttgcatcaaacccataccaaaccaaaaaattgaaccgatattatgaatcaagaatttaagatatccttgaaataaaaaatctgaaaatccaactgaagccagccaatgtttttagactctataaaaagatatctgattaataaattgttacttttaattttaatttttttttaatccagaaaacaaaaaatcaatggtcaaaacatacatagaaatctcaataccaatctcaatttattctgaaatattcttctgaaaccagaaaccaaagaaatccagaccaaaccgaaataactaaaccggaataaaccccctatccagtcatagaaacacttgattctaaagattgcgatagccgccgataggccaatcactcttttggccttatccgaaatctttttgtgggcagaaacgtttgtgtcttaggccaatctctgtgtctctctgtccagagagaaatggcagcatcatcagtactactctcgtgcttcaaatcccatcatcaaccaaaccttctccatggctgcaactactcatctaaccaaacactcctcagattcaacttttcaaccccaaaacctctcctgatctcctcacggagctgctcacgacgattcagagtcttgtcagagaccatcaccgtcaaattggaagaggaggagaaggatgatggtgcaagtgctgttcttgatcctcctgccgccgttaacactaagctctacttcggtaacttgccttacaatgttgacagtgcaactctggctcaaatcattcaagatttcgctaaccctgagctcgttgaggttctttacaacagagataccggacagagtcgtggattcgccttcgttaccatgagcaatgtcgaagattgcaacatcatcatcgataacctcgatggaactgtaagtctcttgcagccttattacaaaacacataaaaaaaaggaaaaaacacattttagttgatctttgttattggtctttctcaggagtatcttggtcgtgctttgaaagtgaactttgcagacaaaccaaagcctaacaaagaacctctgtatccagaaacagagcacaagctctttgttggtaacttatcatggactgttacttccgagtcattagctggagcgtttcgagaatgtggagatgtggttggggctagagttgtgtttgatggagatacaggaagatcacggggttatggctttgtatgttactcttccaaagcagaaatggaaaccgctcttgaatcgcttgacggatttgagctggagggtcgggcgattcgagtaaaccttgctcaagggaagaaattttgatatcatacaacaacattgtgtaatcatttagagttttatacattagagttatgtttatattgattgaactaattaactcaaaagatcaataaaactttttatgctagaaggtgttggtccaaattgttcacttgtgtgtctttgccagaaaatacaacattagaatcaatcaaaagcattagttttgttccttctctcgataacaattaacaattaacaagaaacctagtgacttctctttatacacatgtaagaaaaatcacacagagactcttcgttcattagtggtgtgcttcactgaaccaaaacactatagaactctaacttcacaagtgaagagaccgtaaagacccaccccagagaggaagagctaaacggtggcgacctcatccgttaagaaattctatagacactcagatcgcacggtcttagttgatcaaccagggttacagaggtacgagcctatgacagttcaggttaggtcgtgaccagtccaacttatcttcactttagacgatgtgagacaaagaaaagactaaagtcacttaacaaagcctatacgtcgtcgtttccttcctcaacgtactaattgctaatatgtcgtcgtttcttacatcagtgagctaatgaagagagagactgaaacagaggtttcttactttcttctctgtatctctcatattttgcttaaaccctaaaaccctttttggattaggttttctccaaatcttatccgccgtgataaaatctgattgctttttttcttcatgaaagtttgatttgtgaaactcgatg

SEQ ID NO: 23777 - DNA, 3000 bp, Unknown; identical to SEQ ID NO: 8018
  misc_feature (1)..( 3000): 2750-1469P.txt file - cDNA_ID_2152445; gDNA_ID_1621183; Annot_ID_174332

SEQ ID NO: 23778 - DNA, 3000 bp, Unknown; identical to SEQ ID NO: 3176
  misc_feature (1)..( 3000): 2750-1469P.txt file - cDNA_ID_2152530; gDNA_ID_1620630; Annot_ID_162639

SEQ ID NO: 23779 - DNA, 3003 bp, Unknown; identical to SEQ ID NO: 18894
  misc_feature (1)..( 3003): 2750-1469P.txt file - cDNA_ID_2152530; gDNA_ID_2926193; Annot_ID_201249

SEQ ID NO: 23780 - DNA, 3000 bp, Unknown
  misc_feature (1)..( 3000): 2750-1469P.txt file - cDNA_ID_2152556; gDNA_ID_1620630; Annot_ID_162651
aaaccagtatcgtgaacccgaaccggagggaagatgataatgagagtatagatggacttaaccacgtggaatgctatggcttgtcagtgattttggttatgctaagggtcccgtcactataaactagctatattcgaaggtacacaagggcctcaaagttagatttctaatcataagatatgaagttattagtactctttataaatcttcatgaaaagacatccgtatttcatccttcttttcataactatctttgtcaaatcttatttattttataaaacccaaaaactgtaaatctttataaaatattgtaattttcaaagatttagttgtgtcaaatttatttcttcagtaaatggaaatacaggttggcaaaaaagaacattaaccactctatgttgagcggcaatatccgttaggtgcattaattcttcttaaaaaggtaattacgcatttccttggttcgattcgtctagggacttaatagtgtgcgaaatattagaggatccaaatgatgcgtaagataagtcttatgagaagtccattagccctcgtaactatgattttaggtactagtagaaattcaattgggtatatttggtgaattctagagctttataattttgttatcgtttaaggctgataatgatgaagacataatgtcatggctctatgtttttattgctctttcctgttattttttttatcaactgatattaaagaatatatacattatattggctggtccatttcagtttttcttttatttggtcccgatttgattttatgtacataaaacatgtagaaccaatagtagtgtggtcgttatctttctaataatcgaaggctcgaaaccatatattgattcttggttagcgtatcgtctcttttatgactgcataatttacatggcttgcctatgtgttacacattatctcgatttcgatttcacgttcttggtaacatattaaagaatttagtatacgaaacaataaattgcatggggaaaccgatattcataaccaacgataatttgacaacacaaaaatggatcatcattcgccattgcccactcggccatacattagaaggacaagttatatttatttgctctctgtgaatctaattaagttttttactcgtcagtgggaaacatatagtaattgttttgtttgcattaaaatgaaaatgtatatatataaataaaaatgtactgatatatctactatagtagacttagtagtaattgttgtgaaagtagcagaaacaaaggatatggttgttgtaacataccaaattttcatgaaagcattcattgtgaatgtgaagttgagcgtatctatccgtgcaaccaaaaatagaaagagatgaagtatatgatcataatctgatttcttttgcttttagcacactaatcattgaagtttaagcatcacatctcttttctattttcctttccttgacaaaacttgcgaatcgttttgatgttccatacgtcttttgccatcattcatacataagtaccaaccaactattattaaacttttatttgttaattatacacaatattgactatatatattattatttttaccacaaaaaaaatttaaaatttagactatatagtaccaaccaatatagtattaatttttttttattttttacaaaaaccaatgaataaatttgattttccgaatgtggtttcttaattaaatttatattatttcagttccaatatttatatatatagataataaaaacaaaagagataaaagaagagatattggaaacaaaagaaaatgaataattgagagaacacaaaagaggaagaaagagagtggagaagagaagagaagagaagagagcaacttcctccattttcttttggcttcctctctccttctcggtttgttttgtctgtacctgagagagtttcccctaacaaaaaaagactcttttttcctcaaaatccatttcgcttccgacgccattctcagtcggtgtgaacgcgtgagagaaagagagagatttggcttactttatctccggcgggcatctttttccggcggagtttccgatgtatctactctagctaagctcagctcttaactgttacaggtctctctctctctctctctctctcttcccccgagtaaaaaagccacaaaatgtctgaatcatttagctctgatctcactttccgatgctttttacctattttctcgtttcgatttctttgtttgcttttcactgttcttacttcaattagattctgatccctctttttaccctttctctctctctctttctctgcttttgcttttactgtttccttacaattgtgattgtattgagctaattttggtcggattcatttactcttctctttgtcaatttgcttgtttttgttaaagatgtgacatttattactaaaggtttcttctttttgggggaaacaaatttgagttcatagatagacttactagaggagtgttgtatcactgatgctggaatctggttaatgtaggcagatccacagtgcctgttgattgtttcttcctatcatcaatctcggaatttgagggggtcttattattaagggtgagtcaattttgatttgtaattttcacaaggagtttgtgttcagacttcagagcataaaaagtgactggcttgattgtgataggtcatgtgaaaaaatggtaactggttcatcttatcttttgttcagtcactataaagtgtccctctgattacagaatcttattctcctttctttttttccttacaaagttcttgttttgttatgcttgtcctgttcctctttgctgctagaaatattctcttcttctactctctcttcacttttcctggatcttttaggtttaaattttgaagcttgcagagctggaaagtttcttcattaggaatctttgcttgttagtttcgtgtcacctcagataataactaaatagctgtgaaactgcagggaccataatg

SEQ ID NO: 23781 - DNA, 3003 bp, Unknown
  misc_feature (1)..( 3003): 2750-1469P.txt file - cDNA_ID_2152556; gDNA_ID_2926193; Annot_ID_201238
gctaaaccagtatcgtgaacccgaaccggagggaagatgataatgagagtatagatggacttaaccacgtggaatgctatggcttgtcagtgattttggttatgctaagggtcccgtcactataaactagctatattcgaaggtacacaagggcctcaaagttagatttctaatcataagatatgaagttattagtactctttataaatcttcatgaaaagacatccgtatttcatccttcttttcataactatctttgtcaaatcttatttattttataaaacccaaaaactgtaaatctttataaaatattgtaattttcaaagatttagttgtgtcaaatttatttcttcagtaaatggaaatacaggttggcaaaaaagaacattaaccactctatgttgagcggcaatatccgttaggtgcattaattcttcttaaaaaggtaattacgcatttccttggttcgattcgtctagggacttaatagtgtgcgaaatattagaggatccaaatgatgcgtaagataagtcttatgagaagtccattagccctcgtaactatgattttaggtactagtagaaattcaattgggtatatttggtgaattctagagctttataattttgttatcgtttaaggctgataatgatgaagacataatgtcatggctctatgtttttattgctctttcctgttattttttttatcaactgatattaaagaatatatacattatattggctggtccatttcagtttttcttttatttggtcccgatttgattttatgtacataaaacatgtagaaccaatagtagtgtggtcgttatctttctaataatcgaaggctcgaaaccatatattgattcttggttagcgtatcgtctcttttatgactgcataatttacatggcttgcctatgtgttacacattatctcgatttcgatttcacgttcttggtaacatattaaagaatttagtatacgaaacaataaattgcatggggaaaccgatattcataaccaacgataatttgacaacacaaaaatggatcatcattcgccattgcccactcggccatacattagaaggacaagttatatttatttgctctctgtgaatctaattaagttttttactcgtcagtgggaaacatatagtaattgttttgtttgcattaaaatgaaaatgtatatatataaataaaaatgtactgatatatctactatagtagacttagtagtaattgttgtgaaagtagcagaaacaaaggatatggttgttgtaacataccaaattttcatgaaagcattcattgtgaatgtgaagttgagcgtatctatccgtgcaaccaaaaatagaaagagatgaagtatatgatcataatctgatttcttttgcttttagcacactaatcattgaagtttaagcatcacatctcttttctattttcctttccttgacaaaacttgcgaatcgttttgatgttccatacgtcttttgccatcattcatacataagtaccaaccaactattattaaacttttatttgttaattatacacaatattgactatatatattattatttttaccacaaaaaaaatttaaaatttagactatatagtaccaaccaatatagtattaatttttttttattttttacaaaaaccaatgaataaatttgattttccgaatgtggtttcttaattaaatttatattatttcagttccaatatttatatatatagataataaaaacaaaagagataaaagaagagatattggaaacaaaagaaaatgaataattgagagaacacaaaagaggaagaaagagagtggagaagagaagagaagagaagagagcaacttcctccattttcttttggcttcctctctccttctcggtttgttttgtctgtacctgagagagtttcccctaacaaaaaaagactcttttttcctcaaaatccatttcgcttccgacgccattctcagtcggtgtgaacgcgtgagagaaagagagagatttggcttactttatctccggcgggcatctttttccggcggagtttccgatgtatctactctagctaagctcagctcttaactgttacaggtctctctctctctctctctctctcttcccccgagtaaaaaagccacaaaatgtctgaatcatttagctctgatctcactttccgatgctttttacctattttctcgtttcgatttctttgtttgcttttcactgttcttacttcaattagattctgatccctctttttaccctttctctctctctctttctctgcttttgcttttactgtttccttacaattgtgattgtattgagctaattttggtcggattcatttactcttctctttgtcaatttgcttgtttttgttaaagatgtgacatttattactaaaggtttcttctttttgggggaaacaaatttgagttcatagatagacttactagaggagtgttgtatcactgatgctggaatctggttaatgtaggcagatccacagtgcctgttgattgtttcttcctatcatcaatctcggaatttgagggggtcttattattaagggtgagtcaattttgatttgtaattttcacaaggagtttgtgttcagacttcagagcataaaaagtgactggcttgattgtgataggtcatgtgaaaaaatggtaactggttcatcttatcttttgttcagtcactataaagtgtccctctgattacagaatcttattctcctttctttttttccttacaaagttcttgttttgttatgcttgtcctgttcctctttgctgctagaaatattctcttcttctactctctcttcacttttcctggatcttttaggtttaaattttgaagcttgcagagctggaaagtttcttcattaggaatctttgcttgttagtttcgtgtcacctcagataataactaaatagctgtgaaactgcagggaccataatg

SEQ ID NO: 23782 - DNA, 3003 bp, Unknown
  misc_feature (1)..( 3003): 2750-1469P.txt file - cDNA_ID_2152681; gDNA_ID_1620506; Annot_ID_159025
attttaaaacaaatttttttgttaaaacaaatattattcttactaaacgttttttgtttaaataaataaatcatgtatttgaacttatttacaatgtaatgacactgacattaattatttaggaatgaaaatattaaatcttctaaatccttgcttttagaattattatgtcattacttaaaaggctcaaaatataaaaaaattaaatattattatttatatatctagactttataaaacattattaatatttaaacttataaaaagtttaatatatcataattttttaatattattatataatatatagagttttaaaaaatcttaattctttccgtcatattttgtgactcgaaattttaaaaataaacatatattaatcaattggcaaaaaatgtgtgagttatacgtcccacatgaactaaaatatttagacaatgattcataaatatatcataaataagattaacattaataaaataatgatttttttacaggatgggtttggcgggacgcgatttagcaggacgttacttaataacaaatataaagtataaaataaaaatattttatagcaaaattttatatatactaattttaaaatataaattgtctccacggtgtaccacgggttaaaatctagttatttagtaattatgcatctcgtataaaccagctacaaaaatatcagtggaaggatctttatcagcaagcatattagaaaacattaaaaaatgaatagtaaactatgagtggggaagcaaaagaagagcgacggcttgctattggagacaaagttcataccacacgaactagacgatgcatagtatagatataggttaggcatatgtccatgcatatgttacgtgtagattgaaagggcatcgagatcaacggtggagatggaagcaagtaaaaatagccacgtgtggaaaaagcaaaagaagagaagaagaagatataagcgacgaaaggagagaggatatgtttcctttgtgatgggaacatcacaactctgtctctattggtacttctagttcactacttgtctatgttttttctttcagtacttagtttcccccacgatttacacaactttcttctgctcgtatttacagattttgaagattatttatacatctttatatagaactacacatgaaatcgtatgaaagcatgcatgaatcatgattcatgtgtgtgaaaattgacggtatgaagatgtgtataaattttatacatctgcgaaaatcatatcttgtggccaaatatcgaccaattggaacggcttgcaaattctatgaaaacgatcgatatgaaaatctgatttacatatataatagtattttcaattaaaaatcattttcctcaatttctatatatgtgtatttagcatatatatatatatatatatatcaaataaaccaaataacttcaataataatttaaatatatgaaaattaaaaaaattcactactcatatgatataattcatcactatagaacttataaaataagatcctggtaaaaaaagcatcaatcttgtatttcagtagtttataatgttaaaatatatgtaatcaaacttctcatatttttattaaaaccacacatgggctatctagctaattcacacacacatatatatatatattgttttcgattgtcatgatgatcatttatccacgtaagcagagacaagatgtaaaatgtcactagtttatagggagtggagtgggaataagtaggaaaagggaaaaaattaaaggaaaggtatacataattttcaagtcgattttgggttgataattacagtgagagggagacaacacattgcgctatacctaattctaactagtttcatttctagactgatggaccaatcatatcactttctactaatatcgttagtttgagcttcataaatatcttttatcacattttattttagaaaggttgttgttagttctatgcatctttttaaaccacacgaagtttcaaaaatattcataataatatttacgcctttataactaacatattcaatttcttacattttatcatggacaaaaaaagagagtagttcctcaggagaaatacaaattcgatatctaaaatcaagtgttagtaatctattggttaatattttttcaacacaaagattatttcatggtaaatgcattttttaagataacaattgtatgttcgaacactagtttagattctctatatgattttccgatactcaaagaaactatacactcactttcttaacaaatttattaggccaaatatatactgtttcaccggagatgcattcatatttactatggattagataacaattgtatgttccgaacactattttagtttaatttagattgcctatatgcatgatttttttataaccaaagaaaatatacactcactttcttaacaaagattaaataaagagataatcataaatggaactttgtactaacagaatcttgagaagaaatttgatttgagttttgttcttttttttttgttgttttaaatttccacatgcctatactttcgtttgtttatgtgacgcttttgtacgacaaaatcaggtttggattcgtacttcttttaggtcaatacattcttttgtttaattctgaccaaaaataaagaaatatgttgtttaataaaaatgtaggatattgagagtcgtactataataaaaaaataaaaaaatctcgaactttgatagtataagagatatacgattaaatcttgaacttaatatcctatatttttctcaaactatacttagtttgtatttatacttgtatatattagagtccacacaaagaaaaatggataacaaataatgacatcaatattttgggaacccccaccatgccaaacccaactccatgttacaaaacaaaacaaataaaatttctttataaaatggcatcttctcttcatattttttaaatctctcatctcaataaacaaacactaacaatg

SEQ ID NO: 23783 - DNA, 3000 bp, Unknown; identical to SEQ ID NO: 3604
  misc_feature (1)..( 3000): 2750-1469P.txt file - cDNA_ID_2152761; gDNA_ID_1620653; Annot_ID_163540

SEQ ID NO: 23784 - DNA, 3003 bp, Unknown; identical to SEQ ID NO: 19295
  misc_feature (1)..( 3003): 2750-1469P.txt file - cDNA_ID_2152761; gDNA_ID_2926186; Annot_ID_200611

SEQ ID NO: 23785 - DNA, 3003 bp, Unknown; identical to SEQ ID NO: 19288
  misc_feature (1)..( 3003): 2750-1469P.txt file - cDNA_ID_2152794; gDNA_ID_1620653; Annot_ID_163553

SEQ ID NO: 23786 - DNA, 3000 bp, Unknown; identical to SEQ ID NO: 19289
  misc_feature (1)..( 3000): 2750-1469P.txt file - cDNA_ID_2152794; gDNA_ID_2926185; Annot_ID_200572

SEQ ID NO: 23787 - DNA, 3003 bp, Unknown
  misc_feature (1)..( 3003): 2750-1469P.txt file - cDNA_ID_2152800; gDNA_ID_1620653; Annot_ID_47797
agacttacaataacttcatcaagcaactcatacacgagcacaaagtttttcctgaatgaatcttcattcagaacaccaagataatccttaataacacgagcaatcctttgtagaagctccaaaacaagagagggtgacacgttaactctcgttgtcgcaacaaaatatagaccaacaaccttgacatggaagtagttcacgccatcgacattctataagcacaaaaaataagttagatgaaatcattacagctcacaaccaaacagaaagtataatacctacaaagataggtggcgcctctgcattgccatcctccttccagaacttgactttacggaagaatgtctctgtacttcctttgggtacctcagcccggtctgtagcaataaaacgttacacatcttgaaacttgtattggatccaaccaaatcgtataatctcaaaacaaatagctttcttctactacattacatacagatactctgcccaaactaattgaatagttttgctatatttgtacaatctgatttggaaattcagctcaacataatttgtcatcggataagaaatgttggtagatcaaacagatcaatgagcttagagaagatttcaatggaaaattctcatgaaacagtgacataagactcgactctgaagagaaaaagcaaaacaggaagaagcagagaggatcagatcgagaaagagagcttacagtcacggaagacgatgttatctcctcgctgagataagacgaagaattgggagatcatcatcgttccttatagcggtggattccgactgtttcaccgcgagtttggttaagtctactgatcgccgatcggtctcgtctttttgtgtgtctggtggtgaggtggttcacgttttaccatttgccgtcgttatcgtgaagcttcttcatgagacggagggttctgtgtttttgtgaattatgatttcttgttcttatatgggcctatttttaagacatcaatatggcccaaatttcgaacttgttatgagtttaaggaaataagtagtaagtactataaatgatggttcgatctcggaggagaaaaaaaaaaacattgtttacgaggaagcaaaatgtgagttgatataaagggtacaacacataatttatttttggaagtcaaaactttgaggattaagctgacaacgaaggttagtgaagactttcgggatcgagcaatcgggagatatacatgagcctagagggctgacaagatgaccaagcattccaaatgaaaggcttaagatttttctttttctaaactcaagtaagaaacacaagatatatgaaagggtaacaagggtcaacaacaagtctaagctttttaaacgtgttagatgattcttcttgaacactattacaattactgtttagtttcacatttatatgaccttgggagtcttctagctcgtcccaaatatattttcaacatattactataagatcctaaagaccaataacattgatctacaccaaaaactctcactttctgattttgcactcgctttttttcctcccataaacaaaaccaaaggcttacaatactaaatctgtctcacattcttagtgcttatttgttttagtcataaagaacttaatcttatacagattgaagtcttaaagtcatctatattacttttcacatgtatcattatgagatggtacgtttcccacgaattttatcagtttagtttaattttcagttgtactttgggagaaaaaatttacaagatacttgtcggccatgatatcaccctagagttaccggagtccggtgatatatcatttctaattagggttaaaacttaaaagggtataaatggctgatcaaacccaaaaataaaagataatgatgacggtgggagacgagtgatcttatcaggtgtcgcatctagcatatataggtgaaagactataaaaaagacatgaaatatttaatagacacaacttttgtaataaaccaaaaccaaaaaggtagatgaactgatgaacagcatcttctaattacgaataaaaaaagtaaccaaactttctttccattagaattggtacgtagttccttgtgtattgtgatttctttcattttccaattatgtttttttattttatcatgttacatttttgatagtgggtaacttttgtatcattttatttgacctagccatatataaatctattaacttatacggagtagtatttcacgtcatttatttttattttgtttttagatgggaagttattcaaaactagactaaaacagtaaaactaggaaacccgctactgaataaagttacaattccacattattccatgacagactaattgaattagaaggttaggtaaattattaaatcataactgtagcagtctcttcgtctggcagctcagtcagacaaaacacaaagtgtgtttatgtgttatttttaatgattatagtttgggaaaaagacataatcaaaagggatacaaaacatatggcccattgataagtatagatcactgtttagctaaaaaaagcagactcttttttccaatcttgaacacaaacacagtcaccatctctctctctctttctctctcactcacacattagggagtaaacagctaccagaaaaaccttttttatcttctcacaaatttaataaagtgggtgctgagattgaataacgtaatccaagatcctccaactcacagaaaggtaaaagctgtgaatctgtgttctttcttcttaagcaaagtgtttgatgaattcatctagtcctgtccattcttttgcttctcatggtttatggatctgatctctctttctctctctctctagccattagggtttcctaagaatattatataaactctctttagctaacaccgttccaattggtttctttctttgttcttggtctaaaatctaaatggtgttatgggtataggcagattcaagaacagtagtgaaggagagatctggtaaaatg

SEQ ID NO: 23788 - DNA, 3003 bp, Unknown; identical to SEQ ID NO: 23787
  misc_feature (1)..( 3003): 2750-1469P.txt file - cDNA_ID_2152800; gDNA_ID_1620653; Annot_ID_163557

SEQ ID NO: 23789 - DNA, 3000 bp, Unknown
  misc_feature (1)..( 3000): 2750-1469P.txt file - cDNA_ID_2152800; gDNA_ID_2926185; Annot_ID_140763
cttacaataacttcatcaagcaactcatacacgagcacaaagtttttcctgaatgaatcttcattcagaacaccaagataatccttaataacacgagcaatcctttgtagaagctccaaaacaagagagggtgacacgttaactctcgttgtcgcaacaaaatatagaccaacaaccttgacatggaagtagttcacgccatcgacattctataagcacaaaaaataagttagatgaaatcattacagctcacaaccaaacagaaagtataatacctacaaagataggtggcgcctctgcattgccatcctccttccagaacttgactttacggaagaatgtctctgtacttcctttgggtacctcagcccggtctgtagcaataaaacgttacacatcttgaaacttgtattggatccaaccaaatcgtataatctcaaaacaaatagctttcttctactacattacatacagatactctgcccaaactaattgaatagttttgctatatttgtacaatctgatttggaaattcagctcaacataatttgtcatcggataagaaatgttggtagatcaaacagatcaatgagcttagagaagatttcaatggaaaattctcatgaaacagtgacataagactcgactctgaagagaaaaagcaaaacaggaagaagcagagaggatcagatcgagaaagagagcttacagtcacggaagacgatgttatctcctcgctgagataagacgaagaattgggagatcatcatcgttccttatagcggtggattccgactgtttcaccgcgagtttggttaagtctactgatcgccgatcggtctcgtctttttgtgtgtctggtggtgaggtggttcacgttttaccatttgccgtcgttatcgtgaagcttcttcatgagacggagggttctgtgtttttgtgaattatgatttcttgttcttatatgggcctatttttaagacatcaatatggcccaaatttcgaacttgttatgagtttaaggaaataagtagtaagtactataaatgatggttcgatctcggaggagaaaaaaaaaaacattgtttacgaggaagcaaaatgtgagttgatataaagggtacaacacataatttatttttggaagtcaaaactttgaggattaagctgacaacgaaggttagtgaagactttcgggatcgagcaatcgggagatatacatgagcctagagggctgacaagatgaccaagcattccaaatgaaaggcttaagatttttctttttctaaactcaagtaagaaacacaagatatatgaaagggtaacaagggtcaacaacaagtctaagctttttaaacgtgttagatgattcttcttgaacactattacaattactgtttagtttcacatttatatgaccttgggagtcttctagctcgtcccaaatatattttcaacatattactataagatcctaaagaccaataacattgatctacaccaaaaactctcactttctgattttgcactcgctttttttcctcccataaacaaaaccaaaggcttacaatactaaatctgtctcacattcttagtgcttatttgttttagtcataaagaacttaatcttatacagattgaagtcttaaagtcatctatattacttttcacatgtatcattatgagatggtacgtttcccacgaattttatcagtttagtttaattttcagttgtactttgggagaaaaaatttacaagatacttgtcggccatgatatcaccctagagttaccggagtccggtgatatatcatttctaattagggttaaaacttaaaagggtataaatggctgatcaaacccaaaaataaaagataatgatgacggtgggagacgagtgatcttatcaggtgtcgcatctagcatatataggtgaaagactataaaaaagacatgaaatatttaatagacacaacttttgtaataaaccaaaaccaaaaaggtagatgaactgatgaacagcatcttctaattacgaataaaaaaagtaaccaaactttctttccattagaattggtacgtagttccttgtgtattgtgatttctttcattttccaattatgtttttttattttatcatgttacatttttgatagtgggtaacttttgtatcattttatttgacctagccatatataaatctattaacttatacggagtagtatttcacgtcatttatttttattttgtttttagatgggaagttattcaaaactagactaaaacagtaaaactaggaaacccgctactgaataaagttacaattccacattattccatgacagactaattgaattagaaggttaggtaaattattaaatcataactgtagcagtctcttcgtctggcagctcagtcagacaaaacacaaagtgtgtttatgtgttatttttaatgattatagtttgggaaaaagacataatcaaaagggatacaaaacatatggcccattgataagtatagatcactgtttagctaaaaaaagcagactcttttttccaatcttgaacacaaacacagtcaccatctctctctctctttctctctcactcacacattagggagtaaacagctaccagaaaaaccttttttatcttctcacaaatttaataaagtgggtgctgagattgaataacgtaatccaagatcctccaactcacagaaaggtaaaagctgtgaatctgtgttctttcttcttaagcaaagtgtttgatgaattcatctagtcctgtccattcttttgcttctcatggtttatggatctgatctctctttctctctctctctagccattagggtttcctaagaatattatataaactctctttagctaacaccgttccaattggtttctttctttgttcttggtctaaaatctaaatggtgttatgggtataggcagattcaagaacagtagtgaaggagagatctggtaaaatg

SEQ ID NO: 23790 - DNA, 3000 bp, Unknown; identical to SEQ ID NO: 23789
  misc_feature (1)..( 3000): 2750-1469P.txt file - cDNA_ID_2152800; gDNA_ID_2926185; Annot_ID_200568

SEQ ID NO: 23791 - DNA, 3003 bp, Unknown
  misc_feature (1)..( 3003): 2750-1469P.txt file - cDNA_ID_2152804; gDNA_ID_1620653; Annot_ID_163558
agccgatgaactttcagttctttgcgatgctgatgttgctctcatcatcttctctgccaccggaaagctcttcgagttctccagctcaaggtatattctatctttttgttagtagttgtcttatttttttcaatccatgtttgtgtttttgagaatatggttggataaatatattaagatatgtatttaaatgagatttttattttctcgtttactctctaaagttaattatcagtaggctcggagatctcatgtacggcataatttgatgacctaaattattatactttaaagtataggattgatgttttattacttttatgtataacacatcatgtatttaattccgtttaacataatatgggtttttaacgtgtaatttttcaatcattttcatttagactcatggttaagatttctgtactgggaaataagagagcagaatattatagtgtgatttttgttaattaggaaagcatatgtatatatggatacatagtacttaccacaattagaatgaatttcttttcccttttttcatttgactttgtgtattacaaaagtctttgacactgtcacttggtatgattggggattaattcttaaccactcgtttagtttatcttgggaagcattaccataattgggaaacgagtcatctgtctgtatcgtgatggctacttctgattacttttcttttattataaccaaaaaggcttctaatgtacttaattaattttacaaatgtaatatggacgaaggaaatgtttataagaaagatggattgtttgttgaaacgtgtagaatgagagacatattgggaaggtatagtcttcatgcaagtaacatcaacaaattgatggatccaccttctactcatctccgggtattttcgatatcacttactcttttttttttttgtggattttaaactctctgctctttttaccaaacccttctctttttatcaaacccttctctctataatattatccgatgttcactttgttacacgtgtttgttataatttttagctgtaagtctaaatatagaaacattgagtggcatataatcattaatcttgaagcatctaattaattggttttacatattaatagcagaatcctgaaactgttgactttgcatctagcagcttgagaattgtaacctctccagactaagtaaggaagtcgaagacaaaaccaagcagctacggtatggctccattgatatgttatgcagataaacctattttcatataggctatagctgtaagagatcatctatttcatgtgtgtggtttttttttttatgttttttcaatgatgtgtgcatgctatttttaggttttagaatctatttcatggaaattgaagatatttcatttcacgtgtaagttcgtcaagttgtggcgtgtgtcttggaaattgatgttttgtttgtagattttaagagctacttctaaaatttacaagagttttgtaattttcaattatggcccattattctcattaattcattaaaaaaattatatacattactatctatatctagcataggtagttttttttttctttttctttggtagacctactgaacaaatatctgatatatcactgactggataaatatctatagagatatttttgatagaaatgagtgttaatttaacgtaaaacaggaaactgagaggagaggatcttgatggattgaacttagaagagttgcagcggctggagaaactacttgaatccggacttagccgtgtgtctgaaaagaaggtttactactatacataaactaatagcatgcatattttccttaacgtggcatataaataataagctgtacatatataaaagtttgactttgttgttgttattggtaaatagggcgagtgtgtgatgagccaaattttctcacttgagaaacgggttagtagttagtacatacaattcgtataactaatggatcataagcctatctatagctagtgactttcttaataagtgaaacagggatcggaattggtggatgagaataagagactgagggataaagtacggctctaaacccttatagatatcatggaataaccttaatctatttttttatgtataagaaaatatgatgagggaacgtatattatatatcggcagctagagacgttggaaagggcaaaactgacgacgcttaaagaggctttggagacagagtcggtgaccacaaatgtgtcaagctacgacagtggaactccccttgaggatgactccgacacttccctgaagcttgggtataatttgtttaactgaacatatttcaaactttttgttgacattttgtatgtggatgtttactaactgtttgttggttaggcttccatcttgggaatgaatctgagagagagaaagatccagcagagttgacttcgatggaagcccacaaatattaagtctaccttttccctttcttttctttgaataagtgttgaaaaagaattgagatgggaaggatgaattctcattgcattgcagagaagcaagtttcagatattgtacgtgttattggtctttataactattttgcaccaaagggattcttcacatcacggacaaataataattttaacactaatgaaacaagtaaatatagtgaaacgataggttttctatagtgattctttacattaacaacaatgaaacaataaatataatattggagaggggtgtgaaagaacaaatatgttaattaatttctacaaatgttttcacctcctttctcgattcatataaaacaaaggtaagtctttgttccttaccttcactctctagaaaagatttttttggccaaaaatatgtattcacgcaatcagcagaacaaaaacctcggaagatcacgtccaacgaaggacctttaggcttaggggtaacgtcatgtcttccacttttgagcaaccttgcaaaccatcaacgaagtctttcatgtgcattttattcaacaatg

SEQ ID NO: 23792 - DNA, 3000 bp, Unknown
  misc_feature (1)..( 3000): 2750-1469P.txt file - cDNA_ID_2152804; gDNA_ID_2926185; Annot_ID_200567
cgatgaactttcagttctttgcgatgctgatgttgctctcatcatcttctctgccaccggaaagctcttcgagttctccagctcaaggtatattctatctttttgttagtagttgtcttatttttttcaatccatgtttgtgtttttgagaatatggttggataaatatattaagatatgtatttaaatgagatttttattttctcgtttactctctaaagttaattatcagtaggctcggagatctcatgtacggcataatttgatgacctaaattattatactttaaagtataggattgatgttttattacttttatgtataacacatcatgtatttaattccgtttaacataatatgggtttttaacgtgtaatttttcaatcattttcatttagactcatggttaagatttctgtactgggaaataagagagcagaatattatagtgtgatttttgttaattaggaaagcatatgtatatatggatacatagtacttaccacaattagaatgaatttcttttcccttttttcatttgactttgtgtattacaaaagtctttgacactgtcacttggtatgattggggattaattcttaaccactcgtttagtttatcttgggaagcattaccataattgggaaacgagtcatctgtctgtatcgtgatggctacttctgattacttttcttttattataaccaaaaaggcttctaatgtacttaattaattttacaaatgtaatatggacgaaggaaatgtttataagaaagatggattgtttgttgaaacgtgtagaatgagagacatattgggaaggtatagtcttcatgcaagtaacatcaacaaattgatggatccaccttctactcatctccgggtattttcgatatcacttactcttttttttttttgtggattttaaactctctgctctttttaccaaacccttctctttttatcaaacccttctctctataatattatccgatgttcactttgttacacgtgtttgttataatttttagctgtaagtctaaatatagaaacattgagtggcatataatcattaatcttgaagcatctaattaattggttttacatattaatagcagaatcctgaaactgttgactttgcatctagcagcttgagaattgtaacctctccagactaagtaaggaagtcgaagacaaaaccaagcagctacggtatggctccattgatatgttatgcagataaacctattttcatataggctatagctgtaagagatcatctatttcatgtgtgtggtttttttttttatgttttttcaatgatgtgtgcatgctatttttaggttttagaatctatttcatggaaattgaagatatttcatttcacgtgtaagttcgtcaagttgtggcgtgtgtcttggaaattgatgttttgtttgtagattttaagagctacttctaaaatttacaagagttttgtaattttcaattatggcccattattctcattaattcattaaaaaaattatatacattactatctatatctagcataggtagttttttttttctttttctttggtagacctactgaacaaatatctgatatatcactgactggataaatatctatagagatatttttgatagaaatgagtgttaatttaacgtaaaacaggaaactgagaggagaggatcttgatggattgaacttagaagagttgcagcggctggagaaactacttgaatccggacttagccgtgtgtctgaaaagaaggtttactactatacataaactaatagcatgcatattttccttaacgtggcatataaataataagctgtacatatataaaagtttgactttgttgttgttattggtaaatagggcgagtgtgtgatgagccaaattttctcacttgagaaacgggttagtagttagtacatacaattcgtataactaatggatcataagcctatctatagctagtgactttcttaataagtgaaacagggatcggaattggtggatgagaataagagactgagggataaagtacggctctaaacccttatagatatcatggaataaccttaatctatttttttatgtataagaaaatatgatgagggaacgtatattatatatcggcagctagagacgttggaaagggcaaaactgacgacgcttaaagaggctttggagacagagtcggtgaccacaaatgtgtcaagctacgacagtggaactccccttgaggatgactccgacacttccctgaagcttgggtataatttgtttaactgaacatatttcaaactttttgttgacattttgtatgtggatgtttactaactgtttgttggttaggcttccatcttgggaatgaatctgagagagagaaagatccagcagagttgacttcgatggaagcccacaaatattaagtctaccttttccctttcttttctttgaataagtgttgaaaaagaattgagatgggaaggatgaattctcattgcattgcagagaagcaagtttcagatattgtacgtgttattggtctttataactattttgcaccaaagggattcttcacatcacggacaaataataattttaacactaatgaaacaagtaaatatagtgaaacgataggttttctatagtgattctttacattaacaacaatgaaacaataaatataatattggagaggggtgtgaaagaacaaatatgttaattaatttctacaaatgttttcacctcctttctcgattcatataaaacaaaggtaagtctttgttccttaccttcactctctagaaaagatttttttggccaaaaatatgtattcacgcaatcagcagaacaaaaacctcggaagatcacgtccaacgaaggacctttaggcttaggggtaacgtcatgtcttccacttttgagcaaccttgcaaaccatcaacgaagtctttcatgtgcattttattcaacaatg

SEQ ID NO: 23793 - DNA, 3000 bp, Unknown; identical to SEQ ID NO: 2230
  misc_feature (1)..( 3000): 2750-1469P.txt file - cDNA_ID_2152817; gDNA_ID_1620508; Annot_ID_159043

SEQ ID NO: 23794 - DNA, 3000 bp, Unknown; identical to SEQ ID NO: 2233
  misc_feature (1)..( 3000): 2750-1469P.txt file - cDNA_ID_2152837; gDNA_ID_1620508; Annot_ID_159046

SEQ ID NO: 23795 - DNA, 3003 bp, Unknown
  misc_feature (1)..( 3003): 2750-1469P.txt file - cDNA_ID_2152915; gDNA_ID_1620509; Annot_ID_159068
aaaaggcggtcgcttacctacatttactgcaaaacaatctaaaatgttgaagggatcatatgatttcattggcagaaattattactcatcttcttacgctaaggatgttccttgctcaagcgaaaacgttacattattctctgatccttgtgctagcgtcacaggtgaaagagaaggagtgcctatcggtccaaaggcagcatcagattggcttttgatatatccaaaaggaattcgtgatctccttctctatgcaaaatacaagttcaaggatcctgtcatgtacataaccgaaaatggtagagatgaagctagtaccggtaaaatcgaccttaaagatagtgagaggatcgattactacgctcaacatttgaagatggttcaagacgctatatcaattggagccaatgttaagggattctttgcatggtctttgctagataactttgaatgggcaacgggctacgcagtccgatttggactagtttacgtagatttcaacggtggacgtaagagatatcccaaaaaatcggcaaaatggtttaaaaagttattaaatgaaaagaaaaagaattgatgagacacgcatcattacattgcaacaaacatatgatgtccactaatggttttgtatgaacgttaagcgtgactaacttttttataacacatccaatagagtaaaaatatatccgttaaattagaataatgacatttcttatgctactttcaaagagatgcatgaaatgttttatcgattgttaatttttttttccaaagtaatgtaggtgttagtttcttaaaccaaacctgaaaaattgaatttaaaatacttcaaattatctaaaatttcccacaaaattccatactatcaaagaatacaaattagcttaactcatttacgaattacgatcgtaacattacttagtgaaattctagtagtaaattactttactagcttagtgaaaattctatatccaataccaactcgctattcaaattcaatataaatattgtatcatgttaattgctaataaaatgtcatatattataagatttctatattattgagaaatatacacatttctaaaaactaaatcaaattcaaggaacagtttgtgcatcgaagtactaaaccaagatgcgatttcttatcaacatctatgtactagaatctagtctactaaagaaaaaattcatacaattaaattgtctaaaccaaatgggtaagaactcattattaactgggactgtaatgaagcaaaactttttaataacgaaattaaagatggccaagctcgatccattaactgtgtaacttccaaagtaaagattgttattgacacaaacactaactgacttatggataccccaccataatcaacctccttccattgatgttgccccatttttaacatctcatagaaaaatcgtcatgttcttcttcttggcaaacaattcatattttatagcttaaagagtaatcaaatcctaagaaaaaaatagaaagattatttgatttaatttctttgcaggggctatgtttcactaacctttaataaaaatgaccaaaaataatgaaccaagataaacgaatgtaggtgagaatttaatcaaacgattatagtaaattagattagttctccatatttaaactgttgacttccaaagaatatacaagctttactctgcactcacaattggttacaatgttttacagattatgaaagtaatattatttaactattacatatttatgtggtagttggtagaatataaaattaagccatatggtagtaaaaaaattagataaaaaaattaaattatagataatatgaattttacttttgtgcaaaaaataaacaaaaagtattcttcaataaaacaaacataaaataaaataaagtagtgatgctcattattcctctattttcttggaatgggcaagcaaagatcttctacttggcaaggagagagatgtattcccccaaataccaatgaactccaaatccacacatctctagatgcatgtattaagagaatggaatcaaaatccttgggttatgccaataatatgttgaacaatctacacttgagttgatgcaatggatatgaatagtcctgatctccgtagacaagcacaatgttgcatcgtggttgttgattgttattcattccgaagcaaaacatatgattaatattgatacaatggtttacaaaattatgaccaaaatatttttatgtaccgactccttcttacctagaaaaaaagaatgataccaatataaattgaacaaaaagtatatgaataaatccaataaaaaaaatacagaataaaccaattgggacatgaagagtataaactctactcgcataagcattaatattgtatcatgatcgagtttaaatattaaatattatgtatatgatcaaaaattaaatattatgtattatagcaataaaagattaattacacagtttatgaatcgagtttgacttagtgaaaagtttagctttattactatcccagttaataattcgtaccaattcgatttaggcaatttaattgtatgaattctatagagaccatattttattgttacttttacacaaattaagatttaaactttttttttttttatatatctttcatcgaatggaagtctctcttccgtaggtaatgtggacattggggtttatttttctggcaatacaaaacacacaacactaaagcccacagtgtttgaagcaggcccaataagaagctctcttcaaatttttagactcttgcgtgtccgctagtatcacgactggatatgtgataacacacgtagacgaacctgaagcaatcactcaaactcaagacttctctttaatcctcctcccaaaaatctcagagaatcctccttcaattccaattcaaagctccttccttttttcacatctctcttcttcaaattcaatcatcataaaaatcgaatctttattcttcagagagcttcaatg

SEQ ID NO: 23796 - DNA, 3003 bp, Unknown
  misc_feature (1)..( 3003): 2750-1469P.txt file - cDNA_ID_2152928; gDNA_ID_1620509; Annot_ID_159072
gttatcaatcatgttccaatagagacaagggggtgtctcaatgggaggaagcaaaggttccatgtctttctaagaccttctcattacacaaacgattaggaaagatcaaaacacatttcagtggaagaagaatgataatagagaatctttttaaccaaccaatctatttcattacgagcaatcatatcttctttgtactaaaggagcctcaacatatctatctatgcttaggatactgtggaacaaaatcaaaatccttaaaagcttcaattttgtataacaatggattttgatgggtccaactaaagctttagagttctacttttcacaggtctgcaactaactacaacctctgaatttgctaaagtttctgaaaaaccaaaaactttaaggaaacacattggtcagctattcacttatggcgtctcttaaggtttagcaactaggctattccaaaacattataattaaaggtttggattctccttaagggtttacttactacaaaatcaaacaataacaagcttcagtttttaataacaatggcttttcaaggttccaaaattccaattaaatctccaaattctgcaatcacagggtccacaactaacaacaacatctcaattccgcaaaatcttcagaaaaatcaaaatcttaagccaaaaataaagctccatactcaaacaaatcacataccacaaaaaccgaaagataatcaatcgtaatcgcaaacaataagaaagatgtaaaacctagttgtagtaaagctcaagacccatgccgtcatggatctcatagtccttgagagtgatgtgatccttgtagatgttgtaccacttctgaattctgatcttctcggctcgtgttccggtttgtgccgcgacaagcttcttcagatcaccgatcgtgtcatcatcgttacacttcaccctaacttttttccctaaacgatcgttgagaaccacctcgatcatcttcttcgctcgaaaactacaattgcgaaccctagcccccaattttctattcctccggaaaagtaaagtacgggaagattctacgcgttaaggctcgttgtgacttttatttataaacttttttttggtcgtacttatgtcggtttgagaattggtaatagatttatttaatttctagaaccttatctatattttaatagattttacctttttttttgtcggctaatagattttactttaattttgtgaattatcaattttggcttcctattttctccatatatagactttgtattaaaattatttttttgtttatatttgaaagtttgtgcaaaaaaaaaaaagtttatatttgaaaccttattattaaaaccttgtgattgtgatttttttaatttttttatcatcttgaattctctcagcaaacttaaaaataacaacaattttatcctatcaaagaaagagccgacctctcaaaataagatacatcttaattgtgattattgatgctagcaaactcaaaaataacaacaattttatcctatcaagaaaagagccgacctctcaaaagtaacaaaagcaaaaaccaaaaatttacatagtgtctgattggtaaccaaaagctgtacaagttttttagctgttagctttatttgaatagtgcaaagctgttagaaagagttgtacaaaaaagctgagagtaaactttttataacacttttaataaagtttttgttattggtaactgtgaaagttgtacaaaattatataaagctgtattgtgttaccattcaaactcataatctgatatgtaaaattacaataaatatgccaccaatttacgtctaaataaaattctacaaaacgctatcaaatcactaccaaatatgcaaatcaaagacaaggagcgaagcttaactactcgaaaaaaatctgtctcacgaacaagaacaccatcaaatcgaaccaactatcattcaccgccatatcaactccggataggaaaacatgtaaactttaacatcgacttgagacaaatcaaaacaactagaacaatctagaggaaaattgaagttgaaccaagaaaaaaagtgctaacataaagatgaaagcttgacggatactaacgagagatcacctcgaaaaatatggtctattttttcaagaaagatggtgttgttgtatgaaaatacgggagctatttgacttcttgtgtatatccacttactttgaaccgtatcacaggtttaaaagtaataattcgtaagtttgaaaaaaaaaatctcatttagctaacattaaagaaaatttaaacgttgatttaaaacgctttaacatgtttccataaattggattaacaaaaattgcaacgttttcaaaacagatcgacgacgttttaaaaaaaaacaagattttatttaaacctttcaatttttgtataaattaagtataacatcaatataaattataggattaacttttcatcgttaattttttttttaaaaacataaatatcataatgtcattaaaaagtaaaaatatctaaaaattcattggtttaaaattataaaaaaatatttcatatataaaatgaaaattattaaataattaaacaagaattatttttaaatatatgtaataactctataaaatcaagaaaaaagaaaagaaaacaaaaaaactataaaatcaattttctcggaacaaaagatgtagttacataggatcagaacaagggaaagatattgatcaacccgtgtagaatatacaatatggttaactcttacaatcacttaatcggttttaccattacaaattttaaacacataaattattatcctctgagaagttggcgtgtgtgctcaaaaaggaaataaacaaaaattgcagaaattactgaactagagatagaatgaaacaataacaacaaccacaaacgaaacagctaaagaaaacgataattaaaaaaaaaaaaaaaaagcttacgaacgccattggagaagagcacgaaaaagaagaagaagactatg

SEQ ID NO: 23797 - DNA, 3003 bp, Unknown
  misc_feature (1)..( 3003): 2750-1469P.txt file - cDNA_ID_2152950; gDNA_ID_1620509; Annot_ID_159063
tggggtcatgatttgggccatgacttacatgatctcacacacaacaaagaaaaaaggtagtattcgcaaatcgcaacaaactgcacaaaaatggtaaagatggtgtctacaacagcgaattggccaactttctctacatatataaagtaatttgtcataattcaacatttgttttgttttttctctttctttcatatctcgtaattacaatcataaaacaagtaagttagcagagtgtgctagggttatcttgatgatggtatttatgatatttttgttcataaccttttaacttttttgtagctaaagaaagaattaagtttcaagattgaaaatgttaaattaacactaatttgcataccataactttgtaatttcatgattggatgtcagattcaaaattttaaaattaatatagtttaaatttttgattaccaaaataaataaatataatagtaaatccttaaaaagttaaagcagatgaatcattttaacttacaactatttaaatcttctaattcatttcaaattttctttagttatcttggaaaaaagatttactaggtatagaaaagaaatattttttcacaaatgttcaaaagttatcaatacattttataatcaaaggtaaccaaatcaatacatttaattactgtatttaaatccgtaaaataatgaatcatttcaacttaaaactattaaattcttcttctttttttcatgggcttttaatttgtgctcaaaattacaactattaggttcttcaaaatttaattcaaattttcattattaatcttggaaaatcaatttactatgtagaaaataataaatattttctcacaaatattcaaatttatcaatacatttagtaatcaaaggtaacaaaatcaatacttttttactattaattataagaaaattaattgaaagattcttatgttttcaacctatgacagatttttgaattatttttttacatgtgttgtgtagttaagagtattgggaggttgtaaaacaatatgaatgttaaaataaatattggaagatatttgcatatttgtatttctcttctttacattacatttcttagtagaatcttgtgaaattactagtttctgctttcagggtaagtccaaatccgtaatttggctaatcgtgtgtatatatatatcggccactgatggccaagtaatactactaacaaaaagaaaaatcttatacaaagttatcaaaaagataatcatagaaatggctatcaccaaaaatatgcttgtcgtattacttctcactattatttttgtcacatcgtcggttcattgttctgatagcgctcttggtacaatcttattatactctcattttatatttttattttttgttataaacatagtttaatcctttagatgattataatgatctgtttaaataggaattggaatcaaggaagattgggaagtatgcttcagcatagacccgtgtttgactggagaagggaccctaggatgcacgaagtggtgtagaaaccacataaatctttcattagttggttattgtcgtactgatcctgaacactgttgctgtgtggctgaaaaataatctaaacgaaagattaaaattttctataaaataataatatcactagtttcatctccaaagatttgtgaatttattagtttttcttctccttaatttgatttatctccaaagattaatcgtttctcactggtctagtgtctagtgtctacatatatcgaagtcataatacaccaatcgtaccaaatcaaagttttgaaaaaaagaaactcgagcgaattttgcatgcaaaataagtatagtgtataatcttgtttttttgttaacgtatacagtaaaaatctgtttaatgaaaaactgaattgtacatgtatcaatttgatcactaaaaagtaaaaacatacaacaaaagaaaaattggtaataacattagagagagtaaggaaaaaacacaatcgttgcatccatctaaccagattgaaacccaaaagtttaggaaatttggttttgtaccggtttgggaaagaacggttaccgcccagtttatcaggttgccatgacgatatctgacgctgtcgatgtgcttagttggggcgactaactttctaggagacttgtggtagattgatttgaagacggaaatcggtctttttcgtcgaaatttctaaattatcggttgcggccacgaaacggtaggtcttgagcccgccgaatctaatgtccggtcactcagccagcatctatgaacaagcagcgatcttcttatatttatcggcatgtttttctgattttcttattttgtaattggatctgattttgatgttggttacggccaaactccttaaattgaattttaataaaaattatgaaaaagagacacattagagtaaattgaaccgaaccgatttgaaccgaagcggacttaaccaagaagaagcaggcgcgtcacttgttttcactcccaatatcgaattgaagaagataagagtagactagagtcttcttggttgtgatattcttttccaatttcgtaattttaggtaccttttgctcttgttgctcttgtagattttgtttaatgggtatctcaaagattcatgctttacttgttaaatttctgggtttgggttcttataaccaattagctgatttttgaactgttttagaacttagatcttactcttagaggatagagacataaagaatctccattgtttgatatatcacttacgttgtcttcttgtctcattgattcgagcattgtagtcttttagttgccaaatgcaattgtgaaaatgtacaaaactgttcttgtttcatatctgcagtaaaattgtttttggtatttggtgttctgtagatttctcttgtttatgtctttcatgtttgtttaaattgggtttataaatgttttgtggataattcatttgacataataatgggtatgtttcagaaaagctgtagaagatg

SEQ ID NO: 23798 - DNA, 1845 bp, Unknown; identical to SEQ ID NO: 2255
  misc_feature (1)..( 1845): 2750-1469P.txt file - cDNA_ID_2153039; gDNA_ID_1620512; Annot_ID_159132

SEQ ID NO: 23799 - DNA, 3003 bp, Unknown
  misc_feature (1)..( 3003): 2750-1469P.txt file - cDNA_ID_2153043; gDNA_ID_1620512; Annot_ID_159133
cttgagtttttcgtcttttcgagtttgtttaattaatgaaactttctgcagattctcattgctaacagagatacaaaatcaaatcttagtaagaaaaggtaaaagctttgaatttttctgcattaaggattggcatgcaagctttgtctcctaagcttttcaattctcgcaggggatggtggacaccgatgtttttaactgcgggtttagcatctgcaaagtattttctaaagcatgtctctaggcagaacactctaacacaagctcgtagaaacatttctcgtcactatgaccttgtatgtagcttgaggccctgagcctccatctctcttatatctctgtttcctttttgtttgagttcataatcaaattctctgtttggttaattcacagagcaacgagcttttcggtttcttcttggatgataccatgacttactcctctgcagtattcaaggtgaccatgaaatgtttttagggaatttttttttttttttttggtttctctgacttgactatgattctgacttcaaccattcacaatgatcatagtcggatgatgaggatctgagaactgcacagatgagaaaaatctcgcttctgattgataaggtaaagcattttcttgatttagaacaacaacttgtggttttttatctcttcttgaataaccgaagagggacatttcaggcgagaatagagaaggaccacgaggttttagagataggatgtggatggggaactttggccatagaagttgtgagaagaactggatgcaaatacaccgggattacgctatctattgaacagcttaaatatgctgaagaaaaagtgaaagaagctggacttcaggtttacataatccatttcttgatctgctttcttatctccaaggctatgtatgactaactatataacttctgaatgataggactggattacttttgagctccgcgattatcgccaactatctgatgctcagaaatatgacagaattatatcttggtaaagaaaactctcattttccctctgttaatatggctctgtagttaatctatcttataagatgacatttttgaacattttagcgagatgctagaagcggtcggacatgagttcatggagatgtttttcagtcgatgtgaagccgcacttgcagaaaatggcctaatagtcttgcaggtaatatatagctcttccttatttctcttccgagacattatcaaaacatttcataatcatttgagcctttttatgatgttttgactgtaacagttcatatcgatacccgaagagcgttacaatgagtacagactaagttcagatttcattaaagaatacatattccctggtggatgccttccttctttagccagagtcactacagccatgtcctcttcttctaggctatggtaaaaatgtttgtgtataaccttttccgcaatctctttgttaaatcaatctaacacttaagttaatacagcatcgaacatgttgagaacattgggattcattactaccaaacattgagattgtggaggaagaacttcttggcgagacagaagtaagataaaaaaaatatttaaagcatttcctctgtttttgttctgtttactcatattttcaacataactattattggtgcagacaaatcatggctcttggatttgatgacaaattcgtaaggacgtgggaatattattttgattattgcgcagctggattcaagactcttactcttggaaactaccaggtaataacattgacatagaccattaaaaataacgcatgattctttagtttcatgcaatcaaatgtgaggttttgacaactttgagtacaatacattgcagttggtgttctcgcgtccagggaacgtagctgcatttgcggattcatacagaggattcccttctgcttattgtgtcacctgagaggcatccacaacgtttgattgcttatatttttcgatctatacaatgtttgattgacctgaaatactagtattgattattgatttgtttggtgtgccaatttgtgaaagtttgttgaataaaagagagatttactttggaaaaaaataagcagtactcgtggagctttatgaccaattcatacactccatgcacaatcttgtatgcgaaacctttttgatattctatctgccaaaggattcactgtcaagtatttatctactccaatctttacaatagtagcattagttaactataaaattgccaaaagctatagctcacctaaagtatacagataatatatttgtgacttgatatttgttgacagcagtgatcaacaacaaaccatatatatagtagtaattaataatgaggagaagctcctctattaatttttgatgttctttaaaatactccttgatgaccaaaaaagagaatcaagggtattttatgattttcaaaagatttgtttttgcaaaaaattattgaccggagtaattattctgaaacaaaaaaaaatatatattttttctgccaaaagaaaaatattttaaaatattttttttgagattttctaattaaaaattcttcatagtagagaacatataataaaataaagttttgtttaaaaaaaaatagattttaagaatatagactcaaataaatgcgtcaataaatgtcaagaagtggcaaaaatgtaggtaacttacaaattttaaatcactaacagaaatctcaaaaaaataaaaacaataaacaaacaaaatccgttctaaaactttcttcttcttctctctttcccttcgtatcttcttcttcttcttcaacctctcgatctcactgatttttctcttcaacaactcgatcttcccttcctatttttcaattggggtcttgcaaacgaatatctgctttgaaattgaacgaaattatttagttttggtggtttttcttcgacttcaccaatctgttgaactcaaggagaatatatgagataacatcagtcttcatttctgtgagtttctataatg

SEQ ID NO: 23800 - DNA, 3003 bp, Unknown
  misc_feature (1)..( 3003): 2750-1469P.txt file - cDNA_ID_2153058; gDNA_ID_1620512; Annot_ID_159139
aaatgatttgttttgtgaatagttgattccagctaatgtggtgaaagacaatcatcttacgtttggtgattgtatcaactacattgatgaagaagggaacttagtaggacaaagagggaataagcagatgataggatttgcttcaaaggatgcatggcgacataatttgcagaaggattagacataataacatgaagatactgtcaagtatgagctccttcatgaacttaagtacgttcataattccacttgatccacaactttgggctattggtataaaaagctaactttatctagattacatgctacatctcaattcaagatgtccatttattaaagcaaaggcatgactttatcttcgactagaaactggtgatggaccatcctcaacctccactagcatcatctccacctactcctaaccactaacccaattatccttttcaccttttcctctcaacactatcctatttttaggtgatttagggaaaagagaaatactacactttgatgtaattttttttttaattgaattgagctttgaatactatggttaatatggatgaaagaaaacacacgttcctactaatttctttttctaaatgatgacgttttctcaagttacttatcgtagtctaatcggttattgacaaaaatgatctagacgtttgaaaatcattggccaacctcttcactagatagaatttttatttctaaccattacctacctgatacacacaccaagttctgaatctagagatgatcttgtctcatttgtttatagactaaagagtatataaaagctggattcatgtgggtcatccatcattaatcgtgttcttcaattcaccaacttcgtaggttccgcatcttttgtactttctttctatttttaatcttgcaatatcaaaaataaatatatacaccttttaaaaaaattctgaatatgcatatggtaatggtatcatcagaaaacattgaatattgaatcgtctatctaccaatctcttcaagttgtgaattttatttatcaaaaaaaaaaaaaaaatcaactgaaacgtcaatgttatgttttgcttcaatctaaagaaagttgtaccaaaaataaagtacttttttaccaagaaatttcggattgtagccaaaatatgtcttgttttattttttttgttcaccaaaaatatgttaaactagttttttgactttttcccccatgcgttgttgttgttattcggacgaccaatatttaatacagtattcaagtgtagctaagctactgattccagataaagtaaaaaaatgtctttgataccaacttcactttgaccaattatcgaactctttaatttcataatatatagctttgacaaatatcccatcagaattcataaatcgccacatgaatcttataattgtcaactatgtgcagtccaatattaatatcatggaaaactagattactagcatttaatttcttaattgtatttaggttatagacttaacatggtttttcttctagagcattttcactacatttttttctttctatgttattattttatgttttacttattgttacatccatttacaacgatgttggataaaatatttttaactgttcagtccgtaaatgactagctaaatttttacggatatatttttacataaaaaaagaaattatttttacgatttaccaatttaactcttctttctctctaagttttcatttattaaaaatgatagtttttttaagaaagttatttgtatttatttatttaaaattggatgcaaaaaattacaaaacttggaagaaatattgttaacccatctttatcagtatagaatttctgattactccctgcgttgaaaataagaagatccatagaacgtggtaatgtttttttttttttttttctggcaagaaatggtaatgttaatcaattagactcatgactaaagctggaaaatttgactaaaatggtattatcttgcattattacctaaaagctcttcttgcattactctttcatgcaaaattgcctccaaaagtcatacttcgaaatcatggctttgtaactcacccttgccaccatctatctaaacttattattgtttaaaacaaaattgattttcaaagaaaaaaaaaatataaactcccaccggtcaataacttttaattttcacttcaattattcataaaataaatatatacaccttgattctttcttaataactggagttattttgaatttaaattacttttgaaatacaaaagaaagtaagataattttgccatttaaaatgtctacaacaattatgttaacacttaacatacatttttagaaccaaatggtaatggtccactagttaaaagatttcttatgaatgtctttttatgcagagttcgaattttctcacaacgattttaaccattttcgtcactcgcaaaatttttagtggataacaaaaaaaaaaaaaagttgaaatttaatggaaatttaggagatttgtccaatttttaattttcccgattaatttaaaaaatctactttacgccttttattgacaaagatgcatattaactatatatatatatatatatatatatatatatatatatatatattataaactaaattttgtagaacccatcagaagaaatttgtacttttaactttaaaatcaattaaaaaatttcaattcaaataaaaaaaaatccaaaattgtttataaattcaagaaatataacacacaagttgacataaacagtggagagatttgtgaaatgtgaactcttttgacgtctttctcatatttcgtctcgggacaattcacacgcactgaatcatctctctcacgaggactattcagccatttgcaaacgcacacacaaacgcacacgcgtttatttttttttcgccaaatcaaatctgaagagttcctgtatcttttaaccgctcttcttcttcttcagagagcttcgttgattgaacggaaaaaatg

SEQ ID NO: 23801 - DNA, 3003 bp, Unknown
  misc_feature (1)..( 3003): 2750-1469P.txt file - cDNA_ID_2153093; gDNA_ID_1620512; Annot_ID_159154
tggtcaacatattagcagtacaaaaaattttgatctgaccagagtcgcaagatattttagataataattgaagttcgagactaaaccgagttggactgtcccaattaacacccctagataatgaacacatctcaactaattgtcgggtctttggatcatgcgtttgtttaatcactttcacaagtaaagatgtgtaggacatagaaagaacttaaactaaacagttgtgtatctgttccttctacttcatttggttgatgtttcataatgcgacgcataaactaatataataatatatggatatgtaatcctcatgcagctgttacgcattggtgccggtagtggtcgggctattgagtaccattattttttaatattatgacagttttagcatttgagttgtactaatagtcttatataggtttaaaaaaaaaaagagtatattgtttttctaatctttgataatatttacttatacacaataaagttaatgccttgtaatccaataattgtagtcattcaataaagttataagtgcatccgtatactctatcaatcaatcacaagtcacacacgtacgtgtcacgtttaaaagtgtcaaacccaaattatagatacacaaaatactacatacataataataaatttcgtagacttttagggcaagtttagactttagcgggtaatagactatgagatcttaaggatattatgtcgttgaaatttgcaaagaaataataacacatttgtataattcaagtttaagagatttttacaaggccaactccaatgattacacagtacactattctccaatctttaaaaaatggcgaagattggtaaaaaaaactgagtaaacaaaaaaagtaagatcaaaactaacaagattaaaaaacgattaaaaaaagattaagagttatgagtaatcatcggaagaaagaagcatagtgatgcaaattctgatgatatgaagctttgctctttgttgcctcactgtcctcttcatcttctccaacctctctttcatcttttccatcaactgactcatcaattttccagatatgttggataccaacatggcaacacatcattatacacacgcatacctttatatacatgcaaacacttacacgtacgaacaaaggaagaagcgacaatcccacacctatacacttgagttcaacctccaacactacatatacaaagtgtccaccatgaaactctgtcggaatcctacgtgataaagatacttatgtgtgtgcttatgggttatatatgatttacaccatacagttttgtgtttgtgggtggatgtacaattatacatagaaaaagctagctaggtagttactaatcttatttatatatataaaagatgacgaaatgttttgcaatctttgacatcatcacttctttaaatgatatatcaataaataatcatactgtatattcttttatttttcttgttaataaggaagttctaggtcttgatcccactttttttttttgttaataagaaagttctaggtcttgatcccacttttttttttttttgttaatgagaaagttctaggtgtattttatcccaaaatctcattcgatttgggaccaacttttgctaatatcattagagcgaaaccattactttcaagtgagactcgaacttgggacaactttcctcctaaggcagttcttgaatccaagttaactatccctatttattttatttaataataaatgtgggatatgaaaataatatggattggcgcatggatggagagggtccacttgtaggttggagagtgaagcaagttcacgtgctgatcatcgtcatgcaactctttgaatatttgcataaatacacgttcttaaactcatcctccatgttctctcactctacttttgtcctcctccactaacttgtcatttcttaactttttcaattttggtttgattatctcaattaattaacattatctattgtaaatgtcttatcatctttttttcttcatgtaatgctatataatcagtattgtctacaatctacgttacaccttccatttttgtatgctattcacgttaatttgtaaactgaattagtatatcgattgagatacatataggtaaaatatggccaaggaaaataagaaatcatttaaccaaaaataatacaattatacgaataataaattaaataaatcataacaatgataacaaagagacaaaaaacaaaaactaaatagtgatagcaaaggacaactaccttttctgtttatgacttatcttcaacaattagcttcaatattggttttattagccctacaagctgtccgtttcatatcaaacatataatcttcttgtcttccaaaatctgcttttaaacagcactgcctctctaattaattaatctagcttcaccacaaatttcttttagttctggtaaagttttcatcaatataattattctatgtatatcacataatttatatttgattaattaaaagcatgtatttgcgtttaaattggggatattgtaatggactacaagtatgtgctaatttttaacattaaaacctaagaaaaaagaagatatactaattgatatgtatgagatcatataataatatatgatgggtcgtatcttgagaccaactagtaaatcaggaccattttagaattagaattatcttgctccgccattatatgcgaataatcacagtcgaaccatatgcattatatcctcagctaaaatttagtactaaaaggttcatgatttgcgaagctttgttcacttggagagctggagtatattatcataattctctttaacttagcttattggtgtttattacagtcgcattatctctaaccacatatgataatagagaacaacataacttctagtagtaattaagcactttttatcaaattaaaagttaacactacaaataaaataaaccattgaaaataaaatagagctaaagtgtcaacagttaatcaatg

SEQ ID NO: 23802 - DNA, 3000 bp, Unknown; identical to SEQ ID NO: 2258
  misc_feature (1)..( 3000): 2750-1469P.txt file - cDNA_ID_2153103; gDNA_ID_1620512; Annot_ID_159157

SEQ ID NO: 23803 - DNA, 3003 bp, Unknown
  misc_feature (1)..( 3003): 2750-1469P.txt file - cDNA_ID_2153107; gDNA_ID_1620512; Annot_ID_159158
ttagtaaatcccattgcatatcaaggccacacttcagagacaacaataaaagatgcattcattttatagacaaaaaagtactacacaaaagatttagaatccaggcgttgcaactaatgcaaattgaactgcacaaccaaacttgaagaactaattcagagccttgcgcaccaacgatttataattacgtcgcagtaatacctgatcaagtgcagaagcaaaaaggtctagaacatgaccctgagtgactagttgctttgcgatgctatcataaaacttgacagccttcttatagtacggagcggcatctttatctaaatctttgtgagaacgcacaggatccgacaaatcctttgagacaatctgtacaaaagagattacaaatatgcttcatacacatggtgtgatcaaagctcacaatgccaacaatcatcaacatatacttaccgttccagggccttccgtacatggacctccgatcaaagctacaattctagccccagttccaggcaagcaagctccaagcaatcctgcagctacactcaatgccacgcctgtacatcgttgggaccgatgacctggcttaacaggccactgatcactttgtagctcatccaaaagctacataccaaacatcattcacacaaagatagaagaatcagatgaaaattttccgacttgacaatcaaaagcaaagtcactcaccgagttgagtgtgaattcgcactcggaagcaggcaacaagaatctattcaaaccagaactcgggaagccattttgaggtcctttagaacctcctctcctagaagaaccaccaagccccaactgatccaaaatctgatctttcgaaatctctttatctcctttaaaaacaaaaactttagacatctcagagaatcccaattcatgtacatgagcctgagtaccaaacgacacaaatccaaccaaagcattctccggaagcaacccaatcgcttgtttaagcgccgatttagcaaaatccaattcttcttcaatcatacaagtatcaagaacaaacacaaacaccggcggatccaccagaccttccccgttggctacaggcggaggaagagtgtattcaacagtagtgtactgaggataaagctcaccaggaagattagtctcagagatcacatgataatgaggcgggaaatgattacgctgataacaaaacggacagatccaaagctttgcggtgaaatcgacttgtgcgtaagcgtttaacgcagcggaacaagtccggcatcggagcggtgcgtaaggaagagtagggatatcggcatgtcgccggatcggagaaatgcaagcggcgagtgggatcacgcatttgctagcttcagctttggaatgaggccagacgttccatgtcatacgaactccatcgattccttctagatctgtattcgcagtctccgccattcgttggaagcttttagatcagatcagagaatttgagttttttttttttttttccttaatgaagaaattgaaaaatctcaaaattctttggcgttattttttaggaactctaacgttgactgagtatcaaatatttctatttttgtgtgtctatactcatttcattttagttaggatcgaactgagatcgtagaaattgaaatggtaagtctaattactgatttgtattcctaagctcaaacttgagttttttttttctaaaataatttttcaaaactttgctcccatgatcatctttagccagtttcaccaacttatcttcatcacacttcacaatctccttcgagaagatccccaaagccaccaccgacttaccgtcaccgagaagcttctccacaacgtttctcccatgtttatgatacgaaagctcgatgcaatgccattgaagcatacatgcgatggtgtccgtaatacgctcgttggaccaatgtgtttcccacttcccagtgtttcctttgaaagggagagagatttagtttttggatttcatacttcacttgagaataaggtcttcttttcttgaaaacttgtatgaaatataacacgatgagataaccgaatttatcggttctaatatcggtgagcctttgcttaattgcttccaagaatgttgtgtcgacttcttctgattttcctaggattatttgaatcatgcatgagtgagcctcgcatggttttggtaaagtcgataaaaagatcagaatctgatgccaacttggaggcaatcctatggagctctactatgttggaacgcgagagaatgtcatcaaacttagccattatctcgtgcaagtgtggtcatgtgtgatttttcgtgtaaaatcgagcttaagcacatgttggatcaatgaacttcctaataagagagcgttctttgcgattaggtcaaggaagtaacctttgaagcgatcttcagctattgatatgactcttttgagtacacagcaaccgaatacgtcacccgctaagtcaaggattatttgaatcatgagcgagcctcgcatgatttcaacataataaccatgatttcaatacaattatgaattaaagtgatatatttttgtagtctacaaaattatggttattattgtaatacaacacaataaccatgatttgaatcgactgtttaaatttggagtttaccttcattgggcttcgtttataagcccaacccaacacaatctaaaacctcacgtgccacgtgggataaaaatatcctaagaataaataactcaaacggtcgaacaaaatcatgggccctaatttgatcttatccgttagatctatcatctcacgatcaacggagaatagatgaataaacatgtgaatgcgttctcgatctagaaattcaaaattctcgccattaacggctctctctcaaactctcaaactctctctctctcttcccttcttcttcgttactttgcccgaaacactgactgttgcagaagcagatttaattcttctttagggaatcttcgaattggttagcgcagagagatg

SEQ ID NO: 23804 - DNA, 3000 bp, Unknown; identical to SEQ ID NO: 2282
  misc_feature (1)..( 3000): 2750-1469P.txt file - cDNA_ID_2153146; gDNA_ID_1620515; Annot_ID_159242

SEQ ID NO: 23805 - DNA, 3003 bp, Unknown
  misc_feature (1)..( 3003): 2750-1469P.txt file - cDNA_ID_2153183; gDNA_ID_1620515; Annot_ID_159253
caggagcttattcttcttcccattcaacatcttcttcttcttcttcctgactcatctgtcctctcagttcccctactacatcagccactccttccctgatcatccatagagggaggttttccactctaggatcttcatcttccctggtcggattcaatcttgcccgattcaatcttgtccgattcaatcttgtctttctaaaacgtgcttcggctgaagcgaaaaaactagcagacgatattgaagaagatgaagatgatgcaggagcgcttgtagcagctactgttgtgtttgtactcgagatactcgaatcgggttccttcggtccagaacaactatgatcaggtccaaaccgatgtttcaagcaatgatcgacattttatagagaatgtcaagacttctttgcacctagaaacaggacattgtttcttcttcttcttaacatcgttttcgtagtttgagggatcacaatctgtatcattaacatgtttatcccaagttatgtttgaatcttcgtcagggtttaacctaaatcctatagcacaaaacggacaaataatcactgtgacatctcctctgtttccttttggacaatcgtgttacatatagctacaatgatccaaacaaagcacctgcaaatagagttttaaaagttagataaactttaccacagccattgttcctctctatttagaaaatcatgcaacattgtagatcgtagaaactagcattggaataaaaagacaaggagaaagagacctgaaggcagcgatcacatgtgaagggcaagaaatcgatctgcgtgcaaacatcgacggagcagtgtttccctagatctggaaattccggagtccccatcgaaataagggtttcgacgttcagaacaattcaaactcgaagaagtaacaattcgaacccgaaagatctaggtccgaggaaccgagcgaactatgtaaatcaaaatctctatactttgagaacacggtacgaagaacggagagaactaggtcaaacaaaatctctatcccttgagaactaggttcttctccttttataacacgcaacagtcggatgggcctccttaatgattaatatcttgatgggccttctctatactaatatatgacccaaagagaacccattccactatatcccccttctgccttgtgctaagtttttagtacttttccaagttacctaatcctacaagaaattctggaaagtgaaatttctcataaaatatatcatttacttatttcacttataatacaatagaataaaacaacgtgtagaaaacaatattaatctagcttatcttgtaattcatcaaaaaaaaaaaaacttaacaaactgtcacctttatttggggtcatcccaaaagtgcctccataattcctcacaatgaaaaatttcacaatacgcaacttaaaatattaacattttttcatcttatataaatccaatcactgactactattatattcatatcaagataaaactcaataaatcattccaattctctaatcaaaatgtggagcaacaagttcttcttccttcttccagttgtatgcatcgtagtgttcgctacttctcaaccattgccatcaccacaaccttcccaactagattgttggtcatcactagaagttattcccgactgtgtcccggaaattttccgatcgataacaaatggacagttcgggaatgtaggtccttcttgctgccatgcttttataggtctcgatactgaatgcatccctcagatgtttatcttcgctcccctcatcccgccttctcgcagactcagggatcattgttcccacaaaataattgtgccataaacattttgagactttgttagttgttacaaagagtttgttattctacatgttttagactataaatgtgcttatagtgttatgtttctgcttaattaactacgtacgttctctactataagatatcaataattaacttccatgtgaacatgtgtcatttagctataataagtgaatacgtactaggatacgttggtttatttatcaaaattgtacacattgcatttgcttcacaattgtttggatgactttacaaagcgcttgtttacttatggccttatgggttgtgaattttaatcgagcattgttcatattgtagtccttcaaattttgagttttttctcgtatatacacatatgtaaactccaatactcaatagctgaccaacatcgagttacaagtacgactaccaataaaaagattttaccgaaaataagaaacatcttcgatatatattttttgattatctcttaatcattagtttgcgatgtttatagtgcgggaattgagtttgagatcgactcaaaaattataattggttttctcaaaacatggattagacgactcatatattcattgtctttcctaacatgattatagtatggctctatcgtgaaggactggatagtctgtattttatatatctatagaaaaactaacagttttataaatgagttagcaaaatatacttttttttgttgctttaaaactttttttttctaattctatcccatattatattaattcgattttgttgaatgattctagaggatcgatatacccgaaacatgtttaaaattgtaatttatttttagttttttcagtgaagtaggaggacatttgtccccctcaaatcaccaaatttttaaaaaaaaaaaacttatacatgatttaaggattatgcaattgtattgtctgtccgtcatttgactcattttcccactggtaagagctcaacttcagggattaatgggcttaggcctgatccgtttaaaaaaaaaaatatatatcttcataagagagtttggccgtttggaaataacgtgtaagtaggacccacttttgtgattatccgccgcacagaagtctctcctccactccacaaatagcattcccggcgagagacagagagcgaagaagaagactcaaaccaaaaaaaaaaatg

SEQ ID NO: 23806 - DNA, 3003 bp, Unknown
  misc_feature (1)..( 3003): 2750-1469P.txt file - cDNA_ID_2153193; gDNA_ID_1620515; Annot_ID_159256
ctggtctcatacaaagcaaaaaaagaagaagagagagttaacacaagaagcaactcctaaagataacttcccttcttctcattatacaaatctatataaatctattttaatgacaaccctaaacatatgggctaataagttatttctatgacaatgagtttttattttggacaaacttctatgacaatgattaagtgttccaataactgcagtttgtttgaccaagattttgattccaatttttaatttttattcgatatgcaattattaaaatccgactcaaccccaaattacgacccaaattcaactaacaaacacgaatgggatggagattgatttttttttttagtgaattaggatggggattgattttctgtctggaaatggaataggttgttgggaacgaaaaagcaatctactaaatactctctattgtaccttcccttgatacaaaagttaaactctaagttaatgaaattgtagttaggccaaagttttttttctgtttaagggcaaattataattatttattaattgtttatcaaaaataaaatatcggtcaacgcataattctgacaaccgaagtagaatggttatggtattggcaacataacttatatttatttgtgtatgtcggtatgttataacaatatatagtgtagctaacaagacatttttaaagtatgcatgtgtgactagatgatgacatctctttcgtataagtagcaaacatttatccatttttgtgctcatataaacttattaacataaaaatctaaaattgaaaataagatagttagttaagttttattgtgcaagaaatagaaaagaataaaatattgggattgtcatcaagattaaagtggttccttgattgatctcaccaaaaaaaaaaaaaaaagagacttctacgagaggcaactcctaaaaatacttctcttcttcttatcacacaaattatgaatctgttttgatggaaacctaaacacatgggttaatgagctatttctataacaatgattgggttgctctactaattgtagtttgtttgacaaagatttttattccacttttattttttgttcgataattccttatccaaacttgatttaaaccccaattttgacctgagttcaacaaataaacgcaaacttagcgaacaggatgagacaaattttctatctcgaaatagattaaatagttattaaaaacttattctttttatcaggattcttttgttctattcctttcacaactttgaattctttgaagcacttttgtataaaatcacaatcattttgttcagattttgggagctggaactgaagtgttgtttctaaaatcttatcaaagggatgcatgttgtattgcttttgtgtcgcttattaaactttcaatttgcacccaaacgagaaataagatcaaatcctcttgttttcatttagatttgtgttgacatttgtgttagtttcttagtgtaaaggaacaagtttgtgttgacatacattctttcttcgttttttcagtggcaattgacagttccttacttgctacttcctctaagattgtcacttacttgataagatgaacaacgatgatgtaagtttcttttttttttctaatgttatagaattgtatgattgagaattggatgttttttcctgaatttagaattggtcggacgaagagtgttgatattttcttcaactttgtactgctgaggaaaaagggaatagaagaaagacgagattaaatataactggaaaagagtccatcatgagatagtttgaagaaaaatttgggaagagatattcatgggataaacaattcaagaacaagtatgatgtgcgtagaagaacatacacaaaggttaaaaacttgcttcataacagaactgaaattacatatgattctgtgtaaagaataaatataatttttcttttcattacgtttacctaagtatttaagaaagcaagtaaacatacttttaataactaaaggtcgctgaaaattctaaaaattgtaacgtgaattctcaaaactgtaaaaactgattctttttattgtaccctatatgttaacgttaattctcataactctaaattcttatttttccatcaaaatcatgacgtcaatcaaactgttaaaaggcgagatacaaatataaatattgtactaatattgttaatctgaaatatctactattcaaacatatttgtttgaagtatatcatattacatgatacattttttggtgatgaatcaaattgatgaataaacatttcaatatgaaatttacttgtttttgaataattatgtaatacttttttttattagttatattttgtaaaaaaatataatattttattataaatttcatcaattgacacatattcattcatgacaatttttttatcaagcttgagatcctcaaaatggttttatcattagttatatttaaaattttaacattaaatcataataatataaaaatttggtgtttttcagttttctaaaattataaattatattattttggtattttgtatttaccgttatcgcacatgctagttaaccaactataaaacttcaacaaacgtaaaatttaaccgctaaatcaatcatttaaaatatatgataactcttaaaaccgcaactctccgtttccataaatttcagcagtctgcatttgaaccattcaagcctcgtagtttggtcaagaaccgattacgcggccaaatcttatatccgacgctaagtcgctaaccatgtggaaaccattatttatcaatagaaatcaaaacgacaaaacccgacctaaaccgaaatctcaaattcgaacccaaatccaacttacaaacctgaccttaaccggaaatcagaatccgaaaacattttcccttatagcaaggtttaaagaaagcaataacaaaaccctatctctcgtctcttctcccccaaactctcgccgccgtgataacccaaagttctcgacgaagccatg

SEQ ID NO: 23807 - DNA, 3000 bp, Unknown; identical to SEQ ID NO: 2284
  misc_feature (1)..( 3000): 2750-1469P.txt file - cDNA_ID_2153197; gDNA_ID_1620515; Annot_ID_159257

SEQ ID NO: 23808 - DNA, 3000 bp, Unknown; identical to SEQ ID NO: 2274
  misc_feature (1)..( 3000): 2750-1469P.txt file - cDNA_ID_2153231; gDNA_ID_1620514; Annot_ID_159208

SEQ ID NO: 23809 - DNA, 3003 bp, Unknown
  misc_feature (1)..( 3003): 2750-1469P.txt file - cDNA_ID_2153235; gDNA_ID_1620514; Annot_ID_159209
caaagaaggtactcatatggactgattggatgaaggtttaagaagtttgaggaaccaataaaaagaagtacaagatagaagtcatggattgtgagcatctcctgcaatagttacctcctgactctgggctaacaaatttctccatatcaactaccagcatatttggctgcaaaattagacacaagcttcatgtagctagagtaattgtaatgcagtgtttgcttaactacagaggggattaatccagagcatccgaagagaaaggcgacaaacaacaagaatcttacctcaacaagagtctgctcaaatgcaacagacaaaagtttgtcctgattgagaaagaaagatattggttggagtgttagaagaggaaaaactcaaaaaatccagagaaagctcatcaggcgtcagtacttactagccatcctgcaatccctggaagcacagcaacatcaagtccatgagtggtaattggtttaacagtcatttggaaataaggtggctctgcaaaacacactcgtaaacgcccgagaaaaggccatcgacgaaggaacttcactccaatcaacaccttcaatagttaaagataccgatatgaagtaagatacttcattgaaggaagcgtgtaagtgaagctgcagaaaagaaaatgcactacctttccttcaacatgcattcctgtcaaatgcaactttgtccacattccaaacccaagtctttttcttaacttcacagcgagtattgcgctcatatcatctgctgtgaggaaattcattccaagttccagtacctgtacacactccaatataagttatactttctctatagaacttagagcttatagaactgaaattgtgcaactataccaagtgatcatcacccgtagattgccgtagaaccctaatatctgtcaacaaaggagggtttcttcccaaataaaggtgttgtatcacaacttttttctgcacaaattatcattccatcaatactaagtcggtttttcgactgtaaactgagctacagttagtggcctagctagtactactacaaagggctaactagacacaaaacgaaactggaaagactcaaaatttgaaagagttaccgcagtccaaggtctatacttgtccaagaaccaaggtatgatcggacgaagaatcttctgagaagcaatctgttccatacaaataggccatatcctctccacggcatgattcaaccaccgcaccgattcagaatcagatagaacctacaaagttgtatttaaaaaataaaaataaaaaaagattaccatttcatgcaaacaaaggtaaagtcagtatcttccaatacaagattgagaagaaccctagaacttgaacaaatgtatacacaaagcaacttaaagtcttaaacaacaaagtagaaaattacacgtctctggttagcttgcttcctctcttcaaactgcaatttcttcctcaatctcatcacatagcgttcatgaacctaaaagaaacccaccaaaacaatatttttcaccaaatccaataaaaattgaagctttaacatctaaaagaaacatttctccagagaaggaacaacacaccaggtaaagataaacgagagagaggacatagaaaaccgcgtgtgatcgattcaagtaagatagaacccaaagtaacagtaacacaatcaccacatgatggattaccgaacactccattattattatacttcctttggttacaaaacccagaagtgaacaacaaactagtccaaagattcttgcttttttttcttaaatccaaaggatcaaacaacaatctcatgaaacaaaaccatccgaaacgagtcgcacttcatgtgtgttggttaggaaaggacaaagaaacaagtaataagatgatttcagtttttgtttgttctcgtggattttgattagttagttcagagaaaaagacacagagacagaaccaaagaaaaaaaaaacatttcgatctaaatttactctgttttcttccgcgaagccaaagaaaaacgctgtcgttttttgaaaagcgaaacgcgtcaaccgcctgaaagagtgcaaacgtgtcagacacgtgtgaggagacaaggataaaggtcccactccaatgtcattgttcaattaatcgtgaattagacgatcctatccgttcatttttaaaagcattgatctgatggacggcttacaatttgacttgtttcatataatctcatctccatagaatatctacttttattagataacaatagctatctattctacattttatattaaaaataatgaaataattccactaaatggtcaacaaataatttaatattaaatgttattctaatctattgttatgtagaagaacaagtgggatatttttctatattcatctctctctttatctcttttattatataatcaaatatttttttgaacttgcataatcaaatattatgcatctcttatttgaacccaaaataaaaatgaaaatatgcaaattagaggtgcatgtcacttgttttaatagagaagaaaattgtcttttttaaaagtgaaaaattgaactaaaaagagtataatttataaggtgaataatagtggaaggtgcagtgtcaattgagaaagccattgcgactgtgacataaacattaaagccaatatgattaaacgatatatagttagagaatatagatacaagaaagaaattgaacaaaaaatttcatttccgtcggtgtttgtttttatatttaggaaaaaaaaagagaagcgaatgtttcccctgggattacgcaaatatcaaagattattataggaaaatctggttgaggaaagctgactaaccaccacataaaaagccacgtggcacatgcacttcccctagaaatacgaaactttaataagaagcatccagcaaaaccgaaatcttggttcaccaccgtctccagatcaaagaaaacagagaaacatctgtttttttgtttagtttgatctgttgagagatg

SEQ ID NO: 23810 - DNA, 3003 bp, Unknown
  misc_feature (1)..( 3003): 2750-1469P.txt file - cDNA_ID_2153256; gDNA_ID_1620514; Annot_ID_159215
aaccaggtctgcttcttgcctttcgggtggggaccgaggatttgcatcggtcagaacttcgctctgttggaagcaaagatggctctggctttgattcttcagagattctccttcgagctttcaccttcctatgttcattcaccttacagagtcttcactatacatccacagtgtggggctcatcttatcctgcacaagctttgatactatactccacgtgatgttatcaaaacttatacatatgagaaacaaaatttcatagaggaatttattcaagataatagtcatattaaccatgttttgaattgagaatgcttccctaataacaactaatccatctatttttgagtattattttataccaaatagaaatgccttagtggaagagatgatatttaaataagaatctacaaatttggggaaaaaatctataaagtttaaaatctctcaacttttgaaatacacagttgtaactccccaataaaagcaaaattgatcaattagtgactcaagtaaagcaaaatatcaatgagtcaaaataaaacaattttgtccaaaacacaaactatacagtattttaaaacatgaggggtggtaatatccatatccataccttcttcgaaactatctctcttctctgggagagaaaaatggagatatcagttgcatgcgtaacagtttctgtagttgtagttgttgtgtcatggtgggtatggagaactttacagtgggtttggtttaaaccaaagatgcttgaaagttacttgagaagacaaggtcttgccggaactccttacacacctcttatcggtgatttgaagaggaacgtcaacatgttgacggaggcaacatccaaacccatcaaactaaccgaagatatcacacctcgtgtcctgcctcatcccttccaaatgctcaagactcacggtatgtgtcctggttggccttttgcttcctctctgttttaaactgttgatcaagagaaaaagagtttcaaattttgtatatctatgtggtttgaaacaggaaggactttctttacatggcttggacccaaaccaaccatcaccataatggatccagagctaatcaaagaagtgttcaacaaagtttatgattatccgaaggcgcaaacgtttcttttgggcagactaatagccactggaatcattaattacgatggtgataaatgggcgaaacaccgaagaatcatcaaccctgcttttcatatagagaagatcaaggtttaaggctttatttttcagtcatgaatcaagttgtatgctcattttattctgaactaatttgtgcattctaacttctatgtatagaatatggtacctgcgttccaccagagctgcagcgatgttgttggcgaatggagcaagttagtgtcggataaagggtcgtcgtcctgtgaggtagacgtttggccttggcttgtgagtatgactggagatgtgatctctcgtactgcttttggcagcagctacaaagaagggcagaggatctttgagctacaagcagaactagtacatctcatcttacaagctttttggaaagtttacatccctggatatcggtaataaaagatctcaacctgcctggttttagaacttcactagtgctgcaaactattacagattgtgaaccatgatgtgtcatatactcatattctctctgtcttctgtttgtgtagttatctccctacgaagagtaatagaaggatgaaagcagcagctagagaaatccaagttatactgaaagggatcgttaacaaaaggttaagggcgagagaagctgggaaagcagcaccaaacgacgatttgttgggaatacttcttgaatcaaatttggggcaagccaaaggaaatggaatgagtactgaggatgtgatggaggagtgcaagttgttctatttcgccgggcaagagacaacttcggtacttctggtctgggcaatggtgctgttaagccaccaccaagattggcaggctcgtgcacgagaggaagtgaagcaagtttttggcgataaagaacctgatacagaatgtcttagccagctcaaagttgtaagtataaaccaaatcataaaccttcaggtgactttagtacttttattgtgtttagatggttttgctgaatgtttccaacagatgacaatgatattatatgaggttctcaggctatatcctcctgtaactcacctgacccgagcgattgacaaagagatgaagctaggtgacttgacactaccagccggtgttcatatcagtctacctataatgctagtccaacgcgaccccatgctgtggggtactgatgcagcagaatttaagcctgagagattcaaagacggtctttcaaaggcaacaaagagccaagtctccttctttccatttgcatggggaccgaggatatgcatcggccagaattttgccatgttagaggcaaagatggcaatggcgttgattctacagacattcaccttcgagctttctccttcctatgttcatgcgcctcaaacagtcgttaccattcacccgcagttcggtgcacatcttattctgcgcaagctataattctataaccacatgtgctgttgtcaaataaacataggaaaataatccagatcataatataaaactcaaatctttttcttatttgaagtcagaactttgtcctcacatatgtcttgagaaaccaaaatatttccaataaaaagagtgaaacgcatggaccaatagatttcttcctcttttcgtcgcttttcacacaaagtccaaatatgcttctgcgctttggtggcatgtgactgtgagggtccaagtaaagcaaaagatcaattaagcacaacaaaataattgtccaaaccaccaaaatataaaatataaaataatttgtgaccatcatcaccacatccatatcttctccgatattctaaaccctgagaatggtcacaaattctctaactctctctctctctctctagtagaaaacatg

SEQ ID NO: 23811 - DNA, 1129 bp, Unknown; identical to SEQ ID NO: 2268
  misc_feature (1)..( 1129): 2750-1469P.txt file - cDNA_ID_2153283; gDNA_ID_1620514; Annot_ID_159229

SEQ ID NO: 23812 - DNA, 3003 bp, Unknown
  misc_feature (1)..( 3003): 2750-1469P.txt file - cDNA_ID_2153338; gDNA_ID_1620518; Annot_ID_159360
actcttgttgtacaacatacctcggatagtcctgaagtagtgatttccaaagaaaggaaagagcgagtatggtcatcattcacaaagacttcccacttattgaaatctatcaagtatctgtcaaaaacagaacggaaaacaattcacaaaccccatcgtaatttgggtagtatggtaggcaagaaatgatcttacctcttctgcaactgaagcttttgccgaagcatagaaatcaccgagttaatctgatgaacacgtagtggaacgtttcttcctaagcttatgtggaactctctccccaaggcacgctcaaacttctgatcatccttgcatagaatgctgagtggcacatcagcctctaccaaatgaagatgaggaacaactgatgcaaccttctttaaaaaacatacaatctccttctttggcagtggaggtatacaaactagaatcccaaaaacaaaataaacaatgagtgaaagagaaagacaagtgatacacttcatcaggcctgcacttcatcaatacattctcaaacacatacgtatcctcttatactaaacaaccacttcagaattcaaaaacctcgaaactctcagaaattttaagctacgaaatgaacaaataccaggtacgtaaacgtgcaaagcgtaatttccatcgacatgaggaaagtttcttacacgaactccaggctctgttgagaagaaatccagtgaaccttcaagttcagacgaaataaaaaataagtgatgagtgaaatctctaagaatttgattgaggaacaatcacagagacaattgatgagcatcttcacctgtggatacaatggaatcgagaagcgcaagcggtggaggaggcaaggaaatcgaatctttctctccagaatttgcagtaacgggactcgccggagaaagatcatcggtatcggaatccgatgaagagtcgccgtaggacgctctcaatgcttccattgcccgtaaattaattaaaacagaaaaaccaaacagagaaactatttaaaccagatttcattttcaagcataaaccagattaaaccaaaatgattctaatataaccaaattaaagcgaaccgaatataaaccgaaccatccgcgaagacaaagcagcacaattcggaaaccattaacgggccgagaatgggccttcaccgaagatcaaagcaaaaccctaattacgttccctataaattagacaccaatcgccggaggtttcatcattatcagtattcaatagcatctagggttctcttcttctgttattcaatcgtcgtttttatgggtctttttggatgattgatagtttttaagtttctttataattctctaatcgagagagggagattggcagtgatgactcggaaatttcaagctcaacagaccggaattaggcgtttcttccaatttattggttgagtcgtttctgtgtcgataaccccgctgatctgagccttcctctcttttcatttgattctgatttgtttgcgttttcgaatttgaaattctctggtaatcgatttatacgtttttatcgattttgaaatcggtgtttgcgcttttttaatgatgatggggattttggagattacgatgaggatgtacagctccctcttctgattaagctgaagagaattgctggcagaatcgaacctaaatcactagccactactgagttatccccttaatccccataaatagtttataagagtttgttttttggttttctattcagtaaaaacgaatttagatggtagataatgatgaagcaaaattaatctaatccaacacttgatctgagagatactatgtgcatctccaagtgaagttacaactgttagcttctgaatctaactttgttcaattgtgatttgcttcagtttaatgacaaactacgagtaaagtttaatcggaagaattgactaatacattcaaaatagttgtctgattaaatgtctattgaacacgacacaaaatagttatctatttgttcgaatatgattaggacatccatattcgaacaaatagataatttagtctgccaattctgaaaacattgttttgacactgagaatatcaaattaatgtatgaaattatctattttatctagtgcccgtacctagttgaatccgaagtaatcgatccctgtgtattgatttgaaagcatttggtcataaacattggcgtgttcttgttaaagagcagtcgtcagatatcttagaaactaatggcagttaccaacgatgttccaacgagcacccaatttgcctacaatgacgaaggctggggacttaaaattgattcgaaaaaacctgtaaaaaatatattatacaaaagtattggtcacaaactttgttatcaccgttagtgattcaaaggtagtcagattgtatgaactttttagtcttaatcaaaaattggtatagttgaagaaaaagaaaaatccaaagaccggcaatccaaaacgtttagttactatggtaatttgtaacttccgtataattaacagtttaatacagttcagtacttagcagagttccgttgtaacggaataacgggatccagttgattacgttttgaaaccagtaaagtcaaagatattattttgttgttaagaagaggaaaaaagtcaaagttatcctgtttgtttgttttccccaaattaagaaaaaagcaaaggcgtagagggagagagtttgttctcaggaagtcggtatctctatcgaagccgacttcacgtcacgattacttacttccacgttacattttgtcgtgttttcttccttccgtttccttctctggcaagtctgcttcgtacgtactctctcttcattcccacttcacactttctactttttaccaaatcctatcctcaactctaattcccaccatttctgatccacgatttcaaattgggtggttggaagcagtgtttgtgctgtaattggatctgatctgatcggattcgattgaaatttggatcccatg

SEQ ID NO: 23813 - DNA, 3003 bp, Unknown
  misc_feature (1)..( 3003): 2750-1469P.txt file - cDNA_ID_2153349; gDNA_ID_1620518; Annot_ID_159363
tttattcaatttaagttacttcatttttgtttctttgttgtttatatagaccaacttgcctattttgaacaatgaaagtttgaatttcctgcatgcaagttatatagaacaacttgccaaataaatcagattagaagatgttcaataaattcatggtcaagctttgaaaaactccggcccccacaagagtataaacaaaatgctggaaataaaagttttacgaggagcatttcacgaatgttggttaatcacaaaagtcttaattacttacttcaaaaattcttgttgacgaacaacaatgaaaagaaaaaagatacaagattttttgtcaccatgcataggcccgaataatatacagaaacgcaagatggatacaaatgccaaggacaccgggtaagtcggagaagtgctggtcgagaggacctacaaacataggcggagaagagctaagggtagaattaacttcattaaaacaattaccaccaaaataagaaacattggatgagaatctaactcctacactaggtgctcgacatttggatacgcatgtcggatttggtttttttaagtaaagaaatttaggatccaataagatatatataaaaaacgggtttggtatcgattcggatttgggtcgaatttaagatttcataacctataaactcggtacttttcagttcaaatgtttttctatctgattgtacctgattactcgaagttttacttgattaactgatattatatccgattatccgaaatttttacctagttatccgaaatattatcagattttccaaaatattgtccgattttccgatgtaagtaaagcttctatccatataagtgtagctaattttgggtaatcgggttactcgttcgggtatcgggtaatacccgaagcgacctgatacccaagattacaattacataggatccaataggtaaattagttatatcctacttgacccaaaccggttttttgggttggtttcgattcgggttttcagtttcattcatccacttctgttaatttgttaaatctttgaagttcagaaaacacaaggagtaagattagtgttggaaaactagaccagattcattcgcattcaactcacgccgtcgatcaaaggtatctggcgactccaattttgcctccacatagtctcaaaccgataaatgatcacttctccaaataacctaaaatagctgcccagtaaaaaaaatccctaaacccaacaaccaaatcaccacgatcacaccaccatccagacttgctagacgcaaaaaagtcatcgtgagtttcatcatcgatctaaaatctaaaacctttcacttctataaggcggaaccaccatcttttaagcttaacaaccataacaaacctcttacattatcggcaaaaaaatgctagtgaccgatccaaattaaatatattttttttttttttcacaaaaagtgatactttttatatagatcaagtgttgcaaaagatacaactgtggaaacttccacttacaaacttaactaacaagttaaagcatacattgttaaaacatggatcttctaaagtgaatgaagactccattgaacataacccaaaaggttgcagctacatcttcagattccatttctgcttgaatctccagtctattcaaacggaattgctgcacactaaccattaggtatgcaaatactccaataaaatcctgagcataccaattattcaaacccttgcttcactgagctaacataccattgccaaaaggtgtttaacgccaaaaagtgatgacagaataattagagtggttaccgcttctttggaggtttcagaatccctccttctttaagctctgttactttctgcttttgattccttcgaactgcctctggctgttcaacttgtgtggtcttgcgtttagatgagtcaccttcttcagttggcctggaaccttccccaatctcagctcttcttgatgattcaccaatctctaaaattcttgaaaatctagaagtgacttcatctgcaattggtggagagagatgagattctgacctgaaacgtggtgtaagagttgccatttgaggtttttcaaccatcaagttctgaggagtagctgttcttgaagggaacaggtaaagtcttgcagctgcaagctctgcagaattcaaaggaggggtagcagtccttggaggtggagttataggagcaggaaaggagtcatctgacagttgtgattgagaattcatatccgacctgcaaagctcctcatgtaaagccgctcttgtcctttctgccatgtcttgacctctaccatcatttcttggtgcaggaagaggaaccatgtaaggacaatgattccgttgatgagtgaaacgaagacaccgactacaaattcttctaagacgttcatattggaaacgtatgattgcagtctctccagaatcaaaccggattcgttggaagaaccttagtctatcagttataccaaacctgactcttactctgatgtatgcaatttgattagaagtagcttcctggaagtctatgaggacaatatgacccaattcctgtgcaatctcactaacagtttccacacaaacatatggcataggaattcccctaatctgaacccatagatcaatattggctagaaaatccaagtcaggaaagaactcccacctttgattgatgataaaccaattattaaaaagccaaggctctcttctttgaactgagatcaaatcaaatccaaattaaatatagaagattaaaaactaaattaaaattgaaaattaaaaaaaccgcgtttcactttaaaaaaaaccctaagtgctcgtctccttcgctttcctctgttctctcggatttaaaactcaaaaaaatcgtatttctccataagagtaacatatcactggacgtttcccaattatctcctcctacgctcccgactagcgtttatcctattccggtcgccgccggagaccttgtatctccatataatg

SEQ ID NO: 23814 - DNA, 3000 bp, Unknown; identical to SEQ ID NO: 2307
  misc_feature (1)..( 3000): 2750-1469P.txt file - cDNA_ID_2153372; gDNA_ID_1620518; Annot_ID_159369

SEQ ID NO: 23815 - DNA, 3000 bp, Unknown; identical to SEQ ID NO: 2309
  misc_feature (1)..( 3000): 2750-1469P.txt file - cDNA_ID_2153376; gDNA_ID_1620518; Annot_ID_159370

SEQ ID NO: 23816 - DNA, 3003 bp, Unknown
  misc_feature (1)..( 3003): 2750-1469P.txt file - cDNA_ID_2153383; gDNA_ID_1620518; Annot_ID_159371
ccaaggaaccatagagaaatcgatatcacattgctgaataaaaatgtaaggttttgacaagatcctgatttcaaacagagaatgcatcgatcaagagatgctttgatacgatcagaattcaatatctagatagaacaaaaggtcaaaagccacattccaaagtctatttagatatagacagctagacaatgcaattgcagaggaattttgtaactctgaacctgaattttgagatttaagcacataaagtttcgaaatttactagaacaaaagcttggaaacaagaaacccatcaagccaagcatgatcggaatctctaataaacaagaaaaagtcacaactttgacctacctgatatttaaaggatgcaactttaagctgtggcataagaagaaaagaaggtatctttctcactttgccatcttgaagttgaagaagcgatggagtcttctattctcacacggagacattgacacaaagaagagccaaagacccaagttcgtggcttcgttcgtgctcccaatttcagagacagtcaattccttttgaataaccacataatcttatatttatagaaacaagaaaaaaaatgaagataacttggtcatgcatatgactcatgattcattgttgaagattcttctttcactcttttttattttgtttttgataatagattctttcactctcgttatttactagctcacacaaggattttcttcattatcagagagctacaaagaagagggaggggcttatattatttctcattttttttttatgtttgaaagtttctgccaattctcaacaatcttatgaagggatttgctaactagtatttttttttagatttggaaaatgtctgttttggaaactaatattatttttgtgcacggctggatatactttttcaaaaacatgaatattattaattcatcaagaaattaaaattaaagatgaagtatatattgttcttacttcggaaaaattgcatcacatgatgttagtcactttatatgatatcttgaggatttaacgtttttaaatatttttgtagtccatgttacatagtgtaaaactgtaaagtaacaaaatgcgtattcttcttaaatctcacatagttctgccatgtatatataatccctctgcatggcacttcaaatgagaatattgaatggagagtcggagaccatatgaaatcatggatcacgttcatgatagagatctatatatcccaattcacatatatactatatatattctataatatatcatctaggaatacagatgaaactgttacagagaataacaaaatttcgtgataattaaatctaatattcatttattattcttaatactttgaatatatatggaaaaaacatttatctaaaataattcttctatttaaataggggacttcagatttttaaaatttgagtattttgcttgaagaaatgagtatttttttataaaactttccttatgttttaagatgaatttttcatcttgtaactagacatatgatgtaattccaatttcttttacttttattttttattatatatgtaattccaatttcatttggtttttgcggttagtttacgaatgaattctacatattacaaaaatatcataaaatacatataatgatctatattttaatggggttttcctcccttggttgctcgcatgatctatcttgccatcacgtctttttgtctcccgatccctataatataggtatgtgacaatgtgtgtctatctttttctttctcttttaagtttttaaccaatccaatttttgtcaacaacacaatccaatgaattctaactaatatactatgaaagtggcatattaatataagtttatatgaatgaacgagaaaatgcacttagacataaaagagggaaagagagatacatatgcaatgtcaacgttgctcagcttcacaaacccatgttatgaatctttttcttaggtacatcaagtcgtatgattctttttaaacaaaccatcaagtatgattcattatatggttatatcccaaataagaaaatatatagataaatacatttaaatattgcatgatgtcatgcaccaaaaagcaacaatatataatcaacatgatatagaacttcgaccccaactcctccttcttacttgaacttgtttttggaattgatattatttttgggtaaaattaatggttaattcatttgagtcaggtttattttcttttgaattcaggtcggactttgaatttctttttcttttcttagtcaatatcatcatggttagatgcgaaccatgaccgggacaatatcggctatgtattttctgttttggtacatgtcactatgtcaccttgtttaattttagttgttctgtttgtgtaactacgagtctacgaatacattgtctaatgaaatgtgttgttatgttatatcacatgtcatatatagtgtaactcacaaaagatgtatcatgtcattttctttatttaaatcgtgttacgtaatgtgaagaacttaacaatatattagcaattttaatacatctgaaaatcattcaaaaaatcgaaaaacagaacaaaattttgttatcgtaaacaaccaagttaaatgatagatgaacacaatagatcaaggataaaaaaaagttgagatttgagatgaatttgttttttttttgtttttgtcactgaaatctttattgaaagcccattaacttacagataataggcccaataaacaaaatttacacgccgtctaaacccgatttccgacgacctacagaaaaacttcggtcggtcagtgaccctttaaaggaaagctattagcgattgattcgagagatgtgcaaagcttgttgatttgaggctctctctctactagggtttgttgatttgagttttctattcctcctatacgtgttcttcgattctcctgggatttttttttgaaaaagggaatagaagaagaagttgctgaattctcgatatg

SEQ ID NO: 23817 - DNA, 3000 bp, Unknown; identical to SEQ ID NO: 2311
  misc_feature (1)..( 3000): 2750-1469P.txt file - cDNA_ID_2153387; gDNA_ID_1620518; Annot_ID_159372

SEQ ID NO: 23818 - DNA, 3003 bp, Unknown
  misc_feature (1)..( 3003): 2750-1469P.txt file - cDNA_ID_2153439; gDNA_ID_1620519; Annot_ID_159389
tactacaccagttgtatggcaatttttcttctcaagtatgtcgattctaaggtctactgctatgaaacggccaccggatttacggctatgagtcctcaaccgctcaaccattgattcagccactgcattcacttcaggttgcaactccaaagacccaaacattgctaaacaggctacaggatcagtttcgccatcttgtgaggattttctcaagtttacagaagggaagtatgatgcaactcgaatgtttcctttagatttaaagatgggatcaatgtgctctttaatgtaatcttctgtaactctggtagggaccttcacaatggccatgttccttagagaaacttcttcaggcaattttttcacaactttaacgacattttccaagcttttaatcagcttatccgcatcatagatatcttcaaaattcctagataaagcagttaaaattagtttagaaatctaagaaacaaattagtaaaccaaaaatgaacatacaaaaaacaaccctaacctttcatcaccaggtttgcttcctcttatatcaggaagtactagagttgctccaagatgcttagccaccattacagcatcagtgatctaaaccaagattagcagaattaaccacacaaacaagaagaagaagaagataacaacacatctaaagaacaccactttagagttgttataaagcatacctgagagatatggtactcaggaccattggtaagtgagaatgtaacataccctttcgatgatacagcgtcatctgcaacaatcaagtccttagtaaaaaagtccaaaataaatgatgcaaagaaaataagaaagacacataccagatagtaatgttggccaacaaggagtaagatcagtgttatcttccatccaaagtcctttactgccttcaacggttccgacaagaccatctttcacagagactttagatccttcaaattcaatatcttgtgcatctccctgagctttctcctgtacaaaaatacccaaaatgacaaagatttagagtaagattttgagttttggctacagaagtttcactattagtttacaccaaacgagatgaaatcaatcatgtcctaaagatccgcagaaaaaaacagttgagtctaatttgggtttcttatgatcaatgtccaatccaacttatgatccaaaaatggaaggtcttgttttgatcaagtaaatttcacagaacaactaaattttctaactttgaattagatctaacttcaaaaggcatctaagataagaatcaacacagaacctatctgaactaagctgaaatgagtatcacattaagagtgaaaaaagtgtcggcaaagaagattacctgaagagaatcaaagtaatctctatgaagcatctgtccaagcatcacaaacatggtaatggtgagaataccagcaactacttgcctcaaatcaacacccatttcttacctttctctctaacaaaaaaaaacagaggtttctgagttaaaatagactaagggaagaagaaagaaaaagagagtccaacaaagagaggtgtttgtggggcagatagagacaagctatcttcctcaaatacgaaatctcagttctctttcaattaatgttttgtcaaaaaagctctttttttttttgttttaagggagtgttattgtcagtgtgttgattgttgaagttgaagtcttacgctatcttacacacaaaacagccaccgacacttctgtcatggattttggtataaacactaaccggtggctggtttcactaaaccggtcaaactaatacaacattctaaattatttttggtaatctttacagttacattacattttagagtttaacagtttatactttagttctttatactatgtaaagaattattagaccttacactccaaccaaatgaactatagttccaaactaagaattcatgagagtcaaaatttttgttttaaactagactaattgtaaaattcaataaattaagctgttaaataatttatataacttcgaactcacaaattgttgagctcgttcaattggtttttacatttgttagtgttacattagcaactataaaaatattattttaaacttcaaaatgtggttgatgaaaaaagaaaaagaactttaaatcacggactcatcactaaccgtatcaaaaagaggagttggtaatgacacaatacataaactaaaatcccctttatatataataaaaatagttatttaacaaacaaattataagcaaatgataaagcactggattacagataggttttgaaacacattttaaacatatcataatgttagacatgagactaatttagtaattatactaccccaaaagcaattgtaatgatgcataattgcatatagtttttgttagagagcccacgtacgagttcaactttttgctaatcacacattgtttactaatcatttaattatcaatgtaccgaatcattagtagtacattagtcatatcccagaaaattggtggaacatgaggaaaaacacacatgctgatcaatgattataatccatgcatgagtcgacctgtttttttttttttttcgtgtcttctaagtttgtgaggggatcacaatgagcacttgattgattgttgaatggtagcgtaacgctgtgtgcaattactacaccacttcataactttttgatgtaaatctcttcttcttctttttttacccaatgcaggcgtcaatatatctatctacgcaatcatatactatcgttgtatatgattttggaaacacatataagcaacaaataaataatgaacgaaatcctattttcaagctaaaatagtctcggagacccattaaaccggggaaattttgaataaccggggaaattttgaatttgtttcggttaacatcgataccgtaccgatcctccggtttgttctttcggaaggtttatcttgttttcgtcaaacacagcgatcctctctatcagagcaaccaaaatg

SEQ ID NO: 23819 - DNA, 3003 bp, Unknown
  misc_feature (1)..( 3003): 2750-1469P.txt file - cDNA_ID_2153493; gDNA_ID_1620519; Annot_ID_159405
caaacattctgatgccttaggaaatgttcgtaaatctgacaaaggggaccattttccacttgaaatgctttctagtcgctcaggaaaggccttcagggacaatcagagagatgatgttcatttgaaaaataagtttccaaggaataaaaaagatggtgagtcagccattcgaccttcattacctaccgagacatccgatagaaagcccgatgaactggatggaagtgacaaggatcccaagaatgtttcaggcttgagcataggttcttctcccttagatagccagagaacatatttggcgaaattacctaagggaaatggacctgtcctccaaaaacaagtttcggaattggagttgggtgaactccctgagccattgggtgaagatacagcattgaagccgatcgaagagaaaacttcgtttaggcagtcaaatttaaaaccaagcacttcagagaaattgggtattgactcggataaacgaaggtctaaaaaatctgactcaaaaaaggcagctcctccacatacagtaaatggtagcaacgaacacgttgttgaagattcagaaagatcccaaaagtgggctttgcagtcacatgggcagaaccttacaggtacagatactgaaatcagctcacagaataaaaatttagaagatgcagcttataaatctagacaaaaagatagtagagcaagagtagggaacagtgtggaaggttatggagaaacaaacaaaaaaacgcctgttgtaaagcatggctccaaacgagcatccacatcccgctcttcaagggagagcaaaagacattcgtctgtctcaaattcaatcaatggacacaaagatgcaacttcaataccaggtggcagtgttgtccgggagaaacaaatgacatctttcggtgaagaagactcttcttatttgaaatacgagaaagcttctcctgagcttaagggacctattagtgatcatttgcagtgagtaaaatgaaacttcaatgtttggagttataaagtatttctgttttgagtagataacaatggttttgtttttctatttcaggtataaagcctatatgcaggagtataatgataaatatgatagctaccactccattaacaagatattagagagccacaggtagctagatgaacactcagatcatttgtgttgtcctagattgtcagcttttttgaactttatgtttaccattattcgcagaaatgactttcaaaagttggggcaagaccttgggtttgcaaaaggaagggatgtggagagatataacaaaattgtggagcagataaaggaatcttattgcaaatatggggaggtaatcttctatctataaccacttcatagttatttgtctcttatattttgtattaccaaaatatgaaacttttgtaatatatcgttgaagatagaactcaacttatataccgaagttttctttgcatcagatgatttttagcgtcgtataaaaatttggaatgataaatttgtttgcttgtgtatgatttgagaaaatttgaaagacatgaggagctgaatattatcctattaaggtaataggttaaattggatttgggtgagaaattgttacctagattgatcttcatgagaagaagtgactatattatattgaaagggaatctctcagcttatgtgcattttatttacggatccgattatgtgagttttttttacgatacttgctgttgactcatacttaagcatttttccccctatttgattgtacactatgatacttgatgatggctttcttatatatgttatctctcactcaatctgcagagacacaaacgtttgaagaaagtatttgttgttctccacgaagaattgaaggtgagttacaaaactcccctataaaccgtagtgttggttgttcatctcccacatgcattcttactttagatgtaccgtgcatcttcatggatggatactaatgaattatgataacctcttgcagcacctgaaacaaagaatgagagactacgcatcatctcatggaaaagattgatggaaactggaaccaaaactctcctttggtggagtcatcttgttgaaacattagctctgtttttctttctttcttgtgaaattagaaatgattcataggcccaattttgtgtgagttgtacttaggaggacctttggtagattttattcttgttgcagttggtttagttggagcgctcgataaacgaatatgtacatacatgggtatcaagatcaatgtagattcttctggctctgctttaatttaactttgataagtcatcatggcattttggtcttccatgtgaagcttaacagagaaagcttaatgggtctgattggtggtgacctaaaccattaaggatgattgtacgtactaccattttctgacagcgccaccgccacggttgcataaatcgaaatcactgttgtagtcttgtagaaggtgaaaaaaaaaagtaacctaaaggaaaatctaaaacgcagtcgttttgttttcttagtttggtatcaaaaactctgaaatcaaaagaaagaagaaaaaaaagtctctgttttttctctcttccctgtttttctgtgtctttctcctccgtgttccgtcgtcttctctctctgcgttccttcttgaagccggaggaagcccaaaacccttggaataaaaaacaacggcctctctgctactgattgatagaaaacaaaaatctcaaacctagagaagaaagcgacgtactgtatattctcaagactaactggatctctcgttgatcttcaataaaccctttttgcaatcagtctcataagagtctacaactcgtgggcttctatttttcttgttggggtttcaacgttttcctctgtgaagaaagagattgactttcatggagatgaacctctgctggaatttgtagattcaattagggtgttttctgggttttgtggtgcttcgataggggtttttggtgcgttggtggtgggtgatg

SEQ ID NO: 23820 - DNA, 3000 bp, Unknown
  misc_feature (1)..( 3000): 2750-1469P.txt file - cDNA_ID_2153511; gDNA_ID_1620520; Annot_ID_159420
tacccttttttgagccataccgatacgtcttcaaccacaaaaaaaatcaaatgtcgaaatttctcccggaagaattagccattgagattctagtgaggctatcgatgaaggatcttgctcgattcagatgcgtctgcaagacatggagagatcttatcaacgaccctggattcacagaaacgtaccgagacatgtctccggcaaagttcgtgtcgttttacgacaagaacttttacatgcttgacgttgaaggcaagcatccggttattacaaacaagctcgatttccccttggatcagtcaatgatcgatgaatctacatgtgtgcttcattgtgatgggactttatgtgttaccttaaagaatcacactttaatggtttggaatccgttttcgaagcaattcaagatcgtaccaaatcccggtatataccaagattcaaacattctgggtttcggttatgacccggttcacgacgattacaaagtcgtaacgtttatcgaccggcttgatgtttccacggcgcatgttttcgaatttagaaccggttcatggggagagagcctacgtatttcttatcctgattggcattacagagacaggagaggtacatttttggaccaatacctctattggattgcgtaccggtctagtgctgaccggtttatcctatgctttaatctctcaacacatgaataccgaaaactccctctcccggtttacaaccaaggcgtgacgtcttcatggttaggcgttacaagtcaaaaactctgtattacagagtatgaaatgtgcaagaaggagattcggatttcggttatggagaaaaccggatcatggagcaagattataagcctttcaatgtcgagtttcatctctgtacaagatcgtatctacgattatcaagtcgaattcgtgtcgtttactagaaagaacgatctcgtcgtaacattcactggatacaacgatcatttcgagatggaacctgaagagcgtacgaagaagaagatgttcttgtacaaaaccggaaacgagagatctgaagaagtccggttctgtaaccctctagccgggttacggtttctctgtgaatgtgtggagactcttaagattgttaatcgcatatttatttgacaaaaaaaaattaaaatcgtcaacgttgtgttgcgggtgctacacggataacgtgacaaacaattcaataaattttatatactttaatggtaaccggtccaattaaaattaaagatccaaatatctcaaaaaacttggtggcaatagtagtgaatatttgacgaggcagagctttggaattctatatgaactctctaaacaagggacaatatgattaaagataccattctcttcaagtaactcatcaaataatggatctcctgctttggttattcgagaactcgttttccttaaattcctaagatgattcttattcattccaatagtgtctctctttatataatgcccaaaataaagtgatcataaactaaagaaccaaaacaacaccgaaaatcaaggaagataaaataaacttaagaaatccaaatcaaagcaaatacttcttatcttacaagttacaaaaccatagaattatcatgcgagtctccttccaaataaacaatgatattagcgaaacaacacaggttcaagtttgtgactcagttatcaaacagtagcagcaagagcacgcactagttcataagttttaaacagtagctgcaagagcactcactaggactcttccccactagtggtcctcggattatcgagggccagagccccacgcgccatccaatcgccggtagttcattagggttttgggaatatacggatcctagcgtttaaagtaagaagacgaagcctttgttttgctctcgaaggaacaagccggtttggtctttgattcaataagtaaaaccaatttcatctaaccggtttgggctagccggttttggttttctattttgtcattcaagtgaggaggaaacactttatagattacaaagaattgattaaactcgaaaaagagattaagaaaggatattaatggagagaggaatgaacaatgggcaatcactctggcactctcagtcaccgaaaactccaacgacgatgctagatcgggctctttcctctcgccgtcctcactccgacgccgatctctctgcttccggcgaatccggaaccgacgaatctaaaaccaaacgcccacacatctacctccttgcttccaatttcctttctcggatcggtcatcagtggtggccttgtctcattctcgctctcctcttcctcgtccttctcttcctcatctccgttgctttccattctcacagctttgtttgcatctcccgcttcgatcccgctgctcggatcgggtttttcggtcttgatggcctcgaatcggattttggtgccctaggtgttccttggtgtaagcacttgagatctctgcttatttttaagccttggtgtgttttgtgttcgacattgtgaattggttctagtggaatctctagtgtttccatgtagatttattcaaaatgctttggttagatttgatctaggtttccatttctgttgatagtattcaggtcaatttgaaaattgttctctaaatctgattcagatgaggttttagtatcattgaattgaagccttgtagcttccactggttaatctctggatagtactatagtagtggctgtgctgtgtgttgacaaatcaatggagcagaaccattaactcctctagtacacttcgattacgagttttatactgttagatagctatgttgttgttctctatttttccatcaaagcaacatgataatgatttgttgtgctatggaagtatttaatttttttctttggcaaaaggcagatcgaaacatggaaaagaagttgagtggacatccaaagatttactcaagggtctagaagagtttgtgccgatatatgaaacacgaccgataaagaacaatatg

SEQ ID NO: 23821 - DNA, 3003 bp, Unknown
  misc_feature (1)..( 3003): 2750-1469P.txt file - cDNA_ID_2153530; gDNA_ID_1620520; Annot_ID_159425
tttatttgtatgttcgaagaaaatgtcattaaatgtaaaaaaatagtctcaaacgacggcaaaaagtctctctccattgagtatcctctacggttcttgaattggtttggatacatatttcgtgtatgaaaactgaggcgtatcaaggctatggagaatttaaatcataagtgggatcgttgttcctcttctcatcaaactcctctttctttcaaaggcaatcagaagcaggtttgttgattaattttcgagattctttgttatagcgtagagaaaatgtcaatctttgacattttaatatgttgctatactttggatctttttttacttgctgtgtacacttgaattctcaaattctttgtagattggacaaggtcagagagaagtgttcacacattttgtgtcacttccattagccatataccctgacttgacgaaaaatatcgaggcttttcagaattctgtattgggaaacaatgataaggatccattgaagtttcagagtactttagctggtaagatcacaaaccaaataaagaaatgttttaagtgtagaacatgtttctatgacatgtttttggatattggacagaaatgggaatagaaaaatcgatctttgtaactcccaaaactttccatttgactgtggttatgttaaagttagagaacaatgaatctgtggttaaagctcagaatatccttcaggtataagtgattcctattctaagagacatagtgtacttgttcttcttcttaggattgctttgatgattgaggtgttgtctttttctgaaaagcagagtattttttctaatgtgaggcaagctttgaaaaacagacctgtcttcataagactcagaggattggtaattgctacaatttctagtggcttgaaacataatctttgaatcaatcccaatggttttttgtcttgttaaggaatgtatgagtggatctttagacaaaactcgcgttctctatgctcctgttgaagaagttggtcgtgagggccgcctgctaaatgcttgtcgtatcctaatttctctaagcgcttatttttacttgtgtgaagacatgacttcaaattactatgcaagtgcttctgaactctttaactctctagtttagatgttatcattgatgcatttgagaatgttggatttgctggtaaagatgcaaagtcacgcttgaaggtaatgcttgtcacttttctgttgtttacgtctttgactaggacaaagaaaaagatggatataacaatgtttcagcttctccttcatgcttgttccttatttgcagctacacgccacgttgatgaatgcaagctacagaaaagataaaagcaaaaagatggatacttttgatgctcgagagatacacaaagagtttgagaacaaggattggggaacatatctaatcagagaagctcacatctcacaacgttataagtatgaccccaatggctacttccattgctgcgcttcactaccttttccacataagtgacattgacaacgatcaaatctcctccacatgatttgcattaggaaaattaatgtcaaaacttaggtaagtatggtatgtcactgtgtaactgtttttatatgtgtgtgtcacagcgattggtaactatgtgttgtgtaacttttgtttgtaagttaagttttggacagtaatattcttccttccgatgattggattagaaaattcgtgaaaagtgtttgattttgtattatttctgtttatatcgcatgttacttcttttggtaattttgtagaattgatggtgtattagggtttacgagtagatgttttctagaaacaaaagtatttctcctaatgtgaggcaagctttgaataaccaacccatcttcataagacgcatccttgagttatacatatttagtggcttgaatcatctttgactttgattatctatccaacttttaattcctaaaacatagagattcataataaatctgtaactttaattcgtctctttaccaattgaatgccaaatctagatagatcaaaaagcgaaccagctctttctagacgaataagctctttaaactctgtcgtatgtgttgtttcataggacctttcatctttttcttcttctcataattagttaccagtggcaaaaagggaaaagtctaaaaggaactctagagtgaatttagtatgcaattaaataaatcatttactagataagggtttgattacaaaccttaggataaatatttgattgtatctcaaagtataagaaatgtgtcaagcagattctgtgttttttttgtttcgattaaaaccgctaaaaccttgacaaggttgtctccacaaacaatattcatatcaatctcaaagaatgcaacatgcaaaatgttgtgcatattgtttgtggaggaccaccatcgtaagaggatttatgtaacataacttaaaagaaagtggctatatataactttttttgaaacctttttctacaaacaccttggatgttctttaaataagatgaaaaggctattattctaatgaacaacatgaagccaaaagaaaatccaaggcgtttgcagaaagaggttataaaaggctccgaaatatttcatccgaaccataaacttgttaacacacctaaagaacaatgatgcagtaatgggaatgaatacacacgtccatttgactgctgtgatggaaaggattttataaggtgagaaatttttagggttttgattttgaataacttaattagttttctaaaaattgaactaaaaaatcaaaacaaaatccgaaaggaggggaagtaaatatttctttcgaaatttgtggagatctatatttcccttttcaatactttgatctcgcttttttttttttgaaagtatacggtcaaatatataattttctaaacgtaatggggtttagcagcaaatagtcgtaaatactggcggaagaaaatgatattttacggctgaatcatcaccggagaatgagaggaagatg

SEQ ID NO: 23822 - DNA, 3003 bp, Unknown
  misc_feature (1)..( 3003): 2750-1469P.txt file - cDNA_ID_2153534; gDNA_ID_1620520; Annot_ID_159426
atttatgtacttggtcagcttatttctattcactcatctgtcatgttgcttatttgctatattcttaaggattgtatgagaggaccattagacaagactcgtgttctctatgctcctgttgaagaaattggtgatgaaggccggcttttacgtgcttgtcgtatcctagattttagtacgaatgttatttatagtagtggcatggttagaccgttaaattaagagtttagtgtaaatgctttcgattttcttaataccaagttcagaagttattactgatgcatttgtgaaagctgggcttgttctcgagaaagatgcaaagcaaagcttgaaggtaaaagctttctgagtatgacgagattgttgcagtcacttaacgttagccaaaggctcagaactaatggaattggaagtagtgaatcgtgcttctgtttcatactttttcctttctttgcagctgcatgtgaccgtgatgaatgcgaggcacaggaaaaggaggtgattgattcccaactccagacttatgtttagataaagaaaacaatgttacaaacctctgattatctgaaaacccttttggtctcagaaagaacaataagaagaagatggagacgtttgatgcaagagagatacacaaacagtttggaaacgaagactggggagaatatctgatccaagaagctcatctctcacagcgttttgtgttcgaccagaacggttattaccgttgctgtggttcaataccatttccaggagaacagagagcctgagaagaatcatctaaccagcggccacagtctcaaatctcaagcatcttcacaggttttggtcccgtggtatgagcacttacaactttgagaagagaacctgataaaattgtaaagttgtaccggtcatcttgtgttaaccaaatagttgtcttcggtttggttctttcttggtctttgttcaataaaccgagccaaaacgttcttgtactctttctacaaggtaataaaaaggttcttagtacatttaatagaaaaatgattatttacagctttattagaggctattgattgatttagtaatgaactaataatgcaagtcaacagatctaaaattggaaagattattggcaatggaggcaggacaacgaaaatcaagcatattaaactctttaagattcgtataattccaccggcctaaccaaatctctaagcaattgttgtttatgtattataatatagttcaccatctatttaagcttaaacgagtgtctaatacatagacgtatatgacaattaattaatgatccgatccaaacgacccttggcgtatttggtaaggtagcagtgatgtgcttaattattaaccaacgatgtactgagtttctagaattagtaagaaccataagagttttaaaaagtgtaaaacgtaaaacatcaacacatgtcattccagttaacatacatatatctatatatatgttaacgtgtttgcataatttttttaattagagaaaaacagcacactatgcaaaagatcgttcatatatctaacgtgtgatttaatcgatctaacaactttttattcccttttatattaccaaaatatttatttccattgatcatatatttgaagtagcaaaaattggtaaaattttagttaaaaatgagggagatgaaaactgatatattatgtaaatctcaagtttttgtaatgcataagaaaaatgttatcaccattgcaactatccatggtagcaaccgtatatctcagcatatgatacaaaaaaaaaacaagaagaagctcatattcaaatttcttacgttcaaacgaataacttgattgctaaacaacaaatctagatagcattggattcatcagtaagagttaaaatcgtacagcattgtgaatcataaaatgttgtacaagattgtgaaataacaaataatattgtaaatttatcaaaaaaaaaggggattgtggatcaatgaatatgatggagaatgttcatagaagaggtaaataatagagggacccaaaataacattgttgaaatggaatataatcataaatgagtcacatcttcaaaatctgatcaaatcacttggaaaaaaaaagatcaagtcacatgcaaccagtaaccacaatcatattttggccggtctatcaccatacacattgtttacagctcacacttgtccctccttatatttgttcgtatccatttgttttcttctctctctactctaatctcatctttatgtttatccctttttgaattttgaagctactctgtcctttgggtccaccctccaccacctctaatttcaatcacgttaaaccggccatattactttaaaccgaccgttttctactaataggaaaatccgacccaaatttttgactaattataagacataccgccgctataccatgatattgtcaaagaaaaagtttctaaccaataaccactatagactaaaagatttcaaataatttgattgatactgcattgaacattctacaattctacttatattgtgtagttcaaataatgagaacatatcggaaagactagccgctattagattatgaatgcgtatgaatacattatacattatagtatatatatatatatatacacatatattaaaatgtattactatataataatttgtcttagtatagtactcaaagaaatagagttttcttacgtagatgtcatatattttagtcattttaggcaccttcctaactcaaatcacgaatagaacttatgtagcaaaatgtaaacacatgaaatcatttattaattcgggtccaacgtaacccaccacaccacagaaactcattaaatagtatttttttataaaacttaagttatatgcatggatacatgaacgatactcctatataaagagaacagcattcaaaaggtcttatcatcttcttcactaaacaaaaaaaaacccttcaaaacatttccttattctttcttcttcatctacaacaatg

SEQ ID NO: 23823 - DNA, 3000 bp, Unknown; identical to SEQ ID NO: 2335
  misc_feature (1)..( 3000): 2750-1469P.txt file - cDNA_ID_2153536; gDNA_ID_1620520; Annot_ID_159427

SEQ ID NO: 23824 - DNA, 601 bp, Unknown; identical to SEQ ID NO: 6183
  misc_feature (1)..( 601): 2750-1469P.txt file - cDNA_ID_2153543; gDNA_ID_1620852; Annot_ID_170363

SEQ ID NO: 23825 - DNA, 3003 bp, Unknown
  misc_feature (1)..( 3003): 2750-1469P.txt file - cDNA_ID_2153543; gDNA_ID_1620520; Annot_ID_159429
cttagaggaatctggcagcaaacctggtgaaacagcagttatatatgtatgtgaattacctgaaatcaaaggaaagtttgatccaaagaaggccatggctcttggattgagagctggtccaaagtacagttatcttcagtctggacagtcagtcaagtcagattttaaagatattacggtatgtctcaaagagcaatcattgggaatcttcacaacccaatatcagtttctatacaagcagactaacactgttcacgcttaatcataggttcatccgagtgatgtgatgggaccttcagttcctggtcctgttgttttgcttgtggattgtccaacagagtcacatgccgaggaactgctatctatcccgtctatgaagacttattattcatgtcttgacaattcaacagatggagctaagcttgttaattgtattattcatctaagtccagcttctgtaacaaatagttctacataccgaagctggatgaagagattccattctgcccagcacattctcgctggacatgaagcgtgagtcttctcaactatggttctttctcataaaagaactgttgaatttatttgtctgatatgtagttttggtgtttgtccaggaagaatatggagtttccaatcctgagagccagttctagaatcacagccagacttaactatttatgtccacagttcttcccagctcctggattttggtctcatcaacatgataataactcgataaaccccacttctttgagcaaggttacaaacgcttttctgatattttctttttgagttgaatctggctgtgttcatttagtcaagttgtgttcttttcttctcttgtcagtgcttcgattcgaatcttggtgaaagcatttctgctgaaaatctcctcaaggtattgaatgttgcttcagtgcatcattccatatgaaacttcctttctttagctcttaagtctctcgctttctctcattgatatattgtgggcagttcactttgcgtccacatggtaatcttggggtagacagatctagtatccctagtcgattaacagctttacgagtgatggatgagcttctttcagaaattcctgaaatcagcagtaagaccgaagaaatcaagcagttatggaatggacaacacaacaagatgatgatcgaagagccatggctgggtgaaagcactgttccaagctgtcttgaaaacattagaagagacgacatggagatagttcttttgggcactggttcctcccaaccctcaaaataccgaaatgtcacggcaatttacatcgacctattctctagaggcagtattctcttggattgtggggaaggtaccttaggccagcttaaacgaagatatggtttagaaggagctgatgaagcagtcagaaacttgagatgtatatggatctctcacatccatgctgatcaccatacgggtcttgcaagaatccttgctcgcagacgtgagcttttgaaaggattggctcatgagccagcaattgtggttggaccgagatcgcttaagaactttctcgatgcatatcaaagacttgaggatttagatatggagtttctcgactgcaggaacaccacaacaacatcttgggcttctgtagaaaccagccgccctgagaaaaataccagtagcggcaatgcagagggttctttgttcagtaaaggaagtctaatgcagagtatatataaaagaccgagcagcccactgacagacaattcttcagctttaccattcttgaagaaactgaaaaaagtcctcggcgaaatggggttggagcatttgattagctttcctgttgtgcattgccctcaagcctttggggtttcgttaaaagcagcagaaagaaaaaacattgccggagatgagattccggggtggaaaatggtttactcgggagacacaaggccttgtcctgagatggttgaagcttcaaaaggagcaacagttcttatacatgaggtgcttttctatataagcaaaactgtgtaaaacatttacatctcattcttaaaatttaccatcttttcaaacttataacaggcgacgtttgaggatgcgttggtagaagaagctgtggctaaaaaccatagcacaactaaagaagcaatcaaagttggatcttcagcaggtgtataccgaaccgtactgacacattttagccagagatacccaaagatcccggtgattgacgaatcacatatgcacaatacatgcattgcctttgatatgatgagtataaacatggcggatttacatgtgcttccaaagattttaccttacttcaaaactctattcagaaaccaagtggttgaagaagaagaagaagaagaagagactgatgatgatagcttaatacgtgacaaagtcccaagctttttcatcaattagtatatagattagaatgttctgttttgtcccctgtttttgactgtgttgtattgtctttagaaataatatcaatttaattgatttttcctgtgagtgtgacagaggaaataaatcagtttcatgtgcataatgtgaattgtgaaaaagaaattaaaaaaaatcggaactttgggaaataaggaaagacaccgaagaacacacaaccattcctctttattgaccgcttccttctttctctgtcacatacgaatcggtgagtttttttcttctcaatttctccgttctctgctgatttctccgaggttattgattcgattccgcttgacgcatgattgtgttgtctcaagggtctaattttacctccgcgttgattggtttataggggaaatttggatcccgatcgtgatctttagtttggtgaatttgagctggaattggagcttaaaggatcggttttttgactgatctaattgttttgaggatcggtctttcataaagttgttgtctttgaagcttttttgactggtgaggacgaaaaagttgtgattttgggaattagggttgttttgtttcgaattcgccatg

SEQ ID NO: 23826 - DNA, 3000 bp, Unknown
  misc_feature (1)..( 3000): 2750-1469P.txt file - cDNA_ID_2153549; gDNA_ID_1620520; Annot_ID_159432
gctgcggtatctgcactatggcgtgagaatttcggaggatctgatcttccaccacctccaatgtatactttggatgaccggtccgatttctctcctgagtctggtattgcagactactctgcgtctccagatgctaagtctgacagaagaacaccattccagagttctggaaagaatattgtaactcctggtaaaggaaagttggaagcaagcccttctttttctctactgaatgcacaacagagtcagcaagtttcagggagtccgagttggtggtcgcagtcaaaggcaggtagtagtaccgagcaggatgataaagggaagggatctcctgtagaaggggtggttcagccaggtgcattggtcactcttccgccgccaagagaagttgctaggccagaggttcagaggcagattatacctacaggaaaccttgatgaggaagagtgggtcactgtctatgggtaaggccatttaagctttattgctctcgtttttctcactttactgttgcaaatgttcttgatttgtcaacattctcgtgtctctgaaattctaggtacatggatgataacagttatattggtactgggtagtgttattaagtgccttaacttgtgtctgtctcccatgtttcaatcttagagaactgttcataataaatgctgttctttaccatcatgatgctcaaatatcagcctttgattgtgattttatgttttgatcattgtgaattctgactctttacatggataataactggtagtgttattaagtgccttatcttgtgtttatctcccatcttttcaatcttaagaactgatcataataactgccttcagattttctccaggtgatacaaatttagtactacgggagtttgaaaaatgtggtatggtcttgaaacatgttcctggtccaagaaatgccaactggatgcacatcctctaccaggttactgttcttcccttcaaacctgtttgatgcatgttgataagcattcatagttcttctagacgagtcatcatacatgatagtctaatcaaatcttttatataaaggaaacaacgaactgacaatggtctgtgtatttgatacagaaccggtctgatgcacataaggcgctgaacaaagcagggatgatgataaacggagttgtaatagtaggagtgaagccagtagacccaatacagaagcaagcgttaaacgagagactcaacaaccaaggattcatgcctttacctccaccatcatccactagaaacactgctcgacccctgtctcgtcctcagtacttgcaaaacggcagcgctttctctcctcaaccaagtggtggcgctatggcctctccgtcaaagtcaatggtctcaaagttctttgacttgatgttcggtgtttaaaagctacttcaatggcatttcccgaatgattcttctttacacatagtttgaagtttttgagagcagagtggctaagtaaatcttagagcgtggtcaaaattaaaaattgtaagaggtgtttcaaattgtcttttgtattgacgacggctaaaaatttggtataaatctgattattaaaatctcctcttttagccgtttcattgttgtttgtatttgagcagactagtcatgcctcgtgaatgattgaaagaaagacactgattccatggaagcctcacgggcagtgttttagaaactccattaggaactagccacgtatctagcctgttgtgtttatatatcccctctcgcatgtaaattacattacaaaactcagtaactcacaatggcgaaagcagcagagcagaaacaaaacccgaccgttgcgagtgcagaagcgaagcttgatatccgcgacgtggtcaacacagccatcacttacggcgaagataaccgtcacggcggcgggaaacgcaatgacgtggccatgtttgtgctaagagccatgtgcatggccgtatcaacggtggctgttacgttaatggtaacagcacgcgagactagcatgaccactctctatggcttcgagtttcagctccacgccgtttggtctctctcagattctcttatgtaagcatatttcataaatttgacatcaccagtgatatgtattccacgttgcttttgaaactgacggttcttttacagatatctagttgtggtttcatcggcaacggttctttactcgttgattcaactgattataagtggaacaagactaatgagaaaatctccggtgattccgacaagaacacaagcatggttttgcttcgttgcagatcagataataggatacgcaatggtgagtggaggatctgcagctttaggagtgacgaatatgaacagaacaggaatcagacacatgcctcttcctaatttctgcaaatctcttggtttcttctgtgaccatctcgctggctccatcgtcttcgccttattcgcgtttctcctcctcgccgcttcttcacttctcgacgttctccatctctcacgccaccgctaaaaatttaattactgttttaccctcttgtacttctcgtcgttaattaagtttttcatcattacaataatcatttacgttatggggttgctttttggaatttgattgtttcaatcgatattaccgaatttcaatgttttgaattttgttgaccatgttccatatacacgacaaaaaaaatattcaaaatcacccgcgacaaacacatacatgagtgacactgacagaccggtttccgcgtctcgattcgtttttagcgtctgggcttcttaatgccttttttagagttaaatggcctaagtttttgttattgggctttaagaagcctttttatattacgattgttctgtgttctgtttcttctatccctttagcctgggaaatgatgaagctcattgctacgttttaatggcgatcactctatctcgactagcttggtttattgcaattcacttcttcatgtaagttaaattcactctacttcaattgaatcacatcatg

SEQ ID NO: 23827 - DNA, 3000 bp, Unknown; identical to SEQ ID NO: 20962
  misc_feature (1)..( 3000): 2750-1469P.txt file - cDNA_ID_2153565; gDNA_ID_1620852; Annot_ID_170355

SEQ ID NO: 23828 - DNA, 3003 bp, Unknown
  misc_feature (1)..( 3003): 2750-1469P.txt file - cDNA_ID_2153565; gDNA_ID_1620520; Annot_ID_159440
tttgagaaactgcaggcgattcatggagttccgaagattaaagagaagtataatccggcgacatggatgctagaagtgagctcaatggctgcagaagctaagcttgagatagattttgctgagcattataaaacatcatccttatatcagtaagttcaacctaatattcaaagctaagatcattccagatattttaactcaattagaattgttcgtggtgtagacaaaacaagaatcttgtaaaggaactaagcacaccaccacaaggagcaagcgatctctacttctcaacgcggttctcacaatcattgttaggacaattcaaatcttgtttgtggaagcagtggataacttactggagaactcctgactacaatctagcaagatttttctttacattggctgcagctgtcatgctcggatcaattttctggaaagttggcacaaaaaggtttgtttaattacttgaatcgaatacagaggcctcaaatctagtatcagagtccttacttatatctaaactctatacaactgttttcaaaaacagggaaaacgctaatgatcttacaaaggttattggagcaatgtatgctgctgttttattcgtgggcgtaaacaactcttcatctgtccaaccgctaatagccgtggaaagatctgtattctatagagaaagagctgctgaaatgtactctgctttaccttatgccctagcacaggtgagattaaactagaaacgttttagttacttgacaaacaagaaaccttaatgggtcgtaaagcagtctttaactaaaactttcccatggtttcaggtggtatgcgaaataccgtatgtgctgatccaaactacatattatacactaattatatacgccatgatgtgtttcgaatggacattggccaaattcttttggttttacttcgtatcatttatgtccttcctctacttcacatactatgggatgatgacagttgccctcaccccaaatcagcaagttgcagctgtttttgccggagctttctacggacttttcaacctcttttctggttttgtcattcctagaccggttagtgttggttacttttctggcaagaaagctgaaaccctaaatgattctctattgattctatcataagctggttttactttcctcttgcagagaattccgaaatggtggatatggtattactggatctgtccagtggcttggactgtgtatggattgattgtttcgcagtacggtgacgtggaggatacgattaaagttccgggtatggcaaatgatccgacgataaagtggtacattgaaaaccactatggatacgacgcagattttatgataccgattgctactgtgttagtgggctttactctcttttttgcgtttatgtttgcttttggcataagaacgctcaacttccaacaacgatagggtgtagttgcctgccggatatgtttggcgtgaagtagaaaaaaatgaaaaatgagggtttatgccatatagtttgtgattgatgctttattgattgtaagtaaagtgtacaatatatacaacacaatagattgtggggagaatttacaaggacaaatctaattataattaacttaagatctaaatttatgtatatcctaacagttatatccgttttgtacactattttaaaactttttacagatctaagataaacatagatttattttaagaatcaaattgtgaaaactctgcgtggaaaaaattaatcatgagtcatgacaatgatgagctagttaaggttccaagtgattgcaatcacattttgtgagcactaaagaacacatacacacactatatatatattcttgatcacctaacgagtgaatcaaaagagatgagtagtttattgtattttgggacaaacttcgattaaataatatttacactatttcatgaaaacatttgatcactcatcaaatacatcttatgaaggcgcatatatatctactgtttatgaaatctaatctactttactatatgaaaaaaacatacaaatttgccggagctttctaaagacttctcagcttcttctccggtattatcatccctagaccggtcaattttggttacttaagttgcaagaaatctccgtgtaacccaaatttcataaatgcgtagtgggatttactcttcttcttttttggtttcatatttggtgtttgcctttcgcgtaaaataccaacatatagcaaagagcgtttagacgtcaaatgtgtttgttttatttgtgtagagtatacatacttttttaagaaaagaaaaaagaagttatgaaagcttgttcttttttgttaaagattatgaaagcttgtttaaatcctaatcacatctcgtactaaataaagaactatatgtgtgtgggtaatattatccaatctctttaaatttaaaccacttgtctcatctcatatgcaaaacgtgtatcttgtaagaacacacgctcttctaatatagaaatagatcgcgtaacaagtggacttggaaaagctatagtttatggcgttttcggacagatttacacttaaataatattatcctcacatcttttaaattcaattatttcattatcttggttatcagaactgagttttgtcggtaacattgtatctttaaaaaaaattatcctaaacaaagaacgaaacgatacaatagtataaatttgttcttgtcataaacgataatttccaggtaagattaaggataaaacaaaaaagcttataatagcaatttaaaacacgaattcaacgtacgatccaccacaatcctcgtcgtctttcaaacttaaaataccgaaactacccttaccttcttctttccataagaaatcaaaaccaagtcctatggtcgcaattgtatctctatctaaaaatcttctttgaatttgtgtatacacaaatcttattcaacgaatcatttatcaccaaaaggttctctcttttttgtttgtttctgtcttgtgtgaatg

SEQ ID NO: 23829 - DNA, 3000 bp, Unknown; identical to SEQ ID NO: 6169
  misc_feature (1)..( 3000): 2750-1469P.txt file - cDNA_ID_2153571; gDNA_ID_1620852; Annot_ID_170354

SEQ ID NO: 23830 - DNA, 3003 bp, Unknown
  misc_feature (1)..( 3003): 2750-1469P.txt file - cDNA_ID_2153571; gDNA_ID_1620520; Annot_ID_159441
aactcgggtctatatttttattttacttttatgattatgattagtcgttatcggccgatttatttgttatttaacaatttgtttaggattatagctttttcggattgggaggaatcatgttcataatatcgcggaggtgtaattattcacgaaagtgatagaggataaaaataaatttgtttagcatatactttatttaacgggtgatagatgattgaagttacatctttcaaataattggatattattgaatttatattaatagttgagaagaatgtttttaattgagtaatcaacacaattaaaagaattaaaaatctgtttgtgtgtcgacatttgaacttttaaggagtcatcttcaatcacgaaccagtcaacattgtgccctttatacgaaatacttagttcaattaggtgctaatagctacttctaataactttagtagcacaaattctggcatcatgtatatccaacaaaaaatctcaagataactttccgaagaatatctatcatttaaaaataaactttctctaaacatgtattaatcttccaatcataggaattaatagtggaacaagctagccttctaaagtattacaagactgattttgtcttgaatatgaatataagttatattacaaactagcctatagtctagcaatttcctaataatatatgaaaactaaatctctacatattttctcccttcgaattaattagtcatttgtaccagaggcagagatgatagttacgagttcataataattaagagttaagactatatatagccttaaagcttagaaatatacaaaagatcataagaacaaaaaataattttcttttataaaattaagatcacatatatatataaaggaataattggattgtgtaacacatatacaacaaaatttagataaatgtcatgaattttgtcctcttttattagaattttatcttgtataatactaaaaggtaaacataataacatttgatttaaatacaaaattggggtttatcatgtaaaaccaacctcacaagttttggaatgaattgttttgtttcttctaattttgtggtattacatatttgttattagaggggaggtcggaattaaggagaataatcgagatgagacagcaagcaataataaaacttagattctaaacccacttccaccgaaaatatgtagtagacaagtcctttatgtgagattggtttggtgggcggaggaataaataaagctgatttttttttgtatatgatcaatctctctctcttctgtaattcgatctcacgatgcttgtctgagagagaaagagatatagaaaggaacaaattatgctgtaatgataaaaagatcttttatgtctttgtgtcaatcatttagatcacacttgttatgtgctcttcagtttttcctttttagatacttgttccttgtttccaataacagaaatttatggtttattttttactcgttggatatatgtataccttattctctctctctctctttttggtttcctacttctttctttttttgttacaatatagaagtaggaaacacacgcatccgcacaagtactagcctttccttggcacacaacaccctctcacctccacacattaatggaagaaacttggaaaagatttgcatctaatttttcaatgtttgttgcagcggtcaaagagaaagaaaacacatcaaacagaaaaccccaatagaaatctatttatttctggtcttgatcatgatactaaccttgactatgtttttaatataaaaatgtcgtttaatgtttatcacaagatataatccttacttagtaattgaattccggaccccaaactaaaatacttcgaattagtattgctttctgttgttgaaacaaaagataagcaataatagtgtttgctagtgtgctagattccaacaattttttcttccaaaagtacaacttttttttgcccatttcgtaaattcatatgtacatatatagttgaatgttgtgggtgtacgtaattggtaccattaaaatcaggaaatcacaaccttaaaaataacaaaaaaaaaaagaaaaaagaaaagacaatgatattatagaaaactttgtgaaaacatgaattaaattcagtaattaatcaagacggaaatggtctgttcagaatatttttcttgaactgtatactttttcaatctataactttctttttcactttcaggaaaattcgtgtccacatacattttactagtatatatttgcctcatttccaaaggtgtgtttcgtatagtatcaacgtttagcttttaggttctatattcgaaattttacatgtttctatgatgtacgtatatatataatattagtcgtattcccattcgtgagatcctttgattacttattaattaagatgcatttcagttatatttttgggcaatagatcaatcatccacagtagtttaagtttcataatggaccatactattaattaaacaatcaacattgaggaattctctaattgaaatctcttattcaaaactttaacataaacactatcttatatatataaaagattactatacattcaaacttatatatcaacacacatatatgatcatttgataacacctaccatttgtgttatacatatattttatagagaagttatagaaaattatactgagtatacatctatgtgtcatcgaaataagctgataataacgaatacacgttttctttttatgtctggagtagaatacagcattcatgcccttacgttgcaggttcccatcattttacaaatattctcttctcttttctactttctcttttttgatgtaatacgatctatttatttattctatatttcactatatatatctcagatgtccaacgtttcagtattgcattgccactcgaattacctaagataaaaacgaattatcactttgatttttcgcacttatagttaaatctattctcaaaatttaaacaaacatg

SEQ ID NO: 23831 - DNA, 3003 bp, Unknown
  misc_feature (1)..( 3003): 2750-1469P.txt file - cDNA_ID_2153638; gDNA_ID_1620784; Annot_ID_50393
aatatgtgcatcttgtatgtgggggtcttccatgccagggacttagtggttttacaccgatttagaaataaagataaaccacttcaagatgaaaaaaaacaatgaagtgacggtttcatgaatatcatagactatacttgaagcccaaatacgtcttgatggagaacgttgtaaatcttttaggtttcatggaaagatttgttggtcgttatgttgtagctcgtcttgtaaacaagaattaccaagcaagatgaggcataatggctgctggtgcatacaatgttcctcaatgtaggtacatggtgtattagtatcggtagattaaggatcccaaatcaattcatgaagaggaaatgaggactaagggaagaaaggctagagtttgggagaagatgaagattgtggaaagtggcatgttgttgctgttccagtcgggattgccttaggatacatgtttgggatggcgagtcaaaggttgtgtgatgataaacctgtcatagactaccctttcatgtatccctgaatgtcttaagagaaaggtagattctgatagattaaagatcccaattcagttcatgaaaaggaaattgaggactaaggggagaaagccgagagtctgtgagaagaagaaaattatggaaagtggctaagtgtcgagtaaaggagtattgaagaaacctcttcctgagctagaggattttttcttcttattatcttcctttagaggattccaaaacaactgttgtgatctcatctcttaataacttcttcattgtttatcttgctttgacttggatttatattaggatttaggactgtttattttttttcttttaaatgatttcattaataactctaaattatctgctaggtttcatgatactatggggatcctcagcttttgttagataggtttgaggaacttagtgaagaaagtacacatcttgaattatgggtggatactaagaattaaattatgaatttcgtatttattagattagttgctgaggacgaattattgttggagtgactaatacttgacgaaatcttgatgcactctattctttcctttttatttgctctacttcaacatgaagactaaaactatcaaaagagagtttagatccatggaaatatggaatggatgtatttagggatggtagagtgtacaccaagctagggcatgtgcagaacctaacctaaagcttaggcagcaactgttttaagattttacaaccaatttttttttaaatagatcatgggatcataggggccagagagtgattgcgcctatctacccgaactattaacatcagataaatcaatcgtgtctctccatcttttgcaattaccatattctcttttaaggtttttttttttttgtttaactggtcaagttacttattactctatctgttattttttaattgattttctagaaaaacacacaaacacatattaaaactaattataaatatattagtttttgtgatgtagatttttttataattctaaaccaataattatttgtcttaaagtttaaaattcatcaataataactaaaaatagtgtctagaaaacttaaaaatcaactttttaaaaacaattttttttctaaaaaatcaaataataatgaatagagggagtatcgaccaaaattaaattttgttattataaaaatgtgaaattattttttcacaacaaattatttagcactttcagttgggaaaatggacacaaaaacaattgataatttctttacggaaagataagtatgttttcatataaaataaataagtcaaaataattaaataaataattcgaaattagtgaattacctctgtgaaaactatggaaaagtagaattttccatatatttttaatttctatctaccaagctttttatttcaaaaacattcatccaattaataaaataaattgaaatgtcaaagtgaatccaataaacgaataagccgacaaataaaattttagcgtgaagcccacgaggttttttttatgggccccacttttctccgcaccaaatcactgacttctctttctccgtatctttcttcagctcctaaaacccagaaccttctttttccggcgagggaagagcttcctcagccctaatcgctaaatcgatgaaattatgctcccaacgtttaacggtttaaagatcattccaaaaactcaaccttttgcgtgtctcctctcgccatgaccctaatctcaaggttcgtctctaatctcatattcagggtctctcgtgaatctctaatccgattaattttgattgcccttttagccggagattgcttaaattgattgctatgtttaaaaattgaacctttgtttataaagttttgaacttttctccaaagtcttcgtttgattagatcttcattgggtgggtttggttttggtttcttttgcagatttttgatctctagagtgattagtagaactctgttttcgaatcagaataatagaacagctattaatgtttctgtaaagttgccacaattcagaattcagagtaatggatatcacacattgggtcttcttcataatgttaaaggaaggtttttaggtagtaatcatcatcagcttgcgcgtaggagctattcgattgcagttgcgagtaatgtagttaagcaacatgctcaagtctcttggggaaggcttgtacagagagtaactctgagtcgtagttggaacttacctcggataagtcagattgctcaagcgtgtagcttgtctttagcccgttcgcacttcttgttacctggtttattggctcttacctatagacaagtggcgtatgcgcaaagggtggttccaaatcctgtggtctattctccttcacacatttctccttataggagttcgataaacttccctatcgttctctcgtctttagtgttttctgcggtcaagggtgttgttctgatcgggagagctctttatttagcaattttgttttctccaaatgttattatg

SEQ ID NO: 23832 - DNA, 3003 bp, Unknown
  misc_feature (1)..( 3003): 2750-1469P.txt file - cDNA_ID_2153638; gDNA_ID_1620784; Annot_ID_168063
tctactatcatgaatcaaaatatatccgttttatattgatatcctttatatattgatatcatttacagattttcttttgaaaatcttttacgtgaaggtttttttccataaaacattcgaatgaaattgctcatatagtttatgaagtttgttaattgttcccaatatatttagaatcacagaagtaacctttaaattgtgacatagtgttacaaagataacattggtaaaattactttatttttggctttttttttatatgaacggtaaaataaaattatctatttaaactagaactgtacggttttctttggaaaaaaatcagtccaaaataaaagagcttacatgaaaaagataaaacctcgtgctattgccttttttgcaagacaatcagcacgtatattgtttataagagtcctctttttaaatgctagtcatcatgcatgggattaactatatatcaactttctcttatgttacatcatttttaggtgtattagaaggaatacaaatcagaagaagatacttgggagccgtatgatggattggggtaaggttttttaaattactgctttggccttctcatgttgtcctctaatctgtatatggtttcattagaaaatacaaataaaaacttaaggaattcgtaacgaagggtttcaagtcaaatttattgccacttcttgtaagctaagtcatgttaattacacatgtaaatcctccaaatatttcttgttccccacttttcgtaacttttcgaccttgtgtcgttcttttaggaatatgtgcatcttgtatgtgggggtcttccatgccagggacttagtggttttacaccgatttagaaataaagataaaccacttcaagatgaaaaaaaacaatgaagtgacggtttcatgaatatcatagactatacttgaagcccaaatacgtcttgatggagaacgttgtaaatcttttaggtttcatggaaagatttgttggtcgttatgttgtagctcgtcttgtaaacaagaattaccaagcaagatgaggcataatggctgctggtgcatacaatgttcctcaatgtaggtacatggtgtattagtatcggtagattaaggatcccaaatcaattcatgaagaggaaatgaggactaagggaagaaaggctagagtttgggagaagatgaagattgtggaaagtggcatgttgttgctgttccagtcgggattgccttaggatacatgtttgggatggcgagtcaaaggttgtgtgatgataaacctgtcatagactaccctttcatgtatccctgaatgtcttaagagaaaggtagattctgatagattaaagatcccaattcagttcatgaaaaggaaattgaggactaaggggagaaagccgagagtctgtgagaagaagaaaattatggaaagtggctaagtgtcgagtaaaggagtattgaagaaacctcttcctgagctagaggattttttcttcttattatcttcctttagaggattccaaaacaactgttgtgatctcatctcttaataacttcttcattgtttatcttgctttgacttggatttatattaggatttaggactgtttattttttttcttttaaatgatttcattaataactctaaattatctgctaggtttcatgatactatggggatcctcagcttttgttagataggtttgaggaacttagtgaagaaagtacacatcttgaattatgggtggatactaagaattaaattatgaatttcgtatttattagattagttgctgaggacgaattattgttggagtgactaatacttgacgaaatcttgatgcactctattctttcctttttatttgctctacttcaacatgaagactaaaactatcaaaagagagtttagatccatggaaatatggaatggatgtatttagggatggtagagtgtacaccaagctagggcatgtgcagaacctaacctaaagcttaggcagcaactgttttaagattttacaaccaatttttttttaaatagatcatgggatcataggggccagagagtgattgcgcctatctacccgaactattaacatcagataaatcaatcgtgtctctccatcttttgcaattaccatattctcttttaaggtttttttttttttgtttaactggtcaagttacttattactctatctgttattttttaattgattttctagaaaaacacacaaacacatattaaaactaattataaatatattagtttttgtgatgtagatttttttataattctaaaccaataattatttgtcttaaagtttaaaattcatcaataataactaaaaatagtgtctagaaaacttaaaaatcaactttttaaaaacaattttttttctaaaaaatcaaataataatgaatagagggagtatcgaccaaaattaaattttgttattataaaaatgtgaaattattttttcacaacaaattatttagcactttcagttgggaaaatggacacaaaaacaattgataatttctttacggaaagataagtatgttttcatataaaataaataagtcaaaataattaaataaataattcgaaattagtgaattacctctgtgaaaactatggaaaagtagaattttccatatatttttaatttctatctaccaagctttttatttcaaaaacattcatccaattaataaaataaattgaaatgtcaaagtgaatccaataaacgaataagccgacaaataaaattttagcgtgaagcccacgaggttttttttatgggccccacttttctccgcaccaaatcactgacttctctttctccgtatctttcttcagctcctaaaacccagaaccttctttttccggcgagggaagagcttcctcagccctaatcgctaaatcgatgaaattatgctcccaacgtttaacggtttaaagatcattccaaaaactcaaccttttgcgtgtctcctctcgccatg

SEQ ID NO: 23833 - DNA, 3000 bp, Unknown; identical to SEQ ID NO: 5406
  misc_feature (1)..( 3000): 2750-1469P.txt file - cDNA_ID_2153638; gDNA_ID_1620785; Annot_ID_168096

SEQ ID NO: 23834 - DNA, 3003 bp, Unknown
  misc_feature (1)..( 3003): 2750-1469P.txt file - cDNA_ID_2153903; gDNA_ID_1620773; Annot_ID_167589
cattatgaacaatgaagattttaacgccgatgaactcctcactttcgtcgcctataggttatgttttgtacttctgtctctctagactccatatataactcgcaaatactcttttgaattttgttttgagaagttgtgttgttttaatcccacttgcttgtaacagtgtgctgattctaggtctgaattaaatttgttgtccttctcctttatgtcttagaccatgttttttgtaaactatttttcagatcaagtattctgaaacgccttggacgtatgatgtgtcatgccgttgctctcagccaaggcggctgtgtagagataaacattgaacattttggcactgattctctcctcacctacattgctgataggttctctctctacccctatcccacatgcacacaaatatttatcgttctaacgaagtttataaagttgtacgtctacataagtgggattgattttatatctaaaacggttatgctaatttctaggtctaattctagtcaggattgaagaacaaaatatctcagttggtttagtggtaaaggatatgtttgttccttagtgccttttccttatgaggattaggagaattattttggttaattcgtatttgacatcaacgtatattgagtatggacatactgtatataggttccacccgtctctcttcttatactcgcaagcattagcacacaggttttgagttcatcgctactagtacagtttcataatgatattatatttgtatcttgaattgttcttctatctcttgatttttgtttgttaactatacttgcagatcaagtaatttgagacaccttggacttgctaagtgcgatcaaataacgggcatgggactgttcacagaagccatgaaacttccattgcttgaagacctcgagctttcatactgcttaatcaaaggaaagaatttggaagctataggcttcgcttgcctgcatttgaagacattgaagctaaactgtcaaggtttcaagttccccggctttacgtatgatcatgatgccctaggcattgctaaaagaatgcccgaactgcgatgtctccagctttttgggaacagagtatcagacgtagggttgaacgcgattttcgacggttgtcctcacctggaacacctcgatttacgtcagtgtttcaacattaatcttgtaggggatctggagaagcgttgtatggagaggatcaaagatttgagacgccccaacgattcaactgctgattacccatatgatacaagtttgctcgatctaggcatttgaaatcgttttgaagtctgtttagctggtcttgactacatcaaacaattttaattatgggattaggctcgagacggctcattttattaagcccaagaacgatggaaatatatatatatatatatatatatatattttttttggttagcatttgaaagaactaatctattttaaatagtttttaacatcgaatggtaacaatgtattaatttcggaaaagacattatatgcataaatgtgtaataagcaaagaaagaaataaaataaattgctgtcacaagaaatttcttatcaacttttacacgaattatatcatacataaaactatttcatcatgtcaaattatacacaagtcactatcccgtcagtcgtgtcataacaaggagagtaaaaaaaatatgttgttaacattaacttttagaaaaattaaatgaataattggtttaaattctaagaaccagcttttatataatagccaaaaaactagattttagcattaattcttaacatttttctattttcttctttttgaagatgtccctggaatccatgataatccgaaaaaattgatctgaatccgtatccgaaaatttagatttattctattaggtcttaaactcataaatttgaatccgaatcaaaacctgaacctgaacccaaatccgaatgttttattcgaaaactcaaaattttcgcagaaatttatctcttttaacaaacccgaatatttacccaaaaataagatggttatagaaattctcatacgtatattgttttatttagtcaaattatgtatcaataaataaataaaatatgttagacactagaactcgacttcgtgatcaacgtacgcatcaataattgaaatatgatttggtcgagtatatatgaaatttttttggcagaaatcaatagtttaactaaccgttttcgtttatgtttacatcatgtttgtttaaatttttatgtcatgtctgtttcaaattttataagttgtaataattattaagatatttaaaattaaaatatttttattttaaaaagtccaagttaagaaccttttattacagtcaaaattttaatcttttaacaaaattcttaacgtcaaaattttcacaatcaattataaaaatattcctaataataatgctcttaagagcactactatcgaaggacgtctcaatttgtattggtttggagtaatccggcgtggctacacagacgaattgtagaagaagcttcactaagagcatttccattgcataaccttttattgatgtctttaagactaaccatagtaaaaatagattaaccatgattaaaactaaagacatttgcttttttgggtgtctaaaatgtcttagggaagacatatttgacatcaaaaaaggtgaatgtctttaattttaactatggttagtctttaaaacacacactagaagttatgcaatagggatggtctaagttctttgctaggttactttaattcttggatttttgaacattgctctgtttttttttttagtcaaacaacattgctctgtttccgaaacaatccgctatgatattggcctaatgtattgtatgatcctaggcccaatgcttattgggccagtaagcaattggcacaaattgtattcgtagattttttagtgcgatgaggactagatagtaaacttgtgatctcaacaattttccgattcccacagaaatg

SEQ ID NO: 23835 - DNA, 3003 bp, Unknown; identical to SEQ ID NO: 23834
  misc_feature (1)..( 3003): 2750-1469P.txt file - cDNA_ID_2153903; gDNA_ID_2926216; Annot_ID_203000

SEQ ID NO: 23836 - DNA, 3003 bp, Unknown
  misc_feature (1)..( 3003): 2750-1469P.txt file - cDNA_ID_2153909; gDNA_ID_1620773; Annot_ID_167591
ggcggagcttccgccggaactaacatcttcgattcttctccatctcagcacgattgagatactgagaaacgctcaaattgtatgcagatcgtggcgacgcgtctgcaaagacccatccatgtggcgcaaaatcgacatgagaaacaacggaatctttggttacgactacgacagtccgtcacgccgttgatctcagcgaaggtggtttagtcgaaatcaacatggtacacttcggcaacgattctctctactcctacatcgcccaaaggtttgtttctattcttagaatttttggttggtttcagtaaactttctagggtttagatcagattattaacaggattggagaaggaattgggcgaattagggcaaaatttaacaaagcttgtggtttttattaactggatatgttgccttgggattgtgtgaaggccttgcaagttagaggtcatgttgttgaatctgtggttttgataaagcagtgttctctaagatttaagatgaatatggttatgtggtatgtatatatgcttctgagttgataagtattgatattttatcacaattttctttttttcagatcaagtaatctgagatgccttaggcttgcaatgtgctatccactaactggcaatggatttgtcagtgcagtcatgaagctctcattccttgaggaactcgatatttcacagggctatacacaactggatttgaaagctataggccactcttgcccactactgaagacattcaagctaaaccgtccttctttcagccggttcgttaaatatgatgcataagggttccctttttctagacatttcaagtagaaagagaaatgaacagagttggaggaagacatgtagatgaagtgtggacttttgtctagacgcactcgggttagcgtttcgtcagacaaaactgctaatttcccatcgtgcccaactttaatccaatttttcaaatcgtctattctttgttctgaaacgtagctaactattagagcaagtattggctctagaatatataacctgcaattcttcatattttgctaaaagggacgatgataagttagaggaatgataaatatttggaacaattcaaggaaacttatttgtttaggtgcgaactgaaacatgtctgcagagtgtccacgatttggtatgacaatgatggcacgggaatgtggatggatgcttgactgagtaggaagattaggatcgacgttgatagggggctgttttatgtaaaggtttgtattgagcaaaacggtttacaaaagtgagtaataaaatggaagtttcaataaataattaatattccggagcgatcaagcttagtggggagaatgggtgtagttataaaaccatttcctgaaaatgttggagacgaggtaacggccgatgaacttgtttatatatttgtgccaaaaaatagtcaactaccacttgatttaataacgtaacatatgaaaacatagattcttaaatgaataacatatgaaaacatagattcttaagtggtccgcaaatgtgaagaacattaagaagaacaaaaatgaataaaaacatagattcttaagtttcttcgcaaatgtgaagaacaataagaagaacagaaatgaaatcagtacttatgaaacacatatgatgacatagaccaacgatactcattgaggttctgatggtccgaccaacactcaccgtaatcctcaaactcccaggaatttttgtatgttccttgatgacgtggaccaacctcgttaatatggaacattagcttatctccgaataagtcgacttcactaaatttatagcacattcgcttgtactcagtataaaattcccacggaattgatccatcgcaactatggagcatgatgtaaagtagaccagcatgtgaaaaaacatcttttatgccatccaaaatatcaatcacttcctggagctcacacatatgaaataccaacactaaactctaaagatatagggcatagggatttttgaaggcgaggcatttggtgtaaaacatgtggtaactagaaaattcttgagccatatgaatgaaaacaggggacttatctagtcgaacagaagaaagagtttcccttgaaaaaacagcggctttgcttcctccgttccctgattttcagatgcctgacacgtagctgctaatatactaatcttagtttttgaggacggtgtagatatgttaaaggcttggattcaatcatgactaaaacattacctgtatgtgaaattaaccaaatgttgatgacgaggctggacggcaaattgatttcccctaatatggtcaaggcacttggtggtcgccagtaatgtctagtaggggccatttatcgaagatgggtacatttgcctttctcgcagataattttgggcattctgtattatcaactcgaatagtactgaaagtggtgtaaaagtagcaatataaataagaaatttgaagtaaaccagaaaactaggatcgaacctcgcaaatgggaacagacttgagatagtgatagaatgggaaccctaatactctggaacactaaagaggggtggggagatgggttactggcggcatatgtggtgggccatacaaaataaaaaaaattagacatggcaataagtatatgtaaatcatgtgtgtccaaattatcatatccaaagttatatatctgcatggtatataccatatagacttctagaacatgtattgttacaagcaattcatgtggaactcatttattggggattcggttctagaattttgtttttgctttggtaaacatgtgaagagactaggttatacatacatagactgaactcattaaacaccaacaacaatgttagattgataagacttaggaaatataaaaatgtagatggaatagcaaacaagaatttcacataacaaagacagaacagtagacgcagaaatgcaaaagatacaagttttagaaaatataaacatgtagatggacagataatgatg

SEQ ID NO: 23837 - DNA, 3003 bp, Unknown
  misc_feature (1)..( 3003): 2750-1469P.txt file - cDNA_ID_2154097; gDNA_ID_1620799; Annot_ID_168592
ccatggatgaggtctcctttaccaggatatatggggccggattttgttccagccccaagagatttcgtcccaagtgaagttatttggcccgaaaagttttttggtcaaacgaatctatttccggagatgcatgaagcatgtcaaatgttcattcaaaaggtaaatgtaagaatagtgtttcgttgttgccaatgtggtttggtttagggtttaatcaaatttcaggtttagggtttagttgtgttgattgttcgttatattaggtgaatcatatagtggtggtatagttgtattgatggatatttagcgagaaattgacatttatattgttggacaggtggataatcaacaccaagcttatcgaaggcgtcaccgccaactactcattaagttgcaagacctggagagaggtatgaggcggttggaggctcatccgaaagactgggtgagatacggtttcgacaaagttgctgacattccactgccactaaggagatggtgtgttgagcatgatggatcgtcaccgaattatgcgtgtttcgcggagccaattcccattaaggaggacgatgaaccagatgatggaagttactacaggagagtggatgagcctccacgcgagtatcctcctgactctctctttcaataaacattatgtctttgttttgcttaagtttgtaaaataaatctaaatctaaattgtggttttaaatctttattttgctaactatctgtgttttgaatacaatatatgaatctaaatgtttgaatataattatctgtgttttgaatgtaaattttgctaacaattatataatcagtcgaacggaggtactttattggtcgaaccatttggacaacttagtcgagccatttggactattagtcgaaccggatgaactatttgaactaatcagtcgaactggatgaactatataggtcgaaccgtttgaactaaccagtcgaacacatttgaaccatttgaactaatcagtcgaaccatttgaactaatcagtcgaaacgtctcgcacgcattcaaatcgccaacaatccttaacagaaactcttcaatgtttccatcattctttgcaccagcttttactaccttgaccaagaagtacaacagcactaacttcaacctatctgaaccatgcttcatcttcgagcacttagcaagaacatctaaaacctttatcctagattcttttttgaatatcctcgaacaaagttaatattccccattgtatttagttcttttggggaactgtggcaatcaaacccacttaacaacgcatgctctttaatggaatacctaataggtactccatttaccacaaaccaagcctcctcgagcaaatttgtcttcactatgcgtaacataagcacccacatgcctgacgattaacgttctctaccccttcttttagaattgtattcaccatttcctcctcctccagctcctccccattcccgtctttcgcttcttcgaattgttgaatgacagcgtcaattagaggtttcaaagatgtacctgtctgatcctcttcaatttcggcggttcctttaggagaagcctcatcaccatcacgcggttcctccatagccttttcaatcttagcggtttcttttgtagtatcattcgccgcaacatctcgtgctgctggttcggtcggaaccaagtcgacggcatctccgtcgttctcaatttctgaagtaactggttctgatgtcgaaactttaccggacggcttgtccgtcgaagtaactggttctgatgtcgaaacttcaccggacggcttctctgtcgaatcatatacagggccacctttaccgtctccggcggcatctccgtcgttttcaatttctgaaggaactggttctgatgtcgaaacttcaccggacgacttctccgtcgaatcatatacagggccatcaataccgtctctaacacgagtcatcaaactattacacgaatcaagaattcgtcggaaaattgtgaaaggcgagaaattatgaatttgattttggaaaatttgaattgaatgagagtagaaacggtttgattttagaaattagggatttcgcttaagtgtttggaatgggttttgggttgctaggcatggatcttaattggatcggatattttgttgggtcgtctgagtttttggtcttttgccaattatttggattttctctcatttatctttaattcgacaaaaattgggaattagaagagtggcattcctggttactttttcgcagatagtggcactccagacatttgaacttttatcacttatgccacttttttgaaaaaactgatctggactgccatcagttaatctgaatgccaccgaaaatgtgatataccagttgtacccttaatgagttgattaaaaaaatgaaaaagaaattcaaaagctaaataaagaaaatcgagttcggagattctcctcttcgtcgtcgtgttcttcttctttggtcgacgttcatcttcttcgttggccaccatcgatttcctcatgccgccgacttgaaatccggcgtaaaagccacgaattaggtcagtttcttctcatatttcctttgacattggtgcattgtgattttagattgggattttgaattctatataattcccagctcgattcaatttgatagtttgatgattggtttgcaaagtaaagagtaatcgattagaggttgccgaaacgttatttgaggtgatgagcaaaggaatgtaggttgaatgtgagttgaatttgaattccgagatttcatattaaagatttggggggtttgtgtttgcaaagtttagattaaccaattagtttaacgaataggtatgtattaacattggaaatcaattgaaaggtaacgaattaggttcagtagaatcgagtgcgacgagagattgatttcaacgtatgataagagtacatgtggtataactattaaaatgtttgattggagttgaactggttgtattttcaggagcgatg

SEQ ID NO: 23838 - DNA, 3003 bp, Unknown
  misc_feature (1)..( 3003): 2750-1469P.txt file - cDNA_ID_2154433; gDNA_ID_1620800; Annot_ID_168609
ttatcctttttctcatcaaactccactttcatcaagtcttccaaatctctttaagtcctttttcttttttgattcatcctctaaacacgctcttctcaaatcttctagaaaccgatactcacacaaaactgtcgcatcctgaattatttcttgaatcattcagcaattttatcagataaaatcatgtattacttcttgtatcattcaacactttcatcagcagcagctacatcttcaacttagtcctgtaatttattttcttaacatacaattgaattcagctaatcgtccttgcgaatgatcaaatgcatagataattgtatcatcctaaataaaagacgtggggaaatcatatgacatctagaactttggagaagggggagataagtgatgatgcatggaagcatttcccaaagataatcgaatagattctctcttttcttttgtgttcgtcagtttttctttaccattccccgagacaatatggtgggtttattaattattttgattcttctataattcttcccattatttttatatattctttttaagttacccattcttttttcttcaatgtcgagacgtcgagttagttagcttttacggcgacttatggataaggcattacgctcggagccatggactgagttggatagatataatgcgtataatatttaatccccataacctatattttaattcctatacattgtaatggtagcatctcaactttaaggttagagttggaaccttaaagtttatgaatattacaaaacacttgtatgggggtggagtgcatgaaaattagagctgggatgtatatatgggaatatatatgcactacattatcttacattttacattgaaaaaatattagaagatattgttcttcatttatttaagtatatttttactgctggtgtattctactgccctatatatatctcgaaagttaaataaattcatatgttatataacttttagtcattcgtggcattcttctgttacatcttactgtggatttttcgtcttattatcttatagctgactcttactttagagagacaagtataccacaatggaaagggtgatttgacggtaaaaaaagcgattgcagtgtacccacaaacgacaatttataatttgtatgtgggatatatagtaagggaaataaaaatcatagggttaaatagaaaaagtgaatgaaactgtcttgtagttgtagtagacgaatcaaaaggacacgtagatggtcaagatacgaacctcaaagccttttccctcccatttaatgattcttgtttttgttttaatctataatttttcatgattttcttaagtctttgttttgaaaatcacgaacgaataagttctgatggatgtacttgaatattagtaacaagactaattgaattaaagaaaagagaagttattcctttgacgtttataattttccgcggctaagggaacatatacgttccttgaaactgttgccatgcaacttttgctttaacagtttagagagttttttacttcatgctacatcctttttctcctgacacacacaagagcatattatacatccatgtacctcctccatcgaccatcaatatatagatacatgtgattattaattatctacataaaaagttataccacgaagttgcgattgataatatgaaagtggtacatgctcgaaatagataatgagaatatatcagctttagttgtctcatcgttagtcaatctatatgtgcatatacagttaacaagaaatctataagcatatacgaactggggtcccaataaggtctaagaatcttttttttctttttttcttttctttgctttgctttagtttagtttgtgaaatttagtgaaaatttcattttgtctcatagagaaaccacatgttagtcaaaaattatatagtaagtccaagaaaactatattaatatacccatattaccatatagtcggagatttctagtatctctagtttagttcttcttattcattatcaattcaagtgttataaaacctcgagaccaataaaataggattcactctccttcgtgcccccaaagatataggtttacatatctatatttccacaccaccattttaaaagcaagagttaattaaagagatattttttagtcatcttggtatgtaatctggtaaactttttagtttgttatcttgtataaacaaccagtaagattttggttcttttgtaaatacttctctttgaatttaggactagtgttttaaaattactttcctcccatatttttgttttgatctttcaatttaaattaaaagttcgtttacaacccatgcatgcacacttccgaatttaaactcggattataatttggcactataataatctattagaatacgtcttgattaattttaaaatatttaggtgtcttaaaataagtacgtacgttgataaatatggagatatatacatctgtcaagtaaatggtattgaatttgccagtattagcttttgtgaagctgacgcaaaatgaaaacggctgatatctaaagctttaaccttgtgtttcttttttttgtttaaaatagtggggtctagaaatgataaattaatttaaagtcctcgatatatataaatagataaatttgtttcttttgggaataacgtagtttacggagaaacccaaatgttaaagggaaatgcattaaagctgtagcaaaataagaaagtaaaaaccaattgaaaccctaatttcacttcaaaaaatgttcccggttgttaaaggaagggccttttgctttgtccatataaatatattgtgagagtacaacaacaccttcataagctcttacactcatttcaactctctttttcgtttccattaccctcaggtaatcataacatatatataagttacatttgtagatacatatgtctttagttttgtgtaatttgttacttaattattattttctatggtgttgtagaagaagatg

SEQ ID NO: 23839 - DNA, 3003 bp, Unknown
  misc_feature (1)..( 3003): 2750-1469P.txt file - cDNA_ID_2154448; gDNA_ID_1620800; Annot_ID_168615
ttatatgacagcttttgcaggtttaaacacacagaaattcacggaatctattttcctcatttttcgcctctgttcaaggacttatttagttgattctaataatagtacccagagagagacatatgagcgcaaaagtacctgcatatagatttatggcatttataattttacataccggtagacaaaataggtccaaactgtgtttagattccatctttttacattgacattaactacaattattttggttgactaacgtaagtttcggtcataattagcatttaaataaggaatgaaacatagcaacatatcattgatacggtaatagataagagagattcatattaatatcgagcaccaagagcagaggttgtaattcatagcttttctcaaaaccacaaaagaaaattcccaaattctcaaactgaaatctttcttaaaaactatacattgtactctcttttcccagagacaaagtggggaaaatgtagaaagagatctcctaacaatatatcatgaacttcatatcatccatttgcaaaagaaacttaagaagaaaaaaacttcacatttttttaaggactgatcaaatcaggaggaggatacgttagcgttgcggatacccgaagatgacgatgcactactcccatcattcttttgtttcgaagactctgtgatgatctcaggtacatcaccaatgtccagtgtgtctggaaggtattcctcagcttcagtactgtaaatctgtagaaaagaaacaccaaacgtcattactatgcttaatgcaggaagactgaagaatgaattacctcgagttgattcagcatttcgatagttgcatcaagatcacaagtgttagccaagtaaacatcattgatagactcttgtgaaagaccagggtatgtagctaatagatactcaatatccatgtccatctccaaatcctcatccttcagctgatgattgtataccatctcagatggtgacttcttaggtgacatttgagttccttgataacttcccattccttgaactccatacccataataaggttgttgctggtggtgctgctgctgcatgtgttgttgtgtgacaggctttgtatcaaccaaagaaccttctcttttcgagagtggtacataagctgctgcgtaaggattcaatgtagaacttcctgacttcattgctaagtgacacaatccaacaaacgaaagaagagttcaaatcggtgactacaaatcagatccctaattgttcaaaaattgattccaataagaagaaacgtgaccttaacctaactaatcaaaattgatgccacaaactcgatgacctaattcttcgtgatgcttttaggtacagatcaaaatcaatcaacgcaatctttaacagaaacgaacaacgaaaccctaaggaatcgattctaagattctaaaagcttcataaacatagttgaatcatgaatctaacggagatagtagataaacatgaatcatgaatctaacggagatagtttcttctcccatgatcgaccaatcaaagcacgattcgcgtatcaaatcaacatagatcgaagaaatcaacagatagaatcgaaagaaacggattcaaaacggaagaacaaaaggcgagatgattgcgattacgtcaacgatcgtcgtaagacgcttaccttagagaagaaaatccaaaagcgtcgttgaagaagaagaagacaatggtgaatatttgcagagagagagagatctaagaaacgctgaaaaagtggggagaggaaagaaaacgactcttttgatcaataatggacttttatatgcaacaaagaagaagaagcgtttacttgaaggtcgtatcattttaggggtctgtttggaaacgtgaattatcttatccctaacctggttattgttatcctaatattcgttttctttataaaaaaaaatctttgatatttttacctggtatgctgacgtgtcttttacaaagtggctacctcttcgttcctaaatttatctctacatttgaaaaatgcgtgactaaacgagatgaaagtgattttttcttatgtcctactaatcatgattatataatttgttaatgtattatttaaaatactaaatcaattagattttctataaccaagaaaaaagaattaggtcaatggaatctgcccaacctaatcacggacgatgttttggttaaacatatcgttaagatttggatgaatcttttatgtcatgtatggccggttccaagtgtgactacaggatttgggcaaattaacaaacacatttataaaacatttataacataatttagattaaacacacaatttaaaaatcaagtcttagttttattgtttggttttgaatctatatatcttaaggtcgattaatggtttcgtagtgcttcaatatgttatatatggtggtgctcctcttttgtaagttatgatcatcagatttggtttagtagacatttcggttaacttaatattaaggttcacaacaaacaaacaaacccccctaaaaactagcatcatcacatactgttttatgagcatcatcatctcagacgctaaagtagtgggacaaattcatttcaaatttgccaagtcaattcaaaataaattataccaaaaatcttaatttacgctaaactagtgggtctttttctccctaaaactaaacgtgttatttacttattcatcgtctcattgtaatagaattgaaaatgaccaagagaaaacattagtttttagacattctcggtcaaagccaatactgtaatgaaaaaacaaacagtttcacataaatctactaaaaatagcgttacaatttttttactctacactcacatctaataataagaatcactacctttcactgctaatctctctctctttacaaatccaaatcttaaagaaaaccaaaaaaataataaagaagaagaagaagaagaaggagagtgattaacaaaaacataaaactccattagagtgtgatg

SEQ ID NO: 23840 - DNA, 3003 bp, Unknown
  misc_feature (1)..( 3003): 2750-1469P.txt file - cDNA_ID_2154452; gDNA_ID_1620800; Annot_ID_168616
tttgcgctttgaaggtcaaacaaatttaattgtatgattgagaattaggtaactaaataagacattcatgtaatggcatcaaatatttatgatctcagacattttggaaagtttgaaattctttggtgacatctggtcttatagatattttgctgtcaacttagggcctgactggtttaaacgcagcgggtgcggttgcggttgcggaagtttgcggaaacgggcggttgcggtttcaagcgttatcaagtgttttgaacgactggttgagcgtttggtaatgggtgcgtttgcgggagttttatgactggtaaaccagcgggtgcgatagtaattaaataaaaaataaccaaaataaatataatatattactattaaaaaaaaaaatacaatatattattatgataaattgataatatttgaaaaattaaacatacttaataattaaaaccataaataaaactgaaaattcaaaaataaataaattttataagaaaaagcttaatactttatgcatttggtacatcaccaaaattgcatcaagtagtgtgataaactgtaaataacgttgaactcgcgggttttccggattgcctctatacatatgataaagtttcttcaagatatccaaacgatttttaacacatctccaactcaaattttttccaaacgttaatattcttaagaatattttctttttgaacatcacttagaaatctgattttggggtctttggattcttccgtttatttctccacaataacctgttgcagtaacgcaaatgtggtctcgtttgaccaaatgattttctaatcgagaaaacaaatcaaaacatgtattcaatcaaaaaactcaaaaaaaaacaaaaaaaaaataaacaacaatgccatgaaatattccgagaattacactagctaatgaatggatgaaaggatagatcatacttacgtttgattcttgattttgactttgatttttgtcagtttgggtggatgccataattgagagaatagggtttcattgattagggttttctgataagaataagtatagggtttgggtggaagatataattattttaattaattaatttttttttttaacctaaccgctaccgtccgcaaccgcaaatacttgcgggaaggagcttttgaaatctggcaatttcgaacggtatctagcggtttctatgattggtgccaaccgctaataaccgctaccatctgcaaacgctgcgtttgcaggtggcagaaggagaaccaatcaagcccttaaaacatatagatttggttgacgtttcttaacccaaagaaacaatcaaaattcgaagtatgtggaaacatttcctttataagaaacccacacgcatttttttttacttatataaatctcctcacctgcaagagaaaaaaaaaactttcattttattcgtcgtcagtttcatcttgttgcttcggagcgagcgagaattatcgtcggagaatttatcgtctctctctctgaaaattctgatcggtgaagaatcgtcggatcgaaagttcgtttatcttctcgtttacgtttccgtgatttaaatcctttggggtttttttttcttggtaatgtctgtgtttctgaatgtgtggttgatttttgttcgtacactttactttgatcgattaggtttatgtatagttaattgaaattttttggaagatttcagaagaagaagagaagaaacaatccgtaatctagacccttgaattgacctaataataggatacatatgatgactatgaagcagtctttgagtggcagggttcttaggggggtctttggtatctatctgtaggagggcttttaggtgctgtttcgggagattaaagccagattcaaggtgagtctgagagcttggttcttgtatcttcttgtttaccaatgggaatctaggtcactgagaaaccatccttcttgttgatctagtggaaaaaatcgattatttttctatcccaagtagttgctttttctttcttaaccttaacttgtgcaatcttcattctacctaagcatttccccttgataatgaaactctttaatcatctctgatttggccaagagtgttctttttttttgtcatctcatctatggtggattaacagaggttcctcttagttattcttcaagaaggcggcatgaatgctcactttgtttgtagtctgcttatctcagctatggtctccatagtgagtttcccttagagcatatctcgttgttgtccatgatgaagtttttgctccatgcggatcttgtgaacttgctagtagaatttttccgggtaacggcatcagaagatttttattccttcgattatggggttaccatttaggtcaagccaaaacaggtcagctttaaagatgggggtccattaactaggagtacccttcaagcctttgtttccttaaagaaatttctgattcgtatgttgactgaagagatctggtgcaaagtggcagtgggaggtaggtctatcctctttggacacttacccatctctttaaaacccggttatcccaagttttatgtcagtcccaaaccttgtttgatggtgtttgccttgcttttacgataggttggtcatatccggttgaaactggatagatttcccaagattgaaggactgaagtgaacactcaatgtgctaagcttttatttctctatgaaagctccatcaaccaagagggctgtttttagttgtttaacagggtatttgtagatcttcttgttttggtgattgttcctcttggagaaagctgattggagctgtttcaaaaatggattgtcttggtgtggtgcaatgtagatggaagcaacagttcatcgagtttttttgctggattttcaggtgactgataatgtttgcgaaatgaggaatagattttctaaatattttcttacttgcaggtttcataagctttccatcaactagcagtatctgccaatatcacagacagataattcgtaatg

SEQ ID NO: 23841 - DNA, 3000 bp, Unknown
  misc_feature (1)..( 3000): 2750-1469P.txt file - cDNA_ID_2154464; gDNA_ID_1620800; Annot_ID_168620
aataattgtttgctttccatggcagcaaaacaaataggacccaaataggaatgtcaaaaaaaagaaagacacgaaacgaagtagtataacgtaacacacaaaaataaactagagatattaaaaacacatgtccacacatggatacaagagcatttaaggagcagaaggcacgtagtggttagaaggtatgtgatataattaatcggcccaaatagattggtaagtagtagccgtctatatcatccatactcatcataacttcaacctcagctcctttctactaaaacccttttactataaattctacgtacacgtaccacttcttctcctcaaattcatcaaacccatttctattccaactcccaaaaatggcgattcgtcttcctctgatctgtcttcttggttcattcatggtacttataaactcaaaacgaacaaaacatgattacattcttactactttttattcattgtggtttgatgttattttctttttattattgaaggtagtggcgattgcggctgatttaacaccggagcgttattggagcactgctttaccaaacactcccattcccaactctctccataatcttttgactttcggttaaaatattttactttgccattcccaactctctcacttatttttgttcttaatgttagaaatacatgtttgttctgaatttatattatgaatttatattatggttttcactagtgttagaaatacatgtttgccattccattcccaactctctccataattaactgttttttttctttcttttctttaaaacacacaaaaaatatttatttacataaatgcaaataaagatgtgtttgacttgtattattacaatttcttttatatttcaacatatttttctgaatttgtatgtagcaaataaatgtattcttttttagttgttaataaaataaatgtttccttaccaaactttttttttttgcagattttaccgacgagaaaagtaccaacgtccaagtaggtaaaggcggagtaaacgttaacacccataaaggtaaaaccggtagcggaaccgccgtgaacgttggaaagggaggtgtacgcgtggacacaggcaagggcaagcccggaggagggacacacgtgagcgttggcagcggaaaaggtcacggaggtggcgtcgcagtccacacgggtaaacccggtaaaagaaccgacgtaggagtcggtaaaggcggtgtgacggtgcacacgcgccacaagggaagaccgatttacgttggtgtgaaaccaggagcaaaccctttcgtgtataactatgcagcgaaggagactcagctccacgacgatcctaacgcggctctcttcttcttggagaaggacttggttcgcgggaaagaaatgaatgtccggtttaacgctgaggatggttacggaggcaaaactgcgttcttgccacgtggagaggctgaaacggtgccttttggatcggagaagttttcggagacgttgaaacgtttctcggtggaagctggttcggaagaagcggagatgatgaagaagaccattgaggagtgtgaagccagaaaagttagtggagaggagaagtattgtgcgacgtctttggagtcgatggtcgactttagtgtttcgaaacttggtaaatatcacgtcagggctgtttccactgaggtaaaaatactaactactgttttttaattaccggtttagttttgactgaaaacatataagattaatactaaatataagataatttgtatataatcaattcggttttctttggataattttttggaaaggttgatgtagtttctgtcaaatttacttttcttcttttatgaataaaaaataaatataagacataaataactatgatagatttgggtcaggttgatgtaaaaaacatatacaaatagctactatgtacttagctataattatttttaagaaatattaaacatggttcgatctaatttttcttagatagtttaacatagaaattatttcttaatttaagttcgtgtggttcgtttatactcaaattaattggtttacgtttggctttagcttcggtttctttggatttacatatataaaccaatctaaccattcatgaaaacacatggttcggtttagttgcagttgatttgtatgtccacaccatatatattgtggctaatattttggctataaaccaatgtaactttggttactacaggtggctaagaagaacgcaccgatgcagaagtacaaaatcgcggcggctggggtaaagaagttgtctgacgataaatctgtggtgtgtcacaaacagaagtacccattcgcggtgttctactgccacaaggcgatgatgacgaccgtctacgcggttccgctcgagggagagaacgggatgcgagctaaagcagttgcggtatgccacaagaacacctcagcttggaacccaaaccacttggccttcaaagtcttaaaggtgaagccagggaccgttccggtctgccacttcctcccggagactcatgttgtgtggttcagctactagatagatctgttttctatcttattgtgggttatgtataattacgtttcagataatctatcttttgggatgttttggttatgaatatacatacatatacatatagtaatgcgtggtttccatataagagtgaaggcatctatatgtttttttttttattaacctacgtagctgtcttttgtggtctgtatcttgtggttttgcaaaaacctataataaaattagagctgaaatgttaccatttctatgttttggcttaattgacaggaaattttaattttcagcaagtagaccatattaattggtgatacccaatatgagtgtttaaaacattttgtagaattaattttattactagtttaatatgagtgtttgaaagaggggatatcgctccctttttcacttcttatagtgtcttcttttctttacttcttcttgtttcctgatg

SEQ ID NO: 23842 - DNA, 3000 bp, Unknown
  misc_feature (1)..( 3000): 2750-1469P.txt file - cDNA_ID_2154647; gDNA_ID_2926133; Annot_ID_197019
tgtaataaatacgtattagaaaatgatgaagatattagatattctctcgaaatcaagtcgagggccattaaaattgatgattattagaaaaaaggttataaatacttagttggaagacctagctagctaataactaagaaaattaatagaagaaactctctcttattgatatgtcgtcgtccatgcttctatattggatatagttctcgcatatgagtaaatctactatcattaatacaaaaacaataatatcaaacgcttaattagcatttgaacaataaaaatcatttatgtattcatgcataatttagacacacacacacacgcacacgcacgaatatatacatgttgtagtacactagcacttaggtctaaattttgagaactacgcaatatgacaagtaactaaatctttgttaacctaactaatgcgttgttgttgacatagatgaggtacgaaatggttgtaatatgaattcttatacacattagtatatgtggaagccaagtagccaacgaaacacttgcatgtaaatttttttgattattctttacaagcttaaacgttttttatttaacctatagaggtaaaagaaaaacagtgattttggttttgacttatataaaccgaaactctttctatcactctatagagataaatatacaaagaaatgagtaagtttctctcactatagcattaatggagctttagatcatcataaatgcattgcaccctctctatgcgctcatcaataactccttttaaatttcttattgcaactccacctgttcttttccttcctctcttgtcctcttctccttcttcttcttcaacaacaaacttccattgttcttaatacctagctagctcttccccggtttgagattatcccaaaataacaccggttctcgggtaaccggtcggtttttccggagcaaccaacccttttacttctctttatcattgtctcagatcttctgttcttcaaaggcaaaaatgggcataaaccaaagatcattgtgaattagggtttcactgtgtctccaaaagtaagatctctattatcaaaaaagatctttctctctctacacatatatgtatgcatatgcatttgtgtgtatgtatcttaggttatgtttatagatcggatccatattgcatgttgttgagactcttagatcttctatttttttgtttatggtgttttttggttctcaagatctcgatgcctatgatttgtttttttttctagattattttagtttaatttaatttaatgttttttgtgtctttttgcggagacttatgatctaagataaataaagcgttaccaaaaactttcttggagttagcagtttcaaaaggggtttgacgaaatctacttggtggttgtgtcacaaaaaaaagaccattgacttattgtcaacgctttaattaaccctatatactatatactatttttaatcgcttttaattaatcaaccctatatatcctgtattaaactaattaaacttagcctttttcattagttttgttactggaaacggttcgtctttagtgcacaaagaccaaggtcaatttaattctttaataaattcaattgagagatcagaagcttgtgaatctggttctctctctctcttctcttactagcttttgagtcgacaaaagagagagaaaagatcattaaactcgaatccaaaacttcaaccaacaaaagggaaaaaaagaaaaaataactacaaagagatctatctttagggtttcaaaactttcttgagtttcagatcgaattgagtaagtatttatattatttaagtgttcttcttactgtatcatttctgaccatacaccaaactagggtttcttaaagatcataactctctctctctcgcttcttcctacactagatctgtccgatagatctgatgctttgagaagtcttgtgactttcaagattgatttttctttttgtttgtttgtttatatgtacacatacttggagatagatatactctcatatatgttactgtgcatatggatggatccatcttaagtgtgaataaaaactacccaaatctcatttttgtttgtttcttatctcatttgttgtttttgtaaggccgtcattataaatctaaaacaatttatccgttttcgtaaagaaaatcgctttccaaaaaaaaaaactttgaagtaaaaatatcattttgggtctatattcaaatctctcctcatatttccatctcattatttgtaaaattaatatattaggtcattatcatattgattatagagtttatatgttatgttataaagtaaaagttatatatgtaaatattacgtttgtaatatatatatttatacatatgtacgtatacataatttgtatgtatatgtgcctcatttttaacaaatattatcgttaatctttagtttcattataattttttagggatgtatacattatataaatattttatgttatttatatctgaaatttctatactataacatcttagatagttttcatacgtaattaagagttttaattaatagttacataattatgattagatgaatttatctataaattgtatgcaaaaatatatacatatccaaccgaaaaaatggagagtaaacaaaaacctaacaattaatggtttagtacttgtgaaaatgataaaattattaatttaatatatagtttcataacagctagaaataactttcccttaatataattattttcttccatttccataatgattttcttcttcttcattctgtatacatatatgagcgtttcatatataatcttttactaattcgattgtgattttgattttgggcagtggaagatatacttggagaagaaaatcaaatcacgaaaatatattgatcagtgccttgaaggaaaccaaagttgacaactccaaaaatccatttcgttattaatatctaactgagtgatcatagtcaatcatccataacaatg

SEQ ID NO: 23843 - DNA, 3000 bp, Unknown; identical to SEQ ID NO: 7882
  misc_feature (1)..( 3000): 2750-1469P.txt file - cDNA_ID_2154647; gDNA_ID_2926133; Annot_ID_138803

SEQ ID NO: 23844 - DNA, 3000 bp, Unknown; identical to SEQ ID NO: 23842
  misc_feature (1)..( 3000): 2750-1469P.txt file - cDNA_ID_2154647; gDNA_ID_1621171; Annot_ID_173972

SEQ ID NO: 23845 - DNA, 3000 bp, Unknown; identical to SEQ ID NO: 7883
  misc_feature (1)..( 3000): 2750-1469P.txt file - cDNA_ID_2154662; gDNA_ID_2926133; Annot_ID_197023

SEQ ID NO: 23846 - DNA, 3000 bp, Unknown; identical to SEQ ID NO: 7883
  misc_feature (1)..( 3000): 2750-1469P.txt file - cDNA_ID_2154662; gDNA_ID_2926133; Annot_ID_138805

SEQ ID NO: 23847 - DNA, 3000 bp, Unknown; identical to SEQ ID NO: 7883
  misc_feature (1)..( 3000): 2750-1469P.txt file - cDNA_ID_2154662; gDNA_ID_1621171; Annot_ID_173977

SEQ ID NO: 23848 - DNA, 3000 bp, Unknown; identical to SEQ ID NO: 15422
  misc_feature (1)..( 3000): 2750-1469P.txt file - cDNA_ID_2154680; gDNA_ID_2926133; Annot_ID_197029

SEQ ID NO: 23849 - DNA, 3003 bp, Unknown
  misc_feature (1)..( 3003): 2750-1469P.txt file - cDNA_ID_2154925; gDNA_ID_2926140; Annot_ID_197404
atcatatgatttgaatatacatggatattatgcagcggaaatatgaatcatattaattcgaggttggtttagcactccaagtattgtgcctctactggtatccacacgcatacaaactggatcaaacccagaatggtagttcctttgagatctaatctcaaaacttaaaaaaacaatttttctctttgtttttaagagaatgttacactctaaggcacttttttaaaaacatttccgtgattaggcactttctaaagagaaggcactttgaatgaataatttgactcatttaccctttaatcagatatcgctctatctctctttatcctatcctttctctctctttctcttactttctccaaaaataaacaaaaatcaagccaaaaaaatagatttctttcctttttctttcttccctcttcaacaaatcatcagcttttatgagaaagagagattgagattcagctttttaaattttccgcgtctgttttgatctgatttgaaggagaattttttcagaccatcaatttgagaatctgtcctatctggctgatttggttacatgactcgttgaatgcttgaattggatttggggtttggttttcgttttatgtttttgctgtttgttgcaaaattaatctgattacttgctctttgatttctttgtcttgcttctccaatttcatattcgagattattctcttgaattggagattaaagcctcgtagtggacttcgaatcgtttgatagcaatggttgaatcactaattgatggaactcgttgcttagttcatgttctgtgaatttgattcatgattatatttgggttgtatcttttcagaaagtctggttttcttatgtgttcatcataaaaggtttataagttttttgatggttgattcacttattgaagaacattgttgctagtgaaattgatggaggttttagcttagatctgagactaattttcattcacagatgttagattgatttctacgtttgtgtttaagatataaatgttaaaaaattggtgcaaaatcgagaagatcatcttaactgagttaaatgaacagacctttgtggacaacgatttttggacacgttcttctttacctttttcatctcaaaatccaatcgagaagatcatcttaacagagttaaatgaacagacctatgtggacaacgacttctggacacgttcttcccttgaatttttgatcatctatgttatattttgagatgttttgtatataaaatcaaacttggacttgtattttaaaacttcaaaatccaattgagaagatcatcttaacagagttaaatgaacagacctctgtggacaacgatttatggacacgttcttctttacctttttatctcaaaattcaatcgagaagatcatcttaacagagttaaatgaacatacctatgtggacaacgatttctggacacattcttcccttgaatttatgatcatttatataatattttgagatgttttgtatataaaatcaaacttggacttgtattttaaaactttaaaatccaatcgagaagatcgtcttaacaaagttaaatgaacaaacctctgtggacacttctgtggacagcgatttctggacacgttcttctttacctttttatctcagtttacttgaacttgtctctaagttttttgctgtcaaattctatggctattgaaaaggaatggccctgttttttttgtaatcactacatcagcgatcgacaactgaaattttttaacttacttgcatgtaatgtatgtggagactaacatcatcattctcgtgaaaagagtcgcagcgactataaaagtggtcgccgtttagtctagtgatgccgacgacaactacatctcttgtaaaagtggtacaccattactatttcttcttcgtttcttttgctgtaaaagtggattgacgatgtgagctttgtttgtatctactatttctaatcgaaagagagggaacgaccataattgatgattttgaaagagggaatgaaaatgatgaaaaacaaaagaacatggaagagagacgataaactaagaatagtttctcaatcacacgttcttatccggagtaagcgaggagtgtttcattataaattattttaaataattaagataataaatgtttttgatcgttcagttaaggggtaaaaaagtctaatttttgtttaaatagaaggaaaagtgcctcatctctgaaaagtgcctcaaaaggaataaaattctttaaaagtgcctaaatgtatcacattcccttgtttttatgggttgaagataatttatcaaatttttagagaacataaccttaataaccgtaactgtggtcatgcctacatttaaaacatattaattatgccaaaatagacataccatcatcagtcgttaaaacaatttgataaattatcttcgactttctttctcttctctcttaatccttcagagagagaaagtctccgatggttgtttttggtggcaacgacatgtttcttcacttgcgttggctctcatatgcccagcacagttggttacctcaacgacggtgactggttttctcgtccgatttcggtggattcatctccgccgttggtcggctcccgtccggaattgtctggctcacatagtagagatgcccggctttcgtccagcaccgtcgcgtttccatggtggcatgtggctggctttctcctacgcatcctctttcctttgtttatctgtgtttttacttttgtttgcttttaataatctcacatacatgggttggtaatgacagtgtaagtaatctagctttctagtgttatgttccgatctatttcatgttgagacttgattgcagaaatcaaatcagagatctgagaattatgatgaagataagaagtggaatccgtcgcttattaatcattgccaatttgctgatgtatctttaattggagcctctttactatctaccagtgagaaacccttaagaatccatg

SEQ ID NO: 23850 - DNA, 3003 bp, Unknown; identical to SEQ ID NO: 23849
  misc_feature (1)..( 3003): 2750-1469P.txt file - cDNA_ID_2154925; gDNA_ID_1621145; Annot_ID_173012

SEQ ID NO: 23851 - DNA, 3000 bp, Unknown; identical to SEQ ID NO: 7434
  misc_feature (1)..( 3000): 2750-1469P.txt file - cDNA_ID_2154939; gDNA_ID_1621145; Annot_ID_173017

SEQ ID NO: 23852 - DNA, 3003 bp, Unknown
  misc_feature (1)..( 3003): 2750-1469P.txt file - cDNA_ID_2155063; gDNA_ID_2926145; Annot_ID_197695
agagggcaaaagagatggctcttaacgatgtcgcatctctcaccggcttaaccacaataaacctttcaagacacctagagaatttaagtaaaaaattgttcactattggaaacagtatacacaatactccggtgaaacgagtagacatggttttgggagatacacgtgtaagttttcatattatagcgtattatatttacaaatattaaaacgctagtagattgtcaactatctgaagtatagtagaatacatggtcacacatgtcaagtaaactaaaagatatttagctacctcacgtatatggattgcatgaccacatatacgaagtataggggtgtcaaaatgggtcaaaattcatgggtcaactcaactcaactcaacccatgaacgtaatgagttgaaaatattgactcaaatgagttgatgggtcaaattagttattgggtcaattggtttgatgaataaaataaattgggttgtaatggttaatggtttcaatggtttacccaattaaccattaagttttgtaaaattgaattaaaccaactaaaatctctaaatcaatgtccatttaagttgaaccaacacatctaaaccaatttaataaaatcaatatttttccaaatttcttaaatatacaagcgatgaaattgagaagaagtaaactcgtaatttttccaccaaaaaacacaaaaccgtaattttctctccaaaaacgaaaacccgtgattttcccaccaaaaatgtaaacccgtaatttttccgccaaaaaaaacataaacccgtgattttcccgcaaaaaacgtaaacccgtaattttcccgcaaaaaacgtaaacccatgttttttccgccaaaaacgtaaacccgtaattttccgccaaaaaaacgtaaacccgtgattttcccaccaaaacataaacccgtaattttcccgccaaaaacgtaaacctgtaattttcccgccaaaaacgtaaacccgtaattttcctggcaaaaaaatgtaaacccgtgattttccgccaaaaacgtaaacccgtaatttccccccaaaaaaacgtaaacccgtgattttcttgctaaaaacgtaaatctgtaattttttcgcaaataaagtaaacccgtaattttcccgccaaaaacgtaaaccattgattttttcgccaaaaacgtaaacccgtaacaagtggaatccgtaaatatcctaagtttgatgataatgaattaataattattaataattatttattattattttataataattattaattaaattgttacttaaatggacccatttaacaactcaacccatcaaatgaaatgagttatgggttgaccttacccatttaacccatttaacccattaatcatttaactttaaactcatttgattatgagttgagttgagttgggttacccattttgacatccctaacgaagtatatgacgtcatgtagttaacatcaaaaggataacatcgctggacaatgggtcattattgaaaaattttctgtgtctcagaccatgggagaatttatggcgatgaagcaataattaccgaataaaaatcatttactccatgatttataataccaattaaatagtttataagttattcttttttattttttatttaaatttatctgtatatcaaatttcatttttcgtgcataaaattttgtaccaaactacatcatttcacatatgtaaaaaatatccctcgggattagttcttttgagtttaattgattttggttgataatatatatattatatatatatatatcaatctccattataccaaagttaaaactatatattaatattattttagttgatattagtaaaggttaatataaatacaaattaatatttttagttaataaaatactatattagcaaaaatctgggataaataatttgatatcttgtcaacattttgatacttcgataaataatgtattaatgtgttatttctttttgtcattatctacaaaatgtctaatgtaactaaaatctatttgataaaatgatgtgtaattttaatcataatgttttacaaaatgtctaatttaattagatatgtttaaaattaaatataaattttattaaaataatattaaaatattaattttatgtggatgagataatcattggggctcactaatggaggtaaaattgaagtatgagtttttctaaataaaacattcaaaaaatatagtctaatataattgagatatcatgtgggtatctcaccaataaagatgatctaagcgttgtctaacaaaacattataaccacctaatattaaacaaatgtcaaacttcgacattacaacatttagaatattcccaacatttttatgcattaaattttatatgtatatttaatccgggtcaaatggcacccctttctccttagtggatctgccacttaacatcattcattttcaataggtttgtgaaggcaagacttgtccccttaacggcaaataagattgaaaacgactatctcttgtcacacacttcgttatgtcacgagctatacggttactttgactttgaggcatcactaccttgaacttatacaccactagaaacttcgaactaggttgtgtatatggccaaagtatgtccgagaacgggcgcagggttattcagagtttcaatagatcatgtcagcttcgaaagaatccacaaaatataacacaatattgccgtaatcttgttaagggtatgtagaaaagcatcgtagcccacgcagcaacaccacatacaataaaacttgaattagtccatgaagaactcactatttacattctttgggcttattattgggttacaaaaccatctttgggcttattattgggtcacaaaaccatctttgggcttattatcagtgatccataattattcctttggaacttttttttattaaccctttatttctcatttgctctcactatcgttcgttacgtctctgtaaatcactgagaaaatg

SEQ ID NO: 23853 - DNA, 3003 bp, Unknown
  misc_feature (1)..( 3003): 2750-1469P.txt file - cDNA_ID_2155073; gDNA_ID_1620778; Annot_ID_167822
gtaaatcacactcaatttatattgtagttaatcaagctcaacaacactgatgagcagcatctacgcactcgatttaacatcaattaaaatatgagatcatcgattctaaagtattagagtatttgaaatagagaaatgatctctaatagcacataatcaagtttcacaaaaagcaccataaactctttagataaattctcacaaatagcacaattttaagttttttggacaaaaatagcattaaaattttttttgacataaatcgcattcaaataattattttatatttaattattaaaatttaaaattcaaaaaattcaaaaatacacaaattctttaccaaaaattcccgccaaaaaattcctgacaatattttcccgccaaaaaaatttccgtcaaaatttttccgccaaaaaaatagaaattcatgacggattttacaaaatttaggaaggattctaagcaattcaagaaagattttacgaaatatagaatatattttttttgtatcccttcctgaatttcataaaatccttcctgagttttgtaaaatatttcctaaattttgtggaattcttcaaataatcattttctgaaatttaggaaggattctacgaaattcaggaagggtttcacgaaatttttatttgtgaaagctttcctgaattacgtgaaatcattcccgaataccgtagttaccttcttgaaattttttttgcggggaaacttttacgaagattgttttggcgggaaaatttgataggaaagtttttggcgagaaacttttttacgaaatgtttttttgtgggaaaccatttgacggaaaatatttacttttatttatttattttagttaactaatcgtttatatttaatatttaattaaagttttgagtgctatttgttgattttttcaaaagagatgttatttttggaagaaaaaactttttagtgctatttttgtaatcctcctaaattttaatcaaaccttaaatataaattaataattaagaaaatacaaatacgaatacacaaatttatcgccaaacaaagattattaagtttttcatatgtatttatactataaattgttttgtaaagcctttaatttgtggactatactataaatttttcagtagggcctttaatttgtgggcttttttttacatacaattatataaactaaaacctaaatgctagagttaaaaaaaagggcgatttgtgagtcaacttaatttttgtacaagtaaaaatcatagtttttgaggttaattgttagttttgcttatgaatttattgttattcttcctttctatcgtggcaaaatttgtaagaaaaaaaagatgcaaatcttgtgataatgtgattagttaaactccaattttagaatggatcgatcactagctttgttaaaatatgagacacaaactttcatcaaatttaacgtatttgaccttgatttgtgttaaatatttgtcgcaatataaagttgtaaacgttatataaggaaatgttcaatctctcttctttttttttgaattctttttaactgaatttgtagatgttatataaaaatatgacatatgacaatgttttataaacatgagtatatttgtcacaatgtttaacataataattttgaaaagagagaacaaactgcaacaatgttgttatataatacaattttccattaatattgaaaatatgagatttctatgggatattgcacaaaagctaaattacaattcataagattaataaaaatctttaagtacaatgtatcacaccaattctgctagttttagaaaaatataatatcttttttttgcctttttcataatgagtcaaatttatgtttatggaggatagaatctcaatgttaaaaaagagtaacaattcataaaattaattaaaatatttatgtgtaatgtatcacactatttttgccagctccaaaatgttacttttagaaaataaatgagaataggatatttgttttttgtctttttcataatgagttaactttatgtttacggaggatagaatctcaatattaaaaaggggtaacaatttatacgattaattaaaattttatgtacaatgtatcacaccatatctgctagctctaaaatgtaataaataagaatataatatatattttttgtctttttcataatgggtcaactttatgtttatgaaggatagaatctcaatgttaaaaaggggtaacattcattagattaattaaaatctttatgtatatacaatgtatcacactattttcgccagctctaaaatgacagttttcgaaaataaatgagtcaactttatgtttatggaagataaaatcttaatttaaaaaaaggtaagaaaatcttctatataaattggtcaaacttcctttcagtcttcaattcaaatcattgttttttattactaaaaggaaatataggatttaggatagtcccccaaaatgctaagtttcaactaatataaaaagaataaatctaaattacagctcatctctttaaatgaaattgtaatggacagtgtatcacaagatttttgccagtcctgaacgttctaaatctttaggcgtttatttgttctatttataaatatcaaatcgtagctttataatccattcatagtcctttgctcttgttttactactctcactaatttttttataaaaacaattcttagctactagctagctccatttataatcccttcactcaactttcttgtttcactattctcactaaacgtaagttttcttgcatcatttttctaaattttattgtcgatatcaaactagattcgaaggatttcaattgaaagtcttatgatatttaattgttacgtcgatataatctatgtgatgtagaaacactcatttttaggggtctaattacatctattcaagcaaatcttttatttaaagtgtgcatgctaatgatttggataattttgtttcaaattagggttttctcggaaatg

SEQ ID NO: 23854 - DNA, 3003 bp, Unknown
  misc_feature (1)..( 3003): 2750-1469P.txt file - cDNA_ID_2155663; gDNA_ID_2926213; Annot_ID_202754
aaagtcacactcacatatatcgttagccggtttagatttggttttcgtaagtatattatggtatattgttggtttcagattgaatttgtttactttattttactttactagaaaatgtacatctctagctttggtttcgtttcaactttcagccaaattttttatatatagaaaataaatttaaaatcagataacttgaattttttttaaaaatttggttagggtttctggttcggttaaaccagctgatttaaggagtgacataagctaaattgactatgagtcggatctcatgtgtttgttttataatattgttagatacaccaaacctaatcatcaatgcttcaaaagttcaaacactttggtgttatttttcttgcacgaccaaaaatagttccttctcacgtgatttttcttgcaaaaaacattgaacaaccaaactttatactactcaaaattcaacatccaaattttagtttttgttaggtagaaataagaaatctatcctatgaaaagacaaaaccattaatttttatttcaactcttgctgctatatgacgttgaattatgataatttttccgtctcaagttcataaacgatttttcaaacagagttgtgatgaaatttatttattttctaaaaaaaaaggaagattgatagttttgaagaatatattattgatggtagccaaataatttaccggaataaagtgtaatatcatctcaaactgttcctttttatagcaaaatcgctcctttttatccgcagttagagtataagacaaagaaaccaaattccagagcatcaggaaactctttcccatattttaaggtgaaatcactattttgaaattattaacttagtttaataaccaattattgaataatacaaacaaagtacttaaaacccggtttaatgttttatttcgattttataaatattggtttggccaaaataatatagtttataagtggcgtaagaccacgccagaataatacaagaagaaaaaatgtttaactatgtatagttcggacgtggtagtccattaataatggaatcaaattctgcattaataaattcattatcaagattccagtcttttgtattccttccaattacatgaaattaatataattcttgaacaaatatctttggacaaaagaatttcaattatttacttaaatctatataaaagcaaatctttaatccattcaaatagcagatatgtatctctagggattaaggtagtatacaactataacatctcaaaagaaccaaattgtgactgcacaatgcaatatcataatttgtatatcgaaaacatgatatgttcacatggttcgtccataaacagtacttatattcatatttgaccactaaatatttcacattaaaaaatcgaaattagaaataattatggatttagttctgcaaactcgattttttttaaaaaagattcgaagatgcaagattgataatgaaataaaattgagggtacatcatacatgtgggggaagtgacgtttaaaaacaaaaaggaaaaagaggaagaagatagatgccaatattgttatcatgacaactatgaagcagagttagagtccgtccgtccatacaagtattttgtgtgagtaccaccgaatttgtctgtctatgttatctcccttctttttctcatgcccacgaaccaacatgacaattatgttttgttcgttttttgaaaaattctagagttttcatttattaattatcgttgagttatgatttagtatgattttggtttaaaaattccacttcttaggactcattgtttgatctttgtgtttcttatttatttctttgcacagtactaaaaatcatgcattagttcttaccattcacaaatcttcaaaacttaattagaaaaagaaaaaaaaaaatcgatcaatacaatgaaaacgttctcctatgcactatgcagaacaagtctcgaggattcgtatggtcaaatttattccgatcaaattattcgcgaaagtgtgagaaacaaatacgtactttatttctcttacctcctcctacgtcacttctacgcattcgtgccctaccttcatcagtactcttccagtttctaaaggttaaaaccgagtcgatgatccacgaccgtagagttaaatcaagtaatcaacttaagtcattgtaataagaaagcctccgctcaaaaaaaattctacaatattagtttgacataaaacttcaaatgatagaaatatgaaatcaaatagttgtagacttgtagtctagtactttcatttggctcatttggcaattgcaaagtttacgtggtgattactaaactccttgtcggtataaatgtttttgatcatgaaaccatataccgaaaatattggtatatatagtcctgcctaactccactaacaaaaagtcaggatttttaaattaccaactacaacttgaattgtcatttggaagattgattcattggaatattgtgtatcttaagccataaacaaatcccataatttaatagtgtgccagaattttgtattcatattttaagcagtaaaaacaaaaacaaaatacatatatatattctcaatcaaactataatactttagatttaaagctattaagaaaaacatttagctagtcaaaaaaaacaattaacacttttcgaaaggtccatttccaaggaagctagagaccgtccttttttactaattcgcctgcaccatccccttgtatcgagggtctaattctacaccttattccattttatattccctaacaatttttttagtttttttttttatattactttaattctaatgaaaactcctatcttccttcctctccatcctttttcatctacctttgaatcttttgacacttgtatataaagctttacttcctcctttgttactccttttctatcaatcaccaaaacacattcattgtcttaaaccctaaacctcaagaaccgaacaaccacaccaaaaaatg

SEQ ID NO: 23855 - DNA, 3003 bp, Unknown; identical to SEQ ID NO: 17791
  misc_feature (1)..( 3003): 2750-1469P.txt file - cDNA_ID_2155673; gDNA_ID_1621088; Annot_ID_170542

SEQ ID NO: 23856 - DNA, 3000 bp, Unknown; identical to SEQ ID NO: 6298
  misc_feature (1)..( 3000): 2750-1469P.txt file - cDNA_ID_2155718; gDNA_ID_1621088; Annot_ID_170573

SEQ ID NO: 23857 - DNA, 3003 bp, Unknown; identical to SEQ ID NO: 17765
  misc_feature (1)..( 3003): 2750-1469P.txt file - cDNA_ID_2155718; gDNA_ID_2926212; Annot_ID_202707

SEQ ID NO: 23858 - DNA, 3000 bp, Unknown
  misc_feature (1)..( 3000): 2750-1469P.txt file - cDNA_ID_2155720; gDNA_ID_1621088; Annot_ID_170574
tcccgtatgtgtcacccacgcggaagcagctcatggttgatctcatgtcgacggtggagaatcgcctccaatcacaactccttccctgtaacctccctccagatgtacgaaacttcaataaccctaacggttccgccgaagcatctcttcatatcagatccggcgacaaatcttctccggtacttgcgacgattaactctgtttttcagttatgagatcgaaattgactgttttgcatgcttgttttagagctcaattgcttgattttaagtagaaacagacttcaatttcgatgtaaatcataaccctaaaaaaaaactttttagagaatcttaaagtttgttttgttttgcagattgattttgttataggaagttggatacattgcaagatcccaacaggagtatctttgaatataacaagcatctctggattcttaaactcatcaacaaaagctccaaactttgtggtcgaactaatacagagcagttccaagtcgcttgtgctaatccttgacctcccacatcgtaaagatcttgttcttaacccggattatctcaaggagtattaccaagacactgctcttgattctcatcgacaatctctccttaagctacctgaagttaacccttatgtgtctccttctctctttgtccgttctgctttctctcctactgcttcgatgcttaagattgatgcggaggaagaggataagttggaggagatattgagagatcatgttagtccagctgctaaggaggttctcgaggtttggttggagcggtgtgtgaaggaagaagaagagaagattgtggttggggaagaagagagaatggagttggagagaagagataaaagctttagaaggaagagcatagaggacgatttggatttgcagtttccgagaatgtttggtgaagaagtttcctcccgtgttgtacacgctattaaagaagctttcggtgttctctagattatgtaactatatatatacatcagttaatgttcattgtactaaacatttactttcatcaatgtcacaagaacgcaagatgaccatcaaacaagtcctgttttctcctaagaacgtctttgttgtgaatcatctctgaatcggattccttctgattcattttaatactatgggattgtaaatttatcaatcaagtttctaatttatctgtaaaaaaaagtcttgaattattgtttttctcatggattttaaagtttttttttcactattttacatggatgttttgttaaatttctcgttctctagatcatgtcattttacattagcaaaaccaatataatatatagattaatattaacgaaggaacataaacgtgcaaaactaaaagttttaaagctaaatcgctttcaaaagagttagtaaccagacaaaaaagagacagatcatcggcaactaatctcgtcatcgcatgcatcataaaccaaattaactaaatcatccatttaatccatttgttcttatcagatcatccttttccttcctacacaagaaatggttagtgttttcttttctcgattgtctcttagtttagattctttatccgactactttgttcatcggttttgtttttctttttgtcttccggaaggcgaattacatgtcggaagcagcacagctcagaagaggtctaaagcctaaagggaagacttatgggttgaccaatcagaagagacgagagatcagagagatctttgatcttttcgacatagacggttcaggtaaactattaaaccgattctttatccgatttacaaagttattgctcacatgatttagtgcatcatttcatatgtaggtagcatcgatgctagcgagctcaacgttgctatgaggtcaacggcaatttttctttctttttcaaagttattttcttcaagttctagttaagtatagtactaaaaaattatcagctgattacaggtctcttggatttgagatgaataatcaggtttgtttgttttccttccttttttcttctttgttttaatttcatggtttagatcattgtacgtagaaccaacttgtatttagtttggtcatgttcattgttgcagcaaataaacgaattgatggcagaagtagataaaaaccaaagtggagccatagatttcgacgaatttgtgcatatgatgacaaccaaattcggagaacgagactccatagacgaattgtctaaggcgtttaagatcattgaccacgacaataatgtgaataaatctaaacctgtcattatttcattctttttaatattatctttttttgtttggattgatttcattgtgtttgactggacaacttttggaatgttttaggggaagatttcacctcgtgatataaagatgattgctaaagaattgggagaaaatttcacagataatgatatagaagaaatgatcgaagaagcagaccgtgacagtaagcaaaaacacataataattttgcgttttatctataatcggtccctcaagttcatgtttttgccttaacctacgcagaagatggagaagttaacttggaggagttcatgaagatgatgaagagaacctcttacggctaagtataaatcaattagtaatggttgtgaataatatttgttaatcaccttgatttataataataaagaagtttgatttgtggcttggtcgaataaaaatgtattgttgtataaaaataataatgtaattcacatccattattttgaatatgtaaatgtccttgaacgaacatttgttttatcattttttatgtataaatgtctttgaccaaaaaataaattatgtaaaatatgaaccagaaacgatgttgtttagatctgatacttacatataaccaaacgacgacgttgctagagtaataaatctcaaaagactggaaacgactgcgtataagtccgtgacctggttaccggagcgtaacttctccggcgaattggacaattttgagaaagacggattatggactccatg

SEQ ID NO: 23859 - DNA, 3000 bp, Unknown
  misc_feature (1)..( 3000): 2750-1469P.txt file - cDNA_ID_2155735; gDNA_ID_1621088; Annot_ID_170584
aacgttagacggatttatctcgacacaactctaattcagtttgaccggactgaacacttttatcaatattaatgttgagttgttgacctatatattattgtaataatgaataaacaacgccatgattgcgtactatctatcagactttatagagtaactactttgattaaccattacattttgtttttatgagaatgttttcagttatatatctttatcaacacagttgaaacctgttcttctatgttaaagcctttgaatttgagtaattttacttttgatagctagcctttttaaaatgaatgattatattgttaggttccaagtggggagttgtcttggggatctcatttgacgtgtgatcttgaatttttgatagagatcctaatgatctcgtggtccctctcgcagagtttatgtaaccatctaatatataacttcatgtctggatatggagaatccaaaacttaagaaatgcacgtattagcattcgtagttgtatatatgttatgtattttgcgtcaaatgcagaacaaaataaagcaagaagagaccaacaatcttcatatggagaattgtaaattgtccaaatcagcaatatatagatgtcttgaacaataaaaagataaccgagtttaacattagaccaaaaaaaaagaaagataaccgctacagaatttgtgacgaaaagaaaaaagctttggagaaaaaaacagagtaagaactgtttttgttgtgtgagaagagtttgtccttaggtcgcataatcttttaggatgtagttatatgtgttaagtgtaacacatgcatatcatttacttctgcaatatatctcttctggagtttcgtaaggtacttatggttggtttgtcttcgaaactaccaacgaacaacttaaaaaacattgatctttttaatagcgtgagtttgatttatgttatccttgttatggtgcatatgtattacggaaactttggtctgttttagatgggtaaatagttgtatatgagtaaatatgatattgccagtgttttatataaagaaaaagggaaacgatgataaaaggtgaaaaagaagtttaggatcatctttgttttttattttgttttccgactttcaaatcagacaagacaacgaggtatgggtcttttaacatacagagactcaacttgaaaattctatcaaaccaccaattaaaaaaccagagaaaacattcaactatcttcttagaatctagacaaaataaaaagtgtatcatgctgattttgaacaaattattaaagagatctcaaccatcgtttcattaatatctttgacaattctagaagccgtagtaaatcttgtctttttatgtgtatatcttgttgaatttgataaggatattcaaaataatgagatatgtatgttgagtaattgagtaaaatcagatcccttgtttaatttgacgattaaacgcttttttcattattttttttcgcattttgttgtgtatgttctcaattacaaattccactataagcatttggactctacaatgtcactttctaattctgatatttaataaaacaattattttgtatatgtataaatagtaccagaaaaacgaacttaataaaataattgaatcaaaagcagatgctgaacaaatagctgcagcttttagcaattgtctcccatatgcttttcctttgtttcaaaaattgtatatacgaggttaagtgaatgttgcaatgaaataaatgatgcagtttgtgcattcatcaagcgaacaagtacgattgatgttttcagtgcaaaaactaaaataaaatactactaacaactatatagtgtaaatatatataactttaacttctttttttttaagtcttcatacgctgcgaacgatcaaaatatatttacaaatttacgaccaatattttaaaaatacttcattaaagaattgatgctgctgtctgcacagttgagaacgcaattggaaactttcgtgcattcactttgttcgccgcaaattggatatgtgaacgtggtcatcattatttatagaattattctataaaacttactataaaacactagatataaagctggatcatataaaatgaatttactaaaaattcgatagttaattatagcagatgttatgttccaatttgaaagcatacgaacgaggtatatagttgaaaacacacaccgtaaagttaataattttcacaacacaagaacaaatcaaagtcgcaagtaatttaacgcatgtcagtagcatgggcttcttatatactagtcaatagaataaactagcaaacaagcaactaatgtattcttgtttatcacgccacgggttacaatatcatacaaaatttgaatactaattaatggtaacaagtaaaaaaacaaattactagaaatggaaatacttttgtcaaacaaccaagacgtataacttttgttttctatagattaatggacttcttaaaaatctctccatcagattaaactttgagatatacaaatacagtttttgttttcttctaaatgatatgaatattaactttatcgatttcatccgtagcagatttccattttaaataataaactatgagaaaacagataaaggttgtatattatttgttaccccaaaaaaaaaaaaaactaactacgagtagtagtttagtgtgtctcacgtgcgacgaggaaaagttttgggagagtaaaaacatttaatatttacgactagtttgaaaaaccgtgagctgacacaagctcattgctaatgctacagtaacagctaccttcacttttaactaaatgacagaccaatcattttaacctctgttttcttagctggcgcgtgacagacactctccctctctccatgcccataaaatctcaaagactgtttaaaaaaaaaaatgttttagctttaactgctttttttttgttgttggtgtaatgatatcacagagagaagaaagagaagagaagaagcagagagtgatg

SEQ ID NO: 23860 - DNA, 3003 bp, Unknown
  misc_feature (1)..( 3003): 2750-1469P.txt file - cDNA_ID_2155735; gDNA_ID_2926212; Annot_ID_202697
ttcaacgttagacggatttatctcgacacaactctaattcagtttgaccggactgaacacttttatcaatattaatgttgagttgttgacctatatattattgtaataatgaataaacaacgccatgattgcgtactatctatcagactttatagagtaactactttgattaaccattacattttgtttttatgagaatgttttcagttatatatctttatcaacacagttgaaacctgttcttctatgttaaagcctttgaatttgagtaattttacttttgatagctagcctttttaaaatgaatgattatattgttaggttccaagtggggagttgtcttggggatctcatttgacgtgtgatcttgaatttttgatagagatcctaatgatctcgtggtccctctcgcagagtttatgtaaccatctaatatataacttcatgtctggatatggagaatccaaaacttaagaaatgcacgtattagcattcgtagttgtatatatgttatgtattttgcgtcaaatgcagaacaaaataaagcaagaagagaccaacaatcttcatatggagaattgtaaattgtccaaatcagcaatatatagatgtcttgaacaataaaaagataaccgagtttaacattagaccaaaaaaaaagaaagataaccgctacagaatttgtgacgaaaagaaaaaagctttggagaaaaaaacagagtaagaactgtttttgttgtgtgagaagagtttgtccttaggtcgcataatcttttaggatgtagttatatgtgttaagtgtaacacatgcatatcatttacttctgcaatatatctcttctggagtttcgtaaggtacttatggttggtttgtcttcgaaactaccaacgaacaacttaaaaaacattgatctttttaatagcgtgagtttgatttatgttatccttgttatggtgcatatgtattacggaaactttggtctgttttagatgggtaaatagttgtatatgagtaaatatgatattgccagtgttttatataaagaaaaagggaaacgatgataaaaggtgaaaaagaagtttaggatcatctttgttttttattttgttttccgactttcaaatcagacaagacaacgaggtatgggtcttttaacatacagagactcaacttgaaaattctatcaaaccaccaattaaaaaaccagagaaaacattcaactatcttcttagaatctagacaaaataaaaagtgtatcatgctgattttgaacaaattattaaagagatctcaaccatcgtttcattaatatctttgacaattctagaagccgtagtaaatcttgtctttttatgtgtatatcttgttgaatttgataaggatattcaaaataatgagatatgtatgttgagtaattgagtaaaatcagatcccttgtttaatttgacgattaaacgcttttttcattattttttttcgcattttgttgtgtatgttctcaattacaaattccactataagcatttggactctacaatgtcactttctaattctgatatttaataaaacaattattttgtatatgtataaatagtaccagaaaaacgaacttaataaaataattgaatcaaaagcagatgctgaacaaatagctgcagcttttagcaattgtctcccatatgcttttcctttgtttcaaaaattgtatatacgaggttaagtgaatgttgcaatgaaataaatgatgcagtttgtgcattcatcaagcgaacaagtacgattgatgttttcagtgcaaaaactaaaataaaatactactaacaactatatagtgtaaatatatataactttaacttctttttttttaagtcttcatacgctgcgaacgatcaaaatatatttacaaatttacgaccaatattttaaaaatacttcattaaagaattgatgctgctgtctgcacagttgagaacgcaattggaaactttcgtgcattcactttgttcgccgcaaattggatatgtgaacgtggtcatcattatttatagaattattctataaaacttactataaaacactagatataaagctggatcatataaaatgaatttactaaaaattcgatagttaattatagcagatgttatgttccaatttgaaagcatacgaacgaggtatatagttgaaaacacacaccgtaaagttaataattttcacaacacaagaacaaatcaaagtcgcaagtaatttaacgcatgtcagtagcatgggcttcttatatactagtcaatagaataaactagcaaacaagcaactaatgtattcttgtttatcacgccacgggttacaatatcatacaaaatttgaatactaattaatggtaacaagtaaaaaaacaaattactagaaatggaaatacttttgtcaaacaaccaagacgtataacttttgttttctatagattaatggacttcttaaaaatctctccatcagattaaactttgagatatacaaatacagtttttgttttcttctaaatgatatgaatattaactttatcgatttcatccgtagcagatttccattttaaataataaactatgagaaaacagataaaggttgtatattatttgttaccccaaaaaaaaaaaaaactaactacgagtagtagtttagtgtgtctcacgtgcgacgaggaaaagttttgggagagtaaaaacatttaatatttacgactagtttgaaaaaccgtgagctgacacaagctcattgctaatgctacagtaacagctaccttcacttttaactaaatgacagaccaatcattttaacctctgttttcttagctggcgcgtgacagacactctccctctctccatgcccataaaatctcaaagactgtttaaaaaaaaaaatgttttagctttaactgctttttttttgttgttggtgtaatgatatcacagagagaagaaagagaagagaagaagcagagagtgatg

SEQ ID NO: 23861 - DNA, 3000 bp, Unknown; identical to SEQ ID NO: 3131
  misc_feature (1)..( 3000): 2750-1469P.txt file - cDNA_ID_2155860; gDNA_ID_1620658; Annot_ID_163695

SEQ ID NO: 23862 - DNA, 3000 bp, Unknown; identical to SEQ ID NO: 3707
  misc_feature (1)..( 3000): 2750-1469P.txt file - cDNA_ID_2155902; gDNA_ID_1620658; Annot_ID_163715

SEQ ID NO: 23863 - DNA, 3000 bp, Unknown; identical to SEQ ID NO: 3707
  misc_feature (1)..( 3000): 2750-1469P.txt file - cDNA_ID_2155902; gDNA_ID_2926187; Annot_ID_200702

SEQ ID NO: 23864 - DNA, 3 bp, Unknown
  misc_feature (1)..( 3): 2750-1469P.txt file - cDNA_ID_2156237; gDNA_ID_1620804; Annot_ID_168752
gaa

SEQ ID NO: 23865 - DNA, 3000 bp, Unknown; identical to SEQ ID NO: 8182
  misc_feature (1)..( 3000): 2750-1469P.txt file - cDNA_ID_2156241; gDNA_ID_1621199; Annot_ID_174815

SEQ ID NO: 23866 - DNA, 3003 bp, Unknown
  misc_feature (1)..( 3003): 2750-1469P.txt file - cDNA_ID_2156241; gDNA_ID_1620804; Annot_ID_168754
gctgcttgtaactttgatcttgagttcatatatgttctaagtggatgggaaggttcggctcacgattcaaaagttctacaagatgctttaacaagaagaactaatagattgcaagttccagaaggtaatagattacaagttctaaaaggtgatttatcatatgataatttatttctaatagtgtgcttccatgtttcaggaaaatattatttagcagattgtgggtttccaaaccgacgtaatttcttagctccactacgaagtactcgttatcatctacaagattttcgtggtgaaggacgtgacccaacaaatcagaatgaattgtttaaccttcgccatgcatctttaagaaacgttatcgagagaatttttggtatatttaaatctaggttcttgatttttaaatctgcaccaccgttttcttttaagacccaagcagagatagttctttcatgtgctgccttacataactttcttcgacaaaaatgtcggtcagatgaattttcaagtgacgaagaagatgaaacagatgttgacaatgcaaatcagaattctgaagaaaatggtggtgaagaaaatgttgaaacccaagagcaagaaagagagcatgcaagacattggcgagcgaccatagctgcagatatgtggagagatgctactaatattggtagccaaagatagtaattcactttttataaagttcatgtatttgtctttctttggtgttgatggagacacttttcccgtgtttgagctgaaagatttatttttgaaccctttacactttcttttattattattatgaacgagttcttgtcgtgaaatgatatatgacatgcttccgggctaatctcatcgacataattagaaactgagaagttggccatgggaaaatggtacaagacatacaaatacagaaatgacaatgatgtcagcatgacacttgaccataacgttttaaattatgttctactcatatcggtggtggaataattataccttgacctaagaagtatgggtttatatgtattcttttgtaaacgtttaatactattaattatgaacgagttattctacctctatcatctatgttacagctaagcttttggagttatactgtaaaacattgttcattattcaaatcatatcaattaaaataaaaagtacaggatcatatcaattagaatattactttgatcatcataatattctagttgctactaaagaatagaatcatattacttagaatatatattaccatgatcatcataataatatcacaatctttttgttatattaacgtatatctttacgatcgcactatctctataaatgtcacgtacatctctcttctcattctctaagcatacaagctcattcgactgcaaagaaaaaggttcacttgttcttacttttttcttttgttcttatttacagaatcatatgttggaagtgtgatattgattaacttttgaatagttaacttttgtttcccgtctcactatttccttgttttttgcattgacgtatggttattttttattaaaatattgcaactttttcatgttttaacgtatatttgtttttccaatttgtcataggtatcactatgggagattcacaacccaaaaaaagaaaaaagggggattataatccgtggtctccagaggagactaagctgttggtgcaacttcttgtggaagggatcaacaataattggcgtgattctaatggcacaatcagtaaattaaccgtggaaacgaagtttatgccggagatcaacaaagagttttgtcgttcaaaaaactacaatcactacttaagcagaatgaagtatttaaaaatacaataccaaagttgtcttgatcttcagcgttttagttctggttttggttgggatcctttaacaaaaagatttacggcttctgatgaagtttggagcgactatctaaaagtaagtatcacattttcttttttaagtgaacatggtcgtacttacatattattaatatgtccctttgtttttgtaggcacatccgaacaataaacaacttcgttatgatacatttgaattttttgacgagttgcaaatcatatttggggaaggtgttgctactggaaaaaatgcaattggattatgtgatagtacggatggacttacgtacagagctggagagaatccaagaaaagaatatgtggatgattttgacaacgtgtatgagtatgatactacaactcatcatgagtcatcggagcactacgcaccatttatgtctcatggaacttcagaaagtcctaagcttcccccacgtaaaagaacaagatctgagagaagtacttcacaaaaagaagaaagtcctatgatggttgttagcagtaaaattttggatataatacaacaaagagaagagaggcaacaaaatgaagtggcacagaaaaagaataacgtttgggatgctataaaagaaatttctgacttggatgaatgtattcgttacaaggcacttacgaaaatttatcatttgggaatacaagacgttttcgtgagcatgtcggtggaagagaggctaggatggattcaaaccattatggaataatttgagcttaatttttattttctttgtttttaaagtttttaatttggattcaccaaaattattatgaataaattctttatcttattcccaaacttcaaaactctagaaaacttgaaataaaaaaataaaaaactggtcaaagttttgttagatttcgattagattataaaatcatttgttatagagttcatatctattagaaaaccaaatgacatcatatatcactgaaaatagacttccacgacagaatgaatagtgattcagtttaaatgaactcagatgttttaaaatctgataaacttcaactctaatggagttgacttcaacttcactaaccaataacaccacctaaacttataaaattcagaaaaataatcataaaccggaaacaaagctaattatg

SEQ ID NO: 23867 - DNA, 3003 bp, Unknown
  misc_feature (1)..( 3003): 2750-1469P.txt file - cDNA_ID_2156256; gDNA_ID_1620804; Annot_ID_168759
aagcagcaaagaaagctgctgatgtggccaacgctaagggtgttctctcaggtaaaccagaggcgtctcgctgcattaacgctctctcgttattgatgaagatcaacattactccaaaaccaaaagaaccaaggagtatgatggataagcttgagggacttacaaaacataaagaccgcaagatttgccatgttgcatcagcccttcttcacctttggagacagaggatcagagaacaagaacgtaaaaagtctgttaccaaggcttcatcaaagaacatacaaagacgaggaaacttagtgatgtgaagatcatggcttgaacaaatcaaagtctcttgtggattcaaaaggttctgaaccattttattgagatcgaatataagtgtgaggaagagataaactcatttgtaagcatggttgagtgctgagcaagtatactggtgaatttctcgtatgttatgtagggttccacattggaacctgaatttgtaatcttttttgtgtctttacttttccctgctttgtttgttacacaagagactaacttagtgcaacaatattgtggcgaatcttaattctctaaaccaaattagagtagagatagttcaatagatgtaatgaataccaaatttattatcattgaaaaaactaaaatcacctcatttttttcactatgcaattgtttagcatgtgttgacaaaaaaaaaattgtttagcttgttcattaacaaaatagtcatattgttgtttacgttcactcgttatttatttgagtgtagtaagaattacacgatttccactatttgtccttaagttcaggtttacttgtccgaatttcttaaaccatatatcaaaaatatttacactatcgcatcaaaacagatacatgacatgcatgaaaatatatatgcaagtgagatgcgtactctttaaaaaattcaagttggggtatgatataaaactgtcaaatacatatgaaataataatcaatatattaaaaataagaatacataaccatatatatatatatataatttatttatattcaaattaactgtaatatcttcataattttttttatctcttactcgtcgcttttcactttccctttttaacatcacaacaaataatgtcgttcaccataatatctcctatataattttaacaacacgttttagtaccaaatttttatatgtatgtatattactaataacgtacagtttatttctgaaaattttcccaaaaaactatgtacgatgaactgtaaaagcatgtgttcaagataggtaactgttggaattgtatcctttgattgaacctgtaaaagagagaagaagcctcatgagatgaagaaggagaagagaagaagtcaagccaagaagaagagcaaaaggaagaagaagaagttgtcgtgaaacaaggtcaacgacaaagaggaaggaacaaagtcaagataatagtgttgggcttgtgttgttttgtaagaataagtgtttgggctaattgttttgttcggcccaaatgagtaagtgttttatgttagtcaaagtgtagcttagtgaaagactagagttgtgtaagagttgcttgtaagtttggttatagtcttagggtgatgatgcctagaagtatggtctaggtctaagtagaagcatggtgcaagtgtctgtactaagtagaagtaacttgtataagtatatgttgtgtgtcttgtaagaagtatctggtgatccaagtttattatcaatgtagtctttcaaaaagaaaaacgtgttcgtgtgtttgtctctaaacaagaacaaaacagagtgcaacaaagagagaaactaaagagatagagtgaaaacagagaatcataacaaaaactctatagaaaccgaaacccttgctcccaagggtgttgccattcaatagcttcacaatagatgcatcttatttctccgtacatgccgaagaaagtttgctaaaggccaaactattcaagaagccatcaaatgatcaatgtataccaatcttaaactatatccattttctaatagatttctaaaaaacaattttgcactaatttttcatataaatatcacataaaccaaatatttttcaaagatcagatctaatcttagtgctacaaactcttccatggacgagcgagatcatccctatcaagaccataaacccttctagtattctgatttagttagttttatatagtcgattgatatcttaacaaatatcctgtattttgatattttaataaaaaaattaaagtcgattaatgttttagaatgtatttcctttatcatttcgctaaaagctaaaaaattatcaaatatatttaatatatattttcatacaattactgaatttatgtagtttgggtcaaccaacgtttttaattataaatattagcataaatacaatatatattgtgattatgtgaattaaattaatcattttagaaaacaaaattttatataagaaaaaaattgttttctttttgttacgtgaatatcgtattattacatttttcacaaacaaaaaaaaacaaattgttttccggttgcgaacagattaaaggttttatatttttcaaacgaaaaataaaaaataaaaaaataatgtacttattttcatgaggtccacccaacaacagtcgtcacactagtcgcgttggacttgcatgcgcatattatactctatagtcaaacccacactaacctacgccgatattcttatccaccaccacctcttattagctcaaaaaaatttcactaacccatagtcattattgcttatactccgtattaaaaaatgttaaaccttttgatctgacgtttaaaagcaggtttctttctatttccagataaaaaaactttactcatcgagactcgtttagtgattcgaaatttcccttctcggctcaaatcttcgatctgggctttcgtgtctttttgcgttttgattggtaataaaaagaagctttttaaaaactttttccatg

SEQ ID NO: 23868 - DNA, 3003 bp, Unknown
  misc_feature (1)..( 3003): 2750-1469P.txt file - cDNA_ID_2156274; gDNA_ID_1620804; Annot_ID_168764
tattatttttaaattgatatcttcttaattttttaaaacatgagacaagtagaactctagtctggtgaaaagctcacaagtaaaacatgaaaggagtgtcttaattcaactttgttttgtcggcagtacacatcacaatgtcatatagataggttgtagacggactattttctgaattgaactgggtcgtgtttgtagactatttttttttttttttaattctatcgactgatccggtgagtttcaataaaagcacactgaaatagttcagagagaacgttttttcgaaagaccaccacattatatgtcctaaattttaaatgttttctaactaataacagggttaatcagactacatgtatttatgattattagataaatcaattgagccaaaacttaactaatagattttccaaacaaattttccaaacaaatgtgacagattatttattttacaaaaaaattgttttacattaaaactttaaataatttctacaccgaagaattgaatttgcagcacaacataagaaatcatgaatgatggtatggcatgcatatgttaatcctaacaaaattcatgattccctatccacgcaagctagcttgcttgtccaaattagatttgttcaactgcataaacaaattgtcaatttccaaagaggcaccaaaagtcaaaccataaataggtagtttggacaattattggggatataatggattagatcgtagattcaggagaatttaaggcaagtaagttggttctctatctaatgttccaagggtcttatctatgtacttcgtttcgatgattaattgatgtagttagtagtttcaaattccaaacgactatttgtatgtacaattacatatggattaattgtcagataacatgttgaattctaacatgtttctgtctatccgattttagattaaagttgtttatacaaaattttagacaacacttaaattagtactatcgttagttatatagttccattaatcatttctccttctgtatggtttatttggacagatatgtcattaagcgtttaaaaatatttgtagatttgataatttgtcaaaaatagcatttattgatattatagttgatccgtacgcgttacgaattctttagttgacctttctttttttataatctcctaatatttaaaattcagcagcagactgatgaataaaattaaatacttggttccatttctagatggtaacaggtacaaatatagatcctcacgtaagaataataacaacggaggacaaaaacgttaaattatgattaattaaacatttaattaaaagtattagcaaactcaatcaaagaatgactaaaaggttctaataacttgtgaggtatttaaacaagttaatgtaaaaaaagaaacaaaaaggttgaaacgtacggttttcatccaatgattatgaatgactataaatgattgttttttctacatcaaatatggagttccatcgtcatccaattttcttttggttacgagtgaaaacttcttaaaacacccgaatataggatctgattgataaccaaaagttgtacaagttttttagctgttaactttatcgaaatagtgcaaaactgttaaaagagctgtataaaaaaactgtacaaaaaatctaagaagaaaactttttgtaacgtttttgataaagtttttgtgattgataactatcaatactgtacaaagctgtattgtgttaccattcaaacttataatgttatagtcttggagagatattttttttactcaaagatatgaatttaagttaaaatattccataatccaaaccagcaatatatacacattaatataatttaaattgcatggaattcaaaataatacttatcgtgaatccatctagatacgttgagataagggaccaatcaacaagagaagacgtcacttttacaagttgagaataatctttcagagagaaaaaaagagtaactgtcgatttttgttgatccaaggtaacgtatatgtcctgactcagattattgcttccaattatatgtgaaaagagctttctccacattgacatataactaggatcattcgctatagacgattaatcgttgtttataatttgttataaaaaaaactttggtattttaaagaatatgtcaatatttttttcatactacagtatttttaattcgtcaaactatttaagaatacgctcatgacaaatgatcatataataataatttaaatagtacttgtatttattttttcaagaagaaaacttagttgaatgaaatttgacttaaaatgatataaagggtttgaatggtaaccattttaataacaatacagttttgtaccgttttgacagttaccaatcacaatttttttatcaaaaacgttacaaaaagtgttttactctcagctttttttatacagttccttttaacagctttgtactattccgataaagctaacaaataaaaattttgtacagcttttggttaccaataaaacccaaagtcttacaaaaaaggtcttacgcgtccacgttagctttccaatccaacccttaattagaagtcttcaccatttgctggttaaaggatattttttcaaagtgtttagcattttgtatacgtcaaactattttagaatccagatgatgaatgatcatatactaatacttagctgtatttttataatttaaaacaacaaaacttggtttaatgaaatttgacttgatcttgtttaaaaaaacgtctcacgtccacacgttagcttttccaatccaaaacccctaaagagtagaaaaccaaaataaccatttttaattcccagcctctttttatacgtagtctaaattgacaaacacatcattcgctctctttctcttctttctctagctctcttggttttttgctaaaaacagagcattttctctctagctctcactgtttctttaccataagtttcgtcatattagtacatgcaagtgtaagggatg

SEQ ID NO: 23869 - DNA, 3003 bp, Unknown
  misc_feature (1)..( 3003): 2750-1469P.txt file - cDNA_ID_2156278; gDNA_ID_1620804; Annot_ID_168765
acaagtttcacttattcatcagcccgatgaaagaaatcaaacttaatttgaattattttattttattataaaaatgatcaaattcagtttatggtgttatatttgtttatttacaaacaaggatttttttttttcattatgtaattactactttatttttctgggtaattagccccatttttatgatgtatatttacgagatgtaaaacttggcctacgtacatgtgtattttatctctaaaattgcaaatgtaatatttttcggacatatattaaagaagagattgatttctagtattgggtaactagggtaattaatgatgaacaataaacatgcgattaattaatctaaactgttaagtcctaatattgctgtttaatatgaagtagctagtatatttagaaaactatatatttcgaaaacgtgatatctcataaatttgatttaacattggataacatttgtggaccaccatgcatcatgcgtgctggtaagttgattcgacaaatttctgacgtttgtaagttgatggctaatattaattagattatgcattggaaccacatagatatttcaaaaacaaacatatttaggttcgattcatcactagtaatatattgttttgaccaaggactttactcatgccctgaagcgacaatctgtctatggtgttgcatgtttttgaaacgaaaatctgtctcacaaaccctgtggttaatatctcctctggctgaagaatatgaaaccttagattggaaaaccatctatgaatttttgtctttgaaggttttatcactaccgcatctattatctctatccgtgaatatactgagcttatcccggagtgtcaatttagacacatctctgccggacgttatcttcatcgactatccactgaagcatcttgacaccacttcaatctagcggccaaaactaggagttgtgatttccctgtttttgcttaagctttttcgaaccatagctaactgttccccgacacacatccagctagcttccgatctagaatttcattcttacctgacttcaagggtcctcgccatccaagcttccccgtcatggaaagaaccttggctctggttccatttgtcgtttgtgccggcgaatagtgagactaagtacctttagtaatcgtcacaaaatcttttgatagtgactagttctaaaatacctgaattgttcgtggaagtctctttgacacaccaagaactcgcttgtggcatgttgctagctagcttctgtctctgagattttatcataaaatttttatgggtctatcctcaatgcttttaacttatcctagctatcttatctttattgtaagaatgtgcttcaagtacttgtatcctttgtttctcctcttttgggtttgattgaatgaaatcaattatgttttgcacaaaaaaaaaagacaatttgacaaacacgtgaatgcaatttgattgagttaagattaattagtacaaaacataataattgaaacccatgtaagtttggttgattctatgtaaacaaccgtttttctcaaaaggtatatatttttttgtttttggcattcaaaagctatagtttgtttctaaagtaatcatttttagctgatcaaaaccaagtaaaccgattaattattgtgtgaatgatagttaggtgttgcatttgtgtgtaaatgaccttaatgtatagtagaacggaaggttgctgttacatgattatctaaccggttctcagatggaatcgaaagtagaaaattcatatggaaccgaagttatgcgattcaataaaaccatatcaaatgtacaatatatttacacggtaagtacattgcattagtaagtaggtatgaactcctgactccatgtatagtagaaaagggattgattacataaaatacattgactgcgtgaaatgtatgataagtgcttggtccttagtcctttgttgtgtataaggagcaatttatcgggttttcgatcataaaatgatatttttcattttctaatcataggctttttaaggttttttttttcatcctaagcacaagtgactttcaaattaatcttcatttttatgactaggagatgtaactattttctagagagtaaactctttcctacatgtatcgaacccgtgatctccaaaatctctacgttttcagtaatccatggatttaaccatttgaccaactcgaagttgatttatttttgttctgatgtataatataccaccttttgtattgatttcaaggtgaaacaaatttttttataagacaatttagtttgaaaaaaaaaagggagattaaaaaaaatacactatttatttttaataaaacttaaaaacatctgttaacatagaaacaaatcaacgcatagttttgtttttttaagatacaaatagttagagaacataaaataaaatttagatttaaggttagaaaaataaaaatcgaataaaatgcagcaaaagattatctataacatgtgataaaatggaataatatttaaaatagctgtactttaatttcttttctttcttttggtgcaaaactttaatttcttaaaccaataaaatttaactggataataatctgacccataatttccttaataaaacataaaaattaataaaaaaatctcacatacagttaagtacaatccaatcccttagatatattcccccccccccccaattgaagtaaaaatcaagtattaagagttaacaatcactaagcattccaataatatatttttcaatggaatggaattaccattgtgacataactttttgttttttgtcaaactgtgacataacataaaaccattaaagaaaacatgtgtccctcctttaataagaagcacattgtgacaaacagagcattctctctctctcacactctcctctgtctcgctacctctgtctctttctcgagcactcactgttttatttaccagaaattgtgttgtatcattacatgcatgcataaaatgatg

SEQ ID NO: 23870 - DNA, 3000 bp, Unknown
  misc_feature (1)..( 3000): 2750-1469P.txt file - cDNA_ID_2156294; gDNA_ID_1620804; Annot_ID_168771
ttgaagccaagaagaatatttaaaaccaaaaattttgatccttttttctttctttcctggtatcaatacacagagaactatttctctactgctcagaaggtgggattcaatcactcaaacaaaatttagatcatcaataaattttctatgataaaacagtacctgggcaaatctgttccatttccaggaaaaatctctgagtaaggtaagaaaacaaaaagagtacctgggcaaaggagtacatgagagtggtgctgagtgatcttggagcagaccatgcgtgtatcacctccattaaagacgatccctttgaaatcaatctcaacttcaacaaaactattattgccttagtccgtgtttctctttataaacaagaaccagacgataatcttggacttatgtaaaaaaaaagatcaaatttttatttttttacacttttgggaaagattacaagtttccaaaagaaattgattgatgttttttgattagtttaatcttcacaagtatcttatcttatctcctgccacatcgaagttggtgagtgataatgtaattatttgcactcccagagatcctccaatttctgtcaaaccataaatcaaataattgcaacaaccagtgattgcgtttagcggttgtatatataacccttaatctaagatcaacatacacatttccgcaaacacatgaaatgctaataaccgcgatttcaaccaccaaaccttcgacctgaccaaccaacaaccatcttggaatatgtttcgaaataacggtccaggaatatttgatttcaattgtaaagaaactaaattgcttctgaaagaattacattatctggaggatatggagaagagccgaacggttgagcggtcatacgaatgcatatatggtaaaagctcaaagcgaggcgtaagttctgcggtcacgtctgtgatggaaaggtccatttggtctgcaagtgtcaagcacacattaaaagtgtctacattgcggatcacagatgcgatataagccaccgcgggactgtgttcttcttgtgtcgtgtctctgtcttcagtctcgagagagccatttcctcttttgggtgggttctttaaaagggctactagcacccgaagtagatgagggagacatgacggatcatagattacatctgcgcctagactgttaaaacgcaagggtcagtgagataagcaacatcttctgctatataattctagattttttactcacacaatatctggacgatattggcttagttcactttccgatgcagtttcccatggaagatgagtgcatttaactcgctgtttaagaaaaaataagaatcaatcttgaataggttacgtgtatcctatatactctgaatcagaaagcaaaaagagagtttaacactcactgtactctgagcttctccgggttgtttgagaaactcgtcatcatagtttaagtgatttctctccaaattaagcttcatgttagacaaagttaaaagatctccgtctgttagtatcacctgctcaagaaaaatatttgtgtgtcaacatagctttgtacttatgatgtgaactttggtaataagcaattaagggatacctctttggcctttacatgtgcaaggcaaatcccgaccataccaactccagaaccaacctaaacaaagcttcatcgaatcatgaaatgaacataatagatcacaaagtaaacctcatcagtcaataaactaacctcaaaacaggctttattggcgaataactctggaaatgacaaaacaaattctgacagaaacagactcgatggccagatggaacacctgccagaaccccaagataaaaaatgagcaacgtgaaacgagactcttgcaattgaatgatcatataaacactcctacccggtatctccttcaagcatgttcaacgaacaatgcagcggaataactaatttcctcgaccttggacaactcgggtgtttgtacgaacctaatccacataataagtcagcaaaacacatctcaatagtaactacaaacaataaacaaacacacacaacaaagacatgactttaccttcagggaaaagaaaagaaatgaatttggttatccttatgttttctttcaccaatatatcttcctaaaacacccaaccaaacttagttttgtttttccatcaactacagaaaaaccaagaaaacttcaaatagcaaagaaaaaagtacaccttagaagttaacatgtaaagagcatactcttcatacacttcatccaatacttcaccattctctaactcaacttcatttatgagtttcttcagtaacttcttcgcgtatgatccgttaccattcgcagcctaatccaatacacgagtttcacagtaaattacacattactacaactcaagattcaattttgcaaacactaacaagtcccaaatcaataacttgactacaaatatcttaaagcttccacatttctccgagttttcaaaagagtagaatttacttacagcttcaacgcaaatttcccagaaaaatctctgggcgttctcagtaattgatcctccagtgcaccctctacacaaaaaagaacatacagaagcaaaatcaaacgccggagctaatggaacaaagaagctagcggcggcgggaatgatggtggttttacctagcgagagtgatgacggagtccaccggttcgatggcgaggaaagcagagagtacattaaggtactgtgattctgcctccgtctccgccgccatgacttcaccgtgtcaagctccgaggatcactagccacatcaaaagcatgcaaactttgggcctaatgggcctatatacaaaaggaccaaataacccttcaaaaaaaacgaaatttctattgtacccttcgccttgcaccatcatttgtcttctaaacacttcagagaatctccccacttcttatccattcgaagcaatgaagccttcttctatcttcttcttcttcttcttcttcctcttctcatg

SEQ ID NO: 23871 - DNA, 3003 bp, Unknown
  misc_feature (1)..( 3003): 2750-1469P.txt file - cDNA_ID_2156314; gDNA_ID_1620817; Annot_ID_169292
tggcctcggttcatcagcagctttatgtgtagctctcacagctgctctccttgcttcttctatttcagagaaaacccgtggtaacggttggtcatctctcgatgaaaccaatcttgagttgctaaataaatgggctttcgaaggcgaaaagatcatccatgggaaaccttctgggatagacaacaccgtcagtgcatacggtttgttctaactgtaaaactccaaattctcggatcaaagtttcaataatatgttagagaaaaccgtttctgtttcgtggtggttgcaggcaacatgatcaagttctgctcaggcgagataactcggttacaatccaacatgcctctgagaatgctaattaccaacactagagttgggcgaaacacaaaagctctggtctctggtgtgtcacagagagcggtaagacatcctgatgcgatgaagtcagtgttcaacgccgtggattctataagcaaagagctcgctgcgatcattcagtctaaagacgagacctcagttacagaaaaagaagagagaataaaagaactcatggagatgaaccaaggtctgctcctgtcaatgggggttagccacagctcaatcgaggctgtgattctaaccacggtcaagcacaagcttgtctccaaacttacaggagctggtggcggcggctgcgtcctcactctattaccaaccggtaaactttgtcaggaactttcaatcatcctttttgtcaatttcggttctttattcttaaattaacccctctctgcaaaacaaactcgtttcagggacggtggtggacaaagtggtggaggagctcgagtccagcggttttcagtgtttcacggcattgattggtggtaacggagctcagatttgctattgatcaggtcggaaaaatcatatttggcctctcaccattcttaaacttgctgacgtgtacgtcaagaaggctgcaattagaaattcaaagagtcgattttttcttataaatgatgtgttgaatgtaaaattgctttattattataccatgtgacaaataattgaaaaaagcaaagattgtttagtttttttttttgtattttgaaattgttatgtttcatgatgggaaatataaaatgacaaagtttttacttagattgtcacattgatcacattatttcctcgtatattcatagtttgtccaacttcatcatttcatagatatcataagctggtcttttggcatgttcatgcattctaagtaacaatctgtataatggtaagcttgcaagaccaagacgatgcaaatctctaacatatgcagttgcttcttcaattttctcctctttctcaaagtactcggcaatcgccatgacgatgttatgggatggcctccaatgacaccgcctcattagtacaaacacttggtgcatagcatcaatggctttctccatattctcacatttcacccatccctccattaagatttcccaggtcttgtagtttggagtacctcctctctccaacacacaaccatgcaatgactcggctttccggatttctccattacgcacataagcacccaaaagaacattggagaccctaacatcatagttaaaacattgagcctcccactcactaaacaccctttcagcctcttcaagatcaccagttttcaccaaagacgacaatacacatatgtagttcacacaactaatcctaccacaaaccgatttagaaacttcccacaaacgaacaactccttccttattccctaaagacgcataaagcgtgataagaaagaaatatccaagcctattacttctattcaacatcttttccgcatcctcaagcaccaacctagccttctcatcaaaaccactcttaatataaacattagctaaagtacacaacgaactccacccaacttcaacactcttatcaccaaccatttccttataaaccgtttccacagccgcaactccagacacttcacaacatgcattcatccaaagattatacgaaagaacgtttcttggtatcttattccctttcatcatcgaaacaaccataactactttctcatactgaccactagcttcataaagcttcatcatttcgttaaacgggtgtggagtaacaagaaaccctaatccattcaacttctccattagagcttccgcttctttaaccattttattcttcacataagcacgaagaagcggaagataagccgatttcgctactctcatagacacagaactatgtagcagcttctcaaaatactcctctccttgtttcaagccatgagttttgatgatcaaatccaatctaagagcaatgtcataaacactaaattcaatatctttttgattctccatccactccatcatctgtatatacacacattactggcaaaatcaaaatcaaaagcttagttctcagttttaattaagggaaaaatttcaaacctggagagcgagatcgtaacgatttgatctaatgagacgcttggaaatcaatcggagctccgataaagagacggcatgacccgaatcgatccgttcctgaagcagagaggtaacgctgcgtcgtggaccgttctttctcagtatctccttcaagctattccgatttgcgactgatgacgtgtccgaaccatctgcaagtgaagacacgagccttgatactacgccggtggtgttgaacctcgtcttcgcaaccgcaacgcaacgaatcagcatttggattttggagccgccgcgaaactggttcggtctttctcgagaatctcagagaagagacggtgagagtggatttgggccgtattaaattaagttgggcttacccggcccatatcaatagttataagcccgtttaaagaaccgacgtcgtatggtcaaaaacctgaaacattagcttccttcttcttcctcaccttcaagcgccgacttcgttttcttcgaatccaaatttctgtgtctgcttttgattcacagagaaggagcaggaaagatg

SEQ ID NO: 23872 - DNA, 3003 bp, Unknown; identical to SEQ ID NO: 23871
  misc_feature (1)..( 3003): 2750-1469P.txt file - cDNA_ID_2156314; gDNA_ID_1620804; Annot_ID_168778

SEQ ID NO: 23873 - DNA, 3003 bp, Unknown
  misc_feature (1)..( 3003): 2750-1469P.txt file - cDNA_ID_2156350; gDNA_ID_1620817; Annot_ID_169302
aagacaagcttatatttcagctaagcacgttatcgcaagcttgagacagtagtaaataaatatgaatggggtttgaaatgaaaatggtacctgaattgctggattcgaggtcaataaaagagaaatcccaaggccatcaaatgcatttccccatgaaccatctgttagtgtcttccacaaccctttagattttccaaactcgcttgtttgcatcctcgatgaagctgtatctagaggctacaaaaacatacaacttaaagttaagcaaagcatatagttttgaagcagagctgagtgcaaaaaaacaaaaaaaacgtacttgagtcaaaacagaggtacaagcaccagcagcagcagcaatgaggagattagcctttgttccaatagacttagaaccaatcctttgggaatgtaacctcttgaaatagctataactatagaaatagatgaaggacgaaataaaagactgcaaattcttagtcccaaggccttgatacaaggagagaacatttcctgatgaaattgcttcccaaaacacatctgacagatatctgtaaacatcacaaaaacagctttaggtacctcaatattatctaatgacaatcacatatgaaccattataatacctaaaaaccttaaccaaaaatagtgattcaaaagcttaagctcattgagaagccttgatcagagaactgaaattttcgatttagacgaggatctacaagggatcaacatagaaatcataaacctaatccaaaaactgaaagttaaaaccgatttcaacaattcagcaggaacacagctaaaattgaagcgtgatgcagagacataaagaagcaattctcaaattctagatcatcatcatcgcgtcgcaatcaaatggaaaaagggaagaaggagagaaacctgtatttctgctgaccgcgaacacgaatctcggcttggaacttggatttacaggtatcaagagggtataaaatggtggtgctgagaagagatccaatggctccggaggtggcttcggagatggattccaaatccaaatcaacacccatatcttcttcttcttcttcttcttcgaagagagaaatgataattgatggtatgggcgatcacaagagaatgattttcgtcttgggattttaaacaaaaagccgtgtaagattgttttttgtgatggtgacgtcatccttttcaatttttcctttttttggtttagtcggtcaaatcatagaatgtaaacgataatatcaaagtcgggccacgtggttttcatgtttaaaaccggcctctacccaatattatttcgaattagggctaggcaaaaatgccgaattcgaatcttaatcgaaacactaccaaagaaggttgattagaaaattccccaaaaaaatatccaaatgaatcttagagttaggtattttgggtatcggataatatataattcgaatcgaaactcgaactagttagtatccgaaaaaaattaaaattaagtaaagtcatcaatccatattatatagttttgagtaattcatatattttcgagtaatttgagtgattaaattagttactttccaatattttagataatttgtttatttgttttttctaccgagttttatttatagaatttggacattttcaaatacttttcaatattttttcttgtaattttgaatacggatcgaatccagataaaagttaatctaaatagtaaaatctgatcgaaaacgaactatgaaaaactgaaccgtatccattccagcccaaatattacaaatatcctaacatgaaatatgagcctaaaaatccaaaaaaattgaaaaacccaaactgaaccctaacgtctaaccataatttaaatgatgtaaacgggtcagacggtatgatcaaacaaacaaaaaaatcaagtagttttaaaagtaaattatgaatattatacagaaaatatgaattaaaggataatacagtatataatatatgttgaaatagacaggtaaaaaaaatataatgaatgatgcgaaacaaattgatagtaaaaacatattaaaaatggttaaaaacataaatgttgtagctgaaatattttactgcataatatgattataagttaaaatcaatacaaattttagacgaaaaaataaatacacggactgtacatgaaaagtataacaacgacaaaactggtgtatcacacacccatgcggttcacgttcaccaagttttactatgtaaactgaaccatttttttcttttttctttttctacttttttttttaatcataaagcgcaatgttgtaagaataatcatgaatggaagacatggttacaatccaaaagaacggtgatatacccgcattcgtccgcgttaccactcaatggcatggtctcatgtcatttcctgtattataatgacattgtcactagctaggtgatattttgttgtataattttatgaaactaaatcataatcttgtaataaataaaacatattgctatagcgatgttgtatggaacatgttttttttgtttaacgtcactgtattcaacacttaataagagggagatgtctacttcaatgtattcaacaactagaaaagactttagtatgcatgattcaataaacgtaaatgcacatttttgtgcctaaattaaagtcattgattaaaaaaactagaatcatttgctttaattgtgcctaaatcatttgcgttacgttcattgatttaaaaaaactagaaaaagagactttaattgtgcctaaatcatttgcttcctaaattagatactcccgattgctgcctatatagtatatggacaggaggaagaatttttaccaaaaaaaaggactaggaatggagaaagaataatcatatgattcgatgaacgtaaatgcacatttttgtgtatatatatacatgatggaaacacatacatagagagacctaaactacctaatacctatacattcaatatattttcatcatctttatctacacaatg

SEQ ID NO: 23874 - DNA, 3003 bp, Unknown; identical to SEQ ID NO: 23873
  misc_feature (1)..( 3003): 2750-1469P.txt file - cDNA_ID_2156350; gDNA_ID_1620804; Annot_ID_168788

SEQ ID NO: 23875 - DNA, 3003 bp, Unknown; identical to SEQ ID NO: 18862
  misc_feature (1)..( 3003): 2750-1469P.txt file - cDNA_ID_2156368; gDNA_ID_1620681; Annot_ID_164449

SEQ ID NO: 23876 - DNA, 3003 bp, Unknown; identical to SEQ ID NO: 18862
  misc_feature (1)..( 3003): 2750-1469P.txt file - cDNA_ID_2156368; gDNA_ID_1620627; Annot_ID_162502

SEQ ID NO: 23877 - DNA, 3003 bp, Unknown; identical to SEQ ID NO: 18862
  misc_feature (1)..( 3003): 2750-1469P.txt file - cDNA_ID_2156368; gDNA_ID_2926186; Annot_ID_200634

SEQ ID NO: 23878 - DNA, 3003 bp, Unknown
  misc_feature (1)..( 3003): 2750-1469P.txt file - cDNA_ID_2156476; gDNA_ID_2926178; Annot_ID_200005
gcagggactactttaggaggtatacttactctctgaggtttacaagatcaatagtcactctgaaacaaaatcttctttagctttctaatatgcaacaatgctttaaagttctttttctctcatatgtctttctacagattactatttcgtctctcggttaccggtggtagagaagagacttgcacaaggcggaattcgcttggcagggactcttaaccgaatattttctgcaaaacggaagcttgctagagcatgaaaaaagatccaggagaatcacttgaacatccatgaacactcttatgtattaataatgtgtaatggtagtagttaaggttatggtttggtattgttcctgcgttttaactataataagtatgaaacgaaaactgtacgtctacaagaaaacatagcatttgacttgaaaaatcaaacttaactaaaccaaaaccaagatgtttgaatttgaatcgaaaaatgaactaaaactagcataaaatcttacttgttttatcattcataaacctgaaaaaaatagaacctaagtgaaactatagtttgagtgcaaaaacaaaaatctgatcattcaaatcgaaaaaccgtaagccaaaaaattcgcatcaagaaaaacacatttcaatgaaattacaaagtttgatcacgattcatgatgatagatatcttggagtctgacatccaaaagaagagaaggaaacagagccaaggtcaacttgccggacaccagaatcagttaattagattcattggtaaaaaaacccggcaagtcatccttggctcaacctcattctctattcttccatgcaagaccctctgatacaactagagactctcatcatcgtaatcatcattatcatgttttctctacctttcttttcttgtcttgtgatcttgtcatactcgtgatgaaggtatttataggcatattgaaatgggaaatgtgtggattaatttaattgaaaattcatataatgttattatatgcaataaatccatgcatggttttaaactagtagtgcatgcaagctacaaaataaaatggaattttgaccacaaccgtatattgaagaatataattactttaaaagattggctgaccttatattatcaaattcgaataagaattttatgtgaataatattcgtactctgaaggcatcgacgcatcgtactagtgtgacataaaaatccacgtgtcgtatgtttcttaggattggaatcatagtcttgtgtggggttgatcaacaaaaggtgttatcgattgtcgtagaaacaatttagaaagattctttataaatagtctttttaaaaacattgccacaaatttcaaatgttgcggataaaatggaatatatattgaaaatttcagattgtcctttgggttgagaatatatcatttggagactcatcacattgtgaagggggagtactagtaaataaattttttcccaaagccaattgttgcacgagctagtaaataaatagtaatacatgtgatccaaagctattacacactctttatagctactagagtttcgatttgtgttatagctcccgatcgattaattgggataagccggttttattccatcaacatgaagcttccataaattcactatatcaaataaataattaggccaaaatataggaaattaaataagaccatttaaatagatctaagacgggagatattaggattgattatcttcaaattatgttttcaatttcattagttaggatttaattacatataggaatagaaaaattaccatcaaatggggaagatgagcaatgttcatataggattataaacaagtaaaaaaaaaaaaaaaatttatttttgggtaagaaatatatgagaattttgtgcgcgttccaaaaactcttgtaaattttggcaagcttatgaatattacataaagtttggtatataactggaaacatatttatattactaaaactcgtttaatattaattgctaaagaaagaaaacaggtaacaaaagcgttaaagttaactttgattctatttattgatagatcccatcattagattatgaaatatcgtatccgattagataaattcattaccaacctttttttctttccttttggtaaactctttcattttaaacatattgaatgttaagtgggattgctaacataaaatagtaaaagtttttttactataggacaacgatccaattccaagctaaagattgatatataactagaaatggtatttaagagcttatgactaacactagagaccccatctaagcccataaaatgaggttatctaagcaagttatgtctcacgtaatgatcattattgggctttatgggtaatctatcccgttactccaaatctagttcagctgccacgtcactctaactaactcgttggaggggaaagagtgatattgaagcaaacaagaacaacgacgattatgggttttggggttttatccatttctttgtctaattttatcagattttgtctagatttttggatccaaattattagcggaaatcgaaattgggttttacggttaaatctcgttcttgaaagcttcccttccatggggctttttatctggacttaaaagcttgtgctagtctcacttgatactaatgtaaaggaaggagctttggaatgcttaattggcaagtgactagtggcacaactgtcagtttatatattttgattaaacaaatcaaacgtgggtctgtggatgggcaataaacaacaacataaattgaagaatatcatcaccccaaatggtcaatggatagattagagaaatagaaaaatcaaaagaagctttggcaaagagctaaagatcaaagcttttctttgaggtaattcgtttgactctttttttttttttttttttgcttgaatcgtgttgttctctttgttctgctagagatttgatctgtaaattatgtgatttattaagaaattgaaagctctgtgtttcagaatg

SEQ ID NO: 23879 - DNA, 3000 bp, Unknown; identical to SEQ ID NO: 3253
  misc_feature (1)..( 3000): 2750-1469P.txt file - cDNA_ID_2156487; gDNA_ID_1620635; Annot_ID_47343

SEQ ID NO: 23880 - DNA, 3000 bp, Unknown; identical to SEQ ID NO: 3267
  misc_feature (1)..( 3000): 2750-1469P.txt file - cDNA_ID_2156487; gDNA_ID_1620635; Annot_ID_162856

SEQ ID NO: 23881 - DNA, 3000 bp, Unknown; identical to SEQ ID NO: 3253
  misc_feature (1)..( 3000): 2750-1469P.txt file - cDNA_ID_2156487; gDNA_ID_2926178; Annot_ID_140438

SEQ ID NO: 23882 - DNA, 3000 bp, Unknown; identical to SEQ ID NO: 3267
  misc_feature (1)..( 3000): 2750-1469P.txt file - cDNA_ID_2156487; gDNA_ID_2926178; Annot_ID_200010

SEQ ID NO: 23883 - DNA, 3003 bp, Unknown; identical to SEQ ID NO: 18950
  misc_feature (1)..( 3003): 2750-1469P.txt file - cDNA_ID_2156491; gDNA_ID_1620635; Annot_ID_162858

SEQ ID NO: 23884 - DNA, 3003 bp, Unknown; identical to SEQ ID NO: 18950
  misc_feature (1)..( 3003): 2750-1469P.txt file - cDNA_ID_2156491; gDNA_ID_2926178; Annot_ID_200012

SEQ ID NO: 23885 - DNA, 3000 bp, Unknown
  misc_feature (1)..( 3000): 2750-1469P.txt file - cDNA_ID_2156549; gDNA_ID_1620677; Annot_ID_164279
aatggaatataatgaaatgaaaagcaataatatgaaaccgaaatttcttctctttttctattaaataatatactactagaaaatatagagacaatgtaaatgtttgaccaaaaaaaaaagtgtgtaaaatgaaattatgaaaatgaggagcacctagtcaaattgtgtgagacacgaataaattccttcgtttcccttttcagcttttttctacttataattttatgttacaaaatcataaaagcgacagaccaaaaaaaggaaagagagtgaagtgtgagcagtgagagaacccaaccaaactcttctgtcttcaatacaataataaaaaaacctcaaagttggaacctttctttcttcagagtctttcttcttcttctctgctccgtgacaaacgatgctctgtatcaaagccgaagctcttcatgaagatcaaaaccttgcttcctcttcttcttctcctagcaccgatcgcaccttcggaaatgccacttttcgtcttcccatcaattggtatatatactctctctaaatctatacttcttcttccttctctctatgctcccgatttgttttgtttttttggtttgctgatgttttctgatacaggggaagctcgatccggagatatctgaagaagactggtacattctcgagaagatcttactcttctggtgatggctctttgttttttcctgatctcgatgtaatgtacctctttctctctctcatatatctctgccttttattcttatctgatttcttggaatgtatttagtaaatctagggttttgagggggttatggtcacgccaaaggttttgaaattgcatttttgttttttttttggaagcaggaaagcaagatgattgatcaaactagtggtagatttgatggaaagaccaaactatggtacaaatgtgagcttgaacaagatgtaagtcactcagatccctcacttgcttctctttgtcgtacttatttatagaactaagtcacatttaagaaaccactgaaaagtttgtactactactgctaatggtaatggttaatgatatttgggatgatgatacagattaagagattgcagcagcagttacaagaggagattaacttacggttagctctaactagcgcagttgagcattctagttcaccgtttatggattcgccttgtgaacttcctgataaggtactcaatcctctttctccgacatataaaaatcttatttgttgtttttgctattgagtttctttaataactttatagagatttttttcaggcacaggagcttttggatagcttagcaatattggaaatcacggtgtcaaagcttgagcaagaatcagtttccttgagatatctacttaggcaagagaaaaacgagcggcgtctctctgagattctacaaaagaagtctcattattctgctccttcaaagttcactaatgctcaaaatttccctaacaagtcggtatgactctctttacaaagttttctgccttcttttgttctagtttctaaacagataattccttctggtttgacaggtgacgaggaaaagagagagtaaacaagtggattctttggatagtgaagctttgcaagtagaatgaagaagcaaagagttattatgtgatcttagggatagccatattggctggagagatcaacccatgggcaaactctttctcctctaattttagaatcacctttcagactcaccgagctggtccctgagcatctattcaataagaactctgagatcttagaaagatacactaaggggtaaggttgataggacgggttatgccctgcaggaggagctgcagtgaggagcttaattgtattctgcatctaagcatagaatccattgtggtaggcttataatcactaaggggattattggttgtataagttaaagtcatctcccttggatttaaagtaaattacgtaagatttttaattttttggttcctctattagtttatcataaccttattaaaatttgtaacaaccatacaattgttgcattgaaaatattaacaaagaaactgttgataatggactaatgcttgttgattagaacatgaactagtagttgccatccggaactaaatttttaagaacttaaagagtaggttttgtaattacaattggactaacagaagatataaaagtaattaatctatattatgatcggttaactaccgattaaattaaaagaatgataatgtgaggcgttaggtttataattatattgagccttaatggataaacactatggcctgtccaaaatataaaattacacctgaagattgtgattgctgcattgaaaatattaacaaagaaagtgctgataattgacaaatgattgttaatttagaataagaagtagtgtgtagttgtcatccggaattaaaactgaagagttggttttaaattttaattacagttggtttttggggccttattatgtcttttaatcagtagtttaccgattatattattataatataaattaataacttttatctattttgttagtcaaagtcctaaaatatttttgaaagcccattaatgtcctaaatcggccctgttccaaattttttggcttagcaaaatggtgatatccgattataagcacggactaaaaagataagataaggttttgttaaagttttattgttaaaatttatatatggtagtataaattatatttaaaaaagttataattagtagcgatatatagtatgtttttggaatctttaaaaccaggtcacatggaagtgtcgaacaaaagaataagataatacaggtaattaacaatccttagtgggctgaacgttgaattaagaaataaagccacgagtttggttttcttgttatttaatttacgtctctctctatttatatgtttaacgttacacttattaagatcgtaccttagggaaaaaacactcaacagacaaaaaaaaaaaggaaggcgcatcagtgatg

SEQ ID NO: 23886 - DNA, 3000 bp, Unknown; identical to SEQ ID NO: 23885
  misc_feature (1)..( 3000): 2750-1469P.txt file - cDNA_ID_2156549; gDNA_ID_2926204; Annot_ID_202029

SEQ ID NO: 23887 - DNA, 3003 bp, Unknown
  misc_feature (1)..( 3003): 2750-1469P.txt file - cDNA_ID_2156553; gDNA_ID_1620677; Annot_ID_164281
ctacacactacttcttattctaaattaacaatcatttgtcaattatcagcactttctttgttaatattttcaatgcagcaatcacaatcttcaggtgtaattttatattttggacaggccatagtgtttatccattaaggctcaatataattataaacctaacgcctcacattatcattcttttaatttaatcggtagttaaccgatcataatatagattaattacttttatatcttctgttagtccaattgtaattacaaaacctactctttaagttcttaaaaatttagttccggatggcaactactagttcatgttctaatcaacaagcattagtccattatcaacagtttctttgttaatattttcaatgcaacaattgtatggttgttacaaattttaataaggttatgataaactaatagaggaaccaaaaaattaaaaatcttacgtaatttactttaaatccaagggagatgactttaacttatacaaccaataatccccttagtgattataagcctaccacaatggattctatgcttagatgcagaatacaattaagctcctcactgcagctcctcctgcagggcataacccgtcctatcaaccttaccccttagtgtatctttctaagatctcagagttcttattgaatagatgctcagggaccagctcggtgagtctgaaaggtgattctaaaattagaggagaaagagtttgcccatgggttgatctctccagccaatatggctatccctaagatcacataataactctttgcttcttcattctacttgcaaagcttcactatccaaagaatccacttgtttactctctcttttcctcgtcacctgtcaaaccagaaggaattatctgtttagaaactagaacaaaagaaggcagaaaactttgtaaagagagtcataccgacttgttagggaaattttgagcattagtgaactttgaaggagcagaataatgagacttcttttgtagaatctcagagagacgccgctcgtttttctcttgcctaagtagatatctcaaggaaactgattcttgctcaagctttgacaccgtgatttccaatattgctaagctatccaaaagctcctgtgcctgaaaaaaatctctataaagttattaaagaaactcaatagcaaaaacaacaaataagatttttatatgtcggagaaagaggattgagtaccttatcaggaagttcacaaggcgaatccataaacggtgaactagaatgctcaactgcgctagttagagctaaccgtaagttaatctcctcttgtaactgctgctgcaatctcttaatctgtatcatcatcccaaatatcattaaccattaccattagcagtagtagtacaaacttttcagtggtttcttaaatgtgacttagttctataaataagtacgacaaagagaagcaagtgagggatctgagtgacttacatcttgttcaagctcacatttgtaccatagtttggtctttccatcaaatctaccactagtttgatcaatcatcttgctttcctgcttccaaaaaaaaaacaaaaatgcaatttcaaaacctttggcgtgaccataaccccctcaaaaccctagatttactaaatacattccaagaaatcagataagaataaaaggcagagatatatgagagagagaaagaggtacattacatcgagatcaggaaaaaacaaagagccatcaccagaagagtaagatcttctcgagaatgtaccagtcttcttcagatatctccggatcgagcttcccctgtatcagaaaacatcagcaaaccaaaaaaacaaaacaaatcgggagcatagagagaaggaagaagaagtatagatttagagagagtatatataccaattgatgggaagacgaaaagtggcatttccgaaggtgcgatcggtgctaggagaagaagaagaggaagcaaggttttgatcttcatgaagagcttcggctttgatacagagcatcgtttgtcacggagcagagaagaagaagaaagactctgaagaaagaaaggttccaactttgaggtttttttattattgtattgaagacagaagagtttggttgggttctctcactgctcacacttcactctctttcctttttttggtctgtcgcttttatgattttgtaacataaaattataagtagaaaaaagctgaaaagggaaacgaaggaatttattcgtgtctcacacaatttgactaggtgctcctcattttcataatttcattttacacacttttttttttggtcaaacatttacattgtctctatattttctagtagtatattatttaatagaaaaagagaagaaatttcggtttcatattattgcttttcatttcattatattccatttcggtatttatttttccataaattacgaaaaatgcttcatgtgtttttgaggactcaatgtatcatgtgtagggtaaatgatgacgcagataaacaaacagtggaatatctaactttaacatgttctttttctgaatcggactcaaaagaaagacctgattgcaacatatgagtcacacactcacatagagaaaaagattccaatcgtatcaaagagtgaaccgtattatggtttagtcaatttgacacaaaaccggatcaacccaatcgaaccagcctcaatgacaattttgggaccgacttttaaagacgtgtgtctctttattgtcgccgttcaattggtaagaggccacggcgtaatcgtaggacgacgacgaaacatatttttctttagtgtttattttatttttgtgttgggtttcagtttcaaagagtcccaccaatgaccaaaaagtgctccaatgcatgattattacgttggagcctcttcgatagagagatttttgctttctcaatttattattttttgtgtctctctctcgcccgatttggagtttttagggtttgatttttgtaatgtgagaaaggtttcgttatg

SEQ ID NO: 23888 - DNA, 3003 bp, Unknown; identical to SEQ ID NO: 23887
  misc_feature (1)..( 3003): 2750-1469P.txt file - cDNA_ID_2156553; gDNA_ID_2926204; Annot_ID_202031

SEQ ID NO: 23889 - DNA, 3003 bp, Unknown
  misc_feature (1)..( 3003): 2750-1469P.txt file - cDNA_ID_2156563; gDNA_ID_1620677; Annot_ID_164286
cagctgcataaacagacacactgcttctacttctaagccattttgagctattccggcaataactgaattccacgaaatcaaatctcgttcactcatattgtcaaatactgtcctagcgaaaccgaattttctcagtttacagtacatgtttattagactattcgaaacagtaagcatcaaatcaagtcctaacttcaatgccatacaatgaacttgctgccctaatgctaaactatctactttaacagctgtagctaacattaaaataaatgtgacttgatcacattccacgtcggactctaccatatccgcaaaacatttgagaagagctgaatactggcctgaatggagatattcactcaatcctttgttcctgaatattatttctgaaacagaagaagcatcattaccatttgcaaaggatttcacttgtcctgcatcagaatcatcacctgaaattctagcaagtaaacgcagagtgatttcattgggatttaaaccacttgaatgaaatgcagaagagaggtctattgcttcttccttaaaacccatttccagataagccttcaacatcaagttccataacaccacatctctataaggcatctcctcaaacaaaaccttaccttccttaaccttaccaaacttcaaatatatgttaacaagagctccggcaacaaattcatcaccgtccaaaccaatcttgcaagcatacccatgaaatgactctgaagcccacacatacccagaatgcaaacaaagtttcaacattggagacagagtcattcgactggtatacacaacgtcctggcgtaatatcctgaaaagaagaaaagcttgttgaatgttctcgacaacgcattcggaagactgagcataggcagctaaaatcgagttccaggaaacaagatctctgtcaggcattttatcgaacactcggcgagcataagtgagtgatccacacttggagtacatggagatgagattgttaatcaggaatcgttctgggttttcctcgaaggttaggatacgtgcgtgtgtacattttccgagcatcaagtccgacgaggtgattgcattccgaagaaagccgaaccattgtgacgaagacgaggaagatgaagacggcgaagcagcagaagtaaaacgcagaggacggagacattgaacaatgagagatgtgtgaaaggagaaagggatggccttggaggttgatcgcatgatcgggttaaaaatgtaaccttttaaagttgagaggtgttatcttgcaaaccaagcaactcatgagatggtaaccggtttttgcgtaatcttgtctccggagattccaattagcatttgaccaaattaattggttcaaaattaaacctaacaaacaagttttcttatttaatcgacgcttagacaaccaattaaagtttatttaatcggcgcctatacaaccaattaatttttccatatgcccgttaacttatattcatgtgctttaaaaggttaaaaatacaactatattttgatcaaaagttaatgtacgtgcctaaaatagtttaaaaaacaactgtagtcgtttgtgcttttggtccaatccttatagcttttatacctctctttaagttgggttaggtatccctttatcggggttgggtcttttaagtttcagtttttaaaaatatttgggcttgacccattttgtaatgttccatcttatgataaaaagtcaataaacagatctttaggcaaaaaaaaagaaaaaaaaactgtacagtagtgaacaataagttacacaacaaatgaaatctcgacccacgcgctgcaggtcctctcaattttaaatttatgaaaaaatccccaaaaaggagggttatagtccacggattatagtctcacgcgctgcaacgcgcatgtgatgcgagtggttttgtatttttaattcctacacgcgtgtagttctatttgaataaacttcaccaatcacaaccataatcgttctatgtttctttttgaataaacacttcggatttcctatatttcggactccaattcggattttcatggctaaggttgtctgaataaattaattcctatgaatttaacacgaaaataaaaatacaactatatatttgctcgtattaaaaacaaaaatatataaaagatttttttaaaaagatagaaaaccccttaaactaatacaatgtacgctcaggcaaccatgaaacacgttttaggctccaaccacctgaaaatctgatcttggcctaagaatattggacatatctaaacacaagttttaagatttgacacgaatttcgacataaataaggctttaaatgggggagatttatcatttgagtatagttttgtttttttggcagctgtaaaaattttgttattatatttttggaattttgttttgagacacaaaaatcgtaaaaacagtttttggattctctaccaaaaaaaaactcctagattttaggaaaacaaaatctttaagaagttgattaggtaataaactgttttttttttaatagtaaatctaagaaccgttgtctttttgtttggttcaacttcaaaaaccattgtaatatctagtttttttacatggactttagaaatcattcttgtacagattcaaggaaaaacaattatcgtgtatattaaagaatggaaacaaatataaaaatcacaccattccttcaacgttacatccctacacattgaatacgattatcttccatattatgatctttttaaaaaaaaagattttgtccatttctcaccctttctcatactctctttttttctcggacaagaaggctacagaaagatatgtcgctgtcgtcttacctcagcccgacgcgccttctagaaggctacctccgccgttgtctcagggcggcaggactgacgtcgcagacgctttccatagactctgaaacaaccatccacttctggggcccaccacctctagaccaccggagcgacgatgacagaccggttatg

SEQ ID NO: 23890 - DNA, 3003 bp, Unknown; identical to SEQ ID NO: 23889
  misc_feature (1)..( 3003): 2750-1469P.txt file - cDNA_ID_2156563; gDNA_ID_2926204; Annot_ID_202036

SEQ ID NO: 23891 - DNA, 3000 bp, Unknown; identical to SEQ ID NO: 3977
  misc_feature (1)..( 3000): 2750-1469P.txt file - cDNA_ID_2156571; gDNA_ID_1620677; Annot_ID_164288

SEQ ID NO: 23892 - DNA, 3000 bp, Unknown; identical to SEQ ID NO: 3977
  misc_feature (1)..( 3000): 2750-1469P.txt file - cDNA_ID_2156571; gDNA_ID_2926204; Annot_ID_202038

SEQ ID NO: 23893 - DNA, 3003 bp, Unknown; identical to SEQ ID NO: 19210
  misc_feature (1)..( 3003): 2750-1469P.txt file - cDNA_ID_2156638; gDNA_ID_1620649; Annot_ID_163397

SEQ ID NO: 23894 - DNA, 3003 bp, Unknown; identical to SEQ ID NO: 19210
  misc_feature (1)..( 3003): 2750-1469P.txt file - cDNA_ID_2156638; gDNA_ID_2926215; Annot_ID_202935

SEQ ID NO: 23895 - DNA, 3000 bp, Unknown; identical to SEQ ID NO: 3472
  misc_feature (1)..( 3000): 2750-1469P.txt file - cDNA_ID_2156681; gDNA_ID_1620648; Annot_ID_163317

SEQ ID NO: 23896 - DNA, 3000 bp, Unknown; identical to SEQ ID NO: 3472
  misc_feature (1)..( 3000): 2750-1469P.txt file - cDNA_ID_2156681; gDNA_ID_2926214; Annot_ID_202844

SEQ ID NO: 23897 - DNA, 3000 bp, Unknown; identical to SEQ ID NO: 3481
  misc_feature (1)..( 3000): 2750-1469P.txt file - cDNA_ID_2156691; gDNA_ID_1620648; Annot_ID_163322

SEQ ID NO: 23898 - DNA, 3000 bp, Unknown; identical to SEQ ID NO: 3481
  misc_feature (1)..( 3000): 2750-1469P.txt file - cDNA_ID_2156691; gDNA_ID_2926214; Annot_ID_202848

SEQ ID NO: 23899 - DNA, 3000 bp, Unknown; identical to SEQ ID NO: 3493
  misc_feature (1)..( 3000): 2750-1469P.txt file - cDNA_ID_2156727; gDNA_ID_1620648; Annot_ID_163345

SEQ ID NO: 23900 - DNA, 3000 bp, Unknown
  misc_feature (1)..( 3000): 2750-1469P.txt file - cDNA_ID_2156755; gDNA_ID_1620648; Annot_ID_163360
catacgtcaggttgtaaaatgttatcagccccggtggcaacgatcccagcttccacagtgttctgtcttcattctgcatcaatcatatattaattgacacatccattcatcatccaaaaatatttatatgtatttcttttgagaaatttccaatgccttaccaagtcttgccaatagtgatatatccctgtaatgttccgtttcctccactctttcaggtcaaacatattcatcccaaatgcccacccacaagcaccagcgtcaaaattctctgaaatctttggatttgagaagttgaggtacttgtcaaatctgtggaagctctccttgcacgtctccaccgcaccattcacttttccttgcatgtctatttcccatagtggtgccaggtccttctgcaccacaatgtcatcgtctagaaacagaatcttctccagcttcggataaacctcaggaaggtagaatctgagatgattcagcatcgatagatactttgggttgcggtactttagattatctgcgccagctgagattgatgaaggatgatttgctttgaaatagtattctttcagccttgcagattcaagctgccgtagaacagagcagtaagaggagttcagccacttgaaatcatttatgttttcaacttgaatcgtcgcatcagcaggagcattgatgcgaaaccacatcttcattgcaccaaaattcagtttgtcagttactatatggaacacatgcctctgcggttcctttgcattcaagacagtggagttcaccaccactgatgtagccagaacgttatccgaaaagatcgcatagtgatagagcgaaggatcttcaagcttcttttgactgacatcctctttcactgcatcctcttcattgaaacctagaataaaatagtctgccgctagctgcagactcaggcaatgcaatggcttgggaaatgttttggcagctagctgaattaagaaggttccctttttcttcagtccatctactttgcgttcagtggactgaaggatggcccggaacttttttgcaagttcatggcagtcatataactcgtcttttgcaagagagagtgcatggcccatggcttttgcttgatcaagagcgctagcaaagaaaatgggatggaaaaagtttcaacaaagattgttgtcccacaaagattgctgacaagaggaatgtaaaaaagtaccttgaaggaaggtcagcatcagaggttgctttacctataacacgtttattttctccacactgctgcatcaagaaaacgtacagattggttacattttttgatttggcaatatttgcatatgcttttgccattatgatctggtctctcataagcttcaagatagcatcagcatttgggctctcatagtctctcctccatatactgtatttccctatgactgagttttcaaagctcattgacttctgaatggctgcttcttgcatctgctcatcagtttccttttcttgtcggatcagctctaaagttcgttgacctctcctttcctgacgtaaaatctgaaagggtctacagttgttacaatctcagtcatatagtgttaaggcatccagagattagaaaagaaggctatttgacagatcacctgccgcttcagttttgctgggcttgcaaaatccacgtttggaaactgattttcgctttcatcagtctgattagttgtagaatggcttgcattatcttccattccagtatcattttgaaatgaatcccgtggtataactagctaattccatacaaaaaaatgtcagcaactagagaacaaagaatatgagcaagcttaaggataaattcaagaaacacaaggttagaacaaatgaagttcatgagaggtattttttgctcggtgagaagagtggtaagtaatcacttcacacactttaagttttctactatagaactccatatgcccataggatatacagttctattcttaaactgatgatcaaatctcattaaaactaaaaaccagaacatgaaatgtttggtacctgcgaaccttttgttttgcggctaacttgataggcaggattctccaaaacccaagaaggtgaaagatcccccattttcaccctaccaaggcgtatattgccgtaatggtcactgtatgtcgcaactatgttcacatcctgagataacagctttattagaagtaggaagcatacaaattgtattcactactcagagaaagaggactgcagccttactttcagatctggatcgtagtgcactgcagcagctgaggaagcatacacctcctaaaggcaaaagtggataacaaaaacttaatcacagcaaagtctgatatttgaaccaaataagttatctggagaacaagaggagaatgggacctgtagattattatcttgcagcggacgataagctttaagttctctgtggctgcataaggaaacatcatggcaaaaagaagaaaagagtataaaaataaaatagaaacagtgtagccaaaagacaagcttcaaggagatgtatcattacggtgcttgtgactctaaaatggctccaccgacatgaacagcatgtagcactactacctgcaaatcgtcgacatgtcaaaaaattaaggcacaatttgatcagatgatccattttaagagagtagtgcgaattccaggacgagctaagtaaatatagataatcatatcgaacggagagagaacaatcaagctaggtaccagcgataaaaaggcggcgcatgtagagaacgtcgtcatctggatctgactgatattaccacatcgccggcgagctttctttaaagcaaatcaatcaatcgagaggtttgttaaaacctgcacgtgctgccgtttcgtggtaagaaaaactacacgcagtttctttaagtagaagacggagaaaaaaaaaaaaaaaagagacgacgactttgattagagcagagagatggttggttcgttggttcgtcggaggagaagagaatg

SEQ ID NO: 23901 - DNA, 3000 bp, Unknown; identical to SEQ ID NO: 23900
  misc_feature (1)..( 3000): 2750-1469P.txt file - cDNA_ID_2156755; gDNA_ID_1620652; Annot_ID_163481

SEQ ID NO: 23902 - DNA, 3000 bp, Unknown; identical to SEQ ID NO: 23900
  misc_feature (1)..( 3000): 2750-1469P.txt file - cDNA_ID_2156755; gDNA_ID_2926215; Annot_ID_202902

SEQ ID NO: 23903 - DNA, 3003 bp, Unknown; identical to SEQ ID NO: 19082
  misc_feature (1)..( 3003): 2750-1469P.txt file - cDNA_ID_2156784; gDNA_ID_1620678; Annot_ID_164329

SEQ ID NO: 23904 - DNA, 3003 bp, Unknown; identical to SEQ ID NO: 19082
  misc_feature (1)..( 3003): 2750-1469P.txt file - cDNA_ID_2156784; gDNA_ID_1620643; Annot_ID_163101

SEQ ID NO: 23905 - DNA, 3003 bp, Unknown; identical to SEQ ID NO: 19082
  misc_feature (1)..( 3003): 2750-1469P.txt file - cDNA_ID_2156784; gDNA_ID_2926213; Annot_ID_202781

SEQ ID NO: 23906 - DNA, 3000 bp, Unknown; identical to SEQ ID NO: 3375
  misc_feature (1)..( 3000): 2750-1469P.txt file - cDNA_ID_2156792; gDNA_ID_1620643; Annot_ID_163105

SEQ ID NO: 23907 - DNA, 3000 bp, Unknown; identical to SEQ ID NO: 3375
  misc_feature (1)..( 3000): 2750-1469P.txt file - cDNA_ID_2156792; gDNA_ID_2926213; Annot_ID_202784

SEQ ID NO: 23908 - DNA, 3003 bp, Unknown
  misc_feature (1)..( 3003): 2750-1469P.txt file - cDNA_ID_2156864; gDNA_ID_1620678; Annot_ID_164316
ataaatttaccttccgagattgaactatatccaacgtcttctggaaatcttcctctcgacgtttaagttcagctagtgattcccactgatctggtatttccaggaaacgccttaaaaaagaaaattagagaaaccaatattaacgatttatccaaaaatacattatccatgtctattagaaatatttaataagcatatctataaaataagatatttactccaattgtttttccacttcggccagtcgtgcattgacttcttcgatctcatcttcgatctcctattttaagaaaaaaaaaagcatgcataagtactttaacttttttttgtttatatacctatatattgccaaatcatgagatttttattttattttaatcaacatgcctttggttgaattagataacgaagcccatcgtcaagactctcgtcactgcacttggtttctgaacgcatctgcatgaccaaccgttgtatattctagattctccataccaatcaagaaaaacaaaaaatttaggtaacgttaaacaaaatcactatacgaaaatcgagatgaattaaccgttagatagttttgatttttttaccggttcatgagggaggctgtgttcgatcagatggaccaaccgagtacaatatcaggagttcatgcatatgtataaaataagaatattagaactcatacaataaaattaaacaaacctattactttatgttcttatatataaatgcatgcattaacacaatgaatttaccgtgtgcgtacagcccgagcaagaaacttgcatataatctcttcgggtctataatcatgaacaataacgatgatttgatatcagatgatagtaataatatatatgatgaaataataaaatattggagctacaagaagaagaagaaaatgaaaacgtaatttattaatataatatacctctctttggcataaaagacgaagagtttaccagaaggagagaaaagaatgagagcaactggtacattacatagaacaaagagttcataagctttctttaaaagcccattttttcttttggcgaatgcaatatttctttgttgcctatcatttattcttttaatctgtatttttactctccccattttttcttgtcttcttttcacaatgttttctctttctcaattagctttcaaaatattttttataagtttatttatatagttatgagaaagaactttctatggctaaacttgtagattttccattaaattgtatcaaaattactaattactttaaattaaataaatttattaattaacatagaaccataatcttgtttgtcaatcaaaagatttagttttcttagttaatcttttcttctccagatatataaatgggtattatctattgcacatatattttataaattgaagtaaataattaatatatttataatataaagtaaatgttatattcattagattatgaatttggataagaaatctcatttattatggctcagtggcccatttcatcccatatatgaattgtgttatcaaaatttatgtcctggatgaattttttttaccaaatactatatgtaatgaaatgttttgaccaaatatatgtaatgaaaaaaataaaaaaaattgggtcaaaagggaaagaaatccttctctagaggataatggaccccacttgtgtaagataaaacagtctctctctctcccccacaagaaaaagcctcgaccacctaacgataatggtggctatgagatctccgtcttttctccgtcgtgtttctcaccgccgattataaaatacttatctactaccatctccttgtcggaaacggcgagctaagtcgattaggtatttattccttttatctcttttatctgttaaagctttcttagggtttttgtttttgttgttttgcatttgaaattgtgatctcatcgactatcaagcttcgaactttacattagggttttgtgtaaattcgtgttcttcttcactttctctttccaattcgacgcatatggatacgtgatgaaagttttcgaaaatttgttcaatttcaagtttagttctttatgactctactgattccggatttttctagggttttaattgagaagaaataaaaaggatattttggtatggaggtgaaggaatcgaagatagatatggatgattcagtcaataaggagattggggaattaccaaaagatatgccttgtactagtaactatgaggaccatagttttcataatcatgttgaagaagatgtcactgaggatcttccttgtggtggtgatgatattgatgctgatgcttctattaaaaaagaggttgcagagttcgacgaggacgaggttgatatattggaatgcaatgataacattgagattcaagtctcagggtgtgatgatgggactgatggatattcgagttcgtttggtggaacggattctgaacatgagaatgatcaagaagttgactccatgatttgtaatgagacttcacttcctctttgggtgaggtaagctctttcctcacgcttcttatttagtcttttatcttaatggtttccatgaaggtttgttgtgtgtttaaccaatagcagaatgagaaaaaaatgtcctcttgcttaatttggttttgtagagattttgatggttttggtagcttgtgtacttttactttttaattgaacactatcagttccatctctatgttgctggattcttaaaagactgaaatttaggagttacttgggttcctgtactaatgagaaaaacgtctgtagcttaatttggtgttgtagattttcatggatttggtagccttgtttactgttacttattattgaacactatcagttccatctatgtgttgtttgattgattctgaaaggacttaaatttgtgtgttactttactacgacttagctagctgcgtctttgatttatctccttttaaggaagtcaggagaagaattgctctatatcgtgaatggtatg

SEQ ID NO: 23909 - DNA, 3000 bp, Unknown
  misc_feature (1)..( 3000): 2750-1469P.txt file - cDNA_ID_2156872; gDNA_ID_2926213; Annot_ID_202769
gagcatcatcaaggataaactctctgtacgcagcaagaaagataaagttattgatctttctaaagatgagaagatcgaaaaagtcagtgtttctttcttctcgcgtgaatgatactcgttttatcattgttctcttactgtatttcctcacgagatgcagataatgcgtgctgaaacgtgtgatgagctacacaatattgttggtgaggatttctgggtggctacttggtgcgacagtaccggatctgaagggtgggtttgttgatttgtcccgtaattctcttcactgaagattttctgttatgttgattttgctttctttgttcatatcttcaggaaacgcctcgaaggaactagaatcacctgcattcaaaaaccgtaaattttactttttgttgcatgtgattaacacaaatcctaatcacaccactttcttcaataaatttctctcgtgtttatccaggggaaggctggggtatgatttttcaattcgaactccatgtacacctgcaaggtggagcgactttgatgaagaaatgacctcagcttgggaggtaagacctaagcatatgcaaataattggtatttcttttgtttctgagaaaacaaactcaaaagtctaactgaatccacaggctttatgcactgcctattgtggagagaactatggttctactgagctcgacgctttagaaaccgttagagacgccatcttacgcatgacatattactggtaaacgactatgacaacctaacgtatgattgattaattactcggaagctgttggtatttaatagcaatcattggtttttttaccaggtacaattttatgccattagctcgaggaactgctgtaacaggatttgtagtgttacttggacttctgcttgctgctaatatggagttcactgagactatcccgaaagggttacagatcgattgggaagctatacttaatgtcgaaccgggttcctttgttgattcggttaagtcttggttatacccgtccctgaaaatcaatacgtcgtggagagaccatacggaaatttcctcggctttttcgacaacaggagcggttgttgctgcgcttagcacttacaacgattgagattcaaatctctctctctctgtctctccttctctctctgtctctctgtgtctctctcacaatctttcataagaggtgaagaaggctaactaaaccatgagcagtaagaaaacttgtgtttcagtcaaacatcttccgtctgtttctgatctaaaaaacaaaaaaaaagctagaaaagctttgttagggttttaactttattaactctcgtgtttaatataattttacagatttaataatgtatctaaatatgatttctctggtctcaacatgagaggttccaacatgagagtttacaacccttggccgatcttatgttgttttaagtttattctgacacctctttttttaatacaatcttctgtctgctctgattgacagcattgataccatgatcatataaccgttgcatgtttctgaaatcaatctcaaaataattgcttcatagtaaaaaatgattacaagattcgagtttcatttattatcgttataacactcactgtctcattcgtcaaagtctttaacaaagtcaacgaacgaccattagcttgggctttctctccaccgacgcgccgctctcagaatttccacttactcattgtctttatattcaaaaactcaaaaaaaaaaaagtattaagaatggcttaagaccgaaacgtgttttctcctagtctggcaaaacacaaaataataaatataaggaaacgcttatgaatacttttcaatattctacataaagtcattgaaagaaggattggaacaaagtgagaagcaacaaaaagaaatcaaaatcgtagctcctaagcaatacgtttcttcattggcaacggttttgattccatttcgactcgaatgaaaaaaggccaaagagtattcaggcaattacggtgacggtggcaacaaattatagattaaaacgagccaaaatagaagaaagtgccaacaaatccgtgtgggcaccaatccaaagtggcaaaatcaatcaaccagctgtcctctccctctaacttccgatcaaagactctctttttttttgtttacgttttcttttcctcattctccttgtcttattttgattgcattatattgaacttgagtttaatcatttttcattattaaggttatttatttatagacgcatgatgcatcaagtcataataatttcacccgtgatgatcacataataatactaatccaagactccatgtgtcgtaccccaaaaatttatctcaattatactatgtaccttatattgtgctatttttttaactaataatttcccgacaatttagtagttggaaatttctcgaccgtgtgatataatctataatataaaatatcataattattaaacaatgataaaatttgtgagcgacattggtatcaatttcaaatccaattattatgttgacacaagactagtgatttatagtataaccaatttaatgtctaacgtaaaaacaattactattaattgattttctatatctgatcatatgttcaacaaaacacatgctaatctacccaccattggcgaataaatttattgcagaatataacaggagaaaaatgccaagaaaaaaaaatccttataaaaacgcacaagaaaaaagtaaaagagctattctgtaaaataaaaatgaaaaaagtattgaatcctacattaatagatacaggatatgatgttctgtttctcaacggctacatctgtctgtgatccttttttaatccaacgatccagatctctcctcatcgcctatataaaactcacttctcttacatcaaacaaacaacacgcttggttaaactccatcagtactttaaccatcacttcaaagttcaaactcttttttttttttttgtttgatccaaattttaacaaaattatg

SEQ ID NO: 23910 - DNA, 3000 bp, Unknown; identical to SEQ ID NO: 3994
  misc_feature (1)..( 3000): 2750-1469P.txt file - cDNA_ID_2156875; gDNA_ID_1620678; Annot_ID_164318

SEQ ID NO: 23911 - DNA, 3000 bp, Unknown; identical to SEQ ID NO: 3994
  misc_feature (1)..( 3000): 2750-1469P.txt file - cDNA_ID_2156875; gDNA_ID_2926213; Annot_ID_202770

SEQ ID NO: 23912 - DNA, 3003 bp, Unknown; identical to SEQ ID NO: 19609
  misc_feature (1)..( 3003): 2750-1469P.txt file - cDNA_ID_2156878; gDNA_ID_1620678; Annot_ID_164320

SEQ ID NO: 23913 - DNA, 3003 bp, Unknown; identical to SEQ ID NO: 19609
  misc_feature (1)..( 3003): 2750-1469P.txt file - cDNA_ID_2156878; gDNA_ID_2926213; Annot_ID_202772

SEQ ID NO: 23914 - DNA, 3000 bp, Unknown; identical to SEQ ID NO: 20275
  misc_feature (1)..( 3000): 2750-1469P.txt file - cDNA_ID_2156899; gDNA_ID_1620721; Annot_ID_165812

SEQ ID NO: 23915 - DNA, 3000 bp, Unknown; identical to SEQ ID NO: 20275
  misc_feature (1)..( 3000): 2750-1469P.txt file - cDNA_ID_2156899; gDNA_ID_2926191; Annot_ID_201046

SEQ ID NO: 23916 - DNA, 3000 bp, Unknown; identical to SEQ ID NO: 3996
  misc_feature (1)..( 3000): 2750-1469P.txt file - cDNA_ID_2156949; gDNA_ID_1620678; Annot_ID_48305

SEQ ID NO: 23917 - DNA, 3000 bp, Unknown; identical to SEQ ID NO: 3996
  misc_feature (1)..( 3000): 2750-1469P.txt file - cDNA_ID_2156949; gDNA_ID_1620678; Annot_ID_164323

SEQ ID NO: 23918 - DNA, 3000 bp, Unknown; identical to SEQ ID NO: 3996
  misc_feature (1)..( 3000): 2750-1469P.txt file - cDNA_ID_2156949; gDNA_ID_2926213; Annot_ID_142091

SEQ ID NO: 23919 - DNA, 3000 bp, Unknown; identical to SEQ ID NO: 3996
  misc_feature (1)..( 3000): 2750-1469P.txt file - cDNA_ID_2156949; gDNA_ID_2926213; Annot_ID_202775

SEQ ID NO: 23920 - DNA, 3003 bp, Unknown; identical to SEQ ID NO: 20201
  misc_feature (1)..( 3003): 2750-1469P.txt file - cDNA_ID_2157018; gDNA_ID_1620716; Annot_ID_165643

SEQ ID NO: 23921 - DNA, 3003 bp, Unknown; identical to SEQ ID NO: 20201
  misc_feature (1)..( 3003): 2750-1469P.txt file - cDNA_ID_2157018; gDNA_ID_2926190; Annot_ID_200967

SEQ ID NO: 23922 - DNA, 2922 bp, Unknown; identical to SEQ ID NO: 2345
  misc_feature (1)..( 2922): 2750-1469P.txt file - cDNA_ID_2157321; gDNA_ID_1620522; Annot_ID_159494

SEQ ID NO: 23923 - DNA, 3003 bp, Unknown
  misc_feature (1)..( 3003): 2750-1469P.txt file - cDNA_ID_2157334; gDNA_ID_1620522; Annot_ID_159499
aaatcaaatgaaaataaaagggaaaagatctttctttttgtcttctatatttattatttattgcaaattatgagaaatgttacatacacaattctaacacggacaatttcttccgacccttattagatccacgatagataacacatccttctccatgctcttgattttaattcatttaaattctttgtcatttattgtcgaaagagtttttctaaatatttaaatttcaagtccaaaactacaggatttataacatccaaaacactaattttatttagataaaattgtcttagttcatttttcataaaatttaaacaattgaataaaatctttataagttaatatcagtatacattaataaaatagcatggtactaacattatcaatttatagatgttttattgtattattgatgagtaaatatgcatatttatgtccactgaaaataattaattgataaatttaaaatatattgaaattatagtaatcttaattttaaatttaatttcatgtaatagtatttgttttgtgcccatgatgatgagcccatataatttgacatcatgttgttttaaaaaatcaatcgttgagttatataaatgattgcgacgtatcgcacgatattaccatcgatagaacgaaggaaacttccatttagcagttttttttattcaaaaaacatatctttcatataatagaagtggaaaagttacaccaaggaaaattgaacctacaatcgaaataaatgagataacaaaagtattacaataaatttattgaaagacaccaaaccagatgaatgatccgttgagctatccaacaagggtctagatgacattgaagaatgttaatgataaataatgagaactgaggctggctttgaggatgaattatgcaatcttgcattgcgcttttttccatatggagtacagtgaggcttgataggcaattcgaagaatcaaagtagttttcttgtcacgacaaggattcttcaaccatctaacttcatcctcaaattgatttagaggagaaagatgggctttatcatagaaatagtgtcatacctttgcaacataagagcagtcgaagaataaatgttagcgagattcatccatcaaattacagagaagacacgacgaaggagtagtcatgccccatcgaatcattttgtctctagtgagaagtctatgatgagactttagccaagcaatgaaagcatgcttaagaatccttcctggaaatcacacagattcaaaccgatccatctttgtgtcaggaggatgaagatgtgcataagtttttttttgaatattaatgtgcctaagttttagcagcagagaaaatatttgatgcatggatatcatcaccttccaaaggtaaacatcatcctctacatcctcttgtaagttaacagtagaataggaaggaagacattctttaagcaactgaataatgggactgcgacttcgagaatttgtaagccactattgtctctttctcaatgcatccgcaaccacaacagaacgagggagaagagaaattcttagtcataaatcttcaggttagctcgacaaatatggtcccaaaaaaatccaattatcagtccagaaattacaagttatttctgaaccaatttcacaaacgatgaaaaacctagttaagggtcttaacttgcaaagattattccaaatccagcttctccaagtgatacactccatatcccaaattttttaaaaattattcaaacaagatccatgtgtattagttttctcttttggtaagtaaaatagtggtatccataagatgttggattatcgggcatctatttgctaatgattgtttctaaattagaacttagatttgcgaatctaataatacatcacttatcaatagataaacctttgaccattttttcaacgaactcataaaagatccaacaaaatattttttgagttattaaattaaatactactataaattatctttaaataaatcaaattatgggagtatttggtgtttctttcatcaatgaatggagcaaaaataaaaagtatttaaaataaacaacgctaacatttatgacaactctattatctctctctcactctctcacttcaaatactataattcattgtccttttcatcgaatccaagacctcaaaaaaaacaattattatttttcaacgatcaagatctcaagagtcaaatccaacggtcaaaaagaagtgactctggtactgacaccacctctcataattctcgttagtaggacctctcttcttcttccttctctccactgtatcggatccgggtcaaatccgggtcgggtggagtcgggtcgggtctcttataagaggaggaaaaccacttactcactttcttcttcttttctctctctctttcacccccacgcactcttcttttctctctctgacacatatctttttctctcactaaccatttctttctctctctctcttctgtttttgaaagccaaagtgtctctcttggacagtgatggaactgcttcaagagatttaattttttacccacgagagaagtcaagttgttgaagaagaaagatttgttcttttgtcttgtttctttcattttttcatccacaaagatctcaaagacaagagtttttttttttctgttggggttgcttcaatgcgtacttgtagtagagagcttgtgttgttgttcatggtttgatgatgagaagaaacagattctggttttgaagaaatggggtttgttctgtttcttgtgtttaagggttttatggatggttttttgattcgaagctttcactgagtcttatggttgtgagtgagatttttgggggtttgaacaaaggagatggagaaagacgagtttgtacttccggagctaaagagttatagctactgtagtagctggaagtgaagaagattttttaatagattgtacggaaaaattagggttttcaaagtttggtttcttgaagttgaattagacatg

SEQ ID NO: 23924 - DNA, 3000 bp, Unknown; identical to SEQ ID NO: 2337
  misc_feature (1)..( 3000): 2750-1469P.txt file - cDNA_ID_2157410; gDNA_ID_1620521; Annot_ID_159480

SEQ ID NO: 23925 - DNA, 3000 bp, Unknown; identical to SEQ ID NO: 2338
  misc_feature (1)..( 3000): 2750-1469P.txt file - cDNA_ID_2157416; gDNA_ID_1620521; Annot_ID_159483

SEQ ID NO: 23926 - DNA, 3003 bp, Unknown
  misc_feature (1)..( 3003): 2750-1469P.txt file - cDNA_ID_2157424; gDNA_ID_1620521; Annot_ID_159485
ttgaaaccgaaactgattagagccaaaattgaaagaaattgggggaaacaaaaagcccaaaaacgcaaaccttttcaggaattcgaggaagacattctcgacttgaatcgcttgttcatccattacaaatccaccaaaagcttccatttttcaaattctacctcactcgaaattttcctcttcactaccaaaaactgtttgcgacaaaaaccctaaaatcgtttgaacggaaaacaaaacctttctccactatgggcaaagaaatggcgagcttgttgtggcgggagttttaggtggggtcctctaacattttcccgctaaaaagtatagcgatacgtgaattgggcctaaactttgggcttatatattgggcttataatttggacctttaaaatggaccttttcaaatatatatttgatcaagacaaccatgcttattctaaactctaaagataatcgattctggttattaagaaaatcgatagaacaaaaaaaagaaaacgaaccttcacgaatgttttgctattttttcttcattagaaatacaacttgataagatcatttgaatgttctgtttactaattatgaacaagtaaaacttaaaagatttgttgttatactatctctatcttatacttctctatttatagattaacataacaaattgccataacaattctcttgcctatataattctgagctctattcatcttttcacaacaaaccaagtttcaacaatcaatcataaaaatgagaactaaatatttttctttgctagtgtttattattgtcttggcttctaatgaagttatagccaagaaacactcttcaacacctaaattaagaagaagtgattttccaaaagattttatttttggagctgcaacgtcagcttaccaagtcgaaggagctgctcatgaagatggtagaggtccaagtatttgggatacattctctgaaaaatatccggagaagataaaagatggtaccaatggatctattgcaagtgattcttaccatctttacaaggaagatgtgggtttactacatcaaattggtttcggtgcctatagattctctatctcgtggtcgaggatcttgccacgtgggaatctaaaaggaggtatcaaccaagctggtattgactattacaacaacttgatcaatgagcttttgtctaaaggaattaagccattcgccaccatttttcattgggacacaccgcaaagccttgaagatgcttacggaggattctttggcgcggagattgtgaatgacttccgcgattatgcggatatttgcttcaagaattttggagatcgagtgaagcattggatgacattgaacgaaccattaacagttgtgcaacaaggatatgttgctggtgtaatggctcctggaaggtgttcaaaattcacaaaccctaattgcaccgcgggaaatggagctaccgagccttatattgttggtcacaacctcattcttgctcatggagaagcagtcaaagtatatagagaaaaatataaggcatctcaaaaaggtcaagttggtatcgctttgaacgcgggttggaacttgccttataccgaatcagctgaagatagattagctgcggcacgagccatggccttcacattcgactatttcatggagccgcttgtaaccggtaaatatccggttgacatggtcaacaacgtaaaagacggtcgcttacctacatttactgcaaaacaatctaagatgttgaaaggatcatatgatttcattggcatcaattattactcatcttcttacgctaaggatgttccttgctcaagcgaaaacgttacattattctctgatccttgtgctagcgtcacaggtgaaagagaaggagtgcctatcggtccaaaggcagcatcagattggcttttgatatatccaaaaggaattcgtgatctccttctctatgcaaaatacaagttcaaggatcctgtcatgtatataacagagaatggtagagatgaagctagtaccggtaaaatcgaccttaaagatagtgagaggatcgattactacgctcaacatttgaagatggttcaagacgctatatcaattggagccaatgttaaaggattctttgcgtggtctttgctagataattttgaatgggcaacgggctactcagtccgatttggactagtttacgtggatttcaacgatggacgtaagagatatccaaagaaatcggcaaaatggttcagaaagttattgagcgaaaagaaaaggaattgatgaaacatgcatcattacattatattaaccaactaggttaatatatgcacgatgtgtagtttgtttgagtaacaatttatcgttctgttataaatattgtttggttatcaaacttgaatactaaaatagtgattcaaatgtaaaaattttgtggacactatattaaatgaaacatttccaatatttcaagtttcagtattctagaattgataaattaattgtactttaagaatcaaatatttaaacaaatagttgatgaaataacactctatattgaatattatattaaaataattaaaattattagttttttttgagatattaaaatcatgaatgcaaaatataaaagttatattatttattatttttgatttcataaaatgagtatgtattcttttagagataaaagaaaaaaagaaaaaaattggcaagttcgatgcaaaaccccttaaatatggggaatcctaaatatggaaaacacaatagtaattttatagtattatccaagtagcagttgttcggaggctatctacatgtctcagccactcgtattattctccaatctataaaaattcaaattttcaatctccctttcttaagattaaaagtggcaaagttgagattttgatcgtcttcttcctctggaaatttcaatcgaaactatatcttcagagatgcagaatctgtgaaattgtagaaacgaatttcacatttttttttgaagaaatg

SEQ ID NO: 23927 - DNA, 500 bp, Unknown; identical to SEQ ID NO: 2339
  misc_feature (1)..( 500): 2750-1469P.txt file - cDNA_ID_2157428; gDNA_ID_1620521; Annot_ID_159486

SEQ ID NO: 23928 - DNA, 3000 bp, Unknown; identical to SEQ ID NO: 2356
  misc_feature (1)..( 3000): 2750-1469P.txt file - cDNA_ID_2157465; gDNA_ID_1620525; Annot_ID_159561

SEQ ID NO: 23929 - DNA, 3003 bp, Unknown
  misc_feature (1)..( 3003): 2750-1469P.txt file - cDNA_ID_2157469; gDNA_ID_1620525; Annot_ID_159563
tccaaactcagtcactgattccaattaaccagctagtacagtacaaatgtgaaaccctaataaaggaaagaaacagaggaagtacctgatgttgacgttgtcggtggagatgtgagtagagacatttttagcaacccatttctcagcagctttcaggctagaggcgagagtcgcaagcatctcattgggaataccaaccatgacttcgattccggatttgcccaaagctctgagagtgtcgtattcggcgtcaaagagctttactttctgaataccattctctcttagcatccgcacaactatgtccggtggaagtgggtgcgacgcctgtgtgccccagttagctccgattgaacttgccctctgacaaagaagagccaccgccagtaatagcaacaccgaaccccaacccatctcaggctcgccgatctgactcttcgttcaccaaaaaagctatacaattattaaacactgagctttgagctgcgagcttagctggtactatttcctccagaccagtgggttttaaagcggccacgcacgagcgagtgccgctgctttttggcaaccccataacgacaaaaaatgacacgtaagctacgcgtcaaacgatgtctttaaagtctaaactgttttagttcggtcttctcaaaagtcattacggataatgtgggcttttgtatcacaggcccatatcttgaaaataatcaatcagtttatattgtctctttagtgctctcatagagtcattacggataaggtgggcttttgtatcgcaagcccatttcttgaaaataatcaatcagtttattatattagtcaatgttatttaaattcattgaaaataatcaatcagtaagacttttttttttttggttgagaacttgagacggtaagaaaatattggctaatcgaaggccggaaaaagaaatctgtggaaagacaagaaaaaacgagcacagtggccagtgtgggaatttttgctggacgagagagcaaaaccctactgcgatttatcgactactaggagaagaagaagaagaagacgatgcggagattcggggctgggaacagatccgtttccaagctcgtactcaccatttgtgtagctatcctggtacgatcccttcgttcgatctgtcgcaagattagtatttgatcaaaaccaaatttgaaaattgatgatgagctgcgatgttatctgttaatgcttttgtttttaaactcacctttctctttctcaattgagtttgcgtaatttgtttgattgatttcgtggcttagttcataccatctctatcgtatggagcttcacaagggaaccggaagacggcgaagtcttctgtgttttccttgttcaatcttagggataaaagcagattttggagcgagtctgtttttcgtactggtatgtgttctgtttccaggcctctctttgcttttggatttcctatgtcttcatttgcatcacaatttttcgtgctgttatcagattttgatgatttggagtcttccgttcactcgaattctggtgtgctgaattacactaagtcaggtaagtaattgcctttcgtttctgtgaatggctaaaggacttactagctcaattcgcaacaccacgttctgatttggattgcatcctttcaggaaatattgcgagttacttagagcttatggaagtcgattctgtctatcttccagtgccagttaattttatcttcatagggtttgaaggaaaagggaaccaaggtgaataacttctgcctgtcttgcttttatttgaattggagctatcacttgactttctcttttgtccgtaactttttccacacactttccagacttcaaactccgtcccgaggaacttgagcgttggtttaataaacttgatcacatgtttgaacatacacgagttccacaaatcaaagaagttctcaatcccttttacaagattaacattgaaaaggaggtgcagcaccatcttcctatcatcagtcgcgtgaactacaagtacagtcatctttttcttaacttttttcctggtggttcattcacggtggtgttggctttaagtaaagtttaattgggcatttgtttccctttgtcagcttttctgttcatgctatacaaatgggagaaaaggtgacatcagtaattgaacacgcaatcaaagttttagctcgcaaagatgatgtggctaccaataagtaatgcattacaaagaccttttttttgcttcagtttatgtcgtatggacgtccatttctgtcaatttatatgcagcgatatctgagcctgcagaccacttggttctagtaactttatgtcactcatgctacctgcttccaacttttttaagtggtgtcctgattcttattttttgtgttggttctatattaaactatctcgttttatggtaacagagatgaggaaagtgctctactgcaagtggatgctgagatgatggaattcattttcactagccttgtcgaatattttcatctcgaggatgcatacaacctttttattttgaatcccaagcacgataacaaaaaagccaaatatggataccggtgagcacctgctgtctatatgatcatcttattgtaatacagtcgaggaacatactagacttataaaaggattttgcaggagagggttttcagagtcagagatatcttatctgaaagaggtatgtcaatcttttcatgcttgaaagcaattacatcataaacaatcctcactaaaaaagaagaatgtccttggagtgatctcttggttaagttcgctgttaagtgcttctatgtttttaccaagttcatattactcttactatttctcgcagaacaaggaaatactaaaaaatcttcttcagtctggaaaaccgtcagaaaatattttaggtacagaatggaaaataacaatgatatgtctccattgattatgtacattccagttttcttatatgaaacctgctgcgagtatgttgtagcatttgatatg

SEQ ID NO: 23930 - DNA, 3000 bp, Unknown; identical to SEQ ID NO: 2355
  misc_feature (1)..( 3000): 2750-1469P.txt file - cDNA_ID_2157479; gDNA_ID_1620525; Annot_ID_159566

SEQ ID NO: 23931 - DNA, 3000 bp, Unknown; identical to SEQ ID NO: 2360
  misc_feature (1)..( 3000): 2750-1469P.txt file - cDNA_ID_2157495; gDNA_ID_1620526; Annot_ID_159571

SEQ ID NO: 23932 - DNA, 3003 bp, Unknown
  misc_feature (1)..( 3003): 2750-1469P.txt file - cDNA_ID_2157503; gDNA_ID_1620526; Annot_ID_159574
tatcttgtgtcttaacaagacaaaacacttcttactatcatgaaaatgccaacgtcactaagacactaattttttcatctttacttttctttcctttttcaataaagaaaaatatcaattaccacatcgaagggaaaaaattataattaattactactatctgtgcattttttttttgttagttacacgaaatattatcttttatataattacaatgatgacatcggtttttaaaaatatgtatgttttagaaaatgctttcaaatttgttttttttttttgatcaaaaatatgtatgttttagaaaatctgtatgtaactaacccacaccaaaaagtaacaaaccaatgatgacatcggtttttaaaattatgtatgttttagaaaatactttctcaatttttttttttttaatatttaaagctgtttcacacatgttaaagaatttttaatttttatttattttaaactaaaaaattatttatctaaatataattcagtcaataaaacaacaatctgcataatataaattgtcaaaaccaatataaaaataataattaattttatgtttaaatattatattttaaaattttcttctaaaacaccaaatgaaaaatatggagggattatattacaaacctcatctgtccaaccgcgacaaaaactgttacttatattaaagaaaattaaagaaagaaataaacatcatctccgtgaatgtcattgcgaaaattggagaaaaaaaagaaaaacaaaattaaagatccgacccaaattccataacaaacaaaaccaaccaaaatttaacccagcccaaaacaaatatgttaaattgaacccaaccacctacataacccaacccgaccctccccaaatgacataaatcaatcagatatattttactcgatgtaattagtaatttcataaggctcacattcattgcatgtatacaaatttaactaaattgaaaggaaaaagaatattcgtgtgcgacaatatggtcatattactcccgactacaataacatatgtaaagtagtcataagatacgaacttgaactctctatttatttttgttcataattaattttattggttttcaattatatatatatatatattttgactagtaatctataggttaattcagtaacgaataaagatagatgaacggatggaccattaatccactacgacgcttagggaccaactttccacaagtgaggaaataggaccgcgactaccacttcctacacacccgtgataatattgtcaacgtcattcatgctttttcacctaaatttctttatcttagtggactaggcaatcaatttgaaaactctactacactgagttccaaagtttaacaaaaccataaatgaagagtgctacaaatatgtcatgtttcgtcgtacaacaagtttcccctttggctatacactaaaaaaaaccaacaattttccctgattatacactaaaaaaaactaacaattttccctgattacggtcaaatgctagctgatacacagtgtattttacacacctcgtcgtaatgatgaaagttagattcttgtttcttgacagtcgacttgtcttcgacgtaaattcgtcaaaaaagtcaatttccaatggatttctaaatgttgtatccgtcaaaactcagaaatgagttcttttattgtaatatatatggttatactatagagttaacaatcgtaaggtgttttattaacatcggaaacttttcaaggagttccacccctctttcatagtccctcatttaaaacacaaataacataaaacttgtcctaaggaaacctaaaatcgataactctatagaaaacacaacacatctttttctgttctttataaactgaaatttttcaattgggaacaagtttgtttacttagtatcatttggtaaaaaaaaaaaaagatgctccaataaacccaccaacatcttgggttggtcatttagatactctttgaattatatcagagaaaaatatcttatggttggtatggcagacgaccgataagaacctgtatagtataaccatatccgacaatgacttctctgttatccgaagacatactagacgatcaccaagaaaaagaatttgaaggtaaaacccataaaacatcataagtttgatgtaacaatcaaatttttttgtctctttcccaagttataaggacaacgagaaaataattcaccgaaaaaaggacaacgagaaaataaaataaacattaacttttttttactcataaatgaagtgtcctggaccatgaagaatgcaagagaatacggggtagggagcatttctagggaaagacgggcgacaacaaaacgtcaaaacctaacctataaaaatattaaacgcgaatcatatatagtgaaccataatgaaacaagaaaaaattaatagtgaagaattcaagataaaaccaagctagctaccaaaaacaaaaaaaaagataaaccaagctaatgatgagtcttttgaaaataacatagtttcacatgtaacttaacacacacaaaaatatgtttataatgaccaagaaataaactgaaataaactgaaataaactaagggaaacttaaatgatttcttaggacatatacatgatgaaaactgaaaacgaacaaatgctaggaagtgcattagcaaacaagagattcttaggaaaacatgaataacttagacattttggtaaagaactaaaactcccaaaagtcattctttttgggcataatctataaagtttaagaacttaagaataaataaataaatcataaaataattgaatacacagtaaaactaaaatctacatctcttgatagttaaaaagagagttgtgataaggtggtggggcctttcatttggccttcttttttttgagtccatatatagagaaattggaagaagttgatcaaaaggttcaaaacaaaaccacttttcaaacattggaactatctaagtattgaacacaaagatg

SEQ ID NO: 23933 - DNA, 3000 bp, Unknown; identical to SEQ ID NO: 2366
  misc_feature (1)..( 3000): 2750-1469P.txt file - cDNA_ID_2157537; gDNA_ID_1620526; Annot_ID_159586

SEQ ID NO: 23934 - DNA, 3003 bp, Unknown
  misc_feature (1)..( 3003): 2750-1469P.txt file - cDNA_ID_2157541; gDNA_ID_1620526; Annot_ID_159587
caactttcagaaactgtatttgagctttaattcagcatccgaagcgttgagaataccctcttagtgttcttttagcaagctcacagtgatatgtttaaaatctattttcgaaaaaaaaattgagcaatacactcaaatgaccttagaaaacaattatatacggtaagaaacacgtgtcatcaaatgcaagttctttgagagaaagaacaccaaaagacaaagagtacacacgcccatccttttgaggaaacatacgacgcattgagttatcaaaccagtgttaaacctgtttcataatcatgtccacgtacaaacgtacccgtttttatcagccgatgccaatggtttcccgatcccactccaagaacaacacagtataggagatgtttgctccttgagaatgctcactatattgcctttagatagcgaccatacatgaaccgaaccatctgcagatcccgcagccacataatcatcatctggacttatgcatgaccggctccaattcgatgctaatctgttccccgatgctctcagtgtcccacatatttccaaagtccgggtatcaaatacattatgcacgttgtctctcccgctcgtcaagatcctatttccgttccgggacaatgatactgaggtcacagcagaagaatgtccagctacttcggacagaagtttcccagtttgaatatcccataacctaagattcccatccatgtggcctgagaataccgtaagcccatctatgctgaggcagattgcattgcagttgctggtaaagagtactgtgttagtgcagtaacctttatgcaaatcccaaagttttatggtacggtcatatgctgcactgacaacatgtcggctagagaatttgctcacatccacagcacaaaccttatccgtgtggcctgtgagtgtatggcgtaccctacccgagctaacatcccatacaaacaaattatttgagctggttgctgcgatcacggatttattgtcgtgggttacggccatatcaagtatattcccaagggaaccgtataagcttttgattaaagttccgctattggtgtcccacatttttactgctcgatcttgcccaccagtaaacagagtaccagagttgtattcaaagactattgaaccacagccaccttcatgagcatggatacgattcgcacatgttgacggaatggttgactcaacaaagtgatcggttccatcttcattgcggcggacaataccatcaacttgctgccgagcaagagtttccaaaccatttgccttcagcttagctagcatttcttcatagagatcatttgcctacgtaagaagaaagaattaaggccatcctaaccaaatcgaagaaaggggacgaacaaactctaccattaaagactcatgaaaaataaaagtccctatgtacctcattaagacgttctgcatcctgcatcttctgcaacatccaccgatcaattaacattttattctcagtctctgctttttgcactctacttgtcatctcctccaactgagaccgtatttccaggttttcagcaataagtacatccaccgtcttggtcttttcctctaactcttcttgtaatcgtgtacaatcctccctacagaacaactctagttttaaatatcgcacaacataattccttacagtcactgtaaaaccattcttaccttctttgtgttaattccttctgcaagtcattaattaacaactccttctcttgtaaaatagcctttgaagttctggattcagctacttctatcaccagttgttcagatagtcgagattgagctttgtaacattgctgtaactctgtttccagcttttctgttttctccttccattctgaaccctgcatacagatactcaaaccagatcaagacatgtgtcaaatattccagagcataaaagtagaaagaaccaaatctacagagacgctgaaccaaaacaaaaggattcaatacaaactttgaggcatactatataattgaagcaagtataaacttaactaaactacatatacttttatacttctctgtgacacatgaactcacaaaatgcactgaacaaacatactgagagctacaattgtttttttttctgaaatccaatgaaacgcattacaagaatctacaaggattaaaagagcctttgttccatctaactacttattccatagtgcaaatctttcaatgtttactagcaatttgtatacttcgataacaaggtataaagttgaaactggtgaaatctgaagcaatgaagaaaggaacaaaacaagattacctgagagattaaaggcttagagagagcagaaatcgcaggagcatgagctccttcttccagaagatgacgcttccgcaaagctctcaaagcgtcatttattgcttccatagctttctcctcctgtaccctgaaagttccgacactcatcggaatcaaaatttcaacaatcgcaaaagcttatgcaacaagaaaaggagatcaaatcaagacttacatctctcgattcagatcaaaaagagtcgtgtagtgaggaattagggtttgcgtataacggaagactttgatcggaaccggtggcgacttgaattccaccgccgcttacgagttacgacccaaattagagaaattacaaaagctgcaagtgaattggggattttcccccacaaatttagtttattgaaaattgattataatcagtttttgtattaatgattgattaattagaatttaattgcaccgttttacctgaagttttgttagtagtagccggaaagcaatattattattgggcctataaaagcccatttacattgtgttctgttcctgcaaagtgcaaagagtagagatcacgtcatggtccacgtggcaaccaatgaatccaactctggagaatgaacacgaacacacaaacagaacaacagatcatcagagaagaaactagaattgacaaaattattaaaaagcgaaaaaagaaaatg

SEQ ID NO: 23935 - DNA, 3003 bp, Unknown
  misc_feature (1)..( 3003): 2750-1469P.txt file - cDNA_ID_2157549; gDNA_ID_1620526; Annot_ID_159589
ctacattggaattgtaagtgagaacatttctaatcataactcacaatattaacactcactgagctatcaaaatcaacgccttgttcgttcctcagccacgttcactttaattgctctgccttccaaattctgcaaacacagagagcaatgaataaaagaaatggtaaagtcacaagaagataaccataaacgcatggaggagtgatttcttttacctgtccatcaagagcagcaatggcaacgttaacttcattctcattcgacatttgaacaaacccaaacccacgtgaacgacctgtctctctatcagaaaccactcgggcatcaactactttcccatgctcgctaaataatcgttccaaacgaccactatccacatcccatggcaggttcccaacatagatcctaaacgcagcatcatatacacgaggttgtcgttcaggtcttgatcctcttggagctgctctgtttactgtcaaacgcctcccattcacttcctacagttgtataccaatcaacttcaacatctataatcactatccaaatgacccagaagattgagaaacaagaaaatgattgcttacaaaactattgaacttctcaacagctttctctgcttcttcaactgtactcattgttacaaacccaaatccacgactttgatcagtgtccctattgtatataacctgcaaaaaccagatttcaaagcagacccatgaaacataatcattcctttaagccaaataaactataaaaccagatttcaaagcagacccatgaaacacaatcattccttcaagacaaatcaaactatgaattcgaaacactaaactaactttctcaagaagtaacaatgccacagaaaaatttagttccaattttctcaaccatttggattcaaatgtcaaaaagcacaaattagcaatatatacctctgaaatctcaacagtaccagcttgttcaaagagcatagctaaagcttgactatcaacatcgtacggcaagtttccgacgaataatttagcctcttccggtggctccgggaatccaacaccgtcttcagactcgaaactctcatctacagtgactgaagtacctccgatgcttccatcctcaccttcttcttcctcagcccaattcgaagtttgggaaacgaaagtaacaacaggagatgagttacgaagagttttggatttgagagagagtgtgagattaacgggtcgtgaggataaggaaaaattgaagcggtgagattcagaggacgagatgttgaagatagaaggaatacaaaaaagggtcgaagaggaagaattcgtcatagctaaaagctttaagcttggggttagtactgaagaagtcatttttctgattttggagagattacaggtgaagaggaagaagagtgagataaaaataaaaaaatgttataatctgattagactaaagtttagtctaatatcttatataaacagtaatctattattgggccttacttgacccaataggcttttatatttccttattcacaccgacctactccaccaaaattaagactatatagtacacaaagagccgtttctagcaagatttctttcctcggccttatcgcgtcgaattcaagccggcgaacgaatacatttatttttctgaaacaagatggattatcggttacagattttagaagcaaacgcaattcatgacactgcatcctctttgtagtgatgtgatgtgcgtgttagctgtgtgtgtccgcgtttatcttttttttttttgttacttttctcctaacttagttgttattacgtgcttttcccaatatcaagttaaatcacacacacttcccaccaccttccttcattttctttccgaaatttagcattttagtcctcttttgacaaatagtatcttctttcttaaatttaagatctttctttagtctttagacaacagttattgtaatgtcttttagttgaatgacataagttaggccaaaataatttgagttcaattttcaaaagcgttgatgaaagctaaaaccaatgactaaaaatgacatctaatcggctcctgaaaaccataatcagatatcatatgacaaatactaaaccaaaatttttacctttcaaataaaataatatttgcagatagatttaaaatagtaaaggttattgaaaaaaaaatacaatagaaaaacataatattacctaatatttattacattttaaaagatatatagaaaaacaaaatcttagtttcgacgatggaatttttttttttatatagaacatcacataccaaataactttagttctcttattgtgaaaacaatggaagaaattgactttttaaaaataattttgaaattgatttctttgttcacataccaaacaacttcgttttattatcgtgaaaaaaagataacgtaaatggttagccacacatgcacggcttttccaaattatcataaggatccatatttgtaaaagaaaaaaatacataatccacataattaatcatagtgaggttacatgaataacagagttcctagctagtaaagataaattgttgcgtacaagttgtgctttgattaattatcactatacgtgcttcatataaaaatgtcattttacacttatatatattaagtcatctcatcgccgactatttcccaaaatcatcaattattgttaccaagaataagaaaagtaaaatgagagagcttgcttgcgccattaaatcaacataaagttcaattatagtttgaaatctttatgaatctccattaattaatgtatccatgtcactaaccttgaaatctttgttgaatcccacaagtaatcctttaaccccttttggtacttttcattacatatcgtcatcacaataacctctcaccaatgtatctataatccctatataaacactttctctttagtcctgattaccatcaacaaactcaatcacaatcacaagtaaatacaaaaatcaccatagaaaaatatg

SEQ ID NO: 23936 - DNA, 3003 bp, Unknown
  misc_feature (1)..( 3003): 2750-1469P.txt file - cDNA_ID_2157561; gDNA_ID_1620526; Annot_ID_159592
aaaaagttcgttatctcccccgaatccgttaatcccgacaaaaaatatgagatgatttaggagctgacgttgtcgtgtaggcgttcacccacctgtcagcttgcattcgactaaagtcagacatgttcaatagtgaacttgcattttgtttgttagtctttgatattatatggtctttgcttatcgttttgtatcttcactctcttgacatctctctttattaggctaggatttgaggttaaactttcattttctttgaatctttcactaactgggcttctctactgctacttacttatagatgggtttcaactttcaagttaaataccaaacctaattataactttaaagtttgtctcacgtcttttgctcttaaattgtgaattttgagcctttagcttcgctagaaagtggaagctgagccatgtccatggcgtcttcttctcttgcgacccaatcctttttttcttcctttcctctatctcaccgacttcacttccctgtaccttatcttcttcttcgttcttctttctttcgaaaaccacttagtctctctgctacttccccttcgtcatcttcttcttctccttccattttcctctcctgcttcgatgacgctttgccagataagatccaacaaccagaaaattcgacaatcaatagcgaagaaagtgaatgtgaagaagaagatgatgaagaaggagatgatttcacagacccaattcttaaattcttcaagtcacgaactttaacatcagaatcaactgcagacccagctcgagaatccaaattctccctccagaagaatcgtcgaacttcctggcatttagctccagacttcgctgaccccgaaactgaaatcgagtctaagcctgaggaatccgtctttgtgacaaaccaacaaacacttggtgtgcatattccattcgaaagtggcgtcgctagggaaatcttggaacttgctaagaatttgaaagagaatcaaactttgggagagatgttatcaggtttcgaaagaagggttagtgatacagagtgtgtagaggcattagtgatgatgggtgaatctggttttgtgaagagttgtctatatttctatgagtggatgagtttacaagaaccttcccttgcttcgcctcgtgcttgctctgtgttgtttacattgctcggtagagaaagaatggctgattacattctgcttctgctaagtaatttaccagataaggaagagtttagagatgttcgtctctacaatgccgccatttctggtctctcagcttctcaaaggtatcatctttttcctctttgcacgatgattcagttctaaagaatgaaaagttgtagtttttggtcaaattgtgtagttggtgatcttttgttaggtatgatgatgcttgggaagtgtatgaagctatggataagatcaatgtgtatccggacaatgttacatgtgctatattgatcacaaccttgaggaaagcaggacgaagtgcgaaagaagtttgggagatattcgagaagatgagtgagaaaggtgtgaagtggagtcaggatgttttcggtggccttgtgaagtcgttttgtgatgaagggcttaaagaagaagctcttgtgattcaaacagagatggagaagaaaggtatccgttcaaacacgattgtgtataatacgttgatggatgcttacaacaaatccaaccacatagaagaagtggaaggtctttttactgaaatgagagataaaggcttgaagccttcggctgcaacttataacattcttatggatgcttatgctagaaggatgcagcctgatatcgttgagacacttctgcgggagatggaggatttaggtttagagccaaatgtgaaatcgtacacgtgtttgattagtgcgtatgggaggacgaagaagatgagtgatatggctgctgatgctttcctgcggatgaagaaagtaggtttgaaaccttcttcacattcttacacagctcttattcatgcttactcggttagcgggtggcacgaaaaagcttatgcttcctttgaagagatgtgtaaggaggggattaaaccgtcggttgaaacatacacatcagttcttgatgcattcagacgatcaggcgacactggaaagctgatggaaatttggaaactaatgctgagagaaaaaatcaaagggacacggataacatataacactcttctcgatgggtttgccaagcaaggactctacattgaagcaagggatgttgtatctgagtttagtaaaatgggtttgcagccgagtgtcatgacttacaatatgctgatgaatgcatacgcacggggaggacaagatgcaaaactgccgcaactgttgaaggaaatggctgctcttaacttaaaacctgattccatcacatattcaacaatgatctacgcgtttgttcgtgttcgagacttcaaaagggcattcttttaccacaagatgatggttaaaagcgggcaagtaccagacccaaggtcctatgagaaacttagggcgattctggaagacaaggcaaagacaaagaacagaaaggataagactgccatacttggtataattaatagcaaattcggtcgggttaaagctaagacgaaggggaagaaagatgagttttggaagtacaagacgaatcgaactacttctcctggtcgtcaccgatcttgaaggtagcctaaaagctatataaatgctttagtggtacatagtgaggattctcaagctatacgaatctagttgtattcaatatatgttcctctgttctttgtacttatagccttatttattagcattctaattttttatgttcctaggacataccttggtcatgtgtagtaaaaagtgcaaaagtttagctttattattccgacaagcgaagtatctcttaagtagcaagcaatctttagatataactcttagctctctgcatcaaagatcacacacatcactctcttgtaaacaacccaaataaagaaaatg

SEQ ID NO: 23937 - DNA, 3000 bp, Unknown; identical to SEQ ID NO: 2375
  misc_feature (1)..( 3000): 2750-1469P.txt file - cDNA_ID_2157589; gDNA_ID_1620527; Annot_ID_159603

SEQ ID NO: 23938 - DNA, 3003 bp, Unknown
  misc_feature (1)..( 3003): 2750-1469P.txt file - cDNA_ID_2157614; gDNA_ID_1620527; Annot_ID_159609
agcaaaactttctcactttcaccagattctgtgataccgctactattcaagagcttgaacatatacgtctgtagaagaaattggagcaaaatcaaaacataaaccctaatggaaatcgaatcaaatgaatcaggggatttgaagcttttcattgtagaaatttgttaccttgggagatatatcatagacgttggagcatctcataccgattaatcgcttcaagcacttgacttcggcggcgacgtccgccgtgttcattcgtaccttcaccatatcttagtctctctcgaaatttcgtgattcagtgtcgaatcgaagaaaggttttaatctgtttgtcaaagttagaaattaaaattcggtctgtgctaagctgtgagaaaagaggaagaaggagaagagaaatttgtgagctattcatgtgtgttgggccgactagaagggcctataagcccaatataaaagacgatcattagttatctaaaccaatcaaaattacatgcttttttaaaaccggttagtctaatacactaattagagaagtttttaatttgtctcagtttgaatattgataattgataaataatccacatataacagttgtatgtattatttatgaacaataaaatctatgcagcaaaaataaagtaactaaaatattcaactcctattcaagaatcaaattgatagagtaagctgcaatttatggtgaaagtagttttaccataaggttttctcctaattattttaagaatatatttatttcccacaattggttaataaaattgtgaatgaatacattttttttgtctacaacttgtattattgggtttagactcgaaaatgacacattgataacatttgcacaaataactagatcatatgtttttgtcatattttgagcacaatttgtgcatatttcaagcaaattttgaacatatatcaaatccgtcataaccaattaatgttattattagtacttgttttcattataataatgacgtcataatcaatactgaacgtaccagcgaaatgatggtacatatcggctttaaaatagtattcaccaaatattgctggaggcttgtaatcttttttgctgaagacaagtcaattagggccatttccatttgactaaatctatttgtgcctaatggaaaaatagagatatatactttaagttgatgaagcttttcgtttgcttttatgttcctaatggcaacggtatcaactcgatgatttagactcttaaggaactttaccatatctttatggagaattaggaagtttgtggtgttggataaagggtagaagggaggaaccgcgaaaaagagtgttcttgtgaatggatacacacagaaatactatggattcgggtttttttcctgctcacaagatgaacagtgaatagaagtggtagagaatgtagatattagttctgttaaagctgaatgtgtacaaaacaatatggaaagttagataaataagatctttaggtcggaccaattgttagaagccaaaaataatctctaaactctctttattaaaactgagaaaatgatagcgtaacaagattagagtaaaactcctcaaagagaaactacgtcctcttctcctcggcctaattcgacagaatcctccaaaactctcaattgcttggatgcttttcaaaaacgagactacatccttatttataagtaaacgtaaacaagcattcaaagaaaataaggaaaaataaaaaattataggcaacttcctaaatctaaacagaaacgttgattgttttccaattcacagattgacttgttcttgattattctttttccacatacgtgaataaacaatccacggtttagacttctagaaacattcatatcagatacttcagttttttttttcactttttttttgttgttgtgcgaaatcagatacttaactatacgacatatgcaactatgcaaatctgaaatgtacttacagtttgttgtgaagacgaaaagcaagatcacgattatgattcttgaactgatcatcattcttttcttttcctctgcttataactaatggctcaagtttcttcattttggtttatgtgtattattttattaaattacgatagaagaaattaggaattaaagtctaactactagaatctgcaaaatcagatcatatattgttttcctaatttagttcaaggccaatctctactagagtctgcaatattagtgtgcaggaggggggaagtaatcatttaaaccagcaaacagtaaaacactgatgtgtcgtttttacaagaactggtaaaagaacatcctgttttgtccaaaacgaaaaagaccacccggttattgggactcttagttaaatgagaattccaaatatcaaattaatcaaccagtttggattaataaccggttttaatccaattattgggactgcttgtaaacctcataataaaactaatatgatcttttaaattaataggggttaaagagcgacggaaaatgctttggtcaatataaaattttcccggtttacgcaataacattatgcattgcttgcttgaaattcaaatcgttgatttgtggtgaagaacgatttcgaatatttgtttaaaactttttatttccaagaaaatttaggggagacagcttcatatcccaatttattgcttctactagtaactttccaaacccaaagttaaaaccattttaggattgatcaaaaaaaaaaaaccattttaggaatgcttttaaacctcatagcttcactcgctaatagacaaaatagtaataaaatgtctattgatttaaatacatttggaacaaaaatttgcaaatatttacataatttataaattaatttgtgaaaaagtgttcacgcaaaaaaaaaaaaaaaaacaataaaaaaactttgggtgggccttgtaacacaagacgccgccgataaaaggaaatctcacgatcgtatcatctccgaaacaaaaactcgtggaggagatatg

SEQ ID NO: 23939 - DNA, 3000 bp, Unknown; identical to SEQ ID NO: 2373
  misc_feature (1)..( 3000): 2750-1469P.txt file - cDNA_ID_2157618; gDNA_ID_1620527; Annot_ID_159610

SEQ ID NO: 23940 - DNA, 3000 bp, Unknown; identical to SEQ ID NO: 2372
  misc_feature (1)..( 3000): 2750-1469P.txt file - cDNA_ID_2157630; gDNA_ID_1620527; Annot_ID_159612

SEQ ID NO: 23941 - DNA, 3000 bp, Unknown; identical to SEQ ID NO: 2385
  misc_feature (1)..( 3000): 2750-1469P.txt file - cDNA_ID_2157664; gDNA_ID_1620528; Annot_ID_159628

SEQ ID NO: 23942 - DNA, 3000 bp, Unknown
  misc_feature (1)..( 3000): 2750-1469P.txt file - cDNA_ID_2157692; gDNA_ID_1620528; Annot_ID_159636
agaagagagaacctttagcttcctttcttccctagatgcctgatctagcattcctttgctggctctcaaagcaaccttcttcgcctgcgccagcttccatttcctctcagactcaaagtcctacaaaaacatcaacaattagcatagaaacgtcatgcatgcataacaattcttgcagaatgatccaaatagccacccttcaattacctttgacagccaagccatctcctccaatacatggtcccagtgagttttaggacgacgtggttctttaggagcttcgagcgtcttaaaagaaaaaaaaaaacagaaaccgttaacactttcaaatagtgatcagctcaaactagaatctaccgtaagaagatgaactcagacgtaaaaatgaaaacttggagctaaccttctgacgcttagctctggattcattatcaggtttagatttcccactcttggacgccattactatatcaggtttagatttaccacctttagacgccattactaacgcctttaagcaaaatcttccaagaagaagatggttagtgactgcagagtgcaaactgtgtgactgcacaaagcccaagaaattagggtttccacttcagcgcaaaaaaacccaagcaacgatttcatcactaggttcccgtcacccaaaacattacagtaatattcgattccaaatcttaaatctagctgaaatttgttttcctcaagaatcgaacgggaacaagattagtgttttttttcttctcaaatctcttcacttcattcttactaagatggtgtgatttgagatcgaagaaaactaaaaatgggagatacgaattggtaaaaaaaggaagaagctttggttttgagattttttttttttttaatctagaagagcctctgcttcagagagaaagaaacccgagctcgcggcgcaaacagatgtagaaaattccaactcgatacccttttttttttatttgtaaaaaaataaattatttttattaaattcctttaaaatatctaggattatataccaaattcggatttagataaaacttacgtattaatattcacccaaaaaaagaagctttcgtaattaattaaaaaaaaaaaaaaaaagtttttgtggttattaatatttggtaaataacgaaaacgctgactatcaatcgaagtcatatggtaacaaatattgtaattagtagaaagataatgaatttgtaatttggcactaaaaatagggagatatttaaagtaaagtttggttagtaggtgaagaggtccaagtaataagaagaagagacagacacgcgactggctccttttattttattttattttgtcttaaagcttttggcgagtttgcttgtgtgtgagtgtgtggttatggactctccgttcaaacctgatgtcgtcagaggtcaagtggctctcatcaccggtggtggatccggtatcggttttgagatctcttctcagtttggcaaacatggagcttctatcgctatcatgggacgacgaaaacaagtcctcgatgacgccgtctctgctcttcgatctcttggaatccaggtaatcagcgatttttgttttgaggactttgtttgttggatatgtgtttgaatctgtctgatttctgtttcgtttgaaggctattggattggaaggtgatgttcgtaagcaagaagatgcgagaagagttgtggaagcaacttttcagcattttggtaaacttgatattcttgttaacgccgctgctggcaattttctggctgctgctgaggatttgtctcctaatggcttcagaacaggttcctttttcgttttctcattaatttgatcatgatctgagaagaattatgcctgaaagtttgtcaatttagctcaaggaaacgtttttttgttgtgcatgtgcagtcttagacattgatgcggtaggaacattcaacatgtgtcacgcagctctcaagtatcttaagaaaggagcgcctggaagagactcatcaagcggtggaggttcgattattaacattagcgcgactttgcactacacggcttcttggtaccaaatacatgtctctgcagccaaggtaatttgattagtctgatagagtcattcaatgtcttgagttttggttagagaatcaagaactaagtaataggaacaaaagatgtagcaaaaatgtgatcttaggagtttgaaacttgaaacaggctgcagttgatgctaccacaagaaacttggcattggagtggggaactgactatgatattagagtgaacgggattgctccaggtcctattggaggtacacctggaatgagtaaacttgtacctgaggagattgaaaacaaaaccagagagtacatgcctctttataaagttggagagaagtgggatatcgctatggctgcactctacctcagctgtgattctggtatgctgagttaaataaagcacactctttaatataaaacatatatacatggttagatgatgtaactcattgcttgatttgtttaacagggaaatatgtgagcggactaacaatggtggtagatggaggactgtggcttagcaaacctcgccacttgcctaaagaagcggtgaagcaactctctcgtgcggtggagaagaggtctagggccaagcctgttggtctcccaaccagcaagctgtagatcatttgaatttcagatatcaaataagtgcacattgaaaaaatgttttggtttattgaattacattggagactgagaaaatggtattaagattatgtagatcaaactatcttatgcacaataaagtagctttctttgcaaaagaggcaaaacagtaacgaatatatgatcaaaaagataatcgcttttgaacctctcatcagtgataagagagaaatattccaaactcataaaatctcaaatggctaataaataagaacattgtgagtcactctctctgtttctcatctcctcatctttttatcttctttgattgatccacatg

SEQ ID NO: 23943 - DNA, 3003 bp, Unknown
  misc_feature (1)..( 3003): 2750-1469P.txt file - cDNA_ID_2157699; gDNA_ID_1620528; Annot_ID_159638
ggccttccctgaaagatcaaagtgttcaactttagttcaggtgatggaggaatcaaacgtaaggagtgtgtgggaataatattaccagatgagtggagaggataactttagcaccattttcaatcaaatacttgatcgttggaatggcggcacggattctggtatcgtcagtgatagtctgattatcatcgagaggtacattgagatcagctctcacgaaaaccttcttccccttcaaatcagctgaggtcagatctccgacgctcttcttcgccatagaaaccactcctctgcttcccttcccacgcaccgattcaactttggaagcaacgtggagagagaaacgacgggaatctagagtggcggagaagcctagaggacgcgcggaaacagaggtagagggaattggcagaagggaggcacgtgcgcgagttccggcggaggaagcaacagcgccggtggacttaaggagtgaaaaggcggaacttgcggcagcggaagccatgtggatcaatcaaagaagataaaaagatgaggagatgagaaacagagagagtgactcacaatgttcttatttattagccatttgagattttatgagtttggaatatttctctcttatcactgatgagaggttcaaaagcgattatctttttgatcatatattcgttactgttttgcctcttttgcaaagaaagctactttattgtgcataagatagtttgatctacataatcttaataccattttctcagtctccaatgtaattcaataaaccaaaacattttttcaatgtgcacttatttgatatctgaaattcaaatgatctacagcttgctggttgggagaccaacaggcttggccctagacctcttctccaccgcacgagagagttgcttcaccgcttctttaggcaagtggcgaggtttgctaagccacagtcctccatctaccaccattgttagtccgctcacatatttccctgttaaacaaatcaagcaatgagttacatcatctaaccatgtatatatgttttatattaaagagtgtgctttatttaactcagcataccagaatcacagctgaggtagagtgcagccatagcgatatcccacttctctccaactttataaagaggcatgtactctctggttttgttttcaatctcctcaggtacaagtttactcattccaggtgtacctccaataggacctggagcaatcccgttcactctaatatcatagtcagttccccactccaatgccaagtttcttgtggtagcatcaactgcagcctgtttcaagtttcaaactcctaagatcacatttttgctacatcttttgttcctattacttagttcttgattctctaaccaaaactcaagacattgaatgactctatcagactaatcaaattaccttggctgcagagacatgtatttggtaccaagaagccgtgtagtgcaaagtcgcgctaatgttaataatcgaacctccaccgcttgatgagtctcttccaggcgctcctttcttaagatacttgagagctgcgtgacacatgttgaatgttcctaccgcatcaatgtctaagactgcacatgcacaacaaaaaaacgtttccttgagctaaattgacaaactttcaggcataattcttctcagatcatgatcaaattaatgagaaaacgaaaaaggaacctgttctgaagccattaggagacaaatcctcagcagcagccagaaaattgccagcagcggcgttaacaagaatatcaagtttaccaaaatgctgaaaagttgcttccacaactcttctcgcatcttcttgcttacgaacatcaccttccaatccaatagccttcaaacgaaacagaaatcagacagattcaaacacatatccaacaaacaaagtcctcaaaacaaaaatcgctgattacctggattccaagagatcgaagagcagagacggcgtcatcgaggacttgttttcgtcgtcccatgatagcgatagaagctccatgtttgccaaactgagaagagatctcaaaaccgataccggatccaccaccggtgatgagagccacttgacctctgacgacatcaggtttgaacggagagtccataaccacacactcacacacaagcaaactcgccaaaagctttaagacaaaataaaataaaataaaaggagccagtcgcgtgtctgtctcttcttcttattacttggacctcttcacctactaaccaaactttactttaaatatctccctatttttagtgccaaattacaaattcattatctttctactaattacaatatttgttaccatatgacttcgattgatagtcagcgttttcgttatttaccaaatattaataaccacaaaaactttttttttttttttttaattaattacgaaagcttctttttttgggtgaatattaatacgtaagttttatctaaatccgaatttggtatataatcctagatattttaaaggaatttaataaaaataatttatttttttacaaataaaaaaaaaagggtatcgagttggaattttctacatctgtttgcgccgcgagctcgggtttctttctctctgaagcagaggctcttctagattaaaaaaaaaaaaaatctcaaaaccaaagcttcttcctttttttaccaattcgtatctcccatttttagttttcttcgatctcaaatcacaccatcttagtaagaatgaagtgaagagatttgagaagaaaaaaaacactaatcttgttcccgttcgattcttgaggaaaacaaatttcagctagatttaagatttggaatcgaatattactgtaatgttttgggtgacgggaacctagtgatgaaatcgttgcttgggtttttttgcgctgaagtggaaaccctaatttcttgggctttgtgcagtcacacagtttgcactctgcagtcactaaccatcttcttcttggaagattttgcttaaaggcgttagtaatg

SEQ ID NO: 23944 - DNA, 3000 bp, Unknown; identical to SEQ ID NO: 2389
  misc_feature (1)..( 3000): 2750-1469P.txt file - cDNA_ID_2157796; gDNA_ID_1620529; Annot_ID_159673

SEQ ID NO: 23945 - DNA, 3003 bp, Unknown; identical to SEQ ID NO: 18935
  misc_feature (1)..( 3003): 2750-1469P.txt file - cDNA_ID_2158031; gDNA_ID_1971919; Annot_ID_177179

SEQ ID NO: 23946 - DNA, 3003 bp, Unknown; identical to SEQ ID NO: 18935
  misc_feature (1)..( 3003): 2750-1469P.txt file - cDNA_ID_2158031; gDNA_ID_2926265; Annot_ID_204910

SEQ ID NO: 23947 - DNA, 3003 bp, Unknown; identical to SEQ ID NO: 18933
  misc_feature (1)..( 3003): 2750-1469P.txt file - cDNA_ID_2158039; gDNA_ID_2926147; Annot_ID_197822

SEQ ID NO: 23948 - DNA, 3003 bp, Unknown; identical to SEQ ID NO: 18933
  misc_feature (1)..( 3003): 2750-1469P.txt file - cDNA_ID_2158039; gDNA_ID_1620633; Annot_ID_162762

SEQ ID NO: 23949 - DNA, 3000 bp, Unknown; identical to SEQ ID NO: 2424
  misc_feature (1)..( 3000): 2750-1469P.txt file - cDNA_ID_2158115; gDNA_ID_1620533; Annot_ID_159791

SEQ ID NO: 23950 - DNA, 3000 bp, Unknown
  misc_feature (1)..( 3000): 2750-1469P.txt file - cDNA_ID_2158118; gDNA_ID_1620533; Annot_ID_159792
tgccattgaactttaaaaccgtcacataaagtgtgctttgggttatctcatatctttttcttttttttttgataaaaaaatgtgccttagttcttgcgtgctatatacttcatctcgttgatatccaaatctgtcccatgcaatcaaatttacttcatctcgtaaaatccaaatgatttgaatttttagtaaatttttatatgattttgattattttaggaaagttaatataatttgttgtaaaatttttaaattttatttaaaaccatcaaatttagatttctttattttaagtaaaaaatcttctcaaatcctctcaaatccttcaaaattaagaaaaatcgaatccataagctgtttttaataacagtagaatcagtcaatgttccttgaagacatgatatctatttgatttgctacattctctaggctattcatggcgcataagcgcgtttgccattcaagttgttgttgcactatagaatttatgaagtgcaaccgttaaaacttgaagaaaaaagtgtacgttatacatctgtgaataaaactacaaaacaggcagccggtggcgaaataattaagcccatacgtgcatagtcaaccgatgttcgaagggtgtgtcttaatcctctggggatccttacatttgatggaggctatagaaaacacattcacacatgaaatttatgtactctctagaaggaaaaatgtgcgatggatatacaaaatctgcagtgcacagatcataaacagagttggttctttggacttccatcattgtcgctgtccgggtgggaggcaagttgacacttccatgttgagaagcaaagcaaagaaaagtgagttcgaactttaatggtgtttttgggctgaaagaaaactaactttgttgggctggaatttggcaatgactgacctgattgaacggcgtttcattttggacatttattttgtagttggaacttctaaaaagtgagttcttaattttgggtaattttttcttctaacacgtacgtcttattcaagtttggatcttttcgatcacatgttaatattcaataaaaagttttaaagtataatctcaaaaccatctattaaaaataaattaatttttatgtttaaattactttttaaggataatatatagttgttttctttttaaaggtttttgttttatatttactctaagcttggtttatgcatatttttaagtcaatattctctctaacaatatacggatttgacgacactcttaatcgatcagtgaaacatgtggaccaacttagaatataggctaaggatgacaggtccaaattatagcgtgtataacttttctgctagatgatttcataaacttctaagtttagatatcttttagataacagtctacagacggacagatcgtctccatatataaattttcccaatgtcttgtaatcattaaagcttaatgctttatccttagaaattgttcttttgctccacaccaagtcaataacgtgacaatttagcttatcactttcccaactttaatcggtgtaacgagatcacacttatctttttaataagaatcatattgtaagactatagaatttcaaaactaattggataatattaaaataaagaatatgtttggtacaaaataagtttataattttaaggatcattttataaataaaaaatttaacttttaaaatatgaagatgtgattaatattccttcaattaaaaataaaacactatttaattttattttatttttgaaaatgaaaatgaagcatattgaaaagaaacaattcattttatttttttgaaacaattcatttttatctttaaaatgaaagaaaatatgaaatttgaagcaccattagtaagtaaaaaaatgttaacattcaacatggcatgcttctttccctctttgtcttatgctgagtagggaaacgtcaatccgaatttttttgttaaatccaaatatagcattccaagcctactacgtcagaagttctgaatgttcaataaatcattgatttcacacacacacacaaaaacaaaaacaaaaaacaaaagaattcaagatcatggtaaaggttaagtcattagcaaaaaaaaaaaaaaaaaaaaaaaaaaaatagaggtttagttttcatcttcatatttgtacctcaacatgtgccattcaggcttgcctcaaagaaaagtcagggtcactgtctaacttatagaaaaattcaaattatcatctatatattcatatttttgaactttggctcaaatatctcaacaatttcaagaaatgtaaaatctcaaaaaaaaaaaaaaaaagagttaaaaatgggtcaggtatcagagcatctccaactctctagttaagagattctcacataaagaaaaaattgaaaacaatattatttaatttaaaaatggtgaaaaccccatggcacgtgtatttttaaactggtttctatttaatttttcaattctaaaattttattacctatataccaatttaaattaaatattcttctttttattttcttataatcatgaaataaaattatctttatattagactccattatgtataattcaaattatatattaacattattttaattgatattaattaaagtaagtgcaaaatattaaactaatattgttttaattgttatttgatatctttaaaagctaaaagtaactaacacaatacattgatgaatatatttatatttaaaatgtaattgaatatatattttaaaaaattaatgaaagtttttgcataaaaataatattaaactatttatatcatattgatgagatattttgatgattgaagtactatatccgaaaattcaatgattgaagtactatatccgaaaattcaaaattgtatggatactactagtctactagatctcggttgccgtgttgaactattaatggaaagaaaaacagagcaatattatttttcacttctatcgataaccaaacgaaaaaaaacatg

SEQ ID NO: 23951 - DNA, 3000 bp, Unknown; identical to SEQ ID NO: 2421
  misc_feature (1)..( 3000): 2750-1469P.txt file - cDNA_ID_2158136; gDNA_ID_1620533; Annot_ID_159798

SEQ ID NO: 23952 - DNA, 3000 bp, Unknown; identical to SEQ ID NO: 3384
  misc_feature (1)..( 3000): 2750-1469P.txt file - cDNA_ID_2158274; gDNA_ID_1620644; Annot_ID_163147

SEQ ID NO: 23953 - DNA, 3000 bp, Unknown; identical to SEQ ID NO: 3384
  misc_feature (1)..( 3000): 2750-1469P.txt file - cDNA_ID_2158274; gDNA_ID_2926217; Annot_ID_203045

SEQ ID NO: 23954 - DNA, 3000 bp, Unknown; identical to SEQ ID NO: 3391
  misc_feature (1)..( 3000): 2750-1469P.txt file - cDNA_ID_2158280; gDNA_ID_2926217; Annot_ID_203048

SEQ ID NO: 23955 - DNA, 3000 bp, Unknown
  misc_feature (1)..( 3000): 2750-1469P.txt file - cDNA_ID_2158305; gDNA_ID_1620644; Annot_ID_47565
tgcaaaagtcgctgactttggtctttctaaagatgtagcttttggacaaaaccatgtcagcacggccgtgaaaggaagtttcgggtacttagacccggagtactttagaagacaacaacttaccgacaaatccgatgtttattcctttggtgtcgttcttctagaagctctgtgcgcaagaccagccatcaatcctcagctaccaagagagcaggttaacttagctgaatgggcgatgcaatggaaacgaaaaggacttcttgaaaagatcattgatcctcatttggctggaacgattaatcctgaatcgatgaagaagtttgctgaagctgcagagaagtgtttagaagactacggtgtcgataggccaacaatgggagatgttctgtggaacttggagtatgctcttcagcttcaagaggcattcactcagggcaaagcagaagagaccgagaacgctaagcctgatgtggtgacacctggctcggtgcctgtgtctgatccatctccgatcactccctcagtcaccaccaacgaagcggctactgttccggttcctgctaaggtggaagagaacagtggcacggccgtggatgaacactctggaacagccatgtttactcagtttgctaaccttaacggaagataaaaacaaactaacagataaataattaaaaaaggacataaagaatgcaccaaaccgaatttgtcgttataaacagtaattgcaatagaaaaaacttgactttttaaggtgatatatttgtttctttgtatgtttttttggtggtggtcggggagatgtgtgtgatatttctatattttggtgtattttataaaatttatatattttttgtatgaagtgtaattttgtgggtggatatgtatatgtatgtatgtgtacttctaaatgctctgctgcatttactttacttatcctccttcattgtagttgttaatattagcttacaaatacaaattcacattgaaacataagtgtgtgtgaatcttacttgaaatttacatcattttgtacacacaggaaacaaaaagttctctttttgtattctaagaaagttggttttacagtctggactctgagcatctgtttcagagtagaccagaaaagatctgtttcagagtaaaaaaatttttatcatctggttttgcaaatgaatctcttctctaagaaagtacctaaacattaactggggaataatgtgttcgttctcccatagtctttggaaaaaaagggtaacctattctcgtactttgttgtctagtgtaaactctagttaaagctgtcacatttgaacctgaattagtaatattaaggaaaaggaactcaatggtttgtgtgttgttatatattggattcaagctttgattcattgaatggaattttagtgtttggtttacgacctctgttagttaataatcatagacaccatttccttctttagatgggttagtttggttctaatcagggaaagccattaatttttccatctaatcattgtagaaaccttgcaatattgtgtatatgtaaacatacacaatcgtaaatgtttggatatcaaactcttcacaagtgtttgtaggagaggaagtataggtgagaaaagattagggtcagtcacagattctgcaaaaagtaagagaaccatgaaagtaaaataaaacataaacccagaaatagaaaccattcccttcaattaagcaaatgagttctctttccttttctcttcttatgtgtatatatagaaatgaatagcttaaattttcccacaaaagccaaagagacccaaattattgttttattttgtttttgttacctcgcttatatctattatcatggaaaacataagtgggttggcttttgatatgggagagctaagaaacaaccttcccaaaaagtaaaatcctgaaaaaggatttcattgattatgattgtttgtttaagttatggaaatccggattactatctaattttggattttgtgaatggttgtaaaataggagaggattatcaaggtactattcaggaaaagcgagatcattcatatgtatctcagatgtaaaatgccttgaggatctgaagaaaccaacccaaacttttgatgacgatgatgatgatgaggcttacaagaagaggaagaagaagaacaagcaatcatcttcatcttcattttctgcagctattaacagcaatgtgaatttctcaaactacccttgtcgaagggtctctagtagcacccactgttcctcaccttgtgttgcttaggaaaaaagaagcttacactttctcaatttatttagtagctcctttggtttttattctcaacccaacactgaaaacacaaacttcagttcagtgtgtgggggcgtcattcatatccaatttttgattttctttactgtttttatgtcttttttttgtggttatctttttttcttgcgcaaattatgtagatttggatgtgtttgttccaatttgcttattgggacaaaaatgttggaaatcctttcgaatgtaatcatacgtacgcatagaattgaataataagtgaataaatatagaattgaaaggttcttaaaatattccttagcatttcctatttatctgaaaacatgcaacacacaaagacaaagtcaggacaagtcataatgagtaattgcttacgtggctaattttacatgattcacgacaaaagggagcggcctagaggcgcgtatcacacacgcgcttccacttaaaagctgacgtggtcaattggctatctgacattctatttacccattttctccctttctttcctctatattcacgatcctgccattgtacacccaatcatacgctcctgagatcctcatgacttgttcttaccgtactccgcgagacatgcgattgatgattcttgactgtattcattgagaaaaactgttcgcaaaaaccttgagcttcatcatcgtccattactcacctttcagtttcagatg

SEQ ID NO: 23956 - DNA, 3000 bp, Unknown
  misc_feature (1)..( 3000): 2750-1469P.txt file - cDNA_ID_2158305; gDNA_ID_2926217; Annot_ID_142280
gcaaaagtcgctgactttggtctttctaaagatgtagcttttggacaaaaccatgtcagcacggccgtgaaaggaagtttcgggtacttagacccggagtactttagaagacaacaacttaccgacaaatccgatgtttattcctttggtgtcgttcttctagaagctctgtgcgcaagaccagccatcaatcctcagctaccaagagagcaggttaacttagctgaatgggcgatgcaatggaaacgaaaaggacttcttgaaaagatcattgatcctcatttggctggaacgattaatcctgaatcgatgaagaagtttgctgaagctgcagagaagtgtttagaagactacggtgtcgataggccaacaatgggagatgttctgtggaacttggagtatgctcttcagcttcaagaggcattcactcagggcaaagcagaagagaccgagaacgctaagcctgatgtggtgacacctggctcggtgcctgtgtctgatccatctccgatcactccctcagtcaccaccaacgaagcggctactgttccggttcctgctaaggtggaagagaacagtggcacggccgtggatgaacactctggaacagccatgtttactcagtttgctaaccttaacggaagataaaaacaaactaacagataaataattaaaaaaggacataaagaatgcaccaaaccgaatttgtcgttataaacagtaattgcaatagaaaaaacttgactttttaaggtgatatatttgtttctttgtatgtttttttggtggtggtcggggagatgtgtgtgatatttctatattttggtgtattttataaaatttatatattttttgtatgaagtgtaattttgtgggtggatatgtatatgtatgtatgtgtacttctaaatgctctgctgcatttactttacttatcctccttcattgtagttgttaatattagcttacaaatacaaattcacattgaaacataagtgtgtgtgaatcttacttgaaatttacatcattttgtacacacaggaaacaaaaagttctctttttgtattctaagaaagttggttttacagtctggactctgagcatctgtttcagagtagaccagaaaagatctgtttcagagtaaaaaaatttttatcatctggttttgcaaatgaatctcttctctaagaaagtacctaaacattaactggggaataatgtgttcgttctcccatagtctttggaaaaaaagggtaacctattctcgtactttgttgtctagtgtaaactctagttaaagctgtcacatttgaacctgaattagtaatattaaggaaaaggaactcaatggtttgtgtgttgttatatattggattcaagctttgattcattgaatggaattttagtgtttggtttacgacctctgttagttaataatcatagacaccatttccttctttagatgggttagtttggttctaatcagggaaagccattaatttttccatctaatcattgtagaaaccttgcaatattgtgtatatgtaaacatacacaatcgtaaatgtttggatatcaaactcttcacaagtgtttgtaggagaggaagtataggtgagaaaagattagggtcagtcacagattctgcaaaaagtaagagaaccatgaaagtaaaataaaacataaacccagaaatagaaaccattcccttcaattaagcaaatgagttctctttccttttctcttcttatgtgtatatatagaaatgaatagcttaaattttcccacaaaagccaaagagacccaaattattgttttattttgtttttgttacctcgcttatatctattatcatggaaaacataagtgggttggcttttgatatgggagagctaagaaacaaccttcccaaaaagtaaaatcctgaaaaaggatttcattgattatgattgtttgtttaagttatggaaatccggattactatctaattttggattttgtgaatggttgtaaaataggagaggattatcaaggtactattcaggaaaagcgagatcattcatatgtatctcagatgtaaaatgccttgaggatctgaagaaaccaacccaaacttttgatgacgatgatgatgatgaggcttacaagaagaggaagaagaagaacaagcaatcatcttcatcttcattttctgcagctattaacagcaatgtgaatttctcaaactacccttgtcgaagggtctctagtagcacccactgttcctcaccttgtgttgcttaggaaaaaagaagcttacactttctcaatttatttagtagctcctttggtttttattctcaacccaacactgaaaacacaaacttcagttcagtgtgtgggggcgtcattcatatccaatttttgattttctttactgtttttatgtcttttttttgtggttatctttttttcttgcgcaaattatgtagatttggatgtgtttgttccaatttgcttattgggacaaaaatgttggaaatcctttcgaatgtaatcatacgtacgcatagaattgaataataagtgaataaatatagaattgaaaggttcttaaaatattccttagcatttcctatttatctgaaaacatgcaacacacaaagacaaagtcaggacaagtcataatgagtaattgcttacgtggctaattttacatgattcacgacaaaagggagcggcctagaggcgcgtatcacacacgcgcttccacttaaaagctgacgtggtcaattggctatctgacattctatttacccattttctccctttctttcctctatattcacgatcctgccattgtacacccaatcatacgctcctgagatcctcatgacttgttcttaccgtactccgcgagacatgcgattgatgattcttgactgtattcattgagaaaaactgttcgcaaaaaccttgagcttcatcatcgtccattactcacctttcagtttcagaatg

SEQ ID NO: 23957 - DNA, 3003 bp, Unknown; identical to SEQ ID NO: 19269
  misc_feature (1)..( 3003): 2750-1469P.txt file - cDNA_ID_2158341; gDNA_ID_1620648; Annot_ID_163361

SEQ ID NO: 23958 - DNA, 3003 bp, Unknown; identical to SEQ ID NO: 19223
  misc_feature (1)..( 3003): 2750-1469P.txt file - cDNA_ID_2158384; gDNA_ID_1620652; Annot_ID_163505

SEQ ID NO: 23959 - DNA, 3003 bp, Unknown
  misc_feature (1)..( 3003): 2750-1469P.txt file - cDNA_ID_2158388; gDNA_ID_1620649; Annot_ID_47686
gaaaggattagttatagtttagttagatgtcatcatcgtggatacaaaatactattcaatagacattttcattcttaaccaaatggatcacatacataatcagcttctgtaatgtcagattgtcagtttcttcaatgaactagaatttccaacaatccaaattccaaagtaatttaaaatgtaaaagatgtcattggtaaaatgggtttataatccaggaaactttgagcccaaaaaaggcccatagatcatcgaaggcctttgatatctgcgacggcgagatcagcttcgtcttcctccaacgctcgatttagggaggatggtggtttctccggggctgctctcaactgtttcaggtcactattcgctccggttgcttcttctatatactttcccactgctttttgatattgtccttagtaatcatctagcttcgattttggttcataggcgtaatccgattggctccgtcacaccggattctaagacgcgatgggttcggacccatttgcttcaagttttctggggatttggtaatttacctttctttctattgcggcttaacagcttaagaagcttttcacttaagctctgtttgagtgtgtagagtatcaatgggagagtcagtcataaacatgtgcgtggaagtggcacggtgggatctgtaggttccgctcgtgaaagttggagctctcataagaagcttcccgaagaagagcccttatggctgagtcttcttagagacatggtctggtatgaaattctcccactgagtctagcttttaatatatatatctgctggaagagtctgaatgttgcattatattgaattgcatttttcttgtgagaaggagcacgagatctctcttgtctttcatggctgagcaaccaagtcagctgaaatacatagagtggccaacttttgcaagcacggtatgtcttgttgttgttgttacaacatatgagaaagaaagagatagtttgtgggtgtaactttgtttttttttgttttggtaacaaacagctaaagactgctacactgagtctgtgtctggtagctgtattcattgttgcgctatcatcggtggatgctgctctttgttacatattggcgttgatcttgaggaaagccccatgaggaaggcaactccattatcatttgtctcttgtagccttattgataggtgaatgtttttgatgtagatagaatgcaggaggatgtactcaaaatcaatgtgtttctaaaagttgaattgaaatgaaacctctctggtctagtatctctcacacattaagggaaatccaatcatatatgtcccaagcaaatcacaccataaataataaggaaggattcaacatgttgttggtttacaagtaagagaataagatgatgctaggtgctacttgagaacaacagcagcattgcgaatggagagatactggtggacttggtcggaagaaagtgatctcacagtctggaaaacatgagcattagcatagcggaggtttgttcttgggtccacataaggtgcctgcgagggattagagaagctcattgagttttgttgtttttgggtagtgaataaatttgtagaaaagaatcgatcactcaaaaacagaataaaacctcatatccagtaatatcgcaaagtctcttgcatggttgagtggaaggaggcgattcaatgttaacatctgcgaggcacaaagaagatttgatttttgattcaaacagagtcaaaaatccattcaaaatcagaaatcagagagagagaaaagagttacaagtggggaggtcgggaggaagatctgggaagttctcagcttgaagaatctgcttgaggtgtttccaccttctgctgcttgattgtgcttttgggtacttttcgtaggcttgcttcttcttaaagctcaatcgcgacgccaccactatatctgcctccatcaactctctctccatctctctctctctctctggaaaaaaaaaccttattaattccgacgaggagaacgacgacgacgaaggcttctttcttatacggtgtcctcttaaaaatcaaaccggtccggtacggtagtggaatgaacaatttagtaaaccgatagcagtgtttacattggaaaccgaattgaatgaagtgaagctgtttctttctagatcccccaaagcgagttcatcatcttcttcgcctggattcgatcaagactagcactttcatcagatttgattacaatctctcttatcttccaagttataatcataatatccgagcaatttgggatctgggtctttcctctacattcaatttcttaataaagctggcctctttcttccgagatggttcttgagcgatgatgagtgactctcagcgatcactttctgtgcgattgagccgccggggtgagagaagcaatcattactcacaatctaaaggtctcaacccaactctttttgaactaatgatcatcactttcttttaggtatagtggtttacacatgaaaatttgaagatgacccccgttatagtgttttgtttccactatagaagaatctaatgcgtaatgaatgattatgtcttcgtaatgaatccctaatggattctattactttgtctccaatgatgcagatgctgtggctggcttcttctctcccaccagattgcatgctgattacactttgaaaaaaatttggaaggcaggcttccttcgcttgcttcttgttggcggcattgtctggatgctactcattctatttgccctcttgtttcatgtttggtcctgtcaatcttccctttctttcttctcaggtttcctccaacttctttacacttgccattcttcactaaatctatcatttgtcatacactcaatagaagatgttgttattgtactagttactccaaccatcttctgcattcaccgcagattctatcacagtaacctcatgttctttgtaatttcgttgcagctatttgcaacaaagaaggcagactctatgtcatg

SEQ ID NO: 23960 - DNA, 3003 bp, Unknown
  misc_feature (1)..( 3003): 2750-1469P.txt file - cDNA_ID_2158388; gDNA_ID_1620649; Annot_ID_163390
ctggaggaagaaagacggagagcttctccgtgccatggaagcagacagacatgttgtcaattgtatagagtctcatcctcacatgccactgatgtgtagcagtggaatagatactgatatcaaaatatggactcctggaggaaccgagaaacctctgtcgccaggaaatgcgaaacaggtaatgccacatctattgctaacctcgtttgcttcttttatttttggtgtttgaagactcggaggatatgctttagttaacaagaatgtaactttggatacaatacatgtgactggaggctgaatttggttttggaaggcaaactaaatgtttgtatgtttgcttcttggaaacaggcttcgggttttggtaacccacgatggttcgacggatattatgtggatgacgatgatgattctgacgatgaatctagtgaagagagttcagatgatgatgatagttcggaagaggaggagaatggtgaagttgatgttgagattacgaaggatgatgataatgatcatggggatgatgatgatgatgatgatgaggatgatgatggggatggggatggggatgagggatgagatttgtatagacatgtatttatctaaacacaaaataaaacagcatatggtaacagtaccaaagaaaggattagttatagtttagttagatgtcatcatcgtggatacaaaatactattcaatagacattttcattcttaaccaaatggatcacatacataatcagcttctgtaatgtcagattgtcagtttcttcaatgaactagaatttccaacaatccaaattccaaagtaatttaaaatgtaaaagatgtcattggtaaaatgggtttataatccaggaaactttgagcccaaaaaaggcccatagatcatcgaaggcctttgatatctgcgacggcgagatcagcttcgtcttcctccaacgctcgatttagggaggatggtggtttctccggggctgctctcaactgtttcaggtcactattcgctccggttgcttcttctatatactttcccactgctttttgatattgtccttagtaatcatctagcttcgattttggttcataggcgtaatccgattggctccgtcacaccggattctaagacgcgatgggttcggacccatttgcttcaagttttctggggatttggtaatttacctttctttctattgcggcttaacagcttaagaagcttttcacttaagctctgtttgagtgtgtagagtatcaatgggagagtcagtcataaacatgtgcgtggaagtggcacggtgggatctgtaggttccgctcgtgaaagttggagctctcataagaagcttcccgaagaagagcccttatggctgagtcttcttagagacatggtctggtatgaaattctcccactgagtctagcttttaatatatatatctgctggaagagtctgaatgttgcattatattgaattgcatttttcttgtgagaaggagcacgagatctctcttgtctttcatggctgagcaaccaagtcagctgaaatacatagagtggccaacttttgcaagcacggtatgtcttgttgttgttgttacaacatatgagaaagaaagagatagtttgtgggtgtaactttgtttttttttgttttggtaacaaacagctaaagactgctacactgagtctgtgtctggtagctgtattcattgttgcgctatcatcggtggatgctgctctttgttacatattggcgttgatcttgaggaaagccccatgaggaaggcaactccattatcatttgtctcttgtagccttattgataggtgaatgtttttgatgtagatagaatgcaggaggatgtactcaaaatcaatgtgtttctaaaagttgaattgaaatgaaacctctctggtctagtatctctcacacattaagggaaatccaatcatatatgtcccaagcaaatcacaccataaataataaggaaggattcaacatgttgttggtttacaagtaagagaataagatgatgctaggtgctacttgagaacaacagcagcattgcgaatggagagatactggtggacttggtcggaagaaagtgatctcacagtctggaaaacatgagcattagcatagcggaggtttgttcttgggtccacataaggtgcctgcgagggattagagaagctcattgagttttgttgtttttgggtagtgaataaatttgtagaaaagaatcgatcactcaaaaacagaataaaacctcatatccagtaatatcgcaaagtctcttgcatggttgagtggaaggaggcgattcaatgttaacatctgcgaggcacaaagaagatttgatttttgattcaaacagagtcaaaaatccattcaaaatcagaaatcagagagagagaaaagagttacaagtggggaggtcgggaggaagatctgggaagttctcagcttgaagaatctgcttgaggtgtttccaccttctgctgcttgattgtgcttttgggtacttttcgtaggcttgcttcttcttaaagctcaatcgcgacgccaccactatatctgcctccatcaactctctctccatctctctctctctctctggaaaaaaaaaccttattaattccgacgaggagaacgacgacgacgaaggcttctttcttatacggtgtcctcttaaaaatcaaaccggtccggtacggtagtggaatgaacaatttagtaaaccgatagcagtgtttacattggaaaccgaattgaatgaagtgaagctgtttctttctagatcccccaaagcgagttcatcatcttcttcgcctggattcgatcaagactagcactttcatcagatttgattacaatctctcttatcttccaagttataatcataatatccgagcaatttgggatctgggtctttcctctacattcaatttcttaataaagctggcctctttcttccgagatggttcttgagcgatg

SEQ ID NO: 23961 - DNA, 3003 bp, Unknown; identical to SEQ ID NO: 23960
  misc_feature (1)..( 3003): 2750-1469P.txt file - cDNA_ID_2158388; gDNA_ID_1620652; Annot_ID_163508

SEQ ID NO: 23962 - DNA, 3003 bp, Unknown; identical to SEQ ID NO: 23959
  misc_feature (1)..( 3003): 2750-1469P.txt file - cDNA_ID_2158388; gDNA_ID_2926215; Annot_ID_142189

SEQ ID NO: 23963 - DNA, 3003 bp, Unknown; identical to SEQ ID NO: 23960
  misc_feature (1)..( 3003): 2750-1469P.txt file - cDNA_ID_2158388; gDNA_ID_2926215; Annot_ID_202928

SEQ ID NO: 23964 - DNA, 3000 bp, Unknown; identical to SEQ ID NO: 3520
  misc_feature (1)..( 3000): 2750-1469P.txt file - cDNA_ID_2158392; gDNA_ID_1620652; Annot_ID_163509

SEQ ID NO: 23965 - DNA, 3000 bp, Unknown; identical to SEQ ID NO: 4731
  misc_feature (1)..( 3000): 2750-1469P.txt file - cDNA_ID_2158468; gDNA_ID_2926149; Annot_ID_197948

SEQ ID NO: 23966 - DNA, 3000 bp, Unknown; identical to SEQ ID NO: 4731
  misc_feature (1)..( 3000): 2750-1469P.txt file - cDNA_ID_2158468; gDNA_ID_1620725; Annot_ID_165927

SEQ ID NO: 23967 - DNA, 3003 bp, Unknown
  misc_feature (1)..( 3003): 2750-1469P.txt file - cDNA_ID_2158498; gDNA_ID_1620667; Annot_ID_163975
tcgtaaataaattaaacaatataaaacactataaaaatattttagtcggtggcttgccttcatttatatgtacgtagattcgttcgatatgctttaaaacaagtgaatacgaaaattctaaagtaagacacgaaaatacacgtcgataaaagacaaacccattagaaaaacaaaacagaaaatggaaagttctaagcaaaaacgatgtcgctctagcgtagtcgagaccattgaagcaccattaccactagtgtggtccatcctacgtagtttcgacaaaccacaagcttatcaacgtttcgtcaaaagttgcaccatgcgctctggcggcggcggcggcaaaggaggagaaggaaaaggctccgtccgggacgtgacgttagtctccggcttcccggcggatttcagcacggagaggctcgaagagctagatgatgagtctcacgtgatggtggtaagtattattggcggtaaccataggcttgttaattacaaatcgaaaacgaaggtggtcgcgtcgccggaggatatggcaaagaagacggtggtggtggagagttacgtggtggatgtgccggaaggaactagcgaggaagatacaatattttttgttgataacattattcggtataaccttacttcacttgctaagctcacaaagaaaatgatgaagtaagctctatatgtttaagctaatcaataaactaatcgtagttatagttatgaatcattggattaagaaaaaaatggatcgttatggattagtttttaatctttaaggcttttagcattgcaataataataataaaaatataaagaatcggaataatatgctcgtgtggtttctttcttccgtgattgtaattgtctcttttctcctactcttttatgaagagaaataaaatgaaggttatttctacatttttacaattaggaatctttgaaataatggttttaaattgttgactcagttggtttagttactaaatatactgatttgtattgctgacaacaaaagttagactaaatacatgtttgaaaattttcttgataattctttgtccattttgcataatgcatagtaaaagggcatcatgtaagattcttaatttgaagttctaaactaattaatatcaatactttagtataatattattaggttggaaggtattttacactcagaacagaaagtatgatgacctaaactgtagatctcgtgaatttcatggccgtttgactcaaatctgttcggaggttatgaatttatgatgtccgttgaatcattgagctgttgaactaatggagtggtttactctataatactttggtgtgtttttatcaaaaaccgaccgaatcaacagatataatttattttgaacaagttggtgaaagacaaaatagaggttctattgatctaaatataacggtgaagattggaaattttcatgttttttcgggaattgggcctttatgaatggactattgggccttgctatttcaaagcttgggtgttggtggggcttgctatttcaaagcttgggtgttggtgggggagtgtgagtggttgccacgtgaaggatacttattcccttgtccttttcattcccgcaattttagggattttggtcaacgaaacttatttcactttctttcagtaaatcgatttttttctcaggtgtatatttctcaagttattgtctactttacaaattttcatgggtttctcctcctctttttgtattagatagattagaataaatgttcgcttgaccagtcgttaatttatttatagacacttttgaagaattggttattaataaatgtagtacctaccaaaacataagtaacgacaaacagatagttaagttatgattaaaagaaatttcttcaaataccatttctattagtttttctctcatttttcatactattattcttcattctttttttgtttgtttagcaattaaaaatcaaagttttgaatattggagacggaaagaggtggccgagtaatgttttttcctcttaaaacgattactatactacctagaaaacaattacataatctaaaagtaatatactatacactatgtaatctagaagtgaaatgttaatttatagtcaatatctaaggccggttgttttagcaaattataagtcaattttttggaatgttatgagtaattcaaagtaattaaattatatatcgtaatcgagccccatcatccgtcgaggcgaatgccgcgacttttctttcaaagactttaaacaaagtaaacaattagtggtgcattcggagaaaagaaaattagtgcttacattataaacgacgttgcgtggctcggaaaaggacacaacaacatgtgttacattaccaaagtcggtaatttggctcacataaatgtcttttctcactttttcttttattttgtttgtttcattacttttagagaaaaaaaaaatacagttgaaacttgaaccacaactactcctcacgttttgccttgaggaatatttcaccttattagggccaaatttgtgtctctgatcttcttgtactccgatgtctaacgacatcgttatgtattcacaatacataaaatttccaacaaaaagaaaagtagttgatctcaatatctcatcattaattttcaatcaaatctttgtgggggatgggatttattctaagctcaattataacttatataagaaatgaaaacaaccaaacacaaggttaaagagaaagtctctttattgacaattctttagtcgcacacttataatagattcatctgctattttcctaaactccagccttcaatctcggtcctagacattcggcaatcatttacacacatatattaatacattaactctattcttatttttccgattttcttactttaataagaacaactacaatctcaaacacatagcaagagaagagatacacaaaacaaagactctgtttgttattcttccttctttttgttttcaagaatg

SEQ ID NO: 23968 - DNA, 3003 bp, Unknown; identical to SEQ ID NO: 23967
  misc_feature (1)..( 3003): 2750-1469P.txt file - cDNA_ID_2158498; gDNA_ID_2926171; Annot_ID_199491

SEQ ID NO: 23969 - DNA, 3003 bp, Unknown
  misc_feature (1)..( 3003): 2750-1469P.txt file - cDNA_ID_2158506; gDNA_ID_1620667; Annot_ID_163977
gaagtagatgaagatttggatacggtttcttcaaatgtaagcttctctgttaactgcagcacaagtggagttagcgaaatcgagaagaccggtgagagatctgattgtgatgagaagtctagagaaagtcttgatctaatgatgtcaagattcttaccagctgctaaagcaatggctcttcagacacatcagaaacatcaatcttcttataactcttcagagcagaagctaatcactcagaacagagaagctctcgtagctcgtcaaagaagtcaactggttgcagaacatgaacatttcgccattgttcagagtctttacgatgacttaaacattgatgatgatactgaagacgacgagaatgatgatgatggtgatgattatggtcatgttgatcacaagatctacccagctgaagttaccaagaaagcttgcggattcttgccaaggctttgtgcgaagaactcattcaagtttctaaacccggttcctttggattcagtatcaaaccggtctatgaaacattcgggtgatcaaaccagtttaccaaactggtcaactaggcgtctttccggttttatctctccgtaccgaacctcttgttcggattccggttttctcggaactcccgagaaaccagagagcttcaaaaggctaaacagaggaataagcaagtctcaagaactgtatccaacaagaacaagaagagaggttcttcctaattactcaaattctggagagatcaaaatgtttagaaactcgatctctactccttcgaggatccaacggaccacaattcacgattctaggtttcttgttgaggaagtaaacagaagaaggaacaacaagtcagggaatcttcaacaaacatcgtcggaatatacacctgcgctttctcctcctccgttaccggaaactccgtctcgttcctggctcggacgaaccctcctaccgccggtgaacccgagaccgtacggcgtcgttttaggtcaagttggtatcaagaaactgaatcaagaagttcttgaatctacgaaatgggaaacgatcgttaaaacatcgtatgttcacaacgatcacgctcgttattctcaggtattaattactctttgaacatttttggttctaacaaatcgaattcttttaaaaatacgttgtattattgaacattttaatttatatatcttctctttgtgacattcttctatgcaggagctgattgtttatccatctcgccagcaaaatacataaaaccagacaaattacttcttgtttttacattacaattaagttaataaatagttttaaggtttgcctcttatttttcttgtaggcaacacaaatgtacccgagattgattctttatgtttcaatatttttgtgtgtgttataattgtggcgtttgttttccgaccgcattatttgtaattggaagacctcatgttattgatgttagatacaatatggattccgtgcctaaccagttctgacttagccggtttagaccggcacaattatacaacataaccaggctgattcatagtgtcgattcgataaaccgatgaagtttcttaaataatcatatatgatcatatcatcataattgaaattagagctatctttgtctaagacacacatataatataagattttgattgacttctttttcttataatatcagctgcaattgacatttgatcatgacggaataaaatattttaagaaagtaatgggagacatgttactagcgatgatgctcttttttttttgcttttgtcaaattacgggtgatgactgatgatgttcatgcacattaattcaaaaccccatgtcatgtgtggtagtgctcattatacacaaacgatatgaaaaccgttggattaccgatatccaacggtcacaaagattcactattttattacgcactagtaaagtataagaggcaggcacgtcccccatgccccatgagtcttgttgttgaattcgattttaaaataacaaaattagagagtgagaatagatttggatactaaaattaaaaatacataaatcgttcattttgtgttttaaaatacttatggtgacgtggcttagtgtagtatagttaagcacgtataattattaaaaaaaaaaaatagaaaccaaaagtaaactacaagaaaattaggggttgtgaaattggaaaattttcgaaataattaaaaaaagaaaacaaattgtgcaaagagagagaagagggaagacaaagggaagagggaggagagagaaggcaccaccctttggccctggagagaccaaagatggtcgaagagagacaactctgagatcatcatcatcatcctgcaaaaactaacgagaaatcgattttcaaaaatataatcaagatcgatttctagggatattttgatttctaaatcctctcaccaacattctcttgcttgccctacccgcttgctggtttcatccagaaacataataatacattgtttgcattataaggaattcctttatacagtaagttttatcattacctatcatttgtttggttcctttacgtaatttgcaatgttcctcattttaaagagaacaacataatgttttttttaggtatatatacgttgcttcttcgaaacggtatcccctttggtaattattgttatttttattgcattttcttcaggtatcaagagatccacaagaagctgttagatcccagagattaacactgtgatgaaaagggttttgtgaaaatcaattttcaaacctggaaaatgatgatcaaggacccttatatccgacaattttcttctttcttctgtacattgtaatatatagaaaattaacattttttctctttctttcttttttttcttttgatatttggtttggttatatagaagagaaagtttgtttctgggaaatgggttttttggattttggtttgtaattagggaaaaaaatctttagtatatagtgtttgttgtaaaaaaccttataatgatg

SEQ ID NO: 23970 - DNA, 1061 bp, Unknown
  misc_feature (1)..( 1061): 2750-1469P.txt file - cDNA_ID_2158506; gDNA_ID_1563590; Annot_ID_147954
  misc_feature (55)..(55): n is a, c, g, or t
  misc_feature (114)..(114): n is a, c, g, or t
  misc_feature (159)..(159): n is a, c, g, or t
  misc_feature (354)..(354): n is a, c, g, or t
caggcacgtcccccatgccccatgagtcttgttgttgaattcgattttaaaatancaaaattagagagtgagaatagatttggatactaaaattaaaaatacataaatcgttcnttttgtgttttaaaaaacttatggtgacgtggcttagtgtagtanagttaagcacgtataattattaaaaaaaaaaatagaaaccaaaagtaaactacaagaaaattaggggttgtgaaattggaaaattttcgaaataattaaaaaaagaaaacaaattgtgcaaagagagagaaagagggaagacaaagggaagagggaggagagagaaggcaccaccctttggccctggagagaccnaaagatggtcgaagagagacaactctgagatcatcatcatcatcctgcaaaaactaacgagaaatcgatttttaaaaatataatcaagatcgatttctagggatattttgatttctaaatcctctcaccaacattctcttgcttgccctacccgcttgctggtttcatccagaaacataataatacattgtttgcattataaggaattcctttatacagtaagttttatcattacctatcatttgtttggttcctttacgtaatttgcaatgttcctcattttaaagagaacaacataatgttttttttaggtatatatacgttgcttcttcgaaacggtatcccctttggtaattattgttatttttattgcattttcttcaggtatcaagagatccacaagaagctgttagatcccagagattaacactgtgatgaaaagggttttgtgaaaatcaattttcaaacctggaaaatgatgatcaaggacccttatatccgacaattttcttctttcttctgtacattgtaatatatagaaaattaacattttttctctttctttcttttttttcttttgatatttggtttggttatatagaagagaaagtttgtttctgggaaatggtttttttggattttggtttgtaattagggaaaaaaatctttagtatatagtgtttgttgtaaaaaaccttataatgatg

SEQ ID NO: 23971 - DNA, 3003 bp, Unknown; identical to SEQ ID NO: 23969
  misc_feature (1)..( 3003): 2750-1469P.txt file - cDNA_ID_2158506; gDNA_ID_2926171; Annot_ID_140111

SEQ ID NO: 23972 - DNA, 3003 bp, Unknown; identical to SEQ ID NO: 23969
  misc_feature (1)..( 3003): 2750-1469P.txt file - cDNA_ID_2158506; gDNA_ID_2926171; Annot_ID_199492

SEQ ID NO: 23973 - DNA, 3000 bp, Unknown; identical to SEQ ID NO: 19486
  misc_feature (1)..( 3000): 2750-1469P.txt file - cDNA_ID_2158536; gDNA_ID_1620667; Annot_ID_163997

SEQ ID NO: 23974 - DNA, 3000 bp, Unknown; identical to SEQ ID NO: 19486
  misc_feature (1)..( 3000): 2750-1469P.txt file - cDNA_ID_2158536; gDNA_ID_2926171; Annot_ID_199511

SEQ ID NO: 23975 - DNA, 3003 bp, Unknown
  misc_feature (1)..( 3003): 2750-1469P.txt file - cDNA_ID_2158683; gDNA_ID_1620726; Annot_ID_165967
ctcaacaagcttagtgttgacaagaatctgattaaggtttattctaaagacgttgagaaagaacaagtgttgctattagctgcaagagcttcgagaatagagaatcgagatggtattgatgctgctatggttggatctcttgctgatccaaaagaggtaagaaattttaaaaactctgtttttaaaatgtttttgtttcttgaagaaaaaggaactcttttttctttgtcaggcaagagctggaattagagaagttcacttcaatctagttgataaacgaaccgctttaacttatatcgatggcaacggagactggcatcgagtaagcaaaggaactccagagcaggtaactaaaactgactctgttttacttttaagtagagtagtactgtttccctctaactacgattaaccgtttattgatgattcagattcttgatctttgcaacgcgagagatgatctgaggaagagtgtccactcggcaatcagaaattacgctgagcgtggactcaagtcatttgccatatcttggttccgaaatacaaattgtaacactgtctttttttttccttaccaattatgttcagagcacaaataccatattgtgaacaagttgcaagagaggcatatttgtggtttgattggtgatggagtggatgacgttccttcgttgaagaaagcggatgttggtatcgctgttgcgaatgctactgaagctgcaagagctgcttctgatatcgttttgactgagcctggacttagtgttatcatcgacgcggttctagctagtcgagccattttgcaacaaatgaagcactacacagtgagtgagcaatgctcttattaaactatacacagcgttttgtttttcattttttctgatgttttctcatgtatcagatttatgcagtttcaataaccatccgtgttgtggtaagttaatcaatcttgaatgttttctttaatatcatcaaataatctctgtttatataatctctctttgtaccttttttacagtttgggttcatgttcatcgctttaatatggaagttcgacttttcaccattcatggttttggccattgctttgttaaacgaaggtgagtttttcttctttataaactttgtttacttgctataaaagccaaacaataaaaaaacattattaacaattactcaacagaaaccaccaaggctatcacaatggataatgtcaccaatccttctcctacaccagatagcttgaaactcaaagagatcttcgcaaccggcgttgtttatggcagttacatggctttaataactgttgtgttcttttgggctgcatacagaaccgatatcttcccggtatgtataaacaaatctctcttcaaatctcccataacaacacaagcatactataaagttataacctcttgttttgttttttatatagagaacgttccacgtgagagacttgagaggcaatgaagcagagatgatgtgtgctttatacttacaagtgagtattatgagccaagctcttttcttcgttattcaatcaagaagctggttttttgtcgaacgacctggagagttattgtttctctctttcgtgacagtacaaactgtaagtatatagaaaaacatgattctgtttcttcttttttatttttcattataaagaagtcttcattgactcataaacttgaccttgtagattgcaacaacactcgcggtatacgcaagttgggaaactgcgagaatcgagggaataggatggagttgggctggagttatttggctctacaacatcatcttcttttttccattagacataatgaaattcggaatccgttacatactaaccggaaaagctcagagtctctttgacaacatggtacacttagttttgaacagttatgcaaaactcagcaatggaatatacaaccatactcaagctgaccatacttactcactcttggaagtgtcaactcctccatcccaggacttgagaggcgttgggtgggtttaatatcataccgtggtctagtttgttttgttttagttctttttatttgtttttggtgtaattttttttacttttttttttaattgaaattttagttaaatagaaattagcataatttttctactactccgtcttcaattttaattttcttcaactcttttttttttctttttaagtgtttccttaagttatatcactaaattgaaaacaatatatatagtatacttaaaacagcatctccagtgataacacaaggaagaaccaaatttggtgttttggtatctcaaatctcacactaaaactgaatttattattattttattattaaatctaaaattattttatattttgataaacattatttatttatttttttaaccctcaaaaatcatttattgattatgaatattttatctattttgtaacccacaaaaacaataattattttataactaatataatattataatcggtaattaaaaataataataaacaaattattttagacatgaaaaattgaaccctgcaaactacatgattaaataggtagaccagtattttcctattttgatttatgaatcaattaaaacttacaattacatactagtgtataacaataaacctcaaaaacttgtgatgaatgatgtaggaaataatagtactcttttgaatatcaacttaaatgtattttagcaatttgactaacaaacaattgttcttcacttttaataatcatccaatagaaccatagagaaacttcaagactttccacaaaaattcatcatcatcacataaccaagaaaacaaacgaggaaaaaagcccaaaaaataagagaaaagaccttaaaacgacgagtttcaccgatccaatcttccattgcaattttcacataacaaatctttttctttccccttgctcactccaagtctccaagcccccaaattttttcacaatcaatcatttctttgttgcgaaccaaacttgtgatatg

SEQ ID NO: 23976 - DNA, 3003 bp, Unknown; identical to SEQ ID NO: 23975
  misc_feature (1)..( 3003): 2750-1469P.txt file - cDNA_ID_2158683; gDNA_ID_2926153; Annot_ID_198218

SEQ ID NO: 23977 - DNA, 3003 bp, Unknown
  misc_feature (1)..( 3003): 2750-1469P.txt file - cDNA_ID_2158701; gDNA_ID_1620718; Annot_ID_165705
tgttgattacatgtttaacagatttgatttctcatatttgattattgcgatattctttaggaatgtgtgaatgaagagaaagaacaactcagtccagtatcgatcttagaatgcccttttaaagatgatgacgaagacgatgaaatcactgaccaaaatggtaattttatcaaatgactactactcaataatatttagcaagtcgttatacatcacaagagaaatgtgaatttaacgttataagcaattaacatttgcagatacatatgagaaaattgctagaaaaagcaggagattaaatggtttggtacggcttgagccactagacttggataaacgcatagagaggtatgtagagagacaagaagagtactcatatcacactctggagacggaagaggacgaatcagaaaatcaagcaaaccgcttgtttgctcttgtgaagttgagaatcggcgaaacaaatgacctactagcttctaaagtagcggataatctattgttagactatcttcaagaagataacattgggccaaaagaggagacattaatggtgaagaaagcagaagattgggttatgggtagacaagatgagatgtttatgagttgggaagtgaaaacgaagagagaggtttatgtgaaggaaatgaagtggggttgcattaatggagatgagagagagaatgtggttgaagagttggctaatggtttcttcacttcctttgtggatgaattcatctacgacttagtgttgtgataaagttagtgttttgggaggaaagttaagattttgattagattcataatgtattagatatatgctatctcaataaaactatatgtagttttgcataaggggaatgattcgtataaaaacttatgtaggtcatatgttcgttttccatttttaaaatctagaatgagagttaagagtccatagtcatttatgtgttgtttgtttttctaactagatcttaatatgaattattagttttctttatggtttatttttcgaattatctaaatcaaattcaatagccaaaatatttgaaagtcaaacgaaaactgtgtccttactcattgtatgatttaaaaaaataaactgaaaagacatttataatgtttcacaatcttataaaaccattattaactctaaacaaaatgttatgttcaaataagtgttaaactttgtataaaaaattttagtagccatttttgtaccagagatgtcaatcagctttcttacatcatagtataacttaaagacttgagatctcaatgaaatgaacacatttgaccaaagttatgtttttggaccttttcttgtttattcgagtattttcagtatctattaatatgtttttttcactattttcgaaatacatagatgcataattaattaacaaatgggtgtgctctgtataatgtaggcagtcacccataatccagcatctaaaacgtttaattaaagtttgttattttatacaggataagtgttatatcataatacaatatattttttttttgtcaaaaacataatacaatatataagatatataatctaaatatcttagattatttacggaattagtcaaatggttgatcagtagtggttgtgtttttgggaaaacatcgaatatactggattttagacccaaatatgagaaactcggtcgtgaaggaaaatcattctttatgatgcgatgccttgttgcatcttatttcttgggaagaagcatttgcgaggcccctaacatagtaaaaaatgcatctattcatatagagattatatctcaacaccaattgagggagatgatgattgtttagttgagagttaacctcttaaaagtctcgacaatattttttaaagcaaaccattcagattattttacgaatagttaataataataaaaaagtgtaaaggtatgattcaaacttctggtttagtttgatgtcgacttggttcagctggttaaattgttaaattacggtttaatgtcgcttagacattgattggagaagaatgacttcggttttggatttacaaggaatcaagagaaagactcttctggtatagagggtttgactttgacctctgcatataaatagtcttcgtcttcttcctttgttcgttgtaacagaaaattcttatttcaattcttctcccttgtaacacgtttttgagctctgggttttgagcttaagtaaacattgattcatagtggattgctggattgaatccggctccagacgtaggatcatcacaccggtgatctgaactgagtaaacaatcgtgtgttcgtttcgttctttgtttgattgcgttcttgatcgatctattgagtgttccgcgaattgaagcttgatcgagttgtgttgtgttgaatcgagttgtgttgaatcgatttttgagtcatcagattgtaacaaaaagaatagttgcaattttctaactttatatatctctatcatttcaccaattggctattttcaatttttacatcggacatacaaacctgaaacctatgtaaattggaaaaatcatttgtccggtgccctgatatatatttttcttcttaccaaaatcggatttgttagtaacaaacctgtcaatcaaagtgtttcagcttctccagcttaaacatcagaaaatgagtgtgtttttagtgtgtcagacaaatccccgtgaaccttgccttaaaaataaaataaaatcactccaaaatagaaattatttttacaaacaaaaaaatgaaaaagaatgcttattagtattttccacaattgaaatttaaaaagtatatttcccattatttttcacctaaaaaaaaagcatctaaaaagaagtattttttttgttcttctctttttaaagttcgtatttttttttaaatgtttatgaagaaagacacaaaaaaccctaaatataatttcacgcagctgcctctcttttcttcttccgatcctccttccgccgagtgaagccgcgactgtgaaatcatg

SEQ ID NO: 23978 - DNA, 3003 bp, Unknown
  misc_feature (1)..( 3003): 2750-1469P.txt file - cDNA_ID_2158701; gDNA_ID_1620726; Annot_ID_165973
gttgattacatgtttaacagatttgatttctcatatttgattattgcgatattctttaggaatgtgtgaatgaagagaaagaacaactcagtccagtatcgatcttagaatgcccttttaaagatgatgacgaagacgatgaaatcactgaccaaaatggtaattttatcaaatgactactactcaataatatttagcaagtcgttatacatcacaagagaaatgtgaatttaacgttataagcaattaacatttgcagatacatatgagaaaattgctagaaaaagcaggagattaaatggtttggtacggcttgagccactagacttggataaacgcatagagaggtatgtagagagacaagaagagtactcatatcacactctggagacggaagaggacgaatcagaaaatcaagcaaaccgcttgtttgctcttgtgaagttgagaatcggcgaaacaaatgacctactagcttctaaagtagcggataatctattgttagactatcttcaagaagataacattgggccaaaagaggagacattaatggtgaagaaagcagaagattgggttatgggtagacaagatgagatgtttatgagttgggaagtgaaaacgaagagagaggtttatgtgaaggaaatgaagtggggttgcattaatggagatgagagagagaatgtggttgaagagttggctaatggtttcttcacttcctttgtggatgaattcatctacgacttagtgttgtgataaagttagtgttttgggaggaaagttaagattttgattagattcataatgtattagatatatgctatctcaataaaactatatgtagttttgcataaggggaatgattcgtataaaaacttatgtaggtcatatgttcgttttccatttttaaaatctagaatgagagttaagagtccatagtcatttatgtgttgtttgtttttctaactagatcttaatatgaattattagttttctttatggtttatttttcgaattatctaaatcaaattcaatagccaaaatatttgaaagtcaaacgaaaactgtgtccttactcattgtatgatttaaaaaaataaactgaaaagacatttataatgtttcacaatcttataaaaccattattaactctaaacaaaatgttatgttcaaataagtgttaaactttgtataaaaaattttagtagccatttttgtaccagagatgtcaatcagctttcttacatcatagtataacttaaagacttgagatctcaatgaaatgaacacatttgaccaaagttatgtttttggaccttttcttgtttattcgagtattttcagtatctattaatatgtttttttcactattttcgaaatacatagatgcataattaattaacaaatgggtgtgctctgtataatgtaggcagtcacccataatccagcatctaaaacgtttaattaaagtttgttattttatacaggataagtgttatatcataatacaatatattttttttttgtcaaaaacataatacaatatataagatatataatctaaatatcttagattatttacggaattagtcaaatggttgatcagtagtggttgtgtttttgggaaaacatcgaatatactggattttagacccaaatatgagaaactcggtcgtgaaggaaaatcattctttatgatgcgatgccttgttgcatcttatttcttgggaagaagcatttgcgaggcccctaacatagtaaaaaatgcatctattcatatagagattatatctcaacaccaattgagggagatgatgattgtttagttgagagttaacctcttaaaagtctcgacaatattttttaaagcaaaccattcagattattttacgaatagttaataataataaaaaagtgtaaaggtatgattcaaacttctggtttagtttgatgtcgacttggttcagctggttaaattgttaaattacggtttaatgtcgcttagacattgattggagaagaatgacttcggttttggatttacaaggaatcaagagaaagactcttctggtatagagggtttgactttgacctctgcatataaatagtcttcgtcttcttcctttgttcgttgtaacagaaaattcttatttcaattcttctcccttgtaacacgtttttgagctctgggttttgagcttaagtaaacattgattcatagtggattgctggattgaatccggctccagacgtaggatcatcacaccggtgatctgaactgagtaaacaatcgtgtgttcgtttcgttctttgtttgattgcgttcttgatcgatctattgagtgttccgcgaattgaagcttgatcgagttgtgttgtgttgaatcgagttgtgttgaatcgatttttgagtcatcagattgtaacaaaaagaatagttgcaattttctaactttatatatctctatcatttcaccaattggctattttcaatttttacatcggacatacaaacctgaaacctatgtaaattggaaaaatcatttgtccggtgccctgatatatatttttcttcttaccaaaatcggatttgttagtaacaaacctgtcaatcaaagtgtttcagcttctccagcttaaacatcagaaaatgagtgtgtttttagtgtgtcagacaaatccccgtgaaccttgccttaaaaataaaataaaatcactccaaaatagaaattatttttacaaacaaaaaaatgaaaaagaatgcttattagtattttccacaattgaaatttaaaaagtatatttcccattatttttcacctaaaaaaaaagcatctaaaaagaagtattttttttgttcttctctttttaaagttcgtattttttttttaaatgtttatgaagaaagacacaaaaaaccctaaatataatttcacgcagctgcctctcttttcttcttccgatcctccttccgccgagtgaagccgcgactgtgaaatcatg

SEQ ID NO: 23979 - DNA, 3003 bp, Unknown; identical to SEQ ID NO: 23978
  misc_feature (1)..( 3003): 2750-1469P.txt file - cDNA_ID_2158701; gDNA_ID_2926153; Annot_ID_198224

SEQ ID NO: 23980 - DNA, 3003 bp, Unknown
  misc_feature (1)..( 3003): 2750-1469P.txt file - cDNA_ID_2159919; gDNA_ID_2684237; Annot_ID_192463
ttctcggtggtttagtttctgaatcttgttgtctctttctctaggcttggttaagctagaaccagacctcttataccttaccaaagccttcctttccactaaagaaactctcttgattggtgaactggcctttctcaagtcatcatcatctctattatctccaactacctcctttacatatgattcatcgtcactcgaggaggaagaggaagatgaagacgacgatgatgacgatgatgatgatgaagatggatcctcagaagacaaagactccaccgttacattatctttggtgttattatcttcactatcttgattttcttcttcctcttcatcggtttcacttgagctatcttcaccatcactgatagactctacaattctgctactttcttcaaatagcttcttcttggctgaagctcttcttctagcttcagtttcagactcagaatctgaaagaatctctatttcgccagggactgatttttccaaaaccaaacctctaatctcaggggaacacttgtccttcaaaaatctgatttcttctgacacatcttttaacacagaagagctcggaactgatattacaagatccaaatcagcaatctcaggagaactcttctgcatcagacatgtgttcttctgttcagacacatcctttaacttagaaaatctcggaacaggtatcccaacatccaaatctgtaatctcaggggaacatttcttctccacgcccaaatcactaaccctaaaagacctctctttcagacatgggttctgctcagacccatctgttaacctagaggagctgggacctgatttcttctccacattcagatctctcattatcctagaaaaactctcttttacagagttgttaggtacagagtacatgttactgacttgaggaggaggaacactgtcgttgcaagttggtgtgatgtcctcaatgtcggagtcatagtttttaggtttcttctgccgtcgtttctttgggggagatgtcaccggagctacagtctccatcttcttccgcttgttaacagcctgaagacgctgccagctccgggacttcactctcttcccaatacactccattaaagcaaacacaaagatctgaaaaaagaaagactgttagaaatctagagaagacgacaatggggtctgtaaagaaacagagagagagaaaggtaacgaacctttagatgagaaaaaatcgaatctttcactcactcacacgggtctgagaagaagatgatgaagttcttgagtttttagagaaatttttgattttcactggtttcagaaagtggaacagagagagatgggcagagagagagagagagaagggcatgaagaaagcgtgatggcaaagccaaaccatgctatttcaggaggtctctcataccgccaaaacggtactatttttccacacactctgctttttggttttggtcaaaaaatttcttacatttcgttaaaaaaacagctcattaatcagtttccatttcaagcattgtttttttctgttctaaattacctttttgaccactctgaaattacagagtcaacacgtcactcaaaactgcaggaagagaagatatttcattacaagacaaacaatgtgtaataaattatgtcttactgcttctaatttttttttctgtgttttccttttgcttttgttttgaaatgtaatctttttagtttaccaatctagatttgttataacaatttaaatgaaaaaaatcgaatcatttactattttataaaagaatctcaaaccctttctttgaatgggattggagattggagtattattgaaatcaactaccttcctcttgctggcatttaattccactattagacctttatattatttttaaactaaagaatattgtgtttgaaagaaaaggcaaccaaaaatgattacttacaaacatatacaaacaaaggtttttagaatataaagtagcaaacaacatcattccaaggagagaaaacagagaagaatacttgtcattaatagagagaggtatgagttcttcacgcaaagtctttttgatattggaacttggtcattaatttacatcaccaacaagttctaaatatgatgaaagaaaatttatgtaccaacttcactttaagtgcccaccttttatctaatcgcagtaatgaacacatcacgtcctatgaggctttgacaaattaggaaaaaggctaaactgtgttagtcagaagataataacttacagaggggaccattattaatctcctaagtttatgtttttgtgacaagttacaaattcctcagaggattattagagaagcaaatatcgaaaactgtataacaaaactaacttcttaagaccgtaccgtcacataacatcaatgagccattaccatagccgaaaccagtcagctacacgagtacaagacttattatggtatgtagtcatctcatgatttaagggtataatgaagtatcaactgttagtcccccaagatcctaattgcatatgatcagaactctggactcgtttcttaagtgaggatttgcaaagctcaatctttgtcattgcgattatgttccggtgacgatgttcaaaatctttccggggatttagttccatcactgtctttcttttctatttgtttttgtctttaacaatgtcaaagtcaaaatctcaccgattctgtaaattccaagttatatgacgtgtcattgtattattggtgcgagcgatagcacaacctttgcgtctgcgtcggtagcgaactcttcggaaatatataatctgtaattaaaatgagactaatcccaatttaaaatcaaaaacctttttatttatttttgttttcctatagagatttcttagaaaagaaataaattacttctcttttatttttcattcggtttagctcgtggaactgaatctggtgtgtttgttgatcagagtaatacggacattgcaatttttctaaatccggcgattaaatatg

SEQ ID NO: 23981 - DNA, 3003 bp, Unknown; identical to SEQ ID NO: 23980
  misc_feature (1)..( 3003): 2750-1469P.txt file - cDNA_ID_2159919; gDNA_ID_1620807; Annot_ID_168892

SEQ ID NO: 23982 - DNA, 3000 bp, Unknown; identical to SEQ ID NO: 14248
  misc_feature (1)..( 3000): 2750-1469P.txt file - cDNA_ID_2160091; gDNA_ID_2684093; Annot_ID_190037

SEQ ID NO: 23983 - DNA, 3003 bp, Unknown
  misc_feature (1)..( 3003): 2750-1469P.txt file - cDNA_ID_2160091; gDNA_ID_1620791; Annot_ID_168284
aacttacactctgttttcttttgagaatggttttttatatgagtgtgcactcaagcagggggagagtattctgatgtgtcgtactctgttccggatgatgtgggagatgaggatgtggaggaagaggacgatgatgatgagttagatgacaacacttaattgcttagtcctggtcattttttttttagttgggcattgtgttagggggagtttgtcactgattgtttttgtgtgtttgtgaaaactccctgatcttgttctttatcggcttcttatcggatcttctgtgtgtttaatgattagtcttatgtatagaaccaagaactcatttctgtttcatgtttaaatggttatgtcttttggcagtagttgcttaaacttgagcctttggtttctatgtttggtatggaatattgcttggcttgtattgtggtctctactcttttgcagattacttgaggtgtcacactcaaataaaaagggggagattgaagaaacagagtgtctgaagttctacaggcgtgtctgaaacaacacagagcagaacagaggaacagaggaagcgggaaagtagcagttgcttttgccagcgtggcatgttgattggagtgaaggaaaggcgtatcgctttagacaaaggagacgaagtcgtcagacataggacgtgtgcctagtgtcaagataatgatgaggagctacacttgaacctgatggataaagtagagcatcctgccttttccgagaaactacataagagaagttttggtctcttattagggttagccactttacttgagaaaagtggaagagaagaaaagttaaatagaacttgttcttgtggtttcattggtgagtgaacaaagagagcacacggctgttgctgtgtttgtgagctgggtagttttaggttttgacaagagcaaatcaggttgttgatgttgcataacactgtccaaacttatctgtgattgatcagtttgaaagttgttctaataaagtgtgtttattggagttgtgatctttatcttgtcaaagtacttaggattcttttacttcatatgttagatataatattttgcttaattgaatatattttacaatgttcataagctataagatcattatatgatgcatacgttttatccaaccatatcttcacgtaaccaacttcttctcaattaccttaactgttcacatgtttatatatctaagcccatatttttaggtgttatacatatatatatttatttactttttgaggattctggaaaattgaaagatatgatacaacagttatacgatatatatattgaatttaaaactttaataattataattttaataatttgaatagacactgtaaatatagttttagtcggacaaaccttactcaacattcaatactaatcatataccaaaacataattgttttatctaatttagagaaaagaaacatgaagctatttattatcattgtggtgaccagtttaaccatctcaaaggtatttgacaaaacacttgtcaccattgaagcaagaaatttgaggaagatggaccgtcatgagcatttcaatgctaatgaagatttcgtggaagcaaaaatgttaaagaaaattgacaataaaaataatctaaataatagatgtataaatgattttgcgcctactaatccaggacataattctggtattgggcatccaaaagttataaacaacaaatttacaaaagattttgcgcctactaatccaggacatagtcctggtattgggcatctaagagttgtaaacaacaaatttacaaatgattttgcgcctactaatccaggaaatagtcccggtattaggcatccatgagttatgaatgtttaaggattgtaaatcttattatataaatcttaaagaaataaaataaaactaacaaaaaaacaaatttatatgtctatatctcaaatgtttttaacttttttttctgaactaaaagaaaaattaacaaatttgtttttatatgtgttattggtcaaataaattaggatgtatttatatttatttgaagaaaaaattagcatgtattaatttttttaaagtcatttaatttatgtgtacaaaatattattttacggttttggtgggaaaacgttggcttacagttgttgcgggaaaacgtgatttttaattttggcggaaaatactttttgtgtgattttggcaagaaaacactttttgtgattttagcgggaaaacgtggttttacggttttgtcgagaaaatgttggtttacggttgtggcggaaaaacgtaattttaatatttaaaccaaaaactgaagttaaatagaataatttagttttactaaggatgactaatagaaaaagaaaaataaatagacttaattggataccaatttatttatgtgaaaccttatttaataaatgagtttagttggcttaatccatttaatctcatttaacttgtttttcctaaattaatttaaatgggtcaaaaactcttactcataaccattaattaaataggatttgcatacccaaattaacatcactagtcctagacaaaaaccaaaatagaaaacaatatttttatccatttttacttttgctcatcgaccaaatttgggcctagtttgctacaagctaacaattgaaaagcctcttaagacacatgaaatagtaacgacgtcgtttactcatgaagcgaaagacggcaaacacgaacgggtttacgtagaccgtcaaacgctcctccgtccgacggagaaaaaacgagacggtgaagaagaagaagaagaagaagaagaagaacgactcaaagatctcatcgatcactctctccaagatctattcacgcatcgtcggaagaattttcgcttccgacgacgtttctctcgtctgattttgtctccgaacatcctacctaatcgtattcggtgctggatttgaatccggtgaactgaatctgacaatttcgttcccggaggtgtttaaaaatg

SEQ ID NO: 23984 - DNA, 3000 bp, Unknown; identical to SEQ ID NO: 14248
  misc_feature (1)..( 3000): 2750-1469P.txt file - cDNA_ID_2160091; gDNA_ID_2684093; Annot_ID_137027

SEQ ID NO: 23985 - DNA, 3000 bp, Unknown; identical to SEQ ID NO: 5466
  misc_feature (1)..( 3000): 2750-1469P.txt file - cDNA_ID_2160125; gDNA_ID_1620791; Annot_ID_168295

SEQ ID NO: 23986 - DNA, 3000 bp, Unknown; identical to SEQ ID NO: 7000
  misc_feature (1)..( 3000): 2750-1469P.txt file - cDNA_ID_2160220; gDNA_ID_1621121; Annot_ID_172073

SEQ ID NO: 23987 - DNA, 3000 bp, Unknown; identical to SEQ ID NO: 3071
  misc_feature (1)..( 3000): 2750-1469P.txt file - cDNA_ID_2160942; gDNA_ID_1620623; Annot_ID_47077

SEQ ID NO: 23988 - DNA, 3000 bp, Unknown; identical to SEQ ID NO: 3082
  misc_feature (1)..( 3000): 2750-1469P.txt file - cDNA_ID_2160942; gDNA_ID_1620623; Annot_ID_162390

SEQ ID NO: 23989 - DNA, 3000 bp, Unknown; identical to SEQ ID NO: 3071
  misc_feature (1)..( 3000): 2750-1469P.txt file - cDNA_ID_2160942; gDNA_ID_2926200; Annot_ID_141493

SEQ ID NO: 23990 - DNA, 3000 bp, Unknown; identical to SEQ ID NO: 3082
  misc_feature (1)..( 3000): 2750-1469P.txt file - cDNA_ID_2160942; gDNA_ID_2926200; Annot_ID_201808

SEQ ID NO: 23991 - DNA, 3003 bp, Unknown
  misc_feature (1)..( 3003): 2750-1469P.txt file - cDNA_ID_2160983; gDNA_ID_1620622; Annot_ID_162360
ttctccaggtatctctctcttcctctatccatgcttatgtttttttttgtggattgatctgtgttttagtaaaccaatgaaaatctgacttttaattatatacgtaattgctatttttgagctgctgaatgagtgaattgctatcttctacgtatctctttatcagttattctgaaaattccttctcatctagatccctttgggataattcagaaattagatacagtgagaagattagctcaagcgtttgatttctgatttcagggatccacatgggcaaaggccaagaacacaagttagatgcacacaagaaacttctaatcgctctcataatcacctcatcttctctaggactaatacttgtatcttgtttatgcttttgggtttattggtctaagaaatctcccaaaaacaccaagaactcaggtaataatcatcttaacattaagaatgagaacaaatctgcaaaactttacatttgtaacaagattctgtatcagtttcttcattgtgatctctctgttttgatatctaaatggtttcatgcggaagaaggtgagagtaggatttcattatccaagaagggctttgtgcagtccttcgattacaagacactagagaaagcaacaggcggtttcaaagacggtaatcttataggacgaggcgggttcggagatgtttacaaggcctgtttaggcaacaacactctagcagcagtcaaaaagatcgaaaacgttagtcaagaagcaaaacgagaatttcaggtaccaaaacaaaacacaagtactaatcatttttacttttttaccggattcttgatatctgattttatcatctaaatctcagaatgaagttgatttgttgagcaagattcaccacccgaacatcatctcattgtttggatatggaaatgaactcagttcgagttttatcgtctacgagctgatggaaagcggatcattggatacacagttacacggtaaaaatagctcaaaacatcttctcatcatcgtgtaatagatcatgagttaaattaatactatagtataacagagataaaacaaatcatgtgcccacatgaaataaataatttttgttttgataaaatttaatgtttgcatcattaatggttaaggaccttctcggggatcggctttaacatggcacatgcggatgaagattgctcttgatacagcaaggtactacactcaagtgcccacatttaacaatcctctctaccggttgattaatttcggtttaggtaaaccgttttcttatgttggtttggaaatagagctgttgagtatctccacgagcgttgtcgtcctccggttatccacagagatcttaaatcgtcaaatattctccttgattcttccttcaacgccaaggtaaacaacttgaatcattaatgatgattctgttctgagctaaccgaacaagatttgtttcgttgattcaagaatcatttcattcatttgtctttagttccatctctaacgatagatcaacattcagatttcggattttggtcttgcggtaatggtgggggctcacggcaaaaacaacattaaactatcaggaacacttggttatgttgctccagaatatctcctagatggtaaaatattaacatttccctctatattgatcgactttgactcgttgtcatatcactagagttatagcacatagtttgatagtcataatcatgtgaccccataacattaagtttctttcattacgtctaaaattgttgttctaaatcaaatcattttgtttgttgatgtattatttcaactaatcacacatagaaatcattatttgattagagatggtagttgttgggtcgctaaaccggtttattgagtttgtctcattgcaacatctttatgtccctcaggaaaattgacggataagagtgatgtttatgcgtttggtgtggttttacttgaactcttgttaggaagacggccggttgagaaattgagttcggttcagtgtcaatctcttgtcacttgggtaagtccggtttgtgttgacgttattgccatcaatacatgaatcagatagcattggttaatgagtgtaccgtttcgaaaaatttgcaggcaatgccccaacttacggatagatcaaagcttccgaaaatcgtggatccggttatcaaagatacaatggatcataagcacttataccaggtttgcgtcatcttttgtctttgtgtttaggcttaaaaatccgattggttacatattttttgtgttgaaacgtaaataaaaccggaaataaattgttcaggtggcagccgtggcagtgctttgtgtacaaccagaaccgagttatcgaccgttgataaccgatgttcttcactcactagttccattggttccggtagagctaggagggactctccggttaataccatcatcgtcttgatttaagaaaataatattttttgcttctttttttgaattttacagtttgatctctgattgctttgagtaatttaatttgggggtgaaaaatgtgaggacagaagggtattcacttgtcattattgtatttgtaaattgattaatatataaattgtgttgtcactaagtgtaaatattcaattaattgttgcatgaaccactaatcacaatccactagtatccatccatccactctttcaacttttaaacataatcctaaatgactatcttacccctatcaagacaagcctgagaagtgagaacaacttcgtagacatcgtcgtgtctctctctcgttgaatccttgttaatctttttcttcaatctctcgatctgatcgttatcgaaaccgcgcgattctaaccaagtccaggtgacaaatcagctctgctaaaatactcacaaagtctcgtgatcatattttgtggatcacatcattgtcttatttttggaattgcttatcctcgcactagttcactgatttgagatctgtgcagttaattttgtgctccatagcgattccatg

SEQ ID NO: 23992 - DNA, 3000 bp, Unknown
  misc_feature (1)..( 3000): 2750-1469P.txt file - cDNA_ID_2160983; gDNA_ID_1620623; Annot_ID_162414
tccaggtatctctctcttcctctatccatgcttatgtttttttttgtggattgatctgtgttttagtaaaccaatgaaaatctgacttttaattatatacgtaattgctatttttgagctgctgaatgagtgaattgctatcttctacgtatctctttatcagttattctgaaaattccttctcatctagatccctttgggataattcagaaattagatacagtgagaagattagctcaagcgtttgatttctgatttcagggatccacatgggcaaaggccaagaacacaagttagatgcacacaagaaacttctaatcgctctcataatcacctcatcttctctaggactaatacttgtatcttgtttatgcttttgggtttattggtctaagaaatctcccaaaaacaccaagaactcaggtaataatcatcttaacattaagaatgagaacaaatctgcaaaactttacatttgtaacaagattctgtatcagtttcttcattgtgatctctctgttttgatatctaaatggtttcatgcggaagaaggtgagagtaggatttcattatccaagaagggctttgtgcagtccttcgattacaagacactagagaaagcaacaggcggtttcaaagacggtaatcttataggacgaggcgggttcggagatgtttacaaggcctgtttaggcaacaacactctagcagcagtcaaaaagatcgaaaacgttagtcaagaagcaaaacgagaatttcaggtaccaaaacaaaacacaagtactaatcatttttacttttttaccggattcttgatatctgattttatcatctaaatctcagaatgaagttgatttgttgagcaagattcaccacccgaacatcatctcattgtttggatatggaaatgaactcagttcgagttttatcgtctacgagctgatggaaagcggatcattggatacacagttacacggtaaaaatagctcaaaacatcttctcatcatcgtgtaatagatcatgagttaaattaatactatagtataacagagataaaacaaatcatgtgcccacatgaaataaataatttttgttttgataaaatttaatgtttgcatcattaatggttaaggaccttctcggggatcggctttaacatggcacatgcggatgaagattgctcttgatacagcaaggtactacactcaagtgcccacatttaacaatcctctctaccggttgattaatttcggtttaggtaaaccgttttcttatgttggtttggaaatagagctgttgagtatctccacgagcgttgtcgtcctccggttatccacagagatcttaaatcgtcaaatattctccttgattcttccttcaacgccaaggtaaacaacttgaatcattaatgatgattctgttctgagctaaccgaacaagatttgtttcgttgattcaagaatcatttcattcatttgtctttagttccatctctaacgatagatcaacattcagatttcggattttggtcttgcggtaatggtgggggctcacggcaaaaacaacattaaactatcaggaacacttggttatgttgctccagaatatctcctagatggtaaaatattaacatttccctctatattgatcgactttgactcgttgtcatatcactagagttatagcacatagtttgatagtcataatcatgtgaccccataacattaagtttctttcattacgtctaaaattgttgttctaaatcaaatcattttgtttgttgatgtattatttcaactaatcacacatagaaatcattatttgattagagatggtagttgttgggtcgctaaaccggtttattgagtttgtctcattgcaacatctttatgtccctcaggaaaattgacggataagagtgatgtttatgcgtttggtgtggttttacttgaactcttgttaggaagacggccggttgagaaattgagttcggttcagtgtcaatctcttgtcacttgggtaagtccggtttgtgttgacgttattgccatcaatacatgaatcagatagcattggttaatgagtgtaccgtttcgaaaaatttgcaggcaatgccccaacttacggatagatcaaagcttccgaaaatcgtggatccggttatcaaagatacaatggatcataagcacttataccaggtttgcgtcatcttttgtctttgtgtttaggcttaaaaatccgattggttacatattttttgtgttgaaacgtaaataaaaccggaaataaattgttcaggtggcagccgtggcagtgctttgtgtacaaccagaaccgagttatcgaccgttgataaccgatgttcttcactcactagttccattggttccggtagagctaggagggactctccggttaataccatcatcgtcttgatttaagaaaataatattttttgcttctttttttgaattttacagtttgatctctgattgctttgagtaatttaatttgggggtgaaaaatgtgaggacagaagggtattcacttgtcattattgtatttgtaaattgattaatatataaattgtgttgtcactaagtgtaaatattcaattaattgttgcatgaaccactaatcacaatccactagtatccatccatccactctttcaacttttaaacataatcctaaatgactatcttacccctatcaagacaagcctgagaagtgagaacaacttcgtagacatcgtcgtgtctctctctcgttgaatccttgttaatctttttcttcaatctctcgatctgatcgttatcgaaaccgcgcgattctaaccaagtccaggtgacaaatcagctctgctaaaatactcacaaagtctcgtgatcatattttgtggatcacatcattgtcttatttttggaattgcttatcctcgcactagttcactgatttgagatctgtgcagttaattttgtgctccatagcgattccatg

SEQ ID NO: 23993 - DNA, 3000 bp, Unknown
  misc_feature (1)..( 3000): 2750-1469P.txt file - cDNA_ID_2160993; gDNA_ID_1620622; Annot_ID_162356
caaatggctcggttataactgatttatataccaataattgcatacaagtttgtttcttaaataaatcaagcaatattcataagattgcatgtgtattttctgcgaaactattagtacgaattcgtggatatgcaaatttaatgactatgcaaagtaggtgagaatgtaatagcgattagaatagctagggtttagcctaccaaccatggtaatccagtttcctaattatcgttagtttttgaatcccattcatgcttttatctatttttcaaccaatcatgtctttttaccaacaaagcatttccagtctaagcaatatggtaggtaactcggtacgataaacagaaagataatttattattcatctataaacgaataattggttctcacattactcatacagaggaaaaaaagggatatacaaaccctctctaaattatatagttttgaattcactgttgtttatcaacaacatatataactctcttacccaattcttattattgttcatacttcatagacattaacatgtacgtatagtgattgctacaatgaatggtatgtacagatattgagacagacagtagaaagggatgaatcgagtatttattaaagagaaaggaaagggccaatctatgcctagtttcaattatgaaactcaacccatgaactgatttaaatactttacctatcggataagacttttaagggtctaaaatattttccaactatttttcatttgcaacaaaccttaaagtaatatgctaaagagatcttttccaaaggtggaatgatttttttgatctaaaacggcccatcaaccaatcttcggtccattatcctgacatgattatttgggctacatttttttaagtcttttgcagtaaattgttgaaccaacaaaaataaagagttggagttggacctagtagctgatctgctgatgtgttggtgatggtcgtcgtgggttcctgtcttataaccctagaaaccaagccacttcatcattctcaaattcaatgctttactaaataatattattatcgaaatcaaaatactaatttagacgtatataaatctagaagcaaaccttaggtgaggtcgaaacagagatgaccttttgcgtgcactttaattaatatcttattacataaaatgtcacactttgagtaaactttacattattctctcatccataataaataaataaagcatactgggttttaggtcaggctgacgtcagcagtttctttgtgtttcattttttttttttttgtaatctaacgctccagatttgttgtcttctccacgagccctttgttgttgttggtaatggagattttcgctctaagtcattgtggcttcttcttctttatttagaaaccaattcatcaactccttcgttatttctaaatctctttgccactacctcttgttgctgcaattgaattggctcaaatcttcttcacttggtcgacgtaaagacgactttgacttggtttttaacttcacttctccgtcgaaaactatcccttctcttccgatcgaatcaatcggctctctctccacacaaaccaaggtaagggttaaccctctccggtgattatgctctgataaatttacttgctcggccattagtgttcagaaacttggtgatttatgcatgtttttttttgttcaaagaccgtagatttcggaattaggattgtaaaaattgaacctttacatcagtgtttttacaaagttataagctttacttggaaatcagtggttttttgggtcaaccaaagttgaaagatttgaagaagaatgaaactagttcgatttatatatcattttattgcttcttaagaaagtgtcgtccttggttctttatgaatttccaattgcagccaaatatgtcatgttattcacctaatttttgtattttccaattgcagccaaatatcttctcctgttactggagacaaacctgcatacatttctgtcatctctgttaaggtattacatttagtttacttgtttacttaatgtagctgcttattacatttttttcttcaagtctatattcttctttcaatagcattaaaagttatgtgtatcctcagattagatcttgctgactcgcaagtttttggattatttagcggtttaataagaattatatcttccttgaaattgtgcctaggtagtggaatcgttgttagcctactgtagctcagataggtgatggatcatttccgttcaattgaataatttgactatttaaggtttgcacttagttttgtctacagaatcaattcatcctttttcacagtcaagatattattctcattatcactattgtagacttcttggacttccatacattcatcagtcaacttttcgatggtgcgtttttatcacagtggcacaattatttaagaggctccatctccactgcaccactgagaagtttcgtgtggacatgtctaagcttagaattggtttggttgaaaactgaggagatggaagtgactcgtggtttctcttttttggacaagtttcttcgaaaggtctgttgattttctttgtctcttgtgaactttaatttcgtttttttttccttaggatgcaatgatatcttatctttagatgtcaatatcaaatgtccttaactattcattcatttacggattttgattactttataacagttggtatcttcttctatatatcgtcatcttatatgtttttatttgtatatagtctttcacagaaggagcgtattgagtttctcgacaatatatttgacatcttcttctgccttttctggtaagtgtttaacttttctgataccaattagttttcttaatcattgcatatttttaatgcttgtgcctttattaaagaggaaagttgcggtggattaaagcaccatcgtgcggagaatacgataaggctcttgcttcatttgaagttattgacagttgaatcgagccgctcaattggtcaattatg

SEQ ID NO: 23994 - DNA, 3003 bp, Unknown
  misc_feature (1)..( 3003): 2750-1469P.txt file - cDNA_ID_2160993; gDNA_ID_1620623; Annot_ID_162418
tgacaaatggctcggttataactgatttatataccaataattgcatacaagtttgtttcttaaataaatcaagcaatattcataagattgcatgtgtattttctgcgaaactattagtacgaattcgtggatatgcaaatttaatgactatgcaaagtaggtgagaatgtaatagcgattagaatagctagggtttagcctaccaaccatggtaatccagtttcctaattatcgttagtttttgaatcccattcatgcttttatctatttttcaaccaatcatgtctttttaccaacaaagcatttccagtctaagcaatatggtaggtaactcggtacgataaacagaaagataatttattattcatctataaacgaataattggttctcacattactcatacagaggaaaaaaagggatatacaaaccctctctaaattatatagttttgaattcactgttgtttatcaacaacatatataactctcttacccaattcttattattgttcatacttcatagacattaacatgtacgtatagtgattgctacaatgaatggtatgtacagatattgagacagacagtagaaagggatgaatcgagtatttattaaagagaaaggaaagggccaatctatgcctagtttcaattatgaaactcaacccatgaactgatttaaatactttacctatcggataagacttttaagggtctaaaatattttccaactatttttcatttgcaacaaaccttaaagtaatatgctaaagagatcttttccaaaggtggaatgatttttttgatctaaaacggcccatcaaccaatcttcggtccattatcctgacatgattatttgggctacatttttttaagtcttttgcagtaaattgttgaaccaacaaaaataaagagttggagttggacctagtagctgatctgctgatgtgttggtgatggtcgtcgtgggttcctgtcttataaccctagaaaccaagccacttcatcattctcaaattcaatgctttactaaataatattattatcgaaatcaaaatactaatttagacgtatataaatctagaagcaaaccttaggtgaggtcgaaacagagatgaccttttgcgtgcactttaattaatatcttattacataaaatgtcacactttgagtaaactttacattattctctcatccataataaataaataaagcatactgggttttaggtcaggctgacgtcagcagtttctttgtgtttcattttttttttttttgtaatctaacgctccagatttgttgtcttctccacgagccctttgttgttgttggtaatggagattttcgctctaagtcattgtggcttcttcttctttatttagaaaccaattcatcaactccttcgttatttctaaatctctttgccactacctcttgttgctgcaattgaattggctcaaatcttcttcacttggtcgacgtaaagacgactttgacttggtttttaacttcacttctccgtcgaaaactatcccttctcttccgatcgaatcaatcggctctctctccacacaaaccaaggtaagggttaaccctctccggtgattatgctctgataaatttacttgctcggccattagtgttcagaaacttggtgatttatgcatgtttttttttgttcaaagaccgtagatttcggaattaggattgtaaaaattgaacctttacatcagtgtttttacaaagttataagctttacttggaaatcagtggttttttgggtcaaccaaagttgaaagatttgaagaagaatgaaactagttcgatttatatatcattttattgcttcttaagaaagtgtcgtccttggttctttatgaatttccaattgcagccaaatatgtcatgttattcacctaatttttgtattttccaattgcagccaaatatcttctcctgttactggagacaaacctgcatacatttctgtcatctctgttaaggtattacatttagtttacttgtttacttaatgtagctgcttattacatttttttcttcaagtctatattcttctttcaatagcattaaaagttatgtgtatcctcagattagatcttgctgactcgcaagtttttggattatttagcggtttaataagaattatatcttccttgaaattgtgcctaggtagtggaatcgttgttagcctactgtagctcagataggtgatggatcatttccgttcaattgaataatttgactatttaaggtttgcacttagttttgtctacagaatcaattcatcctttttcacagtcaagatattattctcattatcactattgtagacttcttggacttccatacattcatcagtcaacttttcgatggtgcgtttttatcacagtggcacaattatttaagaggctccatctccactgcaccactgagaagtttcgtgtggacatgtctaagcttagaattggtttggttgaaaactgaggagatggaagtgactcgtggtttctcttttttggacaagtttcttcgaaaggtctgttgattttctttgtctcttgtgaactttaatttcgtttttttttccttaggatgcaatgatatcttatctttagatgtcaatatcaaatgtccttaactattcattcatttacggattttgattactttataacagttggtatcttcttctatatatcgtcatcttatatgtttttatttgtatatagtctttcacagaaggagcgtattgagtttctcgacaatatatttgacatcttcttctgccttttctggtaagtgtttaacttttctgataccaattagttttcttaatcattgcatatttttaatgcttgtgcctttattaaagaggaaagttgcggtggattaaagcaccatcgtgcggagaatacgataaggctcttgcttcatttgaagttattgacagttgaatcgagccgctcaattggtcaattatg

SEQ ID NO: 23995 - DNA, 3003 bp, Unknown; identical to SEQ ID NO: 23994
  misc_feature (1)..( 3003): 2750-1469P.txt file - cDNA_ID_2160993; gDNA_ID_2926201; Annot_ID_201854

SEQ ID NO: 23996 - DNA, 3003 bp, Unknown
  misc_feature (1)..( 3003): 2750-1469P.txt file - cDNA_ID_2161213; gDNA_ID_1620777; Annot_ID_167782
tttaagcaaaacgctgatgagtttatctgttctttattgcctggaatttctcaccctcaagtccaatactcacaaggaggattattagtgaagagtggaggaagtaatatgcaacatgtaacatctttgtcttttttgttactaacatactctaattacctaagccacgcaaataaggtggtgccatgtggcgaatttacagcttctcctgctcttctccgtcaagtcgccaagcgtcaggtaactaaactaaccaacattcctctgttttagcataatagagagattcattaacgtaagtgtttggtggcgtacgttaacataggtggactacatactaggagataatccaatgaaaatgtcgtacatggttgggtatggttcgaggtttccacagaagattcatcatcgtggcagctcggttccttcagttgtggaccatcctgatcgtatagggtgcaaagacggatctcgttatttcttcagcaataatcctaatcctaatttgctaattggcgccgtcgttggtgggcctaatatcaccgacgattttcctgattcgagaccttactttcagctgactgagcccactacttatatcaacgcacctcttttgggcctacttggttatttctcggcccattattgatttcacacctcgaactcgaacgaagcatgaaagtctatttttgttgtgaaacatttttagttgattgttaccgattagtagattcactagattctctaaatctacgaacaaataattgtataaattaatcgagtacacaataatcaatttttaatcatatgggagttaggaaaaacaaagagtaataatgagagaaagggggagacaagagtaattaatattttgatgaccaaactaatcaaaaatcaggaatttgtcttttggactttggtcggctgctttacgcttaacacaaaagaacgctattttgtctcctccacgcaattacctcttctcactctcagacattttgtcaaacagatggtgctcgtttctgaatcagcttaagaactaacaaggagacagacactaagcttggtttttctctccgattagacggaggaaaaagtgaaaacgaggggcttagacgagtgatgtgatagagatggaaggagttgagctagaattagaaagaagaagcaagttcttgaacagtttgatacagaagaagaaggctaaagaacagcaagatcagaaagatgagttcaatgttcgtgttagggcttcagatatgcctttgcctcaacagaacagagcctttagtttgtcgcgtgagattttgaatgctactccagggaaggctgataacaaaagactcgctcatgccctaaaaaaggttagatcttttgtatctctctcatgatttttctgtatttgggttgaattggagtcattgaagtctagtacttggattgagttttgaattttgacacagaatctaaaagtattgagctgcttttgggttctagggctacgtctcaaagtcgcatgctttttgtagaatgtggttatggtcttctctttcttgattggtttgaagatgtgatgaatcttgaatttggattttcgtttgtgtacttgcatattgttgaacttcatggatggtcccatatttgttaggttgcatttgactttgttccattgttgttgtcttttctatttgtagcttcggttagtctacttgactaggttgtttttgtattgcgaggataactgtagtaggagtctcgttgtgaaatgtcttgaaactggatgttcttgttgtttattgagatgattttggagctgtcttaggccataactaatgaggcatagcatgcaccatctgctaagcttctgtatctttgctgttagaaattagttgctacctaatgataactctgaagcatgcttgctttaggaagtgagccttgcctgaatacaaccttttacaaaggacttggttcgacaccccatatatagagttgtccatttatgcagttgtttctcgtgaggatattgttccttcttaaagcggctttgataattagcttttgattttaacttatggagcgaaatggagcagttccctcaatttatgcgactaggtagaggcattgattgatccatacattgattttatgaagtggttgagtaaaacaatttagtgttcacttatctgtgtgcagcttacttgtttgtctcagtgttcatcaatctcttaataatggctacctccctttggcttttaggattgacatacgagtcaatttctgctgttgtcttgttttatcttcttgttctggtaatatagatctcttatctcgaaatagatcttcatatgtttcttgtctctatgttttctcctaaatccagcttctatgttatccactgaagtgaatcttagactcccatctgtctaatgacatgttgcagctgatttaaaactatatattcacgaaacagttttccatctgtcttccatttcaggacttcgattcagcctacggcccggcatggcactgcattgttggaacaagctttggttcatacgtgactcattccacaggaggattcctatattttcagatcgacaaagtttacgttcttctcttcaagactgccgtggagccgttagatcaaaaatgagataaaacgttgatgatcagagcatcttcaatttaatccttttcttttagaattctctgtcttgtatcccacaatgtaattctgcctaagacaaaatctttgtggctcctattgtgtaattagaagtcatcttctctactgtgaatcgtttcaacttcacaatgcaaaatattgttcttctctttctcaaattctaattttgtttttttcgttgttgtgttgttgttgttgttgacattttcttctcttcaaaagagctttaaacccaaaacctctaataccaattttgctcctccgttttataagcatcaaagaaaaaaagaatcagtgaagaagaaaaaaaaatg

SEQ ID NO: 23997 - DNA, 3000 bp, Unknown; identical to SEQ ID NO: 4951
  misc_feature (1)..( 3000): 2750-1469P.txt file - cDNA_ID_2161213; gDNA_ID_1620748; Annot_ID_166699

SEQ ID NO: 23998 - DNA, 3000 bp, Unknown; identical to SEQ ID NO: 5302
  misc_feature (1)..( 3000): 2750-1469P.txt file - cDNA_ID_2161225; gDNA_ID_1620777; Annot_ID_167785

SEQ ID NO: 23999 - DNA, 3000 bp, Unknown; identical to SEQ ID NO: 5300
  misc_feature (1)..( 3000): 2750-1469P.txt file - cDNA_ID_2161236; gDNA_ID_1620777; Annot_ID_167789

SEQ ID NO: 24000 - DNA, 3000 bp, Unknown; identical to SEQ ID NO: 5296
  misc_feature (1)..( 3000): 2750-1469P.txt file - cDNA_ID_2161251; gDNA_ID_1620777; Annot_ID_167793

SEQ ID NO: 24001 - DNA, 3000 bp, Unknown; identical to SEQ ID NO: 5298
  misc_feature (1)..( 3000): 2750-1469P.txt file - cDNA_ID_2161264; gDNA_ID_1620777; Annot_ID_167797

SEQ ID NO: 24002 - DNA, 3000 bp, Unknown; identical to SEQ ID NO: 3218
  misc_feature (1)..( 3000): 2750-1469P.txt file - cDNA_ID_2161554; gDNA_ID_1620632; Annot_ID_162716

SEQ ID NO: 24003 - DNA, 3000 bp, Unknown; identical to SEQ ID NO: 3218
  misc_feature (1)..( 3000): 2750-1469P.txt file - cDNA_ID_2161554; gDNA_ID_2926154; Annot_ID_198262

SEQ ID NO: 24004 - DNA, 3000 bp, Unknown; identical to SEQ ID NO: 3225
  misc_feature (1)..( 3000): 2750-1469P.txt file - cDNA_ID_2161566; gDNA_ID_1620632; Annot_ID_162719

SEQ ID NO: 24005 - DNA, 3000 bp, Unknown; identical to SEQ ID NO: 3225
  misc_feature (1)..( 3000): 2750-1469P.txt file - cDNA_ID_2161566; gDNA_ID_2926154; Annot_ID_198265

SEQ ID NO: 24006 - DNA, 3000 bp, Unknown; identical to SEQ ID NO: 5274
  misc_feature (1)..( 3000): 2750-1469P.txt file - cDNA_ID_2161757; gDNA_ID_1620776; Annot_ID_167743

SEQ ID NO: 24007 - DNA, 3000 bp, Unknown; identical to SEQ ID NO: 5292
  misc_feature (1)..( 3000): 2750-1469P.txt file - cDNA_ID_2161778; gDNA_ID_1620776; Annot_ID_167750

SEQ ID NO: 24008 - DNA, 3003 bp, Unknown; identical to SEQ ID NO: 20713
  misc_feature (1)..( 3003): 2750-1469P.txt file - cDNA_ID_2161790; gDNA_ID_1620776; Annot_ID_167753

SEQ ID NO: 24009 - DNA, 3003 bp, Unknown
  misc_feature (1)..( 3003): 2750-1469P.txt file - cDNA_ID_2161851; gDNA_ID_1620534; Annot_ID_159829
tatacaaaaaaaaaattctttaattttttcaaccacaaaaattatgttctacaagaaaaatcattagaatcaaacccaatacaataaaaattttctgcttttagtttaaattttaatatcttaaaatgtttagaattatttttattatttagttttgaaattgaaaacctaactattagaagaattaatgcattaagtgtttttgattatacaacaccatagaaaattattttatattttatttttatattaaaataaatattagtgtttttttaaatattttttttgatcaataccagtcaatgcttgtcttcaccggactaaatttatcggtgtaccataattttatgtatatgatgttaaccacatgaaatcgtatagctcaaatatgtgaccatgcaaaacatctacttcgtgtagctaaggataaaataatatacttgggatgtatgatcatacattctctgatacttagtgtagttagaaatattttttccttagatttatttgttcaattgtgactataacaattagaagatattttctattatatatattgaaaaacgaccacgtttaatcgtatcgtcgatatgttttcaattaattatctaatttttaattaaaaatgtactaaacacagtgacaagcaaaataataataaaacagttaaaaatatgaaaatatgaatgagtctatggtgcagttttgagaaaaaagttttgataatacttttcttttagaaattatataaaaaacattaatgtaagaaattattatgattcctatagacaatttttttgcctccaccactagcacctctatgagtctcttactaatataactattagtgtttttaatgtaattaaatgttttaattaaattcgaaactataaaaaaatttaaccaatcataagaggaaaaatgtaatttagaatttttagagtttgttatttaagagagtcttcctactctccctccttactttttataattttccatactcttattgatgagtctctaattaagaagaccatcaataaaatacactttaactgtcatagtataatttataaactaaaattagtgaaactcttctataaaaatactatttggtttctttatattttgaaaaagtgggtgattggttcgtctatatcggtagatttattgcaatagaaacgttgttctaggtgtgatgattggttgtagaaataaaatttgggtttataatgtattttaaaacaaaacatataattggtaaataatagttatgtgttatataatattattctcaaatatcaattttataaattatgatatacataacatatatatatgatgtatttaagaaacaatgtaaattatatatatatatatatatatataacccaataaaaagagttatatatatatatatatatatatttcataaagtagttattttaaagattacttatatccacaaaaataattttttcataatatatatggatgaaaactataatattttttttttttaaataaaaaaaaaaaaaagtggaaagaggaaaaaaaattgtacatcccacctaaataccataaaatcgtactctaaaaaattgtacttaaaattattattttggctgtgagaaaaaataagaaagctacaataggggttgtagcttttttgttggctttatacatcttctaatgccctaccaattatacccaaaacattttttttttaaatgttaaatacattgctcaacaaaaaatattatatacaatagaaaaatgaaatttgcaagattatccataacatgggacatgaaaaatatcatggatctgagtttcgatacaattccggaaataggtgttcaaagcttatggatccaaattcagatatttaaatattttatatgatattttctgttagtctttttatttattgaaataatagttaatattattttaaaattttcatctattttttgcagatatgggtagttgcatatattggtggatccagatcttgatatttgttttatggatctaacggatccagatccagataggtggtttacggatccagcagatccggatagctgtttcacggatcatgcggttctagatctgggtatcccaaaatttcacagaaactaatttcatgttcatctttctatctacaaccggagaaacaaaaacaacatgagaaattgaaggagttcgatgatatgagattattacctttttgagtaaagcacggaatatctcgtctcgagattactaaggactttctttgaaccttgtcgtcatgtgctttggttgttttgaaaagtaagggaaaaaataggaggcggagcaaatagattatgttatagaattcagagagatgcatatttatataagaggagcaatattttgtgaattctagggttttcagaagatttatttcctaaatgtaatacgtttttagtaaagatatttgtttgataaaacttggaaaaataataataatgacgaccaactatattgttaacaatatcttactgaaaaaattgagataatcgcctataagatgtttaaagtaaaatatttcaaataaagttccatagaaatattgtaaaaatatgttactatataaatttctaaaataaatatcagttcaattaaactaaaataaactttctctaactttgacacatcaacctttttatgtgatgagaagctgacacatccttaaaacaagaaaccaatcaaaacattacaaatactacacatcaaattaatatctgccacatcagattaaatggatgatttcagcttgttggaaatgaaaacaaaataaaaagcttgaaaaacttgtcaattcctctttgatctttccgtctttactttctaattctcgtgtatctattttgaatagttgtaatacttgtatcagtttttaaatttaattttaggttaggttttgtaattaagttcgttaaagaaaaattaggaattagcagaggggaagatatg

SEQ ID NO: 24010 - DNA, 415 bp, Unknown; identical to SEQ ID NO: 2426
  misc_feature (1)..( 415): 2750-1469P.txt file - cDNA_ID_2161867; gDNA_ID_1620534; Annot_ID_159833

SEQ ID NO: 24011 - DNA, 3003 bp, Unknown
  misc_feature (1)..( 3003): 2750-1469P.txt file - cDNA_ID_2161877; gDNA_ID_2214699; Annot_ID_189602
ctatcgatatttcttttctaagtatgcgagacattcgttggaaaccatgtatatggtgtaaacagtgaagtacaataggttaatttaggagttttattcaaaaaagcttagaatgttcaaatttctacttattatttcgatttgagaaaattcagctttattcttcaccaatacgatttttatttaattgattaaataagctttttttttatataatcaatgtcatattctttttggtctatgctcggaagacgtcaacaaggatattggttccctaaagaagaaacctcctcttttattgaaaaaatatctctcacgtattgattgatatgtaaaaagatgtcctacatgtgaatttctatgattgtgaaaaaagaattattttttacttttagataacaatgtatactctatggtaacattgcatcaattatgaatggattggccaagtataaaatttaattatgattatacctcaaattcacactacttaaccatctattttcaggctattccattaattagtttttattaacacagtaatttatttgagaacagatttgaaaatattttgctaaactacttaaccttagactaactggaaaacaatatttaactaagtgtctgctaattaagaaaattaaagtatcgttcaccttctagacacactatgtcgattactgttttgagtgcaactagtgtattcgaaataatacttgggtgaattaagtttaagctttgagtaactaaaaattatatataaggatccataagttttgttgaaatagaataatcggaacttttacattcaaaaactttttcatatatatacagaaattcaacccccaataaacaaatgactaatgagtgatagtctgataggtgttaatgactgtcttaatatgagatacataagaaattttgaatggaattatttaataaatgtgaattatgtgggtgacttgactattcagtgttcactgaacacaaaaaggtaccaaaaaaattattccaatcagtgagagatcttcaaaggaaagattctcattcgcgccaatatttttgctgggaaaaggtaaaactttttagattattctataaattattttgctgatgttcccttacgaaaaaaacagtattcagtaccaaaatgtctggcacatataatcgtatagacgataagtagttgtcgaaattttatagggcaatggctcaagcaagtgaaacattgacacctagcccattcacatctatgtcactatatatgtgggttcacaaaggtgacgttttccttatgtgaatcatgtaaatgctataaagttttgtagtacatgagcgattatatattattacgaaactcctgaaatatatgatatataatcagatgggttgaggtagtgacaatagtttgtaagtgcaccaaaatacgttttgagctattaagtccgaagtttaggtccttttaagttatcgaaggtatgcttaaaaaaatttactaccttttagtttttttttgcatgatcgttattcgagaaacatgctgacgcacagattgatcagacgctgtggtaatccaagtgatagcaacaacacaaaatcatgtggagaatgatgatgatgatgcacatatggatttgcataaattttgtaatctccgaaatattgtggagaatgaaggaggagaaacataacattttaaaaatggataaagaaaaagaaagtgatggaaaaataagtatgtggtagaaaaatagggttccttcttctcatttgtctctttcaagctttatgatgcaaagcgacccttctttttcttccctttattttcttttattgttatcgttagtgtcactttctttttattaatttcataaagtcgtatgatcgtatccattgtttttattttgctccgacaggaccgacactgatctttctatatctttcggtaattaatgttataggattcctttttcagatcacatcatttgtattttatgttattttcgtttaacataatacactaataaaatgacttcataaaagatatggtttaggttggggaataaaagatatggtcgagccatacttctaatccttaatttaggttgatagaacatctaccgtcactaacaagtaatgaagtcagattaaaacttgatcgtgacaaaaattgtcccatatattttaaatgaacatgataacatattaattgaaaaatgttttagtgacttagttgtattgaatagcaaaggcaagtaagtagttatatacaatgactttcctatactcgagaagaccgtatccaagtaaatcaagaagatcgatatatatctagccggatctttggattgtcaagtgtcaacaatcttaattagatcaaaacagtctgttttaaaacatatgccaagttgtcaaacagaaaccaagcttttcatcactcaaaggagaatcacaaattctgcatggcgtgggggatagatatatatcatcgggagccactgagtccaagaaattgaatctattgacttcctattgctaatctatttcaaaataaccacgtcagagagatacgagtacatgtaatatcaatgagatattttcttaggagtaatttgaagatatttaatttgcggttgtaataatcccttttgaaaataatttgacttgtacacacggcaacaaaagaatgatctaaaggcaagtaacaagaatctgagtatccaccacctcttcctgttcctgttcttgttcctgttcgattccaaactctcactttctctgcccccctcgtgtctggctcccaccttttgtgtccactcaaccaacaacaacagtgtatctcttctcctccgttaaataactttatatttccccgttacatttccttattgtaacaaccaaaaaataattcacctgagactcacattctttaaggttttcgcatttaatatttcactttcttgaaatctcctatatttttgttatatatggtcgtcggcgatg

SEQ ID NO: 24012 - DNA, 3003 bp, Unknown; identical to SEQ ID NO: 24011
  misc_feature (1)..( 3003): 2750-1469P.txt file - cDNA_ID_2161877; gDNA_ID_1620849; Annot_ID_170272

SEQ ID NO: 24013 - DNA, 3003 bp, Unknown
  misc_feature (1)..( 3003): 2750-1469P.txt file - cDNA_ID_2161894; gDNA_ID_2214699; Annot_ID_136830
gcggtttggtttaatttgtgtttggtttacttatttttgaatgtgtgtagggtggttatgttgactgctgcaacggcgtttggagaattcaagggacattagcagtctcacgaggaattggagaccggtacctcaaggagtgggtgatagctgaaccggaaaccagaacattacggattaaaccggagttcgaattcttgatcttagcatctgatggcctgtgggacaaggtaagcataacaagaaatgcatgatttcaaaaatttgattttcatttttggtctttggatttaatgttgaagctggtttgtcctataggtaacgaaccaagaggccgtcgatgtcgttcgaccgtactgcgtaggcgtagagaatccaatgacactttctgcttgcaagaaactggctgagctatcggttaagagaggctctttggatgatataagtctaattataattcagctacaaaactttcttccatgatatattaacacatagtacattagctaaacttaattaatttcattaggtcgtagttattaataaattttgttcggtattttacatgtaaatacataaaggtttggaaaataattaatttattgttattgttcttagagataagctccaaaatatttttggtttacgatataaacactacataatacatgaaattgcactatctaaccatttatcatcctttttatcctcaacttttttattctcatgcattttgaaaaccacattctaatcatatttctgcttttatgtgtaaaaccaacaaagatgtacatggttgatatacacacgtagacataaccttgacaagcaacatcttcgtcgttactcattttacagatttctacccatctgccttcaataaaacaaacatcaaccatattagtaactgcatggtaaccaagcatacgtgagtttttgttgtaaggaccggtaaacactttgaacctataaacacctccgcctcttccaacaactcagaataatgaacaagatcacatgctaaggttttgtaatgcttcttacaaacaaaagtttatttaaaaagggaagggagagtttataaaatataaattagcattgacattggtgtgaggttcttcacataatcatatcattctgaccaaaatattagtcggaaaatggttagaaacacaccaatatgagttgttttcttgtagttctgagaaaacatagatgaaccaatatatcaacgtaagtaactaagataaattgtgaatcatgagaatgcaagaaatattttctcatgattacatgagatgaaatactaccttacaattcatcaaactttttgtagaaaaaggtattgaagaaatgaaaattggatgtagacaaaaaaataaaaaattcttgctgcaagatcctggacaaagacaataatcacattaagaacaatgtaaattttttaaaattagtaaaaactctctataaattaataattcacaccatttaaattttagaggaggtgatgaaaggacattatcatcaattttggtagttaacccccaattatttaactaatcaagatacaaggggtacaactgtaatatattcatagtttggtgtgttttctacaatattcagaaacacgatttaagacgattgaaactaaaaataaaaagtgtcggacttgtaaattttcgctcagcgatctgcttccaatggcgatctacttcattctctatacacttctcacgatcatcttcgccgtatctctgagtttatttctttccgtgatcaatgcaagaaagagcagaaaacgtgcggtaggattcttccatccgtacacgaacgacggtggcggcggcgagagagtgctctggtgcgccgttaaagccattcaagaggaaaatcccgatcttgactgtgtcatcttcaccggagatcatgactcttcttctgatagcttagctcgtcgcgccgttgatcgattcggtgttcaccttcagtctcctcctaaggtcccattactcctaaagtttaaatttttatcaatttgaattggttctaataacacagaacctctcagatttgagggcaagtttcaattttgcaatttgggttagttttgatgcaagttttgtgcttttgttggttgttgttgtgtggctttaggtgattcatctaaacaaaaggaaatggattgaagagagtacttacccacattttacaatgataggtcagagtcttggttcggtttacttagcgtgggaagcattacgcatgttcactcctttgtatttccttgacactagtggatatgcgtttacatatcctcttgctcggatctttggttgcaaagttgtttgctatactcattatccaactattagtttggatatgatttctcgtgttcgtcagaggaactctatgtataacaatgatgcttccattgctaagaggttttggttatctccttgcttatttggtgtttttcaaaagtgaaaagtttctatttctttgtttagtgtaatgatgtttgttgctttttttgtgtagcaattggttatctacttgcaaattagtctattacagagcttttagctggatgtatgggatggttgggtcatgtactcatttagctatggttaactcttcgtggactaagtcccatatcgaagtgctttggagaattccagaacggattacacgggtctacccgccctgtgatacttcaggacttcaggtgataaccttcagacagctcgaatcttatgatttttgtctgttttctggttacatctcagtatttgctgacatcttgggcttattgcaggcgtttcctcttgaacgatcatctgatcctcctaaaatcatatcagttgctcaatttcgtcctgagaaggtgagggatccagtatttgacttatgagaatagggtactatagttttgagggctcacactccaaagttcaaaagagtcgtccagcttactcaattacagtcttgtaacaggctcatatg

SEQ ID NO: 24014 - DNA, 3003 bp, Unknown; identical to SEQ ID NO: 20955
  misc_feature (1)..( 3003): 2750-1469P.txt file - cDNA_ID_2161894; gDNA_ID_2214699; Annot_ID_189609

SEQ ID NO: 24015 - DNA, 3003 bp, Unknown; identical to SEQ ID NO: 20955
  misc_feature (1)..( 3003): 2750-1469P.txt file - cDNA_ID_2161894; gDNA_ID_1620849; Annot_ID_170279

SEQ ID NO: 24016 - DNA, 3003 bp, Unknown
  misc_feature (1)..( 3003): 2750-1469P.txt file - cDNA_ID_2161950; gDNA_ID_1620535; Annot_ID_159844
tatacaagcttgacacccgtgaaagttataagcacgattgcgaaacattgatttcctttgaagtggccaagagagatcgtcgtttaacgattattggtttataattaagtaccttttaatcaaaatataaaaggactagtcatatcttgatttttgcatctcccaacaatttatttataataaacatatttagctttttcttgagagcttgtatcaatttaaaagtttcttatagaacacatgttgaatttgtgtaaagaataaattgtgatgatactatatatggatatcacatcatatcaaaatcttaaatgtattataaatataataattaaaatccagagaaaatcaattttcttaattgaatgtttgtatatagtaatataataatttcatatgtaaatattccatttaatttggattatagttttatagaaagaaagtattttgatacctttttaaattttatctcaaataaatttgttttttaataaatatattgtgatttcagtggataagttttatctttcatcacttttagtttgttaataataaatatgaatccagttagatctcctctgatcactggctttcatctagaaaccaactaagagttttgcttctcattgcattggaatggtggtaatctacaattatgggctgactcaatttaatttgcaatgtcaccaccactgctcctcttctatctagcaaacaaatacttaattgcatttcgaaaaatcaactagtctgtctccattatcatatacataaatacaaattaacatcagaaaaaatatacatacaatctttgcacagagtcacattttcttaaaatgtataagttatttcatccggttcttatagtgaataccatatgtatatccatgtatataaattgatatttcaattaacattaaggaatcacaagcatgcatattctctcgctcccacgcaaacaaaaagtgcatgcagcctaacgtgatctctatcgttaggtagctcacaaatgacgaacctaaaccctcttcaccataaatcaaatcctcctccgctctatataaacaacaaaaaaaacactaaacacttaaataaatcaaacaaacactccacattctcaaaatcatattttcatataacttataaaagataaaagaaagaagaagatggcagcttcgtccaagtactcttccatgtcattcatgaaggtggcaatgatggtggcgctggtcttggtggtggcagccactgtggtggatggacaaagctgcaatgcgcagctgagtacactgaacgtgtgtggtgagtttgtggttcccggagctgacaggaccaacccaagtgccgaatgttgcaatgctcttgaggcagtgccaaacgaatgcctttgcaacacgtttcgcattgcctctaggcttccctctcgctgcaacattcctacactttcatgcagttgatatggatcctcatattaattctagacgctatatctttgtaagaacatacaatataacgtttcaaatacatccatatatagtttcatatgtttaataaatgtatctaaaagcttttttttttggtatttaacaggagaagcatgtatgggaagtaaaggagatggatatctaagaataaaaactcaaagtttgagttttttttttttttttttttttggtttttgttcttcactgcaaaaccaatgggtttcgaataataatgaataacaccgaattgaaattataaatggtttgagttatattatcaatttataatttgtatacatgcaaatatatcttatatcacgcctttcaaagtagtatgcatgtttaattaattggttattggtgtgaccaaacgaaccttttggttcttatacattcgtttgataattcaaaaattagggcctaggggtaacgtactgtaaaattcgcattataaattccccacacatcagatttgaaagaatttcgtccaaacacacaactgaagaaacatgtagtatctaaatttttaacatgtcgaattagagaaatcaaggtgatgttttgccatctcaaatattctccaagaattttgcttaaatgccaagaaaatttgtaaaaaaaaaatatatatatgaagaccagagccagcggtaaattgaccaaaacatccctagtagtctacctcaaagcgtgtggaggttgaaacgctcggcggatatcacgagctcgggccacacgctcatctctagtctcttttacattggctttacaaattttaaaatgaaacacgaattttatcgatctacaaaagttttgttttatattctatggtacagttacctataatgaaaaaattaaaataatataaattggtgaagagtcaaaatgtagatcttttaggctttttagctcaaggcttgtttttctctgttagaaaaagttgctgttattgttttattgtttctccctaattagtcaaaatcttgagggaaaatgacaaaagaagaaacccatgtggtcaaaatcgaagcttttttgtgttttggtccgagtaaactagggtttcgtttgtcttttttaacctttctaaaataattattcgaaaaatttggcttaaaaggtcaaaggtacaacttgagattttggggccatttgagttattaaaaaaaaaaaaaaggggagaggacaaaaacagagtattgaacaaaaaggggacaagtcatatgatataacaaaggaaagatctttctctttcatttgctgatctcactcgtactatagactaaggaaagatctcatttggtcgtcagtaaattttctgatttgattgaaaggtatgaaacttgatgaacaagcaacgtaaacactgagaaaatagtaaaagcagtgacaatacaaatatatgttgtcttgcattatgttcttctctccattgttggttttgtctttcttgttttttttttgtttctctataacttagattattgactatttaatttggttgcagagagggaaaatg

SEQ ID NO: 24017 - DNA, 3003 bp, Unknown
  misc_feature (1)..( 3003): 2750-1469P.txt file - cDNA_ID_2161987; gDNA_ID_1620535; Annot_ID_159856
ccgtagagttgacgaatcatgccacttaatgtgttacaggctcaaatatccaacctatatgagcccagcccacttatttataacaaagaccttaggccaagagtccgtccaaataacaaaaacgacaaacaaaaataggcgtcaagtaaattaagaatctttcaacattattgagagcctcattttttatttatattttttatattattaagaagcactacataattgaaaaaacgaaaatcttttaactaatttttgcttttctaaaataggacaaatggatttttaagttacatattttctaaatctactatttagcttcgagtatggtgtaatcgacaaacgtttatttatccaacaattaccatttgttgaaataattattttattttgaacacaaaaacaaaaacaaagtcaaaattagagatgatatattctttttttaattaaatttctctgatatgatattttaaagttttcaattactaatacaaccatcttttacgatataatactcgaaattaaacacaaaaatcaaatattctatattagacaaactatttagattgcacttagaaacacaattatgtaaatagcacttggcagatttactcacatttggcaagcagaataccagtcaggttagaaccgcatgcttcaaaaaatttgacatcaaaataatcatcaatgttttcaacttctgcaactaaaatgtatttgaagttttaaacaccttcttctgtagtctcagttaaagatccaactccattgttaaacactaagttttaaacggttaaaagaatattagaagtgaaatttttttagaaactatgttatgatatattcatgtggaagagagagagcacatatttatattggtcaagaatttgtatttggttatttaatgagagatttcataagttgattttggaagccttcaatgtcaaggcctcttagagtggatccataggtattttgataagaatcatcggcacatgttatgtcagtatagatgtgagtacagagcactatgagagaactaatattttcaaatacttgttcatccgaatactttatacctaaattattccaaattattcgaaaatactttaaaaaatctaaatttatttgaataaaaaagataagtaaaaatttatcatataatatttgggttggttactttgtaccgaaatcactacattaatcatctaactataagttagaggggtataaaatttattagatgggcttcaaatatattttaacattcgttccgttctcgtgtaatatccgatctaaaccgatatccgaaatacttaaaaaagattcagacaaatgggtaaaatattattttaacctactataataatcttgtctaatcggtaaatgttatttattcaacaatcgccattactataatcaattacttatgatagtaatgacgattaaaaactactatatacttattatagtaaagtcattattcatttggatcaatcaacaaaataatatggatgattagaaaataattaggattatttgggattttttcttttgaggagtaaatttgactatttgagtaactttctcttaaaacattaaacaaatcttacattaatataccagcttaacaaaattatcagaacgcctagcaacttagtggcccaagaaaaatatgtcttttagtgaaccagatttcttcatagataaaaagtttagtcataatccccaaaaatttatgaccaaattatggagagagtagctgagtaggggatatagaaaacttgttagacaaaaaattaagagatgagatgtctaaataacatttaaaataaaaataaaaatttaggagacaaagaagatgagtgcatttaagagagggacagcacatgttttcatgtgcttccaatacttacgccatttttttatccgtatgattcagcttctaatcattttataatcagctataaacaattttaatactttgtcattattagaaaatcaaaatcattaattctgatgagttggtttggtttaaagtatttcaggaaaatagtttaagattgcgaaaaaaatgaagagaaatgttgaaattatcaaaccaataatatctactgatactagaaaatagtgtatataaaattctgaaataaatgtgttatcattaatataacacacgcaacatacatatattctatggtgtgtacagctgtatgtacataaacataatgcatgatggatcatgacgactatgtggcatgcagataaaggcatttctggtttttcttgggtccaccaatactatcaataatggtgttatgtgcgatgtgtttcattcaagtacaataaaaacaaaatataacttattcccttcaaatttaatttcacaactagaaggtagaagccactaaacctcttcacactcactcatgtaactattaatttaaattaatttgaataaaccctacaaaaaagaaaaagcgtaacctactactctttaacctgacaaaaaatggaagctaattttccatacaaagttcactttatattatacaagtttaattacatacaatcttagacttttttgtaagtcacaccaagcaataaaaagggaggttggggtgtctattaaatttaaggacccataaaatcaaccacatttatatgccttactgcaataaaaagaaaagcacttttcaattcaattaataaactattaaaagttaatttcctactcaatcaaacccattaaagcagtaagaaaaaaaagggtttagatggaatctactaataactcactgattaagttttaatattaaaaaagttgtacgaatcaacctttatattgtacaaggaaagtgatcatcgcagactgtaaatcaggttttgttgttttgttttagtttcctcctacattctttggaagaaactaatacaaatcagagaatttgagaatccaaattttgggttgaagaagtttttgtttctgtagagaaaacaatg

SEQ ID NO: 24018 - DNA, 3003 bp, Unknown
  misc_feature (1)..( 3003): 2750-1469P.txt file - cDNA_ID_2162054; gDNA_ID_1620536; Annot_ID_159878
tgcagaggcgcttgaggcacgtatcactggaaacatctcaccgcctgtttctaatccgtttccttcaagcacgacatcgatggtggacattttgaaagcgtacaagctgtttgttcatacttgtcccatctatgtaactgattacttcgctgcgaacaaatcgatttacgaacttgctatgaaagcaactaagcttcacatagttgattttggagttctctacggctttcaatggccttgtttgttacgagctctgtctaaacgaccgggcggaccaccaatgcttcgggtgactggaatcgagctgccacaagcgggttttcgtccttcagaccgcgttgaagagactggtcgaagactgaaaaggttctgcgatcagtttaatgttccttttgagttcaacttcatagccaaaaaatgggaaaccatcactcttgatgaacttatgatcaatccaggagagacaacggtcgtcaactgcattcatcggttacaatacactcctgatgaaactgtgtcattagactctccaagagacacggttctgaagctattcagagatatcaatcctgacctctttgtgtttgcagagattaacggaatgtacaactctcctttcttcatgacgaggttccgagaagcgctttttcattactcttcactctttgacatgtttgacaccacaatacacgcagaggatgagtacaaaaacaggtcactgttggagagagagttacttgtgagagacgcgatgagcgtgatttcctgcgagggtgcagagcggtttgcgaggcctgaaacctacaagcaatggcgagttaggattttgagagccgggtttaagccagcaactattagcaaacagatcatgaaggaggctaaggaaattgtgaggaaacgttaccatagagattttgtgatcgatagcgataacaattggatgcttcaaggatggaaaggaagagtcatctatgctttttcttgctggaaacctgctgagaagttcacaaacaataatttaaacatctgaaaaatgttacttctcaattacatcatttttgtttcccaatggttttgtagaatatgtttgatcccgtgagtggatgcaactcttttttcctgcaagtacatattgtattcaaatccttgtggaaatgataaattgtttaatcaaagatccgaagacaacacgagcacttttaacccaaacaaattcaaaacttttggctataatttatccaacgggttgcaacaccacgggaatgacgatacagacagagcaacaaacgatctactagaacatatgaaccgatgtaactaatagcatatagattgctgtagttagctaatttaaaccctatttggtttgaggttttggtggcctcaaaacgctccagtccaccttcttgctcttgggtttcttaaaaccattgccctttttattgctcggtgatggtttgtcaaagctccttggggacttgttaggacggttttgttcctcggagactacctcagactgttttcttttcaagtcaccatctgtttccccacttggctcaacctttgaactctccggttcactgaaagaggatgcattttgactagttaccgtttacaactttaacgagaagcaaaatcagaaatgaactaaacgataagtaggtgataaatctatttgcaaattgctatcagtaacgacttcatttgtctcaaaattagatgatcagtaagacaatagatctccagcgttgttctgttgtatgcacactctctggaaataacaaagaaaggaatataaaagcaagagtacagacctaaaagacttttttcctccattactgctagagcttgagggatttccaccgtttattgcctcttcatgtaatttctaaggagaggacagttttatttagaaagctgaaagatcacaaagtatttcaggccacagcgtcacagatactaacctcgatagagggattgaaagactgaaaagacatgcgtcctaacaatgctcctggctgaggatcccaatctgttatgaccacactgcatcgaaaatcacacattagtaaacactacaaaacacataacaaaagggtagacaatagatacacaatgtccttgtttacagtaatctgatgaaagcaaaacataaacatcaagtaagaagaaataacggtaccacttctttgcaacagtcctaagggaaggaaaactcccattaggctcttcttcatcagccttcttcttctctactttcagagaagacctttgcataaactatagacagagagtattatcaatcattattaacacgtatctttttgtctctcacccaaaaccagattatcaactaagagctacatgattgatataacacaattcttcagtgaaaaattgcaactttagtcccaaaccaatgtttataattggtgctaagctcagtgctacccccaaggtgaaatcaacctcgaaggggattatcaatttgtccaagaatcaaaacccagcttaatagagaaaagactaaattttcaagctcgaattcaattcaatttcagtaatttccttgagtttcaaatctaaggtcatgtaacatgaataaagctacttctacagagaaagaaaaaagacagtacctttagatttctcagagtgctactaatctctctcttcgccattatagctttccaaaattacaataactacgatattcccgttaccgtagaggaggaacaacaactccgcgtgtgttttcgtttttctaggtttagaagattttccgatttgaagctccgtccaaaaaaacacacttaggtttaactggtctacacctaaccgattcaaaccgtgccaaattgatttttttattaccaaaccaaagattctattggtttaattttttggtatttatttgatcatgtctgaagaatccaaccaaatccaatctgaaaaacagctgaacataaaaagtcaaggaagcaacttgaggagaaaacaatg

SEQ ID NO: 24019 - DNA, 3000 bp, Unknown; identical to SEQ ID NO: 2444
  misc_feature (1)..( 3000): 2750-1469P.txt file - cDNA_ID_2162062; gDNA_ID_1620536; Annot_ID_159880

SEQ ID NO: 24020 - DNA, 3000 bp, Unknown; identical to SEQ ID NO: 2441
  misc_feature (1)..( 3000): 2750-1469P.txt file - cDNA_ID_2162072; gDNA_ID_1620536; Annot_ID_159884

SEQ ID NO: 24021 - DNA, 1071 bp, Unknown; identical to SEQ ID NO: 2438
  misc_feature (1)..( 1071): 2750-1469P.txt file - cDNA_ID_2162090; gDNA_ID_1620536; Annot_ID_159892

SEQ ID NO: 24022 - DNA, 17 bp, Unknown
  misc_feature (1)..( 17): 2750-1469P.txt file - cDNA_ID_2162132; gDNA_ID_1620537; Annot_ID_159914
gaattcaatacgagatg

SEQ ID NO: 24023 - DNA, 1198 bp, Unknown; identical to SEQ ID NO: 2448
  misc_feature (1)..( 1198): 2750-1469P.txt file - cDNA_ID_2162180; gDNA_ID_1620537; Annot_ID_159930

SEQ ID NO: 24024 - DNA, 3 bp, Unknown
  misc_feature (1)..( 3): 2750-1469P.txt file - cDNA_ID_2162191; gDNA_ID_1620540; Annot_ID_160015
cct

SEQ ID NO: 24025 - DNA, 3003 bp, Unknown
  misc_feature (1)..( 3003): 2750-1469P.txt file - cDNA_ID_2162211; gDNA_ID_1620540; Annot_ID_160020
cactgaaaaaaatagatatagagaggtaaaatccgattaaatatgaaagttgctatgtaggcaattgtatagtttacctaagattataaaataatcctacgctttgaatcgttgaaaatgttttgacacatatatggtctcgtctcgtctttctaaagctccaaaataattttattaaaagcgtgtgacttttagtcaatatttacatttattggattgagtcatattggtctataagtacaatattaaaattgattaatacgaaagtaggtcaataattcagacggtcaaccacaacaacataattttaatgattccaaatcaaccctttaaacttccttcacaaattgaaatctttgataaattttaatggatacttttttaaatgataaatgactaaatcagacactgagaaaagaaacaaaataaaaaagtttacagaaggtagaaaaatacatgttcaagtttaacaaactcattaaaagattttcgtgttttttttctttctaaccatgcttttgctttcttctaatgtgtatgtacctgaagacaaatagagacatgaatgctctcttcaccattcgtgtgattacagtgcgttttattttccgtttctgttcacacacgtctcttcttttctcagttccattccaacgccatgatcttgatccttgggttttgtcgtcaaacttccttcacggtttgtgtaatttgaacccaaacactctttgaacatagttttgtgttgccttcgctggcttgagatgcccataagtcatcaggaacagatgtggaaacgttgtcccaaagtaagctccatcaatgtctgttcattcttttaaggaaaaccgcaaaaaaaggtaacaccaaagatcactagaaactcaaaagaaaaatcatttcttcatgcaataagaatcaaacatcaaagtttttcagaactgcatttatataactctatatcagcagaagtgaaactgtagaaaaaaggatactgccttgatactttgatcgtgggtaataaatgtcttcgcatttcgggcaatatatcttcacagtgctagatcgcggtaagtctgattgaccaaccggaagacaaggttggccacagcaataaactcttggacatcttccaaagtcatagtttttgtatttgtctaactgcaaataaacagaatcaatctgtgaatcttttatagaatgtgaaagacatgcaaatgagtgtttaaggattttgtttaccattgctgccaatcctttgctagtcaatatgtaacgagcatgaatcagtccatacaacatctcagctgctgactcgatcaattcattctgttcctctgtaaacatctctcctgttaccgaccaatccaaatcaaacattcaagagacacaatcgtaaaagcgaacccatatcggtttccctactatccctaaatgcagatgctgtgcctgtacctagctaaaccgcaaaaactaataaaaggataacaacttaccttgagaagattcaacatccaaaatcaaatcaagagcgtactcgtagtagggaactagactgctgagtccacacaagttgaagtcatcttgaatgtaatcatcatcaacttcacaaaagaactcgtttcctcttagattacaaaaccaagatatccatgaagtgtcctctccatcagaaccactcacatctgattcttcactatctgtgtctgattcatctattcacatcaaaaattccataggctaataaaggaatttgcttaattcagctcatggagataagatactaaacataaagatcaaaacttgattcccaaatcaggaaactctagggttaagtatctgtttctaaatgtagattcgatttcaatagagcaagagagactaaccatcagaaaccgtattgttcttcgagagagaagcagaacgagaatctctatggttgatgttattcgactgctgcttcccaatcaagttcgccgtcgtcgtcgccgccgtaacggttcctttgcctttgccgttaacttgacgagaggttgaaggagaaggacgttcaagagcgtcgttgatccgtttacgatccacaacttcaggtctcgaattcaccgttcctctgtctctatacatgattctaaaaatacctgataaatctctctcttacagcagctattgtacaactttcatcggcatgtaatcgccggtgagagattgagaaatcgacggcgattaccttgagctctagggttttgcttcttcttttattttatttttagcttttgtcgaatcttgttctttcgcgtttcgcaactagtctgtttcgtacagagaaagattattattttattttttggtcaccgtttaatttttgatttgaaaaaaaattataggggtaaaatgggaaatagagaaataaagagctcccggagacgagggagtgaatcggtagctaagctagccactagagagaaagtagtgggagagatgggtcgaatcgaactaaccactaacttctggttcaacacgtagcatttcactgcacagcaacgaccgctcttgtttctttaattgccattttgccaatgttgcccacatttgtttttagaaatatgctcacttaacaagatagacataaattacttacataaaagaataaaaaattttgtattatttcttttgtctttttaataacatagttggcacatacattattacaatattttaagatttttttttacagtttactaatgataatctttcatgtcacgtatattattagatttttttttgataatctttcagtttttcttgctgtaatttgttttaaaaatgaccgatttgtcttttaaccaattcatcatccaaaacatcaattagtggtttaaatggcccaagaaagcccaacaggtgatgaacaccggcaaagtcttgtcacgtgaccagcacatgaacgagacgatttacatctttctttagtcagtcggtcgagtccgagagaggagaacaatg

SEQ ID NO: 24026 - DNA, 3003 bp, Unknown
  misc_feature (1)..( 3003): 2750-1469P.txt file - cDNA_ID_2162338; gDNA_ID_1620539; Annot_ID_160005
gaaatagaaagaatacaaaacgtacggatgttgttaacctaaacacgattactaccgagactaaagatgtctaagtttaatactaagaaaagtaaaacaatttttcgagcagatatatgaatagtgattttttgggtcaacacataatccacccaacgttgatttttgtttgtcgtttacaatctctaaaacgtttattttctaagaaatatacgtgtgggctcattttaatgcccttcgtgcgtctacccgacgactttgtttactcgaaactatatcacacactacaccacatatttcaacatcacactgtatacacacatttatatatacatgcagaccgattattataataatattttctccggtccctaaaacatatatatcattcattcccacatgagatataatattatgtaaaacatacttttgactatgttgccaataatcaaaaagacatctctctctctctctctcacatcctattttccaagaagctcaccaatgcttttgaattctcccacatgtcttttgacaattttagtataaatactcaaaccccttagtcagtcattctcatgttcatcaacagcatttgatctcaagctcataggaatttgatctccacattatatcttgatcatcaccacaagaaaaacatttcaacttcttttatcagcaatcacaaatcaaagagatgggaagagctccatgctgtgagaagatggggttgaagagaggaccatggacacctgaagaagatcaaatcttggtctcttttatcctcaaccatggacatagtaactggcgagccctccctaagcaagctggtatgtaaaaattataatatcaaatttcttaattttgatcaaatttcttacattaattattggtaattattatttacaggtcttttgagatgtggaaaaagctgtagacttaggtggatgaactatttaaagcctgatattaaacgtggcaatttcaccaaagaagaggaagatgctatcatcagcttacaccaaatacttggcaataggtattttacttcacatataagtatataaccgacacacaagttttattttgttttcttactatatataaatcaccaaaagaaagtaactttatacacacgtctaggtcgcactactattcttttaactacacaatgatcggctctttaattacttttgtattgatgttcttcgttttccttttggtatcatctttagatggtcagcgattgcagcaaaactgcctggaagaaccgataacgagatcaagaacgtatggcacactcacttgaagaagagactcgaagattatcaaccagctaaacctaagaccagcaacaaaaagaagggtactaaaccaaaatctgaatccgtaataacgagctcgaacagtactagaagcgaatcggagctagcagattcatcaaacccttctggagaaagcttattttcgacatcgccttcgacaagtgaggtttcttcgatgacactcataagccacgacggctatagcaacgagattaatatggataacaaaccgggagatatcagtactatcgatcaagaatgtgtttctttcgaaacttttggtgcggatatcgatgaaagcttctggaaagagacactgtatagccaagatgaacacaactacgtatcgaatgacctagaagtggctggtttagttgagatacaacaagagtttcaaaacttgggctccgctaataatgagatgatttttgacagtgagatggacttctggttcgatgtattggctagaaccggcggggaacaagatctcttagccgggctctagttaacatgtttgaggagtaaagtgaaatggtgcaaattagttaaggctaagaaattcaaaagcttttgtttaccgagaaaaaaacacactctaactcttgatgtgatgtagttagtgtattaattagaggctgcgttttcaaaaaattgaattcatttgtttctccaaaattgagtagtttagcttgtacgagtaattaataatcaatgacaagtaatcaaagagtctacgtatattaatattgccttgttgatgaaataattatccaacaaacattggatgccactataacaacaacagcaattaaaataatataagtactagattaattcactgttataatcattttctaatgaggttttgaaagttcaactatggcggaaaaggtaaagttacgtagttttataataaataacttgagaaaaaggagcttaatgatcataaacatttttaattaaaatctcaaatctctaaacatttgtagtttatgtgttaacgacgtctatgcgtcatcatccaaatttaagccccatattgatgacaaaaaatatttaaattataattatacaaaacatataaaactattgattacgttttttttggtaaggaaaactattgattactcttaaactagatgttgtcctttaagataatagcccaccaaaaacaaaatcgagataataataatctaattatttttaaaaatttagacactgctttgtattgtaatttttgaatatctaattcataacataattaaggtagcttaaaagaaaagaaaagaaaaaattgtgccctttatttgagaaaggtataattgtgtgaagttaaacgatgacgtttctttggtaccttaaatattaatttgtgtttgataatttattgtctatagattgaatgctttgttacataaatgggtttgaatcaatggataatggattaaagaaatggatgtttacattaaacaaccacacaagtataccgaaccgaaattgtttgatggctttgttatagaccgaaccaggtttccaattcggaaccaataattattaacctgaaccaaatcgaaatttgccgtctccgaattcaaccgaaccgaagttttttttccggtttaggagcttcgttttattgttgatgcttcaatttccctttggcctttgatacaaaatg

SEQ ID NO: 24027 - DNA, 3003 bp, Unknown
  misc_feature (1)..( 3003): 2750-1469P.txt file - cDNA_ID_2162345; gDNA_ID_1620539; Annot_ID_160007
gctctatcgaaaactgggagttttgctaagaagcactctgctaatgcaacaaaggagcctctgattatcatgttgaaggattctagggtttacttagcaagtgtcaatctccatggagttcacaacaacgttgctcaatcttttgagttaggatctcgattgtaccttaaagatccgcacatttctaacgtctttcactgtgatggcttgttattgctctgctccattaaggagaatacactcgaggtttggaatccatgttcaggagaagccaagttaattaaacctagacacagctactacaaggaatcagacttttatgctcttggttatgacaacaaatcctcctgcaagaaatacaaagtcttgagggtgattagtcaagtccatgttcaaggtgacttcaagattgagtacgaaatctatgacttcaccaatgattcttggagggttcatggtgcgactaccgaactgtctataagacaaaagcatcccgtgtctgtgaaaggaagtacttattgggttgttcgtaataggtattttccatataaatacttcctaagttttgatttttcaaccgagagatttcaaagtctgtctcttcctcagccgtttccttatctggttacggatttatcagtggttagagaagagcaactctgtctgtttggttattataattggtcaacaacttcagaagacttaaatgtatgggtgacaactagtctcggatcagtcgtgtcatggagcaagttcttaacaatacaaatcattaagccgagagtggatatgtttgattatgggatgagtttcttggtcgacgagcaaaacaaatctttagtgtgttggatctcccaaaaagtcttacacattgtgggagaaatttatcacatacaagatttggatgatcatggtagagattctgcgttaagatcatcatgctcagttcttatgaattatgttccaagtttagcccaaatccaataaagatttggcctgatctcttggaggaggcaaacacaaaggactttgtatgaattctgttccaattttgacttgtaattctcgcaccaatctagccaagtccctttttctttttttcctttaggaactttaatattgatcaggtttaaggttttctctggttccatgaacttaaaaataatcaactttgcttacatgtgttatcgcttgagttattttatggattatatacattcaaatactcaagcatataaatggtgaatcagcttgtagctagaaactgaaaaccattcgtttgacctaaaaacgaataaactttacagtgagcagaagaatcaactggcaattagtaacctatttatccacttttacatataaaatgttttattcaatctaaaactgggaaatagtaccaatttatacaagagaggattgatatatttttgtcaacacaagagtgacttgaaaagctttcttgaaaagaataaagaaaagacaatcaagcagtgtacaaacgaatcaattgtcaatcctcaatcttttttttggtcagcatcaatcttattttgtagaaatacaaacaaaaagacgcacaagtaggagaaacaaagacaggaagaagaataaatagatcaatagaacttcgaatgaacctttcttggaactcaagaaaagatctctctttgcagatttgccagatagtgctctcatcactatgccttctaaaatacctttccttggaaaaaggacgagacaagtactcgagaaaccgagaacgttgcctcgagcttgtattttgaagataccttgctttgaaatgaacgataagacagtgcgacatgacatgaaggagacgagaaatcaaaaatctctaaccgatgtagcaatctcgaggtctctaactttcgatctgagcttgttaataaagctcctccttgccagtttcaccacatttttcttcttgccaaactgcaaaagagccatcagcaactctttttttttttttttttttttttttgcaaagaatgatgtgttggaagaaatcacaatggttatcaaggaaaaattagtcttagatactttacttgaaggtcataaataattgaacctcattgtcttataaattactagtatcatgtttcaatgattgaaatgcaatttgtgtgtattgcttatccatatatgttatcgtttttgttcacatttgataacggtcggtcttctcaatttcccttattagttaccttcccgtttttgtgatttaataacaacaatggttgtaagtacttccctagcctcatcattgcagtaaaagattaacgaagatttatacaaagatgaacaacatataaaaatgttaaaaatcacactgttactctaaaattctaattggaagtttatgttgtattgtacgaactacaagctactaaattctatgatgctgtttctttttgcgtggaacacaattttcaattctagttctatttcaatatttgtagatcaagggtagattgaaattgatcatggtcgtaaaacatgtttagtgttccattgaattggtctaatcttatttcttcctcacaacgtcacgtaacaaccatcaactaaatgtctattttaagctaaatgttaatcataaagtattaaattaaaaataaaaagacagaaaaacgtggtaagaaagaaggaagagcgccaaagtctgagctaaatctatggtggtttcaagcattcctaaaatggcaatcttctcacaaaaaaatattatctcaccactgaaccattcttacaattcctcatatcattattccaaactgaaaaacttcccaagattttttgtgtgtagatatgttttgatagattgaagataagtttaaatgattttggatgagacttgaagcggatcaagctagagaaaggaatcgacgacaaatgaatctatgaagacaggtgaattacaacacttgatgcttcttgagtttatccgacgttcttctttcgggtttctcagatggaatg

SEQ ID NO: 24028 - DNA, 3003 bp, Unknown
  misc_feature (1)..( 3003): 2750-1469P.txt file - cDNA_ID_2162422; gDNA_ID_1620542; Annot_ID_160056
gttgaaattctttatgaatgttattttcatttttctgaatatctaagagatttcggatcctagggacatacattcctttggaccgaaactagcatttcaaggaaacacgacttttcattcatttggcgggatcatacgttactggaccaagtgctactcggtgaatgataatgtttataagtacttcacgttgatttatgggtcctttaatttggtactcaacacatcttccttatatgtatatagttattatttatttattttaataactttttcactttaagactcctttttcgttggtaaacaacttgaattagacatttagactcctttatatcatcgacctataactatgccagactattgataaaaagttaaatttttagttcagtaaaatttctcatatattgtttgagtgaaaattgttcatgaatagttttgtgtaaattcgattgtatttatatatagtttacgcgtctctcaacattatatacatatcatggttgtttagtttagatttttttttattttttttttgaaaatgatgtgctcatagtttgtttcgtgaaaaaccatgtacttttttgataagctaaaacaatttcgattattaattcataagtttgagattgttactagattaatattaatattttttcgttatactttaccgtcgataaaaacttttatttcctttcataattcaatatgcatttctttattacaatgattcaatatgcatgcatttgccgtaaaacttttgttttataagtaatttttatgatatatttatttgaaaagttatctgtctaattaacaacttctgactatctccaaaatatatgcggtatataaaatcaactactttattttacttatttaacaccacattacccgccaagtttaataatatgtaaacttatttaaaattaatagctaagttacgaacgtataattaataattgtaatatgtaagctatatgaaataacttatataaaaaaataatcatatactattgaactcaagaaaatccaaaagacattatcggaatcagtaatgtttgtttcctcgggtctagatttggactgcctctgctggttttcacgtgcttgctgctgcaaatccgattatagaggatacacaaacacaaccataccgttttttccctcattattttaaaagttatatattgattattaattatatctcataacaggtcggtatattatataaattactcatgaatcatgattccccaccggccaacaccatctagtttattattctttgtattatttagcgagatcgagagaattaacaatgatgatattattggaatatatctcattttaaaataaaaagtcatcgaaagaatacctactttttgtttatgtgcctctcatccccggccaatccaaatcattagccttcgacttaaattataaaatgttctaatttttgttttcttaatctttttgttgttttatagagaaaaaatgcgtcttcttctctacgtttgaagttacaaacttacaatgttccttcttctttttgtcgtcaaagaaggtaaattcattagataagtatttacaaagtttgttccaagatactacggattacattgagtataagctctttttgttaaggtatatggatgctattgactaagtttacacttctagtgagatagaggaagttaaaatcatgcattaactacatctaaaagatgtcacatacatatgttgagaggtaatgatgtcaacattcttctttgtagtcgctgctttttctactttgtatcatttcatatagtataaaattaggttgtagagccccaacataatgttacttgagtatatcctaggctccgaagttggtgcactaccattcttaagcttagagtttagctttcaatggggagtgaatcggttccacttgcatcatatatatactttaaaaagatgtgttcacttcctcctatgaagcgacaaaccgatgccaacattttgatctggagatttccaggatgcgtcaacaaatcagacaataaaactaattactcattagagcttatagctagccctagagacgccattaaaatgttagcgggtgcaaattgctagaacaagaaatcaaacttggtacctcatggattattagggtgtatgtcaaaccattttgccactttgaatactttggctagtgtaaaacagtatttatattactaggtgcaagtgcccccacattactcaaaagtgggtctagtccacccataaataacagattatagtatgttttagatttttttttgttcataatatctgatgtttcgaaaaaacaattcaagtttctatgcaaaaatattaaattaaacagctatatgattgtttatattctgcaataaattatatcattggtcaaaatatttttaatagatattaatttatgttttaatgttaaaaaactcaaaataattattttcttaaactttgtgccttaatctaaaacatctatatttttgaaacagagtagtctttttagaattggagttcttttgagataacttggtttctgatggtatctaatatactaattcactaacaaacaataagtattcccctttctgcctaagttcggctacattatagctttttcttttcatcaaatcctgatccttagcttcttaccaaaacaaatcctgattcttagctacacacaatacaatactctaattccatccactaatttgatacatgaatttttatatattattttgttaccctttatatcaaaagccataaagggacaattcttaatcagttttaagacgttaaaaaaaaaaagtaatataaaatagatttttagtcaaaagtcctatgccacaaatgtcttatataatttgattccttgctggtgagagtcacaaaacccaacagacttcacactttcactttcattcgctttttcttctctattactgcaatcacttgttcacgataatg

SEQ ID NO: 24029 - DNA, 3000 bp, Unknown; identical to SEQ ID NO: 2468
  misc_feature (1)..( 3000): 2750-1469P.txt file - cDNA_ID_2162432; gDNA_ID_1620542; Annot_ID_160058

SEQ ID NO: 24030 - DNA, 3003 bp, Unknown
  misc_feature (1)..( 3003): 2750-1469P.txt file - cDNA_ID_2162488; gDNA_ID_1620545; Annot_ID_160143
gaatccatgagacaatttttaaaaaactgaagttgtaacccctattaaaacagcatattaataatattttaaaattttataaatattgattcaaatacatccaccatataatccaattccaaaataaaacctgttgtataatttctttacccgtcccgtgatttttttttaaaaaagtaatttttaaaatttaagaattatttttatatataaaagttttgcaaattatatcattctctaatacatttatattttatagtttaattttatatatagtaacattatacatactacataatattttcggttttatataatcttttctaaattaggatgatttgatatgtttaatattagtggtcttaaaaaataataaattaaatatttaaccagtattgaaacggtggattaattatattttacttttttattaatgttgattcaaaaacccgtcactccaaatctgtcttgccaaaaagccatttattttattaatattaattttattaatgatatgactctgaattataatctaaacattttagctaataaataggagtacaccatatttatttaataggggaatgtaccatatgacccgaatgcacttttacccaaatccaccaaaaaagtcttgcaaaaatactatagagataagaaacgatagtcggttttgataggtaaaagattagcaaatatattagttagcttaaattagttaaagaatacaaattgaaaaggtatattacactttattcgaatatagtatcaaaacttatataacacagagatttgataattttttaattgttgaatacttttttttgtgctaatttttatgtgattaagatttaattgattatatatataaaatattaaattgttttacgaacttatttgtttataatttggtaacagatagatatttgagtattcagtatattttgcttcagtttaggaaatctttgatgacccgtctttagatccaataaaccttataatctagatattaacctgcagtataccgcaggtaggcttatattttagttaaactaaaaacttttattgtaaagatgatttaaaaatatatgatattattttatttgattttaaatgtatagtaaactgtgagttgtatatgttttgttgatattatgtatattgtttagtgtttataattagacacttgtagtttaattgttaatttaagagtttcacatgtagtataccatcttgtattaatatcgatctaaacccgtcaattctaggattttccagcttgtattaaaaattgaatcacatcatacacataaaaaaatctaatatgttattaattattatagtatataagattataaattttcaatataatatgtatgaaattgaatataaatatttcaaattatgacccgttactcagtagaaagttttcttaaatctatttttcaccctttataatattttttcatgtattgaacagtttatatttgtttttaaaaatttaaattatggcatatgcgaaaaaactctaattttttttttataatgatgatattattttttcgcaaaaatagaatcatataaagatgagaagtgaactataataattaataaaaaattaatatgataatttagatataaaatctaatttgttgattttaataggttacttttttggaaattaataatgtatttttttaaatttaattaaattaattaaaatttaaatatcaaatcttatatgttgatcttgattggttattatttttgaaaattaataatgtatttcgttttttaattaaatttaattaattaaattagtatttgactttttaatccttaaagagataaattaatttactctttaaaattttatttctaatgatatacctatgtaattacttaaaaaattaatgttatatttaaaatgtactttccaaataatatagtaggatatgtaaaagaaagtataatattttaatgtttgggtatctttatatttaagacacaatgtctcaaatgtctttatagagacattttggagagagatgtctcaaatttaaagacccttttatatttaattattcatatcttataattataatttttttaatatagctaaagaccctctccttttatatgcaatggagatgctccttcatcattagtatattttgttttgaattcaagatttctaaatatagaatttcctaaaataaatacatggtaaactcgtgggggttattgacttgatttgatacaaaaaatgagaggatatagttgtgatcgcatttgattaatttaggctgatgagcaatatgtatgcaatatgcatggatggtgtagaagcgaagacaactatcaccatacttaagattaaaatcaccacaattttaatataatttaacaatatgattttatgcataattaattggacttaattattactaagacattatcagtttgcaaccatccaatttcatgtagaacaagaagtctttagattaaccctcacaaaagactttccgtttttcggggttttttcttgactaaacaaataatcttggagacattaatgatgttatgagtcatgtgaccaatacagttatttagacatcaaagttatctgcaaattcattagagacgaacggtaatagtcacacatgacaataagaatgaagatgtcacttagataaaaattaaaccaactcatgtatttgcctaaataaatcactatttaccaaatttagcaaacaaatcgtaactaaccaatcaacatcacacaatctcaaccctttaataatctcacattctctcgcttcttcttctcggattcctaaatattatcattcattcatcatcctcccaactcattggctctcttctctcctctcctttgcctattttctaaaatcttctccggccacccaccggccaccttatgatctttttggtggcggcgattacaccatcaatttgttagtttatttatatattaatatg

SEQ ID NO: 24031 - DNA, 3003 bp, Unknown
  misc_feature (1)..( 3003): 2750-1469P.txt file - cDNA_ID_2162493; gDNA_ID_1620545; Annot_ID_160145
gacattatcagtttgcaaccatccaatttcatgtagaacaagaagtctttagattaaccctcacaaaagactttccgtttttcggggttttttcttgactaaacaaataatcttggagacattaatgatgttatgagtcatgtgaccaatacagttatttagacatcaaagttatctgcaaattcattagagacgaacggtaatagtcacacatgacaataagaatgaagatgtcacttagataaaaattaaaccaactcatgtatttgcctaaataaatcactatttaccaaatttagcaaacaaatcgtaactaaccaatcaacatcacacaatctcaaccctttaataatctcacattctctcgcttcttcttctcggattcctaaatattatcattcattcatcatcctcccaactcattggctctcttctctcctctcctttgcctattttctaaaatcttctccggccacccaccggccaccttatgatctttttggtggcggcgattacaccatcaatttgttagtttatttatatattaatatgggttgcggtggctcgaggcttggaggtgtggcgacgacaagggcggaagaaggcggggttgtgccacttccagcgggaatacgtccccttctccggcgaaggttagaggagatgaagaaacggagccatgcaggcgtcttgaaagggagccagacgttgtctaagaaagagcttcttaggcataactcttccgaggacggagaagatacggaggagaacgacggtagcttgaaggcgtccgctaaggttgctccggcgcctgatcataatgtagaagagaagaaagaggttatttatgaaaagattccatccaaagatgatgttaaagaggtgaaggaagaagtagttgtgaacaaacaagaagaggacaatcatcatcaagatgttgtggagaaacaagaggaggaaaataaagaggttgtgaagaagcaagaggaggaaaatcatgatgatgatgtggtcgtcatcaatgttaagaaggaaggagatgatggtaagaatcatgatgttgatgaagggagtatcaacaactttgatgagagaatgattggtcctggatctccaagctttagggtttattgcgtcgatgttccttctgatgatgatgatgaaggtaaatcatatgttcttatacaaacacacatatatacatgtataaatcatttactatttgtatttgtatatggatgcatgcattgttagagacatatatatgtttatatatgaaatgcttgttatattatgtagtttcgttattgaaacaatttatccattcactattgcagaaaaagatgtagaagacgcgagaaagtcgatggaaaccgaaagcgtcacgacagagataaaagaggtggtcaatcacattaattcacattattgattatttgatctatgaggatctctaacaatgatatatttgtatttctataggacggaagcattgtcaaaaaggagaaaaaagaaagaagaggaaagaggttcggaatcgcattgccgaggaagtatttagcaaatgtgactgcgccgtgctatgcaggtggaggatgcatgggaaacactcattctcgtttggtgcaagagaaatcgagccagtgatcgatcaaaatatgtttgccatctttgcattgactgatttgttgaagtaagaatggtgtggtgtacgtacgggatcacgatgaataatcaaaaccaccttacgattttagacctttgatttgttttaagagacgcttgtttcagaatttgtacaacctcttcttcttcacctttgctttctttgatcaggataattaagttagtgtttgacgaatttacttttttccacgtggaaagatgtaattaattgaacttgtgcaataaaaaaagtgttgtctaaatgtcaaatttattgttacattaaccaatgaaaataaaattagagtaacatataggaaactgcaattatagaagaaaaaacacactaaaaggtgtaagtaattgaactttgtgaattccgtttgttttcggaatgcacaagtgttagtcataataggaaagataaaaatcttaattacaaatcctaaaatacaatttttaatttattttttagagtttatattaatatgtcgtcaaaaacggtatattattcagaacaaaattatcgttgaccattagttaattaataaccaagttcaaatttgataatttgaaagtttatttagacaaaattaattagttgaaagttttatcaatgatggcctcttaaatttttaacttttttttgttgagttttataaaaaagaaaaaatggttttcaaactaaatttgtttatgatcatgtttatccgagttaagcccaatttgagatctttgtcagtaatgactaagagtacctcccgcatatagaattcatgtagtttctaaaacatatatatatttttttaacttttaaatatatatatttttttaattgtatgagtttctactaaaaaattactattgaagttggtctaagttgcgagaccaaatttttatatgctttcggttcgaattgacatttctctgtgtaaacgaagcatcaataagaatttatcaaacttgaatgtaacaccatttctttagttgatcatttccaaacatttattaatcaaataaaattgaatttcaaagtcacgtgataatgatgatactcaaatttaaaaaaccaataacactttatttcaacatttctatgaagaaatcaattattaacacttaaagttattaattgaataacaacgaacaacatttaatttagtcaaaattagattttttttttcttttttttggttttattgttaagattttataccaaataaaattttacaaacgaatctaaaagaaagaacaaatttaaacttacctatcagaattgttgtaagatatttgggttttcttcgtattaggtttcatcagatccagactcaaaaaatg

SEQ ID NO: 24032 - DNA, 3000 bp, Unknown
  misc_feature (1)..( 3000): 2750-1469P.txt file - cDNA_ID_2162541; gDNA_ID_1620546; Annot_ID_160165
tgctgttctccttggcatcggtttccacggtactgaaactgcctcctggagaaataagaccagttaatagattgaatttctattacttttcatgcgaaagtatgttccaggaaagtaagaagttaagtttgttgtacctcaaaacttggaaatgttagttcacattccactgtttcatcaagctttttctatgaagccaaaattgacaatagagaaagaaagttaacacattatatgccaaaagaaaggcatgtgatatacaaccgtcaaaagaaaaaaacgagatgagtacctttgtgtacttataattctgaaggtcgacaaatatttcgccacatgagcctctacaatcaactgtatagaacgctacatcttttgctaggttcctacacttttcattaactgctttctgcataacaaagcacattatttcaagtgatcaatctacatggcaacaaaagacaaaaacaactggaacaactaaaagaaggaggtatcaacagtaccttagtagcacgagaactgtagccgataaccacaacatcaaacttctcgaaaaaatcaacaccaagtgttgacaaatcacctgaaattgaagacatagactcgatgttactaaaatcatttgtttctactaaaattagagagaaatgaagaaaggaggagtaacctttctctattgaaacatgaaccatagggttaaaatccttaagtgaatcacaacaaatctcagctacggttttgcctacataagcattttcatcaggaagaatcaagaagtttgcgttgaagacttccgttgtaaccaatcgatcatccaacagagtcacactacctactcctgccaacacaatgttcttacaaaactgcaacaccaaatggaggaaaccaagtaagatgccaacactcactctactgcaacatagctaatagagagtcacaaaataaagtaagaggtacctcagcaacagtgcccttaattccagataccaaaacatgagatttactcaatctgcaagcaaaaacacaaaacaaaattcagagaagccctaatcaaaatttcaacagctaaattagcttaaaacccagaaagagataaactttcaccgagtatagcccaacaagaagagtttattagtactcaaacggaaaatcaataacttgttgttgcttgaagccatagaagttagattcaatgtgaagtaccttctttgagcaccagctccccataccctaatttgacggtcataaagagcagtttcctgctcggtgagctcatctccgtccattctcgtagtgaaaccctagaaccgacctcgaagagatgatcaaacccgtcacgaatctactacaagaggttttcggtgactcactcactgagtttgagattttttgttaaccggaaaattgctttctttttatttattcaaattacatggtttgttttggtttggtccggttcgtcaactacaaatttttaaattcaaaacaactgtgcattcaataaataaccaatttgttattttttaggacaatttatgggccgaaacaaatgaaacatgggctttggaccccaaatcttttaaatccatctgcaaaacttttaaagacatggaagacttttatacgattctccctgataattgacaacttgtgtgacccgtaactatgaaagtcaaagaaaataacgcgtatcggtggaaagagagaagaaaaaaaacagaagaagatgttgtgtaatgcgaagcacaacattcacatgctatgttttttgccgtaaacaactaagcatcctatacctctttctttagtatcactttccaatttattgtttcattttcatcatcatcatagttataaaaaagaaaaaaccacatctattttatatcacaatttgaaaactaatatattttggataagggtcagtaaaaagatacaagatttatgagtaatttgaaattttcaaaagtatactctgttcattcataaaaatcggatgctcagagttcagaattgatgaatggcagagaaaaatataaacaaagaaaagttgaaaaagtaagcaaaagaacaatcaacaacagctgtcactttcctccattcttttcttcactttttcttactcaaagtttttaaaaaatgatatcaataaaaccctaaatcaggaaagtaaagttacaattaaagtaagtaaatcatttcttaacttagtaatagctattatcatcaatttctctctctctttcctctttctcttatttgcattattgaagtagcagccacacttgttgtctccactttctcttgctaaactccatcatcttctctttcttttttttcacttgtcccatttttttatattttcatctttctcttttggagtttcttcttctactgactctactggtaggtgtatggatttggtaagatttctcaaccttcaaacaacaaacttttcttattctatagttttttttaatgtaataacatgtttataatcttactttaatctttcatttttattgcatttttttaattcttgcttggaattgagtagacagaaaaaaagttttttgtttttttttttgttttcctttcttcccattttgtgggatctgttctagtttctatgtttctgcacttctcatttcgttttttcagtacaattagtttgccttttttgggattttttttttgtttttttttcaatatcaaaatagatcattttgttagagcttcaactacaatttcagagtactctttataattgtgtttttgctttttgcttatgcttttttattttccttcatatgtattgaagttgaagtttaattgagttaaagattcatgggttttatgtttactagttgtttttgctgtttgttcttaaatttagagtaccaatatcaaaaaggacaaatcttgatattgctttgattgctgttgtgtatgtatgtgtttttatagtgagagaagaaaaaaaagcacaatctttgaatg

SEQ ID NO: 24033 - DNA, 3000 bp, Unknown; identical to SEQ ID NO: 24032
  misc_feature (1)..( 3000): 2750-1469P.txt file - cDNA_ID_2162541; gDNA_ID_1620513; Annot_ID_159175

SEQ ID NO: 24034 - DNA, 3000 bp, Unknown; identical to SEQ ID NO: 2470
  misc_feature (1)..( 3000): 2750-1469P.txt file - cDNA_ID_2162553; gDNA_ID_1620543; Annot_ID_160070

SEQ ID NO: 24035 - DNA, 3003 bp, Unknown
  misc_feature (1)..( 3003): 2750-1469P.txt file - cDNA_ID_2162573; gDNA_ID_1620543; Annot_ID_160078
ttcttatcaccggttaccggcggaagaagagcaaaaacactcggcggggacaggggaaagagagggacaatctccgccggtctctggtggcggtgaagagtcaggacagatggcgggaagtggaggagagtcgtgtggggtatcaatgtacagttgccacatgggtggctctgatgttatttgggcccctacagccagagctccaccgccatactaaccaatccttctttcacaaatctctttctttctttttttgtttttttttgttttgtgttaggatgaatcaagaaactagggttttttttttttgcttttgatcatgaagaatcgtttgcttttttatctacttagattttatttttgtatcagaattgacatatctttccacggtgtaatctctctcaaaccttgggtttatggttttctttagcttgttgcggaattaatttgatttgactcatataaatatgcttccaagtgtcttcaatcatattctggagaaatttaaatatttatctctaatgattgttttcattttaatactcttattgtacaattatgcttctttattggatcttcaaagtgtggtataattaatacgtagcaattagctataacgtttaagaaagctggctattcttgtcttccacaccacatatttgactgcttctcaagaaagcgggctactttatcctctactacaccatcaaccttacaattttggcggcattgaccatatactttttgttcccataacagttaaatacaaaaagtaaaaaatgtacgaatcgttcgtcatatcacaggtttgcacaattgcttttctttccaattactcgtatgtatttattaaaaaaatgtcatagacttaaccaaaaggataaacatgttaataagatgcaagtatgactactccgtgagagagcgcgaatttgtttttgtgtttataagttcaaaaaaagacaataactatccagatacgtggtcaaaaaaagacaataactatgcatatacgtggtcgtgaagcattgatgggatactgtttggctttgtctgaatgtgtcttgatgtttggattcatgtccctggtctctctcatatatccagaagtttcaagactatacaactgcaatgtctgcaaaaacacacatatctatatatataaacacattcaatacccacttgtcttttcagtgccctctcgctttttttacatgggggtttgggtttgaaacttcaggaaaggagaaagaaacgtgaactaaattcgacaaccttttctttttggatgtccattttcctttccttttttgacatcagccatataaaataataataagtatatattttaatttgactctatcaagtatctactaaatatgtttcaattagaatagcaccaaaaatgattaattccgattatcccaaccggggggaacatagtccacgaaggtaaatttatgaaaacgaagtctagtactatcatcagatatataattaaaccttagagattaaaactactggaatgtaaaaaaagcgcaaaagagtggaataaaatatcaatgataactcttctaaataagtcgaggatgcaagatagtcgttcggataaatgctcttgttatcgaaaattgttggatgagtgttacaaataagaattcaacccctattcatatcaaaatgaatccgaaacgaatggtaagaagaattcaatcaaatggtaattcagaatgaaaatctaaagtaaactaaatgatcaaaattaaataaggatgacttaatacgtgtaatccataatgatcaaattgattggggaatattaatgaatataatcatagttggtccttcaaaaaaaaaatccaaaaattcacctcaagcctccaaagttccaaacccatgtagatgtctctcaacaaacccaacccacgaaacaaaaagataaaaatctcaaagcccgacccaatttattcgataagacaagaaaacaagtgttattatttcttctgctttctcaattatggtctctgtccaaaaagattatactatagtaatagttttgtgaagctttttttaatagcatagcaattcgtagaagaaagaacaaccaaatgtcaaaaatcttgttttaaaaaccaattagtttcacgtcacagctcacacataataaaacaaaactccattttttttttataacgtgaaaaacaaaacaaaacaaaacaaaggaagagaatttgcgcgacaacaacgatcgatcagtcgtcgtcttctcagatcttgttcttcaaaggattctatgccgcaagagcttcgattgtatcctctctgaggattgggtaatacccaataccatggataacaatagcgagcgcaaaggaaaacgaatcgataaggataatattcgtgtcaagcggaaaactttgcaagctttgctcaatgattgccagagagccctcgagttattaaacttagccgaagtcagttctgaagacgatgaagatgataaaagcaccggcgagggaagtgggtcacaagagagcaggggagaagtttcttcttccgatcgagaagatcctgaagctgatgaagtaagtatatgcatctctctgaagaggaattgtgaggaaaatttgcttcaagctttaaagttcggaactttttgtttatcaaataagtgtgcgttgaattttggtgaatgtgtatacatcaacattttataatgatgcgtcatatgtttgtaatgatacaataatgtcatgactttcttcttccttgtttcagttatatgatctcatcaaatccagggttgaatgtgatgacttccttgaaaagattgagtcagcccaggtttcagcgccgcaacatcttgctggtgaggactataatgttttttttaagcctgtttgctcattggttgtatagatgattgtgatttctggtgttttagaagatagtagctcttgggatgtagttagtgaagatgatctttgggatgatgaaaccatg

SEQ ID NO: 24036 - DNA, 3000 bp, Unknown; identical to SEQ ID NO: 2482
  misc_feature (1)..( 3000): 2750-1469P.txt file - cDNA_ID_2162663; gDNA_ID_1620544; Annot_ID_160113

SEQ ID NO: 24037 - DNA, 3003 bp, Unknown
  misc_feature (1)..( 3003): 2750-1469P.txt file - cDNA_ID_2162693; gDNA_ID_1620544; Annot_ID_160119
ttaacatgtagaaccgacgaaaatcaaaaaggaaggtgaatgttaatatgtaagagttggaccaaagaaaaattgtcaaaatgagttggaatctatcgtaaaggtcactcaagaaattgaaataaatgcgtatcagatattagtggatgtgatagtgatactgtaacattatagatttttttccccctttctttttatatagaaagtatttatcatatactcctatggagacatgatttgcaatagcatttacattcataaattatgagggtttgagtgtttgagacagacaatatagagcttaataaataatattatccggataataaagttagaatctaaatgcaatattttttggtccaagttttactgcacacaatttatttaagaagacatatttattgtatgtctggttacttttacttttgttttcttaatttgttagaaattggagcaacattgtattcggagcagaagaagtggtgaagaacggttgggacttttcataaaactgtagatgtgtcattggacaaaaatgggtacagctgtttagagagaaaaccaatatatatatataaccagacatacatttaaaaagtatactccatccatttttaatacatgatgttgaaggtttttgaacacaaatttttattattattattattattatactaaaactttatttattatctatttaaatacgatccaaccagtaataaaataatatgtaaaatataaatcttcaaaaccaataaaaattaattaattttgtattgaaagttgaaaacatcatataatttagaacataatttttcacttaaaacatcaagtataaaaaagtgtctatataaaaacatagaaacccaaaaaagaaagcacacaaaaacttcatctgctaaaaaatataatataattgcatttcattccataagaggattttaattacaatttttatgtaataaatctacattagaaaaaatttcatacacaattcttatgatatatattattttacatcgtagctagagaatatctatcttatccaaaatcaaaattaataaaagtatgagatagaattatgcttaagatttgatacatatagctgaaagaataaacttatgtttaagatttctatttaggtgtgcaacaatttaaatatatatatatatatatatatatatttaatatattgtttattcagttgaaaaatgtaaaaagcattatataacacaatgagtaatagtcacaacttgcacaatatgtatatagtttgctgatgcttttgttggatatatattaattctgaaagtttgtaaaatgattgaattacgtctgcgttatataatcaattctaagtcataaaattaagctgtagcgttatgtattaatttgagattgaaaatacaaatacataaataatacatccatccgtctttgaaataaaaaatttaggtttcttataattgtttccataaaaattgattccttagattttctatataatttaaatgaatttatgttaatattttgtagactttaaaaaatataatgaattactattggttcgtaaaaatggaaaaatgttttagtgtaggaaatgaggcatgttttaagagttacatgcatgtttcttaattgtgtgataactttatacgtaatttataatttaaatttaaattttgtgaaaattataaaaaatacacttatattaaacaaaggaagtatcagtaaaattatttcttcctatcgacgagtgtgtttacaagagtgttttactatccaatttcaattgttcttttttttttttttttgaaaaagggttcctctaatttccattgttgcacttcaattattttctctctttgttttttttgagcaaaagttttgcatgtatattgaaaattttattgttttctaaaataatattaaatattttcaatattttcaaatcttgcaaagaaagtacacttgtactataacatcgttacttagtgatctgtcatgtgtgacatcagtctttcgatctcgaacgcgagagatatgtccatgcatgcatgcatgtgatcagtggatctgtactctttaaaaacataaccagtttcgtaacgacaaattattacagaaacaaaacaaaattgtaataaatactgatttcaaacaaccaaatgacacatgtgcaaatactctcttggaatgatagatgtatatatatatatatattataatatacaaatggtagaagatataattgccaggttttgaaactggcttctaaaatggttacaattaacatgagtacttgttacttgtatacatatcattgtttagaagaacaaaaagttgcttaaagatatctctagaaggggatgtaacaaaaattgttttgtatttggaataaacttctaataaacttttctaattgttgttcgaattgtcatgttattttgttattcgacttcttgagtacttggacccaacattgaataaattgtaatcaaattatgttaagccaactttaatatctacattttatcgcaatatgtaaggacaaaactcttcttactacataaattaaaattagagaatttcaaatgacaaaatctaatggaagttgaattaggttcatgaagatttatgccgctatatcatattagggcttaagaactctttttgtcaaattgctttcattaatttaaaggtttagaatacaaagatggagatggttttctcatgactccaaatttcatataaacgaacttgacaacactaaaggttacaacataatagggcataactatagaggttatgtataaatagggtataattgtaattagtattaccctagtctctcttgtaactagcctatatatattgtaattacaatctctaataatattaaggcattacactatatggtatcagagcctctcgactcttaagacctaaatttctcgtgctttacgcagccttctctttcatctcttctcatctttcacgatg

SEQ ID NO: 24038 - DNA, 3003 bp, Unknown
  misc_feature (1)..( 3003): 2750-1469P.txt file - cDNA_ID_2162750; gDNA_ID_1620547; Annot_ID_160180
cgcaatctccttccccacttgatcatccctcccgatttcagctcagacgagcactttccctccggtgaagcagcgcgacagagacgagtattgtacgccggttgagaaaccacctcccttcttggaaatttgttcctgcgagaagaactagaaacccagaaaccccaggaatttctattcatagaaagttcatgaggtgcgattcttctgtaaagcaagtctccagctagctccgaagccatcacatgactctcgtcgaaaacaggaagaagaccaccaccactcctcttcttcatcggtttattccggttcatcctactgtaatcgaaatgcgatcggagtgaaaacatgcttgggtaccggagagacacgtcactcgccgtgattttgctcacctgcatcaataaaccttaaaaaatcactcgaaaacccagacgaacaacaaaaaacgagatctgtctataataaaaggtgaaaaaagcagagaatcgagtgaataccatgacgactctaatcgatttaagattttccggcgatctctgaggaagaatcgaagcatcgatttcgtaataagatccagctcttatatgcgcgactgcaactgtaagaacaaacccaaaccaaaaattcagaaattagaagagaagcgagaaaatcaacaaaaacgaagaaactatagcttcagtagtttaccattcaaagtcggtgacgacggcgaagagattttcccggcggtggtttctctaatcggattccgtttcacgaacatcgtactctgtagaacaagagaaaaactaagagagatattttttttctggagaatcaaaaattgttataaggaataatgaaaaaatcggtttgttgttgttgctgctgcctggagagaatatatttgaaaaaacctgactctgcgagtataacaagaaacacacacgcgctttctggtacgcgcgtgggagacactaaggaaacagaatcaagcggtgatgagttttatttttctcatcatgagactgatagtgactgagccatttatatcacagcgaaaaaaaataaaatctgagagcgagagagatcttacactcatgatttttgctctcgataatcttcgttcctccttttcactggattaaaaaaatcaaaatcagcaacggagaaaaaaaaacatggacgcggatggagaaattaaagcatttctgagaaatagagagaaaacataaacccagaaatatttgaagaattttgttttataccagaaaatctttttaatcagcagagagcttatggggaagacagcaaaaagaaaagttttgaaatgtcgcatttaatgaatctgggaggtggctttatatatgaggttagagagagagagagagtggtgtgagtgtgtgagtcttatatgcgtgtgcacggcacgtgactatattgctttcgcagcaagttggcgtatattgacagatttgccctcaaactgtatctaaactgtaaacgttcgcggaaattggtgtacgaaatcatctacaatgaaagattgaaagcagacgtagtgatattacggattgatgccacgtgtgtcattttgaaaatttaacggtgataagacctgaaggttaatgtaattggccgtagcgaataaatttcgtgttacacgtgcggagaaggcatcattaagctactgctactagagtggggaccgactacacacgtgaggaattgttttttttttttgtcacagtgattattcttacatatgattattttcggataatgatatgtgatttatgatgttttattcacattaaattgtttatgatgtaaggattaatgtctctaatgtatcgaccaattttatactccaatgataactgaatctgtttttctttattgagctgaagcttttttaaaatcaaaaagcttaatttacgtaataacatgatataattgatattttttttataaagtatttaaaccaatcaaaacaaataataagcttgaggacttatgaccatgattatttgcccaatacatttaagttatatttttttgttgagtcaacaatatttttaataatttaaaaatatttttttcttaattatcaaaaacagtcaacaatacatttaagttatatttttttgttgagtcaaatatgtataatgtaagatgttaaaaagataattaagaaaaaagtaaaaaactgtaaacgggcctaaatgggccaatctaagctgaatttttttggggatccgactatgagatggatcaaaataaacgggtctggataccttcataacgggtcgggtctgatgaggaaagagagtgattttttcgatcgccgagagatgaaaggtcagtgctttgtcgtcttctaccgtctccggaccaaagagctcaagtcacgcagctaacaaagtacagatttttcccttgtttcgattgcaaaagcgcataagcttcgtacttgccaaatctgaagtcaaaccaaatacactggtcaaacaaaaagtcgacgagccccagattccgatagcaaaaccagtcggacccaggatttcgatgagccacactggttagcttccgacccaattcacgtcctaggtcaccgagaacgtggtatgtgttttctaaggctttcgaaagggtttaggttatagtttagctttagctaagggattgggttttgttgtgcgtacttattgttcgatgaaacttctgaaagagttttggtcaattgataatgaacaaagtagaaaactttatctccttaaaagtagtgacatgggagctaattctcctgtttgtgtttcgcagaaactgtgtgagcatttgcagtttctctcttgtggttgagctaaataaaaatcattgtacattttcaagagctaattatttctgatcattgttatgtgatactttcttttgcagacttctttgcatgttttggttttgttgagtcggatgagttttatttttggcttctctctcgaccagtagcagaaagctatg

SEQ ID NO: 24039 - DNA, 3000 bp, Unknown; identical to SEQ ID NO: 2494
  misc_feature (1)..( 3000): 2750-1469P.txt file - cDNA_ID_2162779; gDNA_ID_1620547; Annot_ID_160190

SEQ ID NO: 24040 - DNA, 3000 bp, Unknown; identical to SEQ ID NO: 2491
  misc_feature (1)..( 3000): 2750-1469P.txt file - cDNA_ID_2162791; gDNA_ID_1620547; Annot_ID_160193

SEQ ID NO: 24041 - DNA, 3003 bp, Unknown
  misc_feature (1)..( 3003): 2750-1469P.txt file - cDNA_ID_2162798; gDNA_ID_1620547; Annot_ID_160195
gatcgccactagcaaatacatcctcaaccgtcgagcttaactgagttaaccctgcagcatcctgtacatataccaaaaagaagagaatcaattgcagatctacccccaagtgtccacataatggatcacaaaatcactatgaatactaacctgtagtgttttgtaggcagcctccattctctgtttgacattgtccactctagcaagcgcagctatacaatctgctgaagaaccctctgcctgcagagtaccgaattcgataagagcacaagtttcaggaatttgatataatctaattttcgagaagagatccaaacaaaatctcaggaatcagcacaaatgcgtaccttcttgagcttctggaggattccagcaacagaaccacgcagagacacagcatcatcacggagacgcaacacgtctcgtgtggcacgaggaacacggaggagagcaccaccgctctgctcttcaagagaagctccgatctcctcggaggcaatctgaagcttcatttccagatccacaagatgtttctcgagtgaatcctgtgggtgacgcgcctggcacgacgagttaacccatcgcttcgcatcgaacttctcatctgagaatggacctagatccagcatcatccttgatccgatcacccgatttaccttagattctcttcagcttcgacgatgatgatgttgaagagaagaagatcctctgatttcgcagatacactgaagaagaaactaaaccaaatcgatctaaaccgactttcaaattcgactttaaaaccaaaccaaagtaaacggaagataaatttacaaatctgggccccaaagtgatgggccgtcacggaaaaagttttcttctttctttttctttatttttctttattttacttggagaccacgcagttctagaaccatccttaagcgactctctagcctctagcagcttcttctactctctgttctatataaacctttctctaacagcttttttttcgttcaaagagtataaaaaatatctcatcgagcttgaaaataattaatcacttgctaattctaagcttcttctctttccaaaaatggcgtcatcatcggctttagctctcaggagacttctctcttcttccaccgtcgccgtccctcgcgccttaagagccgttcgtccggtggctgcttcatctcgcctcttcaataccaacgccgccagaaactatgaagacggtgtcgataggaaccatcactcaaaccgacatgtttctcgccacggcggcgatttcttctcacgtaaatccatggttcctccgtccaatttcgctatagattttcccaatttgatacatgtttagtgatttatgtatagagtacatctaactttgttttggagatctgttgaatctgaaaatttggttgttttttcaaacagatatactcgatccgtttactccaacgagaagcttgagccagatgctgaatttcatggaccaggtaagcgaaatccctttggtatcagctactcgtggaatgggagcttctggagttagacgtggttggaacgtgaaagagaaagacgacgcgttgcatctaaggatagatatgccgggactaagcagagaggatgtgaaattggctttggaacagaacacattggtgattagaggagaaggggaaacagaggagggagaagatgtttctggagatggacggaggtttacgagtaggattgagttaccggagaaagtatacaagactgatgagattaaggcggaaatgaagaatggtgtgttgaaagtggtgattccaaagattaaagaggatgagcgtaacaatattcgtcacataaacgttgactagagtgttttattttggattgtttgagatggaatggaagtaagtgagtgaatttgtgaactttaaggtgtcctttggtgaatcaaggagaatgacatttcccacggtcctatgtgttcgggattttgacttttttcgttacatcaatgatctatgtacgtttgactactttcatatcataggttcggattttgtttcccaaattcttgatatcggattctggatatgaatatcgtagcaactatgatatagttgaagttatttggatattatttatggagaaaaagagtctgctaggacgattttctatcattatacctatggactatggtggtgttatcaaacatgctggacagagccatgatcaacgatacattcgatgctcattctcgatgttcaaactcggttttataaggggatgatacatcaaattgataccaagtaactgattttgaatgtgctggaaatgttgatataggtctcagcaaccagaagaaggttgtgggacaagactattagagaattttgctaccgtttttttttcacctctgtttggcaaagcgcgctctttatagctttacttctttggaaccacttcggtgaccatagaactcgttcgtgtcggcatcgtcaaatttaagtaactttttatttaccgcatggtttattattttgagtttttttcttccgcattttatattcttcatttttccttgtccatcgagaaagagagacaaaaagaggacgcaattgccggtgctgaggagaattttccaatcgcgaactcaggttttgatccatttcgctctctgcagaatccaccattatcttcatattttcttctattgacctcaatctttcagctcatctctctcctttggttaattgaatttcccagtttcttcaattttacttatttaatacatatctctctcaattgcagtatcctatgaacttcgtgatcatggttttgaattttacttgcttcgattggcctacgttataaaaaaattgaaactttttaactcaattctctaacttacataagcttttggtttgcttagcttatgcaaaatcatgttgatgcaggggacgtcatgctaaatgagaatctgtgggttaattcggagtgagaaggctataatagtttctaatg

SEQ ID NO: 24042 - DNA, 3000 bp, Unknown; identical to SEQ ID NO: 2526
  misc_feature (1)..( 3000): 2750-1469P.txt file - cDNA_ID_2162876; gDNA_ID_1620551; Annot_ID_160298

SEQ ID NO: 24043 - DNA, 3003 bp, Unknown
  misc_feature (1)..( 3003): 2750-1469P.txt file - cDNA_ID_2162951; gDNA_ID_1620552; Annot_ID_160321
agagggaagacaagaataagtagagttggcataggaaacttgagaaacagtaaagattgagatctaagagaaacaagagaatctttaagatcacctgtctacttgaggtagcttcctagaaggttcagtggaacaaagttgactaaatatcaaaactttcagctctcaaccaccctaagaaaatctatcacaagcaaagtattcagcacataaacgcattctggatccaaagtaagacagcaatacaagttacctcttctgaaagcttgatctggctctttaacacctcctagagaaacttgttatacaagctcatgaagcctatatacaacaagtaaagctaactttagttataatctcaccctaagaatctaagttaaagtcggtagatactgactattcacaaatcatgaaagccaccaataggaaagcagagaaatattctctctatcataaggagaaacagaattgagacagaaaagacaagcgcgggcccaattcaaccaacaatactcattcacttgatcacacaaagtgcaatcttaaacactgatagaaaattctcagtcttgtccttagggctcacattaaagatgaatcgagttaatgattgctgcaggtttataatatctgcctgaatatgaaaatcttcatatacggcattagaaaatgaaagtaggccacacatttctttctgaaaaagatgatgagacatcaaaacttataaaacaccaattcaaaaaaataatcgaaacttcacctaagaaactaaacccaagtaagaacccattttcgcaaaagagaaggaggagatattgtaagaactctttaaagcaaaaacagagcattgtaatagaaacaatcaaaccaagtaaaaacagaattttacatgagagatcatcacattacattcccgtcagatgtaagatcacacacatacatacacacacaagacagagaaaacgttgatgatcacgaattatgaagacccattagacaaaacaggacaaaaaactcgcatttacagggataatcataaggggaaaattgagaaaaaccttctctttattctcgggaagtgcagaggaaaacaaaattaccttgtggaagcaacaccgattaaagaaattggggaacatgggaatggaatggatccaaagagaagaaaacgaaacaagagatcccaaaaatggaatcggaaaacgaaaggattcaacgccttcttctgggaaatcaaagacacgcagtaactctggcagagagagagagaaagaaagagaccggagtttttccatttcggttcggattggtaataatgggctcagcaaaaataaaacatcttgggcccttatggaccctcttaccctattttaccataggctctacttttttttaccacctttgttttagtttcacttaaaattttagttaaggaaaaaaaagttaccgattatgtacactctactgttatttattagacacaacaaaactttcaaatatgatggattttccatcctattttatttataaaagaaaatatttatatttctaacatcaacaaactctacccaaatcagattatccttctgaaactatgcaatttgtattgtttttcaggaaactagtgattttttgaataattgtaatacttttcattcatcaaaaaaacatattatatctttcctttttttccatcaaaaacatattatatctaaatatctcattttgggttgttttttgataattaacacttaagcccatataaaagagtctagttcaaactgagcccagctacaccaaagaatctagtgggggacatgtggcaggtagtaatttgagcgttgaccaagaaaggacattattatacatccacctggttagagcatgcttataggtgatattctcaaagtatcattaaaaaaattttagtattatttataatgtttgtttaatagataaatattttttttcttacttttaataaatgctaccaatcaggagatgtcacgtagatgatactgatatcaagaaaatcactggaatgatactaatcaaactcattctaattgtttggttaataaaaaaataatttttacactgatgatattctaaaaatatcactcatgtacatggtcttaaccgttgaaatgttggtcgcggcctatatatagaagaacataactctaaaaatagctaaacccaaccacttcccttggattggaatctctcataaacagtttgttggtctggtccgctccagtccatactcataaggtggtagatgtttacttagggtacatcatacatgcacaacgttagtagttgcaggcatagacgtgtttgccctttattacgcgaaaaccactactcccttcgctagtctactttcgtcaattgaaccactaaacccaatgaaacctaatattttagtgtgctcaataatttatcatcatcccaattcccaagcgtaccaagattataatctaacttaacgcgcaatgtcatgacaaaacctatatacaatgaaaaagatttttcatgacaaacaaagaaaaaataaacacgagaaatgagttctcgtaataaagttggtgtgaactggtttttgaacgtgaagatgaccccttcatatttttatttcttggtttttgcttgagagggttaaagactcttaaggaagaaatacattacacgtcaaacctttttgggaaaacaatgaacgcttcatttataatgtttctattttttactcttaggtaaaacattgcaattgatagatgaacaagaacaaaagcagaggattaaaagaaagattaaactatgaaaaaaggacacgtgtgaagagaattagagattctgtattaagacagattaactaacaaaccaaaccctacttgttccactttctattcatacttaatctcattctcctctcttccccttcatacttaaatcttatcattcatccatcttttaatcattactcgagattctgtttccatg

SEQ ID NO: 24044 - DNA, 3000 bp, Unknown; identical to SEQ ID NO: 2537
  misc_feature (1)..( 3000): 2750-1469P.txt file - cDNA_ID_2162975; gDNA_ID_1620552; Annot_ID_160327

SEQ ID NO: 24045 - DNA, 3000 bp, Unknown; identical to SEQ ID NO: 2533
  misc_feature (1)..( 3000): 2750-1469P.txt file - cDNA_ID_2162979; gDNA_ID_1620552; Annot_ID_160328

SEQ ID NO: 24046 - DNA, 663 bp, Unknown; identical to SEQ ID NO: 2541
  misc_feature (1)..( 663): 2750-1469P.txt file - cDNA_ID_2163072; gDNA_ID_1620553; Annot_ID_160359

SEQ ID NO: 24047 - DNA, 3003 bp, Unknown
  misc_feature (1)..( 3003): 2750-1469P.txt file - cDNA_ID_2163093; gDNA_ID_1620553; Annot_ID_160366
atacttatgactgaatttgactaaagagatagcacaggcttagtaaatataaaaggcatggatgattttctcagaataataaccagcaaaatgaagcagaaaattgccattcagaatcagcaaacatttttagtgaatataataatccgtctaatccatcaggacatgtgatacagaatttcttaattggatatcagatcatttccattggccaagtaaaagtactgccaaatgtgatgtgagggggaatattaaacaacttcaaacttatgtaacaaatgagattgatgtcatattaccaattaatcgtgctgcaagggttttgttaatattcacaaattcattttgaagaaactgcagaagggtctttttggaagtgtctgtaataaggcgcttgataagcagcaagtcaactgacgatggatggtgctttgtctcgataggaatagggggcatcacatccgttcttcgagtaaacttaatagtgacatttttcctacatgaaaagaagatttaaaaacccgataatgctgcacataaagagctatgtgacagagcagcaaaaaaacagaaagatagtgatcttactctggtgtctctgatataaatctaaacagaaactgcgcataaggagtaatgacagccatttggcgcatatagtgcaagatctttgactggatacaacaaaaaaataaaatgtgttaaacaagtttgcgtgcatatatgtctaatgaacacttaagaaataatatacagcagaaggacgagctagaccacgtactctgtatgttgtccagtttccttcgataaccacctgtatttcagccccatgccatttctctttgttgcccttcttttcgtgcagatgaatatgaggaatgttcctgaaaattttaaccatttgaagacaattatacggcgtggaaaatccgaaggattcatagctattatgtcaaatgcccaaacataaaaaattagattgatatccgctttcgagaagctgctcatgtattcagatgggtacctgtgaatatcaatatccagtctgcagaaagtaacatagttttggctcttcatagatgacgagatctctatggggagacctgtactcattttggaccagattaaggcctgcacgccaggaaaatttagagaaactagaagggttaaacaagttctctggaaaaaatatcgatatgaagggaaacatagatatgttatgaatatgaatacaaaaacaaaagaccagctgcaaatcaaagccaatgattaaatcctcctaaagcaacatatacaacatatattccttttgtaaacctaggaacgagccatctaaaggctgcaaatttgaaactgataaaccacttcagcatttcatgcagttttacaggctaatctcagatatcaaacttgataagaatagattattaccatctttgcacccagaccaaactttccacgtgtttgcttcagtccatacttcgtcccggataaaactgtaagaagaacaatttgtaaacttagcctcaatataaaggtttattataaggttgatatgccaggctaaatcaatagaggaagtgagggtggtcattagctattttacctctcccaaacatatttggaatgtcatcatgtggcatccccttaccattatcctacattatgatcaactcaattcataactcaaaaaatgtttaagaaaacaattaggatctccatatatttatacatatacttaaaattgcatatataaatttctgttgaatcaaacaaatattattcaaactctcaccttacatgtcactttgtaatatgaggcttccccacgggcctttaaaaccttcgatactccaggctctttgtttttctttcccgatgccaaatttttagcttgtatctcactggctcgagcttcctttgctaaccttttctacataacaggaaacaacaacaaatattagaatcacaaggattacagaacagtgaaacttcttgaacactaaaaagtagcttcttaaaagcacaaggatttgatcagaacgaagaagagagtaataaacacagaattcacgcaccccacgggccttttctgtctcataatcatcatacagctgtgtgtcaacacgttcccgatcgataagaccaatcatggagttgaacttagattttacaatctcttcgcttcaaaaatataaacaagacagtcagtgaactaaacccctacacagtttctcctaccagaactaacatctcgaatcagcacgaagtaaggaacgtacatagttacttcaacctcagggagctctgaaatagactctgcagaatcaagagcattttcaacaagctctctaactgtagtataaagcgacttccctggctgatgagatccacaattcaaaattcgtgtgatacagaattgaaattacaaagatgcatcgtttgaattgaaaccaacaaattggggactcacattatcaaatccagcaatgttcttgttctccgcgaaaaactcagctggagattctgcaaattcacgaattcaaaaaagagagtcaattgagcttaatctcaattgaaatcaattgtgcagcaaatgatacatagagcattactttgcttgagcttgctctcgttgctgtccttagagttcttcgagcttcccttcttcgtttcaactaaatcatcacccgccattgaaacaacaacaaattgtgaaaatttgagtcagatcaaaccaaatgtctcagagtacaacactacaagtttccaatcaaaattcaaagcaggatctagggttttatggagggaagttaaggaaactcgatcaaagagattggttgctggggttatatcggtcattttactaaattatagcgtttgcgattggacttagtgtttcatgagttgtgtggtgtgactataagcagcaacagttgtaagttaacttgattctgtttggatccaatagagaaaaccattacacgagaaaggaaaaaaatg

SEQ ID NO: 24048 - DNA, 3000 bp, Unknown; identical to SEQ ID NO: 2544
  misc_feature (1)..( 3000): 2750-1469P.txt file - cDNA_ID_2163126; gDNA_ID_1620553; Annot_ID_160378

SEQ ID NO: 24049 - DNA, 3003 bp, Unknown
  misc_feature (1)..( 3003): 2750-1469P.txt file - cDNA_ID_2163192; gDNA_ID_1620555; Annot_ID_160424
agttcccctacaaaatccttgttcccttcctgcatttctccagattttaagtcttctgaaacaggcccaacagcttttcccttctggaaatccaagacaattttctttgggcgtacaaataatcgaggcaaatcttctgtcagtagtttggtcaagaacctgaaagagatgaagcaaaggaaggaggaaagaaactgatttatcaatacgtcggaagagagtaaacaatcaacagagagaagaagctaaaacgaatacattgaggagacttacattgataaaacaggaattcctgatgttgtcatccaaagcattcatgcaaaaagaagaaaatgattaaagctattactaatgtacatgattataaaaatcaaaggagataatgagaaagcaacagacaattatgattaactaatacccattagattaaacaatcggaatggtgcaagctcaaatttgatctttggaagtgaaacaaacgcccatgatgctgctccaacccaaggcgctgacggaatcaatcttaatttaacccatagttcaccgtcaatgtcaaaatcccgaataccaactggcacaactactgggatgataccaaattttaaagagagcattaacaacatccgagcaccaccagtataccgaagaccaatctggtacctataagaagaaaaataagagtataagcaactttcaactgagccgtgaacagactgtttggagtacccaagctccaaacgaatcaacagagaaaatttctaagatgcagtgaccattggtgtgttgaatccgtggatcatgtcagaacaatcccatccgtaaaaaccaagtaagaacaatcccagcatttgatccaccaacacaatgcattagctacctaacatataagtaacgtaggcaatcgcaccaaggtataaacttactgcaagtcattaacacggcgagatgtcctcctctcaacatttctaacagacaaaggctcatccccaagagagaattgcttaatttcaactctctgcacataatcaggcttcttcaaatcatcaatcacaggctgcaacaatccaacaagccaattctcaatcccacctctataaactttccagagcttaaccaacaccatgttcacccactccaccgactctttcctttgcaaatccttctcaagggacagcgagaaactggtgggaacctgtgcccatggcccggctcctctttggcctccatcaccagccatttgtctccgcctctttctccaagtccatagcttatcacaaataacaccaacaaagaagaagaatgcgaatagaccaattgcattacgactaatcggtggagacgggattgggtggattacacctagctgagtcctgagcttatccactataggatcttctctaaagttagtgaaattgtttctatcaccttgaattgcagactcctgtgaagatgaagatgcttcttcatcctcaaattcattcgaaaaccgagtaaccacaagacttctggcagctcttctcgccgaatccgctaatccaatgttcttggaatccgtacgaattccgctggaaacaaacctagaattcgaattcgccgcatgaactcgacggagaattctccgcctctttgtgaatccatcggagaacacaatcagaccgtgctcattggagcaaggacagagcagacgacgtgacacaaaagaagggaaatcgaaactagaacaagaagaagaagactgtagaatcatttatcatcaatcgaattcaccggaaactccacgcaggtgaacctaattgacgcatatcttcgccgttacaacagcagacagaatacagagaaacagaggaatagcgaatgtattagtcagtgttcacggtaggtcggtagctgagaaacttaggtctgtcttccgtagggtttcggataagaaattggaatcgagaaggttcgaaagtagtagcgacaagggatgcgcagaagatgggagaatgtgaatcggcaagtaagtgatcggtggagagtctatcgtcgtgaccttttgttgtacctatgcgaccaaagaatatgcgactgactataaggacccctcaaacttaagccatttatgttttttttgtggaacgcgttaggcgcgttactatatatggttggtcattatttcatttgaactatcagatcagtttaatttctaacgttgttatactatcgttatttaaatgaaagaaccgaatacaagaaaagaaaagcttctgtatcgtcttgctactcttgggaggtcggcgacccaacttgttagtagttcgttcgtaatcctttgctttttggactcttccacttatgggtcggccacccttttatgtccatcaagttaaaaataaaataatagtggtggatgaattatggtcaacaggttgctgttaaattagatagttcattggttactaattttagttttgtgcaaccatgtttattgtgtgttgttttctttttgtcggatgtcaataactaatgtcactaaattgattattttcagtcaactttcaattttcatatgtttgagttagcttcttatatactttttgaatctaaaaacactatccacgtgcgtataacataatgtcttcttttcgatcgattagggggttttcacgaaagaaattgacttaggaggtgaccaaatcacgataaagaaaatactgggttatttcataaattaactttaaaatataaggtcttctcggtaataatttaaaatatctcctttcttccttttcccccggaacgtaatctcagccgtccatcctttctatcatcctacgatctatctaaaccgtcggctgaacttcgttctcctgaatcgcgcgacatcgacatcttctgattcttcctcactagttttttcctaaaccctaacttcttcgttcgcgtcgacgaagctgctggcaatttctcgtcggaaactattactcgataccaccacctgtttagtctttaaaggtaatg

SEQ ID NO: 24050 - DNA, 3003 bp, Unknown
  misc_feature (1)..( 3003): 2750-1469P.txt file - cDNA_ID_2163206; gDNA_ID_1620555; Annot_ID_160428
ctgttatggtggaattggatactaaaatatgtctaagagtgggactgcaatatgaccttcttagtttattcgatgttttggttgcagaagaggaggtcatggacgtttctgctagaaagtcacaaaaagctgggcgcgaaaagttgaggagggaaaaactgaatgagcattttgttgaactgggaaatgtactcggtatagactcaatggttatgtggatttttctaaacagcagatgatctcactttgatcctcacatagctcttctgtttgcagatccagagagacccaagaatgacaaagccacgattctgactgatactgttcagttgttgaaagagctcacatctgaagtcaacaaactgaaatctgagtacaccgcattgacagatgagtcccgcgaggttcgtaccttatcccttacgctccaggcttttcctaacagaaaaaattagcagtctacatgacgtaaagatatcgatagggatcccaatatagataactcattgtctttttgcttttacgatatggtgactacacctatttcgtaagatgcaaactcagacgggctatataatgtaactgcttataggacttgttgttatcatcaatagcaacacttacaaatttactggtacttgtataacaacggttctttctgtagttgacacaggagaaaaacgacctgagagaagaaaagacatcgctgaaatcagatatagagaatctcaatcttcaataccagcagagattaaggtcaatgtctccatggggagctgcgatggatcacacagtcatgatggctccaccaccctcctttccataccctatgcctattgctatgcctcccgggtcaatcccaatgcatccatcaatgccatcttacacatactttgggaaccagaaccctagcatgatcccagctccatgtcctacatacatgccctacatgcctcctaatacagtcgttgagcaacaatccgtgcacattccacagaaccccggtaaccgttctcgggaacctagagcaaaggtttcaagagagagcagatctgagaaagcagaggactccaacgaagttgcaacacaactcgaattaaaaacccctggatctacttctgataaggtagagagacttaaaactagaagctagagatctccaatttttttcggatttattatcttcacagttattcgcgaaattgtattttgaaggatacattgcaaaggccagagaagacaaagagatgtaagagaaacaacaacaacaactcaatagaagaaagctctcattctagcaagtgttcatcttctccgagcgtacgagaccacagttcttccagtagcgtagctggtggccaaaaacctgatgatgcaaaatgattcgaaagaatctgatgttgatcatctcaagtatccaagtatcgtttcgatgagtactgtatatagtgcgagtacaaaatgcacttagctgtttaaagcagtgttttgatgcaccgtggcattcgttttcctcggatagtcatttctcagatgattttcatccttaataggtctgctttagttctaaaactcggatgatttgtaatttccagtgtccaaatctactaattttattaatcctataaattaaacaaacttatatcttgatttttttttaaaaatcatagattatttatactattgtacaaaaagaattacatttaaatcggtaaatatagtttcaccataaatatatggtttcattaatatcataaattagtaatgatatagatatatcaacaatatatatttatatatatattatatgtaagaaatttctttgaaatatatttttaatatttagttctcatttgtacttatttgaatttagttctaatattttactgtatcaaaaaaaatttggtgttattttttagacatgagaattattttttacttataattagttataaaaaaaatattttttataatgaaagaaatcttatagtaaaaaattactatgaaaaatttctttataaattaataaaattttagaatcccaacattattaatttgtaaaggttttactgtagttaagttcaagttcaatttaagctggtgctaaacgttagctacgtgttcgtatgatgtcaactgtctagatacaggaaaatttctccgaatatacagcgactacacatcaaccatagagaacagtatgaagtaaatataccctctatccatcgcatatgtagtttgtgggagtgctctgttggtttcgctttcctctgatgttgtataccctgtattgtcaaatatgactgcgacacggttcccactcatctcatagaccgctagataatagtctgcatgtatataaaataattgttaaagacaaaacatagggcatacccaatatcctttgtgcatagtatttagtatgtcatggaagttaactaggtctttgagagttcgaacgccatgaagagcaaaagaaagagaggaaatacggaagagaaagacaaaacaaactaaaaaccaaaagacatttgacctatcgtttctgtttcacaggacgaccataagatgtaaaagtcttgcccatccattccacaacccattatcgattcacaaggcaacataagaagaagtttacatttcgatgagctagagcaattctctagcgcagatcacaaacaaccaactccaacctctggttatactatccaagatttttacaggatggtgcctgaggctgccaggtttcgaaggaataaagagttttggtgtagcaagaaaaattaagttacaagacactaattatattgtagatagagacagaattgaaataaaatatggaacataaataaataattagataaatgagtcagcagcttcggtgaattgttctgtatctcggagtattactgccggcgacgaggatagtcttatcttctcctctctaatgactttgattcattttcctcttcagattcaaatcctagattcaatcggagaatg

SEQ ID NO: 24051 - DNA, 3003 bp, Unknown
  misc_feature (1)..( 3003): 2750-1469P.txt file - cDNA_ID_2163229; gDNA_ID_1620555; Annot_ID_160436
cttccccatgaactcctacattaatcacatctaagaactatgatttatatttttagcttctaaagcgacaaatctttccacattgataaaataaagctcacaccaaaaatctcaaaatgaaaaggaaaatgatcaactgaatttcgtaaaagctgattctgtattcatgcaatgaaatgaagatgattggaggtcttaacttctttctacgatacagaatcacaaacacacttgaatacagaagggcataccttcttgatgagttgaacatcataagattttccatacttctgtctgatgagggttgcaagatctaagccgttaaatgcagaatcatctgacccaaccattctttcaagattagcccgattcatatcattcgcttgctaaagaaaaagaaaaaaaaagtaattctaaatgattagatgatatcaagcaaccaataaatttaaacaaaacgcttgtttacttgctgtgtcactaagccatgacagagatggacaaacatttagacatcaaaaggactcaagaaatcaaattagttacgcactttttccaggatcaagcaggagtagatcaacattctaagtaatctcacgaactagagagtttgaggctttcatgtacaacaaggattaaaaccacattgactgtttaatataattctagtgtataaagcacagggaaaccaagtctcagttcttaaaggtcaagtcatgacttcaccttagaggacagcaaaaaatggccggagtttacaaagcttatagatttctcatacatacccttttagttttatcatcgagtgattccttttcctcgtcatccgaattatctagattcccctcatcatccacaatactgcaaattcttgaaaactttctcctatcagttttcccataagtagtcttcaagcagaggctatgagagaaagccagtcgtccagagaaacacggaccgcaatatctcgaacaagaaaccttagatattgttcctataccgctacgttcgtgtataacagattgttgacagtgatgatgacttgatacaatgctcatcatatcctgtaaaccagtgaaattccaaaccatgaagcaatttgcagaatctaatagaggatgaatctaatcctcaaaccaacagtgaacacagtgatacagaatctaagtagagaaccaaagcaaaagttcctgataaagtgatttcacagacaattgcgtagtaattgttaagaatatgaatctcgtagcatcataatcaatctcactccttttatattctaagagattcatccagaaatcgctgttctgctaactaagcagcaattatctgaggattcatcgagaagcgactaaacatgaacaagtgagggagataaccagtgaagcagagactcaatttaagaatttagcaagaagtagagggagagcgtaatcttaccgccggaagaggtggggaagtgcacggcgacgatgcggaggaggagattaatagatgggggacaaagagatatcacacatatcagtgaatgaacggtgaaggaggaaacaaaaataaaactcttaaaactttgcgtatagttttcattttcgctatatcaatgatatcataagatttgctaaaaattatagtagaacaaaaaaaaaagatagcatgcacaaaaacgtcttaaattaaaatacatgacttataaaaagacaaaaaaaaacacatatttatccaaattagtttagataaatatgatatttaattttaaaattgctatgatataaaaaaaatatataaatttggattaaatagtcaacaattatgatgaattaattttcgagataaaagtaaataattaaatattggataggttatcagaataaacaaaagtaagccaaagtttttttccattaaagtcaaggttttgtaacttgcacgcttcagcgaagaaacggtggcgtctcggcccttccacacattgacacataatatctacttggtcttttgctcgtctcattatctgaatttttttcttgcagcatcgacacatgagatttcaagctaaaccatcttacatatctttttgtttttgttttaattaaataaaataccaaattgattcgacattccaatatgtaaaccaacatacctgaatacccaaaactcttttgactcaaaatcgaagttttctttcatttttctcaacaagcagaacttatttaaatctcatacgtttataagatataaactgccttgattaataatatagatctactatatcttgttagcttgtgaaagaaatatttggatgcacaaagattaaggtcttgaatggttgttgaagccattccaaatctgaccaaagttagaccaatctttttttcttctaccatttaaactgatctacacaggacgaatacaatgtagatgagtacacaaatcacaaagaacaactattacataccaaaatatcactatctatattttaatttcttttactttaaaattaaaacgtactccaatatagagtttagcataccataatatcggtatggttggtgtagtatataccacataaccattcaaagtctatataaattttcggttatgtaggggttttaaataggccgatagtgaaaagcatcgatcaaaaatgaatatactcctaatcatgatttttggattaacacatactacctagtgatgacttttggattaacacatactacctattgacattataaacggaaaggtggaggtgtaaatgataataaatatatattagtcggtgagtttagaaagaaacaaaaattaaaggggtgtgatttcgaagaaaatgttgcatagttttcaaaatttgaaaatctcagctaaagagagaaagagaagcaccatttttctttctcgtcgtgtcatcgttttctcagattcctgaataatcattcccttccgattccaaaatccccaaacctcatccactcctccatctcccggattcggattcccagaatcatg

SEQ ID NO: 24052 - DNA, 3000 bp, Unknown; identical to SEQ ID NO: 2560
  misc_feature (1)..( 3000): 2750-1469P.txt file - cDNA_ID_2163233; gDNA_ID_1620555; Annot_ID_160437

SEQ ID NO: 24053 - DNA, 3000 bp, Unknown
  misc_feature (1)..( 3000): 2750-1469P.txt file - cDNA_ID_2163371; gDNA_ID_1620557; Annot_ID_160478
gcagtggtggtcgtgggtttcccagctacacctctactgctggctagggcacgtatttgcatctccgcatctcattcaagagaagatcttataagagccctcaaggtaaaatattgcattctacccacttgtgtttttttcttattacaaataagcgctattccacagaagtcccaaagcacaaaactgctaaaatagatctatatgcttcgatagagctcggtttcaatgcaagacaagttttgaatcaatgtgtgtggttttgtgttggacaggttataagcaaagtaggtgaccttagcggaatcaaatatttcccggcagagccgaagaaaatagaacagtcgaaaaacgacatcaagctggattgaagaattaaccaatgaaatagagatgcatccaggaaaacgcaagcaaatgctgtgttatgtgttaacttctccatatctctctgatgtgacacaaatctgatttctcaggggtccagccatttcctctctaagtaaaacacaaacccagagttagtccacctttcctcaagtcttgtttaccatggtgctactgcatttatgtgattcttcatccatgtttttccaagagtttaaatgtatagtaatatcgttgaatgatgtcagagttcttttattactccggacaacaactgttttctatgtttggattatttgtatcaaaaggttttggataaattggtcaattaagttcccaaccatcaaaaaccacaaggtacaacaatcacaaataagttaatccttcttcatcttcctctaccattacaacaaactaactaaaatgttacattcaaaccaaaaaaacatcaaaagagagaattaagtttcagacattgccaatggctggtcacaaaaaacaaaactcttccaccatttttcacgagaactccctcccaagcttctgaattgcacaatacatcttcctcctagacccaacagcattaatccccatatctttaagatcctccaatgtcaacaatggtaacacttgttcatcaacttcatgcatctcaaacattggccaatatctccctaaccctaactcttgtaaccatatcttcactccttcttttcctcttcctccactttgccaatctcctaacaattcaacctctctattctcgtaccgtcttcgttctttcatcggactctccgaatcttctctgctgaaatccctaaacccttcttctcctcccaattcttcatcctcttcctcttcttcttcctctccactgaatttctcatctccttgctctacaccatcgtttctcgtcgcccaattcgacctaactcgcttcgccgaagctgtattcgtcgtcgtcgtcgccgccgtctctccaccggatgatttgacccatttcttaacccgccaactcccaatcgaaaccggatcttcatctagggttccagtattctcatacccaccggagctcaaattcgtcatagttcgagtcctcgaagacgacgtcgtcttcccactctgattattcggctccttcctgttaccaccaccaccaccaccaccaccactaggtctccatttcggccgtcggacttgcggagaatcgtacgccgcaaccacgtgttggtggtactggtcaccgccgatgtctcctaacctaacgctaggtcttctcaatcgtttcgatccgactgaaactccggctgcggcggatgtttccggtgcttcgattgagtttattatcgccggcgggataaaaccgccgttaatctggtgaccttctactaactgtaactcggccatggaaaacgagagagagacggagaaattgaaggagagaaaagcgtttttttttgtttggtcttcagtttactctggaaccatatcttgctaacatgcgcagaaagggattttatttaggttttatctggagaaattggattgtgagagagagagaagacgaagagagagtagcgttcaaatagtggacacgtgtttctggagctcttgtctcttgtcatatttcttttttttgttttctttcccaaacaaacaaatccttaattgcattgtttatctttgtcattaaaatttcggatttgtttctatatatatcttgctttgtatagatttgtaaacaatcataagttgttgtatattaatcatcctttatagatttgtttccacacatatttccatttttttttataaattaggtaatggggtttaatttgttttcccttttttggcttagccaatttcattggacaacagtccacctgctttataatccaacaccaatttaattttttgttgtgcgactaatttaataaaaattgaggataattcatctatataatttcttcaatatatgcttcaactttatttttttcactttataaaattttgacatattcacccaatatcctcctttacaaatgaatgtatttgatgtaagaaattgtatttgaagacttttacaccatgaccttatatactagtatctatcttcttaaccacaaattagtgattatctgtcaaattaaagcttggtaagtttgtgattatgcattaaaattgatagtctttcataacttttgcatttactcgagtacacaaactttcacatgtttaaataaaaattattttatagggtttagtatttttttgcaaatgtaaacgcaaaactcaagcacgaacatagagtactcattgatttattgttggcgtttacatttacaattattaaaataaaagtggtcaacataattaaagttgttagatcagtcattaaaacggcaagatgttctaaagagtaacattgaaacaacaatagtttcaagtatcaattagtcccgcggcgtgtggcgatggcgcgtggtatccgccaaaaacccttcccggaactagaaccctaacttctctgcaagtctctctgttctagtcacaattcactgaattaaagtttgaaaacccatgatgaaatgttgaacctttccaatttccatg

SEQ ID NO: 24054 - DNA, 3003 bp, Unknown
  misc_feature (1)..( 3003): 2750-1469P.txt file - cDNA_ID_2163400; gDNA_ID_1620557; Annot_ID_160488
ctctagattaattatgatcaatttactactgcgcatcttatcacagtctttgcttcattcactataccactcatgcatcgtctgatatgcatcagatgttattgggcaatttttcaaaagctttgcattacctttacttgatgttaaggaatcaatatttgagaattatatttgtacaggaaaccttgaaggagttggtgacatggaaagccaaagcggagcagcagctgatggaattatcaaacgctgtccttgctcttaagggacagaatcaacccaactggcgttacccgtgaagactaggcacagattgatcaatgattttgctttaactagtcgattccacctgcatagaatcccttagagacatgtacagggtttctgataaaactaaaccaaaaaaaaaaaaaaaaagaacaaagagaggaggctagagaggagtcgcatctgaaaagcttaggaacaggtaggacttaagtaagtcatatagaagaagtttgaagtgaaaatttgaaggtagagatgctttaatggtaattgttttgctgtatattctctctcggatctcttattcaacaatgaagcttacttttgagtaatctcttttctttatcccttttgccatattgttaagttgatgtcatattaccacctcccacattgattcagtctttgcttcaatatcactaccacacatggctgcatcttctgatacaggaaaccttgaaggagttagtgacttggaaaaccaaagcaaagcagcagccaacggaaatatcaaacgctgcctttgctcttcagtgacagtaattccgctctagctaatcgattcacagacaaagaatcctttagagacatagttttttcttataaaatctaactaaaaaaccaaggatactagagataactcgtcatcttgaaaagtgcaggaacaggtaagacttaactaatatcacacagaagaagttaataagtgatcatcatctacatcatagtgaaaatttggaggtataattggttttgttgttctagtggttttgcttttatattctctctaatgactcttttttctctttcaaactaagaatatgtattattaagtttaaaatgttaagaggtacaaaaaaccattcgccatacaaaatgccttaagagaagaacaacaccatggcccaagtactcttcttcttcttcttcttcttgttcatgtccctaactttcgctttgtttctgtttagagagatgtcttgtgatagaatgtaggataattctgtgaatattggcatgatgttgaattatatgaatcagaaaggtatggattgccgatcaggccaagactcgatcttctggaagtaatcgacaggcaagacaccaacaatgccttgagtcaaaatcactttgttgtctgaaatgtagaacgcaatcccatcttcaagagctttcttgatgtggaggaagatgataacatttacatttcttctcacgccactaatcacttcaccatctgtaggtaatccacaagagaagtgaacatgcattctattcatacgctttaagcccgatgctaagatggattctaaattcttcctataagttccatgtacacacactggagcttcttctggtgacaatattggtttaagtaacttctctgactcaaccgtcgtgattgagtggccttgattagcgcgaatcaagagctctccatcctcatcgatgaggctaaaccgttttttattgtcccttgtcacagcctctctaatttcatcaatcgtgtgtgaatttaactgaatatttgcacaagttttcaaattcaggttgagtaaatcttcaactttaacaaaaccatcacctctcatgttcaatctcagctcagtagccatatgtcgcaatattctcgtcaagattcgtccaagggcatcgattctatccacaaagatcattgcatattaaggaaaagcagcagctagattcacccgtttcactgcacgtatcgtcctcaagtgctcctgaatttgccagaagagagctttcccagaggaaggcgtgtagtttttttcatcattcaaaacctgagagagaagtttgttgattgttagattctagaaaccgcgttgctagggtttcgaatcacccaaattgaaatgaaaaaaaaaaaattgtgttcttgcttgtctgtttattttggtttatttacaattcattccggttcaatgttaggctttcattaaccgatttaattattcttccggtttaatcaaaaacaattattcttcttctttcacaatctctcctgtgttatttacgccgactcaaagaacccaaagctcttggaggaggtgatcttctcttctcagatcatcttctactcttgagtatacccttcctttgaagataattcctagtttgggacttatccttacttctccgggatttcactttaatccaccgaagagttttgacatctgaattgtattgttttgggtgtgatcccgatagaattcgagggtaggaatcggaaaggtacgttatgaaatttgataattgtgatttctgtgactcgttattgatttttaagtaaaagaacgaagctttgtatatgatattcggagttctaggtttaattgaattgttgtcgttgatgttttgatggggtttaactttttgaactaattgctctgaaattgcttaaccaaatcaagggttcctatcaactgtgtcaaaagttttctctttgtgaattccctgtttgatggctagggttaatagcaagtgagaccatgaattgctttttatggttactatgttcattctgttattctgaagccgatattatatgttgccaagtttgtgtgtcacttgaattatctgttattgtacagttggatttgtgaagcatttatctgtttctgtgttttcgaatttgctaaagctttttagagtactaacttcttcttggttttgctgcagtagggtgatttggtttagaagaagaaagaaatg

SEQ ID NO: 24055 - DNA, 3003 bp, Unknown
  misc_feature (1)..( 3003): 2750-1469P.txt file - cDNA_ID_2163406; gDNA_ID_1620557; Annot_ID_160489
cgagggtaggaatcggaaaggtacgttatgaaatttgataattgtgatttctgtgactcgttattgatttttaagtaaaagaacgaagctttgtatatgatattcggagttctaggtttaattgaattgttgtcgttgatgttttgatggggtttaactttttgaactaattgctctgaaattgcttaaccaaatcaagggttcctatcaactgtgtcaaaagttttctctttgtgaattccctgtttgatggctagggttaatagcaagtgagaccatgaattgctttttatggttactatgttcattctgttattctgaagccgatattatatgttgccaagtttgtgtgtcacttgaattatctgttattgtacagttggatttgtgaagcatttatctgtttctgtgttttcgaatttgctaaagctttttagagtactaacttcttcttggttttgctgcagtagggtgatttggtttagaagaagaaagaaatggagggttttgtcgatcactacattgttctaggtttagcttctggagaggaagctctgaagcttaccgagaaggagattgcaaaagcatacaagttgaaagctttggacttgcatcctgataaacgccctgatgatcctgatgcccatgagaaatttcagaggcttaagacatcttacgaggttctcaaagacgagaaagcccggaagctgtttgatgatcttcttagaatccagcgtgagaaacaacataagaaatcgcaagtagattccaagaggcgtaagatgatgtcagatctggaggaaagggagcgttctgctttttctcctaatccttccgctagagcttatgatgaagaagagagaatcgctaggaagcttaaggaggagatagataggatacgtgcaagacatgcgaagaagaaaagtggtttccaaactccagagagtaatgtagatgaaaagagaaaagaagaaagaagtggtgctggagctagtgttcaactcgataaagagagaatgttgaaggtttcttgggaaaaaagtggtgaagggtatacagctggaaggctaagagaagtgttttctgagtttggtgaggttgaagatgttgttattaggagtaccaagaagaaatgttctgctcttattgtaatggctacaaaggatggagctgtgagtactattttactaagttggtttctctctttttctttatacatcaagaagttaaattgattcaatttgttttttgtcttataggttgcagcgacgaggacattgtgtggcaatctttctaatccattgttggttgtacctcttcagaaagcagcccaaactgattttctgacggctaagaaatctgcagaagcagaaccgcagagtaacatagtaggtgccggtcttcaagcttatgaagatgccgtcatgcaaagactgctacaggtatttttctacgctcctcaggttcttgctgattcattcgtttgtgtttttttttctcaagaactctcatattttactctcttcaacaggcggctatggaccagaaaaagcgaggggtttaagccacatgatcaagaacaaagctccttcaagaccaaagtgataaagaataaagctctgcttcatgattaagaattaagctccttatacattgtttgtgtacatccaatctcatatcagttgttgttgtagaatttaaaattctaactcttctcgaaaaaaaaaatgcttcgtatcatcttcaggagagctttcaatttgtaccggaagtctttttcaaacaagtttttgttttgaagaaaattttggatttgtataatattcctttatctagtttcatttggaattctgttgtagatttcatgtgtttgtccatgatttcaccaaatatctcatttatttgataattcaatcactacaatagtataaaaatgtgatgtttagaagatatatggatttaaaatgtaattaagcacagggttgatggttactaaataaataaagtggacactgacagaaagttagaaaccaaacgagaggaggcaaagacacaaactagaatgcgtatgaaagagaatgaaattttccttttaattttcttttctaaaatgattcgatgtcttcatcatattagcagaaaatacatgtgacaaaaatagtttcttgaataaaagtaatttaggtttaggaaaaaaaggctataatttaaaacgagctacagtttcttcgtatgtaagcgaaggagacgtttttgcctttatttagtgccctaagtactgtacgtagtgtagatacatatcttcattaagtagaaaattttattcataaaaactcaattaactttttttttttcctttttattgcagttttaagttgtaaattacattgtttttttttgcaaaaagtatgcaataaagtattaaattaattaacactatcgctacaactacttctttaattagtctatactattagatatcatataattttatttcttaaaagttaaaagaggcaatattgtacattttgaatgcattgtgccttattaaacaattaaatttatttaactttaataaagttaaaaataaaaataaaaatttggactctggtagtatattacctgattaatatatttgagtatttgaccaaatttatatatttagaaaatataaaaatatcaactaattaataattcaactatcaatgaatttttttccttcattcagttaaaagcattcatggaatttgttttacttcccattttttcatttgatgtggacaaaaaatctgaaatggaaagctattattagctaatcaatcattgtccaaaacttggttttatttctctcctaactcttgacttccctctctctctctctctctctctctctctcttcaatgccttctccaagtcagtttctttcctcattcaacagtttctcttcttcttcctctgcttaaacgaaaccctcaaagaaataaaaaaaagctctcaagaatg

SEQ ID NO: 24056 - DNA, 3000 bp, Unknown
  misc_feature (1)..( 3000): 2750-1469P.txt file - cDNA_ID_2163426; gDNA_ID_1620557; Annot_ID_160493
tcaatctcattcaattcttctctatgttagattcaacagtggtcatgggtaaatttgtaaaaacaaactttgaatgattacagcggtccaaacagacaaaaccgtttatagaccggaccgctttttatttaccattcataaattataatccgtaatagtacatacttaaaaaaaatagaagacaaccgcatcggactaactgcggacagtctttaaactaagtccgcatcggtttgttgtccgacccaaaaatggtatggactaaaccgctacggattagtccgcactaactacaacatccattcaaagcaaaaagcaaaacaagaacgaatttacaccatcatgatttagatacacgatataatccaggcatatttaatcccgtagttaccttccaagttcaaaccatataaaaatgtgaacttctaacacatcggaatacaaaaaatttggtctctaataatacatcaacagtgcatctctagtaaagaaaagaaaacagagcatatatcgtctcatcccaattaattaaaatcgttaatacctaattagttagtgacttataatttttttggccaaattgcgaatgcggtgtcgttttaatgtttgaagacatgagaggttttagggtttatcttttttacactcacaatcaaaatactgacgacttcttcgccaccgtggttaacgctgcctgcaccgtcggcggaaaacaaaaaagcttcaactccattggtttcctcttcctcgatctctcgattaattctcagaggcaagcttcttctattagaccaaacttgttttcgcatcctaattgtcaatttcggcgatatcatttctaatcatcaattttctcccttttcgaattagatcggaattatgtataaattttttggttgcgtatctttgacgtgaaaaaaccctaatttaggtggctttccgcagttgaaaaccctcgaaattggccctgccattttcaatttctttgatttggattcttcatgctttccgtttctcgttgttttttttgttagaagaaagacgtgaatttgttgtgatgtaatttttaggattattctcaaagagagtagcagctatgggctggaaagctgctgagaaactcatcagacactggaagatacttcgaggagacaatgtgagtacaccactcatgttcttcttgtggtgttcattagtttggtttcatttttgatctgttgtttctggggtatgattttatgtgcaggtaatgataattcgtgggaaagataagggtgagactggaaccataaagcgtgtcattcgatcccaaaatcgtgtcatcgttgaagggaagaatctggtgagatagtcttgttctggatatcttttgttcgctctgtctcatgcatttagagaatgaatgtacaagttcattttttgatttttttgttcttgatttggtttgtagagtatgaactagtactgaatcaatatcatatcactagctcaacaccaaccatagagttatcaattttcatttgattctcatttttttaatccaagcatcaagtagacggttactaaatcacaaagcgactctagttccatggatttcgctacacaattcttttgaattgtttatcttgaaactgttatcgttttggatgttctaccttgctgctgggatagtctttgtctactcactgaagcttgtatatgtttttcgctgatgctttttttttcctgtgttctcagatcaagaaacatataaagggaggccctgatcacgaaggtggaattttcactgtagaggctcctcttcacgcctcaaatgtccaagttgttgatcctgtcactgggtatgatttcactctgcactactgtctccaattactcttttgctcaagcgagagatcacttattaatctattatcttttctaccacaggaggccttgtaaggttggtgtaaaatacctagaagatggaacaaaagtaagagtagccagaggcactggcacatctggttccataattccccgaccagagattctaaagataagggcaacgccgcgacccacaactggtacatagaagctcaatatctctttaaacgttggattttggaaatatatagtggaagtctgttagctatctgagaaaaaaacataatcatagatcggctataagataaacatagaatcaacataattcgtttgctatcaacataatcaacaaacttgatagtagcggttttcttatagaaggattcatacttttctctttgcagctggccctaaggacacaccaatggagtttgtctgggagcagacatatgatgctaaaactggaaagggcatgcctgatctttgagttgaaacctctctacagtttcgtttggaaaatgttgcctgctctcaaaaaggattcttctttttcccatccattagagtttgatttcggtctagagctgtgaggttttgttggagaacctttgatcatgactgaaacggagtcgttttccttttttctttcattgatcttgtgaactttcaaggtgccaaataaaatccgtctggaaaacagttcaatatttacatgtttagttattgtatatacactagccagaagtctaaacataaaacgaaaactataagctctaagtaaagtagatttatattatgcaaccgaattaacaatattaacacaatgacatgatttgcattgtaatgaaatttaaaattttgacaaaaaaaatatggaaattcaaattggttattaacttttatttttggggatgatttggaaatttggtgaattattggttacaataaataaaaggaaatattgaaggacttatatgtaattagtgtcgcctaatcgagtaattcgatccatcttcgtctgtcttgttaacaaagaaaactgagaaaggttttcttataagatcccattcttgtagcaaaaacccagaagaacaaactttcgaagaagacgactaatcaattcatctgattatg

SEQ ID NO: 24057 - DNA, 3003 bp, Unknown
  misc_feature (1)..( 3003): 2750-1469P.txt file - cDNA_ID_2163438; gDNA_ID_1620557; Annot_ID_160496
catgaccgataacgctcaacgtcctgacggaactatcaaccgccgtttcctccgcctcttcgatttccgtgctcctcccaatcctaaacccgtcaacatcgtctccacctccgatttcgtcgtggatcaatcccgtgatctctggttccgattgtacactccacatgtctccggcgataaaatccccgtcgttgttttcttccacggcggtggtttcgctttcctcagtcctaatgcgtatccttacgataatgtatgccggagattcgctaggaaattacctgcttatgtcatctccgttaactaccgtctcgctccggagcatcgttatcctgctcaatacgacgacggtttcgatgctttgaagtacatcgaggagaatcacggttcgattcttccggcgaacgctgatctctcgagatgcttcttcgccggagacagtgcaggtggaaacatcgcgcacaacgtcgcgattcgaatttgtcgcgagccgcggtcatctttcaccgccgtgaaactcatcggacttatctcgattcaacctttcttcggcggagaagagagaacggaagcggagaaacaactcgtcggagctcctttggtttcaccggaccgaacagattggtgctggaaagcgatgggattaaaccgggatcatgaagcggttaacgtcggcggaccaaacgcggttgatatatcgggtctggattatccggagacgatggtggtagtagctgggtttgatccgttaaaagattggcagagaagttactacgagtggttaaagttatgcggtaaaaaagcaacgttaatcgaatatccaaacatgtttcatgcgttttacattttccctgaattgcctgaggcgggtcagttaattatgcggattaaggattttgttgatgagcgcgtggcttcgctctccgcttaatcaccttcgctaatgatggatatttaaattagctcaatgaataataatgtattaagctctatgcttgtgtcttgtttagtgttttaaaaatggtgtaggtcgatctattttcattattaatcaagtgttcaactttaagtgaatgtttgggttggttattaaacttgttttaaagcttgtgagacgtggggtttttgtacttgtagtaaaataccaatgttggtttcattatagactatagtcaggtttgttgtacttattatacgagtggggatacaaaacaatggaattgattatttgtacggtgagattcaacaataccggtaggtgagtgactatgtctatcccttaagtttggtgaaaagtgagccacatttaatgcatttctagcaaaagatttaacgcccatacgactcttatttattactatgagactatccaaagctcttatttaatgtataatgtaaaggaaatgtattataagcttgttgaattgtgtaatctatatttgaaaaagttacattaacattgaaagaaacatgtttgttaagtgtgaatttaaacaaaatttctttgtaaattgtaaatgtaaatgctaaacccaatcggaaaggaaacctttttgtttgtgtttgcgtttgacgtgtacgttttcacataaataaaccatttctccgataagtatacactgaacattacatattttatctgattaaaataacctagcattattgatcgttgaaagcctagctcgtattttcacaccttattggcttattggttaactactaatgagtgatgtgacaacgtttaatatatgtgttacaagtatttaaatgatttcttacgtaagaagaaatggttaagtgactcattggatcgtccgtcttttgtcgaccaatacatcattcgtgtttttcgtagtcttaaatatgtgagaagacttatgtttttaacccatacctttcactaattaggtgaactgttcgtctcttggagatactgacaattaattttaaaaggaggaacgaattaatatggttagaaatgcaactatagtcacgtgtccaatctcataaaagatatggttttttttcttcttctttctaatatcattactaggtttgcacgtttagaagttaatcaaattgtgttttgttcttgattactttcgaaacttttttttctctacctttgtatttttcttcttctaatacttaggttatgcattgattcacaaatgatatgatttcactattcttgtaaagattattagtgaaaactgttatacatgaatgtttgtaaaacctcggaggccgatttatgatcgaattttcattgttggtggagcttaaggatgatttaatgagttaagttggttttatgtaactctaactatagcgtaaaccctaaaggcttaaagctaaagaaaaacaaactgtgttctgcttttaaatcactaatatgggccgttaaggcccactaagagtacgtatgaatccaataatggatggttgaccaatgaccagtcatacaaagaaaattaaaaaggtcaaaatttaccaaaatctcgacaaagggcaatttcgcaattaaatgcaaatctgcagcgtctctttctctctctccgccggcgaatttctattgcttccttctccgtcaattttatcaccgaccgtctgtactctccgaccacatatacaccgtgactgctcgaaccattggccttaggttagtcaaccctctttagcttataaagtcaatttcttttttccgtcaaattttgggtttagaattaaaggatttgaattaaaaaatttccaaacagtgcttttgtgttatgttgaattgcagaaatgggttgatttgtcttgtctgggtttaatttgaatgtagaatcgaactccgtttggaactggtttgttgaatgttgttcattgagaaatggttgtgtgtgtttgtttttatgttttgaagctcctgagccacccttaagtaccttaaagactgaaactttgaagtatcactttgatggggaagtgagagatgatcactagttcggtataaagatg

SEQ ID NO: 24058 - DNA, 3003 bp, Unknown
  misc_feature (1)..( 3003): 2750-1469P.txt file - cDNA_ID_2163474; gDNA_ID_1620560; Annot_ID_160580
cgtaaatttttgtgcaacctaagcctatgcgttctgattgcgtaatcttaaagcgagaacaattaaattttgagaaaaaaacaaagtaatcacacaaagaaaaaaaaaatcatgtgaacgacaaacaaaccccacataaaatggtgtattcgccactcgttaattggctatgttccgcgtcgctcagcaaatggatcgtgagtgtatcagttacaagtgaagccgaaaagaggaaaagaaaaaaagaataataattgtagattttatcaataatttataccatttcgtttgaaattattgaaagaatttttttaacatcatatttatatatagattttactgtaatgcaagttatggttttcagtaatacaaatttctaacaccgagcccgccattaaggtttatgtagtttctagtagattttacattatgttaaaaacgtaaaatttgaacgatctacatattattatgtatttttctaatatattttttagttgaaacaaccaattttgtaaatagctgtggtatgatcgaatcaagttgaagtgcaacccaaacattaatcgggtctacgtacataaaatctctaatcacgttgaccaagcgctccagctcgatctgctagtaaaaacagaagcaatatattttttatttttttttatgtacttagttagtggtatatatatagttgtaaattgggtatttccaaagaaccaaagtaatgtaaactatacataagcgaaaatttaaacgtttttctattctatagtcttgaaaattaaaacaatatttactaggaaaaagaataatataagggcaccgacagtttctataagaacatgtggcacgagggcttggagaagacagtacacagcattcaatcaatcatgaaaacgacatttgatgtggtaacctactaaagttcgatctttttttatgaaagtttcttaatatttctttaatttccggactatatctatcaacaagtcaaaagattaaaaaaaatcaacaagcaaaatactgttaaaatattgttttatatataccacgaactatttgtcggcaaatgtatacatatagtatagacatcatacatgggcaaatcgcatatatttgtgtgatgtgataccatagtctcaataatttgaacatttttctcttatttaagcacggaggaaaaattagctatatggcgacttggcgagtggagccaagattaaaaaaaaaaaaagcatgttatttaaaaatatggtagacataacatacaaaaaaatatagtaaaataaacagaactgattgaacaaaagagagtgatcaaagttgaaaaataatttaactataaaaactaaaaagaaaattatcagaggatggagatattaaactaataaaaatgtaattaaataagtaaactataaattaaataagtaaaaaattaaacgtaattagaaggaacaaaaaaaactagaaaagtaaaaacataagagaggaaggagggaagcaaaagtgaaaaccaatgcagtcaacagtcaaaaaccatgatacagtccatgcgtagaacataattaacttaagcaataaatttaataagtaaaaaattaaacgtaattagaaggaacaaaaaaaaagtatataaaaaattagaaggaacaaaaaaaaaaactagaaaataggatcttggacacgatgcttacagattgttttttgtctgggaagtaaatgcccatatctgtttctcgacattttgaagtctctctaacaaaataattagaggaattaagaacttgattgtgtaactttttttttaatcttaaattaagataatactatttcattacaactattattttcttgcacatgttgcaagaacgtgagagtgtacgcagacaaataattaaaacgaaaataaaattataatgattatatacaatctcggctatcaattgattaatagagaaaattgactaaccactctgaattggctcaaaatgtagttattaattcaaaccgagtttcacttcatttatattattttcattttttaactttaaaatatatatatttaataaaccaaatatgatctaaactaaatctaaaaggctccatccaaagtagatttgattttactatatatttaaaacatgtatggtaggaaaatttaaccgaaaccaaattaaacacattttagggtgaagaaaatcacccaaaaaaaaaaggtgacttttttttgtaacaaaacaaaagacctaaagtttagagacaaaataaaatgttagggtgattcaatgcatcacataatacagtattgttaataattaatggctaataataatgtgtgtttggaagtttttactaatctcttctttacaacaacaagtggagtggaagagagagatacacacaaggtttaatgggtcccacattcttttacttctcaaaatttaattactaattttatctaattttggtgctctttttcctcatctacataattgcctttaattatctcacaccatttaactaatcactgattctcttcttccttacgcgtttgtacttaacccccttttatcatcatttcgcaggcttgcgtctgtctctctctctctctccaccattgactctctctctctctctcgctctggaatcatcctttatttctgtgactgtgtgcactttcagagaggagagagaggcccaaaaccaaaagaaaagaaaaggttgtggcttgcagctgaatcaataccatctccatatatacaatacaccttcactattcccccttttgtatttttattatatttttcccatcaaagtctgtttttttagactccggtttgccgctttgtgtgtgtgtgagagagagaaagagagctatctatcctctgatttatggtctctggatctctgacaatcgagttgagttaattacaacacattcctctctttctcaatcgatctgtgaaatccaagattgttagctgtgtctgttttcagacaaatatg

SEQ ID NO: 24059 - DNA, 3000 bp, Unknown; identical to SEQ ID NO: 2579
  misc_feature (1)..( 3000): 2750-1469P.txt file - cDNA_ID_2163488; gDNA_ID_1620560; Annot_ID_160585

SEQ ID NO: 24060 - DNA, 3000 bp, Unknown; identical to SEQ ID NO: 2571
  misc_feature (1)..( 3000): 2750-1469P.txt file - cDNA_ID_2163518; gDNA_ID_1620558; Annot_ID_160513

SEQ ID NO: 24061 - DNA, 3 bp, Unknown
  misc_feature (1)..( 3): 2750-1469P.txt file - cDNA_ID_2163635; gDNA_ID_1620563; Annot_ID_160660
ctg

SEQ ID NO: 24062 - DNA, 3003 bp, Unknown
  misc_feature (1)..( 3003): 2750-1469P.txt file - cDNA_ID_2163645; gDNA_ID_1620563; Annot_ID_160662
atccacctccggtttctattaaaccgtcttcgttactcttccttctgtatacagcttcctgttgttgttgttgttcttgatccctaatatgcatcctctgaaattcctgcatttgtctttgaatttccatcggatttacgacgtgatccggttgaatcacacgcggatcgttaaacaaaggcggttctaacgccacaggaaccggtaatttcacctcagccggtggtggcggcggcggagctgcaactttctccgatccaaacaaaaaatccgcattattcggaggagcagttacggatttctccgattcagatagcctaggaacagtgttcaacgcctcgacgaagcgatctcgatccgattgagtcgaactttgagaaccaaatccagaagaagccgggaagagaaacaaacgcatcctcgctggcttagacgacaaacgaagcaagcgatcgtactcgtgcatcatatgctccagatcatcatcgttcgtaaccgagatcaaagcgtctaagtcttctcccggaagctgatacttaaacgtaacttctcctccgccgccatcaccgccgccgcatacggtggagagtttggaagctaaaacagggaatctaatcccgcgatcaacggaaagaatcttcgtttctccgtttacgtaagtgagctgattatcgtgaggccgtggctgaatcttgccgccatagctgcacataaacttcaccttgtagctatgttgctgctggttctggttctgatcatcccatggaggcggcgggttatcgaattcgatctcacgagatctcggtgacgagtcggttgaatctggataagagttgtacgagaatttctccatctctccgcgaaaattaaatgattttttttgttggtttggcttaattcatgaagagaagaaattagaaagaaatgaagaagactgttgtgatgaaatggtttttattatgtatcggtgatggtggtgttggaaaatgagtacgtgaacttattgctcatttacacgtggcctgtcagattttatgagttttaaggcggtgatgagattatgtgacggttctgtgacgttagctgaatctctccatggattaatatgacttttggggacactgtgaatgggcccaacactagtgttttgatacttcgacgttgaaagaggccagcttttagccttttacatgttttttcttaatattttgttaaatcaacattagtgaagcaatatttttaaggttaagtgataaataaatagttaagaaaaagggaaaaacaaaagtcgttgtcgtcgatctttcgcctgatcaggcttagatatgttttatgattgtgttattggatttcttttgtgtataacaaatatttgaatgtttgaatcatcatcattcatcaactgtattacacatccgaatagtctttgggttagttctagaagatagatgttttttagtctgtcaacatgcagaagaaaactgtaaaagggtcaacaaaaaaaaattgttatgttaaattaacatcaagaatataagataatttaaatttgacaccggtgagtgtatactcactttctcgattgtttgctattattatataccttagattattgccaacttgcaccttattataaacggtgaaattgttgtaattattcaaacttataatagacgtatttcactagcatgccgaaggtgcaatcatggtcgtacaagaacaatatttatattgtcaaattcacgtaacaatttttgttgttttccttgtttgtcgaagacatgtgcattgattagtatttcttccaatattattttgtgttagaacttagaaatgttcattattttctcatcctcttaaataatccatatatatatggactaatcggcccgccgtcccggtacgatgttgctcgatcagtcataaatcaagtcgtgtctcgtggttgtttgtacttggcagagcaagtcaatcaaccgaattttggtaaagatgcatcttagccaaaacttttgatttcactagatatactagaatttagcattatacgaatgtcgaccatactttttgattacttaagagcctcttatatagttagtcctattattgatagttttcttgtagtaatatttgaatattataacgaatcaaatttttcgaatctaataagcacaaaagaaaaatggaatcgaatattattttaaatgaaactatgtactaacataaatccaattatgttcaaatgaaaccaaatcaaataaatgaagtattcctagctttgaattagtaagtatcatatgaaatggctccatatggaaaccaaaaaatccaactgaatgcaaatgaaagtgttttcactacttcatcgtaaatataaagaaattgttaggtgtgataatgaaaaacattagttaacgggccaaaattatatatttacataataaaggggtagtttcataaatttgagaacatggttggaacatttcaacaaatgagacgagttcaatgtacacttgaattatgtacaaatcagtacaagaagcttaagatttgaagctaacatataacattcaagttcccaacaacttcaccgctcatctccgcacggctttcttcatttagtaatccttcgccggatcggatcatcgtttctcagattcctctttttaagtttcttctttcaggttcgcaatccgaatcttccacaaccattgttcgtttcgcctgtgattctggtttctgaaatttctgccttggcgtggtttccttgaatctgattacttggattctccgattctcatagttcttaccagtttttgttttttatttcacttaatttgttctgattctggataacagattcttatgataaggtgaaagatactagagattcatcggttttgttttgttttggcaattttctcaagtgtttgacttatagaacagtgacgtgtgtgatctatgatatcaattccaaacttaatgatgttttgtttgtagatg

SEQ ID NO: 24063 - DNA, 3003 bp, Unknown
  misc_feature (1)..( 3003): 2750-1469P.txt file - cDNA_ID_2163655; gDNA_ID_1620563; Annot_ID_160665
caaacaatcacggttgcaaagtaatctgaacatttcagtacttctctctcaatctacggatacaatgtttcagctacaatctctctctattgttttcatttcaggtggtggagatagtggttcctgaactggaagagatgcgtgcagcccatgttatttcgattgggtctccaacactgtcttctcttactccctactgtgaagctgggtatgtctctagctctatcatctatgaaccaaattagaactttggtttaagaactcccacatttgtcttgtatttcaggaaaaattcaaaactaagttatgacactcgtaccagctttgcaattttccgttcattctctgcttcagactatatcgctgctcaatgtcttaggtaagcggcaatagaataatgcactgtatgcgcagctttcacttttgcttctaaagtcacaagagtaaaccaatattgatagaatttttgttgcaggcgaagattgatggagtatcacttgaatatcttcaaagacgttgatgtcattgtgacccctacaactgggtacgtaatataatttcataccttatcaaaccatctagcaaattgaagatccctatattacttgcaatgtcttcggatatagttacttgtatattacttactgcttaaactcctctcactttacaaacagaatgacagctccagtgatacctcctgatgctctcaaaaatggagaaaccaatattcaagtgacaagtttgtcaagcaaaactctaacttcttacttttggtgcaatctaatacatagcacatttacatcagagttctgatattcaaattgcttcttttctagctgatttaatgcgcttcgttctagctgcaaatctcctcggcttccctgccatatcagtcccggtaagacattttttttatcagtctctaaccaaggcttagacaatcatgttacttatttcattcttgcaatataatcgtatcttctttctgattaatcactctctttttctaacttattggcaaacaaaaatcaacgcaggttggttatgataaagaggggcttcctataggattacaaataatgggaagaccttgggccgaagctaccgtccttggtttagctgccgcagtcgaggtactctctctttttctctctctgatacgttttcaaaagatcaagtagaaactagtgcggtaagaggcggtaaatagtaagagcggactctgtaacttgaatcgattttggtatttcaggaactggctccagttaccaagaaacctgcaatcttttatgatattctcaatacaaactgaattcataaggatcttccacagaactgaaaaggcaaggattgtctctggctgcggaatattatttatgtttacattatataaggttaatatgtcaattgatctacaaatcgacgattattgtgctataaaccgtgttggaatttcttacgtcgactatgattaattttaaaagatgtgaattagtcttgagcatacttgtaaacttttaaaatgcattttgaaaaaaagtttagaaacctgaatgctaagtaaatctacataacaatgcaaaaacgagttgaatttgtggaatcactaatgacaaatgctagatccaaaatccggttagtttcacatcgtcttgcaaatttatttatccaaatttctattatttaaaaagctttaaaacattgttttaaattccatagaaaaaaataaaaatcttatataaaatcattagaagcttgaatgttaaatctacataacgatgcgaaaacaagttgaatttgtggaatcgctaacgacaaatgctggatccaaaatccggttagtttcacatcgtcttgtaaatttattatccaaatttctattatttaaaaaacttttaaaaaattgttttattgaaaaaccttcaaagttttaatagtaatataaaaatataagtttaaaaatattatttaataaatgaaaaataagtgttaaaaatctaaattaagtgtaaaccatattgaatctagagtacctcttaggggtttggatgatgtatccaattagtttacacaaaacagaaaaatttaacaattaataaaaaaccttaaaattttaactataatataaaatatacatttaaaaacattttttaataagaaacaagtcgaaaactaaaattttattatagaaaagtttaaaaatctgtaagaagttttactaaaatccgtaaactttaaaactttagcgaataagaagttttagttttatcattaaaagaaaattaaagagaagggatgaaattgaccttggttttatgggccgaaattgtttcttgtttgggctttgcacaaagatctctagttttgacaaccgtcaacggctaactaatcccgatctatccaccttctcaagcttgcttctctttgatcatctccgtcgacgatgtagcccccaccgcgtcagaattctccgtagaagagagatcgcacacacatacatatgatctcgcttctagttattgtaaacaaagggctcatcttccatcacgctctcgtttcttgttggcgaaaagcaacggcaacaaatcaaaagatataaaatagaagaagtaaaggaagcaggaatcgaagaagatcatgctataaaatcagactttgtatttgcaattctcgctctataactctgtctttctctgatttgtgaattgtgatgatgagactatattttgtagacccatcttctgtgtaatttcctttctttcaactcaagtttccttttctcttgttactcttctgttgtttccttttttaccctttcgtttggaaaattccggagtaaaaggttcggtgaataaggacgaatgggcctaattaatatctgcaaggcccagcccaataagatatactatctaagaacagatttaaacccctaataaataaagttttcacgcgtgatctgtacgtctttaatttacttgtcctaacgcgtgatcggaaaccatg

SEQ ID NO: 24064 - DNA, 3000 bp, Unknown; identical to SEQ ID NO: 2602
  misc_feature (1)..( 3000): 2750-1469P.txt file - cDNA_ID_2163658; gDNA_ID_1620563; Annot_ID_160666

SEQ ID NO: 24065 - DNA, 3003 bp, Unknown
  misc_feature (1)..( 3003): 2750-1469P.txt file - cDNA_ID_2163662; gDNA_ID_1620563; Annot_ID_160667
tgttatcatctacaacagcatcacttggaagatcaatcccctttggaatctttcctggataatcagtcaccgaactgtccgatcccaacatactgtgaatacatgaatgaaaagcattagactatacatggttactacatcgtcaaagctcatggaaagaaaaatgaaatgaagaaacttcataccttctatcgacgatgaccattgaacgtagctcacaattagcaaagctgcaaatcaaatgaaaattatgaacctaatagattaaaaattcataactaagagtgtggaagcttactggccgcaaatttccttcttaacatctggatgacactcgttttgtagtgcattcaatgtgtgaaacaagaaaccactgtgtgtcacaatagctatctctttttctttccgtgtccatagcctacaaatccaaaaccagccatcatacaaagttctgttccatcaacattttcgataaatcaacaagactaatggagattacttaatttctacatggaacattaaaagggtcttcttcaatcagaggttgatcctatttgatgccaacttctacttatcaagctaagaatatcgaggaagctaagaggatgtttctctaagtttcaagttctgcacaatctattaaaaagaactaatttctagagtttagatataaaagagaaaataccagttcaggaacttttttcctctagctgcaagttcttcaatcgtttctctaacatcagccttccataacttgtcttcctcgctttctatctgaacgcaaatttaaatgtgaggagtcctttgaagcacatataagttgtttggcgtagctgtatgctgttaatagtcaactgggcaaccagaagattataagtaataatcaatgccaggcacatctaagactctcaatattacttgccagtgaaaagtcaactgcagggaaaagaaactgatagtcgctgatacttctcctctgatcacatggatgcactccctgtgtccacaaaaatggaatacaaaagtgaaaacttgtcgcagctaagcataattatttcgtgactagatctaagcttttgaataggacagcattgcgagtaggagtgaaaaatactgcaaaacttgtgtttgtttcatggtcactttaagttttgtgataattgtgaagatagataaacgcaattctgtccagttttagtttgtctctaggctatatgtattacactgaaaaggcataccaaatgctctctgcaggactcctctgtaataactggtgggcagtttaaactcgatatagctgcacggctgctatttcctgcatttgctaccattagaggtagtacatcactcatatccgtgtagccctctccaccaaaaacaccaacagcagtttgcaaggttctacgagcaaagcaaatccacaaaaatcaacactgtcaaaggtttatcaaagtggagtgcatgcatcaatgtgatcggtctcacacaatctattacactggtaacctataatctgtcacacaatataagaagttaaatattacactggtaaccaataaatctatcagttttcctaaccaagaagaccaattagactaagaaccagttatactaagatttcaatcacagatgtctagagtacctcatcagtggagacgaaatgaccagttcgatcttcttgtgaagtccactggaatgaacatgcttacgcaaactatctacctgtcaccaagagaatctatattaattttttttggataaagagatgcaagtgaagttatttttctctatagacctgtttccagccaagctgggtcaactcagcatcaaagtagtcatgagacatgtaagccttataattcttctccccatccacattgtgaatcccctgagcatgtctcacctgaacaaaaagtagtcaatatcagccccaaattctgatacgcaaacattagagcatttttgaaaccttcaaaagatatagatttcagctcaaagagatattataacaccactcactaggtaaatggttttgcagcgatgcaaagggtacaaacctataccagcaccagtctccatttctgcaaacactgatttaaaaaaaccatcaactaggatatgataaatagatgcaaaaaaaattgatagcagctaaaaaaactcacaagcaaattgcacactgtaacaaaaactaaagtttcgttttttaagacaaaatccgaatcggagacatataaatcaggacaccaagatcgaattaaaaagaagggaaatacatacaccaatcgaattcagaagaatcgctcaaaatcaaaagccaatggtttcactattacacaaaaaacaaaatgtagagattaaaatgatactttcactgtttcacagagctaatcattcacgtagatgaatacaataaaaacgtaaatataatatatatacacattggtttaaccttacacaggagattcgaagaagtaacccaaaggaggaagaggaaagaagatgtgaatgaagtaggcgaagaagcagaaagtgattagattagttggatgattaggctttgtttttctttttaattacttttataaattaattatccatgcagtggaccaatgaaaacgatttttttaaaaagctttctacaaaaataataaaatggtgagagccgtcaataatactaaccacgtatacgaaccatttgggtccgctcgtacgaaccaagccaaaaccataactctaaagaaaccaaaattgtgttttacattttgaaccatccaatattattatccttatctttatccattttattttctttttcagtttaagtatatcagactctgaggtttgcagtagataaccaaatgaattatcttctaaatcaaaatcgatttaaaccgaatactatagaatttaaaccgtataaaattaaaccgaaccggaataaattaccggctcaaccgcgagattatagtgtcattctctccagtttcagacgaatcgatg

SEQ ID NO: 24066 - DNA, 3000 bp, Unknown; identical to SEQ ID NO: 2580
  misc_feature (1)..( 3000): 2750-1469P.txt file - cDNA_ID_2163683; gDNA_ID_1620561; Annot_ID_160594

SEQ ID NO: 24067 - DNA, 3000 bp, Unknown; identical to SEQ ID NO: 2584
  misc_feature (1)..( 3000): 2750-1469P.txt file - cDNA_ID_2163695; gDNA_ID_1620561; Annot_ID_160597

SEQ ID NO: 24068 - DNA, 2562 bp, Unknown; identical to SEQ ID NO: 15116
  misc_feature (1)..( 2562): 2750-1469P.txt file - cDNA_ID_2163704; gDNA_ID_2926039; Annot_ID_196072

SEQ ID NO: 24069 - DNA, 2562 bp, Unknown; identical to SEQ ID NO: 15116
  misc_feature (1)..( 2562): 2750-1469P.txt file - cDNA_ID_2163704; gDNA_ID_2926039; Annot_ID_138186

SEQ ID NO: 24070 - DNA, 3003 bp, Unknown
  misc_feature (1)..( 3003): 2750-1469P.txt file - cDNA_ID_2163704; gDNA_ID_1620561; Annot_ID_160601
ctccttgtaaatcattttatgccaattacttatgctttaaaaacgattgtaaatcatgttttacccttttataagcttttaaaatcccttgtaaatcattcattgccacttacttatgcttaaaaaacgattgtaaaccatgctaaccctttttaaatcccttgtaaatcattgtatgtcacttacttatgctttaaaaacgattgtaaatcatgttttacctttttataagtttttaaaatcccttgtaaatcatttaatgccacttacttatgcttaaaaaacgattgtaaatcttgtaaaactattataaaaagctttaaaaagatttacaaaggttttaaaaggggttttaaagtatttacctatgtttttaaagactttataaaaattttaagagtttttaaaatgatttacaatggtttttagcaactaccaaaacttttaaaaaatttacaaagatttttaaaagcatttttttggctgggaaaaaaattttacgagaaaacatttttggcgggaaattttttttttggcgggaaaaaaagtttggcggaaattttttgtttggcgggaaaaataaattttggtacatgttattattaaatgagggtaatttggtcattctgttcaatagaagggatatttttaaaaataaacaatataaaatggtattgttacaaaagggtagtaaaaaaagggtagttttgcaaatctccctcgagaatttgcaatttctctctcatagcataacatgtcttttttttagtaaatttcaagatgacaaaaagaaaaaaaaaacataaagaaacaaattgaaagcaacatctatttttctgacttgtaaaaatgtggtgttactagcaaatatcaaatttttgtatctataaactagattttaacccgcggtatactaggagaacgatttattttttaaagttaatatatatacaagtttacaaattgaatatatttataaaaaaaataaattttttagtttacaattattattaggtaacatcccgccaaatctgttccatcaaaaagcttattaattttattaatgttaaccttagttatgatatgattctaaatcattgtctagatattttagccaatgttaggacgttgaacccacatagttttcgtcaattgaataatatatgttcgttttataaatttcgaatcacaatttatgcagaaaatgttttgaaatttttcttaactttacatattatacaataaaaaatcaaacaaagatgataggaaattcatagttttaaatcttaatcaaatcttctaaatatcaatattgttaaatatagaagtaatgagtataagagttgggttttatttgaaccaacccaactaagatttaatgaacatcataaactaatgggtctggtatcaaatgtaatcagatgcattttaacccacaatcaaaaggtgactgcaaaaatactatataagattcatagaagtagatcgtctatataggcctgaaaaatatcagttttaaattaaattatttagagatcttattttgttgggcttaaatactggagaataagactactttagtaatcaaaatatttgggccatgtaactaatgcaaaccaaaatcattattgacaaaagtcattgcatcaaatgattttcttaccaaaatgtctttaaaatatatatatatatatatatatatatatgtaccttcgtacggtacggttgcttttatataaaaaggtgttgtacggttgcattgacttttgatcgtaaatactatatagtccggagactcaaatgcaaaccactttctctatttttttggacggaagttatgttaacctaaattatctaaaatattacacaaataatttttaaacagtttaaaatggcatataattatgttaatagaaatttgacttttagtacggagatacattagctgagaagtttgacctcaccttatttagtgggaaccttgttacttttgaattagtttgaacaatatatctctaattcatataaagtattttgaaatataaagctttataaatataacatattttttggtgggtaatgcttctttttttctgtggcttataactacgtggagatcttatcttctgtccgcttatattagtatttcaccatagtgattttaataaaaatcagattaaacaatatataacagctattttagtttacaggtttaaacttttattttagttctttgattttttttttctttcagaaaatggtggacatcttctaaagtttgttttattaatctaggtagaaactttcaaacaaaagacgaaaacagaaaagttgactttagtacggaaatacatgatatgagataactgataagataacttgttagatggtttccactctcataaacaatataaaaaaattattaacgatagtgaactcgatttttagtaactctatgaaaatcttcttgtgagatcataacattttagaagactaggcttttcgtgtaatatgatctgtagaccattccaatgttatcatatgcagaacagcaacacaatgaaataaattaagagatggaaaataaattaagatcaaataaaatgtggatatacccttaagattccggagacaatacttctccagttctcctctcgtctataaatttctgccgtctcagccaacataatcacaaccaccacctctctcaataattctctctcttgtccttcacaacctgttactacttaggtgaatatcatctacatgtttattttgtcttaatccaaattcacatttaattttgttttcactctttttatcatgtatacttttttaattagctagccgagattatatatgttaaaactacctctatttctaacacacccaagcaatatatcatctttccaatatttacgaaagaagaaatttctatacaaatattaacctttactttgtgcaaaataggagagaagaaaaacaaaaagactgactgagatg

SEQ ID NO: 24071 - DNA, 3003 bp, Unknown
  misc_feature (1)..( 3003): 2750-1469P.txt file - cDNA_ID_2163708; gDNA_ID_2926039; Annot_ID_196074
ctagtaactttcccattattataatgataaattgttgagaaaatttactttattttagtgttactttgttctagagtaaaatcgaagaatacttagggagggacatagggtcagtgccggcttaacatggagaggagggagtgcaacaacgagtggcccataaagcaaaagggacacatacaattctttccttttgtaaacataaaaagaaaaagaaaaaaatatgtgcaaatataacagaaaattgcaaatttttactaaaaagctcatatatatttgcattccttttaaatataaggtaaaaaaaaattctaaatttattgggcccaaattatatgttgatatattttaatccaacaactctaatacaaatattgatttattgggccaaatctcttttgtaaaatgagattgttgttttattttattttaaatgatgtttactaagtgttttacttttgtacgaaaacaatttccaatatattaagggtccaattttttttttgccctaggacctagaataagcttgagccggcactgcagagggtcctaggatttttgtattttttactttgtaagtgaatgccatagcaagccaaggactgaagaagaacaacggaaaatatagagaatatgaatttgtgtgatgcgaagacgaaaagaaattatagaaaatcaactgaaattgatgacgtcgaatttgattgaggagaaaaaatagctacaaaataagaggaagaaaaaggaaaataaagaaaagaacgaagagaatgagaaggagaagccgaaaagggtctagagaagaggggtgttttttcatgaagacaagatactacgaaagaaggaagatgaagggctagttataagtagatgtagatctctgaatatatatatatatatatatatataaagtgtctccctaaaccggaaaaaacgatgggttttgatatgctgaacgggggacaaaacccgagaaccgaaatcaatttaaaagttcaccgatcactatacaactctgcacttattgaaaccgaaaaccaaaattctccgtttagacggttttggttcaatacggttcttattgaacgtcaatcactctatctactactatacttgaaaaacaaaattaaattttttgccttgacttgatccagagagatgttacgcggcggcgatgcattaatcgataaaatcaaacaacatgccacgcattgacttttgcaagaagccagcaactttatataaaacaatcgatgataattgtgatcgttacaactatgtaataatgcatatatataagctatgtattaactgtaaacttgatttaaataatactgatggggagtatataccttgatgcatagaataaaaatgtaaaatacgtatgaattactagcttagtggtagccttgttacttggattagtttagcaagcaaatatctagctctaattcacaagctaaccctaaaagttggttggacatatacatcgtcaaatatatcgaagctatatatatatatttaacatatttgtttttgttacattaaaacaaacaaaacaaaagaaaaaagttttttttgtgctcctcctttttaatatcttttatgaaaatggctgactgttatggaaaatgatgtttttattaatctaagtagtgcctttcaccaaagaaaaaaaaaaaccaaatatagtagactttagtacggagatacgtgaacataacttgttagattggttttcaacaaaagagtatagaatggaaaatcgttacatactgactctcatgaacaaacatattttgcttaatgaaaagtcaactcgatctttattatttatgaggataaaaatcaaataggctctgtcgacaaaacgaaacaatcagactaccctttagaatatatttaaaattaccaaaaatattaatcttttaggaaattacacatgatgatattttagcatatggcggatatttacctccaactccaaatgaggatattttagcatatggcggtctttattcgtacgtactattttgcaaatcattttatatgattgtatataccatagattataatcactactcttagtcccataatttgtaaataatagtaattcgtagacatagatgatcaaagttctttgtaatcttactacatacacaaaaagtaataaaacacaacatttttgttgtattaaatgtgcttgtccgttgacaaaaaagataaaagaatagctttgtttgtcctttctcgacaagtttgtattataatcgtctcacgttcatttcaagattacatgcagaatttgtcaaatgaagtctaaatcatcaaaagtaatttttccttatttgttctcacttgaatataaattaacgaaatatgattcaccataaattacacgaactataggatacgggtacttatttattcccttgcggtaatacgaataggtccaagattggaaatctcagagttgtcatgaatactaagttaaaatatgtgcagaccatacaaaacatagacgagcatagaaagagaagttgatcaagtgatggaaaaagattaaaataaaatataaatatggatatacccttaagattccggagactatgcttctccgatctcgtctataaatttcagccgtctcagccaacacaatcacaaccaccacctccctccctctctctctcttaatctttctgcccccaccattagcgcacaacggtgagattcgttagatgtttattatctatgcatccaaattcacatatagatagatagtacatatatagttgtttatatcaatagaaacttttgtttctaaattgtaatcgcttaaattatttgatttatgtataggtttaattataaatgttattctgttggttgtattggtactaaactaaaataatttagtagcatctttccaatattattataaaattatagttaagatatttatttttacttcatgaagcaggaaagacaagagaggcttagatg

SEQ ID NO: 24072 - DNA, 3003 bp, Unknown; identical to SEQ ID NO: 24071
  misc_feature (1)..( 3003): 2750-1469P.txt file - cDNA_ID_2163708; gDNA_ID_2926039; Annot_ID_138187

SEQ ID NO: 24073 - DNA, 3003 bp, Unknown; identical to SEQ ID NO: 24071
  misc_feature (1)..( 3003): 2750-1469P.txt file - cDNA_ID_2163708; gDNA_ID_1620561; Annot_ID_160603

SEQ ID NO: 24074 - DNA, 3003 bp, Unknown
  misc_feature (1)..( 3003): 2750-1469P.txt file - cDNA_ID_2163750; gDNA_ID_1620561; Annot_ID_160615
caatatttccatgcgtgattttgtattttatgtgataacattcttgctagccgatttggctagcttttggactaatgtcattgtctacttctgactcttacggctcaaaaactaagcttttgtagtttgaaaaagataacttatagtttgacttgttagctacaagcctagaatgctgttttaagcatgaagtagaaaacattttttcttattggtacaatggttgaggaactctatagcgggtacaaagaaaatgtagcgtaacatatgcaaaacgcacaaatatatattttgcactcggacaagtattttcttcatatcatgtaattagtcaaatacgacttttcatcaaaaatgctcgcaagaaatcctgcagtgtactctggtatggtgatatctttgtacttagcagggttttcatcagacaaaagatctttaatcggtccataaaccgtggaatttggagaaagactcgagctaaagaagcacgcaactgaaatccgcggtctatctttgttcggtcgtaccctatgctccacgctcaagaacttatcgttcgttatcagctgcaaaacaaaatgtctcaaattaattggtaaagaatctgtttttttagttaaaagaatgcatcaactggacttgcctgcatgaaatcaccaatgttgacaacaagagctccaggtacaggagggacatcgacccaataatcttcatgaagaacttgaagaccaccgatttggtcttgaagaagaagcgtgaggaaagagttgtcggtgtgtttacttatacctaaagttaggtcaggttgtgggcaaggtggatagtaatggcagagcataaacaaacccttaagacaatcaatcctcttaagtgtctcagagtctaaacctaaagcttctgagagaagttggaagagcacagctcctaattccattacatgcttcgtgtattcgatcaccgcactcctaaaatcatcatattaagaattaaaacactagaaaaggaaattgtttacttgaattaaaattgagataataaaatcgtggaatcatttgaactaagtaaatttatgttaaacaatcacataatgctaaaaagttttttttttggttatatatgaaaccaaattgtttagaaatagcataaacacaacaaatagtataatactattaatcactatatataacatgtacctgcaagctagtgggatttcctctggattcggaggatctggagcaatataacaagtgaaagagtctctccaattcaaaggagaagaatgatagagatcgaaatcattgttataaacaaatctcttgttgttatcggtaggaagatattggttcttgacaactggatcttgttcatgaaaccttcgaacactctctttgatctcttcaagaacagttaaaggaacatcatgattgatcacttggaaaaatccccaattctcagctgcgtctttgatcttcgaaatgacaacgtttcttgaagatgtgttacgatctccgaggtcgatgattgggacggtgaggtttaagccggagatatcagaaggtctgttgtttgataaaatagaagaagggacatgaaacatgctaggaacttcggttatttcggcatcgacgagtcctttcactcctgtcttcgtcgagataaaagtcgtgagatcgtttaaacgatcgattttttcagaattctctgtcatgtttttttctttttttctttctttcaagattctgttttttgttgttgttctgaagactcaagaagaagaggaagattcaatttaagacggaactaaagataagtgtcgaagtttgtggtgtctgtgattgagagcgacgtgttgtgttgtgcaaggaattcaaagtattaaaattgacttttaagatattccgacagaaacaaaaacagaattgataagagggagattcagtttaagacagaactaaagataagtgtccaagtttgtggtgtctgtgattgatagcgacgtgttgtgttgtgcaaggaattcaaagtatcaaaattgagtgttgtgcaaggaatttaaagtatttaaattgacttttaagagattccgacagaaacaaaaacagaattgaagactagaagattgaaaataaattaaaagaaaaagaaccttaaaaagaaaacaataaaagtggagatgcggggtatcgatccccgtgcctctcgcatgctaagcgagcgctctaccatctgagctacatccccatgaattgaacgagtagcaattatataatatctaacgcgttttgtaaagtatagtagatcaatttttcatgtatcttatattcttattcagtaccgcctttgccttgttggttgtaccaagtaaccaacatttgtatggatctttaaatacttaatgattaaaagatgtttaattattattattttgttatatagcttagtgctctaaaatgttcatgaaaaccaacttgaaaaatattatgatagctagtttgtattcaatttaatttgtgtttgtaaattatttttcattttctttactattaattttgttttatttaccattttattttacgggaccaaatccgactacctacgaatgttagtaaatccggttccgacaaaattacacatatataaactttttttttctgaaatatggttctcatatttaaaccaagattctcaagttaaaaatattgtcctaatatttaatccaagattcccaagctaaaaatatggttcttttgtcgaaagtaaaaaagtacatattcttctcggagaaatgaatcgatcgtgtaaaatatagtttctcgttgggagttaaaatttaataaatttgataatgtttttttttcttttttttgaaatgttaataaataaacctaaaccaatagaaccgcagtttttcctcctcgccgaaacgaagaagattctccttctctccgtcagacaaatctacgaacaagcgagcctgagcttaagaccaaactcatagagatg

SEQ ID NO: 24075 - DNA, 3000 bp, Unknown; identical to SEQ ID NO: 2587
  misc_feature (1)..( 3000): 2750-1469P.txt file - cDNA_ID_2163821; gDNA_ID_1620562; Annot_ID_160628

SEQ ID NO: 24076 - DNA, 3003 bp, Unknown
  misc_feature (1)..( 3003): 2750-1469P.txt file - cDNA_ID_2163825; gDNA_ID_1620562; Annot_ID_160629
ccaataaattttctaagttctatggattaagaaaaatgttgaagagatacaaaaagaacatggatgttggagttaccgtaagcctgggatcttagagaaccaatatcctaaggcaaatgctacggcatggaatgtaacaattggaacaatcaatccaagaccttcagctgacagaatctgactgcgattaatcgaaagtgggcttccaatgcacaacgaagtgcataccatagcaacaaacggcatcacaggttgaagaagagtgaccacaggcttcgcataagtatttaacacaaggccaagagtgattggaacaagtaccacctacagatagtaaatcattggacgtcaagaacgatgaatcaacaggaactaccgatcctatgctaaatcttgttacctgaagtatagacttcgacatggcaactgcatcaacaggaactactgatccaattagaagaccactaagcaaaggtgtaaagattacagaagcaatagttgtagaactagtgagaagaatgctcatggccacatcagctttactcagagaactcgcgtaactagacaactgagccccagccacacaacacgtgagtataaaaccagcgtagaaggtcctcggcatcccaaatgcattagcaactaaaaccccgagaagcggtttcaaaacgtactgagcaacaaacccaacagataacggcactggtctgcaaccaaacaatgttctcacaaacgttagaaaaccagcttaactaaactgatcataaaacttataagagaatgctccaagtaccttttgaatgcaagagcaaaatcgtcaactgaaagctgaattccaatagataacataatccctccaagagcaggagcatagaggtctttagataccctgaaaacatttcatctgataatcatcttaaaaccccattcaaaatcttagtttctctaaacagaagatgacaaaacagagtcaactaagtaaaagccatagactttatcgttgattctcctgataagattcatatatatacaccaattttgtaaagatataaactttggcattacagagatagatagagagagtttgtgtgcaaaccaagtgaaactaggtgggtaagagagagcagcaacggcagtgagagcaacaacaaatggaagcaaagcagaccaaaactgagacgaatcagctttctctgtaacatcagttccaccacaaaacgataacagagacatattcccatctctccaatgtaatccaactctgcccataaacggcgtcgttgaacacgccaccactggaaccaatccgctgtttctccgccttagtctaaaatctagaaagttactaagcgatgaagaatggagagaagataaaggtgaactagaagaccggaattgacaattgaaggattgagatttagcgggaagattatgaaattcagaaagtgattgtctttgtatagctggtggtgggagagacagagaagcgattaaagtcatttctatattggtctggattttgtaaagattggatttttaggagagtaggtgacggagagaggtgaagcgccaccgtgaaatgacgccgtggaccggcgaaggagggaaattgagagggtgaggtttggagttgaagaagcaggaggaggaagaagcgataatatagaaaattggaatttggaaatatataaaggggaaagatttgttaaggtttgtttaggcatgattgacaagtgatgtgcaagaaaattgaacggctgagattggttggcgacgtgatcgtcgatgactctttctagcattgttggttttgtgtaggccttagttttgtgtgagtgaatttggatgaatttgggtgaaagattgttgttttgtttggtacatgttggcatcttttttttccccgtcaaacatacttactttagcatccttatattaatacttaaaaaaccaatacatggtttctaagcatccaccaatggtcttaacaaaggtgatgaccaacattctaatcaagcaaagtacaaaccacaagaggagacaaatttttgcaatagcatctgcacacagtgctagttcaatggatccggagtcccaatacatatatttaaaaatggactcttttatactaattgtctttttttacaaaatcatatacctacatatatatataatataaaactttgggtccttttaacaacatagttagaaaaagagagtatatgagctaattaacaacatacttacaaaaaaaaaaattggcccggaaagtatcttgccacttcttaacatcttctactgcctttaaaattactctttgcgcctcttcatggtcatttatgaagaatatctcattttttacatgttggcatttatatatacatttttgttagcgttttagccaaaaatccttaatctattttttaattacagtttcaatctttatgaaacctatctaacaaagatattattctacccaagttttgcaaataaatcttaactacattcgatatatgtaattctgaatataatatattgtataaattaaatatctatatgttaaaatgtacaatataattttacttaaaaatataatgtagaaaaatatgaaatgtcttacaataatattatagaaatatttttatatttgaaaagataacatagtaatttttttgtatttataatcattttattttaatttaacaatgcaaatttaagatctttaaatgtattatgtcattcaaaataatgtatatacaactggatcatattctttacaggtaataacattttctctattatagtagtaagaataaaaatttattctttccatgtttctttttaagtatgattttcattttaagtctagattggattttaccatacaaatttcaatagattcccaagatttgtttccgtatctatttttgttaaacattaccaaaattcttataataataagagtttgctagtaattgtagctcaacgttcttcatcaaaatg

SEQ ID NO: 24077 - DNA, 3003 bp, Unknown
  misc_feature (1)..( 3003): 2750-1469P.txt file - cDNA_ID_2163829; gDNA_ID_1620562; Annot_ID_160630
ccaggttgctctagcatggatggatttgtctacgagcacggtaagctttatataccttttcttgtgtcgagaaaaggattcatatataactcgaaatagggtctcatacaatgctcttttatgttggcaattgtatataagcaaagataatctaaacatatgatactgttcaatactgttgcaggtccattcaatttcgaaccaaaaaagaagaactcacatcttttgcatctcaatccttatagttggtccaaggttgaaaagaaaaacaacattgacttattttcaaacattttcttcaaaagaaattgatctataacttttaagaatgtgttttgttttcaggtgtccaacatcatataccttgactctccagttggtgtgggattctcttactcaaatgacaacgccgattatacaactgatgatacaaaaaccgcgtctgatactcacacattccttctcgaggtgaaataagaatgtaaaagtttttaaaaaagatttccttgtgttgtgtgtgattcaagacactaactattacatccacatcagtggtttaaaatgtttccggagtttcagtcaaatccgttctttatatcaggagaatcatatgctggtatctatgtgccaactcttgcggccgaggttgtcaaaggtcagtattatctctctcaacatcatctttagctccttttcatatattggcagaattagaaaataacgttatctccaatttttctcatcgttttcttgttatgttgtaggaaataaaaatgcaatgagaacaaacaaaacaagcaagaatgtgacaaagccggttatcaacttcaaggtacgactaatgtttgaggctatgtttcggattcaaagtcttatggttttggtgttaaataaataccattaagactaagggtactaatgtagttacctaattgtctctttgtatatgtgagagaaagagaaaccttcttcctatacttgaatgttaaaattggacttatatgtggtatagggatatttggtgggtaatggtgttaccgatgaggtgtttgatggtaatgctcttgttcccttcactcatggcatgggactcatctctgatgaactctatgaggtttgattttgttggtgaatttttcataattcttgctttattcctcaatttttattttttctaatgtgtaacaaaatatggcaggaaactaaattagtgtgcaacggaacatactataccggcggccagtcaggagtgagtaaagaatgtgctggcaaacttaaaacagtgtcagatactgtgaacttattgaacttatataacattctagaaccgtgctaccacggaacatctctatccgccttagatatcgagtttctgcctaagagtctccttactctaggcaaaacagaaaagccaatggcggtgagaaagagaatgtttggtcgtgcatggcctctaggtgccgttgtgcgtccaggcattgtacctagttggtctcaactcctcgctggctttggtgttccttgcattgtaagtagtaaaccacatcatgcatctttcctcttatagtatttgctaagtattaccgtgcatgattgccactttgaaaactaattatcactaggttacactcgaatttacatatctacatttggatacattgtatattaggatcatatatatacataaatagtttaaaaagttgtaagaacaagggtatttaattttcatcattagacacaaatagttcatttgatcaaattaaatgtatagtaccaattgtaatacatttgatgattctccacaattttagaaactgaaaacttgtaatggatgcaggacgatacagttgcgaccaaatggctaaacgatccagctgtaaggaaagcggttcatgctaaagaggtctctattcaattcatcatatttctctcaatcagtatttgtaataagttgatgatggacattggacaccattttaacatcttggaccttttttcgaaacgtcgatataggaaaaagcgattggaaattgggagttatgttcaagcaacctcgaatataggcacgacaccggtagcatgatcgaataccatagaaacctcactcttagtggctttcgagctctcattttcaggtgcacatatatagaaataaatcaaaggtaactaaaagtaaaacgaatgaaaatataaaatataacaaaagttaaattttttgcagtggagatcatgatatgtgtgtaccatatactggctctgaagcatggactaaggcaatgggatacaaagtggttgatgaatggaggccatggatgtcaaataaccaagtcgccgggtaatttttttgttataactatctttcggtcagtttttttcccaactcattgtttctacaattttgtgttgtaggtttacacaagggtatgccaataatctcacatttctaaccatcaaggtacaaacatcacacattttcttcatattctatttctacaaatgaaaacgatttgtgttttagtttaagtttgaatgtttttttttgcatgcagggtgcaggacataccgttccagaatacaaaccgcgtgaatctttggacttctatagtcgtttcctagcaggagaaaagatatagaattctcaagttccatgcatgttcattaataaaaatatttataacaataaaattccattttttcttcaataaaaacttcaaattttgtaatgtaatttacaaaaatgtgaaggattctatttcgtgtactaaaacaagtttttctccacacaaaaaaaaacatatactgttctgtattttttcaagggaaatttaaattgaaaagttaatactgtatatatttgactataattcaaaccaaaccaattaaaccaaaaatttagaaaaccaaaaaagttgaaccggaattgaaccgatatctagattgaaaccacgggatttattgaaatcgtcttccttctcactattccggtgtagctgctcaaaaatg

SEQ ID NO: 24078 - DNA, 3003 bp, Unknown
  misc_feature (1)..( 3003): 2750-1469P.txt file - cDNA_ID_2163857; gDNA_ID_1620562; Annot_ID_160637
tccaacgacaattattctttgagaaaaatggcggtggcatgttgatagagcgactctcgggggcagggtcatcaaacattgatttcaaaatctttacggaggaagacatgaaggaagcaactaatggttatgatgtgagcagaatcttgggtcaaggaggccaatggacagtctacaaagggatattgcctgacaactccatcgttgctataaagaaaactcggctaggagacaacaaccaagtagagcagttcatcaacgaagtgctcgtgctttcacaaattaaccacaggaacgttgtcaagctcttgggttgctgtctagagactgaagttcccttgttggtctatgaattcattaccggtggctcccttttcgatcacttgcacggttccatgtttgtttcttctcttacatgggaacaccgcctggagatagcaatagaagttgctggagctatagcgtatcttcactccggtgcttctattccaatcatccatcgcgatatcaaaactgaaaatattctcttggatgaaaacttaactgcaaaagtagctgactttggcgcttcaaagttgaagccaatggataaagaacagctcaccactatggtgcaaggcactctcggatatttagacccagaatactataccacatggcttctgaacgaaaagagcgatgtttatagctttggggtagtcctcatggaactgatatcaggtcaaaaggcattgtgctttgaaaggccagagacttcaaaacatttggtgagttactttgttttggccacgaaagagaataggttgcatgagattattgacgaccaagtgttgaacgaggaaaaccagagggaaatccatgaagctgcaagagttgctgttgaatgtacaagactaaagggagaggaaaggccaaggatgatagaagtagctgcagagctagaaacgttgagagccaaaacgaccaaacataattggttggatcagtatcctgaagagaatgtacacttgcttggtagtaacatcgtgtcagcacaaggccataccagtagccgtggttatgacaacaacaagaatgtagcaaggtttgacattgaagctggccgctgataaagacgaagaagaagattgttttcgtccaacgagtccaggaagaggttgtggcatcattggattcactggaacaggaaacttatgagcagaactaaccattgttctttcgtttatcatccctacttctttgcagactctgtctactactccaaggaagtctctaaccaccaagaatattctaaacggatgcgcttcttctttagccgagtttccatggaaatactctgtgatttcttttacaagtgataacgctacgctctcttgagcttgtactctgatgatctcttcctcagctcttttcagaaacgtttccatcgattccgaaaacctctgactgttgctttcttctgtgattgttgattggacttggtcacttgaggcatggtcagaaagagtattttcatcatttacggagagtatacagaggagctatgagaatttgatgtaatcagacacccatatggattgccaaaatagatggcatttagttagtgagaaactatgaaccacgaggaatataattggtttaaataacgtctggtctttcttcttcgtagaactaattatttacaaagtttgtttcctatgtatattgtatcaatcttttaaataagaccacactattcccctcatatagcaatttgtttattcaatagacatatctacaatcatatgttcttttttagagattaagtcaagttctctctaatttagcacttgtacgtagtactagttcatatgcaaatcaataaaacactacaattattcatattaggaaagttcctattgattctggatagaaacagagtgttaaaaacagaatacaataaaaaaaaaaattggtgctgacagaatacaagaaatttaagggagtgaattaaaattacggtagccaataattggaggattaacaacacaccggtttacaaaacaaaccggaaatcacactaaacagggtaattgactaataataagagtcatattaattaaacaaatagatcatttttacccatgtgattcgaacgcaatatgtaacttgtaatttgaatttttgtttaaacagactaaagttttcaaattagggggaaaaattccaatttcaaatctaaatgggtctaacgaaataagccggggtatttgagtattttcgtatcaactagccttaaccactaaactacaaatagaatttttctggtttcattcatttcataaccgactcaaaaaaacacttcgtctctacgattcaaatgatcaaattcaacagaatcaacctgtttcggctctaaacggtgatgaatttggcgatgagaacacaattggggaggaaatccttgtcaccgccgtcaaaagaagcatgtgattgaatcgggaaaaaacctccgattacgcaaacaatcaggaatgtaataaacccaggtctgatcgatttcaagtttgtttttgattcatcgattgttgcctttacttcataattctcttccgatttttcagaacagaatcgtgtaattgaatcttgattacaaatccttgtaattacgcaaaataaggttaggaatcacaaacccctttctgtgtatttctttgttgctccgtttatagtaatcaatctcttattgatttagaagaatcagtgaacttcgtagtagtgtgatgatgctgatgatgatcatcttcattttgtgtccgttgattgctagtttttctctggtttcaattcaatcatgtaggttattgaaaaacgttggttacacgtgttttgattaagaaaatctatccatttagaacttcttgtgatgatttttctctgtttagtgattcatttctttggctctagtgttttagttacatgactcttaaagttctttcatcatttgataggttgatagtcatg

SEQ ID NO: 24079 - DNA, 3000 bp, Unknown; identical to SEQ ID NO: 2592
  misc_feature (1)..( 3000): 2750-1469P.txt file - cDNA_ID_2163880; gDNA_ID_1620562; Annot_ID_160645

SEQ ID NO: 24080 - DNA, 3000 bp, Unknown; identical to SEQ ID NO: 5519
  misc_feature (1)..( 3000): 2750-1469P.txt file - cDNA_ID_2164214; gDNA_ID_1620797; Annot_ID_168507

SEQ ID NO: 24081 - DNA, 3003 bp, Unknown
  misc_feature (1)..( 3003): 2750-1469P.txt file - cDNA_ID_2164222; gDNA_ID_1620797; Annot_ID_168510
gcgtgtgtagcacggtgcaggctttcgaggaggccgaggctgtgtcacagagcgtgcgggacttgctgctacaggtgcaactgtgtgcctccgggtacgtacggaaactacgacaagtgccagtgctacgctagcctcaccacccacggtggacgccgcaagtgcccataagaagaaacaaagctcttaattgctgcggataatgggacgatgtcgttttgttagtatttactttggcgtatatatgtggatcgaataataaacgagaacgtacgttgtcgttgtgagtgtgagtactgtattattaatggttctatttgtttttacttgcaagttttcttgttttgaatttgtttttttcatatttgtatatcgattcgtgcattattgtattatttcaatttgtaataagattatgttacctttgagtggttgtttatcatactttttttctatggtaagaggttttggaaaagtatcgagaatgatatataaagtaattttgatatcgacgcaagatgataactactagactagctgagtataagaatattgatgtatatatttgcggacaattttgaatttattataccattatttaatcacgaccatataaaaataattcttgtttgcgttataatttgtgttaatacgatagagtagacaaatgaagaccgagaacataaataatcatgatcattacggatagaattttggtataagatatttgttaacatcgatatttatttgacagccatataccttattccaaaatttggtccacacatcgaacctattacctatgaatagcatatagcttatataggttcgtgtctaaatgaaaataaaacaaaaatatgactttagcgtatatgaattgatgatagtaaagtttccttaaatctagcaagaggaagtaaactgatttggtaaatcccttgtgaaaactgaaaagttcgttttgttaaaatcatcgttgattcattttggtatttttcaaaaaggaaaaaataaagaactgaaagcccccggcgaggatcgaactcgcggcctttcgcttacgaagcgaacgcaataccactatgctacggaggcttttcgataatctctgacaatcttggcatatttaataaaaagcttatgagaaatgttggggactcgcaagttttgtagcatagtcattgcattttcagaagccaatgttaacagaaggccttttctcacgtttatacgtttaattcgtctactttctaaggttatatctttcttgggccattgttcgttatatgggccttagttgtcacatgagtgggttcttaatttactcaactcgtatttatgagaaaattgtccaagtgaactgataatgaaatttgcacgaaggagagagtccatgcaaaaactgaaaaaagtttgacaaaaactcgaaaaagtgaagccaacataaaaatctttggttagacactaaaacacagtagatgagtagacgtttggcgaaattcacctgacttgtcgatttcaatttgatgacgtggtcaaatgatttaacttacaacaactaataatagccgtcgattttaataaatctccactagttatgagcattcagaaagccatgccgtttcttgagactagaggattaattaaaaaaaacgccgtgacattctctcgtagttattgaagacagccagacgtttgagtagaaagggacccgcccgacccggttaacgaagttgatcataattggtttataaatatggttgcggaaaagtacataagaaattcatcaataattctagtgctcaatatttgaatatatatcactgaagtagatgatgcgttcagaaatattggatgtttagtcttaattaaacgtatatgggtaaaaattgattttaacaaaaaatttaatttggttagccgtttagtcattaaattatttggtgatagattaatttgttcattttattaaacattcgtaagtgaaacattatatactaaaaaatcggaaatgaaaaataaaaataatgcaaagtcgtagtacggattcaaatcatcgtcataggaaacccatgtcgtcctagtacaatttttttcagctctagcttgctgacgtgtctgacacattgattttctaaggaattacgtggcacaaacacttaaaaataatcagacggttctcgtatctccttgattacacaccgttggatcgatgactgaggaagataaaacgaaacagagagagaataagcgttttgttttgtcatattttgtgttttgtcatattttgtgtgacatttacaaaaagcgatcgagtgagtgaagcgacagcttcggattatccgtcttatcggaatgtggaaactttgagaaaatacaagaacaactcatagagagacacacaagagacgtttttttttttatctcttttctctatttgaaatctctgaatagcttctgtgtttttcgatgatttgtactgtgtacgtttttttatcttcttctacttcttcttcttgtgtcagttacatatcaatgtttgatttgattgaagaacagtgactccattaatgaagctttccttatagtaaatgcttttttcgaaaaaaatcaacgatctacattttttttttttgtattcacgggttgaatgtacaaacattaataataataaaaaataatttcttctttaagtcttcttttttttcttttggctttatttgtctcatctcttttatttcacgaagaacctgattcttcgagacacgagaaacgattttataacttttctctcttttttcttttcctcttctttaacgtctttttacttttctctcttttctcttcttcttttgtgtatctatctaacaatcaaagtgtgtgaaaatcgtaagagacctttttttgttttgcagagagatgttgaagaagtgagtttttttttgttcttctctattagtccttcttcacctcttgcttgagtggtgagaaaaaaagaagatg

SEQ ID NO: 24082 - DNA, 3003 bp, Unknown
  misc_feature (1)..( 3003): 2750-1469P.txt file - cDNA_ID_2164296; gDNA_ID_2936565; Annot_ID_194590
gatttttgtttttgtttttattttttgtcctacaaacgcatttcaataatgatttttctttgacatctaatattgtctgaaaactataaattgttttctttttgatatttttacgtattgtttccgatgcatatcgtttttgataaccatattttatggagcgaacccaaattaatggttgatgatataggtgattggcaaagtgaacacaaaaacatgtaaagactttgaaacaaattgaatactttaaatttaaattcacatttgagtgatttgagagagttaaaaatctctaagaactattccaagaaaactcacattgccttcattttgtacgtttgtttctctaaatccaataagtatgccttttttataaagcgacaaaaatacttcacagccaagattttaaagtacttgcttggttcataaagaagcatttgctcaccaaaaacaattaaatacgcaaatccttacaacatgcataactcattttttttttttttttgtcaatcgcacatctcatcttcaaggattagctagtaatataggtaagagactttatcttgagaaattggttgtgtattaattggctcgtcgataccgaagatttgatcaaatctagctatgagaattggagaagtaaaatcttactctcgtgacctgcttattatgaatatgcatgagaagtcgtcaacgattggcaatacaaggtggaatagactcgtaaattttgaaataaatataattcacaagttaaatttgagatcatgcgatggcaaaaattaggatatgaaaattggtaatcagttttgaagtaatgcgagtgttattaagagtttaaggtatgtgggttggtcgtcgattacaaatatgaaatatctttaaatatttttcaaactttgaatagaccatatacttatatactgtacatgcacaacatttaggataaagaaaaggcgaaccatcagagatataaactttaaaattaaataccaaatgcgcctaattatgattataaaatgcaaattgcgccgctaattcccgcgattccacgtgatcaaagaaactagagtgggtctgcctgcttcggctctaatgagggtacaaggtatgactgaataagtaaatcctttagtgatttaaattttaaattcgcagatttatgtacgaccaattacgtgatagtataaaatatttaattagttggtataattaatagtagctagtttaagataaaccactaacggtttttatgtactcttaactattctcatgtttatgcaattatgtgtgtgtacatatttatagttttaatttgtaaaacgagcaaaataagctaaataaccctcatatcccgtttagttatatatttttccaaaatttgaaactatatagtactgtattaacgtgaaagctaagttttctacttcgattggaataagctaaaaacctttaaaaaaaaaaaaaaaaaaaaaaaaaaaaaaaagctaaaaacctgaatacagaaataatacattatattcatgtattagtttgggtaaagatggaagacgatcacatcccttcgtcggctaataataatgactcgtgacctagaactagactagggatcgctgtccagcaaaaatcccttaaaacaaaccacatagttttttttttgtttttttttcacacaccacatagttttcttatagttcatattcaaaaagtgtttaagtttctacgatcgccctcttcatgtcgattcaatgttaataccacgtatttctgattagacgaataaataacaaaattatcaaaaaaggaaaaattaacgcacgaaggcgtcgttgaaaaagttatgtcattgaaagtctaatcgccgtgattaagcggtaaacctcacgatgagaccgtccgtgacgataaaatgtcaaaggaatgtgacgttagactatccttttcattttttctcagatttcattttttttttcctttttctttatttcagacttttatctttgccttttttgttttctcaaacttcccatatataatttcatcacaaaatagataaaccgaagtaaaaagataaacggtggggagggttttgcgggggagggacgagtggagaaaaactccctgttctaacacgtggcactctattcaccattgataaaaattaacactatgagcttaaaaagcgagctattttctattttctagtttagttttaaaagaaacaacattttcgctaagaaatttcttttaattaacacatcttaaatttttaaaatctactaaaacgaaaacgagtcattattaaattcgatacgttggttcggcgtaatatattttatactccttcatgcatattgttttgaatcctaaaaccatcgattagatatataatttgcatctgtggacaaaaaaatgacttcctacatagtaaagaaaacaacgcgtcatttaatttttatcatcttacatgtattaattagattgtaataagggattatgaaaatacctatgaaaaatgtagagaataagcatatatacatattaatggaatggaatgattactctaacaaaattacttaaaaaatgtcacctatctatttatccatattcctttttttttctttttttttcaacaatagtttgagtgatatttatgtgatggggattcactcaaactggaagataactgtagtgaagtgcccaaagcaaaagatcttcatgggactctctatgtcttaaaaactttttttctctctctctctctcttaatccaccgagtaaatccagcaaacttccactttcagagatcaaacttgagttatcttaagtgatgaagaaagactaattccatggcggcgtttgcagtttcttaagcttcctcatcatctaccgtcaatctttatagcaaagaaaaggaaatcaaatcaagatttacccttttctttgatttctctttgtggtgtgttgggtgtgtgatgttgattaccactggggaaagaaatg

SEQ ID NO: 24083 - DNA, 3003 bp, Unknown; identical to SEQ ID NO: 24082
  misc_feature (1)..( 3003): 2750-1469P.txt file - cDNA_ID_2164296; gDNA_ID_1620797; Annot_ID_168535

SEQ ID NO: 24084 - DNA, 3003 bp, Unknown
  misc_feature (1)..( 3003): 2750-1469P.txt file - cDNA_ID_2164314; gDNA_ID_1620797; Annot_ID_168542
ggaatcgcgtttgcggttcagatttggtgtattgacagagggggtccagtcttcgttgctgtttaccagcctgttcagactcttgtcgttgcgatcatggcttctattgcgttaggcgaagaattttatttgggcgggtatgaaactataataatattagtggtttatataaatacttgataaaatccaaggtcctaaacaagaataattttaaaatttgttgtgccacatgtcatatttctaatggcaggattattggagcggtcttgatcatagcgggactttacttcgtattgtacggtaagagcgaagagaggaaatttgcagcgcttgagaaggcagcgatccagtcctccgcggagcatggtattgaacgtgcacctgtttctcgcaactccatcaagtcgtccatcacaacaccactactccatcagtcaacggacaatgtttgactactttggacaaatcactctccagctaataattacaaatgccattacccaattaaaagggaacaatggtgtgccgttgtgttttatgacttttgtgtctgctttttttcttagtgttttctcttcttttttttttctaaaaaattattaattacctaagaaaggtttttgaagaaaggaaaaaaaatggtggatgagacatcattgttcatgaggatgatgatgatgatgatagtgatgaagaagactatgtgggagctttggattgagacttttctatatataatatctggctgatatattagtgccattttttcttacatttcttgtggggtttttctttcctttatcatcaatagaatgttataatttgcatttatgatctttagtaattatcactgtcggggatgtttaaaatggattagatcaaacgctttgttctgaactgaagtaaaaaaagatctttagtatttgattaaaatgatctcttaaagaaacagtttttttttacaaatttagtttattatcaaatatccaataaaaattcttaaccgaatgaacaagttaaaaataaaccaacatttaatatatataatataatatggaccaactaagttatagtatggaccaattcttgagttgaaagtccatagattttaacatggtattaaagtttagctaacttgagaaagatgtgttgttcgatatataatttttggtccaatattagaattttgtttgaaatagacggataaaagcattattttaaggagaacgtgttaaaaatttcacatatacacttcaatgctctacattatctttcttggttttctcggatcagcttacacgtcagctttttacatataaaatatcatcttttaatttgatgtaaacaagaagttcattaacagaatttcatatcttatttaccttatacaaataaatttcattaacaaaagaaattcatatacataaggaaaaacacagtgcataagcgactttgtctcataatcgttatctggcataggttagtctaccatgtggattcaagatttcgtatttgaatccattagttaaatcatatatagcccgttattggagactggagaccatatataagccgagatataatgatgttgggccggaataaacgggccaggtttgttataaaccacgccatatagtctatcaagactcgcgaggattacacgttagtacaaagagaagctaagaagaagatgcaaagaaaaccaagagaatagtcaaagacttaaaagcccatagaaacagagacatataatagttacacattgaccgttacacacaacgtaacatcccgttttctttatacagatacattgcacttgatttaatagttttccccatgacacatttttagcttcgagacaaacaactgtcgtttttatgttttttttgatatggtaagaatctgctttcacactatacagacaaaccacatatatagatgtgcacatatataagtacatgtaactggtgtttatttacatatatatcctagttcacggtgactatatttgtatatatatgtagtttgtatatgataacttaacaattaaagagagtctagtgacacctcaaagtggggaatgaaaggaatcccaattagaatagccaccggaaatacaagtatcaaaccgagaaatatcattatctccttcatgaacccatggaaatcctaacgacattgtagcttcttcccatattgaagaatcatccattaccggcaaatccacgtttatatgctcccatgatatctcctctgtcactcttccacatgatgacatctcgttggatgaacacggcgactcagagtcgctgctgctttttccaccggtgttgctgcttggtgtagtctgggacgccggagacgacgccgttttagggtaacttcttaaggactcagggaggttgagatgagcctcaggcccatagagcttacgagctgcggagtcataagccaaggcagcttcacgggaggtgtcgaaggtaccgagccaaagacgagctcctcggttaggctcgcggatctcagcgacccatttgccccaagtgcgttgtctaacacctttgtaagtgcaagacgcgttatcgggtccaccttttcctctcatacaacctttcctcgaactagcttggacggttcgttgtttcttattagcaccaaccatcattacttttggctctatggatgacatgtacggatgttgataactcgaaagtgatattatgtgacgacttttggtgagtgataaggcaaagacatgaggtaatggttaggtgtgtatatatactagaagagagtgatgaaacgtggcgaggagaagatatagctggcgcagacatgacggagggtcgtgtcgagaggaggaagctggtgttgtgtttgtaatcctaacacttgtctcgagagacccttctttttttggcaacagtaatcgtaaaaccagcagagagattgatgagtttgagatttttccaaaaaaaaaaagaaaagagagagagagatatg

SEQ ID NO: 24085 - DNA, 3000 bp, Unknown; identical to SEQ ID NO: 17134
  misc_feature (1)..( 3000): 2750-1469P.txt file - cDNA_ID_2164546; gDNA_ID_1620681; Annot_ID_164433

SEQ ID NO: 24086 - DNA, 3003 bp, Unknown; identical to SEQ ID NO: 19301
  misc_feature (1)..( 3003): 2750-1469P.txt file - cDNA_ID_2164556; gDNA_ID_1620681; Annot_ID_164439

SEQ ID NO: 24087 - DNA, 3000 bp, Unknown; identical to SEQ ID NO: 3596
  misc_feature (1)..( 3000): 2750-1469P.txt file - cDNA_ID_2164556; gDNA_ID_1620653; Annot_ID_163525

SEQ ID NO: 24088 - DNA, 3003 bp, Unknown; identical to SEQ ID NO: 19301
  misc_feature (1)..( 3003): 2750-1469P.txt file - cDNA_ID_2164556; gDNA_ID_2926186; Annot_ID_200624

SEQ ID NO: 24089 - DNA, 3003 bp, Unknown; identical to SEQ ID NO: 19667
  misc_feature (1)..( 3003): 2750-1469P.txt file - cDNA_ID_2164560; gDNA_ID_1620681; Annot_ID_164440

SEQ ID NO: 24090 - DNA, 3003 bp, Unknown; identical to SEQ ID NO: 19667
  misc_feature (1)..( 3003): 2750-1469P.txt file - cDNA_ID_2164560; gDNA_ID_2926186; Annot_ID_200625

SEQ ID NO: 24091 - DNA, 3000 bp, Unknown; identical to SEQ ID NO: 4055
  misc_feature (1)..( 3000): 2750-1469P.txt file - cDNA_ID_2164564; gDNA_ID_1620681; Annot_ID_164442

SEQ ID NO: 24092 - DNA, 3000 bp, Unknown; identical to SEQ ID NO: 4055
  misc_feature (1)..( 3000): 2750-1469P.txt file - cDNA_ID_2164564; gDNA_ID_2926186; Annot_ID_200627

SEQ ID NO: 24093 - DNA, 3000 bp, Unknown; identical to SEQ ID NO: 3167
  misc_feature (1)..( 3000): 2750-1469P.txt file - cDNA_ID_2164629; gDNA_ID_1620629; Annot_ID_162617

SEQ ID NO: 24094 - DNA, 3003 bp, Unknown; identical to SEQ ID NO: 18880
  misc_feature (1)..( 3003): 2750-1469P.txt file - cDNA_ID_2164633; gDNA_ID_1620629; Annot_ID_162620

SEQ ID NO: 24095 - DNA, 3003 bp, Unknown
  misc_feature (1)..( 3003): 2750-1469P.txt file - cDNA_ID_2164645; gDNA_ID_2096296; Annot_ID_195572
catctacagtttctattttttattctttgttaaaaagatagatatatccagtaacatttagtagagtcgcttgatatttgatgggaatgtatttgcatggtatatgtatttgctctggagtcttttgtttcacgcagaaaatttatataaaatacacagagacaagttgtagatgttatattggtaaagggctgcttactagctttctgttttagttagtgttgttcaatttgattgggtttgtaagaagctaatagcattaaaattataagttatggagtactgttttaatgcttctctagctttctgctctttctcttattattagtgttttcctaattgattgggtcatcaggaaactaataatgataaaaatgatgcagtattattcagaaagttatcctcagggatgttcggacaccaagaatggtggtatagagacacagaagtttttcttaaactgtttatgccttttgttgggccgctttgagggaaagaaatttgagagcatactatcagagtatggaatgaagctcgtgcctattcttctacatcaggtatctttcgctattgtttattgaataggggagtgatgacacactttacctgaagttctcttgtagttatattggttgttctgctagttatgctagaattcatttcttatattggcttttatgacttcctgctcaactcataattttgttctgctcaattgattttatgattctaacatatcgtgagaaaattaatcttgaagggttatatatatacacccatgtgatcatcttagtgcttacattcttcctttgtattcgaagcttcgcagtaacaatgaagagatatcagaaggcgttgtggctatatttaaggcagtcttctttaaattacaatctcagtccggagacagcttctctgatacaatgtgcatggacgttgtgataccatcactgcttcaccttcttgatgaaagggatggcgcggccaaagctgttagtgtcctgctggcagactattgttccaagtatgtctattctctttccttttggtactaaatcatgttagtagctttctagttaccagtgacggtacctagtttgtctctgacttaaagaaacattcaccagaaatgcaggtaatagctgtctcagtgaaattctacaacgccttgcttctggaactactgtgcaaaggctgaattctttggatgtgatatcagaagtaatccttatgtcaaaagattcatttccttctcatataccctggtatgcaatcatttatgtttttcgtcccaattttctatttctagcttttctgtatcttctttatttgcattctcatcccctcagaagtcagaatcattttctgctcttatttcaggaaagagattgcggactgcttgttaaagtgccttgatgacgaggaaacatgtatctgtaaacaaacttcagagttgctgaagtcaatcggttggtcttcttttagcctttatccgctattcatttggaagcttttgtttgtggccattattaatttctggtattggcagtcttatgtctcttatgacctctaaatatggcctttcttcatttgataagatgaattttgctgataataatcagtgttttgttaaaaggaggatttctgttaattattcattattcagatgagaaaaacttataaagatccaatttatggggtccaaaacttgttattccatattgcaatggcagttatagttcatattggataacatttattttctgctttcctatataatgaagccaatcaactgaatgatttttgttatcgttttttcttccagagccatcatttgtgctaccgaatttagtaaacctcatttatgcacccaatggaaaagtacaatcatcagctacagaaaccttgcttggggtcctgaaacaccataaggaggattttgatgttatatgtatgttgctgaccagtcttaggtatcgtgctctgtctctttttctcctttccccattgtatacatagttgtttgtttattcccatttaccctaagtgagatgtgagaatacactggattcttaggtcaagtttgtaaaagtaaacttacgaatgctcatacgtgaaaatattgacctgactacctggtttggtttttaattttggttttgcattgtatcaagctaatattgaaaaaggctttctgcttttgatctccacttttctcttgtagtaatatccaagctttggatactgcagaaagtaatggacattccactgaaggtatttggcttcttatttcattaccataggctacatgcgatacagaatctgtgttaaaatttgtcttatatatgtacaatccgaacgtattatataaaattattacaacacttcaaatttaagctggataagaaataaaattactggaatgtgaaacttaaacgatgtgaaatatgaactagtctggctgaattacatagcggacactatcaagttattcttggtcaaggcatgctcatcatcttcttgtactgttacaggtttaacttttgacagtgatcgagtgctaaagctgatcccagagtgggctagaagtgtaagtacaagaatacgtcatgcttgctttgctatctttgaaatcaatccatttttgtttctaaagtgcatgtataggcaccatttacgaactgttggtgcactactgaatagaaaatggtaactgaactattaactctgaaccttcaacacaaactttttcaggcattggttgtcccttttttcccttccagtactatttccttttatctaattgttttcttgtgtatgtgctgggaaactcttcgcatgggaatgaccaaagtgaccaaagcttgtgccagctataattaggcaattagaatatatttctgcctgttgactgaaatcaaattcttacaggtacaaaactggaactcactgatcggacctttgcttgacaagatgttcttggagccatccaatgccatcatg

SEQ ID NO: 24096 - DNA, 1804 bp, Unknown; identical to SEQ ID NO: 3166
  misc_feature (1)..( 1804): 2750-1469P.txt file - cDNA_ID_2164645; gDNA_ID_1620629; Annot_ID_162627

SEQ ID NO: 24097 - DNA, 3003 bp, Unknown
  misc_feature (1)..( 3003): 2750-1469P.txt file - cDNA_ID_2164714; gDNA_ID_1620622; Annot_ID_162342
atttcctggtctaacgctttccctctgcgtgccccgttccttccctcgcggttactcttccgttttatgtttttttttctgagatggtcaattttcccgtcgtctctgaattttccctttttctcttcttcactccaccgccttccccgaatcacttcctctgcctgatctaattcaatctccttcctagctcaaagaagtcaatttacacgagcagatctctgcactcaaaactcctggatcttcatttctgggcttcaatttagagtttttttatattaaatgggttggagatacaaagctggtctgttcttgattggcactgttgttatcatatgggtcacctccgctgaagttactcaggtattcattcattgtctcttcaattttgtttaaagctttcatcttttgaggttatggatgtttcatttggatcttattccattaggcttgttttcaatcatgttcttcgagctttgaattagcggtttgagtttgatgaatcaaatggcaaatgcaaattcagatctctgtttaaatggtttgataatttattgaatggtttgacttcaattttgaccaggatatctttacagcctataagcagccatttgcagtcacatatcttggagcttctcttatgattgtttaccttcccgttgcattcctcaaagactggctttgtcgatatttagatcgacgctcttccaaatccaataaaattcccgctttgaccgatgattcctcggttgagctcggttctcctttgaggcataaaatcattgaaatgggacttcaagggactataactaagaaagatagtgaggaacacctttcatcccatgaagaagaagatgagagacccttgatcggtaaagttagagaagaagtgcagactctgaaacagaggaaagagatcacgactaagcagattgcaatgtacggcctttacctcgcaccaatttggtttgtaacagaggtgaattttctttgatatgctcgttgtattgttttgatggtggtgcctgaaagtgtcctcttttaaaccttggtattgatatttgtttgctgtttttgatgatacagtatctgtccaatgctgctcttgctcgtacaagtgtggcaagtactactgtattgtcttcaacctcgggactgtttactctgttcattggtgtatttttgggccaagataccttgaacctgtcgaaagtagtggctgtatttgtcagcatggctggtgtggtcatgacgacgctagggaaaacttgggcttctgatgagtcgcaattaaattcttcactgtaagtttttcatcctaattcgttcaccatgcatctttttcttatatgtattcaaaagctcaccctgggctgcgttttaaattgatagctcaatttgtctcattctcatagcatttcttgattccatgagttttccagtttcatcaaccatatttttttaacgtacagttgatatttgtgtttagcaacggggaacgatcccttatgggagatctttttgggcttctctctgcggtctcttatggactttttacaggttagaaatgattaatctttaaaggtttagagtattagtgtgttggggaggataacctcattgatggcttgtacccttctgatattgacaacacagtgcttcttaagaagtttgccggtgaagaaggagaaggggttgatgtccaaaagctgtttggatacataggattatttacacttgttgctctctggtggcttggtatactaatatcttccattcatttttacaagtgtatcatccgagaaacataacatatgagacatggaaaagttgactcttattcaaaaagtttgttttttggttgtatgtttcagtgtggccattgacagcattagggatcgaaccaaagtttaccataccacactctgtgaaagttgatgaagttgtcttagccaacggtttcatcggaagtgtcctctctgactatttttggtatgttttaatgatttcagctattacaagataaagtggacccaacaagcaatgttgagtttagctacaagtgtcttgtttattgctaggctagatcctataaagaggtgtgtaattacttgtttagaaaataacttggctgttttggtgcttttgcaaccaaagggcactttctgtggtgtggacaactccgctggtagcgacactgggcatgtctctcacaattccgcttgcgatggttgctgacatgatgatccatggtcgtcattattcagccatttacattcttggctctactcaggtaactaaaacttatattccatcaacaacagagaatgaataatttttcctgatgctcaagaattagcatttggtttattttgcaggtgtttgctggattcgtaatagctaacatatcggatttgttctcaaagaagcttggattgtagcacatatgattctttttttttggttgttttgtggtatttctgggtagaaaatgtatcctagaagattcttggttggaattgaaagctaaaagggaattttccctgtttaatggatgaaagataagaatgtgattaccaacgtttttgattcccatgtgcacgtctttggaaaaagaaagtgcaaaccagagagagttgttgtctgttgagcaaagatgagtgaaagaaaaaatcaaattcatgtttgaactagctcgtatacatgaaaccgaactaataaccttgttggcatagataaaatatttttttgatctttaaaactccatcaaccaataaccttacgttgacagatatgaaaaaaattctatgttaatgttgttttattattctaaattaaaagccagtaattgataattacgattattggttcagaacgaaccttctttctgagccagaaagtttagttcgccttgttctgtctgtgtttcttcctcttcccctgaaatcgaacgatttataaaatcgtcgtctggctttcgacgatctgctgacgaagaccatg

SEQ ID NO: 24098 - DNA, 3000 bp, Unknown
  misc_feature (1)..( 3000): 2750-1469P.txt file - cDNA_ID_2164714; gDNA_ID_2926201; Annot_ID_201867
tcctggtctaacgctttccctctgcgtgccccgttccttccctcgcggttactcttccgttttatgtttttttttctgagatggtcaattttcccgtcgtctctgaattttccctttttctcttcttcactccaccgccttccccgaatcacttcctctgcctgatctaattcaatctccttcctagctcaaagaagtcaatttacacgagcagatctctgcactcaaaactcctggatcttcatttctgggcttcaatttagagtttttttatattaaatgggttggagatacaaagctggtctgttcttgattggcactgttgttatcatatgggtcacctccgctgaagttactcaggtattcattcattgtctcttcaattttgtttaaagctttcatcttttgaggttatggatgtttcatttggatcttattccattaggcttgttttcaatcatgttcttcgagctttgaattagcggtttgagtttgatgaatcaaatggcaaatgcaaattcagatctctgtttaaatggtttgataatttattgaatggtttgacttcaattttgaccaggatatctttacagcctataagcagccatttgcagtcacatatcttggagcttctcttatgattgtttaccttcccgttgcattcctcaaagactggctttgtcgatatttagatcgacgctcttccaaatccaataaaattcccgctttgaccgatgattcctcggttgagctcggttctcctttgaggcataaaatcattgaaatgggacttcaagggactataactaagaaagatagtgaggaacacctttcatcccatgaagaagaagatgagagacccttgatcggtaaagttagagaagaagtgcagactctgaaacagaggaaagagatcacgactaagcagattgcaatgtacggcctttacctcgcaccaatttggtttgtaacagaggtgaattttctttgatatgctcgttgtattgttttgatggtggtgcctgaaagtgtcctcttttaaaccttggtattgatatttgtttgctgtttttgatgatacagtatctgtccaatgctgctcttgctcgtacaagtgtggcaagtactactgtattgtcttcaacctcgggactgtttactctgttcattggtgtatttttgggccaagataccttgaacctgtcgaaagtagtggctgtatttgtcagcatggctggtgtggtcatgacgacgctagggaaaacttgggcttctgatgagtcgcaattaaattcttcactgtaagtttttcatcctaattcgttcaccatgcatctttttcttatatgtattcaaaagctcaccctgggctgcgttttaaattgatagctcaatttgtctcattctcatagcatttcttgattccatgagttttccagtttcatcaaccatatttttttaacgtacagttgatatttgtgtttagcaacggggaacgatcccttatgggagatctttttgggcttctctctgcggtctcttatggactttttacaggttagaaatgattaatctttaaaggtttagagtattagtgtgttggggaggataacctcattgatggcttgtacccttctgatattgacaacacagtgcttcttaagaagtttgccggtgaagaaggagaaggggttgatgtccaaaagctgtttggatacataggattatttacacttgttgctctctggtggcttggtatactaatatcttccattcatttttacaagtgtatcatccgagaaacataacatatgagacatggaaaagttgactcttattcaaaaagtttgttttttggttgtatgtttcagtgtggccattgacagcattagggatcgaaccaaagtttaccataccacactctgtgaaagttgatgaagttgtcttagccaacggtttcatcggaagtgtcctctctgactatttttggtatgttttaatgatttcagctattacaagataaagtggacccaacaagcaatgttgagtttagctacaagtgtcttgtttattgctaggctagatcctataaagaggtgtgtaattacttgtttagaaaataacttggctgttttggtgcttttgcaaccaaagggcactttctgtggtgtggacaactccgctggtagcgacactgggcatgtctctcacaattccgcttgcgatggttgctgacatgatgatccatggtcgtcattattcagccatttacattcttggctctactcaggtaactaaaacttatattccatcaacaacagagaatgaataatttttcctgatgctcaagaattagcatttggtttattttgcaggtgtttgctggattcgtaatagctaacatatcggatttgttctcaaagaagcttggattgtagcacatatgattctttttttttggttgttttgtggtatttctgggtagaaaatgtatcctagaagattcttggttggaattgaaagctaaaagggaattttccctgtttaatggatgaaagataagaatgtgattaccaacgtttttgattcccatgtgcacgtctttggaaaaagaaagtgcaaaccagagagagttgttgtctgttgagcaaagatgagtgaaagaaaaaatcaaattcatgtttgaactagctcgtatacatgaaaccgaactaataaccttgttggcatagataaaatatttttttgatctttaaaactccatcaaccaataaccttacgttgacagatatgaaaaaaattctatgttaatgttgttttattattctaaattaaaagccagtaattgataattacgattattggttcagaacgaaccttctttctgagccagaaagtttagttcgccttgttctgtctgtgtttcttcctcttcccctgaaatcgaacgatttataaaatcgtcgtctggctttcgacgatctgctgacgaagaccatg

SEQ ID NO: 24099 - DNA, 3000 bp, Unknown; identical to SEQ ID NO: 3052
  misc_feature (1)..( 3000): 2750-1469P.txt file - cDNA_ID_2164733; gDNA_ID_1620622; Annot_ID_162352

SEQ ID NO: 24100 - DNA, 3003 bp, Unknown
  misc_feature (1)..( 3003): 2750-1469P.txt file - cDNA_ID_2164733; gDNA_ID_2926201; Annot_ID_201858
cgtttttaaatgcccaataaatttgagaaaaaattgccaacttgtttatgagcttattttctttttcatggatcccaagtcttttgtgtatagagattaaaaaaaaatgacattccttcatgtaaaaaagaaaaaaatatctgggttttaaaaatatctacaatgagtttaatggtaaatatacttatcataatttggagaataaagacctaaagaagaaaattacactctagaacagaagttttgtaagcaaatcattgctcacaaaacttgtgaattacagaattacaggctcttgtaggttgagttattttatgcttcattttggttacaggctttatgttgacattaaaacaaagagattgaagtagagtccaaaaaaaaaaaaaatatatataaatataaaattcaagattaattaaaaaatattggtcttcagagagataaataactaggggaaagagaaaacagtcttctcttctccgatcccaaaaacgcaggaaaacaatgtcgtttaacagctcccacctccttcctccacaagaagaccttcctctccgacacttcaccgatcaatcacagcaacctccgccgcagcgtcacttctctgaaacaccttcgcttgtcaccgccagtttcctcaacctccctaccacccttaccactgcggattccgatctcgctcctccgcaccgcaacggagacaattccgttgctgatacaaacccacgctggctctcctttcattcggagatgcaaaatactggagaagtacgttctgaagttatcgacggagtcaacgccgatggtgaaacgatactcggcgttgtaggaggtgaagattggcggagtgctagctataaggcggcgattttaagacatccgatgtacgagcagcttcttgcggctcacgtggcttgccttagggttgcgactcccgttgaccagattccgaggatcgatgctcagctcagtcagttgcataccgtcgccgcgaaatactccactcttggtgtggttgttgacaacaaggaacttgatcatttcatggtaagtttcactttctaattttgcaaaattttaatgttttgaactgtgaacgattcagccatttatttctctttgattatctgagtatagcaaattcacatttttgtgtggctcattgttcccgcttctcgagtcttgcaatcgatatgatctttgcttctacttttttggttagcttgtaattcgaattatgaactttgtctgactcaaataagttatatttgttgcataaagcttcttctttgatgactaatagtttgtctgattcttgctgaaaaggactttgcatgtccaagagaaagaaagcataatctattttttgtaacgttctgtttgtatgtcttatggattggaatcttacctttgattattatgttgatgcagtcacattatgttgtcttgttatgttcatttaaagaacaactccaacaccacgtttgtgtccatgcaatggaagccattacggcttgttgggagattgaacaatcactgcaatccctaactggtaacgtcccaaatcattttttttttttgttattgtcttcttgctttatgtgtgtcttggttttatcggtttttctttgttctggtttgtaggagtttctccaagtgaaagtaatggtaagacaatgtcggatgatgaagatgataatcaagtagagagcgaggtgaacatgtttgatggaagtttggacggttcagattgcttgatggggtttggtcctcttgttccaaccgagagagagagatctttgatggaacgtgtgaagaaagaactgaagcatgagcttaaacaggtaattgcttgatcaagctgcaatggtacatcaaactatacaaaacacattgttaaatcatgttgctcggtttcttttttcccctgtagggtttcaaagagaagattgtggacataagagaagagataatgaggaagagaagggcgggaaagttgccaggagatacgacttctgtactcaaagaatggtggcgaactcactcgaaatggccatacccaactgtaaacaccttggccgagaagttttgttaccacattgtcaaaagcaaggttttaattcgtgatttggttttggaattgcaggaggaagataaggcaaaactggttcaagaaaccggtttgcagttgaaacagatcaacaattggttcatcaaccagaggaaaagaaactggaacagcaactcttccacgtcatctactctcaccaagaacaaacgtaaacggtaaaacaagatccgttctctttttcaaattgcgcaatttcattaaaccaacccggtcaagatcttcttttgtaaccaaactcaggaccgggaagtcgtaggtgacatagcggctaactagaggatggttctttgccatgtgaattcttgggaaccgtatatgaaagaaacgaatccggttctatgctcgtacagagtgtgttatttgtatagtggataccggttagcctatgaaaccggattctggagtccaaattgttgtttgtaacgacttagtagtttttggaagtgatctgtttcgttggtttgcgtcttgtaacgaacgcttaagcaagtgtgggttttttcttgtaaagtgtcaatatgttcgtttgtaatgaatgtatcaagcaatatttatcataattaaactagcttgaaatgtagtattacgatgttgttgtgttcgtctgatttctctcaccggttgatgcatggttacgttcggctcggtttttatatggttcaatttttaatatatcgataattttaaatgatttcacttgtattattaacaaagcccattggtatttggcccaaaatctgaatgccgacttaatgacttgtttcttcttccttcagcttctccaacgaacggcttttgttttagttttttttgcttacctttctctcgacttggtctacttttgttactctttgagttgggtgattatg

SEQ ID NO: 24101 - DNA, 3000 bp, Unknown; identical to SEQ ID NO: 8129
  misc_feature (1)..( 3000): 2750-1469P.txt file - cDNA_ID_2164995; gDNA_ID_1621194; Annot_ID_174672

SEQ ID NO: 24102 - DNA, 3000 bp, Unknown
  misc_feature (1)..( 3000): 2750-1469P.txt file - cDNA_ID_2165483; gDNA_ID_1621136; Annot_ID_172663
tcctgaagacactaaccaaatgcatcaaaaacaataaggaaaaataaagatatgtacaaagatagacatgggattccctcccaagtgagcctcttttatgtctctaagcttgacttctcatactcattaggctcaaggtggattggagagaggaaatgaggtctcctctccttcttgagtagagtgatcatcatactcattaggatttcttgacaagtctgcaattgggtactcagtggccatgtcctcatagtaagcttctttttttattaagatagtcttctcctctataccattccgatgtgaattcacatccttctttgctgaccagaatagtggctccattgtcaggggcgtccttgatgttgagtggtacttggttgagttttctattgagctccttgatttgatccttcagctctttcacaatatgtgttggcctttgtatggctttgtcctaccatttagatctccccttgagttctaaccaatcatctgacgtctgaatgcttgccttgagttgtttggtcgagcatgagctttcaggacaagttggaggcttctttgagttgttggtggaatcatttggtcgagcatgtgttgaacttacttcattagcttttataatcttcgtgtcagactccatcaagcccttgtaaacctgtgagccaactgctgccttgtgtgactctaatgacttctcagaactcaaagtttcactagggagatacccaggtttaccactcttagtcaaaacagttttttaattatttgcttctttaagttccacttgcagttcaccagctagccgatccacttccttaactaagaaggtctgttcttctattgtcggcttcttcatagcatcattgatatcaaacttcatttcaaaattcttccccagattaagatcaatctttccttgcttaacatctatgattactccaactgtagctaaaaacggccttcctaatatcaagggatcttttggttcttcatccatgtttagcactacaaagtctgtaggcacctccacatttctaatcttgataggcaaatcttctaataacccatgaggtagtctaacagacctatcagccaagatcaaggagatattgcagtttttatacttgttgaaaccaacctcttagctactgagagtggcatgagatttactgatggtcctaggtcacaaaggcatttattgaaagtcaatgaacctagggagcatggtagagtgaatgaaccagggtctcctagcttttctgagacatcgttctcctgtatgatggcactgcactcatggctcaaaactgttgttttctgaacctcttgaattctctccatgatcaagtctttgaggaacttttgggaatccgggatatgcgtgagagcatcagcaagaggtatccttaattcgactttcttgatattcttggcaaacatagctctatacttatcttctacctctttcttgtgtcgaccaggaaatggaagtggaggcttgtaaggaggaggaatgaatgctatctcattgtttttagcagcaactagttttagagcagcggatgatgttaatggattggttggtcgagtatcacggtcgagtatgggctcgagtacttcagttggtttgtcaacttgatcttcattgagactaaaatcctccccatcttgatatgcactatcctcagtgactgacttgggtctctctctagtggataactccttatggtgatagcatgaacattaacatactccttgggattctgaattgacttccctggaagtcccgtaactttgggagaagaggtagatgcggattctccttccaagtatctgactttagaattcaacgcctcaacttttgcattcaggtcattgtagctgcagtctagcttttggtgcaattcagatatctttttagcaatctcaatggagctagatacttgtccctgataagtgtgtattttgcaagttttgagcatccatttgtcatcactttagcatcatatcatcactgttttataccatttctcatcatttgtcatcactttaattacatgtttaggatagatttgcatgcatattgcatatttgcgttgatttcatgtgatttggagctgttgacgagctatctggaagaagcggacctgatcatgtcaaaccactcgaccccgaggtcgagtaggagcttcaagatctcaacagatcactcgaccccctggtcgagtagaggacatcactacttcaccacatcactcgaccccgaggtcgagtgtcttcatcccatcacctgaccatcactcgaccccgaggtcgagtgtcttcaccttcattgccagaccactactcgatctcgccactctaccttgaagtcgagtatctccatcaccaccactcgactacatactcgatggcaagcttcagagttttcttcatcccgcactcaaccagacactcgagcacaaggaagaaaagaagctattcactcgacctcccactcgactacgtgggttgagtacagttcttaatccgtcccaatacttcgtcgttttaagtattagggtttcggaatatttggctataagtagcatgtacttcacattttcgcagacaagtttttatctagttttattccgcagaccttgtgttctagaccttttgtaatccggatttttctttatctattcagtattcagtatttagtttctgttcttgatttcgtttactgttgttcattctgttatcatcctgctgttacacagttgttatcatgttttcaagttgttcaacgtttatgctttctgttatgatgtctgagtagtgaataggtttctgaggatgggttagagtagtgtagaattctcagtatgctaggtggttgagtattgattgatagatcccttctggattagttgttcttaatgcctattgctttctgatcaactggaatttgagcccagacatttccgcgcccaataggtgttcgatgaaatg

SEQ ID NO: 24103 - DNA, 3000 bp, Unknown; identical to SEQ ID NO: 15442
  misc_feature (1)..( 3000): 2750-1469P.txt file - cDNA_ID_2165774; gDNA_ID_2926134; Annot_ID_197117

SEQ ID NO: 24104 - DNA, 3003 bp, Unknown; identical to SEQ ID NO: 21608
  misc_feature (1)..( 3003): 2750-1469P.txt file - cDNA_ID_2165774; gDNA_ID_1621172; Annot_ID_174023

SEQ ID NO: 24105 - DNA, 3000 bp, Unknown
  misc_feature (1)..( 3000): 2750-1469P.txt file - cDNA_ID_2165926; gDNA_ID_2926137; Annot_ID_197252
ggagctgatagaaagggacgcatttatcggtacacctggatatgaacctgttgagggcggcgatacggccggttagacgttggacctcccgtgccgtttttggcgatggcatgtcgatgaaggctgcaatctgcttaggattggccttgatgcctctttcagttactaggtatccgaggaattctccttagggaactctgaaagagcatttctcggggtttagcttcatttcaaatttgtttaggattttgaagcattctcttaattgctggacgtgttctttttcgcgagctgacttgaccagcatgtcgtcgatatagacctctatcgttttacctagctggtcggcgaacattctgttcaccaatctttggtaagtagctccagcgttttttaaaccaaagggcattactttataacagtaggcttattcctcggaagttcgcacttgaccaggcgaagctgtctttattttctttgagaaaggttatgagatcctctcgtatcgctgggtcgaggtcttgacctatcccaaagcatcgtttgggatctgattcgtctatgtagacctgtgttatcaacggttttcgaggtctgctctaagaagggtcagaggatctgactattttcattttcgtgagtttgtcttctatcattagtactacggggtcaacttttttgataagctcgtagctgcccatatagcactttcgggagctacgttggctgtcgtatacgactgctatccccttgtccgaggggaatttaacgcattggtggtaggttgatgggacggctttcatggcgtgtagccatggtcttcccagtattgcgttgaaaggagctttcttatcgactacgaggaaactcgtgagtcgcctcactcctcgtgcgacggttgggagctggatggttcctagagaaaatgtcgtatctccagcaaacccggtaagtggcgtttttctgccttgcagctcggaatcgaggtgccccatttttttgaaggcctcgtaaaagagtacgtcaactgagcttcccgtcttgatcattatacggaaagttcatagttgcctacatcgattcgaataacgagagcgtcatcgtaaggtttatcgaggtcggtggtttcgctttcccagaatgtgatctggtggtcaggtcccatcatcgggctcttgccttttgtgtaagaatctgctttcctctgatgagttttgatcgaattgattgagtcgttgcagagctgagaccctccaatgatgaaatcgatgcgtttcggggagaggtgctcagttgcgcttctgcagaatttcgagaggcgtaatggaaacctcatgtttttcttatgcggggcggggggaggtgtggtgactgaccttcctgtcctgccacctagatcgagttttgcaaagactaggtctatgcgttctctcctagcaggtgggggagagtcacttccctccggtgttcgttcctgtttcttttgcttgggagtttgctcctcctcctgttcgtcgggaggaggggtttcaactttggggtttgaaccttttttagttttacccccagctgcgattaactttttaacggcgcgacactcctcggtggaatgtcctctttttttgtggtacttgcaatattttccgaggtcaagtttctggactctcgtcctcagctgcctcttctattgcgaataaggtatgctgcccctgcgtttagttttcctttttgaagggttttttaattgcaaggggagcgttttgcgttttagattctttgaatcgtaaggccagcacagcgagctcctcttcggctttggcgaagtggagagctttgtgaagggcattgtctaaagagaccggttatctaacagtgagttcctcacgaaacctagaggagaaccaccactacaacaaatatccacattaatagcacaagaggatagctcatttttcgttactgctatgaaaactaaatttttattttgattattttgtaatagcgtttgataaacgctatgatagaaaatcactaagcgggaagctaaaatcatctattccgccaatacttatgcgaaaaaattcacttaagcgccttatgtctcagatctaaaaatattaagcgacaaaacgctaaacacatcttaagaaaaaaaaatcccccaaattgattccttcaaaccctaaatttcttcttttgtccatctctaattccacttcacacatccaaaattctacattgttcttcacctttctctcctcctttctctcttctttcactcatcctctcacgtttcagttagagattgctttagttggaaaaggtttgttgatttgtctctcttttccctttgaatctatagcttctaatccttgtttgttggttgtgtctctcctctgttggttttgtctctcctctttctttgaatctgcagctcaaaagggtaacgtttttgaagtgtttttgtgcacacaagatgttcgacgaattgactgtgagacaaaaaccaagaaacgactcaacatctctttctctgggttcgtttctctcttctccaaggttgtggtctatctcaaatcactatgattcataaatctaattacaaatactttatctataacatcttaagtgttcttcctcatgttgaattatgttgtgtgtatggttcgacattgcattcagccgtggatattgtagtatcttaggtcattaagcaaggtctctttgttagcatatgtagcataaaaaggatttcgttttgttttttatgttgtttggtgcttacttggttaacttgtttcaggtaatacttgaagattatggctttatgtgagtatcaagattccttcctaagtttcttttcctctatacatattctttcttgcttcaatattgacaatatacttagcttcaattaagctactaggagactgagttttggttaagaccaaggagacagagaaaaagacttgactttcgaatatagagaattgagagatg

SEQ ID NO: 24106 - DNA, 3000 bp, Unknown; identical to SEQ ID NO: 24105
  misc_feature (1)..( 3000): 2750-1469P.txt file - cDNA_ID_2165926; gDNA_ID_1621186; Annot_ID_174451

SEQ ID NO: 24107 - DNA, 3003 bp, Unknown
  misc_feature (1)..( 3003): 2750-1469P.txt file - cDNA_ID_2166021; gDNA_ID_1620790; Annot_ID_168244
cttctggattaaacgtacaccacttgttgggtagatacggcacgttttgtgcaccaatcaagaacttactctgtccttgacctgaaagatctataggaaactttggttgcccgtcgaatttaaatattccccaatggcgttcgaacggtcccggtgctatactttttgcatcctcgtcgagtaatccgaacaagtatacctcaatgtaggttggtctcaatggagttcctttgtttgttccaagcctcggtaaaagcccgttgtagaatctgtaagcactgcctgtgaaaaaaccgttttcaaaatcaaaactaaaacacttcataaaggataaaaatccatctaaagaaggtcagatatcaacctgcattagcgtgtttgtcaccctctgttggccaaccaacttctccaacgattattggcatatctccgtgaccaacagctttcaaagacgacaccaaagtatcgaaattggcatcgaaaacgtttgtataatcaataccgttgtcgtttatcggttcagcaccatcgaagaaggcgtagttgagtgggaaatcatcattcccatagagacttaagaaagggtagatgttaattgtgatgggagcattgttcttgccaagaaagtcaacaatctgagtcatttgaccgatgatatcgggacggaatcttcctgcagatggaacgggattgcttgctggtgaatcgtatacatccgcgtttaaagggactgttgctttgacagagtttcctagtccggcttcatttaaagcgttttgaatgttcgcaagtgcagggaatgtgaggtttatgaacgatccattgtatgatttgaggaatggctcattcccaacagctacaaacctgaaacacatccacaagtgattagcttcactgagacatgtaaacacatttttctctaaacatgttctgcattttgacagtactgttaaaagatttgacttttatagatataaatacattttagtggaaacaggttctgcatttgacagtagtgttaaaagatatttgatttcataatcagacaacacagatttcaccagacattgaaaatcaaccctaaacatccaatcttcagaaacaaacatatatagctagacacattttgtctatagacataactcactcatggttatgcatttggcaatgtcataaactaaacaaccatgggtttatgaggtttcgacaaacaaacacaaagaatgttaattttgacgtttagacaaacactacaaccaatcaataacaataacattgagacagaacagagaggaagagagacaaactcacgtgatattgacaccaccatcgaagttataacgagtgacattcttacgaacccaatctttggctcggtcgtaactagtcataaccttaagctgatcattgggaatagcgaccatcacttcaagacccgatccagcgagtgcacccatggttgtctcgtccgcatcaaaaagcttaactttgttgatgttattgtctttaagcatctgaaccactgtctttggaggtagcttatgtgtagccattgttccccaattcacacccaacccatttaccaaaatacccaaatgaccaattacgattacgaatccgacgacgagagccaacagattcgacatcgattttcacctgagaaagatcgaaaaggtgagattttaacccaaaattgtaaaattaacagtttcataaatctaacatttgggaaatgagaaacttttagaggacccattacctctccttagatatggagactgataaaacgcgtacagagagagaagaagaaacgcgtggagactgtagagaaacctaaaaaggtaaactttttggttttggggaaactaaaagagagataaaagttggagatattttcggtgagtttcgttgctaaatgaatgatagtactatttaataatgatgtatcatgacgttgtgggtggatttataacggctctatttctccggagagaacatgtcatgggccaatgctcgttcagtctttgtcctcgtaacaactaataaacaaattagttcatgggacatatggttaccgacataaaaatttcaaaattttggtgcatctgtgatctaattccttgtgatgatttgatcccaacccaaaaccgaatcgaaacaaaattaatcagatcatattttggtttaatcggttaagtgtttctatattagaaaaacgaatttcgatagaaccttagacttacattttattaagagttttaaaccctttgaatcgagattacctttatatacaaaaactgaacctgaactaaactcatatgagatggtctgaactacattttgtttcactttcggtttaggggagtacattcttacattgtgaataatccattacgaccactttaaccgataaattatgaaataaaaatggtaagtgagttaacgaatgataaatttattagtaaaaacaaatagaaactaattacatacataatataaggtctattttgtcatgtatatatacaattgtcttctatttcaaaaaaaataatttaaaaaaaaaaaaaaaaaaaattgtcttctatttcaatttcaacgatgatagtaaaatatgataaagcaatgcatccgaggctccggaccatccgttttctataagtagtaagatgaatttattttctattttaaatattagttattcagaaaatttgaagaccaatcaaaaacaaaagattaaacaaaatcatggttacttattatgtggtgataacaataacataaggacgacccaagacaacttcttatgattataaaaaaaaagaaaaaaaaaatcttatgatcagaaaatgataatttgataagctcgtttataataaagcttgacaattctgattaactttcgttggtggctaagtccactacaaacttcatttgtcttatcttttcttctcctttctctccaccatttgtcttatcttttcctctccttactctccatcaatg

SEQ ID NO: 24108 - DNA, 3003 bp, Unknown
  misc_feature (1)..( 3003): 2750-1469P.txt file - cDNA_ID_2166029; gDNA_ID_1620790; Annot_ID_50460
tagggacataactaaatgtttagtgtaaattatggtttggtttggttcggtttgagttcagttaattcggttcagttcagtttggctaggtttggttcagtttggctaggttcggtcaaaatgcacatccctaatgaaaacatagagacgataagagtcaaaagtggtaaaaactgtgacatatctaaaccgctatgtcatagtctagacaattattgcagtcgctcgtagcacggttctcaattaagattttagcttgtacaacaggcttggttatgatttatgaagttaccttggtggtcgaccatgtgggtgtgtgctgaggtcaaccacagatgaggttagatgagggcgacccaaaatcaatcttttaggccaacttcttcctttgcacaagtttgccgccaaattgacatgtcttttatacttaagagatttgacattcaattatcaatgtttcaaaaaaaaaagatcattcaatttggtacttcaacaaatgtcaaatctcttaagtacatgtccaatgcgctgttttgcttcttctttttttgcattttccacgttctcgacatgtaaagacgtaagacacacgacaatactagaagtgaaactatatctttaggtcataaaaccgcataaaacgattaaattattataaaaaatgtatggcaattatgtgaatttcaagcatagaagttttcttcctttattgtcttttcatgattgaaactcacaatcgttatagtatacgacacaactcattattatttttaacaagggtttagaacaacataaattggttttaagatacttaattgtcatattaactaagaataatttgtgttctatttccatttagttatcataagtgaagatcagtgtttgaagggcagtgagtgaaattaaagaaactaaaaatagccatttgtttcttaatgtccacctcatccttgatatatatctcaatacgttttataatttgcttgtgtggttgggagagagagaaatgagaacgtaaaagaaggaaaacacgaaaacaacacaaaaggatttggttggtttgcttttaaaatgctaaatgacagatacatacgggtaagaaggcgtgactccctctcctcccctcccactttttcatcattggccatttataaatttaattctcaattcactccaaatctcatcatctcacgtttctttatcgatggagggttcgtctacaagccacaaacgcaagaaaaatgacgagcatactaagaagagcaagaaaagacaacatgtgagagccaacaatgtagaaaacaagatggaagagaagagaagtgggagtaatgaagagagtttgggagtttttgagttcccgtggatgaaggagagtatgatctcaacctcacttgattggagtctaccggaatctatgtttccggtcttagatgatggtaatgagatgtttgaagagattagtgatgtgagatggccagtgaaaagggttagtaattataggttggagtttgaggcttttgaatgcatttggacttctattttggattagattgaaatatttgttagccatgtacttcaaattgcattgagagtctaggaccaaacatttttcatttttgtttttgtgttgataataatgtgtttgttgagatgtaaaagagagtagaaggaacggagtagtgtttggttatttagatacgacggaaaagtaagggatagaggagcaacatttctttctgcaaagaaaataaaatgaattttgcattagtatacatgtcgacgttaacatttcctttacgattcaacttcgtcactcgccaagctttgtggcctccctccaggacatgacaaaactaagcaaaaacgtttcactgatggcatgcatgaagattccatgtttgatcatcgacacacaaccactgtttggaatcatatattttctgacctcaacttcaacacaagacccagtattaacaaagttcatgtaactgtttgataagaaaaattgatgttatcttatccataactggaacaatgtgctgtgaaaagttgaaaatcctgaatgttttgaccaattcaaggctaaaaacaaagattgttaacaaagtttggataaaagactgagccaaaaattaactcaagataatttaaaagctcatgccaaaattttggaaacaaataagtataaatcaacgatataacttaactaaattttggaagatttcacatttcacaagtttttcttttcttaacatgttattttctatatgaacatctaatttataaataaaacatattgaaggttgtaattttagatttaggatgataaattagttcacataaataaaagagaaatacatattacgggaaaaatattatgtttcgtaatatacaaatattgaaagaacaaaatcaaaatcaaaactaaaatttatttaaatctatttcaaaaggaatatgatcctaaattctattaaagttacgaccaaaaaaatataatctattaaagttattactttttaacttttacctaccatttgacaaattcgttcttatttagttatagaaaataatagttaatcgttaaattatattttggtgtcataaaaataataatatatatttttgttgttgtgcaaagcagcaaaggtgtcataataaaatccaactcacattaaaaccagcggacaaggagttaaattcaccgtactacacggtctgagctgattgcgtgttctcttaaaactccagttcaccgacgaacaacgaagtatcgtggaatccatttcatgggccgaagatttctcacttctcttcagtgtataacttctctagttctctgtgttcttgtatatatgcacaccccatgttcgatgaaattacgaaaccatgtaatcgttatcaaatcctcatctattttcttaaatgttgcaggaatctgggaaagtaatcgtttttggcttaattctgatttgggttcttacttatatagtcaacatg

SEQ ID NO: 24109 - DNA, 3003 bp, Unknown
  misc_feature (1)..( 3003): 2750-1469P.txt file - cDNA_ID_2166029; gDNA_ID_1620790; Annot_ID_168247
tgtttttgggcttcgatttaagtttggtttgttcattcgggcttttaaagtccatggataatggattcacttttaatgttggaatttgtgtgtgttttttggtgggaagaatttgtgtgttaaaaaaactagatctaagacaaaatataattaggggttttctcctgtcttctctctccccaaacctttcagagaggagacaccatcgttcatcctttttgattccggtttgtccggatttgtacatattctcgtctctgtgcgagataaataaagttccgactttagatcggatttccttaccggcaaagtctggtttagatctcttttacaactgcgatgtcgaagccctctgttttacttccaaatctcgtctgatctctctaatcttttgtggaattatatcttcgtcacttatttttgctcatgtcataggagcaaagaacagattacatcaattctcgatgtagtcagtggtggagcctccctggagatggtgatgttcagcgaatttcgaaacagtttggaattgggatccacagaaggaaagaggacgttcaccgcttcagagctgatcggtggtggctcatcggagtttttagcggtttccggcgaactaacggcggagcttgcatctgacgcgtggcaatgtgaagaccacgtatcatatacgtgtccaaccctaaatcaactatactttaattgtattttatttctctgtttgatttagttttgggcctggcctattaatttccatatgtaatcctctttggaccttctgtaatctgcccaatttgggctttatcaatcaaaatggccgacaaaaaataaataaaaaattgtgtgttaaaaatgataaattctaaacaaaaattagacaacaacactcacttaaatcacatcaaacaacatataaacggttataaatatgtatattattgagttaaaagttatagatttatgtctgtatagttagatattagaaaatacactaaaaatacactttcttaagatcacttaaaacggcttaaatccatttaataacacatgcatattaattttttacaaaaaaaaaacacaaaataatttttaaaccaatcatgcatacgtgtttgcggtccactatttttttctaagtaaatcccatcaatttttgcaatccatgttcgtttttgacgacatcgccgcttagaagctcctctatatgctttccataagatatgatgatattgaccttgtcttaaaagacacttccatattgttcttttgcttacatgctcgccgaaactaaattcatacttaccattgaataagacatcgtggacggatatagtgttgtctttagatgtgcaattaactttgagaatactattgggagcaagttcatttcgaaattctaatgtgttatccttgcaaccccatggtactactgtccaactttcatttaaaccaaaatatatggaaatgactattagaaaaacaatgagatggttcatttctcggattcataagttcttttgtagtaatatgaatctaagacatcaaagtgtagtatatggagacattatgaaggcattagctaaatttaaacacaaacatgaaccaataaacctttggctagagaaacatttatcatcgaaaaacaaggtggaccaataagttcaaaataaaataattaacttctaattctcaccactaaattaaacaaaccaaaaaagtcaaatatcttactaaattcttggaaatgttttattttgataatactagatgtcagttctcggtttgatcggtttaaatagggacataactaaatgtttagtgtaaattatggtttggtttggttcggtttgagttcagttaattcggttcagttcagtttggctaggtttggttcagtttggctaggttcggtcaaaatgcacatccctaatgaaaacatagagacgataagagtcaaaagtggtaaaaactgtgacatatctaaaccgctatgtcatagtctagacaattattgcagtcgctcgtagcacggttctcaattaagattttagcttgtacaacaggcttggttatgatttatgaagttaccttggtggtcgaccatgtgggtgtgtgctgaggtcaaccacagatgaggttagatgagggcgacccaaaatcaatcttttaggccaacttcttcctttgcacaagtttgccgccaaattgacatgtcttttatacttaagagatttgacattcaattatcaatgtttcaaaaaaaaaagatcattcaatttggtacttcaacaaatgtcaaatctcttaagtacatgtccaatgcgctgttttgcttcttctttttttgcattttccacgttctcgacatgtaaagacgtaagacacacgacaatactagaagtgaaactatatctttaggtcataaaaccgcataaaacgattaaattattataaaaaatgtatggcaattatgtgaatttcaagcatagaagttttcttcctttattgtcttttcatgattgaaactcacaatcgttatagtatacgacacaactcattattatttttaacaagggtttagaacaacataaattggttttaagatacttaattgtcatattaactaagaataatttgtgttctatttccatttagttatcataagtgaagatcagtgtttgaagggcagtgagtgaaattaaagaaactaaaaatagccatttgtttcttaatgtccacctcatccttgatatatatctcaatacgttttataatttgcttgtgtggttgggagagagagaaatgagaacgtaaaagaaggaaaacacgaaaacaacacaaaaggatttggttggtttgcttttaaaatgctaaatgacagatacatacgggtaagaaggcgtgactccctctcctcccctcccactttttcatcattggccatttataaatttaattctcaattcactccaaatctcatcatctcacgtttctttatcgatg

SEQ ID NO: 24110 - DNA, 3000 bp, Unknown; identical to SEQ ID NO: 5443
  misc_feature (1)..( 3000): 2750-1469P.txt file - cDNA_ID_2166050; gDNA_ID_1620790; Annot_ID_168266

SEQ ID NO: 24111 - DNA, 3000 bp, Unknown; identical to SEQ ID NO: 5457
  misc_feature (1)..( 3000): 2750-1469P.txt file - cDNA_ID_2166054; gDNA_ID_1620790; Annot_ID_168267

SEQ ID NO: 24112 - DNA, 3003 bp, Unknown
  misc_feature (1)..( 3003): 2750-1469P.txt file - cDNA_ID_2166060; gDNA_ID_1620790; Annot_ID_168268
caagaaaagtataaatagttagtcattttgagctttttctttgaagatatttttcagcaaggtaatgctatacactcttatcaagctctcattatcggtaatgctatacactcttatctagctctcattatctttcgttgcaaacaacatcataccctctaatctagatattcagtagtcagtattatcaatattggtgcatataacaatggataaatatgccatattcatctatacagaaattaaattaggtgtaacactggtaccaagcttagttcttaaagtttataattatcactactgcaagggataaatgaacttagaagaggaaaatgagtagcaactagcaagataacgatgcgatgctggaaggaaaggaatggttacagtagtttgaaataaatacctttatctgctgaaggcatagggaaatgaactcccatacgccagaatgcgtaaaggaatgctgacaagaataagaaagccccaacagaggcacgctcccttcttacacctgaaatgttattttaacttgaaaaaattacagacagttcacacaaaatgctgtaatatgcggcagcgaacaataaagtgatgctttctcaaattcatttatctccatctaattgaactcatgagtgtttataaaagaagcaacaaagccagagataaggatcaagatttttcaagatataagatcaaaatgatgggccaaagactgtttatacacagctgcacagaagtgttctcaaagaaatctcagttgagtagcaattatataacaaaaatagtttcaggagctcctaagaaacttgcaatgaattaaccaattatagtgattaccttctaaacaagaagtgataagagcaaagaaaattcacatatgaaataaggcttaccactattacgaagcatcaaatagcaatggtaatacggcaacatgaaaaccagaagaagtatcaaacaaaaaagatccaccttccagtttatcatccttgccctgcaaaatcatcaaaagatcggtccaaggcttaaaactctaaattaatattccaactaaacaattgctacataatgccatgaattccccctccaatataagtattacgtacaatgacaaacacctcaaaagctcaatgatataagcatctagtatcaagtatcaaatttccacatgacataaaggaataaacaagagaagctagctaccacacagtttatatactcgattacattacacatacaccaaaaaaattgtcaagtaaaaaaattcttaagacaataactccatcaatctacactcaatctcaaaatcattgccaattaggtaagaagtcaacaaaattaagcaattgcaaacaaaggaggaccaagtaagtaacacaatctagaagacaacaaataagtaaagtttccaaaaacctccaatgccagaaaacaccaaaactagctaaatatcaaaaactacagagtggattactcgagaaaagacttactctctagagagaacaggtatgatctcgaacaaaacgagctgcaatagattacaagagaaagcgaagacgacactgaaaatgatttgaaccaaagctcgtttctcttcatactctttgtataatctccgattaagaaaccataaacctgcccatcctaagagacttagtgaagctatcaccaccgtgccttcgtatatcgcccatccgtaactcatcgtcgccaaattccagatctctcttacttctcgagaaaaaacctcagatctgcaaaaacctcatggcgattcaacaccagagcttctgttgtacgattcgattcgaatttgatcatttatgaaacaattaaaaaaaaagtatttaagaataccttatttatttttggttagggtttatttggtttaaactctaatcaacaacaacctcatcaacttcatcatcaccaccaccaccatgcgactcaactcgaactcgcagagaggaaggcgttattaaacgctaaccaaccattgagctacggagtaatgtgaaagaaactgcacaacaatagtgtttctatcctttttttttgtttataggttttggcgtctagtctagtgttgatgataattttaactccattttccgacatgttttcttatctggtcgattgatttttttgtttttctttcacttttacatatatacacgaaaaatgatcgattcattaaaattgttgtttagaaggcttgtccaatcttacacgtgttaccatatataaatttgcgggaagtgggaagggaaagatcgggatatcgatagttcatgataaatcttataattacgggatcaagataaatattttttttatcattaataaaaaattaatatttgtgtacattttcttattgttagatagaaaatttaatattatcataaatgtaaagaacttgctaatcaagttatgatttttgtataaataatcctattagctaatgaataaatagagaaaacctgtattattgctaaagtttcctccaaacttatcagacaccaatcgatgatgtataatataccatttttcataacgtgattctattatttttaccattcacaatatttatcatacatttatatttgattttcatgtgtatgttatatttgatgcatgtggaaaaaataattcaaaattaaaaaaactacaaaacgtttttcttattatatcacaattatttaacaaaaaaaagttttgagctattttgtttataatgtttttatgcttttcaatcctacatttcactatcagaaaaatgaggccaagttataaaaataaaaataaaaactaaacccaataagcccattaaggcccataagtcaatacagcaaaaacagctcatctttgctaaaacgtagattactgatttaatctaccggaatcgaaaggcaataccaaacttccggtgaaccggaatcggatccatttgacttgccgtagaaattaggaaattgattacagtgttcttcgagaatg

SEQ ID NO: 24113 - DNA, 3000 bp, Unknown; identical to SEQ ID NO: 5436
  misc_feature (1)..( 3000): 2750-1469P.txt file - cDNA_ID_2166275; gDNA_ID_1620790; Annot_ID_50455

SEQ ID NO: 24114 - DNA, 3000 bp, Unknown; identical to SEQ ID NO: 5436
  misc_feature (1)..( 3000): 2750-1469P.txt file - cDNA_ID_2166275; gDNA_ID_1620790; Annot_ID_168242

SEQ ID NO: 24115 - DNA, 3003 bp, Unknown; identical to SEQ ID NO: 20192
  misc_feature (1)..( 3003): 2750-1469P.txt file - cDNA_ID_2166753; gDNA_ID_1620715; Annot_ID_165608

SEQ ID NO: 24116 - DNA, 3003 bp, Unknown; identical to SEQ ID NO: 20190
  misc_feature (1)..( 3003): 2750-1469P.txt file - cDNA_ID_2166760; gDNA_ID_1620715; Annot_ID_165611

SEQ ID NO: 24117 - DNA, 3000 bp, Unknown; identical to SEQ ID NO: 3310
  misc_feature (1)..( 3000): 2750-1469P.txt file - cDNA_ID_2166832; gDNA_ID_1620637; Annot_ID_162939

SEQ ID NO: 24118 - DNA, 3000 bp, Unknown; identical to SEQ ID NO: 3310
  misc_feature (1)..( 3000): 2750-1469P.txt file - cDNA_ID_2166832; gDNA_ID_2926156; Annot_ID_198444

SEQ ID NO: 24119 - DNA, 3003 bp, Unknown
  misc_feature (1)..( 3003): 2750-1469P.txt file - cDNA_ID_2166934; gDNA_ID_1620817; Annot_ID_169316
atcgtaatcaatagcaaagtaacaggaacagaaattcaacggactctggcactgcagcatacttccgatgcgcaggtaactaaaaagtctatgcctgtggaaactttgtctttagattgctcatgttcgaataagtatagacttattttgtgtactctttttgctaatagtaacagctacagaaattcttttctcatgattctgctttccaggaaatggagccagaaatgattgaaattgtcattgaatcaaagtcaatagcgcaagcaatggtggatgcagctataaaggtatttataatatatctagagacttcagagtcttctaaatacagagaagccaaattcatacaactctaacatcttttgtttaaatcgttgtcaaccgttttaggctgcatcgtcggggaagaacaatgaagactcagagaatatggttcaccaagctttaagctccattggcgaacatcagccattagacaactctatagtgcctggtatcaagcatcaagagtataccaatggcagcttggatcatcattccttaaacacagcagagccgatgagtaacggtttcatctcacaggaaggatcaggaaaaaacaaaacaccaatgccttcagagcttatcacctcttgtgttgcatcttggctcatgatgcaggtaaaggaaataattttgtcttggactaacgaaagtgtaatctaaatcaagaataccaaagttttcacttgatgcggttttgattagaactctttgtgtgttatttacctgcagatgatctcaaagaagcagtacccaccagcagatgtggctcagctaatggatacagtagtgaatgacttgcagccacggtgtccacagaatatgccgatatacagagaaattcaaacttgtatgggattgatcaagactcaaataatggctcttgtaagaacgtcatgaaacatttgtgtcctttgtaattaacctgacatcgaagataacacttggagatcagatttaattgtttggattgtagaggttagtttagtttatagttagttaataatttgaacagctccaaaggctgttgataattagttaccattgattctgtaacttttttttgtcatcattcattgtaactttggttaccttttactttggagctgttttttttttctttctttctcagtgattattttcttgggtcattttggatcctaatggctgaaataatttattcccaccttaatacaaaatctcaaatatatactattccttaactaaaattctagaacaatgccaaatggatatgtttgaaatacctttaataacaactaggatttaacctgtggtgtaccacggacaaatgttttattcatatataataatattaaattttacggtttttaatttagtatttaagttttataattttatattaatgttataactaaaacaaatggtgatgataaaataataaaataaatatttaacatgtgctatatcaatccaaactcgtcccactatatttcatatcaatccaaacccgtcccgctatatttctcatctcatgatatttttttataagtttaaataataataatgttttataaagttaaaatatatctataatatttaaaaataataattattttttacttaagttggaaagatttttggaaacgtttgttgagcgcaatataaagtatttaaattttcaaatctgaataattaataccaattatatatcttgaaagatctttggcaactattgttgaatataatatcttgtatttaattatcgacaggaaatatttaatgtcaatggcatgacattgtaaatacaagtacaaaatttatttgctaaaatggctgcaaaaatgtatatgtagatttacttctaattttaatgtttcaaaggacaaaactaggcatgaccataaaatccgaagcccgaaaaacctagttcgctttggttcgagtggatctaaagtgtttattttggggttttggtttggttcgtgtaggatctgaaacctgaacagatacctgaaatatcgaaactcaaacggatacatgtaactcgaaataatacgtatacataatttgtcggtaaattcaggttcaatatcaggtttcaattaaatttgagaaccagcccgaacccgaatagacctcaaccgatattttcagttcctaaatgtattttcaatctctttaccaaagtaacccaaaaacccaatctaaacagacccgaaaatccgaatgtccagacctaactaaaatcgtgagtcaaactcaaaaaatgattgattaacactatattatacttttacttagattctataaattggacacatgtatgggtgttattaagggttggaaacataaatttaagccatgaccttatttttggttggaaaattcttgttcttttttttgttagtaaagggctgttaataagggttttaatgggttagcgaacgacaccgtttataataaatatgtttgctaaacgacatcgtttgaccttagggtttattgtttaacatgaaagaacgtcgtttcaccaacgtttcttcttcctcgcaagtctcaaagccaggaacgatctcgccgtatgagcaacttccgacattaacactgtattgctctgccgtactctcctctttttcccttcatactcgtcttcacatctgaattccgacaagatattgcgtctgctctcctctcttccctcattctcgtcttctcattaccaaaaacatcttcttctcgtagctaactcaatccaattccaatctccattcaaatcgagcaccagataattttttctcctaaattctaatataagccctaaaattcaaaattgaaatatctatagaatctccttccgattcagacggataatcgccatcaacagcgtgtgaattcgatcaaaaatctgaactttccacaaagaaattcgaaagctcagatttttcgatttcgaaaattttgaaaactcagttaatg

SEQ ID NO: 24120 - DNA, 3003 bp, Unknown
  misc_feature (1)..( 3003): 2750-1469P.txt file - cDNA_ID_2166946; gDNA_ID_1620817; Annot_ID_169321
tccacaacattatctaccttcatggatttcttgtctattaggctgaaagtctcagtctcatagacagagatagtgtttttgctaagcttggcaaagtatttatcatcttttccaccagcccatctgtagaaaaagtttacaagatatcaacatatgtccataatagtggagaagatgataatattggctgtttatttttaggacattgacatgcagttgaaagaattacctgaaaacaggccaagaggcaccagcaacaccaccaggtcctccaattgaaaactcatcagcactacccttgaaatctctcatcatcctcccggttctcacatcaaaaaccttaatctcaactttctgaaagtttgacagaattcagcgtcacaaatagtaaaagttgaaaagaacagaagaaaagatgcactcacacttgcatctcgcgggttgcttggttcttggctatggtaagttacaagatatttctcacctggcgagaaatcaactagttttacctaaaacataatcaacaaaagatgcaattttcaggccaacagaggaaaaacggaagtaatatgtagcaattgaaaggaaattcaaaccatagaatgctgataacgcatgagacgcgtgaatgtatcagcaccaccccaaacagctgccccctgcttgtggagtgtcacaaggtatgtacctaaaggagaccactgcacataactctctgtccaatactgcataggaagagaacatcattaattcaaatgaaggtaacataacatataaaagtgctctaaacagtcaagtaaacaaataagggatattaattcaaatgaaggtaacataacatatacattgctctaaacagtcaagtaaacaaaagggatatacacacaggaagtaacttacaggacgcttatgaacaggttcaggcgccttctgcctagtatcattccagaaaacttcagtatcagggccagaacgaatgactagctggtctcgggctttttcatcagtaagccatttttgcaaattttcctgaaaaaacaaacaccatataagtaacgacaattagcaccacaaaaggctgcaatgaattaaaatatatacatgaaacaagagttatgaaattatagttattagttagtatacatcaattacgtaaaaagatcctaaccctaacgcagcaggcaaacacaaaataaatcagcgaattaccaaaataaagaagtgattacacagacacaatggaagttattcaaagaaaattattcaaggtacagggagtaacatgatgaaaactacacataccccagggacgtagggcctggcctgaggaggctcccactcctccttcacattcatcaacctgtcaaaatcatcgaacatgtttacagcaaagatgtgagacttgtccaacttgtagccatgagacttttccttagcgttttgtgcttcctgcaaagagccccagacattgagagaaactcttaggaaatactcaaccattaagaacaacctagtttgggctcctttctaacaagagaaataaagtattgaaacatatgacgccgacattattgcttcagaatccaacaaaacagagattaagctaatcaagtagataaataacctgaggagtgttgaactcaataaaacagtagcccaatgtcatcttggtatcgggatcaacaggcatccacagtccattttccttaatcacacctaactggttgtaaattttcttgacaacaccttcaagtttctcaaacttctccttgggaacaacagggaggtgatcgaccacgataatgttaccgaatccagtgtcgaattcagactggtcatcctggtaaacagcttcatcatcactacaaccatcacagaaaaaaaaagtgtataacgaatcagttccatttttcatacgttcatagataaaatgtataaatataataagctttgcaccatcaaggaaagagataaaccaattcgaaatacacaaaattttcatacatacaatagcaaaacctagaataaaatcatcccatcgtataaacacaagaagattagaaatagaagtgaccgtatatgaacaaccagagatctaaaggaaaatctcacctctcgatcccaaagtcttctccaggaggaagttggatggaatcaaaattaacctgagaccaatcaatccctaacttagcagctcgggcatcaatatcaacgacctccatgatttcaaaccttatatcaaaaatctgccaaagaaagccatatagagagagctatcagtctttaacacattccaactttaagtcgataaataaatgtgaaaaatctgagtctttagatctaaaagtaggttttttgttaaccctaaacaagtattaaaacaacaaactaccatggccaaatgttcaaagactaaaactttgaatcatcactcccactataatgtaaatctaaaaccatgcctatagaaattattaactatactctagttttatttaatctagaacccaacaacaggtgaaatggagaaaaatggcaaaattttcctgaaggctctcttatatctattgcatcgttctggatcctgtctcatagctacataagaaaagacaaaaaaaacaaatgaacactgaaatcgagataagaaacgtacccaatacagagatcagccgagagcaaaaaacaaagaagaagacggcgcttgaaggtgaggaagaaggagcgattgttttcaggtctttttggatcatacgacgtcggttccttaaacgggcttataaatatttatatgggccgggtaagcccaattcaatagtaatcagtagatctaatttattgtctttctctcgattagcttttttttttttttaacaataatccgtctctttcatttggtgtcctcgagaaccaaattcggataatctctcatcggaggatcgttgttgttgttgctagggttcttatcgatttgtaatgtacaaaactaaattaatcccggtgatg

SEQ ID NO: 24121 - DNA, 3003 bp, Unknown
  misc_feature (1)..( 3003): 2750-1469P.txt file - cDNA_ID_2167087; gDNA_ID_1620565; Annot_ID_160685
atctagtcttcccgagaaaataaattctttagctgcaccagctagtatacttggctgagtgtcacatgcttgcagctcaaagtcgcatatctcctcaggtttacaacccagtgcgtttgcaatgatctaagaaattaaaaagaggactacttggttactaaaccagaacaagatctaaaattcaagctaaaaccataaagcttatatatttcaactggacctccattagaagcggatgatgctttgatttagaactagtttcagcacacttctttccttcgtcatgttcaccactttcagctggcgttttattgagctccgccttcaaatatatcacacaatataaataaattgcaaaggaagtaagaattcaagtctgctacaaacttgacaacaatggtttcgacttcatagataaatctgccaaaagttaaggggttcacagagatgggttctgatctcaaatagtgggtgacatgcaaacaaatactttagccatactagatgaaacaaaatttagcagagacgctggacaacatagcaagcatagaaaaagcaccttaatagctgttgccagtactggaacgaggtgtgtctgagtgtttggcttaaaaccttcagtgttcacattcctgtccgcaaggcaaaacgaaacgtacataaagttcaatattaatttctctacataaagtaactgagaaataaataatgtttttttttatcgcaaacacgacaaaaaaagagtctaagaagtattccaatacaaagcaatgatttaaaggtaacctgtccaagtgaatggccaaggtaggaatcctcatgataggatcctcaatcctgacaaggcgatgagaatacgagacagaacctgctttctcttctttaagaatcacacgtcctgcaacagtcaagtcacgatcaaaccaggtgtaccacagtccacctccatatgtttgaacaccaacctccaagcatccacctttagttatctgtcaacacaatcctcactttctagtcaaaaaagatttaagtaaaaccgctggagaaaatgtcaaaaagatcccaaaatccaaaatcaccttggatacaggtttcaatttgaggcacggactatcagtatgagctccaataatatggaacccgtttccagctacgtatctgttcaaagttttccaaaagattagctctaacattgtagcaatagatggaaccattggtttcagaagaagaaggaaaagatggttacttgtgaccaatggcaaaagcaacaatagtggagtaatttctggtgaagaagtattttttgccggcttcgagtttccaatcatctctctctgaaatctgttcatacccagccttcaaaagccgtctctttgactcgtctacacataataaatagtagatcaatcaatcaatactagaactgaatcaacaacggaaaatcaatagttctcaaaaggaaaagagatgggtgatgattgacgataccgacggcatgaaaagcggtgggagaagcattgagaaaggagaggaaatcagagacgagggagctcttatccatggctggatctcttaacttgagttcttcgggtttttgtgaggcagcactccaatggatgttcggtttccgatcgtccctgtgtaagtcttgccggaggttccgtttccattttagtaacccgagaagttttattggcccattacaaagcccaattggttttttaaataaatagttatttattcatgagtacataaaaaaaatgttatttattcatataaacgttttatacttttatgtaaaaactttcaataaattattatacaaaaatttgtttcatttgaaattttgaattaacgcactatttaaaaatttgttcattttaaaaactttcaaataaattttgtagtcatatactataaatacccttccttatatgtggttggataattttggtaataacataagaattcccaaaactagaagattttatgtggttgggtaatttcggtagtaacacattcaaacaccattaaaccaatcaaaaccgaaccggactaagtggtaataaaattagaaatcgaagggtaataaattctagaaacccttttttttttttttttaacaagacagcaacgtggatctggcagacaaaatcatatatataaataatattaagagggttaaaaaaggccatcgcctcaaaaatcacagccatccattttctctttctctctctctctgtagctctctctcgttcgagcttccatttttcctcatcgcaatcttcatcttcaatctccagctatctcaaatcgatccttctcgaatcgtatgttttcttatcacctcttattgaatctccttcgttctcgttgagtttgaatctgctgaatctcaaaaccctaattctgtttcctccgaggttttttttattggcatcatcggtttattagtttggatcgagaaattgagattgaagattgagatttttggattaatctacatgtgtttatatttcctgtgattgatttataatgatttgttttcacttttgtccgttgacgcgtctttaattgaaccgtcgcggcgcatgcatagatcgatactgtgaagttcttcattgtagattcattttgttgtttgtaattatattgttagtattcgatctgaaatgttgaatatttagagtaaatttaagattttttaagttggcctatgataacgttgatgagatgagtgaacatagatgatttctaggattggatttcgaatgttatcatttagtttcttctgataattaatgaagttgccagcaaaaaaaaaaaaagttttttcattgcgtttggtttttacatgtgttttatctgatagctcatgaaataaaatttactttcttagcctgtggccttagctttgatgattaatgtgtcttatattctttctcttagaccatcatgagtgaccatggtgagaagacttgtccactttgtgctgaagagatg

SEQ ID NO: 24122 - DNA, 3000 bp, Unknown; identical to SEQ ID NO: 2611
  misc_feature (1)..( 3000): 2750-1469P.txt file - cDNA_ID_2167104; gDNA_ID_1620565; Annot_ID_160691

SEQ ID NO: 24123 - DNA, 3003 bp, Unknown
  misc_feature (1)..( 3003): 2750-1469P.txt file - cDNA_ID_2167116; gDNA_ID_1620565; Annot_ID_160693
aatcttcgcttacgtagttactgataaaggctcaggccggtttgtgatgaaccgtcggtatcttgattattatctcaatgattattccggttggttaaaggaccgtgtcacagataatggatattggagagatatcggatcgtgtgttagagattctggagtttgtaagaagattggaagagatttaaatggtgttccagaaactgctcatatgttttacttcagaaatctttctcctgttgaggtattattattttttttgtttaaaagaacatactagtgtactcttaagaaactattatgtcacttgttcttggaatctaacacggtgtgaacgttatatgatatgtatttgttttcaatctgtagtccggatgttgcaagccgccaacagattgtggctatacgtacgtgaacgagacagtgtggattccgggaggagaaatggtgggaccgaacccggactgtatgttgtggaacaatgaccagagactactctgttaccaatgcagctcttgtaaagccggtgttcttggtagcttgaaaaagagttggagaaaagtctcggtgatcaacatcgtggttgtgatcatacttgttatcttctatgtcatcgcgtgtgcggcttaccagaatgttaagaggatgtataatgacgaaccggtcggtgaggctaggatgaccaatctcatcctagtcattttcaaatttaaggagattttggtacagtttttcttcggaattgtgtttttattactctttaatggtttaatggtctgttgttgtaatgataaatttgcttttagtgttttcttctttggatatgttacatatgcatgatgatgattgttcttgcagattagttgaaagaaatgctactcatctttatatagagtagaaattaatttaaagttgatatgaaaaattcaaaccagacatgagttaccgagaatggttcctcaaagagtgttcaaattactcacgttgggaacatgttgttttgaatttgtggattgatcttcacgactgagttctgggctccatctacttatcgtttgttcttccactgtgaagttctccaaacatacaagtagattcacatcctctcctttgaagttaccattaacgtagagagtcaacaacgttttcgcaacacttccgcttaacctaacagcacaatggatatctgaccacactcttaaccgatcactgtcaccagactgaactaaaaccgagtattcagagtggacaagagatggatggtgacggtatgccacaaaatccacaccgtattgcaaccctgatctcaaaacccagttcttcgatcgtaaatgtgaataagctttgaaaaacattggaaagtttggtctttttgatttcatgtagagccatgtgtctacttcattctccaagcaacgaccttgaagtgagattttgatgcatttgagattgtaatgcaaaaagaaagcttcttcaaaagataactgaatccatttcttgattttctctgccgatagaacgagtctgccaaaacaacaacggtcaagaagctcagcttgctctggctcaaccgctagaagcacattgcaacttgagagggttcccgaggactctgtttcggctagagagagctggagctctgagactgattttgaaataggttctgcaagagcttttgcttcagctcctttccatttccatctaggcgccatggaattgagctgcatatatagcactaaaaatcaaaccttttgaccaaaagatgtaaaagcttttcttagtctattaccaactacaactcttataatctaggaaatcagataaacattgtcactacgacatagttgttaacgtttaaggtatcttgaagaaccaagtaggaattggaatgagcaaaaccaagagcttttgattcttttcccacttttgtattcaaaaatcaatcgtctatgaagcggaaactgtgacattcaaattcacaacaaaggtattttgaaatagtaaacacattttaattgaagaagcaatcacattcagacttgtcctcacatgacagtaaccatgaagagaagagatttggttaaaaacgaaacctggcgtattgatttatgaagaaaaaacagaggatatgaaggactcgggaagcagggtctacaatggagagagctatgcttcgaggatccaatggagagctatgcggtagtgaaaaacgtaatctcgtaaaaattattgttgatttcgattgcacagtgaaaatagaaaagaaatagccacgaagattcttcgaaatcgagaggaagagatcgagaattgaaacgagattcggatctctctctccctggggaagacagtcgcgcgactcgagcagcagagattgtggtgcctactgagtacctcgtgtgaagtctaaaaacagcgtcgttttcagctaaataaaattctacaaaaatgacgtcgtttggaataattttgtttgggctgcctatttatacatgtctaggcccgcgaattttaagtctacagtatttatttaaacatcatacacaaaatccgaaacagataattttgattcaaattggtaactatcggaagtatcggatgagaaggaggaaaaaaatgctttgcttatttcattaattactaccttgatactatctttaataacagatttaatttgatattatagattccactttttacttaactgattgataagatggagataatagtttacctttttatttactggttaaaatcgagaatttatggtccattgacttcttttgaccaagtttaacgaagaagcgtctcatgtaagctattcacaaatgacgttggtaccccttcccacacacgtatgatgtgattgacggttctctgtatatatattaatttaaaggacgacgtaaagcaaaaaacctattcgtcgtcactcgtctgtcgtcaccattcatcaacagagcataacagttgctgatttaagctctgcggagagcaagtatg

SEQ ID NO: 24124 - DNA, 3003 bp, Unknown
  misc_feature (1)..( 3003): 2750-1469P.txt file - cDNA_ID_2167120; gDNA_ID_1620565; Annot_ID_160694
gccaagagcttactgtctctttaccctaaatctggagttaggagatgtgttgaatgtcgtggcctcttctgtgtggactgtaaagttccgtggcatggaaatctgtcctgcactgagtataagaaattgcatcctgagcctccggcagatgatgtgaagctcaaatctcttgcaaataataagatgtggcgccagtgtggcaagtgccaacacatgattgaactttcacaaggatgcaatcacataacttgcaggtatctatctatttctctacacattgatcctcctataaaccttatcaaacaaggccatgtaagctaaagcacatgtgatggattgcaatctttttatctatgtttaactattctgacattccctttggtattctcattagatgcgggcatgagttttgctacaattgcggaggtggatggaacaagataatggggacttgtttaaatcgctgcccaacctggaacgaagaatacatcacacgacaagatccagcgcgtgccaatgtggcagctaacaactactttgatgatgaggatgatgatgatgttgatggtgattacgactatgatgacttcttccacccgcattttggacatgctatgaatgatcgtaatcctgaagagcccttcgaccccttcttcgacttgccagatggtaatgtgtccttccaaatctctctaaaactcttgaatcctatatatttcacaactgaaagcactctctgtttatctgtaggtgtgctctttaccccccagatgttgtcttccaagagtcgtcagcaattgtacttgccggattcagatgattcagatgataatgcgacaacacaaaatgctcctgctgcagatgagaattgcccatactttgggaagtatggaaagtacactataatgtacgactccgacggctatgaactcgaggatttcacgaaccctttccatcctgactatcctcacttctgaggtttggtttggaaccaaagttcgtatttttctttcttttttcaaggtccaaacccttttgctatatgctctttactctttaatcgttttttgaggttcatgtttctatgacgtattgttctatataagactgtttgggtaatctttgaatttgaagacacctcgggattaaagttttttttttttccaaaaggtgtctttgtatatataacatctaaacaacagcatcatccatcaatggagaatccatgttggagaggcaagtacaagatacaacaacaacatttacaaacaacgaaatacaagtaaagtacaacacattctgccacaaaagagaaagttgtcaaatggtagcttgttaagagcaacatcataactaatctcaataagaccaaacatcaaaactcaaaaggtttggagttgatcttatagcttccatcatatgcttgtagtatgattgctttgtgctcaccatcttaacatccgaacagggtgatatcttctactctgattataagaaaactaaacagataaaagcataaaactaaaacaatctagactagaagcttaaccatgattaaaaagccaaactaaaataaaaatcaaaagcgataagaaagagataaggatggcacaatcaaccaaggaaaaggtgagtcatcaaagtggccggagagataccggaccaacttctccggtaaactgaaaaagattacagaaccttcaaaaccaccatgcccaaactaattccaaggcagcaaaaacatccttaactgctaaaagaaacatcttcttctttattcaatatgtcacaaacgaagattgagatatggcttcaaaaaccttcgagaagaagcatcttacacaaaaaccggccatgacgtcgccgaatgagccaacacatgccggactcaaaccgtccatcgccataaaaaggaaacggtcgatgacgaaaatgatagccgacccaacacatcgaataataagccggtcgttgtcggactgaagccggttgcaacaactggacggccttgccggaattaaccggacggctttatcggaataatctgaacggcggaagaaatcaagtttttctctctagaagatttaagagagagaagagagaaaaactcatctccgttttccccgacgctcatgacttgggattaaagttagagcattgttttcgctatatttttcgtcgtttggttattggtttcggcttgctcatctttttatttcccttcaatgggattgatagcgaacaagtaaatatatttttgcattcctatataaacattcgtattaaacccattttatatagctcacccacccacttaccctttggcgaaatcaattctttgtttttttttgtctaactcaccgtctctgtctctgaattcccagctggagatatcagtcgccgtctttttgctcttggtgaagatagattcgagaatcccgaaggttctacgattaccacagagaaattcactatagtgagtaccccatctattggatttgcagcaatgcatacgtctcgcagtcaataagctgaggcggagtcacgtacatggactttttgcttgagctttctaccaaataacccacaggttcgtcatttcttagtatagtgtcatgttgaagaattttcggtcacatgaatgttcaagttaaatcgtatattgttctgtgatgagaaagattataatctgcttataaacactgttccttcatatacggttaataatctctaaacttttgttttaaaatgattatgttaaatcacatactcaacaacggaagatgaagaaatgtttggattcaactaagcattatattagttatgcgtaatctgtagctgtagagaacatgatcttattgaattttgtttcttttgttgatgttttaacttctaattaggaagattgtaatctggttatgatatttttccttaaattaagtgttttactcgtttcgagtttttgttttctgctgattatggccattacaagacgcaacaatg

SEQ ID NO: 24125 - DNA, 3003 bp, Unknown
  misc_feature (1)..( 3003): 2750-1469P.txt file - cDNA_ID_2167124; gDNA_ID_1620565; Annot_ID_160695
tttagacaggtgttggaagtcttattaagggaaaagtaatataccataaagataccaaagcagtcgtaatatttgactttgaagtcgtattcaatgggtctacagccagagagaaagagataattgtgaagcattgagagcaaatagagtatacaaaaacaaaagcgaaacgataactctctatttgtttcattaccaatgattcgaggattgcttttgggaatcatctggatgatattttgtgtttgttcatcatttcagcaagagacgccgtttgtttacaacaactttggtcacgtagatcatcttcaccttgacggtagtgcaagaatcattcccagtggtggtatcctgcaactgacaaatgcaaccaatagccaaataggtcatgttttctacgagaagccgattgagttcaaatcatctgaatcagtctcgttctcgacatattttgtgtgtgcactgctccctgctggtgatccgagtggccatggcatgaccttttttgtgtctcattccactgatttcaaaggcgcagaagcaactcgatacttcgggattttcaacagaaatggttctacttccacacgtgtgttggctgtagagcttgacacttctctagcttcagatgtgaaagacatcagcgataatcatgttgggattgatgtgaacagcgcagagtctattacatctgccaatgcttcttatttttcagacaaagaagggaagaagattgacataaaactcttgagtggtgatcctatccaggtttgggtggactatgaaggaacaacgctcaacgtttcattggctcctcttagaaacaagaaaccaagccgacctcttttgtcatcaacatccatcaatctaactgatattttgcaaggtagaagaatgtttgttgggttttctggctcaaccggatcaagcatgagttaccagtacatactcgggtggagtttcagcaaaagcatggcgtctctgccgaacattgacatctcaaaacttcccaaagttcctcactctagcactaaaaagaagtctacatctcctgtgctcagtgttctgcttggtttaatagctttcatagttttggggattcttgttgtagcttatttgtataggagaaacttgtactctgaagtaagagaggaatgggaaaaagagtatggtccaattaggtattcctacaaatctctatacaaagcaaccaaaggattcaataggagtgaatttcttgggagaggaggttttggtgaagtctacaaaggaactctccctcggagcagagaactgagagaagtagcagtgaagcgagtatcacatgatggtgagcacggtatgaagcaatttgttgctgagatcgtgagcatgaggagtttaaaacaccggagcttggttccacttcttgggtattgcaggagaaaacatgagttattactggtgtctgagtacatgccaaatggtagtcttgaccattacttgtttaatcatgatagattgtctcttccctggtggagaagacttgcgatccttagggacatcgcatcagctcttagttacttacatacagaagctgaccaagttgttatacacagagacatcaaagctgcaaatgttatgttggatgcagagttcaatggaaggttgggagattttggtatgtccaggttatatgacagaggggctgatccaagcacaacagctgcagtgggaactgttggttacatggcacctgagcttacaacaatgggagcttctactggaactgatgtgtacgcgtttggtgttttcttgcttgaagtaacttgtgggaggagacctgtggaacccggcttacctgaagcaaaacgttttctgatcaaatgggttagtgaatgctggaaaaggtcttctttgattgatgctagagatccaaggttgacagaattctcatcccaggaagtcgagaaggttctgaaactcggtttgctatgtgcaaaccttgctccagattcaagaccggccatggaacaagtggtgcaatacttaaatggaaacctagctttacccgagttttggcccaattctccagggattggagttctgtctccaatggcgctttccccagcaccactcgtgatcccttcactatcattttcgtcttcctcctccaacaactctatgtttattactcactcagtcctctacgggagtgggcgatgaaagtttctaacaacttccctcttctttggcctcttaatattgactgattttcagccatttctattcagattttgtttcattaatgtatatggtagcaccatgtccattctccatgaagcttagcttgtagaacgatttttaaaaaactgatttttcaggtaaattcttgcaattacttagttcattatttgtaaagcaagttgttgtcaccatttgagtacagtgataaattgttatgtattgagaaagctgatatagttatggatttgtttcttttaatggttatgctattttggaaaactgatagatatcaaaagacacaacagtttagtctgtaactaaccttattcatgccagatctcaggtacctgcaatatattattgcaaatcacgtatcctaggagatgcatgtttctgcacatttgagtaggctcttggcttttaaagagttaaaatactcggagatagtgacaattcaacattttatttcgtttaagacaagtaggacttggtatgacaatcaatgagaagcttgcctttcaaaactgtgaaactacaaggaaattttattatgtggaacttctgaattcttttatcaaagaagactaaaatgtgacagctatcatattgttgaagtcaactcttaccaattctcttggaaaatgcagaatgttcttcttcttgtgaagtaataatccgaccttgtttcgcagatggagaggatagttatttgccataccattgactcagagacaggatttttctcagaacagcaaacactttgttgcattaacaatg

SEQ ID NO: 24126 - DNA, 1414 bp, Unknown; identical to SEQ ID NO: 2643
  misc_feature (1)..( 1414): 2750-1469P.txt file - cDNA_ID_2167182; gDNA_ID_1620569; Annot_ID_160818

SEQ ID NO: 24127 - DNA, 3000 bp, Unknown; identical to SEQ ID NO: 2992
  misc_feature (1)..( 3000): 2750-1469P.txt file - cDNA_ID_2167214; gDNA_ID_1620620; Annot_ID_162255

SEQ ID NO: 24128 - DNA, 3000 bp, Unknown; identical to SEQ ID NO: 2992
  misc_feature (1)..( 3000): 2750-1469P.txt file - cDNA_ID_2167214; gDNA_ID_2926190; Annot_ID_200941

SEQ ID NO: 24129 - DNA, 3000 bp, Unknown; identical to SEQ ID NO: 3003
  misc_feature (1)..( 3000): 2750-1469P.txt file - cDNA_ID_2167226; gDNA_ID_1620620; Annot_ID_162264

SEQ ID NO: 24130 - DNA, 3000 bp, Unknown; identical to SEQ ID NO: 3003
  misc_feature (1)..( 3000): 2750-1469P.txt file - cDNA_ID_2167226; gDNA_ID_2926190; Annot_ID_200948

SEQ ID NO: 24131 - DNA, 3000 bp, Unknown; identical to SEQ ID NO: 3017
  misc_feature (1)..( 3000): 2750-1469P.txt file - cDNA_ID_2167241; gDNA_ID_1620620; Annot_ID_162271

SEQ ID NO: 24132 - DNA, 3000 bp, Unknown; identical to SEQ ID NO: 3017
  misc_feature (1)..( 3000): 2750-1469P.txt file - cDNA_ID_2167241; gDNA_ID_2926190; Annot_ID_200955

SEQ ID NO: 24133 - DNA, 3000 bp, Unknown; identical to SEQ ID NO: 3018
  misc_feature (1)..( 3000): 2750-1469P.txt file - cDNA_ID_2167245; gDNA_ID_1620620; Annot_ID_162272

SEQ ID NO: 24134 - DNA, 3000 bp, Unknown; identical to SEQ ID NO: 3018
  misc_feature (1)..( 3000): 2750-1469P.txt file - cDNA_ID_2167245; gDNA_ID_2926190; Annot_ID_200956

SEQ ID NO: 24135 - DNA, 3000 bp, Unknown; identical to SEQ ID NO: 2634
  misc_feature (1)..( 3000): 2750-1469P.txt file - cDNA_ID_2167272; gDNA_ID_1620568; Annot_ID_160782

SEQ ID NO: 24136 - DNA, 3003 bp, Unknown
  misc_feature (1)..( 3003): 2750-1469P.txt file - cDNA_ID_2167276; gDNA_ID_1620568; Annot_ID_160783
atcttcttctccatctctgcaacgaatcagaaggaagaattttgtttctaatttctcgatgcacataacgtaaaaataatataaatttagagttggtgttataccttcaacagccatagcttggagaaaaattacgtcgtctgggattcttcttcggaaaaatcccagtcaaaggttcatacaatattcacccagaaaacaaaaagaacacaaaagagggaagcagagtaacatctccggagaggagaagccgaaagctcagagccggagagaatccggagaaacagggaaacagaagttttgtgtttttgtgtgtttttctgttgtttgttgtctcgttaaaagatatctttagaaaatggttattcttagaagattttagagaaagaagaaagatgaggttttgatgactggtaatggattggtatctctgctatatttatacaactccaccatgcaaagtcaagttagctttataaaattatgaaacatttttttataagaagaagatgaaaagatatgatgccgtaactaacgccttccaacgaacagacacgccgacggttgaaatatccaaagaccaaagctagtcaatggcatttccgtaattatagagaatgataagacaaaacacccctctttgttttttatttattcgaaattacaatttcacttaatttgtactttcagcaatttaatattaaccatgtgaaatactgacatcttgttttttttttctttggttttggtccagcatttgtcttcattaatgtaaacctacacagaacttatttacgaaatgccgtcgaatgtgaatctttcgaggtaagaatatggcaatatgctatcttatttccggttatcgtgtcgctatcgtaacgagtgtgtaaacatatggcaaagaagcttgaccaccctagaacaagccaataagccattgttgttacttgacatcttaatataataaacatcaaatttatcacgttttataactaagtaagatagaaaacatttatgagattgttttggttcacgacacgacattcacgagtcatcatgaagctttgtaaaaaaaacatatattccaaaccacatcaggcgcaacatagtttattagagcatccacaacggtggagctctctcacttaaactcataattaaaatatttaaaaataatagaaagaaatcagggagagaagcaataggagagagttttatcaaataaactctctgtagagagattttgacacacatgagagaacctctactttacacatgttttaactttattggtgaataccaattaagtaatttaaatttaattacataataaaactctaataaaaataatattgttttattcattgcatacccattttagagagtccaccgttatggatggccttagtagttcatttggtcccaccacttaagctctcatttgtcattaataacttaggaattacgtgaaataaaacttagtttatgatttagcttacgtgaggcgatcgtgagtataaattagaaagaagtacgatatgcattgaagaaaaatccaacgaaaactataagtataaacatagatgtgtctaatttccactacatatatgtgggtttagtaaagttgagtcgttaactaacatgagttgtttttcttgggtcaaactgataattttcttagcttaaaccaaaggagaagaaacctccaagttacaagacttctccaacacaataaattttcctctaaaaaatgttagtagatttgatgattatttgttttggatttgtttttgagctttgttatgacaaaagcgattttctttacgtgtatttatttgttgtaatattatctagacaagaagatataaaaacaacaagtaagtgaagttgttgctggaaaaaattatcttttagccttttggtgaaatgagaaatgcttaacgtaatgaaatgattagttaattggtaatttcagtgagaaaggtgataaggagagaaaaagaggtttcttgtatagtgggtgaactaaaccccttaactaattttgactcctccaaatgtaatctctttcgctctctaaattgggccccaaagtccaaatcaaaatagccaccaaactcaccaatgtcaagttctgtcggagaagtcagtctaaccgatttcattctcacttaaacagtcataaacacactctcctgttcaatccgaaattcagttaggtttttagttgacttctggtttagttttttcatttactgatttagagcaattagtaatcaaagattcaaatatgtcaccgtgaaacacaattgcgttaaccgtaattttctgtgattgttctattgcattgccaaaagattaatagaaaatttgaaatgagttacgtgtaaacttatgaatcaaatgacaatctaagaggcgatcacttaatccaacaacggattagagaatattatttcgtaaaatacagacatgtctatagaaaatctaaccgaaccacaacgatagtggatgtgacatgaaagtgtttacgtctacatggaaaattgttatcgtcatcattcatgaattgaaaagacaaacaggttatttaataaccaagatatcgttttcatgtgatcaaatcaattatcttatcaaataaattaactaattaagtgatctctccatcaacgactcgggttgcctaaaactaatgactaacaaaaatattataattagttttgttgcatagcaagagatcaaataggcgcctgtagctcagtggatagagcgtctgtttcctaagcagaaggtcgtaggttcgacccctacctggcgcgcttcattttaaaattcaatatattttaattttgttttgactgggaaaattccatgagcattagtaacttaaagcccattagtgggcaaattaaatgggccttattagcctaagcccattatcaataaaaacaaaacagactcaggccaacaaaaattagacagaaattaagagtgacaatg

SEQ ID NO: 24137 - DNA, 3000 bp, Unknown; identical to SEQ ID NO: 2640
  misc_feature (1)..( 3000): 2750-1469P.txt file - cDNA_ID_2167302; gDNA_ID_1620568; Annot_ID_160789

SEQ ID NO: 24138 - DNA, 3000 bp, Unknown; identical to SEQ ID NO: 2645
  misc_feature (1)..( 3000): 2750-1469P.txt file - cDNA_ID_2167357; gDNA_ID_1620570; Annot_ID_160825

SEQ ID NO: 24139 - DNA, 3000 bp, Unknown; identical to SEQ ID NO: 2646
  misc_feature (1)..( 3000): 2750-1469P.txt file - cDNA_ID_2167433; gDNA_ID_1620571; Annot_ID_160843

SEQ ID NO: 24140 - DNA, 3000 bp, Unknown; identical to SEQ ID NO: 2653
  misc_feature (1)..( 3000): 2750-1469P.txt file - cDNA_ID_2167443; gDNA_ID_1620571; Annot_ID_160846

SEQ ID NO: 24141 - DNA, 3000 bp, Unknown; identical to SEQ ID NO: 2650
  misc_feature (1)..( 3000): 2750-1469P.txt file - cDNA_ID_2167449; gDNA_ID_1620571; Annot_ID_160849

SEQ ID NO: 24142 - DNA, 3000 bp, Unknown; identical to SEQ ID NO: 2662
  misc_feature (1)..( 3000): 2750-1469P.txt file - cDNA_ID_2167544; gDNA_ID_1620573; Annot_ID_160901

SEQ ID NO: 24143 - DNA, 3003 bp, Unknown
  misc_feature (1)..( 3003): 2750-1469P.txt file - cDNA_ID_2167562; gDNA_ID_2936568; Annot_ID_194692
aagcatgtattatatcctgtaagtttctaccgcgatagggctctaaagttttttgttttccctccttgttgggttggaaaatgacaaggttttggtctctgcaggttgccattgacaacattcctactgaaattaaggacaatgatgacatcctcgagagcgagttctttgatactaggcaagctttcctgagtctttgccaaggtaatcactatcagtacgacacactaagacgggcaaaacattcttccatgatgattctctatcatcttcacaacccaaccgtccctgcatttgcaatggcatgcgccatctgccagcaagaacttgaaactgctcaaggttggcgttgcgaagtttgccctgactatgatgtttgcaatgcttgctactcaaaaggcatcaaccatccacatagcatcattagccgtccatctgcgacagattctgttgtacagaacacacaaactaatcaaattcagaatgcccaggtattccttttctttcaattttttagctttgatcatagaattgatgtccatatgcatacataattattcacttgtcaaagctggaaagatagataggctcaactccttttaggatttttaccaaaattcctttcaaatattgtgtagctagataagtgtcggttagaaaattgagtttgcatctcttggcttctcttttccttattgctaactacggtttggcttgttggtactgcagttaagagaggtgctgctacacgtaatgacatgctgcactgcacagtgccagtatccaaggtgtcgcgtgattaagggtctcattaggcatggtcttgtctgcaagaccagaggttgcatcgcttgtaagaaaatgtggtccctcttccgattgcactcccgaaactgcagagatccccaatgcaaagtccccaaatgcaggtatgtaatctaactacttataaagcaaattttcaattatcagaatagatttgttcaagaaggtgatgtgtttaataatgatctgacaagtttattttttgcagagagttgagagctcattttagtagaaagcagcaacaggcagattcaagacgcagagcagcggtgatggagatggtgcggcagagagccgctgatacaacggcctccactcctgaatgattaacagacatgttatattctctgtctatggggtcaagggttcgtgcctgaagtaacgatccaaatggcaggcgaatcaagaaagaatgagatatttttggctgattaatttggagattcaagaagctagtttaggagagctcatgggaaaatgagcagatgggtctcttccacaactgctaatttaggttcacaacgaggtacatagatattttttcttacatgtattctaaagtatagacatgtgtataagggaattgtgattttgattcaatttttggtgattctgttcattgaatcctattgaattcgactactgaatttgatcttaatttacttactctttgattccttcgtattgtatatgtggtatttttggcaaagctataagctaataaattcttgattttcaatcattacatatactagactggaaatgcaagtttttactttatattcaactagaatactagagtttatccagttgaacgaaaccaagaccccgaagcattttggagtcattaggcaacgaacccattataatgtatatagaaatgatcttagtacggcgaaagccaatgaaattaacaaaaaatacactgccaaactaaagtagtagaattcacctactagacattccatggtgaaatggatcagacagtttgatgaaactctgggaagcttcataagagcattggtgatcgtcaggaaccttttcttaacatccttgccttcactcaattcgacattaacattgacagtttcaagacgttttaaatttgccaagaaatgcctcattcgtttcagctcttcctcttatccctcttaggggtgcaaacgcaggcgtcaccacgtttgtctgtaacttcatgcacaagaccgtgaaagcaaaaagaacaaggcataagcaaattcatgggaataataactttagcaaagaaacagaagtgcgtggtgatcgaacgaaatagatgataccttgatgacttaagtttctagatttggagagtagttaaggagaagtggctccacttaccagcctctttctttgttacactcaaaagataaagtaacgaggttgggaaacaccgggattgatttacagcacgagtaaaatacctgggatctattgtcacaaccaaaacaaacatatacacaaaatgagactttgctagctagcatgcacttcaaatagaatcaaccaatagaagaagaagacgtagcagagactgacctcaagagaaacagcggacaagtgaagggttttaacattgcttatccctgcaaccagattcgtaacataaccaacaatatcctctgtatcaccatccacataataattaatagtcatctggaagacgctcccatgagtgtagcttctacaagggaacccaaatcaacctcataatcttctgcgggataaccagaatagtcaagatagacaagactgggtgtatcaaacagacgaaaacccttgtgaccgttagggtaacggggccaatgataagagctggtcagtcgtttgataagagaaggactagacacggtccctccatcaaacaaatattattaaaaggaaaaaaaaagagataaatgaaaattggtccataagacaaatactgaaaagacgaggggttaaattgaaataaatccctcctcttctctgttcacaaaatcctcgcgccacaaaaccctagctgaacggaagaaggttagtggtttaatctccctctggggaaagctgcttatgttgattctctaggcttttttatattctgaaagttttgattttttgtatcttgttttgtttctcaatcatcaatttgtggtagtagctcactagcaaacaatg

SEQ ID NO: 24144 - DNA, 3003 bp, Unknown; identical to SEQ ID NO: 24143
  misc_feature (1)..( 3003): 2750-1469P.txt file - cDNA_ID_2167562; gDNA_ID_1620573; Annot_ID_160906

SEQ ID NO: 24145 - DNA, 3003 bp, Unknown; identical to SEQ ID NO: 24143
  misc_feature (1)..( 3003): 2750-1469P.txt file - cDNA_ID_2167562; gDNA_ID_2936568; Annot_ID_143738

SEQ ID NO: 24146 - DNA, 3000 bp, Unknown; identical to SEQ ID NO: 2665
  misc_feature (1)..( 3000): 2750-1469P.txt file - cDNA_ID_2167587; gDNA_ID_2936568; Annot_ID_194696

SEQ ID NO: 24147 - DNA, 3000 bp, Unknown; identical to SEQ ID NO: 2665
  misc_feature (1)..( 3000): 2750-1469P.txt file - cDNA_ID_2167587; gDNA_ID_1620573; Annot_ID_160911

SEQ ID NO: 24148 - DNA, 3000 bp, Unknown
  misc_feature (1)..( 3000): 2750-1469P.txt file - cDNA_ID_2167587; gDNA_ID_2936568; Annot_ID_143742
gcggcaacagatgaatgcaataaaaaacttggtcaagcttgctcttcttctttatctccagtccataactttctgaatgtccagccagaacaccggaaaactcctttcataaggtcacaatctccagattcacctggtcagctatggccaaagaatagttctcagagcaccttctctcggtcttccaccttttgcacaaacctctacttgtcatcatcttcaacctctgagactcagaaacatctaggaaacagtcttcctttcctccctgatccctcctcttacacccactcagcttctggtgtggagtctgcaagatctccatctattttcactgaggatttgggcaatcaatgtgatggaggcaactccgggtcgcttctcaaagacttccttaatctttctggagatgcttgttccgatggcgattttcatgattttggctgttcgaatgacagctattgcttatcagatcaaatggaattacagttcctgtctgatgaacttgagctggctatcacagaccgcgctgaaactcccaggcttgatgtaagttaatctcagtcttgtacagctcttatgagtttgcatcagttactttgcatggctatgacaaacattgacttatactttcactgcttatgactttcggtctttgctgttgatacatagagtgtgaaacgtcatttgctcctttaacacttagtttctgtttgattcaggagatctatgaaacgccattggcgtcaaatccagtgacgagattgagtccaagccaaagctgtgttcctggagcaatgtctgtagacgtagtttcatctcacccttctccgggatcagcagccaatcaaaagtcgagaatgagatggactcctgagctccacgagtcttttgtaaaggcggtgatcaaacttgaagggcctgaaagtgagttttagctttttgagatacgagtaggcacttataaagtagaactctagagctactcttgtgtttgccattggttagatatcctttgtttcttctcatctttctgctgataacgcttaacccggtttttgcattaaacatgtagaggccactccaaaggctgttaagaagctcatgaatgttgagggcttgacgatctatcatgtaaaaagccacttgcaggtactaaatcagtttgagtgtgataaatttataagtacatgataccaaattagctgaatatctctgaaattcacgaatgtgcagaagtatagactagccaagtatatgccagagaaaaaagaaggtaaagcctccaacttgttattgtgatttcacagattctctgtttctgcatgatcatcagccatgattttgatctatctgacagttcctttattatttttcgtttattccccagagaaaaggactgataactcagaagaaaagaaactggctttgagtaagagtgaagctgacgagaagaagaaagggtaaagcattgtgtttctctaattccatgttcaatccgcagacatttttcaacattatccctaaaatgactctctttttccatggacagggccatacaattaactgaagcactgcgtatgcagatggaagttcagaagcaattgcatgaacagctggaggtaaaaccgattacacttaacttggggaaaagaaatattgaagatttgctactataaccagtcccataattgatcaatgtgcaggtgcaacgggtgcttcagctacgaattgaagagcatgctaaatacttggaaaagatgttggaagaacaacgcaaaacaggaaggtggatttcttcttcttcgcagacagtgttatcacctagtgatgactctataccagattctcaaaacatgtccaaaaccaaagcatcttcgcctcagccgccattacctgcagagaacaaagcgtcggaaaccgaagacgataaatgtgaaagccctcagaaacgtcgcaggcttgagaacatagctgaatctgaagatcctaagaggtagtaagattcttcaagtatgtaaatatggtccgttttgtgtaatttagtgagagagagagtgtcactcaaaatatatgtttgtaatgtagatctttgtcagaaacgtgtaaacttattacggatattgaggatgtcactgccttcactgtgagaaaagaatctttaattctgtgtttgtgtgtgtataggtcactggttagtgagaaaactgaagagttcactttccaatgtttatatacaagtttgctaatatcaaacgtggaagtcactttccataagaagcctttatgcgtctgagagagagagtacgataagtaaatagaccttcatgcatacaattacttacgggaagcaaaacaacttgagcaaaattcttcactctcatcagtcatcactctctctctctcttggaaaagtcaaaatcaagggtttcgtcgtcgctttgactggcttggactcgcttggtggggttttctgtaaaaaagttgtttgctttgatcttctgtgttacaatggagaaaatttctctgaatgatgatgaatagtttcgataataatttatatgggtctaccatttcgtttgctagttgtttgagcattactatatagctggtttttcgtcatagtagagattaaagtttcgttttttcctctctttctccatcggcattaatgatttcaatctctgagatcaagttagtgaattctctgtcacattaaaggccattcaaaattcgattttgatgcttgttcctgatttttgtaacagctgattgagaagcgaaaaatgcttgaatcaggaatttgcaagtatgcgtgaacaaaggagcaagaaacaatgatctaaagaagatgaaggtgagcctatcactctctctctctatctctagacattcactcatcaatcatgcggtgtattataactcaagtagtaatcatgttgtacataattccctgtgattcaagttccacttactgttagagagacgtttcctaagatg

SEQ ID NO: 24149 - DNA, 3003 bp, Unknown
  misc_feature (1)..( 3003): 2750-1469P.txt file - cDNA_ID_2167593; gDNA_ID_2936568; Annot_ID_194697
atcaagcctgggagtttcagcgcggtctgtgatagccagctcaagttcatcagacaggaactgtaattccatttgatctgataagcaatagctgtcattcgaacagccaaaatcatgaaaatcgccatcggaacaagcatctccagaaagattaaggaagtctttgagaagcgacccggagttgcctccatcacattgattgcccaaatcctcagtgaaaatagatggagatcttgcagactccacaccagaagctgagtgggtgtaagaggagggatcagggaggaaaggaagactgtttcctagatgtttctgagtctcagaggttgaagatgatgacaagtagaggtttgtgcaaaaggtggaagaccgagagaaggtgctctgagaactattctttggccatagctgaccaggtgaatctggagattgtgaccttatgaaaggagttttccggtgttctggctggacattcagaaagttatggactggagataaagaagaagagcaagcttgaccaagttttttattgcattcatctgttgccgctgagagaagcctgtgtctgttcatgattgctttgatgtacatcaacaatcaaaactgtctcttgacaagatcccccattagtttgcagttagcatccaagccgctgagaaccaaacattttgatgattaggataagaatggtggggtcaataaacatgttagtgacaagaattgagtcagtttgtttagttaactttcagaacaaggcatacagaatcatccagtgatccatcttggctggatcttgacaagttaataagttccttgagaactaaaaagctaagtaattggagcaacaagagtacatccgagattgagatttaccatatatacagacacagagagatgcaacgattaaatatggtgttccaaaaaatgcaaaacgagttgccgacacatggaaactttaaaactcgaacagaggaatcaaatcaggttacgcaaagacacgattacaggaggacagaaacgcaaagagaaatgaggtattaaattctaaattcagaatgttgagactgacaagtagtagtacgaatcattcacagagaaaatcaaaagcaatttatttgattttatatttgattttatcaaagggcatgatagaatagaaacggacctgagaggatgataaagtcttcacctttttaatacttgctgcataacaaatgaagaaaaaactaacatttgagaaaacaagctgaatcccatcaaagagatgaagttaattcgaatgagaaagcaaaagaagaagaagaagagatggggttaaaggaaggagacggagatttcgctacgaaatcgccgtcgaagtgtgtactgttggctttgcttgattggtctccgtcttgctggacctctttcttgttccacccgctctttcctcgactgtaactcacggaccaattcaatccgttagttcatttgccacgtaggattcaagtgctcgtgcgttttgccacataaattttattttattttatcgacatcacgcttagctctctctcgtattctcttcctaatcacatttcatacctggtcaaccaaattattggttttaaaaaaactatactacttctttgggttatgagatttgaggatttttttaaaatcatttatcattgttgattcgaattatttatgtgatcgatactagtagtacttcgtaagctttgttttttcttttccaatggagtacatactattgtgaactattctctgcttttctttttcagttagtattgatatctttatgttgtaagaaaaatcgtgacacaattacgaattattgatataaaaacgaatgataatgattaatgaatatgaatgagaaaatggttgcccaaaaatgatagtgactgatctgtaatgcagtttagtagaattagtttcttttaatagcaaaactaatgatcattaatcttccaaaaggaaagacaaagtagcatcatccattaacttgtgggtcatatctaaagccttagccacacaaatccatccaattttttttgttttttttttgtctttagtcttttttaccacataagtaagataatgctaatttaatgctcatcatagagaatgagctcagcaaatgctttctacctgattatttattatcttcaaaatagtcaagtttgaggcatcaagtggtagaatgtctaaatccttacataatttatatttatttttggcaacatacataacataattcaacactgttctaagtaatacatggctagtgggttatataagattatatacttcactaaaggttgataaatcaattctcagtttgcattttgccaatatacctcaatttatcatctttagtcccacaaatgatggccacttttgtcgtactgtatgtttgttttcgacttgtttaagtgttgggtcccctcattgatcaattattgaaaaataaaatgggccttactaaaaacatatatttgggttaactagagagaaagcccaaatacaaaaagagaatcatcagcgattcaacagaggcttgaacgcgcgtcaaaaagcttagctcaaagattgaattttgattttcacatgtttttcttcataggccaaccattaatggcgttgactttgtcaattctctgacaattgtaatttcgttctcctgaaaccgtgggagaaaagaatctgcatttccttcaagttcaacgtcttccaggtttgattttgatttccttttcccaattccatgacttttttgatccgtatccagtaattgaccaccgtgattcgcgaatcatgattagggtttcgttgttaatgaatggcctttggatgatcaatggtggtgtttgagatttaattgggatttagttatgccctcttggaatttggtatcagcatgagtgtggagcatttagtatctgaatccgattgatgaaaggttgacacttttctcttttgttttttccagattttgaaatg

SEQ ID NO: 24150 - DNA, 3003 bp, Unknown; identical to SEQ ID NO: 24149
  misc_feature (1)..( 3003): 2750-1469P.txt file - cDNA_ID_2167593; gDNA_ID_1620573; Annot_ID_160913

SEQ ID NO: 24151 - DNA, 3003 bp, Unknown; identical to SEQ ID NO: 24149
  misc_feature (1)..( 3003): 2750-1469P.txt file - cDNA_ID_2167593; gDNA_ID_2936568; Annot_ID_143744

SEQ ID NO: 24152 - DNA, 196 bp, Unknown
  misc_feature (1)..( 196): 2750-1469P.txt file - cDNA_ID_2167607; gDNA_ID_1620574; Annot_ID_160923
aacatggagcaagtgtgctactctcctgagatattagaaacacaaacctattacaccatttcgaatcaaattctacaaccattactgattccggcggcgagcaaagccaattctgacggtgaagagaggcaaaatctgggcacgagcagccgcaaatttccaatcaaattattctcagccgatctcagacgccatg

SEQ ID NO: 24153 - DNA, 3000 bp, Unknown; identical to SEQ ID NO: 2672
  misc_feature (1)..( 3000): 2750-1469P.txt file - cDNA_ID_2167620; gDNA_ID_1620574; Annot_ID_160926

SEQ ID NO: 24154 - DNA, 3003 bp, Unknown
  misc_feature (1)..( 3003): 2750-1469P.txt file - cDNA_ID_2167626; gDNA_ID_1620574; Annot_ID_160928
ctagaacgagttcctgttggatggcagcagaatccaatggttcagatgttgtatccacctgcataatccaataaatagaattagaccttacaatgtcaaactgctattaatgagaatatcaataatgccagcgattaaagatagtggggaaacaccaaacgacttgtgacagtaaacagtacgtaatgaagtgattcatcaacccttatcagttagcaccataaaataagaacctgcctatgtcgcttgctgcaagcagaagaaagagcctggatcgcataagaatacagcctcctcacttctgatactttgaatctggagaactccccttgaacaacacataaaaactccctccataatttgtagcttgcggaattctgcataagtgccttttcccacctactgattagtacatcagcgttgtctctgcttcggtatgccttgagcagagcaagcaacagttcttcgctatctgggttcagctcaaaagccttctcaagtatactaatctttttctctaaagtctgcaggcgaactcctttctgagattgcatacttgaaaccttgtcttgaaaatcagcaaatgccagccatgcctttgcatcatggggacgttctctcgtcactctgttgaactcccgtgttttattcagcacttcatcctcccatgatgctccaatcattgagtcctttgataaaacatcttcttcgtcactttctggaacagtcacgtcttcctccagtggaatgaaattatcaaaggaagaatccacagcttcacttgcagcagataaacgaatacgcttgaaattcttgttgcgttccatggcagcatgttttgcataccagtatcgggtatcagactttgctctcccctccaaagaatcaatatcaatctctgtgtcaagcatagaactacgtcgattccgcaaataaaacctcagagaacctgaccctggaactctctgagaattgtcaagtttataacgaggaacattcatcctgtattatgcaaacagaagcaaaatttcaatatccctacactcttaaaacgccttgcacagaatacagaaaatgaaaccaaccataactagacaaattataagcaaagtacctgtaaatagagccataagccagattatctggatcaggacgagtgtccaagtaataatccttcacaggtttcgaatagtattcatcagatttacgagaacgagattcatccgaagcattatcactcttccgtttcttctttttctctcgcttcctctttaccttgtcgtcatcagactccaaagacccttcttcttcaaccaaattataaaccctagcctgattagctaaaccgatatttccatcagctcctccttcttcatcttcgtcgtctccagcctcgacctcggatgaggaaggagccgtcgaagcggcagcgttgatgacagagagatccgtagtgaagctagcgttgcgaagccattgaggagcattcgaaatagctgagatggagttcgccgaagtagggaagacggggaacaagccgcctgtagttacctgtgctccgtcgccgtcttctggtgtattcgacattacatccaccggaaaaaacaaaaccgattctgtattttttttgtgccgctatatatttctgccaaggatcgtgaatactgaataggcctaattattgggcctatataaataattaatgggctctattaacattgaaagaatttactcattgtttaatgttcaacaacattcgaatttgaattcgaaactacataaccggtaaatatttattgattaattattacgccatatttaattttactcgttaattcgttatgaaaaagtacagcaaaaagtataaaaaccacgtgcaatattgtaaagaataaactaaaatttgtgataaatttaggacagtctaataaaaattggcaaaagtgtcattttgcttttttatttcccaccaaaactaatgattttccatggatccaaaggtaaacacattttggagaaggtaaacacatttgttttggagaattccttcaggcgtaaatattgcttttagcggtaaaagaggctcaatcgtggcaggaagctcaattcgagctccatagtgaaagtcatggttctttgtctatagataatcgaattcgggtgagggatgtatcacaagatacaactttttctggctatcggtgttttattgatggatcttggaaagcaagtgaccagttctcaggaacaggatggttctgtctatcatctcttggagagtcgccaaccatgggagccgtcaacgttcgtagaagcctatctcctctacataccgaaatggaagctcttctttgggcgatgaagtgcatgattggagcagataaccagaacgtagctttctttacagactgttcatgtcacgtatgtaaacaatatcccggattgactcttttgagttttaatttatatcggttgaaaaaaaaaaaaaaaaaaagataaacacatttaataaaaataaacgaaaaaataaaataaaaattggcattattatttgcgcattggtggcgttgataatgggatgtccaaggaggagggaagcgccgggattgcagcataagcaaatttattaagacgaagaagaagaagctccattagattttgcagaacaaatcaaaagaacttcaacaaggaatattgcaagaaattgattgaagctgctcgaattagatctgtaagtgaaaatgattgctcgacttcgaattctgggttttttgttttgttttttatggggtaatattcatgagagaaggagaatatgcttttgttagggttctgtctaacgaattttcgtactagtcactaagttgcttaattttatctttctgggtttttgtttggagggaggaattatttgagattcgaagaaataaatcatggagtttctgtttgtgtaaatgtttctcaggttttgtgaaaatttgtttctagagatttggggaaatg

SEQ ID NO: 24155 - DNA, 3003 bp, Unknown
  misc_feature (1)..( 3003): 2750-1469P.txt file - cDNA_ID_2167630; gDNA_ID_1620574; Annot_ID_160929
tctacataccgaaatggaagctcttctttgggcgatgaagtgcatgattggagcagataaccagaacgtagctttctttacagactgttcatgtcacgtatgtaaacaatatcccggattgactcttttgagttttaatttatatcggttgaaaaaaaaaaaaaaaaaaagataaacacatttaataaaaataaacgaaaaaataaaataaaaattggcattattatttgcgcattggtggcgttgataatgggatgtccaaggaggagggaagcgccgggattgcagcataagcaaatttattaagacgaagaagaagaagctccattagattttgcagaacaaatcaaaagaacttcaacaaggaatattgcaagaaattgattgaagctgctcgaattagatctgtaagtgaaaatgattgctcgacttcgaattctgggttttttgttttgttttttatggggtaatattcatgagagaaggagaatatgcttttgttagggttctgtctaacgaattttcgtactagtcactaagttgcttaattttatctttctgggtttttgtttggagggaggaattatttgagattcgaagaaataaatcatggagtttctgtttgtgtaaatgtttctcaggttttgtgaaaatttgtttctagagatttggggaaatggaggattcgagctctatcgattcgattttggaatttttgcggaagaatcattttatgagagctgaagctgcgttgattagtgagctttctaagaaaccaagttcaaatgggtctcttcaaaagcttaactttgaggataattgtgtgagcaagttgttggataagaagaagcaaggcgggagtagccaagcattgggtcttcacaacgatagtcacatttctgatgaattggttgtgaaagagatacaatgtggagctgccaataacttacacgagagtaatcttatgaatgatgtttctgttcagacacaaagtggtaatgcagatttttgggaggagagattcacgtttgctgaaggatttgaggataccgagctcgatttacctccctggaaccatacctctactgatattgtagctgactctgaggaatacagtatcaatccaagtaaaagaggctttgtgaatccacggagttcaaagcaatcaagtcatgaaaaggttcctgaacctggtaaaagcaataaagtggttgtggaagacgtcttctcttcttttgagaagatacggactggaagctctagccaggtatctcagtatgaccatggcaaagcatgtcaatctctggaagttgataataaggttgggaactctgcaatacaagaaggattcgtcaccacgtcatggtcaagaagcgaagagaacattggtgcttcaccagaccattggaaggattgttctgttacaactgtttttccgttgtccaaaggaagcacgtcaacaaaagataatggtgtagccattttagataaatggcaaggaaagaaactggttggcgcgagtgattccaggattcttatcaaggagcaggaagatgatgtggcaacagcgctataccttgggaagtcacagtctggttatgaacataagattccaagcagcttagcattttcgctggctcatgatgctccgagggaagatttacctagactgccacatgtaaaaatcaagtcagaggataaactaatgaactttacttgggaagaaaaacacgagcgagacatattggacgagaagctgattaatactgataatgctttcctattaggctcttatctagatgttcctattggacaagaaataaattcatcaggttagttgacatgatgatggctaccatccaaatcttaaaactttatgttctgtatgagtaaattatgttaccattggctagcttttgcgtacaccttttcttttgttttttgcaacctataacttaccttttctattgtgatggtgtcataggtggcaaaatggctggtggaggaaactggttgtctgtaagtcacggaatagcagacgatgcatctgacttgatttttggctttggcgatggcttaggtgctctcaatgaacattcaaatgagtattgggactctgatgaatatgacgacgatgatgatgttggttacattaggcaaccaattgaggatgaggcatggtttttgggtcacgaagtcgactatcctagtgataatgagaaaggcacagagcacggaagtgttcctgatacgcaggataaaagtcaaaccaagaatgatgatgatcattcatttgccgaggaggattcttatttctccggtgagcaatatgtactcgctaaaggcattgagccagttactgcttccaatgatccgatgggtctctcaatgactgaaacatacagcacgaccaagcaagctgatttggttgctcgatatgacgggcaattgatggatgcagaggagctaagtttgatggacactgaacctgtgtggaagggatttgtcagccatgaaaatgatgtaattttgttgaagaaagggaaagtcgaggacaactctggtagaatctgtcggaaggatatccgcgcagaagatgatcgaaatgctgcagttaggtcaattggtgtaggaatgagcgatgatgttgatgacaatgggagtataatacctgaatactttcctggagaaggtagtgaatgggatctggagctccttccttatcgcggagttggagttgctggtgttaagcctccacctggtaaaggtgcgagtatgctgcttaaaaactttgcagatggtggattctcatttccctctccagtagctgatagacagaagtcccaggatgattctgcaaaccctgaatggtcaaaccattgcgatgctgttgtgagaaatgaaagtgatgaaccaaaggggctaatccagtccgatagcatgattgtctcttcgacaaaaagatgcagtggctcttcttctgaaagaaatttaagagacatg

SEQ ID NO: 24156 - DNA, 3000 bp, Unknown
  misc_feature (1)..( 3000): 2750-1469P.txt file - cDNA_ID_2167633; gDNA_ID_1620574; Annot_ID_160930
gtgtatttggttgttaggggagaacttagtttctccttttcgattttgcagtttgggaggcacacctttaatggaacttatgattgctgctggaaaagcagtccctaaactgcagttggaatttggacttgccgttgatagggtgtatacaggcttttttatgacttctcttgatatggcaggtgagtttctgtcgatttcttcatttagttaagtgttacatactcctgttatcattctgacgatgcttcttttcccaggattctcgatttcaatcatgaaggctgaccattcgattttagaccgattggatgctccaaccaaggctccaaattggccagttggcactgatggtctgtgagattgaacctgtttctgtttttccatgaattttttccttggaatatagtcttagatacaaaatttttgttgcattgcaggcaaccggccaccagcgaagattcctgttcctgttcctccttctcgatcaataaaaagcatggaggtatgcatcacaagtatgataaagataggttgtttagaggtatcaaggtttgttgataaatggttttggtaaatttcatgacaacttggcaataccagtctcaaagccgacctctagagctgagtaaagaaggtcaagttcttgaggcagctattcaagcagcagcaactgtgatcatcagccttaaggatagtttgaatgaatgggatggaaaagtaggcgatggtgattgtgggtcaacagtaagtcttgttttttagacgttgctacttgctactgtgcataattatattatgttcatttagtattattatcttacatgggtttgcatcaatattgtagatgtacagaggtgcaacagctattctggaggacatgaaaaactagtgagtccatttgatactctcacttccccatatacctctctttatgttgagttcttcagacttcacagagattcttgacaaaaaatttaaccatgtctctttttgtttctagttatccactcaatgatgctgcggaaacagtgaatgagattggtctatcaatcaaaagagccatggggggcacaagcggaataatgtaattcatgaaattattttacattttcttcgttatagacagctcatgctgttgggttttattggtaaagtgacattacgggctctcttgtgaaaacagttaccatctcctctgcaaggcagcatacgcggagctaaaagctaacgctcagtcagaagtcactcccaaaaattgtgagatcatgcttgcttgttgtggttagttagtattctaaaagggacatgctcgttttgacactcaacgttatattgaatcagggtctgaagcactcaagtcatcaatcgcttcagtcagcaaatatggtggagcaactgcgggctacagaacgatgctagatgcgctcatcccagcttcacaagttcttgaggaggtgacaaagagcaacttactttctttcacaatttagataattgcaacctgcgcaagtagtaatgagtttttgcttttgataagaacagaaactgagcgctggagaggatccaatatctgctttcattctatcaggcgaagcggcaactgccggagcggaatcaaccatacagatgcaagcacaggtgagtttagcataccattatttcggtctgccattgtttatgctataagtggttttcatattttgaaatgacggatgagattgtgtaaaacaggctgggagatcaagctatgtatctgcagagaatcttgcaacggttccagatccaggtgcaatggcagcagcgggatggtacaatgcggcagcaagagccgtaaaggagcagtatgagggctcgtcatgatcccttctccggagtttcttcttttatttcccggatagacgaattgggattctggtgtatgtacgtttaaaagatgtctgactttgtgagggcgctctccgtttatgcaatttttttggtggtgcgtaatactgtgagagtttagaacttcctagagagaacaagacttatattggtattttgaattcttaattttgtttattctgtagttctaaaagtaagggtgtcgctcaactaaactcagctcattagatgagctagatcagtttaccttatttgatcttctatatataaaccgagctaactcgcgagctatacaaaataaatataatagtaataataataatcacaaaaattcacatatttgttccatctttttaagaccctatcatctgtattctctgcatatgatttgttcaatttgcccaatcagcatgagacgtgtactacaagaaagctctgacgcacgttaaacgactctgacaaaagtgtttcctaagcattgtaccgctattttttttttgaaatattatttttgaaatttcggtacgtaaataacattagcatctttctatatattctgaaatatctaaatggatattagccaggagataaacatgaatctttgtagctccttatctctctcaatatatatcacaagacgtatataatctgttgtaatcgttcctcgtaattcaatacagtacgtagaaactttctgatccaaaggtattttattcacaagaccaactttatatgtctgtcgggtatttgagatatagtgagattaatattttataatttagatggtatttggtataatctggtctatgatcttgggaagaagagacagattgaccatcgatttgtgcatgtggtctcaaatcaggaaataaatatgcagtgattctgatattgttctctgtttaattgtttgaggacaataataagttgttgaaataatgtaccaaatccccaattcaaggggaagagagggtcaaggggggagttagttatatgaatgtcttaaattagtgttaagagagtttttgctttcttactttctttatatttgtgaaaagcttctgacatagtatatttttatgttcaacaattcagcataactcaaacacaatg

SEQ ID NO: 24157 - DNA, 3003 bp, Unknown
  misc_feature (1)..( 3003): 2750-1469P.txt file - cDNA_ID_2167652; gDNA_ID_1620576; Annot_ID_160986
gcttttaagtttttctgaaacagttatgttaaaatgtatgagaaatttgagcttcattatactctattttgaagacatttcttattgcctatttgagaattagctaaacattaatattgccttaacagtaatgttaacggtaatataaagtctaattagtctaagtgagaatcaacataaatagtcttaccttaagtaaatgttctcaaatttcagaaactggaaactagccgtttgattattggaaaagaaaggaaacgaaaaggaatacaaatagctaaatctttgtgtaagatttcacaatctcttcttttgtgttatttgtttatatttgtgtctgagaaaatctgagatgaatccaaaaagatgtgcagcttgcaagtatctgagaagaagatgtccaaaagattgcgtattctcaccatatttccctccaaacgatcctcaaaaatttgcatgtgtccacagaatctatggtgctggaaacgtttccaaaatgcttcaggtatatatatctatacacatctttgtgtatcttcttctaatatcctatttaagatcacactttatgcatatatataagtaagtgtattcatggttggattttggtgatctttttgacagcaacttcctgatcagacaagagctgaagcagtggaatctttgtgctttgaagcaaaatgcagagtagatgatcctgtttatggttgtgttggcattattcatttacttaaaactcagattcagaaaactcagaatgaattagccaaaactcaagctgagattgctgttgctcaaaccaaacttagccaaacccatatttctgattttatgtaatatctctcagtttcaacaataaattctcctctgcattttcgtttccgattgcttctacttataagatagtgatcttctttaactttaactatatcagactcataatcaagaggccattagctatactaaaaaagtgtttcataaaacacaaatgtaaacaagttcgaatcgagtttattattatcacaaatccataactaaagggtgacaattatacagtcttgagtctcttggccgatattttgagaatcataatgtaaaaagataaatgaatctgtttacaaaatacatgacactattacaaatcgaatttactattttccctgcttaagctcccattccttttacaagtacatgacattacactacttttgaaggagcttttcttgtatagttacaaagatgatcaatgaatctgtttaatagacgaaaatatatatgtcaagagacactgaaccttcaaaatcggcctgtatcccacttggtgaacataatttgatgttggctcggagtttcgttcgtttcattcattccatccgtgtattcattaccaaatgaagaattgaagtctggatcagaatccatggattcaaccaagtttgaagctttctccacctcaagggcttgctccaacaattggatcatacaagcattatgttctcgaataggtgagataccgtaaacttggatcatccgagtaaagtacctcaaaccatcctttacatttccagtattcgcacaagcggataagacaccaacgaaagtgatagcgtctggttctacgcttgcttcttcttccatctcttcaaacagagacaaagcctcttcaccacatccatgtacccctaagctagtgatcatcgagttccaagtcgctaaactcttaccctgcatcacgtcaaatactttccttgcgtcctgcaagcttccacatttgctatacatatcgatcaaagcggttccaaggaaacaatcaagcacaaaaccgtttttatgagcatagtcatgaacccatcttcccatagacaagcttcctaactgagtagaagcttgcaacaaattaacaatcgtaaactcattaggcttgacatcatcaacctgcattctcctaaagagctgaaacgcctcgtcgggtctacggttcttaacgtaagccgtaatcattgcagtccatgaaacaacgtttctcattggcatttgattgaatacaatctctgcagaatctaactgagaattggagacaagaccataaagcatagtagtccatgaaacaatacttctcccaggcattttatcaaacaccttacgtccactatctggtttcccacacttaaagtaaagatccatgagagtgttttggaagaagacatcattaaaaaacccagctttaatagctaaaccatgaacttgggtacctaaacgaatcgacgaagaagcgagacaagctttgataacaaaagggaaagtgaatttatcaaactgggattgatgagagatcatcataaggataaagagaagaagagcttcacgaggtttgtgattaacagagagagatcttatcataaggttccaggtaaaagtagaaggagattgaagttgattaaagacgagagaagcgtattgggtttctccgaaggaagaagaaacacttatgagctgacgaactagtaactgatcgttggtgagattgtgtttgatgattttggtgtgaatttgtttcaattgagagaaatttgaacaagttcggagaaagtaagaagcttcgggagatcggaatggtggaggagagaggaggtttggtggtgaagacggcgacggagccgccatggattaacgataaatcaccaaattctcacattcactctttcctcgattgatcgtgtgtggatgatgatgaagctgcatataaaccgaactaaaccgaagtttggctgatttggttcggattcggtttattgtgtagcaagaggaagcataaccagattgattcgactaggaaccactaaaccaaacgaaatacagaaatttcgaaccaaaccggatcgattctacgtgtattaaacgtcgtcgtttttgttagctaaaaagaagaaatagtaaatatccattagaagaagaagacgaagcagaggaatctagggtttatgctacattgaagcaaagatg

SEQ ID NO: 24158 - DNA, 3000 bp, Unknown; identical to SEQ ID NO: 2690
  misc_feature (1)..( 3000): 2750-1469P.txt file - cDNA_ID_2167656; gDNA_ID_1620617; Annot_ID_162075

SEQ ID NO: 24159 - DNA, 3000 bp, Unknown; identical to SEQ ID NO: 2690
  misc_feature (1)..( 3000): 2750-1469P.txt file - cDNA_ID_2167656; gDNA_ID_1620576; Annot_ID_160988

SEQ ID NO: 24160 - DNA, 3000 bp, Unknown; identical to SEQ ID NO: 2700
  misc_feature (1)..( 3000): 2750-1469P.txt file - cDNA_ID_2167701; gDNA_ID_1620577; Annot_ID_161010

SEQ ID NO: 24161 - DNA, 3003 bp, Unknown
  misc_feature (1)..( 3003): 2750-1469P.txt file - cDNA_ID_2167723; gDNA_ID_1620577; Annot_ID_161017
gattgaaatttggtttaagaaatatactaaattaaatatataaaaaagtgtgtggttattatttaaaattcaaatattatccgtaaaatgaagtatgtacaattaaagttcagtttattttgataaaatagatagttaaaagtatatagtaaatagaatgtgtaagattgaaaaacaatttaaaacaaaacttacaaaattaactattaagaaaagtgtgtgcattactatttactattcaaatttctaatttctaatttcattggtaaatttttctatttatatctatacccgcctatttaggcgggacttatctagattaataataaagatatttagaagatttggttctgatttaaatttatgattctcctttcatctttgtttgattattttttaaaatgctttgaataatcatatgatacataagtttaaaaatatctcaattttgttttctgcatatatggtgattcaaaaatttttaaaacagacatatattacctaactaatgaaaaaatatatgtttaacgttccatatcggctaaaatgtttagacaatgatttagagtcctattataaataagatcaaaatgaatcaaaattcgaatgaatatgaactttaacttaacaaacatccaaattttaaaaatatataagaggtaattctgttttttattaaactatttctttttaccacaaatattataattaatatatttgaaagcattagaaagtttataatattatgaacattagaacatataaaaataaaaagtaatatgggaatgattatattgaagaacaaggttttatggtgccacggcggaacgagttttgagtcaacattaataaaaaatataaatatcattaactcgctgctttaatacgggacggattaaaatcaataactattttgaaattttatgaacatttgagcatatttaaagaaaatagcatgggacgggttatatggcgggatggactatattaaaattgtattgaggatttaatgtcaatacaattgaatttatgtatactagagtctacataattctgttttatgctattttggttaattttggtttagctttagacttggtttagttaaagaactcttgtacagtccattcaattttgaaagaagatattttacgtttttgtttctctttcgacctcaatcttgagagaagctataattgtatcggcccaaatttcaaaattcataaaataagatacataccgacaagaaataaaacgtttatatatatctagtccaataaagaatgaaaattccaaaatgttgcataaattgtagcctcgggaaattagttaagatcatagctcgagtgaccggttattaaaaacaaagaatacttaagtcgaactccgatgactcaagatccataagagtttaaagatggcggagatagattcaatagcatcactattacttaggtagaaaaagaagatttagctagattcttatatgttgtctgcgttgatcgttttataaatacgttatgtagtgtcatatttgaaactcaattcgtatttgaatataccaatttgtggtttgatatatgagcattatgcatgacgttttaagttattaccaatatatcttcgatatcatccaaacatagatatgtttgggttaatgctatactttcgatttgtggacgtcaattcatttacggaataaccgaagagattgaaaacttatacgtagcacattcagcgatcacaagtcttggactcttggtggcacctaaaatttgcaaacctacaagaaatacacgatatatacaagaaaaatgggaccaagaaagaaaatgtgaggaacgttttacacttcatttgtcagtttttgcatgtgaaacagtgcgacgataatttagtgtacgatacaaaacagtcctcacgtgtatcgatccatcattataagatatataagaagaagaaaaattataaaccttacgcatgaaatagcactttcttcttttgtttactttgggtcacatgaagtacaatatttataatgttgcctcttgttactttgttcaataataaagatgccttacaacatttcaatggcaacattgcacaacatatcgattaattaatctctttttaaccaagaaatttcggatcaaagctcataatctcttcgacaagagaccagaccattttttcaagtcttcttctcgttgccgatcctcggattcaagacttcaagtactctaccctcttgtttgccaactagatactctggtttgttcatatctttccagtttttcaatggtcatatctataattgttccttataattcaacactttctaactaatgtcggtgacgtggcaaaggaggacaaaatagtgggattcactctgtgaactagaggcttccaccattgcttgcacgccttttatttttagagattgaaaacaacatttccttcgaagatgtatcactttccttttggaggaaaaaagcatgcaagaagaaacagtacacaaacaataatacgattgtgttatgttgtgtcatttcatagaatatcatgtcatggcgtacgattatacacgtgtcggttgtgaaagaaggttcacaaaacatgtcccaacaaattaaaaaagttgaaaaagttggagacccttctctagtctctacctcggccagagacttccgtatagccacacacaccttttagcttgagaacaacctttccttaattttgtaacgtcccatcttacgtacttattactatttcagacaccacacgtaaataaacttcgataaatgcatatctaacaacacattacgacagaagacggagaatgccaacaaaactgatcatgtactattctaaatactcaatcataagaatagatccttctagctcaaacttgacctagctactttatatctacaactatttatatagttataaaccacaaagagaattgaaaagaaaaaatagaagctgagagaagacaacatg

SEQ ID NO: 24162 - DNA, 3000 bp, Unknown
  misc_feature (1)..( 3000): 2750-1469P.txt file - cDNA_ID_2167750; gDNA_ID_1620577; Annot_ID_161027
agagaagaaatggtcctcaatggttggttggatctgtgagattttatcagaaactcttttacccaaataccccctcatcttttgaattatttacgttgttctgccattgccgtagcaaacacgcgtcattgcctcagtagacagtagctttcaattttgaaaattgaaggggatgattggttgaggtttttaagattttaaaatgattttagaagtcttcaaagttttttttgtgaatcaagatttttttactttaaaaatttttaaagctttcccatcctttttttatttactctttgttttcaaattttttttaagtcccgtattagtgactttagaaataaacaaaataaaagtttttattttttcttttcttctttcttatatgattctaaaattccataacatatacttattaattgctttttaaaaaaattcaattgatttagaattatttttaaaatttgttcttttaagattcagtttcttatatatttggtaattatttataatcataattatatagttacaattttattgttaccaatcatgttttaacagttaaagtctttaaaaacaaagtctctgcagtcaaagcttttacagtcaaagtcgtaactcccaaaacctctacaaccataaataacagtcgttacgaatcggtcctgaaagctcaactttggatccagttttctacgattgctgacttattcttcaccgtctgatatagttgaccaattagattttatctttaccatttttgaatatatttgtttttgtgacaaccattttttgatggtttgtttgttgaagatatttttcttcggacaaaatagattttttggtttttttgaccgtatatttattttatgtagatatttatttaggaaagataactcaattaatttaaaagagtttaatgacaaaattattaatagaattttaataatattttaaaatttgaactagttatatcccaaaataacaaactaaaatagtggaattgtttcttcacatttcagaagaaaaaaaagtgtcagacagaattgtttatccagtttcacttgaaaaatttataaacacacatttatagatctacataatagttttgatcattcaatcaaacaatgataagaaatttatcatatgttactatttggatgtatgttaaggctcaaatcccttatttcataggttgaaattttttattctaccagtcccaactgtaattatcattggatggaaggattgagttattattgatctaggtatagtcttttattttttccagatcgcatcaaattggactatgaattagtgtacgtagttatcactgaatttagttttatacccctcccaaattcaaagattgattttctagaattttagtattgtatcaaaagattgatattctagtatttttattttctaaatcattaatgcattttaactttacaatacataattaattgtaggcatttagaatgagaaggtcaaaagtcatactctagtgtatagtactctaactacttcttttgtttttgaggcggtaaatttaaattaaaattatgaaaacaatatatgattttaagtaaatggtgtaaatctatgtcaatatatataaaaaaattaatggaacttaattttactggtcttggttccattctaaaattttagtttttgaaaaacgtagttttggctcttaatttgaacttttaacaaaaataagtgactcatataactaaatttgtaaatttaaagagtatggttttagttttagaggaaatgtgaaagatctcaaaaatgatgcatttaatatgtggtgtaattagaattattggaaagcaacataattcgtagtacaaaagtaaattgattactgcatcattaattatttttcttaattttagtgaaaatattagaaaataaatccttaaaattacgaagggatgttatagaaatgatcccacaatataagatttactaaccaaattaactttgttgagatatgtcatgatcattactttttagaaatcatggatcacatgtgataatcgttataacaaaattaaattatatcacttttttataaaaaaggctttcttataaataagaaataaataaatttagaaacaaaatcaagatccggaaaaaaaaaaagtaagacaatttatgaaattgaaatgtctatgaagattatggtgccgactgagatacaaaattgaaagagttgtgtagcaaaatctgtttatagttgatcaaccatcattaattctgaacatacataacatgtacaattttttttatgtaataataaaagaagacatatatatttaaaataagatttgctttcgtatctaattctctaacttttttaaaaatccaactacatgcgtttatgttaaaaatatcagtttgattcgacatctttattataaactatacaatttggcttttgtttaattgtttcttcaaagaataacacacacaaaacaaaaagaacaacaataaaagggaacatcttaatcctctttcatgtgatgctacctttttgcaaacctcttatcttctttacaaatatttaataataaattattgtttcatatctgtgattttacatgtggcaggtgagattagtcacattgcaagctcacatatcacttgtgactaacattcattaatatatattcaaaactatagtgatttttagaataaaatctgataaatatatggaatataattttgtcatttgggtatggaactccaagttatatgtcaatctattaatggaaacaagccatttgaatggacttaccatcatgaaattaagacgttgggctttttacaaactaatacaagtaacataataggcccattgtaagcccactaaaaaaacgctgcgtttcattgcgccggtatctgatttttatctgtgccgaggtctgagagaagaaaagccaaaagttttgtacgaaagaagaaaagctttgagaagccatg

SEQ ID NO: 24163 - DNA, 3000 bp, Unknown
  misc_feature (1)..( 3000): 2750-1469P.txt file - cDNA_ID_2167811; gDNA_ID_1620572; Annot_ID_160874
gcacccaagtgcacatcacttatcagctggacatttttcggatcaaagagctctttcaggagatcaatacagatatgagtaaagcatatgatagggttgaatggaattttgttaaggagttattaaggaagatggaattttgcgaaaaattgatatcttggataatgtggtgtattactttagtccagtatagggaccttattaatagacaacctaaaagactaataataccagaacggggattaagacaaggagatccactttctccttacttattcatactctgcactgaggtgctaacaacaaatatccggaaagctgaacaaccaaaattgatcacgggtatctaagtagcaacaacgagcccttcagtttctcacttgttatttgcagatgataatcttttcttttgtaaaactgataaagaacagtgcggagtaatattgatatcttaaaacaatatgaagcggtttcgagacaaatgataaattgtacaaaatcatcgatgcagtttgggcataaagtagatgatgctataaagacagaaattaaattgaccctgggtatacataatattggaggcatgggttcttatctcggactaccggaaagtttagggggctctaagacaaagcttttttcctttgttagagatagattgcaaagtagaataaatggctagttggctatattcttatcgataggagagaaagaagtgatgatcaaatcggtagctgcagcattaccaacttatgtgatgtcttgctttaggctcttgaaaacaattacttctaaactaacaaatgcggtagcaaggtattggtggagctcgaatggtgactctagaggtatgcattggatggcttggaataaactgtgtaatagtaaattggaaggtggttaggtttttgggatgtagatgattttgattcggccttacttgcgaaacagttattgcggttaatttcgtcttcggactctcttttttaaggtttttaaagggagatattttaggaaatccaatcctttggaaaatataaaatcatgctctccgtcttatggctggagaagtatttgttaagctagatctctggttaataaaagacttattaaaagagtaggttcaaggacatccatctctgtttgggaggacccgtggatcctggctcaatttccgagaccaacaaaaagtaattgttcaactattgacctatctttaaaagttcaaaatctgatagttagtcatatattttactcattataatcttataacacatgtaataaattttatatataaagtatggttttcaaagttatgaactcgcgtgatcatgatacgtgtcaagtctatcgtttagatattgacatgtttcttatataaatagaaaaactaaaaaaaaaaacatatatatcaaaaatatttaacttttatttttttttaactaaaacggaaaactaaaaataagatggaatgtatatactaaaactatatttgtattacaaaatcgacttgtatttcaatttgaatacaatcgaattcaagtgtattgtattatgataaagtagatatttaaattgtattatgatacaatcgtgacacgtgtcaagtttatcgttcagatattgacatgtgtcaaaaaatatttacttttttcttaattaaataggaaaactaaaaaagaaacacatatatctaaaatatttaacttttaattttttaactacaaagaaaaactgaaaataagatgaaatgtataaaataaaactatatttgtattacaaaatcgacttatatttcaattttaatacaatcgaattaaagtgtattgtattatgataaagtagatattaaaattgtattgaaaattttaatttgtaagatttaaaatttggtttaagaaaataataaatttaatattttaaaaatgtatgagttaatatataaaattcaaatatcaactataagatggagcgaataaaaggtattttattatcctgaaatagatagttaaaatgtatagtaaaatcgaatgtgtttgatttatattttgtcacacatcgtatgatggagtgtcttacatcctttgatgtgttactatacctatgttttattctaaattttttaactcatgtaatcataagtgaaaatataatattttgagaaaaaataagatttaacttttcagttacttataatgagaatactttcatttattaattttaactcatttaatattaatttgcatgatgtaaaatcaacttacgagattacggcatatacaaaaaatatattttcaacaatgtttggtttctaaatatttttgtggatttctttattatttatttatttatgttttgttaattgttaattatttttaatactaactaggatataaatttgatatgttataaatataattttgatatgaaaatgttatcacttaaaagaaagagtgtaaaatttaaatagagtttattatgatgacatagatagttaaaccgtattacaaaattgaatatataaaatagaaatttgcgtttttttttctatatgctaaactaaatataaaataaggatcggttactatttagaattcaaatatcatatataagattaaatgtgtataattaaaataaaatacagaagactgaaaattttatttaaaacaataattattaaataaaatatcaaaaaatatattaattattatacaaaattcaaatactatcaagtttatttttctatcttacatccgcctaaataagtgggctttatctagtatcaatatattattttgttaaagtaaacttgtcataattaataggcccggccataatcttataaatacattttgggccgtcgagggggtaatgcttaaaagggtcattagtcgattcatagcttttgccgtcttttcaatcggaggccgattgtatataaatattaaatgtaattcttctgtagacaaaagaaaacctaaagacatctgcgttatcatg

SEQ ID NO: 24164 - DNA, 3000 bp, Unknown
  misc_feature (1)..( 3000): 2750-1469P.txt file - cDNA_ID_2167854; gDNA_ID_1620572; Annot_ID_160884
aaaaaatttcaaactcattaattaaaatatttctaagagatgccacacaatatttttctgaagatattagtcagaaatataagaaaaattaaatttatttatgcaaataaataaatatatatggaagaagatctaaattgaaatagaaaatattaatataaagtcaatagacatgatttcataatcaaaactttgaatgtttttattttttgaatcgaatcgaatcgtatttcggaatccggatattgatataacaattgattatgacaataaggttaagaaggtgttgcccaaaaaaaaaggttcagaaatcagaagaaggagggtagtctctcttggtaactgatgttttatattggaacatggttgagttattggtattgcaatattactattatctgaaaactcaaaaattttattattagtcaaccaaaaaaaaaacagaagtttgtttccggtgaaaaaaatagtgaaagaacctattaaaagtaaaaaatactagtcaacgagaaataaaaacatatggacaaaaattcattgggtatcattagtaaataaggaacaaaattgtttaacaaaactctttttcaagaaaaaatttcttgatggattctcaatattttcttgcattttccctttctcttctcttgattttctctcaaatttcatctttctcctttagtgttgatccaactagaatcactcaactctcttggactcctaggtatgtgttttgtgtatctgaattacgtaatcatgatctttgttctgttgtgttaaagaaagtgaatttcgtggtttcttcagggcatttttatacaaaggatttctctcagatgaggaatgtgatcatttgattaagttggtatagaatcaaacatgttattaagttttcttgttttcataaaattatatagattttgtgatcatataggactgtgttgtggatgtaaacattggttttaggcaaaaggaaagcttgagaagtcaatggtggtggctgatgttgattcaggtgagagtgaagacagtgaagtacgcacaagttctggaatgtttctgaccaaaagacaggtgagagcagtggaattttactatgtatttttattgtattcgactagcttaattcactaaatagacagactagttctctgtgtttttttttgtaaagaagtaaacgcttgagtcttgaccaagttactattggttttgtttacttcaacctttaggatgatatagtagctaatgtcgaggctaaacttgctgcatggacctttcttcctgagggtacttccgcgaggcatatacatttttctttttttttctaattctgtttcttactctcatcttatctttatgtgttgtggatcagaaaatggggaagccttacaaatactgcactatgagaatggtcaaaaatatgatccgcatttcgactatttttacgacaagaaagctctagagctaggtggtcatcggatcgccaccgtactaatgtacttgtccaatgtcacaaagggtggagaaacagtgtttcccaactggaaggtaaaacatatatcacttcttgttccataaatcatcacttgagtttttgaatttaaatcatcacttaatgtgatcattcattcttatagggtaaaacacctcagctgaaagacgatagctggtcgaaatgtgcaaaacaaggctatgcaggtaaaatatatacaagtttgatgtacacacttgtagttgtagcatggttctatgttttatgaaagatacaactatttcttcaaatggtatattacattatttgaataagtaatctttaattgtagtgaaaccgaggaaaggtgacgcattattgttcttcaatcttcatctaaatggaacaacggacccaaatagcttacatggaagttgtccggtgattgagggagagaaatggtcagcaactagatggattcatgttaggtcattcggtaagaagaaacttgtgtgtgtggacgatcatgagagctgccaagaatgggcagatgcaggggaatgcgagaagaatccaatgtacatggtgggttcggaaacttcccttggattttgtagaaagagctgcaaagcttgttgatcttaagaacaacaacaagtgactagattctttcacataacgaaaaacccggtgttttgtaatgaagcatgatgatatctatatttctaatgaagtgtaacaatcatacaacctactaggggtgggcaagaaaaccggaaccgattacccgaaccggaagcgacccgaaaaattggaccagaaaccgaactcgaactcgaagatttaccctattgggtccaaaattcctctacccaaaaaaccgaaaccgaacccgaaaatacccggatattttattcgaaaatctaaattttacctaaaacccgaaattttaccagaaaatttgggtatttacccgaaaaatctggatatacatccgaaaatttggtatcggttccaaaaaagagcccaaaactctatattcgaaccgaccggaacccgattagacccgaaccgacaccgaaccgatattttagatttaccctattggatcctaaacttttctacctgaagaacctgtactcgatagggttttatccgaatccgacccgcttatccgaatgtccacccctacgagtcgtgtttcaagaccgcggtcgtcggcggacaggtccatcgcggatcagaaaaaaatcgggcacaatgcaagtggtccgtttggatgcgggcaggcccgattgactacgacctacaaaagtaaactaagtcaacggtaattaaaagccaaagtcagagaaaaatacagtgggcgtcataaatactccaaaaggggacgaaacagtaaaatctcaaaactatgggaaacaaattgataagaagaaacattcttgggtcaattctgagtagagcattaatacaattcatcgtcttggtcttcttcgcaccaacaacaagtctttctcacgaaaatg

SEQ ID NO: 24165 - DNA, 3000 bp, Unknown; identical to SEQ ID NO: 2713
  misc_feature (1)..( 3000): 2750-1469P.txt file - cDNA_ID_2168015; gDNA_ID_1620580; Annot_ID_161131

SEQ ID NO: 24166 - DNA, 3003 bp, Unknown
  misc_feature (1)..( 3003): 2750-1469P.txt file - cDNA_ID_2168035; gDNA_ID_1620577; Annot_ID_161030
catgaaagaggattaagatgttcccttttattgttgttctttttgttttgtgtgtgttattctttgaagaaacaattaaacaaaagccaaattgtatagtttataataaagatgtcgaatcaaactgatatttttaacataaacgcatgtagttggatttttaaaaaagttagagaattagatacgaaagcaaatcttattttaaatatatatgtcttcttttattattacataaaaaaaattgtacatgttatgtatgttcagaattaatgatggttgatcaactataaacagattttgctacacaactctttcaattttgtatctcagtcggcaccataatcttcatagacatttcaatttcataaattgtcttactttttttttttccggatcttgattttgtttctaaatttatttatttcttatttataagaaagccttttttataaaaaagtgatataatttaattttgttataacgattatcacatgtgatccatgatttctaaaaagtaatgatcatgacatatctcaacaaagttaatttggttagtaaatcttatattgtgggatcatttctataacatcccttcgtaattttaaggatttattttctaatattttcactaaaattaagaaaaataattaatgatgcagtaatcaatttacttttgtactacgaattatgttgctttccaataattctaattacaccacatattaaatgcatcatttttgagatctttcacatttcctctaaaactaaaaccatactctttaaatttacaaatttagttatatgagtcacttatttttgttaaaagttcaaattaagagccaaaactacgtttttcaaaaactaaaattttagaatggaaccaagaccagtaaaattaagttccattaatttttttatatatattgacatagatttacaccatttacttaaaatcatatattgttttcataattttaatttaaatttaccgcctcaaaaacaaaagaagtagttagagtactatacactagagtatgacttttgaccttctcattctaaatgcctacaattaattatgtattgtaaagttaaaatgcattaatgatttagaaaataaaaatactagaatatcaatcttttgatacaatactaaaattctagaaaatcaatctttgaatttgggaggggtataaaactaaattcagtgataactacgtacactaattcatagtccaatttgatgcgatctggaaaaaataaaagactatacctagatcaataataactcaatccttccatccaatgataattacagttgggactggtagaataaaaaatttcaacctatgaaataagggatttgagccttaacatacatccaaatagtaacatatgataaatttcttatcattgtttgattgaatgatcaaaactattatgtagatctataaatgtgtgtttataaatttttcaagtgaaactggataaacaattctgtctgacacttttttttcttctgaaatgtgaagaaacaattccactattttagtttgttattttgggatataactagttcaaattttaaaatattattaaaattctattaataattttgtcattaaactcttttaaattaattgagttatctttcctaaataaatatctacataaaataaatatacggtcaaaaaaaccaaaaaatctattttgtccgaagaaaaatatcttcaacaaacaaaccatcaaaaaatggttgtcacaaaaacaaatatattcaaaaatggtaaagataaaatctaattggtcaactatatcagacggtgaagaataagtcagcaatcgtagaaaactggatccaaagttgagctttcaggaccgattcgtaacgactgttatttatggttgtagaggttttgggagttacgactttgactgtaaaagctttgactgcagagactttgtttttaaagactttaactgttaaaacatgattggtaacaataaaattgtaactatataattatgattataaataattaccaaatatataagaaactgaatcttaaaagaacaaattttaaaaataattctaaatcaattgaatttttttaaaaagcaattaataagtatatgttatggaattttagaatcatataagaaagaagaaaagaaaaaataaaaacttttattttgtttatttctaaagtcactaatacgggacttaaaaaaaatttgaaaacaaagagtaaataaaaaaaggatgggaaagctttaaaaatttttaaagtaaaaaaatcttgattcacaaaaaaaactttgaagacttctaaaatcattttaaaatcttaaaaacctcaaccaatcatccccttcaattttcaaaattgaaagctactgtctactgaggcaatgacgcgtgtttgctacggcaatggcagaacaacgtaaataattcaaaagatgagggggtatttgggtaaaagagtttctgataaaatctcacagatccaaccaaccattgaggaccatttcttctctctcattctctcttctgacgtgtttcccttcttcggtttctcatcctcacgtccgccggatttcgaggaaacgaagaagaagaagaacaacaacaacaaaaggtctctctcgagtttctatgtttatctttttctataatcccttagtctagtgttgtttagactttcaattctgctccaaaatctctggatttttgaatctaccgttcattttctagagattttggtttctctcagtctaagagtcgtcttttgaaatcttgaatgatgaatctgagagtttctatgaaatttgatggaattttgtgtgttcagttgttgattagggtttgggattcaataactttcaaatttggtttcgattaggttcgatttggttatttttacctgtgaattgatctcgattcgttgtattaacgtctctttgtgtttttttattctgtttatgctagccttttgagatatg

SEQ ID NO: 24167 - DNA, 3000 bp, Unknown; identical to SEQ ID NO: 2706
  misc_feature (1)..( 3000): 2750-1469P.txt file - cDNA_ID_2168052; gDNA_ID_1620579; Annot_ID_161086

SEQ ID NO: 24168 - DNA, 3000 bp, Unknown; identical to SEQ ID NO: 2710
  misc_feature (1)..( 3000): 2750-1469P.txt file - cDNA_ID_2168072; gDNA_ID_1620579; Annot_ID_161091

SEQ ID NO: 24169 - DNA, 3000 bp, Unknown; identical to SEQ ID NO: 2735
  misc_feature (1)..( 3000): 2750-1469P.txt file - cDNA_ID_2168193; gDNA_ID_1620583; Annot_ID_161223

SEQ ID NO: 24170 - DNA, 3003 bp, Unknown
  misc_feature (1)..( 3003): 2750-1469P.txt file - cDNA_ID_2168302; gDNA_ID_1620584; Annot_ID_161261
tttggagaatttcctcgaacatctggcgtgcgttttcgggacgacccatttcgcctaacagcctcgccattaagaacttccactctgtttcttctggttgtgcagctactagtctctctaatagcttaagagcttcttcatcttctcccttctctagcttctgctgcaggagtgatctcagcgtctcgacggcctcaggagtggaatccaaaagctcagataatggcgtgatctcagacagtttctcttctttcacttcctcgtaggtcttttcgatagtcgtaaccggagactcggctttaaccggtaaagttgaaaactttccggtcattgaaacagcagcaccgatgagaatcgctgatttggcaaaagatttaaacttttctggaaaacaataaccagaactattctgattcgagctagctctgatacgaatagaaagaagatcgcgacggggaatcagaggtccggtgaccggagtcgctttaacggcgacgaaagaagaaaccaatgaagaagaagctgagagagacgaaatcatgtcttcctcagagcttcagagagagtatcaaaggttgcagaagcacaatcaaaatcaaaagagatgatgaacaaacaaagcactaagccatggcgatatatcagacacgcgtagcttgtgtgaagtatatttgggcttggtttttatattatgggcctttaaataattgggtctttggccttttagttttcttaaggcagatctccggcgaaactttagactgagatacggaagaatcagatcaacgcatgcgaccaagtaaatcaaaatcgggttgaagaagaaagagataagctttcacatcagtaagttgataaattcatgttttggttttgaaatcagtatcatcttctctgaatcaactgtttatccgtattaatcattaaatttcctgagttagggatttcatcgataattaaatgggttgtgatgattcatcagatttttgaaggcgcgaaatggggaatacttcatcgatgctgactcagtacgacatcgaagaagttcagagtcattgtcatgatctatgtgagattttccgacaacttgtctctgtctttttttctatctgtttcaaattttaatgcttttgttttgtgtgtgttttgtttcagttgagcagcaggagattttatctctgtatcaacggttttgccagttagatcgaaacgcaaaaggatttatatctgctgatgagtttctctctgtgcctgagtttgcgatgaatccactctctcaggttttttacaatttctttaatcttaaatctatgcaatcttgttgaattgaattagctttgtattgattgtttgctggatattgataacagaggctgcttaagatggttgatggtttgaactttaaggattttgttgctttcttgtctgcgtttagtgccaaggctagtctaagacagaaagttcaatgtaagtaaatgagtttcctttaaatcgattttttagtggcaaatgttcactttcactttattgtatggaatgatgatcagacttctttgtttctcagtgatctttaaagtctatgattcggactgcaacgggaaggtctcttttaaagatatcatggaagtgttgcgtgacttatcgggatcattcatgtctgatgagcaaagagaggtatgatttatagaaagttggtgacttttaagtttttgaaaagtgattatggacatgttaacaactaactaaataatgaaacatcattaaactactaaaaccaacatatcggtgtgtaatgattgttgtgtgaaaattctattcaactaaaatgtttctgatattcgatcatctaactgttttggtgtgccattactcatctgacacattgttcaaactttgagataaatgctagagtttttccttttgttcttcccatgtgctccactcttatcatattggatgaaatctttgctttaacctctatggttatgatcatgagaagtgtataaagtcggtaaacaaatgaattcaccatgtgtcttgtgttttacttttgtggtatagcaagtactgagccaggttttgaaggaatcgggctacacgagtgactcattcttaactctggaggatttcataaaggtacaatttgtgcttattgtaattgttatcatcaaaattgcagtatttaacttgtcacattcctagaatctgaaactgcatctcctttcttgtttcttcaatctcacagatctttgggagtagtagaccggagatggacgttgaaattcctgtggattagactttatgatcatatatcatcaaacacaacactcaaatctcatcttgtattttgtccacactgtttctagaataatccttgttaattgatcacatcattgcaggctttttcagcacttgttaagtatttgtcaattgaaacttgttctactaaaggaaattacaattgtttcctctgcttagctttttgcattaccaataatggcatatgatagactttaaatcctaatctcaaaaagaattttttttttttctgtgaagaaaaagaaaaagaaaaagtggaatggaatgaataatcacgaaatctccgttttttaatttaaagttgattgtatttaatgaattgtcaaagaagagtcttaattacttgcatattattaaactatgggttaaagaaacaaaaatactaattatggtaattagattgacaaatggtatgtagacaagaagcttattaatgtgacgtaacgtaattaaagtaaagtaagcattcaattctacttaatattgtccacacaagtcattatataaaataaaaaaggaattaaaacgtcgtcattttgcttcataatagaccactttattcacctaactaaggtccaccaccacttcataacagtttcgtttcgcgtcagtcaaataaaaaatatcttcaccattcttttttcaaacaaagcttaattctctttgagaatccgtctagtaatg

SEQ ID NO: 24171 - DNA, 3003 bp, Unknown
  misc_feature (1)..( 3003): 2750-1469P.txt file - cDNA_ID_2168317; gDNA_ID_1620584; Annot_ID_161265
tcggctgactacctggtcgacccatatatatatagtattaatttcccggctagatttttgcaacacaaaacgtttgcttcttcgtttggtctttaagttttttgttataacgaatagctcttatcgttttttttgtgaaagttatggatgaaggttaggtttatataaactaaggtttgaattagtttaaactttcttgagatgctctacttttcttcgcatagttatttccatcttgtatataattaactaaattcatttgtatagttactactttgaaacactattccccaaaaattgtttggctgtcaccgttcttaaaaaaaaaacaaaaacaattgcgtatattgtaatcaaaatagttgaaatccgatatcataagtgattataatggaaattaaagtgtatatacacagattcagatgatcgattactgaatgtgggcataaccaaaaatatgattaatatacatatagtgactgcaaaatatgtgtgaatgagtgtgtacaacttaaacttcaaaacctttttgatatcacaaaacttgaaatggattaaatctttatatcatgtaaaatttgttttgggatattactggcttctatattgcttatatttgtggttaaccagctggtggtatttctaaatatatattctatatgtggaaacaaaaaataaaactgcaactaagttttgaaaattattgatgtaatgataaatgataatggtaaacatgatttatgcactaatgggtattgtttaatttgcttggtcaaaactcagaactcgaatgaccttgacttgtgcaattagttgacgtttttaggtacagattatttttgtaccaaagccagacaccaaatatatcgaataagggaaaaaataagccctcttggatgaaaaaatacgatcttccaattcttttattttcacatatcaaaataaacaatattgataaaatctgaaaaagaatttaaaataatatgctagctcaatataaaactacacttaaaagtgctgttttcgtgaaccacttatttaattcaaatcatattgcaaatcagaaatcttcttaatcaacccatcatctgctgactcataggaggagccatcgtccgttgcatatttccactccaccctatcacataaaaataataaagttacatcaaataattaatcaaacgtatgaaagacactaattatttcaatagaaagtgagtccacaaaacaatgcaatttaccaatagaggggtcaagaccacgggttttgagttcacggtgttcttggcaaagagcacaacattcacaaaagaagtgagtgacgcaatccgaagttggagactccggtaacccgaatttgcttcggatcttggtccggtaagtgcatgagaacaagcaaggtaagccgaccacacaacatattagcccgtaaaataccccacatctcccacaacctacgtacattatatatacgacgttacgtgaattcacacacacacacattgtttagatatgacatatgtgaatgtatggcttaccggtccttccttcgtcggaaatgtccgcgatccgtccgaaagtgacgcatgggcagaaacatgtgaggcaagcttatccagcacaaaccaaaaggaacaaatcattatacaatcctgacaatagatctatatatgtataaagattaaaggacaacttgattaaatttatatagaatttctaccagtttcactgtcttccatgcagctgaaaagaccagaagtccattgcttttccattgtaaagtagcttcaaccaaatcttgcgtcaggttttaaccagttttgtgttgatcgatcttttgataagcgagatcgtaaatcaattaattagggttttgaagatagatttttgttgttagatgctttaagaatggagggtgggtgggtatatatatggttgatggtggatcgcttcgagagatctacaaatgtttaatttttagtacattgcactttgggaaaaatcataaaagttgtaaaaaagagtaaaagacttttaaaactagtacgttgcactttttgttaaaaggaggaaggttttttgaaaattgatttttgtttaaggaaggtgagagattttactgattgtgagagattttaagctacttaaaagtaatatgtaaacgcgtttttgggattggtttaatccacacatatatacaagatacaaagaatttaatttaatgactaagaaaattaaagaaattatgaataaaaaagaaatatacatcctaaaaatgcgaaagtaaaataaaacaggctatgctaaattttaaaatattaaattcaacatttttctattcataaaatttctattaaaattatttgtagataagagataatatgttcaaacattattcctctatataaggaatcaaacttgcaaactttaaaataaaattttgaaaaatatatctaatgtaatattctggttttattagtaaagtaatattacttaatactaacaaattacaaagaaaagaactgaaggaaaaaaaataaacttttaaaattttctaaccagtgaaataaattagaatttaaacttaaaattttattaattaataatagtcataacaaaatttgacaaatgttttcaacttagatgtgcaataaacatgaatttattctactaaatcaatactgggcctatgaatggcgcaaggaatagcccattggttattctatatcttttggaccttacgtttttgaagcctgtttaggatcacactcataacaaaaaaataaataagaattacgcttctaccaccattaaactctaatgtatctgaactcagaagatccgatcggagtagtaaaaattcaacaaaacaacaataagaaaactcattaattcattcgtcggattcgaagaagaaatcacttcccagaaactttcttcgtatcgaagtattgcttgtgttcttcggagaaacgagatcgggatccgaatacgagtacaatg

SEQ ID NO: 24172 - DNA, 3003 bp, Unknown
  misc_feature (1)..( 3003): 2750-1469P.txt file - cDNA_ID_2168328; gDNA_ID_1620584; Annot_ID_161269
ctgagtccgacgtagtagaaagtgtcgatctttttgttacgtagaagcggcgccgtcgcgtctccgccaccgagttggaccgagttgaaatcaagacttgaggactttcccgagtcacggtcaacgaggcagtaagaaaacgacgtcgctttcatttgattggttatcgataaaacaccaccgcctaaaccgagtaaaccggctgctccggtaaagagaccttcgttgtcgtgaccacaacccaaagcgacgttgtttattttaccagagttaccaaacgtcaccgtatcggtagcgagttcaccgacggtgaaagatccgtctccgtaactaacttggtagagacatttgtttgaccgacaagcggaggtttcgagaagagagcactgtggagcagagcaagtgagagatttgtatgtggaagacgaagtcgggttaaaaaccgggtcggactgttggtaacagtcggcgcaaggttcacactggatccaatttacgtcgcttccggtgtcgagaaccaagtacatctctttcgccggagttccgacaccgattcttgagaaatactcgccgcttccttgagaggctccggagacgacaggtgtcgttagatcctcggtttggtatcgtgtatcttcgttgtaaacgggtttgagatcggatctatcgactccttcgacggcgaaacggatcttcgcgacgattccggcgactcgggatgagtcgcgctcgagtcgactgagtgttaagcttttgtagtctttgtgctgtgacgcgacgaaagtgtctcgagagtgaagctctagagatagtggtgaagatgaattgaagaaaaccgggtcggatagggattcgggtttggtggtggtgagtgaggaacgagtcgggtcgagtgagaggatagtttgtgtttgctggagagatgaaacgacgtcgagtacgttcgttttaggtggagtggatagagagcgagaggaagcatcagtggtggtgaggaaaagagagagagtgacgacggcgaggagagaaagaaatcgcgggaaagccattatttccggcgaaggttgatatgagttaagtggaagagagaaagagtaagtaatgtttttaatttatagagagaaaaataaatgctgcggagagagtcacgccagaattgctgcggttataaaagccacatcaattatttatcatcctgttaaaatatttggattcacattatcatcgatcggtaaaaaaactttatggttggatattatattttatatatacaaaaataaattaaataagaagtcttaatctggatttatcatatgattcccaacatagcgttacatttataccgaatcaaataaaaatttagacaaatgtaatttgagaattgtgtttatttgttattggcaccgaaagaagaatttgtactttgtagaattcaacacaaaactatagcatagtgtctgtagtctgtacggacgagagtagaaactgtagaagatagggatttgacctactaaatattttaatacaagtctacaagcgattatccaatattaagctcctagagatgtgtgactacagagtacttaagtgtttatttattgcaatgacctttggatacaaagtactcctatattgttaaccaattcacttttaattttttttacgtgaccaaagctaagatcttatctagaaaactaaaagctttctgtccttttgttatattcgggcttcaaaactttgtaccttcttcttaccatcgctgtcgagagaaaagtcagcagaagttttggaaactattagttatagggatcgaattatcttaatcatctacgatcatgtcattttgtgttggatatttgttaatgcttgtacatttctaaaaaaacatgtgttgtatattagctaatgtcaatatgtggtgcatatttgctaagttgccgtggaaataacaaaaacttaaaattttgctaagtactgtacttttttttttttgtgattgcaatttgcttaaggtgattgatgaacgaaggctatatgtaaaaactggaaaggagtgaatcaatgtgagaagtgggtgagttgttacttcgttagaagagagatttgggtttatttcgctttccctgaattaatggtaacgcacccttttggctttggttgttgcgtgtcatttatttctcttttgtttttaatcttgttatatccattttcttatacctactttactttttttccataaaatgagattatgcaattcaatcagtaatgttttaaatcgcatacacttttatatttaacaatatgccttcactaatttgtatttcaagattagttagtgatattttatagtaaagtttaaagaacattataatgtagacgcaatcatagagtttttctttgtcaaaggcaatattgcaacaaaaaaaaaggtagaaacgaagacatttttttttttgtgtgtgtaatcagtaatcgccttacacaaaaagacatatacttttttgtgtaaggttttttttttttgagctactatcactaaatttgaaatcaaataattgatactccaataaaagtagaaataatatcatagtatatgaaaaaacaaaaaaaaattacaaggacgatgaaagaaaaaacaaaatctcataactcaaaatcaaatatcatctccaagttcttaacatgataaaactagactaaaataaaaactgacatcctactaaaattagaaacaaaatgacataaattgaaatcaaactcacaaaaaaaaacaatagacattaaaacaaaaaatccgaataacaaaaaacaggatctcagctaaacaaggcctggtgtagtatactagtattggcccatggcccatggtttggtatttttttttctctgaccaaaggaagaaaaaaaaaaagatatttatccgtatggcgccaagaggtttgtgtggttttcgatttcatccaaatttctgaatttcgtctctaacatccacaaaatcgaatg

SEQ ID NO: 24173 - DNA, 3003 bp, Unknown
  misc_feature (1)..( 3003): 2750-1469P.txt file - cDNA_ID_2168375; gDNA_ID_1620582; Annot_ID_161189
cgtttcaccttcttccaccttattttgattgcagatagaacacctctaaaccacataaaacatatacacacaaagactcgacacataatcgaaattttatataacgaaaaaaaatgtagagctttaatttattattgaatttcaagttatcgtatgtctcacgtaattcgacatataattccatggggagaaataagtttatcacgtctctttgaaagttcaatggtcgtatcgtttatctttttgtcccaataagctatctaactaatctaagtgaattaagtctacttaagacaactcctacttagttctccccaatttcttcaattaattaattttcctaatcacatttccaacaatttatgcatgcgtataaaatacaattatatattaatatgtactaatacaaaattttatgatctagaacatgtataagttttcttttttttttagaatatctaaaagtttaaacccaaaaactcaaaaactttacgttttttagagacagaatctatactaaattaaatttatttctctaatagacgtcgaactcattatctctatatttgaaagatttaccactgaatcaacatcatattagtatttgtacaattatatagaacgatatacatttttgccaacttttgaaattatactaaatgtctaacctttaaaccagtttactgtacaaatacctatgtaaaaagaattctgtgtgatatataattgtaaatataatacgcaaagagatcgtcaattttgaaaaacactttaaatagtaaatattatatagaaatttatctccttaaattagatgtctatatgttcagaaaaaatattggtatattttaaaaattacaacatggcatctgacctgctcagaattaaaatattaactgtagaagatattttgatacaacataatcatatattattccactacctccaatagtccaaatatatagcaataattttctaaagatacgtatcaagaatggtttaatatgatatcattgttacatgcatatgcgtaatttttttcatagttaatatattctttgtaatatggagccgactgatgaatattggtgagttctagtgtgtgacaaagatgccattgttgactagcaaattctaaatctgaggagaataaaataattctagaaattgaacttttgtttttaacaccaaaatcaaaaccaatgggcccaattctttgctgacttggccaaatgagagccgtccatatgtcagtcgacaactgccaaacaatcttgacggtttgttagtttggctcaaaagccaccagtaatcactgatcagtttgggacttgagtaaatgacttatttacccttagttcaataatacggttttgtgtgatttaatttgctagttaagttaaaccatatttaaggatggtttaattacatttcaggtggaaaaaattgatgagagaatctagctagaaaaagatggacacgtatggaccgttgaaagtaggaatacaaattatttaaggaatacaatatttaatttcaacaccaagtgtcgaatagatacaacaataataatgatgaacaccaagatttattttatattctctattttgaatattgattactccaactttttcatgatttgtttttcagcacttgagattggaatagacacactgtgatatcgaccataaaatattttcttaggaatatatcgttgtgtataaagtataaagttaagtgtaatgctttaaacaagaaaaataaaagagttgagattgtaatcatagcaaaaggctattttatagaccttttagcggatggaaaaaaaaaaaaaaaaacaccttttagctacatgatgtagcctacatcatatataaaaaagataatagaattatttaagaaatgtaatgtgttataaattaataaccaacacatacacaataagattcatataagtttatgaaatcaaggttgtgatattgttgttattgagatccaaaacttaaaatccaaaatatcagaacttttggagcattggattatataaaatatatttttctcaatcaaatctttttttagttaacaactttaaattaatcgcaatagaattattcatgaaaaatgttatttacatataacccaatccaatgatttcaaaagagatattatagaattttgtaaagcattaaagatttaactacattttgttacatagacccataatcataaaacctttgattcatagtttcattcttataatggtctcttaagtatgaaggtgttgtagcggagactagaaatatatatgagggtaatgtttgtctgttgagacacatttttacaagctattaaaaaaaatgattccaacaatatttattgaaagtaaatgtattttattaggagattttaaaattaatgtcatattctaaaatgtacaatatatacattattttttgaagattttacaataaatttcaaagtgaaactgaaatgattttattaaatttatatacataactctttgtgtttttttgacagtcatatatataactcttaaacacaagcttttacagaacatctacagttattttaggtgaataaacactccaatttcaaacaatttaaataaataaatgataattatctgtcaacccataaactttacattgtaagaccattttattttatttattttgactatttatggatatgtgatattattgagaaaaaaaacactattactaattgacagaaaaaatacacttaatattttctcctaaattttctcaacgaattaattacaaaataatgtgtataccaagtaaaaagattctacttctcagtgacagcagaactaatttattcaagggtagtttcggaataataaaaaagcaataaatctctttttcctataaaagcaaagagacactcaccaaacaactcgtccctgaaacctctcttcagaaaactcaggcaccattttctccttccgccgccgccatg

SEQ ID NO: 24174 - DNA, 3000 bp, Unknown; identical to SEQ ID NO: 2729
  misc_feature (1)..( 3000): 2750-1469P.txt file - cDNA_ID_2168390; gDNA_ID_1620582; Annot_ID_161192

SEQ ID NO: 24175 - DNA, 3003 bp, Unknown
  misc_feature (1)..( 3003): 2750-1469P.txt file - cDNA_ID_2168397; gDNA_ID_1620582; Annot_ID_161194
tcaagtagctaaaaattagacatacggaatattaaaaaatggttttggctcaatttttgtacaatgctcttagatttttcatggatttatggtcaagttttgtatgagtgataacaaaaagtcagatctaatgtagtgtataataatttttgctctataaaattgattataaattgaaattaatggtaagtcttgaaatagaatatttgaaagaaaccgacaagtctacgttaaatatcaaagttttgggggtgcaataattaagagcgttttggtgcagtctgttcgtaatcgtagtgacggttgggaactatgatattaatatggtgtctattttttgtttagttaatttagatttcaaatcaaacacttgattaatagaatgtcaagaactcataacactctaatcactaaaggcaaatatagctaaaaacatgtcaatcttgccggttgaaccggataaaaaatcagtggtgggctttcaattcataggattacggccactcgtgaaagaatatgacactaattcacgaaaagatgtttcgtctaattttatggtggttagaagaattccagatgttttcaataatgaggctttttcccataatcattgttttccccccaaatgacatataactcttttgtataaaaaatacgtaattttatgaaaggtacaattatctccttcgttagcaaaatccaagtttctacaatatgtgtatgtgcacgtgtaactacagtttgagttcataaaaccacgtcccacttactgtaaaacgttagcgactacactgctaattagtaggattagacaaattatatgttccctgtgttttaattttgatattcgtttcggttcgtttagcaaaatagaactaatcataaatatttaagtttcaaaagcctcgattcttaagaaaactacataatttcacatattttcactcgattggttgcgcatcaaatgtatatataaaacggatcacaatttttttttttgatcaaaacggatcacaaaattaagtgtaaaaatacaggaactttcctcagtctcgtcagccatgatgcaatggcccttgatttcatctgtaaaaattacaagtcttttcacattacaaagaagcattaagttcattttttatgttgggaagaagaaaatcgatgtcagtcttcactcagtgtcctcactaagaacatgtacctagaccaattaatagattctctgtttatataccacaaatgtctatgcttattaatgagtagtactattcttttatttttaattttttagtaagacacatttaataaccaagatgatacagagaaaacgggagaccgtaaacaattaaaataatatacgtgacttgtatagttgtattgcttgacacaaactaattagaatgttgaccaaatttggttaacggaatttcaccgcccaattccacttgctttatatgcgatgaacagttgaccagaggagacaaagtgtaacaaataggctattaacaaaacatagaagtaattaatacattcatagtttatatatagacatgttgtgagaacttattcttttcttctttaacaaacaatctgaattcgtttcatactatataagtattatatactacctagttatatgctagctttgtattgactcatagagtcatagtacaaatgctaaaatactaaagctacacagagtggtagaaccagctgaaatatgtttaaaactacatgacctaacccaaccattacaaatttataaacaaactacatcctgaaactccagaatagacgatgtagctcactatgaactataatgtatgtttaatgtcagaaccaaataaatttaaaaaaaatgtcagaaccgtacgagaagaacaaacaaaactttttgtagtttgtttgtatatatttctaagtaaaaatgctgaacacaattatacaaccaatatatgtgatctaatgtgctatttaggaaaatttgtcgatgataagtactacgtcagagtcaaaagacccatattggtttagtccgactattagatacgaaaagtcaagcaaacattacatgtaaattttggtaagatgtgagagatatatatgtctttttttttattttttgataacaaagatgatgctaaaatacttttagatccaaacaccaattatgagattcggaaaaactaatgttagaattcgaaccatgatggccaatattacatgaactcaagtggcaaattttttcactcttttactattggagcaagatgacttggttatgtaagagatatgttgctctcaatattctcatagatcatctctttcttcaaattggtaagatatgagaaatatgtcccatctttttattatcataccaaagtcttttataaaatatatcatatatgtatatatatatattgtcaagaataacttgacttcatacatactatttgaattcggatagtatcacaaaacatcactaccacgtaactgttggaacttcaattttacaaagtatttccggctaacttttcggcgagtttttcagtgaagtttgtcacaaaaataagaatgatcatatttttggaatctttgtaatcgttttcaaagttttctctccggattttcgcggttctacaataattacattacatatcatgatcaatatgtgacctgatcctcgtagttaattaaaacataatttcccggtcaccattcaaaactttctagatggaagattaacaaaacaaaattatcttagcttaattttgtagtaacagagaagaaatgattaactaacatctaatcaagcccacgtgtcataaaccccaccaatgaagaaaaaagagcaaaagacatgcacatgcaattacacgaatacatacaccccaccaccatcctccctccttatattattattgccccttcctctcctttcttcttcccctcttaccttttcagagagagaaacaatatttctaatctattacaagtaacatg

SEQ ID NO: 24176 - DNA, 3003 bp, Unknown
  misc_feature (1)..( 3003): 2750-1469P.txt file - cDNA_ID_2168405; gDNA_ID_1620582; Annot_ID_161196
tgaccctctctaattattcatagttttaaaaccaaccctctctaaaaatacttaaaagcaaactcttccaaaatcaaaacctcttcttacacagattttttttttctctgagagagacagagagagcgaaacttgagagaccaaaatccaatcttttcaacaatcgattctctctgagaaaaccaacaataaagctagacacttttttttgtgggtttgtcttcttcttcgttcatgcaccatgttgtgttacgtgaacgaagaagctatataatcaataaatcttatcgatttgttgagtttgggaatcggagagaaagatgttaacaaaggtgcttagtaaggaggttaagccatgccttgcttgtccaatctgcactaatccgtttaaggatgccaccacaatctccgagtgtctccacacctgtaagtgtaacccttcgattgttttttcctttatctttgtgatttagattctgattttttgtttgtgactatctctctgtttattggttatattaattagtgtagactagagattatatcagattgattctgaaacttggaagttgaaaccgatgttttgtttagctttttggtgttgttgtgtgtgtttcaacatgtatctgtgtaaatattaaggtaagcagataaggactgtttttttttgtaagtggatgattcagtgtctgtttatgtctttgtgatttcaaagttgctgtttctttagcttgttatgtttctagtcctggctttaagtattggtatatcttgtgtctttatatgaattgggacttgtggaatttgtggtaacagtttgcaggagctgcattcgtaacaagttcataaatgagagagtgaacgcttgtccagtctgcaacgttaacctcggtgtttttcctctagagaaacttcggtatgaacttgtttgattcttagcatttgcatctatctttatgcttttatgtgatttgaggtatctatataagtgcaggtcggattgcacttggcaggatttgaagctgaaaatctaccgagcaatgatggaaagcttaaagaaggcaggacctaaaactgttgcagcgtctgtgaaatcttcgaaaaagaagagaaaatctcgaacttcactgcgggtctcttcatctagagtatcatcctcacctgatactccattggaaccagccaatgtggttgtggaaccacctaatgtggttgtggaggagaaacatagggagaccgttctagctcttcaaagcactagaaaaccgataatcacgttccagaaacgtgggagaaaagcttcactcccgaagaagattgattcgaaaccagaacccgaactgcctcctaaggagcctaaaattaagaatctatttgacctgaacaacgaacctgaagacaatggattggtaagtatgtatatgagtctttgtataactattgttctcctttgttaactatctgtttgcaactaatgtgtttatgcatcttaggacgaagctgaaggatcaacttttcaggaagtcgtaccaaaggagaaagatctttgtaaacctattttctctctctctgtcactctaaacatcaacgatactcctcctgatatcgttgagcctgagataagttcggatgacgacacagaggaatctgttgaacctattcagaacaagtgtgttgtgaatagagaaacaaaggaagttcctgttcaagtgaatcaaaacagtctccttattagctctgatagggatagagaggacaactctggtcagaaactgaagaccaatggtgctgctacctccagatcaaggaagaagaaaggtaagaaaccggtggaaaagagctattctttgagaccccgaataggcaggaggacggttaatccagcagctggtactactacaccagaagctccggtttccgtggaagaggagatgaaagttgaagaaggacgtaacaacaatccagtttggttttcactaaagccttccaagactcagtaaaactttttttctatcttcttttttcatgtctttaacttatgattctgtttatatttgaaggactcggtttcttcggttttcaggaacattgaaatgctacttccaccgatcaccgcttgctgcataagagtaaagtaagtactaattaaatttcaactataatctctgttgttgttgtagaatgtgtgatattgattctttgatttgtttttatgttcacagagatagcaacatgactgtctcatatctcaagaagtatctaatggtgaagctcggtctcgaaagcgaagaccaagtaaactaactcttctctctatctatgtctcactctctcttgtcttttaactctaatattttttgatgttcttttgcaggtggagatatggttaagggatgagccagtgtgttcgtcactgacactacataacttggtggattggtgggtccaaacaactccattgcctgagcgacaaagcgcgatggtcggaagctccgctgctgaattcatcatggatctctattacagcttcaaatctgacgcctctgactctggctctgcctctgaataattcttctcagaacttcaaactttactcttcttctaaactcatttcttgcagaataagtttcttttgaaagacttctagttttagcatctttctttatttaataattgctgagacctaaatatggaaaactctttatttatttgatttgcttgctttttgaggactcaaacggtatcgttttgtactaattaaatagaagctcattttagctagcttgagttatatttgataagatgcgccggttttgtgctctgtttggtttaaggtagggttaacgaaagatctgtatccaaacagtcttcttttttgcccgccatggataaacacagagccaggagcttagtgacgaactaaaggtgaaatttttattgaaagtttcaatttttatatggattggattacagaaacatttctatgtgaataaaccaacaatg

SEQ ID NO: 24177 - DNA, 3000 bp, Unknown; identical to SEQ ID NO: 2726
  misc_feature (1)..( 3000): 2750-1469P.txt file - cDNA_ID_2168409; gDNA_ID_1620582; Annot_ID_161197

SEQ ID NO: 24178 - DNA, 3000 bp, Unknown; identical to SEQ ID NO: 2742
  misc_feature (1)..( 3000): 2750-1469P.txt file - cDNA_ID_2168447; gDNA_ID_1620585; Annot_ID_161282

SEQ ID NO: 24179 - DNA, 3003 bp, Unknown
  misc_feature (1)..( 3003): 2750-1469P.txt file - cDNA_ID_2168459; gDNA_ID_1620585; Annot_ID_161285
acaaagatggttgaccacgtttttccactaatagtagaataattggttgggtggaaattggattttcagtggtccaattctcaaacttgttcatcgtctttttctaacaagttgatgctagctattgtcatcttttcttttgggaccgagagagaaagaaaactaaaaaatcttgagaacttgctcataatctgttaatggttttgtcaatttcgctcccatcagtcaacggaagttataatcaatttgtcaaaatctctatgacacgaaagcaccttatcttgtactagcattgtgtgaaatgggtcgagaatatatattgtcattattcattagtcttctgtcttgtgcgtacaaactgagttgatatcggctctatctaatcactaagcaatcataatagatcagtaacgtatctaatgattctgaggataaactagttgctaaattagattattactattatcagttttatgtatatttaccaataaaaagattcactgttttatgtaaaaataatcttacgagaacgagttaacgtttaacccattcgttgaatacatgcgtgcatgtagaacactcaaactaaaaattggttatgtcatatgtgtcttgaccgatgagatatatacgactatatagggggattggactacaatcatttaagttgatttcttttctattatatatagtgacacattacatgtgacgatatgatgtatataataaagatatttatttgtccgcaaacgcatgatatcaaatgtaatatacatatcaataacgcgtttatattaatctctaatacgtacaacatattacaatctctacaaatatcgacatgcttaaaaccaataacgcgttcagtagaacaatttaatgcacgttcaccaaccattttaacatcttatgttatttacactcgcgtagttcataacatttggttattacttattagtatatggaccggccctgccgattcagacctaatgcgacgatgtttgagacatcttaacaatatgactatgctatgatgtttgatcaccacctctattatataatgtagcaagatgatcaattatttgaatacagttttaatttgtttgaggacatacctaaaatgctcatatttttctcattgaaattacctttgagtcggtgttattcataaaaaaagaagaccatttattagctacatcattttcacatgacggctagaaaagtctcattcaagaatctggttgtgaaaagctaataaatatattaggcctatcgagccaaaagttgttacacatgatttcaaacatcaaataagtcatcggagtcaatattaaaaagttctacgtacattaaattcataagttttggcagttagagacatgtcaagttgacaagtttcatcagaacatgatcttttagtcttagagataattatgtaattaatatggcaatagagctagctggcaatagatcttaattatctaattaaagatgaatcacagtcaaaatcgttagagctggcaatagaaacgtaaaaatgaacctagacgacagtgcaatatctaaccatgcatggacttttaatttacaaaaatagaatatagaatcaaaacgcaacgatttaggaatctatttatagaaataaagaatctgtaataactgcgatggatatccaaatttttttatttttgttcttctcgtcctataaatatgccatcttcttggagtatttctttacaacattctctaagcttgtaatcgcgatttaaggcttgtccaccacattaccacgagtagaattgaccaagtaagtttccaacaaaacttaaaaccttttctttgttttacgacaaattcttgttattgtggtccataggttgtttctcactttcttgcaagtgatttttcatgatttttaagatttacgattcattaaattactttactaaaactcagatcgaattgagttcttccatctggactatcttatataattagttaggactttctaatccatttttaattcaattttgttgtattttaaaagtcggtctacaaaatattgtttaaacttaatagcatgatacagtacttcaatatggtgatgaattggcaacgaaaaatttaagttgaatatggaatacgcagataattgaacaagaaagccactaaacctaaatgctggttttagtaagtagatagataacctttttattctacttgttagtttatttttaacgaaatctgaattgttgaaatatagctgaaccaatgacccaattcagtcttcaaatatcactagcaaacgtaattgacatgaccatggcatgtttcaagcatattagatttcgatacgtcttaacttcttaattatcgggaccagctacatacatttttagtatatgtcatcattatctttacttcttttttgtatcatcacaattatttccattttatttttttgttcttcttcatgtgcaaaagaagaggtactttgataagattccagtctataggattcaattaagatactaattaaatacagtatatacagaatcttgagttgtccgctttcaagattccaatacagtttacaaaattctgaattagttattcttgttgagtcaatacttttgaaagaatgttgaccaaaaaaaaaaaaaccaaagaaaacggatccttatttaacggtctccttaaccttaataatagtaaaacggtaaaaaccaaaattcatgtggtgtaaattgtctaaagtctgtatttttttttattgacatccattttttttgtgtcgaaagtctatatatgaagtcaaattcatgaacaaatgcttctaggctaaaaacgttatcgtaatctttaatcttcaggcttcttttctaaaattccgactggttaccgagggctagaaaatccggtcaccgtcgccggagacaacctcggtttctaaacgaaaccatcgtgaaggacggaaaaaaggagcttgaagacaaaacaatg

SEQ ID NO: 24180 - DNA, 3000 bp, Unknown; identical to SEQ ID NO: 2746
  misc_feature (1)..( 3000): 2750-1469P.txt file - cDNA_ID_2168478; gDNA_ID_1620586; Annot_ID_161297

SEQ ID NO: 24181 - DNA, 3003 bp, Unknown
  misc_feature (1)..( 3003): 2750-1469P.txt file - cDNA_ID_2168501; gDNA_ID_1620586; Annot_ID_161304
cttatgaaagcaggacgagacgagatgagatgagaacgggacttcccaaaaaaacactaaactctaaatatcttcaaatataatgaacttccggtgataactcaacaaaaaccggtgacaactcgacgaaaactagaaaaagatttatcaaaaatttgacgaaacttatgatagttatatttcaatttctaactgcaatacactattcacttgctttattcgacggtttgagatatggtggttgtaatttatgtttgatttgtagcgtgcataccgatatacaaatgttaataatgttctatacatgtttacatatatacaaaatatacatgtttacacatatatatatatatatatatatatatatgttaataacgttctatatatgtgtttacatgcatacaaatattaataacgatatatgtgtttacatgtatacaaatattaataacattatctatatgtgtatttagatccaataatttaacactataattatttttagtgcttcatatatgtgtttacatgtgtacaaatgttaaaatcgtataatatatgccggaagtgttttaaaatttctcaaatttgagaaaacaataattaatgttaagtctcgccgttactagtcaactcgttctttctcactgcatgtacgccattcatctgtcgaacattaaatgcccgtcaacacgtttcttctctcaccaaagaaatcacatgaacatatttcacgggcaagatagaagcaaaatcttgttttatacacgtttcttttttcaccaaagaagtcacatgaacatatttcacgcgtaagacagaagcaaaagcttgttttatagtaactattttgaaacccaagtctgtatgtaacgtttatttttctttctttttcgacaaatctcctattgtcttttacctgaatacatatcctaattttgtttctaagcaaaacgttccaaaaaataactaaaactcttcgaatctaataaaagctaagtaacccaacaaaaccaaaagaacaattaaataaacaattaggctaaagaataccgctaaagaataccattgcttcattgcacgctcaaatttttaatgtaaactaacgatttttctatgaaatgatgacttcaattatatttttagaattttcaaaaacaaatgtatgtgatcgtgaaaacgattataatatatgtaaagttgcaaatatgggttatattgcgtattattttatacttcataggataattttgcattttttgaatgtggagagtaaaattgcaaaaataggcaactttaaaggtttttatttttttgcacaaaatcatattttcaaatttattaatttctggtgacaactcaacaaaaactaatcacaactcgacaaaattagtaaaaatccatcgaaaatttgacgaaccttatgataatgatatttcaatttctcactgcaatgcattgttcactagctctattcgacggtttgagatatagtggttgtaatttatgtttgatttgtagcatgcatacaaatatacaaatgttgataacgttctatatacatgtttacataataaagtgctatatacatgtttacattacatatatacaaatgctaataacgctcaatatatttacatatattatatatatccaaatgtaataactttctacatatctgtttatatacatacaaatgttaataaccctctatgtgtagttacatgtatacaaatcttaataatgttatctatatgtgtatatacatatatatatatatagtttaatgctttttatatgtgtttatatgtgtacaaatgttaaaatcgtgtagtatatgtcggaagtgtgttaaaaatttctcaaatttgagaaaacaataattaatgttaagtttcaccgttactaagtcaactcaatctttcttgctgtatgagcatcattcatttgtcgagcattaaatgcccgtcaacacgtttcttctctcacccatgaaatcacgtgaacatatttcacgcgcaagacagaagaaaaacttgttttatagtaactatttcgaaaccccaatctgtatgtaacgtctgtttttcttttttcttcgacaaatctcctattgtcttttacctgaatacatattgtaattttgtctcgaagcaaaacgttctaaaaaataactgaaacttttcaaatctaataaaagctaagtaacccaacaaaccaagtgaacaatcaaataatcaattaggctaaagagtactattgctttattgcaccctcaaaaattattaggatgatgagaatgtaatatatcctatatatgctaaatcaccaagtgcatgtttaagtttattaaacataatctactaatataaacttctattaagaataaaatatttagttgatcaaataataagtatctccatacaaattccagctgtaaaaaataaaattaggaaaacgaaatactaaaataataaagtttggagatatatagaagaaaaagaaaacagagcgccattatcggtgaaagctgtggttgttccttgaaatccgattctgattccttccttttggatccgattctatctccaccttcaagcacaatattcgactcggtactctctctttcttcttcttattgcaaaaagattctctttttatctgttttgtggatatagagattctggataaaaacaatcatcttttttctctcaaaaatctctgcttaagaactgggattcttcaaaagctcttctcttgtctgatttcttctgaatttcccctctaagtctctccaattcttctccattagctataaagtcgattcctttatcaccgttctgaagaatttggtcgaaagttttggcctttagtacccaattttcaatcctggcgataactgaattgaaaagggttccaaaagttacatcacctgaaaacaacagtgcttttgattgtgttggtggtttggagtgcttgataagtttaatcagggcccttgatatg

SEQ ID NO: 24182 - DNA, 3000 bp, Unknown; identical to SEQ ID NO: 2749
  misc_feature (1)..( 3000): 2750-1469P.txt file - cDNA_ID_2168505; gDNA_ID_1620586; Annot_ID_161305

SEQ ID NO: 24183 - DNA, 3000 bp, Unknown; identical to SEQ ID NO: 5753
  misc_feature (1)..( 3000): 2750-1469P.txt file - cDNA_ID_2168553; gDNA_ID_1620814; Annot_ID_169170

SEQ ID NO: 24184 - DNA, 3000 bp, Unknown; identical to SEQ ID NO: 5748
  misc_feature (1)..( 3000): 2750-1469P.txt file - cDNA_ID_2168563; gDNA_ID_1620814; Annot_ID_169173

SEQ ID NO: 24185 - DNA, 3003 bp, Unknown; identical to SEQ ID NO: 20829
  misc_feature (1)..( 3003): 2750-1469P.txt file - cDNA_ID_2168576; gDNA_ID_1620814; Annot_ID_169181

SEQ ID NO: 24186 - DNA, 3000 bp, Unknown; identical to SEQ ID NO: 7261
  misc_feature (1)..( 3000): 2750-1469P.txt file - cDNA_ID_2168742; gDNA_ID_1621135; Annot_ID_172642

SEQ ID NO: 24187 - DNA, 3003 bp, Unknown; identical to SEQ ID NO: 18377
  misc_feature (1)..( 3003): 2750-1469P.txt file - cDNA_ID_2168750; gDNA_ID_1621135; Annot_ID_172647

SEQ ID NO: 24188 - DNA, 3000 bp, Unknown; identical to SEQ ID NO: 7320
  misc_feature (1)..( 3000): 2750-1469P.txt file - cDNA_ID_2168803; gDNA_ID_1621140; Annot_ID_172796

SEQ ID NO: 24189 - DNA, 3003 bp, Unknown; identical to SEQ ID NO: 18415
  misc_feature (1)..( 3003): 2750-1469P.txt file - cDNA_ID_2168826; gDNA_ID_1621140; Annot_ID_172801

SEQ ID NO: 24190 - DNA, 3000 bp, Unknown; identical to SEQ ID NO: 7334
  misc_feature (1)..( 3000): 2750-1469P.txt file - cDNA_ID_2168836; gDNA_ID_1621140; Annot_ID_172806

SEQ ID NO: 24191 - DNA, 3000 bp, Unknown; identical to SEQ ID NO: 3316
  misc_feature (1)..( 3000): 2750-1469P.txt file - cDNA_ID_2169101; gDNA_ID_1620639; Annot_ID_162983

SEQ ID NO: 24192 - DNA, 3000 bp, Unknown; identical to SEQ ID NO: 9439
  misc_feature (1)..( 3000): 2750-1469P.txt file - cDNA_ID_2169255; gDNA_ID_1972120; Annot_ID_178946

SEQ ID NO: 24193 - DNA, 3003 bp, Unknown; identical to SEQ ID NO: 17490
  misc_feature (1)..( 3003): 2750-1469P.txt file - cDNA_ID_2169255; gDNA_ID_1621165; Annot_ID_173825

SEQ ID NO: 24194 - DNA, 3000 bp, Unknown; identical to SEQ ID NO: 9440
  misc_feature (1)..( 3000): 2750-1469P.txt file - cDNA_ID_2169259; gDNA_ID_1972120; Annot_ID_178944

SEQ ID NO: 24195 - DNA, 3003 bp, Unknown
  misc_feature (1)..( 3003): 2750-1469P.txt file - cDNA_ID_2169259; gDNA_ID_1621165; Annot_ID_173826
ctggagatgccattgagaaactctatggaactgcacaggacattgaaggtgtgatcagagacgggaagctctatgtcgtccagacacgaccacaagtgtgatcaaattctctgaccacttcttaatgtgtacgttacgttttctgtccagtaaactccttatttgctctataagcaaagagtataatacagcataagcatatagtggattacaaaatgtgtagtacaaagacatttggcattaccattaagatataaataaaaaaactgtttattggagttggaagtttctccagcttttgcttcttgaagttgagtgcaactgaaaactgcttgtcgtttcactggtcgagcgatatgactacttagtgtttggcttttgtgaattagtgactcaactgtattcccaattcaaattagggtctaaattgtaataaaatatagataatgtttccttttttcctgaataattttcttttaagctttgacacacgaccgcaattgaaggcgattctttttttgtttctagattaagttagctgccaaatgatacatgccatgccgcttcatccacctctttctttgatcttttctacatttcttcacaattttttagtttgtactaatttaatatttgtattggaatctcgcgaatggccttctctaaagccaaccaccaccacatcagtagttcagttaatagatatgcatatctacggacatttaaagctcacaaaatcaaatgtgtgtatgtttgtagatatcacaatgattcataaaaattacacaaccagtttgaccatatgatccaacaatgcaataatgcaaaatcacacaaccagcttgacctcaccatatgattcacaaccgatctcgtattcatagtatggcgtatatatgcatgcacaataaaaaattatcatatacgtgaaaaattgtgctatccacgataaatatatcgcaatgagtttgttttgacatttacgcaaaagtaaactaggattagaatgtataatcgattttggtgctcaatgcttaactaacaagtttaaggttgtttaattttttcttctctcttaagaatccactaatggtggaaatgtggaaggaagaatatggatttttttataatatgattaggatcttgaacctcacaagttatgcaacatatattatagatgctgaatctcaatttttgaaggtttacattgcatattatttacaagccatgacgacaagtatcaaatttatgtttgccacatattaaatttttaacatgcccatgtccaaatggttgtaactatgaagcagaaaacaatatacataccaataccatttgtaaatactagcatataactctgtacgtattcaaattacattatttctgttcttatcctgtataggttttaaatattgaaaaatataccatgcataatcaagggataggtaatgataattggtgggaataaattaaggatggcatgcatggatgggtccccaacataagcactcgagcatgcattgctaatactcagcctcgcgtgccaacactcccatgtccctaacacaaactacttagtaaattaaaatgatctaatctattatttacaattaattagtactaaactttgttatactcttccactaccacagttatactcttcacgtagttgttcatttatatgtatatttttcaagtagaagttaaaatcttatgaagatataatgctctcgaaaaaatgttgtaaaagaaaaagaaaaaagagagagagtagctgacagaaggaacatatagggaagagagtaaagagaaaaagcgaacttcaagaatcaacaataagaaaaagtaaattatttgcaaattcctctttttgtctcttaaaagatacaaaaaatgtttttttttttaaacacacagagaatgcaaactaacacaagataaaacaagaagaagaaacacagaattttgactgtcattatcataagaaacatagcaaccacaagactttcctttatatttggctatatacatttattcaaacaaacataatatgtttcaggctttgtattgctaattgggaacatttcccctcccccaactttttttttctcttttgaccaacttagcttatattaatttgatttcacttataactacatgttgcatacaatttttgcatattcttatctgctaataagtaaaactatgtgatagtcaagatagcatcaaacctacgggtccaaactaaggtttcaggtctaatattaggtatgggatccatctacactttttgttttttttactgagatagaatttacttattagcagatttcattttaggataaattccgataccaggtaaaatacaaacacaatttgaaaaggaatgattattgtttttaaagagattattcattaacacatgagacatttagactaaacaattactccacctctgttttagctagccatatctatataataggttctaataggtgatttaaggaggaagtgtgcatactcatattcttaagccatggaccaacaaagaaagagagaaaagcattgtagttagattttgcttagtcactttatgtcagtggtcttttatgattttgtcatttttatttcatttttggttcctctgtattcttggaggttaaaaaaaaaggaaaggcatgaatgatttcatcactatccaagccaagtacttataaaacacatataaacatttagactattactttaagacaccataattccataaaccccttttgaaactttctctcgtctctctctctctctttcttgttagcataaggccccaagaagacataagagtgttttcatgattctttatttgggttttgttatgaaaaaatttagcttctatagctttggaaatggtgagagcttgagaggattataaaaatcaagggtttttgtcttcttttgctcacttgctcattctttaatatcgagaaaacgttttgggctttgatg

SEQ ID NO: 24196 - DNA, 3000 bp, Unknown; identical to SEQ ID NO: 6153
  misc_feature (1)..( 3000): 2750-1469P.txt file - cDNA_ID_2169314; gDNA_ID_1620850; Annot_ID_170314

SEQ ID NO: 24197 - DNA, 3003 bp, Unknown
  misc_feature (1)..( 3003): 2750-1469P.txt file - cDNA_ID_2169438; gDNA_ID_1620654; Annot_ID_163600
tttaacaactcaacccatcaaattaaatgagttatgagttgacccaacccatttaacaaaatgagttgagttaacacataactcatttaactctaaactcatttgattatgagttgggttgagttgggttacccattttgacacctctaaatatgtgtctctagcctctactatttttaaaaactaaattttatataataaatttttttatcttaataataaccaagttgaacatattttagttctaaaattaactactcggtttaatattaaactttagaccaggacatgccggataacatggtcttagtgttgtcgtacgtcaccattagagtttcaatttgcataatacaaggtggttgacccaataaaagaaatttgattcaatttcgatataaacaggtttgttttggttcagttttacctattactttttattttgtccaatcccaaaactattatttcaaagacaaattggagaagaaacaaaaaaaaactaatggttggacaaaagattattatatatcaatttcaccacaaaaaacttagcattaaaatattcgaaatggacagcgacgaattcaaaccttcgtgttaattgtctccggcgactatgaattctaaaatcttccactttgcctaaaatatcaatacatcacattcatcctagccttatccactctttcttggaaattctggtctggtttcccttcagcaattcaattaacttcatcaaaccgaccggttcaaacaatcatctagaaattctattttattgttagactagatcatgaaattttgaccgagtcagcacacataaaatctggtacttgacgtggtttagttaacccaacaaagttgttttggttaaacggatttattgacaaacgtgtttcggttcactcactaaaaaacccggttaggtagatactacttcattgacaacaaacgaagcatcctttaatttcaaaaccgcgttttaatcagacttttccttttttattttcagttctaatgtttaaaactttccttttctttttctccatatttgactcgtcaatataaatacaattgtaacaaacagattttgatcaaaagattttacttttctcaattcctttcaactttcaaaatcgaagatctcttaagccatgaacgatcttctctccggctcgtttaaaacctccgtcgcggacggttcatcgccgccgcactcacacaacatcgagatgtcaaaagcgaaagtctccggcggaagttgccacggtggtaacaacctagacacgttcttcctcgacgtggaggttgtaaacgaagaccttaaagagctagatcgtctctgtcacaacctccgatcgagcaacgaacagagcaagacgcttcataacgctaacgcggtgaaggagctgaagaagaagatggacgctgacgtcactgctgcgcttaagacggcgaggcgcttgaaaggaaacctcgaggctttagatcgggctaatgaagtcaaccgaagtttaccggaaagtggaccgggttcgtcgtcggaccggcaaagaacttcggtggttaacgggttgaggaagaagctgaaggatgagatggaaaaatttagtcgagtgagagaaacgatcacgaatgagtacaaagagacggttgggagaatgtgcttcaccgtcaccggcgaatatcccgacgaagctaccctcgagcgtctcatctccacaggtaataattttttccaattctttcttaacaatttttttggtcaatttcaaaattcaaattctaaacgttaaagagcaagaaaatagcgcaagttgttaaacctttttaagaaattgttagtttataatttggttaaatcatgatattgatataaattggaattatattgtaggtgaaagtgaaacatttttgcagaaagcgattcaagaacaaggtcgtggtaggattttggacactattaacgagatacaggagaggcacgacgcagtgaaagatattgagaagagtttgaatgagttgcaccaagtgtttcttgatatggctgtgttggttgagcatcagggtgcacagcttgatgacattgaaggcaacgtcaaacgagctaactcgcttgttcggtctggtgcggaccggcttgttaaggcacggttttatcagaagaacacacggaagtggacttgctttgccattttgctattgctcattattgtggttttaattgtggtgtttactgttaagccttgggagagtaatggtgggggaggtggaggtgcacctcgtcaagctactccggttcaagctcagccaccgccacctccggctgtgaatcggcggctactacgctaaataattttttttttgaggttccctctgtctatgcatgagcatatctatgttttgaagattgttttttattttacagtattttgtctttaatgtttttgtaatgttttggttggttaaactctgtgtatatataatgcgatcaccacatttctttgttttattatggaacgatttgcttattttttacaatcgacttaagttaatttgaccgtctatgatattattattcggagagatctatcaaaatcgatggtcaaaatgaatttccagagaatatggaaattaaaaaaattgaaatatatatcaaatattatcatacttaagtatagattatttacagttatctctatagtattatttacatttatatttattttaaattatgaaacttagattaatttgttctctatataaataatttagacaattattcttatgggagtctttttttttttttcactgaaatgttgcctttcattgataccaaattcttatgggagtctaacagtaattattcataaatacttttatcttcgtactcccataatttatcgaaccatattgggccgtgggaaaagccgattagtcatacaaagcgtaagaaaaaaaaaagtttcattgtgttgtgccattgtttcactttctctcgcaatg

SEQ ID NO: 24198 - DNA, 3000 bp, Unknown; identical to SEQ ID NO: 7365
  misc_feature (1)..( 3000): 2750-1469P.txt file - cDNA_ID_2169559; gDNA_ID_1621142; Annot_ID_172868

SEQ ID NO: 24199 - DNA, 3000 bp, Unknown; identical to SEQ ID NO: 7366
  misc_feature (1)..( 3000): 2750-1469P.txt file - cDNA_ID_2169563; gDNA_ID_1621142; Annot_ID_172869

SEQ ID NO: 24200 - DNA, 3003 bp, Unknown
  misc_feature (1)..( 3003): 2750-1469P.txt file - cDNA_ID_2169576; gDNA_ID_1621142; Annot_ID_172877
aacaaccagtgcaacttgatcattattgaaacagatttattatagcgttttacagcatctattgattgtaattttgtacttatcttacaataagatatatataaatatatttttttcctcacaataagattcaatctaagaatatgaatttattgacgaagatgtaaaataaatgaaactggctttttttatgaagatgtatatcaagaaatgataataattcatagaagaaaaaatgataattataaagaagtagaccctaaaataaatagttaaccccaaagtggttgagtgggggatcacatgcagcaaattaacggcggtggggaagaaggtctgagaaattaaccaagagatggctcatcctcagccattcacttagccatcgagagatctcaaacccattaatcatttaacttactgaacatatctaataaatgtgtgtttatatatgtaatgagttagacgccaaaaataaattatagactagagacatgtcctgctagctggatcctagtcatcacggtctcacgagcagtattgcatccaattttcgatcacaatatttacaaaaaattcccaccactctaaagttgtagtttattctctatatatagagtaacataaattgattggacatgcaaatcaagtcaaacataaaagtaaacaaaaccctatctcttcctatatatggccgactcgactcggccgcttctctcagatttcaactcgtccgagtcaaatcttccgccaccaagatcccttgaggagacgatagagcgatgcattggagacttcgggtgggcacagtttctccaagccgctttagtctcattcgcttggttcttcgacgctcaacaaacattcatcaccgtcttcaccgactcacaacccatgtggcactgtgacaactcggaccgagtcgactcagtatgcaacacatcctcctccaacctctgcaccttacccaaccaaacctggtcttgggacttgaacccacacgtttcaatcatttccgagtgggggctacaatgcgccggctcgttcctcaagggatttcctgcaagctcattcttcctcggctgtctaatcggcggcttagctctctctacactcgccgactcatcgctcggtcgtaagaacatgctcttgttgtcgtgtctcataatgtctctctcttccatgttaacagctttctcaacgagcatttgggtttatgcgtttttgagattcttgaacgggtgtggccgagccacgatcgggacttgcgcgcttgttctatcaacggagttagtcggtaaaaaatggcgaggacaagttggagcgatgggtttcttttgcttcacgctagggtttttatcgcttccgatgttaggttacattaatgaagggaattcttggaggaatctgtatgtttggacatcgataccgactttaatctattgctgtttagttcggagtttcgtccgggaatctcctagatggcttatcgtaaagggtcgtaaagaagaagccgtctcaattctccaaagcattgcttctaatgcaatcactatgagcttcacaaacttatgttttgaagtagaaaatgatcaatccaagtcaaatcctgatgtttatgatgcgttaaagatcttggtgaggaaaagttggtcgtttagaagattattagcggcaatggtggttggattcggtatcggtatggtttattatggaatgccattagctttaacgaatctaaacttcaatctttacttaggggttgtgttcaacgccttgtctgagttcccagcttttctgataacgtttttcttcattgataaaatcaataggagagatgcgttgatcggatttacagctctaagtggaatctctagcgctctaatcgcggtgttaggacaacaactagggtcattacagattgtgttagagctcgtttcgtttttcagcgcatgcaccgcatttaacatgacgcttatttacacaattgaaatgtttccgacatgtgtgaggaactcggcgatttcgatggtgaggcaagcattggtgtttggcggcgtgtttagtccagtgatggttgctgctggtcgggaaaatcagttttggtcgtatgggttgtttggtttgatcataggattgtgtggattgtttgtgtttggattgccggagactagaggaagtgttttatgcgacactatggacgaggaggagtataagactttggcaaaaagacaatttattggttgatacttgatactgttgtcttttgttgtaatggttaaaaagtttgcaggcttaaaccagttcggtattgattcaaatcaattctgattttaatacttataaaccacgggttaactccttacattataagtgactgtctcatctgtaccggaccataaaccaaattcaaccaaccataatccccctttcaattttgatctattcaacaatgactcatgcatactttatttcccttatctcatttccatattcgaaatgtaagctctaaaatggtactcttaactgaaactaaaatatatataaaaaaaaaaaaatctacatttcttgaagaaacatttttaaaattaactatagttgctaaattactattttagattgacatatatatatatgtagaccaactaattaacccactgaaatgcaaagagatggtctgaaaatcaaaacagacatctaaacgtggttacctacccaagagctcaccagcctatagtatcccattccctttatattgaatcactttagattatcttttctctttcatctttccaattccactctatattaaagaaatattattttaagaataaacaggatcgtattttcatcatatgccaatatgttatttggatttaagattgttttcgaatctataaatactaattaacacaacaaacaatttccaaatatcgtagtgttcataacgaaacgagcacacaactcactaaacactcaaacaaaaatacaaacattaagatg

SEQ ID NO: 24201 - DNA, 3003 bp, Unknown; identical to SEQ ID NO: 18453
  misc_feature (1)..( 3003): 2750-1469P.txt file - cDNA_ID_2169600; gDNA_ID_1621142; Annot_ID_172893

SEQ ID NO: 24202 - DNA, 3003 bp, Unknown; identical to SEQ ID NO: 19877
  misc_feature (1)..( 3003): 2750-1469P.txt file - cDNA_ID_2170081; gDNA_ID_1620692; Annot_ID_164838

SEQ ID NO: 24203 - DNA, 3003 bp, Unknown; identical to SEQ ID NO: 19877
  misc_feature (1)..( 3003): 2750-1469P.txt file - cDNA_ID_2170081; gDNA_ID_2926202; Annot_ID_201934

SEQ ID NO: 24204 - DNA, 3003 bp, Unknown
  misc_feature (1)..( 3003): 2750-1469P.txt file - cDNA_ID_2170085; gDNA_ID_1620692; Annot_ID_164839
atgctacttaaggttggccttgtcttctttttttacaaatcttaagtggctggctttcatgtctttcaaaattttgcaactctgaataaactcttaagggtattgtttggtaaatttggaagaagatataataatctctgctctttttcaatggctgtgacgtttgccctaaatttttaataattgattatgctttgtagttaaagatggctctgttacagcagcagcagcaaaatcaacagcagggtggtgggaatccaccacagccacagccgcagccacaaccacttaatcagcttgcccttacaaatccgcaaccacagagttcaaatcacagtattcatcaacaagagaaattgggaggtggtggtagtattacgatggatggtagcatttcaaattcttttcgaggaaacgaacaggtctgtttataaattcctgtttcttttcctagttcatgtttcaatgatctgttgcatacgtttttagtttctggtgagtctgaggttggttcctaaacttgttttgcattttactgaaggtattgaagaatcagagtgggaggaaaagaaagcaaccggtttcgtcttctggaccagctaatagttcaggaacagctaacactgcgggaccatcaccaagctcagcaccttctacaccttcaactcatactcctggagatgtgatctctatgcctaatctgccgcacagtggtggttcctccaaatcaatgatgatgtttggcactgaaggaactgggactcttacatctccatcaaatcagttggtgggtttccttaaactgttgatgggaatgaataatggtttctgtaatcaatatgaattagtagcgttaattattggctattttgcaggctgatatggatcgatttgtggaagatggatcacttgacgacaatgttgagtcttttttatcccaggaggatggtgatcaacgggacgctgttacacggtgtatggatgttagtaaaggtgtgtgttttagtctcacttaacattattcgacaataacacggtgaacttttcttcagtaatccaacagtatttctcaatcactacaatgatggctctgcactaggttttacgtttactgaagtgaattcagtacgtgcgagcacaaccaaagttacctgttgccacttctcatcggatggaaaaatgcttgctagtgctggacatgacaaaaaggtaagccagaaatcatcattaggtgttctagcgttctgaaacttagagagcctcttggtttggttcattttgcaggctgtactatggtacacagacactatgaagccaaagacgaccctagaggagcacacagctatgataacagatatccgttttagtcctagccagcttcgccttgcgacttcttcgtttgacaagactgtcagggtttgggatgctgataatgtaaagtgaaagttgatccatacactatgttgttttatctctgcatgaatataattttttccgacattgtgattgcttaagagtttgtgaatctactttgcagaaaggttattcccttcgtactttcatgggacattcttctatggttacatcacttgacttccatcccatcaaggatgatcttatatgttcctgtgacaatgataacgaaataaggtactggagtatcaacaatggaagttgcacaagagtgtacaaggtagatttttttctcttgaaagccaatagttcaacattatttacgtgcttaatttagcaattagatacatataatttcacttttgtctttccacagggtggttccacccagataaggttccaaccacgtgttggaaagtatcttgcggcttcatcagcaaatcttgtcaatgtactagatgtagaaacacaagctattcgacactctttacaggtttagtgttcaaacttttcaaacacgatgtttctgatagatacttattttgtaatatgtaccagcaaaagagagcaactaaaaaaatagcaaaagagagcaactaaaaaaacggttgactaattcgtttgtgtaggggcatgctaatccgataaactcggtttgctgggatccctctggtgacttcctggcatctgttagtgaagatatggtaaaagtatggacgctggggacaggtagtgaaggagaatgtgttcatgagctaagctgcaacgggaacaaattccagtcatgtgttttccatccggcttacccctcgctgctcgtaattggttgctaccaggtaaagttgaaatcattacaatatctgtttaaaaaagtttgtgaagaaagtaatgcaaaaatcccaaatttactcctaaacttgtgtgtgtatgcatgcagtctttagaactatggaacatgtcagagaacaagacgatgacattaccagctcacgaagggctaattacatctttggctgtttcaactgcaactggattggttgcatcagctagtcatgataagctagtgaaactgtggaagtgaaaactatgagagaggaaaagagacgtttgttgtttaggtattattagtaatcatggttttttttttaacttgtagtgttctctctcggccattatctcgatctcaagatagttttccagatgttgaacaaatgttgttgtatgatctgacgaaattgggatcttgagaaattgtgaacaactcttgttgtaatctttactagtccttttggctcagctttaatttactggcactcttcttcacttagtttgggttggtttggtattttatgtttgaacgtttcaataactctttagcttttcgaaacgcttgaaaattgaaatgtgagagccaatccaataatacagttgcatcttatttcaaaactacaaaagtataaaactaaacgcaaacgtgatagttgaaaacgcaaacgtgaaagttgtaaacgcaaacgtgatcctaaacgcaatgtcgaagtgaaagtcgtgatggctccgtcgtatctgaaatcgtggtaattggtgatg

SEQ ID NO: 24205 - DNA, 3003 bp, Unknown; identical to SEQ ID NO: 24204
  misc_feature (1)..( 3003): 2750-1469P.txt file - cDNA_ID_2170085; gDNA_ID_2926202; Annot_ID_201935

SEQ ID NO: 24206 - DNA, 3000 bp, Unknown
  misc_feature (1)..( 3000): 2750-1469P.txt file - cDNA_ID_2170099; gDNA_ID_1620851; Annot_ID_170329
agaaatgggagggactgattgagaacgcaggctcggttttcataggaccatggactccagagagtgttggggattatgcgagcgggacaaaccacgttcttccaacatatggatatgcaagaatgtacagtggcgtctctctcgactctttcctaaagttcatgactgtacaatctttgacagaggaaggtctgagaaacctcggcccttatgtagcaactatggctgaaatcgaaggtttagatgcacacaagagagccgttactctcagactcaaggatatcgaagccaaacagcttgcataatccaattgagatttatattcagacaaaagaggcaaaaattctttttgtattgtatgaacatatttggtttcctgagatggaataacaataaaataagagatgttggaaaactcttaccataatcttgtttttcattctttaaatctaaatccttccgtatgtttgaaccaaagagtaagttaattgtgctaactttcccgaaacacaatgggattccaaatatatcttgttctttacaaatgacagcgacttcaaagattatacagaaaacttcagagagcaccaaagaaaaaacacgtaaaagaatgataaaatcgtattgctgatcagtttcttctagctcaagccggcaaaggttcttcgagaactgcaacacgaaagtaacagaccaaataaaacatgtcttgagtttagttcttgcaattctaacaaggaaaagaagaagaagacgaaaggaaaaaccttttgtttttgtggcggactcagctggtgtgatttccgcattggaagcgacaggagtttttgttggcacatccggaagatccagcttctcagattcttcagactcctttgtaggcacttcaggcatctcatcaacaataagctttaagcaaaacacacatcaacattagtctctttatctagtaaagataataatacacaaatttattttgtaaacccatacctgactttctaggttgtcaaattctgctaatatatcttcctcatcctctgctgatagtttctctcccaatatagcgttcagctcctgacattcggaaatgtaaatagagtcatcaaacacaaaagctcgacaaaaaagattatagaggttttcacactagacgagctcagaacaaaatgtgccacacaaaagcagtgatcaaataagaagatatttacattctgacaaagcggataacgtaataatgaatcataaacaaatgatacgaaacccgaaagtattttgactcacatcttgataagctttagcatcagcagtatcatccattagtttttgaacatcatcaaggtccaattcgctttgaatggccttaatagcactattaccctgctttaagctctcaaacactgccttttgtttgctcgtaagttcaatatctgttaactgcgagttcacatgaaagtttgagaaagccataattatgcatcaaaagagacgatgccggatacaaaacatacacacaaggagaaggatttacttgttgttcaacattgatgacccattgatccacttgcttcaataactcttcttgagttcgtttcttcctcaatgctaacaaagctctgtcctttcgcttttcacggattaagtctcttgcagcttgcttttccgcttcaattactttctcaagctaaattagcaaaaaaaatgagaagatcggttaacaaagagatgagccaaagaactcaaaagcttgagtctttcttttccatcacactactaacaatcataagacacatattgtgaaacgaatcaaatccaatctccaattaggattttggatgaatcaaaactatatgatctgggttccaaaagaaattgtaacaaaagaaaattaagatataagaagagagaataaaaaaccttctgctgatattgaccaagcttgcgtctttgggttttgagagagagaatcgctcgatcaacctccgtgatctgtggtttcttcacgaacaaattccccatcttttcttcacttatcgaaaccaacgattcggaaaatcaaacgagcagaagaaaatttagcaagatttgatcttttgacgaaattgattattagtctctagatttcccaaaaatgtcgccaatttcaaaccaaagtccaatttttgtgtttcttctctctttctgcttttcagtacaaatatctcaaaatagaggaaaagcatgaaccggaccgaaaaaatgtaaaaatcgatatcgaaccgattttagtcggtttgatttcatccacactgaaaaataaaaaaatcgaaaccaaacaaaaattccttggatagtaccgtaaacaaaatcaagctgaaatcgataagtaaccgaatagaccaatgtataattcggtctcccaattttgttcaagtttatatcaaaaccagaacaaaccggttggccacctttaacaaaatctcgaactcgcgttttcgatagcgcgtgattgcaaaacgctattgcagcgtcacgacaaaaaaggtttgttcgtttattaaaccggccggtttggaatcatgaatttgatttgaatccttttagctggttaaccgacgtcgtttgagtaaatggatccaaagccagacagatcctaaatctcgtcgacgacggtgtcgggactgaaagcagagagaaagcaaagtaagctagcttagctaggtccaagatccaagctttggaattttgtaaattgtctccactcttagccggtgagtctcactctgttccgaattattctttgtgatatggatttcgatttcccatgattcgattttgtactttttgctcttctcttgagtttaaagatgtacgaatgaatatatacagattcgattttatgttctggtggctttgatcgctgaaatttgaaaactttgtctatgtttcgattgcttgatactcttgtttcacatgttcatactctggaattgattatagattagtgtttttacagttttaatg

SEQ ID NO: 24207 - DNA, 3000 bp, Unknown; identical to SEQ ID NO: 4372
  misc_feature (1)..( 3000): 2750-1469P.txt file - cDNA_ID_2170256; gDNA_ID_1620702; Annot_ID_165106

SEQ ID NO: 24208 - DNA, 3003 bp, Unknown
  misc_feature (1)..( 3003): 2750-1469P.txt file - cDNA_ID_2170308; gDNA_ID_1620724; Annot_ID_165897
ctgaaccggttaatgcgtaaccggtgtttggaataatgatttaggagaaagagtaggaacatttgggctttgtcataagtttaacctggaccaagtttgaatattcttaagagatatgggcctagattaaaaacaatggtaatgtaattaaacatattgctaaatgctaataatgtggatttgtttgtttattaagaaaaaagcagcaagaagaagataaatcatttgggtcaacgacattaataattggaatcccatactcccaaatcataattagacatacacttttgtcttaggctgtcctttacactcatcggcatcaccaaatacttagttggcaactttgatcaattaatgtattaagcatgaatgaaaacaacttttacattgattcgataaattcattatattgtagataagattagtcaaaagtttacaaacattcgttaacaaattacaaaacttgtaatatctgcagcaatgcccatgtgggtagagctggctgacgcaacctaaccgggggataaaagcgtctttttggtaccaaatttaaagtttctttatgagtaaaattcccaaacccaacatcttcttcctgctgaagcagtaagcactcaaccaaaaaaccaattgcgtaaacactttcccttgaatacagagatcacattcgatcaggtaaaaacaaggtctcgatcttctcttcagtcaattttttcaaattattcgaggttcccgtcattcgattccgacttccgagcttctatttctgctcaatgtttttgtattttgttagggtttccagaaaattcgattctgttgtttttaatttgagctaataaaatctagaatgggaaaaagaaagagttcattttcgtcctctttctttttgtagaagctgaactttgtttttcttttacagcgagctgatttctcacaagggatatcaaaatttctggtgaagtgggattgtaaaattcggcgttgaaagatatataaagaggtatgtttgatcctcagtgaggaataaggatttttagtagttatatatctctccaagtgatgatacatacatacttgtggattagatctatgataagaataagcataagatagagactgagagacaagtcatttagggagattaaataatgttcatggaatgctaaagttcatataggagtttgtctcatatcagaatctagattagatcatgctcagatgacatctcttgaatggacaaaaaagtttttaactatgtgattttttcgacttcttttggggaatcaatgtactacaagctgagagttttagagtagtttcatctctggctaagctttgattcattttctagtggaaggttctggagtcgtttcaattcatggatgatggtactcctaagaagctaaacatattacctgatcactttagtgctcctagtcccacagcagaatcttctcagcacgatactccatcatcttcgcagccaaaggacgatagttctctgaggtaaattgttagcgaataaatatgctaagaagggaaattctgagctgaaatgaattgttttttcgggtggttttgtttagagtaggccttatagccagtcacggactcgcagaaacctgaaaagagcagcaactatgttgaatttgttcactcttcgccgtctgccttgggtttcagatggtcaagagaaggttccattctctcacacctttcttctttgtttttgattcacctcattgaagtttcagggttttctcctgaatcctgatcactctctcattggcaggtcgagctatcagcagcggagttagaatcacttagatcagaactttctgatatggaagaaagagaagcttacctcaaagcccagtaagtcatatactcaaatttgttccattctcagattaaaagcgcatatctcaatttcttcttgctgaactgctacataggttggaacatgtggatgaagtcttgcgctctgcccgtttatctggttatttgtttatcagaagtgtagggccttactctgaattacttatcattattgatccactaggatgttttacaaatttgccttatttttttgtttgactttagcgttgggcagctcttccgggtgaaccaccaccaatagatgatacagaagtagacgactggcttcctcggtttgtcgtccttcaaggcccttgtcttttcttctatttattgtcaacaggtgagttaaggttcagcttttacaatcctgtttcaaatttgtattcttcttgtaatgtctcttgaaattctctattgcagacttgagccctcaagattcgacattgctagcagatattgttgaaattggttcggtaccaagctacacgagagaattcgatgaaacccattattgcttttacatattaacccgtcaaggtctaagatttgagtgctcaagcacctctaaaacacaggtgaaccaaatacatatacatctttacacacagattgttgttgagagatcccacagcatttgaacgcaatgatttcgcggttttgtatggttttaggttgattcgtggttgtcggttttgcgccttgattgcaagtctgaaccagaagaaaggttatcaaatggatcagtcgaagctccagaataaattgaagagcggtcactgctctggatagttttcatttatatgtatataatgcttctttttagatgtagtagaattcacgtcaatgaaaggttcttttactgaactggtggttacaatatttttggtttacttcttttagctgctaaagacattggaatatattcgtttcttgaataggcaataattctagttggaaaacaaaagtgattagaaaggcaataaatcctgagcctttaagtccttgtctgatccgacccgatcaaaacatgttggtataaaatcttccaataggttcacatttttgaggtccctgtttgcacatcactcttctcagtcctcacgcatcgtatcagagaaaatg

SEQ ID NO: 24209 - DNA, 3003 bp, Unknown; identical to SEQ ID NO: 24208
  misc_feature (1)..( 3003): 2750-1469P.txt file - cDNA_ID_2170308; gDNA_ID_2926184; Annot_ID_200484

SEQ ID NO: 24210 - DNA, 3003 bp, Unknown; identical to SEQ ID NO: 20236
  misc_feature (1)..( 3003): 2750-1469P.txt file - cDNA_ID_2170372; gDNA_ID_1971690; Annot_ID_175079

SEQ ID NO: 24211 - DNA, 3003 bp, Unknown; identical to SEQ ID NO: 20236
  misc_feature (1)..( 3003): 2750-1469P.txt file - cDNA_ID_2170372; gDNA_ID_1620719; Annot_ID_165748

SEQ ID NO: 24212 - DNA, 3003 bp, Unknown; identical to SEQ ID NO: 20236
  misc_feature (1)..( 3003): 2750-1469P.txt file - cDNA_ID_2170372; gDNA_ID_2926191; Annot_ID_201079

SEQ ID NO: 24213 - DNA, 3000 bp, Unknown; identical to SEQ ID NO: 3816
  misc_feature (1)..( 3000): 2750-1469P.txt file - cDNA_ID_2170393; gDNA_ID_1620695; Annot_ID_164926

SEQ ID NO: 24214 - DNA, 3000 bp, Unknown; identical to SEQ ID NO: 3816
  misc_feature (1)..( 3000): 2750-1469P.txt file - cDNA_ID_2170393; gDNA_ID_1620666; Annot_ID_163934

SEQ ID NO: 24215 - DNA, 3000 bp, Unknown; identical to SEQ ID NO: 3816
  misc_feature (1)..( 3000): 2750-1469P.txt file - cDNA_ID_2170393; gDNA_ID_2926190; Annot_ID_200992

SEQ ID NO: 24216 - DNA, 3000 bp, Unknown; identical to SEQ ID NO: 3816
  misc_feature (1)..( 3000): 2750-1469P.txt file - cDNA_ID_2170393; gDNA_ID_2926191; Annot_ID_201018

SEQ ID NO: 24217 - DNA, 2319 bp, Unknown; identical to SEQ ID NO: 4291
  misc_feature (1)..( 2319): 2750-1469P.txt file - cDNA_ID_2170409; gDNA_ID_1620695; Annot_ID_164931

SEQ ID NO: 24218 - DNA, 3000 bp, Unknown; identical to SEQ ID NO: 3814
  misc_feature (1)..( 3000): 2750-1469P.txt file - cDNA_ID_2170409; gDNA_ID_1620666; Annot_ID_163939

SEQ ID NO: 24219 - DNA, 3000 bp, Unknown; identical to SEQ ID NO: 3814
  misc_feature (1)..( 3000): 2750-1469P.txt file - cDNA_ID_2170409; gDNA_ID_2926191; Annot_ID_201023

SEQ ID NO: 24220 - DNA, 3000 bp, Unknown; identical to SEQ ID NO: 19482
  misc_feature (1)..( 3000): 2750-1469P.txt file - cDNA_ID_2170413; gDNA_ID_1620666; Annot_ID_163942

SEQ ID NO: 24221 - DNA, 3000 bp, Unknown; identical to SEQ ID NO: 19482
  misc_feature (1)..( 3000): 2750-1469P.txt file - cDNA_ID_2170413; gDNA_ID_2926191; Annot_ID_201026

SEQ ID NO: 24222 - DNA, 3003 bp, Unknown; identical to SEQ ID NO: 19480
  misc_feature (1)..( 3003): 2750-1469P.txt file - cDNA_ID_2170418; gDNA_ID_1620666; Annot_ID_163944

SEQ ID NO: 24223 - DNA, 3003 bp, Unknown; identical to SEQ ID NO: 19480
  misc_feature (1)..( 3003): 2750-1469P.txt file - cDNA_ID_2170418; gDNA_ID_2926191; Annot_ID_201028

SEQ ID NO: 24224 - DNA, 3003 bp, Unknown
  misc_feature (1)..( 3003): 2750-1469P.txt file - cDNA_ID_2170845; gDNA_ID_1620587; Annot_ID_161324
tcataagctgtcgaaagtctctgtttaggtaattgggattaagaaagtaatgaaacctggccaaggactattctgtgtttagcttttatgatggttcctgcatattgagctttgagtattgcagcacgaagagctttctcaggaggtaccggcggcagagcaggaaaagccgttttcaactctgtagcaattataaaatggtattaagaaaccaaactatacaaaaaagaggaattctacagattcgattaaactcataagagaggaataataacaacttaccattacccaacagatcactgtttgaaggtttatcaagctgagacttgagactaccatttctctccttctttgaagtgtcagacccttcattgatatagaatttaaaagtaaactgttagaaagaagtgataatagaataacaagtgcgaatgaaactatgaaagatagctttagatttcttaccattagattgaggatctaactcgctcgcttgtgcacctgaaatgttctttaattgacaatcctgtttgacaagagcattgaaacataaatccctattgttagtgacaagactaaaaggaaattaaatttgacagagatcaagaaagaatctgtatataccgttaacgaacaaacgtcacttccaaatgagctacaggacttgaggcatatgcaaattatcctaccacatttacaggttgctaatgctttaggcgtcacagcaggagtattctttttgctctgcactttcactggcttggacgaaagagaacccttttcggagttctctttagctggtttcgtcaatcccaccccagaggaagctgatgttccagtgctgctccgtctagaacaatcacgttcaactggctgtctcttataaccttctctaacttcattccaggataacctcaaaacctttttcttcatgagtgattcccatctaacctcaaaaatctcattaatctcctttgcaatcgtgtgaacctcattccacagaggattataatgcatcgcattggcaaaagttaaccgaacatccgctgcaaactcatcagcattactgtagacattcttcaaaagtttcgatttgacagtgcctaaatccattggcttttgtatgacattgaagtaatcaggaatctccattttaacaggatcaacaggctccttaaagagccatccaccacggtgctccatcaaaaaacgtaacaatgccaaacattgactagaccaatcacaatccagcctctgcttcttcttaggttgaacttcatctagctctttaggcccaccacgcttctttgatttctccgaggattgagataaatcttcagtcactacatgctcaattttcttcgaactatcagacaacgtttggaatgttctgacagaaccttgaggaccaaactttatcttaatattgggtatcgcaaccattcttacaagaacaaataaaaacctgtaagcaaacataaaaagcgactgaaattagggtttatctacgcgacatcacaagactcgaaattagggtttatacgtcaaaacgaacaaatcgacaaaacaatcagatacccaacaaaattccgactaaataccgactaatttcgttacaaatttctaacgatggaagaagatgaagaaggagtgaattagggtttatcaatttcgcgatcgattaacaaaaaaacttgaaaaaggtactttgagaaacgaattcaatgaaatatatagcgaaaagagtattattttacagagataaaagcttaccagaggaagaatcaatggaacagtatgagagattttggagtatcgagtgtgagagtcagagtgaggaggaggaggaagccaaagcggcgatagaagtttcttttttcttattgagggtttgtgtgttaaaaatacttgagataaaacgcgtattttgtggttaaaaacacttatatatttcactattttgaaaatactacttaaaattatctcaaacgatgtcaaaattaaaatatgacaacaaaatctgttgaataaaaagtgatttaataaaaaaaagctttctttaataaattatttcctatttttttttaataatatatacacggatttttttctctttttttctttacaagtagcggtatttctcgtactacttttttaccgttaattttttctcgtatcatattttttatactcactaaatcttaaaactttgcgaacctcatacttgaatttctttttcttctctttttcttataaacctgttttttacgtaccataaaccattgatggtttctaaacatcgacaattttaccttcaaccaatttttttttagatcgttaagatctcttttaatttaccaaaaatgcggattgagaatgaatggtggtcaaaaaaacaactcttttataaaatatcagcaaacaacaactcaatgataggataagcctaagaatactatttataataacatctcgaaaccctaaatttttttaataatatagattatttaattaaaagataattacataagatatttggataatttcgaaatatcatatttttaggttgccaaaataagacctactctttatattagattaggtctaccatcaaattctttttgcaaatagaaacaggaaaattctaacaacttaatattttctttaaaaacttatctcaagccaaaatccaacgatatctatcgatatggtattatcaatcaaaagattaatattgcataaatgttttgataattttgttaacaatagaataagtgtgaaattatgaaattaactggattctaattctatcccttgtaacttgggaagggtgttaagtgttaacacactcggtaaatcactcatggactttgaattttatatttgggcccataatggatcaatcgtaaacccatcaaagaagctcaaaacatctaattttattccatttttggcacctcaaaatatataaacatttatattattgcgaaatttccgatcatg

SEQ ID NO: 24225 - DNA, 3003 bp, Unknown
  misc_feature (1)..( 3003): 2750-1469P.txt file - cDNA_ID_2170848; gDNA_ID_1620587; Annot_ID_161326
agagatataatctctcgtaagattatatgattttggtagtaatctctctttcaagagatcataaaaaaatatcttgtaaacactaaaccaaagagatataatctctagtaagttaatatgattttggtagtaatctctctttcaagagatcataaaaaaagatcttttacaagatacattccgcatcgaacaacattttctatacgtggtttcacgcacaaaggtcgctcactagctggagtaatgtggtttggcaaaattatgtcagtgagcaacttcaccaggagaccatataactgcattaccatttcctcaaagcccctatcccaaaaatagctgtaaattaacacggtggagtaaatatgttgggacaaatattgcatgaaaccaaaaaaattcataatttaccataaaaattcttttaaaaaaaatctgagaccttaattttttcgacaatccaaacacaacagagacagaagtaatgttttagtatgggcatttttgttgttagcaacgctttgtcatgtaaacttttgctacaatgatcttcatggatgtgtgaaacagaggctgatttggtaaacctttttcaggtatcccacgcctcttcaatgagccaaatttatgttttcacacaatggtgagtcttagttttccattcctaatgagtataactctcttatgttcattgatctgatactttttctattatgatgtattgatgttcaaagataatcccacaatgtcttcattaccaaagctgatatttctttggacgtgagaaataaaagatcgccgacatttctactgaacacgcttcttgcagatcttattcagtaccggtaaattctgttgtgtagttctctagagaatagtaattttcttgaccatgcatctaatgagaataaggagtttaggttaatactaatatcattgtgtatatacttgtctcttctattggggaagcaggtgagaccttacattttagatcttggcagcaccaacaaggcctacattagtgagagtgttgaattgcatctcttcttaattgttttgttttcgtggtttagataaaacgtacgttagtagtgacctttgtttttcttttttcagaaaatacatattgaaccacaacgctactatgaactttttgagaaacaggattataattaagataaaagaattaaaaaagtgtgaaggaattaaaattttaatttcaatgaaaataaggggccaagttgaaatatatagaatatacaaaaaagaaattgtacaactattttccttttgtatgaaaataaattagttttttcttttagcaaaaaattagttcatgtatttgcattgcatcaactaaaatagttatattaaaaaaaggatttttgtgtagctgtgatatttggaatagaaaatccagaataataatatcgaaaattgtttgctttatccccctttcttttgtagaaattctcatatgattagtggatgattcggtccaagtactatcatttaaggatctgtgtagtattaaaatctcgaaatctctattcgttattaactttgtcggtgaaggggttgatatataataaaccgaagactttttgtgtgaaaagaatcatgtaataacggtacttattcattttgtacttatactaaaataaataccgattatgttggtggtagacttctaaattttaattagctttttaaaaagacccttaatttttaataaaattgatggaaagaggaatagttactttctatcttcggtaaaattcaggacccaagaaggtcgaggcacgtgccccatgatagacttgtcatgtgatgtgacctattttctttgtccaacaattttttaaaacaaattgtcataggctagaagtcgtcaaaagttaataagcaaaaaacgcaatatttcaaaaataaaaaatttaacaagaatgaatgacacaaacctaatcgtcttgacattttatctcatatatcaataatgctcaatcgagtgtaaatactttttttacatagtaaaaggcgaataagagagcagatcatgtagcaattattttcactattattgttattgtgttgttgactttgatttttagtttttaatagcagggtacaaatttgtaccttcaattatgtcaccaacgagtgtttgagataagattagacaatagtaaacacaaaattgatgtaagctatttaacatgtttattgaactgtaaataattatatctgttttaatatattttttaactattttttttcttaattgatattttattgtattaacactccttcttattaactttgcaaaataaactgtcatcttgtaaattattaccaaatcttaacactattattattgactttagaatctaagatatacctaaataatttcttaaggccaaaaaaaaaattatcatctttttatttaagttaatctaagatataaacattaagagaaagttgcaaaattaaagaaaaaatatctatctttacctggatacaaaacttatacttttggataattcatatgaaagtctctcttctaatgtagtaaaaacttctacatttcacagctaaaaactgaaacccaaatttaaaatttcgtgtatagtaccgaggaaaaaaagtatttgcaagcaaaatctagagcagaaaaatttaaagatcttttgcttcacatgactctattgtttttttcttacctctattttttcaagtctgcagctttttgaagctatatttttcagatctttcactctctctctagctacttctttttgtctttaagttttcaaattttattaaatttttatattctactgcctcctcagcttctctcacaaagcacaaatccaagccccaaatcaaatcccaccattgttttattacctcaatccaagaacactagacacaacaaaaatctctgtttcttatccaaatttctgatctttgtggagaacaatattttgattggatgtgagacaaatg

SEQ ID NO: 24226 - DNA, 3000 bp, Unknown
  misc_feature (1)..( 3000): 2750-1469P.txt file - cDNA_ID_2170877; gDNA_ID_1620815; Annot_ID_169199
tagccttgtcgtttttatcattaacatgattgacaagactatgacctatatatcttattattatcattgctctctctatttgtttatattgattattactttttgagatttttcaatggttttatctctaactaaacattataattagtgaaacaagcttagtagaagtaaaagtattattctatgctaaagtacattgattagtagagtgtgtaattgtgtatacagataatctataaacaattggtgcatctgtatataaaactttatgatttatttattgtatttaataagtatatgaattgggtacctaactttctaaacagttccaaatttattcttaaatcaaattgcatatgatttttaaatattttgagacgattttattataacgcaaacaacagagtaaaagaagcatatgttgcaaattgtactatggcaagttcaaatcgaaacatttttgtgaaaatcaaacatgtgaaccaagcttctacagtttaattccctttcgtataatttaatttcaacaaatttattgatatccatctagaaattggtccaaagttctttcacccttgagtcatttagtgataaagatgacatgatttttggtgataaattttccatcgttgctatatgtcgttatattattctcctatatgtatattatactatttacatcagaaaataatccaaagtttagagattcttttttacaataataaaatttcccacttactaaaaagagctccttttctgctgaagagaacctaaacctttattcccaaagttcattgagttagagcattttcagcgaatcacataagagatgctctcttcttcatcactaattgacatctcattgttttaaaggttgcacttgtacctgttgatctgattctcaatccacttaagttaaaccaaatagacacgagaaaaaagcacatttatttgttgctaagtatgcatatttttcagcgtttacttcttaatctaatgtatatcataagataatatctaaaagagaatgcacaaaagattattaatatgagaaattcgctgccatttaggaaggacctttataccaatataccgcaataataatagaacattggtccccaagtgtatgtcaaccccaagtgtatagatttctttaaagattaaaatccctttttgttgctaaagcacctgatatatttttctatcaaactaaaaaaattgttagcgggatgaagatatattcgccaagaaccatagtgcttgtataacggcagaccattaattcacaactattattattttattgttagattgttgatagaatcgattttgattgtggcagaatcgatcttgtaaaaactgctttaaggtgcttacttataattaagaaagattcacttatgtaagttaagcatattaatcatatcattcggcctaattcattaggaatattttgctattcgttttgccatcattaacaacaaaattgacacgttttcagccaaaagtattaacaactaaacctaaaacttcaaacattaaatagtttttagtatctttagtttcaaactagtgatttgtcctaatatcaacactacgaacgaatttatatacattgaacttttttctgaatcaccgattacaaaacgaatataatttggtatcggcagttgctattaatttgatcggtttggactttggactaatcacgatcaaatcttaaatggaccgaagtgaataaatccctaatgttttcaagagagtcacacgaacgaaacaaaggtaaaatatgaacatagagcgtggggaccttgaagcagaaggtctgtatggtgacagaccggtgagtggagtgtatgaatgaacgagaagtgagaagacaaaatacaagaaagagcgttgacttggaagttaaagccaaaaaaaccacaaggggcaaatttgtctctttaggaaaaggacacagacagactttctatacgggccaattagaaaaataggccctacttctaattaaagcccatttacttctctccttgtcttcttattcctcttttctccccatcacgtgacgacgatgctataaacgccgtcggattatataactggtgccgttgacaagacggcgacagaagaaagaaagaagaaaccacaggctctagggaacgtaacgttatgtcctgtctatagcatttataacggtcagatcaacgccgtttagataaagatctgtcaatgttaaagaagagatgcatctctacaccgttaaatttaaaacgccgtgaacctcttatctattgatttttgtttgatgaagccaaaacaaatcgtgtcagaagacttatcagagaagaagaaaacgacgacgttcccgtttctccatgtctaataagtgtagtagtggcggctactaaaaactctaaagtttgactccagtaaaactgcctttctagtgtaattccagtgattttagagtttgaatagtgtgtgaccaaatttgaaagtacaatctcagcaatattattgatcactcgttataaaagaatcgaatgtaaaaatagccaatgagagactgagacgtatgtgtttgaccataagtcgtatagtttgtatctatctacctgcaagatcagcagatggttctctgatcaattgtaccttaattatcttttattttcgtaaaatttctctattcacaaatgataaatctacttaagacagtaaccataacaagatttacaagataatttgaaaaatgaacacataaaagtattttggcgcattatttttaataataacaatatttatgtaaagtcacataaaagtatatattcgctcacaaagtcttacggtatttagaacagtagtaccacatcgattctcttcatcttcttcttcataatatgccattgttcatgtctctgtgtcctatcgcataacactcacgctatcttattattttctctcgctctttctcactgagaggacactaaaaaaatg

SEQ ID NO: 24227 - DNA, 3003 bp, Unknown
  misc_feature (1)..( 3003): 2750-1469P.txt file - cDNA_ID_2170881; gDNA_ID_1620815; Annot_ID_169200
aattgtttatagattatctgtatacacaattacacactctactaatcaatgtactttagcatagaataatacttttacttctactaagcttgtttcactaattataatgtttagttagagataaaaccattgaaaaatctcaaaaagtaataatcaatataaacaaatagagagagcaatgataataataagatatataggtcatagtcttgtcaatcatgttaatgataaaaacgacaaggctacaaaagtagtagtagaagtagaagaagaagatgatgatagtgaagacaaacttgtgtcataagtggtcttacacaaatccgtcttggaaactggtgtttgcctaatggccctgctgggcttttgcttcagtcattaccgaatcctcttgtattggcagctttaatcccaaatctattcaactcatgcaatgattttggacgaagaaacttctcaatcccaaatgacccttacttcacctttcactttttgttccatcgtaaagatttgaaactttttagatcttatgaaaaggcaccacatcttcatcaagtattttctttaaaatgtaggggaaaaaaaaatctagttcttttgttcatagtcaacctggaccagtaggtcgttgggccttgggtcttcagtcacgtcggcaatcaacattcacttacccatttgaaacattggatcagcgtgaccaatgccaacccattaatctaaatggtttaaacaatcaagcgtgcaaggataaatgcattggacttgagagaacaagatatggaatttgaaatgttgccttaccagttaacaagtgtctctgtttcctcccaagttaatgtaccaaaactctttggtgcttaattgtgggggcttttataatattgggtacattttgggccataaattagagaaagagcacattatgattgagtttatgaagataggcagtttttgggaaataaattgacgaaattgcccctgcgatttcactcattctcctaaattgtttttgcagaatcttttcctgaattgtttttgcagagcctcatattggatcgattcctaacttgtttcaatggatgatgtattaagtacagagattgattatcctatttctctacttaatcaatgtttctttctacaagacaatatatacacaaaagatgtatttacggaaacaaaatcgatagagacaaaaattagaaaatctgttaataacatttcatcaccatccaattcagataaaccccaataaaatcagttaaaagctttttgatggaagaaagctaacccctaagaaaatattatataacgaacccaaatatactaatcttaaataattggaatcgattaaaattttcaattatttcttatccctctttgaaattgaagaaagagaggatgaaattaattcagatcaaacaattcaaattcaaaaaagctatggaggattaccacctgcatcgtcgaggaagaagattggccaggcatagatctgaattttgtaaggtgatggagaagcaatggacatcaatggtgagtttagaggcaatagattccatgccattagagaaagagaaagagagagaaataatcgcacatttctgagatcgattgatattgatgaattctcctcaattagattgaaggtacaaggagaagaaactcaattagattgaaggataaaacagtcatccatataatataaaagtatctaaatttgtaaggaacatgagatgttcctatatctacaaaagcacagactttaatatgctaatcccataattgatcccttaattgtgtgtgtattcaaaataagcccacttcttataggcaatgtaacacttgactcaaaagccaaagcagccacttaaatagttaagttacattaaacagagaagcagccttccctaagttaagcattcttaatctaaccaaatataattcatatctaacaatgttaacttctctttctattcttaataataacctaacaaattaacttgggtggtgtactattctgagtttgttacttgtcttgtccatgcacggctagtgctggtgctgtcttagaagggcttgaaggtacgtggctgttgatacagaaaatgtttaaagaggagacaagtctttgtcaaagtttgcggatgacggctatgaaatcgaaaacgaattttctttcagtttttcttaaaaatttttttttaccttaaaacaataagttaaataaataaaattaaatcggatttatcttctcggtcgtccgaaaatggcagagttgaatccaagaagttttgtgtgggagttgaggtgggaactacgaaattaaatataatctatgcgctattttacaaatttgttagtccaaatccactatgttgctaatatttaattacatgtttagatcctaattagtttgatgattatataatcaataccaaagaaagtgaagaaataacctaatttatcaacttgccagctagtgaagtagctccttggaggtttcagtaaaaaataataaaagtcgataaaaaaatactacccaacttcatggtttattattaaatgcgatgtggtcgagacaaagtaccacttgagtaccgtactaggatatgctcaacatatttaaaattttgaccaagtcaaattaaccagccagagatgttaacagttaatgtagtagccaccggtccaatgaaattgcaaatgaacaaacgtagcacctgaaaactcgccaccgatcacgatcagcacactttttatgaattggtcaagatattatcttctatcattagatgaatacttgcatgttagtattctctactatcagacggtgtgtatttttttatttatagggttgaacgctttattgtcccatgcacacgtaaaagtcgacctccccatcattttttcactataaatagtggttgatttcaagcagatttcttcaaactaaaacatatatacatcgaaaacaactaagtataaacaatagtcatg

SEQ ID NO: 24228 - DNA, 3003 bp, Unknown
  misc_feature (1)..( 3003): 2750-1469P.txt file - cDNA_ID_2170918; gDNA_ID_1620815; Annot_ID_169212
ttttgcttttggtgattcagtcttagatacgggaaacaataattttcttcttactcttctcaaaggaaattattggccatatggtttgagttttgactataaatttccgacgggaagattcggaaatggaagagttttcaccgatatagttggtataatatcccaatgttgactggctttacttaactctacctataaagatctctcactgcacactttctatagatccgagactaataatcttgattaatcatattatttatataactaggtagtattctcatgtggtgaagtcttctattgtatgcagccgaaggtttacagatcaaaagacttgtaccagcttatagcaagattcgtcgcatcagttctgaagaccttaagactggcgtttgttttgcatcaggtggttcaggaattgacgatcttacatcccgaacactggtgaaagaaaaaaaaaacttaattgttatttcgataaacactatatattatatatctcaaacaatgttttcttataataattggatggttgtgggtggttttgtcagagagttttatcggcaggtgaccaagtaaaagactttaaagactatttgaagaaactaagaagagtagtgaaacgtaagaaaaaagtaaaagaaatagtttcaaacgctgtgtttcttatttctgaaggaaataatgatcttggatactttgtcgctcccgctcttcttcgattacagtccacaacaacatacaccagtaaaatggttgtttggaccagaaagtttctaaaagtaagacaacgtataataaaataaaaaactattagtatgaattctttgtaaatgttcacactcgctcttttggttttatatatctatatttgaaggatttatacgatcttggagcgagaaaatttgcggtgatgggagtgatgcctgtgggatgtttgcctatccatcgagcctcattcggtggggtattcggatggtgtaacttcctcttgaatagaattacggaggacttcaacatgaaattgcagaaaggtcttacaagttacgcagtagaatatgatttcaaagatgcaaagtttgtttacgtcgacatatacggtactcttatggatcttgtcaaaaatcctatggcctatggtacgtatatacacactccctatataaatatatgcatgacgtaaccaagtgatagtaatatgtcatttgttttatcttttaaaggattgtgcatcctaacaattaatgttttttttttctttctttgtgatcaaatttatatccgaatcataacactataagatgatcaagatcatgattctaattacaacaatacatatacttgcagggtttacagaagcgaaaaaagcttgttgttgtatgccgaatgcaataataccatgcttccatccagataaatacgtcttctatgactttgctcacccttcccagaaagcctacgaagtaatatctaaacctattgtctatcagatagcgaaaggccttgcctagctaattccttatttcctacaatgttttattataatctttgaaaattatcaccatatcgataaatatatgtaaatgtataagattcatgacaatctattcgtttttcttatagtaaacaatgtataattcaaattacaggcttttaaatattgtccattttatataacccaagaacaaaagtgtttgtttacaaatgtgcatcaaacagataaatccgggaaaggctatatatagcaccaattgcaagcttgtgaattcgattaatagaagttttgattcaagtaacaacgtgagctacgattgttcccagcaaatttattcaaatcaaaccaaataacaaaaaatatttactccgatccttcgggctaaagtgaattaaaaatctccgccctcggaaatatttttttggtatctataggtacacccatattccgattcttcactcgtgagtcgtgagcattatgcagacgtgattatataagatcaattagcatattttgtctcataagacattttacctattcaaaaaacaaaatcatgtaggttaatatttgaaacagacaaaattaaaaaggctgtagataattaaggttaaaatgcattaaggaaaacactaaagataattgtttttcttatatgattaaaacagtagatatgtgttacagaggcaagtataagtaggttttcgggaccagaggaagaagaaacgacgataatgttgatttacatttaaaataatgattcaggaaaaaacacttataaaaacacacagcataaataatcttttatttataaaaacatgtacatcaacaacaacaaaagtgtactgaattatttcatctcattataattaaattttgattttagattaaatgcggtggatatttgtttttccttagctagtgtcggaattatatatccctcaacaaactagagagtcgtataatcaacatacacaatatgtggtgggattaatattgcatgcatgttttgttaatattgcatagtcatcatatatagcaaaaaaaaaaaaaaaaaaattgtatagtcatgcgactcatgcctatcaagtctcctttaaatcagtagtctttgttttttcttctttcacacggattgcattgtttctatatccctttttcgttgttggaatacaccacttactactttttgtaaacaaaatttaaacattttttccttctcatcaaacgtctaaataaaattacgggaaatattaatctactaacaaattaatggaataatcaaatatttttcacaacacacttttcatctcctacgacattcccatattcattgccggtcacgtatgtgaatcacgtggcttaactcttcccgtattttacttcaaaattaagaactaataaaataaatacatactaatcgagtgtcttatagtctctatatataacagcaaaaatcccttccaacatatttgccatttacacttcttcaagttttccatatactaatg

SEQ ID NO: 24229 - DNA, 3000 bp, Unknown
  misc_feature (1)..( 3000): 2750-1469P.txt file - cDNA_ID_2170936; gDNA_ID_1620815; Annot_ID_169220
taaatcaacaaagcacatacctgggaacggttcgattcgagcagagagagagggagagagggagagagggagagagagttatggtttatgagtctctctgtgaacgtagttggaccatatctcaaatctatcgtttttgtagagggagggctcttatttacgtgtaattacagtttaaataccaaactctataacattacaaatatggcccattaccagattgtgttttctgccacgtcaccataattgaaatcaacggttagagatgaaaggagaggtaactgtctcgcttagcttccgagtaatcgtagccgttgcgtatactcaccgacaccgtccctctgttttaatcatctccggcgattctgggaagagagaaaaagtgtgagtcagagaataatgattcgagcggttctcctgttccttgtcttcgtcgttgagacgagagtacaagcgcagctagtgccgccggtgaggcaagatggtttcgtttacccaccgggtcatcgtttcgacccggatactatactaattgaggcgtattttgacccggtttgcccggacagtagagactcttggccgccactgaagcaagctcttcatcactatggatctcgcgttgcccttctcctccatctccttcctttaccgtcagtgatctaaaattctctctttgccttcattctttgctctgagcttaattcatgtattgatcaatcgacaagtggcttaagaaaggtctggactttaaaatatgtttcactgtctgttttatgatttgttccatggaaatgtgaatgattcctttgtgttatgtcggattattcgttcttgtattgaatcttttttcttggattttggaaattgcagctaccatgacaatgcctatgtaacatcacgggccttacacattgtgaataccgtacacgccaatgctaccttcagtttgctggaagggttcttcaagcatcaggtttgttcaatgttaatactaaaaacttaggtatatatgtttatttatctgcagttgctggttattgtttgcatgtattcaataatgtttatctggttcactgaaactgtttttttttttggcagtcattgttttacaacgcgcaaacacaactcctttcaagacctgcagttgtggagaaaatagtcgaacttggaacagtctcgttggggaactcatatcaatcggttcttaaatccggcttcagcgacaaaaaatcggatcgtgcaaccagagtttccttcaaggtaattcctttaggaacttaaatttcttacaggaaggtcattggctgcatagtcatcatcttattatactgccttgcatctatatcacacacaagaaaatgagtgatgtcagggcaatagaagaatacagagtttaatggcctgaatctttacctatcaagtataattttgtgacctatttgtcgatagtaccctgaggctgttctcgttgttttctgaaaacgaacaatagtgacttttagttcatcttttgctttcgtggcgttgtgtgttgcagtatagcgcttcaagaggggtttatggtacaccaaccttctacgttaacgggtttgtattgtctgatgctgcttccccttcaaattttggaggatggaagaaaatcattgatcctctggttcaagcacatgagatggaagataacttcattcccttcctttgaagattttaagtgcttttgctgtgtcaattgtcatggtataatactatctgtaatgtatagactttctcaaaacctgtatgttgctcattgtaaatttgtaataaaggaaagtgatccatataaaagttggccagcccagatttattaaacagaaattgtaatacatggcaataaaattaaaatttacatgttacgtataatgaatctattgctttgagtttgagctctacactatattaatgtgataaaataaaatattttgaaaaatacatttattgttaaacccgattttggtatttatttaaataaaattattacttttataccaaattatccatatcttaaaactgtggcctacttttgttttagtagtagtgaaccaaacgaatcctccatctgtctttgtgttaacgacgtgagaggaagtgtgatcatgtgagaaagctttgttaatacatttccgctgattcacagccgaatatattacctcgacaaaaggtacattatttttcagatcattaatacagaattaatggaaattttacttgattatgtcatcattacatcgttaattagttatgctattagtcttacattgtttcaagttttggattgtgccacaaaacaaacttaaatgcttctcacgtttgttgggtcaagactcccaacaatattttattttgtaattatggatggttacaacaattatatggtaactaaaattcaaagagacattacttttcttttctcctaagaaaacatagatctcagtttcttgttgaagtttgacaattattatttttgatcataaaattttcgcgaaattctgtataaaatactttactaaatattggtataaaatattaatctttattaactaataagtaaacatagagataacatagacacgttctccaaatattaaaattaaactacaaatttgtcttttcgttggttaatagtactagttagtaccgaaaatccagattttgtctattaataacgtgtagatttggttctcatctaaacaattaattttattttattttcttctgaaaaagccatttagactttttccttcgcattttgtgcaactggataatctatcttgaagattttattacaagaaatttggactttacactcacagaaaaaaaaaagcacaactaaaccgaaaaatcaatgtaaaccgatatacaaaacattcccggtcacatatcaattaagaaccttaattactggatctaatttaacgaataacagctaatcgttgatcaaatctctttttacgactgaagatg

SEQ ID NO: 24230 - DNA, 3003 bp, Unknown
  misc_feature (1)..( 3003): 2750-1469P.txt file - cDNA_ID_2170947; gDNA_ID_1620815; Annot_ID_169224
ttcccggaagacgtggatatccaggttatatgtacactgatcttgcaactatttatgaacgtgctgggcgtatagaaggaagaaaaggttccatcacccaaattccaatcctcactatgcccaatgacggtaaaatcatctttcttaagccaatccctagattctattttttatcttgagaaaactcaattcttactcgttgttgtttgacaaattgatcagatatcactcatccaactccggatcttactggttacattactgaaggtcagatatatatcgataggcaacttcacaacagacaggtaataaataactaccgctgaggccctgatcttactggtttcagtaatattatgatccggctctgaatgaatgtatctttgtttcttccctgaaaaacagatatatccacccatcaacgtgcttccatccctttctcgtttaatgaaggttagaattcaactccattttgattaatacccattgcattctatctccagatcttattaacgtattgtttctcattctgttagagtgctatcggcgagggcatgactcgtaaagaccattctgatgtgtcgaaccagctgtatgcaaattatgcaatcgggaaagatgttcaagcgatgaaagctgttgttggagaagaagcactttcttcagaggatttgctttatctagagtttttggataagtttgagaggaagtttgtgatgcaaggagcttatgatacacgcaacatcttccagtcgctggacttagcttggacattgctccgtatcttcccacgggagcttcttcatcgtatccctgcaaagacacttgaccaattctacagccgcgactcaaccagttaaaatgaggtaatggaggttatcttatcgaaactcttttgagagaaaagtgtgaatttttgtgatgtgtattatttggtgcttattataaagaggaaaaacaaagaaaagctatatattctgtgtctccctatctggtgatattttttttggttctgcattgtgttccaaagtggaaataaaaatcgataaacgatgtcgtattgtagtactttccttttctttgtatgaatttgttaagattggtttataaatgggattataataagtatctttaaaaaagagtgtaattagtatctttaaaatttgcagttagtattgtggaaaacaatcatgatataattgacacgatagaccaccgaaataaaggaatcaattagattagattattgaactaaaccgagttttgtccattctccaatcaatcgcaatcttcgttatctataatcaattaagtttacgcgttgattaatctttttgcaaaggaataggagaacctagagagaccccctccaaggggctacatagtgggaaaataatgataccctaaccttctctaaacgctaaagcaaagcactgatgaatcccctaatgattttggtaaaaatcattaagttaaggtggatacacatcttgtcatatgatcaaatggtttcgcgaaaaatcaataatcagacaacaagatgtgcgaactcgatattttacacgactctctttaccaattctgccccgaattacacttaaaacgactcaacagcttaacgttggcttgccacgcattacttgactgtaaaactctcactcttaccgaacttggccgtaacctgccaaccaaagcgagaacaaaacataacatcaaacgaatcgaccgattgttaggtaatcgtcacctccacaaagagcgactcgctgtataccgttggcatgctagctttatctgttcgggcaatacgatgcccattgtacttgttgactggtctgatattcgtgagcaaaaacgacttatggtattgcgagcttcagtcgcactacacggtcgttctgttactctttatgagaaagcgttcccgctttcagagcaatgttcaaagaaagctcatgaccaatttctagccgaccttgcgagcattctaccgagtaacaccacaccgctcattgtcagtgatgctggctttaaagtgccatggtataaatccgttgagaagctgggttggtactggttaagtcgagtaagaggaaaagtacaatatgcagacctaggagcggaaaactggaaacctatcagcaacttacatgatatgtcatctagtcactcaaagactttaggctataagaggctgactaaaagcaatccaatctcatgccaaattctattgtataaatctcgctctaaaggccgaaaaaatcagcgctcgacacggactcattgtcaccacccgtcacctaaaatctactcagcgtcggcaaaggagccatgggttctagcaactaacttacctgttgaaattcgaacacccaaacaacttgttaatatctattcgaagcgaatgcagattgaagaaaccttccgagacttgaaaagtcctgcctacggactaggcctacgccatagccgaacgagcagctcagagcgttttgatatcatgctgctaatcgccctgatgcttcaactaacatgttggcttgcgggcgttcatgctcagaaacaaggttgggacaagcacttccaggctaacacagtcagaaatcgaaacgtactctcaacagttcgcttaggcatggaagttttgcggcattctggctacacaataacaagggaagacttactcgtggctgcaaccctactagctcaaaatttattcacacatggttacgctttggggaaattatgaggggatctctcagagcaaagcacccccacaaaaccaaccaaaggcaacattatttttccttcttttaaatttcgtttctgttgcctatatttcaaagaaacatccaacaaaaagacaaaaaaaatcacagaataagaccgaagagtcgaagaccgatctactttgctcacatgcttcaaaaccaacataaaacgaccaaaaaccagagaaacaaaaacattggaacaaaatattttcttagaaaaaaaattatg

SEQ ID NO: 24231 - DNA, 3000 bp, Unknown; identical to SEQ ID NO: 5656
  misc_feature (1)..( 3000): 2750-1469P.txt file - cDNA_ID_2170990; gDNA_ID_1620808; Annot_ID_168936

SEQ ID NO: 24232 - DNA, 3003 bp, Unknown
  misc_feature (1)..( 3003): 2750-1469P.txt file - cDNA_ID_2171002; gDNA_ID_1620808; Annot_ID_168939
agggaatagagtttttgatgctatagatttggttagtaaaatggaggaaatgggatttagaccagatgttgttatctacaacacgatcatcgacggttcttgtaagatcgggttggtgaatgacgcggtggagctgtttgatcggatggaaagagatggggttagagctgatgctgttacttataactctcttgtggccggtctttgttgttctggtagatggagtgatgcagctcggctaatgagagatatggtaatgagggatattgttcctaatgtcattactttcactgcggtgatcgatgtgtttgtgaaagaagggaagttttcggaggcgatgaagttgtacgaggagatgacacgaaggtgtgtagatccggatgttttcacttacaattcgttgatcaacggtctttgtatgcacggtcgggtagatgaggccaaacaaatgcttgatttgatggtaactaagggttgtctccccgatgtagtgacttataatactctcattaacgggttttgcaagtctaagagggttgatgaaggaacgaaactcttccgcgagatggctcaaagaggattagttggtgacactatcacatacaacactataatccagggctattttcaagcgggtagaccagatgcggcgcaagaaattttcagtcggatggattctcgtcccaatattaggacgtacagcattttgttgtatgggctttgtatgaactggagggtagagaaagcattggtgttattcgagaatatgcaaaagagtgaaatagaacttgatattactacttataatatcgtcattcacgggatgtgcaagattggtaatgttgaagatgcgtgggacttgtttcgtagcctttcttgcaaaggacttaagcctgatgttgtgtcctacactacgatgatctcaggcttttgtaggaaacgccaatgggataaatcagatttgttgtacagaaaaatgcaagaagatgggcttcttccattataacatatgaaaactgtatattatttgtaagtaaaaaacaaattctttattttgtattcatcaccatttgtaattttgtattattacaaaagaaatacaagtaagctggagtttaatgtaaagtctttgaaaccagaaataaaagaggcaagaaaagggagataaagacaagttttcaaaacattgctctccatgaataccacttgagtttaaactgaaacaagagtggaggaacaccaagaactcctctttgaatcctgggatcaaacacatcgaattgtactttatttaacgaatccagaagaacttgtaccggcacagaatgaagcagtaccggtttagcttctgcaggaacctttcccgccagttcacgggctttcaggagatgtgcattggcaacagatgcaatctcaaacacgacattgcttagtccttctcttgaatcgttatccagaagaatttctaatcgtccaccttgtttcacgagcaacccgtgcttctcagcgagatctgcagggatgtaactctggtgacggtttctggtacagtggtacggtaatgatttaagcagcaagacaagaccactggctttaccaatgtgtgaagctgcatgatcagctgttgttgaactaattccgcctgcttggagtgtattgtacagaagagtggaaactgtgtcttctgcgtatttctctagctccgcaatgctctctggtatatcgtctacttctctttgggcatctcggattctagcgtcaactgagcgttttagccaaggtttactgatgttatgttctgatattgcccaagacagagcttgtgcagctggatggtttatgggctttttggtgtagagtttgtcaattgcttcttgccaccaaagtaaccgcatcaagccgattttgggatcagatgcaacatccatggctcttgcggtttctacattaaaagcccggagagcaaatgctgctttacgcatctcagttgggagttcaaggagacagaggtagtgatgatagtcatagtttcgtacttgctgcacacaataggacaatgctgaacgcaaactactcgagcctcctccattcatcagtataactccaactgtgtttctttctcttatcctacaaccatataaaccacaaacaagatcagttcataaaaacaatgaaaaactctggtttcttctatcactccattataaaacagtaacacagaattcatctacaaacacaagagaaaatcctccaattatcaccacttcaaataaatatactgaataattctcactaatccagaggttttgtgaaccgttaaactcattcaggaattaacacaaacacttggtggacaaagcactggaattggtatttaacaaacaaaatgagaacttttcaacattgcttaacacacaatcataaacccaataatcacacatggataacaaatgagatcactaaagttcacagaaactttccaattagtaatgtaaaatcgctggaaaccattaatgtcgtccaacaataacgaaacgagcaaaaaacaccttaccctaactcgaaaaactctgagattcaagtttcctatgtttaggaactgaatctaccatccaaaatccaaataaaatcaacctttcgacccgaaaatggaaatcgaactctgaacaatcgtgccggagaagaagcgttgggtcaatgtagagaaatacgtcgtcgattaatataaaaccactaatgttattacacgacgtcggttctgctacagtgtaacaggaagtcggttttgttataaaatgacacgacgacgtttttatgtaaagaactgtttaatgaataaacgtgattaggatagtattaacccgaaaccaaacactcttatatcgaacaaatatatatacactcgtatttattcgcctaaagccaaaaacccattagcccctcaaggtatcttccagaagcaacgagaagacctgcaagagaaaattttcagattcaactatg

SEQ ID NO: 24233 - DNA, 3000 bp, Unknown; identical to SEQ ID NO: 5657
  misc_feature (1)..( 3000): 2750-1469P.txt file - cDNA_ID_2171006; gDNA_ID_1620808; Annot_ID_168940

SEQ ID NO: 24234 - DNA, 3000 bp, Unknown; identical to SEQ ID NO: 5658
  misc_feature (1)..( 3000): 2750-1469P.txt file - cDNA_ID_2171020; gDNA_ID_1620808; Annot_ID_168944

SEQ ID NO: 24235 - DNA, 3000 bp, Unknown; identical to SEQ ID NO: 5660
  misc_feature (1)..( 3000): 2750-1469P.txt file - cDNA_ID_2171022; gDNA_ID_1620808; Annot_ID_168946

SEQ ID NO: 24236 - DNA, 3000 bp, Unknown; identical to SEQ ID NO: 5659
  misc_feature (1)..( 3000): 2750-1469P.txt file - cDNA_ID_2171025; gDNA_ID_1620808; Annot_ID_168947

SEQ ID NO: 24237 - DNA, 3000 bp, Unknown; identical to SEQ ID NO: 2756
  misc_feature (1)..( 3000): 2750-1469P.txt file - cDNA_ID_2171070; gDNA_ID_1620588; Annot_ID_161338

SEQ ID NO: 24238 - DNA, 3003 bp, Unknown
  misc_feature (1)..( 3003): 2750-1469P.txt file - cDNA_ID_2171183; gDNA_ID_1620589; Annot_ID_161374
gcttcttctacaatctctctccaatctatctccatgacaactctcaacaatctctcatatagtaaacaatttcatcgaagctctcttcttggtttctctaaatccttccaaaattttggtatctcatctaacggtccaggttcctcctctccgacaagtttcacgcccaagaagaaactcactcctactcgagctctctctcagaacttgggaaataccgaaaaccccagaccaagtaagtttattttcttcttgatcttttcgcttaagtttcgaaaaatcatataaacagagctttttccaaaaaaaatgaaatacttttttttttttttgctaaactgcaaatatcatataaatgaagggaaaggtttacatgagttagaacctaaacaaaaaaatgaaatacttacaaaacattttctaaatacattatctttatattaaaatcagtttttcatttcataatttttctaactccattaaatttatatgattccagagccttaaaaccaaaaatttgcaaacttgataatttaaacataatatcagatctcaaaatcaagaacgtataattaattcacaaattgagtttttaatttttcaggcaaagttcaagaactgagcgtgtacgaaatcaatgatttagatcgacacagcccaaaaattcttaaaaacgcattcagctttaggtttggtctcggagatctcgtcccattcacaaacaaactctacaccggcgatctcaagaaacgcgtgggaatcacggctggtctctgcgttgtgatcgaacacgtccctgagaagaacggtgatagattcgaagctacgtacagcttctacttcggagactatggccacttgtccgtacaaggaccatacttgacttacgaggattcgttccttgccatcactggtggcgctggaatctttgaaggtgcctacggacaggttaagcttcaacagcttgtgtatccgacaaaactgttctacactttttatcttaaaggattggctaatgatttgccactggagctcataggaactccggtaccaccgtctaaggacgtggagccagcaccggaagctaaggcgcttaagcccagtggagttgtaagcaactttacaaattagtgaataaaattagtcttatctttctcgtgtcctgtatatataataatctttttcatagagaattttatattcttatacttgtaatcaaataatttgtatggatcttagtatccttgtgaatgcagtatgtttgagttgaaaaatacttgtaatcgaatctttagttttgagttgtccccttttggggagtaaaatatcttcttcttatttttattgggttgaaaataggtttttgcatagttttttttatcgacctttcaaatacgtcacaattacatttataggagttagggttggtgttgtaatccatatacattaccactatgaaactttcagcgaatacaagcatatactatcaaactccaagcgaaataaatactcacaaaaggctcaccatggtcgtaaagtgaggattgaagaaaaatgatcatgttgatggatcaaataaatcttccatcgcctgatttcatcatgatgtacactcatctcaagaacaagaaaatgatactaagaagaaaaaagataagctggattaggcacgaaggtttggaagaaacccaaactctaacccaaatattgtggataaataaaaaacaatcaactttcgagttccttctccagccaacttatgggttgcaaagatacttttacatataaaagggatgctgacctagtgcgaatatcaagaaattgtgtgtgttttatgtgctccgggttcaatctctatttggtatacaaatgactgttttttaaatccggatatctaaagtctaactttgagtactaggaagattataaggcaaagatctagaactcttatagcttaaataaaaaatgattttacatgtaaaagacagaaattacctaatattagttaagagatgatatattttcaagaaataatgattctagttgtataaaatacctagttttttttttgtatttttttttgaatatttagaagtgcaagtccgaaggccatacatttcctagagatatgatccacaccaggttaaattcatttcttttggagaagagatccctcccaacagacttcgaacccaacacctctacctgcgagattttttttttgttattcgtattagatgtgattttggtgcaccacgctagcgttggagatgaaactcccacattttcgcactgaatcgactattaaagcttggtctaagctatcaatttattacagtctatgccagaaatttatggcatcctacctgatataaaaagctttatggcatcctacctgatataaaaatcagtgttctatcctttaagttgttcatgtattttcattccaagagcagccaatgttgagacagattctcttgctaagcttgccttatccgtttatgctgaaaacattgttagttaatccaagtattggcgtttcaaaaaagaagtgattttggtgcaaatatcttttcacagaatataaaataatttttaatcaattttacatacatgtatccgggacaaaaatatagttagattcattacatttagaaggttttttattttatttttgtagtttagggaccggccaaaagtatttcaacttaaatccaagacccaatgcttagatcacgttccgaccatggaaaccaaatccaaattcctcccaaagcatctttttagtttgagacccacttttggtaatttacgcacgtgctacttcatcaatcatccccattcatcactcatccaacatgtctatctataaatagacggagatatttcgtagaactcaaatcactcaccacataaagtaaaagtctcatctcttcataaaatagctttaaaccaatcaagtagagtttcttctcaagtctttttattttatttttatcaatg

SEQ ID NO: 24239 - DNA, 3003 bp, Unknown
  misc_feature (1)..( 3003): 2750-1469P.txt file - cDNA_ID_2171191; gDNA_ID_1620589; Annot_ID_161376
ctctggaatctttgaaggtgcgtacggacaggttaagcttcgtcagcttgtgtatccgacaaaactgttctacactttttaccttaaagggttagctaatgatttaccgctggagcttactggaacggcggttacgccgtcgaaggatgtgaaaccggcaccggaagctaaggcgatggagcctagtggagttataagtaactttactaattaagtaattagctgtttaatagttgttttgttttgtaatagaatattttgatgagttgtgtgaggttagttaatgatgtgttgagggaataaagtatttattttgatgtgactttattgattacaactggtctttctacaacgtggaactgttgtactcgatttcaaagtaaaactttttacattagtttcggtattttcacggaataaattgatagctagaacctttaatcttatggtttaaaatggtacactcatatacacagttagggtagtggagttaatgctagtaattagtaacacaatattttttggttcgttatggttttggtgttaattgtgttaatgtcataatgctttaacgctaatttgttgttggcacagatatttaaaactaaaaaaagcaacctagttattgctggctatctttttaaattgagaagttaacatcttgtcaagtgaatcgtgtaatattgttatactctaaagatcgatattattgtgtctaccagtcaaaacatgtgttggagggaaattttatttgtaggttcatcatatgtcaggaacattattgtcatgtttctgtaagctttctgacatttaagttcagattttgaccataagttttgatcataaatgagaaaagaacaaagttaagtttagttttgcgaatgttaaaaaaaataaatatcttatttgcactttttgaattatttaccaaatataaaaaccaagatggtgttttttttgtaataccaaaaaagagagaattttagctacgagagaatgcaaaattcggatttgtgatccgttttattgaaaaagattttagtttcatagaacatatatcaagtagtatacaaattgaaaaatagggtctgatagatccgagacacttgggtattatcacctaacttttaaacgtttatgccagttttttgacaaacaaatcacgaagtatttgaggataaatacagtatttgtttatgttttctatctttttttaggaggatgagttcattggtttgatcttaaacaattgaaaatttataggttaccaccaattttgcgattttttttcttcttctatactttagatttaagtttatatatagatattttcgtttgatatcaatatgggaagcccacaaagttggggagtttagtggtacctttttttttggttcacaattgcatacgaatattggggagtttagtggtactattgcatacgaatattggagatacgagaaaggggtggaaaaaattgatgataaattgagcccaagtaggaaacaatacacaaggccgtatataaagttggcatgttgggttcaatacatgaggccgtctttttgttcggccgcggccagtggtgaacactgaatatggccttttgagactccgaggggacaattataatccaacactaaaatacatctctaaactctatttgccaactaatttctttatttaaaatacgtttcaatctaatcaaaacagataagcctgttaaacacaattttgatttctcgagactacgaataggtggatctatttgtatcataacatcataacatataaatcgatatttaaaattttgagtaataaatttgatgttggtctctaacaatttgcgggtaatttcttgatattttggacatcacccgaacatattagctcattacacaccaatttctatagaggcaacatattttcttatcattaaagttgacagctattagagcccttaatcacgtttgatttcatatctaattccaaattatatggatataacaacagcatagcatataaattgatatgtgtagcattaggttatatctttgaccgggaaatgcattggcaggccattatactgggaagatgcattcgcatatatattagtaggtgtacttagtaatcgtctacttgacataattaaaattaccggtcaaaaacacgagatatataggaactcatattgtgtggatatatatattagtttacatgtgtatttatggataaggttataacgaattcaacaaattctcaaggtcctatgaaatttcaacaagtatattacagttttttttttatatatggcttttcttctcccatgtttcggctgtctacgaagagacatttggcttttcatattgggatattgaaaaatacattttcaacgttttatatatgattttgtgtgggtgaaattaatacttacagaacaaaagagctcatgcacgtttagtgttattttggcggctgtttttaaggatttgcatatattctttcccacgtattgaattctataaatgacataataatcaaacttgtaaaaataatagaatgaatagtttatagtcttccaaaattcgatttctgttgtagtggaatcgcagacattttctaacttatgaatgttgttataggacttctttaaaccttggttggatatacccaaataaatataaagttcacacgaaaaaaacttggaatcacatccaggaatattcaccactggatcaatactactatacaacaagggaaaaaaaaatatttaacttgggaaggtatatacttattttataaacaaaagcaagattcgccttgtaatgcgacggcccgacttctctctttcaaataatgatccttgagaaaccctatagagccatatatacgttgtctttataaagagacataactcatctcttcttgactaactttatagttaaagttatcaattattcgaaaacaaagctggttttttgttttgtcccttaaaccagcatg

SEQ ID NO: 24240 - DNA, 3003 bp, Unknown
  misc_feature (1)..( 3003): 2750-1469P.txt file - cDNA_ID_2171209; gDNA_ID_1620589; Annot_ID_161382
ctcaggaactatgaatacgaatttttgaaggtattatcactcacaggagcgtaagggagaagaaagagccatagtatatacacagcttcactagtccatagaagataccgaacaattctccttatagaatcatcttcaacctctaccgtcgccgtctccggtttccggcgagcacagcataagaaggaactgtctcgtgttcgtaatttgaaacgattcgtagactgccatggattgtagcagcgatcgactgtggagatttctctactccgaagaaaatggcggcgaatttgtggcgatttgatttgggaactgtggagacggtgacggagatatgtcaacgtcggtgaggttatcagaatcatcgtcgtcccttcactgcattatccaccgtttagtcggagaattttttttatttatctgagagagacttgctaaaacggcagcgtattggttatctaaatttgaaagcaacgacgtcgttttaattgaatcgaattacacattacagttggctttaaacaggccattggcccacggccttataaaacgccgtttcggtgagacactgaaattggatagtcacatcattattatgggtgctaagccaaatatctttttcatcattattattcgacattcctcaattttcgtcaacttcttttaacaaccccaaaatcatggttatataactttgctttatatctagaggcttagttaaataaataaataaattcaaaattaaaagaacattgaatcatgtaggcaagattcaatttcaactattttggttaattttattatttattttcatttaattattgtggaacgtatgatttattcatgtagatagttttctaatctcattagaatatcttatcatataatttaagtgtggaccaaaacataatttatttcttctacgttatttctcttttttttttgtgtgcaaaatacttgtattcattcaatcaagaaagaaccaaatacaaagagaactgacttatttctctatatgtaaattattgaagaaattataccttttaaaaaaataaaaatgtatcgagatacatttaaatttctgttgtatgtaatgtgtatacgtgtaatccaatttcttgggattctatataattatttatgttgttatggtctgtacaaaaatatcacatgcttataatataagagatatttcttttatacgtatgtattcttttaatggtttttaatatagcaatattaagattcattgttcatctaaataagtttttattagttagcgcaaaaataaaaactcgtttggagaaacaaaaaatggttaaagcgattaaatattgtttttcaatacattaaaattgtttgccatcttctaaagttgtttactcacttcagaatacatatgatactctctaatgggaagaatcccatgagccaaaaccaattgtctttggagtagaaaaaacttatagatctttttgtggaatcataaccctagattcagtagggtttattgaaaaaggaaaagataatacatatcctaacaagacatatccaaactaatccacaaaaaaactagacgattcgtgatatattggagatatcaaatgtacgatgtggcttcgaattcctgccaaattcaaagggatctaaaaggtctttaatgattcttcatatgtcatgaatttctactacattgggatgaaagtaagttagttagtttttatttgtttgcttttcatttttgctaaaatttttgatgaattttatcaaatataaaacacagtagcgtagactatattgttaaattttttttgatgaattttatcaaatttaaaaatacaatagcgtgattttgagaataaagcctataattttccttcatacggcttattgagtatacattagaactatattttttacaataggataacatagttctgaaatgagtaaattgaaaagagtttttgaattgattgaagtatgattctggttgtttagaaaaaaaaaaaaaattaataaaagaattaaaccattatgtgtgaactgtgaatccaaatattgttctttttctcacttttattagttaatcactgatatatctcatcaatcatagatattgtttgcaaaaatacttaaaccgttttgtgtacattacgatcacaaaacaagagaatcacataacctttttttcaaactaactttttttattaagttgaatcaaataagtttacttctatattatttaattatatctctctacaacatttaaaaaccaacacgtaaattcgtattaaaataatatggaaattgttttttcaaaatcctctacacatataagttatttgaatcattaaaacggagttacaaactttttttcttcgattatcaatgtttttctcctaaagaacaaatgaaatcgacgacaacctaattttttttggcatgtctgccaacaaaactcatagccatcagattgaactgtcttgtaatcaaacttgaactgtctccatcacttaatctttgtacgcagtttttataacttctatatttaatcatgtagaagattttaattagataaatttcagttacaaaaagtggatattagacattgcgaaaagagtattgacatgcagcaaaattgggtaaagtttgtcacactatttaattgaatatacttgaaaaataactatttatctggtaatcttgtaaataaagatataataatagatatctttaaataattgactatgatttataattttatatggtgaaaatagaaataaatttggtaaataagatattgtagttggcacatacacaaaaataaacttcaagttaaaccaaattggacaacctattgaaaaaaaaaaaaaacagaaacaaaatcatgtaccgaaatagtgttctaagtcatcattctgactctgtctatataaagttataaacgtatgtgttctccaatatattcagccagaaagaagagaatcttatactaattcaatg

SEQ ID NO: 24241 - DNA, 3003 bp, Unknown
  misc_feature (1)..( 3003): 2750-1469P.txt file - cDNA_ID_2171255; gDNA_ID_1620590; Annot_ID_161395
gcccaatgatctcatccattcaaggtacaattccggtctatcttttctttcttcacctttggccactatcattattccttttgaaacgaaaagattccggattatgattaatccatggcattggatcgtaaaatctcttgaatatatacgcagaatggccttcagacaaagcctatcgtattggaaagagaagctgggacacacaacgatcgatttgggaatagcaccagagaagctggagtcttaccacaatggagacatcaagagaagcgatccaatggacagactaaaggcgataaaaggacatctcgtctctttccctttagatttcatgtgcaaagaagatctaagaccggtcttcaatgagagtgaatactacgcctcccctcaagtcttccattgagatcattacatcaattcttgactgctggcttattcagtgacagctctctacacgaagaatacttcattgctacctttaaccattttcatctcatatgtttatgagaaagaattaaagatgtttgtatagcgatatgatatgtgcaaacagaggaggaaactgagaagggaagccattttgctagtttttggtttctctcttccgaggtaaagtaaaaaaagaaaagaaacaggtcattttctaagtcaaatattggcttactatctataacagtgaatgtgtcaccccacacagacacatatgatttgtaattatgcgaaaaaagactgaataatataatgtcggtgtcgagatccacgaggtgccatgtgaatatgaaaatatgatgtgacaatgagtttgggtcttatctttgtttgtctctgagtcaaacaactccatctttaccacttgcatctcctttgttgtgtcgtattttgttcacaacctgtttgtatctatttatctcaagtctcaactgacaacaaaaaaacttaaatgaaaagtaatacatagcatgtggaggatttggtgatcaaatattaatccacacatgcaatatacgaaaagttaactttttgttcggttctgaaagtaatgaaaccaaaagcaagagaaaaatcagtttagttaggagttctatttaacaaatttcaacattaatctttttcagaaaaagattaaaatcaaagaaagcaaaacggacagagttttgtaacttggttcgggtacatgtttacatgatcttatttcatagtttcccaagtaagaaatagatttggtttgctagttacatttgcgaccatgcatttagcatattccatctagtgaaaattaattaatattatctatttctattttttatcttttatttcactatcttatttctaccacccacccaagctagaccgccatcttaactaataattaatcaaacttaagagtcgtaagcactgatatctatggattacctaagaaatctatagtggacatgtataaaatctaacatatgcactagggacatccatatcttaggcacatatgtatggttaaagacaattaaaaaaaacaaccttacacgtaaataccttatacacacgtaaaatttgcatacgagccaatgtctttcttgtatatgtatgtattgatatttttttctctttttcattctttgttaagggaaatatatacttatcttatatgacccctaaacggctaaacgatataaaaacaacgttaaaaatcttattatggtgcatggcttgcttataattgtttagctatttttaggttattagtagtcgcagcataaaaacggtatgtcaacaaatttcatggtagatctagattacgacctcaaaactcgtttatacaaagtatacaacgtttctacaatttatattaattagttttttgtgagtatgcatatatatcgtaactatgtcgggttttatattattacatttaaaatgataggaacttatcatttgacaaggtgtaacaaaaataataattataaagatgagagttgtttcggatcaaaggcacttaccattagcttttagattcgagagcctctcacagccacacctttttttggactagtccttattgtttaacaaaccccacatgatatccttttatatttacaccactttcgttaatttattaactttcttccacatccacatttaaatttgatctagacattttcttatattaaactatatacatctctatcctaatgaggtattaactagctatagtttattcatttgtcggtcttaagctttattatttgtcatggcaagaaaaagaaaactttgattggttattcattgtggttgttgtaacgcttttttttgtttgtgttatttgaccccaaacataaataattcttcattttcttgcgcgttttatgattgcgttgaaataacatcttcactcgccaaacactccagtaatacccatttttccaacatatacacttctaatcatacccacaaacatacacacgttttaatctgcagcttcaaggatatgttgccttctttaattgaatcttatttaccaatggagaatacgtatacatttccttagactaaaaaaatatataaacccttttgttaattataacattcaagtattcaactataacttcttaaataaaaaaattcgtcaactttattcataacatatatacgtgtccttgtcgacatgcaaaaagaatgtatatgtgcatttgtacgtgtatatatgtattaaaataaaaggcttagaatagtcgaaggagagaaagcgaaagatgatgatgagtcatagagacaattcaccagcttataagtagtaaatccaccaaaaggaaaatatattcaacagagaaactccgatcaagaatattcatatcagagaagaaaaagtaaattcctattaaacttctgattctcttttttctttttgttctgcttttcatttgctttttggatatctttttacagtagttataacttataaatgaagttcgtaaatatattgtaggatcataagagaatcaaagaatg

SEQ ID NO: 24242 - DNA, 3000 bp, Unknown; identical to SEQ ID NO: 2771
  misc_feature (1)..( 3000): 2750-1469P.txt file - cDNA_ID_2171259; gDNA_ID_1620590; Annot_ID_161396

SEQ ID NO: 24243 - DNA, 3000 bp, Unknown
  misc_feature (1)..( 3000): 2750-1469P.txt file - cDNA_ID_2171441; gDNA_ID_1620591; Annot_ID_161428
gttccagttaggcctgatcagcagtctagtgtggggactaccacgagcacgaatctgcagtctaaaccatttgtttctcccttgtcttcaaatcattcacagcaactgccaaaatcattccctggtgctttgcctccatcccctcaacaacagatgcaattacattcagacaatagcatccaaggccagagctcacctgcgaccccatgtaatattttatccacctctagcccgtcaattgcaccagcggttgcaccttctaaccatcagcatttgttgatacaccaaaagcagcgcaatcaagtgcaatcaacagctcagcgagttgttcaacataatcatctagggaactctgagttatcaaagaagtcccaagctgaacgcatgccacgtgttccacagtctgtaaccaatactacccaaactgttagtatgggtacgaccaagggtatgcctcaagcgagtaatgatttgaaaaacataaaagcagttggttctactgcggtgcctgctttggaacctccatcttgtgttgcttctgtgcaaatcactgcttcgaaagtagtaaacagttccaatacagattcagcaggaaatgatccagtatcaacaccgaaccaaggactagctcaaaagcacgggatcaagggcgttacacagagacaacaacagtctctaccttcagaagaaaagagaccgaaattgccagagaagccgactgtacaaaatcagaaacaccttgcttctgaggagcagcctcatttagaagaagcacaagaattatcatcttccaagcctcctgatacaaaagtggaatgagaggcatgacagatgaacctagaaccttgagtagctgtagatcctgcaaagcttaacgctggcccttaccgacaacaaccctgtacaggaacccaaactggtttgtgtcctccaccttcagagtcgggtctctttttggcattaacatcttgaagctgctggtggtctttggatttggctgagagtataacataacaaactctacagattgtggagtttgcagatttggtaaggccagagggagatcaatagggaagaagttggtggataggataaaattcatgcaggtctttttgcctcttttgatgaacacaaagagaagaaggtatatcataatgtaaattacccacttgcatcatagagaagtagtctcttcttcttcccatcttttggtttgggagagagtagaaacagtttataatgttttgtatagaagtctctactcctccatccttgtggcatatacttagggcccttttttaaccttttcctctaacttattctcttgtaggtttaggttaatttgatgaatgtatcattgttcttttatggttaaaaaaaaagttcacttcactcccataaacattagcttacatagtgcatttcttcaaatccgttacctatgttacaaatctaaaagcaacaatgactaaatctctacgttagaaagaatcaaaagcattgttgataaattgaagaagctgagtttgagaactctgaatcaaattttagattttttggatacttcggataaacccgaatccgaacccaaaatatctgatccacatccgatctaaacccaaattttaatatacccgaatgcgtcctagatttctaaacccgaaaccgaaaactccgacccggactcgatccgaattgcctatggacaacgtgggacaaatatagttttacaaaaccagcgacatgcctgagatttgtagagatccatgtcacacaacatgaaactgttataactttattactacaaaaaggcccgaaacaagaccaagcaaacaaaaagaaaggccttgtttggtcaaaatctcaggcccagaattcggagagagagagagagagtcgcatactgcgtcgaggagagagagagagagagaaagaacgaaaaaaaaacatcaacgagaactcaatttttttttttatctcccgagagggaaaccaaaattgaaaacgaaaaatagctgaattaggaatcaatctcgcaacaagcaagcaatttccatggattccttgttttgggaggagcttcttctcttctactctctgagaaattgattctcgtctttcgatttgaaagaaaagcttataagaatttggaagccctaggagagagaaactaattttagaatttggtgattttgcccgagttttgtgccctagctttttgccttcgttctgttctgttctacgttcaatttccaggtttaactctcttctccttcactcttctattcaaaccctagagtccagctttgctggagcttctgtgattttgaacccagtgcttcttttatcaggaatgtgaattgtttgctgaaattgtgtctctgtagttctttgtttctactcgtttagcttggaaatgctcaatacttgattcaagagttcgtaggcacgccattaagtagcttaagctgatcattttctaactttggttcctagtaatcgttgttagtgttggattaagcttctagaacctctctgccttgaggcaacatttcatttctttggtatcttagagttctattctatctctgttatgctggaatacgtagttgtgagcttctcggggatcagaatggtattggcgttagatatatagaattctcagtcaaatactagattctggggagttatcttcactttgatgttcctttggatagtggctagagtatatgagtgaatgttgttttacttttgacatcttctgagcagttacatcttgaatctgataagctactctattatatgatatcatatggtactgctttttgcatcatgagaacatacattttaccagtgttatttgtaggtccaacatttaggtgtaactgattctaacttctgcagtatgatcattcggaatgctgtaaatactgaaagctcttgatataatttttcagttaagctagaattcgaattgatggggtattcgacgtggtgatg

SEQ ID NO: 24244 - DNA, 3000 bp, Unknown
  misc_feature (1)..( 3000): 2750-1469P.txt file - cDNA_ID_2171445; gDNA_ID_1620591; Annot_ID_161430
aaaaggtaagttactatactttgaacgaaggtccactagaattttaattttctcactgcggtcaagagcctgcaagttaatgaattacataaacctcagtcagtttcgcataagtgggaaaaaacagagaaaattcaagtcatatattctcaaatgaatgatataaaattatgagattgacatggatatatgattcagaccttctcaatgttctccatcataacacctttcattttggtcactagagccttaaccttggcaagtttgctaatctcctcgggatgagccaaaagtaccaaaactctttgttcaagctgttgggttaagtagttgtagccattcctatccaccaccatatctcttgttgaaatcctcttaaactcgctccaagaatgccattggaatctgccgaaacaacgcaataggctgcacaaaaagaaaagaatctattgtcatgtccatggaaaaatatgagagaattataaacaaaggacactaaatacgaaaaagaaactgtatagtattgctcatatatcacctaagttcaaatacaagaggcaaagcaagctaaagacataactacattcaacagtttcacttccgtttaagcaaagactcaagtcaattacaattgccttctaaattctcacaaacaagccaataatacataagctgaatggaatcagaacaccaagaaacatatatcatgataaatccaaacgagagatacatcaataagtaaaataagaaaagtctcatcaatcaatggaaaccttaacagaagaagaaccaagtcataaatatacaaatgaatgagcaaatgagcaaagagatccagtgaaatcaattgcaacacgaacacgaatatacatctaagtctaccacatagatcgaaactaggctttcaagagggcgaaatcgaaactcatatatacgaaaaaccaggaaaaaagagaacatgttcggtttgagaagggagaagggagactcactgaagccattttcgacatttgttgtaggaaaattggtatcggagaaggaagcttcttctggcaacactgtgcagtgacggcagtaaaattccctttttgcagaaggcaaaaaaaattacttctttttttccaactcgaaatttttactttggctgtaaatagtaaaattgtttttgaggaatttaaaatggttacatcatttacatgttgaggtatacttgaggaatttgtgaggaattgttcatgtttaagagttttatttttgtttttaagttgtttcataaattaataaaattattattcttagaactaaacaacgcaataggctgcacaaaaagaaaagaatctattgtcatgtccatggaaaatatgagagaagacttccactagaagttgttagtaaggaaaattctaaacagaaaaaaatagtttaaattttattttaaaagtaaaaattagtagtttattttattagtttatgcgtttatataatatttctatttgataaaaaataagattaaatgtattacattcttaatattttgtaatttgtaactttttacaaattaagttactatcttatgtttaataaaattattaaattatagaaaatttcaagtttaatattttttcatatgttttatttggtattagtctcttagatttctaaacccgaacccaaaaaacccggactcgatccgaattgcctatggacaacgtgggacaaatatagttttacaaaaccagcgacatgcctgagatttgtagagatccatgtcacacaacatgaaactgttataactttattactacaaaaaggcccgaaacaagaccaagcaaacaaaaagaaaggccttgtttggtcaaaatctcaggcccagaattcggagagagagagagagagtcgcatactgcgtcgaggagagagagagagagagaaagaacgaaaaaaaaacatcaacgagaactcaatttttttttttatctcccgagagggaaaccaaaattgaaaacgaaaaatagctgaattaggaatcaatctcgcaacaagcaagcaatttccatggattccttgttttgggaggagcttcttctcttctactctctgagaaattgattctcgtctttcgatttgaaagaaaagcttataagaatttggaagccctaggagagagaaactaattttagaatttggtgattttgcccgagttttgtgccctagctttttgccttcgttctgttctgttctacgttcaatttccaggtttaactctcttctccttcactcttctattcaaaccctagagtccagctttgctggagcttctgtgattttgaacccagtgcttcttttatcaggaatgtgaattgtttgctgaaattgtgtctctgtagttctttgtttctactcgtttagcttggaaatgctcaatacttgattcaagagttcgtaggcacgccattaagtagcttaagctgatcattttctaactttggttcctagtaatcgttgttagtgttggattaagcttctagaacctctctgccttgaggcaacatttcatttctttggtatcttagagttctattctatctctgttatgctggaatacgtagttgtgagcttctcggggatcagaatggtattggcgttagatatatagaattctcagtcaaatactagattctggggagttatcttcactttgatgttcctttggatagtggctagagtatatgagtgaatgttgttttacttttgacatcttctgagcagttacatcttgaatctgataagctactctattatatgatatcatatggtactgctttttgcatcatgagaacatacattttaccagtgttatttgtaggtccaacatttaggtgtaactgattctaacttctgcagtatgatcattcggaatgctgtaaatactgaaagctcttgatataatttttcagttaagctagaattcgaattgatggggtattcgacgtggtgatg

SEQ ID NO: 24245 - DNA, 3000 bp, Unknown
  misc_feature (1)..( 3000): 2750-1469P.txt file - cDNA_ID_2171505; gDNA_ID_1620593; Annot_ID_161470
catctgattcgtttgaaacggtagaagattcgtgagggttctgtatcggttgatcagcatggtgttgctcttctccctcagaatccgcataagaagagaaactagctaaagggcagacaagtttcagaggaagagaagtgtgtttctgaggagaaaggaattgggcagtgttcttcctgaagaaaggggattccttgggagagaaacaacaaccaagagctgatctgggtgtgcagagatgagaagtcttaagtagaagtgagtggtttctaacggaagagaaacgataaggaagagtcatgtctgaaaagaagaagaagaagaagaattagtgaatcaagaggagaaaatgaggaggaggtagagagatgagaatctacatagatgagaaatgggccatggatgatgagaatgaagttggtgatgatattgatgatgatgaaaatggatttgcataatgggattttgatttcaggagaggcgagaaagggtaagtgatggtggcacaggggaatgtgaggtggaggtgagaggattgcgtttggatgcttctttgtgttaggagtgagacttttgaatttgtgtggttcttgtggaatgtagtgagaggctcttttggttgggcctcacaacctcacaaatgcccacttgtaaaaaagaagaataaaaatgatttgggaattttgttctttgtttggatgtagtcaaagaagagaattagatgcactgtttaaatttttcttcaattttaataatgatttaacaaaatggcattatctcttatgttaaagtaaatcaatcttcaatttttattacatatacaaattgtcaacagtaatactaaatattacaaatcaaatcaaacattttagttcttaaaaaaacatggagctgagtgtgttcgtggggtaactcgatttcatcatgtggtttatgaggtaggtgaggctggttagttaggtgatggacaccatcttctcttaccattatggcttttgttttccttttatgtcaaaaaaactttaatacattttccatcaaacatttaatagatttatccagcttggttttcaaatattcgaatatgtttagtttcattcagtttggttagtataaaatttgtgtgtttcgattaaaaaatgtttggtcgacatgcattaaaaatagttcaaaacatttctaagatatgatctttggaccaatttggtcgatatgcatcatgataagatcgattgtggaagattgggatgatccgatcatatagacatatatgtatatagttttttatttacctgggagatcatatattgatcaacaacttcagtttaaatttgtatttcagaaaaaaaaaaaaaaagacttatttagaacttgtattttgaaaatcatcatgatataactacacaaaataaaaccagaggtggattttctttcggttttaccaagatattttgagttttcggcccataattttcttgagtaagagaggagatcattttaattcaatcatttcccatcatggatattttaatatataattttgtggtaaatttttttttggaagacccctaatacacaaatataactgcatatacgctcgagaaaataaacatactcattcacatcaattataaattatagtaattcaagtgttagtttgagggcatagtgtttagttaactatatgtcatttattaacttggttttcatagatttcaccttcgattcaattagttttgataatttagcatcctatttgtagccaacaataaaacaataaaaaacttattttttcgtttgacatagtgttaatgttgggacgaattatgtacacgatcaaatatcaaccgaaagacattcatcatgatgattaatttttctccttttttaaaattcaatgatttttttttgtgtgtggatatgactgaagaaaatttcttattggtattatcaactttttatacaattttagttcttttcttctttataaatctttattctataaacaaaataataaaaattcaacgttgataaagatttcctaccaagtagtccaatacatatgatagcttcttccgtatatttaggaaaaatattggtaagaagagtaacaaagtattatttgaataagtggtatacttatttgcgattttcaacgattttatttttatgttgcaatactatttggatatagttagatatgatctttagttgatcaagaaaccttgtgattaatgtgtatgtattggggataacaatctgtttatttctctataagatattcaagttgttttgagttttagagttataaatgataaacgcacctctactctgagtactctttcatgttactagcattagaaaactaaaaatgcggagttcactaccatattatgtactcatttctttttttaagatgatgttgcgttatttttagattgaaaaaccttttaaacttttcttttaaattaaaaattcaacaatttgtttattctttcagaaaagataaattgtttatctccctgtttttctaaacaatgtaagagcatcttcaatggtgactaaattgggttctctcagctgtttttctggaaaaagatgattaaaaataaatcaaaatcatgtattattgagaaagttgtctctcttgagagagtttttgaggaggatgagagacgacgacgtggccgttctgatgtttttcaattatacaaattgaaggttagctatattgaggaaaaaaacaaaaaaggtaactgcgaaagcccattaactttaagttgttttgcatcggcccaaatataaatcctaaagaaaaagttacatatgtttaaaaattaaaacgcagcgttttaagagtcagctatttcagaaaaaaataggattagcaaaatcagaactctgcgagcgtctataagaaaaaaccctagaaagaagtcgattatccagaaacagtgtcttcttctctttttgttgttacttcctttggtttcttcaatg

SEQ ID NO: 24246 - DNA, 3000 bp, Unknown; identical to SEQ ID NO: 2790
  misc_feature (1)..( 3000): 2750-1469P.txt file - cDNA_ID_2171657; gDNA_ID_1620596; Annot_ID_161535

SEQ ID NO: 24247 - DNA, 3003 bp, Unknown
  misc_feature (1)..( 3003): 2750-1469P.txt file - cDNA_ID_2171784; gDNA_ID_1620598; Annot_ID_161596
atttccgtttattttcttgtgaaacgtatatagtttgtctcacctacgtaccatttgtggtcaattcttctttcactataaaaagacgttttcatagtatataaatgttcaaggaagtttcttagaatttgttttcgaagaaaaatagaaaaaggaactcaattccaattttgttagctcgaaacctcgaataaaaatttggtacgttggttgatttggtatcttcgagaagtcttccgataaatcgagaatgtgttcatatttttttttttttaaagaacggtgggaaatgattgtatacgtaacataattacacgtgaatgaaaccaatcagtgattaaaaaaaatcatttatgttagaaaccaaagaagctttttgtttggttgacttctggtatttagtgtagttaagggatgtaggcccatgaaagttaggcctaaatattagaacccaatataaatggtctcttattcgattagtgatgttgagtttttgggaaataatgatgggcctaaatggccaatgtgttgtgggacgattgtttggactttttgagtgactttgcatgtgttcataacttaaaataaaaattgcattcccatacctctttaagaattcaaacttctaaaggcctttaactcgtacaataatttaacgtgagacggtcataattcagttaagaacggattgcgaggcttggccaaaccctaaaggtgttggcctgctcatgaaatgcaacattagttggatcttacgagaccgtacgtgggaaaccaagttccatggacaatgttcacgttttgaggccaatttactagtttacagtttacactgggcaattgaataacagtaaacgaaaacaaaaacaaaaacaatcgtatcactaattactagaatttgtcgagtagggattgaatgtttatatatatgagatattaatacaacggccaacacgtgtgtatctgaaagtgtacatactaacatttatggtagaaaggaattcgtgtcatcaagtcaagtaaaaccttttttgtccgttgtgtaacctacacaacgatatattcaaacaaaacatatgacacatataatcgtatgtgtcatgtttatacatatacaatatgaaaagcaaagagaacgacacattagttgtttttagttacgtttggtcttaaaattaacaagtccctcgttaaacatcagccgtgtgataattaacaagcatccatcgttaaacacttccaatataacattttttgtcgtgaaagttgattttgttcaagtcttcttcgataggagttactcatttaaagaaaatagcatctcttgtatgtaaatttgatcactccttccaatggtccagactccagaacaaaggaaactgtattcacaacgaataaatagataaagggatccagaaaatcatgtaatgcatgatacattattagaaatatatatagaataactgagtaaaaaaatatatatatatatatatatatatatatatagaataaatgagtgacaactgacatcacattagtattctctgtatatataagataatttatatttagatgaaaatgtactcaatcgagaaaaatgtaataaacgaaactaattagttgacaaaaagggaaaatcatcaaagataaaagtttaactacataaacattataaattcactttctaccaaaaaataataattataaatttactttattccagtttcgacgaggagtgtggattctgttgttgaataagcagatatttgattcgccgagattttagattacaatattcaaataatttcgaaaatactggagaggaacgagattaacgataattagaggaaaaaagaagacaaaatcctaacaaacgcaaaactttatgcagcagtagcagcaggcagcggacttattagttatttaacgagtctatgactcaaaagacaaatacgaaacaataaattgaaaacaaactataagaaaaataagaagaagagtttaacaaaaatgaaaagaaaagcaaaagagaagaatataaccacaacgtggaataaaataatagcatggtcgatattgtcactttatatgattccttatacgataacatatgaagtagattttttacttagacacagattgcatcgaaatttgaaaatcgtatcaatataaaatcatcaagtgtgcagtattttcgatatctctgctaaaaatatcatatttactagtagaataaatttgctatagaaccaatagatacacaataagttaagtaggaaaatcgtaaataagtgacaaatcattttgttttcacggtttaatgaaaaagtcatccgcaatcatacatgtattaattaaacaatgtgtcattggataaaatgagataaaaccaaataaaatctaaaaaatgttattttatccaaagattattttgcaaggaaaacttgatagggagtagtatttttagtgagtgtaagctatttattaattccattatttagggtctacgtaaactatgaggcattcgtgcaaacaataaaaagatagcgggactcaaatgtaaattaattatgacactcacaacaagaataattctcattttttttttttttcagtcttatgaatgaaagttagcgtcttagcgaagtagaaaaggccaaaatagagagcggccaaaacggaagcaaaaaaaacctcatcattcttcatctcctctcttctcttctcttattcatgctcaccgccataaccacaccaccacacataagctttcttctgtaatctcaaactcttttatgggctaattattacattttcactatatacgtctacgagaacgagatcaagcacttgctaattattttgttgaagttcttgaatggttttccttcagtgtgtcacatttttggatttagctgaattgttttgatcataaggagaaaactttctcttccttgtttttttttttggtctaaattttctctgttttttttttatccaatg

SEQ ID NO: 24248 - DNA, 3003 bp, Unknown
  misc_feature (1)..( 3003): 2750-1469P.txt file - cDNA_ID_2171849; gDNA_ID_1620597; Annot_ID_161568
aaaataaaaaatcatcatcttcgactattcatcgtccgaccactaacattttagatttttattcagtactttgtatctattcaccattttttttattgcaattgttattataagatcccagttatccattggaaagagagataacactaccatagaaagaaatcttaattcgaacgaatcttgctaagattggaatttttgtttttgtttttgaaccacataaatattgcaatttctaaggcataatatttaagagatctttgctccaactctaaacaagaattagccgtaaaaaccatactcattcctttatgctctatataagagaaggtaaccatctcacataatcataactcaactaactttttattgttctcaaattgatgtttatatggatcaatccatactaatccaaaatccatggataaaaagagtggaacttttggatattggtagataggatttgatgagtttcatgaattagattgaaataggttgggttataatggattagtggattatccataaccaacccaatagagtgtaaaccatatataacataattaaatatctaaaccgatttagtaaagcgaaacaaaatattctaaatcaaatttgtacactcatatgacggttgatttgatgatggtgatggtaattaaacatgagaacagtccttgataacatgctaaatagaacatgcttaaatcgaacatgagaatatgcttattgaagattatgacactcggtttgatggttaattcgatgtgatggtgatgatgattatgatgatgatggttattaattaagtattaattatttaaattgtaataagaatatacaatccattaatttaaatgagttatggtcttacgaattaatccaaactatttgctaattgagttggttggtctccctaactccatatgagatatatgagttggtttgatttggtttaactaatttgacacctctactttcatatgatcttatatcacaattatcaatcattgctaatagttaggttatgagttccaccaaatcaataggtaaaaaagtatctcttatgattttgattaatactttgctgtaaatattgatcggtgtattaactaatttgtatttgcaaccgtatacattgcaagaaatgttggaacaatttgcgagaaaagtctaacagtttacacagcgcagaagtaataaagtcattacatggaagcaatattggtgaaatgcttaatgattatgaatagtgatgtatataaaaatcctcctttttttttataagtctttttctaagatttatcttttcatctcatcctaacaattttgtattaaaattctactatcatcagatactcgagaagatgtatttgggaagttattgctgctctatttcgaggtaaattcttggacttaataatacttctggttatactcgagacaattaccatactaattggtaatttaattttcatattattgatttcagtgtaataatatattttggttgacctttgtaatctaacatttcaatttaatattaattgtttgatttatttactctccacttggattatatgtgtatcttaagtcttaacgtaaaaattgtcatttcattgatcaattgtttttcttgctatgaaggagtgtttacatacaagtaaagtagttcaatcaattcgttaatttgaattttctctctaacttgaaattgatgggttttttttggggaatttttatatcagttttaagtgaaggtcactataatttcaaaaatcagaaaattcaacgccttcaatgtttaactttgtttataaactattttgtcaagaaaacaaaattttatttgttaacaaacatcttatttgtcaaacataagttagatatgttttatgtttttgggttggactaccaatgtttcttattttgttcttttatctactcatcaagttaatccaaattagtactattttaatttgatcaaaaagaaaaataaaatccatattttcaaaaagctccttaatatatcatatcgaaaatgagttagaatcaatatgaatatatattagataaatataaaacataattattctaacttaaaattgatgtaatattcatagttagatggaaaataaataaagaaaaattattttagttaaattataagaaaaagtgataattgtactaatgatatatatatatatatatatataaatgagaaggattgtataaactttatgtcacatatttaatattctatattctaatggtttatgttattttttattcattatgtatatatacacactctgtttaccaaaatcctataatgttaatgtagctaaatggttgagtgtctcttatgaatccaaaaagtcagatgtttgattccccttgatcacaaattttgcttcttattttctaatgtctagaatgacgtcattttgattttacggagattctaacggaaagataattccgtgattgacatatcctaaatggccaagtcaatgaaagtatgaaacttgattatttttttcaaaagtcaaactaaattttaggatttaaatgtcttcttgaaagttcatgttttttcatctcaaatttaaaagtttgggtttttttcgacattttccaacaaaaaataatattttctcttgtttctttatttgttttcagaaaaattggtatgtagctaatttgtctcttcaaaataacattttttaaaaaaggaaaacaaggccttagactttgggcctttcttaagaaaaagactttagaatgggccaatattgagacagtgtacttagctcataaaccgggcgttgttgactccttgtacatataaccgtcgtgttttaatatacgcctgagaacgagaaaacgacgtcgtataaattcaaaccgccgtcgatcgtcactacgtatataaagggcttttaattacacggcgaagtctctctgttctcaagaaattaagaaactgagaaaaaaaaaatg

SEQ ID NO: 24249 - DNA, 3003 bp, Unknown
  misc_feature (1)..( 3003): 2750-1469P.txt file - cDNA_ID_2171853; gDNA_ID_1620597; Annot_ID_161570
taatataccaaattgagaaagaaaaaaatacaaaataaatatgtgattgtatatatagacgttttatgaatatatgtctagagatgtatcacatcacatcactgaaacatatatttttgtagttttacttttactatgtttagattggttagagatgcaactgtaggttaattgttgtaaatgtagctttgttttttttttctctgtataaaatatcttatagtatctaaatatttaatataactgttttggaaaaagactcaaatatgaacaaacacaaaatatttcgagaggtattactggtaaagtcttattggtaaatcaaagtctggagacattaccaattcacatacatattttggtagagtaactattaagtttaaaattatattatcgaattacagttaaacctttataaattaatactcgataaattaataatctttacaaattaataaattcttccagtctcgagttgggaccagtgtaaaaagtgacacaaatcgataaattaataagataataacttttttgaaagtcctatgtaaatatatggtcccatcaatatcataaattaataattgtataaatgtatcaattatatatatacattatatgtaagaaatttttttgaaatataattctaataattttttgcttaaatttgtatttattcttatttaaaatttagatttagtattttactgtatcaaaaacttttagtgttgttttctaaacatgatattatgttttacttgtaattgatttttgaaagatattttctagaatgaaaaaaatcctttagaaatttttgaaaagttactaaattaggaaaatctctctataaattaataaatattaatttatcgataaattaaaacttctctaaattaataaaatattgcagtcccaacattattaatttatagaggttttactgtatatgtatttgttgtaactcacgggttcaatagtgataaaggttaatatttctatatcatgattgaatttgattcccattgaacattaactatgcagattaatggcgacaaactaacggtaatctttaacatcggtgttgataaatcatgacgaagtgcttatgtgaaaagtcgttcacaaaatcgtttaccatagaaaaatgaaaagatttaagatttgttaatcatgaatattaagacaattatttattacaaaattcaaaatttaaggtattttctaatgatagcgtaacaaattaaaaaaaatacttatttacacagaatattatttatactattttttttctaacatgattttagtcttaaccaaataagtttgtaagttcaaaaatgtgttggttatctattataaaaattacaaaatttgattgaaaaaataattataatgctgattgtaactattttcgtaaaaatgctaattgcaatataacttttctataagattatttttttatatagcttttatttatttataagtctaattaaaacaacatgtacccaaaataaacaaaacacaaatcatagtcaatggtgtttaaaaactaatgtctcaaaccaagaaacatatcaatctcctttagtaatataattataatcttaaagttatttgttcacaactttttaaagagcttaatttaagtttatgatttgaatctaaaattgagaggtgggcaggacaaagtgagatgtcgagacaaaaatacagataagctaatttgtgcggtggattttacacaaactttgtcagtcacgagactctttcttattctaatggcaccaaaccctagttttgttcttttcttctttacttttttatttatcataaatattttatttggattctcatactctcatatgtctctttccctattgaccatatctttttatctcatctcttccctttcttgtgatataactttttactctattattatgacaagtcggggctagatatggttgtagtccaatgatcttattatttgctagactatagatttatatgtattggacacacacacttgataagaccatattttattgattctattaactagtaagcactaaatatagtctcgatatttttagtcttttttttttttgtcatctgaaatttaattaataaaacttgttgtggaaacaaggagagatacatatgcccaaacaagggaaactaaagctggcggacaaaagaaaagtccccagaaactaaagccggcggaatacatgatttccccggaaactaagccctgtgaaagggaagttaaaaacaacagaattaccaaacagaaaattcgaatcgaaagaggacgatgctataaactaagaacagaggaaaaaggctaaaatcctaagggaagcgataaaccaaagaatttctcgatatttttagtctacaaatcataatttcttttacgattcaaaattatatattttcgacaaataatttctattattttatctaaaaaactcggataattagtcgggtacggattaggttatgaaaataccttcgtaaaaccttataatatgatattgttttccggatattcgagtgggtgttctgacctcaaatgaagataaatccctaaaaccttgtaagttgtaacatggttttagggaatcatgttaatttttttggcaggatagggaatcatgttaatggcattaactaatagtgtgtacctaattagtaaagacatgtctattaagagaaaattgactaaaccggacaattttggttagaccggataaagaccatgtggtccatttagccttagtgatcatatgtatactcgatctagttgtaagttgttgtcatgtagctaacttcagaatcttactcactaacacttcgagtttcttctcattggcacaaaacttaactccattctctttttctctctctcttctatctttcaccaaaatgccataactctctcttcccctatataccaaaaattaatctgtatctctctatccatcaagagagagcatcacaatg

SEQ ID NO: 24250 - DNA, 3000 bp, Unknown; identical to SEQ ID NO: 2802
  misc_feature (1)..( 3000): 2750-1469P.txt file - cDNA_ID_2172027; gDNA_ID_1620599; Annot_ID_161634

SEQ ID NO: 24251 - DNA, 3003 bp, Unknown
  misc_feature (1)..( 3003): 2750-1469P.txt file - cDNA_ID_2172063; gDNA_ID_1620602; Annot_ID_161677
ttgaaatcaaaacagtgtgtatataaatatatgatcacaagtttgggagaaacatcgttaaggtaaagtggatacgagagattgcaattttaagagaaacattagttggatacatgaagaaacttatatcaaaaattcatcttcaaaaatgatgaaacaaaaggtgtgtatggaagaaccagatggtcaacttgacacatattccactgatattaataactgtttaatctatgactttggaagagcaatgattcttttttcctatagaagtgagagaatgttcatattagagagaaaaaaaatctttgataacaaaacaaaatcccttgtctagttgtggtctcaagtagaaatttttgtttcactcacttccaacttgtctaagacattatatgttcccaagcgtttaaaccactgaaaaacttccattcattaaataaagcttataggaaaagatgcaacaagtgtatgacgttaatgtctacacacccaccttacctagactgttgttagaacactagtttaatatttttccttggctaggttattttactcaaacttacctttaataaaaaaaatttaattattggatagttccgcttaagggtttgaacccaaatacttatcggaaaaccgatcgaatggattcaatttttctatatccgatgaaccaattccgaatccaaaccgaaaaagagaaaaaattgatgtagaaagtttctttgtaaattaagaatatatttgaccaaaacctgaatccgaaccgaaatcaactgtaccaaaccatctattttagattacattttcagtttgaaaccattattcatataccaaacatataaaaacccgaaccggattggaaaagcgcattagccaatcagtaggcctaatttatcagtccccgtaggcccaaattatttaataacgtaacatcaaaactcaattactggaggccatatgcaggcccaaattagtgtttcgcttgctagggctttaaagtaaggttatggattcttgtttgtaggatcttctcttgcttagccaaggcaactatactctattactagatgagtatccgtactacgtgcgagtttatgtattattatttacaaattgttttatataatgtatgttcatataaagtaaagttgaatgcatcggttttgaaacataaatataatttgtaattgtttttgaaaagtcctactatattagttcatctgaaaaacgaatgtgcttgagttattttttattgttgttttaaattctcaggttttttttaatttatatatccttgttttttggttctaagtgtagattgtgagacggtgaaattttagaaaatttatttcttacactaaaaatataacatgtctttattaaccatgtctctgcatattcaatctaagcttattcaacttgatgttcttgaaaagtttagttaaaatcttgtcataatcttatatctcacgttttagttataaggatagctcatcaaacatctttcaaattacttgttttcttagcataaatctcgaaaagcatctgcatattcatttagtttctttcataataattgtctaatttttaggcaagtctaatttttaggcaagtaatatatgtagcatgtttggattttatgatcactttagccacttaagtggatctcaaaattaaagaagatatattgaattaaaaaatatagaaaaagtgatggttcaagttctgattaattatatcctttatgttgaattaattactaattatgtattacttattttatgaagtctaggtggcaagctctcatgtgctgatgtgtcaagttgtgggagagagttagcctcctttcatatatatgattctacctgttccacattaagctccagtttacaggacagtactcagaccgattttagatgcttaatagcttcagctctgtgacagttctccacactatatgtctatatcgggtataattactccatgttcctctcgttcagtctgatccaacgctgcctagctaaactaaggcagcatcaacgtcactactttccgattctaagaaatctaaattcagaaacacttcaaatttctaagcagctcagactttgtttacctgatgaaacccaggttcatgagtcaatgtaacaccaagctcatgtataatagagtataaactggagcttaatgtggaaataacctgatgaaacccaggttcatgagcttaatgtggaacatgtagaataatagagtatagttacactcttactttgatattttcagatgaaggctccacgtcgccaatgctgtgacatctctccatcatatgaggaaacaaaaggctaacttttcatggttcagaaacttgtggaagtctgtatccgaagatctctcgacattctgacaatatttgtcgatgggtttggtcgtttttgtgtaataatatgcaacattgtttaaccagtacggcttctcttctcttgttattaagttttcctagttaaactattaaatgtataaaatgctaattgtagatgaaactgaaaagttgaaaaagaagaagatgaaactgaaagtttaaatcttatatttgacccaaaataaaataaaaacagagaagcttgtaattatagaaaataataattccttcatttcaggttgtcaccataaaaatggtgtgactgtaagagtctgaactcagtcacacctctttactttttcttcggccttcttgtagccgcaaatacttctctgtcatctccgttacaagctctaaacatttatttgaatttatcaatagaattcgtataatgtaaccaaaaaccgtaaactaaatatattttataaaacttatctccattcaacatccaaatccgttcgagtctcacacaaaaatccaataaaatgtactattcatcgccgacatgcttcgttttgatcactatatttgccgtggtggtaacacaactgatctttatgcgcaccgtttcgtccttgaacatg

SEQ ID NO: 24252 - DNA, 3000 bp, Unknown; identical to SEQ ID NO: 2805
  misc_feature (1)..( 3000): 2750-1469P.txt file - cDNA_ID_2172187; gDNA_ID_1620601; Annot_ID_161654

SEQ ID NO: 24253 - DNA, 3000 bp, Unknown; identical to SEQ ID NO: 2810
  misc_feature (1)..( 3000): 2750-1469P.txt file - cDNA_ID_2172195; gDNA_ID_1620601; Annot_ID_161657

SEQ ID NO: 24254 - DNA, 3003 bp, Unknown
  misc_feature (1)..( 3003): 2750-1469P.txt file - cDNA_ID_2172236; gDNA_ID_1620601; Annot_ID_161670
tttggttagtgatttgtagaaaaaaattacatttgctaatgaaattaagccagttgattgcttatgatgtctgcagctaaacatagtaaatgacttttctttgttcttccaagttatgtgtttgttgttaattcacattggtgcagctatgtttttgtgcagttgatttgagtgaggagtgagattacttggtaaaatagtgggcctatatctggttacgaaaggcccattagtagcccattatgttttgtccgtttcagactaattattggtcttaacttaagtatattacccacatacgaattctgaacttagaataagccaaatgcatttgaatccaaagtttgattgattccttgaaaagttaattagtacgtgtcgattttcaaaatactaaaaacacaattatataatcttaaacagaaagttaagtataatgtttaattaacataaatatttaaattgagggagtaagtaagtggtaatgttaaaaagaaaaaagaacattttgggaaaataaacaaaaacatggagagattcgcacaaggagagactctcgaggcaaagacccttgaaacaaggcaacacttcttatttctttatttctaaaaactgcgccgtttaagactcttatggtctttttctcctttatttcttttgtttacttgtaataatggcttgtggtgcgctaattattctatgaactttgcttaatttattaaatttttcaaaagtaacattaatacgtattagaataaatatttcaatgtatgtcatgtgccggtaaataaaacattttttctctctctacgataaaaatccatacttgacaactttgcatagattacttattaatttgtatttttattttttcaggtataactaaacttattacagtaaaacatgaccaaagtttttcgaaaaaagtaataaactaatcgtaattcaatatttgacatgaccaaaatgctgataagtaataagagaaaaagagttaaagaaaaaaaaacaatttgggattttaattcaatcaaattggagtttaaagtaaaataaaggtaagaatcatgagagtggagaattagggtaggtgagaatgagtgaggctcggtgtggtcacgtgaggtatcctcaaaatcagggattgttgttttgtccactacactccctaaacctaaacccactcatcctttgcttaacctatttcttaatactatgattttagtaagttttctatcaataactctctttctttttgcatacctttttggtcaatattttgtacttataagttttaaaaattggaaagagtgtttattttaaatatatgaatagaaatttgacaacaagtcaagctacatcttaaaatactttttgaaaaagtgatggaaactcggaaaggaaacataattaacacgagattatgttaatgattttatttctcagactgtatttgtattagataaaaaatcaataaaccattagaaatggaaaaaaaaaaaatgaaaattcattggatctagcaaaaggttcaagtctagtcatcttatttcaaaggattcttaatgtgtgaaataaacagcaatacaactatatctaatttatagagtaaccttgttttcttaagattacatttcggctcaaaggtttaaagtcaagaagataacaactatagaaagaaacagtaagctactagagtattaactaacatatacaataaaatatactcaagtagaaacaaagggaataaaaacgaatcactgattcaaccacttgcttggggtttgagcaaacgcactcgtttacttacaggggattaagctaaataatttctttaaaacaatcttaattaactgatccaacagtaacataaataaaaatacttatacccataaatttacgtaccaacgcatatatatcagacggctattgagtccagttagcacaaaactgttggaatctcgataatagcatgagcaactagttatttttgtataataaactacgatgttatatagtatataagtagataaaacattctaatctcgaagtaatatttatatacacttttcgattaagcataatttggcttgttttagttttacttcagcttagtcctaagagatgaaactgaacttttgtagtttttacttatatcttttacaaatttaaccacattatattagatcgacaaaaggggaattaaaataagatataagtatgtacattacatgattcacgtaaactataaattacactgcacataccactagtggttatatcaccaacaataagcatgtatccataggtaattttgtactaattctagctatttaacaatagaattttctttttaataatttttatccggaattctataccgagataatcatattttttcttgaaaactatattgattagatatttacatagtaaaaaaaatagaatatttccccatattgaagagcattttaattaaccaaaatttttttgttacctttaccatgtctttaaccaaatatgtttagctatttacttaatatcacttttaaacatcttaccttacgactatttcgtttagttagatatgtttctactctccacgcaatgtatatgtataataatactaaagaaaattagtactaaaatattactggtaaagaagagataggccataaataggtgaggtggcaaagaggtggggtggtgcagttttgttgatctcaaggcattgtgtttccctattttcctttgtactctttctcctctcttaaatcgccactccattattttaaatttcttatcttgataaaacacacacacacacaagtattagaagaacttaaaccctcttatgttctcttcctaagcttgagtttaattcaagcaagaaacagatttcgagagaagagtaagcacagagatagagagaaagaaggcaccaaaccctaaatgggtctaaacccaagattttaatcttcttttcgtattttgaggcaaatg

SEQ ID NO: 24255 - DNA, 3000 bp, Unknown
  misc_feature (1)..( 3000): 2750-1469P.txt file - cDNA_ID_2172263; gDNA_ID_1620822; Annot_ID_169521
tttttgacaaaggattacctcatgtagttgttgccaacttgccattaaccatgatagtgacgcaggcttccaaaacatttcgacgcgagagccactatccgaatacttgaataatattattgttgcgattttttaaaaaggtcttgctgatggccaaaaataaaataataacaaaaattattgtatatacaatatataaacgtgacaaaatgagctgttgaatatgatactagtatagttcgtatattaatttattttgaccaattgtacattttcgtcatcggggatgtagctcagatggtagagcgctcgcttagcatgcgagaggtacggggatcgataccccgcatctccattttcctattttttgttatcattattttttcttgtcccggtttttccccacgtgggaaacgtgaataatttaactaagacatgtacttcttctcatctatcttcgtcgttgactcgtgaaacttttgacaacttgtagtattaagatccaacttcaaaccaacggcaattgcattttcagctaaaagcaatggagtcatcacttccccaagttgctgcacttgatcgttcaactctactcaaagctttcgacgagactaaaaccggcgtgaaaggccttatcgacgccggaatcacagagattccttcgatatttcgtgcacctccggctactttaacaagtccaaaaccaccttcctcctctgatttctccatccccacaatcgatctcaaaggaggtggcacggactcgatcacgcggcggagcttggtggagaagatcggagacgcggcagagaaatggggatttttccaggtgatcaaccacgggatcccgatggatgtgttggagaagatgatagatgggattcgtgagtttcacgagcaagacactgaagtgaagaaagggttttactctcgagatccagctagtaagatggtatacagcagcaacttcgatctgtttagctcaccggcggcgaattggagagatacacttggttgttatacagcaccagatcccccgagaccggaggacttacccgccacttgtgggtaagatttccaaatttgttaaattacgagtttgactatttttgcttttgtaacatgttgtgttcctcggtccgaagaaattatatatggtcgaatagtgtttcactactcgttagacgaatattaatccaataatacgttttcttttttaacaaatttttataacaattgaaatacataaatccaataataacttattcaaatagttataagcgctaggatttcgttgaagatttttacgcccccattattcattagtgtgtcttaaagattttggtggacattttttcagggagatgatgattgagtactcaaaggaagtgatgaaattgggtaaattactcttcgagcttctctcggaagctctagggttaaacactaatcacctcaaggacatggattgcactaactccttgctgttgctcggccattattacccgccatgtccccaacccgaccttactctaggcttaacgaaacactccgacaactcttttctcactattcttcttcaagaccatatcggagggcttcaagttcttcatgaccaatattgggttgatgttcctcctgtccctggagctcttgttgttaacgttggagatcttcttcaggctaactaactaacccttttggttttttatcagtggttaatcaatggactaatataaatctgacttttattacctcattgggtgcagcttataacaaacgacaagttcataagcgtggagcatagggttttggccaatgtagctggaccgagaatttcagtggcatgtttcttcagctcgtatttgatggcgaatcctcgagtttatggacccatcaaagagattttgtctgaagaaaaccctcctaattatagagacactactattacagagtatgcaaagttctacagatccaaaggattcgatggtacctctggattactctatctcaagatctgagaatgtgatttagcttgtctaataagggtgcttgggactttgattatatgtgtaatgccttcttttatgactgttaaagccatgcatgaaactgtcacaaggtttttttttttttaataatatcaacctatatcaatggttttgatgtaaaactaatatatggtttatatatacttatatagtccgaccatgtagatttgcatcatgtcatgaggatttggagcacagttttagtatatagcttgatgaattaatctgattgtatggctcctaacacggattttgcaaattcaagagtttaaatctcgtaataacgtaacattagagaatcgttcatgtttttagataaatgttataaaagttgtaatttttgatattatttctcataaattagctggtttccgacttccgagaggcataaaaaagcttatgttaaaatgtacttaagtcacatgttaaaatgcaaagtacttacctaattgtcaaatgactaaacactatggtagttatccacaacttaaaaatcaatctaaatgtccagattgatttcggtacgcgtcggtttccattgatgtttggttcggttcaattaacatatccacatataaccgatcggttttaaaacgaaattcctaattacccagaattgctcttgagaatcgatcactagtgtctctttctctccgccgtcctccaccgcttgaacatcgtgtacggatttggttagcatcgttactttcgtttgcttttgttcattcctttggatttaacggaaacttgatattttctgatcttcgtaacgtctcttgttcttacaatttctcaccttctttagagaattcaagcaattttgagcttctacgactaggttatacattttcgtgaaattaggtcgatttttggatacattattggtttatgtgttaattcaaggcagttgaatcacttgatgtttcaggtactgttgtttatctctatg

SEQ ID NO: 24256 - DNA, 3003 bp, Unknown
  misc_feature (1)..( 3003): 2750-1469P.txt file - cDNA_ID_2172271; gDNA_ID_1620822; Annot_ID_169523
cggaagtcggaaaccagctaatttatgagaaataatatcaaaaattacaacttttataacatttatctaaaaacatgaacgattctctaatgttacgttattacgagatttaaactcttgaatttgcaaaatccgtgttaggagccatacaatcagattaattcatcaagctatatactaaaactgtgctccaaatcctcatgacatgatgcaaatctacatggtcggactatataagtatatataaaccatatattagttttacatcaaaaccattgatataggttgatattattaaaaaaaaaaaaaccttgtgacagtttcatgcatggctttaacagtcataaaagaaggcattacacatataatcaaagtcccaagcacccttattagacaagctaaatcacattctcagatcttgagatagagtaatccagaggtaccatcgaatcctttggatctgtagaactttgcatactctgtaatagtagtgtctctataattaggagggttttcttcagacaaaatctctttgatgggtccataaactcgaggattcgccatcaaatacgagctgaagaaacatgccactgaaattctcggtccagctacattggccaaaaccctatgctccacgcttatgaacttgtcgtttgttataagctgcacccaatgaggtaataaaagtcagatttatattagtccattgattaaccactgataaaaaaccaaaagggttagttagttagcctgaagaagatctccaacgttaacaacaagagctccagggacaggaggaacatcaacccaatattggtcatgaagaacttgaagccctccgatatggtcttgaagaagaatagtgagaaaagagttgtcggagtgtttcgttaagcctagagtaaggtcgggttggggacatggcgggtaataatggccgagcaacagcaaggagttagtgcaatccatgtccttgaggtgattagtgtttaaccctagagcttccgagagaagctcgaagagtaatttacccaatttcatcacttcctttgagtactcaatcatcatctccctgaaaaaatgtccaccaaaatctttaagacacactaatgaataatgggggcgtaaaaatcttcaacgaaatcctagcgcttataactatttgaataagttattattggatttatgtatttcaattgttataaaaatttgttaaaaaagaaaacgtattattggattaatattcgtctaacgagtagtgaaacactattcgaccatatataatttcttcggaccgaggaacacaacatgttacaaaagcaaaaatagtcaaactcgtaatttaacaaatttggaaatcttacccacaagtggcgggtaagtcctccggtctcgggggatctggtgctgtataacaaccaagtgtatctctccaattcgccgccggtgagctaaacagatcgaagttgctgctgtataccatcttactagctggatctcgagagtaaaaccctttcttcacttcagtgtcttgctcgtgaaactcacgaatcccatctatcatcttctccaacacatccatcgggatcccgtggttgatcacctggaaaaatccccatttctctgccgcgtctccgatcttctccaccaagctccgccgcgtgatcgagtccgtgccacctcctttgagatcgattgtggggatggagaaatcagaggaggaaggtggttttggacttgttaaagtagccggaggtgcacgaaatatcgaaggaatctctgtgattccggcgtcgataaggcctttcacgccggttttagtctcgtcgaaagctttgagtagagttgaacgatcaagtgcagcaacttggggaagtgatgactccattgcttttagctgaaaatgcaattgccgttggtttgaagttggatcttaatactacaagttgtcaaaagtttcacgagtcaacgacgaagatagatgagaagaagtacatgtcttagttaaattattcacgtttcccacgtggggaaaaaccgggacaagaaaaaataatgataacaaaaaataggaaaatggagatgcggggtatcgatccccgtacctctcgcatgctaagcgagcgctctaccatctgagctacatccccgatgacgaaaatgtacaattggtcaaaataaattaatatacgaactatactagtatcatattcaacagctcattttgtcacgtttatatattgtatatacaataatttttgttattattttatttttggccatcagcaagacctttttaaaaaatcgcaacaataatattattcaagtattcggatagtggctctcgcgtcgaaatgttttggaagcctgcgtcactatcatggttaatggcaagttggcaacaactacatgaggtaatcctttgtcaaaaataaataaattgaaatctctgataaaaagataaaatatagattctgttctaatacgatatttagtcgaaactaataaaagagtatatacgaactttttaatgtctttgtaatttgtaaattccgttgtagttttgtaaatttaagaaagttttgttgccccaaaaaaaaacgaaattaaaaaggaagttttattcgtttgattattagtttatttagcttcttttatttcacctttgggccttacacatcaaatcaaacttaaaagttaaaaggaaaactttgggccttggcctctgggttatatactcttaaggcttaacccgacggcggtcaactaccggcctgaaataaccggtttttatttttcctttgtttctcttttcaaagtgctcactttcccggtgactctttagtcaaaatttcaaattaattcctctaaggtgccctaatcccggctgctcgtcgggggaaaataacccggcagggattgagcaacagcgtgagtcccaaagtgagagacagtgtgaatcccaaagtgagagagtgagtgttttagcgacagagagatatg

SEQ ID NO: 24257 - DNA, 3003 bp, Unknown
  misc_feature (1)..( 3003): 2750-1469P.txt file - cDNA_ID_2172323; gDNA_ID_1620822; Annot_ID_169542
actatatggtgcttttactctctttttaaccaatccacaatttcctttttccgtcccaaaaagtaaattacatataattaatagataatggcaaaacttccaatacaagtattagattaatatgtaaaatgagtatcaattagtgtttaaacttttgattttaaacactaagaacttgaatggttattgttattagatgctttgacactaattatagaaatcgcatcataccattttaattctttgtaagtcaaaaacttatccataacattaaaatattttgttttataaaactttatatttgacagcatttatcctctcataccaaaagtttatgatatcaaactagtataattatttactaggctaaactattattgtatgtgttttattagtttaaataaattttatagcggtaattgattcgcttatagatgtgttttggtcttggacatgaaaatacaaaggtccatataattcttctacttcattttttaatttcgttttttcccttaatgcctgttaggtgttcgatataattccgcagagagtgtgggtatatacagcgacgttgtggaacgcggaaactcaaaatagctccatatactctttgagatactatgaggttcctcctcatgagatcacttctggttcacccatgtggtggctccatcatcaatgtccgatcaacgactacgtctgctcaatatgtagcttccagatcaagagaccctgttttcgagaagctcatggacaaatacaagaaccttctcaaggtcattgccatacaagaccttaccctcgccaatccaacagctgatcctccctctctatccattgagtttctctccaggctctcccagaagctccaccttaatcgtggcgctgcttctttcctgcgaaagtatcctcacatctttcatgtcttgtatgatcctgtgaaagctgagcccttttgcaggttaactgatgtagccatggagatttctcgccaagaggctttggctatcactgctactttgtctcttgttgttgaccggttggttaggctcttgtctatgtccatatcaaagtccattccgcttcgtgcggtttttaaggtttggagagaacttgggctcccagatgattttgaggactctgtgatctcaaagaaccctcatctttttaagcttagtgatggtcatgaatccaacacccatatcttagagctggttcaggaagaagagaaaagactggaatttgaggccgcggttgagaaatggagggtggttgagtgttctaaggaggattgcagtgtcgatagaaccgagattcagtttagtttcaaacatagttacccaccaggaatgagactgagcaagacatttaaggctaaagttaaggaatggcagaggctgccttacgtagggccatacgaggacatggttggtaagaagaagagtagatccggtgtgatgggaatagagaaaagagcggttgcgattgctcacgagttcctgaatctgactgtagagaagatggtggaggtagaaaagatcagccatttcagaaaatgttttgggattgatttgaacataagagatttgttcttggatcacccgggcatgttttatgtgtcaactaaagggaaaagacacactgtctttctcagagaggcttatgaaagaggacgtttgattgatccaaatcctgtttacgatgcgaggaggaagcttcttgaccttgttctcttgggacgccatgctgctttatcagaatctgggaacactagtatgtctgaacaagaatgacattacgatttttcaggccctattgagtctgagctatgcaatcttccatatggaagtgtatgagacacttgagagattaggtccaccaagaatcaggcaatgtttctatggcgtttgtccgaatttcggactaattggcttgctcacaagcaaaagctcgagataatctgaaagcaggaaaagcgagttacttgatgtagcgtaagtgagtacttggatcaatacttgtctacgaaaccaatgtaggagtaaacggtctttgttgtgtacttttttggttatgtattgtcgacagaaaggttagaaactagtatccaaactcaatacgtcttctttctttagattttgcttggttgctaattgcttcatgtggctttccttattctactaaaactctcatctttgttcttgttctattttttacttttacatcctaatttttttgaaatattattttttggaataaaatttgaattctttttcttaacctttatcactaccagggtttaaattataagtttaattatataatgtaaaaattgtgaacgttatttatgtattgaatttttgatggatggtttttgtggaaaaaatggttatagaaaaaattgtgacaagaaatgagtgaaataaaaaccgagagcccatgaaaggaagccacgtaagctgttcggagccacatctcttgtcttcaaaagtaccaaacttcatttgcttctccaaacaaacaatctctttctcttcttctgccaaattccacaggtgcgtttcactcttagctcatctgtgtaatctcaagcattttctgctttgtttggtctgaatttctgaaatcttttgatgataaaaatttctatgaaatctcggtctgcttgttgcatgattcttactacctgggttttgttcagcaagtctatttgtctttatctgttttcttcttaatttgactttaggaatgtctaataatggtggattcatgtgttgaaatatagactaatgttatatccagtggcaatttctacaaatttttttatcttggagcatgaaaatgttccaatctttcttcatatgcgtcgctaatgatcgcttatgttgattatagtcttaccagaaacttgcatgttgttaaaggtctcgttttgtttggttgttctttgttcagattgtttttttttgttcacgccatggcttgtaatcgtctgtgcagatg

SEQ ID NO: 24258 - DNA, 3000 bp, Unknown; identical to SEQ ID NO: 7598
  misc_feature (1)..( 3000): 2750-1469P.txt file - cDNA_ID_2172425; gDNA_ID_1621154; Annot_ID_173369

SEQ ID NO: 24259 - DNA, 3000 bp, Unknown; identical to SEQ ID NO: 7602
  misc_feature (1)..( 3000): 2750-1469P.txt file - cDNA_ID_2172437; gDNA_ID_1621154; Annot_ID_173376

SEQ ID NO: 24260 - DNA, 3000 bp, Unknown; identical to SEQ ID NO: 7607
  misc_feature (1)..( 3000): 2750-1469P.txt file - cDNA_ID_2172458; gDNA_ID_1621154; Annot_ID_173387

SEQ ID NO: 24261 - DNA, 3003 bp, Unknown; identical to SEQ ID NO: 18552
  misc_feature (1)..( 3003): 2750-1469P.txt file - cDNA_ID_2172468; gDNA_ID_1621154; Annot_ID_173395

SEQ ID NO: 24262 - DNA, 3000 bp, Unknown; identical to SEQ ID NO: 7612
  misc_feature (1)..( 3000): 2750-1469P.txt file - cDNA_ID_2172472; gDNA_ID_1621154; Annot_ID_173396

SEQ ID NO: 24263 - DNA, 3000 bp, Unknown; identical to SEQ ID NO: 7635
  misc_feature (1)..( 3000): 2750-1469P.txt file - cDNA_ID_2172508; gDNA_ID_1972143; Annot_ID_179290

SEQ ID NO: 24264 - DNA, 3000 bp, Unknown; identical to SEQ ID NO: 7635
  misc_feature (1)..( 3000): 2750-1469P.txt file - cDNA_ID_2172508; gDNA_ID_1621154; Annot_ID_173415

SEQ ID NO: 24265 - DNA, 3003 bp, Unknown
  misc_feature (1)..( 3003): 2750-1469P.txt file - cDNA_ID_2172514; gDNA_ID_1972143; Annot_ID_179293
ctattcaatcctcacgcgattgaggagtgactgaccaaagtttatttctataggggcaatttaataactattgtaaactttcaacgtaaaaattaattactttgaagttatggggcaatatcatcaatagtaataaatataagcccttactcgtaaaatacaaaaggtttatttgttttctgaattgagagcgtgtaactactaccatcgtcgtctccgcgagttcttctctgcgtttaagccatagataacaaaccaaactaaaaaaaaaaagtttctccttttatcattccttctcttcccttgtataggtgtgatcctcttcaaggggatttctctggcgggtcatacattcgcaccgatcaaagtcggattggtctttcttaacgcaatcttgacccgattcaaaaaatttctggtatcctttttaagaaatgaaattaattgattccttgtcttccaaacgagtaaatcgactaattgattagattttgttcattagggtttgttagtgaatagataagaagataaatgggagctccgttagtgtgccacgggcattctcgtcccgtcgtcgatgtggcttatagtccggtgactccagatgggttctttctcattagcgccagcaaaggtatgatcttcgatcgatttgtatttgactatctatgatctttacttggaactgtgcctattttggattatgatttgcatagcgaatgtgctttgacgaatttgattttgctgccttttattatatatcgtctgaagtttgatttgtggctgatctaatggagaaattaggatgataagttgcatacattgttgaactctagctgaggtttctttgacttttgatatttcagattcgaatccgatgttgaggaatggagagactggtgactggattgggacttttgaaggacataagggagcagtttggagttgcagccttgataaaaatgctattcgtgctgcctcagcttctgctgatttcactgcgtatgttcttcttctttcttgttgcgttttcaagtcttttactttaccatttagtcttgcaatttcagtatcctccggtgatgggttgtttgcttaaagttataagttatggggaaactatgttcctagagaaaaatggttaagtgagaatagattaatgggatttaacactatttctttgttttcatgacacatttcaggaaaatatggaatgcattgacaggagatgaattgcactcctttgaacacaagcacattgttcgtgcatgtgccttttctgaggtaaactgtagtttcttcccaagcaaagagtgatttgatcctgttgccaagttttctggtttaaggatataatggtgggattcactaagattacttgtagcatttgagggtctataatcgttggtgtcatttgtgttactattgtggtcttaatgcataactatttatattctaggacactcaccgtttactcactggtggaatggagaaaatacttcggatattcgatttgaatcggccagacgcacctccaaaagaagtcgggaattcccctggttcaattagaactgtcgaatggcttcatagtgataatacaatcttaagctcttgcacagataccggtgacattaggtatgccaccacgtcgttccttgggtttagactcagtcctttagtattcctggtttcattgttcttttgtgtatgtcctctgtaggttatgggacataagaagtgacaagattgttcatacattagaaacaaagtccccagttactagtgctgaagtaagtcaggatgggcgatacatcactactgctgatggatctagtgttaagttttgggacgctaaaaagtaagttaaaaatatagaaatgcatcctcagttacagttttatcgtttttctttgatggttgagctttttctcctgctctcctagttttggattgctgaagagctatgacatgccttgcaatgttgaatcggcatcgttggaaccgaaacacggtaacactttcattgctggaggagaagatatgtgggtgcacaggtttgatttccagactggagaagagattggtaagtttcttttaaaaaagaatgaagttttcattttaggaacctgtgtgtatcctttaaagccaatgtggtgaatgtagggtgtaacaagggtcatcacgggccagtgcactgcgtgaggtatgcgccaggaggggagtcatacacctcaggctcagaagacggaacggtcagaatatgggtggtgggttcggtaaaccatcctgaggagagcaatctaagcggccacgtgaagcttgtggcagaggaggttgtgcgtaaagctgaaagtctccgtatcagtgagaaagccgcagaagctaaatgaaacaccatcgttagcttatgatatcacatagattcatagttgtttttgcatcattataagatgtgacaaaggggttttgccttttaaaagtctctcagaccgaataaaacgaaataatcttcaactatacttgagtgaatagtgaatctaatccaaattttgacaagaaactttacaacggtatcaaaaatatctttaaacaactgtatgtcataaatagttgcaagttttgaaagcccagttgaaactagaggggcccagaaattaagcaaacatcaaatagtcaaatacaaagaaagtgtgaaagttaaaaccctaaacccttaatttgagctctctgctctcctggttttagttttcctctatttcgtgctcaattcgcttgttctccagttccactctgtaaggatctgttacttttctgtaatcctctcaaaattcaatgcttttgcttactgggtctgatctttgcaagtgaaatgcatgacatttcgtccaaaatcagaccttgcaaaaatggtttcttttttacctaatctgtttcgtctgtgtgttttgatctttacaaaagcagatcagtgccggcggcgatattgtccgaggataaaacatg

SEQ ID NO: 24266 - DNA, 3003 bp, Unknown
  misc_feature (1)..( 3003): 2750-1469P.txt file - cDNA_ID_2172582; gDNA_ID_1620824; Annot_ID_169627
gattccgggagagagttcccggcccagacgtagcaccgttggtgtgaactgggttaccattgtgtgtgtgttctgttctgcatttctcattacaaaggttctgtttttggttctaagtcgaagttggttctaaagctgaaacgttcttggtttgtggtgtgttaatcttcacaaaatatataacttcaaactttaaaagaaggaaaaaaaaatcggtgaaatttatttgaaaaagcaatttggaataggtcgaacagaatgttataaaagctcgttgttgacatatatataattcgtacgaatgtacttcgctgactttacttctacttacatcatacagaatacgaatccttttgataaaagttattagtcgtgttgatttcgaaatcgcacaaccactgttattatacaatcactaatccaaaaccacctcattcgttgttaaagctaatataaattcatcctaccaaaaaaaagctaataaaaatttatttggaaattgcaacgaaagatcttaaaaagtttaatgttttatatattcggattatgttatgattggtatatgaatcgttttagttgaattggtatataatttggtggtcaagtaggtttgcataaaatttaaatactagctagctttataaacttacattatacataagcacatgcctctcataacatatattggattttggccttttggtcgtttgagtcaagcaattaaaattttatttgaagaataaatttaaactatcaatattcaatcatgccagacgagtcgttaaaagtcaatggaattattggttgataagatgagatattttcgatcgttcttatgactatctagatatgaagatgagtcatacaagctatgagttcaaaaacggtgtaattttgccttgtttgaaaggacacaacaattatgaaattgtgttagtttaataaaggtttatgagtctttaagtcaagacgacgtgcataatcatatggaatgaacaaataattaatcttgtaagcttaatattgttactttgctagtaagttctgaatttaactttgaccaaaactaaaaagttttgaatttgatattcactttgttatacgcatattttagaatagcaatgaaattggaaaatttaaaagtagtattgattttttttttttaatcaaaggtttgttttcattccattagagtagctaacacatacaaggataaaaggactctaagatcccaaaatttagaacaacataataaagggtataccccaaaattactaacatgaaaataagagagtagatagagttaatcgacaaattatcttttgagagctttgaaccaaaagctaaggggctttgtagaacatgtaaggtcaaggtttgtcgaagtttcttccaagagcgagtcattgggtgaacgaattgttaatgtcgagagatgaaatatcgttgatgagggggctaaagataagcttctcgccgacacgaggagaactacacaaaatagtgatttagcaactgttcgggcaatggtggtggtgtcgcagtgagggtttaagggcatttgaccaatgttgagcaagtaaacaaactcgcaacttacggtatttggtgaagctattataagggttcgcacatggagagagtgtaaagccgtaacataataggtggatcctctctcatattgattatgacttcgatgatgctaaatcacaatttggtattgtgcatccgttcacaaaagttaattaaatcattcgaattgtatgttctttggcgacccgtacgatacttgtttgttgataatccacacacatgggctgaggaaagttttaacctacggcctaagtactaatcacattctttaatcgaacttaaggcccaagtgctaaatcacgacacattcttttaatttcatcagagagacaataaccgtaacagcgcaacaaataacaaactttaaagacaaaatgtatttccaaagagcaaacgtgaaacagaaagatcgtggtcataaagacaacatcgtgggttcaagatgactagataaacatgagttatggaccttacggttttccaaaaatccattttttaaccattcattattggattctaagaatttttactaatttcttaacaaaatccaaaatctcatttcaatgggtttttttcaatttcctctacgagatccttttttctttcaattttccatttgattttttttttttttttttacttttgttacaaaatccaaaaaccaaaaactaaggccatgaatgtttgtaattttaaaaatggtttttggattttggtttttggtttttagtttttgattttcttggtttttgtttttggtgtagattttagtttcttaaaaacttgaatggtagtttgtttagattttggtttttatgttaatggataatatttttgtaacaaaaaaatctaaaaataaaataaaagaatgtaatggatggttttatgattttggttttctttgaaaaattgttaaaacactcaaacactagattctctattttttagaaaaacttatttttttcaaaatcttgaatggatataaaatagattttgaaaaaaactaaaccaaaatctagtttaaaaaccacacccattcaaggtcttaaaactaaaatatttatgtattagttttaaattacaaagataataaaattgaggacagttgaaaaagaagaaaaaaaagtttgtatgtatttggaagttatttttctcaagtagaatactgtgaaagacgattcaacatcccttattttacggttgtgtcaaggaacattcgagaactttttttaataactccttaagggacaagttctctctgtttttcttttttcaatagcttctctgacactttattctttctttctgatattataaacctccgatttggtttagttcaaaactagaagcagcaaaattctgaacacgtaaagctttgtttcactcagtgtttcccgatcagatccaatg

SEQ ID NO: 24267 - DNA, 3003 bp, Unknown
  misc_feature (1)..( 3003): 2750-1469P.txt file - cDNA_ID_2172586; gDNA_ID_1620824; Annot_ID_169628
acgaatttgtaatctcttttgagcaaaaactacgtcttcttctttttttggtattattgtatttcagactctgcattcagtaattatttcatattttgctaattttgtttctgagttttgttaaaatgctttagatctcggagattagaattacatgttcagtgtgtgtctgaaatttagtaagtgcattaaccatgatcatgttcggtcgctactgaagtatgataagctctgtatcattcaattacttcatcattccttccacttttgccccttgtggactaccacagatgttacaagacaaaacataatctgtaaattgctaatctctgaacctaagacttgatatgaaacatttatttttattcccaatcgttttataaagattctgttgcttgcacaatctcattcaccacactactcatgtactcccaggttaatcaatcaagtttatttgtgtccgaaaaaatggaaaaatatgagaaattcccatccaattttaaggattgtttgaatgatcaaagtatggttgttttagagaaatgaccttaaacacccaattttacgttgttctcgtccaaaactagcggaaaatttataaatttttcaaataccacaagatagtaagagtttgtaagttatggtaagttcagaagaaaagaaaaatacataaatgatagttttttgagaattgaatgcatatttcgtcttagagtcaattagttacaattaacatgattaattaatagttattttgttgttttgttatttgttgtttgtatgaaatggtgttgttatatatacattggatactcttatagaagttgaagctgcaatttcttcgttgcatgacttcaacatttgatactcgttagtcaaaatctttttcgttacatcagactcgatcaggccacataatcatatttagaactaaattacaatcaattacgtattgttccaaacttccaaaagataattgaccacaaacactcatttccaacagaacatgactattactgactgactcacaagcatacactaataactatatccatttctcaacatatatctttacatccatttctcaacataaaggattgaacaaataacttaatttttcatcaaaattaacaataaccctatccctatgaattctcaacaaaaaaaagtttaaaacaacactagctacgagctctcaaaatgtttggtcgtgtgttcgagaacatttatataattaagttttttctcaacttatataattccatttagtgaaaaatctatagatatatttatataattaagttttttctcaacttatataattccatttagtgaaaaatctatagatatatttaaaaagtttactatttctttttggcggtttagagagcaattgttttttttaataattgagttagtatgtttgagtggtcgaactacgtattcactaattaaagacattttaatcttgacatagtcataccattttacataagtatggctaaatcaaaattaaaatgatcttaattagcgcagtgcctaactaaagttattttaattttgacatagtaaaagtctagtttatacaatcgcctttatagtgtataatgtattaaataattctaatcaagcaagtgttttacgcaactgatgcttttgttgaaatacattattagaatttagattaatatataaaccgatgtgaacgttatgaatttaaaacggtgttggctagtgaatgttgtgaaataaatatcagtaaattatgcacaagtcacataactttcagagattgtgctacactgctacgcctatcattcagcaacatgattttttatctgtctagttatctcatgttatagcggtttagtcgaataatatatgattaatcaaaattttacacacaaaatatacgttcgttaattgtatcacatcatcaataataaaacaaaagatcttttgactcgagctaagtaaaccacgttacatacgtaattgattctccaatcttctttattacctttttcaaaaagtatgcgtatgagcgaaccgatgagtaagtaaaagtgatcgttgatctgttggagatgagagtttgtgtaattgacttcatcaatctcttaactaaaaatagcaatgcgtgagggaaatgtttttcaaaagatgaaaagacacataaaaaccaatggaaaatacaacatcaaaagattctttacataaaatggtaaaaagaaaaatttacaatcaaagttttctttttagaaaactggaaacccacgctaatgcgtatacaatactcatcagtatatgatatatcaaatatatagccacatataataagtccattattaaaaagtaccgttattatcatgaccaaaatttaaagacaatacacacgtacaactaatattatttattaagaacataacaagtattattattattagaagtagaaatttttttccaaaagaggaaaacgaaaactttaactttatttacttacctaaaaaccttaatttttgacacctctagtgggttattataatgtcgttttcgatcgaaagtgaaacagagagacagtggacgcaagaaaaaaaccgtgggtggatgaaagaaagtaaacatgagatttttgtttttctttgttaatggtttccttaaataaattacaaacataattataattaagaagagagtttcaaataaaataaaatgaaatgccacgtcttacagttgcatctgactctgttttatgttaattgtgacacaagtttaatacagttgtactttcttactttttggtggtttcgtggaagattacgacaactttacaaactctacgacttaagcttctctgttcctacaccttttgttcttctatttaaagccctctgatttgttacttcacattcacaagttttgaaagcaaacacataaagaaaattctagttcaatcttttgtcactcaagagtcttcccgaccgtatccagtcaaataccatg

SEQ ID NO: 24268 - DNA, 3003 bp, Unknown
  misc_feature (1)..( 3003): 2750-1469P.txt file - cDNA_ID_2172593; gDNA_ID_1620824; Annot_ID_169630
tagccgagaccaaacttggtctagtgactcagtgtttcttgaccatatctgccattaaaggagaaaccgtttctgatcagtacttggcaaatctcgccctcaagataaacgcaaaggttggtggaacgaacgtggagttggtggataatattttctctttcttcaaaaaagaagataaggtcatgttcattggtgctgatgtcaatcatcccgctgctcacgacaatatgagtccatccattgttgctgttgtaggcactcttaactggcctgaagctaaccgctacgcagctagagtcaaagctcagagtcaccgtaaagaagagatacaagggtttggtgaaacttgctgggagcttatcgaagctcattctcaggcccccgagaaacgacctaacaagattgtgatattccgtgatggtgtcagcgatggtcagttcgatatggttctcaatgtggagttacagaatgttaaggacgtttttgccaaggttggctataatccgcagataactgtaattgtggcacagaaacgtcatcaaacccgtttcttccccgccacaactagcaaagatggaagggctaagggcaatgtgccttcaggtacggtcgttgataccacgatcattcacccgtttgagtatgatttctacctctgtagtcaacatggagcgataggtacaagcaaaccaactcattattatgttctttcggacgaaatcgggttcaactcgaatcagattcagaaactcatctttgacttgtgcttcacgtttactcgctgcaccaaaccggtcgctctggttcctccggtttcttatgctgacaaggctgcttctagaggaagggtgtactacgaggcaagcttaatgaagaagaattctaagcagtcgcgtggagcgtcttcgtcttctgcctcggttgcctcttcatcctcttctgtcacaatggaggacaaagagatcttcaaggttcacgcaggcatcgagaactttatgttctttgtctgaaaaaaagtttgatcttaaaatatttatctaaataagaacgtctcattaacgcagttcttactcctttttctgattagaaaggatgtttgtgcgtgaatctaatcgttagatatgcagtttgtttgtttccttttcgttgttggtgtgttgaaaatagtttgtatttggtattgtaatgctctttagagctgaaactatgtcatgttatggtattttattatagttttcagactttggattcaataaatagttcatattttgctacttctctgttttgtgaagggcttgagaactcagacatgagtactctagttttgggtttacatgttctgccttgtgtctgaaattccttttttctaaaccatctattcatgtggaacattatctataaggttattttgtgtaatgatcaattgatcatgcatctctactttttttttttttttttttctttttttttttgtcgtcgatcatgcatctctactacatatgcattccaacaaaaaaaacataatggtgctcttgttttcgatataatatcagttatgggctctctgtttttattttattttattggaccttactgatatttcttgggttcatgaaccatagctataccaaatcattaaggtggattttgcacgatttctcaatgtttaatttcatgtattatatactcattgattggttgtttgcagaatcttatttactacattgactctcaagagtcccctcctatatttcatcaaatctatcttttcattttataatttttatgtaatgatagattcctcataaatgtttcttgaaaactataaaaaggtaactaacatttttttcctatatatatatatgtgtgatatatatcccatataaaaagtagcaacaagaaaatgattttagagaagtgataccaaaccaaatgaaaaagacatgatagtcgaagtgattcacacgaatcgaactataataatctatactctatcttattcacattttatcatctttttgtgtttcatgttattttcttatgtatatattcatttttcgtatattcttttgtttttatcaaaataaattcatttttctttttaccccactcattaacataagttagccatatattattataagatttttttcttgccaaataaatgtaagagtttctttttcccacaactcattaacaaagtttggcatatgtaaaaaaaagaatgaattttaaacctaatactagcctttaaaattcaacaattattttatttttattttcttattttcgtgcaacagctggagtgttttttttttttttttttgtgttcccagagatcgagtgttttgtgtttcttctctctatcgttcacatttgattaaagctaaagctttcttcttcttcaattgatgctacttctgatttaccctttctctgcttttttctctcactctctcagttttctcctccttgattcctaaagtcttctcctttgcgtgcatttcttcaattttcagattcttcctaaggtacccttctcaaaattcttccttgttttgcgattcttcatcggttcaatggatcctctttgacttcgattttgaatccgagcttcgttatccctcgattgctaatttcactcttttgtttaggattctttccccaatctaggtattgctttgcttctctgtatctatcgaatctgcattttgttagtttcgaaaattttgaaattagggttcatttgtgatttgttcatacatctttgttagattgcagaatctgttcatcatttttcgaattcacataactcagattagtttgaatctattgagattgagaaatttcttaaaaactctggatttgtgtggattaagattagtgttttgagattgatctctttgtcaatatggttttttttggtgtaggtggtagaatgatgaaatgagaatcgatagataagagtttaaagagcaccagaatctttgttatcttgcaatg

SEQ ID NO: 24269 - DNA, 3003 bp, Unknown
  misc_feature (1)..( 3003): 2750-1469P.txt file - cDNA_ID_2172606; gDNA_ID_1620824; Annot_ID_169633
cattttaggttatattttcctagacaaagaatccatagggataaggagtgaatcctgaacaaaacccaattgagcccaatgaataaaaaagacatccaaagtaggtttgaaggaaaggatagtccatgctccctccatgtagagtgagtgatggtaagtaaatgtgtcttatgaagctatcgacaccaagttggagataaacaaaattgaaaagccaatgtacgtatgatgttgattcaggattaaaaatttataatatggttataaagtaacatatatcgtggatttgaaatctgaaaaagtcacgtactgtatgttgaatatgtaaggtgtgttaattgtaaatcattatataataacaggttcaaagaaaacgagtagccacctgccgatgcaaatttttttttgccaattacagacaaatcaaagatttgggattggagaggagaagatctattgaaaccgacacattaggtccaaaacatttcattttaattattatgatttaacgaaatagtaaaatacatatatcaacctttttggtccggtccctgttcttacgtctgtgatcataaagtatagagtgattttttattttttttcattatacaaattacaaatgactaatttaattaattagtgaacttttaatttgtcgataaccaataagaatgatggaaaacggcaaaagagtcgactgttgaagtttgtcggaaagacactccaccaaaatataaatacaaatcttatcactagtggaaactgtcgagtgtgtgtagttctcttttccttctaataaaagaatattatctttctaaattcttccaaattcattttggaattttctttcctttttctttttgttgacatgaaattttggagtcttcttctatcgccaattacgactaaaaaaacgattttatatatatcaacatagctctaacaagaacatgataatcgcaaatatacatagatttgcctatttgtacacaagcaaagttagttttaatactcagtatattacatctcatgaaaagaatttacagttttttctattaaagctgtgggagttttcttctaaaatgtttttttttgtcgtccttgtaaaatgttctacattcgtcattttcaggctatctttgatttcgaaagctgtgggcgttttctttttttaatttttttaatttttttttttttttgtctttttctacgaaaataaaatagcgtgcactgtattgtttctttcaactttattttttgactagtgaaagactagacattttgttgccctgcccctatattttttgtgtttattttaaggttgttttttctctttttataatgaccgtaaaatgagtttttacaaaatctgcttcaaatatgtaatgaaaaccttgataatatgtaaatgtactaaaaacaaaatcttgatatgggtacatgtgaaaatagtatatttctgttctaagaatatactgttttatgttctaaaatatcaacaaatagatatctttgcatttttttttatacatcaatattagtattacctacattgtctaagagatgtaacccaacttatgtcgcaactagaactacatctcagaaatcaccgagccgagagaaaattgtaagagtcctcgaccagcaaaacgtaggaacatcaactcaaagcagtcgagaataagaaccactgacttgcatcaaaacagaagatctaaccacaccacacagaatccgaaaagaagacatccaccatcgtttaaactttcaacccttgacccaaccaccggtgataaagacttgtccattatagtttactaaagtttatgatcaaacttaaaatatctgttgttagattgatacctctaattcctttgaattgcttcttagatttccactttacccttccacgatttttaagcaatggaaaattaagtttcatttgtttcagattttaatattaatccccttctatgcaaattgagggaccacgtagaaagttgtgagaatctcaatacacaaaagatatagaaacaatgattacatgcacaagcacgaggccataaatttccttatcctatacacattttcaataaagatgtaacattccaaacagaaaaccctcttgtagctcactctacaaaaaaaagagtatagaattccaatattaaagtttataggtcgactatttcaaaaccaattgctataaagtaaattgattaatatttttatactttcttcgatttataatataagttgttttggaccaatttttttgttttacaattaaattgtttttaagtttttatgcaaactatatatttattttaatattttataattatttatattatgcagtctcttttgtgattggttgaactttttaaaagtaaatattcttaatcttcgtacttttaggtaaaacaacttatattgtgaaacggagggagtatatcatttacaatttctctttatttagttttgtggtgattccgaatattaattacaacttgtaccatttaattcaaccatattcgaagaaaacattaaaggcaaaacaaattaaggggaaaaagaaatcaaaagttaaaaaaaaaaattaagaccaatgagaatagataaggggtaaaagacaaaaagagaatataaaaaaaacaaatagcatttggcgccaaaagtaaaactaaaatggtcatgtcacgtgatgttaatttttgctctacgaccaaagcaaaacaaacctaaagttttccaaatctctgggtcccactctcagatgtgctgacttttattttttttacttttgtcttaaatctttggaaattttcagttttaatttaatttaattcatctctctttctcactctataaatccccacagatccgtcacacttcacctagagaccctcccacagctttctcgataactgacaatccaacggttgagattcagttcttctagataaattcacatatccaaaggacacgtggcggcgagagatg

SEQ ID NO: 24270 - DNA, 3000 bp, Unknown; identical to SEQ ID NO: 5904
  misc_feature (1)..( 3000): 2750-1469P.txt file - cDNA_ID_2172610; gDNA_ID_1620824; Annot_ID_169634

SEQ ID NO: 24271 - DNA, 3000 bp, Unknown; identical to SEQ ID NO: 7244
  misc_feature (1)..( 3000): 2750-1469P.txt file - cDNA_ID_2172709; gDNA_ID_1621134; Annot_ID_172591

SEQ ID NO: 24272 - DNA, 3003 bp, Unknown
  misc_feature (1)..( 3003): 2750-1469P.txt file - cDNA_ID_2172861; gDNA_ID_1621125; Annot_ID_172239
gcattaaccagtgtatactctacaactatttgttcagattttcaaaaatgttataaaaatttgatataatgaaaatatgcatttgagtttgtgtacagaggaaatactacattgctaatatttgaaggcaaatgtggatcttgaatcagaagaagatatgatttagaatcagaagagaattaaagccataaatgcaatattgcacaatgattattttatcttatgttatcatcctctaatatgcatgtaaatgctaacatgcatattctttattatttacatggtaattactaattagcgtaatttgatgatacacaatcattttttttttgtcatcgatacataatcattcctatccatatatctcaacattaacttttaggtaaaaaaattggaaatcatttgactgtgtcttgattataataaagacataatatatccataaatgctgattggtgatcaactaggtgacattaaagtcaaaaactctattcgtgataatccaaacaaaggaaaaatacagaaaagaaaggtgtacttaccacaagataaccaaagaaacaaacaaaccgaaattttttctataatactttgtatatatcgcatccaaaattgttttataccgcatgttttcattaggaacttaagtggcttatgagctgacaacatatcatgaattttaaaaatatatcagttcgattactatagtaatattttaggtagacaacaaataacattataaaatttcaaacacttaaaagatcaaatttacttaaatttgcaatgtacaacacaattgacaattttaaatggagacgtaagatgtatgacacctaaatttgcatatactgatatatatacatatctaaatttgttcctcaccatgttactataaagattttctttgttcctcaccatgtattggtcaaacgaaccttcatagcttctgtcatattttgagagttttattcaatattcataatccgagttgtggtcaacacaagttgttaagcatcacttctccaccagaccgattaaacttctttctttattcaataatcaaatcttctgataactagtatacaaaaagttataaacttaaatagttctccatctgtcatgtaatgttaccaagagactattactaacagtaccattgcaaaaggctttcaattccgttgtgtagtaaaaatgataggtccaaatcggtgcccaaaaagctggtagacaatgttggatatatatgtaaatatatttctcagaagattaaaaatacttgtaattctcttccttttttctcttataattgatgtttgcattcagctgttgcctgatgatatgacttcacattgttattgtattggtttacaaatggttttaaaaagcgaaatgttgtagttagtgaagataaaattacaaaatttctagataaattatacaaaacgtatgagtagattgtttccaattacaattcttgtgctttatataaacaactacaattattgatttatgtaaatttttacgaactatttatgtatatatgatttgtagacttgtagtcttctttctctctaaacgaggttcaaactcggagataacttataaaatgtttctatatgcataaaatcgagtttgattatgttataaatcacaccgcaagtgtatttatgaaacaatggggattgcgaccctaattctattcctaacaagtagacctttaaccatcgaagtcaaaacaataaaaagtgctggcgtaatgatcggcagatccgaaggaattgcgatcattaatggttgaattttatgcaacatgcacgatctatatttatggggatttgatgcaaattattttaatttcacttatgactacggtcgattaagatttaacgaaaccatttacattactatacattataatagtcgaataaaggcctttgtaaaaacgtccatgggcttttgtaaagaaaactaaatggagaaatgtgctgaagctaaacgaatccaccacattaattttcctacacgagtttctcctattttatttcctcacctacatgaatcaataaacttaacactatcgcgcgacccatgggctaagtagctgatgctttttagcgaagggcccgcaggcaagaagagcaaaacattaaaacgcaccgttttaaaagttgccgcgttggaatatcatctgcgtgtcgctagtcaatgggacatcaaaatttcattattcaccgtccatgactcgtctcccaccagcttccttccacgaaccaaacttggtttcaactttcattattaatctttttttttttttttttgcaactttcattattaattatttaatgttctcttacctgtacaaaatttagctaatttcatatttaaaaaagaattgactaaaaggaaagaaatcccaaacaagataaaattaataaattttctacggactcttgaccaaaaccaaattctattctccctgggaacaaaataaagaatttattctaaaaagtaaaaaccctatatatataccaaggaatcaatagaggatcataattttacacaccttttttttttttttttttaataatatagctctcgtcgtttataattttttttttttcgtctggggcaaattgtaatctagaaacgacaggaaccaaggtttggatcctccccctcgaactctacgattcgttcttattctcaatctctcctccttgttgttgttgttggatattgaattctcggattgaaaactcgagatccgtgttctgtttttttttccttcccgattcaacacgatcaattggcaattcgttgtttgcgtttcctgatccgttaaagttgattgcttttttattaaatctgcaaaaatattctgacttttatgcttttggatttaggtagctttagaaattggacgatttatttcagctcattacgatttgatttgaaagatcgttttttttttgttcagggttacgaaattgaagatcgaagatg

SEQ ID NO: 24273 - DNA, 3000 bp, Unknown
  misc_feature (1)..( 3000): 2750-1469P.txt file - cDNA_ID_2172861; gDNA_ID_2926198; Annot_ID_141373
ttaaccagtgtatactctacaactatttgttcagattttcaaaaatgttataaaaatttgatataatgaaaatatgcatttgagtttgtgtacagaggaaatactacattgctaatatttgaaggcaaatgtggatcttgaatcagaagaagatatgatttagaatcagaagagaattaaagccataaatgcaatattgcacaatgattattttatcttatgttatcatcctctaatatgcatgtaaatgctaacatgcatattctttattatttacatggtaattactaattagcgtaatttgatgatacacaatcattttttttttgtcatcgatacataatcattcctatccatatatctcaacattaacttttaggtaaaaaaattggaaatcatttgactgtgtcttgattataataaagacataatatatccataaatgctgattggtgatcaactaggtgacattaaagtcaaaaactctattcgtgataatccaaacaaaggaaaaatacagaaaagaaaggtgtacttaccacaagataaccaaagaaacaaacaaaccgaaattttttctataatactttgtatatatcgcatccaaaattgttttataccgcatgttttcattaggaacttaagtggcttatgagctgacaacatatcatgaattttaaaaatatatcagttcgattactatagtaatattttaggtagacaacaaataacattataaaatttcaaacacttaaaagatcaaatttacttaaatttgcaatgtacaacacaattgacaattttaaatggagacgtaagatgtatgacacctaaatttgcatatactgatatatatacatatctaaatttgttcctcaccatgttactataaagattttctttgttcctcaccatgtattggtcaaacgaaccttcatagcttctgtcatattttgagagttttattcaatattcataatccgagttgtggtcaacacaagttgttaagcatcacttctccaccagaccgattaaacttctttctttattcaataatcaaatcttctgataactagtatacaaaaagttataaacttaaatagttctccatctgtcatgtaatgttaccaagagactattactaacagtaccattgcaaaaggctttcaattccgttgtgtagtaaaaatgataggtccaaatcggtgcccaaaaagctggtagacaatgttggatatatatgtaaatatatttctcagaagattaaaaatacttgtaattctcttccttttttctcttataattgatgtttgcattcagctgttgcctgatgatatgacttcacattgttattgtattggtttacaaatggttttaaaaagcgaaatgttgtagttagtgaagataaaattacaaaatttctagataaattatacaaaacgtatgagtagattgtttccaattacaattcttgtgctttatataaacaactacaattattgatttatgtaaatttttacgaactatttatgtatatatgatttgtagacttgtagtcttctttctctctaaacgaggttcaaactcggagataacttataaaatgtttctatatgcataaaatcgagtttgattatgttataaatcacaccgcaagtgtatttatgaaacaatggggattgcgaccctaattctattcctaacaagtagacctttaaccatcgaagtcaaaacaataaaaagtgctggcgtaatgatcggcagatccgaaggaattgcgatcattaatggttgaattttatgcaacatgcacgatctatatttatggggatttgatgcaaattattttaatttcacttatgactacggtcgattaagatttaacgaaaccatttacattactatacattataatagtcgaataaaggcctttgtaaaaacgtccatgggcttttgtaaagaaaactaaatggagaaatgtgctgaagctaaacgaatccaccacattaattttcctacacgagtttctcctattttatttcctcacctacatgaatcaataaacttaacactatcgcgcgacccatgggctaagtagctgatgctttttagcgaagggcccgcaggcaagaagagcaaaacattaaaacgcaccgttttaaaagttgccgcgttggaatatcatctgcgtgtcgctagtcaatgggacatcaaaatttcattattcaccgtccatgactcgtctcccaccagcttccttccacgaaccaaacttggtttcaactttcattattaatctttttttttttttttttgcaactttcattattaattatttaatgttctcttacctgtacaaaatttagctaatttcatatttaaaaaagaattgactaaaaggaaagaaatcccaaacaagataaaattaataaattttctacggactcttgaccaaaaccaaattctattctccctgggaacaaaataaagaatttattctaaaaagtaaaaaccctatatatataccaaggaatcaatagaggatcataattttacacaccttttttttttttttttttaataatatagctctcgtcgtttataattttttttttttcgtctggggcaaattgtaatctagaaacgacaggaaccaaggtttggatcctccccctcgaactctacgattcgttcttattctcaatctctcctccttgttgttgttgttggatattgaattctcggattgaaaactcgagatccgtgttctgtttttttttccttcccgattcaacacgatcaattggcaattcgttgtttgcgtttcctgatccgttaaagttgattgcttttttattaaatctgcaaaaatattctgacttttatgcttttggatttaggtagctttagaaattggacgatttatttcagctcattacgatttgatttgaaagatcgttttttttttgttcagggttacgaaattgaagatcgaagatg

SEQ ID NO: 24274 - DNA, 3000 bp, Unknown; identical to SEQ ID NO: 24273
  misc_feature (1)..( 3000): 2750-1469P.txt file - cDNA_ID_2172861; gDNA_ID_2926198; Annot_ID_201612

SEQ ID NO: 24275 - DNA, 3003 bp, Unknown
  misc_feature (1)..( 3003): 2750-1469P.txt file - cDNA_ID_2172926; gDNA_ID_1621125; Annot_ID_172265
tttctgcaggatgtgatgagaagtttagattgcacgggactagacgataggcgaaaggtgaatgattacgcgatgagcgagtttgaaaacttggtcctatgtgtttaaaggtcagttcctgattgcagtattcggatcatttaggtagaaaaaacaatgtgaacaactgcagagatacattaccagattgaagtctgtatttttcttctctttgtgtgtaaatatgaaacgaaggcggtcaaattatatataagcttcttctttcttccgttcttatgaagttttatgcaatcatagaagcttcttgtttgctgcagagttctgttataagtttctacttttgatagcgtggttatctgaattccaccaagtccatttttcctcttactatataaatatcgagtaatttggctcgagttagttcggtttctttcagggttggtttttcttggcagccgatgaattcttggattcatcgaagtagccatcaattagtaggggttcaggtttttgttgaattgtgcttagtagtttgggatatagtagtgaccatattgtcatttttagttgttacaaggctctgaagtctgaaccatattatatataggaagaattcatcaaggtgcgatgatatttctatcatttgttgagatcaaaccttcgatttatacattttggaataaccagagtcgcagtctcacgttttcatacctaatgatttagagtgttcactcaatctccaagttagagcaggctaatttcggcaaaactcttacctgcaaaccattatttggtatatgtgagtgtacataaattgtcaccggaattaaaccatcaaataacttgtcacaagcactttttctgcatatccgaattcgatgatgtgaagaaaatggttgtaccaattttcaattgcacatatgtctgtcattttcagattatgttacatgtaaaaaccaagtatggttattatattttgttttcaaaatgagaatcaaaataatagaaatcagtaagtatttcttatcatggtagtttactttgattggttatcttattctgtgtaagctctcgacgattttattcatattttgaaatactatacaaaagtcatgatgtgtgtacattttccattaggactttctagacttgagcattattttccttgatagcttcatcgacgtttaggccctgaaatccaaataaacaaactcataattaaaatcctgcttttctaaagtaacaaagaatattaagtgataaagattgggagaaataattacggaaaataatcaatgttaataatcccagcgacaggattagcgatctgagcaaaagcttctcgagaaagatcgagcgtagaagcacagccactgggacaatggtcaacgatcttgaccttcacggatttccccgtgcaagggtgaggcacggcgttacgaggtccgctgcatttcacggtgaacattttgccacaaactcgaccattgtcccataatgtatcactcgctgcagcgatcatcactccttcttgagtacctctgtaacatgctgatgctatcaaacatgaaataaaagaaaatgattttataacatttcgctgtaggttgatatgaaaatgtataagataagtttgttgtttgtatttgttttataattttggtagtaaaacacacaaaaattcttacgagtgtaacttgtgtaaaaagttgcaatcccgggagttgcatatgagaaagagaagagaaaaacaagaacggtagaaaaaaacacaatacttttactcatgattcgtatttatttgtaagagtgtttatctttgaaatgtgacatatctatttatatatctgctatatattatatgactaactctaaatatgcatgtattgtaattgtttgccattgaaatatctttgactgttcccattttttaacatgtgtatagttgtaaatttgttatatttaatttcttcttatctgtgttgactaaaggtttagaaagattgttatcctcatttgatagcaaatttacagccaaagactccagaaaacgtttactaactacgctgatcaaatttgccacgtaaatttatatgaacaatctcataaaaacaattcatcaaaaggaaaaaaactctccttttataggtcctaaatgtagtgaaatcaatatttatggactagtacatatggaacagttatgaggcgagcgttaatgggccgaacgagacgataagagacattattctaaaccaagctcaaccacgaagataaccggatcataaccgcaaaatgaaccggaataaaacgtgagaaacaacgagataatattaaaaatgatgcaaagaatttctgaatgtaaaggtaggtatggtgacataaggaatggagttaccgaggaagctgcccttgtcggattgtccttatcacttcccactcggcattaccagataggaagctcagaggacagagataataattggaacccaaaactgaaccctattttatataatctcatcaccaatactttatccttaaatgaagtctggtttcgccctttgttttctcctctagttttcttgtaacgccaaactacattctgtatgatcaaaatttagtaacataatttatcagaaccccattgttttaaaacgtgtctgtgtatttgtgtttatatacgcttaatcttcttctttctagttaaatttaatcaatttaatgaaaaatttggtatataaaaaaaaagactttgctcacgagttcctctcataagggccaaaactagttaaaaagttatcgtcaaaaactgatataaaaaagatgtccgaatattcccgcatataaatatctatcagacaaactcttttgtacaatatactttgaatccgataaattttcgatcttcaaaatccataaaaatctctcctttatttagccctaaaacagagtattagagtttgattcgtaaaagagaatatttttaatctccgccgcaagtcgatg

SEQ ID NO: 24276 - DNA, 3000 bp, Unknown
  misc_feature (1)..( 3000): 2750-1469P.txt file - cDNA_ID_2172926; gDNA_ID_2926198; Annot_ID_201586
atgtatcactcgctgcagcgatcatcactccttcttgagtacctctgtaacatgctgatgctatcaaacatgaaataaaagaaaatgattttataacatttcgctgtaggttgatatgaaaatgtataagataagtttgttgtttgtatttgttttataattttggtagtaaaacacacaaaaattcttacgagtgtaacttgtgtaaaaagttgcaatcccgggagttgcatatgagaaagagaagagaaaaacaagaacggtagaaaaaaacacaatacttttactcatgattcgtatttatttgtaagagtgtttatctttgaaatgtgacatatctatttatatatctgctatatattatatgactaactctaaatatgcatgtattgtaattgtttgccattgaaatatctttgactgttcccattttttaacatgtgtatagttgtaaatttgttatatttaatttcttcttatctgtgttgactaaaggtttagaaagattgttatcctcatttgatagcaaatttacagccaaagactccagaaaacgtttactaactacgctgatcaaatttgccacgtaaatttatatgaacaatctcataaaaacaattcatcaaaaggaaaaaaactctccttttataggtcctaaatgtagtgaaatcaatatttatggactagtacatatggaacagttatgaggcgagcgttaatgggccgaacgagacgataagagacattattctaaaccaagctcaaccacgaagataaccggatcataaccgcaaaatgaaccggaataaaacgtgagaaacaacgagataatattaaaaatgatgcaaagaatttctgaatgtaaaggtaggtatggtgacataaggaatggagttaccgaggaagctgcccttgtcggattgtccttatcacttcccactcggcattaccagataggaagctcagaggacagagataataattggaacccaaaactgaaccctattttatataatctcatcaccaatactttatccttaaatgaagtctggtttcgccctttgttttctcctctagttttcttgtaacgccaaactacattctgtatgatcaaaatttagtaacataatttatcagaaccccattgttttaaaacgtgtctgtgtatttgtgtttatatacgcttaatcttcttctttctagttaaatttaatcaatttaatgaaaaatttggtatataaaaaaaaagactttgctcacgagttcctctcataagggccaaaactagttaaaaagttatcgtcaaaaactgatataaaaaagatgtccgaatattcccgcatataaatatctatcagacaaactcttttgtacaatatactttgaatccgataaattttcgatcttcaaaatccataaaaatctctcctttatttagccctaaaacagagtattagagtttgattcgtaaaagagaatatttttaatctccgccgcaagtcgatgtcgataacgattccctacgatggctcaatctcccgcgagccatcaccgtctccaccgccgccaaaagcgaacacgaagaatctaccgacgaagattctctctaacttcctcataggtctaatcatgatccctgtagctataaccgcttttatctttatcctcacgtctctcggtttcaccttcttcttcgctttctactggtttcttcaacgaaactatcgccaccgtctccgccgccatcgccgtcacgaatactcagatgggttatctccaagatgcgtgaagaggcttcctcaattcaagtattgtgagcctagttcagagtacggaggcgatgattgtgttgtttgtatcgatggatttagacaaggacagtggtgtcggaagctgcctcgatgtggacatgtgtttcaccgaaagtgtgtggacttgtggttgattaaagtctcgacttgtccgatttgtagggatagggtttatagatttgaagaaggaagaagatggagaccacaaggtgaaattttttgatcggtggttttataattagatttgaaagtgtgtttagtttgttatcatatttagcagcaattttggttttcatcaatagtcatgtacagtgtcttttttttttttttacacggcttcacaattgaaagcttgtttcttcaccgtttgatgaatttgatccaataagagaatgatgggtttctgtagaatttaacttagtttgaggtttgattatcatgccaattattaaattcaatctagtcaattactgatagaaatgttgtccatttgtcactttaaacatgttgcttatgttaccttaatgatttctcataatttcacttgagattcagtggttaatcatcaatgtttctgtttcaatttgtccatgatgaagtataagttctaagtaaagcttggttcatgtgattttaatttacctacttcacctccaaagttatgtcaactatgttttcaagtgtgtgattcaaaagtttatattgaacataaaaataaaggaggctaaagaatcgttttctgattggaatgtgagattgtgactcacacggagaaagtgattgtgattggatctgactataagactaaagaagtgtttttgtgaagtaacaagtaacattgtctaattagtgttttgtattgtaaactaataatgactttgattaacgaaataatgtcactttagtcaaatgtgttgactttcttgtcttataccgatggctcaagtattcccaagaaaaaaaaacaaatatccctccgatttctgactcgtcccgtgactcagtgattctcctcttccaatcctctccggaagaactaaacaaaaacacgatctttctcagatttagagagagtaagagtgagagagtgtcagagacacgaatcaaagaaatgatttttaaaagcttctgttaattctaatttgcatagatttgtttactcgagcttgagcttgagcttcttctaatg

SEQ ID NO: 24277 - DNA, 3003 bp, Unknown
  misc_feature (1)..( 3003): 2750-1469P.txt file - cDNA_ID_2172943; gDNA_ID_1621125; Annot_ID_172268
gcaaaacattctgtagacgactttgtaatattttgctaacaaaacagctaacattttttttctaagtttattaaatctgttgaatgtttgagtcattttcttttcttttaccataatattgtaggccaataaaagatgagaggtaccgactagttgtgcaatcaatgcattcatcatgaaaaagttgaattctctttgacgcgttagggactccccgaaaaggtctaccttttccattttaaaggagcacaaattttttaatgcgatttctaatttcataaggtatatgatcatgtgaagatgaaaaaagccttcctcaaaggctacttattaatttgtgcagagagactatcatatgtatagattagatagcacaatttagttcttccaaagtcatcaaaaataaacttatgtaagttgacgtaaataatacaacgatgatcatatttcaatatttcatataaaagggcctctcgctgtggaaaaatatttgatgcttcaatgatcagaggcaaatcaaaatctgtaatgaaggatttattataaaactaaaactataatttgtcattaagctacaaaacccattcttaaatctcaactaaacccattaagttcattattggtagggccgaatcacattgatggctcgcttttctttcttatgataaatacaaattcttaggtgtactttgagtgattcaagtgtcacatgatgccacacttatttctttcaaaacatccttaattacaaacaattttattttatgatcaataaattttaatgatattcagtcacaataatctttgaaattacatatattcaaacttggttatatgcatccatgcataattgaatattagtatcatttgagttcacgactttaataccatcacttccaaacagagcggcccaactcgaatccataaaccaacacacacaaaatagacacaaattgagtctatggattaaatgtcaacactgatccactatagtctatatttttataatttttatggaagagtttagtcgaacttcagtgcgaaagaaagaaggctaagcaaccttaacaactcacttaagatttagccgtgaaactaaaatttggctaagcctcaaacctgaattacccttgtttgggttcatatgccgactcattacgtcccaccgctacttccaaaggcacgagtccatgtgggtcataaaatgacgtgtacttgtttttttcttacagagatgaagaacttaactgatttgattccgttcagaaacaacggattgaaaacatgttgattccgattcgtataatgtctagattccttttctttaactcgtaaatcctttcttggacgcggtttcgagactttgacgttgataaaatgtgaatatgtgtacatgtccacctttgcctcttacgttgacggtcgacaactttttgcaagtcttccaatttctttccatttatgcaatttttcccctcaacctatttatatcttcactatatgctaatctactcattttaaatacttttcattaaagatcaaatttaagattaatctgaaaggtaccaaattttatttatgattggaaaacgatgcctaaccaataacaaaaatgactttcattagcattttgatttattaaaatcctgaaaataattaagttggtcctagacacaaaactaaaatatatcattccaccaacatcatcatcatataatagaagtttataaatgttttatttgaattttagttcaagttacttggttttagaaaatgcgtaaccaatataaagacggctatagtatgaagcgatgttgatgcggaattgatctttagttaaacagctcttaacttttacaagaatttaagttatatctcaattaaaatttggtttcgacaacccctgaatcgtttgtttgttgtggaacgaaaggtttgtgtgaattgctttaggcaggttacagaggaattaacatataattcaggttttttttatctatttaaacagttgaacagttttaagttttaaccatacatgaatatatttttatcttgattattcagttacatttggattgaatagagtcggttaatccaaattagtcaccttttcataagattgtttatattgaagaactaactaacgtatgagaatcaatgtttagacagacttgagagcatttgtgaaaaatttaggtcccctgtatacccataaaacccataggctataatgggcttaaaaatacaagataattgttgtatggatcctaaaattcaccacctcggcccatacgtgagttatgtaaatgaaagttgaaataaaatagttatgtaacgcaccggttatttaggatgcaataaatatataggcatatctccctaaccagaaaagaaaaatgaatattggacagcttcacgatctaataacacaccacacccagtagggcaatatagtcataaatatgcggcccatatgtcacatcctgacacagtccactgcctcatttaattgtcccttttaccctttttacaatcttaacgtgacaagtaaagcatttaatagtctctctttctgtaaacttacatagttttgcatttacaagtcaaatatcaaaatatgcaggtattattaggggttttaattagggtaacaagtaaaaaaaactttaaatttgtagtcttacgatagaaaaaaaacttccttctcattcgccttaaaagatggtcacatataaatcaacgagatttaaaagtagtggcaattctgtaaattcgtaatactagtaagggcattttcatgtcgtttttttaaaaagttgcaaaatctacacgtttaaatacgcacatcgaagtacaccgattttgatttgctctgtcttcgaaaactaatcttaaaaaacaaaacacagaactgtcaatttattagtcttattgaattgtcttcaaagttcgatcatttttttacgttttattttaatttgtttctccaagaatctgataatg

SEQ ID NO: 24278 - DNA, 3000 bp, Unknown
  misc_feature (1)..( 3000): 2750-1469P.txt file - cDNA_ID_2172943; gDNA_ID_2926197; Annot_ID_201564
aaacattctgtagacgactttgtaatattttgctaacaaaacagctaacattttttttctaagtttattaaatctgttgaatgtttgagtcattttcttttcttttaccataatattgtaggccaataaaagatgagaggtaccgactagttgtgcaatcaatgcattcatcatgaaaaagttgaattctctttgacgcgttagggactccccgaaaaggtctaccttttccattttaaaggagcacaaattttttaatgcgatttctaatttcataaggtatatgatcatgtgaagatgaaaaaagccttcctcaaaggctacttattaatttgtgcagagagactatcatatgtatagattagatagcacaatttagttcttccaaagtcatcaaaaataaacttatgtaagttgacgtaaataatacaacgatgatcatatttcaatatttcatataaaagggcctctcgctgtggaaaaatatttgatgcttcaatgatcagaggcaaatcaaaatctgtaatgaaggatttattataaaactaaaactataatttgtcattaagctacaaaacccattcttaaatctcaactaaacccattaagttcattattggtagggccgaatcacattgatggctcgcttttctttcttatgataaatacaaattcttaggtgtactttgagtgattcaagtgtcacatgatgccacacttatttctttcaaaacatccttaattacaaacaattttattttatgatcaataaattttaatgatattcagtcacaataatctttgaaattacatatattcaaacttggttatatgcatccatgcataattgaatattagtatcatttgagttcacgactttaataccatcacttccaaacagagcggcccaactcgaatccataaaccaacacacacaaaatagacacaaattgagtctatggattaaatgtcaacactgatccactatagtctatatttttataatttttatggaagagtttagtcgaacttcagtgcgaaagaaagaaggctaagcaaccttaacaactcacttaagatttagccgtgaaactaaaatttggctaagcctcaaacctgaattacccttgtttgggttcatatgccgactcattacgtcccaccgctacttccaaaggcacgagtccatgtgggtcataaaatgacgtgtacttgtttttttcttacagagatgaagaacttaactgatttgattccgttcagaaacaacggattgaaaacatgttgattccgattcgtataatgtctagattccttttctttaactcgtaaatcctttcttggacgcggtttcgagactttgacgttgataaaatgtgaatatgtgtacatgtccacctttgcctcttacgttgacggtcgacaactttttgcaagtcttccaatttctttccatttatgcaatttttcccctcaacctatttatatcttcactatatgctaatctactcattttaaatacttttcattaaagatcaaatttaagattaatctgaaaggtaccaaattttatttatgattggaaaacgatgcctaaccaataacaaaaatgactttcattagcattttgatttattaaaatcctgaaaataattaagttggtcctagacacaaaactaaaatatatcattccaccaacatcatcatcatataatagaagtttataaatgttttatttgaattttagttcaagttacttggttttagaaaatgcgtaaccaatataaagacggctatagtatgaagcgatgttgatgcggaattgatctttagttaaacagctcttaacttttacaagaatttaagttatatctcaattaaaatttggtttcgacaacccctgaatcgtttgtttgttgtggaacgaaaggtttgtgtgaattgctttaggcaggttacagaggaattaacatataattcaggttttttttatctatttaaacagttgaacagttttaagttttaaccatacatgaatatatttttatcttgattattcagttacatttggattgaatagagtcggttaatccaaattagtcaccttttcataagattgtttatattgaagaactaactaacgtatgagaatcaatgtttagacagacttgagagcatttgtgaaaaatttaggtcccctgtatacccataaaacccataggctataatgggcttaaaaatacaagataattgttgtatggatcctaaaattcaccacctcggcccatacgtgagttatgtaaatgaaagttgaaataaaatagttatgtaacgcaccggttatttaggatgcaataaatatataggcatatctccctaaccagaaaagaaaaatgaatattggacagcttcacgatctaataacacaccacacccagtagggcaatatagtcataaatatgcggcccatatgtcacatcctgacacagtccactgcctcatttaattgtcccttttaccctttttacaatcttaacgtgacaagtaaagcatttaatagtctctctttctgtaaacttacatagttttgcatttacaagtcaaatatcaaaatatgcaggtattattaggggttttaattagggtaacaagtaaaaaaaactttaaatttgtagtcttacgatagaaaaaaaacttccttctcattcgccttaaaagatggtcacatataaatcaacgagatttaaaagtagtggcaattctgtaaattcgtaatactagtaagggcattttcatgtcgtttttttaaaaagttgcaaaatctacacgtttaaatacgcacatcgaagtacaccgattttgatttgctctgtcttcgaaaactaatcttaaaaaacaaaacacagaactgtcaatttattagtcttattgaattgtcttcaaagttcgatcatttttttacgttttattttaatttgtttctccaagaatctgataatg

SEQ ID NO: 24279 - DNA, 3003 bp, Unknown
  misc_feature (1)..( 3003): 2750-1469P.txt file - cDNA_ID_2172957; gDNA_ID_1621125; Annot_ID_172273
atgcaaagataattatctcatagggaacaaaaggttaaagaaaaaaaggcctgaggcacctgtaggatagccaatcactcaagtccatccacttatacaccattgaccaagactccttaagattttctttcacccataaaagctgcaaaaggagaaatcttttttcgtcaagctcaaacacaaagaaagcaatcatataaagaacccctataagaaagttgtacctacttttggtggctccatttctggagaaacaccgccaccacagtactgcaagactggagaattaaatgagttgattctctctgcctgctttacagctctatggtccatccatacaataatgtttcttcttgaatcaccactccacgacactgtaacaggagatccctcagcatcaaccgccactacaaacaaaaataaacgttacattgtcaccgttaagctcctcttattcagccaaacacaaagacggttataagcagattctacacaccgagagagcacgtggcagcaaagcctattcctttcacttccacatccgaaacatttgcaagagagcaagcagatttcacagcagcacaaactgcatgccaaatatctgttgaagattgctgttccaataatattatcaatgtcaaagttaatctctaaacaaataagccatgatctcccttatccaacataataacctcaatacagtctccatccttccaaatctgtattggactagtagcagatcctagaagcttcccattatcatcgaacaaacctgcatcataatcaacttaagctacaaaaccaaaattgcattgctggtcgattttcaacattaaaaagaatcgatttttagtagactgatatcaaatttcatcgccactaaatcaatcatcattctcacgaatctaagaagactacaatttttcaaaattgacgagattttaactcggggaataagacagaaggattaccggcacgggcgcttccagtgccaacgtcgacaccgagaaaaacggagcgagacggaaatggatttaactcagcggtggtcatctgaacggcaacggcggaagctacggaggtgacgatgactttagtggctcaccttcctttatctactttcctttcctttatacatcataaccggattgttcttggttagtagagagccggatttagctaatttggatcggtcgaaccacggtccacgtgctccgttttttcccctgttttatgactaataaaaccctacaagtccgttctttgacctaaaaaataattctccaagttgagtcttcttactcgattcatcgggaaaaagagatggcagatcgtatgactcgaatccctgtcgtcaacgcagactgttgcaagcctaagaagtagcttcttatgcaaggtacaattaccctgcaatgactataactcgaggggacttcaagctgagattgaaccaaggagaattcacggattctcagattatagttatgttgggagagaatggaacggggaagacaacgtttatcaaaatgcttgcgggttcgaagcttgatattgatgaagaaggatctcaagtacatgagataccacagttctctgtttcttacaagaatcaacatatgtcaaaccgtaaatttgagattactgttagagatttgatacacaggaagatccctaacgcatatgcagaacaccaattcgtgtcagacgttatgaaaccgctcaagatcgaggagctcatggataaaagcttcaacaaactatcaggtggagagaaacaaagggttgctttagctttatgccttggtaaatctgcggatatctacttgatcgatgaaccgagcgcgtttcttgattcggagcagagaattatagcttccaaagtcataaagagattcattcttcagatgaagaaggcggcttttgcacgatttcataatggctacgtatttggcagataaagttattgtgtatgaaggagaaccttccgtggattgcacggcatcttctcctcagtctctacgtagtggaatgaatttgttcttgtctcgtttgaacatcactttcagacgagatcctacgaatttcagaccaagaatcaataaactcgattcgatgaaggatagtgaccagaagcttgcgggatgttattactacttggatgattaagagagagatgacattgagagaatctttcaccggagaaaacctgaagtagtgagaaactcacgttttgatctttcctagccccttcaatctattataagatctcttgaattttattagatccatctggagtttaatttttgagaatatattatggtgtttgaattcggtttgtttcaatcgttcccatatattagactagtttttttcttcacacatgagaatctcaaaccgattgcgtagaagaagaactcgcattcatctgtttttgtctttagttgagaatgaatgaccgttgtaatgtcatgggcttcttttggtttgggtctgaatcacttaagcccaacacaatcttttctttggttgaaacactgtcgtttttgctgttttgtctgacacaaggcatcggatgatgtcgattgtcgaatatgcttcctcattcggagtgttctcagacatcttgagcttctcattagttaggcggtgcgctcgaaagtcgaagccgtgttgacatatcaaaacattgggaccattcaattttgtacaaatgtccaaacattatttcggtttgataacaataaacaaataaagaaagagttttttattggattcacttggcaacagccaacaacgaatcaaataatctatatacataattatattagaagctgtgaatgtgcctccgagtagacaaaagcacatgcaccataaatgatcaaacccatgaaacttccatctctctttttcccctatataaactaatgtcacttacctcaatattccatcaacaatatacatctgagatatcaaaactcctagagagatctaataaaaatg

SEQ ID NO: 24280 - DNA, 3000 bp, Unknown
  misc_feature (1)..( 3000): 2750-1469P.txt file - cDNA_ID_2172957; gDNA_ID_2926197; Annot_ID_141343
caaagataattatctcatagggaacaaaaggttaaagaaaaaaaggcctgaggcacctgtaggatagccaatcactcaagtccatccacttatacaccattgaccaagactccttaagattttctttcacccataaaagctgcaaaaggagaaatcttttttcgtcaagctcaaacacaaagaaagcaatcatataaagaacccctataagaaagttgtacctacttttggtggctccatttctggagaaacaccgccaccacagtactgcaagactggagaattaaatgagttgattctctctgcctgctttacagctctatggtccatccatacaataatgtttcttcttgaatcaccactccacgacactgtaacaggagatccctcagcatcaaccgccactacaaacaaaaataaacgttacattgtcaccgttaagctcctcttattcagccaaacacaaagacggttataagcagattctacacaccgagagagcacgtggcagcaaagcctattcctttcacttccacatccgaaacatttgcaagagagcaagcagatttcacagcagcacaaactgcatgccaaatatctgttgaagattgctgttccaataatattatcaatgtcaaagttaatctctaaacaaataagccatgatctcccttatccaacataataacctcaatacagtctccatccttccaaatctgtattggactagtagcagatcctagaagcttcccattatcatcgaacaaacctgcatcataatcaacttaagctacaaaaccaaaattgcattgctggtcgattttcaacattaaaaagaatcgatttttagtagactgatatcaaatttcatcgccactaaatcaatcatcattctcacgaatctaagaagactacaatttttcaaaattgacgagattttaactcggggaataagacagaaggattaccggcacgggcgcttccagtgccaacgtcgacaccgagaaaaacggagcgagacggaaatggatttaactcagcggtggtcatctgaacggcaacggcggaagctacggaggtgacgatgactttagtggctcaccttcctttatctactttcctttcctttatacatcataaccggattgttcttggttagtagagagccggatttagctaatttggatcggtcgaaccacggtccacgtgctccgttttttcccctgttttatgactaataaaaccctacaagtccgttctttgacctaaaaaataattctccaagttgagtcttcttactcgattcatcgggaaaaagagatggcagatcgtatgactcgaatccctgtcgtcaacgcagactgttgcaagcctaagaagtagcttcttatgcaaggtacaattaccctgcaatgactataactcgaggggacttcaagctgagattgaaccaaggagaattcacggattctcagattatagttatgttgggagagaatggaacggggaagacaacgtttatcaaaatgcttgcgggttcgaagcttgatattgatgaagaaggatctcaagtacatgagataccacagttctctgtttcttacaagaatcaacatatgtcaaaccgtaaatttgagattactgttagagatttgatacacaggaagatccctaacgcatatgcagaacaccaattcgtgtcagacgttatgaaaccgctcaagatcgaggagctcatggataaaagcttcaacaaactatcaggtggagagaaacaaagggttgctttagctttatgccttggtaaatctgcggatatctacttgatcgatgaaccgagcgcgtttcttgattcggagcagagaattatagcttccaaagtcataaagagattcattcttcagatgaagaaggcggcttttgcacgatttcataatggctacgtatttggcagataaagttattgtgtatgaaggagaaccttccgtggattgcacggcatcttctcctcagtctctacgtagtggaatgaatttgttcttgtctcgtttgaacatcactttcagacgagatcctacgaatttcagaccaagaatcaataaactcgattcgatgaaggatagtgaccagaagcttgcgggatgttattactacttggatgattaagagagagatgacattgagagaatctttcaccggagaaaacctgaagtagtgagaaactcacgttttgatctttcctagccccttcaatctattataagatctcttgaattttattagatccatctggagtttaatttttgagaatatattatggtgtttgaattcggtttgtttcaatcgttcccatatattagactagtttttttcttcacacatgagaatctcaaaccgattgcgtagaagaagaactcgcattcatctgtttttgtctttagttgagaatgaatgaccgttgtaatgtcatgggcttcttttggtttgggtctgaatcacttaagcccaacacaatcttttctttggttgaaacactgtcgtttttgctgttttgtctgacacaaggcatcggatgatgtcgattgtcgaatatgcttcctcattcggagtgttctcagacatcttgagcttctcattagttaggcggtgcgctcgaaagtcgaagccgtgttgacatatcaaaacattgggaccattcaattttgtacaaatgtccaaacattatttcggtttgataacaataaacaaataaagaaagagttttttattggattcacttggcaacagccaacaacgaatcaaataatctatatacataattatattagaagctgtgaatgtgcctccgagtagacaaaagcacatgcaccataaatgatcaaacccatgaaacttccatctctctttttcccctatataaactaatgtcacttacctcaatattccatcaacaatatacatctgagatatcaaaactcctagagagatctaataaaaatg

SEQ ID NO: 24281 - DNA, 3003 bp, Unknown; identical to SEQ ID NO: 20038
  misc_feature (1)..( 3003): 2750-1469P.txt file - cDNA_ID_2173018; gDNA_ID_1620705; Annot_ID_165270

SEQ ID NO: 24282 - DNA, 3003 bp, Unknown; identical to SEQ ID NO: 20038
  misc_feature (1)..( 3003): 2750-1469P.txt file - cDNA_ID_2173018; gDNA_ID_2926196; Annot_ID_201473

SEQ ID NO: 24283 - DNA, 3000 bp, Unknown; identical to SEQ ID NO: 3087
  misc_feature (1)..( 3000): 2750-1469P.txt file - cDNA_ID_2173042; gDNA_ID_1620624; Annot_ID_162439

SEQ ID NO: 24284 - DNA, 3000 bp, Unknown; identical to SEQ ID NO: 3094
  misc_feature (1)..( 3000): 2750-1469P.txt file - cDNA_ID_2173052; gDNA_ID_1620624; Annot_ID_162457

SEQ ID NO: 24285 - DNA, 3000 bp, Unknown; identical to SEQ ID NO: 4698
  misc_feature (1)..( 3000): 2750-1469P.txt file - cDNA_ID_2173067; gDNA_ID_1620723; Annot_ID_165857

SEQ ID NO: 24286 - DNA, 3000 bp, Unknown; identical to SEQ ID NO: 4698
  misc_feature (1)..( 3000): 2750-1469P.txt file - cDNA_ID_2173067; gDNA_ID_2926187; Annot_ID_200708

SEQ ID NO: 24287 - DNA, 3003 bp, Unknown
  misc_feature (1)..( 3003): 2750-1469P.txt file - cDNA_ID_2173159; gDNA_ID_2926150; Annot_ID_197987
gtgtttcaaattacctctaaaagcctttccatgttcctgagaaccaatcgatagaaaaggttggcctctgtatctttgaaccgtcgcattttgcttctccgataactacagttaaagaccaacaatttctacagtgaccactgaaaaactcaaaatcgagatgatcacaatctctactctatacagtgaatcaaacatagaacaaataggcaaagtcgcaaccttacaaataaagcgctcatcttcaccaccaacggaagcggcagcaacagaaactgtctcatttttcgccggagccaccgtctccggtacgagtgcttcaccgggagtcgatagcaaaaagacctcaagaacatctctgactagcttcttgtgattggttcccgataagtcgataccgagtttagccgaagcgtcaagtcggagtttgaactccgtcatttggtccatatcagattcactgagtatgctcttcactgtttcctcgattttttgtgtagcgacaatctccatagtttcaccagaatcaagcaacgaattctccatttcgcccgaaaaagaagaaaaaaaaggataaagaaaaagatttcgcagtagcgtcgagttttggttgttggccggcgttatatttagggttcataaatcgccgggggaaaaaatttggccggagtgtgaaaaaaagaggttctaccgagaattgaactcgggttactggattcagagtccaatgtcctaaccgctagaccatagaacctttttgctatagctgttgcatttaatactttatatatgcaaatatatatatatgagttttttttccttatctatatatcttttctgttttataatacgatatatgaatacatgggtgagatacgaatacgattgagaaatatatgggtgaaatacagtttttcttcacgaagccgataagatactaagagtcgaatccttctagaaactaaaccgacagaaagcaaattatttttgaaaattaagctcaaacaaaagaggctaaatataaagatagcaaggtaatagtcattaacatttgttgtgaataatctagtttgggctaatgttaatcttgttttacttgtcttctcactgcattgcagcttaagaaattagtattgcatgctgcgagctcagactcagccagagggctaacccaacagattttgatgcctaaaacatctttaagctcatttaaaattcttaagcattttaaatctatttataattaaagtctcaaaaaaacgaaggtaaggttcgaactgtccacgaaagagtcactaatctatgaaacaatcactagactacgaaacatttttaaaatttgatgccctttaatattatctataattttaggcgcgtaaagcatgagtttcaccaactttagcccagggccggccctgctcagccataagagaagcaaaagatgtaatgcaaaactccaatacgcagtaatgataacaaaaaaaagtttgttcgttaaagcttatcaatgcttacaaaacatcaaaaccaacttgacatgtgatggcagtaacaaaatcgagaaggcgatgctaaaagtaacttcataaactagattgatcaaaagtactcatagcttcggaatcaacataagacaccaaatatgttcaagtcacctttaaaagcaagttaatagccaacaaacaatgtgcatttcacatttcgcttctccaataactaatgcctaacaatttacagaaaacatcacttctttcctcgacaatccattgtattattttcgtgaaatgtcatcatagaagaagcacttaaaatgaaaattgggttggcccatgaatttgaattctctaacccaagaccaaaacccataaaagttatttacgaccatcgaaccacttttttttttttttttttaacggcaaacatttttctattaattagcccaaatgggcttcataaacaggtacaacttgaggccaaaagcccactaattgcaaacattaaatagacaatatgatgacacatgtatgcaatgtggagattgcagcgtagatcaacgtttcagcacatgccccgtcactgcttcgccggagaaatcttccgccggtcagcaaatgattcagctcctccatgaaactttctacccacatttagttgtaccgaatgccttttgccaaggatcaccggaaatagtctattggagttagtttggtcaccggaaatttaaacttcagctgattaggattagaatattccttggaggaccattaaaacatgacgtgaaccccaactcgtcatactcttctccaatcaaccacaacaccttgatctatcatccatgaagaaccgatgcccttacgcttttattagcatagcgaggaattttccttcacatggaagagtaatcaagcatccaatgaacacatttccatctaaaaacctccaagaattaaacatcttctaaaattgaaagtgttgatttacaacctgcaaaaggccttataaaaaaccggcaaagaaaaccgaaagaaactccgaacaattcggaaattaaaaccggcaagataccggaaacaaaagaaaagaaaaaaaacttaaatgaaatccgatttcaatcggagaaaatattaaacagagttttcctctctctcaaagataccagagagaaccacttggttaattaaagaaaatctattttaaccggttgtttaaaaaatagttaaatttggaaagaaaacagaagttgaaacggtagaatagtaaaaagtaatgaaacgtcttgttccctaattaataattacttacgattcacgaagtagactttaaagcccatactaccctctggactgtggccacgtcactctcctttaactactttgatagtcccaaagctgcgacggcgataaatcgatgaattaacgacgttcgaagaaactccagaggtctcttcattttccttttgtatactggtaaaaattggtggtctcttctttgtctccgagtatg

SEQ ID NO: 24288 - DNA, 3000 bp, Unknown; identical to SEQ ID NO: 8163
  misc_feature (1)..( 3000): 2750-1469P.txt file - cDNA_ID_2173159; gDNA_ID_1621198; Annot_ID_174759

SEQ ID NO: 24289 - DNA, 3 bp, Unknown
  misc_feature (1)..( 3): 2750-1469P.txt file - cDNA_ID_2173159; gDNA_ID_1620672; Annot_ID_164132
aag

SEQ ID NO: 24290 - DNA, 3000 bp, Unknown; identical to SEQ ID NO: 3548
  misc_feature (1)..( 3000): 2750-1469P.txt file - cDNA_ID_2173242; gDNA_ID_1620650; Annot_ID_163438

SEQ ID NO: 24291 - DNA, 3000 bp, Unknown; identical to SEQ ID NO: 3548
  misc_feature (1)..( 3000): 2750-1469P.txt file - cDNA_ID_2173242; gDNA_ID_2926176; Annot_ID_199884

SEQ ID NO: 24292 - DNA, 3003 bp, Unknown
  misc_feature (1)..( 3003): 2750-1469P.txt file - cDNA_ID_2173290; gDNA_ID_1621150; Annot_ID_56849
agatgctgactctaaaacggggaaaaagcaaagcagtggtgaagaagattctgagcagtcagagggtaaaacatccgatgttgatgccagagataaaaacggatctctggatgactctaaagttagaaagggcattgaagctgatagttcacctcgaacgaaagatacgaggaggtatgttttttgtgctagacctaatgtgttttggattgcatccttcttagctgttttgaattcatgtgtttccgtgaaaagtactgcaaatagaggaaaaacaggttcttttctccagagaagaatatatctcggttatttacattgtctatgttaattttccagtgaaaatggccatgatgatggtgaatctactgcttctgctggcaaaactgtaaattatgactctcacgacgagacagattcagtttcaagcgtcaaccctgacaacggcaaggtaaaccattttgaacaccccgaagttttgggtttgttgcgtttgataatatatatatatttctttaacctttgtatttcgacatgaaagaatcgttaatttttacgtaactattttttgttatgtttttaccaggacaaggatcatgggaagtatgacagtggttttggatttggatttgggtttgatgacttcagtattaagcctataaaaactggttcgaccatttcaaatgacttcctccctcctaagttatctatatttgctgattccgtcccaagcccaccggcaaatgcaagcgacgtttcccctacaaaaccttctttgtttgctgattcagttccgagcactccagcgacgaacaatgcctcttacccaggccagaaatcattttttgatgactcggtcccgagcactcctgcttatccaggcaacttgtttgctgagaagaaatccttctttgacgactctgtcccgagcacccctgcttatccaggcaacttgtttgccgagaagaaatcctatttcgatgactctgtcccgagcactcctgcttatagcacgtctgattttggtgggaagccatttgcatcagagactcctcgttcagacaacctgttcccaggaagaagcccctttatgttcgactctgtcccaagtacacccgccgcacacgatgacttctctaacaacagcttctcccgcttcgattcattcaacagcaacaacaacgatgctttctctctatcccgcacagactcgatgcgcagcacaagcgagcctgacccattcgcatcaaggtttgattctttcaactatcaaagatatgattccttcaatgcacaaagctatgattcctctagcaacaacaatgcatcggagacgcctaaagcctcattgacaagattcgactcaattggaagcaccagggactctgattacagtcatgggtttgggttcgacgaccatgacccgttcggttctacaggaccattcaaaacaacgacaactacagcagagacacctcggagttctgataattggaatgctttctagccagaagcccacgtgcgatatgaatatgatcacatatcatatactttgctgcttttatagtttgaatttaccagtcgaagagttatatgtatcttcatttctttggtttcacctgcttgcttcattttttattgttaatatataatagtcttttttgccattttttcttttaaggatttttcgaagagtgtcctttgttggtctctgcgtagtgtttctttttatttgtgtctttgtttgttaacttgaataatgaattattatttgtccctgtgaaaacttctattgtatctttgtaatcgtatggatacatttcagatgttgttatattagattgattggtaattttgggaataatccgtatccattttttgatttatactttctattttgtaaactgaaaggtaagtagatatactattagcatttctcaaaatctaatcaagtgttataatatcatacttttgttgatagtaattatgccagaatcatatgcaataattttcttaagagcatatatgtgttggaatttacgaattcaatctgatgccgttcaaatttgtttgataaaattagtgatttactgtatataaataattttccacagtaatatagtaaaaacgaagaaatggatgaacaaatgaaatacgagaaattgaaagaaagaaaaaaaatcattttccttatctttttatggtcataagaagaagagatggaaagtgaaaggcgcgtggagtgcacgcgcagctcaagtgtcaatccagtcacaatcaaatggaagaagcacaagttttaattcaacctcttcggcaatgaagaagaggacgaatccacgaggtccaccaaattcctgcaaacttccaaaacaccatctcaaatatccacattctccgccattaccctgaaccgtttctcgagttgtttctctcatgttcctatgcttttgcccttgccacgtacctatcatgagtcgcctttctccggccaccggaatctcttcccgcctccgcttctccattggtttgagttccgatggacgattaattcccttcggattccggtttcggagaaacgatgtcccgtttaaacgccgcttgagatttgtgatcagagcgcagctctctgaagctttttctcccgatttaggtttggattctcaggttacttacttacttctctcgacttccttgcttgttttcattcactttgttcgatcaatctaaacttagagagacagagtttgcgaagctgaatttaattgttcttaggatctttagattatcgaatcgtttcatgatttttaagcgaaacttttgctgatcagagttgcttatttagtatttcgactgacttcatacactttgatattgaaggctgtgaaatcccgcgatacatcaaacttgccttggattggtccagttccaggggacattgctgaggttgaggcgtattgtagaatttttagatcagctgagcgactacatggagcgttgatg

SEQ ID NO: 24293 - DNA, 3003 bp, Unknown
  misc_feature (1)..( 3003): 2750-1469P.txt file - cDNA_ID_2173290; gDNA_ID_1621150; Annot_ID_173198
ttaaaattttgataaaacgttgatgctcatttactagaggaaactcagtattgtatttttggctagttggcaaaagaacttctacatgtacaactgtatatatgtattcctttgtttatattcataaaatttcctctgttttacaggttggcagcctggaatccaggaaggtgctgctgattgggatgaagattgggataagctagaggacgaaggtatacttgctgtttagattttgattttgttgtcagatgagattattgtggaagcatggctgtagatataatatcgatatcttgtgtctttataatttttttttgggtgacctatcttccaaatttggctatggaatatgcagttgaacacttgaaattgacatcttattttctcttcacttccagggtttaccttcgtcaaggagcttacacttgatattcaaaatgtcatagccccaccaaaggaaaaatcatcagcgtggagaaaagaagttgatgtctcttcaaaagaaggtgaagatgtttcattctcagatgctgactctaaaacggggaaaaagcaaagcagtggtgaagaagattctgagcagtcagagggtaaaacatccgatgttgatgccagagataaaaacggatctctggatgactctaaagttagaaagggcattgaagctgatagttcacctcgaacgaaagatacgaggaggtatgttttttgtgctagacctaatgtgttttggattgcatccttcttagctgttttgaattcatgtgtttccgtgaaaagtactgcaaatagaggaaaaacaggttcttttctccagagaagaatatatctcggttatttacattgtctatgttaattttccagtgaaaatggccatgatgatggtgaatctactgcttctgctggcaaaactgtaaattatgactctcacgacgagacagattcagtttcaagcgtcaaccctgacaacggcaaggtaaaccattttgaacaccccgaagttttgggtttgttgcgtttgataatatatatatatttctttaacctttgtatttcgacatgaaagaatcgttaatttttacgtaactattttttgttatgtttttaccaggacaaggatcatgggaagtatgacagtggttttggatttggatttgggtttgatgacttcagtattaagcctataaaaactggttcgaccatttcaaatgacttcctccctcctaagttatctatatttgctgattccgtcccaagcccaccggcaaatgcaagcgacgtttcccctacaaaaccttctttgtttgctgattcagttccgagcactccagcgacgaacaatgcctcttacccaggccagaaatcattttttgatgactcggtcccgagcactcctgcttatccaggcaacttgtttgctgagaagaaatccttctttgacgactctgtcccgagcacccctgcttatccaggcaacttgtttgccgagaagaaatcctatttcgatgactctgtcccgagcactcctgcttatagcacgtctgattttggtgggaagccatttgcatcagagactcctcgttcagacaacctgttcccaggaagaagcccctttatgttcgactctgtcccaagtacacccgccgcacacgatgacttctctaacaacagcttctcccgcttcgattcattcaacagcaacaacaacgatgctttctctctatcccgcacagactcgatgcgcagcacaagcgagcctgacccattcgcatcaaggtttgattctttcaactatcaaagatatgattccttcaatgcacaaagctatgattcctctagcaacaacaatgcatcggagacgcctaaagcctcattgacaagattcgactcaattggaagcaccagggactctgattacagtcatgggtttgggttcgacgaccatgacccgttcggttctacaggaccattcaaaacaacgacaactacagcagagacacctcggagttctgataattggaatgctttctagccagaagcccacgtgcgatatgaatatgatcacatatcatatactttgctgcttttatagtttgaatttaccagtcgaagagttatatgtatcttcatttctttggtttcacctgcttgcttcattttttattgttaatatataatagtcttttttgccattttttcttttaaggatttttcgaagagtgtcctttgttggtctctgcgtagtgtttctttttatttgtgtctttgtttgttaacttgaataatgaattattatttgtccctgtgaaaacttctattgtatctttgtaatcgtatggatacatttcagatgttgttatattagattgattggtaattttgggaataatccgtatccattttttgatttatactttctattttgtaaactgaaaggtaagtagatatactattagcatttctcaaaatctaatcaagtgttataatatcatacttttgttgatagtaattatgccagaatcatatgcaataattttcttaagagcatatatgtgttggaatttacgaattcaatctgatgccgttcaaatttgtttgataaaattagtgatttactgtatataaataattttccacagtaatatagtaaaaacgaagaaatggatgaacaaatgaaatacgagaaattgaaagaaagaaaaaaaatcattttccttatctttttatggtcataagaagaagagatggaaagtgaaaggcgcgtggagtgcacgcgcagctcaagtgtcaatccagtcacaatcaaatggaagaagcacaagttttaattcaacctcttcggcaatgaagaagaggacgaatccacgaggtccaccaaattcctgcaaacttccaaaacaccatctcaaatatccacattctccgccattaccctgaaccgtttctcgagttgtttctctcatgttcctatgcttttgcccttgccacgtacctatcatg

SEQ ID NO: 24294 - DNA, 3003 bp, Unknown; identical to SEQ ID NO: 19751
  misc_feature (1)..( 3003): 2750-1469P.txt file - cDNA_ID_2173338; gDNA_ID_1620673; Annot_ID_164147

SEQ ID NO: 24295 - DNA, 3003 bp, Unknown; identical to SEQ ID NO: 19536
  misc_feature (1)..( 3003): 2750-1469P.txt file - cDNA_ID_2173372; gDNA_ID_1620673; Annot_ID_164163

SEQ ID NO: 24296 - DNA, 3003 bp, Unknown; identical to SEQ ID NO: 19536
  misc_feature (1)..( 3003): 2750-1469P.txt file - cDNA_ID_2173372; gDNA_ID_2926200; Annot_ID_201778

SEQ ID NO: 24297 - DNA, 3003 bp, Unknown; identical to SEQ ID NO: 19975
  misc_feature (1)..( 3003): 2750-1469P.txt file - cDNA_ID_2173383; gDNA_ID_1620701; Annot_ID_165076

SEQ ID NO: 24298 - DNA, 3003 bp, Unknown; identical to SEQ ID NO: 19975
  misc_feature (1)..( 3003): 2750-1469P.txt file - cDNA_ID_2173383; gDNA_ID_2926177; Annot_ID_199916

SEQ ID NO: 24299 - DNA, 3003 bp, Unknown; identical to SEQ ID NO: 19973
  misc_feature (1)..( 3003): 2750-1469P.txt file - cDNA_ID_2173389; gDNA_ID_1620701; Annot_ID_165079

SEQ ID NO: 24300 - DNA, 3003 bp, Unknown; identical to SEQ ID NO: 19973
  misc_feature (1)..( 3003): 2750-1469P.txt file - cDNA_ID_2173389; gDNA_ID_2926177; Annot_ID_199919

SEQ ID NO: 24301 - DNA, 3003 bp, Unknown
  misc_feature (1)..( 3003): 2750-1469P.txt file - cDNA_ID_2173453; gDNA_ID_1621101; Annot_ID_171422
tacataaaatcacttgacgggctaattgctctaatcaaatttttgattttaaaataaaaatcgatcggtatttggttcagttaaccatgatgattagcccggtttaaataagtttaagaaaaacgaaaagaacaaaattgttttctttttaaggtctaattaccaaatcgaccatgaatccaatgttacaagaacacaagtcttcgtcctaaataacaagttcaatcttcatcttcaacaatctgagagagattagttccaagttttaccgtttacaacaagaatcagaaaggtctttgattgcatatctcaaggttgagccggagcaggagctgaagccataggtggaggagattgttgctgcaatggtttcgattgtggctcaagatgttcagaatctttctttgcttcaggagattcagagagttttgattcacgttcggcttcttgcgttgatgaagctgcctttggtgattcagacaagtgaactctagcaaactcatcaaccactttcctcttatcctcttcctcagccataccaactttctctttagccttttgtccaacttcttctgcagctttagcaactttgttgaatgctccagtaacccacgtggcacctgtgagaacataccggttcttcattatagctgaacctgcattgctcactgtctgctccgctgcagcgattgctgatttggttttctctgagacttggtacttctgatcaacttccctgaccttttctcccactaccaccgtgcctgtgttgatcttatcagtgaaaccaattttcttgtcaaaagatgcgactttggctgatgctgtagatgttagctggtgcttctcgtcaacacttttggctttagctatggcatcttttcccaggataaagccctttgcaagcatgctgctcacaacatcttcggcttttctcaacacggagtcacctgccttgggagatttattgctgtccttgggttcctgtgaaaaagatgaaatggtaagattttaacttgtgaaaaaactcagaagagatgatgaattacgagcttaccaaggaagctaaagcctcaggggacagttggtaatcaggagccatagagacaatgactgaagaatcaacaatcgttgctccctgaaatgaaagaattacattaatactcagtcactcaaaggatacagtcatatagaggaactaatacaggctaagaagtaaaaataccgagagaagaaccgcagtttcagctccttgtagatccttaaaagtgacatatgccagtttagtccgctcagtctcgctgtacaaacatgtcaaaagagttaagaacctgacgaactaaaagctgtaatctaaaactttcaaaaggaacaatagagaggaaaccaaacctctgcgtctcaaggtacagaatatcgccagaaaaggaaaagaactccttgagatctctatcggttgctcctagagaaacattgctcactttaactgttgtcatctgcaagtgaaatataatctcgtgtgacttaaaaactaaaatttcaaaccatttcaccagctaaacaaaatctcagacttattcattagttgttcgattacacatttctcgattccttatcgcctaaaacaatgactaaacacacacacacacactcctaaagcaaccaatattatcaatacaatgatcagaaaacacagaaacattgcatcatcaatacaagaagataaaaagaacctcagaatctaggaaaagcaaatacttgtctcaaaactaatcctatggcacagatcagatattaacagattacaaaacaaaacaaatgctaaagtgaatatcctaatccaaacaaaagcaattttaccctaaaaaaaaatttcttcatatcagaaacagtaattttcacccaaatcaaaaacagagaacagcttcaaatcctctaaaataaaaaaactagcgattcttcactaataatcaacgccatttctcgcaaaacaaattagaaaacaacaatcaaaatcaacagatctgttcacatcttcctcaatcaaatcaacagcaaaaacatcgacctttctcaggataaatccaaaacaaaaaccaaaactaactagtttcaaaaagcgaagagattagataagctcaccgtcatgaagaaaatcgcgttgacgcggattgaaatggaagattgtttttccttcacacaggaggaacaatatttgaaacgaaacgaaacgaaaaatcaaaggaaagaaaaatctctggtcgcggatttgatgtgaagaagagtgaaaaataaaagaaaaaagtgggacctgattttaaacgccttggaaaaacgagtcttattcgggtttggcacgtgatatggtcggaaccttctcacgtgcgatgattaaaaaagagtcctaattttaaacttcttttgcttttgaccctttttagtcacgtaaagttctatctagagattttattcattaaattctggactaatctatcataatccttaatctaattctaattaatccgtaatctgttagtatcttggttaaaataatcaattaacgtcgtgacataatcactttctccaccaatgtctaccatccacgtgtcctgagctcagagcaatgtaatcatcgtagaccatttatcactttataataaaaggaggatataccgttaagattctaaactatagagtcacgtttggaatattatagaaaagttaaggatcaaaaaatgaaaaaagtacaagctttttccgttcatacaggtaatgtgacatttcacgttttgctcaatctctctctccgcggttcacgttttttctcaatctgtccggagagagagaaactcaccggggaatcttgaaatcaccatcacatcctctcttccctcgatctccgttatcgactgtaaatcgaattttgttgttgctttgttttcttgggcgaataaaagaggataatttagtggcggggttttcgagaaagagagagaaagaatg

SEQ ID NO: 24302 - DNA, 3003 bp, Unknown; identical to SEQ ID NO: 24301
  misc_feature (1)..( 3003): 2750-1469P.txt file - cDNA_ID_2173453; gDNA_ID_2926169; Annot_ID_199340

SEQ ID NO: 24303 - DNA, 3000 bp, Unknown
  misc_feature (1)..( 3000): 2750-1469P.txt file - cDNA_ID_2173470; gDNA_ID_1621101; Annot_ID_171438
tgccatttatgaaaacaaaggtgaaagagacaatggatgattgatatggggattcgaaccatgctgagcagaagaagacagtataattaaagtatcctatctcactgattcaatggactgttcctctcacagatacaaaatccctaaatccctttttaatttcatttggtcttagcatcaaacatctgtaatttatttgcatgccaacaaattcatatctcagttgtgcttttacgtacacgaatcttggtcggtatatatatatatatatatatatctgctgtcttcttcggtttgtcttgcttcatcttcaaagtattacattttctttctttagaagaaccttaataagagtcgataaccctaataattaagcgtccaaatcgtcactgggatctctaagtgaagattgttctttttctaagttaattcaaccgctagaaaagaaaatcatttgggtaaatattagaattaagtttgaatatgaccatgcgttgtagatatttttatttttatttttattttacaatacatatactatcaatgattggtgtaaattttaaaaaagataaatagaaaatctacatgctatgtcgaaaatatatattataaaataaagaaaatgtatgatgctagctagagatggtgaggaagcggggaccaaaactagaagaaacaacatattgttatgaatcaagaggatgcccattataaggcccattatctaagcccatcatcgagatgtttctagggttttaccctttccttgtactcctatataaagaaccctttatctcaatggaataatacactgatttcctctatctctttctctgtttacaacacgttatcagcacgctctaaaaggtagatatagagattcttacattttttttaagaaccatgtttacttatcgactcatggttcatagtacttattttctattattgaaacaaaacaatatgagtcgatcgatgattatagtatagatcggtaaaagcatgttttcaatgattcaataaagaagagaatcatgcttatcatttgtttctataattactatcgcatgattcaatgattctacaaagaaaatcgttaaagaagagaatcatgcttgttaattgttaatctttgtgatttactattacaatattgaatatataaattaccaattttataattatataactaattttgtaactattcatagcccggtggtgggtgatgtaagcatgtattaatgttttagcattccagttttgaatagttgcatctatattcaatatcattttataaatactatattatctaaaatccatttatgattgatatgatatcccttatttaactcctttgattaaaacgttatacatatcttatcacttttagatattgacttttccctattaaatatttgatttccatatatttgattgtgttattattatttttactaaaaacgttgcaagataatttttctttttataagattcttttctctaaatctttgtggtatctaaaaaaaaaataaaaaaataaaataaaattgttcatggttttgccctaattttgcacgaaattattttacctaaatcttacacgaattcatattaccctaaataaaagttttgtcaagatatatgtaaaatccaaattttgcacaaaatagttttattgtgattggttttacaatattgcattaaaattgtattagtatataatacttgattattttatgaaataaattgattgataaataacttaatttaaaggtataatcacttatagaaattttcatgaatgactagtttaatgtattttaagaaaatatcatatttttgatggtcaaagttttttcaagaacttaaattatcaccagaagttgagaaaataattttaaaaaaaaaaaaaacatttctaacgatgaaataatctagtatatcaagtagtataaaatcttattaaaagattctagaagagcatatacattgttttctatgggaatacaaaattaaaatcatcgatgctgtatagttctccaaatctcaaagttaatatgatgagatataaatacattatgattctagagtggaattcaatacgagatggatgaacttgaagtttcatcatctcgagaaagagaagtaatgaatggataataagtgacatatccagaagattatgttcaatctttgactactaaagatctaaaagttgtataaagcaattcttatatgaatgtgttattagataaaataaattattactaaaataagttattactaaaacttcaagacttgaagtctctttttgaatataactcacattgttaagagaatatctctgatgcggagatggtaaaacagacgattaaacttttacgcaagtatcgttgtcctgtagacacaatatttgaaagaaatttaaaaactattatgaacttaaatcgagtgtttttcaaaggctaaaaaaaatatatgagttattgatgataagtaatactcatattctaaagtgaatataagatcttacataactagtcaaattaaatttaatatcgtttatattagaatctaaaattttaattattatctcgttattgttttattaacatatgattgattattaaaatatatggaagtaattttgattataagatctcattaagggagtaactgataagcaatgaaaagtaaattagaagttttgaaagaactagaagtttcaaaagaattaaaagtttcaagagtatatttggcttaaccggattggtcatcctggtttaatgatgatgtgaaagtattgagaattatgtggacattaggtgaaaaaccagaagattctccctaatgatttatcaattgttacttgctccgaaagcaatatgataatgtgattttttacgagtcaaaataatttggactttatctattcgtaagtatatacaaggagatgattatggattgatcacccactgtatgatatttagatacctaatg

SEQ ID NO: 24304 - DNA, 3000 bp, Unknown; identical to SEQ ID NO: 24303
  misc_feature (1)..( 3000): 2750-1469P.txt file - cDNA_ID_2173470; gDNA_ID_2926169; Annot_ID_199355

SEQ ID NO: 24305 - DNA, 3003 bp, Unknown; identical to SEQ ID NO: 17945
  misc_feature (1)..( 3003): 2750-1469P.txt file - cDNA_ID_2173491; gDNA_ID_1621096; Annot_ID_170994

SEQ ID NO: 24306 - DNA, 3003 bp, Unknown; identical to SEQ ID NO: 17945
  misc_feature (1)..( 3003): 2750-1469P.txt file - cDNA_ID_2173491; gDNA_ID_2926163; Annot_ID_198922

SEQ ID NO: 24307 - DNA, 3000 bp, Unknown; identical to SEQ ID NO: 6515
  misc_feature (1)..( 3000): 2750-1469P.txt file - cDNA_ID_2173556; gDNA_ID_1621096; Annot_ID_171031

SEQ ID NO: 24308 - DNA, 3000 bp, Unknown; identical to SEQ ID NO: 6515
  misc_feature (1)..( 3000): 2750-1469P.txt file - cDNA_ID_2173556; gDNA_ID_2926164; Annot_ID_198971

SEQ ID NO: 24309 - DNA, 3003 bp, Unknown
  misc_feature (1)..( 3003): 2750-1469P.txt file - cDNA_ID_2173579; gDNA_ID_1621096; Annot_ID_171041
tctgtttatgttataatgcagactttaagtcttttatcaactagggtggggtttttgtaacacaaatgatatggacttctcttccttcatcaaaatatacgaaaaatgtatttgaataattattgattatttttggtccaaaaaacttgaatccagaattattaattggattaaaatgtttttgagaatatttttttgcagatgataccgcccataattttcttaaataagtttttgattggacttcttttgtctttcacaactcacaagtgagaaagactaatatcatagttcttttaataatcgaacaaaaattatcagaagcgaacaaacaggaaacattcgcaagaacaatgagtaaccaacctcatgatacaatcatctcacgaagcacacaactctcgcaatttagacagttcgtacataagataaatttatagactgccacaatcatatcgagtatgaccaatttgatcacgaaacagaatcatcaacataactacaagcaatagcttcctaaccggcgaagaagctgctattaaactaccggtaagataagtttgtgtcgaaagccccacgagtctacctcttctttccctaatgtactcatcaattgcttcttctatttgcatccttgaagagaaggaagatacattaattataccgtcttgacctaaatttaacttcctccacaagcatctagccaaaacaacaccgtcctcaagcgcagccgaacatccttgtcctaagaatgggcccattaggtgcatactgtctccggccaactgtcacgggtgccacgtcggaatttttccagacagaacatcccaaggagcacggtaccttaaacggttgatatacaaagagtccatatcacaattcttcaccatctctttccactcttctgagaattcgcggactgatgctagtgccaatcttgcgatatcctcttgattttttaagaagtttgagtctatttataaaacaaattataaatacgttagtgcgttatatgaaaacaatagaagtctatgtatagtatgaaatgtagcatgaccgggttattaattaccttggggacaatttcgcaaaacaacaaaccaaaagacgagtttgtgagttataggaagtcgtccgcttacgacgttgtccatcttgattcttataaactcttgtcggaatccatggtcgttccgggtaatttgtgaaccctctgatggcccgcgaaccgaggtctttagtcgggtttaatcctagaaatctagagactacagaatttgacccatcgcagccaatcaaaacctaaattaaaagaaaagtatattatcaaaatatataagacccatgcatttcatgctaaacatgttgctttcagtgaaaaacaaacaaaacacaaaccattaaaaccgatcacgacccataaatgtcactgtcggctaatataaggtatatactaaaaaaattccactacggcatcacctcaataattgatcaataaatatatctactgttgttaaaacgtgcctttgctttgatagcttctcccgtttttaacgtgcacaatcggaaacgattttgtttcgtcgagcttaaccgacaaaatatggcaaccaagccggagagtgccaagaggaagagcatgagccaaagctcgaaccaagtcgttccttagtacacctcttacttctccataggatgctggtccaaccgattctcttcgtttaatacctttctcgatcaaaacatctcttatcctgttttagtaccataccggaaatcattataactagataaggttagttaaaatataaatatttatatacttactgatgaattgggagagacttaagacgaagctagcttatcggcgacaccaagttgttgaagagcaagccagccgttagtctgaataccaaaatgctgctccttccgatcttacagactctgatctctccaacacaacgctctttatgcccttcctttataatcatatttgtatgtttagttagtcaatagttcatgtatatgttttctaatttaaattaccttataattgagaaaatgaggagattatagtgaacctgtgaagagcaagggaagttgcaagaccagcaatgcctcctcccacgattactatgtccaattcttccattcttctatatttgtatttcctccaaattttatgatcgttatgtcctgcaatgtcgtggacttatatgtgggggttgaagccacatggcaatatggcatgtcgtggttgtaccttgacccgcgtatttttcgttatctatacatattcattcacagcgatttttattggtatttgtcgattcatatatcaattaaactgtgtatcacacagatcgttatatgaaaccaattctgaagagagaaaaaaaagaaaagaaaaatttaagccttcttgtgttagaattactaattttaataatttatttaatatttttactgtattagtgattaaatgtataatttacttaatcttagaagtatatatatatatttaaaacaattattttcttacacgttatacaatatttgtaattaattgtatttatttatattagaaatatatatacctttttctaaaataatatatttttgttttgtcaattgcccttataatattagtaattcattgtatgatttccttataatatttttacacatgaaaaaatctctaactaaacatcttttcaataaactacatgaactatcaaatttgttataactttcagttatcctccaaagtccaaatattcaaagtgaattattcatgggttggatttaacaaaaataataatttcgaggttgaaatgacaatagatatttttaaaacaaaggaccaaagtcgaaataacaaaactcatcggccgcattaggtttggtcctaaatccctaaaaccctaaaaaaacacaatccctcttagaaacagagagcttctcttctttctccattattcatcactttcttccccgaagatg

SEQ ID NO: 24310 - DNA, 3003 bp, Unknown; identical to SEQ ID NO: 24309
  misc_feature (1)..( 3003): 2750-1469P.txt file - cDNA_ID_2173579; gDNA_ID_2926164; Annot_ID_198980

SEQ ID NO: 24311 - DNA, 3000 bp, Unknown; identical to SEQ ID NO: 6811
  misc_feature (1)..( 3000): 2750-1469P.txt file - cDNA_ID_2173637; gDNA_ID_1621107; Annot_ID_55987

SEQ ID NO: 24312 - DNA, 3000 bp, Unknown; identical to SEQ ID NO: 6818
  misc_feature (1)..( 3000): 2750-1469P.txt file - cDNA_ID_2173637; gDNA_ID_1621107; Annot_ID_171621

SEQ ID NO: 24313 - DNA, 3000 bp, Unknown; identical to SEQ ID NO: 6811
  misc_feature (1)..( 3000): 2750-1469P.txt file - cDNA_ID_2173637; gDNA_ID_2926154; Annot_ID_139445

SEQ ID NO: 24314 - DNA, 3000 bp, Unknown; identical to SEQ ID NO: 6818
  misc_feature (1)..( 3000): 2750-1469P.txt file - cDNA_ID_2173637; gDNA_ID_2926154; Annot_ID_198288

SEQ ID NO: 24315 - DNA, 3003 bp, Unknown
  misc_feature (1)..( 3003): 2750-1469P.txt file - cDNA_ID_2173803; gDNA_ID_1621099; Annot_ID_171297
actcttttccttttgcctttgcctttggagtcacattcttatttgtggaaactacttttacttcttttgacctgatattaccattacccttctgaggaatcgatgagatcatagccaatttagacacacgtgatcttgagggctttgcaggaaccgtgttaggacatttaggatcaacactgtaataaaaaaaaagtatgtagcacaatgcaatgttaaacacacattacagtgattaatctctctcgaagttcaaaaacacatttctcaaatagttagaagttcattacctgaaatcctttctataaagagcttttcgaagacgaacacttggactcctagctgccatgacctattaatgttgattaacatcaaattcttaagttaatgatacactttaaaacgaaatcaaatcaaggaagagaagaagaaaaaaagtttggaactttaagctaacccgaagaacgaattttttgtagattgcttccgaatccaaaaattcctcatgcttctgatcacatcctaaatacacattatcaccaggaaaccaaaatggatcaaaacataaactaattaaaaactgttcactaaaaccctaatttagcaattttcagaaaatgttataatcaaatttcccagatctgtggaacattaatgttattagtaatgatttgattcgaattttgaacaagggaaatgtaaaaagagtgaacaagattctgaccaactctagaacagaaccagtaacgatcatctccttcagggcgatgatctggtgcggtgaggtctacaaacttgggagcttctattgtctcgtagaagtcttcttcgttaaactcatccactatcatatgctcaaatgcctccatcttacactaaattagaaattcgcagagagagtatagaagaacagagagagagagaaagagtattgtctaatttggtgcgtgtctgtttagctagctcagacaagatgaaggaacattcacagaaactagccgttaaaaggaaaggattgtaataatggtctcttttcagggttattttcgtcactacagtgattttgattttgagcttcgaagcatctttttcattccgagtaaagtaaatctgaaggaaagaggagacagaagaagcaaaccggttcatttaaaccggtatctatatagaaccattttaaaccctgtttacgactcttaaacgtcaataatcatagaggcaggaatattttttgtttctttccacataatttatgctttgttttcttcgacagattcaaaatccgtatttaatttaactggtaaaagtaattattcggtaatgcacaacatttctctttctttgtttagacgcgatcagatatttcaatatgaaatcaaaattattggtttaattaaagagtttggagcctagtaaatttcaagcaaaaaaaaaacacaggaattgatcagagtgttatgaataaagatggatgcccattataaaacttatcatctaagcccatcatctagatgtttgtagagttttaccttttccttgtactcctatataaagaaccctttcctcaatggaaaacacactcatttcttctatctctttctctggttataacacgttatcagcacgctcttaaaagatagatatagagattcttacatttttttaagaaccatgtttacttatcgactcatggttcatagtacttattttctattattgaaacaaaacaatatgagtcgatcgatgattatagtatagatcggtaaaagcatgttttcaatgattcaataaagaagagaatcatgcttatcatttgtttctataattactatcgcatggttcaatgattctacaaagaaaatcgttaaagaagagaatcatgcttgttaattgttaatttttgtgatttactattacaatattgaatatataaattaccaattttataattatataactaattttgtaactattcatagcccggtggtgggtgatgcaagcatgtattaatgttttagcattccagttttgaatagttgcatctatattcaatatcattttataaatattatattgtctaaaatccatttatgattgatatgatatcccttatttaactcatttgattaaaacgttatacatatcttatcacttttagatattgacttttccatattaaatatttgatttccatatatttgattgtgttattattatttttactaaaaacgttgcaagataatttttctttttataagattccatatatctaaatctttatgttattattatctaaatctttttataagatttccatatatttgattgtgttattattatttttactaaaaacgttgcaagataatttttctttttataagattcttttctctaaatctttgtggtatctaaaaaaaaaaaaaaaaaaaaaattgttcatggttttgccctaattttgcacgaaatcattttacccaaatcttgcacgaattcatattaccctaaataaaagttttgtcaagatatatgtaaaatccagatttttcacaacatagttttattctgattggttttacaatattgcattaaaattgtattgttatataatacttgattattttatgaaataaattgattggtaaataacttaatttaaaggtataatcacttatagaaattttcatgaatgactagtttaatgtatcttaagaagacatcataattttgatggtcaaagttttttcaagaacttaaattatcaccaaaagttgagaaaataaatatggtaaaaaataagtaaaatttctaacttataacgatgaaataatctagtatatcaagtagtataaaatcttattaaaagactctagaagagcatatacattgttttctatgggaatacaaaattaagatcatcgatgcggtatagttctccaaatctcaaagttaatatgatgagatataaaatacatttgcttctagagtggaattcaatacgagatg

SEQ ID NO: 24316 - DNA, 3000 bp, Unknown; identical to SEQ ID NO: 6626
  misc_feature (1)..( 3000): 2750-1469P.txt file - cDNA_ID_2173832; gDNA_ID_1621099; Annot_ID_171306

SEQ ID NO: 24317 - DNA, 3000 bp, Unknown; identical to SEQ ID NO: 6626
  misc_feature (1)..( 3000): 2750-1469P.txt file - cDNA_ID_2173832; gDNA_ID_2926167; Annot_ID_199226

SEQ ID NO: 24318 - DNA, 3000 bp, Unknown; identical to SEQ ID NO: 6543
  misc_feature (1)..( 3000): 2750-1469P.txt file - cDNA_ID_2173863; gDNA_ID_1621097; Annot_ID_171088

SEQ ID NO: 24319 - DNA, 3000 bp, Unknown; identical to SEQ ID NO: 6543
  misc_feature (1)..( 3000): 2750-1469P.txt file - cDNA_ID_2173863; gDNA_ID_2926164; Annot_ID_199002

SEQ ID NO: 24320 - DNA, 3000 bp, Unknown
  misc_feature (1)..( 3000): 2750-1469P.txt file - cDNA_ID_2173965; gDNA_ID_1621097; Annot_ID_55731
gccttaattttcccatttctgctccctcgccgtaagcgacttgtagcgactctcgccagtccagtccaaaatcgggaggtgagcgaaatctccggttgttttttttcagtcatggagttgagatcggattcacgatcgagttcgttttcttctctcctattcgtcgcgtttctcttgtttctatgcggactcgtttctcgtaccgactcggctcagcaacctttccgtcgcgagccaggtcatcctcactggcatcacagtgctttccttgacgtacgagagagtgttcgatccgatgtccgccgtatgcttcactcccgtgccgaggtacaatctccagcttaaattatgtgaatcatcatcatcatcatcagttagtctgaatttagctagaagaagaaggagaagaaatcgttgagtaatttggttctgtagaatcaccgaagtgaaattaaaagcgttcttgttgcttcacgactatgatcatagcttttttcgtgcatatggttgttagattggctgagtttgagtgacacatcgagaattgaatttcacactatgaagcttgttttgtttaggtaccatttcaggttcctttggaagtgaatatagtgcttgtgggtttgaatggagatggaggttacaggtattcagtggatcctcaaaaactagaagagttcctaagagccagtttttcaacacataggccttcatgccaagagacgggcgagccacttgatattgagcatcgagttgtttataatatctttcctgtgagtaattttataaacctttaaccagtcttcacgaattttgtgttgtttatgatttacctgcttcaacatccgatattatatatgtaggataagatttctattcaagttctggattcttgtatttgatttagctgatttgcatttgcgtctcgagctgattattattgtacatgaagttttttgcactcaatattaagttttactgacttctgatgccaataatttcattgtttcccccattgacctaaatgttcatctttgtttttctttctctagagtgggcaacctgaattaatagctctggagaaggcagtgaaagaagccatggtgcctgctggaactgcactagaggttgctgtaattttatcatctcaaatttaactgtttctcataacgaacctaattacatataaaaatatgtcgatgaaaatgtggatttcatagctgtaaaaactacatcttaatgtttatgatactaatcttcaaaaatatttttggatttaggctgattttggaagacacttacctgcctatgacgtagaggcaataaaagtggagtccgcatttaaccagctttactcgtatatatttgatattgatgtgggttctggatcagccgcaacggcagataaacctataccaagtgccatatttgtagtgaattttgataaggtatggcttccagtgctcttcttacttcttgaatcttgcatatggtatgcagattgtccaaatgctttatctgttcttgtattttttttgctttgttttgattgaaagattttttatgccttcttggctttataaccgtcatatttctctgttcttgaagttgatttttttcttgtcatatttgcatttgttcagtaattgattctatcctgctggattctttaattgcccccttcttttctttactcattattcaggtaagaatggatcctaaaaatacagagattgatctagacagcttgatgtttgcaaagctaccagagcttagtgatgcagacaaggagaaacaagaggcagattatatttatcgatatagatacaatggtggaggagcatcccaagtttggcttgcatcaggcaggtaaactcatctttgtttttctattcttgctgcgggaaactatggacaaattactcaaagggttttcccttggtatctctttgttatcccctatgagtgatatgattgtgccatagatgtgatcaaacaaaaaaatttaaccaccttattatgaaagtattacatctatctaggtatcattaatatatgccattaaagtggaagtgagatatcattgtcccttttgttgattatatatagtccataaaaaaaagaaaaaagaaggagatagacactttttattacttcatttcactttggtaatcatatcttattgtagtaatcagctcttttgttcgaaaactaatattcaagatattgttggcgtaactatttctgttcttatctggtataacttttcctctaagctctcaacatgattgtatttctgatttatctccccttcttgatagatatgttgtcatagatttgtctgcggggccttgtacatatgggaagattgaaactgaagagggcagtgttagtcccagaacagtgccaaggatacgaaacattgtgcttccaggaaatgttagccctgttggtcatcagtctacccatgatatcttttctggtcagttagcagcgttggtagctactacaattgagcatgtcatagctcctgatgtcaggtaatatgatatgtgagactttacgtccttctagcaatgaaaattatgcttaaatgattaattctgagtgcattgtgctaacttctaggtttgagacggttgatctagcaactagggtgctggtacctatcattgtgctccaaaaccacaatcgatataatatcatggaaagaggacaaaactacagcataaatattgaagagatagaatctgaggtaaaaacttcttgcgttagatgattgatgttcaagaaatactagaacttgttatcttttgttttgttttctgaatggtgttttcatccttatgagttaatatgattagtaaaaaagacatgttttccaagtttactgctatcagaaagttagcacccataatattttccaaagtacactcaaggatttgactctattggtttacacatactaactgcccggggtctttgcaggtaaagaaaatg

SEQ ID NO: 24321 - DNA, 3000 bp, Unknown; identical to SEQ ID NO: 6555
  misc_feature (1)..( 3000): 2750-1469P.txt file - cDNA_ID_2173965; gDNA_ID_1621097; Annot_ID_171130

SEQ ID NO: 24322 - DNA, 3000 bp, Unknown; identical to SEQ ID NO: 24320
  misc_feature (1)..( 3000): 2750-1469P.txt file - cDNA_ID_2173965; gDNA_ID_2926165; Annot_ID_139873

SEQ ID NO: 24323 - DNA, 3000 bp, Unknown; identical to SEQ ID NO: 6555
  misc_feature (1)..( 3000): 2750-1469P.txt file - cDNA_ID_2173965; gDNA_ID_2926165; Annot_ID_199064

SEQ ID NO: 24324 - DNA, 3000 bp, Unknown; identical to SEQ ID NO: 6614
  misc_feature (1)..( 3000): 2750-1469P.txt file - cDNA_ID_2174046; gDNA_ID_1621098; Annot_ID_171175

SEQ ID NO: 24325 - DNA, 3000 bp, Unknown; identical to SEQ ID NO: 6614
  misc_feature (1)..( 3000): 2750-1469P.txt file - cDNA_ID_2174046; gDNA_ID_2926165; Annot_ID_199084

SEQ ID NO: 24326 - DNA, 3000 bp, Unknown; identical to SEQ ID NO: 6585
  misc_feature (1)..( 3000): 2750-1469P.txt file - cDNA_ID_2174083; gDNA_ID_1621098; Annot_ID_171195

SEQ ID NO: 24327 - DNA, 3000 bp, Unknown; identical to SEQ ID NO: 6585
  misc_feature (1)..( 3000): 2750-1469P.txt file - cDNA_ID_2174083; gDNA_ID_2926166; Annot_ID_199125

SEQ ID NO: 24328 - DNA, 3000 bp, Unknown; identical to SEQ ID NO: 6609
  misc_feature (1)..( 3000): 2750-1469P.txt file - cDNA_ID_2174090; gDNA_ID_1621098; Annot_ID_171199

SEQ ID NO: 24329 - DNA, 3000 bp, Unknown; identical to SEQ ID NO: 6609
  misc_feature (1)..( 3000): 2750-1469P.txt file - cDNA_ID_2174090; gDNA_ID_2926166; Annot_ID_199129

SEQ ID NO: 24330 - DNA, 3000 bp, Unknown; identical to SEQ ID NO: 6608
  misc_feature (1)..( 3000): 2750-1469P.txt file - cDNA_ID_2174100; gDNA_ID_1621098; Annot_ID_171202

SEQ ID NO: 24331 - DNA, 3000 bp, Unknown; identical to SEQ ID NO: 6608
  misc_feature (1)..( 3000): 2750-1469P.txt file - cDNA_ID_2174100; gDNA_ID_2926166; Annot_ID_199132

SEQ ID NO: 24332 - DNA, 3003 bp, Unknown
  misc_feature (1)..( 3003): 2750-1469P.txt file - cDNA_ID_2174128; gDNA_ID_1621098; Annot_ID_171212
acgctttgaaacaagagaagcagaatgacgatccacaaacaaagacttagaacctaaactcgccattgatttacacggatccgaaagcaaaagatcaatgtgatatccacagacctgaaaggccggaccagatacagaaggaacagagaaagttcgagaaacagcaccaataacagaaagattcctcctttcgttaatcaacaacaaatcagagctagctggttctaaaaacccgttagggttagtaaatctagtgtacaatcctctataaccaccaaaccctaaattccctaatccaatcaaaatcttaacttgtttctgaagactttctctcacaggtaacatcttaagcacaagaatctcgaaacccagtaataaccagagatagagaagatcatatcttccaaagcatcacttttttcgtcgatttaaacgctttcaccaacgaatctaaagattgatccaacacaaacccttgaaactcagagctcaatcaaatacgaattcggaacttaccaggacccacaaattctcttttcacctccttctggagaagataatgtcaaagtcacaacagaaattggctagaatccagataagtttctgaaagaagagatgacaaatttcacgaaagaaccctagccaaatctgatctttaagacaagaaacacaaaagctggtggtcaaaagcaactcgcttttttcttttgttctaaaaaaaacaaaaccagtgaaattttgggatgtctcaaaaaaaatttctgtatttgaggtttttgtgcgatgggtacagattatcagaaattcagaatgttcctctcacatctttttggatataagtgattttcagctgttggatcatacatttaacaatctcagccgtacattttctgtttttataaaatagactaataacgagaaaccgagtcgtggagattaatgggcgtacaaaagcccattagagtagcaatcaaagcccatgcatcggcatcaaattgtttttgaggatcatttgtcaattgtcaacgagtagagccgtgcataccatacaacataaagggaaatagccatagctaggccacaaaaaaaattctactacttaaaacgccacattttttatacaaattatttgatttttttggttacactaagacttttttccactaaaatagattacttttacattagaaatatgttataaagttgtaattttgtgaaaataccattcctataaatattttaagatgcttgaaaatcatattttgtcaaaataatagaataacgtttctaacgataattagaaatcataaaataatatacatgttaaaataaaataaaataaataagtagtcagtacaaaagaaagtttacacgtataacaatttgccataggcctccataaatccatcatatcagaccactctaatgtttttacttgtaaatatttgatggacaaaaacaaatgctgggcctactatagctactatcatatggatgttacatgcagaaacaaaacatgcttttctctctgaataacgaactaaacatgttatggattaggccctaatagctagtccagttaggattttaagattttccgatgtatattaagtgtcaatgtgtcatacatgagcctctaataaacacacgcccaaaatcaatagaactaactaaccctatacaccgaagtaatatagaaccagcacgaactctagatctggaaaatataaatacaaaatatcttttaaaatgttttctaaatattattgtaattatcatatgaaaaaaaaactattcataaaaagtaattatcaacatatgtaatctttcaaagatgcacttgatgtgtgtatcttgttggttagaattttaatttattaatcgataacttggaaggcaaataacagtaaaaataataatctaactgtagtaaatatctccccacacgtcattttttttatttttttttattttttattttggcaactcacatggtttgattcattgataagtcagtttcaattttatttttctcaaatttaaataattctccatttctaaaaataaaggggcaaggtattggtacgcacatgagactaacattcatacctttttatgaaataaataaaacaaaaagggacacaagaaggaacgcaagaattttaaactgaaatgattgtatctctaaattgagaaaaatcccaaaaagaattagtaacaaattaaataactaagcggtgttgttttattcggaggtaaaatatatatatggagggtatagcgtcaactcgcttttttactacattttgatttctctcccaaagttctttaatttttgtttgggtatcacatttgtagtcagaaacaaaattgttgaatgaattatcgacgactattttcactcgttggaatagtcgggattcaatttattaaaccgtcgtaaggaagctaaagatgtaaaaatgatgatatacagacaatttggctagctcattcactttttaaatgggcaaaccaatcatgaatgctagtttaatttatcgtgtgattgattttttttttatataaaaaaatagaagtaaaattgtaactttttatgaaaaccgtcgtaatcgtacgtcactaagctacaaaaatacaacaaacagtgactaataagaaaatgtagagtgatattagatgaatttaacacgtggaaaaatcatgaggaggagatgattttttctgttgcattcccttctgtggttaccagctacgataacgttcacgccctcctccacttaaattagaatgtgagaaaataaaatagcaagaaattggagatcacaacagtattgagtgtaggacatattacaaaggagacaaaatcagtcaatagtaaaaaggtatcacaataaaaaaaaatgtcaataaaaaggggccattgtatgacatgaaagaacaaaattaagtgatcatcacttctcctcctttatcgagagcttcagttttagagcaacaatg

SEQ ID NO: 24333 - DNA, 3003 bp, Unknown; identical to SEQ ID NO: 24332
  misc_feature (1)..( 3003): 2750-1469P.txt file - cDNA_ID_2174128; gDNA_ID_2926166; Annot_ID_199142

SEQ ID NO: 24334 - DNA, 3000 bp, Unknown; identical to SEQ ID NO: 6598
  misc_feature (1)..( 3000): 2750-1469P.txt file - cDNA_ID_2174182; gDNA_ID_1621098; Annot_ID_171239

SEQ ID NO: 24335 - DNA, 3000 bp, Unknown; identical to SEQ ID NO: 6598
  misc_feature (1)..( 3000): 2750-1469P.txt file - cDNA_ID_2174182; gDNA_ID_2926166; Annot_ID_199167

SEQ ID NO: 24336 - DNA, 3003 bp, Unknown
  misc_feature (1)..( 3003): 2750-1469P.txt file - cDNA_ID_2174315; gDNA_ID_1620812; Annot_ID_57892
caagtaatgaagcaaaaagagatttgaaccataatacatctaatcagtttaagaaggagcctttttgattattaaaaaataaaaagattgttttcatcaaatatctaaatagaaaatgatataatttactaaaaatatgttttacataaagatggatgtcatttaaaaataataggcttgggaggagtctaaaacggttgttttcacttggctatccctagggcccgttacgtatggtccgattgtttcgtctaatttgcaacatgaaattggtgcacattatttcttcatatggagtttgtaacaaagcaaaacataatattcacgttaacaaaaaaaaaaaagattaaccacgattttagtataaaactttagaccaaaaaatataacatttattattggtcttatctggcaaaaggatcttatgtcttttattttgtgatcaaaatcaatcaattcttcttcttgatcattcttatctcagctttggttgctccaatgttaggaataatgtgaaaacatattgttgaatgacgacgaagacaataaacatctcctacttgtatgtgaattttgagttttgggcattgagctggtcttatttcgtattgtttgaatcttgcatatgaacaacgcgtaacaaattggaagagctaatggtcgaggtccttgtgaattgtgagtatagtggagatgtacgtaaaatctgagaaggatatgcagaaaatgaagaagggagcctcatgctcttattttcgataattcgatttataatcactgtaaaaaataaaaataaaaatgtataacgagaaatctggagccaataatcacgtgttagatgtgacacacacgagacatattttgttataaccctggactggacagtgaacggtgcttactgcttgcttagcaacgactcttcggtcgataatgacaccatctttacgtgcgatcgtattattggtcgtttaactatcgacggggaaaattaacaaaacgaattaattatggacgcgtccaactattggattttcttggattctcatccaaaagagctttcactcttttaggccgtgaaatctaacggtcgaacgtcagacaaactttgcgactcactctcaccatcaaagtcacatcacagggcagttggatcgctgttcttgttctgtatttcgaagaagtttcgtttgccacttctttttatgtcggtaatatattaactaaaattggaatttcgtattgctcttcttgtgctagatgagatgtgaatcaaatgaagcatggggatattattattattgtgagaacgtcaaaaataccttttgaaatttcttaccttctaatttgttaaagacggaatgtcattgtctgtaattttctttttataagtatataataatttagtacatcgatctttcaaatggtaatatttctaatttatatattcaatccaaatgaaaataaacaatcaaatcaaacaaacaaagtttacgtttatataacactgttaactatatatgtgtttgctctttcgagtcaagcaaccattataacatatccctttttaagaaatcatcaatgagatattaaagaaaaacctaagagcttttttagatatatcaaaagggtaagatccgaaaatgtaaggataatatctgtggtttgagcagtagtagtattttcatcattgctgtaagcgaaattagtagtggtcgacaaagaaaaagattaaatagtaaagagtggatggccacttgggacgagtcggagtcaaatatacgacgacagttggagaaacttgacatctaccttggcccgttcttacttcttaactcttaaaaataccttagtgggtttctgccgtcagggataatttttattatgaaatccttcattttaatccggtgacataaataagatactagatcatttgaaagataaataatgtatcataataataaaaatagtgtttttgcgtttttggcgatactcatactatggattaatttgttttgtggtaggatattatttaatatgagtaaaatacttaacaatttaattattttaagaaaagaatttaatgtcattttcttgtaacatcttatcaactagagattatacactataaacttttgtatcaagccgtttttaaaattatgtgagattttactttttctaaaaacaattcaatgatatgatttctcttgtttttacttgattgtccttatataaaccaaccaaaaaaatactatactttaatacttgttaagtaatattaaatatccatcttagatattttacaactctttttaggtaaagatattttacaaccttttcttttctttgttttgcaaaaggtttttaacaacgctttacatccaatgcagtttgtaatctataaaagaacatataaacttatactccgtaaagtaattagttatgaattcgctcaaaacattattctcgtttgtctaaaattaacataaaacccaatataccggtaaaagtaaacatacatgcaaggctaaaagacgtgggcataacgtgtgattgggaaaccatcggaaacaaaaataaggaattataacgaatggccatactaggttgactaataagagaattattatttgacgtatataagataataagacaattatgggataaaattaagagacataagtgtggacacgtgaagcttagagtacgtgtcaatattcaataagacataaacaacaacaaaaaaaagggtttattctctactcttgttttgtttatacaagaggatgcatctactgccccaaaacaatcctgaccgttcatgtctctattcttagatccaacggtatgtatcagctatctcattgtcccctctcatagctttctatataaaccgaaagaaagaataatagagtcagagctaagacttaagagcgtcacaacaatatcacactcagataaatatcaagagatagagagagtaacagtgatatagtcgagaaaatg

SEQ ID NO: 24337 - DNA, 3003 bp, Unknown; identical to SEQ ID NO: 24336
  misc_feature (1)..( 3003): 2750-1469P.txt file - cDNA_ID_2174315; gDNA_ID_1620812; Annot_ID_169105

SEQ ID NO: 24338 - DNA, 3000 bp, Unknown
  misc_feature (1)..( 3000): 2750-1469P.txt file - cDNA_ID_2174521; gDNA_ID_1620832; Annot_ID_169701
taattttaaaatttgttcaaagtacaacttgcctttttgaatgatctcatctgttttttttttctttggttgtgtgctttatttaaccatctttttctttcacctgaatgaaatcataaactaataaagaaaaaagaagcttacaattgttagacaatattcacatgggatgcgatgttatctactagtttctcagttcaatcacatgcttggtttctttcatgttgatctgatttagtaatacaagttgatcacatagacttttgatttctcacttcttggttgttgtgatacggtaatgcaacttagcgaaagcccttctttggactagctaaaaaagcaacacattcttttcttctaatgcgtggttatcttgctacttagagtggatggtctcttattgacttttatagtcaacatttgtcttgttgcatgcaatatcatcaatgttacatgtttgcatatttgatctagaagataagaatactgcaacgagaagaataggaacatagtgcatgattagcttgaattagaggttcttttggtttttgttataaagtaaaaggtggaaaagtcacatgggactcccgtggattccgctaatgaccccaccaactttctctcctaagattttatttttgatttggttattaaaaaaaaaaggagacatagggttctctacacaccacaatcaaatcatctataagactgcgactatgcttcttctctatctttctcaactcttttgccatgccctctggttgcgttgttcccttggtgggtcgtattatgtctctctgaggcacgctactagcacgtgtctacttgcatgttaccttcttcagtgaaccctattttcaaagcagtcaatgcattgctgaaaatgtaaataataatcccaaccatacaaactatcgttttttgccattaaactgttaccctaactactcatatgtgtgtaatgtgaacgtaatggtctctataatatatgatcagttcatgttttatgcattttagtatatttttattggcctatttaacatctctatttccttcataattactgtggctgctgtagaaatcttttaacttttataatatgtttataaaactgactgaattgcgtgaattataaattgactgaaattaccttggctgttgtagaaatcttttaactttttttaatatatgtttataaactgactgaaattgcgtgtatatattatgtagtccagtattttgtgtgactgactaaatattttgactaagcacggttgcttggtccgactatatattctgtcacataggcaaaactattgtaaaatcaggtaatgttcttgaatcgtctttgggttgagttttggtgtcagagaagctgggtaagtgggtcagtagagtcgttggggcatatatataaatgtccaaatacattaaagaaagagagagagaaaaggaaattgagttttggggtatcgtggagaacataaatgagaggtgtagcgttatttccgggggttcacacaacctctaaatggtatttacacgtgtcatattgagattgggtaattagtaggcctaaggggggatgtctcctcatggggacaagactattagtcctctcctgacaaatgacaatggaggtaactattcactgcggcggttttttgactgctgcactcaatcgtgtgcgtcctcgatattctctaccccttaccactctttcttctttcccttttttgccctctttagccacttagccgttttagccgagaaagcccatttaaactttttcatggtagtgaatagtgataattctgttacatttacttgctataacctataaccattctctgtctttgatgtctttgtatagtgataattcttgtgaatttggtgtaacagaggatggtgtaatatcatctgacgaggaactgagtggaggtgatcatgaggtagcagaggatgggagacaaagatgtgaagaccgggacctcaaagataggttgctacgcaaatttggaagccgtattagtactttaaagcttgagttctcaaagaagaagaagaaaggaaagttaccaagagaagcaagacaagctcttcttgattggtggaatctccattataagtggccttaccctactgtaagcaaaagcaacacttgcatgttttccgacataactaaccactacacttatatataaatgggtggtatgaatgtgtgtgtacacaggaaggagataagatagcattagctgatgcaacggggttagaccaaaaacaaatcaacaattggtttataaaccaaaggaaacgtcattggaagccatcagagaatatgcctttcgctatgatggatgattctagtggatcattctttaccgaggaatgaatttatttatggtacttatttaacgttgattaaaagatggatgtataattctgccttgctttgccgacaaaggaaaaaaagaaagaaagagtgaagcatggacgacacatgaaatggatcttacactcactcacatgtagtagaaggaacaagtcaaaatgctttgtaactattattatcggtgaataaaaataacctcttttgtcttctccggacctctcgtgatatagcttttaccctcttattggcaaaacgttgaacaaacaaaatacttagataggttagatttgtttattaactatgtgtttttcaaaaataattataaaatatcttgttatttgtgtaaatcacactaaattaaacacattcttttattgacagtttaatcatcatgtacattttgctaattgtagccaaaagtttagctatctagcaattggaaccttgtgcccataatccaaccatctctgtttaaattttggggtgggtttcaaattatccttattgggcctaaaatcggcccaatattaaactgaaaccagacttttatccaatccgagtaatcggaacaaaacaacatgatcgtgtgaaccaacggccaaaaaatg

SEQ ID NO: 24339 - DNA, 3003 bp, Unknown
  misc_feature (1)..( 3003): 2750-1469P.txt file - cDNA_ID_2174682; gDNA_ID_1620818; Annot_ID_169337
aaacacttttttttctttttcttaaacacttctgatggtcaaaataaagttttttgaatagaacctttggttggaaaaacaattcgtataaaatatcgacatccggaatacaagctttcttttcaattatgtgctgcatgcggtattaacaaaaaaaattttggatctatatgtttatcatatacttcgtttttatattactaaatagaaaacatacgattacgcgcgatattccgatcgttataaattgtttcataatcacatttcaatctattagggaagggctatattatattattactactataatatgagggatacattaacagtcgctaataaaaacatgttggtatggaatccaaacatgcctagtgattttaaaaaaaaaaagggttttaacatatctatggctagtggaagtgaagagagagatcgtatatgcatcccttttctgttgtgtcggccgtttagatctttttatattatggttcttttttgtatttattttaagaacatttgcttctctatgtacaccatacggtattcaaattcaataaggttatacacatatatttctttcttttgggtgaaattgtctatacacatatctacaatttgtgtatataaagaaacgccccctacgtattattggcccttcgcataaaccaagagccaacgaagcaagcatcttccaaagaaaaaacgttgccaataattgcttccaagtttcaagccacgtagtattttgatcggtccactcaaataaaataataatatggatatttgcatatatataagtctaggtattgcatgtaagacttcacaacgtagagcaagatatctggatacgcggaaaatagagagaagaaatcaaaaagcatatttttattttatctttgaaaagaagattattgtttttagtctacaatggtgactctaaaaatggagatttgcatcgagttgttgaaattgaccgtagatttcgtcgccgccgttgcagaatcaatcgaagtagctttccgccatcgtcctccaccggtgattcaatattcttcagtgatgtatggtcgccggagtaattacaccgccgttcccattcctctcgtggggtttctgtagttaatatattcttcttttgtggttcttttgttttttgttcattcttgttctattataattaccttcttgcctcggacaaaaaggtatatttcttatgaaagaacaagatgtgttttgtgtataaaccaaaaaaatcacgaaaagtttacgtaacccgtgaatatataaaagtttagacgttcccgattgtatatatttttttcgatatatatattttgtttattcataagacccttaaattatatgtttctattatatcaatgtgttcacactttcatggtagatctgatcttgaagagggcagaggttgatatatttgggtcatagtcgaataatgatcgtggcgatatttttttaattccactagacaaatacaaaacctattatcttatccatgtttgagatttaagattagaattgttttttgggtggtgtccacaccaagtaacgtgtcggatactatttttggaaaatttgttttgttcttgacgaatcgtggcccatctttgatccatcttcgatgcaacaccgaaacagcaactgatatgtagctatgaggaacacagatttgtggtacttttgtatatactagatgagtactcgcactacgtgcgggtttacatattactatttacaaattattttatataatatttgttcatataaaataaagttgaatgcatcggtattgaaacataaatatgatttagaattgtttttgaaaagtccaactatattagttcatctgaaaaacgaatgtacttgagttgtttttttattgttgttttagattctcagtttttttttttgaatttatatatccttgtttttttgttatatgtatagattatgagacgatggaattttagaaaatttatttcttacacaaaaagataacatgtctttattaaccatgtctctgcatattcaatctaaacatattcaacttgatattcttggaaagtttagttaagttcttgttataatcttatattttacgtattagttataaggatagctcttcaaacatttttcaaattacttgttttcttagaataaatctcgaaaagcttatatatatttaatctgcatattcatttagtttttttcataataatcgtctaatttttaggcaagaaatatgtgtaacatgtttggattttatcatcattttagcctcaaaattaaagaggatatattgaattaaaaaatgtaaaaagagtgatggttcaagttctcattaattatatcctcttattttagttgttatgttgaattaattactaattatgtattacttattttatgaagtataggtggcaaactctcatgtgctgatgtgtcaagttgtggaagagagttaaccttctttcatatatatgattactgttcaacaatatgctgttaaataacatgaatgtttttgagtttatgataccatgatacattgacacaatattatttaaaaatatctgagctttgtacctccaaaattcggggacgatatgtttaagcttgtggcagtactaggaagtgatgtttagcattatttagagctatcatatagactgtagaaaatcagtcatcacatttcaagtatggtaaaaccaaaaagttgttgacaacgtcaacgacctgaattagttattatttcaattccaaattagcaacattgatatactatttttataatcttgaacaaaactaattttacatcttctaattatagtctcaaaaaaaacacatgtaaaatctgtaattatttttactttctcttataattaacctttccttcattcttagccttttttccctcaagactcttctattaagcagccttgggtctttcccaaggtttttcataaaatgattaaaacaaaaatg

SEQ ID NO: 24340 - DNA, 3000 bp, Unknown; identical to SEQ ID NO: 20842
  misc_feature (1)..( 3000): 2750-1469P.txt file - cDNA_ID_2174723; gDNA_ID_1620818; Annot_ID_169358

SEQ ID NO: 24341 - DNA, 3003 bp, Unknown; identical to SEQ ID NO: 18347
  misc_feature (1)..( 3003): 2750-1469P.txt file - cDNA_ID_2174764; gDNA_ID_2214458; Annot_ID_182710

SEQ ID NO: 24342 - DNA, 3000 bp, Unknown; identical to SEQ ID NO: 2834
  misc_feature (1)..( 3000): 2750-1469P.txt file - cDNA_ID_2174902; gDNA_ID_1620606; Annot_ID_161790

SEQ ID NO: 24343 - DNA, 3003 bp, Unknown
  misc_feature (1)..( 3003): 2750-1469P.txt file - cDNA_ID_2174947; gDNA_ID_1620604; Annot_ID_161723
tagttgatagtataatatgatatcaatatcatagtagtgaatcaaagaagaatgtacatatgattaaagtgagtaattcttgtatgagtggaatggagatatcagatatcttctaaaagtgatttcgaatcatggacttgtaaaatttttcttaatttttgactttttgatgaccaattcctctatttatttatttatttccacaaccgaccaaatattttcagataatatactctgatgggtccattgtattttgggccaaaaagcagtcctctattttatcaggatcagtgggaattgactcggttttgttctacttgtaatgggttatgacaaactgagaccaaaccagccattttacccctgcattcttattacaaaacggccaatgttatattgtcaactgaaatagttgagaaatacagtttacaaaaatttggcacctaaaaagagattgaaacattctacaaagcgataaaactttactttatctttgaccggacaataaatgataggcatttctagaattttaggaaaaaaatgaaaaaaaatcaaaatgtgaacgttgatacaataagaaagtcggtgaacaaaaaaaagataatataaaagcataatatagacaatataaaaattggttcgaccatcccaaacactacggaggacccaaaatatgagccaagagacagcgatagcaagcttcaagaaattccaacagtcatggatcgagcagctacgaaaccacctgaaccacctccgctccgcccaaaaccatcaccggaactctgctaccggtgatgaggaacggttaagggaggctgtggacagagtgatggaacactttagagaatatcacagggccaagtgggctgcgacggataaagacgtcatcgaagttatggcttctccttgggcttcagctcttgaacggtcgcttcagtgggtcggtggttggcgaccaaccaccttgttccatctggtttacactgagtcgagtattttatttgagtctcgtatcgttgatatacttcgtggctttcgcaccggtgatctcagtgatctctccccttctcagttcaggttctacacgaacccctaattagctactttgtttactaatcacaactactagtaaagatttttttatctaatttaataaaatatccttaagttacgttgtaatttgattgaagtaatatcgtgatttgcgcgtgttattgtttaccaaaactaatacaggttcactcctacacctagagatatcaaatatgtagattagtttagaacatacgatgtttatttgtttacttttcttaccaaaaatgttttagaaagtgaaaaacacatttgagggataacaataaatttgagagattaaaacacttattttactttcttttttttcaatgtgtaaacaataacatatggactaactaaacatattttgattacttaatatttaatatttagggttccatttgtcaaaggcaggacggtaagtgagctacaatgtgagaccgtgaaggaagagaatgcgataacggaagagttgtcggagtggcaagacgatgcgagtgaccttgtcatggggacatcgtcagatcccgaccagaggatccgacggctagcagaaatcgtccaccgaactgatgatctgcgactgagaacgatcacacgtgtggtggaggtcttgagtccgctccaacaagcggagtttcttgtcgctgcggctgagcttcgtacaggcgttgctggttgggggactagccacgaccgtcgtcgaagttccgaagtttaaagctaactaaaaccggtctaaaggtaatgagaatcgaggaagaaaaatagtttttggatattaattatatgtttttaccatgtttttggttatccagactgagtttggttttacatggttatgaaaacaaaaaaaactcatatgttatgtctctacggttgcaataaagatcaacccacgtgtggtgcttgttagtttaccttttttagttagaattttgtgtgtttgattttttttatgaggtaattatcggaccttattggggcttctgatagtttgtatataaaaaatactaaagacagagaatcggggacatgggtcattgttggtttctatagaccaagtggataaacagaaaacaaaaagtcagctacagaaaaagacatgaagtgaacgtggcactgccatgtctcttgaagacatgcaagaggacacttggtgtggtacgcgtcctcctatcacggtgtcgattccaaacattttgtttggtttagttttaagattcttcttcgaaagaatctcatttttaatcgaaagatatgatgacatgacaaatttcttcttacataaatttgctcttataatgtttattttcgtgtaagttttatatattttctaaaatattgaacttaaactagctagaccctttataaaaatactatcagcccttttatataatgctttggtgacaacagaacgacaagaaaaactgagaagagacctaaaaacgattatagcggttttgattggttgaagatgtgtcacaattttttttgtttatttcgtttcatttttatttaatatgctagtaaacctgttttttttttttaaaactgtattataaaaacgtgtcttgttaggcctttaaagcccaaataagcccaatgaaagaggaaaagaggagacactgagatttggcccaaactaacgcatatatttgtgttttacatttatacccctatgaccgacatcaatttaccgacagactctactttcgagaatggcgggaacgtgaactgaaccctaatcaccttttttctcgattccccaccaatggctatatgattacagtagcccccttcgtgtctcttcgtttccagttccctctttatataataaatcgctccactctctttttccgagaaagaacacagtatctcgtctacaacacctgtcacattttgagaacaacggcgaaaacaatg

SEQ ID NO: 24344 - DNA, 3003 bp, Unknown
  misc_feature (1)..( 3003): 2750-1469P.txt file - cDNA_ID_2174959; gDNA_ID_1620604; Annot_ID_161726
gtgactagacaagtgcctacgccgaagaatttgctgtttaagttttgtgaacatatgtctgaatctcttaaacttggtgcaggaatgagagaaaaagttccatgtctgacccttaatcgatgctagagttggtaacttgctatgagatatatgcgaagctgtccagtttttgtttggcttgcttgaggatttccaatcttctggaccaagctctgcttaacgtttaacaatgtattgagttgctcctaggcttcaaatgttgctgcttcttttggagatatgactctggttaaagtttaaccaaacattcatttatctggttaatctcaaacctttgctatgtttgttatcccacttttttcatatggttctttctagatctctgtatctggtgtgtcttctctcgtgatctcaacattcgatgtgaaaccaggtagattgtaatattgtatcatagactgcaaaagataacgcaaaagagaagtctctgatctcaacctgaatcagacttgttaggagtccctcttgtttggtttaattcaattttccggttcggatttctggattataaaccgaattaactacaaacggaaaaacgtaccgcgttattgcggtaaccagcaactttaattggcctatagtagaatcaaatgaaaagaaaagagcaattttttttttttttttttggttttttggttaaagaagaaaagagcaaattggaaaaacaaatagataagataatttatatgatttaaaagtcaaatgtaatcacaacatataaattttaacttataaaatatagtcacaccattgcctcatcgtatttgctttcatgaatcatcccaccacttgtaagctttattttattaagaatgaaaacggagaaatataaattgaacactatatactattgtcgtcaccctccccgaatgtttctgataaataatgttaactatcatctaatacgtcaaccggattatcaccgacactgaccccacacctaaccactgatgcacaagtttatattagtgtaggtatcatccacaatatattatccaataattgaaccttgttaatgtctttggttcataaagcgatctataatcaattcagcattattgctaaaattcaaattaagaagacggcatgatttgttaaaaccataaagaaatacaaaagggtcaatgataaaactgtttaaacgaatcagtctacccaagagccgtctctcgaatactagttttaaattcataagcgtatagagtttagtgattccagaacactttacaggccaaaatctaatatttcgatattttgaaacgacatttttagtcctataattaaatttgcaacgtattagattacttttaaaatgtgatactgcgaagaaaatgaatcaaaagattgaatcgaatattcgaacagacggacaagaacccacgaagcgatacagatcagaaactctgcttctttttttaacaagagatcacaaacttggttgacttgagttcatattataatgacgtactcagtgattcgaatattccataaatagtcgtaagaataaagaccttaatgtatacattgttcatttcgtatgccacattgacgaagatcactgatataaatttcaattatataaatgtaaaataacaaaacaaaaagttacatgttatcaaatagtgtcattagctaaataacatgttacttggccaccacatcacttttgttgagaaatttctaaaatttggctatttagtgcatataccctttaaaacttgttgtaaaagcaaggaagaggaaaaaagattgaacctatagcaaaggaaaaagaaaagagagtacatattcttaagtcttgattacaatattttgttcttcaacatattctcttagagttgagataacataaattataatatagatgctctattgggtagcagtagatagaagaacatatgctgaaaatcatttttatagatctagcaaatcacctttataaaggatccagatttttttttttttaactttttgaaagtcaacttgatcatatgtgaaagttagagtcagagatttatgcatcttcgtgcatagacaaaatgcatgcacgagctcacacgatcctgtttttttttcttaatgaggtaattttcttgctgtcatttttttttctaaagttaagattcatataaaaaccatatcaggtaattccttaattttgtgtaataattaagaaatcaggatcattagatctttgaccaccaaaactcaaatttgttcccaaatacactcagttaaagtactatctttaatcatttcatattcgttactttgtaaattagtacaaagtaagtaacaaattttagtttacccaatgaaatggaatgaagttaatgaaaatattcgttcttttagaatattcttctgctcttgacagtgtttaattatttaattttcttacttgaaaaaataaaattgaccaacaattatttttcttacctcatgtagataacttacaaaataaaacatatatatatgtatatatatatttattttcaactcagaaataaataattctaacgaaaaaatatgaaataataaaaaaatctgacttaaaaagcgcgcatcgctcatgccaacacactccctcgtctataaatacttcactctgctttcctcaatcacatccatctctgaatctgattccacatcttaaacccttattccctaaacatcgaatttggttccttctcccacaatccgcagagatttcttcttttcaggtttgtcaattcattttttttttcagtttgagttttgttttgttttttcgtgattttcggtcagtctaccaaatcccctgtttttccggcgattcagttgtcaacagattttgcttttctttttccctttttgtgtaaaaaaactcatttcctttttgatctgatgattacagaagaagtaagagggtggcgaagaagatttgattgatcggcgataatg

SEQ ID NO: 24345 - DNA, 3003 bp, Unknown
  misc_feature (1)..( 3003): 2750-1469P.txt file - cDNA_ID_2174980; gDNA_ID_1620604; Annot_ID_161731
ttattacctgaaagcttcactctcttagctttagtgttaaaatctgaaccatctcttgaagcagatgcctcaaaaccttgtggacatgcatatccactagttaccacagagttggaactcagagaggaattgacattcttactggaatcacattcgaagttaatggctccagtaacgagacatcttttagtagtatttccaggatcacttccaaagaaaacttctctgaatatctgatgatcctcatatgacccttcaaagcagtcacctcctaacatctcaatctcagctccgggaagcatctccacaaactaactgcatattccacttcaccttaacttaaaaggaaggttgtagatagatacctgcaattatataaagtaatgaataaactcacagaacccaaaagtttggaactcgacatcctaatccaaaacacatacccataagcggaagcggattcaaaacaagataaaatcagagatccttctagaaaggccaaaactttgaagcctagagcaaaacgatagaccagatttcatgaaattgagatgttataatgactaattacatccaaaaagaaagctcaaaaattgggaaatgcaggacattaccagcatgcagaatgaaatcagagctgtgaaatcggagaaatggcttcttctcactgaaatagactcatttcgtcgcccttatcctctccaaccgcaagtgggaaacgcattttcattccatttcacgttctctgcactcacacactctctctccttgatctctatctcacacacagaaagaacaacaatttgtctatctttttagctttttctataattgtggaagaaacccacctctgattcggtgttaaatctctcaaccaaaattcatcagatagataaattctgacgaactttttttcacctctctgaatctgcctctatcactttgttgtgcacagtgtgtgtatacttattattggctatttctttctcttctcgttttttttctttttttcttttctataaattgtgtgctgtcaccaaaaaggcatcttcgtgtttttattttatttttccttcgttatactgaaaaagtcattcttcatttttcaccttaagattctgtctcctctctgataacaacggaccagcagttatagtatatggagtacttaaattcgtttaattacacaaattaaaacccaaatattcgtcgtttttttcttctgttatcaaattcttaatcctgttaatgacgatcgtatcactataagccaatattaatgactatggttttaagttcttgacaaagtttttttttactaaattcgccacagacaaaaactgttctgacaaaaataacagacaaactaaaatgaaaaaaaaggttagcatatttaattgccaggtttctaactgttcttctgttgtcgttttaaatcatttcagcttatgtttttgtcctttaaaattcagtcatcaccgattgtaacaggttttgtcttaatatgtataatcaatatctgttaagtggattggatgctttgtaatttgcgcggggaatctttacgtgtcttaacgataacaaatactgtactatcaaataggtgcatgcgatgatggacataagtcgtattttaacctattttgttgtgtgaacagattagttattgcatgttttgtattaactatatataggaatacggctctgaatctttgtttcttcttattcgattttgatatatgaaaattccaaaaagtacatgtaccagtacgatgaaaacgactgtgttatgtgaaagtatttgtttttaaaaaaaaaaatatttagaggggatcaattctagatacttttttcatttttaaggtttaactatggttaaaaagaaacgattcttttttaaaagggtagatggtagacctcatttgctaattttgatccacataagtcaataacaaataattcggctcgcttgcgaagctaatgcatgagccacgtgttttgctttatatttggctttctgtattgagacattcttcttcatcctaattgtgaatggaatatgttggacccaacgaagccatcaaacatggttaaaacacacaaacatgtgatttaatctagtttaatttcgtctattacaatataagtgaattttgacacacatccttggattatatctaaaacgttaagtttgttaaaaacactttggaccggataatgggtattgatcatttattgtttgttgcatgttgggttagaaattagagatcataacaaaaatcatgatttcaggctgtccattttgaaaaatgtgtgtgtttgtgttaatttgaatacaccgattcatccaaaaaccatctgaacagtctcttaattagtttaccgtgtatatatatcatatttatgggatcatatttggttaagtttaactagtagtttcaaatttcgcgttaatagctatttgaaagggtaggagtactttttcgaccggttaacactcccatataaagcccataaattattggaacgctacaaaattaacaaaacatctcttcagaagttcgtccggtttactctactacaaagtacatgtatcaaaaacgacaacacgtgcttccacaaaattaagaaccaggacgtgatgtcgttgttgtaatacttttttctcgccaacttcacgccgtcttagtttaccgaaaccaaagtggctttttctgattttatccaatacaatgacgtggaaagactcaaaagaagctttcgccacgttccaccaatgaatgttcgacacgtatcgtcgagtttctttttctttatgcttacgtcatcgcacacgtctatcttcttttggttaaagtgataaaaaggaaagtcgtaaatggcttcgtcactgagtctttcctactattttaaccccattagtgacactcctttcttctccactacactccatttctctttcttcttgactcgaccatcgtttctctaatctccgcaactatg

SEQ ID NO: 24346 - DNA, 3000 bp, Unknown; identical to SEQ ID NO: 2819
  misc_feature (1)..( 3000): 2750-1469P.txt file - cDNA_ID_2175004; gDNA_ID_1620604; Annot_ID_161741

SEQ ID NO: 24347 - DNA, 3003 bp, Unknown
  misc_feature (1)..( 3003): 2750-1469P.txt file - cDNA_ID_2175013; gDNA_ID_1620604; Annot_ID_161745
cttagattcagatcaagaacttgaagtgtctgtatagactttccaaagggttcgtttttatttggattttgtctgtgttgcaaactactaagccaagtaatggaaatggtttagaaagatcatttttgttgtcatctattacttggaatcttaccagtactaacaataaacataacaatcacatttctgatactcttcttgattaaaattgaaactattacttgctatatagttaaaccccagatctaacgtgagaaaactgtaaaggtatgagagaacgtagatgtaacctcaattaattgaagacatgcttatagttgctaaatgtgtgacaccaaactaaagttgatcacatgatcgaacaaatcccacaaaatcaaaatccaacctcatagaaatagcattctctgtttcttacttgattaaattatgtttcaaagatcataacatgtaataattaattaatttttaaaaaggtctggaagtgtcattaaaagcataacatgcagtttaattaagtgattaaatgtatgttttgtctggttctcgtcctttaatggtctctagtcaaactcatctctcctctaccagatcaacaaacaactgaatcctttttacgcgccactctgctgcgcgtgtacttcacagcctgtcatagtaactcctagcgacgtcagtgagaactgagaactttctccttctttcctaaattccaagtcttgaacacttttttctgttaaatgttagtgccgagtctacgaaatcgaaaccttcttaagttctttaatttcttctaaatatctctagcaagatcatactatatctacgtacttattatttttgggggaccaatgagcacatgtttatatatcaatcatattaattgtcagtaaaagcacgtagacaccttccatctttgtaatcaatttggcatttattatggataattgtttgtttttgtatacaacaaatgttcttgctgttgaaaacgggattattacatcttatagtaccattctggtcatagtaacaacagtataatataatttacaaaatctatttattttttctgaaagttgtctttgtaacaaattaaattattaatatagcagaagaaagtatgcatttagtatttactatatatggtttttctagcatttagaaaaaataattagtctagttgaaaaataaaataaaagtagaaaaagagttattaaaagcatgttaatgctaatatgagggtggtcctgttagtcttataatggtctggtcaaactcctccttctcacgactgccacatcacacaacccatcttcttccattttctgtttagtgtgaccgttgcttcgcgccttcgcggttcagtgagaagctcacgcgcgttttcttacccgcgtgatttttcaccccattatctcctttatgtgattcttctgttaaagttccggtttatgtatctgatccgaatatctcctttatgtgagtcaaacatatgtgtatgagtgagtttatgtatctgattatttaattttatggcttccttaattgaatgatttaagattaatagtatgtctctaactatttggccaccatactcacattcggaacaacataaatgataaagaagctagcgaatgggtccgactccttttaagtgctacaaaaagcgacacgacgtccttagtttcatgcatccatccacacgaaaatgtaaagtgagaagaaaactcaaaaactaataagaaatgttaaaattaataagaaaaaacaagggccatgtcgaatcattaccctatctctcggtactccgatcacgtgccaactttgggttctataatgcttttattattcatatttaatgtatttttttctttaatttcttttattatctgtcttcgaccgtatttagtccaaaccatgtgaagatttccggtctactgtttttatcattatgaaaaagaaaaggaaaaaagctatggtcctctctaattagagttgattaaaaatttgaataagaaataattaatttatttcactctctccagcttgttctttgtggtttggcttatactgaaaaattgaattcccaaatgtttggtcctattgagtaaatatcatccatttatctaaaatgataatcatttcaaacctaaacacaacaagaaggattttaaaacaatagacctgaactcaatcttactaattcattggttaagttgtcacgacatgtatatgttgataacaaaaggattggttacaatatgggtgcaaattgtggttgtggcttaatgtttttaaaattcacaaattttcaaatattgtctaaaagtatcccacttgtcataaattaccatccaagatccttccaatctctacatgcatatatgtccaataaaatctagctagagtacgagaaaaatatccaaaacttttgaatttgacaaaaagtcttatctttccaaaggaaaataaaagtttgtattatttatttccaccagaaaaaaatctactaaaaaaaaaagaagagactacgaaaacaatacatgcaaaatacacaagagacatgcgtgtctgagtgtttgtgtttttgggaaagccaataataccttttccctttagtgtgcacatgtgtgtatccacagaagcgtacgaaccctttctttaactcgtttcactctcatgggccacattactttcaccatcccctaaattaccacttcacccttcttccatatcattcacacaactaatcaaattacctcaaaaacgcaacaaaactaaatcgtgatcagtcaaagatgattacatagatttaggaagaaggaatctcttaccctaactagatccaggggtattttagtaaattatcataggtacccctaaaagtctctcgattccgttacactctcaatatctctccaatggctatggttactactacactcttcttcttcttcttcttcttcttctccttcttctcactgtaaaaaagaaaaaaaaatg

SEQ ID NO: 24348 - DNA, 3000 bp, Unknown; identical to SEQ ID NO: 5943
  misc_feature (1)..( 3000): 2750-1469P.txt file - cDNA_ID_2175025; gDNA_ID_1620834; Annot_ID_57919

SEQ ID NO: 24349 - DNA, 3003 bp, Unknown
  misc_feature (1)..( 3003): 2750-1469P.txt file - cDNA_ID_2175025; gDNA_ID_2684203; Annot_ID_191285
aacaaaaaatgttcctgagatgtgtttcagagctcaatctctatctgtacaacttttcctaacctcgccgcaaatttctatttacaatcggagactgtaacctatccccaggattagaaagaccaaaaatttctaaaaaagacaaaacaaaaattaggattcaacgagaacgaaagaggaaagatttcagaagccaaatctcaaagcaagagacgacggcattttttgcgtctgtggaaccacgtcttcgatccaaaacgatcaccaaaaccatgcggatctaactctaacaacaacatcttcgaaaacagaaccgattaatcgaccttaccgaagaaacgatcatcctcgccggtaagcgataaagaaaaatctaaccgcgaaactcgtttccttcgccggagatatccaataagcaccaatacaagaccgatgttagaagagagagagagagctcaaagagagtaatcgcgacgagagcacacgaaaatgagaccttatacagttatactgttacgagcgagtctagggttccggtttttttccccctgtaaatataccaaattgagataccggtatagattataaaccggcttgcattttccggttcgattagctgatttctctatgtaacaaaatgccatttacagttttcaaatttaccggttaaaattgacctaaccgaaacaaataaagtggaaatgttttagtttttgattcaactaagtgtatcatcaatggattttatattgtttccatattgtgcaaaatgtaatcagaaaatgatcacgatgtgcaaattggtttgcttaatttaagattgaattacagatttttttttatcgaatattaaaggatttattaaggaaataaggaagatctggtaaaaatcagatgctggcaggtgacacgtgtcactcatgactaaggtcttaaactcttacggataaagaaagcgacaaactgggagcactcttagaagacgaagaagatcgacggcagagatagaaaaaagctaaaaggtcgtcatcgaaaacaacggctaagatcttgttctcggatcagacccaacagaggagagagaaaatggatccgcttttgtgatttggataagatgacgtggcgtccatatccttgggtcgttgggcagagaagagagcagaaggcagtgtgagaggcacgtgatctgtcacgtgatttttgattctttttcactgttacacttccactatcgttcgagctatatttttttttatgaaaaaagaatctaaagatttatcagagttcctcctagagatgctaaatttataggaacagtggtggtccttggacaatagtatgatactaccaaacaccaacagaaatcatttttctgtcgttgtatcatttactgacataacttgattacaaaaatatagtattaattagctttgggagtttcacatattttagtatcaaatcaaatatacaacagaaatcaatactatagtatttggaaatgcccactacctaaacatatactacatttctttttcggtccacgcttacttattacatcgttaatccttatcttcaacagattagatgttaaagtgagtagacaagcttagactgattccaaccatgtgatttgattccaaaaagaacattatagctgtgatgggcttgagtgacgaacaacactgttggttctgtatcaactggtgatgaccattatttcagcccacaacttggagataaaagaaccaaatcataagcagtttccacagactaaagcaccaacaaaaactatggaaagcttttatcgagcaaaagatcacgagtcacaaacataacaaaaaagtacacgaatcatgaaatcaaatttctcaagttccctatcaaaacgctttaaaatacagaaaagggatcccttctcatttattgtgtcgttctctcccaaaccccaaaacactattacccaaatttagagagaacacacaacggttagttgaggtattcagagtttgaatcaattctaattcaagtcttttatttgaagtataagcttattgggctggtttttcacaatgactgtatatttgacccaatccgcccaatgtgacgaaaaggaggacccataactagtggtgtcctttactttctttttcttttccaaaaacgttaagatcataaactccatacctatatacattaatatgaactatgaagtgtcgtctactttgtatgaatgttgctctcatagtctcatctcattatttatttttgtcctttaaaatgacaaaaagatagtgacatttattatttattttttgtttccgtcgcttgtaatatatttatttgattaataaaatgggacgaaatcacaaatatatattagaagaacaaagaacaatagatacaaataatagtaacattatattttactcataagaatatacttcatgtgtggcacatgtctcatgtagtccatacattcgtgtttttttttgttgttgcatatttgatatcttaaacactaaaatttacacatgattcatgaatgtcaaagattcatttctccctagtgcttctttctctaccatcaaaagaaaattcatgactaataatccatacaaataatagtaacattttactcataagaatatacttcatgtgtggcacatgtctcatgtactccatacatacgtgttttttttttttttttgcatatttgatatcttaaacactaaattcacactagattcatgaacgtcaaagattcatttctccctggtgctttctctaccatcaaaagaaaattcatgactagagagatatatacataatttggaaattggaatgacaaatgaaaaacaaacaataaatgaatactttcgtcccaatatttattaggttataaataaattacttgtgacttgtgactaaaggtgtcaacaatcattcttctatccaatcaatatcatcaaactcttcactttactctctctctcactcataatg

SEQ ID NO: 24350 - DNA, 3000 bp, Unknown; identical to SEQ ID NO: 5943
  misc_feature (1)..( 3000): 2750-1469P.txt file - cDNA_ID_2175025; gDNA_ID_1620834; Annot_ID_169778

SEQ ID NO: 24351 - DNA, 3000 bp, Unknown; identical to SEQ ID NO: 5972
  misc_feature (1)..( 3000): 2750-1469P.txt file - cDNA_ID_2175081; gDNA_ID_1620834; Annot_ID_57949

SEQ ID NO: 24352 - DNA, 3000 bp, Unknown; identical to SEQ ID NO: 5957
  misc_feature (1)..( 3000): 2750-1469P.txt file - cDNA_ID_2175081; gDNA_ID_1620834; Annot_ID_169810

SEQ ID NO: 24353 - DNA, 3003 bp, Unknown
  misc_feature (1)..( 3003): 2750-1469P.txt file - cDNA_ID_2175085; gDNA_ID_2214462; Annot_ID_133013
cttctacactatcctcgcctgaaaaaacccaagagtttccagcagaagatttctgagaggttaaactgttactgatccaagactcatcatccgtaattattggtttttcatcaccaagagtagtgtctgatgtcagattagcatcacaatgctcttcgagcaatggagacttagagagtatttcttcttcagaaaatttctgaggggttaaagtgttagtgattagagactcatcatcggtaactattggtccttcaccaccaagagtactggttgatgtcagattagcatcacaatgctcttcgagcaatggagacttagagagtatttcttcgtcagacaaggaggattcaactctaacttcttgtacactttcctcgcctggaaagacagaagagttttcagcagaaaatttctgaggtgttaaagtgttagtgatctgagactcatcatcggtaactattggttcttcaccaccaagagtactggttgacgtcagattagcatcacaaagctcttcaagcaacggagatgtggagagtgtttcttcaccatccaaggaggaggctgatgaattctctccgtgagctatattctccactaaaatgtcaccttgaactcgttcctcaacccgaacatgtcctaaaatgtcaaagttctgacatggcggtgaatcagaaggactattacaacttggtgaattagaaagacttttagtgatatgcgactctttatcagtaactattggttcttcatcaccaacactagcggctgatgtcagattagcatcatgatactcttcaagcaatggggatgtagagagtctttctccatcaggaaatatctgagactcttcatcagaaactaattgttcttcatcactaagagtagtggttgatgtcatataagcatcacagtactcttcatgcagtggagatgtagattctatttctccatcagacgaagaggaagctgatgaattatcctcaaaactatctctttgaactacattctctttcaaaatatcgccttgaactcgtttctcaaccaaaacatgtcctggaatgtcaaagttctgatgtgacggtggatcagaaggactttcacttcgcggtgaagcaacacgatcatgacgtccttgtacattagaagaatggtcctctgcaacttcctttgattcacctctaacatattcgaatctcggaggttcacttgatttcaaacaaagcgtgctctgtgccaacataagaaaaccatcactcattctctctattctttagacattattagctaaaattgataatgacaatcaaacaatggactaacctgagaagtgaaagagtcaacctcaacaagcaaattttccaacttgttgtagattttactaaaccatgctcgtcctttagattctggtcccatgatggctcacgctatacgaaaattatgcagcaaaaatataaactttggttaggcaatatcatcagaataataaagagttgaaaaatatcatgttattccaaacttgatcgcaataagaagatgaaagtttcaaacaacaaaaacaggtcctcactaagaaacagctcaaaaatcctgaaaattttgccatcatcactaatcactaggtctagattttatcgaaactcagatgcttaatcggaaaagatgaataatttagaaaaactgtactatacagctatctcaaatttgtgacccgagcacgaagatcgctgaaaaagagaaactcatagacgcatcgaattacataaaaaaacgagactttgagatgaaaaacagagaaagtaatcaaaaggagataaaccctgaaattcaaagtaaacatagatgagaaaaacaaggaaagagagaagaatttacctgagaaagtaagaaggaaagtacaacagaggaagaaacgagaaaaaggcctcaacataatcatcatacaacaataaataaatactaaagagcttatttaagatttttttttatttttttattttttattttttgagaaaaggattctaatttaggattacaaccagatccataataaaaattcaatttagagaattaaaaaaagaaaaaaagaaaaaagtagtgttattggtttgtgatttaaatagtgatttaatgactttaaatgttactagaatctattgttattcaataataaaagttaattaagagtttggtgttattagtttgtgatttgtaaaaaatctttataactctaggttattggatttagaatttgataaagttgttgaaaaaaaaaactttgggttattcaactaaaacaacataattttttttattattaataaactaaattattatattattaatttataattttatacattttcgtcataaaaatatcgtcaaaatagagaaattattcgtgaaactttacaaaattacgaaaaaaactaattaacaaaattatataatactctctaccaatttctcttcatttatttactttatatgattttaaatcatcaaaattctttttaaactagaatccaataccagcccaaagttacatatagattccgggcttttattgggctacctatctaaagttaacgggcttataaaatttagtaggcccaatagaaataaagtagtccgaatgggtcatgaatcatgcacgccacaagtgaccaaaacatgatcatgtgtacgcatacgttttgaagaagaatgatccaaaataagaagacgtggattatgccacgtggaggggaatggcacaaaagaggcatgggtctgacgataaatctacctcggggagtgtgcatctggatgatccctctccatcattctttccatcccaaattctttatcttattttaattttgttgaaattccattcacattttatgatgtctcatgtatatatatgcaactctctcaacaaacacataatataaatatatttacctacatcagattcttcatacacattgtaatcaatagaccatagagatttacatg

SEQ ID NO: 24354 - DNA, 3003 bp, Unknown; identical to SEQ ID NO: 24353
  misc_feature (1)..( 3003): 2750-1469P.txt file - cDNA_ID_2175085; gDNA_ID_2214462; Annot_ID_182819

SEQ ID NO: 24355 - DNA, 3000 bp, Unknown; identical to SEQ ID NO: 5956
  misc_feature (1)..( 3000): 2750-1469P.txt file - cDNA_ID_2175085; gDNA_ID_1620834; Annot_ID_169811

SEQ ID NO: 24356 - DNA, 3000 bp, Unknown; identical to SEQ ID NO: 5969
  misc_feature (1)..( 3000): 2750-1469P.txt file - cDNA_ID_2175089; gDNA_ID_1620834; Annot_ID_169814

SEQ ID NO: 24357 - DNA, 3000 bp, Unknown; identical to SEQ ID NO: 2847
  misc_feature (1)..( 3000): 2750-1469P.txt file - cDNA_ID_2175122; gDNA_ID_1620608; Annot_ID_161839

SEQ ID NO: 24358 - DNA, 3003 bp, Unknown
  misc_feature (1)..( 3003): 2750-1469P.txt file - cDNA_ID_2175214; gDNA_ID_1620610; Annot_ID_161872
taaaaaagagaaagtaatgataagaaagattaagaaattaaaaaagagtgaattttacagttcaaaaggagaagaatcttacgtgtgttttatgttaatgtgggaacattagatggtgaaagtgggtaggctgcttaggctggcctctgtaatcattggagtgagaataagagagaagaaagagagagagagagagagcatgtgcatggcagagacaggaaagttgtgggagagaaaacaaacaaaaggataaaattgtttttaattatcatgtttgattattcttggttaagagactattttaaaagatgatggtacttaccaaaacatggtgtcaaaaaagtcaattattgacttgagaaggttttagacttgaatttgatgtattatgagttgtttatgttaatgaagtttataatgtgtaactaaaaacattgagtatacacatatattttcataggtttgtgttatgtgtgacatataatgatgatacaaatgaatttgcatttttgccttttaagaatatttctgaagtagtctctgctccacttgaagttacattggcaagagtttgagatgcatagagctgaatatagtggctgagtatcaaaagtcttttttcgggttcttaggggacgcgttctagtacatgctgaagcgctttcttgattcctccttgttccagagacgttgtcaagtgtatctcttgcacctgtaatgttaatattttacttaaaatcaaaccaagaatctctctatctatggccatataaatgggtagcttctgagatttacctgtcttccagcacgggcaagaagaacaaacttcccatcagaaggcggtgtctgcgtgtgaacatgcgcatagaatcagaattttcacagagcagagtttattcttacgggaaagtaaagagaaacagaactcacatttgagagccaaagttgtaggtcttgtgaaaccactcttttctcaaatccttgccggttgattttcacagcttctattctgcaatatagaaatgaatattagttacacactggaaccaaaatgttatgcctgaaacatagattctataagtaatgcaattaacaatatccaactcatcatgggttcagaaaaagtatcagccagcaatagctattgacatgtatatattcaatcgcaaatcgaggagtgaacaaatctagtagagtagaggtgatcctagtcacttataataagcagatattatgcaaagagctgactaggactgcatagtaaatttaaattataaaatgatattgtctatatacccatcttcctttaaaagctcttcaagtattgtttctagccctggaagaggttcaattgtatccccattgttcgagcttagcgaaggagatccagtagaactgtcctgtaacaatattcaattatctattaaaaatcactaagacccacaagagacagaaaacacattcattcacattgttttaccttcaaaatcactttgtctaatgtttctagaagaggatcatcttctagttgtttgatggatagtgtaatccttgatttctctctgcattggaacaacttttgattaaaaactatatcatgagtcatggctaataaatttcagtaaccaaaataagcaactcacttgtcaatattcgtgactataacccgaacctcgtcaccatcgcgtagtacatccctaacatcttgaacgtaatcccatgatacttcggagacatgcactagtccagttaaatgataaagacctatacaccaccaccccacataactgacatcaatgtcataagctcaaaacaagaaaaagaaaccaagaaatttaggtaaaagcaaatataccatcatcaaaacgcaagtggataaaggcaccatagtcctcaacagaacctactcttccgttaaacacatccccaacattaacgttttgtgaatactttggccataatgctaacttctcagataaaatcaactttctattttcctcatcagcttgaacaacctaatataaagatttacctcaaattataaacaatatagagatcacaaaacaagccaaaggagaaaactttacctttacaggaagtttagaaccaaccaaagtcttagctatctcatgaatacttttctgaggctcttcataaagcaaaacacaaaccatcgatcaatgtaaaaatcgatactttaaggacataaacatagaaccttgtgaagaagagagagttttggttacctttacaagaacgggaaggacttaattgtggataaggaagaaaacccacaagagaatgaaaacgaataagtaagccaccaccattaaagccttgaacttcaccttcaaatgtatcaccacttttacaataagcttttgctgttttccaatcgcttggtcctgcagctgaagcttcgtcggaggtatcacggagaagagaattggaagcggagaggactgaggaagaggctgattgatcggagtttctatcggtatctgctgtggcggagcttgagaaggatttgactatgcagacgagagagtttctattggaagaagaagaagacgaggaaggaaggagtctaagtgggcaagagaggaaagtggattgttggtcgaagagatgagaggcgaatgaaacagaacctaaagtagtagcgccactaaaaaccgccattgttgcgcggtagagcaaaaaagccacggagattgaaggtaatgatggttaatggattttgccattttggataagaaagtgagagactggagatgaaggtgacgtggcatttgtcagctcacaggtgctatattttaaaacatataggatcaatttgtaaacattggataattagagggtttctttacaaaaacaattctaattcaagcaaagagatcaaatctttttcctcagtgtcgtcgtcttcttcgcaaagcctttcaaaaacccttcactactctttctcagagtctcaagcatcattttcccgagaaaactatg

SEQ ID NO: 24359 - DNA, 3003 bp, Unknown
  misc_feature (1)..( 3003): 2750-1469P.txt file - cDNA_ID_2175236; gDNA_ID_1620610; Annot_ID_161880
gatgcatcgtacatgcatgtattgttatatttttatataaatatcgttgaaattggtattgtgtcgtgtaaaggtggttataatgtataataattcaaaatttctcttcggtaatgtgatcatttcttttacttaaaaacatcctcttgttaaaagtgtaagctcgtatactcaatcaatagggcaatacttctattgtcgacaaaacaataactattttgggttttgggacacccaaaaaagggaaaagttcttacaggacatgcagacacgagaacagactgtcacatgcaatgctgatcgtcattctcattcatcaccaagtttctcacgtccacatatgtaaaagcagataatgcagtttcatcatttttttatatatatgagaagtgtaactataaccatatcgtataaaaaatctctatatatagatagacatagatttaggaaatatttctttcgattttcttccaaaatccagcagcgccgtcaagattcttaagaatgatttagtcacagctcatcgatgtattaaatgattataaaacaaaatcacacagctcatcgaatgcttttatgctcaagtgctttgtctactttacattacattcataaaacgaaaaaaaaaagataaagataacttcttcttatgaattctagagttttcagtttttggcatcttaaaaatattaagattctgaagttgtaagtcagaaatttttgaaaaagtgtaatcttgtcaacatttgagcatgttatctacacattcttgtatcaccaattctcgatgtagtcgaacttaagaagtagataagaatggcgtggacctcaaacatatattacaaactttaattttcaataaaactacaatattaggttggacgttttaaaatgtatactgtaaaaaaaacgaatgttagaaaattattgacgagatgtacaacaatatttttctaacaatgtattttgtaaacttctgattggcatgacacgctcgatcgcaaccctgctagcgactaatcaaaataaagacgtccattcttttctatttggctttccaaacaacaattaaccattttggaaaatgcattactaaactcacaactccgtcgatcaacaaaatcagaaactgcatctcttctatttgggattaccctcctctttgcaacaaaatgctcatgcaaacgtatttcgcagaaaattacccacgaaaatttctctcaattttgcttatactttctaaatttcgagaaataatatttttcttcatcttttgtaaatgcgcttctttctgttagcaataaactgtaattataataatttgtttgcaaactaaaacaaatgtactaaaatggcagactaaatttaataaccaaatagtgtttattattgtcatgtcatacaccgaatttacgccatgtagaagtaaaagatcaaattaaataacattactgctgaatttttcgttagtataattaaaaagagaacatgtataaggtagactgtatgtagtctatgtagatgttatataaatgattttttttttctttcaactatatatagattagctaggtcggttgtattacaaaattaaatagtagtaatattttattttaaaagaattgtgttgaaaattttgatcgatcgcctctcgctctttaataagccattgactctttaaaacaaaaaaaaacttgaacaaattccatttgtctattattttaataaatacggtgttaaactaaaatagtataaaataatatccaataaactgtatgtttgttgacagaaaagaatataatgattttaaaacttcaaagacccaagtttcttttgaccaaaatctattgccttcatttattataactcgcatactgttttactcatacagatcattaaaaaactataagcaattacataacttgcttacaatcattgaaatagacgcacatgtttgccggaatgatgaaaaccatattggtcacacccttcacctaacaaagggtgtgatcaccaaaaatcacatcacttgcttaatttttcataaaaaccgatatttctaatgatgttaattggcaaatatgataatatatgaaatatttactttgaaatatgagagtaaaaaaattgaaacaacatttcttttgttatctaattacattacgcaagttattttggttcaagttaccccaacattgcatgttatcatgttatcaatcaatacaataatcgatcaagttgcatagcataatagcatactccatttatggaactataattactcaactcgagcttcgaattatggtggaaagctgcagcaaagtattgcaatgaatgcggcatctatagctatgccagtcggtcaacacaatctataagctatagcactactatagtccttgtggtcctactcagccaccacaaaaggttcaaggcttcaagcttcaaaggttcgaccacattcattcacaatcatcatttaacacataaataatctccattatcacctccttaaattatgcttcaaaaactttcttaattaccgaccatactaccaaacacaaattatgattccaatttaatctccattattacaaccaccttccctcaataataacctcaaatcaattaaacccaaatttccattattatcatccatatctttaaaacactacttattacaaacaaacctaatccctttattcatacattattacaccttttatattttcataacaaaaacgcgtagtttctgtttttaacggaacgggacggaaataataatatggttagatttataatagtaatgatctgttgaataagctaagtaacgacacctcactcttcgcttgcttccattcatcatctctctctctctctctcttcccaaaaatcaaaaaacagaaaaattaccaaaccctaccaatctccttcttcctcctcctcctccttccttcttcatcctcctcctctctacgcgccgcgcgtgttctctaatcaatg

SEQ ID NO: 24360 - DNA, 3003 bp, Unknown
  misc_feature (1)..( 3003): 2750-1469P.txt file - cDNA_ID_2175252; gDNA_ID_1620610; Annot_ID_161885
cacttacattgatcaaagtcagcctggcatatacggaaatgaaaagagtttatgaggtttgtgaaccagataatgccctctttagtgtttcatgctacctaataatttggtttaaatgagttttttctgcttgttcatatttctgatgcttggagtcgtcataagtactttgctctgctgttgcagggtctttgtttgacaaaaaatcaaaagcctccaatgtatattgtttcgttggtggattggttgtgggcgagagtagttgcatttttcctatggccattgcatatgttggctgaaaagcttgtacacagaaaaattcgttcgtctattgggataacaaaggtagtattacaacattctacttcattttcagttacttgttttaaaatttttttaccttacaagcaatattgtaagactgacttgcaatctattctctgtttcctccaggctggtgttagtggaggtggtagtttacctatgcatgttgacaagttttttgaggttagaccgccaatattgtttcttgaaattagagataaatgtttttttttgcattcaaacaaagtagtctgtccatatgtaaacaggttagttctttatgcaggccatcggtgtgaatgtacaaaatgggtatggtttgacagaaacctcaccggttgtctctgcgcggaggcttaggtgtaacgtaagtttaaactcacacctcaataacctctccttttgtgacctctgcacagaaaaactgtttagatcttattcatcaattttcctaactttttttatgaaggttcttggctcagttgggcatcctattaaagatacagagttcaaaattgtagatcatgagactggtactgttcttccacctggttcaaagggcattgtcaaagtcagaggcccaccggtgatgaaaggttactacaaggtgatacacactttctgctcttagtttgattacattttgacgacaaagttgtgaaaggatgacacagctgtttttagctatcaaattttctgtccatgagtgggtttgtttgtgaatactgcccttatatataactagattatgtgaactcttttccttcttggtctcatcattaaagcatctcttggaatctacatttcttgcaatctatttcccttttgatacatatgtagactccttgaataatctctgtgttttcgatgaatgcttttagtttggtgattagatcagattaactcatctttctgttgattatctcagaatccactggccaccaagcaggttatagatgacgatggatggttcaatactggagatatgggttggattactcctcagcactcaacaggacggagtcgtagctgtggaggtgtcatcgttcttgaagggcgtgccaaggacactatcgtgctttccacaggtatatcacatttgtactgtttgttgtcagcgtccacataaaccagttcctcggaaacctgaaacaaaattatgtttcctactgtctgtatgataagcatacattttaaacactacaagtcttaacaacaaaatgtgcctctcaagttaaagatgaatccaagtgaattgtaaccgccttgctgcacaaatattgctaagaatatttgatagcagtttaattgttgtaggtgaaaatgtggaaccattggagattgaagaagcggccatgagaagcaatttgattcaacaaatagtggttattggacaggtacttgtttggagactttggtttaggaacaatggtatgggctgtttcacttaattaatcttcgatttggatgcgtccttgatcttttgttctcaggatcaacgccgccttggagctattgttatcccaaacaaagaagcagcagaaggagcagcaaagcagaaaatttcacctgtagattctgaagtcaatgaacttagcaaggagacgataacaagcatggtctatgaagaactaaggaaatggtaatgattcaaaccaagtgtgatcccactctaatataagagtaaactttacctaatcaggcaattactcatatatacaccatatgatgcaggacgtcacaatgctcgttccaagttggaccagttctgatcgtggatgaaccattcacggtaggttcttttattcgctctcactgataatcctttaatatgcaactcaaagatttgaacctcatgtgaacgttctatgaatatcgttacagatagacaacggtttaatgacaccgacaatgaaaataagacgggacaaggtggttgatcaatacaagaatgaaatagaaagactctacaagtagactagaaattttagcatcctctttattttacaattatcttgttaaggattagcaaatgtgaaccagttcttactccattgttaatataagctgcatatatctttgttcatcaactagggatttccaagttctgcagcactatggatacttattgagtctaatagaatcaataattggaagaagcagttaaaccggtcaaaagacctaagtatgttggagggtttgagatatcttgacattctgtgtttagaggaaggctagatgttgatacaatattgtataatttgcataattatattatccgttcaatccaaaagcatttaagtgcgatgtaaagtgatggttttttctagtttatgttaaaacaaatgattagtctcactctctagtcgatagaatattgcaacttgtttataaatttgattaggtgagctatgattagtagtgcataaatacattatctatgagacaaagaaacgtgataggttattgttttttcttgtttgcgtctggcatatgtatgtataaaaccaaatatcaagcagaacatatgcgattttcaaaatgtgggcggtgctgaaaacatatattagtttactccaacttgcagaatatttgagtatattaatgcaaaaacagtaaacgcaagagcaggtgcattactagctaagacagcttggttgagagatagagacgaaaatg

SEQ ID NO: 24361 - DNA, 3000 bp, Unknown; identical to SEQ ID NO: 2849
  misc_feature (1)..( 3000): 2750-1469P.txt file - cDNA_ID_2175270; gDNA_ID_1620609; Annot_ID_161844

SEQ ID NO: 24362 - DNA, 3000 bp, Unknown; identical to SEQ ID NO: 2855
  misc_feature (1)..( 3000): 2750-1469P.txt file - cDNA_ID_2175274; gDNA_ID_1620609; Annot_ID_161845

SEQ ID NO: 24363 - DNA, 3000 bp, Unknown; identical to SEQ ID NO: 2854
  misc_feature (1)..( 3000): 2750-1469P.txt file - cDNA_ID_2175293; gDNA_ID_1620609; Annot_ID_161850

SEQ ID NO: 24364 - DNA, 3003 bp, Unknown
  misc_feature (1)..( 3003): 2750-1469P.txt file - cDNA_ID_2175313; gDNA_ID_1620609; Annot_ID_161858
catttgtggttttgaatgtatatgtaaacacattcactatcagcattcagcaatcggataactaaacaaaaacaatttgatgatttggagatttggaaatttacagagctaaaagtgaaaaatgccagtgattaataaaagaaaagataattaaggtcggttagtaaaaagacgtaaatataaataaaaggcttgtttttttatttttcactttgttctctctctctctcgtaacacgcctgagagttctcgtcgtccttatctcgatcttggttgattcgctctccgatcggaaattagggcttttgttttctgaagatgacgactgcagcacgaccaacctgggctccagctaagggaggtaacgagcaaggtggtgctcggatctttggtccatctcagaagtattcgtcccgtgatgtcgccgctcacacaactttaaagccaaggtaagatttcgaaactggttctcttcctttaatccgacgcgaattagactacctgtgaattcgatcgaaactttagctgagattgatgatattgtccagaatctagggttaattgcaatagcgtgctagggattttgacatacggtgattcagaaaaggcctgtgtacgttgtctttaggttgctgaaatcggtagtattgtggcctgtttatttcttaccggttttcttgttgtagtttttgaggatcaatagtttctagggacttatttgtgcttgatatttgaaagatactggtttctatttaagcacatatgtctcgttgtttattggattctctatactcacgtacgtctcctacttattgttgttttggcaggagggaagggcaacacactcaagaggaactccagaagataaatcttcgtgatgagcttgaagagcgtgagaggagacatttctcatcaaaagacaaatcatacaatggtaagataataaatttcaagccttttcattatgatttggactaatgagttttttttttctatcattagatgatagagatcgcagaagaggaagtcagcttttactggaaggttagagaaattcatttatttatttatgatcgttatttgtgtcacattagatagtttgatcgtgtgttttctaacctttataccctctatttagactcgaaaagggatcctgaagagcggattattcctcgcagtgtagatgctgatgattctgatgttgatatcaaaagtgacgatgataggtaccttttcttcatctcttccattcttttcttcttctttgcagttttttatatgttgtgctttaaatttggctaagactgtcaaggttgggggctgatacataagcctaactgtacctcattgcttttcatctagaccatagtttgggaaaaatacaattgatattggggaaaatgtttaactactggcgttccattctcttgtcgagtttttgttgacttcaatactctagttccttcaaaggtatcttacaatctatttatctttgttagtgatgacgaaagtgacgatgatgatgaggacgacactgaagctcttatggcggaactcgaccagataaagaaagaaagagtggaagagaggctcaggaaggtaatattgctattgtctgggatgtttctgctcagattgctattagaaatgactaggataggttttttaaaacatattgacataacaaagatttctcttgtgactgtactaatgtttggtaacatatatgtatcatgcaggaaaaagagcagcagatggaagagctaaacgctaaggaagaggaacttctcaaaggaaacccattgcttaatactccaacgtcttttagcgtcaaaaggaggttagcagcttttgaaatcttgtttcttcgtgaatcttgggattatattaattgttggaagcagatactgaaaattactcgtctcttttcaggtgggatgatgatgttgtattcaaaaaccaggcacgtggtgaaatgaaagctcctaagcgcttcatcaatgatacaatcaggaatgacttccacagaaaattcctgcatagatacatgaagtgattgtttgtcaagagtgttattgctacttctttgtatgatgattatgactaaaagcttttattctgtctggaattacgatgtctctgtactcaaacaacaaatgtttttaagctttatatcaaaaacttatgcatttgattttaatgtaatatctcacagattcctgattatctcttattcatcactaacacaatgagacttcaaaattcgaaacagctgtgtgaacttgcatcttacaagtacaagtatgtgtctgaacatcatcaaaacttcaccaatcacatgtttgaagcaagtcttcgagttttattaagagacgccggggatcagacaataatggatacacctaatcaacagcaaccatgttgagcttcagagcacccatggaagtgaaaaagttctgaacacactcagcgacagcagaagcagagcttgaagtagaagccattgtagcgcacctcgatgttccacagtaggaatccatctatgtatgtttctgcgaatctctcaatgtttgggaccatgtctttgaccgttgcagatagtttcttgaagtggaagacgtactcggtttcatattatgaccttgtcaagcttctcagtagctgtgatgatattgatagcgtatcgctctacgaaattctcatacatatctctctcacccttatcgttcaataacttgacctccatctgttaaaagctgaagagctgtatcaagttcaaaatcaataaataccaagttaataaatcacgttaaggttaaggaaaaagaggaatgcagcttaatcatcatatcacaagacatggataatccaagtttccataatttttgtattaagttttgggcctttgaggcccattaacaacattatatttaatgcgtatgtcacgctgtgttcaaaatcctttttcttccctcttttccaaaatcaaaacgcgatttcatg

SEQ ID NO: 24365 - DNA, 3000 bp, Unknown
  misc_feature (1)..( 3000): 2750-1469P.txt file - cDNA_ID_2175355; gDNA_ID_1621090; Annot_ID_55479
tttcattcacttgcttcttattttagtgtctccaaaattattatgtctctagtaataaacaaggtttttgaatgatgtgttcactgtttgttttactcgtactttttttttgttttccctttagtcttctctctctctctcgcttcttcgtttaaaactttaaactaaagtatcgaagaagccaactctggatgacgcaaaagcttctctcagaacggcattgtagaattctccggtgaccaaataatccgattgcattagtagggaatctgttattttgatctgatccgtcaaattggcggtaagaacaatggacgattatacaagagagatgatggatctcaagaccttagtcactcgaaccctagagaagaaaggtgttctcgctaagatccgggtatatttgtttttctcttgccacgattcctctggttctgtgacatacttcattcaaattccgtagagagatttgagtacagagaagaagagaaaacatacattgcttttctagggttcgtgcttccagatctactttatgcatctggaatcatgtgaattcccagtttttgtcgtactttgaaattgagtctgtgaaaaaattgtaccttctcagctgaattggattctttaacatttggtttggagattgaagatttgtttttttttctctatattcttctgctgaaattttagttgtttctgtaggctgaactccgtgcaagtgtgtttgaggcaatcgaagaagaggatagagtgatagagaacaatgaaggactgcctccagctttgttgggaagctgcaatgatcgtgcaaggcagcttcatgcttctccttcaggtctttctcaatttttatccttcatatcttctcttcacttttacccttcagagaccttttctctttgaatggtatggttctaaatggcatgtcttggtttggaaatgctttcttgatacttagatatattcgcttgttcgaaatgtgtctccttgtttttttcgggtgaaactttgcttgcttctattcttaggcgatatgaacattgagattttgtgtagttgagtaggtcatcttgatcactttataaaatgttaaaatgcaggcaggttgctatctgcattgatttgtgaatatttggactgggcgcaattaaatcacacgcttaaagtttatcaaccagaatgcaattcggtaatcaatatatttcattttctttgaacttctgatatttcttttaagtacgttgaagatgaactttctaactgatgctgtgatccctgaaaacctatgcaaaggcaaaagattcttggaagtctgagatacgtgactttagtatcaacaatggttatgagctcaacagaaatgaagatagtagaccgcttcttctggatgttcttgaaggattcttgaagttcgaggtatttcttctgctttctctctgaagatgtttacacatacagtatagcttttttttttttctctgtttacaagctttacaaccatatttgttacacattacaatagtccagctatggtacatgatttcagggcgttaatgtttacagttcctctattctctaagtgaagatgaccaatacctgttggttacatcgaagctttacaattaccaaattagttcaaatcttgttacattgtgctcacgacctcacattttttccaagtaaataaagtgtcttactcaagaaaagaatttttcagagctttgaataagttcggtgaattccaagcctacaattcttgtcacacccagggattatgtttccatcctcttgtagtaaaaccattataatttgtctgctgtattcacctcatatttagtgatcaacatttttcttcagaacatgacgcaggtcatgggtggtagttcaaggagagagtcagaaaccgagtcgtcattaagccttgacaccagaaatcctcctcgcagatcatctgcttctgatagcttacctcatcaacgacggtaaatccaactccatgttctaccaaatcaacgatctttaatcttccatgttgcttatgagtctgacatgcttaattaatgggcaggtcggtttctgcatctcaagcatcgggagccgctacctcagggtacagaaaagacgagagcaattggagatatgacactgaagatatgccggaagaagtcatgagagcctcaacagcacttgaaaatcttcagctagacaggaaaactcggaacctaacatcgtcttggaggtaacttggagcgtcatggctcttaccttacaagtcggatagaactgaaaaataatctaatccattggttttggttgtggttcaggaatgtgaaggatggaacaagtgaagaagaagaagggaaagattgataaggctttcgttaaaatccagcttgtgaattagtatctctacatatatatgtgtgtttcttttttcatgtatggttttaaatgttgcaactttgtttcttaagtttttcgtttgtcgtgtttgagaaatccgattggaagtaaagattattgatataagatgtcaactacaattaagccgttaacacaaactcaaaaactttcataaaaattctcaaatattagtgtcattaaaaaagcattgttaatctgaggactgtatacattccaaagaattatcatttcccaaatttatttaaaataattttatgatatctaatcctaaatctttttgttgaggaaaaaaaacaaaaaaacaagtaaaccttgtttaggtttattagggttttaaaagtatttatatttgttttctgctgcagcagactcaaaaagctaagtaaactactcaagtccctcccttttccggcgtcgctattctcagtctcattctgtctcccgtaagtcctaactaagctttctctcttcagtcttcagcctccgcccgttattgttgacaagttttagcctttttgttaattactactttactactcttgttgtgaatttgctgctactgttgaagccatg

SEQ ID NO: 24366 - DNA, 3003 bp, Unknown
  misc_feature (1)..( 3003): 2750-1469P.txt file - cDNA_ID_2175355; gDNA_ID_2926252; Annot_ID_143044
tattttcattcacttgcttcttattttagtgtctccaaaattattatgtctctagtaataaacaaggtttttgaatgatgtgttcactgtttgttttactcgtactttttttttgttttccctttagtcttctctctctctctcgcttcttcgtttaaaactttaaactaaagtatcgaagaagccaactctggatgacgcaaaagcttctctcagaacggcattgtagaattctccggtgaccaaataatccgattgcattagtagggaatctgttattttgatctgatccgtcaaattggcggtaagaacaatggacgattatacaagagagatgatggatctcaagaccttagtcactcgaaccctagagaagaaaggtgttctcgctaagatccgggtatatttgtttttctcttgccacgattcctctggttctgtgacatacttcattcaaattccgtagagagatttgagtacagagaagaagagaaaacatacattgcttttctagggttcgtgcttccagatctactttatgcatctggaatcatgtgaattcccagtttttgtcgtactttgaaattgagtctgtgaaaaaattgtaccttctcagctgaattggattctttaacatttggtttggagattgaagatttgtttttttttctctatattcttctgctgaaattttagttgtttctgtaggctgaactccgtgcaagtgtgtttgaggcaatcgaagaagaggatagagtgatagagaacaatgaaggactgcctccagctttgttgggaagctgcaatgatcgtgcaaggcagcttcatgcttctccttcaggtctttctcaatttttatccttcatatcttctcttcacttttacccttcagagaccttttctctttgaatggtatggttctaaatggcatgtcttggtttggaaatgctttcttgatacttagatatattcgcttgttcgaaatgtgtctccttgtttttttcgggtgaaactttgcttgcttctattcttaggcgatatgaacattgagattttgtgtagttgagtaggtcatcttgatcactttataaaatgttaaaatgcaggcaggttgctatctgcattgatttgtgaatatttggactgggcgcaattaaatcacacgcttaaagtttatcaaccagaatgcaattcggtaatcaatatatttcattttctttgaacttctgatatttcttttaagtacgttgaagatgaactttctaactgatgctgtgatccctgaaaacctatgcaaaggcaaaagattcttggaagtctgagatacgtgactttagtatcaacaatggttatgagctcaacagaaatgaagatagtagaccgcttcttctggatgttcttgaaggattcttgaagttcgaggtatttcttctgctttctctctgaagatgtttacacatacagtatagcttttttttttttctctgtttacaagctttacaaccatatttgttacacattacaatagtccagctatggtacatgatttcagggcgttaatgtttacagttcctctattctctaagtgaagatgaccaatacctgttggttacatcgaagctttacaattaccaaattagttcaaatcttgttacattgtgctcacgacctcacattttttccaagtaaataaagtgtcttactcaagaaaagaatttttcagagctttgaataagttcggtgaattccaagcctacaattcttgtcacacccagggattatgtttccatcctcttgtagtaaaaccattataatttgtctgctgtattcacctcatatttagtgatcaacatttttcttcagaacatgacgcaggtcatgggtggtagttcaaggagagagtcagaaaccgagtcgtcattaagccttgacaccagaaatcctcctcgcagatcatctgcttctgatagcttacctcatcaacgacggtaaatccaactccatgttctaccaaatcaacgatctttaatcttccatgttgcttatgagtctgacatgcttaattaatgggcaggtcggtttctgcatctcaagcatcgggagccgctacctcagggtacagaaaagacgagagcaattggagatatgacactgaagatatgccggaagaagtcatgagagcctcaacagcacttgaaaatcttcagctagacaggaaaactcggaacctaacatcgtcttggaggtaacttggagcgtcatggctcttaccttacaagtcggatagaactgaaaaataatctaatccattggttttggttgtggttcaggaatgtgaaggatggaacaagtgaagaagaagaagggaaagattgataaggctttcgttaaaatccagcttgtgaattagtatctctacatatatatgtgtgtttcttttttcatgtatggttttaaatgttgcaactttgtttcttaagtttttcgtttgtcgtgtttgagaaatccgattggaagtaaagattattgatataagatgtcaactacaattaagccgttaacacaaactcaaaaactttcataaaaattctcaaatattagtgtcattaaaaaagcattgttaatctgaggactgtatacattccaaagaattatcatttcccaaatttatttaaaataattttatgatatctaatcctaaatctttttgttgaggaaaaaaaacaaaaaaacaagtaaaccttgtttaggtttattagggttttaaaagtatttatatttgttttctgctgcagcagactcaaaaagctaagtaaactactcaagtccctcccttttccggcgtcgctattctcagtctcattctgtctcccgtaagtcctaactaagctttctctcttcagtcttcagcctccgcccgttattgttgacaagttttagcctttttgttaattactactttactactcttgttgtgaatttgctgctactgttgaagccatg

SEQ ID NO: 24367 - DNA, 3000 bp, Unknown; identical to SEQ ID NO: 6362
  misc_feature (1)..( 3000): 2750-1469P.txt file - cDNA_ID_2175376; gDNA_ID_1621090; Annot_ID_170670

SEQ ID NO: 24368 - DNA, 3000 bp, Unknown; identical to SEQ ID NO: 6775
  misc_feature (1)..( 3000): 2750-1469P.txt file - cDNA_ID_2175436; gDNA_ID_1621105; Annot_ID_171548

SEQ ID NO: 24369 - DNA, 3003 bp, Unknown
  misc_feature (1)..( 3003): 2750-1469P.txt file - cDNA_ID_2175455; gDNA_ID_1621105; Annot_ID_171554
ttaagatgtctaacatcaaactaatcatcacgtaattttgcacaatttagaatggttttaaagtgacaaaacaaataattttcttattttgaaaaccaaaaaaaaacagaggaaaaatgtattgcctgcgagaaagctcaagaacacgaactctcttggcctgagaatcatcggaacatcctaacacggcaagtattccacacatgttttttttttgaagaaagtgaaaaagatcacgaagaatgagaacagaaaaacagaattttccgaaactttaggggatagatattgtaaaaccccaaaaagagattacaagaaaatgtaataaacagacagatgtccaggaagagaaaggagaaaattgcacgtagaagtgtactatcgatattcgtgtttttgatgtcttggttttctacgaccgattgctctatttatagacactaaacggcgccgtgatgtcgcgtttggttctgaaggagtcgtgtatgggaacaaattatttttttacttgtaaccggataagttaccggataactctgaccagctgtttccacgtgttaattaaccttcttacgacgtccgatgggttcttacttcttagtctttacattctcttttgtccggtttcttccaattttgacggtggggcaaacttccggtttagggtttatccggctgagtcagcaagtggataggtacttatctgacggtgtaaaaactgtccaatgattgttctgattgctttagagccgtacacgtgttatcacgacaatggtgtatttgattgtaggattagcattttatcagaaagtgaacacatttcaaatgaaaatgataagtaaactgtgttaggaaaaattgattggtatttttttccttttgattaaaaatgagaagtaaagttaagacttaaatttaaaaaaaaaaaaacgttaaaaacacatatagaagaaatatatcgtactatagttagtaaataattttctcttcctataattagtaaatattcaatatcgtcaacgaattattatttgtatagtctaatagtacacacatattctcaaccttggaatcgaattataacaatacaaactgtaaaattaaaacacgaccctatatggctattgcaaatggtgatttcacaaactttatcataatattaaaaaatacatttacttcttactaatatacagtaaacaaaagtctttgtgttatagttaagcctattttggatatatgtgtatttaaaaaatatatatagagagatttgccatgtgttatataacaaatatataggagatagtggatcatatgcaactttccgcgaaatgaatatcggagaagtattcgagtgtatccataaatcatgtatattttaatataccggatcacatgtgaattgtaggtataggcatcgcacatgcctcacacgttgctacaatgtgcaagggcgagaagatgaatctcagtttataatctttggactttggataatgctaatatataaatcatcaaaataagaatatgacgtgttttttctttgattggacaaaacgagatatcagccctattcttgaggcagcaagacccaatcgcgacatgatacattgtaaatcgtttgatatttttttcttttttatatgtaaaaattgctggtgtccctatctatctatatggtacaccttcagctataaatgattgaaattctcttacaaagactgtaaatacatatccgaacagtttggatactagtaccaaaaatgataatgtggtgatttaggcgacgtgagtcgtgagtgtagctgttattattattttatcaatacttgagacgctaataattgttaagatccatgccgtgtcatgtttgtataagccagtttcgttatcaaataaacagataacgaagaagattcttatactttgtgaaaggaaaatagaaaaacagatgacgtataacagtttgttcggtgaaggaagcagataaaaacagcctaatattcaaatgtatgccaacgcaaaaattgtgtttaatatacaaaacacacaattagttacaagtaccctacaatgttaaccaaacgtcattttgtaaaagtaaaggactttcaaacgcctcatagtcctcacaaagcgacatcattcgtaatttaattacttccggctggtcataacatacttatatagttggtcaattaatgaattagtaagtgggattgcgtaagagaatatcccattagttaaaaaaataacagaagaagaaaatatcacgtttataataagtttgggcataattaaaaaaggtagcgactcgtcgtctttcatgaggtcacgatcctagtctatctggcaaatcatcatctacgagctacggctagaaagaaatagacgctaccactcgtgcacggccgtgccatgtcatcttcgggcataaggatccgaaccttagccagctggttctccgacttcaacttacattactagtttttcttaaatattattattacattacataattagtttggttaaattgtttttctcttattgaattcatataattgtatcttttgtgagttatgttcttgcaatataaatctgttgatctttttttcatcaatataaaaacaactaatattaccaaaataacaaaatcataatagatacggcaattcgacttttaaatgaatcaaagagttaatatccacagaggattaaaatagtagtttggaaaagaacaaatggtgatgaaactcggtcgcaaggttgcgtagtacatttcgttatcactgttctaaattaaattagaaaaatctcgtcatttgtctgactataattttatttcttaaaagttaattgtcatgcactcatgtccatttctttttttttatcaaacataaatattatccatctaagttttgaactttatatttttctcggaaaagtacgaaaacttttattattgtcattcacacaattcagagaagaaacaaaagttgtaaaatg

SEQ ID NO: 24370 - DNA, 3000 bp, Unknown; identical to SEQ ID NO: 7835
  misc_feature (1)..( 3000): 2750-1469P.txt file - cDNA_ID_2175480; gDNA_ID_1621167; Annot_ID_57206

SEQ ID NO: 24371 - DNA, 3000 bp, Unknown; identical to SEQ ID NO: 7835
  misc_feature (1)..( 3000): 2750-1469P.txt file - cDNA_ID_2175480; gDNA_ID_1621167; Annot_ID_173867

SEQ ID NO: 24372 - DNA, 3000 bp, Unknown; identical to SEQ ID NO: 7840
  misc_feature (1)..( 3000): 2750-1469P.txt file - cDNA_ID_2175516; gDNA_ID_1974075; Annot_ID_180351

SEQ ID NO: 24373 - DNA, 3000 bp, Unknown; identical to SEQ ID NO: 7840
  misc_feature (1)..( 3000): 2750-1469P.txt file - cDNA_ID_2175516; gDNA_ID_1621167; Annot_ID_173878

SEQ ID NO: 24374 - DNA, 3003 bp, Unknown
  misc_feature (1)..( 3003): 2750-1469P.txt file - cDNA_ID_2175536; gDNA_ID_1621106; Annot_ID_171577
tatgctctcagagatggctattcagagcaggtagtggattgttcaagtgtgtctgtgtatggttatgagcataagttgctcttgtgtcagcttctttgcttcatagatttaagctactagcctactgtggtatatatttattacatgtgctccattattatatgacaattgtgttcctgggatgcagatagcagaagctttgctggaaattacacttcctagattttctggagacgtcatcccaaaaacagatgcaggaatggttttggcaataggtgataggtaaattgaaagcctaaagttttgttgtctctcccatttctttctacgccaaacggttcgtcctgtgaacacaaaaccttgtatctggattgcgcggagctaaattgtatatgcttctgatatgataatttttgttcgaatttgtgatcctatatactaacacctatgcttgtccctatgactgtagattggatagccttgttggtttatttgctgctggttgccagccaagttcaacaaatgacccttttggccttagaagaatatcatatggcttagtaagtttatagatattctgatctgaaaatgagctattatgatatgtcattttatggttgcatgaggttatggatgccaagtaatactttgtatgccacaggttcagattttggtcgagaaggataaaaatgtcaacttcaaacgtgttctagaacttgcagccagtgtacaaccgacgaaggttgaggcaaacactgtagaagatgtgagaatcaattgagtggcatcaaatcttgttatcaccatctgaaattgttcgtgacataattaactcttttatttgtttctaggtgtatcaatttgttactcgaagactggaacagctattggttcgtgcaacttttgtgatgtttatctttttcgatttcccagctcttaaaatatcttacgggtccagttcttgaaacaacgttttatccttttttacaggttgacaacggagtaagccctgaagtagttaggtctgtcctagcagagcgtggaaacaatccttgtctggcagcacggactgcatacaaggttagtgacttgtgatatgatccaatagcagttagctagggaattaggtaatagttgagaagcctttgggcatcattctcctagtgaatgttgctgtgtcatagtgatattgctccaaagaagctaacatcgctggtgcttgccttgcagacggaaaagctaagcaaaggtgagatgtttccgaagatagtggaagcatattctcgtcccacacgcattgtccgtgggaaagatgttggtgttggagttgaggtacttgaggtttctgtctgatcaaagagcatttgtgaaaacttgcagcttctaacattgaatgatgcaatcaggtggatgagaatgcatttgagactccccaagagagaacgttgtggagtacttacacctctatcaaagatcgaattcacactggtaactcactttcttccctgctgtattctctcaaacaagctcgcttccaaattcgtctcactaaccttccaaatttcaggcattgaaatcgaggacttcaccgagatatccatgcaattggtggagccactcgaggatttcttcaacaatgtatttgtaatggtggtaagttaaaactttgtccatacactgtactcgagtatcgcagacgagtgaagtttgaatataacggtttttgcaggaggaagaaagagtgaggaagaacagactcgctctgcttaataacattgccaatcttcccaaaggagtcattgacctctcatttttgcccggattttgatctttacttgtttcataatcccactccggaatcatcaattcattgacctctcattttttctttgtttcataacctcatatagttgtgttcactgagcaaaaattcaaactaaaacttgtgcaatggaatactttaaaaacagtttcataacctcaataaaaagatttcaaagatttttagatacttctgattgagatgtgttctatttcaaaattctttttttttttctcacaagtgatagaatttattaagctttcacaatatcatacataggctttaacaaaagcccaaacagcaggtttacagaaatagccaacaaagaccaaatagataaccgacttctgtagaagaatttcaatctaaactccatccatggaaacgtgtcgacaaccggttaaaccacgtcccacgcctgatgagtaatcacaagtttttccggcaacaacctccaccgttgagcgccgattccggtaagaaatcctcgccgataaggaatcgaacgaagactcttatgttttgcaccgaattgaaagcatcgaagctccaattaaagtaacagcttaagggaccatgataagcgacacaagaaaatcttctttccttcaacaaaagagtgaaatctctttgaaatcattctgtaaatccagagtacaaaagaaaaggatccgaaatttatcttgaagagataagaaactaattcggatcggagtaaaactcaaaggacagagacaaagaagaaccaccgtggatatggcagatcaacatccctaatcgtagatccgatgagattattagcaaattaaaaacataattgaaaaattaaagcaaaaacagaatccggccatggccgctaggttagccggtcgatgccgggcaaaagctagccaccgctacttaggaagccagtcggtgctagacgaaagccggccatcaccgttgagaaaaacggaagacgccggacatgtagccggataaccaccggacggcgagaagaagagcgtattctctctctaaaatattcagagagcgagaagagagagaaacactgacgaaaatatagattttatgggctaacaaaattcaaatgaaaacattggattataagatggttaacaaaaatggttgagaaaaaaccatcgagagaaccaaagggagagaaacggagctaagttatg

SEQ ID NO: 24375 - DNA, 3000 bp, Unknown; identical to SEQ ID NO: 4432
  misc_feature (1)..( 3000): 2750-1469P.txt file - cDNA_ID_2175536; gDNA_ID_1620706; Annot_ID_165283

SEQ ID NO: 24376 - DNA, 3000 bp, Unknown; identical to SEQ ID NO: 6804
  misc_feature (1)..( 3000): 2750-1469P.txt file - cDNA_ID_2175570; gDNA_ID_1621106; Annot_ID_171590

SEQ ID NO: 24377 - DNA, 3003 bp, Unknown; identical to SEQ ID NO: 18141
  misc_feature (1)..( 3003): 2750-1469P.txt file - cDNA_ID_2175659; gDNA_ID_1621104; Annot_ID_171523

SEQ ID NO: 24378 - DNA, 3003 bp, Unknown; identical to SEQ ID NO: 18141
  misc_feature (1)..( 3003): 2750-1469P.txt file - cDNA_ID_2175659; gDNA_ID_2926184; Annot_ID_200506

SEQ ID NO: 24379 - DNA, 3003 bp, Unknown; identical to SEQ ID NO: 20999
  misc_feature (1)..( 3003): 2750-1469P.txt file - cDNA_ID_2175663; gDNA_ID_1621104; Annot_ID_171530

SEQ ID NO: 24380 - DNA, 3000 bp, Unknown
  misc_feature (1)..( 3000): 2750-1469P.txt file - cDNA_ID_2175663; gDNA_ID_1620864; Annot_ID_170410
  misc_feature (287)..(287): n is a, c, g, or t
  misc_feature (305)..(324): n is a, c, g, or t
agaatgagacaaaaagagaagacgttacctaaggtcgaagtaaaagcttttgaagaggcggtgtaatggagagagtgttaacggcgttagtgtaggaaacgacaacgtgggatgctgctgtctgtgtcagggagaagagagagagagagttaatgaagatttttgtctgtattctgaaacaaggtcgaatgttggagactaaggaaacaaaaataaagctttttgatggcttatgagtctttgaaatagctacaccgctcctctcaccttagtctttaacctaatangggggggggggggggggnnnnnnnnnnnnnnnnnnnncccccccccccccccccttgtctttaacccaataacccccccccccccccccccccccccccaattttctctccctatcctctcatttttgtagtgcgcactgagagagacaaaaaaacaaaaaaagatggagcctttgtttttaaggttttctttatgttgaggacattaggctaagacaaaaagctctgttttctttctttgttggatttttgggtgttgcttgtttgaagaaataaagctttgagtatctccaaggtttccattacagagacaaaaggggtatttgagcttagtttctctgtttatgtgtttgttgtgcttttaaatcggggtttaaggtttatagaagtggtgtttctggtaacagttgagactttttgaggggatattacagagttcaggaaataaaaaatatagaaatttgtgttttgtgtttaatgggaacaagagcagaacgcaaggaagattttgttggtgggtttggatttggtgttgtagaaaattcgcataaagacgttatggtgctacctcatcatcactattatccatcatattcatcaccttcctcttcttctttgtgttactgttctgctggtgttagcgatcccatgttctctgtttctagcaatcaggcttacacttcttctcacagtggtatgttcacacccgccggttctggttctgctgctgtgactgtagcagatccttttttctccttgagctcttcaggtttcaagttctcacctttttgttgacttctgagctatgaaaaaattgaattttgttgttatgtgttggttttgatgtgattttggtggataaaatccaggggaaatgagaagaagtatgaacgaagatgctggtgcagctttcagcgaagctcaatggcatgagcttgagaggcagaggaatatatacaagtacatgatggcttctgttcctgttcctccagagcttctcacaccctttcccaagaaccaccaatcaaacactaacccggatggtaagatctccctagcctctcacttaaacgtttcccatttttgtcaatttgtcttggtttcatgtgttcttgatctcttgttatcatgtttgatgcaactaaaagccattatgatggtattagaatgtcaagttttttaccagtgttacctcttagtggatacatataggagtggaatgtttagtatttatgctgattacaagaatctgccgttgtctatgtggatgacagtaactgtggcagtggcgacaggaggctcattgcagctggggattgcttcaagcgcaagcaataacacggctgatctggagccatggaggtgcaagagaacagatgggaagaaatggaggtgctctagaaacgtgattcctgatcagaaatactgtgagagacacacacacaagagccgtcctcgttcaagaaagcatgtggaatcatctcaccaatcatctcaccacaatgacattcgtacggctaagaatgatactagccagcttgtgagaacttatcctcagttttacggacaacctataagccagatccctgtgctttctactcttccgtctgcctcctctccatatgatcaccacaggtgcttttacttacattcttgtagtcaaagtattcaaatccttcccctttgaaatcatttgaaagactgaaacttagtggttgatatgtgaagaggactgaggtggtttacgaaagaagatgatgccattggaaccttaaacccggagactcaagaagctgtccagctgaaagttggatcaagcagagagctcaaacggggattcgattatgatctgaatttcaggcagaaagagccaatagtagaccagagctttggagcattgcagggtctattaagtctaaaccagacaccacaacataaccaagaaacaagacagtttgttgtagaaggaaagcaagatgaagcgatgggaagctctctgacactctcaatggctggaggaggcatggaggaaacagagggaacaaaccagcatcagtgggttagccatgaaggtccatcatggctctattcaacaacaccaggtggaccattggctgaagcactgtgtctcggtgtctccaacaacccaagttctagtactactactagtagctgcagcagaagctcaagctaaacaaatggcgctcgagttccggtttagtgattagaaaccatcgttgttagtgttttgtttgaaaaactgagaccttttagctttctgttggtgttttacggttggattttgcagtagactgctcttatgaatggaaaattgtttgagacaacgctttactttcactgctggattagtgaaaagtcagaataatcacttttgctaaacatttgactaattatttcaagagttgaccagaccgacaggtccaagtattgccaacgggaagcttctgtgattttgcaggatacgtgacgtcggcaatgacgcgtgcgaagaacaaattaaaaagcatatatccccttaaagcgacttcgcagcaaaacctcttgtctcgtttatctatataaagaaaatttagtagcaaacttctcgattccttgattcgtgggaaaaagaaagtctagatttttgtggattttgattttgtgattccgtgattgtatgaacttgagccgttttgcttcgagattaagaatg

SEQ ID NO: 24381 - DNA, 3003 bp, Unknown; identical to SEQ ID NO: 20999
  misc_feature (1)..( 3003): 2750-1469P.txt file - cDNA_ID_2175663; gDNA_ID_2926185; Annot_ID_200526

SEQ ID NO: 24382 - DNA, 3000 bp, Unknown; identical to SEQ ID NO: 2874
  misc_feature (1)..( 3000): 2750-1469P.txt file - cDNA_ID_2175689; gDNA_ID_1620611; Annot_ID_161898

SEQ ID NO: 24383 - DNA, 3000 bp, Unknown; identical to SEQ ID NO: 2871
  misc_feature (1)..( 3000): 2750-1469P.txt file - cDNA_ID_2175700; gDNA_ID_1620611; Annot_ID_161902

SEQ ID NO: 24384 - DNA, 3003 bp, Unknown
  misc_feature (1)..( 3003): 2750-1469P.txt file - cDNA_ID_2175732; gDNA_ID_1620611; Annot_ID_161911
tttaggtaaagagctcacacctatctctactctatagtgttatatagtgtcaaaatttaacgaaggcattaaaaaaataaaaacttatataccatacttaattccaaatcgaacaaaacacaaattgtacccgaatcaaacatattgaattgaaaccaaatcaaactgaaaccgaactgaactagtttagaaagttttactaaaacctaatcaacaaataccaaaccaaacgggaaattatgagaaaagtagaaaaaggcccaccaaaagagcgtccaccattacttgattgtgtatgatacatatataaattggtcttatttgtaatacaatcaagtgggcttagcccatccttttggtttgtttacttgtgtgtattgggtcgaattcttctagaaggcctctttttaaaaacggtttgtgtaaaattgtcaacaccattttggacttttgtgttatttccattactaatctctatagtttaggaatttctcgtgttataaaactcaagtacaaaacacaggaatcatatatatatatatatgaaagttggttaatataaatgacacattatcacacaacaaaatgacatatgtcattcgatgtttttttttaaattaataaaactaataaaattaaataaacaaattaaatgtattattaattctatttttaattgaattttccaaaataaaaataaaaaataaaattatgtaaacaaattaaatactactttcattatactctttttattatattaatttttttattatcaataatcatgactaatttttttattgtgttgtagttgtttgctacctaacctcttattagtttattagtttaattttgagtttttgataacattgacattcaagttttttcaaataataaaccttcaaaatattagacttaccaaataatataatacacaatcatttctcttatattgatatatgcaatgacagaagatctaaaagtattgactttaatgatactttaatttttgctttctttttattattttcatatgaatactcttgaaatcttatttagtttatatcaattctatatatttaatcataaacctataacaatgttgttggagtattatatcgggggaataaataaaaccataaatagtttatttataatcaagttgaagaattttcaaattatccaagacgcaatcatttctctaatattgatatatgcagtgacaaaagatccaaaagtgttgacttcaataacattcaatttttgctatcttttttatttttttgtatgaatactctttagatccttttcagttgatatcaatccaaactttaatcatgagtcgatcacaatgttgttgaagtacataaaacaagaaattgatttattaataatcgagttaggaaaattttaaaccacaaaagtaacatagttacacagaattgtatcaaaatattattattgttgttatatgtattcatgaagtgaaaaaatattaaaatcttataaataatcagctttatacacaaaatatataaattaatatatagagtcacaaatgaatctaaccataaaaattgtaactacatattatggatctaatttcattaacaatacaaaaataaataaatagtaaatataattagcataaataacaatcaatgtaattttttctttaacaattttcacaacaaatccacgcgtagcgtgggtacccatctagtttctagtaaaaaaagaaatagataacactcttgcccaacacaatcaataacagttcaactgaacaacatatgaggaaacaaatcatacttgccgttttgctatcgactacaaacttcatgtcgtttttcatttagctagtgaactaaccaagattctagagtgtaataaaatattaaaatctataggcaaactcacatgaccaattaaacaagttaacgattactgtccaattaaacgtcacaagttaattttctaccgttaaaatattgccacgtaggacgcgtacgttaattaactcgtaaaatccgcgcagacaaaatcacattgaccgttagatatagatttggcggctagttcttcaatcaatataaaccgtccgtcaaaaatcagaggtaggcttttgacggtgtagttttattttaaaaacataaaataaattagtgtaagaaacttttttctctctctctgagtcttcgacttcgtttttatctccagctttttttttctcacgcgaaaagctcctgttctttaaaggatttgatcacgagagtttcaggtttggatttcgtagtcaatttccagattctagggttttggttggtcaaaatcttctacttcgtcccgtgtttgtggattggttcacggatctttggagattccgaaattggaggcgatttttattctagggtttcggtgaaatttgtaccgttttttggattaattcttacgttgatcgcttctctcctggcgagctcgcgtttaaaggtttagatttcaagctccgtgttgtctattttgaagctaatttatctggtggaggttgaattttggtttgtgaagaatttgtgtggattcagctgttggagattcaaatggtaagattcgatctatttttgatttgtgggtttttcttaattcgaatgattagaaaaaatagagattcatttgaatttggcatcaagctagggtttgagttttggggtccaaaaacgaaattggacagctaaaggtttaatttttacggtcatatctctcacgtttttgagaatcggaaattcttatttcacattgtttagatctggggttcttgtgtcacaacaagtttcttggcccaatgttatctatcgaaatagggaaaagaatcgtcttagtggttttgaatgggactgtattagtttttgttgatttaagtgaaattatatatgattcaggtgtcttgcaaatgagttgtagaagctagtgagaattatatatattgtggtaagtcttgccaaaacaatg

SEQ ID NO: 24385 - DNA, 3003 bp, Unknown
  misc_feature (1)..( 3003): 2750-1469P.txt file - cDNA_ID_2175758; gDNA_ID_1620611; Annot_ID_161919
ctgtcacttttcaaaggtaacatgtttcttgttatgtgagaaacaaagtgaaatcacattttaaaccacttaggctttgtggtcttcttctctgtggatttacgctcgtgttcaacaggtacagcactagagtcaaccgtggctggctctgatgacgattcaaccggttccacggctttggtcatggcctctaaatctttcagtgacaaaatctcttcattaagataaggagttgaactaccaccatcatctgcaaaaaaaccattgggttttttaaagataagttcagaacacagtcctcttcacaacaaattctttagtatgtaaggggaatcaatattatacctaatttaaccagctttctaagattagtattccctatgtattcacatgatcctaaacttcttatcaaactatttcattcctaagtttgaaagtttctggacaattcctcgtgcagtttagttatccatccctcaaaaagatctcacttactaaatctataatcccgtacatatcgcaatgcaaaaaagttccccagagaaagactatggtattgggtgaaggtaatgacagaaactaacctttaggttgatcgtttgaaaagtagacaatggctccaggaacaaacccagctgagtagaagtcttgtgagaaatcttttatctgtttcttgggaggagttgtatctgacaaaaagatggcacgttatcaagttttcttctcttgacaaatgtaaaatctgaaatctgagtgatggaaacatacacaagtagaaaggaacatctgggtgggcaactactcttttgacaagatcaatcaagccttggatcttttctgatggatgaaatgttgcctccaatgtgtgattatcaggaaaacgaacccggattacagcctagacagtatcaatctatagatagtcagtgggataaaactagttcccaaacatgaaaccaatagtaaaaagaaccttagtgagctttgatcgacgagcagcttcttctgcttcccggatttttcttgtcttcaacgatttatcttttgtataagtaatttaacattacatgttagaagaattaaacaaccaaggtactgatttctttagagcaagcaatacattccgattatgacaaacacagttggatttgatcaaagatttgcaaaattttcatggaaatggctgaagaatgtaaactaaaccatacagattcttcagaacatgttaccttctttcttagtagccaaaaggcggtaaaaatctgcaggtgtgaactcgtagaaatcatcagattcatcgtctgtggaattttcataaacaatcaatcacaagacttgttcaaattcagatcaaatgcaatataagaatcagagatccaaaaaagttaccagcactagaaacttgacttggtctctgtgagatactcgaagtctcgaaaacacgaacctctcgccctaatttctctcgcatatcagcaattttagcctaattttacgaaaatccatcaaataaatattgaattcgactcaagaaatggaaaaaccctagaaaactttgcgggaacccccaaatatagaagaagaagaaacagaaaaatttcggatcaaatgaaaatcgaaatggaagtaggaatcagatgatatagatcaatgagggagaagaagaagaagaatgaagttagacctgagctgaagaagaagcttccatggaatcggtgatctcgagtcgtctgcgtttcaaggtgtgtagagaagggtcatcaacaaacatcagacccggttcaagttattctttacttgctcgctgcaaatccaccgtctatataccggaggcgcttttgttttaggtgattttcaatttaagcacagtatgttttgttttttttacagataagccctctttcttattttcatttttttgacccctctttcttctatctaatttttccccaagtaaaccacaagtcttaaagacttaaactattaaacaaaatgaaatgtatgaaataaactatttttttttgttgaaatgtcaaatttataaatcaacaaaataatttatatacaacttaatccatataacaaaaaaatcaaaaaaaaaattaaaataaaaaacattggcatctctcataatctaaaccaatattaaaaaatctcagagatttggagtctcaaaaaaatatagagaaattttgtgttcttcattttgtaagtgcaagatgtagtagataaatatctgaaatgccaaaataataaaaagataagtgagcaagttaaacaagtgaaatggtaaaatgatgaagtttggtcgtctaatcaacgatcaggtgaattttctagcaaatcaccattattcattcaaaccatatatgtaaggttttaagcataagcaacataaacagctcaagattcagtgcgattgttgaattttcgaaccttatgtctagttttgttatttcgaaactcatgatagattaatgaatttttgagaaatatttattacaaaagagaaaaatatttagttttgtcttattcatttgtaatatataaacattaaattattttgaaaaatacaaagaaataaatgtaatcattttgtacatggcatatcgacaagaaatgttattacataaatatgtgccatctaggttgtacaaaataaaagtatttacccacctgaaattaataaagtaccaaccattaaaaggaaaaaataaaacctttaaagaaaagtattgtgctacgaaaatgaaaatttattaatctgatagcctcttcccacctaagcttcttctttgcttattttaattttatctttttgttgtatccttcttgtctctattaacgctcatctttcaccttcaagctctaaatcgaagcaatcttcacactccacaaaccctaatttcaatgcaatcgcaattcaccatctcaatctctcttcatcttcctctatccatggatccataaatctctgtaacctcacaaaaggtgtttccaatg

SEQ ID NO: 24386 - DNA, 3000 bp, Unknown
  misc_feature (1)..( 3000): 2750-1469P.txt file - cDNA_ID_2175770; gDNA_ID_2926187; Annot_ID_200740
ttacttgcgatcgagacaatagagtagagacgacgatgtatgtccaccaaaacaaatcgattttcatgaaatattatcaactattctttattatttttttgggtatgaatgttaagtaactattatttattttttcaaaccagatcctaacaatctacataaagagctaaaccaccatgtgcataatgagctaacacactttgcaatgacaatatgtgataggacgcatcacacacatcttccgtaaagagaatactaacaacattattacgtctacctaaaattgtgtacatgctttgataggatgtaatagaaaaacttgaccaacaccacacatgttttctactttaaaacaagtacatttgtatggacttaacaccataatgttttgaaacccggtatctgaaccatgttcagtttttttttcttataaatatcagtcttaagaatttttcttaaggattcacaatccaacatgagcataatagagagagaagtaattgctatattctcaataacaacacttgacatatactaatttaagagcatcctcataataacatctaagtattttgttatacaacttctttaagtttccaataatgacttaaatgttagatggtcattggaagacatccatgattgcttcgagtggcttctactaaggatatgctcatctattcaaaagactatattttgccatgattgatgataaaatctaaaaaatgtatattaacatcgcaaatgaaattggatattcacatacaaaaataattgtatattacgtattccatagtacttaagtattatgatatatatattttttctttttctttttcaaagcattagaataaaaacattcaaaatatgtttgataggtttttctatacttcatttatgttactgatatagtgtttaaataatgtaaaagtgaatatccaacttctcaagagacaaagaaaggtaaagggtcgcattcgtacacacgcacgagggatacacgtaaaagtcattacgcaactcaacaaaagcaaaagaagaagagaatgcgatgcacacgtgcgctctcttttagcccataaaacccttctcttcttccctttttcattggcctataaaatcaattttactaaactaacctctcaaatctttttagtcgctttggtttagtttaatcattcacaaatgacaaatgacaaaccctacaaaatccttatcgaaaccaccctcacaaatcttctttgtcgctttggtttagtttaaatgtttaatcattcataaaacacaaaccctacaaaatcataatcgatacatcatcgaagatccgccattactaaagtatggcggctaagagcagtgaaattctcctcctaattctagtctcatgtgtataaaaaaccttaaaaggaaataacaataataaaaagtcaactactggttaggcaaactaatagtatagttgttaaccattttgataaggccgtttacaaattacaaccgttcgattcgattctaaagaatctctttaactctttttagttgactatccactcccaccgtctaataaatcgataatttttagacctctttttacgtcgataatttctagagctaattggtattttaaggatatttaaaattagaaactaatcaatttcgaagatacccatcaaagatttccaagtcttcacatcaaataggtctaattgtgcatctcatgggtggacgaagagacatcttattattggcatttattagaatatgcatattcaaatatatcacatggaagtcattcgattttttctagctaacaaagtatgttataccatcttattatttggtgattttattaatcttattagcattatatgtttagaagtataatttgcccaacaaatatattccatttcaagttcattgagaaatattctcataacatgcaaaagaagctcaaaactgaccacactagaatccaaaatcgccaaagaattgatagagtcagtctcatcatagcttacacgagaatataaacttgactagataaagaatattaactttttcagctgttaaaagctctctagtgaatatattggacatacgtacttgattgtagtagatagacgtgttctttcacatgtgtacaccatgcaaaatagaaacattgccgttttataaattaaaaaaaaaccattaaaagaaatcattccaaacccgaccttagcaataactatgttgatatgaaagctaataaataagttagagaaaaaaactaatgtaagtcacgaggatctcactcgccacccaacggaatgaaatcagcggcgcatttatcttaaaagactcgcaatgctcacgagtttcgcgacgccagccattactgagtggcatacccctgtaattaccacgacaataacgagggtaatcttggtataaacatgttttcttgaagtttattttatttttttaagtcactccaatcaattttgcctttgaaaaaaagaaagccatttgtctgcattggggactcatcacttatatatatgcgttactctcccttttttaagtgttttttttcttttgttcctttccaattatttttagcaataatcataatgataattttaatattttaacacaataatagcgaataaataatatatacatggaagcgcgtgggtccaaaccgtcaaattatgatgacgtggcaaaatctcgtgggaaattgaatgaaaactgtaaaagataacgaccggtgacagagagagagagagaggagaagaagaatagaagaagcggctcatatccataataaaagccatttgctcctttatttattctctcattctttcttcttcattattcatttctctcgttattcgtttcgtattttgtttgtgtttatgattttacctccttagttgctgtgagatcaagaagtggtgaaagaaaagttactaaatctggatgttatttgattgtcgtcgttggtcttgagctatg

SEQ ID NO: 24387 - DNA, 3000 bp, Unknown; identical to SEQ ID NO: 6744
  misc_feature (1)..( 3000): 2750-1469P.txt file - cDNA_ID_2175786; gDNA_ID_1621103; Annot_ID_171494

SEQ ID NO: 24388 - DNA, 3003 bp, Unknown
  misc_feature (1)..( 3003): 2750-1469P.txt file - cDNA_ID_2175786; gDNA_ID_2926187; Annot_ID_200729
aaagctggtgagccttttttttctttctttctttcttctgcctcttactactctgtctttgtggttaacctgaatgaattataataagcagtattgttatccactaagtacaatgaaaaagcgaaattcaaatgcatttcatgaaatccactctcgtcttcattccatccacgagaaggctctggtggactatctccctttggaaggagtactaaacattgaccacattcacctggccacctgatgcagcctgcttgaactttggaaagtacttcagaggaataagatttttagaaaaaaaattagtgtaaaaccgcattttctttgacgcaggatgtgtttgataatcttgggacgcctatactcacacctggccatgaatggaccatagggaaatccatctcttatccctcaaaatcagtcactttccatccgcattagcactgccatcttaattgcatttcattcctcatcactttgcacacttggacatgcctctgcaatggagaaggctctctattttcattcatatccccgtctgacttccacattttcagttgttccttgacatattaattccataatgcaaggtctgtaactgcttcactggtcatttggagtttttttaaggttctaggaatgttcaaaatttaatatgttctaggagttaagttaggcgttgaaggagggaggacagtgttcgtgtatgttgaaggttcttaatctggtccacttcctcactgttaatgtactcagatctttgcttttggctttttcttttttctccagggtttgcttttgtatacatggaagatgaaagggatgcggaagatgccatccgagcacttgaccgctttgaatttgggcgtaagggacgcagacttcgtgttgaatggacaaaggtaggatacttaccccaggatttatttctttccagacttagttatgaggtttgaaatactgataacataaatggttctgtgtatatagagtgaacgtggaggtgataaaagatctggtggtggttcaaggagatcctcatccagcatgagaccttccaagactctctttgtgattaactttgatgcggataatactaggacccgggatctagagaaacactttgagccgtatggaaagatcgtaaacgttaggatcaggaggaattttgcatttatccagtacgaggcacaagaggatgccaccagagcattggatgcttcaaataacaggtttgttctgtccattttagtatctaatcactttcctttcttagactcacgtttcatctgtgttttcattcagtaagctgatggataaggtgatctcggtggagtatgctgtgaaggatgatgatgctagaggaaatggacacagtcctgaaagacgccgtgataggtcacctgaaaggagaaggcgatcacctagtccttacaaaagagaaagaggaagccctgattatggccgaggagctagtcctgttgctgcctacagaaaggaaaggaccagtcctgactatggtcgaagacgtagcccaagtccttacaagaaatcaagacgtggcagtcccgagtatggtcgtgaccgcagaggcaatgatagccctcgcaggagggagagagtcgcaagccctactaagtacagccgcagtcccaacaacaagagagagaggatgagccctaatcacagcccgttcaagaaggagagtccgagaaatggggttggtgaagttgaaagtcccattgaaaggagagagagatcgaggtctagccccgagaatggccaagttgaaagccctgggtcaataggaagaagagacagtgatggtgggtatgatggtgcagagagcccaatgcagaagaggttagattctgaaataggtcgatacttgtttatatattattgatgacatgaatcgtaaaccatttctcttgttgttgcagccggtctcctcgttcgccaccagctgacgagtgataagagtggatccacaatctctatcaaagtaggatgttgtaactgtttgtagtcaacaacgctatgtcgtcgtgattagtttttgtcgtttggtttttgatagattcgaactcggatcacttttattgtcggattgaaaaacttatgtcaagttactacatttccgtttttttttatcacctctcagtttgaaccccaatcatgtaatgctttcccgtgacaataagatgcgaacctcaaaacatcttgcatcgaaacaccttgagagtgacaaaatcgaacgcatcgttaagtaacttaaatggtacgccgaaattatggaaggcaagaacggttctattgacttaattgggtctaaaaactactctaaacgcctcttgtcaacgttcgaactagtccctaacctttgactcaaatataaatattggctacaaatagacttatagttctgcctacattggtcgtctgctttagtatatttgttaccaagtaaaatgctgctgtagagtttaatgatctctttgtctactgggtttctccaattttctgatcgttgggattcgtgcaagtcgagagagtctacttggttgaaactttctgggttttgatttgagttgcccattggatttgaagttttagtcttttgttggtaagttttaccctttgagatatgctcgtctgatagtatagggctttcgagtgttatgaaaaattcgccttttcgtcttctgatttggttttcatttccttcagctaaatcttcgtaatacttggatcctgaatgattaatcatagctagaatccgtttggctttgttatttgggtcagagattctgagaggacgctttaaagagtcaagcttttcattcctctgaatccgtccttgtattggacgtcttgatctctgtatgctctcctggagctatcgaatcgagtttctcattgactgatgctcttggttccgaagctgtatatatgcagaggagcagtggcatcaataatctgcatatcccgacttcgccaatg

SEQ ID NO: 24389 - DNA, 3000 bp, Unknown; identical to SEQ ID NO: 2902
  misc_feature (1)..( 3000): 2750-1469P.txt file - cDNA_ID_2175817; gDNA_ID_1620614; Annot_ID_162001

SEQ ID NO: 24390 - DNA, 3000 bp, Unknown; identical to SEQ ID NO: 2900
  misc_feature (1)..( 3000): 2750-1469P.txt file - cDNA_ID_2175831; gDNA_ID_1620614; Annot_ID_162005

SEQ ID NO: 24391 - DNA, 3000 bp, Unknown
  misc_feature (1)..( 3000): 2750-1469P.txt file - cDNA_ID_2175838; gDNA_ID_1620614; Annot_ID_162007
cttcttccttacagaaccagtacattgtacgccgcccatcttagacttgatatattcaactacggatcaaatgtattacagttataataacgaaaatatatatgttctccttgtttggatctatttttatcttttagtactaaaaccttttgcttgagtcatgtaaccgtcaaaaagtctctagtataactgtataagaccatctctaatggtgagttctcaccaatagtttaataaaaattatgtcaatttgttagataagagcttgtgattaaaaagaaaaaaaaaatcatagtccaatggggggttctcagaaaattttctttttacaaaaattattatatttcacaaatacatgattccaatttccaaatgaataactagaaaatatatccatggactgaataaggacaaagagtgaactcaaatatggttctatgtgacaagatactgataaaaaccatttatacaatgacccatatccttgaactaacaataaccatacctctgaactataaatgataaaggaactcgacaaaacagttttagaaacacaatttgattcaatggaaaaaacagagacatttacttactttgttgcatctgctccggctccaggaaagggcttataggcttaatatgatgagtcctgcaatttgctacggctactttgttgagacataatatgatgaatccaactacatataggtttatccacagcttcttccaccttggctaagagatagaatcctgcaatttcagccaattgaatctagaataaaaaccacaagtaacaaagcttcaagtacaaaagcaaactaaagatatcaacagaacactaagcaccaacctgcagtccatagccaataagtgggatgagtatacattggaggcaatagaatagccatcaacagaatgacaatgcaaggatatcaaaagaacactaagcactaacatgcagcccactcgaagtattcaatgcagaatcagactgaaggcaacaaaactttatctttctatactttatagaattaacccaagaatccttctctcacttcaatcatcccctgagtatattgaatttcattacaacgagattttaacccgcggtacaccacgaggctatattcttttttaaaaataaaaatttaacttgtttagtagatttaaaatatatatgatttaatttgctgtacttttaaaatgtacaactcttatatcttactatgtttaatttttactgtttaaaagtataagaaaaataaaatacagttaattaagttaaaatctagattataactaaataattcaaatttaaattatatttgttttattaatatttttatttttttagtgtttaagataatataattgtattttaatttttatatctaagatttcacctatggtacaccgtcttgtattactatcgacctaaacccgtcatatcatctaatctcgttcagtgaaatcaaacatatctaatggatttcacatgtggtttagcgtctcgtattttatcgatccaaactcgtcttaccatctaacccgttcaatgaaattaaactttattttgttatttttgttttaataatactttaattgaaaaatatataatttaaatcaatttaattgtttttagttcaaatggttattaaattgtataaaagttcatatattataaatattataaacccgtcctaccatctaatcccgttcggtgaaattaaaaactatttttttgttttttgtttaaataatacttttattaaaaaaaatataattcaaatgaatttaaaagttttttcaaacaattatataaattttatagattttacatattataaatattctaaacgtttattctgttaaatattttaaatgtttaattaactacaatattttattttttaatcaagtatatattaataatgtcctaaaatttctcattttttaagtaattataattaatggagatatattagataagaaaatgctactaattaggaatattaatgtcaatggcattccgtgtaaataagttccaactcgaggatttatttcataaaatgactgcaaaaatgtatatgtagatagtgagaagtaaccaaagctaacaaatgttccagaatatgatccttcccttacatgaaacatctcttacaagaaaattcttcaatccacaatttactgcttttatctaccaaatcctcaaatccattacaataaacctaatcccatgaatactatattttgttttgattaggtttaaaaggaataaactaacctcaaggtcgtacctatgcacattgtttccggccgacgcttctccatcctctgcctctataaatcataaagctcctctaacgatgctctcgatttcacattcttctcgccgttctccgtgattttgcttcttcactaaaggatcgtctatgattgagtcttcgatcaacaatttaatcacactggattttagtcccaatcaatgtaatcagagaaatctccgacctaatcgctatcgccaaaaagactgttttttttctttcttgttttgtcaaagaatcgtttttttcttcttcttgttttgtcaaaaaatcgggcaaaacatgacacgtaatagtctcttttgcttttcaaaatctatctcaagagagacagctctctcaaaaaataaatcattctgatatattttttccaacttaaaaacatagaacctatgaagaaagcttcatttttacattggagatgctctaagtgtttttttacgtgtttctttaccaacacaaaatgcaaatatagaaactattgattaatacacaaattaaagaaaaaaagaaaaagataaaaaacactacaatcaatctgagccgtcgaatcgtaagctcactacatccattagatctagggctcaagagatcacctccatatataaactcgtatcaatacattttatcccctttggccgactcttactgacctcagagctcagcaaaaatg

SEQ ID NO: 24392 - DNA, 3003 bp, Unknown
  misc_feature (1)..( 3003): 2750-1469P.txt file - cDNA_ID_2176003; gDNA_ID_1620613; Annot_ID_161977
tggaaggagaggatgtcctggatcaaatctagcttatatgattgtaggaagtgcaataggaatgatggtgcagtgctttgactggagaatcgaaggagagaaggtcaacatgaaagaggctgttaaagggaccatccttaccatggctcatcctcttaagttaactcctgtcactcgacaaccacccttgacttggatatgacactgaatttgcagacaataaaaatagatttctctctattttttgtttatgggtttcccggtattagtctggtttggcatttgtagaggaggatgttggggcaatgatgttgatcttgtttctcgaacagaccctctgtcgtttttacatttaaatggttaaattattttgtaattcagacttgagtgcacttcccaatagacttgctaattgagcgtttctatcttgtgtcacatatgtcatatgtcagagactttaaaacattacatctgttgttgtaaaatctgtttttttttatcttcacatgcacatttcttagttacaagactcattaagatccacgtgtggaaccttaggtgtcggtacgtggggaattttttgatttttgaagattctttttcacttactgaatgattattatgatcacgaatgtcaaggaacagttttgacccgaaacgtttcttgttgaaaaaatagttatatactttcttctttccattttttcatagattattgataagaggatactctgtttcatctgcctcattagtttgagcaacaatggcagcaatgttgactgttgagtttcaaaactgcttgatctttatcctcctctgcatccttttactcctatgttaccctctctttttcaagaaaccaaaggtctcacaagatggatttggtttgcctccaagccctctatctctgccaatcattggtcatcttcacctgcttttctctaatctaactcacaagtccttacagaaactctcctccaagtatggacctctcctctatctccgcatcttcaatgtcccgataatctttgtttcctcggcctcagtggcatatgagatcttcaggggacatgatgtgaacatctcttttcgagggaaccctcctatcgaggagtcccttttggtcggatcttttggatttttcaccgctccttatggagactattggaaattcatgaagaaggtcatggtcacgaaactgctcggaccgcaggcactacaaaggtctcgaggcatccgtgcagatgcgctagaacggttttacatgaacctgcttgataaggcgatgaagaaggaaagtgttgagattggtaaggaaacaatgaagctcatttacgacagcatctgcaagatgattatggggaggaatttttctgaggagaatggtgaggcggagagagtcagaggcttggtgaccgaatcgactgccttgacgaagaagatttttatggcaaacgtgttgcacaagccccttaagaagctcggaatctcattgttcaaaaaggagataatggatgtttccaacagtttcgatgaactgctagaaagatttcttgtggaacacgaagagaaacttaacgaagatcaagatatggacatgatgggcgtgttgttggcagcttgccgagacaaaaatgcagagtgtaaaatcactaggaaccacattaagtcgttgttcgtggtaattgtgtcttttagtaggcagattcgtccataatccaaaatatattgtcctgtctaagaaactttttccaactgcaggatcttgttgttgcaggcaccgacacttcgagacatgcaacacagtggacaatggcagagataattaacaagcctaaggttcttgaaaaggtaagagaagaaatttattcagttgtaggaagaacaaggttggttcaagaaacagatttaccgagcctaccttatttgcaagctactgtcaaggaaggactgagattgcaccctcccgggcctctctttgcaaggacagcccgagaagggtttagtgtcggaggattttatgtaccagagaacacaccacttgttgttaatgcttatgctatgatgagagatcctggttcttgggaagatcccaatgagtttaagccagagaggtttctaggttcaggaaaagaagacgagagagagcacggacttaagtacattccttttggtagcggaaggagaggctgtcctggaataaatctagcttacattcttgttggaaccgcgattggagtgatggtacagtgctttgactggaaaatcaaaggaaataaggttaacatggaagaagctcgtggatcactggtattaaccatggctcatccacttaagtgcattccggttgctcgaacccagattcccagttgctaacactaagctcgggaaacgtaaaccaagtagtttgctttcttctgttagtcatgtttatcgtatcttttaatctgcagagtccgatttggtgacttattgttatctggaagatgggaatttgctttcctatgatgtgttcaacttcatttgttatgtttgaaagtctcacactttcaaataaaatagcagtagaaaatgacatgacacgatttgggactaatcaataaaagtctcctaattgtatcatttatcaccaaatcatgaacagtttgaaaataattattaaattgttcatgatgactaacctacatttaaatagtaatcaacaacaacattaaacttttttgagaatttttctataattgttttttcttgaactgcatcaactattatctctcacctaataacaataattgtttttaaaaaatacagaagaaaaaatcctataacggtcgtgtgaagtagatccgaatccaatgatcaatttgaaactttgaatagaaagaaagacaaaaggaaaggcaaacgaattttataattactctttttccctctctttcaaattttgaatctttcgtcgtctcccattttctcgatctcgcaagctgtgtcatttgagaagccatg

SEQ ID NO: 24393 - DNA, 3003 bp, Unknown
  misc_feature (1)..( 3003): 2750-1469P.txt file - cDNA_ID_2176089; gDNA_ID_1621196; Annot_ID_174737
ctacaactgaatcattgtaacttctatcaaaatttgaaaatggtttaaatttaatcttttaccaaaaagtaaaataataataagtttgaaatgtttcctttttgtaaattaattgtttttgattaattcaaaaaaagacttttaaaatataagaaattttttcatccaaatagatagaaataacatattagttatctcatatcatatatttctctcaaatgttcatcgtattcatttgtagtgacaaccatttgcatcctataaaccccaaaaaataaatcattcgtcaggcccaatcatgtcaaaattaaaatacttgaaaaatacacaatcctatatcatagctgacgcatttatttcatacggcatgccggcaaaaacgtcaacagaaattaaataaaaagaaaagacaaaatttccaccggcaataagctttgaaaattatttcatatagtactaataataataaccaaaaataatgctgatatgaatgaaaaaacaaagaaacggtgtcataatgatgggacaagcagagttgagatctgtgtgagtgagtgattacctgaaaagtcaactcaccggcttaagaactcggcttttgccagctctctctttttaagccttctttaatcaatcatgaaacgatcctcttgtgtagttgcaataagttgctatttttctattgaattttgtattacaaaactaattcaacaattatttacaactaatttcctcaaaagagctattattcagaccagtttgtatatagtgtcaatagaaataagtgtggagttctttacagaatccaattaaatcctgaactattttaaaaattgtctctaaaaaatgacttgacatactaacaacaaaaagtattttaaggtagagattcaaattcgtcaaaagtaaccaccgatgggagatttaattgggactctagtcactgaaagtcgaatctggagatcaagacggcgaagaaattggtttcaagaggttagggtttgattaagagagaattgctaaaaaagaagaaataggttagttttttttgtagtttctcaaacataataagagtacttttgtcatttaccagatataacgcgtttgacgctgactttcattagcatctacaattgttagccgcaggatgctgagtttgctgcagctacttgcgtcaaccaaacgaacatacatactcagttacgtttgccaccgccacaacaacatgtgatgaccaaacgaacacgctaattatacacgacaaggatcctcttattcttcttgcgagtcatgatcccttttacaaatttataaaccttgtgatattatcttcactaatataaaacttcatatgggttgcacaagtttgcaaatatttctagctttcgaccaaaagcccaaaataatctacccctctgccaaacaaagtcttccaaaattttcttatttgcttcccattagaccatttgtagctatatgcattaggttcttttgaaagagaaagaaaaataagagaactgcatcatgttagtcttgatatctattcaattatcgtaccctaaatttaaaatatttcttaccaaaaaataaaaattttggaacgaaaagcgagaaaaaactcggcttttacgaaaaacaaatatctgatgacaaaaaaacaacaaaatacaaatatctttcaaattggtaagcaaactctttaacaattactaatccgagttagtttgttttcatatgtcatatcaacaaaatccatcctacatacctcagatttttagaaaaccgaatccggatttttgtagtctacaacttaaagacactattgaatctacaccatataagtatagtgaactgtaacattaataaacatgttcacctaaaaaagaaaagaaaagaaaagaaagtaaattatcaacaataatgaatacttgttttcttaaacgggcctaagtaacaagaaaagcccaatacgtgaaacataagtatattcactaggctataagcccataaaacatatgttgaatagactcacgagtcacaagtccccaagtctcaacagacggtggatgatgctccgagtctgactccggagaagaaaaagtatatgtgtgggattggtagttgccacgtgagtacgtgaccctgcgtggtagttggctattgattagtatttgttttgatgtccccagtccccacttttgttactgagctcgacgttttctttcttagtaaataattgattccaacctaaagcgttgtctaagatgactttagtttttataatattgtcgaaaacgaaaatatgttttttataaaatgcatgtttgttactagcatagctcatatacattatggtccgcagtaaaacaagattctgtttactctacttgaatttcaaccatttctcatgttgaaagttacttacttgaacttggacattgaacatatatagatgaatatccaaaacttaacacaccaatgattttagaatttcatgtgtctctcttattgcattatttaagaaaatttgccacttatgatatgaactaacaccagtactaattccccaaacatatttattaaccaattattttcacgcatttatttgaagattcgaattatgatttttgtcttttcttttgagtaagtttttttttttttttttgaacaaagagtaagtaatacttaaaaacaattccatgtccataaaattttactttatcaaaaaagaatactattaccataaaagaggtaacacaatctgtgttttaagttccactacttcaggagaccaacaatcttccaaactcaaatacaaaaaggtttgagactttttccaagatttgtctcttctttctttattctacctctaaaacaaaaatcctaatcgagttctctataatattcaataaagattataattcttcttttatcttttgataaaacttgtgctttcatgtgattgtgtttcactttgatttataatctcagattccaaaaatg

SEQ ID NO: 24394 - DNA, 3003 bp, Unknown; identical to SEQ ID NO: 17641
  misc_feature (1)..( 3003): 2750-1469P.txt file - cDNA_ID_2176125; gDNA_ID_2926132; Annot_ID_197004

SEQ ID NO: 24395 - DNA, 3003 bp, Unknown; identical to SEQ ID NO: 17641
  misc_feature (1)..( 3003): 2750-1469P.txt file - cDNA_ID_2176125; gDNA_ID_1621196; Annot_ID_174752

SEQ ID NO: 24396 - DNA, 3003 bp, Unknown; identical to SEQ ID NO: 21534
  misc_feature (1)..( 3003): 2750-1469P.txt file - cDNA_ID_2176276; gDNA_ID_2936564; Annot_ID_194553

SEQ ID NO: 24397 - DNA, 3003 bp, Unknown; identical to SEQ ID NO: 21534
  misc_feature (1)..( 3003): 2750-1469P.txt file - cDNA_ID_2176276; gDNA_ID_1971786; Annot_ID_175494

SEQ ID NO: 24398 - DNA, 877 bp, Unknown; identical to SEQ ID NO: 21532
  misc_feature (1)..( 877): 2750-1469P.txt file - cDNA_ID_2176290; gDNA_ID_1971786; Annot_ID_175498

SEQ ID NO: 24399 - DNA, 3000 bp, Unknown; identical to SEQ ID NO: 6722
  misc_feature (1)..( 3000): 2750-1469P.txt file - cDNA_ID_2176318; gDNA_ID_1621102; Annot_ID_171460

SEQ ID NO: 24400 - DNA, 3003 bp, Unknown; identical to SEQ ID NO: 18111
  misc_feature (1)..( 3003): 2750-1469P.txt file - cDNA_ID_2176318; gDNA_ID_2926189; Annot_ID_200869

SEQ ID NO: 24401 - DNA, 3000 bp, Unknown
  misc_feature (1)..( 3000): 2750-1469P.txt file - cDNA_ID_2176511; gDNA_ID_1971786; Annot_ID_58006
tccgatgactagttaatttggattcggatgttattaatccctgtgatgatctatctaattcacggtgagatttttcattttggtttggaacaaatgaatgaatacctttcatgttgttgttggcctttaattccggtttcatttgtgtacttttgtttattggagcggtttacggaaccatagaataaaatagttatctaatcacgttgaaattataaccataatggtttaatacgaaataaatataactagtggaaattaactatctaataattcgttacaagatgtatcttgtaaaactttgattgctttatctcagtaacggatttctaagtctcatgggagataatgttatccacactctcttatccaatagcctttcagagacactagagttgtgctcattgattgccaaatcttttggaaatttataagtaaccccaaagacaattaattttaagtttttaactcaagtggaccaattctgtttttaagtttttaactcgagtggaccaattctgtttttacggtcgtttttttctttgcatgaatgagccaaaactagattaaaaaggtgattgccgacaaagaagaaaagagagagagagaggtgattttcgattatgtgcagtttatctctataaaattaaaatatgtgacattttgctacaaaatgtctatttttaatgaaatttcagtgttgggttggttttattgctatcgtttagaagaaatcaaagcaagttaaacagatgtgttggttcaatagtatcatcatgtctacatgtttggttgttttgccattacataataatagatcttgaatagtagaacatgcgggagataaatcataaacaacatatcaataatcttcatataagattggtgttcataaaatatacatgtataagattacaaaaaatcgaaaaaataattaaataaaattttgatgatagcccttaaacttaggaaaatcccaatcattgaaaccaaaaaaaaaaactaagaagagaaacaaaaaaaaaagtacagccgtataaggcagagtgtgaggtaatgtgatgaatgataataagatgtgaaactttaataaattgaaagtgggacaacatgattcctataacgtgccttgtcttctccatcatcttcattaacatccctaacatgttcaaacatctgatcagagagctggcctcacttctgcaacctaacatggcccctttaaaggtcaaatccatctctacaaacttttggaagttcatgtacatgccttaataacaaacatcttttcgatacaagacacagaaaaacaacataaacgagatatttatagcccacgagtctataaaactattggtttgataagggaatcattgatctactgtgtatcaaactatacttaaaagtttacataccaaagcaaacatttactttctagttaaaatattgtaagttacatgggtgataggtctatgtaaaaatttctctaataagctcattctgccatataaaaaaaacattttgagtttacgcaatcaataaatgtatatcacaaacttggaactggagaaatgagttggagaaagataaaatgctccttaacacatggcattgcaagtgaagggatatggatcaatggggtttattattacttaggtgacatgtctaagaccatgactgctactgcttttgtgatagtttgctttaatgttaggtctgagaaattcgagtttatttatccagagggctatcatgaagctataatggtaaattaggtttggtttattatgatgataacgttgatgataccgttgagttgcgtgtgtgtgttctagaagactaggagaaacatgaacagtcaaaatatgcttacactttgagggatgataaattctaggatcattacgtttccatcgttggagtgattgctactggtgaaattattttatcgatggcggattatacatctaaacaatctttcctacttcaatcccgataaaaacactctccaacgtgttgaaatttaaagttttgaataatatcatgtagtgttctgactacacgtttttgtagacgattgttgtagattatattgctttgtagaccatgtagagtatgttaacgttaacgacccaaacctcctcaagtcaaacatctatagttttccatacatgaggacaaaagaatcagaagaggaagaataacttcaatttttacatccttcagtacgtgtttcaaaacaccattcactcattgtggcgggaaagaaacaacaggaggtatggggaacaaccatcaccaactgcaacactagtcaagatgatcgataagaacatccgaaaccggctcagcacacttcaaaggggaggtaattcaaagtatgaagaaggcatagtcctttggtttgcaacaagaagaaatcatgtctagaaattccaaatttcttgtaaataattttgaaaagtttttacattcacttgtaatacccagtaactttttcttttgagtataatttaacatcatattcaaaaaaaaaaaataacttcaatttttaccaatttaacatcattttatctttttttttttttttttcttttttaaagatttttctgaacatgaggttttaaggataaattacggccataacataaaacaatcccaaatttttggttggacaaattagtttttttttctagtatttgttttgtagatgagtttgtatgctatattgctataaaagataaaagtgaaatctctaaaaaaaaaagaagaagagattggctacttagttaataatagatatacacactaacataaggattaagagtttatttacagaacaatagtcagtgaattaaaagaagttaggaaagttagggtccaaaagagaaataaagcaaatatatacagaggaagctgcaagaagaaaaagggataaggcaaaaaggatttgcttttacgaacagagagcgagccagagagagtgagtaagagagaatg

SEQ ID NO: 24402 - DNA, 3003 bp, Unknown; identical to SEQ ID NO: 19620
  misc_feature (1)..( 3003): 2750-1469P.txt file - cDNA_ID_2176552; gDNA_ID_1971791; Annot_ID_175554

SEQ ID NO: 24403 - DNA, 3003 bp, Unknown; identical to SEQ ID NO: 19620
  misc_feature (1)..( 3003): 2750-1469P.txt file - cDNA_ID_2176552; gDNA_ID_2926197; Annot_ID_201545

SEQ ID NO: 24404 - DNA, 3000 bp, Unknown
  misc_feature (1)..( 3000): 2750-1469P.txt file - cDNA_ID_2176637; gDNA_ID_1971795; Annot_ID_175612
tctaaacttctcacgtgggggacctcttattaaagaaagtggactcttcagtttggtacgaaatctacattttccttattatagagtttggcaactctatttatcaatggacatagtcaaactttcattggctttaaatcactcaaaatatagcaatgccatacaattcttccaacctctctatttttttttattttttttttcatcacttccaacctctctatttaatacacaattttccagaaaataaagtttttggttaaccaaaagtccaaatcttttccattcatacaattctaaggtaagaaataaaatttctttcactgttaaagtaacaaatatgtatcttgattatgttgctttcttttagcaccatcttatcttcttccgttattttcggaaagatcttgcaaattcttgggtttatttattgtatattttttgcttgttttgtagcaaagaatatgacaaattaaaacagtaaaagactctactacaattttgaaaaaagtgaaattgatagattttctttgattcttcgtgacatattaaaaaatatcaaacagtatagtgtaaaaaggatacaagaattttaattggcatcattatatgtcgaccaagtacggtccacggattcaaagttgtgtcgggtcctatgaaattttgttgttgtgcttacttttacacgcttatgaatacttagccaattatatcaagacacaattctaaaacggtgtcgttttggggttaaaatttttaatctttgaaattaatttgtatgaagaagcagcttagctttctggtttttcttcttctgcaccttaaatatacgcccagaaaattcctctggtcaccaaaccaaaccaaaaccgactctttctttgaatttctgaaaggaaacgataagggtttcgagaaaaatcattcctttttgacttaaaagacgcgtttccacatttttggcgtttcttctctgggtttgttttgtctctagacgaagacgatcacgggttttaacatattcgtgtgtacgcgtgtatctccaattttgcgaatagggtttgaagtaatcgttttgtttgtgagggtacgaaacgattatctcgtgttcttcttcactggttttaaggatctcgttgtgctttctgattgatcccaggttcgttattgattataaaggtgattcctttttttcttgttaggataattctgttttcacttttgttttattgagaaaatttggattatatgagagattttagcctatgcatttggagaattgtcattttggtaccatttacttctctttgatattgaaacattggctctttgagtatttagtcttatggctgcttttgattgatttcgatattcgcgtttgaaaacctcaacattcatggttagtgttctttaatcaaaggtgataattttttacagagtttaattgtttttttgtttctgtcttgcattctaagtaaagtgttctgttttttagtagacgactttgtgattttcatgttctgtgattgattgattgtattgttttgctcctagttttgaggggtttgttttgctttttccaaaggggaagcacatgatttcttgcttgtttgctagcattgcttgcaattgtgatcatcttgtaagggaatgatttaatggtttgttttgacttgtagatatatatttctggtcaatagtttgttattgaatggttggtttagaagcactatattgtattcgtctgtgtaggttctacgacaatgacttgcttttgacaaagaattttattgaaaagtgtggatgatgaccagattttccatttaaagagtggtcctattctgtttgtcatgtgtgtcttcttcttcttggtattggatcttatttagaagcctcatttttcttctctagataacgactcgcggggttacgcatagcaggttcctggcttctctactgtcaggaggggccttgagtctttggagttaccacagtagacagaaccccagtgggtgactttttgaaaagtcttcttgatttagtgctgcacattttcgctgtggagctacaatcagaatattagagaagatatgggaatcttttcacgcaggtcaagatcttgtctctctctttttagctaattagtttggtcattcgagagttgttgcagagaaacttagtcaaattttgttcttgttatttcagttcaattagtaggaaatcaaaagatggaatgaagatcattgcaacggcattttttggagtaacatttggctttctgattggaatatcttttccatcattatcaatcactaaggttgccgaatcaatccttattgtcctatttctgtgtttgattagatttgtttccttatcatcattggaagatttttgttctcatatttcaggtgagtctccctacaaactttcttccttcaaacgatctctcatatatcgaggaaaagggttcgaaaattgcaactccagaaagtcataaagcttggtcatcatcaaagggtaacgatagcagctcatctactccgattgacaaatcaaaggcatgcttctactccttaatttgtttatgacttgggaatgttttggacctttacattatttagacaagttaccgattcctactttaatatgcaactgggattcatcttcaaggacggaagactaaaagtctaaggtctccttaataatatgagacatgtttgaggatccttacgtctgattagttttgtactccaaaacatgagatacgtgctaatgaaataagtggtatagcaaattaacagagaatttctttgtggtcttacaaagtttagttaattagatttcaccttgcccaacatgacagaagctaagaacatgtgtttgttaaccttttctttctgtgattcataattaatggtctcaaatctgtccatgttttcatgtttcatttctgatttgtcgcagatctgggtaccttctaatcctcgtggtgctgaaatg

SEQ ID NO: 24405 - DNA, 3000 bp, Unknown
  misc_feature (1)..( 3000): 2750-1469P.txt file - cDNA_ID_2176645; gDNA_ID_1971795; Annot_ID_175615
ctcagagaaagacgcctaaagaaagtgaggaggagaacttggttcagggctttgtcaatatgagcccatcttcgaaacttcgtcgagcttcactggtcaagtctcccagatgtgctaaatcccaaagttactactacaactcagagaatgaatcaccctcactcaaccgtgaaatagggagttcaccttcaaagtcaccgataacaccgtggaagtctctttgggccaaagcggcttgcaaagagcttgcgaacctggctgcaaaaagaggcagtatggatgatatcacagtggtgataattgatctcaaccattacaaaggctgaaaactcttaacaaatatgtttgtattctatataagtatcatatctctctgagactctagtggttatgtagattcttgttcataatatataatggactaatctcaccataaatcttattgcgttcttactaaattcatatcagtgacttacatttgtttcctgtctaagaaatcatagaaacaaactcataaaaagaagaaaagcttgtttcttcttgttgtcactgccttttacaggccttgcttaaccctggagcaatcttatcgaaaatgaatttgttagcagcctgcgtgaagtgtacaccgtcccacacaacagccttatcaggctcatcgcacggctttccaatgtaaacctctttacctttcacaatcttcttcatcccacatccgatacccttgttgtagttatacttccctccatgtccacaacacgaaaccaacgatcccttaaacccgtgaccctgagcgtgaacaaacaactcatgcttgagagagtagacatctacataagtgatggctgcttcagatagagaacttcttagctcgatcacagcttgtttcaaagcgtgattgaattgttgagctaagtggttcaaaggagaaacacatccatgtgaatcaaagtctgatgctttattcggaaaccgttcaatcacataagctaaacaaccaataggtccagtgttatgaatccagaagtatctccctccttgtccataaatattctatcaccaaaagaaaaaacacatttttatgatttccctttaaacaaaatcagagtcagaaacagagagaccaaccttgatagcattcatgaactgacttatgatctcaggaacttcggtttcaacttgttctacggttttattagcgaagtaacctgctgtgagatcgttctgaccaatgtcaaaagtgtacaaagcttttgagaagctgtcggattcaggcaacattgtcttgtagactcctccacgactacgaacagtttgagatctgttgtggaagttatagaattgtacgaactgtacatcgagtgaaaatgggctgaatccactttgacgtagagtagagttaagagctcttatcggagatcccgcggtagcgaagttagcgccgtggctgaagtttgaaccaacggagtctagaaacgcgcttagatatggtaatccaagactctccgctatgttcaaaacagaagcaaaatcagcaaaaacaaaaaacgcaaacgttttggatagggaagagttagtgtacctatgaagtcaatgacgaggcgaccatcgcagtatcgtcccgcgggtgagccgaagaaggaagagccgtgaggaggaccagcttggccaaaagcagcggagagaccgccggtatcggagttagagtcaccaaagttaaagattgctgggaaatggcattgatgggcatgtgttgatggtgatagtgaagaaagcaaagagagagcaaacaaagaagataggattggattcattggtaaagctaaagatgtaaagagaccaaaactcaatcacgggacttttatcctcaaaagaagagaaacgttacccctaccagaaaaagaaagaaggttggcaaaacacaaaaatcagagatttgtgatatgtttttattgagatagggttagttataaatcaatacattttgaatatgtttacgaaaatacttgtaagtttaccatcatacaaatatgctttctttctttggaggattctcttcttatttctttctttttaagtttatatggtagctttccattttcatattttattttattttcgttgtagatatctagtttttttaatttgttgtctctattttctatcacgttttttttctcaaatcttcttttatctttttttgcatgagttgtcgtgtatacactctcacgattatcgcaacattaatgaaacagggttgtgagattgttgtgtggtttcgttcgtagagatgattgtttggattccaaaatggttgaaacatgcttgtttggatttgttcaactggttgaaaagggctttgcttcgtttgattggctatggctacataaatatgattaatagtaagctcactgattgaccatctaacattttcttggcctcttttagctatggggaacaacatagtgttttcttactttaatagatgtgttaccattctacaagtttggaagaacgtgtgtttaaacattagtagaaacatgaaaatttaagaaaaatacccctagttgttaatagaaatgtattgttaatgccctactaatatttttttcccagtgaattctgttcaccagtcatcacaactttcgaagtgatgcttaacataaattatcgaaactttgtgaaaatgtttaaacgtcgtaaaaactttacaataatttaaaaacaactgaatgttcttcttagaggttaatgtatcagatggcaaaacgtcgccgttttacattcctctcatctgaaactgttacaagtctgttaatacggtgccgtttaattgtagttgttttttgtgtaaactataattacaagtctgttaatacgatgccgtttagttgtagttgttttgtgtgtaaactataatcgtatatcgatcgtcttcctcgcgagagtttcagtctcagccacaaagtaaagactccactgtcgtcttccgtagtgatg

SEQ ID NO: 24406 - DNA, 3000 bp, Unknown
  misc_feature (1)..( 3000): 2750-1469P.txt file - cDNA_ID_2176655; gDNA_ID_1971795; Annot_ID_175619
aatatatatcagtaagtcgctttcaggaggattatagcatcgccgtgaaatacaaggaaattctcaaagtttttccggcgagaaatgataaattaagggaagacccaattcggaaaattacaggaaacaagggctttacgagttgactggttcaaactaattgagagagtcacagagagagagagacgttacctgtaatcgaatcagcccaaggatctcttgtgaagttgatttttttaattcaccaattgtgacgtttatatacgtatccatttcacaaaaacaaaacaaaaaataagggaagtaaacttatagtaattaaaattttagtttgataattaaatttttgggggatcatataccataagaaaaaaattaaaataaaattttacaattacaatctatgcatatttttatcctaccaaaaaaatctatgcatatttttatacttaatttattaattttataaatatatattttttaaataaattaagatttcttgaagatatggaaaaacgaaattgaaatatacagtagaaatattattttatttcttacatgattttcaataatttatttatatttattattttcttgcaaaagataaattatcacattttcctttgtttttgttaaaattttatcttcccctgcataaaagatttgactaaatgctagatacagttcaatatattactattaagttatatactatcatccaacaagaaaagttgaacagcaactccacaaccaaataacccaagctatgaaccttaagaaatttagacatgaaaagttgataaacacttatatctttattttattgttaaacatataatgatataaatcaatacaatgtgttaacttctcattatatgttatttaacacattgtattgtcaccacatatctctgttttcttagttacgtttttttgagttaatgataacatcatagatgtaaatgttaagtagaaacagtgtgtgacagagcatgatacaaaaagtgttttatttcaatattttacttttcttaaagttcacatttttattctataacacacaatacatagatagaggcacaaagacttgcaagcacaaacgaaagaagagggagagataacaaagatataagagaagaaaaacacaccgaactacagaagaagaattttgttaatctcgaacccatttcggttctttgatcacgataagtggatttacgctttcatcaaagatgcagttagatttttgcctaaaaccgcgtaaaccgagctccatcctgcctgagtagggtgaagtacatcccagaagaaagtagacttaggatcatcgcataaggtatagttcttctgacctttctcgtccacaaccccacaaacacctcctcaacattctttcaacggagttttaaaccgcgtactccctacatttccataaccaatcacacaatatataaaagccttgaaaatatggatttcaagaatgttgtgttttactttttcttaactggagtctctccattgttcttgaaaacggtcaagaaggcgttgtagtaatcaatgaacatgaaagtcgaatccttggtctctttgttgagcgtggccagtagtgtcttcaacttgttgttgtgatagatcactagcccgtttacagctataatgcaatccttgactgtggagcctttggagatgaaggggatagttaaataatgttatttggaattttccatatacataatggaatcttcttagtttattatctactattttaagtgatctaaattctaaacacatttctatagtgggaagtatacgaaacgaattatttaagatatttaatggaaaaaagttttagaaacaagtaaaaaattggttttggtcagtacactcaagtgtagccgtaagctatgacgacgaaatgaaaacaactttaaattatttcccaagcctctttccgacagtatggggctctaaaagtatatcactaattcagtagtcgaatcgaatatgcctttgttctttcccttttaaatccataatttatttctaaaataataaaaaggagattgtcactggagaagccgcctcaaatgatgtccatatcgcatcataacatttaacgtcacacgataaaacaaaacatttcgtattttgttttgcaatctatttagtaattgcattattagtagtggcctatctcttttgaagttgaaagtctctagttgacttggtcgtatttgtatcattgtcacatataagtgaaaattaagatggacatttccgatattattagctaaattaaatcattctaattttttttaccagatattcaaaattccaactcatttagagtttcacgttggcatccaagtacttggattagctttcgactaaacaagaaattttacgtttttgcatagattataaaattagtttgaaaatttggttcaaaaatttcctgattaaaagaatataacgaagcattttataatgatgacaatgattcataatttttgtaagtgcttcagttgctacctaactcaaagtcgcaacttatattctaacagtttcatcattttaattttctaaaaaaaaaaaaaaatcaaagaccaaaaaattctaaattaaacctataatagtttcctttaaccaaaaaaaaaaaacctatactagtttcaaggctcgtagaggaagttagattacttaccatttaaaaatctacaatttaaatatataatttttttaaagtattttataaaataacattacaagatagatctttttttttttggtaaaaaataagatagattatatatagatagatcaataaacataaaaatagttttggcgcgttatagaaaggctctatgcatctaatcactatcctctctccgtcgcgtagttcaaggagttctcctttgattatccttaaatatctctcttctctcgttttcttctacctcctcctcccatttcttttcattgcccttgttacggaacatg

SEQ ID NO: 24407 - DNA, 3003 bp, Unknown
  misc_feature (1)..( 3003): 2750-1469P.txt file - cDNA_ID_2176666; gDNA_ID_1971795; Annot_ID_175623
gcgtctcctgtttcatcctataattctgggagacaaacaccgaagaatcttgagaggaagtattcacggattgctgataactaccgttccattgatgaggtttgatgatcactcttgtttttgtttgtttgtctcttaggtcgttgtgtcggtttgtgaatctctctattggtgttttgttgatatttcttttcttttaggttaccgctgctctttcacatgccggtttggagtcctcgaatctcattgttggtatagatgtcaccaagagcaacgagtggacaggttagagaatttatctcaatgttttagtatatgtttctttgacctggaagctgacttgggtgatttgatttaggggcgagatcatttggtaggaagagtctgcatttcattggaactactccaaacccttatcaacaagctatttccatcattggaaagactttatcggtttttgatgaggataatttgatcccctgttatggatttggagatggtacaaaccctgattgtttttatgtagctgttaagttcctgtctagaatagattttaaggttggtttctctttgactatgcagctacaactcatgatcaggatgtcttcagtttcaatcccaatgatacatattgtaacgggtttgaagaagttctcatgtgttacagagagattgttccccagcttcgtctctcaggttgagtgagatgaataatcccttttcttctgcatgtcttctgaatcttgctgtactttttccttatagtttgctgcttctcttacaggtccgacatcttttgcacctatcatcgaaagggccatgacaattgtggaagaaagtggtggccagtaccatgttcttctcattatcgctgatggacaggtaaagattggaacctaattcgactagagaaagtatttcttgtatctatttgtgtttagttataatcattcccagacatttgtgtactgtatagttaccattggagcttttaactatgacaggtgacaagaagtgttgatacagataacggtggattcagtccacaagagcagcagactattgatgccattgttagagcaaggtaataaatactatttcctttgacgaaaatccaatttcaaactgtgtctctctaacttgtggtggattctgttgcagtgaatatcctttgtctatagttcttgttggtgttggagatggtccctgggacaccatgagacagtttgatgacaacatccccgctcgtgcctttgacaatttccaggtaataatatcaacatgtttctacaatagtgtagatagatcccttgtctttttcctggcaaatgtatcaatttcaaaggtttttgttgtctatttgaatcctttcagtttgtgaatttcacggatataatgtcaaagaacattgatccagcaagaaaagaggcagaattcgcgctttctgccttgatggagatcccgtctcagtataaagccaccctcgaactaggcttacttgggtaagtaaattcagatatttgagttcatcactgcagcatttatgaattgatctcaataaccgccaatttcgttccttgtttcgaatttgcagacaaagaaccggacattgtccagacaggattgcgcttccaccaccaacttatgctactcaatctatgcgcaacagcccaagaacttcccgatcaaccagttttcaaaacaaaccatatgataatggtgtttcctctacaccaccttcaactactcataacgagagccaggtatgatttacaaagaaagaaacaacaatgcattgataatcttttgctgctcgtcacatctttttgttggataaacagcaacagttttgccccgtatgtctagtgagtgcaaagaacatggctttcaattgtggtcatcaggtgcatttccactcccgagttacctaagcatcgcacttgaatcaaaatcgttaactttcctttgtttttcttattttgctcatcagacttgcgctggatgtggggaagacctccatgtgtgtcccatttgccggagctcaatctcggttcgtatcaagctttattaagataagtctctcaagaactgaaggaacccgaggtggtctgagatctttcacagccaacaccatcccaacttagatctcatttaccagtgtcctaacatttgtttttactttgaggggaataaccggttcctctcaaaggttttgtagataatctgttgtcaattttgcattctcattgcacatgaaaaaaccacagcagactctctcgtgaataaaggatcctttctctgcggttacacatttttacttaaaagaatttgaatcttgaatggtcctatgacatatgtatcaaacaacacactactatatacctttcttgtttgaaacatctagtcttcaacacagtagcccagatggtcctgctttaacttccataattgacatcttatggggtcgtatctattctctgtcgttaaagattcataattgatgtaactgtcaacgaaagatggcaaaaacacaaaggctattataggtttctatcaaactgatcactttttactgtaagaatatatgcgatatacttttcttggtcttcttccctcagtaatgaacaagatcccaatctgagtctgctattctttcttactcttccacaagtttgtattagttttacgtatatgcggttaagcagtccgggcggtgatcctctccattcattcatttgcttacccagaataaatctagtgtgtgtctttcatcacgaaaagtattaccacagtgataagatgtgtagattttcaaatctgaaaaagagataaagctatgtttcaagtctttgaataagattccagtcatattgctcaacaatctttagtttcagggaccctactaatatttttatcacgcaaaccaaagagacaaagctgttttgtgtttagtaaatacatattcaaagtagagtctttttagaacaacaaccatttaccatg

SEQ ID NO: 24408 - DNA, 3000 bp, Unknown
  misc_feature (1)..( 3000): 2750-1469P.txt file - cDNA_ID_2176689; gDNA_ID_1971795; Annot_ID_175631
aggcatctagaaaacaaccaacttagtggttcactcccaccataccttgctcatctgcctaacctacaagaactgtacgtaatcacaactgatacctcaaatgcaattatccactacacatgacactttaaccaatgttattatctggcaggtctatagaaaataactcctttaaaggaaaaattccttcagcgctattaaaggggaaagttttgttcaagtgagtatgctaaaagtcgacttgtcaaacacaatagtgcacagctttttagcatttgcttggaaagagaaattacccttttatcacagcttttcaacatgactgttggaacgttttagtgtatcagcgtttagaattttcatcttttatggagtttcctcttttagtgctaatgcgcagctataacatgttttccccagatataataataatcctgagcttcagaacgaggcacagcgaaagcacttttggcagatactggggatatcaatagccgctgtcgcaattctgttgctactagttggaggaagtcttgttttactttgtgcccttcgtaagaccaaaagagctgataaaggtatatatgcattgtatgttgatcaaatagctgttacaggttttccccaagtgttctaactcatgtttcttcaggtgattccacagagactaagaaaaaaggtttagtagcttactcagcagtgcggggcggacacttattagatgaaggtgtagcatatttcatatcacttcctgtgctcgaagaggcaaccgataatttttccaagaaagttggaagaggaagttttgggtctgtctactatggtaggatgaaagatgggaaagaagttgcagttaagataactgcagatccttctagccacttgaacagacaatttgtgactgaggtattgtctaatttgcagccattaacttgctgcaaagtttcttaattagacgattgaattaaaccaaatgtgcaggttgctctattatcgagaattcaccacaggaacttggttcctttgattggatattgtgaagaagcagatcggcgtattttggtttacgaatatatgcataatggaagcttgggagatcacttgcatggtatttaccaatttcccttatattttcctgcctaagttacggatttcattctgtgaataactcatgaaatccatcctgttaggttcaagcgactacaagccactagactggctaactcggctacaaattgcacaagatgctgccaaaggtttgtagcacaatctcaagattaaatctttagtgtggctataatatgaatccattggacagacaaaacttcagattattacaggtcttgaatacttgcatactggctgcaatcctagtattattcatagggatgtgaaatcaagtaatattctcctggacattaacatgagagccaaagtatctgactttggactctcgagacagacagaggaagacttaactcatgtatccagtgtcgcaaaaggaactgttggataccttgatccagagtaagtctaacaacacaacctcacaaaagtatccctttttatgaactttgactgatagatgcattcttttgacaggtattatgctagtcagcagctgactgagaagagcgatgtctacagttttggcgttgttctttttgaattactctctggaaagaagccagtctcagcagaagattttggtcctgaactgaatatagttcactgggtaaacacctctaatcttctgtccattttcacctttgaccgtttaaagtactacatgaacaacatcaagattcacaaaccacatatcctctctatgcttttcttgttcaccaacaggcaagatcgctgatccgtaaaggagacgtgtgcgggatcatagatccatgtatagcaagcaacgtgaagatcgagtcagtctggagagttgcagaggtcgcaaaccaatgtgttgagcagcgtggacataacaggccaaggatgcaggaagtaatagtggcaatacaagacgcgatcaggatcgagagaggaaacgaaaatggactgaagtcatcgagttcaagcagctcaaaggcacaatcatctcgtaaaaccttgcttactagcttcctcgagctagagagccctgacatctcaagaaacagcctagctccagctgctaggtgagtcctcttaaagctcgagctctcatgtttaccctttggacttaccatcgtcacatagatgaatacattatatacgtattaaaatgtgtgtatgtgatgtagtgtcaaatttaatctgtatctctttacacacttctgacatgacattgtgtagatgttttagttgatgatagcacaaaaccataatttaattattgaaggtaacaacataatatgctatctatctcctatgctgatgaagacgacaaatttccaaaaacaattcttgcatgtcttgtgtcagggagtagccaattgtcaaaagactcgaaacaaaatgatacaaatgcaccactcataatttcacgatcaaccatttgtcacaaaacctcaagaaatctaaaattgtgtctaaaacaatgtcacactgtttcctatgttttgtttaccacttggtttcctcctctattccgcttttaccatatgaaaccttgttttgtattgcacaattcaccatgaaagcctaaatttaccatttttggcaagtaaaataatctgtcaacatcagaaggtgccaacttcaatactcaaacatcacatgaaaccaaattttaaggaagaagccaacacaaagacaataaaattaatcaaaaataaacaaaggagagagacagaagaaacagagagagtagttaattccggtggttttctgctcatctacttctatccaccttcgtcccttccgccccaaaattcaattctctcttcctttctctctctttctccttaaaaactctaactttactcatctcatctccaaagtctcaacctttcttctctaatg

SEQ ID NO: 24409 - DNA, 3000 bp, Unknown
  misc_feature (1)..( 3000): 2750-1469P.txt file - cDNA_ID_2176693; gDNA_ID_1971795; Annot_ID_175632
ataaatattttttattttttttatcataggtctaaattcatatacaaatttagcatatatatttaaaggtgtgtatatctaaattcttgcaatcaaatttgttttgtttttcgatctaagtggtttgaagacaactctcagtgttctctgattctttctcaaacaaagtttaaccaagaagactatataaaaatttgaagtcgttttcaacttaaaaaatggattggctaaaaggtgaaacttttgagaagtaggggagagaatgaactttatacattcaaacaagcatagaaatttcaaaatgatcctcaaaattattaatattataataagtattaggaaaagtaactaaatggaaaatgcccactaacaaagtactttatcccacaaggagaaattaacaaatattttacgaaaagaaaaagatgtatatgtatgattggtgtccaacaaattagaaggatcaagattaacttcgtccttcttatctttttggcggacactttcgccttcttcttattcttaatttgataaaattatgtctcttaaaatatttaagtttctacaaacacctttaaatatacaatataataaagtagaatgtctatataaaatctcctcctacgatacttcatgttatttgattttcaccattttattctgtcttcaacttctatttttaatgctttattaatagattggtatagatacctgatattgatgtataactcattttactatatatataatactactagacaaaatatctagaaagctcaaatggtgcaaaaattatatatgaaaaagtcttattttgtataaatggtgtactgcatgttttctttctttttatctctttatgaaacttgtttcttacaagaaatatgtagcaagcaatatacgaaactttgatcgatattgtttactttgaggttgataatagaacttaaataaaaaatttagaattataatactttccactccgaaactcatatgtaaatatgttggtaaattcaatatagaagtgtgaaaatgcgtaatatagtgatattgttttataaaaatacttaaaattctctcttaatttccaaaaccattaaaataaaataaaaacataccattatcactcaaatttcatatcaaaggtttttttaaaatcaaaattagtaataaatactaaaagttttaaataatattggaatagatttcgtctgtcaagtccacgagagatctctaaatacttgatcttgaatactaattcatcttagaggccctagaattagtaaaagcaggagtggctaacgcatcagtcatctatcaagatactggtgagcaatgagacttgttatgcacccctctcggcatggtacaaaacacataattatttgattcatctaacatgttcgttcttgtagtgatattatagacgctagtgtgcttatccatcccgtgtatgaaaccggtaaatatatgactacgaataaaacattatacactttatacaaaatctatcataatcggatccccaatcttaggagaatattaatactccatactcataaaactcacctaaacacataaaaatttgttgggtgtctttcataactttctcttgacttaagtgtcggagattaattaaacgacaaaggattgtcctttacgtggtacatgtttatctcttgttcagtgtatcgtccacattcacgagaagcaaacacaatgcagatgtcgaaaatttggcaggaagaactatctttttatattaaacttgtaggagcttttccaaaacataatgtttgtggttttttttgaatatatatattctaaaagtcgatcacaaagttttaaaactaaaacattatttttttgattggtgatatatataattttgtgtccgacaccttaatagtatttagtaatataatggttgtgcgccatatataaattgacaaatgacaccaatattttaattcttacacacaatctatacacataaatctcattcgatccttaccttttccgtagcttttcatttaacaataatattcatattttggattaaaccttcactttactctctttgttaactttaaggaagatgctgaatgttgcaattgtgcaatttgtcaataacatatgctgaacttattgtctttgtatatcacataaaaaacaaactgaaatactatgtgttaaaaagaatattaaacaatttataaaccatttttcttgcataatctatcttttaaccctatattaataaaaacaaaaacaaaactacatacacttttttggtcgaatcaaaactatatactgtacattgtttcatataacattattttagaaaagaaaaaactcttcgaaataagtaactcatgcagataacagtccccaattgggaatggatttgtattttctcaatttaaagattaagttcattttcatacttatactgtatatggagaaaatatgatagagtagattattgaaaatgggcctattagttatgtagtatagacctaatgctataacctgctaataattaggccttattacacttccgttttagaaatgcggcccaatgggttttaaagagggaaacaaaaaaacaaacacacatacctgtaggctgtagtgttgtagtacagcttgaattaaagctttcgagaaattgtgtgcgacaccaactttttccaaaagcaagtagccaaagcataaaaggtgaaactgatagctttaaattttcaggaatgaagaaaaagaaaaagctaattcgaatctcaaataaagaaagacaaattctatgtgaccattgcaaagaactcgactttttttagtaaaagcaattaacaaagttggagtctttgttcacttcactgtctctcatcacacgctttccttctttatctcgtgaccactttcaaagccgaaaagaacttggtatttttgcattgaattatagagatttaagagccatcgatgtgtgtgtgatcttcaatg

SEQ ID NO: 24410 - DNA, 3000 bp, Unknown
  misc_feature (1)..( 3000): 2750-1469P.txt file - cDNA_ID_2176703; gDNA_ID_1971795; Annot_ID_175635
ttgtgaaagaacctttaagtgattaatctaacattcttcatgactcctttgtactgacgcccttcttatgccaggtgatcaggttcctggaggacatttcttccagtttaactgacttggctattagagagttttccattttggaagacttgaaggtaatcgaatgttggtattatataattacaggttatgcctttctcactacttaacttgctgagttttaatatcagaggaaagaagaaggggagattccatttggcgtagaagatcttttatactacataaagagggtagaggagttgcagtttgatcttgattttggagatatccggcaatattttcctgtcaacttggtcctttccgggatctttaaaatatgtcaggacctttttggtgagtttacgtctgtactctaaaatcttttgggggtattaataaatttttgctttgcttctgtggcttgagaatatttactatccatttatttgatcctcgtcatagcttgctggccaacttaatgatttcgccatgcaggaataaaatttgaggaggttacagaagttgatgtctggtatcatgatattcgagcttttgccgtctttgactcaggatctggaaagcttttgggatatttctatcttgacatgtttacaaggtccattagcaaccttacttcattctcctctttacttttagagcctccatttcattttgagttgtgataataattttgtttgacagggaaggaaaatgtaatcacagctgtgtggtggctcttcagaataacgcactgttctccaatggtgcatgtcaggtgacaatcctacatccatgtcggacctttatgtggaagtatcatgcaactcaaatataaatcgatattgtgatctcatgtggatgtattttaaggttttagtattcgtattttggcatttattttgtttctgtctccagattcctgtggcgttgcttattgcacagtttgcaaaggatggtagtggtgaagctgtgccattgggattttctgacgtggttaatctttttcatgagtttggccatgtggtacgtgaatgaaattggttacgtggaacagcagaataaattctgttggtatcttttgtatgtatcaggggatgttattagctgatattccttgctactattggtaaataggtccaacatatctgcaatcgtgcttcatttgctagattctcgggcctacgtgttgaccccgactttcgggagattccttctcagttattggaaaactggcaagtaaactgataattttttcttaaaatctttctgtattaacactaaatcctaatagacggaatataattcttgtatctctaggtgttacgaaagtttcacgttgaagttaatatcaggttatcgtcaggtgagcgcttctcacgactaaattgttgacaattgttcttgtcgtagactagtcataataatttgttttaacctgggatttattcctgcaggatatcaccaagccacttgtggatgaagtctgcaaaacactcaaacgttggcgatattctttctctgcactaaagtcgcttcaggagatattatactgtgagatattaattgacttttaatgatgcttatataccttttcattttgacttcattgtagtttttaaactgaaatatcaattcctcacaatcgttaggacaaatggtttgttagtaagacgagtagattgtggttcttattatgctttagaggaagcagtagttaactaagaagtctactagcgggtaaaatgtggtattgcctaatgatgcttgaaatatggatgatcaggtctatttgatcaaataatatattcggacgatgatgctgacttactccagctaatcaggagtcttcatccaaaggtaaaagcataaactctcaaagcaatctggtctgtttacggcaaagaaattttctcatactagtgtctttctatatataggtaatgatagggctaccagtggtggaaggaaccaaccctgcttcatgtttcccacgtgctgtaattggctctgaagcaacatgttacagtcgtttatggagtgaggtatgattgatttgcactgtggtgatccgtaccttccatgactttagtctgagaatccacctatttccacaggtgtatgctgctgatatatttgcttcaaaatttggagatgggcatccgaatctatatgccggcttgcagttcagagacaaagtgagaagcgtatttgtttgtctttcctttgatttagtagtgtgtgagtgtaaaaggactaaacaagtaacaactactttcttattaggtgttggccccaggaggaggcaaagaaccaatggaacttctcaccaattttcttggaagggaaccatcaacacaagctttcatcgctagccggacaaactatagtttgtagtattttgcacctaacattaggttccagtgaatctggtagctggtgaaaataaacatttctttggttgttagagacatcgtttattgatgtttgttaatgtgttgagaggacctagcggtttaggtggaaactgtaatcattcattcttagtttcttacctttctctgcatcgcaatctcaaattacgaagagttatataacatagtgatcatcattgagcatgtacggtgttgaagataaggacttgtctcgatcaatttacaagacagattctaatattatggttttcttctcttattaagacaagaatagtattgtctttttggtttactttggaaataggattgtaacaggccttaaaggtaagtagtttcagacatacgtaaaagaaaagagtttcagattaccttatgaagtacggttctggttcggtttaaactggtttgaacacgtggcaggtacaagtagataaggtacgaatccacgaaatcatcatcttccccaaaccaaataatctctcgtttctaaacaaactagtggtgagtgaatcttctctggtgagtaatg

SEQ ID NO: 24411 - DNA, 3000 bp, Unknown
  misc_feature (1)..( 3000): 2750-1469P.txt file - cDNA_ID_2176716; gDNA_ID_1971795; Annot_ID_175639
cagaagcggcaatttgtgccctggccaagagaaccaacttagacttttccgggaagttttcggcacactgtcccagaagttcttcagctttagcagccttgttttctctcaccaaaacagcagcttgaagcaatgtaggaataacactctcaggaaacataccgggcagtgtagcacaaagctctcgtgcctgaggtaaaaagatttttttaactttaagcagagtatgcaaagaagaaacgaaagaggaataagctagatttcaagtttaaaggacctgatccatcttatttgcatggagaagtagaaggacgcgattggcatatatagcttccttatgtttatgtgaaagcttagcatcaagttcttgagaaagctgaaaattttgtgagtctttgtctttcagcagatcaaacttcctcaagccatcagaaatatctttggaacctttcaaggcaacaaggttgttcacagcaagagcaagtgattcatcagccagatttcgtttaatgatatctacataagagctctttgattcttgagtttgtccaaggaccttgacaaagaaaaaaactgttattaggaactggaagatatcttaacaagatgtaaaagaaaagataagcagtataaaaaagtacctgttggacatatgctaattgaacagaaattggggctagctgagtctcgatataatcatcagaatagtcgccctcagtgagggtttcctgaccaattctgtctcaaagtaacagtacattttttatcagctatgagtaatcagtagtcaaatgatcaatgtacttgaagtgttgataaagatacagaaaaaggaaataatctagattgatgtggttatataagtgtcagtgtaaacaactattttaccgaatcactgatcctaagctagacgaataattgcatcaaagctagacgagtatcgaaaggtatctcttgagaaatactagtaggaacaatggcctaggagacatatacaatggctaaaacttctcagaaaaagagagattatatacctcatggcagtgagcaaaagttgttcagcatcaacatagttactgttttcgatcaaagagcaagcagtattataagccaattgataagtagtcgtaggtctgatcttcaaactctccaatacttgagaagcttttccggctctaatcaacgccgcgactaaattgacctctatcaatttaatcccggacttgttcagtttctgatacacatccacacaagcatctactttccccaaacagttcaaaatctgagcctctaaaagcaaagtctttgactctctctcgagaccttttaaacacaccaaagcctcatctaacttgttttcacggtataaacaatacgcctatcaagagaaacatccattagaccccaaaaaactttcaaatcttagcaaaattactataccttgtgaaaacctagatcgattggaaacgagttaatgacggagagagcaccattgatcttaacgtctttgattagataatcatcgaacttatcgtcttttatcagagccacaactttgcatcggatcgcatcctcatcggtaggtacaatcgacaaaactgtaaacgaaatcacggattcaaattttcaccaaaccaaaatcaacgagtaagaaggaaggtgagaattgtggaaaccttgatcagcgaccttgacggcttcttcatatttagtatccttgatatgtttgtggagggaagtgaagagatcttcgattgctggagtcgaggttttggggttttctttcgatttgggagccatggctgcttcaaggtttctcagggcacgaaacaacagagaagaaaactggcagatttttgactctttaaaaatcaacagattgatgtttatatactacctgacttcaatcaaggtctgtgaagatgttcctaaaataacttatgggctttttatatgggccttttctgctcatgattcaataatctttttacttgaaagtataaaaagagattaaaaaactatttgaaacccattaagactcaatgcatctaaatttaaaacttttatttattaaaatttaatatatatggagttctctcacatctacaaaatatttattaaaaatattttagaaattttcctttcaaatttagctatatttattattacttatagtaaaatgaaaataagttttgaatacataacaaaaagctaagtataataaataaaatattaacaacgatatatacgtttatttttcctttcaaaactttgttaagttttgtgatcaatatcattgttttcaagaggagttaggaaaggtggataaaagtgatatagagaccctttattgttacagctcatttctttttctcctaatatcttaatttgttttatatctttttatattattgatcattttaaatgttaactatgtattatattctcgttgttattagaactgtactatatattcttgataattattatgtaccatacttctccatccggaacctatatctcaatgtttttgagtttcaaagtaagacattttaattcatctaagaatatgttaaaatccttaaaaatgtaagaatgtttcattgttttgtttgttccaccatcgcgatcttacacttgctagccacgttcgtgataacacttttcaccggtgtatatttctttccttaccgttgtaacaatctttgaattggagtgtatatctttgaaccggagagctcatttggaaaatattactatgagtcttttgtaatgaaattaaactcaaatattaagaaaataaaaatgaaattaaagtcccataagagattgtgattgggcttcatgggccttaaaactttatgaccacattgatggaaaaactaaaacgacaacgaatggattcatcttttaaaaccggcctagaaagaagaacaaatatcttgtagaaacagaaacttgtctggtcttttcgaatgtgatttttggttgatgatgatg

SEQ ID NO: 24412 - DNA, 3003 bp, Unknown
  misc_feature (1)..( 3003): 2750-1469P.txt file - cDNA_ID_2176720; gDNA_ID_1971795; Annot_ID_175640
cctcttcttgttcattgtcctttgtttgagtttattagttatcagtttttctcatgttttttggtaaccaactcctctatttctgcattcctctctgtttttggtcatctgcttagttggcacaaagaatcaacctattgtctttcaactgtcttcacctatttttgcaatgaaaatcatttcacatccaattaatttacagacgatagaaaaccactaaactccaaagagtgaaatctgattaaagagtgttacatcatttaaccagtttcataagtacaacaatgcgtgatctaataagatgaatcatcattctcctatttcatctaaaagaactcgacatgatcagcaatttctctgcatactagttttgattccgcagccaaatttaggcttttagctatggcaagcttggttcgtttatgcgtagatgttggctcatactttttcacctcctcatcctctttccctaacaacaaagcctcccttgcaggaatcacactctcccaccagaactcccttaatacatcatgtatgattctccaatagcttcggtctctcatcacacggaaaaccgtgcttccatttcgtgtccagcagtataagttgacccattcccggtccattatctccatttgaccctgcagctgaggcatgtaatagtagggcacttttttccagggtaatacagtttcggttttccctttgttatatggacatttcacttctagaataccaaagcaatcgaggattccatccggtgaagcgccaagccagtgaaattcctcattggagtgaatagcaaatcccattgttccaacctcacaacccattattcttttgtacctttctatcgcagatgattccatttgtacaccccagttcatagcaaaccgtgcagactcctcaacaactcgtgcatctgaatcataaaccttttcatgccagagctcggcacgccggtttcctttccaaaaccccagcgctgtactgaatgtacttgtggttaacttgtctttccttaaagcaaaccattcttcagatttctgagggatatcagatggggagagaaggcttgacacaattactgatgaacggggatgagcaaatggtgaaatggtttgagtgatgagtgataaagcagtagaagaaaacctctttctcgaagaaactgaaccgcttgacttcggaagatgagtatggaacccagagattgagcaagtcctcatagctgaaagaatcatactgttgagagcaactttattcggcttcaagactctacatacacagactgttacaaaggttagaggaatcatattggaaacaaacataaactcaagtttaataaacccattccactacttcaaatctacaatcagagctactctaataaacactagaaccccagaactaccctggaatctttttcaaaacataagatgaaaaaaacaatctttgaacttcaaaaacatcaacaggattcagaaacaagacaacacaaaaaaaaaaaaaaaaaatccgatgaaatcaactaaacccatatacaggacaagaagcgaacttattatccatgttatgtgatttgcgtttcaattttgtctatacaaccaatgagttcaaaagcactggttcctccttaagaatcaatttacccacaaagcgaaaattaaaaaatctcaagcacacaaggtgttcgatgatattaccagaaccacgcttcaagtagagaactccaccattccgggccgaggaagcggaaatagaagaaatggattcagtggaagatacttgaactagcctcatcatcatcaaccaaaaatcacattcgaaaagaccagacaagtttctgtttctacaagatatttgttcttctttctaggccggttttaaaagatgaatccattcgttgtcgttttagtttttccatcaatgtggtcataaagttttaaggcccatgaagcccaatcacaatctcttatgggactttaatttcatttttattttcttaatatttgagtttaatttcattacaaaagactcatagtaatattttccaaatgagctctccggttcaaagatatacactccaattcaaagattgttacaacggtaaggaaagaaatatacaccggtgaaaagtgttatcacgaacgtggctagcaagtgtaagatcgcgatggtggaacaaacaaaacaatgaaacattcttacatttttaaggattttaacatattcttagatgaattaaaatgtcttactttgaaactcaaaaacattgagatataggttccggatggagaagtatggtacataataattatcaagaatatatagtacagttctaataacaacgagaatataatacatagttaacatttaaaatgatcaataatataaaaagatataaaacaaattaagatattaggagaaaaagaaatgagctgtaacaataaagggtctctatatcacttttatccacctttcctaactcctcttgaaaacaatgatattgatcacaaaacttaacaaagttttgaaaggaaaaataaacgtatatatcgttgttaatattttatttattatacttagctttttgttatgtattcaaaacttattttcattttactataagtaataataaatatagctaaatttgaaaggaaaatttctaaaatatttttaataaatattttgtagatgtgagagaactccatatatattaaattttaataaataaaagttttaaatttagatgcattgagtcttaatgggtttcaaatagttttttaatctctttttatactttcaagtaaaaagattattgaatcatgagcagaaaaggcccatataaaaagcccataagttattttaggaacatcttcacagaccttgattgaagtcaggtagtatataaacatcaatctgttgatttttaaagagtcaaaaatctgccagttttcttctctgttgtttcgtgccctgagaaaccttgaagcagccatg

SEQ ID NO: 24413 - DNA, 3003 bp, Unknown
  misc_feature (1)..( 3003): 2750-1469P.txt file - cDNA_ID_2176741; gDNA_ID_1971795; Annot_ID_175647
tattggccactgaacaaatggcgaaatgaaagtatatatgagacacatgaccagttgtgtttcgaaaatgaaattgtcaaaacaacattggattgatggaaacaaagggttcgaaaaataaagtggtcttcaagagaagaattcgtagtttttggctgagataataatggttctgaggccaccaatgggagctaggatcgtcaatataacaccaactactatgcaaaactgcaattacagaaccaaacaacttgttattgtcaaatatatagggtagaaataaaaacacatatttagtagaagaagatgatgagtaaaagaaaatatacccaattaatacaccaagacaatccatacttctttggtttcttgatacaaagccacatgatgcatggtagctaaacatagtacaatacaaaaggtagatcaagttgagttactagaattttcaaacaaatgaataggcttaattagtgtattgaattacttacatagtaagttgttggggcaaaggcgaatcctccgaaaaacccgagcaatccaccaaaaaatgggatgcatatggcaacgaacatcgtgaaagctgttccattgatccaatgttataaattcatatgttactatctaggagaattgatttaatatgaataagaacttaccaacatatagagtacgagtgatgaagcggagtttgaaggaaggagcgaacatcatcttctttaccaaaaaggtttcgagcatgtcaaagaccggcattgcgtatatttggtagcttccaatgacatggacaaccacgaatgcgttagcaatggcgataagccagatgggtttctccaacgtcatgagaatattgtcgtccacactgtttccaaagatatagtagcaaacaaatgcaacgggaaagtagcatatggcaacaacgatgtatgcaactactactcctttccacattgcaatctttgatggtttctcaggtgttgaaggaatagtagcttgtatctccaacacaacgttgtgacctgcatacgcaaatgccacatctcctagtgcattcaagaagttgaatacatttcctgaggttgtagatgctctagacgagtagtctacatttggatgaactcctttcttcaccgaggttgcccaagcgattgtcgagtagctgcatatattacaatcacattaataaatctcaaatagaccattttttaaaaaaagaacaacaggctatattgattttgagttgtacttacctcaaagacataacggcagcagcaagggagacgatagatatggagttaaaattagggagatgagcaagaacaaagtgtatggaagcgaagatcatgatccaatatgtagttcttatatttttgcaatcggtgcaaagaaggtcatgaatttttttcaatgacttccctcccgtaaccatgtacacaatatccacacctacttcaacgattagttgttgtggcaccacgatccatagtccgagcttctccccaaacgcgtgttggcctaattcgtggtacctgtcgaacctcttccctggaaccatctcgtgcatttgcaccatctgccatagtgtgtagaatgttatcagccatgacattatcattattgtcactccaggtcccctgccatcaaaattgagtgtaatattaatattgaacgtgtatatagagattttctaatgagatatttatatatgtagctagattggatatataccatccaagattagacatggcgtaaggtaagctgagtacaccagccccgaccatggcggtgacattgtgaaacgcagagtaccaccacttggcatttctagaggatgttatcggtaaccaatcgtctacattcttctgctttgtggacgcgtccttggttggagacgattgacttttctccatcttattttggctttgaagaacagaaaaaaatgtgggacacaattagatgatgagaaccaaaaggattcaagagcaaggcaatttctttcctgaggattgaaatgtgccttgtgacaatgattattgcaaagagttctcaatttatatatacaatttcatttcactatttttttttccttttatatttttagtgaatttcaaaaaaaggaatttattggttgttgctttatgacagattagtttcacgctctgtttcacaagatagccatgatcgttgttggaattgttgcggtgtatgatctctaattacttataccacatggcttttttgatatttttggctgatgattatggtataagtcattagtcaatgctcttttgcctaacgtgaaaagtgttttgcatgctattaatgaccaaaatagtcatttcttgattttattttgattcatctattgatctgtttctagtataactgactacccgttatatcaaaagttaatttaggggagaatatagttactgcaggtttacaacccacaccttcctcttttaatgagaaaaaaaaacaaatcttaaaccaaattacttttctttatttatatttttgtataatattttatcttattttaaattgattttaataaccttaagtgttattttaccattttacaaaatgtgagggtttaaaaacccacaaattgagtgtctttttcatgtttttagaaaaagtttggatcttttaacccatttttcccaactttccataatcatctaaagttttatgtataaatcttatcaaatcatttagaatttattttgtaatcatatataaatcacctagatatccttaaatcttaataaaatccctccaaatgtttagtttcaacacaccccttaatagttgactaatcacctaaaagacagatcatggtaaattagcagttttttttttgtaaagtagcttgcaatcattgtaaagtagttttaattttcatgttcaatataaaatcttcgataggaagacatctttgatctccgaaaaaaccctaagcagtaccctcaaacgcaagaaccttagctcttgataatg

SEQ ID NO: 24414 - DNA, 3003 bp, Unknown; identical to SEQ ID NO: 21567
  misc_feature (1)..( 3003): 2750-1469P.txt file - cDNA_ID_2176776; gDNA_ID_2926143; Annot_ID_197566

SEQ ID NO: 24415 - DNA, 3003 bp, Unknown; identical to SEQ ID NO: 21567
  misc_feature (1)..( 3003): 2750-1469P.txt file - cDNA_ID_2176776; gDNA_ID_1971781; Annot_ID_175411

SEQ ID NO: 24416 - DNA, 3003 bp, Unknown; identical to SEQ ID NO: 21567
  misc_feature (1)..( 3003): 2750-1469P.txt file - cDNA_ID_2176776; gDNA_ID_1971793; Annot_ID_175594

SEQ ID NO: 24417 - DNA, 3003 bp, Unknown
  misc_feature (1)..( 3003): 2750-1469P.txt file - cDNA_ID_2176796; gDNA_ID_2926143; Annot_ID_197574
attctccaaatcttaaagttaatatgatgagatataaaatacattatgattctagagtggaattaaaaatgagatggatgaacttgaagtttcatcatttcgaggaggagaagtaatgaatctcacatggataataagtgacatatccagaagattatgttcaatctttgactactaaagatctaaaagttgtataaagcaattcttatacgaatgtgttattagataaaataagttataattagttatttctgaaacttcaagacttgaagtctctttgtgaatataactcacattgttaagagaatatctatgatgcagagatggtaaaacagacgcttaaacttttacgcaagtattgttgtcctgtagacacaatattttgaaagaaattttgagaactattataaacttaaatcgagtgtttttcaaaggctaagaaaacatatgagttatcgatgataagtaatactcagattctgaagtgaatataagatcttacatagttagtcaaatttaatatcgtttatagtagaatataaaattttaattattatctcgttattgttttattaacatatgattgattattaaaatacatggaagtaattttgattataagatctcattaagggagtaactgataaacaatgaaaagtaaattagaagttttgaaagaactagaagtttcaaaagaattaaaagtttcaagagtatatttggcttaaccggattggtcatcctggtttaatgatgatgtgaaagtattgagaattatgtggccattaggtgaaaaaccagaagattctccctaatgatttatcaaatgttacttgctcagaaagcaatatgataatgtgatttttaccagtgtaagtaatttggactttatctattcgtaagtatatacaaggagatgattatgggttgatcacccactatatgacatttagatacctaatggttataaaagatgcatcgattcaatggacgcattgactcgattgttgcatcgacaagaaggtcatatttatccttgttataaactcgcaacatagagtttgcgagattactttcttgattaaagtacaagagtatttcagtgtttatttataataaccactattggatatccgttgggataagtgtttaacattttgaaattcatgttcatacacaaaatggtttagtaacatcgatacgcatcaagccaatgaataattaatagttttccccgttattattggttttgggtcagaaaccaaatagttttcatctaaaagctttgaatgtgaaaagtgctccaccacagcacgcagagatgaaccctcagaggaggataagaatacatgttggatatgaatgataactaagccatcctagaaggatttatataccgctcgttttgaagactatcatattatatagtcagctattccaacataagggggagaatgtatacagctggtgaaaaagataaatagaaatgaattatcaatgatcctcggagtaaagaatgtatattaagagtccaaaagataattcaattacagaatttagcgttgtaattgccagacgcatttgctgacccaaataaagtgatgaagtcacttataccagttgtaaattaaatgctccagaatataatgaatgttctgtaaggaccaatttcaaactgctattgagtcttaagatcgcatgaagcgtaatagaccttggttccaaatataaatatcctcgtaaaagtgaaggagcacaaaattaaaaatgaccaaaattgaggaaataaatattttgatgatctcttgaagagagtgaatgatctctaaaagagacataaacatgacaaatgaaacattcaagtacttgacaatgaagagatctagctagctatgtcatgtcaaaatataatggaatcaaaagcaaatcgacgtcgtaatatatttgcatgctatgagcagttgatattatagacaaaaaggaggatcatgaaagaaagtctattgaaaagtgtacacaaagtaatgattagccaaaaatggaaaagaagaaatagacatataattataatctctagtagagatatttggactagtagtctatgcacatgatgtgtaaaaccagtggaaacaaatgagtctttatgtgaaagaatagtgaaattaatgagattttcacaaagataagaaatgttatgaagagatatattctcttgtggtggatgtaatatttttttaagtatctaaagtctggcaataagagacggaacactggatatgacatttatatgaaattcttgaaagatataatctctgaaggattaattatatgagaattatgttctctagaactctactcgatcgaataaaaagaaatatgtaacatgacatataatcatataaatgtatatttacgttgagtttgtcaaaatatattgatcaaactaatatttgttttgaaaatcattaaaactcctacagagttatcataagtaatacgatgacaataatctatgataaaatatcactagataatgatatttataagtctatatgaaaaccatataattttgatcattaagattatggttattaattccaacgagatattgtatttgattgaaaatcatctcctgaagaagatgtttccgagggggagattgaatgatatgcgtggatgtaccctttttccttatcatagtttttatcccacatgatttttctatgacaaggtttttaacgagacattaaagaacacgcaaataatacacttgatgaatattaagaaattctatcaatcatccaaatgaatattatacactaatgatatttagagaaataaataagatggtcaagatgaatcatctaaaagattcatgagcagaagaatgacgttgtactttatccagaaatttgttcaagagaagatttggcagacttattctcaaatactgtttattctctgccacatcttctaatcatgcagagattttactaattcatg

SEQ ID NO: 24418 - DNA, 3003 bp, Unknown; identical to SEQ ID NO: 24417
  misc_feature (1)..( 3003): 2750-1469P.txt file - cDNA_ID_2176796; gDNA_ID_1971781; Annot_ID_175419

SEQ ID NO: 24419 - DNA, 3003 bp, Unknown; identical to SEQ ID NO: 24417
  misc_feature (1)..( 3003): 2750-1469P.txt file - cDNA_ID_2176796; gDNA_ID_1971793; Annot_ID_175603

SEQ ID NO: 24420 - DNA, 3000 bp, Unknown; identical to SEQ ID NO: 8465
  misc_feature (1)..( 3000): 2750-1469P.txt file - cDNA_ID_2176859; gDNA_ID_1971811; Annot_ID_58110

SEQ ID NO: 24421 - DNA, 3000 bp, Unknown; identical to SEQ ID NO: 8465
  misc_feature (1)..( 3000): 2750-1469P.txt file - cDNA_ID_2176859; gDNA_ID_1971811; Annot_ID_175753

SEQ ID NO: 24422 - DNA, 3000 bp, Unknown; identical to SEQ ID NO: 8465
  misc_feature (1)..( 3000): 2750-1469P.txt file - cDNA_ID_2176859; gDNA_ID_2926175; Annot_ID_140283

SEQ ID NO: 24423 - DNA, 3000 bp, Unknown; identical to SEQ ID NO: 8465
  misc_feature (1)..( 3000): 2750-1469P.txt file - cDNA_ID_2176859; gDNA_ID_2926175; Annot_ID_199778

SEQ ID NO: 24424 - DNA, 3000 bp, Unknown; identical to SEQ ID NO: 8463
  misc_feature (1)..( 3000): 2750-1469P.txt file - cDNA_ID_2176867; gDNA_ID_1971811; Annot_ID_175758

SEQ ID NO: 24425 - DNA, 3000 bp, Unknown; identical to SEQ ID NO: 8463
  misc_feature (1)..( 3000): 2750-1469P.txt file - cDNA_ID_2176867; gDNA_ID_2926175; Annot_ID_199783

SEQ ID NO: 24426 - DNA, 3003 bp, Unknown; identical to SEQ ID NO: 18829
  misc_feature (1)..( 3003): 2750-1469P.txt file - cDNA_ID_2176910; gDNA_ID_1971812; Annot_ID_175780

SEQ ID NO: 24427 - DNA, 3003 bp, Unknown; identical to SEQ ID NO: 18829
  misc_feature (1)..( 3003): 2750-1469P.txt file - cDNA_ID_2176910; gDNA_ID_2926171; Annot_ID_199524

SEQ ID NO: 24428 - DNA, 3003 bp, Unknown
  misc_feature (1)..( 3003): 2750-1469P.txt file - cDNA_ID_2176921; gDNA_ID_1971812; Annot_ID_175784
gcttcaaaatcactccggtactcatttttcttaccatcttttgtttgtattcaaatatcaaatgtttttttttgttgctaaaataattgaataatgcatcgacctaaacgaatagataaagaatcactagactaacacacacctgtggttcttgtcattggatctcatgtgagtgttactatacttttctatcaaaggcttaccctaaattgtgaatcctgtaaaaccacatgaaattttatgtctatcacaaaagaatacatacaccaagattcaagaatatgaaaacacacatataatatagacatttttaagagggtcccaaaaacaggctcttgatctggaaactgtattaatttgtatccaattataacctcatgggccacttttccctggctatgcacattatcataggttatacgattaagttcgtgatggaaaatatgatttattaaagttttcttcccgagtttgcaacgattttcctttcttcaaaatctaaaatttattcgattaacaaaaaaaacaattatcgacaagcaattcaaaggaaaaattgtgaaaaaacaaaagaataaggagagaatatgtcctccttctgtttttttttactaagagagaatatatctttaataggggatgcttcttgctcgaagccatcattgagaagaccttcatacttgcgggagtctatgatagatatctcaagagttaactttagatacttttatgcgatttcattttatttttaatgacttactataataattattattttttcatctaaataattcaattcacgaaatcatcttaattattatttatataaatacatggacaaatagaagtggaagaacaatgtttagaaaacaaatcgaaaaagatcgccgacctttattgatcgaggaagagaattctggtgggattttagagggaggtaagagcataggtgctagagagtgttcggagctcggaaaatgattaaaattggttttgattacacttaattagtttaatcttctagtaacacacaaatatgctaaaataaacacataatacattcatgcaaacacaaaacttggcttaatattggccaataatttgagtggcacaatcacaatcaagccaaaagcagcactgatttctctttttttttttctttctaattagtcttaattcggtccaaaaccaaacaaaaatatctttaaattatattggaacctgacgaaaacaaatcttaaattcccacaaaatgctatatatatagtatctaagtttgaatgccaattccatatttttacggaatttataaaagtacgcagaatctatttctagcagtttggaaaattttcaaaatatttgaaaattttcaaatggtttgtggtctgttgatctactaatcacgtcatactaattttgggatggaatgttacagaatatataatttcaaaacagagagagtattcttttgttttctgtgaactgattttattctaggtaatataatgtatccattttttttaatgacgaggaagaaaaattaaggaacaaaagaatatgcattaaatttgattaggtagtgtcatttaagtgatcccttctccaacacaaaatgtatgattcgacgtcaaattaatgttttaaatatttattgcttttattgatcatatataatttaatatttataatcattattacgtgggaacttatctagtacacattctatgtctttgtgaacttagtacacgagtaacggtttttctattaaattaaaaccttcaaaacaacatttgatgaaaatttcatagattttacaccaaaatttcgtaagaaaaattgttggagttcgtattgttttcttgtagtagatgacattaaaaaaatacattaagatacactaaacaagaattatgcatattgttttttggtcaaaatcgagcctttaccaaattgatcgatacattttttctgatgatacgtttagactagttggataaaatattaatctgtcctcaaaaccaatttgcagtggatcaatccatatatcttctatattattaggatctttgtctaacttccgatgtgtgatattgttattcctaagataaaacaccattgaaaaacagtattttaaatcgggtaaataattcagcgagtcacatatttttgttttaataaaaactcaaatcaaaagtgatcaaaatatggtagaaagcaaccttcgattgtggtccatcatgtaagatacgagaagattttatggtttttaaaacccacttcgaccatgaaagcttgacccaaagcaattgagttgtttcttttataaatgacctaatcaatttccatacatacaagcatacatgtgacgtaaaggaaatctaattatgtactaatttgtaaattttactagtattcaattcagtaattcttactaaacttactttaactcttgctaattaaatatactactagagaaggtaaattacatgcagttaagctatactattttttctaattgcaagaaagaaagaaaaagtacaaaagaaaagaaagcacattgcaagtggatgtatatatagttatagggaaataaatatgaatatggactgtatatacatataggtttctcttatctctatcaaattaccttaaatgggttcataaagatggagatcaaagactacacatcacatgctactctccctcttcttttggcataaccttactccatttatacattgtgctcctcaattattcaacattttttaaaaataacttatttaacaaaatgttagaaaatatctacccaatttttttcttccacatacgagctacaaagatctttatcaaataaaacaagaaagattattaatccatattttgggttaaattttaatccatttagccaattaggagaactattttaacagttagatacttttcaacaaaatttattaagtagtcacctatgtatattcatatagtagtttcacaaacaatatg

SEQ ID NO: 24429 - DNA, 3000 bp, Unknown; identical to SEQ ID NO: 8488
  misc_feature (1)..( 3000): 2750-1469P.txt file - cDNA_ID_2176923; gDNA_ID_1971812; Annot_ID_175786

SEQ ID NO: 24430 - DNA, 3000 bp, Unknown; identical to SEQ ID NO: 8488
  misc_feature (1)..( 3000): 2750-1469P.txt file - cDNA_ID_2176923; gDNA_ID_2926171; Annot_ID_199530

SEQ ID NO: 24431 - DNA, 3003 bp, Unknown; identical to SEQ ID NO: 18815
  misc_feature (1)..( 3003): 2750-1469P.txt file - cDNA_ID_2176935; gDNA_ID_1971812; Annot_ID_175794

SEQ ID NO: 24432 - DNA, 3003 bp, Unknown; identical to SEQ ID NO: 18815
  misc_feature (1)..( 3003): 2750-1469P.txt file - cDNA_ID_2176935; gDNA_ID_2926171; Annot_ID_199538

SEQ ID NO: 24433 - DNA, 47 bp, Unknown
  misc_feature (1)..( 47): 2750-1469P.txt file - cDNA_ID_2176935; gDNA_ID_2926173; Annot_ID_199626
gctctttgaaaattagcaaaaatgatactagtaatggattaactatg

SEQ ID NO: 24434 - DNA, 3000 bp, Unknown; identical to SEQ ID NO: 8485
  misc_feature (1)..( 3000): 2750-1469P.txt file - cDNA_ID_2176945; gDNA_ID_1971812; Annot_ID_175797

SEQ ID NO: 24435 - DNA, 3000 bp, Unknown; identical to SEQ ID NO: 4466
  misc_feature (1)..( 3000): 2750-1469P.txt file - cDNA_ID_2176945; gDNA_ID_1620707; Annot_ID_165322

SEQ ID NO: 24436 - DNA, 3000 bp, Unknown; identical to SEQ ID NO: 8485
  misc_feature (1)..( 3000): 2750-1469P.txt file - cDNA_ID_2176945; gDNA_ID_2926173; Annot_ID_199629

SEQ ID NO: 24437 - DNA, 3000 bp, Unknown; identical to SEQ ID NO: 8529
  misc_feature (1)..( 3000): 2750-1469P.txt file - cDNA_ID_2177047; gDNA_ID_1971815; Annot_ID_175952

SEQ ID NO: 24438 - DNA, 3000 bp, Unknown; identical to SEQ ID NO: 8529
  misc_feature (1)..( 3000): 2750-1469P.txt file - cDNA_ID_2177047; gDNA_ID_2926169; Annot_ID_199381

SEQ ID NO: 24439 - DNA, 3000 bp, Unknown; identical to SEQ ID NO: 8528
  misc_feature (1)..( 3000): 2750-1469P.txt file - cDNA_ID_2177058; gDNA_ID_1971815; Annot_ID_175955

SEQ ID NO: 24440 - DNA, 3000 bp, Unknown; identical to SEQ ID NO: 8528
  misc_feature (1)..( 3000): 2750-1469P.txt file - cDNA_ID_2177058; gDNA_ID_2926169; Annot_ID_199382

SEQ ID NO: 24441 - DNA, 3003 bp, Unknown
  misc_feature (1)..( 3003): 2750-1469P.txt file - cDNA_ID_2177074; gDNA_ID_1971813; Annot_ID_175820
taccagtacgacgtcattttcaaaaatcgtatccatagtcatggtttttgttttcatacgatctatatcattacatttacaacgatgatctctatcaaaaatgtaattttttttctttcccgtcgttaacttactattataaagtttgacaacattttagatcccaaaaattagctttatgtaatggtattgaaaaaatatcatcgtataaagtctgtcgaaaaaagcggttttgtatctggtttaatggtgttggtagatttgacaatgaattcggcattgatggatttgacgtttgaagtcgtatgaaatatgtcactgaaatagcgatgcacttggttgaagaatttggctttaatggatttggcgatgaatttggtgttggtggatttgccgtttgaagtcgtctgaagtatgaacaatgaacactttctttttcccaaatgattatcagatttttttattaaatttcaatttaaggttctttgtcgttacacttaaattgatgatttctatcaaaaatgcaaattcttttttaatttcaattttgttctgttttttgtttttatacgattaattcaataggggaatcaaatacacttggttgcaaaacatttcaagttttcaaagaacaatcatagtatttttttgcccaccaatcatagttatatatatatatatctcaaatttagttggaacataagtaagtaataagtaagtagataagcaagtagataactacaaaacctcaaaagcgtctgatcaatgataatcattttgacaatatttggtggaatcaattagcacttctaaacttttgatccaactattttcgttagtttcatcatctagtgatcatacggaatccaccactataatttttttctttcttataactgaaaaattaatgtgtcaaaactgtaaaattagatacaaaacatgtatcctggaacagtggtactatacgagtcagtagatgtgcaccacttaactagtatcatgaatctaagataatatcggctgatatctaagtgaaaacttaccctaaaaagagaaacagttcacatgaaaagcatcgaataacgacaataagaaatagatacttaacagagctagaaaacacaatacttatatataatttaaaataaaaagaattatatatacgtaaaaacagtataaagaaagaaagacacaagaaaagtagtctgttttggatctttaaccaaacggaacctctgtctgtgtccccgcattgtccttttgtcgattataaaaatcggtcacgccttttcacttccatactcctcattttccatctctatactctaccactttttctagattctctttttcttttcaaaaacaaacaatttaatttccgataaaatagtaaaacatatttttactgatctatattgttcagaatgcattttttgcgatctatccgatatatttaatttgtagaaaaaataattagtgaaaacgtcgaattggtgagtaggaacaagtggcttcttgacaactaacttagtggtatcgaggattgcgaccaggagacaataaacaggggtaaaacaaactttgaaagacgaatagagtttgtgctcgttgtatgattttagacaaccggttgcatactattttggtggctatgtgatatgacgttgatagtcttataggaatcagacaattcatgtgactttaatttgctctatctaccgagaaagcacgactaaaatgaaaaaaaaaaaaaatgtagtatgttgtaagataaaaatatatgtaaataagttggtttttcaacaaaaacgcatacattaaccaaaaaccatgcatttgtcttctcttttattgcgagaaagaaattgttaatatatgcttagatcttgtttgctattgcataaattgaaacttaacaacaagtcaacaacactgtatctcttaaatatttgcatttcatcgacgaaaggagcaaacctgttgagagtacgggtaagtatgagaacatcaccatgaaagtaaataagtaattaagtaaagttgagaaattcatacaaacaatgaagcaactcaagcaagtcaggtcatacataagttatcaaactcttttaaattcgtagaaatttgttttaagcattaaaaaaaaaaagatattaaaaaatcaaatatcctatatctatagtgtaacaaaagaaacactgtatattaacacaaattagatttaattgttttgcttgaagaagaaagtgagggaaaatgaataaataaaaaaggttttaaaaaaaagagaaaagattcttctccctgtcctcgcttcttaaatggcaagaaaggagactctgatgggaagttcataactgaaaaataaaaataagacagaaaacaaagttaaaaataaaataaaaacggaagagagaaaataaataaataaaatcactcaaaggatttccacagtttttctttccatgttgatttagcccattcgtagacttcctccgcgccgccgttagacgccgcctcggaagtatcagcaaccgccgtggtgttcgtcgccttcaaaggctcgtttctctcctctctctggtatttttttttttatttctgggtttacttgtgaagattcggttatacttcggagatcattgttataattcacttgttctgatttagtcctacttgtcaaatttctggattgtcgaaattggcaattcattgtctcagatcgtatgattattggatctgattttgaattttagagttagagagttcatgttggagttttgggattaaaatcgtttctatattcttctggatctaaagcatttttagatcgtggaattgtgaaacagctaatagttttttttttttttttttgcgttttgatgattttcaattgcgattgcataggtttgatcataagatctacacttgattctactcactttatttgttgtttcctctaatttgaaaaattgaaatctgcagagatctgaatttgagatg

SEQ ID NO: 24442 - DNA, 3003 bp, Unknown; identical to SEQ ID NO: 24441
  misc_feature (1)..( 3003): 2750-1469P.txt file - cDNA_ID_2177074; gDNA_ID_2926218; Annot_ID_203125

SEQ ID NO: 24443 - DNA, 3003 bp, Unknown
  misc_feature (1)..( 3003): 2750-1469P.txt file - cDNA_ID_2177130; gDNA_ID_1971813; Annot_ID_175848
catatatatataaacaaaacatcattgttgttggaattaccctagcatgctgaagaagaacacacataacaaacatatctggtttttggaacacaaggtttaaccattacaatttgaaagtgtctgaatcgttgaagcttttcaactgttttcctctgcaaaatcaattcattcacataagaacaaatttctgtttgtatctcataggaggaagcaagaacaaagaaagacagtgatctagaaacataccatttattgctcccatgttgtggtcttctttgtagacccccaaaggagagccatgcacagagagcatcatctctccagcttttggtagcctcagagtctttggagtcattccaaaagaaagtctttgcccattaacctgcaaaatataaaagtttcattgtagagtctctccttgtatgcccaaaatctatcattgaaatgctcattctgcaacagagaatgtaattgataaatgtcgaaaccataaactcaatttcttctctctagatcaatgtacaaacaaaatctcgaaggagaaaacatgctaaagaatcaaacaaagaattctagagtaggtacgagataatttgcatcaagacagaaatagggaatataatcataaatacataccccaggagtctgaaaagcatcatggcctggaagcatttggttctcagatgtcccctgaaagacctaataaccattggaaaatagcaaattagcgttttctacttactgtcctgaagtagttttgcatacttttggaaggccgaagaaaaatacaaggttgacaaaattaaaattgataaaacctaaacatcactaaaagaaacaagtaaaggcactactcagtttggtgaaagcctgcaaaattgataaaagcagatgacaaattcactaaatgttctacaacagttgtatctaatcattcaagtctgttctaataggattaagggaaccaccagaaagaaaatggcaggaagacaagatataaacttacaagattatcgagctgtgggttatcagttcctaacaggttagctttcactgccaccaaagacaaaaataaaagtaaaattcaaagtcaaattcctaacaaaagaacctaagtgagctttacataccgttgtcaggtaaatcatagccaccaagagatgacctactgtataaatcggtaaaacgcatcgacaagcgtttcaaaatagaataattcatgtcaacgccattctcatttccagcaaacgaatcaccattttcgtctctccactttaactcaatctccccagtttcttcgtttctcgatatcgataaatccggaagattctctttaaagaagtctaacacaggagtgtgtagctgttcctcagtaaaatacgaacgaagcaaccgcaatgcagttaacatttgttcaatctcaacatcacggattgctctaatcgcagcaatttgtctttcgactacacaatgttacccaatacaccaaaaatcagatcatgataatcctaaatttctgagttgggtattggaataattgataccttcttcgtcgacgaagtcttctttcttctcttcgattcgaattcgtttctcgtcgttcctatcttcttcagtgagtttgacacactcctttgcttttcgcttcggcattatcgatttctttcgaagaattagatgctcaattcgaggaattgattgcaatttcaaatcacaatctgaaattcaaaaccctagaaacagtgaggaagatgaaaaacccccaaaatcaaaaggggttttgaaaataatattaaataaataaatgggcgggagttacgcttaaacgaaattaaagaaacgaaattacgaaaatatccataaagttgaatacggcccatgggctcaataatattatgatcaccaaataacatttctaaataaagcccgaattgtgatatttttttaaaaatagttatgtttctaataaattcgatgtatttaaaagttgtggtgacaaaagatcggaaaaagaaaaagaatgttctttctttcacggtgtccacaaggctgacaagcatgattaagacgaccactaaagttttcttgacaccaacattgtacttactttagatgctcttcacgagtttgcttcaaatgtaataaaaaaacttcttttagttacatgaatcgagatcttattactgaactaattatgggagaatattccccatttttctaatattaatggcgaggtatcaatctacatctatagccaatttagccacgtgtgtgggccaacttttatccgttgaataagtgcttcaacgtataattaaagacttttgaaactcttatatggacatataattaaatgacttggcctcaacgtatacatcatagttttatatctcatctctaccttccatagaaactcatttgaaacttttgggcagagagtctgaacaatcgctttgttgtcgtcaagaacgatacgtccctataaatgtaagttattttgtttctctaaattcagaaatatcccacctaaaaattcgactgtttggtatttttagtaacaagcttcatgaataatattggagattttcttggataaattattgattttcatctaagttattccaagtttatgaatttcccactcatcatatttagaagaactttgattttttttcttgggtggcttttgggtcaaaacaaaagaatgataaagtctcattattattttgagcttttgttcatgtactgtgtggtcaaagacagtaacataaagtctttgttggctttgagttttagcgtatacgcgtaagactggttttaacattttcaatagttgactaatctctattttcaattttgttttcgggaaagttcgaggattcttcaaaatttattgtttatatgaatctgtttctgtttaaacgttgaacatcattttctttttgtgtttatcctctgtgattaatctctttgtttgtttctctatcaatagtagcaatg

SEQ ID NO: 24444 - DNA, 3003 bp, Unknown
  misc_feature (1)..( 3003): 2750-1469P.txt file - cDNA_ID_2177130; gDNA_ID_2926218; Annot_ID_203152
tcatatatatataaacaaaacatcattgttgttggaattaccctagcatgctgaagaagaacacacataacaaacatatctggtttttggaacacaaggtttaaccattacaatttgaaagtgtctgaatcgttgaagcttttcaactgttttcctctgcaaaatcaattcattcacataagaacaaatttctgtttgtatctcataggaggaagcaagaacaaagaaagacagtgatctagaaacataccatttattgctcccatgttgtggtcttctttgtagacccccaaaggagagccatgcacagagagcatcatctctccagcttttggtagcctcagagtctttggagtcattccaaaagaaagtctttgcccattaacctgcaaaatataaaagtttcattgtagagtctctccttgtatgcccaaaatctatcattgaaatgctcattctgcaacagagaatgtaattgataaatgtcgaaaccataaactcaatttcttctctctagatcaatgtacaaacaaaatctcgaaggagaaaacatgctaaagaatcaaacaaagaattctagagtaggtacgagataatttgcatcaagacagaaatagggaatataatcataaatacataccccaggagtctgaaaagcatcatggcctggaagcatttggttctcagatgtcccctgaaagacctaataaccattggaaaatagcaaattagcgttttctacttactgtcctgaagtagttttgcatacttttggaaggccgaagaaaaatacaaggttgacaaaattaaaattgataaaacctaaacatcactaaaagaaacaagtaaaggcactactcagtttggtgaaagcctgcaaaattgataaaagcagatgacaaattcactaaatgttctacaacagttgtatctaatcattcaagtctgttctaataggattaagggaaccaccagaaagaaaatggcaggaagacaagatataaacttacaagattatcgagctgtgggttatcagttcctaacaggttagctttcactgccaccaaagacaaaaataaaagtaaaattcaaagtcaaattcctaacaaaagaacctaagtgagctttacataccgttgtcaggtaaatcatagccaccaagagatgacctactgtataaatcggtaaaacgcatcgacaagcgtttcaaaatagaataattcatgtcaacgccattctcatttccagcaaacgaatcaccattttcgtctctccactttaactcaatctccccagtttcttcgtttctcgatatcgataaatccggaagattctctttaaagaagtctaacacaggagtgtgtagctgttcctcagtaaaatacgaacgaagcaaccgcaatgcagttacatttgttcaatctcaacatcacggattgctctaatcgcagcaatttgtctttcgactacacaatgttacccaatacaccaaaaatcagatcatgataatcctaaatttctgagttgggtattggaataattgataccttcttcgtcgacgaagtcttctttcttctcttcgattcgaattcgtttctcgtcgttcctatcttcttcagtgagtttgacacactcctttgcttttcgcttcggcattatcgatttctttcgaagaattagatgctcaattcgaggaattgattgcaatttcaaatcacaatctgaaattcaaaaccctagaaacagtgaggaagatgaaaaacccccaaaatcaaaaggggttttgaaaataatattaaataaataaatgggcgggagttacgcttaaacgaaattaaagaaacgaaattacgaaaatatccataaagttgaatacggcccatgggctcaataatattatgatcaccaaataacatttctaaataaagcccgaattgtgatatttttttaaaaatagttatgtttctaataaattcgatgtatttaaaagttgtggtgacaaaagatcggaaaaagaaaaagaatgttctttctttcacggtgtccacaaggctgacaagcatgattaagacgaccactaaagttttcttgacaccaacattgtacttactttagatgctcttcacgagtttgcttcaaatgtaataaaaaaacttcttttagttacatgaatcgagatcttattactgaactaattatgggagaatattccccatttttctaatattaatggcgaggtatcaatctacatctatagccaatttagccacgtgtgtgggccaacttttatccgttgaataagtgcttcaacgtataattaaagacttttgaaactcttatatggacatataattaaatgacttggcctcaacgtatacatcatagttttatatctcatctctaccttccatagaaactcatttgaaacttttgggcagagagtctgaacaatcgctttgttgtcgtcaagaacgatacgtccctataaatgtaagttattttgtttctctaaattcagaaatatcccacctaaaaattcgactgtttggtatttttagtaacaagcttcatgaataatattggagattttcttggataaattattgattttcatctaagttattccaagtttatgaatttcccactcatcatatttagaagaactttgattttttttcttgggtggcttttgggtcaaaacaaaagaatgataaagtctcattattattttgagcttttgttcatgtactgtgtggtcaaagacagtaacataaagtctttgttggctttgagttttagcgtatacgcgtaagactggttttaacattttcaatagttgactaatctctattttcaattttgttttcgggaaagttcgaggattcttcaaaatttattgtttatatgaatctgtttctgtttaaacgttgaacatcattttctttttgtgtttatcctctgtgattaatctctttgtttgtttctctatcaatagtagcaatg

SEQ ID NO: 24445 - DNA, 3003 bp, Unknown; identical to SEQ ID NO: 24444
  misc_feature (1)..( 3003): 2750-1469P.txt file - cDNA_ID_2177130; gDNA_ID_2926254; Annot_ID_204466

SEQ ID NO: 24446 - DNA, 3003 bp, Unknown
  misc_feature (1)..( 3003): 2750-1469P.txt file - cDNA_ID_2177138; gDNA_ID_1971813; Annot_ID_175850
caaagtattgttgcgtatcacggtgcggttgcgacagacgatggacggtgttctgcaatagggacgaatgttcttcgtcaaggaggaaacgcgattgatgcgtcggtggctgctgctctttgtttgggcgttgtcagtcccgcatctagcggtataggcggtggagcgtttacaatgattaagctagctaatggcacggaagttgcttatgattccagagaaaccgctcctctaagcgccactgaggtaagtaacacgttttacagtaataacgtctttctttttactcttcccaaaatgagcattttggataacgtacgtttttgagttatggacagtgtttttttaatcaaagatatttattggctgtttctcttgatgtaggatatgtatggtgataatcctgagcgaaagaagaaaggatccttgtcagtaggcgttcccggggaagtcgcgggtctatacacggcttggacacaacacgggaagttaccgtggaagcagttagtagaacctgctgagaaacttgcagctgaaggattcaagatttcaaaatatctctatatgcagatgaatgcgactagaagcgatatcttagcggacaaaggtctctctgagctatttgtttcaaatggagagctcaagaaaccaggggcgatttgccgtaacccgaaattggctgatacactaagccaaatcgctgaatacggtccaaaagcgttttacaatggcacggttgggtttaacctagtgagtgatatacaaaaagccggagggataataactttgaaagatttgcagaattacaacgttaaggttaaagaaccattatctacggagattcttggataccgattactcggcatgcctcctccttcatctggtggccctgcaatgatgcttgtaagtaaagtatttttgtgaaaatttcacatttcatcaaacctaggtttatcttttggagtttctcttgtgttgcagattttgaacattcttgctcaatatggtattccatcgggtgtttccggccccctcggtgttcatcgactagttgaggctctcaaacatgcattcgcagttagaatgaacctcggggatccagattttgtccctgaagttactaatgttgttgcagatatgttatctccaaagtttgcacaagacttgaagagcaagataaacgatgagaagacctttgatccaaaatattacggtggcaagtaggttttttcaatctttttccgcaaatcttttttcttcgattctggatatctcaatctttttctcctattcgtagatggggtcagatcaaggatcatgggacgagccatttatcgataatagattctgagagaaatgctgtttcaatgactagtacaatcaacggatactttggggcaataatgctgtctccgagcaccggaatcgttctaaacaacgaaatggacgatttctcgatcccgacgaaatccggaggtgacccagatgtgcccccaccagcaccggctaacttcatccgaccggggaaacgacctttgtcctctatgactcccaccattgtactcaaggcaagaaaaaagaaaaaaccctagctcttgtgctacaagtaactctgagtactttaggttctaaacgatggttacttctgtgttggtttacacaggacggtaaagtgaaagcagcattgggtgcgagtggaggaatgtacatcatcgccggtacaacacaagtttacttaaatcatttcttcctcaacatggatcctctctcttccgttgttgctccaagaatctaccaccaggtttttgctattttttgtccttgtacccaagatagaaactttcttgttctttgctaattttacttttgtaacctcatttgtagctgataccgaacaaagcttcgtatgagaattggacgacagtgtatagtgaccatttcgagattcctgaagagataagacttgtgttggagaagaaaggtcaagtcctaacgccgatcgccggagggacgatttctcagctcatagttgaacaatccgatggaaaatccggtggaattagtaagcttgtggcggttagtgatccaaggaaaggagggttcccttcaggatattgaaatttggatttgactttgttttcaattatatatcatcgaacttgtgatgtactagtatgaacctttatattcgatgaatataatatgaaagtaataaagtttgtttgcgataatgttgttgatccagagatttttctttaatcataaattcataatagttagtatggtgaatattggaattaaactactaaaccttttgctcttgcattagtgggggtcgtggtatgagtcgatgaccagtaaaagacaaaattaataaagatcttaatgtaaatgcgttggttgttatggacgacagctctattagcataattaattagcatgacttgatgatccttcgtcaagtgatagtcatgtacacgtctaagaccaaatgtgaaaattgtgataatcttgaaacctatatagtactatttcatattttatatacaatgttaattagctcggagttaggtccactaactaagtctaattactaaaataatacaatcttctaacttaacaactaatcatggtgcacatgcaaaattaaaattaaaaaaaaagatttggaggattaatactccaaagtccaaaccttggatactccgcctctagtcagtgacacgtcatataattagcagacgataatcggaagagatttgttacagtgtcactgtcggttgcttaatcagcaatctcattcaaatggaatcttaatacatgtaggaatctttttcctaagaatcatatttgacacgtcatcatttcttaaaaatcttttgatcctcctacttaagtagcactaatcaatccctcactaaactctagtcttaatcacactatatatatatagtactagtgtgatttgcccaacttgtcatcattatctctatctaataaatg

SEQ ID NO: 24447 - DNA, 3003 bp, Unknown; identical to SEQ ID NO: 24446
  misc_feature (1)..( 3003): 2750-1469P.txt file - cDNA_ID_2177138; gDNA_ID_2926218; Annot_ID_203154

SEQ ID NO: 24448 - DNA, 3003 bp, Unknown; identical to SEQ ID NO: 24446
  misc_feature (1)..( 3003): 2750-1469P.txt file - cDNA_ID_2177138; gDNA_ID_2926254; Annot_ID_204468

SEQ ID NO: 24449 - DNA, 3000 bp, Unknown; identical to SEQ ID NO: 8504
  misc_feature (1)..( 3000): 2750-1469P.txt file - cDNA_ID_2177149; gDNA_ID_1971813; Annot_ID_175856

SEQ ID NO: 24450 - DNA, 3000 bp, Unknown
  misc_feature (1)..( 3000): 2750-1469P.txt file - cDNA_ID_2177149; gDNA_ID_2926218; Annot_ID_203160
gaaaagtaagtaccatttatcaggaaaagtaaaagtaataccatcataagatttgtaaacgtaacatcctgcagtggtagagaaacaaaacaaagcattagccgaaccaaatatctacaatcaaagtgaattttgactatcaccaaaaggaataaatctaatataaactaaaccttagatacatgtatataatattgggatatagagtagacaatagtggatggtggtagtggaaccacttaatgcgatttcacgttccctgtttttctccctttcacacaaaaacaaaacaaaattattaaaaaatcatgtcacaccaaatgtcttatttaccatgataccctatctcataaactccttaaacaaacaatagctccctaaactcaagtatccattctcacctctaaatcaatttcttacgttttctctcgtcaaagtctttttttctttgtcacgagatggagtccggtaatagtagtagcatgcaatcttcaagcggcggtggcggaggaggagaagaagaatacgattcacgcgccgcagatcaatccatttccgccttcttcgaccaccacaacaaccacgtgtcatctatacccacgccgcaacaaaaccatcgcaacctcctccatttcgaccataacaacaacaactctctaataccaccaaactactttaacaacaacacgttcttacccgtaaaccaacaacccgacccgatttctcaactcgacctccgaacctcctccgccacgtcatcactccctcctactaacaatataggagtaatcaagaaaacaaagaaaagatctcgagcatcaagaagagcaccaacgacggttctaacgacggatacttccaacttccgagcgatggttcaagagtttaccggaatcccagctccaccgctattcaacaacaactccatcgtgaacaccacgcgcctcaacactttcctcggcttgtcttcttcttcgccaaacacttacaacaccaacaatctcttgttacgaccgtttgctcaaaaactcactccagcgactcctctcttatccggatcacaaattcagcaatatcaaaaccctaacaacggtttcgaggatatgaatctgcaagctcttcttcaagctcatatttcaaaccctagaagcaatgagcacgatcagtttggtcttggtatgatgcagactccatctactaatcctcctactacaacggcagcggctaacgggaacataaacaccggtgataatggaagctacggtggctccgatcatgaacataataatgacggtacttggttatcttcgtcttccgaccagagaacataaatatatttatgtatagtccaagtccgaaatcaaagctaatctcttgacatgattactcaacaaattaaacatagcacatatagcatgatgaagttactcgtttatatattctatatttcagtataaaccactttaaaacttttttcgtgtagggtttgttaattatttaatacttaattaatatgcttgttatttgttaatcttagttttttccataactatatgttggtaagtattagttagtagatggatctcaccatttgaatcagattttcttggtatattttcttataattatatagaacttttaaattttaatgacaacgatgacttgcgatatgaaattttaatttttcaacaatcaatatacagtacgtggttttgggatcactacggttaatatttctcctaattaatattggagtgaatggtggcgaaatttggggaatcttccacggccgccggattgtggaatatggttttgggaccatagtatataattattaattaattatagacttgtggtgatttgaaatttgataaattactgttctcccatgtgcttattcatttttggtgtatcatctacattaacgtcaatttttattgacttgactctcattttaccataccaacagatttgaaatttgaaaatttcccaagcaaaagaaaaacaggtaatcaataatgataattatacatacattttggttttgacctacttttgtcatatgacaatttatctttatagacacttttacttctattattataagtctctttgtttgtgaataggggcaaatttcatttgaccgcctccgacaaccattgaccttgtcacggctctgaatgtgatgcgtctacaaaattcctaacttttttcagtcttctcattaaccaatcaatcgttagaatattcagcttaatttatatctctttctagtctctagcttaacaacacttcagaatgaaatgtcagttctttgtaagcggggttttcaataatatcatttgctactgtatagtataatagtaactcttaaaaataataattcttgtttttcacaataagatttgatgatggattgatggtcgcaaaacaaataatgacatttgatgaaaaatcttttgcttgttcttgtgtatacaaaagttcaaatgattttgatatttttttgtccacggaccagttacacttaagtcaccaatgcactgtataacctatacacatcacttacataaactatcaacaatgtgcatatatgtgtatctctatctaaatggaatatataataatgggtgatgatgatggtttaatattatggtggtggttatggtggaccatgatatcaagctattgtcgcactgatgggttttctatgtattcagatgatactcggtttcatagttgagtgataactaggtctggccattatcttactatccaaataattcgattcgggttctcaattttgtgggccgattggctccaaaagtttcattattatttttgttctgttgaaaatagaaatccaaaaaaatacgggtgggtcccataatcatatccattgtaccgttgcacactcaaaagacaaaagattcagaccaaaggctctggcttcacgcagataaggaagcagagatcgaaacgaagactcaaagaagaatg

SEQ ID NO: 24451 - DNA, 3000 bp, Unknown; identical to SEQ ID NO: 24450
  misc_feature (1)..( 3000): 2750-1469P.txt file - cDNA_ID_2177149; gDNA_ID_2926254; Annot_ID_204474

SEQ ID NO: 24452 - DNA, 3003 bp, Unknown
  misc_feature (1)..( 3003): 2750-1469P.txt file - cDNA_ID_2177189; gDNA_ID_1971816; Annot_ID_175977
gcatggttgagttaagtatagagatctttctgttggaaattttcatttctgattcattttgcatccttagatgagcaatggaagggtacctctcccaactaaccggccaaatggaacagcttgtcccccctctacatcaactgtgagttatcaaattatgaatttgtaatagttctgtatattcttatggaactggtacttactctgttcatcgatttttcattttaccaacagtcaacaccaccctctcagacccaaaccgttgttgtagaaaaccccatgtccgttgatgaaagcggaaagttggtgagtatttctatcacctgtgttcttcttcttatttaccacattagaggaagatatgacaaagtgactgaaacacacaaattgcaggtgagcaatgttgttgttggagtgacaactgacaaaaagtaatcaagaatgagtgagatcttaaagatcaaatccaaattcttcctctattcctgcgtttggtttgtgcatattacatacgcggaaaaactgtatgttatatatctcttgactcctttttaacccaagagaaaaagcttatcagaatctcttgttactgcattattggggtttattcaaagttgaagacacaaggtttttgctcgaataatttggcattcttttgctccatggaacttgaccttctcttctgtttgttgacttctaaaactccatcggcccttgtggcattgttaatgtatgtatgaatataatctgatacaccaaccaatcattaagatttgggtttgaaatctgtctcttccgtggatgagatatgctacatgtcacaagaactggtcttagctttggtagataagacttgtcttagagcaagtcttgaaatctggaaatctattttgcagtaatcttgtcacaacaaccataacctaatcagtcagtaccctccaagaacattaaagttagatgatccgacaaaacctctcaacaagaccaaactctttccatataaatactctttaacactgacacaaagtttcatcactttctcttgatcactcactgcatcaacaatggccagagagaagattgtggtggctggtggtaccacaaagagctggaaactactcttggggctgagaatatttgcattcatggctactttagctgcagccattgtaatgtcactaaacaaagagacaaagaccttggttgtggccaccattggtactgttcctattaaagccactttaaccgctaagtttcagcacacaccggcttttgtgtaagcgagtaaaaccctatacgaaatcgattcgatacatattgaaagcaaaatgtttttgagttattaacattgattcttggttttacaggttctttgttatagctaatgtaatggtgagcttccacaacttgttgatgattgtggttcagattttcagccggaaactggagtacaaaggtcttcgtctcctctctatcgccattcttgacatggtataaacattggttttcaaatcaatttactggtttgatttcaattgaattagtttgaacgtttggaaaaaaagctaaacggtttcttgataatctaaaaaaacgttggaaaaaaagctaaacgcaacactagtatctgcggctgcaaacgcggcggtgttcgtggcagagctagggaagaacggaaacaagcacgccaagtggaacaaagtctgcgacaggttcaccacttactgtgatcacggcgcaggagcaatcatcgcagcattcgccggagtcattctaatgctcctcgtgtccgccgtctctatttcccgcctcttaatcaattctaaaaacttctccaccaccgccaccacaacctccgtcgtctaaaacatcgtggccaaaaattcagcaacatgtgtgtgaccattttatagatgttgtggcttactttgtgtgtttgtctctcaagtcactagcaaattgtgtaatgcactcctttgttctatcactttcacatttgtattcaagttttcatttctctcttatctttttatataattctaaaatgacaaaaaaaaattcacaaagtatatagtacattgaaacaatgagaaaaatctacaatagatgattagataagaccaattcaagataatttataccttttatttctcaactacttcttctatttatggaaatataattctaatcaattgttagttttttacattaaaatgaattatatcaaccgactaaaaaacaaatcagtattagttctatcgcattgtagttcccatacaacttaatttttgtgttgtaaataatgatcctactgtctctaataaatgtgaatcaataatcataactattgaaatccttttctttttggttagtaaaaatgaagtgtaaatagtataactgtttaatttagttcagatatacaaatcaacaaaactacttaatttgaagattaattcagtttttttttttttttaattttctgtttataaaactactgaattttatttggtataaatggattgaagattttattacaaaacaaaatcacatttggcggcttcttctttttatgttctaaacccttttcttagatcggactccaagaaatctacttgctttaatcgttaacctaataaattcttctctaagttttttttttcttaactcatcaaagaaggaaagaaaaaaaaaaacctctttcacagatatttaaccaaaaggttttagatttatactatacgttacaaataaaattcgagagtcaaattcaatcttgggaaaagcttttgttccgaatcttggccccttcacgaaggtacacttatcatctcactctctatttccagacacaaatctatatgcgttctgggtttttttagggtttcgaaaacggcactgcatttcatcaagtaagggtttgttttttatttaacagatctttgttcttccttaggtcacgggttaaaagtatcgatctttgtgaacttaatctcactgtaaatg

SEQ ID NO: 24453 - DNA, 3000 bp, Unknown; identical to SEQ ID NO: 19836
  misc_feature (1)..( 3000): 2750-1469P.txt file - cDNA_ID_2177193; gDNA_ID_2926176; Annot_ID_199838

SEQ ID NO: 24454 - DNA, 1089 bp, Unknown; identical to SEQ ID NO: 8558
  misc_feature (1)..( 1089): 2750-1469P.txt file - cDNA_ID_2177299; gDNA_ID_1971817; Annot_ID_58271

SEQ ID NO: 24455 - DNA, 3000 bp, Unknown
  misc_feature (1)..( 3000): 2750-1469P.txt file - cDNA_ID_2177299; gDNA_ID_2926143; Annot_ID_197558
atgtaaaacattttatcaacaagaagccattagtcttccatcatcattttataataacatgttactttcactacacgttaaaattcaaaacctaacaaagtttttgtggcacaaactcaaaaaccaataaaacaatgattccaaggttaattcccagatggtcttccttgtgcaccattagaatcttgaggattattgttaccagtgcctcccattgatcctccaaacatctgcatcattgatcgtaatgcacccgataaatcttccggcatttgctctgtgcctccgagatctatgttgatatttccgcctacatgtatctcaggctcatctgcaccatttctggtaccatctccacctgctcctccctcgttattgcgagaatgatttcccgggaatgtgtttcccgccatgttcatgaacatgctcatcaaatcagggtttacaggcattgagaactgagatggtattccctggcctcctcccatttctggctcttgagtgtaaaacgtgctcgtgttctgctgttcacaacaccacaaaacattagttcctttcgtctctcgacttatttacgctacatgagatgactggtcagacatttcaatacctggctacgtctctgtcgttgttgttcttctctaattttctgttcagccacctgtgatacacaccatgtcaatatcagactctcatgtaagttacagaacgatcctttaaataggagaaatgtataaaaaaataccaaccctgatattttctttcacagattcgttatgcggatccaacagcaaagctgccatgagtgtgatgaaaaaggttaggcagaataaatgctagctaacttgaagaagcaaagttctagctctattcttaagcaatcaatcctcataaaggaatatggtaatttctgactaattctaagaagatatacatacctttcttgaaacctttctcgatagcctcggcatattttccttgagcataatatgctaacccaagacgactatacgccttactataatttggatcaatctcaatggatttaagacagtccttgattgcttctgagcacatgttgatctgtgtatatgcagcagccctgataacaagtgaaaaaataactaagcgcatcaaattcatattatgcaggaagaccaccaaagagctacaaactcagtttcgatattaatcaaattacagacttatcactcacctgttgcagtagaaaacagcgttcttatccgtcagtgcaattgcaaaagaataaagctcgactgcctcaagataaagattggactgcatagctttgttacctaaaaggcagagaatgtcacatagaggttacaagcacccaaaaaacaaaccttcatcgatctcattctaacataggcttgtaacaactaaagaacaaggaagaagttccaacgatttcgaagaaagggactacaagcaatcacaagtaccttgacacttgagtgtttccgccaagctattcacatcaaacgtctgacatccagacttttccatttcctgatacacaaacacaaaacttataaccaaactcataaccaacagaagaagtaaaaccgtcaaagaaaatcaaacctacattgacacaatcatgaaatatccttgtagctttctccagctgagcaggatcatcatctccatcaggtgtattcctaaaataccgtactttctcaagcgcaccaaagagttgaccaaacagttcatctctagaagtccctaaaaccagcacaatcccacaataataagttccattactctatccaccactcacattggtccaataaacacgaaacaaaccattacttaccagtaaaactaggctctttacacgtatccacggagacatgagaaccggaggaactaggatcctgagtagtagcagcaacaggtggtggtggtggtggtggtatggtttcattgttgtccaatgaagtaaacaaattaacaagtgaaataggtttaaagctatcatcatcatcatctcttgaagaatctgaattaagtttaaaagcttctcttaaacattctctagcaacctcaagaccttcttcgtcaacacctggagcaacctcaactacaataacaacaacaaaatacatagaagaagatttaaaaaccctaaatatctctaaatcaaaacagaaatgaaaatcgagaaacgtgattggtggtgattaccggaatcaagaaaatttaagaaagaacggacgattttccggcagagaggagagtctgttgttagtttcgccattggaggaagagagaaagagagaaggagaagaatctggtttcttcttctctgcgatgaaagtgttcgttgaaggaggcaattgaaaagtctgtctggatacaaggttattatagttctggttgggtatagagttatattaagctgattaacaaacaaataaactatataattttacgtccttgtcctcatctggttccgctaattttagcctgttggacgtcctcgcgtcccagactgaagaagtgatgagtagggctgggaaaaaaacccgaaaccaacaacccgaatcgaaattggcccgaaaagttggatctaaaaccgaatctgaattcgaagatttattctattaggtcttaaattcttctatccgaaaaatcaaacccgaacccaaaactaaaaatacccgaatattttaattgaaaatctaaattttacctaaaacctgaaattttactcaaaaatccggatatttacccgaagttccaaaatagggcccaaaaatctatacccaaactaatccgaacccgattagatgcgaaccgaaatcgaaccgatattttagatttatccacctgggttctaaacttttctacccgaaaaatctgtaaccgatcgggttttaaccgaacccgacccgcttacccgaatgcccatcccactgacgagtgtatatcacagagattaccactggacttgcccttcttctgagagaaatg

SEQ ID NO: 24456 - DNA, 3000 bp, Unknown; identical to SEQ ID NO: 24455
  misc_feature (1)..( 3000): 2750-1469P.txt file - cDNA_ID_2177299; gDNA_ID_2926143; Annot_ID_139015

SEQ ID NO: 24457 - DNA, 1089 bp, Unknown; identical to SEQ ID NO: 8558
  misc_feature (1)..( 1089): 2750-1469P.txt file - cDNA_ID_2177299; gDNA_ID_1971817; Annot_ID_176048

SEQ ID NO: 24458 - DNA, 1085 bp, Unknown; identical to SEQ ID NO: 8314
  misc_feature (1)..( 1085): 2750-1469P.txt file - cDNA_ID_2177299; gDNA_ID_1971715; Annot_ID_175182

SEQ ID NO: 24459 - DNA, 3003 bp, Unknown; identical to SEQ ID NO: 19767
  misc_feature (1)..( 3003): 2750-1469P.txt file - cDNA_ID_2177362; gDNA_ID_1971819; Annot_ID_176069

SEQ ID NO: 24460 - DNA, 3003 bp, Unknown; identical to SEQ ID NO: 19767
  misc_feature (1)..( 3003): 2750-1469P.txt file - cDNA_ID_2177362; gDNA_ID_2926199; Annot_ID_201721

SEQ ID NO: 24461 - DNA, 3003 bp, Unknown; identical to SEQ ID NO: 16662
  misc_feature (1)..( 3003): 2750-1469P.txt file - cDNA_ID_2177390; gDNA_ID_2926199; Annot_ID_201732

SEQ ID NO: 24462 - DNA, 3003 bp, Unknown; identical to SEQ ID NO: 19753
  misc_feature (1)..( 3003): 2750-1469P.txt file - cDNA_ID_2177397; gDNA_ID_1971819; Annot_ID_176086

SEQ ID NO: 24463 - DNA, 3003 bp, Unknown; identical to SEQ ID NO: 19753
  misc_feature (1)..( 3003): 2750-1469P.txt file - cDNA_ID_2177397; gDNA_ID_2926199; Annot_ID_201737

SEQ ID NO: 24464 - DNA, 3000 bp, Unknown; identical to SEQ ID NO: 8587
  misc_feature (1)..( 3000): 2750-1469P.txt file - cDNA_ID_2177491; gDNA_ID_1971820; Annot_ID_176112

SEQ ID NO: 24465 - DNA, 3000 bp, Unknown; identical to SEQ ID NO: 8587
  misc_feature (1)..( 3000): 2750-1469P.txt file - cDNA_ID_2177491; gDNA_ID_2926158; Annot_ID_198543

SEQ ID NO: 24466 - DNA, 3003 bp, Unknown
  misc_feature (1)..( 3003): 2750-1469P.txt file - cDNA_ID_2177502; gDNA_ID_1971820; Annot_ID_58300
aaatgagatggtggtttgtgtttctctttgttcagcccatattcactgtatttcgtgtaacaatttatttgtgactatagtttggtacattatatggttcgttccatctagatattctagaacaaaacgaaatttttaggaataattaaaaattgttgaggggattcggtaatatgtaaagtgtatagaaaaagatctaaaactatagtgaagtagtttgaaaaggggacataagatacaactttcggctgtatatttaataaacagaatggatttagtattaaggagtttataaaatatatattcgaccgttcagaaggatatatagccaatgaaagcccaaaagcttgtgattggtgaaaatttgttacaattttttggtgaagttaagcttagacaaaagtaaccaaaagtctaaaaggtttattgtgcaaaaagaagagaaaagaaaacgaagagatggagttctaatacatattatatatctgatgaagacggcgaaataaaaagaagaggcaaaagtatttaggagaaaaatgtaaatgaagacttttatatttcgagttaattttcaatgtacatactgttcagatccaatctaacaactcttttacctctagttaaaccacttaacacagctacctcatggaccatggtgagtcaaaattggtgatataaaggtgtgtttacttttggtgatttgtttttagctattaaaataaatatacgattttttattttttatttttttgacggcaaatatacgattttgttttgattgattattttttataaatcaaaatattattacagaaaaaaaattataagacaaactaaagggtcaattgcaaaactagccatatttgataatttaattaagaatatagcatcatatacatataaattaaaaaaatagcatataagggttgggaaaagacaattttgatgtgcaatagttgatgagagatgatttactaacacttcatttagttttcatctatttgtatgtttttgttatatatcttttccaaaaaattgattctaattatgaaatttataagataaaaatttctgcttttttctacatacaacatagtttaaatttttaaaatcggatttgtatttataaaatagtaaaaaatgtttgtaagtaaatttatattgtactatttatgatgtatagaaatagaatgttgtactatactattttcataaatcattcgtaatttagttttaattttagtataaaacaaaatattttaaattaaataaagtaatagtggtggtagtggtggtgagatagtagtttatgttgcaatattacctacgataatcgtaaaagataaaacatagacgatttaaattaccgagttaaagcgatatgatccccattaaaaaactataccctaagagatacaatattgggaacccaagcaagcaaattaactgttgtagtgacggtaatacgattgtagtgacgacaatacggttatagcagtgagccactgataaggataatggtgacttggtagtagaggtaatgatgtaataatataggtgataattgtattatgaattttattatgtgtaatatttttttttgttataatagaatagaaagtacatatagaaaatagaagtaaaagacattaagagagagattaagagatagagaaagggagagagagaaagagagagagggagagagaaagagagaaagagagaaagagagaaagagagaaagagagaaagagagaaagagagaggaagggagggagagagagaaagagagagaggaaaagagagagagggaaagagaaagaaagaggaagggggcaaaattgtgattaatacacaaaatataaagaatatcatctagtttttgttttgatggtactttcttaattataaatttttttttgttagatttataaattaaatttccccaaactaaaaggttagaccaaatataatttcttgcagattttttctttgttttgagcattaatgtattatttttagtgtatcaaggcaattagatggtgatataagtctaagaatttgaagtaaggtaaatggttaaacgtccaactacgaaattcgtgtaattaattataatataccttaactgcctaccaaatactaaattatagtgcaactttactaaagtttacataggttcgagaagtcattagcatttgacatattaggatttcattttacacaagctttcgagaagataaacatgtttgacttgtatacggctgttcaacgactcttgacgaaaactcaatttttggtatttcaaattgcttgaaaatctgatgtaaaagggcaacaactacacgatatgattcaaactactatcaattttctttataaaaaaaaaaaaaaaaaaaaaaaaaaaaaactagactaatttttatttgtgtactgtatacattattttctaaaacaaatgtctagacattatagtattttataaacacttacacaacaccaaatgtttgtcttaaccccgactaaaaaggacatatgtgttgttaatgctggatcaccggtggttttgttagtgtctacccttatttgtatggaaaaacactgccatagcccataaggtaacttataaggacatcaaagcttttggtgtttgactgcttaaatgttcagtctccagattccagcacatgcatttctcgaatacttgactaatggtgaagctagcattttttaataactttgccttaccaatcatggtggttggcggaattaatcatggtggtaagcgagagactttattttatccaaaaaaaaaatgagagacgtaaaattagaactatttttagttataatagttatattttattattttgtctcaattattctccccgcccctctatgtagacgtgtgaatattagagagattgataacgaactcctcacaacatcatatctcaagttcaccacccaaaagaaaaaacacacacacatcttagagagatg

SEQ ID NO: 24467 - DNA, 3003 bp, Unknown; identical to SEQ ID NO: 24466
  misc_feature (1)..( 3003): 2750-1469P.txt file - cDNA_ID_2177502; gDNA_ID_1971820; Annot_ID_176116

SEQ ID NO: 24468 - DNA, 3003 bp, Unknown; identical to SEQ ID NO: 24466
  misc_feature (1)..( 3003): 2750-1469P.txt file - cDNA_ID_2177502; gDNA_ID_2926158; Annot_ID_139591

SEQ ID NO: 24469 - DNA, 3003 bp, Unknown; identical to SEQ ID NO: 24466
  misc_feature (1)..( 3003): 2750-1469P.txt file - cDNA_ID_2177502; gDNA_ID_2926158; Annot_ID_198546

SEQ ID NO: 24470 - DNA, 3003 bp, Unknown
  misc_feature (1)..( 3003): 2750-1469P.txt file - cDNA_ID_2177519; gDNA_ID_1971820; Annot_ID_176122
ggtatatttgagttttgagaaaccttagacttgaaccaccagatagaccgtgaacaagtctaataccatcttaacacatagtggccatatggaatgttgggacttatttgattttttagtcaagatcgatttttatggattttagcttgaggggttccgtatgtatagtaggtcacaaacttatggtcaaatatgaaatcaagtgtctaattaagtcattatcgaaaggttttattatttgagaagttttaaacaccatgattttcatagaaattcctaactgaaagaaacaaataaagaaaacggttatacacaaatttgtacataatttcgttaaacttcctccaaattcgatggaaagaaagagtcatgcaccggatgacaaacccatacatgcgtgtacagttcgatagaattcgagaatgggaaattccattgtcggcatttgttattttgtttacttgcacaaaataaacctttactaagctatttcatttcgatctcattttgtatatttctatctagcttaataagctcacttgtgcatgaatcctattaactttggattctcctacaccatcctcagaaaaatgagttccacattcttttcttttatactcttttagttcccctcttgttttcattaaccaacaagagaacataactaatttcttacagcaaaaatcttctttctatacatgatttgtatacacaattagtttcataaatacgaacgaaaatagtttcggagttacgaatattgcaaacaaagagaaatgataaaagaagtagagatctaagaaaatgacgggtaaaggagcgtgaggagagtcgatgattggctccggtggggttggagaaaggatgcacaagagacataaaagtgtctccctaataggttaactaaagaattgttgcatacgttttcactttcccccacatcttttctaatcgaaatttgttgattttgacatataatgtttataaggttaagaagattaattttaagtatattttgtatcaccatccgtataatgtgagtataaatcatctttccttcaagatcattctgaactttaagctagctctcaatcaggtgagctttttaatttcttcttataatcatatttctaaaccaataattaacaaaaggccaaaacttattaacagtttcctccaggaattacgaaagaagaaaaatcagaaagagtgatttgcatatacagatcaatcacttgtctcatccttaatattcactcaacgaaaaagtttgtattgattgagttgagtattgtataatgtctaataatgatatttacaaaatgtatatttatatatggttgaaatcatgagtacgacatgattgctattatgagatccacaactatatatacaactaattcataaatattttacctgtttcaaaataataaacaaatagaaaatgttatagcatgaattagagttatggaaaaaaaattatgaatgaaatttatggataaatgaacaaaacaaacattaaaacaaaccccccccccccccccccccaaaaaaaagatacatttaaatccaccattatttatgtaacttatgttttttagattgatgcatggactgaaataataatccaacaacgccgtacgtaatttaacatttggcgaccatgcatgatgatgtggctggtcaactagtcaccgtaattggtgcttcagaacaaaccaaaaataatcggaaattgagaaaatactattccaataaatccggcataaaaccagtagtgacccatttagtttccgtacggaacacactgccttttgatgacttggcattttcaagctctctaattcgttaattgcttagttaattttcgttaaccccactaaccaatcacacttctgcgtttcctttctcggtaaacacatctgcttctcctactttaggatagtaataatatattttgtgacaatattatattgtcccatatttgatttaacttttgcttagtgtagaccaaacttgaagtggtgaaaaaataattacccagaaaaaggctgattgtagtatagaaaatataaattttgctaggttgatttggtttaattagccgtttaaaattacaaaatcttcaacgttttattttttcaaacatttgtgtccaacagtttttgcaaggtatttgtttggtttggggtggagatttgtctacattgaaaagaagcaactatcactggaaaaaaatacgtaaacctaaaaatagtaggagtaaatttatttttactataaatgttgagtgacaaagatattgaaaagctttcaactttaattttggtagctaggcgccaattgcaggttctccaatttaaaattttctcttttctctttattttttttacgtctaagacatttttaattttctcctttatcaaaatactgtatataacttatttattttagaaaatgttctcttttttatttatttacagtatcttgaatggatcaagataataatcattcgattaggaaacctaagcaaagttagtgagagtaagtactaagtaacatttgattatacagaaatgtaaaaaatcgatggtttaattcttctacggaacgaattttaataataaggattaataaagaggattagtactttatacacatgagacaagaggcggttacggcagttatgaggatttggttaataattacggcgttagaattaggggaacggaagggatccgaggatctcaacatatcaacggctaagattgtaagatcaaaaagtagcaacaaacatattccgttaagtagcggcgtgtgttaacgttaacgttactttattgcgtatatataaacggagacggtttccttggagcttgtgcacactaaatctgtcactcttcttcttcttcttctacttttctctctcccggttattttcccagaaaaagtgcgagaaaattccgttgagctttagagaagaagaagaagaaagcttcaatg

SEQ ID NO: 24471 - DNA, 3003 bp, Unknown; identical to SEQ ID NO: 24470
  misc_feature (1)..( 3003): 2750-1469P.txt file - cDNA_ID_2177519; gDNA_ID_2926158; Annot_ID_198551

SEQ ID NO: 24472 - DNA, 3003 bp, Unknown; identical to SEQ ID NO: 19003
  misc_feature (1)..( 3003): 2750-1469P.txt file - cDNA_ID_2177531; gDNA_ID_1971820; Annot_ID_176127

SEQ ID NO: 24473 - DNA, 3003 bp, Unknown; identical to SEQ ID NO: 19003
  misc_feature (1)..( 3003): 2750-1469P.txt file - cDNA_ID_2177531; gDNA_ID_2926158; Annot_ID_198555

SEQ ID NO: 24474 - DNA, 3000 bp, Unknown; identical to SEQ ID NO: 8668
  misc_feature (1)..( 3000): 2750-1469P.txt file - cDNA_ID_2177702; gDNA_ID_1971833; Annot_ID_176329

SEQ ID NO: 24475 - DNA, 3000 bp, Unknown; identical to SEQ ID NO: 8674
  misc_feature (1)..( 3000): 2750-1469P.txt file - cDNA_ID_2177714; gDNA_ID_1971833; Annot_ID_176332

SEQ ID NO: 24476 - DNA, 3003 bp, Unknown
  misc_feature (1)..( 3003): 2750-1469P.txt file - cDNA_ID_2177759; gDNA_ID_1971826; Annot_ID_176293
accacgaattcatgagacagttgttaaaaaaactgaagttttgatccctattaaaacagcatattttataattttttaaaattttataaatattgattcaaatacatccaccatataacccaattccaaaataaaacacgttctgtaatttctttacccgttccatgattttttttttaagtagtaatttttaaaatttaagaattatattttatatataaaagttttgcaaattgtatcattctctaatacatttatattttatagtttaattttatatatagtaatattatacataccacataacatttttggttttatataattttttctaaattaggatgatttgatatgtttaatattagtggtcttaaaaaaataataaattaaagatttaacccatattgaaattaaattaaattaattaaaatttagatatcaaatcttatatgttgattttgattggctattatttttggaaattaataatgtatttcgttttttaattaatttaattaattaaattagtatttgactttttaatccttaaatacataaattaatttactctttaaaattttatttctaatggcatacctatgtaattacttacaaaaattaaggttagatttaaaatgtacttcccaaataatatagtaagatatcatcaacttttatttttgatttattgtctcttaatgaaattattcaaggagtgtgtgcacctcacgccactcacaccaattaatacctatagactttggtctaatgtaactggaattggtccaaaaattagagaagacaagacctctttacatgcttccagagctaccaacaaacccaatagaaattttgttgttgcaacaatctctttaattaatgtacaagtttctttcaatcaccataaaccttgatttcttagttttttttcccacaaattctaccaacaatttattgtttttctttttattatgttcttaattctgatctttctttggtgagttttttttttttttaattttgataaagaaaagataagtttgtgagtttaaacactaaccctgttaatttttcttcatcacattgttaatgatgcgttgacataggaacctttttcctataccacaaaaatttttcttttttttttctttttttgtgtgtgtgtaaaactccacaaaaatttaactaagagttaaaactgatgaaaaatcttaattttttggtaagatttatagaaaaatgaaaaaggttttttacgatttgttttaattaactatagataaccaccttatttagatacgacgaccaaattaattgtcgtttggttaaaggtcataagagtattaattggagccgtcagattatttattgacttaaatatacctcactacttttacatttctgcattatctctacataccatatattataagacttaatttcggatatatatgtgttaccaaaattgaaattctctcatttacatatgtttcctttaaaatttaaaacatgattttacccacttgatgatcacgaagaagaaaaggaaatcaaaataagatatgatgtactatatgaaattgcgacttgatgattacaataaaggaaaaataacataatcaaaaactagattaaattcaattttcgcatggaattacataatttcattataaaaaaaaaataacatacaaaacttttaatttaaacgtccaaaaaccctacattattccaaaaaaaaaattgtttgaaagtaagaaagaaaattaatacaaagtgagagagaaatatgtttaggtgacacgagtttcactctcaattccaaagacagaccaatcaacgaacaaaacccattttctctgatcgattaggccacgacgtttcctgaggtgcagggcacgagtcgctcaatctctctcttcttcttcttcttttcacgaattttctccgaaacttggtttttattcctcaaacccataaattagggttcagtttttaagcctccgtcttcttcttcttccgtcgtcgtagtcgaaaggttagttcgattatattcaaatctttactcactacgatccttaaattagtgggtcgttttcaaaattttgatttgattcgattttccttggtagaccataaaacctagaaatatacgattaggttattcaattgctgtcgatttctcgatgtaaataggtttcgtttggtagattctagaaacttatttaatgtctatgatcgttgctaggttttgtatcgtgtagtgattagtttatcaaattcacttttgttttgagttgttacctaatttagttttagctgattttgatgaagtgggaataagaatctggttatagtggtaatgatgtgtttcctctgcttataggtggttttagctatatggatatcttctactgcaaatactcttcaaaacggatgctttgaagccttgatactaatttcatgcgttctatatatgtgcatcgtaaggaagtaatgggagagaatcgtcagattagatcacgttcttggaatagaatgccaactaaaagatgcagtgcaaatggcataatggaagagtttattctggtagatgatgatgatgttatcattcttgattttcctgagtcatctaaacggaaagctccgggtacatccagaaccaggaaggagtccattatgccgagagtgattagcattgacgatgatgatgatgagacagaaaatgttcagaaagctgggagtagttcaagcggtaacttgcaaacatctgcagaagtggataatgacgattgccaattcattcaggagaagtgtgctacttttagattttcaaaatgcaaacagactttctctacaatgccctctcatggtattcgatttggtttaggctctgatacttatagtgacttttccgagagtgactgttctgattgtgagattttagaagggtctcatagagatgtccgcgagcagtgggaacaagcagctctcttgagaaaaatg

SEQ ID NO: 24477 - DNA, 3003 bp, Unknown
  misc_feature (1)..( 3003): 2750-1469P.txt file - cDNA_ID_2177763; gDNA_ID_1971833; Annot_ID_176339
gatactaattaaattaattgatttggaagtgttttttaacttggaagtgaagtgattaattgaattaaatattaatatagtaatatttttcgtgaaagtatagaattttttttttcgagaaattaataacagttcatttaccatactgagaatgaatatggtaatataaatttttcatttcgaaaaatacgaaatatgtttaaatcatttcttagtataatttggtatattgtattgaactgttaaaaaaatgaaggataggatgaacatttttctcaaaaaatcctaggtttgaaattgattccttcatttttgttcttaatttaatagaaaacttgttatagtttttcctgattttaaggttataatttttaaaaatatctattcaacgaaataattcttttaatattttatatttttaattataatttcttttattattatttttaataccaaggtagtaaaacattagtaagttacataataagttaattttgaatgaaagttacaccactcatcctgaagaattagtctgatggtaaaactggatcatctctgattatcaatataataaataaaattgtacagtatgaaagaggaagagaaagatactcatatttatgttttaggtaacattgcattaaatgaacaaaattgtctagtaattgaattttgcaaataaacaaggcgcgatctacggagatatttgcgattataaaattccacgtacatgtttataacaacaacaaaatgcaaaaataatggagaaaatttaataatttcatgataatacggaaataattacgacgatgatttgtcaatgcattcaaccacccataatttttcggcgaaataattgattttctatcaatccaacagaatcacaacgttttaattttctataactctaaaattaagaatcaaagaaggaaccaaaaggatggtattaagtacaatgatggttctattgtattttggctttaaattattttttggtagaataagttattttctaaaattgaaatatctgaagtctgatcgatttcggacttatagctagtcccagaaacattcagtttatatatatggtcagaaaaagaaactagactaaaacaggaaaaaaaaaatgtcgtcgtcgtcgtctctaataattaagttgaatttggcttagctgaatgtttctggcgttgtccaaatgtgggtgcccaacaggcaacgctcacgtggttctttctcaataccccaacatttatatgtataagttatcctcttcttcttaatatacttatgcttcttaatacgcgtgggttagtttatttgtgtcaccaaaatatttttgaaaacgagactagctagggataaaacgtctttgtggatgaataatgaagttaacatatataagaaaccatgggattttaacaaaaaaaaaaaaaaaaaacatggatcccgtgacagtctgcgcgcgcgcgcgcagcatagtagaggccaagagcgaatgttatttgattcacttttgtttggttcttttgtcaacattcactctttatttcgatactcttgcttccgtatcatggatttttttattacgttgacaactagaatatatgttttattttttttgaaaaagatactatatgttttatcgttcaaaaaagatgagtcaagtactacaatttacctatcattttttttttttgttaaaccataactttcaaattgatccaatgtttcaggacacttactttcaaagtttatcaacacctattgcattttattttcttaagatattaaattttctgtaattgtttatctaaagcatggttagtattctgattttttgacaaaaggaaaataacgacaacatcactaatatttcaacgttccttttttttcctccacaaaattcaacgtttcattttacgcgcacagatttttattttttctatgtatattttgtaacgatttttttaaaaaaatatttgtaatagttattagtatatgctaaatattgaatacaattaatttgctaatttcctttgtagttggtcatgacatgatatctattggtttatgctagttttattgttattcaattttaaactcaaataatgcatattattgatgaaaagatatactacaatattaaacaaaagttaacatagttactgaggaaaatggaatacggagaaattaagaaatgatatattatgtgctatattattattagtcgcaatgatatctttataataaaacacctattaaagaatatttgtcgtttccagttacatctaagatatataatatatatttttttcctagcataaattcccggaaacagcatgtgatgaaggaatatatcttgaagtttatagttgttgaccaaaaaaaacattaattctattatttctatagttataaatttagttagagtatgaaaaacaacaccatcttattcatgataaacacaagacgtataaacacgacaaaaattctttaagaagagttttatttcgatatgattcaaaaagtttcaaaagctgttatagttcgatttcggtgtgttatccatataactaaaaagttggacagctttcattgaaatatactactcaaagaataagaaattactagatttattatgttgtctcatcatgtttatgacttatatgagtatcaacgtggatgaaagtggtcgcttcttcctcatcggaaatcaaaataccgcatgttcatacaaatcaagaaaattataatttacaaatattgtaaagagctaattattttataaacataggatatcaaatgtggacctaaaaaagtttgaaaatgcaccactcaaataattaatgcatacagccaagcaagtaaaacattagaaagacaaaaaataaatacttttaaacaatttatattatatagtttttcatctcaaaactcaacaatataaaccctattccaccatcttctattccctcacaaacaacaacattgttaagaataatg

SEQ ID NO: 24478 - DNA, 3003 bp, Unknown
  misc_feature (1)..( 3003): 2750-1469P.txt file - cDNA_ID_2177771; gDNA_ID_1971833; Annot_ID_176340
cctcacaaacaacaacattgttaagaataatggcaccaatcaaagaattcatatccaaattctcagatttcaaaaacaacaagaaactcattctctcctccgccgcaatagccttgctattattggcctccatagtcggaatcgccgccacaacaacaaaccaaaacaaaaaccaaaaaatcacaactctatcttcgacatcacacgccattctaaaatctgtttgcagctcaacactatacccggagctctgtttttccgccgtggcagccaccggaggaaaagagctgacgtcacagaaagaagtcatcgaagcgtcacttaacctaactaccaaagccgtgaaacacaactacttcgctgtcaagaagctgatcgcgaagagaaaaggtttgacaccgcgtgaggtcacggcgcttcacgactgtttggagacaatcgacgagacgttagatgagctccacgtggcggtggaggatcttcatcagtatcctaagcaaaaatctctgaggaaacatgccgatgatctcaaaacactaatcagctcagccattactaatcaagggacttgccttgacggtttctcttacgacgacgccgataggaaagttcgtaaggcgttattgaagggtcaggtacgtaaatagttttactcttttaaaagtttagattatagtattatcttcgacatacgacttactcggtaaaataatgtagtgattatagttggtccataattagagcacttaactcttcaaatacgtacccaaaacatttgttttactaggaaatcttttaatatgtaacagctttataatattgaacggtatcaaaacaggtacacgtggagcacatgtgtagcaacgcattagcaatgatcaagaacatgacagaaaccgacatagccaactttgagctaagagataagtcttcaaccttcaccaacaacaacaaccgcaagctcaaggaggttaccggcgacttagacagtgatggatggccaaagtggttatccgttggagacagaaggcttcttcaagggtcaacaattaaagcagacgctacggtggcggatgacggaagcggtgactttacaacggtagccgcggctgtggctgcggcgccagagaagagtaacaagaggtttgtgatacatataaaggcaggagtttatagagagaatgtggaagtgacgaagaagaagacgaatataatgttcttgggagatggccgtggcaaaactattatcactggaagtagaaatgtcgtcgatggaagcaccactttccactccgctactgttggtaaatactgttcttctttgattttatttttaaggaattaagtaaacagtagtatcacgtaatagctaacaacacatactgacatacacatttgtttgtatgtaaaaagaatgtaataatgacgcatgtgtaacgttttgttggtagatgataacgtagacacgatcgtaactcatttccacggttaaatgatagtactgttttctattgactgtagctgccgtcggcgagaggtttctagcgcgtgacatcacattccaaaacaccgccggtccgtcgaagcatcaagcggtggctctccgagtcggatcagatttttccgctttttaccaatgcgacatgtttgcttatcaagacacactttatgtccactcaaatcgtcaattctttgtgaaatgtcacataaccggaaccgtcgatttcatcttcggaaacgcagccgcggttttacaagactgcgatataaatgcacgcagaccaaattccggtcagaaaaacatggttaccgcccaaggacggtctgatccgaatcaaaacacggggattgtgatccagaattgtcgtattggtggcacgtcggatcttttggccgtgaaaggaacgttcccgacgtatcttggtcgtccttggaaggaatattcacggacggtgataatgcaatcggatatatccgacgtgatccgacccgaaggatggcatgagtggagcgggagttttgcgttggacactctaacttatagagagtatttgaatagaggaggaggggcaggaactgcaaatagagtgaagtggaagggctataaggtaattacaagtgatacagaagctcagccatttacggctggtcagtttattggtggtggaggctggttagcgtcgaccggttttcctttctcgttaagtctttgaaattaaaagattgacttattattttaataaacattgtatttctctatctacatgtatcattaaatcgatgttcatatatgattctcaagttgaaccaagtcaatgcataactcgggctggtatagttttaaggcctaaataaccggactttacggggtttattgggttgattacttgattctaattcataaattaagataaaccgggaatcaaacacaatgttggtgttgtgtcacttgtcggcattaaagccctaaagagatagagatagggacgccacatgttagagacgcacatggccattttaatatttgctaagataatgttctttgttttcttttaatttgtagacattttcatgtgtttttttttggttctctccaatgtgtatgcttgaaaaatataccgaggaacccatagaattgtaaagaatgttcgctttctatggacctactacggatgtagacgactttgacatatacataatacataaaaccattttttgtctttaaaccaaattacaatataatcaagttgattaatcaaaataattacaacgttatcatgaatcttcacatgcaagatcctacacacacacttagacgacaagaagtcaccgtggaacaagcgcgtcacgttcatcattcacatttacttaatcccacttaaaaaggcaaacaacaacatgtcttctctaacataaacaacagaacataacaaagcccaaacaatcttagtaataatcccaaaaaccagaaaaaaaggagctttgcttttgtaggaattaatg

SEQ ID NO: 24479 - DNA, 3000 bp, Unknown; identical to SEQ ID NO: 8672
  misc_feature (1)..( 3000): 2750-1469P.txt file - cDNA_ID_2177775; gDNA_ID_1971833; Annot_ID_176342

SEQ ID NO: 24480 - DNA, 3000 bp, Unknown; identical to SEQ ID NO: 8666
  misc_feature (1)..( 3000): 2750-1469P.txt file - cDNA_ID_2177814; gDNA_ID_1971826; Annot_ID_176300

SEQ ID NO: 24481 - DNA, 3003 bp, Unknown
  misc_feature (1)..( 3003): 2750-1469P.txt file - cDNA_ID_2177841; gDNA_ID_2684230; Annot_ID_192238
aagaaaaagagggcatattttgagatatacatgacaaatagaaaaattattatatattaagtgtacgtaaagtagtggatgcatgaataatgggtagtattaaattgctagatagctagaggagagggtaaaggcaacgctttaaagagtcggagtaatgaagttatacgagcatggaaacctgactaaaccctaatttcttattagctctcttcccttttttggcaatcgtcccatctctcacagtcatagttgatagtccccaaccttttttaaaataaacataatttaatttcggtcacctttttaagatgcagatatagatatcgtctcattatttctagtccacgattaccctattacgtacaactaattaatcttctattttcaactgatcatattctaaatttttcagttacacctctggtctaggatgtttcaagtcaaaatttgaaaatattcacatttgtctcttaatgccaatgatgagatttggtttagttttttttttttttttatgatgcaattttctattgagaaaaatggatacataaataaaacttgaggataatttctcattgtccatagttaaagtttcttagatgcaaattaaagtatcaataaaattttaaaattagatactatatcgatcagagactttgttattgttgattttggaattagactaccgtacagtggtacaaaatatatgtttaaaagcatattaaataaaaatagttagttattcatgttttcttcttgttttttttgtttttgtttttgttgttattaactaaagaaatccatgacttttattaatctatttatgtattagttctaactttgagagcaaacttcaatgtatgtatatattggttctaacattgagaggaaaactctaatcaaataaaattgtaagtaagctaaatatgtgtgtcgaagtaggaaatctaaggaaagtgaagaatgcaaaaaagttagtcactgaaagagacgtgtgattgatcacttgtctccttccaatttccctgtgggggcagtgcatgcacaaaagatggaatccatcctatagctcctcctttcttcactatcttttcaagtttctctttttgaatatattttttttaaattgattttgatttaactcaaagcccacacttcttaatccatcttctctataattagtatgccaacaaatatatatgcttgttctgtctcaaatttcaacaataaagcgtgtatagctcccaaaaagctatgttgatgagttatcactctttttatggattggactaatagtttgtctcatgtcaaaatgattatacataactcagaatccagcagtatagagaacttaacttttatatatatgttaaccctcataacctcaaacagaaaatttgtagtgcagtgtagaaaacatccttaaacataaagtaaatcctttaacaaaaaaaataaatataagtggcaaatcaagagattctgcttttgagtccaatgtatgtatagttggatgttctgaagaagatccattgttttggttgtttctctacagttaaacgatttttatatttaacttattaatgcaattgagtgaaaatttcacgatgaagaaaaaagttgtgaatcatgacaagttttgtcctcagttttgcagtgaaatcattttgcgtgaaaattttatgagagaaacaaaaaaaaaaaaaactgatcaaaagatcaggaaaggaccattcttaatttataacatgtgggcaagtcaaggcttgctggcatcaaacttgaataaatgtaatcatattcacaccatgtattgtttaatatataattttaatatcttaattggtcatctatttttgtctttttgcatcgcatatgtgtcataattaatatctgtacgatgtagaggctagtgaatataaagtgaaaacatagatatatcgatcttaaaccaatggtatcttacaccatatgtatatgcttgtttgaaaatatttattctacgaaagtattaattggattgattgttttcactctcttgagtaattttggataagttaatagttattatttttattacacatgattaaggtgtattgttaattataaatcatatttatacgaagacatggttgaataatgtccaacacagcttattttagcaaaaactaatgtacgaggagtgacatttagggtcttgatatttttgaagcaaaattaaatacgtctgcaagattttgcagagggaggcatgtactatatcatctgcaatagtagcaacatagataaaagtcataaacccctagatccggtccctttaatttaattcatatatatgatttgacataaaattacttttgttaaaaagtttgtttttacattaaattcttctatcttttttctaaatatcagtttaatatacatttgtaatttttcttgcaatccctagccagcttaatgatatcattttttttccttctttatatccagagaaattttatgcggaaacgtagattaatatcatcgaacttgttgatccaatttgttttatcttttaaaacatttacagtgattacaaaatagaatatatagcaagtaaatatccaacgaaaacacataatgtctttaacaaaaaaaaagaacgaaaaaaaaaagaaaacacataatgtcaccattagaaactcgtgtctacaccagaagtcattagtttaagatattcattttttttttttttgataagatgatattaaatgttgttaaaataaacaataaaaatgcaattatggactgcatatacacgtccaacactttgacaatctgtatcgctctctctctctctctatatatatatatgtcatggtctcactatgattgttctataaatacaagcctcctaactcataaaataagcataaccctaactctacaaagttcttctgattctttctctctctctctttctttcaagagcggttttcaatccattcgctaaagaccatg

SEQ ID NO: 24482 - DNA, 3000 bp, Unknown; identical to SEQ ID NO: 8667
  misc_feature (1)..( 3000): 2750-1469P.txt file - cDNA_ID_2177841; gDNA_ID_1971826; Annot_ID_176307

SEQ ID NO: 24483 - DNA, 3000 bp, Unknown
  misc_feature (1)..( 3000): 2750-1469P.txt file - cDNA_ID_2177849; gDNA_ID_2684230; Annot_ID_192236
ctttataaaatgaactaaattcttctgaatttcatacggaaaaacaaaataaacttatttttaacacatctcaagtcttaaaaccatacaacaaatcatatcaactaatcaacatttttgaaccttttcgtcatcattgcatcgcatagccttgccgcgtctacattatctctaacattatgaactctaatgatattagcaccttttagtatcccagcagtaacacaagcaacagttgcagcatctctttcacttgcctcaggacgaccacaaatatctcccaaaaatctcttccttgaaggtcctataagtataggtgcatgagacaatcctatactcttcttagccatctcttccctgatttttggtagctccatgacaatatctaaattatgatctattcccttagaaaatccaattcctggatcaatcataatcctccaagctggaatcccagagagttctgcttctcttactctctcataaagctctgtggcaacatctttgcatatttcattatactccaaattctctttgttttgcattgtacatggatctcctctcatgtgcatgatcatataaggaacatcagaatccgcaacaaccttatgcatgttctcgtctaaacttcctccggatacatcattcaaaatgtcagctccatttcttattgcttctaaagcaacctcagagttaaaagtgtccactgatatgagctttcccttcatctctgccataccgcgaacaacttttaaaaccggaatcagtctatctatctcttcttgactagatattcttgaggccatcggccgtgttgactgtgcaccgatatcaataatatctacaccttcagatatcatagaccggacccgagaaaccgcggtatctaccgattgaaacttacctccatcactaaagctatcaggagtaagattaagtatacccatcacataagttttcttagaaaaatcccataaatgatctcctattggtataaccctttgtataataccgtcttttccaagcaatgactcaccacctaaccgctcccacgcttggaaaattccacctgaatgcattgagagtgaatgccaatatgcaactattttatcattatcaatatcttccgttccaagcaaatctaccaaaggtgctaaaacaaatggtctttcccagattctctcatggggaatgataagtttatcagaaattatcttgtgctttccatagaacaatatgtccaagtcaagtggtcttggtccataccttaaaccattttcttcacgacccatctctttctcaattttcttgagaacgttcaagagttcatgaggtttgagctttgtgacacctcttattgcagcgttgagaaatcttggttggtcggtcacatgaacaggttctgtttcgtacaaacaactgtgtctggttacactgatcccatagtctttcatcaatcgtaaagcttctttgaaattattcattctgtttccaacattgcttcccaaagctatcacgacttcttcgaaagttgttgtttccaaagatgtgaaatctgagtcatatacaaaacatgtttcgaaggtgaaatatgattcaatacttaacagaaattagtgtatcaaaacgtaaacgctgtttttttcaacgaaaatgaaacggatgaaaaagatacgaacccattttagaataggttcctccaaaatatcagtattgtctgcttcgatctgaccttaaagtatacaaaactatgagtttagtcttagataacaacgaaacaattattagaaacacaaaaaatgggttctaatattttaagaaccaaggaagtaaacaatacttatgtatgagagaggcaaggtggtagccaattttcacctactttttttctgaacttgttgtgttatccaagtaccttctgtctttcacgctcgtcaaaagtcagcttctcttttgaattagatatgaagatctagaaaagaaaagaaaaaagagaagaaaactttgtttttagagagattttgaaattggtaatgaatctctcataattttgaaattggtagtgaatctctcataattcttttcattatctattctatcttttaccatttaaacatatatttggatagatgatggaaaattgtgtgttagtctccagctatttcattccatttttaaaaaatatcaaaattttcatagatttgttctgactacatcaattttctttcattccactcaaggcactcatggttacattaccaatagaaattaattaaccatacaaaattctaattattataactccagacgatattattttcactatatagcaaaaaatagccgttttaccataacatatatacagtctatattttttgacgaaaaataaataaatatacagtatatatatatatatatatcctcgtgttagaattgtattaagtttttcatcacaccatctttaggcattatttctatgccaatcaaatcatttactcgtaaatcatcatagtaattatgatttcagttaatcgtaagttttttgtagctttgtgatgatgagccaattaacttcacaacaaaatattttccttgaagtagttttttaatagcaaacgatttcacgaaaaactttacataacaaatatttctacctacattaaaagaatgtcatatagacaatactaaattcactagctttaaagaagaaaaatgagccgtaaataaattatagtagacagaatagggacatcttgacgttttagtattttgatcatagaatgcttgccgtttcgttaaagcgctaaacctcctcctcatcctctcccagctagctcctcttgcggtttcagagcttaaaccccaatctccctcaaaactcataaacatattgctctcctttgttcatttctgggtttacgcttctttcgactttatgggtttcggagcttagttttactacaatttcgtttggaaaagagctcttatttgatgttcatg

SEQ ID NO: 24484 - DNA, 3003 bp, Unknown
  misc_feature (1)..( 3003): 2750-1469P.txt file - cDNA_ID_2177849; gDNA_ID_1971826; Annot_ID_176310
aaactttataaaatgaactaaattcttctgaatttcatacggaaaaacaaaataaacttatttttaacacatctcaagtcttaaaaccatacaacaaatcatatcaactaatcaacatttttgaaccttttcgtcatcattgcatcgcatagccttgccgcgtctacattatctctaacattatgaactctaatgatattagcaccttttagtatcccagcagtaacacaagcaacagttgcagcatctctttcacttgcctcaggacgaccacaaatatctcccaaaaatctcttccttgaaggtcctataagtataggtgcatgagacaatcctatactcttcttagccatctcttccctgatttttggtagctccatgacaatatctaaattatgatctattcccttagaaaatccaattcctggatcaatcataatcctccaagctggaatcccagagagttctgcttctcttactctctcataaagctctgtggcaacatctttgcatatttcattatactccaaattctctttgttttgcattgtacatggatctcctctcatgtgcatgatcatataaggaacatcagaatccgcaacaaccttatgcatgttctcgtctaaacttcctccggatacatcattcaaaatgtcagctccatttcttattgcttctaaagcaacctcagagttaaaagtgtccactgatatgagctttcccttcatctctgccataccgcgaacaacttttaaaaccggaatcagtctatctatctcttcttgactagatattcttgaggccatcggccgtgttgactgtgcaccgatatcaataatatctacaccttcagatatcatagaccggacccgagaaaccgcggtatctaccgattgaaacttacctccatcactaaagctatcaggagtaagattaagtatacccatcacataagttttcttagaaaaatcccataaatgatctcctattggtataaccctttgtataataccgtcttttccaagcaatgactcaccacctaaccgctcccacgcttggaaaattccacctgaatgcattgagagtgaatgccaatatgcaactattttatcattatcaatatcttccgttccaagcaaatctaccaaaggtgctaaaacaaatggtctttcccagattctctcatggggaatgataagtttatcagaaattatcttgtgctttccatagaacaatatgtccaagtcaagtggtcttggtccataccttaaaccattttcttcacgacccatctctttctcaattttcttgagaacgttcaagagttcatgaggtttgagctttgtgacacctcttattgcagcgttgagaaatcttggttggtcggtcacatgaacaggttctgtttcgtacaaacaactgtgtctggttacactgatcccatagtctttcatcaatcgtaaagcttctttgaaattattcattctgtttccaacattgcttcccaaagctatcacgacttcttcgaaagttgttgtttccaaagatgtgaaatctgagtcatatacaaaacatgtttcgaaggtgaaatatgattcaatacttaacagaaattagtgtatcaaaacgtaaacgctgtttttttcaacgaaaatgaaacggatgaaaaagatacgaacccattttagaataggttcctccaaaatatcagtattgtctgcttcgatctgaccttaaagtatacaaaactatgagtttagtcttagataacaacgaaacaattattagaaacacaaaaaatgggttctaatattttaagaaccaaggaagtaaacaatacttatgtatgagagaggcaaggtggtagccaattttcacctactttttttctgaacttgttgtgttatccaagtaccttctgtctttcacgctcgtcaaaagtcagcttctcttttgaattagatatgaagatctagaaaagaaaagaaaaaagagaagaaaactttgtttttagagagattttgaaattggtaatgaatctctcataattttgaaattggtagtgaatctctcataattcttttcattatctattctatcttttaccatttaaacatatatttggatagatgatggaaaattgtgtgttagtctccagctatttcattccatttttaaaaaatatcaaaattttcatagatttgttctgactacatcaattttctttcattccactcaaggcactcatggttacattaccaatagaaattaattaaccatacaaaattctaattattataactccagacgatattattttcactatatagcaaaaaatagccgttttaccataacatatatacagtctatattttttgacgaaaaataaataaatatacagtatatatatatatatatatcctcgtgttagaattgtattaagtttttcatcacaccatctttaggcattatttctatgccaatcaaatcatttactcgtaaatcatcatagtaattatgatttcagttaatcgtaagttttttgtagctttgtgatgatgagccaattaacttcacaacaaaatattttccttgaagtagttttttaatagcaaacgatttcacgaaaaactttacataacaaatatttctacctacattaaaagaatgtcatatagacaatactaaattcactagctttaaagaagaaaaatgagccgtaaataaattatagtagacagaatagggacatcttgacgttttagtattttgatcatagaatgcttgccgtttcgttaaagcgctaaacctcctcctcatcctctcccagctagctcctcttgcggtttcagagcttaaaccccaatctccctcaaaactcataaacatattgctctcctttgttcatttctgggtttacgcttctttcgactttatgggtttcggagcttagttttactacaatttcgtttggaaaagagctcttatttgatgttcatg

SEQ ID NO: 24485 - DNA, 3000 bp, Unknown; identical to SEQ ID NO: 8661
  misc_feature (1)..( 3000): 2750-1469P.txt file - cDNA_ID_2177855; gDNA_ID_1971826; Annot_ID_176312

SEQ ID NO: 24486 - DNA, 3000 bp, Unknown
  misc_feature (1)..( 3000): 2750-1469P.txt file - cDNA_ID_2177864; gDNA_ID_2684230; Annot_ID_192231
ttcttctggtttggatcttgttcttgtgatatgcatcttaaagagtttcccatttttttttggttttttggtttttcttgtaaggtgtagacacgtttgtaagtgtgtgtttatatatatgaagcatgttcgtgcttgcatgtgtattgttttgattcttgatgggtgaaaatgaagagttgagactctcacgttgtgaagctgtacttaaaatgtaaatctgtttgatcgtgatagttttgacacttctgtttttcttgagactcacgaaaatgcacatatgagaaaattggtttaaagtttggattattctattacaaactaatggaaattgattgcctacaaatggagacataagaaagagggaggaacatgggagggcactttctttgagcattttgctactttgactttcaagcgcaagctatttctttacaacgataaaacatattcatcgtatttttcttgtttatatatagatcttcgtcctttgccgcgactgcgatcgactgcgactaagtgttgttctgatcgggactattgaccaatattttaggttgctaatttttaacgatttctcgcgattggttacataatgactatacaaaacgaataatatagcaatcacaaaataaattaagatacaaaatctttagaataaacaagaaattaaattattatttttttataataagttttagaatagatataacaattatattttttattttaaaatataaattctcataaattaaaatcttcaaaacaataaagcgaccaatcacatcgattgttaaataaataacaaaacaagttgctggttgcttgtcggaatcgttggcaactagtaaacggaacatgaccctagttaaaaaccgaaatttatgtaaattttttgatatagctcttctcaattcagaatcgagttctttagatgtacctaactctcactattagtttacttctaagttggttccttgaatcttaatttgtctcttgtctcttatccaagagatagagaattcattaaaataagttatctttttgagattatttacttttttccaaaaagtgtcattttaaatgttcaatgcgaaattttagacaaaattttgtttcatattttatctattaagaagagagatgaaattatataatgtattaagaaagaatataaaataaattttaaatcatcttttttatgaaaacactgtaaaaatttataaatgcaacggaaggaatatacattattcatctactcaaggtagacgaataaagagaccaacataaaaaaaacatgtgtgaagaaataaatttgtgaccgtcatgaatcatgatcttgtgcaaaatttttacaatatatattagattaaaagataagatatgattgaaaatgatgtatactaaattagtgacatattctttcacaaaaaatttttggaatcccatattgagaaatattattaaaaaaaatgattaatacatttttcaagctttgtaataaaaaaatctaatcacgcttatcaagattctttctatatcgtcgactcttctttgtagtcacacttcaaattacattgtagtctcttattaataatttttgtagccacacttcaaattttttataatgaaaattagtgttgctagtcgttgcttttgatcgttgaaccagaaagtaagatcctctttctttaacccctcttaatctaaaaccattgctttctaacgcaagactcttttactcggataatttgtagttgactatgatggaagcaaacggtctggaaaaaccaaaggtggacgcaacaaaactcgggatggctctgcaaatagcatcaagacagatggaacaagactgagaatagctctgcagaagatgacgaagatgaattcaagcaggtcagaagtcgtaggaataagaaaaatgtgaaacccctaaggttcaagcacattgatgatactctctactacaaacaccaacacaagaacacttataatttggagatttcttagaatgcaaattgagattaattttcgacattacagattcaaaaatctttacttttttaggttgccgtcgctaatttcagtcgccagcaaaaaacaaacgaatatgatttaattattaaagaagtaaaaaaagatatttgattgaaaagtaaataaacaatgaatatcttacaagataacaaaagctacaaaacaaataatcttagtattttaaataaaatatcttacaagatttacttaaatatattgatttttatttactatttaggtatctctaactaaattaaacctagattttctttatcttcaaaatttattatcattaactatatatatattcaagaattaaatatattgaattataatattaacataaatacacctaaaattctagaaacttctttttaatatcaaatctggacaagagctatagttcataagtgtcacatggtccgaaacactccgaaccctagtaatacccacacgaacaacttgtcgagtgcgttaagatattcctttttctgatttacctttttaaccctggttaaaaagttcataggtcggtcaactaaaaaaggcaaccaagtcaaagaaaacaatttttactagttgagttcggaaataagaaaagtgaaaaccaaatcctaccttaaacagaatttaggaaaatattatatatttccttcttccacatcaccgatttataccaaaatcatataatcaaggaacctctctaaaaccctattaaatcttctctctttcgttcttcttcttcttctcctcctccatcctccaaatctcgatttcccaaaaaaaaaacctaatctcgccgtactctcctcggttccatctttctctgcggccaggttttttaattgatccgaattcagatttgttttttttttttgtgatctagggtttcggcgatttgattctgaattgctctgttttgtttttgtttgtttggtaatcagtacgtgtgcagatatg

SEQ ID NO: 24487 - DNA, 3003 bp, Unknown
  misc_feature (1)..( 3003): 2750-1469P.txt file - cDNA_ID_2177864; gDNA_ID_1971826; Annot_ID_176315
ggtttcttctggtttggatcttgttcttgtgatatgcatcttaaagagtttcccatttttttttggttttttggtttttcttgtaaggtgtagacacgtttgtaagtgtgtgtttatatatatgaagcatgttcgtgcttgcatgtgtattgttttgattcttgatgggtgaaaatgaagagttgagactctcacgttgtgaagctgtacttaaaatgtaaatctgtttgatcgtgatagttttgacacttctgtttttcttgagactcacgaaaatgcacatatgagaaaattggtttaaagtttggattattctattacaaactaatggaaattgattgcctacaaatggagacataagaaagagggaggaacatgggagggcactttctttgagcattttgctactttgactttcaagcgcaagctatttctttacaacgataaaacatattcatcgtatttttcttgtttatatatagatcttcgtcctttgccgcgactgcgatcgactgcgactaagtgttgttctgatcgggactattgaccaatattttaggttgctaatttttaacgatttctcgcgattggttacataatgactatacaaaacgaataatatagcaatcacaaaataaattaagatacaaaatctttagaataaacaagaaattaaattattatttttttataataagttttagaatagatataacaattatattttttattttaaaatataaattctcataaattaaaatcttcaaaacaataaagcgaccaatcacatcgattgttaaataaataacaaaacaagttgctggttgcttgtcggaatcgttggcaactagtaaacggaacatgaccctagttaaaaaccgaaatttatgtaaattttttgatatagctcttctcaattcagaatcgagttctttagatgtacctaactctcactattagtttacttctaagttggttccttgaatcttaatttgtctcttgtctcttatccaagagatagagaattcattaaaataagttatctttttgagattatttacttttttccaaaaagtgtcattttaaatgttcaatgcgaaattttagacaaaattttgtttcatattttatctattaagaagagagatgaaattatataatgtattaagaaagaatataaaataaattttaaatcatcttttttatgaaaacactgtaaaaatttataaatgcaacggaaggaatatacattattcatctactcaaggtagacgaataaagagaccaacataaaaaaaacatgtgtgaagaaataaatttgtgaccgtcatgaatcatgatcttgtgcaaaatttttacaatatatattagattaaaagataagatatgattgaaaatgatgtatactaaattagtgacatattctttcacaaaaaatttttggaatcccatattgagaaatattattaaaaaaaatgattaatacatttttcaagctttgtaataaaaaaatctaatcacgcttatcaagattctttctatatcgtcgactcttctttgtagtcacacttcaaattacattgtagtctcttattaataatttttgtagccacacttcaaattttttataatgaaaattagtgttgctagtcgttgcttttgatcgttgaaccagaaagtaagatcctctttctttaacccctcttaatctaaaaccattgctttctaacgcaagactcttttactcggataatttgtagttgactatgatggaagcaaacggtctggaaaaaccaaaggtggacgcaacaaaactcgggatggctctgcaaatagcatcaagacagatggaacaagactgagaatagctctgcagaagatgacgaagatgaattcaagcaggtcagaagtcgtaggaataagaaaaatgtgaaacccctaaggttcaagcacattgatgatactctctactacaaacaccaacacaagaacacttataatttggagatttcttagaatgcaaattgagattaattttcgacattacagattcaaaaatctttacttttttaggttgccgtcgctaatttcagtcgccagcaaaaaacaaacgaatatgatttaattattaaagaagtaaaaaaagatatttgattgaaaagtaaataaacaatgaatatcttacaagataacaaaagctacaaaacaaataatcttagtattttaaataaaatatcttacaagatttacttaaatatattgatttttatttactatttaggtatctctaactaaattaaacctagattttctttatcttcaaaatttattatcattaactatatatatattcaagaattaaatatattgaattataatattaacataaatacacctaaaattctagaaacttctttttaatatcaaatctggacaagagctatagttcataagtgtcacatggtccgaaacactccgaaccctagtaatacccacacgaacaacttgtcgagtgcgttaagatattcctttttctgatttacctttttaaccctggttaaaaagttcataggtcggtcaactaaaaaaggcaaccaagtcaaagaaaacaatttttactagttgagttcggaaataagaaaagtgaaaaccaaatcctaccttaaacagaatttaggaaaatattatatatttccttcttccacatcaccgatttataccaaaatcatataatcaaggaacctctctaaaaccctattaaatcttctctctttcgttcttcttcttcttctcctcctccatcctccaaatctcgatttcccaaaaaaaaaacctaatctcgccgtactctcctcggttccatctttctctgcggccaggttttttaattgatccgaattcagatttgttttttttttttgtgatctagggtttcggcgatttgattctgaattgctctgttttgtttttgtttgtttggtaatcagtacgtgtgcagatatg

SEQ ID NO: 24488 - DNA, 3000 bp, Unknown; identical to SEQ ID NO: 8679
  misc_feature (1)..( 3000): 2750-1469P.txt file - cDNA_ID_2177971; gDNA_ID_1971851; Annot_ID_176396

SEQ ID NO: 24489 - DNA, 3000 bp, Unknown; identical to SEQ ID NO: 8679
  misc_feature (1)..( 3000): 2750-1469P.txt file - cDNA_ID_2177971; gDNA_ID_2926180; Annot_ID_200152

SEQ ID NO: 24490 - DNA, 3000 bp, Unknown; identical to SEQ ID NO: 8682
  misc_feature (1)..( 3000): 2750-1469P.txt file - cDNA_ID_2177983; gDNA_ID_1971851; Annot_ID_176400

SEQ ID NO: 24491 - DNA, 3003 bp, Unknown
  misc_feature (1)..( 3003): 2750-1469P.txt file - cDNA_ID_2177993; gDNA_ID_1971851; Annot_ID_58415
gctaaagcagcctgttctttgtacattataaaccttaaaatctactaaacaagtactgatgaccccaaactatattagaaaatctgaagctacaaatttagaaagtattgaacaagaagtgttaccgcagtaagaggaagctcagggatgtcaaaccaagaaggcatcactgcaccatctgcacaagacaaattaagaggcaaaggcacaatatttagcaagtacataagatttctcatgaaaaagtatgaatctttactcaattttgtccactgcatttaccaatgagggaggatttagatgactaagccataatttgataaatgaatcacacatcaaagcactaaatccaaaagaaagacacactagtatcattcctatagtaaggactagacctaaaagttcgaattatttaggagaatgcaaatttgttcagctcaatcaattcaaaaacgatgatcaaagtcaacgcctagagaagaaagaaacgaacaacaccaaaatcagaaagtaaagggcaatcatacaattgcaagagactggatttggtggagcagaagggaagagccacttagtgtttctaaactcctgggacctgaaaagtgttttgatgggttcgttggcaggtccggaatcacctagcccgtgaagccataagatgaaggttcgagccatggagtctcggttccgtaaagcagaggtagatgatacgtcagatttgtttaggaagaagaatgcgaagaagaagacagagctcaatagtgcgatagtgagaagaacaatcggcttcttcagtctacttgttcgcatgccttcaccattttctctcgagatcgatctctcaaaaaatgttttgttttggagaatgtctaaatgactaaaatgccctcaatgttaaaagattatcaaatttgttggctatgttttatgttctcatgttcacactcaagattgcaaatgtattccaatgcttgcatatacataattcaaatcgatacaatcatactagaaggacacagcaaacaaaaccatacgaggagcttagaattgtcaatcttcttcttcttgtcttcatagacgacatgtaggtattattattaccttcagtggaacatttctttaagacaattaagttggagacaagtagacgacgaacctttcaaccgtctcttgatccatgactctatatacttcagctccttattgctgatcgagtgcccgagaccaggatatgcctgcagataaacaaatcaccttagaagtataaataattgtacattggagttctatcatgcatttgtctcgaaaaagagttttgatttgaatataccttgaattcacaggtaacaccggcttctttgagaaaaggaagagcagcttgaccagcttcaaagagtaccattctgtcatcagtgccatgagaccacaagattggtgtctgcatattgcaaagtctgaagactcagaaacacaaaaacattgatcaacgtttataagaaaacataagtgaggaaccttcttagcctcttcgggaaactgactgatgattgaagaagtgaatggaacccatccacttaggacggcacctcctccaagagtttttgggtaaagcagaacactagccaaggttaatgctcctacaagaaaattcttattaggcgccacaatgcaaggttcttaagacataagtggattcagaccgatataaaaaggtctctctacaaagaatattgaaaagacaaagaattcatgaaaagagaaacaacctccttggcttaatccacagataaacacgttttctggattagttccttctgcaatctcctggtctataatggcatgaacattcttaactgcttcaagcacgctgctttcatcaattggagagccctaacatacataaaagttgcacacttattgtgatttcataaaatctcttgaaaatgcaagagtgctctgctctttacacaatctgctgaacaagtgttgattctagataatgcgtcataaggtttaacaaaccaaaaggtgctaacttggagctaccagcccattaactatttgccaattcatactataagaggcgttagatagatcaagagtgaagtgaagtaataccactttaaaaggaagttcaggaacgtcaaaccaagaacgcatcaccgcaccatctgcacaagaaagtatagaaagacataagcttttttcagacacatatggattaagagacatgacaccaacagataccacagagaaatcaaagataatcaaattgtgtacatttgactaaatgtctttcaaattaacagaatgtgacaaatctccttcacatcacagaggcaaataataacgctaaatcaaaatggcatgaagtggagaccgaaccctgtagcccaaatcaaaccataaaccatgaacaacgaaatcaatgaatgcaaatcgaaaatagaaaaggaagaacgtactgttgcaggtaaccggattgaatggagcagaagggaagagccaactagcgttacttaactccgaggatttgaattgagtttggatgggttcattagcaggtccagaatctcccaacccgtgaagccacaagatgaaagttcgagccatcgtgcttgagttccgtgaagaagaagaaagaaagataaagaagatgaaaagtgctcactatcgataggcttcgtctgtgtattccttcgcatgttaaaatcgcctgaaactttgccatttcaatggcgattttgtctctcaaagtcttcgcgacgactttcaaagtagaaactacaaagtccactaggacaagagtgaaaagtaccaaaataccctcggttgtcgttttatgtccgaaacgacatcgtacatagctgcagcccttttttgttagtgttttaagccagacagggagagagaagggagaagaatctcgcgagagacagaaagggacgattattggttggtgaaatttagagcatttttgggaattgggtaaacttttcgatg

SEQ ID NO: 24492 - DNA, 3003 bp, Unknown; identical to SEQ ID NO: 24491
  misc_feature (1)..( 3003): 2750-1469P.txt file - cDNA_ID_2177993; gDNA_ID_2926180; Annot_ID_140500

SEQ ID NO: 24493 - DNA, 3000 bp, Unknown; identical to SEQ ID NO: 8687
  misc_feature (1)..( 3000): 2750-1469P.txt file - cDNA_ID_2178004; gDNA_ID_1971851; Annot_ID_176408

SEQ ID NO: 24494 - DNA, 3000 bp, Unknown; identical to SEQ ID NO: 8687
  misc_feature (1)..( 3000): 2750-1469P.txt file - cDNA_ID_2178004; gDNA_ID_2926180; Annot_ID_200162

SEQ ID NO: 24495 - DNA, 3003 bp, Unknown; identical to SEQ ID NO: 20423
  misc_feature (1)..( 3003): 2750-1469P.txt file - cDNA_ID_2178054; gDNA_ID_2096290; Annot_ID_195345

SEQ ID NO: 24496 - DNA, 404 bp, Unknown; identical to SEQ ID NO: 4843
  misc_feature (1)..( 404): 2750-1469P.txt file - cDNA_ID_2178054; gDNA_ID_1620735; Annot_ID_166225

SEQ ID NO: 24497 - DNA, 3003 bp, Unknown; identical to SEQ ID NO: 20423
  misc_feature (1)..( 3003): 2750-1469P.txt file - cDNA_ID_2178054; gDNA_ID_2926170; Annot_ID_199416

SEQ ID NO: 24498 - DNA, 3000 bp, Unknown; identical to SEQ ID NO: 8721
  misc_feature (1)..( 3000): 2750-1469P.txt file - cDNA_ID_2178077; gDNA_ID_1971868; Annot_ID_176524

SEQ ID NO: 24499 - DNA, 3000 bp, Unknown; identical to SEQ ID NO: 8721
  misc_feature (1)..( 3000): 2750-1469P.txt file - cDNA_ID_2178077; gDNA_ID_2926209; Annot_ID_202475

SEQ ID NO: 24500 - DNA, 3003 bp, Unknown
  misc_feature (1)..( 3003): 2750-1469P.txt file - cDNA_ID_2178096; gDNA_ID_2096290; Annot_ID_195335
tcactacagaagttagttctttgatactagtaagaagatgtgaacctttcggacaacgatgtaatctcctttgtccaagtctaactctttctctgaagcagcggaaaatggatgaatcacctgcgagagaacatatatgttgcttatggagagtctttttctttctgtgagatatgcgaggataatattacggaagataaaacttacttcagcaagaaagtatgacgttttctctgagccgttctctgttggaatcgcaggaggagcagattctttgtgttgtttctcggttaccatctacgcggtaagaccaaaagtgtgagcctttgatgagaaaaagatgtgggaaagattcatccaatactaacgtcggcttcaatgtcactgaggatggctgctattcttaagtgataattcttctccccttcaacctagaataagcgataaggtaaatagtaatctgcatatgacaaaaaaatccagtgtgtgtgtatgtaaaacataccatagccacaagcctctggaaagtgagtctatgttgctgtgattcaacagcggctaatgcagcagttgcttctttaccaaggactgccatatttgcttttagctcttgcatttttgcttccgctagttgaagctttgctacgttttctggaatcggagcttctcttacacgtgcttgccgtctagagacttccgttgcctgttttgcttttaagttttaacttacattacaaaataaaatagccagcatcctcatataactaagatcttaagatgattacatgtgtctctgcttcctgtctcatgcggctgtaacgttgagcaagatgacgagcatcttcaagaggagaaccggcaaccatagctcttagaggatccaaaaccttaacggcatttaacaaaaaggttttctcttgttatctactagatttaattctacgtaaacatactaagattaaacacagataatccaagccgaacctgagaagccaaaagcttgttgaagtcttcttgttctttgtctacatgtttccgtgcatcaccgtatatagctgcagccttggccagtatattctcatcaatgttctgactattttcgttcccatacctacaacagtcttcagacaacttggttcctgaaattttaaagaatattaaaagaaaactcacaaaagtatcatagtataacttaattcaatgataggtaacacaaaacagacactcataagtagttaagtacctgcttcaatgtgtctgagcccgatcgtggtaaatgcctcagctgctttaacaatatctctctggaactcctgaaagtgacaataacatatgtttgagggtattgtgctacgatgaatcatactgataccttctcccccaacaatgaactcatataaaatgtgacaatgccattaggtcaatatcagtcaaacctttgcagaacgagtagagcggtaaagtttatcgagttgatgatgcctttgcatttcaagctcatcaatcaccattacatctgagctttcataaccagtcccactgaattgctttatcacagcctacattccccattaccacacatcaatcaacacatcatcacaaccaagattgtgtaactctataatactcaataatatacaaatcaaaacccatcaaaaagtttccattttttttaatccaaattagcaacaaagaacctaaattgagcttcgtttcgctgaatcggtaacagtgaaactagttgcggcgatgaaaaggaattaccagttgctgctttgcgacttggtctctaagcttactcgcttgtcttctaaacgcatccattgtcacttctcctcttgatttccccaaattgattcagagataccaaaaagagacaagctttaaaggattttgagtggaattgagaaatctcaattagatcagaacagtttaaaaactgacaaagcagatcagatctgattcagtagaaatgtatgttcttcttcgactcgatgtgtcactgattatccctctgagaaaatcagtcaatcacagagcacacacatcgatctaagcgggtcgggtcgattcgattgattgaaccaaaccggtccggtccggtctgattaaaaggagcgttcgcgattgaattatttggaagcagacgaggcttttctactaaaaaccttacgttacgacttacgattattattgagtaattaattaaaattagctaaatccgtttggcataaactgagattaagttaattaaaacttaaaagtataggtattaacaaaaaaactgacatggacaactcataaccacttgttatttgtccccactcctcccatatcattttgtcctaactgccattacataattataatctgaaaagacaacctatatactttttcttttattttattattaacgttgcctttctcagtatagtatagattcctactctaccgacttaaaatttcagtgagatatttcattaaattccatgttcttaaaacagggttctattgttgatgtaaacttaaatcaaattatagtcaaccaaaagacaaatgtatattggtatctaaagtactgaatgacaacatttttttgttttaatttatctataacacaatcaagttgtaaagatgattttgtttgaacaaactttacaaaaataatctctatccattatactatttcgttaatagctaaattagtaaaccaaacgcggaaaataaacgaaacaaacgcggaaacaaaattacaagaagatcaattagtgattttacagttaaaaaaaagcaataaaactcagaaaccctttcacatgtatgtataagaagaatctaaaactttcccacttccaccaatttgagttttgaaacatttacggctcgacagaaaagaagacgccattatattttaacagagagaaatcaaagagacaaaagccacgatccgccatagctgtttttgagatcgatccccaccaaaggagcctagcctaaatcatg

SEQ ID NO: 24501 - DNA, 3000 bp, Unknown; identical to SEQ ID NO: 8701
  misc_feature (1)..( 3000): 2750-1469P.txt file - cDNA_ID_2178122; gDNA_ID_1971862; Annot_ID_176439

SEQ ID NO: 24502 - DNA, 3003 bp, Unknown
  misc_feature (1)..( 3003): 2750-1469P.txt file - cDNA_ID_2178224; gDNA_ID_1971869; Annot_ID_176543
tcattgacaattcccagaggaaagaagtttggtaaccgctgtcgagctagattccggatccttggatcactatgcaagaagaaacgatgagatggaggagaagggtgggaaaaatcgtggaatagctcagtttgctgaaagccagtcaagttatgatttccgctattgctactacttgccacagcactgctttgtttctgagctgtgctagtcgtcttgatggagataaaatagtcctgacaaacatcatcgaaagctggtgtctgaatcttggaacttgccggggaaaaatctttccacagatctttaatacaggggatagatccaggttcctttctcttcggtttacttgcaatagatggttgattctttgagaatgaatcatgttttttagttgctccgcttaaatctctgctggtggatggatggtcatcttcagaatctgaatctagtagctggaaccttcgtagaggactacgacttgacatctgaaacaacgatgcaacagaactaatcccagaggcagcagatgcttgaacatccgactgctttctttttccccgagagatagaaggttgattagataaaaccccagaaccatgaagtggcacccttgagctgcaactagaaaaatgacttcttgttgaggccggtgcgtctgcatgaagcaacacaagttttataccaagatgaaaccaacacaatatggatgacttaaaatattacactaaagaaatccaaaagaaaccagtttgagtggaatgaagcttaatcaatgtccttataaataacaaattctcagcctgaaggctccaaacccactctagtctacctattagtgtcaacaactgcaatcaagttttcatctttgagccacaacaaactgatcctgatatctaaatagaagagggtttgcatcaggcttcctaaatccatcagttttaagttctctatgataaactaagggatggtctttctatcaatgtgttcacgatccaagacgcctaatgaatgaaagataggctaatcagctcattgacgtttaataagagatctaacaatgctcgattcctattccagcagtttaagtaagacccatattcgaaaagacgaagcagaagctcaaaattgtaattacccgtaggaaaatcctcaggagaagagaactcttcaatgtcatcatcccgatcctctacagctacgcttctatcatctttcacagaacacttgttgggattaatccctcgtcgcaaccgcttgagaaccgggcttgtaaaatctggttcaagctcccgatcggaatctgagacagtaagtcccaactctggctcgttatcgccgtccccgattaattggtcgccggtggagctagggttttgatggatttccgattggagatccgatgcagcatcaagatcaaaccctagcgaaaacgatggtggctcaatcgaatccatgagaatgaatttagggtttggactaggagatgaagagacttcaaagacatggaattggcgccttggtgtgccgaagaagcttgagatttcgtaaaaattccccgcctagcgcacaatccatgattttaaaaaaatttcaagtgattctcaatttctcatgtattaattttcgtcgggatatttaccgccgcagaaaataattattttggaaagaaaaaaaatcagaatgggccgtgaaatttcaaagttggataaagcccataatttaatttggtgaacggtcttcttttttttttttcccggcaaataatttcattgatatcaaactgaaattacaaagtcagtatacagaacattagaaaacaaattattacataagcagatatatgcgccatgtagtgagaaagatgcacaattgggaagtgaatttgacgatgctttccttagagaagccttattcgctaatgaatcattagattcactattttccttctccatttctgatcttcctctaatgcgaaatgtatgcatccatctactctaatgttgttcttaattgtataatcaactaatcttttttttttattcggatttataaattctgatgatgatgacatattgacaacacttttattattcgattacaaatactaatttcaattaattatttacaaaatttcaaaatcatgttaaatattttgtaatgtataaatacattatacatatcgattacaatttttttattattgtttatttctatatctattgcaataatatgttttaagacaaaaattggacatatggaagttcttaattcacgagttattcattacaccgaaaataaatttgattggtgacacgatcacggtattactaatttgacatatgaacacattttatcataattgttcacacttaacgagtgctcgaactcgaattaccaaagacatcattggccttaaaaagtgtaaaataaagatgttttaattacgaatccaatgtcatcttttatttttgtatcttgtttttgttggtcgactttgtcatttatttttgttttatcttcattcattgcttataagttaaggcttgtcctccattttttgtcatttgctctcgtgacagcatctcgattcaccgtttttactttttctctaactttctatttttatttatatcattttacttcttcaactttattttttcatttttttgttagtcattcttggattagtgttttctttcattcttggaccatactaatattcagataatacttcatacattgcaaaaaaacaaaaataaataaaccaaaattcataaggtatcataagaaatcaattataagaaaaaacaaaaatcattggacaagacaacagactgaattatcgttttatccttttaaaatgaaaatcaacacattcatacgagatatggtaaggacaatttagtcatttagacacgtgtcgtgcccgcgtcgcaaaagcctataaagaatccatttaccttttctcactgaatctgaaagaaaaagctcgcagagatg

SEQ ID NO: 24503 - DNA, 3000 bp, Unknown; identical to SEQ ID NO: 8731
  misc_feature (1)..( 3000): 2750-1469P.txt file - cDNA_ID_2178264; gDNA_ID_1971869; Annot_ID_176552

SEQ ID NO: 24504 - DNA, 3003 bp, Unknown
  misc_feature (1)..( 3003): 2750-1469P.txt file - cDNA_ID_2178466; gDNA_ID_1971874; Annot_ID_176671
ggccgtctcatgtggtagaccttacttcagtgtgactgtgctgatgaaagagcatgtgcctctattaatgacatatatataaattatacatatggttctcgtaactaattctataacataacacaaatacaattcgaaaatttgtttgtaggtcacgcaattaagaaattaaaacctaataaatgcttagtgggaggaatccccatcagcaagaaaactcaaaatcatcaacaaaaaaaaggagagattattcataaaatttgtttgataaaaacagatatgaataagtagctttagtaatgctataaatctgtaactcctagtcttgtttgtaatgttataattatggtgcaagagaaaatatgttttagatattcaaaatcagattgatgaactattacatttacagtttaccagctcaaacacgttttagatcaaccgctaataaaaactggtcaaaatataacacctaatcacaaaagcatcataagtatgtcataagcgaccaaaatcaacttaataaaaaaacaaagtggtaaaacactagggcctgataacttgtatagctgtcttgtacagtgtaataatcatcatatatattctcttcttaagtctaatgggttattcaacatttatccaccatctatttcagattaattaatagctgccgtcaaaaataaaaaggataataataatgttgtgatataagatattatagaatatatattttaatataataatattttatgttcgtaaaatagaaacttcccatgtgattttcttctctcaccgccggttacggttattgtctttttcttagacttgaaaatattaaatctttttgttatggaattttactacacagcttgtattcatatagttttgggttaatagttaaaacataaaacatatatcgtgattatagtttactcacattttacatgttgttacactgtcgatatctatcaaatatattactgttgtaatttcttttcaaaaatactgttctaatttaatcctgcatccaacaaactttttgaccagagagaaccaatatatatatcagtatgtctataaaaaaatatgataattgtgaaaatgagatccatatttttgattatatatataagtgaaatagatttgatttgatttactttgcaacgtcttgtgacacaagcatgacataatcgaacccatctaacaataacatgcagtatatcgttgagcttctagcaaaatcaacaaaaatctaaaatcttttagtaaaataatattaaaccttttatcattaagaatttttttaaaattaacaataaacccatgacatttgtctaatctgccatagagttgaggtgggacttctaacatgctctattatctcttgtactccgttgatcatcgatgataaatcacaagctaaatgtttgtgaataagtgaaaatttatcttggaaatgaaaaattatccaaatcaaagggttacagtaactggataattcatttaacactttgaatcaacaagatcaaataaaaaaagttggaagacagtgaagcgacaacatagtccattactttgagttaaagtaatattataatttagtaaagttgatctaattacatttttataagtttaatctggtcatcgctggaccaagttgtcatcctccaaattccttaccaatcatacaaattgatttttggccttttcttggaatcatctcttttttttctttgtgtttttcttctcattcattttgtttttctttaatacacacacatgcatgtataaacgcagttttatgactggacatatcgcgtaagatccataagccaatagctttttttaagtaaagtattttcattttatgggtataattataaagatgtaaatttccccaaaataatataaacagcagtctctctcctacttaatcaaatcactagacgcggatttgcttaacaaagtaactttaaaccaaatcgttccacctaaaaggctaaaaccattaggattgattttggtcaaaaaaatcggttactattttttaatttacttagaagactggcaaaaaaaaatgattccaaactactaacatataagataaaatgtatttaacatcaaattaaaattttcacgttaactaatataaaaaaatgatatgaaagaaaacccaactaatctttgattatatgcgttagccttcttcattagccttctttaaatactagattagtacttgataaacttttattgtctatacaatatatcaaaaaaaatgcctctaaattaactacataaattagtaatttctgaaaattaataaaaaaaacacgtaaccataacttccgagtatgtttactttaataattttcacgggattctgaactctaaataaagattgattgataaaaaaatattaaaataaaattcacgggatttacaaattagttatcatttgaatcatttgttatagaatctaaaataaaatagtaaattgatcatatagtaagaaatcaaattttctttttttgtcataaataaatataatttgttctttagttatgcacgctggaaatagatcccactaataaaaattggacttttcaaacaaagaaaataattaaataaaatcttcctttacaaaaacaaaagaggaaaattcaaagaaaggagaactctcttcttcttcttcttcttctcctctcctctttatttacttagttggttcacttcagcacatgatcctcgtctctctttctttctctctctcaatcacaagtttcagttacacagctgaacccaaagtatctcacattctgatctaatcagaacactgttttgtctgtgtaacataaacaaacgatcctgtttttatggaaaatttaatgaaacagtgacgattcttctacacttctttataatgacaaacatttcatagtaccaaaatacacaaataccttttctttattcttctcacccttctctgtttctttatcattcatg

SEQ ID NO: 24505 - DNA, 3003 bp, Unknown
  misc_feature (1)..( 3003): 2750-1469P.txt file - cDNA_ID_2178493; gDNA_ID_2685559; Annot_ID_193430
atgcacacaaacctttaatgtctctgtggatctttccctcattatgcagatattcaacagcatgaagcaaatcgcgtgtgatacaagcgattgatgtttcatccaacggattattagattgaagctgcaaaagatatatcagtttaaggattataagttgcatcaaagagaatataagtgcaggacaagatctccaccatgcgtgcatgatcacacacaaagttatacttccaaattccaagagttctgagctacaaagtagtgagttaacatacaagatcagcaacagagccaccggccatatattccatgatgatccacaacttggtctgatgaaggtaagaaccatagtattcggtgatatatgggcaacgacattgtgacaatactgaaatttcctggggtcaacaacaaaaactgagcatgacaatcgccacacaaaaatataaagcacagaaataaacgtcaataagaaataccttctgaatatcttcgatctcatcttctctgccagatatcaagtaaaaaggttagttagaaaattactgagcctgatggtattctcaaccaaaaatcctattcgtatagtggaaagccaaggaaaggttactgtcccttagcctttgagaaccgtgaacaagtaacattcatagaatcataattgtagttactcaacttataagacgataaacgttatacaactcaaaatcttaagaggagaattgcatatatgatgagaaaatactaaaataaaaaatatactcacgattcttccaggtcgattactttaatggcaacttctttattgaggtccttatcaaacctgataagcagcagcagtagttgttcagaatacaggtaagatagacctcttatacaaatgttcagaatagcataattctaatcagatatattatatacgagtataatggacgaacagaaaataaaaaaaagtcaagagtgtgataaatacttacgctttatagacatcaccaaaagagcctcttccaatcaactcaatctggctaaatctggctccagctgcctcttgtaaacccgcaacatcgtccatctccacatacaaggaaaaaccaccttctctcccgctccaaccactatattacgaagataacaacagagtcagaacaaactataatactttttaccactccctccccttttcattacatctaaactctcccctcataaataagtacccagaagaaagcaccaaacttaaactaaatcccttatactcaaagcaaacaaaatcagcaaaaaagttaggtggattggagcaagtgacagctgaccaataaaaatttgcaagtagccgagaatattcgtcactctaggacactgaagagaaacatcttcactgatgtttttctcccgttcgatcaaaatcagacttaaacgaaaataatcataatcaaattctctaaagttcaagggatcgatccaaattacctggtaattcgacagagaagacgaaatgggatactacagatctctctgttgctctttcctttcgtttgctatgtcattttgccagaaagcactctctcgagcaccaaagagatcgacagaaactgtttgggagatgaagtcgaatttatttttcatgttgtttttccttccaagtttcattatggaaaccatttgttacgaagaacaacccaacccaactgttaaaagcactaaaagcccaataagctttgaagctcatttaacggcccatatactaggaagtagaactagaaaccaaccattgtttcggcctttgcagcaattaacatgatctcatattcgactttctttacccacaaattgtttttctttttcctaataaacggtgggtcccgcaaaagaaaaattgtaagtaaagaacagagccggtcaatgcggagctaagactcgtcagggtttcagactgatgcaatccagaccaactctctgttactcctgtcctatttttttaagtttacgtcactcacacttctcactcgccaccctttggtgtattcatcagacgattttgtttcttcttcctggtttgtctctgtgtttctatgcgtagtttatacgcgccacgaggtcaaaaccagacgctgggtcatggttgatgacaaagccactcgagtcttacacacggcacgtgcacacgtgactcctaaatctcttcttcctatatattctctttgtcgtgcccccttaatttgcgtgcgtgtcacacccgtagtaatatgaatcttggtcctaaaccgaatcccaagtttgacgacaactaaataaaagcctttttcttcttaagaaaaaacactttcacatttcatggttttaattgtatcactagagttatatataatactaaaactaaaagactgtgttttttagtggataaaaatgtcgactgactaattatgtcattgtaattgtatctttaatcataacaacaacagtttatccactcgaaaccatatgattatttctctttcagaaaagcaatatgaagtatagaaaatcaatggttgataattggattccattcaaacaaatataaagcgaactaaaatgattttttcaggaagattttcaagtatctttgactttcttggcctaagagataaaaaacttttacatgcaaaaaactttaaccttgtgttcaattggttctctgataattaattatatattacttattgttaactataccaaaccccaagaaattcgtatccttgccacaagattgtaagattttatcaaaaaagtaataagaactaaaatagcatattattgtgtagacaaacagtaaatgttggtttggtaatcatataattagtctaaattagaaaaaaaaattataaacattgaaaataaaagaaatttagaacataaaagagtccatgagaagcttgagcaaggaaggcagcaaagaaaacctagaaggccaaaactagaggagaaacccatataacacacaccgacatattcatatagatg

SEQ ID NO: 24506 - DNA, 3003 bp, Unknown
  misc_feature (1)..( 3003): 2750-1469P.txt file - cDNA_ID_2178493; gDNA_ID_2685559; Annot_ID_138158
tacgagtataatggacgaacagaaaataaaaaaaagtcaagagtgtgataaatacttacgctttatagacatcaccaaaagagcctcttccaatcaactcaatctggctaaatctggctccagctgcctcttgtaaacccgcaacatcgtccatctccacatacaaggaaaaaccaccttctctcccgctccaaccactatattacgaagataacaacagagtcagaacaaactataatactttttaccactccctccccttttcattacatctaaactctcccctcataaataagtacccagaagaaagcaccaaacttaaactaaatcccttatactcaaagcaaacaaaatcagcaaaaaagttaggtggattggagcaagtgacagctgaccaataaaaatttgcaagtagccgagaatattcgtcactctaggacactgaagagaaacatcttcactgatgtttttctcccgttcgatcaaaatcagacttaaacgaaaataatcataatcaaattctctaaagttcaagggatcgatccaaattacctggtaattcgacagagaagacgaaatgggatactacagatctctctgttgctctttcctttcgtttgctatgtcattttgccagaaagcactctctcgagcaccaaagagatcgacagaaactgtttgggagatgaagtcgaatttatttttcatgttgtttttccttccaagtttcattatggaaaccatttgttacgaagaacaacccaacccaactgttaaaagcactaaaagcccaataagctttgaagctcatttaacggcccatatactaggaagtagaactagaaaccaaccattgtttcggcctttgcagcaattaacatgatctcatattcgactttctttacccacaaattgtttttctttttcctaataaacggtgggtcccgcaaaagaaaaattgtaagtaaagaacagagccggtcaatgcggagctaagactcgtcagggtttcagactgatgcaatccagaccaactctctgttactcctgtcctatttttttaagtttacgtcactcacacttctcactcgccaccctttggtgtattcatcagacgattttgtttcttcttcctggtttgtctctgtgtttctatgcgtagtttatacgcgccacgaggtcaaaaccagacgctgggtcatggttgatgacaaagccactcgagtcttacacacggcacgtgcacacgtgactcctaaatctcttcttcctatatattctctttgtcgtgcccccttaatttgcgtgcgtgtcacacccgtagtaatatgaatcttggtcctaaaccgaatcccaagtttgacgacaactaaataaaagcctttttcttcttaagaaaaaacactttcacatttcatggttttaattgtatcactagagttatatataatactaaaactaaaagactgtgttttttagtggataaaaatgtcgactgactaattatgtcattgtaattgtatctttaatcataacaacaacagtttatccactcgaaaccatatgattatttctctttcagaaaagcaatatgaagtatagaaaatcaatggttgataattggattccattcaaacaaatataaagcgaactaaaatgattttttcaggaagattttcaagtatctttgactttcttggcctaagagataaaaaacttttacatgcaaaaaactttaaccttgtgttcaattggttctctgataattaattatatattacttattgttaactataccaaaccccaagaaattcgtatccttgccacaagattgtaagattttatcaaaaaagtaataagaactaaaatagcatattattgtgtagacaaacagtaaatgttggtttggtaatcatataattagtctaaattagaaaaaaaaattataaacattgaaaataaaagaaatttagaacataaaagagtccatgagaagcttgagcaaggaaggcagcaaagaaaacctagaaggccaaaactagaggagaaacccatataacacacaccgacatattcatatagatggtgggctcggaacatcatcaccatcatcaacaacatcatcatcaaaaccatcagcagcagcaacaaaggagcaaagaagctttagggatggtggctctccacgacgccctgagaactgtttgtctcaacaccgactggacttactctgtcttctggtccatccgtccccgtccgtacgtatctctctcctcagctcctctcttttttttttattgacatgatctatctatctctcctcaaaacgatgtcttttttgttcttcaggagagttcgaggcggtggcaacggctgcaaagttggcgacgacaatggaagcttgtaagttacacttcttacaaaaaaaaattaggttacccgtatagtcaagagacttagcgtactatagttagtctttatgaaacatgattaaaaagtcaacattttcccttatggtttatcgtattatagtcaccggaaactttccccggaaagaaactaactagacagactagtattagtactctaggcttgaattaacaaaacaaaacaaaaatccaaaaaatgttgcatggagatcctagacatgatcatgatcacgtagctctatgcatctatatatatgcgatgagactgtatctaccattcgtttaagttgtgaatcatgatttgctggaaaaaaacacatcaagtcatctcttttagatgatcttgtctaataaccattgcttcctttaattaataaataaattaatgaaaatgaaaatgaatgatttatgatgagtagatttacaaatatgcgctacgtattgatatattgatgtttggggctacaggatgttgatgtgggaagatggatactgcagaggaagaggaggaacagaaggttgctatggagacatggaaggagaagatcctgttcgtaaatctttcagcaagatg

SEQ ID NO: 24507 - DNA, 3003 bp, Unknown; identical to SEQ ID NO: 24505
  misc_feature (1)..( 3003): 2750-1469P.txt file - cDNA_ID_2178493; gDNA_ID_1971872; Annot_ID_176613

SEQ ID NO: 24508 - DNA, 3003 bp, Unknown
  misc_feature (1)..( 3003): 2750-1469P.txt file - cDNA_ID_2178537; gDNA_ID_2685559; Annot_ID_193441
tgttggaaaaaaaatgcaggaattattcaaaaatttccgtatttattaaagtatcttgaaaatgttttgatgataaaaatgaaacatttagtttaaataaatttacatgtcctgatatatattaaaattctattttgaaaagtacaaaaccatatcttcatatcttgtcggatagatggtttgtaatccgccgacattgcaacttaaatttaaatagaaattattaaactaaatagaatgttttaacgataaaaatgaaacatctagtttaaaataaatttacgcgtcacgatatatatcaaaactacatttcgaaaaggacaaaaccgtatctctgtatcttgtcagatagatggtttatacttcgacaacatcacgacacaaaaaattaaatgtaagttataatgccaaactagcacaattgacacatttgaactagccatttggaaaattccgttatttgatacgagctataatttatgagaatccgacaaaaacgatttcattaaaaaagaattatagaatatagtttatagtccgaaaacatagcgacacgtaaaattaaatggaagttataacttcaaactaacacaattaacatatttgaatcagccactgaaataattcgttatctaaatgcgaactactccctccgtcccataaagataaattttttaggaaaaatatttgtcccacaaagatagaagttttatatttccaatgcaaatttttaaactgttttcccgttttacccttagataaatatttattattatttttaaagtatattaagaggttaaaattgtctttatacaatatttcttaaagaatgtgaaatttaaaaaaaattcatcttagtgggacggagagagtataatttatgagagtccgaaccgtttttcactaaaaattaaattatagaacaaaaaaagggcacatttctcttttgtatacatacatattactttttgactttgaaggatttttttttccacagattttgaaggatattatgacctaacatttaagcatgtatatgtcccgccacactgtcttttgaaaaagaaagggattgaaagtctagtttgttgggcttcagtcgacgtcaagaaatacactgttaaagcccatcaaatctcaacagtgaccgatctcgtgatagaacaaagttacccagagtcactgaaagcccatcaaatctcaacagtgatcgatctcgtgaccactccacgcgcttgttggcaactgtcaacacgtaattagcgcaacatacaataactttaagattataaagtcgtattcgaatgccaataatattcaagctactcatgtgtatgaaaccaaagatttctcgagactcctgctgtggacctcacttaaaataattgaaagcaacgattctcgtataataataattttcaaattttacgaatttctatgactatgactatattgtcttttcgttaaataaaaaaaaaatcgtctttaactctttacaatttttgttttaaaagattcgagtgaaaatacagttacattaccataaattcgtcaagagagcatctttttaagaaatgtaataaattatggtaagtgtatgtaataaagaagtatgttgatgttgctatcaacattaccatacgtgtctgttactatactagccccaatgactacgcaatagatatgtttttttcgaataaggacaagagctcgtaatcagctacacgcacgtccacatatatacttcaatttcatccattggatctgattatgattacgttttaaccattggatttattaatcatacaggtcttaacataaacgagaagtaggtaataaatactagaagctaccccagtatcttaaaactctgaaaacgtgtcagccaaacggtttctttttaacacttcgtgtaattaattaatgggattgaaaacttacttattaaaaatcgttatagattccagaaataaaggaacagagagacacacacaagataaaaaaaaaagtaacgaaattgagagctgaatgaaaccaaagatttggaatttttctttgtatagtttttccacgaatcggagtatcacacacggtcttggaattttccagcttaatttctaagatttaaaatcgtaatttttatttggaatttcactgtctcttcatgttgtctatataacttttactcggaaacaggagtgtcccgtgttcttgagcacaaacaaagtagcagaacaaagcatatacaaaagcttcattgcctcgagattaaacagcatcaagacaacatccaaaaattacccaggtttcttcattttcttaatatatcgtttttgtttctggatctcctttctaaatctgtagattcaggcgtgtgtagatttagtttttttgttattgtttggatgagtaaagtatgttctacaatgcactagatctaaatctcttcgagattctgatggtgtgttggtgttgtattaaattgattttggggataatctacgacaagggtttcttttaatgttccttaggaaaatggtaatgtaacgtttaaagggttttaagagttgcttaatatagctgttgagatgtctgattgattatgaatcccgatccaagagtttttttatgaatagaagagccatgtcgttcttgattgaattaatcttaatcatactgtttcgtaattcttaaactttgagcttgatgttgcgtgagaatctgggaactttaaatgtgtcggctgggttctctagtttgcttcttctttctgtatttggctctgagaaacttactagagctctaacatttgtgcttgctgataggtttttgtgtttgaaactcgaagattgttgcggattcctgaaagattaaggcttttagctccaagtttccaagagtgctgtgaatcagctcccactctgtctctgcatattgcaagacaccggttttgtttcagaagtttgtttcttcttgtctcatgatcactagttttcagcaatg

SEQ ID NO: 24509 - DNA, 3003 bp, Unknown; identical to SEQ ID NO: 24508
  misc_feature (1)..( 3003): 2750-1469P.txt file - cDNA_ID_2178537; gDNA_ID_2685559; Annot_ID_138169

SEQ ID NO: 24510 - DNA, 3003 bp, Unknown; identical to SEQ ID NO: 24508
  misc_feature (1)..( 3003): 2750-1469P.txt file - cDNA_ID_2178537; gDNA_ID_1971872; Annot_ID_176626

SEQ ID NO: 24511 - DNA, 3000 bp, Unknown; identical to SEQ ID NO: 8742
  misc_feature (1)..( 3000): 2750-1469P.txt file - cDNA_ID_2178541; gDNA_ID_2685559; Annot_ID_193442

SEQ ID NO: 24512 - DNA, 3000 bp, Unknown; identical to SEQ ID NO: 8742
  misc_feature (1)..( 3000): 2750-1469P.txt file - cDNA_ID_2178541; gDNA_ID_1971872; Annot_ID_176627

SEQ ID NO: 24513 - DNA, 3000 bp, Unknown; identical to SEQ ID NO: 8741
  misc_feature (1)..( 3000): 2750-1469P.txt file - cDNA_ID_2178556; gDNA_ID_2685559; Annot_ID_193446

SEQ ID NO: 24514 - DNA, 3000 bp, Unknown; identical to SEQ ID NO: 8741
  misc_feature (1)..( 3000): 2750-1469P.txt file - cDNA_ID_2178556; gDNA_ID_1971872; Annot_ID_176631

SEQ ID NO: 24515 - DNA, 784 bp, Unknown; identical to SEQ ID NO: 8759
  misc_feature (1)..( 784): 2750-1469P.txt file - cDNA_ID_2178622; gDNA_ID_1971876; Annot_ID_176713

SEQ ID NO: 24516 - DNA, 3000 bp, Unknown; identical to SEQ ID NO: 8760
  misc_feature (1)..( 3000): 2750-1469P.txt file - cDNA_ID_2178639; gDNA_ID_1971876; Annot_ID_176719

SEQ ID NO: 24517 - DNA, 1008 bp, Unknown; identical to SEQ ID NO: 562
  misc_feature (1)..( 1008): 2750-1469P.txt file - cDNA_ID_2178651; gDNA_ID_1591961; Annot_ID_151760
  misc_feature (9)..(9): n is a, c, g, or t
  misc_feature (18)..(18): n is a, c, g, or t

SEQ ID NO: 24518 - DNA, 3003 bp, Unknown
  misc_feature (1)..( 3003): 2750-1469P.txt file - cDNA_ID_2178651; gDNA_ID_1971876; Annot_ID_176722
atccgatatattctgaagaagcaagaagatggattgtggaaattctgccaaagcgatattcaaatacagaagtgaaaatcccccagaaaaaaaagctcatcatctaactaaaggttgtagcatcaacagtagaacatgggatcatttagctaacggttgttcttgtttacctaacggtgtaggaaagtctcaggtttgtttctttattccttagtaacccacaggatttgtctttgtagattcttttgatttcaatgtgtttatggataaacaaacttcttgagtattttttttattattattgtaaagcgttactgatcaaatcaaatgttttcttaaaatagttaaaaatattaagggatctcaaaataattgttaattatggagggaaaaaaaagaaacgtcttttaagaagcccatacctgcttcacgtatcacgatggaggcttactcagaccttccactgttgagaatttgaaatttcaatttgtttgattagacacaatgattaagatttttattacataaaaagaaaaaaaaaattggagaagtataaacacatacatagcggtgaaagaagaaacccaacggtcactcaaaagcgcattgaagagtcaagcaagacttggatctgtctctttcgtttctctatctctgtttcggattcctaagagaaatggtggaatcggagctaagctatgaacagattcgtttgaatagggtggaagagaacaagaagagaatgggggagcttaatctcaacaagcttgctcaatctcttcgtgtctcttcttcttcttcttcttcttccaagccctcaccagtaacgtttcctttctcttctcttctcatttcttcttttctttttctgaaattaaccaattttttttatggaaatgtaggcaaagccaagaacgatgcgtattccagtggatttctcggaggtcaggagatcaagccgtgccaaaggtccacctccaagttataaagaggtcttttactaccatttatctttacttgagtttccttaaggatttcttaaggattttgtatgagatatgaaatttgtgggtttgatctttttgtgcaatttttcttagttataatttgcgtgagttgtttctcttttttttgaataaaaacgtgagttgtttctcattactcattatcagagttatctgatccttactcgcagtttgggctagaaccactggagaggaggccaagaaggttgaccaatccacactctctatgaatacattacttctcttacactatttgatgtttgttttcacttttcagtataagttatgtgttttgctttgcaggagctctcgaagaagagatttgctgaatcgggtatatgcttcggacgacgcaagaatgtacgcattcgacagggcagagaagctccagtcaagcttagattcagaatatgcaagctttaccaaaccaatgctccaatcacacgtgaccggaggattttggttggtaagtgaacaacttgaacattcaaagatgtctgaaactcagccatagtagtatgtaaaagtccactgatgtcatatgttttcgtaaccagggtttgccgcttcctttttgcaaggcacatatgccaaaacgtgatgtaataatgactttggttgacgaagaagaggaggaatctcaggcgaaataccttgctcagaagaacggtcttagtggaggctggcgaggtttcgccattgatcaccagttagtcgatggagatgctgtagtgtttcaccttatcgctcgaacaacgttcaaggtaaaggagttttacttagagatcttgaaatacaccctggtagagagactttggcattgatgttgaaacatattgcttgttccaggtgtatatcattagggtaaatgatgatgcaaacaatgattcagatgggaatgaggtaaatgatgatgattcagatgggaatgaagaagatcgagataatgataatgaatcaaacgagaaacagaaggaaactgtttcagaaggtagacagttgagaagcagtggtaagaggaaaagacgaggtaataatgtttcaaatctatttacctcttgactcttgtaataatatctgttcgataagataaaactaaatttgttgattgatgtgtgcaggaagaaagtagagtttgaaggtttaaatgggacttctagttctatggaaggagtgggaagatgaactaaaacttaacataacagctttttgcgagttttttggctgaacagtgaagttgtgcaatgaggggattgtttttgtgtcttgttatggagacaaacatggaacgttacggctaaatattttgattttggtaactacgattatttcatgatattttatgatttggataagggaaagagaaacaaactttaagaaaaaggttgaaagagaagtcccaccaaaccaaaaaataaatcgtaatcacacaaaaaccaaaaaactttataaccgaactaaaccaaactaaaccagataactaaatggccacctacagatttgtgtagtggaatttaagccattaaaaataaacagttttaaaattatgttgataaaccctggcttgatataataagataagggattgaagacataattcgttgagaattgacgcatttaccccttaatttatgatgtgatcaactaactaattagagcccaattaggattgagaaccggtttttgagtaaccggtacaataatagatccggttaaggaagaaagaatagaaagagacggcacttattcctccacacggtaaagcaaaagcccgtaggacgaagacgacgacgacgaaagtctactcaacttttttgcttccttctgattctctctctctccgcaatccaatcacgagaaaccttcacgtcaccatcccttagaaaaaccctaaaatctcatcaaatcccaaaatcagggtcttcgactagagattctctaatcccgcaggggaagggaacaacaaacaaacaagatg

SEQ ID NO: 24519 - DNA, 3003 bp, Unknown
  misc_feature (1)..( 3003): 2750-1469P.txt file - cDNA_ID_2178795; gDNA_ID_1971877; Annot_ID_176763
atggaagcttgagacgacgctcatcgtctatgttgacgtcgatgtcatttggtttagaagcgcgttatttaacggttcatttttttaaaaaacggcacgatgtttggttgataaagacatcaagatgtgcatatgtgtgaacataagagcaagatgtgcataaaaacaacaatgtattttgaattgacaattagataaatgcattatagactgatagtcttaattagctaagttattgtataattatcgggaatccaaaatcagttagtgtattttgaaccatgaaaaaacacagatattccaatcaacgattttttgtatcgaaatttgttatatccgtaagataattaaagacaaaaatttattttctaactttaataacaaacacatatacgtttttgtaaaagagttgatgaagatatatgaaaattagatggaaatttggattgccttcaaaatttaagaattaatttattgttgttgttatgatagattcagttaggattttgttttgagaattaattttgtaaatgtagtttggatttataaacctagcaaaattatatttctaaaaggtatagaaatatatactaatgtgttaatctaatatcagattacatgttcatgaataatatttcacttaaactattgttttttcgtttttaaattaattaaatcactatataacatatttttgtatttgaagatatatatataataagggataatatgttggaagtaatattcatatgcaaatgtaccattacttgcaaatacaaaaatatgataaatagtgttatagttagtttgaaaataacagaaaataaaaatgtttatttttaatgcgtggaaagagacgatagataaggaaggagtacagtacatcttgttaactttttagaattttgaccttttttattacataatttactgcatgcaatttcatagtcctatttaaactcgtcggagggttacttgtcagtccacaaaactcacaattatgaaaaaatgcaaatttctttcgcgtctagttcaaatgtctatttttataatagaataaatttggaaaatagcctctttttgagttttcattgaaaaataccttataacctttttcttttttaaaacctatttttaagtagattaagttacttaaatagacttactaaaaattagtaataattaataataattgatacttaaattaaaaatttattaattaagaagatcccttgcaaaaaactgatgcattaaacggtataacatggtggaaacaagagtggcaagtccaacgtgtgtgggctaacactaatttagcaaagatagtggcaactttaaatgagttcaaatttggatttccattggtccttattctgcaattcaagtcactggtttgttcaaaccattgaaactatcgttggtttgtagcattggagaaccattcacttgacacaaagacaccaaaaacaacatttctctttcgcatctaacaaaaacttttatggctatgtctaacaatgaaaaacataagaaagtaacatctatcgttattcgtaacgtaagatgtatcgcaacgtatcgtaaggaaaagtaaagaaagttcctaaatagaatattaatgtggagaaaaaatttagtattaaaaaatttaaagctcaaaccaaatacaaaagaaagtaaaaaacaaagctcaaacataatctaaaacaagaaaaagactatcttcttagatattatattataaattttaatataaataaataaactatctttattttttaaaaatagtaatttgaaatcgtttttttcttctatatttcgaatttaattttgatttactaaaaacacaggggtttttaaaatctggataaaattgtcattttatatatttgaaattgtagtttttattaaaaatcgaaaaaggtgtatttttcaaacaaaaactcataaatatggtagttttcaaaatcaccctttataatattacagtcattaatactagatgattatcgactttaagcgtcttctttaataaatctcctaagatgattctttgtgttgttttctatatttgaattgttactttgtaattgttttggaaatattgttttaagaaaatattttttggtataatctcaaattcttatgaatgataaacaatagttagctattaaactagagtttgtaacttttgaaatagtataaatgttatagtcaatgatttattacatttgctagagaaccgaaccaaaacattttcgattacttttagtacaaattttaaaaaccaaaatgaatgatctgttgggtttacccgaagattcagagctaaaaattagcatgagccctattcaaaaatacatgaatggccacaaaatatttaagtttgccattttataagtatcatgtatccaaaaaactttatcattaatttttgacaatctatataaccaaccaaaattaaatgttttaacattaattgtaaaataaaaatatccatataatttccacatttaataatataaatattttaaaaaatttagttaagacatatttaaattaatattaataaaaatttaaaatattattaatccaccacttcaatactggttaaatcttcatttaattatattttaataccatcaatacgagacatatcaaaataaactgatttatataatattgtgtaaaataaaatttattttataatatataatagttatttaatgacagttgtacacttaacgaaatataaccattctaaactataaatataaatattttagaaaataatataatttacaacttttaatatataatatataattataaaaatcttaaaatcacaaatgtttaaaaacaaatctattttgttagagtaaaatttaagacccgaattgaaccaacccgactagaatggataatcgaatgtccaagccatccggcctgcactgtgtttaaaccgatcgagccctaaatgtatcggtgactgatgagttaatg

SEQ ID NO: 24520 - DNA, 3000 bp, Unknown
  misc_feature (1)..( 3000): 2750-1469P.txt file - cDNA_ID_2178841; gDNA_ID_1971909; Annot_ID_177026
caagaggcgaaagagaaacaaagaacaagttgaagaagaagaagacaacaacagacgaatcttttcgatgttcggttggtttgattttaaagtgacgattgttttggaatctttccggttatggcaaaaccaattttgctgaccaaatattactaggatatttttccgtattaccatatcagttacctgaaatgacatatcttcattgctgtaaaataatttctgtttgacatatcttcataagaaaagaaaaaatgtacacgaatgagtatgtcatatgtgtgtttgacgtttttttagtggttttgcttgctgggttatgaagttatttattcttgtttagagaaatcgactcttattgcgaaaggaggtgattgatgttatttttgggttggtagtggacattcttggtaaatctcatcacatgtgcaatagaagaagaagtttatttgcttttttggtctatggtttttcttagggtttaaacatgtttgcttttttcttagttaaaggtttcagcctcctttgatcttggtttgataacttttgctttgtatttataccgtctttagtttcccttccatatagtttagattccagaaaaaactcatctttctacgacaaattttatgaaactttcattttgtccgccggttttagtttattttgtttaggtgttgtatttttttctagttccacattaagaattattaatctgggaaggttggcagcgttaccattgtcgatcgacagttgtcttttcatctttctctcgtatttgattggccttagtcttagcttagtggtagattctgagggaacttttgtgtagcgttccacacagacgacgccaaattgtacggattaaatttaacatcttagataaccagaggaataaaaaatgaaacaacacggatgcaaaatatttttcttttttgattccaagaacacaagcacgcaaatacaaagatattattcttccgttaaactcaagttagggtttttccttgtgtttgacaaaaaaaaaaaaaaagttcttccttgtaagtactttcctaaggttcccgagtgttccattgtggatctcgtccttctaggtcgtggaatgtatcctctttccatatctttacttcaagatcttccttttttatctcccggatatattctacaattttttcgtatattcaaagtaatccttctagtaggccgagcttgatctcttcttctcatgatgataggcctttcgcttagaaatagggggtctcccctaattgtacctaggcccgataaaccatttttgaggattcagtttattcctagttcgaggatacacatatagatgttgcataatacaataaaacatacaaaaatagacgatgcatacataattactagatgatgttttcttttatttaactagcaatatagaagtagtttttaatgggctctctaagctcattccaactcttatttagtatgatattgtcttctttgggcttatatgctcaagcccgcaaggatttgttattggcttccttcccaaaaggcctcatactagttggaattggacttagcttatatattaaaaactctttttctaaatttccgatgtgagacctttggtttgtacccaacagtttcttagtctctactcgtacaatacaataatttcttgtataagcaatgaccgctcactctctccttatatacaagtctggcccaaataaggtgggcagatggacggtgacccaagcgaccatctgtttttgttaaacgtttttacgaagaacgagtttatatttttacaaaaaactattaattggcccaaaattttattaaatctattattttacataaaaatgcctttctaattaaaaaaaaacatatcaaaagtaatttacaaaatggtccagattttaaccaataacttgaattgttattttaagtaatacatagtctaatatttttaatcaataatctgaaaagttattttaatcaataatctaaaaagttattttaggtaatacatagtccaatttttttttttttgcccaagggtcgaactatatgttaaggcagggctactgatatcttattatatcaagcttggttttcaaatgttataactcatattattgtgagacgtgtcaagtctatcgatcagattttgacacatataaaaaaatgaaattatgtaaataaatacaaatatttgattatttaatttaatatttataatatttattttaatttcctttccaattggaaatatttaataatttaaattaatcttgaacaatatttacttaagattctttttcaaatatgtgagatcaatatatgatttcttttcctctttgtaatattttttccttagtttttttattttttagtgtgaattataagaaaaaagaaatctgtgatgatttcatttaacatatttattttttgaatttccttttcaactaaaaatatctaatgatttaaattaattttcaatattatttatttgatgtttttcaattaggaatatatgagctcaatatatgtttttatcttagtttttcttataaatacatcatcaatcttaactatgtgaaatatttatagtcaacaatgaaactatgcaaaactgaaagtaacgagacatatagttagattaatctttaaagatcatacttccatggtaaagtagatactatatttgtaaataagatgacggtctgatcagtgatcagtggtactttttttttgtgcaacttatttatgagatacgtaccaaccaatgaaaattgtatttgataatggggattccctacttaatttaaaataaatctactatattggtgagattctctaccaattaaacacttgacttgttatctttgctgacgtagaacttccccccttctataaatccaaccttctcttggctactcatcaaacatttgctaatattaaacacttttgcttttacacaaaaacattcgataaatcatg

SEQ ID NO: 24521 - DNA, 3003 bp, Unknown
  misc_feature (1)..( 3003): 2750-1469P.txt file - cDNA_ID_2178863; gDNA_ID_1971909; Annot_ID_177034
cttttaacaatcaaaatagtattggtcaaacaatatttctgcattaattagttttttcatatttagcaaaaaagaattaattaaaaaattcatccctattcgacttcactttctctctctgcctgaaaattttgatcggtttctggtttctcggcgaaagaagtaaagtggccgacaaatagtgatctcgtgaaggaatcagtgtgtacagtggaagaagatgatacatttggctggatttacatgttgcttaggcggcgtcgctctttatcttcttaccaggagcacaggcaggttaggttttttttcttgtctttactatttacgaattacgataactagggtttactgttattcggtggtaatgttcttctttcgtgggacagagatatcaaatcaatcactagggtttaccaactcaaggatttgggtaatgttcctgcattgttctgcatttcaattttaggtggatgggttttggttatgtgtttgatatcattcgtttttattcagaacaattagtagaagtagagagcaaggtggtacctttgatcatcgcagtatcaggagatgttggctctgagactcctattaagtgtgagcatagttatgttctcggtgtatttctcaagagaacggtatgtatgaattggattagataatctagtttttcgtttctgtgattttggatatgttaaaaagaaacgatttttttcaggcagaacaacaggttttgagacgtaattggagattttcatgggttcgaaatagtacattgatgcagccgatgactaaggaagtcccctggtatctggtatgtctgttggactttgattggagtgtattactttctaaagtcatttacaaaatatgatattggttgcctataggacgacgggacaggtcgtgtgaatgtagatgtatctcaaggtgaattaggcttggcgttgacggttggtagtgatgtatttgaaaaggcagagccggtatcgcttgttcaaggagcgttgggttatcttaaaggctttaaggtcttttcttttcctttcctaccacttttcattgatttgcttttgttttgacaatgcttatacattgtggcaccattgttgtctatagatacttggagtaagacacgttgagcgtgttgtcccaattggtacaccgcttacagttgttggtgaggtatgtcttttatctgttagcggtccaaaatacgttttatatctctctttgttatgttgcttaccatgttaacaggctgttagggatggcatggggaatgtcaggattcaaaaacctgagcaaggacctttctacgtcacttatataccgctagatcagctcatctctaaattgggagatttgtcaaggttgtttcttttctctgtttttgcctattcttttcttcgaaaactatgattgaaaaaaattctaaaagatctctttcttttggcaggaggttcaagtatgcctccatgggtttaactgttcttggtgtgattcttatttcaaagcctgtgattgaatatattctaaagagaattgaagatactctagaaagaaggcggcgacaattcgcactgaaaaggtatgacgcaccctaaccacagccacgtatgaagtattcattgcgagttgcgagttgcgagttaagtgttgggtaacttgttgcagagttgttgatgcagctgctaggagagccaaaccagtaactggaggtagtaatagtatctatccattagagtttgtactttgtagtagtaacatgtgaatcctttttctgcatacacttggaattgctctgcttacaaaaacgtcttaccaggtggtacaagcagagatggtgatacacctgatctctgtgtggtttgccttgaccagaagtataacaccgcttttgttgagtaagtataagaccgcttttcttctaaaagctcttgaaaaccctctcactgatcaaacatggcatcttttgattcctctttttgtttggtttggacttgtaggtgtggtcatatgtgctgctgcacaccatgctccttgcaactaaggacctgtcctctttgccgggaacgaatacaacaagttttgaaaatttaccgccattgaaggacaaaactcagaacgatttttacaagcgaacaattactagtcttgtacatatagtaaagcctttgtatcatgagtttttgactagaaatttttttgcattgatagattgtgattgaacaaatgctaatataaatttcaagcttagatttacatttactaatgaagttatataatcacgtttcgatgttaaaataagaagtgaaaaaacgtgaacggcaggattcgaacctgcgcgggcaaagcccacatgatttctagtcatgcccgataaccactccggcacgtccactttttgttaattcctcactatcttaaatatctaattaccgttaattattacaaatcaggttgggcttaattaagcccaaagttaaagacagattagtgaaggagacagagaaagaaacagctctaaaatggtaatgaacgagaaactagagagtcaacggtcatagcgttgaccaaatctctcactctcaccagccaaatctctccaacttcctctttctctccacccaaatctcgccggcgatcgtcactgacgaatctgattcgtccccaacactcaacgggtaagctctctctgcaaaattcagatcgttctagctcaatctcaacatcggatcaagattcaacttttgttcttttctcttaaacaaagcttttgatcattagtgaaatctaaaatattaacctttgaatctgtaaacttaagcttagagaaccctaagatcaaaactaaaaatttgatctttcattgtcacttgttggaagcaattcaaaattctgtgttgtgtatattttcaaatttgtggattgttccaatttcgataaagttttgatttttattccttttgttgtgtgtttttataaggaggtagaagaatg

SEQ ID NO: 24522 - DNA, 3003 bp, Unknown
  misc_feature (1)..( 3003): 2750-1469P.txt file - cDNA_ID_2178872; gDNA_ID_1971909; Annot_ID_177037
gaaactagttttgcatacaatctagctccgaattcagaagaagcattcaataaaaccatttctgctaatgataaaacctcatatgctatttaagaagcttacgcaacagtgaaaactactaacttaccatctccaaattttctcaaaatatttgtgtaaataaaacctgatagtggtctttgcaacataaagaataccttttccattgagcgaccacaaaaagccttcatggcattcacgaaatcattgtacttctcgaactgaaccacaatcttacaatggagacctgatatgaggtctccactatcctcatctgcgtccttacctagatcatcgtcctcagcaacattaagattcctatagaggattagttaatgcagcggaacatggaatttatgtaaactatcggaattatattaacatcagattcattggtaaacagaataaatgatccgaagaatactgagaacacatggtaagcaagttcaatacaatgattgtaattagtcttcagataagatttccatacaaaatgtcatttcttttgaactacatggacaaatactgtatactatgatcaaatgtagatgcatcaaatctatccaaagcagcacaaaactacttaattttccaataagcaagccatagatcactctcaactcacatagtgtcacattcttgaagcagatttatgaatgttctcttcactccgattgaaaaaaaaacaatcctaatcaagctggacatgaaagatgacaaaatcttacctaattttcccaaagctagagaagattgtatgtgtaaccaacatagaaggcttcgatgaaactcgtggctcagcaaaccatcttgatggcacacctctaagtataatcgtatcagcctctctccttccttcccttgaatgtcctgcaaatcacaatcacatcaattaccacgaaaaaatcgtaaaatcaaaatccaaaattgaagaaccaagattaccaaaagcgtaaaactcctcccaatccttcttcaacttctcgaaatcatctgaaatcggaagtaccacactaagcttatacttaactccttccaaattaagctcaataccattcatcttctccaccaaactcttcctccaatccaaaaacttcttctccaattccttcacatctctctctccatcattctccttcttcttcttcttcccatcgagaaaccctaaatcgcgtataaacaacgatccatgagcaactggctcctcacgcttccgtttcttcaagtccttgtgacgacgaactacgatgtcttcctccggaactgtgacggaggttacgacagagtttttgaggtaatctattaaggatcgcttgagttgccattcgtcgatggatttggatacggatgggactactgggtggattgtgagattgagcttgacgcgtgagacgagagcgagaccgttctcttcgatatctagagtttctatcggagatagctcttctaacgatcgcatttttcgccgtcgatgcaaaattcaaaatcgcgattggctctctctctcagagtgtcgtcggctattgagtacagagaacaggaggatactgaaaacagtggtaaaccagaattccaaatcggttatttccggttctcttggtttccaatattttgggaataaattgcataaacggtccaaaatagagataaattccaatgtaaattttttgaacattgactgaaaccattaataaatgttgaacgtttcatccaatgcctaaatatatatggtaaggattcttatcttagttatgagttttggcatactaggactgaagcattgcatcctactgtgagttttggtggtttgtgctcttctgttgaccttagcaatgcgtccatataaattgagtatggttggattactgttcatacctctagcgaaacattgcaattcgctaggtctctattgtggggttagatggcatgaaccattagttgcacaaatgaactctaatgcatatcatagaggcttgtttttggatatagtttacgaaatattgagatgatatctttcatacaaaaacaaaaaatgcatatgatgatgacactcttacatacacttttggtactatctatccgcgtatgattttaagataatttttttgagcttttactttaattagaatttagtgatatacttgtatgcacaaatttatacaagcaatttatgaatacggtatacacaaatttatatacaaacagttagaccaataccaaaatttggtgatatacttgcaaacctagcatgctaacgaatttgataacttacatgccttatcccatctagcgaaacaaattagagagattaaactgttggagataaatttagaactcggttgatcacaactcaacatttcgcactcaaacattacaaaaatactagtctcctacatcaggattacaaagtggtcttccgcatttgttcatttggaaaaatatacaaccaaacaagcgcattcgatgatacaaattcttgtaccacattgaaattcacttacaatattttaattcgaacaaatttagctgagaatgtctttattgatagcaaaaagttgtgttaatttatattttacgcatccacatttgtgtgttttatgctttcacatttgtaaagaatttctttgaacagttgtgaaaattttcaacatttatgaaagaaaagaaaaaaccacttaataattttcaacatttatgaaatttgaaaaatgtgttaattactacgtgtttatgtaaagttatatgacccgtcttgcccattctctccccgacgaagacacacacagacaaacaaatcctagcttagcaccgtcgcgaccgaattcgaaattccggtaacccaatcgccgggaaaatccaccgctcgtggctaccgatattgattctaatcggatctagcggctccctttcttcgtccagatctcgtacttcattcgacctcgattcgctgtgcaagttacgatg

SEQ ID NO: 24523 - DNA, 3003 bp, Unknown
  misc_feature (1)..( 3003): 2750-1469P.txt file - cDNA_ID_2178944; gDNA_ID_1971906; Annot_ID_176988
tcttttcttttgatattgttttgtttcttattatctctcgttctatcgaatgatctaactcgagcatccaacgatctaactcgagcatctaacgatccacgtggacccaacaacgtcggtcagagtttgactagtagatgaaggactattcttgtggtcgttgtcacgcggtggctgatattttctcttatttttattttattttaactattttttacgttatatttaagtcttgaaccaatagaaacgacgaatcatacattactcagcttgactttgaaataatcctataacaaaagagcattccaagaattttatccaaaaaacaaaataaaaaagagtattcaagcttggtggcgccgtttgtttttggtttattcactaaagttactctgttttagttgtataaatacacactcccatttgtgtatttcttttcatcaatcacaaagatctctctacttcaataaatctccaccttactttaagaacaagaaaaacacagtattaacaaatggcaggaatcaaagttttcggtcacccagcttccacagccactagaagagttctcatcgctcttcacgagaagaatgtcgactttgaattcgttcatgtcgagctcaaagatggtgaacacaagaaagagcctttcatccttcgcaacgtgagtacataaaacatctgtcaagacaaaatattatatttcatctagatactgaatcttggtcttaacaatcttgaatattgtttttgcagccctttggtaaagttccagcctttgaagatggagacttcaagattttcggtaaatacaaatatatatcattatagtcatgtttacaaatttttggttttatgatcattgcaataatagaaagcagaaacactcaaaaatgttttttttttggtgggcagaatcaagagcaattactcaatacatagctcatgaattctcagacaaaggaaacaaccttctctcaactggcaaggacatggcgatcatagccatgggcattgaaattgagtcgcatgagtttgacccagttggttcaaagcttgtttgggagcaagtcttaaagcctttgtatggtatgaccacagacaaaaccgttgttgaagaagaagaggctaagctagccaaagtcctcgatgtttacgaacacaggcttggtgagtccaagtatttggcttctgaccacttcactttggtcgatcttcacactatccctgtgattcaatacttacttggaactccaactaagaaactcttcgacgagcgtccacatgtgagtgcttgggttgctgacatcacttcaaggccttctgctcagaaggttctttaagtgaatctcaaactatttatcgatcagaagatgtaataaaagtggcgatgacctaattgcccaattctcataaactctgtttttctttttgtgtttactctgtttttctgctgccgagtgtttgatttgaatgtaatcttcgataatgagtcttgatataataaaatatttcttatcttaaagtttaactaccaattaatgttgatctcattcttcaaagttgactatcattctcctaagtcttgaacgttgacttccaaattaggtcgctctgctactcatcaatcactaatcttcttcctttccctaatcgattccaaaccttctgtggtgatggcaagcttcaaagtcaacaatgttattcatatttgtttgagcgtaactgtcaccaaaaaaggttcctagatcaaaaaagttgaaagttaattagtttccgaaataaaacagaggaacaaaaggaagcgtgtttaagataaaattagggttttcttaggaaagcatataaataaattgcatagctgtcgcaaaacctctgtttactcgagtgcgaagaaacgacggaaatggttattaccaggagacggagacccttttcaattctcgccggaattaggattctcatttcctaggtagattacttgtattcacggaatgtaagtcttaactagggtttccatttaactggtcttttctgctcgaacgatcgtcttttaatctctaaactctttactgaagtagacctattttgaactatttttgtttactaatttagcgattagtcatcgacgacctagtaaacttgttataacgagggtatattattacgtaacgatcagttgcttatatttgttatatcttattagggtttttagcctcttgaccttactcatgcaactattgatctgataaacatttttgagtttgatttcgggaaaattttgatatgtctagtcttgctcagagtctcgagctatatctgaatacatctcgtctgtccatagatcaaaaggctcataacttgtgaattacgaaagctacaaaacaatgggaacacaaacattgtgaatggatattgaaacttatgagttcgatccactcgcatcaatacttacatgggtataatccattaaatctaaagacggactataaggttgtgaatgcaagcaaggcgaagctagagaaggttctagatagatttattacgaagaacgattcaaaaagaatagcttcttgactaataataacttcacattgcctcatctccttgattcaatgatccaatttgaacatccaacgatccatatgttttcaacaacgtcggtcaactttgactagtatacattaaaagactattcttgttgtcttatccagccatggttgatattttctccgattatattgttttataagttatatgaacagtatatgaaaatcttgaaccaatagaaacgacgaatcatacgttactcagcttgactatgaaataacaaagagtattcaagcttggtggcgccgtttgttttttgtttattcactaagttactctaatttagttgtataaatacactctcccatttgtgtatttcttttcatcaaccacaaagatctctctacttcaataaatctccaccttgctttaagaacaaagtcttaacaaatg

SEQ ID NO: 24524 - DNA, 3003 bp, Unknown
  misc_feature (1)..( 3003): 2750-1469P.txt file - cDNA_ID_2178947; gDNA_ID_1971906; Annot_ID_176989
aagtcttgaacgttgacttccaaattaggtcgctctgctactcatcaatcactaatcttcttcctttccctaatcgattccaaaccttctgtggtgatggcaagcttcaaagtcaacaatgttattcatatttgtttgagcgtaactgtcaccaaaaaaggttcctagatcaaaaaagttgaaagttaattagtttccgaaataaaacagaggaacaaaaggaagcgtgtttaagataaaattagggttttcttaggaaagcatataaataaattgcatagctgtcgcaaaacctctgtttactcgagtgcgaagaaacgacggaaatggttattaccaggagacggagacccttttcaattctcgccggaattaggattctcatttcctaggtagattacttgtattcacggaatgtaagtcttaactagggtttccatttaactggtcttttctgctcgaacgatcgtcttttaatctctaaactctttactgaagtagacctattttgaactatttttgtttactaatttagcgattagtcatcgacgacctagtaaacttgttataacgagggtatattattacgtaacgatcagttgcttatatttgttatatcttattagggtttttagcctcttgaccttactcatgcaactattgatctgataaacatttttgagtttgatttcgggaaaattttgatatgtctagtcttgctcagagtctcgagctatatctgaatacatctcgtctgtccatagatcaaaaggctcataacttgtgaattacgaaagctacaaaacaatgggaacacaaacattgtgaatggatattgaaacttatgagttcgatccactcgcatcaatacttacatgggtataatccattaaatctaaagacggactataaggttgtgaatgcaagcaaggcgaagctagagaaggttctagatagatttattacgaagaacgattcaaaaagaatagcttcttgactaataataacttcacattgcctcatctccttgattcaatgatccaatttgaacatccaacgatccatatgttttcaacaacgtcggtcaactttgactagtatacattaaaagactattcttgttgtcttatccagccatggttgatattttctccgattatattgttttataagttatatgaacagtatatgaaaatcttgaaccaatagaaacgacgaatcatacgttactcagcttgactatgaaataacaaagagtattcaagcttggtggcgccgtttgttttttgtttattcactaagttactctaatttagttgtataaatacactctcccatttgtgtatttcttttcatcaaccacaaagatctctctacttcaataaatctccaccttgctttaagaacaaagtcttaacaaatggcaggaatcaaagttttcggtcacccagcttccacagccactagaagagttctcatcgctcttcacgagaagaatctcgactttgaattcgttcatatcgagctcaaagatggtgaacacaagaaagagcctttcatcttccgcaacgtgagtaatatttgtcaaaacaaaatattgtttcatttagatactgaacctttagtctgaaaaatcttgaatgttgttttgcagccttttggtaaagttccagcctttgaagatggagacttcaagcttttcggtaagcagcaaaacacttaaatttagacctaatctcaaattctgtttttgacaattgcaattaaagaaagcagaaacactcaacttttttaatgttttgttggcagaatcaagagcaatcactcaatacatagctcatttttactcagacaaaggaaaccaacttgtctcccttggctccaaggacattgcgggcatagccatgggcattgaaattgaatcgcatgagtttgacccagttggttcaaagcttgtttgggagcaagtcttaaagcctttgtatggtatgaccacagacaaaaccgttgttgaagaagaagaggctaagctagccaaggtcctcgatgtttacgaacacaggcttggtgagtccaagtatttggcttctgataaattcactttggtcgatcttcacactatccctgtgattcagtacttgcttggtacaccaactaagaaactctttgacgagcgtccacatgtcagtgcttgggttgctgacatcacttctaggccttctgctaagaaggttctttaagtgactcacaaactgttaatcagaagattgaataaagtggcgatgacctcattgccctaattctcataaacaataaaagtggcgatgacctaattgccaaattctcatacactctgtgatttttttgtgtgtgtctcctctgttttttttttttggtttgaatgtaatcttcaataataatgagtcttgatatataataaaaatatatttggtagcctaaagtttagctactaataagtagtgttgatctcttatgaccaaaaaaaagaaaagaaaattagtgttgatctcattcttgaaagttgacttaattattctaatttttgaaagctgacttgagacttcatttttgccattgtaaggaagaaattgactgttgacttttaatgctttgcaatttaattagaatattaaacttcatagttagacagaatcacattcagttattaaaatatcacaacactaactccaagttaggtctgctactcatcaatcactaatcttaacaccaactccagcttagttatgctactcatcaaatcactaatcttcttcgttttcctaatcgattccaaaccttgtgtcattgtgtgacaaagtcaacaatgtttttttctttgggtctaattcgtaccaaatataagtttctagataatattcaaagaagttggaagttaaatattatttccgaaataaaacagaggaaataaaaagcggataaaagttttgttttttttccgtaagcgtagaagaaaattgaatg

SEQ ID NO: 24525 - DNA, 3000 bp, Unknown; identical to SEQ ID NO: 8849
  misc_feature (1)..( 3000): 2750-1469P.txt file - cDNA_ID_2178989; gDNA_ID_2936560; Annot_ID_194393

SEQ ID NO: 24526 - DNA, 3000 bp, Unknown; identical to SEQ ID NO: 8849
  misc_feature (1)..( 3000): 2750-1469P.txt file - cDNA_ID_2178989; gDNA_ID_1971906; Annot_ID_177008

SEQ ID NO: 24527 - DNA, 3003 bp, Unknown
  misc_feature (1)..( 3003): 2750-1469P.txt file - cDNA_ID_2178993; gDNA_ID_2936560; Annot_ID_194394
acattttcaaatatggatgctgttattttgtggatttttaagtgtctaatatattatcgaatatgcagtgttttgtggattttgaagtgtctaatatttattgaatacagtaagttaatatatatatatattatatagacaaattgacatatatttttggccaaagtatctcccttggattttgatcatactctgcgaatgtgattcctttcggttttgatcatactcgccaaagtgcatgaagaaggttttttgaatgtgtttcgtggaataacatttattttcgccaagaacataactttatgctttccgatttttagtttacagtgtgttacatactctgcgaatgggcccctatttactctgtttatgaagtcaatttttgaaatgttggatgctctcgaattggatttgcagttacgaacagagaacacttatacggacaaaattctgaggttcgttatataaagcagtgggaagttaaacaacgttgtagtaactgggttcgttagcgtgttaaaacagcatgctttcaaaaagttgcatcgcccaccgtggggctcgaacccacgaccacaaggttaagagccttgcgctctaccaactgagctagacgggcttgttgactatattgcacactattgttatactcatataaaaaaaacacatcccaattttaactagatgcaggaaagaaatttgcaaggacggtgctctgcgacaaaagattcttgtgaagaaacaaactgaaaactcatcagcttatattataaggctaaagctagtgttatgtctgtaaaaaagatgcatatatataaatagagctgaataaaattacaacaatgacaatcacctgcctttcccattggcgacttcacatctttattttactcagaagagtcacattcatcatcaaacatggctgatgacaacagtccctgtacaaactcacacttctttgccttctccaatttatcactatccgataaaggacacgacgatgtaccctcttttgctgctgacgaatccttaatcggattcttgtcttctacacttgaatcaggcagcacaagcttggtctgatttggtaatgcagaattgttgatgaacgataaaaattgatcggaaacatgtttagagggatgctgatgatgattcatagatggtggcaactcatcaagatgaggttgaagatatttatcagataaatatggatcttccctgtaagacatttccttctgctcactgtaaaattatcggtcaaggaatttcaaataaatcacattcattatagcgacggaaatttgacttgaaaggttttgaaaagaaacaaaaaaggatatcttcaagacatctctatgatgtgatgttatatgatccaccatatgcatcttcacccttttgctacatacaggacatatctacaaaaaccacaaaacaaccaaaacgaattgtaagatgatgctaccacatgacaattcacggaaccagattaataatgttccatcatactacttatatattcatttctttagctcgtaaaaccaatctatgcttcaaaacagagagctcaagtcacctactctctatagcaagtatgtaaagccaaaaaaagtgtcaaaagtattaatatcctaaaaccttaaactgatcaatggagagttatgtaaaacccaaagagtaacttaagataagagtggcatgtttctctattaaaactatttgcaatagcaatcagattctcaaacgcatcaatctaaaacaaatcctaatcaaaattatagattgaagttatgtttcccacaatccgaataactaagctgtgtaaaactgcttcatgtgaagcttgagtgtgaaatgaaaagagcaggagagataggaagtgaattcacaaaccccattgttagcttcatgacgatgttcttcgtcgatatggtgacacaattcaactaaatcataatcacttgcgcaaaacgggcatggatactccactgctatatcgtcgtcaacttcttcaaactcttccaaatcttgataaggccctgaaatattcaccactaattaactcgagagcaaaagagaaaaaaaaagtcttctctcatctaaaaagcaaaacgtaaagctacaatttttaacttaaacgaccaactacaaaaagtcatcaaaacagaactcaactcaatcgaaacccaattaagaccaatcttcaatcataaaccctaaaaatgaagtttgaaagaaaaattgaggggatttggataataaacctgattgatacttagcagcagtttccgatcgatagcttctagaagaaccagatgagctaacgcaccacatatcgtcttccatctgctttgtcggagcctttcttatgtaaaaatctcagataattgatgagagaccttcttcgtcgtgtcagctaaatacccaattgtgtaagagatagcagaaagaaaatgtcaagaaactactccacggaaaggccaaacctttttttaatccgccgagtcttaatggacaagaatacttcgggtggtaagagtgaactactattatacccttacattgcactgagcctttttctcagctaactcaggggtgtttttgtccttttcttgtaaggatgttactgttattgcattgctccccaagttaattatcagtaaaggcctgacttgaaattatataaatgggcttaaagtcaagattttgaaatgatataaatgggcttgaagtcaagattttgaaattatttaaatgggcttgtaggcctaataataaaagcccatgttaaaatctgagaatttttagattctgatagacggaaaatcccaattttcccggaaattttcagacaaaatcgcgttgagattcaacaactttgagtgagtttttttttttgtcatttacctttgtcgcttcgacgtgagacgagccgtggaagaagacgaaagggctcttaagctctctttactcttttcttctcctcctctttttgagatg

SEQ ID NO: 24528 - DNA, 3003 bp, Unknown
  misc_feature (1)..( 3003): 2750-1469P.txt file - cDNA_ID_2178993; gDNA_ID_1971906; Annot_ID_177009
tacattttcaaatatggatgctgttattttgtggatttttaagtgtctaatatattatcgaatatgcagtgttttgtggattttgaagtgtctaatatttattgaatacagtaagttaatatatatatatattatatagacaaattgacatatatttttggccaaagtatctcccttggattttgatcatactctgcgaatgtgattcctttcggttttgatcatactcgccaaagtgcatgaagaaggttttttgaatgtgtttcgtggaataacatttattttcgccaagaacataactttatgctttccgatttttagtttacagtgtgttacatactctgcgaatgggcccctatttactctgtttatgaagtcaatttttgaaatgttggatgctctcgaattggatttgcagttacgaacagagaacacttatacggacaaaattctgaggttcgttatataaagcagtgggaagttaaacaacgttgtagtaactgggttcgttagcgtgttaaaacagcatgctttcaaaaagttgcatcgcccaccgtggggctcgaacccacgaccacaaggttaagagccttgcgctctaccaactgagctagacgggcttgttgactatattcacactattgttatactcatataaaaaaaacacatcccaattttaactagatgcaggaaagaaatttgcaaggacggtgctctgcgacaaaagattcttgtgaagaaacaaactgaaaactcatcagcttatattataaggctaaagctagtgttatgtctgtaaaaaagatgcatatatataaatagagctgaataaaattacaacaatgacaatcacctgcctttcccattggcgacttcacatctttattttactcagaagagtcacattcatcatcaaacatggctgatgacaacagtccctgtacaaactcacacttctttgccttctccaatttatcactatccgataaaggacacgacgatgtaccctcttttgctgctgacgaatccttaatcggattcttgtcttctacacttgaatcaggcagcacaagcttggtctgatttggtaatgcagaattgttgatgaacgataaaaattgatcggaaacatgtttagagggatgctgatgatgattcatagatggtggcaactcatcaagatgaggttgaagatatttatcagataaatatggatcttccctgtaagacatttccttctgctcactgtaaaattatcggtcaaggaatttcaaataaatcacattcattatagcgacggaaatttgacttgaaaggttttgaaaagaaacaaaaaaggatatcttcaagacatctctatgatgtgatgttatatgatccaccatatgcatcttcacccttttgctacatacaggacatatctacaaaaaccacaaaacaaccaaaacgaattgtaagatgatgctaccacatgacaattcacggaaccagattaataatgttccatcatactacttatatattcatttctttagctcgtaaaaccaatctatgcttcaaaacagagagctcaagtcacctactctctatagcaagtatgtaaagccaaaaaaagtgtcaaaagtattaatatcctaaaaccttaaactgatcaatggagagttatgtaaaacccaaagagtaacttaagataagagtggcatgtttctctattaaaactatttgcaatagcaatcagattctcaaacgcatcaatctaaaacaaatcctaatcaaaattatagattgaagttatgtttcccacaatccgaataactaagctgtgtaaaactgcttcatgtgaagcttgagtgtgaaatgaaaagagcaggagagataggaagtgaattcacaaaccccattgttagcttcatgacgatgttcttcgtcgatatggtgacacaattcaactaaatcataatcacttgcgcaaaacgggcatggatactccactgctatatcgtcgtcaacttcttcaaactcttccaaatcttgataaggccctgaaatattcaccactaattaactcgagagcaaaagagaaaaaaaaagtcttctctcatctaaaaagcaaaacgtaaagctacaatttttaacttaaacgaccaactacaaaaagtcatcaaaacagaactcaactcaatcgaaacccaattaagaccaatcttcaatcataaaccctaaaaatgaagtttgaaagaaaaattgaggggatttggataataaacctgattgatacttagcagcagtttccgatcgatagcttctagaagaaccagatgagctaacgcaccacatatcgtcttccatctgctttgtcggagcctttcttatgtaaaaatctcagataattgatgagagaccttcttcgtcgtgtcagctaaatacccaattgtgtaagagatagcagaaagaaaatgtcaagaaactactccacggaaaggccaaacctttttttaatccgccgagtcttaatggacaagaatacttcgggtggtaagagtgaactactattatacccttacattgcactgagcctttttctcagctaactcaggggtgtttttgtccttttcttgtaaggatgttactgttattgcattgctccccaagttaattatcagtaaaggcctgacttgaaattatataaatgggcttaaagtcaagattttgaaatgatataaatgggcttgaagtcaagattttgaaattatttaaatgggcttgtaggcctaataataaaagcccatgttaaaatctgagaatttttagattctgatagacggaaaatcccaattttcccggaaattttcagacaaaatcgcgttgagattcaacaactttgagtgagtttttttttttgtcatttacctttgtcgcttcgacgtgagacgagccgtggaagaagacgaaagggctcttaagctctctttactcttttcttctcctcctctttttgagatg

SEQ ID NO: 24529 - DNA, 3003 bp, Unknown
  misc_feature (1)..( 3003): 2750-1469P.txt file - cDNA_ID_2178997; gDNA_ID_2936560; Annot_ID_194395
gaattcttcatatggtgatttactgatttgtttgccaagtctcagttttttgataatgtaaaaaagtctttgactcttgtatctcttctatacaatgatagttgggacgaatggataaggctggactgtctgttgaaacattcagatgagaatattgagaaacagaaagaacagggtttgaaacagcaagggattaagagtgctatggcttggaaagtgtcaaagatgaaacctagaagccctaatggtcagtcagcttcttcttttgtttgttttgcatattcttgtctcgatggatatcttgctgcttttgtggatattcagagtctctatcagggactctcatttggtcttgcttgctttattctatgtcgactaagtagaagttgttgagattaaagtatacatacacatctttcgttgttagttgagatattgtgtcagttgagatattgtgtcagctgagattttgttcaatattttcttaatttttgcagttgctagaggaagaaagcggaagcaagattctgttgatacggtaatcgctcctttagtggatgtatttgcttaatctttcagcttccaaatatccagggatttttttaatcaggggagtcttactcatgtcttgttgtttgctgaatacaggagaagaatgtgcttccctctgacaaccttttaagtttcaatattccaccagcattaaggaagcaacttcttgacgattttgaatttgttactcagatgcagaaggtatttctatcagcctgttatttcttctctcaattctcaaacggtcttttctgtgtgttttgacgcagttgaccatagtcttttgattcatttagtcagagaaaaaatattcttgtagtcgcatgaatatatttgttgtgaatgtcatatttaggtgcatatgttaaggaatttattttaagtcatttttgggaattgtctgagcagcttgtgcaacttccgcgttctccaaatgtggatggcatcttgaagaagtacattgacagccaaatgaagaaacatggcaggtaagctctttgtggattatagtttctttctgctgtcagtttccaacagttacacttgttaatctcttttgttgctattctcatatacttaaagagagtataaatcatttgtatatgctccatggataatttggttgacagataaagcgtattccaagcttctgatatatctagtactttctttggtgaatctatatagggtaacagattcattagaggaaattctgaaaggcttgcgttgctactttgacaaagctttaccggtgatgttgctttacaacaatgaacggaagcagtacgaggaatccgtatcagggggtgtttctccttcaactgtgtacggagcagagcatttgttgcgactctttggtaaggccagtttttgtaatctgcaaatctgcctttatcatgtggtttagttgtcaagataagactatataaatattgagttttgcagtgaaattaccggagttgctagtacatgtgaatatggcagaagagacattgaaggaattgcaggacaactttgttgatattctcaggtttcttcttcttgttctcctacttaactctttttacaagtatttaaagacaaataacaaaaacaaaatgataaagcaggttcttgaggaagaatcagagtgtgctttttgtatcgacatacaaagcagtggaagaaatggagaagaaagaaggttaggaaattgtgcctaatgacgtgttcttgtaagtatgtgcagcgaatcttctctttgtagtattttgtaacgagacctaagaccatcctgaccatccttattgatggtctcttaacataactcttatgttaagagatatgtcttataattaacaaaagtgacttaaagtctcttatataagaaattttgttagttataaaacatgtctcttagcataagaattgttttaagagatcatcaataatgatgatctaagaactattatactatgttccgtctcgattttgaaagtacttaaacgtcgttatcgtgtttgtctcggcgttttaaattccactgtattagtaagaatttatttttaaaataactttagtcatttttaattatctcttctcccttttcaattattaatgatcatagtaacttctcttgatttgtaaatatgctacatagttgatcttttgaatatacgaatgaaaacatattataatagtatgtgttcaaaatcttttgagttttatgagtacagaactatatgtttaatgggcagattagtatataaaattaccagtgcatcagaaggaataatgatctactcgagtagtatatcaaaataatactattcaaatgtataccaacgacaatgagttcaaaatcatcaaaccccatgggatgatgagcaaataatatttttatcagctactctatacatcatttgatgataatatgcaaaaattgtataccaatgagttcaaaattatcaaaccacatgggatgagaaaaaagcatattactatttttaaacagcttctccaatataaatttatttgaccgttacggaaagggagagagatacacacactctttctcttttattattttccgtttatttgacttttcttctttatagatcgacctggtcccacgtaatcttttcaaacttaccgtttggattcgataatcaccgtccgatctcacatgaagcaacgtgaataaaatgaacggtttagatctatcgaccgtttatagcaatacctttctcctttataatctctatatctctctctctctgaatttcgaaaattataatgctcttctgcttcgtactagctgcttcagcttcttcttcttcttccttagattcaaaatctctcttcttctgagtttctgattttcaagtttgagaactactcttttccttctaaatctttgatttttttctctcgtgatttttgtggttcactgctaattgtgaaccaaagatg

SEQ ID NO: 24530 - DNA, 3003 bp, Unknown; identical to SEQ ID NO: 24529
  misc_feature (1)..( 3003): 2750-1469P.txt file - cDNA_ID_2178997; gDNA_ID_1971906; Annot_ID_177010

SEQ ID NO: 24531 - DNA, 3000 bp, Unknown; identical to SEQ ID NO: 9894
  misc_feature (1)..( 3000): 2750-1469P.txt file - cDNA_ID_2179036; gDNA_ID_2096291; Annot_ID_195358

SEQ ID NO: 24532 - DNA, 3000 bp, Unknown; identical to SEQ ID NO: 9895
  misc_feature (1)..( 3000): 2750-1469P.txt file - cDNA_ID_2179108; gDNA_ID_2096291; Annot_ID_195374

SEQ ID NO: 24533 - DNA, 3003 bp, Unknown
  misc_feature (1)..( 3003): 2750-1469P.txt file - cDNA_ID_2179222; gDNA_ID_2096291; Annot_ID_195400
ctgaaattatttcaatattgaaccttggacatataagagttccgaatcgaatctcttttgaaagaagatcttttgtctcgtggtagcctgctccagtccccttacgaaactttcgttattgggttagccatacacttcacatgtttctagcgattcacatggcatcatcaaatgatacaagtcttggataagaatctacaacgcactagaacgcccttgttgacgatcctttactccgacagcatctagggttcctcgaacaatgtgatatctcacaccgggtaaatccttaacccttccccctcttactaagactacagaatgttcttgtaaattatggccaataccaggtatataagcagtgatttcaaatcccgaggttaatcgtactctggcaactttacgtaaagcagagtttggttttttgggggtgatagtggaaaagttgacagataagtcacccttactgccactctacagaaccgtacatgagattttcacctcatacggctcctcgttcaattctttcgaagtcattgggtccctttcctcgttcgcgaatctcctcccttcttccactccgtcccgaagagtaactaggacaaactcggtcacgttttcatgttccaactgaacactttctatttttgattattctcaaaggataagattattctttttaccaaacatctgcgggtccaatcacacgatcttataataagaacaagagatctttctcaatcaatctctttgcccctcattcttcgagaatcagaaagagactttttcaagtttgaatttgttcatttggaatctgggttcttctacttcattttgatttacttattttttctttattttctctctcttttctttatttgatttcttttttgattttattcccttccatcattcttaagtcccataagtttgatcctatagaatctgacccattttctcattgagcgaaggggtacgaaataaattcaatcagatttatttttgatcaaaaaaaaaaaaaaaaatcactatgtgaaatcttcgtttttttttttctctttctctatcgctttcccataagtacagcacttgttgaatcgatagagaaccttttcttctgtatcgatatgaatccattatgaatcgatattattacattccaattccttaccaatatccctcaaggaaaatcccgaattggatcccaaattgacgggttagtgtgagcttatccatgcggttatgcactcttcgaataggaattcattttctgaaagattctggctttcgtgctttggcgggtctccgagatcctttcgacgacctatgttgtgttgaagggatatctagatgatccgatcaattgcgtaaagcccgcagtagcaacggaaccggggaaagtatacataagtatacagaaaagacagttcttttcttttctattatattaggattttctattctattagattagttagtgatcttggcgcagtgagtcctttcttccgtgattaactgttggcaccagtcctacattttgtctctgcggaccgagaagaaaggaggctccgcgggaagaggattgtaccatagaagcacggaggtaaacctctttccaatatataaattctggcaatgtagttgggctttcatgttgatccgaatgaatcatctttttcgcggagtgaaatctttgcctgctaggcaagatgataggatagcaagttacaaattctgtttcggtaggacatgtatttctattactatgaaattcataaataaaatagttaatcgtggggttaccattctctctttttttttttcgttatctcgcatgtggtcctaagaaaagggaatttgtcgatttttcggggtcttaaaggggcgtggaaacacataagaactcttgaatggaaatggaaaagagatgtaactccagttcctttggaaataggaagatctttggcgcaagaataaaggattaatccgtatcatcttgacttggttcttatttctctatttttttaagtttaagaaaagaataccgtttctcctacccgtatcgaatagaacatgccgagtcaaatcttcttcatgtaaaaccggcttgatttagatcgggagaatcgtacggttttatgaaaccatgtgctatggctcgaatccgtagtcaatcctatttccgataggagtagttgacaattgaatccaactttttccattattttcatttcatacccgtataaagtgcgaaaggaaagcccggctccaatccaagttgttcaagaatagtggccttgagtttctcgaccctttgacttaggattagtcagttctatttcttgatgggggaagggatataactcagcggtagagtgtcaccttgacgtggtggaagtcatcagttcgagcctgattatccctaaacccaatgaatgtgagtttttctattttgacttgctccctcgctgtgatcgaataagaatggataagaggctcgtgggattgacgtgagggggtaggggtagctatatttctgggagcgaactccatgcgaatatgaagcgcatggatacaagttatgacttggaatgaaagacaattccgaatcagctttgtctacgaagaaggaagctataagtaatgcaactatgaatctcatggagagttcgatcctggctcaggatgaacgctggcggcatgcttaacacatgcaagtcggacgggaagtggtgtttccagtggcggacgggtgagtaacgcgtaagaacctgcccttgggaggggaacaacagctggaaacggctgctaataccccgtaggctgaggagcaaaaggaggaatccgcccgaggaggggctcgcgtctgattagctagttggtgaggcaatagcttaccaaggcgatgatcagtagctggtccgagaggatgatcagccacactgggactgagacacggcccagactcctacgggaggcagcagtggggaattttccgcaatg

SEQ ID NO: 24534 - DNA, 3003 bp, Unknown
  misc_feature (1)..( 3003): 2750-1469P.txt file - cDNA_ID_2179226; gDNA_ID_2096291; Annot_ID_195401
agccccgtaacttcgggagaaggggtgcctcctcacaaagggggtcgcagtgaccaggcccgggcgactgtttaccaaaaacacaggtctccgcaaagtcgtaagaccatgtatgggggctgacgcctgcccagtgccggaaggttaaggaagttggtgacctgatgacaggggagccggcgaccgaagccccggtgaacggcggccgtaactataacggtcctaaggtagcgaaattccttgtcgggtaagttccgacccgcacgaaaggcgtaacgatctgggcactgtctcggagagaggctcggtgaaatagacatgtctgtgaagatgcggactacctgcacctggacagaaagaccctatgaagcttcactgttccctgggattggctttgggcttttcctgcgcagcttaggtggaaggcgaagaaggcccccttccgggggggcccgagccatcagtgagataccactctggaagagctagaattctaaccttgtgtcaggacctacgggccaagggacagtctcaggtagacagtttctatggggcgtaggcctcccaaaaggtaacggaggcgtgcaaaggtttcctcgggccggacggagattggccctcgagtgcaaaggcagaagggagcttgactgcaagacccacccgtcgagcagggacgaaagtcggccttagtgatccgacggtgccgagtggaagggccgtcgctcaacggataaaagttactctagggataacaggctgatcttccccaagagctcacatcgacgggaaggtttggcacctcgatgtcggctcttcgccacctggggctgtagtatgttccaagggttgggctgttcgcccattaaagcggtacgtgagctgggttcagaacgtcgtgagacagttcggtccatatccggtgtgggcgttagagcattgagaggacctttccctagtacgagaggaccgggaaggacgcacctctggtgtaccagttatcgtgcccacggtaaacgctgggtagccaagtgcggagcggataactgctgaaagcatctaagtagtaagcccaccccaagatgagtgctctcctattccgacttccccagagcctccggtagcacagccgagacagcaacgggttctccgcccctgcggggatggagtgacagaagttttgagaattcaagagaaggtcacggcgagacgagccgtttatcattacgataggtgtcaagtggaagtgcagtgatgtatgcagctgaggcatcctaacagaccggtagacttgaaccttgttcctacatgacctgatcaattcgatcaggcactcgccatctattttcatagttcaactctttgacaacacgaaaaaaccattgttcaactctttgacaacatgaaaaaacctaaaattctgcccttctatccaaaggatgggggggcagaggcctttggtgtccactccagtcaagaattggagcctcacaatcactagccaatatgcttttctcgcatgcctttcttcgttcatggttcgatattctggtgtcctaggcgtagaggaacaacaccaatccatcccgaacttggtggttaaactctactgcggtgacgatactgtaggggaggtcctgcggaaaaatagctcgacgccaggatgatgaaaagcttaacacctctcattcttattactttttcatattgaaaaaaaaaatgaaaaatgaaaaggttgtcttattcaaaaccccaattatgaaatcatcccacttcacaccccggaacgcaccgttcttatagagagaaaggcactttcacatccgaaatggctggggagaggaaaggttcctttttttagggtactcctgggaacagatccagtggagacggggtggggcttgtagctcagaggattagagcacgtggctacgaaccacggtgtcgggggttcgaatccctcctcgcccacaaccggcccaaaagggaaggacctttccctccgggggggtaggaaaatcatgctcgggatagcgatagcggactcaaagctatggaacttggggatgggtcttttgtcgaaatagagtggagtgaccttcttttttatttgaatttagatatatatctattatatctatcgcttttttaattttacatatagtatttttaaacggccgaatcagcatattttttgaagccccgtaactcttcctcagccaggcttgggcagaatagcggagcaagtattagtagcatagcaaaaatgcgttcctcatcattaagtcattaaattcatatgtttgctcgcggtaattgtgaactctcgggagaatcgatgactgcatcaaagatgcacttgttagtacatctgaaaattctgaattggctagttgtaaatagccccaggactatagaataaaggattatcccgaacctacaccgaggtattgacggtgattctcaaatatcacagaacagaatgtgatacgatgagatagaatgcaatagaaacaaagacacagggaacgggttaccgactcttaacggtcaaagcgaacccgttcattcttacattctgaattcttaaattcggaatgaatcaaatctccccaagtaggattcgaacctacgaccaatcagttaacagccgaccgctctaccactgagctactgaggaacaacgggagattagatctcatagagttcaattcccgttctcaacccatgaccaatatgaactcgaagtttccttcgtaacccccggaacttcttcgtagtggctccgttccatgcctaatttaatagggaacctcaaagcggctctatttcattatattccatccatatcccaattccattcatttaatatccctttggtgtcattgacataagagatgtcgtttctagtctatctctttctatttctatatatggaaagttgcaaaatcatcatataataatccagaaattgaaatagaaaagaaaaaagggaggtttgtgatg

SEQ ID NO: 24535 - DNA, 3000 bp, Unknown; identical to SEQ ID NO: 9901
  misc_feature (1)..( 3000): 2750-1469P.txt file - cDNA_ID_2179272; gDNA_ID_2096291; Annot_ID_195412

SEQ ID NO: 24536 - DNA, 3003 bp, Unknown
  misc_feature (1)..( 3003): 2750-1469P.txt file - cDNA_ID_2179276; gDNA_ID_2096291; Annot_ID_195413
gaacctaaacctgcgctcgagagatagctgtccatacactgataagggatgtatggattctcgagaagagaggagccatagtggtcccctccggaccgcccggatcccacgagtgaatagaaagttggatctacattggatctcacctgaatcgccccatctatcctcctgaggagaagtttggtttcaaaccccggttcgaacaggaggagtacgccatgctaatgtgccttggatgatccacatctcagggtcaggcgctgatgagcacattgaactatccatgtggctgagagccctcacagcccaggcacaacgacgcaattatcaggggcgcgctctaccactgagctaatagcccgtcgtgcgggcctcctgctgggggcccgctatgccaagccaaaagcgagagaaaccccatctctctctttcctttttacgcctccctgccgccacacgagagggacatgggggcgtaaaaggggatcctatcaacttgttccgacctaggataataagctcatgggtttggtcttacttcaccgtcgagaaacgaaagaaggcttccacctccaagtttaactcagacgtagctcccttctttttgggtgtgaagctgtgtcaaacctaaatacccaagaagcattagctctccctgaaaaggaggtgatccagccgcaccttccagtacggctaccttgttacgacttcactccagtcactagccctgccttcggcacccccctccttgcggttaaggtaacgacttcgggcatggccagctcccatagtgtgacgggcggtgtgtacaaggcccgggaacgaattcaccgccgtatggctgaccggcgattactagcgattccggcttcatgcaggcgagttgcagcctgcaatccgaactgaggacgggtttttggagttagctcaccctcgcgggatcgcgaccctttgtcccggccattgtagcacgtgtgtcgcccagggcataaggggcatgatgacttgacgtcatcctcaccttcctccggcttatcaccggcagtctgttcagggttccaaactcaacggtggcaactaaacacgagggttgcgctcgttgcgggacttaacccaacaccttacggcacgagctgacgacagccatgcaccacctgtgtccgcgttcccgaaggcacccctctctttcaagaggattcgcggcatgtcaagccctggtaaggttcttcgctttgcatcgaattaaaccacatgctccaccgcttgtgcgggcccccgtcaattcctttgagtttcattcttgcgaacgtactccccaggcgggatacttaacgcgttagctacagcactgcacgggtcgatacgcacagcgcctagtatccatcgtttacggctaggactactggggtatctaatcccattcgctcccctagctttcgtctctcagtgtcagtgtcggcccagcagagtgctttcgccgttggtgttctttccgatctctacgcatttcaccgctccaccggaaattccctctgcccctaccgtactcaagcttggtagtttccaccgcctgtccagggttgagccctgggatttgacggcggacttaaaaagccacctacagacgctttacgcccaatcattccggataacgcttgcatcctctgtattaccgcggctgctggcacagagttagccgatgcttattccccagataccgtcattgcttcttctctgggaaaagaagttcaggacccgtaggccttctacctccacgcggcattgctccgtcaggctttcgcccattgcggaaaattccccactgctgcctcccgtaggagtctgggccgtgtctcagtcccagtgtggctgatcatcctctcggaccagctactgatcatcgccttggtaagctattgcctcaccaactagctaatcagacgcgagcccctcctcgggcggattcctccttttgctcctcagcctacggggtattagcagccgtttccagctgttgttcccctcccaagggcaggttcttacgcgttactcacccgtccgccactggaaacaccacttcccgtccgacttgcatgtgttaagcatgccgccagcgttcatcctgagccaggatcgaactctccatgagattcatagttgcattacttatagcttccttcttcgtagacaaagctgattcggaattgtctttcattccaagtcataacttgtatccatgcgcttcatattcgcatggagttcgctcccagaaatatagctacccctaccccctcacgtcaatcccacgagcctcttatccattcttattcgatcacagcgagggagcaagtcaaaatagaaaaactcacattcattgggtttagggataatcaggctcgaactgatgacttccaccacgtcaaggtgacactctaccgctgagttatatcccttcccccatcaagaaatagaactgactaatcctaagtcaaagggtcgagaaactcaaggccactattcttgaacaacttggattggagccgggctttcctttcgcactttatacgggtatgaaatgaaaataatggaaaaagttggattcaattgtcaactactcctatcggaaataggattgactacggattcgagccatagcacatggtttcataaaaccgtacgattctcccgatctaaatcaagccggttttacatgaagaagatttgactcggcatgttctattcgatacgggtaggagaaacggtattcttttcttaaacttaaaaaaatagagaaataagaaccaagtcaagatgatacggattaatcctttattcttgcgccaaagatcttcctatttccaaaggaactggagttacatctcttttccatttccattcaagagttcttatgtgtttccacgcccctttaagaccccgaaaaatcgacaaattcccttttcttaggaccacatgcgagataacgaaaaaaaaaaagagagaatg

SEQ ID NO: 24537 - DNA, 3000 bp, Unknown; identical to SEQ ID NO: 8872
  misc_feature (1)..( 3000): 2750-1469P.txt file - cDNA_ID_2179402; gDNA_ID_1971910; Annot_ID_177068

SEQ ID NO: 24538 - DNA, 3003 bp, Unknown
  misc_feature (1)..( 3003): 2750-1469P.txt file - cDNA_ID_2179474; gDNA_ID_1971910; Annot_ID_177090
acatgaaccagaactacagaggtcctcctccaccaccaaacatgaaccagaactatcagggaccaccagcaccaaacatgaaccagaactatcagggacctccaccatcaaacatgggtcagaactaccagggaccaccaccgccaaacatgaaccagagctatcagggacctccaccgccaaacatgaaccagagctatcagggacctccaccgtcgaacatgggccagaactacaggggaccttcactgccgccaccaaacatgagtcagaattacgagggaccaccaccaccgaacatgaatggaggatggtctggaaactaccagcagaacggtggataccaacaacaaggtcagggtggtggaatgcagcaacagccttacccacccaataggaaccagagttaaaccgtcttgtgttttcatgtataggagcggataccattttgtggtcagtgttcttcagtttgtcactctgctttgtgagagagagactgagagttttagtctaataagttctgcatgagttattgtagccagcactcgtcaatctatttatttattatatcctcaagtcaaccttgtttatttatttagtggcacaagaaaaaaagagaaagctataaactaggagtagaaaagagttaatcaaaatccatcgatttcatggcaaaaagaccaaatctcgataaaacatcacttcctcgttggttcttagcagcttggatctgatcagcaagtgagatatctcctcttgttcgctctttccttatcaaatccaaatccagtttctccagtttagctgcaactgaaacaaccctatccgttccaattgcgatcttaccaagacttgttttcttcttgtgaatctgacaagacatttaatcaaaccaaagaatcatcaagtgggtttctaatattcttcagagtcatcaacggagtagtttttttatacctttgttagtctcttctttagtttagaacgtgaagcaatggttggattctccctttcctgctttggctttcgaatctttccttctcgtcggtctttctcctcacgttctttctttttttctgcagctctcctcatcttctcggtcctggcttttgcagcttcttttgctatcatcttggtttgttccttagctcttgctttctcttcagctaactgaagctgctcagatgaaaaatcttgttttattttttcatagctgtcccagtcaagttctgcctcgccacttcctcctttccttgcagcttctgcaatgttttctgaccacgatgacatgaacttctcctttaatcgcttcgatcttgaccgttctgcccaaacttgtttcactgaagctcttatcttctccttggtttcattactgcaagagacaaacttagcttagatatggctctagcttcattgttctctattctacactcaatactttacaaatctacctgtgtggttgttgatgatcggacatcttcttccgaacctgcaagatattgaagagaagaaaaagttctttgccaaataagttttcttccttcacttctcactgtaaacaatagaagatgggacaacaacaaaatgtccctgaatttgcattgaatcttacttgacttcaccttgggatttgtcaaagcttcgattgttctctgcttgattcgtcttcgagtgtctgttaaagagtatcaacaatctcactacacaaagcctcaaagaagaaacaatgtagaaaatcgaagaaaagatccttctaccttcactgtgtttccttcctttgttccatggcacctttcctttattagctaatccaatcttccttctcctttcctcttctttaatcttcctatcactatcactatcagcttcagtatctttgttcatagctttcacttccaaaagacttgaattgacttctttcctatgaatctcaaacacattgtacaatgaacctacagatttcaactccaagtgtctgatagacctcaaagaagcaagtgaattaggtattctcaaaacgattggttctttgagagtccaatagattgaatttgggaaccaccaagcgcattggaatggagcacgagttgattgaaatgtgcatttcatctccattgataaacctctgcaaaaacagtatttgaccaaatcgaaatcaaaataggtcaaataaaatcaaacaaccagtacctgaacgataaatcaatgaatttctacataattttcatcaaattagaaatagatttttataaatccttgatttcagagatgatttcaaatcacaagagataagagtttgagaatgcagaagcactcacaaatttagtgacatacacggcacggagacgaacaggagacaagagaaaactctgaaaagtttccttttatggtttctcaaacgcgaaagccattgaagaagaagaagaagagtgcgcagacacgaagagagagagagagagagagagagagagagagagcgggagaaacagataaggaagatgaagaacactaatgggccgtgaatgggcctaatctttattaataccttaaattacaatttaccctatttcaaagtaaagtacacctttgttttagaggttctctctctttactactataaactcgaaagtgtacccaaatgagtattatcttcatgtacatattaatttatttagtacggttttgatttatcattgaaatatgagagctgaagagacccaaaaaaatcggaataaatttgaacaccacaatgtgtaaagattttttccctaaaatcaaaaacaaattagacgaaaaatcttaaaaattaaattacgaaaaagacctgaaaggattaaagtaaagagggtggtggtatatctcatcgagtgtctcgcccagcttcttcagtcttcaccacataatattaataaaaagcattttcttctttcgattgcttcagattcgtcagctcactctttcctctccagaagaaaccctagacatctcatcgccaaaatg

SEQ ID NO: 24539 - DNA, 3003 bp, Unknown
  misc_feature (1)..( 3003): 2750-1469P.txt file - cDNA_ID_2179485; gDNA_ID_1971910; Annot_ID_177093
ttacctgatatacacagtaagagatcaacataagaactgaaaggattagagcaatcaacacggacaattgtcttccagaggttgagcccaacatctgcggaagctggacaatgacgaacggaataactgatatagccattattcttgcagcatagctggtccaaatatcaacagttacaccagaatctacaaaaacagagtaaacaacaataaggaacccgcatatagtaaagcacaaatactaaattctactgtattcatcagtcccttataaaaacccatacaaacgaagaatcctgaaggtgtaaccgtataagacacttccttgttaccttttaggtgaaagcctttggtgtcttggttgtttacagcaattgaatcacgaagatcacacttgccaaccacagtacaagttccccagataacagtgagaagcataacagtggaaccagcaagcaaacccattcccacagagacttggctttgagcagttgctgcatctccagatagtccagacactgaaagccaaaagacattgtttataaccaaagaaacaccaaacacataataaataacccatcaagataacaactccacagaaaaaaaagataagattttgactaaaaagcacaaagtgacaagttatgagttcatcggttaacatcagtgtatcatcatcatcttttcacaatttggtatcacaaaacccaacaaaaattcactttttgttaatccctgtatcatcatttgattcacagaaccaatcaaatattcactttttttgctctctcaaaattcaaagaatcttcatcaaagcaaaacaaaattcgtctatttcactcaaaatgaatttcaatttcgcatttgctacataactcgcacacaagcatgacactttatagatcgaattgaatcatacgaaacctcaggatctaaatttgaaactttgaaaaaaattaataaacattttgacatacccatgataagcatagcgtcaggaagagcaccaagcatcggaagaaacaaaccaccgacaattccaggtccaaggatctcaagaagaagctcacttccagcagagagatacgtcgcagccgtaaacatgagaaatccataaaccaaaatcagaaacacgtttccaagagcggtcttagtacacggcataaacccgtatgtctgctcacaagcttcctccttttcctcagccggagccgaaacaaccgacttgataaccgatccggaaccggcgagatttgaaccaccgtcgattccatcggagattagactcgttgaagatgggtttagggagacgaatcgagcgtaagcagatgaagtgaagaagagaaggaagaggagagagatgagagatctgaatctcatgattgatttcgaaagaagaagacaacaaaaaaaggtgaaatcaaaggaggacgttgttcatggagaaatcaatcagtcgagtttttgtggatgagtatgtatatatatacacacacacatatacgtgtacagataataaagttgtgtgtgtgtaattcgtgtggggcagttttttttgtttggagaagatgataaagctaataaggaagacgaagaaggcagtgactaattaccattttagccctgttaatttggcactacaccattatttatgtagtaagtaccaaatcgtttgattttttccaagattttcttctgtttatgtttaattagtcaatttaggaatataccaataatacaaaatttgggtgtataagaaaagggggaatataaatttgttagtgtaagttattaataatacaaaatttggttacatctagaagaaagatgccaaaattagttgttacttattagggtgtgttattaataaattaacaatataaaatttgcccactacaaaaagtaaaagtaaacgtattgggtactacaagtacttcttccctacattaatgggattcctcaaattcaacaatggatttgttcagcatttatttattttcttttttagcattttgatatttaaatactatataaatttaaatactccactagtataaaagttcaaaaacagataaggtagtcatcaattcatccggatttatgatgatttttttttgtggggtagatatgtctacttttttcaaaatttcggttatttatgagaggctgatttttttctatatatacagcataaattaattttcttgcaatatttatttatagttaaaaaattatttgaccttagtctcaacttaaaaaactttcggggtcaatcgcaacaatataataggcagaagctgaaaaaatgaaataaaagtaggtaagggcgattcgggaaccgtacgttttatttgcttagaaacgttcgttagtcattattaccagatttgattacgcggccacacttgtaataataaagcttaagagagggcaaaaatcaaatatttgtcaattttgccgacattatagttagattagataccatacaaaaatcataactatttaaaatatgatttgtctgaattctgtatttatagaaaaatatcaaacgaaagtgttgaccaaaagagcggtgaagacgctgacgctgagctgcgtttgagtaatgtcaaagaatcaaaacgtcacgtagttttgtctttaaaaaaaacaacacgcatgtttgggtattttcgaatgagatcaataattgggcctagtttagtattggcctaaagcccataaagaaaggagcgaaatctgaaaagtcagaagacatctccttgcacctttcttctctcttgctgtttctatggtggtggtattagggttttggaaaacccctaatctcacctgagaaaagcttcatccttttgtgacttttaaacttctcttacaagtcttcttcgtcatcctcctcctgggttcagcaattctcgccgaaatcgtaacctccgagctcacagttctgcaacttgtgggtgtatattgattcacaccaagatttagggattaagggtaatg

SEQ ID NO: 24540 - DNA, 3000 bp, Unknown; identical to SEQ ID NO: 8876
  misc_feature (1)..( 3000): 2750-1469P.txt file - cDNA_ID_2179498; gDNA_ID_1971910; Annot_ID_177100

SEQ ID NO: 24541 - DNA, 3003 bp, Unknown
  misc_feature (1)..( 3003): 2750-1469P.txt file - cDNA_ID_2179524; gDNA_ID_1971923; Annot_ID_177193
gttgcctgttgctgcttaattaggaatgatcggccaattctttccacgaatataaggaattgaaggcaataaaagtgacggagttttacctttaggtaacgaagacactttatctcccaactcacttgccttaagaataataattacataattgtatcaactaaatatatacattatatatttataagtaaaaaagttctttgaaatatatttctaatattcttttacttaaatttgtatttatttttatttgaaatttagttctaatattttactgtatcaaaaaattttggtgttgtttctgtacatgatactatcttttacttgtaactgattctagaaagatattttctataataaataaattgtatatttttttaaaaaagttattaaaataggaaattctctctataaattaatatttattaatttatcgataagttaaaacctctgtaagttaataatattttgtagtcccaacattattaatttatagaggttttagtgtaataagtttctaatttaccttcttctatcatgtgatctggctaaacactgattatattctttaatcaaattcgaatagaaaacattcattgtttaatcattgagacaaaattttcaattaatgtatgttatgttagaaaacaatgtggatattttgctataatttatgtgtcacaaatttagcaatggtttggtctacctacgttaagaaaacttgttgtgatttggactggggacaggttgaagggttttaaatgtgcttttactaatggactcaatttgagcccatttcagtttctagcacatgcttagcacatggtccttctcaccaaaaagtaattcacatgatttatatattcaaaagtaaattttatttttaaatacataaattttatcttttcttatagatatttgatatttttacataggatccagcgatttagcggacaagaaaattaatgtcatgcagactaccagttttttttaagtgtcaggctatttaaccatataagaataaaaatatatattttaaacaaaaagaaaaaatatatattaattcgcaatacgtaagtataggttacatcaagtattcaatattgtgacccaaaaaaaagtcaattattatcacccctgagtccaaagtccatattcacattttgggatttgttcccacttttgtatacactgtattttagatcaaagaccttggtcaaagaatcagattttcatttactagtagtattattttttgataaaaagctactttaccaatcgattaattacatttctttcatagttatactatgatcattgtattatatgaaatgtctatctacaaatgtcctaattatttgtcagtttatatcgcactattaacttgacatgactttcacttttttactaaacccattagtcaaaaagtggtggagtcaaaagtcgttgatcgttgacttgggatacatgggggagaaagtgttaagtgcccaaacaaaaagacagcgactcattagagaattacgtgttataaattaaacttttttggtattacaattcttaagtcttgcagtatttgataatttgggtaattaatcgagtctccaagcaaaatacatatataaccataaacttgaatatacttgcagcactacatatgagtgggatacaagcaatatattttttcattattcaacacattcgtcaaagtcgagttaatacgggccatgtgagtatctccacaatactcaagttactgttaagtgcataatcatcactaagtatagtttacaaacatacaattaacacattgaagtaatctgtatatatatatatatatagtgtttacaaacatacaattagtcatattattaacgaacttgcaactagtcagttattaataaacgtataattattaaattacgcgaggatacaaatagatttattcgtatttactaagcacatgagcaaaaacaatgaaagcgcgttgagaaagaacagaaaagaaagcaaaaaaaaagtgtcgtttttggtcctccatgtgagtgatctgtgatctcaactttctcacttttgcattaaattcttatcctttttctttatttcctttttcatgtttgtatttatttaatttacgagtagtttgcattatcatacattcatactatagattcgctaaacacgtaaaaatagagacaaattattagtattaaacagaagtgacaaataccattttagatgattagatcattcgattgaatagactcccattttaacgaggtcgttatcggatcaatgtacttattcaatatggtagctgcacatacaaaactagatacaatattaatctagaaatcaaactaaatatatagttgtaatattttaagtggaaagatagccttttgtctctcgacaatgggatcaccattaaaccaaatcagatagaagttgtgggagtagttatgcttaaattccttttgttttttcacataataatagcgtatgaaaatttagttacacatacacaaaaatgtctcttctatatttatttataagaaaacgacttttctaattttagatctcgcaaatgattgctattgtttttttactactactcacgtacaatgaaactttccaacaattcattttttttttacttatcacctaccaaatacaaacaatcacataaatacaaaaaaatgcagaatcatataaaaaattagacaagtagcagagaatctgcaacatgacggtgcggttaaacagtagtaagtacattgatattatcaaagggactgaattagtaaattctctggtctccatcttctctcttatcgttcacacacacacaaacactcatatataaacacatatgcacactgtcactaatgcttctctctctctctctttctcttttcctatatattgacaagcttgcgatctctgttcgctagatctgtctgaaacagtgaggggattcctaggtttcagagcaaagtaatg

SEQ ID NO: 24542 - DNA, 3000 bp, Unknown
  misc_feature (1)..( 3000): 2750-1469P.txt file - cDNA_ID_2179548; gDNA_ID_1971923; Annot_ID_177202
aaatcacataatttagttaggctggtaagacaaacttaaatacaacgaaatccactttattaattcacattatacaacacagtcgatatcattggagcaaaaactctttataaactaactaaatgatgattagaacaaatatagatatattccctttggcttttgacttcaacacaattcaagaacaaatgatagtgtgacgaagcgagacgacatcgtttccaggtctcaagcttctgaccgaatcagggagaacaatcctttagccatatatagaatcgacaaattgggttgatttttccgactttgacttagccctcaagataacctttgttttgcaggtaagagatgatgttctcagccatctgacgtggcgaacacgactcgtcgtctcctgtgtgtttcagcactacctggaggatattacatcaatactttattagtacaaatttacgttccaaaatctatctgatcattcacgtgacgaacctcgcaattcactggtgcctcgtaagggtcgtcgattccagtgaagcctggataattaattcaagaaaactcaacaattagctaggtcaataagttacactcaacaattaggtcaataagtcaaactctacgaatcgaacaaaataaaaagtcaaagtcaacttttatacaagtacgttttcttttttttgggatacctttgattttgcctgcacgtgcaagcttgtacaacccctttggatctctcgactcgcacacatgaagaggaacgtccatgaagacctaaatcaaagtaagttttcgtaatgtaatcaatgtatactaatatatcttctataacaagcaaattcatatatagtaaaacgttatagcgtacgtacctcgacgaaatcgccgtcaggtaacaaggaccggcacgcgtctctgtctctccggtacggagaaatcaaacttgctatacaaatgactccgacgtcagcaaacaacttagccacctcacctgatattaaatttaaagatcaatcacaaatcactttacaaaaaccattaagcatataccataaaacgcgttaaagaaattggtttcatgagttagtaaacacatgattataatttttggaagaaaggaaaaattgtgtaccaattcttctaatgttttcggtgcggtgctctgctttgaaagtgaggtcacggttaaggccgtgacggacattgtcgccgtcgagtgtgtaagtaagtttgcctctttcaaacaatgctttacttagtgcacaagcaacagtgcttttccctgaaccactgagaccagtgatccaaacgacacaacccttttgttgaagaagttgttgtctgtcgcatctgcatatcgaactctcgtgccacacgatgttctctgctttctcttttccgttatttcttccctctttcagtatagtttctgcgcaaacacaaagttaaagagattgtaaaaatggtcagaaaaaaacaacaacacgatttgtggagatgcttaaacctaaattgctttttctgaaatgtgaacgatctgctatatgacgaaacagagagagatgggagaacctgaaagggcgggaaaatcagcggtgagggaagcttgagcagagacgttaacggctgagattggatgaaaggaagtagaattcgctactaattttcggctgtccgccggaatagacgacgcaggcagcttgaggaaaccgtcacttggaggttttcggtgggaatcgccgccgagacctggaatagaacagaaaaccgacggtcgagatgctctgatagctaatccttccattgaatccgacggccaataactgtgtgggggtttacagttttatgtgatcgtacaaaataagtttatgtataagaaagacggattatattgaaaatatatagagaagactttaagaggaagaaaacaggtgagaaggagagtaatggtactactactaccaactatataattcctccacaaaaaacacatgaccatattccaacatcatttcaatagtcttaatgtcttattaacaaaaaaaataatcaaaataaaatcatacattcttttttacacaaaacagaacaaattattagtattttaccggttattttttttgacgaaacaggtatgggaatattttaccggttaataaaaaaggtttatttatttatttgtgtaatttgaataataataaaaaaaaaactatatagtggttttggtatgtgtgcatgaatcactgaatcactgatgatggaggccaatcttttgggaaaatgattgtatgactgattttgttccatctaccaacctaccaatacccattcagagacccatgtgatttaataagctatatgtctttatacttattttatgatcttactttatctctatgcttattagtatgactttattttcttgttcaaataaatatgcttgactgtatatatttatgaagggaataatggagtcaaataatatttccaaaatcagattcaacactttcttattgcagtacttgtttgattttcttggtttctcaatttaccgggaagaaaaaagaatccagcaagttgttctcaacagtcaaagcaggcggttccctctttgttaaagggcttacatttatattgggccttgtagcccaactgtactaggttttttgtggcagactcaacttagaccatgtacatagctcatatttttagagtatcagtagcccatttacaattttttaatggaccaaccacaaaaaactgggctgagccgtatcagtctattgagacttctgatactcagtctcatattacgtggcaggctctgattggtcgtccatttatttttgtcgaaaaaaaattccttctgtttctctcaaaaaaattctctctcgtggggaattttccgattccttctaattttgccgatcaattttcttctgtttcgattccttctgaatctcttcccttttctcgaaaatccttctcagatcatcatccatg

SEQ ID NO: 24543 - DNA, 3000 bp, Unknown; identical to SEQ ID NO: 24542
  misc_feature (1)..( 3000): 2750-1469P.txt file - cDNA_ID_2179548; gDNA_ID_2926219; Annot_ID_203212

SEQ ID NO: 24544 - DNA, 3000 bp, Unknown; identical to SEQ ID NO: 8917
  misc_feature (1)..( 3000): 2750-1469P.txt file - cDNA_ID_2179563; gDNA_ID_1971923; Annot_ID_177208

SEQ ID NO: 24545 - DNA, 3000 bp, Unknown; identical to SEQ ID NO: 8917
  misc_feature (1)..( 3000): 2750-1469P.txt file - cDNA_ID_2179563; gDNA_ID_2926219; Annot_ID_203218

SEQ ID NO: 24546 - DNA, 3000 bp, Unknown; identical to SEQ ID NO: 8972
  misc_feature (1)..( 3000): 2750-1469P.txt file - cDNA_ID_2179667; gDNA_ID_1971952; Annot_ID_177348

SEQ ID NO: 24547 - DNA, 3003 bp, Unknown
  misc_feature (1)..( 3003): 2750-1469P.txt file - cDNA_ID_2179705; gDNA_ID_1971952; Annot_ID_58637
acaagaacgagcgtatcaatgggaagaaggtgtgaggcacacgtgcaaagagagtgtttaataaagtaataagtttataattagtatttcgctatatatatatatatatatatatatatatatatatttattatcttaggtcttattaaatgtaaatatattagttatggttagaactagtataacaaacttatggaaatgcgtacattgcgtctgaaaccattaattagcgatatatacatttgagatttataatcataaaaatctagagtccttttgcttatacaagacgaacacttataaacgtttccaaaggggggaactttcgaaagttgttgaaatgagagatatacaattgcgaagtatagagaaataaacttcaggacattgacaataatatgaaatgaagtacacgatttagttgataagaaaagaaaagaaaaaaagtatacacgattaatttccttttagaaaaaccaatcatacatcgatttgatgtttaagtctagaatatgtgatgcaatttaaattatctgtttttgttttccctgagtacccaagaatattgggcggagcagattgatgccaatatcaatatgtaatcagtacatgcatgcatgtggtatatatagagagaaaattgtatgtttttgcttacataacttaaatcaaccagacaaccagtgatgcatgcatgtggtatataacgaaattcacatgaatgttctttatcttaaggaaaaaaggaagataaatcagacgaaagttaattgtctcaaaaggtaaaacaaatgtacgatacaatgattaataacaaattgtatagtatagctagctaccacaatctaagtatcgtattcgtacgtaatttcgtatggatagagaagtaagtatatatgtgagagtgtctgagagaggagaggcacgagaatcgtgttgaccgtttcgtgtggagttctttagtaagctaaccaaccttcatgtctgtcgtgctccttttcttcacaacattaatcctcccttttctttttccgtactttgccattttcaaaattagttttatttcacgaaattcttagtatttcatgacttcattttggtgggttcattttcgtgaattacttctaaatttcccccattccttctccaaatcagtagagccgctattaataagaaagtgtaacttccgaatgacaatgacggtgcttggttgtgtttgctacaaacatagaactcgaatttttcaaataataagagtgttggacattagtatagcgagacaagatgatgatgaattcaggtattctcacaaggcaacgttcccaaacagcaggaactaccacaagagcagtttagcttgtcgtctctgttctctccggccacacttacgtctccataactgaaacttaactcctcctctgcgattatgtcctttgctgcaaagaaacagagccgaggaagcaacgctcctgagcttctcaacagaacagtggagagatttccaccgtcacaagaatggttgatgaatctagcaacgttcccaattcttgtggcgtcgatgtttatccttaaacaagcttgtcctgaagggaggtgttcgcgtacgaccaaaagagctgaagcgaaggattgtgttgatctgagtttgtcgtaaatgttttgacgtctacgtgcttcatctgttgtcaatagctcacctataagaagagacgacaaaatcaagtttatgacttttgcataaaccaagtcattaaggcagatcacaaagaaaaaacacattcaagaaagaagaaagatttgtcattatctctaatctccaaatccagcattgtgatactacctctaaacgattgaaacaagaacatttcgaaagctcagatctttcactgatggagatcactcttaataccatgctagaatctcatctcaacgcatcgagctaaatcatatgcagtccaagtgtaaaaggctaataactaatgctaatattcctcaaatcatgtaatcttaagcttgattttcaagttccaattatcaatcttccaaaattagtgacctactgcaataaaacgaatcactatactattaggaaaccaaaagttggttaacgttacctaatgctaatattcctctaatcatgtaatatgaaatcgaaatgtaattgtaacctgcatattcacagatgaattggccttgcttgataagctggtcagcgtacaagcaccaacctttcttctcatctctcacaatcttcaaactaaccgaaacccccttctgcgtaacccggttcgaacaatcggacccgcatccacaacccgacccacattcgttagctatctcttccatccccgcgaaagctaaacacttgcagtatccttcctcacacctctcgcattcgcatcctgactcgtccactaaactcaccccaaaacgtccgctttcactcactgagtcaaaacaaggtctagactccgatccacattcattagcagcagctccccaccattgtcgcggcggaggaggagatgaagcggggatctgaaaaggtgtgtagatgaagtacgcgtatcgttgagaatcgatggagttgtgaaacgggattgagatgttttccaaggatcgtgcagcgtcgagagatcggtgaatggttagagatttcgagattagggataaggttttgcaggtttgagcaacaacggcgagttctcgagggtttagccatgggagaatcaaattcgcacatcggagaaatcgatcggcggccggaataatgtcggaagcttctccaagacaacgcgtcttcggtggtggtgactctcgcagtcgctgcatattttttctcagccagcgatatacaaacgacgtcgttgcgtttaattctatttatatccttaaattctattttaatttcacttcagtaagaattttttaaagaaaaatggcgagtttttttgtgttaatcataactatagatttactaccgtcgctttggtctgtgtaatg

SEQ ID NO: 24548 - DNA, 3003 bp, Unknown
  misc_feature (1)..( 3003): 2750-1469P.txt file - cDNA_ID_2179705; gDNA_ID_1971952; Annot_ID_177362
ttcgctatatatatatatatatatatatatatatatatatttattatcttaggtcttattaaatgtaaatatattagttatggttagaactagtataacaaacttatggaaatgcgtacattgcgtctgaaaccattaattagcgatatatacatttgagatttataatcataaaaatctagagtccttttgcttatacaagacgaacacttataaacgtttccaaaggggggaactttcgaaagttgttgaaatgagagatatacaattgcgaagtatagagaaataaacttcaggacattgacaataatatgaaatgaagtacacgatttagttgataagaaaagaaaagaaaaaaagtatacacgattaatttccttttagaaaaaccaatcatacatcgatttgatgtttaagtctagaatatgtgatgcaatttaaattatctgtttttgttttccctgagtacccaagaatattgggcggagcagattgatgccaatatcaatatgtaatcagtacatgcatgcatgtggtatatatagagagaaaattgtatgtttttgcttacataacttaaatcaaccagacaaccagtgatgcatgcatgtggtatataacgaaattcacatgaatgttctttatcttaaggaaaaaaggaagataaatcagacgaaagttaattgtctcaaaaggtaaaacaaatgtacgatacaatgattaataacaaattgtatagtatagctagctaccacaatctaagtatcgtattcgtacgtaatttcgtatggatagagaagtaagtatatatgtgagagtgtctgagagaggagaggcacgagaatcgtgttgaccgtttcgtgtggagttctttagtaagctaaccaaccttcatgtctgtcgtgctccttttcttcacaacattaatcctcccttttctttttccgtactttgccattttcaaaattagttttatttcacgaaattcttagtatttcatgacttcattttggtgggttcattttcgtgaattacttctaaatttcccccattccttctccaaatcagtagagccgctattaataagaaagtgtaacttccgaatgacaatgacggtgcttggttgtgtttgctacaaacatagaactcgaatttttcaaataataagagtgttggacattagtatagcgagacaagatgatgatgaattcaggtattctcacaaggcaacgttcccaaacagcaggaactaccacaagagcagtttagcttgtcgtctctgttctctccggccacacttacgtctccataactgaaacttaactcctcctctgcgattatgtcctttgctgcaaagaaacagagccgaggaagcaacgctcctgagcttctcaacagaacagtggagagatttccaccgtcacaagaatggttgatgaatctagcaacgttcccaattcttgtggcgtcgatgtttatccttaaacaagcttgtcctgaagggaggtgttcgcgtacgaccaaaagagctgaagcgaaggattgtgttgatctgagtttgtcgtaaatgttttgacgtctacgtgcttcatctgttgtcaatagctcacctataagaagagacgacaaaatcaagtttatgacttttgcataaaccaagtcattaaggcagatcacaaagaaaaaacacattcaagaaagaagaaagatttgtcattatctctaatctccaaatccagcattgtgatactacctctaaacgattgaaacaagaacatttcgaaagctcagatctttcactgatggagatcactcttaataccatgctagaatctcatctcaacgcatcgagctaaatcatatgcagtccaagtgtaaaaggctaataactaatgctaatattcctcaaatcatgtaatcttaagcttgattttcaagttccaattatcaatcttccaaaattagtgacctactgcaataaaacgaatcactatactattaggaaaccaaaagttggttaacgttacctaatgctaatattcctctaatcatgtaatatgaaatcgaaatgtaattgtaacctgcatattcacagatgaattggccttgcttgataagctggtcagcgtacaagcaccaacctttcttctcatctctcacaatcttcaaactaaccgaaacccccttctgcgtaacccggttcgaacaatcggacccgcatccacaacccgacccacattcgttagctatctcttccatccccgcgaaagctaaacacttgcagtatccttcctcacacctctcgcattcgcatcctgactcgtccactaaactcaccccaaaacgtccgctttcactcactgagtcaaaacaaggtctagactccgatccacattcattagcagcagctccccaccattgtcgcggcggaggaggagatgaagcggggatctgaaaaggtgtgtagatgaagtacgcgtatcgttgagaatcgatggagttgtgaaacgggattgagatgttttccaaggatcgtgcagcgtcgagagatcggtgaatggttagagatttcgagattagggataaggttttgcaggtttgagcaacaacggcgagttctcgagggtttagccatgggagaatcaaattcgcacatcggagaaatcgatcggcggccggaataatgtcggaagcttctccaagacaacgcgtcttcggtggtggtgactctcgcagtcgctgcatattttttctcagccagcgatatacaaacgacgtcgttgcgtttaattctatttatatccttaaattctattttaatttcacttcagtaagaattttttaaagaaaaatggcgagtttttttgtgttaatcataactatagatttactaccgtcgctttggtctgtgtaatgaaatctgtcattttcacagaggaaaaaaacttacaaagacaaaatccattgcaaaagagcgagcaacaacgacgaaatttcgaaatg

SEQ ID NO: 24549 - DNA, 3003 bp, Unknown
  misc_feature (1)..( 3003): 2750-1469P.txt file - cDNA_ID_2179761; gDNA_ID_1971954; Annot_ID_177435
tctttaatctctcactatgcaactttaaaagcggataatttggaacgaaaaattcgtactaaaccgcatcatatcacttatgtaaataacattcttagaaatggctctttagagctttaattaatagtggttggaaagaaaaagtttcctttagtttgtcaataattcatgaaccgtttcatgaatgctcttaaggtttgaataggttcatgagacaaagacccaaatctcaatataatgtttcgttttcaaggaatctagagcaatgcttcaaaaatcagcgaataactgagtgaatttatcaatcaaaatttcttctaatttcgagaactaatggcgtgagagctcatagcttggaatttaaaacgttttgagaatcaagtagttagagtttatgggtttctacttaataactttggcctctacttagttttcaaggaatgtagaatttatggtatttctttgttttggccaaaagtagattacaatctaaaagtatcagcgggtagcactagacttcgatattatttcactcattataaaacaacaaaataattttacaaaaattcgaaactttaaaactagcttttatgtttgtgccaccataaaagatgacggattactctgaagagaaatatcagaaaatgtgtatacgatattactatcaccggtaaaaatggtaactcaacaatcatctttgaagattagccggtaaataaaatattctctatatcggagaatatatttgggagagatgaagttttcactctcttaaatagataaactgaaattaaattaattagaattaaaattaaacaattaaaatttaattattttacattggtaaacgttattttccgccatttttatggctgcacaaacaaaaaaatagttttaatgtttaagtaatagtataataatatcaagtttaaagtgctacccaatttaactttgaaagttaaaaatatgtttttttttaatttttactttccacataaatcaactaagtagtgatctcttaatccagcccaccatttacattatccagcatgaaataccaaaacacttatagcatgaaatacccaaacacttttaccctattaaattaccccagtaaatatagaagatgattggcaagtgacttttaaggttttaaaagtagtcttaagtgaagtttttttttgccaattagatttttttgcctttttatttttccttcttcctttctcttcttttttaagtccgataaacgagactttcaaacaaataattctcaaaagctttgttttttatcttctccccaacttaattattaactctccacaaattacatttttttcacaaaacatttttgataaattatttattatcaattttatatctttcttttaagatctatttcactaataatttcatttcactaataatattttattttttggttcatcattaataaatttgttgatttttttgataagtaaaacttatacaattactcaataaaaaaacattcaaaacagttttagaaaacaatttgccataataatcgttcaagaatcattcaagataagtattttaattatttcaatcttttaatttatttttctaatgtttatttgatttgttagcaaatattttaatctttcagaaatttaagtggttggacgagacgacatccatatttcaatctggttatggagaaacaaaatcaaagtagtatagttggaagtttaggtgctatttagaaagaaaacattctttagatatttaacgatcaactcgaagctaatttggagtggaaacatctaaaaaccatttcgattatttgaagatggagtacaagatatattattatgatctttaagctccaggccttcgtctaaattttattaagtttatccccttcttgctaatatgtttggatattaagtctcggcatgaaacaataaatatcaataaatgtatcttttagaagattcatttcttattttatttctaaacatttgtcatttcttaaaataaatattttattaattaacaatttgatttttagtaaatccaaattcataatgcaatgtttggtttttaaaaattgaatgaataataagtatattttaaaatcattaataaaatttattgttacataaatttaattctaaatttattttataataataataataaataacagtcacagtttctaaagtattgttctaccaatcaaattttaatagccaaagtttctacagccaaagtttttacagccaaattctctatagctcaaaatttttaaatcaaaacttctaaagccaaaagcagtgtttaagaaaacgttaggcactaatcgaataataactcaatgtctagggtctagaacgcttaatcggggcttaaacgattatagacgtgaaagcttaacgtcgactgcctaaaccgttttttttttaaaccgtttttttttaaaccgttttttttttaaacctggccaaaagtaagagtggctaccaataggcccaataatctataacaactacaataaaaccgtcactgtttttaatgatttatggcgcgaggccgcgaggccgcgagtactagtagtgttgttagtggccagctctacgaaaatcaatttataaataaacaatactcgaccacgaacaaaaaataaaataaagaccactcgaaaagctccaaatctcacgcgccactctctctctctttctctctcgccatcactgctttcttcacgtgattacgttaatttactcgaaaagactcaaaaactttccttctctttctctttcattttctcgggaaaattctccaacgaagcttttttttgcttcttctctaaattaaattttggactgaagcaaaaaagaaaattaaattcgttcatactctacaacgaagcttaccacacaatgcttcttctactaccttctctttccaaatccatctccgtcttgttctagggtttatcccaatcgatttcagatcatg

SEQ ID NO: 24550 - DNA, 3003 bp, Unknown
  misc_feature (1)..( 3003): 2750-1469P.txt file - cDNA_ID_2179777; gDNA_ID_1971954; Annot_ID_177439
catccgtaaatataacacccacaaaaaaaaaacttataacacattagtcaaacaacataaaaataatacgatatttatttgtatagatttgtctgatccgataagtttaccttacttaatataaattaatatatatatttagaaattacaattaatatgatatatcttcacttaatctttaaaaaataatattacatttaaaaaacattacattttaaagaaaaatatagtctcacgatgtaccgcaggttaaattttagttgattatacaaaataccatgccaaaaatatattaattctttagagatattaattctttagcatgtctccacacggcatcagcaaagggacaattaaatagaatatgattcaccgtttcgtatgctagagatatgggtgtcaaaatgggtcaaaatttatgggtcaactcaactcaacccatgaaccctaatgagttgaaaattttgacttaaatgagttgatgggtcaaatgagttattgggtcaattggtttgatgagtaaaatgagttgggttgtaatggttaatggtttcaatggtttacccaattaacccatcaagttttgtaaaattgaattaaaccaaccaaaatctctaaaccaatgctaatttaagtttaaccaacacatctaaaccaatttaataaaatcaatatttttccaaatttcttaaatatacaagcgatgaaattgagaaaaagtaaacccgtgattttcccgccaaaaacgtaaatccgtgattttcaaaccaaaaacgaaaactcgtgattttcccaacaaaaaacataaactcgtgattttcccgccaaaaatgaaaacccgtgattttcccgccaaaaacgtataatggtaattttcccgccaaaaacgtaaacccgtgattttcccgccaaaaaacgtaaacccatgattttcccgccaaaaacgtaaatccgtgattttcccgtcaaaaacgtaaacccgtgattttcccgccacaaacgtaaacttgtaattttcccgctaaaaacgtaaatccatattttcccgccaaaaacgtaaacccgtaattttctcgccgaaaacgtaaacccgtaaaaagtggaatccgtaaatatcctaagtttgatgataatgaattaataattattaataatgataattatttattattattttataataataattaattaaattattacttaaattattacttaacccatttaacaactcaacccatcaaattaaatgagttatgggttgactcaacccatcaaattaaatgagttatgggttgacccaacccatttaacaaaatgagttgggtcaacccataactcatttaacaaaatgagttgggtcaacccataactcatttaaccctaaactcatttgattataagttgagttgagttggtttacctattttgacacccctaactagacaacctttttgacaatttatgtgaaaattattccaaacttttttatgcagcagattattgttaaaggttataaaaagcacattaattaaataaataaaaaatggcaaacaatcaagacattacttttctaatgctattttatcatcttcgatgtattttaatgaatttttattttaagactatgcgatacggtccaagttaatcattaaagttagactaagaaaatttttctataaataattttggatttttaaccgttatgaaatactaaattcaacaaaatcaccaatataaaaaaagggatttacaaaaatggcattaaaaagttttttttttcaagaatagcatctcttttgaaaaattccacaaatagcactcaaaactttaattagatattaaatataaataaatagtttaattaaataaataaatcaaagtaaatattttccgccaatattttttgtcaaaatttttccgccaaaaaatttccgtaccaattttttccgccaaaaaaaattccataaaaattttctcgccaaaactttttctgccaaatttttcccgtcaaaaaaatttccgtaaaatattcccgcaaaaaaaattcaagaaggtaactaccaaattccagaaggatgtcatataattcaggaaggctttcataaataaaaatttcattcaaaccttcctgaattttgtataatccttcttacatttcagaaaatgattatttaaattttgaaggattccacaaaattcaggaatgattctacaaaattcaggaatgatttcatgaaatttaggaagggtttcacaaaatattttttctaaatttcgtgaaactcttcctgaattgcttagaatccttcttaaattttgtaacatccgtcttgaatttattttatttttggcgggaaaacttgggcgtaattatttttggcggaaaaatatgacgatttttttggcggaatttttttttggtgagaaaatattgttgagaattttttggcgggaaaaaattatcggaatttttttggcggaaaaatattgtcagaaatttttggcaataatttttttatgtatttttattttttttaattattaattttattaattaaatataaaataattatttgagtgctatttatatcttaaaaaattttttatgctatttttgcctaaaacttaaatatgtgctatttaaagaatttctctataaaaaaccattcgttgatttaatatatccaataaataaatattattagctatctaatgttcaatgaaatttagagatttaattttgaaatgttcccataaatatatatttgcctatttaatatagagaattttctccaccttttttttttaactttcaattttcttccaaaatttgcccgccattctctgtgtctcttcgtctaagggtttcttccaaagaacgacgacaaaaccactgaacctaaaatccgaaatccaaaagattcatgcgaaaaaatcgttaaagagtaccaatttcagaaagttacattcttacagagaacaagtaattccccagaaatg

SEQ ID NO: 24551 - DNA, 3003 bp, Unknown
  misc_feature (1)..( 3003): 2750-1469P.txt file - cDNA_ID_2179789; gDNA_ID_1971954; Annot_ID_177442
taagatcttggagttggtgcaatgagtttttcttaaactacatcacaaacaaataacgataaactttgataagttttgtacgttttaagggagacgagattcacaggccacatcaatgtggagagttaattaacactatctcaaaacatatgcatgtgatcgttgtacggaagacggataataaggccttacaacatttaattttacacgtggtcagttgccgtaaaccggtacgtagtttcactgatgaatgcagggtttaggtttaagggtttagggtatagatataaaatgatgccattgagtgaatgctgcacgttctatattggctgcaaaatttgatcctcagtttctctctttggagattaagttcaccctctacccaagaagaatgaagatttcgaaaaaataagggatttgcattaattaatttatctaaaaataattattctattcaaaatcttaaacaaagaaaaagtcgtaattctattcaaaatataattttgcaacctattttatttaaaatattataacactcatgcaaatcttaaacataaattattatatataatattttgggaaacaaacacatacaaagtcaaggctttgaccaatatgaacgcattttccaccagcaaaatttgattcaatgcatgtcttattgcatttttctgttggaaactctatgcaagtacctatcaagaggggcttccttccatcaatatctttcgcttttgtagattctgaaatttataccggtgtaaaaatgttagtttatcactgaaaaacataaagaatccttagacaaatgtattgtaacagtaaaacgcatattcatctgtaagtattaatgtttgcctacttggattcaagagaacaaccatacataagaacacaaggaaaacacatttccttgatgaaaccattttaatccttttctttacgtattttgtgtcttttcttcttcttcccttttaacttatgaaatgaaatatatagttcaaaatatttcacaaatatagaatgttcggaggatatacagtaagatatgcttttgactttgactatgacctttgaattagatcatctccataaacgactaccaaatatttatggaaattgtttaaagtagtctccataaaaatcaggctattgatttcaaaattgtatgtatgtaaacttatttaatttgataataaaaaggttgactctggtatactacttaaactataccgattctttggtatacattatacattatacattgttcgtcttgcggtgaaactagtcataatgctgctaggtgtaatctatatcccaaggaaaagaaaaaaagacaaagaactactgaggtatatgatccacttttttcttctattacttttttcgttcctttagtaattgtatgtgtctgtgattattttttaggttgggccatcatcgtctcaagtaccaaatacaatctctctcacgcaaccatcacaaacaatccccgacatggtggttatgagtgaagtttaataattctatgaatgtgttccatttagtttaattttgcaaacatgaatggtagtttggagtttttcttatcttggtgttagtttttattttttgaaccaatgagaaatcgttggctataaatctaaacataaacctaagttcttaatggccctacttgttcttttatcaattccagtttcggtttcattcttatgtaatcgatgaaagaataaacattgcttttgttttattcacttaagtttgactgtttcaagttgaataagtcctcctgttttgtagaagttgaaacacgattagatttaaagtctgttttggatttagttgagttgagtttccttcgatcattctgttgtaaggtataaaaataccaaattcgtttcagtcttagtaagagaattattcagaacgttctctatctttcaatactctgtttcttataacaatcagtctaatagaaaacaaaaacaaaatcaaaaaacaaaaaaaaacgtgtattgaagaaattctaaacaaaaattaatggttttattgtttttgcttatttaaggtaatcatggttttctaaacgcaattatcgatttactaaatctaaccacaatttagaatcactatgttgcaattaaaagagaatctataattcgggatgtttaatagaggcaaaaagttgtttatggtgtataaataagaggcaaagagtttatggtgtataccaaagaatcggtatagtttatgcagtataccagactcaacccaataaaattaagtaaggcaaacttatcggatcagacaaatctatacaaataaagattgtattttttgttgttgtctgtctaatgtattataagttctttctttttttgtgggtattatatttacggatgtcaagttggttaaaccaaatcaaaccaatctatatccatataaatgtagtgtctaatggataatgagtcaatctaattcatttagcaaatggtttggataaaaccataactcatttaaattattgagttaatgaattaaataagtttattcagttaataatttttctatagatgataaaaaaatatctataatctaaataattatcattaataataattaataactattataatcatcatcatcatactaccatcatcattcgtgatcatcatcactattcatgatcatcataaatattcatgatcatcatcatcatcatcatcattcatgatcatgtttttggtcaaaatatcacgaaatcacgttttgaccaaaaaaatacgaaatcatatttttggcgaaaatatacggaaacactttctttctttttttgcggaaaatatgttttagacgtggaaatcatgaaatcatatttccgcggaaaatgcggaatcatgtttttgacggacaaacaaaatacggaaacacatttttgacagagaaacaaaatacggaaaataaaagcaatcattataaaacatagagcaaaatgcttggatg

SEQ ID NO: 24552 - DNA, 3000 bp, Unknown
  misc_feature (1)..( 3000): 2750-1469P.txt file - cDNA_ID_2179804; gDNA_ID_1971954; Annot_ID_177446
taattgatggatttggagattattagagaggtgagttgcttctctgagtggtgtcttggagcttagataacggatctatcagatcctttgctactgtggttgttgatggacactctcgacggtatggttcttcccctcccagatcggatttgaacttttgtggcttagtctcgttgtctcattgttcttcttctatattacatgtttgtttgggagacttgtatcgatggtggtgactctgtttgtggattatatctttagatctttgctctacctctctattgtgtcctcttacttgttcggagttgcattttggactggtttcgttcttggtgttggccactttgatggtatttcgttgctgagctacctactagcctatcttgtttggagttaggttctaggcaaagcaatggattcgttctctagttcttctctgggggacgtcatcagctttttgtctgtaggtgtgcggaagctgcattcgacgagggcccgcgtgtaagaactagtgatcttaattggcttatctcttgtcgatctccaaggcttttgtcttgtccctagtgcatttgctatctcggtttggttggtgaggtgtgatggtgtttgtatttgtgtctctcgttctggtggcttcttgctttcctccctgtcggattgctactggtttgacttcggtgtgaaatctttccgatcttattggtgcttccgacgttcaccgtttctttggggaagctttgtgagagcttttggttcctttgcgcaattttagtgcttaaatcttcgttttttcttaacggttgattttttttagatatttgtttctttgttttcattgctggtctaaatagtttctccgtttctttggggcttagctaccctcttttaagcttaatttctcgagacattttgttggtctgccggcttttatatttgaaatggtatcctactttggtttcttaataaaattctggcgacaaaatttttttttttcgaaagatcttgtcataaatatttcctactgccttttgcaatacgttacaatgttgacaattagtaaaattcctcattttttccttaagaaaatatataataccaaatgatgatgattccacgtatagatgtctatctcattgcgatactatattaatataaatcaatttcttccaatttctgaccatcatattagtattatattgacttttatatttggtctgcattaattatatgttccccataaatagttagcaaatccggttcggatatgtaggtccaaagccttttgtatttttatccacgcaaatttttcttgaatcgtacgtaaatattgaattccacgtttccatatacaaaaccaaatcaaatataattacttttacaacaaccccatttacgatttgagaaacaaaaacgtaaataacttacgaattttcatgttcttgaatcttttcagcaggaaaatagtaaaataactcaatgtttttatggaataattaaaaaagaaatagagaaaactgtttaattttcaaattattccaaattttgttagaaaagaagttgaccttgaatatctagtttgattctctatttgagatagctatttatcccttttagtttttaggttcataaaaatgtacagttttgtactttgcacattatcaaaaatgtagaagaaaagtaaattattgatttgattggtgacttaaaattatataaatttgttttacagataaaaaaactataaacaataccaaaataattaaaaataatactaataaaaattagaaaataacgactttacatgatatttttggatatcagctttgaatggtaattcattatcaaaacactacagtttgtatatgtttgacaattatcattcacaaaatttttatcaaaaacattacaaaaatttttagtagaaaactttattatacaactttctctgcttatttttttacagttttacactatttttaaagctcttataattgtagttaacatcaaaaaaatttgtacaaatttgtattaccaatcggactcattatttttgcgattagtaataactaaagaggtattagtccgattcggatctaatattggacttaagacattggaacttgggacgacctcgaataaaccctaacaacttggagagataaatacatttagaggctgtcaattttctaaaaaattaatacaaaaatcatagtaaatatattattattaaatacctagtaaatgtactgtccacctaacacttcaaaaaaagtttggtgtatcggtcaaaaaaaaaaactgggcaaccgataaaacaagtttccaagaagaaaaacacaaacgccaaatcagcccaagtcacaaatccgtcgtcgtttagtccacgtagacttcacaaagtctacctttttcaccggttataaccggtaaactaaaattctcctctcttttaccagtcccgttgaaactccgttaaacttttccgtttctccgtcattataaatatcaatcttcttcactctatcgttttttttttttccttcttcttccctctcctataaatctctccgtcttctctcttctctcatttcacgtcggagatcattttctcctcctccgcctccgcctccaccgccaccgccaccgccgccgccgacgacttttctcacttactcaacaccagaggtctctctctcactgtttcttcttctcctttctttcgatttcgtttggtagatttttagatctgatttttttctggtctctgtagctttacttgaagttgactctgtttctcgttatagatcttgatctgtttatgatttcgaataagaacagcttcaagcataattttatattcgaataaaaattagatgcaatgtgtttatttcgcgtgttccaactacacgagttttttttttttttttggattaggagttataacaatctcattgatcttattgttttgattttagatcttggtttagtgttataatg

SEQ ID NO: 24553 - DNA, 3003 bp, Unknown
  misc_feature (1)..( 3003): 2750-1469P.txt file - cDNA_ID_2179811; gDNA_ID_1971954; Annot_ID_177449
aatgatttctggcctagtggctttaacaactgacatcgttaatcaagtcacattacctaaactaactagctagtaagcatgaattttaaccccaaaaatatatatatatatatatatagtaagcatgaagggctttaaatcctattgttcttgggttaaaaaaaatttctatgtggaccaaaaaaaagaaagacttgcactacttcttataatttaaatttgaaagattgaatttcattttctataccatcagtcatagctataacaacattctataaaaacattcaaacatatttcacatttatacctgtttatacaaaagtaagttcagaatatgaggcatattgcgaaaatatctttcaatatttatatatatttatacctgtttatacaaaagtaaattcagaatatgaggcatattacgaaaatatatttcaatattcacatatataagctataggtcgaaaaaggtaaaacaattaagtatattgaagattcacccaacaaatattttattactgttatccaactaggacttcacaaattatatgctatgaattaaaattatactaggagtataaaacaggactctggaaaactatcaaaataacattaaagaaaatgatatgattggctaaatagctatcctgtaagggaaattgatgtaaattataaggtggttagaatataaggataacataataacatatcgtggaatagatgctttgattatataaaattaaaatagctagctatatcttgtagaggaaaatatttaacaaaaaaaaatcttgtagagaaaaatgatataaattataaggtggttaggatttaggaataacatatcgtagaagaaaagctaccaagaaaatgcaatacacgtcgatgaataaacaaatagtgtttaagctgttaaccatatgttcctcgtgttccttctttcagatcgacaaaaatatcaattcatagaataatcaaggcatgactcggcacaaatagaagactaccaaaccatttttttattaaactgtaaactttcaacctaaaactaatcggcgataggtatacaaattcatatcttatatataccacttaaaatcctactcaacttttaatgtaaaatatttttaatacgatctctcaagatgatgatttttctagccattaatcttgatttattcgagcatggatcgatggggcaagtattgggccgaactgatatggattagattgagtatgtgtagatcgggctctgataccatattagaaaagtatggatcgaactctcatatcatttgaatagtattaatataactttataacatacaacgatatatcatcgggaataattaatattctctctaaaataaaagtcagaaaaaaatatttagatatcctcacagaacgaaattccagaaaaataaaacatacaaacaaccaaaaatataaaatgataaagtaaaacttagaaaacaaactaataaatctctaatatgtgaattaactaggaactaccaaaaccgaaaaaaaaagtctgaactaaaacctaaaagatcgatgcacattatttatcttgtggagagaattaaccgaatcgaaactcattgtatagctcttatctctacaaagaaagtgatagagcattaggattatcttagatgctccaaaccaatccgagaagttgataacctcaaatctcactataaaagtgtactgaactaaagtccttacaaaaatgtaattatctgtatcaaatgaaaaagtaattatgttcaatatatatataaacattaacaattaagtttaaaactatgtaaactcataaattagatcaatgaacattgccgagtctctcttgtccagtggctctaccattcggtggtattttggcatttgcaagacaaaaaaaaagaaagaaagcaactttacgttacaatcatgtagtctttccataactaacacaaacgtttgagataaaacatgtacaatcgttttcattgaatttaacgttactgaaaaatgtatctttttatataatgatagaattcacgaaataagatatagaataatatataaatgatattagccaataattcttattcgattttgatttaaaaacttatagaatttaatatggtataattacagtttggttttgttaacccaaataaaatgtttcaagtgtcgtttattgctagttctagagtgtgattaagttcaatgttagagttatcatcttgaaacggtttgttataaatctcacttcaaaattgtggtggataataaagtataaataacataagctaatccacttattacctattgattttgagtttgaaaacaatcataaaacttaatgaagatggtaccaagtattattattaccgattttgaatttgaaaacaatcataaaactatagagttgaaatccatgtacataaaagaaattgttaatccatgtattattatcactacaagaaaacagataaacaacgactacagaaagcgacaacaaatgtagtcgtcgtttttgacgactacgtcacgaccgttttacgacgcatatacgacaacatgaacattagtagtcaattagtcgttattttacgactaaatatgttagtcggcaaatactcgtatagtaacaactatttaacgattatattatattagaaaaacgtttgttgttacatagtcgcaaatggacgactacagtttccgactgcggaagttagtcgcccaatcggcgactaaaatacgacacatatctgtaatcgtaaactagtcgcaactgaatcgcagaatagtcgcattaagttgttggaaaacgttttccgcattgccaagtaggtacacctaatttgtttgttgtagtcgtaaattagtcataaaaattcgtctatataatcaaaattcacgacactcttctttcacaaacaaatcaaaacaacaatcaaaagaaaaaaacaagaaaacaatagaaattttgtttattctataatg

SEQ ID NO: 24554 - DNA, 3003 bp, Unknown
  misc_feature (1)..( 3003): 2750-1469P.txt file - cDNA_ID_2179838; gDNA_ID_1971954; Annot_ID_177457
aatttattttctgtattacatatatatttgataggaaaaaggttgaattgcgtttttggcaggaaaatgttaaattgcgttttttgggggaaaaatgttaaattgcgtttttggcggaaaaatgttaaatatcatttttggcgggaaaatgttaaattgcgtttttgaccggaaaatgtgaaatctatttggcgggaaaatgttgaatgtcgattttggtgggaaaatgttaaattgcatttttggctggaaaatgtgaaatcatttttggcggaaaatgttgaatcccgtttttggcgggaaaatgttgaattgcgttttggcggaaaaatgttgaaggtcgtttttggcgcgaaaatgttgaattgtgttttggcgggaaaatgttgattgtcgtttttggcgggaaaatgttgaattgcgttttggcgggaaaatgttgattatcgtttttggcgggaaaatgttgaatgtcttttttggcgggaaaatgttgaatgtcttttttggcggtaaactgttaaatcgcggtttaggggaaaaaatgtgaaatcttttttgacaagaaaatgttgattcatttgaaaagggacttaaaaaaactcgtgagtacccataacccaatgaggtaaacccatataggtaaacccatatgggttttttttatttgggtacccagcccattttaaacctgtgttttttttccagaaaaaatagatctatggactcaaaattttatgtgggttttgggtacccagtgggttttaacccatcattaacatctctagtatcatctgtggaatataaccatgatcatcgaactaaatttttcgtatagctaattatatatatttgtgtagtctagtggtgaatgtactgtgaacatgtttcagttacagtcttttcgttctatcgaaccaatttttattgtaggcagtttgttagtattgtactgtttaatataattcaagaatatattttcagaattcaactctttttttcttcttctacagatgtaaatttcataattgacaaacaaagcaaaacggtatatatatcttgaaaaaccgatccacaaataataatctactactaaatgagcgtccatccactccataatgtgtgtgataatgcgtttatcaactgtgtttgtggatgttatataggttagtagctttaaaataatatattcaccaatctcgtattttagattaccatacctagatattttctaactatcaaacttaaaattaactagacatgcacggccctaatattctctcccaggcacggaattcaatgagccgcttcccttgaagatatgagcttcttcctccgacgtagctcctccggtagcttccttgtctatcggtgctagctgctaaggcgagatctctcaggcggatctctttttccggtgagacacctgagctgactttctttcatatgttttcaagccactctcgtcgttttccgatgtcttcggttgctttccttgatctgaggcctcctcctgctccaccaccggagtcttcttctccgccgactccaccagaaccacctgacccccctgaccctcagatctgcctctcctttaatgtatctcttgctcagtcgcccttgacgacgagtgtccctctccttcttgcaaagtcactcaatagctttggagtgctgcttctcgacgagtccctctttacaaactggtttggagagatgttcccccatgtttgcttgtcctcctcgtcctctacttcttgtaacatgggaaggaattttatgttcgttgaatgtgtggttcttgttttgtagaactcggggttaactcaatcgatttcgatgggtttagatattcttgtgtctacatttttgctctcttctagcatccttatcgccttgttgcgatcgcttactaaagtatgcagattctgtctcgatttagctcggtttaaatttgtctcatggcagtttagacatatttatttatttcagtttatctggccagctgcccaaaacttattggttttgaattccgacctatgtagagagttttattggttcaatttgatctcgtagaagtttgcttgaatattcaaaatgatactaagttaatcactattaatttactaaatcatacgagtaaaaatttggatttacgttaagctttgaaaacatattgagaggaatcatgaaatcatcttatgataataatgctatgttaggtgaaagctctctagtacttgaaaagattataaaagcagacgtagatgttattatagtatggagcaataacgggcagaataaacagcgagagaatcgaaaaagtatttgatggaacaatgttatgggtcgagatacatgaatgctcctaatggtttctctaataatgcacctaattattggacgaatcaacctcagccataaaatcaattgctcctccaccatcagtggtggagccataaatatatgttacggggtcatatatttgaccgtcacgaaacaaaatgttcccataatattttatgcttattttttcctaaaacacgaagtactattagaattcttttcaaaacgaagaataatgtcattatttctataaactccataaattggagccctatttgaatataaatttatatgtttaaattaatctgatatatgggtgagaagcaaaattgtatgaaatatatttatcatattttttcaagatatttgtttatcgaaattaaatgtataaccaatgtctaaagataaatcaaaagaagtgtaaaaattcatttgtatttaaagagaaagagaagaaaaaaaatgtagaaaaagaaacatgaaaatatatgaaaaaatgagtaagtgttaaatattacgtattaaaaacttaaaacaataaacaattactcaaaacaaagttgaagaactaaacatgggggtcctattagatatttcaagcaaactaattcaattactactaacataagcttgtaaaaaaaaattattaaatttatg

SEQ ID NO: 24555 - DNA, 3003 bp, Unknown
  misc_feature (1)..( 3003): 2750-1469P.txt file - cDNA_ID_2179873; gDNA_ID_1971954; Annot_ID_177468
gacttgatcaataaatccaaaaccactgttctccttcgacttcactaccctgccattatccaaaacaacaagggaggatcccttcttcccacctaatccctcacccacatctcttgacctaggaccactgtgacgcttattcttcctgccatggctttctctcaacaagctgctcaatctagcctctaaatagctatagccttcaacatacgcgactccatacgcttgtctttcatgtcaatataatttttaatcgaatctagtatgtgaacctgccctttagttttacggggtttagaagagccaggcaaggaagcatcaggttgtatggtatcctcatcaacacaatcataagtgctacatacatcactgttgtcattcctttcatcgggtagcgaatcagggacaacaccacctgaaaacatggacccttgaatgtgtgctcctcttttattagttgcaacatgtagtcaacagatagatcttcttcgtcctcgacccaacctgacttgaaagcgtcaccagtcggtgttccactcaaaacaggaacgactttaatctgaaaaacaaagagttagactttagccacatgatattatgttttattacatgtattaaaagtatttatactgttactaacagtgaaatatagattatgtacccatctgctccttaaaaacaacatcttatttcatcatataaccagatgttgtaatgcataccgccatacgtgacttcaagttacggattgtcagataaagaactgtgatcatatgtaaaaccatgcaatttttgcataaatcatgatataaataataaatagtaaatcaacacatattaaaaaaaactaaaccatattctacacatttacacatcacgatatgaatctatagcaatggctcttactgaggtaacaggttatgattattttaaagaaactgtgatcatatttaaaaccatgcaatttatacagaaatcatgatataaataataaatagtaaattaacacatattaaaaaaactaagccacatgctatacatttacacagaatgatatgaatctataattgtatgtttttgataggaaaagaagaggttttcatgataaaaacgagcatatgaaaattaatttacgagagcagagatgcattgctcacctgagactgccggtcgactttccaaacaagatccaacttcaaacttcataagcgctcaatttccgtatctgtttcctctatttctgagtcactatcttcaacggcttcagggaattgaaattctctgattcgaggaacactttaaaagttggagtgcgtgtgggaaaccttgaaccgtgacagatttccgcaaaagtttatcagctccccttgcagtaacactcttcaacgtcattaagaatgacatagttccccaaggaaaatttagaaacatgtctaaattttctgccatgtccacatggaccggagagattttacttctacccgaggttgggcataaaacgccatcaatcaaggccagcacagcgtaacgtaaacgaattccttgatcttgaaccactcgcttcttcagcctgccaacaacccactcaacagatacatcactgcggtcaaataggttgtaccaatacttgccaggcgccaattttcgtttctctttcctctctttcatacgaggcggtttgtcgcagttcaaaccggtaacattttgaaactcagaaatggaaaaccgaacaggggatccagagaaaattacccaaatttcttgtttcttcctaacaacaagctgcctcgttagcaaaaagtaaataagcttcgcagaatacgcggcgctttcggagaaatcaaataatttaccaaactgagattcccggagaattttcatgtcctccgcatctaacgcgttagcgatgtcatctatcaaagacagttcactgtaggactgcactctctcactgttgggctcggatccagacctagacaaccgacggggtaaagagttgttcgtcatctacaagtcgaacccttttctgcacaaaatagaagtttataatcagaaacagtatgagattgcagatttcagttaatcggaatacaaattggagaaataaagaagttgataccgatcgagaacgttgaatagcttaaaccgcatatattttcaaaattacctgtagccggatggaattgatcgcctaactgcgagattgaatctaaagaaacgatatgtatgcgaaacaatatagatttgaaatagatattcggagagtttgcagaatctatgggtagagaacggaagacgttttctctcggaaaaccagcaaatgaagcggcgctagttttttttttgcagctgctgatatttccaaaaaattgataataaatcattttctcgaaattaaaatctatatcgtttgcgtccacatacaacattgctcttaccaaggttttcaaaattctaatttctgcaatcatacgcctatacacctatatgtcccctaaccaagaacacagttatacggggttgcgggtaatttcaaatacgtctccgacatacactatagacttatagttagtttctatattattattgattttatggtcatttagtgcatatacccgtattattattggttatgaatctatgagctgtattatttgaaatgttctgattgggtggtgattttgtggaggtgtgaagcatagaaaaacttgaaatgctgatgtatcagtagaggagagacttttagagtttttgtggtatgaattatcttttcgattttgttaaagccaaaacaaaatgggctttgtagaccactaatataaaaattaaagtaagtaatgggcctattttgggcctttttctaaacactaaacaagttctcgaatgttcgccggagacaatttcggattcctccgtcttcctccaaaacctttgaattctcacgactcagagcactacttcctcttcaattcagatcattttcagaactgatacactacaatg

SEQ ID NO: 24556 - DNA, 3003 bp, Unknown
  misc_feature (1)..( 3003): 2750-1469P.txt file - cDNA_ID_2179882; gDNA_ID_1971954; Annot_ID_177473
ataaactcaacattgattattattagagacttatttcattaatttgttccgttaagatacttaaaacatccttaaattttattggaaagttggtgctttttctcaactaaatttgaaaaatggtgattgttttgacattttttccccaaaacaaagaatactaataaaatttctatttattaaatattatctcgtttaaactatagttttttttaatacttatttttagtaatatgtactcctctaaataaccacccttcatttttttcttatgtatttaactatttattacttgaaattctccatctcattcattttatctttaacaaccattactctatttatttaaatctcatttttctaattcatcatattaaacacatttttcaaaaccatttccagttagagcatatgtctatagtaccaaaatataataaataaaacccctaatagcaaagattattgcaatttaattttttatttctaacatgtttagtcgaaagagtatgaaatatgttatttgttatcaaatataacaaaattttcctcatgctcgtatgagttatgttctaattaactactccatatattaagcttttgtgtcaatagctaatttttgtttaaattaatgtaaatttgaatggttgatcagtataaaatagaccaaaatcaaacaagctaactatagtatataataaataaaatattaagttccatactaaagtaataaaaaataaaaatcgatgatatggaatacatggagaatttgattttgcatgatgaaaaatagtcaaaaccaacatatataatcgaaagagactacttcctaggccctagcaataattttattcttttgaagaagtcaagattcgataccttcttttagttcacgaatagcgttatggcgataacgttaatctctcgatttcaaaacgtgttcctgaatttttctaatgatattgtttctcttatattaaatcaaatagagtatatactttatgcatggtttactttactacagttttctttggttataatttattggaccataaaaaactagatagaaataatacaactggatacagaatcacaagtttccataatgaacgcaaaaattagaatgagacgtgtagataaaatgggtccaagtcatgtaaacgtgttcagcattatccactagtcttctcttcgtactacgaccccaaaccccactagcctacaccaatcaaacctacaccaatcaattataatattttgtcagacgagctttatgccaatctaatggctagttgagtgttttcttttcaaggtttgtttattgattctaaaacttgggccgcctgaagttgaatttgatacaacaagccttggaaaataaaaagtaatgtttaaaaatcacaaaacatatgatggtaagatattacttagcattatacactaaataaccaaattgtgaaattttattttgcaaaataaagtggtgagaaaattacaaaataaataggtgttgatttttcggattgtttaaaacaaatactatgagtttttatcgtgtattaaacaaatactagcttttaatttatctgatgatacattattcttaaatacaacaatccacttatttatattttcaccacaccatattttagcaaaaataaattaaataaaaaattgtatatcctaattaactcatatgttttacaagaacaaaacacaatactatttttatacgttccaaaactttgtattataattattttaatgtttctaaagttatagcaatgtgactaatgtaacataaaaaaaaagagatttatatcctaaattttgcaatgtcactaattaacaaaaataaaaaatatgagaaattaaaaaatgagatttatatctaaagttttgcaatgtcactaatataaaattaacaaaacaaaaaaaaggttgattttggttttttatgtatgtaaagttaaagcaagttaaactaatgtgatattaaaaaaaccaggactcagaatcccgcgatgtcgcggaggaaatattctaaatatgtttatataatgatttaaaaaaaaacaaatcgcatattataaattttagtaattatttaaagaatatatatatatatatatatgtatatatatattaaacagattaataaccgtcaataattttacaaaattttgcaataaaaaaaagatacagacgaagaaaaaaaactcgtcaatattaacaaacaattacgataataaacaagaaaaaaataatcatcaatgttttagcaaaaaattgggatgaaaacacacaagcggaaaaaataaccgtcaatatattaaccaaaagtatcaataaaaagatatgaatgaaaaaaggtaagtttcaatatttcattacaccatattttagcaaaaataaaataaaataaaacaactatatatcctaattaactcatatgttttacaagaacaaaacacaatactatttttatacgttccaaaactttgtattttaatgtttctaaagttatagcaatatgactgatgtaacataaatttaaaaaaaacaaattaaaaaaaattaaaaaatgagatttttttgttttaacatattctttcctatttatattatgaggattatatagtaaattttgcaatgtcactaattaacaaaccaaatatatgtaattaaatttagaaattttaaaatgagatttatatctaaagtattgcaatgtccctaatataaaattaccgatttagaaattaaaaaatgatggtgtttttatttatgtaaagttaaagcaagataactaatctgatattaaaaattaacaaaacaaaacatataaaattaaattagaaaataaacaaaatgtgattaaaatgatataaagagagagtcaaaaaaattggagaagagggaaggagcaacaaagaaaaagtctgtttatcatcttcttcttcttcaaatcgagatcgaagaagaaccaacaaaaaaccaaaaatg

SEQ ID NO: 24557 - DNA, 3000 bp, Unknown; identical to SEQ ID NO: 9088
  misc_feature (1)..( 3000): 2750-1469P.txt file - cDNA_ID_2180041; gDNA_ID_1972049; Annot_ID_178340

SEQ ID NO: 24558 - DNA, 3000 bp, Unknown; identical to SEQ ID NO: 9088
  misc_feature (1)..( 3000): 2750-1469P.txt file - cDNA_ID_2180041; gDNA_ID_1971984; Annot_ID_177675

SEQ ID NO: 24559 - DNA, 3003 bp, Unknown
  misc_feature (1)..( 3003): 2750-1469P.txt file - cDNA_ID_2180069; gDNA_ID_1971984; Annot_ID_58738
ttagagaagaatgaaacagagtttagtttgatgtaaaaggagttacgtgtaggtcacgcgattgaaatgctgtggatttatcttcgcactccgcttcaaccataccatgaccgatggagccggcctgtcgctctttctgaaatcactatgcgagttggcgtgtgggcttcacgcaccctcggttccacccgtatggaaccgacacttgttgactgtgagtgcttcggaggcgcgtgtgacccacacacaccgtgagtacgatgatcaggtgggaatcgatgtggtcgccactggacaccctttggttagccggtctttctttttcagagcagaagagatctccgctataaggaaactccttccgcctgatctacacaatacctcatttgaagctttgtcgtcatttttgtggcgttgtcggactattgcgttgaatcctgaccccaacactgagatgcgtctaacttgcatcatcaactcgcgttccaagcttagaaacccaccgctagagcctggttactacggaaatgtgtttgtcattcccgcggcaatagcgacagcaagagatctaatagagaaaccgcttgagtttgctttgaggttgatacaagaaacgaagtcaagtgtaaccgaggactacgtccgttcagtgaccgccctaatggcgactagaggccggcctatgtttgtggcatcagggaactacataatatcggacttgagacattttgatttaggaaaaattgattttggaccgtggggtaagccagtgtacggtggaaccgctaaggccggtatcgcgcttttcccgggagtgagcttctacgtgccgtttaagaataaaaaaggtgagacaggtacagttgtggcgattagcttgccggtacgggcgatggagacgttcgtagcagagctaaatggagtgctaaatgtgtctaaaggatgagagcttagtcgagactcgagacgttattagtaatgtagtaaatagttccttttcttattcgacatcatagtgtagtaactaatatttatatcattgcatctttcaacgattttttgtttttctgaaaaaatgcatatatcaatgaccaatcaaactctttagctcttttgaatattttttatgttttggtagacggaggtgaattttgtagagctttcacgatcgtagaaaacctacaaaatttcttcactatcacgtggcgacttcagtgacaagtttcattagtttgaatttttcatatttatcaatactaacttgttcgtatatttacgcaaatactttccatacctaaatttttttatagacacacatattttggtcataaaatcaaataaaaatcttatgatataatataattgatttgcgggtaaaaataatctctaaattaagggtgatatttttacgaagcttgtaacaataactttttccataagtgtgtttatttttagttttttatcgatcatgctcaaaattattccagcctataatataatttttgaggataaatgactagaagaggtttattctcacaagtcacaatccactgattgtcaattggttttcaaagacacatagaatttaaaggttaaataattgcataccaccaagacagtcttcttagcggctccaattggttttgatctcatggataggatcgtgacaatcacaagaacttatcatctattaatagtcctcccaatacatttgggaaatttcttggatctgaatacgctcatggaaaaatattagtggctttgtgccacaagatagacgactatctaaaccaaattatggaacattgttatcaacgacgataaaaataaatgaaaacaatgaaaaagcatgccaaaaaaattgaacgaagacacttaagctacaaacttacaaagtaactgaaattgttaagctctggatttattacacgattaaaagaaaacaaaactagaagcagcaacgtacacgatactacttttatattttctgtcacttgtcaatttccttacactcccattcgagtatttttttgtgtggataatatatttatttttgttaacgtgaaactaaaaatttaatactagatttataacaaattacacgatagctagctaatcaaaactcacaactagtaaaaaaaaataaaaataataataataataataataataataataataataataataatgagagttaaattgttcatttttcattttaaaaaagatacgcttatacgaaacagagtgtgcataaggctatatacatcggttgattgaataaatattgtatattttaattgaattcagataaagtattaaattttaatttaaaaaaataaaatcaaccatttctggaaaaacacatggtcagaaacgtctatcagagtttttgaaaatatggacgattctgacttttctctattctttttaattactttgtattattttaataataagtatcttactgatgaaggtgccctaaacacatcgaacagttctgaaaaccattatcggtcggctgccaacaaaaacgttaagtaatttatagattatagacctacgacataatgtttgtttagcttgtttttttaccgtgttcgtatatatgcgtatttctcttcttcttttaaatgtttttttcgatttttgtttgatgatgacaccacaactcgttgcgtggaccaaaataaacaagtgtacagagatatctacatcaaagtcatgcgatattagatcaatggtctagaaaatatcaattaaaaaagtttccaaacatcatagtactacttgacgtttaactatcaaacgaatccaaatctagatagctccgtaaaaaagaaagaaaaaaaacgttctctcgtttctttctattattcaaaatattttcaccaactaaaaaaagatacatcgaaacaaatctctctaatcatatctaagttataacttttctttataaacaataaacaatagctttgatttgaagcaagaggagcaacaatg

SEQ ID NO: 24560 - DNA, 3003 bp, Unknown; identical to SEQ ID NO: 24559
  misc_feature (1)..( 3003): 2750-1469P.txt file - cDNA_ID_2180069; gDNA_ID_1971984; Annot_ID_177683

SEQ ID NO: 24561 - DNA, 3000 bp, Unknown; identical to SEQ ID NO: 9104
  misc_feature (1)..( 3000): 2750-1469P.txt file - cDNA_ID_2180086; gDNA_ID_1971984; Annot_ID_58746

SEQ ID NO: 24562 - DNA, 3000 bp, Unknown; identical to SEQ ID NO: 9098
  misc_feature (1)..( 3000): 2750-1469P.txt file - cDNA_ID_2180086; gDNA_ID_1971984; Annot_ID_177692

SEQ ID NO: 24563 - DNA, 3003 bp, Unknown; identical to SEQ ID NO: 21514
  misc_feature (1)..( 3003): 2750-1469P.txt file - cDNA_ID_2180096; gDNA_ID_1971984; Annot_ID_177700

SEQ ID NO: 24564 - DNA, 3000 bp, Unknown; identical to SEQ ID NO: 9083
  misc_feature (1)..( 3000): 2750-1469P.txt file - cDNA_ID_2180137; gDNA_ID_1971979; Annot_ID_177650

SEQ ID NO: 24565 - DNA, 3000 bp, Unknown; identical to SEQ ID NO: 9085
  misc_feature (1)..( 3000): 2750-1469P.txt file - cDNA_ID_2180145; gDNA_ID_1971979; Annot_ID_177654

SEQ ID NO: 24566 - DNA, 3003 bp, Unknown
  misc_feature (1)..( 3003): 2750-1469P.txt file - cDNA_ID_2180154; gDNA_ID_1971979; Annot_ID_177657
cacatgtttgtaaatatcaaagtgtcaaaattttacagaatctgtcgaagccttactctaagttaaactcgataagttatggttgttgcttcaaggccaagtacgtaactccataatccgtcatgattctatgcgaagtagtttgctagtttgctaatttcacttttatgttttaggaacgtaaatcaaagcaagatgattatcaaagaaagatttgatgcataatataattacttgtgcgagcacaaagtgttccactatggattaataagtttgataacggagtcatgtggagccattccagctctaccttcaagacagtacgacgaagcgaatgtggtggagatgattttagagacattgctagggtttttcttaattcgaaggtcgtcgatgttgctaatgtaaccttagcatgatccaacatgactagtactactcaaagttcaagatttcttaagaaagttttatattattttatttttttttttgttattttaaaagttaaataacataattgttagataaggttttttaaatatttttcaactatgttagatgtggagtttttatgttaattaatttggttgttaaatatatatccggacgtaccccggacttaatccctagtagtaatagaaaagcaataaaagtataacatagattatacgagtaaccgagattcatatcaatcccaagctcttcacgcaggtccggcttagtacatgtgctagagcacatagttctaaggtccaaaatatttttaatttttttttttcatacaaaaatcccaactattttttacaaaataaccactaattcaagaattataccttaaaaatccctaattttattataaaaaaaaacaatatgaaaagatccaaacttttaaaataatatttctataacgaaaaaccacaattatttgaaaacaaattggtatttattttttaaatataacaatataccaaaaaaatttttgtctaaaatgtccttagctattatggatcgggtcttccaccgggtctcgccaatatttgagtcgggtctgtctccactcatgagaccatctagcatttccttgatgtgggcaattgatgcaccaagctcattcatgatatcatgaacaccagttaacaagggtatttgatatatccttgcattaacatactcatacaatttattatttaaataatttattagattgaaaaagaaacaaatttaattaattacttatatcagtaggtgagggtgtcccccgtaaagctcacaatgaatctcgtagagttacatcatatattcgtcagggtccaagtgtgtcacgatcatcttacttgagagtatcgaagttggtctcattacggaccaaccatggcaaaatacaacgacctaaaattttcaaaaaaaaaatatctaatatatcttaagaaatcaagaactactcgcaatttccaaaaactacctttatatactcgaactcattctaaaaatgttgtcactcttttttattaaaataatatatacatatatatatatatatatatatatatacttcatatgagtttttttaatccaaaatgtacataatactacccaaccttatactctaaattagcaagtctaatatattgtataaagcaattatatttaattttaatacatatttttaaatcaaagttacataatatacgtgtatatattcttcttacacgatattttatagaactcagtcactcaaaggaactaaatttaaatgagatgaaaataaaatagaaaccatcaaattaaagctaaccataactcatgatattttggtgaatgatttgattcagtttctagtaagataaacaagagaaatgcaagcacttagaagaagatgagctttctctcatttcattcaaacgttttttgcacatttaatgctccgaaagtaacatattgtcagtcattagtttttatttttgtacaagtttatcatacttcttgttttatttgctccacacaattttccttttatgtttttcgtagacgtcacaatgaattagaaaaaaataatcttaaattattcaaatgaatatatatatatatatagtatatactaaaaaatagttaaagatatagtatacctctttcaaaacaaagcacaaagtaacatatacttattatacatcaatttgataaaatacctagtggacatgactaatcactaataccataaaaaagaacaaaatctggataatggatccaaatgatccatctaaatgtatccattgtatgttgtttgtttttgaatttggcaatccatctagttgaagcatttgaataaagctttgttagtttgagtaaatttgcatatgcatcacgatttatgttgtattaaaatgacttagaaaaaaaaaatatcttcatcttcttcttaatcatagtttaatgatttaaaattacatttacaactaaataaattttaatactttttttgttacacctataaccttttataaaatagtaaaattagcatctcattttcagagcagtctaaaaccacctaaaactaaatcatagaatctgatattattgtactgatgtttctcttctacttaatttcaaaaccatatacagtacctgggctgtttaaccgaaccaaaccgagattttcggatttggttcatgatcggttagtagtctaaaaccgatcggaaataattatgggcttagcccactaacattggtgggattattaatctgtaaccaatcaaaatccaagaatttcgctataaataaaaagcatattcctttttttaattttttttttcctatcgttgtcttcttttgctttcttattttgtcttctcacaatctgttcctatcaatcacacagataataatcctcagcttctctctcgctggatttcaacattcttccactcatcgcttctctttaccaaatcaaactcaacacttcactcaactcttatcggaccttccaaactatatccttcaatg

SEQ ID NO: 24567 - DNA, 3003 bp, Unknown
  misc_feature (1)..( 3003): 2750-1469P.txt file - cDNA_ID_2180275; gDNA_ID_1971986; Annot_ID_177721
gatgatgatgatggtgatgacgctcctaaaacatgggaagaagtcagcaaatctctagaaactaaacttaaacctgccgccgttaaaccgccggaagtagactctgttaaacctccggcgactcctccacggcggcttccgcggaagagcgcatcgttccacacactggacgagcttgaagtgagggccaaaagaagcatcgccgcgcaaatcccgacgacaatggttaagcttaagagaaccgagtcgatgtccaagctaagacccgagtcagatgatcgaaccgagtccactcagtcgtcctactcggggcctcggtcagtgaaggagaacatattcgtcaagagagacagagaacggagggagaaagaagggaacaagaagccggtgatgaactgggacccacttagggagttcccggagaagtgtccgccgggaggaggggaaggtttgattgtctacacgacgtcgttgcaaggagtgcgtcgcacgtacgaggattgtatgcgtgtgagggccatcatggagcagcaaggagttgtggtggacgagagggacgtgtctttagacgccggagtcttgagcgagcttaaggagcttctccaagacgaagcatcagtggcgccgccgcgagtgtttgtgaaagggaggtacttgggaggagcagcggaagtgacagcgatgaatgagaacgggaagttagggagggtgttgcggtgggcacgtgtggagagagtaggggaggaagggaggctcacgtgtgaagggtgcggaggagcgaggtggttgccttgtttcgagtgcggcggaagctgtaaggtggcggcggttggggcggccaaaggtgaaaggtgggagaggtgtgtcaagtgtaatgagaatggattgattcgttgtcccgtgtgttttgttaattaagaacattattagtttacacaagcaaatagaggtgtgtcaaatatactttgtcccgtttgttttgttatatgtatgtgacacgtttgattttgtggaattgaaaatgatttgaaactatgctaggattttcataaaatgttaaagcatgaacgtgaaccattataatgctaagcttgcaaggtctctcactcgtatatgttgatggttttgatcaattacgtaaaggagttcaacaatctcactaatttaagtttggatcgtcagaaggtaaaagctggcaaacaaagtcacttctgcctgaatactttacaaatttgttctttgttgctattttgtttgattgttatgcatccgttgaggattttgtgctatgaaacagagtaatatgaattccatcattatagtaactatggcaagttagtgttagttaaaatcttttaatgaaaatgcatacaagtatgcttctcaaacttagctttaagagtttctcacagttacataagaaagcagagcaatgcacaaaaaaagatacaaaaaagatagatttacttttgttcttacaaagaaacaaaaaaagaatctgacatttttctcacatacacaatgttcatggtcttcagttgtacttcctcttctttatcttgaaggaagatgatcggataatgtcatcgtcggcagtgagaacggtctcgagtggaactattgattcgggtttggtgaagtaagtgaagagaaggtagattccatccaagtaagtgttggtttctccagctttgttcttctttcttatgctgtaagccaacggaatcactcctctgttaaacacttccacatacattccacctcctgccacaagcaactgccacacacaccaaaaagaaatcccagcaacataatgaatctttcagagtctgcaccaactaaaaacttccactactccgaacataaatttcagaattcctcattagattaaacatgtgatatagcgtaaaagaacccacgcgtaaaccacaaatgataactgtgtattagctcgtttcgagcatcaaaggacatttcaagaattgagttaaaatgttatggtaaaacatgactaaaaaactaagaagtgcactaagggctcctatcttgtttcaaatggttgagacttaaagaattcacagcccacagaaggatgagatttgctcttagaaagttaaactctttacttcaattttaacaaggagtcgtcacaaacattcaattgatagctgcaagttacacaactctacattgaaaccattttctcttgctttgtcattaacgtgtaagaacagacacaagatacaacttttagtgatctcttactcaacttctaattgaatcctaaaatctctttctctctcaaataatcaaatttccctctgacatgaaacagaaaacaggtaaagttggagacttttacttacctcttcgtatttctgggtaagaccaagccgttcatcttcagacatgtctggtctcaaaaccgccattgtttcgtactgcctgagcccaggtgggcactgaggttccggtttgtcttcaagggcagttgagactcccgacccggaaggagaagtcgggtcatcatccgacccgaatccaccttcaaagaaagttccagagaagtcaagagcctgagatttcaccacaaattgagagccatctctcttctgtatcgaggcacacataggtttcgacttggaaatgaatggcctgagagagtgggagaatgatagcagcggctgcgaagatacattaggcagagggcaaattgtggaatttgatacacacagcgaagacgccattgttgtgagattgtgaaagcaaagaggagatgagagagtaaaatttggataagagatgatgatggtacacattagtcagaattctattgtacaccatgggcctttttaggttattgggcctgttaaaggcccgttttgtaaagacaattatttctatctgtattatttgtcttcgcgatcaagccagttctcggagcaatcaaatctataagaaaagaatcgtcgccggtgaagagaaaaaaccatagaagcgatg

SEQ ID NO: 24568 - DNA, 3003 bp, Unknown
  misc_feature (1)..( 3003): 2750-1469P.txt file - cDNA_ID_2180306; gDNA_ID_1971986; Annot_ID_177730
acacttgaatttctctgtcccaacctagtaagaaatagagcttatgcagaataatgaattttctcatctgagaacatcaatatgcagaagatagaatattgctccctcatgttggcccagtccaacaagttatgaacattccacaacaatatataaaactgtttcacaagtcttgttaaacacaacttgcttgctttttcgtgctgcccagccagcattattgaatatcatatctcagtgagatgtataatgatgtgcctcatttctatctttttccttcgtgctttgctcgagcctcgacctatcaagcgttgctcaatgatgtaccttcgctaacaggaagagcttcaagagctaggcacaaaggattaacagaagttgaagttttctttatagcagaatattgaattttaatgctgcccagctccagcaacatatcttccaattgtccatcaatttgcagttctccatatgagcagatcattgaatttatccccatcaatatgcagatcattgagttattaagcagataattgaatttctaacacgctgcccagccagcaatatatagatctcttactgttaaacaagtcttacagtgttataatcacacagcttgcccaatcggacatcatagacaagtcttacaaaaggcaatttatccccatcaataataagcagatcattgagtttttatgcagatcactgaattttttcccatcaataagcagatcattgaatttatccccatctatataagcagatcattgaatttatccccatctataaaagcagatcattgagcttttaagcagatcactgaatttatccccatctataagcagaccattgagcttcttttaagcagatcattgaatttatccccatctatataagcagatcactgaatttatccccatctataagcagatcattgagcttttaagcagatcatagagcttcttttaagcagataattgaatttatccccatctataagcagatcattgaatttatcctcatctatataagcagatcattgagcttcttttaagcagatcattgaaattatacccatctatataagcagatcattgaattttccccatctatataagcagatcattgaatttatccccatctataagcagatcattgaatttatccccatctatataagcagatcattgagcttcttttaagcagatcattgaatttatccccatctataagcagatcattgaatttatccccatctatataagcagatcattgagcttcttttaagcagataattgaatttatccccatctataagcagatcattgaatttatccccatctatataagcagatcattgagcttcttttaagcagatcattgaaattatccccatctatataagcagatcattgaatttatccccatctgtataatcagatcattgagcttttaagcagatcattgaagtttatataatgctgcccagccagcaatatatatagaagataatcgcaaagatttgatctttgaacataacaagacttacaatgtttaatcacagcttcttacgattcaattatccaatctttgtgcataatttgtcaagacttacagtgtttaatcacagcttgccagccttacgattcaattatctaatatttgaacataatttgacaagacttacagtttttgatcacagcttgcctgtcttacgattcaattatccgatatttgaacataaatctgacaagacttacagtgtttaatcacagcttgcccctgccttacttaggcaacatcgggacaaattttcccaagttagaaaccggacaaacacaatcatataatgtgtagttccctttcttttgggtttgaacaaaacataaaactttctttgaaacgaaaacagagaatcgatgatggggtttctaatccagaaaaacgaaaaacaaaatctttaaaacacgatccgtattagaaacccaaacaatctttcacaaacgtataataagaaatcgcagattttaaaagagggtttctgatttaaaacagaccaaaaacaaaagaatagaaaccctaattggtaaccacaaatatgtataatttttgaagaggaatacaagattgaaattagaaaccctaagacaaaagacggtttttttcttagattagcgatataaaagaaatcaattgaaactatgattctgaattacaagtttttggaaaatcaagaacctcaaaaatcagatctaaaagagggttttttcgatttgcacaaaaaaaacaaacataaaatcgaaacgcaatttggaaattaaagagagagaacttttggataaaaattcaaaatcgaagtagtgaatctggaaaaagggagtttcaaaatctaagaaaacgcaaacaaaagtctccccaaatcaaaagaaacacacgaaatcaaaagaatataaaagaacaaacgaagaatcagacaaataaaagaagtaagcatggcgacgagcgagtataaataaccgttgtgaaatagaagaaagacggtggtctctgtgttgggcctaaatgaatatgtaagcccaaatacaagttgtgttgttttttccctcatcgtaatataaggcccacatatgtttttttttgtcgtcgaaatattttataaagcccaaacgaaggcccacatatgtttaactgaaagttatggattttccaaagagaaaaagaaatacaaaaattaggatccgacccggctgaacccgagtggtttgttcttgttcccacggagaaaaactttgctctccctttcctttgtcaatcggaatctgtcccatttatcgattcttcacagacacgttttcttcaatctttctccattggtttcgttctcaaggtttgtttgtgtcgatcgaatttagtttcaggacattgatcgtaattggttctgttgcagtttgagaattgcaattgttgtcatgtttagatagtggaaccctaatttgagtcatg

SEQ ID NO: 24569 - DNA, 3000 bp, Unknown; identical to SEQ ID NO: 9110
  misc_feature (1)..( 3000): 2750-1469P.txt file - cDNA_ID_2180329; gDNA_ID_1971986; Annot_ID_177736

SEQ ID NO: 24570 - DNA, 3003 bp, Unknown
  misc_feature (1)..( 3003): 2750-1469P.txt file - cDNA_ID_2180333; gDNA_ID_1971986; Annot_ID_177738
tattttaagttatatctttaggagtacgaaatttgtttacacattttaaaaaggtaatagtattttagattttgaatcatagatatagaaaatgatacaaaattttgttttacctggatcaccatttttaaatggacggccaccatattagacatcaaatgcccatttatctaagagccatattggttgtcttggtcccaaaaacctagatttctaaataataatggattctatagataccaaagcaagtgtccatttacactagcttgtagcttcgcttaatttagttgctatatatgtccacatcattcgcatatgctatctgacacataaaataaatgtaatttagtatatttagttcatatttgattaatttcggttacaattttcatattgtactctattaaaattctaataattgatattttttttgtacaaaggttaaattaataattgatattttgtaggtataagtgaagcttttcttgttaacatgcgtttaagatggttaatagttttttttgacatgtaaacaatcgatcatatggatcgttcttaaaagatttttatgttttttttacttgagatgcttaacacacttaccatgcatgtgagatgtgtcatgcatattaggtatttagagcaaatccagtagtggtttctaagcaaaatttctaacctataataataataataaaataataaataatattatttaattaagatagtttttaaggaaatgtgagagagtttctaattcaagagattttgaatactcttctacctattttaagaaacttttcaaattaaataatattatttcttattttattattactttagtagattagaaactatggttagaaaccaccattggacatgcttaggttaaacttgaatttcaatcattttccggatctgtaaagaatatgatattactactcttaaacaattatcaagggtattaaattggaattttattatcaatcgaattcgtggaatatttgtcacgtttaatcaaaaagtcacttatgtaaagcgtttgcatggtaactgtcgcattttaagcaaattaaaacactattgatgcatatggaggatataaagtcattgattaattatgtgttttttttttttggtatcaagattaattatgtgttatactaatgatatctaacatgtattcaaggaagaattgtggatacagaaaactgaagtatataatttgcgtgggggaatttatattgggcacacttgaacagcatttgtgaaaattcttgacgttaaaggaaaatgaaaaatgtgtgtgttcgtttacataaatacaaaaaataaaggtgctctatatcctaatacaaaacctagggggtagaagctgaggtggatcgcaatagaagaagatggtcggctctcactctcgagatcggacggctgagaagagaagagaagagaagagaaggagaggatgcgtttcttacggggagagagaaataaggccaaacaggtagagcccacaagatgactaatctccaccgtccaactcaaaaacaacatcaacaacaacacatcacaccaaatattattcggtttctctcttcaggtccgactcaatactgtcatacaccacatccactactctactactacagactttttggtgctcttccccctgtggagtccaaatcctttgacacgtgtcgttttctcaagagattcactgtcccactctctgcgtgattcccccccacatctgacggctgcagttcgccgccggtctactcatccgtcaaacgccggttactgctcagactttggtttgatcaaaataaataaaaaaagatcaacggctggaagaggaagtagaggttgaatctggacccttagatttatatatactaaaaaaaggtatttgggtcttcatgtcagtagaggcgtttctcttgcttgtttaacacaacactcccccactcttcacatttcttctattttcttctaatttctacatctcatcacatgtagcacacaaagtcacaaacacttgtactggaaatgattgaaagagaaatatgtcttatatttgcggatatataaatgtgctttcacttcaatatcatttaaaaaaaaaaaaaactctaattttctctgctaattgttacgtttgtaaatatattttttaatagaaaataactatgaaaaatccgagtgcaactatagattgtagataaaagggacaaaagttgaaaggaagtggaagcagcaaaagatgtttcaatggataggggagtcatgacgtgactaatacacttctttttataaaatgtactatacattagtactaaatacagtattgtacaaatattcccgtaaaaacagttttaatttttaatcaaaaacaactatcaaatatggataaattagcgtccatagttaaacaaaaaatgctaccctagctaaaatctccatttcttagaaaagaaaaaaaattctataatatataatacctcaaatgaaaaatgacacattgtacacgttcatcaaatgggaatagtattagtactagtaacctaaagatttggtaagaattaagaacaaacaaaaactagagaagagagagatatgtaagaagaaacacatgaataatgggacaattttattattagaattaagagataaatgaaaaagattcgtgggacggcgggcgcatagttcagagtgtgtcagagtcagaccaaaccctttctcttatctctctctcttacgaagaatccatcaaaaatcccacatacacacaatatacgtgtatctatatattccttcaaataaaagtgacagttttttaagaaatataattaaattgtttaaattctcttttttcgtcttcttcttgctttttcaaaaaccagctttacctttccacacacacttcttcgtttctctctctctctttctccttagcttcctcttcaagttttttttgatcagctgcaaatttccatagccatg

SEQ ID NO: 24571 - DNA, 3003 bp, Unknown
  misc_feature (1)..( 3003): 2750-1469P.txt file - cDNA_ID_2180343; gDNA_ID_1971986; Annot_ID_177742
cgataacaaaaataagaaagattaaaataagttaagccttaaatattagaattaagataaattacgaaaacacggatattacatgaagtcttaaagatgttgacctcgaggggatgcatgttgtgtaaactagaaaattgatttttggagtttttcttcttcttattcgtatcaagttcattattactttcatttgtcaaccaagaaaatagttttaatatcactaaacttataataaaaataaaaaatattcttttttaaattgggtgaaaaatccaaaacatcattctttttaaaacatggaaagtataaattaactctgaaactcatttctattttatgtagactagggtatagggctaacaaaaattggtctcataatagatatcgaacaaaagacacagaacctaaagcaataacaaaggagactaataaccacaaatttttctcatatagaaaaagtttacatattctccatagctattttttcgaacaaattaagagtcaaatgcaaaagattttaaaaattttgtgtgctttcaaagatgaagtttttagcggttaaccatgacatataaattcgtaatattttgtagttgtttttaaaaatatgattggattatataataagttttaccttgttttccacaactcattgaataaagaatttgtcacataaacaatacatatttgcaactgtcatagtaaaaatatattatcaaatctaacaaaaattatgtatattatgaataaaatactctaaatttaaagaaaagtatgaatccaacactatctctatcttagtacatatatatgtggactaatggtagttagttagagttactcttaagttttaagcgataaaggaattttgttttgtttttgacagaaaaatatgttctctagtcacatattttaacgaaaagttttaaaatagcttatctaacaaaaagcaagtgtacaacataaaatccaacttttggatttatttcaccactttcggacacaattgtaataagaacggaaagtttcgaaaagggacaataaatcaactaaagacgaaaaaggattaaggtgaaaatcttgatgccgttgacttttgttctcaacggccatgattgagcgtgtgatgagtataagagaccaaattatggctatttctaataaccccaaaaaataaattgattgatgagtttttcttcatttgatatgtaattataatcacttattccatttcaagatttgtggatatctattgatattctctaccactatcaagaagctaaaagtgtattaagtgcatgtacattagcttaggccgagaagttttttttttttttttttaaaggtgatgtatttgtggcacttaggcttaggcatgtaatgtgtggtgtgagatgttgcgcgacttgcgagtaacaaaaatgggtctcaaatattgaggcatgtatttctaacgtttgctatatatgcctttgatgttctctaaattctattttatatcgtatttccatagtaatattcagtaaaatcatgaaattcgaaggttgatatcagagtttatatagtataaagttttaagatataaataatccattgaaaactcaaaacataggtacaaaatagcaccatgtacaaataaatagctaaaataaagtaataaagtaacaaattaaaacacgtttaatactattcatgaactaatgttcaagtctatttaacattcacatttttccttgcttgtgatcttctatataaacttaaaattaaacatgcatggtttcctgataataataagatgtttagttatattaaagaaaaaagatagtagctctcaagacttaaggcggaagcataaccttattttttttaggttggtaccacaagagaccacaactaaacatttggatgaatataggtataacaaatctcttatgatatgtatatatctggcttatatatgaatgcatactctacgaatgtatgtgactgctgacgacattggtgttagactgttgatataattatatgaggcagtggatcgagatttgagaactacttaagtcaagattatcataccgagaattcaagatttaggtgacacatattttgggaacctcattggcccatacactaaagaggcggtcattctttctttataactctaaaccatattttccaaccaaaaacggtcgatgttaagctttaatatgatgttcaagatataggatacgagggagaagatgatcgctagaaactccacagcaccatttatcttcctctgttgtggggatcacattctcctcatttttatttttccattgcaccagtttccactatagaaattttcatcaaatgttagttaattaatcatatctaaatatattgaatactattaaagtatatcataaattcgtatcgagtatttaatgaatcgatgataaaaagtaaaatcaaaataaaatctccctttatggaaattataccctcgaagatcctctcccgtcctaaatttttcaaaagacaacaaataaatatatagtaatcaaagcaaactttttcactaaaccggcaatagccggtgtaattcacgtcacttccgggacaaaagcgtgactggacaccggcagacaaatcacatcaaataaataatagtaatatatttaattcctcagacaaaaaggctcttccacttcttatcgaattacaaacatttcatgttattgtttggttatatatatagagagacaaagctcttaactcctttttaattgcttgaacaaaaagcaaaactcaaaggaattttctctgtatttttttctatctgcagaaaattaaagaaaaaaagagaaaactcaaaaacccacatttttcctctgtttccagcttttctttatctttggagtttggtttctggagaagacaaaagttgttgtcctttttaagagttcgagatcctgcagaaattaaaagggctcttcccggcttggattcctaaatatg

SEQ ID NO: 24572 - DNA, 3003 bp, Unknown
  misc_feature (1)..( 3003): 2750-1469P.txt file - cDNA_ID_2180366; gDNA_ID_1971986; Annot_ID_177745
gctgtagagatagtacacatacggaccctgcaaccagtccccagctaaatgccgccagggacataaattcattgttggattttaggatctatggacaatcaatcaatcattgggagcattcattcattcattccggtcaaatcacacaccgacactaagctctatagaaatcagaaaatggatcgtgatcagatgtagtgagaactaacccatcatgagagagtagacgaggagatagttgttcttgaaggagttgaaggcggaggaggtgttaatgcggtctttgttcgatttgctcagctccaagccggcgacgatcgcagccaggccaccgaacaccacgaagtagaagatctccattgatacgatcagatctcgcaagggaggaaggagatgatgagatttgtaatttcagatttgtagagtgtgtgtgcaagtattaagtatatatcgttgatttaaatgcggactaaataataataagtttatgtgcctttgcctctctctaattcatttctttttttcatttattaacctcctaaccttccaacaatgtttttttttttttttttttttttcaaaactaaaatttacccaaatgggcttacaaacggactagatttgtgattttaatgatgcagccgaaacacataacgttgtattttgggtcttgtttccatggttcccctttgggctttatgctccgttgttggttttttggtattttctgtttggccctgaggcatgtgttgtattttctgtttgggccttgtaatatgtctttttaatggaaaattatgaattaaaaaaaaaaaactgtagtttcattatcatgttttttttataaatatctcatggaacacctaaaatagaaaataattctcataatcataaggactaaggagagataagcaaacctaacattcttatttcctaagaatacaaccgagcgtttaacgtaccaaaaattgtatagagatgcgtctagattttttagtaagtgaaacagaattcacaaccatagagaaatgttgttacaatcttgtatttgtttgactatatatatgaatgaaagttacgcaaataactgaataaaaaaaggagtaggaaaataagaaaaaaaagaaaaaaaaaaagataagaaagcgtagaaattaggatgaaatgtaatgcttattacttatcttcatgtgaagtttctcaaatatctatatatacatttttgcatctattttgtaaaataaatcttagagttggaacttatttacaatggttgtaactggcttttaattattgattttcttttggcaataaattgattaacaaacaaaaaatattccaaatatattccaatctcatatatcatgcagatttctccaaaatttgaactagatttcggaaattatttaaaacaaaaaatatttgacaaaccaaaatacaattgcaatcccttaaaatgagcaaaacgcacctaaatacatttcttatcagttcactaaatcttatttctccaatatttgaattagatttcgacaactatttaatacgagacggtatagcacgggtgaaatccattagatatgtttagtttcactgaacgggattagatggtaggacgggtttgagtcgatagtaatacgaaacggtataccacgtgtgaagttctagatataacaatcaaaatataattatattatcttaaatactaaacaaaacaattataaaataaaaatataattaaattttaaattatttagttataatctagattttaatttaatgaactgaacgttattgttcttatattttaaacagtaaaagttaaacatagtaattgtatactaaataatatatagatataagagttgtacattcagaaaatacaaaatattaaatcatatatatttttaatcgactaaacaaattatacttttatttttaaaagaacaaaatagtcccgcaggttaaaacctagtattttacaaaaatatagacaaataaaataaaaatgaactatcgtggatttagttagagaaatccatacaaaaataaattgcattgagaaactttagatgacgactaagtaatataagattttgcattgagaaagcttacatgtcaccctaatttctatcaaaagggtttctgatactaattggaaccatgtgagaaactatccatagaaatgatgatcttatctagttatcatgagctgatgactttgaatattccacagtcactaaacgcatgtttatttctcagctttatgaatctgtatgtagacacactttcgtattttcttcacttttgtgtatttgtattgcccattcctcttttaccaaccaataaaaaaagcagtcttttttttgtttggtcaagcattggcactctttgtcaatcaattacccaagggatatataataataaattggaataatgaaagtagttcatcataaggttcgtgattattaacttctacttttgtttatattcaatagattaagatgccgtgtatgataaggagagcaaaagtaatccgatagagatcacagcaatattcattacaaaatagttttcaaataaaaacacatgatcaaaaagtgactcacaaaaacacatgatacgtacgtgggatgctaatcctaaagcaacaaggccacaagggcaaaatatgtagctttcatgctttggcaaagcgaaaactctagttaagcttacctaacagaaaaaataacccccaaaaaagcgttacgttccaaacatttagacagggtacacgtgaatgactcccactttttttaaaaaaataatagtactatcaattcaaatgtgtaaacaacaaaaaaaaaaaatgtgtaagtaacgtctgtaattgatttgataagataaaaaaatcttgattaatttttctataaattgaagcctttcctctttacatttcgttaacacctaggttcttgtttcctaacaaaggctctactttttctttagttaactactatg

SEQ ID NO: 24573 - DNA, 3000 bp, Unknown; identical to SEQ ID NO: 21956
  misc_feature (1)..( 3000): 2750-1469P.txt file - cDNA_ID_2180521; gDNA_ID_1972008; Annot_ID_177803

SEQ ID NO: 24574 - DNA, 3000 bp, Unknown; identical to SEQ ID NO: 9141
  misc_feature (1)..( 3000): 2750-1469P.txt file - cDNA_ID_2180545; gDNA_ID_1972008; Annot_ID_177811

SEQ ID NO: 24575 - DNA, 3003 bp, Unknown
  misc_feature (1)..( 3003): 2750-1469P.txt file - cDNA_ID_2180561; gDNA_ID_1972008; Annot_ID_177815
ctgatgaagatgatgaggcggtgttagcattagagaaagagatgtggaataggttttacggagctggattttggcgaagtccgtcacagagagaatcagtttcgtctccgagagtttccaagtctctttcgtcatcgccgagacaatcgtttactgaagtataccggaatagggatacaacggttagaggaggaggaggaggagctacggtggtggcggcgacaccaagagccgttaggcattttgattagggtaaagaaagagagcttatgaaaaaaatgtctcaaaatgtcttttgttaatagtttcattcgtgtggcgagagttgttgtgtgtgtgagctcaaagtgtgtgtctgcgtttgtcaaatctttggtgtgtgactttatttgcctatggtatgggattttgtgatcatcaaatatgaaaattcgaaatggaattgtgttttgtcgaaatgtgacatgacatgagatctttgactatcaaagtctattgagggtttagtttggatgtttaatcactcataacacaaggtataattacattgttagattcgcaagaagaagaatagatcatgaggtaaataattagtgtgacatggtcatggatcagttaaaaagataaagataagattcaaagggtaaaaggagagtctagggtttaaaaaaacaagtggggagctgtccttttctttcaagggggtttggaacttgtagccttgtaggttgtgatgtaaactatgaggaccacaacaatcaatcagtacttggtcattagtgttaagcattaattcaggtgttgctaacaactactaccaccttcttcttctgcatctctctaatgactcttctttcctttttcatctctgtttttttttttgttaactttgacctgctttgttgtgtttcaattgtctttttactattactcactaattcagctttgatgtgaccctacttcatttatttcattatttggtgaatctcatgcaactgtttttttgtttcttttttcagatgtttgtaagaaaataaacgacttgtaattataatcgaatagtaaaatgtgtatttattttttcgacaaagagtgggcaaccaaatgttcctcaaccattgattgttgaaatataaatttttattattctaaatgaaatcgtgcgtcttgtatcgaaaggaaatgcttgaggattcaacttataacaagataacatttattaattaagaagattttggttgttattttgttcttaatataaaattcacgaggattgttttaaaatgtattatctttcggctctttcggcaacttttagttgattatacttggaccttacagtttcttgttattcaaagataacgaatatttaattcttgaatgagaggcaaaaggtcgtcaccagtatatacttctaactttaacaaaaatggcgtcaccgaaatgaatcttggatagcccatagatttttatatagcagtgcctagcatctctcgacacctcatttagcttccccttctcatgttcatttgatagttggcccatttcggcccaatattttacatgctgttcgtgagatgggtttatgcatgacttgtgtttcctaatttcagatcgttctagatgaccttctgggtatataaagtgtatgcgattttttgtttcttttcgaagaaaaaaacgagttaggcccgtagcaaaacaataagagaaatcgggcttaagataaaagacttcgaaaagatgggtttaaattcagttgggccttaaagcctgtcttcttatcaggcgggaacaatcagaatcgcataattgtgttacaattttccacaagtccacaaccattagccaaagacgctgtcctctggctcttttgatgtagttggacgtaagggcacgtgccaagttggagagcgtgagagtaacaggtaagtggaattgaggtgggacattacacgattcacgaacttagcgtagcaaccaaaaggtgtcccaataaataaataaatgatggttgtattaggtcatacaccgacagcttcaattcaagccacgtgttctcccttcttcttcggctgcttctctttgcttcacatgatgtctttcttttttatgtttggttacatatttcttcttaatttcactttcaatttaagtatcattaactatagaaaactgactaattaactactatcccatttttatcatctagtactcgccgattgccttagtccttcttatgttaagaattaaaagacttgaggaaaagttcaattaccatcactttcactactctaccgtattacaggcaaatatttaattatctagttccgaatattttcttttaactatgattcttatttatgattaattatgtccaaaatgtattcaagattcttttctgattatactatagtattcggaaattgatgtaacagttttgtatttgagtatcaaagaatattatgaccattggaattgttgcgcatgactatttaatatattacctaaatcacggatcaaaaatcaatagttattcactttgcataagtagaattccatctgaagagtttaatataagagcagagcttgtttgttctgaaatagtaatactttcatttattaaaaaaatagtttatcaataaaagacaaaaacaaactgctgtgtttattcaatgattataaataaaaaagattaagccgacgctgagccgagacttaaaaaagaaagccaaaaaagtcagagctaaaataattaaatgttattcagacaccgtgtagtccccaccaccagcctgtccgaaaacccaaacctgttttgatacacaaacaacacagaccacccccaaaactcacatctatctctatctctcttctctgtctctcactctccactttccgatcaccgacgattcaacaaaacatagtaaaaaacaaagcaaattctttttttctccttagttacttcttctacagattatctcaatcttacagagcaccatg

SEQ ID NO: 24576 - DNA, 3000 bp, Unknown; identical to SEQ ID NO: 10927
  misc_feature (1)..( 3000): 2750-1469P.txt file - cDNA_ID_2180565; gDNA_ID_2214466; Annot_ID_133014

SEQ ID NO: 24577 - DNA, 3000 bp, Unknown; identical to SEQ ID NO: 9134
  misc_feature (1)..( 3000): 2750-1469P.txt file - cDNA_ID_2180580; gDNA_ID_1972003; Annot_ID_177764

SEQ ID NO: 24578 - DNA, 3003 bp, Unknown
  misc_feature (1)..( 3003): 2750-1469P.txt file - cDNA_ID_2180594; gDNA_ID_1972003; Annot_ID_177768
gagaagaacagactgctagggctttttcttatagttttcgttttttttttttttttttttccatctcttttagttttcgtttgggacatttaatgtctataattaataacaaacgattgggccttaaatttagctcaggcctggaataagcccatatagtcctcgtttttatgtcactctcaaaacctcgaaagtggtttctatctatcacttgggcttttattacttgttaaaacaaatttgatccaaatctcaaatggaaccgacaaaatagaaaatccggttctctcaaaaggccaaacacgtgacgtttaggaacaaaaaagacgttatcactgcaagaagttttgactttgagaaagtctttgaataatcaaaacagagtttttcaaatttcccaagtctgaaatggtactcgcaccctgcagacattttcgatcaaaattttcagagagtgagagagagagaagggagatcagataatggcttctcgtaagaaacgtgctgcgaagatttcagaggattcagaggaggaacagagtcgccgtcaacggttacaagccattcttctcgctgacagtttcgccacgaaactccttcccttaaccttagaacgccccaatgtcttgttaccgctagtgaatattcccatgattgattacaccttagcttggctcgaatctgctggcatagaagaagttttcgtcttttgctcgatgcaagtcatcgattatctgaacaactctgactggtactcgcacaaagactttacggtaaaaactatagagtcaccgcaaaactccaccagtgctggtgatgctttgcgttatatctacgagcagcagattgagacgtctcagattcaaggtgactttgttcttgttaatggatgtattgttagtaacatgcccctgacgcagctgattcaagaacacagagatagaaaaaagaaagatgagaaagctatcatgactatggttatcagacagtcactcatcaccgatcatcaactcttcatcgctgtaaatcctttaacaaaacagcttctttattacgatgaggacaacatctgcttcgataaatcattgctggatcgtaatccatctgttttgttatgtagtgatatgcaggattgttacattgacatatgttctcttgaggtgcttagtctatttgtggataacttcgattaccaacatatgcgttgtgattttgtggaaggtgttcttgctgatgacattatcggttacaagattttcactcatgagattagctcgtgttatgcttctaggattgaaaatttcaggagctatgacatggtgagcaaggatataatccagaggcggacattcccgtatgtaccggatatgaagttcagcggaaatcgcactcttaagctcgagagacaagggatctacaaggcttctgatgctactcagttaccatctgctcatgttggagcttcctatgtcattggacatgccacaaatattgggagtgggactaagatcttgaactctgttattgggaatggatgttctattggatcaaatgtggtgatccaaggctcatacatatggaacaatgttacggttgaagatggatgtgagataaggaatgctattgtatgtgatgaggtgaaagtgtgtgcaggagctattgtgaaacctggtgttgtgttgtcttttaaggttgtagtcgggagggactttgttgtacctgcatattcacaggtttcactactccgacaaccaatggaagaagacagtgatgaagaaaatcttttgtcaggtgtagatttgcaaatggagtctaagcttggtcttgatggagcaggttacatatggcgccaagcgtgtgaagacgagtggaagcattctgttccaccaatccccaaagataaacttgctgagatcattaaggccattgacgatgatgacacggatgatgaaagtgttgtcacaacttccggcgatgctaatactagtattaacaatgatctctttgactttgagagagaggttgatggcaccttcttaagggctgtcgaagagaatattgtagccgaccttgcggttttggagataaactcactccggttgtcatataacatggaatctgcacattgtgctggtgcaatattctactctatgatgaaactagcagttagtactccacatagctctattaatgacttgtatagaaacgcatcgagtatcattactcgatggaagggacttcttgggttctatgtaaagaaaagtgatgaacagatagaagtaatatcgagattggaagagatgtgtgaagaatctgctcatgagttgggaactttgtttgctcatattttacgttatatgtatgaggaagagaatgaccttttgcaagaagttgcaatcttgagatggtcggatgagaaagccggagctgatgaatctgacaaagtttatctgaaacaatgcgagccattcataacgtggctcaaggaaacatctgacgatgaagatggctaatgaattggtggtaaacatgtgttcgttggctcccaaaaggaacattctgattgattatttgcatcgaagagattactttgtctttttttccatgtgttattctaatgatgtgctattttatatctcatccattacatgtatgaggtatataaatacaacttttatgtttttgtaaatgtattataggaagcttattacagtatttcccaaaaaaaaacaattatagttatctaacgaattagagaaatttaactaagtgaaaaataataaaggaatgatctaaatattaatttttgggctgattttgaaagaaaagaataaggaaatgaaaacgaagaagaaggaacatcgtcttctccacagagtcctctttcaccgcctttgattctttacttataaacccttaccttcctcttccttttgtatatacctatttctctagaaacctttttcctcatcgaactcttcttctttcgcctcgccagaaatg

SEQ ID NO: 24579 - DNA, 3003 bp, Unknown
  misc_feature (1)..( 3003): 2750-1469P.txt file - cDNA_ID_2180614; gDNA_ID_1972003; Annot_ID_177777
tgagcgtttttaacaaacaaaaaaagtcgttcgtgagaattaaaagatggggggatacaaaaaccgaacaataattgaatactttttgaccggagtgtaacatcaataaaggtgttaattagagaatgtaattaggctttttactaacgggaataataaattaaaaactgtcctcgatctactttactatgtatggaaggaacattcgcatgtggcattgtgggaagctgaatctcaaaacttattttaagttttgacattccttacacttatgaatatactatacgattttttttttatcatcaatatacggattagtacattgatgataaaagaaaccacggatgataactattaataattattttattatatgatgaaaatgattatgcatttcacgaaatttcactaaaaaacaattattatgaacaaattcattttgtttatctaataacaataaaaatcattggactttgattttatacgtcgtgggaaggtcgtcgaagcacgttgcgtttgatcattgcatgcatcgtgaaaattccactaaacatcgtcttttaaaaaaagaaacctttaaaacattacaaatggaacgtgaacctataaaatatgataggtagatctcacactttatttacagtattaaacaatatggaacattgacgttaaattattattttctacttataacaatttacacctcccaaaatttggaaaggataaacccaacaaggcaacaagtatcacaaatgtagctgaaatagatgggcttttaaagtttatggattgggccgtcatgaacacatattccataacataacctaattgggtgctccgacttcttttcgcgccgctcgcttgtacatgtcctcttcttcgacttccagataaaatcgcttcctctgtttttttccgatctaaattcacagctcatcgaaaatgggctcacggcaaggaccaccgaagcatcagaacaaattcgcctgggttcccaaagccggcgtcaagatcaacgaaacggtaagctatttgctcggctatgagattaacgaaattgagtgagtactgtagctagacccttgattttttcggaaatttatgaattgttaggaagtcggcgggagatttagaccattatccgagattaccggagtttgctaccgatgtcgagagcagatcgcctggaaacgcaaatacggcaaatacaaaaccctaactgaagccaccaaatggtatcgtttgatttgaatttagagtcttctttgtcattctctgttggattttgaaattgatttgttttgttgtgtgggtttttttttcttaaaagagcaacctttttgtttgtgggtgcagtcagaagtgtacaaagcgaaatgttcgtcaagcataccataagttatgccctggttagtgttttctttctttgcttttgttctcgtactttcttggctaattagagtgtatagatcagtatcttgttttataagttgatgtgttatggtattgaaatgggtatgaaactgataacaggttgtgccaaggagcaaaaggtgtgtgcaaagtgttgtcaaagtgttgatcaaatccttggaaggtacttgtaccttgaagacagtctttcttctacttatgctagatgctggtttccttaagagtgggtttagtagacaagatattaaactaatcttgaggtaattattcgtttctcgcagagatatttacgaagtagaggctgaacagaagctgcttgatgaggtttgtcttttaattattccgcttttggcttctaatgttcaatttcatgcttgtttttgggaggttgttgctgatttcttattgatgtgatgcagactatcaagaatgctagggaaagagatcgaaggaccctattacgtgctgtaagcttctctagttactttgaagagtttttgagatttgtaaatgtgtatgtttgtgtgatttggtcctgaagttgcgtatttgcttgacatagatgaacaaagataacaaaccaaataaatcagatgaagaagcgtcaaggagtgatagcagcaaggttggtgatgtgtttccctcaacttcccttgaagaatatgcaaacaagtccggaagagttagcgggattattggtcatggtagtgtgcctgatcatgcccatgatgatgctagtggacctgaatcagatgaggatgacaatgttggtgatgatgagcatgatttgcgcgaagacagtgatgaaaatgagcaatctcaactgcagaaataaactcatgtttggttgtactactgtcaatttggtaggattgtgagattttgcaagactgtttattcctgttgttttgataaaacttttacttggtcacctgcaatgcaagactagcaaagaatactataaattttgttctgttttcttgtatgggacgggcttaaacgggcctaacagtcgttctttatcggcccactttaacaacacctaattgtctagtctagtagtagtattctctagagactttcaaaaagtctttggattactaaatagtaaatgcgaatataagtaaactataaatgtgaataagaatgtttgaaattgaaaaaaagaattgctagctaagtgcattaatgcttgtgcattaagtcaaattataacacttggcacgaaaaaacccatctcatcccccactaaagcagccttcttttggctttcattaatctctctgcacacaaaaacccaaaaagctggatgtctccattttcaatgaacaattatgagttctttttttaaaaactcattatactttgaagattaatcacaaagatttcgaagctaattcgtcatttcttgttactataatcttttcattgttattaatcactttggcttaagtttctgtatattacgtcgagcttcttcagtcttcatccttgtcttgtcacttgtcagagacagaagattaaagaagaagaggcgtttctctctctttttttgcttcagaaaaaatg

SEQ ID NO: 24580 - DNA, 3003 bp, Unknown
  misc_feature (1)..( 3003): 2750-1469P.txt file - cDNA_ID_2180622; gDNA_ID_2684224; Annot_ID_191875
taatctcatcttaacgggtgaagtatgtttggtgcatttcatctacacatatctttatctaagaaaaaaggtcatataactggtcaaccagtttattctgaaggttacatgctatttatagtctttcgaagtgtatatctctttaatctatcattcatttcacagtttaacattttaaccacgctgtttattactttgatgcaatcatgaaaccatctatatacacaatatcatccaagaatcgttataagatttattcgcagaaatgagtgtcaattagtaataatcatatatgtgtttatcaacttgacactcaaaagtttttccccaaaaatggtggctcatctctaactatgtacccacacatactctcgtttctaaaacagtgattagttaatctttggtaatgataacaaaattgtttaaacacaagcaaccaagagattgcatgaagtttacataatacatttgcagtaagcttaaataaggttatgctagctataatctgttgttactcacaaattgttattagtgcataaaattgaaaaacgacccaagaattcaaaccatcaaatcatacataaaggtaacgcgcttgaaattgattatggtacaatatttgaaagcaaaacctaatacccatgtgtaatagtatattcctcggtacttccaaggtcaaatcaattaattttgtttttttatatgaatagcaaacaatatacttgttatgaaaaaataaatagataagaagtcacaaaccccacctggttcacagcacattgtggaacaaagcacgtgatatgcccacaagctttttgtgattagtacatctaaggacataaaccctcaaatcaaccaagacaaaatactaaaagacgacgacgactttattccatatatataataattttcttcctcattttatatgccagattccttaatgttgaatgattcacatgcaaaaagttattacatcatcttaagcactttatttaatacattaagcaaccgactaattgtttttaataatcagaaagtaatgaactttttgatctaatcgtttcttcagtttgataaccaacttgtggttttgtccacaacacttaaaacatcatccactaaataaatcactctactattcgattagggatctaagagcgctgaaatatcacaatctttaactggttaaagtaattatgcatgcctggctataaattcattattgttatattgatttgacgcatactcttaacaacaggaaagagatgtatgagtaaaaagaaccttgcacaataatgtcttagtagccatctaattatagaaataggttcctttcatgatatttattggtgtttaatcgaaagaatcaaacaaatgaagttggcttattttttaatatgagatcggatacagtttccaataccaaattcatgtatgtatatataaagtagaagatgtagtctatataagctgtgtcgacatctagaatcgattcttacttaatataatgttgaataacctataattcatcttcacctagtggacatagttacaaacacacattaatacacgacacattatccaaaactttgaatgtggttttttaatagccactctttaataaactataatttatgacaaaccatatttagtgtttgtggatattcacaaaaatgtggtccttcgtatatgcagaaacttgaatccatattttgctttaactgtttaacttgcatttgcatatgcatgcattattatgcatcagtctctcgctaaactattgaagtctatgaatcaaagtacccaaaattaattattttcaataactaaataatattgacaaatttaaaataataatatcctagtttgaaagacccaccaatctcagaccatgcaagctttcttccagttcaccaatccactttcccccctaataatttattttgattttatgttgccattagaatacaaattttatttattatctcttattatcctttaagataaatatatgtattatcaaatgctgtgtgttcctgacaaactccacatgcacatgtaaaagaggcaccaagacttataaagacccaccaacattattttgttcacatggatgtgtaaggctaacttagctaattatcaaaactcatagataaatatttttttttttgctaaaatagataaaacttctaagagaaaaaaagagagagtcatatttggagagaaaaaaaatatgtattataaaatgtatcaatttctcattcattgacaatttgagataaatcaatgaatagataaacatgcctaacatttcttataatagatccaaaatataaccaattttttccgaatttcaaaaagcatttaattttgttttctctaaataagttgccttgtgctgtcatgtgcgtaactatcatcttaggagatgaaacagattcctcattatttggcgagcagaatttttcagagctctgacataattaaagaatatataagattactagtgtatataatactaaaatacataaaatctcatacatgtataaactttatatgttaacacatgtacatgcattacattatatatgcttcaaacttcaaagcctcctttgacagttgtatctttgcctttaaagatagaaacctctctctctcaaagaccaaaaacaaaaaaaaaactttttttttttcccccttctcttctttcttcttcaaggtagcctccaagccaaacacggaggaacctaatctgttgtctgctcgtaacttcacaagaagctataatttgtcgttaatgttggcttcttcttgtccatttcttcttttcttcttcctctgaaacacaagaaaaacatctttaacccctgagcagagtaaaaagacgaagaaactggtaactccaaaaaacagagtatatatatgaagagaaacttgagtttgtgaaagtttttttagttatcttgtttttgagataagagttaagtagaggaagaagatatg

SEQ ID NO: 24581 - DNA, 3003 bp, Unknown; identical to SEQ ID NO: 24580
  misc_feature (1)..( 3003): 2750-1469P.txt file - cDNA_ID_2180622; gDNA_ID_1972003; Annot_ID_177781

SEQ ID NO: 24582 - DNA, 3003 bp, Unknown; identical to SEQ ID NO: 24580
  misc_feature (1)..( 3003): 2750-1469P.txt file - cDNA_ID_2180622; gDNA_ID_2684224; Annot_ID_137511

SEQ ID NO: 24583 - DNA, 3003 bp, Unknown
  misc_feature (1)..( 3003): 2750-1469P.txt file - cDNA_ID_2180635; gDNA_ID_1972003; Annot_ID_177784
ttattaattttattaaattgtacattgtcttttaaataaagtgatataagaatattagaagtggacgaaagcaatatatccttatgaatcgaaacaaaggagtaagagaaaaagaaagtgtgatgatgatcattttatcttaagacatcacatgggaacaaaggagaaatcggacaaacttagaatccattaagtcatgtctacttcaccgactccagaattttgttgtctcatgaacaaagattggggttttaatagcttttctatagtattttcacatccataataataattaatgatgtgaaggatatatatatcaacgacaataatatcctaaaaatcatgttaaaagttaaacacatttctccatatttgataaatagcaatcaatatcagcgtatataaatgagatgaagctaaagttagcaagacaaacaaaaacgtatgaattacgtgagcttacgtgaatattgcaaatagaacaccaaatcattaatttcggttgacgtggatattcaaataatgatctacacatatacagtaccgtgggtacgcatgccatttcgagacgtatacaattcagtttcttccacttgagtttcagatctttatcaaaattacaaacacgtttatatatatatacacatatagatagattgatagccacatttctgagattcgatagtcatatatacgactatatattaaatattccagaagatatattgacactttttctgaaagactaattaagaagaacgcgcaagtatgactatgcgttactaagaatatttaatttccattagaaaatgtgtaagtttatctgatatactagttaattagccaaatgattttaaaatttacgttaagaaaatttcgtaggttcaactttttagtgtgtaagttattaattgtgaattatacagctaggaacgtccgttatatgtaaacaaagtaactatatataaaatttaagacttagagtaagtatttattatgtgattgttatatatactcgctaaagagtactagatgaagagtgaagaggttgggcatctcgagagagaaactgaagaaaacagaagagaaagagagttattcactcgatggtccccctaattttcctatcactttttctctctcaatttaaccgtctcttgtattatccccaatagttacatttttaattactcttatcatttcaatacccaacaaagcagaaacagcccagcaaaattttcacttccagaaattataacatggttgaatacacaacactaattaactgcaatatgaatcataaataaatttattaagatttctatataaaaactgttgggcagcaaatgcatgcgtacgatatctatagaattggagtttagtgcaattgttggtatttctttctttggggaaagtgacacgttaaaatatgaaaaatgtaaaaatttgaacaagacttacaataactagaaaaatcagagatacaaaatttactactctatcagtctatctgttgtcttatacactacacctttattatgcactgttcctatcccaaacaccaatccctatgctcagtccatatggtagatactactagagatggtaacccaacacatatgtgttagatggccccataggcagtaagcaaaacattactttttacaaccatatctttgtttataaattttaaaagctatgtgaatttaatttagtattactatcctggatcacaatcttgggccaacaaaagaaatgtgtatgggccaactgtgatgaaagaaaagcccaatggatcaaagttcagatgctttctgtagctcttttgtagagaagtttttgtaagtttagttatagaagcaaaaataggtaaaccacaaaactgaagcccggttgactaaatccttaaatgtgatcatgtcacacagcaacttggctacatgttgtcgtgaagcaatgaataaagtggtacgtggtgtattctagaagcgaaacgtgtcactaatcttatcacctttttagggtaaaatagatttgaaacaaaacatttcttcaaacatacaaaaaaagaaagaaatagtacaagttggccactatgcgtgtcccacttctcgatctcctctttgattgtttgcgtctctttaggagatcctcccattcattcattctttcctctccaccttattattactattattctgctgcatgaatttcaaaaaattatgtaacaacaatttaccgaaatgaaattaccacaaaggattagaaactagcacattcttaataaccaatattgaactcttattagtattgttgttagaacttgaagttaattaggccacaagaaaaggcgcgtagaaatgtttagataaaaaaaatgtctaacgtatttctttggtttgccgtgtcgggggcccagtcaggctggatacacgtggcaataaagggactgtcgtagttgagcacgttgattattagacacgtgtcgagttgtatatgaacaaagtagcctacgtctacgccacttgatgcccttttccacgtggcgtggtgggtggtcgtctatcttttcctataaaaaatcataaatcaatattaaaatgttttcaagaagataatccgaataattccctatattttgtgtctgtcaacgagaaatcactatctattttcattgattatactaatgcaaattggtatattaactggaaattatgtctattttaagccaacttgtgtgaaaatatactaaagtaaagttttaaaatccgtactacatcgtcaactatgcttgtaatataattcaaaaacatgattttctttttttttccctgaaaaatataaaatatgcaaattgaagtactatagtttataatagtaagcatttggtgcttgttttaagacaaaattgtttcgtctctctcaagattgaaaatagaaagttaagccaaaaacgtttctcccttctctttcgaatttctctgactttgatatttggttatg

SEQ ID NO: 24584 - DNA, 3000 bp, Unknown; identical to SEQ ID NO: 9154
  misc_feature (1)..( 3000): 2750-1469P.txt file - cDNA_ID_2180666; gDNA_ID_1972015; Annot_ID_177877

SEQ ID NO: 24585 - DNA, 3003 bp, Unknown
  misc_feature (1)..( 3003): 2750-1469P.txt file - cDNA_ID_2180724; gDNA_ID_1972015; Annot_ID_177896
gcgtttggtacttagtgatcaattttgtcatttttaaccatgtgaagagtttttgttttttttcaacaatcaattgtatatatattttttgccatctttatcacttttaataatagtaaatgaaatatcggtattcattttctgtgacctttatagtctatcattgaaaatagtgttggtgagaagtttagtctttagggatatggtgttattggaggaatcccaaggcctgaagcaatctttgtgtgaagcaaagcaaatgtaagaagaatatatcatctaaatttgtttaagaacacatcactttatatttaattagtctcatataatagcaaaatttcggatctaaaatacatgctacgcgagcctaatatttcatatgcgattgagatatcttttaccttgtagactgtacttgtaatttttttcaaagaagttacatttactttactatcttactataaattactaacttttgctgtataaatatgaccactgaacgtctgtgaagttcacgaccaaaccagtcttactctctcttaatattaaatcattggaatatttattaattgaatttaaatcattggaatatttattaatttatatttaaaaatattaaattactttttcttattgatactagaaatgtataagttacaagttttattttcaaaaaattagtttttaaaaaacagttgccaatagaaccgattccaaaacaaacaacaaagtgtctttgtagctggttgtggtcgctagcaaatacgaaacaattacatggccatatatatatatatatatatatatatgcgtttggtacttagtgatcaattttgtcatttttaaccatgtgaagagtttttgttttttttcaacaatcaattgtatatatattttttgccatctttatcacttttaataatagtaaatgaaatatcggtattcattttctgtgacctttatagtctatcattgaaaatagtgttggtgagaagtttagtctttagggatatggtgttattggaggaatcccaaggtctgaagcaatctttgtgtgaagcaaagcaaatgtaagaagaatatatcatctaaatttgtttaagaacacatcactttatatttaattagtctcatataatagcaaaatttcggatctaaaatacatgctacgcgagcctaatatttcatatgcgattgagatatcttttaccttgtagactgtacttgtaatttttttcaaagaagttacatttactttactatcttactataaattactaacttttgctgtataaatatgaccactgaacgtctgtgaagttcacgaccaaaccagtcttactctctcttaatattaaatcattggaatatttattaattgaatttaaatcattggaatatttattaatttatatttaaaaatattaaattactttttcttattgatactagaaatgtataagttacaagttttattttcaaaaaattagtttttaaaaaacagttgccaatagaaccgattccaaaacaaacaacaaagtgtctttgtagctggttgtggtcgctagcaaatacgaaacaattacatggccatatatatatatatatatatatatatatatatatatatatatatatatgcgtttggtacttagtgatcaattttgtcatttttaaccatgtgaagagtttttgttttttttcaacaatcaattgtatatatattttttgccatctttatcacttttaataatagtaaatgaaatatcggtattcattttctgtgacctttatagtctatcattgaaaatagtgttggtgagaagtttagtctttagggatatggtgttattggaggaatcccaaggcctgaagcaatctttgtgtgaagcaaagcaaatgtaagaagaatatatcatctaaatttgtttaagaacacatcactttatatttaattagtctcatataatagcaaaatttcggatctaaaatacatgctacgcgagcctaatatttcatatgcgattgagatatcttttaccttgtagactgtacttgtaatttttttcaaagaagttacatttactttactatcttactataaattactaacttttgctgtataaatatgaccactgaacgtctgtgaagttcacgaccaaaccagtcttactctctcttaatattaaatcattggaatatttattaattgaatttaaatcattggaatatttattaatttatatttaaaaatattaaattactttttcttattgatactagaaatgtataagttacaagttttattttcaaaaaattagtttttaaaaaacagttgccaatagaaccgattccaaaacaaacaacaaagtgtctttgtagctggttgtggtcgctagcaaatacgaaacaattacatggccatatatatatatatatatatgcgtttggtacttagtgatcaattttgtcatttttaaccatgtgaagagtttttgttttttttcaacaatcaattgtatatatattttttgccatctttatcacttttaataatagtaaatgaaatatcggtattcattttctgtgacctttatagtctatcattgaaaatagtgttggtgagaagtttagtctttagggatatggtgttattggaggaatcccaaggcctgaagcaatctttgtgtgaagcaaagcaaatgtaagaagaatatatcatctaaatttgtttaagaacacatcactttatatttaattagtctcatataatagcaaaatttcggatctaaaatacatgctacgcgagcctaatatttcatatgcgattgagatatcttttaccttgtagactgtacttgtaatttttttcaaagaagttacatttactttactatcttactataaattactaacttttgctgtataaatatgaccactgaacgtctgtgaagttcacgaccaaaccagtcttactctctcttaactaataatattgagatg

SEQ ID NO: 24586 - DNA, 3000 bp, Unknown; identical to SEQ ID NO: 9179
  misc_feature (1)..( 3000): 2750-1469P.txt file - cDNA_ID_2180801; gDNA_ID_1972017; Annot_ID_177962

SEQ ID NO: 24587 - DNA, 3000 bp, Unknown; identical to SEQ ID NO: 9181
  misc_feature (1)..( 3000): 2750-1469P.txt file - cDNA_ID_2180805; gDNA_ID_1972017; Annot_ID_177963

SEQ ID NO: 24588 - DNA, 3003 bp, Unknown
  misc_feature (1)..( 3003): 2750-1469P.txt file - cDNA_ID_2180809; gDNA_ID_1972017; Annot_ID_177964
agaacccatacaacataaatgacgttacaataaaatgtgatattataagtagtatggaataaatttaaaccgagagggtaaataatatacatagaagaaaaaaaaacagagattgaataacgatataacgtatatatatggtcacagtctcatagaccacgaaagccacctaacttacaaaaatgaaacctatcattgattggaatgatgtatttgtcaacacctattaagctatatatgatgtaataatgctctatacatataacatttttatgttgttgtaagaaaatataatttgattcaatgtaccaattacttggttttaaatgctgatatctattcttagcttagaatgattgaaagtcttaacgtttctaaagcaaagattatgtatagatttggtcgtaccaacacatcaaaagtccaatggctagaactcatcatattcaaaaacccgcttgtgggcagaagctgttctttgaactctagttataaagccatttaatatttcttttctttttcgatatgagatattttagcgatgagttagtgatcatttagtcactttccttccaaatgtgtgagatctgaaaaatcttaaaaaccattgcaggaaaagttttatgacaatcacttcttctaggttaaaatgcaaccaacaacgtaaagaatcaccaaacacatggcaagcaaataaacgtggaagtaaattacatagttgggccgccggtgggcatttttacttattctccgggttctcttcttcggaaatgtgatatatgctttacttgggcctaaatgggcttcttttattgacatgcagatttctatctttaatctcggaagaaacaattcgttttagattacacggattggaaaacagcttacagattagagtgaccagacttgcccaaaagaacaaaagtgtgcaacatgatttgttttcttctttttttctggcattcatgatgtgacacctactcatacacctaggatactaaaacttattgccccatttttaattttaaaatgttagatactagtccttgatagtcatcattgttttatccatttccggaaaagttttaatacagtttttaaaatcttatttagtcaaattaaaaaaccacataaaaaataacgaaaatttgtttattttttggcaaattgataattctcgttttccatgaagagcatttactttttgtttcattattgtctgatgcatggttctgccaaaaaataatacgaactctggtcaaattgactatgaccattgagaacctcacgtgtccccgtaaagcaatcttcgcagttgacataactgctgctacagtttttgacggttgagatcagacgagagtattcaagattcggtgcactcgtcgtagtggaatttgccaactgatgaaaaatttatgtcacgcgcgggttttagtgagtcagggcaaagtaagcgctcgtatcgaggcacggtttcagttttttttgcggtaaaaacggaaaaaagttaaagaggttaaaatttgtttggttttgttttccaaacaagaatactaatttatagtaatttcttctagttacatggttgttacaccgaatatatcacagtcaattctatgttctttaaaattcaaaacacaagatttttgcttagttttatatagtggtcgtgatcaataataatatctttggcaatctctttcatgtacttttttcacaccttctcaaccaaatatgcatcttggacttggacacatgggaataaacaaaattgaggagtatttcttttgtataccatgcatggattggattatagctatgaaatacattaaatctaagacctttgaatgacatatctttttattaaactaattttttaaaacaaaagtagaagtttgattgaactttataaagtagtgatctcataacacaaaatttaatcaattttaatcgattcataataaataacttgtaatccctaaattagtaattttaaattatgttatagacgacaaaagtacgattgctagggtaattttctcgttgtcatatttcgacaataaaagggagacacgtgaaatcaacgtagaatcaacttttgactactccgaaaactaatgcgcattcggcatctatacataggttacacatataaaaccaaatccgaataactcgcaagcgcataaatatcaaatattcttggaaagttgtgtttcagaatttatttttgttttaatacttttagatcgctagctaattaatattttaaattacaaaattaattaaatctaagttatttgtagaagatatcttcttattaaactaaattgttcaaataacacatagattgaattttaattaaactttatatatcagtaattttgtaacgtgtatatttaattaaattaagaaagatttatatatatataaaaaaaagtcaataacacataatttttagtaaaaataattaaggtatatgaatgaataataacatacttcccatagaatcaaatccaactagttgactaagaaattaagagttaaagttttctaaaccaaaaatgttgcatccaatgggatgtgtatataaacaccctaggttggtcaagggagaagaaaaatatactattgttaaacaaaatcttaaagactaatttatctttttagcaaaaaaaattcgatttttaactataatcccgctcctagtcttggacaaacttcaaaaaaaaaaccctaaacccaatatcacaacaacagaacccgaaaaaaaagaccacattacgaaagtagttttttttttgctttaataaaatggttcattagaagacaaaatcatagtctcaaatctcctaaaaaaaaacatcacatttaacgctacaaaaaaacccaagttagtacccactactctctcacaaaacaaaagagcctcttcttcttcttctcaatctctctgatagagaaaccaaagcaaaaaaagaaaagaaatttactgtgaccatg

SEQ ID NO: 24589 - DNA, 3000 bp, Unknown; identical to SEQ ID NO: 9164
  misc_feature (1)..( 3000): 2750-1469P.txt file - cDNA_ID_2180847; gDNA_ID_1972016; Annot_ID_177911

SEQ ID NO: 24590 - DNA, 3003 bp, Unknown
  misc_feature (1)..( 3003): 2750-1469P.txt file - cDNA_ID_2180851; gDNA_ID_1972016; Annot_ID_177912
gactggaccagggggtagctgcgaagaagcgggacctttgcctccctcatagcggagaagaccagtggtggttataaccgacttcaagaacctagaggatgcaaccatgtagtaatctttagcttcctgattagcggtaaggatggttccgtaacactgaccaacgtgaacgtcgagagagtcataatcgttctggagaacgtgcgatccttccatctcaacaagcttcaacttgtgattctgaatcctaaagttaagagatgtcttgagacccacgttacagatcctaaccctgtaggtctttccaggtttcaaggtaaagagaggtgcatcggatccatcgcctttcccggactttccgttgatgagaataccatctggacggccaagagtacgaccgctgtcaaggaatttcttcaactgggtgtggctcttggtgtaccagtcaccgatcaagacggtgtagtcatcttctgggtcagcataagggaccgggatgaggagacggctgttcacacggagaccaccgaatccaccagcggaacggtgcatcgcggtgctggggtagtagaaatagcttccgatctgatccttaggctggaaatggtaagtgtagttggtgccgggcatgatcggacacatagttcctggagtcccatcttgccaacagttcttcctgtgttggatcccattcctaaaacgcaaaaacaaaacatatattataagcatgcatattgaaaatgatatattttggtgaaccgtgaaacaaatgttataattaccatgtgaggaggaaaggttcgtcgaggttgttgaagacattaatgatgacgttgttgttggaggttgagttgacgttgggaccagggaattgtccgttgatgagaatgacttgttgtggaacaccgagaggagacacggttccgtaggtcacgttccatacgtgatggaagtaaggatcttcggctcggactaccaccgttgcggcagcggccaggtagaggcacgcggccaagagtttaacccctcgcataacaataaacaatttttggttgagataacagttatagattttttatgtgttttggtactaattgtttattgttatatataattatgctttggggtttgaatttcgagttgtggaaatgtttcgaggcatttttatagggttatttttgacgaatgtttttccaggtttttctcgtcttctttggggtctcctaccatttcgctattcctttcgccatatttgggaatattgaagtttaacctctccctatttttggtgtttctctttaattcctcttagtttattttcttttttccctatgtcttttttggttttggttttcatgtcttcgagaattttgctatttgggattaaaaaataatctaaaggatataattttatatatatatgtgacaaaggtataggtcgaccaataaacattttacattattatagaaaatattttgaaaatcgcttattttaatcataacactttgttttgtacattatgcttttggaatttggatgattatgtctttttatataatatataccagaaaataattcgatatgtcgtattttttctatctatatatcttttgacttctaattgtaaccataggaaaaattagatgacattgaaaatcaggtaatgatgcatagcatttgttcacaacaatattgttaaagttaggaataggagtagtatcttttcccttttcttcaatcatacgagctagtcaaccgttgacgataaattcacggagagcaccggaacctttaagtatgagaaactacttcaataatcttagaaattacttacctaaaaaatcttgcactgtgtagaatttggtaagagacatatggtctccaaatacgttctcagctagcgttatgtcattgatgccaaaacgttctttcatctttctaattagaaaacaaagatgaacaaaagtttgtgatacactccctttggtcagacgaaaagagtttgtgacacactccttttgaccaagagtttgtgatacaaagatgaacaagagttcatgatgccgtaaatacaaatattttgaatgtgtaactttttgttaaagttataagtgataaactgtttttttttgtagtgtatatataagaaactctaagcatttggagaagaaaataaacatgtcgcataagacccacgatgtcaattaccatttattaggcctttatcaacatcccacctcacaatatatctatactaatatataaaattattttattttatttttatatatagaacaccatatacacacatgtacatctcaattaccatttattgtgcagactattatcttttttttttatttttatttttttatttttttgggcagactattatcttatttcaataatctgcataactttttttttaaaggatcaaaagaagattgaataacatgcaagttcatttttgaaattttattatcaaaaacatggaagttcttaaaattaaaattacaaagcatattaagttggtaattaattctgtagttacttactaagttgtaccataatattattttttgtccgtgtaataatcaaccgtagctgaaatatgttaagacaaacaaaattacttgatgatgacacttgtgggtagttaatttggcttctttagagacatgtccaataatagaataagatccgagttgtgtgctcgttagagaaatcgggagtcctaaggaccagcgagcgagagagattcaaaaatagaaatttcacgtaaagagaattagaggtgcagcgtgaaaagaggcaacaattccgtgcataccaaggtccttcacctgcataaataggtattcacaacatcaccaaaagattcgtcaagagcaagagaacatagtttcttcttgcttttgagaaaaaataattatatatttttatataggaaagggttaatttattaataaaaaaaaataaaaagaagcagaaaagagataatg

SEQ ID NO: 24591 - DNA, 3000 bp, Unknown; identical to SEQ ID NO: 9174
  misc_feature (1)..( 3000): 2750-1469P.txt file - cDNA_ID_2180860; gDNA_ID_1972016; Annot_ID_177914

SEQ ID NO: 24592 - DNA, 3003 bp, Unknown
  misc_feature (1)..( 3003): 2750-1469P.txt file - cDNA_ID_2180874; gDNA_ID_1972016; Annot_ID_177922
gcatcatttgttgtaaatatgtaataaacaactccaccgcatcaagtttttctctttatatgaccacccattaagtctttgcatagtcctaaagcttaaaaagatgaattggaagttggttttgctaattggttggattctcctctcgtctattgcatcaaacccagctttggctaaagttacttatccaactcgcacaacaagtaagtatccattacctatctcttttattttatagttgttatttgatagatattcagatcaaattcgtggatctattatctatacatatgccacgtaaaactctttgatgtatggaaaaagttgatcttgtagaattaataattgctttcgatcaataaatgataactacaaactagcaacacttttgttgtttaatttgtatagaaatatacaattgttaatttacatatacataaattcttgaaaaaaataggaaatttattttatggttaatcgaattttaaataggaaaatggcttggaaatatacacatcagcaaaggaatgaagattggctttacaggcagtttttctagacctgctcctcacggaggcggtccaccgaagatcatttctaagttatgacatgtaacgatcttaattagcgatccaatctatatataatctattaacttgtgatttctgattatttgtaaagttgtttcattgtgtgtgatactcttcgaataaattaaatgaaacttcgatatgtaaattattatttagttcactatacgatttaaaatcgagtattgagtgacaacaaggtctttttcattttctcaccaaaatgatgatatgattaacattggacttttcaacaaatgcaaaaataaggaaaaaaagacaagacttagaaagtcaatatgttttcattgcatgcattgacgtatacatatcagtatcacaccaactgtaatgagaacgaccctgatatatataatctctgcctaacagtctaacactagctaatttatagtttataagatgttatatacatatatacccgggaagaaagaggaagaaagaaaaatgagtctcaagttcattcttatagctttgcttctacttttatgcatcacattttccaattcgaccgtcgttcctttttccaaaaaccggaaaattagtaagtcttcataactgcataagtgcaaatattgttattatatggtgttaaaatgaggtttgtaatatagttttaacgtgtaacaagccaatgaagaagaagaagaagaaggtagagagattgacattcacaaaggaaagaagatcaccgtaaaagtcagccgttcgcctcctgcaaaaggctggatttgttgcaatgattaactaaaaggagctatgtgaacattttcataagatcccatccttcaatttctatgaagataatatcgaccaagatcaaacttcaaagcttgaaattagaaacgtgtatttgctatatctcaaccactaatttaaggggctttcggcccattacacgcatgggaagattcaattatgttgattttgtaagttttggggctaaagtgtaaattattgaaacttgtaggcttgatttcattattccaagtttccactttttctcctccgccgtagccggtgcttcttcttcgtgaaaatctttcgtctgagattttttctttactagttgaataaaattgaagatttcgaagactacccaaaaccgcgttttacaaaaagccagattctttttttttttttttttttttataatttcattaaaactacccaatgggcttgggccgaaacttacaaacaattcggtccagttacaaaattagggttttctgacacatcgccaggaaaaagaaaaaagctcgccgcctgttgaccgtcgctagcagagcgaccaaaacctagatccggcggactcaagtcccacagctttgtggccgcctccgagaatcgtccaccaccgacgaaagattccggttttcgtctgtagagactcaactccaacgcaccaacccaccacaagactcccggaaagctagccgctccgacgtagcggttccacggaaccggatcccgacctagcaacccgaaacactcagcgataacacttctctcccatcaccggaaaatagcaaagacccagagccaaacacacgtcgatccggaccggtggagaccaaaaacggcagacctaaagactggtggctcagtcagactctctagatccaaaacccgctgcagccatctaagatccaaacagatctactgttaaccaccgcatcagacaacgaacccccccttacccctctccaacttccgccgtggacgcagcgactagaatcacgggtgagcctgagaacctcgcagcaaccctcagcgtccataaccaagagacccccgccgcaaccttctcgaccgacaaaaccagagccaaatccacatcagagagagagctccacaccacacgttgacggagacaagcatcggctcactcctggacttccttgaagaggcttcaaaccgacgatgaagagcagatcggaacaaaaagaaaaaggaaactaaatctacttaccggaaattgtcttcaagagagagagaagggcacgactttcaaggctacgattgagcctccatctcataaagccagattctttatcttccataatcgtattaaagctacgaaaacctcgatttcgtgttcaaaacttggatttgctcgctatcgaaaggtctgacctttaatccttttcatgggtttaatcgttcagatatgatttctcgtatcggtattatagcttagaggaaaagtgtcgtagttttggcagatgaaattaaaattggctctgtattcccaaatagttgaaacccatttgatgaagctatcttatcagacttttacgcataagttttcttgtggtcttggatcgtgtctagtggcaattatcttctctgagttcttttgcttagtttgattgtctgttgttttagacgaatg

SEQ ID NO: 24593 - DNA, 3000 bp, Unknown; identical to SEQ ID NO: 9171
  misc_feature (1)..( 3000): 2750-1469P.txt file - cDNA_ID_2180882; gDNA_ID_1972016; Annot_ID_177925

SEQ ID NO: 24594 - DNA, 3000 bp, Unknown; identical to SEQ ID NO: 9167
  misc_feature (1)..( 3000): 2750-1469P.txt file - cDNA_ID_2180910; gDNA_ID_1972016; Annot_ID_177932

SEQ ID NO: 24595 - DNA, 2073 bp, Unknown; identical to SEQ ID NO: 9168
  misc_feature (1)..( 2073): 2750-1469P.txt file - cDNA_ID_2180918; gDNA_ID_1972016; Annot_ID_177935

SEQ ID NO: 24596 - DNA, 3003 bp, Unknown
  misc_feature (1)..( 3003): 2750-1469P.txt file - cDNA_ID_2180980; gDNA_ID_1972019; Annot_ID_178000
tcacaatgaagacttattgattctggatgaggaacttgaaaaatgagaagcaactccttgagccataagagttcttgataagtataagccatagctctgtattcagcttcagcggaagagagtgatacccgttcttgcttctttgttttccaacatataggggatttgccgagtaagacaacataaccagacagtgaacgacgcgtttttggacatgtttgaaaatctgaatcacaataggcatctagatgaagatcatcatcgttgcttagtaataagccttgtccgcaagtccctttaagatatcgtactaggcgaactgctacatcccaatgacgtgtacgtggttgtctgagaaattgcgctagaagatgaactagatagcaaaggtctggtcgggtgatagaaagataaatcaaccggccaactaacctgcggtatttggttggttcatgatagaattcaccgtcttctttggctagagtatgattctgttcaataggagtgtcaacgggtttagctccaagaagtctgcattcagagatgatatccaaagtatatttgcgttgcgaaatataaatcccctgctttcctctagagacttcgatcccaagaaagaattttagaggacctaaatctttcatgtgaaagcattcactcatatatgccttaaactctgcagttagcttgatgtaagggggagtgattccccagaagaatctagtgtcactgaaaacccggtttctcttccaccaccggatgtgtcacatgaaaaggatataccggtttcaacggttgaggctacacaaacgcagaatccgaccgtgttgttggaaaattctcatgatccagaagaagaaagtgatgaattgggtaaaggaaaacgtcaaaaatttacctccgttcgtctaaaaggttatgagacttataatgctcgctgcactgaagaaccccatcacgtctcacccgtctttgatccagtttcctcttatgcggtccaaggtaccacttcttatcctcttacaagttacatctctgatgatatgttttccccacagcataaagctttcttagcagctcttattgatggtgctgaaccaccatcatataaacaagctatgcttgatcctcgatggacaaatgctatgggaacaaaagttggtgctcttgaagagaatggtacatggagtattgttgatttacctcctggaaaagaagcgattaacaataagtgggtgtacaaaatcaagcttaatgccgatggctctcttgaacggtataaagctcaattagtcgcatgtggcaatcgtcaagttgaaggtgaggactataatgaaacgtttgctcatgtggttatgatgaagacggtccgtagtttgttacgtattgtggcagccgagaaatgggaagttcaccaaatggatgttcacaatgcctttctccatggtgatttagaagaagaagtatacatgaaattaccggttggttttcgtcattcagatccgaagaaggtttgtcgtctccataagtctctatatgggcttaaacaagccccgcggtgttggttctctaagctctcttcggcgttgctaaagtttggatttgttcaatcttattcagactactctttatttattctctcacgggctggtgtggagcttcgggttcttatttatgttgatgacttgttgatttgtggtaatcatccacgtatgcttcagagttttaaagagtacttggaaaaatgttttcacatgaaagacttgggtaaagcaaagtactttcttgtcattgagattgcccgaaattcagaaggtatatatctttctcaaagaaaatattctcttaatcttgttactgaagctggacttcttggttgtaagcccgctgcaactccgatggaacaaaatcacaagttggagatgaatgagagtgagtttcttcctcgacctgaagaatataggaggttggttggtcgtctcatctatcttcttaccactcggccggagctgtgttattctgtccatatcttgtcaacgtttatgcaaaaaccacgtgttgatcattgggaggcggcgctccgtgtagtgcgttatttgaaagggtctccgggtcgtggtgtgctactaagttcgaattcagatcttacttttactgcatattgcgattcagatttttcgacatgttccacgacacgtcgttctttgagtggatatgtcatgtttttgggtggttctccaatttcttggaagacaaagaagcaagatgttgtatctcattcttcggctgaagcggaatatcgttcaatgcgtaatgcgttgaatgaagttcgttgtttaaaacagttattagaagacttgggatatccacaacatcaaccgatcaagttatattgtgatagtcaagctgcgatacacatctcctctaattcggttttccatgagcgaactaagcacattgaaagagattgtcatgccgttcgcgatgctattcaagctgggatacttacgatggttcacgtcaatacacatgatcaaatagctgacttgcttactaaagctttgggtcgtattccgtttgaaggtttgtcatccaagttgggcatttgtgatcttcatgctccaacttgagggggagtattgggagatctccatatatcttagctataaaataggaaaatatctttgtggagattaggaaattatatagcttcctctccacgtgtagttaacctaaatattctcttgtatatatatcaaggtgtaatcgtatgaaatcaataagagaaaacgttcatctaacctagccgcttctagtttctacagtcaatttcagagctctagagataatcttcatcttcattgaactttaacctcaaaaattttcctaaataaattgaaagcagttttcaacctcaggcttcattagaaaacaagccaaaagtcggagatagaggcacgccaaaaacagagctaggcaaagctactgaagaagctggcaatg

SEQ ID NO: 24597 - DNA, 3000 bp, Unknown; identical to SEQ ID NO: 9216
  misc_feature (1)..( 3000): 2750-1469P.txt file - cDNA_ID_2181198; gDNA_ID_1972022; Annot_ID_178099

SEQ ID NO: 24598 - DNA, 3000 bp, Unknown; identical to SEQ ID NO: 9208
  misc_feature (1)..( 3000): 2750-1469P.txt file - cDNA_ID_2181227; gDNA_ID_1972022; Annot_ID_178106

SEQ ID NO: 24599 - DNA, 2658 bp, Unknown; identical to SEQ ID NO: 9210
  misc_feature (1)..( 2658): 2750-1469P.txt file - cDNA_ID_2181242; gDNA_ID_1972022; Annot_ID_178112

SEQ ID NO: 24600 - DNA, 3003 bp, Unknown
  misc_feature (1)..( 3003): 2750-1469P.txt file - cDNA_ID_2181266; gDNA_ID_1972023; Annot_ID_178126
attctatgggtcttaaagacaaaaggctacaaaatgttacccagtttttttacaatacgtcattgttcagcagttgttggtactcgtctactcacaaaaaggtctgatgcctactccagtactccaatacctataagcaaagaatggaaaattgatggagcaattatacgtaagattaagaacaacgagagatataattatgattttaatgccgaaaagaaagtaagaagatcatcagctattaaaacaccaaccctcctaagctcaactaacccattataaagttagactaccatgatgggtgagcattgatttgtttacccatcaatttatcacatcagtggtcaaatatatagaaatcataaaatccattattcctgcatattcaatttctcccttctacagaatatgactcgttgacatagtaaaaaaccaacattgatagtattttatatgctgtattaagaagcattatacatacgctcatagttctacaggtagagtttaccttcaaagctaacttgtgtaagcaactattggcttcttagaacttggctcactatttgtgagggttcatatcattacccctcttctactctacacactttagtttcggggaactgagatgctaatgcagcagtactttattgttattctcttctaaaggtcaccagggtgacgattgtaccttatagactatgactatgtttaactcacctactcaatgacggcgctcttcacgtctcatctcaactcgaaatttatctttaatatcaccctgtgagagaatgtgtctattattagaaacaagataaaattaactccgagaaatgaataaagaacagaaagataagtgaagctgtgtacattagttctgcgcactagaactggattctcatctttgatccgtttccagtttgcaccatacctgaatcacaaaagaatgcatcaaatcaatagaaatgcatgaaagatattcatctaacatctaggagaatcttcaggtttcagtacttttcatagcctttgagtacggccagcgtttctgcagtactccaaggaagttttggccttctagcaccttctgaacatcggtttcttttcaaaggagacacgacaattcttttacgttttgatttattaatcctttcaatgtcatcgcccatttctccatctgaatcatcaatggagtcattccactaatcaaacaaacaaaaataatgtgaaaaacaaactcatctgaacaaacaagtcctatgttatacagttgcatgaaaagcacattatattaactcagctataactccgaaaccgaacatgcaaagaaatcaattcagcgagtcctacacaatactaattcccaccgagtgcagcgggctggtcagacaatatgaaataataggaaaagatcaaagaatgaatcgggatagtgctgagaaaacttagttaatctgtgtgtattgggtgggtattccatcgacctagctatttaaacacaggaagtctgaagaaaaaaacataaatgatatgatgaaacaattagaaaaagaagcaaatttacttcataagtgtgtgctgtgctacgtggctccatcaagctaggccttggtgcagcgtttgttgcagaaggattagcaacatcgttttcttgttctgtaatcgtctcattgtttaaatttgaaggtcttcctttttctaaagctttcattagctcgattttactagctctcagctttctgagcgctctgtcaacaactgcagatggaatgggattgaattgactgggtacatatacagcttttgaccctccagaagtaggtctttccagttcagtatctaagaggctctctacaacaaaaggaatgcatcagaccctttcagtatccacaaaagcacaatcacatcgtaacaaagtaaatagagatgaaagaaacaaagttgagaaagtgtagaccttggtcgtcttcttccatagcttcagacgcctgactgttctgattacccacgccctctcttgcttcaaccattgattctgtctcttcagattcttcactagattcaatctcatccgattcatccatgttgagattctctaaaacaagattgggattcaaatctaaaacaaccttcctcaaacaaaccaaagctttgtctcttgtatcttcatccatcagtgtcttacaagccttgtcgtcagtgtgggccttccataatcttcgacagcatttcaagaggtcaagagtaaccaaacaactaaccttatcgcataaaggcataatcctaccgagccatatcgttttgattgcttcggtgtaagccttttttgcatctttctcataagcgagacacttcactgtgcactccacagctactttacaatacgcttccgtgactgatttgggtactttagaaccttctttgtgtaaaatctccacaagattctctaatcgctcgagattcttctcttccacaataccatcctcaatctccatgaaaatcccttcgagtatagcttccttccactgcgagagtgccattgttgctaaatcaaccaagcaatgtttgggctttttagagaaatcagtactttctcactcgccgattccgtctctcgaattgggttacacaggaaaggtcaattaggtttgtaacacttcaaatttccaatttttcacttttcgattttcttccgattacagaggcgaaaacgaagcgatggaagaaagaaccataactttttgccgtttccatctttaaaaatagaaacgcgtgtcgttttatttactataaacggctcacattcaatatccctagggagaaaacggcaagatactcactgcttctaactttttacattttttaataaacgaaaaatcatcagaaggcatttgcggcggaatcggattcattgggtacagagaagcaagacctaagaagaggaagctgcagcagcagcagaacttgttcaccagtcgctatcttcttctcaaaacgagaacaatg

SEQ ID NO: 24601 - DNA, 3003 bp, Unknown
  misc_feature (1)..( 3003): 2750-1469P.txt file - cDNA_ID_2181290; gDNA_ID_1972023; Annot_ID_178133
gaatattttacaaatcttgttttgtaagtgtacttaaaacttgtattttgctgtgctttagggaagctgttaaaaggagaaaagcttcctaaagaagaagaaaatttccagaaagtgtacgtcaaggctccatcatttctttcaattcacatgggtgttaaagcagaggttctccctccagatacagattgccatcattttgtgctcgaggtttgatagtttcctactaagatctattcacttgccaggtttatagttattgaatagcgactttcgttttgctgcatccgtaggacgattggaagaatctggaggagccttatggcagtattttcctcagcattccaaccattcttgattcatctttggctccagatggtcgacatatacttcacatatttacaacttcgtccattgaggattgggaggtaaggctactaatattattgctattttccttagctgtagaattatcctattgagtttttattgatttgctcatctttgtttatcaattcgtctatattttggtactagggactccctccaaaagagtatgaggcgaaaaaggaagatgtggcagctagaataatccagagactagagaaaaaattgtttccagggctcagttcatctattacgttcaaggaggttaggcttgttctttattcccctactattttacatgcacattgtagaaatggtgatagtaggtctgcatgatatgagaaatctgtatctgaaacccatgagaataagcctatgccttatttgggtatttagcctgtatatctaaacgttttttgaggcaggtgggaacaccaagaacacacagacgatttcttgcgagggataagggaacttatgggccaatgcctagaggaaccccgaaaggtttattaggcatgccattcaatacaacggtaagctaaagaaagagatagatagatagataacatcaggtttagttagttctggtggtgaatggttttgctaatgaaagaatggttggactaataataggctatagatggtctatactgcgtgggggatagttgttttcctggccagggagttatagctgtggctttttcaggagtgatgtgtgctcatcgggtagctgctgatattggtgagaaaatgccatatttttgcaatatgttaaatagaatgggttgattattatgagcataagaagcaatcacttttgtgttttgatttttagggcttgagaagaaatcacgagtacttgatgttggccttcttggtttacttggttggctaaggacactcgcatagatccaatacattatttccttttcttctttattatgttaatttctattgttttactatttcttcatagaattttacttttctttattttcttatttcctcgtttacttttttctagttctatataaagaagaccttcttgtaagaaatacatctcataataattttcttaagaagcatagagtttttctctcttctactggattatagagtttctggtggattccagaattttatttttcaaattcatagcttgtagacttgtaaaccgatataggtttggcgcttgcattttttagggtttttcgaccgcgtcagatttgtgcatgggaaaggttgattcataaaaactgtaagcccattaaagtaaagcccattgttaactctaaattatcttcattcagagttatatcttcattcattcaggaatttcgaaaccctagtcaattatcgagatcgatccaaccaatttttttttaaggttaaaagtttttgattcgtgaatgatgatggagcctccgcctacgaaggagattgctttggcccctgtatatgtgtattgggacatgaagaggtgtccggtccagatgactatgatgctcgtcgggttggtccgtgtatgaaacggattttaaggaaattaggctacaatggtcctgtcaccatcactgctgttggctcactagcaaaggtccctcgtgacatccttgaagcggtttcttccactggaatctctctttatcacgagttctacagtaagcatttctcatccttattccctttttattccctttattagataaagagagtctctctaagtatatagtttctgaaacaggtcgtaaaagcatggtttcgtgtttccttggccatggtatattgaatccacgtccatctactatgatggtcatatcccgtccaccagtgtacattcctccacgcttctattctaatattagccgccgacgtgaaaatagatacaactccattttcccgtttccacttgagtctcctcgagaagcctcctccaccctctggaaaaagtttcttttagctgatccagggccacttgatgaggaggatagctgcagtgaaacgcctggacttgcctcctggctttgctctgtgtgccgtcgtattggttgtggtccaggtattgctggtcaaggcgttgataattttatcacgcatatctctactcgagaacatgaactcaatgtaagctaagcatccttgccactagtttaactatattccctttctcagttgttcttttctttgcctacatttgaccctgtgttgtctttttcctcgcagcgtcgaggctgtattaccccaaaaggtgatcgcaataactccagattgaaagagagagatatgtgtaaagaagaacataagaaaatgatataatgagaacaattctttttaatccgtaatgtgtgtgactgccaaatattctcaaatgatccaccattttcatgattttttggctgttagaaataaaacgtttagaatttgtaccaaaatacggggatggatttaaacaatcaattgtacgttaagttcaacacatttgaaaatgatttatacgcatgcatcatgagcattattgtattattgtttattttatataggtccctttatatattataaaagagtgcaataaatttggttacgactttgaaactcatcgagctttcaacaatg

SEQ ID NO: 24602 - DNA, 3000 bp, Unknown; identical to SEQ ID NO: 9220
  misc_feature (1)..( 3000): 2750-1469P.txt file - cDNA_ID_2181294; gDNA_ID_1972023; Annot_ID_178134

SEQ ID NO: 24603 - DNA, 3003 bp, Unknown
  misc_feature (1)..( 3003): 2750-1469P.txt file - cDNA_ID_2181315; gDNA_ID_1972023; Annot_ID_178140
aagatcaccttctctttcatatctcccaaagaaaaaaatattgccaaccaatcatttacctgaaatttcttcatccactaataagattcagctgaaacaaaaaatctccatcattacccgatgttatcttctggtttacaagtctctatgcaaatccttgagagccatcaaaggtctccaaaatcacgccgccaaagaaaatatgtgtgtcaggcgagtttgtttcaaagattcaagatgaagccttcacacaacacctcccaagttcaagttctgcaagcaattcagaaaccactttttccattgagattgtttctatcagctgcttgttgctcctcccatcctttatcatcccttttgaaagaagattgattctagatgactctgaattttcagccaggagttgttcgaaaaacttctcttcatcattgagtttcgaggccttcatcagatccaccacctgatgcctttttgcaacatttctacctgctccacagcccattgcagttgctgctccaaccgcatttgcaattgttaaggtattaacaagcggcatgttgcgtatataacctaatgcaattgcagccacaaaactgtctccacatccaacagtgtcaaccacttccacctgatgatgatcatgttttcgtaaagaaaattagatcactacacaaacttacttactctatgatacatacataataattcaattttcaacaccttgatgtgaatgccgaaaatgaacgatatttatgatctgtaagcaggtaccttaaacgcaggtgccactgagacactagatttcgtcactagaattgaaccctttgggcccatctttacaatcacccatttcgttccctttccgttcctcagaatttcttgtcctgctttaacagggttcctgatgccagttagagcctccacctaagtaattcattaaagaggtcaacaataatttgacacagtagagaaattttcagcattagcgagagatgcacaatgtacctcctcagatgttagaagaagaacatcactcattcttaagaaatgagcaagtgctctacgctcatcaggagttcccttggacagactctttccccgtggtccaggatcgaagaagatagctgtcccaactttggcagcgtaatctatcgttgacataataaaactagggctgaaatcgtcaaagtcataaccattgcagaaaagaacttttgactgtctgattgccatctttacttcatcagataggtcagtgatccaactgaaagcaggttcctccttgaaatcagctcgactaaaaaaagagaaacaactagagagaataagttcctatagtagtaaacaagaatattacccatcagaaatttgtttcacaaatagacaaaagaattaggaataaaatgggacagaaattccctgagtcaacaaattcaaagaactaggcattggaggcaagtatgacaatatcacccactagcgtttgtctcaatattagaaacaagatctctaaacaagaaagccatatctttctagacatatagcattaagaacactatcagcaagaaaaatattccgatagaaaatctggtatctacacttttttgtttccaaaaaagttctatcaaatgaaaagttatatttctaggtccccatcaccatccccatcacagttcatgaatgagatgatgcattcactatatacccttagcaaccgtttccccacataaaccagctctaccatccatagatattatcaagttttggcgtggcaaaaagcagtacctgcaaaacccatgcctctgcaaaggatccacaagaacccagcaaatgagagtttcacagaatgagctggtatctttttcatttgttcctccattcaatgcaaccgtacctattccttcctcatgaagcacatcaagaagaaactcaccatagatttcatccccaacgtgaccaatagcaacacaatgaagccccaatctagcagctgctatagccatgttacagttgccacctgcttcccagtatttctataagcaaaacagggaacatatacttcactattaacatcaacagactcaacaatactttaaccttaattcaactgaaacgagaaaacaaagattcaattttctcatcaaagagattgagctaagaagttctttcgatcaatccgaactaaggcagaacaaattatacatacaatgttcgaaattatcaccattgaaacactaagaagcagttaaagtcaagatttagaacccaaaccttatctgggggagacatagagagttcgtccatgagggccttgcgttctccacgagaaggagggggcaattcgtgaacactgagaacaatgtcgacgcagagattacccaaggttgagacatctataggtttctcgaccaccgcgacatctccagtttccccgaaagaacagatggaggaggagccatcggcgtatataaccggagatacatcagcggcgctgctccggcagcggaggcaaacagagctggtcacatgagggactctagcgaatggcgggaggagaggattagggctttgggtggagaaattggagagggataacgcatagtgaggagagaaggagtgaaattttagggaaaaagcgtggtgatacattcagaaaaacccaggaaaaaagaatgaagaagaaagagagttgattttgaatctgcttcgtcgttctctctcagcttctccttcgtcttcaatcttcttgaaatgagatactttattgttcttcaccatttgaggaagaagaaggaaggctttcttgttctgtggtaaactaaaccggagtgaaattggaatatgaaattataccgaaccgggtttgatgtggttatttaaaccgccttgaaattaaaacgggaggttttataagaaagggtttttcatctttacctgatttatacttgtcgacggcggacaccaacagctttcttcatcgtttagagctcacttcaagccatg

SEQ ID NO: 24604 - DNA, 3000 bp, Unknown; identical to SEQ ID NO: 5864
  misc_feature (1)..( 3000): 2750-1469P.txt file - cDNA_ID_2181319; gDNA_ID_1972023; Annot_ID_178142

SEQ ID NO: 24605 - DNA, 3000 bp, Unknown; identical to SEQ ID NO: 5864
  misc_feature (1)..( 3000): 2750-1469P.txt file - cDNA_ID_2181319; gDNA_ID_1620822; Annot_ID_169517

SEQ ID NO: 24606 - DNA, 3003 bp, Unknown
  misc_feature (1)..( 3003): 2750-1469P.txt file - cDNA_ID_2181347; gDNA_ID_1972024; Annot_ID_178162
tatataatttatttatttgtttgtttagcaattgagcaaaaactattcttgtaacgctttttcatgtttgacatgttgatttttgttttttgtgacacgatttgtaatataatgatataattattagctttttaatattttttaaaatgatgaaatttactttgtcacacctaaaattgataaaattttgtatttttttagaaatctaatgttaaattatattaaaaaaaaatgcaaacgtttatacatcgaaatgcaaacttttcttaaaaccgaatcaaaatatggttcaatctatctatccttgactttgttgtgacgcaaaccacacttaaagtcctccaatgtatttttcttcccctttcattgttatggtgctcaagcggtttctcatatttctatcaatcagcttgacaaatttctcttttcttgatggtttttctccgtgtcttctatcattcctttcacgccaaatagagtgtatcgtgttttggaacacataccttagtataaaccttttcgttgtgtctcggtttttgttcgcaagctccctcatgatatcccgccatttttcagtgaacttgtttgctaggatcccccgtgccagctcctcccacacctttctcgaatacggacattggaagaacaagtgctctcttgtctccaaaggatcttggcataagacacagctttgatctgcattttggtttcattgaaacatcctttcccctgttgctaacctgtttttcatcattaaccaagtgacaaacccatactttggtgtagcgtacttgcaaaatttcgtacttgcaaaagaagtttctacgaacttaatgatgacggaaaaaaatacatatgaaacactctacataaactagtattaaaattctttatctgcatggttgttccttaagatagttagagatcatttttgggaagtaaataaatttccactaaaacttaagacattatttgaaacaccggtacaccggtatagtgccttctaaagaacattcaatgttcaagacttccaagtcataatattttttgtttgactttaaaagagaggaatccatgtaaatataatttattcgatgtttgtttgtatcttttcgtgagcttaaagatattacatatctcgatcctttcaatattgttaggtcatgatgccatttatcgatcttccgcatgtcacgccgttcagtctaggcgtgagtaccaatcctaactcctaaggatacgacatcatagcaacttagcaaccatgtatgataaaatggttcacacaaattatttaggcccgtatttcggccccttttgatttcgaaatattttgggcctataaaaaagagagaatgtttgagactcgagagtagtaagaaaggagagaacgcaggtttttttttttaaatgaatgatttcagagaacgcaagttatacacgtactacacgtataacacgttcctcagcaagacaacaatattatcttatcctcaagtggatgcaaataatataaagattttaatattcatttactacatcaacccccaagaacaaaaaatgtcttcaacaaacaaatctacaatcaacgaaacaaacgtaatcaccaaatatgaatcaatcagcagtatgctgaaaattgttgccaacataatttaagcatgcgactttcaaaaactcgaaaaattgtcaacaatttgagtaatccgaatttttctgtttctattacacatgaaaagacaaagtaacattcaaaatccatctcatctgcttggcgcgataacatatctgataagacttttttttgtgtgtccaaagctgataaggtttccaactttatcagaatcaatctatatttgactattcaaaactgaaatacaggagattatttctgctatgaacaaatattattttgactatttgactgatctatcacaaacatcttagccaaaaaataaaatttagtgaccacagcttgagaaaaaaggaaacattcgtgtagaatgtattttgctgatttgtggagagtatagtcttgtgctgtgaacaaatacattcatattaccctgcaacttgcaagtaaaaagaagttatgaagtgacagctaatcaggagataagaataactcgatcataaatacggaacaccgcaacaagcggaccaaagagcatgcaagtagccactagccaagtaggagaaagaaaaatatacaactacataataaatattccaaattaaaaacttattgatttagtctcagcatttatacaaatgtaaaatgtttatacaaatgttgtctattttttttattgttaacgaattttctaattttgaaataatagtgatcaattatgttgcttttgtgactaaaaagtaagtgaatttacaaataaaatgatacgtcaaaattatggttagctaagcctaagtctaagagcttgaatgatatatggatttttggtcgatccaacccaaaaacatctaaatattctatcaacatttatactcaaataacaattgtacatcactaagttacatgttttttataacttaattttaagaataagtcgtgatcaatcaaattacccttgatgttgacttttgattgaaaaaaatgacaaaaagaatttgctgatacaaaacaaaacatggcaaatatctagctcgtacgtgtatcacttgtccaaaggaagtatgcgtattattgcgtaataatacaataatatcggaaagttatataaaataaaaatacaaataagataatgtaattgcatacttattttttaacgcgtatagtacactcatctcaaatgccaataaatatacagatacacataaaagaaagactagaaagtttagttacccaaaatatcataaattaatgtaatcgtgttcactagttgcgcaagacaaagagatcttttagcttaaaaatctcatttaggcatttaccctttaaaaagttttcacagagattctcaacctctattggtgagagaaatg

SEQ ID NO: 24607 - DNA, 3000 bp, Unknown; identical to SEQ ID NO: 9244
  misc_feature (1)..( 3000): 2750-1469P.txt file - cDNA_ID_2181351; gDNA_ID_1972024; Annot_ID_178163

SEQ ID NO: 24608 - DNA, 3003 bp, Unknown
  misc_feature (1)..( 3003): 2750-1469P.txt file - cDNA_ID_2181355; gDNA_ID_1972024; Annot_ID_178164
ccttgatttcctctgaagaaactggacgaataagcctctcattcatctgatcaatgacttttgcttcgaacccaacaaaccagtgagagaaaccagaaggattagaagatttgaacaggttggagaagtaagcagtcgctacctcaccccttagcaccatcagagaaatgctcacttccattgatatccagaagtttgtcaatccgattcttccccctattattcttcacagaattgtgaaagaacagagtattacgatcaccacaatgcatccaagtttctctactcttttgactccaaaaaacctcttcctcccagtacgccttagcaagctccttcttaaggtagaaaatttgatagaaccttggagaaagagccgattgttcctcctctagagctttttcaatcttgtgaatgttttcttgggagttcagattattatctctcttccacccactgagagcctctacacttcttaagtctgtcactaacacaaaggtcattaacaacattcagggggtcccacgactgcaagatggtttcctcaactctaggcttatgcagaagccttttgtcaaaccgaaactgccctttataagaatcttgagaagccatcagtttaagcaaaacaggacgatgatcagaaccacgcatctccaaaaattgttgattagaagcagggaaattcttcagccattccttattaccaaaagctctatccaatctgctctggatccacaagtcataccttctccctgcccaagtaaatctattaccagtactcgccaactccaccatcccgcaagcttcatgcatttccttgaaaggtttaaagtaagactcacatctcttcgggccaccaatcttttcctcattatgcagaatttcattgaaatcacccaccatacaccatctttctctccttccaactccaattatgcttagtctttcccaaacaatctttctttttttaaagtcggggtcaccatacacacaagacagaaaaaagttcaccgcaccaaactgcacttgaagatcaatcaaattcttatcagcaaacttgatatcgatcttaacactttccttccaaaagatagctaaaccaccacaccttccaacaggctctatagaatacactctatcataacctaaaaatgtatgcaaatcaacaagaacatctctactattcatagtctccatcagaaacaacatctcagggaaatactttttacgcaattccttaagacgagggaaagccaagtcttgagaccgtcccaagccttgacaattccagctgataatgctcattgcgcggtgggcaatcccccctttgggatcacctctaagggattgagttttgtggattttgcagtgctagttccctcatcaactgcctttcgtttctctttagcaccatgactgagacctttcttcaactcttgtgatgcagcaagacctgaagccggtaaaggattagctttcctctgattcttagttggcctttttcttgcctttgctttcttaggcttaattccggataagctaggttcaaagaacccagctttaaaaaccgccgaattatcctgaaaaggctgagacaaagcaagaaaattggcatccacatcaaaggcattagggccagcctgatttaaattccacgaatgtgaagaacttgaagtcccaccctcttcacgcagattgggctgagctaatacttttccaacattcctcaagttaatcccttcatcagcatagctaaagaaaactcctttgtctttagacaagtccagatgaaccacaggggctggttcatgactcagcattgactttctcagaactggatccttctctacttctccaacagactttttcaccttgttaatcctcagcagcttctcagtttcatcagagaccaaaagatattgtctcatcccttctaaaacatctgcagcgattctcggtctgcccgtcaacttgtcaatcccaacttgatcctctcttaaaaccccaaacaaagggtctgattctttcaaaacagggggtttcttaggtctctccactggtttaccagagcgtcttgccaaagcagcatcttgtcttgcttttatgaggacagggcaaacatctctctcatgagtcaaacgttgacactcatagcatctcttttgaacccgctcatactgaaaacgcacttctagtttatacttaaacaataatacgtcaaaataaaattttcaatttttagtttcccttaagtttattcataaaagtgtttatacttattatacatgtaatgtgacgtttttaactgaataacagttaaagggtcttacgacggttagttaaattataaacaattttaagttatacactatttaattactttctcgactcatagtactttctttattatacaggaattgtggtatataatgcaactaattttaacaaaaataaaataaaatcatgatagcacaaaatagtaatctaaaatcattatctgaattaacacgatttaaaaaggattattacactaagaattaataacaaacaattactaaaaaaaaaacttttagcttatttaaaagatgaaaattagcttgtatggatcgtgtcatttaaatttagtagctaataaaccctaatagttgacttttgatttctgtaagataaaataacgaaaacagtgatatatagacatgaaaccgcatgtttattggttgttagttgtaactttagattatgtaatcatattagaggattaaaatatagctcgtgaatcacgtccatttaaaattatgatagcagctgtacaaatcataaaaataatacagctcctcataatcaatcactcatctgactagactatataaaaagaatatatacatatcacaatctatttatcgtgttcattattcacgcagcaaatatagctttaatatcaaaactaaatataaataaatacatatagcttaaaatccagtttcctccgacaagaaaatg

SEQ ID NO: 24609 - DNA, 3000 bp, Unknown; identical to SEQ ID NO: 9241
  misc_feature (1)..( 3000): 2750-1469P.txt file - cDNA_ID_2181359; gDNA_ID_1972024; Annot_ID_178165

SEQ ID NO: 24610 - DNA, 3003 bp, Unknown
  misc_feature (1)..( 3003): 2750-1469P.txt file - cDNA_ID_2181363; gDNA_ID_1972024; Annot_ID_178166
ttgtgaaaaaactagaagtaatatctatgaacaatttgaataaaaggaaataggttgatttatttttaggaaaatttattagagtaacccatattttatacataatgacccaaaaggaatgctaaaaatatgagttatttgagtaataattatacctaaattatccttgttttcctttgcagagaaaaacaatattacagaaatgccattactatttaattccagcaaggcaataaaaccacatttatttacgaaaatgccatcgtcgtttttggtaaatctgtggctcttgttgcgacggatttgttatcgatcacagatttgttggtcaaccacagattttttacaacagacttgttttgtaccacagactttactgtgttatgttacgccagatttttttttttccggagattttttaaccgtgactgatttgtttcatatagtctccacagattttatttaaatttcaaaagtaagaatgttgaaaccaaatctgtcactgatttgttttccggaccacagatttttctttatggtggcaacagattttctatttgcacccaaaaatctgttgtgttataacagatttgttaacctcgaaaaatgttatataggcatgacagagttgttttgtgtaatcacagatttaattaacttgttaacaaatctggtgttttacaacagatttttgttaaaaaataaaattactacacagtcacataatgataacagatttgtttttagtgatgacagttttgtttttcagtgtcaaagcataacagatttactcatgtcaatgttatggccgatttgtttatgactagaataacctttttagtaataacagactttttttggcagatttatttttaaaatttcgaaattttttgttatatgagatttattagttagccctcaattaaattatttccggtttgattgtatgttaaatccggtttgactggatttttttttttttttttgaaaacgttacgacagacttttattagccgacagatttttctgaaatattaccatatttgagtcaaggaatattctcgtaacgcctagggttttcaatgaaaaaaactgccattgtcgttttcttttttcttctgtaacgcctaccaaatctaatttcaatacaatccattattcttctacctattcgagatcttagttgcttcatctttgatacaaattcgattcccttgtttattcgattctctctttggtatggatcaagtaattctcgtgtgtggtaaatgggtatatgagaaaacgagatggctttttgtggttgatagtacaaaaggttgccgtgtacttgaaggtaatagtcaaaccagttatgatgatttcatccaaatggtgtatgaggattacaatatcgagaatatcaaattgtatcaccacagaaaacagcccaccaaaacctactaatcctcataattcaatagtgataacatacaatctgccattcttaaacaatctacgacaatattactttaattgataaaaaataaaatgtggaaaatgatttacgagctacaacggattgataagaaatagacttttcggtgttactcgaaaacatgatcttaacttttcggtgtacaagaactggaaaacacgagcgaaaggctttttaattttacatactaaagttcttaacttttggtttgcccatttgcttagtacgttcctttacaagctatgacaacaattaatttaattgataagaaatagaaatgtggtttccataaccggatttctgagttttgttatttttacatttgtttatttatttttattagtaatttttttttttttaatcaaaatatagttttaatactgactgaggttaaatagtgttttaacttaaaatatgagtcataatagttagtcatcgattataggagtcacaatagttatttctattaagattagagtcagtctaagcaattttcacttatttttacgttggtgaacatgtttgtttacatgaacgagtaaaacttcatagtatcttaggaggtacgggacaacgacattttgtttttattaatattctcttaatcattaaaaaggataaacatgtttaacatagtacatgtcagtaaatgaaaacatagttaagtaagaaaattctacagatatttacaaatgtttattgaaaaaaaaagagagaagacaactctattcttggaacgattcaagttttgttttgtttaatctaaacgtacacttaggtgatgatacgataacatggtgtcatgatttgataagaaaaccactttagataatttattgaaagcctgattagctttataaacacacatatattcccccatcaaaatattctacttttccctcaaacaaacaaatattgatcgtactttgttcctttaatctcgaagttgtctttacgtaatatgaaaacataacataactctcttgatattaaatctaggtctagaactcatgcgaaccaagttttggaagagaataaaatgaacctaagaatatatcaaaagatcaaaaatatccaaagaatatgcaagagttagaagtgaatcggagatcaaaaagctgtgactgtgagtaaattagacaatatatcctttccttagagaagaaaattagtgtaacgaatctaaaatataaaaggaatatgaataagtaaaatattcaaaaaagttgctaaattagttaatgtttaaaattggtgaatccaaaattgagagaagcaaaagacggccgtttggagaaagagaaaatttgggaccctctactaagaaaagtatcttccaaattagctgtccaacagctccgaccagtctgttctcttttgctcttctcacacacacacaaacataacatctcctccattttctctcttctctctttttataagaactcttcttcttcttcttctctctcaattccatctctctctctctttctagttcttgttccctttcgaatcaagtgatcatg

SEQ ID NO: 24611 - DNA, 3000 bp, Unknown; identical to SEQ ID NO: 9239
  misc_feature (1)..( 3000): 2750-1469P.txt file - cDNA_ID_2181388; gDNA_ID_1972024; Annot_ID_178175

SEQ ID NO: 24612 - DNA, 3003 bp, Unknown
  misc_feature (1)..( 3003): 2750-1469P.txt file - cDNA_ID_2181407; gDNA_ID_1972024; Annot_ID_178179
ggtgcccattttcctttacccacattaactccaacgggcttcgtcaacgttgccggagtcgtcgtcgccgccgacgccgatgaagcagctggtgtttttgggtcggtttgcacggcggagatccggaaagaagtgggtctggagacggcggaggagaagtttggttgacggtggttgatcatcgatgatttgaccgatgatagattcatgcttccattcataagcgccattttgataaaataaaataaaaagttttgatttttctgatttgggattggtgttaagatttcgacaaatgtgtgtgtgaaatgttacacgaaacctgagaagtgttgagatgagaatttgagggttttataaacgaaatcggagatggtggtggtgtttggtgaagaagaaggctaatgtgttgttgtagttgtggtaggtaatttacttgtaagggtattattggtaattccatgtttgcgattgttagaagggtagatttgtcaattttcattcaaacgataaccggctaacgtgtccgtaatcaaaaacgtatccggtttagcttcgtgttgaatgggcatgtctttgccgctaacgttcggtgaaattcttataatcatgtatactttattttattgatttggagactcaattgtattataaaacaagtttttcttattaaaacgaagatttttcaaattttattttacatgtgtcgaaattgaagatattaggtcgaattgtaatgttttttttttgacatctttgtattgttaagttattaatgtttaattctgaaaaactaaattttttatacgataagaatataaagaaaaaagatgtaattcaattaaaaaaagtaactaaaactaaaagaaagttatattgaatattgaagcaaaattagtatgggatattttatagagttatatcaaacattatttattaaaagtttttttaaaaaaataatctttaaccgcgtatagtctttataaatataaacacggcgttggtcgtggtcttatatatacaaatttaagatggtcatggtcaagattttgtatatttagttatttataaaagttggtcgaatgttgtgttatattaaaaaaaaacatgggtgtattaatttgtacatatttgaaatagtaataaattaattacacttataagtagattgattgataagaataagttaataaccgatcgagattaaatgagactgagtaaagctagcttatctcacctaacacccgtcgtaaatgacggaaccccacctttctaatttcgccaactcccacatttgttataatcttatttattgttcatttgtaattgtttatggtttcaaagtctattcgatttctacatattatttattaccaaactttttttgttggtttgttatattagtattgatttgtaagagttgtttaaatctcatccaatccgtggtataatgcattcgtgtgtgttattaacgattattagttctatatttgtagactgaagactgaaaaactttccgttcatatgatcatgccttctcgtatacgatcaaggaccacattcaatggacatattcttggtatttgttatagccttgtaggtattattagtaaacgtgttatgcagacttggaaaatagaatgaaaatgaagagcatattctttcgtgttattctcctatagatcacaaaatggaccgtcgatgtgataatgatctggtgaggtagaccctacggagtcttgttcttcaatatgttggtggaaaggagagagagagagacacacacaaaatgttaggtgtgttgactttggggttatgtgcttattacaaatatatatactagtcattagcaacgtcagtaattatacttcttgtaatttcatgaaattttgtgttctttgcgactttttttttttttctgtttgtttgacagaagtcagaaataatgtgtcagtgttcttgttttctttcaaggaatccactagattaaaagtcacttggtatattagaaaatatattagggcaagagttaattacgaatattaattaatgtggtgttgttaagacttaagatatataagacagttcaagcatagttacataccaaatcgctagatatgtttccatctctaattttctactgatttcaaggccatctgttcatgtaatgttaagtaaaaaaaaataagttctagcaacgttacatgttttacatatcttccacgcgagagataaaactgactttcaacatttaaggatcataacaattactccatgttgatattgatgtacgacgaaatgtagcctcaactacaaaataaacggcagaattaacgtatttgataaacaacggcttattggattaaataaagaacgagcttacactggaccctagggatattgataatctgatactaagatttgatgggctaagaaactccattgggcctagtagtcatgctccctaaaacaggtgacaatttttattctgaatttctgacgcttcatctcatgtttgcggcacattagagcaggtccattgggaagaccttatgagtttcttagaagaaaactaaagaaaaaaagtcaaaaattaattcagaattgtggtattaagcaaggttcgcaccttgcattaggtgttttttggtttttaaggttcgtatacgtgtcattctcttattggaagactatacaaacaattttttttttccttcgttgccttctctcctccttgtttgctccgaagctctacgcttctcatcttcgtctcccttctgcaaatgatgaactctcttctcatcatcgtttctcatatcatcatcgtctctcgatccgtcacgatccccatcaagttttatcacgtcttcatcaccggtagatcaagcggaatcggtgaaattagatacgtttcatgagcttgcggcgaatgagatgatgcgttgtgcagagcacggtggagaacggtgcggaggcagtgagcaagccggaaaataaaaaatg

SEQ ID NO: 24613 - DNA, 3003 bp, Unknown
  misc_feature (1)..( 3003): 2750-1469P.txt file - cDNA_ID_2181414; gDNA_ID_1972024; Annot_ID_178181
tccgaagctctacgcttctcatcttcgtctcccttctgcaaatgatgaactctcttctcatcatcgtttctcatatcatcatcgtctctcgatccgtcacgatccccatcaagttttatcacgtcttcatcaccggtagatcaagcggaatcggtgaaattagatacgtttcatgagcttgcggcgaatgagatgatgcgttgtgcagagcacggtggagaacggtgcggaggcagtgagcaagccggaaaataaaaaatgggggcagaaggttggatacgtgcgagatacttcggagaacttgcgacaacaaatggtaatgtgtctctatacttctatttgagacagaatataagggaaacaagcaagattgatgtgtgatatctttagaagtggactcaaatggttagagctgtaggcttggtatcatgatggttgtcgtatttttggctggtttagataataggaatgaagctagattgcctttggttggggtgtttgtggctacaagtttttggtttttgttgagcgcacacaaggtgtttgataaaatgtcaaagagaaaaacagattggatagatgcaaaattgttgttggctaaagaatgagtaacagatagcaagtaggatttaagtttaactttgccttctatgtgagagctttgtgttgtgtaattgtcatgtttgtgtgtctaggtgtgatggatgtatgggttctttcctctccttagctgcgtatgatggctgcagcaataccagcaacaacccctgagaaagatttcaattccttacaaagttatgtatgcatgtcacaattcaggccaaacacaaaaaattctgtacaaggacaagcaacgcaagagaatccaaaatccgatgaaggagatattaaaacaattggaaatttgtgattcgaggttcctgtgcgtgtcaaattagctatgttcttgtaattgtcattttttgtttttttttaagaaacccacttaagattctaccattgggaaataagattgaataaaaactctaaacttccatttattcaaaatataataatataaaattttaaggaatccttaattaaggtgtttcaatgggggtgctcttaagagcatcctcaatgggaggatttaagaggtttcttaggttaataaagggatttaaattaaatgtttaatgatgattttagcttagaggccctcttaccttagaggctctcttagaataggtgtggaggtgacgtggcattattctcgtgtttcttcttcctcctcctctctctctattccgcgatcgaagtgaaatcggaacaaataattctcttgtccggagtttctataatcctttcaattcctctacttataattcaattttctctcgttaatgtatctgatgcttttgtatacacaggttccattcgataaaatagtttttttttccaggtaagtttcatgatgattatgtgttctctcttttatatttcaattgtaggatatatgtaattgttttgtgtcatgggattgatttgtgttaatgcgtttaggaacattcatgggattgatttgtgtcatgtagagagattgagtttgcctaaattagctcatgacttttttggtgcatgtactctttacattacatagttctctaacttctgtctgtgatgaaacgaatgaatccgatcattcttctgtctttagtttaacgaaagagatacaaaatatagtgatgtaaccactatgttaatagctattttgtcttatatttttatctaagctcatgcagcttaatcttatatggtgatgacaaatttaacaattggagacaaagttgtactttatttccagccatgtggataacctcccattgaggatggtctaacatcctcgtgtttcatactaatcttttttttgttatatttagcttatccaattcgcttgttctttatcatccgttcaaccatttataccgtatacgactagtactccaccaatttatttcataattgcaaatgaaaactcgagtcaaacccaagtccaaaagggcaattcgaacttggttattgtatccaaattttgaagtcaaagccatgcatcaacttggttacagactgtatccaaattttgtttgtcacggaacgtatctttcttctttgtcacggtgtatttaggcgtgggttttgcactttttgtggttttctttctttggtgaagttcctttaatttgacatatggaatagtggaaaaaaaataaaaggacaaaaacacttaaatttcccgaacaaggacaaaaccttaatagttccaaaattattaaatttcacagaaagttagaaacaaccaaaggtatccgtagaggttaactttaaaggaaaataaagcaagtggtccactcccacgtcgatagtcaacttattgctcttttcgacataatttacctccttattaaatctccttggactagtataactttctaagtatgcttatatctttcatttaaaggcgaaaatttgaaatctgttaattaagcagacactaaattccagattaattattcggcacaagacaagcaaaatagataggcacatgtgccttggaagatgaagatatacttggaacgtgatcatgatctggtgccacggaaacctatatattttgttgcacgtatccctaaatgattaggtccattcggcatatctggcattgtagattttctgcagtacgctcaacttgtagatgaacattatcttatattaggtttttatgaattttacacataaatggaaatcccgggctcatggcaggttttggatactattcacacgtgacgtaatttgtggacaaccaccaaggccaagaagttattagtttggtctcttttttcttctcttctttcttctcttctttctctataaaatggcttatttcaaaggcaaaccaaaactcacatttgttcattacaaaaagaggaaactgacaactgatttcgcgcaagagaaagaaaaatg

SEQ ID NO: 24614 - DNA, 3000 bp, Unknown
  misc_feature (1)..( 3000): 2750-1469P.txt file - cDNA_ID_2181434; gDNA_ID_1972029; Annot_ID_178199
atagagacagagatatagagagaaagagagaggaaggggtgagaaaccttcagcggaatagtgctcagctaatgaattcaacttgttctttgccatataaccaccagctgtggagaagtctgttccattaatatttccattcctaatattgacatcagataagcccacgcttcctaatctagaatggtctgaagttgagtagagactcgctgaagaggaggttcgtttagggatgttgacctgtccatgggaacccactgtagaagcaccaagacttgctccatacccactcattccaccataatttgcagaaaacaagtgatctttagtttctgccgtattttgttgccgcaaagccttcttatgaccattgggtatgtaacgcatgacatcagattgattctccagttccacttgaagctgtgactgcatatggttttcttttacttgactcatctctgacatgttcaacctggacaatgtgtcggcaacatcggcagcagtgtaagattcacagttttggatggctgtgccaaaagtattcttcttctcgacaggaccaaccctggtaccaatagggggaaggccagaggccgtagatcgtcctactagatgtgagtcaggagttctatttcttggcaccggagaactcatggtggatccaagcatagtatttggactgtttttggcagtagaatgtaatgaatcatggaatgctaatgggctgtcaaatccaccggcactgaaatttgataaaacagcagcatctttcatatcccgaaaagtgttgcagcttgcaggccgagagagttggctgcctaaggctgcatcccgttcaagtccttcctgcaaaagttccactcaatgaagtaagaaaccaaggactattcagacacctcacaaccagtatatactcaacagcataagcatcaatgtatatacattacctgaagtatatcagcaaaactcttccttctcggtccaagcccagaatatccagataatccaatcaagtcttctctgccttgatctagccgctgcaccttctgagagcggccctgagctacagcattcctcagttccatcaaatcattctctgcctgctcaactggaacccctggctgaaccgagaagagcgatgaggagttgtcgacttcaaccgttttcttcctccattccccaacaggatcaaacacagactcactgttgtgaaacctctgagcaaccctccaatcctctctagacaacaacggaggaggcaacctcggattcgaatgctcattcgaatagtaataagagagatactcagggtgccaacgtaactcatcatcagataaaagctcaacgccattgctagtggttatactgctaatattcccaacatctctatgatcagagttgttattgttcaagtactgattatccatagctctcaacaatccttccacggtaggaggcgcgcttccgcttctgtgaacatcaatgtctcgttctcgttctcggccaaatgattgctgattacgatgttgttggagcaaagattcgagctccctctggaatcgatcttcgagatccacattggatcctcgattcacacttgtcaaatttgatcgcgtatccatgtagctattagtaaccatctcttcccttcatccgaatcaatattaaacctaatcaaatcaacacctgcaaaaaccagaaaaagccaaaaacaaattcgtgtcggtgttacgaaatcggagaagaatctatcgatttttgaaaaagagtaatgatcagaatccgatcgcgaatcaaagtaatgaatcacctctctatcgatttcaatgtctacgaagacggaacgataaggttctctgtttcgtgaaaacgcagaggagagaacattgaaggagaaagtgagagagggagtgagataagaaatgtaagtgaggaagattgagagaaagggaaaggggattcaaagaatgagagacgaataaggtaaagaagacaaaagaggcaaatcatggatgtctgagatcgccttcatcctctggtaattctcccaaactgtcacacttaaccttttttaattacataaactaatcttaaaaaaggtgattagaagaagatgcggctattacgacatcgtatatccatctctttgtctgatggacaaattacataaagttaaaaggatgattaattaatgattaaatttgtcacctaaattcaagaatctcttattaaatcgagacaataaataatcacaatttctaacgtttgtttttttaatcagagagaagtttgtatttttcgtttatttcgttacggtcattcatttttctgataattaatttgtaatctttatacagaagtttaattaatatagtttatttacaatagagaaataccctctacggtaatagcattaaaacaaatatttagtatggcttaactcttttaatactaataatgatcaaatatttagttatgtcttactgactatattcctaaacatttccaatcttaagagagcaagattcgcacattttaagaactagcaaaaactcacttgcaaatcctccatattttgaaataattattttcaattttataatttgttagtctagtttattaaattaactcgcacaaattacttctatttttcttaaaaaatcaaaaacactattgtttgtacaaaacagtttttaatcaaaaacttacaaagcctataagaaaaatctcttgcagcccactcaaaccattccttagaactcggaactctctattcatatgaaatgaccaaaccatccccacttcacttaccttctatgtatggaaagttgtgagggtgaaacagtaatttaaaacgatatagtttccattacagagatttctatttccattttttgatatcattcgcaatcattttcttcttcttctttcccatgatcgtctctcgcttcccaacgcaatcttcttcacccaatctctaaatctctcctaaattccatg

SEQ ID NO: 24615 - DNA, 3000 bp, Unknown; identical to SEQ ID NO: 9255
  misc_feature (1)..( 3000): 2750-1469P.txt file - cDNA_ID_2181458; gDNA_ID_1972029; Annot_ID_178206

SEQ ID NO: 24616 - DNA, 3000 bp, Unknown; identical to SEQ ID NO: 9250
  misc_feature (1)..( 3000): 2750-1469P.txt file - cDNA_ID_2181472; gDNA_ID_1972029; Annot_ID_178209

SEQ ID NO: 24617 - DNA, 2750 bp, Unknown; identical to SEQ ID NO: 9247
  misc_feature (1)..( 2750): 2750-1469P.txt file - cDNA_ID_2181517; gDNA_ID_1972029; Annot_ID_178222

SEQ ID NO: 24618 - DNA, 3000 bp, Unknown; identical to SEQ ID NO: 9273
  misc_feature (1)..( 3000): 2750-1469P.txt file - cDNA_ID_2181575; gDNA_ID_1972048; Annot_ID_178304

SEQ ID NO: 24619 - DNA, 3003 bp, Unknown
  misc_feature (1)..( 3003): 2750-1469P.txt file - cDNA_ID_2181579; gDNA_ID_1972048; Annot_ID_178306
accatcaaaagctaaaatgaagccacccttaaaggacatagatatcttactctttccgacgccaaatgctgagcctgccatcgacatgaccacaataaagcaactccttgtttggatcaggcaagatatcaagaaacttggcgcaaccacgaggtaatggcgtagtcgagaggggcgtctcatattgcagatcaaacaccaatagctccctaggaaacgtcacaaagagtatattcttccaatgtggcgagaaggcaaatctagcaaagtataacggaaatgcggctgaagcaggcgaagacgatgatgaattgccattactagctgcctctctttccaacctcggtagctcactgaaatctgtctttatctgcatctcctgaatcacaacatcgttctcactatctccaagtaccttaaccgacaataggaatcctttaaggccaagcacacagaaatggcgagaatcatagggatcgcggcggagacaggagagaatctccgtgccggcatcgtacttccagaaaagtccaccggaggtcgtgtagagcgagagaaacgaagatccagaaatcgcagcgaggacatgagaatcgtggcgagcttgaacccaacaaaggtcttgaattccgagcttgggatcggaggaaggattaagccagacgacgacggagcgaagatggaagtcaacgagagcgacacggccgtggcgatctgcaacggcgaggagaaggtgagaggcggagggttcggtggagagtagatcgcgggggagagggagaggaatccaacggacggaagtgacgaagggagagagagcaccgggaggaggagggagagggatagtggaaacgagctggagagaacgagaatcgacgacagagacggaggagccagaggcaaaggcgaagagaccggagggactgagatcggcggatccgaagttgttacggctgggaggaccggggagagtagaatcccaggtatcggttggtgatggcttcgatgctgccattgttgcagctttctaccaacttaatttctctcgatttcaatttcaattgtctcatttgtaaacttccaaaggtgagttgaaatctatacatgaaccagcatgtacagaggaccattctatttttaattttttttcacaaagtgttctttttgtttagaaacagagagattccaaacattataaaagtgggtacaaccacctacaacctttaaagcctgctaactattacaagttttggattatcaaacagagtactgacaatccctacttcaacagaaccaaaagtatcctaagttacttgaagctcgaccataacatcttgaacattcaaggattaatgagctcgcaatgagaataaccaaggatcattagaagactctacaacataggctagtcttcatcttttacctgaaagttaacacacacaaattcctaaaaactggattaaagaaaaaaaacgaaacaaccttttcctgctttgtcgaaactacgtgataccaaaaagtggatgacagtatttgtagagtgatattatctcttctttggaggtatctcaactccccaaactgatgttcttgaaactttcattatttttttcttcagttcattatctgtcacaattgatagatatttagatgactccccaacctcaatctttgtgtcatctcatctatcagtcctcactctttacaaagttctttgctgcccaacaatgctttctttggcaaattgatccgacaatcattgaggatgactgctagcaacataagattgaagtcttaatcttgttatcactacaacaaatatccacattaatagcacaagaggatacattgatagcacaagaggataactcattttccgttactgctatgaaagattaatttttattttgattattttgtaatagcgtttgataaacactatgatagaaaatcactaagcggaaagctaaaatcatctattccgccaatatatatgcgaaaaaatcacttaagcgccttatgtctcagatctaaaaatattaagcgacaaaacgctaaacacatcttaagaaaaaaaaaaatcccccaaattgattccttcaaaccctaaatttcttctttgaaaatctctaattccacttcttacatcccaaattctacattgttcttcacctttctctcctcctttctctcttctttcactcatcctctcacgtttcagatggaaaaggtttgttgattttgtctctcttttccctttgaatctatagcttctaatccttgtttgttggttgtatcgctcctctgttggttttgtctctcctctttttttgaatttgcagctcaaaagggtaacgtttttgaagtgtttttgtgcacacaaggtgttcgacgaattgactgtgagacaaaaaccaagaaaagactcaacatctctttctctgggttcgtttctctcttctccaaggttgtggtatatctcaaatcactatgattcataaacctaattacaaatactttatctataacatcttaagtgttcttcctcatgttgaattatgttgtgtatatggttcgacattgcattcagccgtggatattgtagtatcttaggtcattaagcaaggtctctttgttagcatatgtagcataaaaaagattttgttttgttctttatgttgtttcgtgctaatatatttcacaaattctcattgctttctctcatgattctctaaattgttgttactctctttggatttctttaatctgtttccatggatgattacgtttagctactttaattgtatttctacatcgagtttataatgatttggttatatgattaatagttttccttctaataatgacttataattttctctatttcagtttactattgacaatatacttagcttcaattaagctactaggagaccgagttttggtaagaccaaagagacagagaaaaagacttgacttttgaatatagagaattgagagatg

SEQ ID NO: 24620 - DNA, 3003 bp, Unknown
  misc_feature (1)..( 3003): 2750-1469P.txt file - cDNA_ID_2181660; gDNA_ID_2214712; Annot_ID_189912
cacataaaaaaatacgtatcaatttgtgttaaaacgttaaagaataaagtattttccaaaaaagaaaaagaaaaaagataaaataaattttgctgccagtaaccgaataaaagaaaattaaagcatccataggaaatgacgtgtatttatcgacgtggaaaagaacgtgagacacgtggcagtatatatcagagcgagagagaaggttgatgcacggaagctgttcccttttaaaaaatttggtgcaagtctacgttgtggcactcactcacttaataaactccacttttctccaaagttgattttatcatcctttttccttttttaaaccattattggattcttataatttataatccgcatgaacatttaattaccataaattaatctctactgtatatcgtctttagtagttaattgtaatttcatcttaggtattttaagtctttctgtaaatcgccaaatattccggaaactatatggttctgagaccatcttatcttttactctcttaattatttcctacttttctatttatagagttaatactttgatagtcagaaagtaataaatctttatctctcttaatttttcaaatctctgctcagtttataatttctaccttctcattttctccgtactctctgcagatttggcctaatatattaagttttttttaaaaaatatatatatatatatatatattttttcgtgactggaaaaatgcagatctaatccaacaatgataagcctctttgataataaatttcaaacaatcgaggtatgagaggaaaaagaaaatgagtcctggtttggtaactccttggatattgaggaacatcggtttaaggccaacctaaagcttcgatggatatatttgcatcaaagattcgaataatggctcactgaagagcaagtctcggtaatacttttgctctaaacaattcgatcttatctcattcctctcttaaatccaccctataatggcaccaccacccacgttgcataagtttgtatataggtgtttctttcacaattgttttttataaaaaagaaaaatgtttttttcaaagaagaattttagataaatttaaaaacctttcgacaaaaaaagaaagattaaatttaaatattcaaaagaaaaagaccttaatccccaaagtcggtcaatgaggcaaaaaaaggttgttcaaaaaatgatagcacacttttaatggatttttgttttttgtgtcacgaacactttgaatttaaggaactaaatcgtaagaattgaatactataacgttccactacagtcagttttacaactatagaacagtttaaaaaaaaaaaatttatctataattccttaattacagaaccacctacaagtgttaatatgcatccgtttttatatgcgacgcctggcacgtatagagaaaacgtgttttgttcacgtattcgctattcgcaaaacgtatgccacgtgagatctacatgacgacatacttacttgtattgtatgtaacctcttcgtacatgatacctactaaattgaaatttaagtttgcttgaattttctttaaaaaacaattctaatgaaatttatcgaaatagaactatcattttttgtaatcatattaactttcatgagcttttcaattcgatactaattgctactaaatgagttgatctatcattaatatattactttagactttttgtattttttgatgtggaattctaacaaaccaaaaataaattaagttaaaatatagactaaacacttatcacgaaatgagctcacatcaatattttgataatcaaatgattttttctttttttaccaagaacaaaacgtttaggaaaaatagagaaattagaaacaaagaaacaaaagaacaaccttgtataaggaaaaagaatcgcaaaaaagggaatgcgaaaattatgtatataaaagagtatcaaatacgccaaatgtaaatgaaaggaacatataactttaattatagttatttctttttcatattgtacaagggtgaaggatgaattcaatgtagctaacagatagaaagctaagagctagatggtccattttagtgatatatactgcatgattttgcattttatcgacatatttataaaaaatttcctctttttctttcttttgtaaaatacgttaaacctcaatttaattaaaagggtgttgacctataaaaaaactaaagggtaagagatatataatagacttaatagtgtttaattataatagaacaaatctgcaaaaaaaaatggtttgcgcaacggttattaaagatataattcaaactagggtgcatacaaacctattgaatttcctaatctacttaaaccaggtttcatttaaaccattttcatgaaactttccaattcacatatttctttaagaattcaattagttagtttattttggttgacatctacaatgagtgtttttttcccctacataaaactccatcatttggtaaaaaaaacttttactagcttgtacctttcttcgttaaatgtttaattttcactttttaactcatccgtattttacaaacgaagagaataaaaatcaatttgaagtgtatatttggctatatacagttttagtttaattcgtataaaattggaaaacacatcttttgaagaaacagaagaagcatggtaagaaaagaaggaaaaactatttaataaatacataaatccacccacataggtgtggagacaaagatatagaattccaaatatggaaattaatctctgccattagtggaagttaattctcataacaccgaaaagctaacgattttcaactttttttttttgttactcagaagattttaaacctttataaatacgaaaaaaccaatctcacaaatcatcaacaatcaccttgatctccactctcttacatataaataaccaaataatttctctcccctcttctctctacacacatagacaataaacacataaagacagtttctaatg

SEQ ID NO: 24621 - DNA, 3000 bp, Unknown; identical to SEQ ID NO: 9284
  misc_feature (1)..( 3000): 2750-1469P.txt file - cDNA_ID_2181660; gDNA_ID_1972053; Annot_ID_178355

SEQ ID NO: 24622 - DNA, 3003 bp, Unknown
  misc_feature (1)..( 3003): 2750-1469P.txt file - cDNA_ID_2181693; gDNA_ID_2214712; Annot_ID_189901
cactccgcagatgaatccaacttttcgggtagagtttgaagtaccttgtgaatatgaaacacacacggcttgtttagcaagaaacatttccacgtttaaaaaaattctgtttatgcgtttttgtttgcgctatagtcataagaatgggttttctcgttgttaaacatttgaaatatctcttgggcaagatttactttgtcaaagtgtttataaatgttatcaatggatttggatgccttgtttttcaagaaatttattgaaaaagaatcctaattttgatttgagatggtttcttgtaacccaatctcccctagataaacctaccttttcgccggtggctccaaggaggaaatgaatattagtggcggtaaggtatttgccgtaacagctttgaagacggatcacattggatccaggtacgatctcaaccgtccatctagtgttttttgttgtgccgcgacgatcttgatgaacggattcttgatcttcatcggcacttaggtatttgtcgttgtggctacggagacgtacaatcgttgcctttctaaatatctccatccgagaacaataatgatctctttctaaaaaattaagaattaggagacaaaaggggatggatctataagttattcttcattatcgtgatgcaacgtaggctaatatggtttgttgacctgagtcttgttttttaattcgcttgatttgagtcttttatcgttaatggtttgttatatgtttgatccatgtcaaaagtttgttgaaccgtgggattaggattgttcagattataagaccagatttctaaatagtatgacaactccgaagaccagattctgaacctcttccattaattgaactatttggttaaataaatcaaactgttctatttgtttctatgattccatctctgtaaacggtcaatgtatatgtgtgagtcttttataattcgaatcttctgctcagatatatgaatttattctcatagattacaagaatctctgaagtctgacatgtgaatttctcataaaatcatcaccgcagaagaagaaattatccaaaacgaaatttgaaggaaaatactaaaaaatcgaaagaaaagaagagagatcagagtttggttaagaattttttcggtcacggttaatctgaaacacggaccaatttgttgatcatcatatctctcgtttcaaacaaaacaatcaaaacagaagaaaatcaaatcgaaaaagatctagttgaaaacgattaagatcatcagagacttaaatactaataatcacaaagattactccatcatattgttgcagtattacctcatcacctgatctcaattttgcattatctatacggaccaatacatcataactcgaaaaccaaagatctaaagaaaactaaactgaagataaaatacgaacttgaacagagaaccctaaactgacttgataagagcttgatgtctgtcaaagtcatgtgtggtttgtatataaaggtccccaatggcggcgattcttaggtttctcgaggaaaaccctaacgcttatgggtcgtatatgagcttcataaggcccattataataaacctcttttgacccataaaaaccccaaaccaatactcaattagcttatatggatgggcttgactgaaaatttacaacttctcatttttggtttgattcaagaaaaaacaaaatattaattttaaaaaaaaatatgtacttggaacaaaataatttgtaagaaaatctacatctatttaaggcttgaagtcattggatcctattttaatggaagacaagatcaaaatttatatcctttttttggggagtagatataaacttttaagcttaatttagcatgttttgtagtaaatccaaaactggataaaatctaatttcaaactcaactaattctgttcattttatctttaaacaagttcaaacacttgaaacaatagcttcatacatacgcaaaagaaacaaacacacaacaaaattgatagaataaaataagtttggtattaaagaagatataatcgtaacaagattcaaaacttaagtaatgacatcgctacaaagatcagctgtttcgttccgacgtcaaggttcttcgggtcgtatttggagtgatcaattcatcttagatcaaaaaaatggagcaattcttcaaaatcatctagaacaaaccggaagaaatagtaatgatcttgaagataaaaatccatcacagaaatcaagttcttcgtcatcttcttcatcaccacctccatacttttctgaaatacgtagaggaccagacatctcatcttctacacgaaacaaactcgcttgtggtttatcatcacttttccgacaatgtatcggttcttcggctcgtgcttaattttgttcaatgcttgacgcaaatctgtacatatattttcttgttatatgaaaaattcatcacaattttttccgaccaaacagagttcttgataaatgggcctattattttaaaaagcccaatagatatttgagtgtccggcccaaattgaagtagaataaaagataagttaccaatttaccagtagttagcagcaaacacacagagaaagtgaaacatcgaagagaccccagaatgcaaaatctctctccgcctttttctccttccttattcgaaaattctcagcgtctttgttgcaaactcctctgaaattctccgtcttcttcattcgttttcgactctgcgttctactacttctcgtctcctatcagtatcatcgcaattcatattcagtctagtgtgttaaaccggagaatttggagtctcgccggaattttcctctgtctatgtatgattgccggtgatcaaagcgcttcttaacgattctgttctcctttgagagatctgagtatctgatttcatctactacatatgttttctcgagagtgatagaaagtaggtctcatacatatttttcctctggagggaattttgatcctctgcttcgttaattaacttgtgatg

SEQ ID NO: 24623 - DNA, 3000 bp, Unknown; identical to SEQ ID NO: 9288
  misc_feature (1)..( 3000): 2750-1469P.txt file - cDNA_ID_2181693; gDNA_ID_1972053; Annot_ID_178366

SEQ ID NO: 24624 - DNA, 3003 bp, Unknown
  misc_feature (1)..( 3003): 2750-1469P.txt file - cDNA_ID_2181722; gDNA_ID_1972049; Annot_ID_178323
aaggtgtttcctgattcttgattcaaaagagagaaataccttgaaggcgattggagaagaagaaggaggaagaggagacattattcttggttcttgaatctgcacgcgagaggcatgaccgttgcttgttggtgtaggcatagatgcgttgtatttgccaggagtgttccttgaatcccaagttccacttaaccatcttcatcaatcatcattcttctgttgtatatatatatgtatatatacatacatctttgtcaataagttctatcattttgttgatgttttattaaatgcatttcgaatatttattatacatactttattccattactttgacttactccatctttaaactaaacctacacttcattgttgttttgactttttacatcaaagtttcctcatttcctgatcccccaagaaactaatcaataaaaatgataaatctttcatttggtcttcagactccacaaattatggaaaatacgttttacatacttattaaattgttaggtttatattttggtagtatttgatacatgtaggttcatcttggctacctactcatcgccgtagcaaaggtatttcaaattatattattagatcaaagagtttagagtaatcaatgagttgatctgaagataatgttatttaattataacaaaatattgttaagcaaatatagagttataaacttgatgtctagatatcatttggtttattcatttccgtatatgatgatagatgagatggagacatgaataacattaaaacgctcagtttaatctttgaagaaacaaaaacataacaaatcgtatccttctttttgattatgcatatcttgtcaaactataaaaatgataccatttgaagcaaataaacaatattataaatgtaatttcaaggaaaatgaaaggggaaacgagtagacaaacgaaatacgttctttcctttatgctttttgttgttacttttttgtatttggcgtgagcggataagtatcgatatctatctaatgaattcatccacgggcttgctgtgtgtgagtatttctgtcttctttttattttttcaatatttatgacttatatgaaatttcggaacaaaacacaaatatttttcatgcagccgttgtgaaaagtcaatcaaaactaaagatatataggttatgtaatggtcttaggactggaattaattgacaattttagttataaactatgtgactatgtgttattgtgttgttgatttgctgacaaccttttttgtttcttaaatgaagaaaaaaagaaaaactaaaaatatagattttattgatagagaaaatagaaattttgatggtgaggttggtttgggatcgattgcttactcctgtacccgaaagcatacaaatcaaatacctaaaccaaaaagacaaattaggtaaagtggacttcgtagtagttaccaactcaaacattccacatttgacaacaattatgagtgaacatttttttttattatatctatgatagatgatggtagaatgatcgattccaaaatatagcactgtagaatgtattgctattgtgtaccacaatggttacatacgatcatcgagacgtcaatgtcatttttctgatccctagctttttggaaatacaataaattatgaataagcttttgttcttatgctgttttactgtctttttaagagactgagattgttatgccctggtctactttacatttatcaattatcaccttgcaatcttttgggtgatgcagagctaagaagaaaatggaaacgctggtacaatataactttggacggtcaacaagcaatggcatttggatgaagatggactgatattgtataatgtatagtatatgaatggctctcaaaatagttgcttaggttttagtatctttgacaaggcccagtttaactttacataggccttcttgggacttggggtttcttgggcctctatcggactctagaaacaagttaaaacatgatttgtatcatcgaacgtacattttgacatcatccaccaattcggccaaccacttccataaatcagctccttgtaatttacaaatgtatcctgctaaattccaagatcttacccactaggtaagggtaataaagtaaaattggcttcacacgtgagtaagtaagttccagttggaagatctaaaaacatgtggaagaatgtgagagataggacagatggaggactttgcttgaaagcaaggaacccacaatcttacagttacagccttttcacattttcttactgtcagttacatttgtctgtactttataatcgttctatttctttctatatttatctctttccaaaacaatttttacattgttttcttaacgcagcttttagcttattttgggtaatggattaataaaatgcagtttcatttgttgtcacacacacaaaagaagtcaaacgcagtttttttttttggcagcttgtcaaacgcagtttctacaattagaattctcttatgtgtcttttaaacgtcaaaatcaaaactaattaaaaacaaaaattgatatcgttcggttaaaatttatgtttggtgaatattactaaattaacacaaacacaaaattctgatttttccttagtttgttttcttttgttaaagttttccttaaattgtttgtttaatctttatgtcaagtttggtaacaatcatctttcaaatattggtactgtaccatataagctggtaccaatgttataacaacaaccgttgtttatgaatacttttgagtatgaaatttaatttcactatagatttacagcagattaacacgtttatttgattacggagtttgtatgtacttcagactattgtggggtaataacataaaaaaaacaaaataagggggcatatttgtgattctacaaactacctatcactaaaccacattaaactctctctctccctctctcttctctaaagagattcgaagaaatttacagagagacaaaaatg

SEQ ID NO: 24625 - DNA, 3003 bp, Unknown
  misc_feature (1)..( 3003): 2750-1469P.txt file - cDNA_ID_2181748; gDNA_ID_1972049; Annot_ID_178329
gtaatatgatgtgaaattatttaggtggaagtgcacagttgtaaatccgattagttaaagactaggatactcggatgatacaattccaaactaaaagcgatactgatcgagatgcttggagttgtatgtgcgacatcgagtaaaatgataaaattctccaaattggccatcataagaacgtgtttgaaacggcgcgcatcataatgaaatgaaaatctaggattcttaagaataatggtcctttttaaaaaagcatcatatatattcactcacatagacaattaactgaagtttgctcaaaaaataataataattgaattcgatgtatattctatgaatctcatttgaaataataataatgagtcatttctactctaaattttcaaagaagagaattcaaccaataaacttcattatattttgaaaaatataattttagcaaatcaaaagataatatatcctgctattattataaggcatgttagaaataaccaaaaaaaaagttaagtggctcaaatgcatattaaacatacacaaaacgatagtacttaatgaatgtgagccatgtaaattagtaaaaaggttagcttgttaataaattaattagtaaaacgcttagtgatctgattttaaaccaaattcaatattagcatatcagtaccgatatggtgatatataattcggattttattagttttaatgaatatatatatatatatatatatatatatatctacgaaaaataagaaaacaataaaaaggaagagcataagacagctgggttcatcagatttctattcttgtcgattcctgctctccgaaacacaaaccttaattaacagctcgaagcaatatcttaatcggatagtgaagacaaatttttatttttttatagagccaacttctgcccattagatttagatctaaccttgtaaacatcaagtacaaggttataagtattgaactaatgttcacttaataaaatctgaaggacaaaatctataaattttagaaattacgcatagacaaatccaagataatttctttataaacttttttgatccctctccgtaattatatagggtggcacgagcacatataatattatgttgggtgaacacaaattgtcacatcatatatagtagttgtatattgaaactaaatttgtgtagacgagatcgatataaataactcaataagcagagcttagataaactgaatagaatatgtgttgccattttatacagaaaatattcaatattcaataattaatgttatactagcgatagaagaagattatttagatacaaaaattcgtattaagaaataaaataaagcaagtaggcgacaacaccgaccactataaccagtgactaggagacgcatgtttggttaattcttgatttcccaactcaaagaagaaagcatatattgtgagacttaccatattgatcttttcaaactctctccacacattttcctattggctcccatgtgggtaattaattaacttttgtactttggagatactcaacctttttagcgtttgtactttttagcttcccacattctatgtgtatttttttggtttctgattttgtttgttgactaatcttgttaaagataataaaattcggcagtgattaaatgtatgtaaccagcccataaaaaaaaaaacatacggctaatgaaagttacaatgacttgatcaaatatggccacatgctcttttctgttggcccagcccaaaatatcgtaaatccacaaccaaattggcctagcgtaaatattttcttagtaacattagttttggaatcaagatccatttgaattagttgacaagcaacataattaaaattcaaaagagctgtcaggtttcatcccacgtaaacgttgacagaccaaccgacgatgtgatttgcacatttcatttacagaattatatgtactttttcatccagaaaattgttttttttttggttaattaaattaaatatctacagacgttacgttatcaatgaataattaaggagtcacttaagatctttaaaatactatcaaatgctataaaacaattagaagataattatgcatcattatttgtagttcttaaatagaatcacctaaaaatgcattcttttgagcagcttcatcagtactagacgcagccgatgatgtggagttgtggacatttgggttcaaagcacgaatccgttggggaatcacggtgaaccacaagagcttgtgcaccagtaggaaagtacttttgtaacctaataaaatatgaacagtaaactctgtcagatctaataaattctctttaatcaatcataacgttttgaccatttactaaaattctgactaccattaatctacgcaaactttttactatttcaaatatatttatttccttcaaaatcagtggtctcagaaatactaaacaaacatttttactaaatcaaaactataggagtaagtaatattgatacatattttaccctttttcttgatattgtttttacgctaaatcaaaactatatgaataagtaatattgattaccttttccttaattttttttatgctaataaaaatcagactttttttggttaatgatagaaataaatcctttggttaaacaacaaattctaatatcgttttgattgccccgcgtctcaagatcaacgacgacgactcagtttcttccttcacaagcgagatagatagagcaaagagcgtgttgtgttgtttcttctctcttcggcgttttcatcgtttctcatctacctcgaaattttctcgtcactctaatcaaaaatctcacttcgttattttctcgggaaaaatttcccgatcactaaacctagtttttagatattttctctcctggattctggatctacacaatctttcttcctcttcttctatgaatctgttcatcgtaatttcagattcttgatatatgattccttttctccaatctcttctcttagctctcagagatg

SEQ ID NO: 24626 - DNA, 3003 bp, Unknown
  misc_feature (1)..( 3003): 2750-1469P.txt file - cDNA_ID_2181828; gDNA_ID_1972110; Annot_ID_178744
tttcatctgcccaaccttctagggttttccttctcttaaagcttatcccttttttttgccttctctcgatatggctggagccgcttcttctgatcgtctcgtcactagcttccctcttctgggtacgttgcttttagctcaaagattaaaacttttttggcatcggaagttatcattttgtgctcatcttataacttgcgattgatttctacccttgggtttagggtttagcgactagtgttatcagtatctgtcgtaggttttctgtttctgataggattgattggtgtctagagttctctacaaacctctttatgggatgctagatgaaattttgtgtttttctgcaagttagtgtttttttatctgcttatgggttgaatttcaccagtaatttgccttgtttagactgtgcaattggagtttgaggctttgtcattttaaaatattaactgggctcttgtatataatcgctgcagatacagcagatttgtttcaggacttgtctttaggttcagatgcaaatgaagttcctatgaactttactaaggtacttaattactacttctttttgaaaatttaaagtttttggaacttaaattgtgttgtgtcgaaggatctttaactacaaactgttctgtggagaggtcttgctgctcatttaatgtgaatttgatatactgtgagttttttttttgttaactgactgttttctgagaagggttcttttcagcatccgtatggtcatgcaccttatggtgcatcttctcatggaagtgaaagaaggccaaacatgaatgctggcaatctgctaaatggtggagactcgattggttcatacccgtggggttacatcccagcaaactatccttctggtggctaccctgatccgaggtttggttatgaccgcaacagcaatcacagttccttttcacatctcatggtatgttggttacttcacatgacctctctgcctcttttctgtcttcatatagtcaagagaatgtgtgttttgttctcttcgtcatctctgctgggacttgggattttttttttgtctaattactggctacaactgttttatttaacagaatccacacagctcacaagaagtaccaagttttgaccaattgggatataatgatcatttgtattccaaccatggattgtatggactttacgggaatgtaattgactctggtcatgcatatggaacttttggttatgattcctggaaacttgggcgaggatggtatcccgttgatggttatagaaagaccagaagcttcaatcatgggcgtggttacagtgatgagaaagcagataggcttaatgagctatgtcgaggaccaaggagtagtgatttcaagaatccacaagttcttaactcttcaatgctagatgcaatgaagcaagacgtttcagcagtagatctccagcgctacaatggggagaatttccctgaatcatttgtgaaagcaaaattctttgtgatcaagtcatacagcgaagatgatgttcataactgtattaagtatggtgcatggtcgagcacaccaactggcaacaagaagttgaatgctgcatattatgaagccaaagaaaactcccaagaatgccctgtgtatcttctgttctcggtcagtatgaggttacttcacgtcttgtgcaatatcctttcagatttacattaagtaactcactgtaatcggttttatctacaggtgaatgcaagtgggcaatttgttggtcttgcggagatggtaggccctgttgatttcaacaagacaatggagtattggcagcaagataaatggattggttgtttccctgtgaagtggcatatcatcaaagacataccaaacagtctcttaagacacattaccctggcgaataacgagaacaagcctgtcactaatagcagagacactcaagaggtccgttgaacttcccctaaaccctttcttggacatgtttgaagcctaattgaattctaataaataatgattatggctgttagtcaggcttttaaactgtacggtgatggttttggtacaggtgaatctggagcatgggaccaagatcataaagatcttcaaggagtatatgagcaagacatgtatacttgatgattacaagttctatgagacaaggcagaagatcatcagagacaagaagatcaagcaaaagaaacaggtacaattccttaaaccctgctgcatctaaagcacattaaccacccctcttgatacagtctctgggattgtttcattttgattgttttgttatattaggcccttgatggagcttcgggggaaacaattaacttgagttgaaagatggaatcaatgcaaggaaagaagaagatgacttaattaaaagaacttagttttgaattatgttttttcttcagggttgggatttctaaaaacctaatacacatctttaatctgtgtgttttctctgcttatctaaacaaaacttacattgtcttttgttcctcttaaggggacgcacatctgataaaacaaaaactcaggctttccttcaaagttcatatcatgttattttcaagttatttctcttttagtccctaaactttcatataataagactctcatccgtaaatgtcaaaaatctcacattttggcccacatcaccataaaagttaaaacgacaccgtttagcacaaaaaccagaaggaatggtgttctctattcgtccctaaactttcatataatacaactttcacccctaaagatttaagatctcaatttttggcccccatccccttaaaatttaaaacgacaccgttgtgaactcccattttaaaacctcgaaagttttctagggcaatctcggccacttttactcacagaaaaccttctctctaaacttcttcgaaaatctcacagagcttcttcttcttcgcttttagggtttttgctctattgtttcgagtgacccaacttcgaagcttatagatcgttaccttagaaaatg

SEQ ID NO: 24627 - DNA, 3000 bp, Unknown; identical to SEQ ID NO: 9386
  misc_feature (1)..( 3000): 2750-1469P.txt file - cDNA_ID_2181832; gDNA_ID_1972110; Annot_ID_178745

SEQ ID NO: 24628 - DNA, 3000 bp, Unknown; identical to SEQ ID NO: 9381
  misc_feature (1)..( 3000): 2750-1469P.txt file - cDNA_ID_2181846; gDNA_ID_1972110; Annot_ID_178749

SEQ ID NO: 24629 - DNA, 3003 bp, Unknown
  misc_feature (1)..( 3003): 2750-1469P.txt file - cDNA_ID_2181850; gDNA_ID_1972110; Annot_ID_178750
cacttccatgttaccgtgattcaacgcgtttaaagaagctaaaagcgtgtcgaaactagcgtcgaagacgttcgtgtagataacgccgttatcgttaacggtgttttggccgtcaaagaaagcgtattcgaaaggaaagtcgctgcttaagtagagactgaggaaaggataaatgttgactgtgaaaggagctttgttctgtgcgaggaagttaacgatttgtgtcatttcttggataatgtcggaacggaatcttccggcggatgggacttgattgtccggaggagaattgtaaacgtcggcgtttaaaggaacggtggctttggtaaaatcaccaactccagcctcgtttaaagcggtttggatgttgaagagtgctgggtacgttaggtttatgaatgatccgttgtacgctgtcaagaacggttcgttccccactgcaacgtatctgcaaaattaaaataaaaaattaaatcatactttagttcctagttttaaaatttccaaataaatttattcttatgatttaatttcgataaataacggttatgatgcatcatacatgtatttttacgtttgtacctatgtaggaaatttcacatagtatggtatgcatctttgcaataaagaggaattgaaaaagaaagattccgacttttttttttgtttcagaatacgtttagatcattagcaataaatacttgacacacacatgacggtccatatttgagtaaagatgaaatatgggatataacatatgacggtccatacatgcgatatgcataaaccaaattcaaataattcactttcagaagtatgtatgtattatattatttaacaaaaatatcaaaacaaaaaaactaatgcatatagagataaatgaaatatgtggtgctcaacaaataacatgtcaagaactgatataataaaagaaaaataaatgattcaactataatagtcgtccaataatagcagttaaagaaaaatattgagttgtcaaacaattcaaaactcaaaaccaaacgtgtaaaggattggagcttacctcagtttgtctaatctagtgggctcaggactattatagacctcctaatccaactattattattgttttcaacattttattttctatcattttgtcatcatttttaatttttttgttcatacaaaataaaataataatacaaattcaaaaataatcaactgaaaataatgttctgtgaaattccaatattccaaaagggtctaatatctgatttccccttttcagatcactacccaatatctaaaaacttaagtagtcctaagaaacttcttaccttatgttaaataacaaaacaatgagtttcaaacttacttgatcttaacgccgttgttaaagttgaatctagagacgtttctttggacccaatctttagctctttgatagtttcccatcgctaggagcagatcattagggatagccaccatcacttcgacgccggagccggcgagagctcccatggtgtttgtgtcggcatcgaacaacttcactttctgtatattgttgtctttaagcatctccaccaccgtcttcggcggtaactgatgactcgccattgttccccagtttactcccaaaccagagacaccgccggagagaaaacatacggcggagatgatgataaagacaacggcagagttagttatagcactctgttttcgtcgataattcatttttcctttgttttcctctgttttttccgggaaaattttgtgcttggtattagaaaaaaagaaatcttggaaaagttttaaagtttgaaagaagaatctgatgggagaagaattggaagaagtgtaagagatatataaatattttttggtgtgttttgtgttctgtttgtttgttgtagctcgatgattcgaataaagaatagaaatgatttgtttaagctgacaaaaatctgagtgaaggaaagaaagaaggaagaggagatcaaataggtaagagagactatagaaggaagaagaaggagaaacagagtcaaaaccggcctttgaaacagaaaccgaccattaaaatatctatagtttttaattaaaaatatataatttggttaacatatacatagactagtattattaacactatgatctataccatgcatttatagtttatttagacctaaccaacatagttggcgaagtgttagctaacataattctattttaagtatatatgaaatttaatcttttgcacaacacttcaagtttttgattctatattgtgtaagtttacacgtacgaatagagaaaccttataattgcaggttaatatcgctttcatagctttagtatgtctaagtagaaaacgttgattatctttttcaagatcgagtacgtacaaagtacaaacgtattttggagaagtaaccctgatggtgcatgtacgtaaattaaattgcaattaaatatcagaaacatccaaatacaatacatgacgatagatattcttgatttgatagcacactaataaaacaccaattaattcatttaaaaaagacatataattagtcccggttggtcgatcgtttcgatataataaaaagctgattatatcaaccagaaaaatcatagaacaaaaatttgaaatttactagttattataaaataaacttttaataaaatatcaatggaattagggagtcgacatgaaaaaaaaaaaaaaaaaaaaaatcccgtacgcggttagatgacattcagtggatatttattatcacaatatgatcatgttgaattttctttaggtcaacatgtcatcaatattactaagctgtgattttcattaatgggccttatctactgagccatcattgggtatttttaacagcactaatgggcccttgtagctgtttcctaaacataccgttaacttccttcgctcgccgaacattgtctctgtcattgagtagcgatcaaagaggcatttcgtcgaacacttggcgagcatagagcgcgatg

SEQ ID NO: 24630 - DNA, 3003 bp, Unknown
  misc_feature (1)..( 3003): 2750-1469P.txt file - cDNA_ID_2182007; gDNA_ID_1972104; Annot_ID_178655
cttctgattttttttttttacataatgagtcttctaattgttacttgttatctcatattttttttcttgctttcatatatatttgatacctaagtttcatacccatatgaaacaaaaccaaacgacccaaaacaagaccaaaaacaaacaagcaagaataagataaagtgaacaagcattgatgaattctcttgtcttattaagacaatgttctgaccggagcttgaagtcggaaacctccgtgtctgaggtcaccttacacatggttaatatataaccggaggtggtcttttccctccttttcctccacctcctccaccaccacctcctcctctcttgttatcaaacccaaattctatgtcccctccgtttcgaccagtgggtttgctcataggaccaggccgcttcatatcgaaaccaaactccacatcacctctttctcttggttcacgctccacaggtctaatctcacggctcttctttgacgatggtttctcatgcttcgaagctttgttgttgtttttgtctttgtgttgctttccaccgcggttgcatagtcttccaaacacacaagccagtgctgccagaacaagaattgcggctagaactatgaatgctgtaccaaacgagccacttgaaccggaggatgaaggcgagaaagaagatgaagtagaagaagaagtagatggatacacttgtggttgctgaaactcttgtggttggtctcccattttattttattttggtatttgatatagatttatgtgaggtatatgctttaggagctctatgatgttgaagactacctcaatttatgccatttccataggaaatgaggccaatgtattaatagtactagcactcactcctttccttgatcattctctgtaataaagtttaagtgagacattgtttttttttttttttttttgaaataaagttacctatagcttacttttgtggaaattatcagtttgttttttgttttctttttctttaataaagaaatatagttgttttttcttttcttttgttatcaacaatgtggctatgtttaagagatgcactttagaggattttctgattgctttgtatgaagagaaagtgggattttggttaagaattttgagatgagacacaatttcattgtttccaagaaagatgaattaaagatttgatgagtgggaagatgctttaccaatcattgactctactctttagattcccatttcccattaatttatacacttttttctctactcttcaatctctaattttcaattccgtagtgcttgaatgtatcttatgtattctatatagtatattgtaataaagttgagctaaatatcaggagaacaaaatgatgagtttgcattttcaaataaaagtaggattatggatccactagtttttgcgaatagtactcattcaccatcaaatcttctttaatggtaagtgttaagtgttaacccttcttgtgagtttcttctaaccgaatctatttactttagttctgtaggtagtcttttagagtggggttccacaagagagaatgtaatcggaatgtatttaacatagggattagtgtaaaacacattttatgttcattctttcacgcaaatattagtttcctcttttctttttcatatttctttcaaactttttgtctccttgaatgtctttttcttcctcagaaaatgttgaagtgttcacatgtcttcttttcaatgccttgcctaatgggatcgacctttagattttgaattttgattctataatatcttggtgagacttcttaaccaattagttttctttagctcgtgcttgagacttatcacttatgtaacgtttttcatatctcttggtttatgttttgtttggttttgatgtttttatgtttcttgtatttctggattttagtttgtttaaaggaaaaaatacttatgcgagattttaaatagtaatttaaaaaaagagaaaaaaaatctcgattagtgcccgcaaacgttagaccgacactgggtctaatgcaaaagaattaaaacatagaagcataatttataacacaaattctagttcatctactcaatcaaaacatccaaactaatggcgttagtgaagtaattacaattttgcgattcttcgcgaattagttgaagaagacgaaagacgagtgcaacttgtagaagcctacaaagtttaaaacccataatttgatggggtcaaaaagtagaacatatcaatgaaattttttcacgccagtgatactcgtgaactttgtatactcattccatttctaccacatttgcactcaatacaatcttttagaatcataataacttcttgagaaaagaacttggtccaagctagtgaaatcaaaaaggtacgttaaaaaaacaaatatcttacaaacgggacgcagttttcacagtaagctaaaaacggcacgcaggtttctaaagagtggcgaggatttcaacgttagcttaatttttccgcgctaagaccagctaaaaaacgacacgtggcaatcgtgttcctcaatggtctctttcgtccaagaccagaaaagagaagaaatgtggccactctagaatccgtcgcatctcgattcaaagctattgataatttcgtcttcttcttccatggaataacgtgtttaggcgtgtatcacatggttctttctttgtgtgacacaaaaccaacataaagcttccatacgatttagacattgtcgatcgctattgtaagatctggtctgggtcctcgattttggtgaggattgtcgggtggaacaaaactctttcttaaaggctctgcagaaattaattctctgctctggctggatctgatagtgattttacagattgttcaggtgctttattgggctgtgtttcttcgttagtaaagctttttgctttcctttagtttagtgaaatcttaaaaatgtttaactttgcggctttacttcaattgccttatacactgtgcaggtcagaaatg

SEQ ID NO: 24631 - DNA, 3000 bp, Unknown; identical to SEQ ID NO: 9357
  misc_feature (1)..( 3000): 2750-1469P.txt file - cDNA_ID_2182011; gDNA_ID_1972104; Annot_ID_178657

SEQ ID NO: 24632 - DNA, 3000 bp, Unknown; identical to SEQ ID NO: 9362
  misc_feature (1)..( 3000): 2750-1469P.txt file - cDNA_ID_2182034; gDNA_ID_1972104; Annot_ID_178665

SEQ ID NO: 24633 - DNA, 3000 bp, Unknown; identical to SEQ ID NO: 9356
  misc_feature (1)..( 3000): 2750-1469P.txt file - cDNA_ID_2182102; gDNA_ID_1972097; Annot_ID_178623

SEQ ID NO: 24634 - DNA, 3000 bp, Unknown; identical to SEQ ID NO: 9350
  misc_feature (1)..( 3000): 2750-1469P.txt file - cDNA_ID_2182114; gDNA_ID_1972097; Annot_ID_178625

SEQ ID NO: 24635 - DNA, 3000 bp, Unknown; identical to SEQ ID NO: 9353
  misc_feature (1)..( 3000): 2750-1469P.txt file - cDNA_ID_2182153; gDNA_ID_1972097; Annot_ID_178636

SEQ ID NO: 24636 - DNA, 3003 bp, Unknown
  misc_feature (1)..( 3003): 2750-1469P.txt file - cDNA_ID_2182177; gDNA_ID_1972097; Annot_ID_178643
aatcccggtacgacaaaatttctggctttaccaatcgtcgaagcagatgaaacaacgaggatcataactcatttaggatacgatgaacagaaggatgtattcaaggtgttatgtacaaggacaaagcccgaaactccacatcttgttttgacggtgggatcgggtaaagaaccttggcgagagatagtatgcaaatttccgcacacagtaattggtgctggagtattttacagaggaactttatactatcttgctgcttttcactcgaaaagtatcataatgaccttcgacgtcaggtctgaaacttttatgcccattacatcacctgatggagtcgatttgaatcaaggttcctggagacttgtcaattacagtcaacaggggggatttgcgttagtgaatgaatcaagaggtttcatttaccaatcgaatggcggcgatgcttatcttgaaacgtgggtttggaatgtcgatacaagaaaatggtcgatgaactccatcctgattcgtaaatggaaagattatgctcaagacaatgaagattatgactaccgtttccgaggaacccaaggaacatacgaacttgtttttgcaccaatcagggttaaagaagacggatcactcactgtcatcttatacaatactgatacacaagcattcagaagatctaaggttcaaatgatgggtgaaggtcatgagtttcgatttgtggacaccttcttggatcatgttgatagtactctgcttatatgaagatcaagagttggtctgtattcattaaactggttggttgctcaagctaaatattctctttaagtactagtactatgcttatttagtgggattgttctttcgtattcgcttctattgtccttgttaatctttatttatgatgttgctaaataataataatgttgcctctcaagtactggtcttattgggattgctagttttcatttctatataatttagttaaactttatttatgctatataataatgttttcattctggtattagttggattggtggtaaatgattgttcagctctttgtagtttgtgcgaaatgatcgttcgtctttcactcagatggaactttcattagagagccttttgatgaaacaaaagttttattaagttttataggtcagcctcagtactcaacccaaaaagttgtaaaatctattaagataacagaggaggaactaagtcaaatcttttggcacaaaagagtactatttacacacttgtatagacatattactcttctgttttacaactagcagtaattcgaccaaaagactgaacaaatgtttcaattccaataaaggactcatctacgactaataccatgcaacatacatatttccttaatcacatccatcataatagtgtcttgctcatgtttctcttcatgttatccttccaaaggttcagaatccacctcttgatgagtgttacttaccggtgaaatatgacctgaaacttttagtgtaaaaaaccataacatgttttgtagctttggtttcagatgtatgagtaagtcctcctcctcagccattccttgtggcttttcttttacgaattcttgattcactgtcttcatttattcggaagagcctcttgactttagtgccgactgcttcttctagctccaactgagtgtactcatccataagtttttctggtgttagattcagacaatgaccaacactcgcacaaccgactttagttatctccattctttcttctgcactgttgttctaagtgttgtgttcaaaaaagtttccatgtaaagttgctgcttgtacttccttctctaaggaacctttcacatcatcatctttgtttgagtgaatctccttccaacattcaactgagttttccaagattgctgtgattaaaatcagaaagaaacacggattagaacaaaattagtttagccataaaactgaaaaagtaactcaaatcaaatgaatacaagtatataccttctatagagctacactctcagatctaggagtgcaaataagagtttctctcttagttttggtagttttctcagcaatagatattgaaacgatattcttaacaaggtaacggccagtagacacgactagctcagcttcagtgctgctcactggtacttgcactgaagcaggtgataagcgcttgacaaaaagtacagagtgtgatgatacttcctctttgtcctccttaactgcagatattaaaactgtgtctcgctcaattttctcttcacgttgtccttccataagttcagaattcaactctttagtgcttattatttgagaaactatcaactggtttttccagtgtagaatccagaacattctcataatcataacagatcctgcacctttggtttctgaggaaataaggtgaatcatcaatcattccttatggcttatccttaatgcactcttgattcattttcttcaactactattggagcctcaaatgaattatgtctcgaagagttccttgtcaatctaacatttagcttcttgaatcttgacattttcaacagaggctccatttcgttcacagtcaatactggaacaacttttctgtgaattactcattgcttccagtattcaaaatgtatatctcagagaaggacaaatcacgtcgcaacgtaataattttttgcaaataatctaaattaatctaagagtcatttttgaggataaaatcgagttactgacatcttgtgtgtctgtccttcataccaaattatccggtcaaaaagccaccacaccggaaaatattattttcttatcatcgccatgttttgatttttccacgtttacaccttttaatctaaaaatcaatatttctggaagaaaaaaaaaaacaaattaaaattgtcacacaaatcacaaactgaaatctcaaaatcgaaactaaagcttctcagatctctaactatagctcaaggcggaggagactgagatcgatcatctgaatcgccgaaacatg

SEQ ID NO: 24637 - DNA, 3000 bp, Unknown; identical to SEQ ID NO: 9392
  misc_feature (1)..( 3000): 2750-1469P.txt file - cDNA_ID_2182186; gDNA_ID_1972112; Annot_ID_178793

SEQ ID NO: 24638 - DNA, 481 bp, Unknown; identical to SEQ ID NO: 9394
  misc_feature (1)..( 481): 2750-1469P.txt file - cDNA_ID_2182260; gDNA_ID_1972113; Annot_ID_178802

SEQ ID NO: 24639 - DNA, 3000 bp, Unknown; identical to SEQ ID NO: 9407
  misc_feature (1)..( 3000): 2750-1469P.txt file - cDNA_ID_2182263; gDNA_ID_1972113; Annot_ID_178803

SEQ ID NO: 24640 - DNA, 3003 bp, Unknown
  misc_feature (1)..( 3003): 2750-1469P.txt file - cDNA_ID_2182279; gDNA_ID_1972113; Annot_ID_178806
ggcaattgataataaatctttgagaggtgtatggtggcaggcagattcttttcgtgtttgacccattagattagattttgtgttcggcgttaccctaaaattctagtatcttactttactttttctgccacaaacactattaaacgacctttgggtcctaaccaaacccacatatttgtttttactgttgtccaaaactaatttctttgaatcttttgttagatataaaacaaactttattagtgtataaatatataatgatagaacatttacgaaaaaataatgtgatgtaattgcagcgattatactagagataaatcatagaagattttttgttcaaaaaaaagtatgtagaacatttaagaaacaatatattagtaattaattgcagggatattgcaaacctttattattattaaatatttgggaaatttgagatttgattatttcattccacaattacgtggattaaaaatcataactttattttagtataagagactagaatttattctataatataatataccgtagatatataaaatttcacacaactctaactaaatcaaccaattcgacataaataataaatttggtaactgtaacaaagaggcatgagggtcgtgtgatgagatgggcaatgggagaagagtttgttttcatatcggtccatttgtcatctttgttggtgtcttaggattcaagactcatatgccttatatgtggaacttatacaaacacggtgtccccgcctcgacattgaatagcaagaattttatgcttcacaaagaatcaactaatatagtggaagcgacacacacagaagccaaaaaagacgacaaatgcaattaagatcaccattgaagacattaacaacaagcttgatcaattttgcagctgagaaaaatgaaaaaaaattgcaaccgacaagaatgagaagacttcatagaagactagtttcaaatcctaatatatgttttagacaagttgttttgatttgattgacttattttttatttgttaattttattagaattttggacctaaatattattggagcatcaatttgatttttagattaaaaaattaataataaataataaaaatgtattcataatatttacaaagtttaaaatatatcgataataataataacagtttttagaagttaggttttaactttcacccaaggaaacatttataaaaatataagtaacattataaaacactaatgaaaactacatttacgaatttgggaataaagcgagtgatgggtcaggtacaaaaaatagaattaatactgatatttgacacttacttgcagataagaaaattataatactttttatcttcattcgatactaaggtttcaaatatttttttgagacgtgtacgagtcggataacagatcaaatttggataacaaatatgcctaatcttaacttataattatatgtaataatttatctaaagatattgttttataaactgtaattcaaaagtgttaatattgattagaaaaccctttcacaaaaccaaaaaaagtgttaatattgattatcacttcgaatttgagaaagattgaatatttagtaaggaacgagatacagtttgttggctaataatgggcttggagccgtgggctattcacaagctcgggcctggctttttagatgtccagattaattaatatacaaaataatcccaagacaaacactactatggtcgtactcggtgaattcgtcatgtattatgttagacgaaagaaatatgatcatagaaatgatttcgattagcatcataatggaagtccaaaatcgtatatgatgaaaagagaaagatgatcgttgtaataaagcatgcaaaaggataatttaacataaagatcatggaaggagttaaattttgtcaacaattggaacattttcatttatgttctttcactaaaaccaaacgtaggtcatcctcactcatcacgttaaaaactgtggtagacaaatcaattcataaacatgtgagataagtaattgagcaccgttttgttatatggttccatatggtgtctataaaacatagccactaagtaatcaaccagatacaaacaaacgaatttatttcaaataattcacaattattaacaatttcaattaaaaatttgtaaatgataacatggtattcgattcgatcataagcattatttgagttaaacaatcatatgctcttaaatgttaaacttttttcaagtaaacttaagatatcccccgccggtgattcaaataagaaaatcaccgtacattcaaaaagagtgtatagctgttgtaatgactaatttagtgattaaaaagataatatggttatttaggaacagacaaacggcacgcgtggcgatgcttcaacggtggtctgaataaaacacatgggttagtgggtccccactccacagcctgtgttcaccttttgcttaaactatcttctaaatcaagtttgtgtttgtagttttgacacaaacaagttattcatgttttgttaataacattaactagatctagttaattaagactactattttgatttgaaagcaatcatactagtagttaattaagactagatctagttaatttagccatccaatcccgcaaaatttgtccaaatagtctcatttacattcatttttgtatgattgcattaaatgacttagtaaaatggcacacaattaactgtttatttggaaacaaaatataggcaattaacacttttctctgactaattgacattgacccttaattttatactccaaatattatctctcactaactccttcctatttagacaacaccttacacgcaaacaaaaaaattaacacaaacttataaatagcgtttcccatctcacttctattcaaagatcgcatcaccaatcgcagtcaaaagaaacgcaaacgcgatctctctctcttaaaaactctgattcattctctcccgcagcagcttttcctaatcgatg

SEQ ID NO: 24641 - DNA, 3000 bp, Unknown; identical to SEQ ID NO: 9406
  misc_feature (1)..( 3000): 2750-1469P.txt file - cDNA_ID_2182283; gDNA_ID_1972113; Annot_ID_178807

SEQ ID NO: 24642 - DNA, 3003 bp, Unknown
  misc_feature (1)..( 3003): 2750-1469P.txt file - cDNA_ID_2182291; gDNA_ID_1972113; Annot_ID_178809
ttgaagttattgttcatgaagcttatggttcgcagattcttcattggaaccaatgggtcgaggtttagtttcccggtcaaacccattccctcaagttgtaatccccaaacgtaattgctacaaagaacaccaaaccaatttgctgtatttccttgacatggtgatgataatggatcccaactacgaaattctgaaccatttgctaatgtatctttgaatcgcaagagacaatctgcatctgaatccggcacaaccacctgagacattgccaccggacataacacgctgataaagatgatgatgaaaatgcaagaaggtagattcttcttcaaggccgtgttacacgcaagcgtaaacgggtcctcccaattgcgcattgcggttacacgcgcaatggaatcgatttgattgatgtgaaatctcttgttttcttctttttcttttttgtctttcgtgatcgccaagaaattgtgtgaacggaagagagaaaaacaaaacctaccaagaatagacaaagcaaagtatttaaatttgcaaaattgtgattatttttttttggatttgtggcatcttaagattattattaggtgagagagttctttggataaccattcaattatcttgttttaactttttaagttatatatacatgtaatcgttgttgtactgatttgtcatttgctttagttccaaccaaatttatttttctctctatatgagaattattttggtataactgattttaagaatcaggcataactggtggattgttctatatgatgatgataatatctgaaccaattaaacaagtaatgtgatataactcggtagagttttagagatttctgttttatcaccagttacccgttaaaaacaaacaaacaacatgttttataaattaatcgacaaatatggtcagtcaaactaggagtaaaacttagtagtctcttaattttcttttcaaaattctagtaatgaaattataaaggatgactttgttattcctaaattatgtgactgcgcacgattaagagttgttattttcggacagtgttactcgaggaaagacataaaaaagacaaaagacataaacaatgataaaattaaactttatggggagaaaatcaaatgtaaaaaaatgaagaaaaagaaaatggaaggtcaaaaagttgaatgctgaaattgttcttctgaaagaacgcggaattgggttaaagagctttaaagtgttggtgggccgacacgattggtcggcatgaaatcttaaggtgtgaacctttcaagtacacatttctgctgcttatgcagtgtccatactccaatttcggttcgtactggaaaacatactaaagtggatgtatatttgataacagtttttgtttttgtttttgaatactagtattatataaaagagatttttcctagtctactaatgtttcaatccaatccattgtagttatcaaactagttatttatgggtattcaaagctgataatatggtactgcggggtagtagtataatactaaataattacttacgaaattaataatgaaatgagtaattatagaatgaatgcatataattaagtgtttttttttcacaaaagaaagacgcctgaatttaataataaagtgtattaaatattaattcacatttgtcgtaaatacgtggattgtaaaagtgtatcaatcgtatgtatgtaccactggttaaacaaatgtatgatgcatcaatagtcaaactaaaaaactcgctgatctttgaacacgaagttgaaaaaaaagtcgaaaaaatctcactgatgtatgtaaaaagaaaatatgttggtaaataaaagaaaaaatgggaggataaaaaggcagggaataatcacaaacttttaggcctaaaaatgataagtgttggaccaacccatggcttgcacgtttggtctcatctcgttacttttgttttcgatctcatcgatgtctgcgtctgtgcggaccattttacccttgccttttattacttcactaaaagatgaacacacgaattatttagacatgcggcacacaattttattacggttaagtttacagttttaaggcgaaaatatatcgttatgctttatgctacattaattatgtatagtagtactccctacccaaaacaaagttacgtatagtactttgattggccatcgaggactcaaggtttactaaatagaaagtaaaacaaagagatgtttattgcattcgtcgtccacacatagaataatcaatcatcatcatgatttgttttacattcttaagttctcgtaattattcgtttcgtacgtttttttaattttattccaaagaatttaacattaatattttgaagaaccatgtgctactagcctactattatactcaattgacaacaacccattttattttgcttttgctcgtgtttcattcatttcgaacgattggatttacataaaatagtctatacacaaagacaaaacaaaatcgctttttttttttttttttttttcattttgtatactattattgtggaaaacgcaacatttatatatcatactattgatcttgcatggttccatgaattttctaggtaaaaaaagtgtgttaatagaacaaacaaaactgttaaaacatgttgaattacttaatgcaatttgactctggtaaaacatggtcagccacgacatttcaactactctcattaactcccaaatgtttcatcatttaatatatgaaaatcattatataatactcgtatgattcaattactcagataatagtgatgtaatgcatgacacttgtttttggaattttattttatttccagttatatattacagttgtttactcgtcagactaatattgactgttattagaaataaaggtacttaattcttattctttacgcgctacaaaataagcaacaatggcaaaaccgtaaaaatgagtagtcaaaggggtatttggttttagaaagagatgaggataaaaatg

SEQ ID NO: 24643 - DNA, 3000 bp, Unknown; identical to SEQ ID NO: 9401
  misc_feature (1)..( 3000): 2750-1469P.txt file - cDNA_ID_2182327; gDNA_ID_1972113; Annot_ID_178821

SEQ ID NO: 24644 - DNA, 3003 bp, Unknown
  misc_feature (1)..( 3003): 2750-1469P.txt file - cDNA_ID_2182335; gDNA_ID_1972113; Annot_ID_178825
tttattttaaaattaataataagaaaacagaagagatttttttttcattttttctgatcaaaatacacaaaataatttgtttggttgttaatttttttgttgtcataatgttaggcctgggatttcggcattaaccgtttaaaccgaaccggacaaaccgaggatttcggttttcggttccgaaccgatttactgttataacccgatcggtggaattttaaattgatttcggttttcggatttttcggttcggttcatcaaaaccgatcggtttattcggttaaaaggggataccttataaaaaatagaaaccctagatctaccacttcatattttttgtttcctcctcacgaacctttctttgtcctcttctctaaccttttttatagtttttatcttcttcaatcttcttcttcttcattcttcttccttcttctccttgtgttccttcttcttctccaccattttctttcgtaggataccttctatcaagccgccacgacattaattctctccggcatcgactttagcggcagcaatttatttcatggatttctacatttcttctcgacaccgcgtcgcacagatccatcttctctgttacgttgttgttcttctttacacatcttctctgttacgttgttgttcttcttcacacatcaccgttgttttccttcacttcacagatccatcttcactttactccatccgtattaccgtcaccttaaaaaagtgaacaccgaaaacctagatctgggtggtggacttgagttgatctcaggggaaaaaaacatttgggcttttaaaatctaaaaacatatttaggatttgaataacttaagcccattatgcacaaaagttaagcccagaatgcataaattgacccacaacgatttggttaaccgattaaaaccgagaaaaaaaatattcggtgcaatttcggtgaataataaatcttattaaccgaaccgaaaaacccgagtaccgaaccgaaccgaaccgaacttttattctgttcaattcggcagaattttgtgtagccgaacaaaccggaaaaccgattaaaccgaaccgtttaacccgatttaaccgatctcccaggcctacataatgtagttaacttacgcttctttatcaacctaattatcttgaacatggccaataatagaaacaaaatgattaaacatatgacaaaaataaaattcataaaagagagaatttaaagttttgtcaataattggttccactctaaatattaacgatgtttttttttgtatggttaccaaacaatattgttttgcatttctaccctctatttgtataatattaccgtcgtgaccggtcgtctatatcttttactttaatcgcactttatttcaaggtcagttacaaataggagatcaccaaacgtaactaaatttaaattccaatcatttttaagaataaaataaagtagaaaagagtaatacaactagtttgacctttgaccgttcgatttattaagactctgctttgaattaaatttcaacggcgtgctctttttgccgttgggaatctctctctcatcacccaaacattaaataattagaagaattcttttaaccatcggaataatttaattagcaataataaaaccagtccatgatctaattattgataatgactcgtggctaaatctagtccaataaaccctactgtataggggttcaattgtaatattcacctttgttttgctcctttttgtaccatgccctacatttttagccaacttggcaatattatgtgcatttttttcacattggcattattattttctgccagccattattgcaatttttattatgtaacttaaattaatttatttcacataaaaacatcttaagtttaaccgttttatgaacagtatataaagaataaatgcaaacggtaaaaatctgaagtatataaattataaaccgttggaacatatatacttagacaaaaaaaatatacaagattactataaacgaaaaaaatttctataaattttttatttttagaaaatttaaatggaagattctatagttgttaaaaagtttgtaaatatatgagattattaaatactaaatagtattcgaatgtcctttggtgtatgaatgtggcgaacagcagcataaaagctggcaattttaattttacattatagttttttttttttaatatcaattttgtttgtttttaaaggaaaagaaatgtttaaattgttgggaaattaaaatatctacaaatggtgagggacaaatagcgtcagagcccatgaaaacgcacgttgcaatttaagaagaagaagcaataaccaaaaaaaaaaagttgaagaagaaaaaaaaatgaaaatgaaaaaattcgttcttccccagtttgacagctcgctgccactcaacagtaggacccataggtttcataatatttacaagtttgaccctagtaggggtctacttcgtcctccacctctataaccctagaggttctccgcgttttggtctctctctcagattgtggtcacgtgacttgacacgtcacctgcttacccttcgctgacgcaacgcctctctctttgcctttccagtttccaccattacaacgttttttctttttctcatcttatttaatttcgcatttaagtttatgattgattgcatttaattttaatcaaatttttatccacggtgttgaatagttacagatttgagctacatttatatttaaacacccgacttgtattgtctgatgtatataaaactcaagataagaataacaaacaatttacaaatgaatgaaaaacttgacgggccttatattatatttcctcttttggaaccacgatttataaggcccagatatttatttattaggcccagatataaagcccaactaagttatcccgttcaaattcttacacgtcatcatcgtctacgataaaactgcaaaaggagatgaggtgagtgaggggagggagagagaatg

SEQ ID NO: 24645 - DNA, 1534 bp, Unknown; identical to SEQ ID NO: 9397
  misc_feature (1)..( 1534): 2750-1469P.txt file - cDNA_ID_2182351; gDNA_ID_1972113; Annot_ID_178829

SEQ ID NO: 24646 - DNA, 3000 bp, Unknown
  misc_feature (1)..( 3000): 2750-1469P.txt file - cDNA_ID_2182382; gDNA_ID_1972118; Annot_ID_178854
acaaaactaatgtcgcggcatgtagccaccgtttcgcccttaccaacttcgtatgtaataaattgctttaggtacgttcagttcactgatcagtataaacttattaaccaatcagattcataatcaaattttaaccaagatggtcttcgtattttcttaaaaacaaaggcagaacataatgcacacgtcacatgtgtattgtatgtataatttatgatttatgtttatatgtgtatatatactaaactttttttttttttatatactaaactttggctagctttaggggcaaagtgactaaaattaaaacgtgtgttatgtattgtagtctttatattgaaggtcaataacatcaccttgacattttctaataacattaggcttcgtgatttgttcgtatggggtaaaaaggtccactttgtacgtatcacgtaacctccagttgattttagtattacggcttggttagatttttagaatgttatgtatgcaactttctcattttggtcggttttgttggaattcttgcatatgtatttttgttgaatatgtagcatcgaaatggaacacagttggaaataaggtatgaatggtacatttttcttattgatggtgtgaaataaatgagacataccaactttagtacggttaccgcaaaaatgtacctattttgtttacttcaaaaatgatgttccgctccaaatagttgtactactattttgtgaattttcaataatgtgatttttttgataaaacaataatgtgattttgataaacggtattaacatttccgaagggtaattaatatgagtgaaatagttattgtattatttcaaccgcaaagactaatcatttttgaaaccatataatatttgcttgcatatatttttctacaaaagcatagatgcatgaaatgtaaccaagacaaacgaaacatgggttatggtcaagaagatgactatgcgtactacttacatacacatttgtccatttcgtcatcgacgacatttacgtcccaccctcctgctttaagcaacttcctacgtttttttcttccttttttttgtaatttttttttgtacttcatattcttttattttgaatttaatttatatataatattgtgggatccaaactatatttaggagataggaaacatttgggtataagtgatctcgacacatttcacaaatggctaagaccatacgcttaatagcttattgtcttcgtatgttgtccacaaagtttgtatagcaatgtagcgttaaaaatattatcgttttgtggaagcattttaactttaatagttagccagatgaccagatcactagaagatattacctagatctaaggttaaactcaaacaatgaagattacctgagttcaatatttctggaatgttttttttttttgccggtatttctggaaggttacatcatggtataatgtattatggattggattatccatatgtggatgaaatgcttcttttgtgatatgtatatatatatggttatatttttcaaattgtaattcgaattttgaagagatttatatttttaaaagtatcaagaatcccgagccagtaattttaatgggctaccacatagggaaatgattttgatttgttttcaatacgcagcaagaaatcagaaagatatcaaaaagtaagaggacaaactggaaagaagcagaagcataggggcatgtgtaatgcattatcattacaaaaaattcttttcagaaattgcgtgtaagtattagagaagaacaaaaagaaaaggaatgaattggaaatggacgaaaatgcaaaaaggaaattaggggaatgaagtcaaaaggttggttcaaatacgtacgaaggaccattaatatgactttctaataatcagaaagtaaataattacataacacgaaatcccagaaacaagattttttttaaaacaaggaaactaaaaaaagaatggaatgatgatcctaaggtcaaagcttagcagttgggctatttttcatttttcttatttttatttattttaatttggtctaaataacctatgatgaaaaaagtgtgacgcctagaggaaacttcttcatttgggtaaatcccaaatcccaataaggtaattcttgtaagcaattaggattggacaaaacaaaccaaaagcaaatatgagattcttctacaaagtagtccatatcttaatacaaatttggtgctggatgatattttagtggctgtcgagattaagtaaagatgatagataatcataaagtttcacatatttatatgtaatttttaaagcatacaactttcatctgatttttgtaaagataaacggtgattaattaatgaaataatgcttcaatattttaacctctttattgtttctctttctctggttaatgacgtttcttcgacgggagtggtccatgtattatggataccaaccaaaactcgaaaagattcttgtagagctattttctactaatgcatggaaagtcaaatggatgataaatttgtgttgaatatattttattctgttaggtcaaaaacacatgtcacctcaaactatataaaagtataacaacattccagctggttactaattataaaataattaaaatattatcatctttcttctttctcgtccaagaattacttatgttatcacatcacacaattaatttcttgagttaagatttttctttagcttctctaatatatacacacactgacatacatatacacacacatataagcacgagttcttccaaaaagagacaaaggagaataaatagtaggggaaaagaaacatttatcctctataaaaacagaaaccttttgtccttttatatctttaaccttcactcacaaaatcacaatcctcccttagtgttcttcttcttcaacatctttcttcctctacagaaggcaaaaaaaaaaaacgttttctttttctttcaagaaatcaagatcaaaagaattagggttttcgaatg

SEQ ID NO: 24647 - DNA, 3000 bp, Unknown; identical to SEQ ID NO: 9414
  misc_feature (1)..( 3000): 2750-1469P.txt file - cDNA_ID_2182394; gDNA_ID_1972118; Annot_ID_178857

SEQ ID NO: 24648 - DNA, 3003 bp, Unknown
  misc_feature (1)..( 3003): 2750-1469P.txt file - cDNA_ID_2182405; gDNA_ID_1972118; Annot_ID_178861
gcaggtgagacctacttctttattattatcacccatatttttttgaggcatatttattatttaatactattaacatataaatgatcaatacattagtgctgttttaatataaatagtaagttaattgaataatctttgtgaataattttcttatatttaaacagacgaatctccaaattcttccatcaatatatgttctgaagaaaaatcctcaatttcgtcgagaaactctttcgaaccatcctcgtccacgtcaagtaagcatattgtattttcttccgaagtagtgaattatatgggactttttcgtttttgtttatgcgtaattgtccacagtagctataattaaacaaatcaatcatgaaatttcacttttattcatttgcgttttgcgtttataaaatatttaatattaataaaattatgtgtttctaatcacatgcaaagcattttaaacacaaagtccgatcccgaataaacactgacgtaacacttgtgcattacagaaaagaatgactatgacgagaagaagagggtggtgtatccatttggagtggtaaaaccaggtggtcgagaagaagatataactctaaatgacattaataagaggattttaatgccatcggctaggccggttcgacatccggttggagactttgcatgtcgtccgtgtgtctctgcagatggaccgggtctatcaggcaaagccgtggttgcattcacgaagatacaaacattagggaggggcacaattactattataagaactaagggatgatatatcatatatgtaattaatattggctattagaggggggtcgttataatatgtactggagatgtttcaaaaagactaatcattggttgacatgttcaaacctattgttgtatataatgagaaatggtgtatattagtatacatgcttttccattttcttagaaatcttccttctaattatttagaaacctcttaaaaaagaatcaagataatagatatcttagaaacttactaaacaaattttcttaagaaatcaagattttgtatgtattgacaaaaaaaaaaagttctcttctttttttcgtttgatatattatgttttttgcatgttcgtgctttttgttctttaccctttttcccctagccaacccttttgttctttagtaaaagaaaaattcagtagacaccaaataaataaacgaagcgtgaagaagaataaataacaaagaaattaaagcaaaagagaagaatatgctgaaaagcaagaacaaacaaaagagaaagagagagtatttataagtaccttatcaggaaattctcaaagatggttatatgattttaggcaacaagctttcttatctatatgttcgaaatacttaaatgattattaattattaccatatagtcaatattcttaatgtatcatatcgaaaaatctaaagtggattttacttttaaaatttgaattgaaagaataaacaagtctataattagtaattttaaaattaccaagcttctactacaatttttgaattataacaagtacaatgaatcattttgtttcagcaaatttaaatttcgaattagaacaagtattgtctccaaattttattttatactaaaccaccaatgtataattagtttaaattaaatgaaactaaaatataatataatacctattttgtaagatcaatgtcattatgggcccgatggtaagcccaggtcgatttgcacacagtcaaatacatgacgtcatataacatatatgacgtttgtcagcattttctggtccgggacaaaagatcagcaatcactcgtactgtagtcagtactagtaatgtaatgctcaagtgtttagcatgtgggaaaaataaaacacattttcaggtggttagtgacgtggattggttaataattaacaatcgctagtgctctcttttttaaagatttcttgaaattaaatggaacaccttttttgtcaatcaaatggaacacctaactactaatttaccggtcctttccattatttttcatctccaaacgaccaagatcaacgtagcttttgaccttagtgggttgggtccatgttggtagaccatggttaaaaacttaaaattaagtaattaacaaagctgaataaacaacaatattttgaatttttttctttcctcattttttaaaatattgtttttgggggtgagaatagagtgtttttttctttaattaaatagatgaaatacaaaatcaaacatgtaaaactccataatattatgtaactttgacttgtaaataacatccaaatttgataaaacctaatttaaaatcaagtatttatcaaatttcagttcaagataaaatattgaattaacaccagatttaagccaacaattcaaaattttaacctaaaaacttacataatctttttttttccaaataaatttagattaaatatagtatgaatttaggatttttaaaaaaatattatgctattataataaaatatatctttctaatttatattcatgcatttgattccttatctgtatcaaccatatacaatcaaatataagtctctgttgttaacagaaaaaagaaaaagaaatgatttttttataaattaatataatgatgcagatcgttgacgaatcgaaaatagtcggtttaggcgtctagcaacttatatggaacaactttttaagcccaagtgaaaaagcccaataacaaacttgaatacagagtatatatatattctagggtgcggtttcttccctcgaagatcgatttccattgaatccgtcttgtacgcttttagatcacgatttgctccgtccctctcttcttctccacgtcacggcgattctcgcggcggtgctattccttatcggttgagatacggtatgtttcttaggtcaattatgctcaattttgattttcccaatgtcatcagaatctgatgctaatgtgttttttttttttgctcgctgcagaaaatgttcaattcgatg

SEQ ID NO: 24649 - DNA, 3000 bp, Unknown; identical to SEQ ID NO: 9419
  misc_feature (1)..( 3000): 2750-1469P.txt file - cDNA_ID_2182439; gDNA_ID_1972119; Annot_ID_178875

SEQ ID NO: 24650 - DNA, 3000 bp, Unknown; identical to SEQ ID NO: 9428
  misc_feature (1)..( 3000): 2750-1469P.txt file - cDNA_ID_2182451; gDNA_ID_1972119; Annot_ID_178879

SEQ ID NO: 24651 - DNA, 3000 bp, Unknown; identical to SEQ ID NO: 9421
  misc_feature (1)..( 3000): 2750-1469P.txt file - cDNA_ID_2182459; gDNA_ID_1972119; Annot_ID_178882

SEQ ID NO: 24652 - DNA, 3003 bp, Unknown
  misc_feature (1)..( 3003): 2750-1469P.txt file - cDNA_ID_2182483; gDNA_ID_1972119; Annot_ID_178889
tatatgaaaaatggaggaagccatgccatgaaagaacgtcgatgcattcaaaatgagatttgaaattcctaattaaagttaagaccagttgtattagtgttatgcagagtagtatattattctacttggattaattcacagtaaagaagagatatacataattcaaaggcttattgttatttcaaagcaaaacatgaagaggtcacccagttaagaagagatacataataaattcagaggcttataacatgaaaaggtattcgacaatagatgaaatgaaaagagaagacaaagagtacataagaaagcgcgcacacacagacacagacacagaccaaattaatagttaatcattcacttgggagggcgagtagcgtgaactatcccgttttcctttaacagcttagtctccaacttcacgagagacacgaaagcaggccaattctcggtacgattgtgcatttggtcgcagtttgggtctactttcttcaagtaggagtgagcagcagctatgccgatagtgttaccaatgatatccacaaagagtgcaacctcagaggtagagaaactcatctcctttctatgcatccacataaagatctaacaacaaccaaaaaaacaaactttcataaatcctaacacaatgatctctaactagaaaagaaatagagcgatgaatacaaaagttagatagatgagaaagatacctggagagcatctacatgtttgccttccatgtaagctgctttgccgagctgacgagatccgcctgggtgacgggaacacccttcttctcttcctccgcgatgatgaattctaaggtctctcgggtaagagacctcagcttcttgaaaataccactctttgcattctcagcatcacaagaggaagcagaagaagaagctccgttgatctgcctgttccctttgttctcagcagaagaagaaaacggagccgttctcgcgatcttaatctcagcagaagaagaagaaaacggagccattgttctcgtaagcgtagagatcttcatctctcttttccatagatgaagagaacctgatgataccattcggcgcaaggccaacattttccaaaccctaattttgataaccctaattctctaatatataaaacaatcaagttgccttgttaaaatcaggatatgatctctcttatattagtaggttacttacacaattacctacatctttgtcgatttgtcagtttgacttatgaatcagtctactagattgtaaaaataaataaaacgatgaaatgtctataatacccctaactctacacacgtgtgaactttttgaatagtactggacccgggtcaaccacacacagtagacacgagccttcttcttcttctctaagcgagtgaagtaagcttaccagtggcagtgagtgagctcttaccagtgtttagggtcttctgcaattttccttgttttgatcgggagcttgatcaagactactgatgctgagatttacgaaaattgccaacggtctctatgttcccggtgacagtgaagctctttacgcttccaagtttcaagactccactgctactttgacttcgcctatctcgctggtacaaggtctgtggaggttacagtatgggtgataaccttttccttctgcgaggaaagcattgtctcggcttttacttttgttcataacttgtggatattggatagtaaagcctaccactaatggcataacattcaggatgcttcttggtgtgctatgatttgttataagcgaatcactctcgttggctaaacactttgagaaaatgactcttaaaatgctctcttgggctatactggaaacttgctgtgttcagtggatcttcaggtccttgttgacaaccattaacaagcttaaggtaagaataaagaaaccaacaatactttcagtcctttgatgatttataattccataacagactaagggcagtgcatatagatatctttcgtactcatctgctttttctggtctccatcacaaaagccaactaggtaatcatatcaatctctctttaccgtttactcgaccttttccaatcaggtgcttctggtgtgtctactactatcagttttaggtctttgtatacctgatcttatctgctactgaggcttgtaaaagtgattaaaactgtgacatttactctaagagaagtaacctgtttgatgcatttccctaatataccggtgtggaaaagtgtaggtatctgtactcagctgaaatggtggacgattttgaagaagatgaactctcattgactgaaagcgggttgaagagtgaagatggcgttattatcgagatgaatgtctcctggatgcttttattatcatgtttgggaatttaccaagggagaggtatcagaatctatcttagaaggttacatttagctcaagcttgcatcaacatctttacttagagctctacgggttttagtgtgtttgaagtttcttaactcctagtataattagaatcttctgcagcagactttagagttttgggatgtagagctaaccagagtcggtttgtttaaactagaatctttttatgtagcagacttgttcagtacctgaataccagttttaaattaccgtcagatgttgatcttgttggtaataatggagaaacggaagaataattagacgaaacaaactctttaagaacgtatctttcagttttccatcacaaattttcttacaagctacaaaaatcgaactatatataactgaaccgaatttaaaccggagggagggtttgactttggtcaatcacatttccaatgataccgtcgtttggtttggggaagcctcgtcgtacaaatacgacgtcgtttaaggaaagccctccttaaccccagttataagctcaaagttgtacttgacctttttaaagaagcacgaaacgaaaaaccctaaaattcccaagcagagaaagagagacagagcaagtacagatttcaactagctcaagatg

SEQ ID NO: 24653 - DNA, 3000 bp, Unknown; identical to SEQ ID NO: 9425
  misc_feature (1)..( 3000): 2750-1469P.txt file - cDNA_ID_2182487; gDNA_ID_1972119; Annot_ID_178890

SEQ ID NO: 24654 - DNA, 969 bp, Unknown; identical to SEQ ID NO: 458
  misc_feature (1)..( 969): 2750-1469P.txt file - cDNA_ID_2182487; gDNA_ID_1591154; Annot_ID_150595

SEQ ID NO: 24655 - DNA, 3003 bp, Unknown
  misc_feature (1)..( 3003): 2750-1469P.txt file - cDNA_ID_2182510; gDNA_ID_1972119; Annot_ID_178901
atgataaaagtagtgttttaatcattgaaaattcaactaaattgagaaaagtgcatctagaatttttattttctttcttactttagtggacatatccctttggaaattgaatactataaaagaatgaccctagtggcccggacaataacaaagttagaaaacaagaaaattataattaatttacacttgtagatcgtatactataatttacactagcagacagtcacaaacgtcgaggacaataaactatcactaaaaactaaaaagtaaataaaattaaggagaaaacaaaaataaaataaaatattctgcatatttttatcaataatagcaaatcacacagtacgagtcaaatggatcagacaagtgatctcaaactcgggaagaaaatttagcaaaaaaaaaaactcgggaagaaaaattgataggagacaaatataactaaaataaaataaagacaaatcaaaattttaaagtattttctttaacatttacaaaaataatcgaagtttaaggattttatagtttctatcatatgtagacgcacaagtgaaagaaaaaaaaaaaaaaaaaaaacgcacaagtggtatcatccattgttcttcgcaatcgaatctccaatattttatttttattgtttcttaattcttaaaaatgggtcgggttccgggccgactccatctactccaaaaccacatgttaaaaccgtgccaccactcagagctattgtagatctcttttaactttttcataacacttgtagaaaaataggaaacgaatctggtttaaaatgttttttttttttggataaatcttctttatatgttatttaaggttaattacaaaataagaataaaacttttcgttgtatttagaaaaactgagtagacatggctatataactagttatcgtcatctgaccattttttttttttggctaattattatgtaacaaataacaatataggaagttcttacttaacgatcaatatggctaaaagataattgaataagctaaagtcgttggttgatctgatgaaatggttatttcctataaattctattgttacgaaaacgttttagaaagaagaaccgtttaaaagttatcaatcaataaagcaattaatcgaaacagttaaagaagacgattagagaaagtgactgaaagcactgcaagatggcaaatctagacaacgttctttatcatattttttttttttggattaaatatgttgaattggtgaaaaaatgcacatgtttttatcagtcatcgttttccgcgcatctctaacattttcttcattggtttttttaacagaaaataaaataaataaagccaattccgtgtactacatataagaccacatcttttaccaagccaccactccaacccattgcatgtctctttaacctttagttaacattcttactatagaaaatttcgaactgattaagtcacagaaagtttcaaaatgattatacttaatcagttttaatttcattttaagttaataatatatatattacgataaggataaggtttaaaaaaaaaaaacagagtaggtatagataaatcagataatgactgataccacttgttatttttcattgtagctatagtcaaacgatatatttttgtgttacttttttgttgtcagttatctttactggctaattattacgatgtaagtaaaaataggtatagccgagttcatacttataagtcaatatttctaaaagatagtttgaaaagatcgatgagctaaattctttagtttaactgtttaataaaaagtcattggttggttgcgttcaatgtaatggttatttctttcgaaatcaatttttggtttattcagaaagcatatgtaacgtatatattttataaaagacattacgtgaatatttttataaaacaaaaagccattattaagatgatattacgttacttatttaattcaaacgtgaaaagtacaaacttttttaccgcgtgtttattgtcaatttttgccacataatttagctatctagcaaatttatatatatatttttttttatcaccatcaccaaatattaatggtggtattttttaataataattgatatacatctttggtggttgtcagagatgaaaaacgccagtgatagaaatctatagttgtcgtcgttagtgtgtcgagcgtcaatggatcggatcagatgtaatgaatttcaaacaactgaataagatagctagcactttatattttagaaaacaaaatagtttaggtgtagactcttttttttatattaaaaattgttttgccactgacttaatagaacaccaatttgtcgtttttcttttttcttatatagacggaatcccgtgaattcgtgaaaacacgtatatttgttctttttaataaatgtggataacttttaacagattgatggggaacatggtctttgttaattcagtatctcgtaaatttggtcatgtagttatcaaaaaaaaaatttggtcatgtgtacgttttattatatgaatagtattgcgatttcaatctgttaacgttatctatcaaatattatatttcaagaatgtaaagtttcacacatacgtcatttggtttacatgattttaatcaaataatttttttaaatttttttttagtaattaaaatttacgataaaaaagaattgtcgtcataatataaataaaaattggatatgctaatttggttatatgagtgcttctctatatttttaattcgagtgctgggcaaaacaagagtcaacatgttcatttaatttgcttttaaaaaaaagacaagcacattgttttacattaatttatagagtatttggtgcaatgataatgaaaaagcatgtgcaaagaaaaggaaatcatagcacttcctcatgtactccactcactagcgttttctataaaatgtcatgatttgcggtagtgaaaggccaacacaaagaatcattttacctctaaagccaaagaccaacatg

SEQ ID NO: 24656 - DNA, 3000 bp, Unknown; identical to SEQ ID NO: 9444
  misc_feature (1)..( 3000): 2750-1469P.txt file - cDNA_ID_2182561; gDNA_ID_1972120; Annot_ID_178924

SEQ ID NO: 24657 - DNA, 3003 bp, Unknown
  misc_feature (1)..( 3003): 2750-1469P.txt file - cDNA_ID_2182578; gDNA_ID_1972120; Annot_ID_178931
tcttgcaataatttctcgtaggaccgacaaaaaaaaatgaatttaagttttaaatttggttggttcaaaacttaatatcaatttttatggtttagaagaagaattatagctgccaaaagtattttgtccggtaattactaattactctttgtaatctcatttaacttgcccgtttaaataaacagacaaaattaaagaaccctaattaaagtttggcagaacctatgtcccagaaagtaagaaaaaaacaaagtaaactgagaagtcatagtcaaaagacaagttagttccaaccaaaataaaataaaatgtgatatcaagttgaaaaagtgacggatagagaatctatcctttggatcctctcctctatttttagcccttcacttggatctctcttggataactcattaaatgacactatccaatataaccacatgtgtatctgcgtatgtatatgcatgtgtatttatatttagaagcttcctagttttgtctaagaaaatatcttcttgttttgttcctttcagcgctataactcataattctcttccaaagttcttggatttgttccccaaatcaactggagatctaagaagaagaagaagaagagcgaagatcaaaggataaggaagaagagaggaaaatgtgtactcatgctgatgaatcacaacacaacaatctcccttgtctccattgccaaccacattcttacattcgcatggtacataactacatatatacacatactgtatatagtttatacgttttgtatttgatgtaacaatcctcacaactagtggttgattttgttaggttcaacatatgatagagagatgcattctactccgtatgacgcgggacgaatgcgtcaaggcgttagaccaccacgcaagcattctaccactcgttacactcactggttagtctttacaacgttacacatataacctctatatgattcctcaaaactgttcgaaagcttcgttaactaaaaggaattaataatgatatttagacatatgtttcgattttgcttcgtacgtcaaattatataattatatggaacaattgaagaaattgattattgttttcttggatcatgtatgttcatcattatatattcgacataacttatattgttgagttcacaacagtttttcaacgtaactagttaatttatgcagttttcagctatatattaggctttgcaagtgtgctacaaaaaaaattacatgatatttttcccccccccgcagtttggagaggacttcaaagagaaaacaaggacttctttgaaacgtatgggcatttcgtctctcctaggcccttcttaagtaagagattgtgggatcaaatgtcctcttctaattgttaacaaatttcaattaattcctcagtcaacatataaaccacacatcaagtatgttgttatatagttcattttgatgagagttatgttttctttatcaggcggatatgttcgaagatcgccgaggtttgcgaaaaggatataatgaagacttggtttaggctcgtagctagatatataggagaaaaagcttgaactttatatatacctaggcatatgtattacatattcctatgatgaaatactcatgcttattatctgtggtccttttgatgtcataaggttcccctataagattaagcagataagattgattttcgtgtgtaaactagttttaaggttgcttatttagataattagatgcagtctgtttattgaaaaccctcgattataagaggctttacgatttatatatagcaaatgtgtaaaatatattttttaactaaaccatgacgagcgcttactaatttgagtaaatagactgcatctaaataagcaaccttaaaaatatgacactaagactaaaaccaatcccgccggcatagaaaacgaccaatctggttcgaattctgaatactaatttgaatctaaactaaaacactttatttccttttacgaaagaataagtgcaactgacgatcattcagttagttgtttataatgtatatttttaagttccaaacgaggctggctaggtgtataaatgtaaaaaaaaaaaaaaaaaaatggtgacaaaagataggcaaagatttgcatatgaaaagatgttggaaatttggttatttcctttgacaaattttttttttggatattttatttcaaagatctacacgatttcatgagtaggaaataagagttggatatttgagcatattcctcctaaaaacataatgcagcaacaaatgttttaacaaagtgacattaaagtccggttatctccggtttaagaaaagtgaaagacggaattgatttgcgctcacacctgttcggttcttttttttttgtcacaccaacagaaatacagaggtacacacatatcctaaaccgaacaaaaccggggttgtaaaaattaattgcgatttgtggcgattccgtttagatcggataaaaaatctgcacgacaaaattttccatcttcctcctcttcctctgccaacttataatcccgtcaaagatctttccttttttcttcttctggtttctttgtggtttcctggaggctctcagcatcttcgagtcgttgcgaggatgcgttagaagagagtctcctctcaatcttcgaatctccaagtaatctttctgtattttaggattcacctctctttttgttctgtttgctcgatacaatgaaattttgaaaaacttcgttaatttatgaaaattgaaatggattctatatcgcaagttcttgttccaattatatttgtccgttagtgcaaaaaggtcttacctttttcgccatcttacagtcttgtgaataattcaaattctaaaactttttgagattcttacagagacattttgtcactctttgcaacagaacagtgtgagaatgggtgaccaatatgtttcttagtggtgatgttctcttttgctttgttggtggaatcttaggactgtattgactggccatg

SEQ ID NO: 24658 - DNA, 1204 bp, Unknown; identical to SEQ ID NO: 9461
  misc_feature (1)..( 1204): 2750-1469P.txt file - cDNA_ID_2182627; gDNA_ID_1972122; Annot_ID_179023

SEQ ID NO: 24659 - DNA, 3003 bp, Unknown
  misc_feature (1)..( 3003): 2750-1469P.txt file - cDNA_ID_2182635; gDNA_ID_1972122; Annot_ID_179026
gatttctcaccaggctggatcagatagcttgttaacgttgcgtactttcatcaagatgaaagagttcttcttcactggttccttgctcaagtattctggttttttgtttggattagataatcctcggttgctcactggatccaaaaattaaaattgaaaaaaaaaataaaaaaaatgaaaaaatttaaaactgttttttggtgtctttttggttaggctgcttttaggctatgtggaattacaaaataggtgttaagagcgtatatgatgcacaagaatttagtcactaaaaaggttattccatgatcttattaggtgaagaagaattgtagaaatgaaatcatgtatttaacatttggtttagtgagtttgattgttatggtgaaatgattctgcagttttcttattatcgatgataccatttcgtggaattgcgttttatatttcgcaaaactattgacaataacaaacaaatttcagttgtttacaccctttgtttgtcaaccacaacttttccaatgattccactaatccacgttgctgccaatgtctaatatcgtatcaattatcaaaattgtgggagagaagggaaccaccgaaataataatgtccttacacaacgtcgtctagcccaattaataggcccatttaagcccaaataatacagaattgtggccctggtccgctacgatccgttaaaatctgaaattagggttttagtttaactctccatataaattgttccaaatttcattcgtatcctttccgctgctgccgtcttcgtctctgaggtcagtgtttcagctccttgaacgatatatacgatcttatcgatttcgcattattctatcttaggctatgtatatgactgtcgaacttagttttaccgccgccgatttggcttcgttatattttccctagtagaattaattgtttaggtgtttgctaagctcatttgcatgacttatattggcagataataaggacttgtgtatttttccatcgttaaaaggcatttcaaagagacaatatgtcagggtaagcttctccttcgttgttaactgcatttgtgaatcttgcgttatcagtaatacatgtagctaatttctctgattatccatccctttttcatatactccacgataattctctcttctattttgaggtggccttatctatttaattaaatagcatctgttgttacattgttgatttctgttttgtgggacttagtcaagcttcggaataatcagaaagttgctgtacgagtatcattttgtttgtttagcttgtctgattcttctaatcgcgtctagttggttcttgacaagtttcaaatcagaattgttccatgctttagatgtttcgatgtttattgtggacaatccaagtatatgatatcatgtgttgtgtcctgacttttcagtgatgaggctgcccctgttgttgttcctccccccgttgctgagccagcggccatcccagaggacatggacttaatgactgcattggagttgactcttaggaaagctcgtgcttatggtggtgttgttcgtggtctccatgagtgtgctaagcttattgagaagcgtgtggctcaactcgttgtcttggctgaagactgcaaccagcctgattatgtcaagcttgtgaaggctctctgtgctgatcacgaagtcaggttgctaacagttccaagtgccaagacccttggcgaatgggctggtgtaagtctatgttttcctctttaatactgactcttcatatataccttattgtcgctcagtttatcctcctaaatgaatgtttggttatcaatggcaaattgaatctttgatgttgttgcagctctgcaagattgattctgagggtaatgccaggaaggttgttggatgctcatgtcttgttgtcaaggtatataaagtcatggatgaatcatctaatttttaggattcattgatgatggtccatagttcttttacttaacacgtttctgtgatttcttgtcaggacttcggcgaggagacaactgccctcagtatcgtcaataagcatattgcttctcaataaaatgccatgaagcatatctaaactcggatttcatatgttttccacccccaatgctgttttctcttggttttgatatattatctaatatttagcggacagctcttgagatttgtttggaacatgatcaagttttgttgttatctagactttactcttccaaggccaaatttgcttgagatttatttggctcattactcttcatcataattttttttttcctattaacctatatggtttctacttaactaatatagttgagagagtgaaagcatttaaaatctgtttaccgtatcaaataacaggatatttaactcagcctcgaaaacacttatatttcatattattcatcttgttccgtctgtatacatttttttttttgttaaaggctttggtccgtctgtatacatatgaattgtgttctatcgtcgtcaattttttaaaaaaaaacttttttcgttttacacgaatacaaaaatcattgaaaatttcattcatttcttttgaagtgaaaagctcggggagaaggcgggaagtggaaaagccaaggctctggtattgcaacaattgattataatttgtagagatacttaattatgatttgaaaaaacaggggattacttaataatcgaatgacaaagcacacacatgattgattttagttttgtgttttttgtcaagacttgcataatcgagtttaaagagtagcgtttttttgtttgtttatgagttaatttcgcatgtacgggttacatagagcagttcttgcatgttctacaccgcctttaaaaggcgcaaagttgtcatttttatttccttttcatttgcttccaaccatttagatttgaggactctctgtcttttcttatttcggagaatgttctttttctagggttttgaaattctaagagattttctgaagaagaaaacaaaatg

SEQ ID NO: 24660 - DNA, 3000 bp, Unknown; identical to SEQ ID NO: 9473
  misc_feature (1)..( 3000): 2750-1469P.txt file - cDNA_ID_2182643; gDNA_ID_1972122; Annot_ID_179029

SEQ ID NO: 24661 - DNA, 3000 bp, Unknown; identical to SEQ ID NO: 9472
  misc_feature (1)..( 3000): 2750-1469P.txt file - cDNA_ID_2182651; gDNA_ID_1972122; Annot_ID_179033

SEQ ID NO: 24662 - DNA, 1032 bp, Unknown; identical to SEQ ID NO: 289
  misc_feature (1)..( 1032): 2750-1469P.txt file - cDNA_ID_2182651; gDNA_ID_1563395; Annot_ID_147600
  misc_feature (9)..(9): n is a, c, g, or t
  misc_feature (385)..(385): n is a, c, g, or t
  misc_feature (395)..(395): n is a, c, g, or t
  misc_feature (760)..(760): n is a, c, g, or t
  misc_feature (785)..(785): n is a, c, g, or t
  misc_feature (843)..(844): n is a, c, g, or t
  misc_feature (981)..(981): n is a, c, g, or t
  misc_feature (996)..(996): n is a, c, g, or t

SEQ ID NO: 24663 - DNA, 3003 bp, Unknown
  misc_feature (1)..( 3003): 2750-1469P.txt file - cDNA_ID_2182712; gDNA_ID_1972123; Annot_ID_179064
ttgtgtacatatgacattcttggcagtaggaatggctaacaatatatttgattgtttcaaaatgttctgtaatgatcccttttttctggtgtgtagaatagagtgataaacaatgcaagagcttctagtatcacttaatctgttcatatgtacaagactccattaaactatctgcaaaatataaaaaggttgtgttactatcatagtcttagtgataaataaaatcttaacgaaatatagacaagaatccgttgtagtctagctggtcaggatactcggctctcacccgagagacccgggttcgagtcccggcaacggagtttttttctcatcgtactgagtaattttccacgtggcaggatttagttttactccattattttaccttttggcccctaaaattaaaaagcttgacgtaaaaagcgtgacgcttgcgaaagccgaggcgtgtggtgagtttgtttcccatgtggccttgagggttcgctcacgcctttgtctaaaaggcaagcaaattaagcgacatctattcatggttttgttcggacttgtaaatttatattctttctttctttttttcacctttttgtttgtaaaagcagaatgtgaggtaaacttatcatgtaatttacttttacatacacactagagagtgaacacgtaatgattagctcaaggtttatgagcatgggaaaaaatacaatattagacaccctcaaaatgagatctcgatttcactcttctgtctaagataatttaaacttccataaaaaactacttgtctttagtagatacatataaaaagtagtggtatacggtttctgtttttttttttttacaaagaatttgaaaaaaatggaattgacttgtggatgtgggggtgagtgtagatcgacaaaggcagaacataaacgcatgtaaaaggaaaggtgctttttgtgtgtggacaaggagcataaaaaatgtttaaaagaaagagcattccaatttcaagatttcaagaatcctaaagacataaggataagacactcagtcactcacacttagcttcgccgtttaggtccttatcattgttcaccattgcatgcgtatttttgtttatttttcttttaattgtttttgttcatagacatgtatatagattattatcgacgtaatataagtgcatagttagaaaccgcattaaaacttcaaaatgaaaacagtttagtttaaatcgctagagtacaaattaaaggttgaaataatccttaattatatgtttattgaagtcgttggttcagtttttttttgtgggaagttgagaagtacaaaaaagttaaccaaagagaagtcaaaagttcacgtgggctagctggttactacgtacgtcagccgaactaaaagacacttcgtcggacaacgaagcttcaaccacatgcttagataagtatagtactacggacaaaatcacattccatcaccaaataataatagaggaatattttgctataaaatgtctttcgtgacttcgccaagtgcgttcgcatattgtatcggtttggatattcagagatatatctttctctctgtatacatatataatcttttgttcttttgtaaacgatatagtatgtatgtagagcgtcatgattaaatagtggttaaaaagtggcagaatgaaactccatagataatacaatttgattcctaattttgattagcaagaggactcctcaactatacataccgttatcacttaagacatgaatgcgccaaactatttaaagccacccatgattttacacctactatatacgcactccttcgtgactatgacaagtcggcgaggttattcatgaaatattgaagtgatccacgttctgaaagttatgtgtaacaaacgtacgtagatgactagatgatatagtttgtatacgagttgaacactatgtgttaatgatttactacataggtgtttacaacagaacatatatccatacgaaattttttgagatcgaaggtcacgaaaattatcataaacacatagtgttcaactctaagtataaatgaatcaaaatctaagaataaactagtaaataaaatattttatttaattatcagaattcaaaattttgagatagggagtgaaacacttaagtatatataaccgcaatcgcacgccaaaagttagtgggaaagattggattctttgagtaaagattaggacaaaattaaaccccacatttaagaaatgaaattggaaaacaaaagtgtatttgctaatatcaagaatcaacacaatgagtatgtttgaagatacaaatgaccccacatgcgtgcatgtgttcatcttaaacaaaagaaaagactcattaatctcttaatctcgagattttcaaatctccatcatctctttcctttttctatatcactatcgattaaatgagtttctaaagtaaccaatactgaaattatccaattaataattcactttctaatttcttacaagaccacaattttgcctttatttagtttataatatttaatgtttgggggtatatggtccccttcttccatgtatattctctcgtataaagaagctggtaacttctgcttagctgttcttgtctagctgtgctcttggggttggtttcttttcttcttttcattattttttgtttgaatttggtgttggagataagattatttgagattctgggtttctagtggttttgctcaagggatctgttgttgggtttaggttaatttctggtgttagttctgttactgaatgtggagaaaggaagcagctttaagtgtttgttagaatgtctgagtgaaattgatctgtttttattattatctcgatctgggttttgagggatgaatccaaagtttctttctatctgagaaactctgtacattagggttttgattttagttggagggagtttttttttagggttttggaggctcaaatttccctagtttctttgttgaattctggtgagagaaagaatg

SEQ ID NO: 24664 - DNA, 3003 bp, Unknown
  misc_feature (1)..( 3003): 2750-1469P.txt file - cDNA_ID_2182724; gDNA_ID_1972123; Annot_ID_179068
tatagatgatgatacgaatgatcttgacttcataagttatagaatgttcacaacggtctttacattcaaaattctattgtgatttttttatttattgcttatggcaattcttcggattcattaccgataaaattttagattataaagtcaattggtaaatatggtactaatctggtacgggacgaagttggaatcttaccataaatattagacatgctccacgctggactacaattcttcttcttcatcgactaatcataccaaaatttcattgatatcggattctagtcaatcgtcggatcatcgattttttgaggaaaacttccaaatttctctatgattttttaggctatgaattaaggatttcatttgatttgtgaaaacttgaaagttgtagattacgaattaactccatcagtataaatttaggatgaagttccatggtggttatgatattgtgtgatcaaacatttgacgagagatttacagctttcttcgacgaagaaaccatggactttttttctcatgaattgatctacctaaatggcgaagaagggtttcaaggatgtcggttctcgagttgggaaaagttatttttctatttctatttttcttatttttggtgaaaatttaatttaagtcgttatatagagttttgggcctttaattttgccaataaacgttaaccttttttttttcttagactaatacatgtcttttattgatataatgaaatcaacatttgaatatgtactatatcaacatttaaactccttttgcttccatcctatatatactccttgaggattttcaagctttagaatctctttgtgaccaacaatctcattgcctctgatcacctttttcgtagacttgtacatccacttcgcaagaggctgaagacgaatctctctattaaaaaggttgttccgtagacggagtcttggaacataatactagtaatgatttttaggaaagaacttatgagttggaagcacttgattctctgataatcaagataaaactcaaaatgaattaccagattgcgcttgaagttgttgtttgtgatatatggcctcaaaaaatccacaactagctcaatttctgaagaagaaaacttgacacccctatgcggcactggactttataatattttaggttttggatatttaagtttaagatttaattttattagcatacaaagtaattaaatttaataataattaatactgtaaaagtaaatttcatgaattaaactattttttgaggatcaaagctattgcgttccatccaacctacaagatttagattttgtgttcgtagagaggaaggtaacattttttgtgagatcatcttcaataacaaacaaacataataattagaaacgaagctttacaaaattttaaaaactgaaataaaaatatataaattgagataacttacttgtttcaagaggtgaaataaacataggcaaagatgtaggatcttttgatgttgctttccaaacaacaactacacgaacaggaaatgaaaaattagacgatgatgaataacacgaagcacaaagattagtatacaaatataattacgtgaacattattgaagaaaaaataattgtcttatttttgagttatggagggcacataaattacatgttggtaactatttgttatatgttgattagcacaatagctaggaaaaccaaaacatgtagtcgattaaactaaccttgcgtaaacaactcatcatcaattggcaaagatctatgagattttattttccatggaccataacagaaaaaggagaaaagaaaaccgatgacgatgcatcatagaaaggtccaagattgaagtaaaaaaagaactataaaccataattattacatatcatgcataaaaatcaagccgtgatgtttgagtttcaagggagaaatcctatatttatagaaattttcaacataaggttttagggttttagatatgacggcataaattatacggacataatttttttaatagaaaaatataagtccaataggcgaataagagaattaggattgatagacgaattaggggtgattagagttgattagggttaataggcgaattaagattgatacgcaaattagagttgttatttgtaaaacagaaaagattacattacattttttacacattttttttacatattaaaatatggaaatctcattaatgtaaaatataatcttattaattaataattaataattaaagggggcaaaaacgttcgttaatattctgagagcaaacgtgagcactttgatatataagataaagtttatttatttcccaaatgttacgaaaaattaattccgtcatctttttgttaacaaaagtttatcgatatgcttaaaatgatccaatcatcgaaatttaagtatttttttataaagtcaaattaaattttaaaattttaataatatttcaaaattatatactttttcatcttaaatttaaaaatttgtgatttgtttgacattttttcccaataaaatatagtttcaatttttctattttgctaagatagcaatgtctgtttataatacaaatttggatgtataataaatattttgtctcacaactaacacgttgaaaatcgaccactacttggtacgaaaatagcaaaataaattaatttggggcttttcttaaagaaaattattttatatttttctttaattttgtgtttgtgtcgtccttctatctctaagaagcactacccctcccgcaattgaaggttctcttcgtcgctcacatccaatctctatcgatctcagattccaatttctgcgaatattttcttcccagagagattacagattctagggtttcgaatagttctttccaatctagtcttcttccttttgtttctcgggcgaaatttcccttagggtttcgaagatccgaatctgtggacggagacaattcgacgtcttcttgagctgcaaagatgttctggcgaatg

SEQ ID NO: 24665 - DNA, 3003 bp, Unknown
  misc_feature (1)..( 3003): 2750-1469P.txt file - cDNA_ID_2182736; gDNA_ID_1972123; Annot_ID_179071
gtatatttttgcagacgtgcatactaaaagtcgatctaaagtgttgcattggttgccaaaaaaaagcaagcatgaaattgcagagtatctctggtaaaaaatacttcaaagcttttaattgcgtggctcatatgtctttaaacatgatgatttaaatactttgtttccaatggaaataggtgtagaggaagtggagtataacatcgaaaaagggctcatgacagtcagaggtgacgtagaacccatggctctggttcgtaaacttaataaacatgacagaaaaacagagcttttctcagtcaagtaccagcttgatgatgatgatctaaacagtgattcagaagactactcttcttctgactctactaattcatcttatgatcctaaacccatggaacgtcaattccaagagaagatgatgcagcagaagaagaagaagtctgggatactaaaaatgctttctcttttatggtgtttcagcagtaaatcaaaagttgttcagcctttaccgatgcgaaaccgaaactggcatgtcccatcaaagtttgagaatgttcctcctggctttggcttcaattctactacatcgtcgcagttgcggcctccgcatccaatgatgccctatccaccaatgatgcaaccaccaatgatgcagcaacaacgaccactaatgatgcagcaacaagcacaagttccaatgccacctaatgttaacatgttccagtcagcaccccaaccgtttaagatgcaccctaagttgcattacggggagcagaaacaggttgtcacctaagctacttgttctgttgattatgtctctgatacatatactaagcaaaagaattgtttttaagtttcgtatcttttgccaattgccgatagtgaacatttctcaagtctggcaaacttttaaaacaaaagaacaagggtacattttgaattcatttatgtgtgattctctgcatctcccaaacctggttccataaacatttggataagatgagctttgtttgtgtcacggaacaagaatctcattcataacccaacagagaaaacataaataacaactcaaatctgtgcctattgctagtactagaatctattgtttttgatacagagatttctcttggagaatacttgtcttgagatttgtctgttgtgcttgtgcatcatgttttcctccgatttaatggttgttttcatgttcgccctccaaatctttcaagtatcccatgaacaaaagaaacccgaaaaggaagaatccacctgaagagctccctccaccgcctccgccaccaccaccaccaccatcatcccgaggtgggaacccgtttccaccgtcatcaagctttggggatttaacttttcctgatatttaagttaaggctaaaaaaataaattctgaagatacaaacaagaatagaccagtccgtttctgttaaagcacattctcaagaataagaaccatagcaagccacaatttgagttcaaaataactgtttcatattagctagaatcgtatggttttttaagcccctcttgtttgttagaaacgcaaaatagttgttcaacatagagaaggggatgaaacaatttaccatgagtaggagcttgtgtgattgttggtgattgccgtgtaacggtctgtgtttgtccttgactgcattttgaattctgcagaaaacaaatcagaataagtaaacagctagcgtttcagagacacttaggaagagaataccggaaaataaactattatcggccataagagcaaaaggatcttgttcataaaacaagcaaaatggcttatgatgtgtaattaagttatgtgagcaaaatggtgtgtgatgaagttatcccaacagctaaagatttaaaacacttaaacttaaaggctgcaaagtcatgaatggaacctaccagcgcagagttacatgcaaagactggtcttttattcttagagacgacaactggttgcactgcatcctggagagaagggaatttactttggctccaaggctggcgttgcatagaaacgcttgtaggataacgcctttgagagtttcctattacagacagcaagtagaagaagagctttagaattccattgttcattcaataaaagcaagctcgaacgatgggactaaagcaagaatcaatgctacaacaacactcactaaagctctgagatatcaataacaacaacaagtctagtttcttcaatttgtcaagagcaatccaaactcaatttcaaagaattttccaaagaagcaattgtaaacttaagagccaacaagtgttgagatttagaagagacataccattactcgtaaaagatttctcacgaggagcgaggtacaccgatgtttgtgtaccaatacacaatgatggattcattaccggcataactacaaacagcaacaaaacaataatctttaacctatttcacaagggagaaaaataaaaaaaaaaatcaatttctcataaatcgaatagagaaaaaaattatggattcatcaattttgaaattcgattaatgataaaaacccatagagatttggatcaaagcaggtagattttttgtcgaggaaaaatttgggattttggttgctcctcgaagcttctcgatcatagaggacgaaacgcaaataaatagtttataagaagaacaaaaaagatgaggaacgtgaatcgcacctgaagactaaaacgcaaaaagacggaaaaaacaaagatctttcttagggtttatgtaaaattctcgcacaaatcaattttaaagcgttggcttctattgcaagaatctaaatagcccagaaaataaaataaaaggacaaaatatttctcctttgtttgtcggttttttattttccaacaaaatgatatttgttttatttattattactaaggctgatcggaaaaaattaaaaaccctaatttgagcagatctttccaattgaaagcgaaccgtgaattttgagtctctttaccggcggcgaaaaaatg

SEQ ID NO: 24666 - DNA, 3000 bp, Unknown; identical to SEQ ID NO: 9478
  misc_feature (1)..( 3000): 2750-1469P.txt file - cDNA_ID_2182765; gDNA_ID_1972123; Annot_ID_179082

SEQ ID NO: 24667 - DNA, 3003 bp, Unknown
  misc_feature (1)..( 3003): 2750-1469P.txt file - cDNA_ID_2182795; gDNA_ID_2926134; Annot_ID_197109
atcttccaaatcgagtttcctgccatgtcgatttcacaaaacacgatcagttttgagattagcaatcacacagacaagaggacaaagatagaaaaaaagaagagggaagagaacataagagatgatcacatacctgtccaacaccggcaatcagaaatttacccgattttgcaaaagccaaagagttgacaaatccagtctgtaagatcaaacaaggcattgcaaggattattacttggtgaagtgaaatgcattaatcacagtcacaaacaacagattcatcagacaacactaaggaatataactagtgaacgaaaatttaccagtggaagctcgtacaaaggtcgaattgcattagtttcaacagcccacaaacgcacaaaaccattaccagctccagatgcagcaagatcactgcctctactagtagcaactgcattgacccaagaatttgctgaacagttattgttgactggttcatgatcaccgttttctgttaagcaaataaataagaattagatatttcagagcatcagtagctgcaacgaaacaaaagtgttttataactatatactgcaatgtcaagatccaactgcaacagagatgaaatggggaggatctaaattaggtttcacctaagattccattggtggtaatcccatcaggtatatcttgatgtgcattcttgaaaacgaacaccggtttcttttttaacatgccccaaagagcaacagttccattatccgaaccagacaggtactcattatcactgatgaaacagcagctctcaagagacgatgcaggagctcgatagatcatacgggtgctctcaggcacctataatcatataacaagacttacaaatacagaataataatagaaaccttatgatgatatcttccaacagtgtttacatggaggatagaactattaccttatgatacagcatggttctatctcttccaaccgtaagtgcacgctccttcctcagtgcatcaatggctagaatttcaccctggtgtccatgattttcagttataaatgctttatcttctacgttccacaccttcacagttctatcaaatgaaccagaatagagttctgaagttccgtatctgaaacatagacaagaaactgtgttccggtgacctggaaaggcctgtagacacataattgtaatacctgagcgcaagacttgatgaagaacaaataaaaaaaacactaaacaaaaaccaaatttattatcattacctggacatgctctcgggtacgaacatcccaaatatgaacatgacggtcaactcctccagtggccaaataacgaccatcagagctaacagctaaagcaagagattctctactgtgatttttgttacgaggctccctcaatttcatcccatgcgacttgagaatttcatcacttggccatatgtatttgtcagttttaccagaagatacatcccaatgcataatagtaccatcttttgaagctgaaaatcctctagaatcgtcatccgataaagctaccgacacaacagatcgtcggtgcttgacaataacactaaacccatcagtacttagtggctcctgaaccctgaatcattgaaaaactttaatcaatactactatcaaccaatcttcaaagatatcaaattgacctaagaaatgtacaaaatcactaagtttcttcacaattaaaccagctccctaaaacactaactacccacaaaccctaaattaccaacaatctcaaacctaaactatctaatttgaatacattgaggtactaaatttcttccttacctcgatgcaataagtcttcgaatcctaccactatcctcctgctgcttctgcatcaaactcttcttaatagtctcatcgtcatcttcatcatcatcatcatcattatccgcttcctcacgctctctcctcatcgcttccctccttctattcagcatctcctccgccaatctcttccgcttctctcccgccgtctcatcagcaaactcatcttcatcctccacttccccatcaactcttctcccatcttcatctccgccagtaaatccgttctcttccgcatcagagtccacagactcgatatcgtcgtcatcgtaactgacttttctccgtttcttcggctcttcctcaaaaaatggatccctttcattcgaaccctttttacctcctctcttaaagcttcctcctttcttcttctcgttgttgtacttcattcttctctctctcactccctcttagggtttaacgattttacactttgactcgtctaggtttagcctcagggtttagtggcgacggaagaagctggaaaacgattttgtttatttggtcggaaagtttacaactttaaaccttccactaggttttcttcaggaatcgggtctaccgggttgacccggactaaccaagcccatgacttacctggtctatggtttgagcccattaactatttcgttcttttaaagcagaaacttgggcctttaatttgtagagccgaagactaaccggaccgtcaatttaagtttggttcaatccgatttctgaatttttggttctgatttctgaagagtagtacgtaaaccgaattgggagattctcttatttcagtaacagtttaatacagtttttgtttagtgttttcaatttcggtattttttacaaactcgaatcggatgattccggtttaataaaatcaaatgagttcggtttagctgaatttaaaactgtttttaatcttatagtataccgaaccggaccatccatctaatttcaattgtctaccaaaaccgaccgaccagtctttgtcgaaagttgtctttcttcttccttgttcgattttcgcctcctttggcttttcattctctctctaacttctctatgttaaaattccgaaagctcgattcagaaatctagaagcttcctcgagggccctcgcgtagaaagtcgaactcaaattccctggagacaaagaagaggaagatg

SEQ ID NO: 24668 - DNA, 3003 bp, Unknown; identical to SEQ ID NO: 24667
  misc_feature (1)..( 3003): 2750-1469P.txt file - cDNA_ID_2182795; gDNA_ID_2926134; Annot_ID_138856

SEQ ID NO: 24669 - DNA, 3000 bp, Unknown; identical to SEQ ID NO: 9459
  misc_feature (1)..( 3000): 2750-1469P.txt file - cDNA_ID_2182795; gDNA_ID_1972121; Annot_ID_178971

SEQ ID NO: 24670 - DNA, 3000 bp, Unknown; identical to SEQ ID NO: 15444
  misc_feature (1)..( 3000): 2750-1469P.txt file - cDNA_ID_2182799; gDNA_ID_2926134; Annot_ID_197108

SEQ ID NO: 24671 - DNA, 3000 bp, Unknown; identical to SEQ ID NO: 15444
  misc_feature (1)..( 3000): 2750-1469P.txt file - cDNA_ID_2182799; gDNA_ID_2926134; Annot_ID_138855

SEQ ID NO: 24672 - DNA, 3003 bp, Unknown
  misc_feature (1)..( 3003): 2750-1469P.txt file - cDNA_ID_2182799; gDNA_ID_1972121; Annot_ID_178972
actccacaagagttctttctaatgtgaactctggaaagacttatgcatgcccagataacaaagttaaatgcatgtacaaaattcttcgtagcacaggcatgttaagatatttgcaatacctgatatagtactgcaatagtgggctttgcacatccaaacagaaacttgatatccagaacctgcaattcctcaagcctgaaatttagacaccacactcagtacatcatcattcagttttaaatatccccagaaaaatcatatcgtagtgattctagaggaatgagtatattgaggattaaacagtttatttacgaaagaatctgatgcctggaaacaaatgcacactagaattaaagagtacctgatattaaaagcttccttgagctgtcccttattatcaaatggaataacctaaaagaaaaaccaaggaaatagaacgcatcatcatacatgtataaacagatagattagtggaagttcagtaacatgatatatttaagtaaacaagcacatctgtcaaagtttttatagaaggtaacattataccttgaacaagccgtcatacagatggagtccaattaatctacaatctggatcaattataccaatctacaaagcaattgtcaaatcagaggtaagctacatgcccaccaaacccttaatgacaacgcatattttttgatgaaggaaagtaaatatataagcactctgaaatgcacagtcaagacgacgatattcaatacctgaccattgtctgttggccggcctatacgatcagaaacatcccccattgctctgaaaaaagtcaaaacatcatacagaatcagctgtaaagtagaaaatggtcatctgatatattgcttccaataataaccagtaagatgcaacaattacgccagcaccatacatgattttttccatgctttggatatacagcaatgtatcaattttgtgaaaggtgagaacctataatcaaactctcataaaaaatgcttaatcagaaataggttatagatcagattttgtaaagcaggaatatgctgtaaacagctatctaaaacaggcaagttggtaccatgcactaatctgtacataggtgacgagtgtaatacatttatttctaacaaaaaaatgataagataacggcgaacatgatcatgaactaaaagaaaaatagcacaactggttggttaacatcaactggatgcatggaaaaaaatttatcttttggaagctataccttgtaataagctcagaggactcaggatcccattgaagaacacagaatttgtatctctcagttgcaatgaacaaaaagtcttgcgcttcgccctacaaaagacggtggacaatactatcaacattttaactcattattaagaccatgacaaaagaacacaataagagatatatactcacatggggtcggaacaactccagagtagcgattcttccatatataggaacgtccaacataggctgcaatataggaacatccagcagattcttatattactaacaaaacaaagcatgacaacaaagtttttgaactttatactctaatgtacatggaacttaatccatataagcttgacagaatagagatgtatgtacctgaagtccttgtggggtaagcaaatggatctcgattcgagtacatttcctgagaacagatcaacactgctgtcaaactaatctactaatggatctgatagatgttacaatttaaggggacaatgctaaatcggataaatgagataactttcaaacaaatttacagtactgatagctaacgataattgaaaatcctccatatcaaaaaaggcacgatcttcaaatgtaatttagttcaggaagtaaaagccataccaaaaaaaacacaattctttgtcacagtttcaaaaaatccacctcatcaaagaacccagaggcattaaaatccttatagtcatctcccaaactgaaattgaactacaattttgtttgcaaagtgggtaaatttatgaaaattaactcgtgatgggaaattcattgaaaaccctaaacccaaatcaacagctgcaattcaaaaggggactaattgacaaacaaaaattgataacaaatagaggtagggggagagtttcgtacgcgacaatgagattgagctcttgaggacttgtgaagttgccaacgcacgagtgagtgacactggtcggtttgtgagccgtaacaacgtagttccatgagctcatcttcctcttctttgtctccagggaatttgagttcgactttctacgcgagggccctcgaggaagcttctagatttctgaatcgagctttcggaattttaacatagagaagttagagagagaatgaaaagccaaaggaggcgaaaatcgaacaaggaagaagaaagacaactttcgacaaagactggtcggtcggttttggtagacaattgaaattagatggatggtccggttcggtatactataagattaaaaacagttttaaattcagctaaaccgaactcatttgattttattaaaccggaatcatccgattcgagtttgtaaaaaataccgaaattgaaaacactaaacaaaaactgtattaaactgttactgaaataagagaatctcccaattcggtttacgtactactcttcagaaatcagaaccaaaaattcagaaatcggattgaaccaaacttaaattgacggtccggttagtcttcggctctacaaattaaaggcccaagtttctgctttaaaagaacgaaatagttaatgggctcaaaccatagaccaggtaagtcatgggcttggttagtccgggtcaacccggtagacccgattcctgaagaaaacctagtggaaggtttaaagttgtaaactttccgaccaaataaacaaaatcgttttccagcttcttccgtcgccactaaaccctgaggctaaacctagacgagtcaaagtgtaaaatcgttaaaccctaagagggagtgagagagagaagaatg

SEQ ID NO: 24673 - DNA, 2906 bp, Unknown; identical to SEQ ID NO: 15453
  misc_feature (1)..( 2906): 2750-1469P.txt file - cDNA_ID_2182840; gDNA_ID_2926134; Annot_ID_197080

SEQ ID NO: 24674 - DNA, 3000 bp, Unknown; identical to SEQ ID NO: 9317
  misc_feature (1)..( 3000): 2750-1469P.txt file - cDNA_ID_2182840; gDNA_ID_1972121; Annot_ID_179003

SEQ ID NO: 24675 - DNA, 3000 bp, Unknown; identical to SEQ ID NO: 9924
  misc_feature (1)..( 3000): 2750-1469P.txt file - cDNA_ID_2182888; gDNA_ID_2096292; Annot_ID_195423

SEQ ID NO: 24676 - DNA, 3000 bp, Unknown; identical to SEQ ID NO: 9928
  misc_feature (1)..( 3000): 2750-1469P.txt file - cDNA_ID_2182911; gDNA_ID_2096292; Annot_ID_195431

SEQ ID NO: 24677 - DNA, 3000 bp, Unknown; identical to SEQ ID NO: 9921
  misc_feature (1)..( 3000): 2750-1469P.txt file - cDNA_ID_2182941; gDNA_ID_2096292; Annot_ID_195441

SEQ ID NO: 24678 - DNA, 3003 bp, Unknown
  misc_feature (1)..( 3003): 2750-1469P.txt file - cDNA_ID_2182978; gDNA_ID_1972133; Annot_ID_179125
ttatagcatgatcatgaataagcaaagtcaactaagctatcgtctacattggctattgaagttgctgcctaaacgtaaacgaaaagcatccacagattacggaaaagcacaaaatgagaagatgcaacacttgggttatccatgtgattgatgcccatttgtaaaaattcaaagacaggttcataaaggtagattcaatgataaacgacaacaaagtccaaccacatcttcaagataaactaatttataaatgacttctcctcataacacaaacaccaacatgaaccctcgtggttaagttggcaagcttagccttttcaatcctcgtgcaaagttcccaaaacatcctcgtcccggaagagatggtacctgcgtccatcacacaaacacaaaagttactcactttgagtcaaattcttcttcatttgtaatttcttattcgtttctaaaatcaacccaccaatcaatatgtaaatctggtgttcaaattggcattattaaacattgatcaaaatgtttttaaatcctctgttacaaaattttcaatatcttcacagtcttacaagtaattcccttagttccatccattaatctaattaatggataatgattcctgaacatgattagctaaacataaaggttcaattagatcagatcagaattttatcagaatattagggcaataataagaaagaagcgggtttaacttactcgttctcgccgagcttgacctgtgtaccaccgtactctggaagaagaacagtgtcgccttccttcacagagaccggaatcaatttcccgtccttatcccttgatccaggtccaacagctatcaccttgcctgagttcagctgcaatcacccaaaaatatgtttatttttcagatctaagaggcgaaaatcagaagaatcaaatcgtgaaatcaaagctcttttaccttggaggatttctcaggtaggagaatgccgctttcggttttagcgggctggatgactctctgcaccaagatgcggttgaacgttgggatcagacgcttcatcatttctcaattcttcttctctctcagttgatgaatcggaattttctagggtttctgagtttttaatttggggcagagacacataagacggaaggttctagatcgtagggtttagcgcgacagaaaaaggccaagggttttgggattgtttgggcctataatatcatactatttctttaatgggcctcactcattaaaaaaaaccagtcgcatttgtgtttgtctaaataaattcttggaagtgttgtatgaccttgcagctcaaatggttagttccttccatgattctctttgccaagtttttcaaactccatgtacaatcccatttcatataccacatccagaatgagatgtttattttcggcagatttttcgtggaatgaaatcttgacctttcttttatcaaacgtctctgctgatgatggaaagcttcttgctctgtcagttttccccatttctttcaaggtggtaaccaaagtttttccccggattgttgctttgctatgctatatgtttattacattgtgcctctgcgggaattacatgctcttaattttcagagtacaaatctgaataatccatgtaagccaatggtacggttccggacttatacaaacaccatacaaatgttccaagataccaggattcgaatttgctataacaagattaggcacaaagctgaaacaaagagagctggcgccactagccacttccatcgagttggccttgagatagaaggtgagccatgtattgctgcattcacaataaaatgagctcaattcttggttctaaccccacatgattcgacaaacatttctatcaatggcaccacaaagtcagtaccatcaagattctagacttatggaaactgacctttacaacactaaaatatccgcaccacagagattatcataaagagattgaagaaacttacggagtggtaaacgtatggagattttccctggcgatcaaaatgcttagccattatgcagaattcaacaggaccccaatcttcagattcatagcaattcccaagcgccgctttgtacagctttactccaataaaccccaatcatcagttccacacagaactaatcaactatataaactgtaaacgacaactcaaaattgtcatcaaggacaaaccttagctgtgtcggtcaaaagttcggtgccagcagggtaagatgcataaaactgatctcccctggaatatcctgctcttgttctacacaacattcgaatcagtaacattaaatcaaattaaacctgaagcagaaaccaagagaagaacccagaaattgaaatcatctgcgaattccgatattgaaaagaaagaacaaccaaaagaagcaaactgagatcggacgaaagacattacgtgttgtttgtatagaagaatgtgagggcagcagtgaagcagtagaatccggcgtaagagacagcccgtcgtagcttctggatctttataacctctgagcaaacatccaagatcatcatcttcacaccttcggaaactctttcaggtattatatcgaacaccttgtgatcactttaccaaacagagatgacgagtagaagaagcatctcacgaaatttgcaattgacaaattgtaaacgctttgtattgtccaactttttatgggcctatctgacctttttctcttttcggcccaataaaacttttagattttatttcttttggcaacaataaatttaaaataatatacattatggaaaatcatctacaaacaaaaacctttaaattaaaaaactcacatgttaatgcaattaggttagtaagcaagcacgtcttgacaaaaatgttattgttacacatttaaaaattcacatgttatacaagacaaaacataaacgtaatgttttgcagtcaaataatgaaataaatgaaataatacaaagggatctttatgtaaaggcgtcaccaattagtggaaataatg

SEQ ID NO: 24679 - DNA, 3003 bp, Unknown
  misc_feature (1)..( 3003): 2750-1469P.txt file - cDNA_ID_2183028; gDNA_ID_1972132; Annot_ID_179104
gggattacaagagacggaaacaagagcagtgagaaaccaaatcagcgtgaatcttccgcagatggggaaagatacgattgataaagtcatcttctttcttcttcccacgtgcctgatgtttacagcgtcagtcgtctcggcggagaagttgaaagaaaccaccggaccggcggcgacgacgacgacgacgaggaagttcagaaattacagagtttgtttggtcacttcttccaccaattcccgtattttattattttttatttccagcgtggacttttctttttctttcgacccattaattcgatatttttatggtttcattcaggtaaatttattacatgtaaacttaggtgttactgacgctgttacaactcatattttactgttcagttatattatcctttttgtcgtttcaactttcaattgtaacaaaattataaatcataggaatttgtttccttaatttaagtattaggttatgagtttaagactaaaaaccatgtgaacaaatttataacaaacgaatagaaacaaatatcattcgcaaaccacatttatgtttccttgctctttctctattttacacacattcttccaatacaataattaaatatggttttacatacagaaaaatataaaatgtaatgttgtttgcattataagttctagagggacaaaaacacacttcttctttttttaccacaagcaatttcacttattacgtaacattaagcaagagagacttgagagcaacggcgatatatcataagacttacgaagaggaagaggaaggtacagttgaagggttgaaaggtttctgttctgcgcagctgagctcatcgtttggtcccgcgtcttctcttccaatacccatgaggtcaaggaagtataagtagtgtgagattatgttgttcattggatcaatggaaccttgaccacatgtgtactctccgtagaggacgttcatggtgctgccaaaagtcgggccacgcttggacaaagtgtcgttctttgtaggtttccagtttccgacaaagatgtcgtgagctgagggctgagctctcttgattggagtcatccatctccagattgcagcttggaatgcaagtgtcgcgttttgctcaatgtactcagggtggttcaagagatcagctttcagggcttccccagctgctccgtagttgaagttccttcaaataacacacaggtaaaaataccttcagtatggacgaatgcaaattgtttgacacagtttttatctagagcttcaaagtagaagagaaatgtgtaccagtaaatgggtaaggcaccgcgtccgtagtattcagctccagggctgcaggggtacttgaatttccaggactcgtcacagtaggattgcattgggctcatttccctgttgtagcacagaccccaagctaaaggccctcctgttgcaactccatagccacctataagacatcacagtaacactcatatgcagcttcttacaacatagaaaccaccaactgcaacttagggcatatccattttcatgattctgaatgtcgagtttgatcagattaatataatggtatagctatggaggtaagcttaaagcatccttttttctattcatagttagatggtcaactatgtagaaagaggactaaaatgaaggaaaacttacaggacgttttgctggctacatgaccgagaaaggcagccatttctttctgtcccatgagctttcctccagtggtaccaaaaccaagaggctcaaagagggcagcagcagtaatgaaagactggtagtcccagaaaccaacagcatgagcaatgggagtgttccttttggaaaagagttgctcaaactgataaacctgaaagtaatctgatatcgtctggttacagcagtatttagaccaccagctgcattcccatccttgcgtgcacaccttatttcccctcactttcttcactttaatcgttttgtcctctccattggcaaccaaggccagaaatgatacagccagcagaaccaaaatcacgattgaaccactcctgattgtcaccatagcttacaactatggaacaaataccagctacaagctgcaaacatcaacaaaaaaacaaatttagaaacatccattaatcccaagtaagcatctgaacattactataaagaaaacagaacacaaattactaacaatacagatctaccttatacaataggcacttaatgccaaaaagctgattagaaacaacaaaggaagaattaaaccaaaaacatggaactctctaagttcttaagtgaaaaaactaagaaaaattgttagattgaccaatattataccaacttggagagattgatgtataagatatgcgaagacttcaaatgtgagatcacgaattcaataaccaagcaacgaaacaaaattctctagtcaagatttagctaaatcgttaccaaaattaggcataagtacttgtggaaaaaatgcttacccgcaatgcagatcagctatagatccagagagagatcgagaaaactagcttgtgaattcaaccgacaaaaattaccctttttgcttcgttgccgagaaaataaggaagagattcttgggaaagagaggaggaagaagaaacactaaactaaagcgggtgacggatcagcagtctctatcaaccgttggattagagaacaatcaacggtgaagattgcgtttggtgtaatgtatgtgtcggttagacaagacagcctggttcgtgttgtgggccctactttactgaagtggagccttccaccgacagccgcacaccagcagaacctgatttaaaccaatcggtctacttcgatttttttcatgggttttcggttcatgttatggcccattgggcttttaagtaaggcctttctataaatgtcaattttgccagagtttcctgtctcgtccttgtctttcctctagccactcttcgccactctctttctctctcccttgttttccaacagtaacaatg

SEQ ID NO: 24680 - DNA, 3003 bp, Unknown
  misc_feature (1)..( 3003): 2750-1469P.txt file - cDNA_ID_2183040; gDNA_ID_1972132; Annot_ID_179108
tttatttagctttttctttttttgacattcattagatgaaatggcatcctatccaggggtctagatgcgccattgatcttagtccaggttctggaaatgccagtgtctcctgtcaccgtttggttagattctgttggaatgtgagttttttttagcttgaatccttttgttttgaaaccattttctattactatatattgaatcttagcttcagtgcagagaagacgctcacagtcctgtggactgtaaaactgctgcaaaatggttagcaatacacgtttctgatatccaaaacccggaacgtcggtatatttcccatttatgaaatgattcagtctttttggattatgattttaggctactagaaaatgcggtgccttgtcccaagtgtaagctaaggatcccacgaaatcaagataattcactgaagatgaaatgcttaccttgtaactatgttttctgttggtaatatacttgttcttctagctactattagctcttatgatcttgtggttaattagtatgatcttactagtatgctctttcatgaaatgtcctctgcaggttctgccatgtcgactggattgaagacatggaaggaactggtggtgatttacacttttgtaccttcgatgctgtcttggtactttatcagctgatgatatttattgaaaagtttcttttttattgatctttcatgtaccttaattttctgatgtttttgtagagtgatcaacgtgggaaaatgtcagaatctgattcaaatagatacgaagattgttatgaaaattgggacagtaatgaattggtatatatgcatttatttatgaacttcaaatccattatttacctatgaaaaatgcattgatttcttttgagtttgtttttgggcagttgatgcaaaaggaacaagcaaacctgccaaaactagatactattgtaagataaatctatattgtcttttgtttcaatctctgtagattaaagttgaatcatcttttttttaataatctattttccagattcaggaactaagtaacacacagttagaaaacgtatcgcagcttaagttcatcctagaagctggacttcaggttagcaaaagtcaaactagtgtgagaaatatcttatgttttgagttttggtttccgacataacttaggtgatgactgatgcatatatacatgatacagatcatagaatgtagaagggtcctggaatggacttatgtttatggatattaccttagagaggatgaggtcgggaagcaaaatttattgaaggatacgcaaggtatgtaacttttgtatatgtatatgcataaaacacagagaggttaattttaaggtaacatatttttgttaatcagagaggttgaagaagtttgtggaaaatctcaaacactgtttggagactaatctgcagccgtttcgttacgaggaggaaccgtcaaaggatttcaatgccttccgcatcaagttaaccgaactaactaggtttgatattccattgtttcttgtaattttaacaagatccaacaattaaaccctaaaaccaatcaacttttttatttatttatttctttctttcataatagcctaacgcggaaccactatgagaatgtggtaaaagatgtagagaatggcttagctagtgttgtctctgagggggaagcaagtggttcaggccgtaatcaataatcatgatgattaaatcgagtctaattgttgagttccaatttactaccgataaattggtttaattgcaaattgcagtttaggctggaatattggatatatattaattttataaaaaaaaacgagaatgttctctttttttaatgtttgaaattactgttgtaaaaatgtttgaattgactaattataaaagaaaatattgggtgtgagttatgtactctgttttctaggtttcaaacattaatatattatacataatataagaaaagtagatcatttttataatcttgctaggtttgagccaaaaacgttgtaattcatgcataattaatatatatcaatggtacacattcgttgcatttagattgattcttgttccctatattatatgttactcgaaattgtgaatttgataagaattttgtgttgctcgtttgtttgtgtgattcatctacttagaagtctattgaagctgatggtgccaatatgacatcggtccggaattgcaaaccctattaaatactcaactcgaggaagtcttcatttttttgagatgtttaatttggggtttaccattctttcaacattttgacaaatcaaatccgtcacatctaaaactatctcattaactagaagataaaacaccaaaatgcaacacgtaactcttttaatcatttaaaaacaatatactatagttgaattctacatgaaatcattttcagttcaattttggcttcatggtgcttaaacattgattttcctagatttactttacgttgaagaactaattatttttgtttttaatatcacgtgggtgacttctcaaagaaaatgtcaaaaatctttgtaagaaataaacaaaatttctttttttaagaaaaatatcatagactttacttttatagaatttccattgttcttaaaatcgattactttgttctttttttgggtccaaactttaaattgattacactaatagtattaaacttttttttgttggttactaaaaatcaattgaaaccgatagtggcaaaagtccatatatctttctctcatctactcgatttctgaatcgcgaacgcagcgagcgatccggaatcgagagagagagctaccaatttttccaacttgttcggttccttataaagctgtttactttcccttgcgaattctctctctctctactataaagcaatacccttttctttcttttttggtaacccccaaaccctactttgtccagcgagaaaggaagaggggtttcgtctgattccgctaaatctctagtctttatctaaagatcatg

SEQ ID NO: 24681 - DNA, 3003 bp, Unknown
  misc_feature (1)..( 3003): 2750-1469P.txt file - cDNA_ID_2183052; gDNA_ID_1972132; Annot_ID_179111
atgtatgctgctactactctatcatctgccaaatcaatctctgcagaatccctaaatcttcgttccgattccaattcaggtctactccgaatttgtgggaattttctactgatggaacttagctttctaactggtcgagttgttgattagatgcttttttttttttttttttttttgaatcagaggcagcgcatggtgcttctgagtctgagactcgagtctctttaaggaagaagaggataaagcaggatgatttggagcctgtaaagaaatgttccgccagagaaaccaaggcccgcaaggtaatatataatagggtttttggaaatttcaagtcttgcgtcgagtatgataatttttgagatttataggcaatttgttgatccctttgcttgagaaaagttactgctttttatgttcttaactaatcagattttaaagatgtgtattatatgatcctcttggtcttttgtttatgtaatgcaggacatgtgtggattacctgatatagaagactctccttataagaagactaatggaactgcttcatctagtaagtctcactatctatagttattagtgactgagccaaaacttgttctcactactcttcaactaacaccatgattacttgtatgaaattgttttgcagggacgagaaaactaaactcatacataaaatcaacagaagctagcccttctgcatcgtcgatcaaaacagcaggttttctttcacgagactctactctactactcttagtggcattttgggtacatttattctttacggaaaacgcgatgtccctaagatgtttatttagggctaggcataccacctgaaaactgggaaaaggtgctcgagggtattcgaaaaatgaaaccttcagaagaagcaccagttaatgctgtagaatgtgatagaaccggaagctttttacctccaaaggtagaaatatcttacactaaatggaattgaggtattgctgagtttgtgcctattggttttatgtggaagtatacaatgagatagtttcattgctttctcaaatattacttcccatttgcttttcattattacatggtagtactctatgcatatattgggaaccaagttccaagtggtttaccgtgaattagtaacaaatgctagcttatgattagaaaattttcatattctgaattcttgcttccttgaaaggtcgatggaaggtttcccttcttgtttttccttttgatcttatctctccctatttctaggaaaggcgattttatgtgctcataggaacacttctttcaagtcagactaaagagcacataactggtggtgagatttgaattacttatctctccctatgttgcaagaacgcttaatttcagcattctagtatctctgatttcatctggatctccaagtttcctgatattatattcaaacacttataatatgcagcggcagtagaacgacttcatcaaaatggccttctcactcctgaagccattgacaaagccgatgaatcaaccattaaggaattgatctatccggtacattatccctttttaatcttacttcatgttgttaagggctctttgactctgctatgcccccagctgccatatttttcatgagaagtatttaagaaattaaaaggaaaggagtgagaaactataaatagaaattgttgttatcgttttaatttcgataagaaacttactgtttcccctttacttttaggttggattctatactagaaaggctactaatgtgaagaaagttgcaaaaatatgtctaatggaatatgacggtgacattccaaggactttggaagaactactttcacttccaggagttggtcctaagattgctcatctggtataagttgcccatattattccgctttgtaagagagatacatgttttcaaagttcttaaaaggtttctttgatgtactgcgataggttttgcatgtagcctggaatgatgttcaagggatatgtgtagacacacatgtgcatcgtatttgcaatagacttggttgggtgtctaaacctggaacgaaacaggtgcttctctaacaccaggtttatgttgaagtatatatggctatgagattgatttcttaacacttggtaaaatttggttcttctttagtttgcttatctgctcttggtcacctatctctactttgttcttgaccagaaaacctcgtcccctgaggaaactagagtagctctgcaacaatggcttccaaaaggagaatgggtggctataaactttctgttggtgcgtcatcctgggatatcctaacttatagatgcatgaccatacatagaacaatctacttacactccacttaatcttcgtcctcacatttttgttgtctgaaatctcatcaggtaggttttggacaaacgatatgcacaccgctaagaccacactgtggaacttgtagtattactgagatttgcccttctgccttcaaggagaccccgagcacatcatccaaattgaagaaatctatcaaaagcaagaagctttagttgctttggctctggattctccttctagatcattgttaaacccattttttgattagtcctcggttaaagttaaattgtatccaagatattgtatagctttatggggaatgcaagagcatcccacttgtgtgtaaaactaaaacttatagaatggaaacttacccttatgaaagacactgggcaagtacacttttaactgaatattatgaaaaaacttaaaagatgattcaagaaccttttaaagtgtttccactaaaagcaagtgatttggattttggagtcatccaccttgtaatctatctaatttgttatcaaacattaaaatttttgaattccccttatatagaattaacagaaatttctttctttggtcaaactaaaattaactgatattctatgtaaagactaaaaagattatcaacaaattgaattttgcaagacggaagaatccttactgatgtgatg

SEQ ID NO: 24682 - DNA, 3000 bp, Unknown; identical to SEQ ID NO: 15022
  misc_feature (1)..( 3000): 2750-1469P.txt file - cDNA_ID_2183105; gDNA_ID_2684254; Annot_ID_138075

SEQ ID NO: 24683 - DNA, 3000 bp, Unknown
  misc_feature (1)..( 3000): 2750-1469P.txt file - cDNA_ID_2183167; gDNA_ID_1972137; Annot_ID_179163
aactcagaaccacaaaaaaacgcagaatctactaaccaaagtttatcttaacgagtactataggaacccctagaagccgaacaatgtacacgatacaaggaatctgtcaatacatttatatattccagcgccgtggagcctgagagagaaatgtcacagtgttttcatccgcttgtgagaatgttcagattcttcctcaacgcttgaatcccttccttgcgtatcatatgataatggattctgtatagaaaaatgtatcaacatcatgatatatggctattgttacaaaactaagtatgaagcatttcgaaccaactatttaccttacttgatggctcttcatgagttagaccttgattggctcgcttcccaagatcgatctgcacagaaagctttgcttgcgacagatcaatgcctgcattctggagtgcttgtgttaatgagctcaataacctggccatttcagaattaatgtctcacaagattagtacacaatgcagttaaaaaaaaagggtagaagcgaacacatcaatggcagcacagtaacagaaacgaggaagacttagaagatcagactcactcatgcgagtaggcactagagatgctaatggttccaccttcaataaccaggtcattactttggcctagcccatcactagttgcaggacattcattagcttgttcgccttgtaccattggaagaattggttgtagtggtggtaatcctttgtcgtctaactcaggttgactttcaatcgatatgccggttatagctcttgctttgtcagattcaatcgggatttgcggttctgcaataattgcaggtgtcgaagtcacagtgttgtcttcaaactttccaggaaaaggtatccctggaccagatccattatttatagctactgggtggttccccaaactttgaactcgccaatgattattcctctgttccaatcaagaaaacataaccttcagctaaaagtcacacaaagaaagccttgcgggtgcaaaaacatactcagaatctacaatcacagaaactcattgagaaaccgacataagaagaagctcaaaactttacccatggcgtcaactttgttggttcctgactccaacctggatacgatccttcatacttttgcaccttctcttgtaaatactgaacataatctatcacctagaatggaatagcggtattaagctaacaacatctaaaagacaggatattcgcacaaagcatcatcaaataccatgacatacctctaaaaggaatgaagcagtgtcacgtttttgttcactgttgggaattagttctctcaatatctgaaatctgagaagagatttatgaattcagcactcagaacaagaacaataattataatgtaactaagtcctatatcaaacaccacaaaactgaagcagagcaaaattcccaaacacaagtcctaagtattcttatgattttgttagcaaagtaattgaattttgattcagatatcaaaacaaagaatgtcgcgtttactcctaatctcaagttctcacaaaaacaacaatccaaaaagtttgaaatcctcactttatatcaacatacctttcattgattttgcttcttctacgttgctcagtgaccgaatgtttagaacgtatcgcactagctttatcattttcctttgaatctgctttcaaaatcaaacaccgaatcacacagagacaaaacttagaaaaatctaatcccaaactattcaaatccatctcgatacatatcaacaatagctccaaccaaaacacaaattgacgaaacaacaactaagaaaaattcaaaagtctcccaaatcgaacaatttacctctgttgctatgaacagtagtgttggaagaaggaccttcacgtttagagttaaagtcttcttctccgtaatcttcttcctcttgatttccttttccggttctcatcttcgccggagaatttcgactgtttattgttttattttcaacttttgccgtcgacgagctcttttttgttgcttatttgttttttgttttttgggtgcctcgtgactcggctgagttctagttagctgtgggagagactacgtgagtttacttgagcttttgtccgtcagtttcgtgatttggagacgtgtacgacttgatgtgattacccggttaggcctctaaatgaaccgtagcttgtgatgacacgtgggattcacgtgataagacgagattctaacctatcagatttaaggtggtcacgtgatgcacgtggtctctttctgatctgttaattttcacgtactatgtttgtttctaatcgaacggtgacatatggctatgtttccaaaacaatactataaagggccgaatggaattatcagacttgggccaaacccaaactttacaaaggaaaaaaagaagtaacatatgcctatgtttccaaaacaatactataccttattcgaatttatcagacatgggctaagcccaaaagttacaaaaaaaaaaaaaagagtaacaatactatcagagccaggtttcgatcctgggacctgtgggttatgggcccaccacgcttccgctgcgccactctgatttgttgttgtaatgttaattaggtatatatttatcatggtaatgtataactcgtgccagaatatgggctttgagcccaaataagagcgtaacggatctgataagcgggtcgggtttgacaagatccatgaaatgtgaagcagaaaccaaaggttttatgaagggtttatttcggcggctgtgtttgtacttcacggcgccttctcttttctccagatctctcttctcttcacccaagtcttgtttttaatctgttcttcgaatctgaactctttgatttctatgtttgtattaataactctacaaaatcaagtagctacatagcccgagattgtgctcgtggaggcagtaaactatctgaagcagccactattaccatttcgtggcgatcacaaaaacgattcaaaaaatg

SEQ ID NO: 24684 - DNA, 3000 bp, Unknown
  misc_feature (1)..( 3000): 2750-1469P.txt file - cDNA_ID_2183171; gDNA_ID_1972137; Annot_ID_179165
ggtccacgtacctatcagcctcacccacaggccactttatttaacctcgattcaactttatttagtctatacttgtgtctatagtaggttaattcattattacgattacacgaattaacatgatattatcaatacaaataataatatagtttggcgaaggagtggtcccgtcgggggcagagagtggtctctggctgcatacaaagatttgagttcgacaacaccccaaccatatattctttcgtacctatcactctccatcgatctatctcttcttctttttttccccaaaccatattatttctttttatggtctttttgctgaaaatcataactagttttgttcttcttgttgttctcctgctcaaatatagtaaaagcgtactatagttattggcaaaaacagttgtttcgttttctattgtactgtagaagattcacaaataccatgtgttagcaaatttgaggtctagttgtgctggttttatcgattatttggcgttcctagtaccaaaatctgcaacacaatatagttatcataagattattgtagtggatataaaatgttgttatgatgtaagtctaaacctaactttaaaaataaaaattggtagagttatggacttaattatggtgtcaagtatttcacactttcactttgtttcaaacacttattttatgtgaatacttcttttcttaaacttgaaacatttcatatttaaaattataacccatattttcaaacgaaaacaaaattatccattggccaataggaaactaggaatggtgcgaccaataaactcttaaaagtcaaacacctctgcgtgactcagaagtttccctccgcgtttgccgtaacgttacctttaatttcgtcagtaacgcaaaaataacagatccgaaagaaaaaaaatcaacacaccgagaaaaaaatggaagatctatggaagagagcgaaatcgtttgcagaagaagcagcgaagaaatcacaaaccataacactacaatcatcttcaacaacattcgtcaatctcgtcaccgaaaccgctaaaaaatccaaagagttcgctctcgaagcttctaagaaagctgattcgatcaatgtctccgagttcgtcgccgagacggcgaagaagtcaaaggaattcgctgctgaggtttcaacgaaagcggatcagctcaaagtcgtagcattgaaacaagctgatcagatccagaatataaaatcgattgccgacattatacctggaggattaggaggatcaggatctggtggtggtggttctgagatttctgaatctgagcttgttagttttggtattactgatgatttgagagagtttgttaaaggtttgacatctgctacgttccaggcttttcctgaacaaggtattgttgttttgttgttgttgttgctttatctttgttttggaattgaggatttgaaatgtgttatggtaaatgtggattagatgaatcgtcggaagtttctgatttggaaacaagtgcgtcgaatgttcggaaggatctttctgagtggcaggagagacatgccactcttgttcttggttctgtcaaggtagatttttcgaatttgagattggaattagtttgattagttggagaagctgatcttgcataattggtttagttatagattcatctcttctgtgctacattgtttgattttgcattttgtgtatgttgcagcaaatttcgaagttgagatatgaactatgcccacgagttatgaaagaaaggaggttctggaggatatactttaccttagtgagcactcatgttgcaccgtaaggatctaccatctcttctcaaagtctgaaaatgttatcgacactagactgagaattgcattaagcgcataggaggtggtaaagatagcttaagatctctatatttgtatgactaggtagtctcatagcttaatcactgcagcttaagtttggtaaaatgaaaccatacgtaattatatgggaaatggattataccttatcagcacggatttgatccagagacagtcttagtgaattctcttgtggctgcaaatcatctattctgcctctagcttggtccagtatatctcggaaaaccatgtaactcacaaatgagaatataaaaaacaaaggaacatgactgaaaacatatagaagatcttgacaccttagttgtttgtgtatttctgagaagtgattagtgaattgagcacccttgtctttcattcttatgagacttgatagctgcatgaattaagcggaaaggatttgttttgaatcagatatgaaaggaagtacatggaggaacttaggaacaaagcagagagtaaagatgaagaagctaagaagagtccagggcttggaaggacagaatcagctgaaaagaacagaatatctactgcatcgtctgagcaagatctcgatacattcctgctgggagatctagaagacagtgacgaagctcctggtgagacaccttgacttgatgtagcttcccaagttttagctatgacttaaatcctgattttgtctgtataatcgtaaaacttgcagatgatggtgatggtgatgatggaggaagcctgggtgatgatgactttgacaagattggcaactctgtaagtgaaaacgtttgattattctctcagttctttaaaacatacaacaacagaacatcttggtttaatccaaatctgccttcacgtgtttgcaggatgttgaggaagagaaagaatcaaatgcagcaaaaaattagaaatattattaagttttgttacatacccaattgttgggaagtaaatgaggatggtatatgatctgtttcatcatcagtgattcagtgtatagcttttgatgcaaaagatgaagacacattttattcattcgaattcgcaaattataaaaaaacagactttgattacaaaattatcctaaaaagcgaaactttgacataaatattagtcgctggagaggttaaagtttgctaatg

SEQ ID NO: 24685 - DNA, 3000 bp, Unknown
  misc_feature (1)..( 3000): 2750-1469P.txt file - cDNA_ID_2183240; gDNA_ID_2926139; Annot_ID_197346
cgaacaatcttttaaaacacaaacacctttcttggtaagatccagaattctcccaggagttcctaccagtaaatgaacaggctgatacaaacgcatgatatcgtctttcagactggtgccaccagtggtcaccatgacttgaatcttcaaatgcttacccagctctttacagacctgtgatgtctgaagggctaactctcgagtcggaacaattataacagctgcgtacaagaaaggtattgacggtaaactaagttagaaaggaagcagtaaacctttaagaaacatattaggctactgatagaagcaatgggtttagaggctcaaaggattcattacgatttacattcactaagttttatacagtaactagtgtttattgtggatcaataatctatttacgacgccagctttggtattctgttcttattagctatgaaaaatcactagctagacgatgtcaaaacttcagattctttaatagcattgcaccacgtgaaagaatcaactaacaacatggtccagtacacagttaccttgaataacgttgttatcttggtcaattttttccaagacaggaatacaaaaggcggcggtctttccagtcccgttctttgctctggcaaggatatctctaccagttaaggcaattggaatactctcttcctgaataggagaaggtctttcaaaacccttctcatatattcccatgagaagctcccgtttcaaaaagtaatcttcaaactcgttccctttggtggctgtcacatcctaaatatgataacaagtaacgaattgtgaacatctcatcccatgcaaccaagaatcaattcagtttcacaaatagattctcacgcagtttaagtattgagaaacaaatttaacaagtatttaggtattacgcttaagaacacctttaagtcacaccaatatagcacacgaaacagcaaaaataaagagtgaatgcatcctaatttactctatttcgtcaaaatatggaacattacctctgttctgtatcgagtatcaggtgcaggtagttttagccttgctttccaatcttccgagctgaagagaaattagattgtaaaggttatcaaacgcacaaaagtgaaaccaacactaagcagttcaataccatggtaacgtaagaaacaaggaattatcacttcaaatgaaaataatcacatcccagatttaactaagtagtccaagcttgaacagcactcactttgggtcgataacttcggattgaacagttttctcaacttctacaacagcgtcaccgttactgttaccgccggggatctgacctcttcgaagccattgttgttgttgctgctgttgctgttggtattgatgcggctgagacggcgcttgttgaaactgttgttggtgattctgagcgtaattaccgcgttgaacgtattggggcggcggatgttgttgataacccgaccgtgattggtaattagggttagggttaaaggctccacggccagcgccaattccaggagggtaccttcctcgattgttcatcacaaacctctaaacactaataaccaaaaactctgactaaggaagggatctgtacaccaagaataccaaaaaggaactagggttttctacggtaatacacaacctagggtaatgtcggaattttgaaaaaaaaatctcggtttagttacagagaaaaaaataaactcttccggagaaatctagggtttgaaaaatcacaaaatcggagatagagagtagcagatctgggagtttataatccaaaatgaagcgaaattctgggattgatatttttcgaaaaaggtccacgcgaggaagaaagcgagacagagagagatcaaaagggtcaataatatagagacgaagccagagttctcgcgtgagacagagagacagagagacagaaagatgattatctctatgtaatattataatgtttgtgatttcgtcggatttcgttagcggtattgggcttgggcttgagccttgtggtaattaaaacggagttttaagttttcatttctttctttctgaaatttataaaattacacattacttccttttccttacatatttaccctaacttaattaaagttttcagtctgaccccaaaaatctatctttcagcttctaaagctgtttttagctcaagattaacgctatgcaagatgttacaaacaccacctggtcgtcatagagtatccatccaatttcagagtatttctctaatgtttttatacttcatcagaattgcacttgatccatctatgcactggatttgtgacaagtgatgacatcttcctcgtttgctgtgtcatctgcttttattcattatacctgattatgtctcaaatatgattcttcaaacactaccaaaattatatgttgagtattcaatatgcgaccgagattatggaatttcaaactttcacaattaataggtttctactttcacacaaattaggcctagtttatttcatcagttaacatttacatccaaattttttatagcgactacatatctaccaatatgttatgattattgaaataatttgaataataaagagaaaataatttgaccaaaagtaagcataaattaagcaaaaaataagtaaaatacgtctatataatagaaaagttcactttcgatctacgatgtctacatcaacatccaagtcatcatattgtggcctgcctaaattttatttattgaaatcaaaacattacagctaaaattaattcacacattaaataaaacaataattgacaaaattaaattaaatattataaaaaattaaaaaataaatacacaacataaactatgaaattttttatatcagtgttaagaaaattaaaatagattgaacaaaaaaaataaagtgaacaaaaaactatcataaacatcacaaataaaaataaaaattctatgaatacgtaggctttttacagtctctcgaccgacacgtcgacattcacagaatg

SEQ ID NO: 24686 - DNA, 3000 bp, Unknown; identical to SEQ ID NO: 24685
  misc_feature (1)..( 3000): 2750-1469P.txt file - cDNA_ID_2183240; gDNA_ID_1972140; Annot_ID_179265

SEQ ID NO: 24687 - DNA, 3003 bp, Unknown
  misc_feature (1)..( 3003): 2750-1469P.txt file - cDNA_ID_2183253; gDNA_ID_1972140; Annot_ID_179271
tcttcttcttccttaaacacacatctctctacacttcattttctcacctttctcttctgatttcacttgtacacgattaagcaaagattcaatttccaacattgacgtttctctcgagtgggtgaagtagaagaaagttatgtttaaaccctaaaatatttttttcctgagaagtcgatctctaatggctcttgtacccaagattcgcaatcgcaccatctcggacaaaccagtctcttcgtcttgtactagaacatcgagtttcagacaaagacttctcgccagttgcaaacgatttctcaggttcaaattgttggttcgtgcttcttcagtgtcattaaaaaagaaagcagcaaggtgttcacaatctcaacaagttgttaaacataatgatgataggattgaggaacattcttctagtaatcggggttttaaagatggcaacaatttcttagtatcatcaacagaaacgaagaagcttgttgcggtactgattctaattaatatattgtatcaatgtttgtggatgcaatgcaagattgttctgtttcattgatttagtaagagagctcttgtattgatttctgttgaagttttgtggtgaacctttccaaccactcaacgaggaggaagtagctctagtcaatagtgccttgtctaagagaaacaggttttttttctttctttcagaattagcttatcatgtgatttgacttgattgagaatttaaccacttgtgttgctttgctatctcagaaagaagattttggtttcgcataaaaactccaatattgacatctctggagaaactttacaatgcctaaggccgaatcaatggcttaacgatgatgtaggttaagtcaagagttccttatgtgttttgtttgcaggaatcgtgttttattttcttctttgttttatatttataggtcactaatctctatctggagttgctgaaagagagacaaactagagatccgcaaaagtacttcaagtgtcatttcttcaataccttcttttacgttaaggtttgctttctcttttacttgttaaaaatagatttcaaaggtctatgtttcctcatgccatgacttactttacacattttcagctcgtaagcggctccggttacaattacaaagctgtcagtagatggactaccaagagaaagcttggatatgatcttattgactgtgacatagtgaggtttcctctttttgtcagaagtatatgtatagtccaatttgattgatgatgaacttgtgcagatatttgttccaatccacatagatatacattggaccctgggagtgattaacaatagggaacgcaagttcgtgtatcttgattcattatttactggagttggtcatacaattttgaatgctatggtataacttcttcatcatagaactctctgtccatttgcattttggagattatggaaccagtgttattgttttaggcaaagtacttggtggatgaagtaaaacaaaagagtcaaaagaatattgacgttagttcatggggaatggaatacgttgaagaacgtcctcagcaacagaacgggtacgtaattctcattttgctatgttattgatctcacttgacactagtctgttcgaataattcgcaggtacgactgtgggatgtttatgcttaaatacattgatttttacagtagaggattgagtctacaatttagccaggtaataagagatgtcatcaaggtctgtgtttgcttatgaatctgtaccaatactgttgcattttgaaatcgagaaatatcaaattcctatccggttcaaactagaagaaacattacttaagcacatgagacattattggtcatggaattaaagtaggtgttggtgaaacatgtattaagagggatactataaaatatgttcatttcgtctttaattctatcgtttgcagaaagacatgccgtacttcaggttaagaacagctaaggagatactgagactgcgagctgactaatagtgcccccatcttggtgacataaccttgctattttacaaagccgattcatattagtttagcagccttatttgcttgggctgtggagaatgctagatatcttcgttgctttcttgaaatatttgtttgattttttcttatctagaagaagttgttgataagcttttagaattctgttttattgtttagtgaaggaataatcttcaattttgtaccctggcctgaggaataattttaagtttggtggaaaattgcagattgttatgcaactcttagtctataccataagataacctcatgaatgaatgtggtaatagtggttgcagagcgtgtaattacaactgctttgtgttctgttgtttagtggaaatatgaatctccattttggcttgagtaattgcatattttgtgatgtatccatctctctaagtctctagactaacctgaggtgacaaacgcagcgatagagtcgctggataaaatgcgtaaaggaagtaagaaagcagcactgcagatggttgacatggaatgcagttacctcactgttgatttacaactcttatgcattgtgtttggtggataatgcatatcaaacgtgcagagagtactgatcagtttacaactcttaaccggaaactgagattctcggttcggtttaaccggtttctaccgaattcacaggactacaaatattttaagttaggtaagggaaaccaaaagtccacatgtttctgatccacgtcagcatgaaattctaaacgacgtttcagcgtaattcatcttctcttgtataacacttccgattctaattagggtttatcgtttgcatcgctcttgccactacctccggagtctgtttcatttgtttaaggtgagtgaccacattgattttagaatgattatatatgtatggtttgaattcttgcttacctcttgttagctaaggttttatcttaaccattaatttagtaatataggattcttgttttcaaacagtgaatg

SEQ ID NO: 24688 - DNA, 3000 bp, Unknown; identical to SEQ ID NO: 9522
  misc_feature (1)..( 3000): 2750-1469P.txt file - cDNA_ID_2183269; gDNA_ID_1972139; Annot_ID_179207

SEQ ID NO: 24689 - DNA, 3003 bp, Unknown
  misc_feature (1)..( 3003): 2750-1469P.txt file - cDNA_ID_2183284; gDNA_ID_1972139; Annot_ID_179211
ttatttaaaaccttttaatatagatcgatcctttgtttattttcagagttcaaaattttactctgaatttaatcaaagagaatgtattatatttgaatatagacaaatcataaattcaatgatgctaaatcataaattaggtttatgtggacacatcatcttcttctttttttggatcaaagggtgacatatcttttggtaagacgtaaatacttaatgtgtctttcttgatgatgttaatttctgtaaaacctcgtaccgtacacattgatgaaaatagtgagatcttgaaaatagagaggtcgaaaccaccacactacactagaccgtcttggagttactatagctacatctttgactttcattgttctttgcacgcaacttatccaaatcaacacatgttatcaggaaacgcggattctgtatttctcatgtgttacaaaagcgaaaagaatatatattttgaaaagttcatattataccaatttgacatcaaacaatttaataaatttgtgaataatttaagaatattcaatatattatgctgctgcagttgaaacctatacacaatatgaatttttaaagggggaaataaaagacaatctttaaagttgtaactcttaattagttgagcaatttttttttatccgggtatgattttgggatatccctatatatcggtttgtttgaatttgaaattatttttctttgtttaaacatggataaactgtaattacgatatattttttttgttttttcttaaactacaactaagatctatttggttttaatgttttataaattgagtctttgttttctttctagaaaaaagttatgaatcagtcgtagttaaaagaaaaatgtatagacaaacacacaaaaactataagatgaagaaatttcaaagatgtttactttccggaaaatttgacgctacaaaaagtgagaaagaaggtgagtcgtcgtcactctgagttggtagcaaagacgcggaagtttggaagtatctagggtttattaagtcatacataaagtaaatcataaataaagttaactcgtaattgagattttgtttaattactttttccacaactctcggtaaactgtattgttctcttctaataagtcttgggaatcagagccagattgttttttttccataatataatagtataatctctgtggaaactataaaaagtagcagtacaccatagactatgaaatttcaaattcattcatcctgttaagggctcaactagttaagtaataataattacactccaaatctgtaagtactaaattttgtaacaactcctaaattacacatacgattttatgtatggattacacatctattaatacgaaccatgaaaacatttcacaagaaagttttgattttaatttatatatcaaattggtatacgatgtatatcgtattttgttgttgtttgtttacgtcatgtatatctcatacttaccaaattaaatattgtttcggtcaatcataatggaaagtgtaaaaactattatttgaatctgaagatattcttatttcaaatatttgtcgtttttgctcgacgacgaactgacgtacatgttttgatcttacagaaaagaaaatggcgaccatcgaaattccgaaaagattccctaggttacggtccaaactcaagttaggacgtggaacatttgagatttgtaatgatttaccggccttgactgttaatagatatacatagacattgaaagggataacatgaacttctgacttaatttcacaataagttaaaccatgactgacattttggtgcttataatagtcaactcaaagacatatccatagatatgatacatttaacctgttagtcaagatttacaattgaaatagaattatttgtaagtttttaggaatgtacttatatattgatattgtcaaatgttaaagtatgtgcaaatatatcttgacccagtcgtaattataattaatgaaacacgaaccgggtacgtttgtgtgtgtgtgtatccaatatcacaatgtatagaccatataaactaaaattattgcatatcatagacttcgctctcacatcggatagagactgtttataaggtatctaatacaattaagaaggcaaaatcgctaaatacacaacaatttgtggtgaaatatataataaaatattttacataattttggtggcaagaaaataaataactgatccgttagttatgatattatccatgaagggttttgaatatattttatgtggtgaggttgaagtatgaaaccccataaaaaataggggagattgaagatagaaggtaatggctgaacctcattataaagtgttgattggaatttggaacacaacttagaacatacagtatatagttattgctgatatattccacacgtcttggttttggaagatatatgaagtctagactacaatatgatttttggaaaatttaaaattttatagaacatgaagtcaaaatagactatgattttttcaactacataagcaagagaacaaaaaaaaggagggatttaaattccaactcatgtctagagaaaaaaaaatcaactacttggtaccattgtgtcccactatttactattttagcaacggtacagatcaggcaatcaggacacactttcctggactctcttgtagtcttgtccctttgaatctcctaccgacccccaaaaaaaaaaaaaagtcttatttaattatttaataatcatttattttgtgtatatgtttattattattagcatatgcatcccgaatttgaccgtcatgcatgccgtaatctaagaaaaggataatcaaatttgagcacgttcatttcgaatatatatatagacgccaaacatagagactaaacctcatcaaaccacagctgttcaattcctatcccacacaaaaaaaaaaaaaacacgcacacaaaaacaagagctgtgagtttgatcaatctcttcaaaaagtgtaacacatg

SEQ ID NO: 24690 - DNA, 3003 bp, Unknown
  misc_feature (1)..( 3003): 2750-1469P.txt file - cDNA_ID_2183297; gDNA_ID_1972139; Annot_ID_179216
cttgatttgacaatctctgcatttaatgaagtatggatcttgagattcgtcccattcaacttcaaatccaaatctagtgaagaaatcttgaagaaaaccaagaagatctccttgacagccttgttcagataacgacccgtgggttgattcacaaccgtggaggatccgacccggattctttaggagtttacagtcccaaggacaacgagaacagttggggagagtaaaaggagagcaaggacggagaagagagagacgagagcaagaagagtcagagactctgaaaggtgaaccggttaagtcgatgaaccggtttggtgaggaggagaaccggagagaagaacagttgtttgtgttccggttagtgtttgtaatgggagagagggttagagaagaggagattgatgagtaatggaggatagagaaagtgaggtttttgattgtgatggtggcgcgtgaagatgagcattggatctggaagtttgggtggccacatcccggagaagctgagaaagggtacggtggtgaggagttgaacggtgggcaatgaaatgaagaagaacatgaagtagatgcagaggaaggtttagtactaaaaatggtgagaacaaagatgagtagagagaaacatctccacggtggttgagacatgtaaaagagaaaggaagagatctgattctaaatctgttgactgaactttttcgatgtggacagtgttgtgaggaagatgaagaagaagaggcacgtgaaggtttaggaacttgaaactgaagagtttcgattttattctataataactctttgttactgattttttaaaaaaaaattggttttcgactctccctaggcagtgagtgatactcgacctaaaaacaattattttttctgatttaaaaaagagtatatgaatgagagtaagaacaatatttttgcactccttgaaattaaggaaattgagaaagtatatgaatgtgagtaaagagcaaatgggaatatagaagcaaaaagaaaagtcaaaaagtgacgacagacattgtagacaaatggaaaaaaatagttcagattaaagtgaaagctttattttgtcaataatggaaatggatgcttatatcagtctttgaattattactagaaaatctaaggaacttctacttttaacaattttatgcagaaatggttggtgaagaagcagaagagccaaagatcaacaactctataatcaaattaaactcaactcgtttgaagggtgttttgagtggccttaatctgttttagtggagtaaaatgataaagagcttttgagtaatagaatatttaaaccaagtttttcttcatctgtttgggtcgatgggtggttgaatttttttttttatgtttaacacattatgggtcatgaagttgcctatgggatagtttgagtaagctcattgacctactagaactcgttatacgcactttatttttcgatatgaaaatcctgcggaatcacattttaatgttaaaccgtaaaatcacgtttgaaccatcgaataatgttttgtgctaattttccatcaaattacagaatcttgttttgacatcaaaactgtttattttctatattgtttttaaaaagtgacttgttttacctctagtttttttttcataaacttacaaacaaacagttttggattgaatactgcatggagatccaaaaattaaattaagaaagtaatctttgatgctacatctgaatgttacataacttacatacttacatcttgttgcatatcaggatgaagaaacaaacaaacatattcattaggatactcacatctcttggcttgatctgcaggtcctgctcattggtcgtatacattaatgaaaaacaaattatagcttaatttgttcacatatgagttttgtccttcaaacataaagattgcaacaaaaatctaaggaacaatgatacagccgttgatttggagcctttcctccagtcatgattcaaaaaaaagggccaattaatgcgatgcgatgcgacccaataaagctgaccttttttggtgtctcactctttaataatgtctctgtgattaagtttctccatttaatcatgagacttttgaaacttcaaattatgctttgggcttgtaccgtttgaaaaaatcgtattattgggccttcatttcgacccatagaaatctatgattgattttgttgaacagcaatataggcccatgtctagtgctaccgcgtatatgcactatccaagttttgaagcttgtttgcacacccaaaaataaatgaataaataaacaagaagattatgaaatagtataatatatcagattttagatttatttaatagacagtaattgataaaagtcatagtattttctatacttttttcttcttaaccttttatttatttttaagtttgcttatattgatactcttaactcttaagttaaaagcgtgttctacttaattataagagattttatactattaaaaaaaataatattagcaagcactgaaattattgccattaattttataatcttttttttggattccattattatatgaaacttacaaaacaaaatctataaatctaccttttaccccaaaatatagtcattgatctactaaatttttaaaagaacaaaaaagggttgactttttttgatatagaaatatcacaaattacaactagcttcataaaaaagacaaaaaaaatgtatcttgctgtgacatctggaccaagtcagggaggagactaatgatatacagcctggaaattaattttgacaaaatcatccatttattagagtaacaatataattgaattgaaataactaagaaaacacatatgtcacctaacaaaatctacgcgcaacatttcagtttaatgaaattgtaatacttggagaacaaatagtagactagaaaatattgtataaatagttagacaatcataacaaaatctcaccgtgtccttaacgaagaagaagaagaatg

SEQ ID NO: 24691 - DNA, 3003 bp, Unknown
  misc_feature (1)..( 3003): 2750-1469P.txt file - cDNA_ID_2183301; gDNA_ID_1972139; Annot_ID_179217
caatcaaagaagagtcaacggttaaactcatgtcgtggaacgagaaatatttacgtgggaacggaggagctccgccgtggaggaactctgtgacgtgtgatcgtgagccgcacatctcagcgacgaagaaatggatcttgtggtctgtggaggttgttgagaatcctgataaggttttgtttgctgatcggttttcatcaccggcttctagttttaactcgtcggtctcctccgacgggtcaaatctcgggtcaccgggtcagaaattgctgacttttggatcttctgaatctatcgggtcggatcctgggtcacttgtatcagtttcttcttcgaaacttatgtttactccgtcaaggtcgggtacattgtccccaaaaccaacagaggtacgcttcaattctaattcatataattttgtcacgcattatcacaacatactatactatataattaaaatattgattttgggggtattttgttttgtaacagaggaaatgttcgaagaagataatagtagaaaatgtatcggcgatggaaatattccgggatgcgaaatcggtgcgtttacgaagctatgcacatcatgggaaatatttgattgctgatgacgatgaagagggtgtgataatgggcaaaaacgggtcatctaaagaggctcgatggagagttgaaatggtaccaggatccgaaaaggcgatccggttaaagagctgccatggtggatacttgacggcgtccaatgagcggtttttgttgggagcgaccgggcataaggtggtgcagtctaggaagattcgtgccgatgagccggcgggagagtgggagccggtgaaagaaggttcaagggtgaagttaaggagcagaaacggcgggaattatttaagagccaatgggggagtgccaccttggaggaattcggttacgcatgatttaccaaaccggagtgctacgcagagttcggtggtttgggacgttgatgtggtcgatattcatgggaccggttgattcattactttaaaacttgtcttgaggctttgacattttgtttgcagcatgaataattttcatattttgataattggttggatgtaattggaaatgcgtttggaatttgtgaaaaaaaaatcagtaaacatagagttgcaacacttggtgtagagggtacttgttctgatttaattttgagagtaatcttagaagagtgtgacttttagacttttagtcctatgtcggaatgagctgtagggtcaatgggcttcaggttattgagatgactagtaagggtcctttgaggtttcttaatgatgatactctacgttttaagtgctcaggtttgttacaaattggtgatgatagcagagaagagagtgtagaggctgtacgaatgtattatatgtttccaaattccacccttaagaatatgtacgttagagtgttcgaatttctctatttgatatagcgtattgtttgtttgagaacgaacaaatgaagtcttatgagtttttcgtatagtttccgttttttgttgttctttcattttcttgttctttcgggtattttgatgtattttgattgttcaaggtttgatatgtagaaatacaaaaaatgatgtcccaaacaaacaaaatgaacatgcaaaattatgtagatgcttcaaaaagatcattaagaatagaagcccccaacctaaacaagatgggtttcaattttttcaagtagagcaagaagcgccaagcctggtgcaaaatatgccattgtacaaatatgtatataaagcatatttaaagcaaaataatgcatgtacaaattacgttaaccaaggaaattaacaatagaaacacaaagagtgtactaattgaaactatctacaaataactaatcgacgtctttttatttgaacgtctttttaattgttatgattagtgaaattatgacattaagtaaggttttcttagttagctaatgtatggctattcaattgttatgttaggctattttagttagtatatgaatttaggcagtctatgcaaatgatttcgttttcattttttcatatgtaaacatcaagatcaagtaacgccattcgagttgatattttttttttaaattagtgtgtgtaaattttggaccgcttatttgagtttgctaatgaagttgcatatatattacgttaaaccataggcaaactaatttgaaacatccgattcgatttcctgtaatttttcttggttaattgaccaaaatcaagatcttcagaaataaaataaaagacgaaagaaagctgtcgcaaagcagattgtgttaaaaaaaagtggattgggctcaaacgcaacttgtccagcccgtgacaattaccctatacgcaagtaagagtaacgtatcactggcaaaagttggtattagttacgatatctttgtcatgggggcatgcatgggcatggcttaagagttaagccttaagaagagtcccacactcgtgactctcatgatcgcttgttgtttcttacgggcaaatacatttaactttattcttcatttattcacctatattcttttggataataacttttctctatataaaataacaaacatcgtacgtttcatttatttacaacaagcgatgagaattaaaaggagaccttaattgatgatactcttcttttctctcggttacaacgggattattacagataatgataatctatatggatgctgacgtggaaaaacaaaatttggtgaaacacgtcaattaagcacgacttttccatggctagtggctaagatcgtttcatcacatggctatatcatataatacttggatgaattcaaaataaacgactgagaaaatgtccacgtcacggcgcaccgctttggacttaagtctcctataataaatacaacaccaaacattgcattccacattaattcgtcttgtgcaaaaaaagacacttcttaagcttcaacaagaaagaaatagtattcgcatagtattagaagatg

SEQ ID NO: 24692 - DNA, 3000 bp, Unknown; identical to SEQ ID NO: 9513
  misc_feature (1)..( 3000): 2750-1469P.txt file - cDNA_ID_2183305; gDNA_ID_1972139; Annot_ID_179218

SEQ ID NO: 24693 - DNA, 3003 bp, Unknown
  misc_feature (1)..( 3003): 2750-1469P.txt file - cDNA_ID_2183321; gDNA_ID_1972139; Annot_ID_179225
agaaaacaggatgatgatttatgttaaattagaagaaactatttattattaaatattttacatcatgaaaggagataacacctcgagtaattacaattagttttgagttaaacttcttttaactattcttaaaatcgaaatattagaaattgacattatcattttaaacaatttcccatgaaagccaactttagatattactcattatacaaaatcatgatctaatgtttttagacaatgactccaatgagtgctgacttaattagaccgtccaataattcaggtgcaattaaataaatggaaaattttaacattatgttactttctaacatatatatcattggttatacagtttgcagacccctgcaaggttggccccaactttagaactgataatataagaaataaaaaagcattaaaaagaaaaaaaatcttcccagcttcaagtcaggtccatgaaatggagaagtcagcagtcaaacatatcacagctcatatacagacgagattataaaagggaaatagaaaaagaagatataatttcacgggcagtctaaagaactttggttatgaatatttcgtataatttaatgtcaatttgttgtatgctttatgaaaagagagaaagagttctaaaaaattgaaaatgaaataaataatgtagagaaaagagagggtcggtcactgccacaattaagcggaagtggagaatggttggtatttgttgtgtccttcaaacctcaagaagcttcaatctcaagatccttttgttttattttctgcagattactttgtaaaatggtttattaggtatttttatatttgcaacagtctttttaacataaacagatgatatctaattctatcgatcttgctaggaaaaacaaaaagagaattttcttctcgagtctttaacactttagtgcagaaatttatgtggtacgcttagtcaaattcaataattgtttgtaaatgaatccacagagttgaatattggaaaattaatatattgcggctatatatttcaagataattaatgtttcggattttttttcggtacatgctttctaattcaccggaatattttatttctcattgacaattgtgtttttaactaaaattaacaccaaaaaaaaaacagtgttttaactaaaggatgtggtttgttgtttatgttaaccacaacaataaattctgaagagaaaaagtttgcaatagagactgaaccaggtttacaataaaattccttaatggaagggaaataaatcaagaaaacaaaacaaatattgcatggataagaaaaacacgacacttgtctatgcaacttgtttctttagttgcatgagatcactttaatgttaaagtcctcccaaacagtattggattcttcgttataaaaagacctcagggtgattagagccttgtccttgtgaatttgaatcatatactccaacatgtatacacgtacacacaaatacgtattcatatatggcactggaataatcaatatattcaattctgagaatagtagaatagcactggcctaaaaaaaaagcattagttaaatttcagcatattcttgtatccatgccatgataatggttactttgttgttttattgtctattatttctattatatatgaactttcaatttgaattttagatatattggcagtacaaatacaaaaattactttaaccactatagctcctccgagcattcgtcactgatcagtgagtgtgtgtttatatatgcgatattaaattaaataagtttttcttcacactgtgtgtgtgtgtgtgtttgtgtgcgtggtaacaataaagttctgcgtagacgacacgtatccaatattaatggagttccgaaagaaagatcttctggcaaaaccatcatatatagagacaacagtttattttatcttttaaacaaaaatacgatcacattttttttacctaaattgctaataaaaagtacatagaaaatggtttacaaatatcagccattaacatatatagttcaatattacccgacaaacaaaaacatagtttatttatgattctatctcaaaagaatttaagacgtcaaaagaggtaattagtaacatcattttattggagatattttgcaatgaaaactgccatgaatagaaagaggaggaatcagtaggtctagattaagtgaatgttctacttcatttttgttttagtcaaaaagatagtttcactaaatttattttaaagccattaagtggagggcttgattccttccatcacctttatcttgccctcaactttttttttttggatttacttgcatccttctccattaaacaaaccaaacccaaatatagtgtgtattttatttaataattatgaccagataaatgtggtagactaaaagtttattttacgtgaaacaatctatgtcattctttaactatctagaagaatttagtgttcattaacatgtaaatgtgaacgaataatataatgtgagtaatcgatatgcaatcaatccttaaactttgttaccactataccttgtagagaataatagaacaaaatcaattctcatatgttaattggtattggaaaccccatttcaaaatcaacttgcatattaagtaaagggaaaacaaacatgattgattagtctttattccaccactatattactagctttataaattcttggaattaatatcatctttagtgccctaaaaacaaagaaataaagctagttttctctagaggagaagaaaacaatgttatttcctaagaagagcataaagaaaactacaacatgaagtcattttctaataataaagagggcccaaattcttctttcttctcacccaattggacccttcctcaatcccttctcctctcctctctttaaattccgctaatacccttctcactttcactcttatatttcataaaaacctttttttatatctcctctacctcaaagtttgagagaaagaaagagagagaatg

SEQ ID NO: 24694 - DNA, 3003 bp, Unknown
  misc_feature (1)..( 3003): 2750-1469P.txt file - cDNA_ID_2183328; gDNA_ID_1972139; Annot_ID_179227
atataaactagaattatttttgtccaaatttttcgtaaataaattttgtaaacagcgattatgactctggcaatttcttaaaaaagaattggataagtactgataaatttgtattctctcaactaaaatctctttttaatagaaataaaagctaaatcccaggaatcccattttagtaccagtcgtggtataaatattaacacttactgattgccgagagacgaaagaggaaaatcccaacaataaagagcaaacgatcttacagctcataatatttcgttaattatcaaattgctaataggtaatttcgcggaatcttcctttgtaatttcctccaactttctctgctttgcttataattgcgtctttgcttcctcctttacctttacgcggcacatagattattctctccaagtgtgttaatttctcttcttcgtaatctaattttgttttgttactgttgatttgtgtctttctgtttcgtggactctttttgactcccatcaattttaggattcttcttcgtgtgtggattttgatttcttcttcttctctggtgggttttggaactgttaggcttttgggtattttgttgaattccttagggttttgtagtaagattttgataattattgaatcgtttagaacaagagtcaactttttaaagtcattttatagaatctgagtctactagtcgttgaataaatattcttaaagaaatgatttttataatcttcttctcgtcgactttatttattatttagaatcttgtatttgtttttataacccataatctagaatttgatgatttttcaggtataaagttttgtaatttacttttcaggagaaaaaaatgggtcaagctttgggttgtattcaagttgatcagtcgaatgtagcaatcaaagagacttttgggaaattcgacgaagttcttgagccgggttgtcactgtttgccatggtgtttgggaagtcaagtcgctggtcacctttctttacgtgttcaacagctcgatgttcgctgcgagacaaagactaaggtctcttgacacttcctcttgaatcaataccttactcgttctgtgtcattgaaggttgtaatggttttgggttactttgttgtttaggataatgtgtttgtcacggttgttgcttccattcaataccgtgccttagcggagagtgctcaagatgctttttacaagctcagcaacacgaggaatcagattcaagcttatgtctttgatggtttgtttcaatatccttcctttttggcttcttgatgttattgtgtttgccttaactaatcgatccaccatttttgcatagtgatccgagcaagtgtacctaagctggatctagactctacctttgagcaaaagaatgacattgcaaaaaccgttgagactgagctcgaaaaggtaaactactttccagccatctccttgagcaataattttgaaatttgtgcaaaaaattattatacataggttaagactctaactgctgttgtgtatataataggctatgtcgcattacgggtatgagattgttcagacactgattgtggatatcgagcctgatgtgcacgtcaagagggcaatgaatgagatcaatgctggtacgtttaaatcttgctatagaagttttcgacttttgtttgttgagaatctcacaatgttctgttctgtttctggtgtaaacacagcttctagaatgagagaggcagcgagtgagaaagctgaggcagagaagattctgcagatcaagcgtgctgagggagaagctgaatcgaaatacctttcaggtatgggtatagcccgtcagagacaagccattgtggacggtctgagaaacagcgtcctcgccttctccgagtctgttccaggaacatcttccaaagacgtgatggatatggttcttgtgactcagtactttgacacattgaaggaaattggtgcttcttcgaagtcaaactcggtgttcataccgcacggtccaggcgctgttagggacattgcttcacagatcagggatggtcttcttcagggtaactctgctgctgagtagagaaatgtctcaaagtacaaaaaggctttttcagagttttagagttgtgttactacttgctactcagtttatcttttagcggttggctctatatgggttcttaaatttcttatcgtttctctcttctaggcttgtggacttgatccattttcttgttttatgggtttgtggatagagtttgggcttgaaaaatatttgtgttattttgggttttaatgtcgttaactcgttattaatgtttaaacagtggttaaagaatttgttaacgagaatcctgattttactgaataacaaccagattgttaacatttaataaacatttcaatttaataaaaagaagcaaacaataaaataacgttataagaataaaaggaaaacaattaacttgataaaacaaaaagtagctactttttaaatctctacgataccaaaccactgagatctgtgcttcactatttttcagaaataaacgatttcacgatcttaacgttccaaactcatcgatcagccgtcagatggtaaatcagacaaaaaatagaaaacacaaaatctgagctactaaatttccttgtatcttgtatttagtaagattgtataataattaatatattaatatcgttgctcaaaaaaaaaaaaaaaaaaataaataatatattaatattttagtctaccgacgtggcagagaacgcggaaggatctaagctgacgtggcgttatagtttgataataacaagtccacgcattattcgaaataaaaaaagatcttttcctttcaccaaaccaaaagttatcatatctctctgccaaatactattttctcaaaaaataaaaataattccaacgactcttattaacctcttcttcagtaacattcgctgctacaaaatatcttcttcttctttcttctgctctctctctctctctcgccatg

SEQ ID NO: 24695 - DNA, 3003 bp, Unknown
  misc_feature (1)..( 3003): 2750-1469P.txt file - cDNA_ID_2183347; gDNA_ID_1972139; Annot_ID_179232
ggagaccgtttcatacttccaaactttcgatggtgttatggcagaatctgacaaggtaaaacaaaacactatttctcgatttaaccgtttaaaccacaaatttctctaattcttgttttattttcaatctccttctggtgtttcaatcggttagaattaatctcatgatcatatgattctgttatatatttacatatagttaccatataattcttatgtctgaaattaatacagttttactgcatctgataaaagtcaacttgcttgttcggaaatggtctcgagtatcgaaagttcattattttttttgggacggttatttaatgctcaaggataccaagattttccggtatttagaaaacttcggatgaaaacatttataattaagatccgctctaattaatataggtcggatcgatccattttttttctttttttctttattggcattcgatcatgttcacttttataatactatttactttgtgtgtattgagaactatttatcgtagaagtttagaagataggtccaaacagtttttagataaaaagtgaatataaatgtgtcttggatattacaggaagaggagcttgatgcaacaaaagcaaaggtggagaaagttcgggaagaaaatgagaaattaaagctcttactctctacgattcttaataattacaactctcttcaaatgcaagtctctaaagttctcggacaacaacaaggagcttcgtctatggagctagaccacattgatcgtcaagatgaaaataacgactatgatgtggatatatcacttaggcttggaagatcagagcaaaagatctctaaaaaggaggaaaataaggtggacaagatttctactaagaacgtagaggagtcaaaagataaaagatctgcactgggttttggatttcagattcaaagctatgaagcctcgaaactagatgatctttgtaggcaggttaagcttgcaaacgctgaaaataaatgtgtatcttcgaggaaagatgtcaaatcagttagaaatgaaaaccatcaagatgttttggaggagcatgaacaaacaggtttgaagaaaactagggtttgtgttaaagcatcatgtgaagacccatcagtacgtaccatcaaaaccatacattacatatatgtgtttatttaccatttcacatctaatttaattatttgatcatatacacgttacatgaatatatatagataaacgacggttgccagtggaggaaatatggtcaaaagactgcgaaaaccaatcctctcccacgagcctattaccgttgctccatgtcgtcaaattgtcccgttagaaaacaggtataatacattctataatttctcaatccaaatatctgtttattaacaattggttttgagtaaaaacttttaaaacgaatgtctataggtgcaaagatgtggagaagaagaaacctccgcttttatgacaacgtacgaaggaaaccatgaccatcctctccccatggaagcaagccacatggcagctggaacttccgcggctgcctccttattacaatctggctcctcctcttcctcctcctccacctcagcgagtctaagctatttcttcccttttcaccacttctctatctccaccactaactcgcacccgactgtaacattggacctcacacgaccaaactatcccaatcagttaccagacgactaccctctatcgtcctcctctttcagtctcaacttttcctctccagatcctccacctccatcatcgcatgaccacaccttgaactttagtggcttgcgaacacaagctccgttgagtacagattcattattggcccgttatcgaacgagactttccggacagcaataagccagtaactgtatcggtatagctagacacaagtctagaaagtaactgatttccgttttctttgtcattcatttgtttttcagcctctgaaagagagatctggttttggcatgatatgcaaaatgcttatatacttgtagatatccaaatgtttaaattagtggattacctatcatatcatggattatatatgtatatgaaggttttgtaaattaatggtctacacaaatttgatacaccaaatatttttttatgcttataaaaattttaaatacaatgttaattttttttgttggtgaattaagtaagtatgactatgatgacacaatgatatctaaaatggaaggtggttttcatgcagattgacaaaatctccctctttcacttttgcaaaattgtttgatttttacaaaataaactttagttagcatcacataaaatagtgggttatttgacaaattatcaacacaacgtattattatttgaaatcacatacgtattgtttactaatttgattattattattttttgctacagacatttactaatttgatggtcaaaattgtagtcaccattaaaattatttacataaaagaattgattattttacttccctcaattatcaaatataaatttgtgatgaatttgaccgaaatgaagatgtctgaattgtttgagccacctaaatgtttagatggtcgattcttaaaaaggaaagaaaacaaaatgaccaaaagaaagaaaacgtatgaaactatgatccatcagatattacttttaaatcaatcttgggctcaggcccgttactaccgttttctatcttagaattcggcccatccacgtcagcgactccggttataacgctgttaaactcttttgacacacgaccacttattataacgtcacgtgtcaatgcacttcatcaggacgcgcgtaaccgccagaaaagcgaaaccaaaggtccatctccgacacgttgcttatccgaccacactcaccactgttctaaattctctcttttttttttccttaaccaaaaaagctctctttttttcttctgggtttcatcgtttccaatctaaaatcatcgtagatttgtttgaaattcttcaaattgagccggtatcaagacatg

SEQ ID NO: 24696 - DNA, 3000 bp, Unknown; identical to SEQ ID NO: 9531
  misc_feature (1)..( 3000): 2750-1469P.txt file - cDNA_ID_2183380; gDNA_ID_1972143; Annot_ID_179284

SEQ ID NO: 24697 - DNA, 3000 bp, Unknown; identical to SEQ ID NO: 9538
  misc_feature (1)..( 3000): 2750-1469P.txt file - cDNA_ID_2183387; gDNA_ID_1972143; Annot_ID_179297

SEQ ID NO: 24698 - DNA, 3 bp, Unknown
  misc_feature (1)..( 3): 2750-1469P.txt file - cDNA_ID_2183387; gDNA_ID_1591899; Annot_ID_151669
  misc_feature (1)..(2): n is a, c, g, or t
nna

SEQ ID NO: 24699 - DNA, 32 bp, Unknown; identical to SEQ ID NO: 325
  misc_feature (1)..( 32): 2750-1469P.txt file - cDNA_ID_2183387; gDNA_ID_1563836; Annot_ID_148378

SEQ ID NO: 24700 - DNA, 3000 bp, Unknown; identical to SEQ ID NO: 9534
  misc_feature (1)..( 3000): 2750-1469P.txt file - cDNA_ID_2183399; gDNA_ID_1972143; Annot_ID_179300

SEQ ID NO: 24701 - DNA, 3003 bp, Unknown
  misc_feature (1)..( 3003): 2750-1469P.txt file - cDNA_ID_2183411; gDNA_ID_1972143; Annot_ID_179305
cgtcttctcaataacttctgatgtttataatggtcgcattttagttatatataacaattgaaccactgatcatctaacctcaagtgttcttaatttaatatcgataggtgccttatgactttcgatggtgggaagatcaaagatgtgtatatgtgtttcgccagcctcctcctggaacctatgacattcgaacagtctgagtaagatgaaatatcaaaaaaaaagagggaccctgagagctccatctaggtcccatgggtatgcaaatatttaaggctaggaaattaccgtaagagagttgcaaagaaaatcaatctcatcaatgaaattattggtcacggcccgttttttattgggccattactgggcctgttttataagagaatccagcaaagtcagcggtaaaggagttcttttttaataaaattaaaattttcttataaaaaagtgattaaaataacgtcacaccactatataacgcgacgggaccatcggtttcaaaaacataacataaaacaaataacatatttcttttaaaaattctttgtttttctttaaaatttttttaaagccatggttactattatactcacgtgattgtactgtagaatttaaataagtatgaagaaatggaccaccaccaaacatatccattatgtaaaatccaattgtatcctatcaattcatgttctaacaaatgtacatcttatatagttaatgcgataaggaggaatggagggaaaatctgagttcaaaacttgaacttggaccaaccaaacagtaaattttgcatgagtataaataattcttagatctctcttttaacttttttttttttgggtgactttgtttgtgttttgaatattagatctacctttttggtttgttgataaacattattaggtccatgacttcttgttgttatacgtccatctctcgttagtattttagagtcattattaaactttaagactttagagtaagtaagtcaaataaaataataagactttagatatacacaaccaagtttttagtttgaattcaaaactcgaacgaagtctgattatataatcacgtgttgtaactaatttcaaagaaactatgattgactcatcatactatgaaaatatcgttgacttattacagttttttcatcaacaaaatatatatacatctcatatggttgaagtataactactatcatatcatcattcatcaatcacttttgttgttactgttttcagagagattactacatagtagtacataacaagagaaaacaaagccatgacaagaaacatcaacaaaattctaaaaagcaagaagacgaagctggacaagatctctgcagcatttaacatacaccactccactcgcaatgaagttttatcgtgttgggacctccgattttggactttttttaattttacttactttggtaattaagtgatttttttttgctactacatgtgaaccaaaaagaaaatgaaaacagaaagttgtattaatggctagggattttaacttgtagctcggttgcttctcattaattagtaaacggtgtgaattaatggcatatataccattgtacgtaacaaggatcataaatgtggcaaaaattaaatcacagttgtagacaaataataaccccagatctcacgggttgatctcccaaatctatgtttaagcacgctactaaattcaaaaaattaagcactaatttaattaactcaagtctcccccaataaaaacacttcctttttgtctatctcccatatatgtaatggtcaacaagtcaaatttttaaaattcattatattctctgtacatgaaaacatttagtaatgtttctttttaaaaaacactgttttgatttaatgtcgttagtaaagtttattattttgatttctttttaactttccttaattatttctaaatgtgtcttctttatcgtttaaaccacactagtgtgtgcgtgtctccttcactttcaaagacagtctctttccccaaagagcggattcaggattcaccatctcgatctgtgtccaaagctcctatctttcttctttcttccctgaagaattttctggagcttctcaggtcaaatctcaaatctttttttaacttaattttgttatttctatcagaaagtttcgatttttatgctcatgcttgtgcatccgcgtacctgcatttcgttttgtgtttgagccgccaaagttttcaacttttttttttgggatttattgcaaatttgtcgatgttgaaaggttttctcaaggagaatgtgaagaaaaaggaagagaatgtgagttgattttaggcatagggttttgtgggttctttcagatttatgtagaatggtgcagctctgattcatgggtttgcaaatggtttctcacgatctgttcgttttcccaaggaaatgtagctgcttttttttttttttttgtcatcagattgaaatgtagctgcttttgaagagaaaagtctgatgcttctcttccgattttttatggatggtatttataaaagaaagaaatagtagttagattgtcgaatattggttttcctaatcttttttcttctctagattttataaaattggagtctttttctgcattactgtttgcattgttcaataaggaaatcaaataacttttgattctaccattgaatcttacggagttttgaaaaaaagtttgaagctttgaactttaatgtatcttctattgatacttttgttgatcagtggaaaattttcaaggaaaatcctctgtaagactcaattggttcgattattaagtcaaattggccatctttttttcagaacatttttatatgcatggttgcagattgctatctgctctgaatgttgatctctctattgccttaactaatgatctttgcgttcttttgacagatcagaggaagatgatgcaatcctaagactctaagacttcttcaaggctgtgttttatcgtgggatttttaaacatg

SEQ ID NO: 24702 - DNA, 3003 bp, Unknown
  misc_feature (1)..( 3003): 2750-1469P.txt file - cDNA_ID_2183434; gDNA_ID_1972143; Annot_ID_179314
ttggacataaaacctgaaatccaaaatccgatctgacatcgatccaaaaaatagttataaaattccaacgaaaaaataaattattctatctaaattatctgatctgaatccgatacgaaccgaaaaccgaaaagatatataaaacctcaaaataaaattatatatcaaaaattattagttatatttagttagagttttatattcaagattactaaataacaaaattatccaaaataacctagatatcctaaatttttttagttttatttattaaaattatacatttttttgtaaagagtaaccaaatttttcgtaaaactaaaacaaattttttacaaaattgaactgccggattatttttttttgcaaatgttctcatttgaaggaagaatttgagagaaaaataaaacactagttaacaattgaaacttaagaccggtcttaaaataataattaaagggaaacactagtttaatattgaaactttaggccggtctcaaaataataatttagcacgaaataattaaggcaacatgtgctttgcacttcaacgcggaatcatatgaattatacattgacttaggattattattgacgtcgattcggcctttaaattataatttagaaccaaccataattataatatcactacaattggttagtatcaaacaatttaacaactgttaaatatcactgcaattgacttttagaatagatcatgataaagatcggtctttaaataataatttagcaccaaataattagagaggctatgatttgtattttaaatcggttatttatggactttaatttcgagtgggaaaatagaagaaagcaaaagtgatcaatggaggggcctttgttgactaagaatgagcacatcctcgacgacgttacaataatccatggcgattcttcctcaaacgaagagcacatcgtcaacattacaaccaatgtcgattcttcatcagatgatgagcaaacacaggatgattgtggtgatcatttgagacgtataatagctctttttgtggatgaagggtgtgatggatttacatctagtcatgtttgggttatggtcgagtttgttttgactttgctccaggttgttgcagccattgctgtcctgactctgacaaaagatgaaacagatccacagaaagtgtttcgtacactgatcatctgttataccggtggctgtattgtcgtgctccttattctaggtttggatttctgggattattgcggaaggtataaactataatttgtttattctttgtttttaaggcattagaaaccgaaatcgatagataacagtttcttattgatttgcagattctacgaggtgatggagaatttgaaaaagatgcttgactatttcttcgtgggttgggttgtggtgttttcatggcatcttataaacaactcatcatctccagataatgctacacaacagtactggtgcgcaacaatactaaattttctaactatttagtatgtctcgaaaacagagtaaatctctctaatgatgataatccaccatgcattttcctgttgcaggttatgtatggctttccttgttgtcagttgcattctacatgtgcttcctaatctcccctgcgcggcggcttgttttctatatcctatgatacttcgtcttacccagtctatagacttctttgatgacattactgaaaagatagaggacattaactggttaatctttgtatacttttttggaatcttctcctgcattatctgttgcatttttacttgttgcagcagattatgtagataaaatgaagaatggatcatgtcgtttctcctttcttttgtttaacaatgttgtaatactcttatctatgtatcaaatataaagtcatgactcatgactgaatcctctcttcctgaaatcgttggcctgaaagacacgatgcttacgtcccaattacctctgcatggacgagcttgtgaaccgcatgtacaagtatccattcctttgttggtcctagagctgatccattcctgcatacgaattaataatccaattcaaagagagagtagtagaccgtgagttcaagtcttctgaagcagcatcacgtttgaaccacgttatcgatcggttcagtcttcaactaaagtgaagtcttaggtgtatgaaatgtaactaattagtcttccaacaacacttaaaactcataagagcaaaacttcttttaggaataagtaaaacagagcagaagaagcagtcaagttaatcgggattaccaagaaccaatggtcaacctccaaattcttcaaatttcctggaaaaacacataagggggaaagcaaaacaccaaatataaacacattcctcgagcgcttaactacgtaacaacaatattatcaatattgcatgattacaactctaaatctctatatattttgatgatctataattttttgctttgataaaataaagttatgatctttgatttaaaagtataaaaagatttggaataggagaaaaaaaaaaagcaaaatatagatataactgaaattcatagttgcaaaaggggaagtggagaactggagttcgtgggtgaacggttaagaaaggttggctggtttgacattattggtccatcatgcaacaataatatattaagagtttagaggataagaatttcaacaagtggacgtgccggagtggttatcgggcatgactagaaatcatgtgggctttgcccgcgcaggttcgaatcctgccgttcacgttttttgtttttattttaccttatcccagttttgtcctttttagtttcctcaatgttttcaatcccgcctatattttaccctagatttttaattaattgataccgaatcccgctttctgaaatcattttcaattttcaaaactcatctcctctctctctttcactctatctccttcgatctctctcggtgtcagtgaatttaactgaaatcccatcgccggggaattttccggtgatttagatg

SEQ ID NO: 24703 - DNA, 22 bp, Unknown
  misc_feature (1)..( 22): 2750-1469P.txt file - cDNA_ID_2183469; gDNA_ID_1592193; Annot_ID_152087
tggaccaaagtaccggaatatg

SEQ ID NO: 24704 - DNA, 3000 bp, Unknown; identical to SEQ ID NO: 9556
  misc_feature (1)..( 3000): 2750-1469P.txt file - cDNA_ID_2183469; gDNA_ID_1972144; Annot_ID_179325

SEQ ID NO: 24705 - DNA, 3000 bp, Unknown; identical to SEQ ID NO: 9544
  misc_feature (1)..( 3000): 2750-1469P.txt file - cDNA_ID_2183484; gDNA_ID_1972144; Annot_ID_179331

SEQ ID NO: 24706 - DNA, 3003 bp, Unknown
  misc_feature (1)..( 3003): 2750-1469P.txt file - cDNA_ID_2183488; gDNA_ID_1972144; Annot_ID_179332
ttcaaggtggaattttttgagttgattacatattttcaagacatatgctgatttaatagtatattgcaaatatgtaatcaactcaatgttttaaaattgttagcctaagtttaattatattctcacttgaaacaattttactgcatgtagtacgccaactggccttggacttcagccatgtgtttcacatggtggatttgtattcaacaagcctacccacccatgagttttaccagcaacgattaaaacaattgcaaactcaacgcgtctaagcaaagaagaacaacaagttgacgaaagaactctgagctttgcccacctctactcggtatggttcaatgttactatagattactttctaacattaaaacacacactgtttttggatttaaaattttattatagacttaaaaatttaataatagtatgacgcttttaaatgattataggatcaatcacaagttagtgcttccttaaagatattttcctgcgtgggttagaagaaagtgatatcctgattcacgtggttcggttgacccctacttttgttttcgctatggaattataaataaataaaagagaactaaacatgtattcattccatttcattatgtgagcctgaattgtgtgacatgatcagaataccaccacaaaataaaatacgaaactcatcacaatcctaaagctttgattgatacaataagacgcggctaatttaggaatcaaatcgaatcatccacagattggtaattcttagagtggagattatacgataaatcacagataatgggaacttcaacgctcaaaaatggattggttttgtaaactattacattgctctcgagggatattttatttagggtattttgaatttttatgaatcaaatttatttcctacccggccatgacacataaatcaaagataaatatctaatttttattaaatagatttagttctcaagattcagtaacgcatacatataaaggaaacttatcaatgagtacatgaacaatcatgtccacttgcttgatttatacaaacgcaattaggatagtaaggatccttagtttcatctttgcactgttgaggaccccgagcacgaattggactacaatatgttcccggaaagtattcaacaagtacaggtggacgatcttctgcctccactgtttcatatcaaccacaaaaatattagatggtggatgaaacgtgttagataaatacaaaattgataacacaaaaatttacattcataacattttttcatcagtcaatgttttcatattaagcaagtatataaacaatcgaaattatatgaattatatatatctcacctttagcattatacatcacgaaaaacatgagaacacaaagaaccacacacgcactaacagatttcatgatgcaaatgatatgtctatattttttcttttgttgttgtgtttatctggtactgaatattttttcttatcaacaatgtctacatatatatacagacaacacacacacagatatttttttattcttactcaaattaaaggcaataaagttaagtttgaccaaaataattaatgccaatttgagagtcaaaccaaaatatttattaaaagaataacctaaataagataaacacatttaagtaataaatcatatatttgacagctaatctacactcccaacgttccagattataatattttctaaataagcacaaagtttaagagaccataaatgttttgttattctaatattaaatacccataaatatagtatctaacatttattttaaaaattaaccaatagaaaaagattgcaaattattaatagtcataataaattatgcattgatatttgagaaaaaataatagaacgacaaagtgagtaatatgactttacttgcatatataattattttttttcttttctcttcttatgcatttaaatcatcatccacctgttaataataaattggttttaagaaattactattaaaaattatgacattgtttccttttttggataattaatatatatggattatgatcccttctcgttggaatttattaatattatcattactatgattagttttgatttacaaaaatttcacaattattttgtttccttttttgggataattaatatatatagattatgatcccttctcgttggaatttattaatatcattattattattattagttttgatttacaaaaatttcacaattttaagaaataatctaaaattaccattaaataattaatttgcaaagattcctaaagtgtcagttttattatggtcatatattgaaaaattataattgcagtaatttccctttaattgtgagatttctagaaatatatctttttctctgaaaaagaggttttccttgaaatatatatcatgataccagttagtgacttagtgttgtccataataaatctttgtttatcaccacaataagcatactgaaactgaagatatcaccaaactttggttatgattttctttcctatcgcatcgtatgttttatatagttgaccgttttaaaatttgtagtttttttttttataatcgtcgatattctattttaaccttttcgatgtgaagaaaaaaatgaaaactctgacgcatctttcattagttaacttttaattcgcatttgagtactactacacgcgtctcagtgcatggcactagtgtgaatctcgaattcaatcttctttgccattgttatctatatcaaaacaacaacaacaacaacaatcgcaaactatctacatgaaccatcatcttttattcaaaaaaaaatacatgaaccatcatctttttgtccatccccgtgacaataaattagtattaaacataatcagtccacttgtctttgggatttctccttataaaaacatcactaactgtgaaagttaaaaccacatcctcaaatcaactctacctttgttatcatcttcttcaatctttcaacctatatcgacaattatg

SEQ ID NO: 24707 - DNA, 3000 bp, Unknown; identical to SEQ ID NO: 9551
  misc_feature (1)..( 3000): 2750-1469P.txt file - cDNA_ID_2183508; gDNA_ID_1972144; Annot_ID_179337

SEQ ID NO: 24708 - DNA, 3000 bp, Unknown; identical to SEQ ID NO: 9549
  misc_feature (1)..( 3000): 2750-1469P.txt file - cDNA_ID_2183518; gDNA_ID_1972144; Annot_ID_179340

SEQ ID NO: 24709 - DNA, 3003 bp, Unknown
  misc_feature (1)..( 3003): 2750-1469P.txt file - cDNA_ID_2183559; gDNA_ID_1972148; Annot_ID_179376
ccacgccacaagatggtcaatacgtttgtgatattagtatccatcccaaagacaaaagatccagaagcaggtaaagtatcacctaaccatgatgtaagttcccatctcttcctggtcttgccatcgaaacctagtttcatcccaggaagaagagtatctgttggataatcgaaactttgccacaaaacccgcttcatcgatccatcagcatccatctcttggagctgaagatttccagaatccaaaagctgaagggttgtgtttcttgtggtttctatagagcttagctcaagcatggttgatgctcctcttaaaatcttcaatctgccaagagaatccactgtgaggcttccagagcggtctgagattggattgttacggttagcaatccagacaggtctgtcctggctatcagtattaagataaagattgttgaaccaaattccaagatacaagttttctgaattcttaaagttgaaaaacttgagtttgaagattttaaaagcagaaacgagctcttgcccatctttcaagaactgaccctgatgtagcgtatctgtttcactgcatgattttcctaacaagagagataaagtaagaagagagacaaagatgccatttgaacacatagtttcagaaagatggatgatttggcaaatagatttctttctaaagtggttttttaaagatatatcttgtttgtgatcaaagtcatatcagaagttccaagtctactacgctgggagacaaaattgaagtcttggccgttgaagtttctaagcaacagctgttatcacaactaattagcaagaaagtgaccacaaaattgaagttgactcttattacctaaaacaagacacatacataacagaaccagacgccatgctcttgagcaattgtttttgtttttaacgaacatctcacgcctgttgggagaatacaacacccaataaggatttaaaagggggagactacttacctgagaaataaaaagccaattgctaccaagagaggagaaacagagttatatcatttcttcataaaaagacaaaaaagtatttcatcatggttcataaaaccccaaatcttattggtaaagaaaaataaataatttataatcattttgttgaaagaaaaaaacccaaaaaaaaaaaagaaataagaaatccaaaagcttcttgtattgattgaacggaaaatgttgttagagtacataataataaccctgttttacttggtaaggagaccattttattggtttcaatggtagaaaagaatacaagaatcagacttagcttgtaacatataactggttagaaataaagactcaagtaaggtatatcatccgtggaattgttgaccttcgaatcttgggttacaagcaaacgtaacaatcgttgaagctatcgatggaagataaagacttcctcgaatccattctctagcttattaggtcttctctacaatccacaacaacttgagaaagacgactatgtatgaagtacctcgaaagaaagtgaaggaataatgagaaatgagagaaaattggtaactcaagagtgtgataaactgctcatattgtttctctactatgtgtgggttccgtggagaaggagaagaatatacgacatagttttgataaaccaatttaaaagttttaatgattttactattacagtattagatgttttcgaagctagaagattttctctctttttctttttttttggcaagaatttaggtaacaaatataacaactcaaaaacaatatttttatatttaagtctgatataaaataaataaatgataataattttcaaattataaatttaaaaatctaataaattataaatacaaaatgataattaaaaagacgctaaaaacttcaatccgcctgggtggatgggaagaagcaaatctttgagtgagtttttaattcaagaataattaaaatactccatttggtgatttggtggaccgttagaaattaaaagcaaaatgcaaaaatattcaagtgggataacataatttaactgacaatttgttcatgtttccactaacttttctgatggaaaaaaacgcactatttgcaactataacgcactaatctcttaaaaaaaaaggttaaccataaactctaaactcttccaaaaaagcttaaatactcctaactaaccaaattaatcttttaaacaaaagtcaaaaagttacaaattatatgaaaactcacgtcaaccccagttacaatattgtctctggaaaacttcctaaaactagtacattaaataaatatttatagaaagaaccgttcattagttttaaattagaatactaattaacatcacagtaatgccgttcttaacttaataatttttaaaacagaacacacagattcttaagtacttcctcctccactcgaatatctttttattctctctctctctctctcacatttaaccccaaaatcatggatcgccttaccaagaacaaaaccctaattcatcatcacttgtctgattcttctctattggtttatcttttatgaaccttcctccttggccggtctctcaatatccccggtatgtaaatgtttgacctctatcttatctcttctgttctgttctttgttttgtctttgtttgtccatttttggttgttactggttccacacgtgttctccgcagctttatttttagtgctctcttttatttttaatgtaattcgcaattttttctattaatcgtagaatttcccggtttttgtggatgtgtttcagttccgttattgcaatttttccaggatttgctgtttgaataaaaaattctgttttttttttctttctcttttctgggttaagatctttttctcatagcaaaggtaatttctgtgattgtagcatgattcattgtttgttttaataatttctctgaattcatgtattgattcctttgtttctgggagatttttgtagttttagagttgttttggtgaggtttgatcatg

SEQ ID NO: 24710 - DNA, 3003 bp, Unknown
  misc_feature (1)..( 3003): 2750-1469P.txt file - cDNA_ID_2183573; gDNA_ID_1972148; Annot_ID_179380
ctgatgctctagtgcattttatcggcggcattgctaactacaatgagagacacctacagcactatagcaagaatatactgataggtcacatcccttatgttcatttgtaacaataagcttctttgaacaaacaaacaaaagaatagtgagagaagcaaatataaaaagggaatgtggtgaaagagatgatcaagtctagagagttgcaaggaccaatgttgttagactagaggatccattatagaattataaagtggtgtcttttttatgttgtctctgtcattttttaatggcatgaagttgttagtggcttgcttgattcttgtggggtaaaagcatttacatcattatagaagcaacttccagaagacagcaaacagaagattattgtactgagctttcctatgaatctgtgatggttatcttctcctctactaaatggtgtgtgtcaccatcttgttcatgttcaatatcttcttcattgttttgcatttagagtcaattttaaaaacttattttattttcctttacgtacatgcctaattctattatagaaattgaacttattttaaaaaatttgccactttttcattccatacaccaaaaaacacaagtatatgatcctcaatcacattgatacgaatgctatcttgttctgcggtacagagcattttcaacaacatatttggatatctatctagaatcaacaacaatttttttttacatatatttgtatttttcatattcatatggggtactttatattcgaatttcatagaaaactaatatctttaaatttacatttttgtaaacaaaatttagttgtattttagaaataatgtaatttttgtgtgaaaagggacatgataagaccgaatttgaagtagactggttacctaacataacatcaatggatttggatttcaaaagagagaaaaagaagagaaattattaaggataaaaccaacaaatcaataaagtatatgcataaatttacagactattaatatcatgaatctatcggtttgttcaaaaaaaaagttgttgttagaatttctctttaaaaatagtatggttaattaagaaagaatgattatacatataaaaacaaaactcctaaatgtttaaatgatttaaaactgagagaatattgttttacaatcttttagaggattgtgattctcataatcagaagaaaataattgcagatacaaagatcttagctggctacgtgaagggcatgcttgagatatcataactctgatgtgcatccacacatgacaattgacagtcttaacatattttatgtccaaattataccattaggcggattatttagaacttgtccacgagaaacatattgtatgtttgtgatccatattattatttcttctttcttctaatataaaaattatttaaattttattatatggcagaaaagcagtagtttggttggcatgactcgaatttaagatcgcaaatgtaaaatggatctcccagtcatcgtttttgttcatatttatatgcggttcggtcacagttgacatgttcacacggttcctctatttaattcagatttcagacaaggtgtaataatttgaatggatatgaaacatttgtaaatatttataaaattaatgaaagaccaagaggtttggagaattagtttatactataataagcttatcactaaagaacataattaaacatcataaaaagaaagaaaaatagagagagagatatagactttattattaattgactgtacatcgtattttcgactaatattaattgactatacatcggctattcgaagtatatatctactgataccatttttttataatcaaagtgtaattcatgattttaccacttgacgagttcttttaggatgagtgtagccatcaaataactcatttatcgatttttttaatggatataaaacataaacactatttcgattggcgagatgaaaaagcttagatatttcaacgcttgttaagaatcgatttctgacttgcaacttttttacaagtaggaacgactaatttactaccacttggagtaaacacgtaccgataagattgaaaagttacaatttagagatttgaggatttatgtaccgttcaaagaaatcgccaagtttaataatttgtttattctgttaggtaggaatacaacgagcatgtgcataattaaaatataaaataaacctaaacttaacggcggtcattgcctccaatgagtatatgcatgttatgtggtcggagtttttaatgtccaaactgggtttattttttgacatcaacatgcactttttatagtacaattaagtttggtgcaggcgcagcaagcaagccacacccgtacattactgcgtacaaacaagaagcggtcaatttttcgagaaagacgatccatacgttctgtgtaaataaaaaaataatcagatttaacatacattttgtggaaaacaattcttcttatatgaaaacaccgtagaatgtaaagccagaggagatttaccaaggtggcttcgttgagatatttgaagattgttccacttgtgccttctaaaacgttagtgatctgttatatacgttacctcgctaacaacatgttcatatataacacacaaaaagttatttatgtttttttatgttagaaaagagaaaaatattttatagcgttgacaaaaaatttaaccaaaagaaattaaagtgtcataccacttggtttttggagtctgattctcacgcgctcttacacgcgtacgtgacaagtaaattcacaacccatttacggggtggaagtgacgacactctctcacggtcaaacacattatcctgtccgaaaagtgaaaactaacacaaaacgtcaccgtttttccttgactcagtcctctagcacgaggtccacgagcaacgtttctcgtttgccttatttatcatctctctctatctctctcttcacactgccaaactccaaacaaaagtaaaaatg

SEQ ID NO: 24711 - DNA, 3000 bp, Unknown
  misc_feature (1)..( 3000): 2750-1469P.txt file - cDNA_ID_2183581; gDNA_ID_1972148; Annot_ID_179382
gtgcgagctactacaccggttgggaggagtcctgtgacttcaccggtgagggcttcacaacgtggtgaggcggtgggggttgtgatggagacggtgacggaggttaggagggtagagagtaataatagtgagaaggttaatggttttgtggagagtaagaaggctatgagtgctatggaagctcgagccatggcttgggatgaagcagaacgtgctaaattcatggctaggtgattaacgttaattggttaaatttatggttgattttaatatgtgttaatgtgattcgtgtttgagagttttttttttttgtgtggaattaggtataagagagaggaagtgaagatacaagcttgggagaatcacgagaagagaaaggctgagatggagatgaagaaaatggaggtaagatgttctgtctaattgtggaaagagagttgtcaacacgtgttcaatccgaatttcggttcagtctttttttagttttttaaaagacaaagtagtgtggattggtttgatatggattggatctattaattgttaaagagaaaaataacgttatggattgaaaaggttttaaaacaatgtgtgaacgtgtgtttaggtgaaggcggagaggatgaaagcaagggcagaggagaagttggccaacaagctagctgcgacgaaaaggatagcggaagagaggagggcgaatgcggaggctaagttaaacgaaaaggcggtgaagacatcggagaaagctgattatataaggaggagtggtcacttgccttcttctttttctttctcctttaagcttccctctcgttgttggtgtcaataattgtctattttcattagaatgtaatcgtatggatttagtgatattcaataactaacgcaaaaaaaaaaaaaaaagttttgtttggggaagtagataaaagaaattgagccaagaactctcaaagttaatcaaggtcccacgagtggccaactatccgcactttaattgctaacttcacttaaaactatgtcgctaaccttttaattgacacaaacacatttggggaaactcataatctttgatgtgaccggtaaagcaaaagttttgggctttttaccagatgtctgatctcgcatttggcccgaccccgcaattttgggcttctaagataaggtcaggcccggctttaaggcacaatgtaagcccagcagttcaaaggttgatccgacattaatttggtaacggaggaatctcaacttaaatgataagcatttacgatccgagctgacgactcgtaacgtgcgaagttaatgaggcgagatccgcggcgtgaagtcagcgaatcatttaactcgtttgattcgatgtatttgtataaataagagtcaattgacattgtaaaaggggatacacattgtactgaaactatactgaaatacataaatacttttcacttgatcactgttcgtctaacaagatttaagaccttcacgaaacaaccacaaaattctaattgcggattacgacatccacacaaatcaaataaagataatctcagatatgatggaatagtactagtacttgatagtgattttgattgtcaaattttgtaaagagcaaaaaaattgaagtctagaatgaaagatgactcatatgtttcgaccaagctagtcatgaacacaaacaagaagagaaatgattagttcgtgattgagagattatgaatattcataatgttctaaaacggtttatgtggtcccctaaacattatgcagccacaaaccgtgacaatcattttttcggacattgaaattagacattttagttttgactggccttcggcaatattaggtacataattatcaaagttaacatgactccaaaaattaacatatgttttttgatttaaatgatttgatggtaatattaaggttttcatgtcttagagcaattttatttgtggtttctagatataagtttcttaacattaaaacaacaaaaataatattatctaactatgtgagtttcttgaatagttaagaaattctctccaaaatttcctatataaggtattttagagatgactttttcactaatcaaaaagcccacacattcttttataataaattttctttctttaaaataaaagacttatgtttagaaatcatcaatgagattgttcttatgttccaagtgctccaacatcgactttcaagataatagtctttgtggttaagatgacaataattcgattaattttgggtgtgagtcgtgtgactatcccacgaaaataaaattgttttgccaatttgatggtaaaatctcacgataaaaactcaaacaataacagcctaccaaaaaaaaaactcaagaccataacatgttaaatttaaataaataaatatatttttggtttcaataatattgtcgtagaagttttaaaatattttagagataaaaataaaaagaaacacattgattaattacaaaagttaggggctccttatacctttttttttttcatcaaggggctccttatactaaaacaataaaatagagggggcgaatacaaaaacacgattttagagacctaaagctttgagctttcgacgagaaactttcttctctctctctctctccgccattgttcgttccctctccacggtaatctatatccacccgtcgtcaatcggaactttacgaactccttatcaatcgtattttcactttccaattctgagttctcttctcgtttcgtcctctcttcctccgtatccacgggtctcgctttcggtttctagggtttcgcggttctgatcacaagttctgcttcaattgtaagcgatttgatcgcaagtagctgttaaatcggtgcgtaattcaacttttgaaatctcaaggtttagtctctgcaattctgattttgaacacagctagctagtagcagatttaagagttcgtcaaattaggattttgggtttgtttgggtccctttctcaccgaagttctgtatg

SEQ ID NO: 24712 - DNA, 3003 bp, Unknown
  misc_feature (1)..( 3003): 2750-1469P.txt file - cDNA_ID_2183581; gDNA_ID_1971795; Annot_ID_175649
ccggtgcgagctactacaccggttgggaggagtcctgtgacttcaccggtgagggcttcacaacgtggtgaggcggtgggggttgtgatggagacggtgacggaggttaggagggtagagagtaataatagtgagaaggttaatggttttgtggagagtaagaaggctatgagtgctatggaagctcgagccatggcttgggatgaagcagaacgtgctaaattcatggctaggtgattaacgttaattggttaaatttatggttgattttaatatgtgttaatgtgattcgtgtttgagagttttttttttttgtgtggaattaggtataagagagaggaagtgaagatacaagcttgggagaatcacgagaagagaaaggctgagatggagatgaagaaaatggaggtaagatgttctgtctaattgtggaaagagagttgtcaacacgtgttcaatccgaatttcggttcagtctttttttagttttttaaaagacaaagtagtgtggattggtttgatatggattggatctattaattgttaaagagaaaaataacgttatggattgaaaaggttttaaaacaatgtgtgaacgtgtgtttaggtgaaggcggagaggatgaaagcaagggcagaggagaagttggccaacaagctagctgcgacgaaaaggatagcggaagagaggagggcgaatgcggaggctaagttaaacgaaaaggcggtgaagacatcggagaaagctgattatataaggaggagtggtcacttgccttcttctttttctttctcctttaagcttccctctcgttgttggtgtcaataattgtctattttcattagaatgtaatcgtatggatttagtgatattcaataactaacgcaaaaaaaaaaaaaaaagttttgtttggggaagtagataaaagaaattgagccaagaactctcaaagttaatcaaggtcccacgagtggccaactatccgcactttaattgctaacttcacttaaaactatgtcgctaaccttttaattgacacaaacacatttggggaaactcataatctttgatgtgaccggtaaagcaaaagttttgggctttttaccagatgtctgatctcgcatttggcccgaccccgcaattttgggcttctaagataaggtcaggcccggctttaaggcacaatgtaagcccagcagttcaaaggttgatccgacattaatttggtaacggaggaatctcaacttaaatgataagcatttacgatccgagctgacgactcgtaacgtgcgaagttaatgaggcgagatccgcggcgtgaagtcagcgaatcatttaactcgtttgattcgatgtatttgtataaataagagtcaattgacattgtaaaaggggatacacattgtactgaaactatactgaaatacataaatacttttcacttgatcactgttcgtctaacaagatttaagaccttcacgaaacaaccacaaaattctaattgcggattacgacatccacacaaatcaaataaagataatctcagatatgatggaatagtactagtacttgatagtgattttgattgtcaaattttgtaaagagcaaaaaaattgaagtctagaatgaaagatgactcatatgtttcgaccaagctagtcatgaacacaaacaagaagagaaatgattagttcgtgattgagagattatgaatattcataatgttctaaaacggtttatgtggtcccctaaacattatgcagccacaaaccgtgacaatcattttttcggacattgaaattagacattttagttttgactggccttcggcaatattaggtacataattatcaaagttaacatgactccaaaaattaacatatgttttttgatttaaatgatttgatggtaatattaaggttttcatgtcttagagcaattttatttgtggtttctagatataagtttcttaacattaaaacaacaaaaataatattatctaactatgtgagtttcttgaatagttaagaaattctctccaaaatttcctatataaggtattttagagatgactttttcactaatcaaaaagcccacacattcttttataataaattttctttctttaaaataaaagacttatgtttagaaatcatcaatgagattgttcttatgttccaagtgctccaacatcgactttcaagataatagtctttgtggttaagatgacaataattcgattaattttgggtgtgagtcgtgtgactatcccacgaaaataaaattgttttgccaatttgatggtaaaatctcacgataaaaactcaaacaataacagcctaccaaaaaaaaaactcaagaccataacatgttaaatttaaataaataaatatatttttggtttcaataatattgtcgtagaagttttaaaatattttagagataaaaataaaaagaaacacattgattaattacaaaagttaggggctccttatacctttttttttttcatcaaggggctccttatactaaaacaataaaatagagggggcgaatacaaaaacacgattttagagacctaaagctttgagctttcgacgagaaactttcttctctctctctctctccgccattgttcgttccctctccacggtaatctatatccacccgtcgtcaatcggaactttacgaactccttatcaatcgtattttcactttccaattctgagttctcttctcgtttcgtcctctcttcctccgtatccacgggtctcgctttcggtttctagggtttcgcggttctgatcacaagttctgcttcaattgtaagcgatttgatcgcaagtagctgttaaatcggtgcgtaattcaacttttgaaatctcaaggtttagtctctgcaattctgattttgaacacagctagctagtagcagatttaagagttcgtcaaattaggattttgggtttgtttgggtccctttctcaccgaagttctgtatg

SEQ ID NO: 24713 - DNA, 3000 bp, Unknown
  misc_feature (1)..( 3000): 2750-1469P.txt file - cDNA_ID_2183589; gDNA_ID_1972148; Annot_ID_179385
attttagattttttggcctcaaaaggaaaatttcggtttatgtactatttcagaatacaatctagagtagtggttgagattataaccaaaagaagctatgtattacgatttatatttagtattaggttcatgcaataagaagcagtagagtattggccattgtactcttcctcgtataaatgtatccgaaagtaaaaccaaaaatcactctttattagttataatttagtttaatacatcattgatcactaaatcatctcaagaaaagttcaacttcatgatgcaccagatataactcacaagcagaagaaaaatccaagtcggtttcatcaccgaataaataccaaccacgattcattactaataataacatcctggttttacaatcgcacttgcacttctcactaacgtaggctgttttgagttgttccaccaccgtgttgtcagaccaccaaaaaccgtatctaatcttttgaatcttgtatcgaaattccaccaactcattcattgtagttgacatcaactgctttataacagaagacaagatctcgaaacccttttgttttgttttgcctccaagacagattagaatcaccccgtagacatattttgcttctttgatacctttttccgcagcttcagctaaatattcgagtcctcggtcttgaagtttatctcgaaaatagttaatgaatcctttctgaaacaacgcttcggggtttctactctcggtacatctctcgatgaattttgcactgttctcatgccatgggagaaattcgatttctttgagggatagtcggtagaaaacatacttttcatcacagatacgtcgaaacgatttcgaaactagtctgagattacgaaccgctgacaaggaagaagctccggtacatgaagaaatctccacgagaagatcttctggtaaagaatcgagacataagcttgcttttgttttcgatttcctaatagaagaagacgcatgcaaagacaaggataccaccatgttgagagagattcaagagtgtctgttcccaagtttgccaatttgattatttatattaagagggataaattcgtttcctttttttgaggaggagagacagattaatccttttccatatttaaaaaagaaaaaaaaaatagatagatgactaaattttttattttttttaagcaaagatattaaggaaaaaatagatagatgactacaaatattaaggagataaaacttaccaaaaaaaaaaatattaaggagataaatacttaataggctttaaaatcctcctattcttaactcgtctagactcgagaagtttatgagaaattgtatccatcggacaggatcaagaactcactttagccggtttccttttcgaattgttctttggtcggacctttacaaaaacgttttggagatcctgcaagaacaaaaaggtgtctttggaatcaataaagacattaacctaggctactgaattgttttctcaatgaatcgatgagaaaggtagacaaaagaaacagaagaatgtaaagagcttcaagagatcaggagataaatgtaaatcaatactaaaagagattctgtagtagcaagagaagcatcagatatgacatttaataactggctaggttcaatcaaatactcgagagacagtccttgtcgaatgctcatgacataatcaaatctcttatctccattatagacataaccccaagctaaaagtttcagcttttattcacgaaattagcagtaaccacttatcagccatacaaaatctatatgtaaggcgttcaattgtttacctgatctgaagtatcagtaccagaggattcagcagaccaaaggctttccaaattgaaataacctctggctttctcatcaagtgcatggactacaaactttcctacacgtatccataagagctaattacagccaccacaaatcaaaaatgaaaaaccaagacttgtagatacaaaaacgaaccgtagtctatgacaatccacttgctattgtacccttgcacagaaggtaacattacatgtttagctcctttctgcttttgcttggcctgtgattgaacacaaagaatataagaaaacaatgatcactcttatcatcttagtcttcaaattcactcttaacacaaaacacgtactcattatccatccttatatcaacaattgaacaatagcaacgaaggaattgaaaaagtggaaggtgaaatgtgtatgtaccctataaactaaagcttgagcgatgtttcttaagtgccaatcggatctaccggtggcgatgacagtgaaatcagcccagaaacaatgattatgtgtaggaatcacagtcacgttatcagctttcacgtcggcgagaatcttctccacttcgggaagtgtgagaatctctgagacattagagatcccggcggatgaagaaaaagagggagaggaagcgaagatgcgattgggagctagcttccatgattgatttagaagaagagacgaacaacgagatcgaagagtcgtcaacattagctaagcgcggtggagaaatgggggacggttgggtttaaaccctaataccgaattcgattgaccggaacgttggtcaacgctggtgatgcggctttaggtgtttaatttttttgattaaaaaacgctttaattattctcttatacaaaaataaacattaaatttaatacccttagcctattacacaagcaaaagaggaagattgtcacaagcaaaagaggtacaatgaacaaagaatagatttatggtaactagatgatgacatgtgtaatgttaactagggttttacaagggcttaactttagtataaataaggagctatgcctcatgtaatcgttaagaagagaacggatcaatatcaaaagaaacaatctttcttcccagttttagtatcttctacagacagaaggtgacacgcctccctcaatctcaggccacaaacgcgagaacccttgcgcctgataatg

SEQ ID NO: 24714 - DNA, 3003 bp, Unknown
  misc_feature (1)..( 3003): 2750-1469P.txt file - cDNA_ID_2183718; gDNA_ID_1972154; Annot_ID_179404
tttgacgatctgaaggcaccaatgatacaaacaggagtgttctccccacaaatggagtcaaaatttggtcttgacagaagaggtatcttttctgaggactcgttaggggcttggcccgcctgactcttagaagagaccttcttgttcttcttctctaatccttcaagcaatttaccaagttcctggacagctgatttcagatttttcacagtgatacctgttttcaagacttgcttctccccattcgataaccaaccaactattgccggaaacttgtctacccccaacttttgtatctttggatcagaagtatcatggacctacaagatcatgagaaaaaaatactttagctaaaaagatttcatgtctaaggaattctaataattaagttcaaatttgctgactcgtcattaaacgtggaccagggaaccaccccataatttctacgaccatcagactctcgcagtaacaataattgtaggaatagtgatgtaagtggaaattaaagccaaaatataacaaacctctgtgttgtaaaagacaaatcgtccattgtacaagccacttagaacccgccagatgacaggagtgtctttctttgttgacagaagcaaaactttaggagtcttttgtgagctaacggcagatacatcgaatgtattcagatcaatcttttttgagaatctcggtagatgttcctggcagaagcttttcaccttctttgcaacaagctcttcagtatattctgctaaggtagctttgccacttgatgtgtatgaataaacaaacatccttggagccctacgaggaactatgcctagttgtttgcaaagagaggattctgtttcacaatttaatcgcccaacctgtaaacataaagttaaatcacgtaaacaacaaaagaaactacacttcttcttttaagaacgaaacagaaaacccaaaatcaactaacttgacaagcatatgttttacctttaaagctccttgcaacgactcagcaacttcctctatgatggattcatggtactggcttcccctctgagatggaagatacgacaacaaaagccaagtcatcccttggtccacaacgtccttcttatagacctgagagttaatggttttgatagctgctacagtactgctctttgatttagattcagcattcgatgagctaccaaagccaccaaactgctcctttcctttagaactaccgcccgaaaacatggaaaagatatcatccataccaaaaccaaaggagctttcactaggaccgccaaacgagaaagaaaacgatttggaacctcccccaccgcccatattttgccaaccaccaggccctccaaagttgaaaccaccaccacttgaggagtaagaatacccaccattacctccgggaaaccccgaatcaaatccaggctgtcctttctcatctccataaagatcatagtttttcctcttctcttcatcagataagatctcatacgctgttacacatagataagggtttaaacttgtcaaagccagatcaacaaaaattcaatttgtgccacaaacacatggccatagaacaagaataatcttataatatactaaaagattcgattacaggacacatctcctagggaaatttgatacctaccattattaatctcagcaaacttctcctgagcacccttatctttgtttttatctggatgatatttcagagattgcctgccaaaaaaaatcacaagctacatgagtaaactatttgttgatcatcattcgaattattagcttaatcagcgactagaaacgaagggtgcttacttgtggaaagctttctggatttcacgctgctttgcatccttagatactccaagaacctgaagatgcattcattagttaataatgtttataatcaatagcaaaaactactgagcaaaacctaatatatcaaaaatccttcttttctataacacccacaaatttgtcagcccaaacttcaatgagaaaggggacaatcaaaagtaatcattatttccggccccaatcaaaagacttgtgaatggaaagaaaacaagatgaatcacaaaccgtaccttgtaaggatcaacgctcttcgctttcacattcaacaacaacaatgtcgacacaagaacaacagatatcgccaatcttgttctcaccatcccgaaagtacaacctctcaatctttttctcttttattgttttgttgtcaacgaatcttcttcttcctcttctaagcgtgtcttattcacgaaactcaacgcttcgagaaaaatcgagaaggacatcattaaataggttcgcagggtttaaaggaaaaaaaggaaatttctcgaatgacatatatattttaattaatttagagtattccccatatttaatagtcttacaaaagacaccaaaattgtcaattggattaagaaattggtaggggcaattactcacttcaaaaactagcaggggttgtttcgtatttcctgaaaataaattccggttgcttcccgttctcaatttaaggcgggtatcatacgtggcaaatttgatgcaatcccacgtatctccaccaataagattttagcaaacacgagcgatcgttgtttatttgcgttcacgcgccgttaagatcacgcgcgattattaatttgggcttatttattataggcccaataatctgtagttagcccaaaacgaaagtctccggttgggtgatcggaatccgatcagagcgacggtaagtatttcttttttcttcgactgttaaaaaaaaaagaggaaatcattttcactagtgacattgttacgtttcaagagcttaagagaagttgaaagacggaggaagaagaagacgatctttcttctcttctctgtctctactagcttcgcgttttccttccttcgccgtgagattttatcgtcgtcgtaacaaacctctagggttcatcctcgacgtttccttggttaattaggtcaacaatatcgtcggatctgatg

SEQ ID NO: 24715 - DNA, 3000 bp, Unknown
  misc_feature (1)..( 3000): 2750-1469P.txt file - cDNA_ID_2183744; gDNA_ID_1972154; Annot_ID_179410
tgcaacctacattgcacatatattgtcaactttgaagaagactttggtttgaccaaacagagtctaagaactttttcacttaagcataacatgaaatagagcacttacaaagcaatcatcatcaatggtgtagatgtacttctttttggagaccatgtaaccgaagcaacgacaagcagagtccttgaaggaaatgcaagaggccttgggacccaagattcgattgatgtcgttcctgttgtagagctcgtagtcaaaccctactggaatgttgatgactttcgaaggatcaccatcttgaacaatgatcaaatgatactgctcaaagaaaggtcgccacatctcaaggaagtcgaggtttcgaatcgtaggtatcacaatgtctagctcatctttcaacattggcgtgggtttcacggaagaatacaattgcgccatttgaaacgacaaggaagaaagagtagtttatgattaagcaaagacaaagagagatgtacgataacaaggatgacttcttggtatttatagagatgagattgagataatcattttcactcttaacggaagaaaaaaggtatattcatgccaaaacatgtttcttcttttcatgttttcaacacaacccaaattcacgactctcacccgctctacctctctaaacccaaatcacgtgaccgtcgtctgtttgtagaagatttgttagaacaaaacatgaaaagttttattaatatgttttttttatcaaaataattttaggaattgttttagttgaactgaaatagaaaagaatgcaggagctggtgccatagtggcatagtgccacatacatttttttccttgtatgtatttagaaaatttgaaagctctaaacaaactaaagaagcaaagaatctttatttagttttttatttttcccccaatctaataacaaatttaaaagaacgaaaaaaaaaaaaatgctaaaatgtaaaaccccaaacccaaaccaaaagctctgaaggacgttgagaaatctcaatgcgacatcgttcaagaacctcacaatctcccaaacaaagacccacactaccacatacctagtcataaccgaaaatcaaacgtagcagtaagatagaaagagacagactaggaagacgaaaacattcgtttgattccagatttctgctctgttgttagcctcgatgggaacttaacagtgaacttgattctcaagttccctttctttgatgggtctttagggattggcatgccttcacctttcaccacctcttcataagaagggctgatcacgttgttaattggaaccgttactgatcttccatccagagtcgagacctgagcagtgtatcccgtgagggcttccacaagagggatcttctgtgtcatcacaaggtcattcccgtctcgcttgaacaccgcatgtggcttctcatcaactatgaatacaagatctgatggtatgattcctcgctgctcgtttcctttctccgggaaggtaatcttcgtccctttcttccaccctggcttgatttctatcgtcaagatctcctcaactgttgtgggtctcctgcattgcaacaaagaatacactttcaacttgcattaccgataacaacaacatcatagctacaaaaaaaacaactctaatgagtccaacataatctatccaatggctaatgactaatttctagcactacatctttcatgtatttatccagctccaaagctccttaaggtaaaaattcctaagcaaatcaatgttttggaactaaatccataagaaggtgattcttaaactcaattcatgacaatgtagctgaaaaaaaactgacccgcttgaatcgaggacgtcccgagagatcttcatcttcttactgactcctttgtagagatcttccaaactacaaggaagttgtctctcaataggggcagctttcctcggtggaacaacatttgacgagaaaacgtcttccgcgaaccggaacccattagagggacctgcaccacgtgagtcaccaaatggtcttgtgaagccaaagaactccgagaagatatcatctgcgcttctaccgttgaaccggaacgaagcccctccatccgaaaacccgccgcctgctccgggaggcggagcctggcttgttagaccttcttctccatattgatcatagatggctctcttttgaggatcactcaaaaccttacaaaatccaacagcataaggaatctatcaaacacaattctacaagcaaatcaagattacttaattgccagagaagtaaccatagtgaattgacaaactacacaattgctcaaattcaagcaaaagatgggaatctctctgaaaagagaaaacgcattttgttaatttacatcgtaagcttcggagatctgcttgaatttggcttcggcgtcttttttgttgttagggttcttgtctggatgccacttcatggcgagtttgcgataagctttcttcaagtcgtcgtctttcgcattccgatccacctgaagaaccttgtaataatcgacccccattgctatacctcctccttcttcttcttcctctttgattcgctcttcgaatttcactcgatcttcttcaatgggaaaaactctagcggatcattccgtaccggttcgaaatatttatcgagatacaagaaatacccgaccggttcttttatttggtctttaccggttctgtttttggttcggcaaacctagctcaaaagtcaaaccttatcagaattaagaatcacggtgtcgtttcaaagagaggaaatttacacttagtagccctatatatttattatttaacatttgaccccactagtatatgtttgttactttactttaagcgagggtgatagtcaaattatgaaatatctgagggcctaaaatggaaataagtaagaagttttggggtgttcttaaaatgaaaaatctgaagaacaatatcattggttaaattcctctgaaaatccaaaagaattaaagatg

SEQ ID NO: 24716 - DNA, 3003 bp, Unknown
  misc_feature (1)..( 3003): 2750-1469P.txt file - cDNA_ID_2183772; gDNA_ID_1972154; Annot_ID_179417
cggcgcagacagaagaggaaaccacatcggtcttaatttcaacaacctctcctccaatgtacaagaaccactcatttactacgacacagaggatcgaaaggaagattttcagctcgagagcggcgaaccaatccgagttcttatcgattacgacggatccagcgaaaccttaaacgttacaatctatccgacgagattagagtttaaacccaagaagcctctaatctcgcgacgagtttcagagctgtcggagattgtgaaggatgaaatgtacgtcggattcaccgccgcgactggaaaagaccagtcgagtgctcactatgtaatgggttggagtttttcaagctgcggagaaaatccaatggcggattggctcgagatctcgcggcttcctcctccacctcgcttgagtaacaagaaaggttacaattctcaagtcattgttttgattgttgctttatcgatcgtcacactggtcttgcttgtgttactatttatatttgtgatgtacaaaaggcgaatccaagaagaagatactctagaggattgggagattgattatcctcataggtttagatacagagatctctacttagcaacgaagaaattcaaagagagtgagattatcggtactggaggatttggaatcgtttacagaggaaatctatcttcttcgggtccaatcgcagtgaagaagataacctcaaatagcttacaaggtgttcgagaatttatggcagagatcgagagtttaggaagattaggtcataagaacctcgtgaatcttcaaggatggtgcaaacacaagaacgagctcttgttaatttacgattatatacccaacggaagtctcgactcgttgctgtaccaaacgccgagaagaaacggcatcgtgttgccgtgggacgtgcgtttcgagatcataaagggaatcgcgtcgggactgttgtaccttcatgaggaatgggaacagatcgtggttcatagagacgtgaaaccgagcaatgttcttattgatgaagatatgaacgctaaattaggcgattttggactcgcgaggctttatgaacgcggaacgttaacgcagaccacgaaaatcgttggcactttagggtacatggcgcctgagctcacacgtaacggtaaaggctcaaccgcgtctgacgttttcgcgtttggcgttttgttgttagaaatagtgtgtgggaataaaccaacgaatgcagagaacttcttcttagctgattgggtaatggaatttcatactaatggtggaatcctttgcgtcgtggatcagaatctcgggtctagtttcaatggcagagaggctaaactagctcttgttgtggggttactatgttgccatcagaaaccaaaatttaggccatcgatgagaatggtgcttagatatttgaatggtgaagagaatgttccacagattgatgaaaattggggattctcggattcttcgagagacgatcataaatcgaatgttgtaggttatgtttcgtctgatagagcctcgagctcgaatactttttcgtctttctccaatgtttcttcaagctctatcgttagtggtagatagtttcatagcacttttagcatagcttatttattttctagaaacagaacattttgtatgtttttactatttatgctaagaaggaactaaatgtatgacgtgtgtgtcgattatgtcttattatggaccagtgaacccattacccatattactaagtgaatgatagatacaacttgtacaatacaagggttcattgtttccagctttattaggtacaatattatttttgcattactaaaaacagacttttcttttgtctaaacatttttttgtaaattataacataaaatgcaaatagcaaacaaaatatattttcttattccaatgcaaacaaaatatctttcttattccgttttagtttgcttttgttatcaactcaagactttgatcggtgacttaaaacaaatgttaaaaagacgatccaatccctcatatatgattgaaaactttgatacaaaatgagattgacagaagataagactaacaggtccgttctagattctttccaaacgtaacagcatgattggatcattttaagcaatttcaagtggagaaaatagaaaaatattgtgtgttgcccaattatttcaatcaacaattcaaaattattatgatatgggcttggtaggttgatggtttcactttcataacacaacgacaagtgaactacgaacctatgcctcagtttgtgtccaggttcatgatggacatgcctataattagaaacgtgtattgaaagaaagcgtctaaactttgcaattggctacagaagttttaaaacaatgattgcgttgtgaacattactgaattttcataacaactcaaaccattttttacaaatattacgacacagttgttttgttactgtgatatctgttgtttctatgctttaaaatttaaataaacaactgtgattcgttgtatagaaccgtgtatcagactatcactatcctacaagttaattaattacgccaaaaacaagttaattacgccaatcaaactaaagaaaactataataatagcgtgactctatggtttggtactttggttaatgtgctgcttacttgctcatcttatctatgattagaatatttacttaataagtggagttttaaactgtatttctcatgtattttagtgaatctcatattaacttattaggttatactttttgataaataatttaggttagacttaggtaagataagtacgtattaaactgggatgaagataaaacaatgccaaaacaaacggacacgcttcagctgatgatagatttaattttgccaatagtataaaccagttacgcctttttatagaacaactctgccatacttgataattcatacactctatctcttctctctctcaatctctcaaaagatctccggtaacgttttaacgtcggtgaaaaaatg

SEQ ID NO: 24717 - DNA, 1931 bp, Unknown
  misc_feature (1)..( 1931): 2750-1469P.txt file - cDNA_ID_2183804; gDNA_ID_1972144; Annot_ID_179348
ctttacacttggtttgtgctgaagcaaaaggaggtaagtgaattgataacttgcatcattctgatgcttcttgtgtttatgttggttaaggaaactcatttatttctttctctgcagatttttccgtgtgaagctagagtaatgaacttgggatcaagatttatgactgtttacattagcaagcttggcgtaagtctctactgattcatttaccacaattaaatttatctaaattcctgtttacagtctgctaaacacttgttgttattgatgctgtcacagattgaacggagaatatactacgaccaaatcgaaggcttgtgtgcagactggctagaggcaacatcaacgttaatcgtcgataaactctattccaagagaggtggaagaggctttttcaagcccatgaaggaagctgtctatttggtgagtccttgtgaagtgtgcgttgcaaaatgcagtgcattgtctgtccatgacactgagtcaccagaggccgtgtcaatagatgaggttgcccctgcggtttttcctttgaccatccaacttttctcgaccattcctgtggttcttcatgctgttggtggagatgatggtccgctcgatataggagcaaggctctacatgagttcatactattagatattggagcaaaagagggatctctgaagaggtagattatagcaactgttgtatattttttggattacagttgctgaaaaaagaaaatcatgtcggactagaacagctccgtagttgggatgatatagataatgtggggacttgccgttgtttttggttcggtctagaaaccccattggtttgattcgaagttgtgctaaatgtgtttctatttcctttgttttcatgattttgctcgcccaagatgttttagatttgggttcggccagaatctgtatatatatcgattagggagttttctctctttaccgtgctaaatgtgttacatttttaataatctttttaaaaacaagatcttcaaagtctacactcgaacttgagacattgaaaatcagtcttctaaagaaggagagtaactggagcttgaagaaggagagctttgctttgatggtcgaatcgatgaggtcgcgtcaaaatctgtaaaccggaatctgatccaactcgagaatttgaaacgatcaggcagttggattgggcctgataggctattaatatatatagcataaagaagcccaattatataaaatgtccaaactcatcatttacacatttggttataaaatacatcaattcagctgtaacaagtggtactgtagtacataattttaataatttatcaaaattcgaatttccaacacttaccaatttcacgagctactcacttaaaagctatacttttcgatgattaaaaaaaaaaagctatacttttcaaacttggccacacaaaaggcttacattaacccacacagagtaagtgtagtcagaagccaactttggtgggctttgccactagcctataataccctcggctaacatatgcttatcctctaccagtaaacattttggaaagaaaaataaatccacaatttatccttgatgttaaatttaactaaaattaggtacacttagactaatcaaacaaaaatgagattttcttggctgataaattagaaattcgtatttttttattttactttttgccgtatgttttgttatattattagaaaattgataaagaaaaggtttaacaacaaaactaaaacttggcatcgtcaacttcagggcggcatggtatggcccatgaagcatcatgagttgtgttgtaaaagcccacttgacgtcaaaagttgcaacttgttgcgacaaaaggcaaaaattcctaaatttcgaacgaatcaaaaaccctaaaaagcttaccgaatttttcttgtggtaatgcagagtcaatg

SEQ ID NO: 24718 - DNA, 3003 bp, Unknown
  misc_feature (1)..( 3003): 2750-1469P.txt file - cDNA_ID_2183928; gDNA_ID_1972158; Annot_ID_179490
ctgattgacaaggttttctcttgatttatgtattgttgttttgtgttgttgaaatgaatgatatttgggattcagattcgtaaagctttaaatctttatgtgttcttttcttggtaatggatttatttattttttgtatcgttgtttcagaggctcttgagaatggaagcagaaacgtcttggaccaattatccgtacagctacattacatatgtccctgaagctgaatcataccgtgagcagagcgacgatgaagccaaagtcgaaaccttttcaatggattctcttctccctgacgatttattagaacgaatcctctcgtttctacccattgcaagcatcttcagagctggtactgtctgcaaaagatggaacgagattgtatcttctcggaggttcttatgtaatttctccaacaattcggtttcccaaaggccttggtacttcatgttcactaccacggatgatccatctggttatgcttatgaccccattatccgcaaatggtacagtttcgatctcccttgtatcgaaacatccaattggtttgttgcttcctcttgtggattggtttgcttcatggacaatgattgcagaaacaagatttatgtctcaaatccaattaccaaacaatggaggacgcttattgaacctcctggtcacaaatcgacagattacacggcaatgtctacctccgtaaaccgagcgaaccaagcagtaaaccgcgcaaaccggagttactcagtctcgatagtgaaatcgaagcaagttccagggaatttcttccaatgggatctctctattcatctctacagctctgaaacaatgacttggacaacattagtaaacgatgtcttatccggatggagaggagggaacgagagtgtgatctgcaacaatgttctttacttcatgatatactcaacgggaggctcagatcatcgccacggcttgatcgcttcgaatctatcctcgataggatcaccgtcaagcggaatcttgatgaggagtttcattccaatgccgtgttctttaacctgcgggagattgatgaatctaagagagaggcttgtgattgtcggaggaatcgggaaacatgatcgaccagaggttataaaagggatagggatttgggttttgaaagggaaggaatgggtagagatggcgaaaatgcctcaaagattcttccaaggttttggtgaattcgacgaggttttcgcgagtagtggcacggatgatttggtttacattcaaagctatggatctcccgcgcttctcacgttcgacatgaatctcaagtattggagatggtctcagaaatgtcctgttactaaaaagttccctcttcagctctttactgggttttgcttcgaaccaagactcgagattgctccttagttgcaatgaagaagcaaatgggtctgtgaaagtcttggtcttttggattgtttttgcacagagaaatcgccggcggctttatgaagatgatgatacggtaatgtttttaaattttagttactggaaatgtttttcaggaatattgttatttgcaatttggtactctgttaattataaatttataaaatgaggcccagatacttttatttgaacaaacgaacccttctctatctctcagtgaaatataagaacatttttcaacatgtggcccacaatatctcatgtaaatgggtcggattctgaaactggaggttgtcttgttgctgttcctggtggataaaaataatgattttgttccttttttttccacatatattcataatgatttttcatgttttattaattaattattgttgtaaattattttaaagaattatgtttctgtacttgtataaaattgggacctattttcgtgatgggatttgtcaggtttggcagtgttaggtttacgggtaatggacaacagctattttattgtgtattttatcattttctcaagggtcacttattttcaattttcatagctataataatttactaaattttaaaatataacaaaatgtcattcattagttataatcgtataaaagttgacgaagtgatatatagattctacatactaaaaacaaaattaatttgtgtcattatgccaaaatgtcaaaaggaaaagaaaatttagacaattactctgacacatcaaatcagctaaaacctaactaaatataccaaactagcaacacatatttttgttattaaaagcatttataatgataaatcatgatcagaatcatagtaagcagattcgaacactagtctctcaaatttcggtagtaaagttttcaaccattagaagacaaatacgattttaacatcattagtattgttttttcttttttaatttaagcgttggctttccaaaatgaaatagtaacaagcattaacgagttaagttgtcaatgggggaagttaaaactctttaaaaccaaaaaattgaccacacaacacatatagtgcccactagttctctcaaacgaatatggaatactttaaaacccacctctattctcaagaattaaagcccagaatttcaacgttctaaaaatagttttgaaagatttgtttttcacgggtttttcgtaaaataattatgaacaaaacaaataaattcaaactaatttttacacgtacaaatctgactcctagcctcctagatgaaattcaaaattttgtaccagcagctcaaagctactaggtaaaaaatgtcacgagagaaaaccggaggaatattggtggttcatcaatacgaatcaaaccgaaccaagtcataaaccggttcatagaaagataagaagacagacaatcagtcatcactttggtctcgttgagcctttcgtctatctctcacctgaaagaaagacgttcagctttctctttccaaaatcaaaagctctccgatcagtttctccggcttaggaaattaattgaaggaaggtgatgagaggtactactgagaatacggatctgttcgatcccaaaacccaaatg

SEQ ID NO: 24719 - DNA, 3003 bp, Unknown; identical to SEQ ID NO: 24718
  misc_feature (1)..( 3003): 2750-1469P.txt file - cDNA_ID_2183928; gDNA_ID_1972163; Annot_ID_179648

SEQ ID NO: 24720 - DNA, 3003 bp, Unknown
  misc_feature (1)..( 3003): 2750-1469P.txt file - cDNA_ID_2183953; gDNA_ID_1972158; Annot_ID_179499
tagaagacacgcactcactgtcagaaatctacatcgagaaacacacttccactttccaaaaacatcattcatgaaaaagaccacagagaaaacgaagaatatggttgatgatgatgatcgtatactatgggattgtggaagtccactctatgattcctacgagctcgtttctcttactcacatcattgaacgccatttcatgtctctaccttctcttgctggcgccggaaaagtttgctgctctcgaagaccgtctgatctggaagaaaaggccaatcgtggggccaacaccgtcgttgatctgtgttgttcctctgattcgacgactggtaaactgttgtgcggtgcttttggaaccaaatggtggaagagaaagcaaaacaccgaagctgtcgtcgataattacaacaacaagaagaagaatatgttttgtcggatcctctctaagataaggatttctacaacaagatctggttcttcgaagatgtgattttcatatcttctttttctgtttttagtatttgtttgatccttcgtaaaataataattaagtatattacttgctcatgttttttaatttgaaaatttaatcgaataaactgtaatgaaacgggaaatacattttattgacttatggattaaatgcagagtaattagtttaagttgaagaatttcatggatttaatatccatcacatcatacgtctctgaaacgtttaggcaaagagtgaaacgtggatcaacatgcaatcaacgtttacattggggaatatgagatatatagcgatagaatgatataggagtcgtttagcaattgccattttactaacagttcatcggggtgtcagaagaaaaatatgaacttcatagaaaatcctcaagtgaataacaaaggacaaaacatgtgaagcaatttgaaaatttcatgattcttctgacaatattctaacatgcaaattgcaaatgattcttgactcagtcaatgatttaggtcttgggaacttggtaaatttgtgtaatttgttactctttaaaaaagtgttgagtatgcgcagatgggcttcttgaataaaagtctgtaacggcccatctctataactttgaacagaattaaaggctatattgtttccgttagaatttaccttttcttgttgagtatagtttagccgttacaacataaaatgcttcctcaataaagtattaaagcttatgataacaacgagcatcttcgaatttgttcctccatatactttagtttatatcatataagtagactatttttgaaacacttatattaacaacattgaggggtgttatattacactccaattcacatcatcaagagtacaaaaggctgctgaagaaagaaaagagaggaacaaatcacaataattaaaatcacaagaaagtgtaaaatgaatgcgaaatagaccaatagctataattgcataatccattaccaattgttgtctcaaaaagcagttaagtctctcgtttctatggttctccatcaacttcagagatcttttatgggctccacattttcattttaaagttttataaatttaattactttattaccaaaagaagcaattttgttaagatcaaagtaaaaaatcaaatccgtaaaatgatccacctaaattgcttcttcttcctctgtggttaacacttagacttagtagtaagataaagatccaatttcttaaagtgaaagtcataaaaaagagttagaaaaacagtcaaaagaaacacacacgagaaagaaaatgtggtgaagcttcgaatgggttgggtcgtttggtgtggcattgggctccaccaaagtatacacatggaccactttaatttaacgtttcgtcgtctttgaccttttaatttacgaatatttcctctctctctttatatttttgtttgccatttcatttctttactttgttttaattttctctgccattttgatttcgtgtaattgatgaatgctataaatctttattctgtcacatcttttaacaaaggccaaaaccctgcttttctttttacctcagtggtcgctgacatagaagctataaagaaaagctattatgtatatggttgttataaataaagcaaaagcaaaattcccccaacttatttattttcttcataatccactaataagtttcaaaatgcatactgaaaaaagataaaaagtaaaaccaaccatttcgtattttacaacaataaaaaacaaaaaagagtgtgtgaaaatggaaaaagtacacatcagcataaacactactaataacggcgtagaagaagaagcagacggaactgagagtttcgccgttaggaagatacggaccattgtggtggttgcgtcacagctcagagaggaataatgaaaacaaataaccaccaagtaacttacagtaaaaacgctcactgtaaaaaacgccgtcgtttcaataaatgttggtagctgctaaaacgacgtcatttattttctgaaagagagagagagagatgttttatactacttcttactctgtgccgtgtggaaaggagcgaaatttgcagaagaaacaaagcataaccccccagagaaagagagagagtttctcccaacaagatcaaacttcgaactctacgagaactactattatccaaaacgcgaaatagagagacagagatttcataaatttcttactttttaaccccaaagttcttttccagacagcgttttcctctgtcctttgctctttgtgggtttactccttcttccggtttggatatcccgagctagtaaagaagggatccagtagcagaagctgaagctaataaacccaatcatagagaaagctctctgaacaaaaggttcagtttttctctctttcttcaaaactgaaatcttctttgtgtgattcattcactaataagtcgtcattctttcttctccttctgatttctgtgtactttttctctgtcagacattttctgggtttgttttaattaaaaagaaatg

SEQ ID NO: 24721 - DNA, 3000 bp, Unknown; identical to SEQ ID NO: 9584
  misc_feature (1)..( 3000): 2750-1469P.txt file - cDNA_ID_2183969; gDNA_ID_2684110; Annot_ID_190566

SEQ ID NO: 24722 - DNA, 3000 bp, Unknown; identical to SEQ ID NO: 9584
  misc_feature (1)..( 3000): 2750-1469P.txt file - cDNA_ID_2183969; gDNA_ID_1972158; Annot_ID_179506

SEQ ID NO: 24723 - DNA, 3000 bp, Unknown; identical to SEQ ID NO: 9579
  misc_feature (1)..( 3000): 2750-1469P.txt file - cDNA_ID_2183981; gDNA_ID_2684110; Annot_ID_190570

SEQ ID NO: 24724 - DNA, 3000 bp, Unknown; identical to SEQ ID NO: 9579
  misc_feature (1)..( 3000): 2750-1469P.txt file - cDNA_ID_2183981; gDNA_ID_1972158; Annot_ID_179510

SEQ ID NO: 24725 - DNA, 2609 bp, Unknown; identical to SEQ ID NO: 225
  misc_feature (1)..( 2609): 2750-1469P.txt file - cDNA_ID_2184016; gDNA_ID_30983; Annot_ID_146894

SEQ ID NO: 24726 - DNA, 3000 bp, Unknown; identical to SEQ ID NO: 9581
  misc_feature (1)..( 3000): 2750-1469P.txt file - cDNA_ID_2184029; gDNA_ID_2684110; Annot_ID_190576

SEQ ID NO: 24727 - DNA, 3000 bp, Unknown; identical to SEQ ID NO: 9581
  misc_feature (1)..( 3000): 2750-1469P.txt file - cDNA_ID_2184029; gDNA_ID_1972158; Annot_ID_179518

SEQ ID NO: 24728 - DNA, 3003 bp, Unknown
  misc_feature (1)..( 3003): 2750-1469P.txt file - cDNA_ID_2184050; gDNA_ID_1972159; Annot_ID_179536
ggctcgtttgaagagtgagatattgggttgttttaggcccaagaagaaaagaagaaagagagtgttgaagaacttaaatccatctttttctttaatctctctttttcaagatcatgttcatctttcaaaatcttacagagttacagtgacatttgagattaccttttaaactgttaactcaaatcttataatggattagaagatactgaagatccttataagatattttgggaatattcttcatgcattttgtaggaaattacaaaatttagtgtgctaacagatgatctagccagaccccagaaaacaagatacataagccatcgattcggcctcaaaatttgaaagccattttaaaagaaaaaactgttacaaatatttttgagtttgtagaatcctactatttacattgtagtctgttatataatcccacatttgattaacactaaaattttggagcaaatgatgagattgactattatcttgacctttttaaaaaaaaaacaaattaatctcttctctttttattattgaaaaagtgtattaggaaactagctagatgtagcagtctcaagctctatataaacattatgtatgatcacttttattattataagtgtgaaagtaaatacaaattctatccattaaaaactcttatcaaagtctactagagagaacttgtgaattcaaaaaactatttttaactgtagttttttgaaaattaagtttatttgttcgattatggtccatacttttttcccttcaatattatagataaagacgatatccaaacctaactggaaatcaccatgcaaaattcatcacaaatttaagtttacgttgtcatatattatcactttcttggaaattcagagaagcatgaatatatcaacgtaaataagtttgtcagaggaaaataaagttcattagaggacgacccactaaagaagaagaaatatattagacaagtcgtataattagccaacaacataactattattattattccaatctacttcacgaaaagctcttctctataagcttcacaaactcataaaaatcaatttttccatctctattctcatcataaaccttaaccatcttcctacactccatctttgtacactcatcgtatcctaacaaactcaacacatgttttaactcattttcatctataaacccatcctgattctcatcaaataacctaaacgcctctttaactatctccttacccatcatctcattcttctcaagcaagtactcttctccttcttcaatcaaacattcgtataaagcttccgagtcatcgattatcgccttgacttcttccacggacgttttgatatctgctcgatttgggacaacaactttctttatgattgggagctcggtattttgcttattgtttcttattgaggtgaagagaatgtaggcattagagaagaagagatggaaacgaaagggaaaagaagaagagaagtcttgaattatcatcatgagattgagaatgaataagaagatgacaatggtgaggagagagattgggctaagaagagacgaatcctccatattgatctaaatttatgtgtgtggaataccataaacaaaatttctatgaagcttttatttgtcttctttggtttcaaaggttggataataagtgtgttgagttggtcctattttataattcctagttaagtatacgaagaccaaaacatatcttactcacaaagtctgcggaaagagtctccatgtaaattgttgagaaacttaccaaaggaaagaaaaatgctactttaaaactcaccgcaattcaattgaaagtattatattcatacttttatacctaccgagaaaacctaagaaactaccatcgactcaagctttcattaatgatgatcatactaataaaaacttaatgcttgttattaataattaatctgtattttcatttcaaaattaatatatgttcttgaaaatgtttggcttttcaagtaataggtggagtatatatatatatatatatatatatatatatatatatatatatatatatctcaaaatcaaattgaaatttttggactgaaccaaatggagacatggaagttaatcttgtcatataagaaaaaaacaaatgtttatatatattttgatagttgaataataaatgtaatcaacttctcatcatatccaagaacacaagacaatagagttgaaaattgagtgagagcatctttcattgtcttggattccaattcatggaaatttccatgcaatttccttgtaacgttttcctttaaatttattatcttgttgctttcaccgacccaagtaccctttggaatatttgatatgtagaaatattgagactcttcgtggtagttcagtttcaaacccatgatcagtttttgattcaaataaaaaacatttattattatagttgaatgatttgaaaacctcggaatctaaagttcacgtggtaattttcttaatcgtttttttatggagtataataggcttaaaaaattattaactaaataataatgtaataggcgctagactaattcaatttggttactattgaatcaaaatataaatagaaggctagcaaattaaattgaattaaatataaataagtttgaaaatattgaaatctacatctagccatctaaaacatagatgagaagtttcagttgcgataggttttagtacattaaattaaattcgaactaaccttataatttgttctattatatagttttgactggttacgaatatcgaaatggtttaaacaagaacatttggaagaaaaaaaaacatgagttgtaaaatatattaatcccaagagcaatgacaaagttttgtacttttcatgtctacttcttatctttgtagatagaaaattacgaatatcgaaataaccatcttgaatatacacgtatgagtaacgagcccatatatttatgttcgtatgtttatgggcctaatgagattaagagaatg

SEQ ID NO: 24729 - DNA, 3003 bp, Unknown
  misc_feature (1)..( 3003): 2750-1469P.txt file - cDNA_ID_2184068; gDNA_ID_1972159; Annot_ID_179543
caagtagacgagcacgtcccaagaggtcaacaacgcagccatagtgatgtaaatttggctttatcttaaattcaccactcctcattctatcgaaaaacatcattccttcagcgaccagcccggaatggctacaggcagacaataaaccagtgagtgtctgttcctctggagagattccaaacttcaacatttcgttgaaagcttcaatggcttcttttccaaacccattcatagctaaacccgagatcagagccgtccacgagactacgtttctttcacgcattccataaaatacttggtaagccttatccatagacccgcaacgtgagtacattgaaaccagagtgttactcaaattcaaagcaccactgagtccattttcatcgataaagtcatgaacttgtttaccaaaatccaacgcccccaagttagcacaagcttgtaaagctaacaaacatgttacaccatctggttttacacaaccatcgacatcgttcttcatcttatcaaacaaaactaaaacatctctcgtacgtttattccgcagataacacgaaaacagcacattccaagaaacagtatctctcttgggaatttcgtcgaacactttacatgcatcagtactgttttcgcaagtggagtaaagatccatcagagtcgtcataagaagactatccgagagaaacccatcactgaaaatcttgccgtgaatctgcaaaccaccgagtaagtcacctgatttgatacaacacttgagagcaaaagaagacgagagcggattagcaggaagagagctgtttcgtcgaagagatcgaaacaagcgaaacccttcgcatggagtttggctgagagagaaagctctgatcatggtgttgcagtgagagagagttgggttcaatctctgggagaaaactcggcatgagtaattgatgtctcgaggaatcagagagagagcgagacgagagaggaaatggtggaaaacgtcagagtttctgattaaggaagtgcggagtaagagggcgtgaatctgccggagatggagttttccggtggaagatacgatcagagaaagaagatgatcgtcgccgctgctgctgcttatggacttcaacatagtcttctggtgaaaagaaagtatactaagctttgatttaaaaggttttactaattttatttcgttttaagtattaaaacttgaagttttgatatatgcaagcacatgatgtaaaacagttttatttttggttttgaataaatattacattcaattcaaaaaaacattatgagcaaaaaattcaaaagattatttctaattgattatatgtcacaactttaggaaagtaaatgaggtttacataaataatacaaatagaataaaaaagagttgaaacatattcaatcatctgtattaccttttattcaaaaaatcgctagatgctaatattttattaattatatgtatttttgtataaaatcaaataaattagaaataagaacaaataaatagaaaagaaaaattatatatttatatttaatataagtaaaaagagtttagaaaattaactattaaataaatatagttcaataaaaaaataaattatattaagaatataaatttaagacaatgagattatatgtcacaactttaggaaagtaaatgagattttatagggactaaaaactaaataatatttattttagagatttttgcctcataaactttacaaaaaaatatatagatggaaaaaagacttccaaaaaacttatttcccattcacagcgttacattttgatttgttgtcttttttctatgcccattttgttattttctatttggttttcagttcctaaaagacggaagttatattatttttatttatttttagtatcattccgcaagtaattaaatctatacatgttttagattttaatataaattctgattgaaaaacatactaattttctctgaacgaaagttcattaaacaatgttggtgaaaaagaaagttgataaaaacaatgcattgtttgatgttaccatactaacagtacaacggcggcgccaaagtcttttccaatatactagtttcttttgacatcaagtgattttattaatagatggtaccataagaggttacaacccaaatttgtatcaactaccaactaaacctatttaaagagtaatgccgctttactctcaaacatatagaaataaaagtaaaaacttagcccaaagtttggtgaaagaagctcaacttaaagagcttaggaaagatcctacaaatgatattctatcataaaaggataaatccccgatgtactatttgaatcgactaaactacttttaaaaccagttaagaaactagaaactaaccctagaagaacctcagtcaagcttccttgttcattactgtaggataggcccatagtttaatctctttttaggtaggatcgacagaaataaaaaacagatgggcaaccatgcatggtaattctcgaccctgtctccgagggacagttgaatgaacgactcatgaatactgtcggcacggacgagccaataattcgaacgagtttagtctattttgaattttctagctaccttataaataaaaagctaaatgacatgtaacttcatttaaaagaaaacttatagaagaagacaaacaaacaaagaaaatatatataataaaaagaaagataaaggttgccaccacgtaacaaccacttccactactactctttcgtcgtaatgaagaaagctgaccgtgccggagtttcatcttcaccggatcaccaaattagtcttctttatatagccgatgaaaataccacgtgactccaacgaccaaaataccaaagtccattagtataaagaaaaacatttatttacaaaaaaaaaacgatggatatctcaaaaataaaatgaccaaactacccaaccattatccctatatgtataacacacagcctcttctttttcacccacaaacaacataacatg

SEQ ID NO: 24730 - DNA, 3003 bp, Unknown
  misc_feature (1)..( 3003): 2750-1469P.txt file - cDNA_ID_2184073; gDNA_ID_1972159; Annot_ID_179545
aaattagtcttctttatatagccgatgaaaataccacgtgactccaacgaccaaaataccaaagtccattagtataaagaaaaacatttatttacaaaaaaaaaacgatggatatctcaaaaataaaatgaccaaactacccaaccattatccctatatgtataacacacagcctcttctttttcacccacaaacaacataacatggcttccaccaaaatttccttagtctttttcctttgcctcgtaggtccttgtataggcgctggaaccacaagcgctgccgaatcagtcagtagcattgtgacacaaggtttctttaacaacattatcaaccaagccggtaatggctgcacgagaaaaagattcaacacccgcgactctttcattgacgctgctaataattttccaaactttgcaagttccgttacaagacgtgaaattgcaagcatgtttgctcatgtcactcacgagaccggacgtaagatttttttttccttttctctatgtttttatatattattaaaaacttattagttttgtttgtacatctactctagtcatgagtaaattattctcaaaacttttctctattttaaagtaaaaaatagagatttacattggagattgtctaagggttgaggtgtttcattattatttgagattatcaaatggtgattataatagttttattagagcacgttaagattaaacctgtaaaactgaacatttgacttaagctgattaaaaatcataacctttttttccatgtgatctctatgtcgtatagacttctgctacatagaagaaataaagaaaaggtcacgtggtaggtgcgacgagaacgtagagcagagaccatgtccatcacagagtaaaggtcactccggtcgtggtcatcagagtctcggtctcgaccttctacgccagcctgagcttgtgggtagcaacccaactgtagctttcaggaagggtttgtcgttttggattaatagcgtaaggccggtgctgaaccaaggatttggagccactataagagccatcaatgggatggaatgtaacggtgggaattcaggtgcggtcaaggcaaggattgggtactatagagactattgtagacagcttggtgtggatcctggtcataaccttagttgctaaaacgttttacaaacgcatacacgtgacgtgtcacgtgataatgcggaataagaagttacatttcaaacagggcaaggattcagaatcgcaagtacatgaattaacattctgtaactgttaattgtatcaagttgtgttaatatataagagctaggagaattggtctttcttatgtctagctagtaaccatctatgtttgtagctaggagctacttgttgtttctagttgtttgtctatctaagccaatcatacaaaatctatgcttattcacaaacatggagatcgatgttgcaaaattcatcatttcgattttcacaaacaattaaaatcacgctaccatggctcgcatgcactccatccgccgttggcatctccctccgagcagatcttgttgtcgttctcgtttcccttcaatagaggacttgattcctcatggtcttcgcggctatcttctcccgctatagattaaatacattctcatggtaggctaatgtatttgattgttggtcttccttatgtttattagtaacgttttgacgcctcctctaatcgtcttctcgggcatggggatgaccctttttggccaaatctagtagcactcgtctcaataaaaaaattgcacaaacaatcaaatacattagcctacccgagattctttcagatgcttagaaaccgatttgaatagtcatgttctaaccaaaacaaaaacatattatctttgacaaatcctaaaagtataaatggttcattcccacggtatttcaactcctctaaaccagtattagaaccatatgaatcaaatcgtataatcaagtatccacgaaacatcataatactaagctacatatataccttgatttatcagagttactattgtcattttgcaagtttcagatttgtctttgagaaaattgtcttactttgttgatattgagattatataaaccggataagcgaccttgattttacatgattttgctgttttaaaaaaaaacctaaccggtttcatttaattccgcatgttattaaaaaagagggaaaagtcaaagagtcaaacttattaggaacgtctagaattttccaacttggtccattttgcctactctattggaaaaaggaaacaaatatgtatattattatatgtcacataaattcttttccaacgaaacttcaataatttaccatatggaccaattttaattaattcctgtatcagatttaggtgaaacaatcttaataaacatttaaactcaaaaccaaaaaactgtaacacatttttccgtcaaaattgacgagaagaacaagcggctttctctactagccgttaaacagacgttatcttaccaaactccaaagctctggttcgtacaaacccgaacctcatccaatgcttatacacgtatgtatgtatacatttcttttagatattttataaaaacacgctcccaaaaatatttaatagagttgaattatgtttatctgattattattcagaccgaacacgaagaaacaaaaattcaacaaaaacaaagacaaagtttcgttttagcttaaaggttccagatttcgaaaaagctctctttttttttctccttcgtgttacacaaccatttctaggtaatgttttgatttcgaaagagctctctttataatgattttcatttgtgattctggaaatcaaatcgttctattgaaattggggattttttttcgattagggtttgtttggttcctgttaaattatcaaacgttcctgcatttaattgatttttggtcttctaatattttggagcttcttcttgttgttacagatatcattttggtgattaagttatttaagaaatg

SEQ ID NO: 24731 - DNA, 3003 bp, Unknown
  misc_feature (1)..( 3003): 2750-1469P.txt file - cDNA_ID_2184111; gDNA_ID_1972159; Annot_ID_179556
aagataaaaaaaaaaaagaccttatcttggttatttgggtgcaatgttgaaccataaacacaacagaaatccacaggaggaagaacacttaagaagctcgaaagctcatctttttgagtagtttccattcagacaaaaataacccttgtaatgtattcaactgggcagacctattcagatgaagaaacgtaataaaaaggttgcttctgatagattggtcaaatttgatttcgagtaatctaattaaagtttctacaattaagttcatgatcatttgatcattttgatttcagattgacacaaaccttggaaaaaaggagaggaacgaagccagaggaggaattaggaagcgttagttgatttaagaggggaattgaagaagcttacctgcgactgcgagtgaaggcggcgaagagcgaggaagaacaacaaacgccgtgaagctagcttttttgggtttgggccaaacgagattagtttctaacagatgtttttccggacccggaccggtaatacccacgatccgcttaattatttggtccctgtctagctctaaaatcccggtgcaaacgaaccggcaaaaccaacgacctagcggttcggtattttgtttctgaaatctgaaccctccgatttgttcttctttttttttttctttttataatgcaaacaattgatgaaaaaatatattatggtccgaatggtaacctcggtttttaatatgtgagaaaagtggtataacattgcagtacagttcaattacggtacgtgcgagaaaaatatatttgcgggacaaatatggtttgtacaaaataagcggtacagaataatgtttgattgatgaaaaaattatttgcggtgcggattataaattatatatatatatatatattaataattaattattatttttgtgttaataaataagcaataacatatatttataaattattaatacataaataaatcaaaatatacatttttaaagtttaacatacatattattaaattcgttgaatagtttcatcataaaaaattgaaaaaaaaatcataattttttactagtaaattgattatagaacttatataagcttatagtggataataattgtcaaaatttctataagtattatgatatttctatttcttgtaattacattttcttagattttaattaaataaaaagaataaaactataattattgcatatatatatatatatatatatatatatatatatatatattaaagtccattagttaagcaaattgttatgtcctacgtatatttttttcttttatgcactaggtaactagtgattctgatgcacacatatactctctttttttgtacatatatttaaatggggaagctaatggaaaaaaaattaaaatttgcttaagtaatggagtaataaacgagggatgtgtgtatggaagaggcaaaggctgagaaacttttggttgggacgtaggacataacaatttgcttaagtaatggagtaatgaacgatttttttgttggaatgcggttttgagcaaaaacactaggtaaatgatttttcttcttttgaaaagcattccagtgtattgtttttaggacaaaattgcaaacttttttcttttttttttcgaaaaacgcaaatttgttaaaagtattgattggtaactgtattgtagttttaataaaaaaacaagaaaacgccttttgtatgtttcttaatcacagtgtatgaatggtgacatagaccgcccccaaaaccgtaccgtaactgtaacagtataaaaaatctctatatatacatatatatctatgtatttttgttattatttgaaccgtcccatactttttccgtatcacaaaatacagtcatcattcgaaccgcaaaactatatatagtatttcggtttttgaattcaaaatgaaggagaagaggaataggcagattaatataatttcgttatttctttttaatttcctatcttcaatttttcctcacccactgaatttgactatgccattaaaaatgtgtatactaatcatcataccgtcaataaatagagtttgtgggaaacacacgacagacacgtcatcagctctcgacggcgcgtttccatgcctttattatccttcacgttgaccccacatgcccctgttttttttttttggtgttctacggtatatttttgtgaaaatgttacttttcatctactcgataaaattcttaaacagatagtacaactttttacccgattaatctgtagaaaatacaatgttatttacactcaacaaacatttccattaatagaactttacccgatttaaaccactcttccactcgattaatattattattttattaattaaagatacgatgacgtgtccatgagagatgagctttagtggcacgcaacgtaagagaagaagacaaaagtaaaaaagagaaaggcacatgtcgaactcacgtgtccacttaaacgcaccaccttcttctgtgctctccacgcgcctccacacgccctcctcaacttcggaccttcttcctccaaaaaaaacaatttcactcttcattttctcagattctcttattatttcttctactcgtttcgaatcctaatcgtctacagtttccgacgagattctcaccggagaaagaaaggtagttcttttctctgaatctgttgtgttgagaacttagccgtaatttttgagaattattcttcactatttgatttgacaagaatatgggtaataaagacagaatctaaaacacttgcttcagtttttgaggaatcaaaaatcacacgaaagttttttttttttttctgctcctatgtttcttggtgcgtttgtgtttatttgacattaggagtgattgattgattataaagatgaatgatttgttagattcattaagatcactgttctttttgattaatcatcttatgtctaaattttaggtgacttgacagagaatcttgttctgtaataaaagcaaagatg

SEQ ID NO: 24732 - DNA, 3003 bp, Unknown; identical to SEQ ID NO: 20192
  misc_feature (1)..( 3003): 2750-1469P.txt file - cDNA_ID_2184119; gDNA_ID_1972159; Annot_ID_179562

SEQ ID NO: 24733 - DNA, 3003 bp, Unknown
  misc_feature (1)..( 3003): 2750-1469P.txt file - cDNA_ID_2184150; gDNA_ID_1972160; Annot_ID_179585
ttacaaggtttttatttcctgttatttctccaaatgattcatatatgtaattaatgtcagtaaaacattattatgccaagacaaatgtcactatgaagaacttgctcggttgctccacgacattactttggtgtttgatctcatcatcaatcttatttgttacccatatctctttctttgatgtatgtgtacgctttaataatcaacaccgaaagtttctcttctctaacgactcataaagagatagtttcataacaaccacgctgatagggaagacgtaaacgttcaaatctctctgttgtataatcaaaactgagtaagaatataccgagctgttcctatttatcttcatcataagcaaaccagtaagtgtttcccttcaaaagataggcggtagtcagaatttatgaagtggcagtccagagtgtgacatcatgattcctccatgaattagagttcatatcatcgatttggaattcttggtcgtcacagttttagttcttatagctaaaatatcttgtagctcttattgccagatttgttgtcttggtactccgttggtagtatccaagaacaaaggttaaattctgatttgagtcgactctgttctcatcactttctcgaaattagactagtaaaagtaataaataatattcaaaagtccacatccaaaacaagattcaagattttcaaatcttgatgaaaaagaaaaaacaaacagcaaatattacacgaaatggctggaaaaactggttttaaacagtctgagaattgttttgttttaccttagtcatattattttagaggtctcgacgatggaccagaggtagcaacagctctttgagcacgctgcgtttcaccgcaatacagcatctttgtctgtttcttaattatccttgcttctcgcttttcggcttttacagcatttttccgctctttcttctcttctttcgactcttgaccatgagtcttcctcttgatcggttcagcttttgggatttccgctttgacatcggtttgttcagctctcctaccaggtaaaaactcgacaggaatcctctctctcccttggagattaatgattcttccatttgaactcaatgcgttagctaatgtttcactcagcttcttctgcctagctgactctgcagcaaggattttaccagggaggttatcgagattcgagtatgttgagactatggtttcacaatcatgcttctcgctttcatcgctgctttcttcagtcagctctacaaattcatcttcattcccgttatcaaaattttcaccatattctacagttcggcggataacatgagcagcagtgtccacttcctctttatctctgacagagtcactgttcttcagtatatccgcagggttcatatatttttcttcaagctcataatcttttgccttcccatgaataagattctgaacttcttgagccatgaagtcttcttcttcttcttcttctccatcttcagctatgtaaccatcaccgtcactatcacttccatattcattgagttcgagctgatcaaatagctcatcaatttgacgaggaactctcgggttttcagccacaggttcatcactttctctttctctaacctcacgtcttacagaaaactcgagctctccattgctcacaccagaagattcacccttttgagtaagattagcttgaacaacaaaatcttcttccaaatcctcaacatcagaaccaaactcagacccatcactgttttcaagcaacgcagcaacttcaggatcaatagctttctgcaccttgacgttaacagtcttggacgcaacactatacatcaacttattatcattaccttcttcattcaccataccagagatcttcacacgagacgcatcataagccttaacatcacgaggtaactgagcaacctcatacttaggattcacatagaaattagaaccaccaccagtattcttaatctctctcaaatgctccaagtaattataaccatcatcaggataccctaactctaaaatctccttcctcacatgagcaggtaaagaactactcgaatccccaaaactagagtaaccataatccatctcttcaggagcatcatcaaaccgtgagctgtctccttcttcttcttcatcttcttcaatgaaaccattgatgttaacagggttttgatcaactcgtaagaagatcttatcaccacctggtgcatcactgtatcttgggtctgacgtatcacgaggacacaactcgaaagtcgccgcctttttcttatcaataaacttcttcttccccattacttactaattcacaccttcttaagggttttgcaaactgtaaaacaattacgaagatataagatgtctaacttctaagtcacagcaatcaactagactatgtttcaatcctgactaataaaatgtaaatttttatcatcaatcaacacgaaaacatcgaaaagggagaaactttaagtctagaaacgattcaaaaacactaatttaatgaaattgaagaagcttacctgaagagtttgagagagagaggcggagaacaatgcagatgaagaacaaaaacgctgttgaagatttttagttttagggtagagccacccaaaacgcatcattttagggtttaaccaaaacgctgcgtttttgtgttaagcaagccaaaacgcgtcgtttttggcaacaagtcaaattaaatatttgttttatttccataactcagtgtatgccactaaaagaaataatccaccgcgggagagtgcaccgaatggttacatgcacctaatcttcttcttctcctactttcttcgacggtacctgttgttattgtgcgccatcttgatcttacgtgcgccgttggcgcattctcttataccaccattaacgtgcgtcaacaccggaaccgttgaatcagacgttactggtatcaggttcgatcgttgcctcgataccgattctctcgccaagatctctctttccaccgtcatg

SEQ ID NO: 24734 - DNA, 3000 bp, Unknown; identical to SEQ ID NO: 9606
  misc_feature (1)..( 3000): 2750-1469P.txt file - cDNA_ID_2184154; gDNA_ID_1972160; Annot_ID_179586

SEQ ID NO: 24735 - DNA, 3000 bp, Unknown; identical to SEQ ID NO: 9613
  misc_feature (1)..( 3000): 2750-1469P.txt file - cDNA_ID_2184182; gDNA_ID_1972160; Annot_ID_179593

SEQ ID NO: 24736 - DNA, 3003 bp, Unknown
  misc_feature (1)..( 3003): 2750-1469P.txt file - cDNA_ID_2184194; gDNA_ID_1972160; Annot_ID_179599
aaaaaaaaattgattggtcccatggattatttgcaagtaagtgaagatatgttacacaatgtcacttataactttattgtagtgattaatgagttttggttatttttatttttttgtttttttatgctaaggctatgcgtctccgcgaagccaatcgtctcatgattgcaaagttcaagaaagaatctccggctaatgactctcctgaacaggtgtgttggaaatctatcaaaacatgtttttgaggaatatgtttgtataatttgtaccgtaatatgtttgaaaatgttgttggttgtacagaggctagttcgattgaccaatgagaatccgcaatacaatgtcgactttttgtttcattcatactccaaggtttcttaaacaatagtcttttgatgtttaatagtatatccaagttttgtatatttcatgcgcttttttttaagacttcttaaattgctaaacaggactggtttgtatccgatgttggaatgaaaatgtcaaatgtgatgattccaaaccaaatgctagctcttgactgtgaaatggttctatgtgaagatgggacagagggtgtggttagagttggcgctgttgaccgcaatttaaaggtattgcgtatagatactttgagattttgaatcttgatttctttattggtgtcttttattggatccttgatgactcgggtgatcaaatttttatgtctttaggtgatccttgacgaatttgtgaaaccacacaaacctgtggtcgactataggacagctattactggagttactgctgaagatgtccaaaaagccactctctctctggtggatattcaggtaaatctatatatagaatcttcttctttattttattatttcaagagacaacacttcaagatgttatgtttattgtgcaggaaaaattgaggccgtttctttctgctggtgcaattttggtaggtcacagtttgaaccatgacttggataggtaaataaaacttttctagtagagtccttgttaattttaatttggaattttgtctaaaatcatgagtattttgttaccagtgttgaagatagatcatcccatagtgattgatacttcactagtatttaagtatcctaattcacgaaagctaagaagaccttctcttaataccctttgcatggtaagtctatatctactcttgaggtattcacataaaaatgttaacattcttaatatatactttctaaaaataaataaatttccagtctgtgttgggatacgaagtccaaaaggccggtgtttctcatcactgcgtacacgatgcagccgctgcgatgaaacttgcacttgctgttataaagaaaagagttgacacaacaatcacattaactaaagaggtgacaacaaatatttacctagctaacttgtttatgataaattacaattacaatgtttacaagttttttgaatagatggtggaggccgagaaatcaagactctttctacatcgaatccctcaccatctgtcatctgaagagctgaagaaagatcttgctctaaagttttttcccaaaaactttacaattgatgttaaggttgagtttaaaccatatatctatttcttttctctaaatcttaactttttttttttgatatacggtttttttttttttggcagccagcaaaaacacagggaggttattattgtgcagttgttatctttggaagctcagtagaagcaaatcaagcatttgagaacgttaatggatacaaagagacggtattatagaatcttttgatttgttttgaaatggtccaataataattaaaagtgatgaaataacttttttttttttttttttttttgtgtttggttttcaggattcatcggggctgccacagaaactcatttcttgttcaatatctacattttatgtccgttaaatggcttaagatgggtgggtttggttgaaggcttgaaatcttcttttaaatttgctttttaataatgttggcatttctgaatctgtttaaacattgattaataaatctaagctaagtttttttttttctatccttaatttttggtattttgtttgacatttgtttttgatacaaatcattggcaaaatatacacaattacagtattagaacacaaatcgaataaaaaaaatctttgtgaacatcatcatttaaatgtaattgaaacagagtcaataaaggttctctcaatagaggtagcaaacagagtcaactatgctataagaagttgttgcgttatgttttgcttttctgcaggattcatttgggctgtcacagaaacacattgtcttttggcgtctaagttatgaagtttatttttaagtccataaaatggtttacgatgatgatgtaacctcttttttttccatggatctatattttcaaattctatgtttgtaacctaaactgttttaattatctataaaatatttacaatttagcgaaagaaaaaaatgacgatggaacctcagatcaggtttaatacaacaatatgactaaaattaaatttctatttccactacatttttattcgctccaatccatctccctttctaacttagagatcttaatattttttcttcatatttggagatttcttttttcaaatttacactaaaatttgaaatctccagtttgttgggaaaaaactcaactccataactccatattgaaaataaaaaatgtttatgaagaaatgggagagatgttctaagcaaattttaaataattcctcttaaaataatggtaaagatgttactacattgaagtcaaagatgtcacaatttaagcatacaatatagttaaaattatatataaaaaaacccctaagaataaaatataatccagttaattatatattttgagaatataaccctaaactctgtttcttcttccccaaacagtttatgccaaattcactcccagctaataaaataaaatagaaaaactcgttgagccgccattgtttccgtactatg

SEQ ID NO: 24737 - DNA, 3000 bp, Unknown
  misc_feature (1)..( 3000): 2750-1469P.txt file - cDNA_ID_2184210; gDNA_ID_1972160; Annot_ID_179603
cagaaatcatggttttgttttccgatggtcgctcaacttccacccacaaaaggtacagacggttgtcatggttcgtgccaatccacagtttccatgaaattaccagacgtgatctaggccaaaacttgcacaaccacgtggagacttacgtggagcccagtaagatcgaagtaaaagaagaaaagccaagagagacacgagaagaatgggtgatctcgatcaaggacaagatggagaaagcacttagttacgacgcaacaaatagctgggacaagctctgtatctacagagttcctttctatcttcaagagaacgacaagaagtcttacttacctcaaactgtctctattggtccgtaccaccatggaaaggtacacctcagacccatggagcgtcacaaatggcgagcggtcaatatgatcatggcacgtaccaagcacaacattgaaatgtatattgacgccatgaaagagctcgaggaggaggctcgtgcttgctaccaaggtcccattgacatgaagaatagtaatgagttcacagaaatgcttgttcttgatggttgtttcgttctcgagctcttcaagggaacaattcaaggattccagaaaattgggtaagcctggctaaattttatctagtgatttttttctattgcttaaactgttgactctgttgtgtgctgaatagatatgcacgtaacgacccggttttcgctaagcgaggattgatgcattcgattcaacgtgacatgataatgttggaaaaccaacttcctctgttcgttctcgaccggttattagggctacaaaccggtacaccgaaccaaacgggtatagtggcagaagtagctgttcggttcttcaaaacactaatgccaactagcgaggtgctgaccaaatcagaaagatcgttagactcgcaggaaaaatccgatgaattgggtgacaatggcgggttgcactgtttggatgtgttccatcgaagtctcatccaatctagtgagacaactaatcaagggactccatatgaggatatgagcatggtggaaaagcaacaacaattgatacattgcgtgacagaactaagaggcgcaggtgttaacttcatgaggaaagaaaccggccagctttgggacattgaattcaaaaacggttatctaaagataccgaaactactaatccatgatggtgagttaaccggttttttcttctctacttttctattagttcctcacaaatttttactatccattatctttaagatcttacagtttgacaaagaatatatttgttaccaaaacactgtggtctcacttgtttcttgtaggtaccaagtctcttttctcaaatcttattgctttcgagcagtgccatacacaatcaagcaacaacataacatcctacataatcttcatggataatctaataaactcttctcaagatgttagctacttgcaccacgacggtattattgagcattggttagggagtgattctgaagttgcagatttgttcaaccggttatgtaaagaagtgatctttgatccaaaagatgggtatctatctcaactgtctcgtgaagttaaccgttattatagtcgtaagtggaactcgttgaaggctactctaagacaaaagtacttcaataacccttgggcatatttctccttttcagctgcagttattctgctatttctcacattctttcaaagcttctttgctgtctatgcttattataagccactctcttagttttcatttttttttttcattttatttacaatatttgtatttcttgttttttcaatattttctattcataattaaaaaaaaaaagacgttgtaaaatttggaattttaaatagttaatggattgaaaaaggttaatttcggatatttatttggactgcatatcctagacgtagtgaatattaagaagtagtaaatattgttcattcattgaaaaaaagaatgaaaaaaaaaacactaaacagtatagtgatagacatggttgtgagaactatggatttacaaatagttgtcattcaaaagagtaatgtgaataaacttagtggaataaacaaaaacaagaacagatgatcaagacagcgattagaaatgttcgtcgggtcgaggctgattaggttccatttgcttggaaatggggttgcacgtctgaacactattttttggtacgtcaattttttaaggcataagattttgaatatatcttaagcataaaatataatagatgacttgactttcttggagtcttttcggtttgcaatttgcatgtctgaataccatttttgggtggtcgagtttttttttaaggcgtaagattttgaatattccaagtcttaatatataatagctttataaaattagtttttaaggcatgtcatgaacactatttcttcgagtctttctataagagcacctcattatccattcgagaatggtgaagtcgtcagtcgtgccatgtgccgagtttcccatgtctacggttgataacacatcttaattgaaattataaacttgctgttttctaattcgtagattttttttctttcatatggataattcaagtatcaatcattgtcaataatgaataacgcattatatagtatatagtatttctataagagtacaacgcattttcattttttttaaataagagtgaatgtttcaaataaatatctcactctacgaaatatatatattacattaaagacttgtaataaagtctttctattaagagtagtggaagaaaagtccaagaaaacatcgctcgccaaagcattatatatccattacgtttaaagattgtttaagacattttaatgtataagtatgattagatgtcaatcactggttgttgtcattacagatcaaataatattgcgaccaatgacagctttagttcagttgttacatatttgcttttagactttttctatgtcactctcaatctcctaaaaaccttcaacaaacaaaaatg

SEQ ID NO: 24738 - DNA, 3003 bp, Unknown
  misc_feature (1)..( 3003): 2750-1469P.txt file - cDNA_ID_2184271; gDNA_ID_1972163; Annot_ID_179622
agccgttggtttgagagaggacatgagacttctccaatgataaacaaaaggcttcctcacacgagcttggttccaaatcttgctcttcgatccgcaattcaagaatggcttcaacttcgtgaattattgaacagaccctctgcttgcagagagatataagtgattcgccttaatcagagtgacaaatttatcataaatcaaaacattttcaaattttgtcaattcaactttctctaattaatgtttatattattatatcaatgcacagtgcgttacaacacatatgcttcttagttaataggagttgttactctatcactagtattattggtttggtcactcttttttggggtggttacgcacgtatatactaaatatagactatgatctacttagattttaatatttgtgatgaattgtgaactataagaatatagtggttatgactgaattttttcatagatttaataaatcttccctcatggcataatattagttagttaatatatagtggtatagtggtcactattttatttgttaaatttggtttgatgcattggtggtcattataacaagcataaaaaaacactaaagctagtattggattcatccacgtttttgtaattttgttatttgatggaataataataataaatttagcctgaatcttgcatagatttagttctcttaattaatcttccctcatgacgtttaatataacggaaatatggtggtttggttgcccactacacactatatattcctttgatgccgtgatagtcattataacaagcacaaggaaaaacactaaatcgtagaagaagaaaagaaaaacaaacaagcaatggattcaacagccaccgttgcaagtgatcgtcttagtcaactaaactctttcgaggagactatgacaggcgtgaaaggccttgttgattccggaatcaaagaggttccagctatgttccgtgagcctccagctattttagcaagccgaaaaccaccactagctttgcagttcacgatcccaaccatcgatctgaacggaggagtagtgtactacaagaatcaagattcagttacacggagaagcatggttgagaagataggagatgcagcggagaaatggggtttcttccaggtggttaaccacgggatcccgctcgacgtgctggagaaggtgaaagaagggattcgcgcgtttcacgagcaggatgctgaattgaagaaacggttctactctcgtgatcacactcgaaaaatggtttactatagtaacttggatctcttcaccgctatgaaagcgagttggagagataccatgtgtgcctatatggccccggatcctcccacatcggaggacttgcccgaggtttgtgggtaaggtttccatatatatatgagcttaattatttatagctaataacatttttagaaaggtttttaaaaaaaattttgtattattttttaaaaagtgaattatagaatttttaaagtaaatccatttgtatttttcatgaatctgaattgatgttttgatatgtggcagggagattatgatggagtatgcaaaggaaataatgaatttaggtgaattgatctttgagcttctatcagaggctctagggttgaataattctaatcacctcaaagacatggattgcagcaagtctttggtcttgttcggccagtactatccaccttgtccgcagcctgaccatactttaggcttaagcaagcacaccgatttttcttttctcaccattgttcttcaggggaatctcggtgggcttcaagttctccatgataaacaatattggatcgatattcctcccgtccctggggctcttgtcgttaacctcggagatcttctccaggttaaagaagtgactttttagctttgtaacattttagctctatctttgttaggaatatcatatatgaaataatatggaatttaaagtagtaagtaaaagatataggctagttatgatttgaatggagatgtgagttgattttttatttgaatttgtgcagcttataagcaatggcaagttcataagcgtggagcacagggtgatagcaaatagagcggctgaaccgcggatttcagtgccatgtttcttcagcaccgtgatgagggagagccatcgagtatatggacccataaaagagcttctgtcagaacaaaaccctcccaagtatagggacaccaccatctccgagttcgcaagcatgtacgcgtctaaagagatcaatacctctgcgttactccgtttagagatctgatacatcgaccaaagaaaatgtctttgtattaaataatgttcgtatgcgtttactcaatttcaagatttgagacatcgagcaaataaactgtacctttgtaacgtaatgtgtgtatgtgtgtcactccatgcacggatatgtcgacgtaaaacatccgtaaaatgtacccttgtaacataatgtatgtatgtgtgtcactctatgttaggatatgagacattgaccaaataaaatgtctttgaaaacacacaccgtttggcccattgacccactcttcttttttgtttttacatcaagtagtcattttttgtttatatggtgctagttataataacccattgctacctaatcttttaatacacacgcacatttgttttaagtatattttaatgatataatcgacattgattacttccttgagtttgattaggtcgttgacactcaaagggcttaaaagtaaaaccgcacaagaaaataatacatatacatgacattccagaacgaatattcgaaagaacagagtaacacaagaaagggatgacacatgccttaatcggatcttttctttcttaattccatattattaaaaacattttccggagaagaagacaaaaccaaagcttcttgtctgaaacgaaccagccattctaaagatttttacaaacaactttttcccgagaaaatctcaagtttgaggaagcgagaaagagcaacatg

SEQ ID NO: 24739 - DNA, 3000 bp, Unknown; identical to SEQ ID NO: 9629
  misc_feature (1)..( 3000): 2750-1469P.txt file - cDNA_ID_2184275; gDNA_ID_1972163; Annot_ID_179623

SEQ ID NO: 24740 - DNA, 3000 bp, Unknown; identical to SEQ ID NO: 9628
  misc_feature (1)..( 3000): 2750-1469P.txt file - cDNA_ID_2184283; gDNA_ID_1972163; Annot_ID_179625

SEQ ID NO: 24741 - DNA, 3003 bp, Unknown
  misc_feature (1)..( 3003): 2750-1469P.txt file - cDNA_ID_2184314; gDNA_ID_1972163; Annot_ID_179635
tcgataagaggtggaaactacaactctgattgtagtttttgattttctagagtgatacaactgtcttctgatcaagatttatttgtaaaacgtgaccctaaatgtagctcctcgttcaaagagcaaagtcctcatgttgcttctgtaaagagcatacttgaaagtcatgccagttacttgatgtctggtaaagaactttcaaagcttgttgcattcgtcaaaggcacccagtttgatattgtggtacgtatacaatttgtaccattcaccttttcatgcttggaaccaataaggtatatagtcattcactaacaataccaaaattccaggattttcttcaacgagaaagatatggttgtgcgcagctgcagaattttgctgcagggcttgaactgattgggcaaaaggttagaatcaacccccttgtggtttctttgatgttcaaaactcgttatttttccctctcattctgctgcttgaaacaatttgataactaaaacatagatccctatcgcatcgtaaaagtctgcatatttgagtaaacttatcttacatcgaagtctaactattgaaatccctcagctgcaaatgagtgagctacagaaccggttagatgcagagtttctattggctcagatgtgctccgtcaaattcaaagaatggatagttgttcttgccactcttttacaacggtctgaggtaaaaatcttttagatttccaccgtaatcacgactttaaagcattcacagtgatataaccagattgtttcattattttgtcacaacacaggttctttatgatattttccggtatgatctacggttgtggaaagcatatagcgtgacattagaggtaacaaactcttgtttccataacaatcgatatcgatttcatcacgtgcgggtctcctctttaaaacatgttctttgtttcagtctcacttggctttcgctcagtaccatgacttacttcagattttagaggcaaaactctcagcgacctcacgagaagaaagcaatagaggttccatctcttgataaatcattttatttttgaagctttttcacatcaaacattttctgcctgagttttcacgttcgtgtagataaacataatttgagaagaaataagaaatacatcacctcacatacttttactatttattttggtcacaatagaaaggaaaagaaatgtagaagtcatatcatgtttggcctaaataatcgaattgttacagcctgaaatcgaaaataaattgaaaaaaacactctgcattttgtgtaatgtgcgtgtatataaaaccattgttttgtccaacataaaaagataaatgtatatgtattttgatttactattcagtataacatgtttttattcaaatcaatgaagcttggaacaaaagtatatgagtgctgactaggtgtaatgttctggtcgttattattacaaatagtagattagaggtattaaaaaaacaatcggagaaagaaaaagagagttgtattaaaataaaactgaaaagtaagataagcgtaagcacccgtgaccgtgagtaagtatggaggcggcagaagtgggtcggcagaagtggggatgagtggagtgaaagtgggacaaccccaaagttcacaagaggctaattagaaaaccaaaaaaacaacaataacaaaattggagatgctcttttatgcaaaaaaaaaaaaaaaaaaaagcaacaataatgaaaattaacatggtttaacacattctcattcctatatatgttacatgcgtaactggagatgctcttgtatgccccccaaatttgcatagtccatgttacttcacttaaagatagttttatttctaactttttctttataaaaactaactgccgtaagtagtaactaccgagtagtataagatggtaatgtaaaatttagtagccacgtcgaaagtgacaaacaagtgatgtatctatactctactctcataagtcacaagtcacatagagacaatcacccattcttgtatcatatccttttcagatgcaaaaataacctcacacattaaaacccgtgagtaaacaaacgaagtaaaggaattgacgttgtactcacctcacattctctccctagtttaaacaaattatgattgttatatgtttggaaagatacatgcaacacattttaaataatatgttgtgattgagccgaatgcttatatgattttctattatacgtatagcaatgaacacgattatgaattcgatttagagtgatgatacaaccttaataccttaatccattcaggctagagaccataataagttaacttaatctcctcatcctagtcactactcgaatgccatctttacgtttaaaacaattatggccacactaacgatatacctatgtttgtttgctagtataataaggatatgtctctatttgctatcacttcagccttttctgaagacaatgttaccgctatatcttccaatcaattgataccactaaatgataaaatcattgctaatcttataagatcaccaaacactcagacaaaaagtttgaatcttgcttcttcgtttctccactctttatccgcttataaatactcttattctctcctcttaacatcctcatcaaaccatttagcctctccacactcacaaagggctcacaagtctcaagtaattctctttctctctctcaagcacaaacacacacaaatgtataaacaaacccaccatttttgctttcaaatgttagttgttcactatgtctcatttacattaaactctctttttctttttcccaaaagttgttcaccaaaaccaattgattagctctcattctcataaaaaaaacaaaactttacaacaattactaacctttcacatgcacccatttatttaccaaactacgaaaaaagatacaaccttttatatctctctctttaactaacttaaggaactaaccattctctcttcctttttttttttcagatacaaaacaatg

SEQ ID NO: 24742 - DNA, 3000 bp, Unknown; identical to SEQ ID NO: 9632
  misc_feature (1)..( 3000): 2750-1469P.txt file - cDNA_ID_2184563; gDNA_ID_1972164; Annot_ID_179670

SEQ ID NO: 24743 - DNA, 3000 bp, Unknown; identical to SEQ ID NO: 9633
  misc_feature (1)..( 3000): 2750-1469P.txt file - cDNA_ID_2184581; gDNA_ID_1972164; Annot_ID_179674

SEQ ID NO: 24744 - DNA, 3003 bp, Unknown
  misc_feature (1)..( 3003): 2750-1469P.txt file - cDNA_ID_2184618; gDNA_ID_1972164; Annot_ID_179688
agatcgatgccacaacaaaaaccgtaaacctctgttttctctcttctcttctcttccattactcgaaatcaaaagcttaagtaacgaaacgttgaaaattgtacagaaattcgtgaagcaagtgcttgagacgatcgaattagatgagattaaagattcattggtgggagtcaccggagttagtggattatcgacggagcaaaggaagagattgacgattgcggtggagttggtggcgaatccgtcgattatatttatggatgagccaacgacggggctagacgcaagagcagctgccattgttatgagagctgtgaagaacgtcgctgatactggacgaaccatcgtctgtactattcatcagcctagtatcgacatttttgaagccttcgacgaggtaaattgcataattggctcaataaactgaattgttatattttgaccccaaactgttttatcttataaaccaagtccaaacttgaatttgcagctggtgcttcttaaaagaggtggtcgcatgatctacacaggaccattaggccaacattcacgtcacattatcgagtattttgaggtaaatttgcataaattttacttttagtctatgattgtttttacaaagatatgttaacttcttttatttattggattgaaaaacagagtgttcctgaaattcctaaaataaaagacaaccacaatccagcaacatggatgcttgatgttagttcacagtcggtagaaattgaacttggtgtcgatttcgcaaaaatctaccatgactctgctctttacaagtgagtaaaagcttttaaactatgcattaataactgttattgttctaagaatgtggttgtaatgaaaacatgtgtgattgttataggcgaaactcagagcttgtgaaacagttgagccagccagattcaggatcaagtgatatacagtttaagagaacctttgcacaaagctggtggggacaattcaaatctattctatggaaaatgaacttgtcttattggagaagcccttcttataacctaatgcgtatgatgcacactttagtctcttctttgatcttcggcgcacttttctggaaacaaggccaaaatctgtaagtggagagtgaacatacctcttatatgacactttagatcccagtttgctaacattttgagttgtgttttgtcatttgtagagatactcaacagagtatgttcacagtatttggagcgatctacggtttggtactcttcttagggataaacaattgtgcatcagctcttcaatatttcgaaacagagagaaatgttatgtaccgggaaagattcgcagggatgtactcagcgactgcttatgcattgggtcaagtggtgactgagataccttatatattcatacaagctgccgagtttgtgatcgtaacatatccaatgatcggtttctatccttcagcctacaaagtcttttggtcactctactctatgttttgctcactactcactttcaactaccttgcgatgttcctcgtctccatcacgccaaacttcatggttgccgcgattcttcaatcgctcttttatgttggtttcaaccttttttcggggtttttgatcccccaaacggtaagatcacccatcctttagtttcttgaacaagaatctttaccaagaagaaaatgttttgtaatgtattcttttggtttgtgaaaattgcagcaagtaccagggtggtggatttggttatattatctaacaccaacgtcttggacactcaacgggtttatctcgtcccaatacggcgatattcatgaagagatcaatgtctttggacaatccacgacggttgcaagattcttgaaagactattttggatttcatcatgaccttttggcggttaccgcggttgttcaaatcgcttttcccattgccttagcttctatgtttgcattcttcgtgggcaaactcaacttccaacgaagatgatcatgccaattagtcttcatcaatcatcattttagaataaaataataaaataatggtttttatttttgtttgtgaaaataaacatataacatataacttttctttttggtatgtatatgattttgaggaaagtaaacaaagcattgtctatgcaaaacaaataaccaaatcttgcaagtatcaaaactatattacttattacttgtcttgacaaagacgagtacttgtttttccaagtcgaatacaggataagtaacggatacgggacaaataccatgtatttatgcccacccatatcgacagacagtcagtaatcaaaatttaccttcaaatcaagaaaaatgggcaatagttaacttgagtgacaagtaacaaactaaaatgaataatcatgcataaattataaagataacattaaaccattttccattttatataatttgtacaaataacttttaagttatataaaggaattatttagaaatatgcttgggtaattgtgttctcttctaatttcttattatatatctctagaaactttttttctcaaaagagatttctaaactgatattacatattttttttttagtttttttttgttgttgtaaattttagacatctatttttagacatctatattaaacgattaaatatttcattatcattataaaatcataatgtatttatgtataaaaattcaaaatatactactttttgtttaaaattttaatattacttctgtttggcaaattaaataaaatctttcgaatagttgacatagtataaattagagaatataaataagaaaaccaaagcggtcaacacaagaggatcggtttgttcctttcttcctcctcgtatacgaatcaatacgcatttctccaactccatagccaaaagctcgacgagatccaacagcacctcctgatctgcatcgttttcaacttagcttctcctgtcaatcgaaatccctaattatacattgatcggattcaatcgagcgattcgagagagaatcgcgatg

SEQ ID NO: 24745 - DNA, 3000 bp, Unknown; identical to SEQ ID NO: 9643
  misc_feature (1)..( 3000): 2750-1469P.txt file - cDNA_ID_2184640; gDNA_ID_1972164; Annot_ID_179693

SEQ ID NO: 24746 - DNA, 3003 bp, Unknown
  misc_feature (1)..( 3003): 2750-1469P.txt file - cDNA_ID_2184672; gDNA_ID_1972164; Annot_ID_179704
caaactccattaaagagaaaatctttgctcgtttctcttaaggcccattgctttttatctgaagatgatttcaagagagtgccctgtttttttgtataaataaaattttgatcttttgctcgctttatacacatgtgggaacggttttgtcggtggagacatttatggattcgtgaactgctgcaaaaattatgcgtttcttggacgtttctgtaactttctctttattagattttgtatcttgtgtctctgtgtccaccattgcgttgtgtgtattcaattgatttccccaggtgttgaagattgttatttatatatttaacttattttatgcacagagatctttagtataattcatgaaaatatggttttatcttccatgatctaggggaactaaaacatttgtaaagtttgagcccatattttgtgtttgttgcttttcagagatgcatatattatggttgttgttctgtttatgaattgttatgtgcattgttttgcagcaatggcgccaccgattgaggtttctaccaaaagctacgttgagaaacatgtttcacttcctactcttaatgagaggatactttcgtccatgagtcacagatcagtagctgcacacccatggcatgatctcgagataggtaagctatacgtaaaggtttctttttcttttttttggctctaagatcatttcattgttttttagtaataactcttataccttttttgcttcgcattcctttgtttacaggacctgaagccccaattatcttcaattgtgtaagtgttttgctaaagctctaaggattgaaaatatttaattatattgtcacaaaactgccattatgcgtattcggagatgctgcagttgtttactatttctacagaatttacatatttgtagcattcactcaaagaaaattaaaacattcattggctatatatcttgaaacctgaattgagtctgctgtagcatatgaaatgatgttcatcgcctgattaggaaaccattttatgggtttaatctttgagatattgttgtgggaatcattaaccaagcatacggaggcattattacaggtggttgagataggaaaagggagcaaggtgaaatatgaactcgacaaaactacgggtctcattaaggtataaatttgattgcattaactttcttcgctgtccctttcattattagaggtacgattgtctaaactttacacatattctcaggtcgaccgtattctttactcatctgtcgtatacccacacaactatgggttcattccgcgtaccctttgtgaggacagtgaccctattgatgttcttgtcattatgcaggtaacatattttttcatacaattttgagaacctgcataattcattacataatgtttcttgttctattttgatttgtgcatctgataagctttgaagaagttcaagcgctcaactcttagctatagactctactttataactgtgtagcttaggaatgaatgtagcagatgagaaatgttgccagtcagttatcgagcagttagtggctgctaggcttataaaggtgtctcagcatattgtttagagtgtggattttctagtgtttactctggaatttaaaacctcttattaatcaatcaagtctataagcatcatcagcatctcagtctgtcttatttgactggtagaaaacacatctcatgtgaatcttgttgaatattttctacaggaaccggtgatcccaggatgctttcttcgggccaaagctattggtctgatgccaatgattgatcaggttagatattcaacgtacttgtcatattagtacttataaaagtaacagagattgaaactagaagctctttctgcttgaatagggtgagaaagacgacaagatcattgctgtctgcgctgacgatccagagtatcgccattacaacgacatcagtgagcttccgcctcatcgtatggctgagatccgccgtttctttgaagactgtgagtgttcttttcttacaaacttttggttggttaaggatgatatgaggctcatactcttgtaatcttgttgcagataagaaaaacgagaacaaggaagtagccgttaacgacttccttccggcaactgcagcctacgacgcagttcagcattccatgtaagtagccttcatgaaacttactgttatttacttcatatattatgaccttgtaaatagccgcaatttgtttatatcaaagaataactaactaatcaaattgggacaactcttttgtgtcatgtagggatctctatgcagactacgtcgtggagaacctaagacgttgaatcaccacctcaagcaatggaatgaaagctcacaactgcattattcacaaatataaatatacatataaatgtcaggcttctcaaaggatatatttgttgtgtatgtcctctgatgaatccggtagatgatgccgataattcttttttttttttgtcgtatgaaaccgataatcaaagactaaaacagggatttttctcatttgtggtcatcactttttaaattttggtgtcatttctcatcttaatcaatttgtttttgagttttattcttctattagatcttttatacatcaaagaatagatgaagattcctccctaaaaccttatagtatgtcatttattcacaatatgttatacgtgttaattttctctcttttagtatactctttttttttctttcagattccatcccaagttgcttaaattttgttaaaaccaactaaattccatagttcaatttacaaatctgtgatcagatgctatctaaatgaatattaccattttagcccttaccttttctgaaatttaccacgtttacctcaatgaaccgtcatcgcaaaaccaaaaaccctttcctatccctaaaacccgagagagcatcttcttctcctcttagggtagaagaaggacgaaaatcggaggaggaagaagaagatcgattcgatttgtgatcaacgatg

SEQ ID NO: 24747 - DNA, 3003 bp, Unknown
  misc_feature (1)..( 3003): 2750-1469P.txt file - cDNA_ID_2184682; gDNA_ID_1972164; Annot_ID_179708
caaagatatcatcactgaacatgtcactctttgggctgcctgcggaagctagtgtcatatctgagtctgatatcacaagccgtgcaggtgtttccccaactgctgaagatagcttggcgacttcaccatctacggcctcagtatccaacccagctttagcttgaacatctgccacagtagaggactgctccaactttttcttatatttctccaatatggcttgcgtaatcctcttgctttcctcgattcttttcatctctgcagcttcttgttcttcaactccccaaacaacatcttcaccgtcatcatcattatcaacttcagacctttcaacgttgccctgagtttcaccgttaggtttatggctttttaaagaatctaagtcatcttctgcatcatgcctaacttccccatatccatcaccaccacttttatagatctcctgatcactctggtcttctcttcttcctctatccctatcttgatccttacgtctctctctttcattctccctcccagtctctctactactagacctagctttatctctactactcctacctctgtagttgtctctattgctttctctatcaatgcttcccttcttcttcaaattctccccttcctccaaatcaagttcaccatcgttaccaggattccccaaaaatggataaacattcttttcattgccgtcctcatcaagatgatgactgtgtcgatgcttgtgatgatggtgcttgtgccgcttggaagatttaacgacttcgtcggaaggagaatacgacctacggtgtttgcggtggcttgattctactatcttatcgctcaccatcagatcgtcggaaaagatagacaatcgcaaaattagggttagggttcgattttctcccgcgctctctctgtctccgtgaacaacagacttccattaaaaaaattcacattatataaaaattacagtcggcatcggcaaattaaaaggaaatcagaatcgtctatttaaaaaaacaaagggcccaggcccattaataataaatgattaagaggatagagccatcatgtccgttgattattcgaaacctttccgatggatggatgacacgtcatcgatccgcaagaaactcgggtaaccaatgaaagccagcagaagcctctatataaacaaatgtctcctcagtttttccatcagacgcatctttcaattgtcaagtgattgtatttaaccacaatttcttctcatctctaaagtcagcatcaatggctccgaaagcggcagagaagaaaccggctgggaagaagccagcagaaaaagctccggcagagaaattaccaaaggcggagaagaagatcaccaaggaaggtggaagcgaaaagaagaagaagaaatcgaagaagaacatcgagacgtacaagatctacatcttcaaggttctgaaacaagttcatcctgatatcggaatctccgggaaagcgatggggatcatgaacagtttcatcaacgacatcttcgagaaactagctcaggaatcatcgcgattggctaggtacaacaagaaaccgacgatcacttctcgggaaattcagacggcggtgagacttgtgttgcctggagagctctcgaaacacgctgtttctgaaggcactaaggcggttactaaattcactagctcgtagggtttatatctcttaattctctttccgcctttcgaatcgtttaggtgttatcgctttcttctacatctttggtggtaaatctttgaatgaaaagtttcctttgttaatgaatatcgttttcttcataagaacaaaaaattatttgatcggtgatcaatatcttcttccgtttctgagggttttttggcctttttttctatccataactcttttggttcttcacgattccactaatttggtggggagcaacactagttatattttgcagagatttgtgggcacaatggtaaatcatatacttgagtaattatgttaaagaatgtttcactttaacaaaatcatactgatccatttggttttatcttaatcccttgatttaatcacttcatggtgatttctaactgtgtttagtgatgacgatgttgatgattgatgtttaaggttttcacttttcagtgaacaaacgttacaactgggcctatttatcattcgtgacccattttttccctcgtgatcgggctctagcgggaaaaattcagacacataaaataagagtattaaacacgagacacgtgtatatttctgattcgctccgagtaaggtggccacgtcttcgtctccctagttgacctttctttgcatttctatcttaatataaaaaaaactcgtttgatccatccgtcttctctcagattagctttttaacatcttggctgggtttcgtgtgatttcgttttggatatggttgttcggattcttgttaccatgattcggctatagtgtttgtcgcctctgattgtctcaagcatcgttctttactgatttttagatagctctgagatctgtctctgcgattcgtcggatttgaattcgtttttttttttgggtagctcttggatttcttcttctagggtttccaagaggatagagaaaatgcgggtgtcctctgagatactccttctttctttggttccggcgttgactttttatcattctggtttaagttctaatcgtttgaaacctcttcaaaagagtgattggcgtggtaatcttagttaaacaacaatttctctgtttttttgtttctccgatctcttcagatcttttcaattttctcttcggtttggtttgttttcacgcatttcctagctcggagtaagctaatcgaagaaaacaagcttgttattgatcgatctttcggtttttgttttgacgttttgtgtgaacgaggtaatttggctatatgattttttggctaaagtgttgtttgagctagagttctcttgttaatggtatttgaatttgtgtttgttgcagttacttttggatatg

SEQ ID NO: 24748 - DNA, 3000 bp, Unknown; identical to SEQ ID NO: 9639
  misc_feature (1)..( 3000): 2750-1469P.txt file - cDNA_ID_2184686; gDNA_ID_1972164; Annot_ID_179709

SEQ ID NO: 24749 - DNA, 3000 bp, Unknown; identical to SEQ ID NO: 9634
  misc_feature (1)..( 3000): 2750-1469P.txt file - cDNA_ID_2184702; gDNA_ID_1972164; Annot_ID_179680

SEQ ID NO: 24750 - DNA, 3000 bp, Unknown; identical to SEQ ID NO: 9663
  misc_feature (1)..( 3000): 2750-1469P.txt file - cDNA_ID_2184742; gDNA_ID_1972165; Annot_ID_179740

SEQ ID NO: 24751 - DNA, 3000 bp, Unknown; identical to SEQ ID NO: 9653
  misc_feature (1)..( 3000): 2750-1469P.txt file - cDNA_ID_2184752; gDNA_ID_1972165; Annot_ID_179746

SEQ ID NO: 24752 - DNA, 3003 bp, Unknown
  misc_feature (1)..( 3003): 2750-1469P.txt file - cDNA_ID_2184760; gDNA_ID_1972165; Annot_ID_179749
gaaagcatttttaccaattgaagctcacaaaacaaaatgatctcatatctgcatcaacaactgtttttcaatattacagagcaaaagtgaaacaattgagcaaaataaaagagatattgaccttagacaagctcaatgtaagccattggagcattatcacctctccttggaagagttctgatgatcctcgtgtatccaccgtttctctcaccgtatctatcaggaacctcagcaaacagagcgtgaacaatctgtttctcgtagatatatcccaaggcttgtcttcgcttgtgcaacgaaccgtctttagccaatgtaatcatcttgtcaacgaacttcctcatcgcactagctctagctcgagtcgtcttgattctcccatgcttaagaagctgagtcgtgagtcctcgcagaagagctttgcgctggtccggtggtctgttcagcttcggaacacgtcgtccgtgtctcatcgcgtagatacgaccaccaccgtcaacaattttgaatccattctcaaagctttgccaatctgcgttcgaaattcgaaaaccctaacgactttggagattcaaattgagccaaatctctatgaaaagtggaaatttacctggaagtccgattgagaggagaggattgaccggagagagaccggagaaagatgggagtgaaggagaagagattgggagacgaagagtaaccggacggcgagaagacgaggaaggtaatcggagtgatgcggtggagggaagagctgatttgagagaagacatactccagactctgctcacggaatctgtaggagtcgccattgccatggacattggaatcgccattagattgtgatcctctgcaacaaagcggattttgctggtgttgaatggataagggatagaggaagaggactttgtttatcagaaaccttttgatgggccttaatgggcctataaactgtaactctgtagcgctttgccaacaagagactttttaaggtttttgttgccaaacagatatttgcatttgggctatgtaatgttagaattattttataatgtatgctattgctagatattgtttaagtgcatttgtgatttacaaacatttcatttttattttggttttaatgagcatttctattatagagactttgatgttaataaatggtgttctaagatatattaaaatattttatatactttcttaaaattggataaattttgggaaaatccttaatatcagttaaattgaagataaagagtattaaaaaaaactatgtagtaaaatacatttcacattttttgtgtataatagtacatggtattcgttaagatcactcaaaaattaacaaattaagtctaaaagggcagaaaagactattcaaatatggacttggagaaagacattcagctttttacgctgagaaactttcatattgagccgtgtgtttgtgttgtgaagagaagtaataaaaaataatttgaagtgaaaaaggagaagaaaaaataagatcgtagaaagcgtggatggtttcttcttgggttcactgccatgcgattattaaattggccatggggctagtgtttgacgtacaaaagtctaaaaattgtcagtcaaacaggtccaaaactttgtaagaaaaataatataataatagcaaattttctaaaaattgttaaaaaaagaacaaaagggaaaagatgaggatgcagatgaaagcaaaatgtcaaacactagtttcagattttatcgggaactggggtttgacagttggtgtatgtatgtaatggcctctcatcaaaacatgtgcatctttttccttttttgttatttactgttttagctctacgtcttgtccaattcctctcaagtaaaatgcctttaatatgatactaatatacaaggggactaatgctttttcccttttcttatccttgttttgtctaaatctttacttggattcctttatttttctcctctctttagattagtacggtttaaggaataccatctttctaattttagcacaaaattgcaagttggtgccccatcttagtaagcacatcgtaccacactttgattgtgtgagagacttcttcatcccatctctcataccaaacctaaatcaaatgactagtggtgcaacctgctgactccatatgaccataactaataaatcggtttatgaatccaactcatgtagctctatagaatagaaacccattcatttcacataatgaactgaatctgacattttatttacatcatttactactcaattttgtaattagcaagatcatctttttcattattcaacaattttgatattccataatttattaactttgtcatacatcataatattctgaaattttgttatatattgtaccggttccacgaaatagagctctattattatagaccaaacaaacaaaatattatcttcttgtggttagttcgagagagaggtcaagaagaaacgaaatggatcggcaaacggaagacgtcaaacacacaacgacgaacattttccgatcacccacctaatctcttcccatttttattatttttcaaaactcaaattaattaagaagaaaaaaacagaaacagagagagaaagagttaagatgaatagagatagaaagagtcattaaatgtacgaagcgacattcacaataattcgaaaggtggaagacgacttagatacggccaggcttcactgtcctcctcgtcctcctcaattacccctaacccctttttccgggattcatctccaacccacatccttccaaattctcaccccctcactgagtttttgctttttctcctcatcggagatcgtgaagacgatcaagtaatttaagaatcccaccattgataaaagagtctagcttttctactaccaaacctttttctgtttggaaattttcgattttggatttaacccttttcttaccttatttataaccatgcaatctcacgaccaacaacccttcaatctccatg

SEQ ID NO: 24753 - DNA, 3003 bp, Unknown
  misc_feature (1)..( 3003): 2750-1469P.txt file - cDNA_ID_2184864; gDNA_ID_2213671; Annot_ID_132784
tagtgttaaaactgcaacaagtaaaagatagaaattttatgcagaatataatggttccttttttctactatggcagtctttgaaaaacattgcgtggggtaaacgtactcgggtcatattggatgttggatgtggagtggcgagctttggcggtttcctctttgaaagagatgttatagcaatgtctcttgcaccaaaagatgaacacgaggctcaagtccagtttgctcttgaaagaaagattccagccatctcagcagttatgggctctaagcgactgccattcccgagcagagtgtttgatcttatccactgtgcacgttgtagagtcccatggcataatgagggtggtatgcttcttctggaacttaatcggatgcttaggcctggaggttattttgtctggtcagcaacaccagtctaccagaagcttgaagaagatgttcaaatctggaaaggtaatgactaaagtaaaatgcttgaacttaactagagttcctccttcttttgtttgtttcactgaacctgagatgttttgagtgatgtagaaatgtccgcgttgacaaaatccttgtgctgggaacttgtgacaatcaacaaggataaactcaatggtattggtgctgcaatctaccagaaacctgccaccaatgaatgttacgagaaaagaaagcacaacaagcctccactgtgcaaaaacaacgacgatgcaaatgcagcctggtatgattgtttccacaatttgcatagggaatgaataaccataaggttttaacagaacaaagaaagtcaaaacttgaatggaaatttcaggtatgtacccctacaagcatgtatgcataaagttcctaccaatgtggtcgagagaggaagcaagtggcccgtgaattggccccgtcggcttcaaacaccgccttactggttaaacagctctcaaatggggatatatgggaaaccagctcctcgagatttcactacagattatgaacactggaaacatgttgtaagcaaagtatacatgaatgaaataggaatcagctggtcaaatgtgaggaatgtaatggacatgcgagctgtctacggagggtgagcatcaacgaaaacaaatcaaactaaaatctcacttaccaaaactaaacctttttttactaactacgtaaaaatgcaggtttgcagcagctctgaaggacctacaggtgtgggtaatgaatgtagtaaacataaattcaccagatacactaccgataatctacgagagaggcctattcggaatatatcatgactggtgtgaatcatttagcacataccctcgaagctatgatctcttacatgcagatcatcttttctcaaagttgagaacaaggtataagcgtaactcataatatccacaccttttggtaacgtttcatcaacaataagtctcttgttttgttttgttttgaaaggtgcaatcttgttccagtaatggcagaagtggatagaatagtaagaccaggaggtaaactaatagttcgtgacgaatcaaatgtgataagagaagttgagaacatgttgaagtcactgcactgggatgttcacttaactttctccaaacaccaagaaggaatcttaagtgcacaaaaaggattctggagaccagaaacttctcaatgaaagacgctctgagaatctgcatttgaaagtagcagaagcatcattataatacaacacactactcatatctataatccccaaaagaatttgtcagtataagaaatagctttagtcttcttaaactatatagactaattagaacatttttgttttccttacttcatattgctttttttaacatggttatgatattctcttgtaaggctatgaatcatttcactgggaaaagtaaggcacaccaataaatgaaattttgttccaacaagtagaaacatagcagtaatgaagaagagattatgatgctttagcgataccacaagccaaattcaccataagctattgacaggtagcgaaaagtcaaattacaaaaggaataaagtagacatgaaatgaaaccaacaatcttaagcccacatatgaattcaaaagagaggttaagaaagaagagaatctgacatcatgggcagagtaggagctgaagaagatgggtttctgcaaatttgaagcttttaatcgcatatcgctgagtaatcatcacaaacagttttgaattgaagaagacgggaggagaaaagccattgttaatgagatacccaaatcgtaaaatttcagaaagcccagcccaacatagcccaatacagcccaaatatgtatgtgattgggtaacgaaaacgagaccgttcttttttcagtcatctctcgtttcacagtagcgcgtatgtacgctttgaatttacaaaaagtagacatttttatgaatttttgccggttgagtaaaaaggtaaaaaaaaatagttcccaccaaagcaaaatatttcaatttttatcttttttttttggttcttgggaaaataagagattgagaaagaataaagaagagaaactcacaacttttttagttttaggagaagagggctttggtctggagtcactatcatattcaatgctttaccaaactcacctcttcttctaaattctcaccactcttcttcttcttctcattcaccgacatatctcctctcttcactctctgtctcttctcatctcaggtaattccaattttagttttttttgaaggttacttactcgtcacattgtttgaaaaagattgaatttttatctgtggcttagtcaaatcatggttcgtttcaccaagttgtggttctgggttttcgtgatttttcttttgggtttttctgtttgaatttggaaaaataaaggaacgttttttttttcggggggagttttttttttaaagataatttttggagagtttttgataattctgaggaagccaaaagaaaagaagaaaacctaatttgtgttggtggggtttgataggaaataatg

SEQ ID NO: 24754 - DNA, 3003 bp, Unknown; identical to SEQ ID NO: 24753
  misc_feature (1)..( 3003): 2750-1469P.txt file - cDNA_ID_2184864; gDNA_ID_2213671; Annot_ID_182297

SEQ ID NO: 24755 - DNA, 3000 bp, Unknown; identical to SEQ ID NO: 9713
  misc_feature (1)..( 3000): 2750-1469P.txt file - cDNA_ID_2185251; gDNA_ID_1972174; Annot_ID_179957

SEQ ID NO: 24756 - DNA, 3003 bp, Unknown
  misc_feature (1)..( 3003): 2750-1469P.txt file - cDNA_ID_2185273; gDNA_ID_1972172; Annot_ID_179858
acgtgcatcatcattcgtctgatggtaaattccacaatgggaaaagagtttatactgattactctatcattggtaagtgtccaataatattgttgctcatcttagtcttatgtcgaccgttgtttgatcagaaaatgacaatggttttttaggtattccgggggatggcagatgtttgtttcgttctgtagctcacggattctgcttacgctctgggaaactagctccaggcgagaagatgcagagagaactcgctgacgaattacgtaccagggtaagtatctatggttaagagtttttatctgtcatactttgccaccaaagatcaaagtaactgttgaattggattcatatggcatcgttagtactttttctctctgcttcagcaaagcctaggtcttaatttcatctatcaaagttcctatctatgtgttatctttgaatgtgataggttgctgatgagtttatccaaagaagacaggaaacagaatggtgagtttttcatgctttcagaccaattttcaacttcattcactggctatggactactcttaaacttatacatcacatttgttgatctcttattaattacgaactactagcagctttttctttgcatctactcattctgatgattctcatcaggttcgtggaaggagatttcgacacctacgtcagacaaattcgggatccacacgtgtggggaggtgaacctgaactcttcatggcttcacacgttctccagtaaataacctcatcctctctgttctttttggttccttaacgttcatgatttcagtttctcatacacaatctagattgaaatctaacaaactccgaaattgtgatcataggatgccaatcacagtgtatatgaaagacgataaagctggaggactgataagtattgcagaatatggtcaagaatacggtaaagacgacccaatccgagtcctataccatggttttggtcattacgatgcccttttgcttcacgagagtaaagcttcgattccaaaatctaaactttagtatacttagttttgcatctttgacttttgtcaggtgttgatgatgtttttgtttactgacacaaccactatctgtatgccttgtagaatgtaacctttttttaccttttactttgaataaaaattttcagtttcaaatgatatgctcgcttcaaaatcttagcttctggatagatacaaagcttattgtagatactcgaaaagagtatatgtggtcagtgtgatatcaggccattgtggttgaaaagttgaataatgatttaaaatggtcccaaacgtgacaaaagttagttctacttcatagaattgagtggattacacactagagacattgtagctaagaaaagtgtaaaaatgtcggactagagaactattggtcacccttgaagtcgttgacgacatcgtatgggatgggagtgatagtctccaaggtcataccttcgaccatgaatcctagtttgggtcctttaggctacctctttgtgctaatggtttctcctctggctttggatgcagccttgagctcatcatttttcttcttcctcagcttgaactccacagcacatcttgactgctgcacatgctccacaagaacatggatcctcttccttatgatcttatcgccaatctgataaacccacctcaagcaaaaactcaaaaatcagtgtagagcagatattgtcatagcttctatagagacaaagaaagaagagtaactaaatctaaactgtgaaagtacaaggttagtgtatttgttctttgatgattataggttgctaatcacagtatatatgaagcacaagaaagttagtatatatcgcaagttagggtgaaaagtaaaggagatcagattaaagtcctatatcccatggttttggtcactacactgcctttttgattcatgttaagcaaaacttcaatccaaaagtaaaggatggatatgcttgttttgaaccggtatgaatgccatccggtacggttgttgttggggacataagtgggatattcacatgcatctttgtaattggtgactttttgtcaggtggtgatatattttttttttttttatgtttctgacacagccaccacaatctatagtatgtcttataaaatgttacctttcaagtaccatataccctttaatttgaataaaatttcaaataatttggtcgtttcaaaatcatagcttgtgtgccacacattgtcaaaatcgtgataatacaaactacaaagttcataatatttgtgggcactcaaaagatatggtcagtgtgatataagtagtgttgttggtcaggccactgtgcttgaaatgaaatgatttttttttttaactgaaaaatgaaaaaaactaaaaacaatacttcaaagatgttctgtttgctgatcaagccaagtaatgttcaccagctaagtttagtaattagtgttgtttaggttcatgtctcctactacaaatgcaaattcaaaatcttgtcgtcagactcggtttccaagtaataaaaagcctaactcgtgctcattttccaacaaaaaccaaaaccaataatcatctacatcaccatcttaacaccaacaaaatttagaattttttaaacaaacaattaaaaagcacagagcaacacacctgcatcagtcaataactaaaaactttggatttatcaatcaaaataactaaactgtcacagagcaacaacacattattttattagtatttcaaatttatatccattaccaaatacatcttccaacactttttaagctcccacaagaattcaaaaaactttcctatgtctacattacaaccacgttgctactttggaaccccatcaccctaattcctctctttcgtcttcttcttccctcgtctctctctctccgcaactcctcgttgcatcactttacattgaaacataatctgtagatattaaacaaagtcttttgcaagattctgattctctagacaaatatg

SEQ ID NO: 24757 - DNA, 3003 bp, Unknown
  misc_feature (1)..( 3003): 2750-1469P.txt file - cDNA_ID_2185338; gDNA_ID_1972172; Annot_ID_179879
ttcaacagaaacaacaaagaaactctaatttgagtctgcttataaatccataattctcatccttggaaaaagtaaatttaccgagtttaggagtttgatgtttgctgttgcctttgtgttattatctttaatgaatatttccatattggatagactcaccaatgtcgaagggaacctcctgccacaataccaaacagatgtaggaatgcttaaaaactctctagatataaaacgaatgtttatttgattatcgatgagcaagaacactgactcgaacataacccgaacagcaagagaaccaggagtgttgactccaaaccactcaaaactccatctaccttcaagataaggagacctgacaaagctagctattaggaagcatcaaataacaccttaaagcttaaaactttgaagctcaaaatcgagcaacatacgtggttggtctaggagttggattaagccgctcaagattcgttatcctttcattgacatcaatcttttgcatatcagtgatcttccctgtaactagagcctcaaatcctccagcatcattgaactgtaatctcaaatggtttcagaactccaacagagagcaatcaaattattcactaagcaatctaatgatgatttccaaaaccagatactaaattcaacctaatttctaaccaatcacagttgaaagtttcaatttttaagaatttttcgaagacttacggcgagaataagcgattccttagcagagagacgctccatttctctggcgtaaactgaaggaatcccttgaaccgagtcttgaaccatagctctgcatatcattctccggtaacaactcttcttctccgactgaaaattgagagaaacccttgacagtggaggagaagacgacggtggtgatacagaggatgagaagctcaatcgaaccgcagaggtcccagaaaccgaaccatgttggatcaatgccattgaataagggggaaaaggtcaaagattggctttttattagtctgaggaatgagtaggtagaagaagacgagagcagcagcagcagaagaacccaactaaatttatcagttttaatttaaattctgaatttgcataaataaagataataatatctgaaaaaaaaatcttgtaacaaaataatattagaacatacaataaaggtctaataaaatttttgggaaatggttttaaatgtaaaatgcaacaaaatattaattttttactagaatactaaaagaacattcatgatataaaacaggcaaacaactatacgaaatttacctccacaatatgattttgtgcatttatttccctatgacactcaaaagatattagatccaatagaaaacaataaatatgaatgaagaacatttagatttcacataaagaaagtctaaactctaaactatgaagaaggagaagtagagaaaaggaaaaaataatgttggcattattagtggttaaacataatcgtaattaatgatactccgcgtgcttcatatcgaattaatagaggttttaacatatatttatttccattagctcgttttcttggtccaaaaaaggaaagactcgagcttattaaaggactttagacattgcagtgaatcttctttttccttgtctcatcacttggaatccgagtatattaggtgagacttgtttatgtgaaaccctaattaagttaatattttcttcaagttttctcggtatatatagagattaaactcaagatcggtttcctgtttttgtaggttattatatattttctctgaagaatatgatgaagtcttgttcctcaccgaagatgatgatgatgaaatccgtgaccgcttgtctaattttaacacttttgatcatgtccgtcgccgcaaaaggcggtggtggtggcggtcatggtggtggaggtcacggtcgtggtggtcacggtcgtggcggtggtggtatttttttctttggcggtggctctcatcatcgcaacagcgcttccgttgacggttcaaacatgggtctaacggtgacatgcttggtgtcttctcttctgttcatgttgttccaaagattctgaaccttttagaatgtgaagaacttatcatatttctagctttgtttttaatagcttttcataagataaatatagacactttcgagttcttcttctttttttgcgtgtaagtcacgacaccaatcataaccaaattttttatattagcttgtgttccgatgatattttggatctcgtgttcgttttatttgaaacaagagtttgcttcaatattgtgcacgtctaacacaccgtgtaatataattagtggaggaatctcgaaacaggaaggtgaaaaaggctagtcaagcttgacttatgtaagttcatcacagtaacagtttcttctcctctttacatggcgtagaaactttcttttgtgtgaactatcgactgtccacatttactgtaattatctttcactattcacatccattcacatatacatcacaatgatcacatcatcatccctactcaacattaggttcacaaatcacaattacattcgactacacaccaaacaaaattacagctctatgtattattggcttaaaaaactctctacgtaatttttgtttgttttggttttaatgttaagctcgaaaaagtctctacttaattcaaagactttcttaaattttaacaatgaacttaacgatcccttccgatacaagcaagcaaacatcaatcactctctcgaatggtgttttactcgtcgtcatacaaaaacagcgaaatatcgcattgtcaaagttaagagggcttgcttttgtgacaccaaaaacaaaaaacaaaaagcgatgggtaagtacgttgggctttaaagataatgttgggctttattattgaggctcgaattgggctttcttctctgttttgcatttgttgcgttcgacctctgcttgaaatgctggtttggcaacattccggttagatctcttcggccgccggagatg

SEQ ID NO: 24758 - DNA, 3003 bp, Unknown
  misc_feature (1)..( 3003): 2750-1469P.txt file - cDNA_ID_2185351; gDNA_ID_1972172; Annot_ID_179885
taggagtaaattatctgacaagagaatacaaagggcaatttcattttagttgaattagggatttgggctcgtcatggctcctggaggcagtgctttgaaagaagtcatggaatctaattcaacgggaatggattacgaggttaaaacggcaaaagtggaagttaataataacaaacctacaaagccagggagtgcagggattggaaaatatgggatccattcgaacaatggtgtttacgagcttcttgaatgtcccgtctgtacaaatttaatgtaccctccaattcatcaggtcagtagtatatgagcttgaacagatttgtaattgactaattgcaatgtttcatgttctaaatgttatttaattctacagtgtccgaatggccacacattatgttcaaactgcaaactgagagtgcagaacacatgccctacatgtcgctacgagcttggtaacataagatgcttagctcttgagaaagttgcagagtctttggaagttccatgccggtaccaaaatttggggtgtcatgacattttcccttactacagcaagcttaagcacgagcagcattgcaggtttaggccttacacttgcccttatgctggttctgagtgttcggttacaggtgatatccctacacttgtcgttcatctcaaagatgatcataaagtcgatatgcatgacggatgcaccttcaaccaccgttatgtaaagtcaaatccacatgaggtcgaaaatgctacatggatgcttacggtaaaactttctttcgatatgttttcttctttttatcaaaggtttctaatttaaagtctgattcaggttatttcttcagatgaaatttttatgcaggttgtgattttatatcatcatatgactaagcttttacattcaccttctttcgctgttatcctcaaccatgaaatattcctggctttagctcttttctacaaaatacagattggattctttagaaggaactataggaatctctggctctgctcttttatgctatttttggatttctattttgcctattaaattttgaccttgaacaatccggtgccaaactcccttactagctgctattccggttcccgctttgctcttctttgttagtccaattttacggtctccttaagtacctaccatagggtctcttagtcccactttaatcctcacacttaaacttgaatctcagttactaaaattttgtttccaggtgttcaactgttttgggagacagttctgtttacacttcgaggcgttccagctgggaatggctccagtgtacatggcattccttcgttttatgggagatgagaacgaggcgaagaagttcagttacagcttggaagtaggagctcatggacggaaattaacatggcaagggatccctagaagcatccgtgacagtcacaggaaagtccgggacagtcaagacggactcatcatcccaaggaacctcgcactctacttctctggaggtgataggcaagaactcaagttgagagtgactggacgaatctggaaagaggagtaaacgaaaaacgaaaaacgaagaaaagaaggaatcgattgaaaaatgttgtacataagaagaagcctcgtggaagagctaatgatcatatggaagatttgaagtttgttgtctggttttagtgtggtataatggattcttctccaatgggaatgaagatgagatgatgataatgacaaatcttctatgatgaatcagtttggaggagccattgttactattttgtggctgcaagaactatattatctctgtattttttgttttttttgttgggatttcttttgtggtttcagagaatgtaggaaaaagtaagacatggttttggctatgttcttgttgtaaaaccaagttcaaaacagattggtgcactttttatcttttcacaatggtgattttcattcagtttagacttgatatagcaagctcgatgtttaggcattacagcatgatgacaacacgacaacaccttacccacatagacacacttttactcatttgaggaaaggtaactaacaaatatgaaaaccaagcaaaattttctatatctacaacgtaaatatcttttccttttgtttttcgtttttgttgaatcaactcttttttctattgcaaagtttgatattttgattctccatttgttattcacctgttcattctctttttggtgcacgatctcttggctctcagagtttgtagttagtcgtagttgtgcaatcatagtaagtggtctcatcatatcttgttgcagagagaatttagactttgtgttcttcttcttaatgtttttgactttgtgtatgattttgtctggtgtatatatagttactaaaactcgtacgaatagtttctttttcacattgtgtttcttgtatgtcgccatacaaagctagatatctctttccctgcagaataatacagagcacacggagacggagtacatattgttcagcgcaagtgaaacctggatttgaacctgatacataaatttgttatcgtttggtcattttaaccgctccctctaatatttacctcctttttataagttacacatcttttacatatctctctctctctctctctctctctctctctctctctctttctttctagaatatattgacgcagccgcgaatctcatcgtcatcgtcatcgaccaagaggaaccctgatttgcggcttttcttcctttcaatctcaattcgattcgttttctttctgttgaaggatctgaccatccagattttcccgggaaatttcataatcagactcttctctttttatcttcattttatttccagaaatcccgattcatcgcgatcgattgttgattgctgtatttctccgattggatttggtgtttttgtagtccgatttcacggacttgaatccgataggattgttttgtttgttgttgataatgaaaacattggttgatgaatacaagagactgtaaatgatg

SEQ ID NO: 24759 - DNA, 3000 bp, Unknown; identical to SEQ ID NO: 9690
  misc_feature (1)..( 3000): 2750-1469P.txt file - cDNA_ID_2185355; gDNA_ID_1972172; Annot_ID_179886

SEQ ID NO: 24760 - DNA, 3003 bp, Unknown
  misc_feature (1)..( 3003): 2750-1469P.txt file - cDNA_ID_2185379; gDNA_ID_1972173; Annot_ID_179907
ttcaacaatcgagattgcaaaactttctctccgtttagagttacagagcctctcaagcttccctcagcaactctccccgctagtgcatcgatcaacgttgattttcctgctccacttgcaccgagaacggcgaggatatcgccgtcagaagcctctccggaaacatcatcgagtagagtctttactccgttttgccgtgagaagccaaaccgccggcgaagtgtgacatcgtattgaagattgttaaagtttaagacgtacgggacaggttttacgtacaaggcttcgacatctattatgtgatgtgcaggatcgtcgctttttacgccgtcgccggaatctccttttcggaaactgtcgcagtctttcagcaactcgtcgagggttggtgatccgatgggagtgatatactgagtttccgccgaaacacgtgtcatggcaatctttctaccgctgagtgatagattcatcggacggcgtcgtttagagttttggcttaagaaatcatcaaactgattgtgaagtatatatggtggaatctgaaagttcttagtagtgatattttttatgatgggacgtatagtttcatacgttggttatttataagaaaaatgtaacatgtgttgtaacttctgtaactaaaaaaaaatattagatagaaatttaacgttcgtgtgggtcgtggctagtaataagagtgaacaataattcagaagtttcgttttcgacattaaatgtatgtaaaaagcaaaatactgtgaattacgtggtcattaaattcttgataagtcttaaaagaaaattcaaaattgtatacagtactttgattttggcttctgctctgcaccacgagtcgcatttaaatttgacatatgtgtctcatcaaccaaatttgaagaatgtgttcttgtacatacagcagagaacgtttgttcatagtaaccataacacattctttggttttaatatcatccaaaacagttttctactcctaatcaccaaatcaaatattaacaccgacacgcaaaatgatacaaaatatgtatctccctttattaatatatgtcgaatcaattgatgaaataatccaaaaaaggaaccatgctgaacctagtgaggaatgcgttgacaaatatgcatgtatacagtagatgtggatgtcaaaactactaagagaacgactctctcttcaatgtggctccacaaaacggttggtaatttgggatggccgtagtttccattaattggttaaactccaatttcccaattttgttggattcatgattaatctatcttcgtagaatattggataaattgtgatatcagagattcagtatataactaataataggttagaaattaattcacaaaaaacaactttttcaagtcaactatagtttataaacaaaacaaataaagagagttaactaaaatttgtgtgaagcatgaaggagcccacgaaattatctcaaagtgtgtggctcgtaggatttgacaaccaccatcatcatcgccatcccttactgattacggtacatgatttcatttaatgttaatttcttaattttcttttatttcatgaagtttcattttcgacataaatgtatatttaggaaataaaaaatcgtgattttcgtgattgttttttttttgaatccgtgataaaggcaatttggcttcgtcaactcgatggccatttcattattatccattatcaaagctaagatagttaccaaattttgtttaaagccttgtttcgatgtatatataaaacatgttctctctcgttagtaaccaatcagtttcaaagcataacatgtaaaattaatacttttcttttctttgtcggccacaaacacattcctttgttttggaattatggttcgagtatacacaatcgctaattcaacagttctactcctaagaaacaattcaagttttaacatcaatacacaaagccaaagggaaattccattttttatatacatgttggatgaatgattgacgaaaatatcgaatcgagtcaaacgatcgacaatgaaatgataaacatgtaggaaaggaaccgattgagatatgaaattcgagagattactaaaaataggaggaggaagccggtcctaacatttatgtggcctaaagcatattttaaaaaattatatataaaaaaaacattatgaaaaacaactaaaaatcatctattgttactcgaacatgggggagattgaagatttactaatggagtttagtacaatttcaaaggagacgttaatggctaagttttgtttgaaattgactattggatgacgactattggatgatgtaacccatacaccaaatttgtactagttacttcaaagctgctgtgacatctaccaaattgtgtttaacgcgatgtttctatatcaaacatgtcactcgtaagtcccaagtactctaataagtagtctaagtttaaaaccttatcgcctataacaagacatgtaaattagtactatcatttatttttggtcggcatggttgttacggcaataaatacattttactctgttgtttctgaattatgacagtaccggtattgagattttgggggtcccaaatatgaaaaacagtcaatatttttctacaaatataataaaatttgaattttaatatttcaaccaattattgagagaccgttaaacttacaaaagataccgtcaatggtaaacgagagattactaaaaataggagaaataagtgcaatttcaaaggagacgttaatggcaagtttttctcttccaaaattgactagtcgatgatgttaattgttaatgttgtccacgtgactcatacataaaccaaatactgtatgtactaaataatctacccggtccaaaccggtttggtaaactgaatcaccgatctagagaatcaaccttacttgtgcctttctcgctcaagtagagaagctcgacggtaaacagaaacacttgatacgacgtcgcataacaacgaacgatg

SEQ ID NO: 24761 - DNA, 3000 bp, Unknown; identical to SEQ ID NO: 9707
  misc_feature (1)..( 3000): 2750-1469P.txt file - cDNA_ID_2185411; gDNA_ID_1972173; Annot_ID_179916

SEQ ID NO: 24762 - DNA, 3003 bp, Unknown
  misc_feature (1)..( 3003): 2750-1469P.txt file - cDNA_ID_2185436; gDNA_ID_1972173; Annot_ID_179925
cgaatgaccggtttttaccaaattctcatagaccatatttgattcttttgatttacttctggtgcaggactctctgtgcttatggaagttgatgttgggggaaacaactctcttgtacagtggggaaaaaacttcttcttcttctttctatcacatgaaaatcctcaagggccattattagtatgatcagattataaaattgtaaggttaggggctttatgaggattttgatggacttgttacaatgtttacatatacactcagcagcacaatagatttttgttaaacttacatgttattcaagtaaaagtactatgtagatgttgaagtctaattgaagaattagttaatgatagtcttaaacacttgattcacttgtcatccaattttggttttgcgcatagtttctcttcttttatttcctctctaaaacaccaaaaccaaacaaaatgtcattttccaatccttaaggtttcattcattttagtgattttttgggtacaaaattgagcaatgtctagtgacgtttttactcaaactcataaaccaacattctaatcagaatcacgatttggactttggtttgggaccttctttctacaccaactgggcttgtaatcagttggtagagaaagcccaattatatattatttaaggcccaaaataaatcgatctagggtttacggttttgtttcattttcacttcccttagaataaataaaaaccaccaagcaacttggatctactctagggtttctgtttcgccgctcaggttcgtcaatctctcgatatcctttctctaccttctcctcagctttctgagtattgaatgttgttgttaactgtctctgaatacgattgattttgtgtcatttttctcgtgcttcgtatttgttgattgattgatttacatgtcatgatttgaaatctttgtattgctaattgctattgctctgtttactgattttcttttctggggttatcaggtttcgtgaaaagaatctatcttgagcaatgtctccagctaaaggtacgcctttttttctttcattgttatctgatttgattctacatcgtcttctatttctcttttgcgtgtaattactttgtttatcattattcaatactgtgactgaacttactactgtatacagctttctgaaatgtatgattcttatctggctctgtaaagttcgtattttttatattctcttgctcgtacctactctgttatggattcatctgattatgtgcttgtttgtctgttatttgccaatgatcaaactttccttgaatgagatttgttaccagtagtgtaaatggtttaatgttccattatttttgcagttgatgtcaccaagaaagccgaccctaaggctaaggctttgaaagctgcgaaagcagtgaaatctggccaaatcgttaaaaagcctgcgaagaagatcaggacaaaggttactttccacaggccaaagacattgaccgttcctagaaagcctaagtacccaaagatcagtgctactccaaggaacaaattggatcattaccagatcctcaagtaccctctcactactgaatctgccatgaaaaagattgaagacaacaacaccttagtcttcattgttgacatccgtgctgacaagaaaaagatcaaagatgctgtcaagaagatgtatgacattcagaccaagaaagtcaacaccctcattaggtaaacactaaaacttcactgagatatgggtttatgtaaacatggagtgatgagtgtatgtttgtatgcaggcccgatggaacaaagaaggcgtatgtgaggttgactcctgattatgatgctttggatgtggctaacaaaatcgggatcatctaatctgatcattgtcgctctgtgattttactttttctggtttttctcttccatagtctcagttttgctagagaagttaagatattactatcaccatctctttgttatgcttttatctttggattcaaaaagattatatgtttggtatttgttgatgcgtcatagtttctattcagatcgtgttccaattcttaatgctacctctctaatcccggtttaacctggttatatcgtaccttcgtaaataactaataagtaatacccaacccaaaattcaagtggtccattggacccatctctttgtttagatgctttcaaagtacagaacaagttcactgtggtctgtggagcccaatctaatcaacaaaacaatcgatccgcgagaaactcgtggttgtaaaaaacttttactaaatgaattattgttgcttgttgccggaaaacgacagaaaacgtcggtatcattgaactaacgtcggtattattgaaccattgattgatagttggaaaaaaaagaaaaaaaaaagaaatcatatattccttttgttcctttttgtttgattttctaaaaaaagatatatatattaaaaaaatatattaaagttgattttaaatgtattattttttttgtgttttacaattttctataattttaaaccaataatattcaattatttttattaaagtttataatttatcagtaataactaataaatattgtataaaaaaatctaaaaaatcaatcttcttgaaacaaatatttttcttagaaaatcaaataaaaaagaacagatggagtatctatatattaataaagataacaataaataaaatcatcaaacctaaattgtttcccacgaatcagtttcgagacattggcacgttaaattgtcgatctggtaatgaagtaggctttacatgtagtagactaaagtgttaattaggacctagaccctacagatttgggcataaaccgtcctttgttatgggacgtgttctacttggtatctctagaaccgcggtctttggcagatggatcagattatatctttttgacacttgtatttatatatgttatatgttattggcttctccttccccattggccatcgaacacaccacacagagaaaacaatatg

SEQ ID NO: 24763 - DNA, 3003 bp, Unknown
  misc_feature (1)..( 3003): 2750-1469P.txt file - cDNA_ID_2185443; gDNA_ID_1972173; Annot_ID_179927
tttgtattttgttttttttttgggggagaaaagcaggtgttgaagctattggagccatggtgtgaacttaaagacaaagtggttcttgtgacaggagcttcctctggtattggaagagagatctgtcttgatcttgccaaagctggttgccaggttattgcagcagctcgtcgtgttgatcgactcaactctctctgctctgaaatcaacagcttcagttcaactggaatccaagccgcagctcttgagttagacgtttcatcagacgcagccaccattcaaaaagcggtcagggaagcttgggacatctttggaaagatcgatgcattgatcaacaatgctggaatcagaggcaatgtcaagtcgagtttggatttgtcagaggacgaatgggacaacgtcttcaagaccaacttaaagggtccttggttagtatccaaacatgtttgtatgttaatgcgtgacgctaaacgaggtggctcggtgataaacatctcatcgatcgccgggatccggggtatgttgcccggtggacttgcttatgcttgttccaaaggcggtgttgacaccatgtcaaggatgatggcacttgagttaggtgttcataagatcagagtgaactcgatcgcaccggggcttttcaagtcagagatcacacaaggtcttatgcaaaaggagtggctcaagaatgttaccgagaggactgtgccgttaaaggtgcaacagaccgttgatccagggcttacttctctggttcgctatctcattcatgactcttctcaatatatatccgggaatacatacattgttgattccggtgctacattgcccggtgtgcctatcttttcatctctctgaaaatcgaaccttataatatcttatcttgtgcaataataagtgaatacatttactcattctctactactttttaagatttacatacatcgtcaaaaatttgcaataacaaaccagcagagacacaaaaagaaaggacagaaaaataaacagcctcctgattgtgatgctttggttgtggctaacaaaatcgggatcatctaatttgatcatgcgtcactcggtgatttcacttttgggattgaaacagacttctggtttttctccttccatagtcttcagttttgctagagactatcatctctttgttatgctctatctttgaatttcttgaagtcaaacaagacagctctatcggatgtactatggaatgtacgaccagagtccataacccattctttgcatgtgctttgagtgctcacagttaacaccaaaggttgcggaggctcagttgcaatattagccaattctgcatgtttctttctttgagggcattcccttttccagtgatcttcctttccacagataaaacaacttgtgttgttacttggccttgactggaatttcccatttccacttgaacttcctgtacatggccttttatttcccttattgtttgatctgcccttaaaatcacccaataatgcttctgaatctggttttgacacgttcagcaatcccttttctttcaactcaatttctttagagtatgctgaacttatgactgcatttagtgtcagggtatccttcccactcccatacttgagtgtatcaactagtgaatcatattgtggtggtaagccagccatgaattgtagagcctggtcttcatcactagtgttgatgtctaaacttgctagatctgcaactagcttgagagaagtatccagattttcttcaatgcttttgttctccaccatcttgaagcttgtgaacttgtgcttcaaatagatcatgttggctaaggtctttgtctggtagtttccttcataaccttccttagaatcagatcgcttagactcatgcttatcagactcttagctattttatctttctctgctttctttggatctaccctaggttcgcatccttcctcttgacttcccgggtctgatggtgtagcatcttcaaccaagacagattctaagcctagaatctccaactgacatagcatcttatgcttccacaacccaaagtctcctttgccatcaaacttctcaatatctcaaatcttgcatttgttggttccatagctagatgtcttccttacaatcaaacctggattgctctgataccacttgtagagaaaactgagaataataatagcttgtaaaagaaacaaacacaagaatttgataaccgagttcacggctaaccgctacgtctcggggaaggactcttatttccaagcttcactatatgatcatagaggttacacacaccactaacttgtgatgtccttggttctttttcagattttacacacaagaagaacaagattcaagaacaacaaagaggaagaagaaagcttgcttcggaagctctttatctatcttctcttgaactctctttagcttgtcttgtcacacaactaccaccacctctctttgtacgttgtaatagaaatgttatataggtgatatgtgatggaccacttttgttattctctcttcatgccattttcgtcaggcccactaaggcccaaaggatgtgtttagtcaaacccaaataacaaacttggtccccaaacaaaagaaaaaataattatatacagtatttgtttagattcttcacaagtactaaagtaaagaatcaataaaccaatcaatccgcgagaaactcatggttatataatatttttgcttgaagtattcatagttgtcaaaagaataaaagtaaataaataatactaaggataacaataaataaaaattatcaaacctaaagaatcagcggagacattggcacgttaaattgtctatttggtgatgaagaagagtgttgactaggatagaagaacctacgggttgggcataaacccgccctttgttatgtattatatatctaagttctatttgtacatcttagttattttatgggcttcttcttctcctccatcgagcacacacatagaaaacaaacaatatg

SEQ ID NO: 24764 - DNA, 3003 bp, Unknown
  misc_feature (1)..( 3003): 2750-1469P.txt file - cDNA_ID_2185478; gDNA_ID_1972177; Annot_ID_180042
gtacaagtgtcaacaccagatctagcgtaaaacacttaagctagtacttaaatagattatgcctattttttcgaccattatatattaaactttccagcctttcgtgaaaaaatgcgcatgttcttgttggaatctaggaatcttcttctactaaagattggcatgcacgtggtaacgatttccattgtatactatctcgatattttcccaccttaaatatcttgaaaattaagatcaaattatatgagaacatatattgtatcattgtttgtaatagccttatatagtgtgtagatgtgaactatggatacaaaaaacaataggaaagaaaaagctgcagagaaggtgttgctttacaactatgaatatgggctcatgagatgtacactacagataagcgaagattcctgttgcatgaaaatgtgttactaataaaaaaaacacatgcacatttctataaagacgaatttcttttaaataataaatttctataacaaataaagataagtgctcctttaaaaacatgcaaaagaatatatagatttaccgtatcagattttcatacaatttttatattttttgagcttgaaagattaacatgacaaactgtatcgtgtgtcctcgtctattcacccctagaagaagtgaaacatggaactttatgtatttgcatacggcgagctagcttcttccctacttgtccaatagatgaagacattatcactcaggttcagctacttcgaagcgcaacatatcgacaaaaaatcgttttagctctatcatctgtcttttgaagaaaaatatcaacatatcaaatacatatacacactccccacaaatatataaccacaatatatattggttactacgaaattccaatgatattgctctttgaaacaactaaactgtgaattacaagctaaggcaatatatctattatattctttctttgtgtctcaacttcatccctttctaagtaattcaaattaattggaagttttgtcatctaaattgaagttcttcttaccggatcattttgtctcaggttgatatatactttcttagtctgatacgaaaaacttataaatataatgattagagagagacatgtttgatgttatatttttctggtaaaaaacatcttgattatgaactatatagttagggatatgtttgatgttgtgtgtcgacatagtgaggtccattaaaaagaaggtctgattaaattttacgtttggaccacaaatctttcttttagaaatcgcggactgggacaccttcctacaacatgtccgtctttactaatcttacgtacccctcacattcgtaaccataaaatcatcaaatataatatagagactggtgatcataattcgaaatatttttcactaattcaatgttatcggtaagttatattaggggtataacatcaagaatcacgaaagaattaaaaacaaccttgtcgaatcatgatttgattttttggcttatactttctaatttttatatcttgtgctgcaaattagcaccaaaatatatatattcttcttcttcaacatcgaattctttattttgttaaaggcatttttttcttaacagaggaattttacatcattcttagactgaactttcgggataaaaaatctcgccatgcaaaggtaatttattttttcatgacaaaagccacaatggcgataattataactataatactatgcaaaacgaaactttacttgggtcataccgaggaaaacaaaggtacactcgattgtgacaactccaccaaagaccaccccactaccaattcacctttatttgtttctttattcactcaaaatctttttaatttttttaattaattcaattattcgcttctctcgttgttttttaaccttttaattaaaaattgaaaggaggtgcctagggtttctctctctgcatggccactctcgctcttcacatctttttttgggcaccattgttaacgtatgcaaaaaaaaaaaaaaaaaaaaaaaaaacttacatgctaagaaaactctctttccttgtcgtttctctcataaaagaaatttatttaaacttattttagtccaaaatttatcgttgctgatgaaaaatacaatataggaagtgggatcggatcggacaaggagtgaattatctaccaacttagatttcactcgtcttttgattgacaagtaacatacacaataaacacatatgcataattatttccatcttcaaccaaatgttgtagtgaagtaatttgatctatgttatacggacatctatctactaaatttttgaaaaaaaaaaaaaaaactatctattacatgctccaaattattacttgcttatgtaatttatgcgtatattagagatgttggtgtttttctgaaatttgatatatgttcttttatctctgaaatatgatatgtgaatcatcatagcattttcagtggttacaaccttatcgaatcgacaaaagattgaaacaaattggaaaaaaataaaatagttttactattttctaagcagcgtgaaatgaatatcagtataatatatgaaacaaattcgtacgtgataaatatgtatacagtgatacaaccaagaacgatgacgtatatgattgacttgcaaaaataagcaaacaaaatacctgttcaaatcgacacttaattccaaaaaggttagtaataagtaagaaggcttttatttatgaaaacaaaaagaaataaagagcctaagagaatgatgaaaattgaaagagaaaaaagagcattgttatagaaaagaaaaaaaagagagagtaaagagaattaagaaacacaataaattaaacaaaggaaacttcatttcttctctttatcccattcagctcctcccttctctctctctctctctctctctctctctagatcaattctttcttctatgatgtgattatccaccatatctgcgacctcttacctaaaaaggatacaagtaagagattcaaagatg

SEQ ID NO: 24765 - DNA, 3003 bp, Unknown
  misc_feature (1)..( 3003): 2750-1469P.txt file - cDNA_ID_2185490; gDNA_ID_1972177; Annot_ID_180047
agctgtttcttctaaaagagaatggtttggtattgaggggagtgttaaaaggctttaaaaaagagagggcgttatgaagcgaagtgtttatcctcgccgccattgatgaaagaggacatccaccggagaagaagcagaggaaggaaatgaagaaagggactgctaaaatttggagcgcaatttaggtcatggttcggttttatcggtcagcgaagcgagttatccggtataccaaggaaaatataactaataaagtcaaatttttaaatttttttatctatttcttgcagagcattgagaatatgttaatccaattgacgcccactcttccggttaagagagccgtggttgatttttactctccaacattgcaaaataattacatgttggtcatctaagatcacctatcaactaagtaccaacagcccatacgtcaagtgcttcgttcgtgataccatgagaaatggactctagtgacatgatcaagttttatcataagtggcgatttacagggctccaccagctagttttattaatccgtttggattttctaaagtcgctgagttttgcctctaatccttcatagctatgaaagagtaaaatattaccgctgtgaaggtccactgaacaaagttacctcgatgtacatattgaagcccttgaaggatcatcagtgtgaaacggcgaataaagtgtatgggaagagttcctgcagtagcatactccataaagtgtatggaaatgcttttttatctcatggaaaagggttcctgcagtagcatactccataaggaaaccataggttgtcggagtaagcttatgtatgcactttcccgtgcattgaacaattacagttgaaccttggaacactgagattagataaaattcttgtctcgcctcagactcggatttacaactcttatagacataatacaccacattgccatccggtgtataaattgcagtagctccaccttagcagaatccgcctcagacgttaatatcttcttcattgtcctagggagtaactctagatctatttgatcacacaaaatctcttctgctcctacttttggtcttgctaaagccatctgtttcatctctttcacaaagtctgcataactatgagtagggctggacacaagacaagtacttgcaaaattgaagatatttgtgacccgacttgccttatacaagtaattggatttttggcttgttttgtcaaaacgagtacttggtcaagaaaattgatttcaccgctgattaagtcttacggaatcaagaaaattttgttgaatcattaaatttattttgcttccaagccattgtttcatttcttttattaatttgtgtgaaattttattaatttgtcttctgctctagccctctctttcacgtatataacatacatagattaaactcatccattttaacatgtatccaagtccaattttctcggtggtcaaagtggcgttcttcgtacaaattatcgataaattttatagagaaattttacaaattatgtaatttcttacaaaaatttgatctaaaaagtagttttttctttataatcaataatgtttatgaaaccaattatacgtagaaacaaatattttgttttaaaaaaaaaaagaaaatcgacatagtaaaagtattagaattgaactttataaagaattaatacaaattgaaaaaaaatagtagaattatatttcactaaatatttcaaatttcatatttatatattaatttataaagattttactgtatttttttgataacatttacagcaaatccaataagtccattgaaaaatattcagaaaatcactaaaacattctatttctcgtcttaaagttgtcaaagattaatttttgtttgtataaaaaaaagctcacttctgttactaacttgttggaccttttattaatttgtcttgtgatttagtttagacccctctttcacgtatataattttgttacatatgaaaaacgagacaaaaaatcatccaatgaaattataacacgtgtagatatttatttcaatctgcttacgaaaaacgccactttgaccaccgagaaaactggacttggacaaaaagacagtctttgttctggaacggcgtttcacacaggtggaggccaccatcaaatatttaattacaaaactataacattatatattccaatttataattttgttactttcttatttgtttcttttttgtttagagaagaaatagtaaacgattgattattcacatcgttgacttgttaatctattttaggactatataaaatcaagagaaaaatattcagcaaatcactaacacattctatttctcgtcttcaagttgtcaaattatggtatttgtttgacatttccaaagaaaaatctacatttcataatttcatatatattaatttccttacacataaacctctaaatattttcatatttacataaatagaacaatattccataataattaatagcgttatcattctagaaaaagggcaaaactttaaaaaccaaccctttcttcctcctcctccgagttcttctttctcttcttcgcctcctcctcctccaaggtaaagtattcagctttttcaaattcagtttcttcacaatcggaaataatgaagctttcttaatccaacattttctctttatccaacaacagatctattttttcctcatcagattcatagatttcgtactgttttttaaatccagattgtgtttaggtcaccgagttgaatcttaggtcgtattgatttgtagattttcctctttcgtactcttgttcttcgttttatccctcagaatatgatttgagaaaaaaaaagatctctttgatacttcatttcagttaggacgacattaacgtgtgtgtgtctgtttgtttgttgtgtgcagtgtagaacgacgattgttgaatgcgttattgtaattgttaagaattgaagttaaagtgttgtttttgaatctggtgaaatg

SEQ ID NO: 24766 - DNA, 3000 bp, Unknown; identical to SEQ ID NO: 9749
  misc_feature (1)..( 3000): 2750-1469P.txt file - cDNA_ID_2185513; gDNA_ID_1972177; Annot_ID_180054

SEQ ID NO: 24767 - DNA, 3003 bp, Unknown
  misc_feature (1)..( 3003): 2750-1469P.txt file - cDNA_ID_2185522; gDNA_ID_1972177; Annot_ID_180058
attataggtatgatatgatatgacacaaattaaagttggtgactattgcataatttgtcgtctaacggatagccaagagagtagtcttttctttcttcatcaaatatgggatatatacaaattaaagctctcgaatatataattctgttaagtgttgtttatttggatattggcttaagataagttgtaggtaaaaagcgccattcgatgagaccaaatagcaaagatgatcactttttagaaaaacgaaaaaggaccaataaaacatgaaaatgtgaaaacccccaaaaagtttttcaaacactcaataattaaatatgaagaaaaaaaagaaaagagagagacagagaagcagaaacggtaagaggagggaccaaaagaaaggaaacgtctgaagaaaaccctaaaccctaaatggtgacgagtgatagagagagagatgaaggagctgtcaaatgtgtcaattccatcgatccacaaaacttaatgcttgtgggctacgcaacgcatctctctgctctcttcgttttttaacactcttgcttgctccattaatttactctatcttcaattcctttctctttttatccctcagatttgcctttttaattaattatggccacagtgagtgttaatgagctttggtatatttggtatcttcgattacgatgtgcaactgtttccctaatctctctccctctctctctctctctctaatattcaagaaaatctcaaccgttgatctctttctctttcttctatttaaacactttaccctttcctactttcttcaccctaaatctcttcctctccttcagatctctttagtctttactattagggttagcatgttgatgacttcagattctgaagttagtggcagtcattgtttgctattgcaacatcttcaagattcagaaatcagattctcttatgggttttcttttgagcctttattttttggtttgagaatcttgatgatgctgcagcggcaattaaatggcttacttatctagggtctttttttccattttcatcatgtggttaatcagaaatccagatcctcatatgtagaatcctccgatatgataacttgaggtgaaacttatttcacaggtatgcatatgattatatatatataagcacacatatatatataatagatttgtgtgtgtataaacatatttgtggacaaaacgatgatgaatgatttgaaaaacgaatatgtatatactactctcaattgattaagtgaacccttgcttatagatctttttttttttaaaaaaactttttgctgcacgatggatagatcctgaaaatttccaaaaaggttttagggttttctttctaacgacaaagtatataagacctgtttctgtagactcaaggtgattcataaatgcataaatttgatttatataataatgactgaaagggtttggaggaattggacatatgtatgaaggagcatgtatatgtctgttgttttatgttcggttacatctggttatgtctcttctctttgtccactggttaatcaaatgactcatcttcatgtgaaaccaaaccccttgtttttcgtgtccatgtttctttatgtatgtgattagatctctatatatgtttctctaatgtagtagatgatgatgtgatgtatgtgacaggtttgtataattcttataagagttctcgactttggatctatacatatatttcgaatttgattcctaaatcggatttgagaagaatctcatttctttttcttgttttttatttcttattgttttgtttagggtcttaaatctgaatctaaatgtagtagtgccaactcgaactatgatctacctgaatctgtatatgaaatcgaaattttacatatgagaaaggtttatatatgagaaagagattagtttgtgtacgttgcttgttgtgcagttgttctctgctgcaaagattcgctcatgtatttgtattaacatttaagatctactaagaatttttaataacatggataccattttattgatggaaaagtccacatctacgtaaaaacaaaactgtgtgtgggtaatcttgattttcaaagatttatacagatgagaattctaattaaatcaaacttgcttcctaattataaacgtttgatctcactgatgtgtgaatttctgatatgtggacttggataaaaattacaacaccaaaaggttttagtttgttttgtcgagcatatgcatgatgagttactccaaacatgaagcaagtgatgaaggtttgagtcatggatccttttttcaatattccaaacaaatgagtttatctacaaataatcatcaatggaatggttggctaagatgtaaaataatactagaaggtcaaaaacttggataaaaattaattcagactacccaaattatagttaggtttgaaaacgcgtttttatccgatatgggtctaacgtcaaaattggggcttaattactaaactaagcaattttgcaagattatcattagtacgagtttttgggccggttatgctgttaaagtttgggtggtctgtgaattcgtttattgtaatttaaagtgtgcgttttaagttgcaaacgtcgaccttagtgatatcgtaagatgtaaagactttcgttgtgaatggtggtatcattatttagacgttgttaaacttttctaaaggtaatgttacgcacatttggaatcttagggatttaatctggtgattggtcgtttaattttatgcttatcccaattaatagcattggacaattaaggcctttgtaaatttgggcctttaattttgggcctcaactatcggtgtatgcacatactactatttttcttaaccctcggtcctccactcctcctaagacacttttgctaatcaaaatagtttttgttgagttcactactttaatctacgaaaatctagtgacccaggggctaggttaaattggagactcgtacgatactcgtgagataattagtaatg

SEQ ID NO: 24768 - DNA, 2083 bp, Unknown; identical to SEQ ID NO: 9755
  misc_feature (1)..( 2083): 2750-1469P.txt file - cDNA_ID_2185570; gDNA_ID_1972178; Annot_ID_180087

SEQ ID NO: 24769 - DNA, 3000 bp, Unknown; identical to SEQ ID NO: 9767
  misc_feature (1)..( 3000): 2750-1469P.txt file - cDNA_ID_2185574; gDNA_ID_1972178; Annot_ID_180088

SEQ ID NO: 24770 - DNA, 3000 bp, Unknown; identical to SEQ ID NO: 9766
  misc_feature (1)..( 3000): 2750-1469P.txt file - cDNA_ID_2185582; gDNA_ID_1972178; Annot_ID_180090

SEQ ID NO: 24771 - DNA, 3003 bp, Unknown
  misc_feature (1)..( 3003): 2750-1469P.txt file - cDNA_ID_2185586; gDNA_ID_1972178; Annot_ID_180091
gatagttaaagagtttaaagaatgccttactcaagtgctcattgctaccgatgtcattgcaagaggttttgaccaacagcgggtaaatattgtcctttgagccttttcctttcttctcgttttacctcaaagatgcttcgtagttaatacctcttgttggttatatacaatacttgcaggtgaatttggttgtcaattataatcttcccactaaatatgaaactggagagccagattatgaggtgtaccttcacagggttgggagagctggccggtttggtcgcaaaggtgagttttgattcttctttttttctttctcaagtgtttccataagttcttatcagtttctgaactatgtatttgtattgtaggagcggttttcaacttgctgcttgatgatggctgggataaagaggtgatggagaagatcgagaagtattttgaagcaaatgttaaggaggtattataagatttctgaaaactgctatatatctttcaagtgtttgttaaaacagtatccaacgattttaaactttgctgcagatcaagtcgtggaactcagaggaagagtataagagtgcattaaaggaagctggcctgctggacgagtgaggaagagagacagcatgtgttcaaaccatcttaaaagactatgtcgtctgttttcttgagattgttttaagaaagaaacttgtatacctctttgaggttttcttgtaatctttttatctgattgctgagagtttcagactttgtagattttttgttaagggaaaaggaaaacattttttatgtcaatgtcaatcactttagtatgaacctaaacagtaaacagcaaagcattttttttacaacaatgggtaagagtcataatacacaaccaaagtctcgaattcaatgtgtaaagctttttaatctcaaatgtttgacgttttagcggcaagatggatcaatgctcgtcgatgataggtagtacgaagcttcttgtatttctgcacaaatgctgctgtatcaatctccttctctaggaacttttcttgcagggcttcggattcttcatccacctgattcatagcctctgcaaaacaagtaaaaggtgtttagaacagtagagaaaatgagacgaggggagaatccattgcaatggtaaattgttaccttgaagtttatgaagaagagaaccaggggagtagaatttgaggatctcttctttttgcctctcaagctcattaagcttttcttgcgcagttgcgagctcagttgtacggataattctgcactgtaaaataagtaaagactggtaaatcagagatatcgaaaaggtataacatggtaaaactgaacaagaaaagttggttcttgatacacacttggtttctgagctccattatctgtggctccttctccaagttgtctcctgttacatttgatcaaatggaaagttctagatttctggattgaactaaagtttcctgtagaattacatgaaccatagagtacttactagctagctgcaatgtttctctacggagctcatctttgatctgacggacagaaacaaatcacgaaaaaattaacgtccagagactataacaaggaaccagaaagctgatgacatgatacaggctttatcaaacaatatcaatgtatagacttgaaagagcactaatgaattatatcaacacagaactaaagaagctacatattcttagagctacagataagaccctcggttatccagaaacaaccgactgttttagagactataacaaagaaccagaaagctctaattactggcaacatgtagaagatgacgccatgataaaggcttcctcaaacaatatcaatgtatatacttgaaagagcaccaatgaataatatcaacacataactaacgaagctccattcttaggactacaattaatagtaatactcttagctatccagaaacaactgactgttttagagacttacattattctggactttgacctggtcaagagagagcagaaattgctgatacgcatctttgtcagagagaagcttcctgagttcatccacgctacagaaaagtatacactattcaaaaagaagacatacaaaaaaaacgcacactcgagagaaggataacaaacaaacaaacaaaaagagcaaaccttttgtctttcaagaagacgataatgccagctgcttcacccggtgatacttgtgctgaaatctgacctgaactttgaggccgggatgagcttggcgagctaactaaagaaggcgagtaccatggcgactgtgaagaagcttcctgaggacgagattgcccttgttgttggtcttttgatccccttcacgtacacaacaaaaaaaagaaacatcatcaactaactatctcagcttccaagttaatataatacatcacctcataaacttgaaaggtgcatttatacagcacatcattgtaaacctaatatcagtaactatgaaccctaaatcagtagctgagcaaaatctacacttgtcaattcacctcaaaaacctcaaatatatcattatagctcaacaaactacacaacaacaagatttccttaatcgctaacagacctaatgtctggatcacgcaatttcatcaataacatatgaatcagatggcaaaaaattcgcaaaatcataccagaaattgaacatcgtttctagaattcgccgactaacgaaaggaattgactttttcttgttctcttgtacttcttcttcctaccagatcgacaaaatttaacaactttacagaaacagagtttacagagtttcaaagaaaattcgatcttctctgtttcgtttcagattttgctacttgcttttaaaaggcccaaatacgaggaggcccatattaagttttgattaacaaaacgtagtcgttttatgcatcgtcgtccttatccacgcgtaacggttcgcgtttctacacagagtcaaatatttctgcacggaagcttcgaaaagaggtcatcaatg

SEQ ID NO: 24772 - DNA, 3000 bp, Unknown; identical to SEQ ID NO: 9762
  misc_feature (1)..( 3000): 2750-1469P.txt file - cDNA_ID_2185598; gDNA_ID_1972178; Annot_ID_180095

SEQ ID NO: 24773 - DNA, 3003 bp, Unknown
  misc_feature (1)..( 3003): 2750-1469P.txt file - cDNA_ID_2185602; gDNA_ID_1972178; Annot_ID_180096
tatagctacgataaagttttagatcacagtttgttttgacccgtctaaagagcctgcgtaagaaaattatattttactttaccaagaaaactttgaattgagttttggttctagacagctgtcccaacctatacgatgaaaacaaatccaaaatatacagacacaatatgtgataatattttctaatacatgtgaaaaatagaccataacatttagactagtgatggcttttattacttacattgactggaatcattacgttttctccccaatgctgatttggttatttcagaaccgacccaaattctcattagtaatggccatgcctctcttgggatcttgctaaccaacgctccaaacacctgaacaaacacttaaacttacaagcatgtgtctccattttatcttgaagtttagagtaaaaataacagtttataacaaaaaggttacctcaagtgattctcttagttggaacaattcacaacttctaaattccttctgcattagatttgctcattcacaaactaaagcatcactccgtaagcctcttcttgcctatatcttaaaacccagtaaaggaagaatagttcagaaacaaattcaaccaccaaatagagctgcaatactcaagatatatctcttatctcagttattatatttcttagaggatatctaaattctcaccagaggaaatcatttgtttctcgagttcctggactgcatcgaatatcccatgagcagtataggttttgatcatagtagcaaaagtgattttatcaggcttacattttctctcttccatttgtatgtataattctttcattgtagccaaatcaccagcctgaccatatgcattgattatgcaattgaagaacggtgtatccagtaccacatctgaattcacaatttgcctcaaaaccgaatctatcttaacgacaagacctgctttgctatacgcgttaacaagcgaacaataagtgattgagtttggtttcactccttgatacttcattttcctgaatacatcatccattttctcaattcttccagcttttccaaacgtctcaatcactatattgtaagtgacagtcgtcagggagaagaaccttttctccataaaatccataacagagcacatcttcttatacataccagcttttccaaatgacaggatcagtatgttaaatgtagtgatatccggttgcacccccatcagctggaaccgactataccagctctccatcttcctcatgttgcgaccatttccatatgacccaatgatcgagttaagcgtacaaacatccggaagagaatctccgtcctcgatcatatcagccagaacactttccatttcctcaaacattccagcctttccatacccatcaataatagtattgtaagtaaccgtgctgcatccaactccaagatacgacatctcaagaacgatacttttaaccagatcaaaccgacccagtttgcagcaacaactgatgagaacagtaaaggtgaacacatctggcttgcagtcactaacagatttcatatactcaagtgtagaaaacgccttgtctagaagctcgcttttgccataaacagagataagagaggtatacacatcaatggttggtttcaatccttcagataacataacttcgaaaagcaagctggcttgatcaggctgtttacaattcccaagcactttaaacagctttgtataagttttgcatcttggttcataccaatgctgcttcctaagaagattgaaaatctataaagtagagaaacaggaaagtgaattctatcgaatctatgtccaagtatctgtaagaatgaagaaggattaaagagctgtaccttgagagcagactgccatcgattctctttgatagcttcgtcaagagcttctagaacagcttttggccataaagttaagtacttttcggaattggctttcctctcaatgcccttcacagcagcatctgttctcagaatccgagacaattctttcttaggatctacttggtgtcttgttgagatcaaaccagaattcattttctctgtacgttcgttggggacctttgtcgaacacattgtgggcgttattgaaatagttggtatacaccgaaaataaacaggggaagatatatgttgctgaaccacgcttctgcaagaatgagaaacagagaaagatagatttaatataaacacaactgaagaattaaagaaacgtaaaattcaaaacagtatgattgtatgaaatatgagaatgttaccgagaaaaaccaagttgtgcgatctcattggcgtacgcggaagtagttccttgaacaggattttgtatcaatgccatcgaagaaaaatggtagaaagataaggtggagaaaaagaaactgcaaattttctgggtagaaagcagagctagaagacgacgacgataccgttgtttttccttcgtttttttcttcttctccggtttggtgtagcttctcttcggtttgtaaaatataatgaaatggttttagttttgatttggatgccggtttaatttggatttacaaaattaaaaatttagcattaatcagttttttcttgtccggtttaaaggattggattgatgaaggaagaaccaaatggagctttttccaatttaattttgaattcgaatttgttaaaacgagattgtccttggcaaggaaccggaatttggaaaatgaaaaaccaagaacacagttgaaagttatccacactagttaggacacgtggaggctaatgtatttcacgtggacacgtgctcatcactctcctctaaacgccgtcgtgaagtttaaaggtcagagacatcggccaccgaccaaatcagacaaggaaaagtcaacgatttgattggatcttcttcacttatgctttaaaaccgttcctgtaataaactgtgaagattgtaagaagattaacacgaatcaagaacatcgaactgttgactttagacagagagagacggagatg

SEQ ID NO: 24774 - DNA, 3003 bp, Unknown
  misc_feature (1)..( 3003): 2750-1469P.txt file - cDNA_ID_2185612; gDNA_ID_1972178; Annot_ID_180102
ttaattcttgatattatttgtatatttctaacagaaaagaaagaccggcgatgaaaatcagttttctgattcaattcttccttcttggactcgttgggtatgatcttgtctttatatcttggagtcaagatcaatgacaaaaaacttttgattacaatactcatttttggttatagaataacgttaaaccaaggattttacatctttggattggacaatacctcaccaacattcgcatcagcaactgaaaatgttgttcctgctgtttcattcctcatggcagcgttgctcgggtatgttcttgattctttattggagataacttgggaaacaagatgtgtatcttgcggaccaattattgtggaccctcaaagtgggctctgataccactcatatctcatttttattatgacacaccaacaattgtagaatagagaaggtggaatggaagaggaaagatggtatagccaaagtggtggggacaattgtatctgtcgcaggctctttggttataacactctataaaggaccaaccatttaccaaccgagtctgaatatagtgaaccaaactattaaacctgaagaagcagaggaagaaaacaagaactggacgttgggatgtctctgtttgatgggtcactgtttatgttggtcaagttggattgtgttacaatcaccattgcttaaaaagtacccagctcgcttctccttcgtctcctattcttgctttttcgcagtgatacagttctttggaatttcggcttatttcgagagagatctagagaggtggaagataatatcaggaggcgaattatacgcgttactctacactgtaagtgtttgtttattttcttagattaagactcttttgaatggtgtgattgattttggtgtgagtttgaatatatttcagggtttagttggttcagcaatggtgtttgcaatacaaatatatgtagtggaaagaggaggacctctgtttgtatcagcgtatttgcctcttcaaactttgattgctgctgttttagctactttagctcttggtgaacacttttaccttggagggtatgttatctatatgttttgactcattatgcgttttattttcatatcttatagttaagtttcttacacattttttaatgtttgttttggtcagattgataggtgcaatactaatcatgagtggactatacttagttgtgatgggaaagagttgggagaatcaagctctttgccaacaacaacaacacatgatttcttcagcagcatcagattttggtgatgaagaagactaccataataataaaccaagatctcctattagtcaaccattaatttcttcctaaattttgttagatcctatttatgtcttaaattcctagttcctactctcttcctcattaaaatcgaaatggacccggttgacgaaatagagataaaaataaatttggttaaaatcggtttagaattaaatcgattggtttgggtttagtgccacagtggttaggtgagtagagttgtggttcggttcaggttatgatattataacctggagggatcaaaattggcgcttttaaaaaccaaacaaacaaaaacagagaggaaacaaaaaaatgagaaagcaagaatcagagggagcgaatcttgaattcgaatccaaatcaaatgacaatggaaatgtgaaaatcgcaccaaacgaccaaagtttcctcacaattcttgacgacataaagtcttccaaatctccggttcttacacacgacaacttatacatttgtacacgtttttaagaccgaagctggttttttttcgtaatctgactgttcttcttgtttttgctttgttatattcaggctgttattaactatggagcttcttggtacaccttattctctgtttttacgattacgcttttcatgcttataaagtgttcgatgaaatgcctcaatgagaacggttttgttttgaaactttcaggtgtggagtttgtagccagattcttcctgcattccgaaagctcagcaacagtttctcgaagctcaagtttgtttatgcagatatcgacgagtgccctgaaaccactcgtcacatccgttacacacccacgtttcagttttacagagacggcgagaaagtcgatgagatgtttggagctggtgaacagaggctccatgatcgtctttggcttcactcttgaatatgttcatcaaatattaactatgaaaatctgcattccttttgtgatactttaaatgccaacacaaaaaatacttggctcttcgacaataatcccctgaataagtttggactttggtagattaatgttagggataaacttacagaaacatcaaaggttaaacagaggatggagctaacattcatgatacaactcttgacaaataaatatgaacaccgagctcctcacggcggctctttccctctcaaataatttggtttaaccgggtataatgaccttgagaaacattgaagtctctaaatcacactcttgccaatctcaaaagcaccaagcttcacctctaaacggttttgttttccaggaatgaattgggttaatgtaactttctaatttgggtcaggtttgagattggacggtcttccaccacaaaaaatatcaaccattaaaacttttattgttgcccattaagaccgaccttcttttcgtaattttttttttaaaacgtaactttgttgaatttgtaaaaaaaatctcttgtgaaattatcacaatgtttattcaaaactaaataagaacatactagaagcttttctaaattggaagatgtataaaaaaaaaatagaagaaaagaataataataatggaaaacaaatactataaaataaacgtttctttgataacaagaaacggatttgtcttctatataaataaaacacacacctgtctatttatttacacttctcgaatcttctttttcttctctgcgaagctctctctctctctctactcgattatcaaacatg

SEQ ID NO: 24775 - DNA, 3000 bp, Unknown
  misc_feature (1)..( 3000): 2750-1469P.txt file - cDNA_ID_2185634; gDNA_ID_1972178; Annot_ID_180110
tgtagaactttgaagattttactaaaggtattatttatactcaccgacataagtcctttgagatgatcatcggtgactttataagaaccaacttcggtgggtttgttgatcatatccaacatgacactgatgatgtctgagtgatcttcgattttcccactcttcaaatgatcatcaatcacaagttcaaagaaattggtgagtttggaaaaggctttcatcaccgtggaatgctgaccggagatccgatctatgatccaccctgcaggtaagaagtcagcaaacgccagggagccgaggttggtctccgattcaagcaccaactcttccactgtctccatatcgacaaaatcgcaaaaattttgtccaaaagaaagtctacaaatgatacttgccgcgaaggtaaaaatgaccttcctcaaattaactgatgaagttggtgtctcaagagcagattttgataccttccggaccaacaattggctctcgtcctctctaatatacctgaaagatttgagcttcttctggctaaagagctcggaaaccgcaattttcctcatctctcgccaattctcaccatacggagcaaaaccaatatctttaaagttgtaagtaaacaacccgctccccaccgtcttaggtcggctacaagtctcaagatcgtgagtcttgagcacttcctcagctccttctttggaagagacaattatcacagggaccaccccgaaatggagaagcatcaccggtccatattcttgggagattttgtgaagagatttgtgaagaaatcttccaaactggtgcaagttaccgatgatcggaagacccttaggtcccggaggaagcttccctttcgacggtaagagctttttcaagaagattaaagagagtggaagaagtaagaggaaacaaagaaagatagacattttcttatctgtttttttttctggctaactttcttcttgtctttgattgaagtgaagagtaataaatgagttcttaaagacacatatatatagagccaatgcatgtcgttggcttttgaccaaatcaaagtttcccttcaaagtttctttttattttactcttctctttttttcaccaacaaaacttctcacttattattggaataatattattaatacctagctagaagaatgtggtagaagaagaagttgtcattatctaaagccttttagccgactctgaatattattttgaatcaataaagttaactcgttcacatctttttttttttcgttcagatctatttattgtgtttgaagaaagccaagtctctcgaggctcatataacagccatatgtaaggttgatggtgtgagaaacgcaaacgttttttttttttttttcaaatgtattgtaattggtaaaagtcttaaatttcaatcttcaacatttatagacccaatgaagtgcagcacattttatcctgttggaacaattctggcgggacgactaaaatcgagatactcaacaaatccaaactaaaaacaaagcatactttcttagccaaacaaaatcatattttaataatttgagttaacgttattgttatgttactattttcggaaatccaatctgattaaatggatattattgaaagaaaaaaaaatttaaaacaaatatctgattttaatacaaatctaactttattgtacttggggcataattgtttttaaatcaatatagcagatttattttctaatatataaaattacatagacatatatatatatatatatatatatatatatatatatatctaatcaaatgaaaatccaaccaaaccatattgtagttaaatctaatctcctaaatgtagttttgacaagggacatgatttggttatgtataagaaaacctagccgaaatgtagattatcatcatgaaaacatatactaccatagtatttttattttgcagaaactatatatacaaaagtagttgccaatgattatcgtttatcattctatttatagacggttgcgtacattttttgttactgtttttttgttgcacaacatataaacggttaacagttatttgtggagtacaactatatttggatagttctctatgatgtactgtatatgaatattcgatcgttatctgaaattgatggatgagaaaattaaccttaaaaaaaatcattacaagactcgttccattattttattttattttatgttattttgatagaaactcgttgtattattgctatctattactccattaacgaagctcaaccaccagacagctactttgatagtcctcttaaattccaaattgatccaatttatcactttttgtaacctacggttcatttttttcaatgcgatattgatactaatttaattagtttttgattttatcaattattaaacgttttaaaaaggatgcatttgtacggaactatgaggaggtttaccccatatatacggagtcgttggtcaaacaacgtcgcgaaaaaattgtacgtgacgaggtctgcgttatataaacaatatcaattcaattgtttctttacgaatctatgaaaattttaggatctcgtacttcagttcaaaaattatatattgactttataagcgattatcgatttatttttattagaaagtcgcaagttctcttgcaatgtgtaaaatttcagagagataactcgtaacgtgcagagcggaaacaaaagaagaaacagcgattccgaaatgccaaactcgaaaatttgcgtgatttccacaattcaaaggagctggagtcccatcctagttgtcacgagcaaacccaactagaggcccgtccacaaaatctccggatcaagagcatacagcttctccgcaaactaacgcaaaaacgcgatgacaacaatggacttaatcacaaatccgatggttataagagcatctacggaaaactagagaaaccacctccggtcgccattcttataaaaacgataaaaaccagctctcacggataagcaatg

SEQ ID NO: 24776 - DNA, 3003 bp, Unknown
  misc_feature (1)..( 3003): 2750-1469P.txt file - cDNA_ID_2185638; gDNA_ID_1972178; Annot_ID_180111
tcacaagcaatacatatttctctgaaactaaacacaaaatcaaagagttttgtggacagaattcatttaggcatatcatcgaacacttggtatgcaatatataataagctttatatcttgagtcaaaagctaatgaatccaccattgactatactacaaaagctaatgaattgataaaaagcagtttctaaattccaacttctacaatttcaacattgtttgtaaacgaaaattacataactttacctattagagaataaaatgcttcgaaattgagaagatgatgatgttggagacgattacggagagagacgacggtagtggcctcaaaacaacgccggtaactatgagatcgatgaagaaacgatgctcgtgagagagagaccacagaggggaataatgttttttgcgtttcataaatgaagaaggaaagaaaaacccatatattatatgcacatatatttaatatgtatgtataagtataacctaacatgtaaagtctaatacttcttgactttttagtcgatcagattttgacacattttttgaagaaaagtctatacaatctctcaagtcccaaaagtcaagaccgaaacttttgagacaactacacgttacgagtttttttttttttttggtaaaatataaagtatttatatcattttcaaagtttcgacaaaaattacaaagagtacaagtagcgaaaaaataccagaaatctacagaaagaacatacaatgacaatcgttggtgtcagttttgtcttccgttgttgcttgtttgtggctcctcatcaggttcccttttctctgttacagtggttcgatgttggtgttttgattttgtctttcagtttttggaggtgcatgtcttgtctgagcggagatttcttgagaagaatagaggcggcgttttggtctatgtggcattgcttatccgtgagagctggtttttatcgtttttataagaatggcgaccggaggtggtttctctagttttccgtagatgctcttataaccatcggatttgtgattaagtccattgttgtcatcgcgtttttgcgttagtttgcggagaagctgtatgctcttgatccggagattttgtggacgggcctctagttgggtttgctcgtgacaactaggatgggactccagctcctttgaattgtggaaatcacgcaaattttcgagtttggcatttcggaatcgctgtttcttcttttgtttccgctctgcacgttacgagttatctctctgaaattttacacattgcaagagaacttgcgactttctaataaaaataaatcgataatcgcttataaagtcaatatataatttttgaactgaagtacgagatcctaaaattttcatagattcgtaaagaaacaattgaattgatattgtttatataacgcagacctcgtcacgtacaattttttcgcgacgttgtttgaccaacgactccgtatatatggggtaaacctcctcatagttccgtacaaatgcatcctttttaaaacgtttaataattgataaaatcaaaaactaattaaattagtatcaatatcgcattgaaaaaaatgaaccgtaggttacaaaaagtgataaattggatcaatttggaatttaagaggactatcaaagtagctgtctggtggttgagcttcgttaatggagtaatagatagcaataatacaacgagtttctatcaaaataacataaaataaaataaaataatggaacgagtcttgtaatgattttttttaaggttaattttctcatccatcaatttcagataacgatcgaatattcatatacagtacatcatagagaactatccaaatatagttgtactccacaaataactgttaaccgtttatatgttgtgcaacaaaaaaacagtaacaaaaaatgtacgcaaccgtctataaatagaatgataaacgataatcattggcaactacttttgtatatatagtttctgcaaaataaaaatactatggtagtatatgttttcatgatgataatctacatttcggctaggttttcttatacataaccaaatcatgtcccttgtcaaaactacatttaggagattagatttaactacaatatggtttggttggattttcatttgattagatatatatatatatatatatatatatatatatatatatgtctatgtaattttatatattagaaaataaatctgctatattgatttaaaaacaattatgccccaagtacaataaagttagatttgtattaaaatcagatatttgttttaaatttttttttctttcaataatatccatttaatcagattggatttccgaaaatagtaacataacaataacgttaactcaaattattaaaatatgattttgtttggctaagaaagtatgctttgtttttagtttggatttgttgagtatctcgattttagtcgtcccgccagaattgttccaacaggataaaatgtgctgcacttcattgggtctataaatgttgaagattgaaatttaagacttttaccaattacaatacatttgaaaaaaaaaaaaaaaacgtttgcgtttctcacaccatcaaccttacatatggctgttatatgagcctcgagagacttggctttcttcaaacacaataaatagatctgaacgaaaaaaaaaaagatgtgaacgagttaactttattgattcaaaataatattcagagtcggctaaaaggctttagataatgacaacttcttcttctaccacattcttctagctaggtattaataatattattccaataataagtgagaagttttgttggtgaaaaaaagagaagagtaaaataaaaagaaactttgaagggaaactttgatttggtcaaaagccaacgacatgcattggctctatatatatgtgtctttaagaactcatttattactcttcacttcaatcaaagacaagaagaaagttagccagaaaaaaaaacagataagaaaatg

SEQ ID NO: 24777 - DNA, 3003 bp, Unknown
  misc_feature (1)..( 3003): 2750-1469P.txt file - cDNA_ID_2185690; gDNA_ID_2213660; Annot_ID_181829
gtggttaactagatgtccttgttgtagtcttcttgttttcattcttgtccattcttattatgtgaagtatatatatgatagatttatttctacttttcctttaacttagtgtctcaagttcaagacagaccaagcacaagaagcgaagaagatggagaaactgaataacatatttttcaccctcatggccagaggacctgatggtaaaaatttcattttctgcatatctaacttaaagaaagaacatgcatcatctatctcttagtgtttgagaaaaaaacctcctttgttttattgagctatgaggttatttctattatgagacaatgtatcacatcgtcaccggctattattttctcaaaacatcgcttttctcctaccaatcttgaaagaatggaacttgaatgtgcatcatctcacaacctttaaaaggaaagctccttttgtgctgtgtaacattgggtgtattatagcttactttgtttatttatgttggttgtataatgcagtcgatctctcagaagtcaccgggaaagaacagatggagacacagcctgccaagaaaggaagaggaaggaagcaataagtctcaagatttgttttccgtttgtcttggtatcaagattttgatccatttttgtttgatattttgagatggtagggttgtcaagattcgttctaaagcttacgacttttttttacactttgatcgattaatcacttttggattagcctaaacccaaaagctaacctttttaacttggattttgaaagttggccaactccttatagcttgattagtaagaagactaaagatagtctttgaaaagagaaaaacacctggtcaattatgatggagacagagaagaaaaacgagatgattttcttaaccgatgatctatcagcaaatatcatatcgagattaccgcaaagaatcatcaccacttccaaactagtttgcaagcaatggaaatcactcgctgattctccgtattccagccaaagtaccatcaaaactcgcattcatgactgtcatgtacacacactcacaagaagaggtcatgggttactatgcacgcaagatttggggacttccacaaaataaattaagtatatttagaaatgtaagaattgtgggacccactggtaggggcggttggggcgatacaatacgattcgagaataatatcagaccttagaacttaagctttagttgacaccctacatacaaatacattttgtgtcacaacgttagtgcaaaatataatattaaatctggtatctatcttatacattttgaacataagagaaagcacgtaggaacatccattgattgttatatgaagcaatatggtatttcatggggaaaaagcttaagaagagatcaaaatcatggcatttgattcaaggaagagtcttaattaatcaaagaactaatgacgagagatcactcttttccttttcctttccctatcgtcatgtgattcctaaacctctcgagggtcgtagaagttttctacaaagagactgacattttcacacatcctgagttgatgaaacatcacgttgtttcttaattccttaacaatacatctcttttgatcagaactatacgactatgcaagttctttttttagtttctccgtttaatcttttatgttgtgtggaaataagcggttttcttatgtgacaatgtgcgtttttttttgtctgtttcgaatcctcaatatgacgaagattaatacatttatggttgtgtttcttttgtgttgtataaatatgtgtttgttttattttcaataataagcttggtttggtttccattgtttgaatttattgggtatacatattagaccaattagaattccacttgtaaatgcatattctggaacaataatgttgactatactaataattttttcttgggtctaaaacatttagtatacttttcttgaattttatgtaaagttattctgtttttaggacttttatcctcactgaattatgttgtgttaaagtagtagcttatatggtcacatatctcacacgtgtttccattttttttctatctaagttttcggtttttacattgtatacaaaaataaatggcatgccttgggccttggccactgattcacatgatcacgtagagtttgtgtgtgattcaaatcctagatgagaagatcatccaattgatctaagatgtgtctttcttatatcacacgttttattttaataatactcttcagttgggtttgattccatttatgatttatctatgaaaacagaatatgtcctcatgctgattatttcgtttgtggttgcattttaccatctgtagttttttttgtttactgacaaacaactaagattttatgaattcatttgatgataaatagttaatcaaatatattattatgagtgactcgatggcgaaagctggtattatcttatggctgctaaagtctacttttagaagaagaaaaaaaaagggtctgttgcattaccctgttgttgcgactctcctacaataactctcacgtggcccgtttcttggtttttgccctattttcacaaaagtaaacagagattttcactagcaaattgggcccaattggagacaacttcatgtggtttgaatcgtatatttcagatagattagacatctagtcttctttgatgtgcggtgaggatcttaagtcgctataacgttgtgaaaaaagaaaagaaaaagtcactataacatagatcgcaactaaacaaataaaggacactatacatgtacgtaataatattcatttattttcaacgacaatgttccctagggtggtaacccaagtatttttcatagatattatacttctagcgaaaagccatcaattgagaaaaaaggcctccacgtttgacccgttttgcctataaaaggattctttaagatatggaccttactcatcttctccgttaaacccatttaaatagttttcattgtccttgtgaaaaatg

SEQ ID NO: 24778 - DNA, 3000 bp, Unknown; identical to SEQ ID NO: 9779
  misc_feature (1)..( 3000): 2750-1469P.txt file - cDNA_ID_2185690; gDNA_ID_1972181; Annot_ID_180131

SEQ ID NO: 24779 - DNA, 3003 bp, Unknown
  misc_feature (1)..( 3003): 2750-1469P.txt file - cDNA_ID_2185698; gDNA_ID_1972181; Annot_ID_180134
ccgttcttcttcgaacttctgcaactttgtttctcccaaatctgtgaatctcaagtgttcgtcttcaccatcatgctctctcgtttattccttagacattcgaatctccgtttcgtaaccctagtttcatcgaaatcaaattctcagatcttctcttcgtttattcgtccgctttcgactaacagtagcggcggcggaggaaatggtgacgggaatggtcgtaatcggaatgatgttccgtggagtttcactggagtaaacgatgataagtctggacctttctcttccgatgattcttttggttcttctggagttgcaggatctggtttacctggtggagaggggaaatggccggaggagcctaagagatggaatataaaggaggaagaggaaaaagttgtgtttgatactggtggtgaagtaggtcaagggattgagactagtcgcgagaggaggggtaatgaatgggaggagactaagagatgggatatgaaggagggagaggagaaagttgtgtttggtggcggaggagatgaggtggatgggtttggaatcaggggagaggtgaaatctaatgaatgggatgtgtcaaagccatggaatttgaaagaggaagaggagggagttgtgtttgatactggtggtgaagtgccgtttagctttgagaatagcttggaaatggcggaggaagagcgtgtgaagaaggagttgattgagaaggaagagaaggagcttcttgaggttatcaagggtgagacttttttaatttgttttgctgattcttaagttttgatcttatatgcaatgcaccagtagtttcgatatgtgtctagttttggaatgcagtgacaaatgggtagcaaatttgatctcatgactttccttgttaaggttagatttggatttgagggttaagtcaagtagcaaaggttgtgtaatcaatctatttataggcatgcttgctgagtggaggatatgatagtttttggagtaagctcggatgttgaagaggaataagcatttgggtagaaagacttgtgtttgaagtggatagttttgtgcttactgacgctaaggaacagtttagtgcttatgtgtttttgctattaacaatgttcagcacaataaattgaagaatttgttattttgatcacattggtaatggattctgctgctagtaaaacaagcgctagaagtagagtaattgatttgaaacttactattgcaggtcctgatcgagcatttggagaccttattgctaagtcaggtataacagatgaaatgctagatagtttaatagccttgaaagatttccaaggggtcgaaggattacctcctctgactgagattgaaaacctgcgtcgtgagaaaagttcaaagaagtcatcaagagctgagatagaactccagatgcaagaggacattgccaaagcacgggtgagacaagttgacgaaacaggtagagcctatggaactggaagaagaaaatgtagcattgcacgtgtttggattcaacctggggaaggaaaatttcaagttaatgaaaaagaatttgatgtctatttccctatgcttgatcatcgcgctgctcttctacgcccacttgctgaaaccaaaaccttgggtcgttgggatattaagtgcactgttaaaggcggtggtactacaggtaaaacctctccacaatcacttcgttttcttcgacgattagtcccaaagttctctatttacactagcaagtatgatttatgcttaagctagaggatttggtcataagttaacaaattagattgccatctctttacaaaaatcaacaattatccaagcatttccttctaatcgttgttaaccatgtactcaaatatttggtttaaaggtcaagtcggagctattcaattgggtatcagcagggcactgcaaaactgggaaccagatatgcggacatcacttcgagctggtaagcaagatactacaggcatcttagcgttattaaatctgtttagtcttattgatgttcattagcagagatacaacttattgtctgaccaacgttgtcatttgatagccggtatgtgtgttcatgtctgttgaatggattggtcttgatctcgatctttttcatcttcgatatgtttcagctggtttcttgacaagagactctcgagttgtggaaagaaagaaacctggaaaagccaaggcaagaaagagcttccaatgggtcaaacgttgaatccgaaaatgcgtactatatcttctcctttttgtctctgtcattttcattagttcgtctacttatcccgggtttagaagaatcaccggcaaataacttgttcttttggttcaatcccgtagttatctttttgtaccaacacattcttctcttacggctctactcttggaaacttgagtttcgttggtttctgagtcggacacatatttttgtatgtttttttccggcaaattgtcatgtttcttcaaaaggttcattgatgtttaaacataatgatcaactccttatatggattatattattaggtgaattttgattcttttgatcaaaatgttaaggaatgtccaattctcatagactttacaagagttggttacatttgctatatacaaaaatatctaattggataaactctattataccatccaaatatctaattacaagagtttgtgtaaagactttccataacagagcaatggatagattttgacgttatgttgataaattttattcacttgaaggttctattttgtgttacgtgcaagcatctactcattgaatttcttcactcctactacaagtactaacaaaattatcaatttcccaacaaatccatagatatcctttctctagcaatcgaagtaactattttagtttcattaaaataacatatcactcttaaggactatataataacaaattaccttcttgttgttctcagtttcttctcccaataccaaaaatattttgcttcatccaaggtcttgaagatg

SEQ ID NO: 24780 - DNA, 3003 bp, Unknown
  misc_feature (1)..( 3003): 2750-1469P.txt file - cDNA_ID_2185701; gDNA_ID_1972181; Annot_ID_180135
atgtactcaaatatttggtttaaaggtcaagtcggagctattcaattgggtatcagcagggcactgcaaaactgggaaccagatatgcggacatcacttcgagctggtaagcaagatactacaggcatcttagcgttattaaatctgtttagtcttattgatgttcattagcagagatacaacttattgtctgaccaacgttgtcatttgatagccggtatgtgtgttcatgtctgttgaatggattggtcttgatctcgatctttttcatcttcgatatgtttcagctggtttcttgacaagagactctcgagttgtggaaagaaagaaacctggaaaagccaaggcaagaaagagcttccaatgggtcaaacgttgaatccgaaaatgcgtactatatcttctcctttttgtctctgtcattttcattagttcgtctacttatcccgggtttagaagaatcaccggcaaataacttgttcttttggttcaatcccgtagttatctttttgtaccaacacattcttctcttacggctctactcttggaaacttgagtttcgttggtttctgagtcggacacatatttttgtatgtttttttccggcaaattgtcatgtttcttcaaaaggttcattgatgtttaaacataatgatcaactccttatatggattatattattaggtgaattttgattcttttgatcaaaatgttaaggaatgtccaattctcatagactttacaagagttggttacatttgctatatacaaaaatatctaattggataaactctattataccatccaaatatctaattacaagagtttgtgtaaagactttccataacagagcaatggatagattttgacgttatgttgataaattttattcacttgaaggttctattttgtgttacgtgcaagcatctactcattgaatttcttcactcctactacaagtactaacaaaattatcaatttcccaacaaatccatagatatcctttctctagcaatcgaagtaactattttagtttcattaaaataacatatcactcttaaggactatataataacaaattaccttcttgttgttctcagtttcttctcccaataccaaaaatattttgcttcatccaaggtcttgaagatgggtataaaagtttcatcaaagatcaaaagaattctcgcatccacaggttatattcctattttcatttttaaataccgctattatttttattttttctactgcaaatttgcaagaaaatttgtaaccaagaaaataataattttgaaactttcctcgattggtacagcttcaggtagttcaaatcccaaagatggtgctgacgtggatgtccgagaggaatatgcaaacgcctttcgtacggaatcatacaatcacttttggacacgtgtcgtacagctaagccgcaaaaagtccgcagtgtcttcttcttcttcttctccaccaatcgaatcatcctccacgtcagctcgtctcatgtcttatcgcctattcgcgcacaatcttctagacccggatctgaataccattactcggatactagatgtatcccgggtcgggcgacacacccgaactcttctctctgattacttcttggagacggcaaacgctttcttgctttgcacgcaattactaaaaaacattcatcatcttcgttctaaatacgagtctttgaaaccaaaatttcattcggaaaatcataattcattggctttaatagaccaattcacggagatatcaaaatggttcgacccgtttatctcgtcgggttctaggatccagctaatcagatccggctgtttatacttgctaaaacggctagagtcgagacgagacaagacacgagccaaacttaagcttatcaacggactaactcatagctcagggcttctcgttttggctctaaccactacattgattgtaaccatagcctctcacgcttttgctttgtttctagccgctccgactcttttagcctctcaatttaaaccagccggtttaaggaataagttaacaaaaacagcggctcggctcgacgttgctgccaaaggtacttacattttaagccgtgatttggacacgataagcagactagtgacacgaattaacgatgaagtgaaccatgttcgagccatggctgagttttgggttggtagagggtcgggtcgggttcgaggcagtgaagaagttgctcgagagttgaagagatgtgaagaaagctttagtgaagaacttgatgagcttgaagaacatatttacttgtgtttcatgactattaatcgggcaaggaatcttcttgttaaagagattttggattcggatgatccacctaattgttcattcgctcccaaatccaaaaaaaaattgtagtatttctttgtttcgttttttttctcatgtcaatttttattatttcttttgtttttgtctactacggtatgtatatatatttctttttaccctcaattatataatttttaattcctagaaatattagtgtcggaacatttttatttctatttggatgatattcggattctattagtagtcataaaaatgccaaatgcaagagtcttttatttttgggcaagccaaatacaagatagtctaaattatggaatttttaacatttgtcaaaagaaatcccaaaatccattacatatgtcggaaatgtaggaaaaccgattttaacaaatattttagacgacctctttgttttgggtaggagagactattcatcaaaaaatgaaccaaccataacatttttttttcctatatcttctaattaggtaaatcggttgactcataaaccgagtcagcaactcgtccgaaccataaaaaaacgattccaattcgacggaatctcacgagtttccacttttatataaagtcacttttgcaaatcgaacaaatgcttatagaagaaagttatcaaatctagagatagagagagtgaagagggcgaaaaatatg

SEQ ID NO: 24781 - DNA, 3003 bp, Unknown
  misc_feature (1)..( 3003): 2750-1469P.txt file - cDNA_ID_2185747; gDNA_ID_1972181; Annot_ID_180147
atctccgtaggagctgtacgaatccccagatcgtgaacacatctcttgtctgaaaagcctcacgaaatttctcgacgtagattctcccgttgataatcgccaggcggaaaatcgccgtcgcattggctcgctccaaggcttccctcgtgatcccggtcttctcccatggccgtagatcctcgtgaatccatcggaagtaatctgggcacgtggcggatggagaacggtcagattctccttctccggcgctagatcggaaactcgtcggataattgtcctttgggcaagttccagtgtcgttgccggagaaagcagcgcagtttagcgtaaactcttttggtttttccgtaattagcttagtcgactgagggtattctggggattgagtggtttctctctcagtcacggacaccgcttctttctctatcaaaacctatagacgaaaacgaagtcgtttagcaaaaaccggtagttagttaatgactaaaaacaatcacgtgattattaaagctcccgtgtagacacgtgtcaagcgtaggaaacttgtttgacaaaaaagtaatggtgacacgacaaattaggcgcgaacgagttttagcgccactaataccgtatacgacgtggcaaacgacaaacgggactgtcgttttgatgtaattagaagagaacacaagaatctatttatagtaagatgttcgtacggagggatcgaggaggaggcgcgtggagagaaacgcgccgaggaggaggaagagaaagatggagaagaaggcgtaggatcggttagaagcaccggtgccggttttgacgagtggagacaaaatggtgtcgaaattacgagagtgcgttgcagaggtatatgacggcgagttcctcatcatctctccttgctgttgcatgccaatttgataatcaatgatcgtgaaacgaaagatgaagaagagagatgtgagagagagagagagagagaaagagaaaaggagagctttttgtgtgtgagaaaaggaaaggacagagaatcatgtgaaccagaataggaaaaggtttggtttataactaaagtgttttaatgtttgcaagacttttgatgggtgtgtcatgttgtgtgtaccaggaataaatgtttaaagtttctaggtgaaatgtgagacacacaagtgcaactcttctaattgtttttgtaagttattcggtaaataacaaaggaaaataacagaatcgttactataaaatcctgtttttttattgctttacacgatttataagattcgaaaaagtttaagatatatttgataagtagtatttttgaaaaaagtactataaaggacattttctattaaaaaaaaacttataaataagatgaattttgggaaaataaaaggcctaggacgacgccaagatcaaggactaagcccaagcccgaaatagaggtttttgtaataaagttttgaaataaattgcattttgaggcaaagatagacaatctatcgtaattatccgaaccaatcaaataattgacatagggacatcagtaatcatgtatcttcttttccggttaggttcatgtttaaatatcagttttaaaaagtgacaacaactaacaaaccgagcattgatttggaccacaataaagcacacatgtgatttagagaaaatggaccctttttgtttatccctttttttaagtgattagttctactatatcatatagtttcgacgattttgttacgacatgacatttgcatatatagagctgtcttggtcggagttcactgttcaataaagggtttaggctttcgtggtgcggaagcttaatatatcacaataatcatttttgtgtgagaatattcgttaccaatttcaaagttaatggatcattataggtctcatatatttaggaatatgtactcgtcatttgaaaatatcatcgtcttgattcttcttaatcaaatggaaacagaatgatgaggaaaaagcagctaataccaattatgatggattaacaaatctttttaggagtgtcctctttgacatttttgaattaaagctcatgcttcagaaaatatccatgtccctaccttaatcacaacttcacatcaaaaatctgactatacgctcttgcttttacattttcacaataatattcacaaaaaagttgattaatttcatataatactactatcaatgaaagtcaagtatcgaaattcaaattctaaaccgaatcctcatcatgtatcaaaaaaacctttaatggttattcaaaaagttcattgtattatcggaaaatttagttactcgaaacgatctttgatatataattttctttatcaaattatttcatcatgattcatgaatcatgcctccaagaaattgcatttaatttaataaaccaaaaagataatgtagtttataggtttctcgatttttgttattttcctaaatgagatttctcaattatttcattactaaagtatattaaaacatgataagatatttgaactaaaaaagtgaagggttcacgaaagctttgcataaatccgtattttcatattagtttgctttatagtagggactgcttctattatcattatcaattaaccatttatcggtttataaatttgatgcctaacttaaattatatttgttggcaaataaaatagaaagtaattggaagggagtgagagcgatatgatttggggcagagaagaaaacctaaagctcacactcacaccttttttgttactatttcacgcgtgctatgctcttcctttgtctccctatttcacaacccaagaaccctttccataataacttatactatcataaaatatgaaaatactaatcaaaatattagtagtatttattcacacacatatacataatcgacctatatatatagacacacacacttaggagactttgtgcactgcttcattctctataaccaagtataagcttggagggggttatttttctaaaagggattgagtttttaagatcatg

SEQ ID NO: 24782 - DNA, 3000 bp, Unknown
  misc_feature (1)..( 3000): 2750-1469P.txt file - cDNA_ID_2185816; gDNA_ID_1974074; Annot_ID_180308
caagacatcagcacataaacatcgagatcataaagttacacatagtggccctcgtgatattgccgcaaaacatggcctcttctctcacatgtcttacctttattcgctttgtcctctactctctcaacgtagatcccttttccgtatatacttatgtttatttttgtaatgtattatacaacaaatacgcacacatgccggccactaatgtacatgcatttatacatgtgtccacttcgttccacggagcggaaaaagaaaagttatgtaggatatttgtctaacaacgactatgcgaacaattacaaatacataatttttccaacgcactatattgagtcaagagtagttataaatcaatgatcccaataatcaaaactgaattcaattcaaaagaggtctaattgatgaacttctataatgatttcaaagcttcactaatattaatgtaggatacggaaaaatatatagtagtaaatattattatatctacatttttttgcagctattttgtaaaataaatcctgtagttagaacttatttacaattgttgccactggcttttaattattgttttttctggcaataaattgattaacaaacgaaaaatattccaaatgtattccaatccatatatcacgcagatttctccaaaatttaaactagatttcggcaactatttaaaacaaaaaatatttgacaaaccaaaatacaattgcaatctcttaaaatgagcaaaacacacctaaatacatttcttatcaattcactaaatcttatttctccaaaatttgaactagattttgacaactatttaaaacaaaaatttgtttaacaaactaaaatacaattgcaatcctgtaaaatatttattttaattatttatttaaattagcggtgtacgtcttttttttttataggacaggtttggcgagacgggtttggaagaacgttacttaataagaattataaaatataaaataaaaatattttatagatagatataattttcaaacttttatatatactaattttaaaaaaaaaaatcttcatggtgtactacgggttaaaatctaatagttgtagaaaactcttaagcctaaggaagttaattacctaaatggtaggagttataataaaaataacttcttaccaaaaaaacaacgttagataacttgtaagatcacttttagaggctataaattcctcctcaccttttcttttgtataaaagtagaaaaaaggaaccaaagtaaacaaataaaaatgctatcgactattgtaaattcttttttagtgtttccatatttttttcattttttatttactgtttttttcttactgcaccatgacaagtgaagtagatttcgcgttagtgcacttgaaatttaggacaacaaaaatgcaactagacaaactttttctgtatgaatatctagacgaacttacatttatatggataatcttgttttgtttgtttgtcacagttaaactaaaatataatataatttttctgatccatggctacaataaattttaaaaatgtggataatatgtcttcacaaatatttttctaaataaaatactctttcttttttttggctaaaaagttgtcacatgccatagggacgaaaatgtgtgttttacattgtttggtacaccaatgtttcagtctctcagatctaaactaatggaaattacgttgatttaagccatcatgatatcatgaagggattttttctcgtcatatttgtccagttttacgaaaacaagttaaggtatcaaacttatgcgatacgaaaactctttgaaataactcaattatatttacattcctttaatatgttttgtttattcaaaatcatgattaattaattcagtattttgaattcctatttttgttacatgatgcaattggtaataatacaatgaaaaaaaaaacagtcccttgtgtagcgctatacaccaagtttgtgtgtttgtcgtcaatgcacccatcgcttccttataacctaatataggttttgattggtaaccactttacaaaacggtactaagcgttacaaagttttactcttagtttattgtacagcttaatacctgtagtagagttaacaacttttggttaccaatcagacccataaacatatattaagatagacaaaaaaacatatatacatatatagtacgacttcataaaagatggtataattttcacataatttgatattaattagatatcacttactcaagtactcaactatgcagaagcactcttcattcttcaattgtttttatgaaaatattaaagaaaaaaagctagaaaaatgataccagagaaacaaaatgaatcatgggtttagaaattcattctaatttctaccttttggcaaagaccatgaactctaaactactttttggtatgataactggaccaaatttgggccgttcatagagtttattggtgcagatggacctcggagattaggactcccctgtaaactcaatctagcaatgccgagactccgtatttatagattcgtgaaccatgaatgtcgatcattaacataaagctacaaagtatgaagctctagaagatatgtaaacgtcgtaacattattaagcccaattcaagcccaagaccaagcccaagaccaagcccaacaaatagtcaaaagagtaaaataataagcggaagaagttaggcggggcttaggcagaattcgaaactctctccaacttctttcgcccaccgctcttttaacataattccaatatttctttcttatattaatctttttaatacaacaaaaagacacttttacccttcctcttcttcccgctgtttcctctcttctctctccatctttttctccatcttccctcttctccttcttcatcttcccccacaaaaacctaaatcacgattctccaaaatcgcttcaaaaaatcactctaaatcccatcttctctaccaccggagatacaccgccgttacatg

SEQ ID NO: 24783 - DNA, 3003 bp, Unknown
  misc_feature (1)..( 3003): 2750-1469P.txt file - cDNA_ID_2185824; gDNA_ID_1974074; Annot_ID_180310
aacagtaaataaaaaatgaaaaaaatatggaaacactaaaaaagaatttacaatagtcgatagcatttttatttgtttactttggttccttttttctacttttatacaaaagaaaaggtgaggaggaatttatagcctctaaaagtgatcttacaagttatctaacgttgtttttttggtaagaagttatttttattataactcctaccatttaggtaattaacttccttaggcttaagagttttctacaactattagattttaacccgtagtacaccatgaagatttttttttttaaaattagtatatataaaagtttgaaaattatatctatctataaaatatttttattttatattttataattcttattaagtaacgttcttccaaacccgtctcgccaaacctgtcctataaaaaaaaaagacgtacaccgctaatttaaataaataattaaaataaatattttacaggattgcaattgtattttagtttgttaaacaaatttttgttttaaatagttgtcaaaatctagttcaaattttggagaaataagatttagtgaattgataagaaatgtatttaggtgtgttttgctcattttaagagattgcaattgtattttggtttgtcaaatattttttgttttaaatagttgccgaaatctagtttaaattttggagaaatctgcgtgatatatggattggaatacatttggaatatttttcgtttgttaatcaatttattgccagaaaaaacaataattaaaagccagtggcaacaattgtaaataagttctaactacaggatttattttacaaaatagctgcaaaaaaatgtagatataataatatttactactatatatttttccgtatcctacattaatattagtgaagctttgaaatcattatagaagttcatcaattagacctcttttgaattgaattcagttttgattattgggatcattgatttataactactcttgactcaatatagtgcgttggaaaaattatgtatttgtaattgttcgcatagtcgttgttagacaaatatcctacataacttttctttttccgctccgtggaacgaagtggacacatgtataaatgcatgtacattagtggccggcatgtgtgcgtatttgttgtataatacattacaaaaataaacataagtatatacggaaaagggatctacgttgagagagtagaggacaaagcgaataaaggtaagacatgtgagagaagaggccatgttttgcggcaatatcacgagggccactatgtgtaactttatgatctcgatgtttatgtgctgatgtcttggcttctcctacttgaactttagcttctaccgcaccttctactccgagtatcttatacttttttctttatcaccaaagactttttaggcattaccaaaaaaaaaaaacattaggtatattttggaccatttaaaaaaacatttcaagttttatatatcgaactattaacaacacaggagaacctatattttcaaccattacatttttattatgataaagattttgaacttttaatttccatgtcacatttcccttttgaatattatggatcagtcatacatatataagtatgcaattactactagtctaatttggtctaattagataataagtattgagcatatcatatttatatagtgaaatactggataatattaagatttactcatttcttacaagctagatttatataatttcaattagatggggagtgagaacttatgtacactaatataacatttcagtcatatacagtacatgttcaccatgtctttatatggcataatatactcttgaatatcaagctagctggtaaagtacgtttacccttttgattttaatagaaagtaactttaaagtcgttcgcaaatgatgaataagataaggataatatgtgatgaaaataccgagttgcatgcatgtatttgcaataaactaaagtactgttccgtatatgtttagccagtttcactttagtataattccatgattttttgggtcaattttgatttttagcatacaaatatatttataatgctataaaacttgaaatgtttagtggagagcttgagtaatcgtctatatagtttgtagatactggtgcagtttttctgtatttattgaagtcaattagttgatatattcttatagataaattctgtgaaaatttgataaaacattgctggtacattgaagacattatccacaaagactaattattaggtaatcaaggagagtgatctcccacaattgtttttcattgtccaaaaaaaaaaaaaaaaattctattattacttttctaaatctaaagttgtgagataattttggatttatttttttctaaggtaagtttggaaaacaaatcttactgatatgctaattcaatttagacttctttagggtatttggagtactttaggggatactgtctttgcattagtcctaagaacatggagaaacaagaagacaaacataaaggtggccaactccactacataactaatatgcatacgtttttaaaataatcaaagaatcatataaatgtttgcagttgatatcacctactccaataataatcaattaatttttatatattacgacgagtgtatacgccattatacaccaaaatctaaatctggatctgtgtcaacattttgtatggttggatgcaagtaaaaaaccatcaaatactatatgcttatgactattaaataaatattgcatcaaagtgtacgttaaaaataaaccaaactctatatatatgtatggattagttataagaagagtttgatcccactcgatcactttttcttctcggatcctttcccaccaaaaacacaagcaaaacaacaaagactctctatctatcttctctttcttctttatcgtttattctatatattaacgacattgtaatctaatttgcactgtcttcaacattctctttttctatg

SEQ ID NO: 24784 - DNA, 3003 bp, Unknown
  misc_feature (1)..( 3003): 2750-1469P.txt file - cDNA_ID_2185846; gDNA_ID_1974074; Annot_ID_180314
aaggtcgtatgtcgagttaggcagttttagggatgatccggcggataagtgacgagttgaatggcttctcgagacgtgcgagtaggttagttactttgggcgggcaagttggcgagacacttcggacggacgagtaaacgagctactcaagatggatgggcaaacgaggtacttcggacgggtgagctgacgagctgcttgagacgggcgaacggatgagctacttgagacggaccggctgacgagacgggtgaactatgagctacttgagacggaccggctggcgagatatttcggacgggtgagctgacgagctgcttgagacgggcgaacggatgagctacttgacggaccggctggcgagatacttcggacgggtgagccgacgagctgcttgagaccggcaaactgataagctacttgagacggaccggctggcgagatacttcggacgggtgagctgacaagctgcttgcgacgggcgaactgatgagctacttgaggcggaccggctggcgagatacttcggacgggtgagctgacgagctgcttgagacgggcgaactgatgagctactctttgtctctaagtgtcctcctggcgagatacttcggacgggtgagctgacgagctgcttgagacgggcgaactgatgagctactctttgtctctaagtgtcctcctcgcgagatacttcggacgggtgagctgacgagctgcttgagacgggcgaactgatgagctactctttgtctctaagtgtcctcctggaatctcctttgacaagacatgctattccgtatttatagccttctgcgtgtagggcattcctccagggttttgacgagcctaccctcttgacttaacattctgcttaggcctttgacttggatttgggccttgggaaaagcaagcccaaatctaacccctaacagctggtatagttgcaattgtggagaagattgaagaagagaccaaaagaatggattcaggtaaaagaaccgttgtggctatggacggttcactctacgagaactacccacagtatcaacagtatatggaagaagcactagtcgagcttcttggcgataatcgaagttacattgtgatcatacatgccaaagacgtatctgggcttggtgctgctcttttggctgctactaactctatttatagtacttgaacgttgaacctctacttcatgagtatgacttttgtccatttgtttgtgtacattatatatatataattaagattgttcagaggagcaagtcgagcaacaaactagaagagatgagtaagtcttggcagaacaatttccaaaatgaacaatcttgatgacaagataaataattttggataaaagtctttccctatttgctaaatgaaacactctaaatgactttagaagttttgatttaagactaatcaatgttataatcatacatatcggtcttggaaaaatatctatagagctagatcataacccgttattgtgcagcacggtagaactttaaattttaaatatttattgaaagttgaattattgtttgtttatagtacattttaatcattctatacataatacattgacatataagataatatcattaaaaatgtattttatttttctaatttaattaaactaatgaaattaattaaattagtattgacttgtttattcttgttgagatgaattaatttactctttcaagtttgatttccaataactttctaatataattacttacaaggggcaatgttacattatattttgtacttcccaaatactagtataaaatatatttattcgacccattatctactttgatatgattcgaaaattgctgatatttgtaagttcataaagcaaagcaattatttaaatttaaagataattttcataaatagcacttaaatgagtttttgttccaaatataccatcactagttttctttctaaaaaatactattaactttttccccaaaaatactacaaaactaaacctactttaaactttcacaatatactaaatccatacccaaaatttcaaattataaacacttgaatattattattagtgtttgtgtgtatccgaaaatcttttatcggatatacacataaacaaactcattttttcgcttccaatcactaaatcctgtgttggtaggatatttctagatttaattctaaccataatcatgaaattgaaataaaatcaagccttttagatagatagatagatatatatatatatatatatatatatatgtgacttttatgaagtttgcaaaaaccaaaaggacaacatttttcaaattagaatacaatttttttaaaacaattgtagaatcaaatcgcatcctaagttcctaactattgttaacaaaaccacttactaaatctttgtgagaaattacagaaattatacctatttaaactttctataattaatgtaatttttacttttaaaggttaagtgattaacccaaacattttaaaagttaagtatttatttattatatgtgtatctataaagtatctataagattttcaggtttttgcaaggaattaatagatctaaagtggaaagagaaactattgtttttttctcaccttttatgcttcttcttctaacaactaaacccaaattgatcattagtccacaacccatagtgttagtttctttatttttcactttatggtgttatacgtttaattaagttatcaaaatctgttattcttgcatatcatctttcttatttaaagagaaaatagaaaattagaaattgctccctcttgttaaaaaaaaaaagaaagaaaaagaaactgtatcttctagtggacaaaaaaaaacttgttcttctcgtaaaacccaacaagagaataatcaaataagtaaagtaagcaagtagcagagcaactagaaagttttataaattttagttgaaagttgactttgagatcttcgttcttacaaaacagaaccaaacttcgacaatg

SEQ ID NO: 24785 - DNA, 594 bp, Unknown; identical to SEQ ID NO: 9805
  misc_feature (1)..( 594): 2750-1469P.txt file - cDNA_ID_2185922; gDNA_ID_1974073; Annot_ID_180281

SEQ ID NO: 24786 - DNA, 3003 bp, Unknown
  misc_feature (1)..( 3003): 2750-1469P.txt file - cDNA_ID_2185932; gDNA_ID_1974073; Annot_ID_180286
aatcgatagtttggtttattatacagatgtcattaggaaactctgaagaagatttcaacttaccctgtggccaaacagtaacagacacaggattgaccgctccaaatctggagcttccattagggcggggagaatcgtcatcaatttcatatccatgtctggagggtgaagctttctctgttgattccatgataactaagcaacaagctaaagaaattcccatcgcatagggacgaagattctgaggcatcatggtaactgaaacatcttactattctgttttgttttgttgcagcataacaagagaagcaatctttattgatctatcaaataacctgaattacaatgaagagaactgcagagtttcaggctctgaaacacaccaattcaatgattggataatcaatctctcacagaattagagactctctatatatatactttaaagactctcaacatttagtcataatgttgactctttgactttgttcttccttcttttataggtcatcagggtcagcaaagcctttttaagtctccaactctagagcatggtactctgttcttacatctttgtatctacttctctaaggcttccgcatttcctgaaataataaatacatgttttgaatttgtgagcttagggtttgcagacttaaattagtcctgaattttctaaaacacacatacattgcaaatggattttttaagcaattaataaatcagaatttggatcaacaaaaatttaaaacttgtgccgtgagagttgaccttctaaccaagggcaaggattggtatccattcttggaggtaaacgttgccttcaatggcacacagtattggggatcaatttataaaattgaagaacggcagttgtgtaagaggaatgcttatctgttttcttgttccttcaaattccagcatgcaaatcttccatctaaatcggctttcaacgaagtggagtttaagttttcttactccaggaggattaaagaatgcggtgtacgactcttgaatgtgtcttcataccaagatgatagtgatggaagctctgaaaaagagtacaaccagtctggagaaaaaggtgactttgtagtagagacatcagtaacatctgaagaatataacaacttaccctgtggcctaattgtagcagactcaggattgaccgctctaaatccggaggtttcgttagggcaggtagaagcatcatcactttcttcttatccatctatggagggggaagctttgtgtgtttattccatcataactgagcaacaagacgcagatattccgatcttgaacagactcattagctgtcatcatggtacctgaaacatcttcttattctgttttgttctgttttaggatcaacttgggattgactatgactatagtgataatgacacgagccattttttactgtagatgatggagagctctcggagaaccaaaatccgtttaattctccaacttcggagtctgaaagtgtttgtaatttcttttttatctgaatgcagaaatactctgtgtttgctttgaaaattttgcatttttcctgaaagaataaatgtttcaaaaagccacactttagtatattctggaaaaacatcttggcttggttttgtattgtaccatacttagaaaccaaatgctccttaaagagcagcaaatgcaatcgcagcctacagtcgttgctgacgcactaagccaaactttaaactaataatacaatttttgaaaggaaaaatgataacaatcgccatttattctgaattctttatgcaatctaccacaatcattcattccttacacatcataccacatttcgatctgaaatgtcagtattgccctcaccatttcttctctactttatctctccttcctcgaaatccgtgcgctttaaccatacatcattattttcccgaagacaaaacgaaacgcttttgtctctctctcacttcccctgacaacctgcacagattctctacatgtaactttcaattaaatttgtcccccaattttattcatcataaattctctgttgtatctagatcttgtccccgatttcatcatctttcaaaattatcatgaatccaacatcttatccaccaattgttatcatttaaggatttcatattttatttagatttttcaccatctattttggtcaatagattagttgagcattattgtcttcaccgatccgaatttattcatttttttcttctattgtaaaataacaaaaatatccagttataacatattatcttgtctaccattcgatctaaatttgtcccagatctaactctatcactcatttgatatgaacttgtccccgatataacatattatttaaataaaattatatgcaattgtaaacgtgtaggtgaagacaataacgttcaactaatctgtggaccaaaatagatggcaaaaaatctaaataaaattcaaaatccttaaatgagaacaattgatgaacaagatgtgagattcataataatagagcaagatgatgaaattgaggacaagacgtagacgtaacagagaatttctattcagggacaagatctggagacaaaaaaaaaagtttgtcaccaattgtcctttatctgacacatcagtctgtcaccatcaagggcaatttcgtccacaaatgtgcatgtgataatgaaatgtgatagattttgtaagagaaagctttttgttgtatgaattgtaagaaaacttcaaaaaagtggtagattttacaagattcccttcttgaaaactaaaagagtagttttttttttaattattatttatttttatttttttaaagagtaatttagaaactagagagttaattagtattttagtgttaattagtattttcactgtattatttgaattaaaatcctcataatcgatatacttattctcctaatccatgtgcatgtatgtattgggaaacaagactttgatattaaacaatcataagtacattcttacgataaaatg

SEQ ID NO: 24787 - DNA, 3003 bp, Unknown
  misc_feature (1)..( 3003): 2750-1469P.txt file - cDNA_ID_2185940; gDNA_ID_1974073; Annot_ID_180288
atcttatggaagttgcacggtcaatgatgtttcacacaagtgttccgaagaggttttggggtgatgcggttctaaccgcgtgctaccttatcaatcggacaccaactaaagtcttgaatgacttatctccctttgaggaactaaacaacaccaaaccgtctattaaccacttacgtgtctttggttgtgtatgttttgttttagtacccggagaacaaaggaacaagttagatgcgaagagcactaagtgcatgttccttggctattcaacgactcaaaaaggatataagtgctttgatccaaccaagaatcgcacattcatatcccgagacgtcaaatttcttgaagatcaagagtatgataacaagaaggattgggaggacttaaaagatctagctcattcaacctcggatcgcgttgcaactctaaggtttctattggatcatttgggtaatgaaacaacaccaacgaccgagaatacgcaagaaacacattcaccaaatcaagaagacttgcatcaagggagtgatagtaatgaggaagagtatttacaacatcaagaagaccttctcaatatacaagaagatcatgaatccgtccaagagactcaacatgactcaagtgactcaagtgatgatgaaaaacaagaacaagtcctagttcttccaactccatcacttagaagaagcacaagaatccgtcgcaaaaaggaattctttaatgctcttgcggtagctcatccattccaagcaacatgttctcttgcccttgtacctaaagatcatcaagccttcctctccaagatttctgaacatcgaattcctcaaacgtatgaggaggcaatggagatacaagaatggcgggatgcggtggccgaggaggtgaatgcaatgaagcgaaatcacacttgggatgaagatgagttaccaacgggaaagaaaacggtgagctctcgatggatattcacaatcaaatacaagagtaatggagatatagagagatacaaagctcgcttagtagctcgggggtttacacaaacctatggatccgactacaaagaaacctttgctccggtggccaagcttcatactgtccgggtagtcctcgccttagccacgaatttatcatggggattatggcaaatggatgtcaagaatgcatttcttcaaggcgaactcgaagatgatgtgtacatgactcccccacccggcctagaagacacaattcaatgtggaaaagtgttgcggcttcgcaaagccatatatggtctcaaacaatctccacgggcgtggtaccacaaactaagtcggacactcaaagatcatagcttcaagaaatccgaatccgatcacactttgttcacactacaaagtccccaaggtattgtggttgttctcatttatgttgatgatcttatcatcacgggggacaacaaagacggtatacaaaccacaaagacctttcttaaatcatgttttgatattaaagatctaggtgaactaaaatattttctcgggatagaagtgtgccgctcgaatgcgggtctttttttatcacaaagaaaatatactcttgacttgttgaatgagacaggttttatgaattctaaaccggcgagcactccacttgaagatggctacaaggtcaatcgaaagggggagaaagaagatgagaaatttggcgatgcacctctttaccgcaagcttgtaggtaagttgatttacttaacaaatacaagacctgatatttgttttgctgtgaatcaggttagccaacatatgcaaatcccgatggtgtaccattggaacatggtggaaataattctaaggtatctcaaaggcagctccggacaaggcatatggatgggaaagaactcaagtaccgagatagtaggatattgtgatgcggactatgcgggtgatagaggagatagaagatccacaaccggttattgcactttcatcggaggcaaccttgcaacttggaagacaaagaaacaaaaagtggtctcatgttcaagtgctgaatcggagtatagggcaatgagaaagcttaccaacgaactcacttggctcaaagcgcttctcaaagatcttggcattgaacaacacacacccattaccatgcattgtgacaacaaggccgcaatatacatagcctcaaactcggtgtttcatgagagaaccaagcatattgaagtcgattgtcataaagtccgagagaagattgtcgaaggggttacgctaccgtgttatacaagaagtgaagatcaattggcggatatcttcaccaaggccgcaagtctcaaagtttgcaacttcatacatggcaaactaggacttgtggatctatctcactcttgatctcaagttcccctaaccatgaacatcacactctttttcccttagtaaagttttctcccatgtggttttctctactacggtttttaatgaggtgatggatcatgtgttccaagcttagacttgcgtgagtcttacgcttgagggggagtattgagcaagacctaataaaaagcatccatccgtacaaataaagaaaagaggccgagtgttgtgtgtaagctacaaggtgttgggccgaacacattgagaagcctatagggagcttctagaatgagtgaaggcacacaaatatctcttgtagccgttgaagagaactcacgagtggtcttagcttcatggtcaaccaaggacctgtcactctcaccattaagaccaaggaatctcttctctcatgtctctttcattcgcatgttatgtgtaaacggctatgttccctttgtgtgtccttaaaatacaatgtaaacacacaaaggtaactaaccaattctagtaatatgttttggtcattctcactcataacaatgctctcttgttcctcatgattctcttacccttactcttactctttccaaactacaattccgcatattctttcaagaagtccctcatacgtattacaccgggtggatatatagagatg

SEQ ID NO: 24788 - DNA, 3003 bp, Unknown
  misc_feature (1)..( 3003): 2750-1469P.txt file - cDNA_ID_2185956; gDNA_ID_1974073; Annot_ID_180297
ttggcgcttacgtagggaatcctttagcttctgtaattgcttcaaattggaaagagatgcgcgagaactcatcctacgatcatgcttcaagcatgtggccttaccaggtggagaaatccctaagtatttcacgtatcgagcttatggagattccctaactgtcactttacctcagagctctctttctcaatacttctttccatttaaggcttgcgtcgtggttgaacctccctccgagggcaagggtttttatccatccttgaaggtaaatgttggcttcaatggcaaacagtatcagaaatcattttttgaagatgcagacctgcagttttgtaagacggatcatctgtttttctgttccttcaagatctggtctgaatggactttcaacgatgtggagtttaagttttgttgctccaataggatcaaagaatgcggtgtacgactcttgtatgtctatcaagaaacagagtacaaccaacagactacgagaagcgagaagcggatgggggtatcttttgacttttgattagagctgaaaattataaagctatcttttgacttttggtttgatttttcaggatcgaaacaccatagggacagactatttaatagaatcgatcgtttgatttataatgcagatgacatcggggacatctgaagaatatatcaacttaccctatggccaaattgtagcggactcaggattggccgctctaaatatggagctttcgttagggcagggagaagcatcatcatcaacatctctagagggggaagctttgtatgttgattacatgataactgaagaacaagatgaagaaattcgtatcttgtctactgattctggtaactgaagcatcttatcattctgttttactctgttttaggataacttgggatcgactatgactataatgataatgataattaactgcagatgatgaagatctttaggagaaccaaagtccgttacattatccagctctgcgtttgttttgaacatttcacttttcctgaaagaaaaaatgtttcagaaagccatactttagcatattctggaaaaacatctttggcatggttttgttttgtaaaaacatattctatttttaagaaagacattgaatttgggagcgtacctgcttgagtgcaggtactacccaaaatagtcttgcctttttaaaacatagatctcaatgtttatgttagtaaaggttgtttttctctttattagcaatgaataaatcagactttgggtacagaaaacaacaagaatgtgttggaaatattttacatagcaagtcactcgtcatcagcaacatttgcatatccgctgattcaatagccaaaaggcaaaagcgtttttggcctaacttcggccaaagatgtaaccagcataaggagcaaaaggcagatgatggagcactgacaactagaaaacttttatggttccatgtccagaacagcagaagcactctgttcttacttctctctgttttgcttctttgaaaaattcgctttcctgaaaagatgtaaatataacagtcttgtcttttgaaacacacatatctctctacgtgtatgttaccaaaggttatttttctctctttaaatcaatgaataaattcggtaaagaaaaatgtatttcacaagagaattatcaacaacaaaaaagtgttggaactaaatttttaaatagcaacctcatcagcaacaattgcatcactgctaccgtggcgtttcctacactcacagtaaaaaacagtgattacaacataactcagcaccaccactgccccatacatacaaaaccagcttccacccgtcctactcaccggccacaaccaccaaactcaatcacgaccctgaggtcaagtgagctagtcattgtcacatttaggatgtgaaagctaatttctctggtgcttattttagctgaattggtttgtgcaggtttgcttcagatatttgcaccaatgacctaataataataaataataatataatacaccatcagtcgattccactcttttttcgttcttgccgtcttacaacgaccttgtgattcctaggaacataaaggacattgagtaactacgaggcagtgaagacttatgggaagtagccaagctgcaatcgtgaaacctctttgcctgaggtaaaatctcatcttacatcccttataaactctccattcacttgattgctgaatttgtgtgacataatacaaatgctctgttcttctttgccaccagcatatggattcaaatatcacataaaatggttttcattgttagtccagaacatgatataactttaaaatgtaaattactgataaagtgatttgatagatgatcgtgagagatgaattcacatagatttttgtgttgttgtttcaggaattgtacgtgtcaaggtacttgaaggggatggagttgagaaaatggggagaactcaacacaaaacgcagagagtttctagaaatcttcactccactgtccatccacaccacaccacacaactctagaaagctaaaagagttttttttttaacaaactagatagttagtgttttcactatattattatgtgaattaaaatcctcataattgatatacttacaaattctcctagtttctatgcatgtaagtatagggaaacaaagactgaattccccactcaacatgtttacgataagctgtcctttttacaataagcaaagaccttggacaccaaaataaatctaatattgatttaagaggcatcataacttgtagttgagcggttgaatacttgaaatcaggttttaaatgcttcattggccttggttcgaacctcattacaaacatttcgctacatttttatatttatggcctatgggcaaaaaataagaagtttccttgcgcatcccacccttaaggaccggcctcacagtaatcactctaatcaataatcactgtgtattcgatttactgtacttatcttctcctcatcatattccatg

SEQ ID NO: 24789 - DNA, 3003 bp, Unknown
  misc_feature (1)..( 3003): 2750-1469P.txt file - cDNA_ID_2185964; gDNA_ID_1974073; Annot_ID_180299
ggagcgttttgggtaagtaactaagtatgattaggcatgaaccttccacattttcaagcataacgatctgaaactgctgaaattattgctttatttagggggaaaaactgtataataaagcatcaaggctgtctcaagaatggagattctgattgcatcatccttgagcaccttgaacatgacagacctgattcattgaagagagaaatagatgtgtatcagctgcagtggtacggctactgcatgttcaaagctctatcgagtctgcataagcaggtatgcagattttggactgaattatttttagcattcatatttcaatcacgcaactaactagttctattttttctcttcacaatcttgaagggtgttgttcatagggatgttaagccaggaaacatcctcttctctaggaagaccaacaaaggctatctcattgattttaaccttgccatggttagcattttttgtcacccttctcttatcaaaattttcctggcgacggtttttggttagtgtttcttactatagaatttgaagtaaccgaaaaaaactgcttattcaattctaaggtcagtgtctaacagaggcactgaaaaacttgaggaacacaaacgttcatgttaaaatttactgttatgttcccttccccacccactgatattaatctcttttttttcctgcatggttcaattaggatttgcaccagaagtacagaagagcaggtaaacttctcccctcatgcatatgtgctgtacttggctataaaatatggaaactaaagctatctcttgttatgttctgtagataaatcaaaagcagcttcaggtcttcctaccgccagcaagaaacatcatacattggttaaatcactcgatgcggtaaaccgagggaccaacaaaccttctcagaaaactttagcgcctaatagtatcaagaaagcagcgggaaagacaagagctcggaatgacatgaccagatgggagagactcaatagccaaggggcagaagggtctggcttaacttcagctaaagatgtgaccagcacaaggaacaacccttcaggtgaaaagagaagagagcctttgccatgtcatggaagaaaagcgcttttagattttctgcaagagacaatgtctgttccaattccaaaccatgaagtatcatccaaagctcctacgtctatgagaaaacgggtagctgctcttccagggaaagctgagaaggaacttctttatctgaccccaatgccactgtgctctaacggtcggcctgaagcaggtgcagttctggtgtaatcattgacttttgtttttgtttcagagtttaatttaaaccttaagaagagtttttctgactttactaggggacgtaattgagaagaaagacggtccttgctcaggaaccaaaggcttccgagctccagaggtacatcaactgtaactatagctcacttctcttaatacgagttaaatatgaaaatcttgtgccttcagactaaagttgtaggcctgagctactcattagcacatctctgatgggaaagctaattctctggggctgttcttggctgaattggtttgtgcaggtttgcttcagatctttgcaccaaggacctaagatagacgtgtggtctgcgggagttactttgttatacctcataatgggaaggacacctttcactggtgaccctgaacagttaagatctgacttgaatgagtacaccatcactcggttccactcgtttcttctttcttgccttcttacaacgaccttgtatttcccaggaacataaaggacattgcacaactacgaggcagtgaagaattatgggaagtagccaagctgcacaaccgtgaatcctctttccctaaggtaacatctcatcttaccactcttctgtactctccattcatttatgagacacatatacttgctctgttctttttaccgccagcttaaatatcacataaaagggttttcattgttagcgttttgtgttctattgcttctactgcactcccattacagaacatatatatcttaataatgtaaattgatgacaaagtgattaaatagatgatcgtgagagatgaaatcaggtagagttttgtgttgttgtttcaggaattatacgagtcaaggtacttgaaggggatggagttgagaaaatggggcgaacgcaacacaaaaagcagagagtttctagacgcaattccacggccgcttcttgaactcgttgatagatgtttgatagttaacccgaggcgacgaatcagcgcagaggatgctctcaagcacgagttcttctatccagtacatgaaacccttagaaaccaaatgctccttaaacagcagcaaatgcaatcgcagcctacagttgttgctgacgcactaagcgaaactttaaactaattatacaattcttaaaaactaaaagagtaatttagcaaactagagagttaattttcactttagcaaactagagagttaatttaatttagcgaactaattatattttcactttagtatacaattcttagtgttaatttagtattttcacttatattatttgaattaaaatcctcataatcgatatacttattctcctaatccatgtgcatgtatgtattgggaaacaagactttgatattaaacaatcataagtacattcttacgataaaatgtcttgtacaaggacaactgacacccacaaaatatgtgtgtttcaaaatatctgtgtagaggaaacgaatgtaagtttctgtctaattgcctagaacttgaaatattatttctgtcttgtacaaagactaagacttatcataattaagtgacaaccacaaaaattcaatctctaaaaatatctttgtatgtagtgtaaaaaagctttcgaggaaagtaagacgaagtttctcctctctttctcacactatgtcttgctgatttacttctcttaaaaatcttcgtctcttctctgagttcgctctatcatctcccatg

SEQ ID NO: 24790 - DNA, 3000 bp, Unknown; identical to SEQ ID NO: 9844
  misc_feature (1)..( 3000): 2750-1469P.txt file - cDNA_ID_2186077; gDNA_ID_1974087; Annot_ID_180577

SEQ ID NO: 24791 - DNA, 3000 bp, Unknown
  misc_feature (1)..( 3000): 2750-1469P.txt file - cDNA_ID_2186177; gDNA_ID_1974086; Annot_ID_180568
gtatattttttttaaaacaaattttaatcttatatatgttattttgcaatatattataactgtttattttatcataatatattggactttgattctacccatttcatattaatggataagtactaattttttatataaaaaaaatatgtatattcatatcaaatctatatcttagtaataatattttttaaaataagaaaacatttatttacaaaaaaaaattgaaaaacacaaaaagtttggaaaacagacatttgttaaagtataatttttatatatgttttaatctcgttttgaatgactaaaagtaattcatataataaaaataggttttaaaactaaaactcctttacttacaatttttcaaaaaaaaatgtagatctaaatactcaccgtttttcaccaacatcgaaatgatttttttttctccactcaatgagcaacgactaacaaaatcgttcttcaatgatttttaatattacagattaatggagacaaacgtacaagaaatctccatcgatctataattagaacccttcattgtgattatacgtataaagagaaatgtcgtaggtcgtagatcgttgaaagtttccaaaatagaaaaaagaaatatcatatgtcgtagatctaataaagatcagaagatattatttatgtaagagttatcataatttgaaattaataataaatctatactattaacagagaatgaaatatatgaaccatttgagccgttttcgtttttcgtggtccaggaacaaaaaaacaattaagggtataagcgtcatttacccatcgattgttgtcattaatatttcattaaccctatgatacaagaatcggaagataaaggcaagtactacaagaatcttcagaagaaagttctcgaatctgtgaccgaggtcagtgacatcgacgccatcattgagcaagctgaggaggcagagtgatgcagggcatatttcctcttcttaatagttttctattctttttttctagaagtttaacattatctagagtttagtatttttcctttatttagtttccaattccttgaaagattaggtttgatgttttattatatatagttgatagcctaagctttgtaaggacacaacattattaatttaatcaaagagcttttaaactctaaaaacccttattgcggctagaactcgagagttctcaacggagtaagaagacatagattcttgggcattcttagactaaacaagtttctttgtgttatctatcttggtttacattacagagcgtctttacaccattaatcatagctcctccacacctttgtccattaatctgtaagctttctcttcttctaatttcctcttttttattgttctttgattgattaagtttttgtggttctgtttgtataagttcaatatggtagtgtcatcttgatgttcttatggtgtgctgtttctctaatgtttttggtgaaacagagacacaaattccagctcaagtgttataagatacatgccaggtacctatcttcaagactctttcatttagtaacgactatttacctcactcttctattcattctactcctgcttgctcttggccttggctgcttactctgtggttatttaatctctttattgcttcagaacatgtctgttattggattcgatatcgaccctgaatctcttgaaacagcaacactaaatgcagaggaacttgaggttttttttgaaatgaaatgagttttcttttggttgtatagcaaacaccattgctataattggtttgttttgtaggtgcagatagatttcgttcagtgtgacagtacaaagctagagttaaaaggtactatcctcctttcatttttggtacaatcctactcgtaacttttttgtggctctatgaatttttttaggtacaattgttgatactgttgtaatgaaccctccatttggtacacgaaagaaaggagctgattcgatttggtgatgatgatgtctatgtttgagtaggtcagctactgttaggcttatcgatggccaacaaaacatggtaaatgtgactcaaattcttggaagtgtagctttgattctgcacaataggactcataaatttccagtttgttttgctctctatagcttggtttagtgtctaaagacgaagccgttcgaatggctgatgatgctgaacttgatctggtatgtgtttccattgaaatgctcttacttgtggacattagctattcggtatatgcaatggtttttgtacgatatgagtcagaactcgaataagtgaaaatgagctaatagatggaagattgaactagaattaaagtaaatattagaagaaatgctctgataccgtattagcataactgaatttggatgaatgatttatattattctcttcttgaagaagaagagaatgtacattggtgaatagctgctgctgcgtcttcgtctactgggtagtgagatcttgatgcctggttcaaagtacaagaattatcatttgccattgctttagctacatatgcagtacactattcatgatttagatatataggcatatactttggctattgtatacgttacatagataaactgaacgtacaatactgagtttacatgatctatactatttgttgtcatcaagagaaggttacaaataaattgaacttacaagcttcccattgttacacgcttccaccattgaaatgagtttcttcccattgtaaacaagttaggctaatttcaatgctcctctgcactagactaaacaaaaaattatcaaaatgacatccataagcgttggctgataggctcacatattgatcaaaatgtgtagtttatccattattcactgctaaaatctcatgttctgtttagtgcaattggtcaaatctataatattgaaccattggctaacgattgatccaatgtcttgaacagcgtgctacaatcaaagtgaacggtaaatacgcatatgaacaaggcttcagcaatg

SEQ ID NO: 24792 - DNA, 3000 bp, Unknown
  misc_feature (1)..( 3000): 2750-1469P.txt file - cDNA_ID_2186181; gDNA_ID_1974086; Annot_ID_180569
acgagaaaaaattttagcgggaaaattattttttggcgggaaaaaaagtttggcggaaatatttttttggcgcgaaaaaaaatttggcagaaaacttttagtttctaattacatgttcttattagatgagggtaatttggtcattctgttcaagggaagagaaatttttaaaaatgaacaatataaaagggtattgttgcaaaagggtagtaaaaaaagggtagttttgtaaatctccttttttttttgtggttcgagtttttaagaggtaataaagatttaaaacttgtattatctagaggttgacccgcggtataccgcatgttaatatttttgttcgaaaattagagatttttcttttatttaatattatttatatgtaaataacatattcaaggggtacatcataagcctatatttttattaaataaaaaattgaattcttgtttttaagatgatctacaggtacatgctatttttttatgtatgatactatgatacaccttaggacgattttattaactaatttgttttttgaaattttaagttatatatttgtttggttaatatttttttttagtgtttaaaattgtataattgtattttgattgttaattttaggatttcattcatagtataccatcccgtattaatatcaattcaaacccgtcccaccatataacctagttccatgaaattagtcataattttgtcatttttatgaagtttgaatatttataatattagaaacttcaaaaaagttttaattcgatccaaatttcataattgcatattgattgttacatctaagatttcacccgtagtatattgcccgtatttatatttttttaatatttatatgtttaaacttctaataaagtttaaatatttacaaaatttaaaacttcaaaaaaaattaaaattattaatacttaaaagtttttatggtcttaaaaattttaatacttaaattttaataaagtttaaatatatataatattttaaactttttaagtttttagttatttaaaataaagaaccggagtaaaccgaataacacttttaattttggatgtctgatatatcaaggttcctgctcattcatattcaaaaatattttagtcttttttatagtatgactctaaacgaattcctaattttaagcaatgtgaaatattgtacacttatttttttccatagattgagtattatatgtctgttttttaaaatttgaattgcatcatatgcagaaaaattaaatattttattaactatatgtattttataaataaattcaaaataaattagatataagaacaaatatagtaacataaaataatatatttatatctaatgtcgatatagaaattttagaaaattagccttaatcgaatatagttcaaaaaaaagatttaattaaggataaaagtttaggaaagagttaattgaagtatttaatgaaaactaacaatttgtaagtatttagacatataatatttggttgagtttaaatctgtaaggactaatattgacaataataaaaaggtaagagatttttggccaaaaaccctaccaaaaatgtatatatatatatatgtccaaatatatttttttcagaaatttccaaatacgtatccttttaatactataaaaacacgttccgtaaacgtcaaataaattcggaaacaaaaacattctcccccgttgtagcgcagatccaatcctagtaagctaatacaaagtagtatccaattcctgtgaaacatttgcaaacatatatagagcatacaaaattgagaactttgtttaaagcccacaaaaccctatcgaaattgtgttctcatcattctctttggaactttgttcaaacgcaaactaaattgagaaacaagattaagatactatatgtgacaaagattatctccacccacatgattcacaacatataactaaagttaatattattatatttattggataaagcctgcctaaatagaaggatgtaacaaataaatataaatatttattaataatatttgaattctaaatagtaattcatacctttttaatatttaacttagtcatattatcttaaaccaaattaatatctaaattgttgatattttaattctatacagtaacctccacattttttaattttaatttagtatattttttttaaaacaaattttaatcttatatatgttattttgcaatatattataactgtttattttatcataatatattggactttgattctacccatttcatattaatggataagtactaattttttatataaaaaaaatatgtatattcatatcaaatctatatcttagtaataatattttttaaaataagaaaacatttatttacaaaaaaaaattgaaaaacacaaaaagtttggaaaacagacatttgttaaagtataatttttatatatgttttaatctcgttttgaatgactaaaagtaattcatataataaaaataggttttaaaactaaaactcctttacttacaatttttcaaaaaaaaatgtagatctaaatactcaccgtttttcaccaacatcgaaatgatttttttttctccactcaatgagcaacgactaacaaaatcgttcttcaatgatttttaatattacagattaatggagacaaacgtacaagaaatctccatcgatctataattagaacccttcattgtgattatacgtataaagagaaatgtcgtaggtcgtagatcgttgaaagtttccaaaatagaaaaaagaaatatcatatgtcgtagatctaataaagatcagaagatattatttatgtaagagttatcataatttgaaattaataataaatctatactattaacagagaatgaaatatatgaaccatttgagccgttttcgtttttcgtggtccaggaacaaaaaaacaattaagggtataagcgtcatttacccatcgattgttgtcattaatatttcattaaccctatg

SEQ ID NO: 24793 - DNA, 3000 bp, Unknown
  misc_feature (1)..( 3000): 2750-1469P.txt file - cDNA_ID_2186192; gDNA_ID_1974085; Annot_ID_180515
agttgcctgtgcgtatatttctagctagttttctacaaatatagatgaaaaataattaatactaacagcgatgtgccgatgtgtactataatgttcaatgtatctttacgatatatgagttatttattgacatggcaggtttcgaaatgtagaaaacgtccacgctgacttttgcagaagtgatccatttgtttcgtactcgtacatatacgataacaaatactatcctatcatgcactaaaaaggtttagttctttggttcctaatgccaattaagtattaattttaagactctattatatactatagtctatggatgatgacttattgcagccgtaattgtatattctggttataagttcgtaaactttagattatacacaattaatccatattccataatgttattgaattttggtttagcataaaccgtgcctcaacaagtaggatgagattatatgcgcatggttatcggaattgaaaaaacaagcaaatcgtattggtaacactattttagaaaatttagttctccattttacttgatatttttcatcagacagattctacgaatctaaccaaaactcccccaaaaagataaacctcaaaatgtacacgtattagaaaatacacgtaaaagtgacatcaccatgtatatatgaaactagtggaagtgtatttgttaggtgagcatataatcgtatcgagaaaacaatagtacataattgtctaaaatcatttattattaattcgcttatcatggacatttgctgttgtttatcttttgtaagcatttaactatcagtataatatgtcatctatgtttgcttcttaacattatattaggatcatgcgacacatttggccatgttcgacggagcaaaagcgtgacctgatctctttgaaaaactaacaaaatcacgatctttaggacacatcacccattgaaagactatcgtagagacgtgtgtgataactaaaagaaagttgtgttaattaagaaactatttttggttgaatttttgtttggagtattaagttaaactaattaatggacataggacgaatatttagacatgtgagaaaacctaataagaattttcaattagaggataagatttgatttcataatatatcattgaatatggactaattggtcagcaccactccttgacagacctaccgtgtccttcaattttttttccaacaaatccatagtagttttgttttattttacgttcctcaacaataatacttgcctagttattaattcttgttttaaaagcgattaaactgtttcttctcacatttatatcaactaatttatttttattttatttttgagaaaaatcaacttaatttcagtctataaattagtaattagttttagttttagtttttttttctaatattctaacttgttgtttctgaaatgagttttttttttcatatcatgattttaatataaaccaaaaggatagcgatcaagaaacgaaacataatgtacccaatggaagagacagccaacatcagaaagtcttcgcatctcattttaaatgattaactcattcatttgaattattatatttaaattgtcatcatatgatatggatctctctggataataattgtcttaacaatcactttaatatttcgagtgcattttttagaaattttttcttttaagttttattaatataaaaactatattataagccttttttctaaggtcaatattttggttagggctttcgattaattatacgtatggactttaacttaacaaagtctaaatttgtgtttaatctataactacgatagttttgtttgcttgaattacgatagttgtttgttttgtttgtaggtttttttaactctgaggcttgttttgtttgttttgtagatggttaattatgaatctcatttcttttaaaggtttctcaacacttgaaatgattgccatattgaatcaaaatcttgatattcttcaaaattggaagtgacgctcttactctattagctgagagtaagttacgctccagcaaattcaggatcatcataggaatcttataaaaaaaaaagcttccgccgttccgcccctgaattatgaagatgaagttcagaattcttctcatgagtcttgagtctgaatcttgaccaaaaaaaaaaaagtcttgaatctgcgtacgtaattactacatttttttaaaaaaacgtcttctcctaaatcatgtaattactacttttaagaaaaatgtcgtctgaatcttgttattagtactttattaaaaaatcttctctttttagtctatgttctgaaatgagtaacctcatttttgcatccaatgcgacgtaatactagtgcttctttaatcaaaactataaccccatttctgtaggtactttttttagatagaactatccctagtgaaaggtgcttgatatgaccagccttcttctacttatttaaaaggtacttgatatgaccaatcacttgatataaattaaagaatatgaccaacagaaattaagaaaaaacattgtaccggccctgctctcatctctttccaatcttatatatatgctttgttcctttttccctcaaatggttcacttcaatagtagatactgagatacatcaactttttatttggttgtagaatgttagcataagtcgtactaactacatttacaccgcatgtagtagattatagactttcatttcttcttttattttctcgtcaccttttttttttttggacaaaatcgtcaccaagtatatatactctacagttgtagtccatcatctttttcctttattgggctttaatatggcccatattacatttgattgataatatcggcccaaattagtcactggctttctcttcaagctcgaccaaagaagaagaactgttctgaacgcaggcagagattcttcgaacttgatatttgggaaacttgcaatccgattctgtcaccagtgttttgccttcataaatg

SEQ ID NO: 24794 - DNA, 3000 bp, Unknown
  misc_feature (1)..( 3000): 2750-1469P.txt file - cDNA_ID_2186237; gDNA_ID_1974085; Annot_ID_180529
acttgtccagaagaactagacaaacctttatacaacgaggcataaccaccagctctaacagttccagtcccatctaacttccctctgtaacaagatcctggaggcttagatacactcttagtaggcgtattctgagtcgaattggtctccgaataagctctcccaacaactctaccagttttaggagtcgtattcaacaaagccgcgttcgttgtattagtgatagaatcacacttatctccccaaccaaaccgattcttagaaaacgccgctgcggatcgatacttatcaggcgtccgtaaaggcaatgctggatctgggttctttgctctaggcttagacggagttctatcaatcttacttccacactcgtgtttaggattcttcaatgaatcgttgctggttagagacaaaagcgaagctcggagattttcaggaacattctcgatttcgtcatcgtgattgtctgaatctctacgggaaagcttggtctcctttgacattgtattaccctaatctgaaacaaaacccagttcaaaatttatgaaatcgacacacgagaaatgataagtttagaaacttggaatccatagctaaagctaagaagctcgttgggtttaaaggctgaaatagatctcacctgtgtagtaaattgagcaacaaaatccaaaatttgtcgagcttctaaagagttcgctctctctctttctctctcactccctctctctttctagattcgcatgatttgagcagtgaagcaggacggagaaaggaatgtaaaagaaagaagatgaaatggacggctgagattgcatctttatgttttgtactttgaggcgctgttcgaatttgaatttggaaagggctttctcacgtaataaagtaggcttgtagaggttagtttcgtaaatgagaaacctattttcttttattttttcaaaaatattcaaacggctaagacattgaaaaaagcagtagagactagagagggtccattttaattcgaattatctcgcctcgtgattaaaatatatatttcctagcggcttatgtcaaagttcgagataaaataaaaaaaatagactaattttgcgtaggatttggtttggtttgggtctgttactataagaatgaaataaagagactatacaatatacaccgtaacaagtatatcctttaattttgtcatatgacaattattgttcttctttttctttttggacatggataattatattttgtttcattttggtaaattagggtcctgttcgtttgcctgtgttcgtttgcttgtctgtgttcgtttgcctgtcgctgacgactgaaaccagcgacaacgaccaaaagttgtttgtttgcatagcgatcaaaagtaacgacaatcgccagcgaccagcgaccgcaatttttggtcgctgaaatttttagcgatcagtcgctgatttcagcgattagtcgctggttttagtcgctggatccaacgacatgcaaacgaacaatttagcgatcaaaaaatataaattaaagaataattaaaaataattaaattaaacagaattaaattaaattaaacttaaaataaatgtctttttgcactctgaacggttgtgtcttttaatcgcaactttccgtaaaaaatattgatggttgttttttctcgcttgtgtcttttattgcaaccttcctatattgtaattttctgtcaaaatatttacagttattttttccggttagttatatatatactattgaataactacgaaatttagaatatgcatcatttggagttagatttgttttaaagaaattattatataaataaatttataatatttttctctgcgatatcaagaaaggtttgagttctagtttaattaaaataattcttattaaattaagttaaaataaattaaattcaaataacataaactaattatagtcaaattaaatttgataaaactaaaataaataaatctattaatttatttttctcatggtgtatgatatatatgatttacattttgattttaaaatataaattagtaccaaaaataattaattttaaaaaaaaatatagcgactgtttatagcgacagtcaaacgaacaacacaacgacaattattagcgattgttgatgtaattggtcgctgagtccagcgacagacaatcgaacaatatatgttgtcgctggttgctgtcgctggtcgttggtcgctgtcgctggatccagcgacaggaaaacgaacagggcataggttttgtttgttttatttagtatttctaacgtaaattttaaaaaagcgccaaaatctagaagaagagtaatatgcgagaaaatcacttttactcttatttatttacttgtcttgccaaatttccatcaaaattattaattacttaattatataatttttgactaattatttactttattggacccgggatatgtaactaaatgggcttttattgggctgtattctgtggaccattaataaacataatctttgaagtgcaaaaaaaaaaatgggacccgggacaactaaatcagaatcggggcgggttataaacttttccctataaattaccactccgatgttaatacccgcctctttgatccctcagacgatttcttctttccgttgtatcttccaatcacccgattgagctccgcttcacttcctccggctaaatgtgtacatactctcaattaggaaaccgccaatcccacataacgttgaatgtcgtcgtctcggttagatatcaacgagggttttgttcttggttccttactaaacaacaaaatttgacgaaaattggtacttgggtatgaacgttgttattccctaattgtaccggaaaatttgatggtggtatgtttcccttgtaggttttcgttgagtcgtggatttgttcttgctcctgattcttttcagtagttcctttgctatttgggaagcaaaattgtcacgccactctttgcattcgagggttttattatg

SEQ ID NO: 24795 - DNA, 3003 bp, Unknown
  misc_feature (1)..( 3003): 2750-1469P.txt file - cDNA_ID_2186249; gDNA_ID_1974085; Annot_ID_180533
ctatttttattattataaatgcttcatatattaagaagaaaagttgtaggcttgtagcaaccgattcatagtggaaaatccttttttttttttttatgaaaatcagatcggccgcaaaaacaactttcaccatgcacgaagctagaaactgcattgatgtaccgtgtacgctgtttttaatataaaataattgcagttttattagttaggctacaaatatgaaatcaggagaaatataccaattaatgtacgtcctaattgcttggtatgttacataaccttaagttgtataatatttattaatttattttatactggagttgatagctttaaaagttgagagcaaagtaacttgagaccattttagagttagcaaagtaatggagaaaataagaaaaatcacacgcatgcagcatgatgtataattattggaaacatgtatttccaagaaagtaatcagttctctgtacgcctgaattcgattttcataaagctcacttccttggattgctagagcaaacatttatattgatatctgcgttaacatcataacatgtgggtttttagtaattctcaacagtatgggtatttttgctctctctagagagggtaaatttgtgattccatctgcaaattattcctcctatatatatatagaacgtgatgaatcaaatttcttaagttgcaagccatgactaatcttgatgagtttcttgaagagctaagttctattgaatcacattctcagaaaatcgtgaagatagatgagcatttaaaaaagttggatgaagagacgaaagaagatgaagatgaagatgcggcgaagataattcaagatcggagtaccgcgagagaagcaggttaatttcttctccttcaccttgtaatttaaagttgttcctctctcattctcaaatcttgttgggtcttggaaacgcagaaattgctctacttatggatctccgtcagaactttcttccaccaccatcgatgtcatcctcctctcttcaaccaccgtcatcgtcaactctcgcaccatcgtcatcatcctctcttcaaccacccgcaccgttgatagacttctttcggtcatcagtgtcatactctcatcaaccaccgtcatcttcaactctcgcaacatcatcgtcaccgtctcttcaaccaccgtcgatgtcatcctcctctcttcaaccacccgcatctttgagggaattctttacgtcgtcagtgtcatactctcatcagccatcttcatcttcaactctcgcaacatcttcgttctttccgtcgtcaatgccatactctgttcgacctcccgattcgtctgatcgaccatctttgagggaattctttccgtcgtcaccatcatcctctattcagccacccgaatcatcatcatctaagcgagcacggcttagtaacatctttccgtcacctttatcctcctctccgtcaccgtttgttaacccgtttctccgtccgcaggcccaagaaccaacaataccaaatttcataaacccaataccacagatctctccaggcctacctgctctattcccaaaccctaaccctaatcctaaccctaacccaatcccaaacccaatccgaaacccagacttggtgtggacaaataggcttcaactagtgtttgatgacgcagttgtcagacttgggggattattcagtatgcaactttataatttttttatttattttgtttattctttcaactcctaactattttcctaattttttttttttttttcaggtgcaacacccaaagccataaacgaactaatttctgaagagggtctcactggtgaccagatccgtagccacttacaagtcttgcgggatcgtcaaaaggctattgcagacaaattagccttggagtgaagaaaatattgaagatgagagataggattaaatagaaagagtgatagtatagaacgtttctttttcttttgttgttaatcttgcatattacaaacaattactatatcataatagaatttatgttaatgttggagttattaaaaaaaaaaaagttaaccataataacattcttactgtacgcatgagtgatcatttatcacaatctattagagcaaccccaatgggtgggatgatgacagtccctaaaaaaccaaaaaataataatattttaattttttaacatagtttgacaactaaaaaacctacacatgtacatttaatcttcaggtcccttatataagggtttttggagcccttctctcctgtgtcccttccattttaattattttttttttttttatattgtaagggaccttaagagagaccaccattgctggtgcaggctgtagaaaaatttgtttagcttctccttcttttcttaattttgacagataagtctcagcctctctccccccataagggtatgtcttgacatttagattcgttgaatcaaaagtttttcatgtttgttcatattgtggtctaatcttcttaggcagatatgacctcagggaagaaagattattatgagttgctcaaaactacaatctttaaataaatatttgggtgatgaaacttctagttcttttttttttttggtctaaaatgaaactattacttctagaagagaaatatccaactcttttttttattccaagcaaatgataaccaaaaatgcaataaaggtgttaatttttatcataaatatattctaactatggtcgtaacttgtaatggaacacctaggcattttttatttttttggtgcacacctaattcgaggaaaaaggttgaagtaatcataattacataagtttctaactatggtcgtaatcgaacacatctaaggcgtagtaataattaaggaaaaaggttgaagtagcaaaacgacgaggttacgatttgtaaattccataaatgccctctctcattttcaacctcaaagaatcgtttttggctttcatcagccgcttcgtatttttgttttcttcagtaacggaaaaaatg

SEQ ID NO: 24796 - DNA, 3000 bp, Unknown
  misc_feature (1)..( 3000): 2750-1469P.txt file - cDNA_ID_2186276; gDNA_ID_1974095; Annot_ID_180679
attcctatgttgtatgtgcctaattggtagctactataatgtacgaatttttaatggctaactactataatgttatgtatagtaatatactctaaaactaaaatttaatactgccgaattctagggttcattatcgacagattcaatttcagatctaatcatctcttctctcccctttcctcttttctcttctctttccaaactctcgataatcttcaagggttatcagattggttcgtgattaaggaagatggcactccaatttgttgatccccttgggtcggtaagagtttatctcacttgattctcgttcctagatatgacctcttgaggacggataccggtgttctctgtggttgatgctcgatttatcctgtggagttgcaatcttgctggaaagtgttgtttgattgggtaagttctctgaattttaactgttttttttctaagtgactaaaatattgatcaagctggtgttgattttggcgctggattgaatatgatggttaaggaattcttcagaaggttacatgtaacgttccgacacgacgagaacgcctctgttcatttatcaaagcaacactttctctggtatggaaacgatagaaaggtatgttcaacgcttcaacacttagcatttcggttttttgcttattgtatcaaaagtcgggtactactcatatggtaatctattttcagaaaagtatgcattcaatgtgtccaacgttgtggtcaaagcatcaaagatggcttatgatgtcaattttccgcctcaatcttttagggacggatggcaagtgttttcgttcctttatgtggctgtcttcttcaagcgcaaggtcaatatccaggcgatatgagatattgtttctcctgcaaggttggttaataattgatcaagtatagtcaccattcctttattgaagagcttaaaaacctgcttttttgactttgatgaaatagagtaaataggaaacatgattcacattgggtgtttctgaacccttggcttggcggaggtccggtggcatgttgaaacctgcaaatcaacttaggtaagttaaaacctgcttttttttattatcaaaattctttttttaacttgcaaatgtggaaacagcgtgtttgagtaagcagactagagttggataattagacactgttggcgtgtgttcttttaagatgttatatcattgccttctcaggtagaggatatccacgaaaccaataactaggaggcagcgtttagagaaacaaaagcattaaaagaaatgaaagacaaggaagagttaattaagccaagttctttcttgaagattgttggtgtgttctattaagatgttatgtttttaggatgatgatgtattatgttctgttaagacaagctctgttaagatattttttaattatctttttaattttattttgtaatacagttcttttttaaatatcgtttcacaataactaaatgtagtttcagtactttccaaaaatatatttaaaacaattattaacaaatataaatattattattaatataaatactgcataaatacataaatattgtatgaatacataattacgactgtagccgcaacatagtcttcagttagtcacttaaattaacgactattctatcactacactacatctatttatatttgtgaaatttaatcgtaaattagtcattaattagtcactaaatttgacgactacgttacgactatacttacgactacaaatattagtcgtaaagtagtcgctaattggcgactatttttacgactatacattttagcgactctcgatttacgactacatgatttagtcgctatttagtcgtaaatgaccacttaacgactatttaacgacttttggtgtagtcgccaaaacccagttttcttgtagtgtgtgctaatgatatcatgtaatatttggagacttggagtgattgatgtttgaatccattttgtgtgtggtcatttcaatcatttcgaattatcgatcatccatgcacattcaccaaactctgacaacatggttggcatacaaatgagaagggcaaaaaagtaatttgtatacatatcatgctttccttgaaaccctagccgcctatcattctgctatcatcttcttcctccgacccattaacctatcactacaagaaaacaggtaaaagacaattacgaagagcgacaatcaacatagtcgtattatcaagcgaccatttggcaacggtttgacgactacaatgcgacaacacgaaaattagtagtaacatagtcgttattttacgactaactcaatttgtcggaacatagttgtccattaacgactatttgacgattctattattgaagggagatgttagttgttacgtagttgctaattgacgactatcttaccgactaaataatttagtcgctaatttagcgactaattgacgactacaattcttaatcaacctgtagtcgtataagagtcgcataggcgtcgcaaaaagtagttggaaaacgtgtttcacattggcaagtaggtacacctaattaattagttgtagtcgtaaattattcataaatattcgcctatataataaatattcacgaaactcttctttcaccaacaaatcaaaacaacaacaacatcaaagaaaaaaacgatttattataaaaaaaaaatttagttagtttattgtataatggtgggaaactacaattatggcggtagtggcggtttctatcaagattggatgtacaagagatttgatgaagtgacggggaatttatcagcgaatatgtcgcatgggttgagcaattcatgacattcgctaatagtcagccaatagtatagagtagtcgaggaaaatttcattgtccttgtagtgtatgcaagaatgaaaaacacatcatctcgagtagaagagttagtactcatttgtttagtcaaggatttaagcctgattattatgtttggtataagcatggagaagaaatgaatatg

SEQ ID NO: 24797 - DNA, 3003 bp, Unknown
  misc_feature (1)..( 3003): 2750-1469P.txt file - cDNA_ID_2186372; gDNA_ID_1974096; Annot_ID_180703
aagaaataaagggccacggttaggtatacgtacttaagtcggaaaattcaacatttgttaattgcagagtctctatgaagctttatgttataatatatgtttacttataattgtatggtttctacatactcaagagttgcatgagttcacacttgcttttaaaaagaaatacttctgctaataaaacagtaatctaatacatgagttcatatattaatatatacaccactataaatgagtataggccttgtcattatcattattatttatcattgtcaatgtcattatacttgttaattcttatagtataatattagttatgtcccctggctcgaggtcaaaatgaaagaaaaggcaaaggtcaacggtacgaagcaaggaaccaccgaattcaaaggctctctaatttaacatgctcgtctataaacacgtgaagatgacattgacatgcaagcaatgatattattatacattcaaattaacattaccggaaacagaaataaactagatgtcccaattcgtatacattgatcgttttatgaatagattatataaattaagggcaaaaacatccaatttgaatgtcgttgatgcgttacacatcttactcttaatcaaaatcgtactattttttttttatgatctaactatttatttttataatatcatattttaacagctaatgatttacattaattaagtttgtgtgtgattattccattacgcattgtgcctacggatacgctcttgaaacatcaaaaatctaacattaatttgatgcgacgtaaaaacacaaactaatcaatgtttcgatatttaaacgcttcatttttctcataactaccaataaatagaatgacgaatacatgtaatggttaaatacttaatttaggtctggagcaaatatttttgaaattatattattcgaacagaatcatatctcacaaaaatatactttgatattgcatgttcacctaatataatcttcataaatctgttggttcataaactaatatgtgtataatacacgtaccttatatatgataatatgaaaaaatcatgggatgttgatttattttatacattatggtttttgtgctttacactgataaaaatcataacaacgcgtttcacaaaagcctaacgtgacatcattatctccaatctgaccgttaagatcaattagctgacgtgttataacacatcattgtcctcttgtcatatacttttttttttctattttcacaagccacccaatgatttggaagtgttttcatattctaatcttctgagaaaaaaatcattataaaagtcagcaactaaaacttagcataaatcaagataacaattctcaaattacaaaacaattcataacttatcccataaatcaagattatttttttcctcaaatttctcttcttgatcaaatcatgcaattagaaagaagaagaaacatgacacttttgtttaggttcgaatcaatcaaagtatggtatttttttccactcaaacacctaatgaattggaagtatttcatattcttcccatatttgagaatattactataaagtaccaaaattcaacaaaattagcatagaatagatcaagcaaattaatctcaaaatgtttactaatcttttatcgttttagatcaatcatagacgacaactaagaaacaaaaaaaaaagatactactcattagcttaattagtccaatgatcaagactcaaaatttcaaaacttttttcaattatggtaaacaaaatatatacacaaaaaaaatcagaacaaaatcggagttctgtcttttcattttttttttttacaagttctgtctttttcaaggtaataaaaaagttataaaaaatcgaaataattaattaaggatgatgttttaattatcggttataatcaaaattagttactactagtacaaagattaacgcaccaaaggagaagaaatctgaagaagtgaatgctttcttcaaacgcgctctctctttctctctctctctctctatctccagttcttattctctctctctttctatctctaccaaatttctgagaacctcttcgtcttcttcgttatctcttcccttcttctgtgtcactaactcacttcactgttagtggaagaagctcttaccatattcacacttgtaagcaacgattttagggatctgaaacgctttcactgtttctgttttggattcttcgattgcttttgagctttcgatttgattccatttcaagctgctgaatctggtaatttttccaagaaattaggtttcgattaagctttccctcactatcaattttctccatgaaattggaaaacttgcttcgggtggtgttttgttgtcttgtgttaatcctccaattttgtgtgtgtagatttgagcaattggttgttctacttagggttttcgttttgttgttgtttctggggtttctggaatttttctgtgtagatccgtttgtgaggtgggaattttgagttactgtttggaaatggatcttgtgtagcttaggttgaagatgatcacattgatttttgaaactagctcaaactaatctgaagatgatacttttttattatcatcactcaagatgctattttttttattatctcttgggtgttctatcattttagaatttgctgaaaaaattgggcttctgtgaattctggtgaattttgtatctgtctgtatcttcaatttcacacggaatcatagttgttgtaaaccctaacgctgggttttgttgttgtaatcagatctttcaggttcttcttggtattgtggtcaaaacaccaatgggataataataaaatggtgtttatattgggacttttcttcgtttgttgacctatgttgggtcaaccaagtatgatctctgaagtggtcaaaaggagagttactttgtaatgttgaacaagagcttttaaaagagtgatagtgtgagtgagtgtgcctcttggtttgtgggaagaagatcatg

SEQ ID NO: 24798 - DNA, 3003 bp, Unknown
  misc_feature (1)..( 3003): 2750-1469P.txt file - cDNA_ID_2186387; gDNA_ID_1974096; Annot_ID_180707
agttgagttggtttaatacaccctttgtggtcccttcgtcttgggcctcacttctacactttcttcagcccattttcataacacgtgacctacacatgctataatgtacatgatttaattatttatctcttaattgtgttttctttaaaaaagaagaagatataattctctttattttctcttgatcttatgaaaaaaaatgtatggaaaacttgatagacattcatcatttataatgtaacacttcacactggatattttaacaaatacaactacgctttatcgttctcactatgaaatatatcatcttataagctctttttttttactcttattttggatcttttggacgcttatcagtgtcccttgacaatttttggacaatcacatatactatctttggaaatgtaaatagaaccttagtgaaccacttagtttgatactcagttaatcacataaacttacttttcattctagaacaattgttttcgtaccaaattaaacaacgagttatttctgatcatcctatcccaatacgaaagtattggaagacccttggacagtttcctggtgttccaagcaactttacaaatttttttccagttagtactgaaagtttatctattcttttgatctccaaaagtctatacgaacaatatttatatacatacgcatgttagacttcatatgtcaacgaggaaaaatgttatgtatgtgcgtgatatacaatttaatttgttggtacactatctcaagctcttaagtataattcatctactgtgttcacgtatgttaatgttatataacgaataaaggattataatatgcgtagccaaatcgacataattatattatattgaacggcagagagaaactttggtgaaaagttagatggatttgattattaataacataagacaagtggacaaccacacgcataccgttacaagtcaaacaatcatatttatgttccaccaatttctatacaataatacgaatgcaatctcaaattttaataactaagtcatattgactaaagagttagattcgttactggcgataaagggatgaacagagcaacacttccggtttgggtaaacatggaataagtgaaacagacgaaaaagagtggattgattcatcaataaaaatcatttgtactaattaacaaaattaagagttaaagcaatcaatgtcaccatctcaactacgacaaatcacatgtcaatagctagtattattactaatcaatatgagaacaacaaacacatgtaaatttcagattattttacgcataaccttattaaaaataacatttgtaaagatattacagacccggtagcaaataccaaacacataaaatagaaagaaaaatggaacatgccgtattgggatcggctactctataattatatactccttgatattcagatattaacttcttgatatatacacacacatattaaatgtgcatgtgtatacacgtactaagacgtagatggaacaatacaagtctttacgttactaattttataaagattaatctgcggaaaataagactaataatattcatttaaggactcgagaaccaattggtaaatgtcaagaaagactataacagcaaaatattatacgtaataaataataatcataaaagcagatgtactactttatttcattatttgagtttgattccaacggttacatttttcgataaaataaattttgggccaaaaaaaagtacttctaccttttattgacagtgataagttaatgtttaaaatcacataaaacccatggtaatatttactatgttttactcaatatactgtatgtatatatatttagagataagaagaggacagaaataaaagctttatttgaaagcattgtcttatatgtgaaaccatctgcaaatttcaatgtctctttcattctcacgtccctctcctcctttctcattttctctcatttattttacaaactttaggaaaaaaactatcattaaccattttttttattttaaaataataatttcaaattattacagtataaaaacaaaaatgtacactaaaaatgtctgatcgcctgcaaaaaaaactgtctgaacatctaaaataaaataaaaaacagtaaatctattggtcttttgtttttttcttttcacttattcaaaaaaaatatttcctttaagtttataagtttgttattttcttcctcttcttcctcttcttctccataagccaaaactaaaaccctctttaatggcgagaggacccatctccaagaataaacagtaatcttcatttattgtcattacaaatttttctttaagtccaaaaaaatccccaaattaaaaatcttttcttttttaattacatgggcagatgaagagacaagggtccctataattttctctttagatcttcaaaacccaaacctcaatcatgttggtcactttttcttcttcttttataatctatgtagaaacaaaaatctatggtttttaacttttcatgtttattcagtctctccatcatcacaaagctgagtgcttgattggctccacagacaaacataaagtttgcatctttttttctgactcatttcaaccaaaaagctccggtaagcaaatctctcttatttatgtaagatatactcacttatttatgataaagattacatttttaggctaaaggaagtttcttttttcatgaatgtctgaatgagaagttttttttataatgaaaatctcagtttagggtttaggggaaggaaaaaaaggtaacccaggaagtaaaattgacagttttgtatacaaaagaagcaatttttggacactatttgaagaattctctgtttttgttgttgctatgtttgtaagatttttagtttaatgctaaaagatataaaaaaaaattgtttttcaggtctttgagaatcggttttactagattgaagacgagagttttgaatgattggtgaatttgttgatcatcaatg

SEQ ID NO: 24799 - DNA, 3003 bp, Unknown
  misc_feature (1)..( 3003): 2750-1469P.txt file - cDNA_ID_2186407; gDNA_ID_1974096; Annot_ID_180712
agacaaggatcccaaatccatgaataaagctgcacgcttctcataacaagacaatggatcctaatccatgagtaaaacttcaaacttacgaaaacaagaccatttccttaatcatacgtgaatcttcaaacttttatgttgtgtgtttctatttttctatcagagacggtagaaatttgaaaccttcagtgattcaaatttcaaagttgttttcacttatagagacatcagaacaagttaaaattgaccatcacataacatatctcatttcaacagtgaaataaataagcacgacaaataaaaaaaaattaacaagtggaaacatcagaatcgaaatcgatcaagcaagaagcaaaatggcattgaatcttccattatttcattcatcctccaaatgatgatcctgcaaagcaaacacactaagctaatcagagagggttaatctagactctgtatcttaaatttgacttggacaattcgatagcaaacttctccgaaacccaaaatgaaagagcataaactgaaaagaaaaaaaatgagacgaggacatacctcactcttctgcagatcctccaatattgcaaatgcttttcgtaattctttcttactgcataagccggccagcatacagtggaaagtgatgtaatctggagccacaccacaagaaatcatctcattgagaaggtcttgagcggcatcgagatcacccacttgacaaaacccatgaatcaaagtagtgtaagtaactgtattagcaactattcctcttcgatgcatctcacagaaaatctccattccattgtcaacccttttagccttacaatagccattgattagggtgctaaaagtgactacatccggagagcagcccttgctagccatcgaatctaacatgcgctttgcatcatctacacgatcctgcttgcaaaatccatcgatcattgagttatatgtgattgtggtaggaaatatactccaacgaagcatctccttgtatatttcttcagcctcggagacctttctttctttgacaaatgcattgatcaatgcactgaaagtaacaatatcaggattgatttgcttttcaatcatatgacgcaacaattggtcggcatcactccatctaccagagtgacaaaaagagtctatcatacaattgtaagtgagaacattgggaaaaatacctttctcatgcatttcagtgaaaaggttttgagcattgatgtggttcccgtccttgcaaaggcgatcaacgatggcagtagagattacaacatcggctttgatgtggctttgccccatcttcctaagcagattcaaagccgagacaaccaatcttacacaatccatttacaattgttccgtaagtaaccgcgttaggttgatgaccttcttctaccatccgatcaacaagagctagcgcttcaagaactcgaccctcacgacaaagactgttcatcagtgtgttgaaggtgacaacattgggtctacatccagtttcaaccatataatcaaagaaagctacggcctcagaaatcctacctgattttttgtttgaacattgggtctacatccagtttcaacattgggtctacatccagtttcgcctgattttttgtttttcttctcgatatctctcttttctttttttcacacttctcgatctctctaaccataaaggagtgtacattcaaacagtgtgagctctgagaccgagtgagcgtagtaaaacataatcagaaaactaccggttccattaattggtcggtacattgaccggttaagattaatctagccggaccgggactttaactctggttttgccatctaaataacgtttttttcttttcctataacatctacttaaattttgacattagttaagttggagctattgaagtcaatatcgttcttctttctaaattttagtgatttttttttaagataaattttagtgaaactaaataacctatttttctcctacggaacaaattattgggctctgtaacgagtttcgcttcatactaaaccgtacaagaatctgccaaatatatattcaattcttaatcaaatcttctaaatatagtattgttaaatataaaatatttagtgtataagtgggataataatttgaaccaacctattatattttctatgaataaaatttataaacggatggacatctataagatccgatagtattttgttccacccaacagtattttgttccatccgcttaatgcattaaacgtaaaatatgaaaataaactaaacaaatatgtcgtgagcaattacaagtctcttgtaaaccaacgtttggttcccaagactcaaatcaaacagtgacacacaatggtttcttctcttagtatgatgtgagatctaaccatatcatcgaacaaatcagtggcatcatcttaaattttgagataatgaaacccacttgtcaatttcaaactctctccttctaatgttccttggccctttgatgaaagtatacatgtcttgacggaaagaagatgaatcaatctcgtgctgatcaatcaggtagaagcagtagcagattccgatttcaaaaccctagccaacatttttgttgttgtttcgcctgtttttgtttttttgttctcttatcgatcttactctaactctaagcgagtgatgaccgatgatgaaggaatcccagaaaaccggtaattttaaatttgaatcataaaaccggttcgatctcaacgattccgaaaccggtttgattggtccagtggacttgtcacaacgtcgtaaacaaatactattttccttatccgaaccggttcgtaccaatttcctgatgaaatcaaatcaattacacaataatcaaattttggaagataaggaaaaaagaaaaggagcgtgcaaaaaaaagtcacagtcgcgagataaaatccgaagctagcgaaaagcttcgatttccagcgatcctagtgttggattctacgattttagggtttaaatcttgagatg

SEQ ID NO: 24800 - DNA, 3003 bp, Unknown
  misc_feature (1)..( 3003): 2750-1469P.txt file - cDNA_ID_2186452; gDNA_ID_2096293; Annot_ID_195462
tttattttccgcagacactgtgttcttgacgtttttgtaatccggatttctcttaatctattcagtattcagtatttgcttttgatttggtttaccaagttgttcatcctattatcatcctgctattactttgttgctatcatgttgataagtgtgtattttgcaagtttgagcataccatttgtcatcactttagcaccttatcatcagtgttttataccattctcatcatttgtcatcactttgcatgtttaggataggtttgcatgcatgttgcatatttgtgttgatttcaggtgatttagagctgttgacgagctaactggaagaagcggacctgatcatgtcaaaccactcgaccccgaggtcgagtagaagcttcaagacctcaacagaccactcgaccccctggtcgagtaggggagttcacaatttcatctcatcactcgaccctctggccgagtaccaccacgagagatactcgatcacctcactcgaccacctggtcgagtgtattcacctccaccacctgaccagtcactcgatcacatcattcaacccccaggttgagtgtcttcaccaccaccactcgactacatactctatggcaagctttagagtcttcttcattccgcactcaactagacactcgagcacaaggaagaaaagaagactctagcatatcactcgacctctcactcgaccatctgggttgagtatagttcttaatatgtcccaatactgcatcgttttgagtattagggttttcgaatattttgctataagtagcatgtactttacattttcgagaagaggtttttatctagttttatttcgcagacattgtgttctagaccttttgtaatctggatttctctttatctattcagtattcagtatttgttcttgattttgtttattgttgttcatcctgttattgttttgctattacactgttgttatcatgttttcatcctgttcaacgtttatgttctcttcaatgatgtctgagtagtgaataggtttctgaggatgggttagagtagtgtagaattctcagtatgctaggtggttgagtattgattgatagatcccttctggattagttgttcttaatccctattgctttttgatcaactggaatttgagcccagacatttccgcgcccaaaaggtgttcgatgaaatgtctgaaccactaattccagagattcgtggctcagtaccaaggtattggttgcagggagtgttttggctttaacttgttgattcgtaatgcctataaggttagctctcgtcaatggtgattgagtctgggactaggttaagttgagggtctctattgcggtggcacttagatttggttaatgaacttgttgtctagggataatttattgagcatgtcaatcacctgtaaattgaggaaacgaaactactcaattaccccatcctcgggaattctttatctgattgattttattgtttactctactgttgtttactgcatcttttcatctgttgcttagtttctgcaattctttactgttactcgacctgttacttgaccccccagttgtccggcaacagactgtgcaatcgagtatccctgttacattttctgtctgttactcgaactgtcactcgaccacacccagtgctctgcaacgagctgtgttggtcaagtgttttattgtttctgcttgattttctgttttctgcatgttcacttaggactgctagaacacaccaaaacctgttattacttggcttgacttagtgacttagtgacttagtggcttgctagaacactgctagaacaccaatcatacacatgccatcaagtcatccttattgttagcatcaaactcatttggattgacaacctaaaatattacaacgacatgattggtgttttaagataattgactaaaaaacctattatcaatttgtccctgttgccaattgggtgtttgtttgttacatttgagatttcagacttgcttagatcaagttctttttcaattttcaatttggttgctaactgtgtgtttttcttgttgtcttcttgttctaggtacacctctgctgtatgattggtgttctagcagtgttctagcaagccactaaaatactacaacgacatgattcgtgttttaagataactgactaaaaaatctattatcaatttgacgccgttgccaattgggtgtttttttgttacatttgagatttcagacttgcttagatcaagttctttttcaattttcaattcggttgctaactgtgtatttttcttgttgtcttcttgttctaggtacacctctgctgtatgcaaactcgatcaacaggcaatccgaacctccttttcaacgacaacatcgaccgcatagctcgcgaactcagagaaaagagaaacacagtcaacctaataccacaacaaccactcgaaatggctgacgaacagaatcatcaaaaaggccctgccaacattggtgctggaaacgcaccacgtgatcaccgttagcggaaaggaattgcacctcctgctatctagaacaacaacttcgagattaagagcggtctcatctcgatgattcaggggaacaaattccatggtctgccaattgaggatccactcgaccaccttaatgaattcgataggctctgcaacctaacaaaaatcaatggtgtcagtgaagacggattcaagctccgtttgtttccattctccttgggcgacaaagctcacatttgggagtagaatctgtcccatgactcaatcaccacctgggatgattgcaagaaggcttttctatcaaagttcgtctccaacgccagaactgcaagactcagaaatgagatctctggctttttacagaaggctggtgaaagcttctgtgaagaatgggagcgttttaagggttatacaacccaatgccctcatcatggcttcactaaagcctctctgctcagcactctttatagaggcgttttgccacgcatg

SEQ ID NO: 24801 - DNA, 3000 bp, Unknown; identical to SEQ ID NO: 9934
  misc_feature (1)..( 3000): 2750-1469P.txt file - cDNA_ID_2186563; gDNA_ID_2096294; Annot_ID_195476

SEQ ID NO: 24802 - DNA, 3003 bp, Unknown
  misc_feature (1)..( 3003): 2750-1469P.txt file - cDNA_ID_2186574; gDNA_ID_2096294; Annot_ID_195480
gaagctcgtcaggtactgtttcgttctcagttcttcttttctttagaaaattcatgttgttcttaatcttagttagctcctggcatggaatccattcccaatattgagcctgagctgatttgtgttatatggttttgattggatcgagtaggtttttgatgaagttaaacaatgaaactgtgtctatcgagctgaagaatgggactgtggtccatggaaccatcactggtaagttcttattgttagcttccggtttctttgtagctcttctcatcttttcttctctctcgatttctccgttgctaggtcttatacaagtcgcgatctgttcccttattttcaattggccctaatcgcgtccttgtgatcacatgaataggttgagtaaacacacagttagagccagtagtcataaaggtatatttattgaagtttaagcttgatgatttgggcaggtgttgatgtgagcatgaacactcacttgaagacagtgaagatgagcctgaaggggaaaaacccagtaacacttgatcatcttagcttgaggggtaataatattcgctactacattcttcctgatagcttgaacctcgagactttacttgtggaagacactcctagagttaaacctaagaagcctgttgctggtactgcttcattcatttttggtgtttgtaatattcgtcttcataagctaaaagacttctttatcagtccatttattcgttctctctttctttcttctttagggaaagctgttggacgcggtcgcggacgtggccgtgggcgtggtcgcggcagaggtcgttagatgtagcagcgctctggaacatgttgaaggtttgtgagtttaatttttaggagaatgtacgagttatgtaactagcaactctggcaaaggaaagatttgattgagaaatagtatgattgatgctctagtaaggagttactttgtaatggaattccatggataacaagatttggctttacatgttataagagcatctacaagtagagaatttgtgtgatactgatagctcaagactttttattcatttaacaaatctgactatcaaattgcattaacatgttgacaatcttagtatagaaaaactgctatctcctccgttaatcttccacatgaaacctatctcacatgatcctgcaattgggatcttgattgtaaacgggttccccgatctgattgtagggatcacacgggtagggataggaagatggcacaccatatccatcatgaggccatggttgataacatggctcaggtttttgccatggttgacaacatggctcaggtttcttctcttcaggtttcttctcttcgggtttcttctcttcgggtttcttttcttcttctggctttttgtcaccatccttaggtggttcaactttagctacgctaacaagctccgcaaatgcaacttttttcctgagtgtgttgattagagcaatcatatcgacttcaacaccggtcacctcaatctggttcctgtgatctccctttatttccacagcgttcacgcctataaaccaatgcgataaatctttagattcaacaagaattacaatcatcaagttctctagtgtttgtatcattgttacctttaaactgaaccgcagttttcattgcctttgctcgagttgtgtcatcagtcatagcaattcttatcaggatcttttgctgagtacaataagagaactccttaacatcacaaagagaagtctctctctttcacaagagaatcgaagttattacttgttgttgagtacacaggagacataccttcatgttattgtcttctgagaatccgcgtgatttgtttgatgggagtttgctccgaacttttttgtgtcttcttcgatcacaaattagaggaaatataaataaggatcgattttatatattcatttgttccatgagtcgttgtctcacacaacggaatccgatagtttgaatatcgttgtcaggttcatatcttcggtccttacgtgttttattggttctagttgccgattcgtacgagcttattaccaattttttaattttaaaaagcctaacaaaaatctttatttgattgagtcaaaaaattagatgaaatagttatttgactgggtcaaaataaattgattaaataatggtaaacaacacaaataatatttgtttactacaccgttgcctggtagttttagacatgtatggcaaaagacttaataatttttgagtcgatatgtcaattatgatgattaataagttttgtttgttcatcatccagttgtgcataacaatgaatagaacagatgcgttaaaagtcttggtcttctctagagtacatgtttccctctaacttccttctcaataaaaaaaaagattaacttgactactaatctgtcatccatctgtattaacaaatgttatatgcttgacttgcaatacgtactttcgcaatcatattgcagttttctaacgtaatgaaacaataagcttttagtttatactaatgtgtgttgtctaatgctaatttgactttaatttcttaacacattacacattgatgatgccaattgcagtgatatcagcaacttgcaaccgtttgatccaatgatatatcataggtaattaggtatcatatctcatggagataaacgggtaaataaatataatcttatttgctaaataaaaaataatcaagtttaagttttaacatcttcatatacaatctggtttctgtgatctccctgtattagcaaaaaaaaaacatgatttaaaaaagaatttggaaagaaaagaaaagagcgggaaataaatccaaagatttgaccaagttaaaccaaaacttttttactatctgagaaaaccattcagtttccccaaaataaaataaaaaatcagccttaaatcccgtgtctagggttttctttcgtagctgattgggggctgcaagagtttcgccgaggacgattgagaattttgattttcgaaaaatg

SEQ ID NO: 24803 - DNA, 3003 bp, Unknown
  misc_feature (1)..( 3003): 2750-1469P.txt file - cDNA_ID_2186592; gDNA_ID_2096294; Annot_ID_195485
cagctgaataacgagtttgtgttgttgttgtcatcacaggtgatccatgaaacaggggagctcgtggctagttggacaggactgtctttctcaagagacagaatcaagtggagcgcatcaaagacatcaaaagaagaagaaagtccgtggcgtgctctttatggctaatcttcacaggtcaggtctttttcatggcccaacactgctacagtctttgcttggacctgcagtaaatttccctattgtagtagtacccttttgttaaaattcttatgctcagcagaaccaaatccacgtcactctgctttttctaggatatttatttatgaaagaaacagtttctttttttttgggctgacttggttcaaccaaatcttaaactctcagaagcattttgatttaaaggtacatatatttggtcaactcatgggaggatcataacataggagtgggattacttaatataatacaaatgattagagttatgattggtgggagaggcataaaaaaagagagattaaaattggtgtgaagtccataaaaggcactcatgaagtatagtaatagagatagttaatgttatcttaagagaaaataagtgaggtgtcgtcagctctgctaactgctaagccggttgtttaataataggatattgatgaagaagaaggaatacgatgttttgtaccaaagtttttcggatcgtccgagaatcttatcctactgacatttcagcatcatatgttattttttttgtttgttgtttttatatatcttgttcgatctttttagtgcgtcttatcgtcgccttttcgctttcattatcatttgattagatgactactattcacttatttgccaggcagatttgttaatattttaaccaattagggtctttgatcattcgtctttgattggatacatacgagtctggataaagagcaattcattttgatgttttcttaattgagaacgaaacacaatattaactcaccattaactaatactatattatatgagtttaaaaattaacacttgctcaatttcaaaaacaatagttttctgattaacaatgcatcatttcaattcgacttctcatcttgtaattataaactttgaactgaagttatgatcaattatttagtggtactaaatcgtatattcaataggaacttaaattgtaaacatgtgaaaacagtcagacacttaaaaaaatggaggtggggtttcatccaagacttaaccatcattctttcatatttggtctatcatgttttgcttttttatattactcaatttaataaatcgatatcgagtacccaagaaatcgaaataaagaaatgggtttaagtaaaccggtgaacaatattaatatgaggaaagaaaaaggacaaaagagagatctatcatattgatttcattatttttcagcgactttatgattattatttttatgaagaatattggggcaaaggctagtagtacgtagacgtagtgtgaaatatctttctggtctgaaagagttatacagacgtatctaacttggcagatattttttggttttcattcagttctctctcccctcaatgataaatatcattaatttattttatttgttctaccaaaagaagatatttttgttatatacgcccaccgaaaaatgaagaagaagaagatatttttggcttttgtaaggtcaaagcaaacagatttatcaattattattattattatctgagactgagagagagagagagagggagattttctgaattctgattcgtcgaaaagcatcaaaaaagtgaacgcttgagaatccattatggcacaaactagccacttggtaacttccacgtcgcgagtagattatcttcaatactcgcatgcgcgtgagtaaaaaacatacaacctttttttcttttctttctaatagtaatatctttaagaaatatccataaaaattttattgctttcactataaatacgagagggacccacaataccctacacgaacttttttgcactttttcgtctttttaattaataaaaaaaagaaagagaaggaaggaaattaggcacttttgataaatcagattatgtcagaagcgcctacatgtccctttgcggacacacccacccattgtctatccattcatttttttttttcatttcttcctccagagagagagagagaagccacaacaagaagaagaagaagaagaagaagaagaagaagttctggaatagtcatcatcttctctgtttctaggctttgtttatttgtctctaaagtttctggattcaacttctgaagaagatagtagtagtccacaagaaggatcttctttacgtgagttgtttgtttctcttctccctctgtcttttcttttctgattttaataatcccaagtgtgttcttattttcttgctatctgttgtataattggtgttagtgattgattattcattgtatatcgatgaagggttggttttgatttttgttgaattggatcttttgatttggggttttaaaacttgttcggatgatgatgattgggattgatccaaaagttttcgttatttattggaaattcagattttttcgattcagttccatttgaactagtaagtcaaacaaaatctctagatttactgatctggggtttatactttgaagcttgagttgttgttgttttattaatttatttcgattttcagtaatatccatttgtaggttttggtctctgactcttgtttataataaaagctctgtattgagtaaaatctcatgaaagtaggtttcctttcccttttttatccttctcctttggttattaatctcctacaacctttttttagaaattactacctatattcagaaagattccatctatttcttcttcaaggcttgcttttttgaaccaaaagtctctctctttttcatctaataatttgtttacttttttggacagcagaaagttgatttggtcagagccaaggaagatg

SEQ ID NO: 24804 - DNA, 3000 bp, Unknown; identical to SEQ ID NO: 9941
  misc_feature (1)..( 3000): 2750-1469P.txt file - cDNA_ID_2186596; gDNA_ID_2096294; Annot_ID_195486

SEQ ID NO: 24805 - DNA, 3000 bp, Unknown; identical to SEQ ID NO: 9941
  misc_feature (1)..( 3000): 2750-1469P.txt file - cDNA_ID_2186596; gDNA_ID_2684204; Annot_ID_191328

SEQ ID NO: 24806 - DNA, 3003 bp, Unknown
  misc_feature (1)..( 3003): 2750-1469P.txt file - cDNA_ID_2186609; gDNA_ID_2096294; Annot_ID_195488
catctctctctctttgtgggaaaattttcactccatctgcttatagtttgctttgtcaattatctaattgtaggaaagtggatcaatggatttggacataacatctccaaaacagttgaaccgaaaagcgtttctgaaacagctagctgtagacttgtccactagtgagcgcaggatactgtaccgtgctcaatacgtaaggaacaactttctagccaatacgatagataagagtctgtggatcgatccatgatattgtggaatctgtgtttttttttttgttttgtttgggtcagattctgaggaggagactgagagatatcagaagtggtgagctgaaggctctacggctcttcagtggacttaggaacttcttcaagtgaatgttgaatgaggacatttcaacagctttaagatggatcaaaggtaggcctcgttgtgcttcaaccaaaaatgtagttttttattacaaaaaaattgaacgttggtgtaggcatggttggatctgtctcactcgtataggaatatattggtccagccatatatgtaatttgatcattttctataaactcaaaacctgaacctaaattgattaattaaggaaacgcatgagagagtaagggtagaaacatgttcttcgtatttgatccgaatcgaactgaaataatcgatccaacaaacaaagataatttgaaaattaagaatatatctgactacaactcataacgaaaaccgtaccaaaactcacactccttgttaccgcaaacaagataatctgatggtacacgtcagaacatttgtttctttagcaaagcaagtaaacattccactgtggcaaagtaaaaaacgagaaacctataaagtcttcctaatgaaacgtactgattttatggagtttccattttcgacataatatgacgtggcaatatctaaatggtttaaagatgttttatctccaatgatataacgccacgtaagcccgctgaccaaataacccaaagagtaagcaagcgacgtcgtttatagtttgatgatcttgtcgggtaacgaaactgccccttgagtcaaaacaggcttcttcgtgtccgattctgaacgagctcgctctttctcatccaattctctccaccgtcttctactccgatcaatcttcaaattttcttaacactcatcgaccagatcgagtttccatcgatctaatcaatcaatcatcagatttgatcttctcaagaaggtaaatccctctcactctctgtgtcaaacctaatcacctcgtaggaatcgaaattggaacaattcaatttggtttggtttggaatctctagtcgattcttcttctaaacgattgaattgcgttttgtgctttgatataattcgaaattattgtggcagatgagcttgaagggtacgatcgtattactagggctcttatggagcttccaggctacgttagggattagattcgtgatagaccgtgaagaatgtttctcccacaaggctgaatatgaaggtgatacgcttcatgtctctttcgtcgtcatcaagtctgactctcaatggcattttaacgaggatggtgtagatcttgtggtatgactttttttcttctaattgaacttttctacattctacattgcaaaatcgtcgaaaatcaatagaattggtattcctaaacaatgcttaggatttccattgttaatgttggtagataatttgaagtatgtattgataaagaatttggttactctttaaagctgttatattgtaccatctggttaatttggtggttgttgttgttgttgatatattttggatgcattttgaatagatacatggcccaacaggcgaacaaattcatgacttcagggagcagataagcgcaaagcatgattttgttgtccaaaaaaaaggggtttacagattctgtttcacaaacaagtctccttatcatgaaaccattgacttcgatgtacagcttggtcactttgcatactacgatcaacacgcaaaggacggtaaggattatctgtttagttttgtttcagtttcgtttggtgatgaggtatttagctgaagatggtttttgtgcagagcatttcactcccttgatggagcaaatatcaaagttagaggaggctctttacaacatccaatttgaacaacattggttagaagctcagaccgatcgtcaagctatcggtaacattttttcctctaaaaaccacatttgttgttctcacttcaatattgagtgatggtttgaatatggttgttccttgtgcagtgaacgagaacatgagcaaaagagcagtacacaaagctttgttcgagtcgtttgcactgattggggcaagttttctccaagtttatcttctgcgtcgcttgtttgaacgcaaactcggcatgtctcgtgtctaaaagtatcgagtttattatgactttgaacttattttgccttaaaatgtaccagggaatctttacttaaaacctttttacagacagatcgtagttcattggaagatttgctttctcccatgttcaagaactaatcctctcgtgatgataattcttttttttctctttattaacagacaacttttccacaagctaggttttcatttcaatagagaaaatagtgattccttaaaaccttttttccctaaaacaaagagaataacaatgtgatcaagctttgaataagacgtgtcaaaagtactcaaaatcccttaactggattcgaactcttatagagaaggttataaaagtggacactagactaagttagttgggcccagagtagatagataaagccagctatcattttcttagtcgtcgtacaagttacctgaaaataaaataaaaacacaaactttcctgaaaaagtcgtctccagttttaagcattgataaatccgacaagaagtccgattttgttccatagcttgcttgtgtttttagtggattgagtcactgaaagagaaatcataaggctttgttgatgatg

SEQ ID NO: 24807 - DNA, 3003 bp, Unknown; identical to SEQ ID NO: 24806
  misc_feature (1)..( 3003): 2750-1469P.txt file - cDNA_ID_2186609; gDNA_ID_2684204; Annot_ID_191330

SEQ ID NO: 24808 - DNA, 3003 bp, Unknown; identical to SEQ ID NO: 24806
  misc_feature (1)..( 3003): 2750-1469P.txt file - cDNA_ID_2186609; gDNA_ID_2684204; Annot_ID_137268

SEQ ID NO: 24809 - DNA, 3000 bp, Unknown; identical to SEQ ID NO: 9939
  misc_feature (1)..( 3000): 2750-1469P.txt file - cDNA_ID_2186625; gDNA_ID_2096294; Annot_ID_195492

SEQ ID NO: 24810 - DNA, 3000 bp, Unknown; identical to SEQ ID NO: 9939
  misc_feature (1)..( 3000): 2750-1469P.txt file - cDNA_ID_2186625; gDNA_ID_2684204; Annot_ID_191334

SEQ ID NO: 24811 - DNA, 3000 bp, Unknown; identical to SEQ ID NO: 9939
  misc_feature (1)..( 3000): 2750-1469P.txt file - cDNA_ID_2186625; gDNA_ID_2684204; Annot_ID_137273

SEQ ID NO: 24812 - DNA, 3000 bp, Unknown; identical to SEQ ID NO: 9975
  misc_feature (1)..( 3000): 2750-1469P.txt file - cDNA_ID_2186672; gDNA_ID_2096298; Annot_ID_195588

SEQ ID NO: 24813 - DNA, 3000 bp, Unknown; identical to SEQ ID NO: 9976
  misc_feature (1)..( 3000): 2750-1469P.txt file - cDNA_ID_2186712; gDNA_ID_2096298; Annot_ID_195603

SEQ ID NO: 24814 - DNA, 3003 bp, Unknown
  misc_feature (1)..( 3003): 2750-1469P.txt file - cDNA_ID_2186720; gDNA_ID_2096298; Annot_ID_195606
atacttagttttcattacgattaatactatatttttctctcttagaagactaaccaactgtcttccagttagatgataggcttttattgactttccccttcattcgacattctttgacttgaaggtattttctcttctgcaacacagttttttccacatcaacctgatcccccaaatacatgtaaagatacccaaaatcgttttcttgtagagggaaaaagaagtggagaatccttccattatttaccaaaaatttcattcactacttggcgtttgacagttggcagtaatgtgttcttgaaacctttgatgcagaaaattttatacctaccaaccaaaaaaggtaatttgcacaaatcaattaatttgtttctaaatcaaatactaaataaccaaagaaatgctaaacaacttacatcggatatgtagacctggtaagactaatagttcgtcccaccaatttcacttcattaaagttttgcaacgctgccattgcttcttcgtgagatggaaactcaactctaaattctcgtttcttgtttaaaaccacttggcagttgcaaccttgaaagaactctagactgttacaattccaatattaaatcataagagaaccgtcaaaaaatctaaacaaaagattaatatagagacaaagaaatcaacttacatctctagttcggagattttcctatggacattagagagcatgagaatattactttctaagaattcttcaaactcttcatccgaactggaggcgtatttggcatcccaagtaacaggaaataatccgctgggcattctttgtttctctatccaagcaatatcctacaagtgaatactaattattaagttgttggaaacaagttagtttaagaagcataatatataaatgacgtcattacaagaaatatctacattattaccaagagagaagagctattatatgttcttaggtgatcacccgcgctacgccgcagttttttcagattttttttatattgtttaatttaaatattttttatatatctaattattcactcatgcaataagaaaatatttttagtattaaaatatttttttctaacaacattctcaatatttcatcatatacataattcataaacaacgttcatcttaaaccaatttaaccgagggtagtgttcaattctagaatcctaagaatttgatgatggagctccgtacgtattttgcaccttcggtgatttattatataaatattaatttaagagaataacttacttaaatcattaactaatccacgattattatatactcatactttgagtttggattaccaaaaaaatctttgataataaaaaaactattaaaatagttttattgaaaaatcatgtaatattaaaataaatttagtattagtatattaaatatttaaaataaaataatatataaaataaaataatatataaaattaaataataaatgttcactaatctataattattagtacattacattaattatttaatagacacatgacaaatactaaagtgatgatgtagcaatcatatggttagagttgaccaactttcatatatatgattaataaagctgtattatgcccctgttaagaccaatcaaattgtcatacaacgaaaattcaaaaagtagactctagctatattttgaacttagtgagtagaaaccaaaacgttttcatcatattgtatgatgagctaattaccatcataacttcctaataaatacaattccgtttcatttccatttaatcagatttctaccaactaaattttgtaatcgtttttgtaatcgttttatttcaaacacccttaacaattcccttaatgtttccaattaatttttgccgttacacacccttccttcatatcaaattcaaacaatcatcttcttcccatttctttaaaaaaccttaagatcttcttccaattgaattatttggtctccatttttattataaaacctataaagatgtttccaacctcactcgtctatttgtttattaaagtttaaattaccatccaatagccccagtttctccaataacaaatgacgatcaccactcatatccatcctcgaagcattaaatttcaaaatcaacactcaaaccattgttgttcgtccaatccaaacgttggaagtttgtgatttcaaacgttataatattttgcttagcatcgacagtcttcttatggatgaaaagatatagtaaactaattcctaacacaattcatattcccttccgttccacactttaatttactattttcataatattcatgtatgtagccatgtaggataatgcatttgtaaacaaaaaaaaattatgtactacaacagtgaagttaaaaaaaaaacaattaaagaaataaaatcaatatcatgcaaaaatttctaaaatataccaaaacaaacttgcccaacaggcaggctttttttctagtctacaataaacgagagttgcgatacaataatagttgtcgattaaaagaaacaaagatatcggaatcaaagtcaactaaattaatcagagtaatagaaaaaacttttttttttgttgcaagacatcaatcaaagtattataaaaagactccatcgacgaaagatctatctaatagaaaacaactcaacaacttgttcaagcctaaaacaattataaaaaaaaagttatataaaaaaaaaaacactcaagatttagaatctaagcatatttattaatgaacgtagacgtccaaaaaaatgaactgtactggattacaatgatcagtatttctctgtagttctaacaatcccaatttttttaaaaaaaaaaaagaaaaaaaaatcctcaactatttatttgatatatttttccaaaaatgtggttattatggaaagtgaaattttaaatgtggagggtgacaagcatctttgcttagtatataaaaaaagcctttctcctttcttatcctccaagatttaacaaagagaacgagagatatg

SEQ ID NO: 24815 - DNA, 2277 bp, Unknown
  misc_feature (1)..( 2277): 2750-1469P.txt file - cDNA_ID_2186741; gDNA_ID_2096299; Annot_ID_195615
gaattcttcaaactcttcatccgaactggaggcgtatttggcatcccaagtaacaggaaataatccgctgggcattctttgtttctctatccaagcaatatcctacaagtgaatactaattattaagttgttggaaacaagttagtttaagaagcataatatataaatgacgtcattacaagaaatatctacattattaccaagagagaagagctattatatgttcttaggtgatcacccgcgctacgccgcagttttttcagattttttttatattgtttaatttaaatattttttatatatctaattattcactcatgcaataagaaaatatttttagtattaaaatatttttttctaacaacattctcaatatttcatcatatacataattcataaacaacgttcatcttaaaccaatttaaccgagggtagtgttcaattctagaatcctaagaatttgatgatggagctccgtacgtattttgcaccttcggtgatttattatataaatattaatttaagagaataacttacttaaatcattaactaatccacgattattatatactcatactttgagtttggattaccaaaaaaatctttgataataaaaaaactattaaaatagttttattgaaaaatcatgtaatattaaaataaatttagtattagtatattaaatatttaaaataaaataatatataaaataaaataatatataaaattaaataataaatgttcactaatctataattattagtacattacattaattatttaatagacacatgacaaatactaaagtgatgatgtagcaatcatatggttagagttgaccaactttcatatatatgattaataaagctgtattatgcccctgttaagaccaatcaaattgtcatacaacgaaaattcaaaaagtagactctagctatattttgaacttagtgagtagaaaccaaaacgttttcatcatattgtatgatgagctaattaccatcataacttcctaataaatacaattccgtttcatttccatttaatcagatttctaccaactaaattttgtaatcgtttttgtaatcgttttatttcaaacacccttaacaattcccttaatgtttccaattaatttttgccgttacacacccttccttcatatcaaattcaaacaatcatcttcttcccatttctttaaaaaaccttaagatcttcttccaattgaattatttggtctccatttttattataaaacctataaagatgtttccaacctcactcgtctatttgtttattaaagtttaaattaccatccaatagccccagtttctccaataacaaatgacgatcaccactcatatccatcctcgaagcattaaatttcaaaatcaacactcaaaccattgttgttcgtccaatccaaacgttggaagtttgtgatttcaaacgttataatattttgcttagcatcgacagtcttcttatggatgaaaagatatagtaaactaattcctaacacaattcatattcccttccgttccacactttaatttactattttcataatattcatgtatgtagccatgtaggataatgcatttgtaaacaaaaaaaaattatgtactacaacagtgaagttaaaaaaaaaacaattaaagaaataaaatcaatatcatgcaaaaatttctaaaatataccaaaacaaacttgcccaacaggcaggctttttttctagtctacaataaacgagagttgcgatacaataatagttgtcgattaaaagaaacaaagatatcggaatcaaagtcaactaaattaatcagagtaatagaaaaaacttttttttttgttgcaagacatcaatcaaagtattataaaaagactccatcgacgaaagatctatctaatagaaaacaactcaacaacttgttcaagcctaaaacaattataaaaaaaaagttatataaaaaaaaaaacactcaagatttagaatctaagcatatttattaatgaacgtagacgtccaaaaaaatgaactgtactggattacaatgatcagtatttctctgtagttctaacaatcccaatttttttaaaaaaaaaaaagaaaaaaaaatcctcaactatttatttgatatatttttccaaaaatgtggttattatggaaagtgaaattttaaatgtggagggtgacaagcatctttgcttagtatataaaaaaagcctttctcctttcttatcctccaagatttaacaaagagaacgagagatatg

SEQ ID NO: 24816 - DNA, 3003 bp, Unknown
  misc_feature (1)..( 3003): 2750-1469P.txt file - cDNA_ID_2186749; gDNA_ID_2096299; Annot_ID_195618
ttgcgagaacatgttttgttaagttgtgttttgatcttagggtttagttgagtaatgagctttgtgagattgattagattgagaaaatgtctgaattgattctttgttttagtctcgtgttgtgttggtctttggtctttgatattttgatgttctttgcagccacaatctattgcaatgtgtttgaagagccttgtcgtctaggtctctactctacttgttgtttgcgagaacaactgcttgtggctgcaaagtatcgtgtctgtcattgtgtaagtttagttctagatctttgcagccacaatctatgttctgctctatatgatctgtttgtactttgcagccacaatttatgttttgctagtctttggtctgatatttagatattttctgccatataataactgcttgtttttcttgtgtttggaggtttactcgggacacaaactcacgacttgttaggaatatcactagagtgtttacaaacaagtttgatggtccctactacagctggacatgtgtgcctcaagagagacaagagaaatacttcctcgagtttgctgttaactgttctttcagcccttcttttatatagttgattacacttcttttttttactgacattaccttttctatttgtagaaaacacaccattgggatcctttgatcacagggactgttcagttttacttcaacgagatctgtttaaggcgaatgaaaggcatggttagcactgtaagaactagtcgaaagaaacctaaatggattgggaaaactctatggaaggaaatgactgcgtactgggacactgaagaagctcaggaaagaagtcaaatctattcaaatgcccgtatgtctgaccgtaatggtctaggtcctcacatacacttcttagggtctaagtcatatcatcaaatccgggacgaattggcaagtcttctctctgtttactcctttgcaactttaactcgatgtttcaatgtacttttctatgacttgttttttttttcattacaggaagaccaattgggcaaaactgtcagtattggtgacgttttcatcaaaacacatacaaaacctgatgggacgtatgttgatcgaaaggcagagaagatttcagagttatatcagaagaatttgcagctgaggcagtctgagctcgaggctgaagcttctgctgtttcagatggcacttcgcgggtacgggagctcacagctgaggaatgtacaaccatatttcttcaggtaacgttttatgtttcccaatttagtgtttttgagttgtctttttcagtctctaatctcagcttttatcatactatgcagtccactgagagggattcgagaggcgttccttatggagtaggaagcctcaaagagtctcttgtcaatggcaagcggaagcaagcaggtgactcaacttcttttgtggctttgcaagaacaattacttgaagctcaacgcaagatagaagagcaggtctcttgcattcagaggcgtgaagctgagaattcccaagctgcagatgagcagaagaagaagcttgagcacttgtccttagaggagaagtttttgcgcgaaaatgatcctcggttcctcaatttcctcgaatctcattcagctaaggagacaaccacagatcctatctcaccctctccagctgcctctccctcttcatctgcttcataggtctgaatcttaactccttcctcaagactcaatatcaaggctcaaagtttttatatgtgtacttgtgttgcttgtgcttatgctgaacaaaattctaagttgtagtgaatcgaacatgtttctgtaatttgggttttgtacttttctgaaatgacaataaatttgttttcatgcttcttgtatgtgtttatgcttattgtaaagttttgttttctcaggaaggtttcaatctttataacaatcatatagatgttctaataacaacaatagtcgcaaatttagtcatcaaaaatgtaaccaagcagtcgtttatttataacaattcagtcacaaaaatttccgactaagtgctattttagtcgcaaatcagtcttaaaaatagtgacaacgtagtcgtaaattttaacgactaattaccaacaacgactaaataaccctcaagttaatcgttaatttgtcgtctaatagtcgctaaatttagtgacaacgtagtcgtaaattttaacgactaattgcctacaacgactaaataaccctcaagttattcgttaatttgtcgtctaatagtcgcgaaatttaacgactaaaatgtctctaaaaaagcgattacccaaacttagtcgtaactttgtcgctcttttgcgactaaaatacgattacgttatttagcgactctcgattagcgactaattttaatagtcgtttatttgtcgtaaataggagtttaacgactacagagtaactaatactgtagtcggtaaatgacaattttcttgtagtgactggattatcagccactgtaaatgcgggttactattagtttataagaattatgttttgggtttttatgtgtgtttaaactatatttgagctagttagacttacttaactctttagcattttcgctatccttaaagtgtgtcaataagaaaagaaaacttattaaagcaatatttttacaagttatacctatcaaattttggagtgcatgcaaatgagatttcgaagataggattcgatcggtcagttgcatatgtgatcgtaatataatgatggccattggccaacggacccgacaacgtgacctgtttttacattattgatcctttctctctagttttcgaataaaaaaaagactagtattaatttgatattttccaattgaacattaagaacgtggagccaagtggctgtggttaatacatatatgtatgattatatggtagtggcatcgcttactataagataagctaaacaaagaaaaaacttttatatttcctatccaaagaaagactagagagtggtagagaaatg

SEQ ID NO: 24817 - DNA, 3003 bp, Unknown
  misc_feature (1)..( 3003): 2750-1469P.txt file - cDNA_ID_2186752; gDNA_ID_2096299; Annot_ID_195619
agtgcatgcaaatgagatttcgaagataggattcgatcggtcagttgcatatgtgatcgtaatataatgatggccattggccaacggacccgacaacgtgacctgtttttacattattgatcctttctctctagttttcgaataaaaaaaagactagtattaatttgatattttccaattgaacattaagaacgtggagccaagtggctgtggttaatacatatatgtatgattatatggtagtggcatcgcttactataagataagctaaacaaagaaaaaacttttatatttcctatccaaagaaagactagagagtggtagagaaatggagaataaaactgaggaagaggtatcaatcatcaaagtttcttcccttacttgcatcgatctcgacaactctgatcttcatcaatcagctgttttactcaagcaggtctacgtccatttatttttcttaaaactgattacagtatgaacattataccttccgcgaaaaaacattattaattcggtcattatgtgttatatatatattcttgttccaggcatgtctcgatagtggatttttctatgtcataaatcatggtataagtgaggaactcaaggatgaggctttcgagcacagcaagaagttcttcgctcttcctttggaagagaagatgaaagtcttgagaaacgaaaagtatcgaggctatgcaccattccatgattctctcttagaccctgaaaaccaagtccgaggtctgtcagatcagctttcgcttgcttaggctaaaagttttgttgttcatgtatatctcactcttgttgtaatgtgatggggtttaggggactacaaagagggttttaccattgggttcgaaggtagcaaagatggtccccattgggataaaccattccatagccccaatatttggcctaaccctggttagtttttaccgtctcattgtttgttaatttatgctttgatctttaaataaactctaatgttttttgtagacgttttgcccggatggcgggagaccatggagaaatattatcaagaagcattgtaagtgtcatgtttgtttagaaaatatttaaatagggaaatcaagtgggaaaatttgctaatgacttaaaggataaaaatttagttggaaattaggtggaaagtttgatttaaaacaacttgactctttttctcccaatgaatgtgacatctctctctccacattagttataaacaaaaatattccacatatagaattccctcagagcatccacattggacatacctttgtaggtgtttcaaaagtaaattaagattaaatttaaagacatcttctattttgggggtctgaaatgtctttctaaatactctattacacatttaaagacacaccttcttgtttcttctattatttttaactagatgaattctcacggtacgcgtgggtttgttttaaaaattgttaataaaaatatgttaattgttttaatcgctaatttatgtttatttttttgtttattattgtataactaatagaattagactcataatagtatttacgtttcgacagttgttccaaataccaccacctcagtgataatttaagtgagtgtatatttaatgttatgtatatcgatattgtgaacttgagttgtatctaatgttttcattttttaatttccgtataggttatacatgatgatggttttgtatcctatttatggtacttgtcccttggtaaacatttactgatgttgtttgaaacacatataaaaataaattggttatgatgttgtcccgtggtaaacaatgtctgtttgaatatttatagagcttatagtagtgaaagcttgtaatcccataagctgggagtgtgaatatgttttagtgaaataaattgtgcatctatttaaaagacagttacagctgcttgttccttgattcagttctgtgtagcttctactgtggcatccattctggcagttacaaggtataaaacgttttttctaaataaatatgatgtacagaaagggagactacattgttggatttagaagcattaagccatcattgaaatggggccgacctattagtattgcactctaatagattctaaaacacatatggcccatctggcatgagctattttgtttactctatttgacacttataattagaagctgatgtgtaaaaaataaaagctgaatcatattaatgaaatgtttttattggaagattagaaagctgatgtgtcatctccagaaaagcttaaaatgctgacgtggcaaaatgatggagagagttgagcttctttcatatatatgatttaaagacatcttcatacaatctccattgcacataaaaatgagggtatttaatttgaaataagattataaaaagaaaacaatagacatttttagttagagagagtctagatagagacatttgaatactctctctcttgtatggttcttcccgtgtcaactttttatttgtttttaaattttaaataattaaactaaataaaaagtattattattaaattttaaagatacacttatcattagttaaccaatgcagatgctctcaaagtatcaccaatgaagatggtctaaacgacttcagttacttttggtctaaattttttgttatattgcttttttggtcacaaatatcagaccattaattaaggggatggtaaaaaaaaatatcatagcattgagtaacaatgatatatcactaattttcctttattcgtcattgtatttatagttaaaacttaaatacgaaaaaaagaaaaacgttaggcaaatatttagaattctgaactctagtatcatgtcaaaacttatggatatgcatcttaaaattaattgacaatactatactaggtgccatacatatattttctgtggaactcttaaggaacaaagtttttcaaactgtatacttatgatgagcccttctacatgatcaggagggtttgtaagtctattgcgaaaataatg

SEQ ID NO: 24818 - DNA, 3000 bp, Unknown; identical to SEQ ID NO: 9988
  misc_feature (1)..( 3000): 2750-1469P.txt file - cDNA_ID_2186763; gDNA_ID_2096299; Annot_ID_195622

SEQ ID NO: 24819 - DNA, 3003 bp, Unknown
  misc_feature (1)..( 3003): 2750-1469P.txt file - cDNA_ID_2186767; gDNA_ID_2096299; Annot_ID_195623
atctccaccgcttgaagcaaccatttcatgcagagccactgattcttgagctaggtcaggaatctccatcaaatgtaacttcttcgcaacccgctctagcacaggctgataagcatctacatcactacttttgttgcaaagcgactgaagatcttcatatagctcatcatctgatacatctactcttcctttagctcgccgaaactgactaagaaccagctcaacctacaacaaccaaaaaaacgctatgaatcaactacatgtcgtctttactgatccagacactggcctagccagccttgggtttcaagaatttacctgttctctaacttcatccgatatatcgagttcttcatatggaatctggcttaaagattgttctaacttaacagacacctccatcaatttacttgtcacttgttccctctccatcacctacacacagaacaacaacatctcttgtgtatcagagcacaaattctcaacaacttccatagatcaatcaagtcacatcaaccactaccaaatctaacatctaatcaaataccaaagaagcattgatatcactcaaacactaccatagcaaaacaaagcacgtggctctctcattcaatgaaaacaccaattcgtcaacgagaacaaaaattctcagtgaccacacagatctaatcatagatgctaataaatcgaagaagaaacgcaccagataaatcttgctcccttggctacaaaatttgagataatccttcgctgaacacatagcttccttcaaattcatcaaagtcttcaacgtatcttcgctgatcggttcgttactttctctaatttcctcaaacataggaacaagcagctttaatctcctcgctagattataacaaagcttcttcactgttatacgataatcagaaatcgcagcaatctcgttaactacatcgattaagctctgtgcagcagaagctttctcttcctccattgaattgattcttctctgtttaaaaattcacgatttacggatccgtttttcctccggagaagatggagatctttcccgattgagactccagtggcgagattgagcttaaaggaagaagagaaccatttgcagaaagtgcgaaagagagagatttctgagaaagagagattgtgtgagagagaagacgaggacttttcgaaaacggcgtcgtttagctgacggctttagcttattgcaacttgtacgattctctcggcttaagaactaaaccggaacaaaggtaaattcgaccacgaagccgcgggaccggttacgattgtgtttgttttattttttacattaatatattatattatcatttaaattatttctctataaaattactaattttcttgtgaaattttgaatatttttcaactattatattttcacggattgaatatacgaatttttacggatatagtggtcacttttttgctgtagttggtgacatttttggggtgtcatagaagaacaaaattgttaatgcatttataattttggatttagtgataattgaagaattaaaaaggttttatacctctatctctctaatcatgcaagaaaatattttaaaaagaaaaattaaaaatagttcaactggacaacgaaattatcctaaaatagttatttcttttgatctaatccttcttcttttaaacttttttttacttgtttctactctacatgtttcttgttattaggtaaagtattaggctctttttttaaaaaaaatgcttaatcctctgggtacctcgaaaagggaataatactctagttagataagtgcagcgatcaacatgacaaaatgaatgaatgtttgctttaattggtggctaaaagctaaatacacagaaaagtcaaaattcaatctcaaaatcaacccctctgtctccaatgtccctaatctataccaaaatgtcaatttattttcttgatcatatattccactaattaaaaataaatccttctctaatgaaatttgtcaaggccttggaagcctagttttaaatattaaatggaaactatttcttcaacaatcacactgttatttagtattgttgtatgttgttcactactttcttcatttgttttgtaagaaactataataagcaaaaacacataataaagtctcatgtcaaataatgaatcttatgcacatgcttgattattttacttgcacatatccctatcatcattatcacatttgtcaattaccgttatcatcattactctcattcttcccagaactttttcagcaatttccatacctcacccactaagatcttttaccctttttcttaattatagtttggatagcactcttttacatagcactgaaatttcggttgaacacataaattactagaaactagaaggaaatgttactgaaatttcactgattgtctaaaattgaataatctaaagaaaatggccttttaacctttttcttaggcccaaatgggctcattaccactcatgcttgttcggtgacccgattcttccggtaaaacagagcctaaaccgtattttcaggttaggctggtgttttcttaattctccaacctaaaaatagatggacacgtgtctatagaggctgagatattggtctcaatgaagaaaactaacggctcagacccgtgtatgaacgatattaagggccaaagttgcttctgttttccagaaatttttgaaacccaatttcagggcacgattccacaacctctttcttttcttctagatctacgtaaattcatcaggtacatgttattttttttgtttatttgatgtcaaaattttgatcacaaggaggcaaaaccaatataaatgtaacgctaatgcgtttgattatggtatacgtaacgaattagatttaatggttacattttattgttttagatttagttatgagattggcattaattattggtgtttcctttgaatttgctatgtttcttatgttgatgtaatcagctagagattgaaaaatg

SEQ ID NO: 24820 - DNA, 3000 bp, Unknown; identical to SEQ ID NO: 9986
  misc_feature (1)..( 3000): 2750-1469P.txt file - cDNA_ID_2186836; gDNA_ID_2096299; Annot_ID_195645

SEQ ID NO: 24821 - DNA, 3000 bp, Unknown; identical to SEQ ID NO: 9994
  misc_feature (1)..( 3000): 2750-1469P.txt file - cDNA_ID_2187026; gDNA_ID_2096300; Annot_ID_195674

SEQ ID NO: 24822 - DNA, 3000 bp, Unknown; identical to SEQ ID NO: 9998
  misc_feature (1)..( 3000): 2750-1469P.txt file - cDNA_ID_2187036; gDNA_ID_2096300; Annot_ID_195677

SEQ ID NO: 24823 - DNA, 3003 bp, Unknown
  misc_feature (1)..( 3003): 2750-1469P.txt file - cDNA_ID_2187047; gDNA_ID_2096300; Annot_ID_195680
gaatacaatcgtcacaaattttatttgtaagaaaaacatcataaaaattgaatcaaatatatctattaaccattttcgttacaaatagttaaaacaaaaaaaaaagtttaaaaaaaactctcaataacagactaacatcgtcataatttgtgactaacatatcgacttaattttagtaactcattattacataactacagtctcaaatggtcacaagtgatgactaaaaatttgttgcatattcgtaacaatattactcaaaactaatggtattttgtgactatcataatgctccaattccatcacccactataatatattagtttcaaatagtcccaaactattactaaaaaaaatcatcggatatggttaaaattataaactaaaaacataacctcaaaacactattctttattaaattattgtcataaacatacatatttcttataataatatatatcttagttataaattataattcatctccattcttacaacacaatcacaaatttgacgataactagcagagaatgtaaggatttgacgattactctcatatgataacctctatacagatgatttcaggctctctggaaaggtaagattcaattattatttttctgtaaacgtgattataaaagggtaaagccctgttcttttcattgtcgctgcatcagcgatcggcgaccaagaattataactgagttgagacacgtgtctatggtgagtaacaccggcaacaccattaaaacagtcgcagcgactccttttcaccattccaactgtcgctcatttttccagcgacaacggcgatacccgtggaagtgatcgcatcgactcttttttaattattctccatttatgtggaaattctggtcgcttaaagctatcgcagcgattttaaaccgaacagggcctaagccgtttttctagaaaacggttcaaatagcttgacaaaatgctaattgtgtatcacacctatactcgtgataatttatataaaaataatttcattcatatgttaatataaatgacatgtttacttagtctatatcaaaattatagaacaaatttcgagaaacagaagaagagaagaagccatgaagctaactagtacagtcacaaaaggacgacaccgtttcgaaattgggccagagacaaaactaaactggatcttaaatcagcccaagccgttaactataaatttgttacattagtcacggactcacgtgtcacgtccttcgaaaacaacgtatccgcacgtgacatcgccaccggcctttttttttttttttcacaccgcacgaggaagtttaggtttcttcaaaatcacaaaaccaaacaacaacaaccaaaaaaaaaaaactcaaaccattttctctctaacttctctgtcatttctctctctagtggcaaagtatggcggattggggacctgttgtagtcgctgtgatactgttcgtgcttttgactccgggacttctctttcagattccggcgagaggtcgtgttgttgaatttggtaatatgcagactagtggagcgtcgattctcgtccacaccatcattttcttcggtcttataaccatcttcaccatcgccattcgtctccatatctataccggttaatttcaccgtaccggattcgtaacttcccccggttgtctagttttatggtttgttttggattttgtttcttctctgtgtcttgtcaaaacgttatgaatttgtgaatctgaatatgcattaagttaatttcaaaattcgctatgtttgattctcggtttggtttaaatctggttatggcgttgatttgaatttgatggtaggcactaggcagttagccttagtttggtttattggtattcgagttcaaattggaattgagtactaaaatgctctgttactcatttctgcatcttgagttcttatggatttgcttacgaaatgttcaattttgtttggtctggttcggttcgttctgaaacgaatgtcgagagtcttttgcttgactcgaaacttgccttgtgtcagcgtgtaggggtttgtaagaataaaatgggctttaaaattaagttattaatgggccaacacatgatccaccaagaagaagtgatccggttgcatcttagattctcatgtgatgtgattgaacgttgaaagtgcacagaagtagacctgtttaaagatgtttcacactttcactgcgtactatgtaactagtggagtcagtcccgtcatgcgtatgagtaaagcgcgtcgataccacgggaacacacaaaaacatgtcaccctagtaaaaactgtgttcgttagctcattgtaaattgcagtatatggcataaacaattgtttctacaaattccaagaatgtaagaatcaagacaataaaatgtgactatatcaagaacttaactaaagtttcatccacttaaatgaaaaagttgatttggatagaacaaaagacgtaatattcgatgtgttctctctctctcccatctttacttttattgactttttattttcactttaatgtgtgatgtaaaaataaaaagtaattatttgttcaaccctaggtgaaataaaggacgacccaaaacaagtgacgagagagcagagagagcttcttcttccggacactgaacagtgagagcacccatctccaacctcttcctgtaagtttccccaactactctgtttcttaaatgttctgcgttctttaaaacaaagtatagaagatttaggttgtaagatcgatctcgtttgatttcaaactcactatctgaaactctttgattacaaacccatcttcataatctctgtaaaaatcaaacatgcaattcacttaatggtgcaaaaaccccagaagagggaaaaaggaatcaaatttagtttataaaagcagtggaattgagttgcattgttgaaatattcaaaagcaagatcagatttttgataaagaatttcacttttgattgcaacttataatcaaggaacaagatg

SEQ ID NO: 24824 - DNA, 3003 bp, Unknown
  misc_feature (1)..( 3003): 2750-1469P.txt file - cDNA_ID_2187067; gDNA_ID_2096300; Annot_ID_195686
caatcccgaaagaaaggtaaaaaagaacccacaagaaaagaactgcatgtagtggtgaccaaaattctgaaggaagtagacttcaatacggtgagacttcaaaagtttgagaatttacagattataaagcgtatacaaaacctttgaactcaaagacattttgaattttgtttccaaacaggcaactctatctgatattctacggaagcttggtatgtttctgtaaagcttttctcttattctcaatccataatagttatcgtcttccaaatcttcaggaaacgtttatcattgaaacattcttttcctgcttgtgataatactagggagccattttggaattgatcttatgcatagaaaagcagaggtgaaggatatcattacagatgccattaacgaaatgagtgatgatgatgatgagaaagaggaagacacagaggatgaaggtgagaaagagggaaaggactagttttgtctttcttctctttcctacaataagaaaaagaaaacataaccgaagagacggtttaacttaaccttccatgtgtgaatcataggattgtttgtatgtttggtgtaatgtgtaatctgttaggctcatgtagtatcaggtaatgtggttggatactttctggattagaattaatttgagatgtatttgtaaggacttgcaatctttcttcactttagcagcacacaagtgacatggataaatattgttgtgtttcaaaagaggaaaagaagggtcgtccaagagatcagctccaagtcgatcagagagccaataattcctctcaagacacgcccacgaatgaattcacaagtaatctctcgtgttatgggatctattgcacttatttttgattttaagagtcatgttaacttttgtgtcatgtttattttaccaccctataattagcatgttcgtttcgtcaccactggcggttgcggcagcacaccattgacggttcagcaaaacgtttatcataaacattttatttagctcctcaagaagttaaaacgtttatcatgaacatttcagtccctgatcttcttctccatctccaacccatgtttggaaaccatgtgtgcggttctctcaagcttagttctgcactcttctcacgcatttaaaaagttaaaacttcttgaggagctaaataacacaataaaaccacacaatcgacggttcagcagcacaaacaaatagttgaagcgtatgtgacaacaaatatgcttcatatagtgtgcatggtttggttttattgtgttacttattattatacccttattgaacacccgtattttttttttattaataattttgaattgtaacgcttatatctttaagattcttatttttatcatttatacagttttatattatcactttaaataaatctaaataatttttatgtaagttttgaattgatttgagttggagtcgaacaaaaaatcatttgtattaattaaacaaactttattaagtcaattctgaacatttacaaataagccccagttttatagtttgtcatattacctgatgcaattttggtgatgaactaaatgcacgataataagcttttcaccatgaatttttatttttattttagtactttaattgtgtttttaatttattaatcatgtttaaattttatattttatcagatgattattgtgttacttgatttacaagatatttattagtttagaatgccaaagttttttaaattgttttaataattattaatttatgattcataattaatcttatggtcatcattcaataatttgtcttgaaccacatgttttttttacaccgatcaacattatcttgaaccgtttgtaagtttagcgtcttcctatttgtgtagctgttaagtttccaacttttcttaatatatactaattgtacgactggatactttttggatttgagttcatttttgtagatgtctttgtaaggatttttgagcttgcttcttttttggggtctctctatactagtttacaattccacttaaaagagacacaatgatagaaagtaaacagagaagacagtttatcctgcatggaaagtaaacaatgacaacaaacaaaattggatgaaaccactgatttatattatgagatcatctaaaaataaagaaactattttgacccaaaaaaaagttctactaaaattgtaattcatacttataagtgagatcacctgatgtcattgtttccagctatgcttacccgtgtttcaccttcattgtttctagctttgatttccaagtgaatcacctgatgtcatttacagatcccgagtctttctttatactctaccctgcaagtgcaaatctcacacatataatatattaccaattgaaacttcatactccgacgtccgaatatgtgatcaaattattagaggaatgatcaaaaaatgatttttgaacctaatattaaaatttctcttacatatagaaaacatccaactttgacaaatccatgtaatggacccgtaggccgtaacatcaaatatggttagatatcactcttatcgatcaaccaaccaattaccccataaatatatgtatttattcaatcagccgtccataccggtcttaaagtattgaagtagccagttctttagtggtccttattatgttttcgatcacctccttatctctgtagctacataatcttcccttgttaaatacctaaaccctattctccacttaacctccctaaagaacctatatttcacgttatattcttggctctttcacttttcccataaattctgtgcaaaaactcgagtgggccttaagctttatctaccttatctctccagctatacacttgctactcaagataccgctaaccctaatctctactagacccccttaggacttaaaaccctatatatcaaggtctactctctgttttctcgctttctttattcgagccattccatacgtttttcgatttctttcattgaaaaccattgaaatg

SEQ ID NO: 24825 - DNA, 292 bp, Unknown; identical to SEQ ID NO: 565
  misc_feature (1)..( 292): 2750-1469P.txt file - cDNA_ID_2187093; gDNA_ID_1591980; Annot_ID_151792

SEQ ID NO: 24826 - DNA, 211 bp, Unknown; identical to SEQ ID NO: 540
  misc_feature (1)..( 211): 2750-1469P.txt file - cDNA_ID_2187151; gDNA_ID_1591768; Annot_ID_151485

SEQ ID NO: 24827 - DNA, 3000 bp, Unknown; identical to SEQ ID NO: 3866
  misc_feature (1)..( 3000): 2750-1469P.txt file - cDNA_ID_2187191; gDNA_ID_1620671; Annot_ID_48150

SEQ ID NO: 24828 - DNA, 3003 bp, Unknown; identical to SEQ ID NO: 22612
  misc_feature (1)..( 3003): 2750-1469P.txt file - cDNA_ID_2187191; gDNA_ID_2926200; Annot_ID_141489

SEQ ID NO: 24829 - DNA, 820 bp, Unknown; identical to SEQ ID NO: 7714
  misc_feature (1)..( 820): 2750-1469P.txt file - cDNA_ID_2187203; gDNA_ID_1621158; Annot_ID_57065

SEQ ID NO: 24830 - DNA, 2819 bp, Unknown; identical to SEQ ID NO: 607
  misc_feature (1)..( 2819): 2750-1469P.txt file - cDNA_ID_2187237; gDNA_ID_1592299; Annot_ID_152217
  misc_feature (103)..(103): n is a, c, g, or t
  misc_feature (113)..(113): n is a, c, g, or t
  misc_feature (130)..(130): n is a, c, g, or t
  misc_feature (416)..(416): n is a, c, g, or t
  misc_feature (562)..(562): n is a, c, g, or t

SEQ ID NO: 24831 - DNA, 2677 bp, Unknown
  misc_feature (1)..( 2677): 2750-1469P.txt file - cDNA_ID_2187241; gDNA_ID_1592023; Annot_ID_151861
  misc_feature (25)..(25): n is a, c, g, or t
  misc_feature (682)..(682): n is a, c, g, or t
cgcgagagagagagagaggatgtgncggtttgtattatgtaaatgcttgtcttataatgagagagaccttattgatgataccaatctttgaggtccaagtaacacaacttctttgtgattgatatgtatgagataattaatttgtctattttcatggcatgatgtatcatgtatgtgatttgtctgagatttgcaacattcttctataaagttgagaaataagggtagtttagtctttttaaccaaagatttttatttatttgatcttttccctgttttaaaaagaagaatcgagtaatcgcgtggttttgaagacgaagaaggaataagacatcacgaggaacacgatgggtgaagcggtcaaggtatgtttttatctttgtctcctctgcttctgatctgttaatgccaatcgataattcctagttttgcgatgcaagcatgaatcgccgattgttatctgtgtgatttgattcattttcgacgattttcgaatcatcataactacttctttcgctcaaatctcgcactcagtttaatgcctattcgtattcaatttagttatgcaattgaagatttctcgaattctctgaagttttacagctaaaatcagattaatatctgaacattgcctcccaaggaatctaatcccctcttgatgtgcttttgcttaggatggganagaagaagtgattcaagcttggtatatggatgatagtgaagaggatcagagacttcctcaccacaaggatcctaaagagtttgtatcgttgggcaaacttgcaggtctgtttgtgttttcaattcaatgttgttctctctgcttctctatttgttttcacatgtaatgtttttgtgcagagctgggagtacttagctggagacttgatgctgataactacgaaaccgatgaggatttgaaaaagatccgtgaatctcgtggttactcttacatggtttgtggtctttatttatttactatcccactagacttgaatgctagatgtttacttttgtccaagtcttattttaactctctagggttttgctcaatcttggtttgataatagaaaaatgttcaaattcaggacttttgtgaggtatgcccggaaaagcttccaaactatgaagtgaaagtaaagagctttttcgaagaacatttgcatactgatgaagagatccgttactgcgttgcaggaagtggtaagtacttcttttattggctgccttacttgaaaacttaaaatttcgatatagtagtgtcatgttttattttcttggaaaaaaggttactttgatgtgagagatcgcaatgaagcttggattagggtatgggtaaagaagggagctatgatagtcttacctgctgggatctatcatcgcttcaccgtggactctgacaactatatcaaggttcaatgtcagcttcttctagccatttattatatattttcggcttgcttagaaaattgaaatatcttgttgaacaggcaatgcggcttttcgtgggtgaaccggtatggacaccatacaatcgcccacacgaccatcttcctgcaaggtacaatgtcctgatttctccccttttgttttgttctcttatgcaaacaatgggatataatcaagcaagaaattttgttattttacgagaaagaaattctgatatattgcaggaaagaatatgtcgataacttcatggtcaatgcctctgcttagagagcttcctctctctatatctggctttctgaaaccaggatctataaacaaggcctacaataaagaaagctttcctgtcaagtattggatatttatatatattcctgtgtagaatgatggcttttggtatgcttgagttgttgtaaacttagttacactctctgatatgtctctctttaccatctttgtcgtatcccatatacgaaaagattacattgggattcatattgtcttacgttcgttcctatgtgcaatatgttgagtttttacacaaatctctattcttttttatttgcttttcaaaaaccaacaaattagaagaaactaataagaagtaatacgtccaaccgcgtcaacttctttggtttaatctaaaccatggttcgtttggttgttgttgtgtatcttaacatgctgacggttctaaggatggttcgtttggtggttgttgttatcgaacatgttcacggttctaaggaagaaaagtgtggttttgtgtatttgtggttggacataagattttcgttttcgtttacatttgtggctttcttttgtaatttccttttagagtttggaatctccttaaatccgacctacattaactctatagtctatagaattggagtaatcattttattctcctatcttaatggattacaataaacagtagttgaatggaagaaaaaggggatataaaagtaaacttagcaagtttagcagccatgattaggcttataataatttatgtagacgtggagcttacgtggcagtctagggagtttccctgctccgggaacaattcccccaaattgactcccccatagcaaaaactattcgacctcactctctctcgccactgttccgctctctctcattcttcctaattttacccccaaaacctccgattattactcaaacgccactgctctctcgccgggattccggtgaagaggaggagatg

SEQ ID NO: 24832 - DNA, 3000 bp, Unknown; identical to SEQ ID NO: 4588
  misc_feature (1)..( 3000): 2750-1469P.txt file - cDNA_ID_2217803; gDNA_ID_1620716; Annot_ID_49115

SEQ ID NO: 24833 - DNA, 3000 bp, Unknown; identical to SEQ ID NO: 4588
  misc_feature (1)..( 3000): 2750-1469P.txt file - cDNA_ID_2217803; gDNA_ID_1620716; Annot_ID_165642

SEQ ID NO: 24834 - DNA, 3000 bp, Unknown; identical to SEQ ID NO: 4588
  misc_feature (1)..( 3000): 2750-1469P.txt file - cDNA_ID_2217803; gDNA_ID_2926190; Annot_ID_140994

SEQ ID NO: 24835 - DNA, 3000 bp, Unknown; identical to SEQ ID NO: 4588
  misc_feature (1)..( 3000): 2750-1469P.txt file - cDNA_ID_2217803; gDNA_ID_2926190; Annot_ID_200966

SEQ ID NO: 24836 - DNA, 3003 bp, Unknown
  misc_feature (1)..( 3003): 2750-1469P.txt file - cDNA_ID_2218247; gDNA_ID_2214632; Annot_ID_136073
ctgtttacacttatggactcaaacaagccttcatcatctgcaccaagagttgttgttgtagcatccacaaataggttcttgtctaccttaagcataatataagttgattatcaacattggttttgaatgcaatgatccaatggttttccccgatcttgtcaaaagggtggatgcgattgacccagcgctaagaagagcgggacgatttgatgctttagttgaagtgagcacaccaaatgaggaggatcgtttaaaaatcctgcaggtaattatcgagttcttaaatgggattttcgtatatagtaagtttgtttgtgatcttcatgttttctatttttttcagctgtacacaaagaaagtcaatttagatcctagtgtcgatcttcaagccattgcaatatcttgcaacggttatgttggagcagatttggaagctttatgtcgtgaagcgacaatatctgcaagtaaaagatcttcagattctcttattctaacatctcaagacttcaagattgcaaaatctgtggttggtccaagtataaacagaggcatcacagttgaaatccctaaagtgacatgggacgatgttggtggtcttaaagacttaaaggtcaatactttttaaaaatattcattttgcactttgttgtcctgttttctccattgcgattaatggtttttttttccttgtgacagaaaaagctccagcaagctgttgaatggccaatcaaacattcagctgcatttgtaaaaatgggcatatcgccaatgcgtgggatacttctacatggtcctccaggttgctcaaagacaactcttgctaaagccgctgcaaatgctgctcaagcctccttcttttccttaaggtatagattttgatagatcacatttaacaaaatccccctttggttgtgaaacttgtttaaagaaacttattttttcttgtgtctttgtgtgggtgtgcgatgcagctgtgcggagctattttctatgtatgttggagaaggtgaagcattattgcggaatacatttcaaagagctcgacttgcttctccaagtataatattctttgatgaagctgatgtcgttgcctgtaaaaggtttgtctctatctctcccaactcttgcttcgtgttatagactcttcttaacatgtttatttccttgggtcttcgtagaggtgatgagagctcaagcaatagttctacagttggagaaaggcttctatctacactgttaaccgaaatggacggtcttgaagaagcaaaggtaaacaaaagctcataggcttttaaagattttatctttgttattgggttgcaatgatattgatcgggttttggtttaagggaatcctcgtcttggctgccacaaaccgcccgtatgcaattgatgctgctctaatgcgacctggtcgatttgatctcgtaagtcctcatattggatcttttgatcacacgagttctgaaatagcaaacctcattgctaccctcttcttgatttaggtgctatacgtgccaccgcctgatctagaagcccggtttgaaatactgcaagtgcatacacgcaacatgacactaggagacgacgttgatctcagaaaaatcgctgaagaaaccgatctcttcacaggtgccgagctcgagggtctatgcagagaaagcggaactgtctcacttagagaaaacatcgcagcaaccgctgtcttcaatcgccatttccaaaccgcaaaaagctcgcttaaaccagcgttaacaatcgaagaagtcgaaacttattcatcattcaggaaggcggcgaaaagatctgattcgaaaccgattccgattaacaaaaagaaggcgacttccaccgtcttcggattctcatggcaattaggtgttttgagcttattgttgcttgctactggaaactattacttcaaccacactaaacatgaattactagtagcttctgctacatgagacttgaaacagctcaaagttaaaaaaagttgctaattttgttttattcataaataccaaaatatcttttgtttcaaagttcaaatttttaaataataaaacggctaatgattattagattcgaacaatgacaaagattggccattacacatgaatggcccacgaacctcaccaccgtcgtgaaatttctttaagcaccaataatttcactggttatctcttactaattaattactttttacgtgttctaatccaaatcaacaataattatctgatatttcttcataaaccggttttggaatttagctgaaagatgtgaattttattttgtcttattaatcaaaaaatttgaaatcgttttgatttcaattaaaccggaaccctgacactaacaaaaaccggtctgagcttataaatagagtggctcgctgatgactcagttagtcagctccgagtctgcgttttacttcttctccttgagtttcttcttctagatctgatcgcgaatcaccaaaaggtttgtttcttaacccctaaaattcctccagatcgctttgatttcgtttctctgatgtcttagacgaagttagatcgtagattcctatgttttgattcctcgatcatgcttcgaattatggtgtttttatcctcaatttttggagatttggtttctacggattttgtagattcaggaatttagaaatggtgattcgatttcaatggttttagatctgattcagtcttcactcttgttccactattttgaaaattggctaaaaactaggtttcgtcgtctaattctcccgacgttcttcgagaaatgtgaactttgaggtgaagattttgcgttagcatatgtggttttgtataattgacgttgctactattctgattgtgaattttaagcagcattcacaattgaattgagtcttcactttgttcagctctgaatctatcatctctgaatgttggcaagttatagtttcttattatatttcggtgttttggtttgttgtgctaggttttattttatacaatg

SEQ ID NO: 24837 - DNA, 3003 bp, Unknown; identical to SEQ ID NO: 24836
  misc_feature (1)..( 3003): 2750-1469P.txt file - cDNA_ID_2218247; gDNA_ID_2214632; Annot_ID_187991

SEQ ID NO: 24838 - DNA, 3003 bp, Unknown
  misc_feature (1)..( 3003): 2750-1469P.txt file - cDNA_ID_2685595; gDNA_ID_2213636; Annot_ID_132173
agctttacgataatagatatcctgcaaccaattggtggaggaacagttaagaactcacgagtataattctgagaaatgcgcaccttttacataaagctctaagaacctcattcaaggcatacatacccttttgtctcgagaagcttttcccatggcctctaaagtagaatacggagttggttcactgcgatgaacactaaaagtcagcgaaaactgaagggacagagataagttaagccactagtgtgtctcagaggcattctatcaaacacattaagtgcacaacaaaaatatctgcaaggtagaaaatttcgagattaaatcgatatacaagaagaagacccgccaaattaccgtatagtatacagcagctaggtatgtgaagaagagtagcaccaaagtagaaattcaaggtagagccaagtgaagaagactgtgtgagagaacaaaaaccgattcttcttatttttcttttgatctgtgccctaacaatttggaagatgacgaaatagagttattgggcttgagaccaagttcttttgggtcacatattaggcccaagtatttattaatggaattttcgagaccaataagtaaaacatgtccgtatccaaataaaacaaacattcggccatgtaaattctgacgaacatttagtgtaattattgtatcgaaatttttattaaaaatataattgattttttgtctttttacaaaaaaagcagtcgattcctaacacaataattacacatcccaagggcattgggttcgaatcttgttaaggaaaatcaaatcaactgattgatttcatatatggattgtcacctgtacgttatgattataaacagtcattaaaccactctaatggcaaatattctccattgaaaaacaagaactggattatctttttctgttaatttacaaaacggaaaacaaaaaaatgattatgaaatacaataaccattataaaaactaggttaaatattgtaaggtttggagtgaaactgagcatgcataaaatctttgaaagtaataatgaagaaatagattgctttcaatgaattgataaggcaacaatatgaatggtcggtcgatctaatgtaatggtctcacttcacagttcacacaactatctgtatatcccttagacgtttgtcttgtctcccacccacttttttttttttttttttaaatcataatcttcttctcaagatttccctactcatggatctcttgttttgttttcatcccttaaataatttccaaaaatggtgaccactatcaatgtgtaatttccccactaatgtactgaataattgatagagaaaaaatcgctaaactatagtacaagtatgaaaagcaaaacatttttaatacgatcaaactgttataatttgtactatatctcaatagtaaatattaaattctaatagaaatgagtgagtttaaaatattcatatcatatgctactcccgataataaagtagtaaattccaagtgaaacataaaaaataaaatctagttgaatcgaagaatcaaattcagagggatcagaactggaaagctgctgattcaacaagtctcggtccatttgaaaagacccaaaggcatcaaagtccattacttattctgtgtttgttaaaacgcactaaaagcccattaataaagtatgttctttttcctaatgtaattatgcaaaaaaatggttcatacataatacattcgtaaccatgacgacactgaataaaaatgttctttttgtatccaattcagtttttgacactaaaaagaactacaatagtattctctttgacgaatcaaagactgcaaaagtcgtgaacaaatatttaacaaaaattttattataaattagaccaagtgatgatgataggaaagatgattgtggattgtaggacaatccgacggtgcagagatggcgagtgcacggagaatcaatggatgcacgcgtagaagaacattggcgcgtagggtcaagggcttgatgacgcgcgtggggggtttgctttaaacgcgtgaagaaggtttaattcccacaaaatggctcggctcaaggctcaagccgacggtatattacactgtcactctcactcccatctcttccgtttaactgttctttcttttcttttagggaataagaaaatctttataaatgataaaatatgttatcgaaagaaagaacaatgtgcactgagatatttaccaacaaaacaaaacaatataaatacactaaaaactctaagaaaagttacttattattagctatgtgttttgtgtattaatgtataatcaaaatattataatgctagaaagtttggtatagtgaccactgtgaaggtaacaaatagtaatataatttgtgttcaaaatcaaaactggatacccaaaatttatgtgtgtcatcataagttacaaatcaaaatggtaaacccacaaaagaaaacacactaagtttaattagagaggtctaaatgatgtgggaatcatagagaaggcaggtaaaaagaaatgaagaaaaagcttcctgcttttatgctctctctctctctctttcattgaacatgtataattataacaaaggcggccgcattaaaagtaaaaaacagaacatttttttaagtagacttcgttattacagtactctcctactcacttgccattgttattacataaccagagagctcttcttcactcttttcctctctctccctccctccctcttccattaaatctttgtggttctcttttattgttttgatactgtgctctgcttcggagagtgtagaaagagacagagctaaagtctctgtgtttcttctcagcaggactaaaaggaaaaaagggtaagagcttggagacaatttttcttccttcataagattctctctttttaaaccataaaaaatcaaaagattgtaacttttcaattatttgtttgctttatataattatctttgtgtaccgtacagaaatcgattgctaatg

SEQ ID NO: 24839 - DNA, 3003 bp, Unknown
  misc_feature (1)..( 3003): 2750-1469P.txt file - cDNA_ID_2685632; gDNA_ID_2213641; Annot_ID_132273
aactttcatgtttatagtataatgggcctccttggcccaatattctcgaaacattggactattggagtttctcgtcatcctcaaagcaagttattgggaggtgactcaaaatcacgttcttgaaaaattttccgagttaaaaagttaaacctttatttaattctccaatttgattttcgtttatatttctggctttcgtcctaatgaatatacactagatctcacttgtttttcttcatgtacgtaatcatttttgggggtggcacgactaatcattgcttgagttgatcttgatccaaatcttaggaagataatgcgcaattaattgaattttcaaccaaaaaatggacaaaaagactatcgccttgtaatgattgcaattatgatgcttctagtcttctagatactgtatcaagtatcaactggataataaactatttatcattttcttacaactaacaaccaattaaaagccactcaacatactaacatttccatagtccactccaatgattattgattattatgattaagatcagatgatgttctctatggattaaaaaaaaaaaactagcaataaaataacaagaaaaatggtcatgttgggactgggtgggagtggaacgagaggccacggcacacaaagtcacaaagaaagtgtcattatccggtgcaccgtcccacatgcgattgctggtaaccacgcgtcaatcagacgaatggcatgatccttttttagattgtgctcgctaacatggaccctacaaggaccgaactaatcaatgtggttctcacgtgcctcttttgccaattttaacttttctaacgaaaaaaatattactctgaaacctccacattcaattgtgatatgaccggcgtctggccctcaaaccgaaaggctctcctctgaatcctttgttgctctgtcccacgtgccagaaatatcatcttaaatatggtggtctttcgcaaccctgaatggcatttgtggtaattagttctaaattacgtgagacaatgcaaagattttgttttgcaccatcgttgccgaccacatcaaacaggtcatcgctctgggtccactcaccgctagtccgctatacacttgtgggaaaaggcttcttgtagtacagtttcgtcacggcgtcttattaattgcaaatctgtgacgttacggttttcgattcgggttactattttaatggaaatcttttgataatagctagagcctagagtatgtaaccctaaggttagatggtaataccgaatctacctaaatttttgttattttcggtttttcatgagatatatagactgcgtaatttaaaatctcaaaatttggtttcactttatttttatttttttttagtttcgaggtaggtatacaagcatggaccttttgacattatttaaaattttcataatttagaatcttcatgttaaacgtgtatggctacgatcttcggaactttattcggtttgtatgctcaaaggccaacgccatttattttctaattgattttttcccgttacggaaacaatctttttgcattattgaacttaattaccaaagtttatgaaaagaaacaataaagtctaaattggcctattttgatatactgatcacttacgcgaaaacatctacattgttatctactagactagtcattaactcgaagatagaatttcatttcttgaccaaaaaaaaactcaaaagatagttataatcacagattcattattgacttttgcttttaacactgtagccatttatgtactatttatacaaatacctaacttttcaaatttgtgatatttttcaccctacattttagcctataggttggatcattttgtcatattgcatcactgtttactagtaccaaacttaaatatcacacgagcagtaaatttgctatcaattttttcgttttcacaaacatatatctagtttccctaaccaataattaagttaaattgcattaggaatttaggatttataataaatagatatataacccactaacgacaaaagactatgtcttgctacgtctctgcctttattatcatgccacaagaaaataagaggggaacagagggagaaccccataaataaataaatttagagaaatatctaagtttggttcttccctgtgtctacccaccgtgatcatcataaaatggattgtgatttctgatttgtgagtctatctttctctactccattagcttcctctcccttggatggttacgtcactttctccgagcttacgtcatctatatccggtcttcacttctttttccttccattcctcagcagcattgcgtaatctatctggtgtgtgtgtatcacgtcacttcctcctagtccctctctctgtacgttcttgttgtgaaattgatttactttttgaaaacatttttggtgcaattcaacaatatttgtttcacagttcttattttatttttgtagattaaaaagcttaaatttcaaaaacaagaaaatcttgttttcacaaaaattaggcaaagggtttccaatttccagattgtttaacttgattttcaatttccaatttccgaatcttgcaacttgatttctataatgataagttatctccaaatatgttttcttaaaagagaaaactcgatttgacttcaagttgagatcatatccattattattctctatattacgtacaagttattatatattttataactctagaggaatgttagagcttgtgttaatggaattccaagtcagatatgaatattctcttataatcattattgtccttataactgttttaaatacctcaaatttatattttatcccctgtttttttcccgggaaaacgaatctcaaaaaacgaatttcctactttgacattattttatctccctcttgctctttgatataatgcaactatctgaaactctatgaatttatcatttacagagttcaagatcatatgatattttcactttctggacaaaatg

SEQ ID NO: 24840 - DNA, 3003 bp, Unknown; identical to SEQ ID NO: 24839
  misc_feature (1)..( 3003): 2750-1469P.txt file - cDNA_ID_2685632; gDNA_ID_2213641; Annot_ID_181244

SEQ ID NO: 24841 - DNA, 3003 bp, Unknown
  misc_feature (1)..( 3003): 2750-1469P.txt file - cDNA_ID_2685636; gDNA_ID_2214530; Annot_ID_134257
cttatcctattctgttatcttgcttatattattacactctgttagtctccaatttcgatcatgcgttagctaaaaataatattttacggaattgttaggagatcctacttgtccttgatggaaacactggtttgaacatgcttccacaagctagagaattcaacgaggtaccatacgaaactacctaaacctagtgattctggctccccaaactagaatttcttcgtaaaatcttgaggtttctgggttacatttttttcaggttgttggtatcaccggtttgatattgacgaaactagatggctctgctagaggaggctgtgtggtaaatatctcataaaatttttgatctcattcaaagctcttatttttcattagctctgtcattgaaactggttctccatgtcttgcaggtcagtgtggttgaggaattgggcattcccgtaaagtttatcggtgtaggagaagctgtagaagatctccaaccttttgatccggaggcttttgtgaatgctatattctcttaagccataaaacctcgtcttcttcaaaaagctatcatcttcaacgcaggccagagccaagtggaaaattcacagtgaattcgccggagatgcaaatggaagcattccttattttcttggagatcttaggttgacaagctttttctgcaatggatgcaagtttcgatttttaatgatgtgacaaagctcgtttgcacactgatagtgatcacacaagaatgtaacgagtcataggaactgcttgtgtctcgtctcactactattttgtatattgttaatgttgtatttgaaaggaattacaaagattgataaaagaacaatgaggggaggaaaaccgtaaaaaagaaagaaaaaaaaatgaaacttttttaaaaaatattcataacttgtatataatccacaaaacgatgcaaaggtcaaatgacatgatccataattcgattagttttcatatcattttgtaaaaattaatattcaaatttaaaaataaaaactgtaaaaatgaaagaataaaaaacaaaaatttaaaacttttgaaaatatattaatatgaaacttgtatattaattctacaaaacattgtgaaaacaagttgaattagtggtatcggcatacgacttcaaatgacaagatccaaaatccggttaatttttattttattttgtaaatctaatatccaaattaaaagttaaaaaccataaaaaagaaaaaaaaacaaaaattttaaaatttttcgaaaatgttaataatttgtatattagatctacaaaacgatgcgaaaacaagttaaattagtggaatcggctaacgatcaaaaactgtaagaaagaaaagaacaaaaataaaatttataaaaaacctcttagaaaaatattaataacatgtatattaaatctataaaacgatgtgaaaaacaagttgaattagtggaatcggctaacgatcaaatgactaggtcaaatgacaggatccaaaatccggttagtttccatatcattttgtaaatttaatatccaaattaaaatttgaaaaccgtaagaaagaaaagaacaaaaatcacctttaaaaaaaatatattaataacttgtatattaaatctactaaacgatgcgaaaacaagttgaatttgtggaatcggctaacgatcaaatgattaggtcaaatgacaggattcaaaatccggtcagctttcatatcattttataaatttaatatccaaattaaatttgaaaacccttagatgggaaaaaatcaaaattttaaaaccttataaaaaaatattcataacttctatctcagtttgtaaatctaagtaatttaagggctaaaaagaaaatagggctaagaattgacttttatggcgggctgaaattgatattgttgggctttgaagaattgcaccttagtcctgagcccaaacgacaccatctctaatcttacggcaaagcagtcctccaccagaccaccaccgttatcggaaacgaattccccagtctctccgtcgcgatctccgtcgctgattgtcacgaattacgattcacgaagccgaatatttttattgaaataaccattagaacttagaaccgccaaaacagatcctagagcgagtatcttcaccgccatagcgttcatgcaagtcttcgtcaccggatcttcactagcgccgacgatataattagaaaaaaccataaccgtttctctgaaccgctgatcgattaggttatatacaaagaagacttttgaagatcctcaacgtaaagaggattcgattctagggtttttttcttctccttagtgcgagattttcttatctcttaatgatgaagtaagtccgtatttatagattggtgtgagttaattaatttcctttttttataaaacaaaatattaccgttacattacatattctccggtttaccgttgcatacaaccgtttaatataaacgttgcatacaaccgtttaatataaacgttgctgtgtgaagtgcacgctcttgttcctcttatcatttgtgtgaaaatacatcaaatatcaccttgtttttttgtcaagtgctctcgtttgaatttttttttggttataaagtcatatttcccaatttgcataatgatatacaaatataaaccggatggcccaaaaaggcgaaaaccattagtagtactggcccaaattgcttcttcataaaattaattgttttcggcctcaatactatttcatgttttttgggtcaacaacgtccaagtaccctttatataacataaataaggattgttagaaaagaataattttgatgtgtcacgattattttatcaaccaatcactgatctctaggagaaaaagtgaggacccatagtttaagcgacactctttggttaaagaataaagattagatcggtccaatttatatatttacatgttccgccattatcatcttctaatttgaaaactcttcatcattccctaccaccggattcaatg

SEQ ID NO: 24842 - DNA, 3003 bp, Unknown; identical to SEQ ID NO: 24841
  misc_feature (1)..( 3003): 2750-1469P.txt file - cDNA_ID_2685636; gDNA_ID_2214530; Annot_ID_184899

SEQ ID NO: 24843 - DNA, 532 bp, Unknown; identical to SEQ ID NO: 13533
  misc_feature (1)..( 532): 2750-1469P.txt file - cDNA_ID_2685649; gDNA_ID_2214635; Annot_ID_136105

SEQ ID NO: 24844 - DNA, 532 bp, Unknown; identical to SEQ ID NO: 13533
  misc_feature (1)..( 532): 2750-1469P.txt file - cDNA_ID_2685649; gDNA_ID_2214635; Annot_ID_188075

SEQ ID NO: 24845 - DNA, 3003 bp, Unknown
  misc_feature (1)..( 3003): 2750-1469P.txt file - cDNA_ID_2685667; gDNA_ID_2684225; Annot_ID_191946
aaattgaaacacacatattagatgtccccaaaaagctgaaaggtgtttatttaatctttacacaactctttttaatagtttacaaacacttaaaaagaaaaaaaacagtaataataatgtgtcgaccagaaaaaaaaaaattataatgttacaacaattattattaaaagtaatttagtgtactaatagttttgttgccagacagaacaacatcgacgaaaccacaacatagaaagaagataaagagtgagcatcaatcaaacacaccattacaagcaaagttgtgacaaaagacgaagtcgttattgaaccatctaacacttttattccaaactctccgactttggttctgctacgtactcttcaagtagtcttttgatcaaacaagacgtctacagagcgtgataccatctccaatggaaatctgagagacctcgactcggggatccaaagccaatttcttattgaattctataagagctgctctatattctctcatatgctccggaactccatcttcatcctccgccacaaaaccaaaccacaaggtgttgtcgaacgcaatgattcccccaaccttcaccaattttagaagcctctcatggaagttgacgtagcttgatttgtcagcatccgcaaatgcaaaatcaaactcacatttctgcaatgttttttaatgtatgaccattagctaaaaaaatatagttaattaagcttaaagttaataataatataagaacacatattttcacgtacgtcgttcaccaattggtctaaggccttaagaccatcggaatggataaaattaatcttgtgatcaacaccagccttcttaataaactctagtccaacttcgtaagcttctttatcaatgtctatcgcggtaatctacatccaaagagcatccattttgataactatgtttcttagttaaaacaaacaaataattttgtaaccccaacaatatgattatatataacaagaagcattacacggccatcttcaggtaaagcaagagctgtagtgagaagcgagtaaccggtgaaaacaccgatctcgatagtgtttttcgcattcatgatctttacaagcatcgataggaaatgaccctcatcaaccggaacctccatctcgcttctgcgtttttatttttaaattctacaaaattaagcaactatatagctatctctaaaataatcacaaactattggcaaaattttgtttattccacttcttaaactatataaagataaaatttcttaatttaaaaaagttgttatatagtcctatagattttgttgcacctaaaaaagaaagtcatatattaagacttacaaatttccgtatttttggacagtagcttttcgaagttccttgagcaattcatgctctcttggatacgctgacgtttccatgatgtactgtgacgaacacgaccaaaacaaaacacagatttatacatcaaagttcctttttaaaactagacaaaaccaaagttttaaagatcagcaaactttataacagagaaaattttacctgttttagagcttcgctcttgagaatccctttggtaggaatttcattggccatgtctcttgagtctcgtggttgtgtgcaaattgttcgttgttataaacgagagatgtatgtcaatatatatattggcttctggtcaaactaattgagctactaataagacccaaattaaggactaacacaccaattgatcttatccatgacttttcaaccatgggactagaaaatcaattatctagacagtacttgatgcgaatatattaacgtttatgtttcttaaggattttttttctctcttaaggttgcatacaaatgttgaaatatgcaagcaggcgaacagtttgcaatgtagttttattgactaatataaatttggtatgtgagatttaaaatgcaaaaaaagtatatagtatagaattatttaaagaatatatcaaattgaaggtactaaaaaaacggatttgaattcgaatgctaacataacgaataccagcataaatctccaaagatgattcaaattttgcagtttcaatccctcaatccgcttcaacggatgaaacaataataatattcaacatgttctaacaatttttcaagtatgcatgaagaaatcacttaaaaaattccaagatatgtatttaaagtttagtgaatcatcaaagcgcaaaaattcacaactaagtaagaaggttgtcgataaaaagcaaaaacaaaagttacagaatgtcttgaggagaggattcctcaaacctcctaagaaaagatcttttgggtttttgtaatctgtcattgtaagttaagcaaagtttgttgaataagtgttccagagatatgataagttgaccttttggattgtctaatctggaatcttttagtttatggtgaactctcaccccaagctcaatgtgatgtccatgtaactaatcttaggcaacatgatgtggcataggagattgggcatcctcatcatcaagatccctaaatgacgaaatgattttaaaataataattcctaagatttcacatccttaaacccttattaagtcctaacattcgaaaatacacaacattcatttgatttaatttaaatttttatattaacttctctattttcattaaaaattgtaaaatatttttttattgtcgtaaaatgttttacttttctatttccattaaagttgtaaatatgttttattaacgtcgtaaaatgttatttttttaaataaaaatatctgttgggccaaagacttaaaaatatctaaaaccgtgacttcttcttcctctcttccttgaaatttcctttgatgtgaacgacgatcccttgcccaacgcacaagtttcatctccttcccacataaaccccaatcccaaattctcttcatttttccttattcttgcgactaatcgattcaatcccaaatttcagaattcaaaatttcatctaaagtttagagatttctcgattatg

SEQ ID NO: 24846 - DNA, 3003 bp, Unknown; identical to SEQ ID NO: 24845
  misc_feature (1)..( 3003): 2750-1469P.txt file - cDNA_ID_2685667; gDNA_ID_2684225; Annot_ID_137559

SEQ ID NO: 24847 - DNA, 3003 bp, Unknown
  misc_feature (1)..( 3003): 2750-1469P.txt file - cDNA_ID_2685688; gDNA_ID_2936584; Annot_ID_195032
atagtaaagagttggtatgcattacgtaaaccatgtttttctagatagaagcttctaatcctaattaattttagtttatttcatacaatttattttatgaatatattgacccacgtttagttaaaatttaaagagaagatggaatgttaatgcatgtagatgtgaaagcaattatgtgaagttatattttatgaaagaaaaccaagctaatagggaacataaagtaatatttaagattttaagaaccttcaaaatcatattataagcaatttggtttcctccaaagtggagaacacaagtgcttcgttgattattagtattactttctttctcatcttttctctatgtgcttcgcaaaagaaacatgctgtttgtttaaagacaaacatttctgtcgttaaacccattttgttgtcattttaaattgctttagttcttttcgctttcttgttacataattttgtcccattcatagagcctgtatatgcaagatggctttttaaacaatgatgatgatcaatacaatatgtgatttgttatctgtagaggaatatactatataataagccatcaagtagtaaataacaattagcgtattgtccattcatgcttgaccacttacggtacatacacatctaattcggtataaaaatttgtataattagtttgaatttagaatcagaaacttcaagctcagaattaaacggaattagtaaatatcaaatcatttttccttattaagtacccatatatatatagttgaactttcataccgagactaatattatctctgtttactatacatatagacgctcatgtgggagataactgaggatcgacaatacccatccggtttgaacctatttaggcatgttgtttatccatatcagatctaaaagattgtttgatagattttgacttgtaactcgatttgattaacattgtccattttatgagtaaagtattattaatttgacgtgtccaccggtcaagaagtcaaagagctatacgagttaaccacaatccactcgtgcgttttgtagtctcttctcattctttattgacaagtcaacaacggaagctttggtccaaattaagcccataaaaataaacatactttaacattaattaattgttcataagtcagtggctagtctaactaaatctctttaactctatttcacgatgattataataagttatggacatgatggttgaatagaagttttctacaagtttctaggtcatagttacttggtagttaattttctattgtttgatgtgaagtcaaatactccatttctttgattaatataaatattaatgtacgttttccatcaagtagttatagagccatcaaggtatttgtcaaacaagagtatttaacgcagaaatgtaaaactgcagtgagaacccacttttattctgaaaatacatatcataaaataattgtgagatgagatggtaaacattttgtagtcgaagtcgaaaccaaatttacagaaatgactaagttggtcctaagcactgcccatatttaataccgtaaggacaacgaaattgtgtttgtatatatatgtgttcattaatcgtaactaaatataactaagcaccaaattatatagtgtagtttaatttagtggttttttatttaaggaccgaatttatgtagaacattgttcgttaatgtggaactcagatgatgtattagataccaaacttaatttgaatatcggccaacaaaacctcgtaccgaggaggaaaaacaacagaaaatagagtgaacaagtcgaagataaactcatgatgcagaaggagaagtaacaaaatatgaataaaataaattaaggtcaatgacatattagatgtcgtcgcttcagaaaaagcaagccattgagattcggggaagtcggtaagatattgaagtcaaacacaatctctttatgttgttccaaaatatacaaaacatatgtcgaaacttcaaattgcgactcctctacaatctacatcgaggcatgcttataagtttggcccaagactttgttgcctacaaaactgcggattacatgggatgaactaattatattttcatatattaatataacgaaaaatgttacaacataatttttacaaattaaaaaataaaattacaaatcataatttatttttccttctaaatttctgcaaataaaattagttttttttttattactagtcattaacaattcggagaagaataaacattcctctaactcttaacaattttaactttagctaggtacacaaaatattagactatacaatttacgattttggttttgtgcatttttttttaaaataataaaagcttatgttatggcttattgggctttagggccaaatatcaaaagaacgggtcgatagccttttggacatttatctatgtatatggatcgaactatatactgtttttatatgttggatttagaacttcagccatgtggaaattgtggataaggaagagatcttgtttaaagttttagatattttgatgcacatctttttctcaatcatatcgtttgaatttagaattctaagcaaattaatgagattgtggaaaaaaaagaagcaaactagtgagatgtttatttgaacagtttaacattattttgatttttacatattattattttttcttacataaaataaaataaatatacggttattctttaacacaacaaaaagaaactttttaccaaatcaggtaaatactaaaaaaatattcatccagaaagagtaaaaatcctaatccaagaaaattagcggccaaaacaaaaaaaacaacgatattagcagcacatgttgattgccataagccaaagccaatcctcttcttctctgtttctggatgtccaccaatcatcttcgcacttctttcgtccagtcgatgataataacggtggagaacgacggaggcgggcgacgttagggtttctaatcatttctctctcttagacgcttatg

SEQ ID NO: 24848 - DNA, 3000 bp, Unknown; identical to SEQ ID NO: 10580
  misc_feature (1)..( 3000): 2750-1469P.txt file - cDNA_ID_2685704; gDNA_ID_2213664; Annot_ID_132625

SEQ ID NO: 24849 - DNA, 3000 bp, Unknown; identical to SEQ ID NO: 10580
  misc_feature (1)..( 3000): 2750-1469P.txt file - cDNA_ID_2685704; gDNA_ID_2213664; Annot_ID_182006

SEQ ID NO: 24850 - DNA, 3003 bp, Unknown
  misc_feature (1)..( 3003): 2750-1469P.txt file - cDNA_ID_2685712; gDNA_ID_2684233; Annot_ID_192344
acacaaacctgaagattacgcgaatgtgctctcgcaactaaatctgttggtgtcatgagacggttattgttcacaggaacaattgtgtctttccatggaccaatcccaattacatatggtttaatgtaatccaaatatgcgtctgatgtgatctctgcgtaagtctgcattcacattcattaccttatgtataagcaattttgacataatgagaaaggaagaaagtgaatatgtaaataccttattagtgtcttcggtaagaatagtgacatcgtcgatcaaaaacaattttggtgagtctgtcatgtttgaaatgtaaactagcgaagttgctgcaaaagactgaataaatattggctgttttaaccaatcttcagacagatatgagcctttgtatccatatttcttcaaagtttccacaaatttatcttcaaattttttaccatccgcccacttcacctgcacaagtttccaaatacaatttaacatcctctccatttgttatcatcaatgactaaaagttgaagctaagatttgatggtttgcttacttgctgattcatgaaaaccggattcttgatctctggatatatcccaaccactctaggtgcatccagtgctatcgaaatatactcgtcgaaggtaataatcgggaatttaccattgtattgttgatccctgaaaggatacctctgctttgcaccaagtgttttcagctctttgagagtaaaatcaactgttcttggaatgttcaatctcatcgtcaaaatttgaaaaaaatgaaactatatcaaaacaaatgataatggaatgtttttagttaccagtgaagaagccggtcatgttcattccttggacttcataagtcctcttacggtctgcaaactccttatggtctgcaacatcggttgtatcatcgagattaacatcgtggtgacatataagaacaccgtctttggaagacaaaatatcggtttctataaaatctgcaccctcctctatggccctctgcaatcaaaaaaaccttgtgaaaccagacaaaattagtgtaaaggtaagagacttttgtatagatccaataccatatatgcaggagcagtttcttcagggagctctccgtttgatcctctgtgtgcaaggttgtaaggacgggaagtctgaagtggtttcttggttgcatgttttgcttcgcttgggagacgatacaaaggccttgaggcacaattagcaaccaacaatgacagtaaaagcaatggtagaagatctgcaaaaattataacaaaaattgctttaaacgaagaatcaacttagacatagaaacaatggagatttgacacttacacttgaaggccatgactgaatttgagctagaaaaattcctccaacgaccacactgcatgaatccaacattatatagatagacctgcaacttatctttagaagatttagccaaaaaatcgtaacaacccaatcagcattaagaatattcctctgagaaatctagtatgccaatagaagataaactccgtgttgtttgaaagtatattcttcttctattcactaggttttagttttacattttaaatgatcgcagatatcataaggcagtgtagttttagaacgaagtgaagttgcagatccagattgtattgctatgttctagtcttttgatcctttgttaattacaaaatgtacttgcttgtcgatcatgacaagccaagtttgtaaaacaatctctggttgaatgaaattgtcgatgataaaatgcaatcacgaagcggttgtgaatggaaaattaactcttttatagcatcccaagacacaaatcagaaacgagttcacaccaattctagagaagaaaatacaagagtttgagagagtgaaaactaaagagaggctcctccattcttctcaaactcccatgatcctccattcttcttctcaaactcccatgagatccccatagctacgcatgaggacgactcctcctgcaaacataccaagtgctcgcagaagtttctgcaaccaaaaggaattcgtatgagacagatttcgatccaaatacttcaaaggcatgaactataataaaccctaaatctctaagagacccaacatccccaaattcccattcgaacatccaaatacttcaaaggcatgaacttaacttgtgattgataaaccctaaacctctaagagacccaacattcccattcgaacacacaatttcataagaagaagacacagagataagataaggtcatctgatttggcctatcgaagcataggagagaaaatcaatcctacgttaaattctgaaacccaaaacgaactcattaaattcaattcccattcgaacacacaatttcataagaaagacaaaagaatcacattgtacgctcaattgaatcaatttgtaaatcctaaaccgtaattcaaaatcgctgtacaactcattaaattcagccgaaagcccagaatctaatcatgaaacatacaagagaatcgagacttcgatattcaatagacaatcaagtcggaattaaacgaaagagagaatgtatgaaggttaccatgttcaccgcccatttttgttcatcatgaacctcggagtgccagagtgctttcatcttttcgatagagacaacgttgttcaccatcttgctgctgaaaaatcgaaacttttgatcgtcgaaaaaagaagaagctagggcttttaaaacgacgaattgggatcgggaaattttagtcggttaacttattaagggtttacgttttgtttaattaccaaactaacctttactaatatactaataaccggtaaaaagtgatgtgatttggattgatttcaaccggagaagagttaaccactcgccgaacgacacgtgttcaacacaatcctattcctcctagcaatctcaaagcttgtgtgatctacaagctcttggtttctccattgaagaaaaagctttgacaaaaccagggaaagagacagagagagataatg

SEQ ID NO: 24851 - DNA, 3003 bp, Unknown; identical to SEQ ID NO: 24850
  misc_feature (1)..( 3003): 2750-1469P.txt file - cDNA_ID_2685712; gDNA_ID_2684233; Annot_ID_137670

SEQ ID NO: 24852 - DNA, 3003 bp, Unknown
  misc_feature (1)..( 3003): 2750-1469P.txt file - cDNA_ID_2685717; gDNA_ID_2214494; Annot_ID_133534
aattaaaaatcattgctgttgcatttttaatgaaactcttagcacgaacattattacagttagaatactaatcgttagttgagtaatatgagggagcatccaggatcaaaagcatcttgattgagtccaaaaaagttgactcgaaaaaacacaaactggatgatgtcattaacaaaatccctcataaagtactactagaaaacttagcaactttttcagactaacgggcgagtaaagtgataaactctgactggccacaaccgtaagcggctagcttgtaatcaagacagactatgaggactcgcatatatgcatcactctagaacgcatccttctttggttgatatgaaatgattcaagcagtggagataacattaaatgtgcatcaacactctcattcaatgctatcgagaagcatcattgcgcttttccattgattctagtaaaatagtacccatgcctcttttttggtaactcttctcacttacggtcagagagatcacattatcaagtctcaccaatcccgtctaattaaagttgtaaataatactcattccgttcctttaatttagagggcagaagcaagagaaaattttagggcctttacttaaactatttttcctatgagaataaattttagaatcttgcaaaaatatggacttatttgtataatgatgtttaatttgtaggagctaaaattagcaaacactacgtaaagacaattgaaatcgatatcataaacgtttaaggaaagacaagagaggagtcgagctgatgaactctttctttaaccctttgaatcactcgtagtgtgacggtttttgtgtgattcaaggatcccatgatacaacctctataaactgatgtcgcaccactcgaaaacagctctaacgaaccaagtttctacgatcctctcaaatacttactttcttaacaaagagagattgttggatatatgtgtttctatatgaacggtgaaattctcaatatgttaagaagaagacatcaaacatgcatatatagaggtttgagattggtttgattcttaagatcaatcaaccacaaccatcgcaaatccaggagaggtggatgataggatgaggcaactatctcacagtgaaaccgagtctcaaagagacgtgaaacaaaaaagactgattctcatggaagtattcaactcgacccaacacacttttggaggtccaatgatagtaaagccaaatcattgtgacccacttctcattcgcacaatttaattttataaagcccacttaactttaaaataaaatttggtccaacataattgagccttacaaaattgtggtctaaaaccatgtttcatctagctagtggctaggcttagaggcaaccctgataatacttgatctaagatccactaacacgatattccaactttgaaatgtatgcacatcattagatgctatatgaccaagaaagatatatttgacagagaaatttgcttagatttgtctaattaattatcttcgctcgagactaaggcaaaacagtccaccaacggtaagcctaataagtcaatgcatttgtttttttctaagacgtcaatgcatttcgttctttttttccattgtcccaaaatactcatccttttatattagaagaatttgtagccaaattttcgtttttaagtgatgttataaattttacattctacaaggttaattgttattctttattgttactgtaaatattgatgcattttattgttattttaatattatgataactttctaaaattttgtatgcataattatgtataaacatcatctaagcgacataagaaaataattttttcgatcttgttatttacagaaaaataaagaaaacaaattgtacaaaactcaaggcacgagtcctaatcttatatttggagatactataggtcacttcgtaggtggtgtttcgagatcaagttagccattgaagaagtcataattgtcatcaaagcagtaaacaaacgtaaaatgaggataaacaattgatgaaatcatagaaaaatcacacataatacggatattgtattattcaaacgtagttggattgtactgattttgagtataataacatcgaatatagattcaattattgagatgcgtattgctttattatcataaattaataaggttctgccattctggtcagttctagttggtggctttaacttgaatgtacaacagcctaagatttaatacggtaacaaaaagaagtgtacttgtacctgacccaaattagcaagaaaagatttgtagtatgatttattttgatggaaccttgaaccttcgaataagtaattaaagtgaaaagctctattacgtatgggtcaattcatgttaacatctcaaataaaattttaattagtgatttttttcctaatatcttgcggattgatgtcaaaatggctttcgagtttattttttaaaatatatttattcctaattccaaatttaagaacatgaaatcaattcaaatgaggttgtacacttcaaaattcgtaataacatcactagacggaaaaagagtgataactgataagaaaacaacatataataagggatgataaaggacaacaacacgatgacaaaaataaacttcattattccaattaataatgaagtacatttccaaataaacaattactaaaacttatacctaacggagaattaatactttattcttgaagtttgaacaaaaataaatatactttatttactcaaatagtagataaataaaaatcctctgttccttccttctcccacaaatcaaacaagtgactttttatatttatcttattaattctgtagtctcgagattcgctttttctcctgcttacttctttttatcatcttctctttgtcggtttgatttggaaaaactttctgcaaaaaaaagagagattcttaaactttttatctcaagatcctttcaaaaaatctgaaaagagaagatttttaataaaaaagaatg

SEQ ID NO: 24853 - DNA, 2080 bp, Unknown; identical to SEQ ID NO: 11255
  misc_feature (1)..( 2080): 2750-1469P.txt file - cDNA_ID_2685736; gDNA_ID_2214486; Annot_ID_133357

SEQ ID NO: 24854 - DNA, 2080 bp, Unknown; identical to SEQ ID NO: 11255
  misc_feature (1)..( 2080): 2750-1469P.txt file - cDNA_ID_2685736; gDNA_ID_2214486; Annot_ID_183500

SEQ ID NO: 24855 - DNA, 3000 bp, Unknown; identical to SEQ ID NO: 13557
  misc_feature (1)..( 3000): 2750-1469P.txt file - cDNA_ID_2685740; gDNA_ID_2214636; Annot_ID_188115

SEQ ID NO: 24856 - DNA, 593 bp, Unknown; identical to SEQ ID NO: 12168
  misc_feature (1)..( 593): 2750-1469P.txt file - cDNA_ID_2685754; gDNA_ID_2214535; Annot_ID_185070

SEQ ID NO: 24857 - DNA, 3000 bp, Unknown; identical to SEQ ID NO: 13448
  misc_feature (1)..( 3000): 2750-1469P.txt file - cDNA_ID_2685770; gDNA_ID_2214627; Annot_ID_135977

SEQ ID NO: 24858 - DNA, 3000 bp, Unknown; identical to SEQ ID NO: 13442
  misc_feature (1)..( 3000): 2750-1469P.txt file - cDNA_ID_2685770; gDNA_ID_2214627; Annot_ID_187826

SEQ ID NO: 24859 - DNA, 3000 bp, Unknown; identical to SEQ ID NO: 14428
  misc_feature (1)..( 3000): 2750-1469P.txt file - cDNA_ID_2685791; gDNA_ID_2684118; Annot_ID_137162

SEQ ID NO: 24860 - DNA, 3000 bp, Unknown; identical to SEQ ID NO: 10289
  misc_feature (1)..( 3000): 2750-1469P.txt file - cDNA_ID_2685795; gDNA_ID_2213641; Annot_ID_132278

SEQ ID NO: 24861 - DNA, 3000 bp, Unknown; identical to SEQ ID NO: 10289
  misc_feature (1)..( 3000): 2750-1469P.txt file - cDNA_ID_2685795; gDNA_ID_2213641; Annot_ID_181251

SEQ ID NO: 24862 - DNA, 3000 bp, Unknown; identical to SEQ ID NO: 13224
  misc_feature (1)..( 3000): 2750-1469P.txt file - cDNA_ID_2685803; gDNA_ID_2214606; Annot_ID_135670

SEQ ID NO: 24863 - DNA, 3003 bp, Unknown
  misc_feature (1)..( 3003): 2750-1469P.txt file - cDNA_ID_2685819; gDNA_ID_2214546; Annot_ID_134599
tttaattcttttaatcaaagcatgatttaatgtaaaattatactactgtatgactacttttcttaaaaatataacctaggcaacttgttcatgtgggtctactcgttaggtgcttcattttgaatgatcatgtttaattgcgtaacgagataagtaaactggttaattgcttgtgtgacaaaagatacatatcaaatttaattaatcattaactttgattaaagaagtaggcggcatccccaaagtcaacaaataaaatcaaaggtttctggtttaatccacgcgttgccccatccatattccctttatttctaaacgaaagcgaccgccatttccgtattttgtctccctagcaccaaaattacatgaccatttatttacttacgtggttctttttttctttgcagcagaattatataaatatgcaacactggttagtctaacgctatagatatggatgatattttagatatctatatatacatttttgcagccattttgtaaaataaatcctagagttagaatttatttacagtggctgccactgacatttaataattgtttttgataattaaaaagaaaatctttgaattaaatatttgacaatcttcccaaaatctctccacattaattacacgattagttactaaaataaaacttcccaaaatatttaatcttatttaattactacaaaattatcatttttgatattgtttttctacatgactataataattcgattataatcatcaaaccgcagagatatttgatagcatttaattattacaaaattaaaaaatatttagacaatgattcataaacatatcataaataaaatcagtgagttttttttacaggacggattgacgggacgagtttgacaggacgttacttaataacaatcgtaaactataaaataaaaatattttatagataaatataatttgcaaacttttatatatagtaactttaaaaaataaattgtcttcgcggtataccgcgggttaaaatctagtaagacctaatagagtaccaaggctagaacaattaatacgagtatcgcgtatgaaaaagaatatacatgtattctgataactatataaagtagtagatgaaatgattttgattcatgaatctctatgttgagtgagaaaatgaatagcctgagacaacacaagtgtaatagctttcacgcttggacttgtgtctgaattttggaactgatgatgtttgctgctctttctagaagacctgttgaaaaaagcataaatacgctctgttttcaaatttggcaattgatatttgtttttgtacgtgtctatttaatttttggtaaagaacgcacgttgtttatacttacacaccgcccttctagaagaacaggctctcacgtcatttgcatacaacttccatcttctggaaccaatggatccctgttacaaaagttgctcttaaaacataaacaaaaacaaaagaaaagaaaacatttttatatttgtcgtcaataataatggccactttctgcttacatgtatatgaatgtatatattactataatacgtagctgctcgtgtttcttgtctaagttctctgttatagttaggagacaaataaagagaattagagaacagaagaccagaaaaataaagatgaacacaaccaacaacgtgtttgatgtgtcaccgttcttgcttttagaagcatctgcagattccgaagctggccacgacagcgttgacgatgataaatgcgttaaggattacgatcttggtcatgagtcttctagtgccagttcttgcgagacgtcttgcgtgagtcagagaacgagtttgttaggttttgacctgcaggacgatacggtgaatcatgaagaaagagacgccggagatgaagaagacgaagacggagaaggagaagtgaatagctacataagatgtgggagaagccaacgtgaaaatctggctgtggattctgctgcggtggtgagtgagatggatcaaaatcgaatgttctgggaagcttgtctcgcatcttgatctgtctttattaattaatgtcatctcatcatcaacagagaaaacaaaatagtatatatctagcttagcgtagtgttcttgtctgtgtttcccctttggcttttaatgcacaactaatcgatatgatatctacccattaaccttaattagtcccctttagcgtagtgtaaatttgttttgattcgtcaagagaaaaaaagtggtctaagggactgactagttggagaagaatccgtataaaatctgttaaaaggagaaacaatatactatactagtcttttctcgtagaggaggatgttatactaacattactaatttatgctcacccagtttaaataaaataaaatcaatacttttttggtttgtactaattaacatatatatatatatatattcccaaaattaaagattccatggctaacagacctaaagaagaagaagaacaaacacaataagagattggtgtagttttacttttactatattcatctttgtctttattgaccaataaagtaatttctcccctttatctatttgatagtggtatactttaagttgctttttaattgctggtgtacaattatattggactcaccaacaagaatctgtgtgcagtcagtgtgcttgttactattgttttatctcattaattgatgatcactttttcaccttcatacatgagagctgaattcatcactttgttagttatataagttgggctattctattattaacagtttgatttttgacagtaaatttgtctgccagaataacttatacacattaccacccaaaaaaaaaaaaaagaagaaccatttttggacattacgtggttttgggtttgtctagcgaccttttatgggccaatgatatgaggcccagtaaggaaacaaagaacggcccattataatgtaaacatatttagtacaaggaaaaggggtaaaaaaggaacaaggggaaagaaatg

SEQ ID NO: 24864 - DNA, 3000 bp, Unknown; identical to SEQ ID NO: 10928
  misc_feature (1)..( 3000): 2750-1469P.txt file - cDNA_ID_2685834; gDNA_ID_2214466; Annot_ID_133015

SEQ ID NO: 24865 - DNA, 3000 bp, Unknown; identical to SEQ ID NO: 10928
  misc_feature (1)..( 3000): 2750-1469P.txt file - cDNA_ID_2685834; gDNA_ID_2214466; Annot_ID_182828

SEQ ID NO: 24866 - DNA, 3003 bp, Unknown
  misc_feature (1)..( 3003): 2750-1469P.txt file - cDNA_ID_2685858; gDNA_ID_2213637; Annot_ID_132186
aagatctccacttttacttgctcttctccactttttaacctcattccaactaggaagtaagatccatgtatctctttttaacccttaaaacattggaaacaagaattctcttacacatgtatcggtagttggaaatgccgacccaaaaggaccaaaactcaccattatctcaagtgatagagcttctcaagaaactactccaccatttccacaatctccttttgtatttcttcatcctctggatcggcgtgatagttggaatcattgtttatccctctctacaaggattatcttcgccttcttcgttaaccatccaaagtgtctcccaactcttctttgtaacccctcctcctcctattctttctccttcatttcaggacaatgggcttgacatgtttctgataccactgaagaacatcatgcacgatatggaagataatgaacttctgtggagagcttcaatggatcctaagatcagggattacccttatcctagaatcccgaaggttgctttcatgttcttgacttggggacctttacctttggctcctctatgggaaaggttctttcgaggtcatgaaggtcttttcactatctacgttcacaccaattcgtcttacgacgagttcatgccgcaagactctgtgttttatggccgccgtattccaagcaaggtcagcttcccaaattattaagaaatttatttcgatacattaataggtttggaattaacgtgataaataaaatttataaatatattataaataatatatatatatatatatatatatatataacggatcgaagtacatgaatacgatatttttcctatcttttttagtaaattacataaaaatataagaatatttggtatcttaaaagaaaacatattaattattacactataatacataaaataaaatcaatccaatgtcattaactataaacgtatgcagagagtggattggggaaacgcaaacatggtagaagcagaacgaaggttattagcaaacgctttattagacatcaacaacgaacgtttcattcttctctccgaatcatgcatccctctcttcaacttctccacagtttactctttcctcatcgactccactctaacccacgtcgactcctacgacctcacaatcggtcgcgtccgctatgaccgccgcatgtatcctcacatccgcatgcaccaatggcgaaaaggctctcagtggttcgagctagaccgagccatggccctcgaggtagtctctgatacgttctactggccaatctttaaagcttactctcgctgccccgacgagcactatatcccgacgctactcaacatgaggccgagccttgggttgcgtaacgcgaataggacgcttacttggactgactggagcaagcgtagggctcacccgagattgtttggtgagtgggaggttaatgtggagttcttggagtggctaaggatgaagagtgttggtgattgtaagaaaaatggagaaaataagatgagactttgctttctctttgctcgcaagttttcgtcgactgctttggatgagttactccggttagcatctatcgtcatgtatttctgatcactctcttcccccttcgtccaaaaacaaagatgcaatcggtttaactaccaaatcttctttaagtaagtgaaatatacagtgtgtgcttaacaagttactttcagtactagggatgtgagattaatcaaagtccttgataaagttaggaactagcctgtcatcaagttataaacagaagataacttgagaaacattgagaaaacacaaaagcctgaccccccaatctcatttggtttagtcctccattagcatttatgagaaggtatccattcatattagcacctaactctgcagacaatgtatactcatatggtaagaacttatagaagagaaaaataggaaaagaaaaaaaagaacaaattgctactaataggactaaaagttttgcctagacacctgaatactcaaagaagaataaagtcatgtcagatatttaatctccttctcccatcttcttaagcgagatagaaactaagccacaaatgtttaaccaaagaaacacttgaaaacactactaccaccaagaaatgtgaagaagatcttaattaagcagctcaatacacatccatttttgggcaacactcaaaacgcaatttatcaagttgtagaaacagaaacaaaggctaaaccacatataaacaagaccttctcaagccaaaagtcgtaaatgttcgacaagagaaacactattagtaacagaaatgtgaagattttatcttaatcaagcatgttctagtatgagaaacacctaaaaagatagcacaaaaagcaagaacctaatgagaagcaccaccaccaatggcaaaattttctatacaattgttgattttttccccatttacatattgattattccattttgctatatttagtttttttttttttttttttttattcattcaaattcaattttacatatatttatgtgacccaaaacataattccaattcattttctacaaaaattcaatttttgacttaccatatcacaaatgatattattaaaataatatcaataataatataatcactcttataataaaacttcgtaatggccacaaaaaaatcagtaattttcgatttccttaaaaagtcatcgaattaaatatgaaaaatcaacgagttagtttgtccaaaacgaataaaataaatttaatagtaccttttattttttcggaaacccttgtttcgttttttttcctcgatcttcttcttccccaatctctcttattttgtgagctttttagatcctcctttcttcatcgtttcttttccgaggtttcaaattcgttcaatttctcgattgaagatacctgaaatcgcgttattctaggtccgccgctgttggatctgcaaattccccttcgaatttgaacatttgtgatttcaaattcttcgagaagatg

SEQ ID NO: 24867 - DNA, 3003 bp, Unknown; identical to SEQ ID NO: 24866
  misc_feature (1)..( 3003): 2750-1469P.txt file - cDNA_ID_2685858; gDNA_ID_2213659; Annot_ID_181791

SEQ ID NO: 24868 - DNA, 3003 bp, Unknown; identical to SEQ ID NO: 24866
  misc_feature (1)..( 3003): 2750-1469P.txt file - cDNA_ID_2685858; gDNA_ID_2213637; Annot_ID_181086

SEQ ID NO: 24869 - DNA, 3000 bp, Unknown; identical to SEQ ID NO: 13156
  misc_feature (1)..( 3000): 2750-1469P.txt file - cDNA_ID_2685906; gDNA_ID_2214602; Annot_ID_135580

SEQ ID NO: 24870 - DNA, 3000 bp, Unknown; identical to SEQ ID NO: 15003
  misc_feature (1)..( 3000): 2750-1469P.txt file - cDNA_ID_2685913; gDNA_ID_2684240; Annot_ID_192566

SEQ ID NO: 24871 - DNA, 3000 bp, Unknown; identical to SEQ ID NO: 15003
  misc_feature (1)..( 3000): 2750-1469P.txt file - cDNA_ID_2685913; gDNA_ID_2684240; Annot_ID_137766

SEQ ID NO: 24872 - DNA, 3000 bp, Unknown; identical to SEQ ID NO: 14937
  misc_feature (1)..( 3000): 2750-1469P.txt file - cDNA_ID_2685931; gDNA_ID_2684234; Annot_ID_192378

SEQ ID NO: 24873 - DNA, 3000 bp, Unknown; identical to SEQ ID NO: 14937
  misc_feature (1)..( 3000): 2750-1469P.txt file - cDNA_ID_2685931; gDNA_ID_2684234; Annot_ID_137689

SEQ ID NO: 24874 - DNA, 3003 bp, Unknown
  misc_feature (1)..( 3003): 2750-1469P.txt file - cDNA_ID_2685940; gDNA_ID_2684130; Annot_ID_191200
ttgttcacttcaggaagtctccggcagtatgtattttgctcatttttatactatcttgttatgtcgccgcgaaaatagcggttttggagttgtgtttaaagcagcgaaatcttggttttcttgaaggtaccgtaagaaacatagaaaggtgaatatgaaggctgtcaagtgttgggcgagacagattttaacgggattgaaatatctacatagtcaagatccgccgataatacaccgagatatcaaatgtgacaacatttttatcaacggtaatcatggagaagtgaaaataggagatcttggtttagctactgtcatggaacaagctaatgccaaaagtgtgattggtatgagcaatgctttttcttttatatagtttacaaattcgtttttctttgttttttttaggatctaaattgatagtgttatgttataaccaacaggaacaccggagtttatggcgcctgagctttacgatgagaactacaacgagctcgctgatatatattcgttcgggatgtgtatgttggaaatggtgacttttgaatatccttattgtgagtgtagaaactctgctcaaatctacaagaaagtttcatcggtaagttcgatattttcaaattgtttctaccattggttttatgatatcgaacaatatatgataatatgaatggataacttacttggtgagtcttttttttgtattctttacttaggggatcaaaccagcttcactatcaaaggttaaagatccagaggtaatgaaatttatcgagaaatgtttattgccagcttccgaaaggttatcggcagaggagcttttattggattcttttctcaatgtgaacggtttagttatgaacaatccattaccgcttcccgacattgtaatgccgaaagaaggatcattcggtgaacgttgtcttatgtctgaaggaccacctaatgctcggaatagaacgatgtcaatgaatcttgacgaagacaataaccttcctattgttatttcaagcaacaattcaggaacaaactgtattgaggttagacgggcaaagcgaggaaacttttttgtccttaaaggtgaagagaatgatgagaactctgtctcattaattcttcgtatagtcgatgaaaatggtaagagtcttttgcgtttatattttacaaaacatttcaccgaaaatgttagatgcatatacaatcagccaaaaattgcgtttggaaaattgcatattataccaaacttgattagttttgtcttctttttggcgtgtagggcgtgtgaggaacattcattttctattctttcaagaaggtgacactgcttctaatgtatctagtgagatggttgaacagcttgaattgacggataaaaacgtaaagtttatagcggaattgattgacgtgttactcgtcaatttgataccgaattggaaaaccgatgtagctgtcgatcatctaattcatccgcaacagaaccagagctccaaggataatcatcaaaacggtgcaagttctcaagctggtgaatccattagccactctttgtcctctgattattgcccacgatccgatgatgaggcaaacccgaccgtagctgcaacaacagaagatcaagaagcagagaaaccaggaagcttggaggaagaagaagaagatgagaggttaaaagaggagttagaaaagatagaagaacggttcagagaagagatgaaagagataacgaggaaaagagaagaagcaacaatggagaccaaaaatagatttttcgagaagaagatgcaacaagttgagtaaagtaaacaacagagcaacactctggttttggattcctctgttttgcttttctgtttttccatgttttattattttagttttggtcaaagagaaaaaagcttttgttgtttacttgtttcattgcaagtgtagaaagtttcctccataaaaaaaatagaaagtattttctaatggtaattgggatttacattatataaagcactaattgctgagataaaaccattcatcaggtatatatgtaaaactattctcgagataaaacaagaaagtgaatacacaattttcttgcctctattcataagaaataaacctgttttcattgtgtttatttaacaccaaaagcactcaaaattgaggcttaacattcagacaaaccgtaactatagaacataagaaaaacctaactattgaagaggttgcattatatcacaagtttaaaacaccaaagctcaagctgagtagcaaaaataggtctcttcttccgccaccaaaacctcaacaggaacgtctacaaaagccttgaccgccacaacgaccaccggaaaaacgaccaccgacgaaaagaccacgaccaccaccaggaccaaagacaggagtaccaaaacggctataaggttcctcatcagaagatgatccatccacagacatgctctctgcctgggctttacagagccaattttaacttcattatttgacctaaacaatgagatcaacagatccatcttctcttccattttatgaagacgaataccaaatccttccaacatctccatcgcatcagatattttcatctcagtcgtcatgtctttcttatctttctccaaattgtctgtaggcgtcgtgtccttaatcacagaaggagatgcttcagctttggttgcggatttattgtccatggagaagatgattagtagaacaacgcactagagctaggttaaaagagagaaattggagatcggcaaaaacccctaatcagctgcttaggaagaaaggtatttataagagtcttttatattctggcttggggcacaagagtcctttccttttattttatttacttttcccgttgttcattttttcaactaagcaagctttatctgggccgaggtgaggcccattaattgaattaaaagcccaaaataacaacaaaacattacctgattgtcggaaaatcagacggaaacaaaagaaatcaaaaatccgatg

SEQ ID NO: 24875 - DNA, 3003 bp, Unknown
  misc_feature (1)..( 3003): 2750-1469P.txt file - cDNA_ID_2685948; gDNA_ID_2214530; Annot_ID_134249
aaaacttgagctttctttatgctacaaagtattgatggatgacgaacctgggggttacagtatgtagtatcaagaataagagagctgatatgcgatccaatcaaccaatttgacatctcttcactatagcggaaatcccccgtatgtagaacagcctatacaaatcaacagagtccatggacaattcctttgtgaatggaaagttaaacataggcttacgactacacactgaaagtttctaatttaagaacgcaccttaccgttggctggttcaaagagtatcatgatggatcccggacagtggtttgcatcaaagcatgtcacatcaatgcctgaaatattaaccttctggccaaggtccaggacttgcagtctctcccaaggtatcccaatcttcatatttaccaactttgcggtaactaaggaacagtatatcttcccatgactaaatgactttgtcaaaccttgataatctgtgaatgagaatacagagactttaagcattgattccacgatatgcaggcttcttctgtgtagtaatttataattagacatacagctgactacttacgatcgagatgaaagtgtgtaagaaaccagtggcaacaatcgcgtgtgaggtacttgaatgcgtcctgcatacatatattaaaccagaaaagtcaccaaacataaagattacttaaaagataaatattcagcatcagcatgacgttttaaatctaatttcatgagcatatttgacttgaatgagaaggatgcatatgtaataaggttgttgcattcatgcggagaagttaaaccatgacctagcttgttatgtaacattaccactcgaaaaggtgtccccggaatgcaattccaatgtggaataactttagattttccgttgttgccatttcttctcacagcacgtctagagctagaatctgatggactcttttctgcgacaggtttaggggctgtccggatcttagtgccctcggtagcctgaccagggaaaaactctgtaatcaacttgtttgcagttggttttttgggctcacttgccttacgagtggttgacttatctctctgtctctctgtaacatggccacttgtacaatgagactgtgcctgcacttcagcagaagatgcaaagggatctctaactccgctaagtgcattcacaatcttctttctgggaccaagtgacgtgatacctatgcttagaagatcctgtggaagtataaccttgtcaatactcaattctgtttctctgtgtaaataaataaataagtaaactttagttccattacctcctcagtgagtgactgaagggtatcccagtcgatctcttcacgaataaaaacatcttcatatttagctaaacctagactcctaagccatttcagcactggagacaagtcggtaactagctgaggaagctgaactggatcatcaatcgattcttttataagagaagacaaattttcgcatttcctcaaggagtcctacaataatcatatttacaaatcagcagtcaatcaatggcgtaacgatgtaacaattgaacacagtatacttcattgtattaacctaaattgaaggttgatatcaattccagttatgagataacaaagaagcttacttgctcagaaggctgattatatgacttatcaagacaagtattgctatgaacttgcctctgctcttcactcaaagatgaaatatccatggaacacaatgggcattgaattgaatcatccttgcctaaactaaactctccactcctaccctcagactcagagcaaaggtttatcaacacatcaagctcagagttagactcaacaaaaccttcatcatcctcatggattccactatcaaacccgagacaaattctcgatttcaataacctagcctccatcgaattacacaaataaccttcacgattcacctttatacagtcgtccttatcctctttatcttcttcaccaagagaagaaattggaccattgaaatctcctagagagcaatcaacactagatgggatacaatctaagatacagtgaggagtagaagaggagcagaagagatccggatccggagaaggaggcggagtcacattttctttacccgggtaacggcagagtctgggctttttgttaggagggcggtgagagatgttgttagcgttggttgggtgaagaggttttcgaatcgaaagctgtgaggaaggagggatctggaagtcgtcgtcgtcatcttcgacggtgttcgacatttagataccggcgaggcaaaagtgatagaagctccgtgttcgtttgagtgttaagtgttaaaacgacgaaagcgaaagaaagaaacgacgacgtttcggtttcaaaagtaggataagtcgcatttttatcatttgttttaaatggagcaaaattaatttttaaaaaaattgcggcaaaaacttgtgaccattttaataaacaagagggaaaaggaaaataaattgtgaagaggataagagcaaaaatggtcacaagttttacaatatttttttaaaatttcttactattaatatactagttttttcatcaccaatactcgaagtcagaccattaattatttttcgaaaaaaaaatcattatttattgtacattttttatgtgttgatttttttcctttagttttaatttcttgctttaaattagacaaaggtttttcaaaattaataatgtgggattgtgaaatactaaaattttaggtgggagaagaaaattggtccattatttagcccaatagagtaaatctatgatggaccggatctaatatttttttcagcccaaaacgttaatgttgacaaagttgaaaagaagaaatattgacagtgggctttcggaccagaacctataagtcggcattgttgtgcgaattagggttttacatctcccaagatcatttgtcggttgattccatacgatctccaagtcttgtcgttgcagaatctctaagaagctaacgaaaatg

SEQ ID NO: 24876 - DNA, 3000 bp, Unknown; identical to SEQ ID NO: 14343
  misc_feature (1)..( 3000): 2750-1469P.txt file - cDNA_ID_2685955; gDNA_ID_2684110; Annot_ID_190603

SEQ ID NO: 24877 - DNA, 3000 bp, Unknown; identical to SEQ ID NO: 14343
  misc_feature (1)..( 3000): 2750-1469P.txt file - cDNA_ID_2685955; gDNA_ID_2684110; Annot_ID_137152

SEQ ID NO: 24878 - DNA, 3003 bp, Unknown
  misc_feature (1)..( 3003): 2750-1469P.txt file - cDNA_ID_2685961; gDNA_ID_2214694; Annot_ID_136779
caatatatcaggtatgacaaaagttcatcatgtaatgaaaaatgcgaggtataagaatcctaaatataattaatcacaccttttctggaatctaagacagtgccggtcaccatcatgcctgtcgaagtcatgtgtcaagtcctctttaaggacatcatacgtagttaaaacaatgtccgcattgagaagttcagtaatgtcaatcataggttcttcagaaagtgaggcgttcctcacaccttcatagatacatgttatgagagatcccaagcgtgtatggctacaacatgacagatgaaagaaggaaagaggactcacattacatgatgtggagatacacaaaaaattacgtctagtgaaagccatcttgttaagtgttcctctagtcaaaacataacagaagggagagaagaatctcataccgtgtaatctcggaatgccattgcggtaatataggagctggacagacaataagagtggcacccgtagagatgggagaggcagtgacttgtagaagttcagagcacatttggcaaatatattcaccttctctgacaataatttccgttgcatcctttttgctcttcttttgagatgctttttcatcaatatgttgactatccttcttacctttccctttaggtgaataacctacacagtcggcatgctgccaagcatcacaaaggtcacactgtacccaaactcctttgtatttgtgactttcactgacagctccacatatgcactcaacacgttctcttttcaatcttctcaagccagcgttcaaaacatcagtaactgatgaaccattagacacagaaatttcatcctccgctggttttcgatgagaaaagatacaagcaagtagttccaccgtttttcccaatcccatttcatctgcagcattcgtactttaccacattaagaacgaaacgcatgagaaatattagaggtagacaaagccatatacaccatctagcatttaagacgacttaaaacatatatttctgaaaatattctttgtgaaagcaagtcaaaacaaaattatccttgtaaataattttctgattatatagtacatggaggcaaaatgaagccgcaaattgttcataccagcaaggataccgccctgaattcgaggtgaaaaatactctggtgtcaatgagatattcccactaaaaacaaccaaaacatgacaaattgaccagaacaaattagttcttctgtaaatggcggaacttcactgagcagaacatacactatttgttgacgatgagaggagcttatagttcaaaataaaattaaaaaggactacttagattcttttctactaacctgaatgggttcaagaacatttttgtagcagagtcaaggaatcccacggagatagacaaaggtgaaatgaattggttgtcttccttgtctcccaacgttattggatcgcctctctctcgctgaaccatccaataagctgcccgtcgttggtacggcctaagttctgggagcaaatcagctatgtcatctccaagcattgcatccgtcctgaatcgatattgtgctaataagttggaaagataaaatcagatattaaggcacataaagagagaaaaaaagttgttcactcactttgatggctttatggcttcataaaaagcagcagcatcaaaactagactgcttactagagtccaaagtttcatcttccgtcacaactgatgactcaatatccttgacgttgaatcttgtcccatacctagcctctgatgtcattacctctggcctcaaccaagacatgacatgaatcatactctttttccaaatctgccttgtattctcaagaagagaatcacatgcatcaaaagcctgctgaagcatctcaactctaactctaggagacaacaatccctcattaccaggcatgagccttaaagtcaaaaactttatacttgccaaatgagcaagacccgaaaccccttcacctggaccatcaaaacttgcagaccaaatcactgacccaacctcatcatcagacaccttattatcaaccaattccaaagttatatcactcgaagacaaaaccggccagtgaccaagcttaatccgatcaacaaaattagtcacattgcaaagccgaaaccgtaacgagcaatccagatcatgatcaacctcaataggttttgtgaatgtactactacttcctacacgttctcttacactaaaattcgttagaacaacttcagctaaatcaaagttctgctgctgctccgaaactcgactacttaaacatatgttcacataatacggcttatcgatatcttcaacattcttgtcccctgaaccctcagcttcgtcgccgggtaattgatttctatcggattcagaaccagttggagtgatcaaacccactgcacgctggggcttggattgctttctcctacccatcactaagctaaaatagaaacttcagtactgcgaattcataaacaagataaaaaaattcaaaaacacacaaacaagctatgacctttatgcaatttcatagctcaaacccaaaaactttatgcaatttcaaaatagttattgaaccagttatataattcatacgaaaacaaactcagttacgatatgaaaacatgattccgaacctgtgaagtgaaagagaattcgttcaaaattcagaaattgcgaatcgacggagactatggaggagtggaatttcaagcgccggagaagattaatagaccgccgcgtgatataataacgtattgccggtttatctgccaattcgtttgcaccgacgtggcttgagaatgacaatagtaccctcagcttttaaataaaataacgaaactacctcctcttctctattggaactattccgattccagtaaaacggcacacaactgcaaaaccctaatctcaagttttctgtcgattttgatcttttggttgtaattttgtttgtgaaagtttcggacttttggaatttgaggtagaagagatg

SEQ ID NO: 24879 - DNA, 3003 bp, Unknown; identical to SEQ ID NO: 24878
  misc_feature (1)..( 3003): 2750-1469P.txt file - cDNA_ID_2685961; gDNA_ID_2214694; Annot_ID_189479

SEQ ID NO: 24880 - DNA, 3003 bp, Unknown
  misc_feature (1)..( 3003): 2750-1469P.txt file - cDNA_ID_2685968; gDNA_ID_2214520; Annot_ID_134041
gtgagatccaaccctatccgaccgtatatacgccatgttcagaaggttgtaaagacttgtttaccaattctataaattatcgtatgatatttttatatgttttcacacggttttgacaattattttttggaagatcacctattctgaaattgctgcagtccaaacacgtttaaatgtataatttgtttcaaaatagttgaccaaaaaataaatgtgatttggcgatataagtgacaaaatcaattcttttaaaacgggtaaatgtaattttggttttcttatcgttttattcaaacaaaattcattgtataactcgtgaaaaaggtatatgtaagtttatgttgtatgacgagaaaaatcacacgacgtcaatatgtgaatgcaagatctgcactttaaattttgttataagatctagggatatggtctagattctcatcgtatgagcctaatgattttaggattgaagtaatcgacgatttggatttgtattaacgaactgaaaaatgagagtacaaaagagatctctttagacatgacaaattttttttgttgagtatttttctgactaaacattacacccaaaaaacataagtattctttctggctgtaaccatacgtttttcttcatgtctccccttctccttttaaacgtactagttcgcagttcaaacaccacctcgatcttcgattacattttaattgagaaggacaaatattttattttattttttgggttttaaattttaaagataggactggctagatggttaaggttgtgacaaaattttcttaatgttgaggagaacattttcgttacaaattaagataatcagataaatatgtggtgatttgcaacttccgtaccttatcattattcatggtgttggtggactattcccgaagttttagcgacaaacgcaactcccgtaccttatcatcactaatataatatgattttgaatttatggataagtctagtgacatatatagtgcaaatggttgtctcaaataaagaagctgaaagaattgaaacaatattcaactagtcttttatcatttgagatgaaaaagttgaaaaacattattcaacttaaaaattgaaaaaatagcaagttataaagaaaagttgttcaacttgttcactacaatttgaatgatattgaatgatattcaatcctaaatgatttttattccattcaattttaggcaaccattcgtacccatacagaaagcaacatatatgatactgattgacaaaaccacttcgaaatggttgctccacacaaacaagaatatgagaagggcctacacaacgatattaattactgttaatttttgtttttgtctgcctgcatttagaatatggacaatatctcttcccggaatttgccatacaatcacaacaattaaagcagcgtaccataccatctaaataacagcattaatggctaccaatctcttattttttaggttagagtttagatctactttttaaaacctgattagcttgttccctctacaactataattaggggtggacgaaattttcgtcagggaaataaaaccaaattgaatcaaacagaaataaaacctatatacgttttaaaaattggtttaattatttgatcgcttgtctgtttgttctctgaagtttagtttatacaaccaacattgatatgtgtattttaagggatgatcattttcagttctgtttggttaatccggttttagtaaagctgttattaccaaactcttacaaaagtaattccgtttttttttttgttttttttttattctcggtttaaaattcgtgagcaagttatacataggttgatgacacaaaacatgatatggtgctgatggaactaaagtttccatgctagttagatcagcaaaacgcatcaaccataaactataaatggccaagattatgtcacaaacatccaggtacataattcagaataaactttttattacaaattttacgtcctaacaagtaacaagtaacagagagctcaaaaaaaaaatatgcatacagttatcgacatggctattttgtatcacttttaaggatttcacgtaaacaacgtccaggtacatgattcagaattctacactaccctttgtttgaggaagcgacacatgcttaatgcttttggccttttgccaagtgtatcaagaatggtataaactacaagttgacaatatattttaggcgaatgatttcaatggtggtagtactgggacgatacacttgtaacatttcaaacaatgcagtgacaacacaacagaacacaacacaacacaacatattttcctttgatcttgagaccatgcatcaattgcagctatcatcttttccacatactcagatctagacaaccaagataagtaatctctatttaaataaacaagcataatgtagaaaaagttatccagaaacaacaactctagtcacatataaaatttggcatggcctctgtagaagatagcaagaatgcttcatttcactattgcatcaaggacacaaaagttagtttaaaaaaaaaaaaggagaagataatgtcaaacatatacgtgtgcagatagacaccatgcttcatgtcattattgcatttttcttccctcacagcccatcaccaaagaccaagaacacacacaaaaaacttgttttaatgcgattttaatgtatttctctttacacaatcttactattttttttttatataaaacagaacaaattagtaagtttattatttgtgagggtgtttgattttaattacataccatattaataatttttgcttgggcctggaccacccaagtgtaaaggattatgaacaaaatcaagagcattaaaagcaacgtccctaccttatccgtgtttggtgatattatcaaatttttgcaaaagcaacgtacccatcttatcattattttataaagatcctatgtctatccgtaaatggactaatctttagacacacagagaatataatg

SEQ ID NO: 24881 - DNA, 3000 bp, Unknown
  misc_feature (1)..( 3000): 2750-1469P.txt file - cDNA_ID_2685972; gDNA_ID_2684203; Annot_ID_137253
cccttaaaagctttctttaagaaacgctcgtcgcttgcatctccagtcgtcaacttcacaattataattccactcaatgtttgccaacgtaaagagaaacaacagatagaaccaagagtatatattcaatgaaccaacctcaacataagatccaaaagcttccaaagcctttcttttgtccttcacaagtgctttaacccgagttcctttcacaatcagttgcagtataatcatctacatcagctaagaattaacagttctcagtttcacttttaaactttcatcttgttgcatccaatggatgatgcttctgtgaaaagcaaacacacctgacccaaatcactgtctccatcagttacaaaaacaacgtctttctctccatcaagatcatcttctttttcctctgcttcattggtttcaaatgagataccaaaatgcagataagagttatgtgcaagtcctgagattccatttcaaccattttaagtatcttgcattttgtttttaatgataccttcaaattcatcgtcgtctccacttaaagatccatcctttggccgaagttcaggagctccataccatttcctaagcttgggaccgccttaaaacaagaacacacaaagaccaaactcaagacagttaaaaagtctcaatttttcttctcataaaaaattcaaattcaaatttccatggcaatgagaataccttcgatataatcgagaatctgatccacaaaactgattttcttcttagcgaaacaacgaacaagacaacgttttccagatgttatcccaattcgacatttattagcttctgagtcctgattcgaagaagagaagagtaacgaaggtccttgactgaggagacacgaaggtagagaagtacccgccatgtctgcaaccacaaagataaggtttcgtcctcaccttgcttctactgtaaatctctcaacagttcacagtaaccctctagatgagaaagaggtttctctaaaccgggataactacaaaaatacctgctattggatcggataagattgttatgcaaggtgtccagagcaagtcctttcattttgcaaccttatctcaacgttcttctgctgataaagtttgggactttcttcataaaaatgtgtgcatgctagtttctagttttgttctctctttttttgtgttatcttctatgagtctctttattcatagatgttttcgtttgattatatataccttagtcatgttatctatttatgatgtagctcgttcttacttgagattgcactagtagtcttgcttaatgacatataaatcttgatttaaactccctctggatattctttcatagagaaaaaaaattcttatgatgattttattgttgttgttacttgttttctcagcattgatccatctctgctcaatccttacaccaaattttgatggtataagaggattcagtgacaatgcttatattaaaaatggagtttatagtctctctgaactatctatgtccaagttcttgggagttcggaagcaccttacatcgttgacatttgttctaagttttcctatgacaattcttttcgtttgcacattcagagatcagtttgagatccactaaagttgatgtggtctgatactcacttcttatcccaacctaatcaccatgataacttagtgcttttgcttaccgtcctaatggttttgtgtttagtttttttctttttcctttcaagtttccattgttgcaggagaaacaggtctactcagacatgcaacttccattcatgatgcagcaaaatgatcattgttgcaagagaagagaagtccacaatgatgtctcaaggatcaaggacattatttagcaacaaagaaatgttgatttatgttttcaactatcatgtactaagtaataattcaaactttgtgaaacatctaacaatttgagagcaaaaaaattacaaattaacatatgagtgtcaaattcacagacggcgtgcaatcctgatctagatagagcagacgacacggcgtgtcttgcacacgtgacctaaaacggaacgtagtttactctgttttggcatattaagctatttactgacgtggcaatgcttcgatatcggaccaaagctgaataggtatatacggattccaaatcacaaaataaagttatttttgagttaataaaacgctttggagtccgggacctgttaattttgctctaagcactggaaaaaaaaaaagcctaaagggagccaaacataaaagcagtaccaaaaatttccacttttctttaaccttttttgcttgtctaagaaacttctcctctgaaatcatcgtagattaatctgttttcttagacatgattaagtctccgacgctttgaggtaaccggaaagtgtaatcaatcgcttgttgctgtatttgtcactctccggcgacaaaacttgatttccggtggtaagcaataaaaattcaacctttttttaattcgtttctacatttcaagctttgattttgttctttcttaatatgttgttgttgtatttctgtgttgtattcgtaattcgatctaaaattgtcaaattgattgtgagaatgcaaggtcttagtttgtcaattgcgaaacttgtgaattctttggaatttcaattttttaatctttcttaattttgtatacttagtgttatacttaatattcaaagggctttacttttgtttgataatagatacttctcactttggggctgctttgttttcgtctgatggtgttatttgtatgagaatttgctttgtgttcaggtttttggtgtgaaattgtacagagatgctgtcaaatagtaaaagaattgtttttttctttggtaaagttatatgtagtactgaaacatgctttggtagattggtttttttagtacttgaagaatatattgagcatatatcaatttgtttgctttttctctgtttgggattgcagatagtgtgttcctaagttagatttgcgatg

SEQ ID NO: 24882 - DNA, 3003 bp, Unknown
  misc_feature (1)..( 3003): 2750-1469P.txt file - cDNA_ID_2685976; gDNA_ID_2214523; Annot_ID_134110
tcatagatcttgcaacaaagaagatgcatgcggctgtgactgtttccgatacaggtactttggctaatcggatggtaacgataaagaaagatccttcttttgatctattgaagaccttttgggttaatctggatgacaagaccaaaagagaacttttggtggtagattctagaaagcttatagactatgtagagaataagtatgttgacaaagtgaaagaagattttgggaaatgtgtatccgttgccaataatcttcgatggagatactggaagtgccacatttgttctcaggtatactactgttttacagattgccagaggcacatcttagataaccatgtgcaaaaatttgtacccgatcccagtgctcgtcctaagtgtgtggataaggtattagctgacatgatatgttgtgggaaatgggagcctgtgaatacagtagcggcagcaaatctgatcaaggatagagctaagcgcggggaagagtttgtttatgttaatggatggtgtagtgattggcctgaagctaaggatgaagagcggagtaaaatactcaaacagtttgctcaggttcttaaatcttcttgtaatgaaaatgatactctttcatgtaccctttgggactcgttgatatattacacagaaaggaatctgcaactacttgaagttcctgggagctatcttgataaatgtagcttctttaagaaccctcagtgcatctgcttcttagatcttaagcaccttgaacacatcctcaactattttagacagctcaccacagatgtccgcgcgagtttagttccaaaagtagtgaataggttctgggaaaattcccgggtcaaggaaacaatcggtattgagcgacttacatctaatctgcttcttgatgggagactgctgtgtgaagaagagcatcattttgatgacacagggagtgtagagacttttaagtccagtggaatttatgagcatgtgatacctgagggggacaagatggtctcctgggttctcgactgcccagaaatggatgagaaacttgtgtctcaaatgggagagggcgtacacaattttgagatatgttagcagctctgagaatagtaaggggcatggttaggaaaaaggaaagctactatgataagagacatagaatggtaacctatgataagatgttgggtgaggctgaaaccatttgtaacagagaagacaataggaagaatgttaatcagcggagcacatatgcgtcagcgctgcgaatgaagtgtgaggagcttgtagtgatacaagatgatgataccaaatgtttcttgaatgttgtaagagatgttcttgaaagagcaccttctccaaaatatgaagtattaaccgacaaagagtatatggagagtatatctgggctatctactgctgttcaaaatgacattgttataaaaagtctgtggaagctacgaaaatttctgacaaagaaggtatgtattcttcgtcttcgtttctttctactcattataacatgttttgacctgtggctactgataaaaataagaaatcttgggtattttttgcagttccatttgattgattcaaagatattgctgaacgaatttacacaaggagagctacatgaattcccaaagctatcagcaattgagtatcgcatggtggtccttccgtttgtgaaaaagtttttacaggtttatcaacttacggaaattatcaatcacagggaactcacttggtgtttgttacttaattccaacacaacataatttgttcttctcgcagggtaaactgaagaaaatgatcatgaaaactaaagaagatgacttcagttactgaactagaagctaagaagagagctctgtaaaagaggtaaaaatctaatgaatcctatcaacagttgttgttttggtgttgttctttgggttaaatttagttgtgttttttatgcagggctacaatttttgaggatcattcttgcagatgaagaagataaacttcgagtaggagttgtttagaaaacagtcttttatgttctcgggaaaactttgtacccgagagaaaactagtctgaaaagttctagtttgttttaggatctgatgcatatacgtttgtgtgtctcaagagagattgagaaacacattgagaagtggtgagaacacatttttatcaaagtgaaaattgtaaaatgcctcttaaaattgttgccgtccaaaaaacagacgttaggtggtcgtttagatttgactaattgtttatgtcgacaccaaatccaaagcccatttgacccgccttacaaaacaaaacatcggcccaatctgtgtccccaaaaaaaaaaaacttaaagcagacgtggcagaccctgattcgttacactatcgtgtcgagcatatttttctcgcgtcgccacgatttggcaataccctgagaaataaataaaaatcgaaaatggattataaggtgaccttcgtctttggttgaccatcaaaaactacaacgctctttctccgtaggaaaggggaagcaaataaattatcgaagcccactggtttcggagctgatcggtctctatttctctcttcatacatatctcgtaagcttctcctccctcttttatcttcttccaatctcctcaattgctttctcctttaatgttttcgtttctccaatcgttatttgtgagtcttttctattcagatctgtgtgattgttgatctctgttcttagatctgtttcgcgttttctagatatcgaatttctatgtatgtaatacgatgtagatcggatgcgttattgtagatctggtttttttggatcgactgagtcaaaaatgattgactcagtttacgaaattgttcagttacttagctgcgaaaactgtgattcgtgaattttgtagctagattatgaatgtggttgcatgcgtttggatttattgagcttacttggaagtgatttgtgatttattattacagaagcagataaagttgatcggatactagaatg

SEQ ID NO: 24883 - DNA, 3003 bp, Unknown; identical to SEQ ID NO: 24882
  misc_feature (1)..( 3003): 2750-1469P.txt file - cDNA_ID_2685976; gDNA_ID_2214523; Annot_ID_184677

SEQ ID NO: 24884 - DNA, 3000 bp, Unknown; identical to SEQ ID NO: 11729
  misc_feature (1)..( 3000): 2750-1469P.txt file - cDNA_ID_2685989; gDNA_ID_2214513; Annot_ID_133888

SEQ ID NO: 24885 - DNA, 3003 bp, Unknown
  misc_feature (1)..( 3003): 2750-1469P.txt file - cDNA_ID_2686029; gDNA_ID_2214492; Annot_ID_133487
ttgctagtaaagcctaaaaagatatcattctgcttccaaataccttgcattaatttagaattagtattgctaaattgtaacaacatgccatcatatttccatcattgagttttgttatggatttggcaaacaacccaatctaagtcaaattcattgcatgcaagatcatactaaatgttgtactggagaaagcacgatattctatagcatttttttttgtttaaatgttaattccattgtagtaagaacaataatatatagtttagaatctgttattacaattcaataatcactacaatataagtagaattcaaatgaaagtgcataaatatttgtatacgtcatgtatataaaaaacatataaggcctagatatcttcataaaagtgtttcttgaaggcctccatgtgagccacctgtagacacgtcgcgagaatcaccgagccatcttcgttttgatccggcaagatcagcgagtcgccgtcaaagtcatgcgtgcctggtcccgtgtagaactctttgccccatccgaaatcaaggccgtacattggcaaagttaaccagctcaccactccaagatttgggtttccgtagaatggaccttccgtgcttcccaaggcatgtagatcttgaaacttcttcagatctttttggttcttaagatactctatcccaatcatcacgtattcgtttgttacattctttatggctttactgattaaactcgccgcgaaacccaattcattcgatatcagttcacctatatgcataacaaaattatcgaaacagactttgcattgtagaatcagtacgtactaacctacatttacgtggatgaaaagcaaccaagaaaagtttcatatatccaagttcttcagataattttaattgttcagcaatagtagaaattaatgataatccatcagtttcataaaagagtcgttttgacggtcttttgacacgaattctaagataaacaaattacaatattttgtaatatttttgaattgaaaaaaattaataaataaataatatatataattggaatataaaagtaatgaacaaaatcataatttttgtttagaggactaaattaaattttgaagaagtgtattcaaattcacaaaacaaacaaaatttctatggatagtaatagaaaagaaagaaaaaacacgtacctgaggtgcttgctgcgaccacgtcaagagtagcattgccgaagtagccgcgtggcagaggtggctccatccgactacgagtatctatacagattcctagagccgttggttgctccggagagtggccacgtgctttacacgcgcacctccacacgtgtccggtgacggtctcgtaccttgtaaaccctttcgccgggtcagagtgtttgcttccgttggctttacttcgtagcttctgcagctgagatgtgctcagtggtagcatcaccacaatcgttttcttctttctctcttctacattgtccgtttctccgatcaaaaacggtggctgatcaaactctttgtggtcgaactttgggggcgacacaaacggtgggagcggttcaccagcccagaggattttccggtctagaaatggaacggtttctaacggttcaccgcgcgcgagtcttccccattccgatattaagtgaagcgcgctttggccatctacgatcgcgtgggaaacgttgacgctaaggcttattccaccgcatttgaatttggttacctgagctaaaaatagaggaatcgtttcgatagggtttttatagtttacttgcggcataagattctcgaattccggcgtaggagagaagtctttgaaatccgaaagcttcccctcagattccgcttcaatgaattccactccctcggcgttacaattgagctcgaaccgtccccgagggagccatctgagacggccagccatagggtaaaaatggactagcacacggctcaacgaggtttttaggatttcgactacattgccttggaaagattcagatggcttgtcgtaaaagtaaagggtgggaatgtgagtaattgtaccaacttgatcccactcggctaagggaaacctaccgctccacgttggttcggccggtactatagtgtaagattttctaaaagttatgggagccataacacaaaccccctttctttttctcttctctttttgaagttcgtgctaaagtaatgtttatatagtacacagaatcatatggattcaacgaatttttcttgctgttagtcaaaattcaaaaatgtttttctcgtggtttagtttgtttccttcgaagcagcttaattagtggaagtgagaataaggtttagttttgttggttgtatatgatcacgcgtattacccttcttctctattttgttcacattgtggatgaatatatatttccacgaaaaaatgaaaaaaaacgaggtaagaacatataacataaaattcatatcactattagggaatgtgttatacttttttatgcaagtatattccaaagtataaattctaaactaaatccttaagtatatatcataaactctaaaaagaaatggtaaatccaaaatactaacttcatagcattaaattcaaaagcccacatcgccagttttgattatatcttctgaatttaagttgagtttatttttataaagtcatcttgaagaaaaaaaatgtggatgatgtattttacactgttacacagtaattttagtttttacaaactaacaaaaaggagaaaacaattccactttctccgagtctcctcctccagtagttttgtcttaatgggtaatttgtgggccttttaaagcccaaaatgagttatcgtattaataaaccctagttttaaacccgaccgactaaaccttaacccagacccggactcgactggatcttctcttctcgccccatctctctctatcgacgatcgaacttacttgagtacttcttcttcttttgaccagagctctcacacatacgagtcactataatg

SEQ ID NO: 24886 - DNA, 3003 bp, Unknown; identical to SEQ ID NO: 24885
  misc_feature (1)..( 3003): 2750-1469P.txt file - cDNA_ID_2686029; gDNA_ID_2214492; Annot_ID_183707

SEQ ID NO: 24887 - DNA, 3000 bp, Unknown; identical to SEQ ID NO: 15037
  misc_feature (1)..( 3000): 2750-1469P.txt file - cDNA_ID_2686032; gDNA_ID_2684256; Annot_ID_193130

SEQ ID NO: 24888 - DNA, 3000 bp, Unknown; identical to SEQ ID NO: 15037
  misc_feature (1)..( 3000): 2750-1469P.txt file - cDNA_ID_2686032; gDNA_ID_2684256; Annot_ID_138104

SEQ ID NO: 24889 - DNA, 3000 bp, Unknown; identical to SEQ ID NO: 7523
  misc_feature (1)..( 3000): 2750-1469P.txt file - cDNA_ID_2686130; gDNA_ID_1621150; Annot_ID_56845

SEQ ID NO: 24890 - DNA, 1671 bp, Unknown
  misc_feature (1)..( 1671): 2750-1469P.txt file - cDNA_ID_2686217; gDNA_ID_2653; Annot_ID_145840
aggaattttggcaaacaattatgcatcacctacataattgtttgtgtaagtggtgatgtatatattttattctttcgaacaattatgcgaatattgtcaccaaaatatgaaaatatcgatgttatctattcatcattaaattacccgatccagagatttataagtatttaactatttatcaaattctaaatcgatgttataagttgtagataatttttagcaaaaaaaagttgtagataattgatattataggggagcccattccaattctctcccgaggatggatcccgtttaaattcgtaagtgggcttataagttgaaagcccatacttatgttagaagttaaaagcccagctaaataataatctctgtagtgtttatagtcgatgttgggctattgaccactattttcatcatgcgtgacgtaggcgtgggaagtattatttgtgtgatccgagatctgatccgaatttgaatgtagctgtatgggagaaaagccgaacgtgtatattatccttttgacggcgcttaaggttatcttatactagtatatctcatatttttcttacgtaaaaagtcggtgatatgttattgaaacgtgtcaccacaaacgtaaacctatgatctgggacatgtttgaaaccaatgaacttttcaattaaactcggacatctatttgtatctttctgtaaacttaaatattagatatatctattgatgtattatgttgattttcttattcttagacgactagcaatatacgtaatatggtcaattagaaatttagaaatctcaccaagtcaagcactaatctatacagaacggcaaatccttctaagttctacttctaaccaaaccgtatgatccacatgaccatatgagagtaatttccaagagactatcatgatgcaagaacgaacataaaaccatctaactaaaaatttagctcacttacatgcatgaacaaaccaaattgcctcattgaaactgcctacttaaaacatgttataaaatcaagatttttccttgtctttttcttgattcgaacaaagaaagagttaaacatgttgacatacaaatcaacaaaagaaccggcgatggttaaggaacttcgacaagggaacccattcgtcaaaagtagtttgttattcgtttaccggtttttgatattagtaccagatttgtttttgacatcttaaagaacgttaagattgtttcgtactatttaatagtttcacacttattttatactgtatttagaagcttgtttctccaattatctcatttggtaaagacgtttcattagcgatatcgtgttaacgtcgaaagtcctcctctcgttacggtccggtccgacacagaaatttttatttaatatttactttattttttgtccatttattagaaagaaagtcattgattggtgcaatttattaatataaatttattaaacaactatataaactcctcattactgcccattaacgagcttcccttttcctctgttcttcactttaagaaaattacaaacttttatcttctattggacgaatctttgatctggttttaattaatcactcgcttactttaggatttttttacctgaattcgaatatatacttttgattttcatcttccgtagtcggtaccatagaattgaggagcttcatg

SEQ ID NO: 24891 - DNA, 357 bp, Unknown; identical to SEQ ID NO: 132
  misc_feature (1)..( 357): 2750-1469P.txt file - cDNA_ID_2686240; gDNA_ID_2986; Annot_ID_146081
  misc_feature (25)..(25): n is a, c, g, or t

SEQ ID NO: 24892 - DNA, 520 bp, Unknown; identical to SEQ ID NO: 217
  misc_feature (1)..( 520): 2750-1469P.txt file - cDNA_ID_2686284; gDNA_ID_30662; Annot_ID_146827

SEQ ID NO: 24893 - DNA, 511 bp, Unknown; identical to SEQ ID NO: 226
  misc_feature (1)..( 511): 2750-1469P.txt file - cDNA_ID_2686295; gDNA_ID_30985; Annot_ID_146899

SEQ ID NO: 24894 - DNA, 974 bp, Unknown
  misc_feature (1)..( 974): 2750-1469P.txt file - cDNA_ID_2686302; gDNA_ID_77479; Annot_ID_147183
tcatgacttatgatcgtgtaagawttttatttttctgaaaatatttcacacgggacctgaaaacgaaacccatgtcgtcttaaagtcagattctcaaacactttctcttgacaacattaatagccaacaatgagatgtgattagatgaaaattgtaataattcacaaagtataaagaaaatgatgttaaaactgaaagccaaaacaatatatggaaaactgaaaattgtaataattcagaaattttacaaatttgataccttaattgaaattacactcgttgtggttgacctcttcttcagccataactgacctcgaatgagaagggagagtgaagatgaattttggtttgagaatggcaagcagcaaaaaaaatgtaaggattgttaatctgccatggcgtcatggtgtaaagcaggcggaaaagaaaataactgatccgaatgtgaaaaatttgagattcgtaattagaaaattgcatagaagatgaaacaacataaattagcaataactgttgcaagatatggggaatggggaagatagtgatgaagatggcaagaaagaaggaaataaattatggattaaatctctttaataatttatgttaatgagaaaagaattattgttttacgcttcagaaaaatcaaaactcaataaattgagactttgcttacgtgtaaacaggagaatgttgcagtttgtgataaagtgactgttgatttagtagatatagattatagattaaaagctgacccgggtctaaagtatgtatggaaagccaatatagcatcgtttcgaccattgcaataatattgtgtggtgacaagcaacacatgatatgtccgtttagaaacagacaaaacaagaagaagaaaaaagagtcgtggaggattcttcattcttcctcatcctcttcttcaccgattcattagaaaccaaattactaaaaaacgtctatacacgaaaaaacaaatg

SEQ ID NO: 24895 - DNA, 3000 bp, Unknown; identical to SEQ ID NO: 14931
  misc_feature (1)..( 3000): 2750-1469P.txt file - cDNA_ID_2686404; gDNA_ID_2684234; Annot_ID_192371

SEQ ID NO: 24896 - DNA, 3000 bp, Unknown; identical to SEQ ID NO: 14931
  misc_feature (1)..( 3000): 2750-1469P.txt file - cDNA_ID_2686404; gDNA_ID_2684234; Annot_ID_137683

SEQ ID NO: 24897 - DNA, 1165 bp, Unknown
  misc_feature (1)..( 1165): 2750-1469P.txt file - cDNA_ID_2686424; gDNA_ID_1591787; Annot_ID_151502
aaaactatgcctatatatcaccgtgagtctttctttttttgggattactttgccagtttgcctataaccatgtcattgagtctatgactacaacatggcattgggtttagatgtagtggtcaacatcttatagttattgagatattgagtccattggtaataaaaaaactcggttaaagaaaagaaaaaccggtttaaaaacggtataaaacatgtggttgaatgattatgattagtgaaaacaaaaatttgactaaaaaacttactaaaaaaactttaattagtatacacacaccttgcttccacttaactatcatgaagccatcatcactgggtttacatcggctaagtttatgaaagtgaatgtctctataaatgcttactctctttttaccatacatattagcctagagaagtatgtagagttcaagtttccaacatacattaatttgaactcaatacgtacgtgaaagcaagccttcctacatcaataaagaccgacctactagtttcttcataaatcagatagaggccgtgtttgaacgtagatgcgacttggtgtctcaatgagtgtaaaataaaaacctaaaaaaggaaaaaggtaggaccaaacacgccccatcccttaatctcattattatcacctcttccacacgttacctccctgcaaacctcacgctccttccctcataacacgtgactctcacgctcctccacctctcaaaaaaaccaaattttccttgtaatttacttgaaccaaattcatatattcacctaaacataactaattcttgatctaactttcgaaaattttcaaattaaaacatctcattgattccaaaaacatactttattgttttatatggttagtattttaatctttatgtaaaataaaagacgttggaattggaaattactactagtagattgctttatcagaattttataatctatacaatgtaaaaagccgcgtcatctgttcaaaaattcagaagatcagagtcacgcctatatttctctctctcccgtcactctcactcttcctcttctgcttcttattattacatcgatcctcgttgtccctcctctgtttcttcaatatctctttctctccaacaaaatcaaaatcaagaaaacaaaaaagaaaaactctcaagaaacaatg

SEQ ID NO: 24898 - DNA, 3003 bp, Unknown
  misc_feature (1)..( 3003): 2750-1469P.txt file - cDNA_ID_2686462; gDNA_ID_1974091; Annot_ID_180598
ttggtgtaaggcgcaggagtcatgaatctgtagtagaaaggtttcatttcaggatcatcctccgggccagtcatacaactcccgcttgtactcatggagtcttcttcgcttgtactcattatggacttgttgctgtcatccatcgagtcttctctgccatggaacgaaaggctgcttctcttttccatggtcttttcgggttcgctgttggtcttctctgtttttggttcttcagtttccgtctgcttatgaatgagagagtctggctcaaatcaaatggaaagatgtatttaaagcagacaaagaagacgactcacatggacatgatgatgatgaggtggtgtgtacaatctctgctctaaagacttggcatcccattttatggagtactctctggcgatttcctgcagcagctccactttcatttcctttgacggcggctctgctttgaatctctctacaaactgcaacattcctccgtggagtcagcgaccaagtggcagagcatataaaaaaatatagtcaacaaagaataaatacctcagggttcacaaactgatcaagtgtgtttccgtatctctcagcaaataaagatctgaggtcgcgtagctcagggacttcagagactctagcggctgcatatacaagggaggagatggcctcgcggcactcatcagggcaccggctgctcaagcaaaacccaatatttatttagatgaatggaatccatgcaagtaaattaaacaagtttagggttagtttttacatggatttctgtaatagagagacattggatgcaacacagttgcagaattgctccaaaaactcataacaagccagcctccttttctcctctataagcccttctgcctgtcacacaaacacatgccatcagaaccatctctctatgtacttactcatgtgacttataacttaaaacaggggccaagaatttcttaagcaacaattcactctgttataaccagctggtgacagcatcagaatgaaatatatctatttctttttttttgcattgcttccatctatacccaaaatagaaccaattaacaaagatttaccgaaaccatcgtacgttgaccctctttcagaaaagaaaaacaaaagaaaaaaaaaatcattctgatggaaatgtaattgctttcacgttcggaaaaccaataagatcccgtgattcattaagtcgatagaggacatgaataacgtgtctataactccaaacaaacaaaaaagacgcaatagaggctgccatatgcatgtaataaatgggggtaaaagaaaatgatattaccctgccatatgcattgtaatcgaggctgttcttgagaagatcgacaatgtcgttcttgagatatttgcaaaccgagtttttcttcctcttcaccgtgtctactcttgtcttcgttatcttgaccaacgacttgctgagaaatataattaaaaacaatcaacgaatgaaaccaggaaaacggaaaataagcagagacttaccatttcgtataaaacttgggtttgaacagcccatcaaacattttgcctttcgaaaaaaaaacagacaaggttgtcttcttcttcttcttcttctttttttttttttttttgttgtttttttttggggggttttgttatctctctctctttcttcgtgcaagagaaagagagagacagagagaagaaatgtggtccttttgagaaagatggcgctttaaggtaagggaagggcttttataaggaagagagaggaggtaatgaaaaagaagagaagcgaccttggcttggctcggtcttacatgagatctgaagaaacggacttgtatcgcaagaaaaccatggaaccctgtctccccgcttttttatccacctctctttctctctctctacgtacatgtacatgtattgatttagagctgtaattactaaaacagggtggagttcccgcacgataagggtgttgactagggtttgtttcggtattcaattcttattttttccgttaaaactctttgttatttcgcaagtgagtcagtgatgatgacgaatcaattcaatcattatgttctctcatatatatggtttacttcaattccatcatctcattcattcattcaaaacatgtgaccattttatttgaaattgttaattgttatatataaccatggatggacacaagtgttggagaaccccaattgggcccataataaaagccaagcccatatgacaaggtatgcctgtacatctttagggggtttatatgtctctgatgagtacaacaaaatctgaatatggttgatgagcttgaattatatattgtcttaattccttcgaaaacataagtaaatcatttggtaacttgacgtctctctactcaacctttttttttgttggcgttcttgtctctttgtatagaaaaagatgttcatatgtttgtgtactctacgttacttcttcttcttcttcatgtgacgatgatggggattacgtgcaccccttcttccttaaacaaaatccattagggagttactttttgttttgatagtgtagttgtagtggagcactgagagttatcaaatgaatgaggatctcttgaataataaagaattggagtgtggaattaggatggatctaatttcattaattaaagaggagcatgattatcattttttgttaatttaatttaataatggttaatgtgaaaaacagaggaaactagaagaagagagttttggcaggagatgtaggtggcgggagtgggttgggcgagagagatgatggtgacggtgcagctccaaatcttctctaatcttttgacacttttctataaaactccccaaactgattctctctgactgcctcataagtcattataatagtttcccccggattgttttttctttctttttgctaatcatcatcggtttcttctaatcaaaaaaaaaaacaaaaaaaaaagagggactacgttcgtacaatcccatccttggtatg

SEQ ID NO: 24899 - DNA, 3000 bp, Unknown; identical to SEQ ID NO: 14655
  misc_feature (1)..( 3000): 2750-1469P.txt file - cDNA_ID_2686488; gDNA_ID_2684211; Annot_ID_191505

SEQ ID NO: 24900 - DNA, 3000 bp, Unknown; identical to SEQ ID NO: 14655
  misc_feature (1)..( 3000): 2750-1469P.txt file - cDNA_ID_2686488; gDNA_ID_2684211; Annot_ID_137333

SEQ ID NO: 24901 - DNA, 3000 bp, Unknown; identical to SEQ ID NO: 10266
  misc_feature (1)..( 3000): 2750-1469P.txt file - cDNA_ID_2686506; gDNA_ID_2213640; Annot_ID_132251

SEQ ID NO: 24902 - DNA, 3000 bp, Unknown; identical to SEQ ID NO: 10271
  misc_feature (1)..( 3000): 2750-1469P.txt file - cDNA_ID_2686506; gDNA_ID_2213640; Annot_ID_181197

SEQ ID NO: 24903 - DNA, 21 bp, Unknown
  misc_feature (1)..( 21): 2750-1469P.txt file - cDNA_ID_2686513; gDNA_ID_93827; Annot_ID_147277
atcgtcagtttcataacaatg

SEQ ID NO: 24904 - DNA, 3003 bp, Unknown
  misc_feature (1)..( 3003): 2750-1469P.txt file - cDNA_ID_2686513; gDNA_ID_2684211; Annot_ID_137344
aacaatattacattgagaagggaactctaggtatcaggcgcatttgatgtacttttcgttgttgtgtttatcttaaggcttctctcacatcaaaagtggtgcaatcaaacagtgtatgtttcaccatgtttacgattacagatgtctaaccaaattctaagctcttaaaatgggcaaaatacaatcaagagaaaaagagccaattcatttctgacaattcttaatgtaacaactccagagaccattcacctgagcttccaaccatcaggtagatggcactaagctcttagggtttagatcccaaagcaagaagtatcttcttcctcggaccctgcaacgaaaacatagcttgtgaaaagagagcgtaataatgttgaacgaagagagtggatgtagtttttcgcgttacaacagatcaaacaaaactgagaaattgaaattcattcaaaatctgcaagatatgataagagtgatactagatgttgtgtggcaactcaacatgaagcttaccatcggtatgagcatagccttgaggtcatcatctgtcatatgcatgagagcatccatatcaacctgtgaatgaccgaaaaggataggaacgttatatatgcatcatccataacataacataaatttcaacctaatagaagatattacatacttcttccacttgaaacgctgttgaatatttctcgagacccaatgattcaagaaagctatcaaccgatgaatcagcctgaaccagaagatgacaagcaaagaaacattagtggatggcctgtatacaagggaagagacatcgtaagctatgtgtctaactacattttcgcaccggtcagaagaatggtttctcccaagcaataaagtactgatggaaaaatatagttgaagaaaagtgaatcatattgcctgctgtgatttcttcctggtagcttgactggaagtttttctagtctctgtttcagtcgctacgctcttcatacttggcctagcagcctccgctttggattttggtgggtcactgttttttggttgctgattcattgtcccagagagctgatcccgtaaatcccgcacgcctgaaccagcttctcgcccactttgagacccatgatgtctcttttggagcttcaaacgaagatctctaggatcaaccctgcgatctaaataagccatccgatagagaatcaacaaccaaacagaaatacttttgtcatacttaattttctactgaaagaatagatgagggggaaaaacatacttgaaagttgaggtttgtcactactgaaaagatcatgctcccatttgtcgtcctgcctttgcctgaaagcatgaggaaggagaaacttgagataaactgatatgtaattaacaatgaagactacataacgagaggaatataaaccattccccaacgcaaaagcaaaaaaagttcatcacccaaaagattcaattaaattgccttaaaaccctaatcaaatcaccaaccatcaacaaaaacatcatcagatagatcacatctccagatttaactatgcaggtaggcactcaaactagagaagctcataaagctgatctaattgacaatgcagtgaagttgattgaaattaccaattcaaaatgggcaaatcagagagtcctagtaagctaacaaaaagagcggattccatactctaattcatagagcgaagcaagaatcaaacttggggatgctacaaggaagattatacacaagaggaaaagactctaacaccaagtaccagctaacatactgaagaattttcgaggaaagcaagatatatctcaatagaattatgacggagagagggagatagataagaacctcttcccagtcacttgtcgcacgcgagtagagatgtctccagaaccgccattgatacgatccttaacgaccttcctgcttccagactcagcctccaatttatcagcatacatctttatccccttggatgaaaaatacagaaatttgtcctaaccctaaattaggaaaactcacaaactaaaaagttgtgtggactattagcagctctcaggttagagatgcaaatagaaatcctagaatctacccagaaatcacagagacggaagagaagctctagaacagaaacaatccattaatgtagaaaactgcggattttgctcacgatgcctttggcttcaccaggatctacgttgcgagagagtattcgggaaattaacatccaatcaaagtaacgggtcgggtcgggtcgagaatcaggattatgcgttcagaacaaaaaaaacgataaccggtttgactgttaaccagagttaatccggcgattcaaaagacgtttcggttcgatttttctttgacaacgcggctaagcttttcatttctttttttttgttttgtcaacacgcggttaaatttttgtttgtcagattcattttttttcttgataaaaaacatccagattcctttctttgtaatgttttagattaaaataaacaaaaaatccctaaaaaacgaaaaagttttgaaacttagaaagacggacataagcgagctagcttctaagctttcttcgctaaattcttggctaattctcttctatgactgatccaattctgcttcgactccatatctgaggtttctgacgtctgattaggtaactcccgcttttgttttttttggggggttttatccatttttaatgtctttgttgtctacttgtttcaatcgtatgaacttgagacgcgagaagctcagattcaggatccctaaatttttctctatttttttttttagttttgtttcgttgattacaactagtcctaggttaaagaacaacgtttacaacttattttgcttttttcagttgtgcctaggtcacttgtccgaatctgtataattcacgtgtatcttcctggatttgattacatttcatttacttagtgttgggttttacgttagtttaagctgctgagtactttgatgttttttgtttgtagaaaatg

SEQ ID NO: 24905 - DNA, 3003 bp, Unknown
  misc_feature (1)..( 3003): 2750-1469P.txt file - cDNA_ID_2686520; gDNA_ID_2213668; Annot_ID_132724
agtgtaacccagacctccaacaacgtttacttagctaaaaccaggcgtcaataaaatgccttgctttaaaagttcagtaaattagtggatgagaatcccaaaaggagaaacagcaaaaccaccactacttgcatagatcagtactttataattaactggtgagctaaaggaatgcatcatagtatatttatatcaaccaaagagcccacaatctcctctgtggagaatgtatcaaagttcatagcacctaaactaagtaatcaactaataagagtgggcaaattaaattgaaagtgaataaacaacctccaattgaaacactgactggatcatcatgtccagcaccaaactcttcaagagaatctgcaaaggcactaactccagtagatgcctctcctaaagctcccctataacaaaaaataatgcaattcctaagtttcagaaaagacaactgaagagaaagatacaacaaggagacagaaaaaatgaaggtgagaacgagaatgctaaatctaattcattgaaaaattccttcccattgagtcttaaatggtacaaagtttaaaactttcagctttcaatggtcaaacagttcaagagaatgacttatgaataagacaaagccttatataatagagaaccagagaaagatgattaagatattacgacaaaaaacggaaacaaccaaaaaaagtaggtagagatactcttcttacatgaacttcttaacacctttgtataacttctgacaacgatctttaagctcatcacttgtcccttccaaggagaagacctgatccagtcaataaatcaatcaagtttcaaaactttattggagaaaacttgaatatatcactaatgaggtaaaaaggtagtgtacctgtttttgaaacattggggaatcctcaagattgataaaacccgccattgttaagataaaacacgaagaagcttcagaccaaaagtctacgaatcgagtcaacaagacaagacaagtaaaccctcgaattgctgtcttcttcgatttgaaaatagatctcgcgagtttcagaggcgttttcagctgtctgatgatgttttcatttgcttcgagaagagagacacagaaaaatctgggaactaaagttgtttacaaataaacccctcattttattatttattacagaaacagaggaaaataatatcagataacaaaaccatcctcatgtcacatgtcttacgaaatttaagtaagccactttaataagttcaaaatgttgttgtaacaacactcaaaaagtagaatttatccatcttgctcagcttttaggctctccaaattttccatttgaaacaacaaagttacaaaaaattctttgtctttgttcgtatgctctctaatttctctgttaaagattttgtcctcatagttgcgatcgtcatctctctgttttttttcgataacggtttttgacatgtacacccacacacaccccaaagaaatggatcgaactcattaattttaggatgtaagcaaataccccaaaccattagattgcacggtcttgctcttgttatctctcgtttgatttattctagtttctttcttctgtccaaaaacacttttatatcttcttcacggcttgtttccaaaacctatcattataatttatttccattaaaattttactccattgtgttggtttgaaacctatgtatatgatgacttagaaaaatgtgtatgtatttttagtatgagtttttaagttttacttttgatttattttggagaaaaaaataactaagattataaagtttgaggttctctattaaaaatgataatgaaaattatgttaataatgtttttacttataacaaataaagaatatgttcaaaaaccaaattaaagctagagaaaaaccatatacattcaacatctaaagaaaactaatatggtagtgcaattaaacctgactaatctcgaaagaaaaatcaaaccgaaaaaaataaaaataaaaaaataaacttctgagcttatcctatgagaaagttaactcaaagtaagattttaaaaaaatatcaaaacggaaatctgttgagcaaattaataaatagaagattaaaaatttgtacttgttgttcaagcttctttaatggagaccccagttctttatatttttttgaagaacacatcttgagaagacatctctcatcatccatgtcatacacctcgtacagcatccgatgatttaggttttgtggtgaatatatcttagctagcatcaacatattctatcaaacagttttaagattgaaggaaaaagagataaaaaagaagaggttttcatcgtattctttacatgtacattcaacatcttatcaggatatgcgccatgagcacttgttagcttgtcaagttcgaactttaaacaactagttctttacatgtacattcatcaactagttttttaccatttgagatgaaagagttgaaaaaattattcaacccattcaattttaaaaaattgaaaaaaatgagcaagttataacaacaaaatgttcaacttgttcagctacaattttggagatgaataagttgaatgatattcgatccaaaacttttcgactcaatacttttaatccattcaattttaggcaaccatccgtagccatacatgtaggattaaattccaacgaaaatcctaaagcaaatgacttaattacttttttcataatgcttatttactttcatttttagaaaaaaactaaagtaacggtcttcatagaaaccataggttaaaataaaataaaataaaaggtttttaggttccaactttactttttaccacacaccaatcatttcaacttttgacaattgcgtcaaatacatatccccaacggtaaactttactctctgccttacattattgtcatccacttgttgcaaagttccacattacaagaatcattcgattctcttctatcatcatcttcttcttctccatcaaaattcaccaaaacatg

SEQ ID NO: 24906 - DNA, 3003 bp, Unknown; identical to SEQ ID NO: 24905
  misc_feature (1)..( 3003): 2750-1469P.txt file - cDNA_ID_2686520; gDNA_ID_2213668; Annot_ID_182163

SEQ ID NO: 24907 - DNA, 3003 bp, Unknown
  misc_feature (1)..( 3003): 2750-1469P.txt file - cDNA_ID_2686544; gDNA_ID_2214701; Annot_ID_136867
ccttgcaatcctctctacgcaacttcgctcaatgtcttttgaaccatgagcagcaaactctgcaagatcaatcgtcttgcatatatgtatatatttgttcgtgtgtgtctctgtacatgtcatgtgttattgcttctatattaatggatctggactttggtgtggttgttgatttgtaactgttgaataaaatctttctatggaacactaatttcttcttgttccatagatgataagtattcttgttctatattgtattttggtggctacagtctacaattctacgcattagaaagatttaatacatatcaggtgcataatgagtctccatttatcttatttgaattacagaattgttgctgaatttaatcctagcttatatactttagatagtagatttgagtgactaataaccagggtttgttatatattatccttcaaactaaatcatacttaacatgagtttctttttttcttcatttaaaattttgtcaattggtggttttgcattgaacttcttgctttaggtctgaagcttcatactgttttaatctgcataaattgcgacagatatttcaaattaggagtatgaaaatgtaaaaaaggtcttcaagatttttttttaccatagacttttttattttttcatgataacattaatatgaccttctttttttttaacatcaacataaatataccttgtcaccacaatattcttagtttcttttcaaaaataaaaatcgtaatttttctattattacatcatattttgttaattttttaaaaaacaccacatgcatattactgtagcttcacatattggagatttggttttgtatcacgacaatggttttgttgtttgagtatcagtttagataatgcatgtcaattggttcaccccacaaaaaggcagttgttcattatgtcattttcaagctacacaagtagatcatcagactctcaaccatcagcaaagcagagcaaccatgataattttaactcaatagtcacatttggattgcaagcatgggtggatgtatgttaggagtatgtgggacacgtgccccacattgattataatgttttgcgagtattagagtttacaatggctacttagcatctttggtcgtaatgtagtaaagtattaccattcccatgtttagatccctttgatgttgcaatgttttctttatgtgtttattagttatccaaataacattattctaatttcttttttggttggtctttcttataaaaatgtcaattctaagttttgttatcattattttgtattttactaatcaaaaaaatataatattgaaacaatatatatatatatatatatatatttgaaataaaacatatattttttttgtgccccatacaaaatacatgtttagatttgtcactgattctaagaacttattttgtagaaaagtaattttcttaatattctatgaatctttcgaatatgttatgcatttacgttggaactgttaggtttctcataaaacattgtaaaactaaaatataataaggggtgtgtggaattttggctcaaaaagattgtatactttgccagatttattgattttgagactatgttgtgcagcatgtgcacaaaatttgttgattttggtaatagtgacaatatagatccaaagatgatttttaaaaaaattaagtgaatatatagttcatttttatcgtaaataattggttaaattataaaattaaaatattgtataaagagaaattaaagcgattgtaccattgtagcaaccacaaccagcatatatgtttgctcaagatttttaagttgttttatacacgattcaagcatatgatcttaatatcaaaaaggatatattaagtttaatcggctttccattttagttggtagcaattgtaaaaatttaatattatatccttatttattaaatattattattacctaaccttttttgattaacaataatcataaaaaagctgaccatctcaatttgaagataaacaaatagatttaaagaagtgatcaaatcatgtattggtaatgtctaacatgttcttaccacatcttaattcacagataaacatatacatatacattgaatatgtttttatataacacatggttcaagggaacaaaggtgggataaatcctatcatattttctattcttgacttaccttcataagtatctaggttataagtttaaattttctttataaaaaataacaatataaaaagaaacagttaaatttgaaatttactactttttaacaaaaattattcatccatctgtcattcaagtatcaatatagaaaataaacaaattcatgttgtcagccatactgcatgaacatgaatttcttttatctttttactttttttcgtaaaccctcaaaataacatcagtaaaaatggatagcaacataacagataaataaaaaccaaaaacaaaaacaaatccagggtaagttaatatgaaacaaatgcattagatcaaaaacttatttattagtgtagcaacttaaacagaaataataagtctcaaagttaattttttttttaataccaaaaattatatcttttatattttgaatgaccacgaatatctttttcacttgatcgataaaattacatcatacagtacatcttttctaaattaaaacaaatctaaaacatggttaacaaaacaaacgggttaaatgtgaataaacaaaaagtatcgggtgcaaaacataaaaagacaaaaataaaagactgagtccaaaattccaaaaagtcaaagccaccttcctaacttgtctgcatagacgaagaagacaaagaagaagagattcgatcacacaagaaaaattacaattcttcttaatcctcattattatatatataaataaacttcaatctaagcttcttcgtaatttctctttcgttcaatgttattcttttagatctcgaacaaaacaaaatctccagaagaaaaaaccaaattccatg

SEQ ID NO: 24908 - DNA, 3000 bp, Unknown; identical to SEQ ID NO: 10082
  misc_feature (1)..( 3000): 2750-1469P.txt file - cDNA_ID_2686576; gDNA_ID_2213624; Annot_ID_195776

SEQ ID NO: 24909 - DNA, 3000 bp, Unknown; identical to SEQ ID NO: 10082
  misc_feature (1)..( 3000): 2750-1469P.txt file - cDNA_ID_2686576; gDNA_ID_2213624; Annot_ID_132007

SEQ ID NO: 24910 - DNA, 3003 bp, Unknown
  misc_feature (1)..( 3003): 2750-1469P.txt file - cDNA_ID_2686579; gDNA_ID_2684216; Annot_ID_191679
acttgtacgtgagataagtgatgattcatttttcttagttgagataaactgattttattatgttcatacagtgtgtggaagaggacagtgatacggtctcgtgactctcgtatcgtcttgttcgttcgtgtgagttcgtcggtgccggctttgttggggaccttctgtctcttacggcagcttttcatatctctttgtctgttgttgtatgtttgatttagctttgaccgctttatcttcattttttgtcctctcacctacacacgtatgcctccaaagtccaaacctttttatagatttcactaaaaaatcggactaaagagaagctagagcaaacaaattaaagcttcatctacatagtacttctgcttagaaattggcttagattatctgaatatatgacagtttttacagattatgatctagttcatgatatatttcagcaaattggtatgataagcatagtttttttttttcattcttagaaagtgtacatgtaatgaatgggcttatatcttcctgccgacaacttggcaaactcgtgctagcttaaaattaaagaagacgacgaagaaggccaaaggtatattaatgaatccaaaactagccagattctcttaaatctctctttttccaaaaatattcaacaaaaataccaaaagtagtcaaaaaccaacgatttctattcgaaataatgatttatatacttgtttcaagatttctttcctccaagaacgcaaacataatttcaatatactattcatcataatgtggggctgtatatggaccatatacagtacgactctagtctaacaaataaagcatttttccacataaaaaccactgatttaaaattcggttatgaattaaaaacataacgtaacccattataaaaaatgattgctagtttcagaaataagtaaaacggtggtaattttttctagtatataggctcatagcaattgttttagtagcattaaggtagaagacatgcatatatattgtgatttatttaacacacaaaaaacaatttatgtactaatttcttaggcatggctaattttaactcaaagcatatatgttacagactgattcatatttttgagtatgatgcattaaagaggatcgatatatacacacacacacaaaggaatatatttaataaagtgcttcaaccaaatatatatatacaaggaaagtcattcgataaacctctactatactcaaagtgcataaattcttttatatgcaaccacacgaatttttttttttttttttttttttacatcttgtgcaactaaatgattacaaatttgacataagcaatacatctatgacttctttttccccgttaattatcatagtttctaaaaagacaagatgaaactaaagaggaaataggtgataaaatgattgcggtatattatatacttgaagtcatcatacttgtacatatgtataattcataatacgaatgtaaacatgtatattagacgggtaattaaaaataagggataactaataattatttatatgactcatatcatttatataattatttatataagcatatcatttgatccacttttaaaatttgtaaacttggagaaaaaaatcagcccgcgaaaaacttttcaattggcttaatttaagtttcgtaaacaaaatcagttgccaaaaaagttgtctgtagattatcaactagttttgttttagcgattaaaaacaatagatatcgatttatcttcatagcatggatttgaacactaaattaccacgcataatgtaaaagatggcaaacaatatgattggatatatggcgtgtggactttgtaaagggaaaataataaatgaaaacgaagaacagaataacgaagttggctttgggtcagtttattactcgtacatgcatttcaaagctaataaaaaaacgatgtgaatgtctatttgtgattcattttcaaaattggatacttaattggtatagggatataaggttttattgttagtgaaaaactaaaatattatctaattattcataggttagaagttgctttatcgtcttattgatcaactcgatttttaattgatggtggaagatgttgccaattgatttgaaatatcaaaatataacaatcaaagaaaatgctttatttatttattaataggcacatgatccaaaggcacattgggactaccgttaccatatatacttggcttagaagggaaaaagaataaaagaagaagacttactatttttggatatttcttcacttaggggatttagctccaatccaaactctttactaaacaagggccgttgcttattcatgaatttcaatcgttggaacttggaatatgagacttgttcaaacaacagtaagtggaagaataggcccatgtacggtccttattaaaaaatcaattatacgatttagggtccacataagcccatgcttaatccccaagctaagcatgaagagagattagaacttataatgacactgtaaacaaagtgtttttttttttcttccaaaaaagtgaaaaacctagttccatatctatataaaccaacgaaaacatgtagatccgtatcaatattaagtcttcacgtgaataccttttgtatttctattaccagatcattagcagttaacatttagtcgtatttattatagacttgaaacttaaaaagttgtgatcaaaagtcagaacattaccgtgtttaaaaggaagattggtaagattggtttgtagataaacttatgaaaatatgggcctaagcccataggttgtggaaaacagtaatacgacccagttcggaatcaacgaacctactttgacaattctcacgcgccaccgtcagcgaccacgtactgtgattggcttacactccccaccgtcaactttgatgattcacatcccaaattatttttcagttacgaattagactcaaagaaagaaaaaatcagatttttgttttgtttttaatcgggaaagatg

SEQ ID NO: 24911 - DNA, 3003 bp, Unknown; identical to SEQ ID NO: 24910
  misc_feature (1)..( 3003): 2750-1469P.txt file - cDNA_ID_2686579; gDNA_ID_2684216; Annot_ID_137400

SEQ ID NO: 24912 - DNA, 3003 bp, Unknown
  misc_feature (1)..( 3003): 2750-1469P.txt file - cDNA_ID_2686597; gDNA_ID_1971923; Annot_ID_58545
taattttaaggtttgcaaataatgttataaatatattgatgtatgttaaaaaatttatcacttaattttagacataatttaaaatcttaacacttatttcttttatttaaaaacatttatatatcaatatctaaactgtaaagtttttttttgtttttaacttaaatttagataaacagttttattttcttacataatatttttgtttttaaaaaaaagttgtaagtatttttgtttaaatgtgtaaaaagaattgaatgataacagattctttactcacagaacaagagatattaaattttctttatgtttatagtatttaataaagtttatagtatttatttccatatatacatttgtttctgtaagaactatccatttgatactagaataaatttcttcatttggattagattgttcagtacaaaactctatttctggcatgtcaataaataacaaatgctaattttggctcttaatcttgttgatagaatactaaacttgcaatgctttttacactaatctttatctctttatatatttatttttaaaaactcttctttcctttttttctgatttaaagtacaaaaaaaaaacaatacatctttccattgaactagaagaaaacattttcactgtccttttgaatcagaagaagaaagagaaaaaaaagagatggagagaaacacgccggtgagaaaccctcacacttccaccgccgatctgctttcttggtcggaaactcctcctcctcctcaccactcaaccccttccgccgctcgttctcaccaggtccgtttcttcaacaaatgttctcactttctctttctatagagagaagctgaggttttttcttctttcttctttcattttcagccgtccgatggaatcagcaagattctaggcggtggtcagatcacagatgaagaagcccagtcgcttaataagctgtaaaagattcatttaatctctatctctcattgcattaccagatctaataagtatacctggatttgttttttgtattacaactgaaacttaaagtttaaagctttgatcttgtgattcaccaaaatggtttctttgaatgatgaagtcacttctttttcttagtgataaatttttatgaaagggattggtcaaatgctttttggcttttctgagaagttttagtgttaatagtattttattacattctttgttcatcaaagccccacaccatttacatgtcaaactactactgttcattatctaatgaggagatctttgtcttctttgttatttttgattgtttcattaagtgacttcatcattacatgtaaaggtctttaccggtctctaatatggcgctttttggtacagaaagaattgttcagggtacaagttaaaagagatgactggtagtggcatatttactgataagggaaaagttggatctgaatccgatgctactactgatccaaagactggactccgttactatcaggtagcttacttgtgtcttgtcttatgtttcaacagatttagacaagtgtaaattgaaacgattgttatgtgaattttgcagcagactctgaatggaatgagtcagatatctttcagtgctgacggtaatgtttccccgaagaaaccaaccactttaaccgaggttgcaaagcaaagagagctgagcgggaacttgctaaccgaggcggatttaaagagcaacaagcagatatcaagtgctaagattgaagagatcagcggtcatgacatctttgcacctccatctgagattcagcctcgatctttggttgctgcacagcaagaagctagaggtaacagagacatgggagagcctgcaccaaggaacttacgcacttctgttaaagtttccaacgtaagtcttgccattgcttttgctttgagaggaaactcaaacttagtgcccaaccaaatcagtaaattttctcttctattccaacagcctgcaggaggacaaagcaacatactattcagtgaagaacctgttgtgaagacatcaaagaagatacataaccagaagtttcaggaactcacaggcaacggcattttcaaaggcgatgaatcacctggtagtgcggataagcagttaagctcagctaaactccgtgaaatgagcggaaacaacattttcgcagacggaaagtcagagtcccgagactactttggcggcgtgaggaaacctcccggaggtgaaagcagcatttcattggtctaataagtaagactcggggctgtatggtattatccgcgcatatgctcaactctcacatttcagcttctttagaatttagtttcttagagtctgaagagagctcattgtacggatcctttaaaaccttttggtgttgtctctaatacttgaagtttcttaactgtttctgcatttctcctactcttcacttaaaaaacaagtatggtttcaatacatcatcgttttcgtgttgaaaagagaaacgactccactggggatcgaacccagaatctctggtttcgtagaccagcgccttatccattgggccatggagtcttatttgactaagaatttctacaaaaggtatttatattaaacaactggtttaaaagggtgaagtatacatctctcatcatagctcgtcgccttctcttaccgaatatgatcgtctttttagttaagctgtctcaaaaacactcggcataaaattcagctctttaagaaaaaaattcagaggaaaattaaaaaaagtggatataatagagaaaaaggtaaaggaaaggaatagtgagagagagagagggagagatggtcttcttgtttagaacatgttgtttccaattattctaagaatggcgttttaggtaaatgatcacagcttattacagatggaagagaagctgactcaatttgtggtttagatttgtcaaagaggatcgtgtggaatctgaaagttttcaattttcactaaaaataggattagagttaaaaaggaggaagaagaaatg

SEQ ID NO: 24913 - DNA, 3003 bp, Unknown; identical to SEQ ID NO: 24912
  misc_feature (1)..( 3003): 2750-1469P.txt file - cDNA_ID_2686597; gDNA_ID_2926219; Annot_ID_142357

SEQ ID NO: 24914 - DNA, 3000 bp, Unknown; identical to SEQ ID NO: 11831
  misc_feature (1)..( 3000): 2750-1469P.txt file - cDNA_ID_2686605; gDNA_ID_2214518; Annot_ID_134012

SEQ ID NO: 24915 - DNA, 3003 bp, Unknown
  misc_feature (1)..( 3003): 2750-1469P.txt file - cDNA_ID_2686636; gDNA_ID_1620781; Annot_ID_50355
caaaacaagtgaatattgtaccagcattggtaagggcatgaaggagattagctttctgtttgagcttgagaccagcttcgaagtaatcgtgttggtcaagctcggactcagcgcacgtaccgtgtttctcccactcatgtgtccaaaacttcataccatcattgctcggacacgacaacgttggccattctctttgtaaatcgctcatcagatcagaaacctttataaaagttttcgattctcattagttatttacgattcttttcttgtggttaataatttccgaagtcccaaaatacaaaaactattgtgttataagttaaaaacaaacccgtaaatcatcaaatcgactgtcaggattacaattttgcggccatccaccggttttgtagttaggccaaagaccgtgaattccaaaatctgcagctggtttaccggtttgtggatagcaacaactatgtcttgaatcacaatacgctccaggccactgcattgcaacgcacatacacaaacataaaatttcaaagtacaatgataattcttgtagagacatttatcgactttaattacctgtaaaacgaagtagaagaaatcgaaatcttgggcgaaactttgtacgtagagttgttgtaacgctagaataaaaatgaagaatttcatttcctcaagatatcaaataatttgtgggaatcaaatttgtcgaaaaccaatgaaggatggatgatagataaatagtttagaatatgtttatataagtcatataacgtgaagtgtgatattttgttttgggtagagagacgtgacgtgtgattggtatatgtttgcttaattgtgttaggttagtatttcgtgcaagcattttattttcagctccaatgctttaaaaagtaataacgtaaggcaaacttttcatcatgcttcaactacaaaattatgagtattttgtagctccaattaacgtaacgtaaggcaaactttccagctccaatgttttagagctagccgaatattatgtgtctcagtatttataaaattatgagtattcgattggaaaaataaataaagaaactcttatagtattcacttaaagacctttgtttcttaaattttaaatatttaaatccacttaaagatccttgtttctcataaagtgttaaagacccataaaggcataaatcaaaccattgtcccgtctcggaaacgtacgtcaagtttcttgatgaggcgcatgttggctacttggttctacttctacagttacagactccagtgtgtaccgtattctatcaagttctgcatttatgcaagaaccttaggtatcacaaatatttgggggcaataaaattataaaaattccttacagtgcagcgatttatgtcacattttcagccaagaggttgtgtgttcgagttccctcaactacttctgctaatttttttattaaaaaaaaaaaactttagaccgcccataactttgagccggcaatgatcctacctcacaatcatactaaaatctaccaatgatccttaccatgttttggcgcttgaggtggatacgaataatccactagttgggttaaccttatagggaaggtgaagattgttataaagtttgtagattatacaatgaaaagtaagaagataggtccaagtcaaagtttgtatgattaaaacaagaaagatggtatataccatgcgttgctttccagaaaatggcttcaagaaagcaaagacaaagaatatcatcatgagcttgaccagggataaggaagaagatccattgacgtgtttacaacgacaaaaactagttagaagttagaacatagtgtcgctgaagttgtggaggaaatgcattttttaaacagatgcatagagacgattgaatatggcatcgaaacagtgaatgcaagcaacaaaggttggtaaactggtgaagagaaaggtaacagacgatataactttttttgtgaatgaattaaaagggatttttttttttcgtcaagaagctgaaatttcattaaaccgaaacttaaaccgatacataagttggtacaataagtgcataatttaatgcagattttgcatatgcatatgcacaaccgtttttttctctaaaaatgaagtgaaaagaaatttgatcgaaattaaacgaaagagcaagaacatcttggaaaatcacgtagagattctttgggaaggattctgagttgatagctttgatcagcgtttgcaaatctgaagcgaaggtgacttcctaaaaccgagttctaaggcattttgttgggctagatgaagcgccatggcttctgccaaaagaggagaagcaacattcgccactctaagggattcaaagcctctttatgaaatagaagttgacatatttttagttcaattaaatgaaatgaccgacgtgccaatttgtcatatccacataagtataaaagctaactaaacctccaatgtcaaaaaaaaaaaaataactggcttcgactagggatcgatccttggacttcgatatttcacaattctttgtaaccaatataccaaaggacgagaatgtgacaaccgcgactttaatttaataaatacgttatagtttggaaaccaccagcagagacggagagtccacttttatttcttccgctccgtttggtctgtcctcttcttcttctccaccttcgaaatctatcttctccgatacctctctatctatatctcttcgacgctgcaaattagccttaagcttctttctcctttaaacttttcgattattattccatttcctatctttttgtttcccccaaatcttttcacggaagcaaagaatacaattccaaaccctaatcccgatcatccgtctttcctctccggtcagtcttccgatttcctcgatccacctgattttcattatgattatacatatatactttcttctcgctcgtcaattttttcgttgctgtgtgaatttagattgatttgttttggattcaggtttcaaaatatg

SEQ ID NO: 24916 - DNA, 3003 bp, Unknown; identical to SEQ ID NO: 24915
  misc_feature (1)..( 3003): 2750-1469P.txt file - cDNA_ID_2686636; gDNA_ID_2684095; Annot_ID_190085

SEQ ID NO: 24917 - DNA, 3003 bp, Unknown; identical to SEQ ID NO: 24915
  misc_feature (1)..( 3003): 2750-1469P.txt file - cDNA_ID_2686636; gDNA_ID_1620781; Annot_ID_167938

SEQ ID NO: 24918 - DNA, 3003 bp, Unknown
  misc_feature (1)..( 3003): 2750-1469P.txt file - cDNA_ID_2686679; gDNA_ID_2684220; Annot_ID_137438
tatttattcataaggaagagcatttcgaattctgtagttcaaaattgaagatcatgtcggcgtcaacggtgtcaatcaccgctagtcctaggacaataaggcggacgccggttctctccggtgagaagaaatctaattttgatttcccgccgagcgaatctcatgccaatgcggcaattggagagtcgtctgctggtacgaacaaggatctgattcgcgccgaggctgccggtgagagatccaacacctacgacgtaggtccggtgacaaggaaatcaggatccaccgcgacggggactaatacaaccaccacgcagcgtcggacgcggaagtctcaggggaataagatagatagagggaaatggaagacagtggttagggtattcgcgaagcaatttggggctcttttgttacttgttggattgattcagttgattaggaaattgactttgaaggattcgtctctgtcttcttcgaatttcccaattgaaacggaaatggtgctttcggaattggagagtcggatttctgcagttgatggtttggtgaagactacgacgaagatgatgcaggttcaagttgagtttcttgataagaagatggatagtgaatcaagagcattgaggcagacgatagattccacatcttctgtgttacatagtgagttgaagaaggtagagtctaagacagagaggttacaggtttctgtagatgagttaaatgctaaacctttggtgtctagagaggagttagagagagtttacgaggagttgaagaagggtaaggtcggtgattctgatgttaacattgataaactgagggcttatgctcgtgacatagtggagaaagagatagggaaacatgttgcagatggccttggtcgagtagattatgcgttagcgtctggtggagcttttgtaatggggcattcggatccgtttcttgttggaaatgggcgtaattggtttgggacaagcaggagacgggttcatagcaaagcggttaagatgttaactccgagtttcggggagcctggacagtgttttcctctgaaaggaagcaatggatatgttctagtcaggctaagagcaccaataattccagaagctgttactttggaacatgtctctaaggtagtactaacatctcaatactaaactttcacaaaatgattgatttttatatgttaatttgagccttcaagaagggttctctgttaaatgttgttggtattgagatgccctgtacttcggattggattgctggtgacaataggttatcgaatagagggcaagaaactagttttgtgaatttgagttcttatagtttgaggtttagtttaggcactagctgtgacaatatgcattgaggaggattttacctattgttattttctgcaaatcactagctttagcagttcctttgtctaatatcaatgccactgtgttgttgtgctttgtttgggacatcgttgacagagaaaagaaccgtatgtatgggaagagcttgtaagtttacaattagtggaactgtaatattcactgtttacggatatccttaggaaacagtagctgaagggaaatagtctcaagagtgtgtaatgtgatggtcacacattgctttccatcattgttcatccttgtgatcatttgtctgataaatttcttcttgtctgaccactaaaaggcaatactaatcttacggttatgttatgcaccatttaatcgaacaggctgtagcatatgacagatcgagcgccccaaaggattgccgtgtatcaggatggctaggtgacatagatatggagactgagacaatgccccttcttacagaattcagttacgacttagacaggtccaatgcacagacattcgacattgcagactctgctcactcaggacttgtcaacactgtcaggctagacttcaattccaaccatggaagctcttcacacacttgcatctaccgcttcagggttcatggccgtgaactagactcagtctctgttgctcatgcttgatctgaaagtccacgtcaaacttttcttctctttgtaacattccctctaatagatatctctcttctttttttgtgttagtttatgtggtgggaaagcttctcttagtctgtaatcagaatcatttggttgtattcgtgattattagcttcaaatctgttttggttcggtttatttggtcagggtatgtatcctccgaattgaataatatagatcttagtttgatgtccggttttggttttgtaacagagtttcaatttaagctttcacctaaaacaaatcatacaaattctaatagagtatacatatttcattagttgaaacaaatattgaatttggattattaatggttaccttgggtacttggtattacaacgatatgtgatgaataggaagagtgtgtatatagatggaccataacttgttagtgtgaattgcgtaatcgacaaagtgacgacttcttcttctaggctgcaccgtcttgccttgtctaaaagcttcccaacacatcacatgcaaaatctacggtcaaataatagatatgaaaccctcttccaagtcaacacagcttgtttgattataaattaaattaaatacaaattcatctttgacatgtctgattaatgttaattttttacagtgtcaactggcataacaaattgagctaaacaaaattaagctctaaaaatagccattttttacggttaaatcacatgaagaaacctttcctaaccaagtcaacccatgtttggtcgtcgtgacggtggaccaccggctccaaaaaaactcttcatttgaccaaaacgagtataacccttaattattagaccaacatgcattacataaatgataaattcagtttccctcgagcccatgcattcattaaatagcagaaagctcctcgtatagtctatatatatagcagattttagatccaaaataacaaacaccatcaatacacaaacaaaacaaaaaggatgaaaatg

SEQ ID NO: 24919 - DNA, 3000 bp, Unknown; identical to SEQ ID NO: 3778
  misc_feature (1)..( 3000): 2750-1469P.txt file - cDNA_ID_2686789; gDNA_ID_1620664; Annot_ID_48018

SEQ ID NO: 24920 - DNA, 3000 bp, Unknown; identical to SEQ ID NO: 3778
  misc_feature (1)..( 3000): 2750-1469P.txt file - cDNA_ID_2686789; gDNA_ID_2926203; Annot_ID_141606

SEQ ID NO: 24921 - DNA, 3003 bp, Unknown
  misc_feature (1)..( 3003): 2750-1469P.txt file - cDNA_ID_2686834; gDNA_ID_2213626; Annot_ID_195876
gaatttctcgatggttgaagatggaatttatcgatctgggtttcctcgacctgagaatttcagtttccttaaaaccctaaatcttcgttccatcatgtaagatcctttattaatcttctgggttattcaattatactgtttgataattgattatgattggagtaattaatcgtttttttattcatcaaaacagttatctgtgtcctgaaccatacccagaggagaatctcaagtttcttgaggctaacaacattaagctttaccaatttggaatcgaaggcaaaacggtgcgttttgcttctttcttgttgcttgttgtcaaagaaatgcaattgtccttgatgtcttatctcggatcttttacgatatgcaggatcctccaactcctatgccaaaagatacagttttggatgctctcaaagttttagttggtaaggaatcaacactcaataatgttttttggtctcttcttagctagttcatgagtcttaaagtagatcttttgtttctctgtagatgtgagaaaccatccaattctcatacattgcaaacgcgggaaggtaatttacagtttcttcttcctcttctaggaacttagcctatgttattatttattacaggacactcatggtggtcttggcttgtcttatttagttatgcacagtacacaatctttttgtggtcctttaggaaataggcagttatttacaggacactcatgatttggtgtttttggtgaacttgcagcataggacaggttgtctagtgggatgcttaagaaaagttcagagctggtgtttatcatcggtgctcgaggagtaccagaagaacgcgggtttaaaatggagacaaagggacttgaattttatagaggcatttgatatagtgagcttgagacagtgtctcttgagcatcatgtatcagtatcacggttatggcttcaagaggagaaggttggcatatgaagaagagaatgtcaagacaccaaaaccgcaggctgctagagtttaaaaagagagcaaccaagtggcatatgttccgtgttctgatttgagtttaatcggtgcctggattattctttaagtgggataagttttagtttaccccaaaagccgtaaccagaagttttattgtgttttttagaaatagaaatgtatagaaagtttattcttcattacaatctgatgcaggggaggtcatttttaactcaatgactcattcatgcttatgttgctttattttattttattggtcaaactcctaaagttagcttaatcttgttgtttaaacttcaaagtctctttggaataaccattagcaataatataagtggtacagcaataataccatgttttaaattcttgtaaagagttcttcgataatctaatcatttataaagagttcttaaataatcaaaccagtagaaattagatcaaaattagcaagaacttgcagtacaattttcaaatcaaaagaaaaaaaaaactgatttatgtccagaaaacctctctagccaatcaaactgaattttaaaagataacattcggtagtatactttcggtatgaaatcaattattaaaacagagaaaacagaggaggttaagagtatcgagtcagcttctaatatataccatgtgcactgcagtacaaggtatatgactaatctagcacatgtgttaggaaaaatatgttttcaaagataattaaagaaatacaagttgattagcagcattcttttactaaaacagccatattatattcatctattatatatttagctttttgatttccattctcagaatgaaaaagtgtgcagctataattgacattgtctatgtaactatgtaacacataattgacaaagaataagcaaaaccgggaaaattctatcgtaatttttctgaccagaactaaaccgagaaaaatccataaccgaaccaaatcttacctaagaatcatcattcatcacccacgtatcggataaaaactcacctcctacctagaaatcatcacccaagtatcggataaaaactcaagatcaagaacgcaaatcagattgacaattacgcaatcttctagttatagctaagaaaattccatgtcattttcagaaaacaagatgtccgtgcatacgtactttgcaaatcatccggacctaaggtttccgctgtttatgttcgaacagaaacagagtacttcatttcaaacaataagaactaatcttgatgatctaaaacttgtctgaaaaaagaaatagaggttgttgatttaacatgactacaaagctatttaagattcgctaaaccagatgacatcaacaacatgatagattttggggtaagaagtagcacattacactctttaacatcaaaagataacaaattttataaaattcaaacatagagttacttcttcaagcttcccctgataccaggtttaggtttcgattcagctactggtgctaaaacagcatggagattcacgagctttgattcctcataaatgatattaggatgcttcgattcgtgatggatctgcatcgtcttaagacctggagccgtaattttgcaatgaggacactcgtacttagcgtggcctcctttctcttttccggtccgatcagcgattccagcttttcctccgcctcgattagtcaacgcagcatcgatcttcgcttgaatctccttcgctgtatgcttctttggcttggccttaccagtcatcttcaatggcggctaaaagggatgaatttgccaggaagggagaagccctaaccctaaccctaatttgtgctctactcttctgatttaggacgcgagagccgatatgaatatatatactaattttatttttaaaaatggaaataatcttatctgattttgttttttggggtgttatagtgtgtggagaggtgcatggtaatgactgtggacctaaataaaataaaacgcagtaggcagaaacgcatcagtcatcaccacatgcgacacaccaacaccaatg

SEQ ID NO: 24922 - DNA, 3003 bp, Unknown; identical to SEQ ID NO: 24921
  misc_feature (1)..( 3003): 2750-1469P.txt file - cDNA_ID_2686834; gDNA_ID_2213626; Annot_ID_132061

SEQ ID NO: 24923 - DNA, 3000 bp, Unknown; identical to SEQ ID NO: 14657
  misc_feature (1)..( 3000): 2750-1469P.txt file - cDNA_ID_2686856; gDNA_ID_2684211; Annot_ID_191511

SEQ ID NO: 24924 - DNA, 3000 bp, Unknown; identical to SEQ ID NO: 14657
  misc_feature (1)..( 3000): 2750-1469P.txt file - cDNA_ID_2686856; gDNA_ID_2684211; Annot_ID_137337

SEQ ID NO: 24925 - DNA, 3003 bp, Unknown
  misc_feature (1)..( 3003): 2750-1469P.txt file - cDNA_ID_2686861; gDNA_ID_2684103; Annot_ID_137091
ttcagtgaggagaaaaacgctttctcaattatgaactctgcatctttgtcactgattcttctcacctgatctgttgcagatatttggtcaaagagtttattaaaagataacataatataaagtgaaaaagcaatgctgctttctctcattggttgtgcatagagcaaggacagagaaaaacaggttcgtacgtaagaaacacacattaactgtgttctgcttcctttgtattctctcacttttctcttttttcagaattcaatctctggaaattttcttcctaaagattaaagagaaccgtttggaccagatcagcttgcctcttggtaatggtctctcttctctttgttcccaatttctgtagctttcttctttctccctaactcgtctgctctctttgtctcttcctctcacagttcatacgtcttccatggcttccggtgatgttcttcctagattcttcactgtcttcctctcccattgcagctccgaatccatggtgagatttttctctggaatatttcatggaaaaagctgcttgggttgatatgtttcttggatacagtaacgatgtgaatgagatctgcaacattatcttaattcttaactctatatgtttaaatctcttgacactgacaaaagttttaactttcttcactaatgagctcaggattatctctgtttgtgttacttatgtttgaatatgatagagtatgtcaaactaaacactgaatttcctcaaagagttttctcctttgttgaaaaaattgaacaagaggtcttggtcttgttgtttgtctgtttacctccgcttgcagacagagtctttagcttatattttgctcacttttaacagtttagtttatgctacatctttgtgttgagcaggtgataccaaggtcttactacaatcttttaccacgtccgttgcccaagactgcgattctcatcggaactggtggaagattttggaaagtagcaatgacgagcaagcaagagcaagtgtattttgaacaaggctggggaaatttcgttgctgataaccagttaaaagagggagaattcttaacttttgtgtttgatgggcacaaaagttatgaagtaagtatctatggtcgtggagattgcaaagagactcgagcagtcattcaagttgaagagatctctgatgatacagaagatgacaacgtttctcttcatagccctagcaatgtttcacttgatagccttagcaacgattctcatcatagcactagcaacgtttctcttcgaagccttagcaacgattctcttcatggtgatgctgagatagagagcgacagtgagtattctcccgagaacctaccctcagcctctatatctgttgaatccgttgaggtggtgaatccaacaacaagcaggcagagaagttgtaagtaaacattgttcttttaactgatgcttataaccgaagctgtttagaatttgatctcaaatgggaattttgcagacaagaggaagaccattgagaatccacatctgtatttggatgatccaaacaatgtctgttttgagacgtgtcttaagcttagaaagtttgagctggtaagacttcattagatattattatctcgtctcattaaaaatcctttcacgagttgatgattatttttctaactaaagctctatatacattatgcacagttagttcatgcacagttggtgaaagactacggcttgatattcagcgacaatgttgactatattgacggatatggaaaactaaccgcgaaaacgaccaagtgggcagatcaacgggtttgcataaacaaatggcagaaaatatgcgagagaaaccagttcacagagaatgactccatcctatgtgaaattctccgcaacgaggacaaagtggtttatgcaatcaagattcacatcttccgcgatgcagcagcaagcacttgattctctgatgcagttctgcaattgtgtttcttctctttcgagtctagtcttttgtagtaaactattagaatgtctaatttcaaaacatgtttaagacttttgagttctcttgtagactttgaagtaaacacaatgaggagcaggcttaagcttacccgttaatcactctgtttctcttacaagttacaatcatgtaaaatgggttagaatgatcgttttaatatgttaggtacagatttcgtaatttctcgaaaatgtgatatctcttcttcacaacagaagaacagattattgtgaaagtcaaaacaaaaaaaaatctctgaaacaatggcgtgttgcttagcttcgtgctgtgcgtcggcgacttgtggattatgctcgtcggtagcatcggggatatcgaggaaatcagcgaggatcgcttattgtggtctcttcggtgcctctcttgtcgtctcctggattcttcgtgagactggtgctccgctcctcgagaaactcccttgtacgattctctcatccttttctgaactgggtttgtgaaaaaggaggttccttttagccgagattgatgattggaattgaaagagaccatcaaatttcgaaattgggttttctttgatcttgtcaattggaattgaatccggtggttaacgatagatttgggtgatgtcttgtgcttgaatcttactaagcgtttaagtatgaatcttaatttgtattggttcagtggaaatttggttgctttgtagctgcaacagattgataattgtgtactagaactttagaaatctcaatctgtgttgatttggatgtttttcaactttcaattgcgtttgtttatgctttgtgttaacctgcttgatctaagagagaattttgagtgttgcaaaaggaaacttcatcgcctattgatacaaatctccggttttggatgttgtttgacaaacagggatcaatacttctgattcatataccaaagaatggtatcagcaacaagctgttcttcgtgtgagctttgggaatttcctcttctttgcaatatatgctttgatcatg

SEQ ID NO: 24926 - DNA, 3003 bp, Unknown
  misc_feature (1)..( 3003): 2750-1469P.txt file - cDNA_ID_2686869; gDNA_ID_2214671; Annot_ID_136615
ttttcatctatttttcttaatttttataatattatttaggtttaaaattcgtaatacaaatattaatacatataatttggcacgaaaaattcgtgcagaaccgctacataccacatatgtaaacaatttttttcaagattggttcatctgagtcataaataatatttaatgacaaaaaaaacaatattttaaagtatttgatttgttgttgaattatttagattattaagatttgttttgtattttaaggagaaaattgaaaagatatggaagttgtaaaaatttgcattgaccatttgaccaatctgggtcaacaacaaacgaagaaacaaattaaaaaaacacaccagcttatctattgttagttttttttttttctgttttcaggtgttttcttaaatcacaagctacaaaccctatatttatcttctgcaacaagtcagcatcgaactctcagatcatttatcaattcatcttcttaatttacttgaccctttctctttacacgataatggcgagagataaagaagatcaaaacaatgagaatccttcaattgtccagaacatgtcatttccattcaacaccattttcttgatctcaagcgcaatcttcctcgtcacagccgctttctggttcgtagccgtcatgacattacattacaggaccgatgaatgtaaccggttcgtcacaactcccggaatattcataagcttctcattgcttgctatgtccctcactggattctacgcagcttacttcaaatccgattgtctctttcgaatccacttctttatcttcttcttgtggatgttcgttgtcgtgtctaaagcaatctttgtcatctttctacataaggagaccaatcctagattgtttcctgggaccaagatttatgagtttaggtacgaggattactcaggatgggttagtagattggtcatcaaagacgatgaatggtatcgtacaaggagatgtcttgttaaggacaatgtttgtaacaggctaaaccataagatgccagcttctgagttttatcagatgaatctaactcctatacaggtaatataacctaagctacacattaactaaatcaaaccgaatctagttttgattccggtttaatgtttttttttatttcattctaattttgtttctttttttatgacagtcgggttgttgcaaaccaccactttcatgtggattgaattacgagaaaccaaataattggacagtttcaagatattataacaatttagaagttgattgcaagagatggaacaattctgcagatacattatgcttcgattgtgattcatgtaaagctgtgattattgctgatgtacataatacttcattttccataacagttaacattattcatatcatctttagtctttgtatcggcatgaccggttggtttgcctggttaaggatccttcgagaaagtcagaaatagatttgtacacatatgtaagacacatataaataaattgtttctttttattatttcttataatttatatcccttgctcaaaaatcgctaggcgctagttgggcggtaagggtgagcctaacgcctagtaggaaaatcggagattatacgggattaatcggatattagttttagggttatttcatatttttaaaatatattaatccattataattaagaaaattatataatattgttttttaaattgtattaaacacatgaaaacaagattttctattcaaatttataatttttatacaaattacgaacataagttggatattttaaattttaaattttaaaatgaaaaaaaagaaaaaataaaaataaaaaaattgggctagccatcctctagacagatttaggcgggtctaaaccgacaaaaatcggatcaacgattaattttcccaatttagacaaaatcgttgcagactccatctgatctctatgcggccgattttttgaacaaggcttatatgtatacaatcaatttaaaccgattgaaagagtaaacaaaaggttataattttagtaactgtttgtttacttggttggattggactgtccgtcacctgccatttctgtctttgcacttaggaattagaaagtttatatgtatatttttcctggacggccactgaatttgtggatgtaatatatgagtttgtgtatcactgtattgtggataaaaagatttagggctaagcgttctttagaaacacagactgaaaatgtgaaatgaaagcatgtttgttgatgatttttgtgaattacaaaaagaacttagagaggatataatgtaaaaagacccccttcttcataattgggccttagttataattcccttggaattttatggtatgagttttttttgtttgacgagatccaacgccaacaaatacgaagctaacaaactctctcatctaacaaactatttctaaagttacttttttatttgtttcaatatatcaatcaatgaatataaatataaaaataaagaaaaccaaactattgtgatatcatataacaaccaaaataataaaattttatccaacctcttctactatatatgtatttaatctatatatagtccaattatagaaacacgagaccggcatgtacgcatttctgtttcccttctatctcaaaccccaaacgttccaatttctaaatacagttctctactttagtaatgtttaataatgtttctttcaacatttcagttttctatacccgttgtgacaagacactcaaattttccaggacttatgtttgactattttttaggcaaggtaaaaaattgcataagtctcgaaacttttgggtgttcgggcggattggttagttagaaactaatgcacgtcagcctctgaggttccgtgtaatagattctcatgttgtcctttaaaaatgaaactcttccctttgattctttttgttcccaaaacacatttttctacatcttagagtcttagagaagaaaggcaagataatcaatctcatggcgatg

SEQ ID NO: 24927 - DNA, 3000 bp, Unknown; identical to SEQ ID NO: 12234
  misc_feature (1)..( 3000): 2750-1469P.txt file - cDNA_ID_2686877; gDNA_ID_2214538; Annot_ID_134420

SEQ ID NO: 24928 - DNA, 3000 bp, Unknown; identical to SEQ ID NO: 10233
  misc_feature (1)..( 3000): 2750-1469P.txt file - cDNA_ID_2686883; gDNA_ID_2213638; Annot_ID_132209

SEQ ID NO: 24929 - DNA, 3003 bp, Unknown
  misc_feature (1)..( 3003): 2750-1469P.txt file - cDNA_ID_2686885; gDNA_ID_2684236; Annot_ID_192411
ttggtggtatcaaaactcaattagaaaaataataatgtgcacgagggatgggacttttaccaatgctaggctgacatgtaagagtacggacacaaatcttacaaagttcttattgtaccttccctaactttgctctgttgagataagtttctttggtaattaagaagtgtttgaattatgtagctataatttgctgatttatattaaattcttcactacaagaatctgtatctataactataatatgttttgtgtacaattagagactaactaaactaagagtgtgttgtaagaatgttaagcaaataaactctatattggacaagtgacttgaaaagagaatcaagtgcagtctcaagttcctctgttctttcctctaatctctctaacatcttcttaatttccttggagttatccccatctgaacgtagaactgcatccaagttctgcaactcgctcattatcgacgatgacgatcggtgaccaccactgatcagcctggagacgaatttgagagaacatgtctttgtcttcattgttgatgttgtggacaggaacatgaaaagagagcggaagatggagacagagagctcggttgtctcagagtcatccaacttcttcttgaggccaagaagaagcttgttagtctctttcttgatcttcttcctaaaggaaaagtactctttgatctgaacttccatggatttgtcttttcttctcaatgcagactgaagattaaggagatgctctctgagagtgagaactaggtttctcgctgcgtcgcaagagtctagtaacgtggctgacacgtcaagagaatgttcagcttgagctgtgggaagagagtgattgagttggtgaagggaatggtaaagctcagagaggttgagtaacgaggcgtgaagagattgagaatcagatgagttttggaagagatgaatctgagagagagcagcttgaaacttagcagaaggatggtggattcttgatggaagacttatagatctaactggcatttggagtttggtttctggaaatgccatgtttcttaattctgctgaagaaaaagaaagaagagaggtttggtatatatatgatgaagccaaggcatgtgcaggaaacatgggatattatatttgttaaaaataaacagtgattgtttagtcaagccacgatgcacatggaggtggtgaaggaagctttgaatgctctgttttatgctctgtttttgaacgtgaaaccaattttagaggaccaaagatagatagagccattactagatgttgcctttgtgattcccatttagttagccggagagagtgggcttgtcagagtaaggagacatggaaacatttgtcgcagaccattttcagatttcaactctttcttgtttcatccaattgtcaattttttttttcttcctattaacttattcaccattggttcccaagacggtcgtgaagagaaaaaagatgtcacaacactacaaagttgttgtaaaacaaaaaaaataaatactatatacacgaaagatgttacaaaaaaagtattattttgcattttcaatgcaataattaaaatgaattccaagtttattctttttttttttttttttttttttggtgcaccttccaagtttattcttataaactgattcttattatgtaaaaagtagagaaaatgcagagagttacatggaaaaaaattcaatgtagtcttaatttgtgagattttttttttatagaatgacacttagtataaaatcgggaaatattatattaagaataatcctaatcaggattatacaactgtacctactttaaataatgttgattagaatttaggagggcggttcaatgttttgtgccctaataatagaacgttgtattataagtttttgattgagtgcttcaaggctgtcattggattcatgatcaattggaaacattgttaagtgagagggacaaacttatgaattaagatattggccctttgtctccgttacaagagctatgcttatatgataaaatttgtttattaaagaaagaagggatcattgtagatcgcatataaatgatatgatgcaaaattacgggacgatgtaatgtacggggaatcttaaaagtggtacgtttcagacagaagatcttcatggaatttgatacattgaacctcttctcaaagtgttaatcaactcatctttatctgtcagaacccaaacttaaaactcagtcgaaatgtattctcaaaatatagttaataggcaacaaacttcgactatcaataataaccacataatttggtcggaaactagaagacgtcgcaacattatcaaacttaaactatgtagaaaatttccaaaactataagctactttaatgttgattaaaatgtaggagctagggctagtagctgttcaatgggttgtcccctgattcaccatatccattttagtataagtttttctttaatttgattgagtgattcaagactgccattggattcatattgatcattatcaattggacgcattgttgaattagagagacaagattatgaatcaagatcatggcttgtccccgtttaaaaatggtttaaactatatgataagtttatttagaaagaaaaaaagatcatgtacggggaatcttagagaagtggtacgttacagacaaaagatcttcacaaaatttgatacattgaacctcatctcaacgtcaatctacaactacgccttcaatagtaacagaaacaaaacacaaaaagtccataagttaaacactgggcctgacaatttaggcccatatactgaaggaaaacgagtctataaataattgggcctaatgaaatataaaagcccacgatactagattatcgaatggtggtccctattagttacgtaacgtacgaagatttatctacaagtttgaatcactccaaaaatttaaaattcagtgttcaccattttttatttttctccacaaacccaatctttctacaatg

SEQ ID NO: 24930 - DNA, 3003 bp, Unknown; identical to SEQ ID NO: 24929
  misc_feature (1)..( 3003): 2750-1469P.txt file - cDNA_ID_2686885; gDNA_ID_2684236; Annot_ID_137701

SEQ ID NO: 24931 - DNA, 3000 bp, Unknown; identical to SEQ ID NO: 10079
  misc_feature (1)..( 3000): 2750-1469P.txt file - cDNA_ID_2686953; gDNA_ID_2213624; Annot_ID_195771

SEQ ID NO: 24932 - DNA, 3000 bp, Unknown; identical to SEQ ID NO: 10079
  misc_feature (1)..( 3000): 2750-1469P.txt file - cDNA_ID_2686953; gDNA_ID_2213624; Annot_ID_132001

SEQ ID NO: 24933 - DNA, 378 bp, Unknown
  misc_feature (1)..( 378): 2750-1469P.txt file - cDNA_ID_2687044; gDNA_ID_1972138; Annot_ID_179174
aagcttgaaagcggcggaatccttacatattccgacgtacttaaccggagcttccggcgccgccatcttctcttctaattttccggcgattgaatggagacaatgcgtcgccgtttttcaaaagcggtgcggaagagaagagtgggcgaggaagtttagagaaactggaacagaaaacctaaagcgaagaagtgatgagtaaaactcctctacacgtggtctttagtaaacttcagtggatatgtaacatgatcgacggtcgagagtttatcatattttaaatgggctttaggaaggaaaggcccaataaagaaatgaatatttccaccacagaattatgaattgagtaaaccagaaaatcgaagaagaacggcaatg

SEQ ID NO: 24934 - DNA, 3000 bp, Unknown; identical to SEQ ID NO: 9041
  misc_feature (1)..( 3000): 2750-1469P.txt file - cDNA_ID_2687055; gDNA_ID_1971974; Annot_ID_58702

SEQ ID NO: 24935 - DNA, 3000 bp, Unknown; identical to SEQ ID NO: 9041
  misc_feature (1)..( 3000): 2750-1469P.txt file - cDNA_ID_2687055; gDNA_ID_1971974; Annot_ID_177556

SEQ ID NO: 24936 - DNA, 3003 bp, Unknown
  misc_feature (1)..( 3003): 2750-1469P.txt file - cDNA_ID_2687136; gDNA_ID_1971893; Annot_ID_176868
gcgtacctcagaaattaaagcgcacgataaggtcaccttctcggctttgccaaagatgcatctctctcttgcgttttgtttgtcgttaaacgtttcgttcctttaaattgattgtgattatttcttaataaacttgattactattattaattctttaacttaaatattactctaatggtgatgccgtgatggtcacaaataaatgaaatagaaaaagaccaaaacaaaaaaaaaaaatccttttttcctctcttttacatgatgggaactcttgacctttaagttttttttttttgtgacaggaagtgttcaaaggaacgaaatacacttcttcttccatttgatgtctgtggtccgaatgaaaaatatctctgtattaaccagaaacgtgtttcataagcatctttaactcttcagctctcaaattcttcatgaatatctctgcttatcgatcaaggtttgttaaattttccctccctctctgtttttcacttgaaacgtttggatcttggagaatttggagtttctcgtgtgttttttttagttccaaactttatattagttttaaaaatgattaagagtttattctgtttatggtttgtatcagtgagagcaaatgcaatttttaagagccagctattggatctataactgaaggtgaggcaacacaaaactttcttttttctttctgctttgatctattcttgtgcatgtttttgaaagattctaaattaccaactatgattggtttgatatgtagaggatatatatagagatgatgagttcttcttctccaacacaacttgcatctttaagagacatgggaatctatgagccatttcaacaaattgtcggttggggaaatgttttcaaatctgatatcaatgatcatagtcccaatactgctacttcctctattattcaggttgatcctagaattgatgatcacaacaacaacatcaaggttaactagttttcttctttcaagattcattgatttttgaaagttgttgttacttgtttttttactaatgggtttttaaatcacgtgcagataaattatgattcttctcataaccagatcgaagcagaacaaccttctagtaatgataatcaagatgatgatggcaggattcatgataaggtttagatcaaaacaaagctaattatgttttcttttttatacatgcataatagaaaatggtggtttttgtgatattgattgatattcttttgtcatatgccaatagatgaaacggcgtttagcgcagaaccgagaagcggctcgcaaaagtcgtttgagaaagaaggtagaagcaagtccctttattgaatctcatatagtttagttagttgctactaagtcctctttttttttgtatctttaggcttatgttcagcagttagaggaaagccggttaaagttatcgcagttagagcaagaactcgaaaaggttaagcagcaggtgagctaggtcaaaagatatgtttaaaatgttctgttttgagtctctatcaagaaaatcagttttggtttcgtaattgactcagtactaaatgttttctttcaagggccatttaggaccatctgggagtattaacacagggattgcatcatttgagatggaatattcacactggctacaagaacaaagcagaagagttagcgaactacgaacagcgcttcaatctcatataagcgacatagaactcaagatgctagtagagagttgcttgaaccattacgctaatcttttccaaatgaaatccgatgcagcaaaagccgatgttttctacttgatatcgggaatgtggcgaacttcaaccgaaagattcttccaatggattggagggtttcgtccatccgaacttttaaacgtaaaaatacccaaaatgttacaatctctaacaaaaacattttcaaaatgtaatattttctccttcccttttcttgtaggttgtgatgccttatcttcaaccattaacggatcaacaaatcttggaagtgagaaacctccaacaatcatcacaacaagcagaggatgctctgtctcaagggattgataaacttcaacagagtttagctgaaagcattgtgattgatgcggttatcgagtccacgcattatcccactcacatggctgcagctatagagaatcttcaagcattagaaggatttgtgaatcaagtaagtagtaaacattaactcaaaacaaattaagtaaagtttgtgtcattctatttcaaacatctctatcctgattataacaggcagatcatctgaggcaacaaactttgcaacaaatggcgaagatcttaacgacaagacaatcggctcgaggtttactagctttaggagagtatcttcatagacttcgtgctcttagttctctttgggcagctcgtccacaagaaccaacttaaaagaggaacttattaaaactttaaaaacaagaaacagcagaatcaaaagtcttgaagaagcatactcatcacaaagcttggaaggatgttttaaaaaagatctttgttaattaagtagagtgagattctcttgattagaactttatggtttttgctttatgaagtatctctccagagaagattgtaaatttgggttgaaactttgtaatatatttagatacaacaaataagtttgaaatctgagcaatttgataatatgtgtactgaatgtatatttaatgtattattaagggactaatgtgaaactcaataaatcaaagggtactattgtaattttcccatcgttgcgcttcagtcgtccacaaaaaaacttccgttggaattttctgaggaaaatgagaaaattcaattgaagaaaagagtaaagaagaagtctcttgttcggttggatttttcaggaatttcattttcgtgagcttacttgttcgttcatataaagaggtggaatttgatttatatgaattttgatttctgggtttacgaaattgatcggtttctgggttggaacttgaagttatg

SEQ ID NO: 24937 - DNA, 2202 bp, Unknown; identical to SEQ ID NO: 3674
  misc_feature (1)..( 2202): 2750-1469P.txt file - cDNA_ID_2687174; gDNA_ID_1620656; Annot_ID_47851

SEQ ID NO: 24938 - DNA, 3003 bp, Unknown
  misc_feature (1)..( 3003): 2750-1469P.txt file - cDNA_ID_2687174; gDNA_ID_1620708; Annot_ID_48950
ttcaaaaagatgacttgacattcgtttggttgatgatccttgcatctcttggatcgaaaatcttgcggcttcaacgattttgtcaatgctaatgccctcttgagattcaaatatcctgttgattcttgagcggagaaccattagcagctgatcaagtgttgttgtatcctcatctggctcactggacttactagaggactgtttttccacagatcttctactgcaaacactgttggaagattttgaagctgagttagctccatctggatcactacctactaacttttcaatctccaagaagtcatccatcaactccagtctactagaactcctaggctttgaggaaccattaacacttacttttctcactttatgagaatctagtgaggttgctgggccacactcagaagaacttccttcttcatcaaatccatcttcggacaccgaggtgacactaggcggatagtgatgatcatgaccactggatagactttcagagagatttctgctatttgattttggagcattcttgtcattgttaaacatatgcatctgcccttcaagaatcttaagcttcccaagagtcttagcgcatacatttctcgaaacctgcagttcattgttacgagcagagagatgttctttaagcgtctgaatctcctcctccatttccaatgtacgtcttgtgagatatacattctctcttttgcactcttccaacttatgatcagtagaaatctctgcctttgcgatgtgtgcattgtgattttgagacatgtttctctgtgctcgagggtctgtgaattcatgccctaagccttcaacttctagcttcatttgagccatagcagcaggaccaggaagctttttccgcagaagtcctctaagcctatgacactctgcttcaagttttgcaatctttttcacaccttccagatgctgcttatttgcgatatccgccgacttcaaactcatgtttttctcttcattgcggatctcaacttctttggaagcaacgtgaagatcgtacttcagataactaatctccttctcagccaactgaagattagtcttcaacttttccacatcagcttcagctttagacctctcctcactaatccttactatcatctcagatcgttcttgcaacgatctagtgagtgctgcattgtcagaagctgcccggtgtagtccttcactcaattcatcgatctttccttcaagctcggctttgatcttatcccattgactggtcttagcaagaatcacatcctgcagcttcttatcactctcttctttcacaatccttatctgccttgtacactctttcaacgcatcatccaaatgcgatgctcgatcctctgcagtgagctttaagagtgtaacagattcgagttgacgtttaagtgccaaagtttctgcatcagccttctcccatcctaaaaaaagaacaaaagactataatcagcaacaaaaaaaacatctcaaaacaaacaaaaatgctgaaataacattttacctgaaacagcttcttcagcgactttggcatgttgaagaatcaaagattctttagtgttgatctcagagtgagcaagagtgagtttttctttaagatctttaacttgaacttcaaacaatttgacctgatcctccattctactcatatgtgtgtatgaatccatagttatctgaacatagtttgtgtttttacacttctcctgacacacaaatcaaacacacaaaaaaagacttcaaatgaaaatttctatctcacagaaactgacagattatcacaaaactatataaaacagaggtttggtgtaaaattaaagcacctgattctcaagagaagccaagtaggacaaagaacaaacaggagttgactcgattccaacaactggtttctcagtcgtggctttgtccgaagactttctcttccatggccaacctctaccctccattttttttgctccaaaataatagtactctgcagaatccgtagaagaaggaagaaaataagctttaataaaaaaacagacaaagaactgatagaagttttgaaatttgaactaacgtacaaaaaaaggaaacaaaatcttccgtaaatgttactttcaatttcatccgacaaaatcccgctatatatttattatactgtatcacctcaacaatgaccgttttgttgtttctttctttttttccgcagtgattcacatttaatgatttctttccaaaactatgtaaccaaatttattgaaaagtctactaaaaaaataattcaaatcccatcgcaatgggcgcgagcgagtccttcacattaaacctgatcataatcatcatcagctaccacagtatcgcacttagaacacacacaatcaaattcaaacaaactttcgcttgacaatttcaatcgaaaccatatcttttcaagtttagctaactatcggaaagaaattacataccgagactaatgattccacagacttgagagagcgcaaagatcgaagaacattcgtcgagagaaagaagaagaaagtgggaggagcgtgtatgtgccagagaagaaggagcagtggatgatttatgcgcttgggctgtcgctttttttcaactttgacgctccacaaagacacaacaacgacatctctctatttcaaaaaagttttatttttttattcattttaaatacattttaaaaaaattaacaaataaatcgccatttgttgttcttttttcaaaaacggaatacgagggtgcagttatcctctacgagcaggtgcatgtaataccatctgatggatttgacttatcgtttatccacaaaagattcaaaatcttcccggtttttaagtttgggcttcataaggcccaattagtggcaaatccatcacagtccactagggtttttgagagactggatataaaatttgattttgttcattgttgtcattcgccgtaatctgaagaagacgaagcaaatcctcccacaaagaatcatccatg

SEQ ID NO: 24939 - DNA, 3003 bp, Unknown; identical to SEQ ID NO: 24938
  misc_feature (1)..( 3003): 2750-1469P.txt file - cDNA_ID_2687174; gDNA_ID_1620708; Annot_ID_165394

SEQ ID NO: 24940 - DNA, 2202 bp, Unknown; identical to SEQ ID NO: 3674
  misc_feature (1)..( 2202): 2750-1469P.txt file - cDNA_ID_2687174; gDNA_ID_1620656; Annot_ID_163657

SEQ ID NO: 24941 - DNA, 3003 bp, Unknown
  misc_feature (1)..( 3003): 2750-1469P.txt file - cDNA_ID_2687174; gDNA_ID_2926210; Annot_ID_141959
tcaaaaagatgacttgacattcgtttggttgatgatccttgcatctcttggatcgaaaatcttgcggcttcaacgattttgtcaatgctaatgccctcttgagattcaaatatcctgttgattcttgagcggagaaccattagcagctgatcaagtgttgttgtatcctcatctggctcactggacttactagaggactgtttttccacagatcttctactgcaaacactgttggaagattttgaagctgagttagctccatctggatcactacctactaacttttcaatctccaagaagtcatccatcaactccagtctactagaactcctaggctttgaggaaccattaacacttacttttctcactttatgagaatctagtgaggttgctgggccacactcagaagaacttccttcttcatcaaatccatcttcggacaccgaggtgacactaggcggatagtgatgatcatgaccactggatagactttcagagagatttctgctatttgattttggagcattcttgtcattgttaaacatatgcatctgcccttcaagaatcttaagcttcccaagagtcttagcgcatacatttctcgaaacctgcagttcattgttacgagcagagagatgttctttaagcgtctgaatctcctcctccatttccaatgtacgtcttgtgagatatacattctctcttttgcactcttccaacttatgatcagtagaaatctctgcctttgcgatgtgtgcattgtgattttgagacatgtttctctgtgctcgagggtctgtgaattcatgccctaagccttcaacttctagcttcatttgagccatagcagcaggaccaggaagctttttccgcagaagtcctctaagcctatgacactctgcttcaagttttgcaatctttttcacaccttccagatgctgcttatttgcgatatccgccgacttcaaactcatgtttttctcttcattgcggatctcaacttctttggaagcaacgtgaagatcgtacttcagataactaatctccttctcagccaactgaagattagtcttcaacttttccacatcagcttcagctttagacctctcctcactaatccttactatcatctcagatcgttcttgcaacgatctagtgagtgctgcattgtcagaagctgcccggtgtagtccttcactcaattcatcgatctttccttcaagctcggctttgatcttatcccattgactggtcttagcaagaatcacatcctgcagcttcttatcactctcttctttcacaatccttatctgccttgtacactctttcaacgcatcatccaaatgcgatgctcgatcctctgcagtgagctttaagagtgtaacagattcgagttgacgtttaagtgccaaagtttctgcatcagccttctcccatcctaaaaaaagaacaaaagactataatcagcaacaaaaaaaacatctcaaaacaaacaaaaatgctgaaataacattttacctgaaacagcttcttcagcgactttggcatgttgaagaatcaaagattctttagtgttgatctcagagtgagcaagagtgagtttttctttaagatctttaacttgaacttcaaacaatttgacctgatcctccattctactcatatgtgtgtatgaatccatagttatctgaacatagtttgtgtttttacacttctcctgacacacaaatcaaacacacaaaaaaagacttcaaatgaaaatttctatctcacagaaactgacagattatcacaaaactatataaaacagaggtttggtgtaaaattaaagcacctgattctcaagagaagccaagtaggacaaagaacaaacaggagttgactcgattccaacaactggtttctcagtcgtggctttgtccgaagactttctcttccatggccaacctctaccctccatttttttttgctccaaaataatagtactctgcagaatccgtagaagaaggaagaaaataagctttaataaaaaaacagacaaagaactgatagaagttttgaaatttgaactaacgtacaaaaaaaggaaacaaaatcttccgtaaatgttactttcaatttcatccgacaaaatcccgctatatatttattatactgtatcacctcaacaatgaccgttttgttgtttctttctttttttccgcagtgattcacatttaatgatttctttccaaaactatgtaaccaaatttattgaaaagtctactaaaaaaataattcaaatcccatcgcaatgggcgcgagcgagtccttcacattaaacctgatcataatcatcatcagctaccacagtatcgcacttagaacacacacaatcaaattcaaacaaactttcgcttgacaatttcaatcgaaaccatatcttttcaagtttagctaactatcggaaagaaattacataccgagactaatgattccacagacttgagagagcgcaaagatcgaagaacattcgtcgagagaaagaagaagaaagtgggaggagcgtgtatgtgccagagaagaaggagcagtggatgatttatgcgcttgggctgtcgctttttttcaactttgacgctccacaaagacacaacaacgacatctctctatttcaaaaaagttttatttttttattcattttaaatacattttaaaaaaattaacaaataaatcgccatttgttgttcttttttcaaaaacggaatacgagggtgcagttatcctctacgagcaggtgcatgtaataccatctgatggatttgacttatcgtttatccacaaaagattcaaaatcttcccggtttttaagtttgggcttcataaggcccaattagtggcaaatccatcacagtccactagggtttttgagagactggatataaaatttgattttgttcattgttgtcattcgccgtaatctgaagaagacgaagcaaatcctcccacaaagaatcatccatg

SEQ ID NO: 24942 - DNA, 3003 bp, Unknown; identical to SEQ ID NO: 24941
  misc_feature (1)..( 3003): 2750-1469P.txt file - cDNA_ID_2687174; gDNA_ID_2926210; Annot_ID_202576

SEQ ID NO: 24943 - DNA, 3000 bp, Unknown; identical to SEQ ID NO: 5911
  misc_feature (1)..( 3000): 2750-1469P.txt file - cDNA_ID_2687185; gDNA_ID_1620831; Annot_ID_169655

SEQ ID NO: 24944 - DNA, 3000 bp, Unknown; identical to SEQ ID NO: 9780
  misc_feature (1)..( 3000): 2750-1469P.txt file - cDNA_ID_2687287; gDNA_ID_1972187; Annot_ID_180166

SEQ ID NO: 24945 - DNA, 3003 bp, Unknown
  misc_feature (1)..( 3003): 2750-1469P.txt file - cDNA_ID_2687331; gDNA_ID_1620815; Annot_ID_169228
aacgcttcccggcgcgtgctcgtcagacgccgtctattcagaaactcagcctcatcgtgatcgattattggtttctctttcttcgctagatgtctttcgagaagctcctccacggtatctggaccttcgtgcaggaaccgcctcgtcgacacagcgccgctccgattcatcagatctagacgacctgccagatttcgccatttctgaagcttcgcagccatcatctctctcaaacaacaacattgaaaattttcgatcctggtgacaacaacaacaatgcttgataacataatgggcttcgatttctgaaactgtataagcccagttaaagcccaatataatcattaagttcgcaaatgttatacgtctctaataagacgacgacggatttagataaaatttgagcccaaaacgcaccaccactcagcgttttagacctgtcttctccagaggcagagaaggagaagcttcctcatatggcgttcatagccgaagaagccgtttgtctattccttcctctgaatgcaaatcatcatgactcatcccaaagatgagaatttgaaagatgctataaaggttttactatgcttatacgaaaagggttcaaatagacaattttttacgtgcattgagaagaaaaggatgtgattgttccacacactgaaacacgtgatacgaagtgtaagtctatatacagcagatgggtatggatacagaacgactaaagatgatgtattattgtcattgaataactatatgagaaaccaaatgttcttttaccttctgcagaattgaatgtcatgcactgttaaactcttcaaataaaaagtctgatcagctttgtgtttacaactctttcttgcgtatcttctccatctttatagatagttattttcaacgatcagcatcctattctctaatacctggatttgtgacgtttttccccaacaatgttacttctattttagtgatgttctcttgcaacccatcgagaaagggtttaatcttgcatgataagctttgtggatgggttgcagcagaagatgactacaacagaagttatattgttgggtaaaacgtcaaaaagaacagagttcttaaaaccatcaaacaaatccaggtagaagagaaaagtatgttgctcattgaacaatatcaatcaatagagataaagaacatatgcaagaaaaagcctaaacacaaagatgaccagaatttctatctgaagaatcgagcattgcatcacattcaattaaagcagaagaagtacaaaaaaaaaatgttaatggccctgcatatccaacatctcatcaagtcctttgattctctctaaaccttcactaatcagataccgaatcttttgtttgtcattgcagtctctgttcttttccatctcttgcctaacagtctgtttcagttcccctacaaaacatcaacacataaaatcaaacaaagtttatcctccgaaatctactaaacccctagatttcgagatttttaatcaaatggatgtacggtgaacgcaaatttattgtctatgtgacgaatctcatagatagaaaaataagagacatgaaagacacgaacctctaacatgaacaggagctctgtgagctatcttcaatgcttgtcggtaaagtttaagcactcgagcccggagaataaagctctgcagatctaattgaaccataatttatcaaccaaccgttgaattaagaatttacggccagagaaggatcgattcagaaagaactgaaatcaaaatcgaaatctagggtaagagagaagttcctgactctgagtcctgagttaaaagaaaaaagatcggagaaggaaagagtcacgtgagaaggacatgatgaagaattaatgaaaatatgtggtttaagtgtaaaccggtaatcggtgttaattgaaatcaaattatagtttaccaaccatctttaataacagttctgttttagatggtcctaattacggaagcccatccgaaccatcgtggtttaacttacagcaaacagataccaaaattaattaggtagctttgaataaatattaggtggtttagcatcgtgtttccataatatgattttctcagtgtacagcttcgcaatttctcaattgtttttggtccattttcgtttatttaaaatcgtttactagagttgttcgtcccttggttgactaatattctaccttttttttttaatttctttgaagcacgaaattgtaaacacaagatatcaataatttagacaaggtctcagtaatttaatatagactacgtaggatttaaaatatagtttcgataattaaaagacaatcatttaccaaaacgtgttactgaatgatttgtgttaatattattatcagaattcaaacatgcaagtatatgaagaagaagtatgtttatcgattgaaatacattgtattttttttctctctcttaggtgtttcaattacagaactttaaatgctaattaacaaaaaagtaaaatttcataaagctccaactagttcaatgcatcgttgataagttctaacttctaccttccttccgatatggctgaattttgcttgcatgtaggtcccaaatatcaccaccgtttcttaaagaaatgttatactattttgatttttggactattgaggcacaaactaaagtcaaattagtaattaactaatcatcatctttggaaaataaaaaaatgtgccgtttagcttttaggtagtagtaacaaaaagaagaaacttgaaacaaaaacaaacatgtcttccgcattttgattttataaagtcggccgtataaacacaaaggtctttcttcttcctttttagctctcacatttgaccaaaactcctccaatccaggcatcatcgttgactttttcaaactcatttcctctctttttccttcttctcacatcatattagacccaaacataaaaagaacgaagaatcctctgttcttgtctgcgaattttgctgttgtgatcagcgatg

SEQ ID NO: 24946 - DNA, 3000 bp, Unknown; identical to SEQ ID NO: 8775
  misc_feature (1)..( 3000): 2750-1469P.txt file - cDNA_ID_2687347; gDNA_ID_1971889; Annot_ID_58460

SEQ ID NO: 24947 - DNA, 3000 bp, Unknown; identical to SEQ ID NO: 8793
  misc_feature (1)..( 3000): 2750-1469P.txt file - cDNA_ID_2687347; gDNA_ID_2684202; Annot_ID_191250

SEQ ID NO: 24948 - DNA, 3000 bp, Unknown; identical to SEQ ID NO: 8793
  misc_feature (1)..( 3000): 2750-1469P.txt file - cDNA_ID_2687347; gDNA_ID_1971889; Annot_ID_176810

SEQ ID NO: 24949 - DNA, 3000 bp, Unknown; identical to SEQ ID NO: 8775
  misc_feature (1)..( 3000): 2750-1469P.txt file - cDNA_ID_2687347; gDNA_ID_2684202; Annot_ID_137225

SEQ ID NO: 24950 - DNA, 3000 bp, Unknown; identical to SEQ ID NO: 9500
  misc_feature (1)..( 3000): 2750-1469P.txt file - cDNA_ID_2687357; gDNA_ID_1972138; Annot_ID_179179

SEQ ID NO: 24951 - DNA, 10 bp, Unknown
  misc_feature (1)..( 10): 2750-1469P.txt file - cDNA_ID_2687382; gDNA_ID_1591309; Annot_ID_150822
cacaaagatg

SEQ ID NO: 24952 - DNA, 3000 bp, Unknown
  misc_feature (1)..( 3000): 2750-1469P.txt file - cDNA_ID_2687416; gDNA_ID_2926144; Annot_ID_139052
tgtaagattaatctcgaaacgttttggattgtggttagacatgtttgaattcaagctgaatcatcttgcgtcatttgctttgaggagcaatgcatctcaactctttcaaaccttactaaagaacacgcctccaatctctcaaaccttaccgaagaacaagcctcaacgctctctaactttattgaagaacacgcctaggtactttcaacctcacactttctcaagcctttttgaatcattgatttgtggctgcgatttgattgaacgacaccaatctagtctcccaatgttcctttggttatggccttgtgattatctttggcgatttcgacaaatcttatccggcatttggaatatctttccaccggcagtctcctcgatggagcattctaccaaaagctcatttgcgtcaatcgcgcaagccgtctatcaccaccagttggtcgggattttctcgaagcttgtcttcgaatttgaatctcctatggcatcaaaagatttttcaaacattgcaagcttctccaagttgagcatctttttaaaaacacattgagcctttagctttcttttccatgcattatcttaatttcagtttgtatgaattttcctctttttgaggttttaagtgaatgaaagttcttttgtccaaaaaaaacccgacatattatgtttctttcctataattgtttcaaataaatttaaaatatatattttctaaaggttatgaatcaagataaacacaacaactaatcaatctccacaataactagtatatagtttgacaaaaaaataaataaagataaaagtactttttacggggctttatagatttgggtacatttaagttaaaaaagtcagaataaatcactttttgtttggtttatagagataagcattttctgttagacaaaattaccattttgccctcaatctccttcttctttctttattctttctttattctttctttctttcttcatcgcttatttctcttcttaatatttccagaaaatctcaattttttttttggtttttttttgtttttgatcacaaaaatccaataataatgaaatctataccctaagggatagtaaaaagtgaacccaaacaaaataattaaaccgatttgataagaatataagaacgctaaaacaatttccaaatttgataaaagtttaagattttgagattttggttttgcaattttgttggttcgttgtctaggtttagagatttatttgggttttgtctaatctatttatttttgaaatttatttcaatttaatttgtttgtatgttgttgatgaattttgttggaaatttccggattttcttctatatagaaaattcttcaacatgaattagctagagaatccaaaatcataacaaaaatatcaattttcagttccttaatccaaaacaaaagaactgctattaaaaatcagcttgaattttgatctggttcgggaagggaaagagatagtgatataatttgtaggtggaaaagatttgggggagactaagattaaaacggtaaaacagaaagtagaaaagtacatgaagctgtaaggcacaaaaaaaatgccgatacttacaaagggacaaggttttaagtgtttttctcataattgatcctactttatacaactataaacaaggagaatcacaagtatctttaatttgaaagatgatatatgaaatattttagatctacaactatgtatctatatatttatttagttattgatgttaagaaaatactttatttagttttattttaggtttaaaatttaatattttattggatatcatctaagttacaatttacactttgaatatatcatttaatattaatataatctaatttaataaaattaattaatatatttatctatatatatatattacgcttatatatatatatatttttaataattatatattttatttttaaagcctgcaaataacccgtaaacacacgggtttgaccctcaccaacctcacggtagagcagtcagggtgggattagaaagctttagttctgacaaacctaacaattaccactaaaattggaaaaaatgtcaaaacaaatcacaaattttaaaatttgggacgaaaaaaccatgaagttttgacatgtcatttaaatctcaaagtttaatttgactttacaataaaatggttaagttgtgttgattgagtcattttaggcatgccgtttttttgttatttaaaagataacaaagttaattttctataacatctaacaaaaagtaacgacaatgcctaaaatgaccgaatcaacaaaacgtaaccattttattgtaaaatcaacctaaattttgagatttcaataacatttcgaaaattaatatttttttcgtctcaaatttcaaagttcatgaatttttttcgttacttttaccactaaaaattgtaaacattggtaataaaataacaaaagttgaatactccatattttgtcacctacccattagatcagatctcaatgacaaacagtatcatttatttataaaatagtccaacagattttcgtcatttctctagctttacatagtcaccattttttttgtttgtttgacctcaaaaactcctacgtttctaagctcttctctttgcttcgattcccaaaacgactatttccaaaaggttagtttttaatcttcaaatccttcttcaatgtccatcttcgtgatttaatagtcatctcctttggctttttttttttttttgagtccgtactttttggattgtagacaaagatcctcccgaccaaacattttgcttccgtgaaaaacgattgtggtctctgtaagattaagatcgacattacacaaccactgatttgtcttagctttaatgattagattcttaattaattagtcattactcttgtctctgtaatagttgacttgggtttttgaaactaatgttaaatttaccaaactaaaatttttgtagggtttaaagaagttaatg

SEQ ID NO: 24953 - DNA, 3003 bp, Unknown
  misc_feature (1)..( 3003): 2750-1469P.txt file - cDNA_ID_2687416; gDNA_ID_1620757; Annot_ID_49911
tcgatgtaagattaatctcgaaacgttttggattgtggttagacatgtttgaattcaagctgaatcatcttgcgtcatttgctttgaggagcaatgcatctcaactctttcaaaccttactaaagaacacgcctccaatctctcaaaccttaccgaagaacaagcctcaacgctctctaactttattgaagaacacgcctaggtactttcaacctcacactttctcaagcctttttgaatcattgatttgtggctgcgatttgattgaacgacaccaatctagtctcccaatgttcctttggttatggccttgtgattatctttggcgatttcgacaaatcttatccggcatttggaatatctttccaccggcagtctcctcgatggagcattctaccaaaagctcatttgcgtcaatcgcgcaagccgtctatcaccaccagttggtcgggattttctcgaagcttgtcttcgaatttgaatctcctatggcatcaaaagatttttcaaacattgcaagcttctccaagttgagcatctttttaaaaacacattgagcctttagctttcttttccatgcattatcttaatttcagtttgtatgaattttcctctttttgaggttttaagtgaatgaaagttcttttgtccaaaaaaaacccgacatattatgtttctttcctataattgtttcaaataaatttaaaatatatattttctaaaggttatgaatcaagataaacacaacaactaatcaatctccacaataactagtatatagtttgacaaaaaaataaataaagataaaagtactttttacggggctttatagatttgggtacatttaagttaaaaaagtcagaataaatcactttttgtttggtttatagagataagcattttctgttagacaaaattaccattttgccctcaatctccttcttctttctttattctttctttattctttctttctttcttcatcgcttatttctcttcttaatatttccagaaaatctcaattttttttttggtttttttttgtttttgatcacaaaaatccaataataatgaaatctataccctaagggatagtaaaaagtgaacccaaacaaaataattaaaccgatttgataagaatataagaacgctaaaacaatttccaaatttgataaaagtttaagattttgagattttggttttgcaattttgttggttcgttgtctaggtttagagatttatttgggttttgtctaatctatttatttttgaaatttatttcaatttaatttgtttgtatgttgttgatgaattttgttggaaatttccggattttcttctatatagaaaattcttcaacatgaattagctagagaatccaaaatcataacaaaaatatcaattttcagttccttaatccaaaacaaaagaactgctattaaaaatcagcttgaattttgatctggttcgggaagggaaagagatagtgatataatttgtaggtggaaaagatttgggggagactaagattaaaacggtaaaacagaaagtagaaaagtacatgaagctgtaaggcacaaaaaaaatgccgatacttacaaagggacaaggttttaagtgtttttctcataattgatcctactttatacaactataaacaaggagaatcacaagtatctttaatttgaaagatgatatatgaaatattttagatctacaactatgtatctatatatttatttagttattgatgttaagaaaatactttatttagttttattttaggtttaaaatttaatattttattggatatcatctaagttacaatttacactttgaatatatcatttaatattaatataatctaatttaataaaattaattaatatatttatctatatatatatattacgcttatatatatatatatttttaataattatatattttatttttaaagcctgcaaataacccgtaaacacacgggtttgaccctcaccaacctcacggtagagcagtcagggtgggattagaaagctttagttctgacaaacctaacaattaccactaaaattggaaaaaatgtcaaaacaaatcacaaattttaaaatttgggacgaaaaaaccatgaagttttgacatgtcatttaaatctcaaagtttaatttgactttacaataaaatggttaagttgtgttgattgagtcattttaggcatgccgtttttttgttatttaaaagataacaaagttaattttctataacatctaacaaaaagtaacgacaatgcctaaaatgaccgaatcaacaaaacgtaaccattttattgtaaaatcaacctaaattttgagatttcaataacatttcgaaaattaatatttttttcgtctcaaatttcaaagttcatgaatttttttcgttacttttaccactaaaaattgtaaacattggtaataaaataacaaaagttgaatactccatattttgtcacctacccattagatcagatctcaatgacaaacagtatcatttatttataaaatagtccaacagattttcgtcatttctctagctttacatagtcaccattttttttgtttgtttgacctcaaaaactcctacgtttctaagctcttctctttgcttcgattcccaaaacgactatttccaaaaggttagtttttaatcttcaaatccttcttcaatgtccatcttcgtgatttaatagtcatctcctttggctttttttttttttttgagtccgtactttttggattgtagacaaagatcctcccgaccaaacattttgcttccgtgaaaaacgattgtggtctctgtaagattaagatcgacattacacaaccactgatttgtcttagctttaatgattagattcttaattaattagtcattactcttgtctctgtaatagttgacttgggtttttgaaactaatgttaaatttaccaaactaaaatttttgtagggtttaaagaagttatg

SEQ ID NO: 24954 - DNA, 3003 bp, Unknown
  misc_feature (1)..( 3003): 2750-1469P.txt file - cDNA_ID_2687424; gDNA_ID_1971898; Annot_ID_58495
tatatcactagtcacaaaattttaaaacttatattacatgtacctttaaataatggaaaatcaaactcaattttgcaggagattagaatacaatatgaataatactaattttgggaccgcaaatcgtgctgcagcatcaaaaatcttaattctgcatggaacgtgtatgtgcaagaatatatattatcatctatatatctaatttgttatctagatatataagaatcacgagatcatatatgctaaaattttgtttttgtttttgcaataaagatccttgctaattaattattgaatttttttgtgtcacagctgatgatgtagttccctcttcattcggatacagatgtgctgactcccttcgcatggctggatttccaaccttgttcaaacaatgtggagggtctaaacatcgattacttcactcttttttttttttttttgattactattttcttaacatacatcactgaatttgagttatataccatgtgtgcagggatcatgtaattaatgagatccgtgtctggctcacaaaccttgggctttgaggatatggttaatttctgcataaagaaaacaaatggggagcaaaactattatcgtacaatataataaagtgtttagttttgagctttcgttttttgtctttgttattcataatcaatagttaatgtattattcttcgttcgaaaccgttaaaaaggtgaattatatttctccattatatatcttagtaaaacaatttccttatctgaccagcaaattctcaaggaatcaaaattgcttcggaaatcctaatactggtatgcataaatcaaattaactttcaaacaaaactttgtgaaatttcctgaagtaacagtattgaaaaccgttacccccatacgaacgttacagagaaaactattttttaaagaaatgattgaataaataattgagaagtaacaggaatatgttttagtcaagtgaatagtgattaaatttgactccgtcttccagagtttgactctgttaaaacgtaatagagatggactaataaattaggtcgaaagatgtaaaataaaataaaaataaaaaaaagtaacgaaaacaagtgcatgttgcgaaaatttatgatgtaaatgtcttcgtattaggcaaagtttaaaacgaaaactttataaaataccaattatgtaatttccgtactaatcacccgaaataactagtgtccaatttataaaagaaaaccattacatgataatacgtagaagtacattcaaacccaataaacaacaacaaggatcggcataacctcacgaacgcaacaaacactaatcaaagcaaacaaacatgaaaaccacgaacacgaaacaaatatttatcctcttcacttcctctgtgtctcacgagtagtggtcgtagtagtagtacttggagctgaagaaacatgttctttgtttccttcatcagtgcgaagccctaaagtgtgcttcaccgcatcagtagctcccatagccatctgtttcacctgctcaccggtctggcccaagatcccactggtcttctccttacctgcttctgcagtctctttggtatattcagctgcatcgtgtgccttgttcttgattgcttctccagtttccgacatgtagcttcctgtcttgtctttggactcttgagctctctcttgagtcgtttgtgcagcttgagacgtcttgtctttagctgactgagctgtttcatgagccttttgttgggctgactgggctgtctcttgagttttgtccttagctgcttgtgttttgtcccccatcgttcccatagcttccccagttttctcctacagttcaagattggatttacattataaaaaatactaatcagctttttttttttttttctaaaatcaaataacacgaaacatcacaaaattgaaaataataactttcaaactcatttttgttttttcacatacaaacaatagttactttttaggttttgtttaagtttctaaaattaaatcatttaatgctgctatccaaaatgtattatagttatgcatataaatcgtttagtacctgagccttgcctctggtttcaccagctttgtaactctgttcttgatgagacgccattttcactcttcgaagaaattcgaaaccaaatttttctaaatgataaaagcttttttttttagatcttgtgttttttgtgtgtttggaactgtgagttgtctccgactcgttagtcagagttatttatagcaagtcttggtcggcgagagaacaagataggtgttgcagtttcgcgacaggtgtgtaggtacgtgccccgattaggttgatgtgacgaagtttcgaaacttggagttatgtgcgagtgttaaagttaggtttctcgttttcatgatgacctatatctatgtgacacgtcatggtaaaaacggagctacggaagatgttagacacgtggtgactcacgttatcttgatattggatattcatctactcaaggcatatattatgcaaccgccattactgcatagatatttacttttttctaaaaagaaccaatacacaattcttacatggattcgaagtaattttaatatagctataaattcttgaaaatcgatcggatgagtttttattgtattcgttattgatatattactgataatatattttttgacaacaataaaaagtcataaataattgtcaccggaaaaaaaggtttaagatcttcctattgcctgtcatcctacttcacttcttgaccaagcaacgttagggtaataaatcctcaaactattcacctccacaaaaaattagccatgtcaatcgtcaatggtatgttattttccacgtgttagtgtaatgcttagatttaggattttactaaaatatacactttctaattatataaataccattataatgcatatcaaatcccttcaagtattctacaagcttacaatcttaattaattaagacatttcacagaacaaccaagaagatg

SEQ ID NO: 24955 - DNA, 3003 bp, Unknown; identical to SEQ ID NO: 24954
  misc_feature (1)..( 3003): 2750-1469P.txt file - cDNA_ID_2687424; gDNA_ID_1971898; Annot_ID_176908

SEQ ID NO: 24956 - DNA, 2516 bp, Unknown; identical to SEQ ID NO: 9985
  misc_feature (1)..( 2516): 2750-1469P.txt file - cDNA_ID_2687434; gDNA_ID_2096299; Annot_ID_195648

SEQ ID NO: 24957 - DNA, 3003 bp, Unknown
  misc_feature (1)..( 3003): 2750-1469P.txt file - cDNA_ID_2687434; gDNA_ID_1621109; Annot_ID_56073
aacaagccaattgctttaaaatgacagcatatgaaaaagaagaaccccatgatttgagagttattggtgattcatgtgttaaaaacttctctcccacgaaaatgatgtgtcaacctcatatttcctgctgatattcatgtgatttctcacgcaacacaacgtattaatcatagccgtgactagttggcatttaagaattatatcctttggaagatcttcgaatctacacgaaatgggattttaataattctacatatggatcacattcacctatatatatatagatatgctatgcattgagataaaacatgagatagggagagagtgtagtagagagaggggttaagaaatggagaaaagagtagagaagagaaggatagtgttggttccacttccattactaggacatttcactccgatgatgcaactcggccaagcccttatcttgaagggattctcaattatagttcctcagggagaattcaatcgagtaaactcttcgcagaagttccctggttttcaatttatcaccataccagattctgaactcgaggcaaatggaccagtcgggtctctaacacagctcaacaaaattatggaggcaagcttcaaggactgtataaggcagttgttgaaacaacaaggcaatgatattgcatgtatcatctacgacgagttcatgtatttttgtggagccgtagctgaggagttgaagcttcccaatttcatcttcagtactcaaactgctacacataaagtttgctgcaatgttttaagcaaacttaatgccaagaagtacttgatcgacatggaaggtatacaaaaactagcttattacccattatgcttactctccttatgttcaacataattttgttttgactttgcagagcatgacgtgcaaaacaaggtagtggaaaatatgcatccattaagatacaaagacttaccaactgcaacatttggagaactagaaccttttttggagctctgtagagatgtagtcaacaaaagaacagcctctgctgttatcatcaacaccgtgacctgtctagagagctcgtctctcacaaggctgcaacaagaactccaaattccggtgtatccattaggccctcttcacattacagattcatcgacaggatttactgtgctgcaagaggataggagctgcgttgaatggctgaacaagcagaaaccaaggtctgtcatatacataagtttaggaagcatggttctcatggaaaccaaggagatgttagagatggcttggggaatgttgaatagcaaccaacctttcttatgggtcatccgacctggatctgtctcaggctccgaggggatagagtcattgccagaggaagtcagtaagatggttttagagaaaggatacattgtgaaatgggcaccacaaatagaagtactaggacatccctcagtgggaggcttttggagccactgtggatggaactcaacactcgagagcattgtggaaggagttccaatgatttgcaggccttatcaaggcgagcagatgttaaatgcaatatatctagagagtgtatggagaatagggattcaggtaggaggtgaactggaaagaggagccgtcgagagagctgtgaagaggttgattgtggataaagaaggtgcaagcatgagggagagaacccttgttttaaaagagaagctcaaagcctctattagaggtggaggctcctcatgcaatgcattagatgagcttgtcaagcacttgaagacagagtgaagaattagaatgcaatgatttttttgttaaatggtttttttaaagagttaatgatgcatatttttcaaagtagatgattttctatgcgcaaataaaaaagttattggaaccagaggaaagatccaagcttttcaaattcaaggaacgtcattgttctaattcgtatttaacattcccaattatgtatagatcatcacaaaaattctatattgaccaaaatatgcgtttactctttcgaaaatgttagcttcttccttcgttgaaagttattgctttcaaaagatatatgaagaatacttaaaatggtatagcaaccctttgatgcaataattgaaaccaagattggagaaccatgcatttagccacttttgagaaaattttattatatttggagactagaaagtaaaacctcttagcatttttgttattattatctaaatctcaagacaaaacctacccaatggtgctcaaaaccaccaactcctatatctatctatatgagacaaaacaaaataaaacaagtttttcttggaattaatgtcatactctcagtaaatataaatgggattttaaccaaaaaaatactttttagtcaacagatttttaataataatttagatcacttatttagagttgttcagcaatgatgttatactaaccaataatcatggatgatgaagatgcaggtatgacttatgagtgataggtaaattttgtcaaagagaaattgaaagcctccgtaagaagtggagtctgagtgaaaacacggtgctaaactttgctaaagacagaataaatcaaatgaacttcatgtaacatataaaaacataagtaatagaccagctttgatttttatagatcaagcttgttcttgcaaaaattacaaaagtagatgctttgctatgcaaataaaaagctttcactttaattctcatacaaagagaaaatacgtaatggtttgagagttgttgatgtagcttgtgactttatcttcattaccacgtaattgatgtgtcaacctttatcttaacagctaaagtagttgacttgttggcatttaaaatctcttttagaagattatgttgaatagtcattggcgtgcgattattcttgctttgaaaaatgaacagttgactatagaaaatggtctcatttggaagattgtgggattttagttattacttggatcacgtataggattcagagacaagagaagagaaaagaggagagaaatg

SEQ ID NO: 24958 - DNA, 3003 bp, Unknown; identical to SEQ ID NO: 24957
  misc_feature (1)..( 3003): 2750-1469P.txt file - cDNA_ID_2687434; gDNA_ID_1621109; Annot_ID_171758

SEQ ID NO: 24959 - DNA, 3003 bp, Unknown; identical to SEQ ID NO: 21114
  misc_feature (1)..( 3003): 2750-1469P.txt file - cDNA_ID_2687499; gDNA_ID_1620745; Annot_ID_166639

SEQ ID NO: 24960 - DNA, 3003 bp, Unknown
  misc_feature (1)..( 3003): 2750-1469P.txt file - cDNA_ID_2687599; gDNA_ID_2214507; Annot_ID_133783
aaattgtttttaacagacctctgtaaaaatttaattagcgaccttttctatgctaaaatatttttcaagtgtttatatataatcaattgatatatcaaacagaatcaaaagcaagggttaatttgcaaaatggctaattttttttatagttgctaaaaatataattttaaataactaactaaaagcaaatgaaaaagtactttaatagttgaccttcaaaaatatttcatttaatattcacgtagagctactcgttttattcattggtaaaatttaagaaaacgtggtaacaaatgattttcttttttggaggctaatataataatgaatactattaagtacgagagaaaaaaaagattaggctaagaactaataataatggaatgatggaatataaaaattctattttgtttggatgatctaacctttcatttaacctaaatgggtgattttcttttctgtaatatatcacttttatattatatgattttaatgttaacagattttattaaatagagttgaagctatatgatttcaggatgccatatcatactaatattctacgtacaaaacaatttagcacagaaatagttttaccgaaaactaattgatggcaagaaatcacatgattattattttttgtaatttgttttgtatattttccattaatattttgctaattaactcagctaaaaatgtttcaaaaaatagatctgattatttggatgttggttttatatttccttgttataaaaacaaagaatatgacgaataaatttaactttttgaaatcctaaaaaaaaaagcatacacatttaaataaatacttttatgtatttacctatgaaagttaaattgattttgtctatcagatacataaatgatcaaataataaatgagaaaaacctgcccatatgtgccgatatatatccagttgaattaaaccatcatcttcttgtttctttgtttttaaaattctcttatgaaatcgatcttttagataaaatacaatcgaatttatggaagcaagaaaaaaaaattacgtaggggaggtgtattattgggggacccagcacgatcaaaaagtcaatattcatcagccaatttgctgaataaataaataaataaccttgaaaacaatttttggttaaattacaaaaataatgatatccacaaacatgtgaattgttccagcaattgctgaccttgccatgaggcaccttggaagagccattgcttcattacaatcctttaaagccataaatatgagattaggattaccaaaatttcacatataacaaattgttttatatcattactagcttaatatgtgttttattatagttttagatcgacgtcatctgaatattttcccccaaactcctaaattttataatctgtgtctaaacctaattttatatttcaaaacatccctttttctggaagaaacttgtcttttaattttttttttttttttcacacttgtcttttaatttccttaagagaccaaatcaagttaatttagtgtactcaccacctttaaaacaggtcaagttaatttatttgaacatcagtaataaatttatgaacatctcttttcaacatcggtattcttaaatagtgttttagaatcgtcattttaactttatgtttcactaaacttagaaaatatttagttttttttatctcaattagtaattatcatttaaatttttattttctcggtttctacttcgccactattatttaacatattattaaacaaattagtattatacgggttgattttaattttccaattacaaattaattaaaattcaactttttgattggttgtataatccgaaggaaaaatgtttacatacgaattgttttaaaaacactttgatttaaaagtccgacctaaacaatcaacatgaaaattaaacttatgagcaaattaggttgatctagaaaataacttttgcatttgtctcatagggaattataaagttagtatctacacacatatatcaaatatacatgttatatctatattactctctctctctctctctctctctctctatatatatatatatatatatatatgtatattcacaaatccatgtatgtattttaaattttgtttgttttttttttccttcaaaatgagtaacttatatagaagtcattaagattagctttgcacaactctttgggaacaaaaaagaacccaaattttaagcattattcaatgttcatataattattatgtatattatttttccttattgattatcaattttatatacacaaaaagatatcagtgaagaacttatgattgtgcatattttctgtccatacataaccacaatattaatcaaaaatttaaatttatcttagatatttttcttatgataattcaatactgtataattttttaaaatctatacattacagttttgtcttttaaatcatattctaatatgcataaatatctagaaaaatactaactccatagaattaaatttcttatgtaagtttagtatattatcctaaatttgtgttaatgttaagatttctactaaatttgatactcaaaagtaaaaagtttctcttaatagaaaaaaataaatatagattctcttacattacaggatcagagtataaaaccagtttaagtaaacaatgtttcaaaaaacagtatgatatctgaaattttaattataaaaccaaaaatccaaagtcaaatatacgttttccaagtgagaaaggacccataaacaattaacaaccattgatgatcaccaaatcataatcaacggtcgaaatgaatgaaaaataaaagtctgaaacggtggagagtttcgtcgttttgagtggttataaaaagagaaggcgtatatctcctctgcaacagaagctcgctttctctctctctctctcgtgtgtgtgtgtgtgatcgagtggtgaaacgacagagaggggcgtcgttttgttgatttcttctgggtgaagatg

SEQ ID NO: 24961 - DNA, 3003 bp, Unknown; identical to SEQ ID NO: 24960
  misc_feature (1)..( 3003): 2750-1469P.txt file - cDNA_ID_2687599; gDNA_ID_2214507; Annot_ID_184164

SEQ ID NO: 24962 - DNA, 3003 bp, Unknown
  misc_feature (1)..( 3003): 2750-1469P.txt file - cDNA_ID_2687670; gDNA_ID_1620518; Annot_ID_159366
ggctatcgccttgtagaaaagattttgagcattagtaagccaattaaagtaccaaataccaatgacagtaaatgctctaattcagtaatcttattcactttcacattgttttcatgatcatctggatgctaacagctagcacattcccttgtgtaggtttctttggtttgatataagtaaatcaaatgaaacagagaaacaaatgaaagattgattcgcaaagcaccacagcttcttctaatttcattcaaatcacaggggcttgttctccaaaggggtgaaggagaaattgccggagaatatggactctttatctgtgtatgacaaaaaagaaccatataagaaaaggcatgtctattcgaaatgcaaatgcgagtaacataatgaggcattccaactatagcgtcataggtacctgttaaagaaagagaaccaagttctctccggacatatcttgccattgcctgaaacacacaagcaatgtcttaacaagtttggtacacaatgcctaaactagtatgtcaatgtgtgtgtgtttgcgagagagatagagaggagaaaatcatgcctgtgctgtttttaaatctgtgttatcaggtgttgttgttccatcatcagaaaatacgttcctacaatccaattgcatataaggttctgagacaaatccgttatctatggctgccatattgtatataaattcaagccgagctacttagctgtgtaatctctaccgaactcattgcataaagcatgacgttatagaagctttacctccataatttgatttgtaggtcatttggtttagcttccggaagtagcgcagcatcataggcaacaacatttccataaaatattctctccaactccttcatccacttggctagcagcaagttaacctgtaatttcaagaaagattaagaccatcttattttaaggaatctaagaaactaagatatctcttcgaaactatattaaagcaaaaccaagtctagcacgtaccccggctttagataccctgagttcaacatcatgattgtagatctcatagacgtattgaccaaggtcaacaccttcctgtccatcttccttcaagcggcgtaaaacaagccacatatgaaggacaagcagcgaatacgttattttgaatgttttctccaagttgaatactgcagcagagacagagcacccgatatataaacaaagcacaaaatgtaaatacataactctgtttgcaaaagttgtgttggaaaccaaataaagtaccatcatatattgcaggtttatcaacttgtgcaatgatccgcttgtagatcacgttagccccacggatagacatgctctgtttgctatagaacatcatcatctttagtatgaaacgacgaatccctacatagtctggttcatcaattctgagaggagagtctttaggcagagccaatgaacatggctttgaccaaaacatcttatccaagtttatctgtcaaacatagaacaaatccttttcatcaaagaagacacgattgtccagaagcagttgactaaaagagcatgaatctaaatcacaaacatactaatgaaactccaacagaaaaaaagggatgaatcctaaatgaggtacaatggggaggcagaagtcactttagtcccgcattcgatgaaactagaaacagagagaatcaaattgagcttaggttcgaatactatagtgagacctaaacattcacaacaactacgcattaacagctacttctgaaaacgagatctttaatctgagtaaacaaaatgttaccactttaagatcataccggagatttactggggaaatccttctgcgacggaggatcagctgccgccggcgcaacagtcgcgtacccatatcgggagaaaaaggagagatttttcatcgatccattagtggtcaaagatcgaagctttgaggtttgagtgacgactcgagctaatctgggcaacattagagagaaacccttgtggttttactcaacagatgaataaatctgaagggagaaatttgaatgagtaagatcgaattctaaaaccctaggcgaaaaaccctctccgactccttttctgtgtgattgatgatggggctaggtagtcgtccacgttagcgtctatttggccagatattcaattacagtgctaacttacgccgttattaggaacggaaaaccttggttatgcaaaaacaaacacattttaccgatattggtgacacgaaactgatggtcgattttagatagtaagagttgatgataccataaaatatgtttgtttataccattatcattttagggggataaggaactatgactactttgtcatccatttttttggtggatctctaatttgaactcaagtggcttatattgaatagttaagaaattatgctttctcatggccattggggaatttagtttcaattagtgaaaagagttttaattagattttattgtgcaccgaattttactgatttaggacatggtttacgcttattttctcaagagcaaaaatatttacggtctcctcaacaatatcatcaatttacactttttattactcttcgaaacgcttcatctctctctttctctctctcaagctgtcaaagtcacctctgtattcgcgtgaagataatttctcacaattagggttttttttttcttctgagttaactgttccatctccatcctaatcttcaccttctccttgatttcgagatctctgtcaatttgttgaatctgttctttatctaattagctcaactccgagtctttgctggattttgaaggtcaccactgttcaagtttacattttttttcctgctaatcgcttgatacccgtttctgctgttgtgggatttattgggtttttcttctttacgatttttgttgcagcttttgtagctgaagcaaatttgtaatctgtgatggtgtatgcactgattctgggtatggtattgtactctaggatctcgtagcgagaatg

SEQ ID NO: 24963 - DNA, 3000 bp, Unknown
  misc_feature (1)..( 3000): 2750-1469P.txt file - cDNA_ID_2698044; gDNA_ID_2926150; Annot_ID_198024
taacaaacctgaaatatgatcaaaccaatgagaacaggctgtgtatcaaatccgaaactcctgaagagatcagtggagtttctgacaagagtgtatcctccaaattgtaagaaggcaaggatctgcaagcaaaacattgagagagggtcataagacatgatttcttaagtgaaatgtagatgtgagtaagtttttgaactgtcggttgagcctcacttgaactgcaatgaacgagtatgtagtgtgattcagtttccaatgtccaagctcgtgtgcaataaccgccacaatttcatcctcattcttgcactgcacaatagaagattatgttatgtttcagaaccagaaacagaaatgtgagtatagctcgtttgaagcatcaagagtcacagtacctgctgaatcaacgtatcataaagaacaatccttttgttcttaaagaaaccatacatgtaagcctgtatgatgtaacaagatacgtaagcttctaatggtaaactagagtaaagtaggtaggaagagatctcaagcttctcacattgctatggcttgaccttgtagatccatcgacaacaaacagcttcttcaaaggaaactttagagaagaagcaagtttctcaatcttctcccggaggtctccatctggaagctatagccataaaaaagcgggagattatattgtctggtaacaacatatgcaaacaagcagtgaattgtaaaatggccatgacagaaatacacacaggagtgaacttgttgaagagcggtgctatcaagaccgggtatatagtcatcatcactagagacaggataaacatgaatgcccacagatagatggcaagataaggacctcctttctggaaaaagatagaaacttcatgctcagagaagcaaattttaaatttttaacacgaaaactaaaaactttgaagctcacactcaatggagaatagtcatccatgtgaaaaactcagaaataagatgaatccagaatcatcaaacctggactatgaaaattatcgcagcaacaatgggtgggcctagtatgacagagaggaatgttcctttgatcatgtccctaatgaacatccatattgtttgctgtcaacagaatttagaagcaaatttaatccacatctctgataaaaaaacgtaagtcacaaggtagtgttggaaatacgacatactttgttgaacccatgccgagactcgatcacgaaagttgagtacaaagaaaatggcaaatcagtgatctgcatcagaatataaaagaaatattattatcttaagaaaatagatattttgatgctaaacgtataggactatatgaaggggtttatttggaacacctgtgaccatgtcataacaccagccaagaatgaaagagtatgcagtatttcattctctggatcaaggcccaacctcggtaaaacagctccagacatctaaggtaaaaatgaaaactttacaattgtaatgtaacaactctatattcaaaatgagatactgtataccgaaaccagatatgtaccttccaaaaccaaggcaagatcccaaagaacaaaattgcagagtccataagtatagttacaaactcatgaacaaagtgaaaatagctgcatatattaaagttctcagtgatgatatcccctggcaattataaaaaactaaaatgatataaatatgatcaagacgaaaccttttgtcaagactgtatgctcgtgatttctcaaacttctcttggctaattacaccaaccaaggttttcgggagagttggaagcttgagagcagtgagttgcctcagatccaaatacgtctcaaaaatgtacatcactatcataaaacctgtaagaaaaagaataaaacagaagatgaaatacgaatctactctaaatgccacaacaacagatactccatcactgaaaattcaataacatcatctacttttttgatcaaccagatataaaaagatctcttgtgctgactactgatggaaacattggagcactgaaagagttttgatgcaacattcacatacggttccacaacacaaaacccatttcaaaaaactccagaaaactctagttgcagtcacgaacataataataccctgacaagaaaacccaaaacctcaagctgtatgacttgaacaaagaaaaatttcaagattctcaatttccaatcgggaatgaggaaaaaaaagactccgacttttcttcccaaatcctagattttggttaacagagaagctccgtacattctaaaaccgaggaagagatgatgaaatcacataagctcaaatcaaatcaaacgcacgagtaagacaagaaactagtaggagtaataaaacctcagatcaaggtacgcactattagaaaagaacaaaatttagaaacgagaagcagagacgatggtatatgaaacaaacgagtcatggaatctcaacacacacaacacagaaagcaaaacccaaacaaaaacgaaatacgatgagtgaaacaggatagtaaaatgtctcagaaaaaggttttgaagcttacccacgacggtttccatgaaaggaatcgccatggctgagaaaagagtgacctgaaccgcgatgaaagcagaagcaaatcgaagaaagcagaagcaaatcgaagaaagcagaggaacgacaaaagagaggtttttcgtttttgactcttctcaggtcggtgtggatatgtaaaacaacaaaaacacgggtacgggttataccttagaagcccaaatagtaaacgggctgagatttaggcccatatgaaacaacccctatattttatctaaaatctctaagtataatagtatattatcaaatattggggccttagttgaaatattatgttttaaaggggctaaacggaaaactccttatcctcaaactgtcaacaaattacgaaggtgccattgggtttaatcaacaacgaacgccgagagctctcacttcacactttatccacttggagcttcgacaatg

SEQ ID NO: 24964 - DNA, 3003 bp, Unknown
  misc_feature (1)..( 3003): 2750-1469P.txt file - cDNA_ID_2698044; gDNA_ID_1621155; Annot_ID_56996
aaataacaaacctgaaatatgatcaaaccaatgagaacaggctgtgtatcaaatccgaaactcctgaagagatcagtggagtttctgacaagagtgtatcctccaaattgtaagaaggcaaggatctgcaagcaaaacattgagagagggtcataagacatgatttcttaagtgaaatgtagatgtgagtaagtttttgaactgtcggttgagcctcacttgaactgcaatgaacgagtatgtagtgtgattcagtttccaatgtccaagctcgtgtgcaataaccgccacaatttcatcctcattcttgcactgcacaatagaagattatgttatgtttcagaaccagaaacagaaatgtgagtatagctcgtttgaagcatcaagagtcacagtacctgctgaatcaacgtatcataaagaacaatccttttgttcttaaagaaaccatacatgtaagcctgtatgatgtaacaagatacgtaagcttctaatggtaaactagagtaaagtaggtaggaagagatctcaagcttctcacattgctatggcttgaccttgtagatccatcgacaacaaacagcttcttcaaaggaaactttagagaagaagcaagtttctcaatcttctcccggaggtctccatctggaagctatagccataaaaaagcgggagattatattgtctggtaacaacatatgcaaacaagcagtgaattgtaaaatggccatgacagaaatacacacaggagtgaacttgttgaagagcggtgctatcaagaccgggtatatagtcatcatcactagagacaggataaacatgaatgcccacagatagatggcaagataaggacctcctttctggaaaaagatagaaacttcatgctcagagaagcaaattttaaatttttaacacgaaaactaaaaactttgaagctcacactcaatggagaatagtcatccatgtgaaaaactcagaaataagatgaatccagaatcatcaaacctggactatgaaaattatcgcagcaacaatgggtgggcctagtatgacagagaggaatgttcctttgatcatgtccctaatgaacatccatattgtttgctgtcaacagaatttagaagcaaatttaatccacatctctgataaaaaaacgtaagtcacaaggtagtgttggaaatacgacatactttgttgaacccatgccgagactcgatcacgaaagttgagtacaaagaaaatggcaaatcagtgatctgcatcagaatataaaagaaatattattatcttaagaaaatagatattttgatgctaaacgtataggactatatgaaggggtttatttggaacacctgtgaccatgtcataacaccagccaagaatgaaagagtatgcagtatttcattctctggatcaaggcccaacctcggtaaaacagctccagacatctaaggtaaaaatgaaaactttacaattgtaatgtaacaactctatattcaaaatgagatactgtataccgaaaccagatatgtaccttccaaaaccaaggcaagatcccaaagaacaaaattgcagagtccataagtatagttacaaactcatgaacaaagtgaaaatagctgcatatattaaagttctcagtgatgatatcccctggcaattataaaaaactaaaatgatataaatatgatcaagacgaaaccttttgtcaagactgtatgctcgtgatttctcaaacttctcttggctaattacaccaaccaaggttttcgggagagttggaagcttgagagcagtgagttgcctcagatccaaatacgtctcaaaaatgtacatcactatcataaaacctgtaagaaaaagaataaaacagaagatgaaatacgaatctactctaaatgccacaacaacagatactccatcactgaaaattcaataacatcatctacttttttgatcaaccagatataaaaagatctcttgtgctgactactgatggaaacattggagcactgaaagagttttgatgcaacattcacatacggttccacaacacaaaacccatttcaaaaaactccagaaaactctagttgcagtcacgaacataataataccctgacaagaaaacccaaaacctcaagctgtatgacttgaacaaagaaaaatttcaagattctcaatttccaatcgggaatgaggaaaaaaaagactccgacttttcttcccaaatcctagattttggttaacagagaagctccgtacattctaaaaccgaggaagagatgatgaaatcacataagctcaaatcaaatcaaacgcacgagtaagacaagaaactagtaggagtaataaaacctcagatcaaggtacgcactattagaaaagaacaaaatttagaaacgagaagcagagacgatggtatatgaaacaaacgagtcatggaatctcaacacacacaacacagaaagcaaaacccaaacaaaaacgaaatacgatgagtgaaacaggatagtaaaatgtctcagaaaaaggttttgaagcttacccacgacggtttccatgaaaggaatcgccatggctgagaaaagagtgacctgaaccgcgatgaaagcagaagcaaatcgaagaaagcagaagcaaatcgaagaaagcagaggaacgacaaaagagaggtttttcgtttttgactcttctcaggtcggtgtggatatgtaaaacaacaaaaacacgggtacgggttataccttagaagcccaaatagtaaacgggctgagatttaggcccatatgaaacaacccctatattttatctaaaatctctaagtataatagtatattatcaaatattggggccttagttgaaatattatgttttaaaggggctaaacggaaaactccttatcctcaaactgtcaacaaattacgaaggtgccattgggtttaatcaacaacgaacgccgagagctctcacttcacactttatccacttggagcttcgacaatg

SEQ ID NO: 24965 - DNA, 3003 bp, Unknown; identical to SEQ ID NO: 24964
  misc_feature (1)..( 3003): 2750-1469P.txt file - cDNA_ID_2698044; gDNA_ID_1621155; Annot_ID_173456

SEQ ID NO: 24966 - DNA, 3000 bp, Unknown; identical to SEQ ID NO: 24963
  misc_feature (1)..( 3000): 2750-1469P.txt file - cDNA_ID_2698044; gDNA_ID_2926150; Annot_ID_139283

SEQ ID NO: 24967 - DNA, 3000 bp, Unknown; identical to SEQ ID NO: 6657
  misc_feature (1)..( 3000): 2750-1469P.txt file - cDNA_ID_2698142; gDNA_ID_1621100; Annot_ID_55831

SEQ ID NO: 24968 - DNA, 3000 bp, Unknown; identical to SEQ ID NO: 6657
  misc_feature (1)..( 3000): 2750-1469P.txt file - cDNA_ID_2698142; gDNA_ID_2926167; Annot_ID_139970

SEQ ID NO: 24969 - DNA, 3000 bp, Unknown
  misc_feature (1)..( 3000): 2750-1469P.txt file - cDNA_ID_2698142; gDNA_ID_2926168; Annot_ID_199251
tatacgtgagattcagtttctttctcatgcgtatgaggatcattttctgcataagatttgtatctagttttgaagcaggatcagcatgtttactggactgaataaattttcaatgtttcaggagaactatggtaaagccgaaccatcaaacgttgctaaggtgaaagctctctacaaagagcttgatctcgaggtttgccactaagcattaactcaaaccctttcgttagttagaccaagtagaataagagaacgtaattattgcttatgaaagtagagaacatgagagatgtgatatatatgtaacaaaatctgcgtttgatcttgattattccatagggagcgttcatggaatatgagaaggaaagctatgagaagctgacaaagttgatcgaagctcaccagagtaaagcaattcaagcagtgctaaaatctttcttggctaagatctacaagaggcagaagtagagacatactcgggcctctctccgttttattcttctgacatttatgtattggtgcatgacttcttttgccttagatcttatgttcccttccgaaaatagaatttgagattcttgttcatgcttatagtatagagacttagaaaatgtctatgtttcttttaatttctgaataaaaaatgtgcaatcagtgataaattgatacttgttaatgtggcaaaaattttgtgtcacatgagggtgcaacagaaatttggaaggacctgaggctgtttgagcttacatcaccttgcaaaatcgaaacagggtttggggaatctggtcctatgtcaaattagggaccattgttggagaagaagaattttcaaggacatgtgtaacagatagctccaggaagcacttaagaagttacaatagataaagacgagaagattagtggaaatgaatctatagtgatgatcacaatctaattgatgataaccgatttgagtctcatcttagacagtacattgacaacaaaggtaccatagttttagtggttctgattttctaatatagaccccaagaagatattacagagataacactggttcagcttttcagcttaacaataaaatacatctgaccctatatttatgcaatttctccgtcctatatctactatatcgctaaataatgtaacactgaaaaatttccctaatctacattgtgagagtccagatcaatagtccaatgcaaatgtggtagatagaccaccttgccattggctcagtacttgacgataagcctatatcagtaacacccacaagaaatcgacagtcaccaactgaaggatctaggaaggtgaccatgccaagtccatcaaagtcacagctcttttcatgttgcatctgcatctgatagtaactgttgaaagcgtatgagatattatctttttcaccaagctggctgcacgagcccccgtcgttgagcgttgtgcaatctgcttcactgcaagcaagcctgaggtggtcaccaacttgggtcatgtctcttgatgggtgagccacacaccaccttgaaggaaggtactgcacattttttgcattcttgagtcctctgttgcctagtcctaagttgagacgatacttggcctgtccatcgaaagagaagattccccaatgcctctcaaagttaccaggcagtgtgcttttcgctccttcgtcaagcaaaccgaaaagatatacatccgcaggaggagatccaggcctgagcggtgttcctttgttgctcaacacatggctaatgagcccttgattaaaaacccgggctgctgtgagattagcaccaactgctccatctgtaggccaaccaatctcaccaataactataggcatttgaccatatccaagcttggtgagagcagcaacaagagtgtcaaagttcccatcaaatgcattatagtaagtgttaggcccatccggaaccggatgactactcccctcaaaaaaggcatagtcttgtggaaaatccgagttcccatagagactaaggaaaggatagatattaaccacaaaaggagagccattggagttgagaaacgaaaccaattgagtcataatctgtgtaagctcaggccggaacatcccctgagagggaacattagactgatacgcatctgcgttgcaaggaaccaccaacttcacatagctagctagatttgctctaaccaaagattgttgcaggttaaccatagttgggactacatagttctgaaactgaccaccgtaaccagtcagaaacggctcattccctactgcaacatacctattcaacagatatattggtaaaatcctctgcttaatcatagcttaaagacacatatactctgagagaaaagatacctaatatcagcaccgtttttgcctatgaagcgagagagattttgctggacaaacaaatcagaattgaaagttgagagcatctcgttaggaatgccgatcattacttggattccagtacccattaacgctcgaagcgcatctggattcgcatcgaaaagcttcaccttggtgatcttgtttgctttgaggagatccaccactgtggaaggtctcatcttgtgaaatgacaacgttccccagttcacgccgattgcagattccacctcatgggagacgagaagaagggagagggcaaagagagctacacctacaccgcttcccatctttttcactgagctctctctcgggtgcaaagatagcaactttttaaaggttacagctttatttttataaacagactgcatgtcgttttctatttaaataaacgtcaagcagtgcggttactaaataggaaacgacatagagattgaaatttggcgacaatacaggttgatgcatcgctggatttgctggaaaacaaaccgtcaatctccgtctttatagagaaaaaaagattctcttctcttctcgttctcatcatcgtcttaaagaaggaattcgatttttcgcctgaacctgcggatttttcgattcttcaaattcaatgtcttatg

SEQ ID NO: 24970 - DNA, 3000 bp, Unknown; identical to SEQ ID NO: 14311
  misc_feature (1)..( 3000): 2750-1469P.txt file - cDNA_ID_2701811; gDNA_ID_2684104; Annot_ID_190359

SEQ ID NO: 24971 - DNA, 3000 bp, Unknown; identical to SEQ ID NO: 14311
  misc_feature (1)..( 3000): 2750-1469P.txt file - cDNA_ID_2701811; gDNA_ID_2684104; Annot_ID_137117

SEQ ID NO: 24972 - DNA, 3000 bp, Unknown; identical to SEQ ID NO: 10475
  misc_feature (1)..( 3000): 2750-1469P.txt file - cDNA_ID_2701832; gDNA_ID_2213653; Annot_ID_132486

SEQ ID NO: 24973 - DNA, 3000 bp, Unknown; identical to SEQ ID NO: 10475
  misc_feature (1)..( 3000): 2750-1469P.txt file - cDNA_ID_2701832; gDNA_ID_2213653; Annot_ID_181652

SEQ ID NO: 24974 - DNA, 3000 bp, Unknown; identical to SEQ ID NO: 14338
  misc_feature (1)..( 3000): 2750-1469P.txt file - cDNA_ID_2701843; gDNA_ID_2684110; Annot_ID_190588

SEQ ID NO: 24975 - DNA, 3000 bp, Unknown; identical to SEQ ID NO: 14338
  misc_feature (1)..( 3000): 2750-1469P.txt file - cDNA_ID_2701843; gDNA_ID_2684110; Annot_ID_137139

SEQ ID NO: 24976 - DNA, 926 bp, Unknown; identical to SEQ ID NO: 11177
  misc_feature (1)..( 926): 2750-1469P.txt file - cDNA_ID_2701871; gDNA_ID_2214482; Annot_ID_133298

SEQ ID NO: 24977 - DNA, 926 bp, Unknown; identical to SEQ ID NO: 11177
  misc_feature (1)..( 926): 2750-1469P.txt file - cDNA_ID_2701871; gDNA_ID_2214482; Annot_ID_183402

SEQ ID NO: 24978 - DNA, 3000 bp, Unknown; identical to SEQ ID NO: 11174
  misc_feature (1)..( 3000): 2750-1469P.txt file - cDNA_ID_2701875; gDNA_ID_2214482; Annot_ID_133280

SEQ ID NO: 24979 - DNA, 3003 bp, Unknown
  misc_feature (1)..( 3003): 2750-1469P.txt file - cDNA_ID_2701887; gDNA_ID_2214482; Annot_ID_133293
tcgagactatttggatattgtaattttcactaagttatctgagtaagaagaaccatatcgtttcatttcctatctatttattaaggttcaacttttgagctattgactggtaatggaaaatgtttgagaaagaagaaaacttggagacttcaaacccattccggttaattttcatcgttgatctgacatggtaaatactgaataaagcacatgcacactgtgacacctctactttaaaaagtaccaaatagataaactgactagaagattattttcttgtgatgcaagtaagaaacaaactcaaccaatcgaccttactaaagtatactcttctataaaataaagaaatttcttctcccccgtatgtaaattgaaatcaccagatggaagtcttggtatagagatatatcgatctgataatcttatcacggaagaagactttggtctcgattgcatatctctcacgtacgactctcgtttgtatgaatagaaagaacaaagacacacacaatttaacgagttcccaaggtcaaaccgatccttggtacatctcggctaggctttgccatagcaaattcactatccagttttttttttcttttttttatacatatgtacacaagagagatagagagaggattaggtcaaaagaagcttcgagaaacttggaatcaacgacctagatatctccttgttgtcttctgttgttggcgatggaagtccttgtgtaataaaaggatgtttcaagagctcagtcgcggtgggcctgcgtgaacgcatgtcatcgcatcgccttaagaaatcttgagcctgcggagagataacgtcacgcaaatgccatacgtaaaattcgtcaaagtactcctggataggtatagctccaaacatctcattaaccacacaccctagagaatatatatcaagggctggatcgatatgtcccggatcgatcagtccgtttggtacaaaagagtccgggggcatgtactcaacagtaccaagggacgtaggatcatgatcggtgtcaggctctttggatgaaccgaaatcagcaagcttgagatcccacggctctccaggagttgtggaagggaagaggagaacgttggatggcttgaggtcgcagtaaacgtaaccatgggagtgaagagcctcgagtccttctaggatcatacgagccgtgcgactgaccaaagactcaggtatcggctcttctttccgacggaaaccatatataaacctatggagattacctttggaggcgtactccatatagatgtagcaatattcgtagggttggatttgtaagtgaagcttgtttgaggcttggacgatgcgaggatgatcacggaaacgatgcatgatcctgagctccttctcgagaatctttttgagatgcatcggcgatgacttctttgcgtaaagtcgggagttggagtccttctcgagagagacgtaaccgaagttccctcggccaagagaagagagcttcgtcaacgaagactcgtccacaatccaatcatcatctctgcaaatttgttccatcatcatagtgaagcttttacgtattcgattgtctttaggttttcatcagtctctctatacctatatatatatattttctgtaggtcggtgcgtggttcgttttttcagttggagctaggacagattttccttttccaattaagaatctgaaatatcgtatacacgctttagttaaactatatcctcaacttatttaatatttatattatttaatgctaaaaatgaaaatttattataaattacaaattctaaatgttaaaagatttacactattatttattcaaaatgtgtatacaagaaatataaccaaccaataaatatagacaaattaaaagtaacataatttgttagcacaataatatatgaatattaaaaagcacatattgatcttaaatattcctaaatataaaaagaaactgaaataaataaacaaaactttctattaattttaatattttttcattttatgattagtgatttttcgtattattttaaattttacttttagaaagaaaagtaattgtaatcctagattcattggaatcgagtagatttttttagtaaatacatcatcaattattgttgatatatgatatattttctattcgaatatattttgagtcaataatattagttgttaaaacaattatgcaaaagtgaagtaaaaagatatatgtgtttatatatatatggggtaggaaaataaaaactttcaacaattaaattcgatatatatgttatttttttcacttgatattacttttttcccataagactaaaggaagactgataaattgatttcttaaaattttatttaaatgaaaccaaataaccaataatccaatattcaccaaattaagtttcctttttcgtattattttaattatgatagcttaatgatatcaattgttaatttttatttaaatttcctatcaaacggataaaagattacgaagtaggattatgttaaaagacaaattgaagattataatggatttttaaaggttataagattactttgttaatatttaagatttggggacaatttggaatatttagtatttgttttaagaaaataaaagattttggccaatttttcctaatgtcaatttagtatttttgtaccggctaaataatctttcgtgtagacaaaaatcaactctgaataaaataataataaacccaccagccgttaaaaaagggtgaaaaacatagtggagccctatccttctctctctctctcgtagccctcctctgttccatcttcttgctccgccgatctccctctgctctttcttcttcttcttcttcttcaattctgtttttatttatttctttataaaccttctctcttaaaacccaaattcaaaaaaatcaaacgaagaaaaatctccgagttagaatcgtccataatcttgagactaagtgagaaatagtatccaaggtgatcaaacaatg

SEQ ID NO: 24980 - DNA, 3000 bp, Unknown; identical to SEQ ID NO: 11190
  misc_feature (1)..( 3000): 2750-1469P.txt file - cDNA_ID_2701895; gDNA_ID_2214482; Annot_ID_133296

SEQ ID NO: 24981 - DNA, 3000 bp, Unknown
  misc_feature (1)..( 3000): 2750-1469P.txt file - cDNA_ID_2701898; gDNA_ID_2214694; Annot_ID_136765
tttgagatgtcatcttcttcaatacttacaggatccaaagagaagtgtttgcagagagctgaaagaatcatctgcttcgcctttgaatccatcgtcaacttcttctctttctctattttcgaaattttgttcttctctttggggctcttcgctgtaagaaaacacactgcaatttcttcgatagggtttttgcttgatgtaactaacggtcctaacggacttccaactaacggcgttatctccatctataatgggcctagatatattagcagcccattaatatgttcttactatgggctttaccaccgaaagcaatcattaataaaataaaataaatgaattaacttctcagattcttcaaagacctagagtgtcttcgtcttcgacgacggcaaattcgtggaagctgtttcatcgattccggcttcactgaagcggcgtcgctcgacgtttattattccgacgactaggcctttgaggcagtttctgattaacttcaggcgataatggcaaacagaacagatccgttggcaaagaatataagaggaacgaatccgcagaatctggtagagaagattgtgcgaacgaagatttatcagcacaccttttggaaggagcagtgctttggtctcacggcggagacattggtggacaaagctatggagctcgaccatctaggtggtacctttggtggtagccgcaagcctactccgttcctttgcctcatattgaagatgcttcaaatccagcctgagaaggaaattgtcgtggagttcataaaaaatgatgactacaagtaagatttctaaccaaaagcttatttctgcgtaatctagattggatactgctattagccttgtcgtagttgtttctcaagtatacaggtatggaatgtctctcaaatctattggtcttagataatctactctcttagtttctgcagatatttgttcttgaattactgaaatatttactcttttggtttctgcagatatgttcgtattcttggtgcgttctatctgcgtctcactgggactgatgttgatgtctatcgctacctcgaacctctctacaatgactaccggaaagtgagacaaaagttatctgatgggagtaagtttcattttctttcgatggatccgttgtgtttaacttttgattgatttgttcactaactagatttatttctttggtttggaatagagttttcgctgacacatgtggacgaagtcattgaggaacttctaaccaaggattattcttgtgatattgcaatgccacgtttgaagaaaaggtttcttcttttgcatttgtctgaagctgaataattagtttttggtttctgcagtattttaagatggttaatttttcactctgatgataggtggacgcttgaacagaatggtttattagagccaaggaaaagtgttttggaagacgactttgaagaagaggaagaaaaggaggagaatgaagggattgctgatggatctgaagatgagatggtcagtgctttcattctgcaatagtttttatgtgatctgttttctgtttctatctagcagctctaagatgataccatcttcctcctcttttacaggatcagcgccgtaagagtcctgaaagagaaagagaaagagacagagacaggagacgcgacagtcatagacacaggtatctgaatccgtgacctttactagatacatttctatgctagttaacatttttcaaaaaaaaattctttgtgattgtggaagctgtttgatctagctaatgctcttgcatcatgtctagtactctgtcttttgagtgtctgtttccactatggcatctcaagccatcagcggttggatacagcttccgaaattaaatttgtagagatccttccaggtttctctgtactgacagtgttcagagagaagtattatggatcagacattattacaatccttaccctgatacagtatatggtagttgtcattgtgttactttgaaaaagatcagttaatcatgagagcacttcccatctagtttttagctcaatcaatgttttctttttgttacagattttcattatgattgatgttgagacttgagctcattgtttcatgaattataatttgaccatggttctgtgattggcagggatcgtgattatgacagagactatgatatggatcgagatcatgacagagactatgaaagagaacgtgggcatggtcgagaccgggatagggagagagacagggatcactatagagagcgagatagggacagggaaagaggcagagatagagaacgagacagaagagacagggcaaggcgcagaagtagaagcaggagtagggatcgtaagagacatgaaactgatgatgtgcgggatcgggaagaacctaagaaaaagaaagaaaagaaggagaagatgaaggaagatggaaccgatcatccaaatcctgaaattgcagagatgaatagactgagagcatcactgggaatgaaacccctcagggactgaactgtgaaatgaggacatctttatcaaaccgaaacttggttcatttgcccagctaaaccggttactacactgtgatcctactcactatagttttggtttttttgagtttacctgatccctctttaatgtagaacaaaatggagaatctgtaatggcattgtactgtatgttctctaaaccgtaaacgaattgtggtcgagaaattctgaatgtaacccggttcttgatattagttgtttttaaggtaattcagataaatataaaaacctatatgttatgtctacgtggcgatatcactttatgagtccatgtaaatcggacccaccaaaagcttataggtaaatgatacggtttcataatcattaaccatcacgacgcgcgtgctactcatgtcccacttacgacgacgtcgttttaaactctctctctgtgctcttccagtctctatcgatcgccttctgaattttccggcggaaaagcaaatg

SEQ ID NO: 24982 - DNA, 3003 bp, Unknown
  misc_feature (1)..( 3003): 2750-1469P.txt file - cDNA_ID_2701901; gDNA_ID_2214483; Annot_ID_133305
aaattccattcggaaatagagaggtaatttcttcataaagctgtacccttttgatttcattggttgtttcatctggtcaaatttgaattcggagatgattggtaggatttgagacctttcgctctatagtagagaagcaaagctcgctgctttagatgtatgtgttgaacttgttttagcttcttcttaagtttttcatctttttctttctttttgtctactgtgtagattttagttgagactggtctcatggggagacaagcaagttctgcagtcacggtgacagatggagaaactgtaagtgtgctgtttcattcaatttccaaaactttcaactttttttcttagttcctcgagtttgtattcttcagtttagcttctgttacatgcttatctcttaatcggctttgtttcattatctaatctgtctacttgtcattgtagattgtcttcacatccgtttgtctagctgatgttccgagtgagccatcagattttcttcccctttatgttcactatcaggagcgattctcagctgtaggtcgaactaggtaagcgtttttcaattttggagtctcttgctgtaagaagaccatgtcattgcctaaatgatgatctaaatggaccttcttgtggtacagtggtggattttttaagcgagaagggagaaccaaagatcacgaggtatgtactaatgctgtttttggtttcgtctatttcgccatccttcttaacatgttgatttttatgcaggttctgatttgtaggttacttttctttgccttcctgcagcctcctacatcaccggacaggaagagctaaaagcatgcttaaatgattggaaatccaatggtttagtggtgtctggtttggttagagatcagagggagaagttgattcaggaagtgtcttccacgttcagtggcaagctcaacattcttgtaagttcccttctcctgcaaaatgcttgttaaaactgactctagttttttctcagcattgtgatcagaatcgtcattgatcttgaaatagtttattgcattagctctgcatccttataagtttattcagagagacgggagtcgccattagctcaaggatcagggaataatatgggtggttctgtgatgaatggtaatactcctccatcactagactgtcttttatctccaaaatccaaatggatcctcttaattaatgatgagtttctacatcatgaaaattgatcatgtcatggtgtttccagctaatgaatctgtttcacctgtaacctcttccccggttataacttcaacaccgttggaacatacagaggctggaactaaaggaaagacggtccccaagaagacacttcagccaatggaaatgaatcaactcgagagaaggtatcactttaacataattgtcattatttttatttaactctgagatggttcttctttgtgtttaacactaatatgcacagatgcgtgagaagcattatagtgaagataacagtcgtaagaggaaaagaggagaactggagcataattcggacctcaacgagactggtatgtcttaactctcattcgaccttctgaaattcatgatcagcttgcaatgttacaaaggctgagttccattatacgagtaataaatattactatactaaagcaatttcattaattatcttgttaatttgtgcatgcgttgatctccagtgctaccctctgattggactcccgatcctgtgaagaattttgctgctgatgatgatgatgaggaaaccaaagcaaaggatgcaacaatggttctgccttttgtgaagaagtcaccggtttggaagatatatgaatcaatggaggtcttcaaaagagtaccacaaagtcctcatttcagcccattgtttgaagcaaaagaagatttccgtgaaggttttgctttgggtatgatggtgactttttctggggtattagaaaaagtagaagatctgaaaaccgacgttcccatacgccaactaaatagccttaaagactcatttaccgagctagagaagcatggattcacggtcacagcgcctttatctcggatcgccaagctgttagctctcaaagatagacaactaaaaatattggaggaactaaaagttttcgacaaagagatgaaagatgaatctagcaaaaagcataaagctgagcaagagtttggtgagatggaacgcaagattcttgaagtgaaaaacaaggttctggagctgcagaagcaagaagcggctctggaaaaacagaaggatgcaacctatgaaaagatatgtaaaatggagtcacgtgcaagagatcttggtgtagagcttgaagatgtggagtgagttggagacaattctgtcagctccctggtaagttaagaaaaaaaacaaaactataatgatctattctgactcaaaagatttatctgagttcgttgttcgttataggttatgatgtttagcttttaatcttgaagccattagcttaacttcattttcctttttgtggatttcaggtgaaaaaacaaaacaaagaaggaacaaaagcgtaaagggtttataggatcaagatcagagtcaaggagagaagctgacgtggcaaagacttgtgagtgattaagtcaaagagagaagctgacgtggcaaagaaaaatgaagactgaataattaattaattaatatcagtgagagcagataaaaacaattaattaagatgggctcgttaatttaggcccaatagatttctttgtaactttcatcgcgccaaaaaaatgaagaattattcattaatataaagtaattaattaaggagtatgatatgacgacttctcagattcctatgtaaagctaatccattttcagaaacagagtttgggtttctctccgctttagggttttctgtggaagaagaaaaaggcgggggttttctctctctttgttctgaggtttttttttttttaatgtaatcagagtaacgacattggtagtatctggggatg

SEQ ID NO: 24983 - DNA, 3003 bp, Unknown
  misc_feature (1)..( 3003): 2750-1469P.txt file - cDNA_ID_2701901; gDNA_ID_2214483; Annot_ID_183421
ttggtttcgtctatttcgccatccttcttaacatgttgatttttatgcaggttctgatttgtaggttacttttctttgccttcctgcagcctcctacatcaccggacaggaagagctaaaagcatgcttaaatgattggaaatccaatggtttagtggtgtctggtttggttagagatcagagggagaagttgattcaggaagtgtcttccacgttcagtggcaagctcaacattcttgtaagttcccttctcctgcaaaatgcttgttaaaactgactctagttttttctcagcattgtgatcagaatcgtcattgatcttgaaatagtttattgcattagctctgcatccttataagtttattcagagagacgggagtcgccattagctcaaggatcagggaataatatgggtggttctgtgatgaatggtaatactcctccatcactagactgtcttttatctccaaaatccaaatggatcctcttaattaatgatgagtttctacatcatgaaaattgatcatgtcatggtgtttccagctaatgaatctgtttcacctgtaacctcttccccggttataacttcaacaccgttggaacatacagaggctggaactaaaggaaagacggtccccaagaagacacttcagccaatggaaatgaatcaactcgagagaaggtatcactttaacataattgtcattatttttatttaactctgagatggttcttctttgtgtttaacactaatatgcacagatgcgtgagaagcattatagtgaagataacagtcgtaagaggaaaagaggagaactggagcataattcggacctcaacgagactggtatgtcttaactctcattcgaccttctgaaattcatgatcagcttgcaatgttacaaaggctgagttccattatacgagtaataaatattactatactaaagcaatttcattaattatcttgttaatttgtgcatgcgttgatctccagtgctaccctctgattggactcccgatcctgtgaagaattttgctgctgatgatgatgatgaggaaaccaaagcaaaggatgcaacaatggttctgccttttgtgaagaagtcaccggtttggaagatatatgaatcaatggaggtcttcaaaagagtaccacaaagtcctcatttcagcccattgtttgaagcaaaagaagatttccgtgaaggttttgctttgggtatgatggtgactttttctggggtattagaaaaagtagaagatctgaaaaccgacgttcccatacgccaactaaatagccttaaagactcatttaccgagctagagaagcatggattcacggtcacagcgcctttatctcggatcgccaagctgttagctctcaaagatagacaactaaaaatattggaggaactaaaagttttcgacaaagagatgaaagatgaatctagcaaaaagcataaagctgagcaagagtttggtgagatggaacgcaagattcttgaagtgaaaaacaaggttctggagctgcagaagcaagaagcggctctggaaaaacagaaggatgcaacctatgaaaagatatgtaaaatggagtcacgtgcaagagatcttggtgtagagcttgaagatgtggagtgagttggagacaattctgtcagctccctggtaagttaagaaaaaaaacaaaactataatgatctattctgactcaaaagatttatctgagttcgttgttcgttataggttatgatgtttagcttttaatcttgaagccattagcttaacttcattttcctttttgtggatttcaggtgaaaaaacaaaacaaagaaggaacaaaagcgtaaagggtttataggatcaagatcagagtcaaggagagaagctgacgtggcaaagacttgtgagtgattaagtcaaagagagaagctgacgtggcaaagaaaaatgaagactgaataattaattaattaatatcagtgagagcagataaaaacaattaattaagatgggctcgttaatttaggcccaatagatttctttgtaactttcatcgcgccaaaaaaatgaagaattattcattaatataaagtaattaattaaggagtatgatatgacgacttctcagattcctatgtaaagctaatccattttcagaaacagagtttgggtttctctccgctttagggttttctgtggaagaagaaaaaggcgggggttttctctctctttgttctgaggtttttttttttttaatgtaatcagagtaacgacattggtagtatctggggatggaggaaacgattaggaaaggttctgaagtggaagtgtcttctacagaagaaggttttgcagatgcatggttcagaggtatcctccaagaaaatcctaccaaatcaggtcgcaaaaagctccgtgttcgttacttgactctgttaaacgacgacgctttgtctcctcttatcgagaacattgaaccgaggtttattcgaccggttccgccggagaatgaatacaacggtatcgttttggaggaaggaacggtggttgatgctgaccacaaagacggatggtggaccggtgtcattattaagaaattggagaatggcaagttttgggtttattatgattctccacctgacattattgagttcgagagaaaccaattgagacctcatttgcgctggtccggttggaaatggctccgaccagatattcaggtacgaggttgatgtaatccaagttgggttttttttttccttaattttgttgctttgttactaaagattgaaacttttatctgttgcatgttgtgatccattattaaatccgtttttttttcatgcttggagctgtctctgttttgttgcatgctatgttttgattgaaatggttaaaggcttgatctttgactttgattcttagtgtagactttgatgtttctgattgttttccttgaaggaattggataagtccatgtttagctccgggacaatg

SEQ ID NO: 24984 - DNA, 3003 bp, Unknown
  misc_feature (1)..( 3003): 2750-1469P.txt file - cDNA_ID_2701905; gDNA_ID_2214483; Annot_ID_133304
cttcttctctttcccttttctacttggttatccagtttatctgattatttctggtgaatctgtcaaattttcagcttcatgtatacttgagaacctatggacttgaacaaatggtccaagctgcaagctctgctgttggtcttcgaacgatcaagcgggttgagcagactctgcaagatctcggggtttgtctttgcttcttgttctgtttaactctttctatttgtctatctcatttgcttatctttccccattgattgatgatgagacttaactaatgttataaaaggcacccgtactgaagctagctttgaatgtgttctatgtaattagttgggattttggttcgggtagaggctagtaggttcttgtcagtttatttgattgtagccactcttaagatttactaaatggattttttgagtatatagagttttctgtttacaggttaatttaaagccaaaggttcctaccaaaactgtatgcgatgagcatcttgagctaagaaaagaaatattaacactactgaatcttcagaagcaggtaaaccatacaatacaagtcttatctcacatagattcacaaatatacagctatttgtttatttaacttgttgccaaaacatggtggggtcgtaacttcagctgcaatataaggaatcagaaggttcatcacatcgtgaagggtcgtatgccgcaatgccagacactccaaaggtgagcaacaaactttgtttattggttctcgctacagtttcatcttcctgttgatctctttaatttctatatatatttgatcaggatcgtgttttcgcaccggacccattcagttttggaggtacattatttccttatcttgttggtttcagcattgtatgcactacttaaccatctctaagttcattttgtgtgtttatttcagctgaaagaccaatcaagaaggaacaaaaacgcaaggtggtgcacatcagagtttgctcttctttatttttcgtaccaattcctccgaaaatcctttgcatctacatgtaaaacttgaatcttaattaaaatatgtttgggaatcctgcagggtcctggaagacaagcagatactccttcaccagctcataagcgtccgagaaagttgaaagcctctgatctctaaaatctctctactcggtgcatactgactcgcaatttcatgtgtatgtatttgcctttttccggtgatttccgcaatgttttcagttcttaaattatttctgatctctaaaatctctctacttgtactcagacaccgcactatcttgtcaagccaattagagaaattgagaaaatgttgcacattatatttatgactagtaagaattattacatctaaagacattttcgaaaatgttaaattacaaatggttgattggtatgataaagaaaagaataaaaattaattagatagaagagagagtaaactatcgaaataagaaacacaatatcaggaggtggaaggcgaggagacacattcataagaatgtagataacagggagcttgaggtgggtagagacagagaagaagacagttgacaacaattgttgagtcttgaaggagtctcgctacatacatgtaaagaaaaacaaggattactactttatttcttcaaacttatagattcttctattgataggcaaaaatcttagcttcaatgtgtttatatgtatgccaaaactccaaccaaagaaagaatgtccatactttttctctcaacttagcaataagtcccattatacagtgggatttaagattactgaaattttcaacacttagaaatcttgagtttttagtatactaccaattagaccaaaaaataactaaatttgttccacatgtgacagaggtatactagttattataatcaatatcattatcaatattaagcacaactacattcgaatgactaacagagattcctacgaaaaaacaataatctgaagcaatagaagtaagagaagcaactatacatttggaatcgaatagccgatatgggaatccgccacagattctggagaagaatttgcagtttgtcggagagagcttttgattgaagaaatcagacaaaagttttggaggagagatctcgaaccggaacaaaaagtttacattagtattgaaattagaactaatttgcggttcggtttacactgggctaaagaggaaaaaaaaaaattcacgcgatggtgattttgaagacaactgcgttgataaaaaaaggcatgatttcaaaaggtgaacccctacagaattgctctcacgctctcaacgcgcactttgtgcgagtagatctgaaatacagccttgtgattggctaaaaaactctaaaaaaatagaaatagtagacatgttgctagcttatgttattatttagcttttctacaaaacgccgtcgttttttatttcgatcgtttcagcttttggcattgatccgaaccaatcggttcaactggctaagtctatccacaggtttgtataaaaaatctcatttggtcatgaaattaagcactaaatttatattaattaatcatttaatgcttatagacaaattctatttcatatttctaacgaatcagacctaattgtacgaaataaattattggttctgaaaatatcaattgggaaattaaaacccggttcaatttgaaaccggaaacaagactagctacgcctggaaactctcacacagagtcacaggagaagctcccgcgtctgcaaggaacggataaagtctctctctttctcactctctctcaatgaagaagaagatgctgacgagtcccagtaacgcacttcacagtagtactccacagttctggccagttcgccggagcagactttgccgttcccggaatttccctcgttttcactccggcgaacgcagcagcggcggaggaggaaaattgtgctcgctctctcttctctccggaagtggcgccagtaaattcagtgtcagagctctagttaggcctgatg

SEQ ID NO: 24985 - DNA, 3003 bp, Unknown
  misc_feature (1)..( 3003): 2750-1469P.txt file - cDNA_ID_2701913; gDNA_ID_2214483; Annot_ID_133301
gatcggtcaataagggatataaatacaagatgatttaatattcattagccatcttcctttttagagagtcttatctattgccctataatatttgatttaaactgtttactaagattttgcgattgaccttatagagattttttgttggaggctttatgtgttatgtcgcatcaaatcggaattagacataaccagatgacaaaaaagagagcctttgcgtatgaatatgacagaattttgagcgtgtaagttaaaaagacgagattgtgggttctacttttggtagttctgctgattttgatagatcgcaaacgtctttttatgttgatttttcatctttttgttgattatttatctctttctttttgtgctttcctttttaaaactatagatctacttgtccggtgagacgatcgtatatataggatagtacacgttttggcatcaaacttgatttcctattctcgccaagcagttttaatttcttgtcttatcaaacaggctttaagattgttcttgagtaatatgcaatttagcagtagaaaaaaacagtgaaatattccttcaactcataaatcaatataattgacacaaaagaccggtcttatttcatgtcaatagaaaatggtattttctctcgtggtttgttacttttctgttcttataaggctaacctctagtggggatgcaaagttctagatttagacttgttcgttagatgactaggtggttagaatttagattcgcgtcgttgtttactgtgttcgggataatcgtttttagttgggatttgtcttcgcgggttcatctatcctttgctctactctgtttgtggttaaagattctctagtccgcgatcttcgagctcttatttccgcgagttttgctctcctccgactttcatgttgatctcatgagcttatcttcttgattttagtatattttcttgtggtcccatgtatcgggcttttgttttcggggatttctttattttctgccggctatgttgtacgaaaacgcattccaaaactgtatttcacccatgtattatataatgaaaatctttcagttaaaaaaaaaaaaaaaaaaaaaaaaaactagcttatttgggttgtcgtctatatcacatatctaatcgatgtaacaattcactgaatcgggtgttacaaataacatttgttttcttcactaaaagtataagatactggtacaacgcgaaatctaacctatattcgaatcaaatgacacgtcatcacttgggtgtctatttgtccacagttgaaagttataagaagcagacaagtgtctcataaagacatcgagatctgattcggttctcaggtacatacagttaatcgggagtgttgctttcccctagaactatggaggctactatttaagtgtcgttgtgtaacaaaaatcctgtgtttacttgcattacttaaactcctttactttaatagttttatatatgttttcgacctccctttttcgacggagtggatcgctatgacatgtaggcatctgattgtatttgctaatctgtttttgttagtatgttaaatttttaacccaatatatgtttatagtgcttatatattcttactttagttacatatgaatatatgatcattgatgaattaaacaatataatgtaataattaaatttgatttccctgatcgaattataatttatatgttttgtaatacgaatcaattaaaatattttcttgttacacattttgataaaatgtcgtagaacgttacttaaaagtaatgatgcattaacaaaatgtacaacatatattataaaagttatcatcaatattataggcattcgactttcagaatgtgtatcaataatcgaagtagtaatggaacgattattgaaagtatactacggtctctctttacttcatcgtggattctcattaaaaacaaaagtactttctctaccggcaactattgaaagtatattattgtttttaataactttgatagtgtttcttaattattattcccaacgtacgataaaattttgtttgataaaactcacaaaagtttagtatatttctgtaaatatatgcatagaagtcatagtgattgacagaggaaagacgtctctttgactactcttcaatcgaaaacaaaatgtgctaaaatttcaaaagcaaagtccctaaactcgcctaactccatttctcatttgactttgccttaaatgtcaatagtcctatgttatttagctacattcaaaattgggaattaagaattattttagactccatatacttagaaacgaatccgtattggaaactaatttccatttagtaatagtatttaagtattattatgcttaccgagtagcatgtagtagtttcttaatgttagctaatttcaaagcaaacgacgaatattaaatcgtgattgcacacaacaagaagtgattaataaatcattaatttcgcccatagtaatcactaaccagagtaattttgaacaagactaaggatgtacaataacttacgtctgcgatactgtgtggtaataaatatagaaactttatgaaatagaactctcttaccaaagaaagaaaaagcaagagtgcgtgttactatacatctgaacaagtcaaagggtcaaaccttagtattttaaaattacacaaacaattgaccaaatggagagctaattatgtttagcataatttactatatagttgcaaaattccactttagaaacagaataaaaaaataaaaattgaacataacacttatgccgtgttccagtcactcttcaacattctactcattttcaaatatcctttttataaaatactacttttaaaattatttgattcttatgttccttcactatatatatataaatatcgcacattgcttaatcacttcaaatctaatccacaaaaccattcacaccatctcatcttctttctctctatctcttttcctttcctcatttaaagtttctttataagaaatg

SEQ ID NO: 24986 - DNA, 3003 bp, Unknown; identical to SEQ ID NO: 24985
  misc_feature (1)..( 3003): 2750-1469P.txt file - cDNA_ID_2701913; gDNA_ID_2214483; Annot_ID_183417

SEQ ID NO: 24987 - DNA, 2063 bp, Unknown; identical to SEQ ID NO: 11201
  misc_feature (1)..( 2063): 2750-1469P.txt file - cDNA_ID_2701916; gDNA_ID_2214483; Annot_ID_133321

SEQ ID NO: 24988 - DNA, 3000 bp, Unknown; identical to SEQ ID NO: 11203
  misc_feature (1)..( 3000): 2750-1469P.txt file - cDNA_ID_2701929; gDNA_ID_2214483; Annot_ID_133315

SEQ ID NO: 24989 - DNA, 3000 bp, Unknown; identical to SEQ ID NO: 11205
  misc_feature (1)..( 3000): 2750-1469P.txt file - cDNA_ID_2701945; gDNA_ID_2214483; Annot_ID_133308

SEQ ID NO: 24990 - DNA, 3000 bp, Unknown; identical to SEQ ID NO: 11205
  misc_feature (1)..( 3000): 2750-1469P.txt file - cDNA_ID_2701945; gDNA_ID_2214483; Annot_ID_183426

SEQ ID NO: 24991 - DNA, 3000 bp, Unknown; identical to SEQ ID NO: 11195
  misc_feature (1)..( 3000): 2750-1469P.txt file - cDNA_ID_2701949; gDNA_ID_2214483; Annot_ID_133300

SEQ ID NO: 24992 - DNA, 3000 bp, Unknown; identical to SEQ ID NO: 11195
  misc_feature (1)..( 3000): 2750-1469P.txt file - cDNA_ID_2701949; gDNA_ID_2214483; Annot_ID_183416

SEQ ID NO: 24993 - DNA, 3003 bp, Unknown
  misc_feature (1)..( 3003): 2750-1469P.txt file - cDNA_ID_2701953; gDNA_ID_2214483; Annot_ID_133310
atatcagcagaatctattatatgttgaatgttctgtcttccaataaatgatacaaaaataaatcttaaactaggatttaatccgtggtacaccacgggacaaatattttttatatatatatatataataatatgaattttacggttttagtttagtattaaagttatataattttatattaatattgtaactaaaaaaattggtgatgataaaataataaaataaatatttaacatgtgttatatcaatccaaacccgtcctgctattcatatcaatctaaatccgtcccgctatattttttgtctcatgattttttaattttttataagtttaaatattagttgttgaattagttatgattgtgattttataccgaaaaagttatggacttttaatttcatggaatattcaaaccaagataaggaatgtttttaggtgcacatataattgggtttgctcattttacgggattgtaaatgtattttggtttgtttcacaatgtttgttttaattgattgccgatatttaatagaaataatttaaatagttcaaattttggttgttttaagatttagtgaatattgtaggtgagataaggagaagataatttatcgtgttttgcgtgacatatgggattaccatatatttcgaatatttttggtttgttacacaattaattgccttaaaaaaatacaaactattaattaaaaaaaattaaataattaaaatccagtgacaaccattgtaaataaatcccaactccatgatttatttcacaaaatggatgcaaaaatgtatatatagatttagaaataaaaaaatggatcaaataaaaaactcaaaattttatgataaaaaaaactaaaagatcaaccaatattaagaaaatatatttagtaataatactatactataatatatagctatgatagtttagtttaattaacggcactgtattttaactattattgatttggcccataattaaaatacttattgggctagaggcaggaattacagttggggctaagcccattaatactagtgggtttaatttggccctttaacttaaatactgtgatccataaactgatatatggttaaactgtacgacgatacagatgatttaggtctctcttcttcttcttctttttcttcttgagcgccggcgaaaaaagtctctgtgagaaaaagatacgacgattgtcattagaagagtcgtattacatgttttgtgcttgaatctaattcaacaggctttatgtaagagattctttaacaattcctataatctttgttgttggattagattcacgcacaaactcgtaatctgtcttttcgatttttaccagatctgtcttcgatttcgaatcgatctcttttgattttggtgattttaagatttagatgttgctttaatttgggaatcgtaaacaagatctacatgtctacttttggaatcattcccttgcgttgatgatttctatcgttttctatttccaaatttggtattacctatgtttggtatgaatctcgattcgagagcccgacaaaaagttatcactctgtttatttatgcatattaaagttttcaagcactcatttcctaattgtcttgcttaattatgctttcttaagactttcaaagactttacttgagttactggatttgattgatgcaaacgacttgtccttaatccatttatgtctgtgtattaatgtctggaatcatatgacagttgttgttattgctttagcattttcttacgatccactggtaaagagaatctctttctcatagtcctgttctacgttctttgttggtttgtttgtccgagaaagcagatcaaaatcttttgtaaaaatattgtgaccaaattaaacttaaacatctttaagtcactctgattgtggggtgtgtctactattaacatttactaggtcaagatatttacttgtataattcaaagattttatatctgatttcaattaattttcttataacaaataccaaggaactcttacttattcagccaggtggtttgggaatactcaatggtagatcagaattttttcatgtctttatggatttactacactacatgaacaataatgttactagcgagaaacgtaagtttttcttgtaacaaaagtataaccaaatatatgaacaagtaaatagttcgttaataatagcattaataaacataaattcatattttagtgtggcacaatctgtagttaattaagagtcttaaaattaccctgccaataaaacggtcaaattacaatagaataaagtggtaattaagaaaaacaaagtacgtagcatcgaatcttcctctctctggctaaactaattcaaagtttcaactagagaggaattaatacgtacaaagtaatgtattaatttggttttaaaaaaataagagtgctgtgtagctttaaaagattttaaagccaaaactaataggtgactttaaaaaaaaataaaaaacaaagagtaaaaaaaaaaagagtgctgtgaaagctttaaaagattttaaaggcaaaaaaatcttgattggcaaaaaaaaactttgaagacttttaaaatctttctaaagtcttaaatgcttctgtcaatcacccccgaaatcgttaaaatatatgttatttagtttaggaaggtagaatatcagaccaaatatattttgtttggtatttttttatagtcaaataaaaaaactccaaatgtttaaacttatttttgttaaaaaattacatttaaattatatatatggaaatatttaatgtgaaatatttaaatatttataagatgatatcataccacatatgtacatatggatcagtgaatgcaaggtaaacacgctcgctctgtgaacagtttaatatataaacacctaattacatttacttagatgtgaattataaaaaatcaattctatacgatgaagagggtagcatcttacaattacaaaattgtgtgtatggtcgtaatg

SEQ ID NO: 24994 - DNA, 3000 bp, Unknown; identical to SEQ ID NO: 11228
  misc_feature (1)..( 3000): 2750-1469P.txt file - cDNA_ID_2701983; gDNA_ID_2214484; Annot_ID_133332

SEQ ID NO: 24995 - DNA, 3000 bp, Unknown
  misc_feature (1)..( 3000): 2750-1469P.txt file - cDNA_ID_2701999; gDNA_ID_2214485; Annot_ID_133342
tcaattccatgagggagaagagagctgagtgcagacctgatgttgtgacatttacgagcatcatgcatttatactctgtcaagggagagatagaaaactgcagagccgtgttcgaagcaatggttgcagaaggtctaaagcctaatattgtttcctataatgccttaatgggtgcctatgctgttcatggaatgagtggaactgctctctcagtgttaggagatatcaagcagaatggtattatcccagatgtggtctcttatacatgcttgctcaattcttatggaagatcacgtcaacctgggaaggcaaaggaggtattcctcatgatgaggaaggaaaggagaaagccaaatgttgttacttacaatgcattgattgatgcttatgggtctaatgggtttctagctgaagctgtggaaatctttcggcagatggaacaagatggcattaagccaaatgttgtttcagtatgcactcttttggctgcttgtagtaggtctaaaaaaaaggtgaatgttgatactgtactttccgcagcacagtcgagaggcattaatctcaatacggcagcctataactcagccattggaagctatataaatgctgcagaacttgagaaggccattgcattgtatcagagtatgagaaaaaagaaagtcaaagctgattctgttactttcactatccttataagcggttcatgtaggatgtcaaaataccctgaagcaattagttacttgaaggagatggaagatctcagtattccattgacaaaggaggtgtactcttcggttctatgtgcttacagcaaacaggcaagtgcttagagtttgagctcagaagaagacgtgtgtattcaatagaattctgattttcatatggtttgactgtcactttctttgtgataatttccagggtcaagttacagaagcagaatccatattcaaccagatgaaaatggctgggtgcgaacctgatgtgattgcatacacttcaatgctccatgcttacaatgcttcaggtaaataccatgagtgtaagactgttaaaaatggtaacaaaatgttttcagtggatctgagttggcttggaatggttttgtgttgccagaaaagtggggaaaggcttgtgaactcttcctggaaatggaggcaaatggaatagagccagattcgattgcttgttcagctttgatgagagctttcaacaagggaggtcaaccgtcaaatgtctttgtcctgatggatttaatgcgggaaaaagaaatccccttcactggtgcggtcttctttgagatattttcggcttgtaacacgtaagttcttgtatgtctatttaaaacattacagtaaaatacttgctcgaattacagaaagagcaatatatcacccttcttctttcaacattgcagcttgcaggaatggaaaagagcaatagacctcatccaaatgatggatccgtacctgccatcgctttctatcgggttaactaatcagatgctgcatcttttcgggaagagtggtaaagttgaagcaatgatgaaggtacaacgaacttttagttgatcagctaattagacttccacattatctttcttttctgccaacctgtttacaaaagaatgttaacgaaaccatgttgtaccactaaacacacgcagctgttctataagattattgcctctggtgttggaatcaacctcaagacttatgcaatactgttggaacatcttttagctgttggaaactggagaaaatacattgaggtaatacttttttgtttgtctcttgccaaatgaatttcaattagcaatgaccaagcaagttttgcggttgagaaataaaatttgacttttgtgtgaatgatttgcaggttttagaatggatgagtggtgctggtattcaaccctcgaaccaaatgtatcgtgacataatctcctttggtgaaagaagtgcagggatcgagttcgagcctctaatacgccaaaaattgggtgagatgagagaggaatgcaaaataaatgattctgtcacatgattttcgatctttttggtgtctcacatttcattttttgttggttattccatagaatcactgagaaacaaaggagaaggtctgattccaacttttagacacgaaggcacattgttgtaatttccactatatgcttgtatttttggcccagtgattatgcatatgatgtttgtaacttgtaatctcctctatcgataatatgataattcaattcagaaaacgaaatcattttagtattgaaaataaacgtagattgttggctagagttacatattgaattgctataggatccagcttgtatgtgcagataatagataaactgatacaagacattcaattcaaccaatcatttcaaaaagtttgaattatgatttttaaatggaatgattcgatgtgtaagtcattacaacggtagcaatatgaagaatcaaatggtaggaaagaaaatccgaatttaaaatattccgaaaattattaagcttagtttgataaacaaaacaacaacatcgtgagtgtaccataggaagaatattccttggaacgaggcgagagttgggaaacacttcacattaaaatgtcagaatccagaaacagatcacgtacacgtggacataattagtacacgtcagcatataaacctattctactaatgacgaaagcaccctcgtctccgtacatagccgttgcagttattatctttcgcttcgttgaaaaaggaaaaacaaaattgggacgtaatggtaaattaagtccgtaattttattttgccgttgtttagattactagaaaagactcaaaaatcaaaatcattgtattcggtgaaaaaggaaagagtcaaagttgaattttctcagctctcactctctttttctctctctttacttctactgtatcaagaagctccgttttgcttagccatagtgcgtctagggtttggttggtgggaagaaggttccgatcatg

SEQ ID NO: 24996 - DNA, 3000 bp, Unknown; identical to SEQ ID NO: 11239
  misc_feature (1)..( 3000): 2750-1469P.txt file - cDNA_ID_2702003; gDNA_ID_2214485; Annot_ID_133343

SEQ ID NO: 24997 - DNA, 3000 bp, Unknown; identical to SEQ ID NO: 11246
  misc_feature (1)..( 3000): 2750-1469P.txt file - cDNA_ID_2702007; gDNA_ID_2214485; Annot_ID_133345

SEQ ID NO: 24998 - DNA, 3003 bp, Unknown
  misc_feature (1)..( 3003): 2750-1469P.txt file - cDNA_ID_2702013; gDNA_ID_2214485; Annot_ID_133347
aattatttgatttggagagattggtctcatcattcgctatttcagcatgacacgatgtcctttttagcatgtgaatttgcacgattcaactcctttttgaaggatatgcacttttcgtatattaaaagaatacactatagtatttcttcgtaataatatactctttaacatgaaaaacaacaatcatgaatgaaatacaataaccagataaatagagaacagccttcttttctacttttaggcttttggcagatgtcatggatggataatactccttttttctctactctcgttttcaactcaaaaaaaaagaaggaaaaaaaaaagttatgtcatgtatataatcgtattcgtaaatacatagaagaagaaatttcagaatcagctaccatcattccatcaatgctttgccaactagagtttgttcaaactcttacaaacttctctacttgactaatataattatgcatttaaaagttcaccgtaccgttttccatttatatctctcctttttgatagtctcattcgcatatgatacacttgacttgaaacctcccaaaaaaaaagggtacaaagtgtagcttctatatgaccgatggtacataacagactttcgactaccatgcacttaactaggatccaaatccctctcccgtagcctatttcacaatatatcagtgaatgtttttttaaggtgttcaaaacaaagttgctatacttgataaatcgatcattgttttattttgtgtgttgccaggtcaacttcacgtaaacaaacaataaatatcgaaaacagataaaagttattaacttgtactataccatcaagaaatgaataaaaattataattgaaggtcactccatcgtaaattaaggaaaacgtaaaaatgaataaagagagtgcaatgtccacaccgaatgaaatgaaagaaattatatgttttaaaatttcgagaaatatactatgtatggttgatatatatataatcggtatcaaaaatatatatattttttaagtaaactctataaagagatgataggagtttcgatcagatatttccgattgcatagaatgaacaggctcggtttattctttgagcagggccaaaactaatgtaattaagtaagattcaacctaaacaaattaaagttgaaatcgtaacttagcagtttcatctcttttttcttgactaacaagtttcgagctttcaattcagaatttatctaattctgaaattagtatttgtgccgtacgtattacgtagcatagatcatgtttgttttgaagttattcggacaacgaccaacgatatcgattagcaaccaacaatacatttcttcattcaaaatagtaagtcagacttattttgatctccaattcgaatatggaccgtaaaaaggaatatgaatttacaggaaacggttttaatgattgaacttgtgtgctttaggaattaggcatctatatattataacatcggtactaaaaggcctaaaaacatatcatgtgattcagtgagtgtctagttttttaaaaaaagtgtcaccttcatttataaatctcgaaagttagttatatgatcgcaaaacaatccacgaccccctcacctctatttctcacttcacgtggaacaaggtcccatgtcccattatttcttcttttctagttcataaagttcatcataatctatctgttccacacacacaaatatattgattgatttgtctactccaaattcgcaagaaaacgtgaataaatttgagaaatcacagaattatttgatattttgtaaattaactaattattgatatagaagaacaaattaatacaatggactaatgtcatagagcaatttttttttgctaaacttcaggatttaactcattcttcttcttgttcaagtggttgctgattctgaaatctcttcttcaataacttaggtcttggtttcataggcttcaagtacttagattgaaatctaaccatctctttcaaaacactaatcagcttcctctctatttcttcaccgtcaggttcaatagctcctaagcaccgtgccacagcctccgccgtagttacacatcctccgaatggttccttccttagcacaagctctgaatcgtagatggttcctccactcactgatgcgtctatttccgtatccaaacacactctaaccgctcctgcttctcttaacaccacctcgctagctttgaccatctccttcgcgtgtttccacgtcgcgtcgaatacgattagtctcagcggcgggggatttgagatctcacgatggtttaagaggtttagggatttgaattcggatatagtgacggcgggagaggaaggagaagaagggaagaggtagattgttggcggtgctgggagtgcggttcctccggcggtggagatgtgacggcggaggagacggcgggcggggattctggtgacgtttagtaaggatttggtaaggagaggagtggtgttgagcttgtggcgtgactcgtgtggatggtggaggatgatgatttctgtattcgtcggaattagatccgctggtaagacgtggcagagacaaatcgcatttgggcgatcgcagttgtcgcagatctgccggcgatgatgcgcgtcttgctcgtcctccatcgtcactgctctgtcacgcgagcattccaacattaatgggaaattagaaaaaataaaataatacgctgtcgtttttggtctattagaaacacggcatcgtttaaactaagtttctgaacgacggcgtttgacccattcacgaatacgaatacgattacgattgtattcactacgtcgtcgtttggtctgttcacgatacatcgtcgttgggcattaacttatttaactctctgtctcttctccggtcaccatttacccaattgtacacgaccactttttagttttgacgattagatgatcaacgttgctggaagtaggaaaattagataagagtactgatcaaatcctaagagagaatg

SEQ ID NO: 24999 - DNA, 3003 bp, Unknown
  misc_feature (1)..( 3003): 2750-1469P.txt file - cDNA_ID_2702019; gDNA_ID_2214485; Annot_ID_133353
taacaactttacgttttggtaattgtggaatcaaccatgataatcttatattattcgatattaatcaaaatatggcttaaatagttaaaactcacacataagtccataagttccaattgtataatattatacttttaataaattatattatatttatacatatgaataaaaaggaaggtttcaggaattcatggttacaaaatgagtttaaaaagatgaacatttcccccaaaacactaattagatcgtacggttggtgagcctaaagaagtagtgctactaataaatgagaataatagtttttggtacgacatcccacaaatccttaatgatgagagcataaatctcggcataatcttcgtttcaagagttcgaaagcatattcatgaatattcacaaatgattacgcagaaagtcagtttgataggtaaagcatccataagctaatgactaagttttcattgtaatcattggttaacattttctctaacaatgttaattattgaaaatttaaaacaattaactacacttcttatctccccttcttcacgagtttaaagcgacgaggtgcttccatcattatgtcttctctttttcttgttgctcttcttatgattcgtctttaactcattcgcctatttgtgaaaaaaatagattgcttgaaaagcataaaactaatcaactgaaaaaatgtatatgcataattaaaaatcaattcatagaaaaattcagtcgtactttcgtcaattcatggatttattttttgttgtagctaaaacttcagttgtactaccaaaacaagaagaagttcaacgtcttgttgatagtatcatgagttgtgaaaactcacgtgaaaagaaatgtaactatgtaataaagttttttatagtattaatagaataaaacttgcttaattggtggtgttatttatatatacttaattaggcaattaggtttcaagaagaggaaaaaaacgatgggacggaggtggtgagtggtggtggtcggagcagacaaagaagggtcctacaatttgcctaaccgtaaagagccacattcctttttcttttaccccatcccgtgagtgaaccccactcttcctcattctattattctcaatctatattttcaaaaataaacataaatatacaaactctttgcagcataaaggaatatgttgataaaacggagctttgtttatgattttgtttcattatgatatattttttttaaaacatttaccaacaatttcttagaaacataaattaagagctaactagtatatctagtatttctcgaaacccaaactcatgttcttaattttttatttttttctggaatgttaatgactatcggatatttgagtataattgtatgaatttgcttgactgttgcatactttgaatctttctttctagtttacaattgtgcaaattaaatcaaactcgttttcagtattttaccttttagtactatacttaattatgtcatctgtatcaggtaatagttagaggaaagaggaaaatggtgtaatataaacaacaattatttgtatgtgagtttacgaccatcatctagcttaaagtacacaccaatgagaatatgaacacagtttagctcaactcatatatgatctatccgacatcttttcaatgttttgggtcgcgtaggagtatcggaagcagcttaagacatagctatttaataaattgttggtatgttttatttataacaattatcacaaaatcaaaagatactaatctcgctgtttgaggcagacatctgagaaaacatgtcttctaccaacattcaagatttgacaaatcgttgtttacgtattgttatattgagcatcttacaacaaaaatttacgtgtattttgaaactcggaaatcaatcatatctattgatattaacacacagtgtttcctgactatcgtcgcagacgaataataatagtaataatcttccacctcgtgtgattctataatcttatattcttgacataaatgtcgtcaaaatttggtatacatcaaacatggatcgtgtttaaagtaatcatcaaaaatcaccacacgagagtagattccctattgtcaaatatagatcaaagagaaaacatgtaggctacaaatataacctagtccctacgaataagaaaaatgtcattataccacaaatgataactgcaaagtgtgtgtaaattttgattttaaaagaaggtaaaaaaataaaaaagatagatttggaaacaatcttttacctctttggtattgaacattgtgacagtatcaatcagtatggtacagaaaaaacgtcagaggaaaagaattatcaaaaaacgtacactcttcattttcattaaaatcttttttttttcttccaaaaaacaaaagcagaaaaaatgtgtcagaaagatttatgcagctttcattcattcatcacttgcactgtctcgtgaagaaaattaaacttttttgtatcagaaattaattacattaaaagaaaagaaaaaaaaaattccctcctttccaagtgcgtttgctttgtggagtctctctcttctctctctctgtctgtgtgtgaagtgagaggatctttgtttggttctgcaatcataatttcgtgatatactaaaaaaaatgcaatttcctcttctctcttataagcagagaccctactactctttgatcgaattttccttgctctcttctctttgttctctcatgtttttttctccctaaatttatgggctttgctctctctctaagccacactcacactctaaagcactcgtctttcttcttctttttcttcagaaacagttattttgacttgaaaaaccagagctttaatcctggattcatggcaaaaagagcattacttttcttttcctctctcactttcttgtttcatttggcttaaaaattcaatgataattttgtatttgggggaaagaagaagaagaacaagagtgtgtgattgattcaattcttaaaaatg

SEQ ID NO: 25000 - DNA, 3003 bp, Unknown; identical to SEQ ID NO: 24999
  misc_feature (1)..( 3003): 2750-1469P.txt file - cDNA_ID_2702019; gDNA_ID_2214485; Annot_ID_183490

SEQ ID NO: 25001 - DNA, 3000 bp, Unknown; identical to SEQ ID NO: 11252
  misc_feature (1)..( 3000): 2750-1469P.txt file - cDNA_ID_2702023; gDNA_ID_2214485; Annot_ID_133354

SEQ ID NO: 25002 - DNA, 1893 bp, Unknown; identical to SEQ ID NO: 11242
  misc_feature (1)..( 1893): 2750-1469P.txt file - cDNA_ID_2702027; gDNA_ID_2214485; Annot_ID_133356

SEQ ID NO: 25003 - DNA, 3003 bp, Unknown
  misc_feature (1)..( 3003): 2750-1469P.txt file - cDNA_ID_2702038; gDNA_ID_2214486; Annot_ID_133369
aaacaccgagtttttaagccaggttatagatcttgtttcaatctcttttcccttcctttgtcttaaggaaacttgtatttacattctcttgcttctttctccttaggtttccatggtttcaagactaaagcatgagaatctcattcaactggtcggttattgtgttgatgaaaaccttcgtgttcttgcttatgagtttgcaacaatgggatcattgcacgatattctgcatggtataatgagtttctccgcccttcttattttaaaacttttttctgttttaaataactaagaggttctcggcctaggattgttttctccatgattgtgtcatgtgatgttattacaggtaggaagggagttcaagatgcactaccaggtccaacacttgactggataacaagggtgaagatagccgttgaggcagctagaggtttagaataccttcatgagaaggttcagcctcaagtaatacatagagacataagatctagcaatatacttctttttgacgactatcaagcaaaaattgctgattttaatctttcaaatcaatctcctgataatgctgctcgtttacaatctacaagagttttgggcagctttggctattactctccagagtaatcctccatagtttgtaaacttttaaattttgttgcatcgttataaaagtatgtacgagctagctaaatgtgacttgccatttgtagatatgctatgactggagagttgacacataagagtgatgtatatggttttggggttgtacttctagagctcttgacagggaggaaaccagttgaccatacaatgccgcgaggccaacaaagtcttgtaacttgggtatgttttagctactctttttccatctcaatatatatgtatcatactgtgttttaatctcatatcttataactgtgtattattcaggctacaccgaaacttagtgaagatacagtagaggagtgtgttgatccaaagctaaagggagaatattctcctaaatcagtagctaaggtacactactttcatcccagagagtatataaatatctaaaaaagggttaggatggtaacttaatagacaagaattacatgtctttggtcgttttaatcgccaaaaaatgatctaatatttatgtaatttggtaacgcagctagcagcggtggcagcattgtgtgtgcaatatgaatctaattgtagaccaaaaatgagtacagttgtgaaagctttgcaacaacttcttatagcgacaggctcaataccgcaattctaaattcgtgcgcttttaaaatactatcttatattgtttttggacaacagagttagaatcttcattcatacaaaagagacattttactttgatttggaatatatatatatatatatatatatattaaaactactaagtcttgtgcatgattaggtatataatcattgatggataaataagagatgaggttacatattcaggcttcaaattttttatatttggtgatcaaaatttaaaaaaaaattaggtgagtttggtctttttaaagctaaaaaatattgaaacacaacaaagcaaaaaaatgagtgattgatttcaattataaggtgaaaatagaaagaaaataatacaaaaatattacttttaaaaacattattaatttaagaagaaaaagggcaaatgagaaaagtggactttccttttaggctgttttaataatcgtcttccccgcggtttgcccatctgtctccgtcttcatcatcaagcaaaaaaaaaactcatctttctccactctctctctctctctctctctctctctctctctctctctctctctctctctctctctctctctctctctctctctctctctctctctctctctctctctctctctctctctctctctctctctctctctctctctctctctctctctctctctctctctctctctctctctctctctctctctctctctctctggttcatctacagagttaataatcattaagcgaagaagatccctagaaagattgatcagagaaagtctcagctgaagcacgtttttggaaaacccagatttgacgggtatatatctaatattttctttcaatttggatcaattctcttgattttctacctttatagagcttattgattcgtttccctttgacccaattttgctttctttatttagatttcaaatttcttactcgatttcgttttgtgccccatttgaggatcttcgttgtagacgcgattctcagtggttctgagtgttaattcgagtagaatctcttctgggtaacgtttctcatttgaaattcacagtaaagttttgatctttcattcttttcgtttttttcaatatccagtttatccatagtagttgactattgccaaccttatctgacggcagaattttgtccctttctgatttgtaattttgcagttcgactaatggaatgtggagttgttgattgagaattgcattttttattatgattagagaattaccaactcattgttccaaaagcttgtgcttatcatcattgctatcttgatgcaaatctgaatccagtttctggttttgactttactttgaagcttttttttttcagttatgtgaaaatgttgctgtgatttgttagatggtttcaatatgcctaaacaaatttgtacttgctagttacaatatttgaatcatgtctaggggacagttgctttacttgtttgcattttggaggtagtgatctgaagcattaacttaaattgaagtagcaggttgtgacattgtaacattagatgttaagtaatgccgctgccatggcagtgactatttcatttgttaaaattttgttctacttactttggcattgacatgtagtgtaacgagctaatagaggattgttacttttttctgcatctataatcagttgctttgaatggtttcaggtactaagaagctgtggaggatctatatttgaaagaagagaacaaggatg

SEQ ID NO: 25004 - DNA, 3003 bp, Unknown; identical to SEQ ID NO: 25003
  misc_feature (1)..( 3003): 2750-1469P.txt file - cDNA_ID_2702038; gDNA_ID_2214486; Annot_ID_183515

SEQ ID NO: 25005 - DNA, 3000 bp, Unknown; identical to SEQ ID NO: 11258
  misc_feature (1)..( 3000): 2750-1469P.txt file - cDNA_ID_2702050; gDNA_ID_2214486; Annot_ID_133362

SEQ ID NO: 25006 - DNA, 3000 bp, Unknown; identical to SEQ ID NO: 11258
  misc_feature (1)..( 3000): 2750-1469P.txt file - cDNA_ID_2702050; gDNA_ID_2214486; Annot_ID_183506

SEQ ID NO: 25007 - DNA, 3000 bp, Unknown; identical to SEQ ID NO: 11263
  misc_feature (1)..( 3000): 2750-1469P.txt file - cDNA_ID_2702058; gDNA_ID_2214486; Annot_ID_133370

SEQ ID NO: 25008 - DNA, 3000 bp, Unknown; identical to SEQ ID NO: 11263
  misc_feature (1)..( 3000): 2750-1469P.txt file - cDNA_ID_2702058; gDNA_ID_2214486; Annot_ID_183516

SEQ ID NO: 25009 - DNA, 3000 bp, Unknown; identical to SEQ ID NO: 11261
  misc_feature (1)..( 3000): 2750-1469P.txt file - cDNA_ID_2702066; gDNA_ID_2214486; Annot_ID_133367

SEQ ID NO: 25010 - DNA, 3000 bp, Unknown; identical to SEQ ID NO: 11261
  misc_feature (1)..( 3000): 2750-1469P.txt file - cDNA_ID_2702066; gDNA_ID_2214486; Annot_ID_183512

SEQ ID NO: 25011 - DNA, 3000 bp, Unknown; identical to SEQ ID NO: 11259
  misc_feature (1)..( 3000): 2750-1469P.txt file - cDNA_ID_2702070; gDNA_ID_2214486; Annot_ID_133365

SEQ ID NO: 25012 - DNA, 3000 bp, Unknown; identical to SEQ ID NO: 11257
  misc_feature (1)..( 3000): 2750-1469P.txt file - cDNA_ID_2702082; gDNA_ID_2214486; Annot_ID_133360

SEQ ID NO: 25013 - DNA, 630 bp, Unknown; identical to SEQ ID NO: 11933
  misc_feature (1)..( 630): 2750-1469P.txt file - cDNA_ID_2702086; gDNA_ID_2214523; Annot_ID_134102

SEQ ID NO: 25014 - DNA, 630 bp, Unknown; identical to SEQ ID NO: 11933
  misc_feature (1)..( 630): 2750-1469P.txt file - cDNA_ID_2702086; gDNA_ID_2214523; Annot_ID_184670

SEQ ID NO: 25015 - DNA, 3000 bp, Unknown; identical to SEQ ID NO: 11275
  misc_feature (1)..( 3000): 2750-1469P.txt file - cDNA_ID_2702124; gDNA_ID_2214487; Annot_ID_133381

SEQ ID NO: 25016 - DNA, 3000 bp, Unknown; identical to SEQ ID NO: 11274
  misc_feature (1)..( 3000): 2750-1469P.txt file - cDNA_ID_2702132; gDNA_ID_2214487; Annot_ID_133379

SEQ ID NO: 25017 - DNA, 3000 bp, Unknown; identical to SEQ ID NO: 13847
  misc_feature (1)..( 3000): 2750-1469P.txt file - cDNA_ID_2702152; gDNA_ID_2214658; Annot_ID_136504

SEQ ID NO: 25018 - DNA, 3003 bp, Unknown
  misc_feature (1)..( 3003): 2750-1469P.txt file - cDNA_ID_2702160; gDNA_ID_2214488; Annot_ID_133400
attgtcaaggtttgggataacatatatgtatctcgtaagatgacccttctcaaaccgttgagttcttcaagaaactactttcctcagcatttacctcgtattttcgatatgtctaagtttacggttcgtgaattgtgtcgggaagtcaagctctatcatcctgattactactgtgtccctggacacacagctttagagttggagttggggaaaactgttgtcaagtacctaaatgatgacaaattcgtgttgcttacaattcttgaatatggaaagttagctgtgtttaggtcttgggatcgagaatggactgtgatcaatgattacataccttctcgttgtcaagatttgattatgttcgatggacgtttctttgctatcgactacaatgggaggactgtagttgttgactactcttctttcaaattgacattggccgctaatcctttgattggcggcggtgacaagaagtttctgattgaatcttgtggtgaaatgtttctggtggatatagagttttgcctgaatgaaaaaccggaattcacagggggtttctattcgtattttaatgagaccacggtcagttacaaatttaaattctttaaattagtggaaagagagaagagatgggttgaggttgaggatcttggggataagatgtttttccttggtgatgactccaccttttccgcttcaactgctgatattatacctcgctgcgtgggaactggaagcttcgtgttcttctacacgcatgaggaatccttggtggtgatggatgatcgaaacttgggagtgtttgatttcaggagtgggaaaacagagctggtaaacaaactccctgaatatgccaagttgttttggcctccacctccatggattactacttctcatgaggtcagtggtttccaatctctcaaccacccgaatagagtgtatttacatttgcatcttactacttcttttttaccgcttgtctcactaacttatgctcaaatatcttttgtctcagagtgttgaaaattatactggagaaacatcatcacaatcccaatcttgagtttaagaccttggagatgacacttcaacttgaatgacaatgtttatatgtatttttccaactcttgttttttcctaaacaatttgtatattcatctttcaaaagttttcttatgtctaaaccgaagtccgctatacaaagattttgaggaaaactggaaaagtgattttgtgttaaaatcgaattagttacgagaaataagtcccaactaaaacaagaactttatttcgatgaagcctgctttactttaagatggtgttgattggtgaaaaactgtaaagattggctatgcaaatgaagttgtaactgtgaatttaatcacttgaattcacaagttctcagtgaaacagagaagagtgcattaaaattttgtatgatatgacacaaccagtgaaatacagtcaccttgcagtaaaaaaaagctttatcatgtatgtggtgattttttttttaataaccaatcactttaatggttaaaaagttcattttacaatttacaagtttggttataaagtgtatattagatgcttcttattttgggaagtttcgttaatattgctgtgttctgtttactgaataatgttcggcatttgaagacaaaaaaactaaaagaaagtagctttttctgaagtttccgagaaattttcatatgtttgtcatatatattcttcctagccccactagtcgaactcacttgtttttattggtgaattgtttggtcttttggtaacaaagaaaacgatttaaaatctataaattttatatctacatatatctactttacatttattgaaaatacaagaaatattagagtttttttttcttagttgtaccatgaaattgaggtttgagtcgtgttgagttctttaaatggaggtgctccaaattaagaaaatatatattgggagtctctcacttagaaagtagtatgggaaaacatatctattattgaactgcagaatgttgattcaatgattaaagattccaacattaaaaccaccttaaagaaaaataagaagccggtgagataacaacacaaactattggtactacaagatttggctaaaataaaaaacacgttagtacataaccttataaaactaatgtaagaggctaagagttcatgcttttcttttagattacacataatatttaaaagctaaaatgaaatcattttaaagcctgaataattgtttttgtccattcatattattgataaaaaatgatgttacattttatttaattatatatatccacatcagtttttttcttagttttgactacaacaaaaaaaatagttaattttatagaaattttttaaaatatttgttttatgttttaggttgtgtccaacaaagacaaataacttcaagtctttggaggagacttcccaagtcaatctgagattaaacaaaatggtggaagtcccacaatcaaaaaagttatattcatttttcacactaaaatatgatcaaactaattaattacaaaaaaaaaagaagaagaaaaaaagtggagtaaacagaagaaccaagctctggtccaatcctcatatgaccatttctaattctcttaagataaaaccgtgtgggttccatccactttgatcaagacctttcttcttctttcaagtaaacatcacaaacctttaagaaatatgaaagaaaataaaacacattataaaaaatctcacaagacttcaaatttcaatatgttaaatcattcatgcctccacatacagtatttttatttttctctcttgacttagtcttctccatcaaagtattgccccacaaagaaaatctttcacaacatattcggtcctagttgtatataaatgtgtattgattcacctaagtgataaccaccaacaactttttcacttacacagctttaaaaagaaccaaacctttataagtgttttttagacattgggagagatg

SEQ ID NO: 25019 - DNA, 3003 bp, Unknown; identical to SEQ ID NO: 25018
  misc_feature (1)..( 3003): 2750-1469P.txt file - cDNA_ID_2702160; gDNA_ID_2214488; Annot_ID_183564

SEQ ID NO: 25020 - DNA, 3003 bp, Unknown
  misc_feature (1)..( 3003): 2750-1469P.txt file - cDNA_ID_2702164; gDNA_ID_2214488; Annot_ID_133395
atctagagtaatataaaaaggatatgatcaatccactcttggcttgattttgaaattggaaatccaccaaacttaacaattaaattgtacggcttttaagatatgtattctgtcttgcctaacaattaacatattaaagaagaacaagattaactacttagattcactttttaaaatgtgccgaaaacaccttatatttaaacacgatatttatgcctttatttttgattaccatctcgttccaggggaaggtccaaggatgtatatccggggtaagggcttttgctcaagttgtggctccatttgtatatagtccattgacaggtaagtgaacacagtatcactaagtgaccaatgaacaccattcattaataactatcattaataaaacgttattcatcactaataagttttatagcgttcattggtcaatatcgagaaaataaagttttatttcctttaacaaatatttattttggtttgatatagctctatttctctccgaaaatgcaccattctatttccctggattcagcattctatgcatcgccatctctttggtattctttacatctacaaccatatcatcagttatcacaattatatgtttattattaataatgcatgacataatgacattgctttacatgcacagatgatcggattccttcagagtcttctgataaaagatcatccttctttgcccttagtgaacataacaatcaacaacccttcaaaagcggaagcttgacaagaaatatatcaagaagcaaatgtaactgtaatattgtacaaatttgcttcaaattaaaagttcatttaaaacgaatacatagctagaagctgtaaaaataacttagttttcttacaaagattgtcattgcaaatgaataaaatcacttgtatagtagttgttggcaactaagtacaaccggtcacatcaacatacatcaactaagtaaccaaacaaatataaccgtaaaaacaaacaaccgtaaatattttagagaagagatgcgataaaaagacaaccgtagaaaaataaacgaaaatatttcaacaaaagaattagatgaaaagacacaactgaaaaattaaccgtaaatattttaacaaaatgttgcattgacacaaccgttcataaatgcaaaaaggattgggataaaaagacaaagctttttatatttcaatgaaaagatgtaataaaaaagacaaaacaaaaaaaaacgtaaatattttagtaagaaattgcgataaaaagacacatccgttcgtaagtaaaaagacattacgataaaaagacacaaccgtaataaaaaaacaataaatatattaacaaaaaattgcaacaaaaaaacacaaccgtttagaaatgcaaatgacattacgataaaaagatgcaagtttcggggagaattcgcaaaacttcatgaaaatacgcgataaaaagatataacaaaaaagatcgtaaatatttcaacgaaaatttttcgttaaaaagatacaaccatttagaagtgcttacgaaagaaacgacacaaccgtaaatattgcaacaaaaagttgcgagattaaaagaaacaaccttataatctctttgatcatatgaatggaaaactaaatctttgcacacaaaaaaattcaggattttcatattattttcatgggatttttgtttaaatgggcacatttcagccaaaaaaataatgagagggtacattcttgtgggcttataagaatgagtacttatttggctaagaaaagacaatcttgtcaatactctttcttctttctttttttttttttttttttcttttttttccaaatgcttcatagatctttttctcccttattaattcaatagatccaattaaataggtttgtatataaataaatctatatcctaagggaataatgcttagggaacccaaagatttcaagacgcagattaaattaattttacatttgatcgataaatatattggtcggtggattttgattcggactgaaacttgtcaccagtttaggagtcgaggaaagagatgaaggcagtgtcactggtttttgattagcaaagactgaagatggaaggcgttaacggcggaaatgaggatcgacggtaggatatgttttcgatttgatagaacgatgtctaataatcgctaagtaattcaaaaacagatgttcgatggtgtatgtgtcatgttgtgatcagtttacgaattacgattagggtgaattgagagacaaatcggaactggagattgagggtgaattgtagagacaaattagacggttaaatgcgaataataaaaaagataaaaacgtcaatactgtgagaaaaatacctaattgcagtagcacatgattttgtgcctatttctacaacggcatacacttttgaagtgctttatttgtaactgatccttattttcatgcatgtgagtgatatcaagttgtactttgttgttttgaaatgcctagaaatgacaaaagcgtgtgggaatggacataatcgtttttacaaaattgtgggaatggacatgatccttatttatggtttgtacgcgacggataaatttttatttaattacgtaatcgtctggatttatatatctttaatgcagattgaaatatggcagtaccaaattttttgcatagtcttaacttcaaatcgatcgtagttattacaaaatgtcacataattcgtaatgtgtaattaaaaggtactccctacacaagagatggtgactaatgatcgagtcggccagaaaataccaaaaaagtcctcaaaagtctgatgtgatctcccatgcttcaaccgaatttttggaataaagaatagattggaaaaatatctgccacattgtagtattttcaagtaagctttctttgtttgttcaataatcaaaagcaaaaacaaaaacaaaactctcaacactttttgtgtttattttctgttattttgaatcgaagtcggcaagcataggctaaaaggtgatg

SEQ ID NO: 25021 - DNA, 3000 bp, Unknown; identical to SEQ ID NO: 13158
  misc_feature (1)..( 3000): 2750-1469P.txt file - cDNA_ID_2702176; gDNA_ID_2214602; Annot_ID_135576

SEQ ID NO: 25022 - DNA, 3000 bp, Unknown; identical to SEQ ID NO: 13158
  misc_feature (1)..( 3000): 2750-1469P.txt file - cDNA_ID_2702176; gDNA_ID_2214602; Annot_ID_187088

SEQ ID NO: 25023 - DNA, 3003 bp, Unknown
  misc_feature (1)..( 3003): 2750-1469P.txt file - cDNA_ID_2702192; gDNA_ID_2214602; Annot_ID_135583
cagaaaaaaaaaaaatctataatttccaaccaacatagtttactttcagtctgatagccaaatttcccaagtaaatatataagaaatcagtccatagtttcaagctctagtaccattacctttgtaacatgtacctaccatattatatacctcagatctcatgatatcataagcaaacaagtttttgtggacttaggctctgtgctgcaggaaagttcatgatgcttatacatgaaaaataaaccttaatagtacagatcttttagttcataagaaaaacttacatagaagagtttgtcaataacaacagacatacttcttttaaaccaaaagaaaagagaggcagaaaacaagcacggttgggaaactaagaagcctttgcatttaaagtatcactaaggttctcgactctccaaaccagagccatcaaaagtgaagagtaatacaaggagttcatcaaattacacactttcaaaaagtctatagaatttacagaaaagtctataggaaactgattaggaaatagaagaggatgaaagaataaggcacgatggcaaattatcatatactgtatccgcataaaagagcatcagagcaagttcatgcaaaataggtaacacttgatatcatcttttcagtttctatcaatgtactacttcttcgtttatattcaagtaaaggccttgtacatgtatttcactaaacttacaaccatagatgacatgagcaagaaaattacatggaaaatccaatagcaggacttaagcttaaaatatttttctgaaccgaaaccctcaaaagtgcacctgcaggcaaataatcctagaaggatataggtttagaaagtcctaaccacgaatacactacactacccaagtgataaagccgtcgtgcttgattgatcactgattcatcatttctgcacacctttaaagtagaccaacaggaagcaattaggcccttgacttcactaatacaatgagaacaccaaattctattccttctcctctgatccacaaattgaatacactacagtttccttagataaacggatttagtccacaaaagtactagcctgcaaaggcttactacctcatttactatttctgcgctcttattgtcttcaaacccaccagcacaccttaatagactcctgaattcgggcttgtgtgaaaggatgctttcttaaaattagcattatgtttcacatcattgtgcatccaaatcaaatgcttgtacgtgacagcatgtcactctagaaaccattatatgatagatgtagtttgttaggaagattgaagttccccactcatggataccgtacctcaagcatcttcaactgactaaacacactctggtacacatgtgatggcagagactagttatggttatttccttacccctatggatcagaataacttctagatgacttgagttcaagttcgctttgctttcccaatcaaccaagaaggtccacaacacaatccgcaaatcagaatacatcaaggataggccagccaccaatcctaatgggctaacatgaggaactaacatctgtttgaaatgtgttatcaatgcaatttctttaagaatgatgccataatttcaaagtttctaaaagttctcaaagaggaagatgaattctgacctgaaactatagccgtactagttctcaaatcttccaaacacttgaatcactgattaggcttttctccagtttctcaactaccagaggttcgtggtggagaaaggtatgatagaactagaaaccaccattgccactaaacctgcagcctgcaggatacaaaccagctaagcctaggttatgctaatacactatatcccaaactagcttacccgcatcgctgaagtagcagcctgaacaacattatcaacagctaaccaaaacacaaagcttacaacatctcctctaatcaccgagctggtctcttctcagtatcggaatcttaaaaagctaacaactacgtgaaagagaacaaattcgaagtctgaaattatcagaaccgactccggttaacggacatgatcgcgatcatacccgaagattgtgggaaaagtcaccgatgtagcagcaaaaccgggaataaaccggattaaaccgaaaaaaagaaacaatccatcatcacacaatcacaagagaaaaaaggaaacaacgatcggcttgtttatacataccaacacgaaataatcagctcaacggcgaaacaacaataatgatcggagaaatgagaaacattaccaaagcgttccggcgatgagaaaagaagaccgatcggagaaaagcaaagagacgtatggattcgtatagatgacgcaaccttttatgaaaaagaggttttagagagagaaatatgttttgaagacaaattgctttcttttttggtgatggttgagcgatgaagagtatcggtttatatttaagaaaaatcaaattaaagcggttgagttacgacgttgccgggacattaatcccttctctgaccaacttcaccggctaccggtaaaacccgttcactgtcttattgtcgactaaacaatttattaattaactatggttcttcagtaatgggcctatatttttggactgtacttgggcctcagctgtacgtatcaaaagggttcgagaaactcagagattaaagggatcttgaccgttgatcgagatgactttgattttatccattaatagtcaatttgattgatgagttaagaggatgattaagaaagcaataaaggaagcgaatcggaatccacattgtattaatctttttgatccagtagccattggcgaatccaggagtattaaagttccattttgattttggcgacgatgatgaacagagtttagagaaatttgcattgaagaagagaagatttttggattttgtgtagtgggagaagggtaaaccctagcttgggagggacatgatcggatgctctaagtagcttgtgaattagagaaagagcaagtgagcaaatatg

SEQ ID NO: 25024 - DNA, 3000 bp, Unknown; identical to SEQ ID NO: 13184
  misc_feature (1)..( 3000): 2750-1469P.txt file - cDNA_ID_2702206; gDNA_ID_2214603; Annot_ID_135609

SEQ ID NO: 25025 - DNA, 3000 bp, Unknown; identical to SEQ ID NO: 13184
  misc_feature (1)..( 3000): 2750-1469P.txt file - cDNA_ID_2702206; gDNA_ID_2214603; Annot_ID_187132

SEQ ID NO: 25026 - DNA, 3003 bp, Unknown
  misc_feature (1)..( 3003): 2750-1469P.txt file - cDNA_ID_2702224; gDNA_ID_2214603; Annot_ID_135602
taatgttcgagattgtattattttttccttttcgggaaactaaagggagcgatgggcccgctttgatctggacggttggggatgctttgcaggaggcttctcagccgttagattcaaatctaagagttgaaagttattcaaagcttatcttcttcttctcccgaaaagatctaacagagtgaagggtacaatgggaaaaagacaagtttatatatttaataatttaatattattctggttcagtcaacattaaagttgacggacgtaagcagatattttgactagtcgtcccatatttttgggaacgcaaactgcgtgccgtttctttttttatttttattttattacgctctcgtacaaataaatagtggattttcacagagtagccccaaagtttttttgtatgtatttattttggtcaaaatctcaaaagagtggtcaaaagcgtaacgtccatagtccaaatgacatgacgatgggacctgtcaatgcacatttacactttccaaacaaaaaaaatactacatgtatccaattttgaaatctttagttttacccaaaataattcaatgaaaagatgagtttggttactaatagtagtttggccactaagtttatctgtatcaattatgattctatctacctatatttaaagaagtgattgagctttaaatgtgcctcttttaaatttatgaaggtatgaatgatttgaatcccaagagtttgtaaagatgttttgactctgaataatgacaaaaccgcaaagtgtgatacagtttcgatagtaacgaaaattttgtatatatttatttaatttattattatttgaacctcaacgcaacttatcgaacaacacatttttattcggagttttagttatgggatcttcgagtttttatctaacatgaaggtcatggaatcaacgtttgtttcatgtaagtgtgtgataatgtttaactttttacttgcgaatggaaaaccatattgatattatgacattgtatattaaagatgtctaactcttttagaatcatctaaatgactcacatgtaaaaatttaattggtaggttctaaaggcatctccatcagtgagataccttattggtttttaaaaaaaaatatattagtattttaataaatattagttctataattaaattttaataataaaataatatttgaccaatagatgatatacaagtgttcttatgggtttttcagagtttttcacttgagagactaattttactctctctcttactttttgattatattttatttttatattaaacagtttttcaataaaaaatcattgatggagatggtttaataccttaattatcatctcggaataatagtagatcgcaaaccaaaaactaaaaaagaaaatatagtagaaaaatatctaatttttaacatttgctttcacactaatgatactagctaactcggctactaatttttattttgaaaaacaaccattgaaatatatagactgcaagcgtgggtttttcccatttttctaatttccaactaagaaatatggacaaactaaaacaaaaaaattaacagattttacagtcattgtcgaagaaaaagatggtatctctacacatatactttacacttttacagtcgttgctaaatcttttatgttggtaaattagctatataacttcaataattagaacctttttttttgtcatgagagttctcttcgaatattgattagttttagaaaataatcaataattcgtaaacacgtatactattaaaatacatttgatattgtagttgaagtgtgactttattaacttgaaagtatgtttcatcgagtaagaatgacattcatgctaaagtatacttaagctctggatgattttttttttcttgatacttattggctccatcttaataaaaaaaaacagaatggcagacgtaggattatataatttcgactaagcatcctctctgttctactatgtaaattcgaatacatgtccgaataattaggactttgaaaattctccacaactacatgatcataatgccaattctctttgatttaattaatttttatttttgataaatagactactttgttcaatcgatcatcgggtttggagacacaacttttttacttttttagtaatacattttttataagctcttgttaaaaacaaatacattttcgcttacttatcaaaaatgaataaacttattcctagtaatatttttttttttggatcataattcgtagtaatatatatgatggtgattacatgagacaatgatcttgagtcaacaagtcaataatttgtagactaatagaaaaaggttttaaaatgttttagcatacaaataaaatgataaatgaaaaaactaactgaatatacaaatgtaattggcttttaaaataaggtgctacttaaaataggatgaatctaacgaaaaaacctaactaaatcctttagagtttcagttagtgattcaacacttcaactttttgatgctattataaccaatcttgcgattcttttaggcgagttgggacgaaaaatttaataaaactattgatgagtagaattattttagtctttttaattatttattttggagcatgcacatgatagaagatttatcagtttcggattaaaccccgtttaagatttttccacatatcttataaaatattaatttttattttcacttctcacgaaaatatttatattatttttttattggttaattagttaatatagtgaagataaaaggaaactttaatatgaaaagaagattatcatatttgagccaaaagtaattaaaaataataattttgttgctcgaacgacgtcgctttgctgggagcgcaaataatctccggcttctgatcaaagccgctaactcaggcagaggctttaacatgccttcactccagttcaccgccgttgtcttctctctcaccgacggcttaagttttatctgtcggagtagtttcaatg

SEQ ID NO: 25027 - DNA, 3000 bp, Unknown; identical to SEQ ID NO: 13179
  misc_feature (1)..( 3000): 2750-1469P.txt file - cDNA_ID_2702234; gDNA_ID_2214603; Annot_ID_135607

SEQ ID NO: 25028 - DNA, 3003 bp, Unknown
  misc_feature (1)..( 3003): 2750-1469P.txt file - cDNA_ID_2702281; gDNA_ID_2214604; Annot_ID_135628
tacacacatgaaaactcatatcattatatgcgttagctaattaggtttaattgttgtgacctcgatatccttaccttgaaactaatgttgtaagctgtgaagttagctgcaaacactacaaaggagaagctatcagcagtgtttccggcggattttgctgtgtcgttccattcgatggatgtgttttgatatcctcttccttgaataacaaggtttgtcttgttttcattaaccgtaaccttttccctgcttgcttaaattgaactcaaacattactaaatatatatatcatattacactataaaagaaaattattgagcaatggagataggggaaaaagaacaagagcttggagttgaagataggacctataagaacccgaattaacgatgatgagagtcttggaagagcttaaatcagggacaacatcaatggcgctttgaacattgctgaagttaccacaaccatgcaaatcaacagtcaacacaagagaagtcttgtattggtgtctaagccttgacgtccatttctcacaacattttattggttcatggtggtgataatgatgatggtgatggtggtgatggtgatgatggtggtgtttgtgtccaaaaaatgttgaatattttgctaatgctccgatagttgtagctatagaagagagagatctagaggatggcaattggatcgtgtagagagcaagaatgatggataaaagagctattagggtggttaaaaccggtttgatgggcatgtttaagataatagtagatgggtttagtgtgtctcaactagttaaaagtaaaaagaggccaaatgttgtttggtatttatacatgtgtgaggaagagtggcgtgagagtaaagtgaaggatgggcttcgaagacagtgtggtacctttttcttcgtaaatcagatacgttttatctaaagtcatttctgaacaatttcgtgataattaaacaaaaaaagtatatacgtcgctttagaaacttagaaaaactgtggaataagttttctcataggcatcttcaatcgtttaagttagagacgcaataatggaataagatgatgaagtatttttacaaatatcagacgacaattatgaatatttttgacttactaagtattgtttttttttggttttgggttagaaaaatcgaaatcttgtttttttcttagacataacgtctgttttgcaagacttataacctgaaagtttataattttttttcttttaaagacatttttacatatgaaatattttatgattttgcttaatagatcattccttgttgtattaaccatcttgaaaacgaagtatcacggccagtcggctatcataacaaaaagaaaaagaaaaacttataatgaaatctagccaaaagcatattataaatttttatgtaacaatctataaaatttataagagttcaatttagaaatgggtgacttatatgatgttggaaaaaatagttgttgagattataagagaattttcaaatcaaccgacaggcgagcgagttgggggtggtacacgccaagatggttaatgatgcttaataaaaccatttcaaaagcaacttttactatattttaattttgcgttgtttaataaaattgtgagtgttttatctattttggtaaaaaacactgactcatttatttacagaaaccactgagtttgactcgtcgaaagaaaaataatttcatttacataaacaatgcttttctccataaactttctaactccaaatttggtatcggtatggttttaggagattacataacagtatgaattactttgaaaaatcttgaactattaacatcttaatgagtcggttgacgtactgtatatttattcaagcaatgatgcatggatccagaaactattttgagccgaggcaaaaataaacgtaaattaatagtattgaacaataaattaaacaagaaatgaaccgtgtaaatttggaaaaagaaaacatcatttttctacgtaatttatcaacattgatctattttaaaatttcaaagagtcttgcaaaacaaattcgagttcatcactttctttcaatatatatcgtctcgtgaatccaagtgaaataattgccatgaatcatgcaagatgcaccttataaaacagaataaatttatcattttttccaatgctaataacattaaggcgaaataaattgttttatagacttacgttgtatcatgtatggttaaagtcttaaagagatagagaataacaaatacacaaagtgtataaaacataaagaagagacttgagaaatgagttctcaaccaaatcaaaccgatcacacacgattagtaaaagaaaaatttagatttaactgcaatagttttataaattctaaaactactcataagaggttaaacaaagtttaaattttcaactcataattcctaacaatttaactataacgcacaacataaatgcagttgttaattctaggaaaaaaaacagattagtaagcgcaagttttcgaaatgggcattaggcccaattgatttatcttcaagaaatacccattaaaaaggttaatatttacgaaatctgccactgctctaaagactgtaatttactgcgtttttctctatcttccttcctctccagtggctgcaaaatcctaaatctcaccgaaaaggattttgtattgttacatcctcttcttcttcctccagatccatgtatgaaacctcccctgaaccctaatttagctatcgaatttgagattcgatccgatgtttacttccaaatcttcgtttcgtctctgataatataactccatcgtaatagaactgatttcaagacggttcgtttcgttttcctctatcccagattcggaaagctaccttgttttgaactccatagttttcccgaatctattcatcacttgctactatcagtttgcttcttctgttctgtgtagatttccttggagggggtttgttttgacgcagtttcgttgcaaatg

SEQ ID NO: 25029 - DNA, 3003 bp, Unknown
  misc_feature (1)..( 3003): 2750-1469P.txt file - cDNA_ID_2702287; gDNA_ID_2214604; Annot_ID_135625
aataaacaaattttataatatttttttagaataaagcagaaatttgttttgttaagaattctacttctgtaaattatttttcaaatttaaaagatcatacgttataaatccttacgtatatctacatgtattcaaaggacatgtcacatgtgtattactaaatttatagaaatttgaaaattgtaaaaattatattttattatctgcgggatcgtatatacatgctggtcgatcggtccagacttgatatgtgacgaacacacaaaaataaaacttgaataggatgtaatcgaaagactgttatgaagtaaacatttaaacatatataaatagaatcactatttttaaggaaatttttatatttgcaattttgcaaaagtcaacatatatacaaagtcctattgagttgacccaatcccctcctcaacgggacccaagcaacgaagtttcgcgccaactagttccgtttcagtcaattgcttaaatatcatataacggatcttttatacaccactacgagtaattttatagaaaaattacactgaataaacgaaaaacataggcaacatgagccattttttcttattatgaatatgattttttttttttggggaatccgtttaaaaaaaaaagtagtcttgatcacgaaatttcttcttccacatgtttatgtatatatgatcacaaatgacggaatcaaagatacatcatttagacatttaccattaatttcaaaatatttattttcctcgctacaaaatattctgtattgacatattgtcatcaaatatgcatcatttaccatttcaacatgtttattttcctcactacaaaatattctgtgtcgacaagtagtagcatgattttccttaacaagaataatttctgaactgtcttcaaccacacattcaaatcttcacccgaatgcattccccataaaataatgttacttagatactgttataccgatacacatgatcttaaacttgttgactgttttttctttttcaaataccatacaaagtaaaaataaaataatctttactgatcctagctcttgatggctgctggaattaaacattcacgaaccctttaattccgctgtgaactcgacccgatatatatatatatatatatatatatatatattttacctactttgtagagatatatccatatacttaatcattttgtacatcctatatagcaatttttttcaacaatttgtttttctgccaattagtagtttttgtgatggttaccaacttcttgtgatggcttttaagatattgcgaacgaatttgttgtaacataaattttatgtctacttatcaaattgtcatatttcacattattttactgacttttagcaactactttgaaaattccctctccatatatataataatgcgatagagtatggaagtactggcaatagtcgtagctcagttgcaaacaatttgcgatgaattttttgcaacaatattttcgccagatactaatgaaacattatatttagttgtgaatttgtgactagctaaaaaatgagatgaaaccattgctaattcatgatatactggtattctcgtcccaataatatgcgacgacttcttttacagtcttttccatcacatagatgtttttgtacttgtaaagatgtttctattttcataatacactacagtcttttacagccttttccatcacatagatggttttttgtacttaaatacttttttgttaaagacgcttgagtccgtgactcgtgagtacggataccccacaaggccacaacagccgcaaacgaatccaaaatcagtatattcgaaatgcattacgtacttaccttttcgaacgaatctaaaacgtgtccagtttgagattgcatggctcatatcgttgttgtacatgcatgtacattgtttatgtaaaatacaataacttttaattatatacgtatatataatcatttttaaaatgtctattgtagcttcaattcaaatggttcgggagaaaaaatactctctaaacccatattaaaacttgcaaataattaatttagtatcttctaataataattaaatatatatacatcaaaactatcatttttatctggtaatgtttttcttatctggtaactataattaaaagttatcgaacaaactttcaaaatcattaatttttaatttataaattagaataaataaggataaatattttatatgatattctatcatctccatttagagctatgtgaatagctgttgcgcatttgtgaccaaaaggcgagagagctaaagatctcgttatggccatctattggtttactaaacgctaacattatctatgattttttttttcctttgtaaacaatatatcaaactttttttgttgtgaaaattcaggaggtggctcgtattattatattttaataaatctattctattttttctcataaactaggtagacttttattatttttattattattttctctatcattttcaattatatttaatattattgcgagctagaccctaccatctcgtgtcttatcgttcaaatactatagaataataatattaacaatatgtcaacggttttttggtaaggacgagttaagaagaagaagtcagtctccaagaatttgactcagaacaataccaaaactgctttaattcgtcaaaatatcaattctggactattcatttcaacgtctcctccaaaaacgtatgtatataaatacctacacccaccaacaccacaacttaccaagtctccaaacatagttcctcgcatttacatatatacatataataatatctctagaattttcaagagcatcaagatccatcaagatccaccaggtatatatatacgtgcttcgtacatacatacatctcctgagtttccgttctttgataagttctctatatttgctaattgattattgatgcatatgtacgtgacaatgtctcattaacagtgtaacggagaagaatg

SEQ ID NO: 25030 - DNA, 3003 bp, Unknown; identical to SEQ ID NO: 25029
  misc_feature (1)..( 3003): 2750-1469P.txt file - cDNA_ID_2702287; gDNA_ID_2214604; Annot_ID_187170

SEQ ID NO: 25031 - DNA, 3000 bp, Unknown; identical to SEQ ID NO: 13195
  misc_feature (1)..( 3000): 2750-1469P.txt file - cDNA_ID_2702291; gDNA_ID_2214604; Annot_ID_135624

SEQ ID NO: 25032 - DNA, 3000 bp, Unknown
  misc_feature (1)..( 3000): 2750-1469P.txt file - cDNA_ID_2702293; gDNA_ID_2214604; Annot_ID_135623
ccaaaaaaaaaaaaaggaagtaaatttacgacgatagattaggctgacggcccgaccacccgttatgggtcaataataaaggcccattaacggtataacttagcaagataacaaacgaagaagaaaagtcgttgacaaaaagaaaaaaaaaacacgattttgagacaatttgccgattcctcgatcatttcatctgctgaataacaacagtgattggctcttctgattagcaagcttcttcttttcgaaatcgcatcactttggctgatcggtggattctacgaaccatgttcaatttctggtaacatcaacttcatgaatctgatttttgtgattatgcgattttgttaccctcttttacctcagctcgattatgctgttatctaattttgattatgatcgttttggagaatttcaatttctatgtgtttgggattaaagaactctgctttttgttagttacttactgttttatgcataccattgatggctcttatagttagttgctgctaacatagttaaggtgaacaaaaattttagttgtaatcattaaaagaacctgatctatgctcatgaagttgtgctgggtcttaagattttgcaatgttagtatattgggtattggaacagtttcaggtaagtatttttaagattgttgtgttaaaaatccaggggatcaaaagaacagcaacaaggacaatctcgtccttctccagaagcttctgcaacaccgtggtattcgccgtctcttgtcacctctcctagctcatcccggcctcaaacctcagggcagattccatcacatgtttcaccaggtgaagccgccggcattattgccattttaaaagacaaaaggttagtcttcaatttccttataccttcttgtttgcctcttttgtacatgatgtataacagttttcttgtgtcacacagtcacacatttcttgtcatctttaatatgaatttatggtcttttaggcttggaatagtttagattaacgctagaccaaacactagatttactggttctgtggttttgatagtttggttgctgatagtctcttgtgattttgcgttgtgttactaatttgcagagatatataaagggaattgatttctgtacttgtcggtatgttatcttgtatgcttactcttattactcatttatgatgttcttcaaatgttttgctcttagtgtggatgagcttaggaagcttctctctgacaaggatgcgtatcaacagtttctgcactcgcttgaccaggtcactattcaaaacaatgtaagtgggaaacatgatgtaaaaatcatctattgtcttaagaaatgtagcttcttcattatttacgtttttgagatgattcagttttgtgctttttctttatatgttcattagatcagagaagagcttcgcaaagaaacgttacatctagctagtgagttcttgtatgactttttttgacgatgacaattatattcatattgcgagatctaaaacattcatgctaatataacaggagaaaacttggagaaggaaccacagatagtggagctcagaaaccaagtgaataatatcattcaatctctgagtgagttaattaagtatatgaaacttctctccatttgtataatctttttaaaaacagtgcagaataatccgtacatccgagcttgcgactgctcaagagaagctcaatgagcttgagaatcaaagagaagagatcctcaaattctactctccaggttctcttcttcatagacttcaaggtaagtaaaaccattagctgcttcactcaatatccttcatgtgtaacaacaaaatgatacatgtcggtttctaatacacaatcccgggtttgtttatcgcagatgctatgaaccaggtggatgaagaatcagaggagctgcaacagaagtttatggagaaggatattgacacagctgcatttgtgcagaaatacaaaaagctaagaagcaagtatcatcgacgggctttgattcatctcgctgctaaaacttcatctattggctgaaaacaaacttacacgttttgttttttttgcttccgaccttaattcgatgtgtaagtaaacaaaactggttaaaagtcgagatctatatacgagatcaatatatatcattgtattacataatcatgttatgctctatgaatctgaatcttctatagttctttctgattttgaatcttttgttattggttcgtcctggtttgggtgtggaaatgcacaattatgttcagatgacgtggaatgtgtccaatttttgtctttgtttaggaaactcacaccacaatttaccaaagcctcattcattctttgacgtgtccttatggatcatgaagactagcacgactcacctacaagtcaattttaaataatataagtaaaccatatcttaacttactcattcatataattttgtagttaattcgaaggtggtcttacgagtggtgactaataatattaagcctcactgaccctaaaaactgctcagaaaatttgtctaaagatttgcgtataagaaactttgagttctcacaataaataatagcggaaatatacaatttggttgatcccttgtttaagaaaatttcccggtttgcatgctcaattttatcatttcataatcttctgcatctataattgaggaaatttagtaaaacagagaaagcagatagaggaatcaatataccaatcgttaatttaaaatagtaaacaactagatttgaacataaaatcgaaactaaaccgaaccaaaccaaactaaaccgaaatcaataattttggaatatataaatttcattagtccccactatctccgctaaaacatttgagaacgtctctctctctctctctctctctgacagttctttctgtctctctctctgctcgatgcgaagaatcgagcatttgtgtcgctctctggaacgtgtgtcttcatcgggaatataaccataatctccacgagctgcttgaatg

SEQ ID NO: 25033 - DNA, 3000 bp, Unknown; identical to SEQ ID NO: 13221
  misc_feature (1)..( 3000): 2750-1469P.txt file - cDNA_ID_2702318; gDNA_ID_2214606; Annot_ID_135663

SEQ ID NO: 25034 - DNA, 3000 bp, Unknown; identical to SEQ ID NO: 13221
  misc_feature (1)..( 3000): 2750-1469P.txt file - cDNA_ID_2702318; gDNA_ID_2214606; Annot_ID_187233

SEQ ID NO: 25035 - DNA, 3003 bp, Unknown
  misc_feature (1)..( 3003): 2750-1469P.txt file - cDNA_ID_2702330; gDNA_ID_2214606; Annot_ID_135657
ccacaagtctcttccggtctagcaagattgttttcttaaacccaaggtacctgcaaaaagatgttcatttcaagaatcttgctgggaattagcttgaatcagattttcataatacctccgatgaccttcgacaacttttgccatgtttccataataggtaggaataaaagtgttgctggctacagatactatgaaatctagagctgccatttgagatgaatggttctgaaactgttgcaattctgttggatctaatagcatttcctttttcacctgaaaaaccaacaagtcaccatcatcaccaaatcgtttccaaagtgcgtaatgttgaaagtgataaaacttacaattcgtggaaatgattcctttagaagggctaatctctttgcaccaccaaaaatctcaccagctgcaatgtatatctgtgtatccttttgaaaccccaatgctttaagaaccaaaaccgcctcctccggtgtcaaaggacacagtccttgcactctcctttcttctgaaactatctctttctctctccaccatggatatgcatacctagaacacagaagtgaaccatgaaatcaaaattttataaaagatgagagcatccagctaaaataatagtttcacctcatctttttgagttcttcagcttcttcatcggtacaaccatgagtgcaaccagagaaagccaacatgtccatctcatatctcaaatgcaaagccacaaaagaccctctttgttgaagaatccgaactaactttgatcccaaagcctcaatccgtggagtgaatctcagtccttggaaattcactcggcatctcagcctttgaaggtcaagagaaagaccattgttcgccaatcgcgtatcactccgaacgaaatgtataactttacgtttactaaaccgcggcaatacctgaaacaaacaaaaaaatccgatcaatcataagcatttcagattcatcacatagaggcaaaacagaacaccaaagaaacttgcaaataaacctgttgcaagtaatatttgtcgttggaccagctcacaggcggcatttcgaacaatttgaatccatacttcttactataccgtttaggaagtctccttatgatcctaacttcatctcttaacgaatcaatgaaatgctttatatcaaaaatgtcctcaaagtcactgtaaaaggaagaaacaaaagaatgctttaaactacaaacaaatcttgtaggatcattgacatgagacacaaacatataccttgtatcagcccagaatgattttttatcaagctcaggaacaacaagagtcaaattcaatagcctagcaacagtcaccatatcacaaatctgaaacaaaacaagcatcaagatattgcaaaaccctaaattcagcaaatgagagagagttacacgaaccgctgcacgcatttgattcaaaccgccattacaggacactagtaaaattccattacttgtgtaattccctgcaaaaaaaaaaattcaaactttccttcaatctctcaaattctcaataaccaaaacaaaacccaatgaagaaaacaacaaaactaacttggaggaagaggaggaggtaatggaactgactgaaccgggagagagaatctagaaatgtgattggttaaaccagtgaagatttgggaatgccaaaagagctgaatcaaacaagtccaaaccaaaatgcaagaacaaactctaaagaaccaaacttgtaatcgagctttgggaatagcttgactcggaggagctttatagtcactccgcatcagagtactctccgatctatctccgacgacgacactcatcgccgcttcatcatcggaaaaaataattaaaacctaacaaaaaccgcttaatttgccaaaagtttgaaacttttgtggatttttttctccgaaattatgaaattagtgaccgaaacaagtgcggacaaaaaatacagatacgaccgtacgaagttttgttttttttctatatgtttatgtttcttttcccgtgagaaaattgaatttttcttaagaaatacacctacttttatataagattattcgaaaacaatcgaaatttttgcaaagatggtatttttcaaaattagaaaaacttgaaaatcccaacagattgatctcatctttatctctcttttggatcatcatcatcatcatctctgtagcttataaaaaaatatatatatggctgggcataaaatccgaaatctaaaaaccgatccaaaaaatccggttccgaaaccgaaccgaatagtcacaaaacccaaacagatgatgaattcttctacccaaattccccgaactgaattcaatccgaaccgaaaaccgaatggatatctgtaatccgaaataaaattatatatcttaaaatattagtgatatttagttataatttatacccaaaaaatactaaataacaaaaatattcgctataaccttaatatccaaatttcttttagttctatttgttataattttactttgttttgcaaaattaaaccaaattttagtaaaattaaacgatttttgattaaaattaaacaattttttagtttttttttctcaaaaactgatttgaaatccatacaaatccgaatagtcatataatccgaatggttaataaactttttcatccgaattatccaaatacaaaaaaattctaacctaatccgatatgaaatatgaatgttcggacctatattgaaaatttaaaatttaaatttcggatatattaatctatgtaagcccaaatattgtgccaagtgaaagttcattacaaaactaagcccagttccatatacaaagcccataatatgctcatgacaaagaagacttgtcaacgtgtcttcaccaattaaataattacacgtgtgcaaagaacgtctttgactctcttttgtcttaccctaaacggcaaaaaaacattgactactgcaagattttatctctttctctctctctcttctcttttctggtgacgccatg

SEQ ID NO: 25036 - DNA, 3003 bp, Unknown; identical to SEQ ID NO: 25035
  misc_feature (1)..( 3003): 2750-1469P.txt file - cDNA_ID_2702330; gDNA_ID_2214606; Annot_ID_187226

SEQ ID NO: 25037 - DNA, 3003 bp, Unknown
  misc_feature (1)..( 3003): 2750-1469P.txt file - cDNA_ID_2702339; gDNA_ID_2214606; Annot_ID_135661
catgtttttgttgttttctaacattttgcatcatccaaagtgaagtcttgctttctttgttttcacatactttaacgtaatgtatggcgaaacttccttaagaggataggctgcaagattgaatgaaactacacacttagaatttttgttttccttcctaagaatgtaagtattcataaaatgaaaatgtttatgttttacacgcgatacctaaggatttggtcccatgaccaaaaaaaaaaaaaattagaaatatgctggtcacaactctctttagtggcatttgctaaattgcattgtcatatcacggtgcaaagtagagatctccaaatctataactaattaataacctctggttttttaggccaaaaggatcgtctcctaaacaacaacttgtgaatccaagctacccaaagagcatatgcatatcagcatataaagaccgcattccttcttgcggtgcctcttagacccaatactcctttttctgcctcccctctgacaatcaactttaatcttgcatgcgactattggaaatgactctactttaaaggtaacagaagcttcaaggtctctcagagagcgtttaggtagtgtcaaaacagaacatcataacttaatggtgttgtgtatgaccaaaaaatcatttttaatctcccttcaaaagataatgtcttattgccaaatgcaatatcttatgcattttgacactcaaaaaaccttcatgtatttctccatcgactcggaattcgagcttgtgacctgattgttccaaatgcaatatcttatgcattttgacactcaaaaaacttcataacattttagtttttttaatcaaacatgaagcaacatatataaaacagaacaatacatcaagcataaactgtatcccactctatttctctttgatatttgtatatcttcttacatacacgtgaaactatatatgtctgtataataatcacacaacacatagcaaatgctcttctaatacatacatatatacactcgtctcgttacacgattcgaaccactcgaactctgcgtcgtgatgataacaactcgttcaatctcccaatttcaaccataagttcctttattctctacaaaatcacataatttccaataaaaaaaactttcttaagattactatagctctataagctcagaattagttaacacaaacctgatctttctctctgaggagaagaagcagaaatctcagtttctcttcatgtagccgtctccaccatctcacgagcttcacataaacaaggctcaagaccaacgagaagcctccaatgattgttaatgaccaaaatacccttttacgagttaggtaactacaacgcaccctttcgacggcctgaaagatgcacactgagttcttgattaatcgcttcttggtagtctcaatcactcgccacggaagccaaagattcacggtggaggggacaacagaatcttcatcatcgtcgttgatcgttggattttcacggcggtggcttggttgtaatatcggtgagtttggaggggtagatgcgtcagtacgtggggatttgggtgaggtttgtataacaactacccattcactgaattcttcttcttgctctgcctctgctctgttcataatttggataatgttctgttttttttttgttgttgttgtgttcaaaatattttcatttgctagttgagaacaaaatatctaatagaatgataatgacactattggtttctacactctcgtatttttatattcaaaattaatgattttcttatttataaattttaaaataaatctataaatattttagtagtaatataaacttcaaagtactttcagctgatatatatatatatatatatatattcatatttaataaacagattaattgtaaatgaaattttaaacaatcaacatgttaattaatttaattaaaattaatacttatacgcatgtttattatttcgtgctgtgcatgggtatgatcagaattaaattccatgcatgattatattattatatcattaacttatgttccaaacttttcttatacaacgtcttctctacattcataatttagataaaaacttaaaggtgaaaatggttccaagaatattgcatgaatggttaacatatatcggtaccttctctttgtgttttattttattatatatcacattacatatatataatcctttgtatagttctgctcttaatttatcttttatccttttcagcttcaaaagtttctgaaaaacttagcttccgaaaagcagcagaggaaccaaaccttcctattgctgctgctactactctgatatcacctcaaggtcgagtagactttgtctttatggacaatgaagcacaagagataagaaatgtttcgccgacatcacaagaacttccatcttcttctactacttctatttcacatagtaatgaacgatctaattctctacgatctatcgttattcagtaaatgtatatagattttctatcttatactacaatatttaaaattacaagataatatataaaaaagggtgatccttaaaacaatattttgtttgaactcaacggattttcctacatttttactcaatcatatacgtggaaatgatgataaaattatatcatatgataataaaattgatgggcttaaatatattatttggactttatattcaggacattgttttgcgtggtaaaaaggtgtgacccttgcaggatttagggtttgtaattcgtagtttgacagagacaaatccatcatatatattgagatgatactcatcaataacattgtgttagaagaaataatggtgagacttcccgtgaaaaccctaattggatttcaaagcgtgtctaaacactggaggtgtacgatagagtcgaagtctttcaaggagagattttgactttattaggaaacccaagaacccaaatttctcttaatctatgaaagcgagtgtgagagtcttgatatgaagactatg

SEQ ID NO: 25038 - DNA, 3000 bp, Unknown; identical to SEQ ID NO: 13220
  misc_feature (1)..( 3000): 2750-1469P.txt file - cDNA_ID_2702343; gDNA_ID_2214606; Annot_ID_135662

SEQ ID NO: 25039 - DNA, 3000 bp, Unknown; identical to SEQ ID NO: 13220
  misc_feature (1)..( 3000): 2750-1469P.txt file - cDNA_ID_2702343; gDNA_ID_2214606; Annot_ID_187232

SEQ ID NO: 25040 - DNA, 3000 bp, Unknown; identical to SEQ ID NO: 13235
  misc_feature (1)..( 3000): 2750-1469P.txt file - cDNA_ID_2702364; gDNA_ID_2214606; Annot_ID_135671

SEQ ID NO: 25041 - DNA, 3003 bp, Unknown
  misc_feature (1)..( 3003): 2750-1469P.txt file - cDNA_ID_2702371; gDNA_ID_2214606; Annot_ID_135673
aagcaaagatttagaagatttaaatcgttaattaaatatttttctttctaaataattaatttcagtagcatgacattgtaaataagttcaaatacatgatttatttatttaaacaaaaaacgtttagtaagaataatatttatttaaacaaaaaactttgttttaaaatattgttaacaaatacgtttatgctaattttaagggattgatgtgaagtttgtttggattaaatttgattgataatgtggttgacaatttaaattaagaatttaaagtaaaattaattatttcggaaaaaaaaaattaatgctaatggcattgagttgtaaataagtccaactctaagatttatttgttaaaatggctgcaaaaatgtatttatagatttcggatatttttgattatccaaaatattttggttccgtagtaattcaagtttcgattcttttgattataatgtttagtaattatttttaaatttttgtttcgattgactttattttgctttcctatttcagttcgatacattaggtttaatttatttgccaaaacctaaaaattatcattttcttgtgtttttcctccttcttctcaggataataattagtttatttatttttagacggtccatttaaattcgatattaattagtattacttcccataacttaaagttcggttctaattatacaaatatttgattaacgcaatctcgagtggtcaacaacatgatacatgatctttaacatcataatttcctccatcatacacaaatgacaaatccaacagttaataataattcagaaaaaacaacagcttactaaaacagtaattatagaagataattactaacataattatttttagaaactaaaacattactcacttcataaaaccttgagccatcttagcataatctccaaacccatgaccacctccggacttctcatcttctttcttagccgccggtgctccagctccaccaccgtgtcctccaacattaccgtggcttccagttccaccggtggaggagtgagagtgggaagtttcgtacttgtgaagatattgttcagccttttcaaggtactgaccaacaccgctcttttcatcgagcttaccgtatctagaagcggcgtctaagatatcagcggtggctccggcgactttggctttgtcaagcttgtctgactcgtgacgagcagcggcttgagcagcttcggctacgatcttggcactagccatgagctcagcgttcgtagccggtctgtgtgttgttggatcggtgttggagaccggtttatgtgttgttggctcgccgtgaccgggtttatgtgttgttggctccgtgtgaccgggtttgtttttgttgtggtttggctccggatcagagctctccggtttcttgtcggagaatttcttctttacttgatcggtgaagaaatccatgtttctttgtttcaaaggaaaagttttttcttgttcttgaatttggtaaacgtacaataacaacttatccggaggatgatatttattgaatttcttgaaattaggtttttgttctttttctttgtccactagtttttggtcttctttttctttatccactagttaatgggatatttatagtcacgattcttacgccttagatctacttttcgactttagtgagtgaattttattctcttcctacgtaaaaaagatgcttgattacatttgaccatttcgcaaaagtcgaccctcataaccggtcttgataaattctttcttattatctttgattcttgatcatagagttacttttattggtggatgggtacttttagttttgggtatttgtttacctatgtaaatgctagtataatcttggattcttcatcataaatgtagagtttatactttatagggaagtaatatttggtgtattttactacacttaaaagttttagtattggttgaggttttgatgagtggcacggaaaaatgggtcctcatgccacgttcgtccgactatccaactctttgaccatttatgattttgtcggcagaataattaaactatttgaagattggtagcagagtttagatgagttttggatgggcctatgagaagagagctcatatgggctcattaatagcccattattagatatatattctgagcccaactttgtttgatacattccattgaacgttgtcgtatgtgaagaaaaggatgtggtcatttccatcacacttactaattttttgtcaacaagatgaccacattattatgacagaacagaagtgaacaaaaatctaagtaagaccaagaagagtaaactgtatttatatatgtagaaacttgtgtagtatagtatatataagaagcagtgaaagcaaagtatggagaagaagagaagaacaacaggaggtgaaatttcaaaggagtggcatgtgaacacatatcctatggtttcttcaaatttccattgaaaccattgagttttgtgttctcaggtcacccctttgaatctcccctgttccattttttcaccttactaattttttttattcatactctaaatttgtgagcttttgtgctttctttttttttggtcataagtgagattttatgcttttttgattacacatttattataatggaacctctattttgtatctgaaacagagacaaagcattaaccatatcctacatatataccttaacaaattaatgacaactctggtttccaaaacaataaattatgtatgatttgacaattaaactggttgataaaatgtaaatttggaataaataattagttccataatatatgttttttatatctaaaatagcatagtcttttgaaggtgaaaagtcataaatcaggtttggtttcaaacaatgacttcataatcactcaaaaaactcttcttaattatcaccaaaaccccaaaaccaactaaaactgaaaaaacaaacgttgactttttgactaaccaccatcctccgccgtaaatcatg

SEQ ID NO: 25042 - DNA, 3003 bp, Unknown
  misc_feature (1)..( 3003): 2750-1469P.txt file - cDNA_ID_2702375; gDNA_ID_2214606; Annot_ID_135676
caattatacttttttcatgtataaatcttcttatctatatatccaagattctattcttttttaactatcataaaatattacaacaacaatatataatacaatgttatgcaattatattacttatgtggtttgaaacttatctaacttgattataagcaaactattctttgttccatgtattttcctaatctagtactctagtcacatcatgataagctcatgactaaatattgaattgtaataatttgaataacaaatgtataactatctactcatttatttcaaaagttctatctactcatttatttcaaaagttttataccaaaagagaaaacaaaaagcaaaaaattaaagagtcatttaagtcaacacttttaggtatctctctttgcatttacatatacccatattggagaaagtgtcttgtattgaatgttttggtatatctaagatcccaaaaaaacttacttgaaaaatgtgtatgtcattattaatattaccaatttatcataaggtacaaaaaaatcatatatcatgtagaccaaaaaatgtaataataagagaagattaagttaaaatactaaactaaaaaaggttaaatagcaaacagctaagttacaaatatcagataatgactataaaaaatagcaaaatagaaaaagtagaataaaagtagtgtttgatacattaacatgatttgtatttttttcttttattttgaaaatagttaattaagagtgggattgatggatggtttaatgcaatatgagaactttaatttttcgtcactaacttttgttaattgttaaatgatattaatttagaatgacatgtggcactctccagtgtgatgatgtgtcattcatatggagagagttgaccaactttcatatatatgatttgtgtccaagcaagatgtttatcatgatcattaaaaacggttaatatgattttccacaaacggtctatcacattttaatgatccatataagcaggagtgatccgtcttattgtgataattcctaagaagttgtattttaatcatgccttcatttcatggaagtctactagaaaaaagcgaagcttcgtaattacatatttggagattcaatgagaagatttgtgagaacttgagtgggaaaaactaatagaatttcttctctttatgagctatacccatcttcatagaatcctatattatgatcacaaactcttgcaaaatatctaatcaaaacggattattccaaaactcgagacatcatccatgagacgttgtgcaaatggatttagattactcgaatggagagattgaaggtagtaaacgcttatatttgatcatgcatgttgttctaatgatcttatctcatcaagacatcaacccaagttcgatcgttgtcctgagattttgatatctttgttggttttttaaaaatattatttacgactaaaatatcagtgttgtgtttagatttgttttctttcaaagttgttaatgcgacataataagaaaacgattgctttgacgttttgttgcctgatttctttcttttttttcctcttcttccataaatcgtaacaaggacaatttatttcttttaaaaataggactcttttctaagtacatataataataataggaccatgtacataggtgatatttttagagtatcacaagtcctaaaattatttttatattaataaagcaattataatatgtttgatcagtatcagtccactgatatttatgataccagtatcatctgacgtggcttcttctgattggtcacatttgacaaaaacaaaaaaaattatatatatttattaaacaaacattataaataatactaaaaaaattcttaatgatactttgtgagtatcacctatgaacatgctcttataattgagttacataattctatgtagtactcaaaattttataaatatacttaacctaacacgtataaaataaattatttaacccataaacatgaaaattaggttttcttttatagtagtggattgttattgctcaccaccaacaacataatcatacaaattaataataataattaacaaaaacctttttgatatagagaattttagaaaaataataaaataaagagaccaagagacaaagagaccaatttaataaatgcacaaaaagcaaaagtgcaccacgaattttgcaattattctcctcatgactgtttttttgctggaaccaaaactaaacaattctttgttttaaaaagtttacttacacatactttcttaattagatctaagtttaggattataatcttcatcatcattatttgttattattaatctccatattcagaaaattcgattaataaaaaaagaagcttacaagagagtgcccatataattggaatatctctctctctatctttcttctgaatctctcaaaaatttcgccattgttgttgctctgaaatctgttaactttggtacgcatctcaaaaaccctaatttgattatcgtcattttgtctgcatttaatttatttgatctgatcttcttcgccattctcgagatctcaatcatgggtttatccatcagaattattatcaagcttttctttttcttgaattttcgccgacaaaaaagcaaaattcgcttaatgtatagattcactagaaatggtaatgtttcttttttgggaaaatttcgatttttgatctgtgagatttgattgcaggtgatttgattgcatttgcctttgagagttttaatcttcaatttttggctacatcgagatttggttctgaattttggcatctctattagtagtgaggccatttcctgatttggatcataaagagtggagaaaaatcttgcctttgtctccttaggattgtggcttgatcaggtaatgagactatgtgcttcaaaattgagacttgtttggtgaaagaagcggatgaaaaagtttctgtgtacagcgagaggaattagtggtttctgcttacgaatgatatg

SEQ ID NO: 25043 - DNA, 3003 bp, Unknown
  misc_feature (1)..( 3003): 2750-1469P.txt file - cDNA_ID_2702383; gDNA_ID_2214606; Annot_ID_135678
tgaattaactgatacaaatagaaagtttttaattaccaaacttcgaatgtatcgtgcaccaaccacaaaggactagaggaccaggtcagcattaactcataggttatgcaaaaatttctataatttgtcaattcccaactttcattttccttcgtacattatcagatgaacactaaaacatattgatttgcttttattgagtctactaccattatggtctcacgatgaaatcacgactattaattggttctgcttttattttgactaagaataattaaattgtaccaaacgataaatgaaataattacaatttttagcaacaaaaaagaaaaagaaaaaaacaaatgttgagaccatatacatttttggagtttggacactgagattttcagattcttgtctgtggttaaacctcggaaccagagagagatggtatggtctttatcactctcttttattaataaactcatatctctctcatctaaaatctcatctcttcttcttcttcttcttcttcttcttcttcttcttcttctcctctgtctttgaagctatcttcttggattgtgtttaggagttaaaaacttgctttggtccatcatgagattgcttcttagtctcttgtttctcttggctttaaccacctactcaagtaagctttttgttcaaaatgattctctgttcttgaggtttcaaacaaaaccaactctctctcactttctctgtttctaggtgcaacttattgtctatgtagagatggtgttggagagaaagatcttcaaacatcgatagattatgcatgtggagttttaaaagattgtaatcctattcatgagaaaggtccttgttatcaaccaaacaccatcaagagtcattgtgattgggcggttaatacttatttccaaagatttggtcaaatctctggaagctgtaatttctcaggaactgctactaccagccaaaatcttccttcaagtaaaaaccaaaatctctgaaacctaaatttgttggtgttatgatgcaatctttttgatgttttcctctgttcttttgcagctgtggttactggttgcttatatccttcaagtccagggtatgtttgtttcaagatttggtaaagagattgtttggttaaaacttgtctttctttatgtaacgtgacttagaagtttggtgttcttttacctgttttgtcttccacagaagtgcagggacaactcccacgacaggtactccttcaggaacacagacgtttccgggacctcctgcgtttggtccggccggagattttgatccttcaggcaataatggtgctccgagtttgttcatttcaatcgctctctcacttggtttctccgtcgtcattgcgtttctataaaaggctagtgagtgattaagaaagtgaggctgacgttttggatgtatggatgagattttgtcacgtgtgaatgcaagttctttgaggcagacatccatttagtggttggctttgttgtttaggctattttaattttatttcatgtatgtaagaaatgatctaatggaatctttctataagtgtttacatgcagagtaaatagaacatgtaaacataagtagaatgcaaacaatatataggaagtggtagagttatgtctaagagatgttgtggtgactggtgaggcaaaagttttatttcgatatgaacctgacttgatattttttttgtatctattccagctttgaatcattagagacaaacttattattcatgttgttctatatcttaagtttgaaaaaacatataaacctcaaatcaaatttaaatattagattagcggttttaaaacaagaccaaagatttcatacatatacgtgctaactattagggctattctctcatattggaagttaagtatgattttaatcttcattcattgccaattattttgagttggaagcccacaatctaatatgatatcaaagcccgaacatatcgagatcagtggttagaaaaaccatcatttcggagagacgttttaggataatgtcccacattagaagttgagtaaaatataaagtgatatatatataagatatgagtctctccacttattaacaattgattttgagttggaagcccacattctaatactaacgtacacctaaatactttctatatcaaaaaatcaaggttactaaaacttattaacacacaatttagtaatttactcataataagcccacatataaatcaaacctatagagtgaaaaaatttacgggtcggatttgcaatatttgcatcaagatttaagatcatcagcgttgttttcaccgtatgttagttatctcgaagatttagagaattatcactgtttttatcttcgatattcaaatcgttgttttcattgttattattccttaaataattgtttccaccaacaaaaatctatataaaaacaaaacatattataattatatactttttcatgataaactattgtataatataacttattttatgatttctatcaaaaaataaaccttttgtcccaccatgtacctttagttcaatcctaatttacatatatatatatatatatatgtatgtaataaattggtactaacttgtctaagatatatttttttcttttttttttcaagacttaactagtaatctctattgtatttttttcatatttataacaagctaatacaaattatttagtttgatactggaaaaatatagtatttgtttaatatttgaagatttgttttaaaaaaaaagttataatgaaatataaattttggaagattactcccacatctaaaaaaatacgatccattgattctcctctattcaacggttcgatatcaattacacacacgaagttaaactcttccctcccacaccttataaaaccctatacatgaaaaaaaccttcatcttgaaaaaacccctttccaagttttgcaatttccactgaacagaaaactttcccggttaagcaaaattcgccatg

SEQ ID NO: 25044 - DNA, 3003 bp, Unknown
  misc_feature (1)..( 3003): 2750-1469P.txt file - cDNA_ID_2702425; gDNA_ID_2214607; Annot_ID_135692
taaagttaacgtctcgcaacaattaaacgacatgattaaataggtgacttcggtcaaaataaaactttgaacaaagttaaataaatcagtctttggaataatttgtaatctcgtgcacgttttcaatggaaactaagattatacattatatttgtattatattagagctcttgccacaaatggttttggaaaaacctcaacacgattagattaatttattttaacatttaaaaaaaaaaaaaacttatgctaatattaaatatgattatagattaataaataggtgacttcggtcaaagtaaaacgttgaacaaagttaaataaactagtctttaaaataatttgtaatctcttgtacgtgtctactggaaaccaagattataaattgtatttctactattttaaagctttcgccacaaattttgttttggaagagatcgattccatcattatattttttttggagtgaatctctagttcgacaaaaattgtttttgttattattgaccacgagttgatttttcgaaagtttcgtgcaaccctatcagataattttccaaacctttatctttattttgatgtattttctaaggcctcactggtttaaacgcaatgggtacggttgcggttgcgggagtttgcggaaatgggcggttgcagtttcaagcgttatcaagcgttttgaacgattggttgagcgtttgataatgggtacgtttgcgggagttttatgactggtaaaccagtgggtacgatagtaattaaataaaaaataaccaaaataaatataatatattactattaaaagaaataaatatacagtatattatgataaattgataatattagaaaacttgattttctgaccaaataaaaatacaatatatcaccttgtccgaccaaatgatttttaatcaaaaaaacaaatcgaaacatgtattcaatcaaaaaactaaaaagaatacaaaataaaataaaaacaacgatgctatgaaatagttaaaaaattacactagctaatgaatgaataaaatgatagatgatacttatgtttgattcttgattttgattttcatcggatgccataattgagacaatagggttacaatatattgattaaggttttctaataaaaataagatatatcacagattagattattttaattatagtgattagagtttgggtggaagccacaattatttaatttaattaaaaaagatttatttttaacctaaccgctatcgcccgcaaccgcaaacgcttgcgggaaggagcttttgaaaacggacaattttgagcggtccaaagcgatgtctagcggtttttatgattggtgtcaatcgctaacaaccgctaacaatcgctaccaaccgtaaacgctgtgtttgcgggtggtagagggagaaccaatcaagccttaagttctggttttctaccttttttgtgtcaaaggttttcatatttatgatattttaaaaattatgtgtaaaacaataaattgtgctaagcccaaaagagaataattgcagaaacacgatattaaaaatacaaaaaaaaaaaaagagaaagaccacccatgcctattagaggaacaaccaacccataggaaaagatccatcggagccaaaaaagtcaaacgcgaagatgaaaaccacaaaatctgatgtccacactcatgacggatccaggtctaaatccgtcgtgtgtggcagatctacagtaaaaagaggtgaggcatttaaatccgttggcatatctacaatgaaaggaggtgggacatgtgtcccacacttattcttaataagtatttgattgatcaaattttcatataaattttttttaattcatttgaaaagattactccatataaagatctaaaatttaatttttctccattttttgagcttaattgccggctgatcccttgtttctcaaggaacaatgctgagtcgaatcccatatctgtctacggtggtgtggtgtctcctccaatgatgtagcggtagctcttatttgtcggtagaggtctctttgagcatgatgctagttgaggacgttggtggttgtttggagatccccttggctcaactgatgagttagaatatgcggttacaacgaagattgtcggagaaacggtgagttttgtagttctatttggtggtcaacgactaatcctgtcatgagggactatgagccaataagcctctggatccaccgtaatggtttctatcagaccggattgatgagattttgactcgaaagtttcttagattttctggtggtggcttgagacgttaaatcccagtttatcaggttgcttaaaataagattccaaagtatgatcaactctccaacaaccggctctacattgttagatcccattttaagaaacctgataaactgggatctaacaatgcagagccggttgttggagagttggtcataccttgaaaagtgtggcgggtctagtgcatcggtggcgtgatcgaccgaggaaatttgaatctcctatcgtagatcgcatgcctgagatgcacaaagctgttctctttgaatccgccaaaaactatgtctgactcttttgccttcagtcatcaccgaattccgattctcgagccgtcgtcgtcatgaattttttcttttaccttatttggtaactgttgtcttgaatattgacccgaaaatccaaatctgattagattttaataaaaattaaaaatatatattattctaaagtttttactaaattgatattaataagtcagagataataatggtagaatctgattgtgaagttttaaagtcatcatggtcgaataaaaaacactttcgtgtagttgtaatcattcattaactaaactcgtaagaaatataacacttataaacttacaaatccacgataagaattttctgttttggggcctaaaaaatccacgagaagacaaaaaagggtaatttgaaaattttcagatagaaacagtcccgtcaccggcgacgatg

SEQ ID NO: 25045 - DNA, 536 bp, Unknown; identical to SEQ ID NO: 13245
  misc_feature (1)..( 536): 2750-1469P.txt file - cDNA_ID_2702429; gDNA_ID_2214607; Annot_ID_135693

SEQ ID NO: 25046 - DNA, 3003 bp, Unknown
  misc_feature (1)..( 3003): 2750-1469P.txt file - cDNA_ID_2702449; gDNA_ID_2214608; Annot_ID_135711
cgaaagacaagattttgacaggtatttgtacaagtactgagtcggtcaacaaaccccgtctggactctggacccgaagtaacccaacaaacgttgcgacaactacattagcaccaccaccaaggcaccaataatgcaacgtaagagggacgcagcaaaactgtcgcgatgtgagattcacgcgctctaatttaaacgttgactctttgtttcatcgttactctctcccatttatttacttcgcatactctcttcgttacaagtttccatttaattactcttaagtctctaactaatagctttagggattcgtcattaatttaaggcaacgtaaacttaaagagtttcgactaaaagccgtttcaggaaacatacatcatcacatactttatctaaataactggcttattaattttataacaaaaatgacgttatttagtgttaagatatacaaatatttaatttttactaaattagttaaggtaaaattgtgttcctttctgtgagttttccgcaatattaaaaaaccctagagaaattaacaaaacgtaattgactaaaaaaagagttcaaaacaaaacatttgttacatttatttcataatttaaagactaagtataaatccactagaaaacagatgattaaaaatgcgggtcccacaatacgccaatcgtcaaataatcgcgcaccttttcgccacgtagcataacaaagtcacgtaagcccttcctctacattacaagaccaaactcaaagtctctttctcccccaaacccaaaaacattgacccaaagagagagagacttctatcgtgcgcacctctctctcttaatcctttatcctgcgcaccaccaccaccatcttcttctccggcgaaaacaaacccaccgccatggggaaaggtcgtgcactttccgacggagtgatcaaaaagatcatcctttcatacacctatgtcgcaatctggatcttcctcagcttcacagtcatcgtctacaacaaatacatcctcgacaagaagatgtataattggccattcccaataactctcaccatgatccacatgggtttttgctcttccttagctgtgattctcatcaaagtcttcaaagtcgtcgagcctgtttcaatgtcacgcgagacttatctcagatccgtcgtaccaatcggcgcgttgtactcactttctctctggttatcaaactctgcttacatctacctctctgtttccttcattcaaatgctcaaagccctaatgcctgtagcagtttactcaatcggggttttgttgaagaaagagactttcaaatctcagactatgactaacatgctttcgatctcgtttggtgttgctattgctgcttatggtgaagctaagtttgatggttggggtgtttttcttcagcttggtgctgttgcttttgaagccactaggttggttttgattcagatcttgcttacttctaaaggaatcaatctaaatccaatcacttctctctattacgttgctccttgttgtttggttttcctctctgttccttggatctttgtggagtttccagttcttagagatacttcgagtttccatttcgatttcgtgatctttggaaccaattctgtttgtgcgtttgctttgaatcttgctgtgttcttgctcgttgggaaaacctctgctttgactatgaatgtggctggtgtggttaaggattggctcttgattgcattctcgtggtcggtgattaaggacacggtcacacctatcaatctgtttggttatggacttgcctttttgggtgttggatattacaatcactgcaagttacaggcgttgaaggctaaagatgcacagaagaaggttcaggcaagtgatgacgaagctgggaagcttttggaagagagggaaagtgaagctaaacgcaacgaaacccaagattgatctgttctgattcaagaatgcaatttcaggaaataagagcttcaaggttagaatgatttgggaagatggattttgcattttcataggtatgattatcattgtcggtgttcgttcgtctacgttttagttttgcgattatatttttaagttatggctgattatattacatagtgatggatgggtgtttaattagaggttcatgaatcttttgaactccattgtatcttcttcttttgagttgtattttgtttcttacttcctcatgaatctatctttgtgggtaacaattgttttagtagtacttctttatattttttccctccattgagattgttaaatgtcaaattgaaagtcccttttacgtctctctttatccaatgaaaccgttgtatgttggaaggcacaagaagatggtcaacaccaaaaactttttgatattttatgggttatgtaggatcatttagtagcaagatccacaatttaaggaaataaacaaaatacccataccgacgttcccttgcaataatatgacacatgacaccatcatatgaatacaatggtctcatttaacctctacaaatatccttcctttagtctcaacaagtttctgtcctgagtaaagggacaggccaaataggtgttagataccaaactaaaaacattcaaacaggctcacgggttatggatttctcatcagcgaatatttgggaacttttaacacaattcggatctactctcgcttggcataaaagctgttttgttccagaacagaattcataagcatgcattggtgcttggtttgtcactttgtgaaatgtgactttgaatagccatcctacctcttggcagaattgtttttggatttgggttatatcctatcaaattccaaaacttaacaaaccagttttgtttgatttcaactggaatcttataactagctcatagttcctacatatcttttttttgtttgaatctactacatatcaggcagtagtattctagactcggacgaaactttattagtccaaattaggctgcaccaaacgaaatgcagatacatcatacatg

SEQ ID NO: 25047 - DNA, 3003 bp, Unknown; identical to SEQ ID NO: 25046
  misc_feature (1)..( 3003): 2750-1469P.txt file - cDNA_ID_2702449; gDNA_ID_2214608; Annot_ID_187289

SEQ ID NO: 25048 - DNA, 3000 bp, Unknown
  misc_feature (1)..( 3000): 2750-1469P.txt file - cDNA_ID_2702453; gDNA_ID_2214608; Annot_ID_135708
tggacacaaatcattgagtgagtaaattttatatcttatgagattagtatgatgagaaataagaagggaggatcctttcccatatttagcaggtcggcagccaaatgacttaggaccctcgaatagtaaaaaaataagtcccgaaaggcccaaaataagagtattaatttatttacttaccaataatcatttctctaaaaaaacaaaaattaattttatttgcacattttttttttctttctactgcaccaacaaatatcttatattttaacctttatcttataatatacatatataaaagtgttaagaagatgatattttttttaaaatcccaactttgtttttttagctataacaaaataatatttataatttttataattaatcaaataaatcctgtttaaaaaaaaattgtttcagccctccgaaatatcaaaacctgtctatttggaccgatcgagactgaaccacccctttttaaaaaatgctcatatgtcattgcgagtggattataaacctaaatcccaatccaatgttttatttgaaacttacgtccaaaattttaaaacctaaaaaacaagttagatcagtgtccttgggtttttgatctaaatttatgtgtttgatatacttttgtaactaaattaaatctaaataaattaattaataaatggaaacatgttattttcatagaagaaagagttaatgcatgatttaattatggtgatgtgtgtcatcgctcgagagacaccacatcttttatatataggataatggcctttgtggtttagcatgtctgagtttaaacgatccaacgtaagtaattaagaggcgttttataacacaaaaggaaatacaagttttatttattatagcggccgttcgacaaactataaaatatgacaaacacatgcataggtaaacaaagacagaagccacaaaccaaaccacaatgtaagaaacatgcacacacacacgcattcgaagctagattgaggtcaatgaccaggttcgtttgtgcctttgaaagacctctggggcggaggaggagataaatgaagacgactacatgtgccttttcgaagacattccggaataggcggatcttttggcgtagggcgtataaccttaggaatatattttggcttaataggaatagtaaagcgtgcatcatggtaagtcttttctgcacctacaccacccgaaaagcattacattatatattacagtgtcaatgtttgatcatctttgtgctcatttgtctattcaaatgaggagaaattccaaaattcaaaccaaaatcaggattaaacacaactaattaataacgtaaaatgatactaatgacctcggaacatctaaaataccaaaagactaaccttgtttctgggattcctcgtgtgcgcctagggctttatccatatgcggaaacacaagaagaagaaggaggaatagaaccatagtagatgtcatcttaatattccctcttattttgcttattagtgtcactcatggttatgcatttatataggctatacagcaaattataaaagaaatttaaagatatggtggataatatagaaaggctaagagacaaagaagatgaagaaatctgtggacagtctagcgagagacttaaaagcttatagtcatcgacgacttagttggatcacttattttatgagtctcgaagtttttgttgtattatttggtgaaaagtcttcaatagccaattcgccatatgattttaaaagatcattttatattccttattttcatatttgtattactaattatactgggttaagaacccgatattgcagagaactcatttttaacaaatttttgtatttacgtgttatattataaaataatatttgtttgtgattatgtattaaattattatgatatctaaaataataataaccttttttaatattagacttattattcgttttgatttttaatgaatacaaaaacaaaggctaaggcccaaatacagatgataaccgaaataaagaaatgggccaaaccaaactaatcggcaaacgaggccgaacaccaggaaacttgaggaggcaaaattacagccatctgttgttttctctccagctctcgttccagcttcattccctcgtatcaatcttcttctacattcgaaaatcgtatgtttacctataattaaggaatctcttttggtgagtttgaatctgctgaatctcaaaaccctaattctctgttcctagagttttgcctcagcagtttttattggatcattgatatatcatatatatgtacaattagcatcatgaactgtttgtccattgacgcgtctaatggaatcttcacatattaatttcttcactgtaaatgcattttgtttttgcttttctgattgttctgttccttgtgtagtttgcatatttagagttttcttacttcttctggaagaaacgtgtttcttctattgtgtttatacgtatgaaatcaacgaacaatttaggactacacttatcaaaatctgtagatgtgtcaaacgttaacattttagcttttagccaagtgtgatggttttagtggaagcttttgctagtaatttatctgatagcccatggaaaattttctactttctttgtttatggcctcaaggtttataatctttctcttagactaccatggagaggacttgtccactgtgtgccaggtttggtgtaatagctaataggagaaacagaataccattaattacagacagttaatggttattagaaatgatattgttctgctgacagataagagtaatctattgttctctattgattaattagcattctatattatgatgacaatataattatagtatgtgacatcttgttgttggataatgtacgctatacaaaattttgaagttacaagatggcaacattctttgttcaatcttctttttgtttgttgatttttcttctttactctttccgcttacagtacaacacgagaatg

SEQ ID NO: 25049 - DNA, 3000 bp, Unknown; identical to SEQ ID NO: 13254
  misc_feature (1)..( 3000): 2750-1469P.txt file - cDNA_ID_2702457; gDNA_ID_2214608; Annot_ID_135707

SEQ ID NO: 25050 - DNA, 3000 bp, Unknown; identical to SEQ ID NO: 13254
  misc_feature (1)..( 3000): 2750-1469P.txt file - cDNA_ID_2702457; gDNA_ID_2214608; Annot_ID_187285

SEQ ID NO: 25051 - DNA, 3003 bp, Unknown
  misc_feature (1)..( 3003): 2750-1469P.txt file - cDNA_ID_2702493; gDNA_ID_2214610; Annot_ID_135736
ctagagttctgaagcttgtttatatggttaattttcactttatttgaatggctctacctttaatagactagtcttcttctagtttgtggtacttgagcgatgaagtttgagttctgggattagttacttctgatagttttgatgtgattgccaaattgttatgtgtttgtttcggtaaagggtttaagctgaaagaagatatatgcttgccgtattgtcatatccttctctttgttttgatgtgagctaacaaaaatcgtatttagtcatatgcttgtcgtattgtccaaaacagtcttcttttctctttgttttattgattctttgactgtgtctatgtgattaattcttgtatttggctaataacaggttttattaagcaatctctaacttggccttatttctatgtatagttatttgcagctgatcttttacaaaaaatggacaatgaagacgaatgtacttatggtggtgaaggtgggcaaacatcagcagatacatcacaatctaaaagtttagtaagtgcttctcgttttaaaagaagtagaacatcagatatgtgggattactttacactagaagatgagaataacctcgtgattttcccgccaaaaaaacgtaacctcgtgattttcccgccaaaaaaacatgaccccgtgattttcccgtcacaaaacgtaacctcgtaattttaccgtctaaaaatgtaaactcgtaaaaatttctgaatcaataaatatctcaaatttaataataatgaattaatgatgatgataattatttattattgttttataataataattaattaaattattatttaaatggttaacccatttaacaactcaacccatcaaatgaaatgagttatgggttagacccaactcatttaacaaaatgagttgggtcaacccataactcatttaatcataaactcatttgattatgagttgggttgggttgggttacccattttgacacccctagtaacaacagaatgaattttgtttatagagacaaaaaaacatgaagtaatgaacattaaaaaaaatcttagtaatataatgggttctctaatataatctaaccttcgagtgagaaaaaaatgaacataaaaaaaagaaacaagaacaataaaaagagtgggagacaagagggtgataaatggtatagctacgggacggtgacgtatgatgtgaaagaaaggaagagcgcgggtgatgatggaattaggtgacaggcatgtgaacaacagtgaagctgcaaagcctgatttggttgtttcccttctctttaagcgtgcttccaacgtgtctctttgatcatgaccttcttcttcaaatatacaactcttcacttctattttcatttgctctcattttcacattgattgtgttcttagaattttgttcctcgtgcaatctcctcactagtttaactaaataattatacattgatttttgttgtgagtctacttaaattatggtatctattattgtacatttcataactataccacaccaaaagtagagcatattaagcagccggcaaaacaaagttcaattgctgctttcttgtctctctcgtatcatcactctcctttgctaattgctctcagcccataattataaacgagtagaagaatatttaacactctttttcgtaaattttcattttttaccacttgttaaatgctctgtcttactttttttttatccattgtaattttcattggcggtatgcatatttttagacagacaaaatttaaaccgatacgtggtcccataactattgaaactctgattataatggaaaacatattaaatttataggtattttagaccactcagcctcttaaatattggatggtcccatttctatctaaatcattttaacaacaacaaaagaaaatataccataaaacaatctgatttgattttacttattgctaaaaccatataataattttaataaaatataataaacacacgcatgttatttgtggacctacaaaataaaataaaaagaataacagagacaaaaaaaagtcatttcaaatatataaatcaaattaaaattaataatattttcatgtttttttaagcttccttacaaaacagaaacctgaaaccatgttacctataacaacgacatgtatttattattatttctccattagatctaacgactcagaatcactctcacttactcattctcaaccgtcagatctaactacagtactccacaccacatacgaacaaacctaatctatccttaatacccttacttttgtagtttattactaaatttaccactccttccatgtttttgtttctctcttcttcttgattgttgcgcttttgttagctttctctggttcattttccatggacggaccttgacctctctgcttcccttcgtgcattttctctctctcactatcctctctctttctagtgtttgtttgatcctctgcgtactctgttcttcttctctcttcaggtactagtttcaatttctctaaaaggaactattgaaacctccttctctagtttcaattttcaatctgggtttgtttgtttggttcttgtagcttctttggattcattatcatttgggtttagtttatttttctcgtaagtaagtgatttagttgtgattctgaattttagggaaatgctgaagaagttagagtaagaaatttttggtttttgaatggaaagtgattgattttggggaagatgagttctgggaacgataaggttgaattctggctatgaaacctaggttaaagtttctaactttatcttacttgttaagcaaatctaacccaattctcatctgaaaccctaatttttctgggttcttcttaaaattgagaattttgttcatgcatctatagaaagtgaagatttttatgtaattagattgattttgggttgttcttcttgttgttgtgatgctaagcagataaaacaagtcctgcatattgaagatctgatg

SEQ ID NO: 25052 - DNA, 3003 bp, Unknown; identical to SEQ ID NO: 25051
  misc_feature (1)..( 3003): 2750-1469P.txt file - cDNA_ID_2702493; gDNA_ID_2214610; Annot_ID_187344

SEQ ID NO: 25053 - DNA, 3000 bp, Unknown; identical to SEQ ID NO: 13274
  misc_feature (1)..( 3000): 2750-1469P.txt file - cDNA_ID_2702512; gDNA_ID_2214610; Annot_ID_135731

SEQ ID NO: 25054 - DNA, 3000 bp, Unknown
  misc_feature (1)..( 3000): 2750-1469P.txt file - cDNA_ID_2702524; gDNA_ID_2214610; Annot_ID_135727
gtgagtccaaccattttttaacagacagccacgtgtcggtatcttcaaacttttcgtccggttttggaggcaaaactccgaccggtataaccggtttccggtgaagttcttgtgtaagtcctaaccactccgcttcatactcgtaacagctccgtacgaagatgacgtcacagccgtcaattacgccgccgacacggtggatgtcgggaacattcccttcggtggtttccgccataaatcctttgaaaatgaacctgcattcaaataacttgaaagctaccgaagtttcaaacggaacccacttaggcggcttcataaaatccgccggcgaagtacggtactcttcgaaccccggcggtttaagaataccgagcgtcgcgccgttgaaagcgctaaagaatccggttttgattccgagacgacgagagattggaggaagccaaaaccccgcgaaatcttgaagaacccaatcgggtttcgaagattcaagaaactccgtcaccggaacttttaacccgtcgtaagcgatttttaagtaaggtatgagttcgaaagggacgtctgtggtagcttcaccgtcttccgggagtttgttgtcgccgacgggaagtgatagcttgacgaagttaatgacggaggagagattttccggtaaccatgggaggagacggtcgatgttacgtggagtggaaatgaaagagactttgtgacccttttgagctatgagtttagagagctccaagtatggaaccatgtgaccaaaggctaaccatggaaacattaccacgtggagtttggttccatctccatcgttgtctttgaagtttgtcattttcactttgatgatatcgagttatcgactcttgactatcttcatttataggcaagcatatagatatatatacgaacgggtcagagtgggttacgttcgataaaataaaggtattaaaacattacagcattacaagtatagtgttattttatttgattgtgaaaacagatgttgtaggtacgattaacagctgagattaagtttaggtcggtaagatgtgtggtagtattaccgtacatatggacacccaatagtatcagattactataagtgatctgtttccataatcaccacatatagttagactacttttgagatctgattctttccacaaaaagttcatgcatacgaatttttaaattcgaatatctattttgctaggacaaagaggttgcgttattatagtagtatcgtgcatagtcattgatagtttagcatttcattggaagacgtatcattgttttcttcggtaggcgtaaaattttattcaaacaaaatgatcaaggttttcctacaacgaccccatataagattttgatttcgcttttgctttaaatttttgatttggttggcctatcaattcaacatgtttctaccgatatgttgatacaggaatcaaacaagtacaaagaatgggatctctggagaagtaagaagaatcttcaagttgttcgagccggaagctaagtgaggtagacgcgttgagggcaacgatctcagaacggggaagagtgggagcggcgatcctgaggtcagggcgatccttcctcgagtcttcagctcgtcgaattagggcgtcaacaatcgtttcttcgcttgtggttgtattgtcgctgtattagtgccaaattcccgtcccatcaacgtttctttccattctttatttatagccgcttgtttagggcgtacgacgagggtaatccggccaattccctctgtttaatgcgatgatctgtcctttctccagaacattcattttcaatggattgggctttgtttgtaacgggctttgacttataagtcgaaatcgagctgtcaactctttttgggccagaattgagacttgtccaattcttccctcaacacgatagttctgacaaattcatcttagcgatgtctctcgtctcgtgatatatcgatttgtttgacttgtaatgtaatatttttttaaaaatctttttggtggtctttcttaacaatcggtgaattttatcataacctatagtttagagaagtcatttgggtatttgatatgacaatagacaaatcttttcgaggaattgatctccatgataacttcctcttcctaaagacatggtctgatgatggtgatgttatcgatgccccttgattggattatccatcttccatagaaaaagaaagcatagttacaaatcggtaatgattgatagggtattataaaagacatgttccaaaaccattttaaataaactatttgtatgtttgtataataagagtgttgcaaaactcctttgagaatttcatctataaaatgttagccaagtatataaaaaaaagacttaacagatttcatatgttgtctctaaaacttccatttaggaagaagtgttactaccatttttttttatcgaaattatggtcttttattttggtaataattatatttaaatggtttatgtatcatgtaacacatttctgatataatataattgaaattgaacacaaaataaaatagaataaaagttcaaattttgatgcataaaagtttttctttaatattaaaaaaattgaagggcttcgcttgtgattgcctgcctgattgggaagtctttttaactaatgggctcgctttgttagcccataatctgctttcatctgaacaggcaaaaagtatatacgtaagacggtaagagtcacagagagatcaaaatggaggtgcggggaatcgaaccccgtgcctctcgcatgcgaaacgagcgctctaccatatgagctacacccccaattggtaacaatactaattttatttattatatcgaaatacttaaaacagaaatttatattatctgaaaattatctgactaagcaaaacatgatccagtttttgatcatgtttactctatattaattactttacaaatttttgatccagttttctcaattttttctagactcgtatcgatatg

SEQ ID NO: 25055 - DNA, 3000 bp, Unknown; identical to SEQ ID NO: 13280
  misc_feature (1)..( 3000): 2750-1469P.txt file - cDNA_ID_2702541; gDNA_ID_2214611; Annot_ID_135758

SEQ ID NO: 25056 - DNA, 3000 bp, Unknown; identical to SEQ ID NO: 13280
  misc_feature (1)..( 3000): 2750-1469P.txt file - cDNA_ID_2702541; gDNA_ID_2214611; Annot_ID_187379

SEQ ID NO: 25057 - DNA, 3003 bp, Unknown
  misc_feature (1)..( 3003): 2750-1469P.txt file - cDNA_ID_2702545; gDNA_ID_2214611; Annot_ID_135757
atattattttaaacctctgattactttaacataactctgcaacttccattcacatggttgttccggaaagaacgcaaactgcccaaatagaaacatgaaccattctttctattctttttttgttctctctctctctcttcttatttcttaataggcgtagcattttggcttattatgagcttgatttctgcttagagttaaacgacaaagtgcaaatgtttaattcgtatgactcattatacctctagttgcataagggtctatctgctgaggttatagatcaacttctatagtattccaaactaataaaatcttcggttaccataaattatcttgcctacgtgatatgtttctactgacttgtgctgcaaatgcagacgactggattacaaaggatctatgaaaatttgtgtaaaagttcagatagtgtttttgcttgattcacttattcagtatttgattttttattgtaccacgagtctactgcatttgtcatcaggaatagatggttagatcaatgggctggtgggttcttgtgagaaattccaccagagcagagaaatatcaaagagccgttttaagttttcatcagtcagaggtagtgcaacaaaaattgaaatcagtgcagagaaagaataaagagtctccaggaacagaggtccacatcacggtttcaatgatctgtttgtacattccactatttagaaatctctccccttactcagaattaagaaattttaaagcacacaaatccatattcctagagaaaaagtgggaataagcagaatggctcaaattagcacaagaggaggaaaaagaagatgcagaagcaagcaatgaacaaaactatctgcacattgggctgttgtgaggttggtgtgaaggagtcttaggacagtctgatggatgctggtaactcgtcttatcatctgctgctgcattgaacttacattcctgcttagctgttattggcgtcaccaggtacccttcgttcttctcctccattatcttcaatatgctctcaaaaacagaaacttcacaaggaatcctcaagacaccggcttgttgaaacccgaactcttcttctgcctcacgcagaagaacatagaaagcttgatggctgaggtactcggttggtattgtgtacctcttcttctctaacccgaccgaaacagctagataccctttaggcacagctgttacatctgtaaatgacagtgtcctcttcagaaacttgatgctcttgcttcccccgccactgctattgttgtcttcgttgttgttgttggctgcttttgatgcaattgcttgttttcgccatttcttgagaagctgttgaagcttaacgatctctctgatcttgtttgacttcttggcttccatggtggagatagaagacaaaagacaagaagtttggtactatgttttgtctagcgtctgtctctttctatgtgtgtagtgattaggacgtggtgaatattgagaatcggggatatatagaggtggtgaccacggaattctgatttaattagttttgtttctgcttaaaatattgtgctaatcatatgctttggttttttttaatgatttaaaccaacttgaatttgttgacaagcaaaattaagcagcttgaacttagaaaatgatatttaacataacctcaaattttgtcaccaaaatcagacaggcaaagctggctcaagcatcgcttaaatccctgtaaaacgcaactatgtaattaatattgagatatacttgttgctttctgactctgatttcattcactcggcagcattctcgtgctctcggctgctgttgccaaatcttatggtatctttctcaaaaagctcatagtaccgttgtgtctccatcagactttcattgatgtaagtcttataggtactactaagatccataatatgtaaggcctcacttgcttctttcccatcataccatatggctctttctctttttccacctcccggtactgaataacagcatgttgcttgctacaaaatgtgtgattagtaggaatgtcggatctttctctcacgtccaaagaggtagcaaatttggtaatgaatgcaaagtgtctctttcagtggttcaccatccttaaaatgataaagtctccatctttctttgggttttctattatctacgggattattgaagaggagtgtgatacctttgtatatgttggtttcttcagcaagtttcctcgatagctcaaaacatcgcacaccatgtttttcaatcatcaaacatgaatgaagtagcagctatcgagattctctctctcgtccggtacttagccaacacccttcctccgaatctctgaatgtcagattgatgtctcctggcacttggaggataatctaagcagacatggatgggtcctaatcgatcaagatagtatcttccatataggtctcaagagtttgagaagatgtctttcaccgtttcatgcggaagttgactccttactttaagcaattgaatgcatgatcgtaattagtgatatatttggagttttcgcttccggttactctgatatgatatctttcctcgacaactataacgaatgaccaatatttgtaatagagatagtctattttcgatctctcatttgtttctttctttttttaacattacattttttcatagaattctaatactcacagattgtttaatgattttttcttacaaaaagtatcattcagataatttaataaaaatggtatcgcagtgcctttatttacctttaggagtaagttttctttcttccgatatcctaaattgttcgacacgtgtcaatcacgaaaccacaaccaaaaaaccttgtcgtcttctccaatcataaaaaaaaaaaaaaaacagtgtcccaatttgatcaaacaaaacaaattcataaattcggagaagagaacgaaaaatcttcttgttggcaaatctccggcgagatcatctttcttattttgttccacggaagtttcagacatg

SEQ ID NO: 25058 - DNA, 3000 bp, Unknown; identical to SEQ ID NO: 13288
  misc_feature (1)..( 3000): 2750-1469P.txt file - cDNA_ID_2702554; gDNA_ID_2214611; Annot_ID_135765

SEQ ID NO: 25059 - DNA, 3000 bp, Unknown; identical to SEQ ID NO: 13289
  misc_feature (1)..( 3000): 2750-1469P.txt file - cDNA_ID_2702566; gDNA_ID_2214612; Annot_ID_135771

SEQ ID NO: 25060 - DNA, 3000 bp, Unknown; identical to SEQ ID NO: 13289
  misc_feature (1)..( 3000): 2750-1469P.txt file - cDNA_ID_2702566; gDNA_ID_2214612; Annot_ID_187405

SEQ ID NO: 25061 - DNA, 3000 bp, Unknown; identical to SEQ ID NO: 13295
  misc_feature (1)..( 3000): 2750-1469P.txt file - cDNA_ID_2702623; gDNA_ID_2214613; Annot_ID_135785

SEQ ID NO: 25062 - DNA, 3000 bp, Unknown; identical to SEQ ID NO: 13295
  misc_feature (1)..( 3000): 2750-1469P.txt file - cDNA_ID_2702623; gDNA_ID_2214613; Annot_ID_187435

SEQ ID NO: 25063 - DNA, 3000 bp, Unknown; identical to SEQ ID NO: 12746
  misc_feature (1)..( 3000): 2750-1469P.txt file - cDNA_ID_2702627; gDNA_ID_2214569; Annot_ID_135023

SEQ ID NO: 25064 - DNA, 3000 bp, Unknown; identical to SEQ ID NO: 12746
  misc_feature (1)..( 3000): 2750-1469P.txt file - cDNA_ID_2702627; gDNA_ID_2214569; Annot_ID_186112

SEQ ID NO: 25065 - DNA, 3003 bp, Unknown
  misc_feature (1)..( 3003): 2750-1469P.txt file - cDNA_ID_2702631; gDNA_ID_2214569; Annot_ID_135021
cataaccatgactataaccagaaccataactataaccaaaaccatagctataaccaaaaccaaaaccatcaaggcaacaaccccaagaagatgcatcgtcaaccatcttcgtccgattctgagaacataatgagcacacgagtcatcaccattgcaggtgaaaacaaaggtgcagtaatggagatcctacgatctcctcaaggcaacaaaaccggtggttcaggaacacattcctctagggtttcacacggcaccggagagaaaggacggagacttcaaagcagcagcagtagcagcagcgacgaaggagaaggtaagaagaaaacgacgaagaacgtccctaacaaaggcaatagtaacctcccaatgaaagcttttatgaatagtaacgttcagatgataaacaactccattgtctacaactcgacggcatctcatcatgatcccggcgttcatcttaaaatctcccggaaacctggctccgacaatggttttcatgtcagtgattacggtaataatggcggatacaccaactgatgaaagaagaaaaaaaactaaactaaaataaaaaaaaaggttttggatttaaaattgcaataaattcgatttaattaaaataaatgaaaaaaaataaagaaaatatgagtggggttaatggtttctgattcttctctaaagcttttggaaccctctcacttatatggaggctttgattcgtttacttaaaacgaacttctttttttaattacttttgtaaacgcgcgcattggttctctctgacgtaattaatgagaaatcagttattgctttaataataatcatgaaacccatattattgtgaaggcccgatgtatactacataagcccatattcatacctatgggcctatataaacaatttgtatttaccgtaatatatttacttttatcaattggggtaacgatttggataattgaatccaaaagattattgtgccacaagcgacaagtttatgtgaagaaaagagaaccaaaccttgtatattattaatcaaatgactttcaaatcaactcaaatgtctaattggttcctgtgtccgttatgagaaaagctcatgcttcaataaaccctctaataagatcacattatttatttatacaaaaatatcccaaccaatgtatatgcttttatatttttaattttttttgtaatgtagaatctattctacacaaatcgttttagtgattgtaacagtatctgaaaaagaagtggggaactaaagtgagcattttgaatgcataaaatagaaattggaggagttgaaaagccagaggggtcttttataagctgatttattctttattagttcttgagtcgatttttgtgaatatttaaaattcaccaggagcaaataaaaacatcactaccttataaaatcataatacaatactttcgaaaacttatgcaattgaataaattggccatataattaggcaaaagataacaagaaaaaatgtccaaatcccaaaaattcgagaacaagaagcaactgacaaagagaaaggagagtgaagtgtccaaatcccaacagtatgtgtgtggttttgtgtgctcttcaaaaagctttagagggtactttgcatgtgcatatgcatatgcattatgcatatagtcctcctaatctttaatattgtatctttgaggatttaataggtatctgagaccttgcaagttgcaactgaagaatttgagtaaagttggtcacagattataaatccgtaaattattacattttacaattaatccattagtaacggattggccatgtgatttggaatttacaacttaataatgttgtcaataatttaagtatagcttgtttctgtcaagagaaatggcaatggcatagctttttacaattttgaagataattttacgtcaacgttctaaaacgttgatgattatcactctgaaaatttgacgctagggtttgaatacattattgttgatagtgaagaatgatccgcgatgacattccgcgacatttatattatagtgaccacagtgaccgaattgcttccactatatttggacccttcttgagggaatccaaagctggtgaatatgacattttcaaataagatattaaaattgtacgtccatttttaaaaattgattgaaaccaaaactttcgctttaatgcagcgaatttttcctttgatgtctaatcaaatgatacaaacactgaaagcaacagaagtctaccaacaagattacaagaaatgaaccacggaaagatcaaggaggcactgaaaattagtattaaaattttcttgtcaaactttgataatttataagtaatcgggtcaaaaagcaatttcttaataattaagggtgggacaacgaatagtgtgacgaccagattagcaagtgacatgtggcacctacttattggccttgcctcccaaaagtcagaccgatccaacccactctttgtaattaacacgtgtcagaagctgaaggactctcctatatgatttatttaatgtcttaatagatttctcatttcacactatccttttttgcttgagaactttcttcactctttcaactgctaagaagaaatagagaaaactatgacggtacgtaaattttgttgttaattattttgctttaatccttttttcatatagttcgtaattataaatctataattgttttccgggatttttcgaagatctttaactgggtgcagaaaaagctgcaccaaaatgtcatcaaaggttagtttttttttttatagataatcaatatcagctttattttataaaaaaataacaaatttgctttattttccctttgtttattagaatatcgtaagcttcactaaaatagtagtttactttttgtagtagtatcatataggatcatgtggttccctgtttaataaatagttttatattaacgtataccacgttttcgctaaagcataaattttgtccaacctatatttattttcatatg

SEQ ID NO: 25066 - DNA, 3003 bp, Unknown; identical to SEQ ID NO: 25065
  misc_feature (1)..( 3003): 2750-1469P.txt file - cDNA_ID_2702631; gDNA_ID_2214569; Annot_ID_186110

SEQ ID NO: 25067 - DNA, 3000 bp, Unknown; identical to SEQ ID NO: 13305
  misc_feature (1)..( 3000): 2750-1469P.txt file - cDNA_ID_2702642; gDNA_ID_2214613; Annot_ID_135796

SEQ ID NO: 25068 - DNA, 3003 bp, Unknown
  misc_feature (1)..( 3003): 2750-1469P.txt file - cDNA_ID_2702646; gDNA_ID_2214613; Annot_ID_135795
gaaccgatttttttgtttactcgaaccaattcatgtattatgtataagctatattctcttagataataagttaaaaattgggttcttctcttctccgtcttcttcgctggctctcatcatccataaagtgaaaggcaacgcatagaagagccatcactcacaaacaaagaaaaggcaaaaaaaaaaaaaaagtcctccaaaaacattcttctctttggcctttactcaaaacccacacacatctctctttctctctctctggctttctctttgtcggaagtcatggacgctacgaagtggacacaggtgcttaaaagatcttcctttgcctcttctcttttgtttcttcttcttcctattaactacttcttccttttttctctcttatctttctcttactctcttccctatccgtgaaagatttcatacttgtttatatgcatatatccgtgtgcatatgtgtttgtggttatagagattggagatatacgtatttcagtttgtttgcacattttctatgaataattaatttgcatgggaaaattattattgttgtatattatagctcaaaaacactttttctcagccttttcatgttattaatcattaattatatttgagaaactaatggagatattagaagaaagtcatgatttgtatttaccctttgttcttggtgttcatctattttcgttttccacgagatcctatatacatagttctatagaatatctaataaggaaaatctaatgttcatgtttcatttttctgtttaattagtgcttaaaattgcaaagcatcgtgcgaactaaccatatgttttaattagcttattatataacttatgtatcaattatggtctatacataattaatatacatgtacattgggtttcaattaagctctaattaactctttaaaattcaaatttttagggttttcaagaaatgatgaacgttaaaccaatggagcagatcatgattcctaataacaacacacatcaaccaaacaccacatccaatgcaaggccaaacaccattctcacatctaacggcgtctcaactgctggagcaaccgtctccggcgtaagcaacaacaataacaatacggcggttgtggcggagaggaaagcaagaccacaagagaaactaaattgtccaagatgcaactcaaccaacacaaagttttgttactacaacaactatagtctcacacaaccaagatacttctgcaaaggttgtcgaaggtattggaccgaaggtggatctcttaggaatgttcctgtgggaggaagctcaagaaagaacaagagatcatcttcatcttcttcatcaaacatccttcagacaataccatcttcacttccagatctaaacccgccaatactcttctcaaaccaaatccataataaatcgaaagggtcatcacaagatctcaacttgttgtctttcccagtcatgcaagatcaacatcatcatcatgtccatatgtctcagtttcttcagatgcctaagatggagggaaatggtaacataactcatcagcagcagccttcatcatcttcttctgtctatggttcctcgtcgtctcctgtttcagctcttgaacttttaagaaccggagttaatgtttcttcaagatcagggattaactcatcgttcatgccttccggttcaatgatggattcaaacactgtgctttacacttcttcagggtttccaacaatggtggattacaagccaagtaatctctccttctctaccgatcatcaagggcttggacacaatagcaacaataggtctgaagctcttcatagtgatcatcaccaacaaggtagagttttgtttccatttggggatcaaatgaaggagctttcatcaagcataacacaagaagttgatcatgatgataatcaacaacagaagagtcatggaaataataataataataataactcaagccctaataatggatattggagtgggatgttcagtactacaggaggaggatcttcatggtgaagcaaaatgatcaaaaggagattatgaaattagctttctaattctctttttatgatctcttgcctcacatgggttactttagttaaagttgtcagaacttagctaacacaacatagtctttttattcttcctttccttttttttttttttttttttttgttaaaatcaatatttattttctaaatgttttgtagtttggtttgatgataatttgggttggtttttcattttggtttgttgattaattagtatataaatcacggcgttatgtatgggtagaagaatatgtgaatacgaatctctcgagtgttgcatatatggtatatggtatgcactatgtaactatgtattcatcgcttcttctatctgtataagtgttttcataaaaggattattcatatgatcatatctattatcgatatagaagttagtgtgatatactctctagatcgatcacttggaaaaatcaataagcccgggccatcaataaggcagctaaagtaactacgtaaccattggccattgctaagatggttatgtaggcttctaacatgtcctcggtcgttggttcaaaaagccacaatgatcattttacctttctcttagcaattttatatccagttaacaactacttagttcatattttttcataatagtcacatctcaaattcagacgagaaattaccgttacatcaaatcagttaaggcttggacggagaaagagatattttattatatgtcgacatgtcgttattattgtaagagaatccaattccattgaagtaaataattgaaagacacgacggaagaaatcaagaaacgaaacttctccgaaacttaccattgtcttgtctttcttttgataacaatatatgggagtgggaatgcgtcgtattcacggcccattcgaactttccacgaaaccacctaataatcagctgcttccctccctactcacgaaatcgcattttatcttggaatg

SEQ ID NO: 25069 - DNA, 117 bp, Unknown; identical to SEQ ID NO: 329
  misc_feature (1)..( 117): 2750-1469P.txt file - cDNA_ID_2702650; gDNA_ID_1563893; Annot_ID_148473
  misc_feature (3)..(3): n is a, c, g, or t

SEQ ID NO: 25070 - DNA, 3003 bp, Unknown
  misc_feature (1)..( 3003): 2750-1469P.txt file - cDNA_ID_2702690; gDNA_ID_2214617; Annot_ID_135825
aagtagtggatctgattgttcatagagtagaagactataaaaatcttaccagtttaacaaagagttacttcgctgccttaaccgatcgcatgttgcttttgttatttcattttttgagtcctttgaaaatattggaagtgtaagcagtaaaagttaaataacattttaagtatcaatttcagttattgttagtgtgtatatcgtattgttttcttatgcaggaggtttacataccactgcccaaagaattagaccatatgtctgtttaagtttaccagcttcttagatgttttggtatgataaatggtcttcatttttgggaagcacaagatctcaaggggaaataacgaggagtggaaagttacattaaaatgatatggatttctaatttatatctcactcattgagataaaagagtttcattgtacgcccgaaaaacctaagttgaagttcaagcttattattattgttgatcagattttgtacaaaagttacgttaaagccagcagggatcattgtagaatggatctatgatttatcttgttgtagatttgaacaaatttatggcgatttgaattatttttttcaattaccgttttaatttctattttttttatatataaaaatattgattagttagtttttaggcaaaaatattagtaacaaagattttccttaccattccaatctgtaatggctttgattaagttgtaaattaaaaatttgaagtagattttctatttttttgaaagattttatctattatattgtatatataaaatttgtttaatgattggtttatttatcttgctatatttgttctatttataattcagttagagatcaaatagtgatttgatacctttttaattttctgaatttttgataaatatagatttgttagttttaggcaatatttaataaaacggtttgattacgttttttgataaatatatctttattgttttttattacgttgaatcagatttttatttttgttgtaagatatcgtcaatgattttatcagaaaaggtagttttaagattgatttaatggtcttgctctatttgttatattttataattcggttagagataaaataatgatttgatttgtcctctttataattgtccatgatgacttatttcagattcatagttagcacaaaactttgaacttttttgcctatataagaacaaatcaaacaagaacaccatctatatttgctagataaaaataaaaaaccaacagtggcgacttgaacatcagagacaaaagaacgacctcgatttaatcaaattgtgggtaaaataactttcaaaattgacccatttaaaacagatggtcatgatataaaaacgggaaaaatgtcgtttaatcccccaactttccaaaaatggccaatcaatacgtcaattttgtaggaggccatttaaaacatcaacttacaattgactaacatttaaaacacgaactttgcgttgactaggcctaataagaccgacgttaaatcgattaacagatccattagacgacgttaagaactgttatcatctctctgttagtgaagaaacgacgacgttttaaagcttaatagataacccgattgtttgtcgaaaatccccaaatcaaatacttcaaatccctaattccctaattctcttcttcttctctaaattctccatcaaaagctgaagaaatgagttgcaaatctgggaattctaactaatggcatccacgaacacactttcaagatcgttggagataaattagggtttgtttttgatttggggatgaattcgatttgaggatttcttctcgacaaatccctaattgggttatcaattacgcctaaaacgtcgtcgtttcttcacaaacagagagatgataacggttcttaacctcgtctaatggatctgttaattgatttaacgtcgtgttttattaggcctagtcaacgcaaagttcatgttttaaatgttagtcaactgtaagttgatgttttaaatggcctcctacgaagttgacgtattgattggccattttttgaaagttgggggattaaacaacatttttcccatttaaaaactggccaaaaaccaatgactaagattttatttgatcatcgggtcaaaactcacaagtatcgggttaggcaaccccctcgttcttcaaataaaattatttaaatgaggtttgatatcctaaaacgtttataaatttgattataaaactttagcatttgcccatatgtttgcaaattcattaagacattaaattcaattgtaacaattatttgcaaatgaataatcaacgtaatccacatatttataattttatatgcaaaataatcaaatacaaaatattttaacaacttacattattattagtatattaaaaatataataatattgtctaccacataactataactattttaaaaaaaaatcttaaacaaacttaaaaacagatttttttttatccaacactgtattatgaaagattaaataaaattgtgtactacacaacaacaccaacaattatctaactaaaataaatatttaacaagaataaaataaaaatgtattttttctactacaataacatctagtaaaatataaattcacaatttcgaatctgaaaaaaacattaattattatctagtaaaataaattagtcttacagtcacaataaatcacttacctcacttttagaaaaatagaactttaaaagttgagataagtatctaatggcccagcctcggcccatttacccaattctggatccggatattatcagcatcactttcgtttttttgcaagtagcagagcattctccatgtttgagaaacccaaagttccaaattccaaaattggtcaaagctcgataacgtgtgtattgcttctcttagtcaatggtgatttcgattcattgactgggtttaaaaaccttgctagttctcaattctcatgactttgcttttagtcttagaagtggaaaatg

SEQ ID NO: 25071 - DNA, 3003 bp, Unknown
  misc_feature (1)..( 3003): 2750-1469P.txt file - cDNA_ID_2702694; gDNA_ID_2214617; Annot_ID_135824
ttaaatacttacaattctttttctaaaagttaaaaaatgcttgtaaagactttataagagttttaaatggatttacaaatgtttaaaatccttttcaaactcttgaaaaactcttgtaaatcatgttttacccttttataagcttttaaaatccttgtaaatcattctataccacttacttatcttttaaaaacaattgtaaactatgcaaaccttttttaaaatcccttgtaaatcattctttgacacttacttatgttttaaaaacgattgtaaatcatgttaaacacttttaaaatcccttgtaaatcattctatgccacttacttatgctttaaaaacgattgtaaatcatgttttacccttttataagcttttaaaatcccttgtaaaccattccaatgtcacttacttatacttaaaaaaacattgtagaccatgctaaccatttttaaaaatccttgtaaatcgttctatgccacttacttaggctttaaaaatgatagtaaatcatgttttacccttttataagtttttaaaattccttgtaaatcattcaatgtcacttacttatgctaaaaaacgattgtaaaccatgctaacactttttaaatcccttgtaaatcattctatgccacttacttatgctttaaaacgattgtaaatcatgttttacccttttataagtttttaaaatcccttgtaaatcattcaatgtcacttacttatgcttaaaaaacgattgtaaatcttgtaaaactattgtaaaaagttttaaaatgatttacaaaggtttaaaaggcggtttaaaagtatttatctatgtttttaaagactttataaagattttaagaggttttaaaatgatttacaagggtttttggcaactaccaaagcttttaaaaaatttacaaggatttttaaaagcatttttttggttgggaaaaaaaatttacgagaaaaattttggcaggaaattttttttttggcgggaaagttttttttttggtgggaaaaaaggtttggcggaaacttttttttggcgggaaaaataaatttggcgggaaactttcagtttccaattacatgttcttattagatgagggtaatttggtcattctgttcaagggaaatgatatttttaaaaataaacaatataaaagggtattgttgcaaaagagtagtaaaaaaagggtaattttgaaaatctcccatatttttgacccaaatttattcaaaagtgattagatacctataaatattataaatatcacaaaatttatatattttgacacaaattattacaaatataaatattaataataatatattattaatatttatattgtggatatgtacagaaacccgttggaatcggatttgggtttattttttttggatttggaataaaactgggtattttgaaaatttgggttcgggttggatcaggttattattggattcggatcgggtgttgggtttggatattatgcccagcaatggtgagtactcctctcgccatcatcagtctttactctgttccaagtcttccttctttggctcaaatggggtccacgatcatcaatccaaatagattcgactttttgttctggggtttcgtcgagaattcgatttttgggtttctttcgaaacttggtcaaatgtcgaatacgcgttacaaagaacaaacctttctctttatttcgtttgtcttcgtcaacggctgaatcaaccaaatggtccctggaattaataaacctctaataataatggctttgcttttactctgatgacaagttcaaaaatggaacaaagatcactcctttgcttcctttatctgctcctactattcaatttcactctcagagtcgctggaaacgctgaaggttcttcctttttctgctactctcatgaaaagtcccttcctttttggtggttgttagatttcgaaagttcataactttttttgtttgtttgctggtttggattatgaatatgtgtacaggtgatgctttgactcagctgaaaaacagtttgtcatcaggtgaccctgcaaacaatgtactccaaagctgggatgctactcttgttactccatgtacttggtttcatgttacttgcaatcctgagaataaagttactcgtgtgtatgtttctctctctctgtcttcttttttgctctctgtgctggttttgtctgaatgaatggttcaataatccctttgggaatctactgtttgatgtttgcttagtgaccttgggaatgcaaaactatctggaaagttggttccagaacttggtcagcttttaaacttgcagtacttgtaagccatctcttcctcaatgtcgattaattctatagtgttcaagatggacttgaatttgttatgcatatcatatgcttcatcttacttgtttaatgactgtgacatagttgtgtttttgctttcaaaagagaattgtggataaacaatttttttctcagagtagaaaactatgtgtgtgcgctctcttgtggttgatgcatctgaaatatatatatatatgtcgatttatttttgatatcgttggtaatcaccaatcagtgccattttagatctctttagctaggcttctcgagccttgttactggaatcctttataatcatctttcagctagaaccatggcattatgaaagacattttattttttgaattctctatgtcaaatgttctcatttaactctattagataagtaactggagagtttggatctggtatttctctacaggtgatctcaactctacatatttgtgttgcggctgcaaaatgtttttttgaaaatattgcttacaaatatagtttccacgttcatgtatcttagctgtctacgattattatagttcttcatattaatgggtatcttgtttattacatacttcattatgttttctgtagcctgaatttctggtaaaataattttagagattttccaatcgacaataattaagcaaagcttaatg

SEQ ID NO: 25072 - DNA, 3000 bp, Unknown; identical to SEQ ID NO: 13337
  misc_feature (1)..( 3000): 2750-1469P.txt file - cDNA_ID_2702734; gDNA_ID_2214619; Annot_ID_135840

SEQ ID NO: 25073 - DNA, 3000 bp, Unknown; identical to SEQ ID NO: 13337
  misc_feature (1)..( 3000): 2750-1469P.txt file - cDNA_ID_2702734; gDNA_ID_2214619; Annot_ID_187602

SEQ ID NO: 25074 - DNA, 3000 bp, Unknown
  misc_feature (1)..( 3000): 2750-1469P.txt file - cDNA_ID_2702738; gDNA_ID_2214619; Annot_ID_135842
tcagtataaggttaaagtgaaagctgtaagatctgacaatgctccagaactgcgttttacaagtttgtatcaacggaaagggattatggcttttcattcttgtccagagactccagaacagaactcggttgtagaacgtaaacatcagcacattcttaatgtggcaagggctctcatgtttcaatctcaggtaccactttttctatggggtgaatgtgtcttaacagctgttttccttatcaacaggacaccttcacagcttctttcaaataagactccttatgagattctcagtggtactgctccccaatatggacagctcagaacatttggttgcttatgttacagttctacatcaccgaagcaaagacataagtttcagcctcgatcaaaagcttgtatcttcttgggatactcgtctggttataaaggttataaacttatggatttggagagtaatgccatttttatttctaggaatgtggtgtttcttgaggaggtgtttcctttggctggtactaagaagtcagcagattctctgaagttgtgtacaccattagttcttgtgccttcaggtattcaacaacaatcttctttttcttctctttcatcacaaatttctgatctaccaccacaaatttcttcacagagagataggaaacctcctactcatctgtcagattatgtttgcaacaatatgcaatctgatcaaaaatatcctatatcttctactatctcttactctcaaatttctccatctcacatgtgttatatcaataatatcacaaaaattcctattcccacgaattttgctgaggcacagggcactaaagaatggtgtgaagctgttgatgttgagattggtgctatggaatctacgaatacatgggagattacaacattaccaaagggtaagaaggcagtgggttgtaaatgagtgtttactttgaaatttttggcggatggtagtcttgagaggtataaggctagactggttgctaagggttatactcagaaggagggtctagattatacggatactttttctccagttgctaagatgacaacgatcaagttgctgttaaagatctctgcttctaagaaatggtttatgaaacagcttgatgtgtctaatgctttcttgaatggggagttggaggaagaaatatacatgaagttacctgaaggatatgctgagagaaagggtattatcttaccatcaaatgttgtttgtcgtttaaaaagatccatttatggtttgaaacaggcttctcgacaatggtttaagaaattttccgcatctttactcagtttgagattcttcaaaacacatggagatcacacattgtttctcaaagattgtggaggtgagtatgtggttgtgttagtgtatgttgatgatattgtcattgctagtactaatgaggcagcagcagtacagttgagtcaggatttacagaatcttttcaagttaagagatcttggagatttgaagtattttttgggattggaaattactagaactgaagcaggaatctcattgtgtcagcgaaaatatgctttggagttgttggcatctactggtatgataaattgcaaacttgtttcagttccaatggttccaaatttgaaactgatgaaagttgatggtgagttacttgaggatagagaacagtatcgtcgaattgttggcacgttgatgtatttgactataactaggccagatatcacgtttgcggtgaacaagttatgtcaattctcttatgcacctacgactgcacatcttcaggctgctcacagagttcttcaatacattaaaggcactgttggtcaaggcttattctattctgcttcttctgatcttactttgaaaggatttgcagactcggattgggcgtcttgtcctgatagtcgtcattccactactggtttcactatgttcgtcggtgattcccttatatcattgagatccaagaaacaacatgtggtttctcggtcatcagctgaggctgaatatagagctctcgctcttgctacttgcgagttagtatggttacatactttgcttgcgtctttgactgctgctactacaattcctatattattttcagacagtacagcagcgatttacatagcaatcaatccggtcttccatgagcggaccaagcacatcgagattgattgccacaccgtgcgagaaaagatagatgatggtgagttgaagttgttacacgttcgcacggaagatcaagtagcagatatcatgactaaacctctgttcccaaaccaattcgaacatcttaagtcgaagatgagtattctcaacatttttgaatcctcatcttaagggggcatattagagagtgttggtttatttatgtgatttagttcattatgtatttcgattatattaaccggttgtatagtcatagtatatatacttgtacaaatacattttacaaagttaatgaaaaaatatcttcatctatgtctaacaaactttctcatctctctcaatcgtaatatcaaacatgtctctattactaactatctatttgcagttaccccaaatcataccatacttaagctgctagcacgattacattatatacacataaacgtctaaaatgtttaatgttttaaaactgtggaattttgttaaaatatttatcctagctctgtttttgggtgacgtagtttagcaaagatactggcccattgggtcttggttcattgggccaacgaaaaaggatttaaataagttaggctgtcatcaaaacgacaccgtatggttgaggacgcttttgctgcacgacgaagcataagcatgattttccggtcaagtcttttgagtatcagctaactgatttacagttttcgattcgaaaatcttaatctccatttcattccttcgacatcttcacacaaaccctaatctcatttctggtaaatccgattttgggaaactctaatttgatctcgagatcgctaacaacgatg

SEQ ID NO: 25075 - DNA, 3000 bp, Unknown; identical to SEQ ID NO: 13338
  misc_feature (1)..( 3000): 2750-1469P.txt file - cDNA_ID_2702746; gDNA_ID_2214619; Annot_ID_135844

SEQ ID NO: 25076 - DNA, 3000 bp, Unknown; identical to SEQ ID NO: 13338
  misc_feature (1)..( 3000): 2750-1469P.txt file - cDNA_ID_2702746; gDNA_ID_2214619; Annot_ID_187612

SEQ ID NO: 25077 - DNA, 3003 bp, Unknown
  misc_feature (1)..( 3003): 2750-1469P.txt file - cDNA_ID_2702750; gDNA_ID_2214619; Annot_ID_135846
ccgtctttagatccaataagccctataatctagatattaacctgtagtataccgcatgtaagcttatattttagttaaactaaaaacttttattgtaaagatgatttaaaaatatatgatattattttatttgattttaaatgtatagtaaactgtgagttgtatatgttttgttgatattatctatattgtttagtgtttaagattatacacttgtagtttgattgttaatttaagagtttcacctgtagtataccatcttgtattaatatcgatctaaacccgtcaattctaggattttccagcttgtattaaaaattgaattacatcatacacataaaaaaatctaatatgttattaattattatagtatataagattataaattttcaatataatatgtatgaaatttaatataaatatttcaaattatgacccgttactcagtagaaagttttcttaaatctatttttcacccgttataatatttttttcatgtattgaatagtgtatattcgtttaaaaaaattctaattatggaatatgcgaaaaaactctaattatttttttataatgatgatattattttttcgcaaaaatagaatcatataaagatgagaagtgaattataataattaataaaaaattaatatgataatttagatatcaaatctaatttgttgattttaattggttactttttttgaaattaataatgtatttcatttttctaattatatcaaattaattaaaaattagatatcaaatcttatatgttgattttgattgtttattatttttgaaaattaataatatatttcgtttttaaattaaatttaattaattaaattagtatttgactttttaattcttaaagagataaattaatttactctttaaaattttatttctaatggcatacctatgtaattacttataaaaattaaggttatatttaaaatgtacttcccaaataatatagtaggatatatattaaaagtatttaaactgcactgcactttatccaaagttgagcgacacatttctatttggagcattattttcttagtagtaattaatcggaatcgaaactaatatatagttttttgacaatttttttcttttcttaaagaaattaataaaaatattatcatcatcaaaaaataaattgtattcttctttttaatatccaagtacaaatcaatcataatcttttttagctaaatatttaagttatcaagttataagtttgactcatagtgttcacttattagatttctaaaagtaagttaaatagcaaacaattcaagtgtcttataaaggattaaaagattgagcaaaaaaaataatatatatatatatatatatatatatatatgtagttacagcatgaaattatattaaactcattaattaacaatagatagatatttagaaccagaatataaaatggttttatttaatcttaaaacatgcagctaaaaaggtcagaacatttaatattaccttctacattttgtttttatgtaaacattaccaatttaccatatactttccttgtacatatttagctaagaaatcgtggactcgaaattgtattttgattttagcaaattaattttttttctcccttgattgaattaaagtttacatttttttcttataatcacttgtgtgataccactattaagtcaaaaccagattttgtttttcaactgaaaattacttatatattttttattctaataatttggagagcatgatgatcgtctctgtccgatctcttcaactactgcttcttttagtgatgttactgttttgccgacgctatcactttacctcctcaaaagttttcccatgtatgctcttgctcttcaccctctaattcttatgagatgggaagttggtagagtttatggctctggttttgaggattttgatgtagctcattcggtttcgatgggcttggatacttgtgtttctacatttgtgttcctttgcttttatcgttttgatgcgatcatttatagcaatattcggattatgtatttatttgcttatgttaaaaattgtctcgttgcagtttagaaaagttttttgagtttagacaaccaaccacttatcctagtttattgaggctttcaatagccatttctgctttatagatcttgttatccttctaaatactttatttgtgtttagtgataatgttataaggagcattgtgtgcaagactattctacttgaattagaagcgggcattgttgttcaagactgttcttgtccaacatttattggccatatgatgttgatttgcttcctcctccttatggttttgacaaagacttccaaactaaaaagtgtatgctttattgaatgttcttggttagatgatgttttggtagaacttgtaagttcacccctattccgaaatctcaatttgagtgttattatttatgttagcttgtgcttatgcttattcttaacctctatgttaatcgatgttttgatttatttgactcttcgtaggcataatgtatcctgtcaggttaaacttctttctaccagaggataagtttgtcaaaaaaattgtttttttgtcgaaggtgcaactagagaacatgtaatcgaatccgagacaaaacgacatcgttttggtgtccgtgctatgtccaggacaattgtctccgcagtctaataagaaaaagaaaaaaaagattccagcccaaaaaaaaagccagataggttgaagaagaatcctccatgtttgatcatcatcattactcttgattcaaatctctacgatcttttgcccagcttcacttcaaatctcccaattctagcatttcaatttcatccccagtagctagggttttcaagacgtcgaccttctgagattgagaaagctaaatttggatcaaatttcctgactggtaatttcgtttgattagtctccaatttcggcgttttagaacgttctaagaagaattgaagacgaagatg

SEQ ID NO: 25078 - DNA, 3000 bp, Unknown; identical to SEQ ID NO: 13341
  misc_feature (1)..( 3000): 2750-1469P.txt file - cDNA_ID_2702754; gDNA_ID_2214619; Annot_ID_135847

SEQ ID NO: 25079 - DNA, 3000 bp, Unknown; identical to SEQ ID NO: 13341
  misc_feature (1)..( 3000): 2750-1469P.txt file - cDNA_ID_2702754; gDNA_ID_2214619; Annot_ID_187615

SEQ ID NO: 25080 - DNA, 3003 bp, Unknown
  misc_feature (1)..( 3003): 2750-1469P.txt file - cDNA_ID_2702769; gDNA_ID_2214620; Annot_ID_135859
atatagcaatgagagattactggagagactctataagacagtttccgaggaagtgcagtgcgtaaaaccgcagactgttgtccaattcagatatgttgtactctttgatccgagaaaaagatggtgtaaaccaaaatggaacatttcaaagtctgaaaagagagattgaatcagctccaaggcataagggaaacccgctaattcagcaagactgtttaatttcctataaatattctatttttattttcttttcagatatttattcatcacttatcagcgatttgacgagaagagctttttggtttctgcgaatcatccaaaatccgccatggaagcaactacaagaatcttgagtacttcttctgctctcaatcgtcttcttcttctcagtaagctcaatctaaaatcagatccccgtaatatcaattccacaaatcagctactacacaatgccgttacccgaaaatcctctatctccgccgctcgtatacggtgctcttcgctccctgcgaatgcgaatctcttcagatcactcttcttcctaacgtcaacgtttcgtctcgagaacaccgccgttcacgctaatccattccgatccgaacctaacgacggcgtcgccgtctggaacagagctccacggatcgtgaacggaggtggaaacgcggcgatattcggcgggaacgaggggaaagagacgacggtggttctccttggttggctaggagcgaaagctaaacatctaaggagatacgttgagtggtacaactccaggggaattaacgccgttactttcactgttgacgttagggatttgctccggttagatcttggtcggcggcttgaacgaaggatagctgaatttgggaatgaattggttaattgggtatcggagaaagaagatgatggtagagagaaatgcttggtgtttcacagtttcagtaacactggttggcttgtgtaggttgatgaaaccaaaatccttcaaaatcctacattgtgattgcgattgtgatttagtgttgatttgaattagatgatgaattttaagcatggtgggcttttttacttttggtagatatggtgccttgctagagagcttcattggtagacaagatttagtagaaaggattaagggttgtatcattgactcgggaggagcagatcctcttgatactaaggtttgttctctctttcatgtaaccaagagttttaaatgctattcaatggtttctccactgcttcaagatcttgtattggaagtggaaatgtcaatattgttgtgaagtgaaaaattctatttgagctatgttgtcctctttttcaataatgattcattttatgctagtgtgaaagctttgctagtttgagttctatgttgaagaactttgtatcgattacaagcatttgcagaaccatggctaggggacttttgattttgatatctaagcaattagctttgtagatagataactcagtacttagaaaagactatatagctatgagttaaaaccgctgatttcttttggttacgtagccatcactcacaggtttatagtacatcggcctatatatcttgtgaatgtgatcttgttctcttgcaagatatgatgtcttaggcatgtgaacaagataaaatgagcttcatagtatgtgcctgagtttgttctgaagccccttttgttgaaaattgcttaatcattgcgtagtcctaataagccatcataatcattcatcttgcataagattagcaatgcgtacacctgtgcagattttatagatcaacaattgaattctgttcttttgcagatttgggcagcggggtttaccgcggctatactgaagaagcgtagctccaccataaccacagaaccaaacagtcccataaaagaagaggatgcttcaacaccacaaaagaaggaacctttaggaatcgaaaacataatgctatcatctctggagaaactcttccccatcttcttaaaccacccagacgtcaatacgtaagcttcacaccacacagtagacaacccatctgcttcttctttgtatattaggttgattaatctgagttattgtttgtatcgcaggaggctaacaaaaatcattcaaaaactatatgagaaccatcctccatgtcctcagctctatctttacagctccggggacaaagttgttccatctcattccgttgagctccgcatccgagaacaacagaagattggaagaaagatacattctttcaatttcaagtcctctcctcacgtggatcattaccggaactttcctgacttgtattcctcacagcttcaaaacttcttgcaagaatgcttcacaccaacaaaacaacaagctctgtgactttggaacatctttttttgcagaatatttgtagccttggtttgtttgtttgttttctcctcaaaagttgtttattattgatgatagaacaagataatccgaaggagacagaaactccaaactgtgtcgacgagctactgagcagagatagtttctgaaactcttagattgttgttgctagtttggcttcatatgtgaaacttgaccgatgctcggacaaagaaaaaatgtaaacctatttcattcccttgttcaacggtgtggtctaccccttcctcaaacggctcgtcttatattaccttaaactacgtcgtgttggattctttaaacggcgccgtcttgccgtaccataacacgacatcgtaatagctttccttaaaacggtcgtatcaactttccttaaaatgtagtcgtaggaatattttgccgttttgtttgttgaaaaactacattagagaaagaaaacgacacacatgttaaagcagaatgggtttagaaatggtcagaggagagttgaggattttgggagtgggaatcgatttcttgtgtgtctgtagctacggattcgattcgagtgaccaaaggaactcgatttattggttctaaagtctccaaatcagaaaattcagagacgagccctaaatg

SEQ ID NO: 25081 - DNA, 3003 bp, Unknown; identical to SEQ ID NO: 25080
  misc_feature (1)..( 3003): 2750-1469P.txt file - cDNA_ID_2702769; gDNA_ID_2214620; Annot_ID_187637

SEQ ID NO: 25082 - DNA, 3000 bp, Unknown; identical to SEQ ID NO: 13351
  misc_feature (1)..( 3000): 2750-1469P.txt file - cDNA_ID_2702784; gDNA_ID_2214620; Annot_ID_135857

SEQ ID NO: 25083 - DNA, 3000 bp, Unknown; identical to SEQ ID NO: 13351
  misc_feature (1)..( 3000): 2750-1469P.txt file - cDNA_ID_2702784; gDNA_ID_2214620; Annot_ID_187634

SEQ ID NO: 25084 - DNA, 3000 bp, Unknown
  misc_feature (1)..( 3000): 2750-1469P.txt file - cDNA_ID_2702795; gDNA_ID_2214620; Annot_ID_135873
atttaaaggatttaacattcatttcctaaattaaatatataatatgcctttacaagatcattttcaaataaatttcagtctactttcttttgttggtcaatgcagatgtatatacaccaacttaagatttgtttcggtttttagaatttatctttttactaattcaatctgtccattttagttttttttttggtcttatccttcttcctcagttacccattggcaactccaaccagagcaccaaagttggtgttgaaatcacacaaaatttggtgttatagtgtcccatttttttttctcatctccaaccacaacactaaatttacaataaatactattcttatctataattatattattaaatataaaattcttttattttttaatatatttcataaatactattatattatgttttcagtgttatttgaacctttagtttttaatctcaattagtttcatatttatttagatatcttgtacaaattaatattttatattaaaagtgaattcatacaaaaatattaatggtatatttgtctttagttggtaaataacaattaaattatcttacttaaaacaaaatacaaattagataaaataaaaatttggtgttttatgaacagtcctattggagcaagactaacaccaaaatggtgttttggtgtcaagttggagaagcccttaggtgtgcccaagataaagttttatacatatatgttgtatccaaaaataaaactgagcaagctctttcttcatactataattactatttgatagatatgtgttgatgatcattatgcagcaacaaacacaacaaacaactcaagaataatagaagatgagatcattactgtaacaattataactgtaatacacatctaataaccaatcaaatcttctatttagtgtacaaagttggatactaagatcccaactattgccaaaaccaaaactggagctattctctggtcttacaagtgtaaattaagaaccttaaatgtccaaatcatcatcaggatcttcatcagaatcaggatgctcatcgtctgaatctctgaaatatataatctcaccacccttacccgacgaaaccacatcggtctgcaactccattgacgacaatggtgttgtctcaatcttgccatccacaagagatctcctcccatcatagatctcgttcgattttccatcatctgaagaacagagaagtatcaacaacatgttttatccacaatctcaaaaggcttcacagtatctacactcaccttggtgctcaaaaggaagcacaactttttctttctcgacccgttctttctcagacaactggagattgaattgaacctgaaccaaaagaaacaatgatcttatgccatacaacttacgaacaagagatcacattatagcaagagacacagaccaagtaattaaaaagcagatctaggtaacttgccttaggcaaaaggcttttagtggctgcaataacagtatccacagaggaaatgggtgaaaagtttatccccgattgatcaacatgatattcttcagactgtaggtaaagagttacaagagtgttaactaaacgagaatgatagggcatagagagcagagcaagagaaaacttaccattactctcacacgtccttttctaagcttaaaccggacatgaaaccgtcctttaccgaaatcctgatgaaccgaaaagaggttttctaaagcattcctttgcccatctgaagatggacacaaaggttctaagttcgctttcattgtggatatatattcaagcgcatttgtgaccttctcttggtgaaggtcagtgttcaatgaccaaaagacactggaaatttgcgctgcaccgaaaaaaatcaacctttgtagttaaacctaacaaggaataaaactaataaactagtgctcaggtttatgtagcaaagtaccatggcttcgaagatctgttaaaagaccagaaactaatggcatcgctgaatgtcttagcaactcatttacctgattcaaagtttagatatataatcacttctcttttctatagatgatgtctaaacaattagagcttaactcaccgaatcaatggcaacgcagaaacgtgtcttcccagttccaaccaactctgcaccaaagcaatcacttttaatctcatataatcctttagataaagatctaactgaaaaaggattcaatgtaaaagaagtacacctcttcctgcttcaatgattgaagaaaaaagctttttcaagtcactcacacacttatgtaacttaatcaaacttgaaccttcactaaaactagttgaagattgatcaatccatcccaatggatcagtgtaacaatccaaaatacgaatccttcaaatcaaaaccaattgttatcaaacaagtatcacagtgattcgagcaatcaaactactccacaagctaggataatatttagaaaacctaataactcaccatttagaagatgaagagacaacgattcctttttgcttcaacaattgcaaatagaacgaagggctccgcgagaatgtgatcaacacaagacccctgaatcgcaaagtgggaaaaacgaagactttagcagtaatgaagcaattggagatcgaatatagaagaattagggtttaagagtatactgcgacgaggattttccagctaaaattgaagaagatagatttgtgagaagatagccggagacatcgagtccgaaaggggaagctacagtttcttctatagtgagagctggtgcgagttcgccttcttcgccaccatctctgagctttctgaaaatcgattccgccattgttgagagattctagagctctccggtcaaaagagcggcgaggaaacaaaacatcgaaaagttaaaaagggcttttgggctttatgatgtagcccactgggctttgttcaaagaaacactcgttggaggaataaacatcgtgccgtttttttaacatggataaaacgtcaaccactttgtatg

SEQ ID NO: 25085 - DNA, 3000 bp, Unknown; identical to SEQ ID NO: 13378
  misc_feature (1)..( 3000): 2750-1469P.txt file - cDNA_ID_2702834; gDNA_ID_2214623; Annot_ID_135909

SEQ ID NO: 25086 - DNA, 3000 bp, Unknown; identical to SEQ ID NO: 13378
  misc_feature (1)..( 3000): 2750-1469P.txt file - cDNA_ID_2702834; gDNA_ID_2214623; Annot_ID_187715

SEQ ID NO: 25087 - DNA, 3000 bp, Unknown; identical to SEQ ID NO: 13405
  misc_feature (1)..( 3000): 2750-1469P.txt file - cDNA_ID_2702853; gDNA_ID_2214624; Annot_ID_135937

SEQ ID NO: 25088 - DNA, 3003 bp, Unknown
  misc_feature (1)..( 3003): 2750-1469P.txt file - cDNA_ID_2702869; gDNA_ID_2214624; Annot_ID_135926
acgacatcatcgatatcgaatcaggagaggaggatttgtacagcgatggtggtaacgtatccgatgactacaaccctgtggacgacacaattagtcgatctgagaaaagttacgttgttgttaaggaagaagacattcttaagcttcaaagagacgatatcgaacaagtttcgacggttctctctgtaagccaagtggaatcgattgttctgcttcttcactatcattggtgtgttagtaaactcgaagatgaatggtttacggacgaagagagaatccgtaaaaccgttggtatattaaaggagcctgtcgttgatgttaatggtacagaagtggatattcaatgtggaatttgctttgaatcatacactcgaaaggaaattgctagggtttcttgtggtcatccttattgcaagacctgctggactggttacatcactacgaaaatcgaagacggtccgggatgtttaagggttaaatgtcccgaaccttcttgttacgctgttgttggtcaagacatgatcgatgaggttactgagaagaaagataaggacaagtattatagatattttcttaggtcttatgtcgaagacgggaagaagatgaaatggtgtccatcaccgggatgcgaatacgcggttgaatttggtgtaaatggaagtagtagttacgatgtttcttgtttgtgttcgtataagttttgctggaattgctgtgaagacgctcactctcctgtggattgtgaaacagtgtcaaagtggttactaaagaacaaggatgagtcggagaacatgaattggatacttgctaagacaaagccttgtcctaaatgcaagcgtcctattgagaagaacactggatgtaaccatatgtcatgctcagctccatgtagacattatttttgttgggcatgccttcaaccattgagcgatcacaaggcttgcaacgcgtttaaagcagacaatgaggatgaaactaagagaaaaagggctaaagatgcgatcgatagatacacgcatttttatgaaagatgggcattcaatcaatcctcgaggcttaaagctatgagtgatttggagaaatggcaatcggtggagcttaagcagcttagtgacattcagagcacaccagaaactcagctcagtttcaccgtagatgcatggcttcaggttagtaaaagtaacatttacaagaccattgaaaatgtttgtggaaacgacggaacataatggaattactaccatagtagatatataataaacgacaagctttcttgaagacgattttatgagtaacttatcattgatctgaactgatgaatagatagattacaaaaaaagtgtgtataattttcaaactggcaaaaatcatcccaccattatgctagccaccaatgagattctaagttagattttgttacttacattgtaacagcggaacataatctgtagtagaaaaaactagaaaagctttattaaattgaaaaatcatcttaatgacggttaactttccgaaatggtgaaaccattccaccattatgcatgagaactaccaattagactctaagttagttacggcattaattatattctcattccaccattatgcatgagaactaccaattagactctaagttagttacgacattatattaattcttgttgacatgtacttgattttactgttacagatcatcgagtgtaggagggtcttgaaatggacctatgcatatggatactacatacttagtcaagagcgcaacaagcgagtatttgcaaggtcagtttttggtacggaaacacttaatttgtgtgtaatcttaatttttccattaattgtagcagaactttttcgttgtcttgttgttcagctgaggcagaaaatggtttggagagacttcatcattgtgcagaggaggagttgaaacagtttatcgggaaaattgaagacccatcaaaaaatttcggtgagctccgagcgaaattaattgatttgactaaagcaactaaaacctacttcgaaaatctggtgaaagctttggagaacggtcttgttgacgtggcatataatgagagccagtcaatagaagaacctgaatcttttaccaaaaggtccaagacaaggaaaataaaaactttaatttagagttttagtaacttcaatattttctatggtttatgtgtttgctgcgaaggactgtagatttttttatgcctttttttttaaccttagacctcaaagttttatttatttacaattaaggatttgcgactttgctgcttggttgctttatatttcatagtgcaattttggtgaccataatttgtatttattgtctgaaaacttctctagattaagagctaatgtaatatccattcaaacatcggatgaaacctctcctaacatgacaaagattaaaaataaattacatgaattgtgagaactcaagcatctataattctattttcgttgagctcatctatacaactctttctgaagtccaacaaattctaaaataacatgaaaaagtatgatccacaaaaaaagaaagataacataatgaaatcaaaatttttatcggacccacccacctaatctcctcccttcatggcttcatctacccgccacgtttattatatggcatagtaagaatctttttttttttaccatcacaatgtcttaatcgtcatagattgctctctacacatttcatagaaatcaatcctgaaatactctcacgcattgcatacaaacttattcacaaaaaggaagcatcaatttataatgaatcattccttcaaatttaaaaccaaattaacagaagaagagaagaagaagacgaaaaagaagaattgacaagtattctaaaaattataataacttttatccaacatcgtaaataatgagacatgtatataacactatattcacttaacttacataggagacacaatatcaacaacttattgttcctttggttcgaacaattttaccaaaaaaatg

SEQ ID NO: 25089 - DNA, 3003 bp, Unknown; identical to SEQ ID NO: 25088
  misc_feature (1)..( 3003): 2750-1469P.txt file - cDNA_ID_2702869; gDNA_ID_2214624; Annot_ID_187744

SEQ ID NO: 25090 - DNA, 3003 bp, Unknown
  misc_feature (1)..( 3003): 2750-1469P.txt file - cDNA_ID_2702877; gDNA_ID_2214624; Annot_ID_135928
ataatcagctagaatggttgagaaacagaatgaagtacttttagagagcatatagaacagtgagtggaataaaaccagactagatacagccatcaagaaatgccgaggagcacaatgtttgaccattaacgtaactaataggtaccggatataagatgacaccaaaacgtatgaatccataaggtactacctcatataatacgacaccaaaagagtaagaatccacactcctgtcaaatatttcatctttgtaaacctcaggtgccatacagtaatctgcaaacaacaaaaaaaatcatctgtttaaactattgcctcatggaaatggaccattcttataacttatgagtatatcaatagtagaaacagtttctatacttaatacttgtatcaaagtttctcaggaggaaataagcatttaggacttacttgaaggatctatatgggccccgtgattaaggatttttgatttatcagatgataactttgcaaaacttatcaaaccaaatcccgccaccttcagatgtcctccactatcgagcataatatttctggcaccttacaagaagttgcaaaaattagataacgagggtccaaatatatgttctcgaaaaacttaacgtgcaaatgcttctttatttagttatcttacttgggttttagatcacagtggattactggttctggtttacactcgtgaagataattcattcccctgagaagagccaaatgattcgttcaaaagattattaaaaaaaatgtagttgtaagttgaatacaatcttgccaaaaaagtcacatgcctggctatatcgagggcaaatcttagaactttggctggagaaagacgaccttttttttgaagatagctcccaaggtccccctgcaagttaccaccaagtggacaacattagttcctaccatccaaatattgcttaatgagggaaaaatcttttaaggtgtaaaaagagggagaagcttactttaggatgatactcggacacaatcatcatggggacattttgagtaacagctccaacaaattgcacaacattaggatgacgtaccttctcgaataaagtaagttcgtgtttgaaggcatttctgtgggtacataataaaagtcagatgagaagattgcagaacaaacgtaatatatgaaaagaaaaacaaggattaacacagagggaatgaagtggattccagaaaatattactggaaatgcacaattccaacatagaagattctataagaactatgattgaataatgttacagctcatatcatcatcactatgaacataacaaagatgatttcaacgatctatagcttcactcaagaagaaattcaaactccttcttgacctgttagctaacatagacatattactcactgaagagaagagtaatcttacatagtgtcagaatccttgtagagatccttatcaagtatctttacagaaaccttagtcccattccatttagccacttgatatattccctggcaagtggaaaagtgatgtagtatcttgttaaaaatctataaatggaaactaagacattattacaggaaagtaaagcaaagagagatcttgcctttgagataccatcagctttccgaacttgaagttcctgcggatttaactcgtactcaggaacttcacgaggattcgccacaaccatgggtgtccttttggttttctaaaaccaagaagaaaatgtaactataaacatattaagatatgaaaagaacagagcttgaatcaatgaaaaatgcagcaacataccggaactttagctccacgggctttcaaaatgttgaaaacatccatgttaccataatacttagcatcagcagctgcctatccacacaacacaaacataatttcaaaaccaaaagcacaaaacctaaccaataagagacaacaatagaaatttatcacattaccgtgcttccccaacgatcacgagcatcaatattagccttcctagtaagaagaagcttgacaacatcgacatgaccttcacaagcagcgatatgaagagccgtacgaccatcaagatcgatactattaacatcaataccttcatcaagcagatcctgaacaccttcaacatcacctctacaagccacaaatagaagctgcatagtagcgtcgagattatccggtacagcaagctgcggaccgttagaaccatcaggactccgacgaatcggatctaaagacgattgtcgaccaaaactaaatcgcatattgttccggcgaggatcatgtgaagcttgacgcgtgaattgacgactaagcgtacgacgaagcgatccagttgagaattgtctcgagattcctcgttttagctgtcccactacattcgccatgatttcaaatctctttctcttcttctctctttcgtcttcttctgcgaaaaaatcgaatggataatcacattttctttttctcgagaaaattgatctggtgattatgtgagatccgtctctagcgcgttgcttatcgagaaataattaattttaatttgacgggtgaagatattattggcgacgtctgtttccgattgactttgatttgacttttcctttcaatcattatttggcgagtcccgcgtaaatatggactcttcttgattgtccacttttttcggtggctttaccggatttaaaatcattttcttttcctaaattatgaattttaccctaaacttctcataattacaattagttccgacgaacccaagatactttttagcaaaattaggaaaatagttgactcgaaaaggttgttatacgtggagctgacgtgttggtcttatctactcgaagccttttgggcttttcttaaagccattgatttctaaggtcgtcaacaaccgaaccggaccggacggtttgaccggtctaaccaacatatatacgttctttttcacttgccgtttcgtcgtcgtcagtcttcttcagtagcaaaaaaccttcggcttcgtctcgtcaatg

SEQ ID NO: 25091 - DNA, 3003 bp, Unknown
  misc_feature (1)..( 3003): 2750-1469P.txt file - cDNA_ID_2702881; gDNA_ID_2214624; Annot_ID_135929
gatttgccgcaactttccaagctgttattaactttgtgaggattttctgcaggtccatgatcttactcatttgccattttctgaaagagaactgatgctgattaagattgccgtgaacgctgctgctagaagagatgtcctggacattgctagtattttcagggctaaagctgttgacgtatctgatcacacaattactttgcaggtaaaatacatttctcataaatgggatttttatgtagctgttattgcatctcagatgagaaatcctttcaattggagatcttcaaagtttcacgtctttccataggtcttcaacttgtttgacataatcagagttccgtttgaaaaaaatatatgaagctgacttggattttccatcttaatctctatttttttgcttttgtgttttggattttgtgctgaaatttgttggctgtgggtatagcttactggggatctagacaagatggttgcactgcaaaggttattggagccctatggtatatgtgaggtttgtttcgcaatctactttcatctcttagtgaatgcataaccccgtgaattcttaatttcttataatgatactccaattgttcggataaagtcccaaaatttagttgtagtctttacgacttagaaacagagtagtgaaatctaactctctggtaaaatcaataaccaaagctggacctagttacatgaatcttcttctggttgtgtgtagaacaagaataagcttgacaagccatgactactttcagattatgcatcgtgttgacgcttattatgaacaatcaatcacaggttgcaagaaccggtcgtgtggcattggctcgtgaatcgggagtggactccaagtaccttcgtggatactcctttcctttaacaggctaaaccgttgcagagtgcatccatcgaacatcagaaacttttgaaggtaaaagtttcattacacagtctatgaaccaactcaaagacagacagagagactgcgtagatatatgtttgtgactttgtttatgaaacaattagctgattttggcttcatttcgattcttttctttttgagataagaaaagttgttaggattattaatattcgttcgtcttattttcccaatatttcccaagttattattatgagatggctaaaagaggaaacacaaatggactttgtaaatgttatagtctagagagtcaaaagtcaaactaagtaagcgttgactgacccggacgtgtacctaaaaatgactcctcttctacaaattcgattcttacattggtaacttcaataacgattactcctgacaaaagtaattcaataattgtgagtccaaataagatccatacgactcatatcatcatctcttaaccttttcaataaatgtcacttctctaagaatatactttcaagtttcaaaaaatctaaccattttcatgattattctgtatttagaatcggggaaacttagatttggaaaaatacacttttggaaagaaaaagttgtgtttctcttcgatatgcatatgtaaaagaaaaagtttgagaattgcaattatagagccgaccatgtgctttttatgctttactcgtttattttaatttgtctgtagtgactacaaaattttcgggcactatgaatggatcgatcaatttatttatgctttatcggcggaagatataaattattcattgaatcataattttgtaatctccttgtttcttaatttattttgtactaagacagttctcaatttaaccacagtttataaccgtaattttgtactaagatataactgtattttgtagttagtgtagaattttgtctctccagctataaaaagctagagttaacttttgagaattttttacaacacttttccgtattttgtaatatgatcatattactaagctaagaaaatccggtcaaacaaattgtttaatcatttaattagaaatgtgaataagttaagaaatgcaagttctttttagtcgtccttagttttgtgtacaagacattaaattacaacactacacaaaaaggagaattcgttagttaactaacaaagtgatcaaccaaacaaaaccctaaccaaatgatactgacttggacttttaactagagcaagtaagtaaaaacgactagttgtatcgtcttacctttgtttagacttttaactccgattaggtgacatggcaccatccatagattagtcaatgaaaagagcattagagacctccatcaattattcaatttcttttatcttattagactcaaactgaaatatctaacacaccatagagaaaaagctttccactgtcgacacaaaaagagaaactaatactaaaaagtaaaaagtaaaaactttattatcgcttaagagtgatgcttgcataaaagcgtgttattaataaaaaagaggcactaacaaaaataaaacaagagtttgtggctgctgaaattcttcaaacccaactgatggtgatgctgatgttcttcttcttctgacattctctctctcttctctcttttcgcagcttcttcttcatcttcggcttaacaacaacaaaacttcacacacgtggtgagagagcacacaaaggctcaagctttttcaaacccttgttgaaattcgagctcttttggtgtttctcttttttttgttggtatcaatttggtgtttctcttggtcttgttgaggtactgaatcagcttcttcttcttctccgatcttaatcgattctaagtttcttcacagcttgggacgatttgacatctactctccaattcatttcccgtaaagttgtttttttttcttcttgttgcttgcaatacatggattcttcgaggtgataatcaacaaaagcttatctcttttgttttctcaaggtttgtgtattagagattagtgtttttgttagatttggggataatatatagataatctgggtttaggtattttagttgataacgacgataaattggagtaataggatatg

SEQ ID NO: 25092 - DNA, 3003 bp, Unknown
  misc_feature (1)..( 3003): 2750-1469P.txt file - cDNA_ID_2702881; gDNA_ID_2214624; Annot_ID_187747
gtttcacgtctttccataggtcttcaacttgtttgacataatcagagttccgtttgaaaaaaatatatgaagctgacttggattttccatcttaatctctatttttttgcttttgtgttttggattttgtgctgaaatttgttggctgtgggtatagcttactggggatctagacaagatggttgcactgcaaaggttattggagccctatggtatatgtgaggtttgtttcgcaatctactttcatctcttagtgaatgcataaccccgtgaattcttaatttcttataatgatactccaattgttcggataaagtcccaaaatttagttgtagtctttacgacttagaaacagagtagtgaaatctaactctctggtaaaatcaataaccaaagctggacctagttacatgaatcttcttctggttgtgtgtagaacaagaataagcttgacaagccatgactactttcagattatgcatcgtgttgacgcttattatgaacaatcaatcacaggttgcaagaaccggtcgtgtggcattggctcgtgaatcgggagtggactccaagtaccttcgtggatactcctttcctttaacaggctaaaccgttgcagagtgcatccatcgaacatcagaaacttttgaaggtaaaagtttcattacacagtctatgaaccaactcaaagacagacagagagactgcgtagatatatgtttgtgactttgtttatgaaacaattagctgattttggcttcatttcgattcttttctttttgagataagaaaagttgttaggattattaatattcgttcgtcttattttcccaatatttcccaagttattattatgagatggctaaaagaggaaacacaaatggactttgtaaatgttatagtctagagagtcaaaagtcaaactaagtaagcgttgactgacccggacgtgtacctaaaaatgactcctcttctacaaattcgattcttacattggtaacttcaataacgattactcctgacaaaagtaattcaataattgtgagtccaaataagatccatacgactcatatcatcatctcttaaccttttcaataaatgtcacttctctaagaatatactttcaagtttcaaaaaatctaaccattttcatgattattctgtatttagaatcggggaaacttagatttggaaaaatacacttttggaaagaaaaagttgtgtttctcttcgatatgcatatgtaaaagaaaaagtttgagaattgcaattatagagccgaccatgtgctttttatgctttactcgtttattttaatttgtctgtagtgactacaaaattttcgggcactatgaatggatcgatcaatttatttatgctttatcggcggaagatataaattattcattgaatcataattttgtaatctccttgtttcttaatttattttgtactaagacagttctcaatttaaccacagtttataaccgtaattttgtactaagatataactgtattttgtagttagtgtagaattttgtctctccagctataaaaagctagagttaacttttgagaattttttacaacacttttccgtattttgtaatatgatcatattactaagctaagaaaatccggtcaaacaaattgtttaatcatttaattagaaatgtgaataagttaagaaatgcaagttctttttagtcgtccttagttttgtgtacaagacattaaattacaacactacacaaaaaggagaattcgttagttaactaacaaagtgatcaaccaaacaaaaccctaaccaaatgatactgacttggacttttaactagagcaagtaagtaaaaacgactagttgtatcgtcttacctttgtttagacttttaactccgattaggtgacatggcaccatccatagattagtcaatgaaaagagcattagagacctccatcaattattcaatttcttttatcttattagactcaaactgaaatatctaacacaccatagagaaaaagctttccactgtcgacacaaaaagagaaactaatactaaaaagtaaaaagtaaaaactttattatcgcttaagagtgatgcttgcataaaagcgtgttattaataaaaaagaggcactaacaaaaataaaacaagagtttgtggctgctgaaattcttcaaacccaactgatggtgatgctgatgttcttcttcttctgacattctctctctcttctctcttttcgcagcttcttcttcatcttcggcttaacaacaacaaaacttcacacacgtggtgagagagcacacaaaggctcaagctttttcaaacccttgttgaaattcgagctcttttggtgtttctcttttttttgttggtatcaatttggtgtttctcttggtcttgttgaggtactgaatcagcttcttcttcttctccgatcttaatcgattctaagtttcttcacagcttgggacgatttgacatctactctccaattcatttcccgtaaagttgtttttttttcttcttgttgcttgcaatacatggattcttcgaggtgataatcaacaaaagcttatctcttttgttttctcaaggtttgtgtattagagattagtgtttttgttagatttggggataatatatagataatctgggtttaggtattttagttgataacgacgataaattggagtaataggatatgactataatggaggagaagcagaacaacagtcctgtgggagagaagcaacagagctttaatggtataataataaaccaaacacaagagaatcagacaaaatcaatggagaaacaacagagtttccgatgtgtggtggagaatcaaccgagaaaggcgagagctttagagaaacaagtgagtttccaaggtgtgaatgtagagaactatcagcaaagcagactcggaagatcaatggagaagcaacagagttttcgaggtgtcaacgttgagaatcataaacgtggagttatg

SEQ ID NO: 25093 - DNA, 3000 bp, Unknown; identical to SEQ ID NO: 13395
  misc_feature (1)..( 3000): 2750-1469P.txt file - cDNA_ID_2702896; gDNA_ID_2214624; Annot_ID_135934

SEQ ID NO: 25094 - DNA, 3000 bp, Unknown; identical to SEQ ID NO: 13404
  misc_feature (1)..( 3000): 2750-1469P.txt file - cDNA_ID_2702904; gDNA_ID_2214624; Annot_ID_135936

SEQ ID NO: 25095 - DNA, 3000 bp, Unknown; identical to SEQ ID NO: 13411
  misc_feature (1)..( 3000): 2750-1469P.txt file - cDNA_ID_2702931; gDNA_ID_2214625; Annot_ID_135955

SEQ ID NO: 25096 - DNA, 3000 bp, Unknown; identical to SEQ ID NO: 13411
  misc_feature (1)..( 3000): 2750-1469P.txt file - cDNA_ID_2702931; gDNA_ID_2214625; Annot_ID_187781

SEQ ID NO: 25097 - DNA, 3003 bp, Unknown
  misc_feature (1)..( 3003): 2750-1469P.txt file - cDNA_ID_2702935; gDNA_ID_2214625; Annot_ID_135956
taagtctatgttgcatgaaaactctttccgcagtgcgtttcccatttctgaaacgtttcgaaaacgaaaactctcgcaaattagatgaaaacttacgaaaacgcgttttctaaaattctatgtttggaaatatgatggaaactcacgtttctgttttggaaatgcgaaaaatcttttttattttattttgggaacttaataatttaaaagtttggaaatattaagatttaactacttgtatgactcgagttttaacatctttctctcgacaaactagttttcaagtgctttctatgatttttgatggaactaatgtaaatgatggtctaaatatttgatattaagtcttttaatctttattttttagaattttagtttaaatatttgatatttattttttggattttgattgtttaaagtatatatatgtaccgggatgtacctcttattaaggatgtatttataattggattgacttctctctttttctttaatagaaatgtgaatatatatcatattaatgaaagttttttgatatacatattaaagaaagttgagggtttacaaaatagcttaaccaaacgtttgtaatcttgccaaaaataaaggtaaaagtcaagagatacaaggtattaggtgtgttgagtgtgaatcaacaagtgctaccggatccacaaaatcatcagacttcttaaacctacgatattcgatactccaatatgatttgttccatcagtaacatataatacatattttgatttgtttacgaccaatttgtcacgtgaattatggggtcctatatattttagacgtttgtagacaaaggaaaataattgaattgctgtcttttaacgtgcgttcaaaaattttaagaaccatcatcacattctcacgtcttccaacttaactgtgtcaatattacctaatgatttttgagccagtatggcgtttcttaagactttttaaaaaattacgcttcatataatttttagtttgattttcgcttaaaatggattaagtgttatttatttgtatatttgtatgatgcatttacatgcagatatgaaatgtttctcgatttaattcatattatctagatgtacaatagtaaatggatgcatttttgaaaaggaaatgaattttggtgcataattgacttaaaaagaaagaaaaacatagacacacaatcccacatgcatgcatatctcattttcgtctccttttatcgtttgatgttaccgaaccaacgtatttttgttccatgcaaattgcaattagagattgcggaatgagggaataagaaataacaaaattacatatatgtgatatgccactactgagtttaattttgctagttctcttttaacaaaagactgatcatttaatttccgttgagtttagttcatatttctaaaataaaattttatctttataaaaggaaaacagaagagaaactaggagaaaataacaaatgtaaactaagagaagtagagaatgaccatataccatatgacattatataatcatttggaccacgtgaaatgacatttctcttttcttaattatcttcagaaattgattttggacccctctctcttcgacttccaaaatcattttttatgatgaatgacttccaaaacattactagagctatctattcctcaatcttcatcatttttcctttgatcacatcagatcatagtaattaaactgcatcagataaaccgaattaatttcaccattccaattaagataacacaaatgttcgagaaataatataaacaacatacagtgagaatatgtcatttttataagaaagaaagcgtgtgtttttggcatgaaacatgtgaatgactcagtttttattgatatgtttcctagtggctatctttctctaaactatttttttccaactcactctcgtttaattacttaaaacaatgtgacgatccttgtagaaacctttttgacccttaatcaaattttctcaaaactcaatctttttgtgattaggtcgaaccattataaccgcatgaatatttagtggacaattcggatacgatgtgtcacggttgaattggccatcgaaaaatcaccctcagcactatctgacaaattacctcagaaattggtttggattcattgcgaaactcttcaatgtcatagttgactgagtcatagttaataatgtattttagaacatgagaaaaagattagaccaaaaaaaaaaaaaaaacatgagaaaaagatgcacaatctttctctaaaatcttacttttcacgtctcacacaaaacatttctcattacatttgattcaaaatttttatttattattaccgtagttgatgattcatagggtttaaacgcaacgagttcaattgtgagaatatggagaagtggacggttgcgaacttgccgtagactatcaagtgttttgaatgattagtaaaacataaataattattaaaattgagagattaaagtgtttgacaattaacatgaatatatatatatatatatatatgaattttattttgctcacgtgatttttttttactcggggaataaaccttaacaatctcaaagtaatttgaaacaatataaaacgttttttaaatgattgattttaaaccaaaatctgcaggagaaccaataagttgtatagttattgataaacgaattgggtggatacaataaatacctggagattctttttcattaattaaaaatatatatacaaaaaattgactaaaaatattttattttaaaaaaataaaaattgagggccctataaataagagatatccactcccactgaaacctcaaatcaatcagagagagagcttctgagacataaacatcaattcaaatcgacgcaagcaaagaaagcaaaatgtaagtcactgaagagtttggaattcccatttctgttcaattttcaattgagtttttgtgtttttctcttcagggaaaatggaagcgggaaggtgttgaagccgatg

SEQ ID NO: 25098 - DNA, 3003 bp, Unknown; identical to SEQ ID NO: 25097
  misc_feature (1)..( 3003): 2750-1469P.txt file - cDNA_ID_2702935; gDNA_ID_2214625; Annot_ID_187782

SEQ ID NO: 25099 - DNA, 3003 bp, Unknown
  misc_feature (1)..( 3003): 2750-1469P.txt file - cDNA_ID_2702942; gDNA_ID_2214625; Annot_ID_135958
aaatcttgtataaacaatttcataggtaaaattgaagcgatcgatacagaaatcgctaagaacaaagcatgaatattttgtcatctataaatgacttgctcaagaagaccaataccatacagagcttttatttgagacataaagaaagtttatgatatatagaaacgaaaaggagatgatggtatgcaacaaccactatatatacaaagaacctcatcaatagtaatttgtagggtttcttgttttttgtcgtatcctcgtatccgagtccaatctgtgtattccgcttcgaaaactctttttgtgttggtttcttatttagtcaatgatatagtattctagaaagtcaagatcacacatgtgaagtcaagagcaaaaaggaatgcacgtgtgtgttttgagctggcaacttgacattgacggtgatcattattaacgtttactttctttaccttttagtataaaaagcaacatgttatgttcatgctttcttatgcgaataatctggttgtattttatttctagagacttctagatttccctcatcgttttaccgaagctctttcgtcgagactcttgtaggtgagaagttgatatcgcgttttatgaacgttatatcaaattatcgtaataggaatactctgtttcggttctctgcatttttactttgttttactcattattctgtttacgttatcatcagtgaaacatgaaattgaaagcaattaactgtctcattttagttaactaaatttgtcttgaactgtatataattaaatcaaagaaaaaaaatacaaaatatgaaagtgatgaccggggatattcaaagggagactctcataacaacttggtatatgaataaagacttaaagcactggaatatgagtaccttgtttccttaattattgactcactgtttgtacagaaaccaaaaccagcactgcaaatgaaatatatcttaacagaacagaaataacccccaaaaatatttcaaaaagctcgaaaacatatggttccattttgtatagcgttgcacaatgtaatgctaaatcaaaagagtagattagatatataagatagaaaaaaaaaagagcaaaaaggatagaacaaagtattatagatagaatgtcattgggcaaaattaatccaaggactgatacatacaagtatacaaccatcgtattaacctatgaaaaagtattgcaaaatataaaatgatttttaaaacaatgaaattacacctatccaattgttacgaatgaaactcaacttttaaacactaaaaaaatgtgtatatttgcagtccagattacaaaataaaccattatataataggatccaactgtattttgacttaaataaggtagttgaaaatatcttgactaagaagtatatttggtttactcggtgtcaagactaataataattagtaagtagtgtatcgaataaatatagcaatcgcttttgcagaaaataaatatctactgaacagatgtatcgttctcaaaggaaaaaaacaacactaattggtgccgcgtatctaaagatttgcatgggaccatatgtctagtagtctagtaccatataaacctttttttgcttactcgtcagtagtttcttttgaaatcttcacaacactttcaacacttctcagtgaccgtgagcaacgaattattttcagttcaacgactccgcggaaatggaaaattcagaaaatgttccctcttacgatcaaaacatcaatttcactcctaatttgacgagagatcaagaacatgtgatcatggtctctgctttgcaacaagtaatatccaacgtcggaggtgacacgaactcgaatgcatgggaagctgatcttccacctttgaacgctggcccttgtcctctttgtagtgtcaccggctgctacggttgcgtcttcccacgacacgaggcgataattaagaaggagaagaagcacaaaggagtgaggaaaaaaccatcaggtaagttctattctaatacaagctttgagtttttctagtactagctagttttagttcatgtattttcatatatatataagccacgagcccatgaggtaaactatgttccaatacgttagcatgcagttgatgtactttcataaaccatcaggtaaatgggcggcggagatatgggatccgagtttgaaagtaaggagatggcttggaacgtttccaacagcggagatggcggctaaggcttacaacgatgcggcggctgagtttgtcggaagaagatcagcaagacgtggcacaaagaacggagaggaagcatctaccaagaagacgactgagaaaaattaacggagaaggagcacgtatagaaaggcaggaagaggcatcttacttgcttcacaagtaaatcagaatttttttgaaaagtaaaaacgttattttgtttggtaataaaataaagtaaaacaaaatattgctaacgcaagacttatcaagttcagtcgtgactgtgagtgtgtttttatgtatcttacttcattttttgtctttcaattgtgtgtgtgtgtgtgtttttttttttttttataatctatttggtttgggtttattgtgaccaatgacaagaaaagtctatattttatagttagacgtattatatatatcatgagataatatacaagcaaacacaattgtaagcatatataaaaatcaatcaagttgttatgatatttatgataactttaaactttgattaacaagaaaggtaatccaatagtaatatttgtcatacggtgccgtttcactaataaatgggcttacgtaatacggaccaacacaaagtgacgtggtttcattttaaaggtgttacttatcgtcgccaatgagatattgtcaaggcccaggcccatttgcttgtatcctcgaggcagcaaattcttgtattccatttctctcctcttcttcctctttctctctctcacatctgtatttgttgtctcgatcgtgtaactgagaacgaaggatg

SEQ ID NO: 25100 - DNA, 3000 bp, Unknown
  misc_feature (1)..( 3000): 2750-1469P.txt file - cDNA_ID_2702954; gDNA_ID_2214625; Annot_ID_135949
ctcatctctttctcctatctcgatcggtaattttactcattagggtctctctgtttctgggcaaattttcttcatctccgccgttttgcttcaatacagatttctgggattttttttaccgatcaaatttaggttttcgttttcactcagaaccttagaaaccctaattttgatacattagctttagagaaccttccatcggatccgtgtacaataaaaaagtttgcgttttttttttccttaaatcgattgaacgtgtttgaagatgcctccaaagcaacaaccaaaggctgatttggcgaagaagcagaaacaagtggaagacaaaactttcggattgaaaaacaagaacaagagcaagaatgttcagaagtatgttcagagtctcaagcaatctgttcagcctaaacccgatgcaactaaagctgcagctaaggtacacgtctcttgagatgagttttgagttttcttcatgaatttgaagttaggaggctagtggagtagattttttgaatatgtctaatgagttagtgtgagagataagttcttaccaagaaaaatggtttttttgaggacagaaaaagaaagaggaagagaaagcgagagaacaggaattgaatgagttgttcaaggtagctattagtcagcccaaagttcctgtaggtatgtatgttgaatgttgatactgtttctctggtttgttcactttggtttcggtattatttattgaatacggtgtgttgtttttggtgatgtatcttggcaggtgtggatccaaagtctatactctgtgagtttttcaaggccgggcagtgtcaaaagggtttcaagtgcaaattctctcatgatttgaacattcaaaggaagggtgagaagattgatatttacagtgatacgcgtgatgaaggtataaaagtgtggcacaaagtgtcttatatatctatccctttggtcctttggatgatggtcatatttttgccttttttatatggctttagatggagatatggatgagtgggatcaagagacccttgaaaaggttgttgaatcaaagaaaaatgaatataatcagaataagccaacagatatcgtaagttgtttctcttatcttgtgtttctcggactttttattatatgcttgtcgggacatgcttatcagttattagtagcttttctcttgttaatgcactgtgaaaatgtctgaactggtttgtgttcaaatatacagccttttaacgtgtattatgtgaagtgatgcattagttttggttgcacttgctgtgattaacctttagctgatgtgcattcgccttacgatgcgcttcctttagctaatagcacggttcatattaagagccattagggtcttagatgttattatgcctcccgttgttcccttgtgtttttctgcgcacttggttcatgcctgacaagaactcatgcttttggtgatgttagtgctaatcataattttgaaataaatgtttcttaactatatacgtctatgctaaaagaaataatatctctgcgtctcatctcaataatcatctcataaacttatcctaaacacatgagttatttgtctcgctgagttttattgacttgtaattgtttttgtgtttactgaaaaataataggtttgcaagtattttctggatgctgtggaaaagaaacagtatgggtggttctggtcatgccccaatggtggcaaagagtgtcattacagacacgcgcttcctcctggatatgtccttaaatctcaaatgaaagccctcttggaagaggagtcatcgaagaagctggcagttgaggacgaaatcgaaaacgaggtttaaaatactcctcaagtttccctcatagctgctaggacccggtacttgatttgtgagacccatgttttcttgttctatgtttcagcgtgcaaaactgcaaaccgcaacacaaatgactcctgcactatttatggaatggaagaggaagaaaattgctgagagagatgccggtttggctgcttctcaagcggagagagctaagaacgaccgtatgaggtaatccccattcatcattctgttacatatccatctccagtgtgactctatttttgtccttggaagctgattcattgtgtggatttgtaacctcagtggtcgggagctgtttctgtccaatgcaagcttgtttgtggatgatgctgaggcttgtgaagaatacgagagggaaagagagcaggaagagactgaacaaaaggtgagctctctctctctctctctctctctctctctctctctctctctctcactcactcatcatttaaaacaaccaagtcatgttaatggaatcttgagttttttgcttttcaggcaaagaacaaagaagcagaggcagggacaagcaagagtagtggtgatgctgaacagagttcgaaagaagtcaatgaagaagaagaagatgacgatgatgatgatgatgacctagacatggatgagctggatgaattggaagcaagcttgtcgaaaacatcgatccagattcgtgagccaaacgacgaagggtcatcttgaaatgaaaaatggtctaagaggaagaggtggaggagagaaagcacatgttttgtttttgtgtactttcaatagattggattttgcagacacaaaccccattttggggtgttgaataatttctgttactgttttacagtcttaaatggcctcatcaaagaactagtagtatcttttttgtccaatcattttcatctttctttgttgttgttaattttatcatgatgtgtaaataaaaggtcgtaaacttactagagaaaataaaaactacagaaatgtattaaaaacaaagaattttaatcaattcttatgaatatttagttgttttattgatatttataaataaagaacaaaaaatatcggcgatataaaaagaggtaaattaatctgagggcaaaaataagaaaagcatccaatttcgtcggaagaagaaatcgccatg

SEQ ID NO: 25101 - DNA, 3000 bp, Unknown; identical to SEQ ID NO: 25100
  misc_feature (1)..( 3000): 2750-1469P.txt file - cDNA_ID_2702954; gDNA_ID_2214625; Annot_ID_187776

SEQ ID NO: 25102 - DNA, 3003 bp, Unknown
  misc_feature (1)..( 3003): 2750-1469P.txt file - cDNA_ID_2702969; gDNA_ID_2214627; Annot_ID_135991
ttcttaagcctctgtttccatagtttatatcttaatacgtgttttctctttcttttggagctttgattatctcttttaaactatgttttcgaagatatctttgttttctgccggttttgtaagatcggaaaatatatttttattttataatattaataaaaaagatgacaaaacaaaaaataatgattttctttcaaacttaatgaacataaaaaaaagggaaacgaaatcttattttgcctagctgacataattaactaatgcaactaaatgtaggtaggattaagtaaacaaaaatatgagacaaaattaaacatgccaacctccagggcatagtcaatgggtcaagtcaagcgaaagttggtctggatcttacaatgcaacttaatgtaaagtactcatttttcttcgacatgggacatccgccgaaattgttgatttttgatccatctttacacttgttttctccgattacaacaaaacataacaattcgactacgatttaacacctaacctttttaattttttaggacacgcatttagtatttacgatgcaagccaacaaatttaatccaacgtattaaacacaacttgctttttgtcaatacgtattaaattaaatagttttcttgcaatttttgtttacacatttcattagtattgtttttttccaatatttttgtttctatgttcaatcactatcatatgcataatacacattataattttggcacaattagaattacacacaaggattttataaatgtttttaaaatgatttacaaaagattttataaaaattttacaaaagtttttaaaagatttaataaaagttttaaaacgattttacaaagagttttaaaaacttttaaaggttttaaagaaagtttatgagaatttacaagaattgtaaaagatttataataatttttttagaattagaaaggagaccctcattttccacccaaatcgtcaaccttctcataattgacaagttattacactctctccacttactagttactataaaaccaaaggagaccaaatctcttagcaattatgaatttggtcttcgctataatctcacgttacattaaattggctcctgtgaacctaaatttatggactatgatcccaacaccaatccgttcgaccttcatttctccggtaaacttccggtgagtttttcaatttcttcgaaaatttcacttcaattttcgaggttgtggtgattattcgtggtgttcatatatattttattgcctgatttagaaaagagaagtctcggcttcagcttctaaagttgtagagaagaaatggttagtgaaagatgaggttagttctttcatcgaacactttggtgtgcaatactttgacctcaaaatttttgactatgagtgaatggattaggttgatcaagttctcatatctgatttagacattgaatagtttgtttagatcggtgatgctcaaaagttgaacaaatcaaagctttgtcttacagcttagtttggtaatggtgattttcattttacacagaagagaaatatgctacaagatgaaataaaccgggttaattcggagaacaagaagctaaccgaaatgttagcaagagtctgtgagaagtactatgctcttaataatcttatggaggagttgcagagtcgaaagagtcctgaaagtgttaactttcagaacaaacagctaacggggaaacgaaaacaagaacttgatgagtttgttagctccccaattggactcagtctcggaccaatcgagaacatcaccaacgataaagcgacggtttcaaccgcttactttgctgctgagaagtctgacacaagcttggtaaggagatttctactacaagtatcgttctttgagtgtattgatttgttaacgaatgttttgtggatatacgttacttgtagactgtgaaagatggatatcaatggaggaaatacgggcaaaagattacgagagataatccatctcctagagcttacttcagatgctcgttttcaccgtcttgtctagtcaagaagaaggtactttggtttaaactttgttaaagagttcttcgatatcatcttgctgtctgattaaattccctagttgtgtgtgcgcttgtttaggtgcaacgaagtgcagaagatccatctttcttggtagccacttacgaagggacacataaccacaccggaccacatgcaagtgtgtccaggacagtgaaacttgatctagttcaaggtgggcttgaaccagttgaggaaaagaaagagagagggacgattcaagaggttttggtgcaacaaatggcttcttcgttgaccaaagatcctaagttcactgcagctcttgcgactgctatttccgggagattgatagagcattcaagaacatgaaagttctctagaacatgtatatttctgttttgttctattttgttgctcattcctagtaaaaaggtaaagatttgtttgatcttgattaggaggcatagatgtcaattttaatgtgtgtgtatataattacatcaaatctaagtatccaaaaagggtcacccccattttatcttatgttgaaagagttttgttatagctcggtgtaagtatggtagattgacgctgcttcgacagtttatgtatcttccaatgttatcttgttcagttgtttgtattaacttccattagagaagaatgtgatgccattacagacataaaagaaacagagaaacccggaaacagagtaaaaccacgaaaaacagagtcggtttaagagaaccaaaccaaaataaccggtacagctataaaaagccaagaagaaaaattatgaaccgagtccaaattaggttacggttagcttccaatcccaacttcttcttcttcttcatctgtgtttagtcccaaattgaagaatcaaaagtttcgtgttttgagaatttgacaaaaatttgtttatgtaatcttagttttcgctgattttgagtaagttatcgacatg

SEQ ID NO: 25103 - DNA, 3003 bp, Unknown; identical to SEQ ID NO: 25102
  misc_feature (1)..( 3003): 2750-1469P.txt file - cDNA_ID_2702969; gDNA_ID_2214627; Annot_ID_187844

SEQ ID NO: 25104 - DNA, 3003 bp, Unknown
  misc_feature (1)..( 3003): 2750-1469P.txt file - cDNA_ID_2702975; gDNA_ID_2214627; Annot_ID_135973
ttcttatgtatgtgtgttttgatgaagttcttacagcttctactgcatctcttgcggcaagaacaagtatatcagcacaagagactgtgccgggacaaaagatttcgaggatatttttgacgctttctatcacagcgaatcctcctagagacgcattcccagggtcgcttcgctctgtaccgtttcctcgaatcaacactgagccatcacaaccctaagacagcaatgacaagaacaaaaatctcattaaattggaaatgccttgttatgcaaggaagaggcagtcctgtgagaatgtaatgtacctggacgaagcagtcatggaagatgagacgtaggagcttcccaaggactgatggatcagaggaagaagcagatctaacggtgtttctgacgattaactcagctccaggacaagaaccggcgtagaagttgaaagagagctcagctactgaagaagaaagaagcaaaagtagaagaagagaggagaggaatgtatattttggtttgcatgaaaaaaactgcaacgccattttttaatgtgtctgtcagaagatggaaagtgaagttgcttaatcagccgagagagagaagagaagttgtagttgttgtgataaatgaaaactgtaaatgcatgtgcgttcgtgtcagagagagagagagatagtgatggttgagtcaggagaacttaatgacaatctctttactctcttatgcatgcatccatgagatcgagtcatcaattttacaaacaaaacaagaatttgaaagtggtgaatccaatcactgcatgcagtgaattttatgggtaagaaaccctaaaatagtatgaatttctccattattgtgacaaaaatcagaaaacttttttttgtacctttcagatatttctttttgaagatttaaaaaaatcactcatgcttattgaattcatctttctttgacttgttatagtatatgtcacttttgcatacaaaaaaagaagagagaatctataaatagaaaaatgtacaaaaggatctaataatgtgcttcagaaactctttatttgttgatagtttctgttgataagccaattctttgtctttcatgtctcagaaaacctgaaaagtacaagaaatggtggaaatcagtaaaaggtttgtcgtttttagataataaactcgatatagaacaaaaataaacaagcaacggagatatttggattttaaaacctgggggtcgtggctttggactcgaattcaataacctaattaagcaataatcttataatttcgaaggaaacaaaacaagcaaattttttaatgttaggtttaaagctttgtgaaaaaataatagaaaaaatgtactccatctttttctaatcattttaagtttattccactttaattttgtagttttttttttcttttcttctttattgactgatattataaatcacaaagttcaggatgcaatgattaaatttattagattacaatcaatgagtattagtttatagttattaaaaatatttaatataaaaaataaacagtcataaaataatgtttaatttttaatgtgtgtaaaatccaaaacatcaatgcttacggagatttccttaagattaataaagttgatttttatgtaataagaaacaaaatctcattaaactttaaaagtaaaaaaaataaaaatatgaagtgtcacttatggtagtagtatccaaaacaataagttaatggatttgtttctaaagaaaagaaaaacactataaacagaggatcctcaccatcaactttcactaatcatcacaacttcaacttttcaatactcagattaacaatggctattttctccaaattacatcttctcttcttctccttcatcatagccacatgtatacataaaacatttccaacattttaagatgactactttgatttaataatttatctgataatttttttttgttgtccgtcctagtaatttttttttaattgtatattcttcaaggtacaatttctattgtctccggcaccgtcttcactttatcaaaccgctgcaactttactgtgtggcccggaatcctaaccgcaaaccgcacactactccgcggcggcggatttgccttagcttcaggttcttctgtaaacttaaccgtttctccaggttggtctggtcgaatctggggtcgaacgggctgcaacttcaacgcctctggttccagaaaatgtaaaaatgcaccggtgcaagaggagcaccaccagccacactagcagaattcagaatcggctcctctggaaagaaatacaccgtacaagattcttacgacgtgagtctcgtcgacggttacaacgttcaggtgaaaatcacaccacaaggtggctcaggcaattgtaaaaccgcgggatgtgtttcggacgtgaatgccatttgtccaaaagagctacgcgttaacggctcatcgggtgttgtggcgtgtaagagtgcttgtgaggcttttaacaaaccggagtattgttgcaccggcgctttcagtaaaccggagacttgcccgccgacgaaatactcgaagatatttaaaggagcttgtcccactgcgtatagctatgtgtacgattatgcttcgagtagatttacatgtactagtgctaattatgttatcagtttctgttcttaggcatagtatagccttttttattgttattattatcaacaatgaataaataattaatcactattaacatagttttatgtttttttttcatcactatgaaatgtattaaagcaaaaaagactaatgttaaaacttaaaagattaaaaataaaataaaaagaagttaaaatgacatttaaataacgtaaaaataaacgacgtcgtttagccaaagtttctactatctatgtatgtggtggaacgaggtccaatggttgaacaagcaaccttatgatatattttatgagaagaggcaaacaacacctaacattggattcgagctctctagtgaagaatccgccatg

SEQ ID NO: 25105 - DNA, 3003 bp, Unknown; identical to SEQ ID NO: 25104
  misc_feature (1)..( 3003): 2750-1469P.txt file - cDNA_ID_2702975; gDNA_ID_2214627; Annot_ID_187822

SEQ ID NO: 25106 - DNA, 3000 bp, Unknown; identical to SEQ ID NO: 13436
  misc_feature (1)..( 3000): 2750-1469P.txt file - cDNA_ID_2702979; gDNA_ID_2214627; Annot_ID_135976

SEQ ID NO: 25107 - DNA, 3000 bp, Unknown; identical to SEQ ID NO: 13436
  misc_feature (1)..( 3000): 2750-1469P.txt file - cDNA_ID_2702979; gDNA_ID_2214627; Annot_ID_187825

SEQ ID NO: 25108 - DNA, 3003 bp, Unknown
  misc_feature (1)..( 3003): 2750-1469P.txt file - cDNA_ID_2703017; gDNA_ID_2214628; Annot_ID_135999
aacagaaacagtaaaacactcgaccaacacagctctttgcagagcattgggtgaggtcgagtgacaggtcgagtaacagacaaaaaataaaacagggatactcgactgcacagtctgttgccagacaactgggtggtcgagtatcaggtcgtgtaacagtaaagaaatgtagaaattaaacaacagatgacaagatgcagtaaacaacagtagagtaaacaaagaattcaatcagataaagaattcccgaggatggggtaatcgagtagcttcgttttctaagtttacaggtgattgacatgctcaataaattaaccctagacaacaagttcattaaccaaatctaagtgccaccgcaacagagaccctcaagttaacctagtcccagactcaatcaccattgacgagagctacctaacaggcatgacgaatcaacaagttaaagccaaaacgctccctgcaaccaataccttggtacagggtcacgaatctctggaattagtggttcagacatttcatcgaataccttttgggagcataaaatgtctgggctcaaattccagttgatcagaaagcaataggcattaagaacaactaatccagaagggatctatcaatcaatactcaatcacctagcatactcagaattctacactactctaacccatcctcagaaatctattcactactcaaacatcataacagaaagcataaacgttgaacaagttgaaaacatgataacaacagtgtaacaacaggatgataacagaatgaacaacagtaaacgaaatcaagacaaaagctgaatactgaatactgaatagataaagagaaatccggattacaaaaagactagaacacaaggtctgcggaataaaactaggtaaaaacttctttttgcgaaaatgtgaagtacatgctacttatagccaaatatcccgaaaccctaatactcaaaacgacgaagtattgggacggataaagaactgtactcgacccatgtggtcgagtgggaggtcgagtgagtagctggagtcttctttcctttcctgtgctcgagtgtctggttgagtgcggaatgaagaaggctctgaagcttgtcatctagtatgcagtcgagtggtgtgatggtgatactcgacttccaagtagagcaatgaggtcgagtagtggtctggcaatgaaggtgaagacactcgacctcgtggtcgagtgaagtgatcaagtgtttgtcaggagatactcgacttccaggttgattgacgaggtcgagtggttgtctgatgatggaggtgaagacactcgacctcatggtcgagtgatgtgatcgagtgatggagatgagggcactcgacctcgtggtcgagtggtgaagtgaagtggtgatgtcctctactcgacctgggggtcgagtggtctcttgagatcttgaagctcctactcgacctctgggtcgagtggtttatcatgatcagatccgcttcttccagatagctcgtcaacagctccaaatcacctgaaatcaacgcaaatatgcaacatgcatgcaaaactatcctaaacatgcaaagttatgacaaatgatgtgaaatggtataatcagtgatgatatgatgctaaagtgatgacaaatggatgctcaaaacatgcaaaatacacatttatcaactcccccaaacttagtctttgcttgccctcaagcaaacaatcaagaacaagctggaagtaaggtttgaaagcggggattcagagccaaagaaccagatagaccagatgaaatcaatgtccaagttgaaagttctaagctgcaagatcaaattctacttaaagacgttagccatgcctcattatcaatcaatccgactcatatgctcgacccacacatgttttcaaatctaccaatccctttaacattcattagttctggaacgtgaatcaaacaatgcatcatcaatgaactcatttggctaaggtaaaaggtcaagagacaaagatggtcccttacagaataggcttcagtaacaggggatctctcaaaaaatgattaagctttaatagaatgctaaaggtaagtcccaagctatgcatactgagataagatcccatctacacagagtatatcaaatgaagctctaatggtaattgttgattctgtaatcaaacaatgaatttgtactaagggatttagacaaattcactcctctcttagctcacaaataatcaaaggaaaagaactaagttgcttgaacaaaaagctagggtttgctctgtaatagtagtctcttgtattaggttaaaaatggtctcaatggggggtttgacccctctatttatacaatgggtcgaatataccaaaatatgataaacttctaattatcctaggtctaaatcttcattacttctattcttcataagatcctcttctcttaaatggaagttttccctttacacgacctaagaagttggttatggcgatcttgattgtcgacttaagtcttcgggcgagctcatgacttaggcccattaacaggctaaccgggataccccggttcaatcgacttctcgattttattcacattattcctcggtttaaattggtattgtcggaggtgctaattcctgcaccaacaattagtccccccccagtccggagaatccgagttgcctaattcgaaatttccgaacttagaaattgaatatttgatttaaatcttggaagacgtgaattaatcattagatctccgaatcgattcgtatttcgaacgtatttgacacgtgtcaaatcgtcgcatctgtacgcgcgcgtgaagctcaagaaccgaagcgtcccgtaggtttaatgatgacctcgtaggcttgccgcccattcgtctctatttatattcgaccaaaccctcgggaaatcattttctgccgcttgcaagaagaatcaaaggtagctttcgctctctcctctacgaattattttgtattctcgattctttatcgatttttccggcaatg

SEQ ID NO: 25109 - DNA, 3000 bp, Unknown; identical to SEQ ID NO: 13466
  misc_feature (1)..( 3000): 2750-1469P.txt file - cDNA_ID_2703032; gDNA_ID_2214629; Annot_ID_136021

SEQ ID NO: 25110 - DNA, 3000 bp, Unknown; identical to SEQ ID NO: 13466
  misc_feature (1)..( 3000): 2750-1469P.txt file - cDNA_ID_2703032; gDNA_ID_2214629; Annot_ID_187912

SEQ ID NO: 25111 - DNA, 3000 bp, Unknown; identical to SEQ ID NO: 13465
  misc_feature (1)..( 3000): 2750-1469P.txt file - cDNA_ID_2703035; gDNA_ID_2214629; Annot_ID_136016

SEQ ID NO: 25112 - DNA, 3000 bp, Unknown; identical to SEQ ID NO: 13465
  misc_feature (1)..( 3000): 2750-1469P.txt file - cDNA_ID_2703035; gDNA_ID_2214629; Annot_ID_187907

SEQ ID NO: 25113 - DNA, 3000 bp, Unknown; identical to SEQ ID NO: 13464
  misc_feature (1)..( 3000): 2750-1469P.txt file - cDNA_ID_2703042; gDNA_ID_2214629; Annot_ID_136014

SEQ ID NO: 25114 - DNA, 3000 bp, Unknown; identical to SEQ ID NO: 13464
  misc_feature (1)..( 3000): 2750-1469P.txt file - cDNA_ID_2703042; gDNA_ID_2214629; Annot_ID_187904

SEQ ID NO: 25115 - DNA, 3000 bp, Unknown; identical to SEQ ID NO: 13463
  misc_feature (1)..( 3000): 2750-1469P.txt file - cDNA_ID_2703045; gDNA_ID_2214629; Annot_ID_136013

SEQ ID NO: 25116 - DNA, 3000 bp, Unknown; identical to SEQ ID NO: 13477
  misc_feature (1)..( 3000): 2750-1469P.txt file - cDNA_ID_2703053; gDNA_ID_2214630; Annot_ID_136028

SEQ ID NO: 25117 - DNA, 3000 bp, Unknown; identical to SEQ ID NO: 13484
  misc_feature (1)..( 3000): 2750-1469P.txt file - cDNA_ID_2703053; gDNA_ID_2214630; Annot_ID_187923

SEQ ID NO: 25118 - DNA, 3000 bp, Unknown; identical to SEQ ID NO: 13478
  misc_feature (1)..( 3000): 2750-1469P.txt file - cDNA_ID_2703094; gDNA_ID_2214630; Annot_ID_136030

SEQ ID NO: 25119 - DNA, 3000 bp, Unknown; identical to SEQ ID NO: 13481
  misc_feature (1)..( 3000): 2750-1469P.txt file - cDNA_ID_2703102; gDNA_ID_2214630; Annot_ID_136033

SEQ ID NO: 25120 - DNA, 3000 bp, Unknown; identical to SEQ ID NO: 13481
  misc_feature (1)..( 3000): 2750-1469P.txt file - cDNA_ID_2703102; gDNA_ID_2214630; Annot_ID_187932

SEQ ID NO: 25121 - DNA, 1295 bp, Unknown; identical to SEQ ID NO: 13501
  misc_feature (1)..( 1295): 2750-1469P.txt file - cDNA_ID_2703122; gDNA_ID_2214631; Annot_ID_136062

SEQ ID NO: 25122 - DNA, 3003 bp, Unknown
  misc_feature (1)..( 3003): 2750-1469P.txt file - cDNA_ID_2703132; gDNA_ID_2214631; Annot_ID_136058
gccaaaaagtcatttattttattaatattaattttattaatgatatgactctgaattataatctaaatattttagctaataacataggagtgcaccatatttatttaatagggaaatgtaccatatgacccgaatgcatttttatccaaatccaccaaaaaagtcttgcaaaaatactataaagataagaagcgatagtcggttttgatagatataagattagcaaatatattagttagcttaaattagttaaagaatacaaattaaaagggtatgcaccatatttatttaatagggaaatgtaccatatgacccgaatgcatttttatccaaatccaccaaaaaagtcttgcaaaaatactatagagataagaaacgatagtcggttttaatagatataagattagcaaatatattagttagcttaaattagttaaagaatacaaattaaaaaggtatattacactttattcaaatattgtatcaaaacttatataacacagagatttgataatttttaattgttgaatacttcttttttgtgctaattttatgtgattaagatttaattgatttcatatataaaatattaaattgacttatttgtttataatttggtaacagatagatatttgaatattcagtatattttgcttcagtttaggaaatctttgatgacccgtctttagatccaataagtcctataatctagagattaatttgcagtataccgcaggtaggcttatattttagttaaactaaaaacttttattgtaaagatgatttaaaaatatatgatattattttatttgattttaaatgtatagtaaactgtgagttgtatatgttttgttgatattatctatattgtttagtgtttaagattatacacttgtagtttgattgttaatttaagagtttcacatgtagtataccatcttgtattaatatcgatctaaacccgtcaattctaggatttttcagcttatattaaaaattgaatcacatctaatatgttattaactattgtaatatataagattataaattttcaatataatatgtatgaaattgaatatgaatatttcaaatttatgtccccttactcagtagaaagttttcttaaatctatttttcacccgttataatattatttcatgtattgaacagtttatatttgtttttaaaaattcaaattatggcatatgcgaaaaaactctaattatttttttataatgatgatattatttttccgtataaatagaatcatataaagatgagaagtgaactataataattaataaaaaattaatatgataatttagataccaaatatagtttgttgattttaattggttacttttttagaaattaataatctatttcgtttttctaattaaattaaattaattaaatttagatatcaaatcttatatgttgattttgattggctattatttttggaaattaatattgtatttcgttttttaattaatttaattaattaaattagtatttgactttttaatccttaaagagataaattaatttactttttaaaattttatttctaatggcatacctatgtaattacttacaaaaattaaggttatatttaaaatgtacttcccaaataatatagtaggattgtcactacgactacgagggacacttgctaaattttcggaatattttatcttatgaattagaaggaaaattattatggaagttgtaataaaacatgtacaacattttaaatatcataggttttttattacaaaagtattatattttaatagtatatgggaaaaacaattgtctcttcaaaatttattcaaaataaaaaaaaaattaaactatagacgaatgagcctcgaaaacgcaattcctcaaacatttttttttacaatcttatccaccaacgtatgagtcaaatcaaacaaatagacaccttaaagtaaagtatatacatagttcactaatatttttgctagacggttaacctctttatacatatacgagattcgaattatctactctgtagataaaatatatgatacaaacttatcaagaaagacaattgggttcgactcacaaactcttgcctttaagaatcctaccactaattccgcagctctagcctcatcactctcttctcccatgggatatacaattcatagtagacttcctacaacttcggtaaacgagccgagtatacaatgtttagcgcacaatttccgcgggaaatacaaaaaagattgtgatgttaatgtgatgaatttgtaattaaacacacgataaattagtgcaatgtgtaaaatattttataaatttgtgagtaatgggtaaaaaaaaaagtaaagaaggaagcaaagttcagttggtgaatcattttgctggccattactctataagagagagagatcctatctccataaaatcccataccctcaaacacacacacactcaccatcccactaactcgaatagttaacatgcgcacaccgatccttggcctttcgttgctaaaatgagcatggtgcgtgattcacccgcttacttgctcgatttctccttcacccttttaaaaaggaacgtcttttagcttacctctgcctcctttaccctctctctctctctatctctatctctgttctttcctttttccggcgaatttctgggctgagattgttagtgtctctgagtgatgcagagatcaactgttgtagttaatcaatatcttctgacataagctaaactcgattctttcttacaatctctctgtctctctctgcttccttttctactgtcttctttcttcttctctagcttttgaattttcaatattgatttctcccatggcgagtagcagttgcagcagatctatctctgtttcaaattctgattctctcggtgttttttgtttgagctagggctaaattagtttccttcttgggtttttattcgtaatccgattcaaagtttgtatctttgggagggatg

SEQ ID NO: 25123 - DNA, 3003 bp, Unknown
  misc_feature (1)..( 3003): 2750-1469P.txt file - cDNA_ID_2703136; gDNA_ID_2214631; Annot_ID_136057
cctttgtctctgtagtagctgtagagcctttcgacaaaaagatccaaatcagcaattggttgaacatttaaactctctccattaagaagtcccgatgggctctcactaccaggacttggtattcctccgtagttagatagctcaatctcgtgtgactcattatgaagcaatccagtagtcaaagacgatgatgattcaccacgttgccatttaaaaaagttacgtacatttggacccttatgcccactgctcatcatttgtaaacacagacgattggccaaaacagccggtccattccctgcttaccacgcggaaatttgaagaaagtgtagtgcgcaatgagaatgcaactacaaatcctgcatcaaacatgaataacataaagcatccacaatgcaaatcacctaatgacagagataatttatgtatgcaaacaaaaaagtgccactaaaatgttcaagctagaagcacatacaatgaatatactaaccaatgagacactaaggcaaatcaaatccttaaacgcagaaagacaaaccaaggatacggaactcgtggcataacctgctaaagaaatgtttctatatctgttttccaccatgatggatataaaccagacccacctatcctttgcttgacactcaaaagactattcgatttcaaacacttcctttctttttcaacaatagcattcatgcacaagcagaatctttggacaatgcactaaatgcctagcactctgatgacaattgatggtgcagagaaagcgaagacgaagtaatctatactcaatcaagaggctgacacaagattcacgcaacctttgcacaaccaatagaccttgatcaaagtcaattacctaaaaccaactctatttttcacaagaagacgaagcaaaaacggcgaattccttcccaatagaacaaggggtttatctacttttaacagggaaatgatcaggagcaatacgattctaaattgaaacctcaaaaacccttaagctaacactataatctcctccaaccttaaatcacagtgcgattaatcaaaaaaaatcaacctttctcgataacagcagatgagaaaatcaaaacttaccagagacccacgaaaggaacagcaattagaaagcgaaggtctataagcagctaggaagatataattgtcttaatatccgaagctttagagaaggaggaatcaaatacagaggctatgggcaatggaaaattcgatgaagaagttgaaaagacaagaatttgatcgacgaatttaggggagaaaagcaaaagaagaagacgaagagaattgggtttgcgtggaagaaaagaggagtgataaaatattgatgctttggagtttggagtactagttttcaattttcgatttgggcttttcttcttcctcttctcttctcttctcttctatacaacattacttaaccaaagaaacgtgatcacgagttctcttcctcttctatgattttggttttactttgatctttggttaaaaaggtaatctaacatttattagcttgaatccaaaaaagtctttgcacacacaaaaaaaaaagtcttgaagccaaaaaattgtaatttttctttaatgtgatatattgaattttattttaacaacttgtataatgggccgattgttttgagtgggcaccggcccagattctaaacagacccaaaaaaacaatagttaagatgtacattatattactaactttaaaattgagttttgaaaatatgatagtgagtcagttgacataaattttggatctagatcagattcttggtatcaagatcaatatttagtctcagagcataatataatacaaattgatacatctagctcctttaattttttaaatgttaatcaaaaataaaaactcatgaaagttataattattttataacggcattatatttttttttgtcaactagacgataaaccgataaaagaaataaaaattggtatttattattataatcatcaaaacttcatatattgacataaaacaacaaatttaaataagagtatatagagaaataataatatcggaaagtataacatttaataaaaagaaaagttgaagttttgttagtaagaaaatagtagtaatgacaattgaaaagaatctcataatcattgaaaatttattgaattctttgatttagaatagggatgtggtaatattcaatgtttaatatttatgtgttttcttttaataatcaatatttatttcatgattttatatagatttcctcattagcaaatataatataaaataaaatggaaacgacgaaccttaataagaaaaagttcaagtatatacagaaataacaataccggaaaaatataacatttaatagacaaataaaattaaagttttgttagtaaaatattagaaatgacaatagaaaaaatatcataatcatttaaaaactgtttaattctatgatttaaaataaggatgtggtaaatatattcaaagtttagaaagagaaacatagaaaacataaactaaaccattgattatatttgatttgctgggctaactgttttatcttaatattttactgttgataagattccttatgatgagattatctttgatttttcaaaaaaactataaatactgaacaagcagcataaacattgcacgacgaccttatataaatcatgttcatataaaaaaaatcacaagttgaaaaaaagaaatctggtctctttggtttgcatctattagattcgttcagagacagcaattcataatgggcctaattaatgggcttcttcgtagataagtgttttcgcgggaagcaacgggttaataggcgcgggaggtatacgtggctttggtacacgtaggattgcgcgccaaagacctaaataaatctaaacccttcttcttcttccgtcgtcttcatcgtcttcatctatctcctccactatctcctctctgcatctgacactctatagacattgttgataaaaatg

SEQ ID NO: 25124 - DNA, 3003 bp, Unknown; identical to SEQ ID NO: 25123
  misc_feature (1)..( 3003): 2750-1469P.txt file - cDNA_ID_2703136; gDNA_ID_2214631; Annot_ID_187969

SEQ ID NO: 25125 - DNA, 3000 bp, Unknown; identical to SEQ ID NO: 13493
  misc_feature (1)..( 3000): 2750-1469P.txt file - cDNA_ID_2703140; gDNA_ID_2214631; Annot_ID_136056

SEQ ID NO: 25126 - DNA, 3000 bp, Unknown
  misc_feature (1)..( 3000): 2750-1469P.txt file - cDNA_ID_2703160; gDNA_ID_2214631; Annot_ID_136048
atatatatatttatttaaagttaaaatagttctcttggtcaaatcttgtgtacgggctctatttttccttagacctggacccttccttagtcttcattttgggatattttgatcagtgaaaatgtcccaaatatatcacttttgttgcatgttgttacatataatatttgataaatgcaattatcagaactaccttatacgagggttagccaatgctactgcctactggacacataactagtaagattctgatagagcatgagaggaggtaaaagattttgttggttaagttgtgtttcaggtttggttagacttagaccaaacttaatttcaaattatcattatgcatgttgttaataaataaaaaaaactacagaaaataaaaatgtcattaatgtattaaaattaacatttcaacctttcatgattatttagcaatttgttaagtgatgaaaatgtttactttgttattcttatacagatttcaaaatttagttgagacattttattttagggatagctagttggatctgattgaagaagataagtaacacctttttaaatattaactagtgaaatgtttaaggcttctttacttttgacatgcatgtataatcaataatgcaaatcagccgacccttggaaaattacaaaaagaagcgacaaagttagtagttgaatggacccacaaatatctagatttcgttaggtcacgatccatttgaatttatcaattatcaaacaaaacacttgcattaaaaacatgggaactccacaattatattggagtagtgttgtaagagaagataaccctcgttgtattagaaaatgaaaccccaaaaagaaaacggaaagagaaaaaaaaaattgtgaaaaagggcaagatcttggtaatgatggaattagatatcgacgatcttcgttttgttttagtctattctttttaaaacgttgtaatcttggtctaaatacgtttaatttgaaacagtatacaaaagttgcttttgacagagacaaacgaatagtttaactcaaaagtaaatgttgtaatggtgagtgaaggtgtgcaattgaaagaagccaagaaccatatcactaaatatcaattgacgacaatttcatacattttacgatctcatggttgtaattatcttacgtaatgacatataccgtaagaaagacatttctgttttttttttacggtatgacactatgaataattgacgtgtttcaaaataatctggttgtctattttattttaattactaactcaccggtaatttaataaatttaaatttgtatttacaaagtaaaattataaatactctttcgaaattaaagattcatatgaccaaaacaattcagatgtagtatcaagtcatatttaacattaaaagaaagcgggaaaacaatgaccaaaaagtggagtcatcaaatcatattctagctaataaatcatttcataaaaattttttgttaacaatatgacctctgattctctgaatcatattagaaaagaggaacccctttacgtacgtaccgtacctacttcgatgtctatgattttccctcttgacaccacaattgttttggctctacatacctattttttaattaatcgtaacggtattatatacattaagaaagaaaatagtgtaagtgtttaatatgcgcatagaaaaatatgaaacttttaatgtttcttattgacttataggtcacccaacaagcttgattgagattaaaagtttgattatttttggcccatgatttgatcggaattgagcactatgagcctctttctttgacatttttatgcatatataatttgaacctttctttcctctcataatgttttatattattttatttcctaatttcttattatttatattggagcattttttgcttaatatcttttttatataactccgtaatccgaggctccgagcgggagtccgggtaaactagaatggagcaagcttgtgaaatacaaacacaccatattaaacatttagactacatatcaaaaccagtcgtccaaaaaaaaaaaaaaaaaaaaaagactacatatcaaaaccaacttatccaataaagttgttccaaaaagaatatgaaacatatatgatagatatatttaatagtaattaagatttgtcataaccaatcaagtaaacggatcatggcttgtataccagtggttttcaataatagcttgtataacagtggttttcaataatagatttagatatcgggtcattaacttttgaagtgggtacacaggtcgaccatatgtcgatctttcatatgaatcatgtgactcatatgcttagtgaaactagcgtccctagaacatgataattcagggcaataattgcataagtagagtgatgtttgcgttttgcttctcatcacacactcgtttccctggttgcgtgttgcatctcaaaaatattgcaaatatcccgaaatagaaagttttggaccctatctggtgatatataaagagaatccttttggcctgagtcgaactgattaaccgttaaatattttactactgaatggcacctgaattataggcaatctttacacaacaggagttacaggacatcgaggctccagtggtattcgtcgacctcatcaaaacagattaaaatacattagaaaaaagttttttttttaatgaatctaaaaaaaaagttcaaaggaaaaaggttaaaaactttggactgtgtagatcaaaattagtatgagaaaatttcaacttggagttgtcccacggttgcattgtgattatataataataatatgtgtgtatatataataacacactaaacgtcgacatcgcatacttccttcaagcatttggcttctttagctctcataaacttcatacccattcaacacttgtccttctaatcattttactcaattgaagaccattttgtttttctttttctgagtgttttttttcttgagggggcaacggaaaaaagaatg

SEQ ID NO: 25127 - DNA, 3000 bp, Unknown; identical to SEQ ID NO: 25126
  misc_feature (1)..( 3000): 2750-1469P.txt file - cDNA_ID_2703160; gDNA_ID_2214631; Annot_ID_187959

SEQ ID NO: 25128 - DNA, 3000 bp, Unknown; identical to SEQ ID NO: 13514
  misc_feature (1)..( 3000): 2750-1469P.txt file - cDNA_ID_2703183; gDNA_ID_2214632; Annot_ID_136082

SEQ ID NO: 25129 - DNA, 3000 bp, Unknown; identical to SEQ ID NO: 13503
  misc_feature (1)..( 3000): 2750-1469P.txt file - cDNA_ID_2703187; gDNA_ID_2214632; Annot_ID_136071

SEQ ID NO: 25130 - DNA, 3000 bp, Unknown; identical to SEQ ID NO: 13503
  misc_feature (1)..( 3000): 2750-1469P.txt file - cDNA_ID_2703187; gDNA_ID_2214632; Annot_ID_187989

SEQ ID NO: 25131 - DNA, 3000 bp, Unknown; identical to SEQ ID NO: 13536
  misc_feature (1)..( 3000): 2750-1469P.txt file - cDNA_ID_2703272; gDNA_ID_2214635; Annot_ID_136116

SEQ ID NO: 25132 - DNA, 3000 bp, Unknown; identical to SEQ ID NO: 13536
  misc_feature (1)..( 3000): 2750-1469P.txt file - cDNA_ID_2703272; gDNA_ID_2214635; Annot_ID_188088

SEQ ID NO: 25133 - DNA, 3000 bp, Unknown
  misc_feature (1)..( 3000): 2750-1469P.txt file - cDNA_ID_2703286; gDNA_ID_2214635; Annot_ID_136117
ttgttttcttttaattattgaaatttatatatggataaagtagtgataaggtccataaggatatcagaagatacgaaaaagtgtttaggagaacataggtttaccaccaattttaaatcacgtgatcaaagttgtatcctattgactgtatcatattaaaacgtcatttattacctcctttacaaaaaaacaaatatttcttaatgaaattttgtggtgtattttgcgatgataaatttaaaatgtaaggtaaataaatattttgaattttactcacttatttataatataaataaataaacgtaaattaacataattttgcaaatttttagtattagtgaaaatttagttgatttttctttttgtattagttccctttttttaacggtttgtattagttcaaataccagcaatatttatgctctctattataaaagctcaacttacaactataaaataagaataggatttatgaatagatcataatagtattggtcttcatctttttaaaactatccacataaacaatagtaatgaatctcactagatagtagtagtgtatagtttgggtaaaatacattttagagtagattactgcatattggttttgtcgaggatgattttccggttcaacaaattctgttatatgcaagcataatcaaccacatcttctttatgaagagatcctctcccgttaaatcaccgtttacttcacacaaacacaatatatgtgtagtgtacagataatttattgaccataaattcaactatccaagcttcaaatttcgtaggaatatgacatagtaatcaagtggtggtgagaaaattactgagagacctacgaatcctagaaacataattttcgtaactcctaagtgaaaatcatcatcataaactcagactttgaaagtcaactttgaaatataattttcagaaaattatatccgtttgatgattacccccaaaatctctttggatgatcatcaagcaagacatcatcttctgaatctctgatgtaagattatggacctatgttcaatttctaatcattgtttctctatttttatatataaatcaaatgaattttggcgtgttgacattggacaatatagtttaggttagacttggggatgtagatcatccttcttcctgtccctcctaggatagcaagagaatcattagggataataccggaaaaaaatggacaattagccaacactaattttggagacttgaaccaattattattattattatatatttacaaggaaaaaactacataaactatcaagaaacattagcttgcagtaaaagaccataattccaatattgtgtcaaaaaatagattctaagacatgatgatatataaaaaaaaacttggagaagtgtcaattccacaaacaatagccaagccaacacggacaatcgttggtactatcgttgtacatgagaggctttgttaaaggaaagagaagtaagacgaacccaaccacaccgcctaagaacgctgcactcaccaaacctgagagaagaaccataaccatgtttagcttattcttttgcatttgcatttgttaacaaccttgaactttatgtcttaccttttccatttgcgtatagcacaggcaatcccatgtagttgcaaaatatatgagcaaacaaaggagcagcaagatgtcctgtaaaatttacacaatgcaggagacaatcatccattagaaaggcttttacatgtataagatatataaatgcctggaatgttaccggttctgatgaagagaaacgatgcatatgcaccaaaaatgactgtgtagccaagctgaagacctgatcaacggacaagtgaagctcaggactgatcaacaaacaatattattatgattatggatggcaaagacataccaacaataagtgaagcccggagatagctgcggttatgcctgatgtacatctctctaaaatggtttaagtgagctacacaaaacatataaaagtcagacaaatccagtaattttcttttcactcgagttgtaaactgttattcacagagagagagagagagagaaagaaacaaacccaagctaaagagaactgggcacagaaagatggcagtgttaatcctaaacccagcacacagaagcaaaggtatcatacatgatcggaaaaccagctcctcagttactggtgcctgcaaatcataagaaacgccagctctaacagattataacttgttcgatttagaacttacttatacaccaaactgatgcatatagtcctcagacaattagcaagcaatgccttatgcaatttcaataaagaattgacaagataagcacacagagatggcaaacatatgattaccacgataaaattgcgccaaacggaaacattagaagcacttgtcaataccgaagcagggattgtttggaaaaagcttctgatgtaattaaaggaactacatcctccgccattttccttccatgattccaggagagtaaacaacttcaacaccaaagacccagcataaacgagcgaggtcaatagaagaggatacaccactccttgccactgttccatatcacaaaacataaccattttaatatgaatagtgtacaataagctacgagtaaacaaattgagacaaagaacttaccagatgatctttccttatgccataaactccaagtatataagaggcctcccagctttttatctaacattactcaagcaaaaaaggaagacaagtttcagagattcctgtaactagcgttgaattgtaccaaacacaacatagtcaccaatatttgagtgttacattcttagagacaaattgtgtgaacctacaacaactagtaaaagctaattcaactctcaacaaagttacaaatacatcaaatttctttacttttagtttaactttcatcaaaacaccaaatgcatctagatttggacctaatttggttacagatcaacggagaatgaacttcaaatcgagaaatg

SEQ ID NO: 25134 - DNA, 3000 bp, Unknown; identical to SEQ ID NO: 13537
  misc_feature (1)..( 3000): 2750-1469P.txt file - cDNA_ID_2703289; gDNA_ID_2214635; Annot_ID_136118

SEQ ID NO: 25135 - DNA, 3003 bp, Unknown
  misc_feature (1)..( 3003): 2750-1469P.txt file - cDNA_ID_2703292; gDNA_ID_2214635; Annot_ID_136120
aaaaactcggtgaccatattcaaaactttcccacgttaattctctcttctttgttttgtttcagattcattacttttctccaaaaaactttcttcaagatctgttcttttaaataattatggcggaagaacatcgatgcgagacgcctgaaggtcaccgtctctgcgttaacaactgcggtttcttcggaagctcagcgacaatgaatctatgttcaaactgttacggcgatctctgtctcaaacaacaacaacaagcttccatgaaatcaaccgtcgaatcatctctctctccggtgatcgcacctgttctcgaaaactacgcggcggagttagagatcccgacgacgaagaagacagaggagaaaaaaccgattcaaattccgacggagcaaccgtctccgccgcaacggccgaatcgatgcaccgtatgtaggaaacgggtcgggttaaccgggtttatgtgtcggtgtgggacgactttttgtgggagtcataggtatccggaggttcatggttgtacgtttgatttcaaatcggcgggacgtgaagagatcgcgaaagctaatccgttggttattgcggcgaagcttcagaaaatatgaatcggagccgttgaccgatttctatctttaccctgagaaaatttcgattgtctcggtggatctcagccgttcattatgttattgtattacggacacgtgtcgcaagattaaggttgagatggtttcgtaactttttaattattttctttgtttatttccgaagaaattaaagtttttatgattgtgtggcttttgcttgtaaaaaaaaaaagggtttctctttgggaaaaagaaaagaaaatatatgaaattgtgtctcgcgttttggataatgttttataccgacagaaacagtacaaagacgttttgatcatttcaaaacgttagatcattgaagaaaatgaagctcatgtccttattgacgtttgtttgctgattttaattcttagatttgtgaggaaaatggaatataagttttaggtcagttgatttagacttttatctgaatcagtttacctaatcatctctaaagcatttagctaaggttgtttgttcttaatgctttatggtcaaatgtttgtaagctttttaggcataatataaggccggattcattttggtaaagacgaggatacaatagcttcgaatgtgtggccatgtttcgctaagcgatcatcaacttgatttgtcttttggtatgtgaaagaaaaggaggttccatcaaacatctttcagctcacttgaaaattatttgaaatgtctttcatacatttatgatctatcaatgaatacaaatgaactactatttttctcttcaaataattattctctttctgttgacattatgaaatttagaagttttcacaataatcaaaagtaatataaaacgtcgaaaatatatttatctttatatgaccacttgatgatgaagactcaaaccaacaaaaaactagtgtttgttttatttccgtggtcaaatgtaataatatatttctgtgtgtattaggtgatatttagaatttttgtataatttccaaaacaagaaaatacttcaaataaatttcatattaatcttatcaaaacatatctttcatattttatatgaccattattggatgaagaagagtcaaaccaaatatgaactagagtagtagagttcaatttttttttttgacaacaatgttttctttttctggtcaaataaataaaccttttttgttcatattaaggtgaaagaaaattagaaattatgaacaaatgttttaaaaataatataaatatctagatcatattgcatatatttcatttaccaatgttaaagatttgtgtatatatagaaaagaaatcttcaacaaaattaaactgctaagaaattattaaaaaaatgtaaaagaaggaaaaatatctaaaacatgaagccagagaaacgaaataggagtattaattaattaaagaaacaaactcaattaattaattcaatggaaaccgctaaattattaaccgttcgccataattaaaatttaagagacacacaccttaaacctcacctatatattttccatgcaaaaaaaaaaaagacaacaatttcaaccatcatgaacattactaaactcactccttggtttcttttctcgtgtctgattcttctatcaggtattattagtctataactttcattttcttcttcttgatctgtttaatgtatgtatcgtatatcaaattacagcaattaatttgtattaaatcagtttcatcgattaatttctttttccttttgatatacgtgctagactacataaaggtaaacagctcaatttctccatctagcgagcaaacacaagaagatggcttttttggtttcaaacctacaaagttgtttgtgttcggagactcgtatgcagacactggaaacacacctttcctgatcgttccctcgtggaggtttcccaatggaatcactttcccgggaatacctaccgggcggtttagtgatggtcgtgtttccactgattatctcggtacgtttgaactataatgttttgtttggtaatctgtcacaatatctgagtctgtaagatttataatattgtaaacagattgcaaagctcagtgaaaaactcttagattagatatgtcttagctgtacatttgcattgcatctcttatataatgaaacgcaagtcaataaattttgttcattataatttgttttaaatgttgaccatataagtatttagtttaacgttttcactctctcaaaatgcaagatatctctagtttaacgtaaatcggttgccaacagtaattataccctatatatagaaaacatatattatgcaataaatcttatagtttgacttatattgtaacatgtagcgaagtatattggagttagaacgccgatcacatacaaatgggggaaatacggacgaccgagactagctgtgaaaagaggaatg

SEQ ID NO: 25136 - DNA, 3003 bp, Unknown
  misc_feature (1)..( 3003): 2750-1469P.txt file - cDNA_ID_2703300; gDNA_ID_2214635; Annot_ID_136122
gatgacacactcacgaggaaccgtgaggttgaagttgaggcgatgctcagtaggagaaagcaactaaggacaacaacgacgaggacaacaacgacgaggacaacaccattgagcttgtcttcctctgcttcaaagatgaactggtctaaaaacgatgagcttgtcattctcggggttagttagtaaattctttgcagcttctctatattcttctttatcctcttctaactttttttactctattttgtgtgtgtgtgtaaaagggtattgtggactatgagaatgaaacgaaattgagctatagatctgactgggatgccttgtaccgttatatcaaagattgtgtagaagcaaagttttcgaagattcagctcatcaataaggtcaagaacatgaagagaaagtttacatacaatcaggggagatctaaccatggggaacaactttcttttactaatactgatgatgatgaaatcttcaaattgtcattgatcatatgggacaagaatgaatcagagtatgtttctaatgagaatatagaccaagctaaggtgagtgtctttgttctgtttttcaacaatctcttagactactaatgtgcaatgaattaatgatcttgttttcttgatttgcataaggatgttccttctggtgagccagagactaatgatgtgccttgtgaggagcaagacgatagggatgtgccttgtgaggagcaagagcgagcgaatatcgagattgataatggtgtgagagagaaattggaccaagccaaggtgagtgtgttagttctgttttttctaccaatctccttgttaccatcttaaaacatgatgtaaaaaattgtgttactaatgatgtgcaatgaattaatgatcttgttttcttgttttgaataaggatgttccttgtgtggagcaagagagtgaggatgtgccttgtgtggagcaagagcgggtgagtatagagattgataatggtgagaaagagaaattggaccaaaccatggtgagtgtgtttgttctgtttctaccgatcttcttattaccacctcaaaacatgatttattgatcttggtttcttgttttgagtaaggattgtgaggagcaagagaatacggatgtgctttgtgaggagaaaggcgataaggatgtaccttgtgaggagcaagagaataaggatgtgccttgtgaggagcaagagcgggtgagtatcgagattgataatggtgaggaagagatgagtagcgaagaagatggtgtggatgaggtaggtgttatggaggacacacttgattctgggatatcgtttcaaggtttaggtaaaaatggtgtgaaagacaagagtgaagaagatgatgtggttgagttgggtgttctccaggagatatttaaggaggatacattttttcaaagtttaggtagatatcaacaaaaattgctgcttcagaatttggaaaacgttggagttgaaagaagaaaagagctcatcaacgaatggaaggcattgtttgttgatgagcagcgattgtgtgtcaagaaactaactttcgccgcaaagcttgcaaacttaggagtttctccttgattcaatgaagaaaaatctctgcttttggaatgatctcatttttttttggttgtgtcatattgataagaaaaaacatgatgtatccacgatccgttcttgttctagagccaggtaactgaggtaagtaacagttagagctaaccatagcagattctcctttttttagtgttgtgtttgtttcgactcttccttttgggttgggcttcgataacgattgttcaggcccactaacattcttttcttattgtgcgtctgtctctttcgagaaaaagacacaagcacttaaagccaagattcgcattttgccacatgccactaatttcaccttgtgttagatattatttttgtactacacactcaacgaagaccatagatcaactcaaaatatttattacacaacaattatcggagaagagattgatgtgaaatgtaatgaagacgaaaagaaaataaaaaaagaaacgacgaatttggacgtaattttcagccaaaacatatgctttgggtcccacactttcacatttcaactttatcatcacaccgaaacactaaacaccaaaatccccgacaaatttaaagaaaatttttccattttttttttttactctatctctgtgagagattctcttcaagctcaggcctttaggctttaggtttcttttgggagtcttcttgagctctgtaatcactctctagaagcttattttgcctcctaatgttattaggtacgtctttgtatctgtacttgcttctgcatttttcgatatttgtttcttttgatgagatttggggactcttccttcagaaggatttgaagattttgacatcttccattaaaagttgaatctttacttaagctagtgttcttagcattctgtttatgttagcttcatgagatctgggatctcgaggctgctttttttttttgctttgatttcacatttaatgggttttgattacattttcattaggtgaagtgagttgaacttggcttgtggttttgatgaatttctttctattaaaagttttggtttccctaccaaaaaaatgtcttctttttgttaattaaagtctaaaagtagctaatctctatctgtacttgtgtagggttcatcatttgagtctataactataatgactttcactgttcatttcctttttaaatctcttgttgtttccctttccttactttgttcatcatttctccttccctttactcaatagacactgctcttcctttggattattgctctgtgagttatttaaaataagccataaggtctcttcttatgattgttgcagggtgttgtactggaattattaggatgaaccaaggaagatgagtctctcggtctttcaaaaaccaagtcttgtaatgaggagctgtccactgttgtaaagtaagtcattaagatg

SEQ ID NO: 25137 - DNA, 3003 bp, Unknown; identical to SEQ ID NO: 25136
  misc_feature (1)..( 3003): 2750-1469P.txt file - cDNA_ID_2703300; gDNA_ID_2214635; Annot_ID_188098

SEQ ID NO: 25138 - DNA, 3 bp, Unknown
  misc_feature (1)..( 3): 2750-1469P.txt file - cDNA_ID_2703300; gDNA_ID_1563948; Annot_ID_148567
aaa

SEQ ID NO: 25139 - DNA, 3003 bp, Unknown
  misc_feature (1)..( 3003): 2750-1469P.txt file - cDNA_ID_2703319; gDNA_ID_2214636; Annot_ID_136124
ccaaaaaaaaaaacccactattttggtttaatagacaaaatttagtctctgttgtttaattttgtttgatggaagtttatattggtccaaaatgagattcagttcaaattaaataaataaattatctatttaaccaaacttatttaaaagaatttatatgctctcaatctttttgtttgtaaagatttaaaagttaaaattttaaacaaataacaaaatggagcaacgacgaatctatcaacgtacgtacgttctcagacattacattgtacaattatttcgacaaaaaaaaaagcctcattgattatcatttatatattatatcatagagattcgtgccccttatctcgttttttttgcaagactaaacaagtaacaaattgcctagctgcctaaagaagtgaagataatactctttctaaaatcacaatattctcatagtaaaaaaaaacatatttatcatcatatcgtccaaatatttcagttttgttgtttgtttaacaatacaaattaacaatgatttaatttggagcacttgaatataatagtacaccgaccacaaccccacacaattcacaaacttgagaaagagagagaatatgcccaaactcaccaaacctaatcattttcataattaacgaaaaaaatagtttcggtaagatgatgatgtcttagttaacttttgcttactacttttttaatcattaaacaaaaaaaaatattaaaaatcgttttcacttgttcaatacatatttttaagttttatttataaggaaaaaaacttaatagcttattgcaccaaaactaatatggtccttatggatcagtttcatgtttttagttttttatgtaatgaaaatttgaattattttctaaaaatatgtgtacgatatggttcgatttaaatagaaaccatggttcaaaacgtcagattagtaacgttcataaaactgaacgacttaattatgtccacgtatacggttggtttctttcaacgtttttagatagttaatgctttgaaatcttagttagttatacaaaggtaaggtaaacggtccaaaaatgattgttctcaatcaagttttaaataagaaggagaaaaagtcaacaaggaaatgcaccaatcaataaagtgtcaccaaatatatgaggaattccgatgattagctagcgttttgaaaatacttcggctactagctatgtttttgagaagtacgtacatgtggttggtaaaagaatactggaacattgtcactagaacgttcgtgattgtacgcagtattcatgccagttgatgttgtgcaccatcaatgttcattatgtgaaccacccaaaaaggcaaaaacaatggatcatccacctaacaatccaccccaatctaggtagttctaaaatcacacgacttacatcaaaggaaaagtttcacatgtttatcaatcacaggtcacagtatgtttgaaagagatgatagaaaaaagatatcaaatttgtcccgtgttgataggaaagttggtttggtatcgtattataattttctctacacacacacgactcatgtttcatgtgttaaaaaaaaaaagcaatcgttttaatcccttccaatttatataaatctgcgggctctgtttttatataaagaaaattggatcagttgtatgaacttcgaactgtgcaaaaaacttcaaaatggttcaactattttgtcaaggcttgtaaaataaataaaaattagcacactgttaaaatttgtagtattatatttaaaaaaaaaaaagatcaaattaaacaaaagaaaaacgaaattatcacgtcttttatttattattattttaaataaataatatgacattttaaattttgtttggaaattaatcactttctggcagtacctctcagccgaattgtaaacctaaaccgcccaaaagggacagattgcatcgtggtggtaggacattcataaattattatttttccttaagtggagggccgtcacacaatactttttgcccaatagataattggcccacaaaataaaatgctaaaataaatatataatctttctgtatgattgtgaaaaaatgtgagattgtctcgaatgttaaaatttggtgccacaaacaatataaatatataatcacagaaaaattggtgccacaaacaagataacatcttataattttctcgtatacttggagagcgagttgaaagaattgcgattagaataaagcgtagtgatttggcattgaatatcatttatgctacataattctacttagcgataatataaaaaaatatcataacttatggttagcatgtaatgtcactatacgaatatcaaattcataaaactagccgtgacttatctacacagaattatttatgtttcgagaataaagacccaagagaaaacaacgacattataacaaaaaaacaacgacagattataagtaaggaagaaacaaatgactatagattagatatgaaatatttttagtaaccatctttagttataatttttgttttggagcttgctccgtatactcagttgagtatttttaccacacatatatcaagactaaattctaccactaatcaagtaaaaacctcttagcaaaatagttggagaaaaacaagaataaaatcgtattattttcctctagaactatcgatcattcgagagagagaatatgaaaaagggacaaaagctctatacatgtacaaacatgacaagtcattatccgccacgtagattggtcggttccgcttcgctggaattatagcgatgtacttgtttagcctgttttcaaaattatttaaatctctaaccgctccaatcaaataatttctccaccaaatattaataatatatcatccggtaaccggtcaccaaaatggcgccacctcagatataagtaagagcacatagtagaccagaaaaaatcatcaaatccatctcccactcttctagcatcttgaagcttaaatctcagccgtccgatcatg

SEQ ID NO: 25140 - DNA, 3003 bp, Unknown; identical to SEQ ID NO: 25139
  misc_feature (1)..( 3003): 2750-1469P.txt file - cDNA_ID_2703319; gDNA_ID_2214636; Annot_ID_188114

SEQ ID NO: 25141 - DNA, 3000 bp, Unknown
  misc_feature (1)..( 3000): 2750-1469P.txt file - cDNA_ID_2703326; gDNA_ID_2214636; Annot_ID_136130
gttctaaattaatctgtgtttggcttgttcatatgtgtcaccactttgctttaatcccttttctctaaatttttaattctctatttctcagctttcccacctaggttcagattaacttacgatgtcatctgatcctctaaaccgatattgtatatctctctgaaaccttaacagttcttattccatatttccatcttccacctgctatactatttaaataaacgataaatcatctaagaatatcttgttattatttctttattatatatcatttttctccattgccactgtgttgcatccaatcactctaattcatttcataatgactttttctctttcttttttgcactaaaaaaaagtctattcatttttttctctaaatgttagcttgctcgatgtcaattattttcaatatacattataaattttttgaaattttttattttcatgaattttctttccaatcaagaattatatcttttttctttttgtgaaagctttatatttgcacgttaaccctaattgtatgattgtacggtcatgagatgtcattttttgtttgtttgttgatgcttttatgattttatccatttattagaccactcagccaacttacgcacaactagatttatttccaaaatacgtacacccaacacttttacatgttttcaaaatttaattcgaggtttactcaatgcatgttgttaattaaatgaagactagctcatcattcaaaacttgtataaactttttcaatgatacaggtggttcggatttgtaggaattaggatcaatatcctcccatcttttagacatttgattagtgattagctccttcttaaatcatcgctatgaccatatgaaacgcaataatgttaatccagaagcattgaaaacttggatatgatagagaaacaaacgttagctctttggaaaatggaaagcatgtgtgcactaatcctcttccgttatcttactactttcccaaacttttttttcctttctattctatcatttttgtacctcttaaattattattgaaactaaataaaacaaatgaaatatggtagtagctagagtttcaagggtccatctcattcacgtatccgtgacatctagcaaatgcctagaaagtgtatgaaacgaccttattgcttttggtgaagacatatgtatatgtccatatctgaatttgtttcctttactgattgattggtcgaactcgaacttatccaaatacgatttccttttcattttttcagataactttgtacctacatgtatcatgcttataattcatgattgttttaaatctcatacatgcattttaagtagagattgtttaaacatcacttcagttatataacgaaactttagaaacatttaatttgcctaatttcacttaagtgtcctttcaaaagtagactgtatacatacactaagtaaaaaaacaagtaatgtaacaagtttgtttgcctaaaaagaaaaaggaaagaaagtgaaacaagttttgtgctcagctaattttgaagaatattttgttctacctggatttgtgagaactttatgattgactgtatgtaaaatatcgatccgcacatgcatgtgaatatgacttttgtgattgtgaaatgtggtgggactggggcgttgttgtgtgatataagtcataggaaagatacaatgaacaaaaatcaaagacaacctaattaaaacgaaaacctaatcaaatatgcaaaaaaaaaaaaagagaagtgcaaaaaaagatgtacgggggaagtccactcaataataggaaacatcttggaccactaaatttccaatcttactattcttatgaaacaaccttgtacctaactagtgacaattgaagtttcacacaaaatgaatcattgaaatttatcacatatctttcatgtaaacaagggtacacgtgaatcgttgaaacttcaaagtttatttcatacatttcacgtaagtaagtgttcacaagaataacactagagattagtgaactcaatctattagactattacttaccgccaacctccagtctcttcctacgttcaaacatttagttataatttgacgatgacgaaaatgaaacgaaacatctatcggcaacttttagctactgcaatgttttccaccactattacaagaacaacaatatcgtattattacgagtttgttttataactaaagatgtgtcgctttgtattttaaaccaagaggagttggtaatatatatctatctacctaggtgttcctttttttcgtcaaatgataatgacatttacaatattacactaataagaacgtaatttaaaaaatatatctgaatagtataggttttatatattaataccggcatgatgcactaaagctactctatcagaaaaatattcttgagcttgtagaatagtgaatttcagtttgtccccttgttggtacacaaattaataggattctccaaccttccactacgttaatatgcgaaaaatgtaacatagtcttttagactaaaacgaaaagttggttaatatttttcaaagaaaaagtaaaggagaaaatagtggaggtgtggattccacatcatcttcacacaaaaaaaatgcttcacaaaactctcgttgattagagaaataagtatagagatcaatttgtaagcctgtgttggcccaacttaaccttcaggcccataaaacatttcgatatgggcctaacgaagcatttagcgctttttcttgtttcctctaactccgattaaatctcgatcttttctcgtcgtaacatctccgattgcgatttatcctgcggctaattccaggacggcgccacaagtctctcgtctgctctctcttgctcaggtgattttgaatttcgatccgctcttttgttcctctccacacttgttttgttatattactcattgtatacgaatatatctgattcagagacgcttcggtaacgagaagtcctgatctgagagatacaatg

SEQ ID NO: 25142 - DNA, 3000 bp, Unknown; identical to SEQ ID NO: 25141
  misc_feature (1)..( 3000): 2750-1469P.txt file - cDNA_ID_2703326; gDNA_ID_2214636; Annot_ID_188124

SEQ ID NO: 25143 - DNA, 3003 bp, Unknown
  misc_feature (1)..( 3003): 2750-1469P.txt file - cDNA_ID_2703333; gDNA_ID_2214636; Annot_ID_136142
tctcgggagttatttcaatggctactgacactgagatgaggactagacctgttatagaagtcgcgtttaaggatctaactcttacattgaagggtaaacataagcatatattgagatctgtcaccggaaagatcatgccaggtcgtgtttctgcggtcatgggtccatcaggagctggaaaaactacatttctttctgccttggcaggaaaagcaactggatgtacgaggacgggtctaatccttataaatggtagaaatgactctataaactcgtataagaagatcactggatttgtgccacaagatgatgttgtgcatggcaatcttaccgtcgaagagaaccttcgatttagcgcaagatgcaggtaaatttattctcatatcatagaggagattgagagtccaattcttaaaaaaatacatttttattacatagtgtttatgcttcaaaaaaatgttgcatatcatttatttatatatgtttctttacatgcagattaagtgcttatatgtcaaaagcagacaaagttttgatcattgaaagagtgattgaaagcttaggattacaacatgtaagagactcgttggttggtacgatagaaaaaagaggaatctctggaggacaaagaaaacgtgtgaacgttggtgttgaaatggtcatggaaccttctctattgatattagatgaacccactacaggtttagatagtgcatcttcacaattacttcttagagcacttcgacgtgaagcacttgaaggtgttaacatttgtatggtcgtccatcaacccaggtatgttatctcctccatgaattatgttacaattttatgttaagaaatactttttgcttaataattggttttttcctcttattagttatacaatgtacaaaatgttcgatgacatgataatactagcaaaaggtggtcttaccgtgtaccatggatcagtcaaaaaaatagaagaatattttgctgatatcggaatcacggttcccgatcgtgtcaatcctcctgatcattatatagatattcttgaaggcattgtgaaaccagatggtgatataactatagaacaacttcctgtgagatggatgctgcacaatggttaccctgtgcctcacgatatgttgaaattttgtgatggacttccttcctcgtcaactggatcagctcaagaggattccactcataattcttttagtaatgatctatggcaagatgtgaaaactaatgtggagattacaaaagatcagttacaacacaattactcgaattctcatgacaattctaatcgagtaactcctaccgtaggtcgacaatatagatattttgttggaaggtatgatttttctagatttgatagatggaattttgtggttaatttcatatgtacattaaaactttagtctatctatttcagggttggaaaacaacggcttagagaagcaagactacaagcgttagatttcctaatattattagttgcgggagcttgtttaggaactcttgcgaaggtgaacgacgagacaatcgatacacttggctacacatacaccataatagctgtctgtaagtttcttacgtacacaaatattaatttacatttactagtattcgcgatttttggaacgttaactaagctcttttctgtatgtctttctttttttgtagctcttttgtgtaagatctcggcattgagatcattctctgtagataaattacaatattggagagaaagtgccgctggaattagcagtttggcacattttatggctaaagacacaatggaccatttaaacacaattatgaaacctttagtgtacttgtccatgttctacttcttcaacaacccgagatctagtttcgaagacaactacattgtactagtatgcttggtctactgtgtaacaggcatggcttacatttttgccatattgtacagtcctagcgccgcacaattggtttgtcctcactttctcataattcatatatgaaggaaccaaaattttcactaaccatatggtacctgaatttgctgttatgttcttgcagttgtcggtgttagtccccgttgttatgactcttatcgctaatcaagataaagaaagcatggtccttaagtatctcggaagcttttgctaccccaaatggactctcgaagcctttgtcctttccaatgctcaaaggtagaaagtttgaagatttaattcttctaacacataatcaaatcttaattcagaaaatttgattttggactcttttttttgggttaggtactctggagtgtgggtggtgactagatgcagttcattgtctcaaaacggatatgatcttagtgattggatattgtgtctcattgttctcgttctcatgggactaatatgccgattcatagcttatttctgcatggttacattccagaagaaataatctaataattacacatgattaaaaagcttacattttgtaaaattcttctatttttcatacgttaaatattaaatgagttatataagtagtttatagaattagagaagaagggattttagaattccaattttgtaatttttatttgtagataatggtgattattcatcatgctttttctttctttatatggtaaccggttttggtaagatagagtcatacagagaatgatatacaaagaaatcggtttattttcagttacgattctttggtttatatgatccggtttaattggttactaagatgatgtcggaaagagaatagggaagcggcgtaactaaaaaacacgacacgatgatgaattcggcgtttcgaaacgttcacatcactgcgtctcgtttgataaaccctaagcccttttcttcttcgattctccattttcttcctctctgttccggcgacgcttctcctcgccgttccaatcctctccggcatagaaactcggtgtctccttcatcttcctttcccttctgttcgacttcttccttttcttctttctacattcctatg

SEQ ID NO: 25144 - DNA, 3000 bp, Unknown
  misc_feature (1)..( 3000): 2750-1469P.txt file - cDNA_ID_2703356; gDNA_ID_2214636; Annot_ID_136125
tttcacattttctctcgggacaagaactcattactttggacgtactattcttcacggtggtgcaaaggtatacttgcttttatacatagcaatgtttccgtttttttcttttttcttttaaactttctcaaatgcctgtgcgttctttatttgatcaacagtatcgagcaactggcagaggttttgtggttcagcacataaagtttgccgataattacagactttattctagaagtcattttgttaaagcgtaagcccatttgttaatcagttacatatgccaaataacatttatcatgtggatgcttagtgaactgcttcttactaactttgcgcagttttgaagtagctctactgttgatcatttacattgcctatgggtatacggacgggggtgcctcttcgttcgttttgctaactatcagcagttggttccttgtaatatcctggttgtttgcaccctatatcttcaatccctctggatttgaatggcaaaagttagtactgtgcttgttacttggtcttcattccatttccgtattcaattgattttctctggtgacacagatggcactatgtcttaaattgtattggatcgtgacctgtaatctttcatgcttgatacaggactgtcgaggattttgaagactgggtcagttggcttatgtacaaaggtggagtgggagtaaagggagagctcagttgggagtcgtggtgggaggaagaacaggtctgtccaaaattttgtattttgatgtattaccgtattctgtattggctagtttttttactatttgtgttcctttacaggcgcatatccaaacattaagaggaaggatattggagactattttgagcctgagatttttcatgtttcaatatggcattgtgtacaagcttgatctcactcggaaaaacacttcacttgcggtaatgcttgctttttttccttctatcctcgtttaattcagttgagctattgcattccaatacattgctattattgcatgagtgtgcctgactgaatcctctcttttgtgttttgcagctctatggctactcgtgggttgttttggttgttattgtgttcttgtttaaggtgtgtactaagatgttcattagtgttttctccagattttgatttttttggtaacccatgacactaacattatcatgcctccttgttacttcagcttttctggtatagtcccagaaaatcaagcaacattctgctggcactgcgttttctacagggagtggcttcgatcacattcatcgccctcatcgttgtagccattgcaatgacagatctatcgattccagacatgtttgcatgtgtccttggttttatcccgaccggctgggctctactctctttagccatcacatggaaacaggtgcttagggtcctgggcttgtgggaaacagtccgtgagtttgggcgtatatatgatgctgcaatgggtatgctcatattttctccgatcgcccttctttcctggttccctttcatctccacgttccagtctcggctcctcttcaaccaagctttcagtcgcggacttgaaatctccattatccttgccggaaacagagctaatgttgagacctgatgaacgagagagagagagaagttagtgtggaagtagaagaagtattagacattttgtttgtagagtttgtagaacatcattggaagctcatagactcgaattttatatggttgtaatcttagttttgtttactctaagcttactgtttattgtcataggttgactatattttggtaacttgattttttttaaaatgagatttgttgattgtctgagatactttaatctttaagagactctttctagttcctgtaactatcaaattggaaattatattacactataggtagtggtcagcgggtgtctgtgatgactttattttgtgccaatgggtgtaatgttactaggcttagattggtacttgaagtcgtagcacgctgattatgtaatcattcattaaaccaaaatactgtgaatcataattttaggtaacagtcatcgtaattggtatatttttgtcgcaaggaaagatctgattgcttgcaaatacgtgatgacagataaacatcattgtctcagaaaaattaatatttcatgtggaatttagtagtgtgtggattcaagaagtaaaatttacccgtggtgacataagacttaaaaaagtagatttggaaaaagtaatttgaattaagaattaagaaacatctgagctcacagctcacatcgttctggtaataaaacacaaacagtgtagtgtggtcacgtaaatcgtgtaggacttgtcatttgcttatcactatcgcctaaagtcctcacttttaggagtagactagtaaacgcttctgactaaaatacaattaaattaagaaactgaggttcactaaaattccaaaatgaacaacaaaagctcactaatactcaaataaattcttaatcaaaagcattccgatatgattttcaattactaggatccaaaattgggacacaaaatttggattagatacactgcctacaagtagataattctcctgaatattcatcaatcaagaatattcatctaataactagtaaccaaccaaaaaaaaaagaaaaaaaaaactagtaaccaaccaccattgtttatttagacttgcttttaaaaaatttgttagttaaaaatataaaatggaattagacaattagtgggttctatgtacctctaaaacgagaaaaaataaatcagataccaaagagagaagattaataagatagttttgaggaagaaatcacaattagagcttaaagcataggaggaacaacacaaacatgggttcaagtacaacaacacgacgaatcacttaagctcaacacgacaacacctttgactctatctttctcatctccaaataaaaaccaaactaaaccatcacagaagctgaaaaagttcaaaactttaaggtacaagatg

SEQ ID NO: 25145 - DNA, 3000 bp, Unknown; identical to SEQ ID NO: 25144
  misc_feature (1)..( 3000): 2750-1469P.txt file - cDNA_ID_2703356; gDNA_ID_2214636; Annot_ID_188116

SEQ ID NO: 25146 - DNA, 3003 bp, Unknown
  misc_feature (1)..( 3003): 2750-1469P.txt file - cDNA_ID_2703360; gDNA_ID_2214637; Annot_ID_136157
atatccgtgattcacggtactaggttgtgacaaatcactgattctccaattactagggccttgtgggtctctatgtatcgactgaggcatgttcataaaggttgcggcagaatcttgatacaaatcggtttgaaccggtacggaaatctggttctgtaagataccaatcaaatcaaggttgttgggaattctgatgttctgatgctgctgctgagtccaagtgttgggaaaatcattcatttgctcaactctaaacttatctcttcggatttgttgaaaatctggttttatcatatccatctttatgtaccttttgatattctatcataagaaattaccaacaaattaaatatgcatgagttccatatatatagcaaattaattaataaacatctgtaaattggaagaggttttttttatgatcacagaaactacaaaagcgagttgtatgaatggaataatcgttagactgttcaaaaaaaatgaaattcttactaacatgaacttaaagatccaaaattaaaaccagtttacaagaacataaagattcatgcgacagggaccttttagctaacataatatatgcattaatttctatataaccaacaacaataacaacaaaagaacgacgacctttaattaaatttccaaatgaaaaactacaaaaaaaacagggaaaacacgaaatgagagatggacgaagtaaaaacacccagaaaataatactttttatataagaacaaaaccctaggaaacttcaagaacaacaaagagaagaagaacaagaaaacaaaaaataaggtgtgagaatataactagtattcggatttaaatttggtaatatatatcataatcgtcaagatttcaatttggaactataagtaccatgagcaaaacaaatactcgcgaggagaaacaaaatgaataaggtaagtggaagtgataaagacagatagatctcagaagaaaaaagggaacacaacacataccgatcggaaggtggccggaaaaatcgtcggagctccggtggtgagtttagatatgtatgtaaaccgaccgtgggagatagagagagagactgagagagactgagagagaataatgattgcgtaaagccgtaaaatctgtaatggtttttttcttgacgtattaaggtgggttttatcagtctttctattacacggtactgtacttactctcttaaaaatctattttgtcggtttttttccacgaaaattattttcttctttaaactgatacacatgtatcaatatccaaatgaaacacatttttatacaaattgaaacatgcaataaactacggaatatctaaaaaacaataaaattaacggccctaaaattaattttaactaaattctttaataaaataaaataaaatcataagtctataaagtattagttattttatggtagtttaatggttaataattgttttttcatatagaacataggaatgtggttaaatttcagaattttaatacacttttaacttaattatttgtttatatgaggcactttaagttttagaaaactataaacacatatgcaaaacatcaaaccaaattatgtttttgcatgtcttttgttgcatgctctatatatcctaactatttttgcttagtagtccactaaattgtttcgtttcaatcacaaccactcaagaaaataattacaatagattactaaaacaagttaacaacagtgttatttatttactctttttgtcgtaatgctttaaattacatgtctctttcttttcatcggacaactgttagtgtgtttttttgtacatcaggacaactgttagtttactcatgttttctacattgtacattttggcagtcaattttacggcacggtttccattaaagatatggacgtcatcttatggtaagctgcatcttttgaggaataatacatgtagacgtccctatttataatttttgtgttacgtaacttcccttttgttattaattaagtgtgtttatttggtcaattcactcaatcaaatcaaacccaacgccaaactgcaactatttatgtgattgacgcttcagagttgaaactgccacttttgtcagatttattatctcacttcccaacttttcttttccgtaactagtgaatttattcatgggaaactaatttaatgcatggtatatgatgcgtacaacaagcaatacttatatgaaaaaagatttagaaacaaattgtattggcttaactaaatcaattaatcatgtagcaattaggtgatttggagtctattctctgtttagaaaagtagtaactgttgtctttatgagagtttctgttttacttagcgggtaaatctactctaagctaggtgttttcatccacttaacatgtattttataatctcatggttttcacaagtcttaaattgtacttattagtttggtctaaatattactccctttgtttcattatattggatgttttagggattttattttgtttcagattataagatgttttacaagtttaaatttaaatttaatttgactatttgtgactatttatattttgcagttttcattatcattttttttaacaaaatctaaatactattttttatatacaaaatgacctaatatgtatccatttaccttaaacctcttatattttaaaacagagtgagtacattcagtaagagaatggataaaaacgaatttggaatacacaaactataaaagtttcttgagtactgtttctattattgggccataaacagtgagacaaacaggcccatagaagtaggtgaaaaaggcttattaagatcaacggttctctcgttacgaatgcaaagaatcttctggatcctttttctctcagctactctctccatttatctaataaaccctaacccctcctcccacactattcgtttacactaaccacttccttatccacaccaatccagaacgttcctcaaaaagctccctccttttctctcaaaatg

SEQ ID NO: 25147 - DNA, 3003 bp, Unknown
  misc_feature (1)..( 3003): 2750-1469P.txt file - cDNA_ID_2703372; gDNA_ID_2214637; Annot_ID_136145
ccaaaaagggaaataatttaaacaaaatatgattttattgacgttattttaattaagcttcagtcttaactcttaactcttaagtagtttcttaaatagtgtgtcaaaaaaaaaagtaagtttcttaatactgcttctaatttgcatgtcgtagtatcagaagttttttcaacaaaaaaatcattatgaagagagtttatatgaatatcgctaaccattatgtggaattgtggataatggataaattttgagaactaattggattcatgtgttgcctcacagtgagctgacgaccgttcgatcattgatatacatacacatatgatgaaaaaaagatgctaatttctcgttgctttttttttttggtcttttcaaaaaaggattgagacaaaaaaagaagagaaaaaatgatgaataattaggtacctttccgagaagcaaaaccctcgaaactctcatcaaatatcctaaccatacctttctttaaaatttggattttgcacaaatccatttacaaatttaattactttttcttttcgtaggtatatatttatttatacctttataaatatataactttataggaagaagtatcgtatagtactacttcctactcgctatacaataaataatacaatgcgaggttgtttgtttcttatcacaaagttgtaccctatgcaacaacattcatataatcatccttttcccgagcattttgactgatcaatgcttcagtgcttcttcattatcatacaacacgttccaaccaaacttgaatcatgtatttttcccaaatcccaagttacacctaaatgataccaaagattacaaatacaactaaacatactcctagttttttcttatggaaaaggaaaattaagaacactagttagatgcaaacaaataaaaggagaaamcaataaaaatatatatatatatatatgagtgtccgaatcgaacgaactgaataatgtggaataagtttgattcgggataggttttgttttctgaataatctgcaaaactgacaaaccgaaatcgaataaaccggtcggctcaaagtctcaggtttagatatagcccaaatatgattgcaaatcacttaaaagttatacggacaccactatttgatcaacataaaaccatgttctacaataaagatttaagaattttaaaaatgggttggattggcctgaaactggattggaaaaattggtatttcttcctttaactaaatggcacacgatcaatttctaatttctccaaaaataccatttcttttggtattactaggtactagcccatgaagataaaagaattcattttactttatttcattctagtatatttcttgaacaattctaatgcaatttcaatgtcttgactatactcttgatcctccaatcgaatccacaagattttctaccaaaaccgctttacgacttacacctcaatcgtaaccatccatgaacttaattcggccaaaatcgattattctatttggcacgttatgttatggactgttcatatacgtaccacgttccaaactcgtttgtatctaaaaaggaaaaattatctcacattagtgatttttttttacttgcatcaactctattactatatactaatatatattaccattaccattttgaacgcgttacatagacattatttagtcattagtcaaatccctttactatataatcccatttgaaatgtaagaattttgaatgttgacagatgcaaataaggattagcatacaaaattactttgtaacccttatttacgtgataaaaaagtttagcctatcgttccactattaaaaacatgaacatgtaaaagttgaattttctatcttttcttgtatcaactatcaagtaatttgcaagtacctaagtaaaagaaaacaaataaacacaacgatctttattactatatttaaaacaaataaaagatagacaactattaatttgtttatatgcatatcagtcctttgcaacgtagataaaagcggtattatgcaaataaacttttcttttgtcaattgtcgtcatcatgcaaataaattttcaaatatcactgtcattattcaaatttcaaaccctaataaaaaagcaaattaaaaaaatggtttcgtacgacaaagggcttaacgaaagatgataagaacaaacattaataccgtagcttttgtatttctaacatcagtaaaaataaaaaaatcagacctcgtaaccaatgaagctgccataaaacctgagatggtgtagttaaagagggaattatgatttgtgtcagctatcaatatcatcataattagctgaaattatatttattctttggagtttttatttatttatatttgaacatttattatacaaacaaattatatacaaatagtcgtaactcattttatttttctcttcttcttttgttattatttgtcaaaataaatagtcctttatattcgtaattcgtaaatcagtataaattaaagcagaagtgaaaacataagccaatagtggtaaaaactgttattctatctctattctggttctgcaaaaagcatatatcaatttataaaaaagtgaacagactaatactagtagagttaaaatagactgtagttaagttaagaaaatgtacgatcaacagcccacaccgccacagatgaaattacgtggaacgtggtaaaaaagccacgacggtaaaatagtaatttaattaactcttcgattttccttttaactctgaagagggcaaaatggtcaatgataatttcgtttatttagtcataaaaaaaccgggaatgcaaagagatgagggcaaaatagtcaaattaaaaaaccgacgatcttttagattccttttaaaacctagacgtcccactctcacacaatacacacaagtaaccagttttctctctcattttctcagtttttctctctctccgtttttgaaaagatttttgtttctactttgggaagctttccgctacaatg

SEQ ID NO: 25148 - DNA, 3003 bp, Unknown; identical to SEQ ID NO: 25147
  misc_feature (1)..( 3003): 2750-1469P.txt file - cDNA_ID_2703372; gDNA_ID_2214637; Annot_ID_188160

SEQ ID NO: 25149 - DNA, 3003 bp, Unknown
  misc_feature (1)..( 3003): 2750-1469P.txt file - cDNA_ID_2703379; gDNA_ID_2214637; Annot_ID_136147
ctaacttttaacttctctcaaggaattgaatataaactgatgcgtctattgtgaaaggttaagaatgttgatgaacgttttagttagtgagtttaataggttttgtttactgtgtaggctaccttgaggttggtacagctggataaagtggcagaaactctgtctcaccatgttatggagcatcatgaagtaatgggtaagtattcttgaattgagaagatcatatgcgtttggttttgtgagtattaatatttgcttttggccagtgaaggggatgaatttggtaagagaattggagaaagatttgaagattgcaaatgtcatctgcaaggtatgagtttcatattcttaacctaaattttacataaacaatacagtggttttattttctattttatctattactggtttgacttggttttggctgtttttgtgtgtttattgccagaatggaagacgaaatttgacttcttctatgaatgaggcttcaagagatcttattgtacacactcattccaaaaagaaacaagctcttctggtaggcttctcaatttatttcagacatctaggctccactgattgtttctttaatctgctttcttgaaatatttcatgtgttatagtttccttctgaaatcaccatcaatgtgctctagaactttgtgtacaaaattactctgtattatcatctatcagaaagtggccgagtatcttttttgttttaatctctaaagttacgaacaggatgtttctagcaagtagtttcttagatacaatctaagtgtaacctagcctaattttttgttttaattgctaaacatactgttgagattattattcctagcatgcctgtttgcttctctggataccatgtaataagagcgacatgaaagtttaatctttttacttgcaggatatgcttcctatactaactgacctccgccatgcaagagtaatgcagtcaaatcttgaagaccttgttgaagatggaaactattgcaaggttggtagtttaccatcgtctctgttgtatacttccatggttttcttatatgaattatggtgatgttatgttatgaaactaacaagagatgggaatttattccttattatgcaggcatttcaagtcctatcagagtatttgcagctgcttgacagtctatctgagttctcagcagcccaagagatgacccgtggtgttgaggtagttatagcttattcatgaccaaccattgtcttcataattttctatcgtcagtcggttgagcttctcatactcttttcaaggtttggttaggaagaactcttcataagctggattcactgttgttgggcgtttgccaggaattcaaagaagatagttatgtaatggttagtaagccaactcattctcatgtatctctgtagctttctcctttgtaaactaaaaggattgaattgtgggccttcagtttagtggagaactagaaattttgttcagagatttaacttgtttatgtgctcatacctttaggtcctcgacgcttatgcactgatcggtgatgtctctggtctcgcagaaaagatacaaagtttctttatgcaagaagttatctcagaaacccactcagtgctaaagagcattgttggggaggtatgtgagctaaatatcatttgttgctcctgtaggatgtagtcgtgcatgcttggatggttgaatgtattgagcttgctggtgtatagcgcaatcgttgtttttcctatttttttggtgcaagccgcaatcctttttctgtgttgcttagatgtcacttttgatcctagcagatacacgaaagtagcaaattgaaacctgcacattagtacaagttttttttacacgttgtgatttatcttatttcattctgcatgcaatctttgtcataggcggtaatgcttttttacttcatcatactgagcacgaatgagcacgaaatgagtttattaacgtcagcatatcaaaccaatcagattgttgatctattctctgtatatatatttgcttttgtaggataacagtgctgccacccaatatagtaggtatgctctatgcacttgagttattactggtacctattacattatctagtatttatctctggtcccttttgtttggattctagtatccttgctgatttttttatttttttttaattaatttcagacttacctacagcgatctatgccttcaaacaccagaatccaagtttaggcaatgtcttttgagaacactagctgtgctttttcagttaatatattcataccatgagataatgagtttcacgccagaaaaggaggtaggttccattccttgctttagtttgtatttaacattttcttattaccttgatagggttgttgaaacagcctctggttctaatttcagtactacagtataatatttgttggtagatctcatagtcttaaacacctctgcagaccttttacttattgtctgagccaaactatacctaaaacttctctctaacactgtagttagaggaaatcttagcatatggttgtaaatttactgtgtgtttgtttagtttggtggtgtggaactctaagaagacctgctttattgatagggatctatctcgaaatttattacttgatttcctagttaacatacaattaagtggggtttaatatctaagcctctgtggcgggatttaccaggttaacttactctatgttaggtaattgattgtccaagaatttggataagttctttaattttagtttaatatttttgtcttattccctttcggcttgaaagataatgggtcctaaaatcttttctctttgatggcttcattgctctgtatcttatacattgtcagcatccttaagatttttttctgtatgttgtcaatgttaatttgtttaaattatctctaatgggttctaacttctaagggctaagcttctgaactggaacaggcagaaattttggtctcacccagtcttgcaacaactcaaatg

SEQ ID NO: 25150 - DNA, 3000 bp, Unknown; identical to SEQ ID NO: 13567
  misc_feature (1)..( 3000): 2750-1469P.txt file - cDNA_ID_2703390; gDNA_ID_2214637; Annot_ID_136154

SEQ ID NO: 25151 - DNA, 3000 bp, Unknown; identical to SEQ ID NO: 13567
  misc_feature (1)..( 3000): 2750-1469P.txt file - cDNA_ID_2703390; gDNA_ID_2214637; Annot_ID_188168

SEQ ID NO: 25152 - DNA, 3000 bp, Unknown; identical to SEQ ID NO: 13575
  misc_feature (1)..( 3000): 2750-1469P.txt file - cDNA_ID_2703394; gDNA_ID_2214637; Annot_ID_136155

SEQ ID NO: 25153 - DNA, 3003 bp, Unknown
  misc_feature (1)..( 3003): 2750-1469P.txt file - cDNA_ID_2703414; gDNA_ID_2214572; Annot_ID_135090
tggaaaaccgcatggtacctaaatcctacaacaatggattccttttccttaggtatgttttcgtatatgtatttatcaatcgaagatttgtatggtttaatgaaatatttatcgtgtttttgttatccaaaagaaagcaaaatccaatagtcccgaaaacccatgcaaccgtgtacataataatatatatatttaaaaatccatgtccaatctccaaaccattttaaaacaagagaaacaatagtttgaaaatatagaaaattgcgtgtgagtgtgtcataattcataaatgcaaagacaaatgtttgatctttgattgtaatttctgaaactcacggactttcctacctctttctgatcttcccgaccccatcaacacttttttgtatctctatcacacatataaaatcgtattttgattaataccattttccagccattttgcctctgtcctctcctacttactcttctctcttatgtttccagccatcactcacgagcccatttatgaactttaaccctaaaccagtgtatatctcctcccacttatatatccctcacattatcattccaaactctctcaaaaaaacaaaaataattacttcaaactaaaacccaatgttcaacacaagagttcatattgtcattatcactctaaaccttttattcttgtacgctggagggagactaataccactggagagtgttccaagctcgtcgatgatgcctttatcagtcgaagacacggtcaaattgaatccgaggaatcagatttttcatgggacacaagtaaagagttgtatgcctaaagggttccgaccaagatccgctccgagccggtttgtaaattatcagcctcttgtttccattaagtgttcctcatctaaagttacctcccggtccaagatatcgccttgattattttctcttctattttgagaatttaattatacaaataagactgatgtgttgattcttttggtgtctatatttatgaagacgtatgtaatgcaaaagtatgtgttattttctatgcttttttattcaaatttttagttttggataactcttctttattgcttttattcagggttgtttttgaccaatttctgactaaattcatggtcgaaaattggacagttttcttgtagtagaaaaacaagaaaatgttaagtttgttacctcaagttcctatgtagtgccgaatagatgataacgcagttatatagttcggattttatttttggttgaccaaaattttcggggttttggtacgtagatttttgaactacaaacaaaaacaggctaaatgaatcattttcccaccgccgagaaccaaactcctggtcttgagagactcttccttttgaagttacccactacaaaaatcaagctactagccttggataggtcgatatattcattttataggaaaaccaagaataccaaatgaagcattttcttatattttctgtctttgcatggtgaaacttgaaagaaagaaaaaaaaaagagagcagaagagtaaattgctaaatagagtggcaatggaggaggagtatcatggatcacgtgaacgatttcaaggaaaatgatcggaaagagggaaataattgcaaatttgtgtatgggccgttttacttcttcaagcccacttaaaacttgccaccaatttcaacaaaaccaaatagtgtttcccattcagatagtaaatagttactcaaataacgttaacatcgagaaaaaatgaaaaaaaatctgtaagccatttatcatacaaacaatatttttttcttattttaagtagctggtttcttcatgcttgattataaagataaccaaatatcactttctttttcttttcttttcaattaatatcattaaataaaaagaagaaaagctgatactaataccaaaaaagagcaagatatttcaaaattttgtattatatcgtttaaaatgtcagcaatttgtttgcataattaagaaaagcactaggccaaacctttgttcagatatctaaagcttaaacgaacaaaaaagcttaaagttgaagttagtattttttttctttaaattattttctatattgacattttttcacaagagtattgtgaaaataggcattgtttaaaatttctaatagaaataaaaacttttttacttcaactaagccccaaaataactttatatatccaaaggaaaaacttaactaaaaagaaaaaaatccaaaggaaaaatataatatctgcaaaaatgccatagtgccttcaaattttaagaaatcctattttcacaatactttctataaataattctttttatgcaaattaagtttatatttttatacaataatatgatttttttttcttaaaaggtaaaaaaaatggaattttgctcacttttatgtaattcgttaaagcatttggtttcagacaaaacaaaaaacaattcccaatccatttttttgtttctttatttgcggaacccaaagggtttggttagagagacgtcgtcacttgagagctctctcactcttgctaccaagaagagattctccagtctctgtgcgtctttctctgtggatcttacttcactcagatccaggtttgtctccttctctatcttgttctcatcataactcgaactgagtctcttctcctgcttagtcttcgtttagttgctgagaaaatctatgaacttgaagttactctgtttcagtgtctcaataatgcagaaactgaaaaaagttagggtttttatgatttatactaagttacttaattaggaatcacttctcactagtcactaaactgtaatttagtgagcttttggaaaaagtttagatttttaatagtgcttcactgattcctactatatatagtagtctcttcacttattggcctttttgttttggttgcattgattatggaatctaaacattttattgtaaaatttgtagtttctttggaacattttgtgttcttgaggtgtcaaaggatg

SEQ ID NO: 25154 - DNA, 3000 bp, Unknown; identical to SEQ ID NO: 13597
  misc_feature (1)..( 3000): 2750-1469P.txt file - cDNA_ID_2703430; gDNA_ID_2214638; Annot_ID_136190

SEQ ID NO: 25155 - DNA, 3000 bp, Unknown; identical to SEQ ID NO: 13597
  misc_feature (1)..( 3000): 2750-1469P.txt file - cDNA_ID_2703430; gDNA_ID_2214638; Annot_ID_188214

SEQ ID NO: 25156 - DNA, 3003 bp, Unknown
  misc_feature (1)..( 3003): 2750-1469P.txt file - cDNA_ID_2703442; gDNA_ID_2214638; Annot_ID_136164
tttagtcaatgctggaaccaacaaggcggcatcaagcggcacatctctgaacacaaaaatgcttgatgatgacactgagaaccttactcgtaagtcttatctttaatcatttggtttattaatggtgaattgatttccctagtgtctagaatatggtagtgtcaggctctgtatctaggctaatgtgttcatttcttgtttcaaagtgttcaacgtattggaaaactgttcttatatgagtagagtctgtctatctttctgcctgtgagtctttgatggttatagtgagaggaactttttattgattgatgtgtattggatgctgaagcttcatgttttgaattatgcaattgtgaattcagatgaacgtgtgcctactgagctaaagaaagccattatgcaagccaggacagacaagaagctaacccagtcccaacttgctcaagtatattatccttctctctatatgtcccttattattaccctattttgtaactcggttcatgacaaagtgtttgtttctttttgtgtagatcatcaatgagaagccacaagtgattcaagagtatgagtctggcaaagctatacccaaccagcaaatcctttctaagctggagagagcgcttggagctaagcttcgtggaaagaagtgagccaagttctactgatgtagcaagtaacaagaatcaatgctttcgtctaatgccgtaactttgccaagaagaatattttctgattgtaagaaagcaaaaccgtttgaatgtttgtttcgttgatggaatctctatctcataaactcatatcaatataataacttgggtcttttcatcacatagttgaactgcttattgttgatttatcatgaccttagagaaaaatacagaaatacaatttagaattcaggtacaggttcttcttcaacgggagcaagaacccattcaccatcttcgttcttgatcagtcctttgttcttctctacccaccaagatcctggcaccaaacactcagctttcaagaactcgcatgacttgttcactaatgcaatacttctcttaaccatcagtttaaactctcctttcttcccattccatccagctacaacatgtaacatcgcctgcacacatacatggaaaaaatatgtaaaagtttctactctgtatcgtttgagtcaaatttgaaagattcttctcacagattcttacctgaagattatgccaatcccctggattccttgaatcgcttaggaacggtgacttctttgtatcgatcacaaagtttattcctatgtccacataccctaaaagtccccctgggtatcgagttaagagatcaatcgtgttccttacatggaggatctttaagttcttgtgactcattacttcgtctctgaactccttgtttcctacctgtggacaaccaaagactatagcagtgaccggaacatcatcactggaaccgttctcagctatatcataggcggccagaacagcctctgtagctcccaagctatgtccagtcaacacaatgctcggtttctcgtccttatacttcaacagaagctccttgatcttggctaacaactgtgaccgtagactcagcttagtgaatttcgattcggggtgattagaagtatagattgtgagccacccgagcatcaccttacacccttcttcatcttcactgtcactatcaaaagtcgtaccttcaactacaccaccagaaccatcctgctcgggtccgtgcagcaaggggtcagctgaagttggcctagcacccaaaacattgacccactcatagttcctgctcgttcctctcaaagctatatagatctcacggcgtcctaaagccttagaccgttcatcagacgtgacagcaatgtagccaaaccagttagactcacggtcccaagaatctcttgattgtgattggagaagcaaaccttcggggagagaaacacgagctgtggcgtagaggaagtttacaacctcgtagtcggaagcgttttcgagcatgaccttgtcgaagaaagaagatttgccgtagcggctggctccacagtacttggagttttggtcgttgacgaaggcatcgtaggtggcttgacaaaagtcgccacaacgtaagatgagttccctaagtgattggtctaatgggtctaagatagtgtcccaattctttgagcctaagagttcttcccatgatgtggttgttgtagccattagagagaaatggtgtgtgtaaggagataataagtgactcttgactcttaagttgtttaactttatacaaatggttgtggactggtgatgatgctgtctgacccacttatgtccaaagcgataaaaggttatcactggtgtgggaatattattggcatatagaattatccacaaacttgcacatcattctcaaccatacaaaaaagagtaaaaataaacccaatcaaatagagagaagaaaattcaaccaaatcaatcgatacacacgaaaagagacttattgtttgtttgcaactaatcaaacgcgacgacaggcttgtcttcgtcgtccggaatggccatgacccaatcaccagcctcggtcttgagcatgcctttgtttttcgcgaccccaccaacacccatccttcaatagtgcaaatgatttgttaaccaatgttatgtttcagttaatcactttcatctccaatatatccccctttgataacattgcatcctagacccgttaactaatatatgatgggccataataaatcaaagataattcaaagcccaaaaagtgtaaaaaagcccaacaaagtgacgatcatacgacgaacgatatcaagttaagctatcatgttcgtcgtcggtgagatttcccggcgaagcgaaagcagtgtttctccggtggttcaggcatcagtctgatttcagacaacacatctcatagtaatttgattctaactggcgatttcactctagctcgaccaattgtatccaattctcgtagctgagagcaatg

SEQ ID NO: 25157 - DNA, 3003 bp, Unknown; identical to SEQ ID NO: 16500
  misc_feature (1)..( 3003): 2750-1469P.txt file - cDNA_ID_2703454; gDNA_ID_2214638; Annot_ID_136169

SEQ ID NO: 25158 - DNA, 3003 bp, Unknown
  misc_feature (1)..( 3003): 2750-1469P.txt file - cDNA_ID_2703461; gDNA_ID_2214638; Annot_ID_136172
tggactaattacgtgtggacccttttgctgcacaacacacattaacacacaagtaacaagtgcaatcaaattcaaatgtcagactcataaaagtcataatacaccattagaattgttgattaattacttgttctttccgttatacaattcaaattgttcataaataagaaatttttatatgatgcgtacactgtaaagtatatgatgtattcaaaatttattcttattattcatttatatatttacaacgtagataaaaatacatattactccaaggttcattttggctcttccaaggttcgaatatctttagatgcgtgtggactcaaagggagcgtaggaaaagagtggagccatcataaataaacaaatactaatatttagaagcaactcgttataattatttagcaattcttttcatatttaacatgtggtaagacatttccatcctatacctaaaagtgaccaacctctctgcaccttaatttgatatctctcaaccacgaaaccaacttacaaaataaaagagttgttggttagtcttacgtacatatacgattctctacttctctttcatatatgtaatctatcaacatgtaatagtgaaacacatatacagtcaatcaaggcgtccacaatataaagtatatctggagattagttttcttttggaattagttctttggttgtaagaaaataataattgtagcaaaccagattatcggggtcgggattcatcattttttatagggtaaaaaatcaatctagtggtttaatggttatttttaaattaaagtagccgtactatatatctcaaaacataaaaatcaagttgtttctcagtacaacaaatatacaatttaaacattattaagcctaaaattaaaacaataatatctaaaatacggaatacggtaaataaaggcatttgaattcataaaataaatggtggaaaaatcaggccaatcactgagaataaaattaaaaggttaagtcataagattcaaaagtttaaagtaatttgttactgagagttaaaatgataaaaattcaaaaattatacagtaacttctcgaaactaataatcccaacacccacaagtagttgaactcaagaaaaacactcaaactaaagtttttagaggagatagttttccatgagtttgatcagagtaacacattagttgtgcgatactcaaagaaaggaaggagtgaggatgagaagagccttccatagtctcttggtaaacagtaattttgtatttgaaacctttcagaatgatatattatcactcagcgaggctgaagaatacaaatataaatgtaactacttgctcatagttgaagataagtagaagttccaaaacacagaacccatggacatgaacgctactcgagcttgaagcgggactaccctgtaaatttcacctttcatcagacctcaatcctattatacataatcacacaatctataaagaccctctccaaatgacttaatgatagagaaagaaagccataccaaaagttaagtatgctaacgggaacccagaagcgaaatcctgcagtaatcccaagaacagtaaatatttgaacgatgctatgtaatagtaaaaaaattactctctgtaattggtagctcaccataaagaagcgtaggaagagcatctttctgatacttgtttccaagctcagagagctttcccagccacaagttgttccaagcaaatataacagcaatcacagatggaccaaggattacttggttaagcagaacctaacatgggatcagtataagcagtaaaaactatatcacaacgtgttccaagtacaaattaacaaaacacgcctagatttgtaccttaagcactagatttgtcgcagttggtttaggcaaagaatgatcaaggaattggtaccacgcataagaaccaggaccatacaagagaaacccgtaagaactcatccgcagcgcacgaatccagtcatgttctgagaaaatgttccacaattccccctaagtaaaacgatccaatcataaatccttagtctcaagccaagttccaccaatgtacgagaccattttgcaagagagtaaatatgagtcaccccaacaagaattcaaatcaaacataacctaaccaaagactgtcactactcactaaacaaccatactcaccaacatttttggttatgcaaagatccagtttcagtagaattctcactataccacactaggaacttgattcatgtaatatttcaaacaatcaaaacattcactaaaacctctaaaattcaaatctatgactcgaaaataaccaaaacttggtcagagacaaacctcgtcaagctcagaagatgattgtttaagagcggttctctttttccatctccctgatagctgagcaatcgtgtcaccggtgaaagtgagtgctccggccgtcacagcttgcttcaaaggaaaccgataaccgccggcgtctctgctcacatcgacggaatccgacgatccagaattacgtttcttacctctatcaccggaagacttcttctttctccgttgatcgaagccattccatccccagaaaccaccagcgccgccgcaaccacccaatgcgtccattaaaaatgcttccttttgcgtcgaaacagagaagagttttgcctaaatcttaaaaatcgcaaatgagtcctgtccatttgttttttccggtttggttcgattccaatttattggatcttgggttttcggaaacaggtcaaaagtcaaaccaattctgaaccgaacgaatgttatcaaactgaaaggatcaaaccaatttattggatcttgggttttaatcagtattatatctttttgaggtctctatatttatttcactgaatttcgatttattttgttcagtccatatgattcggtataagaattaatctatagtttgagttaatattcggttcatttattttgatttggttcggttttatgcttagtgtacataaaacgatg

SEQ ID NO: 25159 - DNA, 3000 bp, Unknown; identical to SEQ ID NO: 13586
  misc_feature (1)..( 3000): 2750-1469P.txt file - cDNA_ID_2703469; gDNA_ID_2214638; Annot_ID_136175

SEQ ID NO: 25160 - DNA, 3003 bp, Unknown
  misc_feature (1)..( 3003): 2750-1469P.txt file - cDNA_ID_2703484; gDNA_ID_2214638; Annot_ID_136183
tctatttagttcaagtgaacatataactcatatcgtggaccaaattagatttcatagttagttcacatgatggaccaaacttagatgttaaaattttgtacatatcttaaaaactcaacggccttgaaatatgatgaagttcaatttgttttaagtacatagccgagacaagtttgattcatcttgtagataaaatactagaaaacgttaacaaattgtatatttgcttatcttttgcttatactctacttatgttttacataatttttgtttgtttatatttggccgaccacaaaaaccaaatctaattatggcctttaccggaactaatttttgtattggtttttattttattttattttattaatttggattgtaaaatccagtaacaattttactatttcaacgtaagtaatgtagagaaaaatctcttgcaaaaagaatttacttgttcgaaagtaaactatataactgctgacaaagacaaaaaaaaataaaaaataataagagagtggcttgtaatatagaagaaatataagggtagagggatggcaaaaaaaaaagctaggtaattcaccaggagaaaattttacatttttactaaagtattttatatgtttgaaatctattttaacaggtttccgatggagatcttgtcatttgcttccccaaacataaccaaccagcttttgcccatcctcgtttaatacatctcaagatacaggtttgtttctttactttttaaattttgtttctttactttttaaattttgttgctcgattacttatgattcctagaatgactggaactagcaagaaaagtgaatggcgaacatcagaggcacacgtcagtaccgccaaatgtcctgaaggtacagtgccaatacaaaacataaccgttttggatcatcgagcaaaaccagaaagaggcaataacaatactagtttcatcccctaacatgaggtacataaactactagtttcatcccctaacatgaggtacataaactgttaaacatatatctatcattgtacttctctctttggtaatacgtatttctctctttggtaaaaatgaatgtacttctcgatttttagttttgaagaaattaaatgcattattaattggtaagtgtttttttcccaaccgttttgtcaatatattattttcctaatatttgtgatgatagagtgattattttttacatatatagagattatattgagatttgttttttttttaaacacatctctagatttgttttaggtccataatagacttcgataaaaaaaaatcacaatttaattttatgaaaatacaaaattctgcacgagttgtaatactagtatgatataaatcacataccaataaaacctcaacattgttttgttttgtaactgatcactttgacaaaatgcaaatccgttaatgaaaaatttatgtgacttttgacttaaactatttttcaattaaatttatcggataataaatgtgagaatgtcagaaatagttagaataagtaaatgtgatgaattttatttattcagtttacatgttaaaaagtcattcagaaaacagcaaaagtatttaaaataaagtaacaactccaagttttacatttctgatttgcatcataagtgtatttgtgactttttaagtccgtcctagaatttgttcttacaagttgatcataataatgcgagagatgaatctatgagaaataaagttgagtatcagactaaattttctcatcgaatgttcaatgttgcatccttgttgaccttgtccccaactatcatatactactactatatttcaaaataagttccgacatattaagaccaaaataatagtggtttttctaacatgtaattaaagcccatattttaaatgttgattagggcccataatgttatagtatatactaataattaattatttgattatttaaattattataaattttttgatatacattacatatgaccataggacatatagataaattcctgtaaatattaacatattagatgtcaaaatatttttccttgtagagtttaaaacaaattatcagtgtccatcaaaagctggtttaggttcgtgtcaacggttgggccgaaaaaataaacgaatttcaaaaattatagactctaattaagtaggattacttattttgattgtaatcactacataaataaaataattaaatatccattttttctctctctctttctcagtttttttttttttgggtaagcgtttgctcgttgtgtaatttcccggcaacggaagagaggaggaggaagagtgtaagcaataaattcctcttcttctacgaaacatttgctcttctcctctttctcttctcttctcttctcctttgcttctccgattctcttccttttttttagtttgatccgactactcaagctttttttctgttcatggtttcctccatcatcgcaggtactacttcacttcttcttcgatgaaatttctgctaatcggtttgatttttggttattattcatatgaaattttgtattccttatttgtttgactgctctatgattatcatgtagtttgattgtgactgttctggtttttttttactcaaaactgatcatggtttttaacgagaaaacaagttgatactctctttggttccgtggaattcactgatcatcgaatcggtttttgacctgtttcaaaggtttaagctttgatttgagtttattgctctgtctctgatgatgttttgtcgccacaagcagcaaaattttctattcatcgagttgaccaactcatggtcttgcttcgattttcttcttctcagttatgtttgttgatgtatggactactaggaaacacatgagtagcttgtgatcgagaactaatgatcttagcaagttactgttctgctttatgatgcaaaatcagaaatcaactagcaggtctttgatatttgattcatatctgcagttgcagaaggcaaaaagatg

SEQ ID NO: 25161 - DNA, 3003 bp, Unknown
  misc_feature (1)..( 3003): 2750-1469P.txt file - cDNA_ID_2703523; gDNA_ID_2214639; Annot_ID_136215
caatgacccagtaaccaagaaggtagtccggttcattgtccgggtcgggtttaaaaacattggacttcaaggtaaatctctaatagttctgatatatgtgacattaatggttctgatatatgtgacattcaattttgaagaagaaagtctctaaggtttgtgctttgacggaagagtatggagcttcaaaaaattaaccttctaatcggattagatctcaagatctaaaaattcaatagagatatggaagtttaagaaagcgcatgaagatctattaaagcatggtattgtggaaaagattataacaaaaagaactgaatcatttattctcagtagaaatcaaaagagatttggttgcttatttgagaatcgttaatttttccacatgattaccaggtcaagaaagaatcattcgactgttctctctttgccggcgaatattccaatccggcgatagacaaaacagagatgacgagttggacgcgtgtaaacaagtcaatgaaattcatttgtacggcaccacgtttagagatgacagagtgtgttgctttgcctaagagttttcttgttgggcttggttttcatttttaggccttgttataaataatggcccatgtttgttttggtttactagtgtccggtttttttggctctattaataataatctatgttgcatgggaactcttcccgtagtgcgtttctcgttttcgaaacgtttcggaaacgaaattagacgattaatattggtataatgggcgttcaatgtggaattaggcgaatttgttgattcgtgaattgattcactgcaaataagcatcaaaatcaatcgattttgaacacctaacatgacatatttgcctctttgtgcagctagtcttgttgtctcaggaatatatcatccacaaacattaaaaaacaagcgaatctctgaaataattgtaagtcatgtccaagtatttgaaagttttgtagatttttggtgtttttatactatagatcttctagtttgtttattgtattagttgttgctttctttagggttggtatataaatggtagagatatactctgtttgtggagagtgtgaacaaaatgataagttttagtgggttttcttgtagacacaaacaaaggtggatccctttgtgaggtagatgagaatatctcattcaagggcttagttgagagtgtcattgaagatttcagatttgatccggtgagcgacgaagtcgtcgggtttttcgaaggcaaagctgttggatttggaagaaatgagattagatattgtgtattttctatattttattttaattaatttttagaggattaaaatttttgtgtgctatttgtacaagttttaaaagaatgtgtcatttttgcaataataaacctttttagtgtcatttatgtcaatctcctatattttaacacttatagcgaattataaatttacaaattgttacaaataagtgaattatttttatggtggatataaatataaatagtagattatttttaaacttgtaaagtgatcaaaatactaaatagtaaagagacaaaagaggagaaaaatgttttattacttctcttgtaattgaaataatgaatgtcatttacaacgatcgaaatcgtttatgtagacgtaaaaaagttaattactatgcatacataatgacaatgaattctacataatttgcgtaacatttattatatatatatatgtacatatatttttgacgttgcgagaagtcacatttattaaattttgtaaaataaataatttaatttcagtttcccttatcaaatactgttctcgtatttaataaagtttaaataactttttacaaactgttcagacctggtgaatatagtgtcttctccaaccgaatggacgactttctcagagtatttggaggaattacggaacaataagaaagaattcacaagtttttcttcatctttaatttttggtagtgtaaatattatagcggattctttgacaagaaaaatccgtatcgaaccgcatcatattacctatgtaaacaacatttcttaggaatgactcttttaagctaaattattagcggtcgacaacaaaaataaaagaaatttaaataactttattatttaaacttttactttaccctttaaaaccaagttaacataataataagtatgaaattagcataaaacaatatccctaacagaattagcaaaatccaatcattaaatggactatatatggaaacctgcctctacagttgttcttgagatcaaaaacatcctctgttgtcacctcgatctcttatcaagagctcaacagatcatccgcccatgtccatctctccttgtcacttggtttggcgtttttcagtagaagattcagttggtttctcttctggacctggagccttgtttcggtttttggcattttgccatctatttggacatgcggcctaatttcggtttttattgtgtatttgggcctgtaactttatttaaacgttttgtcatgtatattgatttaatattattggaaatttaaaattaaataaaaaaatggactatatacttaaataaaaaaaaaaaattcttttttatttttactgtaaatcctgaacaaaaaaaaagaaaagtaaatctgcaataaatggctcagttaacaattttgactcagttagagatcctctctctcccgtatctattacagaacctgttaaactgagagactgtttaaagaagatttacataaatctaaactccacgtggcacgtatctatccgaatcagtattaatcccatcgaagaagaaaacaattcttcatacaaaaaaaactctcttctcaagtctctccttcttctccgtccttcccaattcttccgttcaaacaaatttctccaaacccaaaccctaatttcctccgtctgtgaaatcaagggttttctctgatctgggttttgatcagaaatcagatctaggtttaattttcgaaatcaaattatg

SEQ ID NO: 25162 - DNA, 3000 bp, Unknown; identical to SEQ ID NO: 13620
  misc_feature (1)..( 3000): 2750-1469P.txt file - cDNA_ID_2703554; gDNA_ID_2214640; Annot_ID_136223

SEQ ID NO: 25163 - DNA, 3003 bp, Unknown
  misc_feature (1)..( 3003): 2750-1469P.txt file - cDNA_ID_2703558; gDNA_ID_2214640; Annot_ID_136218
tgaagacggatgtggtgatactccctgcaaatttaacaatacttttgaaatttttacaaatctatcgacttattaaatcaataaactcaatctaaatccaattcccattaacatttcttctaaatatgattatggatatcattatagaattacctgtcataaatgtggtagaagcattaccaaccttcgaaaagcgtacaggtggaagatatgattaaaccatcatgacaagcgtctggatttttagatctaggagttcttgaagacggatgtggtgatactccctgcaaatttaacaatacttttgaaatttttacaaatctatcgacttattaaatcaataaacttaatctaaatccaattcccattaacatctcttctaaatatgattatggatatcattatagaattacctgtcataaatgtggtagaagcattaccaaccttcgaaaagcgtacaggtggaagatatgattaaaccatcatgacaagcgtctggatttttagatctaggagttcttgaagacggatgtggtgatactccctacaaatttaacaagacttttgaaatttttacaaatctatcgacttattaaatcaatcaactcaatctaaatccaattcccattaagacctctaaatatgattgtagataccattgtagaattacctgtcataaatgtggtagaagcattaccgaacctttgaaaatgtaaaggtggaagatatgactaaaccatcatgacaagcgtctggatttttggaatctaggattttttgaacatatagtgtggtgattttttggggagaagagatcattgttgatgtatgttgcctgagttatggccgcgacgaaaaaatagactgaaatgtgtgaaaagatggtataaatatctttacctaggtttctaggttttgattactgggcatgtgaaatgggttttaataaatgggcttgggcttgtaaaattgtggaattaagctattgtaatcacgcatatgagttatctaattggataacttattagattgtaataatgagggaaaaaaaaagattattataatgagaggtccacatttaaaatgatgtgacactcttagcaaataaatataacatggcaaaatttagaagtgttgtcaaaaaacgataagcgtaaaatggaaattgtgactgaaccaccataagaagcgtctggatttttggagtccgagagatttagaaagtggagtgtggttgttttttttagagggggaatgttgttgtttatgccattagagtcatggtggcgtcgaagaacaataagtatatgtgggaatcagagatgtgtgtaagagaaacaaaaatttatttggttgggttttgaattttcaagaaaatgttaaattatttcatcgagtttctttttttttctctatgttaggaaatggtatggtcaaaatctattgatgatggtgatgcctaacattaacaaaaccaatagaagggagacaagagacataagacatcttcttgaaattcatcaacattacaaacttactaaaactcctcctcccaatcccaaatgaatatgtacttcttaaagccacgtgtctttctctttttcattaatatttatttatttttttaaaatgtgaaattatttctttggtttaatatctctggatcattcttctacaatgatcacaagtatttagatcatgtgtaaatagtcccatcatgaagttttaattaccaatcggtattgcacatcaccgattggtactgatccacctgcacttttgtcgatcttttgggacaacgaaaaagaaactaatttaatatattttgttatccgctcgaagatattaattataagctttaatttggaacttctttatatcaattatatatatatataacttctttgttaatagaaaatgggaacgatccaaaacttaagacatttgatctccacaaggccgtcgacgtacagagaagaagaatggccaaaaataagtaaataaaagagaagaaaccgaggggaagatgattttgcattgccacgacccacgagcatccatcggccatcgcctttttggattcacatggcaaagacaaacttcgatcttccttttttctcgtgaagttattatctctctaatttctagtctggtcgaacctatatttcatcatatatatcattatttaattcatatgctgatgcatgggacattatcatgttaagtcattacaaaaaaataaaaataaaaataacttacgttggactctcagtttaccttctcctatggatttcacttccttgtataagaatatacatcttactcaaatcatgatttatatgcaattttcttttgtgagattttttttacatataaaccagaaatgttgaaagaagaatatccaaacacaacaaaataatagaagaaatctcacgtagaacatggaaatggaaaaagaagtgaactcgtgaaccgatatatttaccaaaagtgcacacatagacaagtctttctcattaaagcccaatttcacactttcacattttcgtgacgtcttttgaagttttgaatacgaattaatgttcatgtacgctataaagacctaaaaggttgtcatatttctccactttcatcttctcttcacaactatcctaaaccttttttccttttcttcttcttcactctctttcttcccggcgtcactatggcggctgccgccgggtaaaggcagcgaactcgaccacatcaagaatgaatccgttgatctggtatatatatttacgtcttcttagttttctattatctatatgttttaaaaaatctttggccctactaattttaaattttctgttacataaaagatacatatatgtatagtacgtaactagtaactactttgatctaatcagttaatatatttgtcccatgcgatttactcatgtttccattagaaatgattagtcaaaattatataaatgatgggtctaggtacgaatacccatg

SEQ ID NO: 25164 - DNA, 3003 bp, Unknown; identical to SEQ ID NO: 25163
  misc_feature (1)..( 3003): 2750-1469P.txt file - cDNA_ID_2703558; gDNA_ID_2214640; Annot_ID_188285

SEQ ID NO: 25165 - DNA, 3003 bp, Unknown
  misc_feature (1)..( 3003): 2750-1469P.txt file - cDNA_ID_2703562; gDNA_ID_2214640; Annot_ID_136222
ttgaactataacaaaatcccaaatcataaattttaacttaagggtttcaagatttaaccaaaaccataacactcagattcgcagatgagacttgccaagaaaagtataaagatcaaattttcagatcaagaacatagtaaaagacaattatagatacattcatgagtcaaaccaaaccaaacccaaacttacttaataggaagagagtcttcaagagaagaactaaacgaatcaagtgttcctcgttggcacgaaacggcgtcgtcttcttcttcttcctcctcgttttcactgctttctccgatagacgacgaactatccgaagattcctccggcgacttattattattattactcatccttaatccaatcccgatctgtgatccaccacgtcctgattcatcagccaagaacagagccgtttgaacagccttatcctgcgccgaaacaccgcgatgatctctaacgtacgccgccatgccgattccaaacgacgaaccaaccataacctccatataaacttttccgattaagatctctttctctagcctgtgaatatacccgaaagactcagatgatcataaatcgccggcgatgtgcgtaggtgaagagctttaaccagcgcaggttaatgatataggaagagagatatacaaaagaaggtgaaatgcaaaacaacactgaacgagaaaaatggaataaattctcatttacatttataacgacaatatcgtataaaaatacgattacgtattgaatacgaatatttatacgtatttatgagtctggaaacacatgttcctaaatatagaatagtcctaggcacgctaacggcgactttgacggtatagacacggtcttgctgacgtggagagttttcattggtttaagtttggacttttgccggacgtttcgggttactgtctccgtttaatccgatgtatgtcgttgtaccgaaagttcggtggtcactatcacaccatatctcaaccttatccatttatattttgattttgtttctttaaatgttttaagatgttttagaaatatgtggaaaaagggaaaaaaatcttgattagttatatcaattcaattggatggataatatttggtatgcaaaattaagatgctgatttttttctgttaataagtcaaaagattacaaaaatattcgtgtatgatttactttatgtttttaaatggaaattaatatatttaaaaatatataattagtactatctgaatgattagtttagtacaagtggacaaattaaaccttatctcgtttacttttagtacaattaaaaccaatatcgttaatgatacaaaaaaatctatattataatgaaaatttgctaatgctggattagtgcggaagcaagaactttgactcgttcaaaatgcgaatattggtttattttatactttaattagcaaattactttgctgagtcatgaatgtttaaaatgtaaaatgaatccaaaatcatctattttacaatatcatatacatgagatcaaattattgtatgatccaatcctaagattttaaatgttggtttttatacagttcaaagcaattaggttttgttataatcatgagttgatatagatcaaataacataatatatggagggatatcattagaccaattagataaatctaaccttatctctttaactgataatcttgtttatgaaatgtggctaacttaagtctattaattgtgtctaaagggtatcttcctgtttagctttacctctggcattttattttagaaaattcaatggtggactatgaaacattttttaagatattacttttttgtcatcctgttattaaattaattatcaaaatctgttaagctcttaatgttaatgtatttcctcttgtttataattacgttgttagactttagatcttgacgatgatactgaaaagaattggtagtttgacttgtataaatcgaatatgtgaactagctgtgttgttgtttgctagtgacttgatgaatgattgccgcatttttttttaattgaacatgttagttgtgtgtatacttgtgtcgtgtgtatatttgtccgcatttatataatcgagttgatagacacaaaattacttccaacactcgtataacctatatagccagtttaaacttttgagtcttaagtatataagtttcaacccatcaaataaatagatgggttatattctcccataagaaatctcgaacccaaatttatttgagttgggttgagtcaaccagttcaattaatctaatggataacattttgcatgtatttatggccccataatatagaaatagatctggaagcccaagcccaaccttctcccacttatactcagagccgacatttggtgtcggcaacgccaatatattattggagaagttgaaggaagactcatgttgtgtggcttcagagagtgatgccaaaaatacgagaactagacagacccgtgagtgatatcaattgttttactcttcgacacagacaaatgggaaacacgcttaccatcatatattcatataccttttactcaaatgaaatgtgaaacctgatctccaagactccatttttcagcaacttctggggccaagtttttgtatcagacgcatcccaatatgataagtttcacttcccaagtatttggtcttttctagcatatatattggatttatctaaagaaaactatacactaaaaatggttagcaaaaaataacactttgctttaagtattaacttaggtcctcttttaaaaccttgcttaggtaaccatattctctattcagtcgttaaaatctttattaatactataacccggcttttgtttttatttttcagcaaaaaaaaacacaaacacacacacacatttaatcagaaatccagcaaggtccaacaagaagaaaaaacacaatcaaaattccttataaattaatcaaaacactagctagacagtagacacaatacaaatcaaactaatg

SEQ ID NO: 25166 - DNA, 3000 bp, Unknown; identical to SEQ ID NO: 13624
  misc_feature (1)..( 3000): 2750-1469P.txt file - cDNA_ID_2703576; gDNA_ID_2214640; Annot_ID_136230

SEQ ID NO: 25167 - DNA, 3000 bp, Unknown; identical to SEQ ID NO: 13623
  misc_feature (1)..( 3000): 2750-1469P.txt file - cDNA_ID_2703588; gDNA_ID_2214640; Annot_ID_136231

SEQ ID NO: 25168 - DNA, 3003 bp, Unknown
  misc_feature (1)..( 3003): 2750-1469P.txt file - cDNA_ID_2703637; gDNA_ID_2214641; Annot_ID_136251
ccaaattttatgtggacttgtagattagaaaaaaataaatttgaaagtcattgaaaattgttgaaaaatgtatttataaatttaaacaaataataatgcaacaataaatgataaacaaagaaaataataaaacaacaattaatgattgagaaagacactaaaacccccactaatcatatacatataggtaaaagaaacaaaatcaagaagagtgtttatggttaaacaaagcaaaaatgatcaaataaaaacaagattatgatgttgttgttgtaaaacggcatagtcaagtcacaagcgcaccaccagacggtgccgcaacaacaacaacaacaacacctacaccgcataagttacattacaacacaccctgtctttaaaaactctttcctttttaataataaatctttctttaaataccatctctcttcttcctcctctgcttctcttcatcttctaagaaagaaacaaagaaagacttcacattttaccattatttgctctgagctcaggtcagcttttctctcttcccctctctcctctctcttctactttatggtacagttgaattaacaatgccattgaactactacttccatgaatgtatcttctttacacttgttgtcttaagtttctatttttgtctgatccagatctagtttcttctcttgtgtcttgtgaacactttagcttcttactgtctttatgtttgttgttgttgtgtcggtttgtttttcatttttccagtaatgttgaagaaacaagttcaagatctgacttaactaacttacactagttttagtttgctagtagctatataattctttgatcctgttaaagaactcaaagatcattcgttcttgaaaacagatccggatctgagatagggttcttgataaagattcgatatttgaatcctgatttggtttcttgtaatgcagtaggagagttcaagaaacaatggcaaagatgcaattatcaatctttatcgctgtcgttgcgcttatcgtctgctctgcatctgctaaaaccgcaagccctccagctccagtgctgccaccgacaccagctccagcaccagccccggaaaatgtgaatctcaccgagcttttaagtgtagctggtccgttccacacattcctcgactaccttctctcgactggagtcattgagactttccaaaaccaagctaacaacactgaggaaggcatcacaatctttgtccctaaagatgatgctttcaaagctcagaagaatcctcctttgtcaaatctcacaaaggatcagcttaagcagcttgttctcttccatgctctgcctcattactattcgctttcggaattcaagaacttgagccaatctggtccagtgagcacctttgctggtggtcaatactccttgaaattcactgatgtttctggcacggttaggattgattctttatggaccaggactaaagtcagcagcagtgttttctccactgaccctgttgcggtttaccaagtgaaccgcgtgcttctacccgaagcaatctttggtactgatgtccctccaatgcctgctccagctcctgctcctatcgttagtgctccttcggattctccttcagttgctgattctgaaggagcttcttcaccaaagtcctcacacaagaactccggacaaaagctgctacttgcaccaatctccatggttatttccggtttggtggcattgttcttgtgatcagatggttttgcagattgagttatgtttttaagttacaatgtgaaagattgtattacatcatttgaattgtctttttgatttttgaaacccattttttattatacatttttatcattattattgtttgtcattacgattgttgtgaattgaaattgttcctccattttgcttttctttagttaattttgcttcatttgcaagttaagatgataccaagaggtttaaagttcattctctttgatataatctgaagataagtcaataaatggcttgggatttgttcaatctggataaataatatgcagaatttgtttcactagtctgattacggcagtaactaggcctcggcataatacccgaaccctaaattttcaaatacccaaatgggtttaaatttcaaaatccgaaaaacccgaataggtaaccaaacatatctcaagtataagtatatattagttatatttatactaatatatataaaatattagaatttttcagatattttagttatttttgtgtatttttagatatattcaagcaaaactactcgtgttgttttgggaatttttgaaaatttcaagtaatttaataaatttgcacagaaaattttgatatttgaatatataaataagtctgaacctgaactcaaaccgaacccgatccaaaatcttaaattacccgaacgggtcttaaacttctaaatccaaaaaatccgaacccgaaatatttgacctaaatacccaaacgcccaggactagcagtaacgagccttaacccgttttgagtaaagctttttttttttatctctatggttacaacgccattacgagacgcccttggattcataattatgggagtagaaccatcaactatccacaaaacaatgaaatttcctactccatggagaataaaagagatcaaaagagagtaggagtataaacattcatgtaaccaaattgtgttgaaaggcaaatggcaaccattataacatttctaaagtcaatagatatttaaagagatgttattattatgtagattatcattctcactcttgtgaattgagatagttcctccattttgcttttctttaattgatattggttcacatccaagctaatgtaacccatctcataacagatttataatttcgtgtataatataatctccaaatcactaattatgacctcacattttaggataatgttttttttttaaatgcttatggtcaagaaagaagataacgattcaagccacacgaaacagaagaagacaatg

SEQ ID NO: 25169 - DNA, 3003 bp, Unknown
  misc_feature (1)..( 3003): 2750-1469P.txt file - cDNA_ID_2703670; gDNA_ID_2214641; Annot_ID_136238
tctctgtttcaattaaaaagaaaaaaaatccaaacgataatcattgtgataaatcacaagatgatatcatcttgaacactaacattaagagtcttattctggagaacaatgcttcctatgactgctacttcatcttccacagttacagcctcacctgcagaaacaaattaatcagaaaaaatataacgaaaaatttgttgaacaaaaagaaaacaatgaagttaccaagaatggtaatcccaagcctgtcattgtaatctccactagcttgaactcttgaccatctacctatagaagatttccatccgataattgagtttataacaacagcattctcctgcatttaacaagagtagagaacattaaacaacgaatcttttggattcataacaagaagaacattctaaaacactgattccaaattaccttgatttcaacatcgtctaagattatgcagctaataagccttacaccaggtccaacacgaacatttgctgatatcgacacatttggaccgatcttgttccaaagaaatttaagtgtgtcatttcatttgcaaactgaatgagaagtttagctagaattcatgagatgaaacaaataaactcacctttgcggttggatgcagttttacggatgggtgaatataaacatcaccaattatagttggtttcctattagtaccatctcctgaagctaaaatatgaggcgatgtttcgcggaattgggaaagatataaagccgagcatttcaaagatttcctgtttaaagcaatttcttagcataaggagtaatccaagaacgtctgaaacaatgattaccaccaacttaccccggagtcttgatctgttcccagaaatccttgttctcatatgtgtatagttgcttctttccagcaagaggtgacaatatatcttgatctaatctcacaaaatctgcaggaacagaccttgtagcggattggtagttgctagctgccaagtttaaagagattatacaatgaataacttatgaaaagaccaaaagaatcatgaaaatgatgaagcaggtctctaattgataatattgcaagtctctgagagaggccaataatgaatactcacatgtgtctcttatttggctatatacttcttcaattgcattgaagatatctgaagtaaacacatagacaccacagtttatcaagtcactgacctgcattgagtagataatttaagctaaacaaatttcagagcctgtgaaggaattaagaaaacaggattgtttagcagataattacgaaagtctcgggcttctctgtataatgcaggagttctttagtatcaggatcagctatcaattcaccaaattggctagctgcttctgcagaaacctgaagtgaaaaagcgatattcatgtttatgtttgatctttatgtttgtttccttagtgacatctaaaataacatcaggataacgaaccttgattactagcatagttccaataccaccatatcttcgatgtgcgtctacgaaaagtagtgaagtacatcaaagtaagaaaatgaaaacgatgaagcagattagcgatttcaaagggagattaccaagtatgccttgaagagggaaagaacagcaaacatcacagttgaggaggaaaacatgtgactgttcaaagagacaagaaatggaagatcaatcaggaaaacaaatgactgatgaggcaggaactaaagttgggaatttcatcagaaatcaaaccggtttctcttccataattctatcacgaaagtaataaagagcaccagctgaaccatggggtttatcttctttcaagtatctatataacaagaacatcgttcaattctcgatttcacattacacaccaaaaaccaaaaacacaaatgctactacaacttaccgcactggaattttcagctcgttagatattgaagacacatacaaagcaaattctcgttcctcgtaaaatccaatcagaaaaatctgagccagatttgatatctgtccatgccaaatacaaaacaaatataatatgatcaatcatcattacaaagttgagaactttcccatcctttgagcctgaagaaactatgaaaagttcaaaactttgacactacaaatcatacaacaacaagaaaatattccaaagtgtagagtactaaaatggaacaaacccacataaagacaaacgatccatgtcaaatcaaaacaagttatgagcaatccacatttcaaagttgacaactttcacgactcaagcaataccaaacttttctcagggatcaaaagcaagaaatagtaaaaagaagaaacctttttacaagcagagataggatgatgaatcataggttgaccagccaaaggaatcaatggtttcggtgtattgaacgataacgggcgaaatcgagttcctaaaccaatccacattagcaaaaacccaaaaccaaaatcaaaaattcatgttttgaaaatagaatttgagatccaaaagagaatgttatacctttggtcggaccaccaaccatgatcacagcgacgactttctcctccgacatgtcgagattcaataaaacctagattcgttaaagttaaacacacgacgatgatctgattttgtattgaaaggtcgtatctttgtagtcggatattctcaagttttttgaactaaagttgaaaaacagagtaatcagaatggagcctaataaaacgtcttttttaattccgttttgtttttgcgtttgttagcgttttataattgcgtttgtgaatgaccaaactttatgaatcttcttctatagcttctctctctgaacttcatcaatgtaaatttcaatcttttcttcattaatgtgttccgtttgattttgtttcttcagtgaaatgaaattgagattggtttctgattttatcttcttgccagtgaaaccctagtaattgtgattttgctgggcaagaaattagggttttaggaggttttgttacttactcaagagtgaaaaagatg

SEQ ID NO: 25170 - DNA, 3000 bp, Unknown
  misc_feature (1)..( 3000): 2750-1469P.txt file - cDNA_ID_2703674; gDNA_ID_2214641; Annot_ID_136239
taaaatacaattgtagcttttttggaaactgcttttttaatatcttccttctgacccgtattaaaaaatttcgatcgctcttccactttgtacttggttacataatttcatagaatataagtaagtatatatagtttataaatcctagaaggcacaaagaataattatccactattagtaattaaatattgtcaaatgaatttttcattattaatatttgtatatggtatttgtttaaatttagagaaataaaaattgaaattaaacatatatatataagaaacaacaaggaggaatatgtggcctagaaaatctctattttttttgtcctcactctcttataggaatacttatggactacattttctttactttcttctatttttggaaaataagttttttatatacaacaattagatgattgtgtcataagcattctaccaaaaacaaaggaaacaaaacaaaagaagaaacataaagtaaagcaaaaatgggtaaaagtgtaaatgtcactggtttcatcattcatatgatgattttcttgttgattttaacaggtaatatatatatacattgtgatatattaatctctttgaagtcttatatattcttactttttggatttatgactaatgtttaggcaactttaataaaaattcaatagctaatgtgaaaaaaaggaaccagaaaagtttcccttttcgtttggagtttctgtttgcatttatcataacgttattttatcaaacaaaaatgttctatttctcaaggatttatatttttgttttaaaaattgaaaacgtagtgtaattcatcatagtttaaaggattaaagtgcttcatgttttttttttaccattgtgtatcaatcccgacataaattttattgctcttgagatagctgagaaatggcatatatgttacgtgaaataaactttacactactaatcattttgtatgagatttaagtagtaatcctaaagttactgtacatcaagttagtagtcatgcaagtaatcatcatagctagagattattaatgtttttaagcatcatcacttttaaattgtggattaaccaaatttttgaggcaagagaatgtagatctaattgatcaaaaccaaatgattaataacttatgtataagagaatgatagatctaattgatttttttttgtataattagaattatttaaatgtatcttacatatcgatcactaatggattaggaatatatggacaaaagcataagaggagagtgcttcaagtaccgagccccttacacgcgtggatcttgtgacaattataaacacgtcaagtccgcagtatgcaaaaaagtttgccaacgtagaaaggattttgatggaagatgtgaactttttcaggacgaaagaggattgcaactaggttgcttatgtttttcttcggattgtaagtgacaattgcaaacttcaaatcctatgtgcaacaatattgtttattattaccaaccatcaataatatgtcattaggactttgtggtatacatatcatatgatatatccatcatatgctatcttcaaatcttatgtataagaatatttaattttttcgttattagtgtaacgcccgtgaaccggaaaatcggttaggatttgtttttaaatcatccggtttaattggttgggttaattggaaaccctagagtgtgcctataaaagaatgaaactcgaaattagggctttagttagccacttttcgttttataaaggagaaaaagagagaaaatgagaatgagcagaatcgttagggtttgggagaaatcagtttcgtcatatcaaatcgtggtaaaaggtaacgaaattaggtatagttatttccaaatcctttatcgttattctccagtttacagaattagatttggattaaaattggttgagttattcgcagtttcgtgagacacgttttctcagacgcgaattaggaccagcggagattgaaactgagatcgtggtctcgtctgttttccgatcggcacgagattttgtgggcagctttgtgacgtctgcagctaggatttaaccggagcgattgaatagttaacggttagcttgtattttagggtttcgtctttgagacggtttgtttctggtttttcctgtccagtttgcttcaaggttgcttttggttgtgcacttgttgcaggacgtttctggactgtttcagacgcaaggagagtctctcctgggtttaattgctattagaatcaatttgttaaggtgagtgcgtgaccatgagcttatctgagcgattgggttgtgtgatgatatgtaggtgtggtgaatgtgttttgggtgaattgttcaatgactggtttatttgtattgtattcgtgattatacctttttatttgcttgtgtgtatagctcgtagatgggaggatcgcctcactaagtatttatgacaatacttacgcatctcattgtgttgttgatgcaggtaaagataaagtgtgattgtgaaatcatggcaaggaagagaggatgatctaggaactcgtttgttttatgtttggtgtttttggttattggaacccggttaggattgtcagttattcttggttttgttgatcgaattatttatttattcataaaatagtatttctgacttgcagtttaattattatgttattggttggtttaattagatatttatgggaatatttaattattattattatttttttaaatgggtcgggttgtttcaatttggtatcagagcgattacggttctatgatgtgtagaaaaattaattgatgaattattttcctgttgattgatgtgggatgagctagggtgttagcatattgaggattgattatggagtgtttagtcaattgtgtgttgttggagtcctagcatcatcttctccgagccttaattgagattccacggtaagttgtttgtgatatattcgattgttttagtttcttagccatttgttcttgagtagcgcagatg

SEQ ID NO: 25171 - DNA, 3003 bp, Unknown
  misc_feature (1)..( 3003): 2750-1469P.txt file - cDNA_ID_2703682; gDNA_ID_2214641; Annot_ID_136241
gctgcaattttggatacaattgagcacggaagccatcaacatcctttatattactacactacatttgactggaagccttgtagccgatgcagagaggagggcgccgttttatttcgttgtgatgagtgtgactacattttggatggaaactgtgctctttttccaaaaaaggtaatgagaaatagatacgatgatcatcttctcttcttgtctttcggtgacaagaatgtgagtggtgactattggtgtgaagcatgtgaaacgaaagtgaacccaaaggaatggttctatacatgcaacgattgtggaaccatattacatatatcttgtgttgtgggagatttctcatatatcatgccaggttctcatataacaacatggagagctaacgtggtatccaacacctctatttgtagaccagtttgctatatgtgtaactctcgatgcaaacttccttctgttcttaagctttctgacaccaaagttgatgtatacctttgttctttcaaatgtgcctattttattaggaaataaaattatgtatcatttttctagttaatgttaaatctatatacacatttttagcagcactttttgtctttaatgtttgaatttctctcactaatattttagttaagatgagtcaaaatttacccggtttaattatgttcggatattacataactttaatggatcggattatttacctggttttattgtgttccaatcctgagaacattaatttttgaaaaaagttaccatttctatcaaaaaaataattggaaacgaaattaattatttaattatcaaatttaatatatatatatatatataatatctttaaactaatcatattttttatttaccttaactaattttttaaaatctctctatctagaataaacataaatatatgatttaaacgataaaaaaataatatatatgtacaatatttcatattacttaaaaaaatgggtaatagtttagagttatattatagggaaatttgggtgtataaccataaaaaatttaataatttaacaagtaaccattcaaaaagttggatatgatattcagcatatattgtgtagtatatacacatttgcccttgtttatacacgtgcttctctcctctctccaacatgatgcatatatcatcatctctttcttctccaacagtttttttttaaagcaaaattcttttgtaactcttttcacaacagtcattttctctctttgtcatcgccaaaacaaattcatctacgacaatggagatatagcaaaggaggatctcacatcagcctcacacaaaaagttttcaatttcgatgacgatgagtaaatatttacaaaagtgaattttaaaaacatggattagctaattagtttttaaaattgcttataataaataggactataaatctcacaggaaattctagtgagattaagtcaaacaaatcattttttattttaggaaaagtttgcaagatattattctattttgtaaattaaaaataattttttattcatttatttattttaaccaatctgttacctaataaaaacatatttaattataaaatttaatatacaattaaaatgaaaggatatatctatttgggtttacaaaaagaatattagggttttggattttatgattaaacaatgttaaatattggtttgagtttataaacaagtttaaattttacaactaaacgaagtcaaatgtcggtttgggtttagaaagtacaattagggtttagattttataattaaacgagtaaaaatgttggtttgggtttataaacgagaattagggtttagattttgtaattaaacaagattatatatcggtttggatttatacaagaatggttaaagttttgattttataattaaataattttaattatttattagttgaaatattttgattggctagaataaagaatggtgaatatgagaacccaaatattgttctttgtgaatatactgtttacgtttatgttatactaggtgcgtttaaactgaattgtttgttttgattgatattcattgtcatgatagagtgttttcattggccaaaccacagtgtttgaaattgaaatactatttgatattgcatctctactttcttgtctatactatttcagtttttagaacaccaattttttttacttacaaccatttttctattttgtaaatattggttcattttaaaaaattcaaaccactacataatcagaaaaaaatctaatgttttttttaatatagctagaagtctaaatcagtttattttagagagatttttagaaagaaaatgtaatggggtgtgcaaaataatattatccaaaaacataaaattaatcttttctcttgtatgttcaccacgtcagctcgtccaaagccttgcaaatgaggagtttgtcgacatttcatgtcatctacatgttacttacttagttttagattttatagtgctatatccttaaataatttatgaaaagtagttacttttgcaattcaccctatattataagatgaaataaaattattttgaatacgaatgaacaaaaaacttgagtttttaaacttccaaaactaaaaatgttcggtttattatggttctttattttaaaaaatataaattttaaaataaatttaaaatattataaatatttaatttttattatacggatgaaatcttacaatggactaatttaaatcgattataataataaacgacaaaaaaaaaaaaaatcgattataataataaacggtataatacatgtgaattcctagaattaaagaatattttgcccatctcctgcaagttataagttaattacaatatgatgaaagaagaagataagagagatccaaagagataagaataacattaaagttactctctcggtgtgggtatgacgacgaattgacttaaaattttcgttagtcatcttttgtcaatttcgtttcaatcatttttgacacaaaaagtatg

SEQ ID NO: 25172 - DNA, 3003 bp, Unknown
  misc_feature (1)..( 3003): 2750-1469P.txt file - cDNA_ID_2703684; gDNA_ID_2214642; Annot_ID_136263
gcaaagactagagaggacgatgatgagcacaagatcagcatcggaccccaagagaagaaagaagagaaggatggaggtgtggtttactatggaccaatctcatcaaccataaagaaagtgaaactcctctcactctccacttgctgtctatcagtctctcttggcccggtcatcactttcatgacttccccgggactgaatgtgatcatgaaaggtgctgttgcctctactgtgatcttccttagcgcatccacaaccgctgctctccactggtttgttagtccctacgtgcacaagctgaggtggcagcctggttcagacacttttgaggtcgagatgatgacttggctcggcacatttagcgcaaagacactgaaattctcagacatacgttatccagacacgcaaagaccgtatgtgagcttcaaggctgatgggaatttctactttgtggatgcagatcattgccctaacaaggcattgttggctaggctcactcctccaaaggatgctcatgactctgctttcaagaacttgtaatccaaattcgtttcttttgttatactctttttttgggtgtggatttttgttgggtttgtaagctctttaagatacttggatacctcctccccttctcatcactaatacccaaaaaaatgcaaataagaaaagaccggtttgatccaattgctaattctattgagaaattataaaaccggttttgaaccggttggcgttaaaaccggtttagctcagcctcaaaggttttgattgagttcccattttggttgcagcgatcggagagctctgacggcatcagccacctctgcggcttcgcaaatccaaataagctgtggatgaaacgaagaatcctagatttctgaatggtacgtaattcggaacactaatagtctcttccagaaattagggttcatccgttagttgtgagtcttgttctgtgaatcttttggattctaagttttataatatcatgaatcagtgctctgttaatcgtgtttaatactggtcaatgattttcttaagctaaatcgatctttcttggatatgaatctctcttggctcattttgttgataaggaaatgaatctttgaagagtcactgccttggcttttctcatcttgaagagtcttgtgtttagttaagataagatttaaaactgactgcaaaatacttctttcatgaatgtagtgtgtcttaagtccctttggattcttgtttgcaatgtatttgtcatttactgtagcagaaatgagtcctctttgcaagttttaatcaatagattttgaaaactgtgacaagtgagcttgattcattggagaatgatgatggtaagaagaataaagcatatacaaatgcttaattttgtgttatgcgtttttggtacaccaggcgacaccatttatagcgggggttgcagtagctgcaacagcacttgctggtagatatggaatccaagcatggcaagcattcaaggcaaggccaccaaggcccaaaattaagaaattttatgagggcggtttccagcctacgatgacgaaaagggaagctgctctcattcttggcgtcaggtgaaggaaacacacacacatactctctctttctcttgtgtttagtagtttctcaatcctcaatgatcaatttggttatagcattagcatagtttccattgaagaaagtgtaacgttgtttgaaatgtggggttttgtgattgaaaacacagggagagtgtagcggcggaaaaggtgaaggaagcacacaggaaggtaatggtagcaaaccatccagatgcaggtggtagccatttcctagcctctaagatcaatgaagctaaagacgtgatgctaggcaaaactaaaaacagcggatccgctttttgatgcaaatttcaatcaaaagacttccttatgaatcatcttatgttataggactgtaatgtcaaaatgcagattttatgctaatttataagcttgtggtctgtttgtgacacataaagactcgaatcttttctttcacttgttgtcgctgaaaagaacacaaaaataaaaacgcaaagcagaagggcgttctagtcttttcggttttaaaaaaatccagtaatagaaactctagtacacgtgtcatgtggctccagcgacgtcttacgtcaacctctatccattcattcccctattagcaactccctccacaaaactatttttaattttattttttattggcaaaacaaatctattatttaatccttgtttttttttttaattattcgacaatcgaccgtctaattatcttttaattatcattagctcttgctaaaggcaaaatcgactcatttttcttgttttaatgtgaagttttaatcgcttataaaagcctaaaactggattatgattaatgagacccggtcatgatttatccactacatgaaagaaaatacgtaaatatagtactagtattaatttattaattattattattatctgttataatatccatgtctttatcttcttctaattttcattttcattttacgtttttttaaaaaggcaaaaaaaaaaaaaaaaaaaggagaaagaaagaagaagaagggaactaaagagggtcatcatcatttcatggttacctcctcttcctctcttcttactctcaccatatctgctctctctctctctctgtttcaagcttttgctcccatttttcatttccttcgtattctcgctcgagcttagcggttgatgtaccaatgaccaaatcgatatttgaatcgccgtggctacctttctttttcttctgatttctctatctctcgcttgattctaccacttttagggtttctattattcccagggactttgggtttctttaagaagttcgattcgtctccgttttctttttagggttaacgaagtctgtggtgttggatttcgatctttttttttttggtatcttccccattgactgttgcggtgataagagagtgacgcaatg

SEQ ID NO: 25173 - DNA, 3003 bp, Unknown
  misc_feature (1)..( 3003): 2750-1469P.txt file - cDNA_ID_2703702; gDNA_ID_2214642; Annot_ID_136266
ggtcccaacgacgctcaattggatctctctaaaggaatcccacggtactctttcccgattctctaaaactcagattctttgttaatctgcgtttaaattccacatctttgacgctaatttatcattctatgtgatatgtgttggtgttggttccaaaaatagttgtattgattagttccaagttgtgagatttataacaaagtcctagcttttaggttaataggtttcagattggtttgttctcaatgtgtgatataatttcgtggcaggctctatatacttaggctgaaagaaacacccttagggtttttcaagatcacgcatcacgcaaaggtgacacagtgtctaggatcaataggaggtgatatttggtatatgggagtggctaagccatctcttattgaagatgatgatgatggaaggagagtagatacagtaaaagcaaagtctggtcacttgtacattccacctgaggtggaagagattcgcgtcttcaggttctcgggaccaaagtttgtgaaactgcaccgtggtacatggcatgctggacccttgtttagtggcagctccatcatggatttctacaacttagaactcagcaacacaaatgtgagtcagtgagtgatggttttaaattgttaatacaatgtagtgtgatgaatgacttgacaacattgttgctgttgatgatgttgttcaggtggtggatcacacgtcacatgatttcacgaagaataatggagtcagcttccgctttgacacctaagaagaataatggagtcaatcctatcatgagtgtgcttctgtttttccttgtgtgtaatgtaattgactaattgccaataccaatactgtgtattgtgtactgtgcacacaaattggttatatgcaataaaataccggtttaagttaaccaaccctggttcataaaatcctaataattcttgaattggttttctaaaaaaagaaagcaaatcatgaatactaaagaaatttgattacatcatttggtgtttctagtaatctgctctgttgccagttataaagtagtatatttaattattaagcattattaaaacgaataatacgtataatataatcgtagccgttggatataattacacgtgcgactatctttcgatcgcactaaaagcaaaggaaaggctaaaaagaagctcgagggtcgagatcgatcaaaattgtaaatcaatcataacacattttaactagctctaacacaaactctaaaattttagattaattcagacttggtaacaattttgacttaactacgagcgtcattaccattctatgcatcgttttacacgaattacactcacatctcaaagatacatgtccacatgctacgtaccgagtatcgaccacacccgataaacaacgggacaagccctagaatcccgaaaaggcaaaaaggtcccttgttttctctcttttttcatgttaaacacatactttttaaattaacaagaaagcccagatatttttggtgttttcttactgaatctagacttgaagagaattttaggaaaactccaaaaagctcgtacgctaattcttatcttcacttccatttttcctgtggtgatggtgagagttcaagtgttccaacgatggcgaaatccccggtagaggtgaaactgatcccgatcgaagctactcctgagaatttcgcagactatggtcaagtcatcgaagcctctcgtgacggtgcaggtttcggtcccaacgacgctcaactggatctctccagaggaatcccacggtactctttatccagtttactaaaatttcgttaatacctaagattattgattaaaacacatgcttcttctaatcatattcgttgttgattaatgtctaaattcctcatctttgatgctaatttatcaatcaagctatgtgatttgtattggttcctagatagtcgtgttgatcagttcctaataacaaaagacttatagattttgtaggaacgtacttatttactacaaaattcaacaaaacgaaagaccaattcaaactagactcttcttactacttcaagtaattaactgacttcatttacaagtcctagcattaggtttcagatttgtttgttcttttttttttttacaattagctaatcatcatattctcattatgtttaatacttgggacaggttctatataatgcggatcagagatacaccctttgacttttccgtactcactcaccacgcgagcgtgacacagtgtctaggatcaataggaggtcatgtttggtaccttggagtggctaaaccgacacttattgaagatggtgatgatggaaagatggtagataaattgaaatcaaggtctggtcacttgtacgctcctcctgcggttgaagagattcgcgtcttcagggtctcgggaccaaagtttattaaactgaaccacggtacgtggcatgttggaccactcttcagtgacagctacatggacttctacaaccttgagctcagcaacacaaatgtgagtgagaatggttttattgttaataatgtatggaatggtgatgaatgacttgtttttattgacgacattgttgttgttgatgatgatgttcaggcggtggatcgcacgacatatgatttcatcaaaaataaaggagtcaccatccgagttgaccccaacgatgttgacacatcgtcctcctaactcaatcttatcatcagtgtgtgcttctgttttcatgaataaattgagcaatcgtgaataaaatttgtatgcaactgtgtacaaattgttttttttttttttttttttttttcaataaatatcgaaaatacttgttttctcatattttcatgttaatcccatacttttaaaattgacaagaaaacctaaatatactttggtgtcttctgattgattttaaaaacattttgagtggatacaaaaagagctcaagatacaatcctctttatttttattttcttgtggtgcgtttcaacgatg

SEQ ID NO: 25174 - DNA, 3003 bp, Unknown
  misc_feature (1)..( 3003): 2750-1469P.txt file - cDNA_ID_2703714; gDNA_ID_2214642; Annot_ID_136275
tttttctcatatcatcatatgtattggctaacggtttacccaataagacaaatacgctgttaaatatctggttttgtttaacaaaaaaaaaattgctaataaataaaccatatgattgagaaagattgtcagactgactatcaaaaacgcctaattgattcgatcccattatcttaagttccaacttgtcctcaaactcttttttttttctttgacgtctcaatatttaaaatgatctctcaaagttcaatacaagccaagaaacatatttgccaatattcaaaacgactttaattactctttcttggtacgtatgtatagataaactcgttcacattgcttaaagaaaaactaatccaacaaaattgtgaaaaattcatccttaacctcctttctcttacaaatcttcggcttcgaagagtgtatatacagtgatcagttagtgaccaaaaataacaaatttacaaggaattaaaagaagaattaataacgagtttaagccggagattagtcaagatttcgatttcttcggttataaaataaacaaatcactaggacattcttgtggcggccacggaggaggctaaagggacaacctcggcgaggggagtagacagaggagttggaagcggcgaagtccgacacacaggacacgtaggattgagtctaagccacgtgtcgatacatttaaggtggaagagatggttgcaatctggtagctgccgcagcagatgttttcccttgtagtctcctaaacaaatggcacaacacgacgccgttgttggtccctttgcttccgagtagagaatctttggatagctttgaatggtgtcctcgtcaagaccggggacaacgtcgatgatgacatggtggtgatggtgatggatacgtgttgaatcttggttggtttgtgaaggtgaagaagagagctggttacgtgtgcaatagtatgaggtgagggtgatggtggtgatgaggaggaggaccccgatggagacaccgattccgtatcgaaatcctcctatgtcgtccgtgccgaggaggccgttgtagtccggcatctcggacggtggcggtggttggaaattgttcatggcgggtttggtttgatggttttgtttaatgggtttgggaggaggaagaggagaaataatggagaggtttttggtcagcgatttgatataagacaatgtaaattgaagcatcttggggttatcaaaagtcaacgctaagagagagagagagacaaagggaggaaatgcatgtgaatgaggataagaaagcttgtcaaagcaaagcaagaattgtgtgacttgtggatggttaaaaaaatattcaatgtataaattttctaatattgtattggtaatactgtaatagtataacgcatatataaatatattgacccattaattcgttgtttatttcaaacataaaacacttagttgcacaattgaattggatacagggctaatgaatttaacgtgtgacatgtattaagatttgatttaggaatgtagggaggggccagtggctaagattagagaaggtttacgctgaattagtttgaagtcaacgttgtacttatatactaatcttgttgtttatgtacgtttagttatctcctttattcaggcttatttaagtccaatcatgtcacctaagcaacgtttagtttccttcacttgcttttaaagtcgcagtgttatcttattttagtattagaatatttaaaactttgaaatctctccatattagaagattaatataaagttttgtttttctcctaaaagtggcaagacaataaaataaaatataattgtaggtaaataatttgtatatactaggaaatccaaatttaaccaattgagtcgtgggcattaacatttgtattacataaaattatattttggcaaactaccataggataaaaatcattcacttaacggccaagttactaacacaaggcatctttgataatggaaaacaatctgttggacagttgttattaatgaagaaaatgcgtcattgcatgctcgcatgatgtatattttaatatacactagctatgatagtatataaacagatatacatgtaattaagaatggagataaatgaacgtatattatccaggggcggattcatttggtgaagaatgaatgtattcagtgaattttaattgatattcgaatacaccattgttattgaacacttaattattgccgccgctcttccaatttttcaattctttttttccccaatcagtagagtaactatgggcttttaaaacccatagctccggattcccaatcatatattctatagtctatgtcatctaaaacaatatgaatttagataaacaatttatgaccttcaagccatatatttgggccggatactcaaaacatatgaaattacactcaaacactaattgagctacttaggccaaatatataaaggaaacacttactactaggcataaaaagtttggaagaaataataagagagaaaaaaatgttataatcctgacattgtttttttattgttaactcactcttggaataagttgtccaagtctcatagttgactcagtttggtggtgtcacaaattagttccatcattactaatttgctatcagtttggtgatgtatcaaatactgttgatctagtaatttcacaaaaagcgcatatcttccggctaatgatattagatttactcatatgtgtaatgtgtatgtatggttgaaagttgaagctaaattaggtttaagtcactcatatcatatgtgtgtgttatcttgtatagtgtaatacaaaattcaatacaaaattttccaataagcaaaaatagtcgtcagtgcgagttcaactttaaactgtttcaaactttatattcattacgaatgcaacagtccctctcttgtttctccacgcttcgctttctccttccattttcttccaaactctctccgcttcgtcctctctttcacaccgccgctatg

SEQ ID NO: 25175 - DNA, 3000 bp, Unknown; identical to SEQ ID NO: 13660
  misc_feature (1)..( 3000): 2750-1469P.txt file - cDNA_ID_2703718; gDNA_ID_2214642; Annot_ID_188362

SEQ ID NO: 25176 - DNA, 3000 bp, Unknown; identical to SEQ ID NO: 13660
  misc_feature (1)..( 3000): 2750-1469P.txt file - cDNA_ID_2703718; gDNA_ID_2214642; Annot_ID_136277

SEQ ID NO: 25177 - DNA, 3000 bp, Unknown; identical to SEQ ID NO: 10452
  misc_feature (1)..( 3000): 2750-1469P.txt file - cDNA_ID_2703736; gDNA_ID_2213650; Annot_ID_132455

SEQ ID NO: 25178 - DNA, 3003 bp, Unknown
  misc_feature (1)..( 3003): 2750-1469P.txt file - cDNA_ID_2703742; gDNA_ID_2214643; Annot_ID_136305
tcctcgaaatcccgagatgctctaccgaatgtgaaatcgtcatcctctgatttggtaaaagagcagagagaacattgtgaggtttcgtagttttatgtaaagacgatgtgaacatgcattgtagtttcatggttggtttggctttggatttcatttgcgtcttaggagtaaaatgaatgcaactatttaggtacttggctggagatatcagttgttcttagaagcaatttgtatcttttggtgattttgtgtaaagccaatgtggatcgtcgtagcagtttcattactacttggtctaatgatattatgatagcttaattattttgctcattcgatagtgaattttctatggcacttcatggatctatctatatctgttcaattgttataaaactctaagcaatgtcaagctcttcaagggaaaaccttctagatgattccaagtctctgcttaatgtgccaactagcctctacgtcactactttgtgtcgtctccaattctcatccttcttgacaagaccaaacgtatcactaatgttggagagatgaccaatgtttgttcatacatttgtttgtaatgaagacatatagcacaacaccatataacatatgatccattctattaattttgctatttttacagccgaagaagaagagtataagaaacatgtttaagattcagccttacacaagtgtagcagaagcaaaaaagaaaggctatcaacgaatgggaactttgatccaaccattggcaaaagcaatggctaagatgacgaatggcgttgacataccgaagatgataatgtaaggaagaggcgtcttcatcggattctctccttctctttctccaacgctttgccaatacctataaagttgtaatgcaaatctcatccataaccatttcgtcagtcacaatattgcatgtttatgaaaaatgtgcatgcaagagtttaagattcttttgactaacttacaaaaaccaaatattttcgatcaaatttatggttcgtgtattgatacaatactaacacaaaccactagtctacatgtcattgtcacataccaaacaaaatctaaattctgcaaaggagactaaaattacattaccatccaatgagtttctgtttattttctacaatctcatgatggaaaaaattgagaattaagatgaactaactgttctggttcttcatctttggtaatgaacttcttcttatctttaggcttcacttctccatctcctccaccttaagcaagaaccaaggattaacagattttcatctacaaataaataaaagatctaagagagtacctaacttggcgtgaagcttgaactgtgggaatcctaatggagatggtggacagaagaattgaggcaaagcaagcaatgatgaatatgaagaagatgatgaggttatggaatcattagttctgtggctaaacgaagaagagggaatgcagagttttgctgccatttccaacaactaaacgttttgtttttgtatatgattttttttgtatatattagttggagatatatgtggcatttgtagtgacatttggcaaacttgtagactaaaaccttatcctcttcttacctctctttgtgttctgattttttgtattagacactccatttgcagtggaacatttgaactaaaccgaatcaatttaataaaagagagaatgtgtaaaccaggcctttttaaaataatattgtaattgctgcaaaaacaaaaaaagtttaagaataataattttgcaattaatttaatggactagttatacaaaaattaatcagcttttatatattttgcaattatttgaatccattacattatgtatgtcaattgggctgcttggacccaatctgaattagaatttcaaaacccacaaatctttcagtcttgcccaactcattttactatcttacaaattcttgttggcaagaaattagttttggaatgaaaattatttgtttgagctttaaaagccggtccaaagactctaactcgcttgggttagacccaataaaccttttattctgaacgaggtttgatcctacttgactgtttctgaatcttattttgcgtatatgaagttctccttgatatgcctaaaatcccttcgaggttcatgtttaaaggtaaatatgtgagttataagactcgtacttttgaacttttgatctgatttttaaaccaatgattaaataacaatttattgtaaaatatttcaaattatatgaagtataatttaagtttaaaatctaatttgcaaaggcaattaaacactattagtacaacatgtaattatataataataataataataataaaaacataaattttgattgatttttgtttgagtgattattttggttatgattggtaaaataccctcaaaccacatttaaaaccatgagatgcaaatgttttgtattgttaactaaagaaatcctctaaactgtagatttggaagtctattttaaaatcactagttcataaaacactagatttcttaagatttttttagaattcatgatggtcatttcaacacaaatcattttaaatgtttgattgaatacacttccctcatttttggaagtaatggatatgattattgccaaatagaaactattaatgatccaaaacatgatttgtaagataaggtttttcacattaaatttctgatgatacactttatgctatattatatttgaagtttagactaaatacaaacacctaaagagattgtaagtatgtgtgtaaatgaagtaacgtatgaatgattaaacctttaaatagaagtatcctcttaatcaaataaacgtcatggaggatgatgcaacattctaacgaactattcgcataaagtttgattacaaaatttgtaattaaagcaaataatatcgttttaagaaaaagaaaaaacacagcagtcaacaattggatggcagaatcgtaaattaagtaacaattgatcggtgactaaaaaaaaatg

SEQ ID NO: 25179 - DNA, 3003 bp, Unknown
  misc_feature (1)..( 3003): 2750-1469P.txt file - cDNA_ID_2703746; gDNA_ID_2214643; Annot_ID_188418
tcatttcctctttcttggaggttgttagtgcttcagaagatgatgatggagctgcaacgcttgtagtcttactttgcatattgcaaatgaaaaggtgagtacaattgcattaaccaccagatatatctattaacctttgtagtttatccctaggtggcgtgatttcaccggcgatcagttctctccctgaactagttgagattaacctccaaaacaactttctcacaggcgaaataccgaggcttccaaaacacgtaaaggtcatttacaaacccggaaaaaggttcctcatacacaagtcaagagataacaagtgactataggcatactcattgcaatcacaattggaggagcacttgtcttgatcaacatgggaatcatggtttacgtttatcagctcaagaaatctacaatggttgcaataaaatatataaaaaaataaacagttttcttctaataaaaatatctaaatgtcaaatatgggtttacaagttacaatcatgaaactctttggtaaggaagataatcaaaatatggatttgtacaattcaaacatgggcttctaatatgatataatctatataataataacaattttaattaatgtctttaacaattgtgttttcttttaatcgcattttttttgataaactagaaatatattttgcagttatttttttttagaaagttgcaatctggataaatgtcttctactgttacatctttttttaatcgtaaatcttcataaacggttgcaactatttagttaaagcattacaatatttaatttatttgaaaaatcattgcaatttttggtttatttatgaatcgttataatatttaataaattggattctaatgtaatgccaagttagattatcaaaagctagggtaatgatcatacatctcaagatgtcgcgaaaatgaagctagtaaggtaaaattcggcaatcgccaaaaaatcagagtctagatttgtaattttaattgcatcttcttctttttggtcaatagtaacatctggtcatggaaagtgttctgcaaaagtatgtttatgcagctcctagtagaatgagtacaagaacggaagaaacactacatgcttagacttttgatgatgataataaaagtttaccaaaaaagtgaatccaaaactgaaaaagaaagaattataacacttaatctgagattaataacttgaaaattttaaagcttaactcatattacaacataacaaataacatgcagtattctcaaaatctacatatacatttttggtagactttttggccaaaaatctctcaactatttactaataacatttagatccttacaaaatatatctcaactagatattctaatactaaaaatttacaatttgttagtttgcattaaatacttaaattaactcttttctatattacatatttagtccctacaaaatctatctaaaaaaaatatgtgtctaattaaactacattcaattaattactaatttcttaaaatttctctatctacattaaatataaatatatgctttttctttcacttttagttgttctaatatctaatttatttgattttatataaaatatatatagttaataaaatattagattttttctatatatgatgtaattcaaatttttaaaaacagacatatattactcaatcgatgaagaaaaaaaagtaagtgtaaaaagtctcacattgcttaagaaattgggcaacggttcagagtcatattataaaaagaaccaaaatgattttgaataagaatgaactggaagttgatttatcaggcatcccaaaataaaaatgttattcggtttaaagaactgaatctttaaaaatttcaaaatattataaatatttaactttcttaaaagtgaaatatcaaaaaatttataacttttaaaaagttatactttattaaaaaattaaatgcattaatacgggacaatatactacgggtgaaatcctatatataacaatcaaaatagaattataaagtttggatcgatattattattattatttttaatttcaataccataaacatttaaactttagaaaaaatgacaaaatgatgtttaattccacgtgacggggttatatggtgggacgggtttaagttgatattaatacgggatggtatatagtatgggtaaaatcctataattaacaatcaaaatataattatataattttaaaaactaagccaatgtaacaatattaatatatatatatatatatatatatataaaacttaaaattttaatttttttagttctaaaattgtctcagagtattatacgttaaaataaaataacatatgtctatatatcatcttaaagacaaaattcatttttttgataaaaatatacccatgtgatatacctcttaatatgttatatatatatatatatacatatatgtaatataatattaattaaaataaatcgttaactttctgtgtaccgcggaccaatctctagttaaatacattttgggacagttcttattacaaaataaaaaatatataaaaatgttacaagtttacagaaaattacaaaaaaccatggttacgtataaaatgtcgacccatatttagtgggctttgttggcttattgggcttttgtgtataaaaaactcatttatatacactcgtgagaactggaaggttccgtcaagtgattcctcattcccagcaactgtttcaacttccgccggcgacatcacgatctacagttccggcaagttattccattccgttcgatcaaaacaatgtagttcttcttcgtcgtcttcgtcttcttcttctcattttacacagttttgttttaggaattttcttcataagatttttgacaaaccctagcctgatcacttagtctcaataaggttttagttttagtttctcttcctcactggcgatttatgtttgcatgcatgtaccttttcttacagatttttcgtggtgcagaacaagaacacatatg

SEQ ID NO: 25180 - DNA, 3003 bp, Unknown; identical to SEQ ID NO: 25179
  misc_feature (1)..( 3003): 2750-1469P.txt file - cDNA_ID_2703746; gDNA_ID_2214643; Annot_ID_136303

SEQ ID NO: 25181 - DNA, 3003 bp, Unknown
  misc_feature (1)..( 3003): 2750-1469P.txt file - cDNA_ID_2703753; gDNA_ID_2214643; Annot_ID_136291
gtaggagagaaggagagttgagtttctcggaggagaaactttgagaaactattctcatccaatttggacaggtgtcatcatactattagttcaactattaaataataattaatatatttgttttgattaaattattaatatatttttttttgagaaactttctttatttttactgatggagatggtctaaacatcttgtctcaccgccatggtatgaaccatctgctgcccaatctcctccgacatgcaatcgaaagaaaagcgtcctaacaaatacaattatcaaaaactctctaaaaatctgataaatttatgcgtctgaaaacaatttaaaaaattgagagaacaatcttataatagttaccttaaaaagctgagagaaattttcctttaataatcttttcctattcgtttaaattttattttttcagacttttggaaattttatgttctgttgtttaatataataataaaatttacatataaaatgctaataataaattttttgcctttttgttttttgaaattttattttattgaaaactattattttgtatattctaataattatattatacatttttactatttccatatcttgttgaattgaagagatcacttaagactttcatcaccttctaattattattataactatttgtataataataattactatattgagtttataataattgacacgtcataatgtactggatcacgtgcatcgcatgttttagacgagagtatcatatggcaactcgtaagaagaaaagctgaaaccagatcttccttcgttaactgttttcagctccagcttctgaaacaaaatatcatcagggttttatctcaaacaacaacagattatatagtttgtagatacgaggaagatcttggactaacctgctgtttggatcataatagaaaccgcgcgctgatggatccgtcgctgcaggagaagcatacgtagtaaaatctagctattgttagtccacaatctgtgccaacatttacaaagtattgctctttccatctcttgcaccaccacaaaaattatccggagtgaattatataggatatgtaagagtaaaggatcatcgatattgatacgaaagcgagagttataccataaatatataagggtaaatgttatgacctgacactcacagaatcaagaatcgtttcccgtattagaaattcaaagggaaacaacatgaagaaaaataagtaagagtttaaggtcttacaggagtgtctgccatgggaacgtttagagcttccatggtgccacaaagacagccatgttcaaggtcaattccctgtatctggacattaactctccaagcttcctccttgtgttaattagagacattttgcgtaccagaaaatgcatgcagcataaaaacatgtgtgttcctcatctttaggttcaatatgaacaaacaatctcttggagccaatgaatgttatacaatcccaactagatataaatgcacttgaattaagcatagatgtcaacatgaaaaagatatcaagccaatcaaagcagacaaggccaacttctactattagctattcttgtgatttcaagtattcataagtcagaacttgtcaagtctgagagaaatttcaccttttacatataaaaatccctaagacaatgtctttatagatatactcagattctgcttacacataaggttatgttcataaaaagagtgtgcatacataaccacagatgcacaagcataactaataaagttctctctagtcctaaccaatattcccaagacctctatggtcagacacttataaaattcaatttgttaaaccaaataaacagaatcgaaaaccacatctcatcatacccggttcggttttcttaaccgaatcaaattatatataaaacggattaggcttctccggttttctactgcgttttgtataaaaccctcacaaaaaccctttctccaaatccttcaacctctattatcgaacttgctatataacctttggacctgactttcctacttctctctaactccaggtttgtcttcctctcaagttgaagctgcggctttattagtttcctgttgacttatgttccttgaatccattcacatgagcttcttacgccgttttcattggtttacctattgacgttgacttgggtctaccatactttttcatgttacttgattgcatatttataaaacggtgctcctttttgtatagcattctagatgttgcttctgaaacaaagctcatctgctgttcttgtcgttgggaatacaaaaactccagtccttcacacttgtcgctccacctacagagttggaaccagaacgcactcgttcaagagtttgactatggcaaatttgcacaagcacttcttcgtctgggaaactgaatacggcttcatctgtgccttgtagctctcacgaggcttctcctatcaggtacctatgccccctgtattgagtataatggtgtcaaccattcttcttaagtattttctcgattcttgttattttcttggctattgtcagtttcatggacatgagaagttgcatagctgttgtagttaagattgcatcacaccaatataataaagaaactagctgtgtgcttccctgctcgtttctctgttactagacacgaagatttgaaaatagtaagactggttaaggtatttctaatgttcattttctttcctctttgcaagtgagaataacgagaataaacatgtccatggagtttctgagacaattgtgggagttcttggggtggacaattgggtcagtttccatagcatcatttggtatctatattccattggcttttaatttctgaatgctttgaaacttatatcaccaaaatctgttgtatataacctttttatgaaacacttgaacccttcatgaatcttcaaagtatctgactgaatttgtggtgcttgttgtttaccacattgcagagacacctcgtgttggtatcatcatg

SEQ ID NO: 25182 - DNA, 3000 bp, Unknown; identical to SEQ ID NO: 13679
  misc_feature (1)..( 3000): 2750-1469P.txt file - cDNA_ID_2703765; gDNA_ID_2214643; Annot_ID_136297

SEQ ID NO: 25183 - DNA, 3003 bp, Unknown
  misc_feature (1)..( 3003): 2750-1469P.txt file - cDNA_ID_2703769; gDNA_ID_2214643; Annot_ID_136296
tgttctttaagaatcagatggatgaaactttgtggacaacaatcgtaccaaaagcaccacatatagcttttccaattcttaacatgtaagaccaaaagattcacaactctcatcataacaatctgcacaatccacgatgcgtcatccataatgtgccatccatataaacattccattatcgtcatccacattgttagaactaagatacaaacattccataaacaagcaaaatctaaaatctaaaaagccaacaatcatatgatcagtttaacgtcatcaaattcaagagagtggccaagtgctatgcaatgataagagtatccatatacatgtgaacaaattgtcaaaacaaattggtgattgcagctaatgtaaaaagtcatatggatatagaggtgtggataggtgtgtgatctaaacacatcatttctagatccggaagatgtatctgttgggaaacgatagctccaataaaaccaaatatcacatcttccctagcatttttgagatagaaagagattaacacaaagttattgttagccaaagtttttgaagaccaactacgtatctataggctggaaatagagcaaaaattaaacaaggaattcaaggtgttcccagagaagggtattagaattttaactggaaaactagatgcattttaacaaatcaaatttcaatgtcaattcacaacattcatatcactggatcctaacttgggattgagtcaactacttaatttaaaattcttcaagtaatttgtcaaatcgatcctaacttgggattgaatcctatcttactatttatcaatttaacattcaatcttaagaaacagataaagccaagtaaaaatccaatacgagagaggataaaatttggttaaagatgctcttacctctcccaaacaatgattcagtttttcttcttccccaattcaaacatccttagtgatctgagttgagaccaatattttctgtcttaatcttcggcgaattggatttctaatgttaataatccttcgataagaaacgatggtggtggccataagttttccagcgaatggagaaaaatatacaaaagtaaaaaaaaaaaaaaaaaattagggtaaacatagattttgattgtgaatttaggataacctcataattttcatgattttgtaaaaattatagagaacgacaatgattttgaaagagagattgaaaatgatgaaaaacaaaagaatatggaagagagagatgataaaagggggatagtttcttacccacacgatctcatcaaaaataagtttaataattattgtgtcatcattacttcaggggtaaattagtccaatttctcctcaaaaagatggcaaagtgcctaatccctgaaaagtgcctcaaaaggaataaaattctttaaaagtgtctaaacgtgtcacattcccttatcattttagtcctttaatttttatatattcaaaatatttcaacactttgactcgtaatctacagattaaaaataaagagacttatctatctcttcgtaatgcattgattgatcacatatgagagcattacgaaaataattttattgagtaatttgtaatttataagttaatttatgtatttttaatttttatttatatgtattttatttataaatgtattgttttgttaattaagattatgtgtaatattttaatgtatgttttagtgttattattaaagttatatagttttaaaataattatgaacaatataaagactataatgcaaaacacatattttagaaacttcatatttaaagtatactcttggagaagaaactactcatactttatatttgaagtttacatactctatatataaaatatcttttggatatgctctaaattatattggattatcttttagagaacctaaaactttatatttgagggatagagtatctcttggagatgctcgtggtagttcaatattgtaccttaactgtaacgtaaatgttgttatctttacttagacgtctttgatatgtaaaaattctatctctgtatcctgtttgtactggcctctccaaggttcaccattattggatgatgcactgggttgatatatataacataactttttggcaaaaaaaagaaacaagaaaaaaaaaacagtctctttggcgatagcgatttggtcggagatttctccgattacattgattgggactttagtgaatcttcacagaagcaacttcacggagaacggcgagaagaatgtggaattgagagcgtcgttagaggatcgagaagcgtcggccgtttcactggagagatctagtgttgttcgttgatgaaggggttctaatttcgatacctaacggaattgatcattgataaggtctcattccggtggcaatcgtcgtcgccggaaacaatgtgcacagatacgaccttgaggttagtttattcctttaaaatctaatcacaacaaaatatatcatttgtattcatgggattatgttcattgtaatggatttgaggatttggtagataaaagtagtaaaaattgtggattgaagaattttcttgtgagagatggttgatgtaagggaaggatcatattctggaacatttgttagctttggttacttctcaccattgtgatgaaatttgctatatccaggggatgattcaagtgagagaaagataaagtttttttgccttcagtctgattctgcattgaatacttccagtgggctgcaggttagtgcttagtgttcttttgatatccttgcattgtcattccgttgatggctattctattgcctccaatgtatactcattccacttattggctccaatgtatactcattccacttattgcctccaatgtatactcactccacttattggctatgggctgcaggttggtgcttagtgttctgttgatactcattccacatattaccactctctaattttgtgacgtcaggataatacttaaaaacgttgtagcaaagcgggagatg

SEQ ID NO: 25184 - DNA, 3000 bp, Unknown; identical to SEQ ID NO: 13666
  misc_feature (1)..( 3000): 2750-1469P.txt file - cDNA_ID_2703785; gDNA_ID_2214643; Annot_ID_136290

SEQ ID NO: 25185 - DNA, 3003 bp, Unknown
  misc_feature (1)..( 3003): 2750-1469P.txt file - cDNA_ID_2703825; gDNA_ID_2214644; Annot_ID_188445
cttgttttttcacagattccagaatccttcaacgaatgagattgtaacacgtgtaagtgagacaacttaggtgacaattccatatttggagtcggaatttggcttacgtggaacccaccgaaatcgtgtaatagaagtcaaacgcatctatatctgtgtttaagctaaaagtaaacctcattgaagaagtaacataggaaagctttcgtagccgtcagatcaaccagacaaaacgtcatatcgagacaaaaactttcgacggagcagattctacagatacaatacacacggtttcactggatttcgcccctctctctttaaacaaaattaaataatatcagaagacacgttcttcttcttacgaaaccgactttgtagtttcttctttttttccattacacaaaaacgaaaaaacgacaacacaaaaacaaataacaaaatcttttaaataaaaaataaatcgactctcgtgtttgtttaacttcttgtttatttttcttagaggttaattaatttcttctctacatgaacgatccaatgggagaaacaggattttctagagaatcggcgccggagatcgtgttctcggagacggatatggctgcggctgagcagcttatgcatctaagcgaagaagaaacggttagctgtagcagcagcaccggcggagattgcggtggcggaggcggagacaagataaagcatgaatatgttagctcgagaatcggaaacgagctaaacgacggcgtacgaggaaactctattcttggcgtggagaagaagaggaagaggacggtgatgaaggaaaagaagtttcgatctcttgagagtatttacaaagggacgaaggagattagggattaatggaggaaagggatcggagagatggttaattatatatcgtttgttaattacttttgttaatcgatgttagtaacctcttcaatggtttttttggtgtgtgtgtatatttctagtccttgcttaatttaacgttggagctgaaaatttgtgataatagtttttggagattttcagatgaaatctgtaaatattttggttctcatatatattagacgtgatgctgttttttgtttttccctagtcacttcgttgcaaaaattaacaattttactttggttttggatctgatagtacattcatttttttcgtaagatttaaaagtttatttacgtgcaaatgatttcgttttgaatttttaaattttgagttctatgatgtgccaactgccaactgagatcattttttttttaccttttcaaaaagtatatattctacacaacaaaccagacacatgcaacaccaccaaatatcttaaaattgtggtgatgatttttatacttactgcagtaaagaaaaatcataaattttatcatgttcaactaaaggcatttgaagatgcctcatgtgggtgttgagtgaactcgggtcatgggtctttttcgtgaacttctcgttgagagcttcatcttcttaattatcttggagtcatcttctgattcttgtagcttgtattagggtttttgttataccttgatgagcatgtaaagagaggtcaagagtgagtgagttcctatagtaaacattcagttgatcgattggatgtttgtgacacaaaatgtactgtaggagaactagtgactatgtatggaaattgtttatgcattgatgtttagtcatgctaaaaacagatttcaacaagtggtattagagcacaactattctcaaggatagtcaaatttgtaacagaaaagcatattaaggcatgcaagcaatgcaagttgcacaagaagattctattctagtctcgattcttgtaaaatcgagtcacaaaagatcaaggtttcctagtatatcaaggatttcatcgggatataattcctaatgtatcttttttgcaatcatggcttgaacctctagacggttttggcagtatttgtatccatcatttccataccaaatcgtgtttgcctcaacattctacatgtaaattgcactatctgctcatgccttccacaaaatacctaggcaaaagacattaatttttcaagtttacgagcacggagtttagaggagccatcacactgattttacaataaatgaagaaaaatctttttgttatcttgattgacgtctactcatcccatgttttaacttgaaactttaattggcagctaatatctatagtgttatatccacaataggtggaaataaaaccctcacgttccacatcatgttgaataaataaagctgtcatccgaaatagatttggaggtatatagaagttttgactctttgagataacactgtggaagtcaaaaaaaaaaaaaaaaaaaaaaaaaaagtcaaaacatcctcctcgtctgagatgttccatgcaatatatctcttcataattctttcttgtcttcaacaaagtccagcaaggatctgagaagtttgcgtcgattgattatgccaacttgaagttggaaatagaagaagactaggcggaacatctcatcaaaaccctatacattcaacagggaaattcttttgcacgaatgttagacttcaatattgaataaaattcatagtttcaacaatctcataaaaaaagagctgggctccattcgaagacacattaatttccatgggcctggtccacatacaaccatactaaatttgaagtaatttacccgccatttaaaaaagcccataggctccttctcctagaagctggcgggaaaatcccaaaacttttcccgggaaagtagataaaaaatttcggccattaaaggacaaaatcacaagaaagtagaaaccctagagattttgaaaccgaaaccccaaaaacccctttgacgcctccttcttcttatctctttataaaaaaccatttctttcctgcaacatcgttgcttatcatcagacgcacatcacctgttcgataaaattcctctgagagtgttttttttgttttccttctgacaaagaaatatg

SEQ ID NO: 25186 - DNA, 3003 bp, Unknown; identical to SEQ ID NO: 25185
  misc_feature (1)..( 3003): 2750-1469P.txt file - cDNA_ID_2703825; gDNA_ID_2214644; Annot_ID_136315

SEQ ID NO: 25187 - DNA, 3000 bp, Unknown; identical to SEQ ID NO: 13690
  misc_feature (1)..( 3000): 2750-1469P.txt file - cDNA_ID_2703829; gDNA_ID_2214644; Annot_ID_188452

SEQ ID NO: 25188 - DNA, 3000 bp, Unknown; identical to SEQ ID NO: 13690
  misc_feature (1)..( 3000): 2750-1469P.txt file - cDNA_ID_2703829; gDNA_ID_2214644; Annot_ID_136323

SEQ ID NO: 25189 - DNA, 3003 bp, Unknown
  misc_feature (1)..( 3003): 2750-1469P.txt file - cDNA_ID_2703833; gDNA_ID_2214644; Annot_ID_136313
tctgtttcttggcaacactgtttttgttctttgtccaggtataaattataaatgcggttttagtcacacggaaaaatccaaagggagatgccattatatcatttaaaaaccatatattataacaaaatcattactggagtttgcatacatcaaagtttcacagaggaaggcgccggagaagaaccaccggaatttggagattgacagaaaccacgaagaacgttggtttcatcagaggtaaagcctagagacgtgagcatcgcaggccaacaatcggtggtgatgacctcgacggcttgacagcaatcgacgccgagtttggtttcaccgttgaggaagaagagaacgatttcgttggtgcatgatttgagctcataaagtgcgttccaacactccattagtcctcctccgttgagtcttgccgctatgtttgtggaatcttccgtctccgggagagttcttccggagatgttgagaacgaggaggatagcgatggtggcaaagaggaaacttgtgttagaagccattattctttctttttggggtttttgttttgttttgttttgttttgcgatgattgagttacgagagttctgtttttatattgtggttttggatggattcgaagcttagtggtgatttaagagtaattaaaaagttggattagtgggaggaatgggaaaggattgacggtaaatagtcacttaatcatgaaacgttaaagcatttgactgtagaaacgtatttagtatatattggcatgttgaatcagtagcgctcctattggagacgaaggtttaacgtcgtgttacagaaagtgaaccaatgcttttgtaataaactcattgaactttatgctatatactgtatatggtttttactactcattgaactttatgctatgttttctttaaactccttgtataaatatatttcttaggaattacttttaaattatgtacaaagacatgtattacagaaaaatttcatgttgtaatctaaataagatgctatagtgttgtcgatgtgtcatgtgtgtcactatccatcattaaacatgtggtaaaattacagtctataaccatcatctagatcagatatatctttttaagaatttaaacttatggtcaaattttcacaatctcgaatacaaatatacaagaatgtatattctcaagtctcctagtttctctgttatttgcatcttttgtgacttacaaactatgataacttttataaaatagatataattagctatcttcttggacaagttacctctcttaggttgtttctgttgtttactatgctctgattcttaacaaaaaatggtttattttgttctgataatggttttaagctattccagctcagtggatctctgtccttgtataaacgcaatgataaaccaaacgcaaatgcttttattccaaactcaaaatcagtgaacagacattttctcaccatacattcatagaaagctatatattataaccattactaatgtcttcttacgtcagcgaggaacatttatcaaagtttgacaggggaaagagctggagaagaaccgccggagttcggagattgacagaaaccacggaggacattggtttcctccagtgtaaagccaagagaagtaagcatcgccggccaacaatcagtggtaatgacatcaacggcgttgcagcaaccgtagccgagtttggtctcaccgttgagaaagaagagaacgatctcattagtacatgacttcagctcgtagagtgcatcccaacactgcatcagtcctcctccggttagtctagccgctatgttggtggaatccgccacgggcgggagtgctctgctggagacgttgagaacgaggagaagagtgacggtgacaaagaggaaacttgtgttagaagccattgtgttttcttttgaagattttgtgttgtattgtgtgatggtttagaggatttggtaagagctgctatttataatactgtgattatgaaaggatttttgaggtttaattatgattaaagatggtttttagtggaggaagtgggagagggcagagagttaatgattttacttaaatcttaaatcatgtaacttagagaatgattgaataggtggtcttaacggaaagatacaagcgaagagtcaatggttacttgataaatatagaaactttgaagattgtataacaagagtggctgtaatacagtggttagtattctacgttgaggccgaagggacctgggctcgattcccagcagacacactatctttcatcataatgtcttccaacacttttagcttcatccacttatgcacctaacgcttcttctctctatatgacacatacaggtggacacatagagggaaagtcagcttttttcttttctaatttgtctccagaagttttaccatattctccgctttcactcaaatcttttacagagatcttttcatctcagtgagctttcactttctttcatcctcaacttcagatttttgtctcccgtatagtttttgttgttgttgttgttgttattttctctttctctctgtgttccgtgtgtctttctctaaaccctagaatttcacattgcttctgtgtcactcttcaaatttctgaatagatttgatcacaaaaacgtaaaaagggttttcgtattttgtggaatcacattgcttctgtcagtctccaatttctttgacccggaaatattgtttctttttttccctttttcttttgtaaatttgggattttttcggagcttttatttttagttattgaaaacaaaaaaaataccaaaaggcaagactcggactcagtggttctccttctcccttttatctagtgtgactgcgcatttcttgtaatgggagtgcaaccgtctggatccattatccgggtagggtcagacccgttcatgttctctgagctgaagaatctgtaaaaagatacactttttttctgtttttgtgatctgatcggactagtgaatcatg

SEQ ID NO: 25190 - DNA, 3003 bp, Unknown
  misc_feature (1)..( 3003): 2750-1469P.txt file - cDNA_ID_2703856; gDNA_ID_2214645; Annot_ID_188491
aatctacactatcaataatgtgttcttgttttgcttcgtctagccaatttatttggcataaacacttggtgttttaatttggtttttctaaaattctactgttgctttatctaaaactctacttgagttttgttttgtttggtgtttgcgtttgctttttggagtgttttcttttgaacttttgctcaagtgattgattgctttttggagtgtttatcatcgagtcgttagttatgtagccactattaattagtcgtttgaaaagtagatgaaaattaagacttgaggaaatcaaacacaatccataatttgaattcaccccgaagataatgatcagctgctattgtaatcgtcaggcttcaagtgtatataatttatatttgtatataattcataattcgtatttatttatttatgtataattatttgaacacactccataattcgtattcgtatttatgtatatacaaacacactccataattcgtatttatttatgtatcaaacatataattagtaaactaaataaagacgaagaaacattattgagtagaatagaggcatcgaataacaatattcgtcggcctaatcaagaatatttcttggaaattcgggttgaaatccacatatggaagaatcttgaatagcacgtactttatcaatttaattacatccctcttaacggtctagctactctaattatcatctaaacctttttccttgtacgttatctcataatttgcaggactcttaatcattatcacatttcaaattttcaatattttactaaagagacgtctcgtgttcgtgcgtagctctatattttctggtttacgtaaaatagttcatgattttgtttagcttaccttttgaaaaaaataagcgaatctttcttcctttacttttcttccactcattaaaatgttctctctatatataaatgataaatctagtcttctaatcatatactctctataccacacatatctagaacaacaactagatattcaatattagctctaatggcttcttgtgacacacctgatgcgtttgcttggcttcaaactcttcctcctctttctctatggaaaggaaatttaatgtccatgtgtatttgctctccaaattcatcacacccatctttgaacttcactcttactcgtacccctcaatctccaaactttttcaccttctcgatagtagccaatttcaagactcctattactctctttatttcaaaaactttcagaaccattagcactaattcaactactttcctcaatgaaaacgtcatatctactctattgatgggttttgtcgacgttgttctcaactataacgtcaagagaaccacttgttcaatccaactccaaaacctaggctccacttctaacctcaaagacgttttcaacctcgctttcttcactttcgtgttcctcatctgcatctacgaggcgccaacgagcctgagaacaacttgtctcaaaacggtgaaagatcagctggtaacttgtaggtcaaggcagggctctaagttgctcatggtgcaactaggctctaaccttgaagaacaatggatgagatcgctgaaccttgcaataaccaactggatcatcgagatcaaagcgtttcagcatctcaagtctccttctcctttgttttcatatgctttctcgactcaaggtctatggaaagttcatatgtattgtcctgtggtagcaatggaaatggagagcgtaaatagttctctaaacgacgagagattgttcttctcgctaaactatcatcaacttgaaggtgtaatccaattgaaccacaggatttacgttcgtgaaaagtggtttaacgtcgcagtaaatattgacaacgtcaggtatcgtaaaattgtgtgtaatcaagcatacataagtaatttgttcatattaatttctcttaactatagatattgtttataactaggtgcgacataataaggcttgtgaacgagaaactattatcggaacgtggcatgggaacagaggaaaaacatttcccctcaagaatatcattgcaactaacaccaacgaatcaatcaaacatcttaatggtatccgtacaaaaatcttcagaaaacccattgacagaattcgaagtagagaaaggcatagaagcaacaatagatccaccaaacacattctttggactaaaagtctcagccaacgagaccacaacaaaaagcatgaagccatggaagttcgaggaatgggttcatggttatagcgccaatctcacttggtttctccatgatcttgacgatggaagagaagtttcgtcctctaaaccatcgaaagtctcgatgatgaaccctcgagcttggttcaagaaccggtactcgagcgcgtttagaccgttcacgaagcaaggaggagttgtgtttgcaggagatagttatgggcaaagcgttttgtggaaagttgataaaacggctattgggaaagtaatggagtttgaggttaaaggttgcgtttggttgacttattggcctaacaagcatcatactttttatagtgatactagaaagttggaatttaaggagatgctttacctcaatcttccttagatatttcttttcttactttcaccctaagcaaaatattcccctagtttgttgcttttttcagtaaagtttgtaaaataatacttatgatggaattattgaatttagaaaatacagtattgtgcttttctaatgacttcaccgacataaagaaaaaaagttttgtatatatgaatatcaaagtcgtatatagtccatagtttttttccgttgttgttatccataaatttatttttcaacattattatacgtataatttggtggatctaacataaataaaatcatgtagtagaagtttttttttatttttgaaaattggagaaccacacaagagatggcaataaaataaaatgaaaagtctctatttgtagatctagagcaatgcaaaaagctgacgtgtaccaatg

SEQ ID NO: 25191 - DNA, 3003 bp, Unknown; identical to SEQ ID NO: 25190
  misc_feature (1)..( 3003): 2750-1469P.txt file - cDNA_ID_2703856; gDNA_ID_2214645; Annot_ID_136355

SEQ ID NO: 25192 - DNA, 1146 bp, Unknown; identical to SEQ ID NO: 11173
  misc_feature (1)..( 1146): 2750-1469P.txt file - cDNA_ID_2703868; gDNA_ID_2214482; Annot_ID_133278

SEQ ID NO: 25193 - DNA, 3000 bp, Unknown; identical to SEQ ID NO: 13707
  misc_feature (1)..( 3000): 2750-1469P.txt file - cDNA_ID_2703872; gDNA_ID_2214645; Annot_ID_136351

SEQ ID NO: 25194 - DNA, 3000 bp, Unknown
  misc_feature (1)..( 3000): 2750-1469P.txt file - cDNA_ID_2703882; gDNA_ID_2214645; Annot_ID_136344
cccacgatctcgtacgtacacgtgtctctcatccgcagcctcatcatcaacacatcacaatctcacttttacatatatctccctcgcctcacgaaaaatccattcgtcttctccaattttctcgcgaagaaaactttcctactttgtttcaatccaaacgagtcaaaatgcttctcaagactgtttcttcatcttcttcttcagctctctcgctggtgaatttccatggcgtgaagaaggatgtgtctcctttgttaccttccatttcatcgaatcttcgagtttcttctggaaaatctggaaacttaactttctcttttcgcgcatctaaaagctcaaccaccgacgcgctaagcggcgttgtcttcgagccgtttaaggaagtaaaaaaggagctcgatctcgtccctaccagctctcatctctcactcgctcgacaaaagtactcagacgagtgcgaagccgccattaacgagcagatcaagtaggttattctttctcaccccagtctcttagattcggtattataatctggttgattggctataagatttggtaacttggaacctcatgttgattctgcttattgtttatgaacctgtgaatttgaaattcttcaatggattttggttgcagtgtggaatacaatgtctcgtatgtgtatcacgctatgtatgcttactttgatcgggataacatcgcgctcaaaggtcttgccaagtgagtctccggttattcaagagtgttgatattttcggattttttttgtttatccatagttaattgttggtttcatggaatcaggttctttaaggaatcaagtttggaagaaagagagcatgctgagaagttaatggagtatcaggtcttatgaaagttatttccatttgtttaccttattggagctaatttggttctaacatgttttagtttttttccatgaattgcagaacaaacgtggtgggagggttaagttacagtccattgtaatgcctctttcagagtttgaacatgttgacaaaggagatgctctttatggtaagctcaaaaatgctaacactaataatcccaagtgaaaaaacttctttagtttcatatgtctgccacattctaagaaattagatattgacaccaatgattttgttaagcttttgaagagattgcatattttcactagcaaagactgaattttatctgagttcttaagtattatgaaaatgtatctctcatatggagattcaagtctcaatggatataggaattttaacatacaattctgtgatttgttgttgcaggcatggagcttgctctgtcactggagaaactagttaatgagaagctcttaaaccttcacagtgtaaagaccatctcttcttgagttcatactatatatgtcaaatccgtatttgagaagtaaatctaatcttcactcggcaagaactgttctcagtttggtaatgctttgcttcaacaggttgcttcgaagaacaatgatgtccacttggcagattttattgagagcgagtttctgacagagcaggtaatttatttggtgttctatgttagtggcaaagagctactgttgtatataagctatcaaagagaatctaataggaatttttgataaaataaaacatttctcaggtggaagcaatcaagttgatctcagaatatgtggctcaactgcgacgagttggcaaaggacacggtacataaataatctctcacattttgttctaatctataaatttataaaagaacaagaaaatccacttattcatcctacgtcgtgcctcaaacttggttttaatatatgtctttgaatgcttgtgggtaatttcaggaacatggcatttcaatcagatgcttctggaagggtaagcagcttcgagggactcttgtgtctactgtgtttctatatgtgtctactttatgtttagttctttagcttttacgattttgtgaggtagtagacttctttttctgtaagagacaaaagacatgatcacataactttatattctggtataaggttcatcaaacccacctggtgatcgattctacatcggttcggtcagaatgtttttggactgccaaatgtggattcgagctctagtttagtttgctccggtttaaacgcaattcatgaataagcaaaggaaatcaatccaaacttacgttgtgaaagaagttgggccgaaaatgtctgaaacccgaataggcttttaacccctaaccccttgaaactatcttgtggcccaattaaaacctaattgtttaactgacacggtgccgtttaacttggcatctttgacgcaagtcgactcattttccgtttgtgttccttgctcatttcttatctctagaaacctgtctgatttgctccgtcgcctaaaaagtctaaaaccctaagtgtctccgcctcgtagctttacccgattcaacgaagagtgaattcgcgtgagctcaagcagtatcgaaatctaccaatcatggcgagtcaaacaccgaatctcgagtgtcggatgtacgaggcgaaatacccagaggtggatatggcggtgatgatccaggtgaagaacattgccgatatgggagcttatgtttctctcctcgagtacaacaacatcgaaggcatgatccttttctccgagctctctcgtcgtcggatccgaagtgttagcagtttgattaaggtcggaagaattgagcctgtcatggttctccgtgttgacaaagagaaaggttacattgatctgagcaaacgtagagtcagcgaggaagatattcagacttgtgaagagaggtataacaagagcaaacttgttcattctatcatgcgccatgttgctgagactctttcaattgatttggaggtaaaatatcgtagttcaaatctgggattatctactggatttggattttgcttgttagagatattatcaaatatcatagcttagtgatgtgatcgttgaatagaaattgatttgagctttcatg

SEQ ID NO: 25195 - DNA, 3000 bp, Unknown; identical to SEQ ID NO: 6142
  misc_feature (1)..( 3000): 2750-1469P.txt file - cDNA_ID_2703885; gDNA_ID_2214645; Annot_ID_188479

SEQ ID NO: 25196 - DNA, 3000 bp, Unknown; identical to SEQ ID NO: 6142
  misc_feature (1)..( 3000): 2750-1469P.txt file - cDNA_ID_2703885; gDNA_ID_2214645; Annot_ID_136343

SEQ ID NO: 25197 - DNA, 3000 bp, Unknown; identical to SEQ ID NO: 6141
  misc_feature (1)..( 3000): 2750-1469P.txt file - cDNA_ID_2703889; gDNA_ID_2214645; Annot_ID_136341

SEQ ID NO: 25198 - DNA, 3000 bp, Unknown
  misc_feature (1)..( 3000): 2750-1469P.txt file - cDNA_ID_2703927; gDNA_ID_2214647; Annot_ID_188534
catatgtcttcatttcccttaaccttaatcttaacatagtaaaaatctccttctgtgaaatctatatattttttaaagggagcaatataaaatcttactgtgatatatatatatatatatatatatatatatatatatatatatatatatttcttcattattccttaacttatgattcttcaattttacgtttgaatctaatgatggcagattggtccttgcttccgaatgacttactagaactaatcgtgggtcatcttgagacatctttcgagattgtcctcttccgatccgtctgcagctcatggcggtctgttgtacctccacaagatcaatcccgctgcttaagtatcaaaactcatgatatatcattcaatgccgggttttcgttcagcggccaaccaacggatcatcctctgtttggaagcacactaacaaagatcccaatttatctagtgaaattctggactccgtttggtgatgattatttattggcagagatgcgtgaacgagagggtggggaaccgatgtttttgttgtcgcccttgtcatctaatcgtattatatatggaatgggaataaataaagtgttgttcaactctcttacctcaccaattatcccatttggacaatactacgaggttggtgttcaaaagctcatattattttttcaaatttttatcttttctttttgataaattttgccacttagatagtcatttaaccaccactttttagttattatggtgcacgagattgttacttatttcattgtctaactgattttgaggtaaatcagctaatgtttggaattctttgtggtattaatcacgatcctgtaaataaatatatacaagtcacacaattcataactaagatatataggatttaaactgatatcaaacccatcatattagcagcatgtaatcttatctctaataaattctccctgaccttgctaattaataaataagaccgcaaagttggttttgttattattattactattttccttgtgtcttcaatttagccccataatcttcgatgcagataacctactctgagaagcaacccattcgttaccgctatggattaccctgtcatttatgggataaattagagtgggtggagattaccgagagagttgaatttcttaaactggatagtgaagatagcagagattttgcggtgctttttgctggaagaatgtgcaatttggtgatgtatagaagccgtaacatgagttggactcaagttgtggagcatcctgaaaagtatgcatatcaagatttggttgcattcaaaggaaagttttatgctcttgattcaagtggaaggggacgggtctttgttgtcgaactttctttggaagttatggagatcccctcagtcagaggatcacaacagtcttctaaagaaaatctggtgctgtcaggcgaggagttgttgctagtgcaacggttcacccctgaagtgcggcattatgatgaatatctatatacatggttcagagtgtttagacttgatgaagaggagggaagagaaagtgggttcaagttaatgactctaacgaccgagtgatctttcttggagctcagacgaatctctgctgctcggtacataagctcccatgtgcaaaggagaattgcattgtgttcattgaatcaaataattgtttcatcattgacaatgactcagtccttttgtttgacttaaaaaccagaagaactagtactgcgtttaatgaatgcaaaggctacatgggcgtgttcggcgcaaatcttgaatctttgttgtcttgtggacttgtgaccattcctgacccaacgttaagctttgatttcggttatgattatgaatgttagtctttttattctggattccaatatgacagtttagatgtaacatttaaactatatgaaataaaccatccgaaatacctaaaaactatatgagccagatattttatttaataatttatgtgttgtaatatcgtatgttatagttaagacatttgttaaattttagtgaaacttgttcaattttatttagtaaaatttatttttaaattgtatattagctttatgttttataatatttccaactgggttctaattaaatataaaaatctaaatatttgtaaaatggagaaaaataaaaatttatcatgacatatgatcttcatttcccttaatcttaatcttaacataataaaactatctttctttaatttattatatatataggattttactttaattattttttaaaaaagattatacttttaattgagttataaatgtgaaatttatatatttttaaaatggagcaatacaaaaacttaacgtgatattcagttttacgtactcatctttacgtttgaatctaatgatggcagattggtccttgcttctgaatgacttactaaaactaatcgttggccattttgagacatcttttgagattgtcaacttgcgatccgtctgcagctcatggcggtccgttgtacctccattagataattttccgctgtttagatatcaaaacaaaggttataccgtccaatgtcggcttttcgttacacggccaatgtccgtttaaaagcagtgttaattgcacactaaaaaagatcccaatttatcaaactaaatataatagagtgaaattaaaaaaaaaaatcttagaatgtcaaactaaaatttaatgagtaagaaatgtgtcacgaaagtataatgccaaaagtcgtattatgaggcaaagttagaaaaaccttgtcatattatataagataaaataggattttacactaattatttttttaaaaatatattatacttttaagaaaatattatactcttaattgggttataactgtgaaatctatatattcttaaaagagagcaatataaaatcttactgtgatatatatacttcttcattatccttaacttttaattcttcagttttacgtacagatctttacatttgaatctaactatg

SEQ ID NO: 25199 - DNA, 3000 bp, Unknown; identical to SEQ ID NO: 25198
  misc_feature (1)..( 3000): 2750-1469P.txt file - cDNA_ID_2703927; gDNA_ID_2214647; Annot_ID_136370

SEQ ID NO: 25200 - DNA, 3000 bp, Unknown
  misc_feature (1)..( 3000): 2750-1469P.txt file - cDNA_ID_2703931; gDNA_ID_2214647; Annot_ID_188535
tcgaggtcttgatttagtccaagcttttacgatgatgtgaaatgtcttatggtgatctcatttctgtgaaaatattgtgtagatggttgttgtatagataactggagagattcatgaatcatgtagattatcttgttgagttttttgcagattcttctggatattagtgtgttaatggagggagttggaggtgacgctgcttcaatggcatcatcacctgtacaacaacgagcgaatgaggcgtggaggctgtatcagtattacttagacaagactaagcctcacgcggttaataggtggatcgggactcttgtgattgttgtgatatactgtttgagggttttctatgttcaagggttctttatcgtttcttttgccttggggctttatgttctgaactagttgactgggtttttatcaccacttgttgatcctgagcttgatacgtctgatggtccaatgttacccaaaaaaggttcagatgagttcaagccattcatccgttggcttccagagtttaagttctggtaattttacagtacaagctctctttatgtgctaatatctgctaagctctaaagcctggttaaaaaaatgttatgccatggacaaatcaagccatatgtgagatatctagagagtgattttgagtgagaccagaattaagtagtgcctataagcttagggacagtgatgttatatctgtttttcgtgaatgaagacaagtgaaatacgtttagaagtgacgtcatcttgtttggtaattcttttgtgttagagtgtgagctataggttaatttatatgttggcaggtactttatgactaaggcgttctgcatagcgtttgtgatgacattcttttttttctttgacatccctctctttcggccggtactactcttcagtctcttctattggattgctctgtttgtgctgacaatgacgcgtcaaatagaacacatgattaagtacaaatacatccccttcaatctaggaaagcaagtaagttgtgcatgctaatgaactagtccaaacgtttagaaatcacaaaatgggtttgatgttgatatattgcgtattactcatttcccataacagaaatatggagggaagaaagcttctggcagcagcagctctcgcgcagactgaagcatatggagaagtagtaatgttaatatgggcatgtccaccccatttaaagtccgtcccatttaaaacccacctcatttaaactcatttaactttaagatctattagagttgtccatttaaacccatatacccatttagacccatttagatataaattctaaaagcaattttagtaacttggaatacaaggcaactatttaatcaacataaaaatatgtctaactttttataaaacaaactaaaatcaacacctaccattaaatttatctacgcaaatttaaaatccaaaagaggcattcagtcaattgtctaaaagaagaaaattcaacatttcattgtttcgactttcgtgaggttaattggaaaccatgaaggcgtgtgtcatggatgtatggattcgtgcaatcaatatcaactagggtttcagaatccaatgggagaaatatgattacatttcaatctttgtgacctcttttgatgaataccaccaatcagtggcaaaatgaagaaatgatcaaggaagtgacgcttcgtaccattgcggaatacaacttagataatgtcagtgtgttttgtggattctctacacttcgaaatttggtattgtgttttgattctatggttcttagttcatggaacaaacattgtgtttgttgagcacgtctccacgaatttcgcgttttactggttattggcacactggctcatattcgaggatagatatctgtcttccccttctccaaagtcgaaactccatcaaatagaaacattacagcgcacaagcttgtttcatattcctatttttagggtcaaacagacagaggaaagtgcactttattcctagtttcttttgatctttgtattctttatttatccgagctaacttctcaacttagcggtcctttcacatgacatttccgctttccttcatttgcaccggtgttatatttttgttacatatagaaatttaatagaatagtttaggtttgtaatcaaaatatactaatagtgatttgaaaagtgtaaaacagggatgaagaattgatattgaataagtaaacattaagagtcaatttaccttctcatgatgtgttttcaggctaagtatcaagaattttatccgagttacttgtatcacaaggttttctattgtgtgtgttggtaacttggtatgcagatataaaattgagctaggtttctttcaacagagcctgtataagaatattcattttattcaagtactagttagtaaactaagaaaaaagcatgtttaatcttaaaaacaaaaagaagcgaattaagctatttcttgtcttaaaaagaaatcaacatttcattgtttcgtgagggaatgatttactatttgctctccggttattctcaaacacacgaaatcaaccatccgaaatacctaaaaactatatgagccagatattttatataataattatgtgttgtaatattgtatgttatagttacgccatttgttaaattttagtgaaacttgttcaattttacttagtaaaatatatttttaaattgtatattaactttatgttttattatattccaaactataacttataattaaatgtaaaaaactaaatatttgtgaaatggagaaaagtaaactattatcatgacatatgtcttcatttcccttaaccttaatcttaacatagtaaaaatctccttctgtgaaatctatatattttttaaagggagcaatataaaatcttactgtgatatatatatatatatatatatatatatatatatatatatatatatatttcttcattattccttaacttatgattcttcaattttacgtttgaatctaatgatg

SEQ ID NO: 25201 - DNA, 3000 bp, Unknown; identical to SEQ ID NO: 25200
  misc_feature (1)..( 3000): 2750-1469P.txt file - cDNA_ID_2703931; gDNA_ID_2214647; Annot_ID_136371

SEQ ID NO: 25202 - DNA, 3000 bp, Unknown; identical to SEQ ID NO: 13725
  misc_feature (1)..( 3000): 2750-1469P.txt file - cDNA_ID_2703938; gDNA_ID_2214647; Annot_ID_188543

SEQ ID NO: 25203 - DNA, 3000 bp, Unknown; identical to SEQ ID NO: 13725
  misc_feature (1)..( 3000): 2750-1469P.txt file - cDNA_ID_2703938; gDNA_ID_2214647; Annot_ID_136376

SEQ ID NO: 25204 - DNA, 3003 bp, Unknown
  misc_feature (1)..( 3003): 2750-1469P.txt file - cDNA_ID_2703965; gDNA_ID_2214647; Annot_ID_136374
atatagtattatttatacataatgtaatactctaataatcgataagtttaatatcatgatttgttttccttattactaaagtatgattgcttatcttgcctagttgataactaatgtgatataacatcaatataattattcgtatatttttaaacattaaattaagtttagaaatgtatttcctgataaattattgtttaccgaaatactcttaatactttaaacttctctaactctatcatactcaacataagtaaatggaaaatcatgctggataataggtttagatcgtgctacaaaagtatatttttaaacattaagtgaaaaagaagtttaaatgaattggttttactttgccagattaatctgctaacttgctgtccgcaataagtcaatcacttcagtttgcaatccgtgatgggccaacctgcttggcctgctatttcgtggacataaatattaatgtctaaacccaccccactacagtactatttggactaagcccgtttgacacctttactaattataaccactagtgagtagttatataagattatcttcaatagtagtttcttagaatagttataagagaaataggtataaaatttaatgtttaattcatataattggtaagagatgactcttatataagagtctaaatacatcttaagagccagacacgtgttgtgatataagtgggagaatgagaaatatttgcaaaattctgtaattatgtactactaatcgttttatgtatgtttatgtcatgtatgtttaaactttgatatcatgtatgtttcaaattttatgaattgcaataattattaaaatttttaaaaatcaaatgtttatatattttttaaaaacctcaacttaagagcttacgattggacattgccaaacatttaaacttttatccaaacttttaacttcaaaactttcaaatcaattataaaaatattgctaagaatctttgctaagaattcaccattatagattctctaacaaatcttggcataatcattattattaaaaaaaactttttgtagagttcttgttttttcctttataatttacttttctttctctttttctttttttttggcagaatttaacaattttttaataaaaatttaaaaatatagcactatatatgtatcagttaactaacataaaagataaattaaatgaccaatggaggaggtgacggctccgacgatggtggctccaacgatggtggtaagttcggcaacagtgtgaatctagtgaggacatgcggtggatccggcgagtggttctcgcgaggatggtggcttggaggacggcgatggtggtgaggacactggtagctccggcgagggcagtggttccaatgaagatggtggcttggagttggaggactgcggtagtggtgatgaagatgacggcggtagtggtggttccgccgatagcgaaactgtggtggtgatggttgttgtggtggtggttaatggtgatagtagggaggataaaattgtcatattatatattatacatcaactctaatataaactttattgtataggttagtttcctcatcatttgctattgcaagttatttctctctctaaagatttgatgtaatttaatgcttacttagccattttgcacgacgcaaataaactaataccgcaaaattcgtgattacgcaaataacattatctaaatggccaaaaataactcatcccatctcttcttttttttttttttttggtctaaaactcattcaatctcttctacacttgcattttctaattactgaacaataaactgcttcatacaacataattttaaatatgtttcgtttgagataaattgttcgacattactaaagattttggctgatcaaaaaatttatcaacctttaccacgattcaattgcctagtcataggcacgaagactcttgttttcgtttacaagcatttgaatgctaaaagtacatagccgtctttggagacatgatctaataaaaaaagatctacgttgacgtatagaaaacacattgattaaagaaagatatctcttaaactttatgggcaagaagaagatatttttataacctgatagacacacatggcaaaattaaaaatatctagatatatgtacagttaatgttcttgatattattgtgcccatttgcattagacatggcacaaaaatgaacacgtcatttttcaactaaaataacttttcaacttattaaaaaattcgaagataactataattcgtcgatgcctatacgaaatacgaggttctttttaacaccttctttggacaatagatattgagatttacatcttctgctctttccgacaaaagcccatctcttctgtcttattttcttctgaaggttctgttttttttttttttttttttttttttctcatccaaataagtacttgagagaattataagaaaattcgtacttcgtttctttggacagtgtacctccacgtattcgtctctggtaataatctccatcacaaatctcttttttttttcttttgtgtgactcttgtttctggtggtacagtttgctcatcgattgaatcgatttgtatttcttccacacaagaaaaatggatttgtacttgtttctggattttatatatctggtgtaattgtaagtataaatttgtggaattagcttcttttttttttttttttttttggagaatttactgaaaaagaatgtgatcctagtttatcaaaaaaagaataagaatgtgatcctcctcacatttgtttgatgaaactttttgtgttctttaggtttaattctgaggttgtgtgaaatttggtgaagagaattttgagatcatagtaattatccacttgcttgatgctcatgagctctagtttagtattgtgtttgttttgaattatgattgagataaaggatatttacttctcaggtgatttaatcaaagcctctggagaagatctgtaggtacgtacaaatg

SEQ ID NO: 25205 - DNA, 3000 bp, Unknown; identical to SEQ ID NO: 13746
  misc_feature (1)..( 3000): 2750-1469P.txt file - cDNA_ID_2703969; gDNA_ID_2214648; Annot_ID_136389

SEQ ID NO: 25206 - DNA, 3000 bp, Unknown; identical to SEQ ID NO: 13745
  misc_feature (1)..( 3000): 2750-1469P.txt file - cDNA_ID_2703973; gDNA_ID_2214648; Annot_ID_188572

SEQ ID NO: 25207 - DNA, 3000 bp, Unknown; identical to SEQ ID NO: 13745
  misc_feature (1)..( 3000): 2750-1469P.txt file - cDNA_ID_2703973; gDNA_ID_2214648; Annot_ID_136390

SEQ ID NO: 25208 - DNA, 3000 bp, Unknown; identical to SEQ ID NO: 13743
  misc_feature (1)..( 3000): 2750-1469P.txt file - cDNA_ID_2703981; gDNA_ID_2214648; Annot_ID_136392

SEQ ID NO: 25209 - DNA, 3003 bp, Unknown
  misc_feature (1)..( 3003): 2750-1469P.txt file - cDNA_ID_2703998; gDNA_ID_2214649; Annot_ID_188602
ggagttgctcgaagttttttgaagcttatcataaaattgaaccgagtttcttcgcgttttaggcttgaactggagaccggcaaatgggaagggacttaccaccgatacagaactggaccgcgatggctatcacagttggcggtgttcggcgtgatgcatgcaggggtgtccaattacctgacgcgtggctcggcggagttccatcactcaacacgtgtcagcatctaaagattaggattttaatctcgaccgttaaaattacgcttgtactttattttgggcgtttccctatgtaaaaagtccattgggcctttcttaataaaatcgttggccgactaaaaaaaaagactaaaatcttatcaactatatatacgttaaattgagattagtatccacagatttgtgcatcacaccacacaattgctacttgtaagctaccaaattagacaacattaaaaatttatatttttcatatattgattatggttttttgtagtcataagtttttcttctacagaggaagaaaaaaaagagtaaaaataagttactttcttttccgcatcaccagttatattaaactagataaagcccgcctaaataggtgggtgtaagatataaattcaaatttttatcgataattttaaaatttgaatagtaaatagtgtttcacacacctttttaatatttaatttagtaatttttgtattaaacaaaatattaatcatatacattcgattttactatacattttaactatttatttgaggataattaaatctattttaattttatacgctccatcttatagttgatatttgaattttatatattaactcatacacttttcagcctacaaaaaaaaaaactcatacacttttcaaatatttaatttagtatttttttcaaccaaaatttaatcttacaaattcaatttttcaaaacaatttaaatatctactttatcataatacaatacattttgatttgattgtattcaaactgaaatacaagtcgatttgtaatacaaatatagttttagtctatacattccaccttatttttagtttttctttttagttaaaaaattaaaagttaaatattttaaatatctatgtttcttttatttagttttcctatttatttaagaaaaaagtaaatattttttgtcatgtcaacatctgaacgatagacttgatacgtgtcacgatcacgcgagttagtaactttgaaaaccatactttatataataagattataggaaatatactctattctacaaaaagtcattcatgaaccaatttgcttacatgagagaaaaggcaattacgatttcgagagttcttagctaaacaatctgctcgagtattaaaactacgagctaatgctgaaagaagagaaaaaacaaactaaataccaaaaagaggccaattccgttgcaaaagttggtcaatcgtcttggtgatcaacgagagagatcaaatctgcgcaatcggtagcaaaggtatctgtatcgccaatgctgatcatgcattccattgcccctagcaaagattcaagttcgacgtaaagcggagataagttttttcgaagaaaaaaaaagttactcatgtaagcgagtaagtaactcaaaaaaacaaaaaaaaacctagttttctctctcgcaaaaccagccgccgtctaaagaggttttgcagttttgaggctagaatgcggtggctaccttagcactgattctggccttgtgcgtctttgtttaatttcgtctgtagatttcttccttctcgtttttatggtgatatggttgtagggttgatggtgttggggagtgcggggaccaatttctcttctatatctgtttcggaggttggtctctatgttgttggcagctcccgtttttaggctttgtttcaattttggctgtatatgcggctggggttttgattgatttccagatcttgatctggttttgtcagttgaagctatgtcagtgtttgtcacgatatggaattgtttccttttgtcttcccccgttgtgttctgtgtgtttgcagttgaagatgaagtcgttttgagttggtggatgcctctggtgatgggttctgaccgggttatgtgacgttcttgttgtggactaggcgacgactcgtcagggtggtggctgtttggaggcgatttaggttgtcttccggtgcgggtatttggctgaaactgggtcggcaaatgcatgcgtgcaagaggtgtttgtcttatttggcttgtcatttggcgattctcaagggcttcccttgttcctagtttattttcgtcttctcgtgtgccttggtatggtgtgattgttgtctctctagtatcatttggttcttgctttcgttcctggcggtttgacttcagaaagatgtcttaattttgtggcattaccagtcttattgctgcttcacgtgttcttttggaaatcttagtgagaacctctatggaacaataggtcagcttagtgctttggtctccatctcttctttttgcgagtttatcttgttgtttttacctttcttggtaatttggctgtctggtttttagggattagttttcctccttttggtctttgtctctagggatttttgtttatccgccggcttatgtatgattttcgacttgtatgttctcgttgcaattctaataagataaaaaaaagcgagtcacatatcaaaatttcaaaaagcttggtacagttttcaaaacatgtaaaacatttccaataaccgttttgaaattcattatttcaataacacggtttacttaaccggttctacgtagtccacccttacccattgacatttgacactctgtcccgatataatctcttttgacgaaagtcaggcaaagaaaaaaatgagaatcttcaaataaaaaaaaaagaagagactacggagagtcaaaaacagtgagagctttctttcatcttcagccagatcggagcaatcttctccatagattccgtgaaacgatg

SEQ ID NO: 25210 - DNA, 3003 bp, Unknown; identical to SEQ ID NO: 25209
  misc_feature (1)..( 3003): 2750-1469P.txt file - cDNA_ID_2703998; gDNA_ID_2214649; Annot_ID_136400

SEQ ID NO: 25211 - DNA, 3003 bp, Unknown
  misc_feature (1)..( 3003): 2750-1469P.txt file - cDNA_ID_2704026; gDNA_ID_2214649; Annot_ID_136398
gagcactttcacaattaatagaaaacactgcattatacacttccaattctgtgacatcttgagttaattgttgattcatatccaatgaaacctttgcttgaaaaccattcaaaaaattatcctggcctattggataagaagatgaaaaaagatgctgaaagaacgaagaagcaattttccctttctcactaatcctggtgtgttcttgtccattttcatccagaaggaagctcaaagagttccctaatctagaagatttcaaagaagcatgaaaaaaccaatgtttttatcttcagcaaacagccatttttgactacttttctgtctccaaaagagttcatcatcctcatcagcaagacccaattgatctttaatatatgcaattctaggccaatttggaaactcataacttttcagcaaatccaaatctttcctcaatctttgaatcctactctaagcattagtatcagctgatttttttccatacactaatagctcttcgacattcaataagactaaagatagaggagtgagaaccttgagacattgcattggtccaagagttggaaatcacttgaatacaagaaggatcatcagctattcttttgtcataacaaaactgtccacgaaacaactcgttatcattaataaacttgactaaaacaggacgatggtcagatccaaatctctcagaaaccactggtgagaatttggaaacaaagaaaaccaagaggaattcccaaagcatctatccaatctacactgaatccattgaccatttctagtccctccccaagtaaagccattgcttgtactacctagttcatgcatatcacaagtattcaacatgtcttgaaaagattgaaacgaagaaggtactcttctcggacccctctctttcccgttttcgacttaatatcattgaagtcacctatcatacaccaagcttgcttccgatgtgatccaagactacacaacttatcccaaacctaaggcctaagatatgtcaccagatgcccataaacacaagaaacaaagcatactttatttctagaagaacactgaagatccaaaagatgtttatcatcaaaaagaatctcaatgtccaaatggcttttccaaaagattgctaagccaccacttctcccttgaggttctattgtatacatatagttataaccaagccaatcaataacttttgaaacaaactcgtcaggattcatagtctccatgaagaataaaatgtccgagatatgattttttttcatctccttaaggtgtcgaattgtccaaggattcctcaagccttgacaattccaactaaggacgccttactgatccaacggtggttcacttggaaccaccgtattcttgtctctcttgaaactttgagcttctgtaatgtctgagggttttcttttccttttgaacaccttttcaaaatgaggagaggcaggagactgaataaccttattcttcagagacagctcattaactagtttttctttcctgaactgaaaaggagtgaaatcctgcattatatgatgtttaaaccctgaagtggaggaactagcctcaccaacacatgtggtaaatccagtactaatgtccaaatctagcatctcagctaacaaagtattctctggatgactatcaattgcaacagtagctgatagaggatttgctggcaaagcatctacccttcctttgggagcaattgactgaaagggaaactcagccagcctcggtaaaaacatcttcttctgtttgcctttctcttgtaatgatctcacatcatgtttgatggaatctaagactttggatgggcatctatttttatcatgagttaatctttgacacaagaaacatctctttctaatctgttcatagtcaaaagaaattgtgacaacttcaccagatggaagttgtacctctttattgttacgaagtggattggcgacatgaaacaaaacccgaacacgaacatagtcctgaaactgtgatttttcagagtccatcaccacctccttcacttccccaatacagctcgtgatctctttaattgtgtcctgagtataatagttcaccgaaatattcctcactcgaccccagattggaagaaaattcagataatcaattggaggattctcaatccatctatccatgactacaccccaatttatcttctgtccaaactccaattttcataatttcttctaaatcttcctcagatttgaagaaaaattggaatcgatcctttgagagagcaacacctctaacccgagaagaaattctccaaattcgtggcatatctaatatccaattagacatcctttgattctctagattcaaaaacctacccaactaacgacagttgtttctgttaattgaacaaaagcgcggttgatcagaaagaatcagaggcttattgtcttaaatcgacatattctgaatggctttatccagctccatgatgagatcctgatagagagtaaacaactttcccgaactcgtcaaacctgatttgcaggaaacaaactccaagagaaaaaacagtgaagaaatccgagtaattcagatgataaccaacacagaactgagaatcacaaagcaaactctcgtaacagagaaagagtcagaactaccaaaaatccgaggaagaaaacaacaatttagaccggaccgaacacgtaaatatttctggtagaagctccgttcagaatagaacacctgagagaaaagtctttaggctccaaattaactgggacgactattgttttaacggctagtttcagctactaagagaaagaagagagagaaaaactttttgtcaaactctttttgtgaactccttttcttagatgacaacacttatgagaaaaaaaaaaaaaaattagttttgacgagacacggacataaaaaaaaaaactagggcagagtgactgataccaaaggagaaacaacaaagagacgaactgaagaaaaacctctcggaagaagatg

SEQ ID NO: 25212 - DNA, 3003 bp, Unknown
  misc_feature (1)..( 3003): 2750-1469P.txt file - cDNA_ID_2704034; gDNA_ID_2214650; Annot_ID_188627
attggtactttaactccgaatatttgtccttactgtacccacattaggctttgtcttctccaaataattagtttcactatttaaccgaaaaatctcacccaacataagagacaaataactaaagttgacaaaagaaaagacaaaaaaatgtgaaaataaagagagaaataactaagtttgcttggcatttatagatttttgtttgcaagctttctctggcggaatcctaacttcactgtaatatttactattacacaaaacaaatgtgagctgtgctataacaaaaatttcaataaacccttccaaattgtatagtttttttaattattattctcaaacaatcaataattcaggactgttgagttgtgaattgggtgtgccatgtcgatgataaaatccaaccactagataagtatatgattagatgatatgattagatgatatgattagacacttaatcccagtagcatcctaagggggttaagcacattattaaagtgattttatacctcttttcagtatttaaatctcatttagttttgttttgataaataattctctttgctttctactttatcaatcttaatatataaaacgaataatgtgattattagttaagtacattcctcttctaatagtataaaagtgattatgtttcttcataatcgtatcacgactgtatccagcacgacgttgacttttaatattcagtctcccacacatgcggtattaaattgggagatacagaaacaaatccaaaaaaaacaaaagttttcgtaaagattgttagtttatgtgtctaattctgttttattaagttacccaagcctaattattgagagaagtatatataaactactcccataattatttagatcatatacttaatgatagaatcatggaatttaaattgctacgaataagtcttatggttattgacttactgtataattgcatggaccgtattaaaaatttcattaccctacccaaagttgaaacctattctacttgttgttttctgcccaaccaccttaaatgttatttttctggttctttatgttaggagtttatgtgtcatcttttgtcttttaattccaaaaaattatagagatatatataattcagttaaacaaaaaaaaattaattagacacttacactgtagaaatatatggtaaaagaatttgaataaaaacttatgtatggtaaaatgatacgtatactaattttataaaattattaagcttgatcgttactcgtttataataaaactattttggtaaaacaaaatctaatatataatattgtatatgtatatatatacatataatgatttgcagcttgattagttggtacggggagcgagcaataattatgtttggatgggaatgggatactaaaacaaaagttgttaattaaattaatttaaaaaatagacatctacttttctcgatgaaactggtggagaagagcggtaatgagagagaccatacttttgattagaccaaattggcatctttcttgttattaagaggggtacatagtatcatcatcatccttaattaattagagtccacgcaataacaatagaagactctgtcctccccatttgtggtaaatcctcttctcatgattattgtttggttgagtatatgttttattctattactactcaccagaagaacattttcatatgtgattcgaatacaatgttacatttctaatatgagagataacatatgcacctactttttatacatgcagttgtatattgtgtgatgtatagttatatattttcgtctaatttctgttgagttcatatgtcatacctaatttgctataggattttattgactgaacaaaaaaaaatgtatacatggtctttatcttagaataatggatatatctatttcttttatttgatttgcttcgcaaatgtacgaatattcgatctttctaaatcgaattgaatcaaataacagatcgaaacaaatctaacgaatattttgtccaaccctaatattttttttaaaaaaaatgttagttgtttaattatattactaaaatcatgaaaatataataaatgttgtaaatgatagaaaaaaaaattgaaagaacgtttttctgaagagtttatataccttgtatacaaacatcttttaataaaaaaaacaaataattcatattaatggtgacatagactgcacccaaaaccgcagcgcaacagtgctgtaacagtattaaaatctttacatatacatatgtatctatgtatttttgttactattcgaaccgtatcgcactttttcgtaaaacgcagttactagtcagaaattaaaaatatataattttaaatgaaagcaaaaaattatcgtaaagtttacacttcaccgtcaaaacacagctacttatgtcagtgactcttcttctatcaccactacacgacaccaaagaaaaacactaacacactctctctgataactctcgcgtgactctcctccttcaactctaactggttcgtacccttcacgctccattaccggcaacgcgcttatcgtctggcacactcacccgcaccgtacccgtcgtcggtcttttcgccaatttatcgtatttttccgtgaaagagaataatataatactctaataaagtgttataataaattacaacgttactatttacaacgatttttaaaagaagctgattattatttcttctgtaactctcttctctgttgctctacctgttcttttctctctgttcattctcttttctttagcttaattcagcaaaaaatttatctttgtttctctcttttgtttctttcctctgcaaagtaaagttatgagagcttaataatgtttgtctcatcttcaagcttcagatctgattccttgtttctacaagtaattgtctctttctttttcgattaaccaccatttctgtgaagaaaacctttttgcttgcttcaagattcgagtgaggaaaattttagctgaaaatg

SEQ ID NO: 25213 - DNA, 3003 bp, Unknown; identical to SEQ ID NO: 25212
  misc_feature (1)..( 3003): 2750-1469P.txt file - cDNA_ID_2704034; gDNA_ID_2214650; Annot_ID_136418

SEQ ID NO: 25214 - DNA, 3003 bp, Unknown
  misc_feature (1)..( 3003): 2750-1469P.txt file - cDNA_ID_2704038; gDNA_ID_2214650; Annot_ID_188625
aagaaaaaaacaatcaagctatttataggtttataatcttatcacaataaaacgaatgcagggaataatggacaatttgtccggttgtaatctaaacattaaacaatgaactatgcttctaattatatattgttatatattttgaaacaaataaaaggacgacatgtcgacatgtgcattataatactaaacaacatctattttctttacgacaagaatacaaaatacatagaaacactgaaacgttaacatatacaacttacacacctgaatgtttctacaaggagatgatcttagatcagtggtaaaactatattttctttttttatataattcttaacggttaatccgataaaaatatatagaagtgtttcagaatagacttttctttaatatcagccgcctatatttctgactagcattttaaccaattaggtcaaaaaacaactaatagattttctaaacaaatatgtttttgttttttcttttttttttgaaaaatacaaaatgtttttgttttcttttagtcttagtgaagcaagggttgtctagaaccaatttgccaatttgttgttagtatataattttgatttacatcattgtaactgccacgtgttgcatccttacttagcttgtctaatatgtcctaacaatacaattctaccataattttctcacaccccttaaagaactttttgactatataattcaaaagtatataaaagtatgaaactaattttgaacaataaaagaaaattcatatcgttctttttccttgttaaagtaaaaaaataaaaatccagataatatttctcatcatgtaatgatcaacaagaaaccaatttaagactgctaaacatcgatgattaatgctgaaaaaattcttatcgtgaaactgagactactaacatcgatgattacgctattctaatattcgttgagacaacccaatactaattatattcttgtgttttgtgtatgtatgcactgatacatataacatatattgatatatatagctttcgtggagtcaccattgagaatggttggatccagtgcaagttccatactcgaaacttaatttgttttcatgcaagttgctccataataagatacatttatttgtttaatagggcagcaatatttgctttgtcagatttaaaatattttcaaattcacaacagttaaacaaatattgccgtgataaatagtaattattagattaatttttattttttacttattttagtttgaattgaaatcttgatccatactaccaacaaaaataaaccactaactaacatactacgtgtagttatttttaagttttcatagtttattttgttatgtattaattacttttaattataagtgttgattcgatattttctgaggaaatctatattaaaactcaattatataccatatttatttattttatttaataaaactataaattcttacaattttataaataatacaaacttgtgttttaggaagggatgttaaaactttatggttcttttggaatttttttaaaaatcaatggtagttttagaaaacaaaatttaaatagtactatttgcgacctttgatatatcaccctatatatatatatatatatatatatatatatatatatatatatatatataggtcatttgataagaagcttacgaacaaattatcttctcgtaacagttgccattttagaaagaaaaaaatcaaattccatctctcctactgccaattggaaaattaaaatcttattatgcaagttactaactcctctggttagtacatatacgagttgcataacttactgttattgttctttcttagttaggttagatactattgcagagtcatgtgcttctgtgtactccataatatataatttgagggacctattaaaagactaacaaaataaaactgttgaaatgacttgcaagttacaaacagagcaccaaagtgatacgacgaatatttcccatacaatgtcaccactagccatcattattggtgaattgattagctgctcaaattataagccgaatagagaaattaataatatcgagattaatatatcgttaaacaaataaaagtaagcctttgaataaaaatatgtagaggtccacagtgattagaccgaccaaaaaataacaatatttaatttcactgctataagaaagtttatgacataatgataagattcaaagaccaaaatagtagaattctataattagaggaaaatactattttcttttctcattatactatacttgccagcccattttgtcatttatcatgaaaattaaattgttttacatatcttcatttaaatgtttatagtaacaagttggaccctcctcgttatcaaaggtaatcgccttcagtgtttaataaagtaatacgattgaggacacaaagtgaatggtttaaaattaatttccgtgggatttaaagacgaatacaatgtgatcaaggtggtttgacgtctaactatagctagtctaaactagctagctaggctaacaaccagtaataatagctgaccaatcatcaacattcatttctttggatttaataaagaagctcaataacatcgactgactaattattaaaatgataataaaaactatttagtataataatcgtcgtccacgtcagagtttcacctctttctctccggctttgcatggctctttgtttctccttatctccctcccttacctattatacttcctctacaatttcattgcttcttgataagagctctctcttctttctatctcttgttctttaatttgtctctctctttttctctagcaatgcttggaagctatagagaagtgagtattagtgtctctctctttactttcactatctctgtttagatgtgtgtgtcggatatataaccggactaatatacgtataacttatagttattctatcttgaccattgatatatgcgaatcactctatggtattaataaggttatg

SEQ ID NO: 25215 - DNA, 3003 bp, Unknown; identical to SEQ ID NO: 25214
  misc_feature (1)..( 3003): 2750-1469P.txt file - cDNA_ID_2704038; gDNA_ID_2214650; Annot_ID_136417

SEQ ID NO: 25216 - DNA, 3000 bp, Unknown; identical to SEQ ID NO: 13769
  misc_feature (1)..( 3000): 2750-1469P.txt file - cDNA_ID_2704042; gDNA_ID_2214650; Annot_ID_136416

SEQ ID NO: 25217 - DNA, 3000 bp, Unknown; identical to SEQ ID NO: 13768
  misc_feature (1)..( 3000): 2750-1469P.txt file - cDNA_ID_2704049; gDNA_ID_2214650; Annot_ID_136414

SEQ ID NO: 25218 - DNA, 3000 bp, Unknown; identical to SEQ ID NO: 13766
  misc_feature (1)..( 3000): 2750-1469P.txt file - cDNA_ID_2704057; gDNA_ID_2214650; Annot_ID_136410

SEQ ID NO: 25219 - DNA, 3000 bp, Unknown; identical to SEQ ID NO: 13765
  misc_feature (1)..( 3000): 2750-1469P.txt file - cDNA_ID_2704061; gDNA_ID_2214650; Annot_ID_136409

SEQ ID NO: 25220 - DNA, 3000 bp, Unknown; identical to SEQ ID NO: 13787
  misc_feature (1)..( 3000): 2750-1469P.txt file - cDNA_ID_2704086; gDNA_ID_2214651; Annot_ID_136426

SEQ ID NO: 25221 - DNA, 3000 bp, Unknown; identical to SEQ ID NO: 13784
  misc_feature (1)..( 3000): 2750-1469P.txt file - cDNA_ID_2704102; gDNA_ID_2214651; Annot_ID_136432

SEQ ID NO: 25222 - DNA, 3000 bp, Unknown
  misc_feature (1)..( 3000): 2750-1469P.txt file - cDNA_ID_2704132; gDNA_ID_2214652; Annot_ID_188667
gaactttcgtttggtccaaattatgatcttagaatcatcaacattgcaaacttattttctttgaattctatcattcttgttttaaataattgatgtattcgatgtcttttcatgggatgatatatcatatattatcatgtgactctcgttcaaacaaacctcaaatcataaaaagttgagtaataaattctattgggtcattattagacatttgtatacgtaaaaagaacatgtgaaaggatttttgccctatcgtacacgacacgtttaagtgtgttcacaacttatgaccacaaaaagtttctgattctttcctagccacgggacaaaaagataagaatcacatgtaaaagaacataaaagaagggtcatgtgctttctttgttgacatcttgtgattgaagcaaaacctcatcatataagcctaattaccaatgatacaaaaacaagatgaagatcatgaaagaacagaagatatcaaaacatgaacagttagatcaattacctcagccaaaaacagaggtcttcaaaaaaacagttggagattgatttctgtgtctaaatctcatcactgcatatgagaggacaagaaccctaattcagatgtcatatgttaagcaaccacattgcactcaatcacaacagtcaggagaactgtagacaaagaatttgaagtttttttattcacttgacacaattaaaatcataaagacttaagattactacaacacataacatacatagaattttaaagtaaaagccaaaccagtttatccacagacacatttgcaggtctattctcagcgaacaatggcagagacttcattcttgcaaagacggtctttctctggttcaaagatgaaaatcgattctagttcagctgcacaaccgtacggtgcaagcaacagtttgtgcccaatatttgagtctagcttttacatcatctggatcatcacctgaatcaaaaattgcaacaatcaaacattcaagtcaagaaaatgttcttcataatcacaagactcaaatctatctcagatttagagatttaccagggctagagatcttccaatttgcaattggagcggtcgtggtcggtggtggcgacgaatcatcttcctcctgggacttgtggtggttttgttgcttatcatctaagaacttctggctcatggagtaacaaagctctaacgcaggcaaagtgttgcaaagctcagggatctcatcgtaactaaaaccaaaccctagatctaaacaacctttaagctcctcaagatcatcatccgtcaaactcttggctctcgtcaaatcatcttgatcatccaacgcgtatccctcaagcaacacttggctcttcttcttctccagcttcttcctactctctccggcgaaatagcctcctcctctgccgccagaatctccaatcgcggcccacgtttcttggattcccccgtcgccaccgtcgtggtgttctggtaaggttgtgttcgatatatcatcagcatttgctggtttgttctcttggacagagtgtgtcttccatgcaggtggatgtgatgattcgatgtgaatacaagccattggtttttctctctgtgattgttttttgttatcggatataacatattgagtggtgaggaaagattattatataaaggagatggtttctttcttagaaaagtggcgacgtagaagcatcaattattgcatatatgccatctttgttgtggggccatatgcaaacgaatcaatgattccatgaaacgtgtgttcgagaaacattgggtttccattttgggattcgtctcggtttgtctttcaagtttcaacttctatttaatttatggacatctattttactaataataatgttgcataaacattgaatcacatcgagaaacataaagtattgttgtgaaaatttgtatactacttaattggaaggagaaaacaaagtgtattcaaatgaacatgagaaattatattctgatattaaaaagtgtattgcagaagagatcactagtaatcccatttatttacatgatataaaattgaattgcgacctgagaagacatgaagttgacatcttcttcataacattgtttacaacatcaagcaatgttgtcattggtcatcaagaaatgttaaaatcgtcccattaatttataaaaacttaaaaagtgtaaattttcaaattgtttttttttcaacttatcaatattggatttatctaaagaaaactatgcacggagtcgccgctggccacacgaacagaagaagtatggcctacttcagagagtttgattttggtttcagatattggtataaattatttttctagacacttgttctaactgtctctagattcgtgtttagtaagttaagtatctcatgctggaacatgttatagtatgttgttaaatgttatccatatcatatgaaagaacagaatttattagtttttttttgtggttcaggtatttataaacatgttaatctttttttcttttgggttaatgttaaattttaataaatatagcaatcttaatatgacttgttagcaagaaaacgacaaaacactctcagcttaagtttaggtcattttcttaaaccagaattcagaattggagttcagttggaatcaagatatgttggtttaatttgtttgtttctttatcgatttgttttttcacattatcaattcttaaacgctaaacaaaaacgtttgcttttctattttcctttgctcgaccaacgaaatttattttcttttgaccacattgtttttcagttttgtgaaaagctcatcaatatcttaacaaaatctttatttagactataaggttcaaagctcttgacttcatccatttgttacacactttaaaagaaaaacaacctcacaaagccagcttggtaacaaaaaaaaagtcaccttataaatacaccacaaaaacaacacatttcttcaaatctactaaaaaacaaaaaccaaaacaaaaaatg

SEQ ID NO: 25223 - DNA, 3000 bp, Unknown; identical to SEQ ID NO: 25222
  misc_feature (1)..( 3000): 2750-1469P.txt file - cDNA_ID_2704132; gDNA_ID_2214652; Annot_ID_136441

SEQ ID NO: 25224 - DNA, 3003 bp, Unknown
  misc_feature (1)..( 3003): 2750-1469P.txt file - cDNA_ID_2704136; gDNA_ID_2214652; Annot_ID_136439
taatgattcgacccgggataaaagcagcttgagaatccgaaacaatcgagtttagatgagattttaaacgattcactaagcatttggagatgaccttgtataaaacattgcaaagtgctataggtctatagtcggagagtgttgtagggttagtgatttttggaatcatacatatgttagtatgatttatgctgggtttcataaatgatgtttcaaagaattttttgacttctaatataacatcgtatccgactatatcccaacaattcttataaaatcttgctgttaacccatcaggccctggggctttatcatctcctatttggcagatagcatcatatatttcggtgtcactaaactcttttgtaagatctaaattgactgtattagtgactgtggatttgaagtccgcaaagtctattggtgatacctttataccattggtgctaaagatatttgtaaaaaagtcctgagcgtggtttccaatttctttatctcctgtgaacatccttccttgatcgtccatgattgtgttcactcgattttgagaatatcttgtttttgtacaggcatgaaaatagccggtgttttgatcgccttccttcatccattgattacgactcttctgcttccaataaatctcttcgtcactaaaggccttcgctagtgactcttgaagttgtggaattagttgtctgtcaaccctccttgtactctccattgctctgtttaggctgctttgaagttttttgattcgttgttctgagtttaaattagaagcgtgtttcagtcttgccatggcttgtcgacaactactgatccgttccgtgataggtgtagaacgtgaattccggtttgtcctccagcttgtttgaacaatacgtttgaatgtcggtatgtcaattaagcggttatcaaaacggaaaagctttgatcgacggggaaatgactcgttgaagtgaactaggaccggtttgtggtcagagcccgtgaagtccaggaattctgtttcagcatatggaaatgttgcagtccaggctgaattaataaaaactctgtcaaggcaacatttgactgtgtgtgtatgtctttcccctacccaactgaatctatctccttttgatctcatatcttcaatgtcacaatgagaaaccatgtttctgaaatttctaaaagtccattcctctctcatgggaccaccaattttttcagcgttcgaaagtatctcattgaagtcacccactagcaaccattcagcatttcgattatctgagatatgttcaagagtttgccatagttgatgacgttcagattgagtagggtgaccatacacacaagacaagtagaagctcttattattaaatgttacatgagaatcaatgagtctttcatcctgagaaatcaaggataaagagacattgtttttccacataagagctaagccaccactccttccattagggggctgagttattacattagggaagcctaaatcatatgctagtttacatactttatcacactggtttaaggtttcaactaaaaataaaatatcatagttatacatacggaataagcgaaacaaccgcgattgagtcagcggcataccgatgccctgacagttccatgagatgatcctcatattggatcccttaggggtaccgggccccccgcgcctccgtcacgtccatcatgtatcgaacacgatcctgcagattcagtctttcttcctttcttgcaaagttgactcagaacgcccatttcatctgcagcttccacctgttggtacatttcttctaatcgaaccctctttctcttcatgaagacaaactcattttgtgcattgtcagaggactcaaggagcagatctttctcaaccggtgcgtcagttttaactcctgcaagtttggcgtgaaggtagcggagtctttcaactgtgaggtctgtgtcctcaatgacgcatggaaccgaataaccatctgaaagtttttgtacctggcgttgattcccctttgaaagcgaagattgaaggccgggaataagagtcgctggatccactgtctgaagagtatcagtgtcgcttatgtcatgttctttgttgtcgtcgtgatgatcgtcatcatcatcagcatcatcatcatcacttgtctccaccggatctgcccaataggagactaatattattttggggttctttttgtcagaaattacttggatttgttttttttttcaaaccacacagtaattaaaaataaaactttttacattggcattttggtcttaacagcattgtgattcttctcctgccaacaaaaattcatctaataccatcatcaattatatggattattacaattttgttttgtcatttcattctaaaaaatatgagtgatctaattcttgtaaaattttgatgtgtaacctgaaatattgatacactaatctatagccaattaaaaatgacaaaacataacattgggtaaatagtaacataaaaatatacatgaatcataaattttaaaagtatgctaagtatgtataagatttaaaaaaaaaaagattttaagagagttataacagtaacacacttgaaagccgaagttttgttcttccttgtctcagcgccgcgttttttctctcctcatcctctcgatgaattcctctcaagcttgcttcttccatttttctcttagaccaatctcgctttcgcatccctcctatgccttcctctcgaaacgtaagttttccttccccaaattaagtgcttgggaatcgaaattttaagagattgttgttacctagactagttcaggatacaatcgttagagtttcgttgcttcgaattgattaaaccctaatttcaaaagcacagacctgggtttttcactgttcctgcaaagttgataactttttcactgatactatctcttagactagttctcttaacccggaaattctctcaaagtatccaactttatgaacagaaacaattgttgaggcatg

SEQ ID NO: 25225 - DNA, 806 bp, Unknown
  misc_feature (1)..( 806): 2750-1469P.txt file - cDNA_ID_2704155; gDNA_ID_2214652; Annot_ID_188660
aagcttgaccattaaacaaacagaaccttcttgataaaatgctcgaattcaaaatttaagtaccgattggtcctagaagaatctgtaaattaaacagctcttggtaagaaccaaacctagctttcaaaacatgaaataacaataagaaacctttttcgattgaacggcgaaatatatccattgaagatgttgagagtgagaatcgaagacgaagaggtgcaattactcgcagtttttttttttttgtaagttaattattaatttttgacttcattaaagttaattatttgctgaaaaaaaaaaaaaaaaaagttaattatttagtatcttcaaatataatatttaaaaaaatctagccatcttaatgcattttaatgaaaatcctacccaagttttttaaaggtcaatttaaaaagtatcagttttgatttttaattatattcaatatttgttaaattttgtttcatatgttaatattaaaaacacaatctatttcctaaacatttatatacagatcttttttaaaaaaggttagtcaaaaactgttggaaaagctaatctttttttaacaaaaatagtaaaatactcatatacgtaactttgggcctttcttaaatggctttgggcctttcgtaaatgggcttatgggcttaagtacttcaaatctgatagtatttggtttattgcaacaaaaacaataaatggaaatagcgatctgagctgaccaaccacagtcgcggacagagctaaaaccaccatttgaagaaggagaagaagaagaagacgattcggtgaaagcgaagatg

SEQ ID NO: 25226 - DNA, 806 bp, Unknown; identical to SEQ ID NO: 25225
  misc_feature (1)..( 806): 2750-1469P.txt file - cDNA_ID_2704155; gDNA_ID_2214652; Annot_ID_136435

SEQ ID NO: 25227 - DNA, 3003 bp, Unknown
  misc_feature (1)..( 3003): 2750-1469P.txt file - cDNA_ID_2704179; gDNA_ID_2214653; Annot_ID_136464
aattcgtgtagtattttgactaaggaattgtcttaatagaattaagcagttacaaagttttatttacacaaatattttttcctctcggcacaccttgaatcaaatcaagcatcgtttaaattaaattactgtaatggattagataagtactagtaataagtaaagtatgtttgccgacgggtgaaattgtaaaaaagattggatactttcttttgtttgatatgaaactcgaatctcgtgattaaaaagatggcccgacagtgatttaatgagagtcaacaaaaaagatgtaaaacacattattagcaactaattgtactttatttttataattttcacacgtttcctcttttgtctattttgattggggtcattcatgctcaaacattacagcctgcgcattgtattatgttttgtatgtctccggcggaacaaacaatgtgacatgcgtttgaataatcagtctaattgtatgattggtgtgttcattcgctattaatgcaaatggtgtccaaattattaaattttgagttaaatccgtggagaaataatattcctttcattttaaagcaagtgtcgttttagactgattttttttatttatgtcgtttatgaattaagataataaagaagtattaataaaaatgtgagacataaatatataattctgaaagccaatcttatcttcaaatgcacatttcacttatacgtattcagtattctgccattcaacaaacccataatttattttgtctatggtaaaaaaaacgcatatagtcagtcatattagaattattttacgaatgtaatttttattgctacttatcatgtatgcttaagtgaaaatagtgagtcactatcgtcattcgtcacccatctcatgcttggcgttggcgggctcgaggtcagttttcgaataatccgtcggtgttaacagaataatccgttattgaaaaactaaacgccgttaacggaaactgtgtgcttagctggcagacacagcagagaagtcaataaccagctggcatgatcaccgttttgcaattatccccataattaccgcaacacccttctatttttttatccttttttttctttaattagtatttactatttattatcgttatgttcttaattatcctattattgttttaaatatttttatatagcgaaataatttatttaagaaaaagtcaagagaaaattaattgactatatatggaaaataatttgagggtgcgaggcatgacctagctagagaaaaataaaataaaatgaaggcatgcatggtgcttggttcaatgtaattagtggttccgtaggtctgaacggtacggactggccatgatctactagaaacagtaaatagttaatacaaagtaattaattatgagtttcagcaaattaactactctatatcgaatgaattaaacagtaatccccagaaaagaaaaaaagagaactatgacagccttttcaaaggacacccgaaaaccaaaatgaagattttaaaaatgccagctctgcaatagatattgaactttcatttgtaattttctttatttttgttgcattacacacatttgttatttacatttaaattggctattgcaataaaagattactttatatgcttataatagtacaatatatatggtggcttaaacaaaagtttggctggcttgataaatacatcttacatcgaatgacgattttaccctctatcttgctgtctctgagtacgagggttgaaatccttacgtggcattttttctcatttttcttggtcaaatagtttaaccaaactccaaaagtctgtgatttgttgacatacttctaactaatttttttttataataaaaatctattgtatctgtagaaataatcattagatttactttctagaatataacttcttatttcttagtaatttgtccagatttttttttacaactaactaaacactagttaaaatgttaatgtctaaaaaataccattacaattattcaatttaataaaaattgagtcggccaatttaatgcgagacttctgtacaacgaccctaaaagtgggtttgataaatgaaacatattgcaacaaaaaaatactagtaataatgataaaatagtaacatgtcgtggcgcattgaatatcctacgaaggtttagtgtttacttttaaaaaatcctaatatgatactagtacatatagctagcttgccttgcttatgctattgcatagtctgtattaataaatgatgttatacatttcgatagagtaacattttgggaacatgagtgaacgtgcttgaatcttcgtgcccttgacgtcagaagctagtaattttaaatactaattaacattcatacaaattaacagatacaatgtactatatcataattcgtttccgtaacacaacgcaacaatttgaaagtagatgtactttagtacttagttagtgtgcaccaaaaaaaaaagatgtagttagttagtaaggggttaaatgttttaatttattaagaaaacttaaattcattaaatgttagaaaaagtctaattagtttatattcgaacactgtgctcaaaattaaaaagtcaactattttagactatagagtttattaattaataataaattcgataaatcaccgtattattttcttcaacgacaagtagccgtgaagacacgggagcgaagagagataaacagaagatgaagaagaagatcaatgtcataatcttcagggagataaatccgtaatctttattaatcaaggttaatccttttttttttcttcatcttaattctttgcgtcttccttttctatttatcacgagatctgtctttctttttcctcttctttctctctcttctctctgaagacagtacttgtttctgtccggcgttaaaagcttcggtggtggtctcttgacttctctgagaagaagaaaaggaagctgagtctcattttagattcagctcacgaggaagtgacgacgatg

SEQ ID NO: 25228 - DNA, 3000 bp, Unknown; identical to SEQ ID NO: 13809
  misc_feature (1)..( 3000): 2750-1469P.txt file - cDNA_ID_2704183; gDNA_ID_2214653; Annot_ID_136466

SEQ ID NO: 25229 - DNA, 3003 bp, Unknown
  misc_feature (1)..( 3003): 2750-1469P.txt file - cDNA_ID_2704191; gDNA_ID_2214653; Annot_ID_188709
ccaattttagtttcattgttttggttgtaatttcttcataaaaccattcaagttctaattgttgttgtccaacaaaaaaaataaaaaaatcaagttctaacgaaatagtaatattatgattcttgagtagcaagaacgatcaaaaactcaattttaaaatgtttttgtacgtgagatgaaagaatatttgaacttttggagatctaagttgattcgttatgtgttttgatgtccgtcagttatataatatgtgggtattatgagctatgaagtgcgtttgatgtccaaagtctaaaagaaaaggtgagcaaaaataagacattcttactttataatctgataatatatatataatgtagtcacttatccatacattatatataggattagtaccccctcatcatgcttcaacgtgtgatctctttctccacaaactattttttaagggaccgtgtcttcgtatgtggtttttctgctcgtctaaaaagtcaaaatttctgatggatttattttaccatccattgtttcacgttttccatttcatgatttcatgcgtgctaagtaaaaggtaacttaaagtatgctatataaataattacatattattataatgatcattctagggatttatctaaccaagcatgaattctgataaagtcaattaccttttctgtgaagaaaaaaattactcaactacaagtgcttatagttcatggtttctcgatggtgcaagtgtcactcaagacatcttccttcacaattccctactcacaactaagtgcctttgatccaggaccatgagacgtcttttagtttagcaagtacaaattgtacaacttattccttttttctaataatttaaaatcattctttatggatgtttttgaatatttatatcaactagaaattaatctgtaaaatttttagaaaatattttaatgcatttgacatgacctctaaatagtttgaaacggttgaattgtatacatggttcattgaattatattcactttgataagataatattgtattacattaaccaaatatatgcccaagttaattcagccagtctataagcatgggcacaaaaacatggtataggtcagtggatttgaatatatttagtacatagtcgcgtttatatgttgacgcatgtgtaatcacatgtatatgtatgcgtgtatgtgtttttgtgaccggcaagatgagtaggcaagagataatgcatgccctacaaatcttaaatttctcactttgtaaggaaaaagagaaaaacgaaaaataaaatttagttgcaaatttctcactattgctttcgtgattatgctcactgagttatccattaagctttttaaaagttaaacactattttgaaaatataaattgtatttacgttggagaaataatcaaaacctatattttatttaatttgtaacatgactgagcgccgcttattaagcgggaaacgtatctaattaaatactctttgaactgaatcgattcactgtattggatctatatttctcttaaaatggaaatgaagttcagcttatcttttagttgttgcatgcattcttacgtgattccaattatgaatttggaaaagactcgatattcttacatatatgttatgggtttgggatttatctagatcctgatcttatagtaaaattatctgcagtttaaatacatttctgtacatgacacaaatcagtgtttttgatgctgttttattccgacttcatctcttgttgcagtcagtaacttaatattgggggttttcttaatattttaaggttattgaattctaaatcttgcaaaatagttgtgtttagttttagttattttcctattaaagctcatgtctatcaacaaagaaggttggtattattcttgagggacataaacaaatgttagatgcatgcacgggaaaaaggtggattgttctttacaggaaaaatatgcaattcaagtgggaacataagggagagagagggataggttgattttgactcttgcaatttgattatataatatcaaatatgtatatttgtttaatgattaagaacaattgtcaagttacggcgattccataataatacgaatgatctcacaaacaaaatttgctgtgcctctaccaaatgaagtattggtcaacttgtgacaatggcgatgattcaaatctattatctcatacaatttttttaaagataaggtattttttgtaaaacatttgaaaggagcttaagtaactatgacacatactgcatgtacagtaaagcatacatgtacccgtaattaccaaattcgaagatcaaagtttcgaaatcttttgagtcggttaatgtgtaaatctctctttatcataccaaagtacatgcatagattacaactaaaagctgatgagaacacacgaacgaaatgaaatagtcaggacattacatgcaagcatgcaacttcgtatatcctaaacctttcattttgattagtgatataatgatatttacattcatagagaaaaaagggtatgcaactatgattttggtttctccaaaatagtatatcatcgtataagtacgcataacaatctttttgaccaatgacaacacaatcccattatctattggttatgagtattttgataaagtaaggatttataaagtacaatttgaggatgaatattttgtaggcttaattaaagaatgtatgttctattttttttttttttttttttgacatcgtatgttcttatataattaacctcaaagataatttagatttaatcatttaaatacatatgatttttcaatcaaattacctcaaaaaaggaaagaattatagtactatctatattaaaaagaaaaaaaacataaaagaagagagaagaagaatgtcagtatcatcacgtggctctctctctgcccaacacaaatctcttcttcttccttcttccctctttcttcttctaaaatctcctctcttgtagatttgccgcttctcatg

SEQ ID NO: 25230 - DNA, 3003 bp, Unknown; identical to SEQ ID NO: 25229
  misc_feature (1)..( 3003): 2750-1469P.txt file - cDNA_ID_2704191; gDNA_ID_2214653; Annot_ID_136468

SEQ ID NO: 25231 - DNA, 892 bp, Unknown
  misc_feature (1)..( 892): 2750-1469P.txt file - cDNA_ID_2704210; gDNA_ID_2214654; Annot_ID_136471
atgacatcatggccgttcgattcacgacagttattcacttggtcctcatcggactaactgaacggggcttatgttccaatgacaacaatttttttctttttgagtaatcccggtttactcaacttactcaaccgtaccggtggaagattccttacagtaatactaaagcttttggcttagctcattttggtgatgataacagtaatatcataagtacataataaataattgaaacttttgtaagtatcctcattttttcagaaagtaaataatatcaaatgtattgagaaaacaataaatgatcatttttttattttaattagactcaaaattaaataactggaaattaaaaaaccaaataaactgaaaattattatctaaaatacagtaactaaaaatttgtcttgtcgataagtcggataaaatttattcatataaatatttagtcatatacaagtaaaataatactacaaataatacacaatcagtcgatgttatatacaataaaattatagatttataaaggaaaaaattatccggcgatatatctgatgtcaatctctagtgggttagcatttttattgaaaaattgtattgcttagtttttttattgttatattgttagtgaattaaaatggtactttggtattttcatatatagactttttgaaaataaaatcttagattttttctaacaagagttaccaaaaatattttggaattaaatgagccggcgacatagaagaatagagagggttaaattgaaaattcataaagtaggaaaaaattagggttagactcgatcattcatagctgcgactattctctgctctttctacattttctcattttctcttgggctacttttcgactactaacaaatccaacgatg

SEQ ID NO: 25232 - DNA, 3003 bp, Unknown
  misc_feature (1)..( 3003): 2750-1469P.txt file - cDNA_ID_2704214; gDNA_ID_2214648; Annot_ID_136388
taattgtgaattttatatagtatgtgaaaaagtattgaaaaaataatgaagatggtggttatatatatgttgggatgtgtgtgaaggtggattggacaccagagctacacaggagattcgtggaggcagtggaacagttaggagtggacaaagctgttccttctcgaattctggagcttatgggagtccattgtctcactcgtcacaacgttgctagtcacctccaagttagtatatttcttttcaatttcattctctaatattaaccatccaaattaacatgttgctgttatttggtatactagaaatataggtctcatcggaaacatttgctagctcgtgaggccgaagcggctaattggacacgcaaaaggcatatctatggagtagacaccggtgctaatcttaatggtcggactaaaaatggatggcttgcaccggcacccactctcgggtttccaccaccaccacccgtggctgttgcaccgccacctgtccaccaccatcattttaggcccctgcatgtgtggggacatcccacggttgatcagtccattatgccgcatgtgtggcccaaacacttacctccgccttctaccgccatgcctaatccgccgttttgggtctccgattctccctattggcatccagtaagttcccacatttatgaaacctttactttagctctttatcatatttgttttcatcatagtatttaacattatgaaagctgaatgacaccgagtatttttatcatatgcttgtctttctaaccagcatttttgcatgtagatgcataacgggacgactccgtatttaccgaccgtagctacggtaatgaaccaacatttataagattgtttccgtatgtatacccctttttgtttctatatatatgttttaaatcgtatttttgattggtaattgtatagagatttagagcaccgccagttgccggaatcccgcatgctctgccgccgcatcacacgatgtacaaaccaaatcttggatttggtggtgctcgtcctccggtagacttacatccggtaagaatctaatataatgaattgattgttgtcgagttttgacttttcgcatttgattatgtaattatgtatttttgactttttgtgtatatatattataaatggaacagtcaaaagagagcgtggatgcagccataggagatgtattgacgaggccatggctgccacttccgttgggattaaatccgccggctgttgacggtgttatgacagagcttcaccgtcacggtgtctctgaggttcctccgaccgcgtcttgtgcctgaaacgcacaagatccgtaggcaagcgagaaccaaacaaaaattcgacgacatgtctttcaattattgtacttttatttttccaagggttgtttttgttttgacccttgttgtgttaagagttactctttacttaatcgtcccatgtgactaataaggagacccttttcatatgtatctagggtgctaagtacactctagctctattaacgcaaataaattacctatattttctctaaccattggtgatttagaacttgattgcttatataaagtttttttataaaacataacacaacaaatttccatatcaaatgatcatatggaaattggaagcgttcaaagcaaagtcgcaaacgacgaccaattgattataaagaggacaacctcacgagtatatatacacttataatttataaacataacttatacttaaaaataccagccggttatatatggtgaaaaatgagtaatgaaattgtgtgtttaccatgcatatattaccgtataaaaacgtattgttgggattgagagaacaatggcataaaataataatgaggagagagggagaggaccacgagataagaggagaaggaagtgcatggaggcaacgtaaaatccaacgtaacgacctcttctttctccaattgtgaccactctctctctctctctctcgtctccttcaaatttgaatggtccctctctcttcataattgataattcatatacatgcggatactattactagcatctcattttccactcacacttgtacacatatgctttttataagtacgtatttataggcaaaagtaaatatattcaaaccctacatgcatggtattaaaatccaatataaccaaaatgaatactcggttcaaattcaaaaatttaaaggactttggtcgaagataatgaagacaaatcatttttttttgttctaaccggacattccaaatcgaaatgcacactagtttttggtgcctacatctacattggctaacttttactaaaatcatagtgaaaataacaaaaaaccatggtctctataaactctttggtgaagatttcaactactaaattaccatgagatagatggtcaaaaattgtcaatattgaatttacaaggatcatgagatatttcaacaattttactaatgaccagatccaatgcagtgaattagacgaaactatgacttcactaggttgtgaaagaaaagcttgtcttgcagttttgtctgcgaccggtcgaaaagagaatgaaaatatgtcgaaatcctcttcaaacgtgaaataaattaactgtcataaggataaattatgtttgttcaaccatacagaaatatgatgaataaataattttagacatgtgggcccatgtaagaagaactcactaaatgagcccaatacggttaatgggctgtgacattgaaaaagaggttgtaatgggctgattgattctatagtgtagaaatcttgatcgaggggttatcttctccgattccaatatttagattcttcttcatatattattgtgctttgattagagagttgcagaagagttttttttgttttaattcctgcaatcagagagttttcgatagcacaagcacaagcttctcgattcgtttgagtgttcaaatttcaagctttttacaaggggttccttagattgatctgttactgtagagatg

SEQ ID NO: 25233 - DNA, 1682 bp, Unknown; identical to SEQ ID NO: 13740
  misc_feature (1)..( 1682): 2750-1469P.txt file - cDNA_ID_2704218; gDNA_ID_2214648; Annot_ID_188565

SEQ ID NO: 25234 - DNA, 1682 bp, Unknown; identical to SEQ ID NO: 13740
  misc_feature (1)..( 1682): 2750-1469P.txt file - cDNA_ID_2704218; gDNA_ID_2214648; Annot_ID_136387

SEQ ID NO: 25235 - DNA, 3000 bp, Unknown
  misc_feature (1)..( 3000): 2750-1469P.txt file - cDNA_ID_2704234; gDNA_ID_2214654; Annot_ID_136480
cctttgggaactttgacattcttaaaattcatcttttcacgaacacctgcaaatttggaacccaatcaaaatccaaggcagaaacagataaatagagaaacgaaatgcgtttgtagattagacccaaggaaaacttggatcaacgaaaaagagacaaagataatctgcaaattagctgaaacgaaacaaaaacttagatcacaaaattgaagccgaagaatctgaagctttactcgcttaaactaagaattcgatctataatgaaaatggcgagaggaagtacctgaaaattctggaaatggcgtggagaagagagaagagaggggttagggtttaaagctcagaaatcaggattttgttgacgctttggtcgatcacgcattttctgttactagagatctttgggcccaaaatttgtattcaggcccattagtgaattcactaatttatttatttttcttaatatattttttttttagtaaacgatttttatttatttttcttaatatataaacggccatatttgacatttccttactttctatacaaaagaaataattctcattttgattaatagatagtagattaattattatcacttttcaaaaatgtaactttcaaacccatattttgttgcaaactgcaaaggctctaaacttcttgatgatttactactaaacctaaatgaaatttcttaacttatataaagtgagatatagatgatgtggttattttgttgataacttactttggttcaaaattggtcatcatttaataatacatgtatttaaattcaaaaaaataatacatgtatttttataaaggaaatttcaaaaaagaaatatcaaggcatagatgaatcaaatcaatcatgcaaataaatgtttgtttttcgggaacgtttccctcgcttttagttaaaggttcaagcaatatatataaccgagcaacaaaacaatgcaaagctaacaacaatccctagacttgtcctcttcacgcttgatccggcagatttgtgctcatcatcagcagctggagaatcggcatcagacgatgaagttgaggatttcggggcaggagctccggtgggagtggtctttgttccgaataactcctccggcaacaacacactgtccaccacgtaaactgctagaggaaactgttgccttaatgcattattgatccgagtctcaacaacaccggtggaaacattcacttggttgctttgtgcttgtcctgtgaaatttaacccaaaaacacctccgtcttgtcccgtagcctgagttctaacgggattacttgctaagagaagatcgcttagagagtagtattttggaatgatatggtagagcatgagctggatttgttgttgatatgtcagactgtttagggttccgggtttaagcttgttgaatgcgttatctgttggggcaaatatagtcatcccttggtcagagctattgagttgtacacttacctgaaacccgacttgagttgtgttgaggagttgtattaatgtggtaaattggtgaccagcttcaagaatcgctgtgagattgatgggacttttttcagtggttggagctggagcagtgggctggctttgaatgtatgggatggtgaaaaggaagattaagaggacaacataagagaatagtgacgaggacatggcttaaaatttgttatatttttctctatctctctgtgtgtgcttgtgctagagctaaccctttaggtattatatagaaagattttaaggagagatttaagacgacatgtatgcgtgacttgcaaaagaagttgatccattgtttttaacaacttagtctacattttacgataatgtttataattaagaaatgcaaaacaatactataagaaggttgacaaaatgtatatatatatatagaattgtatcccacatccgataagatcataagagatttgtagggcaatatatatcgtatatagtatacaaactcatggttcaccagttagattacacaacaacaaaaacaacttgaaaatgttagctggtcatggttcatgaatatctttacatttttctgtatttaaaatgatgtggatacgtgtatatagtcgaatatagtctggcattgataggcaacgtgggggtcatatatattataacaacgaaactgctctacatgacattggcatgggcaaaatttgggctggaactggaaaaatcctcgtagggcatgactataagaaaaggcccattaaaaacatgaaaaattaacaaagttggaatcataatcgactgacgaaactaatctgttaaaattatgtgactttcttaatacaaaatagcgttgtactggtttaggattaaaatcgttcggacctcttgtggccttgtgggcacatggtgcgccgtgcgtagctcacgtgaggactgacgatgacatgcagcaaaaataataaaaagaatacgtatttagcagcagattcagacaaactcatgtgcgtttcaaaaatgacgtttatatccccctaataattatattcactctatccactttgacaaaaagatcacgttaatttgaattctaagggtaaaagcgtcaaagtatgtctctttttccgaggtaatagcaataggcaactagaggagaccgataactcaagcaaactcagattcttgatagcgatttaatgaagacccaagagtcccaagaccaagggctgattaattaatgctgttttaaccatatgcatatcatggacacactttgttctccgagtcgactcgttctggtcaccttcttcctcctctgcttctttgccggagattcatcggcgacgaggcctggtttcatctacaccagacacagaggacgatgcacgccgcagtaaatcaatcaatcttgaatttcattttctttacaaaaatctttagctgagtcatatctcaactcgttggtggtgtttttgagcaggtattggagcagccagagggaagcatggccgaggatg

SEQ ID NO: 25236 - DNA, 3000 bp, Unknown; identical to SEQ ID NO: 13820
  misc_feature (1)..( 3000): 2750-1469P.txt file - cDNA_ID_2704240; gDNA_ID_2214654; Annot_ID_188724

SEQ ID NO: 25237 - DNA, 3000 bp, Unknown; identical to SEQ ID NO: 13820
  misc_feature (1)..( 3000): 2750-1469P.txt file - cDNA_ID_2704240; gDNA_ID_2214654; Annot_ID_136476

SEQ ID NO: 25238 - DNA, 3003 bp, Unknown
  misc_feature (1)..( 3003): 2750-1469P.txt file - cDNA_ID_2704281; gDNA_ID_2214656; Annot_ID_136498
ctatacacacaagaatatatatttgtatatttaaccatggtacataacctagactactctccaaaacttgtataaaaaggattttattgtcatcctacaagactacaacgtgtcaacgtctacaatgacctaattaaacagaaccaaaccagtttttaataatgttgggctgaaattcgatttctaacctcttgaccaacaaaacaatcttccatttgaataaactacacgtttttggttcacttgaaaagtttttatcatcgatacgtcaatttatctacatttatcttacgtatgtttggtaaatggtaattgaatatgaacattaaaaaaaaaaaaatcaaacattaaactatgagttacgtcgttaatatgtaattgcttaccaattttttttttgttaaatttaagtcattagagaatacttaagatatactttacgtgtagggttggcggcttgcatgcttcgtgcattagttttagcaatcaaaaagagatctataatgagtatttttgtatgtttgaatgtaagaactaaggaaaaaaaagcgtgtatctatgttttccgtcaaaggccgaatatatatcccgatatagtaatgggccgaaacccaaaactaaaggcacatactaacaaaactacttctatagaaaattatagatgcactcaacacttttgtctatatactattcccaatagtttgttttttatcactaatggtagtagacatgttgatttgcacattgcagctacaaaactacaaaaaaaaaaacgagccatatggatgcttgtcagattgttactgtcacatgaagaaaaccaaagtcttatcttttatttttatacatccaagtagaacacgacacgattggtaaacgaaacctatatagtcaaaaaactcaaaatcaacggattttgtttactgtttgaattatgttcttgttagttagatttattcttttgtatgcatatgtaacaattttgtgtagggaagaaattatagtcataataactcattaactaaaaataaaatatggtctaatgattagactctaatccgaacaataacaaacaattattttcgtttagtgtctctcttattttatccaagaaaaaagaagtgtcaatttataatatcttctggaaagcagccgacagaaaattgtgggctcacatgaaaaaaatttcaatgatgcgtcaaaaagcaaccaaacgactccaaaataaaatcaaatcaaaaatcaaattctctacacgcaactttctttcaaatacaaaaccaatcatctcgattcatccaacccgcgaagacccagaaaccaaaatcgaagacccaacaaaacccacaagtcgaaatctcgaaatccgttgagagtttgttcctttttttgtttgctcggagatggaggctttgccggaggatgaagagtacagtttcagggaagtagtgttgccgtctttgattccggtagtgccggagccggaacttgagagagagagcggagagaggagaagaggaagagatgttatcgtagccgttgatcatggtcccaatagcaaacacgcttttgattgggctcttgttcatttctgtcgtctcgccgatactctccatcttgtccacgccgtctcaagttcgttctctcttcaatgtgaatagtatatagtccgatttcgtgttcatttgcatttccagatctggaatcggagattctaaagctggtttttgattttcttcgcaggtgttaagaacgatgttgtgtatgagacgagccaagccctcatggagaaacttgctgttgaggcgtatcaagttgccatggtaacctttatattgtattatctctttttggtttgcctgataatgttgtttcttgattgctaagttagggtctgagaatccaattcaatcagatgtttcattagtagcatttcctaacaactactagttcttagaattgagatcgttgcttagttcttctcttgaatccaaacactagttctagtctattcatttgtcgcatttgctaccaactgcgtagagacaaaacctctggtgtatgtattcttggaaatcaatattgtgatgattttagatgagaataatcagaaaaatgagtttggtacacactttatagatatattctttgaattcgatgacataacttgatactgattttgttatgtttaggtaaagagtgtggctcgtgttgttgaaggcgatgctggtaaagtaatctgcaaggaagcagagaaagtgaagcctgctgctgtgattgtaggcacacgaggcaggagcttagtaagaaggttggttataacttataatacaaaaacaactactagttgtgtgatctatgtcttgtttttcttctcttttgcctttcctaagtcgatgattctcttttggatacttgtgcagcgtgctacaggggagcgtaagcgagtattgtttccacaattgcaaatctgctcctgtcataatcgttcctggaaaaggtacattactaatcaatcatggtaaaaccggagtgatcatcacattcatttgtatataactagaaaccttttgattgtaatgcagaagctggagacgagtcgatcgtggactggacacgctcagaagatcctaaaccctgaagaaaaagttcaagtgttgtttccacgaagactgttttgtttttcatctttctgtcgctactgttgcagtctttgtttctgtatgtccctaaaaatcttagattgcttcttcttcgtctctctgtgtgtgtatgtgttttgatttgggtttttgtagtttcaaaatttctgtataaaacctttgctcaggaatgaatgtattgtatgcaatggtgtgatgtgtttcagacttttcagtaaacaagcctatagcagacactatttcttttacgcagttgatcgaacacttggtgtgcgtcttggtgaaatatagaaagattacagatttgtttgttgtttactagagaggttagtcaaccatg

SEQ ID NO: 25239 - DNA, 3003 bp, Unknown
  misc_feature (1)..( 3003): 2750-1469P.txt file - cDNA_ID_2704289; gDNA_ID_2214656; Annot_ID_188775
tttttagagaacaagctattatgagctagttgaacaacaacatacttattccagaaaacagttttatgtattggattgctacaaatgttagacaaaaatcaacaaaagcagtggcagtttactgataaaatcactcttaaaaaaaagaacaaaaacaacagttctatggtaacaatgtcagatgagaagaagattaagatcaattcttaaaagaaaatgattaagatctttttccttatatattctctcatcaaccaataaaaacccctgagcatggagattctccatttcctaagttctttattcaaagattccgagaaacaagaaaataaaaagaactctactgttataggctgctactatggctgattttggaccaggcttgtgtctgtggatacttttttccctcaaatgggactagctcttatggattcctggtgataatatgccatttccttcttttgcgtaaagtttgtccgaatccaattttgtaaagggatcattcttttgttgataataatatctcaccactatcctcgaaaatccttcgaaaacattttgagctacagaaacttccattatagagtgattacttcaggttcgggttcttttccaagttgcaaaaggagagcaaccactaggagaggaatcagaatacttagtttttgtttcttgctagatttggggataagggttccaaatatcaacagtaattttgtaacaaattaaaatgcttactcttttaccttccttttcatacagattccttgtaagctactccgggtaaattctcagcaatgatcactcaagacctggagatatcagaataaaaccctcaagcgtttactgatgcaactattcatagtgagaaagtaaaaataaccatcttgctcaacaacaaaataatcgaccttatgaactcaagattatcgttttcacagctaaagaatttacctaaacttatgacttaaatgtggggaaagtgttccttttttaccatttcaatacctaggcaaagaaggtcgctgtgaagcatcgtgacgatgagaatatcagtagtgccccaatgcctactagcagaatttcttggcaacttgcaatctattatctctctggaatatattgtgccccaaggcctcattattgttaagattctttctctgtttaaagttttccttctcgataagaagtttcgccgcccctaccctgaaaccaaaccatgacatcttagaaacagaaccatccattatcataactagaataaaaatatcttaataatataagtgcttatattggcatatatccagaaagagagcaaattaaagtatcataagacctatacacgtaaaggaatatcatcttacttagcaaaactaataacatttagtgaaatggataaacactattatcaagaaagatccgagaagtatggttcttaaatagctttactttaaaaagtgtgtagacaataactttatatagtcttgtggtcttttgataacaaacctgattcaatagtgataagatatgagtatggtcctccatctcccatgggactttgaatcacctgtgtttccgagagagggaaaatcttgagactttaaatcaaaatgtcaactttattatgaactaaaaatcaaacaacaagtggatcattaatgaacaacctttgttgcatgaaaagaaaatcttcaaatcttttaaagaatgaaacaaaatgctcactttctgagataaaaccaaacaacaagtggaccatttatgcatgttgtctttttgccaagtatgtatattattagtcctattgtgcattatttagcaacctaatttagttatatgacaataatctatttgcccatcccaaccctggattcttaccaaacaaggtaattaaagtgttcatgtgaaacattaatgtttgtattttgtaatacgacaacttttggttcccgcccatattcaataatgcagacactaaagaacagaagaaacaatttgaatatccaccaagaaaagtgattatttaacaaattaacaaccaagaatctacattagacaatatatgaccaagaaaaacacagttgcctaacttcaaggagatggacccaacaagccaaggaaaaaaaaaggtaggtaaacaatgttgacgtttatttttttcaacaacaagaaaacacagaaaaatgtcgatgattgtacggaaagatcatcaatacagctagataaattgatatggttttcatggcagagaatctcaaggtaaagctctgcccccacttttctttaagaattcttcttatacaagagaatatatgacttatggtgaacacacgaaaagctccaactttgtgtttgtggatacaaattaatcctcacaatgtttcaaaatcactgagatttttgataagaaggaaatctgattagtcaatgaaaatcatctgtcaatagagacttgtccctaactttcaaccaaagacttgtaattttccgcgagcacgtgagctttgtgctctgattagagaccagactgttccatgaattaagtaccataggtagagagattttcctaactatttattacctaaactgtttctttttgacaagaagcttaatctagagaatgacgtcataaccactaattgggaaagaaaagtaaacatattagttataacatttatagaaaagtgtgtctagggagcatcatatgccaaatatggatggaaaaacgcaatctttggttgattagtttggatctttgatactgatctccacaaaaaaatttgctcatattcttttctagctatagagacaaagacttaaaattctctttgttttggcaaagatatcttttaacaactggccctaccccacaccaaaacctctttataaagagcaaggactctgcgacatctgtgcaacatatcatttcctcagaatctctttcttttctaggtttattactacacaaaaccaaacatcatcaactttagttactaaacaatg

SEQ ID NO: 25240 - DNA, 3003 bp, Unknown; identical to SEQ ID NO: 25239
  misc_feature (1)..( 3003): 2750-1469P.txt file - cDNA_ID_2704289; gDNA_ID_2214656; Annot_ID_136500

SEQ ID NO: 25241 - DNA, 3003 bp, Unknown; identical to SEQ ID NO: 16294
  misc_feature (1)..( 3003): 2750-1469P.txt file - cDNA_ID_2704305; gDNA_ID_2214656; Annot_ID_136497

SEQ ID NO: 25242 - DNA, 3000 bp, Unknown; identical to SEQ ID NO: 13849
  misc_feature (1)..( 3000): 2750-1469P.txt file - cDNA_ID_2704315; gDNA_ID_2214658; Annot_ID_136511
  misc_feature (46)..(46): n is a, c, g, or t

SEQ ID NO: 25243 - DNA, 3000 bp, Unknown; identical to SEQ ID NO: 13850
  misc_feature (1)..( 3000): 2750-1469P.txt file - cDNA_ID_2704325; gDNA_ID_2214658; Annot_ID_188827

SEQ ID NO: 25244 - DNA, 3000 bp, Unknown; identical to SEQ ID NO: 13850
  misc_feature (1)..( 3000): 2750-1469P.txt file - cDNA_ID_2704325; gDNA_ID_2214658; Annot_ID_136509

SEQ ID NO: 25245 - DNA, 3000 bp, Unknown
  misc_feature (1)..( 3000): 2750-1469P.txt file - cDNA_ID_2704393; gDNA_ID_2214659; Annot_ID_188845
ctccgacaagaacgtgctttggatgggtgcaagggctataccaaaggctcaatccgccttggttactgaggctgaagcgttgcgttgggcggtgttgtcactctctcgactcaactaccgaaaggtaatctttgaatctgattcccaacaattggtgtctattcttgttgataacgatgatatgcctactctggaccctattatacaagacatcaagttcttgcttcagcattttgaggaaacaaagtttgtgttcatgcatcgtggaggcaatggagtggcagataggatagcaaaggaatctctttctcttgagaattatgatcctaagttgtattctatagtgccaaattgggtaaaatcgtttgtggaattagacaagttgtaaaactctgttgtttaatgataattattgttgttgagccaaaaaaggaaaaaacatattcattttcaattactttgttatcttttataaaaggaaaaaagatggctaactacacgaaatatagagaattacgctgtcatatataccaagtataatattgtatcttgagctacacgaagtacatgtattgcatgaccatatttatgaactatatgacgtcatctggttaatattatgaacatacaattccggtaaaccgatcagttgacttcggcgttgacaaacaaaaaaatgctaaccatagttcaaagaaaaagaattgttacaaaaacgattctacgataatttttataatttataataaataataaatctagacggtaaaaaataataacttaaaatttacgttttttctgacatagaagtctatattttagtacacagattcttttattttatttatgtagaatgatatgtcagatttgtcatctttgttagagtccaaaattggcctcttccaaatttcttatggttctttttcattttttccccaaatttaaataaattcaataaaaatttgttgattttttgtggccgttgattaaaaccgggaaagcagcagaaacaaatctgaaaatctgagttaagccaaccacaaaacaaatccactccaaacactccaaattacttgtctctcttctcttccccaccaccactaccttacaaaaaccctaaccctaatttctccacccccaaattcttttcctcaatctctgcgatggaagacgaagaaggcatcgggttaattttagccagagccaccgagctcagactcaagatcagcgattgtatcgataactccagtaccaccgtcagcgacaacggcgatggaaacgaggatctttctcccggagaaggaagaaaaagcgagattattgggaatcaagacaaggattttgactcaatcagctctgaggatgtagatgaagcagaagctgaacggcttttgcgtattcgtgatgctcttgaagctcttgagtctcagcttgcttctttacaggtttgaaccaaaccctaaaaatttcctctgcttctcatcaagtttctggcttttagtgtagtattggacattgaaagtgttaggttctggttttaactgaaattgagtctgaatttgcttcaagtctggtctataatgtctgaattgcttctttacaggtttgaaccaaaccctaaaaaattcctctgcttctcatcaagtttctggcttttagtgtagtattgaacattgaaagtgttaggttctggttttaactgaaactgagtctgaattttgcttcaagtctggtctataatgtctgaattgcttcaagtcttggtggtggttaatgtggggatggtttttggtttgtggtgaacagaatctaaggcaaagacaacaatatgagaagcaactggctctctctgagattgattacagtaggaaaatgttgcttgagaagcttaaggagtacaaagggaaagattttgaagtgttacgtgagactacgacttttgctggtgaaagagttgattatgagaatgatcttttacttcctccttatcctgtccatcctcctctctcccttggtttagataataataatggttacctatctcacttaccttcgaagaagaaatcggatgcgaatgggttcggctcaggacatgtgaggaacgaggcagaggcgaaaagtcccaacggaggatctggaggttcgagtcatggggttattcgcttcttaggctctgtcgcaaagatcgtgcttccaatcatcggtgttatctctctattgtctgcatcaggatatggtccagagatgaggaaaagaggcgcttccttgaacctttttggacttctcccgcaccgagctaccagagggaagagaacacctaaccaatgtccaccagggaaagttcttgtgattgaagatggagaagcacggtgccttgttaaggaaagagtcgaaataccatttgactctgttgtagcgaaacgcgatgtaacttacggatacggttgagtttgaaagaaattaaacaccctcctctgtaatgttcattgcctgacattcagtgtgtaaagtttcaaccttttcttacctcttagatatgaaagccacatggtgctacataactctcacaagttttgttcatagttgtgcaaataaattggatgagggagagattcatttgagtagtataatctctgttctgccaatttgatcaatagattcagtgtatcccaacttataccacttggtgtggttggccaatacataaataagtaaattaatgagataaagagatctaaaagacttttctttagtgttttgactaataattggtcaagcctaccattacaaactatgttccattaccagtacagagcacatggtttcactttttaaccaagcaactttatcttaaacttgcttatcaagaactgtctcttcggtaacacaaaagggtcttttatcaaaacctatatataggatacttttcataattggagtaagatctacaaaacagagagttgtatactttaaatcatttagaggttgtgaaatattatg

SEQ ID NO: 25246 - DNA, 3000 bp, Unknown; identical to SEQ ID NO: 25245
  misc_feature (1)..( 3000): 2750-1469P.txt file - cDNA_ID_2704393; gDNA_ID_2214659; Annot_ID_136520

SEQ ID NO: 25247 - DNA, 3003 bp, Unknown
  misc_feature (1)..( 3003): 2750-1469P.txt file - cDNA_ID_2704401; gDNA_ID_2214662; Annot_ID_136536
catgtgaaatcaattgcttacccattaacagaccaaatgaagcctaaatctatacttaaacttctaatgtaggtgctaaaacacaataacccaaatctaattggattgaatctcaaaatcctcaaaatatgtaattcaaagcttttgaagctctctccatacctggacttagtagattgatgcagcttgcaggaggagaaaaacgacaatgcggctcgccggaggaagaagcccgaagaagaacgagctcgagctttttctttttctttttccgtttttttttttcaaaatgtttagaaatacaggggtaaattcgtcttaacacaattccttaacacaaaggggatatgaagactctaaagtggttttgcagattagttgtcccacaaaagggacacaagagatgatcattcgattataagagggaggaaggaagaagacgaaggagatgtatatttatttttaattcttttcatcgtttttaaataattatttaaattagattatattattaatattaaataataacattgtatttattttgggttgtgataatcaggttttaattcggtttagtctattgggttttggtttgacatgggtttggcacagtaaatcaaagataaaccgtgaaactcaaatttatggggacctaggattcgaactttcgatttagggagaaattggactttaacttccattttgtggagactgagatagaggttcgaattctgtgtagttatggtgttatatgaaactttgtagggagacacaagtcgtttacccaaataaaaacaattaaaaattacacaaaaatattacgaggatacgcatacccgttaatgtcttctaataaaatcagcaaaacaaactctatgttcaatgcaaagcctcctcgcaaattcccgtccccatctcgtagcactcctcccgccgatgcaagtcatggattacccttagaaacactgtccgtattaagtttagtccagcccacataaggtggagaccgtgcaatcaaccttgttacccacgcaggtttgatcacccttcccatcattacgaagctccattatgtggtaacctacatctttaaggatattcatgaaactcttcgattgaggaataacggcattatgacccgtcttcaaagagcagtggttaccgaaactttctctttcattctctccaaccacatccgactatagttccgtagtcacccttctccttgttgatgagcaaattcaagtagctcttctcgtgccagcgagtatctcggccatggaacctcatcaacgtcacttaatctattgactatgactattgtatcgtctaccgctttacccgtggatgatgtgtcgacaaaccgtgttatcacttgtgccaattagcttcttagagttggcttccaagctttcatggatcctttctcgatttcttctagctatccttttgtagcttttgcttgtcccttgttcttatgttgtttctgccttgttcctagccttataacccttgcatttgtggtagttctggttcttcttatattatgatgaatgaaacaagtattttgacccagaaattttctttcataaaccgtttttattaatatgaattatatttggttatcctaaattatttttggttatattaaaattaacgcgacttgattatatatttgtatgttatatttaaatatggttatattaagtatgttaaacatgaaacttgatgagtatatattaatatcacccataaatttgcaatttgtaccccaaggtggtgcatatatcaaatacttttgattatctttaaactgcacaaactttttcgatttccagactaatacaccaattaataggctattatatgcctcaaaccgaccattttcatggtgcctccaacgttcacatttggataaatcggaaagaaatagaaaaccagaccataaattttagtcaaaccaaaaattagaaaattggcaattgataccagacaaaaaaagatatgttacctctgtgtctaacgctatattctctcctttgttatttatctacttggattgtaaatttggctcctagttctatatatgaaggaacatatccaaggtatgtgttatttgttaacttaatcattcactagttgtttcgtatccaaaacaagagttgttgaaatcttcagacacactaactattcggctccgggttctatcaagatccaaagtatgtggtataaactctgtcattccacactaattatttaatgctataaatagctttgatcttctccatatttctttatttaaagatttggcttttttacctttgctttcacttctattcattgtcttcctctgttccattggtaacttccttgttctttcatctaagtgttcttttatcatagttcttttactgacactttatacttatctagtgctctcatttccttacgcagctccaaattcaaacacaagtgattttgtcttagactgtctcatgcgataaggtaacactactatatattttggtgtatttcatagattgccataagattatatattttaggattaaaagcttaacaatatttgatagaagtacgtgggaattagaatttcaatatccttacgtagattcgtttaaagaataactaattctaggcttttgcatggtgtatttttatttttagtgtgtttgactgtttgttattttgtaaatcaattataataaccaactttggattcagtgttggagctagttatcttcgatgcataattttgttttaaactttctcttaaatttttcaaagtttttaattttcttttcaattaccgaagcacaagttgtaaaaaaagtttatatttttttttctgaatataatttaactttatattaaaaaaaaaaatgattataattaacttttcgccatcatgattttttttcgcagggtttatttcttttgaactctttgctcttaaaccggtggaaaaaaaaatataaagaaatg

SEQ ID NO: 25248 - DNA, 3000 bp, Unknown; identical to SEQ ID NO: 13871
  misc_feature (1)..( 3000): 2750-1469P.txt file - cDNA_ID_2704409; gDNA_ID_2214663; Annot_ID_136544

SEQ ID NO: 25249 - DNA, 3000 bp, Unknown; identical to SEQ ID NO: 13883
  misc_feature (1)..( 3000): 2750-1469P.txt file - cDNA_ID_2704443; gDNA_ID_2214664; Annot_ID_188961

SEQ ID NO: 25250 - DNA, 3000 bp, Unknown; identical to SEQ ID NO: 13883
  misc_feature (1)..( 3000): 2750-1469P.txt file - cDNA_ID_2704443; gDNA_ID_2214664; Annot_ID_136562

SEQ ID NO: 25251 - DNA, 3003 bp, Unknown
  misc_feature (1)..( 3003): 2750-1469P.txt file - cDNA_ID_2704455; gDNA_ID_2214664; Annot_ID_188955
aaagaatgatgaagatgaagaagaagaagattcgtataagacagctcagttatggcatctgcctgaaccgcgaggaatattagtgcaaccgttccgaccagaaccacggaccggtcctctttgcaacgcctgaaacagaagccggatctcatctacgggatctgggaaaggcctcatggcttcaacttgcgtagcgtccaagaaaacaacgaacataacaactaacataactacgaccaccaattgttttttcatcatgtttagaattttagtttttcgaatgagaaacaaaaacaaaattgagcttttttattggtgaatgtagagttttttttgtttttgttttgtatgtgtaataaattcgataatgactcatatatatagggtttttgagatgtcattgtttgacttgtgctagtttggtctcactatcttatgtttatgtatacacacacatacatgaaatttgactttgactttactacaaaagaattcgttttcaacattttgaaccaaatttgaaggattttgaaatataaaattcacttagacacggtttgtccaagtccacacaggcttttgctaaaaatatacaagacctggccctagcagcctcattctaaaccgaattctggtttcggttcagattggtttcatttggcttcgtagtcagatacaactttctcttttcgtgacagagtgtggaaatggattctcttttgctaattgaaagatattaatagacactcaactaaaatatatatcatctcttacaaaagcaaagtgttttctttttttaataagttggatagcttttggtgaagctttgttctgaaagagagtaagagatcattgttaataatatggtagtacttacgatactagagatcttatgataaaataatgcgaaaataaagatacaagcatgcatgcgtcaaaaagtgttatgatgacaaatgaatgtactctaattttcatatctaaatttttactaatattctgaaggtattaattttcgagttattaaatcgctgtaatatgtttatattttgtaagagaaaaatttggggtactaataaatttgtctttagccctttttcgtctaaatgtacgaaattaaatgatctatggacgataatttctagtttgattcatcgtatatactagtccaaattgtaaaccaaggcataagattcgtcgagaatgacaaccagaagagatgaggagtgctaattagaggtgataaatcataaatataccgccactcttggtttgagtttctcttgtacgtagctacaacttgacaactatgccgccacttttttttattgatccgtaccatttgtattgtatgcaactttggtatcattttgttgttgacaaagttggtaatccatattgtatatcacattggtaaaaagttgctaaaaaagagtctatgcttattcatcaaaattttcaaaggattgatttatcaaagtttataaacacgtggaccatatatcaaatcaaaattccaattcaattcggtaagttatactgtagttattaacgaaatttatgtttgaaattagttaaatatgattatttgtttacgtttgcattgaacatgtaagaataccacacatattttaagatggtaaacacaatatgtataaaactcaaacgaaactttaaagtcgccttattttatgatacacctgatcagtaaataccacaatactattacgttcataaatatacatgtgtttcactttcattaggagcagtaaagtaaacaatatgcgtggagattagagatttttcttttatttttatatttagcttgattataacttaataaaaatgtgtatgtgtttatagataaaatcagggtttgtttgtttatttgactcgggaattttggtctcttaggaatttcatgagatatgacttttatttgggaagaaactcggcttgaaaacatttgaacaacacaattaatattggaattaatcaaacacccgactcggttcgcctttacaccacgagttctttattcacacgcaaaaaaattctgaaaaccggatcataatcccggtttagttggccgagcatattcctaggtaggtccttacgatttatgctcttaaacaaggcttatcacttatgttaattgttacatacttgcatgcgtgtataggactataggtccacctaacgaaatactacaattgagaaaacaagttttctttaatatacaagtttaattacatatatgctcgcgtcatgtcatcgatcatgtgagttcatgtttcttcttctttttctttaatttattttatagtataaagcatgcatgattcatgttgtaacttatttcaaaacattgattatataataatctcttataagattaaaaggataattctcttacttttctgaaacgttctccgacattgctttctatagtaaaatcaggtgaatgtaaaaaaattgaacattactaaatcatcaagtcaatttgaattttaaaattacatgaaaaagtgccttttgtcggcaaagtttaaataatatgatcaaatcttgtatttaagcacaacaattaagttcattttcattcctaccataaaaaaacaatattaagtttcattttcattaaaaaaaatttgaaataaatcaaaagtttaattaaattaaaattttgatgcacattttgtagtcgtgaaaacacgtcttacctaaattcagagatgcctcgctgtttaatattttggtttagtattcggcaccacttgtcccggtccggttcgttccggtttaggatgttctaggaggcgacacattgctctctctctgtacggcttcttcttcttctcgctgacgctctttctccgtcaattctcttcgaagatcgttttgatccaagagagaattctctgagagattgagaggggaagagaaattcttcgatccatagagagataattctctttgaacatcgatccatagagagatatg

SEQ ID NO: 25252 - DNA, 3003 bp, Unknown; identical to SEQ ID NO: 25251
  misc_feature (1)..( 3003): 2750-1469P.txt file - cDNA_ID_2704455; gDNA_ID_2214664; Annot_ID_136557

SEQ ID NO: 25253 - DNA, 3000 bp, Unknown; identical to SEQ ID NO: 13885
  misc_feature (1)..( 3000): 2750-1469P.txt file - cDNA_ID_2704459; gDNA_ID_2214664; Annot_ID_136558

SEQ ID NO: 25254 - DNA, 3003 bp, Unknown
  misc_feature (1)..( 3003): 2750-1469P.txt file - cDNA_ID_2704461; gDNA_ID_2214664; Annot_ID_136560
caaaagcatttaactttaaccggaaaaatcttacatttttttcctcctggatctctctctctatatctgcagattcacactacagctgatttagatctatttcgtaagtgggtctttcaaagtcgtctcctttgatctactttgattcagggttaggattaaaaacttctcctttttctatagttgcttcactgtttctattccatggagaaagttgctagctttaatttgccaacttactattcttatgtgtaataatcgtttgcagggtcgttgatttggtgataagtcagtagaaatggataaggagaaatctccagcacctccttgtggaggtcttcctcctccatctccatcaggtcgatgctctgcattctcagaagctggtcccattggtcatggttcagatgctaatcgaatgagtcatgatattagccgtatgcttgataacccacctaagaagattggacatcggcgagctcattctgaaatacttactctccctgatgatttgagctttgatagtgatcttggtgtggttggtaatgctgctgatggagcttctttctctgatgagactgaagaagatttgctctctatgtatcttgatatggataagtttaattcttctgctacatcttctgcccaagttggtgagccatcaggaactgcttggaaaaatgagacaatgatgcagacaggcacaggctcaacttccaatcctcagaatacggttaatagtcttggcgaaaggccaagaatcaggcatcaacatagccaatctatggatggttcaatgaatatcaatgagatgcttatgtcgggaaatgaagatgattctgctattgatgctaagaagtctatgtctgctactaaacttgctgagcttgctctcattgatcctaaacgtgctaagaggtaattggttttcgtttttcttctgtgattctctggtttcttaaatcctgtttatagtgtggatggacacggtgactatttgtgtgcttttggtttgaaccttaatgccaccagtcatttagttgcttcagctgttcccacataacttcagctttttaatgagtggagcaagtgtataatttgtttttgtttcatacaataggatatgggcaaacaggcagtccgcagcacgatcaaaagaaaggaagacgagatacatatttgagcttgagagaaaagtacagactttgcaaacagaggctacaactctctcagcccagttgaccctcttacaggttagttttgactcattgtacggttgttctttcttcatgctaaatgaaactaaatctagccttacaacgtttgttcgtgcattgtgattttttatgggttgaaaacttgtgctcttttcttcctgtttgtatagagagacacaaatggcttgactgttgaaaacaatgagctgaagctgcggttacaaacaatggagcagcaggttcacttgcaggatggtgagtctctcttttatcacaaacaatatccctctgtgccaagactgctatagttggttcatatcatcgaattgaatcttctctattaacagaactaaacgaagcactaaaggaggaaatccagcatctgaaggtgttgactggccaagttgctccatcagcgttgaactatgggtcgtttggatcaaaccagcagcaattctattccaacaatcagtcaatgcaaacaatcttagctgcaaaacagttccagcaacttcagattcattcacagaagcagcaacaacaacaacaacaacaacaacagcaacaccaacagcagcagcagcaacagcaacagtatcagtttcaacagcaacagatgcaacagcttatgcagcagcggcttcaacagcaagaacaacaaaatggagtaagactcaagccttcacaagcccagaaagagaactgaggaatatgaatatgtcccacgtaagtgagaggttctccttctgaacaattcctttctcattcataaattgttgttcatccatcacttgcagtctcttggattttagggttttagctaacacagcttaacgggtgccttggcctacagggtattggcgttttggtacgtagaagaaaccttttggtaaggtcattgaagataaacatttgggtaagcccaaagaaacagagttccgtgcattgcaaatatgcaatgcactgcaattattagttgtttggatttgatatagagactgagtctcgaaaccatagtatgtaaaaatataatcacgttcaaaagctgttaatttgttataatcttataacaattgtgttttaagatacaaacctactttgtgttatgatatttgttcactattggttttggtatatatccaaatcatttttcagggaattaaatactgactttattctctaaaagaaagaaggaaggccacaagatgtcaagattagtccacacaaatgccaacaaacttgtattgatgttaaagaaaattaatgtctcctccaatgtgtaatacagaccgcaaaaacatttcagccgacgaaattgttgtgcaacattgtccacaagattttacggctacactgtatacagactcacgaaaaagaaaacattaatagtcttttcagtttccataagatcgctttacaataatatcaaaataaaagtgaaaaagacagagaagaagagaaacaacgagagccgcagaagttgaagaaatgaggacctacaaggcattgatgtaagaagcaaggatgtggttccttttgattcccaaaatcctcttaaaatctcataaagcccttcttatcttcttctcttctcctcaacttgaatacacagaaacaaaactgcttttgtctctcaagtcatttgtcttataaaaaggttctgttcttgaacaagggaaagaaacaaaaggctgataactcctgttttgtagattcctctgatattcagattcttacttctcaggaaaaccctaaagaaaatttctgtttttttttgagaaatatg

SEQ ID NO: 25255 - DNA, 3003 bp, Unknown
  misc_feature (1)..( 3003): 2750-1469P.txt file - cDNA_ID_2704467; gDNA_ID_2214664; Annot_ID_188965
atcaataaaccataaaaaataatgaaaaacaaattcctaaagttacttgggtctcaagcaacattgtgacattatgaggaatgaccagagctgcttctaccacaacgggttggagaagagagagcaaagcaaagttttccacttccatctcgaaaggaccagatttcaatcacgtcattgactttgaagatttttttatcaatcacattgttccaaccatgacttaacacatatttccaaactgtattaccattccacttctttaaataaacgacatgcttatccgattcaggatccaccaaaaacactttcaaaccatcccttttagcctttaaaaagtcttcatctaagaatctggtttcgtcctctgtcaaaaaatctgacttctctaatttgctgagatgcattgagagacacccctggtttttacggagatcagtcgtacacagcaccctcctctttatgatcagctttggatcgtatccattctcttttctcatcactttcacgagccagtctggtatcgaagaattgcatgtttcgggactatcagcaggacataacgaaacgatgtcgcttttgttctgctgagaggggctcgggatgtcgaggatgattttcttttttcctttgagaactatttgagaaaattcttccaacatatccagcttccaaaacttacaaatatcataagcctccattgtgcggccagagaactacaagaaattaaggaagaggtttaataacaagcttaagagagagatagagaatattatataacagaatttttaattacgttcttactaaggatttgctcttgtttttttcccaatcttccttaaataagttatatatatatatatatatatatattctagtaataaattcttattttaataattttctagtgataaatttttattttagttctcactattttaatttttaattttaataattaggtgaaatccagttaattaacgttttttaatcaaatttttgttttatttcatttatttttcccctaacataaataggttttagtttccaaaagtaaaaaaaaattggattagtttatttgtttatcttgatgaattttatttttttgtgaaagattagtttctttatttcccaaagcaaaacatgtttatcttttgtcatccatgacccaagagaaaaaaagttttgtgtacaaaaattaaaattaggagataatggaatggtctagtggaaaccgaaacattaaactgccattagtattttcatggttattaatgattgttaattactattttgatgaactaccgttcaaagtctttgactttcctaaaaatttcaggaatctcattctcatccgtatattatcatcacctattttagctttgaatttaactataaataaaatgtttgaaacacaacaacggaaacaaaattaattaagaaagaccttctttgttcacaatatggccaaaatgacaataacacacatgaagtttcttcaactgttgttatctttagtgctctttgtattctcaatgtcaaatgcaatgccaatctcagacgtacataatttttgcaaggaaacgtttgaagtagaattctgcatgaaatacattgggtcggaccaacgtctcgtagccgcacgcgacttcagtgacatgcttttaattccggtaacgttatttaatgtgacaattttgattagtgatatgtcagattagttgatcacatatattaccaaaaaaggcaagatatttgttcagtgttggtaaaattagggataatagtatagattagttgaaaattttcaccacaccagttcttgtaagattacatggcctccaaaatactaaatagaagttatagaaatctgtggtttattcatattctacaaaagaagtattatttttggtttgtgattgagaccttcttatcagatatctgagactcaaattcaagtgaccaatgcaatcacacaaatcaacaatatccgccaaaggtttaatgacacgcttggaaagaatcggatcgctctatgcgaggaaaaatacgagagcgcgggcactagttttcacaaggcttgggaagtcggacagaaaaagtcaaattcatcgacggaccatatggaaataacccgaaacacgcaagctggctttgatgctgtgtgcgagtgcgaagacgaatgggcaaagcatggtccgaaacaagagtctcctctcactttctattaccataacgttctgaaactatgccaaattactcgtcttattatcagcaagctttaggcttaagtacgtcgtattggaatttgatttatttacgatattaactggtttagcttattcactcacacgtttattaacaccgattgttctctgcttctagttgtaaacccgatttttgaaactatatgtatttattggtttaaatgaataaaacctttgtgatgtttttgataatttatcatcattccgtgaaaaacatgacgttttaaaatctcgagtttcgacgcaatttgtggtatacacctgaatgagagtttcaagcaaaaactaagtccggaaaaatgctaaagatgtatgctaaattagcacaaattcgaaagcaaaaatagttgtctatgatgtctttttggagatgcatgatgcaaatatagagtattctagatttagtaaggaatctcttgaagagattctcttccatacattatcaagagtttccttttttatatatgaggaaaagaaagcatgaagacagaggacaatttcctatccataaaaaaaggaaattatctattgctattagtacgagaataggaaattggcttattgtatagccacaacctatttagtataaatatggtgctaaagttttggaaaagtttagcacaaaagaataagaaaattctaatacattaaggttataaagtttcttgtaagaaagaataacgcttaacagggctaagaaaaaaacacaagaaaacacttcttgtttctcaaaatg

SEQ ID NO: 25256 - DNA, 3003 bp, Unknown; identical to SEQ ID NO: 25255
  misc_feature (1)..( 3003): 2750-1469P.txt file - cDNA_ID_2704467; gDNA_ID_2214664; Annot_ID_136565

SEQ ID NO: 25257 - DNA, 3000 bp, Unknown; identical to SEQ ID NO: 13890
  misc_feature (1)..( 3000): 2750-1469P.txt file - cDNA_ID_2704475; gDNA_ID_2214664; Annot_ID_136567

SEQ ID NO: 25258 - DNA, 2762 bp, Unknown; identical to SEQ ID NO: 13790
  misc_feature (1)..( 2762): 2750-1469P.txt file - cDNA_ID_2704491; gDNA_ID_2214652; Annot_ID_188662

SEQ ID NO: 25259 - DNA, 2762 bp, Unknown; identical to SEQ ID NO: 13790
  misc_feature (1)..( 2762): 2750-1469P.txt file - cDNA_ID_2704491; gDNA_ID_2214652; Annot_ID_136436

SEQ ID NO: 25260 - DNA, 3003 bp, Unknown
  misc_feature (1)..( 3003): 2750-1469P.txt file - cDNA_ID_2704499; gDNA_ID_2214665; Annot_ID_188988
ttgagacttatttacagtggctgccaccggcatttaataattgtttttgataattagaaagtaaatcttcgaattaaatatttgcatttaactacctttccaaaatctctctgcattaactatacgattaattactaaaataaaatttccaaaatatttaatatcatttaaatactacaaaattatcatttttgatattgctttttttttatgactataacaattcgattataagcagcaaaccgtaaagatatttgatagcaattaattactacaaaattataaaatatttagacaatgattcataaacatatcataaataagatcaacattaataaaataaatagttttttttacgagacgggttggcgggacgggtttggcaggaagctacttaataacaattgtaaactataaaataaaaatattttatagatagataaaatttgtaaacttttatatatactaactttaaggaaataaattgtctccgcggtataccgcgggttaaaatctagttaattagtgttatcgactcatgattaaatatatagaattgatataaactgaacaagatttcaaaagtattcatatgaaaagaattaaaaaaaaaagcataaattaaagcagtatttaagtcaatacttttagatcttctctcattgcatatatcaatataagagaaatgatcgtgtattaaattatttggtaagtctaacgttttaaaggtttattatttgaaaaaacttgagtgtcaatgttatcaaagactcaaaataaaattactaaactaataagaggttaggtaacgaacaagtacaacacaaaaaaattagtaaaataaaaagagtataataaaagtagtgcttaatttattaacataattttttattttatttttatcttgaaaaaatcaattaagagtaggattgatgatacatttaatttgcttatttaatatgattaatattttaatttaaaaaatatagaatgacacatgtcatttttttgtgtgatgatgtgtcattcatatggaaagagttggccaactttcatatatatgattagatttctaaatgatcattgccgtaatattagtaaagatgtgtccagtgttttagcaatttttaccaaactaattttgatttacatctttaattaaatatttcatttattaataattaatgtcaatagcatgacattgtaaataagttcaagtacaagatttatttgttaaagtagctgaaaaatgtatatgtagattttagatctctaaataagattaacataagaaatctgtatcggtctaactaatgatgaatcgcgaaggacaacgttagaaaactaatgacgaaaatatgttcatgagaataatatatactaaactaataagaggtttggtagcaaacaactacaacacaaaaaaaagtcattatctagtagtgattattgataataaaaatttaataaaataaagagtataatgaaagtagtgcttaatttattaacataatttttttttattttattttgaatcaattaagaataggattaatcatacatttaattttagagtatttataataaatgactatagatttgaaaagaatgtacaaactaaccttgagtcacagtatcttgtcggaaacatgttggagaacacttgttattttctcttattacatagtatttataaaaagcacatgctattttttggaaaaaacattgtattcagtttaatatatctttttatcatgatattttgtagtaatacacgttttttattgagatcacacgtgatttctttaaaaatattcttattttttagtaatacatggtttttattaaaatcacatataatttttgttttaagattctgttcatgtaaaagaatttcataataatgttttaaaaaaaaaaattcataacgtattatgaaatagcatgtttttaaactaaatataacatgtgaaattttaatgttacatgatattttgaaaaattacacggatgtgtttcgtttacttttcatcttacaacaaataaaggatagctttattatttcctttcttccgacaacgtgggtccatggttattttgtaacaaaaaactttatctctgctagtttcttaatttgtatgttttatttggttatctactaatattacctttaattttattattttttaaatttaaaaatatagaatgatatatgtcaaacttttgtgtgatgcttttgtgtgatggtgtgtcattcatatggagagtgttgaccaattttcatatatatatgattatatattaagaaactatatattacgttgtctttttcaaacaggtaaaaatgttatgagatttatttgatttttaagtaattatttaaattaaaataaataaaaatatatattattttaataataggggctaaatagaaattatgtggaggagaggggctgcgtagattaaaatccaaaaaataccgtaaacaaaaaaaaatattcccttgcgagagagggaagattgacttattggcacgcagccctaggcattttcgtttcgtctccacacgcctctctctctctctcgcttcttcaatcattcatcactccgacgtcagattcaaaatcctccatgatcgatcccaattgatcaatcaataaccttatcttcttcatcttctctgtcagtatctgaatctgcatctggaagcgtgatttcatcatcatgtatttaaccgcttcatcttccgcttcttcctccatcatccgagctgcttcttctcgctcttcttctcttttctctttccgatcggttttatctccctccgtttcatctacttctccgtcgtctcttctcgctcgtagatcttttggtaccatttcccctgctttccgtcgctggagccattcctttcactcgaaaccatctccgtttcgcttcacctctcagatcagagctgtttctccagtcttagatcgtctccagagaaccttctcttccatg

SEQ ID NO: 25261 - DNA, 3003 bp, Unknown; identical to SEQ ID NO: 25260
  misc_feature (1)..( 3003): 2750-1469P.txt file - cDNA_ID_2704499; gDNA_ID_2214665; Annot_ID_136572

SEQ ID NO: 25262 - DNA, 3000 bp, Unknown; identical to SEQ ID NO: 13898
  misc_feature (1)..( 3000): 2750-1469P.txt file - cDNA_ID_2704510; gDNA_ID_2214666; Annot_ID_189003

SEQ ID NO: 25263 - DNA, 3000 bp, Unknown; identical to SEQ ID NO: 13898
  misc_feature (1)..( 3000): 2750-1469P.txt file - cDNA_ID_2704510; gDNA_ID_2214666; Annot_ID_136580

SEQ ID NO: 25264 - DNA, 3000 bp, Unknown; identical to SEQ ID NO: 13899
  misc_feature (1)..( 3000): 2750-1469P.txt file - cDNA_ID_2704518; gDNA_ID_2214666; Annot_ID_189008

SEQ ID NO: 25265 - DNA, 3000 bp, Unknown; identical to SEQ ID NO: 13899
  misc_feature (1)..( 3000): 2750-1469P.txt file - cDNA_ID_2704518; gDNA_ID_2214666; Annot_ID_136584

SEQ ID NO: 25266 - DNA, 3003 bp, Unknown
  misc_feature (1)..( 3003): 2750-1469P.txt file - cDNA_ID_2704529; gDNA_ID_2214666; Annot_ID_188995
aaaacttataaatggtccatcaaaaatcagaaatttttaatatttggtcagctttatgtgttgtttagtcgtacctcttaaagcaataagagttttgtaagatggattatgctctaaacatggccttatagaaaataacaaccacaccagtttttatgtccgtcaattcttcatacataagcttcctttccaattccatcaactccaaaaataatcttagaatgacaacatttaaccattttgactctccacaatgtaaatcaattcacgtgaactttgtgatttatcttttaaaagacacaacatagaaaaaaatctcttccaaaatttggatatattaccactcgaagtggttaaccatgccttaatcaaatggatagacctggtttcgtcccattagaaatgatcttcatcttccatcgttataagatacatgccatcaaaagctacatgatcctcctgatgatgaagtgtcgacgatatggttcatgaaacgcttccaagacattcaagcaatgaagaatgggcgtgatagatacatgaggactctctagtcctttgacaacgtatatcttctcataatttcgtgattggtgagctttaagaaagattagctaattttatgacaaatatcttgacatacaaaaaagttttgacctagcagctcccacaaagtcacatctcactttgacttactccacaagacccaaatttaactacacgcaccttattggtcactattaataacccttataatacaccttcccgtagacaataacttacgtttcttcttcttcttcctttaaaaaagttcaaattaagcatctcttctctcactttaccctcttctctctctctgtctctctttctttttccgtaactcttcatcttcttttcccagatttttccgttttccaattctctgtgtctaattccaaacttcctaggggttttttctccaacgtgagaaaaaagcttctagctttagcgatgggatgtttcggacgcactccgaaatcgaacaaacgatcagataccaaaaccacgaagaacaacgatttcaccccaaaaaaactcaccgtcaatgcaaatcgagataagctgacacaacccagctcaggtatcgacttgatttcgcataaaaaatcgatttttatttcgaaatttagaatcttgcgataattaggttttgtgttcttaatgttgcatttatggattcgttctgatgtgtttgttgttatgtctttgttgcgtagattgtttaaaagttagtatatgtggagatgtaagcaaggagatagttactaagaaggatcaattagctttggatgctaaagatactaatgttgaagatgaagttatagtgaagaaagcacagacttttacatttgaagaactctctgtttctactggaaactttaagtcggattgttttctaggagaaggaggttttggaaaagtttacaaaggtttcattgagaaaatcaatcaggtttagtatttgtatcttgatctaatgagttacagtgtattgtggctagtttggttagaggttttaagagtttgtgaatggtgtttcgataggttgttgcaattaagcaacttgatcggaatggtgctcaaggaatcagggagtttgttgttgaagtgttgacattaagtctcgctgatcatccaaatctcgtcaagcttataggattttgcgctgagggtgttcagagactgttggtttacgagtatatgcctctaggatctctggataatcaccttcatggtatgttatattggtattgcatcacattgctttattgattatgttaacttgttttcgtgtattctgtttggttttagatcttccttctggtaaaaacccgcttgcttggaacactcgaatgaaaatagcggctggtgcagcaagaggactagagtatctccacgatacaatgaaacctcctgtgatataccgtgatcttaagtgttcgaatatcttgatcgatgaaggatatcacgcaaaactctcagactttggattagctaaagtaggaccaagaggaagtgaaactcatgtttccacaagagttatgggaacatacggttactgtgctcctgattacgcattaactggacaactcacattcaaatcagatgtatacagtttcggagttgttcttttggagcttattactggaaggaaagcttacgataacacgagaacacgtaatcaccagagtcttgttgaatgggtaaagactaaaaacatctctttctcctttttctaattgagcatcataattcacagttttgactgtaatgttacaggcaaatcccttgtttaaagataggaagaatttcaagaaaatggttgatccgttactcgaaggagattatccggttagaggattgtatcaagcacttgcaatagctgcaatgtgtgttcaagaacagcctagtatgagaccggtgatagctgatgtagtaatggctttggatcacttagcttcttctaaatatgatcgtagtcaccgtcaaaagcaggataatgtgaccgagactaaagtcgatgaagagaaaacacttaccacagaatctaatgtttgtgtggaggagaaacaagagatcaagatatgctcagatcaagcaacttaatcatcaatgaggattcttaaaattttgatattttcttgatttgtagaatgcttcgtttacgtaagcaacagttttgttcgaatttcgactcatacttatatagtaaactgtagcaaaagttcggtttatcagaatcttaaaccattacgtatgggaaagtccggtttatcaccaaaccagtttatggaaacgaatttgtatgatgttctaaataacgattttaacctcaaagcttctgttaaattacgattgtgccataactatataaaggagagacccgaacaaacaatccggaagcggaagctaaagttaagcaacggccgccgcgaagctaacctccaaagaaggggaaaaatg

SEQ ID NO: 25267 - DNA, 3003 bp, Unknown; identical to SEQ ID NO: 25266
  misc_feature (1)..( 3003): 2750-1469P.txt file - cDNA_ID_2704529; gDNA_ID_2214666; Annot_ID_136576

SEQ ID NO: 25268 - DNA, 3000 bp, Unknown; identical to SEQ ID NO: 13902
  misc_feature (1)..( 3000): 2750-1469P.txt file - cDNA_ID_2704537; gDNA_ID_2214666; Annot_ID_136578

SEQ ID NO: 25269 - DNA, 3000 bp, Unknown; identical to SEQ ID NO: 10017
  misc_feature (1)..( 3000): 2750-1469P.txt file - cDNA_ID_2704544; gDNA_ID_2213619; Annot_ID_131932

SEQ ID NO: 25270 - DNA, 3000 bp, Unknown
  misc_feature (1)..( 3000): 2750-1469P.txt file - cDNA_ID_2704555; gDNA_ID_2213619; Annot_ID_180878
caataattataattgttttccaagaatatcccataacggaccaagagatatatcaattaagtcactctctgtcatatttttagatgaattttcatgtaactttagatttttaaattagcttctattgtaggtggcaaattttatgtatatctaaatcatggatataaagccaactaatgttttgtagttgatgctaaatcctcttaaataagcaacgaattggtgatatcagtggaaatccgaaattttgttgctgtcaatattcaacaattatttgtaagaaaatgtgtaaaatgcatgattaaaggccaacttatcattagaatttccttaagtttctcggcttgaacctatataaaagagtatcagtagtattcagtacaggttcttctcctcctcaaacctaaaagttattgttcttctcttccagtctttttttaacagccgttttaccgacctctattagaactaaaatatgattgatgtactagcgatgaaattgtccttatcgttatctaatgataaaacttgttgaactatatggagccgtcctcaaactttagaaacaaatattctcgtcttcaattatggcgatttagccataccttatatatttggtaatgtgtaacgtaactacttacgtagatcgttttatcaacaaagtttaggtaatggaaaaagggctggatagttaatctttctttattactattttttttttttttgtattgtatgtctaaatctatctcgcagttgttacatgagactcctcatagtaaaagttttgagtgagtgaaacaaaggccattgtaagtggaggaggataaagtaattaagtacgtcgcaagctgatccatcgttatctgtgagaactgagaattaaaagaaagaaacaaaaacaaaacaacatgtggtggaaaaaaaatagtatgcaaaaacgtaaaacgctaggtgtcatgatttttgtggtgtgaataaattccattttcggcagaaggacctgtttctgcggctgcgattcggagccgcgtcaaatatcgcctgtttatattccgggtcaacaaccgtctctccttatttgaccagagtccttctgtttttttttgttttttttttgtggataaataaacagaataaattagggctcgaaatacttatgatatgtattccaaaagacatagctttgatcacttaaacaagccacgcctagctgagaaagaaaaggctttggctggtttataagaaattaataataactttctggcctttaatttagataaatagaacatttaatttgtaattatatattttaatcatgcaaataataaattatctcaaccaacattataattttatatatctttgaggtcattatttttgtaaagaaaaacgctagaattgaaatatttattaatttagacgaatataagttggacaatttaatccatgtaagattaagattttgtatgccatcaatctaacaacttgtctagacaactaatgtttaacaataatttttgatactgcaaaatttgtttatgtgaagttacagaacttgtaggagttagattgttaacgttacaatactatatatagttgattcacgtgtttataggcaacatatcaaattaacatgtttgctttgcagttaaaaattgttcaagaaataagccaaaattcatcgacaaatttggagctaggggagattcggtaggtacaaattaaacaaaacttattcaagtaattaacaagtaaaataaataatcgtttaccacgtgcccatccagctgtgattccacttcaacttctgactaaggaacggaaaggcattccaagtttcctcaattaggctcaacttttcagagatgaaaagaattagtatgtgcaaaataacgtatagattcacaggatgatacaaaatctttcaatgacatggttagtcaacgtaaacaaatttgttttggaagggtccatagagatttttactaaagcaacgtggagttttcatgtgtttgcaaccgttaccaaaacccaacagttagttaacaactttattataatgaataaaaataacacacgagaattaatgacatagtgtcaaaaagaagaagaacaagcatgatattttatgccgactaaagtattgtgaccatttgttgttgctgaatcgtcatctccaactcctaacgttaggcacgttcttgaaaaatatcccataacgcaaattctagattaagcccggtaaagtaaacttgaaaaaattataatatacaggttctttatttaaaggaaaatgtgacatggcagtgaggagaaactaacccatcttcctaatggacaaatgtcagcagagccatacatttataaagtattttaatgattaaggggacgatgatgatgtcatcagtagttgagttgggggtagaataggtaattcaagaaatatgtgattgaaagtggaaacgtaagctttctggcttttgtgtcctctctgagtctcagtgtcgggacaagacatgcatcagcatcacacatccgtgaatcggtgctttatcctcttctatcttttttaacttcacgactagaaaattgatttttaaattttgttttacacaaactgatattaactacaaattaagaataacatagaaattaagaataagtttctagaaatgtacatcaagtattggccgttaagtttcaacatatttataccatctggcctcaattacaatcataattcataaataatcttctgacacttaataagataacttttcaccgagtgatatattcctgaaagtaaattcaacgctttagaataatgttcttatatatttaattatttaccaaatacacactatgcttcaaactccctataaaaagaagaaaccaccttatagcacttctcctcattcctcacttccaaccgccaaagaaaaaaatcaaaaactccaacaaaaaaaacctcccaaaccctacccgagcagtcgccagatg

SEQ ID NO: 25271 - DNA, 3000 bp, Unknown; identical to SEQ ID NO: 25270
  misc_feature (1)..( 3000): 2750-1469P.txt file - cDNA_ID_2704555; gDNA_ID_2213619; Annot_ID_131927

SEQ ID NO: 25272 - DNA, 3003 bp, Unknown
  misc_feature (1)..( 3003): 2750-1469P.txt file - cDNA_ID_2704559; gDNA_ID_2213619; Annot_ID_131958
agaagcaaccatcaaaggagaccccgtctaaatcctcctccacatcgaagccttctgtgacacagtcagataataattatgaagattttccaaatagtcaaattcgcaaggtaaattaacatatttattactctctatgtagaatgatgaaatatgtcctgctgcattctgttttactttccccacttggcagattatagcaaaacgtttattggaatcaaaacagaagataccccatttgtatttacaatcaggttggtgactcacaacctttgtattttctttgtgtattttatttgctgtttaagcattttattttgcctgcagatgttgtattggatcctcttcttgcatttagaaaagaacttcaaggtttgtagactgctcttatcacacatcctggtatttattaacaacttgagaggctcagagtgaactgtactttcatgatctacagaaaaccatggcgttaaagtgtctgtcaatgacatagttattaaagcagtggcagtcgcactgaggaatgtacgacaagctaatggtgagaaattattttctcctcgtaaatgatttcattaaaaataactaaactatggtttgttcccatccctaactatgcgctagattaaaaccttagttcatcctctttaaggaaactcggcttccatgttggattattcttgcaatgccgtttacctccgttgagagtatttagtaaagatgttttgagattgtaatactgtaacattcaatatgactggtaatgcattttagactcggttttagtcgttacaagtaggacattttttggtgtgagtttgatgtaatgatttgtggattggaatcgtgtggttgttttttctcttctgctttctcaaacctttcttatggttgcttaaagttctctttctcaatgtctggcagctttctgggatgctgagaaaggagatatcgttatgtgtgacagtgttgacatatcaattgcagttgcaactgagaaggtacacttgtgtgtttgattttctgatcatttcaacagtttatccctcatcatcttggcattttttgcagggcttaatgactccaattatcaagaatgcagaccagaaatctatttctgctatttccttagaggtaattttattctctctgaagttaaacgaatatggaaggctatagaggcacatatgtttgatcagttcttaccatattccatgtgttgttgatcgctatagttatgaattttaatatgtcaaatgatttttggatcaggttaaggagctggcacaaaaggctcgatctggaaagcttgctcctcatgagtttcaaggagggacattcaggtattcatcatttttaagttattaagcatagtacggaattatcaatcatgtgtaacttttcctacttaacgagaaaaccatactttatcgttttgcagcatatcaaatctaggaatgtatcctgtggataatttctgcgcaatcattaacccccctcaggtaatcatagccttaacgatgcaccctgaatcacagattgaagattaagttttgctgtttgtaatttgtggtgtagaggatttagtttaatatttatagagatgcagatgtgtttttttggataataaacttcaggactatcaattgtcttgcaggctgggattctagcagttggtagaggaaacaaagtggttgagccagttattggactagatggtgagctagtagaatccttttgggttttcaactagggttgctattctgatcatggtatgacaagttttcgtcattgtttcaggaattgagaagccttctgttgtgacaaaaatgaatgtaacgttatccgctgatcatcggatctttgatggacaagttggaggtaatggaacattcataaatcccttcgtttcgagttttatgttatgctgctgccatatttcactgtgtttctcctttgttactcattgctttttctatgaaaccggctttgtttcagcttcgtttatgtctgaattgcgttcaaactttgaggatgttcgaagacttcttctgtgagaaagatccaactgtttaccaaatgaatcttggattactacataataaacctcggaccaacccacgtgcacatccagaaccagaactgctggtctacattgttaactctgatcacatgtttcatttttttccatttggttcatatacttaccaaaatttgttttggtctttaacaattcgtcttatagattggtaacttcctgaggtattttttgtctggtctgtcctctgcaaaataaataatttcagctgtcaatccgcaactggtgaaataatttaaaaagtattttaccctcatcaaaatttttaaaatgagattattgccatctctgttctaccagatcttattgttgagctccaagaaacgatttatagacttatagtggttagtgttgaattcatccgttaagtctttaaccaagagattacaaaatttctatccaaaatttagggtttaagtaccattacaaaagaaggaaatatcagagatttgaaggtgatgtaggttaatcatctgaagtagtctaatgtcttgcaaattgtgttgtaatttgttctatatataaagtttttgcattttcggagaaataaagaaaaaaatgatcacaatacatccgaattgatagcatcgcattcgcataataaaaacttgtagaatgaaaaaatgaaaaatcacataatgaaacaagaaactatacgcttacttattagcataatatgcttttatttatatttttagacgtaagatctacattttcatgaatcttatgcatattttctcgattggttcttgcataatcgtattaaaaacccgttattcaaccattatccgtgttacgaataaagtatgaaatataaatgaaatatggaggcaacagaagaagaaaagtttaaatgtgtgtcaaaattgtaattttcagaacttcagccggagaagaaagacatg

SEQ ID NO: 25273 - DNA, 3000 bp, Unknown; identical to SEQ ID NO: 9740
  misc_feature (1)..( 3000): 2750-1469P.txt file - cDNA_ID_2704562; gDNA_ID_2213619; Annot_ID_131955

SEQ ID NO: 25274 - DNA, 3003 bp, Unknown
  misc_feature (1)..( 3003): 2750-1469P.txt file - cDNA_ID_2704570; gDNA_ID_2213619; Annot_ID_131952
cagtttgagttgcccgagctatcaagaactaccgctaaaaaagtatctgttcttcgtaatctttgccaaaaggtaaataattatagacacattttcattcagaatttatttaccagggaatcctgattatgtcagttcataattgttattaatcacttcatttccctgttaacaggttggtgtcagtattgctgctcgcaaatacgacttcagtgcaaacacgccttttgagacgtcagatattttggatcttcggcccgtaattaagcactccgtccctgtatgctctgaggctaaagatcttgttgagatggggaaggtccaactggctgaggtaccttttgttatttcacactagctaacttttgcttgctaatttttgccaatatgtttgtactggataagatcaggagaaccttattgtgatatggattggcattcaactcttcaataagcatctcgttttagtttgcgaaagttgcattatgaatggttcttggtttagttttttatgtatgaaaatgattaaacttttgtagggcatgcttagtgaatcctacacgttcttttcagaggcattttcgatacttcaacaggtaagtaatctgtatacgcatctcgtcctgtcaaaataatttaacaccgaagtagctcatcatattctgattttaggtgactggtccaatgcacagggaagttgcaaactgctgcaggtatgcgtccgactgattttttgtttttctggaaaaatatccatgggctttcgttttagttgccttaagttttttgtcgtcttttgcttttcaggtacctggctatggttttgtaccatgcaggagatatggctggggccataatgcagcaacacaaggaactcattattaatgagcgatgccttggtttggaccatcctgatactgcccataggtatcaactatctttcttttatattaatgtactgtgatattgtactctcagctattgacttgcttcaaatgttttgatactgcagctatggcaatatggctcttttctaccatggactgaatcagacagaacttgctctacaaaacatgggtcgagccttgcttctacttggcctttcatctggccctgaccatccagatgttgcagctacatttataaatgttgccatgatgtatcaagacatgggcaaaatggacacagctctacgttatcttcaagaggctttgaagaaaaatgagagacttcttggtcctgaacacattcagactgcagtatgctaccacgctcttgccattgcgttcaactgtatgggtgcattcaagctctcacaccaggtactaaaactttcgtaaagtcttctagatcccacctttcgactctgttcttgtcaacatgagaactatatgtctcacctttcgacttaattgttctgttcttgtcagcatgagaagaaaacatacgacatacttgttaaacaattgggagacgatgattctaggacacgagactctctaaattggatgaagacgtttaagatgcgtgagcttcaggtttggtgcactgataatgactgaggagaacctcatttatctagtatacattttgtttggatttctcaaattttctggttgggttttgaatcagatgactgcacaaaagcagaaaggacaggcagctaatgcagccaacacgcaaaaggctatcgatctcctaaaggtatacttgcagctttagatttcggcatattttgctgaaaaggaataactcctctatctttgatgttgtagagttgaaataataatgaaatcgttttcctgattggtatacaataggcacatccagacctgatacatgcgttccaaaacgcagctgctactgggaggacaaatgcactgaactctgctgtccttggggagactcaaccacggggcagaggttttgatgaaagagcagctcgtgctgcagctgaagttaggaagaaagcagctgcaaaggggctactggttcgcccccagggtggtgttccagttcaagccatgccaccgctctctcagctccaaaacatgatcaataccgccacagtttcgtctgagaaaggtggagaaaacggggaggcaaaggtacaagagaagaaagaatcctctgaaaatgggaaaacagaaaacctggctcctgcaggattaggtgctggtttaacatctttggataagaagaagcaaaaagccaaaaaataagaaacagtaggatcttgaaggaaaatggtgctcaaagaaagtgcacgattctaagtagtgaagttggtttttgtctctggaagtcgataaaccacttgctgatttcattacatgacaacaacgcttttgtacgttaagctttgtttttcttcccattatgtcacaacgatttgggtaagtcccgcttccaggcatgtctggcttttttcttttttcttttcccctcacttttctgcgggtgtaattttataccacaaaaacgtcattgattttctagtaactccaataagctcacagttcacgcttatacctaaccttgcagccttactatttttttgtgctctatacaaaaatcttttacttggcttcttgtgtctctagagtctagactttagagggacactagattgaactcgactaacaacgaagaatcatggagtggatacatcaatttcgatcaaccattaatgatcatcacatacttcatttatgttcatcttccatcaatgatgaagatgaacagtggcctgtagtgatgttgtcactggccaaaacagtggtcaggcgtaacccgaacaagtacctaagtgtatatcaacccatttaagtttaagtctgcggcgtgagagacgggtaaatgggtaatgtttctaggcccaaattataggccttaataaggcccaattatccacacaggttagaagtgaggacggctaatggataatgttgacgacactcgcaacttcttccttatcgacacctacactctcctgctacaatg

SEQ ID NO: 25275 - DNA, 3003 bp, Unknown
  misc_feature (1)..( 3003): 2750-1469P.txt file - cDNA_ID_2704574; gDNA_ID_2213619; Annot_ID_131951
aagtatgtatttccttgtttcggagctgtttaacgtttctggattctctcttttatacacatactatgttggtacttgggttttattggcggtgttttttgaccttatgtatcttgtgtccatttttccaaccagatttctttttgacgagaactgtgcggactacaagtactatgtattcaggctggctgaagaggaaaaattaatttcacaaaccaaggattctggtgtacttcacagtggtaagtattagacaccatataattattttcagaatatgcttagccaagcatgtgcaaggaatatttggctcatttctttttactctccgaaaaatttctatcctacaatacgaatttatatgtgttctgtagtgtgagtgataatgtgaggctgctcttcctgctaccatattcttagcttcgatttccttcatttgtctttccaggtgatgcaggctcgcgaacgtccacagcagcaatccctttgcaaaagccagcttatcaacaaacaggatatcagatccctgcctcagctctctatgatactcctgtggaacctggagcttcttctagatctgctcaggcatcaattacaagacccagcgacagtatgttcattagccttatatcgatctaggttccttcctattactgatatctagttttgattgtgggttatatatgtctgatctgcaggtgactcctttagtgggccgaggggtgcagaccctctatcaatgatggagttttacatgaagaaggctgcccaagaagagaaaatgagacgtcctaggcagtcaaaagacgaaatgcctccaccagcttcccttcaaggcccatctggtgagaatgaatcctagtgctatttatggttttaggcagctgtaaggtcttatcgctcaaccatgtttgatttcagaaacttcctccacagaccctggaaagagaggtcatcacatgggtgattatatcccacttgaggagctagataagttcctttcaaagtgcaatgacgcagctgcacaaaaagccacaaaggaggctgctgagaaagcgaagatccaagcagataatgttggacataaactcttgtcaaaaatgggttggaaagaaggtgcttacttgcatcactctatctgtaaattggtgcccttgtttctttctgtatcttgtgcctttatggagacaaagagcttagaaaattggaggagtggattacaggtgaaggtataggaagctccagaaagggtatggcagaccctataatggcaggcgatgtaaagacaaacaacttgggagttggtgcttccgctccaggagaagtcaagcctgaggatgatatatacgagcagtacaagaagcggatgatgctgggttacaaacacagacccaatccactggtattttatccatctttagctccattctttttgtgatagcacttcttttactcaccatctgtctcaattgtactacagggaaatcccaggaaggcgtattactaaggatcaaatcaatgtgttatgcgcaattattatctttggttcacctcagcaccgtctgagctttgcttttctattataaagaatgttcaagcttttagattactgatatattgaagtgttggtatgcattgaatttgcgtttcagtgtgcaaatagatctctttgacagacatatcagttgaaatacaatggatttgttattgctaatgactgagattttgattcgattgtcataactttattaatgttttggaagtctgggacataatacactaagcagcaaggttattaaagagaaaggtaaatgaaaaaagaaaagaaaagaaagatgatatgtccttcctagttgatgatatcgcagggagggaaattagcagagcatctctgagggagctgaagagccatggagcggtcaatgccagagagtggaggtccattggcaaggaggcaaagacaaggacgaccaagtgtgacaacggcagagcaacatatctcggtcggtgggatcgggctaaaaggagcaactgctgctctacatggtatgagctgtaccagcgcggagaaaaatgtcctgctgcatcctcccacttcctcctcgggcaacattggtggtggaggtggttgttgcaggccctcttgctgcgctgcaacaatggtaagaacggttatggtcatgagcagcgtcattgccaacccaactctcatagctttcatcatcatgtaaacagcgatggtaatgagatgacgcaacaacgagatgctgctggtttatataccataccatataatgaaaggggtaacaatgtcatgccgtttcacacctctctcctacctcacaaccaaatagcctcacgattactccgtgtgtgtgtctccactgtccagagctttaatcttcgatcaaactcacaaaaattataacatatcaccggttcctcctagctacaaatattaaacccataataataatattgtggtcagtgattattctcacctactgtgggtatctaaaaacttgcttaaaattctgatgatttgcaataaatttcgcatctttcccgctttaaaaaagcccaaacaaagcccattagaaacccaaaaaggagggattggtttgttattctctgtatctctctcctagtattcagctctaacacatagagaggagtcagaatatcatcagccgcctctttcacttcaaccctccttaaacctcatctctttcctactccgccgctctctccgtcgtctctcccgttactccatttctctcgacccctccaggtaattccttttcagatcctctactagaccctttacttattttagtgaattggtctttctccatttccatctatcccttacgtatctgtgactttttccccccttttggattgtattcctcatcttcctctgtttccgtcaaatgaatgatctttctgaaattcaatcacttttgtatcgtttctgaatctttcctctaataggtgaaaatg

SEQ ID NO: 25276 - DNA, 3003 bp, Unknown
  misc_feature (1)..( 3003): 2750-1469P.txt file - cDNA_ID_2704578; gDNA_ID_2213619; Annot_ID_131945
gattgaaatgaatgagttagaaaaaattctgatgtgacaataaaaaggaaaaaggggaataatgacgtcagcaaaatggggacacgtgaaattatttttaaaattatttgggacaatcgacacagttgctctatcgctatttgtttacgtggggctgttctctctctatttatataataatgagatacggttttttcagcaaccagattttaaagttatctgattaaatctaataataggatagagatagagtcacagagacatgttgttgactttatgacattattttattctttgcttatccactcagtcatcatttatctcaccagtcagacataatgtgttgttgttgtgaatttgtagatgcttccgactatacctgattacctggccattcagaatcggtttggatcaaaaaatttgggttttcggtttagaaatcgaaacaaaccgaattagttgaaacgaaccgaatagaaattcggccaatttggttttgcattggcgtgtaccttgtgactacatgtgtgtgtgttagatgagatctatccacccatttttcaaatcatttttgtcgttaagctatcaagattctgatattttcctgctcacttttgattcccaaaacaaaaaactttcttcaattattctattcatcttctcatggcggctctctccaccaccttctactaccacccactctgcactaaccaccgtacaaagagacaagcctcaagcagacacggagttagatctatgagagtgatgtcttgtcggaagcagaaattaccagaagagaatgaaggagtgatccagagaacattgagaaggatgatttcagaggctgggaagattgggaagaatctgaagccagagaagaagaaaggagacgtcaaggacctgatgcttatgagtctctcttttgctgtttatgtttatatctctcaactattggtttgtgcttacttctcctggcaacatctcagcttccccaaatcttcatggtagtagctaagctagctcctccttgtaaattctgcacaaatcagtaataagataagaaattcaattccgacataggagaattgagagttgtgatctttcactttggtcttatataattgaattgttaagcttctcatacctctttatctgctttaactccggcagaaaaggcaaaccaaccattgcgataacactatcaaccagttaaggctctttgttttagagccgaaaggagatgcaagagcctcgggcagagtcgctgagtatgccttgaaaaccaaaactttgaccgtaattgttagaaagaaagagagattcctaaccatttcgtattggcctcctccaatttatcctccttaaacagagagccccatccattttccttctgtgtgctgcaccaaacctttcctccatagtcatatcactgcgagcttttccctgtacaatccaacctctaagtcagctataagcaaagagcttgggataaaagcttggttgtggagtgttcaggtaaggaaacaagaatcagcaaatgatcttaaagaaaaaacgttcctcctttgtttcatcaaatccaacaacttcagcgtcatctaacaattccgctatagatggaacattgggaaaaagaagagtttccatctctcctatatgctaaattcccagcaaacatgcaagagcgcacgttcaccagacttgatgctggaaacaccaatagctaaaccggccattacttgtatctctgttcatagaggacatttcactccttagtttttaatcttgtttaaagctctgtatactaacataaacatgcatgaatcagctttaaagcaacaaaagaaagaaaggaaaactcaatttctttcctcccaaatattctttttcattaggttcacatgaaacgcaagatttaagacctcagctttactatcaactttaggtaggtaagactacctaccattttgagaaggctcacaatgcaaaaatggaactcaccatccttgactgattcggtttcagctccagcaaaccaaagtgtttctaataaacttggccgtgcattgaaccacggagttccaaaatcaatgtctgtttaaatcattggccccagaatttgaactacacacagagtcacagacattcattacgatggttgaatgaaatggtcttgactaagaagtaagaacaactatgcacaattgagaaactattagctcgatttccagaaactatcactatcgtaatataaaagtcccaggatcgaccaaatcggacgagaaagactcaatgaagaaaccccataaaaacatggtcgaagtcagtataaacaaaatcaagagtttggtcgtcgttgtggatttggaggagaggagagtgagcttacagagtatgagaagcgagaagctcaggggaagtgtgactcgtcgtcgtcgtcttcgaagtcactcacgaccatcgagagatctgatgattttggtaaaatatcaaaaaaggacttcaacttttcacttaagtcaaaacaagcccctataaataaattctgttatttaagccttgaggcttgagctgcgtctttgttgttcactaggagagttatttgagcggataatttactaaaactgaatgtccatctcccaaacaaacattttacgttttcatgttatataaaagaatactatatcgttagctagaatattgtagttaaatattaaagtagtgtattttacattttgtctgaactttgtcatctttgtttcatgaatggtcaatggtgaataatggggagagaaggaacgtgaataaagggatccacaagtgtctccaccattttctgagtaaaaacaatcacatcctttcattttcaaacccctaaaccaaattgtaaagtcagaaaaaaagaaaaaaagaaacacacatacaaatcgaaaagcttttcttcatctcccacgttacaataagccctaagaacgaataaggcaactacagagagaaaagatg

SEQ ID NO: 25277 - DNA, 3000 bp, Unknown; identical to SEQ ID NO: 10018
  misc_feature (1)..( 3000): 2750-1469P.txt file - cDNA_ID_2704585; gDNA_ID_2213619; Annot_ID_180886

SEQ ID NO: 25278 - DNA, 3000 bp, Unknown; identical to SEQ ID NO: 10018
  misc_feature (1)..( 3000): 2750-1469P.txt file - cDNA_ID_2704585; gDNA_ID_2213619; Annot_ID_131935

SEQ ID NO: 25279 - DNA, 3000 bp, Unknown; identical to SEQ ID NO: 10016
  misc_feature (1)..( 3000): 2750-1469P.txt file - cDNA_ID_2704594; gDNA_ID_2213619; Annot_ID_131931

SEQ ID NO: 25280 - DNA, 3000 bp, Unknown; identical to SEQ ID NO: 10015
  misc_feature (1)..( 3000): 2750-1469P.txt file - cDNA_ID_2704602; gDNA_ID_2213619; Annot_ID_180880

SEQ ID NO: 25281 - DNA, 3000 bp, Unknown; identical to SEQ ID NO: 10015
  misc_feature (1)..( 3000): 2750-1469P.txt file - cDNA_ID_2704602; gDNA_ID_2213619; Annot_ID_131929

SEQ ID NO: 25282 - DNA, 3000 bp, Unknown; identical to SEQ ID NO: 10519
  misc_feature (1)..( 3000): 2750-1469P.txt file - cDNA_ID_2704610; gDNA_ID_2213659; Annot_ID_132500

SEQ ID NO: 25283 - DNA, 3000 bp, Unknown; identical to SEQ ID NO: 10519
  misc_feature (1)..( 3000): 2750-1469P.txt file - cDNA_ID_2704610; gDNA_ID_2213659; Annot_ID_181799

SEQ ID NO: 25284 - DNA, 3000 bp, Unknown; identical to SEQ ID NO: 10337
  misc_feature (1)..( 3000): 2750-1469P.txt file - cDNA_ID_2704628; gDNA_ID_2213643; Annot_ID_132333

SEQ ID NO: 25285 - DNA, 3000 bp, Unknown; identical to SEQ ID NO: 10337
  misc_feature (1)..( 3000): 2750-1469P.txt file - cDNA_ID_2704628; gDNA_ID_2213643; Annot_ID_181363

SEQ ID NO: 25286 - DNA, 3000 bp, Unknown; identical to SEQ ID NO: 10335
  misc_feature (1)..( 3000): 2750-1469P.txt file - cDNA_ID_2704644; gDNA_ID_2213643; Annot_ID_132329

SEQ ID NO: 25287 - DNA, 3003 bp, Unknown
  misc_feature (1)..( 3003): 2750-1469P.txt file - cDNA_ID_2704652; gDNA_ID_2213643; Annot_ID_132327
tgatagagtttgtcatccttcgaccaaagaatacaaaagaaaattgagatgtatcaattagtgtgcgaggaacctataaatttaatctttggaaacgcctggacatcgaagcaccagtggtctagtggtagaatagtaccctgccacggtacagacccgggttcaattcccggctggtgcaatttttttaacaaaccaacgcccaacatcgtaatgaacctatgtgggctttaacggcccattttgcttttcagtccgtaaacactaggccttttttatgtgttatgttgtccttcctcccaaccacatgattacactccttgagttcaaaaatttctcttatgtttcttttaccgattgtttcatttagttattcttaccaacatctactggttaaaatttgcatatagccatgggaattcaaatatctggaactgaaattcgaaagcgacgatgcaatgcaaataaaatataggatttatttgtgaactaaaaaagtattttaatgatatttggaaaaatcgagaaagtccgaatgggaattgtaagttttaaacacaaagagacatttttgctttagtcaggcgtgatggagaaaactcccaagggatttagttttccctcgagttaagttattatgtcattaaacattcttctgtaatttatgatctaaaccggaaaagaaaaacgggttagcgcaaactgcaattatctcaactaattcttaaataacagtaattatgatcccattgctcaagtgttttagtagtcttttaacgtttagttatgttacttcactgttccagtaatacgtcctaaattatctcgtacttcaatttagattaccatgaactacaatgttaaattgggattatgggaacataattactaagatgttttgagacaattaaaacttttaaaatattgacaaataattagtatattctttcagccgatattgatttgaatttatctttttttttttctggaacatccaataaaattaaaacgattagaaaatggcttagcatggttcatgcacataaatgaaatacataaaaatgattttatttcactaaatataattcagctaactcatttgcaagtttgataacatgactgtagttgagaaaaaaaatgaaactatagttaatttggtcttgtttctcaaattttcggttgcttatttgatttttttttatttacatgataacaaacttaccaactataaccatatccgagtaacttttaaagtacacgagcactaagtgaagaaagtcacatgcgtacactaatcctaattgaatcacacgatttctctcgtgtgcaaaatccgtaagtacataatattaatacttttttttgtaacatattaaattctaataatctcctcaggtgatttgaatcctagtctgtaccagctacatactcactccatgtaaccaaatattcctaagccacctaagcagatccagcacgatcaatcaatattacgagctttagtgtttgttttgtcataaagggagtttaattagcttataattacgcatttaacaattatacttacataaatgggcttcaaatacattcatggcattagcatttgtcggtacatctttaccggcatttgccggttcatccggtccccacacttcacgacaaacagcagcagttccgatgtccggcgttcggcggaagaacttataaaataacttttctaaaattaaaataaaaataaagaatgaatgaaagaagatagacaaaattgattattaattgagtttgctttgaagctccaagaaccaaacgtatccgggtataaaataatacgagataaagtgatagaagacctaagactacctcattactaaaaatatggatatttttctatacaaatccacgaatgaaaagaaaaagaagttggactaattaaattgaaatccaataattgtaaatataatattaaaacccaataaattagaagtctcatgttgcagtctccattattgattgtctccttagaatccaacatgtgaccctccattgtctaccattcacaccctttggctcactcgataaatttggacattaattgcattcattttatttgtaagaaccagaatctcagtagatgttatttgtgttgagtaaactgttgttatttatagactaggctattcttcgtatacactttgatactgatttttagttcatcatctatctaccgactaaatatagtgtttctatgtggcttctcctcaaatgtcaaatttatttctttaatgttgtttgagtttcaaacttgcaaagtgcaaaccaattttggttgttatactaaaaccacacatataattaaagacacccactatagcataaaattcgtcgtgtaagcaattttactatagtctaaactccataaaaggacgtcgaaaaatattgtgatattggaattatagtgtcagtttgtttttctttgggcaaatggattgtagtttcattatatattacaatttataaacgaaacgataagtatggctcatactttagtgatggagaattaaagtattttatattcagagatgacacaatatggtagaccaaaaataactaattaaaatagtatcatattagatatttatatgtgattgtaaatttgatcattgagtgaacattttaaattagtatgcccaagaaagaaaagaaaaaaaaaaaactctttctctctcatgataatgttccttttataaaatccacccaaagacaccaaacacttctccatcatcatttcatttcttgttctttttccaccatcaccatttcctagttcgctcgtgcacatctccgacgatcccaattctaaaatcatcacttcttccaatcttttcaacatctcttcaaaatatccagtcaacaaaaaaaaaagtacttaaaacaaggaaaccccttctttctttttgtacatataacataaaaatcatcacttttttgttcgtttcgccgatg

SEQ ID NO: 25288 - DNA, 3003 bp, Unknown; identical to SEQ ID NO: 25287
  misc_feature (1)..( 3003): 2750-1469P.txt file - cDNA_ID_2704652; gDNA_ID_2213643; Annot_ID_181355

SEQ ID NO: 25289 - DNA, 3000 bp, Unknown
  misc_feature (1)..( 3000): 2750-1469P.txt file - cDNA_ID_2704659; gDNA_ID_2213643; Annot_ID_132324
attgacaactttgctgaattttctactccatcaagtgtccgtgtgcctccatctgcttttctgggacctaagtgtgcactatgggattgcacaaggcctgctcagggctccgagtggtacctggattactgcagtaactaccatgggactctagctctgaatgaagattcgcctggcacagcacctgtattgaggccagggggcatcagtttgaaagataatctattgattgatgctcttcgtgcaaagactcagggtaagaatgttgggatcccagtgtgtgaaggagctgttaacacaaaatgcccatggaacgcagcaggtgagagcattgtcccactagagcccagttttgcttctctctttgttttagttcaacatttcgttgcctctttgaaaacagaagccttatgtgagtttcttacttttgcctgacccttaattttttgtacttgcagagctatttcatcttgaactggttgaaggcgaaacaattagagagtggctcttctttgacaaacctagaagagcatatgatagcggaaaccgaaagcaaagatcacttccagattacagtggaagaggttggcatgaatcaagaaaacaactgatgaaggaacaagaaggccagaagagatcttactatatggatccacaacctccaggtccctttgagtggcatctctttgaataccaaatcaatgaatctgacgcatgtgcgttatatcgcctagaacttaaagtaggaaatggaaagaagagtcctaagggaaagatttcaaaagaccctctggctgatctgcagaagaagatgggacagtttaaagtggcttcagacaaaccctctcctccaaccaaaggtcgtaaggagtgaagttagctattggtaatctaactcaagactcctgcaacaatagctccaagttgtctccagcattctacaaaagagccatcgccacctctgttttctttttttttttctttctgactgtattatgaagagataggatctttgatgtgttgtgttaatatggacaagtctggtctttgccctttttcttgatagaatcgtagatgggtttgtaaatttttgcattttatttttctcctttaaaaccacaaggattttgttaacgaagtggtgtattcatatttcaaaggtacatttgcaacaccattgattctttattccaattcttatctacgtgtgtgtgtgaatgaaacttgaaaccaatacaagtcactaatgctctcagattatgtaattgggctttactgggccgtttataaaattgggctagaaaaagggagacagcagacgacaagagcatccttgttctctttaaaccctaaattacaagcaaatcaccaacagagagagtaatggcgaaaaattctggtagctcgtttgaagcagagaaatcagagggaaagtgtgttacgacgactactgaagcacaagtaattcaaaattctggctgatgaattatgtatttgattttacgtatttgtaattcactaattctcactgattcatacaatttgtgtcgtaaatgaacagcaaagtagtcaacctgttttgagcaaggaagaggagaaagtgagagatagctacttgttctgctgtgaaaatttctacactcttcctgagatgatcaatttcatgaaggagattcatggtgtagaacaaaccactgtgacaaaggttttcagggaacttttaaaaggtagaaaagctgaagcatatctcagagaatctcagaaaagaatgaaggcaagaacaacaacaacaacttgaacagaggaggatgaggcttaggttgctctaatttgaaattctttggtttggtttactggttagtaagaaatagacttgtattgtcacatttttttatcatattttgaggtccattgctttgggtgtatggaccagactaggacaaatgaataggagatgcaaaagggtaataatggagaagtcagtcttgttggtctattcttgtccgagtccatgatttttagagggagaactagaaggaggaactaaaagttgtttaggttaatggtttaggtgctaagtgttggctctgtgtgttacttatgactcgtgggatctaatgtcttgtgaaaaatcacttgtgagataaaatggacatagtctagagaagaaggtatataagaagaaaagcagtcaacttaactacaaaatcacaacggctcacaactgttttatgttgtagaagttggttgcttcttagagtggttcattcttcattaccagctaaccgcaaataaccgtgacttgaagtctttcgaattacacttctttcactcgtggttcaaacttcttctgttcaagttgttatgccttctccagccattacttgatttcaaaatggtgttgatggtctcattcttgaaggcttggatgtttctcaactttttgctcttgaacaagagccaagaggtgatgggactccgtagtacaaacacaatttaagaacgtttgagtaagagttttgattcacattgaaaaaaaaacttagaagaaaaaatgaaccaaactaaaataatcaaattaatttagtttattaatcaagaattaaatcaagttttaataataacctgaattgtagattttttttcttttcttaatagtcgaatactgaacactgtagtattaaatgaaaactcaaagcccaatataattcaaagcccatcgaatcaaatatctggccactccacttattcttaacttgaaacttaaaagccgaaatcgtaaagagagaatctggtcggaataatccactcgaatcttaaaacgacgtcggtttaaccaaatgcgagtcaacggatgctgctgcaatgcgtcgtgttgtgttcgtcactcgccgtcgtcgtcatctccgtcgcttcgacctctcccctcgttggtgttcaccctttaggttacttcttcgatgactcttatctttattatatcgacaaatctgaaaaatg

SEQ ID NO: 25290 - DNA, 3000 bp, Unknown
  misc_feature (1)..( 3000): 2750-1469P.txt file - cDNA_ID_2704661; gDNA_ID_2213643; Annot_ID_132323
ggtcaagaatctacaaggttttgcaacttttcttgggaagcttatttgttttgtttgattgtctagcaaactgatacaaaaacaattgttgttgttgttgtttccaggtatgaagcttgttttcgctcttcagatggtttttatcggtttcttagtgatcttatggatgcttaggagtcgtgctcggtctaagagacgacgctatctgctgaagaatgtacctcccattaatagatcagctaactaactccctggaacttgtattatacttttgtgaagcttttacgtggaacctgagtgttaaagccacatatgtcaagtgtcattactagctatacttattcagtgtgagattgtttgttcctagttacataattgtcttggtcttcatgtttattaagccttcagatcctcagaccatagtaggtaccgatgagtcttatcacaagtaagatagtcacatgatctgcagattttctagaaaatggatggattcacaatttgaatgatctcatggtgaattattcgactgatataaggttttatgaaaatgaactcttgtttgtttctcacagacaaaatcaatatacaaaaaacattacaagccattgaagagaagagagaaatttacagttaaaaaatcctgaaaaaatgatttgtaaactcaagattggaaacatccacaagttgcctttggaacaattctaatggcccagtattttagcagccgtttcttcttgcttctccacgcttaccttcaatcattgcacttctttcttctgcttccttgtgagtcactgaaacctaattcatcctctctgcatactcctgctttcttcttctctagttcctcctgcagtgaaacaaattcacaaacacttcacttctcattgttctcaatcacattgaaacagtatcagctctctattgctaagtttattttacctccattttcttgagttgcacttcgacagctgctttcttcacttctcaacggaaaactagtcacatagtttagtttaaggtcacctctaacgagtgaagcagaccaagatttcgccagtgcagattctgtaagaattttcattctactaaaacataaacagcaatatgccaagccttaacacaaagagtgtcacaggtaaacacatacagagcaaatgcatgattctgtcataaagcttcaaatttagctgtaatatattacctccatggatgtgtattgaatcgtaaataggccgcttctctctcgaaacaagaactagcaatggtagcctgatgtcaacgtatgttgtatgaatcaagtccccagtgcaacttgaaggtaaaagaacttcttcacactgttaggtcgaaaggtgaaacttaaagcttatgtactagacaaggcgatggaacttcttcacactgttaaggacagacttagaggtaaaagaaaaacttgagtagctcatggagtttagctagaggttggtcgctaagatatttgtaaactgaagatgctaatggttatattagggatgatgatcttgaaggaattatttggaaatgacataacagatgatgtgtgatttcctcctttaaaacaaaatcgtttggttttgataatcatgaaaatatttctatgagattactgtccgacacacatttagagaaataattcactgactatatattccgtaaatacatgtacatataactttctcaagtttgatttataattttaacatttcaacaaaacaaaaaaatatagattccgttaaatattcctatcgatccggaaaagtaaaaaattggacagacaaaatatccaaaattatacgatttaagagagaaaaaaaaagtagcaagtgtcctacatgtgggtgtggtctgggacaaagcaaatatagaggggaaaaaaagagtacagaaaacaaatcacatggactcacacatcaacattatactcttcactctctctccactcgtccactaccctactttctccatgcattgtttagccctcctcatagcagtgatggtaacaagataatccattaccatggtgaaagatatgtgataaataagctaagtcgtcggatttgttttccaataaattaagtcatgtttatcaactcgacttaattctattattctatatatagatgatactgtgtgctattaactcatgtattcattgtacttgcttgacgtaggtttacatgtaccaaaattattaattgacacatatgatttgcaacaaatacgagatattgcatttacatgaacctatcgaaaaaccattcataagaaagaaacgtattaaccattcaacaaaagaaaggtcacaagaacacgtgcttgcttgattcctcctccaaatctctttacatagattaaaaagaaaaaaaccagtggaggagaatttccagttataccgttgagacctttagcctcacttctcaagacagctgtttcatagctgtccgatctcaatatctccctccatgtggccctactcagagagataaattaaacactttgatcacatcgaatttattatgttctttcataagattttacataatatatatctcatgtatatatatatatatctctatttatctccttcattaattctgtttttttacttccttctatttatataactatcatttgttaaacatagccattttggttactcttgttccgttttcttctttcttcctctccttccttttttcttttctctatcttcttcatatggttcatgacattgatctaattccacttcccatttgtctccacatttcgtttctttcctttgttttttcatctaggtttttggttttctgaattggatttacgttagtttatcttgtacttattaattaaggttttttttttttccttcctcaatcctgtaaattcagatttgctttctttggtaatcttttggatcaagatccatctattttttcttcaatggcacaactccctcctaaaatccccaacatg

SEQ ID NO: 25291 - DNA, 3003 bp, Unknown
  misc_feature (1)..( 3003): 2750-1469P.txt file - cDNA_ID_2704665; gDNA_ID_2213643; Annot_ID_132322
aataaattgtattatcatattttaaaattttgatagcagtatcatatgtaactctaacattctatgtttagagatgaatttatctatatatatctacttggataaaccaatttgcaccatactatttgcagcatatgagactaactaactcttgatacactgaaatgatggtagacaattcagtctatatatgcgagttaactcctaataccgtgaaatcataataggcaaattcagtccacaaattttttacgtaggattttgatattttccactctttatatatacagtctataatcttcaaacctatcacctataaataatctacaatctaccatttagtcaacaatggtgaaatttctaaaccctcgtgaaagtctacctatctcccaaagtttctaattctatctacttcacatttttctccacccaccaactaaagtataagccttggaaaaacaatcaaaataagaaattctataagtcctttattccttatataataaatcataagttagtaaactcttttgttcacttttcttttgcatccaccgaagaaaaaccagcttcacaatgagctccaacgacagagatcatcgcaggttcaactctgaccaccactcattctggcctaatccgtctacttacgatcttaacagcaagatcatgcttgccgcagtggcttctttatctggagttatcctcatcgtcttcgctcttcatctttacgcaagattcgttctccgacgccgtagagaagctttccgtggcctccccgtcattttccgccacccttttgagatgcctaagcgtggcctcaatcccacagtcatcgcttctctccctactttcactgttggagccactgatggcgtggctgcctccgctactgaatgcgcagtgtgtctaagcgtgttaaaggagcaagacaaggcgagagagttgcccaactgcaagcacatcttccacgtcgactgtgttgacacgtggctcaccacttgctccacttgtcctgtttgtcggactgaagttgagccaagaccgagacttgagcctgagccaagggaaggaccagtcggtactgcaccgcagttgttggtggaaaccaggctgaacttgactgtagaagccgcatcctcttcttcctcagataacaaaacagttgtatccccggcttcgcgattaaattcgtttaggaaaatcttgacgagggaaagatcttcgaacaggatcaaccattcttgtcctgaccaagatcgtgtggcagatcttgagagacattgagtcgacatatagatacatattatgcatataaatcatatacacatatcgataatctttaatttatacaatatcctcctttcttttttactatatcatgctctgtttttggttttagatagttttgtgtaacggaacactaaatatatgttagtcaaaagatacatctggtgcagttcatgccattcaagttaactattcacagtggtagacagtacatatcagggctccataaaagatgcagaaccattttagttacataaaactgagggagaagagagatcataaaagggttaccttcaatcaccaatcggaagctaaacctgttggataatcagtgtcattgtcacaatgtggcctaaaatgacgaagggtgacaaccagctgctaaacatccgccttgctcggctcaatctgagaattctggtgcagttgctccctgcattgaagtggcatctgcgatacttccattgctcactcccttactgcacaccagatttcaacagcatgagtgtaactattactatactcaatgaaacgaagcctcatggagaatgagaacattttcaaaaaaattgctttaatagtttttgaaacttcttctatgttctgcagtaactgcatcatattgataatatgaacaatataatcaccaagatcaaaatcaattgtcgaggagaagtgaagtaacttcatccttctaagccagaagctaatgaaaaaaacaaaaaaaagatttcatttcactcaaaagttcaaaacccatcaaactagaaatcattttctaaaagaacctatgatggatcaaaattgctccaaacagactataaatgagacacacacacaaacgctaattggcaatacaaatgtggattacttaattaccttgaaggaaacttgcatgttccttgacctgaaaacgaaaaattgcagaaaaagcatcaaactttcaacattttcaattagcaaaagtcataactatctgctagacattgatcctgaaagaaaatgtgaacttactaggattgagagaagtaacagctgcgttgttactaaagttgcaagcttcatctgcgagaccattccatcagataatagttattgaatacatacgaagccatcttcactatatccaatggatcgtagcaggatccaccttgctgaatctagacgcaatcagctcctctgggaccacaagcccagtcaatggccgtttaaagtgttgaatcctcaacgttgttcttcgccacgcaccaaagctccgtctctaatacctccccaccaaactccgcagtagcagcaaccgtaatgaggagaaatagagagattcattaggaagcagtgaggctgagagagagaatacacgatcattttccgagagattgatcgattttgtactcggagatttcgaagaggaggaagagtgtgaatttgaaagagtcgaatagatgttggagtttgttgtgattaatgtaaagatttgggtgaataatgtaaaatattttaattcttaccggttattgaactcggttatactgatttgggccgtattaaactccggcccatatacatatgggcctctaatgaagtgtttttagctgctctgtttttgatgacggagcatattaattatggttaattagtaaacaaaaagactctttagctccttaaccttttcaatttctgaaagaggaggagatcggaaaacaaaacccagtcatg

SEQ ID NO: 25292 - DNA, 3003 bp, Unknown; identical to SEQ ID NO: 25291
  misc_feature (1)..( 3003): 2750-1469P.txt file - cDNA_ID_2704665; gDNA_ID_2213643; Annot_ID_181346

SEQ ID NO: 25293 - DNA, 3003 bp, Unknown
  misc_feature (1)..( 3003): 2750-1469P.txt file - cDNA_ID_2704702; gDNA_ID_2213670; Annot_ID_132766
atcattgtaacttatgtatacatctacatttgtatattaaaagagaaaaataaataattaaaagaaacaagaaaaaaaagaggaatcaagaaagagttttacgtagtcaacattagaaatttatatctacatgtgttcgaaacttggcaattgataattgagattctaggtaaacgttgccagtagaatgattttaactctcttggcatatataaattattgcacttgtattgtttttaagaaacaatatagccgtttttgtcagtaagaaaccatataaaaatgttaagtctcatggctgcttaaaatgtttcgaaacttttaaagttattaatagtcaactgcaagcagtagatggttggaattggatctactagtccatgataaataaataaataaagtaattccggttttcaaattggtttggaatagaaagttaattaatcaatataaaatccccaaaccttgaaaatcaacctcgttgacccatctttatttcacccgtcgatggtaatttgtcgcgtatcggttatagacaacaattactaatattcttccaccatatgcaatgtcaacaaagttactatgaatgattgatttagcgttagttttttttaaatcgtcgtcgtattcatcggtttggcatagacactatatgattctcgaaccaatgaactcgttatgtaatgtatatttgtctcgattatgattatctaatttttgttcaaatcaacaaagtactagtctattgttagaagcgttagttacgttagttgatatcatagccatgttaagctagtatcatcctcgacaaaagtaatattatcatcgatgttcccgttacattagactcttaatacatgttaattatgaatatccatatattaatatgattgtatgcttcaagaaaataaaaagatcatgatttgataattgatactacacttaaagtaattatagttttttttatttttttttattttcacatttccaaacatatgtgatcgaatacgaatggcgatgtttaagatgctaaatcaacaagatccttacacaaaatcgaagcaatttttgaggagtatgtaaacagtgaccgacttgaataccttcagtgccacgtttttcctcacttggacaaacttgttcttcatttttatttgtttggaccaagataactcgttattcattacgagggctttccacggaagaaaatgcactacctacaaaagaaatggaataatataaacttgaatgggccctgcttgggatatcaagacttcggcccagcaatgtccgtgcatgcaaatattttgttaatcactttttaaagtagcatttggattatcgcttagtatatttgcattcccatctattactaatactacaatactaggagcaaaagttattagttctttaatttgattgctagatagtgctggaaactttatttcaggaaatggaatttctaggctggctaaatagtgttctggattcttgagggaccctgttacgcctaaaaataatgttgtttttttgaaggtcatcaaaataaacattttataagacagtaaaaaaagaaataagacaattatatttatgtagtcaaacgcttgtttttgctggatatataattacataaaagttgcatttatcctttaatcaattgccaaaaagcaagaaataatatcaatccaatcttataaacaactatattatgaaaaagatgataattattgtacgcaagatgttatacgacacacgtaatttgtagatacacaaaaaggtcaaggtcaacaaataacacgatcaattgcattaaatgtgtactagcatggttatcagaaatttttattgataccatggaatcgatagacgacaaaaccaaccgtaatttcaaaatttccgtaattgtttctcttctcttttcttgttttatcgacgattatggaaattttttttttttaacggagatgtttggtccgacaacgtgacggtaaatcctccactgtcttcgcttaaagacaaacgacaattaatctttttaactcctcgtttcacttgcaaagttatttcatcattttagtagtttactctcattctactaaatttgtatttttattgtaacataacggtcatatcagtatttggttagttgattatgtgacatgactatggataataagacttgatatgaattcccatatataagaaatcgtcgatgacataaaactactttatctactaacttcataaggcaaaaatgagtagataattagattattagaaagagagagacaatgagattgatattttttatatgggagtccaaaatcaagatagatatacttgaaaacactcgaaccccacaaggatcgacaaaatatttctttttaaatagctcaaaaaaattatttaaaaaaattcaaaatctttttaaaatatccaaaatgttgaaaagttgtaaatcgataaaagagaaaaataataataattgtgccaatagagagaaagagagagacagaagaagaaagaaaggttcctttgtctcggaacaaccaaagagccaccacccaaaaaaaaaaaggttcttagctttttttctttctttcacacgaaatctcacgagacgccttatttcttcttctctgtctctttccgacggcgtaactctccggtggaatctcagctctcttatcagtagaagaagttttggtctttaaatgtaatttttttggttttgctttaaatttcaatcgttgttatcagaaaaagtaggtagcaaaaaaagagattttttacgaaaagcagattgactggtagctgaaacaacggaggagaattatagaaacgagtaaaaaacaaaaccctaaaggttgaaacttggttgacgaaaaaaatgagctgatttttttttcttcatttatttcattcttaactctttttcacatatttaagaatcagtaagaaacaaaaaaaaacagagtgagactaaaaaaaaagatg

SEQ ID NO: 25294 - DNA, 3003 bp, Unknown; identical to SEQ ID NO: 25293
  misc_feature (1)..( 3003): 2750-1469P.txt file - cDNA_ID_2704702; gDNA_ID_2213670; Annot_ID_182273

SEQ ID NO: 25295 - DNA, 3000 bp, Unknown; identical to SEQ ID NO: 10219
  misc_feature (1)..( 3000): 2750-1469P.txt file - cDNA_ID_2704713; gDNA_ID_2213638; Annot_ID_132190

SEQ ID NO: 25296 - DNA, 3000 bp, Unknown; identical to SEQ ID NO: 10219
  misc_feature (1)..( 3000): 2750-1469P.txt file - cDNA_ID_2704713; gDNA_ID_2213638; Annot_ID_181094

SEQ ID NO: 25297 - DNA, 3000 bp, Unknown; identical to SEQ ID NO: 10234
  misc_feature (1)..( 3000): 2750-1469P.txt file - cDNA_ID_2704717; gDNA_ID_2213638; Annot_ID_132208

SEQ ID NO: 25298 - DNA, 3000 bp, Unknown; identical to SEQ ID NO: 10234
  misc_feature (1)..( 3000): 2750-1469P.txt file - cDNA_ID_2704717; gDNA_ID_2213638; Annot_ID_181111

SEQ ID NO: 25299 - DNA, 3000 bp, Unknown; identical to SEQ ID NO: 10239
  misc_feature (1)..( 3000): 2750-1469P.txt file - cDNA_ID_2704725; gDNA_ID_2213638; Annot_ID_132204

SEQ ID NO: 25300 - DNA, 3003 bp, Unknown
  misc_feature (1)..( 3003): 2750-1469P.txt file - cDNA_ID_2704737; gDNA_ID_2213638; Annot_ID_132194
tgaagtaaaatgtataaatgcggtattaattgtgtttcaaggacacacaaataattgccagtttttgtcaaaaggaaactatagttgtagaatattcgtctcttttcttctttttctgttatctgttctattagaaagctaaagaaatacatcaaagtcaggtctcaacggtaaaatgaaaacaagcttctttttcactaaagagtaaaagagattcctctcaacattggtctttcatatttttcctagctcatattctggtgtggttgatcgaatcttaatgaaccggagaaaataaaagatttgattatgtaatttatcataatcaagagcttgtttgtgaacacatgaaaaagtaaaggaaagaagaagaactctctctgcctgaggagttgtaatttttggcagaagctggtgtcgttttaaagagaaattagaagtgaatctatgtagttgtgttggttggtaagatcgatttagttacattaaataaaaaatattcctttgagcaaaaacaattaaaaaagataggtttcgtcacaaggtggaccatttcgaagaagaattaagagacgagcccacttgaaagagacatagcgaggggaccccatgtgaatctgcaagcagagacagaggctttgaccgttctcattcatcaaccatcctccattattagccagagtcataaaccatgtgattcatcatcacaaggcttcattggactctctcatgcatattcacaatctccacttccatcttatacaattccagttcctacccgcaacaaatccaacacctgaagatgatactgatgcttttgaaagtataactaggaatgagagaagtactaggatgagccatctttccagatattcatttattcactcacacagcaagagagtagttcagtgtatcatgcaacttaaaagcatacaaaatatcacgaatagagaaatattgataaaccaaatgttattgaggtctgatttctgaaagctttaatatgtccaaggaaaatcaaatgggaatgaaagtactagatcccccagcttcttcttcttctggaatgcactttatttgtcaccacaagtggtcaccttaagcccctacatcacatcaccatattactctcagagttaacatcgcaagccagaggagaagaaaagaaagtagtgagaggatttcgcatgcagagaagaaagaacatcactgtcctagagcttcacattacaaaaaataaaaacagctccaaaagattatcaataaaccaaccataaccaggacctcaatcattcctagacagggcaaaaacaaataaaacaaaccaccatccagaagcttccagtggtaaaacaaaaactaagcagaagtgcctaggataatttatcgagtacccaaaactcaggatatgattcatttctctacacagaatagcaaccaaaccaggaaccctgaagcctcaaactgacagagaagagaactaagtagtaacaaatctgcttgttgcttaagaatacttatacactagctatatccacagggcctctcttataaagctctgaaagcatatccattttcaaatttcaagaaccaaaaacacaaatgatcacacatttgaacctttaccggcacactaattagcttatgaaacaacaaaaccaatatactgatttgcatatgaaatttgactcgtgggagcaacaaaagaaggtgtctttgggggattttccaatatacaagcagtatcatggctatcgaagaggactaaactaagaaagagctcagagaaagcggaacgaataattaaggagagaatgagcacacacctgaggaacacaaaagagataaagcgaatcatgaggaaggagctgcagctttctcgacgactttcttgtcgcgtctttccatagcaacatcccattcatcgtggccgatgtgcttaggctgcccaatcacaaattcaaatcaaatcatcaaccaaatgttcaatagagtacccaaatttgtataaaccggatcaaatcgagcaaaccctaggagagagagagagcaatgaatcgaaaaggggggaaattcatacacggccatgataagctttgtggatgtagtactgagaattgcccatgatacagagcatcccaccgatgattccgagaggcaacatcgcttccaaccataccaacgacatcttcgtcttctcctttcttccgattgtgcttcttctctgtgttaagatccaagttaaagatttgggatcagagaccactctagtcaattggataataatgggcttttgggcttcatttttaatgaaacgtaaatctcaaagcccaatacatccaaatgaaatgtttttgactttttcatggattggatggatacatggtcacggacggtggtaataactagataacctacttggtagtactagtgttatgacttatgaccccaagttagtacatgtaagctttccctagtaatcaaattttatcccacaaccgtatgaagctggatgatgaagacagtatacacttggaagtaatgttttcttatagaagatattaaacacgatcgattaaaaggcgagtaccgagtaagaaatgaaatatgtcaaactaagcaagtaaacgagaatctacggatatttaagacacgagatacacaaataaattagtaaataaagaaaatctacggacagttatatcagattgacacgttacaaattaaaatctctgtttattaatgatatattttcttgtttgacacgatttatatatatcagacgttaaaacttatatttagtacgataaagtaacaccgtgaaccggaagttacggccataaaaacgcaaaaaggaaatgtagggttttagttgctaaaaaagatacttaaaggttagattttttttttaaagtaattaaaagggagtaaaaaggttaaatgataagtctcatatttaccctagcattctactaaacactaaagactttaactgataaaatg

SEQ ID NO: 25301 - DNA, 3003 bp, Unknown; identical to SEQ ID NO: 25300
  misc_feature (1)..( 3003): 2750-1469P.txt file - cDNA_ID_2704737; gDNA_ID_2213638; Annot_ID_181099

SEQ ID NO: 25302 - DNA, 3000 bp, Unknown; identical to SEQ ID NO: 10351
  misc_feature (1)..( 3000): 2750-1469P.txt file - cDNA_ID_2704766; gDNA_ID_2213644; Annot_ID_132339

SEQ ID NO: 25303 - DNA, 3000 bp, Unknown; identical to SEQ ID NO: 10351
  misc_feature (1)..( 3000): 2750-1469P.txt file - cDNA_ID_2704766; gDNA_ID_2213644; Annot_ID_181376

SEQ ID NO: 25304 - DNA, 3000 bp, Unknown; identical to SEQ ID NO: 10353
  misc_feature (1)..( 3000): 2750-1469P.txt file - cDNA_ID_2704774; gDNA_ID_2213644; Annot_ID_132342

SEQ ID NO: 25305 - DNA, 3000 bp, Unknown; identical to SEQ ID NO: 10353
  misc_feature (1)..( 3000): 2750-1469P.txt file - cDNA_ID_2704774; gDNA_ID_2213644; Annot_ID_181379

SEQ ID NO: 25306 - DNA, 3003 bp, Unknown
  misc_feature (1)..( 3003): 2750-1469P.txt file - cDNA_ID_2704778; gDNA_ID_2213644; Annot_ID_132343
aagaatttgagtatgcccagaatttgattcttgcttgatgttaaagaatgaatgattttgaagaaagaaaaaaagtaaaaccagacggcgacaacaaaaaaatgaaagagaagacttgagaaaggtgttgtctttggtaccaaatgcacatgtttttattttatttgtatatttttcaggagaagaaaatttaatcaatagtagaagagagattagggattgtgaatatgtctgggcaccaagcggatatccagaaaaattgtgatatttgttattcgattcgttttaaccgaatacttaattttgttatttgctttgattcgaaaatttctagatatccgaaatttcgaatatccggatttttttgtgatatttgcggatatccgctttgatacatataaatattaaaaaaatttgtaaactatataaccatataatatatttaaagttattatttaacatgcttacaaaataagttctaaataccaaacataaccgttgttattatcaccggtcaacaaaatgttatcaaactaattccaaaaactaaaacccgatagtttaagatgttattgatcaagatataacatgagagaaaaatgatcaaataaatattttaacataaaaatataagatagcaacaatacataaactatttatgatatctatatatagatataactatatatttaaatatatatcgatagatacggatcgaagcggatattcgattatcttaaaaacattatttgttatttgcttcggtttttacgaatactacatttttctatttgatttggtccaaaatcttacggatattcgaatttttcgaatcaaatcaaatcgaataccgaatcgaagcggatcgaacgaatattttgtccagccctcattaatgtctaaatgttataatgggaaatcaaaattaactcaaatttggaagagatcaaatatgttttcatttaattgcaaattgatatttgacctataaattaagtttttgttaatccgctaagttggagactgagatgcgtaagtttgtgatttggagcaagctttgtgattcgaactagaagacctatgtagcatcatatcctttggatgttactagatctagagttgaaaagttttcgataatgttgttatttgaagacaatttcaatagttgttttgttctctgccaagagtcgaagactttctaccattatgggttctagagttcatattgattgaatttttcacacggcaaatttatttagcattgacaacatttctttcccacacacggcaataccaagtaccgattcaactaaatacatttaagctatttttattttttttggtcaagtactacgagatattctttaatattatcatgtggtgaggccgttgttgaccattgtttaattattcttctaatcaatatatttgttccttcattttcaaataaccataattaaagaattatacaagacaaaatataatcattggattgaatgagatcatttgaattcttcaattttacgtaaacagtagtacttattatattatatatgaatcaccaaaactattttttgatatcagatttcgtattcgaactaggtccctaaagccaactagtaaaagaatctgcatttggcctagtgaccgaacctgtttttgccaattgtgtttacgtgcttggaacaaatctcctgtaagtctagaaaacacatggggatgaaagaaaaaattacatcggggaggaatttacatgagatcataatattgaaaactgaaaagattcaactcgtgaagtctctcgatgagttgtataatctttttcaaattccttataaagaataaaacaacttctaaaagacaaatgaacatatatgtagacattgcatcatcaatattttttaccactgtttttaaaaccaaattgatgaaagtgatctgtagatcaaatttgttaagtgacaattttactgtcttgataattaagaaaatcaaaaagcaaggattcatataaatttttaccaaaaaataattagggagaaaataaaaatctatgaaaaatatgcattttggttaatgatattgtttaccatatttacatgtttcatcgaaatcttcaaattattgtttatctaatcttcgatttgcttttaatcgacgatagtttgaagatttttgttcttctattgatgttctcctccgtctgtcaactttaacgaaacgatgccgcagagactgagaggaggaggaaatattctgcgattcttctacacggcaacgattctggtcagtttctacacgacaatgattctggttagtttatacacggcaacgattccggtcatttcgttaatatctctgtatagtcccacctattatttctccttattgtatatgaaacaaaaagagattccaaaagtagcaaaaaatatgtcgtcatctcctccgaacaaaaccgatccaccaaacaaaattgaaacacaaaaaaataactgccaatacataaatgtgcgataaaaaaacaaaaaaaaatcattaatattttaacacaaagttacgtcaaataaacacaattgttcataagtgcaaataacatttattaaaattgtttagctaagaaagtttgggctcgtaaatacttattatcttatgtataaacgaatttgttctaatgactatatataaaaaaatcaatttcagataattttaatataaatagtattgccaaaaaaaaaaaaaaactgtaaagtttctcatgtaaatatttttcctccgctaccaatgggctttaaaccaggctgattgtcttacgaagtcagctaataatggggtttgaaaacaaatgggctttaaaacaggtgggcttatgcgacccattatgtttgtttttctcacaaattcgtccccatagtttcaatcctcctccacaccaagtcaccaactgtggatgagtctctctaaaaccttggcttccttcgacttcttctgttttctccggcaatg

SEQ ID NO: 25307 - DNA, 3003 bp, Unknown
  misc_feature (1)..( 3003): 2750-1469P.txt file - cDNA_ID_2704788; gDNA_ID_2213644; Annot_ID_132347
taagatgtttcaatgattgaaaactcaacaaagaagacatagaaaaccaatataactaactagataaacatataatacaagtagttatttctaatatttgagtgactgcaaccgatatacagaagcgttctaaattttattaagacaatcatgtttgaaatgatgtcaataagaatcatgattcaaactttacaacgtaacaatattgcatgcaaaaaacaatttagttacgaatgaaccatatagtctcgaatattagtttatgttattataaattatttagaccaatattggttatatttattacataaattcactagaagtctgaaactgattatttatttttatagtgtgtttttatctaatttttatttttagtgttggttatatacaatataatttatatagagaaaaattggtaccggtggaaagtccaccatcgataaaaactgtctgatgtccatccaaaaactaagccgacatagagttgtatttggtcggtatattagacgtacatgtatatttatctttccataaggtttcttttgaatataaagttgtgtatccaaatgcagattcttttatgctttatcttaagtcatcttcgcattttattttggtcaaaagaaagttagaagataagagaaagtttttgggtcacacatacgaaagaaacgtaaatggcttctcatgcctaatagcgctttctacgcttgtggggtatttgattggatatacgtcacaactcataatacgtagttgtttactagcttatctgtacatggactccacttctatatgatatatatagaaatgccactaatatacgtacgtatccacaataagagaattataatgaatgtgagattggtaagtagtatcacataatttaagggtgtgaaggttaattaacggtaggttgttctatattatatatggttactcacgtaaagtttttaacaaaatatacaaattttaaaatgtattacttaaccaatctctgttctcatgagagtagtttcgcttattcaaactgctaccaaatattatctagtagccttttctaattggtatacaaatacaaattacacgatgtgatagacactttattgtttgtgcatactacctttagagtaggcactagccaatcatgataaaaatggcaaatctaaaaaatattaagcaacatggtaaatataaaagatttaggtgacaaaactgaaaacagaagaaaaaacttacgttttaacaagtgttattaaatgctggttttggactaaaagaggatatgggtttaatgaaaaaacttaatttttaggaaaaaaaaaaaggtggaatttgagtagaatacaacaaaaagtcttagagtttgattggtaacacaaaactttagctgttacggaataatgtaaaactgtacaaaagagctgtaaaaaaaaattgtatcaaaaagctgagagtaaagcttttcgtaacgcttttgataaagtttttgtaaatggtaattgtcaaagctgtacaaactgtactgttttgataatgggttaccattcaaagctttaaattttaaatcgcatgataacctgtaaataattattttgaatatatgttagactttattattattggttaactatgttctcttgattgaaaaaaaaatagatttgtaactcattgctgttttttttttttaagaaacaaatagagaactatataaaaatataagaaaacgttggttttgtccaagaaaaaaattgttgggttttggtgggtggcaatagaagatgccatgtacatagtgggaacaagtagccttacgcccataacatgtcggaacatcaccaataaatttctatgttcaaaaatatcattgtaacaaaaagtttttcgaatttcttctcccaacccaccataaaaacccaatcaaatgcatgtgaatgttcttgttcatttgatgaggtcaagatcaagaagccatgtaatctagaatacaacagtacacatgtgacttgttacagttttgaactctcgttcacagttttgcaagttcttaccaaagctatagatgcctctcatcccatgagccttcatcacctgatgggcttattaggtttacaggcttgactaaactctagagcctatacgtatagaagaggcctgactaaacgaagataatgaaataagcccacaaggcccaaataattaatatcttttattctttttggcaaaatgaaaaatctgacttatgggctttttaacatttacacatttaacttcatgacccaatgaagacccgacccgtctggtaatgacccgatccaacacatgagtaaaccttcactgaaacctcgaaactcctccagaagcctaaaaccttcaccaccaaatcggtgcctccttgaatagtcgccgccgtcgtctatcatcgccgcttgtgactccggtgagtattcttctgctctattgagtttattttggttgaagctctatgagatgtacgtgggtctggttttcatttctgtttcttaatcgctcgaattagcatttgatagctactgagattttgagttttctgatctgccgaataatcttcgccattgtagtgtagatgttgtgtgccttttgattagattacactgagaaattggattgttttcgtgtttgtagatgagaagctaggttattgaatcagagattatggctgcttcaatttcaagaaggatttttcgcacttttggatccttttcagctctaggacgttcctcttcaccaagtattatctcattttccaagcttcttataaaatatgtttgtttcctggatctctgattgtttctctcaacagatttgtctgcgaatacatctggaaatggtttagcttctcttactaatgatctaaaggttggtgtgtttagttaatgtcactttctcctttccttcatctgcatattattgagttctacttactactacttgagtggtcatcttcctgattttgagatg

SEQ ID NO: 25308 - DNA, 3003 bp, Unknown
  misc_feature (1)..( 3003): 2750-1469P.txt file - cDNA_ID_2704816; gDNA_ID_2213645; Annot_ID_132362
ccacctatagtttatgtaccatctaagttactagggatgtgtctatattcatttggtatatagcaaatgttttttccacaagaaacatagacgaaacaaattttcaataaatgttatgtgtgttctcacatggtatcaacgttacacattaagaaaaaaaaaatcaacgttacaaaactttgagtgtttgtttatttgtctttatttgaccatggacgagaatggcatcacatgaaatgtctctaccaatggttatgtgctatataccaccaatattcataaatatgatttatcagaactttacataaaattctgctatcagtattttttatttatttaatggtaataactatgctgattaaattttaaaatcagtatcaattaagaaaaacagtgattttgtggactgatatattggtcgacaaccgataaattgatcgttcgtgattgatgacatgtgaactattttgtatttttgttagtttcgtggatcatgaacacaaataatatgtttttcactacaaaatctcactcagtcggatttttctttttaaacttgtaaattgtacaaaccatacaataagaggctatctacggtccatcttcccgcagaactttcattatccttttgtaacatactggcagttacatttaaaaaaactgtcaagattacttgaaatcattcggtgtggtgccttctaaaaacctcccaatgctcaaattatatctttattttattttattgtggtcaaagtattacgatgttcttttagtgattcagtataatgttcatagtttttctgttaaaaatatcatagtaattatagatcgtttttatggggaaaaaaaaacttagtacatagtaaaagtagttaataatctattaaaaaataatatggtttggacctttttgcacccactaaaatatcagtatataactaagttaaatctttaaattagtaattacgaattgcttgatgttaaattaaagtgttaatgagtttttcagaatttaatttaacatgataaataataaaataatctaaatattaaagagtttattagaaaataggcatttgtcttggttatatatttattttaaggtatttccttacatgattttcgaaagaggtacttttctcttgtgaaaagtcatccttatcctcctctcatttgcattatcttttacccaattgaagcaataagtcgtgtctgtttcctatattcgatatttgcatcaccaattgaagcaataaatcgtgtgtgttccctatattcaattgaaacaatggcgatatatgcatcatcttctaaatcgccactcctgcaaagacaacaactcggattttcaagaatccaagtttttatatggaaaatcactgagagagagatcattgtgagggatttaaaccggtttcatcatttcaagaatggacttgtggtgattactggtaatttgaaaaagacaggtgagacgatattcaaaaaccggtttcaactcattgttatttgtgaaccgatttattcttggtataggaagactctgggtgggaaaagattccaactttgcttacgaaggttaagtcgcaacaaagaaagcttctttatttccgccatggacacagcctatcgtagtcatgtggacagaactgaaattctctaaaatcagaaccgaaattccacaaaatcagaactaaagttccataaaatctataaattttttcgattgggttccctatatattatcttagggtttagtattgtgtaattaaaaagaaaaattaagtttgcttgaaaaacaaagaagaaatcgatttaatcagattttgcaactatgttcgataaagaagaagaagaaagaagacgatgaagaagaagagaaggaaaaaaagacagggacaaaattgtcccgattgaagcaataaatcgacactgttgtattcaactgtggaaaatacctattttgaaataactttatttaaaatgcctattttaaatataagctcaatattaaacaccttgaacttatgtgtatttattatttgtgtgtacgggaagcaataccagaaaatgaaaatctcttttatttattgacaatccataatcctacaaatcctctaacttctagacttatgccgttattaaatattttaatatatatatatacatatatatttttaataattatatttaggaacgtcttttaatttatctccgagggtacactttttttctttatctcttttgtttttatctaaaaacaaacttttaggatattacctcacgaaaaaaacaataaattattcgtctagcaccatcggaaaaagacaaaagacttcgactaccccactcagtggcacaatcctgtaatttctactaaacattgataccctttctcgaattcatcgtgttctttgtttttaataagatggtactttttcctcatttttcaatctttttttcaccaagaagcagagaaaagaaacattaaagcagagaaaaaacaaagacaaataatctccatttgctttcttctccatcttcttctaattttcttcaagttttatcaatggctggtgttactggaatcttaaagcttgaagcttggagcatcttgtgaagaagattaactagtttcttgtatttttcttttctggggttttgagtttttttttctcttccttattaccggaagtaatggcatgtcggagtatgatcgcttttagtttagatcctgaaagaaaacaaagtggaggacttaggacaaaacaagctggaagaggatcttgccgtggaagttagtctttgttcaaatccattttcctcttaaagaatgtaataatgggtttttattgattgttgtagatttgttaaaaagttttgtttttagacctaaagtttcgatttttttcttctgggcagtttgaaattgcactgttgcaagtgaaaaagtttgttcttgttggagcttaaagaagagagaagagaaagagaaaagctatg

SEQ ID NO: 25309 - DNA, 3003 bp, Unknown; identical to SEQ ID NO: 25308
  misc_feature (1)..( 3003): 2750-1469P.txt file - cDNA_ID_2704816; gDNA_ID_2213645; Annot_ID_181403

SEQ ID NO: 25310 - DNA, 3003 bp, Unknown
  misc_feature (1)..( 3003): 2750-1469P.txt file - cDNA_ID_2704844; gDNA_ID_2213645; Annot_ID_132373
aatacatttccatctccggacggatttagtcccccaatgggaaatggatattttccgtctcacgatttttataaaagttcacatttttcaaaggtcaaagttaagaattcgaactatgaaaccattgattttgaaaaacagagaacaagacgttatgcagattcttaccaatttatagactaacgtattggggttataaccagcataatagagtatccttctcttatggaggaccaggtggacaatgtggtacttgatgatcaataaatcaaatatgtatcaaccaaagctatatcaaatttgcaagagaaataaactatatccatgttgttgtgtatgacaagtattttaaatatttataaggcattcaggtggacaaagatatataaactacctcttccaatacaaatcttaggctaatttcgttttcttacaaacatctttgttttatcattccaattttatgaaatcttcagaaataaaatgtggttcttccatagatgtatatagaaaattagagtcatgctatgaacacaactaatgccctaaacggcgaattccacataagtaaataagctttagatagttcttaagcgatcttttggttagaagtagataccaaagacatgaagaaactagtgaatagatcaagagaacaatgggttagtatgtgaaggcaaagaagaagaggcataatcatccaaaagactcaaagactctcaagtcacgtgacttgtatacatgatcaaacgcaaaacgcaaaactggtctatgatgactcaaagctcctaactctaggtgttcgatacaactaactccccaaatccaaataacctcgaaactggtttgaaggttttctgagtctcataatttaacctaacaagttgacaaaagagaagtatcagctatcaccacctgcatgatttggcttggtgtctggtggattgtgttttgcagcttttgttgtgtcaaggatcacgacccgcccgtcaaccaactgtgatccatataacaagacttcatgaagactaagtaacataaccagttccaagagttgacgattttagattatctcaagacaatagttccattatctaacatatcttgttctaatgctccaccaggggattcacaagtaaattatcaaatctttttcttcataacaggagaaagctataagtttgaaagatcaatactgtgaaagggtttatacgaaaatcgattcgaatggagtctttagacttatctgagatatagaatttcaagcaatgaattctcaaatggagaagggagtttatacctgggcgttgagttctaataaagctttctcggcttcttctttagatgagaatgtgacataagcaaacccttttggtctgcatctgattttgtccattataacatccactaaagcaaccaaaagttgaagaagacaatcagaatgaatgaaaatactgaaaaccttatgtacaagtgtatagactcttaactatctcaaactaactctgataaagataaagagatatgtaagtgaaggtgtacaactaaattgctgttgggattagagactgacctttgagaacttgaccatattgagaaaatgcttgggttaatgtttcttcagtgcttgagaaagatatgcctgcagcaaaaatcttcagttcagtgacagtaatacaagtcacacacagatcaaacaaagacacaaagcttttacatctaaagttcgaaacttttagattggtaagacactatgtggtagttaagcagtaaattcacacataccctattgttgtttctatcaaaataagaagaattggtacaatcacagcatacatacacaatagctatctctaaccaaattggcacagtcaaagtcacaacctttaagacctcaaaaaccaattgaggacatacccgattcaaggaattagaaatcaggaaatgggtagttagattcgtgaaagaaggattaagaatcagaaaagtcgcagataataacagaggaagagggagagagagagagagagagagacctttaacgaaaagcgtagaggagaaagatctggagaagaggagaggagtgaaggagcgataaaggaactgggtgagcatttcttttgaagccgtggctgttgccgcgatctcaccgccggcgaaatcacactctatgaactttattctcgctgttgttcttccgttccatttaccatataataaaccaaatttaagtccacgtcagcaattctaaccacactgtaaaaaaacaaaacatcatcgctccctgagagcaaaaccctaatcgtcgattctgctacattcttccggattctcagctgctgaaatctccggtgagtgttcccacactctgtcaattttggttattaaaattttgtttcatttcttttgattgatttttagtttaaaaatgtcaaattgaatgctttttctcgagaatttgagctaaattactgcaattttgtttcagttttcatgggcttctacagccatcacgtccttcctcattcttgccatcgatcaagctcttactttctcagttctcagtgtcgatagattctcttctttggtttagctgttccactctctgattttacttagcttgatccttccgaatgtgaaaatgtttctgttatgtttatctgaaatgtggactcatgaatctggaatttgagcaaacaagggtttcttccgaatgtgagcttgaatgcttacaaattttgaatctttttgtttatttgtttgctctcttcattttttaattgatctggtcacctgaaatgagttaagttcgacttatatagaagctatgttctgcaaatccacattgatgattttaccattttgttaatttggatgaagttgatccatcaagaaacactttaagacttataattgttggacttgatctgactttctttttgggtactgaccatttatgctgacaattttgtattgattcaatatcatttatggtgtcagatg

SEQ ID NO: 25311 - DNA, 3000 bp, Unknown
  misc_feature (1)..( 3000): 2750-1469P.txt file - cDNA_ID_2704848; gDNA_ID_2213645; Annot_ID_132374
ttatacatcagcatcctaaatccgtgattttctttaaaaactcttataatgaaggagaatatgtataataaaataaattaaaatgacatttttgtgaaacggaagaagtattcagtaaaatacaccctaaaaatagactacctaatctatttaaaactacatttgacttagtatgtgatcgggtagatatgattttttgggattttttaaaaaaacattattttattattaaatcattgccaacaacttcttttttcagtattgttttttattatttgaccatacttaccatgttttcatacacctggagtcgaggctaaaattttaaattttagaagtaattactctaaataattgaaaattattttaatgctcttgtcctaaataggcaattatcatttgccatgcattacaatgtcaattagtatcttattaccagctcgagtcgtggccgtcttctgattatagagtgccccatttattattttgtcggtccactacccttgtattatttttgctgccagaggctgcaggccttgcatttttaattctctcttgagaaagagacttatcgattggcaaaatgtcgtcactttaaattgtatgcaaagtaacctatcttgttagtaaaaaatgcaacaaatttttgtttatacatatgatagacgataatgttttggatttcacaaaatgaaagagaaaagaaatggaggcacacgacccccttagggtttctagattttgaagggattttttggagatgaatcgaagaaccggtgtttaaaattaaaatgaatgataaactcatgaacactagattttttttggtttctctttgttgaagtaaaaagtttgaagtttttagggaactttctttttatttttaacatgttacctagtggccaattagagtcacattgatcgagcttaaatttggtgggatgtcaacaaaggtaaaagcaccagtgcaccactagcctacttgttaaagcaccattagcctccttgtttcttccaagatttttagggaattcatttttcttcaatttgtttcatagagtcaaagtttgtgatagtcgacgaaaaaaatctttgtaaaaagatccaaaaaacgaatttggcgtatatttttgaagatgatatacaatcaaagactcaaagtaaggaaggtaaaaattgtagaaaaccaagatgataataatatcttagatgtgtagaggatcaaaatgatatcacgaagatgtaaatatttgttttgtatttatgtagtttaaaatgatataactatggattttatgaatttgggcttttaaagttttgaacccaacgattaaaatgaaaatccataaaatctaaaacacatacaaaaacaatatccgcaatgatgagaacacgtgtcaacgcactgacgaaacatagtcgctgagtccacgtcagcatcttcgccgtctcttccaaccccaacgacggtttaaaaaaaaaaaaaacatttcctctcaatttttttttcaatcaaacaaaaaaaaatcatcgctcccaattttacattcttcttctcgccaaaccctaattgtttcgatttctgctacattcttccggaaacttgttctatctctgacggatctcgaatcggtattctcagctgctgaaatctccggtgagcttttccatactgtggtcaacttctagggtttcgattatcgccatttaatgatcgttttatttcatttcgatccctttcttttgattgatttttaggctaaaaatgtcaaattgatttgggttttgtgtgttatgtggtcaagtttatagctttttttttcccggtatcgtttccaagaaaatagaggaatttgagctaaattactctgcaactttgtttcagttttcatgtgtgtttcgatattggttcgatattggttaagtagagatagtaaaggtgttgtctttagggaatgtttcggatctaatttgctagaaactagaaagtgttgttagattgtctaagaacttggaaaaatcttgatgattgctagcggaatgcagagaacgttgttgtgtttttgtatcagaaggttaagtagagatagtaaaggtgttgtctttgggaaatgtttccgatctaatttgcaacaaactagaaagtgttgttagattgtctaagaacttgggaatcttgatgattgctagcggaatgcagagaacgttgttgtgtttttgtatcagaaggttaagtagagatagtaaaggtgttgtctttggagaatgttttggatctaatttgcaacaaactagaaagtgttgttagattgtctaagaacttgggaatcttgatgattgctagcggaatgcagagaacgttgttgtgtttttgtatcagaaggttaagtagagatagtaaaggtgttgtctttggagaatgttttggatctaatttgcaacaaactagaaagtgttgttagattgtctaagaacttgggaatcttgatgattgctagcggaatgcagagaacgttgttgtgtttttgtatcagaaggttaagtagagatagtaaaggtgttgtctttggagaatgttttggatctaatttgcaacaaactcgaaactgttgttagattgtctaagaacttgggaatcttgatgattgctagcggaatgcagagaacgttgttgtgtttttgtattgtgttgtcaatttgattggtcaatcttgtagttttttccgatatgggttcgaagaaaagaagggaatttgagctaaattactgcaactctgtttaagttttcgatattgattcacaacggtcaagtagagagatagtaaaggtggtgtctttggggaatgtttcggatgtaatttgctaagaaaatcagaaggtgttgtttgattgtttaaaaacttgggattcttgatggttgccagcggaatgcagagaatgttgtcgtgttgttttttgttgtgtggtcaatttgattggtttttgtgttgtttggtcatg

SEQ ID NO: 25312 - DNA, 3000 bp, Unknown; identical to SEQ ID NO: 13296
  misc_feature (1)..( 3000): 2750-1469P.txt file - cDNA_ID_2704852; gDNA_ID_2214613; Annot_ID_135786

SEQ ID NO: 25313 - DNA, 3003 bp, Unknown
  misc_feature (1)..( 3003): 2750-1469P.txt file - cDNA_ID_2704856; gDNA_ID_2213646; Annot_ID_132393
caactgtgcatgatggatggctactatatgtatataggtgtgtggggctttttggtatttgagttcaatagaaaggaaaagcacatgttggcgtgccgcgtgtgctaggacatccgactgcaatctcacggtcacggatctgctttgtaaacgagctggtagtgacaacattcgttttctcaacacctcatgcccattaatcgaccctgcccaaatcacaaactccacagacttcgactttggtatgtatattgatgcgttgaagtcaggggtcctagaggtgaaaccaaaggattttcccaggaaattcgtctattgcttttggtggggtctccgtaatattaggtactaaattgtattatgctaaactctctgccgtgagacatatatcaatccacttgatagattaatccgctctacagtgctttgggccaaaacctggagacaagcaactctgcaggggagattttctttgctatcatcatatgtgtctctggtttactcttgtttgctgtgctcattggaaacgttcaggtaatgttcataccttagaactagagtttgatctcataaagctgattcttaatagatgtttgtttttggtgatcgcagaagtacttgcaatcatctacgactagagtagatgaaatggaagagaaaaagagagacacagaaaaatggatgtcctatcgggagataccagagtatttgaaggaacgcattaggagatttgaagattacaaatggagaagaaccaaaggcaccgaagaggaagctcttcttcgtagtcttccaaaagacctcagactcgaaaccaaacgctatctttttctcaagttgctcaaaaaggtaaccttttattttgtcccatcataacttaaccaactcctcttgaattcactgttttgttttgtttcaggtgcctttgctccaagctatggatgatcagttactagatgctctatgtgctcgtctcaaaacggttcattatacagagaagagttacattgtgcgtgaaggtgaaccagtggaggatatgttgtttataatgagaggaaatttaatcagcaccactacttatggtggcagaactggtttcttcaattctgttgacttaattgctggtgattcctgtggagatcttctcacttgggcattatattctcttagttcccagttccctatctctagtagaaccgttcaagcgttgacagaagtcgaaggctttgttatctcagctgatgatctcaagtttgtcgctactcagtatcgtcgcctccatagcaagcaactccaacacatgttcaggtaatattttcaattgaaaaaatgcatgttgagttaatcatattggataatgatgacatatcgtatacctatctcgtttctcaagttaccttcaacataataacccaaaatctttttatcacctaccttgtatcttgtttctcaagttacctttaatattataatctaaacaactttttgtctccaggttttattcattgcaatggcagacatgggcagcatgttttatacaagcagcatggaagagacattgtagaaggaagctctcaaaggctttacgtgaagaagaaggcaaactacataacactcttcagaacgatgattcaggaggcaataaacttaacttaggtgctgcgatttatgcgtagaggtttgcttctcatgctctgaggaatctaagagcaaatgcagcagcccgaaattctagattcccacacatgttaattttgttgcctcagaaaccagccgatccttagtttcctatggatgaaacctagttttgtatagttgttgactctatctctctgtaatgtgatcgctagtgatttcttgcaaataacttttgtgtaaaccagtaaagatatttttatgtgaaataataatcaataggaaaatttcttatagagtttagtaaaaaaacaattttaatggagacgttttagcgaatactcaccacctcaaccactgtaaatgttttgttatccaaaaacttctaattcctaagcttttaacttttaaagcatctctcgttaaacaatttgtatttttttgcaaaacaaaaataaaacgctgtatttttaaattagaatccttaaggttgggtatttttaagtgaatcaaaaattccaaccaaagtaatggaactaaataactgttttttattagaaaactgaatacgtacatataccaaagtacataataaaactagttctattattgatatatataaattaaacacagatttagattatatttaaacacatagctaagattgtttactagagagacttaattaggtctctctattggtggtctagcttggcttcactctcgaattgaagaggaacaacgtgtttgtttagtctttttaggacttacaattacgtctctgttgtttagtaacgatggcaaataaaaataatgatttagtatatttgaacatggtcccaaatgggcaagttgtaaaaagaagacaagtagagaaaattcaaaattggatttcgtggatattattgtaagttgcagggaaaaaagagtgagactgccccaccgtagactaaaatgatttagcttaccactctcactctgcatccacagtttaataattacccctttaatattttaatcattattttagtagaccaaaactgtttagtgttgaaacttgtgcatccacatgagtgttggttaaaggttgagaacatcgatttgccaaccatatctcacagccacagccatttttattctctctcggtctctcttctcagtctctcactaccacagccttaagttcgagaagaccgaagtggacttcattttcttgtacgggaattaaaatattgcagattgacgacatatactaacatgaatcatcggaggagtaaatttgccaggtacttcttcgaagttttgattaactactatttcatatttggttgtgatagtgatcattgttgatacaggatagatagtatg

SEQ ID NO: 25314 - DNA, 3003 bp, Unknown
  misc_feature (1)..( 3003): 2750-1469P.txt file - cDNA_ID_2704860; gDNA_ID_2213646; Annot_ID_132391
tacaatcacttttgtttatttccatatcaaagtaacattgtgttagtaacttaccctttatgataacgttcttttgaattttagtatggcaaaaactggaagaagaaaacgcagagtttttcagggcatattacatcagactgaaactgaagaagcaaatagttgtattcaatcatttgcttgagcatcagtatcacctcacgaagtataatgtacattcaaaagttcctctggtcccaatgcagaacggtattcatcctatggcatctggtaagtctgactccttatatcacttgttggtgtagatggttcaatgatttgtttgtggtttcactattattataacactaaatgtttgcagcgcagtgaacaacatgcccatgggatacccagtactacaacatcctcagatgcatgctcaaggtcatccccatcttgatcctatgagctgtggaatgtcaagctgccatgtggttaatggagtccctgcacctgctaatttccaaccaatgaggatcaactcagggaatgagtaagaactaacttggattgagttttgtttttgcatttttggtgctttagacttaagaactaattcctactgttgtttccggtgcttggtgtagtatggtaatagatacaaccatggctgaaccaactccaatgattccaccaaatagtggtatgtcggatatgccagtaagtccagcttctgtggcgtcaagcggacactttccatttgctgcttcagacatgtcagggatgggaatggacacgtcagctcttgactctgctttcacatctgatgtcggaacttcagtagggttacaacttggatcagatggaggagctggaaattctagagaccctctcaggccatttgatcagataccttggaactttagtctctctgacctcactgcagatttgtcaaatcttggaggtaagctctttttatcaaatgccattgcgagtttagctcgaaaaactttataacatacgttggtagatgctccatgtacaggtgtactccatagaatgttgcatatcaatgatcttttactttgcagatttaggggctttaggaaactatcccggttctccttttctgccatctgattcagagattttacttgactctcccgaacaagaggacataggtaaacattagctctcactctccatctaaaaggtgcaatcttataagaatggtttgaacatggatgttatagatttaaaagtttcatgtcctatgatcactaaccaatatcttcgtttctgtatcccgtagatgaattctttgtggattcgattccaggacctccatgttctcagtcagaagaagacaagtcttaatcaagcttatgatatttgatcaatagaaacagtcttattatctagcaagcaagcattgtttgtgccgtttctctatattagagaaaacctcccaaaaggatttaaaatcttcttcttttttcctcttctaagggtaatgatcgatcatagattcatagacttagattaattgctcagttgtttgtttattgtacacctttattttgggactttgctaagcattgtataatatctcccaataatctattttcttgttggatagttcatcaatatgcatgggaatatctcatttttttccttctaataaatactccctattatagaaatctataaaagtgttcataattataactcgtggaaattaatttgagctttaaggaatgattgatatctttttgtgaaacaaaaaatcacaaaaagaaaatcattgatttttttttttttggttggaaaatgattgattcttttgtttttttgggtaggaaaatgattgattatttttgtagaggagaaaatgacgtactctaaaattcagaaaaaagaaatgacgtacgccaaaaaaagtatgaaagtctcttcaagactaaccactaaacaccaaacaagatataattttcttttttttttttgtatgtggagtagaaaaatcattgatttcgtatataggtagactaatcaacgtttgtggattcagaatttcaaatacaagtgtccgtgaattaaatccaagaccgtgaatgcataaaaaaaactaggtctataaagtgaaaaaaaatacaaatattaagggagtaactgagtcatcataactatgaaaaatatgattgtttgttatacataaaaaaattatgaccatacatatatattttctttttaaaaataatgaacatattgaggtaaataaataaacaacagattaaaatattatatatcatggtaagaaccacaacatatatatataagttgaattagtaaattaaaaatgttggatggaatttgctcattcactagaaaaattattttcatatttcgtctcaagaaaaaccaaattggaattgtaatttttttgggttgactgactcagtcttcgtcaaaagtcaactcaactttattccctttccaaaatttattattattgaaaacttgtctttttcatgtgtgttccaggctcgtttcttcttcacttagtttcaattcaaagttgtactaaatcactacttcgccaaaattagaacatcattatcttcgagggtctcttctctcttcatactacttcaagaaataattaaacctttttttcccttttaatctttcctgtcgggaagacttttaagtaccatttcttttccgggaaacaaattctcgaataatcacagaaaaataccttggttcactttttttactgtatagatcgtccattgaaatcaaggttttattctttaaaactttggtctttatttcacaacttctttgaacttcaaatagtttaaaatttactctgtttcatcaaattactctgtttcgtcaaattactctgttttgtcagcttgctcttttctaaaacgtggaagtaaataaaattttgacataagtatattttctcccacaggttcaagaatctgtggaagaaaacaatcagcgatgatg

SEQ ID NO: 25315 - DNA, 3000 bp, Unknown; identical to SEQ ID NO: 10382
  misc_feature (1)..( 3000): 2750-1469P.txt file - cDNA_ID_2704868; gDNA_ID_2213646; Annot_ID_132383

SEQ ID NO: 25316 - DNA, 3000 bp, Unknown; identical to SEQ ID NO: 10408
  misc_feature (1)..( 3000): 2750-1469P.txt file - cDNA_ID_2704876; gDNA_ID_2213647; Annot_ID_132405

SEQ ID NO: 25317 - DNA, 3000 bp, Unknown
  misc_feature (1)..( 3000): 2750-1469P.txt file - cDNA_ID_2704880; gDNA_ID_2213647; Annot_ID_132422
cagtttcttctcacctaaactgcctctcgaatttaattattttttaatagtagtagatttttgttatagagaagtttgtatttgcaccgctatttaatgagaccccaactgttacattcgtttttatctgtgagccccacactttattttctttcaatctaccccccaaattgacggtggtacagtattttgtgtcaggaatttttaatgttttggaaattaaattacacctagaacaaaaatatcatgttactttcattcttcatattatagtgtgtgacaaaacaaaaaatatgaaagtctcccacatttagtgaataatgtgtgatatcgagtattgcatttgatatatattaaaacttggtttacggaaattgaggttaattctgtcactagaactagtttttgatcaaatatgcaaaaagaagcataattatggggtgtgaatttggagtaatattaaaagtagttaaataaggagaaaccgagaaagtgcagagatagttggtcctcgtcatcatcaacaaaggaagatcggacggtcattaatggccgtaggtaaaacttttaacggatctatggacagtagacctgtatacctgtaagatttttataacaaaattcaactgagagaattccgccaactaaacgacaaacactatttaattgcttttgttttttttgttggaaaaaaaagaagagaaacgtcaaaacaggaggtggaaaatgaaatattctttacaatatgaccccacttaattttggatattttattataactattgtcaatttagatttcaacaattttttgcaaatgttatttcggaaaattttactccactttgattaatcacataggttagtgacttaagatgatttttatttgattttttgaaatacagatttgaaaaatgtatatagcttgttttaaatgaccatgattgttagttttgagttttgacaattagaagatgttgtgtagcaaaatgtgaattattaattaaaatagggagcaaagtgtagtttctctcattgcccgtaccgtgggacccatacaacacgtggcggatagcggaggatgataacaagattagaagaaaaatcaattaaatacggagcaattaaagggagggtcaacggtcgttaggccttcccatttctagttcgaatatatttattacttaatttgttttactttcacaatatatatccatttttatattacagaaatcaacagatagtgaattttgacaaaagaaaattagacaagtttcattaattgaatctgaacagcacgaaatattgactttcggtttagacttcgtaatgatcagttgtgttatgattggttagtacgttcgttctggtagtagaatttttaatcaatcattgctctaatcatttttcaacataaccacactatattttatttcaatacaataatgtaacccacaaaatgcatccagttggacaaaaaatagtaattacattctagatcaagtcttgaaaatcagaatttgtcttgctaaataatcaaaaagaagcccagaatttgtcttgctaaataatccaccgttggaactctgtacggtctgatcttggaccgttctcggtttctacttgagcaacacacctcgcacctgcgtttcctcgcatttcgcctgcaagaaccacaacatttaaatgatcattttctgaaatgaattttgagtaaactaatccagttggttgaaacaaaaccaggccaaaaaatcaaattttcaggttaaatcgacaaatcgtagttgctgaatatacatgcacaaacagaaccggacaaacaaatatgattttacaaaaaggaggttcatcactaaagcatatgataaaatgagcaaagcagtgacttcttacattacccgcagtttcagcttcttcatcagctttctatgcatcagcctcttgttgaaacttctagatcacgttatggtaataagtatgatttgcagaggagtaagaaaccgaacaattaagatgaatgatcgcatgcagcttttcaaacaaacaatactgcaagtaggtttgatagttaaccggtgagtctggtttaactctgctactttcttggttttctctgtactcatctgactcgaagttctctgtgtcatcttgagaataatgtttgcactgcgtgaaaaaattgagtaaatgaagaacaatataaaacatctagaagactagaactctcacttttcttccaaatacaaacaagataagttgaaaaatgaatacattaccttccttggctcttagatgtattctgggtttaccctcgcaaagaaactagggtttcaacttccgatggtcgaagagatcagatctaagcaaagagttgatttttaaattgcaaaaagttactcacagcctagtggttcagacactattcttttggctctgaagagcagggttcgatactccatggactcgctccctaaaaagatatatatattttttttcttccctcgaacacggttgagtcgtaacattctcggacacgtgtgtattaattatatagagagatgtgtacgtcacggacacggtcacacgtttcgactatctctatcaaatctacttcgttgtgatgctggtatcaaaaaccaaaaccgtaaactcttgcgcgtcgtataaaacaacaaacctgaagtagaatcgagagatattgttgcccccatttacatttctgcacgatcatcagtacgtttctctgccttttctctctgttttcttatgtctagattgtagattcatgatcttgccactcaaatctgtttctcttcttttcttttttttatccccaattctggtttatctggaaaatcgatctttgatcccttttcgatgatctcaagaaaattggggaaataaatcgtaaaacatttccgcatacattggtatcatgatcaaatctgcaatcttggtgttgatttgtgttttgtttcacattggttgacaaaagtcatg

SEQ ID NO: 25318 - DNA, 3000 bp, Unknown; identical to SEQ ID NO: 25317
  misc_feature (1)..( 3000): 2750-1469P.txt file - cDNA_ID_2704880; gDNA_ID_2213647; Annot_ID_181498

SEQ ID NO: 25319 - DNA, 3000 bp, Unknown; identical to SEQ ID NO: 10410
  misc_feature (1)..( 3000): 2750-1469P.txt file - cDNA_ID_2704891; gDNA_ID_2213647; Annot_ID_132402

SEQ ID NO: 25320 - DNA, 3000 bp, Unknown; identical to SEQ ID NO: 10412
  misc_feature (1)..( 3000): 2750-1469P.txt file - cDNA_ID_2704895; gDNA_ID_2213647; Annot_ID_132400

SEQ ID NO: 25321 - DNA, 3003 bp, Unknown
  misc_feature (1)..( 3003): 2750-1469P.txt file - cDNA_ID_2704913; gDNA_ID_2213649; Annot_ID_132452
ttgtttggaaaacttttcttttctttttaccgtttcctaattaatatgtggctgtcccaattaatagaaaatatataaattaaattttgaagtttcactgtgtatgtatatgttgtctgtacatacagagataatataagaaggtaaacaaaatcgatattttgtctatctatgtaaaatttagtttttcttttctgtagatgttatctatagatatggataataagaaagaaaactttttttatatataattaatttcatattaaaaagaacttagtttagattttcgcttaaaactttatgattctagttattaaccattgttaacggtttaaataccgttattttgtaatgctagctagtgaccgttgtaaatggtttttataacgtttaaaacttataattctattttagatgtgttggaaagactagtaatttcaacattttcatatttttttagtgatttgtaacagacttctaaaatgaacaaacttacttatatacaaatgaatattatattatataataatataaacaattagaccttatattaatataatttatattcaatggatattaagtttcaaatatcaaataatttagattaaaatgcaaaaaagaacaaaaaagtcatgatttgaatttggccgaattaaatcatttcaatgtagctgtcttttaaaaatgttatttttttgtttttaatggaaacagtaattaagtgttacatagaaagtattttattttgactaacatacaatgctaagacagatttgttttagtatacgataattatatattttaaaagtaaaagttgggaatttgaattggcttggccagttataccactaaaaaacaaatttcttaaatggaaaacgccagcgggaagcaaagaacacgagtcaaacctttatagttttttccacttctagatattatataattaaagtacaaatggaaagaaatatagattttgaccaatttaaaataagttcacggaatttgtttttgatgttcagaaagaaagaaaattatgtatatttggaaaacatcaacggaaaaaaaagtagtatttgctaaaacaaaatctacaacaattgcaaatcatcaagtccggtaatttttttttatttttgtatttttcttcagtcaaaccgatgatgtgttgtaacgtaaatggcatctttttccaaactcagattctttttttttgtgttgataacattataatttcgaccactttaagcccaaggcctaaggcccaactgtatagcataacgtttaccgtcaatgcttgggccaacataataaaaccaagcgcgcacacacacatcaagccgacacattcggaaagactaaaagagcgacccaaagggaactgtgttttttttttttttttttctttctttcaaagagaagcaacgaacattatcaattcaatatgttgttatctccctgtttaaagtttcaggttgattcaagttcttcgtagcagagaattagatcaaacgtaatctacgtgaaatgcaaatgcatggccacatcgtagcagaatacaacatcactacatgagtcgttccttctccaatgtttaacaaaatattcaacaagtatacaaagctgacactctagtcaaaaatttgtaatggttatagtcgtagttgttacttgtatgtatattacttagtaaatcaaacattcttaagatagttgttttaagtagaatacaaaaacaacctaaaactgtaaattttttgtttaaactttggtagtatgaaggtgtaaaaactttagtaaattttattcaaaagataaaaaaactttggtaaattttctgattagcatttgaatggaaaaaggggatgggaatcacaacgccaattgcgcatttctttcctccttttataatttacattttaaattggttaaaggggtctcgaaaatgtcgggttggtaaaaaataagagtgagattagctacaagaaagctgactttgtttttcaagcaaatcatcaactgtcgcgtcgtaccaatcatggatccaccatgttatttgttatttttttgtcggcacactagtgttaatttgaattatttgatatattaatagcagaaataaaatacttcttacttgaagagcttaaacatattttcattacccgagaatgttggtttatcaaatgtgtatattagtggaaatgacaaatacgagtccaatagttaacgtaataactacccttcttttggggttcaaaagaactaattatgttgtttggagatttcgggaatacgagatcgaaaaatctatcttatttggatttgctttgattcattcttagtgtaaaaaccaaaaggaaagctaacctgttataaattttgatttactcaatatctaaacagaaaagcaatttgcacaagtaactttaactaatcttgtaacaaaaagacacaagttaaagcaatgatatactgtggatacctttttcaaacattgggtaaactttttgggcgtagggttatgttcacccacactatggagtggaaaacagcaatcattcacacaaccaccaccattcctactttttgtgcgtagggttatgttcagaaatatgatttaccattatctccttttttacatctatcaaagtatattattaactgattaatggaaatttcagttgatattactcgataaccttatgtcattactcagttcaatccttatgttatatatgcaattttaacatagaacgtacattattcttcatgagttctgttcctaatcagtgctatgtacgtaacttttgtttttactttgttcagtttttgttttgtctctttttttcttgactatgacactgcattcaaaaacataagaaaacagattaaagaaaagagaaaaaagataaaattgaaagattcgtttttctcaaatttcaataaaaagaaagatacatttctctcttcacacttcactcttctctttcccgcctctccgccatg

SEQ ID NO: 25322 - DNA, 3003 bp, Unknown; identical to SEQ ID NO: 25321
  misc_feature (1)..( 3003): 2750-1469P.txt file - cDNA_ID_2704913; gDNA_ID_2213649; Annot_ID_181570

SEQ ID NO: 25323 - DNA, 3000 bp, Unknown; identical to SEQ ID NO: 10440
  misc_feature (1)..( 3000): 2750-1469P.txt file - cDNA_ID_2704924; gDNA_ID_2213649; Annot_ID_132448

SEQ ID NO: 25324 - DNA, 3000 bp, Unknown; identical to SEQ ID NO: 10440
  misc_feature (1)..( 3000): 2750-1469P.txt file - cDNA_ID_2704924; gDNA_ID_2213649; Annot_ID_181565

SEQ ID NO: 25325 - DNA, 3000 bp, Unknown
  misc_feature (1)..( 3000): 2750-1469P.txt file - cDNA_ID_2704928; gDNA_ID_2213649; Annot_ID_132454
gtatcaagtcattggattgaataaaaataaaagattttcaaagaaaaaaatcttaaccggtgatcctaatttttttaaactgacttttttttaataatttatttctcccttgtgtattagtttatacatctttaccagaaacaaaactgtatctaaatcattattaatttttcataagcatttggaaatattgttaattatatatattttttatataacatgtggtatcgaaaacacgtataagttgggaaacggaaaaagagccactagtcccatatgattttgcttaaaataaaacaatgtaaaccaaataaatttgtaatagattataatcataaaaattggtttaacttttcgtgttcacatatgttaatgaaagcgaacaaaaatcctacaaacgctagaagataagagtaattagttaaaggctcttttgaatcccgatcgaagatatatttgatcatcaatgttggaagggatcaataatgagaatgtaactacaataaaagttacatataaacagaataattaaccatcaggagcatgatggataatcaaagatgccaaagagatctacttattatctgctagttctaagctaaatcaagaagcatctctgttagaagctgaaggtataaagcctgttaaaatctattgaattcaacactttgggatcgagatacgtaactattattgtcacaatccaatgaatagagagagtgtagaagtgataaattgagtgagtaaatactaaatagtactacgaagaaagctatattatgataatctaaaaacgaggaccatatagtataaagttacagagaaataaagctcaagagagcagcgtgttgtgtcatttactgaatgttttcgtataaagaagaagctcactagaattgtttccttctttataggtcaaaattccatgttagttaaacaccaaaaccaacggttaatgttttcagtatattacgtacttgctaaacagagagcatggtgaaatctagtataagaattctttttacagacaaatttgacaataacatctttctgacatgtactttggcactgccaaatgccaacaagtggaaggcagaagtcacagaacctgactttccatttgccattattacctttttggtaatttaagtcgaaactgtcacgtgtctccccgtcgtgaaaacgaaatcaacattcaatacgaaaatagacattggaataacaacttaaactacgttttaacaattaccctaacattaaaatggtcccttttaaagaatggtccttacgtttgaacaagacccttttctttcaagttacaattgtcaaagcctatctattttcattttttttaagtaatcacaatttgtacccactttacatgttcatattgaatcgactggtgatatgaaatggtacaagtttttaactatagtatgagatacaagcaaaaaatggactttgaaccggaataattgtggtgtgatacttttttttgttaacacaaggaacatatggaaactttcaatccttatttgatctgccagagagagaattgttctaaaagattcacaaaactgagagccaaagatcaacagtttacgaaaaacaggtcaaataacatgatcacaaaccaagtattgcaatgctcttgatcatctacttctgtgttaacactttgatatctacttgctaattctacttaagttcaatgagtttcggaaatattgtaccttcattcttctgtttcaatccaattccagtatctgtgatcttcgattccagttatcgccattcctcttgccgaaatcgccatacaaaaccgtcctgtcgatctatcagcaatggaaacaataactaacattcgaagtataattgggccgaccactgtcaacaatgggccgatttatagatggacaaaaatagaattggcacgcccggtgggactcgaacccacaatcgtttgattagaagtcaaacgccttatccattaggccacgggcgcttttgtactatcacctacttacatttatatatatactaaaacgataaatctctttgaaaaagattaacatacaattactagaaataacagaggcaaatcatgtgtataacggggacataaccttaaagaatagatttggacaaagttttgatttaatttcttacaagatcaaaattgttgcaactcttcattagatctctaaagctagctttcaatttcaatttcagtgttatgtatactctaaaaaagaaaaagtgttatttcagttttagcggatgttgatatatcgtattgtgatgtcacatttgaaaagaatggttttaagtattcaaccaaaaaattggtctaacataaatgtgttgatagaggtcccggccggccactttttaaataaatcaaacaataaaaagtcaaaactctaagagaatttagtacactataaacttttggcctatttattatctttcgtgtcacgttacatattttcgtatctagtcttattcagcctaacaacaagacggcagaaatgtccaaaaaatctttaaggatcaagctgcgtacactcatttcccaacaacacttcaacggtctaaagaaacatttaagtgtctttccaaattcacagccacatacatttcagagttgatgttttttttgttttggattgttttgtgataagtctaacactatcatttgtacaatttgttcatatattatcccaattttgcagtaaatgattgtgtctagatctgaaccactcaattccaaagaaatttcttcattcaccacattttaattgtgcttgcttcgtaattcgtatataatgaaagaaactgttcaacaacttctgatttctaaaatcttttaaaaatctctccgccacttctagttggacttgatttctcaccatagtctgtcccgttgttaccgaccatctattatatagggaaagtctcttagctacagagacacaataaccatttggagaggtcatg

SEQ ID NO: 25326 - DNA, 3003 bp, Unknown
  misc_feature (1)..( 3003): 2750-1469P.txt file - cDNA_ID_2704949; gDNA_ID_2213649; Annot_ID_132438
aatgatataactatcaatatttttcgtaagaaaacacaagtttccttattcttttcttacgtcggcgataaaagttaatgtcgtactttgatttatgaaattgtgatggaaaattgttttaattaattaagaagagaaacgagttatttgtacaaacaaatctgaaaatatagaaatagagcaaaggacagagaataagaagaagaggcaaaggagggcgagagttcacatgttcaagagaagacaaatacgtttctctgacacaaatctgtcagaccaatatttttaaatattttattgtatagtttttattttgttttgttgtatgagaaagaaacgtatattatgtctttattaccaccacaaggggtcaggctccgtccacttggggtcccaattttttctttgttacgagtttttttttgtagtaaaaggcaagtcacgccggcacgcgagccctcacgtgatcccacgtgctttatttattctctccataccaaaatttcttttcctttgttgtttggtaaggttttttcttttttggccaaaatatgatattggcgagattgaaaacatgtatatttttaaaaaaaatgtaggcgtaaaaattatgttactaacacttcattaagcatatgccaagatttttaaattaaaatttatatatcactattggtcgtttttttttttgtgtgtgacagcagctcactattggttgtttatattaaccacatactaaataaggctagctactaccaaacttggaccagaacctaacacatgatgttatttttagtaatatgaaaaaaaagaaacgaaaaggaaaaaggaaagaatagatctttctggtgagagagcatacacaacacattggtgacacaaggtatctaagggcatgaccgcacgtgtcaacatgcatcaaacatgcgatctttcaatattagtattatatatttagcaaagacgcaaaagaatccaaggcaaagactacttcgcctgcatgtcatgccaatctctctctatatgttttctaatcaatatactagattactagacaagttgttttctaataagatctctcacatatgagccaatttgagccaaaacatgatatgatggataaagcttatttgggtattgaaagtatagagactgtcaatgagaaagtagtcatttgggcccaagtacagagatttaaaccttatcaggaaaagcccaatccagtacaaacttgaagaaaaagattgatctccttgtaagttgcaactggtaaagaataggacctttgttcaaggtctactgtattgagatactgaattagtataaacggccacttaaaactactttgtatttgtttaggcccaaaacattggactatcatgttgagaaaataaacacgaacgcaacagaagtttcctacttattatatagcccaacaaatattgatctctttgcttccaatgaatctttgttaaggcccaaaaaatacaaagccgaaactacttccatcttgtactatttttaagtttattttttggaaattttaccatgtatgattcagatcgttggtttaaatttttacaactagaaaatagtatatactctattagcctattatgatattaattaatgggcaatatttcgattagtttacgtgtagagtgtagtgataatgtatttaggttttgaccggcaataatgcatttgtaagaaaagtctttggacaataatagctttggtcaagtcaatgtagaacagaagactaatttctcttgacaaaatattaaaccttaaaaacaaatcctgtcagaccaaaaggtgatacgattgtaacttacaaatgatactatatatttttatagttaacagtctagtatttaaaattttgaaatattgatgatcattgattggttcatataagtaatccattaggttttcatgttggtcaatacagatgtacatgttttcaggattaatataggttccgtcctatgaatttatccgaccatgcataagagtaactctttaatctactattacaagttttcaggatttgaaagctctatacaagtttaactttatgtgtatattagttaacgtttgtaaccacagattcataatatttaccgtcgaactcttagccataaaattcggactaaaagactcgattcaaaaaggtatcgatgagatggaaagttgttgaacttattgtataaaagcttagagaggatattgataagtcgtcttttgcttttgtatctacagctatgacgtatattgtttaatccaaatcaaagtgttttaaagatattttggtttctggtggaggtggtatactaaagattcacatatagatagagatatttatgaatacattgatatgaaaatcatatacaatatgctaaagaacaataaatggtacacatatggattggttggatatggttggcacttggcagttaggtcattttcgttgctttactaaactttaataaacagtctgtaacatttacatttatatacgccaatgccaaaaaattctttattttatgcaatggcacattttctgcttttcctttacaggcaaaaactctttctttcctaaagatgcattatttttccatttgataaaataaaaaaaacttgacggtacaaaaatacacagaagacaatcgaattaagtaatgactaagtattaagattaggtgaaatggtgtaattaaaccgatgggaataatataattattatttaaatacagaaacagagcttgctttaccaaataccaccgaaacccactaagaatacagcaaatcgtctcttcgccattaaaacaccttcctttgcaaacaaagcttcaaactttctcttaaaacacccccaaatcagcaaagatagggttaatcgaagaacctcaccgtaagtccactgaggattcaagttcttgctttggtttaaggaagaagaacagcaaaaacctcaaggagaagaagaagtcaaagatg

SEQ ID NO: 25327 - DNA, 3003 bp, Unknown
  misc_feature (1)..( 3003): 2750-1469P.txt file - cDNA_ID_2704957; gDNA_ID_2213649; Annot_ID_132435
caaatttttacctattaaaattttaaaataattaaacattttgggaactctctaaatcttaaaaaaagatcgtatttgattattaaggtattattaattaatgattgtggttatgatgatgccacacaccattcattatcgtattaatggaatgcatagggaatagctaaattgatgactgttgtcatgtgatgaaaatcccttacttcgtgggttgcgatatctcttccgtttatttctgaccgtccgatattctcattcaaacatgtgtagctctactcacgttcattgattatctcacaatcatctatatggtactatatatagatcgccctatgaatgatttttactcaaaatagtctttagaatttatttctgttaaaaatagccttcaaattttcaactaccagcttctattaaagcaccatatacttataagtgaattatattatgcatatgtatttctactgttagagtgtgcccatgttaacataaatctcattttgtatgttatatgaaattcaaacttcaatagcaaaagagtaagagacgttccaaattgtacgcaaagataaaaaaaaaacaaaagtaagttcaacattatcgaataataatatggatacccttcaaagtttggaatcttcaaagatatgctttgtctcagtttagtgctttgtatttgaaagcagattatagcatctgtatatattatttctgatcgcatagtttcctaggggtgtccagtgtccaatgtactggaaaaaggtatcgttgccaaaatttgatacagaattaggaatattttaaatcgaaaccgtaactaatttttggaacctagtttagaattagaagaggatttatattttcgtattgcaaagggtaaaaagaattaaactcatataagaattgaactttcctaatcgaagtcagtgcagcctttaaactcagaagttcaacgtgcgatatttgcaagcctgacacctcaaacttattcacactgagaatgcatggtcgaccatctgaggtcatgttttgtcattgttcggctaacgaaagcactatcaaacaaacaacaatttgtaaagagaaccagaactaaccaaaaatatcaaacgtaatgctgttaaaagacaaaacaaaaaaattcgattgcatttggtgtccaattaagatgaaacttgagagtaccttcccgatgaatttagctctatctatgcatcgtagtttatactgttaaaatgaaattgtggtagtttcatgtatttgttaaagtggaaataaccctattaaaaatgcccaacaatattacatgtcgtcatgcgcaaagactttaatctttttttttcaactgaattttctaaatttcccttaaaaaatattttagttttcccccccattttattatgatatttatgacacaagcaattacatcactacgaatagacacgagagacacgttcaatccgtaatattagtatattactttgtttaaattagacacactacctacaatatcaacaaaattaaactaatcaaatcatcacagaatttgtaaaattgtaactcaacgagataatgctataagaatccaccgtttgcggcaaaatcactaatttttttttttttttttaattgaaattgaaagcataacttcgttggaagaaattatgcgatggaatttaattattttttacaattcacacacattccaaatcctcaatttgaattttaaaacgacagaaaacaaaaattaataggcaacaattttgatttagtacaaaataattccgttggaggaatttcagttgatacttaagtaaaagatcatgcatgtgttagattttaatgcaattttattaaaaaagcaccttgaaaacttttaatagtatggacgacttaccatttacttacgattatgaacatagcaaacagttagacggattatgttgaatgttgatcgtctgatcaccatacaatgtagatttcttacacctaataacacgactgtactatgtagcaataaacgtctgaacagtaggtgacaatccatcaactcatttggacatccattatcaaaactaaatatatgtaaagcagactaaatattggactaactaattttactaaaatattcacctaaactaattacactgaaagctaggaaatacatcttaattatatatatatatacgtctatatttattttgtttataaaataactatgatatgttacaaacaatataatataaataagatatactaattcatcagaaattcaatgttattcttcatagtaatttattaaaataaattcataagaagttatctgatacaaatatgtaacacgcacatatatcacatcaattcaacattttatctttcctatatatagtattgaattttatttgatattttctatctaattgagatcgatttaaatatagaactaaattttttcagtatattttatcgaaatgatgtaaaataaatcatatttaccatttacgtctgaacagtaggtggcaatccatcaactcatttagacatcaatagtcaaaaacaaatatctgtaaaacagactaaatgttggactaactaattttactaaaaaaaattatatgatacaaataactaacaaacacatatatcaattcaacatttcatttttgctatagatagtaattaattttatttgggattttataactaattgaaatcgatatatatatagctagtaattctttttaagtattttctatcggaaaataatataaaatactatttaaatcatatttaacagttgttagtcttactagacaaaagaaaacagacaaaaaaaaaaattgtattataaataaaaaaaatattgtcactcgaagcctttaaactcgcctcttctctcttctctctcactccagagtttctctctcccctttaaatggtcgccggaaactaaatcgtctcgaacattcattagtaaaaccggacgactcagcggcgatg

SEQ ID NO: 25328 - DNA, 3000 bp, Unknown
  misc_feature (1)..( 3000): 2750-1469P.txt file - cDNA_ID_2704968; gDNA_ID_2214635; Annot_ID_136107
ctcttcacttgttaggtaagtggtttaagttttgttctgaattcatttcatctacatgtattcgcttcttaacgctggctatatttaattttatggttctcttcatgttatgctaccatacattaacttcaagtttggtttaggtctgcttgtgatagtaacgagcagcacgatgccgaagtagattctgcaaggactgctgctgaaaaagatgtaacaaagaacagcgatgatataatccagcaaattgaacgtgagctttctttcttgcacatgactgtttcttagataaaagagtttcttggcatgatcattaatctcccaatcataaaccgatatccttgtaatctttcaggcatgtcagaggatgaaaaagcgtctgtatcaaaaatcctggaaaatgtcaggtcgcatgaaaaaactcttgaaagtttccaacaggatcagtgttgccaagccagatgcatcgaggataaagctcaagaaacttttcaacaacaatacatggagtatgagcccacaggtgcaactccaacaaagaatgaaccagagatcccaaccaaagccaccattgaatcactacgagccatgccaattgagacattagttgaagagttccgtgaaaacaactcttatgaatcctttgcgaccaaggaaacaaaaccgcaacagctaacacggtcgcctctctcacaagtcaactaaggaaccacctctgttccattatatgatattttgtttttaaaaccctcaaaatcagtgtctgtgtctgtatcatcactatgaatctatgtatacttttgtgaaagtgtgggatcaatcaatgaagagtcagatgcttctgacacatttgaaatattcatcattgtaatctatgatttcttattcgagtagttgaaattctcttacagtaatcgaagttctcaaagacggtttgttctactattacataatgcgaatcttggaccctttttggttatgatggtttgtgatatgtgcatgcatataccacttgatcactttctatatatgactcaaccatgaagatgctttaaaatcccaacaatgaacattttaagtgggaaatcaagtagaattttgtgaaatcagagtcactgtgccactcagaaaattcatctttctcacttcccatgagaatttctaaaaaccatgagcatgagagattctcatagaatcatcttttaccattttaaaaaaagaacaatcatgaaaactcttttagttcgtgatcaatttccaaaacttttacaactcagcaactactattcacttgggatttttattacaaatcgcatttgtgtatatataaagctcaaggtgacatgtaatgatactggtaatgtcaagtatggtttctatatcaagcttttaatgttaggtctttcattttagaaagtggaacatcaatatagtggaattatacatccaccaagagaaatttctttcattcaaatatatgtatggtaacgattagttaagcatggtgttagtcactgcaggttcatatacacaaaagatgcaagcaaagtgttgtagttgtaggtgatgtttcacaattatagaaatggaatcaacatcactagccaaaaagttgtggcagtatttctagtttttaggcacaaccggaattttgaagaaaacaatattctgaatttgaagcaaaccggagaattgggtttattgggggaagtaagtgcatatattgctgaaaatgtgaacgtaaactgcgggaagactctttgattcactttttggcgttatgatgatgtgatggcaaattgctcaaatataaccggacatataacataagattcgttatgcctcaagcattgtctctgagagttcacctttgaacccgttcttgattagaccgattatattggaagcgatacaactgaattttaaaataattttttaaactaatgctgcttatcaattttgttttggttgttctactgacataaacaaaattgataggaagcattaattaggctgatcattatcagaattaaccactatgcaaaatttgaaaaaaatgttaggcactattgtggtgccttctgaaacactttagagctcaagccatacaccaagatttttaagagtcactttaagagttttactatataacccacctaattggagtatatttgggtctgaatatttgaactcatacgattctgccaattaatccaagataaaccaattagttacatagtggataattatctcctacttctacggtcaatttataagaaaagataattaccgaaactataattacataatttgctatccacaaagaaagatacttgcatcacttcttaaaaatgaatcaaaaatgagatactaattaaatatttggttattaaatccttatattttggatttccgtttccattataattccatcagttgatatcgtgtggatttttttaatagaaattaatgattagttgtgacaaaaatatagtttgaaatttgctaaactaaccacgttaaattagaagaagaaaaaaaataaactataatatataattcttgttagatttttttttaaaaaaaaaaaatattcaagccatgacttcatttgagcaacggaatcgtcaaagaagttatgaaacctaatctatatacacatattccagtaacacactttaattaaaacatccattaagatatgtttgattacacatgagaaaaccctagatataaggaatcaaaccgccgaccaaacatatttaatttcaaccggatgtatatttctctaattatagtgagagtaaaaatcttcggatcggattaacattatcctaaaaattatctatgtttctgttatcttcctcctcatatttcgcctatataaacattacaacaaactacttccacttatcacattctctccttattcaacttaaatactacacggccaaaaacatttaacaaacgccactcagatcctgagtctttggatcaatg

SEQ ID NO: 25329 - DNA, 3000 bp, Unknown; identical to SEQ ID NO: 25328
  misc_feature (1)..( 3000): 2750-1469P.txt file - cDNA_ID_2704968; gDNA_ID_2214635; Annot_ID_188077

SEQ ID NO: 25330 - DNA, 3003 bp, Unknown
  misc_feature (1)..( 3003): 2750-1469P.txt file - cDNA_ID_2705028; gDNA_ID_2213653; Annot_ID_132487
aagagagcagagatgggcggagagaacaagagatgagaggcagaggaggcagacgatcccggctctaaatacttatatatatttttatttgtttgttcgaaaaatatttaatcaattttggacccacccttcttcgttaacaccaatgtttttttctttcttttcatttcatctcttaatttcaagatccgatctacaaatataatccttgttaagtatgctcaacataatttattttcttctttaactcgaattggttaatcaatagtggaatcatcaaattaacaaaatgatctgaacaaattcaggtgaataaccataaaattctaaccatttagaaatatggcttttcaattgagttttaagaatagatccgttttctttaagatttgtatataatcccataaatcttttgttatcaggtagagctatagatgcaactacttttgactctaaaagaaagaaaattgaatttaaaacctaattcctaccgttactactaaattattatgaaacatatttaatcctctaaacaacattttttggttttcctatttctcttacgaaaaatcccattacttttttatcgtatttatccttatctcaatttcatcaaatggaatgtatgacaatagacgtacaaatgttatgaagacgctgctgggtaagaagaagaacaaacactaacatgttccgataataaaggcattgggccggcctaacattactgcaaaagccaattttattaaagacctatatttgatgacaattctaaatattgtatgaccggatttaacatttatggtttgacgttttcgaaattaaagacctatatttgatgaacgaagacttggtagaaaataaacaaaatcaattctaacaaaagcccgagccgattggtttgctaggaaacttgagttatacaacatacgcatcataaaccaactaatagtcctttagccagatcaaacaagtaataataactcatacgacaaaatatagtctccaatatccaactacaaagaagaaagacaagtgactgcgtttagtcaaacaaaccgaaacccaaatctccgtcactctcttctgctggctcatcctgcaataccaaaatgagatcaattttatatcacttattagttagaagaatgatttcgtctatcgttgctatttcatttaccttcttcttctcctcagcagcaggagcagctgccgcaccaccgccagcagctggagcagcagctgcaaccggagcaccacctccaccaccagcaccaacgttcatgatgagatcagtcacgttacgtttctcagccatcttggcgaatagcattggccagtatgactcaatactaacaccagcagctttcaccaaggtcgcgattttgtcagcctatcaacgacataaacaaacacaagtaaagatctttacccaattcaaaacacatttagacagatacataaaatacttgttcaattcctgaccaaataatactataccaaatccttatcactccataagaatcattttcactaagtttctaactatcaagtcaaaagaaacggttccaaaaccctactgactaaagcaaagagaccaatcaagatttagaaatagacaagcaggagtcaaaggaaagataccgtgatagcgataccctcgtcctcgaggatcataacagcgtagctgcaagcaagctctccaactgtcgacatttttttatcctgaaacgattcaaaaacagtaacaatagattaattgcttattcacaaaaaaacaaactttaaatccgttttaaaccaaaattagagtaagtcgaacaacccagacgatgatgaaatgccaataacaagtataaacggatcaaatggagaatcatagactacctaagagtaagatcgaaaatgcttttcgcaaggcggcgagagagacaaaatttctagggtttggatgcggagacgggagatgcagagtttataaagcttttatccaattatttgatgggccgcataaatattcgctaggcccattttttaattttacatatatttgttttcagtattgggccttcaaacctaatagccgtgaataaataaaagataagagcccaaattaagagatttgactttgaccagaaattgttggttggtttctagggaacgaccaccgtggtccatcatgcatgtgacagcacgagcttggtcaagcaatacttgatggatgtccttttcgcactagtaacataattcttcatttgacatatttatagtcttcaataaacatatcatatgcgatccaatatattttcattttttcttgtacattcgtcttggtccaaaaatcacgagtttgattagttctttaaccccaaacttcacaaaatcatgtagttgtagacaccaagtttgattatatttgtcaattaataaaaaaaatgatttatacaatttgtttagaatctcgataaatacttgttcatcctactaccattccaaccaactttatataatagtagtaaaaattacgcatgcgctaagccaaatattggcatttagtagaataacagaaaaaaaataaataaaaatgtagattatggagctaaaacaacgtgcaatctctctccttatctagtctacgtatattgtcccgcacggtatataatcaatatggacccaaaaacgaatatattcatgttaatatcgatgccaacaaaataaattaataatactatgtatttggtgaaaagataaaatttattaaagagaaagaaacacagttattggtgtcgtggttgcagtaaaagaggtggtcagactcagagcaacttcttacaaagcaaccaaaggttatctgtactttctgtttctctctcactccttatttctgaaaaaaaaatctacagctaaatacctaaatctcaacttcacggaacaccgatacataaagacaatagagtggtaataatttgttgagaccaaaagtaattaaacacattacacatg

SEQ ID NO: 25331 - DNA, 3003 bp, Unknown
  misc_feature (1)..( 3003): 2750-1469P.txt file - cDNA_ID_2705047; gDNA_ID_2213671; Annot_ID_132805
ctcctcctccaccgccgccgcgccctcctcctcctcctctaagccctggctctgaaaccaccacatggaccaccaccactacttcctctgttcttcctcctcctccgccgccaccacctcctcctcctccgccttcttctacatgggacttctgggatccgtttataccgccgcctccttcttcctctgaggaagaatgggaggaagagacaaccaccgcgacaagaaccgcaacaggaactggctctgatgctgctgtgacgacggctccgacgacagctactcctcaagcttcgtctgttgtgagtggattctctaaagatacaatgacgacgacgacgactggaagtgagctagcagttgtggtgtcgaggaatggtaaagatctaatggagattattaaagaagtcgatgaatatttccttaaagctgcagattctggtgcacctctctcttctctccttgaaatctcaacctctatcactgacttttctggtcattccaaatcaggtaacaacaatcaagctcttgtcttctcttctttgattgattttgattagtgttttgtgtttgtttcttcagggaaaatgtacagtagtagtaactacgaatgtaatctgaatccgacgtcgttttggacaaggggatttgctccttctaagttgagtgaatacagaaacgcaggaggagtaattggaggaaattgcattgttggtagccattcatctacagtggacagactctatgcttgggagaagaaactttatcaagaggtcaaggtattcactttttgacttcatttcattcataaagttgcaatctttgaacaaaacaattaatctttgatgtatcttcatatgttaagttttgtggaaagagtttgaaaatgttgtttatattcagtttgaagtttgaatattgaaattgcttgcttagatttcatccaaatatggataaatgttttgtttttgggaatttggttgattcatgtgggcattaaaggcttgtggtgggtccaagcgtgagcagatagtgtaagagacccacgtgtgtacttaattctgatgaataatgtgttatgtacactggcacaaatatcttgccaagtagtgagtgagtgtttgttgttttttgaatgtgggttttgttgcagtatgcagagagcataaagatggatcatgagaagaaagtggagcaagtgaggaggcttgagatgaagagagctgagtatgtcaagactgagaaggctaagaaagacgtcgagaagttagaatctcagctctcagtatcttcacaagccatccaaagcgcctctaacgagatcatcaagctcagagagaccgagctttaccctcagcttgtcgagcttgttaaagggtttgttttgtgcattcccattgcttcattaacctaaagtatcttatgttggtcaatgtgaacaaggttcttgtatgaatgtaatgtaggctaatgtgtatgtggaggagtatgtacgagagccaccaggttcaaacccatattgtgcagcagcttaagtaccttaacaccatcccctccactgaaccaacatctgagcttcaccgacaatcaactcttcagcttgagctcgaggtccaacaatggcatcactctttctgcaacttggtcaaggcccaacgtgactacatacaatctctcacgggctggctcaggttaagtctgttccagttcagcaagaatccacttgttaggagtagctacgagtcaaagatctacagcttctgcgaggaatggcatttagctattgacaggatccctgataaagtagcatctgaagggatcaaaagctttctgacagcagtccatggaattgtggctcaacaagccgacgagcataagcaaaagaagagaacagaatccatgttaaaagatttcgagaagaaatcggcttcgctgagagcgcttgagagcaagtatagtccatactcggtacctgagagtaggaaaaagaacccggtgatagagaagagagtaaaggttgagatgctaaaaggaaaagcagaagaagagaaaagtaagcatgagaagtcagtgagtgtgactagagccatgactctaaataacttgcagatgggtttccctcatgtctttcaggcaatggttgggttttcaagtgtgtgtatgcaagcctttgagtctgtgtacaaccaagctaagagcatcggtgaggatcaagaggaggttaagaggttgcttccttaaagagagaaagacaaattgttttaccatttgctctctgtttttgcttgatccaagctaatcttttggttgaatgttaggttgagtttatgctgttttcgaaatgaaattggttaaatgacttttcattgaatcactgcttgaaacttcatcaattcaactacttcttagccaagtcaaatcattggaaggtgacctaccaaggtattattaacattggagaagtgttagttagttagttagtgaggtagttaaggggattgcttaaagaagtaagcaagtttaatgataatcaaacactcgtgatgtgtacgtaacagaagaaaagagagatgattcgtttgagcggcagaaaaagacaagtgcctaatttgatttcccataaataaacacacaatcgattggtaattttgattagttgggagctattaaaagaggaaatccacaataatcggaaatagaaagacaagtttggttagcggaacgtttcaacgccatttttcccggccaaagctaactctaactaactctttgttttttttcggtttttgtgccatcttccagttttcattttttttgtttcccctctatctttttgggtaatagggtttctaatctctgggacaaactccaatcgtttcgaatccgcaatgcccagatggtcgatcaatagaaatatcaagagtctccaattccaaaggctaaatctttgagatctttttttttataaatttccctgaaattaataaactttgaggggaaatg

SEQ ID NO: 25332 - DNA, 3003 bp, Unknown; identical to SEQ ID NO: 25331
  misc_feature (1)..( 3003): 2750-1469P.txt file - cDNA_ID_2705047; gDNA_ID_2213671; Annot_ID_182318

SEQ ID NO: 25333 - DNA, 3003 bp, Unknown
  misc_feature (1)..( 3003): 2750-1469P.txt file - cDNA_ID_2705049; gDNA_ID_2213671; Annot_ID_132803
caagtataagcttttgcaccacgattcctctaaatgtgaggaattatctctataggcattagtaacttttcttgatatgtcttttgaggattggaagtcttgttaagttgcagaatcttatcgctattgcgttctttgtttatatctgtctagatgatggattccgactcacctatctgggttatgactttcttgccattaaaacattggtcaaccggggtatatttaccggtgtcggtcgtcagattggtgttggtaaagagtcaggtatgttgttttcctatttatttttattttatcggtgtcgaagagatgcgtgttggtggctgatgtatcttatttatttgttctttgcatataatagacatatttgaggtcgctcaggaagatggaactattctagcaatgaagttacatagactagggagaacctcctttagggctgtcaaatctaagcgtgactacttgaggcatcgcagtagtttcagctggttgtatctctcccgacttgcagctctcaaggagtttgcttttatgaaggttattgccttcttccactaatgtaacactattcttgtgggtgtatcatctttttattttatttttggcctaatgtttgtttggcttctgggtgagcaggctttggaagaacatgactttccggttccaaaagctattgactgcaatagacattgtgttatcatgtcccttgtgcaaggttaccccatgtaaggacctaactacatatttacacaaagaaaagtggttatgatttatgatgtttgtcatcatctactgatatgttgtggtcggatattgattttaagctaagataatcattggatttttgagtttctaagaaagctaaaccatttgcttcactcactcactaagaaacagttacaccctttctgctgtgaatcacatcttttcacatttttcatttatgcagggttcaggtgaagcaattacagaaccctgagacaattttcgagaagatcattggtattgttgttcgtttggctgagcatggtctaattcattgtgacttcaatgaattcaacatcatggtgagatacttagatctatctagttgaattataccttctatttgtaagttactttgctgaaaatatcatgcatttatttgaagctgccttctcatataagttaattaatacttctgtaagcatgctagttttgtcctctgcctacttacaattttcattgacacatcctgtttatgtatgcatgtatgttatagattgatgatgaagagaaaataacgatgattgattttccacaaatggtatctgtttcacaccgaaatgcacaaatgtatgtgacctctcatctctgcaccatgcctcagtactttcttccaaatttctataaaatattcttggtttgttaatgaattttgtctctcaggtactttgaccgtgatatcgaatgcatcttcaagtttttcagaaaaaggtgatttaccaatttgattttctttttaatatatacatcatttgttcacaatacctagtagaaaataatctctcagtcgctgaatccatgtcatgaatgaccctgaaattctcatttttctttgaactctggtcctttcttacaggtttaatatgtctttccatgaagataaaggtgaatcagaggagacggaggtggatgagaacagcagaccatcttttttcgatattactaaagatgctaatgctctggataaagatctagaagctagtgggttcacaagaaaggagcagactgacctcgataaagtatgtgagcctatgaccttagttataacactgcttatcaatcttcaatcaaccgtttcttggtattgcgtatatattttgaatcttaggcagactaatttgcagcactggtctctgtgtggttttgtttcctcattctctctggtatatagaatgaacatatggtttctgtcttttatagtttattgaaggtggggtggagaagagtgaagattctgatgaggatgaggaatctgatgatgaagagcagacttgtgaatcaaacgaagaaggaaacctaaatgaaataaaatcattacagttgcaagacaaggtataaaactttccaattcatcatacaactgaaacatgtaccaagtaaagatgtcctctacttacagtatatgcttttggcatgatgtaggagcaaaaaagttcagatggtgttgaggcagaagttgagttggataataccgagaacggtgaaagcaatggagatgaagatgaagtcggaagtaatgaggttagtatcttgtgtgtgagtaactcggagagtgaagtaatgaaatcacttacaaaaatgagttttgctacttcctttgtacaggaggaggaagagaaagaggcagagctggagaaaaatttgggcaaggtaagacgcagagccatggcagcagccaggggacgtagaaagtcacagtcttcaagaaacacatacaaggacaaaggacgcggatcccaaaactccaagatccacagcaacatgagcggcttttgatactccaactgtgggcttgaatgggccgtataatgatgtaaacgggcccataatctttttctagtgactttttctcgaatcgttgagttttccaaattgaacaccaaccaatgtactgagacagagaaattaaattataacggatatgtttcttaataaatcaaatctcaaatgttattttgtccaaattttgtttgatgtagttttagcggggctaaactgaaaacacatgaaagtcaaaggagtagatgcgaaacgctcccccagtaattagcggaaatagaaaataatggaacgcaacggctagtgatctcaacggtcgaaaatttaaacttttttataataattgacagacctctctcttttgttaaaatcctaaccttgttctcacattaatcctccgccgagattccttttgtcttcttcttcttcatcttctccatttcaattacaaagatg

SEQ ID NO: 25334 - DNA, 3003 bp, Unknown; identical to SEQ ID NO: 25333
  misc_feature (1)..( 3003): 2750-1469P.txt file - cDNA_ID_2705049; gDNA_ID_2213671; Annot_ID_182316

SEQ ID NO: 25335 - DNA, 3000 bp, Unknown; identical to SEQ ID NO: 10737
  misc_feature (1)..( 3000): 2750-1469P.txt file - cDNA_ID_2705069; gDNA_ID_2213671; Annot_ID_132785

SEQ ID NO: 25336 - DNA, 3003 bp, Unknown
  misc_feature (1)..( 3003): 2750-1469P.txt file - cDNA_ID_2705073; gDNA_ID_2213671; Annot_ID_132783
tatccaactccgatcaatacattcatggccggtacacaattctttcccaacccaagatcatgaggaaaatctgacataaaagcaacataactcttttgaattcttagaatagaattagggtttataaacgttaattgtcggatcatattatataaaagagtatgcagaagtggggaagtgaatctgtttatgcttcccctacttttagacactcaaagttgttgcaagttttaggggtttttaaatggaaattcaattcaaataataccattgtctttttatatggttttgtgaggatatagtgttgtgtatcatttaaatgttaggagcacaatatagctcttgttgtctgaatctttgtttcattaatgtgtctgtttcttgtttgtgaaacacgtaaccttagaatccggggaaaatgtttttcatctttatataacaccttttgtgtcttctttcttctattcaatataaagaagaattcattacatttgtaccatacattatagtacaatttcatatttttcaacccattttattttttatttttttcaaccatggtttccgttacgacagaatatggtctgcccatcccatgcatttaatggtttctaaagtgtattatttgttagttactagtaattgatgtatgccataattgacatgtgatagaatcagagaagatgactagaagagcgacatgtatagatgtgacatgagggtgcgttctacaatgtacgttaatcccaattagttacttctcccgccgttgcccacaccattagttctttcattactagtttactataatgatttagttaatttctactatcaggtttttgatttttctattctttcacattgactagaagtcttgaacaatactactaatctttctctattttaaaataagtcttttcatgatcttgagggaatgtttctgttttaaaaagggtttttaatgatttaaatgtaacgtttgtcaagaaatgatctcattgtctctttaaaattacttaaatagaaatttaatataaaatataatttaaaagttaacatcctttgtaagaatacaataggatattaaacttttcttatatgcatgatcagtgtcaaaaccatgtctaatttcaaatggacgcgatattatttttatttgtataactaaatcaatcataacttgtaaggtaacatggtcgaagaaaattaatgatcataaggagtttacctttcatgtaagcttacgtatatataaggcatccttgcatgagatgtatttttacaccctacacgatgatatacacacacatatatattaatagatagagattttgcagattctcatagtggatatatcatatatgtgaaacctatatatattacatactaagaaatatataaatatggaatgcaatgccatcaatttcagacgagtatgtttggctacagaaagctatttactcctccttcctctctttttcatcaatcatttcggttttgctcatttaaatacaaacaacccttaaaccaaaaaaaaaaaactaaatacaaacaaccccatcttcgtcttctcttctttcatactctcacatttaattttggtttagctttcttaaagtatgtaatatatcatacaaaaatatgtaatatatgatgtgaaagaggatatataagaaacaataatacaatgggaaaaacaaaactggatcccttatacaattgagatatattgcgtgacaacattacataatcggtaaatttggtacattcaaatagtgctgcggtccaatcggccgactcgttccgacttttactctctgccgtatcccacagcttgtcatatcccacaaaatttattcatttctaatctttatatgatgtttcttactagatccaccagtatagtgtcgtatcccttttgttgtgtgttctcatatagtttctatgtaaatttgatgtctcttatttggataatttaatattctgagaagaaagccaaaagagataaaatcataaaaatgctggctaaaatttccaagactaaaaatctaaaatttgtcattgtccgacatttataaatccaaagcttcaggttccactcaaagaaaataattatactatttggatgtcttttggaccttttggtgcattgatgacaataagcaaataatactatacacattttgcaaatttgcaggatgaatgttacaactggatatatagtagaccaataaagagaagacatgtgtgatgtttataccaatgattgacatttgagttatgtgagttttaattagggaaagaactgaaccaaacgtaggagaaactgatcttcatactaatgctcacactacacattttattagtatctcaaaagtaaaaagcaactttaaaataaaacatatagttttgtgaaagatgcaaaaattgagaaggtactaaactattattacttatattagtgaatcaaaactttttcttaatccatttggagttgtttagttcaaatgaacggaacatatgtaatccaatacaaacacaaatataaaaaaatacaagagaacaaacagagaattccagtcaaacatgtttttataaataataccataacaaccaaaaaatacactcaaattgaaatcaacatacttaatcaatcaaaattcaaattaaacagtcttcgaatacattataccaaaaaagcacaagcttgccatgtttaatatatccttgactaggcgttacaagttaacattggattacatggcactaatttttcatggacaacaaaatatgaaacacagagaccataactaaatttagagacacgaaattgaaagtcccatatccgactctataggatctttgatccagtcttgtctcttcacaacctctctttctcttctttttcttctatttttacttccttcaactcccattttactccttcatttttcttcttcttctttctccataactagtactatacgcaagaccgtaaagatg

SEQ ID NO: 25337 - DNA, 3003 bp, Unknown; identical to SEQ ID NO: 25336
  misc_feature (1)..( 3003): 2750-1469P.txt file - cDNA_ID_2705073; gDNA_ID_2213671; Annot_ID_182296

SEQ ID NO: 25338 - DNA, 3000 bp, Unknown; identical to SEQ ID NO: 10774
  misc_feature (1)..( 3000): 2750-1469P.txt file - cDNA_ID_2705105; gDNA_ID_2213672; Annot_ID_132827

SEQ ID NO: 25339 - DNA, 3000 bp, Unknown; identical to SEQ ID NO: 10772
  misc_feature (1)..( 3000): 2750-1469P.txt file - cDNA_ID_2705109; gDNA_ID_2213672; Annot_ID_132825

SEQ ID NO: 25340 - DNA, 3000 bp, Unknown; identical to SEQ ID NO: 10772
  misc_feature (1)..( 3000): 2750-1469P.txt file - cDNA_ID_2705109; gDNA_ID_2213672; Annot_ID_182362

SEQ ID NO: 25341 - DNA, 3000 bp, Unknown; identical to SEQ ID NO: 10771
  misc_feature (1)..( 3000): 2750-1469P.txt file - cDNA_ID_2705113; gDNA_ID_2213672; Annot_ID_132824

SEQ ID NO: 25342 - DNA, 3000 bp, Unknown; identical to SEQ ID NO: 10771
  misc_feature (1)..( 3000): 2750-1469P.txt file - cDNA_ID_2705113; gDNA_ID_2213672; Annot_ID_182361

SEQ ID NO: 25343 - DNA, 3003 bp, Unknown
  misc_feature (1)..( 3003): 2750-1469P.txt file - cDNA_ID_2705117; gDNA_ID_2213672; Annot_ID_132822
actgcgacgcaaggagcaaacgcccagtgagcaccgcacgcccttacttcaagtgctgttgcagctccaattcttttgaccaaatccgcgtctctacaaagttaacacatgaagtaccaatgttatcacaagccaaacacaacatggccacaataaatgcaactaattatttaatactaatagctagcattaaaaagttagtaagtgtaacatgattatatcttcaaataagactcaaatgaatcagtgaaggcaagtctcatcagatcaaatcaatccctttatatgcaagtctctctctagtctcttctactaaatttgtactttgcttaaaagaaaaccagacctagtggcgccgagaccaatattgtggggaaagatggtggcgccgtagacgtcattgttgccatgaacagcgtcaatgccgtaaattatcggaattcccaaacgcgactctaacgctgatcgctggaagccgtcgatcatatccgcccaattcgacgactttgcatcctcaaatggccaacctcctgcgcggttcaatacactacctgtaacaatatgacaacttgctttgtatcttttagtatgttcaattttcataagagaacaaaaaaagaattagagaaaatctaacaaaggtttggtcgttgaccaaaacaaaatttagaaatggtctgtggttgtgtataccgatggagaaatctcttatcacggcctcagaagcgacgctacgttcgatcaaagtcatctggccgattttttcagccagagtcatccgagagagaaggtcctttacacgcgcctccactggcgcttcccggttcttgtaaacatatgacttctcattgtcaaccattttcttcctctttctcttcttcttcttacaatgtcacttctcctctttagtctttaatatatatatagccaagctagggacacatgggatgggacgttgacttggaaacacactcggattaaggaaggacaaaatatcaactagaattcatttcatatgtatgtaaggtgtgaagtcttgagaacatggctaaaacaccaaaaacataaattaatttttttttttgggtgggaaaaaaacgttataattaaaatgttgtattgtaagattaaaatcaattggaattttaggtatgaattcttaccaaataaaaaataacgagaaaaatgtttaacattgtgcataaatattattacatgattttcaaagttactaaacacaaactaaggtagtctaggcatgcttgtattgggtgaagtcacataaatatttttgattaataatatgagtaaacatataaaaacatttggttggtatacttaaaagctcttcaaacatttggatcggaggaggtgctggggttctacggacgtttattagcggctgcacagaaagaccaacaccgatcggcggtgtcaacaacgacagttccagcaaaacctgtgcatttaaactgttttccatatggatagcacggtggttctttaactttttcatttgtgataggatttcttaacgggtcatctttgaaaggatttcttaaagaatctacaaaagcaaataaatgaacctttttcagactatggttatgattataatggtaatgatgctaaatgacgatctgaaccaaacctaaagtacttataacattaactcaccacattcatgaagacttgctagaaaaataagaacgatacaaaagatactaaaattagatgacgacattgtaattttcacactaagaagttttgttgttttatcatagaaaaacttatatatagacaagtctttgattactgctaaatttttgtgaggtgatccgacaaaactgtcattagatttgtttggctagatttatttcttttctattctaaacttataattaattactttgttttcgaaagtccctaaagtttcgaatgttgatcaataaaagaaaacatagtaaccagaaaataggaccacgattaagagtgaagcatatggtggatggagctaacaatctatttttctttttcataccaactaccacacattaatcatatacttttcttgaattaggtctagagcaataaagtcagttatttaattagtatttacttgaataaatgaatcttgattcttgaccgtttcgataatcatggtcttttcatttttatcattttgtgcagattgattgtaccatgtttatttctgtttctaaccaacattcagaaacatttttattcgtaagaagaagatgcaagaaatgggttacaaggttggaggtagagggagactcggagattgtggtggggttccttaagtcgggaatcacaaactcacatccattctctttcttaatacgtttgtgctatgactttttgtcgcgtggctggatagtccgcgttttttcacgtgcatagagaaactaaccgcctaacggatgtgttaactaactatgctttttctcttcccttagatttttatttgttcgagggtagaccggatgtggttgtctctattgtctttgatgatgcgaacgggtctgcatacccacataatgttcgtatttgatttagttttaatttttttaattaataaaatgtggggacattgtcccccaaccctaccaaaaaaaagaaagaagatgcaagaaatttggaaagaaaagaaaagagtatgattgagtgatttgtcttttaggccgattttgggcctctttcggcccaataaactctatattaattcttccaattatatgtccacgtgtcctcttgcaccattcggttccgtacgccgtgtcacacttgattactcagctttgccgatgagataattaaccgtcctccgttgtatcgacggtcgaattttaatatctttgatccaacggtcacaattcgaagtcgtatttcccagcaaacatcgtcttcattgaaaattagacagatcgatataaatgtgttacctttgatttccccaatttctagggtttcgaaataatg

SEQ ID NO: 25344 - DNA, 3003 bp, Unknown; identical to SEQ ID NO: 25343
  misc_feature (1)..( 3003): 2750-1469P.txt file - cDNA_ID_2705117; gDNA_ID_2213672; Annot_ID_182359

SEQ ID NO: 25345 - DNA, 3000 bp, Unknown; identical to SEQ ID NO: 10765
  misc_feature (1)..( 3000): 2750-1469P.txt file - cDNA_ID_2705125; gDNA_ID_2213672; Annot_ID_132813

SEQ ID NO: 25346 - DNA, 3000 bp, Unknown; identical to SEQ ID NO: 10765
  misc_feature (1)..( 3000): 2750-1469P.txt file - cDNA_ID_2705125; gDNA_ID_2213672; Annot_ID_182349

SEQ ID NO: 25347 - DNA, 3000 bp, Unknown; identical to SEQ ID NO: 11017
  misc_feature (1)..( 3000): 2750-1469P.txt file - cDNA_ID_2705158; gDNA_ID_2214471; Annot_ID_133103

SEQ ID NO: 25348 - DNA, 3003 bp, Unknown
  misc_feature (1)..( 3003): 2750-1469P.txt file - cDNA_ID_2705158; gDNA_ID_2214470; Annot_ID_133069
tcttttttttaatgagtgttattattcttttatttatgaattctggtgaaattgtataatcaaaaatatacattcaagatttgagaaaataattttcaatgagaggaaacattatccaaaaacattaattgtgattaattacactttgctcagctaaaattttcaaagttggtttatgaatctttgaaactaaagaggtgctacttcaattgttctgttagctgtttatatgaattaaaggagaaaattaatatatgaacagattatttttatttagtgtttttatatataaccatttttaacaaaatatttagctaattagttcatgcacacattttgtctactatatatgcagtgttagatgaacaaattcgttttatgtagtgattgtgtttaaccattttcaactaacatttagctacttaattcatccacacaatttgtcagactacataattcacatgacatttactgctctgtaatagtattaaaggaaacaaatatgaaaataacctactagtaattcttttgacaatatagagcttttcttagtcataaaacagcttttgtttcaaaattggaaacgatctctctttttgggatcttacacaaagtacacatgtacgaaattcctcattgatacatcattcctcattacgaaccacacaattagatctaacatatatatatttgttccactcaaatacaaatcttgttagggtaacatcacctctgaggaaacgacaaaatgaagttaatgaaagtatttggctttagatggattcgtagatagtacgtgacacgttgctgatatgcggacttcagataaattatcggctagtatcataaagataatgtaagggtctaagcatactcactaattaacgaaatatcttcttagaaacacctgagctcgatctatttcaatcatagtgactcaaacctaagaaaatctttgacatatgtatattacattagtgttccaagaagatgctacgttcgacgtcatatttgttatcctgtaaattataacaaagatgcatcaacattcaacagagaacaaagtttagtttttatatatatatatatgtcacgatcataggtctacataactataaattgatacaattgattttacagattttacacaacatatgtatccaacttgatgatatatccggtctgccgtttcccactatatatagagtattttataattgattcccatttatttttcttagtttatatatgttcgtcttttggaattgcttaatgaaagtgtgtgcgagtggttaggtatgcgattctattatgtctctttatttatttttgatttcgaatcgcaccactaccttcgtatgggaatgtttcaatatgatatctatctgtatatgatcacgaatataatttgattttgatcaaaatcaacatgtaatataatttcacgtaatatcaaacatccaatagttacagtttaatctggctactgaatatatatatatatatatatatatatcttcctttgaaagaatgtttatatatttttattctttgtgacgttttttttagctaatggtgatctcttgactctaaattcatacaaattttttaaaaaattagcttagggttttgaaaatataaaaactcttttagggcttatgttttctttttggtcaacggagcttatgcttttgtagaaacactaatttttaagacattaaagtatacatcagttttgttttgtgttttgggttaaacttatacacaattattcaaagacgacaaaacaagtttaaatatgaattccaaaataccagttcatcttttcggactactgtatataagaatattatgttggcaaaaagtaggtttattataggttaaaaataaaaataaagtatagcctactttgttaggaatacatattaaacttcacactaattactagtagatatttaggcaatataagtctagaagcggaaagtagacaatgcctattgcctagtatacatttcggacagcacaagtgacttttaactctttaatcacacagaagacagaactatgcaatgatcgacaacttcttcactctgtaaaatatttggatttctcaattaatggtttctgaaaataacatcatctttttaaagcatgaacaaattaatcctaatgtagacctaaataaaaatcttaagaccatctttatcagtaaaaacaaggaaagattctaaaaaaaaataaaaataatattttaattaaaacagatacattaattattatttaataattgaattaatagtatgatgacacttgtccaaattggatgagaatagtttctcaaagtttctcggaagagaaattcaactctccttctcttctacttttttttccttctatcatactttttcttctttaattattttttttttttattgggtatcttattgagatacttcaaatggagatgctctaataattaatgggaatgtgtttctaattaaaaagataacatctttctttctatatttttgtcgtcatataacacacctcaactcttttaagtactcgtgttgaattttgttttttgaaaagacaaaactccttataatcaacgtaattattaataacaaggagaaaaaaagtccaaagaaaaaaaaaagaaagctttttgggaacataaacaccatcgaaggagggtgggaggtgttttatgttcatgggtggagcttcttggccaacctgaccccattcatcatatcattacccactttcttctcctaaattattctctcttatctctctctctctctttttattttctttctttcttaattcatctaaactctctctgcttttgcttttcgtaattccttacatttcactcaatattaatccccagaatctccgatccacccacaaatttagcaattttctgagatttgatcatttgggtcaccaaaaaatcttgtctttttgatctgggtttaacgccaataacatatg

SEQ ID NO: 25349 - DNA, 3003 bp, Unknown; identical to SEQ ID NO: 25348
  misc_feature (1)..( 3003): 2750-1469P.txt file - cDNA_ID_2705158; gDNA_ID_2214470; Annot_ID_182998

SEQ ID NO: 25350 - DNA, 3000 bp, Unknown; identical to SEQ ID NO: 11017
  misc_feature (1)..( 3000): 2750-1469P.txt file - cDNA_ID_2705158; gDNA_ID_2214471; Annot_ID_183043

SEQ ID NO: 25351 - DNA, 3000 bp, Unknown; identical to SEQ ID NO: 10985
  misc_feature (1)..( 3000): 2750-1469P.txt file - cDNA_ID_2705162; gDNA_ID_2214470; Annot_ID_133065

SEQ ID NO: 25352 - DNA, 3000 bp, Unknown; identical to SEQ ID NO: 10985
  misc_feature (1)..( 3000): 2750-1469P.txt file - cDNA_ID_2705162; gDNA_ID_2214470; Annot_ID_182994

SEQ ID NO: 25353 - DNA, 202 bp, Unknown; identical to SEQ ID NO: 370
  misc_feature (1)..( 202): 2750-1469P.txt file - cDNA_ID_2705162; gDNA_ID_1564427; Annot_ID_149437

SEQ ID NO: 25354 - DNA, 3003 bp, Unknown
  misc_feature (1)..( 3003): 2750-1469P.txt file - cDNA_ID_2705178; gDNA_ID_2214477; Annot_ID_133153
ttgaagccttagagaaaatcaaagctggtaagtgagcatatagccttggttttcttaaatctttttggttttggtttttaaatggtgactgattctacagagctgatgatccttggattcatttctttattactcacttttggagaaccatatattctcaagatctgtgttcctcgaaaagctgctctctctatgttaccttgtttatctgaagacacagtgcttttccagaaacttgctccatcatctcttagcaggcatcttttggctgctggtgatacatctattaattgcaaacaaggatctgagccactcataacattgaaaggcttgcaccaacttcacatcttgttgttcttcttggccatctttcatatcgtatatagtttaatcaccatgatgcttagcaggctcaaggtaccataaattctagttttgatcaaaactttgtttgatatagtgaataagtgcttcattttttgttggatttttggcagattcgtggatggaaaaagtgggagcaagagacattatctaatgactatgagttttctattggtactttgttcatcagattctgttttgtacccctgaactgaagtgttgttcttttacagacttacttctgttctgtggtgcagatcattcaagacttaggctcactcatgagacttcttttgtgagagaacatacaagtttctggacaacaactcctttcttcttttacgtcgtaaagaaaccatttctctcattcttcatctctttcaaatgatcaaaatgatcttcattcgatttattatatgctctttggttacagggatgcttctttaggcagttctttgtatctgttgaaagaaccgactacttgactctgcgccatggattcatctctgtgagtttttttttctaaatcttccatctctccatttccttctatctcaatcttgatatgtgattttcgtgatgttttgattcaggcccatttagctccaggaagaaagttcaacttccagagatatatcaaaagatctctcgaggatgatttcaagttggtagttggaataaggttacaacacaatcaaatcatcaaatgcaaatgaaaccggtcttacataatccggtcgtatataacagttttaacaaattgttttgctctgcagtccagttctttgggcatcatttgtaatcttcttgctgttcaatgttaatggtgagctaaatttatatctttaaatttaaattcaattcacatactgaagtctttctattcaattctaggctggagaacattgttttgggcatcgatacctcctctactcgtaagacaatctctccctctaatacatcttcttgaaagtttcttgatgaacaataagtatttttgcagataatcctagctgttggaacaaagcttcaagcaattatggcaacaatggcgctagaaatcgtagagacacatgcagtagttcaggggatgcctttagtgcaaggttcagatcgatacttttggttcgactgtcctcaactacttcttcatcttatccactttgccttgtttcaggtaattatgaaaacatcttctccttgatttcattcttgaactaacatgttttcgcagattctgtcttcttctagtaatgtttctctctctaaccggtaaatttatttcctctgtgttatgcagaatgctttccagataacacacttcttctggatatgggtaaagaaacatctattcttactttggtgttatagaatgatgttactgagtaacatctattactggcatttgcagtattcttttggattaaaatcatgcttccataaagatttcaatcttgtagtcagcaaactctttctatggtaaaaagcttattcataaacttacttatattatagaggaaaagtatttaaaaacatgtgaggatgtatgtatgtatgtatgtgcagcctaggagctttgatcttatgcagctacatcactctcccattgtacgccctcgttactcaggtaattaacttgtaaacaacagttttcgatcgatattttagtcgaatggtctattgaaggaaagaaaatagagagatgatgaaatggtgtgtggagcagatgggttcacacatgaagaaagcagtgtttgatgagcaaatggcaaaggcattgaagaagtggcacaaagacatcaaattgaagaaaggtaaagcgaggaagctcccgagcaagacacttggtgtttcagagagtttcagcctctcttcctcttcctctgcaaccactcttcaccgttccaagaccactggtcactcttctaacatcatatactacaaacaagaagatgaagaagacgaaatgtctgatcttgaagctggagcagaggatgctattgacaggattcaacaacaggagatgcaattccacaactcttagctgctttagtttcttctgttgttacttcatagttcaaatgaaacgatgctgtttactaacttagtcaggaaactattgtcgtacaagtgtttctttaatgtgttactacgtttaagccaatatagatatctaataacttgtcctaaactaaataactcgcactacatgatcattgttattattaatatagatttatttcgatttgaaaaatcctaacacgacatgatcatgttttcttcttctccttattatatgtgatccgtatcaaatacttaatcattgtttacgtcaatgcttgacattaacaaaattatcattaagctaaacagataaggacgcgagagatagagatagatagtgactaatatttttgaattatttaatgcagtttgagagaaagagacgaggaagaagaagaagaagaagaaaggaagtgacgaagaaagaatgagaagacgaagaaagagaaaacaagatccgattcaaaatatggaaacttgaatatcttcttcttcttcttccttctcctttctcatctctcactttgagggtgaattttgattttgtagaaaatg

SEQ ID NO: 25355 - DNA, 3003 bp, Unknown; identical to SEQ ID NO: 25354
  misc_feature (1)..( 3003): 2750-1469P.txt file - cDNA_ID_2705178; gDNA_ID_2214477; Annot_ID_183175

SEQ ID NO: 25356 - DNA, 3003 bp, Unknown
  misc_feature (1)..( 3003): 2750-1469P.txt file - cDNA_ID_2705186; gDNA_ID_2214477; Annot_ID_133150
tgagtgagagttttaactgtaaaactaaatatacgattttacaaaaagtaatataaataaattaagcattatttggaaaataatgtaaagctgataattatattcctaattttaaatccatattgtttccttaaagaatatttcaatataattgcaaaaagaaaagaaaggaaatatatcttccgacaatattatctgatgcgcgtgaaatagactatcaggccaagattaggtcaaaaagcccgtgagcccaaaaacctgagaaaacccggttcaaattgcaaaccctcgatttcatttctccaattcgatagacgctgggtaaaaaaattcggaggacgacgaaagagaaaacgagtgtttcagtcactgccccacggagctctcggaaatttgtcttccccttgtcgtcgtctccctatctactgcttcttcttcgttttcgtcttctttatcaaggtgcgctttagcttctcaacgccgtttgatttttagaatttcgatttttttttttttttcttctagttcttgaatcaatccggaatttggcgactatgttgcttcgtttgtaaatcgtattctcctgtttagaaatcttcaattgactgtgttataggaacaatttaaatctcaatttcaatgtctcttttagtcaccttcgtgtagtaatttgcttttgaattactgttaatgaatctcaaaaaatggattttataatttgggaaaaggggcttctgggtttaattaaagaacacgagataaggtctggttttttcttttcatttctttgtgtgtgtttttggtttctttgattttcttctgggttatggtccgtttgagtctggtgatagttagttggcaaccaatttttattgatctattacaatcgagaacacaaaactaaaccctaagaaagaagtacataaagttgttgaaaagatctcgttaactctcccaaagtcctagggctttcacacaaccagtgattaaataacctttgagctgttctccttcccacactttatatgtgtgtttgtggtttgtctaatttgtgaggagcttctatgaaacctctggttattttaattgttttctgcaattcctgattgatatgtttatatatatttcttgtatttgtgaatttgtgtaggaatgctgtttaattggaatcaacaatggagaatttgacggaaatagaatcaacgatggagagtttaacggaaatggagagtgagagagttgaacagggtaccgataaggaaattggaagtggagagaaaaggcaggatgatgtaaaggaaacggagaatgagaattctggagagagagtaggagaggaagctcctgtcagggaacatgaagattctccatgtctcattgttattgaagaaggtacttccctagcttcccttgaggaggtgaccaatgctgatgatctgccgaagattgatgatgagaagaattcccaatttgaaacaagcccgcatccaagtccttctccttcagtagctttagacactgaagaagggttaatcaaccctactgcagaagacactgtagaagagaacatagtgtctagcgaagtaagttcggatatcttgaaagatgacggagatgccgtcgaggttgacagagatactgcagaagtccaggaagaaacggccaacatacctgaatccaaactctcggaggacacaggatcacctcatcatcatgctgatattctgatggtgcaggaaaaagctgcagaagaacatgacatgatagcctctggagaccatgaagaatttccagtcaatcctgataacaaacactctgaagaaaatcagtcaccacatcatcatgctaataatgtgatggagcaggaccaagctgcagaagaacgtgagatcatatccccaggagaacataaggaaattccagccaatcctgatactaaagttgttgaggagaacaatgacaggatagatgagggtgaggctaacaatttgaatttggctggcgatggaagtggagcagtcgatcatgattacttgaccaaaacggagctggacaaagtgctagaggtgcctggttctgagaccatatcaaaactggaggataggccatctgagcatctctcagaaacctcaatgaacgtggaaaaagaactagaaatgcctgccgttgaaattttgccagacaatgacaaaaactctgatgtgttggcagttggagtttctggagacagtgacaatgtggtatctgtcttgcccgcttcccaaacttcctctgatcgtgatgaaggaatgattacagttgatgctgaacctacggaagacatgaaacttgatgttccagattctaaattggttactgatactactgttgactctactaataacaaggatgcccatgttgaggctaatactgaaaggcaagataattctagtgcacttgtgctaaatgatgcaaataatgaaagtgcaccagtgaaacgtgtacctggtccttatgttgcatcttccaatataaagtctgaagcgcggggtagtggagatttgaacaatggagtacataaaatagttcggaccccacctgtctttgatgggaccatgcgcgcaaagcgctctttcctcttggatgatgcgtctgatggtaatgaatctggaacggaagaggatcaatctgcttttatgaaagaattggatagtttttttagagagcgaaacatggatttcaaacctccaaaattttacggggagggactgaactgcctcaagtaagcttgatacccatcattatttggtcactttactgtgttacattttaaaattttcagcaggagctgatatctaatcaatttctttggcacaaggttgtggagagctgtaactagattgggcggatatgacaaggtacgggtcactgtgaatacgcctgttgaatgtcacagcatcttttttgacaagcaaatgtgacttcggcttttcatcttttgttccatcctggcttacttgcatg

SEQ ID NO: 25357 - DNA, 3003 bp, Unknown
  misc_feature (1)..( 3003): 2750-1469P.txt file - cDNA_ID_2705190; gDNA_ID_2214477; Annot_ID_133146
agaagcatttgaagaggctcaatgctcctaagcattggatgcttgataaacttggtggtgcctttgtaagtttcacttgtgttggattgaatcttattagagcttagttttcgtttgattcggtgcttataatgctatttctgtccaggcccccaagccgtcttctgggccacacaagtctagggagtgtttacccttggtccttatcatcaggaacaggttgaagtatgctctgacatacagagaagtgatttcgatcttgatgcaaaggcatattcaggttgatgggaaagtgaggactgacaagacttaccctgctggtttcatgggtgagtctgttagtgttgtgatacgttttcagagtctggctatagtccttgtgctgattgatttttatgcttcttgtgatcaatgatctaactaaggataaatatttatttacagatgttgtgtctatccccaaaacaaatgagaacttccgtcttttgtatgacaccaagggacgtttccgtctccactccatcaaggatgaggaggctaaggtttgttctcctaaatctcttacattgccatatactgaatctgtcaaaacaaagtcaagtctttattcattgctctatacttacattagaggtctgctgaatttgcatgttgattaccagtttgtaatatattccaacaagtatcctcttttgttgttgtgcagttcaagctttgcaaagtgagatcgatccaatttggtcagaagggtattccctacttgaacacatatgatggtcgcaccatccgttatcctgacccgctcatcaagcctaacgacaccatcaagctcgaccttgaggagaacaagattgtggagttcattaagtttgatgtgggcaacgtagttatggtcactggaggaagaaacagagggcgtgttggtgtgattaagaaccgtgagaaacacaagggtagctttgaaaccatccacattcaagactcaacaggacatgagtttgcaacaaggttgggaaatgtgtacacaatcggtaagggaacaaagccatgggtgtcccttccaaagggtaaaggtattaagttgaccatcattgaggaagccaggaagagactttctgctcaacaagcttgatagttaatactatgctctgttttccagtttcagaacaaaccatgctttagtttgcagcttttcaatgagtcacttttgttttaaaacttatcttttcggattgttatgagctatattttggaccttttgcgctattaatattaagtttgaactcaaccttgtttcttcagatagttattgaattgcttcgtagtatttaggggccattttgttaatgttagggtcttagggagatcacaacttctgctaaacaacagtaagataaatgtatcacttaaacatgtggtaacattctgattgatgtttcaaatttccgatctcgatgtcatatttcggtgtgggagacaaaacaaggtttatgggtttgctctagaaagtcttacattgattatggtgcacaagcatacgtgtctgctttaagaatactgaagtcatgttgatatcgttattgtcgctagcttcacgtggtagttgtggcgagtgttattttaaaatcgttagtagaagttgctcaaagattcttctccttggtgacttggtcaaacaaaaaatcctacaaaatgagaagaagataacaacaaaaacgacactgaagtcaatgtcgaaccaagtgcctcggaaatgcaactacagtcaggtatattgattgaaaacaatgtatctcttgtatgaaatcaaacgccatgcatgaatctgttttaagcttggggaaattataagagtaaatcaagaaaaatattctagatgatagaagcatagaacattgatcatgtaacttcatgacaacaagaaattgtcttcgaatcttttttgatggtttttctacattcaagttaaaaaaaatgtcatttgatgtgaaccggttcgacttagcatatggttaattgaaatccagcaaaataagaaaagacttgagaatatctaaagccaaaactgctgaattccaaaagccaaaataggtgttaacttatggtggatataaatataaatcatagagaaaattttacggagattgaataattaatacccgcaaaaggatcgggaaactgaatagcaaaaagacgagagagaatgagattttacttctttataattgaagttatgcgaatgttgtgtatttttacaatgaacggtttatcgttctttatatagagataaaaaaaaagataaaatttactgtgttggcatagtaacatttaaattttaaactacatcactaaataattagctttgaaagaatatatatttctcttagttttttttcttttctttttaagttattattaagaatgtggccaaatttacccaagagttaaaattttgtcccatcctttatattttaaggaaaaaattaatagttttagagattgatttttaccatttcaatttgggggaaaaaaataacaatctaaaagcattgaaggtttgaatttttgattcaaaaagacccaaaataaacgcctcatctttaggttaattttcagaataactattaaaaagtgaataattcttcactgatccatgttggactagtaagtagtaacaatcaaatccataacattaaatgtgttgaaaaaaagaatcaaaagtaacaaaaaccataaccctaaataatcatcccaaaagtggaaataataaaagaagcagttagattgtgacggaggagacaaaatcatcatctctgttcttcttcttctcctctctcacatacgatgatgacccaacaaccttgacgttgatttcgatgtcacacacaacactataaataacactcttcacctatttttgtcatctcacactttggactttggagcccaaaataatctcataaccattaaaaacaaatctcctccttctctccggcgtcaatg

SEQ ID NO: 25358 - DNA, 3000 bp, Unknown; identical to SEQ ID NO: 16564
  misc_feature (1)..( 3000): 2750-1469P.txt file - cDNA_ID_2705194; gDNA_ID_2214477; Annot_ID_133144

SEQ ID NO: 25359 - DNA, 3000 bp, Unknown; identical to SEQ ID NO: 11057
  misc_feature (1)..( 3000): 2750-1469P.txt file - cDNA_ID_2705198; gDNA_ID_2214477; Annot_ID_133143

SEQ ID NO: 25360 - DNA, 3003 bp, Unknown
  misc_feature (1)..( 3003): 2750-1469P.txt file - cDNA_ID_2705209; gDNA_ID_2214477; Annot_ID_133138
tacataagttgttaaggagtttgttagtatagatgagtgaagatcacattgttaaagattgtttttatggatgcagggtgatcatccttgtgacaggcgaagaagcgtcactgagtacaaggctctctttcccgctattgatttctcaattgtaagaaaaacatcttatatggttaatatatatctctgtggaaatgttggcaagttgcttatgctttgacctctatggttttagattgaaaccgacaatgatgttctgtggaagccgagtccaagagagagccttgaagaagttgcagccagaggtgtagagttcatcaaatggtgagtttcatttttgttacttatttccacatggagatatatgtaaacatatgtatagctgaatctctctactgccatttgctttgtgaaggatatggacaaggaaagagaaggagatcgcaattgtatctcacagtggcttcttgcacggtctcttgagttctttcgggaaggattgttgcgatgacctaaagaaagagttgtctatacagtaagagcttaaacaaaaacttgatgtctacaagcaccaacaatttgtataacttgaaactgtttaactaatcaacatctttaactttgttcagtttgagcaactgtgagcttcgctcaatggttatcgtggatcgagggtaagcaataattacaataagttttgacagaatataaatataatttgagagtgtgttggattatttattatggtgttgggtgtgtaggaacctggggactgactctgcagagaccacaaactatcctgggaaggttcctgaaggacttgataatcctagtggctaaatggctgaagagtaagagagagaattctgagatagtttttctttctaaaataaataaattacatgatgtttccattggactagaatctggcattttcagttatttgatgaacattagtgttggtatgtagccatgtaggttgactctgctgctacatgaatttattgtatgattgttattatccaaaatttagcggtagctttaatatttctgctccaattctcattttagctgtgattatacaattgtggaaataatagcattacaagtagaggaactggtagatgcaactaaattataagtgtgaatcttagatgagtagatttatctctatcaacatgagaaccagcagaaacttaaaacattatttatgtaagatcaacttcatattttatggcagctgtgttgaattttcttatggccaagcattttaataaaacaaagagaaaattccaaaaattacactcagcttttcttatagtactaggttttatcttttggtgttgagattttttatgaaaatagaaaatgttttaagtgtttttatagaagtagatcaaagtttaatgctcttcgtacgttctatgtatttggactttaatataatcgataatcgtattcagattctttatagaaattacgctctctccaaactattggagaaagcttttaccattaggaattcgaaattttttgttccccaattttgaacatatgataagatcttttaaagaacactcgacaatgtaaaatttaaagtaggtctagcttcttatccgtttaagagaacgatttttttttttaaatgatatgattcacggtttgtaaagttatctattggaaaataaaaaaactgtaagtacaatactgtgatgtcaaaaagaaaaaaaaagtacacccaaactaaatttgtaccacgtgcgagacaaattgtagtctgcgatcttactcactacccgacaatgacatgccccatgccttagttcttgtaagaaaaaagtgatatcctatatacttcactaattattggtaaaattatgcaaaactttcagtgctaaaagtttgatttatactgtactagttgttatttcaacgtagacataccaaaatgtttattcaagaaagcctatatactagcaaaagtaaaaaagaatgtgacatctttgatgaaccaatgtgaaaagtcaacataataaaacttgagttttcagaacaaatttagttgtccattgtttcgatctgttaatcaagaccataaattaactcttaactatatgcatctaataataatattttgtagttagctaagttaagcacatccaactcttaaaaaaagctagtataacgttaggcttataatcattctcttaataataagttatcctaaacaaattattgcaattttttattctccctacttgcactaagtatcattacaccagtaaaagatgatgatcccttaaattaatactaattaaacaagcaattaaggaatgaagaaggtgagacgaaaccgcgtaaaagacctttcttctttgcaccatcctctctccttcatcatttcacaaatccacaaaagaatcaatctttttaacactctctaatgattcaacgaatccaattacccaaccagaaacagcaacacatatagagatatatactattaaacaataacataacaaagaaaccattttttctcttttgttattgacttaaacaaaaactatcaacgaataattatccttttttgagtttttcccatttcttcttcgtctccatttcatcgtcttctcgctgttctgctatattccggtactagatcctctgttttctcatgtttcttttattaccaaatgatttcttcatttattgttgtgtctttgattcttttttgggatctataatgatcgatgaacatttaaagctacgacttttcaggagctcttgtctttttttctttaatctttgattatgttacaaaacaattatgttttttgaagcttgatctgatgtgggttctttgatttcgttccaaagtttgatacttttttggcttctctttatctgattttttttgtgtatgtttgttcatgaaacagtttcgttggatgaggagaagaagaaagtgaaaaaagttgtgaaatagagagagtttgtttcatg

SEQ ID NO: 25361 - DNA, 3003 bp, Unknown; identical to SEQ ID NO: 25360
  misc_feature (1)..( 3003): 2750-1469P.txt file - cDNA_ID_2705209; gDNA_ID_2214477; Annot_ID_183161

SEQ ID NO: 25362 - DNA, 3000 bp, Unknown
  misc_feature (1)..( 3000): 2750-1469P.txt file - cDNA_ID_2705220; gDNA_ID_2214478; Annot_ID_133177
tttttgtatcaatgttaagtacttatactattttcacaagttttttaccgaagttacagcgaaatacaaattacataaaagatcaaaaactaagtaaaacaacaaaactacatcacaacacaaacaccagggagtacaagcaaaaactcaacgagtagagtctccggaaaaaaacattactgattctgaaccgctcggacatcttgtcctgagctatcttgtcctgagacactaatgtttgctaaccaacgacttccacccttgaatcacatagtgtgaggtaaacaaattagagatcatgttcattcattatgcatcaacaattaacacacctcataacacatagataacacgactaatatattagtaatttttagtattaacgatcgttaacaatattattagaagattaagttagtttgtagttatggcatatgtcgtatatgtgctacgaccaatcgtagacaaagatgcgtatgcaactggatttcgattattcaattaaaagagatgtgatttcatggggtccatgaaagtgacaaatgccctgcagattcctctactccatcgcatggtccaatcatcttttcctaatccagataataaattacataaccctgttatttggtaaacacttttagcgtatatgtttatatttttttctttcttctttttgtcaaccattataagtatgggtttctaaaccaacacgttattgaatctatatagtcttacgtaaaacgaaagaaaagaaattccaaaacggttggcttcctacaacaatttatttataggagatgaaattgaattgacgtgctttcatcaagtctttccatttctgttctacgacttgctaatatacctagctacatggcattttaattgtgttatagtttttatatttgattggtgaatgaatctataaaaagaaaagctcatgttatactcgcaaaacgtcttttaagagatgtgattaattcaggagctcaaacaagttgccaggtattttttttgataaagggtataacaaattgtcaagttgcaataacttaagagagcaaaagtggtaatgttgtagaagaacttaacaagctaaacaagtaaaagatgcaattaggtaaatgcgtaaatcgcaaggagaatggagaagtcaagagggcatttagttgcttctaaagcgactttcaattgctttgtcccactatagatctcctccacattaacttcatttgtctcacacacttttccgtacacacctcctaatctcacaaaagactaaattgcctctaatacaattcaaagaccacgaatgagaaaatcacatactaagtggtacaaaagaagcgtgattagtgcggaacataaagaattactcgtacgaatgacgactataacaaaacagcagcggatatagaaactaagttttgttgtgttcaaacataatttatttatcaacaagtgaatactatataatttaacatacggttaatgtagttgaatcgtatcgtacattagtgtacaacttttatgtagaataccaaatacaatgggttagtttggcattaaaggtagggcccaaaggagggacaatgggagacttcaacaaatgccggttgcgtgaggagaaggtaaaggtcatgtctcttgtccaaataatacaatgtggatttgtcgtcaacgaaatccatatcgactttttttttttttttttttctcttccatatgttcttgttgtatgtctcaacataatattatttttagttgcggtcaataattgggttgtagagaaagttacgaaaaatgaaaattacatgtcaagaaatgatactttacttgctcatacttgttactcactcggcttgttaagctttattgtgatagtcaattactcgtttatatttctactaatccaggatatttctactaatccaggttattacaatttcacaaaatattatcaaagtgaactatcattttatttgagttacggtcttaattagatgaaaacaaaccaacccctagaatctatggataatgaactaacatgctaaagttttgaccaagcgattggaaaatcaacaaacgaaatggaaactattatgtggcaatactcgagtactatagacccaactgacccgacataatctcttcactttttattttgttatctaaaaaaattcggtataaagccttgtttggtttcaaattttatccacttgagaatctcatatatcaagatgaaacacctacaacaacaaatgtaacttcatatgtcaggaccggtccgcaggacaagcatgtaataaaactgtgtgttttctacattttctatgaaatgggtgtaattgaaagatactaaatgttagggcttttcagaaacttccgttacgttttaggcgtttaacacaattattattttctaaaacgagagccgtttaaagagaaagagaaatttctaactccagagagcgaagaacacaatcccagagtagcagaatctgatccatcccacctttttcaattctcaggcaaaggtacgatctttctccttccccgttagagatcagccttagattcgtcattctcgtccattgaatcaatagatctcgaataattgtcttgttttattgtttcttctcacgctgttttgatgctcttgcttgattggtggatccaattgaaattagatctctgtatcgattcggttgatgccatttttatgattcttgttctggatttccactgtaatggagctgatttaaatagttctatatctgcatgtgtagagagattgttggctgtttcaattttccttatggagctgactcatttttacaaagtgactttcatgtttgattcaattcattacctttttgcttgagttaatgtgtttctcagtgttgttcatgttgtttctcagttttgggtttgtttaatgttgattatcttcattcttcagtgtttgatctcatattcagataagtcaaacttgaaaaaatg

SEQ ID NO: 25363 - DNA, 3000 bp, Unknown; identical to SEQ ID NO: 25362
  misc_feature (1)..( 3000): 2750-1469P.txt file - cDNA_ID_2705220; gDNA_ID_2214478; Annot_ID_183211

SEQ ID NO: 25364 - DNA, 3003 bp, Unknown
  misc_feature (1)..( 3003): 2750-1469P.txt file - cDNA_ID_2705247; gDNA_ID_2214478; Annot_ID_133187
acttgtctgactctggttgattccctgatgtggtgtctgaaactgcatctgcgtagatagcaaaaggtgtcttggatgatctgcaaaagacaaagttgcttaccatagtgagttgcagaataatttaaaggtatgagttgatagaaaatgcagataatgaaaacaacgagaaatatagaaccaatcaaactacttactgatttggctttagctttttggcttgtgggttagaacttcctaacgcctgccttcttgcatctacagaaaacattttcatgtaagatagcttaccaaaacatttcagtggtttccaagttaagttaatgtgactcactattatctcccctggacaataaagtgccaaagcttcttgacggtaagtcattattctcctttggttcctgctggtaggtagaacattaattatgattaggaaaaaccttagtccataatgaatagatataaagtgttacaaagagacaaaactttttacttcatcagctgtgttggaccttctcatcgttctcaccataaacttcttgtacgcgtcattcaacttttccactggctttgcatccctgcacaagttcccactttcaaatcagaccaataacttggagccgaaacatgaaagtaagattacatatctgttcatttacctagagattccaagattgaagatctcattagcagttttgaccttattcttaaactcaatgtgcaaagcataagctatatagtagacagcatgtgtctttccaatctcattgacctccaaaaacttgtaaatcacttccgcatcagcgcaatgctccgccttcaaaacacacacaaaaactatgagtactctctccataacaaagaaagaatcatctagagggtttaattaaagatagaatcattacatattccaaccagactttaagataacgaagatcatccttgtaacgttcagagtgccaaaatttacgaacacattgctcatatatcactaacagtcctgaacattctcctcctggtggaaaagcctcttgtacccattttatacaccttccaaagaaaccaattaagaagctcagtttacaaattggtcacagcataaagattggttcaagaaaaatttcaatttttcaacaacccaatcaagaatgataaaaggaactcactctatccatggagataaagggtcatctccttcatactcatcaatggcttcaatcaaattcctaattcacaaaaacaacacaaaattagacaagaatcgagcgattagactaaaacccaagagcaaagatgtgagattgaaatcagtacctgcgtttctcgatgagattctttctcaattggtggtcagagtgagatttgagagcgtggttgagaataccaacattgcgacctctcttcaatggccggacgttctccttgaaaagctcccactcgtatccagtctcctgcttcgaattaagaaactctgcctctggatctgaaacctgaaccttcgtttcggctgccatcgtcgtttcttcgagcaaattttgaatatcagagagaatatagccgttagtttactcaatgagagagcttcgcaactttttgctttgatgtacgcatactcggagcgtatagacgcttttgatgggcctaacttagatgggccatgatttgatttcttaaacccattaagtggccatctaaaccgaattgtgtatactcctactacaaataatcgataagagaagaaaaatgacaatgagcgaaagtaaaatagtaaaagaaatgacagaatacacttcattaattcaattggctgaacaaaataacacaataatccagagaaaattatttttactgttttgttttcttctaaattagatggttttggtcttttggagaataacaatcaaagcaaaagataaaagagaagatgtactctttttttaccttctttaaataaattacgagcataattcactttttgacttggaagctaaaaaaaagttcatccacaaccacaagatgctctctgtctgtcggttcaacaagggatgatcacatacattgcgttacacgctaaacctagtgtgctcaattatgaattcctaaacaaaacgtactcaagattagaagttgtatacaaagtctgtttttccattgtaacaacttccaccgacaataaaacagtaacagtttattgaagaaaatgaaatgaagaaaacataataaaagaattgatatttatggtatccttcagtttgggaatgtgacacacatgatctcctttattgacgtttaagtttggaaaaaaaaacaagtctttaaatgcatgcaatcgtattcgcaatcaatatacattttgcttgttattactaaagtctaaaactaaaagccttttgccgtacgtttaagaattccataactggaagaacaaatcatgtttttaattcaaatgtttaaaacaaagtctacattcaaaggaatttagaacacactttttttttttactttttgctgggaattcacaaactctttaacgagtctattcacatttcacctttccgtgcccaaactcattcgatttctctaaccgaaactaaatcatcaccaaagaaggtacaccgttacgccaacttgcccaaaggaccatgtgtccccaccatgctgccaattgggagccagcaatacataaaacagacttgatccaactttttacaagttagatgcagtgtctttttcgtaaatcataatagatccaagcccattctcgtataacctccaccacatcactcctcatatcatatgtgagacagccacgagtcttctaatttctacacgccgtgtcggcaaagcctctcgtcacttctctctgacgcttgtcgtcacttttgaatttttttaatttttaaataattgataaccgaaacggtgcgttttactcaccgtcgtcgggaaaaaaaacatgaggaaggaagttttgccgccggtgttatcaaccaccacagtatg

SEQ ID NO: 25365 - DNA, 3000 bp, Unknown; identical to SEQ ID NO: 11112
  misc_feature (1)..( 3000): 2750-1469P.txt file - cDNA_ID_2705251; gDNA_ID_2214478; Annot_ID_133185

SEQ ID NO: 25366 - DNA, 3003 bp, Unknown
  misc_feature (1)..( 3003): 2750-1469P.txt file - cDNA_ID_2705261; gDNA_ID_2214478; Annot_ID_133181
gattctttattatgtagaaaacctacagaaaatcacgttgtaaattcggtttcgaaaccataaaggacttcaatattcaactattctttaacaagtgaacttttatcatctatatcacttaaatctttattctctatatcacttgaattcataatagagaaacgaaaatttaactaaacacaacctttaaagaacccttaaaaagtaattaaaaaagaaggaaagtgaattatactaaacaaaagattatgttaaaattcggattcttaaaaatcttctagggaaaaaaaagcaaaatggaatatggattcgataaggaaggaaggagaggagacccacacacaagaacagagtgacagacacaatttggcgtctctttcgatctgaaacatctctgtctctcctcagagattcccttcttaggtcccattgtctctctttctgtatattacaactcttgcaaacctttctaccaccaagataaaattattatttggtaaaaagcaatatctttaattttctaggaaaaaagaaagaaagaacaacactggattgaagtggtcgtcgctttctctttctacacttccaacagattcccttttgcacttctctctttcactcttttcactatttttgttttatcattattttgtttacggaaacgtcattttcctccagacaatacctttattccctatatatataatggtatggtgtaaaaatgttattgccactgtatatattggtctatcacaattccttctctttatcttcctttttgtatttttgcagcaacaacaaaaacgtaatttatagttaggtagttatctttctttgcatgttttgtgtatgtacgtaactaagaatggtaagttttttttgttttccctcgattttaccagttcaataataaacgttatgcaatctgaagttaattatacatacatctacctaatattctattaaaccatactatatagatatagcatgcttcatgttagtacctaatatcttatatagttatatatcacatggtcttcaattgtttgggtgagaaaactatatttattggctttcttttctcatctttttcattcctttgtgtattgttgtttcgtaaactttttaggatgaaagtaggaacatggtgatcatggtcttgacttttgtagtttttatttttgacgtgatgttcttggctttattattcaaaagatgagtgaagtgaggcatcaatatatgatagttttcacaaatttaataattgcagctaaagatcgagagcctttgcccacataaaaaatactttactctaatgtgttaaaacaaatgttgacattttgcatttactttctttataatttggttgactttctctaaaataaaaatctttagttcttcaattattttgctccacccatcatattgcattattaggctttagctattttaaattgtcatctcacggccagattcatttcattttcgaggttagtacttgctgtcgtatagtcattccatcctgaaaatatcatcctgtttgctattgactttcgatgtatgcaccaaacctcaagctagccatcgagttttagatttgaactcacatataacatattcttataaatatttattggattaaggttatagtttgttgtattcactctattcaaatatgaatggattagatgaatatgtaaaaggtgaccgtcttagcaagaagattgatgtgttatgcattagactatgtgaaaaatcgtatattgaatgtaatcgtgactatacgtgcatgagatgaaagtgataatgtgtgatcgatttataaaaatataagtatgaggctatgtgatctggttttgattgagtgatttgtggatctcaattaatgtttgtagacgagaatgatcttctagattgaatgagttgaaagccgtggtaagtcctagttatcattggatgaaggaggagatttatagatttttggatgtttcgagtagatattaaacagtagaacatagttggatttaaattttagtaaaggcttaatggctttaggatattataaagttgatcatgaacaatatttaggttggacggttcaagtttctcatgaatcaaatattcaagtgctaattgccgaaaggaaatactgaaccgaattcgaactgaacaaccacaaaaaacagctaatgtaaatttgtttgagaatatttttgataagaacttgaatccaattcgaaaccgaaattgtaccaaactttttatattttatatcacatcaaagattttactttgaaaaccattattgataacaaaaaatccaaaaactcaaactaaaattcagattaaacaccggtttaccatctagggaatgggattaatataacataaaaaatactaagttgtttcatttaataatcaagtaagattttgcaatgctaaagaaaaacgaaataacagaataaaggaagttccggcattcttttcgatatctacgttgatagtaatatttaatttaacagagtttttccttctttctaaaaacaaaaatctcaggtttaccaactttaacccttcccaagatttttcaacttttattctcctcttattttaaaccggccactaaccgataacaccacgcgcctaaaccctcgcgtgtgaacctaatggtcatacgttttcaagaacacggtaacacggacgtgagacaaaagtgcgagagagcctctgtggtcactttggtctctctgacagctacgggtccactttctcttttacccaaatatccccacgcgcttcttttacttgcgcgtgaactttcaaaaccaaccaatgctaaatttccgaaactacccttcactctgtttttttgttttcttcgttctcttaagattagttttctcatcacaaataataataaactcttttcttttgtttcatctctttcttcttctctgcgtctttgaggcaagaaaaaaagagaagatgaaagcacccaacatg

SEQ ID NO: 25367 - DNA, 3003 bp, Unknown
  misc_feature (1)..( 3003): 2750-1469P.txt file - cDNA_ID_2705265; gDNA_ID_2214478; Annot_ID_133179
ttgttaacgatcgttaatactaaaaattactaatatattagtcgtgttatctatgtgttatgaggtgtgttaattgttgatgcataatgaatgaacatgatctctaatttgtttacctcacactatgtgattcaagggtggaagtcgttggttagcaaacattagtgtctcaggacaagatagctcaggacaagatgtccgagcggttcagaatcagtaatgtttttttccggagactctactcgttgagtttttgcttgtactccctggtgtttgtgttgtgatgtagttttgttgttttacttagtttttgatcttttatgtaatttgtatttcgctgtaacttcggtaaaaaacttgtgaaaatagtataagtacttaacattgatacaaaaaaaaaaaaaaaaaaaaaactcatgaggtcttgttatatatatggtgatcacatctttaaagaaaatgttatagtatttgttttagtttaaacaattttttatgtgccaaaaacattattaaaaagagagcaataccctactctaaaatagtaaagctaccaaattcaattcattacgacatggctcaaaagaaaaagtatttcgaatattatacgatatcaaccccattatcattgctataaaataagccaaactttacctctccattttcaataatctctcatcttctttcgtctctctttctacggttcaaacattaaaaagatagatggagaagaggagctctattaaaaacagaggagtacttagattaccaccagggttccgatttcacccgaccgatgaagagctagtggttcaatatttacgtcgaaaagtaaccggtttacccttaccagcttctgtaataccggaaaccgatgtttgtaaatccgatccatgggatttaccaggtacagaaattgaaaaatctactctagggtttcattcaaattcaatatttgatggtgtatatgcatgatgatcacaggtgattgtgaatcagagatgtatttttttagcacgagggaagctaaatacccgaacggaaaccggtcgaaccggtctaccggttcgggttattggaaagcgactggtctcgataagcagatcggtaagaagaagcttgtcgtggggatgaagaaaactcttgttttctacaaaggtaaaccaccaaacggaacaagaactaactgggttcttcatgaatatcgtcttgttgattcacaacaagattcattatatgtaagagaatcaaattcaaataaattagattcatcaatcagttggataaaaacttggctaaaaagtgtattttaatgtgtttttaaaagggacagaacatgaattgggttttgtgtagagtgttcttgaagaagagaagcaatagtaatagtaagaggaaagaagatgagaaagaagaggtggagaatgagaaagagacagagacagagagagaacgtgaggaggagaacaagaagagtacttgtcccatattttatgactttatgagaaaagacacgaagaaaaagagaaggagaagaagatgctgtgatttgaatttgactcctgctacttgttgttgttgctcttcttcgacttcttcgtcgtctgtttgctcaagtgctttaactcacacatcttctaatgataatcgtcaagaaatcagttatcgggaaaataagttttgtttgtttctatagattaacaaacttgggaacaacttctattaactttaataaattagattatgattgtttccaaagttaattatgcaatccaggagtctttcttggttttggtaattaatagccatattttatagcttatctaattgtatcaaatattgaaaactggttgatcaaatatctaatttgttaatgagtgtcaattaacaacaaggaccaaccatctagctaacaattcaagcaatcaaatcagagactaacactacattaaagatcactcttacaaaaaaaaaatgtggaacatttttttatagaaaaaatcatatacccaaacaacacaaattcatttattttgatatctgaaaaagcattatatgttaaaaatagaaaatgcataatgattatttctttcaattgttgggttgtttctaagtttttggacaacacttttttacccatactgtaaaagatcacaacattgataagaaaactctcatgtctggttgaaataaattagtaaaaggttagaataaattggtttaaaggtaaattaatattttagttttggcacaaattaacaaatcaattaatttttgtttatttttaactaaaacatcattgattatctatctatatccgattcaaccaatataaaataatttatcaaatataaatcacccaaaatcaataataaactagataattttgcaatggaagtcgaaaacatcatctcatttaaaattccaaaaaatcaaataaaggaatattaatataacatagacaatttagtatgattttggttttagttaaacatatctttgatcttcaaattttttttatttttttttcggtttgattgaaacttacttttatagtttgattttcagattgattaagaatgaatcggtttgataaaactctaatgtaaatggagtaattattgtaatattcaaaagcctaaaccatttgctgccatcattaattgcacttgctgacgtaattataagcgagaataatatgatcccaaaaagaaaattgataaaaaggacgaaagagaatcaaagagacgacgaagtcaaggatcaaagccttaacttttcctctaaaacaatcgcttttttatttttctaaatttctctctgttcttttttcctctggttttgattttttcctggcattattattagggtttttttcatacgttgttgaaaatggcgtagttggagaaaggagacgaatcgatcatctacctacttgcccattctttgtcgtcgtttttcgattttccttgattcgccggagaaatagcgtttccggcaatg

SEQ ID NO: 25368 - DNA, 3003 bp, Unknown
  misc_feature (1)..( 3003): 2750-1469P.txt file - cDNA_ID_2705273; gDNA_ID_2214478; Annot_ID_133174
tttggatattgttgaaattctaagttttgtttctatgtaacaattttatttaataatgtaaattgaggtttcactgttttaggaaattactttgggtagaagattagttttcttttcaagaacaattcatgtgggaaatggtaaatttattttagtaatcttttagaatgctgaagcatgctaaaaagagacgattactcttgtggtcaatctgtggaaaagcaaatacaatttggggttaaaaggaaacaatgtcaaaataaaagggcgatctgatgatatctccaataaataaggggaaaatgaaaaagtaaacaagttgattttaaaatccagcggacaaaatctgatgtgagtttttttcttttaatctctcgtccccgaaaaaaagttgacgaaactctctaccggaggcgctagttttcgccgtcggcgaggcaatttaactttccggaggtgcgacgcttctactccgcttatttttttctgctcttgttatttctcgtctcatgtcaagcttctttatgccttctctttgggtgtaaatagttggattagtcgcgaaaaaatcacgattggttcttcatttcgatgtatattagggtttgtgtgagcatatgattgctgagaagtagctagtaattgaatgtttatgtggttagtgggtaggagaatgggctgtggagatatctctactctgcgccgtctagttctttaggtcgtggattacttaatgcgattagattcaatcggatcgtagttctgatctattcgttcatcttgaagtttctagtcaagtagttaggaaatggtgttggtttttagaggcgcagtcactgtttcttgtacaatcagttaaataacttgctttttctggtggttaggagcttgttaaatgtgatcgaagatctatgatatgataaaaaaatctggaatagtattgtgttggtaggtttctgtttctgtgattttggctccatgtatcttgtaattttgaagttcctggtaatgatttctatgttggacgagggagtggaaactcatgaattcagctgtgcattgccttataattgtcttttgttctcattctattagtttgtgatttatgtctgctgatgattgtgctctctgctcattatctcaagggaataaagcaggatgaacgaagttaataagcaaaaggaaaatcgtgatggacatgaaacacttgtaaatgaagaaggatctgctgctcgaacaagacctacaagtgttgaggagattaggctaaggaggaagaggaaagagtccttggaaaatgtgaaggaggaaactgtaggagcagcacagttactgggttacgatcttgttgaaaaggcttctgactatcatgagtccaagaatttgaggcgtgaagaacatgttgaagacagttcaagaaaggaaaaagaagccatttctagatgtagggaagaaaaaatagaaaaaccaatgaaagaggaccctgtgggagcagctcagttacccgataaaaatcttgttgagaaggttcttgactgtcatgagtctgaaaaagggtatgatagatccgagaaactgagtcatgaagagcttgttatggacagctcaagaaagaaagaagaggctatttctagttctagagaagaaaaacttgataaaccaataaaagatgatcttgttggaacagctcagttactgggtaatgatcttgttgagaaggttcctgaatatcatgtgtctgaaaaagagcatgatggatccaagaacgtgaggcgtgaagaacgtgttaaggacagtttaagaaagaaagaggacataacttctagttctagggatgaaacaccaatgaaagaggatcatgtgggagcagctcagttacggggtaacgatatcgttgagaaggtttctgacaatcatgcatctgaaaaagggcatgataaatccaataaagtgaggcgtgaagaacatgttaaggacagttcaagaaagaaagaagactacatttctagttttagagaagaaaaatcaagaaaagaggatcatgtgggagcagctatgttactgggtcacgatattgttgacaagttttctgactatcatgcgtctgaaaaacggcatgataggtcgaagaaagtgaggcgtgacgaacatgttaaggaaagctcaagaaagaaagaagacgccacttctggttctacggaagaaaaatcaatgaaagaggatcatgcgggagcagctcagttactgggtcacgatattgttgagaaggtttctgactatcatgcgtctgaaaaagggcatgatagatcgacgaaagtgaggcgtgaagaacgtgttaaggacagctcaagaaagaaagaagatgccacttctggttctagggaagaaagagtagataattcaacgaaagaggaccctgttggagcagctcagttactaggtaacgattttgttgagaaggtttctgactatcatacgtctgaaagagggcatgaaagatccaagaaagtgaggcgtgaagaacgtgttaaggacaattcaagaaagaaggaagaggctatttctagttctagaggagaaaaaccgattaaagaggatcatgtgggagcagctcagttactgggtaacgatcttgttgagatggtttctgactatcatgaaactgaaaaagggtatgacagatccaagaaattgagccgtgaagagcgtgttaaggacagttcaagaaagaaggaagaggctatttctagttctagagaagaaaacctagataaacaaaaaaaagacgagtctacttcaaatagaaaaaggaaagcagaaggagagtgttctacagctgaaacagaatcaattgaagaacatagtaaggatagacgaggaaagaaagaagaaactaattctaattgtagggaggaaagacgagataagaagatgaagaaggaagaccttgcttcaaacagaaaaattgaaggagaaatccctacaactgaaacaaaaacaatg

SEQ ID NO: 25369 - DNA, 3003 bp, Unknown
  misc_feature (1)..( 3003): 2750-1469P.txt file - cDNA_ID_2705277; gDNA_ID_2214478; Annot_ID_133172
ataaataaataaataaacgaagctgatatggaaaagtcttctctttctttttttttttttggtaagtcgatctctctttcactcactttaacccaattggccgctattttccaaagtctgtttatttttttaatctctctctcttctctctcacccaatttcacaaacccgaaaccctaattttctcgggacactgaaatttttacagcttctttcctcttcttcaccggggagatttgtcggtactaaatctagggtttttgggtatcaccggagggttgaagagagagaaaaaaactcacaatggaatcagatcagggaaagctatttatcggcgggatttcatgggataccgacgagaatcttctgagagagtacttcagcaatttcggcgaggttttgcaggtcactgttatgcgagagaaagctactggtcgtcctagaggattcggattcgtcgcattctcggatcctgctgttattgatagggttcttcaggacaagcaccatattgataatagagatgtaagcaaaaatcttgtttctcaaatgggtctttctaaattttgaatctttatagtaaaaattgatactttgaatcttgttgttgtcgaggtttgattttcatctttgatggatttaagttgtgttaatttcttaggttgatgtgaagagagcaatgtctagagaggagcagagtcctgctgggagatcagggacttttaatgcttctaggaattttgatagtggagctaacgtgaggactaagaagatattcgtgggaggtttgcctcctgcattaacatcagatgaatttcgggcttactttgagacttatggtcctgtgagtgatgcagtcattatgattgatcagactacacagcgtcctcgaggatttgggtttgtttcttttgattctgaagattcggttgaccttgttttacataagactttccacgatttgaatggtaaacaagtcgaagttaaaagagctcttcctaaagatgctaaccctggaatagccagtggtggtggtcgtggcagtggtggagctggagggtttccgggctatggtggttctggtggaagtggctatgagggtcgtgtggattctaatagatacatgcagccgcaaaacactggaagtggttatcctccttatggtggttctgggtatggtactggttatggttatggaagcaatggtgtaggttatgggggttttggtgggtatggcaatccagctggtgcgccttatgggaatcctagtgtccctggagctgggtttggaagtggtccaagaagttcatggggcgctcaagcaccatcgggttatgggaatgtgggatatggaaatgcagctccgtggggtggttctggtggtcctggttcagcagtaatgggtcaagctggtgcatctgcaggttatggcagtcaaggttatggctatggtggaaatgattcctcttacgggactccatctgcctatggtgcagtaggggggcgatctgggaatatgcctaacaaccatggtggcggtggctatgcggatgctttagatggctctggaggctatgggaatcaccaagggaacaacgggcaagctggttatggtggaggttatggaagtggtaggcaagctcaacaacagtgattgaagaagaaatactactagaatgtggttttatcgctgaccttgaaacctcctgctttccgccttaaccatgtcacgtctttggcggttagaccaggaggtggacctacgctggattatctcttttgttagtttctcaataagttgttttcaggcaattccggatactatttcctatcaagttgtagtttttaagtttgcgtgcttatttatatttgtcgctttggaatggttttctttctctgttatcctctagtgtttgtgtttaacgatacatcctccagattatcattattcatctcccttttggttcattcatttttgttgaatattccattcacagattcttgcttttgcatctcctctgtttaggggaagatgatttgctcagtgttcaatgtgatctaagaaaagtgtttggtagagcaagagctgcaataaatcactttgagattgcgttgttacatgaaggtcgtgttggcggaaacttaacagtcccaagaactttaaaatattgtcttttgtcagacaaaacctgactaaactggtctgtttggtggctgttcaaacatgacgtttctaatccaaaccggcccgtctctaaatcattttctctctcttacggtaataagttatcttctctactgcattccagtttttgcaaatcctgcggctaatctaacacttctgacatgtgagtaaagcaatacattgtagctagtagttgttttcccccagttaattatgttttaaacactcgctcagtgaaacctcttgagtttgtaatatatattttctttcaatacattagatttcgtaaccattttggaccgacagaagaaaagagattaccattatgtcttttttcttttctatatacgataactaaaagtctaaagcgtatttctcttcgtataggtaaaaatgtagattgagacattgagtagcatctacattaaagaaatatatacaaaaactggtatattgtgctggcaacaatctagtacatatatataaaagattttacagatgagatttggatggacaaaatttactcgaaataggaaattagctaattctagtgttatttttatttgtgagtattcctaattttactcgcatcctctatgattctctcaatacagattttttttgctgtagattacctttttccaacttgtcgccttcctcctccacctcctcagtttctccagttttatttttacgtttgtcttataataacacaagagatatgtcttttcctttcctctttcctctctcattgagcaatctaatttcataaaatcccgtaaagttttcctttccaccctctcccctcctccgccatg

SEQ ID NO: 25370 - DNA, 3003 bp, Unknown; identical to SEQ ID NO: 25369
  misc_feature (1)..( 3003): 2750-1469P.txt file - cDNA_ID_2705277; gDNA_ID_2214478; Annot_ID_183206

SEQ ID NO: 25371 - DNA, 3003 bp, Unknown
  misc_feature (1)..( 3003): 2750-1469P.txt file - cDNA_ID_2705281; gDNA_ID_2214478; Annot_ID_133171
gtataatatgcagcaatttattattttttctcttcttcttatagtacttgatccaaaaaagttgaaagatcacaacttgtatcaagatgtagttgcagaaacaaccagtgggaagaatagccctaaaagggaaaacaaatacaaacctccatccatacacacacaaagaatcagaaatgctacaaagacaaacaaacaaaacacagtttttcttcttcttccttcttgttaaccactgtgaaacctttacctgttctccatgttggtgatatccacaattggggatctcttcgatgaaccattcgcatgaagactctttggtgaggccaaccaattggaaaggctagtattaacgattatctccttcagtagtggttttgcttgatcatccatatcctcttcaacattctctttcattacccgtttaactttcactggccttgctttaaccgctttccactgagcaagattctccactggattcaaaagaggagccacgtcctgctcattctcttcttcttcttcttcatcttcatcatcagcatcatcttcatagtcgttttcattatcggtgtaatagtcttcatcttccaaatcactctctccataacccatttcatcatcttcatcctcaaaactatccacacagttgtggtatctatagtttgaaggatacacagatctactgcttagatcctctggtttcttatctatagccgaagatcccttgcttcttcctcctttcccctcttcatcatcactgcaagcattctcatatcttgaaggtacaataggttcataggtttgtacattcaagtcaaatctgactctcttcctcgtcttcttagtcaccttcttcttctcctcctcctcccctacctcactcctgacacagtaaacataaaatagccatttcaattgataatctctgctaaaattgggtttcattttggcttttcataactcagattaagaaaaagtttcagtttttaagtaaatccaagcccctaagacattatacctgaggttcgaatttgagatcttttcagggttatctgaaacagtactgaaatctgtcggatctgaagaaagcagcggctcatagctacagattctctgcaataaaggttaaggttcaaatcagagtaatggaaaaaaacctaaactttaaagagatagagtaagaagaaagagtgttattttacttattgtggaaaattgaaaaaagcttacttgatctcgaggaaggatcttcctaatggaatttctgcgttttttgttggaagagagaccgaaacaacccataaaacatcccattggtggtgatgtttctctgtttcggtttcgatacttgagaggaagaagaagaagagagatgattagttgtttactttgttgcctcgttgaggtgttttgaaaagagagaaataggaacgttggggtttcaaacggatgaaagtgacggtgggctcacggagtttatgccgtcttttctttatgaagatgagacaaaattaattattggattccttttctatttttataacattttatgccaaaataaaagcatttatttgtttctatgcacaaccaaggaatgttgggccttgcggcccatttcaaacagtttgttgttaatgtgctttttgacttttgaggtctgtaaagacagatttaggcctacgtttatgccttttaagttcaacgttcactctaaacaagtggtgcacaaattttgatcaccttgcgcaatatgattatgaatatgtgaaaactgaaaacagcttaagttaagtttgattttagaaatgttagttatcaccaaaatatgaaaatatcaggctataactatctaagaactttcttttgagattcctcgatccaatttttatttaataggaattgttttctaaatttataattttagagtttctaataatttaattttttttttgcgacaaaaatattcttaagagttaagagaataacgttgatgactagaaaaaaaagagagattaatgttgcttttttttttttggtcacagcataatgttgcatttaagagttcaaatttgcagtactagcatctatacaaaataacatgattaattggtttcccttgtaagctgaatttgtagattacattgtattctttgattatataaattcttctttaataccacaccctcacaaagtttgccaaatgaagtgtttattatttttcggatcaatgaccttcttaacatacatttgaattaatacgaaaatgtacgattcttagcacattccacgttgtttgattttttttgtaaaattgcagatatttcatttcttccatcaatgctcgatatatttcgatgagagaagtagaaagattgctttgatgagctcgatttgagatatggtttttttgtcgattaatgcttttatatatatatatatatatatatatatatatatrawagtaacaaattttaatacaaaaaatcaaagacttaaaatgatctaacattttttctcaaataataaggtcattgatccttatataacatggaatcactataacatttataacctacattcttgctcatatatctctctccttttttttccaacatattaacgactaataataaaatttatcaaccattttaaatctctaaatggaacttattattacatgactaaaaaataaaaataaataaataaataaacgaagctgatatggaaaagtcttctctttctttttttttttttggtaagtcgatctctctttcactcactttaacccaattggccgctattttccaaagtctgtttatttttttaatctctctctcttctctctcacccaatttcacaaacccgaaaccctaattttctcgggacactgaaatttttacagcttctttcctcttcttcaccggggagatttgtcggtactaaatctagggtttttgggtatcaccggagggttgaagagagagaaaaaaactcacaatg

SEQ ID NO: 25372 - DNA, 3003 bp, Unknown; identical to SEQ ID NO: 25371
  misc_feature (1)..( 3003): 2750-1469P.txt file - cDNA_ID_2705281; gDNA_ID_2214478; Annot_ID_183205

SEQ ID NO: 25373 - DNA, 3003 bp, Unknown
  misc_feature (1)..( 3003): 2750-1469P.txt file - cDNA_ID_2705289; gDNA_ID_2214478; Annot_ID_133165
ctagattgaagaacgagctaatgacgcatatgtatagttcatatacgcatgacattttgttttgttttcaaccctaaataatacgtacgtataacgtttgagattatgtaattaatattggtgaatcgtaattatatatagataattaatggttgattatatattacagatgcacatgcatatataaattttcttcattttaggtattggttttatatcttgaaattaaagtggtggtcgttttctatttggataatgcgtgatgcatatattgcatttcagactttatatgaagatggtcatatcttcaaaagtatcaattcatcaaatcagctttgatcttaagctgttttacttttattttaatttcctttcgttaaattttaatctgtaaacaatttattgcaattctcgtaatcccaaattctgaacttctacacccagataatccttataatatgtgtcttaatcgctattatgcacgtgtgtagtgtagtttaagctcatacacaattttgtgttcaaaaaaaaaacctcatataaaatttagtttgtgcagacgacttgaaagtgaagtaataatatttttggacatagaataactagatagactcttgacaatgattttcaaatggtagatagacttttgtgaccaaaataagatactgaaaggcgatgttgatgtctcatgattagaacaaataaaaagaagagaactatattttccatgtaatgaaataagtgaaatacaaaaaacacttaagatctactatagtaaccaaaaacgctttcaaaaccattaaaataatattttatttttatcggcaacacaagtacaaatgtaaatcgtgggcttaaacaaaaagtgaatccgtgtttacctatttgaagactataaatgtgaaataaacactcgtaagttatagtttgatggataacacgtacgactcgtacttttgtttgtgtcttacgtaccgataatgagatctcgagcatgtagcctgtagtctctacacacatatcttctcatattaatttttttctgttatggaccttatggttattagaataacaaaagtgtacgaaagtgaaatattctcaattttgaataacaatgcattgaccctatgctcaaactgtcacaatcaaagcatttttctatatgaaatcattttcatattttttattaaaaaaaatgttcgaagttggttaaacattgttttcgaattttatctgatatccctaaatattttcttaaggcaaataatatgcttattgtccaaagacattttgtccagtagcattttactttagatatcttctattttctaatactttactgacctggtcgaaatctttttctctcctttgcgggaaatcatgagccaagtcaataaaattagcaaacgagataaaagatagaaaaatgcatatctaaattaaaaacatagaaactaattccacgaatatagggcttaatttaggacgattttcagtcaaaaacgtcaaaatccacggaacaagaattgggtcaaactcattgaccggtctaaatagtttcctcctacgtgagatcctttacccacgtcaacaccattatatctacgtgggctttccacgtcatgtgaagaggagaatcgagggtatcacatttttgcatcaagtccacgctggaatatattataaaaattatgtgaaaataatttgtacatacactgaaacacacatgcattagtttagtatatacaaatatatacatacacataaaaccaaaagtatatatatatatgtatgattgttacgtgaaactcccataacctctttttttccagaaaactataagaatttgaatttcttctctgtccaaacagaagaacctttgttctgtttttaattcaattacctctttgttttttcagtttttgttgttttttcctcccaatatttgaatttcttccatggattttcttgttcatcatacatcactcattccaatattattccacaaatcatccttgaagcctcgttcattaattttcttgctataattcatattttctcgggaattttctttattttcccagaaagttttcgcattaacattggagatatacaaagaacacaaacatgttgcaagacatgatctcgtctcactctcacgatcagctttccatcgtaattctcttctcattattgctttcatttttattcatgcaatgcgtagatgtttttgtctttgaaattttgcttacatgtatagatcatataaactcgagtctaatcttataaactgattaatttttattccgtagtcttttattcggcaactaccctataatttcagctagtttttcttttttggtgtaacgtcattttcttctacttatattccatttgatcttcttataaattgcttcattcttttcgcttttctttctttgttattctctccgcacttcaatttgtccttccatgcgatttttttttgaacaatcattatcataattctcattggcatacgattattacttataaaccaatagaaaatcgtcacatgatatggaacaatattgttctacaaaataactgtaaccataattcactatatctatcgtattttagtatagatttttattctcatcaaacgaaaaatgctagatttaatctctcaccttggattttatgcaaaatctacatattacgtgaatttcactaggagcattgtttgttatcatgatgggtttgtatatgatcatgatcataatgggtttcacacatgttctgatattttatgaagtgccctttactttttctttgtgggaaaaaaatctggatgttggttcataccaggcaattttaaattattttgtcaatacgaaaaggaaataccagaatcagaaaactttccgtttatagaaactccactcttctttactttatctttttagctattggaagtaattggaacacttcttcttaacatgtcacataaaagaacagatg

SEQ ID NO: 25374 - DNA, 3003 bp, Unknown; identical to SEQ ID NO: 25373
  misc_feature (1)..( 3003): 2750-1469P.txt file - cDNA_ID_2705289; gDNA_ID_2214478; Annot_ID_183198

SEQ ID NO: 25375 - DNA, 3000 bp, Unknown; identical to SEQ ID NO: 11074
  misc_feature (1)..( 3000): 2750-1469P.txt file - cDNA_ID_2705291; gDNA_ID_2214478; Annot_ID_133164

SEQ ID NO: 25376 - DNA, 3000 bp, Unknown; identical to SEQ ID NO: 11073
  misc_feature (1)..( 3000): 2750-1469P.txt file - cDNA_ID_2705295; gDNA_ID_2214478; Annot_ID_133163

SEQ ID NO: 25377 - DNA, 3003 bp, Unknown
  misc_feature (1)..( 3003): 2750-1469P.txt file - cDNA_ID_2705308; gDNA_ID_2214478; Annot_ID_133155
ttcaaaactttatatcccaggattgataataagcccttaagaaagaagccgttattgtaaacctaccaatcaaacaatttagaatagacaatcttggcaagagcatctctgcttagtgctgcactaccgggatcaagaggctttgtaatgctttcaccacgagtcaccatcaccctattgcacaaggagttctctagagctttctcatcacacctacccaaaaaagagcaatcagggttctacctcccattgacaagaaacctgtaatccgagaacacataatagtgaagcatatacatgaaaagttttgcagcaacttttagatggaaccgggatttatcgtccttgggttctgcaccatctgattcttcgctctttgcaaactcaatgtttcctagatgaaggatagcagcaactacccgaaagattgcatcctacaaaagtaaaatgtaagaagagttatcctcattgctgatcatgtcaatgaaaaaacaaaaggtacctgttcttcaggactaattccaacaacgtccatagctttcctcgtagctaggtattctttggaatcatcaattgcatccaatgcatggcaattcgattgatttaggtagtgaaatgtgcttggtttccctaactgataccgctcagtttcctgaaatttcagaacagaagctagttttcagtatgaatcccatatatggccaagcactggacatacagagccttcatatgttcgacctgatgtaaacatacaagggaccatgtttacctgttctggcgcagcgcaaagcatgtaaaagcaatgatagtttctttcaggatcagaaacttgacaaactcgtgacctctccagcaaatatgttctaatagcagctcctgagattcttcccatatgattgaactgaatctccacaaatttaccaaaacgactgcaatatgagatttgcctacatatgtcaaggttgacttcaagaacatacataaacttgaaaaatcaagaaatgtgaatgacattccaccttgaattattgtttctgacggtttttgcattaccaaaagcttctaaaactggatttgactgcataacaggatcataatacgagaagaataagaagatatctacagagagaaactcagtgagtctgtctctagtaagaatgtagatgcattgtaaacagactatctacctccaaaacttgctgttcgacagatcgtccttcactctcagcttttccacccatgtatgcaagatattgcatgagcatttttgtgctctctgtcttcccagcaccgctttctccactcaccaagatcgcctggcttactccctcgttgatcatttttctaaatttatattcttgatgatggtgaggcccaaaaaaaaatgatagtgcaacattagttaaagtttcatctatgcaacaaaagattacctgtatgcagaatcagcaacagcaaaaggatgtgggcttaactcgccaaaatctgtgcccttatattgctccattatctcatttccatataggtggggtaatcttttaaagggattcacagctatcagtatattccctgtgtatgtctgtaaccatcaagaagaaattagcttgctacaaacacttcagagaaatattaatgatattgctataactgtgcagtaattttcagcaaaacaatggtagagataatcatagaattcataagtgggtgtaatgaaagaaggaaaactgacaagagttacatgctgaagcgtacatatatttcatttgcattgtatctggcttttagattgagaagaacccctggttcatgcaaatacgcaagctttgtcatgtcgtccacaccaagctcaggaaactcaggatccttggggtggacagcattaacctttgccacaacctacaaacaaatgcatcacaaatatgagcaatgtattcttaaggtaccttaagaactaacacattgtctcgttgctttggagaaaagggactaaccgtcttggtttggcaattaactttgatctcttgaccgttagcttccacaacttctccatctagccaggcttcatctggatcttccacccagacctgtgaccccacagttaccttcactgaagcctgattaaagtagaatatattagaaacaaataaaaaaaatattgtcaagcttcattagctggttcttttgttctcttttagacacatcttataatgaaatctaaaatgtaaggggcaacataaaaatcagctcaaatagcaattatggttacagaagataaaaaaaaaaaggtaaaaatgaagaacacggagaaatcgcaatgcagataagagaagagagactcgtaccattatcacggccaaatctggtctgattttcctagaaatgatcccgaataaagatttccaacgggagaaacattagaaaaaatccctgagaacccaatcagctggtgtttccacaccatggatccaaacaccataaatcaaacacaaaacgcttctctctctctactagcttcaaaatctctgatcgacgttataaatgcggaagattaagactacattcacgttttacggacgatatttcaaatttctccgacgattacagagaccttaaacccttcggcttttgccttccaatatttccccaggaaagctggagattctcgcagaacgtaagaaattttctcgcgttttccctcggaatattctctcctggtttttttttgtttttgccttgtttgatgcttcgtctctctctccctcgtttctggaaaaaggaagagaaaagagaatccacgtaggcgtgtcaggtcagacatttgatgatctcgaaattacccctgcaattataccggatttcagttctaacatttctcctggaccaagccggtttatagtattcgattctaatggaggagatgatgacaacgtggcgcaagttgagtgtgtctatacatggagcagagcattttcttcactgttctcgcttcgccagacgttaatg

SEQ ID NO: 25378 - DNA, 3003 bp, Unknown
  misc_feature (1)..( 3003): 2750-1469P.txt file - cDNA_ID_2705315; gDNA_ID_2214479; Annot_ID_133217
acaccaagaagtatcatgaaacctgcacattctaagtaaagcctacaaaagcaaaaggttgcaatgtttattctcaagccgcaagtaaataaacacagatcattaagaaatcgatatctctctaaaacttgttgtggttttgcaccagagacgaaaaaaggacttcaagtccggttacagagatctcacagattcaattttgacataaagcaaagcaaccactaacaccaaatttagtactagcagctcgattcgtctcaaaatcgaaacatacatgcatgattcacctcccattatattacagacagtgaagagttcaagaaaaaaagcttgatagataccaaaattccagcagaagacttcatagaacgaaattacttaaaagagtaaccctacatagaaagaagttacgcaccgaagtcaaaggaaggggagggaggcacgaatcgctcggtgtcgtcgcaaaattaccggaaccctaaacccagagagaaaaagctcgcgagaaagaggaagagagagattcagaaattaaacaagtctgtatttaattttggtttatttgcaaaatattgataagaccctattttatgacggaatgaacccgatactattctttttgtcaaaataacccatctcctgcatgttttttgggctgacaaattgggtttcttttgattgattttgacggcgtagtaacagaaatttatggatagccacaccttagcttagaccaaacgtttaggtacaaagagtatgataaagttgagaacttaagacaatgtcaagaacatcaaaaccatgtcctgatcatacattctcttgtttaatcaatgtattatagattggactgagactcaaacacagatgccactcgatgtcagaaacgagccactttcgtgacaaaagaagcttggaaagcaaagataaataacgggtttggttggacatatcaagccagtgaggattagaccttagatggaaccttggtgtcagtgtccacctgtttttggccttcgaacttgtctatagccacttgaagctcgtctgtgccaccaaccgccctcattgtgtagaagtataccccaaaaacaaaagctgtcaagccaccagctacaaccgtgttcttgccttttgggcctaggtaactaaaacctggaaatcccgccattacttcaaagtctttaacctgcaagatccaatgtgtcacatgttacagaagagacccaagtatcagaagtattagattatgttatatcttcaatatcacagtttcataaatactaagatgaggaataacaagagagaactctgaagcatgatataacaacttttgattactctttttaacattgcagaagtgactccagaagccctgaggcatcgcaggacattgacatattgttcatatagtgaaaaacagattacacagattgaatacgacgaattttcgaattgttatacttatacctcatcctaagaactactacgccaagagtaagtgatagtactcacaacgagatcaaagatgagtacaatcatggtatgaatgaacaactgaaagttgcaaaacatttcagcaaaatagaactttcttctgcatcataatggaaacggagagaaaatcaattggtcacattcatgcccatcagtctaacataattgtccacaaaatcagcgcacttccctttaacgagtcaatcaaccataaatcatcaaccaaagcaaaaataaaggcaattagaaacctaactctacatctatacatccaaagctaacatcttttaaacgcaggctactgttactcaaccaaagttctcaaaaccagatcaaaatgtcaaaatgaaaggagagcagaaaatatcaatcaaaaattggttctttaagcaaattactccaaagtccacaaaattaaaatggaatcgaaaggaacctggtgatgaaggtttgatgatcactcgaaaatccgaaagatacaacaaagctgatatttttttcttctacagagaatcgtgcctaaatgcgacagaagcctaaagtttccctatttagttgacaactggttcggtgacgcttagtgtcgtggccacttaccaatctatcgaaaaccctaaacccagtaagagctctcgtgtgaaagagggatagaggcagaaagcaagccgtctcgagttcgaacccaactgtataacacaagagaagagatttattgcttcattatgtaaaaaatattgagatgatccttgtaattttggaatattatcaaattgaaccaccatactttttaaaaatccaaataaccctcaaccaagcatgtttcatgttgtggcctcattcacactatacgactatcaagttcatcgaaattcttgatagagaactttaaatacttaaatagttaatttagatactatctaataacttttggcggtttataagtttttgtgtttttcaatctacataaaatttagcgatttttcatgttacaaaaataatctcaaaattaaagtacaacccaaaaacataatatcaatgataataactacatttatctatgattcattttcacccaacatttacattcaaaaaaatgctgttgttacttgttaatgataacgattaaggaaggaagtcaatggaacaaaaaaaaaaatggtgataagtcaatgtaaaacgatgccgtttgtaaccataacagtgttaaacatgagaataaaggatcaaactttgaacagtggcttgcttgcttgcttacacacacgggtcaagtgaagacccaaaaaaaaataaaaaaattaatagatccgtacgcacatgactttcacttcttgtctctcagatctgttttgaccccaaaaccaacgaatatcaatttctccaatttcattcataattcactcaccccaaaattacaaaaaaaaaaaaaaaaaaagattttccatttccctcttctcgatccaccaccaccaccaacctcaaaagctttcatctttaccggtcatg

SEQ ID NO: 25379 - DNA, 3003 bp, Unknown; identical to SEQ ID NO: 25378
  misc_feature (1)..( 3003): 2750-1469P.txt file - cDNA_ID_2705315; gDNA_ID_2214479; Annot_ID_183276

SEQ ID NO: 25380 - DNA, 3003 bp, Unknown
  misc_feature (1)..( 3003): 2750-1469P.txt file - cDNA_ID_2705321; gDNA_ID_2214479; Annot_ID_133222
tattccagaccaagcaacagttgctttgtgtacattattatcacctatttaaaaagaggttcagacacaacattcatcgcctgtgactgtgatgctcaaacacaaggattatcaaagattcaaagttcaggtacagtcagaacttactggctcaggaaaagatccaaacttcgccaacaaagatgaaattgatccaccaggaacaattcattgatccaccaggaacaaactgcatcataatattcaacgaatcactctctcttacagtacccaagtatctctgcaaaaacaaagataataagaagaatgcatgtggaacagacattaaacatatgaaaaatagctgaatggattcgccaactcacaacaatgttcggatgtgaaagattcttaagaagttgtacttcttcctcgcgagccaccagaacttttgtttcaactttagctaggcaaatgaatagaaactcttaagtaagcagcattttagatgaaagtgaggcaccaatgatggctcgctaaatcttatactcagttcaatttctcattattgtccaaaaaaggcttaaataagcttcgggccttacctcctttgtgtccaaatttgtgccgttcttcatcctcgtcaatgtagcctttaaaaagttttaagtgttcaaactcacaagcaaaaggccaactcttctttctacctgaaaatccaactatcaagatgagatcgcacatagtttcaataagagcagaataattttggtgtgcagcttaaatatgttccctaagttcactaggccaaatgggtgacaataaagtttcacaaacaacaactcatacgagaagctcatctgtacaagaaaacagaaacatgaatgggataatggcagtcatggttttaaaaacataaaacttgcaatcatatattgtaataacctcatggatagaactggaagggtgagacatttttgacgactttgggggtctaaaatgctgaacaaccgatgtttttaatccactacatacttgaaggtaggagaagagttgaagatgacattggagcagaagcactatatggggttcagatgtaacatttccatgtccaagtgcgtttctgcagagagcttcaagtcatcaaaaatcaccaaccaccactaaatgtgaactttatagttatctaaaattatcactaccatcagatatcatctagaatcaatcgtaactaaaaaaaaaaaacaactttcaaaaactagataataacatataggagctagcaacatgtatactatttcactttttttagagtttctaagccaatcagaaggctctatttcacacccactcgcacaaagtgagcgttgagcgcgtgagagcaattctgtgggtgtacccctttccaaaacacgcctttttcaatcgacgcatttgtctccaaaatcctcgtcgcgtgaatattttgtttgttacttcttctctatgtaaaccgaaccgcaaatcaattctaatttatttcaataccatttaaacctaaccgaaatcaattgaaattagtaatgactaaccgcttgtcctcatcggaagagtgatctaaagctagatttttcgagagagaatctaaggaaattccgacaacagaagaagggagtataccggagagctcgccaatcaccgccggagcgatggagtaaaattggtacgattttgaaaaagagaagcgtggtggaagaatttcggattaggattttgatagtgtgtaaacgacggtggtcgatccatgagctccgacgacggcgaactttactggcaacgttgtttagcatagtttaattggatatagtgcccatttagtcaggcccattaatatttattcggcccattgttttcctttttcaaatagaatcgtctgtgtgggcttgttttcatattttcgacaaataagaggcggggagaaattttcccaattgaaaacaatttattcttgttcctctcttgaagaaagtctttagggtttaggattttattccacaaacttaatatatggtgttttggctggaaaactaaaaaaaatcaacggttgggatctctgctttcttttcgccaaaaatttactgcagcaccttctccataaacaactttggatgtttgctcttaatatagaccaagccagactatgaaagtttatatttaaagaaatgtcccattctcgaaatttttattttgagtttattttcagtttagttttatatcaaaccgagatattgatacttgcatgcaaattagtactccaagttctgaaccctttatgaactgctagtgcttggctgctattcttgctttatttggtttaccaaatgcatacattatttttttggctttgttaggtttaacatatacatcacttgacatttgatttttgatttttttttggctttgttaggtttagattttttttaatatactaaggtttagaatttttttataacacccatatttgctattataataaacattttgccgagatcttattctaactatagagcggtagaaaatttcacttattgacttcctaattggatatttctatttccttaaattttaaatctcttacatatatattcacaattgatttcctgcaaaattttaattatactagttgcaactaaattaaaaatgttgtcgagatcttttattctaactacagaaccgtagagaatcttctgactttgttattacgtcccattttcatttccatgtgtctatgtactctccatcttcccaaagataacacaataaagtaaaaagaaataaaacttaaaatccaagcttttcacttgtcacccttatttagtttttttttggaccattttcttttcttgctctgatgaaaagctgttgtcttctggaagaacctcacaagtctattaatatatgtatattcccaatatccctttattcgttctgcggaaagcaaaagattgagagcgacagagagagataacgagagagagagagatg

SEQ ID NO: 25381 - DNA, 3000 bp, Unknown
  misc_feature (1)..( 3000): 2750-1469P.txt file - cDNA_ID_2705338; gDNA_ID_2214479; Annot_ID_133197
tgaattttcggaccaaattaaaaagtgaaatagggtaataggtttgaggatgatcgatttacaaactcactaagtttggcgatcgaaacacaaaaaccataaaatttggaactctttaaagacgtaaacaagatgaaaacttttattccatagtcacaaagtttaaaattgaatttcaaatcgtttggacgtttcgatttaacataagccatttaatttattattcatccttccatttctatgtactagtcaatgttgcttatattttgtttgctaacagattaagaaaaaaacaaaagacaaaaactcaagaagatatttattttttagccttggtagatggaaagtcattagttagcattaggaatatgcaataatgttaggccatggcttttgaataattgacaatacatgttaaatagtagtacaccgcagcctctaagtggaaaaaaaaaattgtataaattaattaattcatttctaccatataaaaaggttccttccaagtggtctacgaatacccgaagatattggacttttttagttaccagtacagctgaggtgaccatcctagaaggaaaataaatgaagagattatagactatcttcagtaatgtatgtggatttgttgacgaaaaacaaaattatacaatatatagactcgaataatcaggcagtgtgcatgaatgtctatatgaaacttaagatcattttataataagatacacctacgaaaaactctactttaagatgaaacaatgagtcccaaataaatttgaaagaatgagttagtacccagcgaatctgtccttttatttaattgagctaatattactgttaagggaatatgaattgtcttcatctcgtaaagtttttattactattaaacaatatacatacgaatttgaattttgatacttatatgatgacgatgctaacaaaacagaaaacaatggttagcgtatctacataattcaacagtaacagctggttatatgtgaaataagcataaaacaaagcctgaatttctttgatagtgagcacgagtcattattatccagcgagtacgttgattaatttgagattttatagtaagaacttttcttaagaagtataattcataagaactaattggaagtgcaattctagcgttagaatgtgtggatttagaattgcacttccaattagttcttatgatcaattgtttttctttgacaataacttcattttaatgagtaaatacagtttctttgacaataaatcgaaaaacaaaacacagtcatcttatttatctacttctcgtttctttttattcctaatgctaactcgcaacgaattcgtggtgattcagtacttgatagacttagcatgaagttaagaactaaggtttgagtaatttcattgcgattgaaatcattataattgatcattatgattatctcttaaactttaaaaatttccacgcggcgactcgagttttaaaaaatcattgaaaagaatgagttggttgttgaatcatacgattcctgaaagtccggaccagtgaggcagtgaccgagccggaacgcacaacgtccggtgcagttgtcacttccaccagaaaaggcgaaaccaagagctttgaattgaatagtcaaaaataattgcttctactcttcattcttcaacgtatgcaacgtaacttgtatgattgtgcatttatcattttttatcggcaaattttagccttacacaaaagacataataaagtatcatggccttttttgttgacattgtccttctcttgtcaacaatcttcctggttttaagatacatatggatggttcagaatgtcatatagtataatctattactctacactttgattgatgacattcttattccgatttttatccaagtcttttattagatgaaaatcaactgttattttataaaaaaaataaatagtggatttaaagtgatttgagtgacatacattaggtgaaatttgaaggaatttcttagttaaaaaatcaaagatgcaaatcttatagttttaggtgagattttagagaatgttaatagcaatttcctaaagttcactaaaaccatctcaaaactcatcaaaactaaaatcactctcaattcatccttcaatacagcccctaaaactgagaatcattttttgtcaactaaaactgaaattcatacatttgatggaatttgagtagccgccgggtaatggacccaaccaaaggctcacatagtcacatggtaccaagatttatagtgatattatgcgacatctctctaccacatagtcacatggcaccaagatttatagtgacaatatgcgacttctctacttagggccggctttcagaaactctagaagaactagccactgatcgactatattagagtagttaattttatcaattacatttgaaatgtttatctctagtaagataaatatcaaacaaacaaaacttaatccaaggacttgtcttcatatcgtctattaagagtcgaatttaagaaatgaaaaataaacgattcaagcttaagttagttttaggaaaaagacatactgtttgctccatatagtttgtacatgtattaaatatagaataacaaaatattttaatgtttgctccattgacattacatgtattaaacagtttaatagaaaaacgaacatttttgtttgttcaatcattgggaaatcatagaattgttcaaaatatgaaacaaaagtgagaaatatcaattaatataatagttctgtttaacaagaaaattgaatttagaccaagtccacaatattcatcttgagtaagaacacgaccaaaagtcaaactcgtttcgaaatacataaatatgtaccccgctatacaaaaaagaaaaagacatttacatccacttatcccaatagacaaatgaccaaactacccaacatctacccctatatatacctcaccacctttgccctctcaaccacaaacaataacacaaaacatg

SEQ ID NO: 25382 - DNA, 3000 bp, Unknown; identical to SEQ ID NO: 25381
  misc_feature (1)..( 3000): 2750-1469P.txt file - cDNA_ID_2705338; gDNA_ID_2214479; Annot_ID_183251

SEQ ID NO: 25383 - DNA, 3003 bp, Unknown
  misc_feature (1)..( 3003): 2750-1469P.txt file - cDNA_ID_2705354; gDNA_ID_2214479; Annot_ID_133203
ttgatcatcgccgtcgtttacctactgggaaatcgaaacaaagttctgctgtgtgcttatttggtgggaaagataaacctgatggtagtgatgaggtcagatgctttttcctcatgttaagttcttctgcctgtaaatgaatttactttgcaactggagagtgatttcttttgtgtttgtttctaagaactttgctgttctgtttgctgatgataagtgtgttcttcttattttttcaattttgttcttagtgattgttgtaatgaattttgttatcagatatcgccatggaaagcaatagagaaagctatggggaagaaatcggttgaagatatgttgcgagagcagatacagaagaaagacttttatgatactgacagtggcggcaacatgcctccacgtggaggaggcagtggtggcggtggtggaaatggtgaggagcgtcctgaagggtcaggaggagaagatggtggtcttgctgggatcgcagatgaaactttgcaagtggttttggcgaccttaggcttcatctttttggtaaatgacacaaatttcaggaaagatttgaacttcaaatatcgtatcttgctttgatggaatatatctttgtttttgcagtacacatacattatcactggggaggaattggtcaagcttgcaagggattacattaggtttcttatgggaagacctaagactgttcgattgacccgagccatggatagttggaacggattcttggagaagatgtcgaggcaaagagtgtatgatgagtattggctagaaaaggcgatcatcaacacaccaacctggtatgatagccctgagaagtacagacgtgttatcaaggcttatgttgattcaaattctgatgaagcttatgtggaatcaaattctgatgaggtatcttactaggttaggaacaggaagagatccataataacaattgagttttttttcttagtgtttgaaatttagaatcagtttctttgaattggatttatgttcgtacatttgtatggaattggtttatttatacacgatgaacattctcgagggaaaagcaaatgcaaaccaaaatctctattataacacaagtcaaaatcttttagatctttcaatagctttcaaaattcaactcttaagcagcaattgcaaatcaatgagaaacacaaaaggagaaatcaaagtttcttagatttagtggttgaagtgctttctttcttctctgcctctgtcgatttcttccggtctttcctttccctcttcttcaaagcagtcatgtgggccttaagaatggtggcatatgatgcttgaaatctctggtgatccttagcaccaaccttacaaacaagaaagcattgtaacaagttagcttcttacagatcatagaccagtatcactttacaagaacttgggtaggttttcaatcgttttatttgtttaccgagctacttcctcaactgctagaaggcaactacaatagtgcaaggaaggataaatagagacttaagagagaatgttatcttttattctagttcattatccaaagagagtagtaactcttaaacaatatctcgagtaatcgatgtgctgtttagtttactaatgaatagttcctacgtttggaaacatacatggttcgagatcataatcttgagataatgtgtagaacataccgaagtagaaacagttttctttccatcggttgctcgaataaggcatctgtattcaatggattctccaactgagctcagtttcctcttctgcaccttagacttgagagatgctgacacaagtaacaaaaatcatataagatatcttcaaaaagatatttcaagtataaacatataacaaaagtggaggatgagattttcaaagttacatcttttcaaagtaacccacacagaacccttctctttgcttttctcaaacatgctcgtgagttcattgaggaatggatccaactgtaatagaacctgcaaaaccaaaaaggatggcatcaaaaaaacgcatgatcagtcaaaacaatggcaaaaattagttttctttactccatcaatcattgaaccttacaatgtagcatcaatgctgaatcaaatcccaccaaacacaaatcagaggaaaaaaaaaaatctcacaaaaatcttcacatcacataatcctgaattagcactgagaatttaccattgttaaaccgcagatggatatcttttgcagatcctcaagcactgaaaatacttcttatcactcagataactgagagagaaaaccataaacacaatgcaagtgcagggaagagttagatcttaaagtttagaactttgtcgatataaatggaatacgcaacataaaatctaagcacaattgaaacaatttcttcaaatcattcggatttctactcaattctacgctaagacaccattgatatacaaccctagatcgtcaaagcttctgacaaatcacaacacggaaacaatataattcaattcgcaacaattaggaggcgtcaaatccgatcaagtcaacaaacccagctcaaaagccacgagctttaagaatcagaattcaaacttagaaaaaaactatgaaactgaccagagagagacaagaatctgatgatgatctgcgtccgaaaactcaccggccggaggagtctcttcggtaaaaaggaagtcgccacaaatcaaaagacgggtatactcttagtactaaaggaccatttaaatatgggcttatttagataataatgggccttattaggcccagtaatttataaaaccttactagggttttaacgatacgttctcgttctctttctctgaaactcagcttcttcttcagacaccattgatatcctctaaattgttccccgtcgtagaaactttaggtaatcgttgccgtcgagctgatatttgtgaaggggaaaccctaattcgataagggattgtaaagttgcacaagtttgcttatccccagaacctgctctgcaacacaacaatg

SEQ ID NO: 25384 - DNA, 3003 bp, Unknown
  misc_feature (1)..( 3003): 2750-1469P.txt file - cDNA_ID_2705361; gDNA_ID_2214479; Annot_ID_133206
ggttatagtgggaaggaatgtgggaagaatcaattagttgaaatattttattattcttgcttgaatgtattccaaagtataattatatgcgtttttaacactaattagtaaatcatttttccaagtccctaaacgatacattacatttgattcgcatgtcttcctcttagaccaagaacaaggtcgagttttttgtcaacagaaatcttctccccgaaacatgaaacaacttatagagcaaaagataaatattatgaactttaattgcccaagcatctgtgatccagtggtgggagaagatttggggaagggtgaaactttcagagctgggttcgatcctccctggaaacaaaaatcacatttgtttggaaagtctgtcagttgggctttagcccaattggtttacctggtagtcagaaatgcaggcggcctgactaccccctggcattagtcggaaagcatccaaattcgggacagacagtgtggtggtctttcggggagaagtccactctgaagtatttcggtgcatttctactgaggctgaccggatcagccgataaagtttataaaataaaataaataaatgaactttaattaaccagaaaatgtagaaacaaaaaatcttactaaacctatgaccaaaaaaaaaaaaaaaaaaaagttgtggagtaagaagtatgaagcgttttatccaacatatcccagaggagaacagtgattggtcgatgtcacgtgaaataacatttggcaaatagtgcacaaattaatgaaggcaagaaagtgagaccagacgcgagatgtgagcgcgtatgaagaaacatgatgagacaacaaagagaatcaacctcgtctatgaaaatttcttcagattctcttctcattgcgataccaaacaaaaactcgtagtatatttttgttggtcgtttttgtacaaaatatataaaaagcaaactgtcgcaattatggtttgtatattatacaccagataaacaaatcagaatctctccactaaacctaatatattttaaaattttgataagtctatatacttttttggcggggacaaccggatagttcttctttgagacttctggcttttttttctcttgatgataataagaaactgtatgaatatttgaaaatgccttatgacgttttcttaccaaaaaaaaaaggcaaaggaactacaaaagatagcttaaacaaatttagacaattcatgtggccttaccttaagtattttagtgatgatacgattttaaaattattagtgccattctatcatgttctatactatataaaatattcattcaatattgatttcatagttaaagtttacaccaaaaaattgacatcacatcctatcagctacggaaatggttaccaacacaaaatagtatatctatgtcctatatatatataggaatttaagacaaagcaatattagtctacttttggaggagatgaaaagttacaagaagtctccctataaaacactattaatgaaccaaaaacaatctactaatcaaacttatagtctactagaggtactttgttaccgtttggttagggatgagtttcaacgtttgtggtggttacaatgaaggtaaaagtaataggcccaagacattgagtgataaagtgactaactctttctctttcttcatgatgataaatcgatttgattaattccaaaaaggaagtaggaaagaaaaagtttcgaaattcatcgcaataccaactagacccagatccaaagttgcagacttttcaaagtaatttacccacacacactctaaaaaggatgggttagagaagactaattatttttcttaatagccaattaaaatagtatttctttattgtgtgtttgcgttagaaaaagatatgagagctgagagagagagagaggaagcagaggatagacagagagaaaagggaaaattaccagacaagagttcttctttcttctctctgcctgcttctttttcctctcttttctctctctctctctttctttgtgaaaatctagaagaagagaaagctacaaaaatctcaacatcgaggtatgttattcgtgtttgcttacctaggagatgatttaagttctgtttcttgatttttcactttctggttttctggggtgtttcaaaagatctgtctttttttgttctctttgatgtctctagtcttgttgggatgtgaaacacatgattttcgaggagtagagagagacagagagaaattaagggaaagagctcacttgtgtgacttgttctgtgagaaaattctctaagcaaaattctcaattttttcagcttctttctaatttatgcatattaaaattcagagcttttacacttgaaagttgtcatctttgtctcagtctctctctctctctctcgtttgcatagaagaaacaatttttgtgttgatttagtcagttcacctaatctgaagagaagttaaaaagtttggctaagatttgtcaaaaagttaaaacttccttttcatggaagctcaacaacttaatctctttggcagtttccttatcttagtttctttggatctgcctttgattttctttcatttgtcttttaactgcagtttccaatttggttcatgcaggtaagagttttggctacagagcaaccatgctaacttgcgccttctcccaaaatcttatccactaatctcggtaagcaatacttctgttctgatgatcaatacacaactgtactagtcttgaagtttctccatgcatagatcttagaactaccataaaggttaatcctttgagcctgaaacaaaggtttgagttctgtttgattgtgacaggtaaggaaagtgatgttggcaaaatggtgaagaaaggaagttggttttctgctatcaaaagggtttttactccacattccaaagagaagctagccaatgtaagctggttactccttactggattttcttagcttgcaaaaatgttttattacagagtttttgatg

SEQ ID NO: 25385 - DNA, 3003 bp, Unknown
  misc_feature (1)..( 3003): 2750-1469P.txt file - cDNA_ID_2705392; gDNA_ID_2214479; Annot_ID_133218
tattttgcaaataaaaccaaactatacacgagcttatacaacaaatgtcacatttaaacatagtttctttaagaaaaagaactaatcatttctagtgaattattcaagtgaaactaaaaagaaaagaagaaaaaaaaatctagatgaagcaagctaaagctattgtagcactttagctttggctttcctatttttgccaacttttactcttttttatttagttttcttttactttttttcccacaaaaatccaatcctatgcaaaagattttgcctttcacgtcgtttggagcacgattcactctaaaaggtacgttttctcacaagtacccccaaaaaagttgcatactcaatatacacacaagctaatagtataaatcacttgcttgaagaatttgaaatcactgacgaaaataataagctccttttactttcttctctagtttcaaaacgttaaatactttatattgtttttgtttgtcaacgtactttatattttacaattttcaatacataaatcatagctttttattatctccaaagttgttctctttaaagaagaaactccaatcaaaaatctcacgtttgaatgatgatgcaaacaatcacatttaaattctacaataaatagtgatagagataattcattatttcatttgtacagtttggttgtatgatttgattatggtgtgtatatcttagttgaaagggtaacatcgtaaattaaatgttactttgaaaaccggaacaggtaatagtcggtgaataagagggctaacaaaagagagaagaagactgacacgtgtacataaagaaaacaaagtgggatgactcagtgaaacgttatggatttgcgtgattcacgggtttacagtaaaatgttctcgtcgtctagctctctctctgtacgctctttttgtactcagtttttgttgctccgactatttctcaccgacggttttgttctacgtcgtcgttttttgtttcacttgtagtgtataattgtttacacttattagtgttatcatgaagactaaacaatagtttaatggtggtcagaatgaatctttttttcaacagagggaatgttttgcatagtttattaactacatagcttaactttattgaccaaaccttaagtggaattttcaaattgcggttaattgtagttttggagaagtaatagatgaaaagttgtaaaagttaagacaacttaaaataaagagaagtacaagtgaaatttgaaatttctaagaagagagaggagaatctttggagaagtggaacatgatgcaaatcccaatactttttgttacttgaatacttgtaatttatagtactattcactgtcagtgaatactttttgaatatcgaatatttttctcatattgtatagtaacaaaattaatcatcaactaagacctaaatatgacattacatggtttgatatcagaacatcaaacttcaaaacactagtccaaaatgtatttgagcaattaagttgaaataaatacggttaatgtttttgttatcacattcttaactttacattgcacgtaagattataagtttggatattcaagatggacaataaatttagattagtaccgccgaccaaacaaattcattacccattttccttgtcacgatattatatcaattggctctgtgacattgaattgtattgtattgattgcattgactgaagctaacatttcggttgaactatataagtctaaaatcactaatcagtaatccaatgcaatgcagtaattagtcttcattaattatgcaaaagcaaaacacttaaatgtcatctatttaactaaaagtatcgtttcactaacttttctagatttgaaatgttgaaatacgttaatagatcagattcattatatgctttatgttttagataacttaaagtttgttggaaataaacatggcttaaaaaccaaaaataattaagtattttgccatttagagagaacttatttattcatgaacacaatcagtaatattgaggaaaatctattttatgttatgtgtttaggtgtatagtttgtaaaagatgttaagtaaaatgtaaaaataacaataagaacatttttgttttttgtatgttaaatgtatcttgtttgtctcaataaatttggttctttattgcagaaataatgtggttgtgttggaagaaaatttctgacttcgctcgctattcagtacaacaatccagaagattttgatgagccattatattttcacaatttcagctaaaattaagtagtctcttctttcacattctccatattttaacgatacttcaaaagtaaattcaaagtacaaaaacaagaagaagaagaaaccataaatgtttaactaattgtggcagtgaaagagtcacaatcaaaatctttttatcttactaattggtgatataaatataattaacagaaatcttgttgggaaagaagatgttcattattaattattacagcaatcattatgatcgaaaatcgatatttcttctaacaattggtccaaccaaacaacatatcatttaattttttgttctcaaacaaattaatgatcgaattgtatttttaattatcaattattcggttttacagatacaaaatttaaagcctttttggataagagaaaacgtggaaataaataaaacacgaactaccatttctcaatcaaatcaaatactagagagacgttaaatactaattcgaattaagtaatgacacctacttatactattccctccaatttctctttctaaaagagtccctcgtaaagaccaaaccttttttatcactctctctctctatctcttcatcgaccagaccaaacgcttcttcactctctctctctctctctctctctctctctctctctctctctctctctcttttctcttcaatgtcagattttgaatgccacaacaacaacgagccctaaaactagttgtgtgtgattgggggaaaaacgttgcaaatg

SEQ ID NO: 25386 - DNA, 3000 bp, Unknown
  misc_feature (1)..( 3000): 2750-1469P.txt file - cDNA_ID_2705399; gDNA_ID_2214480; Annot_ID_133232
tgtaaatgcgttgtttgataaattgagtgcaatgagttccttcaagagaccaatagatttaggaatctgtccttctaatctattcccagaaaaatcaatggcactgtaggagttgaggaccatctgttgctccatggataaccctttgtatttcatatctatagtatccctatacacatacgaatctataccgaatgcattattcttgtataccatatataaatctccatcttcattcaccgtgagtgatgatgttttccagttcacaaagtatcttggtgacaaggttccagtaaacatattatcagctatctcaaatatccgcaactcaggaaacgcgagaggactttgatgaggaggagctataggaccatacaatttgtttgaacttaggataaggacttgcaaatttggtaaagccttgagccagaagggaaatgtgtctttgattctgttgttgtcaacgctaagaaactctagagacgagcagtttaggagagatcttggaagcgtcccagatattagattgaagccaatgtcgagtgtctgaagagagtccccggcacataatgtgtcaggaatacttccttccaaattgttctttcgaagatgcacaaacgtcaaattactcagacattgaggaattttaccggtgaaattgttgtaaggtagagaaagagcagcaagagagcttctgttgcagattgaaagaggtatctctcctgagaaattattataacccgcagagaaggctttgatagagagtggtagattaggaagtgccccttgaatattgtttgaatgcataaataatatctccattgatgaatttactaaaacatctgttgaaccttcgaaaccgttgaaagaattatttgcaagactcattgatcttaggcgaggaagtctccataaccactcagggattttaccattgattctattgttggacatgtctatatactccaacttctgaagggtctttaagatgtttggaaactctatgatgccgcattgctccaatagcaacttctcaagggttagtgggatgtataaatctgaccttaaacttctcggagatatactgttaccggaaagatcgaggtatgttaaagatttgagagaggagaagaggtttaagtcgagtgggtagcttatgtttagaaaagaaagttcaagacgctttaggtttatgagctttgagataggctctaggatttgtccttcaaaaggtttaagcccaaggtaaaggatctcgagcttcgatgaggtagaaacttcaatggaaccggtgaaatggtttccatataaattaagatatgataaaaagggcatcatgaggagagaagaagggacggttccagagaatttattattttcaaagtctagatgggagaggttagttagattttgtacctgtgggaaaccaccagtgagctggttattggaaaggtgcaactcggttagctgacttaggttactaaatgaggaaggaacttggccagtgaagctattaaaggaaagatccaaaacctctactttgttgagattaccaaactcggaagggaatgaagtggaggtgaagttgttgtgagagagattaaggaaacggagctgatgaaaccagaataggctactgttgggattcagagttccactgagacaagcgttgagttgtagcttcgtgaccacacccgtcgagttatcgcaccagactccattagagtggtcactatggttgcaacgatgggtatcaaactcgttcttgaactgtgtaaaggcttgaatctgatgggaacgacaagcaacaagatcaagaacgggataactgaaagtgaataagcttgaagtcgaagaggagacacaacagagtaatagtagcgagagaaaacgcaaacgcagatgtgatcctgacatggttcatggaaactttttaacaaggatgatttagtttaaagaaaagcgagagtcaagattgatataaatataggcatatatagatacgtggttatgcataattggagcacaaattgacttataagaagttatagccgtgaagtctttgtattcgatcgggagtgaagaaaagtatggctaagtgggtcaaggctaggtgccactaaagtcatgaaatgaatccacgttagttgaaattcctaacgtataacttggattggaatcacatcagtttgaaacttctaaaacttacttttcaaaactacaaaaaataaacttaccataacgacaaacccatatacgtttgttgattaattgtgctatctgagtctttaatcattggtataaaactggtgaaaaatacgagtttggtaattgataatgatgttatattccaaaaacatgaactacttgaatcttgatagacatctaaagaccaaatgtaaaacaaaatacgtcgacgtgtcttatcggcaacaaatagcatcatcgagtcatcattcataatcatatatatgggcaacacttgatattttgatgcctcgcgtctttacatgagttataaaggggccatttgccacactttccagattttatgtttgaatactagttttactattagtgattttttttcattccatatatgaacacaaaattatattgtgcattttgttttgttacaatttttctcttctattcaatacgattatcttagaacatatactataaaaaaatacattatgcattttaaaatgataattttagttaattcattataatatatagttctttacattatttatctagtattgttttcctggggcaaattctaaatctgaaacggtgaccatctaccttccaggggtcaataaataccccatgcaatttttccaaaagggatcaatgtaacaatcgttagtttctttctcagcctcaggtaagctgtccccacatatccctccctctttctaattatctgattgtagtttgtataatgttttgttgtattcgtaagacttgatcaacttgcaagcaaaagagatg

SEQ ID NO: 25387 - DNA, 3000 bp, Unknown; identical to SEQ ID NO: 25386
  misc_feature (1)..( 3000): 2750-1469P.txt file - cDNA_ID_2705399; gDNA_ID_2214480; Annot_ID_183301

SEQ ID NO: 25388 - DNA, 3000 bp, Unknown; identical to SEQ ID NO: 11143
  misc_feature (1)..( 3000): 2750-1469P.txt file - cDNA_ID_2705418; gDNA_ID_2214480; Annot_ID_133235

SEQ ID NO: 25389 - DNA, 3000 bp, Unknown; identical to SEQ ID NO: 11143
  misc_feature (1)..( 3000): 2750-1469P.txt file - cDNA_ID_2705418; gDNA_ID_2214480; Annot_ID_183304

SEQ ID NO: 25390 - DNA, 3000 bp, Unknown; identical to SEQ ID NO: 11144
  misc_feature (1)..( 3000): 2750-1469P.txt file - cDNA_ID_2705422; gDNA_ID_2214480; Annot_ID_133236

SEQ ID NO: 25391 - DNA, 3000 bp, Unknown; identical to SEQ ID NO: 11162
  misc_feature (1)..( 3000): 2750-1469P.txt file - cDNA_ID_2705429; gDNA_ID_2214481; Annot_ID_133262

SEQ ID NO: 25392 - DNA, 3003 bp, Unknown
  misc_feature (1)..( 3003): 2750-1469P.txt file - cDNA_ID_2705433; gDNA_ID_2214481; Annot_ID_133261
taatgtaggcaccatgcaaaaggttgctctgctgtttcttataaacccaacaagcacccgtgtctgacttaatgccatctcaagaacccaacaactactctaaaaccatcattatcgcatccttatcaccacaagaaaaacaaatcaaaaccaaagaatccaaataatattatgtcgccaagagtattgaatcatgaaactatagagaaataagtttcatgggtcttcctctggcatttgatctaggctccaagcggcagtcaggtcaccattaaaagtggcgcctgctgttgactcgataaaaatggagcctttatctcgtaaaacaaaaacattcgaaaacgcacagatctataacaagtttcaaacgaaacgatacatgattgatgcggagaaagagagagaatcgagattatatagtagtgactgtggggaggagaagcaaaaccctagcattttgaactgtgagaataacgggcttttaaactgtctttattaagcccaatcactcattacttgggcccatcatagtcatctatatatattcagaaacgatggcttgttgaaccaatctcacaagtcacaagtcaaaatgacgtagttttgacttcgagcgatgtatttgcatatttggtaaggttttgcaattgtttataagaaaatcagaaatttttgagagatccaactgaaaaaaattaacatctatattcattcatacccataatggttatcacaaatattattatttattatcaaaattcatatatatgttaataaaagttgggttcataacataaaaaacactttcactaagtttatatttgtatctacgtattttttttgtttttgttaaccaaatttcatacacccacactctgtgtagaccaaaaacaagtcctcaaatttcatatataggcctgcctaaaggccaaaaaagttttgttgcccatttacaaacaaaaattccaaaaatgttaaaattttgagccatcaatttttctatttctaaacgtatataattaacaataaaagcgatattcaaataccatccacaagaaacttttaacaagttgtcttaataagtaatttactatacttggaagcttggcttaacatataaatacactaatagttaaaccatattcaacagccagaatattcaaaggaaaaagaaaaagaaaaaaaaaatacattactagaagaaaaaaatgacgtttgaaaagaaaattgtgattgtgtcaatggccatatttttaatgatagtagcaacaaccgctaccgaagttgatggtcgaattcatgtccgacggagcttagctgattttggtggaggttgttgcaacgtttttattcacacttgttgttttcctaaacattgacttaatcacttttaaatatatattacctcgtaataagtttcttctcttctttttcttttctcttaggagaattgattaactgtataaatattcagataagtggtggaccattgaacataatatacgtatccaaacatgttattcaggattgttgcatgtaataaaactatatagttgagagaaagataaaccgtccccacatacatttttttgtcttaaatttttcctttatataaccgataatagttatctatcgaatttagattctcacctagagcaaacaaaaatacgtttgtttttgaacgatcgaatgttttggccaaaatattcgatctagttacgaaaaaatccaatggttgtgtaaattttatgaccatcaatcagtagtgattaaatatatcaatggaaatatttgtatttttatgtgaaaatgttattttatatttaaataagacaactttttcttagataatcaagttttctcagccaaaattcaaactaattaattacaaaatatatatacgatggttatgtgaattttgtgagtatcaattcatagtgatcatgaaatcaagggttaatacaaaaatattggttttgattcctgattacatatatacactgtaagcctatccaaaccttttcattcaacaaagtctccaacttgaatctcaatgtgggatactgaaatattcacacaaaactctccaaagaaaacacgcacgtgtcacgtgtgtgtgcgtgtatatatgaaataaaatatttacatgtatgtgtaagaaaagcaacatcagtgaatactttaggtttagattaattacttcatgaaattatctttgtgccccacacaagaagtaaaacatccaacactacgaatgaagcaagaatagaagccaagttttgtccttaagactctaatcgcaaatcgtctcttggtcgtaccttgacgcacttccgaaacccatcgttcggccgactcgttcattcctttcattgacttccgaagcttctctttgaaactgaatctctctgatcccatcaagtcgtagcttgccaacacaatccgtcttccgtcccgataacatttctgagtgtagcgttctctctggtcatggtgcggcagcgttacataggcgtacatgtacgtttgttccggcatcatgaatataaagcaacgtaagaagagtgatgtagtgtgtatagcctctcttacatatatatgtatatatatatgtacgagagggagagttgggtgagattttggttgaacaattatgaaattgcgtttgatagtggttggtgactgtgttgcaccaaatatggaatctcatgttatttggtcatacgcaacacatgtgaccataatgtgactgacctatgtgcaagccgccatgtactttgtcaattggttaaagaaatcttcaatcctatttaatacatagaagaaacatttggacaatctatttttagataatgggaagagtaatgaatgagcttgccacgtcatcgccgagtcatttctaagctttttgttttttctttcgttctttctctgtttatacgaatgaacgcttgtgttccttaatcctccttggatcatcctcctaattactcagtgatcatg

SEQ ID NO: 25393 - DNA, 3003 bp, Unknown
  misc_feature (1)..( 3003): 2750-1469P.txt file - cDNA_ID_2705440; gDNA_ID_2214481; Annot_ID_133254
acggatctcgtttttaaggacattaacaagaacaacagagctttcccaacttttcaaagaacctacacaatgtttagttaacttgatacaattaattatgatacataaataaaagaagatatcagatgctagtgcatgtgaagcacataccttcattttttaaaggagcagtttctgacccagagagcccaatgatatcagcaacacttacttttccctgaaacaagatgatggttacaatgcaaaggttaggattttctatacatccttactcttgtccgtggtattataatttataaagcatggaggcagccaaaaacgattcttgtttttcactttttaatgaaaatatataaagatcaagcaaactgggcacttctagacatactagttctaacatagcggacttacttacaaggttcataaagaaaaaagtatgatcgctttctgattcacattttagccaagaaaagctaatgtatccactcttaaaaccagcattagaatatcatcctaccacgtcattgatctttccagcaatcacttcttcatgttaaatcttgaataaaaggtttgacaagcaaagtttctttgcctaggctctcaaaaagccaagtgtacacatcagtttttaacttttatgtctacttccttacagcttggaggtgatgaactatattcaaaaattgcatttgtagtaccttgaaaacttgtaaaccgagcgcatctagattctcccctgaatacctgtgatgagctactgtctacaggagaaagaaacgaaaagagaattagcatagcagggtattatagagtctactccattctcaaaatgaaagaaactcttcattcctaaaatgatgatgatgataaaaatcgacaatgagaaaaaaaccttagaaggtatgatctcaacagctggtgttggaagctgcaaatccttctctgataatgcagacacaccgcctcggtcttgaggcagcaaacccggcaagcattgtgcaagcaaagatggtgcacgcattcttgagctttgagttctcaataacgctcaaaatggtcacaatctaaaattagcaaaaagatcaaaactttagtaatactattgtcactttgaacatctttaactcgaaaacttaaaccccaaaacttagacatcatgattttcacctaacgtcgatgcaatcacatgattcacatgaatagatacataaatgcgaaagcaactttgaacatagtgacaaccatagagaacttagcagtcaaataaaggtcaaaattaaaactttctgattcaaaactaagcccaattgcgagatctaggcgaatcctaaaatccacatccctactgtgaaaatgaccagcaaggatcaaaatcaaaaacaagaaaccatcaacagaacatgagttcttacaagacataatgaatcaaaagtttgactttaatttcaataataaacgaccatgtaccgtatcaatggagtatcaagagaaacagacaacaaagaaactgaaatttacttacagagtaaaataaattaaaaagagaaaacgagaagtggaggagtggaggagttctcgacacgaaatttcgattcagacggcaaaaaatgagattcttctataacacggcgaaaatctagggatcaaacaaagcaaccaggggttgaaatttcggagcaaagcgatctctcacacgttttaaagtaagaagaaataaaagaaatgtttttaaaaagaaagaaaaattctaaaaaggaaagagcaaagtttggccaacaaaaaatcgaagcttcggttcagacccgctggtctgcttttgtacacctgttccttaactatttataattctagtcctttttattctttgcagttcatggaactcaccactttctttcgttcctctggtcgtcgtctgatttctcgcatttatatttctcatttcctggaaaaaatggagtttattaattaatttctccttatagaccaattatatgggcctttaaaaggcctctattgtatggcaatgggtcaacaaactctacctataaacggatttgttaaatttaggcctttattacataccaatgatattttaccaatgaaatatttgtataattaaatttcatattatcataggataaaaaataaattatcacattaacgcatgttgaacaaaaattttacatggattatctttctttctatttttgcggagtaggttgtttaagtatgtttttgtcctttcaagaatttgtcagtttataacttataagtaaaattttaggtacagtatatatataagttgtaaaagttgataggtattcttgtaatcaaggtttactatcaaattttaaactaaaaatggttaatcattcatcaacacatgctaattatgtttagtatgggtagatgtgcctgtagatagagtgtcctaggagagtgtggtcacgcgcttacgctaaacaaataatatatcctctgtctttgctacacgtgtataaacagcagcaaagatgaaacgtgattaaataaaataagaggttgagaaagcgagtagaagatatttagataaacgcgggagtgcaattatggtttgtttgttggaattaagagacaaccttatccagagtaagctcgccacgtgtattaaaaacattattattgtctgttagtcacagtcgagtaactccagataatcttctctgtctcatttctcgtcgtctttttaaaaacgttttactttccacggcgaattttggtctgattccaaattcttccctagtttgaaaaatcttctgtattctgaaaagagattttatgcgtatcgctgaaataggaagaaaacagattcctttccatttcccaaattttgtcattgagtcttggcatttcaaccaatcgcaatttattgaaattccggcgagtcattagatttttttggattccgtttcaaggtacggtgctttttcgcagattgagaagagcttaataagaaagatg

SEQ ID NO: 25394 - DNA, 3000 bp, Unknown; identical to SEQ ID NO: 11170
  misc_feature (1)..( 3000): 2750-1469P.txt file - cDNA_ID_2705471; gDNA_ID_2214481; Annot_ID_133264

SEQ ID NO: 25395 - DNA, 3000 bp, Unknown
  misc_feature (1)..( 3000): 2750-1469P.txt file - cDNA_ID_2705474; gDNA_ID_2214481; Annot_ID_133257
gagatacaccatattttctgatcagctaggaagatgggatatccctgtttcggataatttgacttttattccacttgcatgcaacgagtacgagaatgacattgtctctagtcaatctgaggcgactctctatcctcctaatagacaattcatgagaggtacaaatacaatcaaatcaaagtgagtttgaataaacaaaacaagaatctgaaaccaagtttcaattctgtctgttgatacaacaactatctagtatctacacagacaaactaaatctctatttcaacatcaaatgtgagtttttatattcgaacaaattcaatacaaaacaaaatataagataataatagttcattagttctaaaaaaagaaatataagataaactacagaaacaaatccaactgtaatgtcatagttcataaaaataataatatttgatgaactattttatccatttagataaattacaaattgcatcatcccaaatttttttatatcttaacaatcaaatctatacggccataatttaagatataaagacaattcactcatgttaattgcaaaacaaatatcttgtttgtaactaaaaaaaaaagacaatttctgttttgctatatttgattaacatacactacactttttttttctttggttcaaaaggcactcttaaaagtctctaacaccaaatattattaaaaaaaaatctgtaacaccaaatattattgttattttttttacaatatgattacttagtcggaagaatgatgatcttgactataggacctcctatgatgatgggaaggcaagtgtttatgacgtttgcgagatcggtcttcttcagaacgttttgatcttttgctgccagaaacttcacccttgttgtcaccatatcgatcttccatacctcgtgctctctcttttctatcagaacgggactcttccctggaacactcctctctgtctttgctgcgtcttctatgagaactgtgtgtgtgtgcgctcgacctgtgactgtgatatgacctaaggctgcttcgctctttaaactcttcttcccgttctacagaactcttttcccgataatattcttcctctctatccgacacacttccttttctccttggaggtgatgggatctgcatccaacaagtaagttgtggtaccaagattttagtttacaaactatcagctttccactagacacattgaacaacccatttaatatattatttctagcagaagaacattaacaaatgacccaataagatagcaccagagacagaacaggggtaaagttcaaatgactatagagtggtggtgaagttcaagacatggtagacctgtgtgcgcgacatatatcttccctcaggcggaagctgaataccgagctttttcaaatcttcatgagggattggtcgtctgatattaacaaatagaaagaatgcccatttcatgaccactatgtttagctggtgttatctctggacatgctaaaggaagagtaaagcaaaaccatacaagggagcacggaatggtctatctcgtcctccaaagcgaagttgtccggattctttcctaccaccaaggccacctcctgttaagagagaaatagatttcatctgtaagggatgaaaatataacgcctatgacatttcattacagacaaaaataaaggtaaagaatggcaaacctagtcttcttggtatccatccaggcatcaattgctgtctattataatcaacaataatctctcgcccatctattagtgaatgatgagcatcctgctaaagaaacaccaaaaaaattctcactctgataaacaaactccactagtttccagtaattacacggagatgttaatgaaacaatcacattgcggtgccttagtaagtggttcagacagctttcaacaacaaaaacaagaggtaaaaagaaaatgcaatttagtatcacagcacctcataagcacgaagcatctccttttcagtctcatactccacaaaaccatatcctcgtgaagctcccgtcactaaaaaaaggtaacaagaagaggagactcaatactacacaatgtggaacttagaggaaatatgtaatcacagttctgcttagacaaatatcttggtagaaagtaacaaaccatcagaaatagaaagatgataaatttcctaaagataaagcaaagtgttgatgtcataagtagagcaattgcaaaatcttaccaatgtgtcttaccaagcgcaagttcttaatcctgccatacttactcatcacctacgaagaagaaacttttataatcatattcaaaacatagtctacacgaaaatcaaaaactaagtgaaatttcaatcattaacctctcgaagtgtatcctccgtagtgtgatgagagagacgacccacgaagagagtacagtaaggatctccaacagccttcgaatcaccagaaggatcatctttcaaaacaacccaaatcaatgtatttgaattcagaaaccaaacgataaaagtgaaaagaggagcagagagaacgagagagtatacatacataagccagcgttataacagagaagagctcgacggacgccgttatcatgtggagcaacatcagttccgtcgatacttccggcttgaatcggatgatacgacgtcgcgtagaacactttgttcacgacgttgtttcctccgccgctcatttcttctcccccgactctctctctctcacggcggctccggctgtttaaggaaataaagaataacgtcgtcgtttgaattgattactattaaaaagcccaacatataaattgggcttattacagcccagttaaagatatatgatattctcgtaggtcccacacgaaggcggaaactccaacggtggctgctttgggttaggtgaatcactcactgaagagtgaaaagctctagcacaaaccaaacaccaaatctcatttcttcttcttcttctttttccacattttctgattagcagatcaaatg

SEQ ID NO: 25396 - DNA, 3000 bp, Unknown; identical to SEQ ID NO: 25395
  misc_feature (1)..( 3000): 2750-1469P.txt file - cDNA_ID_2705474; gDNA_ID_2214481; Annot_ID_183340

SEQ ID NO: 25397 - DNA, 3000 bp, Unknown; identical to SEQ ID NO: 13905
  misc_feature (1)..( 3000): 2750-1469P.txt file - cDNA_ID_2705502; gDNA_ID_2214667; Annot_ID_136591

SEQ ID NO: 25398 - DNA, 3000 bp, Unknown; identical to SEQ ID NO: 13929
  misc_feature (1)..( 3000): 2750-1469P.txt file - cDNA_ID_2705565; gDNA_ID_2214672; Annot_ID_136627

SEQ ID NO: 25399 - DNA, 3000 bp, Unknown; identical to SEQ ID NO: 13929
  misc_feature (1)..( 3000): 2750-1469P.txt file - cDNA_ID_2705565; gDNA_ID_2214672; Annot_ID_189137

SEQ ID NO: 25400 - DNA, 3000 bp, Unknown; identical to SEQ ID NO: 13928
  misc_feature (1)..( 3000): 2750-1469P.txt file - cDNA_ID_2705581; gDNA_ID_2214672; Annot_ID_136623

SEQ ID NO: 25401 - DNA, 3000 bp, Unknown; identical to SEQ ID NO: 13926
  misc_feature (1)..( 3000): 2750-1469P.txt file - cDNA_ID_2705593; gDNA_ID_2214672; Annot_ID_136620

SEQ ID NO: 25402 - DNA, 3000 bp, Unknown; identical to SEQ ID NO: 13937
  misc_feature (1)..( 3000): 2750-1469P.txt file - cDNA_ID_2705601; gDNA_ID_2214673; Annot_ID_136630

SEQ ID NO: 25403 - DNA, 3000 bp, Unknown
  misc_feature (1)..( 3000): 2750-1469P.txt file - cDNA_ID_2705638; gDNA_ID_2214675; Annot_ID_136640
cagatacacacgcctcaataatcctagaggttaacctcggctgccaaaataaaaagcttacctcaaacatcaatctttcttaaataatgattttacaaggatttttaaaaggggtttaaaaacgttaataatgattttacaagattttttaaaaggattattacctgagtagtagatgcagaatgagaagcaaaaggatatgaagtcgtctcagcctgtaataaactcaatcactgacttaataatgattttacaaggatttttaaaaggggtttaaaaacgttaataatgattttacaaggatttttaaaaggggtttaaaaacgttaataatgattttacaaggatttttaaaacgattagtacctgagcattagggatagaatgagaaacaaaaggatttgaagtaggctcagcctgtaataagcacaatcactgacttaataatgattttacaaggatttttaaaattataacacaagaaggttattgaaaaacctgctcaactgtcacagaaatttgctctacagtcaaacataactgaagcaatcctccactctgtgagaatttgtgcataaaagttgcaagcagtctatcgttcctaatataaagaggatgagattgtatggttgtagacgtggagactaacttgtaactaagcttcaaagaattggttgaactatctatttgaaaatcctctacaagaatatcaaccaacgcgtgataggtaatgtgctcatcaatgagcactaaagaagctcctaattcaatgtctaattcaaattcccaagtcatattgtttgtcaacttccacaaggcacaaacagaatacaattctagcattataacctgataagataaataacaacaaaatcaacagccacaaaaacactgtcactacaaagagaagaaaggtttacaaatcgttttaaagagtaagtaagtagcatagaataatttacaagggattttaaaagctttgaaaagtggttaacatggtttacaaatcgttttaaagagtaagtaagtagcatagaataatttacaagggattttaaaagctttgaaaagtggttaacatggtttacaaatcgttttaaagcgtaagtaagtagcatagaataatttacaagggattttaaaagctttgaaaagtggttaacatggtttacaaatcgttttaaagcgtaagtggcatagatctatcacgaaagcatatgcaaaagaggtaaacactaaatcagaatcaaaatctattacgaaatagtataacgaattcacataagcaaatctatcacgaaacagtataacgaattcaaaaggattttagaacagtataacgaatgtacaaggattttagaaacaaattcaatcatcaaatctcaaacaaaattcaaattcgaagctgaagcaaatgtcaaactgtcgattgaatcaggattcaaataacgaattcacataatcaacaacaaaaatcgaataaaccaattcgaaaacgaagatttaagctaacattataaaatcaaacctgggaaacgtaagagattcgacggcgacacacagctctacttacgacggcgaagatgggttttcacggcgagtaaactcactatttccgacggcatgggattcaacgacattcacaatttccgatggaagaagaagagagagagtgaagaaatgaattaggtctgtgggtagctcattaagggtaatttggggagaaaagtattagaaagggtagaaatgaaaatggcaaaaaagggtagagttgcaaaagggcattgagaaaagggcattagagtgaattattcaaaaattaatttgtgtgttttgaatttatatttctcggatttatatgaacaattcaactagtttaacttggttcaacttattggattagattaaaaacatgtatgtatttgtttccgtgataatttttaatttaattagttgaactagttcaaatgtctattctttggttttcgtagtaacatttaatataattagttcaactagttcgatttagtaacgctaaaatgtttaaattttttaaattgataatttattatacacgtaaaattatatacgaatatctaaagctataaataaataattttatatcaatgcaataaaatttaatattttctaaaaaacaatgttgttttcatataatacaccccttctaatacaaggaacatttagtatatgatcaccttatatgaagtaaaataggtgaaaactaagcttttaccgatgtaatattatgaaaactttggaaatgcaaaataatagagacaaagtgtgagttcaacttataattaattatttaccgtctagttcaactgtaaattatgaaaactgtgaaaagttcaactatgaacacgatggtacaacagtacaactatgagtattttctgccgcaaaaagacaaaatattttttagtggggttcacatgttgagtaaatataaccactaaattaaatccagcgtttttgtagggtccatatacagaatatttatgtttttcttatttttttattttattttttaaaattaaataaaaagtcattcattaatggtgaaataagaataacacatatagaatagcatacagattaaaaaatggcactccaaattcaaatttctggttcaggtgcattcttgactggaactcaaacataagagtggtactactaattttttattttcgaatagtggcataagaggtgagccttcacattttatgttgattttgaccatttttccgataactttcaaattgcctaagatagtttgtaactacaaaatttaattgtaaacattgcctaacatattcacgtaattacgaaattgcactttagaacttccaaattgtaaaacttcggctcccacaggggaaacaaagcgaccgttttgctcatcattatttatagccgccggcgaattgatcggtaaaaaaaaaaacttccgacgtttctacaaagttgcgaatcatg

SEQ ID NO: 25404 - DNA, 3000 bp, Unknown; identical to SEQ ID NO: 13952
  misc_feature (1)..( 3000): 2750-1469P.txt file - cDNA_ID_2705651; gDNA_ID_2214676; Annot_ID_136660

SEQ ID NO: 25405 - DNA, 3000 bp, Unknown; identical to SEQ ID NO: 13954
  misc_feature (1)..( 3000): 2750-1469P.txt file - cDNA_ID_2705659; gDNA_ID_2214677; Annot_ID_136663

SEQ ID NO: 25406 - DNA, 3003 bp, Unknown
  misc_feature (1)..( 3003): 2750-1469P.txt file - cDNA_ID_2705706; gDNA_ID_2214678; Annot_ID_136676
tcttaagattttcagagtttccccattggaaagaaaaacaaagccctcataagatcatgatcacaaaacaacgaaatcaaatgaccaaaaccaaaccaaagttgatttagctgaagcatactatagattaatacgagttgattcatatggatggatggatagctgcagagaagaccaaaaaccgagaaacaagattgatcctcttaagaaatcgaaaaactgaaaacaagattgatcctcttaagaaaacaagcattcgcatcatcggtcactgtgaggtcattgtgaaaatccaaagaaaaaaaaaaaaaaaacaagtatgctttgctaccataaccagagttatatagaatatgaataacgagcaggtaaaaaaaaggtaaatccagaacaaagctatgtaaggtgaaaaacaaattgggtccaagtaccgatgaccaaaaacaatcttgaacttaggcaagaaaacttggcaactgatatcaaaatggactcttaaatacaaaagagaaaggggcgacactaccataaaagaggaatgtgatgaaagagattgagaagcttataaaaacctatggggaagaaaacaatgcttgaaggaaagaaaactcaggttgtttattccagagaaaatcaacttgaagcttttgaaagagtcccaaaactttttccagtactcaaaaagacagatttaaaacaagaatgtaaaaccattatgtctgatcctacaaacgggtctcaagacaactgcagctggaagatacagacttttggcagttatgacatatagtggacaaaactataaatgtcataagcttcttctccagctatagcgaacagatattcaatgaaaatgcgggaaaacataaaaccaaaaacaaggaaaaacaaaagagaaaaacatacgccatgccacagaagaaaaccagacgtgagtttgatgggtaaggagaagacagaagaccataatgggggactccaaaagggaaaacaaagagatagcaaactactttaaaccaatattgatcctagtaactaaatcttctagacaaaatgaccacatttcactggtttatgagaacagagcagaacaccaatgacagacttccagagagcaacagaaaattcatcctttgagcacacatctccctcaaaatggctcatataggggtagatacctcgttaaaagagactataaataatgaaactaaaaaagtaggtttgaaacatcaggcatagaaaataaagatccgcaaaaaaaactcctgcaattcccaaaatatcaagttggagtcgaagataccggactaatcattagcctaatctataacttgaaatatcagagaacatggtcataccacttgggttctcttatctcagataccaagcacgttcaccatcaaaaccagcaccagcaccagcacccgcaccaacaccgttaacattaccatcaccaacatattgtcccaccattcccatatgattcggtggcatcataggtccttgattcatcatacccgagccaaacatacgataattctgtaaaccagcaaccatcggattacccatcattgcaccatacataggattaaaaccaggaggaggctgagaatgtccataaaagggcatgttctgtccagcatacattgacatattctgctgctgctgatgtcccttatcaagtccatgacccaaatcaatcccaggcaaagccatttcactctgattacccgtatgactcaaatcaatcttcacagactcaaccggttgttgttgttctcgtggctttccagaattaaacggcctagctggtaaacaactaacagttcgattatacattctcttctccggattcttcaacgccgctctcgctcctttacgcgtcttaaacaacacaaagccaaaacctttagctcttcctgtatctttatccataaccacagaacattccgttatctccccataaacctcaaaagccgccttgagattctcatgcgttgtatcccatccaagaccacgcacgaatatgttccgttgagaactatctctatccgctgattcaaacactgctgagatcaatttagaacctttctcagcagttttgtaaattaggttaataagctcctctttagagtaagattcaagtagattcttaatatcttccttatcgaattcgaaatcagaatcagactcaatggtaacaatcgggaccgtaacaggctttgaatcgacgatctcttcggattcatctgatgatctcttatgtttcttcttactctccttcgatttcttaggagatggagatggagatggagatttctcctcttcttctacttcttcgtatttcttcgatttcttctttgatttctctggtttctcttcctctttggatttcgatttatgtttttttgagattttcttctctcttacagcgagttcttcagcttcgcgacgcttcctctccttcctctccttcttctctttcttctccttcttacgttcttctccttctttcgccattgttgacggcagtggctaccaaaaaaaacactctgaatagagtaactcctctaaaatagggtgcaccagagaacactagattatttaagtatatttataataaagtaaagagtctaacaaaaacgtctgggtggtgtagtcggttatcacgctagtctcacacactagaggtccccggttcgaacccgggctcagacatgcttttttttttgcaacacataatttttttttttaacatgaattagtagaggggcaaaaacgtcaaaatacagaaaaggaaaaagatacaacatttctggtttttgtgtgccggcgaagaaccggtgagtgacgggtcaattcacatacttgtttaacggcaacaaaaacctaccgataaatgctaaactaacgaaatcggatcatagctcgacgaagtctcgatcttttctattctctctttctgggtattcgtgggttttacccagatttcgaaattgaatg

SEQ ID NO: 25407 - DNA, 3003 bp, Unknown
  misc_feature (1)..( 3003): 2750-1469P.txt file - cDNA_ID_2705709; gDNA_ID_2214663; Annot_ID_136538
aaatatcaaagagttcttttactctcacttatgacacgctaaattaaaaccactaaaaaccataatattaatttcacggctacaagttgatgcttcctcaaacttactacgttccaatgccgggcactgattaaatatggacttcacatctttttttttttttttagatattcatttccaaacggtctattgacagatgggctaagaatttcacgggttacaaaaaagtggtccaaatcggaacataatagaaacaagatcagtaaaacgacggttcaccggccggagacgcagccttcaccttctatatccgatgcaaatttaacatatttcgaacgaatctatgagatctatatgagaattttgcttcttgggttttatacggttcgggaaagtggatgtatcaagttgtgacaagaagcatcaaagaatatgactttgtccagtcatttttatggtatagtgatgatcgtcaatgatcataattggctaggaagaaagagcacatgtgcattcatatgattatcataattgtgcatatcatatgcttttatgggcatagttgtcgatagaaacaaaacatgcgtcgaggaaaaaacaaaagaatagttaaaacttagaatctttgattctcatgagccatgaggccatgtgctttttctctcccacgttatatgttttaccatccttataatttgctcccccgacttctctcactttcagacgaaaagaactgctgtcgcgatttttgaacaattatggaaaataatttagatgtgaaggaagccgtaaaaatagttattatactttttgtccatatatatagaattcgtgatgattatgttgtggatgacaattggtggtagatagaaacctttactatcgccattgttatgggctaattaatcaagtttggtaacaaatcaacataataggaccaataacaacaactactgcagatcttactattattctttttattaattcatcagtatattttattattttttcttgattgtttatccgattgatcttgtaagagataacttttgattattacataacttacttcaacatgttaaatgacacaataaaatagacaatttatttttgatatccttttgaaaaatattaaataaatatttgtaatgactgtgttgcactaaaaaatcgagataaccccatgagtgataatttggtaacataatctaaacttagagacaattaactaattaagttattatctgagaaataaattagacaatatttttattcgtgtgtgtaatttttgtggtataatattttttcttatattgtttcaattctacggatgttttggataaaaaggttaatcaaatttataaaatgtaaaattttgcttgaacaaatgaaccaaaatgtttactaattggctaattgctggaaaaaaacagttatataatttttgttaacaaaaaaaatgtttgatgtaaataattaattcacagctaaaagtcaatttcctcatttatttttgattaaagaaagtaataaaaaacaattaagtataccattcgctgtacaagagtcgtttagttctgtcggctcgacaaccgactcaagccggctcgagtcgctaagtgaatccactcgctgtctgtcggtggacaaagccggctccaatctgatcactctctctcaccagcacacacacagctctctctcttccctctctctctcccccgctttatactttgttgagtcaaaatcacagacgaagaagaagaagaaacctctctctcactcctctctcctttctctcgtcttattcgcttctcttctacgtaacagattgttcatcttcttctccttgttgcattgaggtgagttcaatttgatctatcaatgtctaaatgcatgctttttgaattatcggatctcttgtgtttgatttcattgatagagatccaattatgatctagatctgaagaatcctgttttttgagttcctattggttaaaaagtttcctcatttagctttagttcgaatctggaatgttaaacgattcggatcgagatttagcagtagtagaattcagttaggtagagtgatatttttatactattagtcttcaattataatataattgcattgagcttttcctacttcactgtatcgttttctattgtaaagattgatcctttttatatattatgcagggggtgttgttgatgttctgacgatctgatttgagtagatctgggtagggggcaaggtctctgggtctacttttgatttgagaattttttaagtgaagtgaagatatgacaagtgctcttggatggagatttccttccactaatggaaatggccttgccccaagtgacacggtaataattacttgattcagtattaacattcatcacacgggtttatggaaaagcttgtttagttgatatactgcaatctttctgagttgcaaagtcagatctggtgtattagcaggatgattaagctgatatgtcccttgcattttgaatctgatttgaaaaaagtacttgagctaagtccattgttaattaatggctttgtaccagtcagttatatctgatagagtgtcatgataaaggttatagtttttccattgcataggagcgaaaaggtcttgttgctcttttaacttattttctgttgtttggtcttgattgcaggagagaaatggggatatgaagatgcatgattcagagcccccaactccacattcaaccacaaagatgagtttgaggtaacgcatatatgtatttggtactgcatgggagctaatcatcgtgataaaattgaggttttatctgtatttgttgcaccaccatcttggtttaacaatgcctgtggaaattaatattatctggattggtttcctatgttatcctttcaaatgagacattttaagcagaaaggcacacctattagcgaattagtatctaactttccccatcccctgcagagaccggacaaccagcatg

SEQ ID NO: 25408 - DNA, 3000 bp, Unknown
  misc_feature (1)..( 3000): 2750-1469P.txt file - cDNA_ID_2705740; gDNA_ID_2214683; Annot_ID_136699
aaagaatatggaggagtcctcttccacctttggtaaacttatctagtaatttatataaaattttttttttttttttgtaatttgagtattactatgtttattataaaacattttttaaaatttttcttaaaatattatattttatttaatgtttttcatacaatataatccaaaaggagacaatatacacacttttctagattttatacacataaaataacacagtaacatattaatatgttattttatgtctataaaatacagaaacttgtgtttgttatatggaatatacagttttggttgtaaatgttgatttaatacatgaatagacgtatttctctattcaaaatttatacttaatgagctttctaatttgttctcaaatcaaaggcattttatgtaatattttataataataaaggtttatttttcaaatgttcttcaaaaatacttatatagatgactttgtcaagattattctagaaccaaaaaaaaaaaaaaaagcgtcaaaccgagtcagattcctcttctagtcaaaaattataagaaagtttcaaagaatgaaacattatgttcctataatacctttttgtttaacattataagttttttaatcattaagatcactaatattgatcttggtttcttttctaatgattttttcataactttttaagatatgtttaagaaatttataagaatttttagtaaaaaagatttatttttaatactgtcgattcaaaagaatataaattatttagaaatatttaaattttatattatttcaatactactatgtttattataaaaaaaaaatctcttatttttgcttaaaatgttaccttttattcaatatttacttcatacaatatagcctatatatatataaacacattactatgttattttatgtgtataaaatacagaaaattgtgtttgttatatggattatacagttttggttgtaaaatgttgttttgattcatgaatagacgtatatctctattctaaatttatacttaatgagctttctaatttgttctcaaatcgatggcattttatgtaatagtttataataataaaagtttatttttcaaatgttctacaaaactactaatatagatggctttgccaagattattctagaaccaaaaaaaaaagaaaagtgtcaaacctgagtctgatttctcttccaatcaaaaattatgataaaatcctaaagaatgaaacattgtgttcttataatacttttttgtataatattgtgcgttaaatattattttgtatgaaacctgcaatcactatgtatgcataataaattattttttatgtctatataaacggtcgaattcatttgatataattcacaattgacaatttcaattacaaaaaataataataacaaaaaatttcacttttctctcattttatttcagtatctctatataactgccgcttttaatttttttcttatttatatttttatctactataaactaaatctttatacaaaatctctctctgctcttgccgccgcttagtgaaaaattccagatcggaggctggagagtggtggctttcatagcaccggctctgacctctccctagtagcttaattttgttttagttcttcgttttcttcttgttgtggctttgtttggagaaacctttctccgaagttggagtttgtgttttcttcccatcttatttgcagaatttcagatttcgtttggggaattgtttagtttgtttcgattcttgagattgggtgtgttgaggaagcggttagagtggctagatctgtaagggtttctgtttacagtaaaattgatgatgccggatctattcgatctacggttggttcgatgaataatgccattgtattttgcttgttcctgtctcagttctttatgcctttctcgggtcaatctatgtttttgccgttggtgtggtttggttgttggttagcgtttgcgccgttcaccatttgtttctcctttacaccccggtctcgtcgtatcagcttgcagttctcttttggttctttccctttgtaggcagaggcttcgtttggtttgaagttgtgaattttctctatgtttgcagaatctcttctccttgttgtggttccctgtgtttgatggctggctcgagttttcgtctttctcgcttctgtgagtggtgattttcgagggcttatgcttcgctccttgtccttgcttttcagatctgttgagattggatcgcgttttgaaggattctaactagacgtccataggcgtatcagacgtcatcgtcacatccagaagcttgtttgaggctctcttagtgtttttgcttgctggattatgatttccttggttcttggtttcgagagattggctctcatcgtgataggaggtagttgttgttgtctttgggtaagcagggggcacccttgatgaatctcttttgcaggagttccaggagaagatgtttcctaggtttcaaacctatttgtgtttgttctatgtttaagggattgccctctttcgaaactggtttgaaatttcttgctttgtaattctagttgtgatccttgtttccctttgttagggcctagttttcggggaagtttcgttttcctccggctcttgtctccggggactgtttcgttgtccgctggctttagcttcctttgtttgggcatttgtaatctcaccataatttcatatcatgcttttcaatgaaattcaggtgacaaaaaaaaaactaaatctttatatataacattgtctattttatggtagaaactccgtaaaagattgtaaaaattatgctaaagaaaaagatattctgttggaccaaaaaaacaaagaatgaagaaaagaaaatattctcaatgggccgttaggtagcaaaagcaaaaagcccattgcaactgtgaagaatagacgaagccttaaaagaacaccaattcgctactttactcttaaaataaactctccactaaaaaatatg

SEQ ID NO: 25409 - DNA, 3000 bp, Unknown; identical to SEQ ID NO: 25408
  misc_feature (1)..( 3000): 2750-1469P.txt file - cDNA_ID_2705740; gDNA_ID_2214683; Annot_ID_189296

SEQ ID NO: 25410 - DNA, 3003 bp, Unknown
  misc_feature (1)..( 3003): 2750-1469P.txt file - cDNA_ID_2705769; gDNA_ID_2214686; Annot_ID_136712
tgtggggagaagcagtaaggcactcaacctatatcatcaacagagtaggaacaagatctttgcagaaccaaacaccatatgaagtttttaagcaaagaaagccgaatgtagaacacttacgtgtatttggatgtattggttatgccaagattgaaggtccacatttgagaaagcttgatgataggtcaaagatgcttgtttatcttggaactgaaccaggctccaaagcatatcgtcttcttgatccaactaaccgcaaaattatcgtaagcagagatgtgtactttgatgaaaacatgagctagaagtggaacaattcagattctgaaactcgggacatctctggaacattctcacttaccttaggagaatttggaaacaatggaattcaagaaagtgatgatatagaaacagaaaaaaacggagaagaaagtgagaacagtcacgaagaagaaggagaaaacgaacacaatgaacaagaacagattgatgctgaagaaacacaaccctcacatgctactcctctgccaacattaagaagatcaacaagacaagttggaaaaccaaattatttggacgattatgtcttaatggcagagatcgaaggcgaacaagttctattggcaattaatgatgaaccatgggattttaaagaagcaaacaagttgaaagaatggagagatgcttgcaaagaagagatcctgtcaatagagaagaacaaaacttggagcttaattgatcttccagttagaagaaaagtcatagggttaaaatgggtttttaagatcaagcgaaattcagatggcagcataaacaagtacaaggcaaggttagtagcaaagggttatgttcagaggcatggtattgactacgatgaagtatttgctcatgtagctcgtattgaaacaattcgagtcatcattgccttagcagcatcaaacggatgggaagtacatcacttagacgtcaagaccgcttttctccatggggaactaagagaagatgtttatgttacacaacctgagggcttcacaaataaagacaatgaagggaaagtctacaaattacacaaggctctttatggtttaaaacaagcacctcgtgcttggaacactaagctgaacaaaattcttcaagaactgaattttgtaaagtgttctaaagaaccatcagtgtacagaagacaagaagaaaagaagcttctcattgtggctatttatgttgatgatttacttgtgacaggctctagcttggatctaatactctgtttcaagaaagatatggctggaaaattcgaaatgagtgatctgggacagctcacgtactaccttggcattgaagttctccatagaaagaatggcatcatattaagacaagagaggtatgcaatgaaaattatagaagaagctggaatgagtaactgcaacccggtcttaataccaatggcagcaggattagagctctgcaaagcacaagaagagaagtgcatcaccgaaagagactacagaagaatgattggatgtctgagatacatagtgcatactcggccggatctctcttattgcgttggtgtactaagcaggtatctacaacaaccgagggaatcacatggaaacgcactgaagcaagttctaaggtatctcaaaggaactatgtctcatggtctgtacctcaagagaggattcaagagcggattagtaggctatagtgatagtagtcatagtgcggatttggatgatggaaaaagcactgccggtcatatcttctatcttcatcaatgtcccattacatggtgttcacaaaaacaacaagtagtggctctttcatcttgtgaagcggagttcatggcagctactgaagcagccaagcaagccatatggttacaagacctattcgcagaagtgtgtgggacaacaagtgagaaggtgatgattcgagtggataacaagtcggcgattgctcttactaagaatcttgtctttcatggtaggagtaaacatattcatcgaaggtatcatttcataagagaatgtgttgagaataacttagtcgaagtggatcatgttcccggagttgagcaaagagctgacattctaaccaagccacttggaaggattaagttcagagagatgagagaactagtaggagttcagtgtgtgttggaagatgacttcaagcttaaaggggagtttgttgggataagcatgaagtcaataaattagggaataaaagttatgttttaaaataggattaagataaatctttaggagtaatctaaagatatgttaggagttatctacatcttattctattgtgtttgttatcatccctctcctatataagagttgccaaagttgtggtaaaccttaagagatttgagagagagattgaaagctttgttttgagttattttcaaagctaataaaaggagtgcttttatatttgatctaagtattcaaatctttaaagttgtggctaaacttcagtttgtgtttgcttttgtttatcaagattgttcttagactttttcgagttaaaaaacttgtgtgttggagtcatcatcgtgatcaatggaaaataaagttgagaaggagattacttgggtgattaaaaatttctcttctctgcaatctgcaacaatatattctgatatattcgttgttggtggctgcagatggtaagaagataaattgttttctaatatttttcgtctaatctacggtttacagataatattctttgattgctttcttttgtttttgcttgcaggcgttgtcaggccttccccaagggatataataaggctgattatctttctctgtatctcgacgttcctgataaagaatctttacctattggatgaagaagccacacaaaattttcttttactttagtaaataaaatttcggaaaaactctccaaacttaaaggttattggtctctatgcttgctaagagtatacctcatgtcatattttctggttttgttcagagataaaatatg

SEQ ID NO: 25411 - DNA, 3003 bp, Unknown
  misc_feature (1)..( 3003): 2750-1469P.txt file - cDNA_ID_2705789; gDNA_ID_2214687; Annot_ID_136719
tgtggttggctttgttgggtacccgaatgtggggaagagttcgacaatcaacgcattggtaggtcagaagcgaactggtgtcacatctacccccgggaaaacaaagcatttccagacattgataatctctgaggatctaatgctctgcgattgccctggtttagtcttcccttcattctcaagctcaagatatgaaatggttgcttctggagttcttccaatagaccggatgaccgagcaccttgaagctattaaggttgtggctgaacttgttcctcgacatgccattgaggatgtgtacaacatctctctacctaaacccaaatcctatgaacctcagtcccgcccacctcttgcctcagagcttctaagaacttactgcctctctcgtggttatgttgcctctagtggactacctgatgagactagagcagctaggcagattctgaaagattacattgaaggtaagcttccacattttgcaatgcctccagagataacccgagatgatgaaaacgagacagcggatgacactttgggagccgaaacaagagaaggttcacagactgagaagaaaggtgaagaagctcctagtcttggtcttgatcaagttctagatgatcttagctcgtttgatcttgcaaatggacttgtgtcttccaaaacgaaacagcacaagaagtcacataggaaacaatgattcggtcttgatggaacgccaattctgagagttttcctgaaaccgatcaacaaatgctcgaatatatgatacagttgtggatttttcttattgtagaaatcgtgataacattctaacagctgttgtttagatattatgtttgagcaaatactagtgatatcgataaagtttcaacttgatgctagtcaatatattgatgaagagtccttcgaagcaggtttggtagttgtaatatattgccattgagatattatagatcactcactcattgtgggtttgtttgttttctatttgtgggtttgtttgtttttaaatatgtgtaaaatcttggcctgttacattggctttataccataaataacaaaaaaaaaaaaaaaaaagatcactcattcatatgcaaagcaactcaaactacaattttcatttcccagacttttattgtattttttcaatttaggaatcagacttttgttttagacaaaaaaaaaaaagaataaacattttgtaacctttatattctccagcatcactcttgtactaaatcaatgcacatgcaaggttttctcaccattgttgatattttcattttttgctctatttcatagctttggactttggacaaattcaatagattcctcaagctttgtcacttcatctaaagtatgtcatcgccgtcttttaatgagcaaacaaacatatcagtaaagaagtcaacaatttatttgcaattggctcaaatttgagtagctcaactcttctaactcagaattttcctaggttcttcattgttttaaaaaaatttggcaaagggaaactttactgattaagctctttttgtagttaattacaaaccctctgaaatttaaattcatatataaaaaagtgtaacatccagattgtacgcaatgatgaatgagtttcattatttccattatattagtcatttttcttcatagattatttctaaagcttccaaaactgaaattggcggtttgtacgaagttaatctgaattgactaatgtcgtttctgttgtagatgacattcaatgcattagaaatcctcatttcattacgatttttcttcaccattcattgtatatttattcatgagcaatattgtttattccacttttatgtattgtaacatggatattattagcaatattttgatgatggagtttcatgtgttatattcatcaatgaacttaaaattgactgaattcttactttctagtaaatgtagttactgccatttaagaaccgaggacatgtgaccgaacttttcttctctacgtggttttatctagtctcaactctcaatttggatgatcaaaaccaatgtaaaagtcttatagcacttattggtgaccttaaattcgtaggtacattactagattctgtactgtaagatacatttctatatgttactgcctaataaattaaaacatttataaaaatacgatacaaacatttgaaagggtacgatgtcaaaaaaaaaaaaaaaaattttgaaagggtacaaactctgagaaagtgtgtcaaatacaaatagttttctaaaaagcgtatcaattatcatagtataaatcaccctttataaatcaccctaaattttcctagaaaacactacaatttgcaacatatgtctctcacaaatccaccattaggtatataaaataatcaacacaatattttaagctaactacacattaccaaatcagttcagtttcatgcgtattgtttgcattacataaatgatgaaacaatttcttagtacaagactatatatagcttcaatttcgttactcaaatcgaaatagataattgttttatttcctcaaataatttctgttgtttttatagtaattaagtaaatgataaaaatgatttaataaatgtaattatcttagcttaaagagagagagataaataaacaaagggcaagttttttgattgtttggtgttgagtgtctctctgtccttattcctcaacaaaaaaaaaaaaactgggaagaagaaagaacaaactcattttcaaattctccgaatctctctactccaattaacttttttccgggaagatctcaccggagaaaagctagctagggtttctccaccgtgaagattctagaagcgagaatttggaatttgctaattaagaagatgtgttacgatctttcttaattaaaaaagcattgaaattgacgaatttagggttgtgaaaaatatggatttggattcttcaatggtaccagagaatgatcaagatcctattgctacgtctgagaatcaatctcctatg

SEQ ID NO: 25412 - DNA, 3000 bp, Unknown; identical to SEQ ID NO: 13991
  misc_feature (1)..( 3000): 2750-1469P.txt file - cDNA_ID_2705793; gDNA_ID_2214688; Annot_ID_136720

SEQ ID NO: 25413 - DNA, 3003 bp, Unknown
  misc_feature (1)..( 3003): 2750-1469P.txt file - cDNA_ID_2705826; gDNA_ID_2214692; Annot_ID_136740
attttgcactgtggcgggattttttcgtgaaggagcgaaataatttgacacgtatgggaaagaagagcaacggacggaataatggattgtgctcttcaaatcctgaccgtccatttgacacgtgtacctgagcttgcagatctcgcccttaattacattcataaagttcttcaccaattgacgcatttgctttctaataaaccccaaatattgtttgaccagaagagagaaagataggaaaactcgaaccgggtttgaccagatcaattagatttaaccggtaccggttatttacattttttttcccctgtaaaatattcccctcccctcttttctctcatcgctcgctgcctttctctttcacagtcagcgctcttgaacggagaatctcagtcgcgccgtcaactttttgttgagaagagatatcatctgttttcgatccaaagaatagaaagcttggattccgaaatctccctttttgcttccccaattcgttttcctttacaagctcggcgcttgatctcgctatctctcaggtaggatcgagctatatacaacagtttctcaattttactagatataattgctttagattttcaagtgctcttgcgtttctggggttttgttaagattggagtttttgtttcttattctcgaaatctgttgattgattcgtttgatccatcaatgtttgtttagaaattcaaaaagcatgcaaatttgcagattctttgtttgccttgtgcgaattctatttccgtattccgtatcgaaactaaaaccctgactaggttatgtttcaagtgtgttttttagttttctatttgagggatattttaactaactccataagtttggggttttgtgaacagccaaaagtcttttctttcgtgacatcagtttcttggtaaaggaattcgatttcttcacctaatagagaatttattttagaactttggactgatatgttgaacattgatgctgatttggcagaaatggatcgtttgatatgatacgtatctacatttgtagaactgattttttcacctagaatttgcagcaagtaagactagaatgaataaaggggaagcttgtattatttgttgttaaatgagttgttcaaagagctttgtttgatatcattgttgcttctttgttacatgtggatagtttaggatgctacttgttaagtagtaagtactgttaaggtgtgtagaacttatatttcactgtgaaacgttggagtaggttgccgtttgtgccgttagtatatcttgttttcgccttttactgacaagacttatgaatgttttgctttcccgtagagagctgagagctgaggatattggaaatttggaaggtggaatctcaaatggctgaacttcctggtcaaataagacatataggcggtcgaatgagtcaactgctagagcagatatatgggttttcgagaagatctttgtttcgggtcatatctatgggtcctataccttgtcatattgcctttatcatggatggaaatcggagatatgcaaagaagtgtggtcttttagatgggtctggtcacaaagcggggttttctgcgcttatgtcgatgctgcaatactgctacgagctgggtatcaagtatgtaacgatatacgcatttagcatagataattttagaagaaaacctgaggaggttgagtctgtaatggatttgatgctggaaaagataaagtctttgcttgaaaaagagagtattgtgcatcagtatgggattcgggtctattttatcggtaacttagcgcttctaaatgaccaagtgagagctgctgcagaaaaagtcatgaaagccacagctaagaatagtcgggtagtgcttctcatttgcattgcctataactcgacagatgagatcgtacaagctgtcaagaaatcttgtattaacaagtcagacaatattgaagcatctaattataaacacgaggatagcgatagtgatatagaaggaacagatatggagaaccaagagaagaagatacagttggtggatattgaggagaatatgcagatgagcgtggcgccgaatcctgatatactcatcaggagttcaggagagacgaggctgagcaattttctcttatggcaaacaggtaatacccagctctgctctccggctgctctgtggcctgagattggtttgaggcatctgctctgggctatattgaacttccaaagaaatcattcatacttggaaaagaggaagaaacaattatgattgtcttgaaaggagactagtgaaggatatacaaaagctctcttctctatttggctttgtaatgtgatgtgatgctcttgtggtatactatcaaaaggaaacttgggattacatagaacaagcaatgtattttacacacgaactcatttgagtttttctttatgaatccttaaccaaaactccaaaagtcctctctaaagacatcttacttcctgttctgtcttgtaagatccagaatcttaacatttgtgtttcacgagtgtttttttctcaaaccaaaattaaaccaataaatttagttcgttaatggttcagattgattgcatatatcatggaatttcggtttagcgatattaaaacaaggaaaaccgggattggtatccaaaaccgtaccgggcgtcaagtctggttcggtaggttagagtacacgcttgtggcgaacttgcaattggaaacctaaaaagtcgcgactatgctctctgcaaagatggttctacttttggcttaaagagcaatgttttcgagtctttgccatggcgggtttcattaaacgcaaaggcaacgtattttttcattctcaagccttagctgctgtctactccaaggtgggtcattcctcctctttggattctttcgtttagtagattcatttctctggggcaattgatcgaacacttaatctgctggtttcttcttgtctctagttgcagagaagtaattgcacgcttgctgagggattcatg

SEQ ID NO: 25414 - DNA, 3000 bp, Unknown; identical to SEQ ID NO: 14019
  misc_feature (1)..( 3000): 2750-1469P.txt file - cDNA_ID_2705830; gDNA_ID_2214692; Annot_ID_136737

SEQ ID NO: 25415 - DNA, 3003 bp, Unknown
  misc_feature (1)..( 3003): 2750-1469P.txt file - cDNA_ID_2705834; gDNA_ID_2214692; Annot_ID_136732
gatatcataagttctaatgagtaatgattggtcaatttatcttgttgtaaattgttcaatatacgtgacgtggtccacttctatcctccaagactccagctacacaaagacacagtaacacaaacgcatacgcatatgcatgtgtcgtgtctttgtgtgtgtatgttgtatatattaatatattatctaaactataccattttcatgaaatttataatatattttctcaaatgatttaagaagataatgatatgtttacgagagtaaaaaaattaatgatcttccagtaatcaataaatatagtaaattgatatcagatcttgttgccaactatagaattgaacaaaatacaaaactgtcatcgccatgttatattatcgtaaagccagcttatatatccttccccattggtgttttttatttttactttgtttggtgaatattaaagcgcttaaaacacgttccaacagaataattgtttgacctttttagtttatctgatttttaatatcaattcttaaaaacatctcctcaatctttgcgtaatttgtcttttcctaatgcatcggatagagatagattcttctgagttcttgcatggttcaggtactttctattcgtttcttaatacgtgttctttcttttcggatgaaacataattcatcgatcgatcgatatgtataagtctgataaaaacttgatcgttgcttttgatcattactagtaaaacatctcaataaatcacataacatgtttcacgttttgaatcggtttttcagccttgttgtttcagatttgattgatacgaattttaatcattattattgcaaaaattcatatttaaatttgagatgtttttataatatacatgcttaagattcataccaataattaagttcaataatctagatatggtttagaaactttagatatatagagatgctgatgacatgatgaaggtgatgatcgattgatcgtttattcatttgtcatatatatgagttgtaggaaaaacatcttatgaatttagatccattaaatacgcttatatgcatgtgtgcatgttcaatgtgtagataagttctattctgaataaattgacgaataacaattattgatttcaatttcgttttgagtgtgcatgtcatgtgtctgagatatgggaaaatgaaaaggaaacttccctatatataccgaaacaatagactatcaactttgatctatatatacaaattgtagaaaagccttggatctaactgatatttccttatgtgagatacacattaatgtcttttgttttgcttcttaagattaacgtgttatatattatctctttattttaaaacatgttgaccaaaataatttatgtcttacgtgttgcatatgaaatagatccaatcgaatcagcctcccatatcttgaatctttgatatttggggtctaccattgatatgatttactttgttaattacttgatgttaatatttcattttttcttaagaaattgtaaactaattctttacatatatgcatggcaattaacttagtcaacaggttcaacattttataatgtatccagaatcccagatagtacctgtcctgataaaaccttttcaggatctcatgatatttcttaaaatataacagcttagtgattttaaataacataaaaattagccgacaaaaagaaaatatcataatataattctgaaaataactaataatttactcttttcaagtaattattcaaaataaatttagaaaactaattcaatgtatttcctcattgtcactcttttatttccctctacaaaattatatatatgaagtagttttttttaaaatagagccccataactaacattaggggtccatatatttgcattgtaatttataaacacgtgtagaacattataattatttaaaataaaatttagaacaataacttaatgtatttcctcctcgttagttttcctttttttccctctacaaaattacatatatggaatagttgttctttacttcttttaagtagagccccttaactaacacattaggggtccatatatttgcattataatttataaacacgtgtagaacctggcactgaagtctgatgaatatatatccatttgttttcacaactaccctagctttttgtatcatcggttactttttttttatcacaagaaatttctcgattttgattttgatttttcaatgttgtgaagttgagaagttcaacatgttttggacagatgtttttgaacagtaaattagtattttaaacatgtgaatctatttgcaaacgtaatgacgtgtcgtctgaccatttcttgaatgttagttaattttttagctctagttttgattaatctaccaattaggtcattcatttcagtttaagtcaaatcaacaattaggctcgtcctaacgttttcatttagccaaaacaaaaaaaaagatttcaacagtataaataattcgtccttatcaaaaaattaataaataaaaaagatatacatcattacttacgtaattgtttgtattttgatagttttcgataatttctatgtgacggtttttaaaataaaaataaatgttgaataacaaaaaatagtagtacaatagaatactgaattggtttgtgtagggtcaaaccaacaaatatggaaagaaaagtattatttagttacaacgtgaaaacacaggttcgtgctactactccaatgatacgggtctcaaaatactcaaaactctggcatgtctcaattccacaaattattgtttaatcattctgcttcttctgtaagtttatatataaatgtgtatatactcaacgtaaatatttgcttacctcgtatattttctctcttctcaggcttattaattctctgcagataactgcagaagaaagaagaaagaagaagaagaagagattagagcttgagccataatatataatcccttgatcattagtctaaagaaccacataaaaagatg

SEQ ID NO: 25416 - DNA, 3003 bp, Unknown; identical to SEQ ID NO: 25415
  misc_feature (1)..( 3003): 2750-1469P.txt file - cDNA_ID_2705834; gDNA_ID_2214692; Annot_ID_189413

SEQ ID NO: 25417 - DNA, 3003 bp, Unknown
  misc_feature (1)..( 3003): 2750-1469P.txt file - cDNA_ID_2705845; gDNA_ID_2214693; Annot_ID_136761
attcttatcctctgtaggcgataagattgtgaagatctgtgaaggcaagtctcgaaagttgtcacctttatgtttcctttggaatttgtcttgtctcgaaacaaagagatttgattgattgttaaaatctggattcgattttgtattttgcagagtatggctactttgaaagaaatgaggtcagtaatatcaaagctaaaaacattcagggtctggaactagagctgacatcagagcgtcttcaggaatatgacttcaactctatcaaatccacttgtttcaataaagaggtgcgtgcgtgcgtgttataagtaacattgacgaaaattttcacgattttgcttgcttgcttactcttttactcgttattggtgttagattgggatcttgtataagcttaagtatggggaaataggtgctaagttgatatccaaatcatcccgtcctatggctcagttcactggtactgttagacacctcggtaaactctctggtttggaactcacttccatgagtattgttgacattaacggacacaagctcgataagtggcatgttgggctcactctcattgcagggaacgcctctgtgcagattagacggttagtagttttaaaacgttgattcctccacctcttatagaacaataagcattgtgtggtgaattctgaatatgtttcctctttgcagagaggctgatagatacgttgtttcaacccgccatcatattcacccgagatttgtgtcgctcactgagctgagatcactgtatttctggcgcatatcactcccgtccactgtggcgatgggattcgagttcgagcttaaccctaggataactcttgaagtgatggtctccgaatcccatcttcaacctccgagtgttgcactccaatatcaatgttcaagggctcagtgtctcattagagtttacggtgatgtctactccaaaaaaaatggtgtatcttttgcgtttcgtccttcttctttcgtctagttactcggatttttaccctcaaattactttttttttacttgttggcctcggctagttattgggccaattgtttctatagtgggccgtgtattacagacagacacacctaaacgacgacgggtcgagaggataaataaatgggaatattctcggaaacattgatgtgattccaaatattttattcccaatttggtattcttcttcatcatagctcgaaaccctaactccccacttccatcgaccatcgacatgttttaatcttagaattgtgaccaataaggtgatggatacatttcaaggcaagtccgaaggcctggaaccacaattggcatcgaaggatcttcaggcgtcgaagccgataatttcatcatcttcttcgttatcagagcgtcgatacaagagtggtacttttcttttctccaattctcgatcatacttgaatcatatgtgtttcgttttgctccgaatttctaaatcaatcagaattacgtggttatgtatggctgatttgttagaattattagtgtagctatagaccaagattttttcttactcaagagttgtgattttctctcgcaggcagaaagatacctattattgctattgaatgccgtagatgcttatcagtctcttctccggtagttattgccgacccttgcatgcacagattctgcggttaggttcttctttactctttctttaacccactagctaatgtgtgtgactgaaaacaatcagggtgtttagctttgtcttattttaacacaaacccctgattctggactaacttattaccctaacaaaattgtctttttttctttcttaatgcaacagtgaaatgtatcttattcctctggggacgccagaaacgtagagaaccttgtgtatgcccccttgatggagaaaagatgatttgcttacatcctcctatgaacattgccgaatctgcggctgaggagattactggccttgtcgacgtttataatcctatgttcaatccacgccattacatggtaattaatcagttcacctcctaatcaattgaacatgctctaatattcttagtaagggagtagttattaatatcttttctaactctctgcttacgaacattatgttgtttcttctttgaacggaaaatcattatgcatttttaggacatggccgagacacaacttggtaagttccttgatatatgctttatgtatagatgtttttagactttgttttgttgaacctaactcttttagttacacgttttttttgtagcgcggacatttacacggttttactgtttggatctcactctcctactcatgggggcacttgcgtactgcttcaagtgttctaaagcctcccgcacttagaagtctctattttaattctcttggaacgactttatgagtatgttataattaaactattttaatcctgaattctggttatggatctgtgtcattttggtcaaactcatcatgtctttttctccgatatccatccattcctaaccttgttactattatctatcagtctttttgataattaatacaaatgttgatatgtagagtacgacgaatcgtaaattgtaataattgtttcgttttgctgtaatttggctctatctttatacattagaagagataatcaaaaaagagataaaaataaagccaaaataaatgtgttttttttgcgctggtcaaagaaaaaaaaagaagtccaaatgacagttatacccctaataacgcaccatgagaactcagacgattaagggtgtaatagtaataacaagaagtgagtctccggtctgaaactaattaaggagacggcaagagaaacaagacatacgtttgctgtcccacgttgatcttgttgtttactctctctctctcctccatcggcgacgaccaccggagatcagcgtcaccgtaccaaaacatcatttaccttcttttagatttgttgttttttaatcagttgaatcggaataaaatatcgcatcagagatg

SEQ ID NO: 25418 - DNA, 3003 bp, Unknown; identical to SEQ ID NO: 25417
  misc_feature (1)..( 3003): 2750-1469P.txt file - cDNA_ID_2705845; gDNA_ID_2214693; Annot_ID_189451

SEQ ID NO: 25419 - DNA, 3000 bp, Unknown; identical to SEQ ID NO: 14038
  misc_feature (1)..( 3000): 2750-1469P.txt file - cDNA_ID_2705859; gDNA_ID_2214694; Annot_ID_136766

SEQ ID NO: 25420 - DNA, 3003 bp, Unknown
  misc_feature (1)..( 3003): 2750-1469P.txt file - cDNA_ID_2705869; gDNA_ID_2214694; Annot_ID_136771
gatttttttgatgaataaaattttgcattcattcaaaaaaaaataaaaaaaaaaaataaaaccgaaaaccctaaaatccgaaaacaccaagaaacgacaccactccctatgaactggactctagtaaccaataaaacgacagaggaaagagcgttttggtagacgacccaagtgagataaaaaggcccaactgaatatcgttaagggccaagaataactgcaaaagacgaaaaagaatctgttcactctctctctctctggctcgctcgctctcaatctttccgatttggttgggttcttctccaactccaagtctctgcgaaaatggcggcttcggtgcaacctgcatgcttagacctccacttctccggaaagcatccaccgcttcttaaacacaacgctattatcgtccgctgcgtttcttctccaaatgtaattcccgaagctgactccatctctggtccgcctgatatcatcaatacgaaccgtgaccagcgcaaagtggttcgtatcgcttgggagaagttggttcgatggtctcgttctttgcgcgctaaagctaaaaccgatgttcttgagcgtactcgcaaggttttattatcttcactttctttcttaatttcgtttgcgttttggagaatttgaaagaatctgggggtttttaggttgttgttcttggtggaggttcgtttggtactgcaatggctgctcatgtagctagaaggaaagagggattagaggttaatatgcttgttcgtgactcttttgtttgtcaatctatcaacgagaaccaccataattggtactttatagcgtttgatttttatccaaacacaattcataattcttgaagacttcgcagtgataaggttgattctgttgccagtaagtattttcctgagcacaagttacctgagaatgtgattgctacaactgatgcgaaagctgcattgcttgatgctgattactgccttcatgccgtgcctgtgcaggtttaagcacattgagtatttgtttttagttttgttgatttgtttctatgttctgctgattaatgtggggttgttgttgcagtttagctcttcgtttctagagggaattgccgattatgtcgatccaggattgccttttatatctcttagcaaaggtctggagcttaatactcttaggatgatgtctcagatcattcccattgcgcttaagaatccccggcaaccttttgttgctctttctggcccgtcatttgctctggagctgatgaacaatttaccaactggtttgtttgactcttgttcttcttttgtttaaatcgaatagcattatagttttctattgctgaatgatgagaaatgttttcttttggtatgttattttgcttgcagcaatggtggttgcctcaaaagataagaaattggccaatgctgttcagcagcttcttgcttctagttacttgagaataaatacttccaggtacaacatttcaaaacaagactccattggtttcaatgatttctggatgcatttccctgctgggctatgataatatccatttgcctacctgcttgagagtttattcatgtcttgtatatgtgtggtgttagtgactgagctctaatggtcaacttcttaattcctcgagggagttttgtgcactcagcttgtaacctctgatcatttcagtgatgttacaggcgtggaaatcgccggtgccctgaagaatgttctagcaatagctgcaggaattgttgatggaatgaatctcggtaacaactctatggcagctcttgtgtcccaaggttgttcagagataagatggttagccacaaaggtagtaagtttaatttgtgtctataattgcttcatagaaagtggttttttcggtccatgcaactcactacaatgattactaaatcctgtgtttattgcatttctgcgtttttctgtcttgtatgtgagaagatgggtgcaaagccaacaaccattactggtttatcaggaactggggacataatgcttacgtgttttgtaaatctttcaagaaaccgaacagttggagtcaggttagggtcaggggagacactagatgacatactaacctctatgaatcaggtgtgtttctcattggtgtcgctcttcatatggtaaaacaaaaaggattggttgaatctgaaacccatgaatcaaataacaattgctgcgcaggttgcagaaggtgtagcaacagccggggcagtgatagcattagcacagaaatacaatgtgaaactgccggttttgacagccgtagctaagataatagataatgaactgaccccgactaaggctgttcttgagctcatgaaccttcctcaggttgattataggtttcacagattcccatttcgactcggctactcttctggtatttttatttgactctgttctgtataattctggttttgcagattgaagaagtatgaggtagaacaatcgttttgaggaccacatattcaaagagatggctttaaggcggcaagagctttgcattcgtttagagatagctaacgatagagatgattcgaagtgagttttgtaatcgatttttaggcctgaatctcatgaatgtgaattgttcataaacattttacaaaatctctgtaaatttttctcttacatctataaaaatgatgtttcagtatcttgtttagagtggagtgtggaatttggaataggcttcgtatgatcttcagactttcggagccatggatataagtatgggtgtttcaaattcgggtacacccaaccggtttaatccaaacttaaaccgtaaaaagccgatcaaaaaaataaacaatgcgcatgggctttgaagttgagaggcccacaatttttgaaggctcagacgtaaacggtgacgtataggaggcaaaacccttgcaattgcagtgtcgtcgtcgttgagtagtcgaagacggagggaaagaaacagagaacttgtttgtttcgtcgaagaataagatgatg

SEQ ID NO: 25421 - DNA, 3000 bp, Unknown; identical to SEQ ID NO: 14041
  misc_feature (1)..( 3000): 2750-1469P.txt file - cDNA_ID_2705877; gDNA_ID_2214694; Annot_ID_136774

SEQ ID NO: 25422 - DNA, 3000 bp, Unknown; identical to SEQ ID NO: 14051
  misc_feature (1)..( 3000): 2750-1469P.txt file - cDNA_ID_2705937; gDNA_ID_2214695; Annot_ID_136793

SEQ ID NO: 25423 - DNA, 3003 bp, Unknown
  misc_feature (1)..( 3003): 2750-1469P.txt file - cDNA_ID_2705949; gDNA_ID_2214695; Annot_ID_136797
aacgatgttgatttgaagcaggagaggttaattccgatcatcgtcgccgccattggagctgaggaagccgagcaaattattttatccgttccagattttttttttattgttctttaatataaaattgattttacaatttttaggttgactttttcagtcaactcaattttcacaaaatgttacaaaacaactctcttaattatattcgaatgcacacacacacatatcaaatcaataaccaaaaaacattccattctcatagggtttggttggttacactcacaagttattgaatatccctattcctaaacgcccgcccacggaaaacagcgaacccaagagcatgcccgaaaatcgcggctaggaaaacaccaccgttgaaggaaacaacagccagaatcactaggtagctaaagccggacttgacggtatacatagccgtgcgaaatgcaactttagcaagcttatcggcaccctgtttgatggatgacgcgtcagagcaccgagcaagccactcagctaagaacgccagaaagaagacgaagataagtgcgagtgcatacatcccacggtcagaaccaggccagcctgagaagagcacttggcagttgtaaccccaatagaatgttgggtgtaacagtgacggtctatgtggcgtttgcgtttgcgttgtggtggtggtgttccaagcctctactacgacaacgtttttgctcgacaacatctcctttaatttggtgtaaaaagagaattgggatgtcgttgtcgtagtggaaataggagactcgctagtctttgcctataaaaagtgtttcgtcttgagaggaagagactggtcctactaaattatatgctatgttcatgttatgaagcaaactcaagatttgattgtcggatttttctttcgaaaagctacaccatgtccatcaataaactatttttggccgtatatttgtaatcaaaattcgtttttaaacgtatatataaatacattgatgcacatatcataagctaagctagctaactaaaagtaaagtatcttatggtttaatatgtttttttgtctacgttagaatattttctttgcttttttatataaattttatcacaagctattgcaagcaataataaaaatattaaataaaatatgctaataaaaaccagtaattttattttgattcacttaacaagtaaattagttatttccccaagcttgttttcaaataatcatcaatctattctaggctatctagtggttaatttgtttttagactagggaacaatcgatcatatgattagtcgatatacgaaattttttgattatgtcaacaaaaagtgacataaaattttcagtgataaaggtgagctagcccatgttacaagagctaaatactaatccgatcccctcgattcaacagaacatttttaaacttatccaatttattattatatgctttacgtcaagtttgcgttcttccacgagagaagccttaacacatgatggaagagtgtaatgttgcccatgccaattgccaagaaacaaacaactatgcgtctatgcttatggcgggcaccgactaggccacgttctctatttcacaagtttaaccgcgaacacacaaaaaacaaacaaccaaaaaaaaaaaaaaaaaaaaaacttaagattatgagtttgaagacttggatgcacgaagcatagcaacgttgaaggtgaggagaacgatctttaatgggtatagtccactttccatcatctaacctttgtttatacggatattccaactcaagtataatccactttaaacttttgtgatgagtgaaaactatttcaaaactacactttgctttttttatgcatttcaaatttcactttattaatgtaaagtgtataaatatttgaataattggttttgaatctagatcttaatgtcaaggcacctataaagagaaaacatcaattcagttgcaattaagggcatgtagctatatacatttttttgttcttcagccgaaacagtacttcaataatgattcaaaacacacacacaaaaaaaaaatagatagcgaaacagttatatcttagccggaccaaattttcctatgaaatcactgtcagctttcttactcattacctcatgcggcactacctttggaccaccccgatttgataatcacatccaatagatttcaccacgacaaggtactcaaatcctctaactaaatgtaagaggaagaagatacaattaccaaattcagtaaactagagaaaacttgcactaaaattattatttctataagaaatgttttaaatattttaatttattaaattagagtaaaaatggatatttaacggaagagagagtggaataattaataaagaattaaatccagtagtaacagaaaactcaagtgtttggacttcagtggcagttttaagtactttgcttcggtcagaatccttcaaacactgtttcttcatctcccttcgtcttctaccttttgatttcgcgccaccacgctccaaccttttcgttttcctctcactgctttctccgatctgcctgagtttctccgtaagtggtccctaattcccactttttcctctctctggtttggtttggagtgacaaaaagaaaagggaaagttacaatttcgttttcctttctctttcttctttggtgatcccattgctaaaatttgctgatttccttgcaaaggtttctgattctcctaagttttagttagatctgtgatctactgatatcctctagagcctcaattcttcaagagactgtttagcttttgctaagaattgagtatgaagtactgaattgtgtaattccaatgaattctctagtgatatttttatgcttaaactttatgtctttgttattgcagagtggttagtgtaaaggtggatgaagaaactaagatttggtttagtccctgaatgcagtatagagtcattgctttgaggttgctggtaattattctaccactatg

SEQ ID NO: 25424 - DNA, 3003 bp, Unknown; identical to SEQ ID NO: 25423
  misc_feature (1)..( 3003): 2750-1469P.txt file - cDNA_ID_2705949; gDNA_ID_2214695; Annot_ID_189505

SEQ ID NO: 25425 - DNA, 3003 bp, Unknown
  misc_feature (1)..( 3003): 2750-1469P.txt file - cDNA_ID_2705965; gDNA_ID_2214695; Annot_ID_136803
tcgttttatgtctgtgtttgtgtaaatttttatatagtacagatttatgtctgtttgtgtttatggccttgtggggattttgctaattatatgctttttttggttgattttattacattctttgatttatttattagtacttcccaaatatggtacaatagaatattttcaagtttaagcatctcatatactgtatatctggattttaaaactttgggtatagataataacactagtcataaatgttcacgaatcattcataagccagtgacatatttgctcaatcggagaaagtgaacggaaaaggttacaggataggccggtgatggaagagaggcaatctccctcagcgtccataggttcacacagagatagagagtgtatattgttttctacgattagagcaactatatatatattacccaattaaaagtaaagttataacttatataagttctaacttacataagttctaacttctaacctatcccacaacaaaatggtttgtagtttatacccgatccactaacactctctcgcccatgtacacctctagatcacggccacacatgtcgttcgtttaccctttaattattattttgttatttagaaaaatgaacaatgcaacttagttgctatcattacatgttttaaaatgtttattatctttgtctttaaaatttttagctaatttcttacactagaaactgaaaaacgtacaaattaacacttgatcaagatgtaacatgtgggccaaaccttagatttgccgtcaaatatattggacacgtaacccctaaccacatacctcctatcacctgctaccacgtggattcattccaaacactttccggatctcaagccggtcggcaaagagcaccagcgtgaaattcgtcttctgcaccttcttcgtgccttgatggccgttggatccgaatcagacggccgatacacgatctcccttgatcttacatgtgaacttgtcatttgcgttaagtcaagtaccaaatcatttgtaaatatgtcggacgaggtacaaaaatgtgttgttatacaacaaaatatttaaaactcatataaaataaaggtatacaaatgtgaagagtattgcaaatagatttagctggttagtgatgttttgaacgtcatggatattgtcgtagtatgtgtttataagttgatcgttgtctatgtttcaatgtaaaaacagatttttggatgtaataaattagaaatgacaatcggttttaaacttcaattttctgataagtggttcattgaaatactcaaagttgatgatttatttttcctcgtttagaacttgatgatcttcgcaaagatcttaatcataatataattagattttgtttgtgagtaatccagtcatatatagaattaaacactagcattgtatgtttaaggcaaaattgcaattacaataagattcggtttcatatcaaatctcttgtttatggaacatgtatgtgtcttttttttttaagaagtttttttgaatagaggtttggtgatagatatggtcctttttttttaagaaagggagggtataacgatataaatatattcttcttccaaaaaagagtgaagggcaacaaatacaagaagaattatgttgaaatcaggcgttaattaaaaacataaaattcagatgtgtattcatgctgcattgaaattatttatatcgaaaatgataattgtagtaggagtagaataacaaagacatacacaagtgcaactcggtgtaattagataagatcactgctttgcttctttgtaccttcgatcatgttcttgtataatcaagattcgtatagaagctaatatattcacatgtttttgttcttctaattatgaagttgaaccatctattattgtagttggggattaatggacgatttgaaagaatcaaccgaaactcactagatcgtgtatttgtgtcttggttttatgttttatctttttaaaaatttctatactgaatctggttttcttagcagcttaaatttttaattaatatcagaatgagatcatgataaaacttttcacaaaattgttgatcttgtattagagaacaaattgaacaaccatgagaatgaatttcatgagtcacacacatcttcacattatctagatggaaacaagtatacttactagaaaattcaaatggagccacctatcaaataaatcccctgttagataactcatgatcaagatattcatgatcaagaaattatctactcgattttctgttttagctcttttgataaacactaatttttaagtgttttatattcctcacacacatattcaccaatagattagtcattaatctcaagttaacacacgtacctttatattcaatagacctaagtcttgtttctgacctcaaactgttggtgccagactcccacttccatgttcgaacttctttacattctttaagtcaggttattttttggattccaactgtagtgacaatccatacattccatggctaccaaacttatcttgattcacattatgctaagaagctaaaacatacaaaaagaaccgaaattgtcgtgagtttttttaatacgatagggtattaatgtattcttaacaacgttatggtcttgagaaataaaatatgcaaatctcgggtagggttatttggattagtgaaatttgggattttcttaatttaaggctaaaaactatgaaatttagagatttatgacagttaataaatacgaataacggtgttcgttgcaattttatgtggtacttatttgtttttaaaaaaaaagtttagtactaaattgttcgatttcgaaagttaaatatatttttgaaagttataaaggaagaaaggatttcttagcaaatttccgttatttaagttggagagaaaaggtttaactcaaaatatcgcaaaaccctaacaaaaaattttcattcttcctccactctctcaattccaaaacactgcgccgggaagacatg

SEQ ID NO: 25426 - DNA, 3000 bp, Unknown; identical to SEQ ID NO: 14056
  misc_feature (1)..( 3000): 2750-1469P.txt file - cDNA_ID_2705969; gDNA_ID_2214695; Annot_ID_136804

SEQ ID NO: 25427 - DNA, 3000 bp, Unknown; identical to SEQ ID NO: 14056
  misc_feature (1)..( 3000): 2750-1469P.txt file - cDNA_ID_2705969; gDNA_ID_2214695; Annot_ID_189513

SEQ ID NO: 25428 - DNA, 3003 bp, Unknown
  misc_feature (1)..( 3003): 2750-1469P.txt file - cDNA_ID_2705971; gDNA_ID_2214695; Annot_ID_136805
agttgggcaaggaagctttcccttaccgttacagttggtgcatctgcggagaaaagagagttttctgtaattaaaaccacacttttcattttgcaaccatcaaagtataagtagagttcttgatctgaactcacattgtgtcggacccatctttatgagcaaccaagcctcttccatagcaagtggaacacttcatcatctgattctccttgtaaaatcctggctctccatcagcattgcatgttggacatactacatctcctcttccggtgcaacctgtggatcagttaaaccaagtctcatcagtatttacaacattctgattgtcctaatggtcatatgtacattacatttgatacctgtgcacttctcaacagtctcagaattaggaaccaggacttgagtttctttatacgggacaaacagagtaggaaactgcggtctcaggtccagttcccataaccccggttcagatccatgtttctttccattgaattcaccaccagtgaaaggcacagtctgtgtcaaagcttccctctcctcaatgaaagtatcaagagttccgacataaacattgcagtcttcaacagcatgaatcttccatgtacgagcaggacggcttccccaacagcaacgatgaccaatatgatcaataagcagctctcttatttcaatctcatcaagaaactgcctgtaagaaattacataacgttcaacataagttaagaaagtgagggctaacaacagcaataagggaaaaattaggaaccattatcactagaattacctttgttgcaattcatgacctgctccagatgcacttggataaccaatagcttgagctgttaaatgccaagaagaaatcagaaatttgtataaaaccattaagaagcaaagagagaagattataggaaatgaatcaatgatgaaactttcacatttggaagatcaaaaatcaaaatctagagaaaacagcatgtagatcacttccactacgaatcaagactcgaataaaaagtctgctactttcaatggaagctgatcaaataactaaaggtgtcaatacaaaattttgaaggatcaggaaagatggaacgagacttacgaatgggtaacgaaacaggggtcttgataacgggaggataaagagacggaggatcagaagaaacagcagaagcggtacggatttcttcgacggtgacgacgccagctccggcgaaagatgggttacgagcagatgagctatttctctgcaggtattggtatgaatccaacctctcggattcattcgttttctctgatcctaaatgagcatttcgacaagacaattttatgaatcagaggactcaaaggagatatacacagaggagatgatatgttcgtctgaatttacctgaaagcagaggcttatccatggattacgaatctctctgtcttcccaattaaccaaagtagtggtttttcttagagagtaaggaaaaacccaggtcaattcgatcttcttctccgtgcgagagaaattttcattacaagaagaaacaagacaagaattcgagtttttcttatcgggtcgggtcagatccagatagaaccgggtcttcgtattgccacgtgtgaaacggttgaggatattttcacccactatataattggttgttataagtacgtaagctaaaaagagattcacgagggaaataattgcgcgttttggtccagtgtttaaggagagagagcaggtatatgaaaataacacttacacatggatgcttttaagtcctatcacatgcggcatatcggcaacaaaatctttttcatgttcgttcatttccaagttattcaatatgaacgattccaaaattttgtcgttgatttgattatagttgacctggaaaagatactatagatactaacgaacatcatctctgttggtctagtacatgtatttaggagtggacacaaaatggattttttttacttttttggtgctctgtccggattcaacatatatctagttttgtgtatcattttgattcattatggaataattggttacaagttacaacttcataatgaacaatttattataagacgtcgtcgactctactgatctcacctcacgtatgattaagcacaatattggtgtatgtttcttttttctagtgttgagatgtctttcatacaaatcccatgaatatgcatgtctcttgttctctcaatctctgctaacacaatttacgacctctatgttatattaccataaaaacattacaagagaaagaagaaaaatttaattagttttcaaattaataaaaatttagacgttttaagaaaataataataatttacaggtcataaaaaaactgattgaagaaatatatttccagctctaaaacccaattcctaaatctatattcatttagaaaatatatatacatttggtatttaatattcttaaatggagtaagataataaatttatattgtaatattaaataccaaatatatatattttggtgtctttttaattaataaaaaaataacaaagacacttattctaaattaagaagagtcaattaacgaaataataaggaatgaaattctcaattatgaaaaacacctgtcacgaaagtaaacgggaaaaaaatcgcacgatagataattgcatcggtgctcagtgctctgtttatctcgttatataataatgttagagaaattggatgtgaatgcaatggggcggtttaatgtgaattgatgagtagacacaacaagagtttggtttggtaatggtagcaacaagccaagagcactaactaccgacaaccactcgcgtccacatttgaattttcctcaattcccccactcacgctttttagctctttctcaatctttcatggcggattatctctctctctctcacttctccttctcgtgtgattctgattctcctctctaagatccgtatctctcttactctcccttctcaagctcacttcaatcaaccatg

SEQ ID NO: 25429 - DNA, 3000 bp, Unknown; identical to SEQ ID NO: 14067
  misc_feature (1)..( 3000): 2750-1469P.txt file - cDNA_ID_2705975; gDNA_ID_2214695; Annot_ID_136806

SEQ ID NO: 25430 - DNA, 3003 bp, Unknown
  misc_feature (1)..( 3003): 2750-1469P.txt file - cDNA_ID_2705979; gDNA_ID_2214695; Annot_ID_136807
aacttacgtttggtcaaagaggagaatcgagcaaggtacgaatttatcgaccggacgaaggagtttggagatcggagcgaagacgaaacatcaagcaagccacgatcctattttcttcaaattaattacctttttcagaaaatatacttttttattctttttgataaataccatattttatggattttacattaatttggaacaattattttaatgatacatgtataattatttttttttaaactatgggttatttttttcaaaaaaataatgtgtggatgtttcaaaaaaaatcaaatttcataatgaaacaaacaaaaattcgaagaagataatacacattgtgttgagaacaaacaattattacacattgtcggattaaccatataaataccgaactttgccttttgatttggccaaaaccttaaagttaaggtaaaaccttcatagctgtccaacaatgttaataaatccatcttagagtttaaggtcattgacagaactttcagtaactttgtctcccaaagcactccttatgtgatacacatacactaatgggtaaaaaatttcaatttctctgaccatatcaataaatgtcaacggcagaggcaaaaaaaaaaaatttggtcaacgaagcaaatcatagtggtttctaccactgtaaagaagcctaacaacattcttgtttgtcttcccctttccccagcctcctcgaaattcacttccatactcttgaatcggtataaaacccggcccataccctcctcctcttccatgctagataaacaataccaaataactcaagttctgaatacagttactagaacaaaagaaacacctagtcttgcttacataagactcaaattcaaagggcgtttacctcgtgctcaggtatgtagacgatgataggctgtttacatagcttggagagaacctgttgaagcaaaacactgacattagatcatttctctatgatggcagttttaaatgcaggaaactcactagcagctcggactctcctccccagaaatcgtgtcttccaatccgctggcaaaagctgaagaaaaatgcttaacgtgataaggaaaaacaatgccatttagctgaaaagtggtaatgagtgtgaatgaattcttatgagttatgactcaccgtttcagagactcatccacagtgatagccactaaagcttctttgtacttctccctttccttggggtcattgcatataacctctttcacagccattcgtaactcatctgtgaaacaaaggcaagttttgccacacaaaaacatgatgaacaagagataaacattcaaatgtatagaccagagaaaccacaaaacatttttccaccaaaaaggctaacagaatgaaacaaaatccagttttgattccccaatctcagcaagcttaacacagttcaatctcttagatttcaaaaacacacaacaaaaatcaaaacaaggctatatgatcaaatatatagttacctgcatcatctctctctcgttgggggttaagagtaatacccttattaaaggccattcctttcacctaatttacattgaaaaatcacatcttttattcaggaaaccccaacaagaacacataaaaataacagaaactacattaccaatgctcgaaacagacatctcccatcccctttaactctatccacagcatacttctcaacctttttcgctgcaggagaccgattcctagagatgaatataagaatcaattcgcagattagcgtaaagggttttatcagagactcgattgttgaattcaataaacgagaaaacacacatcgaggaattgattctggcgaagaacacataactatttcccttcgttgtgcttatgaatgaagcagggagtgaagtggaagatattgaatctgacacagaagcagtaggagaagaaacaagctcgaatctagcgaagccatttctcagctgctctagaatgttatctgcgatattaatgaatgatagtgttagaaattaaacgagaacaaagcaataagggtgcagagcaatgaagtacttactgttggaagaagatttgagctccattgcaggggacggagataagggaggaattcgaattttgacttgaagaagcaaggaagaagactcagaaatgtagccatgaatgtgtaataagttaaatagttaaataactctacgataacacaaatccgttgtagtctagctggttaggatactcggctctcacccgagagacccgggttcgagtcccggcaacggagtttttttaatagtttttctttttttttgtcggccgtccgattaatccattaaacgacaccgtcacatataacctaaccccaccaaatccaccggaacatatccaaataagtgataggtgttaatctcacacgtaggaggagtcacgtgggcacgtgcgagagagcaaaggtctaaactttatggtttaacgaccaaccggaaagttctggcaattggcaaggaaggattcgaagctggttgtttcccaatctgcataagaaatatcgaaacacttccacacaaaatccacgcgctctctcacgctcactcactcgcataacacttgttccttcttctctcaatttcaaaaaacgacgatctcttcgatgctttctcttccttcctccttcatttccttctgactctgctcttcttcttcgtcttggatcttcgaatttgtctttgtgatttgaggtaaagtttaattctttgagctgggttttgttttgttgttgatgggtttcagagatttgcttgttttatttctgagacacgaaatgggcagtggaacaaatctgaccaatttgtgttcttcttcaattttatttaatctctcgtggattcagtgatcgacgattgcttttgatctaatttgtgttggttttggtttctgtcagtgttatagaataaagatctgtttggagtggatccattcaagtaattgaagaactcaacgcaaaaaatg

SEQ ID NO: 25431 - DNA, 3000 bp, Unknown; identical to SEQ ID NO: 14102
  misc_feature (1)..( 3000): 2750-1469P.txt file - cDNA_ID_2706032; gDNA_ID_2214700; Annot_ID_136844

SEQ ID NO: 25432 - DNA, 3000 bp, Unknown; identical to SEQ ID NO: 14101
  misc_feature (1)..( 3000): 2750-1469P.txt file - cDNA_ID_2706036; gDNA_ID_2214700; Annot_ID_136843

SEQ ID NO: 25433 - DNA, 3000 bp, Unknown; identical to SEQ ID NO: 14101
  misc_feature (1)..( 3000): 2750-1469P.txt file - cDNA_ID_2706036; gDNA_ID_2214700; Annot_ID_189629

SEQ ID NO: 25434 - DNA, 3000 bp, Unknown
  misc_feature (1)..( 3000): 2750-1469P.txt file - cDNA_ID_2706063; gDNA_ID_2214702; Annot_ID_136896
atgcgggaagtagggaactttgactacagttcacgtgtgaggtgatatttcactttaatcccggggattaaaacgttacattaatataattattatactacacctaatccatcccctcttcagaaatgcattattacactaatataattattaattataaattatagacggttcactcatttttatataaaaaatcaataaataaatatgtactctatcaaatatattaccctttaaaattaaaaatgtatgaaaattcgatttcaaagatgatttagttcttttaatataaaaatgcgtcgaatgatgatagtacgaaaaaaatagtttcagttattttagataaaattaattagtaaatattgctttgaactacacaatgcatggaatcaattaagtaatttgtaatgccaaaaacaaaacaattcatttatattgaaattatgctaattaacaatagttgatattcatagccacgttatgaatttttgtataatctgaattcagagttaatatataatctgaatattttttcatcaaaagaaaacaaattttttttataaaataaataagtaacgtatcaaagttaggaaacagagtttttgacagtcagttgataagatcctttgctttgaagttttaactctcgattcgatactaatattttaccttgttgcaatgtaatattttttttctttttcttgctgcaatgtttatggagtattcaagggaattaaagagaataaaacgctggtaaataattgtagttgaatgcaaagaaggtctagctaggtaggggctttgttagatcaaatcagatgtcaaaagagcataataaaaatgtaatatcaaatcacacaaatgtttctcaataaaaacatggtcctacagtcctactttctactgtttgactgtttccttcatcttgtcgctttaacgttatctttacccatgcttatattattttcttttatctacaaaacaacatttaatttgcacccatttccttactaaatataattataattaaaactagaaacctaaacaatgttctcacatagttaatttatcaccgcattattattattgatcatataataactcatcatttatagtttagcacaatgcaacatattacgtcttaaaaatatgtgaagttaagaataagttatcattaagtttggacatctgattgtccgtatagacaacttgttgtcactgtctacgctgccgtgtgcacttaatagttaaaaaccaacaaaatctatgtattgtaacaactggggggtaaaaagctatgtatagtaacataataatatcataacggaaccaaatcgatattgttgtgtttaaaaaggaactattggccttttccccaattaaagtagaaaattacgatcgcagtttagaagttatcacgaaaacaaatgagattaaagagtgtaaatagaaatctatgaagtgacaagaaagaaaaaatagaaagctaagagaaagagacaaacaaaaaaataggttcagaagagtgttgaccagaggaactgtggattcaccaacaagtgggacaaactttctcttacgtccaaaactgacacaacagtatattaactctttctcctcatcatgatgaatcatattcatatgacactcactccatgttcactctctgctctctctcaatatatatttctttttctatagcccaagatgttaatattgataaacctataatgatttagatctcttgtaatataagcgagatgttgcgaatgataaggataagatatatgaatctacaactagatctcatgttgcagtatcttgtagccttgcctagagtcgtaggtgagactctaaagaattttatgattaagaaaaaacaatttttatcataaactatactgtaataatatgaggtccttttcattcaaagtatatactgggattactatgtataaacttggacaaggccaatattaacatatctagcttgagtcttcaaaaaataagagattcttatttttcaatttgttaaccatataatatcatgttatcagatttcaaatatcaaaaataatgatatcgatcacctttgcatttgtttcaccaaattcgttttatcacaattagatgttcctttcaattgaaaataaacaatatacttaaggaacaaattaactgaattacagagaaaactagttcaagtttttttttttttttttttttaactagtttaagtttaatttgttttgtttttctcttttcaaagaacccatccataaccatacacatattatatagccattttattttgcgtttttcagtactttcactttttagatttttaagaacctttgaatttgtaatgtataaacataacttaaagattttttagtagcgacggtttcacctcgttagcctcaaaatcattcttgaattttgatatgataaatattcagtagtaaaaaccactatagtacaaaatctagtaatgtgtacttacttaaacgaagactgcagttattgaggtttttagagcctgtcatctataaaatatattatgtatcttaacagcaatgtgatatttgcaatagctgtggttgacatctagaaaattttaggggtgatttcttattttagaaaattttaggggtgacattaaaggacccattttaaagaaaacctaagcaaagatcatcacacaaaaagattatagctagtatcctcgggagatcaatcttgagatatatatttagattatcccaaatttttatgaccaggaaaatagaggataacccttgattttctgaatcatttctgtctcttcttctgaaattcaacattcgtttcctctccaatttacaaaacgttaaaacaaaaaatagaaacccaccaaaaaaaatataacaaaacccatcttcagatattggatcgtgttccttgtcttccaaacttcttggaacgtcataactaaagacaaaagagtaccgaccagatatg

SEQ ID NO: 25435 - DNA, 3000 bp, Unknown; identical to SEQ ID NO: 25434
  misc_feature (1)..( 3000): 2750-1469P.txt file - cDNA_ID_2706063; gDNA_ID_2214702; Annot_ID_189723

SEQ ID NO: 25436 - DNA, 3003 bp, Unknown
  misc_feature (1)..( 3003): 2750-1469P.txt file - cDNA_ID_2706080; gDNA_ID_2214702; Annot_ID_136883
cctcaatcgactgaccacccacaatagaagtcaccctaaaccctagataatgcgcaaacttaacagtttcctcctcaatctgctgagcaagctctctagtaggggccataacaacagcataaggcccctcagtctcattctcttcgctcatcggtggcaatctagagatgtaagctaacatgggtaaaacaaaagcagcagtcttaccagaaccagtctctgcaatgccgataacatcacgctgttgcagtccaagtggtatagctgccatttgaataggagaaggtttcttgtatccagctctctccacagctttcaaaagctcagaagtaagcttactctcttcccagctcctcatcggacgaggaatcctcgaacccttgtaagagatattgaaatcttctctgaaaatacgccaatccctttcagtcatctcctctaatctcttatcactccaatgcctgtcaaccctcatatcaaacgagtcataagtatcagcagcttcttctctcactctctgagcagcagcttcctctggtttctctacaataccatctttcttacgaatctcgtctcgcatctctttctcatgcttagccgcttgtttcttctgctcacgacggtccataccagcacgaaaccctctcccaaagagaagctgagcttcatgagggttttggtaaagaacgttcatatccctagaagtatcctcagtgttttcccaatcaaaagagaaacgaaacttctcgcttggcctaatgactctcttcttcggcttcttacctccaagatactgctctttaatggcgtcaagttccttctccttctctctctcaactaatttctcaacacgcgccttctccctagccttaacctcctcttccctctccttttctctatttctccgatccggttcacgatctcgttcacgacggtcacgctcacggtctctctctcgctctctatccctatccctgtctctatccctatcgcggtctcgatctcgccctctatctctctccctatctcggtcacgttctcggtctcggtcccgatctctatctcgatccttatcccgattggtatctccattggagacatcttccgtctcgggctcggggcgaccaagttgctcacgacggacacgttgctcggagatttgatcctggcggcgttttagggctaactcttcccgctgttttttggtgaggaagacaggcttcttagcaatggaggaatcgagagtattgacggaggtagatccgacgacttcgttgattgttcgcttcatcggtggttagctggagattattcgcttggtcgattagcaggaggggaaagcaaacaagacctagaacctttcttctcttcttctctcgctctgatttctttttcacttggattctctttttctacatttttccaaaaccccccaattctagcaaactctcaagggttttaggcccattagtttttcttttgcattccgaattcaaatctaattttgtttttaggcccattagtgttttttcagcggagattatgtagagtagttagattttctcttgggtgaagattacaaacccatttcaagggttagagaactcgcttgtagtagtgtggtgtgacacagttcattcatcattagggattaaaccaactacactaattctgtctttccaacatgaagttttctggtaatgcaaacgaaaccgattatcttcgacatcaatgttcagataaagttgaaaactgatataatggttgctaaggagacgacaaaatgttttttgtggaagcagagaaactaaaacctgattcgttctaattgatgctctcaaaacataaccctgcttaaatgctgatgttcctaaactcaaccctgctaaatatgctaattcatcgtataatctatacatatcacctaatcttagttaagcaattaccaaagataatgcttcaccccaaggccattgcaagtcaatatgagctccttgtactcattcaatagttcctgcaacagaagatacacagggatttatcaaactcaaaagctttggaagtagtttctctctcgaatgaaattaataactttcgtctaccgtgttgtgctcatagatacgacgcatccttttcttatcgtactcctgccttgcaattgggtcgctcaacactgttcagttacaagatcaaattctttattgctaaagtccacagaatcaatggctaaatgaaaacagattcctttcccctaaactagtaaacttctttccttcaataatacattctgcattacatagttagaagaagaccaatgaaacaaattcacattctaagcttactactacttcaaagcctagctcaacaaacaaacacaactacatctacacgatgaaagagaagcaaaaccttgataagcctcgttgatttcttgaaacctagacgtagcagaatcctcttctttaaatttgtccggatgccatttctgcaacacaactccaacacaatcatcactgaagaactcacactcagagactgtcacaaattagtgggaaaatgaagtggaaaagagaaggaaccagagcaagacggataaagctggaacgaatctcatcatcagaagcgtcacagttcaattccagaactttatagtgatcctgcaacacccaattcacaaaaaccaaaactttaacaaattcaaaaccaaacaattatcaaatttttgtttttttgtttgtttaccttgtaatcctcgaaatcgaaaaaatcgaagccatggctgtctccccaatcggaacaccacattctccagagcaaacaaacgattccaagcttcctcaaatttacgattttcctcctctcgtcactgtgggcttcttcagataaaattttattattattatgcaatttcgttttagacccctaaactattacattattacagttaaaggacatttcgcagcttccagaaacatttagagacggctgagatacacagtgatg

SEQ ID NO: 25437 - DNA, 3003 bp, Unknown; identical to SEQ ID NO: 25436
  misc_feature (1)..( 3003): 2750-1469P.txt file - cDNA_ID_2706080; gDNA_ID_2214702; Annot_ID_189700

SEQ ID NO: 25438 - DNA, 3000 bp, Unknown; identical to SEQ ID NO: 14156
  misc_feature (1)..( 3000): 2750-1469P.txt file - cDNA_ID_2706095; gDNA_ID_2214703; Annot_ID_136918

SEQ ID NO: 25439 - DNA, 3000 bp, Unknown; identical to SEQ ID NO: 14165
  misc_feature (1)..( 3000): 2750-1469P.txt file - cDNA_ID_2706099; gDNA_ID_2214703; Annot_ID_136919

SEQ ID NO: 25440 - DNA, 3000 bp, Unknown; identical to SEQ ID NO: 14159
  misc_feature (1)..( 3000): 2750-1469P.txt file - cDNA_ID_2706134; gDNA_ID_2214703; Annot_ID_136910

SEQ ID NO: 25441 - DNA, 3000 bp, Unknown; identical to SEQ ID NO: 14159
  misc_feature (1)..( 3000): 2750-1469P.txt file - cDNA_ID_2706134; gDNA_ID_2214703; Annot_ID_189750

SEQ ID NO: 25442 - DNA, 3003 bp, Unknown
  misc_feature (1)..( 3003): 2750-1469P.txt file - cDNA_ID_2706138; gDNA_ID_2214703; Annot_ID_136911
agatgtcaacatgaaataaacgaagaacgaaactcaagaatgaaccatattttacagatcaggacgtaagaaagaaaagcaacaaacctgatgaattggaggatacattaaatttgtacaaaccggacattcaaggagctcataaacaccattgctcgaatggaattttccaatggagccactacctgattttgttggtttgctattagcctcaacctttgccatcttaacctcataatctacgcctgtcgagttagattctagagcttctttcaatgcactgccaccaggagccatagagagtccaaacctagccaaaacttgttttatttctaacagcaagtaagtgaaaatccctagtcctctcttgttgcagatgatgtactcctttcgatgatatattcctttggaacttcgttcttctgcaagaaaaacaaatgatggctaaatatacaacatttaaggaaatgttatcaataagcaagcaggtaacatgttagttaaaaaactggagcaaagtaggttaggaagtagatacgtggtgcacttgatcaagttcttttctttctttccggaaaaagggaccaatgatctcttagcagtacaccatactgcaaatccagtcttataccgttgcggtccaagcatataaaacgtagcagccacttcgttaggaaaaaaggatagtcttgtgaattaatgtgactaagttcattcccaatcaactgaaagttgccaacacatctttctttccacgagcctgttgcgtctcaggtccctcgattcttcacaatcctttctaaatgctagcggagtaaaacagttatgtaacaagtcagactttttaattcaaggagaaacagttcatctatgaacaatgctaaaaccttacaagttccaatattttaaatggttataatataacaatcacaggctattcaaacatcaaaaatagagctgtcaaatgaaacgatctgtttttattttgcaagacataacttttcaatgtaaactatacaaaagagaaattgattcaacaggaaaacacaacaagtagaacaaacaaacatcaggtaagttcaaactcaagatctcataaaaatggaggaaaaaaactcaaaaaatttaaaacaagtagcaaattttgaattatgaaaacaaattgaagctgaactcaattttcaaaaactttgtacccacaaaattattcaaaatcacctcatcagcgacaaaagttatttccgattacatgaaatagttaacgaatccataaactaagcaattcaaagacaattgacaagaggaacataactcattcctaaaagacttggccagattcgtcacaataagcacccctgaacgaaaaataaaaacacagaaccaaaaacctagttcttaattcctaagctcgtgtttttttctcgattctgatttaagaacccattaaagaaaaaacccaaatttgaacaataaagagagagagagagataattacccagggagaaatttgcaggcggtggcgttcgagttatcgaggttttactttcagattcacatgaggattgaggaagacgaaaatatcaattaataagagattgaagaagaaatgggctttgaattaggaagaagaagaaacgaattaagacggcagggagagggaggagatagttgtgtcgtgtcttgttgttggtatcgatgaaagccattaatggtgctctgtttttattacagcttttcaatttgaatttcacccaatttcgtttttcttactttttggtcccttttgtttttctaaatagacaaatgtcgtccaaaagtattctttaggggtcaattcatcaaaataaatgtaggtggtgtcttaacaacaaaataacgaaaaaggtgtcctcatctcacaatttgtcaaatgtattgttaattttttctttgtttcattattgtccatcaattcgagtttacaataaaaatcttcatttttgattgatgtaattctcaactctcaagatataataatccacacaaacaaacaaaaaaatgtcaaccttacttattataaatagttatgtatcaaatgattctcttgtatggctatgaagtatgaacaatcagactatgcctcggcaagcagcaaatatgcttacactggatccagttgccaccttcagaatggcatacaaggcccataaattggtccaactgatccagggccagacacatttggaagtcaagctgagtcttgttgtatgattgtatcctatgcagtgtttgtgtatgagctcaaagataagatcattatctgagcattgaaagtttcttacaagttggacaaggccacatcattatgatcaatcaatagggaagagagttgtaaaatgatactctcacaccttcaatggcctgcagagcctcatggaaatgtgatttgttaaaattggaaaaattttaagttctgaaacttttgcatatactatagtaaaaatcggaaaatgttacattgggtcactatcgattacataaggaagaggtaatgtgaatgggcttgtagttacctaccaagtaccaaacagagcaaagtaaagaaaacaataaatgcaaaaaatctaattccttctatttattgaagaaagagtttttcaaatcttcaaagacattctgggtaactctgtcaccacagttgactgtctcatatccccacgcgctaactcctgaacgtcaaactcaccttcctccatctctaaactctgtgttttagccacgcgtgtaatcgcgtgagtaagaaccaccaacaatgggaccaacttgcttaaaaagatttatgggttttcgcttttattacacactctcccaaatccaaagaagcgtttgtgtttagatacgtggtggtgggcaaagaaaagaaccaaacacgccactaggagctaccatctctgttttattgctgcttctgcttcctcttccattactcgtcttaaaacaaaggagaaagagtcaagagacatg

SEQ ID NO: 25443 - DNA, 3003 bp, Unknown; identical to SEQ ID NO: 25442
  misc_feature (1)..( 3003): 2750-1469P.txt file - cDNA_ID_2706138; gDNA_ID_2214703; Annot_ID_189751

SEQ ID NO: 25444 - DNA, 1024 bp, Unknown
  misc_feature (1)..( 1024): 2750-1469P.txt file - cDNA_ID_2706142; gDNA_ID_2214498; Annot_ID_133604
atcttaacatattttattaaaataattattttggtttgattcaatcataatagttagaatttactttgtaattagaattattaaatatgagtcaccatttaattaaccttaactaaatttgaaatcataaatcaagaaacatatatatgaaattagagactatttaaattcaaatcattgataagttaaattatatgaaattagaatctaattaaactattacactatacatggttgatggttttctagttacacatggcgcattgttattcattaatattcaaaaaaagtatatcttactcatttagtataagattgttttgggttaaaatggtaactttttattattttcaataaagtaaagctaatctagtttttataaagatacaatgatacatattatgacatatatagtatatatactatatagggcaaggtcggccaaaacatgcaagcagtagcgctgagttggctcattcatatcattttaattttgttagattttttctttttacatacataatttataatcaaaaataagaaaaaattcaaaagattaggaaaaattgcacttatttggaagggggaaaaaattgactcctactagtgtgggacccatgtctctttttccatgctctttataaacgaaacaaagcgataggatttttgtcagaaggattcttgttgccgagacgagacaaggaagaagaaggagaagaacataatttttgaacgtaagagaacgatattctttaagtgattttttttttgttgtcactgcagcgatgtttgccattgcaataactagggttcttttctaacaccatccgtttgtagttattaggtatatatttcgagctaatttatccttaaacataagaattaacatgatctctgtatacgatatctgtttttttccgaaactgattgttatttagttgtgtacgttttgaaggtatataatgataataattttgaaaaccaattttttgaaacatgcatgatatgtatactctagataatg

SEQ ID NO: 25445 - DNA, 1024 bp, Unknown; identical to SEQ ID NO: 25444
  misc_feature (1)..( 1024): 2750-1469P.txt file - cDNA_ID_2706142; gDNA_ID_2214498; Annot_ID_183889

SEQ ID NO: 25446 - DNA, 3000 bp, Unknown; identical to SEQ ID NO: 14166
  misc_feature (1)..( 3000): 2750-1469P.txt file - cDNA_ID_2706146; gDNA_ID_2214704; Annot_ID_136922

SEQ ID NO: 25447 - DNA, 3000 bp, Unknown; identical to SEQ ID NO: 14177
  misc_feature (1)..( 3000): 2750-1469P.txt file - cDNA_ID_2706146; gDNA_ID_2214704; Annot_ID_189770

SEQ ID NO: 25448 - DNA, 3003 bp, Unknown; identical to SEQ ID NO: 15999
  misc_feature (1)..( 3003): 2750-1469P.txt file - cDNA_ID_2706154; gDNA_ID_2214704; Annot_ID_136924

SEQ ID NO: 25449 - DNA, 3000 bp, Unknown; identical to SEQ ID NO: 14175
  misc_feature (1)..( 3000): 2750-1469P.txt file - cDNA_ID_2706163; gDNA_ID_2214704; Annot_ID_136928

SEQ ID NO: 25450 - DNA, 3003 bp, Unknown
  misc_feature (1)..( 3003): 2750-1469P.txt file - cDNA_ID_2706173; gDNA_ID_2214704; Annot_ID_136940
caaacagcaatactgaagagttcctggtgaggattagaacagaaggatctaagctcaggatatacgtacaatgtcggataattcttcaatgaattctcctctatctgccagaaaacaatcaatagacaaaatcaaaacagctttcagaagcgtaatccaaaagctgagactaaatcaaacaaaggtaaatccagtaacgaattccagaaatctaatcaacgcaatctgcaatcaagtaacaactcttcactatactatcgccatatccatcaatctaacatccctgagaccaaaattagaaagcgaattgaagaaaccgcagaagtagaagaagctcaccgacggaagtgatgctcttgagccgattcgaaacgaaaacaatcggagctaaaacagataacaatagcagcgagaggatcagaatcctctgccaacgacgaacttgattcatcaatgtgcgtaacttctcagagaacgcttcatatattttatctccgttgcgctttaatcgttctccacgaagaagaagaagcacattcccagagggaagaacacagatctcggagattctctgcttcttcaacaagcaattgaagaaaacgatgagcagattagggttttcagattcttctgcaataggattcgataaatgcgagagtctgtttctacgatttcatatctggagattcagagcttcctcgtgcatgtttagagacttctgctcttttattttttttcgcttaactcagattttttaatatttataaatcaatgtatttatttgatttttatacggagaggattaatgttgagatacagatatagtgcggcgcggtgtacatgtgctagcaaaattactagtttactaagatttgacttcttttgattggcttagtggaaattctcccaagccaccatagatgttttgacacgttgatagaatgtactgtcaatgattttcaagagtgggaaattcacagctttgtactttggagtttggaggaacaactggaatgtttgaggtcgaatttgggaattgaaatttttaacccctggatgagtttatatttgattgatctctctattatggggtgttgaatgttatttacaaaaaaaaaatagtcattgttttatggacgaataaattatctacttgtcgtttttttaccgaataacgcataaattagattcaatacggataattcctaaaataaaataaaaacggttagttcttctaacatacgttactataacaaacgtacttgacgagttggcataaaaatgtatttctactgttttaaaagtaacgtacgattcgtcttgcatactgtgacgaaatatgtaaattcttttgtcgcttagtgatgatgtgaattattttgattcataaagtagaaactcgatacatacctattaactaaacatgtattatgttgtgattcatttttgcctaacaaataaaatttattagcaagaaccattaaaatttcatactaattttggatactaaaatgttagattgatatataagaaaagtatatactcaaaaagatttaacaatttaccaatatttagtattggaatcagtgtagtgtttgttagtacatgcttttctacatttagaaacagttaaattataattgcaaaaggaagcaatattgaggtattaataaggttttacacttttacttcagctagctttgaattttagaagttttatggactattaaattatctacttgtcgatctttcataaaaactgttggctcttgcgagagatatgtgaccttccaattgatcgcgaagtgataagatgtattcgattttttcagcttatgccatttttacaacttttcggaaaaatgtttcaaaatatccattatgaatttgacatccaagttataaattagataaaatttacttgagataacatatggacatatagattttacttatttattagagttcattaacgaaaaattattgagttaaatatagacatctttaaactcgttaattttaaaaagaaataataaacaatatatatatatatataaatattttattttcaaattttatttatttaaagggttttaatttttattaacagttataatatttatgattgtttccggttactttgatgctattttctcgtaattcccttttgtacatatatatttagaaccaaaaattcaatcattgagaagcatactctctgtcaagtgtaattgattcctcctcttcattttttaattcttcatttcttaagttttattaattaattgactcacctcttcatcttgtttatttccaagtaattttcctaatgatgtcaataaacaaaaataaaaagattaaaatcacgcaatatcagtaaaaaaggagagagggttaaatcggtggtggactttgcagccctaaaccattgtttcgcctcggaaaagcccatttacacaattgggaaataaataaaaacagagtaaagaaaggaacgtcttttactctttacggtatcgctcgcttctcttctttctcctcaacacgaagacccctcttgcctctttattagagagaccccttccttcttcttcttcaccttcaccttcttcctcgattcagatcgtctcctcctctgttttatactcaccctattccttcgaatctctctccatttttatccccagattctcccttcttcaacctcgtcgactcttcttcatcactctatttcttccgattgagacttctttcactctgattttcttcgaccctttacggatatattcggtcttgagtctccatcggatttggatttgaatgtaggtatctcgcacgagagttgttgtttaacgtaaatctgggttcttttttttggtgggtcgttgtttttcttctacatgcagttttggggatagtacgtgcgattcatcgatcaatcctcgtttagatagacatcaaggatttaaaggagtcgttaagagagcaatggaaggagacatg

SEQ ID NO: 25451 - DNA, 3003 bp, Unknown
  misc_feature (1)..( 3003): 2750-1469P.txt file - cDNA_ID_2706176; gDNA_ID_2214704; Annot_ID_136941
tttttgcatttgtttctagatatttctaaactgttgggaaataaaaaaatttgcacacaaaacatagttaaattcacgtggtatttatagagatttacttcaaccaaatttggattttgggtcattgttttatggacggataaactatccattagtcaaatttccacaaaaataatatgtgaattagattcgacaaggctaattcccccacaacatacgatactagaacaaacgtacttgactacttgacgtaacaatgtttctcttactgtcttgaaaataacatataactcgttcatcaccaattttcttgtacatgattgattaagtgtgtaagcatctttttcgattaatgatgatgatgttaattggagaaacaaatttttcataaattcccttatagacaaagtcttataattttgttaaattccgcatatattttaccaaaactttgtcgaatggaaagacacgtcaaatgtgctaattagaaactgttgtattgagatttcaagaggaatcaataataaggtactactagggttttatttcaattaggtttgaatcttgggtcattgtgacgaataaattatctacttgtcgattttctacaaaaagcacacatgaattagattcaacgtggccaattcatctaacatatgttactaaaacaagcgcaatagacgagttggcgtaattttattttatactatctataaagtaacgtatgattcgtctatcaccaattatcttgtaaatgatggtaaaatgtctaaattcgtttgtcgcttaataatgatgatgatatacgttactttaattaaaaaaagcgaattttcgatagatactctattaactaagcatgcacatatcacgttgtgattgatttatgcctagtaaataaaatttatctccagcaagaataattgaaacttcataactaattttgaatgctaaaatgttaaattgatatatgggaaacaagttatgatactcaagaagtcaccaatatctagtattggaatcgctgtggtgtttgtttgtagatatttttctacatttagcaatgtattacattatgattgcaagaggaagcaatattaaggtattaataaggtttttacttttaccgggttagaattttgggtttgtttattggatgaagaaattatccacttgtcgatctttcataaaaagcacacgtgaattagtttcgacatagttatatagttctcctaatatacgttatttgaacaagaatacttgactagttgatgtaacgatgttttcttaacgtttcaaaagtaacgtacgattcttccataaccaaatgtcttgtatataatggtagaatatatattttgttttgtcgcctaatgattatgatgtgcgttactttaatttagaaagcggactatttaaaaactgctatattgaaaccgcaagagaaagcaatagtaaggtattaatatggttttacttcagccagatttaaaccaccaacaatactttaaaccattggtcgatctttcaccacaaaaaccacacgtgaattagattcggtgtggctagttccctaaacatacgttactagaacaagcgcacttgactagttggcgtgacgatgtctttcttactaatttaaaagtaacgtatgattcgtccattaccaattgtcatatacctaatataaaatataaattcgtttgtcgcttaataatgataacatgcgttactttatgttaaaaagccaattttcgatagattttctattaattgtaacgttataattcattatacataacaaaaaaaatcttcaacaataatatattgaaatttcataactaatggatgctaaaatgttagattaatagatagagaaaacttataatactcaaaacatttaacaccaaaatttccaatatctagtaatggaaatgtaatgtttgttagtatataaatttctgcatttagcaacacttatgcttaaaaacacatcattgatccgtagaataaaaagacacctcaagtgtactaagtaaccgttagaaactgcgtaaaaaagtttggtaccactttttcttttactttttttgttttgtcaagttacttatcaaaaacttggaaattaactttctctctttttttttaaactcgtgaataacaatgaaacattcgtatatttttatatcataaaagaaaacaatacggtattatatgaacaaaaaaaacttaaagataaaagaggtcaacaaaatgtccgaagtatgatgatgctaagtttgattagttatcttttttatgtcagagaacaattaaatttgttttattattatactaaaagaagaaaaacctaaactgcaaaaataataattacgacccgagtcttcgagtaggacccacctctgaatctgtgacagacgccggtttcgttctctctctctcctttttttcctctctttgcttttccaaaaaataaagttgtctttttttatttataataaaatgatttgttgtttcacagtgtgttgtttgttttggggtaaaaaagaaaatcataaggatgctttcaatatttgttttgttttggttgagtgattgctgaagccaacttaaaagagagagaagagaagagtgactctgtgtgtgtgtgcaagaaagtcttctctttcacacctttcgttttctcgaacctctcctttaaagatggtggaggaatcttgggtttgacaactcattaacactgaccctctttttagctctacaagcatccaaggaacccctcttacttttccctcttcttcattccctctctctctatatctcccaattccttctctttttttaaccttgatcttcttcttataagagactcagagctgttcttcaagatgggattgtgtaagcttgaaacttgactatctgggtctctcccattttctgttctcttttgtattctgagtgaaagttttgttttctgggggaaaaaattagggttcttagatg

SEQ ID NO: 25452 - DNA, 3003 bp, Unknown
  misc_feature (1)..( 3003): 2750-1469P.txt file - cDNA_ID_2706179; gDNA_ID_2214704; Annot_ID_136942
cagcaacagcaacagtttcatgaacggttacaagctcaccatcttcatcagcaacagcagctacagaaacatcaagctgagcttatgcttaggaaatgcaatggtgggataagtttgagtttcgataactctagttgtactccaactatgtcatccactaggtcctttgtttcttcacttagcatagatggtagtgttgctaatatagagggaaagaactccttccattttggggttcctagttcaactgatcagaattcactacattctaagaggaaatgccccttgaaaggagatgaacatggaagcttaaaatgcgggagctctagccgatgccactgcgctaagaagaggtcagttccatatttttgtttcgttttcatagcctctctttactaagatggtgtagttaatctgattgggaaattgacaggaaacatcgggttaggagatcgattagagtaccggctataagtaacaaggttgcagatatccctcctgatgattattcatggcgaaaatatggtcagaagcccatcaagggctctccttatcccaggtatacacttcttgatcatattttgttatgttaagaagtgataaagattgatgtcacatgcaaagaaccatccttttaacattaaggcttttgagttttgatgagaaaaaagagtctaaaaatggctaagagatgacacaagtaagatgagtccttttaaggaagtgttgtattggatttttgtgtgcagaggatattacaaatgtagtagcatgagaggttgtccagcgaggaagcatgttgagagatgtttggaagatccggcaatgcttattgttacttatgaagcagagcataaccacccgaaattgccatctcaagctataacaacttaactctcgtttatctttgcggtccagcataaaccttctcatgtatgttgttctcttttgtgcgcgatgatcggctttggggttgctgcaatgttgtgatatatggatcggggtaagtgcttttgttggggtggatttgcttgtgagagtttgctgcaattgttggattttgagctatatatggggtaaatgtaggattggtcaagactctttttctgtttctcaagtttattggtcttaatgattaaaagtttaatggtttgtttctggctatgtatcttttttttcttctcaagtggctttttcttttatgattggtactgttagaatttggagattgttgctaagtaacttaatcatttagcaaggtagcttaaatctaagatgattagggataaagaatattggattctgttctgagtttagagaatattggattctgttctgagtttagagaatattgaattcatgtatcaagcataatgaatgaaacttattttaagacaaaattgagtttgagattccattttaggaatagacaacaagtctacaaagtgctcacttatgtactaatataagaattcactaagttagtaaacctatcattaatcccgaaaatgttaagtagtttgatgaaaatcagaagtatgcgtaaaataataacaaagaatgagaaaatctgacacgtttaagcgcatttttggtaaatttaatctgaatattcatctcattcttttttaaagaacacttacactaattacattcccttttcttctccatttatcatgtattttatataatattctcatctaaaagatcattctcattaatagtatagattatttaaaagtgggtgttgaaacctacaaaataaaattaaaacacatttcaaaactttaaaatggatgtctcttacatatgtaacagaaatcacattgtccaactatctactatacttatgtgaaaaaaacatacatatgcccaaaattgttatcaaaccaaaatgttctggaaatagcccattggacatctatttataaaattgcatacactttagctaaaaaaaagtacttcagtttgttgttagaatattcaaattcaagaattatttttgaaagaattgtgtgcagaatatcaaagaaattttgaaataattcagaattgtgtacacaatatcaaaaaatccatttcgaaaatgctttgtacacttgtgttttggcttgtatttttattttaaaagtatgatatgtaaaataaataggaagtgtaggattattctttttcttgtctaataaaaaataaaaaataatcatatgcatttatgaagataattaaacttttaaatactttttaatatttcatacatattatccatttctcattccaaaaaaagagtttaattctcagtttcagaataaaatgtgggccttatacagatttagttggcccattaatgtacaggtgacaataatccaccaactcgtttctcctgacacaaaaaatatctcatcatgtcttcttcttcgtattcgtgtctctcatttccttttttgactcttctttccaaaaaggattagatctgactcactattacgtgtcacgcacagttcattaggtacgctcggaaaattttatccacacatctaaatatctgatttatgatcaaatcacccatttttatttttccttttgtagcttctcaaatcttttgtctttattcgatttaaaagttgatgtactctgcatctgattgttttgctcgtgttttattaccacgttgtggttgaaatttgacggcggaagttcatggtggggtatgaagccagttggattcagatttttttgccaagttgattgctttctagctgattcattgaaaataacgttcctttttaaaaacccatttgttatcattgtcttctcaaaacgtatgatctggtttttcaaaagtgagtctggttgagttctatgtgtttgtgaaaatgtctcaatgagtgaaattttgtttctttttatgtttttagtgtctttgtctttggttatatagatgttgatggcttgtgggtttggaaatattgtaggtgaaggcaagagattttatgaagaaagatg

SEQ ID NO: 25453 - DNA, 3000 bp, Unknown; identical to SEQ ID NO: 11256
  misc_feature (1)..( 3000): 2750-1469P.txt file - cDNA_ID_2706187; gDNA_ID_2214486; Annot_ID_133358

SEQ ID NO: 25454 - DNA, 3000 bp, Unknown; identical to SEQ ID NO: 11256
  misc_feature (1)..( 3000): 2750-1469P.txt file - cDNA_ID_2706187; gDNA_ID_2214486; Annot_ID_183501

SEQ ID NO: 25455 - DNA, 3003 bp, Unknown
  misc_feature (1)..( 3003): 2750-1469P.txt file - cDNA_ID_2706195; gDNA_ID_2214705; Annot_ID_136954
ttttgtctattgtgcatattatgcatctgctggagtcaaacttgactcttgatcgtcggaaagggacttctccatttatgtattataatggacgtaaacaaaaattgtgagttatcgacacaacttcagaaacacctctcatttatggtatattgtgaataaacgaataagttatccattggaaaaattaaatcagtagctagtagaaacatatatgaaaaaatatactgcgacagacagtatattaactgggaaaggagaaaaaccgagaaagaaaagaaattgtcaaaggaaatcaatcgtatttaattaagaaaaggaaatctcaactgaatctgcccttttttggttaagggggcttcagattaaaaaagagttatcgcttcataatgaatgaatgaatattcagtacaggtcacgacgtcatgttacgtacgactaaaaccgcccattttcagaatcagagccgatcggggtattgtttaataacggatttaacgatcgtgcatgtcatttcgttataattccaagctttctcatcattatcattttattatcatctttatcaacttaaacagactcttctttggcggcccattcacagcccatataatgattcttaagaaaagaaaccactcgctaccgatgtaacaacaaaattattaaaatgatcactagtattatagttttcattaaaacgacaaatccatgtccgtacttgtcaacacacaccacaaaacatatacatatatatcaatctctcaggccagaggattattcaaatcattaatttgtcgaaatccatcacttgaaagtcgggttagcacgagcaatggtggaagaggaactgagcttcatctttgccttctttatgtactcagagaactgatctgatgatctccggccactactacctacgtgagagataggcacatggtggtgaagatgatcatgacgtgtctgatctgtttcatcacttgtctcccacgcatcctccttcatcatatcaccgacattcgtcatcgcccttatcttcagcttcgctttctttatatactcggtgaacctctcgtccgttttgatcgtagtatccactcgagcgatcaccggttccacctttgtaatgggtttggctgccctaggcctagccgatgtctctgcaaatttgacgcgaacagcctctgctggtgaagatttggtggagatgcgacgaacggttcggacaggactagtcactgctctgaagatcttctcgcacactctgttttcttgcttcttcttgctactactctgtgatgatgagttctttgccatggatgtcaccttgggaagtactaaaggtgatctgtgcagagaagatagtgacattaacgagctttttataatgcaaaatctatgtgattttatctttgttaattgcagaataacgtgtttcaacatgcaacaagcgaagaaattacaacttgttgaaaagaggaaagttggaaacttttacaagtttttcaaaaaaggaagagtgatgttagaaagggatcggattctgattccactatgttttctttctttctttcttcttcgttgtttttgtttcggattgttacgttcctgtcaggatttgagaatcatgcatcagctgtcactcctctcaggagggggagattatatctacttgtaacatactaatcttccaataaataagcacttcacatattattaaaatacagtagattctcataattaggccattttccataagcttttgtttacttatttcaatccactagtatgcttttcacattattcttttcctgcaatttagcatgaatcatgtatgcaatttagcatgaatcatatatatgaaacgggggtttactaaaactctatacataaatttctaaaactctaacccactccaacccggttttttctgttcgggtatcgggtccggtttttttttcgcaggccctaattaagacattcaagaaaacaagaagaagcataagaagaggcctaaatgcccagagaattaaacaaatgggcctttaacaatattttaaacaacactgaacaatagatgagatctcaacttcgaaaagctaaagccttaatataaaaccaaacatcaatctctcgccgttaaggttacatctgtcgccgccgctgagaccgccacttaaggccgtctcctccgctctatccatatccaaaacagctataaagataaacttccagagcttggtgaaggagcagcaaccctagttttcaatccctaaaggtgaagtttttgttcttctttttctttgattctactcttttttcgtcacaatagcgcagtagcgatctgggttggcgtttttattgacggattttggtgggtttgggttcgtgttagattttactttcacagattcaggtatgtatttgatcttatttagctttggtaatactcaaaccaactagtatttgatcttaattaggtgacgttgatattttgtgtgttgtgggtcaatcatccactctaggttgatctgcgtctatgtttagtcctaattttgaagaatcattctaattgctgatgtttatttatgacaattttatgtcttacttcgaatttagctaagataataaatctagacgagtgcctttataaacagtttatgtatgaacaatgcttcgcttgtgggattgttgatttcactacatttgattaagaatgtacatactattacaaatgttatcgattaaaaacgtcattttcagatattagttctccagcgagttgacacaaaacccgattacgtttcatccggcgactcgctttgatattccatggattctcagttgaatccttccaagagacgcaagataaggttcgcgtctctcatcttttccccagttttttttcttattcgaatcacttaaggcttgagaaattagtggttagggtgtgtaaattgcgtttgatatagtgtcaggcacagatgcgttgcgtgctataagatg

SEQ ID NO: 25456 - DNA, 3000 bp, Unknown; identical to SEQ ID NO: 14187
  misc_feature (1)..( 3000): 2750-1469P.txt file - cDNA_ID_2706203; gDNA_ID_2214705; Annot_ID_136949

SEQ ID NO: 25457 - DNA, 3000 bp, Unknown; identical to SEQ ID NO: 14186
  misc_feature (1)..( 3000): 2750-1469P.txt file - cDNA_ID_2706207; gDNA_ID_2214705; Annot_ID_136948

SEQ ID NO: 25458 - DNA, 3000 bp, Unknown; identical to SEQ ID NO: 11342
  misc_feature (1)..( 3000): 2750-1469P.txt file - cDNA_ID_2706211; gDNA_ID_2214490; Annot_ID_133449

SEQ ID NO: 25459 - DNA, 3000 bp, Unknown; identical to SEQ ID NO: 11336
  misc_feature (1)..( 3000): 2750-1469P.txt file - cDNA_ID_2706215; gDNA_ID_2214490; Annot_ID_133451

SEQ ID NO: 25460 - DNA, 3000 bp, Unknown; identical to SEQ ID NO: 11336
  misc_feature (1)..( 3000): 2750-1469P.txt file - cDNA_ID_2706215; gDNA_ID_2214490; Annot_ID_183640

SEQ ID NO: 25461 - DNA, 3003 bp, Unknown
  misc_feature (1)..( 3003): 2750-1469P.txt file - cDNA_ID_2706219; gDNA_ID_2214490; Annot_ID_133443
tgcttttggaaaaagagaaggctcagattcaagccccacctataaagataccatatagttagcaccccacattcacacccattaattccacattgtatccaactaatacacccacataaaatttaatatcaataatcattacctacgggattggtattttgtatatggtttgccatttgaaaaagacacttacagaatttggtaactatgatataacttcaaacgaatattgatatcattaatcaatggttgacaaaaaaaaaaagattatgattaaataatagtcatacaaaactgcatgcgttttaaaatctttctataaatgcattcacatttcagctcaacaaccttaaaaaatttatgtctaaagattgatgattctaaagaaaccatcatttctagttttgtacatagatttacttagaaccaatgaacttaaaaaagatggctagttatatcaaaattacgttcacaactaattacaattaatctttaatagtattacataggagttacattttgaataaactcatgggaatattttttttctccatgaacattgtcagagacaagatttgtcttaagagttagaactacaggatttgatcgatactatatatatttctaaggacactaaaattcgtcttaagcgattccaaaaacaagaaaatgagaaaggaaagtaaaaaaaaaagggacgagacactgcatgtgttttggaccgtttggttagagtgataaaagataaatctgtcccaaacatagatcccctcaatccacgcgcagtctcacctgatccgtattcaccaattcaccctcgtctcgaaagccttatttccgtctatgaaggttatttccgtctattttccgacaactatctctgttgcttataatctttgttttcctttgttcttttgctcggagaattttcaacttcattatagttagtgaagatttttatacattattagcagtgtttaatcttcccaaaattctaatataaaattatcgtcgcagcttttatttactttacagacaaataaagtatcactcacgaagcccaccatgattagagcgtcgaggtccaacattgttttcttaatcaaactatactattcttattgctgaaattaagacaaatattatactatgaattaatacaattttttttttatgactcgcaaaacactgtgtccactaatcattgctttcaagcacataatgtaaactgttcctatataattattggcataaaaagagagcagacaaattagtggaattggagagacaagattaattaaacaagtgatcttatcttttcaagaaactcaattcattgccatatgtgtcattgtatcaatacacttctccctaaatgattcgtttgataaaaatttataactttatcaccaagtctatattcattttaaaacccatgcaactctcatcataatgaattctagagtgatgagtgtacgtatttgtaatactcttcttacattctctattgcacttacaccactcattatttttctttctgtttcacttgttgttcaagttgcatttagatttcaaagaacacatgttcaaatgaagacaaaatcttgagtataggaaaaacaaaaggcaaagaaaaaagaaaagaaaagtgatgggaaatgggtagaaaaataacaaaaaaagctaatcaatattatgcgctggtgggtcaaaaaagtgttatttcacaaatccacaaggctttgattctttgtctctttctttcactattcattttttctatattttattacacaacaaaaggaatagtttcttcatcttctctctcacaacaacaacaacaacaaaatatgtatttcatttttgttttaaatgtgatcaactattgtttgatactactataccccttgtggccttgtccatctaataaatttatcagcatacgtctaatcaaagattgtggaatcaagctaacaaaatgaataaagacatcgatcttaacgacataaaagataaacggaatctctcaaagaaaaaacctttgatctaaaagcataaacaagaagaagaaacgtctcaaacaaattttgtaaattgtaggttaaacaaggaacacatgtaggtcctactttaattactggaccctacatactctgggccccactctctatttgccattttttgttttttaattttagctttctccgttaccgtcagtagtcgcagcagcaggagctagatagcgcccacacacacacataaagcaaaagcctttgagctctctcaccattcccaaatcccaaagactctctcatttgagggttttttgtgtttatcttcctaatctctgctccaattcgattttcacagagaaagtttcttccttttggaacatttttccggtgttgaaatctctctctgtatcggctacattgtaccggaaaaacctctcgatctcgggaatctcgccgataatcctctctttgttaccggttagtgacgatttcgaaatctctttcctttgtcgttttctatttgggatttctcgattgattctgttgaatgataaagtttaataatccctatgaatgttttctttaatcactccagaaagtgaactcctgttttctcgacaaggtttctgcaaaatctcagatcgaacaatggataataatcttaggacacacacatagagacaaacacaaaccacacactcgtgttcttattctttgtcttgaaaaccataagtaagaattagtcctgtggcttattcccaaatcacgtgttactgttgttgttgttgttgttgtgtttatatatatatatatatttgccgacaagatttctaaatatggtcccgaaattgttagtgggttttgttagtatctttctagtgagcttgtgttaattgaggttggagattgatttagtttacgttatttgcttttgtagggaaagagagatttgtgtttggtgttaaaaatcgcatgaatgctggaaatg

SEQ ID NO: 25462 - DNA, 3003 bp, Unknown; identical to SEQ ID NO: 25461
  misc_feature (1)..( 3003): 2750-1469P.txt file - cDNA_ID_2706219; gDNA_ID_2214490; Annot_ID_183631

SEQ ID NO: 25463 - DNA, 3003 bp, Unknown
  misc_feature (1)..( 3003): 2750-1469P.txt file - cDNA_ID_2706227; gDNA_ID_2214490; Annot_ID_133447
atggtgacaaagttcaagacactgggaatcatgtgattgagaggctctatgatctgcagaaagtagctgaaatcattgtttctaaatttggcaactctgttaatgcttgggttgttgaagcttctgtctttaatggaccatttgctatctacaaagactttgttccatcagtgaatcacatgggagcaccaaaatcttattccccagttggcttcccagcttcttcatcaattgtctccctcttatctagttgcctccatgaggtattgaaggaaggcactgatgtgtgtttgatagaccagattgcatcagttcatcactgtcccaaaactattgtgcttggatttagcaagggtggagttgtgatgaaccagctcatgagtgagatcagttccttggataccaactttgcgaaaacttcatctgcaatggtagaagaatctaccagccagcatgaaaagattcagatcattccagcctccaaagaaagcttcctcaacagcatttctgaagttcattatatagatgtaggactgaactcttctggtgcctacattactgatcacaatgtcgtgcagagaatctcccaacgccttgcacgaggtgcagactcgctacgcattgtcattcatggaactcctaggcagtggtgtgatgagctgcgaggctggattcgcaaggaaaaagatgagttggttcgtttgctcaaagctgaaactgagaattccggtgggaaactacaggtctgtgaaaggttctatttttctgatagacttgctgatttgcaaatgcactttgagataattgatgctatggatgtctcctaaccattcgcatgataaaagacacataataatacattgcaaaatgatagcaacttaaagccgttttatcagtacaaaaaccaaaacttttttttttttaaagacttccaaaaacaaatggtaagagaaactaaagaagacttgttctttaagatgacaccagcatcagagtaagtgagaggcttttagacggatcatattgttaccacagaatcactcttccatggcttcgttttgaacagacttcttttcggaaacatcaactttgatcttctgtgccccgggagcctggaccatatgaatgttctgatcaagttctttcatatcgtcattgagtttcttctgcttgtttggcttcaacctaagtcccatacaaaaaacaaaaacaatcataatcaaaaacagagtctagttttaaaatcatacaagcagtgttatcaaggatttgcaggagactagaagaagaagaagaaggaatgtatacctattttcgatatgtttggcttcccttgcggttctgatcttagcaatcttcttaatggccatgagtgtattctctgtaacgttcctgtcgtatctctcaggtctgtttctcttcttctcaaactcaaatgttgtatccttttagggtaaagtaaacaaagaaagacaagcaggagggtcagcatcaactagacaaccccaaggaaacaaagaaaaacttttgctcaaatgaacacgtaccttagtcatgtccttcccgtgtgcagctctgaatgctttagtccatttcactttacgtgggtttctcttcatcttgaagttcttgtgacacttcgacctacagaaccggaatatctgcaaaggagaagataccatgcttgtaagtgaattacaataacgcataagaaacaaagctaatcgataacaagacatacaaacaataaggtgttttgattaacatttatgctcaaatttttatcagaacatttgtaaacctcttatatactaaactcctagctaaagacacataaacatattgtaagaatatacaaaatggtcatttttttagctaaagactcacacaaataacgacatatatcaaaaattgttcatttaagctagagaatacgagcaaggagacattcacatatatagaatctaagagtactatgtaatataaaactcaagcaaactatttactgtgaattaaagcaggttgataaagatttatgccaaattaattaccttggcatcgttacggacaaattgaataccatgaccaggatatattgtggaagagcaaaaccaacacttctccaatctcatattgcctcgtcttgaaaaccctacaaaagactgttgcaaagttaagacatgtaaaactgaaactcagaccacaaaattgacaacaaacaaacaaaaaaagaggatactttcccagaaataaagtcgcttacttatagtaagagctaagaagcagaagacaaagtttcaatttttctctaattacacggtttcaatgaacagatattcaattatactactcaaaaattagtctagatttcaacaaatatgaaaaaatcataacaaagagaacaccaaacgaacgagatgggattaggactttgagattaagcggcaaacctgtaggtgattcttctaatttgcgacggcgatttcaggaaaagggttttgctttagagcccccctgcagaaaaaaaggtctaaagagaagaagatgactacttctaagaaatctcttagggtttatgaaacgttaacataaatttctaatttgaggcccataacctaacattgattccggcccattagttgttatgttttgtctgcccattaatgcggtaattacggcccaaatattcaattttggattccttattatattatatagtatctcgatcctttcatataatatgtaaaaaagttgtaaataaatatgcaagtccatttaattttgttttcatataagaaaacttttaattgcatatatattgttatttgaagagttttagataaaacttttattgtcaatcgataattttcatgttcatggttttgtatcagattactgaatgagtttagtcattaaaaatcttagaaatcaaatatgtaaaatatacaaaagacacacatagaagcatggaacccatctgttgcaagagaagaaaccaacatg

SEQ ID NO: 25464 - DNA, 3003 bp, Unknown
  misc_feature (1)..( 3003): 2750-1469P.txt file - cDNA_ID_2706230; gDNA_ID_2214489; Annot_ID_133417
ctgccttgaggagtatctccttcccaccaggagagaggaagtttgattgccaccccaagaccttcttccccaatctatcttttaaataactcaatgtggcaaccttggagccttggaacgattctggtagccccaaatagactccttccccgccttctcgttcaatacctagcttccttttcaccaagcagcgtctctcctctgaaatgtgtttcccaaaatagatactcgacttaaggtaattaactctctgccctgaggcaagactgtactcctcaatgatcctgattatttggcccaatgcttcatcgtttactttgcagtagaacatgctatcgtctgcaaatagtagatgggagataggaggagctcctctagccactttaagtccagtaatttgattcttttgctctgcagactgtagcatcttgaccagcatttcagtacaaattacaaagaggtaaggagagagggggtcaccttgccttaatcctcgagatgggatgatctcaccatgaggggtcccattaatcagcacttggtatcgaacagatttaacacactccattatcagcctaatccaatgatctgcaaaccccaaccctctcattgctttttccaagaagggccactccactcggtcataggctttagagatatcagttttgatagcaatgaactcctcagaacatttattattcgaactcaaggcatgaagcagttcatgagctattaagatattgtcactgataagtctgcccttaacaaaagccgcttgagtttctgaaatcaggctagggagaatcttctttaatctgttagccatcaacttcccaatcaccttgtaaatcacgttacacagactgataggtctgaagtcagtcattttctcagctttgaggatcttcgggataaggcaaatatttgtcttgttcattccttcctcaatactgcccgacctgaagaatgcctgaaccatctctgttatctgatcccccatagtctcccaaaattgttggtataagaacccattcattccatcaggcccggggcacttatgagggttgatgctaaaggtagctctctgaacctcttccttcgtaatgggggcaagaaggttattattcatttgatcagagactaaaggcgtgagattttctaactcctcaaccgtgtaacctacatcctccgatgcaaatagcttcttaaagtaggcctctgccactcttccaagatcttcatcggaggtccattccctaccctcttcatcaatgagtttctggattcgattttgggctcttctattcttggtagccgcatggaaatactttgtgttcctatccccattcctcatccacataattctgctcttttcttgccaaaactgttcctcattattatattcctgactcaattccttcttcagtctcgccagctcccttctatcaaaaggaatttgtttggtagcagcatctagtttaaactgaagctcctggatccgaacagcagaacttggctttgagactcttttccacttagatatttctcttctacagcttgcaattttctccatcattagagcatttgttttcgtagattgttgggaccagaagttacacaatagatccttgaaaccctctctctgtacccatctcttgtcatacttgaaaccggcccatttcctccagttgtctcccacaagattattaatgagcggactgtgatccgaacagattttctgtaaataagtcgctttagcctggggaaagagctccatccaagcttggtttgctactgttcggtccaatctgcactgcactaactcatcattgcgattcccataccatgaaaattgatagcctgaatgattaacttcccacaatccacacgagttcagcatttgtctaaattcaaggcaggatgactcctttctcgcaggccctccaatcttctccgaggggtccacaagctcattaaaatctcctgttagcatccaagggccacttctactcaatcccagtcttgttaacctctcccacagttctcccctttcagcttgaacaggttcaccataaatgcaggtgaggtaaaactccttgtcttgccatatcagtaacgcatcaattaatcttttatcagattgtagcactttgatctgtactgaatctttccacattagagctagaccaccactcttccctatcggctcaacagtatgcaaatcaaaaaatccaagatggcctaccacattctccaaataatttcttctcttcttagtctcacagaggaatataacctctgggaaatacagaccacgtatttccctcaggtgccgaactgtcggggtattccccaccccctgacagttccagctcagaatcctcattttaaattcgaagggttggaattaaccatcaacccttctttcaagtttttgttgctatcattctcaggtaagataccagaagagtgagagcgattggctgccactgaggaggcagaatgattagataattgagctgccacatgagcagaatgatcttgatgaacagagttctccttgcagattgagctagaagatgaagcttgtgaccctaacctttcaaagacagaaggagagtggtgtgctctgtcatttgaattacgatggccagattctcttgctttttcattgcttgatcccaacctttcgaaaacagaagggggctgctgaggtttttctccagaacccaaccgctcaaagacagatggtgaaacctgagactcttctcccggtgaattttcagattttagaaaagaataaataatgaagaattattagtcgttgacaaaacaaaaaagagaattattttagtcacacgacgtcgtttagaatatgttaattttcatcaagtcttggataaaccctagactcgtctctctatttctctatcaaaattcacaccggcgattttgagattgttctctgattggcttaatccgagagaatcaaggaattgaatg

SEQ ID NO: 25465 - DNA, 3003 bp, Unknown; identical to SEQ ID NO: 25464
  misc_feature (1)..( 3003): 2750-1469P.txt file - cDNA_ID_2706230; gDNA_ID_2214489; Annot_ID_183588

SEQ ID NO: 25466 - DNA, 3003 bp, Unknown
  misc_feature (1)..( 3003): 2750-1469P.txt file - cDNA_ID_2706237; gDNA_ID_2214489; Annot_ID_133436
aaacggcgccgttaccaacgttaccataagacaaccagcttcagtacctggtggtggctcatctgtcgttaacttacacggacgtttcgagattctttctctctcgggatcattccttcctcctccggctccaccagctgcgtcaggtctaacgatttacttagccggtggtcagggacaggttgttggaggaagcgtggttggtccactcatggcttcaggacctgtagtgattatggcagcttcgtttggaaacgctgcgtatgagagactgccgttggaggaagacgatcaagaagagcaaacagctggagcggttgctaataatatcgatggaaacgcaacaatgggtggtggaacgcaaacgcaaactcagacgcagcagcaacagcaacaacagttgatgcaagatccgacgtcgtttatacaagggttgcctccgaatcttatgaattctgttcaattgccagctgaagcttattggggaactccgagaccatctttctaaatcgcgaagaaaaaacaagttagatacgttcgttgtttttaatttataatctctcttctgtcaagttttaattttctttttcttcttctttgttttctaaagataattgtagtctttgacgaagattcgtggtacgtatgaatcgaagagaatcgttttggtcatgggattgatcgatctattaggtttgagagggggtttgtgttttgcgttgactagcagattataaaattgttgattttcgagtttttattttcatgtgttggtgataattagctttgtgtctatctatgtatgttgaattctagtgcatagttattatatcgttgaaaggttgtgattaaggttaaacaggtcactaacaatgtcaaattgttatgttcttccgttagattttgggtaataggtcaaatgaatttcttcaagtccgttactgctgattaatcaaactctaaactcattttccaaaatcacgttgtttgtacttttttctgttcaaagagttaacaacggttatttttattttaaagtttaaacggctgtagatatttataatttaacttaagttggaagacataagaaaaaaaaagatgattgttccgaggttggttagaagatggtgaggcaagaggcataatgacaagaacaagacttgggaacaaggtgattgcatttggcagatactttacatttacacgaaaatctttgtataaacatccaaatattaaaatctaaactaattttcataatcactttttggttattgaaaaaggtattgactaggaattagattctagaacttggaacaagagaatgatatatgattgtataattgactaactcacttgatcaagttgcatatatagacatggatttgatggaagtatgtatacatatagaaattgtgtgagcagggttttgtaagtgagagatgagaaagcaattaaggttggggaagagaagagcattggatgatgcaccgacgcacgtgcatgtctctgagagagaaagaagaaaagttcctttacgaggcgatgagtgaaagtgagaagaaagagagagttccttacttccaaagccacctccctcccactttgcccatcattcatttcctctcactctctcttttttttctttctttttttgcatttataacctcactccaccaattatatttttagtataacctatgattatgaatctatgatcgatcggtcatttctgttgtcctaatttatcaaaaggatattgatccaaacagacgatcaagattttgaaaaatgagaatattagacgcttgatcaacaatttttgttcgtcaaagttttggtcattacaactaaacgatccaattcatcaaggggctattgcgcttagagaagaaagacgtagtaagaattagttaacttttttatattggaaatgcatcggagaaaatgtagtgttcgagacctaacaccaaagtctcaaaagttttgggtccgataagacgatcctaaattaaattccatgatgacagctaaactatacaaccacaattagccaatatatacgttattatatatgtctatcttctaccattttactttttgttgtaccttacttttgttttatctgaattttgatatttttcggcattatgagtgattagacatctatagatattcttttgactttccaattcaatgattacactatactgaccgcacaacaaatccaataacgcacaacaaatccaatactataattgtagatagaccaacatcaactatagtattggatttcattaactattaatgattcgggtttccagtttacaatattgggcttataatgatcggaatgtttttgttaaatttgggcctataatgggctttactttaaagacaattaaacacaattctgacgcgttgacaaaaacaaatcagatacaacctttttttttttgaccgcaaagaaaaaaacaattatacaaattacaaagcagtcacgatggaccgtttataaatacgaacgtgccttgcataatctcttacttacgagaagattaatatccaatggagccctccttaatcatatgattaaattatccattgttttgtgctataaattcttccaaaagatgctataaaaaccccaaattgaccataaaaaaattatgcgtatcaatcagtatccacgtggcaatatctgaggagatacagagagagacaaaaaccctaagacgctttttagtttcgtcctccgtcaatctctctcgccgctttatccttgttacaaatcccatcgatcttttcggaatcttccctcattatgctcagccaccattaccagagctccattgtttcagttctccgttcaacgattatcggaattattcacaacactattagtatcaccgtcgccaaccgattttgattaccagctttggtgacgacagtcgtgattaaggaggttttggtaaatttcttcgttcctgtttgttttcaaagatg

SEQ ID NO: 25467 - DNA, 3003 bp, Unknown; identical to SEQ ID NO: 25466
  misc_feature (1)..( 3003): 2750-1469P.txt file - cDNA_ID_2706237; gDNA_ID_2214489; Annot_ID_183609

SEQ ID NO: 25468 - DNA, 3003 bp, Unknown
  misc_feature (1)..( 3003): 2750-1469P.txt file - cDNA_ID_2706252; gDNA_ID_2214489; Annot_ID_133422
tcaagaagatgtggagaagaccaatcgattgtcacagagtctgttctgctaaggagttttcaaatggatttgaagaaaaatggcaggcttcattgttttaaggttgttggtctcaaatccatttgtatctttgcccattttgggctttaaatgaaaagttgttcgacgaaaaaaaaagggaaaaaaattaaaaaaacgtaaaaaaagttgcaaatatggatcgaactcacgacattagtaaaatttagatgtcgttgaaccactagactactgagaattatacgatttttaatccaatagtttttaaatattgattcaacgatagggagttaaaagactttcatcgttatatatgtggcgccaacaatgatttcatttgggcggcgtaaatcgccggcgattgaagaaacttcactcgcgacttcagtcatggaggcatggaggttaccgttatcgccttcgattagaggaaaactgatatcggccggttatacttgtctgtcttcgattgcttccgtctcttcttctgatctcgctcgaggtaaatttctgctttaccctaatcttagaagattagaatctgttgctcgtttttctctgattagcacagacagtacacctcaattgattagtccttgggttgataattagggttctatttagtctcttgtttaaggcttatttctggaataattctatatatgtgtgtgtgtgtgttttgagtcatctttgatatcgttggtgtgtgagtagatgcaaatatcacagaggaggaagcatttgagattttgaagctggctaatcaaagttgttgcaatggaagccgttcactcataaatggtaacttgatgaactcctccttggagctatgttggtggtttttctccttcttaaatggttcactcaaggattctctttatgaaattttgtgactaaacaaaggagcaaagaacgcttgggatatgcttcacgaggaggagtctttgccgcgtattactacatcttgctctgatcttgataacattttgggcggtggaattagctgtagggatgttacagagattggtatgtcatctccattatcattctttctctggtccaatttgagatcattaagtgatttagtggtttgcttattttctcaaaggtggggtaccagggattggcaagactcagattgggtaaatccgcttcactgctttcctctactttctcatcatcatcagagtgtttcctcttctgttaacttcgatctggtttcaggatccagctctctgtgaatgttcagattccacgtgagtgtggtggtcttggagggaaagctatatatatcggtatgtttcttttagtagtgatgactaatgccttggttgatcacttacttggttgttaatgctttttgtatgctacagatacagaaggtagcttcatggtggagcgtgctttacagatagcagaagcttgtgtagaggacatggaagaatacacaggatacatgcataaacattttcaagcaaatcaagtacaaatgaaaccagaagatatcttagagaacatattctacttccgtgtctgcagttacaccgagcaaatcgcattggtcaatcatcttgaaaagttcatctctgaaaacaaagatgtaggtataataattttgaagttccatcccgttgatttgctgctacaagtgtatattgtgacataattcggcggctcactaagactctctttaatctttcatggttgcaggttaaagttgtaatcgtagacagtatcacctttcatttccgtcaggactatgatgacttagcccagaggacacgagtgctcagcgaaatggctttaaagttcatgaagcttgccaaaaagttctcacttgcggtaagaagaaatgatctaattcacaatacaatccttgactagcttaagtggaggttcctaatcaactcttatgatccaatctcaggtcgtgttactaaaccaggtgaccacaaagtttagtgaaggctcgtttcaactagcgcttgctttaggtgagccaaactcaaatctaccatctcagtttgctattatcatcatcatcattcatttgttatgatacttaaatggtcaacttgtgctgttttcaggcgatagctggtctcattcgtgcaccaaccgagtcattctgtattggaatggtgatgagcgttacgcatatatcgataagtccccttcacttccttcagcttcggcttcatacactgtaaccagtagaggtctaagaaactcatcctcgagtagcaagcgagtcaagatgatgtaatgacacaccacgacacagtcacaaggacatgagtaagctttctccggtttagttttggttcagttcttgattccattaaactgcatgagtttttttcggcccaattgtttcataaagcccaaatgggcaaatattcggtacaaaagaaggtcataagaaggcccactaattgcaaacataacaagaaaaaatgagcaaaataaagacacgtgctatgcaacgtgggatgttgagagaaaaaaaggtttcgtcagctacgccgtcaccgactgggtcaataccggagttggtgaattggtgactaaaatgtatttcctaaatctaaagcaattttgcccccaaaaaaaaaaaaaatctaaagtaattaggttcttcaccaacccttgtcataaccatggcttttgcttaacacaccaaccatgccgcattgtcaatctattttttacttaaattaaattattattttaataattagcgtaaaaagcaatgattagttgaaaattaaacaaaagaattagattcgaaaaattgttaaagccatagagcatcacagccgtcaagattgtgtcctttctgaatccaacggtcagatcgagatctcattggtttattaatagcaacagtctcctaaaataggtttgcagagaagctttctcttctattttctctctctcagttaaccagagagagcatcaatg

SEQ ID NO: 25469 - DNA, 3003 bp, Unknown; identical to SEQ ID NO: 25468
  misc_feature (1)..( 3003): 2750-1469P.txt file - cDNA_ID_2706252; gDNA_ID_2214489; Annot_ID_183594

SEQ ID NO: 25470 - DNA, 3000 bp, Unknown; identical to SEQ ID NO: 11327
  misc_feature (1)..( 3000): 2750-1469P.txt file - cDNA_ID_2706256; gDNA_ID_2214489; Annot_ID_133430

SEQ ID NO: 25471 - DNA, 3003 bp, Unknown
  misc_feature (1)..( 3003): 2750-1469P.txt file - cDNA_ID_2706277; gDNA_ID_2214491; Annot_ID_133474
tatgtttaagaataatctatgatcaaaatatagatgaagaggaaatgatatatatagcgaaggaactttcggtgatagggcaaaagaaacacgtttctgggaggaataaatggtttcgtcagctttcgtctttgactttgagtgtctcttcagtcaagtcaagttttgtgtgtactttgtttttcattctcaagtctctctcctcgattaaattaaaatcgtggtcacatctacgaatctaactgtgtgaatgtctcgtcgtgatctggttaactaaaggttgaatatttttaccctaataaaggttcttttttccaagcttctacactaacttttctttttaattaaaaacaaaattgaactagtttatgatttcatttgtgtatattattttacgtatagaccatgtcaccatgctatttttgttatatatcatcgtatcagtgtttgttatttgttatggttattgtggaccattggccaaacatatatgcattgtttcaatcatgttgaaggtctaatctacaataacactctcttggataatttttcacacaaaaaataaaatgtagaaaaagatgatcacatgagtactgattatggttttaacttttttttttttggtatcaatgttaagtatttataccattttcgaagttatgacagaagttacacggaatacatgtagcggaaaaataaatctacagaaagcacagacaaaaacaaacagtaatagtggttaacgttaactaaaagcggaaacaagagaaaaaacaccgattccgagaagctaaactcagaaatttgcgtgatttccacaactcgaagataccaaagagttggagtcccatcgtagttgccacgagcaaactttagcagaagcccgtccacaaaacctcttaataaagcgcctacagcttctccgcaaactaacgcaaaaacgcaaagacaacagaggactaaaacacaaatccgacggttacagggataaccaaagaaactaccttcagtcaccattcctatcaaaacaataggaaccatctcccacggataaatgatgcctcgaagaccaacgcgccgcctctattcttcccttaagactccactccgacatgacgcataacatcactgttgtctaagtacaaaacaacaacaacaaaagacaccacaagctccaacttcgagcaaaaacgatgaagaatcgaggaggctttacgaagagcagaaaaaacaaaactaaggcgatgcaccacctgatttctagatcggagaagaatcccgtcgctaggaggtccaacgaacccaaacgtctcatcaagagccacaaccaccgcagaaaggagaaacccaccacgcaccaccaactagagacgatgggcaatcgaaatctgaaacaaaacgatggagcacgagaggaggagaaacatcaaagacaacaaagagggaggaggaggagccctccccgttcgccggcaaggagtgccgcaaacggagaggcggaggaggcagatcgccgacattatgatttaaacttaatttgtaacaagaaattactctaaaatgatatcggcatagatattgtattagacttcatttttaacaaatatggttgtacaacaaccaacctaaaccatgattagtgaagaagaagcaataaaagtagagtaaataaagcccaaagaattaatgaacaaaaataacaaagaggatgttgacgaaaagtcaactccactaagctggcgacgacaaaaacttctgcgatttaagttaaatttgttgggtcctacttcgaaaccagatcatacggctgacgacgaaagtttgactcgatcctctctcttctttttcgtccgttatgactcttatcatcacacctatcttgatttgtctctccataaaaataaaaaataaaacattttctttttcattcatcttaacaacatgtattttatcaagtttaattacaatagtgtcgacgaaaagaacaagaaaaatgccgacaaaaaaaaaaatactagaacaagaaaaattagaataatgtcgaaaagcgattaagttagtggtttagccgtttgttcatcttctagcctaatagtttggacatctctttctttagtggagtaaaaaatgagtctaatgtactaattaaaccagaatagagataatttcatcctaatacaaattactagattatatacgaagtagtaatacttcatttgttctaaaaacttttttgaaaaaaataaagttttttcgatgaaatgtataattggttaatcagagtaaaaatatgtacaaaagtgtttaactgtgtctaaacggatgactagcagtttaataaggagttttggacagctttaatcactatagttgtaagaaaacaagatgtgagtttgtaagttctctcacaaagtttttttccaaagctctttcaaaaacattgaattgtaggcattacaaatgttttggtgcttaaatgaattgtatcaaaaattgttggtgttacaaattgttacaacaactcatctaataaagacttgattcttctatctcgacaaaagattagagtttgccaaagctcatgggatagtggtgtatagtaaaataaaataaaatgtattgagttctcttggtttttaagtaaagaacatgtatgcaaatatgctcgtaaacgttttaaaaatagtgatgatcaagacttatcactaccgttgcaacaaacacgtgaaggttgaatcctctaattttgtacaaactttgacttttcgaatctaacaaaaaaagaaaaagttgactcttaacaacaaaaattgaatagtaaaaaagactatttatgaacataggaaaagtctaaaccgtgacacattagtcagtcacctaccatacaaattacatcactttaaataccaaattttttattcatttttgttctcttatttactttagtcctctcgaatcccataaagtccacaactctctccttgtagagagagagattttatg

SEQ ID NO: 25472 - DNA, 3003 bp, Unknown; identical to SEQ ID NO: 25471
  misc_feature (1)..( 3003): 2750-1469P.txt file - cDNA_ID_2706277; gDNA_ID_2214491; Annot_ID_183671

SEQ ID NO: 25473 - DNA, 3003 bp, Unknown
  misc_feature (1)..( 3003): 2750-1469P.txt file - cDNA_ID_2706293; gDNA_ID_2214491; Annot_ID_133470
cgaggtccaccggataacgaggtttttctacggtggagaggagatcacgggctgactcaatagtggcgagattgatgtgtaggttctttgatgataacgagagatgttttgcgagtttgagcattggattgatgtgaccttggaatggtagtgttaccattaggacatgtgtttcttgaccctcactactgcccattattttttatttttttcactaatagtttagattttcatgaaactttgagtcatatataatagcaatggtggtttgatgagagattttgcttaatgaagacataaaattagattatggtaagaaaatctgtctatagtaatggctaacccagtcaactgttagcaagtagattctttagtatccaccttttcaccaagtatgttcatctattggtcatcgggtcagttacaatttttatcttattattaactaaaaattgtttattagtgtgacacttgaccgttacaatgatcaacttttgtatgtgtcaaaaatttcacaagattttcacatctgtttagtattgtttctttatttataaaatcatttttatagtaaaaaagtatgaaacatagaattaaatttgaaataaagtttggtcaacgataagatatccaaaataaataaggaataaaaagaaaagtgtttaagtggcatgtaccaaaccgaatgttaatttgctagaatgtataaatagcccaaacatatattccatttgttcctttttatttgattgtttagaaaaatgcacatattaagaaaacatattaatgttgattttaaatgtattattttttgtattttacagtttcctataattttaaatcaatgatattcaatcatttttattaaagtttacaattcattgataataattaataaatattacatagaaaatttaaaacatcgatctttttgaaatatttttcttaaaaaatcaaacaaaaaggaacatagggaataggtgagtctcgtgtttttttatgtaccatccaactcagatctcattttcggtaatttctaatctacaggtttattttcttttataaccaaaaccaatgaatgtgaaaatataaagaaaattttacaatgtacttaaaaagaaaagtcctccatacacatattcgtcgtcatacattaagttccactaaacgatttttaaggatggttttgagaaaaaaaatacacacacaaaggttgaaatatcaacaatctgatacttcgctcatgaacatttcaaagaaggctactttgaatggaaataacaacaacgtgagaaacaagaaaagtacatagatagattggtggggcctgaaattttgtaacatcaatcaagtttgatgcccacccaacaattttaattttcaactaaaaactacttcgaccgttaatttggtagaagtagtgaatttagtattctttcaaattaacggtcgaagtagtgaaaatggttatgaaaaattatgtaactatttagatcatcaaatatatgtttgtggtaatcaatccttagaaaactcttatcataaaacatttttgagttaatgtcatctacagtgattatagtatacttgaaggaaggtgaggacattaggttttgtcacaatattatatagataaacataaaataccatactagatttgaattccacacatagtttatggtctacaactaaaagtctattccaaacaatcagagacaaaattaaaatcatttaatttcttcagccaaataactaatctccattcctcgttgatggctttatatgttcgcaaattatatttttaaaaagaaattggaagaccaagaacaagaagcaacctcagtattttcccaggaaggagcctaaaattcaaatctcacgtcttgttgaattttaagcttatgaagtcaaaaactgaaaatgtcaaacttttcttcttcttcaaggctcttcactttactatatattctaactcccaagtccacaaactactcacaacaaatttagtcatctcataaattagggaacacaagaaaaataaaataaaaaacatttttgtttttactactcaaaaataccactcaaagaaaatgatgatgaacaaagttgttttgggttcgtttctgtttttcatgttggtgagttcgaattttgtggtggaggctcgtcctttgggtttaacgaaggctgaagagaacctcgtggctaagttcttcgatggtttgtcacttggggcgattaaggagtcgggtcctagctctggtggtgagggtcatcggttcgtggaccggactgagacgcttgaatatggtaagcattcaggtcccagcacgagtggacccggtcactaagttcccgaccgaaccagttaatgtggctgctttggtctagctccggaaattgattgctttgtttagttttttttcagattaattattcagatttttctttttatgcttagaacttgggaaaatcaagaattggaagaacctcatttgttctctgtaggaatattcttttgttaacttattgaaattcatttgataataatgtacaatgtaatatatattgtaattaatttattattctgattatgtgaatgaataactggatattcatgtttttaatgagtttcaataacaacatagttaagctccaaatccacaaagcaaaaagaagcgacttaactttaaccttcttctgagtgataatcacctaagcttacctctttaacagctacatccacttcaactttaaccaagaaatcgcgatttccgtggaaattgaagttaaccaattctttagatagtttctgaaggatgttgttccggatggagctgtggaaatttggcttggacaacaagttatacacatatctagtgcatatttcttctccattatataggtaaacattaggagccttacgtgcaaagcaattgaacccatttatggacatcatcaagcaggaattgatgcaagtgtgactccttgttgtattgtatg

SEQ ID NO: 25474 - DNA, 3003 bp, Unknown
  misc_feature (1)..( 3003): 2750-1469P.txt file - cDNA_ID_2706296; gDNA_ID_2214491; Annot_ID_133472
taatttcaatttatatacatgcaaattacaaaatataatagtttttgggggataattatcttcttgcgcctttttattaaattaatatgctcatatagcagttcttacaattaatataactagggttttaaatttcaatatcgagttgacaaaatgaattgtttacaagtttttttcttttcaatatgcattgttcatcacgtattcgtagtgatgcaaaaacaaactataaattataattgcactagtgagattagcaagaagtgttataaattagaataaacggaactatcaaactgtgttatgtacaccatttatttttgttaaagaatatgtgtagtagttagaaaactgatcaaattaaactgaaaattcacattacggagatcaagttacattgtctattgatgaaaaaaacaaaataaatccaaatggcactaaaagttgtagaaattgaaagaagaaaatagatttttgtctaggaataaaagtcaaaatgggaaagacaaaaaaaagagaggcaaataagcagtgatggagctaaagcaacgctttactcttttaattatgaattatttgatttgacctccactcgcctggctttttttggttgttctttatagaaaagtaaaataacacaattagcacataacatgagttatcgagaaaccaattctctttgtggtgttttagttaatttctataacttatgaaaccattttctcagtttatcatgataattgatcctctatttaaaaccctaaagtttatattttgtttgttcaaacacagtcggtactcaaaatagatgaaacataaatttgattttatttctaaaccacttggaaaaacatatactattattcttctcatgcaaaggaccccattataaaactaacatggcttttactattggattcactgtagtgattaagggtgtatcaccaactgttttgaatttttgtcaacttaattagttattaattaagaagtgggtaaagctaacataccaaccttttactacacaattatcttaaaaaatccttaaatttataagaatagaagaaagctaaaacgaataaggaaaaagaacagcaatcgagtgaaatgatgaacatattcaactcccaccattttgtttatatggatgagttccaaaattttggggcatacattctctaacagtattgagatatttcaataatagtatttgcataatgaaaagtaatattgatcatttcagaagattatatgctctttttatttaactattacgagatacatggttttattttgtaacatgttatttttaccaaataaaatttgttaattgttttactcatatcattaagctattttcaatggaatctaatatattggacgtgtgacattatcttatattttctgtaattatttagcatgttaaatattgatttttagtatattcatgtatggtaataacaaacaattatattgaaagagtcgtatactcgtatgtatgactgtttatatcgtaatcgtatatactgcaagttaaattcaacaactgtaattactaattagataaaatcaaatatctgtcgggcgtaacatgcgacccaacaaacgtcatgtgaatattttaattcttctattagtttgttaacctaatcgtgattgggtattcatataaatacacattttcatataaatacactttgtatatggtaagttatcattttatacaaaaaaccaaagaatgttttcttctctattatatcatcatatcccataattatgggaacccaaaaaaaaaaaaaattggaccctccattataaatataaactattgtcatataaattttagacataactgattttgtcataaagaaattgaaaggagaatctccgtgacggttggatatagcaataataacaactcttaataatcatagcaacaagcaaataaaagcagcacatggaagccatttgcgcaaggataattcttgtaagaacacattacctaaaagctaataataatgagaaaaacagcagaaatattcgaaaccatattaaaaaagaatgaaacatttcttaaataaacctaaactagattcgattttgcatgtttgatccacttgatgtatgaacaaaagaaacataaaacagtaagcaaaagtcaaggatctaatgtaaagtcataaggaaaaaaactaaatttaaacaagttgtaactgcagatcatgttatgtcttttaactagtaaatcctacgaccaattagattagagcaaccaattcttttatgattttgatttttgagagccaatttttatttgtattgaaaataatagttatatttttcactcctataaatttattttctactaatgaaattgttgtttataaaagtattctgtgtgtaatagtctataaaaaatatagtacaattttacacatttttaaaagttaatatttttgatattttgtatagtaaatacaaaaaataccaccacacaatacattgatgattcgaagtttcgaaccaccattttcattgaatcagctctaatattaaaaaaaaatgatttttttgataaaatatataaagaatgttagttttgttaaaccaatatatcataaatacgatagtatatatttttgtattttattgagcttgtaatcagtacatggatgcgaatccgagtgacgttgatattggtacaaactacaaagtatagtagtctaagtatatgtccatatatatataataaatctgttatattcaatgattaatgaaacctggaaactggaagtgcaaaaatgcattgattactttaatcgaaaagaaaaacaaaatgcattgattatagtatttataaaactgcagattttgcagagagcaggaaacagagaggtttggttttgcgttgcgtgagctgtttcctctttaactctctcttcttctacctcttgaccctctctctctctctctggtgatgcggtttcttccttggaagccatg

SEQ ID NO: 25475 - DNA, 3003 bp, Unknown; identical to SEQ ID NO: 16598
  misc_feature (1)..( 3003): 2750-1469P.txt file - cDNA_ID_2706298; gDNA_ID_2214491; Annot_ID_133473

SEQ ID NO: 25476 - DNA, 3000 bp, Unknown; identical to SEQ ID NO: 11366
  misc_feature (1)..( 3000): 2750-1469P.txt file - cDNA_ID_2706305; gDNA_ID_2214492; Annot_ID_133496

SEQ ID NO: 25477 - DNA, 3000 bp, Unknown
  misc_feature (1)..( 3000): 2750-1469P.txt file - cDNA_ID_2706317; gDNA_ID_2214492; Annot_ID_133491
agtctttctaacgcagcctgcagagtaatccttcaagtcccagtctttctgcgacataggcctaaacccttgtgggcaacggcaaaaaggctcagacttgtcactgcaaattccaaaggagccacaatacctatagacctgacattgttgtcgaggttgagaccagaacaagttccatgccttgtttccttctaaccaagtgaactgtttgatctgtccagacacgtccatgacgaagcgtgacacgttcaactggttatagatagagtacgtgaagtatgagtctgtggtgttagagaaaaagctgaagttgtagatgtaattgagtctcatctcgggaaccgaatcaaagatcctgctctgagggttccaaggaccacttgaccagtactcattagatccgttccagagaattttgtaagctgtggattcgtctagctcgagagagaacaaacctggtgatggatcttcgagactcttccacgaagtgagtcgctggctctttccggttcgtttatctaaccggatcttcactccgggaagccacgtgtctcccgggtgatcaaagctttgccacaatacgttagctgataagctagagccgccggttctgagaacaagattgccgtcgtcttgcaaaaccgcttcaagagcagaaacagaggaagtggagttgagaccggtggaccaaaccggagtctggtaattaccgtcgagtaggattaagtttccgttggagattttgaaaactgatgagtttttgtcggaaactgctttgtctcgattggctacccatagtatggtttgagagagttgcttataccacatacctatgtagaagtttgaagaagaacctggtttaaagaaacccatttcgtaagttccgtcggaggagacaatagtctggtcgccggagagagtaaagtcgccggagattgtgtcgacggcggaagagccatggatgaagaagcagatgaaaaagaaggaagtgagggtcaagaacgaaaccatgagaaaagcttagaggaaactggaaagagagagagatcatatgattatgaagagagactcttcttttaaaaaggagaagactccgtgaggtttggtttgttaatggcgattatcaaagagaggagatatgtcgtatgtttgggttggtttgtttattggagaaaagtcaaacaagttacaataattatgatgggacggacctaaaatacttttcttgacctcgtcaaaaactcaaatattattagatttgtgatttgtctttctcgtatatttcacgttgtgttctgttgtgttgtgtgaataaaatgcgtagtcataaaatgcatttaaccaaactagcacccaattcgtattatgaatgaagtctaacgtcttgactagttaatatggtcggacatatgatgattatacaaattggaaaataatgtgtacccaaattcttgtttttatttgtgggtcaagatatactttatttttaaaacacctcttgaattcttatagaaatgtttttagtcaagataaaaactttaatcaaaatggtggaatcaatacaacaataaaagaaaaaaaaatgtatttaaaagatcatgtttagctaaagaatgacaaccacgttacaaaatcgttttgagatgagtgaaaattcgcttccttaaatcttttaggtaatctacaataatatatccctaatatattatacgtatgttttcgtcttttcgatctcaatatcttttgaattttgatagctaaagaatgaacaactacgttctacgttacaacaccgttttgacataaatgaaattcgtgtacttcaaatcttttagcccacaataattttttttatcccacaataatatgttgtcatatcttttgattcgccgtaaatgatcttctaaaaccttttgctaacctaaaatacaccctctgcttttttttttttgcttttttttatgtatttttttaatgtttttggaatttttttttgttttaaaatagatgaggttttcaatttttaatgcaaaattaaatatatttttttaattattttaacaatttatattctacagattgttttcatactggttaaatcttgtttaagtagataattaatagtactataattaaaaataataataataataattcgtgattggtgtgtgaaaactttaaacatcacatacaatttttaaaaagaagtattacaaaaagaactttaaaacaaatacgattttttttgctctttctctctctttctccccctatataagcatcaaagggtttatcataagctaaacaaatttgctcttacacatcggatcataagctaaacaagcaaacatgttttaaataccgtcagattatctaacgtaagccttaatccaacggtccaagttcaatctcttacaaagtcgcatagtctctaagccaccagattcctctcccctccgatatcgaagaatagttttaagttttaataaaatctccggtccccgtcgccggcgtcatcggaagacgaattcgtatcttagaactgtaatttcgtactcggcacagtacaaactttgccggagtagagtgagattacgattgtgctcacgtaacacattctttttagaccctaactaaaactcgccgccgccgttcgccgactctgttaccggttcgtttgctcgatcttgaactttgcttgaataacaaatgcgtgtttgcgccatttataatcatctgttctatattcatggtcgctgaatcaatgttttgatcactatgcttagtttcgattttgaggtttaagctttctctgcagaaacttctgtagttcagaggagatacgtcatttgattcttttattgttacttgatcttagtgaagtttctatagatgctgatggaaatgataaatgttaatttgaatcaaccaaagaatgttattgtatctgcaaacgctaatacttgtggagattatgacagataagaaggtgaagtgatg

SEQ ID NO: 25478 - DNA, 3000 bp, Unknown; identical to SEQ ID NO: 25477
  misc_feature (1)..( 3000): 2750-1469P.txt file - cDNA_ID_2706317; gDNA_ID_2214492; Annot_ID_183711

SEQ ID NO: 25479 - DNA, 3003 bp, Unknown
  misc_feature (1)..( 3003): 2750-1469P.txt file - cDNA_ID_2706321; gDNA_ID_2214492; Annot_ID_133490
tattaaaactaattataaatgtattaatttttgtaatttatatttttctttaattataaattaacgatattcaattaattgttctaaattttaaaattcattaataataactaataaatagtgcatagaaaacaaaaaaaaaatcaatcattttgaaacaatagtttttctaaaaaatcaataaatgatcaaaataataaaaatgcaatgaacgcgacaaagcaaagtttgaataaaagcaattaatgaacctttactcaagagtacattaactggaaatatttgatgaaacaattaataaagttttacatcggtttggaaagccgcaccatccaaaatttgagatgaaagaaaaaaattacccaaactatggattttatagtttttgcgatcaagataccacaaacttaccgatcgggtatgccatgaaaaagcttaaagctaacattcaagatgtccttgaaacctataacgatgattattttgttataggtttaattacctacgacaatttgaaacttttttcccattctgactattgtactctaataaatgatgcaatcaaaatcttccatgcacagagaagagttggtaattgttgcaattgtaaaaacaaaaacccataaaatctcaagaacctcatgtcacacagataatgccacattgcttacttaaaaaatttgctttcttgtttttcttttttttttttttgccaagaaaccaatgtttttcttttctctttttttttttttgagcaaaaccaaaaaaccaatgtatatttgtactttaccaataataaaatctcaaaaacttgaagataagtttgatcaaggccgacccatgggtaaaaagcccaacaagcgaatgctttaggcaacaacgtttataaatgtttttagcagcctcactaaccatcaagagttttgctttatttgttatcatattctttttcgcagtatacactataaagatgcggtcatattatctatattttttgtaacgatttggctgggactgtttgtggaccacgacgtctatttttggttgatggatttctacaatatacgatactgaaaagagtaaaaatcatttattttattataaaaataatgtctccaactttctcttgtaataggttatggcttgtattcactgattcttaatgcattctagtataactttatgtcatttatttatttaatttagtggtttatcatttaagccgcatacgtctttactctatctctttctcctagagtataactataagttatactatgcaaacatgtgagattttattagaaagtataaaagatataggtagatattaagagataagctacgaaagtagacgacattggtgcgttgcgttaaaagaatttgtagttaattatttagaatgataaactaagaaaatcgtactaaaaacaataataaagaaaacaatgagatgaggaatcacacatggattccattttcgtgacattccacttttgggggtttccactaaattttttataactttgatttcgtgtctcttcctcacgagataaaatccccctttgaccatttgtttcgtccaatcaacttaaaacctagcaagaactattaatcataatataattattcagattcttagatatgctatatactaatgtgcctaaactcgtgacgtatcggaccagttttagtcccgccctactttcaaactaataatgttttgtaatctcaatacttttccttcaaaacaattttaagaaaactgccgtatttgttatgagctaattataatcgagcatcctaccttgaattaacttggtttcaagactaattaagatcgacttttccaaaataaagtcatgcataaaaattgatttaaatattatacatacgagttatgacaatttgtatataaaaaaatttgctggacgtttgagtaaaacgtttcataaaatataggaactgaatcttgaagataggaaccggaaacaaataactaaaaagatagcctacgagatttacgtggtaaaaaaataacttaaaaccccataaaaccttaatcaaagaaaaaatggtttaataaaggtttcaaaaatttagtaatggttctaaaatcatttggtaccccccttattaaactttcaacaaccttatacacctactagatttgtggtatttttaataattttgaatttttgtggtagttttggaaaacatgatttaataatttgaagcttttcgaattactctataatttttaatagagatcgatcattatccctaaatatatttataaaaaatctgataattactaaaatgttaaagaaaactaaccaatcatcttgcatctaacattcttacttatctgcctatataagcaacaactcccatttcttgacttctctatgttcctaacacttctctcaacctttatctgatcgcaccaaaccagttttttcgcatcggcttcttccttttgctactagctctcctctcttctccggtatttttgtctctcttcttaattcacacagatttcatgataagtgatgatctataacaagacgctaactcttctcttgcatttctcgtgttttcattttcttgttacgccaaatttatcccttcaaaatcatttttttatgcgtatagaatccaaataataagtaaaagctgattcgtcttcttccacttaacacaagtaagcaatgagagggtgaagatttttctttaggaaaaaaaagagagtgaagatattttttggcttgatctcaacattattttttcttaaaagtaaacattttcaataagaaaatacaagacccataccgaaagtttcttcttaaaaaaaaaaaaaaggttttgaactgtttcatgataatgataactaaaaaagtttttgctttcttgttttttttcctccgcaaaacagtcttaaagtataaccaaaaagcctataaatcaatataatttgttgttttgatttacgttttacagaaaatg

SEQ ID NO: 25480 - DNA, 3003 bp, Unknown; identical to SEQ ID NO: 25479
  misc_feature (1)..( 3003): 2750-1469P.txt file - cDNA_ID_2706321; gDNA_ID_2214492; Annot_ID_183710

SEQ ID NO: 25481 - DNA, 3000 bp, Unknown; identical to SEQ ID NO: 11364
  misc_feature (1)..( 3000): 2750-1469P.txt file - cDNA_ID_2706329; gDNA_ID_2214492; Annot_ID_133488

SEQ ID NO: 25482 - DNA, 3000 bp, Unknown; identical to SEQ ID NO: 11362
  misc_feature (1)..( 3000): 2750-1469P.txt file - cDNA_ID_2706333; gDNA_ID_2214492; Annot_ID_133486

SEQ ID NO: 25483 - DNA, 3000 bp, Unknown; identical to SEQ ID NO: 11362
  misc_feature (1)..( 3000): 2750-1469P.txt file - cDNA_ID_2706333; gDNA_ID_2214492; Annot_ID_183706

SEQ ID NO: 25484 - DNA, 1801 bp, Unknown; identical to SEQ ID NO: 11834
  misc_feature (1)..( 1801): 2750-1469P.txt file - cDNA_ID_2706352; gDNA_ID_2214519; Annot_ID_134015

SEQ ID NO: 25485 - DNA, 1801 bp, Unknown; identical to SEQ ID NO: 11834
  misc_feature (1)..( 1801): 2750-1469P.txt file - cDNA_ID_2706352; gDNA_ID_2214519; Annot_ID_184539

SEQ ID NO: 25486 - DNA, 3000 bp, Unknown; identical to SEQ ID NO: 11382
  misc_feature (1)..( 3000): 2750-1469P.txt file - cDNA_ID_2706369; gDNA_ID_2214493; Annot_ID_133513

SEQ ID NO: 25487 - DNA, 3000 bp, Unknown; identical to SEQ ID NO: 11382
  misc_feature (1)..( 3000): 2750-1469P.txt file - cDNA_ID_2706369; gDNA_ID_2214493; Annot_ID_183740

SEQ ID NO: 25488 - DNA, 3000 bp, Unknown; identical to SEQ ID NO: 11381
  misc_feature (1)..( 3000): 2750-1469P.txt file - cDNA_ID_2706381; gDNA_ID_2214493; Annot_ID_133509

SEQ ID NO: 25489 - DNA, 3000 bp, Unknown; identical to SEQ ID NO: 11381
  misc_feature (1)..( 3000): 2750-1469P.txt file - cDNA_ID_2706381; gDNA_ID_2214493; Annot_ID_183735

SEQ ID NO: 25490 - DNA, 3000 bp, Unknown; identical to SEQ ID NO: 11380
  misc_feature (1)..( 3000): 2750-1469P.txt file - cDNA_ID_2706385; gDNA_ID_2214493; Annot_ID_133508

SEQ ID NO: 25491 - DNA, 3000 bp, Unknown; identical to SEQ ID NO: 11380
  misc_feature (1)..( 3000): 2750-1469P.txt file - cDNA_ID_2706385; gDNA_ID_2214493; Annot_ID_183734

SEQ ID NO: 25492 - DNA, 3003 bp, Unknown
  misc_feature (1)..( 3003): 2750-1469P.txt file - cDNA_ID_2706393; gDNA_ID_2214493; Annot_ID_133503
agtcgaaatacccactggtgtcacagatgtcagcgtgctgtccgccttcacggccaagagcctgtatgcttttattgcggaggtggatttgttgaagaacttgatatggctcaagccagcccctttgatatgtttagatcccacaggggtgttgtagaacgtgatcagacttttgatctcatggatgctttctctgtgtttatgaggaaccgcttagctgaaaggagccacgacagagaaatcagaggaagaaccatcagttcaggtcctgaaaactttcctggtctggcccctttgttgatctttggtggtcaagtcccttatagactaactggcgacaatgcagtcgaagccctcttcaatggcggctcccctggcattggcatcacacgtggtaacaccggcgactacttcttcggtcccggccttgaagaattgttcgagcagctttcagctggcactactcgccgaggcccaccacccgcaccgagatcagcaatagacgcattgccaactatcaagatcgcgcagaggcatcttaggtcatcggactcgaattgtcccgtgtgcaaagacgaattcgaactgggatcagaagcgaaacagatgccgtgtaaccacatctatcattctgactgcattgtcccgtggctggttcagcacaactcttgcccggtctgtcgccaagagctaccatcagctagcggaccttcaagcagtcaaaacagaaccacccctaccagaaactacagaagcagtagtagtagtagtagtagtaacagtcgtgagaacgggaatgaaagaaggaatcctttctcttccttctggccattccgttcgtcaggttcaagctcaagctccactcaaaaccgtggaggcacaagaaactcggatacaagcgatgagaaccataactaccatcaacagcaacatcaacaatcatatatgggttacagtggctggccttttgattactaaaagtctaaaagtgagctaaaacaaatctttggtctcactttggtctctttacttaaatatgcttgtgattctgcatatgccttgtgcttcactctctatctctctcactctcttttatcaacataaataatggagaactgtatttgttactgtagattttctttctctgttaaaaacgagttcatcattttctatatgctttgttaaatatgtcattttagttgggtttttgaaaatggttgaaatagatttttgagttgatcgataaataaataaatgaaaacgtctggacactcttgagcgatctatcagtatctcgtgatcttcttcaatactaataaaaaaagggaaaagaaagagaagagagtcgtgctcataaattaacggtgcagagcgattgaacaaaaacaaaaatatcttccagaaaaagccatttttgattgcgtataatgaatacacgaaattaaaatcattacttgccatatatagtacactatttctcagcttcactcactctcgagactcgtgtatgttgatttacggtttgttcaagcaaaggtgatcatcaattcccaattttttttacgtcactattttcgattcactccaatggcttgcgtgttgctgatttcttgattttgtggttcttgagttagtctccatctgataagtaagtaaattatgtgattgtgatctgggttttgctaaagttttgatttttattattgttgtttagagaatgatgaatctaggatctctttcgttgagtacgagcaagtcgagtaagccaatggttagcatcagcttttggataccgtatttcactcactggggagagagcctgctggtctgtggctcggctcctggacttggttccgggaatgtgaaaaaaggtttgctgctaaagccatcccagcaagatgatcagctcatctggagtggctctgtctcggttccacctgggtttagctctgactattgttactatgtggtggatgactcgaagagtgtgttaaggtcggagtttgggatgaaacgaaaacttgtggtgcctgagacattgaccggtggagagtctgttcatcttcgtgatctctggcaggtttgagttctttgtccttttcgagtgtattatacaaattttgtaatctgattttgtagtgttgtgattgatgttctgttcctttaattttagagtggggatcaagctcttccatttagaagtgcatttaaagatgtcatcttccaccacagtttcgatgtgaaagtagaaaaacctctaggggtctttatgaataagtcagatcaagatggtattcatttttttatctaatcctatcacaccattgtctctgagattctctagtttgtgattgatctctttgctaactgttgtggccttatgactttaccatgtaaacagattcagttgttgtccaattcaaaatctgttgtccagacattggagagggaacatctgtaagcctttctctatgatctttggttttctttcttttcatgtttgagcctgatgtggtgttgtggccatcattcttacccttgattatgacatgtacaggtgtatgttctaggcaccccagaaaagttggggaattggaaagttgaaaatggacttagactcaactatgtcgatgattccatatgggaagcagattgcttgatccctaaagcagactttcctatcaaatatcctttctttttactttcttccagactaattagttgaacatagttgacacttcacttctcatatgctttctgcatgttgggttcttaacgattctttcacatatagatactgtaaagttcagaaggaagatagcatagggtttgaatctggtggtaatcgggagctgtctcttcactccatcggtagtaaacaggaatacattgtcatgtcagatggcttgtttcgagtaagtaacagagacaagctatgaactagctctaatgtgacagaatcaatgttgtcttactattatttaattttacttgtaggcaatg

SEQ ID NO: 25493 - DNA, 3000 bp, Unknown; identical to SEQ ID NO: 11376
  misc_feature (1)..( 3000): 2750-1469P.txt file - cDNA_ID_2706397; gDNA_ID_2214493; Annot_ID_133501

SEQ ID NO: 25494 - DNA, 3000 bp, Unknown; identical to SEQ ID NO: 11390
  misc_feature (1)..( 3000): 2750-1469P.txt file - cDNA_ID_2706397; gDNA_ID_2214493; Annot_ID_183727

SEQ ID NO: 25495 - DNA, 3000 bp, Unknown; identical to SEQ ID NO: 11397
  misc_feature (1)..( 3000): 2750-1469P.txt file - cDNA_ID_2706401; gDNA_ID_2214494; Annot_ID_133523

SEQ ID NO: 25496 - DNA, 3000 bp, Unknown; identical to SEQ ID NO: 11397
  misc_feature (1)..( 3000): 2750-1469P.txt file - cDNA_ID_2706401; gDNA_ID_2214494; Annot_ID_183757

SEQ ID NO: 25497 - DNA, 3003 bp, Unknown
  misc_feature (1)..( 3003): 2750-1469P.txt file - cDNA_ID_2706409; gDNA_ID_2214494; Annot_ID_133540
caattcaaataatataaatatgcatattttcccagaaaaaatacttttattctttctaaatccaccaaaattcaaaaataaatattaaattatttattaataaccttaatttcaagtttttttgtttatgtaatatttgatcatttaaggcaaatagagacatactcaaagtccaagtttgatataatttgtaaaattataattgatttcaaaatttataacacatctgctagaccgtgagtaatattaaattcgaattgtcactgatggttagtcacatatgtaaaaaagtttgaaagagatttaagctatatttattggttttaataaaaaaaaaatttatggttgaacctcacagttacaaaaataaaaatatattaaaagaaaagttttttttattacaaaacaatttttttttattgagcaataacttcttgatgtgaatgttttattgagcaatatcgtttttttttgtggtgctctaccgtaaaatttcgtaatgtatttttggaacaattgacaaagaaaagaatagaatcgcatatattattattattttccgcgaaaacacttagaaattttgtgagcaatatacttttatcctttcaaatcacatgattcgacattgatatgctggaatatctttttttctcaagacatgcaaagttgaagtttcttcatcattgagttgatagaattctttgattagatagataaagagatggaaaatgaagttgacacttttattctcacccaccaatgtgaagtatttacaattggttgttttttggatcccaaattgcagttgaaatgatgacaagaaaaaaaactgcggttgataatcaccaatcaaacctatactattatccctgtatcccaatataaaatcaagagttgtacttgtaattatatttaagtttgtctatttaaaactataatgcaaagaaatggttacatttgtttttttttcttattctttttcaccggttacatttgatttaatgtaatacttttagaattaaatagatcttgcatttcatacaaatttgtatgtttgaacatttgcaaagtgttatattttattaagaccaattggaacccaaaatcaatgaataattttgatacggcaaatcatcaatctcgaatatgattagtaagtgagtgaatgtgtaccaaaaatgacaccttaattcgtcgtcgtcatcatcttattacaattatccgattagcagaattattatttcaatttttgctttctgaatttgaatgcttttaatatatatatatatatatatatatataatatgatgagagagaaatttattgagtaatcaagaaagatgatttgcaaaactaaccacttttgataatttaatttaaaatataaattaagaaaatttactattaagaaaaaaaatttattgagatttctcaaaccatcaatctcatcaattggtaaactactctctcaagatgccacgtagacaaacactctgatagctaattctcaaatgccacgtgtacctgcaaagctttcctacttctcaaaacgtgagaaggtttcattgaggaaattcaaaacgtcattataaacactcttcttagtttatgatcgtctcctctccatctatccctcacgggcctcacccttcttggtttataattttagaacattaattactagagtttatgatttctttcggttctctagggttttcacttcgaattgaagccgataacatattaaaatttagtcgaaggacgaaactttttggttttgaccgtcttgattaacaaattttcttttctttatatcgttctcacatccgctattttatcaattatataatttttacaaagcatatattttcaaccgctaaaccaatcgtttaaactgcttgataacatttaaaaccgcaaccgtccacttttgtatactcctgtaattttatccacattggctgcgtttaaaccaatcacactaagttccaaacaaattctttcttatactgagtatgaccatcgtttttagttgtaaagaaacaaattttttgtttttgatttaatcttactattctgaattttttggtctaaaattccttaaattaaaaaaaaatagaagatttaaacgaactaaaacaattgatacaaatttattttctattaaacaatattacattaaagatcgaatccgggtcgggtaatgtaactcaaaacttgcttggtgcgaccctctccactttgccagcctcattcatctctaaaaataaacaaaaaccagtttttttgttgttgttcaggtcaagtagtttggtttaactactttttatacgtggaccaatgaaacaccaagaagccactaattttctttattaaaaactaaaactgaataacaaaataactaaaaaaaaaggaaaaaaaataaaataaacaaacaaaaccgaacattatgaaagagagagaatgccagatggatgatgaagatgagccgatgagagatagcttcatgatttgtctccgcgaccgcagttatctctttctaatttctgtctgaaataataaattaaacttcttctactacctccgatcatcataatcctccggtaagacttctcttctcttcttgaatcttcttgatgcagcttttttttgtcggcatacaacttttgtatttttcatattttttttttctccagctgataaactcagaattcttgaaattcggaaacttttcatttttctttgaattgtaggaaattatcattgttcgtatttatcttcttaaaaaaacactattaaatcctggaattggtaattatttactcacgtttccgaatttgtttacacaaagatgaaaatccgatgatcttgattaaagtatgtttgattcttgtataccatatttgtttgattagagtaatttgatcatcaaagatgttttgtattcaattttttctcaattagtctttatgttttgtagcaatttcaggttacaggggaatg

SEQ ID NO: 25498 - DNA, 3003 bp, Unknown; identical to SEQ ID NO: 25497
  misc_feature (1)..( 3003): 2750-1469P.txt file - cDNA_ID_2706409; gDNA_ID_2214494; Annot_ID_183776

SEQ ID NO: 25499 - DNA, 3003 bp, Unknown
  misc_feature (1)..( 3003): 2750-1469P.txt file - cDNA_ID_2706421; gDNA_ID_2214494; Annot_ID_133528
tgcaatgacaaaaattaaaagcgataactaaagtggttggtactaaatcgagatagtaatgcttttcaaacttgcttttgtcacagcggtttccggcgaaggattcttggcgagggatataatgataacaaacacagcaggacccgagaagcaccaagcggttgcactacgagtgaacgcggattttgtggccttataccgatgtgtcattgatggttaccaggacacactttacacccactcattccgacaattctaccgtgaatgcgatatttatggaaccattgattatatctttggaaacgcagccgttgtcttccaaggctgtaacatcgtttcaaagttgcctatgccaggacaattcacggtaattactgctcagtcacgagacactcaggacgaagataccgggatctcgatgcaaaactgctccatccttgcgtcggaggatttatttaatagctcaaataaagtgaagagctacttgggacgtccgtggagagaattttcaagaacagttgtaatggaatcttatattgatgagtttattgacggttcgggttggagcaaatggaacggtggggaagcacttgataccctttactatggcgagtataacaataacggtccgggttctgaaacggttaaacgggttaactggccgggttttcacattatgggttacgaagatgcctttaacttcacggcaacagagtttatcactggtgatggttggttgggaagtacttcgttcccttatgataatggaatttaacatttttttttgctagaaatgtatagggtttgtcttcatataaaaatctaattacaataattaataaataaaaatctaaataattctatggtttgagttatttctcaaagctgtgtattaattaagataagctggcaaaatatgtatctttcttgaaaagtctaaagcatgtctttcttggctttatctgagtttccactttttaagaacgagaaacccatgcgaccatgtctttttgaaagttccaacactttaaattaaaacatgcttgacaagttgtgttctgtcagattcagtggcatattttatttttatgaagacggtgctgctaatcaaatgcttaaaagacggtgctggtgatacataactaacgattgcatttttgttttaattctttgtttatatacctccttaattgtattcagagttgaaaaacaaatttgtatacacatacggtagccagtcgcatcttcttggctttgcaaaaagtgggttacaaagatagcattatacacatagacggatccataaattattgtacatcgaaagataatttttaaaatgttaagatagtatatgtttggggcaggttttcgtaaatcgtaatccaccagatcattacatttgtttgtagtcgaaaacgttgttgtttttggattactattgagcaaaaagtagacaacccaagcaaatttaactcaactgtgttaggtgttgatgattttgcttaggaatggacagaaaaaaagttgtaatctccaatatgtaagctagcatctgttattgcgtgaggcaaagcaaacaacgactagcatcctcgcttgtgtcactccaaacaactttagagctaacttaagtgataaaaatatggcacaagtacttgctgcaacagcaacaccattcacgtaatataagttacacgtattaataagggattcgtctaaaattcggtgataaaaaaactaagatacaaatatactattacaattgttttttttgttttttttgggttgaattgttcaatagaattatgtaacattcccgtgacaactcttttcaaatgggatttgagatgtttcccaataaaaaatgtttacgtctagtcacgagtgtgtctcttcaatagtcatcacgtgatcataacttggcatttgctcactctgaagttttacatatatccaccaaaaccattgttgttgcctcttttcgagtctggtgatgtggtcacttactcacttactcacttacctatatgatcttaagccctaaaaagataaggaagcaccaaactgatagagaccgaattaataatactatttacttttcattattgtcttttattagttttattgttttttcttatagctagattttcctttgtgatttgcttgttcgccaaggtgtattcctatttaacgaagacctatgagtttaatagagatcatccattaagatatcaaaagtggagttgttattttactcgaataaacgaaataggagattgacttcgttttgatttttgaccaacaactctagtctagcaataatgtatgatacaaaaaaaatggttgctaaatttagaaggctcaatttcttttcaaaaaattgacatcagcccacaaaactctcctgtccagagcagatatgttcaattgtagaaattgcaacaaaacagtaacaaataaaactgaaaccatggaatgaagacaggggagagaagacaagaaagagccaaaaataaaacgtaaaaaggattcatctttccttttaacctctctgccttggccgccttctaaggcagaggagattcatttctttctctccccaagaaaaacaatacaaaatttcagaaaatttatagtaatttcagtatggcgtttcaggattttgacaagatccaagaacgtgtaaacgccaataggaaacgtaaattcaggaagaggatcatcgttggaacggtctctttgcttgtggttgttgctgccattgttggaggagcttttgcttatgttgcttatgagaaaagaaatgaacaacaacaacaacaacaacaagcaaagaaccacaacaaaagcggtagcggcaacaacgtcgtcaaggatagcgacaagaagagcccgagcccaccaaccccgagccaaaaagcgcccgtttccgcagcgcagtcagtgaaacccggtcagggtgataagattatccaaactctctgcagttcaacgctttacatg

SEQ ID NO: 25500 - DNA, 3000 bp, Unknown; identical to SEQ ID NO: 11400
  misc_feature (1)..( 3000): 2750-1469P.txt file - cDNA_ID_2706446; gDNA_ID_2214494; Annot_ID_133529

SEQ ID NO: 25501 - DNA, 3000 bp, Unknown; identical to SEQ ID NO: 11400
  misc_feature (1)..( 3000): 2750-1469P.txt file - cDNA_ID_2706446; gDNA_ID_2214494; Annot_ID_183765

SEQ ID NO: 25502 - DNA, 3000 bp, Unknown; identical to SEQ ID NO: 11398
  misc_feature (1)..( 3000): 2750-1469P.txt file - cDNA_ID_2706457; gDNA_ID_2214494; Annot_ID_133524

SEQ ID NO: 25503 - DNA, 3000 bp, Unknown; identical to SEQ ID NO: 11395
  misc_feature (1)..( 3000): 2750-1469P.txt file - cDNA_ID_2706468; gDNA_ID_2214494; Annot_ID_133518

SEQ ID NO: 25504 - DNA, 3003 bp, Unknown
  misc_feature (1)..( 3003): 2750-1469P.txt file - cDNA_ID_2706472; gDNA_ID_2214495; Annot_ID_133552
aataactgatcagggtagaactggtcgttttctccctatatataggtagaagcaaagatggttcaggctccacgtaaaggaagacagataaaccagcaaaaacacatggtaaaaggggttttacctgatcaattagaattgttgcagaaagattgttgtactttgaaataagacaagtggcatcgtattcctgaagatttacaaaaggaacaatgcatcaaatttggggaaaaggaactatgataatggttttagtttgggttggttttacctcccaagcagctttgttgtcacctagataattggtgaatgccttctgtccccatgcacaatttatgggattcgtgattggtgcaaacgcagatacagactgaacatgttacacagatgaagtggttaaattaaaagaatgatataggagtaacaagtatttggttcaagcacattatccaccatgaaagacaatctatctttagatttgagattccacgtttcaagcatctaactcacattgcattgccacaagaaaactctttgaaatgaataccttgtatttatcgaggttcctcaggtatatagtaagagctccatgtccacccatggagtgtccagatatagatgcttttgttgtgtcaagctgggaaaagttttcactcaggagttttggcaactctttgacaacatagtcatacatacgccagttcttccacttttcctgagtagcattgaggtagaatccggctcctagtcgaaatcaaacaggaaagaaagaatattttatcacccttgatcattaactgaatacttaaagaccagaccaataggtccaaagctacaaaaagaagtgtgtgaaatgcaaaccagaagcatgtaacgttgcatacctacaccaaagtcgtaactgtctgcctccccttcaacatttagtcctcctacaatatcaaaaccatcacagagtgttaaaaatacacatcaagggaagatgataaatcaaaaaaatgaaaatagtgttggctcacttggagaagtgtctggagcaacaagagcaatgccgtgagtagaagcagcacgttgagctcctgatttgataatgaagttctcgtccgtgcaggtgaggccagaaagccagtaaagcacctgtcaatcaacaacatggagaatcattcatccaaaaatccaatcagttgttttggcatcacaacgaaatcaaggcaataaaaaatccaaaaacaatcatgcaaaacttaaagttttcgtctttagaacaatatgggagaaacccacaaatatcagtaatacttggttcaaactagagacatgaaatcagatgagtgaagataagagtgaaaatttgagaaaagtcacaaaagagcccttttttactgtagaaacaatcaaatctctacctcagaacatgaatcgtgaaaactacaacaagaaatttagatcaaagtaatgaagaagaaggaatatcattgcatacaggagatttatgggaagaagaagcagaaggagggaagtagatggaaaaggtcatggaacatccaagtgtctcactgaagtgtttgtatcttttgttgtagccatcgaacatcttcgtgctcccgatctcgcttagtccactcgccattatcactctctctatctcactcactatctctgtgattgcaaagtctagaagaaacaacagatgcaggctgcagcgaagacgaagaagaagaagaaatgatcgaatgagagaggtctatcggtttctacagtggatccgagagagcccatagaaataattcaacaacatatctccttaaaacttctggcccaactaaaaggtcttgaaaggccgatttgagtatcttaatgtaataatcaaatccggtttattatagtgacatgaacatctttaatgtaaaaatcaacttcattagtacaaagtgtgtctttgttaggtgatcaaatcatttatatatacatgacacatcagaagataacgcatagatttttatttgcggcggacccatttattgattaatttgtatatctatttgttttgttttcggtgtataataaatgccggtataactaaaaaaccatttcataaatgttgttcagattgagaaaccaaaaaaaatggaggtgatgaagaagactggtaccaaaaaaagatggagtaattttttcatgtgccattaatgaatgtatccgaagttaggcaccttcccttaaatatccccataaccaaaatataatgttacaaaaaagtctctccctttccccaactgtacccatcaatgcctatgtccattcctctcccttgcacataagctttgctctgtctatttaatttaactcttcttctgcatgaaagttttatgctttcgatgattcccaaaatctttctcatgcgttttttactttcttgatttggcaatcctcatgagctgattttgatttcttctttatggttgccgacacgaaaggtttgttgttcttgacttgtgtttttattttattggacagtcttcttttggtagatgaacaactcaaagacggagctaacaaagttgtttttttgatattccattaattttcctttattttattccttaatctttctttgatttttctctgcattgtgtcatgttttgtggcattactatttaaaggaattttttggtatctatgcattaatgtctgatttcttacatgacagaagaagctaggacacaaaacaactcaaattttgtttggtgagaaaaatcaaccaagaaaatattgattcttttggagcaaggagttggtttgattggtaatgctcaagttggtctctcttttttcttttcaaatccaacttgatttctttgttctatatgatccaaacccatgtagtataaatctgtagtggattacataaccaccagaaaaaatcatttctagtcattgttcattattgtctttggtttgtttgaactttcttgtgtgtgtggaccataagaagaaggaatg

SEQ ID NO: 25505 - DNA, 3003 bp, Unknown; identical to SEQ ID NO: 25504
  misc_feature (1)..( 3003): 2750-1469P.txt file - cDNA_ID_2706472; gDNA_ID_2214495; Annot_ID_183801

SEQ ID NO: 25506 - DNA, 3000 bp, Unknown; identical to SEQ ID NO: 11423
  misc_feature (1)..( 3000): 2750-1469P.txt file - cDNA_ID_2706476; gDNA_ID_2214495; Annot_ID_133551

SEQ ID NO: 25507 - DNA, 3000 bp, Unknown; identical to SEQ ID NO: 11423
  misc_feature (1)..( 3000): 2750-1469P.txt file - cDNA_ID_2706476; gDNA_ID_2214495; Annot_ID_183800

SEQ ID NO: 25508 - DNA, 3000 bp, Unknown; identical to SEQ ID NO: 11426
  misc_feature (1)..( 3000): 2750-1469P.txt file - cDNA_ID_2706480; gDNA_ID_2214495; Annot_ID_133566

SEQ ID NO: 25509 - DNA, 3003 bp, Unknown
  misc_feature (1)..( 3003): 2750-1469P.txt file - cDNA_ID_2706488; gDNA_ID_2214495; Annot_ID_133562
aagctctagggcggtgcatcgtgaggagaagatctagatcgtttatttaagtgggacctattaataatcaatcggacggtggattaattttctccagcgattgacgtttgttttttatttttattttaaattagcttgcttgtccgttttaggaggacagaggaaaaagaaacaagtgacttgttagggaagtcataccggtcgcatgtgttggaatttagttggaagattttaggagtgtttggatataggtacagatataaactcggcattgagcccattgtagtactattgttatcgccatttgggtcactaaatggaccctttttgaactttggttcagtatacaatcaaaatacagaaaccaacttttgggtaattttattcctgaaatagctaaacattagtacgtgagacaaaactggtcatttgctttgaaggtgacatatatcacccctttttatacgtgtctcacaacatttacagaaattatttaactttataaagatgaaaaaaaaaaaaaaaaactttataatttaatgatatatgaatgctttgaatcaacaactttaaccaaaataaaagaaaattaatgctttggatttatatccatattatgtgagttcaatttttttgcaacaaaatcttactcaggataagttatatttatgaatagagagtttttttatttaagatattactttataaaagaaattaaagatatttctgtctaaagttattactgattacacctaaacattaaatattacagattttatttttattagatgtaaatctttaccatgtgaaaggagtagatactttcaaacagattaaagcaatttggatatccgatacaagaaattaatactatgacattgcagattattaacattgctgacattgtatcagctatatctctccatgatgattttcatttaccaaaaccttgaaacattttgggcatgccaaactaggtgaccactaagacaaggagatagactgtgtccttccacgttaaggaggcaaatccgtgctaccattcgcaatttttttgagtagcatgtgagaaaataatttagaaacaagcagtaaatctgaaaatatgatattactcttgatataacaaaatatgatattaattactcttgggtaaaggaaaacaaatatgatagttagtactctctgtgtttggacaaaaatatttttgcctgcttgcatcggattaccgtaatacgactgtttgtcttcactccgaacaaccggagatgagtacaatacgactacattaaatataagattgtaatatgaattgagagtcaaattaacaagggggaattcagttatttctttgtatgtttaaggaataggtgatgggttagcctggtgtaagactatatatgtttgaatataggaattatttggacttttcttaacagtaatgcattgtgtgggggtaaataatgattgggtaatacaagggtattgctacttattacagtacaagagttctgaatatcaatagtttggactttacaacgttcaatttctggaatggatcaatgagattcgatgatacatatttctatcatgctcataatttaaaatgttgttgaaaaggtatgcagatcgtgttgtgtggattaaaatagcgttggatatcgtttaaaacaagtgctgccgcgatataactatcttgtccaaaaaacgataatagctaggtgtccaaaaaaacgtttcatactttcatctcttttcttttcttgcaagagtgccataaaatgaaagtatgaaacaaattaccacctttgcttgtatacgttgttgttatcagttacaattaaattcaatttttaagtttagtcaatttcacggacgcggttaagatgttaggcggtagccgaccatcaaaatagagttaaacattggattattctctatatatagctacataacaaattcattatccgaaaattttcaggcaataaagaacatattggagcaaacaataatttatcgtaagagtttttttaaaattcgttggaacttggaagggattttaaatattattttgttttccttcatttttataggttaataattgtcaaagatacaactcgatggaccaaaataaaataataaaattcgtcgaatttggtaaagcaaaacggtcgaggatagctaatatttatgcgaaacccgttgtcaaagcagatgttcagcgtcacgcacatgccgcaaaaagaatatacatcaacctcttttgaacttcacgccgttttttaggcccacaataatgctacgtcgtcttctgggttcaccctcgttttttttttaaacttctaaccgataaaataaatggtccactatttcttttcttctctgtgtattgtcgtcagagatggtttaaaagttgaaccgaactataacgattctcttaaaatctgaaaaccaaactgaccgattttcttaactgaaaaaaaaaaaaaaaaaaactgaatttaggccaacttgttgtaatatcacaaagaaaattctacaatttaattcatttaaaaataaagaaaaatttaggtaacaatttaactaagtggtctatctaaatcttgcaaattctttgactttgaccaaacacaacttaagttgacagccgtctcctctctgttgtttccgtgttattaccgaaatatcagaggaaagtccactaaaccccaaatattaaaaatagaaacattactttctttacaaaaggaatctaaattgatccctttcattcgtttcactcgtttcatatagttgtatgtatatatgcgtatgcatcaaaaagtctctttatatcctcagagtcacccaatcttatctctctctccttcgtcctcaagaaaagtaattctctgtttgtgtagttttctttaccggtgaattttctcttcgttttgtgcttcaaacgtcacccaaatcaccaagatcgatcaaaatcgaaacttaacgtttcagaagatg

SEQ ID NO: 25510 - DNA, 3003 bp, Unknown; identical to SEQ ID NO: 25509
  misc_feature (1)..( 3003): 2750-1469P.txt file - cDNA_ID_2706488; gDNA_ID_2214495; Annot_ID_183811

SEQ ID NO: 25511 - DNA, 3000 bp, Unknown; identical to SEQ ID NO: 11436
  misc_feature (1)..( 3000): 2750-1469P.txt file - cDNA_ID_2706492; gDNA_ID_2214495; Annot_ID_133560

SEQ ID NO: 25512 - DNA, 3000 bp, Unknown; identical to SEQ ID NO: 11424
  misc_feature (1)..( 3000): 2750-1469P.txt file - cDNA_ID_2706502; gDNA_ID_2214495; Annot_ID_133554

SEQ ID NO: 25513 - DNA, 3000 bp, Unknown
  misc_feature (1)..( 3000): 2750-1469P.txt file - cDNA_ID_2706506; gDNA_ID_2214495; Annot_ID_133553
tttacaaagatctagatgaagctcccagtggagagctccctgatggaggctatacaatggtagcagttgttggaatcaaggatccagtacgtccgggtgttagggaagccgttcagacttgtcaagctgccggaatcaccgtccgtatggtcactggagataacataagcacagccaaagcaattgctaaggaatgtggcatatataccgaaggaggcttagctatagaaggttcagaattccgggacttgtctcctcacgaaatgagggccattatccccaaaattcaggtcctttgatatatgatagatagaatgaattgttattgtttatctgtctattgaaaatgtttaagtatctctaaaattccttgtttctgcctttaggtaatggctcggtctctgccattggacaaacatactttagtcagcaacttgaggaaaattggagaggtagttgcagtgacaggggatgggacaaacgatgcccctgcgttgcatgaggcagacattggactagcaatgggaatagctggaacagaggtaagctatagttattctctgttattggtttggttaataaaaaaatctcgagattaacattttcgtttggtgctaattcccgatatgcaggttgcgaaagagaatgctgatgtgatcataatggacgataacttcaaaacaatagtaaatgtggctagatggggacgtgctgtatatataaacattcagaagtttgttcagttccagctaactgttaatgtggttgctctgatcatcaactttgtctctgcttgcatcacaggtacgacagaaaaaccaatcaaacaccatctttcttctagcgtttggtcaaatatagtaaccatttcttttggtttcttttccaggatctgctccactcactgctgtgcaactgctttgggtcaacatgatcatggacacacttggtgcattggctctagcaacagaacctcccaatgaaggtttaatgaaacgtgcaccaatagctagaaccgccagctttatcaccaaaaccatgtggagaaacatcgctggtcaaagcgtttaccagttgattgtcttaggaattctcaatttcgcaggcaaatcacttctcaaactagatggccctgactccacagccgttcttaacacagtcatcttcaactccttcgtcttttgccaggtaccattcgcaaacaaaaaccaacccaactcttatataaaagataagtaacaagagaatcaaacggtgtacaaacaggtgttcaatgagatcaatagccgggaaatagagaagataaatgtgttcaaaggaatgttcaatagctgggtgttcacttgggtaatgactgtgacggtagtgtttcaagtgatcatagtggagtttcttggagcatttgctagcaccgttcctctgagctggcaacattggttactatcaatcttgataggatcattgaacatgattgtagccgttatcctcaaatgcgtacctgtcgagtctcgtcaccatcacgatggctacgacctgcttccttctggtccttcttcttccaactctgcctgataccgtttctatgttcactttttttttgttttccgggtaggagtacacaaatatgtaagttttctatttttgctacttcaaattctttttttttataccacgaatggaattttgttttcgacttactccaatactctaatacgattttgcaataaattttgcattttaattgaatgttatctatcaagagctgtgctaagtattagaaaatctagagagatgctttgattagtagattctcaagaatttatgatcagaacatctaccttttttcgtataaatataaatctatattgtttttgataaaagttatagtagcatctaattagatttgtgacatgtataatgccagtatttatccttgtcgtaggtgagtctataatgttgaatcagaacgcttacgtaaagtataaacataataaaacgcaattgtgaaaatagaatgacatattattctctggatgacatgttaaatcaaatcatatagcataataaaatagaagaattttcctctatctcacatcaatgtacatgaagctttcgtttctgtatatacacgtaaataaaacatcggaaaaagatggaaagaacaccaactttgcttctccaatacatgaaactttaacaaaaacaaaaaagaacaccaactttccttaaaatgcttttataaaagtaaaatattcatgcataatttacttgaaacttttcgacactttcatttatttattgaagttaaagaagttggtcacgcgtatgaaatctttggaaaagcaataactgtacggacgtcactctcagatgttaagttcaataagcaaaagaatagcgggacccttcggttttccactttattacgattgtgccatctgactcgtcatttactcctagccgtccgatgaaaaaggcagaatctggagagtgtacagtaactcgaaaacacaggaacatatattcgcatttatacagtacgagtcaaataaaagtcaatgaatctgacggttgagattttcagttggacgaagagtggtccccatgagttaataaaacggcttagtttggtatccacgcgcctccgttggtttatccatttgtagcaaacccgttcaccgtttgaaccgacctctttctctctctctacactctactctaaatactgcagagtgttttgttcgtcgctttcactgccagcctttttttttctctctctcactaaattctctcgccgaccttcttcaaaccctagaaaaacgcttaatttctggaagatccatcgacgaagctcacaacggtatggttagaactttgggtgttcttgtgattgtgcttcttagtgagaattgctttggagattttggaaatgtgggtgaaaaggctgatttttttttacagaatgaattttgaggcttatcgtagtgagtgaccaccatg

SEQ ID NO: 25514 - DNA, 3003 bp, Unknown
  misc_feature (1)..( 3003): 2750-1469P.txt file - cDNA_ID_2706509; gDNA_ID_2214495; Annot_ID_133550
aacaacaagactttcctcggaatcttcatgatcttagttctaagctgtataccaggtagaaccaatctttgttccaatcattctgttagtaccccaaaagaattaccttcttcaaatccttcagatattcgttcctcattagtttcactagatttggagggttatataagcttcgacgatgtccacaatgtggccaaggactttggcaacagataccagttaccacctttggcaattctacatccaaggtcagtttttgatatttcatcgatgatgaagcatatagtacatctgggctccacctcaaatcttacagtagcagctagaggccatggtcactcgcttcaaggacaagctctagctcatcaaggtgttgtcatcaaaatggagtcacttcgaagtcctgatatcaggatttataaggggaagcaaccatatgttgatgtctcaggtggtgaaatatggataaacattctacgcgagactctaaaatacggtctttcaccaaagtcctggacagactaccttcatttgaccgttggaggtacactatctaatgctggaatcagcggtcaagcattcaagcatggaccccaaatcaacaacgtctaccagctagagattgttacaggtatttcattcatgctttatctctgcggtagtctcaaaaaaatatgcacctgtaaagaatatccatctcttcatgagcaaaaacactgacgactttaaataatttttgactataaaacaagagtgcataggcacaaatgtgaaatatgcaacacacaattgtaacttgcaccaagaaaaaagttataaaaacaaacaactgataagcaatatatttccaatatttaatcagggaaaggagaagtcgtaacctgttctgagaagcggaattctgaacttttcttcagtgttcttggcgggcttggacagtttggcataatcacccgggcacggatctctcttgaaccagcaccgcatatggtaaagttctatcttgaacaaagttcaaacaatatacgctatgattctaagaaccactttcctgacacagtcaaataacttttaataggttaaatggatcagggtactctactctgacttttctgcattttcaagggaccaagaatatctgatttcgaaggagaaaacttttgattacgttgaaggatttgtgataatcaatagaacagaccttctcaataattggcgatcgtcattcagtcccaacgattccacacaggcaagcagattcaagtcagatgggaaaactctttattgcctagaagtggtcaaatatttcaacccagaagaagctagctctatggatcaggtaagatgtgaaagcaatatataactagacttagtttccacagagagctccaaatcaaccgttggctactagcctactaacataatgaatggttgccgtgcaggaaactggcaagttactttcagagttaaattatattccatccactttgttttcatctgaagtgccatatatcgagtttctggatcgcgtgcatatcgcagagagaaaactaagagcaaagggtttatgggaggttccacatccctggctgaatctcctgattcctaagagcagcatataccaatttgctacagaagttttcaacaacattctcacaagcaacaacaacggtcctatccttatttatccagtcaatcaatccaagtaagtgagcaaaatgccaaaagcaaatgcgtccagtgattctgaaacataaattactaaccatatccaacattttgtggtttcaggtggaagaaacatacatctttgataactccaaatgaagatatattctatctcgtagcctttctcccctctgcagtgccaaattcctcagggaaaaacgatctagagtaccttttgaaacaaaaccaaagagttatgaacttctgcgcagcagcaaacctcaacgtgaagcagtatttgccccattatgaaactcaaaaagagtggaaatcacactttggcaaaagatgggaaacatttgcacagaggaaacaagcctacgaccctctagcgattctagcacctggccaaagaatattccaaaagacaacaggaaaattatctcccatccaactcgcaaagtcaaaggcaacaggaagtcctcaaaggtaccattacgcatcaatactgccgaaacctagaactgtataaaagtttcctgtgtccgtccttgtaaccgctcaggctaggcagcaagaaagtgaaaaattctttcttttttgtttcttttggtgaacaacaaattttacagtctgaaacagattgggacaattgtataggatctccataaaaatcctacgcagtgtcattacttttggtgctccaaaaactcaaaaaacatcatttttaaatctactataagcaaacaaattacaatagctcaaaaaatcaccaaatcagaactctgggtgcaaagcgatttaccttgaagaatcgattctcaattgggtccacgaatctcgttaatggagccaagctacgatttttccaatcgatttttgtactgaaacaacaacgattatcccaatttctcatcaagatggcagaaatttggcgcctttccgccatgaatagtcacgacgagattattttctctcttcagattgtgatttcaaatttcacttcgtttgtcacacgcgtgaagcaacaaaacacacgtgtgtgtatatttttattttattttttgctgggcggtcaggcgaagcagaggctcctgaagaaaatggcgcaacaaagtttatttatttcattaatattacttcttcttcttcttcgttggtaataataataagcaaatcccaaaaaccctaacggtactgtgtagaagctatatacattcctcttacttcacctcaacacgcaagaccagattcgtttccccgagagattcctttccttaagccctaaagtttcgatttttgatttttattttgaaagaatccaatttttggatg

SEQ ID NO: 25515 - DNA, 3003 bp, Unknown
  misc_feature (1)..( 3003): 2750-1469P.txt file - cDNA_ID_2706513; gDNA_ID_2214495; Annot_ID_133567
acacagagctcgattacttacactgccaaaaaccttaagaaagaagcaaagaggaactcctcaagtacctcctgaagaagaagaagacggagaattggcggtggcggagactctgaggcggagggaatcagaagagcgagttcgggttggttgacggaggagataggagccgccgtgacgtgtggtagtagtagtagtgagaaagaagagatgaggaggaggagaaagagcggatgaggcggcggagacacggtgaggcgatgagacggaggcaataccgatgcctatcttgggagacgcagccatattttttttgattgccttacctttaccagagaccatacaattgtctctttggctttgcagttaaaaaaaaacatcccgattttctgttggcgactgtgcctcacgcgcctcagcattatctctttgcttccaagtccacaggcttagatgattttcagccgttggatatatgtgatgaagcgactgaacggtggagatgtgttttgactgattttacttcgtcttttcaacggagggataagccaatcgctttttttttaagtgggaaagatcgccaagagtttaagtggacggacgacgctttttatattgggccataaatgggcctgttttggtactgaatatttagtcacgacgaagattcttaaacccaccggaaaatgggctaatctgtgtgcggattgcttcgccaaaaagttagtactaataatttataaagcataactagctaaatgcgaagactatatagtttacttagttctgaagaggttgaagtggaaatgaaatgaactaggagttggtgagggaaggtgacagactattttttcttaagtcaaaaagttaagctgaccaaaaaagagcagcccaatgaaagcaaggatctttatctttagtctagtgtctgaattccatgcacttccaatgttttagtcaacaaaatgtacttacatttgatgacttgatgttgtatagattcgttaggaagccacatcactaaacgttaagcataactttatggttaaaaaaaaacccccccaccgtgttcttacttgtcatccaaattcgatctgccatttgaagtttcctaagctgttcttgatgactattcttaaattcgatgtttatatcttaccatctaaattaagccttacaagagctacatatccaagtagtatatgctggagtagttttgtgatcccttaatcttattgttcaacaaataatttcaacaggacatatatatggatcactactgttaaaacgatatagtagagcttaagcgttaggatttgtattattagttgtctctctcttttacagacgcgtggaaggtacgcgccgtcataggaacattgtcggtaatccccttcaaacaccagtagtcagtagatcgatgacttgaattacatcactgtcccctactttgaccaatagagatctaaaggtttcctttcttgcattattgtgctaaaaccgacatttacttaagttacttgattatgtcttggaaaaaaaaaaagattttaactttgggaacttttattcaactgaaattttaaagaattatttaatttggaattccttctataaatttactggcttttaccgttatacgttaccataaacttatatatatgatcaaattcgaccgtgatgaatgatcacttttttaactttccattcagatcaactgaacccccttactttttctatatatactcttttaagcacttgtttatatattatcaacaaattaaggtgtcgaaagtaacatacaattagacaaagcatgtatagtcaaaaagatagatagtcatcaattttgaaaaacgagcaatttacatgatcctacaaaacaacaaaactaactatatgaaatatcaagtttataatcatttttaaaaataccattacaaaagatttgtactttgaatataatttaacatgaaatttagaaaacgatctgtttaagaatataacttctgctatgtggtattttaactggtactttatagagaaaaaaagattggtaattaatgtgatatttttgcaatccatattatatattcgagagattttactaatgatagtacttgattaatcattagagaaaactaaatcttacaaatataggtagacatgatgaataatatgcatgatttgcgtttcgtaaattgatagtaccacctcacctaaagggggtccaaacgagttgcttcatatcacaatatccaattttaccaacatacattaatatatgtgtattcacatatatacctcgtgattaatattttttttaaaatcatttttcgtttgtttcctatacgtctaatcaaacacacacgttacaactaaaattatattgacaatatagctcggttggtaaaagcaacgactactgcagtttccctgaaaaacttaagaccagtactaaatatcaactatacaaattaagttgatatcagtttttttgggggtaaagtaatccaatatcattctaaaattaaaagcaaaatgtcgttagttatacatgttagagacgagcgttgtgtttgagaaaaaaaagagttatgtcgtatagtggattcgacgtaaatattatcgatggttggtttcaaacctgaaaaattacatgtcatattgtcatcaaacatcgattttcatttgatataagaaaaatatatttacaaacacaatcgtgtgtgtgtgtatgcatcatgattatatgcatgttagtgttagagttacatattctatagaatatgtaaatagttagaagcgtacgttccttgaaaattgttcaaagtatttctattattgttttcttttgttaaagtatttctattattgtctcaaccacctaattaaattaaataacgtctctatctctttctatggagtcgtgttacgtctttctagtttgagatcttctactacttgttttcttcaagaataataattttcgttttatatatg

SEQ ID NO: 25516 - DNA, 3003 bp, Unknown; identical to SEQ ID NO: 25515
  misc_feature (1)..( 3003): 2750-1469P.txt file - cDNA_ID_2706513; gDNA_ID_2214495; Annot_ID_183817

SEQ ID NO: 25517 - DNA, 3003 bp, Unknown
  misc_feature (1)..( 3003): 2750-1469P.txt file - cDNA_ID_2706525; gDNA_ID_2214496; Annot_ID_133572
gttctcgtcccgaaatcgggacctgaaccgccacaaaattggtgactttaccatcatctttcccaaaaacaggacacatatgaaacaacatccaaaacggagacccagatttacgataattcaacaagctcacttgcactgatctctcttcacgaatcgcttcacgaatctccatgatcgatcttcgattagtcttaggtccttgaaaaactttaccgtttcttccgatcacttcttctcgtgaatagccagtcattttcaaaaaccctaagctcgcgaaaacaatcgggtgacccgaaataaacgggtcggtgattgtgaaattgtgtggaagctcctctaatgcttctttgatccataacgtgtatcgaccgctaaaggaatcttcttcttcttcttcagtgaaaactgattctgaagatttcgttaaggacataatcgtaataaacactcgatgatgattactcttcttcttcttgtcagtctagtgtttagttccaatcccatgtgggttttcaggcgaaattgagaaactttttcttcaaagtgaattcgaaacacgaaatccagattgtgaaatttgaaatcaggaatcaagaaaatgttttcattgaaaaaaagcgtaactttggagaagataagacagaggagagaaagagaaaccagagatccttaagtaaaggagaagaagaagaagatgaaatgagagatacggaattgagaaattaagagtcaatttgattgtaatctctatctgttagaagaaacgttcttctttcttcttgtctgatttttgttttgtggctatcggaagaggacgattggttttgtcgcgtttctcagttcttcgagttgttaagatattaaaaataaatattttcagatatttgttttcctaatttggtaaatacaaaatttataaattaaattttcaacaatttatctaaagtgatttagggataagtacaaggtttatgtagggtagacacaaattggataagataagtgaacttaatagttcatttagtaactaatgtgttgcgaaaaaaaaaaaaatgtttttgataataatatcttaatttgccgaccaaacaaaataattaatttaaaaatttataatttgtgataacattaaacaatagtgtaggttaaaaaaattttaattaattaatttggacataaatttttttgatctattaattgattaaaagtttattaataattttataccaaaaaatttaaaattcgaatttcaaatattataatttattacaaatttacagattaataaaaataaatgtataaaaaatttacaacaaaatataattataatcgttcaccaaaattttattaaaaacaaattttattaaaaatatttataacataaaaaaagaatacattgtatatcataaatctaataaaattaaaaaaattatctataaaaaaattatatataacattttttataatttacaataaaaaaataaatattctaaaaaccaaaaaaaatcactccggatatttggactaatctaatgctaattgtatttgttaaatataaaattatgcacctcttatttaaggagtgtagtgggtcctagaaaccgagattccacgtaaacaaaggctggaaaaagacaaaagctgactgtccatacttatctatttctcttgtgtcgtgtggctttgtttgtgttatcaaatcgatgcaacctggcttacgtggcatttatcatttgtacgttactctccggtgctaacatgtgtcattcactcatcgcttattattgattcgagtaaggaggcccattgggctgtattaagctgttttgtttttaaaacaggttcgcagacgaaaataacaaattgtcgccaatgttcatatcggccaactcaaatctatcatctaagagtaagaccaaaattaaaattcacagtacattgctacactactactatagaaaatggtgaaatacctaaaatgtgaagtctatgttcatgtttgcagttgctaaagactgataccaacgattgcgatcatcaaaagttattgcgcgcaacacattttttgttcgtttggtagtcgaacaaaaaatttggtcgttggtcgttatataacattttagggtgaaggattcgaaagaattttttataaaatactaaaatgaaacactttaattgctcgttataaatcaacttttaatcagaattttaatttatgtttcaaaagttaaaaatctcaaaacagtaaaacgaaatactgactagatatttgtttaaacggaatcatacgttttttttttttttttttaaatatcaggaggttttggactgaagcccgtaatcccctaggtctgaaaccacagcatgtaatattagtttcgtctcaagcgtcactcgaatttcgccaattgagctaacaacacttggtggaatcatacgtttatctgtttatattttcaacaaaaattatcattccgtaatcttatgatttctttgtaagtgcaagtggtctttgaagtttttgattgaattttgttggcttttagtaagaaatgatttgttactgaattcattttgtaatcaatcctaagttaatcaaaaattataaacaagaaaacccaaataagagtaatatttaggtttaaagacaaaaataactgaatatattccacaaaagaaggacaaacaaagaaagaacaataaaaaaaaccacacaaactataattggtttacaggaaaagtaacagagatatttacaaatcaatggtaacctaataattactctgttaatcgttaaatcctccattaatgtctttcattttccctctctctttcaagttccttgttatttaagaaagccatgaatccgattatctatttctaaccctgggccgaccagaaaactttttggacgacccaaacttcaagggttctaataaattcatcaccggaaaaagatacatataaaataaaaatctctcaccactgctgattcaaatg

SEQ ID NO: 25518 - DNA, 3003 bp, Unknown; identical to SEQ ID NO: 25517
  misc_feature (1)..( 3003): 2750-1469P.txt file - cDNA_ID_2706525; gDNA_ID_2214496; Annot_ID_183833

SEQ ID NO: 25519 - DNA, 3003 bp, Unknown
  misc_feature (1)..( 3003): 2750-1469P.txt file - cDNA_ID_2706533; gDNA_ID_2214496; Annot_ID_133581
tgctgtaagaatttatgcttaagcttgaaggaactgtggaacgacttgtcttgctagaaactcttgagctcaatgaagctaaaagagatcccaaataaaaatatctatgtcagattgatttctaacttaacaattctataaaaattgattactaacttaaagcatgatcataacttgatttcgaatttcaatcctcaacgttaaccaattcaacaatctaaaaccaaatttaagataactattgaagatttaacaatccaaacagtcaaatagtgagataatggagtaacatatagattcaaacaccaaatgtttccatatctaaccccaaaattactaagagaaatcagacataagcagaaattggtatttcgaaaggtttgattttgaagatgtcagacaaagaacaaaagcctaaaagtcgaatcttaaccatcttagagaataaggagaaattttcaaaaacagaaacttacgcagcaacgaaatttggataaaggaagaaactttagaggtatggagaaaattaaaagaaagttaccagaattagcatgaggactgtggctgctactatccactttagctgatgaatctaagcaattacccatttctcactcgataaaacaatcaacagattcaaaggaacaaagccaacgagctttttttttgtttactctgcggcgcaaaagctgattgtaataattataatcactaaattatccaactaaagaaaagaaaaagaagatttttgaaaccagaattagagaagaagaagaagaagaaggaaggaagaaggaacacagagaatcacagcacaaccatacatacaaaaagtcgtggtgttggtggtggggttttgagaaaattacgattctgccctttgtttgcttttgttcgccgtggtccgtggctttttctcttaaatgactatactacccttcctttcggcgaatatttttggtttaacgcgggtatcaaataaggggaatcagggatagtttggtaaaatactgtgttagtagatctggaccacctggcaacgtctttgcttgcgtaagcagatccacgtcagattttttcttcaaagcttttttacattcacctttaagcaaaagcaaaactcctaaaagatgcatcaaatctaaagattaatttttggtaaaagattccattaaatttttgtcatttttagataatgtaaaattttttattaattaattcgaattggagtacagatggtttagtactgtttaattatagaaagagattagttaacacgcttttggaatattttaatttcaagtgtatcaaaactttattcatattaaccaaaaaaaactttatttcatgcattgaccccaaaaagaattcctctatcattcacattatgtttgaccgacaaatccaagagctttttttggacactacacattgacacgtggaaatgatattcgaataatgatttttttttgcaaattactatttcctcagtttctttttaagtgatgtttaaggttattacacacagattaaaaaaatatataatttttctcttttctatacaaatattattaaatagaatgaatttaaccaataaaaataattgttcaaaaattattaaatatatttaatatttgcataaaaagttaaaaacatcacttaaaatgaaacaattttttttgaactaaaacatcatttaaaaataaagaaagagagtatcataaagcattgtttaccagaacaatcactaaaaatagattatcaaatgagtaaaatgtgttatttattcgtccattttatggaattgtaaaatttgttaacacaaatcatgattccactaaaagttgtcatagaagaaaggcaaaaaaaaaaaaaattataattgtaaacatgtaatatacggggtagtgttgaaatcatccattatgagttgatgaagttaaaatacatatcatggtcatcagtcatcactcatcacaatttaagtttacattttactttttcagtgagacaagttacggttgtgccgctcagattactaaaattgtactataacaattcttttgtcggcaattgaatagcattaaaagtttaatgtccgtattttgcaacttgatacatatatatctccaagtgatttatataaatatcctaaggttttaacacgaagcatgtgaatagtataaacacgacaaaaagaagcattcaatagtaatcttttgactatttcaaactcttcttatatatagatttgtcaaccatattatctatccatgccatcgatgcattatgatatttatggataaaaaagatcatggactaaaaaagtagtaaacgtagtttatagattatgtttgagtgcatattattttatttgctatcatatttatactttcaatcttttctttgtcaacaattctatctttgctttacactctttagtatcttatcatctttggtttaatattttatcaaaatccataaattgaacatacgagttttattcagtttgtcgctttgaagtttggatgattcaatcaaaacacttaagtagagattaaaactcttaaaactccatctaaatcaaagattaacgacccttaaatgatgtgactctactttttgtcaacttcaaagcacccaccgaaactttccatcattttgcaacttacaaagactagcgtgtggtttttacgattagaaaacggcgtgtagtttatatttataattcaaacacggaaaccatttcacgagctgcactccaaaagtacacgcgtcatcgttaaccaatcagaaacgtcaagtgagatcatcagtccagtgattagcttccacgtggaacatcgacgtatctattttcgcgcctttgtaacagcttcatcttcccaaatccaaaacaaacatttttagtttgcgattctcggattcgatcagtgaaattcgaatcgaagcgccgccggaagaatcatcgccggtgtgggagcgtttcccggagcggcgatg

SEQ ID NO: 25520 - DNA, 3003 bp, Unknown; identical to SEQ ID NO: 25519
  misc_feature (1)..( 3003): 2750-1469P.txt file - cDNA_ID_2706533; gDNA_ID_2214496; Annot_ID_183846

SEQ ID NO: 25521 - DNA, 3003 bp, Unknown
  misc_feature (1)..( 3003): 2750-1469P.txt file - cDNA_ID_2706551; gDNA_ID_2214497; Annot_ID_133603
taataagtcaactgaacacttgtcctcactggggaaaagaatctggcacaccaaaaagaagcttacaacttttagaagaaactgatgaaacctgtagcctgatcgatcgaacagtatcaagaggatgcgaaacaaacggaacatgcaaaaagatttctttccagagaatctgtaacacaaactaaacattgcaaaggatccaatggcatgtaaccgaaatccaatctataaccaatgctaataacaattgcatgttccactgtatgcgtaatcaaaatccagaggtaaccagatcaaaagattataactttcatcatgggttcagtaaaacaagttgggttcttttcacaaaaccataattttcaacgaacaaatctcaacaaaaatagctaaaaaataagaaaagaacagatgaaacagagtgagccacgcgacgaaattgatcaatgcggacgtaccggagaatatctcggtgagcggcattcacaatacgccgatcacgggagagattttccgacaaacggaaatcgagaggagctgattggaatcggtcaagcgttggatattgcggtggagacttgggagccatttatacacatctctctaatctctgcatgacacacttcaattattgtatcgaaacgaggattcaagcgtacatcgaccgacacgtgatcttatctaattggatgatttacttgactaactaggattaattaatctcgcctttctttggtaaggtttaagaatatgagacctcaattgcaagttttttttatatctttttactccctgaattttgtttcatttcatccttataagcattagattttaatttcaacctgagtaatattagttttatcatctcctcgagtttagatattatcataaacatatatcttactaaaaacctgacctgactaatttattttctttataaaagataaacatgataaatatgaagtgtgaacgcattatcaaatcagaattagtggatatatatgtattttgtttttttctgattaaaaaaattattgagatatatacaattgaactatgaggacaaaaaatatatatatatatatatatcttattatataaagtatggttttcaaaattgacttggcacagtgtcaagtcaaacgattagatgtttacatgtgtcattcaaaatttaacttttttattctttaaaaaaatagaaaatcttaaaaagtaaacaaatttacatatactaatttatatgtctatatatttataaacaattaacatttattcaacaaaagcaaaattaacaaatttgtctttaactcatgtaatcataagtgaaaatagaacactttgagaaaaatagcttagcttataggatttaacttttcaattattttcatttattaattttaactcatttaatattaatttgcatgatgtaaaattaacttacgagattacgtgggtgattggtttgtctgtaactgtagatttactgctgtagaatttttgttgtaggtgtgatgactgtagctgtaagttttattgctgtagaaattagactgtaggttttattaatataattattacttaaagaaattgggtagaaataagattttggttgtatgtatttttaaacaaaaaaatattatcgggtcgggttcggtttgggttcgggttcgggttcgagttatttatatattgaaatatcaaattttgtgtgcaaatctattaaattacttgaaattttcaaaaattcccaaaacaacatgagtagttttgcttgaatatatctaaaaatacacaaaaataactaaaatatccaaaaaaattctaatattttctatatataagtataaatataactaatatatacttatatttgagatatgtttgcatacctattcgggtttgggtttgagtttttcgggttttaaagtttatatccgttcgagtatttgaaaatttcgggtacacccgcctaaataggcggaccttatctagtatatatatacatttgaactatattgtttactttttagttgatttaggctatgtatgacattgacataaatctacctgttatttatcacgtgtaattcgtgtaaagtgtaaactagaaagttcaaatacgtatttgtttttgttctgttatataggattgtcatagttgtaaatctacaatttattacaacatgaataagtacacaagcaatgtaattggatttaattgctaaactctttacatggtcaatctaaatttgataagaaatacgtcacatattactaagactgatagtttttttgttgtcaccaattatttttgttaaattgacgaaaacaattccaaaaactcaaatgtacaaaatcatacagtctcacaaacatctcatagagaaagatataaatctcccatatgggaacgataacacgaggtcgaaatactattcgtaaaactaaaacgccttagttataaatcgttagttgtaaccgcggtcgagaatacatacagatccacgaaactactactacacatgctgctgaattggaatttggaaaagaccatcttctttaggaagagctcacccaatgagtgacaaaggtgtcggtggcttgttttctacccatatgtatacatcaaatggtagtttcattaacgtttggttttgagaaaagtaagactttggctagtagctaggttcgtatataataaactcttttgagaaagttcatcactggtggaaaatgttaaaccggttttttctcattttttccgccatgttaaccaccggtttaaaaagaccgtaacacattgaaagattaataagggtatatttgtaattacggtttgctggcaatttttaattattattttaattagagaaaatagagaagccctatcaatgtacatggtatatatataaaaggcaaaaccctagaaaacgatactcttcgactcagccgtcctttcgcagaaaccatttggagttggagctttggacgacgacaatg

SEQ ID NO: 25522 - DNA, 3003 bp, Unknown; identical to SEQ ID NO: 25521
  misc_feature (1)..( 3003): 2750-1469P.txt file - cDNA_ID_2706551; gDNA_ID_2214497; Annot_ID_183875

SEQ ID NO: 25523 - DNA, 3003 bp, Unknown
  misc_feature (1)..( 3003): 2750-1469P.txt file - cDNA_ID_2706557; gDNA_ID_2214497; Annot_ID_133587
aaatgaaatgagtatagtaaaatatcttctcgatatatgtcattataataacagatagattcccagtgctttaaatttactcgaaccatcctggcaaaatctgtgaccactagctttaaacctaacgtcttcatcaatgacagtgtctgatatatatgtatatgagaataaatttataatttctcccctgtacgttaacgttgtgtctcaatgtaattataattactattagctcacgtaatgagtgcaggattaagattattgaattcgaaatgaatatatttggactcacccatataacatatatatatatacaggtccaaataaatgcgggaggaaaattgtacctgtaaaataaccaattaatcatatttttctttctttcttgttgttggattatagtgattttcttatctaggaaaatagagttcccaattataagggctaactgtcccttgacagaaaaaaagaatcctatgagaagaaaattgaatgatatttgcatctatctataatcgtttcatttgattttactattagcaacaaatttatttgatttaatacaaacttcaaaggaagtcgaggcagaaccagaacatgtgttttttccacttatgcatttatttgtttatgatgagcctgtcctttttgtttttgccctcttcttattttatgtaccacaaactccatcaacgcgatatatcacgggtattctttttttccattgttttatacaaactattgtaactagcattatatatataaaaaaggactttaattttgtagtttttatacgtaacgactgttcatatcattgactttatacctttatacgaaacctttttcacgtatagaaaattatatctaagtttttattataaatgtttttgttattgttaacctactttaacaagaagaagaagaaaaaaaaataggaaaggttttgttgtaagaaattgtattaaaaaataacatatttacaacacgatgtgctgttataaaagcaaacttatgagtccgaatgtttttgatctgatttaaaataccaaaaactaaaaaagaaaagaaaacacacaatgactttaatatgtaaaatacaaacaaatgttgcaaaagaaattaagagagtttggtaatgccaaataggcaaaagaataatttatgtgtggcaagcaatgaacaaagctgagctgtacatgtaccacacctttcattcattggttaccatctaactgaaagtgacacgtgtcttataatcaacaaggcttttctgacgtggcagtgcatttaattatttgatttgacaagtttaggctatcgttgtcaaacaaattaacttaattgtatcaaaattgctcgcacagtacgtaattctattttaagtttaaaatcaacggagacactagtgtcctatttaattatctccaagtaaagaaaagaaaaaataaatatttgtgcttagttgattaaaaattaaaaagcacgattcttgtcttgagctccttacagcttacaagataattaagaaccaaatcactttttttggttaaaacaaatcataatgttagaggctagagatacttatgatgttaccatgcactttccccttaataactagctcacttaattacagtaataccatacagtaatatctacttgatgtgcctattgagtcatcgatccaatgaacttattcactgcttcaattttatgaaatatcattattttaacgtaaacatcattactagtgtttttatcatcaaattaccgatttagtgtaagtaaatcgaatcagtttttaaatactgttggacacatatatacatagacatgccaattactcaagtatcatgttggtttgcatatactctagttttaatcagggtttatattatttcaatttaagtaaacgcatgctaaatgatagatcatgaaatagaattagggtatccattgtttaatgaaatgaatcgttgaactggtataacatgcaaaaagataatgtatccactatgtaagcattataaggtgccgctataacaaaaatatccacatggtcaagactgaaacgtcgcattatcaaacaatattacatgctcaattgttaaattttctagccaaattaataatatcgtcatggaggaaaaaaaatagagttgaataattggcaatgatcataatggatatgggtttctcaaaaacgcaatcatatatcgtgcgacaaggttacagtaatatagatatcatgcttattccaaaacgacgactaaaacgtaaaagattacagaactagtaaacgagtatataatgttagggaatgttctttaatttataatctagctagtataaatcacatatcctatttcatatgcgagatatgaacaacaaagtagtatacttaattgaatcaataataatccaaattaaatttatatggtttagatcatagagaacctaaatatctaaaactaacaaagtctaaaccacctcgattaattgggaataggatgataatataaagtctagattttgttttagttcaaaaatcgaaacaaaatcttactgtaattaacttactacgttcccttactgaagattgatcaccacacggtaaaaaaaacaccgttaaaaggttaaaccaaaaatattgctaagaagacattatttggttagttgaatgaaaaattagggaatgggaagtgtgaaacctacctaaaatatggctatgtagatgatattcattgaagagagagagaatatagaagtgtaaaaagagaaaatggtgccagctatgaattagaaggatcaaagctttctctgaagctgtcatctatctctctctttccttatagtgctctgtttctctccacattcacacactctccctctctctctccattattaaatcacttgttgttgtctttcttttttcaaaccttggaagcaaggaattcttttttgatgatttaatcgaaagcttcttcctccaaacaaacatcaatg

SEQ ID NO: 25524 - DNA, 3003 bp, Unknown; identical to SEQ ID NO: 25523
  misc_feature (1)..( 3003): 2750-1469P.txt file - cDNA_ID_2706557; gDNA_ID_2214497; Annot_ID_183856

SEQ ID NO: 25525 - DNA, 3003 bp, Unknown
  misc_feature (1)..( 3003): 2750-1469P.txt file - cDNA_ID_2706561; gDNA_ID_2214497; Annot_ID_133589
attgaagtggaagacgagagagggttaacggcgttggaactagcgagggagattctgaagacgacgccgaaggggaatccgatgcagttcgggaggagaattgggttagagaaagtgatcaatgtcctggaaggacaagtgttcgagtacgccgaggtggatgagatcgtagagaaacgagggaaaggcaaagacgttgaatatctggtcagatggaaggacggtggagattgcgagtgggtgaaaggtgtacacgtggcggaagatgtggctaaggactacgaggatgggctggagtacgctgtagcggagagtgtgatcgggaagagggtgggagacgatgggaagaccatcgagtatcttgtcaaatggactgatatgtctgatgccacttgggagcctcaggacaatgtcgactctactcttgttctactctaccaacaacaacaaccaatgaatgaatgattgattttgatgattacattcttctcaatttgcttctttctcatatgtgttggttcatctgaccggttcggttggtacgtaccggtacattttcattttcttttaagatgtgatcttgatggtttttggccttttggggacactatttgattttatatccatgctttgaattttgcttccctttttggggagattcatgatgctggctgacttgctctttatcgtcccaggtttagagaatacatcgtcttaggcttttctttatctcaaaacccatttacatttaattgggcctatatatttcatataggaagagagtacatgtaaacccaatacacaacttttatttatgggtccgtttcttgtaacatttgttggtgataaaaacaacttctgaagagtgataatgtacaactgcactttgcgattaaggaaattatagaaagatacaaagtctgaataaatgactagaaaatatgaataagtagtatccattcttctctaattcaacatcatttttttttttttttttttttgacgatattcgatgcattgtgtctatatgagagaaattttggtttgtcagttaatggctagacttttattattatgagcatctagattttcagtgcatgtgatgttacgttgatgatggacataaggagacaaaaaggacggagttgatttagtacacattttcgtttctttgtgaatacaacgatcgcctatttttcgtttgtaattttcctcttaattcgagaggggcctctagtcatgtgtgttacttctagttatagtgacatgaacggatgagaaaagtttctttttgtaaacaacatgcgtacgtaaatcaaccaaatatatttagtataacaaccaaattactgttggacaaccaaccaaacaacaattatgtagattatagattagagaaaacaaggaactaggtcgattaaccgcgaccacattagccaagtcctccagtcgattaatataaattgatgccaaatatattagttttcactgggttttatattatactatcagaccacagaagacatcacgtcacagttaacaacactacatatttcagattttgtatgaaacgtaactaggtttatatatgagaccttttaaccaattaaatgatagtgatatggtttgtaacattgtattgtatgtattttagttgatgtgtgtggttggtaaggtataaattagctagtgttacgaaaaatgacttcttgctttttctttcaaattgaacgacgctctatttcacttaaataaaaccacatttagttatttcaatgacaacatactaagttttttcttacataaattaaaaagtaattttggtttcagtccaaatttttctagttataggaaagaaaatgaaagagttgctttcaaaatattgaatccattgtatttaattttgaatattgaatagtatgtactaaagtcttttctttagtagaccaatctaaatacgaacgaaagtaccaaaaccatacgaaacggcaaataatgacatgtggggaacacgtagttagatgagcagtaaatgggaaacatattttgatggttgtcctcatattttcgtgtatcgagttagataaggaaacctgtgaaaatttatttctcaaaagattccgtaagattccgtcgaatataattgatatttcagtattttggactggcagcgaatatggcagactatacagattgatcgtcttccggcgttgttatagacattaacaaactttaactactcgtttgcttaattaggaccatctgatgactttattctaagttcaaatttagatgacctctctttcttgaacatatacttgttacatacttaattcattgtgttattgcaataagtgaattgtgtggttatcactaacacgctgacgtaaatttacacgtgtttatatgaacgcacacgtgttttgtagctcgagcaaaagaccatctggtcaacggactaggaggatccggcgtaaatcctttatataatttttatcaaaattataagaagaacaaaaaatgtgcgattactatctgatctacgtattcacgtgacaaacaacaattaatttcaataaagatctactaactttagagaaaaaatcttatgtgttaataaaaaagtaacgtcaatgatctcggcacacactagaattagtgtctaagagaaccacgacgaacctgcacggaccgaccacgagtctctcgacggtgaataagccacgacttcagtctccttctaaaccaacgtggcgcttcttacaccacacacgtgtcatcatctccttctccctcgaacccgcaagctcttttaatccctttcaattaattaattaactatatatcacctgcccctatatatatctaaatcagtcactttttgcttctgttgtctgtcactcagtaacttctctttctcacttacacactctctctctctctctccattgccttgacttttgtggtcagtggaataaacacatataaccgccggagaaaatg

SEQ ID NO: 25526 - DNA, 3003 bp, Unknown; identical to SEQ ID NO: 25525
  misc_feature (1)..( 3003): 2750-1469P.txt file - cDNA_ID_2706561; gDNA_ID_2214497; Annot_ID_183858

SEQ ID NO: 25527 - DNA, 3003 bp, Unknown
  misc_feature (1)..( 3003): 2750-1469P.txt file - cDNA_ID_2706565; gDNA_ID_2214497; Annot_ID_133592
tttatgtttcataaaaccaaaacataaagacaagtaccttatattcagatatggagtgagtggattcccaacattgaaattcttcccaaaggacaacaaagctggtcacgattatgacggtggcagggatttagatgactttgtaagcttcatcaacgagaaatctgggaccagcagggacagtaaagggcagcttacttcaaaggttcggtaaaaacatgtcttctgcagaatcaccatttcccactaaaaattgaaaacttatgttgattctatcacactctcaataggctggtatagtcgaaagcttagatgctttggtaaaagagttagttgcagctagtgaagatgagaagaaggcagtgttgtctcgcatagaagaggaagcaagtacccttaagggctccaccacgaggtatgttagtagtaactcttaatcgatacatggagtgtgagtgttgaaagttgcctctttaattattgggctttcatgatgtctctataggtatggaaagctttacttgaaactcgcaaagagctacatagaaaaaggttcagactatgctagcaaagaaacggagaggcttggacgggtgcttgggaagtcgataagtccagtgaaagctgatgaactcactctcaagagaaatatcctaaccacgttcgttgcttcttcttaaaagtcatatagcttgaagctaagagaataggagtcgagagagtttataactgatactgttttgagattttatgtttgtcaagatcaagaacgtctgtggttatttctggttagttctgaaactcttttgaacccaagtttatctgtctctggtgaacaagcgaccacgataatcataaacttcattcgcgttaaaaaaaaaggttcagtaatgggccaggctcgtattcattattaatgggctaggctcgtgttcataaaaagtctgtaatgggtcattgaggtatacaaaggacatccaataaataaaacatttgtctcatttttaaaagtacatatcatctccgttactgtttcgtctatgaaaaaagtaacacggaagcaatgtgatatactactaggcaatagctaatcaaataagtaaattaagtaggactacaaagaaaacataaccaaaacaaaaaaagtctctcaatggtttttaatccggacatgcaccgagactgctgtttctaactcagaagtcagaaacgatggacaatctgacagcatttgtttttaatccatcggaatccattcttcaaagtcgatttaactttaccttcaactgtataagctttatacctcgcgattctcttcttcctcttcatctccgcatcgcttaaacctccgattcgcaaagacgacgacgcgttgctccttcccgccgctacttttcccggcggaggcggcagtgacggaggataatcccgagtcccgtagatctgatttctcttaccactcacgatttccttcctccgatcaacgccgtaagttctctgacccgacccgtacccacatccatcgtgactatccatttccctttaaaccggagctccgatcagattatttattccggcttgaggaaaccaaacaaaaaacaaagagcaaaagtgaacagatgatgatgatgattaacacagctcttatttggccttttttcgttttttaaagtttttactcctacttaaacaaacatcaaattaagctctttttttcttttcaattagtagctgtaattaacacacattttataatagtgaggaaataacagcttagggatacctcaaaaaaaggtttgaaccacctgtcacatgaaatctactgtcacatatccttgttgtggatattcactgattttttttaaaaaagttttgcctttggtaatgatacaactattcacttgaacaaatgttgatattggcagctgttagtttgcaaaaattaaatatgctaacatgcgcatataagaaatgaattatacgaaattttgattcgactctctgaaaacaaaaatattaggaaaatggtcatgtacctcttgcttaatttaacactagagattttattcaaaagaaaaaaaattaacactagagataatcagaacataatgggccagacatcaggcctttttacgaattacatatgggccacattggatactccgcaatcacataaatgacgtgagaggaagaggttggtggtggtagttttgtgagtcgtcactctttttatacttttaaaacccaaaaaaaaacgtacaagaagcagcgtgaaacattcaaattttgatggttctttgtttcttaattagtactagtattaattaaagtctgcatttatacgaaattgtctgattataggtcctaagagtaagagacaacacaaatcgtcaatttaatctaaaaaaagggccaaacatacgtataactgtttaaaaaaacttttttagttgtttaaaaacttataatcatgaaaagagaatccagcggtcagaatttgttcaggggttgagagtattactacagcttaaacacatctctgccatttattgcaacagcaatcatctcgcttgtaaaccgcatctgattgcgtcctctgaatttatttccccaaataaactctgtatgcttcataaatttgagcattgactttcccattttggatatgatcatattgttgttgtcggatgagaaattcgtacgtagcaataatttaatgttttcccacatgaacgattaataatttcggaatgattaaaaaagatactaatatatatatatatatatatatatatatatatatactttaacaacaacaaaaaaaaacagataatatatactactatatcgaacattacgttatcgaatgcatatcgatccgtgctctttataaagaaacctagagtgtctccgtctctctcactacattctccactgttcacattctctctctctctctggatctctagacaccaatacgcatagtgagcagagatcgtgatg

SEQ ID NO: 25528 - DNA, 3003 bp, Unknown
  misc_feature (1)..( 3003): 2750-1469P.txt file - cDNA_ID_2706569; gDNA_ID_2214497; Annot_ID_133593
ctttggttgcaccacaagtcaaatgcagtttatttgtgaaattccctgattaagctaaacaacaagaaaaaaaaggaaacgaggaagggaaaataaagttatagggaaaaaacgaaacatatgaatcgaaagtacatcttttgtgatggcagcaatttgtaattcccccatacgattacaatcatgtttgtgggatcgggattcatgtgatctcactgcggtgagtttaatttttttaatacatatacttcattttgtttttaggatgttttacagtaaataaagtcaatactagtagttagccaatatgcttttaattagtagtatgcctaatcatctcccatgtcgtgattccagttcaatagcggccataactgcttaaggatgatgtgtaaattttagctcacgtacgccgttatgtttcaccataatgctagctagaataatctaattcacacttgattataagattttcaggttaggtttcattttatgaaaagtgtgtagtcaagattttaataaaattgttattttcagagttgtataaatgttgttttgtgctaatctctttacaaaaatggaataaaagatggattattaggggaataaaagatgcttaaaaattaactttttttttaaaaagggcaaaggtattgaaacatcaaaactgtcatggaactatgattgaatctcacatgctctgttttttcttcatctttattctttctcctctattttgtttaatggaaaagccttttctaaaagtaattacagtaaatttgttatgtttacataatgattatatatcaatcgttctactgtttaatcaccaaaattgaattattttttatattagccggctcctatgaaatggttgcatttcgaaatttcaatttggataaagaaaaaaattctttaggttctaatttatttatgcttatttttttgtttggttaggcgtgaagtgggcgagacacggtcacgcgccaagtcagccgagtggtcgtttctcttcgaaagagagaaaatgtaaccgaaaccacgtggcagatatcgattcgttcgtgttattgacttgggtgacagtcggtcgtagcaccaaccacattcgattttctttgtgagacgtgtgtcctcgtcaaagacgctctacgtggggttacatgctaggctcggtttccgaaccttgattccgaggctctgatttgaattttttgaacgttgaagccaacccactttggttcgtctctctatcttcaccatattttccctttttgttttagcaattgttttcttcaatttgaaattccattcattataatatcaatatgtgcataatcggactcacaaaatatcgccgtcaatgtttggtggtgtgatgatctcatttgacaccgtaggatgttgactcgttgcccatatacattgtttattatcgatcgacatggaattcaaaaccgtgattatagatatatatgtcactaattaagtgcgttcgttatgttatgagaaaaaaaatgaaattacatgattaatcttgtctggagttacacactaagatacatgaactaagtactaaccatgcgttaatacaacatactcttcacagaggagttataagttttcttttaacatttctcgagttaccttttaaatgttctctagtaaagtcatgtatgaagataatttttttttacgagaattttacgtaataaatacaacgattatagtacatatttcttttaggatgggaaagaatcctatatatgttagttaccaaataatgaaatggacgttttattaggaaaaaacgagaatgaaatagtaattgggtaatggacctaattgcagtaactttcaactaactctatatttctcaagggataatttggaaaggaatgtctcgcctaacattcttcttctatataacaacattataaaataacaaatcattgcaattaattgttgtttcgctcaatactaaagtatcactttttataaaaaatttctttcttagctttgcttctaaagcattgcaaagacacatggaatcaactaattcacaactactgtgctactagctacatcgatttgtggaatgttttaatgacacatcctcttgtctcatatttacaatcttacatataagagaaaaacaattactaatactaatagaaaatacaaatgagataattatatagaaaaaatacaatttggagtaattcacaatactagtattaataatcacattacgatttccatggttactataataaaacaaaacacgatcccactaagttttattgaaacggaaaatctgaccattttccaagaaaagtatacaatgatcttggattcaattaaaaatgatactagtaataatgaaacatcagtagtatcatctagatctagtaataatatattaggaacaaatatcattgatgagtgatatataatccaatataagcaacaatagtaaatggtaacaaacttaaatagagagatataaatagtaaggtttttaataaaatccaaacggtagaggctaaccgaaaaagattctcgcgtgatcgtgaaaaaagaattataaagaattataaggtttggttagggagggaaaaaagaaacgaagcaagaggttcggaaagaatagagagaaggagaaagagtgaagaggacaacagagtataaagcagttatagctttacaaccttgtatttgtgagaccattcatggagcttatgagttctcaactttttttcttttctaattaaatctctcattaccttttaaatctatccccaaacttgttaaccaaaaaaaacagagaagaaatctcccaaatcctctttttttttgtttgttctaccgtttctcatatatctctctgtctccgatcttatttggatcggactagtgtcattggcagtgaagtttcattgactttggggttttcgcttttgatgctgtgagcttattattattgttattacggagttgatg

SEQ ID NO: 25529 - DNA, 3000 bp, Unknown; identical to SEQ ID NO: 11459
  misc_feature (1)..( 3000): 2750-1469P.txt file - cDNA_ID_2706573; gDNA_ID_2214497; Annot_ID_133595

SEQ ID NO: 25530 - DNA, 3000 bp, Unknown; identical to SEQ ID NO: 11459
  misc_feature (1)..( 3000): 2750-1469P.txt file - cDNA_ID_2706573; gDNA_ID_2214497; Annot_ID_183866

SEQ ID NO: 25531 - DNA, 3003 bp, Unknown
  misc_feature (1)..( 3003): 2750-1469P.txt file - cDNA_ID_2706582; gDNA_ID_2214497; Annot_ID_133598
ctcgtctaagcttttgtttgatatatgtggacaggtgcagtggcgagagtgacatgtgagagaactgatgaatatggttacgaagcggaggatgtgacggtgcttagccaagcgacggatgcaaagggttatttcttggcgacgctttcttcgtcggaggtgaaggattataagaaggtgatcaagatcaaagagtgcagggcgtttcttgagctttctccatctgacacgtgttcttttccgacggagattaaccgtggaatcagcggagccattctccaaaactatcgtctcctagaaaacaagcttaagatgaagcttttcaccgttggccctttcgtcttctcctctgaggaaactcaggacaagtctatccccaacggctactaaatttaacaatgttttttttttttctttttcagtttctaatgccctaatgggtcatattggcccatatatcataatatatttatgtatttagtggctttttgattgcataactcacacatgcaacaattactgaaaatatactgaatatctattaatgcacgtgatttttaacttttatacacactatagataaatcaaagatcaaaattgcaatataattacggaatccaatatcttctaaatttgaaattgtgagtaagaatatatatttatgctgcataattatagtgtttatacagtgcataattacctccgtacgttaatgtagtttccaataagcaaactatcaaattattacactttaatgggacaagtgcttcgtataatagtgattattaattactacagaagggcacaagacaaaattgagagtcaaataattaataaacacaactcgaaagaaacttgccttaaatatgaagaaggcacatgctttttccgcgtaatttgaacaactagtgctagtgggttttgcttaacagcttaagtagatacattacacaaaattttgaaaattgagtcattaaaatatacaaattatcttaaatatgcttgacttttacaaaagtggtttaaattttcttgagttacgcaaacgggccaattcctttggcattgcatgaattttcttcacgcgttatactttcatatcaaataaaacgtcgccgttcagagatacactttttattcagtccttggacttggatatggaacacggtttttagttgatcagaagtcaaactcattgtcctatcttgccgaatttagaggatttatttaaaaaatattaaataaataacgcatgataatgataatttataaaaagtataaccaaaaaaatatctcttaaagaaaagaaagaaaacaaaatgtagttttgagtttattggttatctggatttcggaagatatatatgattcataattttttaggagttaaatttattttttaagactttaaaagaaaagaaaaaagttagtagacattgtttcccataaaaaaacaccaggtctcttaagtctcaagtctaaaccatttttccttttctggtcagataattctatcacacatgcttgaatttgaatagaaagacaacaaaagatggtttaaaaaaaaaaaaaaaaaaaaaaaaagacaacaaaagacaacactgggaacatatttacccaaaattcgataatggacaagctacattcaatctatgcttatgttttcgttgcatgcgaatgcatgttgtattacgtttatgagggttgtgctctacgatgtatactcttcacatgacaatatgtacactaatctacattgataatacatatatttgttaagttcaaatagcattatcacaaatgattaagctatatgtatgttgtggtgaattttccataaataatttgtcatctgtcaataaaattttaatgtatattctataacggaattacggtcagatacatgtgtaggtaatgaattaagtaagatattaatatctgtcgacaaataaaagcatcaatatgtatgtacattctcttaaaactgattcgatttcattgtgtcactgtgtatattgtatagaaacatatccaaatacgtatctcatgcctgtcctctaacttaaaaacaaaagaaaaaattatcataccagccaatttaatgcacaagattaactaattgatcaataattggatacgttacaactctataaaatcatatccattacgctttgggcaatggcaaattggcaatggaagtaaaatcaaaagttaaacaaatgaattaccatttgaaacactccaaattggtattcgtgtccaaaataatttttccaaatgtcccatcattctaaagtttttcaccttatgcatggaaccttcctagtatatatacagttctaaaacgaattttatttgcaatggtctatcagagattataatgtcaagatcttgactttttgctgatgtgtagtgtaatgtgctgttttaccaacatgttatatatataatcgaattttttcttgaaatgcctaacgttggttgacaattttatattacgaaaacctttccctgattatgcatattcaaattgcggtaacagaagtttggtcaaaatttgactttcatgtaaaaaaaaaaaaactcaattgaccttaaacttaaattaaacacccatttatatataattatcacggatggaatttactccttaattacagtgattatttatctaatttttggtgagagacagatctatgcgtgtgaatattatcacaatatggtatatatgttgaattttttgacaccgccacaattatatatgtagtatgtacacacacattatcattgacttgaatttgtatgtatattcaaattcaacgttctcaaaaccctatatatataatccaaaacatttagcaaaatatctccaaaccaaaacacaattaagctaaaaaaaaaaccaaaggatgtctcagaaactcatgttcttgttcacccttgcctgcctctcctcgttaccatctccttttatctccgcccaaataccggccattggaaatg

SEQ ID NO: 25532 - DNA, 3003 bp, Unknown
  misc_feature (1)..( 3003): 2750-1469P.txt file - cDNA_ID_2706590; gDNA_ID_2214497; Annot_ID_133600
tctacttttcttgcttctcaatgttcaacagcattacaattattataaatatacaaaaagttaacgtagttttaatatattggccaaggttagtgaaatgttgtttaaaatagtatttcgatgtacaagttgtttttttaattcacgggtttgctcatacgtcggccgcagaaatagcgaatctatgggtattcacttaagttgccatgttgggtaatttatttgattattgtttaaccaacagcaataagagagagaaaagattgtattatgatttgatgaacaagataaggttgcccattggtcaaaacattccccaagttgggatatatttctattttcatcatccttccatgtgatgtgccgtgcggcaaatctagaataatgtactatcaaagttgtcaaaaagtaaaaaaacataccaaaatatcaaaaacaatctttgttagtttgtttcctttccgatggaatcaatttacgacacaccaaaataaaatgcaatctaggaccatgttttgttgtttgaatttcattcagttaataaaatgatgatacaagaaataatcattcacatttctatgaaacttcagatgaccactttctctttttaaaattttcttagaaaggatattggtagtcaagaaaaggcaagagagaaaaacatttacaaaagagttaggctgaaaatagggacatttgtgaaaaagtaagaattgattttacagaaaaaggaagtaaatacaataaaataaagaaggatagcgctactagtatctattttaaaataaaataattccctattttagtaaattatttatcaaaaacacaatttatttcacaaattattttataattaaggtcacttttatatttagtaaaattgtaaacaaatgatatattaagaataaatagtactagataaatctaagtagtttcgataattcttttttcaaaattttgattttgtaatatgatgtaacaccaagtcaaggtttatacattgagcctagtcatggccaacgcattcctctccctttcttcccctttattactttcttttttccttgtaacgtttttttgcctcacctttatttatttattttggttttctttctttcaagtcatttcgaatccaaaagattaaagaaaaactggaacaataacacgtaccagcttacttattagcaatcagaaagaaagacagtgactgacgccaatatcttagacattacaaagatgaggaaacccaacgtacgttcttcacttacacaatctaatcatagcgtgagaagatcttttggatcaattaaaggtattgacaaagagagttacccaaatgaaaaaggatcaaacatttgatctaatccaaaacccgataatgcgcaaataaaaaaggaaaagacaagttttgaaagtcgaaaggtaaccgattacttcagaaaaatttcaagtattactctagttcatcagaaatccaatttgccatttatgataactaatcaaatcaaatactataaggagcaaaagcagaactaaaagagagaaagattttctcctacttagttttcatatatatatatcattatagcaatgtaaaagtataatccataatagttaaaagataaactcaagtcatacacagactgaccatgaagtttcgtagctaggcttagaccttgaaacctctgctccttcttcttcctcttgctatctcaatttttttaccagtttgacgtacatacggtttggtgtggctgtgaggcacaccaggagctggtccaaagtgcttcactgcttcacgtgtgttcttaggacctctaagcagaacctgcaatcattacggaatgctacatcaatcgctactgcaataataaaaagtgaaaatataacccttgtaaactgagtacaagtggtcctcgagatagatattctctaattttcatcgagatagccttttaaacaaaggcttacaagccactagattttgaaagttaggacagtaacctcaaattccaatcatcatgaaacgagacatagtaactgaactaagctacatacgtcacgaacaagtaaacgattagcacaagtttccacatttcgacaactgaactaagagtgaaacaagaatgggatataccgtgttctctgaccaagtggggcacggaagagcgagctgatcaaaagtgaggcactctccaccagccttgtggatcctagctctagcgctctcagtgaacctcaatgcagtaactgtaagagccggaacatcttcgattctaacatcatcagtcacagtaccaacaataacagcaatctttccatcctaataaaatcaaacacacagagcattagttcatgagtcgccaccaagtaacataacatcgaactcaatgcagtaacaacctaaacaacaacaaaattcaaacctttccgtccatgtatcggaccagacgagagagagacagtggcgctttgttcactttgctcatgaacaaacgcttcaaaatcacggcattgaacttgctttctgttctcctcaccagatatcggttcgcctaaaaaaaaaaaaaatttaatctctgacggatttttagtcaaatcctcaaccttgacaaggagcttgagatagacatcgtcggatttaggctcagtacgtttcgtcttcttgctcttacctccggctatcaaatcgataccctaaaatgatgaaacacacagaagaagcccaaagtgagagtcaaaatctagaaagaagcagaaccgaagattgcttgggagtgaagataagaagtgaaactactaataatatgtatcagtttagggtttttgatgggctaaatatattaatcggcccactaataagaatattgggctaactgatgggcttattagggctttaggaggaacagagttaaacctcacttttttttattaattcgattttgggtggttccggctaataatcttctccgaattcgacggagagatttggtgaagacgatg

SEQ ID NO: 25533 - DNA, 3003 bp, Unknown; identical to SEQ ID NO: 25532
  misc_feature (1)..( 3003): 2750-1469P.txt file - cDNA_ID_2706590; gDNA_ID_2214497; Annot_ID_183872

SEQ ID NO: 25534 - DNA, 3000 bp, Unknown; identical to SEQ ID NO: 11482
  misc_feature (1)..( 3000): 2750-1469P.txt file - cDNA_ID_2706594; gDNA_ID_2214497; Annot_ID_133602

SEQ ID NO: 25535 - DNA, 293 bp, Unknown; identical to SEQ ID NO: 12369
  misc_feature (1)..( 293): 2750-1469P.txt file - cDNA_ID_2706598; gDNA_ID_2214546; Annot_ID_134566

SEQ ID NO: 25536 - DNA, 3000 bp, Unknown; identical to SEQ ID NO: 11488
  misc_feature (1)..( 3000): 2750-1469P.txt file - cDNA_ID_2706616; gDNA_ID_2214498; Annot_ID_133618

SEQ ID NO: 25537 - DNA, 3000 bp, Unknown; identical to SEQ ID NO: 11488
  misc_feature (1)..( 3000): 2750-1469P.txt file - cDNA_ID_2706616; gDNA_ID_2214498; Annot_ID_183904

SEQ ID NO: 25538 - DNA, 3000 bp, Unknown; identical to SEQ ID NO: 11494
  misc_feature (1)..( 3000): 2750-1469P.txt file - cDNA_ID_2706620; gDNA_ID_2214498; Annot_ID_133616

SEQ ID NO: 25539 - DNA, 3003 bp, Unknown
  misc_feature (1)..( 3003): 2750-1469P.txt file - cDNA_ID_2706624; gDNA_ID_2214498; Annot_ID_133613
acagatccaaaacccaaatttgccaccatttatatatatatatatatatatacatataactaataataagaaatttagcaagtatttgatagtatttgcatcagcataaatcaaaattttctcaaaatgtctgtctagctatttcagaacctagacgtagttgtaaaactagtcaggggttaggagatcgatcaggtctttagtttcagggttaaaccaatgcagccaaacaagtggaaaccactttcactaaataaagctaaacaaaaagaacaaatcaaaacctaaacctataaaataatactatactacagtttacacagactctgatggatgatgtctatgactccgatttaacttttcatacttttcattataacgaatagatctttctttagatattgtataggtacaaattatcaaaaataaaaaaaagaagtccaaaaataaaactaatttggctttaactagcaaagagaaacaaacaaactcaaaatcaagataataattagaagaagaaaaaacccatttttgtatatttaaacatgagagaaagaggtttaacaaataaaaataagagtactgaattcatttatagggttgcttgcacatctgccgacaccaactagttcccttgaagtgtcacatcttttgttgtgttccaataactgtactgctcatatttcagtctttaatacttttaaccttttcacgatcagtataaaaaaatttcttatcatattcgtcgttactctttaactaactacagtatagaagaagaaactacctatttatagaactctgatctcctcggcagtttcctattggttaccactgctgagtatatagaatctatggagaatagtatttttaaatttagaatgttactattaacttaagtacaaatcaatatcagattatcaaaattggtatagttggatgttctatggctatggggagtctgaatattgctccctggtctcagatagatgctttcaaaatttaatactacttaaatttaaacatacatcgccacatgacccatcactatcacggttacttatggatatccaacattaaagagtaccacccaacactaggactcttataaaacacataaactccaaaattttatacctaatatccctggacaatatcaataaagttttattggtttcttttttgcaacaaacgcaagagaaatttttattcgtcacggattgaggttttacgcacaccggtacaaaagtgtctatgaagaaaataacaaaccatgcaaacgtgtttaacgggctttacaaatatgttcagaaattactcgcatgcgagattaaagaaatacaaaaaacaagtttggaaccggaggattgcaattatcatctattctatatcgcgtgtgtgtgtgtgtaaaattatgatttataatgtatcgaggtcttagattttaccttgcgatcctagagtttcgtacatatatatcgactattcaagttcttctttcatctttttgtatcttaataagttccacaaatttcgacgatagagaccatacatttgttgttatcctctactcacgaagacaaccagtctaacgttattgcataagttccacgtaaattaaaattgtgtttcttttgttaatattgaaaataggttaaaatgtcgccaaaaaataagctttgaaaacttgaggtaggaaaaaatcatggttcttttgcacatgctccggaccaatcatgtttactactaaaattcttactgcttttataataatcatctcgactggcgcgtgtagaactctagatgaatgccaagtcttattttctaattataaacgcaaataataaaaaggtttaagaatatttaaatttcacatgacaatatgacacaataaatactacttgaaaaatgatctttgaaatttcatattttctaatcaaaaacaattccttcatattttgaaatataatcgatctctcatatttaatttccaattagagaattatatccacatgatttgctttcaaatatgtctatttaacgtgtacgttgaacttgaacctatttattatttaattcattcccaaactaaaaatattttattttctaaaaaatatagtcgtaagcgtacttgtgtaaatatgttctaaagttaataatgggtttagacatttagtagaaatatatattttttggtttttggtttggttggttcggataatcaaaattttcagtattcgactaaaatacatttttgagttatatttctttacttaattttcataattgtaagtatttaaccttgtgtacgattaaaaaaaaaaaagtattttaaccttgtgtatcattcataatgtaggttttctttccattttgaaaaaaagttttgatattggttcgcattcatcagttgaaaaccaagtcaaatttatggtagattggcaatggacaaacacaaaatatcatctccatttattgccaacctcataatgccaaatggtggaccaaaaggaaaaacatgcatttatttattctcttgacataagagaaaatgcatttaacttgtcaaataattgcaaggaaaaactctataaaaagatagaaatgtgaacagtataaagtaaataaagaaatatgtgtacatgaaagacctctccaatgttcacttgctccagtttctccaagattagaaactgctacgtctctctctatagctccctcgttttgctatgtggtaattaacaacagacaacagtttttgtttgtccgtaccgttttacttactctctcactgtctttgtctattaccactctcgtctctttcttttttccttctgttctgtttctctctctaaacccaaaacagtcaaaatcagggaagccgaaattttctttgctttcttctcctttggtcctttctttaaacccgagacagttaggtttgtgtgagagagagaatgatgagtaaaaccctttctgtctgagtaagaggaaaccaacatg

SEQ ID NO: 25540 - DNA, 3003 bp, Unknown; identical to SEQ ID NO: 25539
  misc_feature (1)..( 3003): 2750-1469P.txt file - cDNA_ID_2706624; gDNA_ID_2214498; Annot_ID_183899

SEQ ID NO: 25541 - DNA, 3003 bp, Unknown
  misc_feature (1)..( 3003): 2750-1469P.txt file - cDNA_ID_2706632; gDNA_ID_2214498; Annot_ID_133609
gtagtagcttcaatttccatagttttgtagaagaataaaaattagggtttatgtgatcagaagagagagttggtgattttttttggtaagtgaaatgtgataaggttaaggttatataggagaaaagatagaagaaaatggtaaagaaaaatcaactattttagatgtacaagttttagtgacaactaggtaatatatgtttaatccttttccttttctttttcttttttgtcaactcgtatttctagtttatatcgtagcagaacgtaaagatcctgaatatattattaataaaggcaaataatattgattgatgtcttgttgagattcaatagataaactatagtttgaataattaacatacaatatgagattacacttatattgaatattgatgaaagagatgtgtcaggctgtctccgaagacatgagatttatgaatccaaaggaagtccagggacccctccaactataacaaaatcctcgttttggaatgtcttaagacattaattcattatatttttagcatattgtaatttagtatcattgatattaaatttttgtggtcagagatccacgtacgatattgcatgtaatttgtaatcgttttcgcattcatacaagtaaatgtgtacacatggtgtaaaaacgatacaatattaaagttggagtttatataattcatgaaggtgacacatacaatatttccaattgaaatgtattttttatctcaacatagtcgaaataaagtaaaagttgtcattagtatatttggcaatgtgtgtttagttaaggtattacgcataaatccaggtggcttcaattaaataaatgcctataggattgcagaaacttgtccccatgtaatgtacacaaactcaaccaccttatcatttgcaatctctaaagttcaacataaaaatacaatttgtgtggaccactaccaacactttttataatctatgattacagccttaacaacgagaatctcagatagtacatgtttaactaaactaaattggatgacataatttgaaagaattatatatgcaaggtgtaaatttaacgtatagacatgtcttgataattaagaaccacaaatgtcacagctagtggtatatataaaactaaattttaaatacgtatatatgtgtgtgaaatgtcatgataggttaataaccatttaaacgaacttatgaatagtaacaagacgaacttatgaaatgaacttgtgaaatgtcatgagaggttaataaccatttaaacgaacttatgaatagtaacaagacatgaaaagataagaattaatgtacactttatcaccaaaaaaaggaagataagattgtacgaaatcggacgtaataatgtaaggacatggaaatggcatgaccctcgggtgcacgaggcagttccacttcctgacgactctccattttacttggtttacttttatcttatctcttttcctttttaccttgcgaatcaaattgaccttttaacaaattcaattcctaagtgtttttgtacaatatttgtgaattataatgtgtagtgtatgtctatgcttgtttgattttctaacgcttgttggatataagaaacaattatcttgaaatctctacagtacttatcacatccaaacacactatataatatattggacaagcgatacactgtcttatacaaaacaaaccaatcacaaacaaatagaaaacaatacatctgtttcgagtcaagtaacgtcctatatattttatatagaaagtataaatatacacacactagttgaaaaacttgaacaagaacatgttagagggcatacatatatcattcttactaacaagagatgttttgtataattaagccaagactttctaatattatatttgtgtggtatagatatcataccaacaattgaactagaataagcaatatatttaccatactatatcttgtttacctaagatttaaaacggataatagccatcggatgtacatgtacacgtgaagagttgggatatgaaagaaatccaaaggctgagaaaaagaaagagaggtgaaactccaatgaaagaattgggtttgtatacggaaacacgagtcttgtgctctcttttggatccggaccacacgagcggctaaagaagcaatgttgtcaaaaacgttagagccgtatgggttatgggccccaccatctctttacttgacgtggttcccagttccaaacttgtgttgtgtatatatcttgtttggctggcaattaatttttgaaaattttaattcgatttctgaggacaaaagtggttgctgattaatcaactaatccaaatttgcacaatgctaattcaacactcgtgctgcattaggtgaaaacttattcacactgggaaacctgcctttttatatagtatagattgtttctcatgattattgttgattaattaaaacattttttaaaaattagtgttgcaaaagaaaactaatcttatatgttgttttattatatgaatgtagatgcggatatatgattgagtcccacatgctaacacgtattgttccctgctggggaagaaggaaatcaaaatcatgggagaattataagcatattcactcgcctacctaccttgattactcatcattcataatttcatagaatcattttccctaaagaattaaatacacccttgatttataaagtttaaacgcttaaaaagtccaataacgagagggcctttgaatcggattcgcaattatatttgtaacaagtaaataattgggccgactaaaggaatgaatatacttccaaaacaacattctcagtcggtgcatatggtacggacctaacgaatccaaacctaacaataaaaagaaaacgttacaaaaaaatatgtaacagagaaaataacaaaaatataacgaagggaaagactaaagaagagacacattcattaacaattcatacacctttgttcaaatcaacgaataagcttctttattttaatg

SEQ ID NO: 25542 - DNA, 3000 bp, Unknown; identical to SEQ ID NO: 11484
  misc_feature (1)..( 3000): 2750-1469P.txt file - cDNA_ID_2706643; gDNA_ID_2214498; Annot_ID_133606

SEQ ID NO: 25543 - DNA, 772 bp, Unknown; identical to SEQ ID NO: 14096
  misc_feature (1)..( 772): 2750-1469P.txt file - cDNA_ID_2706651; gDNA_ID_2214700; Annot_ID_136835

SEQ ID NO: 25544 - DNA, 3003 bp, Unknown
  misc_feature (1)..( 3003): 2750-1469P.txt file - cDNA_ID_2706659; gDNA_ID_2214499; Annot_ID_133633
tttcattttctggtaacgacattcttagttctaccgcagcacatcaaaatctaaaggtttttacatatatatgttttgtctggtgttgaccgtctcatggagattaaggaaagaaccagaccttgatgaagattgaaagaaccatttgcagaccaaatgctgcagccattacaaccgtgatatcattgttcgtctcgaggtaagaccgtagattcagggcaacaaaacacgatgatgcactaccagctaagagtataatcacccatctcagaaactctactggaataagcaatggaagctgcaaaatagaacatcctgagtgttattatgcttaaacagtatgaagtataaagttgtgatatcaagttaggttgatttatgtcattgtacatggtcattgaaagtgaagttaccaaaccattgtgtatcaagtatatgcatttgtctttagtgttactgatcatcaattgattaattttaacagcaaaagagaccgaagttactgaagatacttacagaggttggaacgaaaatgaagagagagtatccccaaaggcaccagaatcttagaagatcagctttggaccccatataacggagtgcaaaataaaatcccagaggcacaattattgcatatccatatattatagatgctgccaaattcatatagttcacatcaaagatccaaggagcattactgtcggttcgtttcttcacgagatatgtagcacaatttccgagagaagcaagcacaaacacaagcgtagtgcagatccagacaagtccatacctaacagaagcacacacgagtcattaatcaagaataatttgtgaaaggcctagcttttagccaatctttagaggataacatattatgatgctttctgttcatttgtccaagagaaaatgaggatattttaatcaatcgcctgaagtaacataggagtaaatgaatagcaagatcatgctttcggaaaggtgcagaagataacacttagaacggtaacaaattaacggcatgactgagcaatggaccgattaaagaaattcgaaagaactctctcatggtaagtacaatcaccaagaagagtgaaggagaaaaaggcattaaaagacttacaaatcagggtttgcatcaatcttgttgaaaaaatctccactagtaggatataaagagctcattaatctgttcaaaacaacgtccgtgtccacgtcgaagtattgggtatatgagtagacattaaaaaagcccttccagttgtttgatggctgttgtgctggtccttctactggagcagataagatatatcaccatataagacagaacaaggtgaaaacaaaggtatataggatcttgacatccataagaaaaacgaggttgactcacacaagtattctttcaaccattgtactgattcatggtgactacagataaaaatatctcctaaaaaaggaatctaaaaggagcatatatacctgttgggctctcaagagtttgataaccctttgtattgtttcctagattcggtggaaatatttgcatgcttgcagaagggcctgcaataatgcagaagacatacaacactcaatgtctttcactaccggaaaagttctttgcaaaagataattcaagcagaaactagcaaaagaacacaccttcattgacgcttgctattggtacatttgtgcttctcttgtcgtcgctgatcacagcctaagaatacagatgtttgtatcagacataataacacggggatagtcaatccattcactcaaaacatttatcttagcggattcaatccaaaatgaagctatcatgcaagcatttaaactcaaatacagttttgtttttcatacgaattgtctcctaaaatggtgaaaaaacttaaataaaacgccttaacaaatatagaaacccagaaatgcaaataaggaaatcgtccattgttctatgagtgtgaagactttaggcatcatcgtggacgcgaaaaaatatgacaaaaaaatctgaaaagtttcaaaattctacttcctaatgtaacacttgagacagaacaacaaacaaaatgatggcatgaacaaaaaacgttaattttcccttcacacaaacaaggatcatagaaaaactcaatcaaagagcttattgatggtgaaatgaaagaagcaatagatgtaatatagacttaccggaactgaaccaagcaaatggcttgattgtagattagcgaacgactcatccatcgatcaaagagaaaaagatatcaaagaaaaacttagaagataggttcttctaatctcattcaaaaatcgataagatcggaaaaaaggtcgtccctttttctgaatttttaaggtttctgggtttgcttctcctcctccgtcgtcgtggaagcaattgggaaaggaagagaaactaaagaaagaacgatccacgcgctttcttagcaagtcggtaaaacacgcgctgttcactttcggacacgtgatttgccgacttgggcccagacaatcacaagattcacacaagacttcaaaaacaaaggcccatatttaaattttgacccgaatcgtgatttgccgacttgggcccagacaatcacaagattcacacaagacttcaaaaagaaaggcccatatttaaaatttgacccgaattaaacaatccgacttgacccgtttgaggagaaattcactcaacagtgtttcctctcttcgtcttccctcccgagaaagctcaacggagccctagactggttttatcactctcgccaacaccaaccacgctttttctctctttacctccatttttgtattcgtcaccggagtagatggatacgagagaaatcaacggttttgcctccgccgcgagatcgatatctcttcctacgcagcctaattacagtagcaagcctgttcaggttcttccgctttatacctttttatttctccactgaattagtttagctcaggtcttaggatttctaggttcagcttaaaaaaatg

SEQ ID NO: 25545 - DNA, 3003 bp, Unknown
  misc_feature (1)..( 3003): 2750-1469P.txt file - cDNA_ID_2706667; gDNA_ID_2214499; Annot_ID_133626
taagattatgttaaaagtaacattaaaccactaatggagattgaagtgtaccggagctctgttgatggcaccgacggtggaaactgcggcggccatatctcaagactgcgacgagtatgcgtcacaacacaagaagctgaagagaggaattagattggtagaagaagaagcttagagagatgttggtgtgagcaagaaactgagagatttataaagcgagtgatcaacaaccaattcgttatctcttcgtcttcaaggcttaactctctgatcgccacacgatgcggattggccaagttgccacgaggaagatgattaggaggattctattttgattggtccacgtggaatatgtttatgaggttgtcgtcaaatggctaatctgtgccaatggatttgttttttttttcaagtgaagattataacattatttattaccacatatgctttggaaaatcattgtttttttttttttttttgaggattgaggtaagccattcatatgtgatcaagatacttctacactcttcttcatacgataacattccaaaattttggataatgacattgcttatcgataataatgttccaaataaccgatgtaaactgattggtggagagaaattggcttagccaatagaatataattctaattttgttatatacaactctagatacaacaggtatcaagtatgtggttatcaaattaaccatattgtactaaaccgctaaaaactaattaatgcaactttttctttacacaaaatgtaaaaacaagtgatgcaatgcatacgtaagatttgataaatatatagtttagaagatgaagtaaagatagtcgaggctaagatagcatcatgcaaaatatcatatgctaaaatatgaaataagattatagtgtttaaattcatagtgaaaatatgaatatatcagaaattcatatgaatttacttgttttaaaataaaaatgataactatatcatagtttattgttccctcaaagttactataaaaacaactcatctaaaactatatattcacaatcacaagcaatcgttttctacactaagctataaaatgaaacacttcacttgtctgatcattataatttctcatcctcttcattattttcagttttctcaaccattctctcatgtggaacgagccatcatatcatcaatggacaaaaccaaattttaattttaggcttcattcgctgccgacgaagcaatatgtacatgttctacatgcaagacaagagaacaaagattactgatatgatattaaactattattgatccatatataagacatgttgaagaaccaaacgattgataataatgtggtggagctactcgcacaatgctaaatgttaactgtatgtgacaaaattagcaaaagtttgcgtgccaggtttgattcttagtacacatacatgacttttaacatactgaggttagaaaatgaagtacagtaaaacctttataaattaataatgttgggactgcaaaattttattaatttaaaaaggttttaatttatcgataaattaatattttttaattatagagaaattttcctaatttggtaactttttaaaaagttttataagatttttttcattatagaaaatatctttctaaaatcaattacaagtacaaaattatatcatgtctagaaaacaataccaaattttttttgatacagtaacacattagaactaaatttcaaataagaataactacaaatttaagtaaaaaaaaatcaaaaacatttcttacatataatgtatatatatagttgatacatttatgcaattattaatttatgatattgatgagactatatatttacataggactttcaaaaaagttattatcttattaatttatcgatgtgttacactttttacattggtcctaacttgggatctggtgaatttattaatttatagaggttactaatttatcgagtattaatttatggaggtttaactgtaaaaagagttgaggttaccattgcaataaaatatgagacaatgtgtagaggaggataaaagattgaacaaaaagaagaaagccaactagtttttgtcaaaaggataattttccatgtgcatgcaagtatgcaaccacatcaaaatcataaataaacattgtctaaaatgtttctaataaaaatagatgtaaagaaaattcatcagtttaataactagggtttaagagatatttacaaatactaaccattaacatcatatttaatatgactttgtaaaatctatgatcaaataacatgcaatttttttaatatgtaaaataaattatctcaaaatatttgattgaatatataccctttaatttagcattgattttaaaaatccaacaattttctatagtatattttgtaataatgttattggttcctaaaaaagatggtcacatcattcattaaataaaatgaaataaagaagtgtttccttcgtcgcattgaataaaataaagtaaaccttccaaagacttttcattgtcttcgcctgcgagcgctaaaattatctccgagcattctcaagttgggtgattcggtacggattactgatttgggagagaaaaaccctagattggaattagattctgggttcttgggctaaaggtttcttcatctccttcgaatcatccttttgtaagtccagtggatgtgaaaacccagtactcactgattctttttattaggaattttgtaaggttttgggtagagttttcacagttttgatgatactaaaatgtgggccactgggtctagagaatgaagaatcttgcttttagtgacaaaggttgttcctttggagtagtaagtgagcaagatatcagaaaaactgaacctttaatctcaagaatttactttgattggagcttgtgaagtccttgtgttattgttgcatgatgttttctttgagataacttggcaatgtgtgtttggtgttattgtagagggagcaagacgatg

SEQ ID NO: 25546 - DNA, 3000 bp, Unknown; identical to SEQ ID NO: 11499
  misc_feature (1)..( 3000): 2750-1469P.txt file - cDNA_ID_2706669; gDNA_ID_2214499; Annot_ID_133625

SEQ ID NO: 25547 - DNA, 3000 bp, Unknown; identical to SEQ ID NO: 11499
  misc_feature (1)..( 3000): 2750-1469P.txt file - cDNA_ID_2706669; gDNA_ID_2214499; Annot_ID_183919

SEQ ID NO: 25548 - DNA, 3000 bp, Unknown; identical to SEQ ID NO: 12166
  misc_feature (1)..( 3000): 2750-1469P.txt file - cDNA_ID_2706673; gDNA_ID_2214535; Annot_ID_134352

SEQ ID NO: 25549 - DNA, 3000 bp, Unknown; identical to SEQ ID NO: 12166
  misc_feature (1)..( 3000): 2750-1469P.txt file - cDNA_ID_2706673; gDNA_ID_2214535; Annot_ID_185049

SEQ ID NO: 25550 - DNA, 3003 bp, Unknown
  misc_feature (1)..( 3003): 2750-1469P.txt file - cDNA_ID_2706677; gDNA_ID_2214500; Annot_ID_133654
catcttctgtttggcgcaacattgttgaatgattttggatgactgaaattcccaaaagaataattataaaatactcaaaaactaatttaaatgattttttttcagttatatctctaacatgtctatgatatataacaaaacgtttaagacaaatgtttaaacatgagaatagaatcacgctttcaaaacgtgacaactaaagaaataccatttatcaatctaactctgttaaattcgattatctattgtttttctttgtacaaatggtattttgatgctatacattagcatatataataggaacgttcttttagatggtattaaattcatttcatcctatatatctatttctttcatcttctagatcgagatatgtcaaaaggaaatactagatccgtgatgttgacaaaagaaattgtccgcctaatatgttgaatattgtgaacgtaaatgatgtgatatagtgtgataaataaataaataaatgaatcaattaccagataaggatttttagtggcattcatagatttgccgaaaaaattatatctaaagttacaatttacacatttaggtttacttggttctatttttttagggtataatatttgttattatgtattttataaaaaaaaaatggaaacataatgaaacaaaattctcaaatacatatttttatttaaaaagtttctcaaaattttagcttttaagtggcagaaaatagttttttttttttttatagataaagtgaaaaatctaaaatggcaaaatcaacaataatccaaaacaacaaaatcaacaaatctaaaaaactcgttgattgttttgaagacaacagctatgtggtgaagaaaaaatgaagaaaaaccaaaatcgacatgtgggctactgtgtaagatgcattcatttacagctaccaaacgcacacgtgacaattttttttttttttttttttttgtttgtatatattatataaatttaaatacaatcgaaaacaaaaattcttcgttaaactcttttcaatgctgtatttgaagcttcctatttttattattaaaaatatgttgtttctaaaaaatatatatatatatatatataaaaattcttttcttgactctacaaaatttttgtttgctaacaattttaccttcactgtttactatacaaaaaatctctgttttagtgaataatatatgcaactaagtttttcgcaataaaaatacaataaaaaaattgtagctagctatagtctggtcacaaaccataggaaatgtagcctctaaaaataaaatcaataacaaatttgtactgatctttttatatcgacataaatttggtgaaagtccaaataacatgtttttcgtaccataatcaaccaagtggtgttccttcaacagatacataaaacgaggcaaaataaaagtgaacgaggcagacaaagaattttccaaacctcatttaagggactaggttgactttagtcctttactttagaagagagttgcagttttcatctattgtaggggttacacaaaatttgttcttatgtgagtccaattgccaaattgtacatcactcgaagacaaattgggcccaaactgtgtagaatgggtttgggctgccaacccataataaaccttaagttgaaaatgaattagtttggcacatgcttttttttgtcatgttcatgcttttaaaaaaattcaaaattggcctaacaagtttcacatctctagaatgttgttcctagctggctagttccacgcacgtgtcacactataatttgtcatttcgtgaatgaagaaatcattccaacacttttgttattttgataaccatacaaggaataacacgtgaaggaatttaggaaacgagagattctagagaagtcacctagttttgtatttaaaaaaggtgctcaaaattagaaaaatatcgaattttgttgaaaaagggaaaaataaacaaagacaaagtagtaaatagaaacttgggcatgaagctaaggatatgactggtcgccgagaattaataaccacacagtattattacaaaaagtatacaaaccgaaacttctcgcggtgatgatgaaacctcaacgcaatgttatcgtcacatcaatttgattcctcattatagtatgaatgaaaaagcagattaaacagaaaatacataaagagctctataactcaataggaaatatttaccactcacctatgtttttcttacactttcactctaatttattttgacaaaagaaaaattgtattatattatttaaagacttgactttctctttaatattttactgttttttatatttaaagcaatataaaaaattatcatcattttaattaaatttattatccctaccattttaccaaaccaactcagtaataaactcatttcatacacatatttgacaaatatgtcgactgtcagaatctagaatactatttgtcaaatgaaagtgattacattatgagataacgatagaaatatccacatctctcctgatcaccagtcaacatatcttttattaacgaattgactggtagtttaagacgctaattatcctttgctctataataccatttcaatcgatattttaactaattatatactattagaaatgaaatgacaaatctgccgaaagcttttttctttttaatattttgtcaaaagaagacacacaaaaaaaaagtaaattgtattagaaaaaatccaagacagagaaaaaagtaaacgcgtagacagatggcgacaggagaaagagagagtggagaagaagaaaagaattgcgatcaaagaaaattagacttctttcttccaacgttttcacattacaaatacacaaaaaccaaaagataaagaaaaacaagaaatattttgtttttcgatctgaaaaagtgaaagcttcttcaaaatctttgctttagagatcgtttggtgattttttttctttattttttttttatagtttcttcttcttgattctttcatatg

SEQ ID NO: 25551 - DNA, 3003 bp, Unknown; identical to SEQ ID NO: 25550
  misc_feature (1)..( 3003): 2750-1469P.txt file - cDNA_ID_2706677; gDNA_ID_2214500; Annot_ID_183965

SEQ ID NO: 25552 - DNA, 1151 bp, Unknown; identical to SEQ ID NO: 11529
  misc_feature (1)..( 1151): 2750-1469P.txt file - cDNA_ID_2706705; gDNA_ID_2214500; Annot_ID_133656

SEQ ID NO: 25553 - DNA, 3003 bp, Unknown
  misc_feature (1)..( 3003): 2750-1469P.txt file - cDNA_ID_2706717; gDNA_ID_2214500; Annot_ID_133649
aatggtatatcaggttctcatatcaacctagagaaattgcatatgtaatcggcacaggtaaatatttcaatcttttcaaagtcaaattcatagcattggttagtttctctataacatgtagtattattgcatatgcaggtgtggtgatttgcttcatgttggtagctatacagttctgcaacaggtttcagtgcagtggtggagagggacatctaaccgaggatgattcagcgagaacacgtctacttgcagacaaagatgacgatggttcaagcatgggttcgtgtgacgattcttatgcaaacgatgatgctgacttagaagagtttatgggaaatgatggtgaagcaagtaaccgaagtagacgtctctgtgccatttgttttgatgttccaagagattgctttttcctcccttgtggtcattccgtctcctgttatgaatgcggaacaacgtaagttattttgtccacgaaggtctttaagaattgataatatacaactagacatatcaaaatcacttgattgatctaaactttgaaacgttatgaatctgcaatatgtgaaggatgcaagaagctgatgggagttgtccaatatgtcgaaggaaaatgaagaaagtgaagcgaatctatacagtgtaagatgaatcaaatataaatctctgacataatgttgaatctatagagcattaataaaagttatattggtattgccaaggctcatttctttctttgcataactatttcatttcgtccctgaccatctttgtgataacactcattgtttgtcgactcacattccgaaatgggatcgaaaccctgaaccggtaagtccagtgttggtgcgtggactaaatgagttggtacttcttgatgactttggaatatgcgtaaaggtgggattgcaaagtccaaatctatctccacctccaacacacaaccatctccaatgcacaaatttctgtatctttgttggtgatccaacttattatttttgttctttattgatttctcccacggttcttatcttcttcttccttttttattgtggttattgttcaagctcaaagaaattcaagcatgtatcataacatttttgttagttgacatggtcatacttaattaggagaaaccattacataatgtttttaagcactgtaattttttttttgttaaaataaacattatgtaattaattgtgcaataatacattcaatcattgttaagataacacatatgaataaacaatttcacataagtatattgaaattgctaagttcaatcaatatagtttattttagaatactaattaaacactaaaacttaacagttgattaattttaacttactatactgttaaacttaacagtttaattaatgttaaccgaaggacaaaattggaatttcaagaaagaatctcttcaaataatataataaaaaaacaaaatcctcactgacaaaaacaaaagtctgaaaaataatgttattattttatataataaagttataaaaataccctcaagactctggtcgtcgttaccgttcaaacgacagagagaatagaagaagactagccggagaaccaaaatcgaacgataaccgttacactaataaacttgccctatcatcttatctttcatggattcacttcctcacaaattctcaggtgttttattttatctttacttatcctataaatctctagggtttcttctatccaattcatttctcacctcataaatttttttttgttatctctttctctaagaatcaccgaaatggggtcaattcgtggtgaccttcagccgctttttgtcatgccaccacctcccctcgatgaagattgtgatgatatcttcaattctgacgaatcttcatgggggctgttgagcttgtcctgcttcggtatcattatgggattgtggttctttggttggtttctcaacttcagttccaatttaaagtttttgtcttttttgattatatgagaatctgacttatttcgtggattgaatcagcgtcggtttgtctgatttttggtgtttacggtagtgaaactgtctggcttggacctaactcgtccattcttgttaaaccaagttccatctttgtcaaaagcattaatgttgtctcttgttttttttttttttttctcactctcttcttgtgtttcttctgtgtaccaaggctgtgctaatttatatgaaatgtaatttgtttttgttaggcaaaggagcttgatttttcaaagcctggacttcagctatatggattcaatggtcaatctactcctagtggttattttgtaaactggactgaatctcgagtgttatctgtctcacagaattcttacaaggcaggtttaagattccttaggatctttattgtattgttttgggtacttgccattgaaaccaaagatttgatctttgtctatatattttgtcagaatttattttcagctttgattattgacgttgaagtctcttttagactgatttttttgaactgattttgcttctctcagggatggccatactacttaaatagaggaacgcatatgaatatatcttataacattttacctaaaggttctgcagttcggcttgtgatcactgaaggttagtaaaatattgttgttttgtcatatgctaattgctatgcttgcttgtttgtttatcattgttaatgaggcttggaaagagtttttaaaacatgaacataaagaaaaacctaaaagatcttctttgttgatgtgaacacgtaaccgataaaccctcgggaaaaccgaatatttaaataaacctgtttccctcgttgttttctaacaatcgagacttcatttgtgtatagtatatacttgaataggaaaataactttgagtgaagtaagaggaaatagaggaagtagaagtgttaatgttagtgagttttttttgtttgaaagtgttgccttttagggatataaactgactatgttaaggctctcaatttataggaatg

SEQ ID NO: 25554 - DNA, 3003 bp, Unknown
  misc_feature (1)..( 3003): 2750-1469P.txt file - cDNA_ID_2706721; gDNA_ID_2214500; Annot_ID_133647
aattagcgtcgctataagtctataacacatgctttaagagtattctttagaatatcctaagggtccaaattgtgtcgttagtacgaatgcgatgttgatggttttgccatgtggctttttcggttaacgaggaggtaatagcttcataaaaggcagaaggtggctggtggcttttgttcgctagtgtttattatgtttaacttctagcatgatgttatttcatattcatctataaaattatgatttaaatcagggccatagaagctcacggctgaagctacggctgttcttcacgcaattcgtcacgccatcgctcttggaattttgacaaattcactttgtttctgatttgtctcaaatcagaaatattgactttgtcgaaacaaatcagtaaactttctttatcgttccaaatttattggatgtcatcgatatttaattaggaccttagatctaactatagggataaaaatagggttatctaaagtcaattacgctccaaaacattataatgactttgctaccaccatcgagtctataccattaaataagagtattggagattttggaaagatgtcatgaataaatcaaggatcgatgaatttaaactatactgtgtggtggtgcgtaattaaatgatattttaactatatataattatatattgtgcaacaacgtaaataaatccttttaagatgatttcttatacattgcgtaatgcatccctatcaattgttcctttccttaagttctttctcctaactcaatggcctagagaatcttagattatagcgcccctagtcccggataactaaattttcattataaaaaaagatcataagtgatctatctatgctttgtccaaagagaaaaaagtgttctatttatgtagtcctcgtccattgataacgattgagcctgagaatttaaatagatcaaagattcaaaatattagtatttaatgaattatggtgtgtaaactgcactgcagtactcaagcggatgctgccgaagatacgagaattaggctatatagtattgaaacaaataaagctcaagtaaaagattctaaaattatttcataaatatttatgcatagtgcatccacatatacccccatctattgtacatttttataaatctttctcctaactcagtggcgtagagaatcttaattagattatagagccagtagtcccggagaattaaatttggttgtaaaaccgatagcataagctctctagttatgtagtccttgtccactgacaatgattgagcctgagaatataagttaaatctatcaaaatataagtacttattgaaattatgatttctaaaaccatacttaagtactcaaccgtacgcatactgccaaagtttagagaattagggaatccaagtgggtaaataaagacgcaaacacagctgagaaactcatttgtcttgtccgaatacagaacaacattattaaagccccacaaatctttagtgattttggaagttacacaaacttcttgatttggttcaatcttatatacgtatgggcaacaataaacgaaaggagtaggggtcacaatgatgaaaaggccaagaaactaaaaaaatgtaatcaacgataaaagccttaaaggaaacttcccggaagctgccttcttgaggatacgtctatgcacttctcacttgcatgtggttagatgttgttatcgacccttcttggttagacaatctattaatatatttttgtctttgttatataagatttctatactatatgggaatcaaagctcctacatgcatgtgttcttacagtcttacttgttatggcatttagcctaacgtggtcacaaaccatatgacgagtgggtcctctaatgtgtacggaataagaaacttatgttatcatttagatcatatcttcttagaaggtatcgtaatcatgcctcataaaaaatcatatcttcttccaaagaatcataatcataaatgaaaatgaccattaaatccacgaatataaccgcttattcatttataattgtttatcactcctgcatcaatctttgaacagatcgatagaagcatccgagatactctcttcactagcaaatatcctaagagtaagagatgtggttgattgcgtcttagtggttgatttgtttagtttctgtctggcttttattttaattcctcttttgccaaagaagtttcttgttaagtaatttgccattagaatttacatataaggggacgacgctgaaaatcaagctgaatgattgtacaaaattcaagatgaaaattgcgttctacttccagcaacctaaagaaaatatgcttaagcttgatgattagtgatgctcatataaaataaaacaaacatataaataatatgtgacctaatcacattatataaaacaaaattatatcacattattaaattccatcatttaaggtagcttgattttgttttatcagaatgaaatatgatttataaacctaatggagcaggtgaaccaccccaatgtgagaaccactcaaacctaaaaaagcatgacaactttaaaggtactaaaactgtattggaagttggaatcaaaattgtttattcactaaacgaattttcccctaggatcttctgatttgactgattcgtttagtatattgtttaatcttcttttttttttggaacaaaagaagaactgttgagtactagagaattaaaaaaaataaaaattgattctttgattatttttatttttttgtttacctgaattgattctttgattattttaagaattctttttaaggaattttggtcctgatgtgttgctttttttcagtagtgcgatctgacgactgtcacaaaggcataaaccctttatgcatggactaatcaattaaattaattaaatagcttctcttatttttcttataatctcgaagttggtcgaagcaaagcaaaagcaaaattctcttggccgagagaagaaacattgatcgtcgatcatg

SEQ ID NO: 25555 - DNA, 3003 bp, Unknown; identical to SEQ ID NO: 25554
  misc_feature (1)..( 3003): 2750-1469P.txt file - cDNA_ID_2706721; gDNA_ID_2214500; Annot_ID_183957

SEQ ID NO: 25556 - DNA, 3000 bp, Unknown; identical to SEQ ID NO: 11531
  misc_feature (1)..( 3000): 2750-1469P.txt file - cDNA_ID_2706737; gDNA_ID_2214501; Annot_ID_133660

SEQ ID NO: 25557 - DNA, 3000 bp, Unknown; identical to SEQ ID NO: 11537
  misc_feature (1)..( 3000): 2750-1469P.txt file - cDNA_ID_2706741; gDNA_ID_2214501; Annot_ID_133669

SEQ ID NO: 25558 - DNA, 3003 bp, Unknown
  misc_feature (1)..( 3003): 2750-1469P.txt file - cDNA_ID_2706745; gDNA_ID_2214501; Annot_ID_133671
tggagccaacacttttactacgacttttgttttgtggtataatcacaaaatcatacagtataataaagacaaccagatactctcaaaatcactaaactcggcattgctgtttagtgattatcaaaactatataaactgttcatagctaatataatgtggattttagtttgcgtgttaaaatattacttaaataatcaaataaatatattttaatcataaattgcaaaattagatgaacgttggttttcatgttaaatagaactatatttcctaataatgtacagaaaaaagccataaatacaaactttcactataaatagaaataaattcgttatcgattcacatgggcggagacaaagaatatatttagacacagaatatattttatacgatatgatttttagtctgttgtcctttaggtttgaagagaggtgggaatgattggatcggcttctcatctccacttcttccacagtgtccaacttgagaaccgaaaaataattggagagataggaatcgtttctcatcaaattcccacttacttatgttaagccacttaagtagtggaacaataattcaaaacttataataatattcttttacccaaaactcttttcatttgaccaaattagtaatcgagttggtaattactagttatgtatacattctgacattcactatccaagttgttttccaataagtagaaagtttaaagtatgcgtagctcgacattaattaattagcttctgttaattatatgattaaggacggttcataaaatagtatttaaactgctttttacaagtagtttgagttttagcaatcatgtgatgattcagataaatttatatattttaaatttatattgaagcaatcgttaaacgaagttgaaaatgcgttaataaagtatctgacatatggtaagtttaatgggtgtaagaacaatatccactatctactaataacattactcaagtgtaacgacatggtgttaacaacattacaacaaattttaagcatgtatataagaatatacatgaactcaattttccttgattaaactagtcatggaatcaagtaaagagatccaatattgaagttttaattatcaacaagacaaggcaatataaattctaatgatggtatcaaatatgaggtgggataatattgagagaacgagagatagaccgagatcaacggtacaaatgattaccaaataaggataattgttttttgacaattatatcgatcaatctttgattttaccaataaataatgttagttttcaaaatattcttagcaaggaatggtaaaattagccattagttcccaaacatttgtttagctcaagtgtcattacaaaattcatttttatttgctgagtattatatcgatgttattagtttcagttctcgttcaattctgtttgttgataaaaccttttatgctcgttcaattctgtttcgaaagagaagtatgaacctatttttaatattggttggaagttggaacagtctatagatcaaaactctaaaattgcttggtacggttaaaaaaaaatattcccaagatttgtaaaaaaaaatagtaacaatgaaacaaaattagggttttactgtacattcttaagtcttaatacggaagctctttacggtgtggagcccagctcagctcgggacccaaaacctttcctaatctgaagcatattccatagaatgtaccttttcaatttctccattagtttattttagtattttcttttcataaaatctcgttacattttcaaaaaacagttatatagacatagacggaaaaaaaaaaactaaattttttttgtcgaacactttgcagcatgtgtattggttcggagctcatgagaggcccgtacaggcatacaatcttttatatgtctcttgagtcctgactcttgtttttcacaatatatattgatggactactaaaaatagtaggagaacattagttgcttaaatggtttgaggagttatgtgaacaactgaacataacatttttgttaatcatacatgaagataagtcttttttgaaaatatatctcaattaatatatagagaatttgagaaagcgttagcgttcctaatttcatatatggagtatagcatagtttataacacgggactgctatagaacatctataataatcccattaaatttttagcgatcgatttacaaattacaaatctatagtaattgttcgatcggttgatggaattactacaacgagaaacaacaatttgattttgttgactagttaaattctaatatacatatatatatatataaaattatataccaatattagctttttgtcggtatttaccaacacaattaactataacaatagatattgtaataaatcacatatcatatagatatatcttattaacacgatatgtaagataattgctctaaaataaaaacttctatagtagtttatttttgtcaccaattgaatatttttccttttggggtggaaaatatttgtggtatctcaataagcttcttgtgtatcccaccccccaccatggcattcctacaatttaataaagccgtattttcactttcactctgagtcatttttattatattgtcattttcgacaaaatcgaatttagattgtgcattatatattctgacgaaaacaaagaaagattgttgcattaatttaatttaaaaaagttgattgaaaacgcaagtctcgttcatctcctccaaatgttctttttctttttttatgttctttctcttctaaaagtccaacagcgacaacataggtttctctctctaccatggcgtgtctatataaagcaaggtcgtcgattcataacgaccatctccattacttctccataacctttcaagaaacaaaaacaagataagatctcttcagattcctacactccaacaaatataagtttcattagattctttcttagctagagaatgaaactgattgagaagacgatg

SEQ ID NO: 25559 - DNA, 3003 bp, Unknown
  misc_feature (1)..( 3003): 2750-1469P.txt file - cDNA_ID_2706753; gDNA_ID_2214501; Annot_ID_133674
aagcttgaatctttcttaagattgtttttaataagattgctctgagaagcttctagcttatggcacgtttattaattgtaaagtcgaaacaatgtgagaccgtcggtgggagatttatgaaatatggaacgtctagaagcaaaaaaacatattttgatctaataaaaagttcttcactttatactaaaagactctttaatatcaaagatttgacagatctggttattaacatatttattaactaaaaacattgggatttgattgttacatttatttattttataccttgcatttaatattctgcattattatggatcgccaatttttttattctgcatggatttaagagagagagggagagaaaacaaaacccatgcatagaaatttcatcgaccgactcttgtcatatgaatctaaaataattatcaagaaaaataaacacatcaaatctgcttaaataaacaagaatttaagttttcccaaatgaaattaaaccatcctttcccaaatgaaagtttgaactcagcaccaacaacaagcaaaattcaatccttctcgtactcaccaaataagctagacatatggggttaataaagtttattcgcagctcatttggttcctttatgatattatactcaagctaagtaatgggttcgattcccatcttctcatttctttatcaaaaaacaagtaataaagttccttaaatattgtcttaaaatactatcgtagtaactagtaaggtggaatatatagtgtaactttggagcttgaggtcgtcggtgatgtgctggtacgaagagacacgtggcgctcaatcatttgaaaataatttagtttttttctttcttttggaatatgggaaccaccaacgacaacattattaattccatagattcggagttaattgagcgggttgcacgaaccacaccacacaccagatgccgaataaaattttatgcataagctaagcgaataatcaatgcatagttaaactttataagactgatatttaacgactggattatcacaactaagaggcgttttatttgttttaaacattttaattaagttattaatggtttgcgactcaagacgataggaaacgaccatctttttctactcatgaatatttgaaagaatattgttcttgcgacaactgatcaagctactatctttgaaaagaacgttcttctgccagtctactgaagaataactcaaaaaatgcacttggggctcactgatttttaacaacatttctttttatatacatcctttgaaagaaaactgaatcgtagcaaaaactagactaggaaactgaaaaaaaaaaaaaaaaaaattaagaggaagactaggaaaactgaaaaagaaagctttattaaaccagcatgcaacacaacttaatcatatgaattactttgtttttttccacattagttgccgtctgattaatttaacacatttgaaactatagtcatctttttgaagaaaaagttcactaataaaaacagagaaaatccatttaaaaaaaaaagacattttaaaagaatatcgagtaggatttttaatgtaaactttatataaattttataatataacatcaaatcgaaactaattttaaaaactaactttattttataaaagatacagtataatgaaagtgtataaacgaattttgttgtggatcaacatgaaaattaattagtttgtcaacagctattcatatagttaaatgatacaagtaatgataaacaaataaacgcatgttccccgttaacaatttttacgtctccatgcttagtggcgctaatcacctttttggttcgctcaagtcaaattattttgaccaagttgtcggtcgagctagctcgaaggtaacaaatagttaggcccactttgaaaatgtcggtgctcggaaaaaagataaaccgctaaattaaaccggtcatcatgaaactccggaaacctgaattactgccaaatttatggttgtaggcactgcacacgtgtaggtgtctcttagtccccattgtcatacccctcagtttttattggtggtgggcaaacttatattaagatgacccaggtccatctttcaaacccatttagatccatcctatatttttgaatgtttggtgtttttgctttagatatcaatagaggtgaataaattagtattcatactctgcagatttgagtttaacatttgtgatagtttttgtaaactttataatttgtaacagtgaacccagccaaaaccaaagttttgatttgagaaattagccttactattcacgattctctcgcctaacacagcagccttaacgacagaaacagaaacgaatctctgcctagcaatgacattctacggttccgaaaatttattagtattaattggaccgtttcatggaaacttgaaataattaagagaaactaattaagagacaaaatcgtccactttaactgttacactatcaacaactgacactctccttctacttttcaaaattacacaagatcgctaaatacattgaaattatcaccaccttttgaaacaaaaattgaaatcattaggaaaagtatcataaaacaccctctcacacagtacaaatgtaaaatttcaacaattgtaaatagtatgtaaaatgactttactacatgcacttttaattaattcggtctagatttagcacagtaaaagcaataactagctgcataaattacggccattaccactatatggaaaaagcaaaagtctccacattttctcatgtggaaatattttagattaaaaacaaaagttaaccataaaaacaaagtcacgtcatctctctcctccaccactccacagagctttcaaatatatccctctcctgcgagagcagagaaatagagagagactagtgagtgagagagtccatcgctttctttctttctctctctcgctctctcttcatctccaacagagacttctttctagagaaagagatcttcacaaatatg

SEQ ID NO: 25560 - DNA, 3003 bp, Unknown
  misc_feature (1)..( 3003): 2750-1469P.txt file - cDNA_ID_2706753; gDNA_ID_2214501; Annot_ID_184000
ttaataaagtttattcgcagctcatttggttcctttatgatattatactcaagctaagtaatgggttcgattcccatcttctcatttctttatcaaaaaacaagtaataaagttccttaaatattgtcttaaaatactatcgtagtaactagtaaggtggaatatatagtgtaactttggagcttgaggtcgtcggtgatgtgctggtacgaagagacacgtggcgctcaatcatttgaaaataatttagtttttttctttcttttggaatatgggaaccaccaacgacaacattattaattccatagattcggagttaattgagcgggttgcacgaaccacaccacacaccagatgccgaataaaattttatgcataagctaagcgaataatcaatgcatagttaaactttataagactgatatttaacgactggattatcacaactaagaggcgttttatttgttttaaacattttaattaagttattaatggtttgcgactcaagacgataggaaacgaccatctttttctactcatgaatatttgaaagaatattgttcttgcgacaactgatcaagctactatctttgaaaagaacgttcttctgccagtctactgaagaataactcaaaaaatgcacttggggctcactgatttttaacaacatttctttttatatacatcctttgaaagaaaactgaatcgtagcaaaaactagactaggaaactgaaaaaaaaaaaaaaaaaaattaagaggaagactaggaaaactgaaaaagaaagctttattaaaccagcatgcaacacaacttaatcatatgaattactttgtttttttccacattagttgccgtctgattaatttaacacatttgaaactatagtcatctttttgaagaaaaagttcactaataaaaacagagaaaatccatttaaaaaaaaaagacattttaaaagaatatcgagtaggatttttaatgtaaactttatataaattttataatataacatcaaatcgaaactaattttaaaaactaactttattttataaaagatacagtataatgaaagtgtataaacgaattttgttgtggatcaacatgaaaattaattagtttgtcaacagctattcatatagttaaatgatacaagtaatgataaacaaataaacgcatgttccccgttaacaatttttacgtctccatgcttagtggcgctaatcacctttttggttcgctcaagtcaaattattttgaccaagttgtcggtcgagctagctcgaaggtaacaaatagttaggcccactttgaaaatgtcggtgctcggaaaaaagataaaccgctaaattaaaccggtcatcatgaaactccggaaacctgaattactgccaaatttatggttgtaggcactgcacacgtgtaggtgtctcttagtccccattgtcatacccctcagtttttattggtggtgggcaaacttatattaagatgacccaggtccatctttcaaacccatttagatccatcctatatttttgaatgtttggtgtttttgctttagatatcaatagaggtgaataaattagtattcatactctgcagatttgagtttaacatttgtgatagtttttgtaaactttataatttgtaacagtgaacccagccaaaaccaaagttttgatttgagaaattagccttactattcacgattctctcgcctaacacagcagccttaacgacagaaacagaaacgaatctctgcctagcaatgacattctacggttccgaaaatttattagtattaattggaccgtttcatggaaacttgaaataattaagagaaactaattaagagacaaaatcgtccactttaactgttacactatcaacaactgacactctccttctacttttcaaaattacacaagatcgctaaatacattgaaattatcaccaccttttgaaacaaaaattgaaatcattaggaaaagtatcataaaacaccctctcacacagtacaaatgtaaaatttcaacaattgtaaatagtatgtaaaatgactttactacatgcacttttaattaattcggtctagatttagcacagtaaaagcaataactagctgcataaattacggccattaccactatatggaaaaagcaaaagtctccacattttctcatgtggaaatattttagattaaaaacaaaagttaaccataaaaacaaagtcacgtcatctctctcctccaccactccacagagctttcaaatatatccctctcctgcgagagcagagaaatagagagagactagtgagtgagagagtccatcgctttctttctttctctctctcgctctctcttcatctccaacagagacttctttctagagaaagagatcttcacaaatatgactgtgatgaatcaccgacacaagcaatgtcattttctcctcctccttctgatcactgtcttctctgccgcgttggatggtgtttcttccgagacagacgtcggagggtttgactacggtgaagcattgtctaaaagcttactctactttgaagctcagagatcaggaagacttccgtacaaccagcgcgtgacttggcgtgatcactctggtctcaccgatggtcttgaacaaggggtttgttttctgttcaaaactcttgtcattttattttttaattaattttatttttgaattcaaactaattcagtttactatcattagtttgaattttaataagagaattgaaatttattgtttgtattaatttataaataatacataaatttattgtagatttccatttaaagaaattattttctttggtttggaatgagacttgaaaaccttttgtgaattaagtattgaaattaattatttgttttattttgtgatgtgactttaattttaaaattttggtaataaaggttgatttagtgggaggatatcacgacgccggagaccatgttaaatttggacttccgatg

SEQ ID NO: 25561 - DNA, 3000 bp, Unknown; identical to SEQ ID NO: 11536
  misc_feature (1)..( 3000): 2750-1469P.txt file - cDNA_ID_2706773; gDNA_ID_2214501; Annot_ID_133667

SEQ ID NO: 25562 - DNA, 3000 bp, Unknown
  misc_feature (1)..( 3000): 2750-1469P.txt file - cDNA_ID_2706779; gDNA_ID_2214502; Annot_ID_133685
aactttgatgataactttaagagttgtctcaaaacaactccctttctcatctttatgaaagtagtaattgaatcatcgtgttctttgtgataacaaagtaatctttcctcttttagtttctttgagtaataaagctcttaatgagctatctaatttcagttttatatttctcttaataagctcatttgagcataaatatcattgctttagaaatgataacaaaaacattagtcggagacatattaaaaacgagatctaacactataactagagatgacaaccgaaaaaatgatacattgacaatttcccccaaatttccgcatgagaacattgagaagaaatcaagtgttgaaaagtacattcgggacaaaaacaaaatctccagtcttaatcattgagtttgggtctttcctctcatcagcggaattcctgccaattattctaatcattccacaaatttcttataaagtagaggaaagaagataaatcattgagcttgggtctacaaaactgattaattgataataattatctgacctttttcatactgatcaatatgataatttaataatgttgtgattgctgaagacaaaactatatatgacaacaaattaattatatgtcttataacggaaatatcaaagttttgtattcttatttatcgtttaaagattccacagtaaccatgattaaaaatgtaccagaatgattcaaatatagtcattcgatcgaccactagatcccaatgaattggtcgacaaataatctttaataacagatcaaacgtttagttgtttcgttagagatattaagctattaaataaagagatacgagtttaaattccatgctaaatgtaattttgagtcacgtacatacactttcaaagtcatggtcaacatcaaactcaaagtcacattccatagtgattccttctaattgagtattgccagtttcaaaatgaaacatgtgtaatactatgtgaatcgaatcctatagataaatggaagaaaaataaattgtaaagcgaaattaaatgtttaccgtatataaacatttacgtgtatagtaaggcacgtatttatcattctcgaaaaggaaaagaatagaagtcaatgggtgcaagtaatgagggtatttatgtcatttaggaaatggattaccccagctcacacggcaagtaagtcgataacgaacaaggctcgtgaccggaccatgactagagtcgatatccaaatccaacgaactgacatataaacgggttttgcgtgaaacaacgaataacacgttcacactaaacttatattttatttttaattgatgtatatggttttcactttttagcttatttaaaattcgctttcatagttttgtttttatgcatttacattgagtttttagagtatttttaccgtcttttgttcttcgtttcaaattagaatcttgtcagtaattgtgaaattagaatcttttcagtaattgaatgtgtgtgcagttgaaaacaaggttatcgatctctagtttgatttaacacaaaacatgagataatgctcaaaagattttgatccatcaatttgatatcctcttattgatcattctattctacaaaaaaagtagttttacttttgttaggacaagaagcacaaaagaccaaatttggttagataacacaaatgatggtttgagcggttcaacaacacaaatttggtacgtaactactctgtttgcttataacaacaatactcttaaatgtaaccaccaatatgctaaagatattgttccacttttcaacaaagtaataataatattgttcgaccaatatactagcactgcaaatgatcaggtgaaaataaataatttttcatctttttcattttaaatggtaaaaattagttgaataattttttgtctaaccaatgtaatggttcgagtacatatatatatgatatatgtaataaagaaacatagaacaatatgtttgtaattaaacttgtacatgtacatatatatatatatatacataatacataatcaaatttcatctcacgaaaaaggtggataatcacaatctcaaatattatgttaataagaattttcggaagatcaacatcaatgatccaattttctcaatcagacattattttcctaaatttgcatcaattttgttctagttgactaattgacccaacaaaaaaaaacaatattattcgattcaatagaagtgtatattctaataacattgttttctttttataataatgaaaacaaaacgactttgatcaaattgttatgctgtccactcacacacgcatcatcaataaataaagaaaaaaaaaactcaaacccggtcaaagatatcccaattgctcgttgaccatgataaggacatatccgtcattttaatcttcccacgcttttcctcaagggcttattcgtctttaaacaaaaaaatagacatccactgggcacgtatcttcttcttcttcctcgtctttaatcaaaaccaatttattactctgattgttatttcgcaattcggtataattcaaacgggagatttcgttttccgatcatcaccgatcaacttcttcgccggagaacaaataagtttcaaagcttcttttgacgattaaagtagaataaacagaaattgaatccatgaagaagataaagagaaacctcagagaagaagaagaaggtaattgataaatctaaaacactaattagactctataatatcggccattaatggaggaatcagtttctctctctctctctctgtttctctatgtgtatttattttggtgtgtaccgttgggaagcttgagagcttttaatagctcaaccaatttccaagtggtctctctctctcgaggtcttagggttttagctgttgacttgtcgcagcttcactggagaattgaatgaattttcttatggtttcaggaaggtgatgaatgttgagatcgatttttgatttcaatcaacgttcaacgaagatg

SEQ ID NO: 25563 - DNA, 3000 bp, Unknown; identical to SEQ ID NO: 25562
  misc_feature (1)..( 3000): 2750-1469P.txt file - cDNA_ID_2706779; gDNA_ID_2214502; Annot_ID_184017

SEQ ID NO: 25564 - DNA, 3000 bp, Unknown
  misc_feature (1)..( 3000): 2750-1469P.txt file - cDNA_ID_2706783; gDNA_ID_2214502; Annot_ID_133699
ctccacaccattttattcaacacacaataaattaaaaattaactcccacaatttatttacaaaactgaaatcataaatatatataaattaattatatttctccacaccatttttttcaacacacaataaattaaaaattaactcccacaatttattttcattctctcatttcctaatcccctttcacagtatctcaaatattgttttgttttgttttaagttttttctttgttgttgttatgagtttaaaaaatattattgtaaaagctaaattctaaattttaattttagattatgaaccttacactgttatttttttttgtttaaataaatttttaaaacaatttaagaaaatataaacttggagaagataaatcttaaatcatttcaatatgtcactcctataaaagaatctattttttttttgcttcaatataattttctaatgtgtattatagacatagatttttgtaatttgtatgagtgaactaatgttgatcatgttttcttcagaaactaagaattgagcttcattatattaaaaatcagaaaacaatttaagttttgttttagagagcatataagtcaacaaaatttggtaactatttatagcaaaaattaattcaaaatatttaatttggaaagacaaataaatagttatataattattgtggtcatacctgttattatcgctccatcattttttgagactaactaaaacacttgcctgaatttttgtattttatgaatgatcaaaactttgattctttctttctcttgtaattgactctactatccatagtatgctaactttttctttcatatccatttaaatggtttaaagtgcatttgatgcctacaaaaaaaaaactaacaaaaatatataagtaagactcaatataactaatttagaaactttaaacaatgtaaaatcatttacaaaaacttacaaagaaaaacaaaatctgaaagctattatgaatccaaactttaaatgaaggagacaaattgataaggttgagactcttgcctgttttgcttcctctttcatattcatttatggtttaaagtgcatttgatgtctacttccaaaaaaaaaaaaaaaaaaaaatttctcgatttacatttagaacaaaacaaaaacatgtaagtaagactcaatataaccattttagaaacattaaacaatatgaaatcattcacaaaaactaaaagaaaaagataaaaaaaaactgaaaggtaatatgagtccaaacgttaaatgaaagagacaaattgataaggttaggactcttgccgtaaacgttggtgataccgtaaatgttggtgatacagcaaaccatctttcatttttctttcagtaattgaataacttcaattgtcaaaggaaacaaaagcacttgtaaatatgtgtgtgttgtgtctgtgtaaatatttgctatttatattagaaaagtagattgttagggtataactaataaaggttaataattatagaagaacgtttataacatgaacgttacatgagtaacaaactaataatttctttttttttaaaacattacatgagacactgagtattcaatctcattgagccactaatgaccttaatgaggtttaactgcatggtgtttaatcctaattttctttctctcgttgtttttaaccgttatcaaaactatggtcatttgagtcttttttaatcaggtgagctttacatctactcatttattttttattaaatcatatttttaaaagcatatgtagtatttaaatattgataagtgatacatcataaaatatatactataattactattcttttatcattgttttgaataaatcacttacaaaataaaatgttttggaactattatgtatgagtttatatcaacaaattattttttaatttactttatcatacatttattttgtaaaaataagatatgatatgtttattaatatatacatgcataaataacatataaaaagaaaaactgttaaaatatgagcaaatgtaagatatcaaattttaacagcttttaaaaaaaattaatcatataagatcgaaacaaaattattttaattaattattgtttaaaagaactaaaaatggaaaaaaatcttataaaattggagaattatttgtagttgtgaactattaatgtgcagtctaaaacataatatcatgtcaaaatttaaaagatttgattttgtaattagttaagagagttgcaattatgatagaaaaaaaatcatttcaaaattgtagtttaatatgtagtatttttatagtttaatgactattttctaaataaatgttatatttattaataaattattttagtcaaactacaattaatgataagtacacatgtcatcaaaatagagtgccaaatgtcgtattggtaggcaaagttagaaaaaaccttctcttattatataagaagatatatgtagttgatgaagagtagaaaaaagtaagagaaaggaatatgatagattgataagagtaaaaaatacaaaagtgtttaggaagaattataatagactctcgtaagattaatgtcacataatacatcgatatatataaagaaaaagactaaacctaatttactcaatgtaaacatttatgtgttatgtgtggatgatgaagagtaggaaaaaaataagaaaagggaatatgataaattgataatagtatgaaacacaaagtgtttgaaaaatattataatagactctcgtataattaatatcacataatacaccgatatatataagaaaaagactgaacctaatttcctcaataaagataaacttaaatgtaaataatactattttacgtgttactaccgtaaatctagtcattgtgctctgtcttttttgttataaaggaatgagagaagaaacggagagagattgtagagtcggacaatgaccacgtggcttaattgtttggatacgtgtttgataatctaaatcagaagagtaagaaaaatg

SEQ ID NO: 25565 - DNA, 3000 bp, Unknown; identical to SEQ ID NO: 25564
  misc_feature (1)..( 3000): 2750-1469P.txt file - cDNA_ID_2706783; gDNA_ID_2214502; Annot_ID_184034

SEQ ID NO: 25566 - DNA, 3003 bp, Unknown
  misc_feature (1)..( 3003): 2750-1469P.txt file - cDNA_ID_2706807; gDNA_ID_2214502; Annot_ID_133686
gttttcaactgcacacacattcaattactgaaaagattctaatttcacaattactgacaagattctaatttgaaacgaagaacaaaagacggtaaaaatactctaaaaactcaatgtaaatgcataaaaacaaaactatgaaagcgaattttaaataagctaaaaagtgaaaaccatatacatcaattaaaaataaaatataagtttagtgtgaacgtgttattcgttgtttcacgcaaaacccgtttatatgtcagttcgttggatttggatatcgactctagtcatggtccggtcacgagccttgttcgttatcgacttacttgccgtgtgagctggggtaatccatttcctaaatgacataaataccctcattacttgcacccattgacttctattcttttccttttcgagaatgataaatacgtgccttactatacacgtaaatgtttatatacggtaaacatttaatttcgctttacaatttatttttcttccatttatctataggattcgattcacatagtattacacatgtttcattttgaaactggcaatactcaattagaaggaatcactatggaatgtgactttgagtttgatgttgaccatgactttgaaagtgtatgtacgtgactcaaaattacatttagcatggaatttaaactcgtatctctttatttaatagcttaatatctctaacgaaacaactaaacgtttgatctgttattaaagattatttgtcgaccaattcattgggatctagtggtcgatcgaatgactatatttgaatcattctggtacatttttaatcatggttactgtggaatctttaaacgataaataagaatacaaaactttgatatttccgttataagacatataattaatttgttgtcatatatagttttgtcttcagcaatcacaacattattaaattatcatattgatcagtatgaaaaaggtcagataattattatcaattaatcagttttgtagacccaagctcaatgatttatcttctttcctctactttataagaaatttgtggaatgattagaataattggcaggaattccgctgatgagaggaaagacccaaactcaatgattaagactggagattttgtttttgtcccgaatgtacttttcaacacttgatttcttctcaatgttctcatgcggaaatttgggggaaattgtcaatgtatcattttttcggttgtcatctctagttatagtgttagatctcgtttttaatatgtctccgactaatgtttttgttatcatttctaaagcaatgatatttatgctcaaatgagcttattaagagaaatataaaactgaaattagatagctcattaagagctttattactcaaagaaactaaaagaggaaagattactttgttatcacaaagaacacgatgattcaattactactttcataaagatgagaaagggagttgttttgagacaactcttaaagttatcatcaaagttctcatcacataactatatatatgagtgatgagtcactatcttgttaatcctatttatatggaccactacatgagcttttaagttactcatgagacattatattgggctttatatggatcctctaatagttttgctagattaatgtgaatacgtctttaggaatgactagatcatgagcacgagataatcgtcaccgcttgcactaatatagtataagagggcaatggtgactaattttcaaaaatttagctccaaggtgattttggagttttacgctcatttacatttcagaaaaaaatcaaacaatcatgattgggtcgtgtctaaacaattttgcatacacatcaaaacaaacatttgcaaaagtttgaagaatgatactaagctaaaaagtgaaaatttccaaaacaaaaattagggactaagaaatgcgagattttaagctcacaaagagtacttaattgattgtgtttctttttttgtttatcttcccgtagatttcatgtcaatttccgaatgaacctagaaaatcaccaccatatttcctcttatcaaacaaattttccatccaatcatattgtctcattctaacttgagcgtaaaaaggtatttgaaaacaatttattttagttttctcggacactttcatgagttgaagacaaaatcagagaagtctccgaaaagacaaaaatggatcgtcagtttgtcaccaaacacctacatgaaccttacttgattcgctccaagtgttcaatcacttatcatatgatcaccaacaatccaaaaataatcgaagtttccataccataaacaaattccataatccaaaaattcgaccccttgacacacactgacacacactgacacacacacacagaaaatattcccgtagctatgcctatatgggcaacttcctgggctaatggtcccatgaaaaactgatgagctcatagtcaaatattatgcacaaatgggcttatataaatgtcaacttcaaagcttaccagaaacccaacaaatacacaagccctgaagtaaaaaacaaaaacaatatttatatcaccgtaaatttcggaccaaatcagagaattcagagtgtttttactgttcatggatcccacgtgatcagacagctcaaattccgatctcgtaacgacgtcgaataagacaatttcggttttgtccctaatcccatcttaaactgggtcccacgtttttctcttcctcccaaaaagcaaacttaaaaccaaaaaaatattatcggacaagattccagctactagtggttctttctttcttcttcatctttttctcaatcactttcttcttctccattctccttttcttttggttctctctcccacttgtgaagaagctcctcaagaagaaccctaaaaaaatgattcttctttgattttgtgtatttttacctgttcttgttggtgtttgtttgcttagttctgaagcaaaagctagggtttttcttcttcttcttgaaaatg

SEQ ID NO: 25567 - DNA, 606 bp, Unknown; identical to SEQ ID NO: 11567
  misc_feature (1)..( 606): 2750-1469P.txt file - cDNA_ID_2706818; gDNA_ID_2214502; Annot_ID_133701

SEQ ID NO: 25568 - DNA, 3003 bp, Unknown
  misc_feature (1)..( 3003): 2750-1469P.txt file - cDNA_ID_2706826; gDNA_ID_2214502; Annot_ID_133694
ttcttcagggagatcaccattctgatcttcgttcgtgttttcaccttcttctttctgtaaggaatcatcattctcaagcattggtacgtcttcatcaccagcaatcttttcttgaaaggaaagtgatctctttgcagacgcttgacttggtgttgtgtcatcagttggcgcccgtttggtttgaatcagataatgtgccacagacttatacccaagtgcagctatctggaaacaatccaaagaaagaaagaaatcttcagctctagattctattcaagaatcaaaaacaccacaagataatacaaaagaacaactgaaaaaaacgcacccttctgtaaatcgggccagttggaacccatcctttattattccggcacaaactgcaattgcagatcccgcgacaagcgggacaaatccagtctggattctcaagagcttcaagcacatgttcaccatatctgttcatcaaaaatattaatatacattcatcatcaataacagaaaaactaatagcaaccaacctcatgaacaaacaatcaccacagaactgtccttgaaccaaattgcattcactgcactgtgtacgatgccccatcgtcttctgcctgtaagaaacacacaaacacacactaaagcattacagaaaaatcatttcagagagttgcaatatcaagttctcaacacatatgagtttggttattacctgcattggtgacaagtcttaccgttaaacggatcataaatccgtttcccattcttatcatagccatcaacaaaacaagtccagcttctttctgtattcccaagaagcttctcatgttcctctgtgtaaatctcagctcttatcccttcaccaatcacaacactctctcgtttagatgctttcttgcccttctcattgatcccatcagtgtagataactggagttgtgttctccaatctaacaatcacagaagaaaagaatcaataataaacccaaattcttactttaaaatccaaattcttaaaccctagttttgcctcaaaaacccaattcctccagaaaaatctctcctttaaactgatacaaatcgaatcataatccctaattccacaaactcatctttcaaatccaaaaccccaaaatatgatggaatgagagaaacggagacagagaaaggaagagattaccgagaagatcggcgagaaggctgaagaggaggagtcggattctgaacagaattacggttaccgtaagatcttttaacgggtcgggtcttgggtttgagtttgcgagagagatttaagagacccagattgttcatcctctgaagattctctttgatcctctcttccctgcattgttcgtaaagagagacctttggggtttctttgattagttccggattagggtttgatttaggtactgaatcttgtgcttcagttctcatggtgagcatgatgatgatgaagatgatactgggtttcagatttcagaactctctgtcactctctttatggctgctctctggagaaatgatagtaaaagtttaggtttttatattgttttgagttgatgtcctgatgttacagcaacggtcggatttattatttgaaaagtgtgcttatggaaatggggaatagtgtttggaaatgtttactagcttctgtatcataaatccctaatgatgggacttaatctttttaaatatttttgtttccttctaattgcaatacagctaagtagagatagtgggaatatggaaagttgtaatcttttaagagaaaattaataaaccattctacaaaaattgttcttggtgcactttattaagattacgaatattaacatttaaacaaatttccaatagaaatataaagtttgacttttgagtaaagtttagggactgtccataagattgagagtctcaccttgtcaaccaaattaacaccaaatcccttcacatttaggaggatgtattcaatatagcatttggaatgatttgtattaagatgaaaaatatattttattcaaacatgaattctaaaaagctttctaaaatcaagtgttattggattaataattttaaaatctagaatcaaatctgctgttattagaaatattttaaatagtggatttgaattgacttgagagattttgggtgaaatttcaatgaatttttaaaaattcaaacattccctgtctcatagtttgaggtagattttaaacagttttaataacaaattttcgaattcactaaaataatttcaaaactcaataaaactcaaatcactccaaattctttctacaatacactcccttaatttttatttttttttcttttttcctatttttttacacccctttattaattactgtgctttactaaacttaccacacatacaaaaatatgaaatttaagttactaatatagaagaatactgttggggactagaatcacatgatcgttgttgtcataaaatctatcgctagttaaagtattaaaagatcgagaaaaaaaattattagttccccaaactcataattgtatgttaacattttctacccattttcttagatttgaataaggaaaaataatattttggttgtaaattgtaataactaaattttttccggatttgattatttgttttattttcttgacagtggtaactctgctcaagtgcttgccttcatctataaaattggagagacttttcattaattactgttccaacaaatttgaactacttttaattatgagtctaattaatacagagagagttcaagcgtccaacgaattaaaggtctcgttgttattttctcactagctaaaggaaaaacttggccacgttgatgaaccaccacttgaaaaatcttgaagcctccatttacatcaaaacagtcaaaccaaattcgcaatctcacaagtttcccttccatcccaaacaacactttattatctcttgttatatataaatctcaaacaataacactaacatttctcaaaatcaagaaatatg

SEQ ID NO: 25569 - DNA, 3000 bp, Unknown; identical to SEQ ID NO: 11556
  misc_feature (1)..( 3000): 2750-1469P.txt file - cDNA_ID_2706834; gDNA_ID_2214502; Annot_ID_133692

SEQ ID NO: 25570 - DNA, 3000 bp, Unknown; identical to SEQ ID NO: 11562
  misc_feature (1)..( 3000): 2750-1469P.txt file - cDNA_ID_2706842; gDNA_ID_2214502; Annot_ID_133687

SEQ ID NO: 25571 - DNA, 3000 bp, Unknown; identical to SEQ ID NO: 11554
  misc_feature (1)..( 3000): 2750-1469P.txt file - cDNA_ID_2706847; gDNA_ID_2214502; Annot_ID_133679

SEQ ID NO: 25572 - DNA, 3003 bp, Unknown
  misc_feature (1)..( 3003): 2750-1469P.txt file - cDNA_ID_2706866; gDNA_ID_2214503; Annot_ID_133707
actttttattttaatccctttatttgtttacgggagaaatacagtgatttgctcaaaaaaaagcaaagtagaagaaactccgtttttgagattctccataggacagtagtttacgcataaaaaagcatgccagtgttgtttattgactaaccaagttggtagtagtatccaatggtatgaagattcatatgatttgtcctccaattatttcgcaagactgataatgcagtgtgctaagttgtttcaccctttcatgctcacaatattaaccaccttctcgttatgtaatgattccagtttaatttttttgcaacactattggtaaactgttatagcttatgattttcttgtttatcattactcagaaacgactgtcttttagatgagcagatttttgaaggcgaagactgaggtctaagtaacagatacaaacttataactatgtgcaacggtattagagagacccggaaggagaaacaaccaaagagtaggaaagactctccgtagaagatgaaggtataagttctatttttcagacttcctagtggggttattatggtctaacatctgcttcctattttctaatctcttctgtagtttatataagatatctgattgctgcgtctaaaatgttctaactgctggcattatgtagctgtaagttcatcagatgtttgcaaaaccataaggggcattgttttcataaaatttggattttgaactaaagaaggtatccgtgaaaaagtacttgtttccaattgttataggtatccagcatccacagttagaacgtgttaggctataacatcctcattcatgtcgctaataaacattggtttttcagtattggttcttcataaaatctattgtcggtaatcatatcctgaattccattgtcaggtcagcaaatggtgcaacaacatctgacattgatgagtaagaaggtgggctctaagatatttaaataaggtctctctcaacaacctcactattataaggcactctgaaaattctggggctatagcaatcaacgaggacaagactgagattaatcaacttcgagattctgcaaacgagactgcttcactcagcaggcaagtgtctctttttcttccttcaaccgcagatatttttcttgtttaactcttagatgcaagcgaaaaacagaagttgaaattcgtgatagcgctgctctcatatttttcctgaccattgccattagtctcgcacatgcttttcgcaacttctaagatgtcacatctttgtcattgtctgagttttgatgagcttaaagcaacttctagaagacaaagagacaagaagaggacgagtttgaagcactaatggagaagctttgtttacacctgaggcactagccattgagttttaggcaagtcttcttgttttactcccaagaggactcaatagcagaggcttttgagcttctaggagaaatgttgttatgttgcagaatcatatgtatagttttgtattgtttgatcctcttggaataaacaagtctaagtcttgacacatgtagctttgaactttctgcaacagtgtaacacctatgtatgtaatatataataaaaatgccaaatattttgtggttcttcattgtgatttggttaacaaatattgaatctgtgaatcttctctactgatacagttcagattcagggatcagaatgcaagaaactaaaaaaagagacccattttacacaagaacaaaaaatctgagcggtttaattataaattagattttgaagttatatatataaatttttccacaggaaaatcaaagaaagttgttttgccagtgagttagagagagagagagcgatagagcgagagagagagagagcttgcgtcagtggaggagtcggaaacttgagaaacttgtttagaagaaacgccataacttggagaagcccaaacgaggattttgctcttgtgtatcttcgtagtccatctggtaaatgcgagattgttcttcttgttacgaaattgtttgtttgtgtatcgctgttcattgtattgtttgttgttttgtactggatttggctgtgctttgtgaggtatatgaaggtttctgcaattactggaattggattttggtgtttagtctccgatggtttgattgtgttctagggttttcataagaacggaagtctgttttgttgtgaatttctcagaaaggtaaaatttgttcagagattgttgagattaagacttgaattttagcataggaagagaaatttatgtctagcttgaatctaggttgaagggtgcatggtgctttaaacgactgaaagattaagatttctcagagattgagacttgaattttagaataggaagagaaatttgcttacttcacaaacgttttgtgcaacctggatttaagatgatatagatatgtagcttgaatctaggttgaagggcgcatgggtttccagattcgagtcactttagatccgaatttttgtagttttctaaacttgggtgctgaatttggatctgaatagcatccaagaacatcctggattactaacttactgaggattaaaggtttttctgaatggaaagtttgcattttatcactagttaggaatccgatttgtttttctcagtgagacttggagatgatgagaacagtatgtgtccgcttaatgcagtaccacaaaattattcaatcacgaatcaggagagcaaccttttgagcgcctgataagttactggagttagtttaaaacaatgggtgaaattgatccaaattagtgatcagaagataacttactgtttcttcgttatggtactcatggacttggttttcttgcattttgactctgttccatgttttgctttcgacatttaggtgatcagaaggatatgagcattaccattccagagggactacatgaagaagtcgaccaacagattcattggtacttagagaagtaatgtgctttcagatacttttttggtttctcaggaaaacatg

SEQ ID NO: 25573 - DNA, 3000 bp, Unknown; identical to SEQ ID NO: 11569
  misc_feature (1)..( 3000): 2750-1469P.txt file - cDNA_ID_2706885; gDNA_ID_2214503; Annot_ID_133720

SEQ ID NO: 25574 - DNA, 3003 bp, Unknown
  misc_feature (1)..( 3003): 2750-1469P.txt file - cDNA_ID_2706889; gDNA_ID_2214503; Annot_ID_133719
cattgacattctgattcctaatatttcctttaagcttctcctcaattcttagttcaaggtagaaacgagtttgctcatcattccacgcaagattcttagttgatcatgtgtttttgtacaaaatcagtctaaattacagaaaatattacagtaaatctaagtttagaggagaatatactcacatcggtaccattgatagttgtcatctgtagcacacaatgaaaacaaacgttttgtagttgtgtttgaacaagatcaaagataccaaacaaataaaacaaagatcagagataacaaagcaaacaatacacaacttatgataacaaagcaaagcaaataaaacgtgtacaaagatcagagataacaaagcaaagcaaagaaaaactatttgatattgaacaatcatgagatattattcttgactatttctacagtatttgaactcaaaccttagacgaactcatgctactactacagaaagccaaatgcaaccactaattaatactatttaatatcgaaagcaatatatttacagaggacgtactcgagaaaccaaagctttcttacttggagacaaaacttgctgaaacaaggactgaagagaaaaaatcttttataagatgaaattctcccttataaataagcagttataagctataaacacaaaaacaattccactttggatgcaattgaacacgtcaaggaggcagctgaggtttgtaactatggatggtcaatctaaagagggctaaagtgcagatgctaaagtggcagcaccaaatggttatgttgctcctaatgtagagacaacaaagcctcttaagagcaaatcgaagactcaaaagcaacacaaagcaagcaaagcaacacaaagcaatataaggaacacaagccgtaaactaaagctaatcgaagaatcaaaagcaacacaaagcaaagtaaagcaaacccacaattaaacaatgtaaccatggtggatcaaacccaagaacaagtgattgcaacaaggatacaaagagaaacaacgtgagagacatggagcgagagagaggaagcgagagagagagagagagagagagagagagagagagagagagagagagagagagagagagagagagagagagagagagagagagagagagagagagagagagagagagagagagagagagagagagagagagagagagagagagagagagagagagagagagagagagagagaaacacaaacctgctacactggcgaagaatcggcgacggcgatttgtgaagaatcggcgacggcgagatcaccggcgaagaatcagcatcattgacggctatgaatctcaattttgagtgttttgtgtcgaggagagggtgaagaagagatgtgattttgggtgtaattccatatattagattagggtattatttttgttataattttggctgaatcagcttcagcagaatgaacaaatcaaactcagtcagattttttttattttttggatgaatttagaaaaaagcattcaactgaatcattcgaatgatctattaaaacatgaaaaacaaacaacaattttcatcttcattgagatggttcatccaaatggacaaacaaacaggaccatagtactcaacttgaaaccattgaagctggttggcaggttttagtctttcttgcaatatttgcatgtttatatataaatatattctaattttcttatattttattcattgttttgttattgattaggtgtgcactgtactttataatgatactaaccctcgatactttgtctactggactgtgagttaacttccaaagtattgttaaattttctttgttttttttgttgacaaaaaatctcctaactattttttgttatgtgtgttgtttgattacgtgaaaacagaatgattcatatacacaacatggttgctataacaatctttgctccggctttgttgttgtcaaccaagcatttgctctaggcgcggccgttcctgaagtttctatccgtgatggtctacaatacgaaattttcacaagtatatggaaggtaaaaataagggctctttttcatcatataatttcaagaaatactcttttatatatagaaactgaaactaaatatgttctattgttataggatcgtagttcaggaaattggtggttgaaatttggtactcatttaattgttggatattggccttcttcattgttcaatcgcttaggagatgctgcgagccaagttcattggggaggcgaaatagtaaacgtaaaggagaacaaccaacacacgtcaacacaaatgggaagtgggtcgtttgcaataaatggatttagaaaggctagttattttaggaatattttagtacttgatgaaaacaatactacgaagcaacctgtaggtgcttctacatctgagacggaaggaagttgttatgacatcaggtatcgcactgatcaagcatggggaagtttcttttactatggtggtcctggtcgaagtcctttttgtgcttgattagatatgcatcttatatatgtaaaatattgtgtatcaatctatctatgtcagttatcaccagcatatagtattatatgtggtggtgaaaataaagtttaagatatcattatagttttgagactataactagtgtaagctagtgtaaaaaaaaaaaaaaaaaaagaaaaaaaaaaaaaaaaaaaaaaaactagtgtaagccaaattcatcaatagggttaaaaagatagtttaatggattgagtattgagttctcgaggaagttatattcttgtctaaagtgttatcacatttaacaaagtgaaacggcaacgttttggttgccacaagataaacaaaccatgtcgttttcgaattgtgaaaacagcacgtagttagaaaattcatcaatctgaaaaggaaaagggtttcaaactctctctaggcggtctccgaattagcaaattgaaattggcaaattgcaagagttttcgattcaacaatg

SEQ ID NO: 25575 - DNA, 3003 bp, Unknown
  misc_feature (1)..( 3003): 2750-1469P.txt file - cDNA_ID_2706901; gDNA_ID_2214503; Annot_ID_133714
tccggcagctgtggcggcgacgaagaagcatctttctcaacgaacacgacaagaaactcgtcctccatccacgccgtgacctgatccgtcaaggcgttgttaggaagcttaaatctgctcatgaacttgttgtcgccagtacagatctgaagatatccttcttcatctacgaacgcaatcacttcgtcttgatccactcccggaagatacgctttgaaaacgtgagccgtcggagtctcggtccaattgagctgcgtattgacggtggatgatgaagtttgtgggaatatttctcgagaaagtgagggaaagtggtgagaaagaaagagagctggtgatgggaaatcaagaaaggtgttcatgagttcaaatggttcccagattctatcgccgggagatagtctccggcgattgctgatcggaatcatcgacatcttcttcttctctattcttagaaagtaacagaagctgagttataaatcttgatcttcttactcaagagaattctagagttttcttgagagtgacgtttgtgatgattatgaagcacagtaactgggcctagcgtggaagcataaagcccaatagaaaaggcctttttcttttttttcttcttattcccggaatccgacaatgttcaaagtgtgtagtagattgatgaagaaaaccagtgtcattttggtagataatcgtatggaggaattttttcttgcaaaagtgatatatatggtggaaaaatatatatgtaaacatagatgtttattgctcttccgcatttgtgttaaacaaatagtgtaacaatatcaaacagtttttttgtttcgtccattcgattgataaagacaaagatcattacgcattgcgaaaatcgaacattttgattaaagactacaaaacagaacacctgacattaactactactcgagggacgaatcgatctttcgtacggttcttgagaaagcaagaatgtcctctggcttgctagcgccatggtcgttgtctttgttgccatcatcgtcgttggaacctctgtcttccactatagattcacgaatgatggttcttatcgtgttgtcttcggcttttcccgcctcgttggtgacgactctctttttctggtctttctccattctctctttcgttgcctccatatctctctcgttctcttttctctagctggtgcaatattttcttgaaagacttctcgacacgagatttgagaacacgtggcacgttagagatgataacgtggtcgtgttcgatgtgaaggtgttttcttcgactgatacgtggagggatgagtcaaacgaagagaaaatgttacaagaaagcccctcagaccatccttatcaatggactcttacatacaattctaaacaattttgatatacaaaataatgtttaaatattaaaaagattcttacaaaagtaaaaaataaagaagaaaactcttaactaagagccattttccatctcttaagcacactttttaattttttaattcttattttgtttaatataatattttgatattgttaacaatctattgataaggatgctctcaaacgagtgatgtatttcgaaaatgaccttttgaacgatcgttaaaatgagtttcattcaactttcatctaaacaaatcgttttgaatctacgtgtgaaagttggtatccgtttagaaaacaaccggactgctaacgtttaactcaaaccggttttaatattttccaccaaaagaatttgttttagcttctttgtagtatttataatggagtaactcaaatgaatttgacgtttattaagcttaattagggttaatcatttagggaagcaattttgatactattttgccaatggggtggtacttaaaatggagcttgtgaaatttttggccatgaatggatgttcttttccagttcagtttttggatttggtttttattttttttaattattttaaacaaaatttagattttagttttagattttgttattagatatttgtttttttttaaaaaaaaattggttttgaagaaaataatgtagttaaagtaaaaaatagattccttaaattatagaagaactaaaaatctaaaatcttttaacgggagattatatcaaaactctttcttaaactccaaggaaacaaattttacaaacttgattggtatgacaattattttttgaagaatgaaaaccaataactctgtcaaaaattgcaaaacattcaattcgtgtattcacacttatgaaaaactccacgaacaaagctaacaaagttgctttactttttagttacgtcaatttaagttgatactatatatttttaaaaatatatattcgtatagttagttgatatattcgtatactaacttgatctcactcacctcgaacattatcggttttggtgggatttgaaagtgaatagagatgaatgagatcatgaactttattttacaaaaatcagagtaagaataacaaaatttggtaacgggtacatatgattagttaccgattaaagagattgacgtgtcaactatattatcaataggaatattcgtaatttttttactcaagttccagttcaatgctttttgatagttcttttttaataactagtgagaacaatccttttgatttggtcaaaagatgccaataaaacattaaacactgatagaaagaaaagagtaatttgcgttagtatttgactttttttataatcaggtggttaagaaactttgaccactaataaaatgccatacttctttaattacctaattttattaatggcttggatatttggattaatttaaattgattacttccttttaaaactctccaccgtacatgcatctcctatttccgtacacacacatttgttataccatattaagcttttaaactctctttcttctctgatcattctcttcttcttcaaacaacatatacataaaatcatacacacacgtatatatatatatatatatagatagtgtgaaagatg

SEQ ID NO: 25576 - DNA, 3003 bp, Unknown
  misc_feature (1)..( 3003): 2750-1469P.txt file - cDNA_ID_2706901; gDNA_ID_2214503; Annot_ID_184054
tcctccatccacgccgtgacctgatccgtcaaggcgttgttaggaagcttaaatctgctcatgaacttgttgtcgccagtacagatctgaagatatccttcttcatctacgaacgcaatcacttcgtcttgatccactcccggaagatacgctttgaaaacgtgagccgtcggagtctcggtccaattgagctgcgtattgacggtggatgatgaagtttgtgggaatatttctcgagaaagtgagggaaagtggtgagaaagaaagagagctggtgatgggaaatcaagaaaggtgttcatgagttcaaatggttcccagattctatcgccgggagatagtctccggcgattgctgatcggaatcatcgacatcttcttcttctctattcttagaaagtaacagaagctgagttataaatcttgatcttcttactcaagagaattctagagttttcttgagagtgacgtttgtgatgattatgaagcacagtaactgggcctagcgtggaagcataaagcccaatagaaaaggcctttttcttttttttcttcttattcccggaatccgacaatgttcaaagtgtgtagtagattgatgaagaaaaccagtgtcattttggtagataatcgtatggaggaattttttcttgcaaaagtgatatatatggtggaaaaatatatatgtaaacatagatgtttattgctcttccgcatttgtgttaaacaaatagtgtaacaatatcaaacagtttttttgtttcgtccattcgattgataaagacaaagatcattacgcattgcgaaaatcgaacattttgattaaagactacaaaacagaacacctgacattaactactactcgagggacgaatcgatctttcgtacggttcttgagaaagcaagaatgtcctctggcttgctagcgccatggtcgttgtctttgttgccatcatcgtcgttggaacctctgtcttccactatagattcacgaatgatggttcttatcgtgttgtcttcggcttttcccgcctcgttggtgacgactctctttttctggtctttctccattctctctttcgttgcctccatatctctctcgttctcttttctctagctggtgcaatattttcttgaaagacttctcgacacgagatttgagaacacgtggcacgttagagatgataacgtggtcgtgttcgatgtgaaggtgttttcttcgactgatacgtggagggatgagtcaaacgaagagaaaatgttacaagaaagcccctcagaccatccttatcaatggactcttacatacaattctaaacaattttgatatacaaaataatgtttaaatattaaaaagattcttacaaaagtaaaaaataaagaagaaaactcttaactaagagccattttccatctcttaagcacactttttaattttttaattcttattttgtttaatataatattttgatattgttaacaatctattgataaggatgctctcaaacgagtgatgtatttcgaaaatgaccttttgaacgatcgttaaaatgagtttcattcaactttcatctaaacaaatcgttttgaatctacgtgtgaaagttggtatccgtttagaaaacaaccggactgctaacgtttaactcaaaccggttttaatattttccaccaaaagaatttgttttagcttctttgtagtatttataatggagtaactcaaatgaatttgacgtttattaagcttaattagggttaatcatttagggaagcaattttgatactattttgccaatggggtggtacttaaaatggagcttgtgaaatttttggccatgaatggatgttcttttccagttcagtttttggatttggtttttattttttttaattattttaaacaaaatttagattttagttttagattttgttattagatatttgtttttttttaaaaaaaaattggttttgaagaaaataatgtagttaaagtaaaaaatagattccttaaattatagaagaactaaaaatctaaaatcttttaacgggagattatatcaaaactctttcttaaactccaaggaaacaaattttacaaacttgattggtatgacaattattttttgaagaatgaaaaccaataactctgtcaaaaattgcaaaacattcaattcgtgtattcacacttatgaaaaactccacgaacaaagctaacaaagttgctttactttttagttacgtcaatttaagttgatactatatatttttaaaaatatatattcgtatagttagttgatatattcgtatactaacttgatctcactcacctcgaacattatcggttttggtgggatttgaaagtgaatagagatgaatgagatcatgaactttattttacaaaaatcagagtaagaataacaaaatttggtaacgggtacatatgattagttaccgattaaagagattgacgtgtcaactatattatcaataggaatattcgtaatttttttactcaagttccagttcaatgctttttgatagttcttttttaataactagtgagaacaatccttttgatttggtcaaaagatgccaataaaacattaaacactgatagaaagaaaagagtaatttgcgttagtatttgactttttttataatcaggtggttaagaaactttgaccactaataaaatgccatacttctttaattacctaattttattaatggcttggatatttggattaatttaaattgattacttccttttaaaactctccaccgtacatgcatctcctatttccgtacacacacatttgttataccatattaagcttttaaactctctttcttctctgatcattctcttcttcttcaaacaacatatacataaaatcatacacacacgtatatatatatatatatatagatagtgtgaaagatgatatgcgaggaggcatatcatcagcaaccgcaaatacaaaaggaacaaatgatgacgatg

SEQ ID NO: 25577 - DNA, 3003 bp, Unknown
  misc_feature (1)..( 3003): 2750-1469P.txt file - cDNA_ID_2706915; gDNA_ID_2214504; Annot_ID_133722
agcgctatcagccaataaaagacgacagctgtaataagactcgagacgagggaatcgggacttcaatatccgtaacggccgtacgggttcactctcgcagacaccttagcatgtggcaccgtcggaggtcgggcacatcatcgaccgatcgaccgacgtcggagttgtgctcggtctaaacaacattggtgctatgtaatctctctatgttgtgcatttgtgctcggccttaaatgtctacaaaatgattcaaatcatgacatgattaccatggttaatggtttatacggtgaattaaatcttgacttggtttaactgttgttataccatttttcagtttaaaatgttctattatatgttgactactacgttagggccggccaaacagtcaagaatgcagtcagatgaagccaccgtttgtgactctttaagtttaacaatcaaatgcatttgaatagagaaaaatataaaacaagaccaattagctcgtagttttaaaattaaccgctggattatttttaccagctctgagatggtcaaaacaagggtagacagtgtcaatggaaacaaagaatgaaataataaacaaaaatataaagcatttgatattaaaatgtatctatcaagaaaaagtactagttagacatgaatatgtcaatagtttgtcaacttttcgcatagataaatctcattttctttttgttgtggagaagttcacaatgatgtggttggttccgaacccaagatatcttcacatctgtatgtggatggaaaagcatatagaggaacggtggctgtatgtgaaaagggcactctagttactttattcttctgatggtcaatatgtcccctaccgtgccatagaatataaattgaaattgagttgcaactagcaatgaggcactatatattatcctggattcaaaaatccgattggatttgtttttaaagtttaatgtttgaaatgttcagatccaatttaattaaaaagacaatgacattggtgtggagatggtgaaggcaaacaacaaacaaaaattggaaatagaactaaaagactagaggtgagctaaactaaaggttttcgtggtaaatttgggatggagttaatctaatttgtgatatgttttttttagcatgttaccatgcattatgtacattcttttagttaaaaaatgttgagttgaagttaattatttttttatagcttaatatttttttttggtttaacaattagcttaattttgttatttgataaagactaaaacacccctggatgctcacccaccacatgcccacaaacggagattgccaacccccgggggagatgacgacagacgagaggagagaacagatttggagcttttatagcttttatagctatattgttaaaaaaaaatcaataatataaattaaactgcatgcaaaatcaaactcttgtacatctagagtcttactagattaacgtgtaagaacttagaacttggaaaaatctatatggacaaaatagatcagtcttttttcgaacatcatcaaccacacgaaatacgctagctaacttttaaacctcttctgtatcaactatcaagagacaaacgatataaaaaaaaaacaattggtgtatttttgaattttcattgcacgcacgtgaacagcataattgcttgattggaaacaaacctttttagaattcattaatcagttttaggtgttttggaaaattaacgaactatagtggagattaattaattttatattagtcttttttagtacacaaatcgaagtttcctagattttttcaaagttgaaaataatattgataatatttatcaacaatgaatctacaaaaacataatttttttgccaaacaaataacaccgaaacaagattcattcactatttttggtttaaaaaaaaaaatcaaaattacactattatgaagccaatttttgtatgcaaaaaacctgtatgtatcaatttgtttgtattaaaaagtaagcatttatgtcttttttttataaataatagaaacacttactagatgaatagattttttggttttagaacagaatactataattgtatttatatagcttttttatattattcgatatagaaaagtgttataataggaaaaatgtaccatatactgtcaataacatatttgattctaaatataaatagaattgttttaaagaaatatgatcgtttataattaaatggtttttaatgtcttttcttggggcaaaaaacaaagcttctctttcgtccatatatttgcatcgtaaggggtgacgtatcactctctctttctctcaaatattattcttcaatctctttttggggaatcttcgagcaaattagtgagagaacccacccactttctttctcatatgagtacataagatcccttttgagttttcgtgttttgccaaaatctccaggtaaagcttctccctttttctctgttttctctgttttgttattctcccttttctccattgtagctttttcctgtaaagtgggattgatagttttgtttcatggatttcaaatttgtgttatttgactcgataccatcttaaatgcagagtcttttcgtgataataaaattatggattcgtttcaaagttttttttttttcgtatggaaaacacttgagctctctcaatcttgtagtcttgactcttgatgattcttctatgttctcgttgtgattgcttgtcactgttctatcttttatatatgattaaatgcaattttgcccctttttacgcgcgaatgtatttattatctttcgcactctgggtccatttcttgtcacttgagcacataatgattgatttatgactttttaaagttatgaaaatttattatttttgttgctatggttttttggaattagaagctcatttcaaagttgttgattttctttgcagggtagggaattggtgtggtagcttgtgatgcactgtgtttgagggaaaggaaaggataacgatg

SEQ ID NO: 25578 - DNA, 3000 bp, Unknown; identical to SEQ ID NO: 11584
  misc_feature (1)..( 3000): 2750-1469P.txt file - cDNA_ID_2706923; gDNA_ID_2214504; Annot_ID_133724

SEQ ID NO: 25579 - DNA, 3000 bp, Unknown; identical to SEQ ID NO: 11586
  misc_feature (1)..( 3000): 2750-1469P.txt file - cDNA_ID_2706931; gDNA_ID_2214504; Annot_ID_133727

SEQ ID NO: 25580 - DNA, 3000 bp, Unknown; identical to SEQ ID NO: 11586
  misc_feature (1)..( 3000): 2750-1469P.txt file - cDNA_ID_2706931; gDNA_ID_2214504; Annot_ID_184072

SEQ ID NO: 25581 - DNA, 3000 bp, Unknown; identical to SEQ ID NO: 11587
  misc_feature (1)..( 3000): 2750-1469P.txt file - cDNA_ID_2706935; gDNA_ID_2214504; Annot_ID_133728

SEQ ID NO: 25582 - DNA, 3003 bp, Unknown
  misc_feature (1)..( 3003): 2750-1469P.txt file - cDNA_ID_2706939; gDNA_ID_2214504; Annot_ID_133729
accctcagaaaattgttaaaggtctctccttttttgttctaactaaggaagagacgaaatgactaacagaggcctaaacggctagacccaagagggacacaccatgtcgttttttcagttcatagcctccgtccttctctaatattcattaacatcgtgccgttttcatgttttccactcacactgtagtgataggtcaactcagaaccacgaaaatgtgtaggagtggtaaacgacacgatgtgcaacagtgaaaaggaggctaatacaatgaggacaagtgtcgaaacaacgatcgagattgtaggaaaagacgggcagatctgaaaagctgcccgaatatgttatcgattgttcaactccactagttttgcctgaccctacttgtgcccgttgccctcaaatatatctttcgttgtgagtcatcaaagaagcgtcggtatcgaaaccgaagattccgttcgcttttggttttgttcgaatttcagagacattaaaccagctttggtatttagattggtttgacttcggttcagtgacaaaacaaaacctacttaaacgaacgagtgatgagtgacttcagaaaaaaacagtacatgattccataataagtaacttattatttataagtttcctaaaaattttgcccaaaaaaaaaaaaagaaaaaaaaaactttcctaaaaaagtatttgctaattgctttgactcgaaaaataattgaaaactatcacttatgtgtaaaagaccaccaaaagttgtaacgcctttgatcacttatacgaggtcacagtattcgacaagtaactataggtcaaaatcaagtaagtatgcattcgacaagtaagaaacgtttaacgtaaatgaagtgagtgagcagtcattgaacaacaaattagcgtttggaaatggacgaaaactaactagtaaacatgattaatacacaagtaaatgaagtgactgagcagtcattaaataaccatgcttacttaatcacctatacgattatatagtctgctttcatccctaaactccttatcatcatgattcttgattcgacacctcaaagtcctcaagtgcatgtcagcacgtataaagttataaatataaaaaaaaaaaaaaaaagttataaatatcaagcataatttagcactgagattaaaagagcattcctaacaaaaccaaagattataagttcatgatattggaaaaacccaacacaagttcatgtaattaggttaagtagatgagcaagtagtctcttatatataatcatgtagtgagaacagtgagactaacgtagagagttgtcacttaactccatagtctatccccttctttgaaatcaaaactaaagtcattctattcttggggacaatctaaatcttttcccctcatacttttgttttgtgcaataagcttaatgaggtctcttattttcagttttagatttctatgttagttcatttgagcacaaatctatcctagtttggtttttcctacaaagatcgcctcaaaagaacgattttagttaataagacttaaaccccaaccatcaagatcaaaccgtcataatctagtttaatccatgatacaaaaaaaaaaaaaaaataccacttacacaaagtaaaagcaaaagaaaaagatagagatgagaccaaattcataaatttgatagaaagataaggatgagattcttttataattgtgaagataaatatactaatttttatcgaaggggtgttcaaaagtatattgattcaaatagattatagagaaaaattaagtaaaacttagatttagaaatacctcttgttatagttgtcatataaatcttaaatttaacatcaatcatattgtcaaatctagctttattaccaaaaatatatctagaatagaaatactaaaaaattaaaatgtcatccgaaatctataattaattaatcgaatgtcacaaccatattagtcatataaacatttttcttgttccaagaatgacatcttgaccgaagaataaagctatgaaaagtaatagaccaaaaagttaagacttctaaaacagaggctccgatcttttattagttctttaaaaagaatccggattaatttaatcatcggattagttggattggactaaacaatgattttgaattaggtagaaaccttaatgattatgagatcaactcaatgaattctttccaattattattgtcttagcaacacattctagtatatccataaaagaaatattataattcccttattttagtcatataagtatgaataaccctaatgaattgaagtattgaactaaaattaacgaatgaataagctctttccaacccagaaaacaataaataaatccatgaaaaactgaatttgttggattgagcttgacccatttgaacaggctacttatattatatataaatgtgaacatctttgcatgaaaaaataagtctcgtcaacaaatgttagccgaaataatgatatagtttaagatagagccaaacacataatatacatacacatgtacattgtattttctcaaaaaggtataatgacaaaagacaaaattaataggggtaatatcgtaaattcaagggtaaaggagctgggcataagctttgttctcgagtctcccgctccgctcaggtgtagcgtagcgcctcttaaactttctctccctttactatgcgttttctttggaaaccctaaaactctgcaagaacaagaagaaagtctcatccttgaaatcgacgctgtgattagctcttcttaaggtcaattcgtcactttacctcgacttgtaagtttgcttctccttttatttggtcatggtcgttagagttttcttataggatttgtaatctcaattcattagctgggatagcttaattaaggagtaaattttgttgtaaagttttgatttttattgaacactgttgtttctctcacagggttattgtgagaaaagagtggtggaattagttaataaccttatg

SEQ ID NO: 25583 - DNA, 3000 bp, Unknown; identical to SEQ ID NO: 11589
  misc_feature (1)..( 3000): 2750-1469P.txt file - cDNA_ID_2706945; gDNA_ID_2214504; Annot_ID_133731

SEQ ID NO: 25584 - DNA, 1291 bp, Unknown; identical to SEQ ID NO: 11603
  misc_feature (1)..( 1291): 2750-1469P.txt file - cDNA_ID_2706949; gDNA_ID_2214505; Annot_ID_133746

SEQ ID NO: 25585 - DNA, 1291 bp, Unknown; identical to SEQ ID NO: 11603
  misc_feature (1)..( 1291): 2750-1469P.txt file - cDNA_ID_2706949; gDNA_ID_2214505; Annot_ID_184100

SEQ ID NO: 25586 - DNA, 3003 bp, Unknown
  misc_feature (1)..( 3003): 2750-1469P.txt file - cDNA_ID_2706977; gDNA_ID_2214506; Annot_ID_133772
agtgactcgcaagatggcgttgaaacatagaatgataactaaatgggccgttaatacaatcttaggcccataattatcaatatttaagaagtatatagtagaccgttaatacaggcttaggcccataacattcaatattttgggctcaactgtctaaatgtatgaattatgatcctagatgggaaatatgagtttgttcaaaaaagaatcagtatagcatcttctttacttttctttttcgtagtttttttgggaagtgaacttgtgattggtaggaaggttactggtgatcgacgtttcctttaaggccgacaaagttaatggaccacggggagttttataaaggaggttttctttctttctttctttagcttaaaaaggtgtaatgatgactttttcaatctcaattttaaaaactttttggtgtattaatattgattcatatacgtgcaatctggagatcaagacattgaatactaacaccaagacgaatttttcggattgatggtttttgagttttcaaaataagtatgttggaatggtgcattggcgaatgaagcattgaccagacaaaggtcattggaaagtagtttttttttttttttttgcgtaaagctaaaggaaggtaataaaatacagtacatgaaaacgaaataagtagtgatattaaatactttagttgacaaaattgacagcggaaaaaacattacatgaaggccataaactaagagctttgaccaaatctgaaggtaaatcaggtttcagaatcagaagaggatatctattccaactggtgcaacggtagttgtacctgttgtgtcactattgcttcatagtttcgtatttatttattgtttctatgatgctgatatttgataatatatagagatatattgtgtttgcgttaattggtttggtcagtcgacaacccaagatttacttgtttgttattcgttcatcaacaatcttatagttttctctgtcaaatattctctttaagtaattttttaattaggaagtttagggattttttataggtcataggtgtaggttaaattaggtttgacaatgtataaggtgactctataaaatattataagtttttctaaatgaatatatcattagttggattaccaatttgaatatttttatgagattttgattaagtacttgaagtgttacgtgaaaatatatatagttcatgttttatcatggcaatttttttaattatgactaaccattatatgaatgttttaaagaataattctcgtttctattataaattttggtatgaaatctctatttataaaaataatgtgtatgtttatcaacaaaaaagaagaagatatgtatatgttttcttgataatacccgtacatagaaaggctattactttgacttcaagtaaaggtgtagcaattatctatgttcttgcttttttccaagcatataaggataatcgttggaatctaggaaaacttttaacgcaactcaacttcagataacaaacgtaaattttaacatggttaaatattcgatctaatttgtatatatacttagcgacaccagctttcacttatataaaattcacgaataaaatagttcatatgatggtagctaaattttcagtactttagaaaatatgaaatgcaagtgaagtagaattcagataaccggccaattgaatagaaaatttgatttagttggatagaggaaaagaatgttctgaaaaagagtaatgatgtgcatgtgctcgcgaaagtttccatagtgttgatggtagcgaccagtcttgagttccattcacgctaaatcacgtggactataaagattacacgtaccataaccataaagctctataaagattgcaattcaaaaaaaaaaaaaaaaaaaaaagaattgtaataggggctagtttctgattttgcttgctgtaaatgtaacatttcctcaagttttgacatagtttttaaaaaacctccttatagggacatgtcacatgtgttggatgattgattaacaatccggtggaccagaaaacaatgagtaattatacggaggccggctttagttaaacttcacacatcaaaatatatggcccatccctcgccttttgcaattgtcgccgaccggcgcgtgacgatctacaaaatttcgattttaaactcagaaaaatacataatacaatatacgtcaaaattgcatctacttattctaatggtagttgaaggaaaaaaatcagaactctatgacttgtgttataccatatattacgacaaaaaaaaagggattaaaaagtcgttgacgtttgacttaagtgccaaattaattaaccaatgcttaatgacctaaccaaagtcactttttattttagtccggtatgacttgtgacggcgacgctgaaaacgattgaagtacacgcgcggggtcctccagcctaattgccacctgtacaccagccctgtccgtcgtaactataaaaatctcattttccttttttattttatttccaaacctccaaacaattaaagaaacggcaaaaatttatgctgaaatctttttttcttccttattctcctctttcgcttgatttcgccgtccgattatctctatcgccgataaatatccggcgtcactcagtagatcttgaagctgttgctttcttgctttgctcttcgcgcaagattctctttctctgttttcattgaggattcgaagttgatcgctatttgattcgattggttttgagttttcgatcctcgacggtgattgaattctcctctttactttatttttggtttttgaagctcgctgtatcaatcgtgacgttttttgtgattcgcattgtgtctgtagtagttgatcaggtttccgattggtttcttattgatttgattttaaaaattcgattgctgatgaaattatctggttctgcatttgattgttcgcaggatggagattttgaagtgaatcggaggagcgaataagagaaagtgagagatg

SEQ ID NO: 25587 - DNA, 3003 bp, Unknown; identical to SEQ ID NO: 25586
  misc_feature (1)..( 3003): 2750-1469P.txt file - cDNA_ID_2706977; gDNA_ID_2214506; Annot_ID_184136

SEQ ID NO: 25588 - DNA, 3000 bp, Unknown; identical to SEQ ID NO: 11625
  misc_feature (1)..( 3000): 2750-1469P.txt file - cDNA_ID_2706988; gDNA_ID_2214506; Annot_ID_133763

SEQ ID NO: 25589 - DNA, 3000 bp, Unknown; identical to SEQ ID NO: 11625
  misc_feature (1)..( 3000): 2750-1469P.txt file - cDNA_ID_2706988; gDNA_ID_2214506; Annot_ID_184127

SEQ ID NO: 25590 - DNA, 3003 bp, Unknown
  misc_feature (1)..( 3003): 2750-1469P.txt file - cDNA_ID_2706991; gDNA_ID_2214506; Annot_ID_133759
tccctaattctcgagctcgaagaaagagacgaaaatggcactgagaaatgcaattcttcgtcacctgagggttccggtgcaaaccctaggattgaatcagtctaaaattgggttccttggtacgatccggtcattttcttcgcacgatgatcatcttagcagagaagctgtcgtcgatagagtactcgatgttgtcaagagcttccccaaagtcgatccctctaaggtcagctcgatcttcataaaatttggccaaatcgtgattcttatcttttgttttcctcattattgggaacaaaatgattattttgccttgaatatttgtcaatgtaggagcttttggttgatttcgtattgatctagtggaaatagagaccaaatgtatctgaaacgatgttgcattagtgttgttagtaaattgaaggttattgatctcaatgtggtttagtaagtgtagcttatcgtgttgttgttcctatggatttgatttgatatggtcattcttatggattttgcatttatgaatccttcatcaactctctctaataagggttgtttggttagggttatttttgttgatggctttgtgataaatatcgacaggtgactcctgaggttcatttccaaaacgatttgggattagatagtttggacacagtggagatagtgatggctattgaagaggaattcaagctggaaattccagacaaagaagctgacaagatcgattcttgctctctcgccattgaatacgtttacaatcatccaatgtctagctaatcgctgtgtgctctctcatggtttctccttcctttttcttgtatgaggttcttctctctttgataatgccataatgggatttgcaaaaaaatcacttttatttggagagcattgttattgactcttttaacggttccagtttcttaaaaagaaaacctttttgcttgaatcttgtgaaagttgacactttttcttgagttaatactttaatacgatttgtatataatacacttgattcttagcatggtcttgatcatacattgaagacgaatctttgaaaaacatacttgttttaaaaaactgatcgtctctcttggatacatatgcaagaccaagaaattggatcttatatactacattacatcataacgtgctattaactagaattgtttgtcagccatcttttggatcgaatacagacagtagttttcatttggacaagttttctgcttcatctcaactacagcatttgtaccaaaatacaccaatatctctatccacaagttagatgttttaattaggagatacatttcaggtttcgtttgaatcgattttttagtaaatgggacaaaatgggtgaacttacaatattaaaaacttgctaagctaattatgcaaaatggatagggtggaaggaacaaagcaagatgctgaaaccgcaacagcaatgaatcttgtaaacacattgtagtgatattgatcataatgactaaagaaagactaaataaacatctaacgtcaacaatatatctcttgattaagtttaacccgaaagagacagacaatggcgcaaactatagttgttaggaacgattctgagaagttgagacggttcttcagttccatgaattcctacttcactcctaagcaagccaatcattctacaccaaatctctttgctttcactaacattacttggttttccccatataaacgccaactttccgtagtattccccgatcccaatgcatcgagctttgtcaagatctaaaccataaaccactctccacaacatcagctcagagtcataccacattaacccaaatctaaggaagtaaacgaagagcacattgtcaatcacgcattttcctgtcttccaccaattatcttcaggtatcgtatatctttgataagaaccatctctagtatcgtaagaattcatgtattccctcgaatttaaagcataaaccttcctatcaagtgaaacacttgcatgcgtgaaccattcgtttctatcctttgccttaggaatcggcgctgcttcccaagtttgtgtctttaagtcaaatacttccgctaggatctcttcgcctctgttgcctccgatcacatagatcttaccaccgactagtcctacggtagctgataatcgctccacttgcatactaggtccttgacgccactgtccagattgggtgtcaaagatccatacgattgatgatgagggaaaattatatccgggaatgcagtaaatctctgtatcaattgcgatattggaaagagggtaagaagcatgcccgggacgataaggaacatcgatggagacgaagacattctcagtcgtattcatcttgttatcattcctccggagagtgaaccagtgaaaagtcgtccggttccggttcgggtatgtagttctggtcgagaagcatagataaagagagtcctttccgtgtaaagatcgcgtcttgtgaatctccggcgagcgaattagactccgcaaggacttggagacgcaacagaggattgggtaatatcgttttggtaccaaggctaagatgttcaatacgatgtccaccgggagtgagaacaatgacggcggcgtcaatgaagacgacggtggttggttggttttctgcggtggttcgtcggcgttagacatcgagagctattaggaggaggagactagagaacaactgagtgaatcaatcaaattgagggctttagccaaaaaccaaaagccggttaaattcttctctgattctgctttaatcggttaaaaccggtttatatttcttgtcttgatcagggaaacacacagagttttagaataaggcccaggaataagcccggtgagtgaatctttctaaggaatcgattttaaaacaaggcccattaaagggtgaagaaaaggcccatgaaaatgcttaaaccccctttgtctcccagcttcgtacacaggagagactgagataaggaaagaagaagaggaagaagaaaatg

SEQ ID NO: 25591 - DNA, 3000 bp, Unknown; identical to SEQ ID NO: 11617
  misc_feature (1)..( 3000): 2750-1469P.txt file - cDNA_ID_2707002; gDNA_ID_2214506; Annot_ID_133752

SEQ ID NO: 25592 - DNA, 3000 bp, Unknown; identical to SEQ ID NO: 11617
  misc_feature (1)..( 3000): 2750-1469P.txt file - cDNA_ID_2707002; gDNA_ID_2214506; Annot_ID_184114

SEQ ID NO: 25593 - DNA, 3000 bp, Unknown; identical to SEQ ID NO: 11616
  misc_feature (1)..( 3000): 2750-1469P.txt file - cDNA_ID_2707006; gDNA_ID_2214506; Annot_ID_133751

SEQ ID NO: 25594 - DNA, 3000 bp, Unknown; identical to SEQ ID NO: 11640
  misc_feature (1)..( 3000): 2750-1469P.txt file - cDNA_ID_2707006; gDNA_ID_2214506; Annot_ID_184113

SEQ ID NO: 25595 - DNA, 471 bp, Unknown; identical to SEQ ID NO: 11613
  misc_feature (1)..( 471): 2750-1469P.txt file - cDNA_ID_2707010; gDNA_ID_2214506; Annot_ID_133747

SEQ ID NO: 25596 - DNA, 3000 bp, Unknown; identical to SEQ ID NO: 11647
  misc_feature (1)..( 3000): 2750-1469P.txt file - cDNA_ID_2707024; gDNA_ID_2214507; Annot_ID_133777

SEQ ID NO: 25597 - DNA, 3000 bp, Unknown; identical to SEQ ID NO: 11647
  misc_feature (1)..( 3000): 2750-1469P.txt file - cDNA_ID_2707024; gDNA_ID_2214507; Annot_ID_184158

SEQ ID NO: 25598 - DNA, 3003 bp, Unknown
  misc_feature (1)..( 3003): 2750-1469P.txt file - cDNA_ID_2707036; gDNA_ID_2214507; Annot_ID_133782
tctctctgatcctgctagtgctcggcatttaaagtttgcgaggagtaatgttctcaaaagcatccagctcgggaatatttggccctcctttatcctattctcgattctctctatccctagatagttccctcctttagcataacactgaagcatcaaggaataagatgtttcagtaggtttgaaacctttacttttcatgtcggaaatcacattttcgcctgatctccaatctccttttcttgccaaggcattaagtaacgcgttgtaagtcgtaacgcaagcgttgaaccctgctcttgtcatctcaccatacattttcgatgcatcaacctctgaaccacatcgcccataggcactgatcagcgtgttgaatgtgtccctatcaggttcaaatccgcagctcttcatttcacggaacacccggttcacaaacttatccatacccttattcccacacagagcaagcattgtgttccaagtggcacgattaggggaacatccattagacttcatatcacataacatctttatcatttcgttggatctcgacttcttccccaacagactaagcactgcattgtaggtgcaagtattcggaacacaaccagcttctttcatactataaaacagcttcaaagcctcgtcctcctttcccgcctttccatatgcatctatcactgtagtataagtgattgcgttcggcattacaccctttttcgtcatcatctcaatgacaccagcagcttccttgctaaaaccagctctaacataagcagcaacaagctcattatatgtcacagaatctgctgggcagctattttcctccatctctttcaaaacactcaacgcttctgtataaactcctgctttaccaaaaacttgcaacaaagcattgtacgtaacagtaccaggttcatagccgcatgacttaagttcagcgaaaaactccttggcctctcttaacaaaccttctcttgcacaagcagagagcacagtactacaagtaaactcatcaaacttcaatcctttgcttctcatttcatctaaaacccctagaattttccgccaagatcgacccattttcccgaaaacatcgagaatcacattgtaagtcaccaaagtaggtgaaggacccatctctttcatcctctcaaacaaatcgatagccttttcatacttcccagtccgtgaatacgcatgtaagatcgtcgtgtaagcccgaacatcgaggagatattcttgtagaggaattttatcgagcaacttagctgcaacagagtactgagattctctacctaaaatcctaacaaagatttcgataacttgatgatctagcttcaaagctccagaatttgaagacaaaactaaccattcaaacaaaaaaacagctctttcccaatgcccagaatcatctagacccttaaccaaactaaccaaatcagttctaagcaattccgatttcacagaatcaaaaaacctactcaaaccagtcaaaggctgttcaacaatggaattaaccaagacaacttctttcttacacaagagtttcaaagacccatttctctcgttctcaatttcaatacccagaatgggtttcgacgatgatgaatcagtcgagacttcgagagaagggaaacgagcggcggcggagttggagtgtctaggaggcggggaagagaggtgaacgagatggtgaagaagagaatcgagagggaaagaaggaggagaaggaggaggtaagtgaagagtagcggaactgaatttgatagattggttagaggattgagatggtggaggtctcttggattgaattgggtatggaggtttgtgagggaagagtgctccgtccattgaaagacgttatccgaaattgggattgaaggagaagaagagtgagtgaaagttagcgcctttgggttgaagttgagattttgaatggccgtaaaagggactcgtccctatcggcacaagattggcctttccagatgatgcgttacgaacatttttgttctaatccgtatgactgaatatcttaactaaaccgaaccgaaccgaatttgaactaaccggaatgtatacacgaagtaaaaacaatagataaaatgtgaaaaaaaaattaaaatccccaaactgtaaaaaatacaaaaaaccataatcagattttgaaatttgaaatatttttgcgattttattgagttcatgtgtattttaaacgaaaaaaattacttgattagaccaaattggttcagacaaccttaaatctataaattggtttgttagattttacaccaatttgatcacttaactaaattaattaaattagatgattatcccaccatatttttgagcattaaaccataaaaccatagttataagtaactgttttaatcgaatatgactcgattaagattaggaaaaatttataaccggtaattaagaaaacattaaccgtagtaaccgtaaatgccgattcctcccttgtctaaaagacagaaaacatatattttattttgccccatatgtttcactctatttaatttcaggcacaatacttttggttggtaacaaaactaaaaaggacaacacgtgatacttttcctcgtccgtcagtcagattttttttaaactagaaacaagtggcaaatctacaccacattttttgcttaatctattaacttgtaagttttaaattcctaaaaaagtctaactaattcttctaatataagtacattccctaaatttcccaaaaagtcaaattaataattttcaaaatctaatctaaatatctaataattcaaaatcattaaaaagacacgcaacaatgacaccaattaatcatcctcgacccacacaattctacagttctcatgctaaaccatattttttgctctctgttccttcaaaatcatttctttctcttctttgattcccaaagatcacttctttgtctttgatttttgattttttttctctctggcgtgaaggaagaagctttatttcatg

SEQ ID NO: 25599 - DNA, 3000 bp, Unknown; identical to SEQ ID NO: 11648
  misc_feature (1)..( 3000): 2750-1469P.txt file - cDNA_ID_2707040; gDNA_ID_2214507; Annot_ID_133778

SEQ ID NO: 25600 - DNA, 3003 bp, Unknown
  misc_feature (1)..( 3003): 2750-1469P.txt file - cDNA_ID_2707091; gDNA_ID_2214509; Annot_ID_133809
ccgtcgtcacaaggtcctcagcatcatcagtcattcgctctcgatccagccatcgcagccattggtcctaccgtcaataatccttttcctccgtcgaattggcaatctaacggtcatcgacccagtaatcataaccctccttcttggccactcgccttttcacctcctcataatctttcccccaatttcttagggtttcctcaatttccgcctagccctttcacgacgaaccaattcgacggtaatcaaagagtatctccagaagatgcttatagattagggtttcctggaactacaaatcctgctattcagtccatggtacagcaacagcagcagcagcagctaccgccgccgcaatcagagactcggaagcttgtttttggttctttctcgggagatgctactcaaagccttaatgggttacataacgggaacttgaagtatgattctaatcaacacgaacagctcatgaggcatccccaatctactctctcgaattctaacatggatccaaacttgtctcatcatcggaatcatgatctccatgaacagaggggaggtcacagcggaagaggaaactggggtcatattgggaataacggcaggggtttaaagtctactcctcctcctcctcctcctggattttcgagtaaccaaagaggatgggatatgagtttaggaagtaaggatgacgatagagggatgggtaggaatcatgatcaagcaatgggcgagcattctaaagtttggaatcaaagtgttgatttttctgctgaggctaatagattaaggggattgtctatccagaacgagagcaagttcaatcttagtcaacaaatagatcatcctggaccacctaagggtgcaagtctacattctgtatcagcagctgatgctgcggattccttttcgatgttgaacaaggaagctcgtcgtggaggtgaacgtagagaggaattggggcagctcagtaaggcaaagagggaaggcaatgcaaactctgacgagattgaggattttggagaagatattgttaagtctttattgcttgaagatgaaactggtgagaaggatgccaatgatgggaagaaggatagcaagacttctcgcgagaaggtacgtttcagtttttgtgtaagcttgtgatataggatatacctaatgacttgttgggaacattcagtgatggtgtttagctcgtgtaatcaattcttgaactagaaaggatgtttttttagattggaaagattgtttaaatcagggttttgttatcaggagtcgagagtggacaatcggggtcaacggctgcttggccaaaaggcaagaatggttaaaatgtatatggcatgtcgaaatgacatccacaggtatgatgctacattcattgcaatctacaagtccctgattcccgcagaagaggagctggagaagcagagacaactaatggcacatctagagaatctagttgccaaagaatggcctcatgcaaagttgtatctttacgggtcctgtgctaactcttttggtttcccgaagagcgacatcgacgtttgccttgcaatcgaaggtgatgatatcaacaaatctgagatgttgttaaagctggcagagatcttggaatcagataatctccaaaatgttcaggtaaagtaaatgagtttacttatagaaacacattgctttggtacttgatacgcttttcttgctttgaatctggtgcctatattttctgaaacattgttttttgtgtaggctctaacacgagctagggttccaattgtaaaacttatggatccggttactgggatatcttgtgatatctgcatcaacaatgtattggctgttgtgaacacaaagctcttgcgagattatgctcagatagatgttcgtttaaggcagttggctttcattgtgaaacattgggcaaagtcaagaagggttaatgaaacttatcaaggaacactttccagctacgcgtaagttctcctccacactttgaaatgaagttactttggattgcaaattacaatcattacttatatttgatacttttgcaggtacgttctgatgtgtatccatttcttgcagcagcgtaggccgccaattcttccttgcttacaggtgtgtataatcatatcctcctaaaatagtgtactgattactgaatgctcttcatttattgaagttattacttgatgcaggaaatggagccgacttactcagttcgggtagataatatccggtgcacatactttgataatgttgatagactccgtaacttcggatcaaacaacagggagaccatagctgagctggtctggggattcttcaactactgggcttacgctcatgactatgcgtataatgttgtatccgtccgcaccggttccatacttgggtaaactagaaactcaattatacttactgcaacatctgtgaagcaacaatctcagagatgaaacatgaatatgtgtgtgttgcaggaagcgagagaaggactggacgagaagggtggggaacgataggcacttgatatgcatagaggatccgtttgagacgagccatgatctgggtagggtggtcgacaagtttagtatcagagtgttgagggaggagttcgaaagagctgcaaggattatgcatcaagatcctaacccatgtgccaagcttttggaaccatatattcctgaagataataatggacaaggccacaactgaacttttaaaacatttgaatggcggattcgtgtggcttgtatatatttatgggtagaagattcatgctctgttctttttgcttttttggttgtgatttgaaatcttgcttgtgacccaacaaaaagaaaggtcttagttttgaagatttttgtatgatggtgatgtgggtggatttcttaaacgtgtcgtgttatttgcgtgacttgaaaaaagaagtgagataattttgaaaacaattttttaataataatgcaaaacagatcaatctcgcaagtcgcaacgatg

SEQ ID NO: 25601 - DNA, 3003 bp, Unknown; identical to SEQ ID NO: 25600
  misc_feature (1)..( 3003): 2750-1469P.txt file - cDNA_ID_2707091; gDNA_ID_2214509; Annot_ID_184202

SEQ ID NO: 25602 - DNA, 3003 bp, Unknown
  misc_feature (1)..( 3003): 2750-1469P.txt file - cDNA_ID_2707094; gDNA_ID_2214509; Annot_ID_133808
aataccttcatccgaatcttcaagccacggaatattccgccggaatccaaacttccgatcctcgtttactttcacggcggtggatttatcctctacagcgccgcttcagctcctttccatgaatcttgcaccaaaatggctgatcgtcttcaaactataatcctctccgtcgaataccgtctagctcccgaacaccgtctcccggcggcgtacgaagacgccgtcgaagctatcttatggctccgtgatcaagctcgtgggccaatcaacggtggtgattgcgacacgtggttaaaagacggtgtcgatttctcgaaatgctacgtcatgggttcaagctctggaggaaatattgtctacaacgtggcgttgcgtgtagttgacacagatctttctcctgttaagatccaagggctgataatgaaccaagctttcttcggtggcgttgagccgtcggattctgagtcacggcttaaagacgataagatctgtccgttaccagctactcacttgttgtggtcactttgtttaccggacggtgtagatcgtgaccacgtgtacagtaatccaattaagagcagtgggcctcaggaaaaagataagatgggacgttttccgtcgactcttatcaacggttacggtggggatcctttagtggatcgtcagagacacgtggcggagatgttaaagggacgtggagttcacgtggagacgaggtttgataaagatgggtttcatgcttgtgagttgtttgatgggaacaaagctaaggccctgtacgaaaccgttgaggcctttatgaagagttgttcatcaactggcccatcgtccaactccaacatgtagtagtctgatctaatcatgttttacgaactatatatatatctagctaataattaaattcctacaactattacgcaatttttgttgttttaagtcacatatgatatgtgtggtgcaatggaaaaatgtataccctttcaataaatatagtggatgcaatttaatctatttactaatactaattttaacgatgtccaaagagaattggatgttctgtgagctacgttttattaacattttaaattatgaattccaccaacaaaaaaagatagattttaataggtgaacatactatcattatcatattatgattagctatttacagaattgttttgaataattcattaagaacattgttagattctttttgtatatatacaacaataaaatgctaataattccatctagtttagtttgtagaacatgattcctcatttagacaaaatataaaaacatttcttaatttggtcaataatcaatatagctaaactgcgtaaaatcatgaccacaaataatccgtatattcatcctaatcacaacttaagctccattaaacgtaaaacagttacacacaacaacaacaacaaaaaagtaagaaaagaaacgaaaaaaatcctaaacatttcttcttaggtcaaagttaacttcctcttaatcacgcaattaatcataaaaccatgtcacgtgactctcctcccgcatttgatccatacaaacacctcaacataacaatcaaccccaacggctcttgcacgcgccatttcgtttggccgagggttgaacccgacccggatccatgccccggcaagctcgccgcttccaaagacgtaaccattaaccacgaaaccggcgtgtccgtacgtattttccgaccaactaatctaccatccaatgataacgccgtggctcgtctcccaatcatcatccatctccacggctccggttggatcctttacccggccaattctgccgcaaatgaccgttgttgctctcaaatggccagtgagttaacagtgattgttgtctccgtacactatcgtttgcctccggagcatagactcccagctcaatacgacgacgcattagatgctctgctttgggtcaaacaacaagtcgttgactcaaccaacggcgagccgtggcttaaggactacgccgatttctcacggtgttacatatgcggttcgagtaacggcgctaacatcgctttccaattggcactgagatcgttagaccacgatttaacgccgttacaaatcgacggttgcgtgttttaccaaccgctttttggcggtaaaacgaggacaaaatcggagcttaagaatttcgccgacccggtaatgccggttcctgcggttgacgccatgtgggaactatctttgccggtaggtgttgatcgggatcataggtactgtaatccattgggttacttgccgcaaaaggagaaagttggacggcttggacggtgtttggtgatcggttacggcggagacacgtcgttggatcgacaacaagatttcgtgaatttgttggttgcagctggagttagggttgaagcaaggtttgacgacgccggtttccatagcatcgagctggtcgatccacgacgagccgtcgctcttcttaatatgattagagattttataagttgattattcttttcaagttttcatctaagcattctataaccgttaattttctcattttctattttgtatacatatgacattttacattgaacgttgttacatagcacaaatgttacttcttttgtgttttttgataaaatgttaacattgttacttcttattgtattcatttttacaattccacaattccgtaatttcacaaatttactaattgaaatccatttcattctcaatcatacttaagtaacctactgtagttgaattttaagtccaacttgtgatcagctttaaaaacaaaagtcataacatcggacggtcaggatatcatgtgtgaggctgtatcctttaaataataaaatagaggacacacacgagatccgttaaaggttaaaccttgaagaaagaaagatctctcggtggtggtcattcaacattgtaagatcttcgacttggcaaaattgtttcactttcgctctaaaaacttcatcttcactttctctcctcctccatg

SEQ ID NO: 25603 - DNA, 3000 bp, Unknown; identical to SEQ ID NO: 11669
  misc_feature (1)..( 3000): 2750-1469P.txt file - cDNA_ID_2707105; gDNA_ID_2214509; Annot_ID_133803

SEQ ID NO: 25604 - DNA, 3000 bp, Unknown; identical to SEQ ID NO: 11669
  misc_feature (1)..( 3000): 2750-1469P.txt file - cDNA_ID_2707105; gDNA_ID_2214509; Annot_ID_184196

SEQ ID NO: 25605 - DNA, 3000 bp, Unknown; identical to SEQ ID NO: 11670
  misc_feature (1)..( 3000): 2750-1469P.txt file - cDNA_ID_2707109; gDNA_ID_2214509; Annot_ID_133802

SEQ ID NO: 25606 - DNA, 3000 bp, Unknown; identical to SEQ ID NO: 11670
  misc_feature (1)..( 3000): 2750-1469P.txt file - cDNA_ID_2707109; gDNA_ID_2214509; Annot_ID_184195

SEQ ID NO: 25607 - DNA, 3000 bp, Unknown; identical to SEQ ID NO: 11664
  misc_feature (1)..( 3000): 2750-1469P.txt file - cDNA_ID_2707117; gDNA_ID_2214509; Annot_ID_133800

SEQ ID NO: 25608 - DNA, 3003 bp, Unknown
  misc_feature (1)..( 3003): 2750-1469P.txt file - cDNA_ID_2707121; gDNA_ID_2214509; Annot_ID_133797
cttacctgttacatggacacatctgttgatcaaaccttttaaactcaaacacacttcaacattaatttgagagactgagaaatttagtactttatttgcttggatcgttagaatatttgcaccgagttctctgattggcatcattgcagcttcttcacacaatgcttggagatcgcttcctgagtatcctgtaacatagggatagcttacgcttatcagttacttgacttatgaatctgtgtttttttatacaaagtctatagagcttgccttcggtttctttgacgattttatcaatgtcgccatcggataacgagtgaggctggcactttaatttagttttaaaaagtagttttctgacgttggaatccggcaatggtacatatattctcttcacctaacaaagtgataaaatcaaatcatataaccagatactttcctagcaattggtggacaagaaaaattctgatgacaataatgttcttaccaatctcctaagcactgcatcatccaactcctgtggcttgttagtagctcctgcaaaacattacatcaaagtaaatttttaggaaaggaaaacagactatatgtaaactgatactccgagatgttaaacagaatgaagattgagtttgatgtggactgatttagcagaaatcataccaatgataatcaccaaatcatcaggattagaagtcacaccatcaaactggataagaaattctgatttcagccttctgcttgcttcattctcactggttgaccttgttgacattatactatctatctgataaccagagcaaaaacatattcagatctccaagtgacaatatgttgatatgaaaaagatcctttttcagggatctttaggtcttcagtcaaatacaacttatatggtattatctagaactctggtaagagtagttcttcccatataagacagaaaaaggaaaaagtgtgcatacttcatccataaatataacagacggttgtctggatattgcaacttgaaacagcgttttaactagcttttcagcctcacccacctgaatcaatacagtaaagtcagtttgtctattcgaattgacaaataaattcaacaagccttgttagttattacaaaagacagtacagtgacagaataagcacacacccattttgatgtcaaagaagatgctgagacattgaaaaatgttgcctgtgactcagaagcgactgccttggcaagcattgttttcccattgccaggtggcccaaagagaagcagacctaacaaagaagttactttaccaaggacggcaatggagaagataaagaagaaaccaagcttgaaatgttacctctcgctggtcttcggagaccagtgaacaaatctcttcgttttgccggtaaaattaccatctccaacaaagcttgtttagctccattaagtccagctgcaataattaagcataagcttgtttccacatactgcgccgaaaaggaaaaacaagaagaagagcataacattgacactcaccgacatcatcccatttcacagatgggcttctatccactattgttgtatttatcatctcaaccaacttatcatcatagacatttccagattctttcacaggttttgggcttgcagcagcatctttagggttccttggcgttgcaacgccacctctggcaaccggagtcttttgcgataaagttttcctataccttgacgctgtagaggaaactgaagctgaagaaggatatgccaccgtcctctacataacaaagaatcaaaaaaagaattgaagtatacaattaatgccttaaaaatgaattatgttaagcaatcaataccaatacagaaacatatcactaataatctacaaacatcacattctccttccaacatttatgaacaaaaaagaagcaatacattaccttattctcagacattccaacacctaaaatatgaacaccattgatgacagaaacaagtaaaacaaacaaccattagtgtgaattcacttgtgcttcttcatattaatatgcaaaaaaggtcaaaaatttaaaactttatcacctgtacgcttacccaaagcttgcaatctctcagatacttgattttgccaatttgaaatcttctctcggtacgatctcaccttctccttttcactaccatatcattcaacaaatcatcatcactacaactttatttttcaacataacatatataagtcaaaacaaacttatcaaaacctggaactaatatacgaaggagaaggagtagaagtagcttcattcatgatcctttgagcatttctataatgaagaagagcatcatcatgtaaaccccactcttctgctctaacccctttagcgatttcctctttcgctaaatcgaagtatcctttaagcttatacgcaattcgttcgttagtaaccggaactccatcgataccattcatggactcagaagaagttgatgatgatgaaacactaggatctttcttagattcttcgttgagaatagagctaaacgaatcaattatacctctgaggaaactcatatctaagcaataaacaataaaatcgatcatcacttccgagtttaatcaaacaaaaaacaaaaaaacatcaagaaggcaaaattggtttcacgcaccatgttgtgctcgtatatataactcatgtcgagaagattcgaatcaaaatcgaaatcaaatccagcgaattgaagaaatttgatgaaatcttatgaactgggaaatacgcaaacgatgaacaaaccaaacaacacacggtcaagtctttaaccctctacgtagaaagaaggttctaatgggctttacaaggcctatacatatataatcttaggcccaatgatattttatcggtggcccagttttgttttgttttcgatcatcttcttcgccgttaaatattttattctctacggtaccttttgtctctttgtactttcagatactatcgttgacttcgaagtaagaaaagaaaatg

SEQ ID NO: 25609 - DNA, 3003 bp, Unknown; identical to SEQ ID NO: 25608
  misc_feature (1)..( 3003): 2750-1469P.txt file - cDNA_ID_2707121; gDNA_ID_2214509; Annot_ID_184190

SEQ ID NO: 25610 - DNA, 3000 bp, Unknown; identical to SEQ ID NO: 12074
  misc_feature (1)..( 3000): 2750-1469P.txt file - cDNA_ID_2707132; gDNA_ID_2214530; Annot_ID_134247

SEQ ID NO: 25611 - DNA, 3000 bp, Unknown; identical to SEQ ID NO: 13007
  misc_feature (1)..( 3000): 2750-1469P.txt file - cDNA_ID_2707172; gDNA_ID_2214589; Annot_ID_135387

SEQ ID NO: 25612 - DNA, 3003 bp, Unknown
  misc_feature (1)..( 3003): 2750-1469P.txt file - cDNA_ID_2707186; gDNA_ID_2214511; Annot_ID_133833
ccgcctcctagaccaccaccgccgcctaaacctccaccaccgcctaaacctccaccgcctcctaggccaccaccgcctcctagaccacctccgccgcctagaccgcctccaccgcccaaacccttaccgaaacctttcttgtaaatgccatgcttgtggaggaatggacgaggtttgtgtaaaaatggacgaggtttgtggaaaaagtgtttgtcgtcgttaacctcaacatttccgaacgaaaattcagcgactagagcgaatacaaagataaacacacacaccttcccggaaattaaacccataattaactggttcgttttatatggtgtatatgaaagagagatcgaagacagtagttgtgtcagtgaagcttagtcttgacctctatatatagacatatcgtccactcgtgagtacgttacatacataaccggttttgcttcttctttttctaggtttcttatcaattccggtttagtttagtttgttgatttgttcatatatactcaaattattctatttcagaggttgaaatgcttggttaaggcgtaaccgtgaggaaaagtgggaaaccggaattgattaaaccggacgtattaacttgtaagaaggcgaaaaaaataaattggttgagtaaactaaattaaatgaggttcacctgtcataggacaatttatttatgtctgccaactgcccagttgatctcatccaacataacaataaaaatgaaatcaatgtacatttgatgaattcaataaataaataatatcgatgtatatatatatgcacatgaaatgaaatgtatatcttatttccgattaagaaaatgagcaaacgattctagtgggcgccgatggtgaaaaaacctgaaattgatgaaaatatatactacaattggttcatgtactttgtcaaataataataattggttcatgttctaaaaaccagactgatcatattcgtagaatgcaatcatcagttcaccatatgtatatgattcctcataaatcaaccttccatggatttatagcaaaaagaacagtgtgtttctcttttagtgtattttcataaaagacgtaccataaatgaataaattgtgtcgttatcaaaaaaacaaaagtttataatcgtggctgttttatttttccttttatagttgaaggacatgtctactacaaagccattaataatatgagggctcttttgcattattcaagccctaaatgtgatctcatttagtgaaaaaaaagtgatctcatttattatgtcattaatggctcaaaccaaacacatattaaacctttcattttccaaactaacaaataaagaaaaacagataggcttatacattatacatgcatcacccacatagatttagattattaaaaatttgaggttgactggtttgagctgtgaatgtaatcttttatttaatttggactgtttgttgttagaataatggttgggacttaaattttaaagtcaactagtgatttgaaaaaaaaacgaggcttaacaagaatatttaactagttaatctagggctaacttgttagtaagaaatttaagaaatacgtttaatacttcataacactacaagtgtggattgttcatttcacatcataaagtactaaaacttcaaattaagtgccaaatgaatatcctatgcattttttttttgtaaaaaaattagattggttctattgagaatatgcatgcaatcttttggttacagacctctagttaaaggattttaattagttcttattttctatttagaatttgaattagtttcataaaacatatgcagtgatcagtttataaggtcaaatctcaccctcaaaatacaaacatatttcacgagtttgcccaaaaagaaagaactagtatttgacgcaagttttcattttgaaccattcgtaagctataactagaagattaaatacggtagaataatgaatgtattatgggaaaaatgttaaaaaaatcgccaacttttaaaaatgggacaaaaaaatcgccaactcctgaaatgtcatttaaatcatatacttttggttgacttttccagaaagataataaagcaaagattcgtaatcaacaaaactttgctctgttatctttctaaagaactcaatcaaaagtatgtgattaaaacgacatttcaggagttggtgatttttcatcccatttttcaaagttggcaatttttttgacattttttccaatgtattattgagtgtagctacatgaagtatgaaccatttatcttgacatagcattgcgtactttgaaaataatttctttactaataaaaaaacctacacttttttttataataaattttttcactctgtttagaaaccatgaattggctgctctaacgattcaagagaaatttcggcctaccttcgagttgactttagattaaaagtcaatcacaggcccaaaagtaagcccataactaggtccaaatatcgaagcccatgaataaactttttcatcgaatcctaaagctaagcatcaaaccaaacatccgatgatctctccaaactcatcaatctgatctatctctctcttccagctgtttcatgatcgatttactcttaacttacagctgattacaattcactgtaatctctcaagaaccctagattcttttttttccttttcaattgtgatccgtcaggtatgtgaattcgattactttctatatcaattcaacgaattccaaaagtcatgttcgcgtataagcaatttaaccttgtcgatttctttatattttctctgtatgtgtagcagcaatgcttgatctttaaatttactgatatctgaagatcgaattagggttctgatctacttgatatttatttgtttgggcttttattcaggttagtgtctgtttattaaaacaatcgaattattctgagttcatatcatttctttggattgaagatttgaattccttttatagcagctcgatcttgggctgaagctatg

SEQ ID NO: 25613 - DNA, 3003 bp, Unknown
  misc_feature (1)..( 3003): 2750-1469P.txt file - cDNA_ID_2707190; gDNA_ID_2214511; Annot_ID_133834
gtcatggccctaaaacagctatagatcatttataggtaggtaacattttgtttgtttaaaaacagataatgtggatgcaaatttatttttgtcagtaggtatttatatggaacatggaaacactacaagttgagagcactccggaagaacatgctcatatcatcacagatgttcgcttcagaccgaattcaactcaactggcaacgtcatcattcgacaaaacaatcaaaatctgggatgcttctgatgtatactaatttaatttgtttctcttttatttgttgcaatttttcgtgttctgctgtgactaactactaccaatttgtgcagcctggttacttcctacgaacaatttctggtcatgctgcacctgttatgtccattgattttcatcctaagaaaaccgagcttttatgctcctgtgatagcaacaatgatattcgcttttgggacataaacgcctcttgcgttcgtgctgtaaaggcaagcccctgaccttttgtatggtttctctgggatgtgaactctgtttgctaatcgttgaattttccaagcacagggggctagcacgcaagtacgtttccagccaagaacaggacagtttttagctgcagcgtcagaaaatactgtgtcaatttttgatattgaaaataataacaaacgggtcaacatttttaaggtagagctgaagatgatatattgatatttttgaattccccgggtcaatccacataaaagactaaaagctttgttttttacttttaatactttgaatcttcaaagtccagtgcatttttcttgttagatgcattggggcatatgtttagatgtcgtaagtgttgatcgttactcatggctttatttacttttgatctggcagggacattcctcaaatgtacattctgtttgttggagcccaaacggagagttggtggcgtctgttagtgaagacgctgtaaaattatggtcactgagttcaggagattgcatccacgagcttagcaacagtggaaacaagttccactctgttgtttttcaccctagctatcccgatctcttggtcatcggtggctatcaggtataacctatatccccatttctcaaacaaataatgtgtcaaacaatatctagtcttatgttcaaatgtgtgatgaggtgaatgtgtctctcagttgttttaactttggtaaacgaatctgtgacaggctatagagctgtggaacacaatggagaacaaatgtatgacggtagcaggccacgagtgtgtgatctctgccttggctcagtcgccttcgacgggagtggttgcgtctgcaagtcatgacaaatccgtaaagatttggaagtagaaatatttctatgttcgtctgaaaagaaaaggaaaaaagaagaaatagcagagagctcaggactttttttgggtctaattttttttttttttttaatgttacattaataagttggttttttttttaaattgggtttgtttatgtcaaaagcaaagagacttgtgatatttccaatctttgtctaatgatcctacttctttacttcgttgttttgatctctagtgtttagagtgaaagagagatgtaagtaatttctctagaccaactacattgttgaataataatttcttataatcagccaaacgcttgtttttaaggtctctttacgaatatcttataatgacactgcatacattaagttggtttaagatgaatacaaaactctaagcatgcacattgaaagtactcgtacgttaaaacttaggattaaggatgagtttattatctgcttaggcttaaattgtctttgttctgggttacttattgaacttctaatataaccgcatctttcttgaatgactctgcctctctttcaaaattatttgtttcagcatcactgtaacatttattgtaaaaatagtttttttgggtttgaataaatttaactttcaactcaaaaaaaaagaaaaactcgatattatatatagaaaacggaaatgtgaaacataaggagaagtaaaaagcacggttacgtttgtgtttgtttacaatttacaaacacgtctaacttggaaaaactaaaataaatgtacttttttttttttggtctaaaataaatgtacttttttcttaaacatgaacttattttttgtaacagttgagtggttgaatgaatcattaatttaagttatctttagtttctcaatcgataatatatacctactcaaacctttatacaatactataagatataaaatactcctactccttcccaattctcaaaactgcttaaactttcataatcatctaactcttgtaatttatataatctagtcattagattcatcagtatattctcaatattacaaaggctaaatatcttatgctacattatccaagcaattcgcagaaaacaataaaaataaaattgtcaaacatcataagcctagtagagaagtagaagttgacattccaaattcgtccaatctctacctcaactagatttaaaactttttatcctaaggtaagtaaaatacacaaaagtagagcaaaatacgatccttgaattaattcaggttgtgtaaccgttcaatcttttctaacgctgtgacacatatttgaacccaactaactcaaatttttttattttaaatataatttataaatgtggaaaaaaataataaatttataaataaaaatatatgtcatcatttctatttataaatatcgaaattattacactcaagttctaaaatattttttttttttaaaaactaaagtgaaaaaatagcaaagtacattactcacagtagtgaagaagcagccacctgaaaaaaaaaataacacacacaaaaaaagagagagagagagagagagagagagagagagagagagaccccacaaagagcactaatcttcacaaccctaactccgatttttctcacacctcccaatctctctttctttctctctgatgaaaagctaacggaaaatg

SEQ ID NO: 25614 - DNA, 3003 bp, Unknown
  misc_feature (1)..( 3003): 2750-1469P.txt file - cDNA_ID_2707198; gDNA_ID_2214511; Annot_ID_133839
tgatgaaaccagttccaaagctttgggttgtcatctcaagtgcctttgtgttctgtcttttagttctgtttcaaatcaataaatcagatttgatcgaagcaaatctccaaatcactcatcaagttaacaacttcctcatctccttcgttgcttcttcaaataatcaaatcctaaatcacaccaaacatgcgaatgagagtgatggaatcagagcgaaacagcttgaggaagaagaaacggatacttgcgccggaagatacatctacatgtacaatcttccaagcacattcaacgacgacatcatcaaagaatgtcgtccactcatcaaatggttcgatatgtgtccattcatggtcaattccgggctcggtccacagattttggtctccgataaaaccacagctcgagtcttaaccgtgaaaaccggttcttggtactcaacgaaccaattcttgctttcggttatcttccgagagaggatgaaacactacgagtgtttgaccaacaactcttctctagcctcagcgatctatgtcccatactacgcaggatttgatgtgagccgtcacctctggggatacaacgtgacggttagagacgaattggcgataaagctggcacaatggctgagagagagacctgaatgggggaagatgtacggccgagatcacttctttgtgaccggacggattggttgggatttcaggaggtttcacgatgaagattcagattggggaagcaaactgatgctattacctgaattctcgaatctgacaatgttaggtatcgaaacgactgcttgggctaacgaatttgcgattccttatcctacttatttccatccaaagagcttaacagagatttggagatggcagaagaaagtgaagagtgtgaagaggaagtatttgttttcgtttgttggaggtccaagacctaaattggatggatctattaggggagagattataaagcagtgccttgcatctcacggtaaatgcaactttcttaactgctttgttaatgactgcgataatccggttaagataatgaaggtgtttgaaaattctgtcttctgtttacaaccttcgggagattcgtacactcggagatcgatattcgattcgattctggcgggttgtataccggttttcttcagcccaggttcgggttacaaccaatatatttggtattttccaaaggattataccaagtactcggtttacataccagagaatgaaatgagaaatggaacggttagtctcaagaatattttgggtatgatcgctaaggagaggattttgaggatgagaaaagaggttgtgaagattataccaaaaatcatatataataaaccagggtttggaccggagaagattgaagatgcgtttgacattgcagtggataggatgcttgagagggtagcaatggttaagaggatgatggaagaagggaaagatgttcaaagtcagtattattcacagacaaaggatttgaaaaaacttgagattatacatgaaaaaactgcttaagccttaagacattgttaatgaatgcacattcagtatttatagcatgttgaatcacatttcagatacattttggaattgtaagtaaatcaatcgattttgttttacaaggatgcataaattacaaatttctctctttctcgttccttaagatgtggagcaaccaaaaactatatgaatatgatctctcgaaagaaacttaatttcgaatactatataataaatggattttgatgtatgaatgagaatgttttgaaactatgacaagagaatttgacttttcgttagcaagaatttggatggctaaattagatatggaagttaacatacacataaaaagttagctgaatgttaaactgtagtctattcgaaatatgaagtttaaagtagaatgtgaatggtaaatgttaaagttaaattaagatacataataattggttcaaacttgagataaccaggacgaaataattggtttggtacaaagtacaaaacaactttggttaaaggaatcatactttccacgaggaatcgccagttcgccaccagttggccggatcgaacggtgcctactgcttaacccggtctttagataatacccacctgttaagtcattcgggtcatctctgacccggaagtttctaatctctctctctttcctaaagtaacaaactttaaattttctgcaaaatcgaacaacgaatcatcagcccgagaagcttcttcaatcctgtaaatttttcattctacgtaccaatctctcatttcccagattcgtttcttgcttccattgctcttcctttgtaccaatcatcatctccaggtgatcggtttattaaaaattagggtttttgattgttctaatccgatctctcggttcctttaagattgatgatgaatttcgaagcgtgatatgaaaagatctgaagacttgatgtcagaacttgcgttgcgtgggttccgagataattgttgatggaaagagtatcagagcgaagtttgtcagaaaatttgagaagaagcgatcgagaagatgggaagattatagaatgggaagaattcgaccatgagcttacgaggttatggagtctttcttctgctatgaaattagccacagagaggaaacaaatcctgcaaccgaaacttgagtctcttattcaggtttttctcttactcatgtgttttcttttgggcatgtctgaatttgattcatttctgagtgtaaagcatagatttttattagtggcattgtcttaagggtggatgaagatagctagaagaagaaactctattcaaagaaaatttatgctttcttattgtgttggttaggaatgtgttgtttagtcttattattcttgcttatctcttactttatctactcgatgagctttaattgattagcccgcggattagcgggcggcaaaatttcgggcaggttagtactgaatcattgagacgcactaatgaacttgaagaaatg

SEQ ID NO: 25615 - DNA, 330 bp, Unknown; identical to SEQ ID NO: 11695
  misc_feature (1)..( 330): 2750-1469P.txt file - cDNA_ID_2707214; gDNA_ID_2214511; Annot_ID_133844

SEQ ID NO: 25616 - DNA, 3003 bp, Unknown
  misc_feature (1)..( 3003): 2750-1469P.txt file - cDNA_ID_2707226; gDNA_ID_2214512; Annot_ID_133876
atacaaatatttgagcacaagacttaaaaagccttccaaaactattatacaaactcaagaagaacaactgcttcaagttctgtgaaaatcactatttcaataatcgtctcctttggaaataatctctttgcaagttggtcgcaacaggattgtatgctcaaactgagaaatatagcttcctttgacatcacacactggaggacatggctacaaaagttaacccaaagaaacttactttcatcaaaatgttcttgaacataagtcatcagagtatatatatagttttaaggagtttacctcaattatgccagaatcacaaagattctttaaagccatcaagtattttgtttcaccaaggcggtccaaataacgtctgcagaaggctagcgtggagaagttcttgttaatagtggcaaggagttgttttgcccttggtaacctcaaaggtacatgacccacatcatagtttttcatgtaatggctacattctaagtcttctcttacatatcctttccctgcaaaatgacacaagtgaaaaaccaattttactctgaattcgtaaaaatccacatttcttgtatagtttcatgtgagaaatgttgttgttacctgttgatccaaaagtttcaatggcatataattcaccctcttccattttcgtctgctcgcctcctctaacattaggaactgatttttcagcgtgtatctgatagcgtccaatgctgtgcccattcaggtttctgatacttttgactgcccccaaaagacacaacattgttttagttttctaataatccaaatagaaaccaccaaaaaatgctgccacaaacgtaatcaattaccttggtagacttttccattgatttcaacctcataagactccatgacctcctgaactgcagcaccaacatcacagagccggacatctaccccggcttcctaaaccaacaaaattaataacacaatggacttattcagttggattgaacgataaagatccaaaaaagaagctcaatatggttataagaaaacaatgcaaacttcaaagaagaagtcactacagaatgaatggctgcattcaccatatccaagaacagaagaatcccacaagtagcaacagaaacagaatgagcaccttgataccagtatatgttgcgtcacgcgaggctgctaaaagaggatcaaacataggattgaacgcaactgtaaaagcagaatcaacaatgtgccctgccaaaacaacataataattgttcttatgagacatctacgttgagaaaatacaacaaacagatgataagtttttgtttttaccataccatcaatatgtgttccaaaatccagcttcatcacatcatcatactgaaggacagtcttatctccagagtttggtgtccaatgagcagcaacactgaaggttcaagtaaatttgagacgcattgatagagccaaagatcaaagaaatgcagaaagaatgaaaaaggttgaactaacttattcagtgaacatcctgtaggaaaggcgataccagcttgaagaccattctctgatatcaacttacgaacagtgttctctaaagtctcacagagatcaatcatcaacattccaggcttcaatatacttctcatatacttcctaacttgacgatgaacttccgctgcttggcgaagagagttatatatcggcttttgcagcctctccatctctctcttctcttcagatgttgttctccacaaattactacatcacaacatagacttagctagcaaaacaaaatgtccttatagaaaatctagtctagacttactcatcattgtactgttggatttcaccttgaggaaaatctccagaagggaagagctcaagaacaggaattgaaggaggatcagtctgttgaagagaactcttcttcttcctaaaaacaatcatcagatttttgagcaagatcatcaaagcaaacactgaagattaacagaaaaaagaaacaacttctcacttgcttttacttttcttcttcttcttcttcgttgaagcctcagctaaaatgaaaagactaaaagtctcaacaacaataaagctagagaaactctaaaccaacttcacatacactagttcctagaaagttacaatctctgatgacataaccagattgattaatctaaactagtaataaacaagaacacacgaaagagaccaaagttccatctttttcccgtcataattacatacttcaactacaagatctatcaaaaacacgaaatgatttacctttcagtccatcttcttcttcttggttattatccttttcgtcttccttcacttcagccagatcaagactcttcgttaagtcagaacttaactgagactcgtttccattagaggactcggcttcagtgttctccttccccatagttgctacttctgggtttcctatcgccatctcaaattattttaacaaggaggcttaatgagaagaagtgcagaagaaagttcatcagaagaagtcaaagtctcctcttttcacctctttttcactcccaacttttttcttcagtctatccaggaaaatgtcggaaggttaaaacaattgcaaaatgatccaacaaaactttcatttatacatttataacccattactttaaagaacacaaacgctccttattgggcccaatattaataggcccaccaacattaatcctgcttatcttttttttcaaaacattaatcttgcttatcttatctgattaatttaatttaatcgagaaagcaagacaaaaaaaaaacctatcgtttcacggacaagaagagaaccgttgcgctttgtgaagcatttactcaacggctagtttccttcttcttccccttttctcttcctcttcgcctagggtttcgaaaatttcaatccgatttgaataatttctgttttcttatcggaacaaaaaaatctccggcatctggaatctccggtgattttgtcaatttcgaagaaatttgattgaaatg

SEQ ID NO: 25617 - DNA, 3003 bp, Unknown; identical to SEQ ID NO: 25616
  misc_feature (1)..( 3003): 2750-1469P.txt file - cDNA_ID_2707226; gDNA_ID_2214512; Annot_ID_184308

SEQ ID NO: 25618 - DNA, 3000 bp, Unknown; identical to SEQ ID NO: 11701
  misc_feature (1)..( 3000): 2750-1469P.txt file - cDNA_ID_2707257; gDNA_ID_2214512; Annot_ID_133847

SEQ ID NO: 25619 - DNA, 3000 bp, Unknown; identical to SEQ ID NO: 11701
  misc_feature (1)..( 3000): 2750-1469P.txt file - cDNA_ID_2707257; gDNA_ID_2214512; Annot_ID_184272

SEQ ID NO: 25620 - DNA, 3003 bp, Unknown
  misc_feature (1)..( 3003): 2750-1469P.txt file - cDNA_ID_2707261; gDNA_ID_2214512; Annot_ID_133873
atgcctctgtttttatttcacttttcttgatctatctatttcagcatttcattgatataagaccataattatctgcttgtttaagtacattgaactggaaaaaaccttatcttttgtgttaggatgctattctcaagctgttcctcaagttgcaagtgtgggagtgagtgtaacaataagccgttccaacaacgacatgtcaagaagatgaagttaattcaggtaatgtgtgattggttttggttggatagagtggatttttgttgttgtcggtttgttattttagttgtgtcttgtagacagaaaaatgcggatcagggattgtggcagaagaagaaatcgaagctggagagtttatcattgaatatgttggagaaggtgatgtgactatttgatattttgtctccctactgaatatactgcgaccatggtctaatttgttttcttttttcgtacctttgctcaatgtagttattgatgataagacttgtgaagagaggctttggaagatgaaacaccgtggcgagacaaacttttatttatgtgagataaccagagatatggttattgatgctactcataagggaaacaaatcaagatatattaatcatagctgcaaccctaatacgcagatgcagaaatggtttgttgttaactgtcaacccttagtgcttgtttcctagtttagaatacttgagagagaaaagtcatcatttggtttacttttgcttgcaattaggataattgacggcgagaccagaatcggcattttcgccacccgtggtatcaaaaagggagagcatttgacctatgattatcagtaagtttatatcctccttctccagtttactttgtaacatatctgtttttatgttgagttgtgacactaagaaatagagcaggtttgttcagtttggtgcagatcaagactgccattgtggggctgtaggttgcagaaggaagcttggtgtaaaacctagcaaacctaagatagcctcggatgaagcttttaatctagtggcacatgaattggcccagacactgcccaaggtattttcaaattttatctgaaaagaagaatcaaatatatatctcgtctttgccctggcatagtttcacagtcactgaaaaatttgtgtgatgaggtctaagtgactctttttctttccccacttttggttaggtgcatcaaaatggacttgtaaatagacacatagatgcaggtaagtttggattttttctgctcaatttgcgagagtagcttattgtgttttggttgtaagaaagtaatttggattcccatgtttctccaggaaaatcatggaacaatcttagtcaaagggatacatgttcgcgtaattgcattggtgtggtgatcaggttatctcgccccacgagtgataggtatttattgagttttgaactcgtggattagttttatgactcattctatgcttttctcatccaatgttttatcttttgagattttcaggtgttttggcctcgttagacattttgatgagtattcaagaaagcactcggtattacaattagccaatacttgttcctcaccatcgaacttggcaaaatcattctcaattaagacctctctgttaacatctttaaacttggtccaggtgatgttcgaggatggtgttaccgagtttgtcgacatgtcgagagaagactgggagattgtctaatattgttttcaggtgatttatactcttcactctcttaatgaaacattaaaactcccagaagcatagagtattaaattaccctggctgctatgtttctgcagattgctttgaagttgagaaaccaaaataacctgtcttggtaaactaaaggtatcccaaaaaacccgggtctgactgactgggattggtgcagtgacattgtttgttgcgtctaacttgtgacctgtgtttgtacaaccattataagagatatcatatatctacttgtgtaaccacatctgtactttcttctccttccttcttttttcatggggatctcaaatgatgatgtcttgcaagaaccttcgtggtgtgtaattgactttgtaagaaccggtaatctcatatccggtttagcttttaaaaatttgtatccaaagaccggtttgttcttgtttgcatgtgctgttcttattcgtgcatctgtgtgagtgtgactgtgtcggtgtcgccgacaaaagccggtgtttgcaaaatctgaccagttttgttttagcgattaacgtttcaaattccttcaaatgcaaaatgagttaaacaagtgaaaaattactaaaacaacataacagttttaaattggaaaaagttttgtaaagtttaaagatacactgtaagtgaaaaacggaaaattttaattagattttttttttttttttttttttttggtaaaagtagattatttttgttaaacaaaagtgatggatcattggttttttggtagtaggtgggtgatgtgggtgtgtggttctggttcaccaactcaaaaagcatagactgcaggggttggggattgataacgacaaatctaattgtggttggtaaatcttttactaatcacattcctttaaaataattatgtaactcatcttgtttactaatatcaactcgactatcttaatatcaaataactcggattcttcatttttttcactttagaatggtttggtaaatctcttgaataataaacactttaataaaaatgtttttttttgtcaagcataaaaatgtaactcatgttgtctaactacatggattttcgcacaaaacaatgattaaatgtaaattatgtaattatactttatttaaagtatgattttgtcttaaaaatgaaaataatataaggaagtggacgggtaaggtaaagtctaaaattcaccaaacattttggaatctctctgtttactataaagcagtgagtagaagaacctgaaagaactcgcctttgtctctcattcttcttctccatttcgaaaagaagatg

SEQ ID NO: 25621 - DNA, 3003 bp, Unknown
  misc_feature (1)..( 3003): 2750-1469P.txt file - cDNA_ID_2707265; gDNA_ID_2214512; Annot_ID_133867
cttccacgagctgtcctcttagcttttgtgagagcagccggccacccgcatccacacactctctgtacagtggcatgtaggcgattgccactctcaatggtgctgggagatcctttagacttattgcagactctccgagtttcaaaactctcatgaaattcatgtaattttcccggctttccttcaatccttggttgaatgcagcttctgaccactgttcttggagaaacgatttgaggtcggaaggaacagactcgtcttctgactttgcaatggtgtctgcaactgaatatgtggctgctggatccccgaggaaatctgatttaaggagaaactctactccgtggagggaaccaccacttctttcaccggctgctttgaggatttcaatgctgagagcagtaaggacgggtcttggaacatgaggaaggagataagcagcaacctcaacctggctgcttgaagtggcggctgtgagagctaagcatagctccatttcacgacagcctcgtttcacaaaccattgaacaacttgcatgcaacctctctccgctgctctcatcaagggacccaagaaagcaattgcatgaccttcttctacaaggcaatccatcgtttcgattttactataatgcgaggcaaaaccaagggctaagtcaacatccacgtctaagctattcctttgagcaatctgcaccaggaaaaagttcagttagattgcacaaagtaacttgcaagcagtcattaagaattagatttacctgcaacaagatgcgcacaagttctgtgctcccaaaacgagaagcttcaaggaagcactgatttacattatctgcgcctccttccaccagcataccgagcaatccatgtatgacagtagctgaaattccagaagcccagccaggattaaacgaggtagagaacagcgtaagcgggaagcaagctgcatcaaaggcttctgtgaaatcctttcctgatagatggtttcctgcaagatctaagaacatcttgaaagcagaaagctggagttggatctcagcagctgagtcttggttagctttatctctagggccctggcatcgggagtgaaaacctatacatttgagtgcccattcagtaaacttttgaactttagcaccagcttctgctttgaggacctcatcaccgttacactcttggagacgctcgtgcaacctggaaacgccgagatgggaaaaaatggatttatatagaaagggtatctcacccttcccagctaaccaaagataaaccaggaggaataagaacataagagatactatagatttaacaaaaagcgatttctaagaaaagttaacaacactaaaacacttgcagatgtaaccaaccaatgtaacatgtaagacacaatgtagtgatcatataaagcaaaaacaaggtatcataacagaaaccaacttctccaataatccaaaagtgttttaccataattatactgagaaaaaggggaaacatcttataagagaaagtatcaaatgtgtacctttgagccataacagttacagtatcagcaagactcacagtccggctatggcaagatgaaacacaagaagcaagaaaggaagtcctaagtgtagctctagtatagtcctgagcaccatgacatatgatcttagcaatcaattcagtgattccccgtaactcatgctctgtgctcaagaaccaaatagaatctaaactaatacacaacagatcattcaaagtttgtggatcagccagctgaataaatctctctgaaagttgccaatcctgtgagctaacagcaccttggaaaagccgtcccaattcgattctatcctgtctattaagcttcttctgttgctcaagacccctgcatttcagtatctttgcagtagatccagagcatttggtcggttgagtgatgatacctacaagaggtgactctcttgcaaaaacaacatcactctcttgaggttccaagtcagaacctacaggctcatcaggatacatgtcatcgttctccatccactcagatttccaaaatcaataatccaaaaacttgttttgacattcgaaaaacctttgcaataacaatactgtataccaacaaatcccttcctccttgtacaagcaaatgtcttgtaccaaaatcaaaatccagacttgcgcaatcaaccactccaagaaatcaaacccaggaagaaaagaaaaaagagactagagatttcgttcagaaaatgcggtagaatcgattcacgagagcgaaaagggtctgaattttagcaaaacgtagtcaacagaagcatccaaaccttaaaataaaataaaaacagaaactgatcccaatcagaatccatggccgagcacagcaattgtgaattcggccatgaaaattgcatcggaaagaagaagaaagatgtgaatttgcaaattaccaaagaagaacattcgtagaggagatgggaagatgagcgaacctggacgagattttcattgagaggtcaagagaacaatgagagaatttttttttatttttttattgtaaaaataataattgacaaaattaattaaataaatttgctttgcactcacagaacagaacagaagatgacattttctctattttcatatttgtctttttggtttaatcgactggttatttatttattaccctaaaaaaaaacggaattgttttagaaaatgctaattgaattattagattgcttcagacagcaaaaacattattgtaaatctatttattacacacacaaaattacttttaagttttacttggtaataatatttagatttatccaaatttcaatagccaaataagaaaaaaaaaagagaaaaagcatataagaaagaaagcatctttggacttgtctgattttctctatagacgcaatcaccgccgattctctctctctctctctcgagtctctcgacggtcgcatatcaaaagtccatttctttcttctctttggaggatcagcaactatg

SEQ ID NO: 25622 - DNA, 3003 bp, Unknown; identical to SEQ ID NO: 25621
  misc_feature (1)..( 3003): 2750-1469P.txt file - cDNA_ID_2707265; gDNA_ID_2214512; Annot_ID_184296

SEQ ID NO: 25623 - DNA, 3003 bp, Unknown
  misc_feature (1)..( 3003): 2750-1469P.txt file - cDNA_ID_2707269; gDNA_ID_2214512; Annot_ID_133863
ttaaagagtttaaagctcatctccgtcaatcaaaacgtgaaattcgtaggtttcgaaacgtacccattcgtagccataaaggaatttactctccaggatacggaagttttgttctttgttacgacggagtcaaaagtttaaatctttcacttttgtctgaaaatttccggccggtgagagtgattggggatgtagggtttagcttatcccttttcatcaaaccggaaatctctaaccaaactaatagattcaatgaaaccgtaattttaatgaaaataataaaccggaagccttgaaccgatttgataagctaatggacctcacagtctcactcttaacctgaagaacgaagaaccgtctctaaaactccgacgaacgaaaaatgaagtcattagcttcgccgccgtgtctccgcctgataccgacggcacaccgtcagctcaattcgcgtcaatcttcctccgcctgttatatacacggtggctcttctgtgaacaaatccaataatctctcattctcctcatccacatccggtaagcttgctttctctcacttctcttataataactcaaatcgttttttcgcaatttcgtgattgagatgttaacatttggtgttaggatttgcgtcaccactagctgtagagaaggaattacgctcttcattcgtacagacggctgctgttcgccatgttacggggtctcttatcagaggcgaaggtcttagattcgccatcgtgagttctcagaatcgctttcttactttgtgcgctgcttagatttagtgacttggttctgatttacagtgaaatttgaaaactttgagctcaattgcagtgttgacttggttctgattcatttttctttctcaaggtggtagctcgtttcaatgaggttgtgactaagttgcttttggaaggagcgattgagactttcaagaagtattcagtcagagaagaagacattgaagtaaaagtcttttgcttgtagaacagaataaaaagttatgagctttcacaaagctaatgacactgtttttattcaggttatttgggttcctggcagctttgaaattggtgttgttgcacaaaatcttgggaaatcgggaaaatttcatgctgttttatgtatcggcgctgtggtatgattcttgttttgaaagaatctcaggctattccatttgtttttctcctcatatggcttcagaaagtagttgctttatgttgataacatatacttaaagagttggattttgatattactgttgtccttgttgtggtttagataagaggagataccacacattatgatgctgttgccaactctgctgcgtctggagtactttctgctagcataaattcaggtttacctcgatacttatttgctggatatacatctttagacatttttatttgacattgttttggaaacactgaaagattgattttgtatacttccgaacctaaaagagcgggtagttcatttttgcttttctttggattttggatgtttaaattccctcatcatgaattacttcttcaaattttgtgtttacgcactattgactctagtaattaaagcttataaaaaatccaatttgcaggcgttccatgcatatttggtgtactgacttgcgaggacatggatcaggtttaagttgtgttatgcaagagttgatgatatatagcttattcatcataatggatgaacactgaatttgttaatattgtggttaactgaaactctaggctctgaatcgatctggtggcaaagccggcaataagggagctgaaactgctttgacggcggtaagtatcattatgattcaatcctttattgttagaataagatgtagaaattcctgatcattccattgagcaactggtcatgttataaccattcgggttcttatgtctttttggtaaagtctttgaatatttcttcctcttgtttttcagctcgaaatggcgtcgttgtttgagcaccacctgaaatagctcggctcgttcgatggatgaacatgatcacgtatgagaacctcttgatgttgtcccatttggttacaatccagtctctgaaattgtttgtacctcaaagattgtcaaaatgttttacccttggttacaaaatcatttaaacgcttttgtaagcttctggccttgttttttttttttgaatcgtatgataataataattcctccgaattttgggggtctttctgtactaatcaaaaatgtgatcttctttgttgtaatatcttgaaattgaggtgtcgaaatggatgtcaattttaaaagccaataaggatcttacacgacgaaaattttgtcggcgagcgaagattacgcgtcacattgataatagttaatataaagttcaacggatcaaccaattccacaatctataatcattttgtgactcttggagcactctcttctctttgtctctgtgactcacattcatccaatccaggtaaaaatcaaatccactaagttttatttctcttcattgttgttcttgcgttgatccttcatgatttgatcggaatacatggaaaaaggtggtgtaattagatcgagctttttgtttctccgatctgtttgacatttaggttgatctagtgctatcatgtgtagatcgaacattcggatctgtatttcccacgaatcctcttgattcacgtgatatgatcattgtctcttagtacagagatgcattgtatgttctttggtttgggatattccactaggatcctagttgatgatatctaatgtgatgcgagttctctatggtctttggtgagaaactttgttttggtgattatagcctcttacaactactaaaaactgtgattacactttgtttgacttttacaaccattgtcctgctgtgattgatgaatctactctcggcgttgaatgcttgaagttttgtctattctttgatactctaagcttttgtttctgtggcactaattgacttttcttgctgcttaggaggcatg

SEQ ID NO: 25624 - DNA, 3003 bp, Unknown; identical to SEQ ID NO: 25623
  misc_feature (1)..( 3003): 2750-1469P.txt file - cDNA_ID_2707269; gDNA_ID_2214512; Annot_ID_184291

SEQ ID NO: 25625 - DNA, 3003 bp, Unknown
  misc_feature (1)..( 3003): 2750-1469P.txt file - cDNA_ID_2707272; gDNA_ID_2214512; Annot_ID_133862
cttattgcagacattgatggagcttactttccctcatttgtttctcatggcctatggaacataaaaccgttctttggtgtctcatgagaagcccatttaaagcccaaataagctgtcactgttacacatttaaaagactccccggagttcttcttagttgcctgccctaaaatgcataccgccaagaacagtcgaagtgactcatttgttcaatgagaataacaataaaagccaaaaatcttaacaacaccagattgaataaactttgtcgattaagattatatacaagatgatttcaatctctgcggattgagtggtcaagttccttactatgattatgcacttgatctcattttagatgttgaatcatcaaatggtaagtgaagggtccatttgatgaatttaggttttactttgtctgagaattgttgtggagaagtttgatcaataagacttcacttcaatgatccagaaaggagaataacattgaggtaaagaggtcaaaacatgaacaatacaatggcaagttcttgtatataccaaggaatttcaaaagcctgtgctcaaggcagaagaagtgggaaaccaaacatctaattttcacagctgatgatttggtaaatctaatctcagctcttctacaaccaccatttggtcaatgcactggcaaaactcgaaagctcaacgcatatttccctctctcaagacatcgatcatgttgtagattcgctgatctgctttcaatcgaatctgcatttcacaaaagtgttgaatcaacaattagcattatagagaagagcggtgagactcagagaaagctgagattcaatttcgcagaatcatgatgagcaataagagcaagctttagaacctttttggcgaggaagagcacggcatcaacagtaccctcagcataaattgatcggccgcagacattgtgctggaactcgaaggagacactgcaaagaaagacaaagaaaagggagctagttatggaacagagacacttttacaatggaaacaaagaaaagtataaacaatatcttagatattgcattacgtttcatcgggtgatgtcaagtgataaagatggaaagcgtgaccagagatatgctcctcaggtacacccaccatctccacttgctgttttggatcccgaatcaattgtatctgccacaaaagttgtatacacagaaaattcacattccgaggataaattaagtgattgccaagatgtaaacaataaaggatgaccaatgcacctgatccatgtcgtaagacacacccaattcctggaagcaagaaataacagcttttgctgttccggatgcatccaatttgctagcttgatgagactccatcacctacatatagattggcagttgattagatgtagcaagaagtaatataaaactaacagagaaagaaaaaagaatttgaatgtataaaagaagtaagaaaagtacatccaaggaataaccagaaaaggctcccggaaactgctcagccatgatctccatggccgcaagaaatgctacaacctatagaccaacaaagcacacaaatatgagcaaaaatgatcttaacttacatgcataagtaatcatttcttccagaaacattcaagtacacatacctgtttacccatctgtggagaaatcacagcataaatctttgcttcctcaacagtttcatacaatttgttcctatctccaccagttgttcccatgacgaaaggaacacctactttgctatacagctccgcattatctacattttgcgagaataccaaacttgaaatcaacaaacaatagacaaaaaaaacacttctagcagatgattttcacttgcacaaattctaaactaactcaatcaaggatcgttccgccaaccagaattcaaccataacttcaacaaatctagaatacaattgtcttttgatggtagaaatgagagattctgaagtttaccatttactgcagagggaattgtgtagtcgacaacaattagctccgggtgcttctcaaacaccgaagaaagaaccttttctctttcagttggaccgtgcacagtaatctcctttccacagacctcaactctctgaccatcctcaccagcagatccaaacgatatgggaacaatatttactcctgcagagtctgctgctttaattacagctttccccattttgccactacatccattcacctgtagaataagagataatgaatatagctaaatccaacataaaaatccccatttcaaaaggaacaagctttgacatttctacatttcaaacttaaatggtaatgcaaagtcaaatctcacaactttgagtctaagagaaatcatcagatgatcaggtttaccatgatggatatgccatttccaggcaaaacagatttcacggcctcctcaccggaatccgccatcgccgtcatggataaaaccaccggaagacgacgtgtcccaatgcccatgaaactaacacggcctttaccgtattttcctacagtctgattcgttctagaagcaaatgcgatacgcgggcgatgaagaaacacactggacgacgccattaacctgtgatcaaatcgtttaaattcaatagaatcctcttaaagagtttaaagctcatctccgtcaatcaaaacgtgaaattcgtaggtttcgaaacgtacccattcgtagccataaaggaatttactctccaggatacggaagttttgttctttgttacgacggagtcaaaagtttaaatctttcacttttgtctgaaaatttccggccggtgagagtgattggggatgtagggtttagcttatcccttttcatcaaaccggaaatctctaaccaaactaatagattcaatgaaaccgtaattttaatgaaaataataaaccggaagccttgaaccgatttgataagctaatggacctcacagtctcactcttaacctgaagaacgaagaaccgtctctaaaactccgacgaacgaaaaatg

SEQ ID NO: 25626 - DNA, 3003 bp, Unknown; identical to SEQ ID NO: 25625
  misc_feature (1)..( 3003): 2750-1469P.txt file - cDNA_ID_2707272; gDNA_ID_2214512; Annot_ID_184290

SEQ ID NO: 25627 - DNA, 3000 bp, Unknown
  misc_feature (1)..( 3000): 2750-1469P.txt file - cDNA_ID_2707274; gDNA_ID_2214512; Annot_ID_133849
gcaaaacaccaactcttctttctacctgaaaatccaactatcaagataagattgcacatagtttcaataagagcagtgaaatgattttggtgtgcagcttaaatatgttccctaagttcactaggccaaatgggtgacaataaagtttcacaaacaacaactcatacgagaagctcatctgtacaagaaaacagaaacatgaatgggataatggcagtcatggttttaaaaacataaaacttgcaatcatatattgtaataacctcatggatagaactggaagggtgagacatttttgacgactttgggggtctaaaatgctgaacaaccgatgtttttaatccactacatacttgaaggtaggagaagagttgaagatgacattggagcagaagcactatatggggttcagatgtaacatttccatgtccaagtgcgtttctgcagagagcttcaagtcatcaaaaatcaccaaccaccactaaatgtgaactttatagttatctaaaattatcactaccatcagatatcatctagaatcaatcgtaactaaaaaaaaaaaacaactttcaaaaactagataataacatataggagctagcaacatgtatactatttcactttttttagagtttctaagccaatcagaaggctctatttcacacccactcgcacaaagtgagcgttgagcacgtgagagcaattctgtgggtgtacccctttccaaaacacgcttttttcaatcgacgcatctgtctccaaaatccccatcgcgtgaatattttgtttgttacttcttctctatgtaaaccgaaccgcaaatcaattctaatttatttcaataccatttaaacctaaccgaaatcaattgaaattagtaatgactaaccgaagaatttaaggaaattccgacaacagaagaagggagtatacgggagagctcgcgaatcaccgccggagcgatggagtaaaattggtacgattttgaaaaagagaagcgtggtggaagaatttcggattaggattttgatagtgtgtaaacgacggtggtgatccatgagctccgacgacggcgaacctcactgagtttgtgtgtgattcgaaaacgtaacgtttcatgtttagcatagtttaattagatatagtgcccatttaatcaggcccattaatattattcggcccattggtttccttttacataacatatgggcaaaccgtatgcaagagcttttataacattaatgtttcctgtaagaagcatctctctcattacaacacatatatcgtgattctgaaatgtttctttattgattatgttatgcagttagctgatcgcgttggtgggtctccttaccaagaatcagtctcagcgtttaaattttcatcttctccttggaccctaacctttttcataactctaacaactctcttaattaatatctcactttggttaaaatgttttgtagctatgaagagcttttgattcccttgggatttgaggtaatctctattgtggataacgaacttgctcctgatacacgcaaagtaaacaagaaacagtctctagtttctttgtgaacaagaaagattttaaaagaaaaagtttaatatttgaaatcaatatttagggaatggaaaaagttggcagatggaagaagaagaattcattgtaatgatcctcaataccatcacaatcacactataccatggctctctatatacatcaataaagattacagttttggatctcctatagtaagaaccgagtgtactatttacacgtctagatgaataaatgggtccaatgtttcagttttttaataattatatgtgtagttgcatataccttataaacaaacatttatgggtgactttgttgtgaaattacaagtccctttctctttatggtatatgccaaattttcatccataatataccttactgaatttggcatataccttaaggagaaagaggtgtgtaagacaacgcagtcacacttcaaatatatttttgtcgttatccgttttataaaccaatgtcggcagtttcacttttaattttaaatcgagagagattggaagttatgccatactctgttttggagataagaatgttcaccactagcaaatggaaatagtgttgtaattgaccgctaaatgctcactttggtatcaaacttagtgatgttttagccaaaaacatcttgtgaacattttagcaaatcaaattagtgtgtaaaaatcgtggatagatattgtgacagaaaaatatagatattggatatattccttacaccattccccaatatattttcatactaaaaatggagttctctaatgataagagcaggtggaggttttcaccaaccctttactttatttcggaagatcatcttttccataaacttccgattccgacaaactcatacactgatcggtgttaagaaaccgttaatttttgctgacatggatgcgaagtagataaaaagaaaaaaaaacgatgtttctttgttcaaatcacagaattagaaacaaaatcaaaagtctaaatagtcgtcgttaacgttagtataaatggcatagacagaaattccttcagaattcaaaggctgctatcagtaggtgaacagttgacaaaaagttgaaagaaaatataataggcccaagaaagcccactggtcatatttctttgaatttgtttagcttaccctaatgcgttgtccaacttatcctgtcgttaaatttgtgatagacgttgccgttttatattaaagaatgactttcttttttggtgcaaaatattaaagaatatgactatgcaaatatctctctatacaaaagtatgtatatagttgggtgaaagagcacaataataatcaatacaaaattaattttattcagtcattgtttaatatgtttttgttaaattcattaattaatctgttaatctctctataaatagatatcttgtgcttgaagcttcccacaactactcaaaatg

SEQ ID NO: 25628 - DNA, 3000 bp, Unknown; identical to SEQ ID NO: 25627
  misc_feature (1)..( 3000): 2750-1469P.txt file - cDNA_ID_2707274; gDNA_ID_2214512; Annot_ID_184275

SEQ ID NO: 25629 - DNA, 3000 bp, Unknown
  misc_feature (1)..( 3000): 2750-1469P.txt file - cDNA_ID_2707292; gDNA_ID_2214513; Annot_ID_133897
ctcccagagttgaaaattcaaattctctctctctagctatggcgctttcttcagctttcaaggagaggctcgatcaaatggagttcaccagaaaccaacgactcaatcttctccaggtatcgatcaatttagaatcctagcttctcttcgttccactgcatcatcgagtttcaatgtcgctagtatgtaaatgtgagaatcgctatatccatgtgctaatcgagatctctggtttgatgaactattgctctaattcaattcgaaatcaagagaattatctaaaaacagatcattatcatattctgcatcaatttatcgatcatcactataacagtatttttcaatttgaaatttctgaatccaaattgttgatcgttttctggttctgtttgattataatgtttgagtaggcggagaaagaactacaagtgaacaaagcacagattttagcatcgaagcacgcaactatacaatccattgaacgcagatgtttgatgctagaacagaaaatagcagcacaaaacctgaagatcacaattctcagatctaacatcgatgatctcgactccaaataccacagctatatacaacaattgaggttaaatcattcttgactcttggtttgatgatggttgtgatgtcataataatgtttttgattggtttctgttgaatggtattggagaataggacactgaagattgaggttgaggagctgaaagagttagatgaagagagggagaagtattacaaggtgaaatgttcagagatgaatgagtttatgcaaaatgttgagaggtttagatcagagaaccggttacaaatcgagaacctgcgaaaccgaatcaaggaggtaaaatcacagtcaagtgtgtggttttggattaagtagtgatttgtagcattgtatgctttagttatgtattatcaatctttgtgtttctcagcttaactcaacgttcgaggaaagtcatcagaagaacatttatctacagaacataaattaaggtatgattctgaattcctaatcatcatttgaagagagatgtaaaagtatattgagcacggttgtggcctgtgggaattacatagggaaggcttttatgagattactaaatgatattatctttataaaaaaagagattaaaatggatacagtattcaagacattttacatcactagccaattgcagcctttagatatattatgaaaaagaaattaactaaaataatagataaattacagaaagaaacaatgtaataatcattgtgagttgtgacaataaatatttgtaataaaaaaggatctcacaaaaaaaaaattgttaaaaaaggaaacacatatgtaagcaagatgccctatatattacggttttggaataaaatgttaaaaatagtttaatagatttgattcactaaatacacatgtacatatttgatggcatgatgatcaagaaagtaccgtaaaatgttaaacttccaatgttccttagtgaaaaaggtaaatatgtatttttcacaaatgttaaacttgtcatttgtgtgtttgacaggacgtgtatataagcataatctataccggagaagaagaagtcacgaaacaaagttaaaaagaagaaattttttggtgtagtgaattcgaagagcaatatgatgaatattggttacattttaaccatcgtgtttgttggtctcatcctcatctcggcttttgtggcgtgtttctattgcgccaaacgattactcaaatgttgtggcggagaggaagattcgcctgctactgctactgcgtctacgtctacctctacgtcttctgcgtctgcgtgatcaacttttagttatttgttttggtttgtttctttttctttcaatgattttagattagtaacctaaaggcatagcagatcgataatgagactcggcaaaatttttatctttataccgctgcttaataattaagttttcacttatttaatgatattgtacctctattcttgatctttcaatgattttgttaaacattaaaaatttgcaatgttattgttacatgttacttctatatatatagaaccaaaacgaaagcaatacaatactatgcaaatacatagtagagatagcaaaatcaacaaataaaaacatgtaagaagagacatgagctcatgaaaagaattcaagacagatgtaccaagcctgcctagagttcaagacatgtcatgatgacatgacaacaaatttgttagcttcttctttagatctagcgcaattgcagggtttgataggaacaaataactgattacttgttagattctggatctacataccaaataaaagaaataactcattggcaaactgtactttgaaaacatgttttccattttgtctccagcttacactcttctcacattagtctagtcaatgttaacttgtcattggagcactgtgggtgatcataaagagaaagaaaaagtgttcaaggtctgcaaagataaacatactttttttctagtttgtgtttggtgaacagcctttgtggtttttcctaaaggaatttcaaatgataaacagactacaatgcaagatgaagagtactggactcatgacaactaacaagttgtttgataaaaaaaaaaaaaacaagttgtttgattctctcgctaactgttcaagttggaggtcgagagcagaatcctattagcctccaacatttttgcaaaatattaatataattcagttgaaattgttaccttacaaacaattcaaaatttaggacaaaaatcgaaaacataggttagtaagtttgccaattatttgttttttgatgacgatggtaatatcaccaaaacgaaccaagcaaaccaataaaaaccgaaatttccaaattaataagttaatcggcggtttatctccaccgaacaagaaaaaaaactaaaaccctaattccagcgtcgtcttcgcgctctgagaaaaatcgcagagtagagactagaaggagaagaagatg

SEQ ID NO: 25630 - DNA, 3003 bp, Unknown
  misc_feature (1)..( 3003): 2750-1469P.txt file - cDNA_ID_2707298; gDNA_ID_2214513; Annot_ID_133902
ataaaaaatcaattgcatgcttgttatcttcttcaattaggttgcataaaatggtaaatagcctaaatgttagaccactatacacgatctttttttaatgaaagatacactctacacactaatctctaactttgaataacaaataaatttatggggaaaaaaaaagcgcgatgatgcaagaatagtcgagaaattagccaaattaagataatcataacacttgtacgatgaattctagaccagccgccaatgtgtgagctcatatgaatttcgctaatgccacgttatacaaaacttaaccaacaagctgatagtcaatccaaattttctatgattacaatatgatgtataaacatattttggcttcttatgatgatagaaaaaaattaattaaatgtctggcttagtaatgaattttatttgctgacgacccaaaaatttgacggatttgtcgagaactgcaacaattcatggaaaaatgactgtaataatagaggtttgaaagattaaaataaaaacccattcgagttttactttcactccggataaagaaacagataaactcacatcaatgatcaatccttttgattgaatcttcaaattttatttttatatatgtaaaatttgaatcattaggtgatgcaacaaaataaacttcacttttttatagatacgtggaagcaaatctatcatatatatgttgttttgattttactttgttgtgctgtcaaagcgtggtacattatttttcttatattgtacatatcaaaggtacctaatgtaatgtataaatataagaaaaataaaaatttacggattcctgttgttgtcacaaggttacgtgttgacgttatgcggtactaagcctctgtaccttgacctaaaataattttccgatttgcttatatcacccgatatcgacaataattttaattttgtaattatcttaatacaaacattaaatgtaatgtacattttccaggtaaacaaaaagaaaatcattgaataatacttgcagaagacgattggtatttccacgtaactcaacatgaaacgacaaataccgaatcgtggcaggatccgcaagtaagatatagtagttgaaacaagggtaaaatgggaaattcacacactcaataattcaaacttacgatcacaatataaatagctccaaccatgaccaatccaaagatcatacacacgagacctcaagtcctcaaggttcaatttttcaaatccaatgcccaacttatcaggagctatccctgaaaatgacagaaatgccctcgtacgttgtcgaaacccccctcttcgagccttacaagcccaagaaacaatacaaattgtactcttcgttgctcccgatcatcttatctatcttcacctacattttgatcttccacgttctcgacgtgtctcctttgtcgatcttcaacgacacgaagatcttgttcgtcatctccaacgcacttatcatcatcattgccgccgattacggtgcattcactgacaaagagaacctcgatttttacggagaatacacagccgcgatgagaagggatgcacaagaaaaccctagaccggaaaagtcggtctatggggtgagtatggcggaagaaaccaagaaccgtgagaaacaagaaggaccagtgggagcgagagacttacaagatcagtatttgcctaacaagaaagcgaaagttactgagagaatcatacaagccgtgagcaagaaccaaccgagaaacaaagccattgaaaagtgtgagccagtgactgagcaaaatgttcatataatagctgcaaaagaagaaacttgcaacgcaagcaatctgatgaactctaaagcctacgggcgaagcaaatcggataaggctcgtgggtcagtgatatccaaggaacgtcgtcgtcaagagatcaaacatagacataaaagttacgatcggagtcaatcggatagctcgaaatggatggttgttcacaaggggaagaaggctgacgaggagatggaggaggcgacgaagaagtgggagaatgtaaaagaagagtcggaggagttctcgaagatgtcgaacgaggagttgaacagacgagtcgaagatttcatccaacggttcaatcgagatatcaaacgacaaatttagtttaatgtaatttgttgttgtaccaatacggcaaatttagtcaacctttttgtgtcgtttccttccctttttttcttttgtcattcttgcatcttgtttattagagttggtaatgagatcatggagatattaatcgttagtttaatttcaagggttaaaataaataaaaatttaaaagtaaaaattgttgcgacttttttaaatcgatggaaactgattcaaaaacaaatttactttacagaatctctcggtatttcagacagatcacactagtacattagataaagcgttggatcgaatcctcgtatatgttcaaagaacagttaaaatgagttacatgagtctttgttgttgttgttgactaaatttgccgtataggtacacctcaatttcggcactcttctctcggatccttccatggtatgattctgttttttctcgtgacttgcgtgtttagatgctcaccattggagctcgctaactgcaattcctatatgttgattttgaaacttgtatcatccacttttgatttgattctagaatgttattagcttgagcaaagcaaaatcaattctgaggaagagactcatcagacgaacaactatctagagaagatcaaacattagaacactgatgacgaattgtaacctcaaatgagccaatcattgcacaagaggagtgccacgtgtttggatgtgtgttttggattatccaaactacaaaaaagggaaacactatctaatctcaccaatcacaaaagagaatagtgccacgtggaaaacaaccaccttaccttcacacttcttcttcttctccttcggcagaccatccaaaggccacatcatctctttccaccatg

SEQ ID NO: 25631 - DNA, 3003 bp, Unknown; identical to SEQ ID NO: 25630
  misc_feature (1)..( 3003): 2750-1469P.txt file - cDNA_ID_2707298; gDNA_ID_2214513; Annot_ID_184352

SEQ ID NO: 25632 - DNA, 3003 bp, Unknown
  misc_feature (1)..( 3003): 2750-1469P.txt file - cDNA_ID_2707314; gDNA_ID_2214514; Annot_ID_133920
agtacttaaacaaatatgctttaccaatatttagatcttggtgtcacaaaaagaacaaacaaacattatactctatgttagaatcgatcacactaacgatgttggattttacgaacgaccaataagaagtcaagttaatcaactatccatccaattcagtatagcactactttccattatattgttgtttattgataatgagaaatgttatatcgtgctagagctttacttctcattgtctcaagtcaactctcacacgatttaacacatccttgagttaaaaaaagtataaacaaattttggttcatttattagtctaattggcctcatcgctcaatgaagctatactatcgcaatccaaaatgtctcaatgaagatatcctactatcaatgaagctatactctctataaactataccgaaagttttttactagagatttcttaatgaaatctctatcccttcgattcatatatgtaggatatcatgtaaattataatacaaaaagaccgttgagctaaatattaatactcaatctgtatcattttaaatgatgtttacaagagagaaaaattgtttcatttaaataatgtaatacagtaaaaaccttaaacattccttgaaatgaagagagtatattattatgggctatattaatgtatatgcctgaaagacttgaaaattagatatttactataaatagtttaatattaggtaagaataaaagagaaaaaaattaaaactataaatatcttttctatttatttaatttaccaaatttgccattgtctcacaacattatttattaccggatactttaggcatgatactgttcatcatatacctgacaactctattcatccaaaatttacaacactattcatcattggattgcataaaatatttatggtttatgtagataactatttgattaacatgttaactagtatgatatcgtgctagatacagataaatgtttgattaacatgttaactagtatagtatcacgataaatttatatataacgtattaaaccatttaccatattatacaaattaatatgaaagaatcaaattcggttgacaaaaaaaaaaaaaaaaatcaaattcaaattagaataacatattatactgaatataacgtgctaacatattaaatatttgaataatatttttatataaatgtggtaaaatatttgatatatagtgaaattataacaatagtttatacacgacatatttggtaaattaaacaaagtaaaaaagacagttatgactttaattttttttctcttacatacttacccaatattgaattatcaatggtaaaatctagttttcacattttctgggcatatccattaatactagatgagtacccacgctacgcgtggatttattttgaaaattgttaaaaaaaatatttacattgattgttatttttgctaatttttgtttattctttgtttattcttgtattgttaataaaattagatccataatatgtacttataatttttatggttagattcatttgtgactaatttatttataaagctgattatttataaaattttaatattttcacttcatgaatacatataacaacaatatctgatattctgatagaattatgtataattatgttacttgtgtggtttaaaatttgcttaactcgattataaataaatcaattccttgttttatgtacttcaacgatattgtgataggttcatgattaaagtttggattgacatcaactgaataagatctgaaaaatattcatatgtaaaaataagaagatggcaaaaattgaatatcatttaagtcaacaattttagattttctatcattgcatatatcaatattagaaaaatgatcatgtcttggatgatttgaaaattgtctaacttgattacaaataaactatttctggtcttatatattctcttgatataataatcaacaacattgttataagctcatgattaaatatataaaattgatataaactaaacaagatttcaagcgtattcatatgaaaaaataaaaagaaagcaaaaattaaaatatcatttaagtcaatacttttagatcttctctcattgcatatatccatataagagaaataatcatgtattaaattatttggtaggtctaatgtttcaaaggtttattatttgaaaaaatttgaatgttaatgttatcaaagactcaaaataaaattactaaactaataagaggttaggtagcaaacatcttcaatgcaaaacattttagtcattaaaatagtgattattgataataaaaaattagtaaaataaaaataatataatgtaagtagtgcttaatttattaacataatttttattttttatttttattttgaagaaatcaattaaaattagtattgatgatacatttaatttacttattaaattttattaaattttaatttaaaaaatataaaatgacacatgtcatttcttgtgtaatgacgtgtcattcatatggagagagttggtcaacttttatatatatgatttttctattatatattacattaaatactttttgaaacagagtcaaaactattacagtaaatattataaactaacgttagttggatttaattatttttaatttcagcttagctgtattttttgtcaaccaacgtcaacgtggtaacgtagctgtaatatataacaaaaatgacttctacattaatataacttaattcgtaataataatgtgaaaattagctagcatttagcgcccatagtttatttgctactatatgagtcattaaacaattacgactagatcatatcattctaaaataatatcaaacaaattgcaaactggagttgtttaatccttgggaagctaaaagtgaaatcttaacgaggacaacacctttcagtctttatatatacacatatgtaggggcaagaaggataacaacatcccaaaaccctaaaaaatactctaatcgagcaaccatg

SEQ ID NO: 25633 - DNA, 3003 bp, Unknown
  misc_feature (1)..( 3003): 2750-1469P.txt file - cDNA_ID_2707326; gDNA_ID_2214514; Annot_ID_133907
taataataagggaccgtaataataataaaatactaataatagcaacaaatagtcatgtgatgttatacattttcgtcggcgtatccaacggaccaaacattaaaacagctaacacatacgattttattttacagtaaagacatttgtcaggacaaagattcggcctttcattgctcataaaacactggtgagatacataattatcgaattttatcaatccatgtcgtacttatggacatttgtatgtacaagaattgaagtatatagccaactagttttgttggaattgaatgtgctaattaacatgagaaactaagtttagtgatctctagagctcttgaatcatgaacaaaataaaatgatcataaaagtgttgttaaagttataacaagctaatttttcaactttcaagatatgtttttgatttagtttctttttctatttgctgcaaattgttgttgttgttctttttttttttcttgcaaattgtttttacatatatttactaagtaggagaataagatttagggtttatgagaaaccctctcatctttgcataagttattcggtgtctgttaacaacaagagagaattttatcgatgatggtattatagtattgatcacattaatggaaaaagctatataacactatatactgatgttttaaggcttaaaaatatggccaaattattattattatatatatatatatatatatttattattttttttgaacggaaaaaagccagaactgtagtcatatacatatatctgaatatagcgtttaaaaaataattgtgttatcattgtatgacactcaaaattttcattttttgccaattttctttttagggtacattgataacataagatcaataaaaatatattatggcatcagttaggtaacatacagtatataaacaaaagccacatgttgaaaatacgtaaataagtatgcaacaacactatatcgtgataagaactaatattcaacaacactactttattatcgtagcaaagtatgataatcataaacatttattttcacacagtaactatttttttaaagataacatcataaaagtcaacattatattaaatatagttataacataatgtatattcttttttatttattgtactgtaaatttattcaacaaccaaaaaacttccttttatgaatatgaaaagaatttgagaagctttgaaatggtaatctttatattctacaataaatctttatattctactataaaaaaatattttcactgatgatcagatgatgcatcaaacttttttttttttttttccttttgcagaactcaatatactgatatttcaaatctgaaaaatacgaccaatttttttttattttttttaaacgaaaaagtgagaattgtagaattgtagtgatatagtgaagatcggattttaaaataattatatcattatacgatatttagacaaatcacttttttttttgcaaatgttcttttaagtttacatctaaatttgaagatataaactcgataaaaatatattatggcattaataaagtaacatatttaaacataacgcacatgttgaaaacacgaatgtaagtattcaccaacacaatataatatcctccaaaatgcgattcaacatttttctgccaaatacgatttcacatttgttttaataaaacatgatttcatatttttccacgaaaacatgattccgtggtttttccactaaaaatatgatattaatcataactatttatgtcactaaatattattcaatggtaataattattgattaattattctatttaattaattaattattttattttcaggaatcaactcatttaaccattaaaccatcaaataattggattaatgaattgactcaatccgttcaacaaatgaattgaatcaactcataaaccatttcagcctaaacttggattatggattggtttgaatgagtttatccattttgacatctctaacaatacatatctacatatgaactaatattcaacaacactatttattctcatagtaatgataatcttaaatgttcatttccataccaaactattaagaaaagaaaaacagtataaaattcaacattattcctataataaagatagttatatttttttttttgcaaaataagaaatatagttattttgttttgtgaaattaataaatatagttatcacataatgtctgtccttttttctttattcctgataatgtaaaatttgttcaacaaaaaaaatacacttccttacgaaatagagatgtaacgtctataagtctgcaaagaattaccttaatgtatagttcttttcattaaggtaagcattctattctaccatatacaaatattcccattgataattcactaatcttttctctattagtattcatcatgatgtttattttatttttttgactaaatttgttagtatttttttgagaaaaaaagaaagaaaaaactaagtgtgacgagacacgaaaacactagacaaggaggggctttgacgagacccgaacaaacaaatgtgaatttaaaaaaacccattaaaataattaaaaataatggaaatttaaaaatagaaaataatagtgtctctcgctttccttcatgcgttctctcgcagtcgcaggcgactatcaagtttcagaactcgagattcatcattctctgttccacttccggcgatgtattataatccctagaccttagttccggcgaactctcgaagaacaaacaagtatatattattattttcttcttagtgtttcgtgctgtttccacgattccttcgttttatcttggatctacagttttacattcttctgtttttcttcactttcattgtttccactgcgttgttctgattaggtattgcacaggttttgaaatgtcagtgaaaacgcgaagctgagagaggagaaggaagaaatcgaaggaagctgattcaaatttaggaagaagaaaaaatg

SEQ ID NO: 25634 - DNA, 3003 bp, Unknown
  misc_feature (1)..( 3003): 2750-1469P.txt file - cDNA_ID_2707354; gDNA_ID_2214514; Annot_ID_133915
tattgcttcaaaaagaaaaaaaaagaataattgtaagctatgggcttcacaagtttgtactctctctatggaaaatccaaggttctgaaatcaattagtttttccgctctcaacagtaaaactctcgcaattgacgcttcaatgtggttatacagaggtgctttaaataatgcccggaaattcttggaggaaccaactacacccaactctgaacatataatgtttgtcatcaaaaaagtcaaacaattcatcgaccgtaatgtgaatcctattcttgttttcgatggacatcgtttacctattaagtcaccgcggaacccaataaaaactctagaatacgcaaaggatcttgacgcatcagcacaacttatggctcccgatgaccctaagagaaaggacaaagagaagaatgctactaagatctttcaaagtcatatacacatcacgccttatgtgatacatgttttcattgaggtaacatttacggtaaataattatttttaagaattttcacttctttctaattttttattaacctttcttttttctcccattgaaggtttaaaaaaaaaaagtatccgaatattgagtttatcgttgctgctcacagcttgtatatttggctaataataaagataaaagcgtttatgcggttctcactattaacactgacctcataccatttagatgttgaagagtaagttctttaatacacttatcaattattattattttaaaggtttttctcatgtagacataacattaatttttactaccactttaaacttttgtgtgatcacaaattattttcgccagtaaagactttgaattgcttgaactcgaaatgatagacttattgaagcggtttcatagtagcaagaaaaataaagacaacgaaaaagaaactaaagaagaagcaaaatcttacgatttttcagaattcacagacgataattttctggagatgtgcattctttgcgattgtgactattttaaatggccattaacggagggatccgaaagagcatatgaaataattggtactaaaactatacgtggtagagaggtactttttacttggtttagttcaaaatagtagtatactatacatttagattttgtatttgcatgtatgatgacatgatgtgtgttattcattttctttcaggtaatagaggaactactagaggacagcactgacctaacttctcatctgaaaaaattcataattttgttgcttttcaaatattagtatgtctataatcaagtaattgaagagcttcaacacttgaatgtgcctgaggtgtctaaccttccattcttgcgtgaccgtgagtctggcgatgaatttgtcattcgaaagtatgaagattctacgggcacatatttgtcaacaactaagactaaggaaatagcataaggaagacttaatcctgaaacccacgaaaaatttacacacgtggaagtggaagaaacagatgacgaagaaactacttagacaaaagtatctaataatttgaatttcgaagttctagttcaaaataaaggaagtctaatttcgacaaaaaatctcacatctataccatattttacggttttagttttttttagtcgttagcaacaatgacaatcagttatattttgttaactttataatcgttagcgatgactatcgacaatgaaatcatgtttatttggtagtcgttgggtcgggaacatttaacaaatgattttgattcaattttttttttttcttataaaccttatcggctgatctggttagccctagtaaaaacacaccgaaatgttttcgagtggacttcttcccgaaaaaccaccatactgtctgtctgtcacgagtttgaaatgctttctgactaatgccagggggtagtcaggcggccgcctacatttctaattaccaagtaaaccaattaaaccaagacccaacttatacacttaccaactttcaaggagaatcgaactcgggtctaagagtttcatccttcccaaagcttcccctaccactaaaccacatatacttggcctaggttgaaaactttcagtgatacaattttttacttgctaatcgttcaaaaatattgaccataaattgtcgatgaaccaatggctaacactatttagttggttggtcgcaatcgcatagcatgtccctgacacaaaaaaagcaaacaaaaaaagaactacttggatcaaacaaagaaacccatgcttgggctcagactgaaaacaaagtaattgggccaaacccatttagtattaaccgactaatcaagtccaacaatgtacagcatgaaataaacgctacccattaaccgactcaaatcgcaccaagtcaggcccaattaatcctacacaggcccatttagaagaaagttaacttcctccttaagaagagagaagggctaaaaatcaagctttcacgagtacggaaatttacagtatctcctccatctttttttactttcctcagagctctctcctctccgcaacttccaccaccaccaaatcggaactctcggcgttctactccgtctccggcgttacctccgtcgatttcatcttctcaggttacttagggttacctcttttttgctttttgatcgataaagtgtgatgatgtctagcgttaactcttttcgtcttcgtagtcgtagtcttagggttttggtggcgacgatactttgatttatcaaaccgaacttcttctttgtgatcttcgatgaatcaaaagttttctaagggatattaattaggttttgttaccggcgataattaatccatcttcgatgcttcttctttacacttctgactttgtttctgatgttttaacctctgtggagagcttgatagagtgacattgctctgactaagcgttttagttcaacgcatggttgattctctttttactaagtaatgaattttgagatccttgtttgattgcagttggaaggagtgaattgagaaggtcgggccaatatg

SEQ ID NO: 25635 - DNA, 1592 bp, Unknown; identical to SEQ ID NO: 11442
  misc_feature (1)..( 1592): 2750-1469P.txt file - cDNA_ID_2707368; gDNA_ID_2214496; Annot_ID_133568

SEQ ID NO: 25636 - DNA, 3000 bp, Unknown; identical to SEQ ID NO: 11754
  misc_feature (1)..( 3000): 2750-1469P.txt file - cDNA_ID_2707372; gDNA_ID_2214515; Annot_ID_133933

SEQ ID NO: 25637 - DNA, 3000 bp, Unknown; identical to SEQ ID NO: 11754
  misc_feature (1)..( 3000): 2750-1469P.txt file - cDNA_ID_2707372; gDNA_ID_2214515; Annot_ID_184412

SEQ ID NO: 25638 - DNA, 3003 bp, Unknown
  misc_feature (1)..( 3003): 2750-1469P.txt file - cDNA_ID_2707379; gDNA_ID_2214515; Annot_ID_133947
aacaacaaggaggctatggaaatatgcagacgaatcagcagagtctacagcctaataacatgatgcagaatgctcaacaaaggcaccaaaatcctcaataaccccttttaaataatttgggcttgtaatgggccgatgcctgtattttgtagtaccaaaggcctggcccattctttaacattaatacactcaccagatttctctagttgtatggtactttcacactacactagtacactttgtttacttgtatcattgtatgaggttaaaaacgtgaagcagagattggacggtggaggattgttttcgttctgacatgtttattgagaattcgacacgtggcatcgacgtgaacatctcgacgccgttgatggggttatagagacaaaacgaagacgcgtttctgttgtacacgggactcgagagagcgacgtgtctatgaagtttacctgttttctgaactttaaacagagagctttaaaactgcgactcgaaagctattaaattttctgacaatttgttttgtttcttgtcaacttaattttatatactcattttttatgtacttatttagctcaacgactcgtttagttacctcaatcaaattttgaaatttagttaccatttcttttaaattttttgtttgcttttgttacaaatatgaaaaactagtttactttggtttttaggaatttgcgaaaaaatcactcaaaatcgcttatttttacaatttattgtgcacattcaaaaaatgcaaaataaatttataaaatttaaaataatacacaatataatttatttgtgcgattttgcatatgttataaacgttttcactataacatatatttgtattcaaaagttttaaagatataattgaactcatcatctcaaaggctttgatttgatatattattttctttaatataaatattcaatgcataattttctttaaattaattttatataaaataaatattttactatatattatatgaaataaatgctttattatagggaaaaaacccaaaacaaacctcaacttgttatgaataaagatggatgctcattataacgcccatcatctaaactcatcatctagatgtttctaaggttttaccctttccttgtaatcctatataaagaaccctttacctcaatggaataacacactcattttcttctatctctttctctgtttataacacgttatcaggacgctctaaaaggtagatatagagattcttacatttttttaagaaccatgtttacttatcgactcatggttcatagtatttattttctattattgaaacaaaacaatatgagccgatcgatgattatagtatagatcggtaaaagcatgttttcaatgattcaataaagaagagaatcatgcttatcatttgtttctataattactatcgcatgattcaatgattctacaaagaaaatcgttaaagaagataatcatgcttattaattgttaatttttgtgatttattattacaataatgaatatataaattaccaattttataattatataactaattttgtaactattcataacccggtggtaggtgatgcaaacatgtattaatgttttagcattccagttttgaatagttgcatctatattcaatatcattttataaatattatattgtctaaaatccatttatgattgatatgatatcccttatttaactcctttgattaaaacgttatacatatcttatcacttttagatattgacttttccatattaaatatttgatttccatatatttgattgtgttattattatttttactaaaaatgttgcaagataatttttctttttataagattccatatatctaaatctttgtgttattattatctaaaaatttttataagatttccatatatttgattgtgttattattatttttactaaaaacgttgcaagataatttttttttttataagattcttttctctaaatctttgtggtatctaaaaaaaaaaaaaaaaaaaaaacaaaaaaaattgttcatggttttgccctaattttgcacgaaatcattttacccaaatcttgcacgaattcatattagcctaaataaaagttttgtcaagatatatgtaaaatccagattttgcacaaaatagttttattctgattggttttacaatattgcattaaaattgtattagtatatcatacttgattattttatgaaataaattgattgataaataacttaatttaaaggtataatcacttatagaaattttcatgaatgactagtttaatgtatcttaagaagatatcatatttttgatggtcaaaattttttcaagaacttaaattatcaccaaaagttgagaaaataaatatggtaaaaaaaaataagaaattttgaaagaactattataaacttaaatcgagtgtttttcaaaggctaagaaaacagatgagttatcgatgataagtagtactcatattctgaagtgaatataagatcttacatagttagtcaaatttaatatcgtttatactagaatataaaaatttaattattatctcgttattgttttattagcatatgattgattattaaaatacatggaagtaattttgattataagatcttattaagggagtaactgataagcaatgaaaagtaaattaaaagttttgaaagaactagaagtttcaaaagaattaaaagtttcaagagtatatttggcttaaccggattggtcatcctggtttaatgatgatgtgaaagtattgagaattatgtggacattaggtgaaaaactagaagattctccctaatgatttatcaaatgttacttgctcagaaagcaatatgataatgtgatttttaccagtgtaagtaatttggactttatctattcgtaagtatatatacaaggagatgattatgggttgatcacccactatatgacatttagatacctaatggttataaaagatgcatcgattcaatg

SEQ ID NO: 25639 - DNA, 3000 bp, Unknown
  misc_feature (1)..( 3000): 2750-1469P.txt file - cDNA_ID_2707383; gDNA_ID_2214515; Annot_ID_133943
gtagggttgccatacagaaaataacatttatcactttgtttagttggtatatgaccaatcttaggtttgatgcatgataaactggtaatggttttctacatttttttttttaacatctaaacaaactttattaatgtgaatcaaagtatacatgattatcaatgagattacaaatacaaccaattgtttttgtaacgaaaaaatgatgaagcaatacatgccgcattcttagtcaagtactttatcatcttcgtcatttccgtcaatttggtgtgactttcttgcttagggatcttcttctttttactgataaaataccggtaatgcagttgagagtcatatgcaacgatccatatgttacatcacaaagcttttggattgatcgagactctcatatagaatgagatgtcattggtcttggttgtgcttaaaacccattgttgtgtacatgacataaaccatcttccgatcattctcctccatagatagttgcttattgtcattatccattcatcccgaattgtctctttttccatggtagtttccattttccaaagtagatctgtttgtatagttgtaaagacaccaaattccgagatctccatttatatttgtaaatctgcaagaacaagactgcatcacatcgaatcatgggtttcagtgtggggataactgcggaagggtgggagagatgtcccaagaaaaccatatcatcgacaaagagaattacaatcatcaccataaaggtgaagagaaatcgaatgaagaaaataaatctgagaacaatctgagataacagaaaattccccatcacaattattgaaagcagaagaaaaataaagcaagtaacaaaatagaaccaccggcaaatgtcggcggcccgaaaaccaaagaggaaaaacggttttatcagtatccccttttgtgtcgacagagagataggagttgtttggccgttttcagggttatcgtctttaccattgggttttctacaaatttatttgggttaatttgttcatgtctttttctttttttaattatctttcagattttaatttttatttacatttttataaaatgataatatatagatatattaataagtcagaatatttgtaaattataatactaaaacttacaaaataagaatattttaaatagtttttcttttggaaatatatttaaataggtcatgaaataaataatctatgaaatatatgataatatacaattatagaaaagttagaatatttataaaaatgataatgataaaaaggatttttctgttttaatgataaaaaggataaaaaggatttttctactcgtcaaattaattatttaactatcaaacttttttgtttgttttaatgttaacttatcaattcagatttttaggattgtaccaaagcccctataaataaagagacaagcccgagttgcatcaaagtttgagagacaaaatgagaaggtttgggaagaaaaacaaaaaaacaaacaaagagacaagcccctcctctgaatgataatattgaaaacaaccaaaagttaaggataaaatacaatttaaagttttatatgagcttttccttggatattactggatttaacgtctacaaatattttaagaaactaatacaaccacattgatacaaagtatacttcgtccgtattatataaagttatgttttagtttaaaaaatggtttcattttaaatgatgttggtagaggaacaaacccacaatgttttacatttttaacgtaaaataattgttttattgtttcaagacttgttctattattgactgaattgtggattaaatattaacagctttttaatatatacacaaatttttaaaatatttattatttaataaaaaagattacatatcaaactgttaataaataactcaacagtcaaatgaactcgcgtttgtcaaaattaaaggttaatcgggtctgggataaactttttttttatgctgagaatcgtcttgttataatacacctacttttatataagattattcgaaaactatcgaaatttttgcaaagatggtatttttcaaaattagaaaaacttgaaaatcccaacagattgatctcatctttatctctcttttggatcatcatcatcatctttgtagcttataaaaatatatatatatatatatatatgtatatatagttggacataaaatccgaaatccaaaaaccgatccgaaaaatccggctccgaaaccgaaccgaatagtcacaaaatccgaacagataatgaattctcctacctgaattacccgaactgaatccgatccgaaccgaaaagcaaacggatatctgtaatccgaaataaaattatatatcttaaaatattagtaatatttagttataatttatacccaaaaaatactaaataacaaaaatattcgctataaccttaatatccaaatttcttttagttctatttgttataattttactttgttttgcaaaattaaaccaaattttagtaaaattaaacgatttttgattaaaattgaacaattttttagtttttttttctcaaaaactgatttgaaacccatacaaatccgacaccatccgaagtgaaaccaaaccgaatagtcatataatcctaatgttaataaactttttcatccgaattatccaaataaaaaaaattcgaactgaatccgatatgaaatctgaatgtccggacctatattgaaaatttaaaatttaaatttcggatatattaatctatataagcccaaatattgtgccaagtgaaagttcattacaaaactaagcccagttccatatacaaagcccatactatgctcatgacaaagaagacttgctcacgtgtcttcaccaataaaataattacacgtgtgcaaagaacgtctttgactcttttgtcttacccgaaacggcaaaaaaaacattgactactgcaagattttatctctctctctcttctcttttccggtgacgccatg

SEQ ID NO: 25640 - DNA, 3000 bp, Unknown; identical to SEQ ID NO: 25639
  misc_feature (1)..( 3000): 2750-1469P.txt file - cDNA_ID_2707383; gDNA_ID_2214515; Annot_ID_184425

SEQ ID NO: 25641 - DNA, 3003 bp, Unknown
  misc_feature (1)..( 3003): 2750-1469P.txt file - cDNA_ID_2707387; gDNA_ID_2214515; Annot_ID_133938
tttataatatttatacataaaaatatcaaaatttataattttcattctctataaatagatactattttcatttgatttgaatacaaaaaataaaaaaccgtgttggctatcatcatgagatcgtgtatcatattgcataatatgattgttgaggatgaacgagagacatatgctcaacattggacggattatgatcaatttgaggcaagtaggtcgagtacacaacaaccattctcgaccgaagtgctacccgtatttacaaatcatgtgcgtgctaggtccgagttgcgtgatttaaatgtacatcacgaattgcaagcagatccagtcaaacacatacgagcacaattcggaatgttccatggtgaatgaaatttttaagtttgtgagttgagattattgtattaattaaattattagtgttttcttacttgttgtgtgcttattgtatttttgcattttaaatttatgttcattgtatgtgttttagtaataataatttctatttctcgtttttattatttataaaagtttttaaaaatattatataaaataaaaacaaatattaacacaaaaataatttataaaattattttaatttaatttaatattaacaatgattaataatatgtaatcacaaaaacataaacataaataaaatgaaaaaaatgaaataaaaatggtggggtaaggtattgtaattttattaaacaaaactattgtaaatataaaagggagatttgcaaaactaccctttttttactaccttttgcaacaataccctttcgtgttgtccatttttaaaaatactcatttccttgaccagaatgaccaaattatcctcatctaataggaacatgtaattggaaactgaaattttcccgccaatttttctttccccgccaaaaaaaaaaaatttcgtcaaacatttttcccgccaaaaaaaaatattctcgccaaaaatttttacaaccaaaaaattgcttctaaaaatccttgtaattttttttttgcgggaaatagatttacaagggattttaaaagggttttaaaagatttacaatggattttaaaaggttttaaaaaattttacaagagtttttaaagaatcttcttgtaaactctttaaaaatcttttaaaaacccttgtacatatcttaaaacccttttaaaatctcttgtaaatctttaaaacccttttaaaatcccttgtaaatcttttaaaacccttttaaaatcccttgtaaatcttttaacacccttttaaaatcacttgtaaatattttaaaacacttttcaaacaattttgaaccctttaaaaatctttataaaacctttgtaaatcttttaaagccctttaaaatctcttataaatcttttaaaacccttttaaaatcccctgtaaaacttttaaaacccttttaaaatcccttgtaaatctttttaaacccttttaaaatccttgtaaatattttaaaatcccgtgtaattcttttaaaactcttttaaaatctcgtgtaaatttggcgggaaaaatatttttggaaaaaaaaaattggcgggaaattgttttttcaaaattatttggtgggaaatttattttggaatattttaggcgaaaaatattaatatttcattttgtttacctaaaacaatttccaaataacggtaaatggtcattaaaatttaaagaaggtaaaaataaaaatgacaaataggaaagagtagaattgaaaaagggtaatgtgaaaagggtattctcaacaattattcaagataaaaattgtataggtgttaaataataatgtgtaaaagagaagacgatgtgaagtattaaaagaaaaaaaaaatggatgttgtatataagtaaccattgtagatagtttaagcaagaaaaattgatgttgcattggaaattaaaaaatttcaataaaattagaaaagcaactctaaatcattacttattttattattttcaagaagttataaagtattaaacaattcgttgacaaataagtttgatcgacattgtgtgacaaatttaaaacacatcattaataacaacgaggacaaatacagttcagatatcgtctactattaaaacacttcttctataggagcaaagaaaaattgtcggcaacgaactggggaccaataatattccgagtttgagttcaaactgagtaattttattttgagaaaatttgccaagttaacttataattctggtttacgtgtagtaatttattaagttgttataggaaaatgagaaaatactaagacacatccaagaaagtttcacacgaaatttacttacaaaaagattgtttatttaatacttccgtatatagatatataaatatttaacacattaattataaagttcaagataattgattatctatctttttttgtcatctgaaattattatcgctcaaacgaagtaattctgaggaaagttgtttacaaactagttatttcattattgtctacttatataatagaattaaaaaaaattattgcttaatgcaatttagttttagataaaatcattaaacttaatagattatataagttagatatcaataattgggcttgcttaaaaacataaatataaaatattattgggccgttacgtgcatacaaaacgaaccttctaacaaacaagtgtgaacgttacgacttcaaaattaaaaaaaaacacaacaactatgtccacacgtaatctcatatgattcagattccaaggagaacaaaattaaaaacaaatctcgtaaacatacatacacttcacataaaacaaaaggtacagtatataccataaatctccgagattcttttgatgtatctgtccatttcattattacacaaactaggaaactgatatctctctattcacattcctctgattctatttctctttatatatattcacccattaaccatctcaatcttataaccctcaaaatcacaatcttctcttacaaaaaactttgaaagatg

SEQ ID NO: 25642 - DNA, 3003 bp, Unknown
  misc_feature (1)..( 3003): 2750-1469P.txt file - cDNA_ID_2707394; gDNA_ID_2214515; Annot_ID_133930
attcggaaatttgaagacttgttaatttgggtttgggattgggattgatctgaaaatttgtagtttttggaagatatgttggaagatcgatcaccagattcgtgtttgagtacaagggttttctcaagctctcgtctttctgaatcaaactggtctaactcttacatgtatccagaggatgatgataagctcctcggtaatggtaaaagagctttggaggttgttggtgaggttagacagaccaaatcacttaaattaatgggtttttcgattatctatgatagcgattcttctgactattcattgagtggtggggaggagcaagctgatgctgctattggtgatggctcatcatcaaggcaggagcaagaacagcaatctgattttaatgacaatggtggtgattcttcggattctcactctcttatcaatgagattgggagggacaattcgatcgactgtttgatccgttgctcgaggtctgattatggttctattgcttccttgaaccggaatttccgttctttggtaaagagtggagagatttatagattaaggcgacaaaacgggtttgttgaacattgggtttacttctcttgccagctcttggaatgggttgcgtttgatcctgttgagagaaggtggatgcagttgccaactatgccttccagtgttaccttcatgtgtgcagataaggagtctctggccgttgggacggacctgcttgtcttaggaaaagatgatttttcttctcatgtaatatacagatacagtctactcactaattcttggtcttctggtatgaagatgaactctccgaggtgtttgtttggatccgcgagccttggagagattgctatattcgctggtggatgtgattcccagggaaagattcttgattttgcggaaatgtataattctgagcttcaaacttggataactcttccaaggatgaacaaaccgaggaagatgtgttcgggagtttttatggacgggaagttctatgtaattggaggaatcggtggtgctgattctaaaggcttgacctgcggtgaagaatatgatttggagaccaagaaatggactcaaatccctgacttgtcgcctccaagaagccgtgctgatcaagctgatatgtcaccagcagcggaagcaccgcctcttgttgcggttgtgaataaccaattatacgctgctgatcacgccgatatggaagtgaggaagtacgataaggagaataagaagtggttaactgttggaagattgcctgaaagagctggctcggtaaacggatggggacttgcttttagagcttgtggagagcggttaattgttattggtggaccgaagtgctcaggaggtggtttcatagagctaaattcttggataccgagcgacggtggtccacctcagtggacactacttgacaggaaacattctcctactttcgtatacaattgtgcagtgatgggttgctaaaagaacacacattcataatactacgactatccatttgaagaccctccagattcttgttgatgggttttagcttacaagtcaaaagacaccattgaaggtcccacgctccaacctttatgcttcttcttcttcttccttatttgtttcccttacaaaattttcaatttgaatacaatcatctctgtattgttagaaaccagacaaaagtcccaaggagattccaaaaaaaaaaaggaaaaaaaaaaactgaaacaggtttataataagttcgttaaaagttgaagctttttagagtttgccagatctggttaacattgttgtatgtgtttttaatcaaatttgttttctaataatcttgccatctttttggtctttgttcacggttttgcttttgagtttaattctttttctatttttgttttgctttacctttctttaattttacaggtcactttacaacgttgagtttgaagtgtttgtcaattttatgacgacaaacaaaaaagtgtcacttttgtttttttgttggggtaaggaggggcaaatgttatgtctttatagatgtgtcctttaagatatctcaatctgttgcttgcaagttatacaattttttgttaagaatgtttttggactcttgttttagttccttcagcttttagggtctttagattttttggtgaagataacaacatattacaatctaagttagtattttaccaatcggaacaactcatagtataagtaacattaaccaaagtaaatttttttcaaagagtagttaaaatttcttaattacaagataaccaaagtaatatgtttttagtgtttctaattttctgatgatatatttttttttgttatttagatattttttcttatatacgattatctaatgtcttttaactttatcgtctacaactcacacacgtgtactgcttgatttcaatcgaagttcggacacaatgacatcactagcatatgttatgcttgaaattttagacatgtaaaaatctcatagacatagatataaatactagaaatcaaaaattgaaactgaaatataaaatatttagaaaaatataaaatatttagaatagaaaaatataaaaaatttagcagaattctctaaattttctttatctttattttttcgtagcgtaaatgtaaaagtagacacattagtatgaaatatttgtatcgaacagcatcatgtcacatatataaacaatattctcatgattttgagttctaattaatattggttgacaaaaaagagaaagagttaaagatgcctctttcttcaacatatcagtatcaccctctcaattcgattttttctacaaagaaatatgttatgttctaagcaaagcccaactacaataaatttgggcctcataatgttaaggcccatttactctaaatctcgcagggttttaagttttgatttattctctactcagcaaacgccattatcgctctgtagaaaagcttccattttcgtagaccactctcactgagaagatg

SEQ ID NO: 25643 - DNA, 3003 bp, Unknown; identical to SEQ ID NO: 25642
  misc_feature (1)..( 3003): 2750-1469P.txt file - cDNA_ID_2707394; gDNA_ID_2214515; Annot_ID_184408

SEQ ID NO: 25644 - DNA, 3000 bp, Unknown; identical to SEQ ID NO: 11751
  misc_feature (1)..( 3000): 2750-1469P.txt file - cDNA_ID_2707398; gDNA_ID_2214515; Annot_ID_133928

SEQ ID NO: 25645 - DNA, 3000 bp, Unknown; identical to SEQ ID NO: 11751
  misc_feature (1)..( 3000): 2750-1469P.txt file - cDNA_ID_2707398; gDNA_ID_2214515; Annot_ID_184406

SEQ ID NO: 25646 - DNA, 3003 bp, Unknown
  misc_feature (1)..( 3003): 2750-1469P.txt file - cDNA_ID_2707406; gDNA_ID_2214515; Annot_ID_133945
ttaaaatcggaaagatattaaaatacaagacatgaacaaattaacccaaataaatttgtagaaaaccattaccggtttaccacgcaacaaacctaagattggtcatataccaactaaataaagtgaaaaacgttattttctgtatgcacgaccctacacttgtcttaaatttaagaaggttttgtttaggactaatacaatctccactttattgagtttaccaaaaatgaaggccactgagaacacaagaggagatgacaacatcaagatgtgctagaggtaaagccagcgcctcgagcaggacaattcagatggctaacaccaacaccaattacttcctgagctttatgtacggaaatgaatcagtatttgaggatcgtgtattcgcttctcgttaatccgactttaagttattggtttccaagctatatggttcaaaattatggaaggttacagttttcagtttgagtcaactcttaacaatttaggagagaatttgaaggccctgttctttttccagacgctgcgatcaaatccagcgaccaaaaaaacagttgtttaacacacaattacgttgaagtctatagaaagttatgtggagaggaatcactcgattctaaaaacagcgacctataaggcatatacacgtgttgccaaaaataacagcgactcaacatcttcactagagacgtcgccggcgtccatattgagcgactgtttttgtatctctgttaaaaaatttgtcttcgtcggagtcgttgtcgctgtcgcagcgattaataaacgaacatgcccgaagttacagagaacaacaccacacactatttgtaaaattatgaagcaaaaaacacataagctaatgaatactcaagtcttgtgaattacagagtacattgaaagaagctaacagaaccattgagaaagattcaaagtaatggacataatttgaaattttgaatggttaaacgcaaaacatttctaattcactcagctagggatatgtgatcatctactgaaacccacgtacttggtgcaaatcatcacttttgcagtcaattaccatctttctcatgtaaactttaaagcaactttcattcctcatcaactagattcttaattaccttaccaaaaaaaaaaaactagattcttaattacaccttcatgatctaacatattgaaacaaaaaactatatacaagctcatatgaaagtgtcttagcatgtcccaaagtacaaaacttctgcaattttcatctctcaaatctcaagtaccaagaacaaagaacatcaaaaagcttacattgttgttgttgatcatcatcttctttcacgatctcaagttacacattacatgatctaacgaaacatgtactcagcctaatcattgaaacagaaactatatacaaaactcatgtgaagtgtcttgacatgtcccaaatctcaagtaaaaagaacatcaaaaagaacgttgttgtttatcatcatcttctttcagcagacctaagacgaagttctaaaagccaatggttaaactgaccatcactaaccttcaacatctcagacaaaggcatcaaaatcccatgttccttaagcaatctatgccttggctttatcttcctctccaagctaaacgaaaaatactgagggaaacgtttcagctccttaacatctccacgcatctcctcaataaaaaactcaactttaggaactaaattgttatcaacactataagtcaacaacgccggagatctcacaaccatcttcgctacttcttctcttgtaaaccctaacccttcttcaagatactcaattttggggattagggttcgttccacattcgatacaagcaacaccgtgttccgtgacgtaatcgtgtcgcgacccacgaatcctagggttttgaggaacgttaatgcaggacgaagctgataatctacagatgaaattagcaatcgaggacaacgagagatcgatttaggtatgtcttgctctgaaattgaaatctcattggataagaagcgaagaactggtaagatttcagattcaggatcagaagttaacaaatctggaaacatgtcgaggatacgaccaacggcgggtcttgagagtccggtggaagagagtagagtctcgacggagacgacggaggagattggagcagaacggagagatgggtttactcggagagctttgtgaggatctacgttaaggtcttgaaggtaaataagcttctcccggaatagaatcccagtatctgaagtttctccggcgaaacatctaatcctcacggcggagaaacacggcggcggaaaaagagaacaccttgctatcatcatcgtcggtgaggtagaaaaaaaaagtttcaatctttaaagtgtggataaaacaatggaagaagggtaaaatggtaattctggtgtaacggtcagataaagattaaacgacgtagttttttggttgagagttgtttctgcttgttcttcttcttccaatgaggatccctattctcaagcggcttaatcataagaccggtttttgcgcagagtctgttaaccgcaatcatcttctctgtctctatctctacctctggttttcgattcttcgtttcgaagttttttttttttttccctttcttcttcaagaggtcctttttaagatctcgctcatggttagtatcagcttggcgtttgaatttgcctctttaggtaagtttccttttcttcttctctttccttatctcttcttaataagggttttcacaatctctctgttttcttcagaaaaagattgaatctttattgaaaacccaaagtgatgaaattgaaattcatgatctgggtattatagattgcagattctggaaacgtattatgttaatgattcatttcaagttttgattttttgtgttggattgaagagaagaatagtttattgatgttttgtgaagaagaagaagaagagattttgattttggtttaatatatagttggggattaacaggatg

SEQ ID NO: 25647 - DNA, 3000 bp, Unknown; identical to SEQ ID NO: 11755
  misc_feature (1)..( 3000): 2750-1469P.txt file - cDNA_ID_2707432; gDNA_ID_2214515; Annot_ID_133936

SEQ ID NO: 25648 - DNA, 3000 bp, Unknown
  misc_feature (1)..( 3000): 2750-1469P.txt file - cDNA_ID_2707448; gDNA_ID_2214484; Annot_ID_133323
tcgcagcaagcatgaacaacatgtccttcgtgctaccacgaagtaactccgtcatgcaagcatattaccaaggcaccccaggaatcttcacaacggattttccgcccgttccaccggtgcaattcgattacacaggtaacgttagccgcgggttatggcagcccataaaaggaaccaaagcttacaagcttaagtacaaatctaatgttcagattgtgttacaagacactagcattgtcacgccagagaatcatcccatgcatctacacgggtaccaattctacgtggtcgggtcaggtttcggtaatttcaacccgagaacagacccggctaggtttaacttatttgacccaccagagaggaacaccattggaacacctccaggtggttgggtggcaattcggttcgtcgctgataatccaggttagatgatcttattgactcgaaagcatttgatactttgtaaccataggttaaatgatcttattgactcaaaaatgaaaaacatattttgatatacttgtggtgtaatgcaggagcatggtttatgcattgtcacattgattcacatttgggatggggtttggctatggttttcttggtagagaacggtcgtggacagttgcaatcggtgcaggctccaccattggatcttccaagatgctaataaaaaacttctaccgttggatctaaagaatttatggggtttggttttttgttcttgttttttaatcaaaaaaagacttcgtgagtcttgatatgttaaagatggacaactgctctattgaaagtggttcaacctttgttttcgatgtacttttgttattttcctcgtaatagagtgagtgttttcatttttccgattaaaaatttaccaaataaaagctgtgttagttaatcttctttttctagctgactttcccaaacaactttattagttattaacttaatatgaacccacaagatacttttaattacattatcatacataaacttttcttgcaaaaatagcatcatatcgatctttaattggccatctttacgagaaaataattcttgaaaaagaacgtaaatagtgtggttgcgattccgttgatcaaaatttaccattaaactgaaaaaaaaaaatagtgatccatgaattacatttctgtataacttcttccacaaaaagatgattttttttggtcaactttctccaaaattctcaaaacaattcgccgtcaatgcctataactcgacataagtaaattgactacaactgccataagattgtaagtttggtggtctgttggtcatcctgatggaatgtagttgtaccattttgaactataatagaatctaatgagatagttttgatcgattgttataaattggataaccctaaatgtaaaagtacaaaaaatacattcttcgttgtggaatcctaataaacaaaattgtcctctggatacttaataattcaaacgtcatgacataagtgatccaaacatcacaaaaaaaattcataatctattggaacaaaaggttgatagacttacatgagtggtatccattccaatcgacactaagatttactgatcccaagttgaattcatgcgaaaatatttacactaaaatggttagaaataggatttggtatggtaaacatttttgggatactctttattggtctcgattttgcaatcaacgtcgcaaataattgatttacgatatcttttacctcacacgaaacgtgtacacaattgtgtattctttcttgcacaaccctagaccttagtttaaacttcaatcttctccgcaatgaaataaaatacacaattatacataatttccataatccaacatttttttttttatatctaaaagcacctccaatggagagaatctgtcgaagggttctctctatttttttatgattaaatttcaaaaaaattaacaaaagagcttttttcttttttttggttttttatagtccaatggtaggttcttttagaagaattctctggaaaaacaatattaatataaaattattttatttcatacaatttaataattattacaaagtataaaatattaaacatacattaatttgaaatattataaaatagatatgaaaaaaaacggaataaagatcagttgttctgttgattgttacaacatttagtcacgatatacaagagaaaatgacttgattcatacctaatttggagaatccgtcaacgattactctccaaatcatattttctattctccgattgagtttatcttccggtgatagtcatcaccatctgcaatgttataaaagtcatgcagtacgtacttaggtgctagagtaccgcctatttcggattaatcgtcgactaggcgttaaatcaaattggcaaatatgctatagtttatataaatatatagtatatataacttttaatcagtcatatttttaaaatttgatgtagcattgtggtctggaaggttgtttttggtagccaaagtgataagttcgatacctacaagtggacaatattatgcattttagttaaaacgaggggtacatctgtaatttcacgtacaaagtcaactgcttttcctacaaaacctaatcgccgtcgtcaaacctgagtttttttttgttctgattttttcgtatttcttctatttcctcatcattttatcgcatctctttaccaaaataacacaaatacaacattaatctttggatgattgaccacaaaatggaatttaacgtagtcttgaacacacgaatttttttgtttcttttgttaagctttacatccaatcaaatttggacacgtgtccgtttctctcctttcttcaaaaacttcccccagctaccatcatcttcgttaactccgctaaagcttttttaaaaaggattactactgtttacttctctgaatgcgttcactgcttcaccgtactatcttactcacatctccgtctcattctcttatccggcgcacttctctctccgccatg

SEQ ID NO: 25649 - DNA, 3000 bp, Unknown; identical to SEQ ID NO: 11779
  misc_feature (1)..( 3000): 2750-1469P.txt file - cDNA_ID_2707456; gDNA_ID_2214516; Annot_ID_133955

SEQ ID NO: 25650 - DNA, 3000 bp, Unknown; identical to SEQ ID NO: 11779
  misc_feature (1)..( 3000): 2750-1469P.txt file - cDNA_ID_2707456; gDNA_ID_2214516; Annot_ID_184449

SEQ ID NO: 25651 - DNA, 3000 bp, Unknown; identical to SEQ ID NO: 11786
  misc_feature (1)..( 3000): 2750-1469P.txt file - cDNA_ID_2707460; gDNA_ID_2214516; Annot_ID_133956

SEQ ID NO: 25652 - DNA, 3003 bp, Unknown
  misc_feature (1)..( 3003): 2750-1469P.txt file - cDNA_ID_2707463; gDNA_ID_2214516; Annot_ID_133958
agaaattgtgctacaaaatatgttctatatagaaaatgtttacatgattatttaaattgtcacaggagctaccagttcatcaaagagctgacgcggtgaatagtctggtttttgaagcaaacgcaagagtaagagatccggtctacggctgcgtaggagcaatctcctacttacaaaaccaagtctcgcagcttcagatgcaactagcagtggctcaagccgagattctttgcattcagatgcaaaatgagccaaccttacagtctcatcatcaagtacttgaactagaccaagaccacaaagctctcttactaaacaacaacaacatcaataactgcaacaccaacaacaacaataacaactttggttatgccatgtcttctggacagttcaactctaactttgcctcaccaagcagcataatgcaaatgcagatgcaaatgcaaatgcaagaccctcttaagcaagaatctctttggacttaatgtaataataataataataattaatgttcgacaagtttgctacttggttatgttgaaaaagagaatatgggaacaggtttcgtgtaaggaaagtagtataagtcaaagcttaaatgcatgcatgtgatggtgatgagatgtagttatgctttagtactggagatctgttttttttttttctttttctctctttaatttggtttctcacttccatttttcttttaccatcgtttgaacagtgaaaattagatctaattcaatccaatttttttgtaatatgaagtcgccaagacattgctctctaaccactacacactttttctcaaacaaaccgacacaactttgccgcgttcaaattaagagacatttagattgtcttatggaatagctaaaagactagctaaactcaaaatctcagatatacaaaaaaatttattaaacttatttaaagtagtcttagaaaacatgcaaaagcaatttttctttttatggaatcaattattttactatagactaaaaaagtagattgtatttctacatgcgataaactgaaattaaatcgaatagaaaaataaacctcaagttgcaaactacattttattcaaaaagaaaatctacatgattcaacctttacaatttgactcacaatagatttattcgaccgacctgatttgattaatcataagctacacgttagaacacaaagtcgcctctactgttgcttttgtactaatccttaaaaaaatcatatagatttaattcaccaaaattaagttaggaaagaagaggtggtggtgttgaatttgattatgttatctattgatagtattcatgtgatcagtagacgaaaaattttcaaaatattgcctgtcgacatgggaagaatcgaatgactaaaaaaataatcgatcatgttctttaatttcaaatttaattatatatctatataaatacccttaacttgtttttgacgatcctaccaagccagagaacttataactgtcatattcataccatatgctatataattagtgggatataatactctatctttaactttacgcgtaacaactttttaattaggatttaggaataagaacctttcttttgtttgttaaaaaattctttctctttctctctcaattttttcactatataaattattaagttagacgcatgtatatgtctttttactaacacgtagaccggtagacgtccatgtgctccatgcacgtgtgtaaatacatctttttttgccatgtgtgaactaatttttttaatttgccaagccaaagttataattaattaaatagcagaaagagtcttaagagaaataatatgattataatggcagaagaaaagttaagatttacagatacatccaatagtgtatagccgcttaattaatttatccacacctcaacgaaaatttccgttggtgcgctaacgaattcaggctgtgaagttaaaagaaaataaacaaaattatagcttcacataagcgatcgatcttcaaactctacacatgacagaagcaaataactaaattaaatagcgtaaattttgtaataatactagaaaacctaaaaaccaaatgtaaaaaaccttatgggaaaaaatgtgataaagcacctaaaccatagaataacttaaaatttcaatttcccaatcaaggtatgatataaaaaccatggaaaacaaattctcagccatatttctatctgaccgagtctttttcaaaataatatatagacggtagagtcttatatagtaaaaacatttttttaaaactaatttatcttctcatatgaaaatgaatgcaaataaaaatgaccatatatgctgtaatgatattcaaggaagagatatcacaacaaggtcgaagaaatatacaatatctgaaagtcgactatatggtccactttccaaattagagatggaaagaagaaacgattatgcagcaaacccattgatcggacgaagaaagaataaatatggaggcccattactatagtatttggccttgaaatattttggtccgagaaataataaataaacagttatggcttttcggatttggttgctttcaattttctcaaatgtttggacaagtgttattacactcacctaaaacaggatcattccaatttcttgggctcagagtctgtactttcttcttctttaaaccaaggtcttataagtattctctaaaccaagtcactaaacaataattggtcttgggtctggttcaaacttggatcaatgttgccacatagccattagccacacaaaacaaaaattgtcttgcctttatatggaatgaagaaaaatcgaattttgtaaccatttttgactttaaagtcacactcgccgtatacggcacaccaaatgaccaaaaacatttgaccaccaactttgctttaatgttaaaactttttttttgcatcccactactctcttcttcacctcctcaagtcacagtgaccaaaatcacacacttcacaagaaacaacctatg

SEQ ID NO: 25653 - DNA, 3003 bp, Unknown; identical to SEQ ID NO: 25652
  misc_feature (1)..( 3003): 2750-1469P.txt file - cDNA_ID_2707463; gDNA_ID_2214516; Annot_ID_184453

SEQ ID NO: 25654 - DNA, 3000 bp, Unknown; identical to SEQ ID NO: 11219
  misc_feature (1)..( 3000): 2750-1469P.txt file - cDNA_ID_2707474; gDNA_ID_2214484; Annot_ID_133324

SEQ ID NO: 25655 - DNA, 3000 bp, Unknown; identical to SEQ ID NO: 11219
  misc_feature (1)..( 3000): 2750-1469P.txt file - cDNA_ID_2707474; gDNA_ID_2214484; Annot_ID_183449

SEQ ID NO: 25656 - DNA, 3000 bp, Unknown; identical to SEQ ID NO: 11220
  misc_feature (1)..( 3000): 2750-1469P.txt file - cDNA_ID_2707482; gDNA_ID_2214484; Annot_ID_133327

SEQ ID NO: 25657 - DNA, 3000 bp, Unknown; identical to SEQ ID NO: 11220
  misc_feature (1)..( 3000): 2750-1469P.txt file - cDNA_ID_2707482; gDNA_ID_2214484; Annot_ID_183453

SEQ ID NO: 25658 - DNA, 3003 bp, Unknown
  misc_feature (1)..( 3003): 2750-1469P.txt file - cDNA_ID_2707494; gDNA_ID_2214517; Annot_ID_133984
gaattctcaacgacgacgccgttttaatcgaaccgggaaaaatctccggagatcccaccgtcgttaccgtcaattgtcctgatgaatccggtctcggttcaactctgtgtagaatcatcctcgaatttggtctctccattacccgagcaggtcaatattcaattttacttcgtatctgtttaggggaatattctctgtttgtcgtttagcttcacggaatattcttctttatgattcgaaaaattcaattctgtttttcttattttgagggtaattaatatgtttgtaaaaatggtgtttgcagatttttcaacagatggaagatggtgttatatagtgttttgggttactccagatattagctctcctaaaattgattgggacagcttaaagaatcgtcttttatcagcttgtccttcttgcttaggctctttctacttctgccttcaatccaatgtctctaagcctccttccctttatcttctcaagttcttttgccgtgataggaaaggattgcttcatggtatgtgtaaagttattgtcttttgtcttgtgcttggtgttttctttatatggttgattaaaagtttgtgtttttttggtgattcgtagatgttactaaagttttgacagagctagagtttacaatacaaagagtcaaagtcatgacaacaccagatggaagagttttggatatgtttttcatcactgacgcaatgtgagttttcttcttctttctaattctgatgtttcatttgagagaagaaccaacattaacgttgtggtttgtgactttgtgtaacagggatctattgcacacgaaacagagacaaaccaaaacgtgtgaccatctaacggctgtgcttggtgagcatggtgtgagttgtgagcttgaactagctgggcctgagttagagagtgtgcaacgattctcttcacttccacctttggctgctgatgagctgtttggcccagatgggtttgatattagcggctctagctctaacaaagcggttcttaccgttgataatcagttgagccctgcacatacgttgcttcagattcgttgtgttgatcaaaagggacttttctatgatatcctcaggacttccaaagactgcgatgtccacgtacgttaaaactgatctctctaacattaagagaacctaaccttacctctgctaagagaagttgggacttctatggttgaaagatttgtataactcaagtagttcttgtttctttatccagattgcatacggtaggttctcctccaaggttaaaggttataggaatttggagttgtttgttagaggcacagacgggaataaaataatggacccaaaacatcaagccaacttctgtgctcgacttaaggaggaaatggtgtgtcctttgcgagtgattatcgtgaaccgaggaccagatactgagctattagtagccaaccctgtggaactatccggaaaaggaagaccacgagttttctacgatgtcacacttgcgttgaaatcactaggaatctgcatcttctccgtaagtactgtataataatacattgtgttctctaagctttttgaacggttattttcggtttgttttaagattggcattgcgttttcttgtaggctgagattgggagacattcgactttagatcgacaatgggaagtttatagatttcttttggatgagagtcgtgaattcccattggctagcctccgtgcgagaaatcaagtagtagatagagtcacaaagacacttatgggttggtgaagcggatgagagtgagctttcatgaacgttatgctacactcaaggggacaaagaaacaaagtcttcttcgcttgcggcttcgggtcgatgaaaagagtgatgcaagggggttgtgattgctgttgtgtggagctaatagcgttgtaaagctttggaaattgtaaaaggattatataaccgcaattgcaatgaatgcttgtaaactcactttgcaaaggtaacatttccgttgactaggtggtcactacaagagagcgacagagttgacccgagccagaatcgcaaacatgttacatttagccatgtagtggcctttgggggataatatggtaattagacaaattgtatcgaaatatatttagagtgttgccatcaaagatctctgtgtttttgaattctttttaatcatatactgaaatttgttttagttgtcatcaatatattcatctactactgtactaatccctttataattgagtttatataacgaagaaaaaggagatatagatgcattgacaagtccataattatgtttagttgtttaccattggatctgaaatagattcgaaaaattaaacggttaagaaaaaggaaacgcgttaattaaaaataaaaaaacgaagcggtagggttaatttcgtcgtttcgttatccgttgtcgctcgctcgtgcttcatcggcggctagtaatccagtgcagcagaggtcctcctatcttaacgaaagctgtgattctccttcgtctttcaatatcattcttaggtttttgaaattcatgtgtcgtaagaaccgaggaagatgacgacaccaatcaccgggaaaaactctcctgttaccggaaaagaagaaggcgaactatctacctccgacgacgaagtatcaattctcgctactataacttatattttctgctattgattttcacagtctgcgaatctggattctgttgcaccctgaacatatcaactgatctctctcgatttgtgtggtttttgagatctgcctgtgttcaatttgtatgggtttatagatttggggtataaattgtgttagttcagagactagagcttatttcttagtgattgttcgttgattatttgatttcaaagctttcgtgttgcattaattgcggcaatccactgtttccagaatgttttattattattgattagcagatttcaaaaccctaaaatttcaacgattttgtttttcttaggtacaaccaatg

SEQ ID NO: 25659 - DNA, 3003 bp, Unknown
  misc_feature (1)..( 3003): 2750-1469P.txt file - cDNA_ID_2707498; gDNA_ID_2214517; Annot_ID_133983
aaaaaatgttgatgattaaggacaattaaatcagactaaaaaccggtttaattctattaatcattcctggtttttctctcctagacctcatcttcttgaatcttgattaccaaatccgattcttgaactgtgttttaccaaacttttaccacttgaatttactaagcttctgcaatctccatcactttcttcttgtaaagcttctcctctgcatcccttaagaacttgaatctcgacaatggcgaagatgacggtgaatgtgatgatgacaatggagatgatctcactagtctattaaactcagcatcagaggatgactcaaacaaactcgagatctcttcttttctaccattacaagactccattagcaatggagttaaaggaggcgtgaacaacgaaggagaagcacgaggagtgagatatggaggagttatgacaccactttccatattaagaaacaaatcattcaaactctttccttttgtggaaaccacatcttcagattccatttcttccactgtttcttccatgattgtgaacagaaacctcggcacaagccctggaccaccaacattctcaaacccattattaagaggacactgttgttgagtgtcaatgggtttagggtttgagaaagaggaagaagaaggagaagaagaagaagggtttgtgctactactgcaacagaagatgaagagaagctctctggttccaggggtagaatagtcatttcgaaaatcaggtcttctcgtcgtcgacctcttcttacaccaaagcaagtaataaagctcagcgagaagagctaatagcaagcaaccaaagactatgcttagagcaagtcccacactgctcagagatctcatctttcttcttctagataagattcacttctcttgttcatcgttactccaacacaaagagaagacctttttatccgattcgaccaaatgtgaaatgcagaaggaatggacactatggcggttgtttatgattctgagaatagcaagggtttttgcagagacggaagaagaaaataaagttgggatgaaagaaaagcttgggaatgtggaaaaaaaagaaagaaaagcttgggaatgtgaaaatataaataatttcctaaaaaaggtgttatatagccaagtgtgtaagtgtaagtgaaactctcactcatattttagaatcaataaatgcataagtgaatacgaaattttacccttaatgaaagactttagcttctgaccatttttttttcttttcaatttatatgtcaaatgatgattttatcattgaagatgtatgaatcgaactccatgcatcattattctgacaattctactaacaattaaaatatgggagagatgactcgcgcggtgttgtagtatatggatcatgttcacagtgattcgtgcatatatatttgaaacatatgaaattacgaggaacaaaacaactctacttcattacaccattctgaaaatatttggcaagtttatctctattaatcctatattaagaatagaactccaaacctagtacactaaattaattaataaacttattttggtataaccacgggatggatgatggaagaaggggactttcaattttgactactttatgattttctgatgtttgatctactacttaactttgttacaaaaagaataccattgcaacaaaaaatttctttaatcacaaaaataaacattgttttttttccttttatcttggtttcccttacaaagcatcatatggatagcacttcaaggccttatagcccatgtgatgtgacgcatatgaagtaagagatgtgaacttgaaactgattataacacaagtagcctgagatagagtgagatttgttttgttttgcggttcttcatgttgattgatatcaaagtcagagtcagattagcctaccaaatcgaagtgtcagtgattccacctcaataatacaatttcgtaatgtgcatcaacaactatctagcctcctccatcaaccaatcacaacttcatgtagtaggctagtagcattgataatgatatccctttttagacttgtttccattcgtcatataccacttgatgacttgtttaaatccctttattctctttagtccgtgtaccaatatttttgcaaagaaagtagaatcatggattactcataactaacagaaacgttgagaaattggaaaatatgttcatagtgctaaggaggaaaactacttcttcttctcttctcaacaattgcaaataacacaagaaactaaaactgtgactcagtcttggcctcccaagtcacaatttcatgtttacaaattttctcctgcaaatatcatttcattttgcaaattaataagtttagtacggtgattatattcccttggatttatcaaataaaacccaacatatgagtccattatgcatcctcacatgaagtattttgcatttccttttatacacaccacaaaatatacagcaaacttcaactaaaacacaatctaataaataaaaaatagaacacttagttcccaccacagattttattacaaaaaaaacaaaattatcattatccgtattttatatcgtgcatcacaatttgtgattattcattgtattaacgagcccacacataaaagatcttaattatccatctacaccttaaaatctacggaccgtcttacattaatacagctagttcaccttgtgaaatctcggtaataccctcagctgcaaaagatagaagtttcatagaacggtacgtgttcattacccaacccagctttaaattttcttcttacgtgtgtatgactagacacgtaggtcccactcagcaccacgacaacccaataataaacatataaaaacaaaaagaaattaattaattttttttctttcttcatatatataattcgtttcttcttcctttttccccgagatttttttcctctgttcggtcggccattgaattgttgttgattcattggctctaaaacgaaaatg

SEQ ID NO: 25660 - DNA, 3003 bp, Unknown; identical to SEQ ID NO: 25659
  misc_feature (1)..( 3003): 2750-1469P.txt file - cDNA_ID_2707498; gDNA_ID_2214517; Annot_ID_184487

SEQ ID NO: 25661 - DNA, 3003 bp, Unknown
  misc_feature (1)..( 3003): 2750-1469P.txt file - cDNA_ID_2707505; gDNA_ID_2214517; Annot_ID_133981
actggaactggtcgtttggaaagagcaagggatgagaaaacggataaaacggcaagagagacgaatgcgaagagaagaagactggccgatgcatatcctttactaaagaacttatccactggatcagtcgaatcaaattctattaatgctatgtatgtgtctttcaaatctttgctcactccaaatcctgccgccgaacccgttgcaagtaaatatgatattacctgtccaaatttgaaccagattttgttatatatcaatatacagtatgacttataattttaatgtatttaaagatagtatttcctcaaaaatgatataaataccttatcaccgtagaaatcgaactgataagtaagaggatgtgtttttccggtggcaaattgggagattgttaagaacagttgtacaacggcgtaaactagtccgatgacggcagcggacagcatgtatcttcatgaatgatgaatccaaacatatatgcaaaaaataggtaaaaatagttagtcaaatattggatacaaaattttcacagagaaggtaaataatttatttacctataagcatagacatcgttgaaaggcaatttgatagacgtgcttgaaatttcgagagtgacggtgttggtgctgatgaggaccaccgttatgaggaggaaagccgcggtcaaaaccctaaggagaaggagcactgtcctcaacgtaacggacggtggtgccggaggtggtggagccatataaatcttcccgttaattaatcgttacgctttaaagagtaagatgaaaatgattaaggctaagatgttcgaatgcaagacatggaatgttgactaatttatagccaaaatttacgttgactcgagttcgaagagttgatttttgttacattataatatttaaccataatgtaaaatatatatatgcacaaattgtattcttcaattcgtgctggagcttgctggaactcgatcaccacttctaagttctaacttagtaattgaagtcgtgatatattttattgacatatggtattaatttagatttaaaacagtttttagccaaggaattgtaagtctaaattcatagtcttcgtagccagaaggcaacctttgatattatttttattatctatatctttttttttttttggacaaagcttgtatctacatctaactgagaaaaaagaatgtttttctttgtcatattattgttctcaaattctgattatacaacttttgacatcaaatcataattatgcaatcaaacaaacaaaccaaaaaagaaatatgcgactagcgtaatttttgcgccacaatgtattttatatgcatagcaaatcattagaatcctagtacaactgtacaaagttcgagttggacacctagcagcgataattcaaaccatgtttccatctaatgtaacagtatagacttagtcgtctatcaattttaggtgcaatcattcgtattaaaaagaaaacttagtttttttttcatactgtttagaggaacaaaatacatgtaacaagaggtacatttttgtttgagttaaattttacaatttttgaatatatagtcaacgaagaccgaaaaagttgagtcaattcctaagaatcaatctgccacatgcatcgccgtgcttgaagggcggctcactgtcttcttgcttattactacagttaaatctttttttttcaacatctaatgctatacttttaatctataatatatattagatgtgacttaaggaatttcaatagttatacataataataaaaatgaatatttgttagtgttacaaactgtgtgtcataatcatcattcatcaggatttcaaaaatatctcaaaattgttgtaagttcatgtaattcgaaatgaatgtgcactataagaaataaatttacaatttaaaaaatgcttcaatactggttacaaaaaaaactttcaatactagtattatactacttacttagtcaaaaaagtttatgaatatggttttttctgtatgttaatatttttaactgaaaatagtaccgacataacaagtaaagatatctttatttaaagtaacaaacattaatttcacttcaaattctcactattaaggattcctctctttgtagccacatttcaccatcactactttgttttcgcatatctttaaattttgtatacgtagcaaactctttcgagaaaacaagatgaagctcgtggttgtacaattcttcataatctctcttctcctcacatcttcattttctgtactttcaagtgctgattcgtgtaagtgtttacttaatctagttaataattgtaggtcatgcatgtatcattttgaaacaagttttctgaaattctaagattttacatatatatgtgataaatgaattagcagcatgcggtggaaagtgcaatgtgagatgctcaaaggcaggacaacatgaagaatgcctcaagtactgcaatatatgttgccagaagtgtaattgtgttccttcgggaacttttggacacaaagatgaatgtccttgctaccgtgatatgaaaaactccaaaggtggatccaagtgtccttgaacgttctttgaagatcctcatcacatacatataacttctacgtactatatgtgtggaaatattaatcacattctatgtttgaaatatataaaataaaatcaatgcccccaatgttggaaatcttcaatgtgatatcttaatatatatcacgaataaaaaagtttaaatttctcaatctcatttttaatctttaatctaatttcttaacacatcaacgaatctttaatctttaatcatgtagataattatcagagcacctaaacattgcgccgttttgtgattatacaaagtaacatcgtgctgtttttgacttttgaaaaccacagatccaaaaactgtttactttcctctaagagaaagcaaagccgagtgagtccaagcgagttttgagagattcgttgactcactaccggagaacgacgctatg

SEQ ID NO: 25662 - DNA, 3003 bp, Unknown; identical to SEQ ID NO: 25661
  misc_feature (1)..( 3003): 2750-1469P.txt file - cDNA_ID_2707505; gDNA_ID_2214517; Annot_ID_184485

SEQ ID NO: 25663 - DNA, 3003 bp, Unknown
  misc_feature (1)..( 3003): 2750-1469P.txt file - cDNA_ID_2707509; gDNA_ID_2214517; Annot_ID_133980
ttattaatgtcaacgtcaaccatttttaaaaaaaatcatagaaatgcatattgtttattttttattattatttaattgcaaatttgcaatcgtgaaggactcaaaagccgtatataaacgaattatgtaaattactaataacatttttggaaaaaatgtgaatattcaggatataaaaatagtataatacttaaattattgttcgtacaagaatgacacgtaactgcaaacgcgttgacttcgtaggcctaattaaaacgcttatgaaattgccaataaacacacacgggaaaatagtaacatccaaacattgcatggaaaagagtttaaggtttgtgaaggaatttgagaattttcttccttactttttttttctttctgaaattaaaattgttttcttccttcaattttgatgaagaagaaaacacataaacgttgcaaaacgacactatacatgttgacttttggtaggcgtaaatgattcgttttactggcaaattatgaaaagttagggctttttaataacattttttaatgatccgacacaataataattttgcatgatgattagaaataagaagacttgaccttatagataggttggttacatatgttttcacagaaatagtactcccaaacatagccttgcgagatatgtagccaacaaagtaatatatgtatttggtaacgtgacccaaagaatcttaaaaagcgtataatcttattaaattccacgattggtgaattaaaatgaaggaagcataatgtagggttacaatgatcatatgtgtgtttatgagactggaactggtcgtttggaaagagcaagggatgagaaaacggataaaacggcaagagagacgaatgcgaagagaagaagactggccgatgcatatcctttactaaagaacttatccactggatcagtcgaatcaaattctattaatgctatgtatgtgtctttcaaatctttgctcactccaaatcctgccgccgaacccgttgcaagtaaatatgatattacctgtccaaatttgaaccagattttgttatatatcaatatacagtatgacttataattttaatgtatttaaagatagtatttcctcaaaaatgatataaataccttatcaccgtagaaatcgaactgataagtaagaggatgtgtttttccggtggcaaattgggagattgttaagaacagttgtacaacggcgtaaactagtccgatgacggcagcggacagcatgtatcttcatgaatgatgaatccaaacatatatgcaaaaaataggtaaaaatagttagtcaaatattggatacaaaattttcacagagaaggtaaataatttatttacctataagcatagacatcgttgaaaggcaatttgatagacgtgcttgaaatttcgagagtgacggtgttggtgctgatgaggaccaccgttatgaggaggaaagccgcggtcaaaaccctaaggagaaggagcactgtcctcaacgtaacggacggtggtgccggaggtggtggagccatataaatcttcccgttaattaatcgttacgctttaaagagtaagatgaaaatgattaaggctaagatgttcgaatgcaagacatggaatgttgactaatttatagccaaaatttacgttgactcgagttcgaagagttgatttttgttacattataatatttaaccataatgtaaaatatatatatgcacaaattgtattcttcaattcgtgctggagcttgctggaactcgatcaccacttctaagttctaacttagtaattgaagtcgtgatatattttattgacatatggtattaatttagatttaaaacagtttttagccaaggaattgtaagtctaaattcatagtcttcgtagccagaaggcaacctttgatattatttttattatctatatctttttttttttttggacaaagcttgtatctacatctaactgagaaaaaagaatgtttttctttgtcatattattgttctcaaattctgattatacaacttttgacatcaaatcataattatgcaatcaaacaaacaaaccaaaaaagaaatatgcgactagcgtaatttttgcgccacaatgtattttatatgcatagcaaatcattagaatcctagtacaactgtacaaagttcgagttggacacctagcagcgataattcaaaccatgtttccatctaatgtaacagtatagacttagtcgtctatcaattttaggtgcaatcattcgtattaaaaagaaaacttagtttttttttcatactgtttagaggaacaaaatacatgtaacaagaggtacatttttgtttgagttaaattttacaatttttgaatatatagtcaacgaagaccgaaaaagttgagtcaattcctaagaatcaatctgccacatgcatcgccgtgcttgaagggcggctcactgtcttcttgcttattactacagttaaatctttttttttcaacatctaatgctatacttttaatctataatatatattagatgtgacttaaggaatttcaatagttatacataataataaaaatgaatatttgttagtgttacaaactgtgtgtcataatcatcattcatcaggatttcaaaaatatctcaaaattgttgtaagttcatgtaattcgaaatgaatgtgcactataagaaataaatttacaatttaaaaaatgcttcaatactggttacaaaaaaaactttcaatactagtattatactacttacttagtcaaaaaagtttatgaatatggttttttctgtatgttaatatttttaactgaaaatagtaccgacataacaagtaaagatatctttatttaaagtaacaaacattaatttcacttcaaattctcactattaaggattcctctctttgtagccacatttcaccatcactactttgttttcgcatatctttaaattttgtatacgtagcaaactctttcgagaaaacaagatg

SEQ ID NO: 25664 - DNA, 3003 bp, Unknown; identical to SEQ ID NO: 25663
  misc_feature (1)..( 3003): 2750-1469P.txt file - cDNA_ID_2707509; gDNA_ID_2214517; Annot_ID_184484

SEQ ID NO: 25665 - DNA, 3000 bp, Unknown; identical to SEQ ID NO: 11796
  misc_feature (1)..( 3000): 2750-1469P.txt file - cDNA_ID_2707520; gDNA_ID_2214517; Annot_ID_133974

SEQ ID NO: 25666 - DNA, 3000 bp, Unknown; identical to SEQ ID NO: 11810
  misc_feature (1)..( 3000): 2750-1469P.txt file - cDNA_ID_2707520; gDNA_ID_2214517; Annot_ID_184478

SEQ ID NO: 25667 - DNA, 3003 bp, Unknown
  misc_feature (1)..( 3003): 2750-1469P.txt file - cDNA_ID_2707532; gDNA_ID_2214517; Annot_ID_133966
tggtcacttggatttcggctcatatgctttatctgtgtgacgaatttgaagaatattcatcctacagaaccaaaagaactaaaaggaacattcaaaagaatagagaatgtgtgaaaacaatttggcacaagagattatgcgaaagtcaactcttgccctataagacaagtaatcacaaagtcaaatttctcaaaatttgtctttttctcagaaataaattataaacaactgatgtttacatatgttcaacttcaaatttcaaacacgattacttaacaaaactacgatagtctctgatatattgcggatatatatcgccagcccccacctcttcatcttggtctaacaaatcttagtgaccaacaaagtgattcacacaagaggacatattttggtgtatcaattcttcttcttcttctttttggtcaaaatggtattatcaattcttcaaaatctcagattttttacctaatgattctctattggtgtgtaggtttcatatctgtcaacttatcttgcaaatcaccgcatcactttcgtttcttttaatatgattttttctcgggtcaaacatatgtacgcaattaaaagttttctaagaaagaatcacattgcctagagtttaccactggttgagtaatatgctagagagagtcatgtcgctgcgcgatcgagttgggtttagttgataagcaatgaactgctcaaggcaagatcgagttggagtgaagagtaatgtatagagatcactaccctaacaagctaaccctcaactgagtaatataaaagatgctatgatccaataatataacaatactgtttttctgaatcaatctttcattaagatgagcttttaatatctttaacaaggaaggaaaacaaagcaaaaactcacacgagctcaaattcaaacacaaaaattgatgtgatcaagataaaagcttacaccttaatagcatacttccttattggaaagtacatttctttcttcttctccctctctgtcttcaacgatgcctattcaaatcagccagcaattattccattcagtacaataaaacacaggatttgttcatcacttctcaatatcaatctgaatcacactaaagaatatacaaatacctgatgcttagtgagtctcctcctgatggctctagtcttcttgggacgaagatcaagaggcaaaagcttcttgttcttgtatgcctctctcaaagcagacttttgtttctgtgagatcactgtcaacacctgagcaatcgacttcctcaccaccttgctgaaatcaacataaaacataacccatttgagatcaatgtgattaaaaaccagtgaccgaacaatccaacagtgatataactaagcaagtaagctactttatctatctatagaggataatgataggacctaggatacaaaaattacactaaacaacttgcaaaacataagcagaacttaggtaataatatatgtccataacaacacataaacataattaaacctagctaaatatgattactacataaccctgactaaccactaacaccagcaagatcataaacaaagctatgaagaattcagaatccaaaaaaaaaaagagttaaccaaaatcagaaaaatgtaacatttgatcacacaaagtgtgtatagaggaaacacatacatcttagagagcttattaggagcacctccagtgaccttagcgacacgaaggagagcaagctctgccttaaattccttcaactgacccgaaagatcagcttttgatttctccctcagctcatgaaccttgattctcgctgttcagattccatttcacaatataaaatcaaatctcataacctaaacgtacgaaattgtgtgttaacagaggaaaaagtttgagaatttaggcttacccattgcgtcttcgagctctctctagcgtccctttactcttttgcggtgttgttataagagattagaaaccctagagaaaaatgaagaagaagacggctaagagttaataatcagattttaggttatatttgggctttgactgtgagtataaaacccaacacacatctaatgggctgagttttatatcttatgggccagggattataaaatcctagtagtgaaatcttgtaccaaaatcatttattaatgcaagaaaatactaaaaaagtgaatagagagttgtataattagacacgcgccgattgaactgttattttttgtttttgaaggagaattatttgatttcaaatataataataacataatttagcttttcagaataaatttcttctcttttctttttctttttgacatgtctaattagattgtgaatgaaggagtaatcttagaagaagttttggttaaagacgttatcgtaatcaataatgtgatggaaaagtgtaattatgagtcgcgtaatgaaccaaccatacatttgtcaacaagttgatacaaagacataaatgcatgtttatccatccccaagttcaatattcaaagactaaattatgagcatttcataatgactcagtatgccatttggtcaaatgaaaaaccaagccggtcaagcaccaacggctgaaacattcatattcaaatatgaaaagtaaaatcttggactcgttcaatgtttctggtgacgtcatctactacgaggaaaatatcccaaccaaaacgcagcgtaattgcatggtcccctgtttttttggggtcgctttattcctctgtgactcctctcttttcatcttctataaatcagacaacaactaactctttccctctcgctctccgcataaatccctttgaaacaagatcatatcttaactttgtataaaaacaggacaaaaaaacagaggatcatggttatgtatgaagaggttagtgtctttatatatgtttccaagctcatgtagagctctgtgactgtagaaaagtgatagttattcctttctttttttgatcctataatctcgatctagcagaatcattctattaggtctaatg

SEQ ID NO: 25668 - DNA, 2767 bp, Unknown; identical to SEQ ID NO: 11823
  misc_feature (1)..( 2767): 2750-1469P.txt file - cDNA_ID_2707544; gDNA_ID_2214518; Annot_ID_134014

SEQ ID NO: 25669 - DNA, 2767 bp, Unknown; identical to SEQ ID NO: 11823
  misc_feature (1)..( 2767): 2750-1469P.txt file - cDNA_ID_2707544; gDNA_ID_2214518; Annot_ID_184530

SEQ ID NO: 25670 - DNA, 3003 bp, Unknown
  misc_feature (1)..( 3003): 2750-1469P.txt file - cDNA_ID_2707548; gDNA_ID_2214518; Annot_ID_134013
aactgtaaagctgggagggaacttctcttctgagaaagacatgaatatcaatcaatgtaagttgccaattgccataactagtgtaaggaggatcacataaaaacaatcacatacttccttcagtctgcttccatagccattctgaaaccgcagaatcatatgcagcaacatgctgaaaggccttccacgcaagttttctgcggaattgttggtcgctctgtcctcctttgagatactccaaaacagcttgataatctcctgaatcgacaacaatgagaacgtctttgtggttctgttgaaaaaacaatagaaaatatacatttataatcttgaaaataatcttgcaagtgtaaagaaaaagtctcatatgcacagatatatgtattaccttagcagctgctctaatcatagcagggccaccaatgtcaatgttctcaatcccatcctcaaaactgatcccacctggagcagtaactttttcatagaacgggtacaaattgacaaccacaacatcaaatgtacctgtcatagaattaaaaaaaaaaaaggtacagttaaacataaggagacactataaatgacttagtctcaagcttaatgtagaggatcaatcaaaggtcaaaactcaccaatcccatgctcattaagagcttccatatgatgctccacatcccttctagcgaggataccaccatgtatgtttggatgcaaagttttcacacggccatcaagctttaagagaagaaaaaaaaaaaggagagctaagtttaatatactaaactcaacaaaacaatggtataaaccaaaacttaaatataaatatcagcgagatcacaagaccaaaacttttagcaagagcagcgagcataagagaaaagaaaaacatgccatttctggaaaatgagtaagcttctccactttggtcacagagactccagcattctccaaagtagaggcagttcctccagtagaaacaatagtgtatctacacaaatatcaatgaaaaaaggaatcatttacatataagatagaaacaaaaccaaaatttgtatagttctaagtaagagagagttgtgaagaacacataccccaattcttgcagaccgttgccaagagaagccaagtccctcttgtcagatagagatatcaaagcttgcttctcccctgattcaattaaagcccgattatttgaaaatcactaaaacgtaactgaaaatcgatcactgaatttgaaattgcagcaaaaagaaaaattgtaaaccagaggagcctgaggattgcggctgattcctctgagcagtctgagactctgccatggctcgaacagcaacgaaacttggacacagcgacgtacgatagacctgctcattgaaaattccactaatattaaaaagtttagcagaacatgaaacaaagacacaaaggaacacgtccacacacagaggagaactcacaggctgagtaaaacgaaaaggcgcgacggattttttgcgaaacaagccgcagagaatatcgccggagcgagcactcacggaggtggcggtggcggctgagctgagcatagtagtctgattttgaaacagtgtgtagtgttgagctctgttaggttttgtgattttgcggctaattttggaaataaattagaaaaaaaaataaaaaaaaaaggaaaatatgtaatttattattggcgtcaggtggaattatgtatttattattatggccttgacagttagattacacctggaatatttggaaaattggaataaagcttctctttttatttcccccaaaaataaaactaaactattttaactccaaattttaaaaaatttagtagaaaccaaaattctcaagtgtaaactaattagtaagaaataaaactttattggatcagagtggtaatattacaaaagactaactatggagatgacgaaagcttcttatgttttatatgatattttatttgcttttcagaattttaaataatgtaagtagataacaattattttattggtaggcataatagtttttttctcgagaatatagttttgtttttcgaattgtcaaaattagaagagagattttaaggaaggacttggcttcttctcctactcatcgatcgtcaaaccgaggacgcttcacagtctctggtgccgcctttcctggtataaacctttttctctacttctctccttctttgcttactcgtcttccttttaggtgtatgctgtttttgaattttgatcattattatcgaaaatctctggatccgatgtgtttccacctgaatttcgggtaatgatactcagatcttgcattttctagagtttcagtggttttgatggcttgatcggcttttgttttttggttgggtagaggtttttagctcagtttttggttcgaaatgacgcttatttgtttcctttttgaggtttggaattgtttcacggacttgattgaattttggatttagttctatgttttgatctgttgatttacactctctcaaagttacgatgggtttgctaatagtttggtgaagttgatcgattttagtttcagcgattcctgttagtttaaacttgaagagactagaaagtagtcattttagctagtttcatgttggaaagtatgcacagtcagatatttgtactggatgatctgtccctgctagagtaaagagttttattggtttgtataccgaaaatgttccttaaatagtatggttttctgagttttagccgtatgctattttggtttttttgttcttgaatatgtttgactacttgagtaaagttactcttctcctatttcaggcacctcaatgagagtttgagttgttcatgatagaagtcgtcctgttctgcagccaaaacgttagaaatttgcgaaggatgcttatgcaaagattttacttgggtcatgatcatgatatgtcgcctacaagcgtttgtgagggagcttatgaactagatagatagacaccttgagaaagaaaacatg

SEQ ID NO: 25671 - DNA, 3003 bp, Unknown; identical to SEQ ID NO: 25670
  misc_feature (1)..( 3003): 2750-1469P.txt file - cDNA_ID_2707548; gDNA_ID_2214518; Annot_ID_184529

SEQ ID NO: 25672 - DNA, 3003 bp, Unknown
  misc_feature (1)..( 3003): 2750-1469P.txt file - cDNA_ID_2707552; gDNA_ID_2214518; Annot_ID_134010
aataattttatggtggtaggaatctaataatattcagttatctagacaaagcaagaaaaacgatatcaattgacatcgtgacaactataactatctattatacacatcgtttaaaaaaaataaaacaataccattaaaatccaatcgacgtatgtaaatcatcatcgttgacttgccaaaataaataataggaaaccttataaaatttgatgctaactaactcgggcgggtttcatccaaattaaatagaaacattgacggaacatggagtgtccaatacacacaagatccaatcattacttcgaggagtcacttcaaaactccaaataacaatgacccaaacaaatttcattggacaatgaataattaacacattattatccacaatcaggatcgtataaactaaaaacctttaattcggggctagtttagaagtcatcactttcccgtgggtcattttgtaatttacatttcccaaattatctcttttagtttctccgacgatgcctgaaaaataccaaacattagttacagtcggaatttcgaaaaaccctaattcagctaaagtttgatcgttgatctaaaagctcgagtgatgaagggaaattggtcgatcgtacgaaaggttcttcatcgccagttctccactctccgttcctcgacaccatcgtcgcgattatctacttccatccgaccgcttgttctggccccaaactcgatatcgtcgctaatcgctagaaattcgttgttcactgcctccaacattggtccatccatcgattttaacttctccaacacttcgcttcctcatcggagaagcctctgttcggaagctggaggtaattaatcaattggttctgctgcttcctgcgtatttgcgtaaatgtctgtgattagcatgatcttggctggaaaacgagattgatcagaggaataagcttgagtttatagtgctaggctgctagctttttctatgggaatcaaaattactaagctctaactctaccaaaagccatttcagcgaatttttttttagaaattgggaatttatctgtgcaagtcagttggagaaaactaaagtttgcatatttaaatgagtatctatctataacgtctctgtgttagaaatgaatctaatcctgcaattatgatgttaggtgaaaatggtgttgttctagtgaaatcagaggaagagttcatcaatgcaatgagcaaagctcaaggtaaaccattacacttactttcttacctcacgctaagtggatgtgtttagtatgatttgctgcttatgtcctcttcttgttatctgtactcagatggatctttaccatcggtcttctatttcactgccgcctggtgtggaccatgtatgttaattcttctgaaagtgagttttgttctgtatggtaatttttttttgtgagtggccttattagtttgtgtttcattttactttaggcaggtttatctctcctgtaatcgtggagcttagtaaacaatatcccgatgtaactacgtataaagtcgacattgatgaggtattttcgtcttgcttttgaactctatgcatatatgtctattttcgttgggtttctgtgattagaaccttctacagtgttttgagattgaaacaaaggagacgattatttggtgtgctgtatagaaccttactcgccacactctgtttcaatgttatgtatgcgatagagttagcgagtaaaatagctgaaccagacaatattagtcaagcttctttacggctctttgcgcaatcttctgtgctcatgaatttttgcttaaaacttaatcctttcttgcatatctgtagggcgggatttcgaacactatcagcaagttgaatatcacggctgtggtgagctttcattaccctgtctttccaactataatctacattttacaattagcaggaataactcatgttgaaacggggatttttatatttgtctcatgaacatatatgatgcagccaacactgcatttcttcaaaggaggctcgaagaaaggggaggttgtgggtgcagatgtcacgaagctgaagaatctcatggaacagctctacaagtgaagacctaatccgttctagtaaagaacgtgttgaatagctgctagttaagactgtccaatcaaatcaaggttaaaaaattcttgcttcctttttcaacaataaggctttatgtagttttctccaaataatgatgagatgtttcatatgatttaaccgatgaattgaagttgggtatgcaaaagacattcctctgaattacaatatacgctaatgatatcattatcattagactcacaatttgagatcaatctagaaataatgaatgcgctgaatcagtttcgtctttgttcccccttgttgttcaggattgtaattgcccttttgttttgtttgttttctccatttcctttgggcttagtttccggaaatttgtttgtgtccgtcggtgacaacttcaaaaaatatcgacaagtcataactttttatcaaaattttgactaagttgtcaagcccttagtcgacactcgacgcccctgacattaaaagtattgactccagtgccctgtgccggcctaaaagagggcctattttgggactcttttgctggcaaattgcgccatatgtagtggagtaaatgtgtaaaaaaacagttgaatcaacataaccattatttgatcagaaaagaaaacaaaaatgtggtgtaatgagaggaggatacggtatgtggaaacttgatttacttaatttcaaaggagacctacggagtcaaagagagagttagaccaactaattgtccagagggattgagattggaggaagggtattatggtactttacgaatactattacgttgattaatttggatactttgtcttcttcttcgtctctctcccctcgcgcatcttcggtgctataaaacaaactcacgactagatcatttttggagtgagatttacgtttgatagactactacaatg

SEQ ID NO: 25673 - DNA, 3003 bp, Unknown; identical to SEQ ID NO: 25672
  misc_feature (1)..( 3003): 2750-1469P.txt file - cDNA_ID_2707552; gDNA_ID_2214518; Annot_ID_184526

SEQ ID NO: 25674 - DNA, 3003 bp, Unknown
  misc_feature (1)..( 3003): 2750-1469P.txt file - cDNA_ID_2707556; gDNA_ID_2214518; Annot_ID_134009
gtagaaacataattagcttaccataaccaaatttgaaataaaaaaatcttcagatacagatatatataaggaaaatacctaatgcatatgtttgacggtttgaccagtttgttggtttccacaaatgcttaataaggaagtcactgtaattgcattttgatgggataagcgttattaaaataaaacccaactccatttatccatcaaatgtgtaaaacccatctgctacatttcaaagattcacaatctcacacatacttttttctttctgaaaccttcaaacgatttgttttgacaaaaaatagttgtcatttttgttggtcatgctcaaaagaaaaaaaacgcaaataagaggcatgacaacattaaatcccaattacaaattgtaaaaaagaaaaaaatatatattatttacactcgttcatctggtcggagccgttcgaaagaccgttcaccagcttcaatcgatgtcggaagattcttcggcgcatctccggagaaagtagaccgtacggaaccactccggaaagagaatgaaaaagacagcgaatgaagccgtcgattgttattattactcttacgtccgtacgggaaagcgcttctctcgctcccgacgctaccgcttctataaccgctccgtgaactcctcgcctgaggtagtaacgccacgtgtcccatcgtcctcgatgtcttcataagttgccgtcgtacatcatccggtaacctcaacgtaaaccggtctagattcccagccggttgaattaacgaatgtccggtcgagtgcgatctcgggaacaaaattccggttatttgccagctggataaccccgttgactttgaccgaggtgttatgttactattgctccacgtcacagcatccagcaaatgcgcgtccgaagattccaaaaccattcctctctcaggatccgtactcgacgaaatcgtacctggatccgtacccgagtagctttcagtgctgtcgtcgtcgtcaccttgttggtttaggacaagatccgctctacagagaggacacgtggagtgttctgagagccagacgtcaacacaatcggcgtgaaacacgtggcaacaaggaggcatcaaacgcagcgtttcgtcgtcttcgaattcacagagacaaaccgcacactccacaccacctttcccgatcctcaccgccttcacctccgagtaaagaaacgtcgggaaagtttctatagcctccgcgtcgagcccacgcgccgtcaacctcctgatcctgacgacctgagactcggcgtctgcgtcggtggatcggaaaatggaagaacgtgaaaactgtgcgttgcttcgacgacagaagatggaaccgaagaccatgaaaaagatcactaaaaacaaaaccgtgattacaacaacaactggatcgttaggtttcgtttttgttgttccgggtggtgtggtctgagtctgaccgaatccatacggtactgactggagcaagagcaagaggagaagaaagagaaggttgtgtgggatccaacggctggactttgtgtcgaggatcgccatttgaagatcatcgtatggaaagtggagaagaaaagggttttggtgtgaaaaatataaggtcgatagagagagtcaacgtctggtttgtgaaatccacggaggtgtaagagtcattgcgtaactgtggatcatagcacttgcttattgtttattgataatattttttttagttaaaagggaattttatttgatttgatctgttcacaccttttgactttgaagaagtctagtgtgtctttttgtacttttacaactaggaaataacaccacttctaaagatgaaaactttcactactatacaattagtggtgacaatctcttagaaatgattagtatatagagattttaattaaaaatcctaacaattgtttttgagaattatatggtgatatatcttatctaaaacttcaaaatcttttctaaatgagttaatataagctaatgttttgactcctaacatcttatacattaaagtttctgagataaatctctattcttagtaaactaaactaataactgatccgcctaatcaagtatcataataaattgcaaaattttctaatgcagaatcatcacaagttaaatttttgggtttttatgtttagtcttcttttactttttatattacaggagatacaatagtttacacgaagcctgaaagtgattccaacaataatgaaaattagaaatttcagctgtgttattactcatagttacttgatgatcaataaccaagacatctaatatagaataggcatccaaaattaacattggacaattcgtatatatgatataacgtatataaaacttaatctcgaaccataaaacgagtattatctctaaccatttataaatctaataattttatggtggtaggaatctaataatattcagttatctagacaaagcaagaaaaacgatatcaattgacatcgtgacaactataactatctattatacacatcgtttaaaaaaaataaaacaataccattaaaatccaatcgacgtatgtaaatcatcatcgttgacttgccaaaataaataataggaaaccttataaaatttgatgctaactaactcgggcgggtttcatccaaattaaatagaaacattgacggaacatggagtgtccaatacacacaagatccaatcattacttcgaggagtcacttcaaaactccaaataacaatgacccaaacaaatttcattggacaatgaataattaacacattattatccacaatcaggatcgtataaactaaaaacctttaattcggggctagtttagaagtcatcactttcccgtgggtcattttgtaatttacatttcccaaattatctcttttagtttctccgacgatgcctgaaaaataccaaacattagttacagtcggaatttcgaaaaaccctaattcagctaaagtttgatcgttgatctaaaagctcgagtgatg

SEQ ID NO: 25675 - DNA, 3003 bp, Unknown; identical to SEQ ID NO: 25674
  misc_feature (1)..( 3003): 2750-1469P.txt file - cDNA_ID_2707556; gDNA_ID_2214518; Annot_ID_184525

SEQ ID NO: 25676 - DNA, 3003 bp, Unknown
  misc_feature (1)..( 3003): 2750-1469P.txt file - cDNA_ID_2707609; gDNA_ID_2214518; Annot_ID_133995
agcaagcaccagagatccgtccatgctcactgagttcaggtcttggagcttcacctagtctaccctcaggatcagacccaatcacattgaaatatctgaagaaaaccaatttgaagacagaatgaactcaacttcagggcaagagaaaacaaacacagaggtcacacacacacacacataacagaattaactaacaaccttaggatcataactgccataatagaattcttggagaaatccaagatgatatcttctgccatctttttagcctttccatatggattgattggaacctgtggagtttcctctgttattggcattttctcaggctctccataagtagcacatgtgcttgaatatatcaaagtcttcacaccatgagcagccattgtctctaaaactaccaatgtgttcgatgtgatattgtgataatacttgcaaatgacagaacacaaaatattatttacatcaatcttacagcaaaggttaaatcattttgagaaggaacaaaaatactcacttgagaggaaactgtgtgctttctccaacataagcaacagcagcaaaatgcatcacagcgtcaaatgcgttttcagaaaatattttgttaacctgaaagaatttcttatcaagaaaacacacacaaaaaagcttgtctgtgtgtttatggtggtcttatatctaaaatcacaatgaaggatcatacagcatttgcatctccaagatcagcataaatgaattgaagctttccaggttccggaaacagttgttgcaagatcttgactgcaccgaggttccctcgagatagattgtcctgccaaaacatgaaaagatttacttctttacttagatacaacacgagaagcatgaatctatgtaaggcaatggagatgtatgtataccacaatggtgacacggtatgaatcttttagaaggcgtaaagctgcatgtgacccgatataccctgcaccaccagtgactagaacatgtgtaactcctggttcacttcgagaaaactgaaagatgaagaaaacattactactacaaaaatgagacactgtatcaatatcaagttaagtacatataagaagtaataccacgcttggggtattgaaggttggggattggttgagcaagagaatgcacattgctgtaagtgtcatgaccaaaacaatcttccccatgtaattgttgttcttctttgggtctgcaaaatccaatcctacactccaaaaatcatcaacatgtgtgaaattttgaatccaaataagaaacacaagaaaagcttatgactttggagctaactaataagcccccagaaaatctaaaatctctatcaacttaccaaccacttctaaacaagtaagcaaaatatttcagacaaataaaaaaaaacagtagaaaaatcaggttttatcataaaagtctaaaagatattcctgtgtgtaccttcaaaagacatagatctgttttgcctcccggttctagctctgcctaaattcagcattttgattctgaaagtacacggcgtagtccagtttcagctgtaagagattaacaactcgaaatatttagaaaactcgcacctgcaaaaacctcagtaactccagtttgggtgggaacatgtaggtctttcaaataaaaatgaaaatgcagaattcacaccgacacagaatttcacaacaacaaaaaggccaaagttcagcctgtacatgaggaaacagaagaaaactgtagaaagcaaaaatgttgtataatctggacttgaccaagaatctctcttctatagtaagaaagattcgatctcaattctaagtggaaaaggttagaacgacttacgtacaaaggaggaaagtaaagagagtggtcttgacggtgaaagcgagcgaagggaacacgagacacgagacaagagaagagctataaagttgaattaaatgattactttattgagatttttagacacaagtaacgaatgaaattgcaacaagtattataagggacgcggtgattggaacgagggagctccggcacctgtgcgtaccgacgaactctctgctgcacatgtcggcaaaagtctctacgtggcttttactttatggccaaaacttgactacctcttgaccaacatattatagtacaacaaaaatttacggaaaatattagtataatgaatgataagcaaaacaaaatctattgtttttggttgtaatatttgtaaatgatttttagatagttcgataatttgctagttataattagaaaaatttcgaatagagttataaagagtagacctttttgtatatagtaataaaaataattggctataaactatgttgacttcataacattactacgtcttcttaaaaacaaaaacatgactacatcttgatcaagaaaattaaagcaaccgacagttccatgcacattgactttactagatctcgagaccatttattcctcagttgtatagatttgtttatcttttttgaatttaatgttagaaaaaaaagaagagaaattgctttcattgagagttgaactcaagacctcctgcatactatatatttgtttatcaaatatacattcattgattaaactaatttcatatatcataaaatttgaatcgtacaaagatcaccacaagtcagaagactaataaaacaccactaacctgaacaagcacatgttctttgtattaaaaatgtgagagaataattcatcatgaaaaagtcataatcaaagtcaaagcctaaccctttttaagtcttttcggggccgtcttggagcaggcctaacaggctagcggccttttaagacttactctactacatttagaggtcaagttataatggatcaaaaattgaaattgaagagaaaatgtaccaatctaataaactaatcaaactatgtgtaccaaaacgtaaatatcagaaacatcctatagatggttcgggtcctctggttcgccagtaaaattatgaccgcagactgaaaaaaatg

SEQ ID NO: 25677 - DNA, 3003 bp, Unknown; identical to SEQ ID NO: 25676
  misc_feature (1)..( 3003): 2750-1469P.txt file - cDNA_ID_2707609; gDNA_ID_2214518; Annot_ID_184507

SEQ ID NO: 25678 - DNA, 3000 bp, Unknown; identical to SEQ ID NO: 11818
  misc_feature (1)..( 3000): 2750-1469P.txt file - cDNA_ID_2707619; gDNA_ID_2214518; Annot_ID_133988

SEQ ID NO: 25679 - DNA, 3003 bp, Unknown
  misc_feature (1)..( 3003): 2750-1469P.txt file - cDNA_ID_2707627; gDNA_ID_2214519; Annot_ID_134028
gtcaactttacttgctcaagccatccccgcaaggtagaaacttctgtggtctttctcgttatttcttatgtaccatgtttttggtcgtttgtgtagtttcttctaaccttccacacacttgtcttgcgaattccttccacagcagagatgttaaatcaggaatattcaggatgtagaaacttctctgctctttctcaagtagaatgcacttgtggaatccctcagatcagatttcattggtaacgttcgttaacttcaacaacaacactttactaaacatgtgctaatcaattgtcatacgcttgtatttcttcgattcatttttatcttatgcaagtgttttctctattatgatttatttagttttgcataaataaggacactccttcggagtcagtataagaaaactataacctaaaatataaattaggcaaatgtccactcacccatccaaaattccattgtaaataaatgtttctttcaaataaatgaaaaaaaaaaaaaaaaacaagttggaagaaggaaccaaccaagtaattgccagtcaaaggaggcgactcacacttgaaaggataagctgacatggcagacaacgatcctgcgtagaaattgcgtgaacgtggaaaagtttgaggatatagccgtcatttcaaataattcgggtactattatataaggcttcaagtcctggttcgtagtacaaattgtctcacaaactcttctttcagtcatcacagaaaacaaaaaaaacaatggcggataagctcactgacgatcagattacagaatacagggaatctttcaggttattcgacaagaatggtgatggtatggttcatcaactctttccatttaatcgtaatgttggatcatgatcatcttcaaagcaatgaaatgactaacacaagtccttgattactttttgtaggttccattacgaaaaaggagctcggtaccatgatgcgttcaatcggtgaaaaaccgacaaaagctgatcttcaggacttgatgaacgaagcggatttagatggtgatggaaccatcgatttccctgagttcttgtgcgtaatggctaagaatcaaggtcatgatcaagcgccgcgtcacactaaaaaaacaatggcggataagctcactgacgatcagattacagagtacagggaatctttcaggttattcgacaagaatggtgatggtatggttcatcaactctttccatttaatcgtaatgttggatcatgatcatcttcaaagcaatgaaatgactaacactagtccttgattactttttgtaggttccattacgaaaaaggagctccgtaccgtgatgttttccctcggtaaaaaccggacaaaagctgatcttcaggacatgatgaacgaagtggatttagatggtgatggaaccatcgatttccctgagttcttgtacctaatggctaagaatcaaggtcatgatcaagcgccgcgtcacactaaaaaaacaatggtggattatcagctcactgacgatcagatcttagaattcagggaagccttccgcgtattcgacaagaatggtgatggtatggttcatcgtccctttctcgctaatcgtacatattggatcctgatcatcttcaaagcactgaaatgactaacataagtcattgcttactttttgtaggttacattaccgtgaatgagctccgtactactatgcgctcccttggtgaaacccaaacaaaagctgagctccaggacatgatcaacgaagcggatgcagatggtgacggaaccatcagtttctctgagtttgtgtgtgtaatgactggtaaaatgattgacactcagtctaagaaagaaacgtacagagttgtgaatcaaggtcagggtcaagtgcagcgtcacactagaaatgacagagctggtggcaccaattgggagagggacatagcggtcggggttgccagcaatatcatcgcttcgccaatttccgacttcatgaaagataggtttaaagatttgttcgaagcgctgttatcttgaaatgacacgtcagtaactttatgccaatagggtctgacaattatgttagatctctctcaaaaggcgtttcatctaatgacaataatttctatgtaataaatttattgcatgtgttagtgtgttaccatcttcagttgtgtgcaatttattaaaatgagtttgtaatatggtttcagtatcgaatataattggggtattaatgtatcttttgagaaaaacattgaaacgtagcagaactaatcattgaaaactggtagctcactactaaaaattgatctaatatgataaatcggttaatgatctggcacatacagtgatcaaatcagctaagcctcatatcttaccatgttaatcaattgtcataagcatgtatttcttcgatttgtttttatccgatgcaaatttttgctttgtgattgttattgcagaaacaaggacgttcgatgcacttccaaaaaacatataatgttacagacaatgtagtattaaaaagtagtagttaaaagcaaaatctttaataatttagacaaatgtagcgacagctccacttaccatccaaacgaatacttcacaattgataattctaataaatgtttttttttaaaaaagacagcatttaacaataacgagaaaacaaatactaacgaattggaaccagaaaccaacgaaccaaggaaaatcaaaggaggcgactcactggaaaggaaaaggtgagatggcaaagtcaacgatccgcgtagaaaccgcgtgaacgtgtgatccatctcttctcatgtcaacctggcgcttaaatttaaaactcaaatttatggcattctcgtaatttcatccccaaaccgaggtccttcccgacattaacaataatccaggtaaataaaacgcctcaagtccgcattcgtagcacacgaatcgtctcacaaactctttcgtttttccctttttctccaatcacagaaaagaaaagaaaaaacaatg

SEQ ID NO: 25680 - DNA, 3003 bp, Unknown; identical to SEQ ID NO: 25679
  misc_feature (1)..( 3003): 2750-1469P.txt file - cDNA_ID_2707627; gDNA_ID_2214519; Annot_ID_184553

SEQ ID NO: 25681 - DNA, 3003 bp, Unknown
  misc_feature (1)..( 3003): 2750-1469P.txt file - cDNA_ID_2707635; gDNA_ID_2214519; Annot_ID_134027
tgtttttataaactatttattaaaagttagtataagaaaactataacataaaagtaaaatataatttagacaaatgtagcgattggtccagttactcatccaaaattccaaatgaatcttccaccgttgataattctattccattgttttcttctgtagaagaccatatattattaagtctctagtccattgtcaataaatggaaatacaaaaaaaaaaaaaaaaaaaaaaagaagaagaagaaaaagacagcatttaatgaacgaaaataatattaatgaatttggaagaaggaacgaaccaacgagaaaaatcaacgaaataatttagacaaatgtagcgattggtccactacccatccaaaagtccaaatgaatacttcaccgttgataattctattcaattgttttcttctgtagaagaccatatattattaagtctctagtccattgtaaataaatgtttctttcaaataaatggaaatacaaaaaagaaaagaaaaaaaagacagcatttaatgatgataacgatttggaagaaggaaccaaccaattagagtaacaaaccaaggaggcgactcacatgaaagcaaaagctgacatggcagtgaattcagttttataaaaaaggcttcaaggccgagagttcgtagtacaaactcttctctcagtcatcacagaaaataaaaaacaatggcgaataagttcactagacaacagatttcagagtttagggaacagttcagcgtatacgacaagaatggtgatggtatggttcatcgtctctattcctctaatcgtacatattggatcctgaatcatcttcaaagcactgaaaatgactaacacaagtccttgattacttcttgtaggtcacattaccacagaggagttcggtgccgtgatgcgttccctcggtttaaacctgacccaagctgagcttcaggaggagatcaacgattcggatttagatggtgacggaaccatcaatttcactgagttcttgtgcgcaatggctaaggacacttactctgagaaagacctcaagaaagatttcagactctttgacatagacaagaatggtttcatctcagctgctgaaatgagatatgtgaggactatcctccggtggaagcaaactgatgaagaaatcgatgagattatcaaggcagctgatgttgatggtgatggtcagatcaactacagagagtttgccaggcttatgatggccaagtgagatttaaacaacttttccgcttcccctttttttactacctcttatctaatttcataaagaatgttcctctcttgttcttaaatttcattctgagttcttgtgtgtatggctaggaatcaaggtcatgatactaaatatgacacaactggtggcactttggagagggacttggcggccggggttgccaaaaatatcatcgcagcgccaatgaccgacttcatcaaaaatttgttcgaagcgttgttttcttgaaatggtacatcagtaactttatgccattagggtctggctggtatgttagatctctctaaaaaggcgtttgatctttgaaaataatttctatgtaataaatttattgtgttaccatcttttcttgcatgcaatttattaaaatgagtttgtaatatggtttcagtatcgaatataattggggtatcaatgtatcttttgagaaaaacatttaaaacgtagcagaactaattattgaaaactggtagcattactaaaaattgatctaaatcggttaatgatttggcacatacagtgatcaaatcagctaagcctcatatctcaccgtcccagagttcttcaagactcttataaggactcatctaatgaataatgacatgcctcgcaccaacctgccctgcaacattgaaaacacacgtctacaatttcgataacccaagtgttttgagcaaaacaaaggacgccctttgacccatttggactacaatgtgtggaaaattactgcatgttcaatatcagaaaacttggataacatgtcttcgatatgggcttttcttattttgtacccgtgtaatttcgctggcccaaaatccaaagcaacaagggtaaatttgtatgcagtacatgtggcatgttgggtcatatggaaacaggtcacaagactcagattctttacattgcggcgggtagtagtagctttctagtctaccttgagattgcccctgcccgtgattcttgagtcgggcacaggaagtggttttctgtcaactttacttgctcaagccatccccgcaaggtagaaacttctgtggtctttctcgttatttcttatgtaccatgtttttggtcgtttgtgtagtttcttctaaccttccacacacttgtcttgcgaattccttccacagcagagatgttaaatcaggaatattcaggatgtagaaacttctctgctctttctcaagtagaatgcacttgtggaatccctcagatcagatttcattggtaacgttcgttaacttcaacaacaacactttactaaacatgtgctaatcaattgtcatacgcttgtatttcttcgattcatttttatcttatgcaagtgttttctctattatgatttatttagttttgcataaataaggacactccttcggagtcagtataagaaaactataacctaaaatataaattaggcaaatgtccactcacccatccaaaattccattgtaaataaatgtttctttcaaataaatgaaaaaaaaaaaaaaaaacaagttggaagaaggaaccaaccaagtaattgccagtcaaaggaggcgactcacacttgaaaggataagctgacatggcagacaacgatcctgcgtagaaattgcgtgaacgtggaaaagtttgaggatatagccgtcatttcaaataattcgggtactattatataaggcttcaagtcctggttcgtagtacaaattgtctcacaaactcttctttcagtcatcacagaaaacaaaaaaaacaatg

SEQ ID NO: 25682 - DNA, 3003 bp, Unknown; identical to SEQ ID NO: 25681
  misc_feature (1)..( 3003): 2750-1469P.txt file - cDNA_ID_2707635; gDNA_ID_2214519; Annot_ID_184552

SEQ ID NO: 25683 - DNA, 3000 bp, Unknown; identical to SEQ ID NO: 11842
  misc_feature (1)..( 3000): 2750-1469P.txt file - cDNA_ID_2707639; gDNA_ID_2214519; Annot_ID_134029

SEQ ID NO: 25684 - DNA, 3000 bp, Unknown; identical to SEQ ID NO: 11842
  misc_feature (1)..( 3000): 2750-1469P.txt file - cDNA_ID_2707639; gDNA_ID_2214519; Annot_ID_184554

SEQ ID NO: 25685 - DNA, 3003 bp, Unknown
  misc_feature (1)..( 3003): 2750-1469P.txt file - cDNA_ID_2707641; gDNA_ID_2214519; Annot_ID_134031
atgttgagagatttagggaagattgttaaatgtcaaatatttaattattcaaagatttttttttctaattatcaaaaacaaacattaaaatctagtggcagttattgtaaataattcccaactataggatttatttcacaaaatggctgctatatagattttttagataaaaccgatcaaactctttttcttttcaattattaaactctttgatgggttaagaaacataaaaacaaaaaggaaaacagaggagaagaatcgaggatccaaaagcccatctaaggtgagagaagaggggtccaaactgagattggaacaaaatcggttttagggtttcagaaaggcccaaattagattcgagtagagcagtcccacagtgactccgacatgacaacacttgagttacacaagaccaccacgtctctatactctaagtctatgccgtacgtcaaaggcaccaactctttcatcacatatattattaatcaatttatacaaaactccaaataattcacgggaccaatactgaatcgaaactaaacgaatttgttaaaatcggactttgtagatgcaaccgaaacagagtaagtacatgaaaatacgtacaactgcatgtgatttattgtgaaattctatgggaaaaaattgaattgacatattatgcaaaatgcccgtatgttacataaacttttatttttgtgtgtgtgacttaacatgagtgtataaatggaactttttttgttttattttgtttcatataagaatttacgatgtaggaaaaaaattagaaatgaaaagaggtggcaaaagaaaaagaagtgggagaaaatagatgtcaaggaatattgatattcttcttttctccgatacattacttttccttccattatcttctagtaataatttaggcttttgctgccaaataactcacaaccaaaaaagcccaccgaggaagatggttgttagggtttttctctgttttatactttccttgggctatcttacgtacgtaaaatatttctttatatatttgtctagtttcatcttcaatctgaaaatattattcaagtttcaggtacgattcatcaatctttgtattgtaaattgactcttctacaaaaaaaaaaatgaaaatagaaataagaaccaataactaaacttaaagaattaaatatgctaatttcaattccaatgtgccaacaatgaacgcaattatttgatcttagactaaaataatcactcgaggaactcgtttcaaaagaaagaaaccaatcaaatcattgccttccaactacggatactgagtttttttaactcattataacacgtgagatcgtcactatctcacgcatttttctttttgggtgggtaattcactatctcacggattacataaatgtttatggattatgacgattggctgcattggaagatgtatagcccaagaaaacatatttaatccagtatgatagccttgtgatgctctataatttaaagcatggttttatatataactgtgacgtaaatatcaaggtctaaaagcattgtcattttatttttatttcgtataaatgaaaactttagtctaaaacacccggtcatgtaaaagttaaaggaaaaagaaaagaatgatagctgattaattatggcaatgtcgtactatactacgtcgagaactattcatgattagatattcatcggtatgataaatcatatatatgtgatgtgcctagtgcagaaacccaaactattatttatttatctactcctttgggctttgacgtgcaagtaaattcttagatgttgttttcgaagtttatgggtaggcaaaccaaaatctggaatgagatatagaagaaacaaaaagaatttcgagaatgaaaattatgtctcattttaaattcaaatgaactataattcataataagaacatatgttaaatgatgtttttacaacttgatatggatttaaattacataaaagagaaaacacaacttttacctactccttctcacaactcattcatttttggtgtaaagttgatatatgtggtggacaagtgaaatttggcaaaacttggtttaacaattggctaaccctatgaaacaaattaggcctttgggtagagctttcttttatcaagtaccaacttcgaggttatatatatgctctgcttttatatattttggcatgattctaggactcttttggatccttcgattgatatttgtagacatagcaaaattggcagtgcaaagataaggttgctgtgtaagtcttgatagaatttagcaaatatagagactactcatctcgtctattctctctctataagttaaaattgatgggtttgatatcaacaagacattacaatatttctaaaacataagaatatctatacattagccatcaattagcaacaaattttttaataatcaatttaccatcataattttgtagcaagttggtgaaggaagactcttttcttggcagccaaacatcacattaatcccattttaacaataaagtgattaaaaactaaaagaactgaataaaataaaaacaaaagaaatgaatgaagcctttggctttgctttttctctttttgattctctccactttatttttcttgttgctactgctaaaaaaagcatcttcttcttccttttttcattcttaagagtcttttgcttttccttgttcgactctctcttttcacttatttagcttttgcttctgattggaactaaactcaattctctccttcttcctcctctttgcgtgtggtttatcttcctctaattaatctattgatctcaattctcaacctttttgttaatttcaatttccttacccctctctgcgttctgggtttccgagtctcgatttctgggatttcttgcttctcacatgaatctgtttcgcaacctaacttattcatcggagtgatatcgatattcttctcaaattttgaagcttttcgtttcgaattgacaattcatg

SEQ ID NO: 25686 - DNA, 3003 bp, Unknown; identical to SEQ ID NO: 25685
  misc_feature (1)..( 3003): 2750-1469P.txt file - cDNA_ID_2707641; gDNA_ID_2214519; Annot_ID_184557

SEQ ID NO: 25687 - DNA, 3003 bp, Unknown
  misc_feature (1)..( 3003): 2750-1469P.txt file - cDNA_ID_2707655; gDNA_ID_2214563; Annot_ID_134898
gatctgaagccttcagctttcgatccaaaagataagatatggaggaggtttccgcgcgaaggaaccaagtacacacctccacatcaatctactgaattcaaatggaaagattattgcccactagttttcaggttagacaaaaaaattcctttacctatttcacattgctacaaatcctgtcttacttattgacatgttttgcttatggtttaattttccaggagcttgaggaagctattcaaagtagacccagctgattacatgttatcgatctgtgggaatgatgcccttcgagaactatcatcccctggaaaaagtgggagttttttttatttaacaaacgatgatcgttacatgataaaaacaatgaagaagtcggaaacaaaagtgagttcttttcaagttaccggttagagagtgttggctggctattaccaaaacttttcagattgcaattactgagcgtcttttttgtcttcttaatgtaggtgcttctggggatgcttgcagcatattataaccatgttcgagcatttgagaactctttggtaatcagattctttggtctacactgtgtgaaattgaatggaccaacccaaaagaaggtagatacaaaaaattaacactttatgtggcatggttttgaaacgtttggtttagtttggtaactctcttggtttgcatataatgcaggtccgattcgtcattatgggtaatctgttttgttctaagtactctgttcacagacgctttgatctaaaaggatcttctcttggccgtacaactgacaaacctgaatcagaaatcgattcaaacacgatcttaaaagacctcgacctgaatttcattttcagattgcagaaagcatggtaccaagaattcatcaggtaaaaaccattatactttactctatccatagtttgtttgtgcttgtttcatttctcatggttcattgtttacatcacaggcaaatcgataaagactgcgagtttctagaacaggagagaatcatggattacagtcttctagttgggattcacttcagagaagcttctgtcgctggagagctgattccttctggagctcgaacgcccattggttcgcttttgtccaatctaaaaactacttttcccatcagcaaaaatgtatcattcacagaaacaaagtaattgtttgtttatctacaggtgaatcagaagaagaatcaggccctcgtctttctagagcagaggttgatgagcttctttcagatccctcaaggtaacacaacataagatatcaattaacaacactttcaaaactcaaaaccgaaacacagaaacatggattttgaatatggttgtgttcttgcaggtgggcaagtattagattggggacaaacatgccagcacgtgcagagagaacgatgagaaaaaacgacagcgagctgcagcttgtgggagagcctacaggagagttctacgaagtggtgatgatatttggtataattgacattcttcaggattatgatatcagcaagaagcttgaacacgcttacaagagcatacagtatgatccttcctctatatctgcggttgatccgagacaatactctaggcgtttccgtgactttatcttcaaggtcttcacagatgacaattgagatggtctcaagttgtctctggcgtttttagatttcttgattcccaagtaagagctctgcaaataggctaccttgcaaatatgaagttcgacgaatcccatttcgtttgttcgtttgtttcaatttatagattttgtatcaagctttgtaatcagctaaaagccatagcaatgaatattcttttttcttgtatactttttatgtaacctttcataatatgattaagattttcttgtctggaaattcttgtaaatgaaatgattttaattatcgtggtggttgattcattttatattttaactatacatttgcagtatagtgttgtcaatgtgacgtagttaacataaaagaaaacaagttgcataatttcttttacagatacttttccactaaaaatacttcatcgacaactacataaaaaattgaagtggtttaaagtttatagaatttacaaatgtgattgtatattctaaattgggaacaaagaatatttgatgcaccaacaaaaagattcgttcaaaaacaaaagagattcttgaaagaaactagagtttttatttctctaaaaggtggaaagtttcttggtcaggtaattagatactgaataaagacatgaagcaaaactttataaaagatagacaactttgggcaatgttagttacgtaggtgatgatgatatcttttgttttcttcaataaagaaataagagtaaaagattccaataattgttctaaggttaacactcgctgttgttgtcgctttatgtggtaaacgtatagagaatctctttgttctcttctgccatttgtccccttacaaaattaaatttgcgactcttcaaacgctatttaattattttaaattgattacgtattcttgaaattgagccaagcacttgccatttatttacatattaactacttattcaacattagatttgtagtctatattcattcaattgttctaaagtacaatctgtaaataaagacatgcgtcaccaaacgcaccgctaaatcttagaaaatcgcgatcgcgtttgaagacaaaagaaagctaataaaactagcactttcatcaactttacaacaacaaccaaataagcgacggcgattagagagtcctgcgtagtcgtgctcactgatcactcttagctcgtgccgtgatctgagactgagaaaacatcaccggttgggttttctctacgattccggtgcaccgtacacttcaccgcagtggataaatctctgcttccattttgactttttgaaaataaaactacaacagtcgcagagagattaaacttcgaaatccgatcgatcgctttctctctcggcgtttcttctcaggagcttcattccatg

SEQ ID NO: 25688 - DNA, 3003 bp, Unknown
  misc_feature (1)..( 3003): 2750-1469P.txt file - cDNA_ID_2707659; gDNA_ID_2214493; Annot_ID_133515
taacgaagcacttctctcttctctctcgtcctcaatacttcggtgtcaatctgatataggaaactaggcattgatatatggttagatacgtggcaatacatgagtggagacagtagctgtgagacgtggcaagagaagattggtcgatgggagtgttagaggaagaatcgagatgcagagatatatagctaatgaagatcatttgcagaagataagaagattttggatttgttgtttatagtttccttttggattctctctgagaatcgttcctcatcgttcgccggagtttcatgttgaactcttgtagatgagaagttgatatcgcgtttcatgaacgttgtatcaatctgtcattttcattaatcgaagcattctatttcgttactctgttttccgttatcactggtatcagagccaatcgtgtcctcggtggagatcaaagctacttgcacgatgaagagtcgtcggcgcatatcgtgggaagagataaacgagagctggttgaatggcttatgtgtgttttgcaaagagccagaagctcctgatcaccacatgaaacacaagaacttagggcttcttatgatctatggtaatgacgatcatctctctaatggtggaattggtgaatcaattgatcatcgttcaatgaatttggtacatgaggaacgagaggagcactccaagttggataatcacaaagatttagtacagagaactatcatggaggaacgagaggagcactccaattctgagattctgaaaagtgttgaacctagggaagtaaatttcgggttagaaaatcttgattctgtggtgatgaacgagtatcaggagcaagattgggttaaacagaacatgaataagaggtttgaggttgaagatgatgttgataggggtcagaaattgttgagtattacagaaaattgcagtgcacaccaagtgttcggtaaaacgtctcaacatgaagaaaagctggaaataaagaagaaagcgaaaggattcaaatcatggatgttcaaattcaaacttgctaagaaaacaataaggaaacgagacaataagggttggttccacacttggagcagaaaagtgggttggaggaagaacaagcctatgaaattgcagtttgtttcacatcaggtgaaagaatcatcacatagggataaagactcttttgcgggaaaaaagtcaattaagcaagagatgtgtgttgaagtggagagcttgttgcagcaacaggatttaagacgcattaaagagacacaagcggatcagggagattcttatgttgttgtccggaaactgttgccgcatcttgaatcggtttgtgctacaaaatcgtttttggacaatgattcaatgtccaaacttgaagcggagttaactgactcaaagatgaggacggctggtgttacacaacatcaggtctcaatttttgtcatggaaactagccatcatcatcaagtgttagaggattttgatatgcatatggtcattgaggatcaacaacctatcgtgacagaagctttgcgtctaatctctaatgatttccactcggacgtggctgagttgtgtgagcagttaacatgtgacgagtctcataaaccgaagcaaagactagctccaaagtcttggatgtttaagtatagaagggaccataagatactacacagccctactatgtctaggaatgtgagaatggttgttttcagaaaaatggaagcagcagaaaggagtcaacatttggttacacacaggtttcatgtgggtccactagaaatggatactcaagactctgaaattggtatcatagaggttttaagaagagtgatgatgctgttccaaaacagtattgtacaagccaagatgatggtgacaaagagaaagaaaacgttttacaagtctaggagattcaagttcaaacatagagttgtaccaagagctttacaatatggttttgaagtcaaaatgaagcaaaaggtttctacagagtatccatgtttgttcttgatcggcaaggaggcagaacttgttcatattttgcttgggtatagggacgtgatgtttaacttgaagaaaaaggggagatttagactctttcagtcattttctaaacaacttctcttatggctgcgacatgatgcattgctaataaaaccgtttctgcttagtgatgagaggttccaaataaagcatacatggagaactaagttcatacactccgtttcatcaattggtgttgggcattatgaatattctatttggacacagagtgacaaagggacgcagctcttttacagcaggagattggttgtttacaagcttggaagtgaggccaagaatgttgtagaggtgtctcaacgtgtgtatcagcttgttaaactgaaatttgccaaagacgaacgaaagcttgaagtcatacagagccaaacctttgaccctgggattggaattgaatcacaagagctacttgagaatacctattcgaactgaaccttgtggtcaaggttcttccaacaggggagttttgatataggaaactaggcattgatatatggttagatacgtggcaatacatgagtggagacagtagctgtgagacgtggcaagagaagattggtcgatgggagtgttagaggaagaatcgagatgcagagatatatagctaatgaagatcatttgcagaagataagaagattttggatttgttgtttatagtttccttttggattctctctgagaatcgttcctcatcgttcgccggagtttcatgttgaactcttgtagatgagaagttgatatcgcgtttcatgaacgttgtatcaatctgtcattttcattaatcgaagcattctatttcgttactctgttttccgttatcacaatcatcctcttcctctaaattctcttcttctctttgctgctacagaaaaagaatcaagctttagaggcaagcaaggactcactcacccacaagtatcctcaccccatctactcatg

SEQ ID NO: 25689 - DNA, 3000 bp, Unknown; identical to SEQ ID NO: 11855
  misc_feature (1)..( 3000): 2750-1469P.txt file - cDNA_ID_2707681; gDNA_ID_2214519; Annot_ID_134034

SEQ ID NO: 25690 - DNA, 3000 bp, Unknown; identical to SEQ ID NO: 11838
  misc_feature (1)..( 3000): 2750-1469P.txt file - cDNA_ID_2707685; gDNA_ID_2214519; Annot_ID_134036

SEQ ID NO: 25691 - DNA, 3003 bp, Unknown; identical to SEQ ID NO: 15537
  misc_feature (1)..( 3003): 2750-1469P.txt file - cDNA_ID_2707689; gDNA_ID_2214519; Annot_ID_134037

SEQ ID NO: 25692 - DNA, 3000 bp, Unknown; identical to SEQ ID NO: 11352
  misc_feature (1)..( 3000): 2750-1469P.txt file - cDNA_ID_2707699; gDNA_ID_2214491; Annot_ID_133457

SEQ ID NO: 25693 - DNA, 3000 bp, Unknown; identical to SEQ ID NO: 11345
  misc_feature (1)..( 3000): 2750-1469P.txt file - cDNA_ID_2707710; gDNA_ID_2214491; Annot_ID_133456

SEQ ID NO: 25694 - DNA, 1898 bp, Unknown; identical to SEQ ID NO: 11871
  misc_feature (1)..( 1898): 2750-1469P.txt file - cDNA_ID_2707714; gDNA_ID_2214520; Annot_ID_134051

SEQ ID NO: 25695 - DNA, 3000 bp, Unknown; identical to SEQ ID NO: 11864
  misc_feature (1)..( 3000): 2750-1469P.txt file - cDNA_ID_2707718; gDNA_ID_2214520; Annot_ID_134048

SEQ ID NO: 25696 - DNA, 3000 bp, Unknown; identical to SEQ ID NO: 11862
  misc_feature (1)..( 3000): 2750-1469P.txt file - cDNA_ID_2707720; gDNA_ID_2214520; Annot_ID_134047

SEQ ID NO: 25697 - DNA, 3000 bp, Unknown; identical to SEQ ID NO: 11862
  misc_feature (1)..( 3000): 2750-1469P.txt file - cDNA_ID_2707720; gDNA_ID_2214520; Annot_ID_184585

SEQ ID NO: 25698 - DNA, 3000 bp, Unknown; identical to SEQ ID NO: 11860
  misc_feature (1)..( 3000): 2750-1469P.txt file - cDNA_ID_2707728; gDNA_ID_2214520; Annot_ID_134044

SEQ ID NO: 25699 - DNA, 3000 bp, Unknown; identical to SEQ ID NO: 11860
  misc_feature (1)..( 3000): 2750-1469P.txt file - cDNA_ID_2707728; gDNA_ID_2214520; Annot_ID_184582

SEQ ID NO: 25700 - DNA, 3003 bp, Unknown
  misc_feature (1)..( 3003): 2750-1469P.txt file - cDNA_ID_2707736; gDNA_ID_2214520; Annot_ID_134040
cttccaaccatttttatgctggcggagattcttattccggtatgattgttccggccctcgttcaagaaatctcgaaaggtatcatcacatacttttatttgaatatcgtttaaccgtgctctttaaaataacacactatgatgcaggaaattatatatgttgcaaccctcctataaatctaaaggtaattgcaatttaaatgctctttgtaatttcgtaagtatattgatttttaaaaagtttcgatcaactaaaaatcactaggatatttttttgtacactagaaactgatagttatgtgtcgacaaaataaaagagattgataattgtgtatatatataatatgtttttgttaagttgataattaatattattcttaccaaaaacagggttatgtactcgggaacccgataacgcacgaagacgacccaaactatcgcattccattttctcatggaatggcactaatttcagatgaactatacgaggtatgaaatatgtggcatgcttaaattcgactagtcttgttatccttggcatttttcacaactctttttaatgttaaaaacattttcttattaaaaaaaagtcaattagggaagcctgcaaaggaaattatttcaatgtggatccacgaaacacaaaatgtttgaaacttgtcgaggaatttcataaggtacacattgcacactttgaaatttggtcgatgttcagtaatttatcagatagtgaacatctaactcagatttgtttttaataaacttacagtgtaccgacaaactaaatgaattccatatactatcaccagattgcgacacggcatctcctgattgctatgtaagtaatatgtcttttctccacctagtgactcttgtaaaagggttggaaaatgaattgatgaagaaacattttttctttttcaactacacattaagtaaaataccgctccatgattaagtcaacaaaaaaaattgcattttatataacttccaagaaacatacttttaaggttgcttttgcagttatatccattttatctcattagcttttgggccaatgacgagagcgtccgcgatgctcttcatgttaataaggtatatgccattaataatgtgtgatgataaaaaagaaaagaagccttaaaatctaaactatggccgattgatgattacagaggagtattggaaaatgggagcgatgtaactatctgagtaaaccatacaacaaagacatcaagagcagcgtaccataccatatgaataacagtgttagtggctaccgatctctcatctacaggtaagagttagatacctatatctaaattattaagaacctgatcaaaaatttcctaattagagactcaagcaaaaccaaattaaatcaaaccaaaatttgttattattttacttttaaacccgaaaaaaggaaacaaaaatgaatagacaagaatttattaaaaatatataggcatatccatattacgtagaaatttaatttacgtaaattattatgtatttatgttttgcaattattattattttatttttttgtgtaaacgcaattatttaacttaaaacaacctaaacaaaccgaattacatcatggtgaaacgaaacaaaccaaattacagatggattttattttgttttactttctcttaattcaatataaaaaatcgatacattaatccacagtgtccattcatacatacaaaatttaagagattccaatattttgcgcggttgatggtgaacagtggtgatcatgatttggtggttcctttccttgcaacacaagcctggataaaatctctaaattactctatcattgatgaatggagaccttggatgattagagatcaaatcactgggtatatatatttttttgtgtttttgggttttcttgttctttcattttctcatcgtatcacaagcttataaagctccggtaaaaatcattcatcctttttttttaattgacagatacacgagaacttattccaataagatgacatttgctactgtcaaagcaagtcttcttgtctcaatttaacatttctatttgtcgtttaattaaaaagtattttctaatttgttttaagcgttttgattgtagggaagtgggcacacagcggagaataaaccacaagagagttttatcatgtttcgaaggtggattaatggccaacctttgtaaaaattacaattatgaattatctactatgtgagctatttgttcctgaggaggtttagaactctaccactagttcgacatgctatagttaccaataaatgaggtcttatttgggtctagggagactacaggccaaagacttggaacttcttggtttattgttatatgttgttaggtaacatttttgtgttattcatagattttaccttttggtacttttatcttctcacagattatattgttctgtgttgtgctgttattttttacaattaaacttagatttttaataaattcttttttgtctcaaatttaataagttatatacctatctccattttactcaacaatattttttagatgaataaaatatttctgattgtgtttttttatctttgcgcgcatttagtactttttctgtattgaaatgtaaaattatattaacaaaaaaaactgactttgcatttagtatcacttttagaggattgaatttgatatccaaatcatatcaatatttaggtaaagatgtggcgaggataagaacaaaataataagagccataaaaccaacgcccctaccttatccattattcatgctgttggggattttgatcttatgtcaaaagtgtataatggtatacagtgagggagagcgacgcatgcaacattataaaatatctattttcataaccaacccgatatggctgctccacaaaagaaaccaggcctacgtaacgtggagctactttgtaattataaagatttattgtttcccataaactggttaaatgattttagaaactaaagtaaaatg

SEQ ID NO: 25701 - DNA, 3003 bp, Unknown; identical to SEQ ID NO: 25700
  misc_feature (1)..( 3003): 2750-1469P.txt file - cDNA_ID_2707736; gDNA_ID_2214520; Annot_ID_184579

SEQ ID NO: 25702 - DNA, 3003 bp, Unknown
  misc_feature (1)..( 3003): 2750-1469P.txt file - cDNA_ID_2707740; gDNA_ID_2214521; Annot_ID_134054
aattatcttttaataaccaaaataattcggaaaccaagtgatttctaacaaaaacaactgtgcacacacgcttgtcgatattcaattttttcacaattcccaaataaaaaaactttaacaaaaaattcataattccaagtcccacgaatgtagcttttgatacaaagtcttaaatattcttttaaacattatatacaaaaacatcttttactcattgattgttcttgctgaaaacctgaaatgcctcctctgtttcttccttcttcttcctctgctctgtttctacttcttctcctcctcttaactctccaaaccctaacctctatctctctctctcagccacaggctctccgttcaccagaaaagtgtggaaacttctctgtctccttccctttccaactctcttcctcctcctccgcagccgcttttcgactctcctgcgaaaactcctccactctgtttcttcacataaaccaccaaagctaccgaatcatcgagttcttcaccgacggtctcctcgtagacttcccttcgtctccttcttgtcgccaattcaacgacttacgctctttccctttctccgcaaaccaattcttctccatctctttcgaaaacgtaatcggtctttacgactgcgaagattcttctctctgtaaattcggttgcgaaaccaacgatctcttcggttgtgacggcagagaagaagacgaaacctccggtggagatatcggatgttgctatcctttgtctgatcatagcgcgtggcgtgtaggtgatgatttctctgtgtttagtagatatggatgcagaggattctcttcgtggcttgttccaagagggacgaacagaggaaaaagaggcgttaaattagagtgggctattccaagaaactcgccggaggctatttgtgatcgtgaggctcgaactgttaacgctacggctattgaaggaagtgttcgttgtgtgtgccgtgatggcttcgtcggcgacggcttcctccatggcaccggttgcttaaaatgtcagttttatttcttcttttcatttattttcgtgtatgaaacagagtacgtttcaagtaaccttattttactattctaaacaatgaatagaaatattttgtttcactatgaataattcataactgagtcatatggttcgttgggttactaaaaaacttagttttgattcagctcagtaattcattttgccttagtttaaaaagacaagtgtttcttgagttacaagcaacttacactacttggtttactgttgtaacagcttgcttcaaagacggaaaggaattatatggagacaaatgcaagatcaagaaacacaacgggaagaaactcactgttttagccggtaatttaagataatctcatctgaataatttgaaccaaacttcttgctaaaatcattaatcatatgcaggtgttttggctcctctgttcatactaggctcactgttagctctcttctgtctcctaaaacgtccggtaacaagtcacaaagatcaacagttcgatatatctacaacaactaccactactaatagtgtttcgtttcgcaaaggttacaacaagactcgtctcttcacgtaccgtgagttagaagaagccaccaaagggtttcaagattcacaaaaactcacacaaggcaaaaccggaacaatctactcaggcaatctaacaaacggaacacgcgtgatcgttcacaaggttctctgcgaaaaccagattgaattcatggagatttcgtctcagattgatcatctatccgcggttttgcatagaaacctcgcgagaatcataggtttttgtatggatattggatataatccactagttgtttacgagtatccggtaaatggatcgcttggagaccgattgcggctagggcttgattggtgcaagagagttaacattgtagctgaagtcgctggtttactcgcgttacttcagtatgagaactatccaccgattctacacaccaacatttcttctggtaacatcttcttagacgaagattttcaagctaaagtcacaggttttggtttgcagaggaaacagaggattgatactagtatgtacgatttcgcggttttgcttctagagattgtgactggtttaaagcagagagaagagacggtaactcaagcgttacagaagattagaagcggtaagcttgaagaaatcgtggatccttcaatgtattttcatgagcagcctgtggcttttagagaacagattggtttagtagctgatatagcgactcggtgcgttttgtttggtggtgatgggaaatttggaatggttgatgcagctagagagctgttgcagatcgctggaaacaacggtggaggcggctgcgataagaaaagagatggaattgaggaaacgttttcgaattcaagtttgcttcagatgatttctatgtctcctgattctatctatctccctaaaacctaaaacaaaaacagaggaagttaagggttttttttgtttgttttgaatgtatgtaaattaaaaacgctttgcttgagagtaaagaaacgtccttttcttgattactagattgtgttctgagaaaataaatcgtgatcgcgattggaagtcacgattataacaacgtgcaggcaaagagtaagaagaaacaccataaacaagtacaatgttttgtttttcttccatttttaaatactgaattttctttaaaagaaattgaaaggctgagaaagaatatctctcgaatcattaaattcgattttgaccaaatcgttatgctattattaaactctttttgtctggtatatatatatgatagctttgtttttgcagaacttacattttgtttttgtccctttgaaacgaaagaagatccaaaggtaattaatactaatctctgattgtttcttggtttattagatctttccaaatgctctgttttcttctgcacaatcaataaatctgttagttttaacgattgatgtgacaatagatg

SEQ ID NO: 25703 - DNA, 3003 bp, Unknown; identical to SEQ ID NO: 25702
  misc_feature (1)..( 3003): 2750-1469P.txt file - cDNA_ID_2707740; gDNA_ID_2214521; Annot_ID_184602

SEQ ID NO: 25704 - DNA, 3003 bp, Unknown
  misc_feature (1)..( 3003): 2750-1469P.txt file - cDNA_ID_2707747; gDNA_ID_2214521; Annot_ID_134058
aataactatgattttaaaaaaacacttattagatacgacgtggacgagcccaaatagacaaaaacccattttaatgctaatttacacagaccaaagaaacaaaatcagaggaagaaacaacaaacaatgctcataataatacacaattaaggatctctagtaaccctattgaaagtttgaaacaaactaatcacagcttcttcaagtgttcttgtctttagtagcagcagcatgagatttgaaccatggaatccacaccgaagttgtcttctgatatgctctataagcttcagctctgtattgttgtttcaccatccgacgctcgacaaggatcgttacatagaccagacacagagtattgaccaatgcaccaatcaaagtccacccttgaccaaggttccaagcaaatatgaccaatccccaccaccacaattgctctcccaagtaattaggatgtcttgagtaacgccacaaacccgagtccagattggggattttgggctttccttgctccttgagcttttggtttccggttacaaactcgtgaagctgtgtgtctgcgaagtacgccatgacgattccggtcaaacagatagccgaggaaatgaagtcccagatgtttagtggctcatcaatggaatggatgacatataaaggcagacatatcccaatgaggaagatctgagcaaattttggaaaaaagaagcaacatgagaaacagaaagcatataagctaagcatcaaatatatataaaggtaacaatggttcaagcccttataaccaaaagactatcctgttctccaaatcatcctcataaaggcaagcttagattaaaaacgagctctttgaggcaattcatcgaacagttggtggtcatgtacctgctgagaaacgtagacagagaagaaggagagccaccaccagtgtttcccgtactgtttccgtaagtcgttgaacctccagtcttctctagctccccattcccaattttcccgccggaagtagttatgagtcaacctaatgctccaaatccatgtcagagttatgacaatcatggatctcagcttattgtactgtgacaatggatgcgaagcgaagtaatgaaccagcattacaggtatcactgtccaatacacatcgatcatctgcaaaattaacgaattttttcaaaaactaaaaaattgcgaattttaacaaatgggtaacagatttggagactatggatgcgtacccagtggctagattggagtaaaccgatgacccagaagagcacattgacgtttaagaagaagagaaggtttgctaatagaagaggatgattcaaacaccatgattgaatagaagagagctctgaatcggaagatgaagagtaattactgagaaaggtgaggtagaatacgatagaaggaagtggagcaagaaatgcgacaatggcgtttctaagattccgattcattttctctcgaataagtcgttgatgttgggttggcctgtaggaaggagaaagagaatgcaatttataaactgagcttaaagaatatctttggacttttgggttgggttctttgtggcgtgtatgggcccatgttggcccactttgatcactgatatgattagagtcttctgtttaattatacttttggtgaaaattaaaatatgatcaactgtagataaagatattagctttttgtaaaagagccgaaaaagtcagtaatgaagaaaataattggactatgattttgtatcgtaatgattatggtatgagatttctgactattaagtaatgaaagtaatagtgtaaaatatatacattaaacaatataaactcaaaaattatgaaatgtaagtggttaagcagaaatagggacaaatgattaacaaatttcagagcatggggaaagggaatcgcaataataataactaggatttaatccgcggtaaaccgcggacaatcggtttatttggtttttatactaaatatttgaataaatttgatattttaaatttataaatataaattttttaatcaaacataattaaataataattgggatttttttttgttgttatttagtgataagataaatgtgttaaaatgtgtttaaaaatgtgtatgtaattttagtgaaagtaaaatatttacaaaaatgtaagattcacaaaattggtataatattttttatgattataagtgttttttttaactatttgacaggttatacacttttttggcaaaataaagaccatatgaattatgttatttataattatatgtctttaaagtgaagataaaaaaataaaattatttcacttatttttgttgaacggtttagattgaagggaattaattttattgaacggtttagattcaatcagatcatataaagtttagaagattattaagaccaaattatctttaatgattttgaatagcaaataacaaaatccaaaattgaaatcaaaattgaggccaaattagacaaaattttactttgtacttccccttttaataataaggggatagtgaattcgttattacaatactttttgaagtaaaagtgaagatatcactaaagagatacaatttagctgtgctcgtggtgactctaattattagcttagccgaaagcattggattctataaattaaccaactttatatgcggtccaaattcgaactttaatataaatttatgcgccaattgtgtcaagtaaaacgacgtcgttgaggtaaaaaagggattgtaaaacgccgtcgttctttctcccgcatctcggttgttttctctctctcccggaataacaatctacagttctaccggtttaaatgtaccggttaagtaaaaaccggaaagataccttgttctcctaaaaaggttgagagaagcgagggattagcgtgtatcgacgagataatcatctagtcgtcggtgtcgccgcctttctccgccgtctgaaatcgtccttgttcgattttccgaagacgaagcaggagaagatatg

SEQ ID NO: 25705 - DNA, 3003 bp, Unknown; identical to SEQ ID NO: 25704
  misc_feature (1)..( 3003): 2750-1469P.txt file - cDNA_ID_2707747; gDNA_ID_2214521; Annot_ID_184608

SEQ ID NO: 25706 - DNA, 3000 bp, Unknown; identical to SEQ ID NO: 11878
  misc_feature (1)..( 3000): 2750-1469P.txt file - cDNA_ID_2707751; gDNA_ID_2214521; Annot_ID_134063

SEQ ID NO: 25707 - DNA, 3000 bp, Unknown; identical to SEQ ID NO: 11893
  misc_feature (1)..( 3000): 2750-1469P.txt file - cDNA_ID_2707755; gDNA_ID_2214521; Annot_ID_134064

SEQ ID NO: 25708 - DNA, 3003 bp, Unknown
  misc_feature (1)..( 3003): 2750-1469P.txt file - cDNA_ID_2707761; gDNA_ID_2214521; Annot_ID_134069
taaggtcataagagggaagccaagaccatttccaatagatccaagcgtcccgaggatcatcaagaggaaatcaaaggaatctgcaaaagcaaagagcttataaaacggcaccgttttggttttctcatgttcctcgtctttcttctctgttttcttcacttcttcttcttcttccttgtctcttttggtctcagaaacctcttctagtatatttggatctccatttaagccgctctctgaagccattagagtttcacagatacctcacgatcctaagcatttaaaagaacagaggagatatgtaataagtttctaaatctatgagctgatgagatcttcaagagagagtatatatctaaatagggaacataaaggtcaggccaagaaggaaaagaaacaaagacttttcaccaaccatgaaaacaccctaaagatctgtatattgttttttcaagaacatgtgaaaaaataacgaaacctgaagcaagatctgtcgtttacaatgaggaataaccgaagctacggcccagataagaacataaagtacagagtttccagtataaaaatgattaaagcagagaatataaaaatatatatatatacctcgaaaagcaacaagaagaaagtgattagggtttagcggcttcttggtgtcttgccgtataaacagcagttgaaaaatgtgcagagagctctctctctctctctctgcttatatatttttatataattgtaagtgaagtttggaaggactcatgtgagtttatatatgctctgtttatttcttgacgaacaagctgtgacttgtttgagagaaagagaaaatggatgccatgaaattaataactactacttcgtaaaatttgtgaaaaatagtctttttgttgttgttgttagtaaagttaaattgtaaccatagcacaattggcgtagttataaaatagggaatcttgtgtatataaaatgaattatgcctttatgtttgtaatacaatataatacgtaagataacattttcaatattttatctgcccattattgtctaatgctgaccaagatgattaattatagcattaaaaaaatataaagaacgaattgatcacagcgatcgacgattagtctagctgttttgttcaactacaactctattattttaacataaagttttaatacgggaggaccgtatgtctgtataatcccgcgaatcactcatatgtacaatatagttattttttttattttttttggtatcagtgataagatatatttgatctcttattatagctagttaattagccatgttattagcagcttccatatgtccttactccttatcatcgtttaaaacgattcgttttatataaaaactcgaattttgtatgtacgtctttgtgtgtacatatacacatcaatatctcaaaaaaaaaggaagaagctgagttatgatgattttcttgcatcgctttagttgactttctcgttggcattagttgtgacttgtgactatggatggacaaattgacaagtgctgcaagaacccattcctcactagtaatctttgttatcataattgcgttttgccaacggatcgatgggaattattgatgtgttaaaacaaacgaaaaatcgaattcccataaatgtatatttcattagttattttgtaagttaagctaaaaatattataaaattatattttctggtcagattatatctttgcactaccattctaggttggaaccacgtgaagcttattttactttacgagcaagaaacacgtccgaattttaaattatcgattcaaaataaaacaaagaaaagtcaaaactacagagaaagggacctttctttcttccagggagccagggaaggaatggtctcgcattacttcttctgcgccttttcagaatcaatgaatcttatcgaaccaataacgattctgacgtcattcctgacatataatgatattcctatatttatcacctacccacgtatatcttttgtctatagcaagaatttactacttggggaacaagttatcaaatactacttttctaagaaaagaaaaactactagttgcaattttattccaaacattgatgtgagagtgactacaccattaataaatcgtgtgaggcgctattcagatttttcatttttcgatgaagtgtggatttgttttgtcatttttattgtaagtttttgttttggtgcacataaatatttaatttctattaatttaaaatatctgctgaatgacactaattattggactcattaattcactcgatagattattgacatttttttcagtaggcgtagtagacctttttccgggggaagaaaaaaagtttaagcggttcgattcccactaaccttttggagaatcgtgtcacgtgtcgaatagacccaaatcctttaccctacatgtttgaaactgtataaaattcccgacgtaaataagacgatcttgacccggcccgagaacccgaatctatggattttgaatttggaaacccaacctacaaattttttatatatcccactgacaaagccgttactagcccatgggcctaattacttcaaagaatgctcaacttttgatttttaatagagaagaaaaagtttgaaactttatcatatattgacttgtcttgttgctctctagagtgcaatcataccattgaatacattttaggattcgttttcagatggtttaagatataatcactctgaacgcaaatgcaaattagaatgtattttgatccaagcatttctacatgtactgctttgatctgaatcgaaaagagcaagtcatggttactccctcaataatcgccactaagaagagtaacagcttctttgacttttggaagcatttatcacatagagattaaatcattcaccaactaccactgcagtccacacaaaaaaaaagcttaaatagattaaccaaaaaagcacaagaaaactaaatgcagaaagagaggaaaagagacaaatg

SEQ ID NO: 25709 - DNA, 3003 bp, Unknown; identical to SEQ ID NO: 25708
  misc_feature (1)..( 3003): 2750-1469P.txt file - cDNA_ID_2707761; gDNA_ID_2214521; Annot_ID_184622

SEQ ID NO: 25710 - DNA, 3000 bp, Unknown; identical to SEQ ID NO: 11895
  misc_feature (1)..( 3000): 2750-1469P.txt file - cDNA_ID_2707769; gDNA_ID_2214521; Annot_ID_134080

SEQ ID NO: 25711 - DNA, 3000 bp, Unknown; identical to SEQ ID NO: 11895
  misc_feature (1)..( 3000): 2750-1469P.txt file - cDNA_ID_2707769; gDNA_ID_2214521; Annot_ID_184633

SEQ ID NO: 25712 - DNA, 3000 bp, Unknown; identical to SEQ ID NO: 11894
  misc_feature (1)..( 3000): 2750-1469P.txt file - cDNA_ID_2707773; gDNA_ID_2214521; Annot_ID_134081

SEQ ID NO: 25713 - DNA, 3000 bp, Unknown; identical to SEQ ID NO: 11876
  misc_feature (1)..( 3000): 2750-1469P.txt file - cDNA_ID_2707783; gDNA_ID_2214521; Annot_ID_134059

SEQ ID NO: 25714 - DNA, 3000 bp, Unknown; identical to SEQ ID NO: 11877
  misc_feature (1)..( 3000): 2750-1469P.txt file - cDNA_ID_2707787; gDNA_ID_2214521; Annot_ID_134060

SEQ ID NO: 25715 - DNA, 3000 bp, Unknown; identical to SEQ ID NO: 11890
  misc_feature (1)..( 3000): 2750-1469P.txt file - cDNA_ID_2707803; gDNA_ID_2214521; Annot_ID_134068

SEQ ID NO: 25716 - DNA, 3000 bp, Unknown; identical to SEQ ID NO: 11905
  misc_feature (1)..( 3000): 2750-1469P.txt file - cDNA_ID_2707807; gDNA_ID_2214521; Annot_ID_134070

SEQ ID NO: 25717 - DNA, 3003 bp, Unknown
  misc_feature (1)..( 3003): 2750-1469P.txt file - cDNA_ID_2707815; gDNA_ID_2214521; Annot_ID_134076
aaaggttgacccaattagaaaacttgttatatctttaggagtcaaagtcaaagcgcgtttacaaacaccgacactttctttgtcaactagcggttaccgcggttgttcactaggcacggaacactcgatttcttcccaagaagtcgcaaccaacacttactatgtatggtacatcacaacatagacaataaaaactcttggaatgttccgcgaaacaggtgattattgactaccatgagtggggaaatgtggggtaagttaacaagtacactgcttcacatgggaaaaagaaaaatgagatacacataattcacaaaatataatttttatcttagacaatttttttaaaataatattaaaatcagtgtagaagtggtccccaccactattttgtttttccttaaaattaattattatttttgctggactaaataaaattggtttttttttttctctctctgtcctaactctttttctttctctgttttgtatctctctctctctctcactctttgtctctcccctaacctttattgtactagcataaccattaccatacatactcttctctatcacgccacaaacgcagattcatcacatcttcttcttgttcatagcatctccatcactattgggctctcttcaaaggtgtatttctggggttacttattccttctttgtattgattagtgttgaaaaggtgtctctgttgcgttcaagagctagctttagggctatatattaagaggtttccagaggttttttttggattataggcatctgtgtttggcttacatggatcctttttttaaggttttctgggcaagactaattgattaggaccaaagtttgtgtttttatttgtttggatctacaaagatcaattaggctgttgttgaattggatcgagtgatggaagctagaattgatgaaggtggggaggctcaacaattctatgggtccgtaggtaaaagaagtgtggagtgggatttgaatgattggaaatgggatggtgatctctttctcgccacccaaactactaggggacgtcagtttttccctctaggaaactcgtccaatagctcctcctcctgctctgatgaaggcaatgacaagaagaggagagctgttgccattcaaggagacactaatggtgctcttactttgaatcttaatggtgaaagtgatggcctttttcctgccaagaagaccaaatccggagccgtttgtcaggtcgaaaactgtgaagctgatcttagtaaagttaaggattatcatagacgccataaggtctgtgagatgcattccaaggctactagtgccactgtcggaggtatcttgcagcgcttttgtcagcaatgtagtaggtatgtctctctctctctctctttcccaacaacaaaaaatgaatccaactttattcttcttcttctctcttgcaggttccatcttcttcaggagtttgatgaaggaaagagaagttgtcgtagacgtttggctggccataataaacgtcggaggaaaacaaatcccgaacctggcgctaacgggaatcctagtgatgatcactcaagcaactatctcttgattactctcttgaagatactctccaatatgcatagtatggtgttttactctgctcatctctatgttgtcttaaagtttgtatcagctgctaaatttctatccctttgcagaccataccggtgatcaagatttgatgtctcatcttctgaagagcctcgtaagccatgctggcgaacagttagggaaaaacttagttgaacttcttctacaaggaggaggatctcaaggttccttaaatattggaaactcggctttgcttgggattgagcaagctcctcaagaggagttaaagcaattttcggctcggcaagatgggacagctaccgagaacagatcagaaaaacaagtcaaaatgaatgattttgatttgaatgatatctatatagactcagatgacacagacgtcgaaagatctcctcctccaacgaatccagcgaccagttctcttgattatccttcatggatacatcagtctagtccgcctcagacaagtaggaattcagattcagcatctgaccagtcaccctcaagttctagtgaagatgctcaggtatgtatattcttacctcatccattccattattttctggatctcttagcctgctgatattttcctgtgaccttttcgtaatttgttatgattccatctcagatgcgcacaggccggattgtgttcaaactatttgggaaagagccaaatgaatttcctattgtcttacgaggacaggtattggtctgcttgattattctcaagttcttactttgtgatgttggaagttaaactgatgtgctagtttctcgatatacagattcttgactggttatcgcatagtccaactgacatggagagctacataagacctggctgtatcgtattgaccatctatcttcgtcaagctgaaactgcttgggaagaagtaagctaaacttcctctcccctctttgacaatactcgtctttataaagttccagactcctcaagggtttttattttgcttggcagctttcagacgatctgggttttagcttagggaagcttctagatctctccgatgatcccttgtggacaactggatggatttatgttagggtgcagaaccaacttgcatttgtatataacggttagttttgagaatactttcaccttgtgaatacctctctggatttctcagtatttatcgtcaatccggggttgcaggtcaggttgtcgttgacacttcattgtctctaaaaagtcgtgattatagtcacatcattagcgttaaaccgcttgctatagctgcaacggagaaggctcaatttacagttaaaggcatgaatctccgtcagcgtggcacaaggttttgttccgtttttctttttaatgaaattttggccttccttgtcttaattttcttcttctttgatgtctaaatg

SEQ ID NO: 25718 - DNA, 3003 bp, Unknown
  misc_feature (1)..( 3003): 2750-1469P.txt file - cDNA_ID_2707826; gDNA_ID_2214481; Annot_ID_133250
agattgtttttgcacattttcgtcgtaaccgcacttagctaaaatattcatactaatgagctgcgtccctactcaaagcgtaacgtcactttgtcgatacgaattaagaacgtagaatgtcatgatctcgtacatcaatacatcatgttcattggagtattcgctatgctcgagcaatagtcttttaatgctgagaagatcatgattttctactcgaatgctaacccagccaaaccggtttatctcgtctcattatccatatgctgaaatataaatttatatacaataagaataagtttcatatgtatattctcaaacattacagtataatgtgatctagatcctaatttcaatatgaagatatatctagtttagatagcatcaaaccattaacagttggattacagaatcaattttaacgatacaacaccttttgcacatgtatttatttccttgaaaacgtttaacttgtcttctcaatgacactctagttttctagaaaaaaattcattgctctttttcctctagaaaatttgtctctccagggcatgtatttaattttcttgctcttttttctcacaagtatgaatccctactatcataaacatatataatctctgttagttcctgaagaagtaagattaagaacattgagcttataaggtcatctcgtacatatggtgaaagcatccataaccataaatattatagcatgctctaaaaatacgaatatcctttgaaagaacaaattgaatgaatgagcaatcgacacaggagcaaagtgaatcaactttttagaaaatgtccaagctaactagaaaatgctaatccgtaattttgataatatcacaaccagttcttttggcccctagtcaaaatctgtaaacagagagaaaagtttgaagcttcgtacttgctttgcaagttacatgccaagagggtaaaacacatagagaagaatccacctacttgaattttaatgatctataatactgataaccaactagaactagagtggcaaacacaaaccgaaaagtgatgatctccttgaataaccctgcctccggatgcttcgaaaacaatccgcaactagatgtcctgattttgtaatcccgatgatcatgtcctgagtccaaacgaagtggtaccaaatcctcgagataaggagatataacagaaatatctgaggagagacagcaaatctcatttgtctcggtattatatttaaacaaccgcttgtgattgtcacaaaagacaagattccctagcttagaaaccgtcaacaccgtgaaccaactagactcccatgggtggttaataatgatactggctaaagttatggagtaagtcttgctccatatttctttgtctacatccatcaggctcagtatctctagctcccattctggcgcaccgtttgttttagttatggctagacggtcatcaaggttcaccatctgggcactcatggtgcaacacgtagatggaacggaaacattgtggaactctagtgtgtgaagatccaaggctaggattccgaaacgctaaacattttttaaccagtagattgacccattcacacacactgacttccttcccacgtcaatatcgttaggaggtggattcagttcactccattccccagtttcaacatcaagaacctcgcatttttccacaggactaaaacacatcctcaccactttatagctaccattaaatttgtctctaccaaatcccatctcccaattccccggaaaggaagtgaggtatagttcgtctgcaatttcacgaaaaaatcagacaaaaacaatccaaattttaactgactctttaataaaccattaaacagatattacctctgaactgaaaacgaatacgatcagagggcacgtgatgattagggctacaaggaaatctccggagttgtctggtcgatgggttcaaaacgttgatccaacctggtgctgggatacacaccaaaccctcacatgtcagagagggtcgtgtggcgtcaatatcgcagtgtaaatagaccatctggatctcttcctcaccttcgaatcccaactcagtccggtctccaacagccagaattttctccttcttctcaacgttcaaacgcctctccgcgaaactcttcgattccaggattgatctccattgttttgagacggttttgaatctgaggattgattttaaaggcaatccaaggaaaatttcttcaagtagatcgggaactacgtaaatcatcatcgggattagggtctttttcttcttttctctacagaactaaaaactcatcgggattagggtcttttttatacacaattttttttttttctagttttaacggaaacccccacaaatatttcattattactatttagcccagtcaatttccaaaagattaatttaggtcacctctctctctctctttccctatctcttggcctcgtgctcgtgcagctgaagatccctgctctgattcgtcaaatccagtaagctaaatttcctcttaattttctggtctttaattactttatactccatatgaataatttcttcaatcgaatttttcatctttgggtcttaatttttttctcaactgattcagctaacattagtgattagctatttgctggatttcttcgattgcttgtcgtctctatgtttcaattgtattatgattacgacacattcttgttctgatcattgtcgatgaaaagggtaaactttgaacaatcttctattacataaaattgaaactttttccaacatttctgagattttccaaatcaaattctcggagttgaattgaactctcaagtagcttacataatattcaaacttttgattatctaatcaaatctgtaattcttccttatctatgtggcagtggaagatgaggatgatccaaccacaaagaacagcaacaacacagatgattttgctatagagcctcgtgaagggattatatttgaatccgaggatgcagctaagatg

SEQ ID NO: 25719 - DNA, 3003 bp, Unknown
  misc_feature (1)..( 3003): 2750-1469P.txt file - cDNA_ID_2707826; gDNA_ID_2214481; Annot_ID_183332
catactaatgagctgcgtccctactcaaagcgtaacgtcactttgtcgatacgaattaagaacgtagaatgtcatgatctcgtacatcaatacatcatgttcattggagtattcgctatgctcgagcaatagtcttttaatgctgagaagatcatgattttctactcgaatgctaacccagccaaaccggtttatctcgtctcattatccatatgctgaaatataaatttatatacaataagaataagtttcatatgtatattctcaaacattacagtataatgtgatctagatcctaatttcaatatgaagatatatctagtttagatagcatcaaaccattaacagttggattacagaatcaattttaacgatacaacaccttttgcacatgtatttatttccttgaaaacgtttaacttgtcttctcaatgacactctagttttctagaaaaaaattcattgctctttttcctctagaaaatttgtctctccagggcatgtatttaattttcttgctcttttttctcacaagtatgaatccctactatcataaacatatataatctctgttagttcctgaagaagtaagattaagaacattgagcttataaggtcatctcgtacatatggtgaaagcatccataaccataaatattatagcatgctctaaaaatacgaatatcctttgaaagaacaaattgaatgaatgagcaatcgacacaggagcaaagtgaatcaactttttagaaaatgtccaagctaactagaaaatgctaatccgtaattttgataatatcacaaccagttcttttggcccctagtcaaaatctgtaaacagagagaaaagtttgaagcttcgtacttgctttgcaagttacatgccaagagggtaaaacacatagagaagaatccacctacttgaattttaatgatctataatactgataaccaactagaactagagtggcaaacacaaaccgaaaagtgatgatctccttgaataaccctgcctccggatgcttcgaaaacaatccgcaactagatgtcctgattttgtaatcccgatgatcatgtcctgagtccaaacgaagtggtaccaaatcctcgagataaggagatataacagaaatatctgaggagagacagcaaatctcatttgtctcggtattatatttaaacaaccgcttgtgattgtcacaaaagacaagattccctagcttagaaaccgtcaacaccgtgaaccaactagactcccatgggtggttaataatgatactggctaaagttatggagtaagtcttgctccatatttctttgtctacatccatcaggctcagtatctctagctcccattctggcgcaccgtttgttttagttatggctagacggtcatcaaggttcaccatctgggcactcatggtgcaacacgtagatggaacggaaacattgtggaactctagtgtgtgaagatccaaggctaggattccgaaacgctaaacattttttaaccagtagattgacccattcacacacactgacttccttcccacgtcaatatcgttaggaggtggattcagttcactccattccccagtttcaacatcaagaacctcgcatttttccacaggactaaaacacatcctcaccactttatagctaccattaaatttgtctctaccaaatcccatctcccaattccccggaaaggaagtgaggtatagttcgtctgcaatttcacgaaaaaatcagacaaaaacaatccaaattttaactgactctttaataaaccattaaacagatattacctctgaactgaaaacgaatacgatcagagggcacgtgatgattagggctacaaggaaatctccggagttgtctggtcgatgggttcaaaacgttgatccaacctggtgctgggatacacaccaaaccctcacatgtcagagagggtcgtgtggcgtcaatatcgcagtgtaaatagaccatctggatctcttcctcaccttcgaatcccaactcagtccggtctccaacagccagaattttctccttcttctcaacgttcaaacgcctctccgcgaaactcttcgattccaggattgatctccattgttttgagacggttttgaatctgaggattgattttaaaggcaatccaaggaaaatttcttcaagtagatcgggaactacgtaaatcatcatcgggattagggtctttttcttcttttctctacagaactaaaaactcatcgggattagggtcttttttatacacaattttttttttttctagttttaacggaaacccccacaaatatttcattattactatttagcccagtcaatttccaaaagattaatttaggtcacctctctctctctctttccctatctcttggcctcgtgctcgtgcagctgaagatccctgctctgattcgtcaaatccagtaagctaaatttcctcttaattttctggtctttaattactttatactccatatgaataatttcttcaatcgaatttttcatctttgggtcttaatttttttctcaactgattcagctaacattagtgattagctatttgctggatttcttcgattgcttgtcgtctctatgtttcaattgtattatgattacgacacattcttgttctgatcattgtcgatgaaaagggtaaactttgaacaatcttctattacataaaattgaaactttttccaacatttctgagattttccaaatcaaattctcggagttgaattgaactctcaagtagcttacataatattcaaacttttgattatctaatcaaatctgtaattcttccttatctatgtggcagtggaagatgaggatgatccaaccacaaagaacagcaacaacacagatgattttgctatagagcctcgtgaagggattatatttgaatccgaggatgcagctaagatgttctatgatgattactctagacgattagggtttgtaatgcgtgtaatg

SEQ ID NO: 25720 - DNA, 3000 bp, Unknown; identical to SEQ ID NO: 11922
  misc_feature (1)..( 3000): 2750-1469P.txt file - cDNA_ID_2707838; gDNA_ID_2214522; Annot_ID_134100

SEQ ID NO: 25721 - DNA, 3003 bp, Unknown; identical to SEQ ID NO: 16096
  misc_feature (1)..( 3003): 2750-1469P.txt file - cDNA_ID_2707846; gDNA_ID_2214522; Annot_ID_134097

SEQ ID NO: 25722 - DNA, 3003 bp, Unknown
  misc_feature (1)..( 3003): 2750-1469P.txt file - cDNA_ID_2707848; gDNA_ID_2214522; Annot_ID_134096
agaaccctatttgcataaacagattcgagtaagtaatcatagcaaaacatactccttatcagattcagtgaagctaaaaaactgtaaagtcttcaactttatggagaacacaatcaacaacagtagacgatcaaattcacaataaccagatacaaattgtgaagaattggtttagcaaaaattaatcagtgatggatttataaatcattaccagaggtgatacagtaaggaaacccagctcgttcgatgagtttggcactaagagcatcgaagcaacatggaccctgaagaacaccaggggattgcataatattccttagcttcttcgccggagaagatggaagtttcgcgtttcccgattcatcggaaactacggtggagttaacggcgccacgaaatcgtcttgagacagagaaggggttcgcaaataattctccgacggtttgtgtgaaagaagaagaggcagaagaagggaaaaaactcgatttggattgtttatgaagaattcgaggaggagaagagctgcaaaagctaagtgccgccattgaagccttgaaggattcacttctgttcggtaaaagaaagaaacagaaattgatcaaaagaaagaagttggacaaaccgaaacaacaagaaccagaccgaaccagatttaataattaaaaaaaaaaaaaaccatgtcacgtgagcttttttagggttcacgtgatcatctctatcgtcgaaatacaagcggcggacttcaaaatcataacttttttcttcgctcctctcttagcatcgccgtgaatcgttggtctcagtttctccgtccatctttgattcgtcgatccgtaagcatctattcagtttcatgtcttttgttctaaactttttggtttgattggggttttacctttggttaattaaagctttctagattcttagtgtttggattgaattctgtaaggtttggtaaaactataccaggttagttgctatctagctgcaatgggtacagagacggttgtgcatgatcaggcaagatgggcaatggctgcaatggaacgaaggcttgctgttgcaaaagctcagcttcttcaacaacaacaacagaagaatgagaaagataagaaggggacttctgatgtagatgtctctatgaaagaatctcatcaagctgattcactgcctactccctcaaagacatcaattaaaaaaggtttgatggttgagtataaacgaagaatgattctctctagcaactctttattgaactctgattgtcatgggaatttggttttgtagtagatcccaaggatgatgattctgttgcatatacaaagttgtcccatcccgttgatgagaatctgctggcaaccaatgttaaggtatattcagattcttgaggagaacgaagctcggccttcttctgtatgatagataagattgctcaatgtgtgtgtttttttgtgattcagttttctagtgcaaagggaactatagtagacaaggttttgcataaccttcttcgaagcggtgactctgctcaaaagtacttgcaaggtactaaaagtgtgaagctggataactatatccttcttgataattttgtacagtcacggtcttcggcctctggttctaaaaaggcatcacagaaggattcaaaacgttctaaaagccgtatgtctatgaagcgactcaagaaatctggtgctttgcatatccctaaagatctccaaaagtgagttctttatattttttttttttttttttgctgtcatatagattgaactggctcagcctatgcatctgagtctattattttggtattcttaataaagtttaagtgattacttgttcacttgtgtttgagtgcaggtttgatttgtttaagccaatgcatggtatgtgggaaagttacatgatgaaactcatcaaggtgaccgggtaagctacttatctgattaccgaaatactgattcaaactatgtgctttctataaggacgaaactgatgggagtaatctagtatacacaatcattttaagcttggtcatcattcttagacaatttactttttgcaggaagattcaattatctttaactcttctctcagcagatcttcatggtgctttcatgtttggtaatccttcattctttcacaaatctgtagtactaggatatgatcttttgtctctcactcactttccaaaacttaacttctctgtacgcttaaacaaaccttaaaactagtccttttttttcatattgtaatttgttccaatcatagcaacctattttacttgtgacagttgctgagtgcaagatagcatcattcactggtgtacaaggcataatggtgcgcgagacatccgaaacatttggaataatcacacgagatgacaaatttcgaggtatcttaaagcttttttcaccaatatatttgccataaatatcttgaatcgttctcttccccagcctcaaggcttaacttagttattgtaaacaatctgatacagttgtaccgaagaagctctctgtcttcatcatccaactcgactgctggaagattactttacatggggacaagtttatttcaagagacaatattgttcaacgttaatgctaaaaatgaagctctagtcgtttttcttagctagtggtagaaagcaaccattgatgaccacagaagcatcctaatctcacaagattttgctttagatctttccttatggacccaacattttaatatatttcttaatcttgaattttgtatgaatcctctgtaaatatactactgtgttattgttaatactaatttttattattagaaaatgagtgcttatatctcagaaatccatctggggccactaataaagacaagtacagttgaagattccaaggtgagtctgacttaactaaagtaataatatttcacatcactgtcctctctctctctctgcagctctaaactgttttgaaacctaattgcagaagaagtccagacaaaaaaaagaggatg

SEQ ID NO: 25723 - DNA, 3003 bp, Unknown; identical to SEQ ID NO: 25722
  misc_feature (1)..( 3003): 2750-1469P.txt file - cDNA_ID_2707848; gDNA_ID_2214522; Annot_ID_184659

SEQ ID NO: 25724 - DNA, 3003 bp, Unknown
  misc_feature (1)..( 3003): 2750-1469P.txt file - cDNA_ID_2707872; gDNA_ID_2214522; Annot_ID_134087
aacatccgtcgcttccaatttcaaacccctagtttctcgagaagcatcctcatcgttcgtcactcgctccgccgccgagccacaagaaagaaaaaccttccatggactgtgctatgtcgtcggcgacaacatcgacactgaccaaatcattcccgcggagtttctcactctcgtcccttcgaatccagaggaatacgagaaactcggttcttacgctttagttggtcttccagcttcttacaaggaacgattcgttcagccaggtgagatgaagacgaagtactcaatcatcattggcggtgaaaactttggatgtggatcgtcacgtgaacatgctccggtttgtttaggagcagcgggagctaaagcagtggtggctcagtcttatgctagaatctttttcaggaactctgttgctactggtgaggtttatcctttggattctgaagttagggtttgtgatgagtgtacaactggtgatgttgcgactgttgagttgagggaaggagatagtattttgatcaatcatacgactgggaaagagtacaagcttaagccgattggtgatgctggaccagtgattgatgctggtggtatatttgcttatgctaggaaagctggaatgattccatctgctgctgcttgattttgacttcaggtatgattctgtaacttgatgatgatgatgatgaggattggtaataggttaggattgagatcgaatttgtggaatagtctaggaagcttgacattgaattgaacgatgcaaaacatagttttcaatggttctagttagagaaagagaacacagtagttgggattctagttttgtgttgtttaaaatgtgttggtttagtttttgtgtgagattgataatgacttgttattctttctcttcgcttaagacttactttatctttccattggttcaatttctagattgtacatctcttgattgtagttgttgggagggtaaaagttatgatgttggctgatcttttccatgctcatatccattaagacttgagtgtccgatagtagaacaatacttcactcttattttgtctctaagactcctttttttttttcctttttttgttctatttgttttgcaggtgtcaatggaagtgcatgagagtcacttcaaggatcttgatccaataataagaatatgtaatgtttccaaaagcttatgaacctaatctatgttttatgaatatatatgactatcggctttagtcttcagtatcagtttcttgtttacatttggatgtatcagctgctaaaaaaatgcatagtttcccatcccatttgaaacgacgttttctctcatgtcttccactaatataatcttctggtcatgagaacagaacaggagctctgtttttctcacacaatgatcgaacacacttttgtcatatagtatagagaaatattaacacttctttttaggcatccgtatctagagtctttgtttcactgtgacctacctaagtatatcaaaacgcacgtttggaattctgaatggcactttcgtaaataggagggtacaaacatttctccttttaaattgttttcatcgtgaactctctcactcactcaacaaagtaaagaaacaatggcgtattctcttcctacatttccccaagccttaccttgctcgtcaaccaaaacttcttcctccttggctaccttccgatctcctttcttaagattcaatggttccacttccttaatcccctcctctatctccatcacttcacgtggcacatcctccccgaccatcatcccacgtgctgccgcctcagaatccgactctaacgaagccctagccaacacaaccttccacggcctctgctatgtcttgaaagacaacatagacaccgaccagatcatcccagcaggagccgcttgcaccttcccatcgaaccagcaagagcgtgatgagatcgccgctcacgctctctctggtctaccagacttccacaaaacacggttcattgagccaggagagaacagatcaaagtactcaatcataatcggcggcgaaaactttggttgcggatcgtcacgtgaacatgctccggtctgtcttggagcagctggagctaaagccatagttgctgagtcttacgcaagaatctttttccgtaactcggttgctacaggagaggtgtttccgctcgagtcagaggttagagtctgtgaggagtgtaagacaggagatacggtgacgatcgagctgagtgatagtggtggtttattgactaatcacacgaccggtaaaaactataagctgaagtcgatcggtgatgctggaccggttattgatgctggtggtatttttgcttatgcgaggatgatgggaatgattccatcattagcttaatcctcttccataaccatgatggtgttcttgtatgcataactatttgatgaatatttgtgttttagagttttctattttcttaacttttttatgtttgtttgatttggtattgttgttgttacctaaagaataagaaatcaaaagcaaaatagaccgacatgttccaagatatgtgaatatggtgagtgtttactaaattatgcgaatattgttgttgcaaccttattttcttccaagttgggcatcaatttccctttttgggcttagtcttcttttgtttgtaaatttagtttgttttagtttattgttggcccatttctgtagggtttggcccgttaagtaagtaccatgtaaacccagaaaatttacaacgaaaaccctttagcaaaaaagtaataattccgttggtaacttttctcattgtagtacatggcatattttacttactctactaaccaatttggtttggttattgaaaatttggcggtttaaacaaaccgatataaaataaccgttaagcggtaaaagaaaggacatcgctaaacctaaatttgcgactcctactttataacgccgctcttcttctccattgtttgtatactctgaaaaacatg

SEQ ID NO: 25725 - DNA, 3003 bp, Unknown; identical to SEQ ID NO: 25724
  misc_feature (1)..( 3003): 2750-1469P.txt file - cDNA_ID_2707872; gDNA_ID_2214522; Annot_ID_184651

SEQ ID NO: 25726 - DNA, 3000 bp, Unknown; identical to SEQ ID NO: 11913
  misc_feature (1)..( 3000): 2750-1469P.txt file - cDNA_ID_2707876; gDNA_ID_2214522; Annot_ID_134083

SEQ ID NO: 25727 - DNA, 3000 bp, Unknown; identical to SEQ ID NO: 11951
  misc_feature (1)..( 3000): 2750-1469P.txt file - cDNA_ID_2707908; gDNA_ID_2214523; Annot_ID_134116

SEQ ID NO: 25728 - DNA, 3003 bp, Unknown
  misc_feature (1)..( 3003): 2750-1469P.txt file - cDNA_ID_2707938; gDNA_ID_2214523; Annot_ID_134106
ttgcctagagactataaagaaagatatattgttttgcatgggatgaattgcggggcaaatctcctttggcagagaagcattttacttgcatatctagccaatgcgatctgccataggagtattcgcccagtaatccaaccatacattatctctctgtcttcataaacatgcatcttcactactatttaatatattcttcatatttcacattgcattttgagttattggaagttggactagcaaagtatgtatatatagttgatgaaagtgtttctatatagtgaatgaatgcgtatagaaagcatattctctggcacatcccatgtttcatagagcatatgtgtctagtataatcctaaagaccccttcatgcggtcctcatgcttctgctttcagaagttaccaggctagtaaatggtatattaagttttgtgattcatgttttgataggaaattgttccatagcatatgctctttatatcaaggtttacatatacattacatagtttgagtttatcctttgaagcaataaagtgagagaggaaaactgagattatttcttggtagaaagcattacagggcgaatcctctattggcagtggaagttgatgacccttatatgttattttctcatcattttcctctgccaaaggagatttgcctcgcaatgcttcactaacgttatggggttattcatttctccaatatccaaatctagtagctaatattttcatttaatagtgttatttgaggcagctcatatacttttgtaatttgataattgtaaaagattttactagagcctcttcaaattaactcctttcttttgatttggacgttatctcttcgttagaggctttcacacacatagtcaaagaatgctaaactaatgagaatccgaaaacccaagttccacaatcaagttaaaacgatataacggtttacaaatttttatcataaaatactaagaaatgtaacatgattcattttacaaaataattatcgtaacaaaatggttttaaggatctttaggtttgatctatatcttgtgaaaaccgagaattgattgctaataactatgcatttggacattgatcctcgttggctggtgacatctctcatgattagtatagatcttgctaagtaaaaaacttaaaacggttatctataatctaaagccagtatatattatcttatgtgatttgtcaaatagctaatgatcagttacaatagcatgcaagttttgttttagttggatatacttactgaatatgctgccagtacctgacgcatctaactttgatatttggccttttcaaacctaaatcataaaatctccaaaggtgctacaagaataggatatatacaagcatttttattatttttaaataagtatttgtctatttgaatttatattctacctatggactaattaaaaaataagactttataccacaatggtaaagttgacttaattgtataactgattttatataataacaatattcgtacttaagttttcataaaagtttgaactattttttatgaacaagagaaaaatgtgcacttgccaaaactatacaataaacaatttatgtcttaggttgattggttcataatcatttgtagttgctcgcaaaggctatgtttctgctatgattgggtgctacaatgtttttcttgttaaactcattattttactactatctagcaaaattcaaagtaaataaacttaacattgcaaaaagagaaagttaagaagcaaaagtttgcgagtttttccaaaataaaactctggagaggacaataccatggatcattccatttttagagtataaacctttacaagttgtctttgtcaaactttttggcaagtcaaaagtttaattctcgaatattaatcatcttaaattataaaattatacaaacgtacgtatagagagattttattctagattggaaggatagtgccattgaatatgcttattgcaatgttatatataaacacaacacatataattattgcagtagagagatgaaaaatacatagagaaggtgaatatgcattacagggcaagatcaccattggcagagatctattacttcattcttgcatcatatgcataaatgtttgtggtgagctctctgccaaaggagatttgcccggtaattctcttgcgccaatgttttatattaatttgttggtttttggttagtaagattttaatttttgagtccaagtggacactagttcccttggatcaaactcgtcgaaatcgacgattctaagttctaactttcaagaaaatcattgaacgatatctatcaatgtgtctttgttatgtttcaaagatgttgtattaaaaaagatcgatggtcacaaactctttcctcgtggcgatcagtagatgcatgaaggtaatgaattcttctatatatgcatcaagcgggtcagtgaaacattggttatgtaactaaactttaaaacttaaaaaaaaaaaaacttagctttgtcgactttagcttagtatgtttatgttggatcagaattatgatttgtatgcggcaaagtttatggttggtccattgtttgatcaaaagaccgattccatggccgtggcagaaaccacgcatatgagaattggcttgtcttgatcatggttgtttatttattggaggatttagaatttatggttagaaactggtaaaccgaaatcaatgcttagtgaaccatgactgggttaaattaaagaaagggcaaaatgggaatataaaatataccacatcctatataagtacactgagtaagcggcaattcacaatttgataaaatttcatgcgttagaatttgcaatttagcgagaagcgaaaaagtctgctcctttcgattcttcaggggttttagggtttttctcgactcgagtaagagcgaggatatttcgcgatgttctagattttgggtatttttaatcggaaccctagtttctctgtaatcgaaccatg

SEQ ID NO: 25729 - DNA, 3003 bp, Unknown
  misc_feature (1)..( 3003): 2750-1469P.txt file - cDNA_ID_2707942; gDNA_ID_2214523; Annot_ID_134104
gttgttgaattatttcttacaatgtgtgatgatagctgatatcagaaaaaaaagatggaagatgttgatccaataatggttttgacccggtcacctaacttaccatggataaattatcactaaattgcatatctaacaagaaaatattacagtttgattccttattgttgagttaataacgcaccatgttcatattaatcattcaccatgcatgcatgcatgcaccacatgttgtaaacaaaatgccaaaaagactaatcacaagtctaatgggcttgggctcacaaacatttttaatcaaatcgtcgaaaatttaaattagcactggacgaaagagatggaggcgaagacagagagacactttctggtttcgaattttgggaccgccggtggtgaagtttcgagtgcgacggagaataagcgagacctgttcggcgattcggcatctggggaatgtactgagagagagaagtttctgggaggagctcaaagttagtcctcttttgctttccgtgtttcaaaatcgctaatctagaatgattatagattgctgttttcgggttttgaggtcattatgatctagattggattctattgaaattgtcttaagttatccagctaggggttttactgttagttccttcattttccctcactgctttgtctttgcaattttctctattgttgtggttctttggattttctgttttttctaggatcatgtgattgaagaggggaaaattgataaggtcctttagtttgaaaaagattgacagatgtgaaatgtgaagttattatatagaagtctagatttcttgttgcatgaagtgaggttccaagataattcgatcagattcggtcttgattcagtaaacatgtatttagaccctcttgagtataatctaagtggcttctgcacatcgctctgcatgttgttgaggaattcatctttgttggtgtataaattgcagagaatgacaaggaaaggagggagcaagaatgcaggacaaaccatcaagctccactttttctatgctggttgctcaacttgggactgttatcaccattcaaagcccattccaggtgtgcactagttacttcctagataaaagaatgtacccttttttgaaaaatttgatagattttgggaatgtgacaatttttacaggatatctaggtttaatcaatggtgggattttcctctataccaatatatactgtggcttgctatgcaatagcaaacaagaaatcgaagtaggataaggttggttatcacagtttaagttttgagtgtgtacaatgagattatgagatggatttttgcataattaagttgtttctttttgtggtgtttgccttcaggtacatgaagaaatcatctcccagctagtactcaagattttctatcttcgttatggtctaatgcagctattcaatcagatgtcattgcttctgcgtaagtctcaatttagtcgttcagttgacaatctcaaagctgctgctagtccgtgccaattaataatagcatccactatttgttttaggagatatctgaacagatagccgagtatttctctaatccatatataatcctttaaaagtcagcttgtgaacttagaagccatttactattccttcccctttagaatgtgagagttatttagtaatagtttagtcactttgtgatatttagacattttacatccaatgtgggatcttataacaagcatgtgttattttgaatcacagatgaaagaggcaggacatgagcaaatcaaaacctttttactcaatcgaccacagccatgacacggcaccgtttttggttcttgtagcagtcaacaggtgaaagagaccagagaggtatgtctgttaacaaaagcattgtgaattttttttgtattgtttatgtcttaaatccaaatatgtgaccccattttggtccatcttgggtcgcacgtgggtgtcccagttagctactctttttacatctgcactgttttggacccatgtcttggctccatgttatttattacttttatttttttgcgccaatgtcattattattcaacccaagataatttttttaataaaataaaaagttcaaagtgaaaaatgaagaaagtaaagcaaaagagatgttaagctattgattcatttttcttttacaaaaacacgtcattttcacacaatcataacgttttcttttacctttttacttaggtttgctttcattatggtctagtcttcataatcgatcatcaagtatattatactaacttttttttcttgacttttgtataaccaatgtatgagaatgtactaggtagaaaacacctttgcaattataaaaatggataatggacgtgaaaactgaaaagaataagaattgggaacactaaatacaaatcaaagacttggctgctatacgattccttcctctatttttctgtgccctttaattaaagactaactaaattcaagaagcttgaaagaagagaagacatgcactgcagaaaacgtaactaatgcattaaagaatctgtgactctctgatgtgtaaagttgagaaaagcattatttaccaacaaaacagtgtaacggtagtattcggttttttggcagttctttaaggggcatttctggtacctaactaaaacttctaacggtcctttttcctaacctttcactatcccattcatatataaatcaataaaaattccttagccatcaccatctccaccactaccaaaaagctttcttctaactcagctgcaacttcgaaaaagagaagctttttcgctttgccttgtcctcatttctctttcacacaacttttctatcttatttaaaaccactctgttcttgttttctcagtcattcctctgattcaatcagattcttttagttttcctgattctttagcagattcatgagctcataagaagaagatttgttgttgagtgttaacccagaaagaaaaaggaagactttagaatcatg

SEQ ID NO: 25730 - DNA, 3003 bp, Unknown; identical to SEQ ID NO: 25729
  misc_feature (1)..( 3003): 2750-1469P.txt file - cDNA_ID_2707942; gDNA_ID_2214523; Annot_ID_184673

SEQ ID NO: 25731 - DNA, 3000 bp, Unknown; identical to SEQ ID NO: 11956
  misc_feature (1)..( 3000): 2750-1469P.txt file - cDNA_ID_2707954; gDNA_ID_2214524; Annot_ID_134129

SEQ ID NO: 25732 - DNA, 3000 bp, Unknown; identical to SEQ ID NO: 11957
  misc_feature (1)..( 3000): 2750-1469P.txt file - cDNA_ID_2707962; gDNA_ID_2214524; Annot_ID_134131

SEQ ID NO: 25733 - DNA, 3003 bp, Unknown
  misc_feature (1)..( 3003): 2750-1469P.txt file - cDNA_ID_2707968; gDNA_ID_2214524; Annot_ID_134133
taaaagttttaggatttttctaaaaagtattttgtaatatatttggaaaaacatttttttctgtattttacatggaaatagactgttttcttttagtgacatgttttatactatactgaatttgttggtaaaaatatatatatatttaagatatttttggtgaaatgatatattgccattcaacccaagttaaagtttaaccaaccaatatataatttcaatgaattttaagtattaaaaataattgttactgtgtgtaaccttgaatttgctttaagaagaaaccaaaacagtgttaaaaaaagcttctcctttactactatgttaggtaacttttttttcttcgtaacaaattttcgctgacatttaaattactttgtttttttctcacaattatttttcttaatataaaagtactttattttgaaaaaaacgaaagaataaaaatgccaaactgatccatttttaaaaattgtaactattttttattttatttttttaatcacatcgctaacataacctgcacataattttcctttcttatagtattatatttttttttatcttataagtcaatttataaaccacacataaaaataattatccctattccctagcatagaaacaattgttactgtgttaaaaccttgaatttgcttttaaaagaaaccaaaacagtattcaaaaatgcttctgatcctttactatgtcaagtaacttttttttttttcaagtaactttttttcttccgaataatttttttctcataattatttattattaatataaaagtattttattttgaaaaaaaagagagagaataatactgccaaactgacccaatttttaaaatccaaactaaatttatgtgtaactatttgtttgtttgctttttattttggaaagctaacataaccatatatacatacatagataaatatacctaatcatatttttccaatcctatagtattatttttatcttataattcaatttataaaccacacataaaaataattatccctattccctagcatagaaaatattttatcttccatattttcgacattttggccatggtacatgcccaaataccgatgccatcgaccaataaaatcttcattcataatccagaagaagataagaatcacacatatagtaattcttttctccttttataatacaaatctcaaaattcatagattcaaaaaccaaatcctctcttaatttgcatcgcaccaccacagatcaaatcacaaaggtgtgtgacccttccatgcccaaaatccaaatctttaggtttaaaaaaaaaacatttgcttcttattatatgtcacatacatgatgtgtttcgtgttcccactttataactctctttttttttttcgttggttcttcttccgtgacctagcctttgattccgccatgtctgtttccatatcctaagtcctaacaagttattgtgttacctgaccttctctcatagttattaaaaacccaaatgttaaagtttttgttttgtggcagcattttaacatttttggtcacctccacctgggtttgttgattggtcatgttattgatcttcaatttggtatctttggaccaacttttttttttcttatatatatctgtataattcaatattgggttctttctaatgtagggtttagatcaattcttcatttcttggtgttgattttgttttgtggaattcagggttttagctaattgttcttccccagttaggagttttacttcttaagatctgaattgtttagattagtaattctgattagtaccaacaatgtcatgtaatataattgacttcgtatgtctgaaaatgccttattagaaatttcttatggtgaatgttagaaatttgattaggataggaaagcaatttatattgactattgtttttgtattcccctgttcttattgcagaattgtgtgtttgtatcaaatcctgggtttaaagaagtgaaatatcttctaagtggtgatttatggaagttaaaatggatgagttggttcttgacgtggatgttgaggaagcaacaggtagtgagttgttggtgaaatctgagccggaggctgatttaaatgcggtgaagtctagtaccgatttagtcacggttaccggacctattggtaaaaatggcgaaggcgagtcgtcaccttctgagcctaaatggctgcaacaagatgaaccaatagctttgtgggtgaaggtaataataatacgcgttttttatctccaaattcggaatctttaaattcgatttttgtatggttaatgtttggtgtcttgttgtggtgttgtagtggagaggtaaatggcaagctggaataagatgtgcgaaagcggactggccattgacgactttaagaggcaaaccaactcatgataggaagaagtattgtgtgattttttttccgcatacgaaaaattactcgtgggcggatatgcagcttgttcgatccatcaatgagtttcctgatcctattgcttataagtctcacaagattggacttaagttagttaaagatttaactgctgctagacgctatattatgcggaagcttacagttgggatgttcaatatagttgaccagttcccttcagaggtataagctcagtatttgatataccgaaggatttggattgcatttggttttaacgctttttaatgttgcaggttgtttctgaagcagctagggatattataatctggaaagaatttgcaatggaagctactagaagcacaagttatcatgatcttgggataatgcttgtgaagcttcatagcgtaagctactctctttgctgttaaagttttagagtatttttggtttgattcggctttgtgtaatgttgttcagatgattttgcaacgatacatggatccaatctggcttgagaactcgtttcctttgtgggtacaaaaatgtaacaatgcagtgaatgcagagagtattgaattgctgaatgaggtaatg

SEQ ID NO: 25734 - DNA, 3003 bp, Unknown
  misc_feature (1)..( 3003): 2750-1469P.txt file - cDNA_ID_2707972; gDNA_ID_2214524; Annot_ID_134134
tgtaacaatgcagtgaatgcagagagtattgaattgctgaatgaggtaatggcttcaccagaggctgatagtgtcattgatgtgtattgtttccttaactgaagccactttatctggttgtgtttaggaatttgacaattgtatcaagtggaatgaagtcaaatcactttctgagtctccaatgcaaccaatgttgttgtcagaatggaaaacgtggaagcatgacattgcaaaatggttctctatatctcgccgtggtgttggcgaaatagcacagccggatagtaaaagtgtgtttaactcagatgtccaggctagtcgtaaaagaccaaaacttgagattcgacgtgcagagacaacaaatgcaacacatatggagtctgatacttcgccacaaggattatctgcaattgactcagagtttttcagttctcgaggcaacacaaattctcctgagacgatgaaagaagaaaatcctgtaatgaatacaccagagaatggtttggatctatgggatggcattgttgttgaagcaggtggttcacagttcatgaagacaaaagaaactaatggactgtctcacccgcaagaccaacatataaatgaatcagttctgaagaaaccatttggttcgggaaataagagtcagcaatgcatagctttcattgaatcgaaaggaaggcaatgtgtgaggtgggcgaatgaaggtgatgtttattgttgcgtgcatttagcttctcgtttcaccacaaaatctatgaagaacgagggctctcctgctgttgaagcacctatgtgcggaggggttactgttcttggtaccaaatgcaagcaccgatctctacccgggtttttgtactgcaagaaacaccgtcctcatacagggatggtgaaacctgatgattcttcatcttttctggtgaagagaaaggtatcggaaattatgtcaacattagaaacaaatcaatgtcaagatttggtgccgtttggagaaccagaaggtccatcttttgagaaacaggagccccatggagccacgagcttcacggagatgtttgaacattgtagccaagaggataacttgtgtataggttcttgctcagaaaacagctatatttcttgcagtgagttctcgacaaagcactcgttatactgtgaacagcaccttcctaactggcttaagcgtgcaaggaatggtaagagtcgaataatatcgaaggaagtgtttgtagatctcttaaggggttgtttatcgcgtgaggaaaagttggctctacatcaagcttgtgatattttctacaagctcttcaaaagtgtcttatcgttaagaaactctgtcccaatggaagtacagatcgactgggcgaaaacagaagcttcaagaaacgctgacgctggagttggagaattcttgatgaagttggtatccaatgaaagagagagattaactaggatatggggtttcgctactggtgctgatgaagaagatgtatcattatcagaatatcctaatcgactacttgccatcaccaatacctgtgatgatgatgatgataaagagaaatggtcgtttagtggatttgcttgtgctatttgcttagattcttttgtgagaagaaagcttttggaaattcatgtggaggagcgacatcacgtgcagtttgcggaaaagtgtatgcttcttcagtgtattccttgtggcagccattttggagataaagaacagttgctggtacatgtgcaagctgtgcatccttctgagtgcaaatcgctaaccgttgcttctgaatgcaatttgactaatggtgagttttctcagaaacctgaagcaggcagttcacaaattgttgtgagccaaaacaacgagaatacaagcggcgtacataaatttgtttgcaagttctgtgggctgaaattcaatttattacctgaccttggccgtcaccatcaagctgaacacatgggaccgagtctagttggctctcgtggtccgaagaaaggaataaggtttaatacatataggatgaaatctggtaggcttagtcgtccaaataaattcaaaaaaagtcttggagctgtctcatataggattagaaatagggctggtgtaaatatgaagaggaggatgcaaggttctaaatcgctcggcacagaaggaaacactgaagctggagtatcgccgcctctggatgatagtagaaactttgatggcgtaacagatgctcattgctctgtggtttcggatatattgttgtcaaaggttcagaaagcaaaacatcgccccaataacctcgatatcctgtctgctgctcgatcagcttgctgtagggtgagcgttgagacctctttggaggctaaattcggtgatttgcctgaccggatatatctcaaggcagcaaaactttgcggtgagcaaggtgtacaagtgcaatggcatcaggaaggatacatatgctctaacggatgtaagcctgttaaagacccaaatcttctacatcccttgatcccgcgacaagagaatgatcgattcgggatagctgtggacgctggacaacattctaatattgagttggaagttgatgagtgccattgtatcatggaggctcatcattttagtaagagaccgtttggaaacactgcggttttgtgcaaggacatcagctttggtaaggaatcagttccaatttgtgtcgtcgatgatgatctttggaattctgaaaaaccgtatgagatgccttgggaatgctttacttatgttacaaactcaattcttcatccgtcaatggatcttgtaaaggaggtatcttacttgttctagcttgtcatacccttgaaacagagatgtgactccatgttgtaaccttgttttttgtccgctgtttgcagaatctgcaactcaggtgtagctgtcgcagttcagtgtgctcgcctgtaacttgtgatcacgtataccttttcggtaacgattttgaggacgctagagacatatatggaaaatccatg

SEQ ID NO: 25735 - DNA, 3000 bp, Unknown; identical to SEQ ID NO: 11966
  misc_feature (1)..( 3000): 2750-1469P.txt file - cDNA_ID_2707974; gDNA_ID_2214524; Annot_ID_134135

SEQ ID NO: 25736 - DNA, 3000 bp, Unknown; identical to SEQ ID NO: 11967
  misc_feature (1)..( 3000): 2750-1469P.txt file - cDNA_ID_2707982; gDNA_ID_2214524; Annot_ID_134138

SEQ ID NO: 25737 - DNA, 3000 bp, Unknown; identical to SEQ ID NO: 11974
  misc_feature (1)..( 3000): 2750-1469P.txt file - cDNA_ID_2708018; gDNA_ID_2214526; Annot_ID_134152

SEQ ID NO: 25738 - DNA, 3000 bp, Unknown; identical to SEQ ID NO: 11974
  misc_feature (1)..( 3000): 2750-1469P.txt file - cDNA_ID_2708018; gDNA_ID_2214526; Annot_ID_184750

SEQ ID NO: 25739 - DNA, 3003 bp, Unknown
  misc_feature (1)..( 3003): 2750-1469P.txt file - cDNA_ID_2708022; gDNA_ID_2214526; Annot_ID_134153
cagcttgaaccacattactaataaaaaagatagaggaccatcaagtgactcaccagagctcctcaacaacaaccgcgcaatccgctaagttccttcttgttctgtaactcttgtacaccttctgtaacgtagttgcagctgcatcaagctcggtgaccggtcttggagagaagaacacaaaaggcgtaggtggagtaatagtaggcttcgttatttggattctctcacagttccttccattcaaactgttacgagcaggcttcgtcggttcaacaatctcctcatcttccttgttcatcggttcagtctcaacttctgtcacaatctcccagctgttgaagctcaaagaccgctccatacccgtcttcggagacttttcctgcgggttctcactcttgaaactgttggttcttgaagtcaagcctccttctttaagttttaagctgaaagatctggtttcaagaaaactctcgacagggttcttgaaactgaagaactgggtcgtcacaacttctttccaagcagacaagagcaaagaaagagaaagacccatctttctctgattaaacaacaatattaaacacgatctcttcctccaaactaccctgcacacgtatcaaattcagatcaatatcaaaaactttgacaaacgaatcttttttctctaagccaactatcattaatatattaatttgtttactgagtcattcctatcatcaccaccaaacacatttattatagccgacgatggataaaaatctaatctcattcagacatttcaacaaacacattcagaataactccataaaggtggagactttatgattttattcatcttttataatcgacccatgtaagaatcagagacatacctcaagaatttgcagagtattaacaccaaggaagacttgaaaaaggtcaagtctttatctctatcttcttgtgtagagaaaacttaaggaggaatgagaaattgaatacaacaaccaagttgaggaataacacaatatatatacacaacacaagctgaataaatgtatagtgtgtgtgtgtgtagttgacgagtattaaatgcggtaaaagttttgtttaaagaaagtcttcgttgaatatgacaaagctttgagtgaagaagattcaaagatggtgtgtctgaaaaaaaaagatattaattttaaaatgatatatagagacaagtaacaaagtgtgtgtgtgatagagaacagaacagtgtaataagggaacccataggagacgctgggtaataaaggtagcttcaccgaaacttattcatttagaaaagtagggacaatttattagtcttttatatatttttcgttttttttttggttatagaatttaaaatgtaatgtgtaatgatatcgaaattcctttagttcaattttggttattttggttatagagtaaaatttatttagatattggaaaaaaaattggacccgattcttttggtttatggagtttatgaaccattccaatacatacaagtaaacaacaaagtgtgtgatagaaaacagtgtatatgggaacccacaggagacgctcagtaagaagaaggtagcttcacagaaacttattaattcaggaaaaaaaaaatattgttgacaaataaacaaaaaaaattgttaattcagtagggtcgtttttcgagcaaatcttatctaccatgacattatgaaaaatatattaatgctgtggatatatatattaatgcagaaattattgaaacaatgatactatatatttactttgtccccaaaaaaaatgatataaatttacctttaactgttgaactagctagttacaatatcgtgaaatgacgttaataatagtaaccactattgcaccactcttttggtatgttaaccagattttttcaccatccaaagtaagaaagtttgtctatgtcgtgtaaagagaatttagacttcaaaaaactttgaaggatatgtataaatagtgcaagaggtgtaatcatctccgtaggatttttaagcagagagttagactccaactctttgcaaaatattgagaaaaactccaaaagaacatattgtcaaaacaaaaagtaattatttgctgcaagtagatactcacacaaaagttaagttttttacttaggtttgaattagtgacgttcattaaagcaatgaacctgttttgaaaacataacttaataggagtttgattgttagcggtagtttgcaactttgcattagtagttcattcatatcaaatatttagtttaaaactgtatgtggtatattcttaaatatcaaaatcacagctagtgaggtcttaaattacatgtggtaggtgtagatgacaaaaggaaatatttgaacaaattattcgcatgtgtagacacgtgcataattgcatatgagcgaacgaagattagtcgggacatgtttgaaatagtttttgtttctcttctttgttttgtgtcgacaccgtacaaatcttggttctttgtgataatcacaattttatataagattttggatataattaaatacggtttggtctgatatatctgtcatttgtcgtgtgcaatgtaattgatgtggtttgggtgtgttgactgttgtctaattgctattaaacgattatccacgcagtattgtcaccgttatcaactctgtacaatctgtttccatcaaatcaatctattcttctggccaaaatagtttatatcccctaaattagccattattattgttaattatgagtgaagagatgataggctccgttttgacatattgcactttggatttaggaataccaaaactaccatatccttgaaaggctaccatatcctccgaggtgagagtctttatgtcttaacgtctaatgaattgccaaacctggatttgtctaaaaaaggtttcaaggaagtgtacttcaatgatagtttattacaaaaatttcgtccgccaaattaactcctttaagtggtaccatatatgtaacagcaacatg

SEQ ID NO: 25740 - DNA, 3003 bp, Unknown; identical to SEQ ID NO: 25739
  misc_feature (1)..( 3003): 2750-1469P.txt file - cDNA_ID_2708022; gDNA_ID_2214526; Annot_ID_184751

SEQ ID NO: 25741 - DNA, 3003 bp, Unknown
  misc_feature (1)..( 3003): 2750-1469P.txt file - cDNA_ID_2708026; gDNA_ID_2214526; Annot_ID_134154
tttcagccaaatgggtgtatcctcttccgtgactatgctgtcggtgatcttgctcaggtttgatccaccttttattacttcagaaattcaaagttatcgctactcgtatgcccattttgatgcacttgaaacgaaaaaatatttctactacagtttcatgcttaaaaaaaaacattgtggtctggctttccttttaggaagaacaaccacttcttaagagatttagtatcctttagaatacgaaggcgtggttaccccttatgtgtttcagtatttcatcaacaggagaggttctctgggaaggatcagaggatcagcgagaacttttatgtgagaggtgatggcactgtaagttctttctttctcctgcgctatttatttgcagtacacatttctataattttgcagatctgtgatgattttgttttctatgcagcgtgcattctacttttctaatgaattcctagaaactttgttttctgaacaaggatttgaagttgaggagcttgatgtttgctgcaaacaagttgagaatcgttcacgcgaactggtcatgaatcggcgctgggtccaagctacatttcgtcgaacaaatggcaacaaaaacccttgtgatagtttgactcctgccaaattagataaatctgaacaacaggatagcattcagtctaaatctgaggagcaggaaagaaaagagattattgattacactgacattgacatatctgatggtctggctatggaaatgtttggagcctccccatcaagtcatgaggtaagagacttcggtaatctcattgtttttacatattttctcgaagagtatttttaatttaattctatgcttacaagtccatatctgtttttctattcgatttgttgtcatagatgagcgtggttaagcttagggattctgcttttaaaatcaaacttttgtcaaaagaatatcaacatacttgcaaatctacggggttgatgctctgggagtctgctcggcttatggcttctgttcttgacaggaacccaaacattgtttctggaaaacgggtgttggaattgggttgtggctgcacaggaatttgctcgatggtagctgccagatcagctaaccttgtggtagcaaccgatgcagacacaaaggcacttacgctattgacagagaacatcacaatgaacctccaatcttctttacttggaaaactgaaaacaagcgtacttgaatggggaaacaaagagcatatagaaagcattaagcgtttggcttgtgagggattcgaagttatcatggggacagatgttacctatgtagctgaagccattatacctttatttgaaaccgcaaaagagttgatcttacggaaaatgggagacgacttagaggtgcaagagaagccggcgttgattctatgccatgttttcagaagggttgatgaaccttctcttctgtcagctgcatctaagtttgggtttaagcttgcagacagatgggctgcaaattcaaaggaatctcctattgggaacatcattgacagttggttttccgaaaaggatttggtcgcagaaatcccgagttctgcgttgcatattctctattttcagatggagtaactatgtggtagaggagcaaatgttgattaactggagagttcttttatattaaaaaatcctcattgaatctcaaatcaatgaatgtcctacatgtattcttctatattagcaatggattttttgggtataaaactattacatgatgatgacttgttgttaccagccttccttatcatccatttccctcacgattttgacatttttaatggctttatgagagttgaatccacatgttaactcggtcctgcagaaacactttcccttttatgacttggattttgttggcatgttagtttagtcagtctccccctcatctaattccatcaccactttccctcattctttgccacacaaaagttgtccaaatgttcacatttccttctacatgagcaccgccatggataggtgaattatacatttacatctcctcttgtgggtttagcttgaatcataatgttttggagagttcttgtgatagattcacttccacaaaaaacctttgcttcttcaaaattactacataactccatgacataaaaaaattactaaaaacattattaattttatttttatattttttacacattgaccaaaaaataacatgttatgaaaactgaaatgataaaaatatgaagaatagtataggttttttatggtaagagaagtttagttagtgaattttttttttttttttttttgtattctcaaaatataaatagattcttattttatttcttttttcgtgtccttaaatatttatctgaatttttaattaataaacgacgatcaaaatagttctcaatcagttggatcatctttttattcctaaataaataaactccaaaagcatctctctgtttcttctcctctcttcaagctttttgtttcgtctcagtcgtcgtcatcatctctgacaggtgaattgaataatattccactttcattattccttcttcttctttatagcttttccacatgaatttttgtgtttgtgcttgtagatctaaggttttgtccagtttccggagtaattgaaatttgcagagaaagaaaaatccaatttttgttcattttggaaaaaatctgaattagactgattgatagtacacattttttagaaattttggagaaacccatgtatagtaagctacaaaatgatcaattatactcagatcatttcagatatataatgagaaatggtagattaatcattgttatttgttaggttgattcaaataaacattagaagctatttgatgaatctgtctatgtctacttgtggcagcaaggttattcacataggcaaagaagtcattcttttgcatgctgttttccaataaagttaattctctaacagaacaagtttcgagattggatattgacgacaacgatatg

SEQ ID NO: 25742 - DNA, 3003 bp, Unknown
  misc_feature (1)..( 3003): 2750-1469P.txt file - cDNA_ID_2708030; gDNA_ID_2214526; Annot_ID_134158
atccactaactaacattttgattcatatatatatatatatatatataaactctcttttttcatttaagaaaactaaaataaaacataattttaagtgacacataaacggcaaaaatgaagtttaatttgtaattatcatgatcacttatcgcaaaagtttgacaaagcaccatctcacttttgcgagggctcaatcttttcacgtcgatcaccacgtttgtgaccgatgcagaatcattaacttagtgactatcctgcctcaatacctatgagatagtagccttccgatcgaattgtcacattttgtaaaagttttccaataatttaatggaaatgtggtagccttccgagaagggttatttcacatataaaatttggacaaaaactactggtaagtaacctctttaaaacgctatacatacgagtggcacaaaattgtaaatcattacaaaagaaagtaataatactgagtaaaatattctttaaatataaatgtttgaattggtcctatatatgaagtcaaaaacaattcatattaaaaagaaaaagcagacttatgcatgtgatccacagcaaggacaacacatgcccaaatgggtttctttaagtacgtgtgctttatatagttgcgttatataccctaaaaagaaaaaagaaggaaaatggtgaatggtgatcataattacgacgtcgaaagaaatacgatgaaggtacacgctattacttatagagttatcgttttaaaattgacgaaacgttatgatcgtgtaaacatgggattttaaaaatcatgagaaaacaaaatccacaaacgaaacacgacatcatatatatattctaaatatgtagtattgatatgtgatcaaaacattgttaggttaaacttgaaaaggaaaaaaagttgctgttaaaagaagttgctaagacgtatgggaaattagtaatgttgacaagagaggtatggatgttgaaatgtttatgatgatatctaacttatggctgtcttctttaatgagtcaaatggctgatgcattttacgggaagtagttgaagcaaccccttataccattattgcacattattattatttccctctctcttttttgtattgtttttaaataaaaaaaaacaatttcagatcggttaggtccttttggaccatgaattttgtaggccataaaaaaataaaaaatagaagtccaaaacaaatgaagcagtgaataaactttaccaaaataagatccaaacacgtacgtgcatgcttgaatttgttcataaatgactgaagatttttcatttgattgactaaatattgtttttacttctttgcctttttttcttttataggttttgccaagaaaccaaaagcataggtaatgaacatggaaatccgaaccatcttcatcttatatgatacatactcatttagcaaagaaaaataattaaaggatttagtttttggttgtcacaaaaaagctttgtttcaagaactctgtcattgcgcttatatcaggaaagaaacttgaacaaaaaaaaagagctttgtttcaagaagaagggtctatactctatagtctatatatagtgcaacagaaaatgatcacgtgaggttgtagatataagagaagattatcgaaccaatcttctaagacaatttcagacttaatagttaatactagtagttttcttatatatacaaccaaaaagaaacggtttaagaagtgaaatataaaaaaactatccaatcttatccaacgagtcatggttctaaactcccgttgacttacataccataaccacagtcaaccctaagataaagatggctaaaatatgaaataattgtggcccttcttattattatatcaaatataaattcacaaaaattcaatggatgaggatgatagaactgggtttaacatgggcttccaacctaaaaccaattgacaataggtggagtggtccgaaccttctatatatcacttgataattcctccaatttttgatgtggaactttctttcattaacaaaggatacaaaagaaaacctctcataagcgacaatattaaataggatttagttatttagcaaaaaaagtagaactttagttatagtattttcataacaattttcttattatttaaccgcttgttaccaatcataacaaaaacaaaaacgtgatggatagttataagatgatgaaattgaagaactctgaaagagaggttcatgcttcgacacacaaatctcgtcaagttttgtgacttcgtctagaaacgaagattaccttataatctagctttttattctaattttttttgcattcatggttataaatggaagggatttgatgaaattagatgggattggagatggagaaggatggaggcacctgaagagagaagaacaattgttaaaactataagaaattaaagaataaaaagataaaagagtatcatgaagagtgaagaagaaacaatggtcataaaactatatttgcgattatttatgcaactttatatattttttattttttttaatcttttaatttattttatattactattgtaatgagattttacttataacaaaaaaaaatatttttactattcgacttcttgttacaacttaaccattttcattatgaccaaaaacacactttcacaaaaactttgaacaattttcatttctttttgttacaaacccctccaaaaccaatcttaaaacagttttcatttacataaaccttgagattaaatcacattaaaaatcccaaatcatatgggtttaaacttaaacagaatcttataaaaattcgaaagcccaatatgttttgttttcccaacaataaaaatagattggaacagaaaggttgtgggaggcacacattacacaccaaagcagtgttttctttctcctgaaaagatttttcaagctctctctttctctcaaaggtaaatgcttctctgatttcgccatttttgcttactcgattcaaaagacatg

SEQ ID NO: 25743 - DNA, 3003 bp, Unknown
  misc_feature (1)..( 3003): 2750-1469P.txt file - cDNA_ID_2708034; gDNA_ID_2214526; Annot_ID_134159
gattgtgttcagtggctagctaccatattaatgtgaagaggcataggatgttagtagaactagacatattttcaaatctaccctggtcttgattcacttgttctgacatgattttgcagttgctgatacacttctctggaaggatttaaagcagactcttattgccatattcattctaattagtatctattataactttgttgcaactgggtctaccgtcgtaactgctctttcgaaggctctattggtagcatctgtatttttgttcctccatggcattctaccagagaaaatgtaagattcctgagatgccaacttttgatagattttcatttatgtgcaatatgaactaccttaacctagttctctaataatggaaaccagaaggtatatgccaaacatttttgaaacactgtgtatcgtactcttcaatcaggaacaagtaatataagcaattgctgtctatttcagtttacgaacaactgaatatagatgcttattttgcagatttggttatacagttgaaaagattcctgcatcgcaatttcacctctcaaaagactcatcacatgacctctcattgtcagtgatctcttcatggaacaccactgtaaaagctttaagatctctttgccaggggaatgattggagcttctttttcaaggtatttttccttgaactagttattgctggcaagttccagtcgtacgatatcttatcccaacctgaaacagaaatagggacaaaattcgattgctgaagttctctttggtaataatattgtaacaccgctttggtgtttttaatgtcataggtggtcttcgttttgttagcattgagtttggctggagccatatctcttcacagcatatttgttataggtacacactcactctctatctagttttactacatgccaacgctacggttgtatgaattatagttcttcaacaataactggttttgttgttctgtttttgttcaacaggactgcccattgccttccttgcttttctcgtgtacgaaaagaaagagcaagagatcgactcaatagtggtgagttttaaatctttcgcatgcaagcacaaatccgatgtgtatgagaaattgttcggaagcaagaaacatgactaaaaaccctttttttgcccagcatttgtaattttcttttgtttccaacgacctctaactctggtttgagcttttttcaagttttattatttgtgaatctcttttttactcatttctattggtctttgtttacatgcttggagaaaaatggatgttgagagatgccctattaagccacaacttttgtcctctaacatgaaagtaagcattgaaaaatcgaatgaatttgtgaaaaaaagaaaggagagaagaaagattcgcaaggttgattcctaaagcacatgtccttagtcccgtgcctttgaatatagaatcaattgatagattatcaaaccacaaaacaactctaatattgaatttaatgacaaaatattagtaaagaccaactttatgaagtggcagcctttttatctacttgttgtaagtctatttctcgaattttcctttccaaatatccaaaatgtaattaatgtaaattgagttaactatattccaatatcattaaaatcatagagacgaatttcataacgaataaagaaaaaattttaagcttcaattttattgttaatattttgttgtacacatgttaaagcgaataatttagcatatgaaattcttacagaaccacgttatattacatatgtaaacaacatatctccgaagtagttcttttgagtttaatttaaagttgttaaaaaataaagattatctgaaaataaataataatacaaaaaattataaaaataaatagaaatgtttaactggatcccatccatctaaaaacagaagcttacaaattaaaatttgtattatcactccacttttattaaaaagccaaaattacaagacttgttataattacaagagttttggtgtaagtaattaataaaaagaagtcgggtcgggtcgggtcaagcccaactatttttgaatcacaagagttatctctcagtctcactagtcacttgcaaagaagcgttgtgtgagagttttgaatagaaagagtagttgtctctcattccccaaatttggaatcacgccgataaagccaaaattagccccacgaaaaagctccgacaaccaaagtaaccatctttttccgaggattcatcacttaaagcaccattttgtccacaatcactcaaccctaaaatctttttctcctttgaatccttttcatgcttcttcttacattccccgatttctttttcctctgagaaagtgatttccttttgattttgattcttttttagtctttctgcaatgattccgtattttgaattaaggatttataaaaaagcagagattggagcttggtttgttgtctatcatcaactatcacaatgggtgctctcagaagaagaaatgttggtttgattgattcaaagggttgttctaagttgtttcctgttttacaatctcctcctcttactactacttcaatgtctcagtccaatggtccattctcttctcttgtcatttgtgtcactggtttatccaaaggtaaagactttgttcctttttcaatctctattaggcagaaagtttgaatttttatgttccatcaatattaaagttttattcttctagactttcagattctgttgttataactttggttttatgtttgtaaatttaaagaatttgttcctcttcaatctccattagtcagaactcagaagtaggatatttatgttaatcaatctttagatttcagatgctgttgtgaatgtgatcttgttgtattcataacattggttttgtgttgtgatatgttaaattgctttgtttctttgcagatgcaagaaaacaagtcaaggaagcgacagagagactcggaggcgagtacactcctcatcttcaccagcgatg

SEQ ID NO: 25744 - DNA, 3000 bp, Unknown; identical to SEQ ID NO: 11981
  misc_feature (1)..( 3000): 2750-1469P.txt file - cDNA_ID_2708038; gDNA_ID_2214526; Annot_ID_134160

SEQ ID NO: 25745 - DNA, 3000 bp, Unknown; identical to SEQ ID NO: 11981
  misc_feature (1)..( 3000): 2750-1469P.txt file - cDNA_ID_2708038; gDNA_ID_2214526; Annot_ID_184762

SEQ ID NO: 25746 - DNA, 641 bp, Unknown; identical to SEQ ID NO: 11982
  misc_feature (1)..( 641): 2750-1469P.txt file - cDNA_ID_2708052; gDNA_ID_2214526; Annot_ID_134165

SEQ ID NO: 25747 - DNA, 641 bp, Unknown; identical to SEQ ID NO: 11982
  misc_feature (1)..( 641): 2750-1469P.txt file - cDNA_ID_2708052; gDNA_ID_2214526; Annot_ID_184768

SEQ ID NO: 25748 - DNA, 3000 bp, Unknown; identical to SEQ ID NO: 11615
  misc_feature (1)..( 3000): 2750-1469P.txt file - cDNA_ID_2708064; gDNA_ID_2214506; Annot_ID_133750

SEQ ID NO: 25749 - DNA, 3000 bp, Unknown; identical to SEQ ID NO: 11615
  misc_feature (1)..( 3000): 2750-1469P.txt file - cDNA_ID_2708064; gDNA_ID_2214506; Annot_ID_184112

SEQ ID NO: 25750 - DNA, 3000 bp, Unknown; identical to SEQ ID NO: 11614
  misc_feature (1)..( 3000): 2750-1469P.txt file - cDNA_ID_2708068; gDNA_ID_2214506; Annot_ID_133749

SEQ ID NO: 25751 - DNA, 3000 bp, Unknown; identical to SEQ ID NO: 11614
  misc_feature (1)..( 3000): 2750-1469P.txt file - cDNA_ID_2708068; gDNA_ID_2214506; Annot_ID_184111

SEQ ID NO: 25752 - DNA, 3003 bp, Unknown
  misc_feature (1)..( 3003): 2750-1469P.txt file - cDNA_ID_2708072; gDNA_ID_2214527; Annot_ID_134195
cacatgaaatggagattaaacaaataatcttacggtaagattcgcattttgttctaactcgaggaagtggtgcaacgtgatgacattctaaaactccactaatccaatggttccctaaaattccgacgaatattaaataacgtaatattctatgaataagtctaattttgtttttgcatcaacttcgaataatgtcatttggataaggacgaagcatgtactcgtcattcgtctgcgtccatcacaagctaaatactaaaccaaaattattgatcatattattggttgctccattttcattcccttatatatgctgttgttcctatatataccggaatccgtatatctcaatactacatcgctagatcaacacaacaattatttccatattatcatcctcaaagtttgagcatctgaatttcacaatcagacccaagaaacagctacttattacttgagtcgatacagaatcaaaacatatattcattttgatctatagtatgagatacttataagaatataagtaattacttagataattttttttacttattcctccaggactccatccactaactggtctaattgggtaggtacatgattttcattactattgtaatcattaatggtcattattaactaggtcagcgtctctgtatgatacaaatgtatattcttattgttaaaaatgcagtattaacttaacattgataccaaaaataaattaaaaaatgtagtattaactttgcagtatttatagatatatttaaatggatagtcagacactaaataaggacagacagatctagcaaggccaaacgatattaaaccccattttatctgatttaattaattaaatatcattttcggtaaccaaccagaatattcaagtccacacgaaatacataatactattgtatacttgaactcttcaaacttctacgtcatatgatgttcacaagtttctaatttagaatattcaaaacagctttggactcatttttttcttgtagagtcggtacatacgcaataaccacatttagtcattagattcaattatctatgttttatttcgctttcaaaagtttagtagtgtagaaatttgtccattgtaccataatgtaattgaggtagaacaatagaacatgaaatcatttaacaaaaacaaaatcgaatattatagtcacgaataaaaaataactcgcatcaatctctatgtttggttaataagaatattggacagtgaaaagtcgtactttaatttttcccataattcgacgtgagacatgtgagtggccgcagggagacacgtggcggttaataagacgttagactgacctgacgtggacgagaataccgatgtgtcaagtggattccagctggcagccacttggataaagagagttggatataacttgtaatgtaattcaacacaaaaaaaaaaaaaaacaaattctaagaaattaccttaataacatatgaccaagcttactttttttgtaagatgtcataataagtcttcttttaatgccccatttaatttccctcttaagatgaagaaaaaattatatcttactctatagttaaaatatagaactcactctctggtctctaccaaaaaaaaataatatatatatatatatgtatatatatatatatatatatatatatataaaactcacttgtagataataacttgttgaccaaacttacataattctataatattatagcaatcatttctttagggtatattcgaggagccaaaggaaatgtttgatattttataatataattgaaattaattactaattgtttttaggtatagggcttattaggagaagtgtattcacaggctgtcgtgtgagctttatttagcttttgttcttcgaatgatgcaaataaacagctggccgtatcacaacaagacactgtcatcgttgttggtgtacgcaaaggatggatatacacatttttgtgtttctattcgtaattatggtttgtgtaatttttgaactttcacaaattgacatcaataaattggtctctttcggacatattttatattatttgaaatgaaaagtgattggggttctccttttttcttattctactatatcataacatagcattaatttttgttgttgttaaaactcatattaaaattatgcgacaagtaatctaattaattttaaaactttgattctatttagaaatttatcataaaacccaaaatttaatcatctaaaaaactaaaacatagaacaaacaaatacatagccagtctttggctataagccatggcaaccaattcgtttggtaatttgtcatcttctaagtttgaagaaactgcaaattattcaaaaaatattgtttgacaaaaagacgagtgtatcatcattcccattcattacctcataaatatttgaagcacatttttctacatattattttgtttctacttaaagcatgtttaattgaatagactttgatatccagtatggctcattattcatatgccgaaatgaattcaaaacttattgatggacctaccaaaaactcccaatgactttatcataaggttcataacacacacaaaaaaacgcatttttgtggtctcttctcttaatcacagatttttttttcttaaaaaaactttctctaatcaaagttaaagaaaagaaattacagtcaaaacaattaaattagtattttaattaacaaaacagttaaacaaattcaaaataaaaactgccatgtggtctctttcttctctgtttctctctcccttcctttaagaacgcgtttgcagactttgatcagacttcgcgttcccgccgcccatctccctctctctctctttttctctctcacacgtttcttttttgtctctctccctgattcatcgccgtagctgtgtgaccgaacattgctgcgagttcctcaaaacccaaatctttcttcctcaaagactctgttttttctttcttcctttcttcaatg

SEQ ID NO: 25753 - DNA, 3003 bp, Unknown; identical to SEQ ID NO: 25752
  misc_feature (1)..( 3003): 2750-1469P.txt file - cDNA_ID_2708072; gDNA_ID_2214527; Annot_ID_184806

SEQ ID NO: 25754 - DNA, 3003 bp, Unknown
  misc_feature (1)..( 3003): 2750-1469P.txt file - cDNA_ID_2708080; gDNA_ID_2214527; Annot_ID_134192
tgtccatgcctccatggtgaaaatggttatcacaaagacgatgaggatgagctttttgctcaagtcatagtgaatggacatacagacagtgaaggaggactgtggtgttgacgttgtttttgataacgaggtgagcaagaatgtctattactcctaaacactcctttatgtgcgaaatagagaggctcttgaaaataccttctagaatcagaccattaactagtcctcatgaatctctctgactctggtggtgggaaggcaattttgtaagctagggttcttaatgcaatctctttgcaagactctaaattctcaagttattgaaaacttttggcatgaattaaagttagaaatcgatcgtagactgaagactgaaattagaatgtttaggtctgatttcttttggttgagtagaactcaaacagaataaattttagagaatgctatacatttacgtctataatgattccatctctttagtcttgagcatagctaaaagtctatcaaacttcatctctcatcaacaagacaaaaacattcatcgctatcttcagaacaactttgagtggtgcgaattttggtggcaatttcttgaccactttcttctctttgtatttcttaccaagcactgaagcttcattagcgatagaattatgcttagatattgagggccataagcataaacttgacctgtttcctttctagaaccgagtctaacaccactaaagctaagaagcttcgtaagtcagattctaacacactattgcttaaacttattgaatcaattgatttttttcataacataactacgaagttaatgggtcctaaataattttcgagaagatcgatcatgcaccaaataataatatctaaccatccaattacgataggaaaaaacacataagataaattctcatatattcttagggattatttagccaacttaagttagtagtttaccaaagcgtagtaagtcaaaaagttttatggaaaacttggaatgcgcaaacttgagggtgagtaccaaacaaagaaatatggccatgaaaggaagtaagatatatagtaccaaaaacaattatttgacgcaaatcacctttcctttctctaattttcaactatattaaagaaaattatattgtcatcaatctttgaataaacagttaaactaaaactttaatgtaaaataaaatatcataaatacactttgtttcctataaaagttatgtgtaatttttatacagatgttctgtattatgttaggaaactaatattacctgaattgattagtctaattattatatttaatagtcatccaaaaataatagaaagcactagagagtagagagagtgtcgaccaacacaaaagaaaaaaaaaaaagagaaaaagtggttaaaattgtgatgttggcaaatagacgttatactgatgtgttcggatctcttatattaatggctaaataaatcaacggccgtccttataaaaggccgtaaaaacaaaaacaaatttgaggatagcgacatttcaagtttcgaggtatgtaacgtaagagttctttaaaggaaatggaaagtaacgtaacaattgcatagattgcgatatagtataagattcgactacatctgtcaacatatttattaggtctatctctggcgttacacatcacacatggagtctaaaattacttttatttattttgtaataagaacaaaattataaatggatattaaaacaagaacttgaaatccaaacaaaaagtaatattgtatacgatgagataattaatatgttatgattctaatgttttaaggaatatggtaaacaaaaaattcttaaaaattcattaaaacctatgtatatcagtatatttaattagttttttctaaatataatgataattataaatatagatcgtgtcaaactagttaaaacccgatagtcagacactcaaatactcatttggttcaacaaatagggtacgtatatatttataaaaaaatcatttagtttatatattgtctattatttgtgtcttattctttttttttcaattttaatattacttcaatgcgtgccagttcaaaatcttacctataaaaggattacgactacatactaaatcacaagtaaaataatcgcatcgaaaatcttttttattgtgctcttcgtctcttccacggtcgtatcgaattgccgttttttcactctcatcaaactgatacaaaaaaattccaaacttcatttttctttgcaactgcgaaacaaaagctttttgctctttcttaaattagagttacaaatccaatcgtgaaacaaaactttttgctcttgcttaaattagggttacaaagtccgatcttaaataatatagatattctgtatctattgaattataccactttaattttcaatattcaagtaagtttttttctttcacaaacactatttatattatttatattaaattatagactcttcgctagagaaaactattcaggaactgatgtaattacatagaaaaaagactatttcgaatccaaacttttttaggtaagcaatctagtcgagcattagaactacgaaaaataaatttaatacggtaaaaaaaaaaactaaatatcgattccaaaagctaaaaatcaccatttcagtaactaaaacctccaatcccacttccaccaaacctccaattccacttccaccaaaaaataactattcaagtaaagggcttgggtagtaatgaacggccacgatttcatcaaagtccgtaaaatcagccttttgaacgtgagagttgtaagcatttcagagagttttacatgcaaaaagagtttttgaccataaggatctacatttccacgtagatcaacgtcaagtcacgagactaagctctatatataccagtagaggagcacattgtttgtaacgtctacaaaatttagcttttatcacttaattacaaaatctttagaatcgaaaaccaaaaagaaaagaaaaaaatg

SEQ ID NO: 25755 - DNA, 3003 bp, Unknown
  misc_feature (1)..( 3003): 2750-1469P.txt file - cDNA_ID_2708084; gDNA_ID_2214527; Annot_ID_134191
tgttaagactcccaattcgaaataaactatcattcatatttatgtaattatgttgcaaatgtagtgttggagccaatgtgaagggatttttcgcatggtcgttgctagacaatttcgaatgggcaatgggatacacggtccggtttggactggtttatgtggatttcaaagacggatgtaagagatatcccaagaaatcagctgaatggttcagaaagttattgaatgaaaagaaaaacgattgatgatgatgagatatgtatatttcattatattagtttctctgttactcttgagagatttatatattttttcccccctttggaaataatgagaaatggttttagctattttcacaacgaaacccgattgatgtatagctgatggaaatcatctttcgatgtaattacgtacgttttataaggaaacttaatattaaacttgttgaaaaagttaaaaaaaaaatagaatgtgaaaacgatataggcaaagagtatgtaacatctacaactttcagcatatatcaatttgaaaaaaaatgttcaatctttaaatttttgaagaatctcatggttttcaaagatcatcatttatggtattatgagttggattattgatatttttttaaagattgtgatggtcccattattgattatagcatgtgagatgttgacagaactgctataatgtgtaacaattattcgcttcgatgtgagaatattctattaatacgcattcaaatagaaaagcccagtgaatatgaaaccaccaaatataaaagcctcacaatttatttatttattttaggctctgaatttttttattttcttattatggtaaatcgtctttttttgttaactttgtctcacattcccttagatggcaaattagcatcttactttacctgaatcatttaacttgaactgaaatgttaacgttaatgtgttccaaactttcaatctcaaaaaccaatttagtaatcgttcaagcagaatttgtatcaaacttttcttgtgtatcaaacaaagaaaaaaaagaaaaaaaaagaaaactgacgttatttcttttttcgttttgaaaaagtaaacttacgatgacgtcatttcaggaggtttaagcttcaacttttccactaatttcgaatcattcgaaggtttaaccgtttaaatacatctttttctcacactaatttctaagttactactacaatattattctctacgaccccaccactaaccactattatccgaacttccgaaggaaaagttcgtcacgccgtctgactttagaaaagcacaaagagtaagatctcaactagtctctcatgcgtgcatagcaacaacgtaacaagaagtcagtaaaggcggactctatatgcgaacttagtacctgaatctgatccaaagacttatgcacggtttgatgtaaaatcagtagtctagtcgattatttttagtgagttttaattagtaatagctacataaatcctaagttcaagttacgactattggtttacgctttcgcatatattatattaaaactgatagaggaatatcaagatcgagaaaagtttgttagagaacaaaagcaacaaactcattctcattcattctcttaatcaaaatgattacatttccctctcttatatagtatgatagttaacgagacattaagccaatgttgaatacacggtttacataaaccgatcttaatcgattctatactctaatacattgcgttggtagctcacatgacataagattactttatattatttaaatcattctgaacattatcttaatgggctaagctttcccaatttgaccatgcccaactttttaagagaagatatgttttaaaattaaattgcgtatacagattcacttgacgtcactagccacgtatagtacgaacttatgaatgaagacataattgcaaccatatccaaactgattaactatactgtatccgtatgtataacacctacaacgcctgcttgtaaatcatacaggaatgaatttaagtattttttatatcttcgttaccaataccatatcaaatacattatgtggaaaaaattcaaggcacatgttcatccaccagcgaataaaaggaacaatatctttctttgtggatattcaaatgcaggataattcacattctttcatatttgcatttttaaatacatggaattaatctttgatgtcatttccttgtggaatcggaattggatgtttttgataagcatttcataatttcaaagattaattccagaagaaaacgaatttttaaaaaaaacatttatctaaattttcaataactaaaactccaattcctttgggataaaataaaattccaattccacaggaaatcaaaaacaaaatcgacaaaaagggtttggattgtaatgaatgttacaccgcaacagccacgatatgaacaaagtccgtaaaagggaacgtcagctttttcgaacgtgaaagttgtaagcgctccagagtgttttacatgcaaaaagggttttcgacagtactgaacatagccaattttaagaccacattcaatctccacttgtccaagtacaaacacacatgcatagacactaagacacacacttatttctatagattagaatgtaagcagtgatcccgaccacattcaaacacgaagatgaacagaagctaagatacggtctcatttgggggtaaaaagaaaaggaaaccaaacttgaattctcttccttatttaattatattactatacttctcttcattagggcaaatcattgtttaatgttaattaagttactttatgatagtaattacatactaatatgagtataagaacatacctttccacgtagaccaacaacgtcacgagactaagctctatatataggagaagagaaatgcttagtttgttacaactacaaatctcatctttgaaacagtttgaagaaaatacataacacttttaaattccaaaacacaaaaaaggaatatg

SEQ ID NO: 25756 - DNA, 3000 bp, Unknown; identical to SEQ ID NO: 11995
  misc_feature (1)..( 3000): 2750-1469P.txt file - cDNA_ID_2708128; gDNA_ID_2214527; Annot_ID_134173

SEQ ID NO: 25757 - DNA, 3003 bp, Unknown
  misc_feature (1)..( 3003): 2750-1469P.txt file - cDNA_ID_2708139; gDNA_ID_2214527; Annot_ID_134169
aaacaaatgataatttaatttaatagaatgataattgatttatatttgcttcaaagagaaaaaagtttaaaactgaattatatccttcttgtcaatgtcacagatagtttaatactttatatagataacgtcgaagacgaggttacaaaaaaaaaagaaaaaagaattctggttagagttgagaaaaaatagtaagttatgtagcattccacttctataaattccaatgaatactgtctaaaagttttgctaagaactgtatagccatgatgagaatgaccggtttcatagtagctatgatgatagcagcggcgatattcactacttgcgttgatggaaacaagttcttttatcaccgggaaattaaagtacttcgacatttgaaacggttcaacaagcctgctcttaaatccattaaggtacatatcttatataaatttcatgacaaaaattaaagaaacctttttagagatgaattctaatacgctttcattaatctttcttgcagagtgaagatggagatgtaatagattgtgttcctatcactaatcaaccagcttttgatcatcatttacttaaaaaccataccatccaggtttggtttcacttccaagtctatctattgttttaaaacattatgatttttgaatcaattgtgacgtaaagtttacacatgcagatgagaccgagtttctacccggtaagtgattctacgtacaccaagagggaggcaaaggctgtaactcaggtttggcacaaggctggagagtgtcccaaaaacactgttccaatcagaagaacaaagaaagaagatctcttgagaccaaaatccatcaggagttttgggagaaagtctcatcaaagcattccaagaactacaacctttgatccaacattaggtcatcaggtacaagtcaactacatgcacacacacacacaaacacatgtgtatcattgttaatgtcttgtggcttacgcttttcatttcttttggagtgcctttagtacgcgctaatgggtgtgagaaatggaaaattttatgggacagaagttgcaataaatctgtggaaaccatatgtccaaattcctaaagagtttagcttggctcagacttgggttgtgtccggaaatggctctagtctaaacaccattgaagctggttggcaggtttggttccttcttgactacatcctctttgcttttatgcaaaacacttaacttgctctaatattttttgtcttaatttataggtttatccagaactatatgatgataataatcctagattctttgtttattggacggtatgttctccttttcagcagatttaggcgtacttatctcttctactatacactaatcatttgaaaaacataaagattgactagttttctgatccggaatagaactatagaagtctataattcaagttaagtctctagatttatgtatttaaggatttaattaaccattatgaaatcgttttttttttttgggaaatagcgtgatgggtaccgaaaaacgggatgctacaaccttctctgctcaggttttgttcaaacgagtaatcgatacaccgtaggtggatcaatcaccaccatgtcacgctaccgtggaactcaatatgatctctccgtacttatatggaaggtaataacgtaattatatttcacctcaacaacatcagattcaaatattcaacgtaacttcagtggcaagttacataccttttcgctcaagttacctctccatctatcttgaaatggatatcaggaccaaaaaacaggaaactggtggcttagagtcaatgaaaaagacgttattgggtactggccaggctcgttgttcaattctctaggaagagaagctacgagagttgaatggggaggtgaaatcattaactcaaagaccggtgggagacacactaccacagatatgggaagtgggcattttgcagatgaaggttttaagaaagcaagctatttcaggaatcttaagatagttgatggaaccaatactcttagagaaccacaaggactttacttctttgctgataaacataactgttacaatgttaagacaggaaatggtggaacttcttggggggctcatttcttctatggtggtcctggtcgaaacgttaaatgtccttgattaggatctgtgtgttcaaaagcttttataatctcacatacacatgtctatatttgaataagaacatttgcgaaaaccacgtcatcagagatgtttatatctgtcatttttcttaatttattaatgaacagtctgttgacagtgaaattgaaatatcgagaataataaatacgtacatattgataggtaactaaaatacagctggtttaaatcaaattgcaaaaatataaaacattgcacgtttaacaaatgtaaattaaaccgtgttcgttattcgttattctttgaccagttgaggaatcgtttggacggtagaatccgtcactatgcctctggaatatatataacgcatgaatccgttaaaacaaaactagaatgataaagaattatgtattgttttcaggtaaggcaaattatatagatgtgaatatgtgatatatataattgcagagctttaatgtgtattatatatacacaatgttttgccatgatgttatattattcataccaaacaatccacaagggaagtaacatgcgaaatggttagacgtgcaaaacattgcaaaaaatctataacaaattaactatgttgatcgaatcaaaggccacacaacataacagtgatttgcgatgacttttcgtttcacaataaataccaaacatgtgctgagtttctctttagataagaccaaatccttgaaattttgtgtatgtggttggttgatctaactcgaccaactatattgattctgtccccatttccctttaattctgtctttaccacaccacaacactaatcataaaacgtcactgtttgtctttgattttgaattcgtcaatatcaaaatg

SEQ ID NO: 25758 - DNA, 3003 bp, Unknown; identical to SEQ ID NO: 25757
  misc_feature (1)..( 3003): 2750-1469P.txt file - cDNA_ID_2708139; gDNA_ID_2214527; Annot_ID_184779

SEQ ID NO: 25759 - DNA, 3000 bp, Unknown
  misc_feature (1)..( 3000): 2750-1469P.txt file - cDNA_ID_2708146; gDNA_ID_2214528; Annot_ID_134236
cttttaagtcttgtatcactgtaatgtctgttttcaataataagattatggttaggtaaatttggttaggtcctttgttctttctggttgtgaatctaaaaccttggtacatagcttataaagatcaaaccattcagtaactgtgatagttatgttgatgaggatggtatgatatgtctcatctatacaacattgaaagctgtttaaagaggaatttgaagaagcttcaagagaattttgttgtctatggtttcagcttggatttaatgtgtatgttggattatcaaaaattcaaaattataatgtcaacaagagtctacaactactgtaacaattctcttctcttacattggaaactaattttaaatagcagaagcaaaaagtcaaaatgtagatatggccggaaattcgcactacattttaactgacaacggttcctattgagacgaaccagtagtaacagcagcatcagcagattgctgagaggatcctgaaggtgctgcagacacagagtcaggtggtggagcagagactgaacttggatgtggaggattaggccttgaaccgggacctggttgttgtgggtaatcatgatcagcttgttgtgaatggccatggtggtaaggaggatactgctggtaaggtggttgcatatatcctccatatgatggtggcgggtatggctggtgctgaggatagtggccatgtggtggcatagtgtaagaagaagaagaagctcctctgttgtcactggtgcttgaaccgctttctttggacgaactaactgcacccattctctgagggtccattgatgggtaaaatggtctgtcttgatgaggaggttgtggtggtggtgggtgcatatagtattgtagcattggtggaggttgattctgttgctgagatataactgctcgaggtagtaaaccactatgagccacactgccctgttggttagaaccatcttgatcaggtttgggaacctgaggtcttccccatgtgagttttagcctctgaccgttgacaactagcctgttactgagctcttctgcagctttctctgctccttctcgggttgtgtaagtgacaaacgcacatgctttctcagccaagattctgatggattcgatttctccatgggcgtagaattgatcacgaatgtcttgctcaaggactctcgagtttagcccaccaacataaagcgttctgatgctttgatcctctggagattccaaagtacccatctccccagccttgccaagtaacttcaacgcaactggatcgtttacactgcaggaagtgaagaataagatgagaaaacagttccaatatcaccaaaataacagccagtttacgcacacaaactgatgtatttttcataactctctttcatgatataccaaagcaagaaattgaggagtaactcaatattatcatactcaaacaaaatgaaagttagaagtatgcttacccataataacggtctttaatgttctgctgggataactctcctgtttcaggcatctcatgacggtatggacactcatcacctcttgtacactctcccctaatgaagaaactacaaatatgagctcggttccttttgtagtaaggcgttgtcctttgaagcatacgaatggtatcgttgggccgaatcttcccaaaagaagactcataatctagtccagctctcgtctacacaagaaaacaaaaccatttcaataggccattacaaagtagagaaactgtatagccaaatctcaaaccaatcaatactcaaataatataactagttagaacgcagagtcaccatacctttcgatcatgctcttcagcgaaaaactctcggttcacatcactttttgggatagaatcatgagtactaatgttgagcgccgtgtctctgacctgaactggaagaccatactcaagatccaagagacaaacttggcacacattcttcaacttgcaacatgtctgacaaacttcagtcttcttgtatctcgcatccctaccaggtcgccatctgaaaaccgtgaaaggccgggtacagatcttacactctttatcgtaattcgcctttgtctacataccaaacaacaacaataaatcaatcaatcaatcaaacatgaagctgcacatcactaccagacataacatgagacagtattcaatgaattacattccctctaagcaaatttgatcagaacaaaccaaagatatcattttgaactacaactccatgaattctgatttttaccaaaggttatgaattgtatattaaatcgcttaaaccctaaaatctcaaatcactaaaattgcagcttcaacactaagaaacataaaagcattaaacaagctcgaaaatggacaaatgaaaggagatcttaataaagacacatgaatgttaaaaaaaaatctagctaaaggcaaggaaatcgaatttgtttgaggagaaacataggaagcgaagaatataccattctcacgtaaggattgtcaccgagacaagactcacagatgattgggaaatcagaacgttcccatccatcagcctcgtgatctctcagtattctatgcgccatttcctaattctcttccttcctcaatgatttctggatttcttcttcagtctcgaacacgaagattaccttgaagagcagatttgctctcgtttcgattttttcgggaatctttaatattacagctgctgttgggccgaatgtttgtttggcccaatttaaacccatgaaataagaaagcttaaagtgatggtggtgtactgaaataaacaatacggactcacacagatgataattcatcgtcacacacaggcgggaacaaaaataccctaaaatcgctaaatggcgccacaaaatctcagcttataatatcacttcccgctaacaattgcaatctcctcccagaaatttcaacagctctaaaaaccctaaccgtttcgattcacactctaacctttcgataatttcccagaagatg

SEQ ID NO: 25760 - DNA, 3000 bp, Unknown; identical to SEQ ID NO: 25759
  misc_feature (1)..( 3000): 2750-1469P.txt file - cDNA_ID_2708146; gDNA_ID_2214528; Annot_ID_184853

SEQ ID NO: 25761 - DNA, 3003 bp, Unknown
  misc_feature (1)..( 3003): 2750-1469P.txt file - cDNA_ID_2708150; gDNA_ID_2214528; Annot_ID_134212
gtttcttcaagacgtcagtaaaaaggagggattgtttagtagaactccacttggtcggtctggagagccgaatgaagtagcatcactagtggtcttcttgtgtcttcctgcagcttcttatatcacaggtcaaaccatttgtattgatggaggcctcacggtttacggtttctcctctcaaccacaggcttgaaaatggtcttgtcgtttcttgtctgtttaaatattctctccctaataaaatctctcatcacgctatgagtttatgtcccttgtacaaaaacacacaatgtcaaattgttgctctttagtcttgtaagagaaatgagggacttatctatatgaaggatcaattaaactagtactattttatttgtttggttaaactatccttctctaattattgcaacttatgtgtctatatatggattaatgtcataagtactagatggaatcaaagataacactaaatagcgttagtcatagaatcatactcacaagaatgagtcctctaagttcaatggaccactccgaagtccatcatgagaacaagaccaatcaataaaaatgtccttttgttatctaaattagcaagtgtaccaaattttgttcaccattctaacttataatttcagttttcttttgtgagtgaagttattgaaaaagaaaaataagaaagtattggtcaaagattttgacaacaacaagttattttcttgaggaaccaccaacttagatattttagtcatgttctctgttataagtcctactgctactacataatgtttccaccacacataaaaaacaaactcaataattcacacttatctgatccacattcattgtatataatcttatggcatttctggtcatttagtctcaagcaaaatggataagagatggagtctacaaggtatgactgctcttgtaaccggtgcagccagtggaatcgggttcgtcttaattctctgttctctatatcatgtttttggctcattgttcttcttgtatttctaaattgtcaagacttaaaggaatttttgtgtagtgtaggtatgccatagtagaggagttagcaagttttggagctataatccatatatgtgacatctctgaaactcttctcagtcaaagtttaagtgaatgggaaaagaaagggtttcaagtgagtggttcaatctgtgatgtagcttctcggcccgatagagaaaaactgatgcaaaccgtctcctcgctgtttgatggcaaactcaacattcttgtaagtaaatgatcttataggaaaaggcgaaaagccaagcatagttgtttaaagagagcttcttaacataaatcttatggaaatgcctaatcatatgtaggtaaacaatgttggtgtaatacgtggaaagccaacaacagaatatgtggcagaggatttctcttaccacatctcaacaaatttggaaccagctttccattttagccagctttcacatcttcttttaaaggcttcaggatttggaagcatcgtctttatgtcctctgctacaggggttgtatcagttcaatgtggatccatttatagtctaactaaaggtaaccaaagttgctactagaggtagttcattgcaagactgactaatcaaatatgttttttttttaaattgcttttttctgttgatttattttacaggagctttgaaccagttaactagaaatttagcatgtgaatgggcaaaagacggcataagagccaatgctgttgcacctaatgttgtcaagactcctttgtctcaatctgtaatataaaaaaagtcaacatttacattttagtttttattttttatgtgaatgtaacaatctcaattatattcctctaattaattctcaattgtgtgttcttgaagtatctcgaggacgtcggtttcaaggaggcattgttcagtagaactccacttggtcgcgctggagagccgaatgaagttgcatcactagtggtcttcttgtgtctaccagcagcttcttatattactggtcaaaccatttgtattgatggtggtttcactgttaatgccttctcttataagccacaggcttgataatggccttgttgtgttttgtctaaatgtcttatgcaaaactatgctcaatcaacttttgtgggattggattttaattgtggttcggtatgtggttcatatctttgtcacgagagagaaacacatgcaaatcgcctaaattatatgtgtggcaagctcaacattcttttatgtaaatcataatttaaagaaactaagcatacaatgggttaagctggctttaagtatttgaacaagaagatgtttctgataacaaagagtaagccaaaagcagatcacaacatgctttaaaatccctatgaaataattggagaaatgtcacaaaccatctttatatatataattcaaaggtgaacgcaaaagcttgatagttctttcctttattgtctgtttcactaaagatatcattacaaattaagtcaagatccatcatctcttacatcactatttgtcacacgaaaagtatgagagaaacattttcctatttgcttgccattataataagcttcatatagggaaggaagcaaggaaaaaatgagataaagagaaaagaatgagtattgggggaagtagtatagtagtagagagtcgtagaagagttatcttctaaggtcattagtgatgaagagttcatagttagtttactttgttcaaggtggataagcaatagggtttaggcctttgttattatcagacttctacttttggaagacactaaaaagttgttatctagccataagaaagttttggccaaaggttttgactacaaaatgtcatttttgccggggccactaacttagatatttttgtaatgttctctcttacggctacataatatttccaccacacatacaaaaacatactccacacttatctgatccatattcattgtatatatagtttgtggcatttctggtatatg

SEQ ID NO: 25762 - DNA, 3000 bp, Unknown; identical to SEQ ID NO: 12013
  misc_feature (1)..( 3000): 2750-1469P.txt file - cDNA_ID_2708154; gDNA_ID_2214528; Annot_ID_134198

SEQ ID NO: 25763 - DNA, 3000 bp, Unknown; identical to SEQ ID NO: 12013
  misc_feature (1)..( 3000): 2750-1469P.txt file - cDNA_ID_2708154; gDNA_ID_2214528; Annot_ID_184817

SEQ ID NO: 25764 - DNA, 3003 bp, Unknown
  misc_feature (1)..( 3003): 2750-1469P.txt file - cDNA_ID_2708166; gDNA_ID_2214528; Annot_ID_134213
ttcaaaggtgaacgcaaaagcttgatagttctttcctttattgtctgtttcactaaagatatcattacaaattaagtcaagatccatcatctcttacatcactatttgtcacacgaaaagtatgagagaaacattttcctatttgcttgccattataataagcttcatatagggaaggaagcaaggaaaaaatgagataaagagaaaagaatgagtattgggggaagtagtatagtagtagagagtcgtagaagagttatcttctaaggtcattagtgatgaagagttcatagttagtttactttgttcaaggtggataagcaatagggtttaggcctttgttattatcagacttctacttttggaagacactaaaaagttgttatctagccataagaaagttttggccaaaggttttgactacaaaatgtcatttttgccggggccactaacttagatatttttgtaatgttctctcttacggctacataatatttccaccacacatacaaaaacatactccacacttatctgatccatattcattgtatatatagtttgtggcatttctggtatatggtcactagaaaaatggacaaaagattatggagtcttcaaggtatgactgctcttgtgaccggtgcagccagcggaatcgggttcgtagttcttctctattctcttaagtttatgttctgcttcgatataacaacctgaatggtcaagattacatggaattcatatttgtggaatgttttagttatgccatagtagaagagttagctggttttggagctaaaatccacatatgtgacatatccaaaactttgctcaatcaaagtttaagcgaatgggaaaataaagggtttcaagtgagtggttcagtatgtgatgtaacctctcatcctgagagagaaaaactgatgcaaaccgtctcctcgattttcgatggcaaactcaacattcttgtaagtgaatgatctttatatagaaacaactaagcaaactctacaaaacaaaaagataacttaagagagaatttttgttcaacataggtaaataacgtgggggtacttcgcggaaagccaacaacagaatatgtggcagacgatttcacttttcatatatcaactaacttggaagctgcttaccatttttgtcaactttcacatcctctcttaaaggcttcaggctatggaagcattgtattcctttcctctgttgctggggttgtatcactaattgactgtggatccatttatggtctaacaaaaggtaaattactccaaatctgactaatcaacaaagagttttttaccaaaaaaaacaaaacaaagagttttctgcttccttattttgtagtgttttgttgacttcttttataggagctctaaatcaattagctagaaacttggcatgtgaatgggcaaaagacggcataagagccaatgctgttgcacctaatgttgtcaagactgctcagtctcaatcggtaaaataaaaataacttttacatctttttatttttgtggatttaacgacatcaatttctctaattatctctcaatttttgtgttaaaagtttcttgaagacgtcagtaaaaaggagggattgttgagtagaactccacttggccgtgttggagagccgaatgaagtttcatcactagtggtcttcttgtgtctacctgcagcttcttatatcacaggtcaaaccatttgtgttgatggaggtctcacggttaacggtttctcctatcaaccacatgcttgagaaatagtcttgtcgctctcaaagttctatatctaataaaagttctcattctatgagtttataaacgtaaacatcaatgagtttgcaattccatattggagatactaatctcgcacatatacaagattcggttacacccgctacgccaacaactcacaccaatgtgatctctcattctctctcataaatgaaatgttatactattttttgagaattgtagcattgataggatagattacagtctatatgtctctgattttaaatgttaattgtaacacaagatgattatattgtacatatttttgttgttgttgttccgtctattttgctgattatacttgtttattgttgttcttccgtgtctgtcgtgttttatctgtttgtcttaaactttgtattttatatcttgtgatttttgatactacacgacaaaaatgaccttgtcgtgttttatcttgtgaattattttattctttcgctattagattaatccattttgtgaataatttgcgagcaaggccctcacacacataattataccttttgagtcttgaatcaaaaggctgtcaaaaaaaaaaaaaaaaaaaaaaaatcttgaatcaagttgatagatacatatgggcttgcgtgatcttgagtcttgaattcataataggcgaatttgaatcttgaacgactaatcgataacaaacaaacaaaaaaatattatataattggttagagtagttaactctatcacgcttaatgagcattttatatttgtctttgaatgacaattcaagtaaatactttaatttcaaaattgatggatcgttttttcattgtacttttcttcgaataatattagagataatcttccacacttaaaatagattaatctcattgtctctcatcctacataagcttcttactttaatttgtctacatccctcttgtctcaattaagtattattattaacgcttcaaattcttactacctaaacacgtgaacagtagtctttcagtagtcttttaatttgcgagtgaagttaatgaaaaaaatacaaaatggtaagttttggtcaagattttgactattaaaattaatatttgctcttgaccactaagtatatttttgtcatctctttattatggctaaaaattgacacttatctaatactcattcattggatatatatatataatgtgtagcatttctggtcagtgaaaattgacatacaaggactatg

SEQ ID NO: 25765 - DNA, 3003 bp, Unknown
  misc_feature (1)..( 3003): 2750-1469P.txt file - cDNA_ID_2708169; gDNA_ID_2214528; Annot_ID_134214
ttatatttgtctttgaatgacaattcaagtaaatactttaatttcaaaattgatggatcgttttttcattgtacttttcttcgaataatattagagataatcttccacacttaaaatagattaatctcattgtctctcatcctacataagcttcttactttaatttgtctacatccctcttgtctcaattaagtattattattaacgcttcaaattcttactacctaaacacgtgaacagtagtctttcagtagtcttttaatttgcgagtgaagttaatgaaaaaaatacaaaatggtaagttttggtcaagattttgactattaaaattaatatttgctcttgaccactaagtatatttttgtcatctctttattatggctaaaaattgacacttatctaatactcattcattggatatatatatataatgtgtagcatttctggtcagtgaaaattgacatacaaggactatggataaaaggtggagtctccaaggtttgactgctcttgtgaccggtggagccagcggaatcgggttcgtctagattctcactatatcaactcttttacccattgttctgtttctaaaattcattctaaattgttaaagttttaaggagttttattatgtttatcgaatgtttagtcatgctatagtagaagaactcgccggttttggggccaaaatccatgtgtgtgacatatcgaaaactctgctcaatcaaagtttatccgaatgggagaagaaagggtttcaagtgagtggttcagtctgcgatgcatccaatcgtctcgaaagagaaacacttatgcaaactgtcaccacaatatttgatggcaagcttaacattcttgtaagttaatcttaatttaaagaaactaagcatatctttaagctatttagaaatgacatgaatatatactcttttctgttcaatataggtgaacaatgttggcacaattcgcacaaagccaacaatagaatatgaggcagaagatttttcgttccttatttcaacaaacttggaatctgcttatcatctaagccaactttcacatccactcctaaaggcttcaggcaacggaattattacttttatttcctctgctgcagggatcgtatcatttgatgctgcatccatttatggtctaacgaaaggtaaccatagtgaaaagtttaatactagaggaagttcattgcaagaatgaccaaatagtattgtggatttatatatgtttcattatgtatattatatatttgattaggataattttcaatcccatttaataatttcaaatgatatttgagaagaattgttttttttttttttttgtgcgtgaaatcttattttagtgtgctatgctaacatttttggtttcagaaatatataattcagaaggtcaaatatagggcattcatattcaataacatacaaaaacaaaactaatttataactatgcatgttatttatggataataaatctttttatttttatttagatggttcataaatatcgcattatgtctccgaaagctgattctaacggctaattgattgccctagtatcattcgtttctatttctaaattggtctatctttctttgggaatcctaatagatgtctctcatagtcatagtattattttttcttgtttgtgtatatgttcaggagctttgaatcagctagcacgaaatttggcgtgtgaatgggcaaaagacggcattcgagccaacgcggttgcgcctaattttatcaccactgctctggctaaacctgtaaccaatacaccctctcttttttttcttttttttccttttaaaattaacatcatcacccactcttattcttgttttttacaatcttgtaaacattcagtttctcgaagacgctggttttaacgagattttgtcgagtagaactccacttggtcgcgctggagaaccaagagaggttgcctcacttgtggcttttctgtgtctacctgctgcttcatatattactggtcagaccatttgtgttgatggaggtctcactgttaatggcttctcatatcagccataggcttgagccatgtcttgtcttgtcttgtgtgttgtggagtatggtcatatggtcagtatctccataatctaaatccatagatatgtgagttgtggagtagacacaatttttcaataatggaatatctatttaccagttccgtattatgcatgcattctccatgacaacgcttctcataacgaatataattacgtggatcataatactatgaggattgatatcattgagatggagtagacacagttattttcttcttcccttgccattagcaatttcaattgtatctatgcttgaaatacttaaatggcatttacttcttaactaaaaagcgaaaggagggaaagaacaagtcattacaagatactataataattagaaattaaaagagtataattacatcttcccaaatgtgtcaaatattcagcaaaaactctgtcaatagaaatgaacaaacggtattttaaagtaatacaatgggtaaactttagatattttgtaaaaacctaattagaaaaaaaatttggaaatcttagttgaagataactacccaaattatgaaaaaaaaaacatttgccttcttgttacctaactaacacgttgaatgttttacaaaaattttgttcaccagtctaactgacttgtcgtttcagttgtcatcttttgaatgaaattaatggaaaagaaagaaacaaaaatgagtaagtttagatcaagattttgactattaaaagtcatatttgctcttgaccactgacttgtatattttgtcatgttatttattatggctaatatatccaccacacatacaaacatactcattaattgacccttatcttttatttttatggtaagaaaattgacacttatctaatactcactaggtgtgtatatataatgtagcatttctggtcattgaaagtaacttacaagcaaaatg

SEQ ID NO: 25766 - DNA, 3000 bp, Unknown; identical to SEQ ID NO: 12036
  misc_feature (1)..( 3000): 2750-1469P.txt file - cDNA_ID_2708189; gDNA_ID_2214528; Annot_ID_134229

SEQ ID NO: 25767 - DNA, 3000 bp, Unknown; identical to SEQ ID NO: 12036
  misc_feature (1)..( 3000): 2750-1469P.txt file - cDNA_ID_2708189; gDNA_ID_2214528; Annot_ID_184845

SEQ ID NO: 25768 - DNA, 3000 bp, Unknown; identical to SEQ ID NO: 12015
  misc_feature (1)..( 3000): 2750-1469P.txt file - cDNA_ID_2708197; gDNA_ID_2214528; Annot_ID_134201

SEQ ID NO: 25769 - DNA, 3000 bp, Unknown; identical to SEQ ID NO: 12016
  misc_feature (1)..( 3000): 2750-1469P.txt file - cDNA_ID_2708201; gDNA_ID_2214528; Annot_ID_134202

SEQ ID NO: 25770 - DNA, 3003 bp, Unknown
  misc_feature (1)..( 3003): 2750-1469P.txt file - cDNA_ID_2708205; gDNA_ID_2214528; Annot_ID_134203
tgacccaaacccaactggatccgacccgaaccagaaccaaatatttagaattattctattggatagtaaatcatatacccattaatcccaaacccgaacgggttctaccagaactcgaatgggttactcgtatgcccaaccctattctctgatttaattatctaaaaactcccaaaaaaaacatatgttttgctgactactttttattcaaaaaaatgtacatcctcttctaccaaaatcatttcataagacatcccaaaacccttggaataatgattttatgaatgaagaatcctaatttgtatataccaagaggttttaaaaagttttaagtttttatttctaatggcatacctatgtaattacttacaaaaaataaggttacatttaaaatgcttatttataatttttgataagtgtgtatgtgagaaggtacggacatcgtgatggtaatctgcttatttataattttaacttgcagtataccacatgtaggcttatattttatttaaactaaaaatttttattgtaaagatgattataaatatatgatattattttatttgattttaaatgtatagtaaactgcgagttgtatatgttttgttgatattatttatattgtttagtgtttaaaattatacacttgtattttgattgttaattttagagtttcacatgtagtataccatcttgtattaatatcgatttaaacccgtcaattctaggattttctatcttgtattaaaaattgaatcacatcatacacataaaaaaatctaatatgttattaattattgtagtatataagattataaatttttaaaataatatgtatgaaattgaatataaatattcaaattatgacccagtattcagtagaaaattttcttaaatctatttttgacccgttataatattttttcatgtattgaacagtttatattagtttttaaaaattcaaattatggcatatgcgaaaaaactctaattatttttttataacgatgatattattttttcgccaaaatagaatcatataaagatgagaggtgaactataataattaataaaaaattaatatgataatttagatatcaaatctaatttgttgattttaattggttacttttttggaaattaataatgtattttgttttttaattaaatttaattaattaaattagtatttgacttaattattaaagagatgaattaatgtactctttaaattttatttctaatggcatacttatgtaattacttacaaaaaataaggttatatttaaaatgtacttcctaaataatatagtaggatttcttaattaggaaaatgacaaaaaaatattatatttacctcttaacttttgagattttatttaaatttatgaaagttttgcttttttttcagcggagatgttaggcgaaacttacattattttcttgtcagcaaagatttggtgaattcgttaattcgatgatgataacgttagtgacggttgcaaaaatgtttctgtttttacggttttttgattcatgtagaggcaaagtttgtttgtaattggaaagaaaaaataaattaaataacgaatcttaaaaagtcttccaagttgatttttttctttactgacataaattttgctttatatatcatacaaatacgtcaaagtccataatttcgatgatggtgatgacaaaagaaaatatgttattatcttttgcatgacatgccctcatatatgaaactgaaacacagagttatgagctcatctatatatacatttttgctgctactttgtgaaataaatactggagttgggatttatttacaacggctgccactggcatttaataattgtttttgataattagaaagaaaatcttctaattaaatatttgacatttaacaatcttcccaaaatctctcaaccttaactacacgattaattactaaaataaaacttctaaaatatttaatatcatttaattactacaaaattatcatttttgatattgcttttctgcatgattataatcatcaaaccgtagagatatttgatagcatttaattactacaaaattacaaaatatttagacaataattcataaacatatcataaataaaatcaacattaataaaataaatgagttttttttagaggacgggttggcgggacgagtttggcaggacgttatttaataacaattgtaaactatacaataaaaatattttatagatagataaaatttacaaacttttatatatattaattaaaaaaataaattgtttccgcggtgtactgcgggttaaaatctagtctaatacaatattagagataactatagtcattgctctcatttttccatttgcatacttatatgttctcaattctcatacctaccttatattgtgtgcccatacaccttccatgcgcacttgttgtccacacaaattacgatcaaacaactgttatatagtttccacccacactttcacctatggtttaagaaacataagttactctaatgtagtaggacgagttgaccaaacctaactccttcattttgttgcaccaacccatatttttaccgagtaatgcacaccccaaaacttataatcatagtcatcttcctttcacgtcccataaggttcacattgattactctaatctatttcactttcaagattaccaccacatgtaacttttccattccttttccacatttatctcttaaacctcaaacactttcaagtttcatcttctctctctcttattaacttcatctaccaaccctacttaacctaaaaccattttcaattgcttaatcagtccacacaatgcacataaatttccgtgaccacactgttcgttttagaagaaaaaaaccacttccaaaattgcatatgtaccaataagataaaatgttttactcattcaaatagacctacgagattaattaagactaggtttgctttgggctaaaactggcccataagctatg

SEQ ID NO: 25771 - DNA, 3003 bp, Unknown
  misc_feature (1)..( 3003): 2750-1469P.txt file - cDNA_ID_2708217; gDNA_ID_2214528; Annot_ID_134209
tggcctttgtgttttaggagcaattaatcaacttacgagaagtctggcttgcgagtgggccaaagacaatataaggatcaatgctgttgccccgtggtatatcaaaacatctatggtggagcaagtatgggtttaaaagccttattatctattatgcggttaaatataagctcttgaggctgaaaatcaaaatgagaaagactaagctaatttgtgtgttccttgtttaagatggggttgtttaatggttctcgtcttttggtctcaggtccttagcaacaaagagtacctagaagaagtctactcagtaactcctcttggtcgacttggcgaaccgagagaggtgtcttctgcagtggcttttttatgcctacctgcatcatcatatattacagggcagattctttgtgttgatggtggaatgtcaataaacggtttcttcccacgacatgattaggccactctattgttttactagtttccttgggatcctttttgttttatctttagcatgtctcctttctcccgtgaaagacagttcatcgatatgagatgagaattgaagttgtgctactaagtctactgttaatgaaaaggataatttagcatcagacagcgtgattcagtttcccttgtcttttactgattatcttgattgtgcatgtgggggaaaattgctgaggaaccttttcatgttatgacttttatgaaaacaaaaactttatgtttcttgagttagtattcattagcttgtattctgtgtcatcctttctcggttttggctttcattgtgtcttgaacctgcactcatatccaacaaacaatggttgaggaagagagaagctgcatagaataaacgaggaacctttaatgaattaccgccacctgtgtctcgggtcactcttcttctgcccttgtatttacagcacattaagctctgcttttggttaatatcgctttgtctctgtgtttaataatgtttttggttcgatgtatatatacaggtaagcaatgcaggaaagtgtatagccaaaccgaccacaaaatatgcagtagaagatttctcgttgctgatggctacaaatctggagtcagctttccatctctcacagctcgccaatcctttgttgaaagcttcaggttcagggagcattgtccttacgtcctctgttgatggggttgtccatctgagagtcggatccatctatggagcaaccgaagctaccgtatatatgtctacatccttaaaacaatgttcccttgcgttatgatgctttcgtaacatatagatgcgtttcaggagccatgaatcaactggctagaaacttagcttgcaaatgggcgagtgacaacataagggcgctctgtttgtccttggttcattaaaactcctttaactaataatgtacggcgaaaagtaaaaagtctccttattattatgaaaatatatctatatcataacttcccaattttgatttgtatgaaatgtttcagtttctcaatgataaagatgcaaaagaaaaggtggagagtaggccaccgatgggtcgtgttggaggtgccattgtcaacgttttttccttcaagactctgccttaaaatacatatatgcatgtgtttggattatattttcctgcgtaataattaagaaatgtactttagataagttcctatctaaagtcgcttgtgatgccaaagggattgggtcccccttcttcttcttgttattctctatgttttgtttcctgaaatatttatgcttgtggtgaacgagagttcaatatctgaattcattatctactttggccaacgcctaatggtatcatttggtgtctcaacatgtgatggagtgtctaatttggtttgaaatcccaaaattcaatatccatgggtattctctagtaatttataaaagaactttggtccaaatcctacaagtggtcatatactgacataccacatagtggaagaactagctagctgggtttgaaataaactcaagataagacaagtggtcagaattgatgttgagagatttttttcctcagcatgggtgtcaaatgagggtccatcaaagtatgcagatgtcactaagggtttccatttagagtaatgagacatgaaatagtgggttttgggttttgagtatttgggttttgagtaagtattccaatataatatatgttcggataattttgatagctaaaatcattgtccacggtcccaaacgcccactagtttaggtaagatggacagccctagatgtaactatcaggagttgcccaatgtctatcatgtaattgtatcttttcttatttacaaagttgttagtaatctatctttatatacaatttaaagaagctcttgttagttatgtgatagataaagatggataacagccgatggagtcttcaaggtatgactgctcttctgaccggtggagcgggaggaattgggtttgtcttcttaccccatttttctacttctatttgatatccaaaatggtcaagaattcaaggagtttatgtttgtggaatgttttaggcatgccatagtagaggagctagctggttttgggccaaagtccatgtatccgacatatctgaaacactgctcaatcaaagtttaagcgaatgggaaaagaaaggatttcaagtgagtggtacaatctgtgatgtatcctctcgtccggagagagaaacactctgcaaactgtctcctcgttgtttgagggcaagctcaacattcttgtaagacgtttgtgagtgaagttaatggaaatgacaatgagcaagttttgctcaaatattttgactataaaatgtcaattttggttaggaccactatcttagatttttttcatcttcactcgtaaggctacgtattatttccaccacacatacaaagataatcactagattcatacttatccgttccacattcattgtatatacaaaatctgtggcatttctggtcacttcaagtaagatacaagaaaaaatg

SEQ ID NO: 25772 - DNA, 3000 bp, Unknown; identical to SEQ ID NO: 12035
  misc_feature (1)..( 3000): 2750-1469P.txt file - cDNA_ID_2708221; gDNA_ID_2214528; Annot_ID_134228

SEQ ID NO: 25773 - DNA, 3000 bp, Unknown; identical to SEQ ID NO: 12035
  misc_feature (1)..( 3000): 2750-1469P.txt file - cDNA_ID_2708221; gDNA_ID_2214528; Annot_ID_184844

SEQ ID NO: 25774 - DNA, 3003 bp, Unknown
  misc_feature (1)..( 3003): 2750-1469P.txt file - cDNA_ID_2708225; gDNA_ID_2214528; Annot_ID_134231
tcttgttgggcaaatcttcttccaagtattcgtatggcacgcctttgagtttgagagccatctcgactcgacgactaaaagggcttgcccaaaaccctagaagcttcacactctcttctttctccgccattcgatatctctcactttttggtatctaactcctctgtttcttgcactacttttcttttttatgtttcgtttacttgcttgattacttgagtttactatattctatacacaaatgaagttatgggtggtgaaataaacaaataaataaaaggaccattttgctttctctttgtctttgtatccaaggatatcttgaagatcacaccagaaaaggactgatttatattttaaggtatgcacgtcattgccaacgtcattcgtcttagtgttttaagatatttgaccaacacttagtgtttctaatctccagtcaattagccgaccaagaaataacaaatctccaaatgattacgttctacaatttatattttaagattcatatgttgaaaagtttaaaactgagagattaatgtatcgactgtatttgtaaaacacacaactttttttgttttgaagagtctattttttggccaattcattgtctgccaaacatttgaaatgaatgacattgtaaaacagaagaaatattcagttatcaaacaaaatgttaatcattttgaaagaaatgatgtaataatctaaatcaaaatataacatttatataatgtgaaccttttcagtttttgggtttgattccgtcttgattcacggtatcggttgatttggtttagttaaaccgaaatcgaactctaagcgaaatcatctcgtcggttaaacttcttttgaatttagacaaaggttaataattattatttattccatacttcattaggatcaaatgtatccgatacatcataattcatagctcaatcggagattattataatttagatagagtactcacacactcaagtaaaacatgaaccataaccatgacaaaaacacaagcaactccgatgataaaactcgaacccattactcaaccagagatctgaatagacttaacatcagccttcttagtctcagccttaggcaccgtaacagtcaacacaccattctccatcgcagccttaacctgatccatcttcacattctccggcaacctaaacctcctcgtaaactgtccactcgatctctccacacggtgccacgtgtcattcttatcttctttctccacgtgtctctctccactgatcttcaaaacactatcctcctcaatctcaactttaacttcctccttcttcaatccaggcaagtcagctttaaacacgtgggcctcaggcgtctctctccagtccacacgtgcgttcacgatcgctgagttctcacgagaaagtgatgatgatgttagttccttgaatggatcccatacgtcaagagagaatggatcaaagatgttgcttcgtctgttgttgttgaagaaacttggaatcatcgacattttaaagaatttacttttttttttgttgatatcttcttgagaactttgatttttcgatttctgatagaacacacgaaggatttttgaagctatttaaaggtactaaccgaaatttctcgagcttctcgagttgttatggggaatacagaaacatctagaggacgtctatgagaaaaatcaggtgaatccagaaaattctaggagcattttgaagattgtttgtgttcgttgggtttaatgggccttcatgggctttagacaaatatgtagtcttccaaaaaaaaaactggatttctacagattatccggttcgactggttaaccgaattaaattccaaaataattggactctaatcacactatccataaaatctaaaacattttctttgttaatctgaagcatttaaggctgtctgagtattatgggccatgggctttaaaagcaattgtataacgtgctgaattgaatagaatattactaaaaactgggcccatctaaaggaggattaaacaaatccaacggtgtatattggacattgagctccactaagtaagtagggtcacaatgacgtaacttcccgcgttcattacggaatcttgagcgtacgattctactattgggcccatctttataaaaattatactgttttttttactaaatccgtcggccacaaaaagatatgttttttttttttgggaaaaaaaaaaaacaacttcgacgaaagactcggcgaacaaaacacactcgcttcaacaactctctatctctctctacttgtcactctctaatctacacacaattaacaaagctcaatctctctcttctcttactctctacctctgtagctgatagggtcagcttcgtcggcgctatttctgccggatttcacggacgatttgagatctgttcttccttcttcttttttcctctcctgatctgattcaactctaatctgcttcagtctctgtgttacgaactgattccgttcaggtacggttcgatttttttccaagctttttcactctctgacactgccaataacactctcgtgttagtcctggtgttagtgttatgtgaattcatcgattcctgctttgtgtgtgtacgctttaggcctttcctgttactaatcttgttttttagtacttctttggtaaattaagaaagtttgagaagaatgtgattttgttttggttcttttgatactttagttttactttttttcctcagctttaatcttgtagagattcttctaatcagatcttacggattcttaaggatctataaggtctatgaagattcgttttgtaattctattacattgtgtgtggataagaaagatgtacttttttttttttttggtatttgttatgacttaccattttttttgtttctacagtgaaaaaaaatgttgagcgtttcaagcttctgcagtttaatgggagactgaggagtcatttgagtgaaacgtttggaactttggaaacagatg

SEQ ID NO: 25775 - DNA, 3003 bp, Unknown; identical to SEQ ID NO: 25774
  misc_feature (1)..( 3003): 2750-1469P.txt file - cDNA_ID_2708225; gDNA_ID_2214528; Annot_ID_184847

SEQ ID NO: 25776 - DNA, 3003 bp, Unknown
  misc_feature (1)..( 3003): 2750-1469P.txt file - cDNA_ID_2708229; gDNA_ID_2214528; Annot_ID_134237
catattgtatgtttactgcctaagaacgacaaagacataatgtgcatacggtgatacaggtgaatcagattggtacagtaacagaagccattgaagtagtgaaaatggcaagggatgcccagtggggtgtggtgacatctcatagatgtggagaaacagaggactctttcatctctgacttatctgtgggtctcgcaacaggtgtgattaaagctggtgctccttgcagaggagaacgtactatgaagtataaccaggtctggatctttttccaaactaatatcctcagtaccccttatgcaattacactagaacaatctacattacgtggagtaacctgcattggaattttggatcatagctctttcatcagattatcatcagcttctttttagcttttaagtagctgagttatgttgtggtatgtgaatctttagcaacctaggctaagtttcagtttcttcaacttttggctaatgcagcctcagcttatagatccataatgattgagtttggagcagccatgtacatttagttgctagatagtgttctcatttcattgtagaaactactttattaaaaagctgaatcactgttgaaatgttcctgcagttgctacggatagaggaagagcttggggatcaagcagtgtatgctggagaagattggaagctatctctctaaacaaaatgcacatgtgatattaattgttacacttctcgtcttacttcattgttctcgagtctatttctcacgcagacaaattcttgtgtcttgaaagttcaaattttttgttgtttttgccaaatttaagaacaaacagaagtaaagagtgttaaacatgttttttacaaattgtaaaagcatccaaaaacatcaatcaacactagttcgtgaggttgcagaagccacaaacaaacgtgttttagggcttcgtgtcttctttttcttcaatgtttaacaaacagatgaaaagtgttataaacaagcttttccaaatttcagaaagacaaacatcatacgattatctagtttagcattgccttaagatagtaaatccagaaaacaactgaatcaagacagacatttcaacaaaggactcgaacgaagactatcaaacattcatcattattctggtttggtgtcttcttcttcttcaatcttaggcgccagatagtatcgaatgtaacccatctcagccaccttgtactccaccacgaccggtaactcagaggacaaactgatggtcacagtttccgacaatggagtagcctttgtgaaggagttcatgtacctcaatgcaaatgaaagcgaaacaggctcgttcatctctatcacaatagcatcttcaggctgcaaaacacacatacaaacataaggtcacttcaacattgtattggacagattattaaacaaatctctctagatgactagtgattgttcatactttgtcgacggtagtattctgcctgagcacaatgtttgctgtcccgatatcacctgctgttgaaaacttcaccccttcttttgttaccgagatcacaactgcaaaatcataacatcaaaaccagaatcatgattagagaatcctcgcagtgatacaccaaataaacaaacagttcatttacctgtgtcaccaatgctactgagatctttgcatatcctggaaaattcaccagaaggcattctcacaatcgagtggtactcagcatcaggaattcctaaatgctcactgtcgatatccatcagcttcatctcaaaatctgcaatcttgtcttgtgctgcatcatcaacaccatttaaataatgagattaacaccacatagtcaatatcaaacaaagttcctctgttaactttcactaaatcaagaaactctattcactttcaaactatagtctttaagctagagactatacctattctgaaaacaaaaatggaaggactcattctcatcaagcaagttctagtttctgtcaaatgaaacctataaataacagttcagatcactaataacatcattaactacacaaaaacaaagccatatcaaaccttattccaaaccaaaaaccctctattaacatagattttatcttctctttcatctcttacaaactaaagctttcaagaaatggactgaatcattctctacaatcatattctagcttctggcaaatcaaacctataaacacagaatcaggtcaccaatagcatcaacattgacaacaaaaccaaagccctaacaaacaaaaatcgatttgaagaacttactgggactctcaaacatgaaagtaacagtgtcgctaccatcatcagctttgatggtgatgatatcatcatttccagcacatttcagcatcttagacatattaccaagattcattcccatagagaggttcctatcgcatctatagtgctcgaaaccttcagatctaagcaaaagagacaccaacgcgacatggctcgaatccatagcttgaagcgagaaccctgtggtcgaacagtcgaagttcgcatcgttcaccagatctttgaccgcttctagaaccttcttcagtagagaaccttgaactaaacgaagctccaacatcttctgggaaattatcgaaaggttagagtgtgaatcgaaacggttagggtttttagagctgttgaaatttctgggaggagattgcaattgttagcgggaagtgatattataagctgagattttgtggcgccatttagcgattttagggtatttttgttcccgcctgtgtgtgacgatgaattatcatctgtgtgagtccgtattgtttatttcagtacaccaccatcactttaagctttcttatttcatgggtttaaattgggccaaacaaacattcggcccaacagcagctgtaatattaaagattcccgaaaaaatcgaaacgagagcaaatctgctcttcaaggtaatcttcgtgttcgagactgaagaagaaatccagaaatcattgaggaaggaagagaattaggaaatg

SEQ ID NO: 25777 - DNA, 3003 bp, Unknown; identical to SEQ ID NO: 25776
  misc_feature (1)..( 3003): 2750-1469P.txt file - cDNA_ID_2708229; gDNA_ID_2214528; Annot_ID_184854

SEQ ID NO: 25778 - DNA, 533 bp, Unknown; identical to SEQ ID NO: 12065
  misc_feature (1)..( 533): 2750-1469P.txt file - cDNA_ID_2708241; gDNA_ID_2214529; Annot_ID_134246

SEQ ID NO: 25779 - DNA, 533 bp, Unknown; identical to SEQ ID NO: 12065
  misc_feature (1)..( 533): 2750-1469P.txt file - cDNA_ID_2708241; gDNA_ID_2214529; Annot_ID_184883

SEQ ID NO: 25780 - DNA, 3003 bp, Unknown
  misc_feature (1)..( 3003): 2750-1469P.txt file - cDNA_ID_2708245; gDNA_ID_2214529; Annot_ID_134244
aagtcaaaggtctgaaattagattaccaaatatccccattcccaattaagtaacaatcctccattattcttcaataaataagcgggaagcttgagtagattacaagaatgacccaactgataaaaaaaacggctcctttaaatgcaaaaaaactcctttcagtttcaaaggtatcgtctccctcaaaatcacaagctctacatacaattcctgctcacatcatcacatggcttcatcagattcgtcttactctcggaaattcttactcatcacctttcttcctctttccttggcctgcttggccttcctcctccaatggcgaagcggagtcaacgattccgttacgcagtggtttgatgataactatccgttcccaggaatggccactgtctccgagaaacgttctcttcgttctgattcgagctgcgtttctcttctgggtcagagccgtacgcaagcgtttccttatctccgagatttgaagcttgatcacaagcccgatcttaaacctagggttagaaatcttggttttcaatttgatgggttttgagaaatgttaagacttgattcatttgatgatgtaaaaatcgatttttttttgtagatatgtataacgacgagcacttctgctgggttagagcagacattgccatggatattctatcacaaggtcattggagttgaaactttttatctatttgttgaaggcactgctgcttccccaaacgtttctcgagttttggagacaatccctgtgagcttttacgagtcttgttttgttatagttgctctgttcatgaatcctgatgtttggctttatgttaccttctaattctcagtgatgatatttgtttgcagggtgtaaatgttatatacaggacaagagagttagaagaagaacaagctaaaaggtattcttgtgttttgtctgtcattaagttatggatttagagccatgtagattagaaaaatggaggatttgaaggaaccacctctggttatttagacatacctagatatattggtgtctcattggtgtgctcttgtgttatgcttctttgcatcttgttcttcaaaactgaaatggttctttgcatcttgttctttcaaaaaagatcatttcatttgaagttttattacattttctttggtttatagccggatatggaatgagacttggttggagaagtttttctacaaaccgtgtaattacgaattattcgtcaaacaaaacttgaatatggaaatggctatcaccatggcaagggtacctgttacattcagttagtcactagaaagataaattatagaattgccaacttttttcacattctctccttttgcttggtatattataggatgctggtatggactggatactgcatcttgatactgatgagcttgtacatccttctggaacccgtgaatattccttgagaaatttgctcagagatgttcctgcagatgtggatgaagttatctttacaaattacgtgagttaaaagtctttgaagacattggaattggggtttctttctttggtttgacgatggtgatgactcgcaaatgttcctttttcaggagagcagcgttgagcgagatgatatcaaggaacctttcactgaagtacagaacattatcatctagagcttgctatcttgggacatatcttcatatgagttttatcatcaaaagtgtttgtttttgaacttttaggtatcaatgttcaagaagaattttaaacatcttcctagagaagtttactatggaaactataaagaggcaactcgtggcaatccaaactattttcttacctatgcaaatgggaaatccgctgctcggattcaagaccatcttcggcccaatggtgctcatcgctggcacaactacaagacgtatccaaagtatgttcttttcctcacttagcttaaacatagacattcattcttttgcttttgtaatctgacattgattccatctttgttgtgacagcatcaaggaactagacgaagctgcgattcttcactacacttactcgaaattttcagatcttacttcaagacgtgatcgatgtggctgcaaaccaacaaaaaaagatgtcaagagatgtttcatgctagactttgacagagccgtaagctagttttgatttgtttatgtcgattagtatagttcttgttcatcacattttgtatttgtttttgtttctgcaggcattcatcattgcttcaacttcaacttcagaggaaatgctccaatggtacagagaaagagttgtatggactgacgataatttgatcctaaaacttcttaggaaaggaattctgactcgcatttatgcaccaatggtcagttagttttactactaaatctacatcctcttttaaatgcttttcattgaacaaagctatcatctatctcaggttataatccaagagctaagagaagccggtgttttcagctcagtggtaacttcagctcatatgtctctctcaaagaatagaagcaactcttcaacctcaagcaactactaggaaggtgttggagtttgatcttgttggtgaatcttaagcagtatcagcgataccaccgaaagcatctccaggcttggaaaaaatccaaaatgtttaattataactttcttgaaaatagacttcaaaaacttgcagagagatgaaacagagattttctgtacattttcgacaagattttttttttgcttaggtaactatacaagaagaacattagagcaggctttgtggatctacttggaccattaatatacattctatgtaaaatgcttggatttttctgttggtcttgaatcttgatatgaagaaggaatcatagtatgatagtgtctgtgtttaaagactagtgttatagagtgaccaaaagacagtggagtgggcgcgtgtcatatacgcgcgtacgagctttttttttggcggttctttgcctctccttcctctcgagtctcgagtttgtgccctttattcgatg

SEQ ID NO: 25781 - DNA, 3003 bp, Unknown; identical to SEQ ID NO: 25780
  misc_feature (1)..( 3003): 2750-1469P.txt file - cDNA_ID_2708245; gDNA_ID_2214529; Annot_ID_184881

SEQ ID NO: 25782 - DNA, 3003 bp, Unknown
  misc_feature (1)..( 3003): 2750-1469P.txt file - cDNA_ID_2708249; gDNA_ID_2214529; Annot_ID_134241
accaaaaccctcttacaaataaatcccgaagctttatgcagagagagagagactccaatcagaagcaagcatccaagagacagcaacaacacagagcagcaagactgcaaaagcaaaaacagtgtttacatttcacaatcagtattaaaaacaaatccagttgctttaagacatgcaatgtagtaagcagtagctagatcatgcaaacaatcaaatcctaaaagatgcacattcatcaaaaacaacatccgattcacactgttaagtaaagccatcaaagaacaacaattatcctgtattcagtgaaggaacagagaacacaaaaaggatccatcttgctaagccaatttacttatcaaaacttgtacaagtatagtttcaagtactcataaacagttaaacactaccaaaccaataacgacaagaacacaatcacaattctagtttctttaaagcatgcaatgttgtagtaaccagtagctagatcatgcaaacatgttaaatcctaaaagatgcaaattcattaaacacaacaacaattgtcctgtgatcagtgaatgaacagagatcacaaaaagtcaacctctacagaggaatattctagctaaaaccacatgaccttttgttcaaagaatctctagaagaaatatttaaaataaggaatatagtcaaattcaaactatacacaaaatctaattagtaaaaacagattaaatataatggagtgtgtttattgactaaccatccttctagaaagccaggactgctctgttgttgctgatgctgcggtggtggaggatattgaggcgcgtacggtggaggatatccttgctgaggataaccttgttgaggatatccctgaggtggatagccttgctgaggatatccctgaggaggatatccttgtggtggataagcatcttttggatatccctccggtggataacctattgatacaatttcagcacaaacaaaattcagatccgtcgtacaaaaacaataatcagtaccaaattaagcagatctaagaaaaaattacaaatctaaaaaccgaaacttctaaaagtaatcgaaaatagaaggaaagaggaccttgaggaggaggaacaccaacgggaggttgattgtactggctcattgtttcctttgaagaaaaagtgtaaacttcgtagagaagaaggagatcacgaaccttagatcgaaaaagtttatagaagcgatagagaaggacaaggaaaagaggagagtgttttaagtataacgcgttttgcagttatttgatttttcttgtttttatccataactttaggctagcgttcaatacgatgaattaaaatgaaactaccaataaaaaaggttaaattaaaacaagattcacgcggtttctgccttttgcagcgatattatttctgttttttttttgtttaatagaacttaattaattggagaacaaagattattgattggttgtttattctgttgttttttctaatgttctgtatgaaatctagtgatgcttaatttctttttgtatcttacttcaaatttccttagaatatagaaattcattttgttttatcgagtcgattgacttaagacacattacaacatatgataaatagatgtacacaatagataaagtaaaagtgtctacattctaaaccccacttacctacttccaatgtatactaaaaaagaggagatattcatgtacatatatacattttaaggtttccaatctcttgaaaaggcttgctgaatcacattgtgaaagtagcaatggcctggacttcactacaacattttccttcccgccaattacacatcgttctctttgagctacttcatctactagttttgccactgctattctaaaactgaccgtaagtggttgatgcaaagaagaaaatatgatcagtcattccgttttgcaacataacaatgaagcagaaaattatgtatgttcatttcgataatcctagttgttcgacaccttaatgatcttggtgtccttgtatagattaccttagaatttggttcttcattgtcattggttagcttttcaaacttgatgtcctataaaaatgcacatctcagacattacgtaaatcctagaatctacttttggtacttacacgatacaataccgaaaacgtaagtaccaaaagtagattctaggattaggcccaaaatgatgatgtaaaacaaaatcatgagtgggttaggcccatacggtcataaatgggcttatattggattagtttcctcctaccttatcctctttccgaccaaatttaagatattttatagaaagaataataatttaactttttagtgtgagtagccaacaggattggaacgaaaaagaaagtcaataaaagccaacagtaacgcgtctacacgtggacggttgattactcagaaccatgttagctatgggtccagacctacccacttgtgtctcacctttaatcctgcctcgacgttacgaaccccagcttcgtcaccgaaccttactttatatattagtccttcttcttctcatcttctcgcaacgtaggttctggtgaatgatcctaatccgtttagcttttaaaaaaataagaagacatatttatcaacttgatcaacttgagcaagttgcagcagatattttcctcggccaaggtaaagatctgatgttgtcttcttctctactcgatcaatttctatatttgaagttcgtggattttgaaggatttgattggtttccatggtattagatctctgtgatggttgttgatctatcttaaaacttgatttatcttcagttctctcgatttcaaacttgtacttgtcctacttcaagtgatctaatcggaaacttattgttgctatgtttactgatcgtacagatctattgatctaaggattaagctatgttgtgattgagttgttagatttgaatttgaatttgaactgagcttgtttgtttgtgtgtgcagatctagagttttgagaatg

SEQ ID NO: 25783 - DNA, 3003 bp, Unknown; identical to SEQ ID NO: 25782
  misc_feature (1)..( 3003): 2750-1469P.txt file - cDNA_ID_2708249; gDNA_ID_2214529; Annot_ID_184877

SEQ ID NO: 25784 - DNA, 3003 bp, Unknown
  misc_feature (1)..( 3003): 2750-1469P.txt file - cDNA_ID_2708261; gDNA_ID_2214555; Annot_ID_134746
gtgcagtaatgattccaattctattcaaaactgtcctggatacacatactgtctgtcactataatgagctaaactttgttagtatgggtgggttaaattgcagggccgctttgcagaagcgttactgcgtgaaatagcaggtgtaatcataccatcagaaaggatttatggtttgggttcagggtcagtatcattatgaggtccaccaatgattttgtttctcatccagattctacccttaatctagttttattttctgtgtgatatcccatcaggccaaaggtggaagttctaaagctacttcaagataaaccagaacatcagggcttgacgctgcagtaactcacgttctatatatctatcaataattcttctatctgcatgacttggtaatggtcaccattagtttacaatccctatgcatttttaatttggccagtttcgtggaagacagactcgcaacgctgaaaaatgtcataaaagagcctgaattagacaaatggagtttatacctaggtggtctcttccctctcccatatcatcacttctggttccccttattggttattctgacaaaaacttatctcaaaacaggaacctggggatacaacactgagaaagagagagctgaagcagcaggcattcccaggattcaggttattgagctctccacgtttagcaataagcttaaatgagtgcatatactcattggaaaagaaacaaagctttcctctttattgtattctacggcattcaacggaaactaaaaaccaaacatgtttaggtaagattcagtaaaagagttgaactttcagtactacccattatagaagcttttctgtgacctataattcatccttagtaagatcattcttgttaccatcaccatcttcgtgatctttcctttgctcagcttgaaatttgtcaaagacatcttcaaatggaggatctccaggtcttctaaactcttgcttccctatcttgacctcgtaagcttcttcttggctcagcacgaattcccttagctaattgaaagatatgattgtgatgttagattttgactaatccactaaacaaagttttcagcattgtgtgttttctgtggcttttacctcagtcacaagcttcccattttgcatattgaacatcactgtgcttcgatctacagccatgaatcttactcctatccctcctgttcttaaaacttttgtccatttcatagcaatatcaatcaccacatcctgattgaaacatataaacagatcactattcaatcccctgaagcaactggacccatatcgaattcagagaattttgaacagtaactgaaactataacttaaggaccccaaattcacgattcgatttggattttagtttaccttggtacgggggacgcctaaccggagcttgacgaaaccgacgacggttccaaaagtccgtttagccatttcctcttggatctgatcgaatcccatattggtgaaatccggaggcggatcaaattccggggtcgttgctttcttcccccactctttccatgactcgtcttcttcattgtcttcaacgtcgtctaggtcatcggagatctcgatccgtcgcttcgttgcttcggcgatccggacaaatccgtgaaaattcataaaaagaaggaggccaacaagtagaatcagcgaagaagaacgaacgatcttctccatcgtttaacaaatttattcaggaatcagaaacagaggaagagagactgcatcggcaacggcatttctatatcagtaaagcttctacaaactcgcacacaagtcacaaaaccataataatgtgactttttacttgtttcgggaaaaaaaactattaacgacataaactgaacctgctggttcaaaactgttcgccgtttttctatcttaaaatagaactgcgtgccaactattgacgtaaagatggcaagcatatcaaggctgaaagatgaaaacgacacgaggttgcaccgtaaataaaacaagggtaattgtatgattctctctaatctactactgcactacagaaggtaaaactaaaagtcaaaatttgtctaattttaaattcaaattaattaatcaagtaaaacaaacataagtctaatttgatttccaaatttgtttttttttttctttttttgatttccaaatttgtttatagtagtatcattttagtattcttattacccaatacggaaacaaatatttgaaataaacatggaaaaattaaaagtcattccatttggttaacaaaaggaacgtttggtaaattcacacgtgtctcatcgtcatttgtgcaactgacttgtataaggaagggtacttgtggtaataaaagcgaaaaccgaggggtggcctcgtgaaacgcattttccgtgttccaactgtatcgaggcgtgggacctacaatcaaaaataaaataaaattaatgccccttccaaaaaaaaaaagaaagagaaaaaaaagaaaaagggaagtaagaagccagctagggtttgactgcgagaaatttctgatctgcgtgaatttctcaaagagaggaatcgatcatcgattccgtggatttcgtttccctccctttttatttttatttttcgagaagccatctcaaaggatctgagtttataccgttgcatcccccgcgactttcgttttccgatttcccccaaattcgatgcaaatctaagaagagagagaaatagaaaggtgtgtgcgcttcaaccgactcagtgtctctctctctctctctctctctctctctctgttgctatttgaggttttttcctttgcctcgggggctctcgctgtccgaattcttttgtagggatttattgggtagggtttttccactttttttttgtcttcttctactagcttcgttgtgcattgggtttaattgtttccagtgtagtgactgtcagattcttcgaccaattgcatgcaatctggaggcagtggcggagggcccgctcggaatccggccatg

SEQ ID NO: 25785 - DNA, 3000 bp, Unknown; identical to SEQ ID NO: 12075
  misc_feature (1)..( 3000): 2750-1469P.txt file - cDNA_ID_2708265; gDNA_ID_2214530; Annot_ID_134248

SEQ ID NO: 25786 - DNA, 3003 bp, Unknown
  misc_feature (1)..( 3003): 2750-1469P.txt file - cDNA_ID_2708272; gDNA_ID_2214530; Annot_ID_134253
gatcactctctctctctatctctgttcacacatctctcccaaaggtatttcgaatcgaaattcttttgatttctttctatgatttgtttacattttttcgtggtgttcttgatttttttctttgatcaaaactagtagaaattttccaatttcgtcctgccttgtgattagtagtagatattttggaatttgattagtaggtagaagaagatggggacgacgttagatgtatcaagagcagagctagcacttgtggtaatgtatttgaacaaagcagaggcaagagataagttatgcagagctatacagtatggttccaagttcttgagtggtggacaacctggtactgctcaaaatgttgacaaatctactagcttagcaagaaaagtcttccgtcttttcaaggttaatccttttgattttgattagagtgtgtttttacctctttgtttaattaactaaatattatcattgttgcagtttgtgaatgacttgcatggtcttatcagtcctgtgcctaaaggaactcctcttcctcttgttttacttggaaaggtaggtgctttagagatcaaagctcagagttcgtttcggttttatatctttgttctgtatcaatctttgttgttattttcagtcgaagaacgcacttttatctacattcttgttcctggatcaaattgtctggcttgggagatcaggaatatataaggtgagagagagagagatcatcaagtttatgttccactggtgtattctagttttgtgtgtttggctaatgtcttatatgtgttatctcaacacagaacaaagaacgagctgagttacttggacgtatatctctcttctgctggatgggatcttctgtctgcacaactttagtcgaggtccgcctcttctttcacttttccgatcgattcctcatgtcatcttggcctttttcgccagcttatgtatcggttttcactgttatcaggttggtgagatgggaaggctttcttcatcaatgaagaagatcgaaaagggactcaagaatggaaacaagtatcaggtaaagttttcttctttgttaagaaacttctaattctacaaaatcttattataagagactcaattcaaattgtataaaaatgtaggatgaggattatcgtgctaagctaaaaaaatcaaacgagaggtcacttgctttgatcaaatcagctatggacattgttgtagcagctggtcttcttcagttagctccaacgaagatcactcctcgtgtcaccggagcttttggattcatcacctccatcatttcttgttaccaggtaacacttgtttcatccacaagacctcactttccaatttcgtaactttcttcttctgaattctgatatttacatgattctcattgttctccacaaacacagttgcttccgacacgccccaagatcaaaacaccctgaagtcaatcgaggaagctggtgttaaggagaaagtcatttcagaaagtttctgttcttcttattattaaggaaattcactgctgttataaaacatcgtataaaatacttatttgcaggaattacggttattataaatttatgcctcagattcttgatacacaagtttcaatactcaatagtattgcattattatgagatgttgtttctgctacgcaataactagaggcaaaatccaactacatatatgttttgatctgattattataatagactttgggcttcattccgcctaaagctacaacttggagtctgaagagcatccatgcatcgtggaacgctcattttacactgaatgctattttttattaaatatgaaaatcctcgatatttttctataaaaaaatatcttgaaagttgttgataggcccatgcatggatacgaagattttgggaatttaattccgaaatgtaagatttggtttgatttttttgttacatttgttcaaattagttttagattaaactctaaatttaaatcataagaaatcatcaattttacctggataatcttaacaacttatcattaagatctgttataattattaatttgtaaacttgagttaagttcgataaaatcacttcggttccattcgtttcaaatgtttccagtccaatgtcatgggtattgtttaggttaggtgtaactgtgtaaggtacaaaatgttgtttggatcaattaacgcaaaccaaactctcactgccttttacgattccaatggcaatatacattgcttctttgggatttcttcacaatcccgcaaggtttaaacttcctctgtccagtgtccccccaaaaaagtgcatattacattcccataactggcgtatatacagagcaacagagaatatcagttaaaaacggtgtgagcaaaaagtgcttcggttaagtattaaaattggttcgaaccggtgaaaagtgcaattgggattgcgtctctttgcatccaaaggacccaaacggacccctcatcacctatgtatcaaccttcactcgcttcaccggagcgtgcactttcacaaacgcggattctcaaatcaattttacttctttttaaaataatgttaaaagaataaaagatatatttctcataatacaatgcatgaatatactacaaaatccttaattttcctaattttctaaaagataaaatctaataattcgctgaaaatggaaaagaataatattttgaacaaaataatttccccattgttgcctatgactagctcgcacgttttaagcctaatctctcacgaatacataaaaataaaattaaaactcattgaccctttgaccttaaagcgcgtacctaacactcgcttctattttctctcttccctttatattacaccatcgaaccacttcatatcaacccttgaaaacttcactcgtcacacattcgattctttcatcgttgtgtctattataaatatatgtcaatttggtttctaaaaaattctaccattgattgattgatttttttttctttaagagatg

SEQ ID NO: 25787 - DNA, 3003 bp, Unknown; identical to SEQ ID NO: 25786
  misc_feature (1)..( 3003): 2750-1469P.txt file - cDNA_ID_2708272; gDNA_ID_2214530; Annot_ID_184895

SEQ ID NO: 25788 - DNA, 3003 bp, Unknown
  misc_feature (1)..( 3003): 2750-1469P.txt file - cDNA_ID_2708280; gDNA_ID_2214530; Annot_ID_134255
gtgcggcgtgactacatagatgcgtgttattaatttgatttgatgacgacatcactacataattaacttatttgcttaatttccttaaagtcagaattattaatggtttgttttaaaagattattcagtagcattttccaaagaatagacgcctctccactacaaaagacatcttcatattcgctttgttcaaatactttttgttttccgaaaaagaaagaaagaagagaaaggctctcaggccttagaaatttcacggatgtctttttttgttatacaaagttttgtcaacaagtgcaatttgttataatacgcatgcattcacgaaattagaaccttagtttgaacagaattatgaaagtagtaacttgaagaatacaattgtgtacgtaatgttttgggaaaagtcaatggagtcgttgatacggcacgtgtcgaacacaagcgattaagttgacttgtttctgaaggaaactgtggcgacaattcgaacgaagtttcaggtattttttgcatcattcttgccaaacgtcgacgggacgcgttttttttttgtctgcaccaaaataatcgacttttaaaacctgtgatccatagccagttaataatttcaataacaattttatcacaaaatgtaacagactatatataaattaatcgtatatcttcacttttgagactaatgtaacaaacgtgctcttatcatatagtgattgaaacatttaaggagcaattaaaccccctcgttaacacgaaaagctgtgatggccattggcattgcacgaagaacaacttaccgtcccagaacacactagagccgctgccgcgctttctcacatttgcgtatatatataattttgatcaattattttgacgtaacagttaattacattaatacaaattggtattgtagtcgtagttacgtgatttatcccaattcaaagtggatgtaggtaatagctgggaaaggtaaaaactgaaaaatcttggccaacaaacacatgcatgcatggctatacattgtaaattacatatgtcagcagcatcgtgtcgtgagctaagctaaatagctgtggaaatgttcatatatttaacaatagtttaaaactgcaacgatgtggtcgctcactctataatgtatttttgcgagatattattatatgtatattatcatatgacccaagatgaccgatgggcttagcttgcagtactgatgaataaatcattacagactgtttctggaaatttgttgtttgttgcccagttatttcatggcacatggattaggcactcatatcaactatgtagtactttttctacaatgttgtcgtgttgacttgataaaagtatacagtcaatctaggtcaatatctactagttctttcttataccgtttttggtggatagcgggaatggaattgctaattctaacttacaaggtatggtttacgaatattgtaagtgtttttttttagaatgccaattcagatattcaaaaaacggagaacatgtactagtcattaaatatagagtaatagagttaaaaatctataaattttgaccgaatacatataaaaatataaaaaattagaataatcaccaagtatttctcggtgcttattaatataagaagatagaatttaaaaatggctaccaaaaacaaaaataataaaaatatttattaaaataagcaaattgttaattagataattcaacagatttgaaatttataatcggccacttgttttttcttttataattagagactctcaaaccaaaatctaaagtaatttacacgatatgtatatataaagtcaggtctaaaccactgaatttagagatccgatccgttgatgggaaaactcaacccacattatcaattctgtggaaaaaagattgtgatttatttatattttttgtgtggaacacatgtatgtactataactgtgtagtacatgcatatgtaatttcaagtactcgttaaagaaaacagaccagcaaattgtcttagtaacatttttccacataccatctaatcgttcatgacatcgttttgcttatgtcacgtttatgacgcttgtatgaatgtgttcggctgttggtgtaccaaatatacgacaaatgcgaaacataagagaaaaagataagttaaacgttatacctaaggaaacaaatttggagtcttcacttttggtcgtcctcagcaaacaaatttggtgtatataataatcaaaataggcgaagtcctataaattgtttgccaacaaaatataaattgtcaaactagtattcgccacaaatgcacttttgagttaaaattgaatcacgtgtgaagaagttgttggactttgtttacatcctttggatcaagtcttaaagtcgttctatggacatttgagaaatctacgggaaatagaggcaaaagaaaaagaaatcaaatatagtagtaggttttaaaacatacatactttgtaccaaagcttaatggcgccatcaatgaatgaaatagttgatgtgattgtagctgaatgattgctagttacttgttgtgctcgtttgaggataaatcttatgatttcaaatttccaatatctttgaaaatcgttcaaagtaagatataaacatacctttgaaagagaaattagtatataaacaaataaaactaattatagttttcaaaatgataactgtagatgattaactattttctctcactaatttactaacatatccttgataaaacttgtaatctagatagatagaatataaaaagacgtaatctattatatacaaaacaaatttgtatttgaggattttttttatttataattataattaatagttttcaaaaaattaagcattaacgctgcgtttttcattattcatttttttgcagattggttcattattgggaaacaatagaaacgtaaaacgcagcgtataaaaaagattattatccagtaagtcagtaacttacacagattctctagcacaactgccatg

SEQ ID NO: 25789 - DNA, 3003 bp, Unknown
  misc_feature (1)..( 3003): 2750-1469P.txt file - cDNA_ID_2708284; gDNA_ID_2214530; Annot_ID_134259
gatagtttctgatagcgtaaattgatgatgcaggagttgataaatttcacgctgcactacattgcagacctggatattccaattaagaggtataacgtggatccaactgctagtctctaatcatgtttgcaaagtgataagatgatttattttcttgaaatttgtatacataggggaacatttattgaattccgaaatggaatgctcaatgtatcacccattggtcgcaactgcagccaagaagaaagagatgaatttgagagatatgataaggtagaagaaactatatttagtttgttcaatttcttatagaatatattttgagcattgtcattcaacactttttttaaaaggttcaaaacatccgaccaaagatggtagctgaacttcgtgagcggtttgcacatcttaaccttactttctcaattgggggacagataagcttcgatgtgagtagaatcaaaatgtggattataacaatttcttaaatccattttttgagtcactgagtctaatcaaattgttatgacttaggtcttccctaaaggttgggataagacttactgcttgcaatacctcgaggacttcagtgaaatccatttcttcggtgacaagacctatgaggtataagactcatctcaactctgcaaatctattcattagagttgttgtatggtttccgttgagcttgatgggtaaaaatatggcttttacttctgcagggtggaaatgactatgaaatctatgaatcaccaaaaacaattggccattcaggtcagctacttggatatattatcgtttaatctctgtatgtttgtgttgcgagatattttcatgacaaataggattgtttctgttgttgcagttacgagtccagatgacacagtggcaaaatgcaaggctctgttcatgtcttgaaacactactcatctcaagaacacagtgtcaagagtttgattcttctttggcgaaatctcacaactcttgattacaagaaatggagagaagtgtgtttgaatgctatctataccgtatgttttgaattttgattcatcaaataaaatatcttgttataaccttttgtttcagaacatggtcctcaaagttttaaaactaaaggttaaaaatatcctcttcaaaaaaaattggatgttaaagattttgtttacaacagattctctccaaaaagagctttaaaactttacaagaatttacaagaagaaacaacaacaatttgtatttatatattcattaaacagaaacgcatataaaaacttcaaacttgagaactgataagatcattcctccacgacattttcaagactcaacgaccggctcaggctcctcttctcctgcagcttcaggggcagcgtcatcttcttttgcttcgggaattgaggcggtgtcgtcaggtttgtgatcatcagaaggaggagaagcgccaccagaagaggcggatcgacggtggttagcagcggcttgatggacgtgattgtaactgcctttctcgagaaagagctgattgaagtggactttacagtagaggacgccattaagagaagcgtaagaagagtgagtcaaaggacaaccactgtgtgtgcacctgaagcaagtcttgtggtaactttctccttccattgttactttctcaagtgggtaaaccgtcttcttacaagtcgcacatttgtcttgtgttccactgaagaatgatgataacttgcttggagttcgagtcttgcagtatccatcaattgagacaaatcagatgaaaaaaaagaggaaataaaaacaagatgatgaatctttgaagacattaccagatgatcattgggcttctcggtctttcctgcctgaaaattcttgctgtaattgccagattctttgaaaagctgttcgaagtgtggcttacagtaaagaactccatccattgatgagtaattgcttatctgtgttaagaaaagatgtggtcttttaaaacaatgaagcattgtcgaaaaacagagtaacaatggaggaagaagaagaaaagagaaataccacgagagtgcctttgcaatgggtgcatctgaaacatgatttgtgataagtattaccctctaatgttaacaaatccatcacgtacacggttttgtcacaggccttgcatttatccaatgttcctgtaaacgacattttctctctttctttcggatgttagattcaaaaagtttgttcttcgttcgccggttcttgtcttaggacacgaccaaacgacgacgagagaaaaaacaccaggttttgtgtttttttcttttcatctctcaagttctctgtcttatttatcaaaaattcttgaagaaatgagaatttgtggtaattttggttctagtggtagagattcgaaagaggagaagccattcaatcattgtcgatcatcaaaattctaatttcaattttacaattttagactccgagcacaatgaagggtatcgacgttttcagccgtacgctctgtttgcggaagatccgaagatctatttttaaaaattacgagagaataatgataaatacaaagaaatgtgggggttatttcataattatacgaacgtacaaggctaatttagtgaaataaatgtggataagagtgagtgaaactgaagaagagcctgtccgtgtaatgaaaatccacttgacgacctaaacaacaacaacgactccggcgagtgtatgtatctttcactttctcactaaccaaccagacgacaaaagaaaattattcatcttagctaagctcgattagtttctggcggaaacggttttgtggataattgttagcatattccgatcttgccctcccccgagagagagagtccaatcaatcaatcaatcaatcatctcttacgaagctacgtgtgacctaacattctccagattgttgtttatagcctcttcttagatttacgatttgtgagcttgtgaagatttcttggtagaattagagttctctgtttcgagatcgagatg

SEQ ID NO: 25790 - DNA, 3000 bp, Unknown
  misc_feature (1)..( 3000): 2750-1469P.txt file - cDNA_ID_2708287; gDNA_ID_2214530; Annot_ID_134263
cttgaataagaagcctcagtgcgaaacactagaagcagagctaaagccggagccgtaagctgatacggtagaggagaagctcgaagtacagggaagaaatcaggcaaccagtccaaatccacggcggagttatagccggcgatcaggatcgcgacggtggtgaagaagaaaacaggcggaatcaaagacagtataacgcgtgaagatgggctcgaggatacgtgacggagatggcgaagagagcttctgtgtctgacccaattctcgtgagtgtagagagatcgtttctgctgcatccgtctctctttgataccgtcagaccagtttgggacagctttaagcagcgaaatgagcttctcggatagaggtgaatcgtcggatttggggccggaggagacgcaggaaggattgaatttgaaatgtagggatttgggagctctggcggagattccggagtataatcgtggtttgagaaaggataggttggtaaagttagaagaaaaagataggttcattgactgatacattttgggcgggaaaatcgaggtttagggttagggattttggtggagacgacgatgaagaagaagaagcagagacaacaataaagacacatgcaaaaattgcagagtgcataagtaaagagagacaagtgtgacttggagaaaggtagttggaacgaacagttgtgcgctcgacaacgtttcggtttctaagcttttatctgggcttaaatgggcttatactgaaacttctattctatcttctaaatgggcttatgtcttatctcagcccattaaagttccgtaccctttgaggtcagttgaaatttagggtttatagagaacgcctatctggttggagaggtgaaattggaacggaaaaaatgtcgaagaagaacaatttagccaagagaaagaagcagcacgagtacaatctccaaagtaggtttctttaaatctctttaaacgctttcaattcaatacgcatgtgtttctcaacaaaacttggaattttttcgatttgcagaagagaaagagttacaggacaagaagatcaagaagcttcatgccaacaagaataagatgaaagtaaggaccttttctgtctctcttatctcttaattctgatatttagttcatatacattggtgttcgttaagtagcaaaccgattctgttgcagagaatggtcttttctagctatatattactctagttggttaccaatggtgaaatgattgaattcgcttggattcaatttgatttcgatagtgttagtcagaagcttatgtggggtaaaaataataatattgaatcttcttagtagaacatctgacgaataagtttgagttttccaaatcatttaaatgaagtctagagtagtttatgatatctgtgagttggttgattttgttgtctaggttgatggaagtgggaagaagaagaaaggtggattttctgttggcaagaagaaattaaagacaaaactgactccaactgctaaagctaaagctgctcaggcaatggagctagacaattgacaaggaacttcgttttttttcacttgtatgtaaaattgttcttcattgatcttcgtctttactttggagaaatcatgttgaagctagcttcttcttataggttaaactcttatgtatcactctctcttttgaatgcaagattttgctatctaaccggatcgggatcattgtggaatgtagctattgatgaagtgaaatgtgtatggttcctaattgcttctaaagttcaaattcagcatagattctgatttctctgagaaaaagtcaacttttaggtaaacaaaacaaagacacaagtatgtttataattggcataagactttcatggtgcattagtcagacccaagatcttttctagtttattagtacattccagtattccactaaacatattttgaagaaaaaaactgtcttttagaaagtcaaattatgtttgtcataatcaaaagtcttatacaaacagtgtcacacattacatggtacatttaaagttgaatcctaataggaaaaaatctcaaaggctttgagaggttatatcatcccatcaatgggtccttgcgagatattttatagatttcttctgatcagcctctctctctcgtcaaaatagttctcaaagtggaagccagtgggcaagtctctgaccagacaggcccaaatcttttctcactctccggcgcgtggcctccactgtctctacagattcttccgtctcagatcaaattccgaagagatcaatcagtctatagaaacagtagagagactagtaagaagtagcatcagcttgaaaaggaggaatctgttcaccaagatttctggttgagaagaaagaagagtgacatgttggtgcacgcgcctgaataaagagtgtggccataagagtcatgtgccatacagatgcctagttgctatatagagctacagtcaaagtcagtttattcattaggattttgaatttccaaatacattttcagaaaaaaaagaattaaaagatcccattgttgttatcctcacagtaaatgcttttgcttgagagagagtctgttagaggttttttgtttgtttctgtttccttctgtcacccagaaaactaaaaagcaaacaaattcaagaagagagagagagagagatagcctcaaaaccaagtcctaaccattgttgatagaagagaaagcttttcttttcttgttgcttatggtgaaagaatgaaagagagagaggaggagaagtaagaagcagagaaagtgtttagagctttgcatgttcctttctctccaagtttatatcttcatcgtaaagtctctcaacctttgattctgttttttcctcttatccatttatcctctttctttttctctctctcctcataattctagccacaatctttttagggtttcacaagttcacttaaaaagttgaaaagagtctttcttcttcaactattgtaaatgcgaaatg

SEQ ID NO: 25791 - DNA, 3000 bp, Unknown; identical to SEQ ID NO: 25790
  misc_feature (1)..( 3000): 2750-1469P.txt file - cDNA_ID_2708287; gDNA_ID_2214530; Annot_ID_184905

SEQ ID NO: 25792 - DNA, 3000 bp, Unknown; identical to SEQ ID NO: 12088
  misc_feature (1)..( 3000): 2750-1469P.txt file - cDNA_ID_2708291; gDNA_ID_2214530; Annot_ID_134273

SEQ ID NO: 25793 - DNA, 3003 bp, Unknown
  misc_feature (1)..( 3003): 2750-1469P.txt file - cDNA_ID_2708295; gDNA_ID_2214530; Annot_ID_134274
aaactgatccaatgaagcagcaaaaaaaaaaaaaaaaaaaagcagaaacagccgtatacgtttggagataatacagatattcgaattgtccaaaacacaatatatcaaacaagcaaaagcaaacacattgagatacatacacgtaaccaccgagaagctcttttgaaccaaggagagtctattatgcgaattggcgcgttgtaccttataacagatattgggtattgaaggtgaacttccggcggggatttaaaatctggtggtggatagcgacggcggacggcggcggctgcggccaagcgatgtggaagcggccgagcggataagtgagagaaagcggactaaatttaggaattaattttattaaaaataaaaataaaaatcaaatgaggaggaggaaaaacaagaaaatgagaggaccgatcatgtccaggtgtcatgatcatgttggctaatggctagtggtggtatcaaccataacggcatcgttaggtaaaaaaggaaactaggctcgagtcggtgggctctagtagcgagagtggttcgagttggcgatgcttggagaatttgttaaaaagccgaggcgcttgtagattaaaaattgttggcccaataataagtatgggcttttatataggtgataaatggcccaactgtttttttaaaaaggctcgaatcttcctcatttgaaatttctaaggaatttgattttccaaaacttttgttgaatacatttgaatttaaatttgtaggaactttgaggagcaatttgtcttggcaaattttgttttgaaatgtaaattttaattgatatatccaaaatttggtgtctaatctttttatccatgatgttatttcaaaactttaaaaactattgattcatactagtattgatggtattgtacttgtgaattgttcagaactcttttgtcaaaaaaagaaaaaagagaacaaaatgtttcaaaattaaataatccaagagaggtggaagtggggactgtaacgcaacgggaatattgggagtgggcatgcaattattgcactcatgaaaaataaaactaaaaatgattttactatttggctgaaggtgacaagtgtttgggtggcttggtcggtttttgtatacgtaagtttatgccacgtgtcctcttatccatggattggacggcttggaatcgtggaatattttattctcataccaaagtccaaatatattacaacctccccctttttttcccttcacaaaaagctaaaagccattgcttaaaaaaccaagaaatactaaaaggatttggaaaagtagcaatcctgattttgattgatagtactataatggaacaccagtagttgaaattagatacataggttgaatggaattgtaacataggtttattttattcccttttttttttgtgaatacatgacaaaatggtattgaattgtaaatgaacttttcagaattgtgtgaatggccaaaaaaattgcaaaatataaaagactattctaatatcgacagaatttactaatcaagatcaaactcataccaaaataaatataggccgttcaataaataatttcattatggatgtgagtttaacttcattatggagcatgtacatggtttgggacacgggaaaggcgataacataacttctgcactatacaccgtttaaagagggaatttaccagggaaatttggtgcatggtcagatcaaatttggtccatatgagagcttggacggtaataaaagaaggcaagcgatagaacataacgaaatttggtaatgggactagaagaaaacagcacgtgggtaggacatagtgttacacccaaaaagacaacaaagcaacgaagcaaccataattgtttagtcctttttttctttcttttggcttaaacgttgtctttcctttttggcaaatagtggattgctgccgaatattacactatccaatcttcttctttaacctcattaaaacccactattcatcatgcatttattttacacattcatggtgaaactacttggtatatatatgcaaatgaatatgcatgtggatggtacatggcgtttgattttgcatataggcaatttattgatcaatacttggtgtagttggtacattaaagttgcattatagacaaacaaaattcggctgtcatgcttgattgatctatagatgatttcataataaaaaaatattgtcatggataaaaatagtgaagatgataacaaaaagaacagaacacaaagaagaatctcatttcttttttgattaataaaaggatataaagtcattagtttttttattcgtctcactcgacactaataataactaaaattgttggagaattaaaagtaagaaagcaatgctataaaataaagtaattgttgggaatggagcatgtaaaattatcactcataactaaaattagcaatgttataaagtatttaagtaagaaaatgttgtagataatttgttaaatgaggtgtccctatgtcttttaggtgcggtgagtccatgtgcttatcctgacagcggtccaacttaaccggcggttcatctcgaccacatattcaactgcttttttaatatgattttctgtattttcttacctgtcataatctacatttaaacgttaaaaaatgtccacaattttatttattttattagggtacaataacgacatttgattagagtaaagaaaatagttgcaaagcgggatttgaaactctgtccacatactttaattatcattaatcaataacaagcattatcagtattcagcagcagcaaagatgataacgttaattatactatcatgcaattaagttaactaattaactatcatcttgtttatgttttaattttgtttccatcatcttccaaccttgagtttcggtcactataaaaagccaccactctctctgcttctctgcaacacataacccactcacagaaaaacctagaaagctctagagagaaagagagagagagatg

SEQ ID NO: 25794 - DNA, 3003 bp, Unknown; identical to SEQ ID NO: 25793
  misc_feature (1)..( 3003): 2750-1469P.txt file - cDNA_ID_2708295; gDNA_ID_2214530; Annot_ID_184916

SEQ ID NO: 25795 - DNA, 3003 bp, Unknown
  misc_feature (1)..( 3003): 2750-1469P.txt file - cDNA_ID_2708329; gDNA_ID_2214531; Annot_ID_134292
atatatatattatcaaatcatcaaaaaccacaatttccacctggtcctccaaatgaaaaggcttctcctgtagatttggtataaccccaatatgtcgccctaaaacaattataggaatcgacataaagtcgtattttcctaccttcaatgtaaactcttttatagtccgagtttataacaacgacgttattaaaatgtgccgtctttttaaagtccgcaactggaaaaaacccattgcccattggaggactgattccatcgggagattcaaaagtatttcctccatatcttactagagaagctccattattcaaatgtgaaaataactctttaggccaataaccaatgacttcatcaaacattttaagtgcccaatttccgctgaagccatcctaatacatataaaacaaaagaaaaaatgaaaactaaatactccaacaagtatggtgtaatatgataagttcatctaaagtctaaactaattatataaatctttttcttaaaaaggataaacagaaatttacctgaaaaacttgcaatttaaacgtaagacttgttttaccatagacagatgttccccaaaatccgcttccaattcttgaatttcgacttacaaccacaaagccagggcattgtgtattatagcacccagttttctgataaccatctccctacatataataatatttgttacacatgtaaaataatgaaagacgttttgatctcttattttatttttttactctaagctgattaataatgttcttaaaagaataagagtagctaaaaattactcacagtccaatatattgtaaatcgtgtgacactatcaccgtacaatcttggatgtacctaaacagaaataaatataaaaaagattatgtatgttaaaaaaaaaacagattatggaacgcaaaatctttagcaagtttgatagaactgacttactgccaaaccagcttgtatactattgagttgacctggaggtccattctctaaccatatttgacttttactgtattggttattttgcagtttcaaatcatgaatacttatatcagcttctgctccccgatatatacttccatctaaaatggtctcaattgttgcaaactgcaaatttcatcaatatgttagtttaattttcatctataatatatattttgcatgaataacaatcggatgttttgatgttctcctttaattttacgtaaaacgaatagattattagaatgtcttaacaactagatgaaattttgtaactcctttcaaaaaccaagattaggagaagacatacatgttgaccagaatactcggcggtattcaaatgaacgcccttggatacatttctttgtctcaaaattgcaacggttccttttggacaatgctcttttgtattatatttgttgcttctttcaatttttccatctaggctgaatgtttcctacattataccacaagtaacaaaggaagaataagattcgtcagttttgatgtctcccgaagtcctattttcatatttgattaaccacaactattttattcacattttataaatttataaactaacattaacatattcatccaaaagtttcttaggaatacccatccttgactataacaaaagttacttatcatacataaactttgaactctacttttataaaataaatagaatatgcgagatctaattctaatatgaaaaaatctagataatttctaggtcggattagatttcgaaactcaaatattttgcccaacgatatatgctacgttacctggatcttgtgatctttcaacaatggatgttggaaagctggttgtttgtatatttccacacaatcaaaatcctataaaattggttgaacacacaaattagagaaaaattctaaatataagaatggaaatctttagaggatagaacaaacaagcataagcaagggtctcacatcagtgtttccctgtgcaccttgtgtaaacagcagataaacacatagacttaaagctagacgtaatgccattgctaagttatttttagtttacctagtttatatcaatgatacttttcagtataaataaacgaattcgagtcaaagactatctaaactattcatattaattgtgtttttaatgttttaccaaaattaacatatgtatatattttttggtcaacgttcaagtgtatatatagggaaatatggatacatggcttttagtttcccatatgtaaacataacataccaaaaaagtttcaaagttattcaaaatactttcatacgtatctttcaataaagagattcctaaaataactttaaaatagtcaaaataaccaccaaagtttatgaaaatctaaaaatattattttttaatttaaatatctttgtcacattttctatttacttcttatgccaattattgtttaagataatgatttagattaaaatattaacgaaatatcattgcttaaagtgttaattttactgtttttcgagtatacatatattcaaaaataaaatcaaaacattaaaaagaaattgaatcaaaaaagggtaatctattcaaaagaaattgaatacaacataaatgaaaaccattgtcattctttttccctggatttcacaattattaaaattaaactttatattaataatatcttaagataatataataaataaaaagtttatgagatggcagttaccccgttgggaacagattttctgatcccgccaatgttatctccacgtgtcaaataaatattggtcgcagagatatgcttcatctaaaccagatatcctcctaaccgtacgataaaaatccaacggaccagaataaaccttatctctccagttttagatctcgtataaattcaaagaacccaaaaccaaacaaaaagcacaagcacttagcagagcaaatgaagaagacgaagcacactgagaattcaccggccagagatcaccaataagtgttgtagtttccggttacttcgaataaccttcaatg

SEQ ID NO: 25796 - DNA, 3003 bp, Unknown; identical to SEQ ID NO: 25795
  misc_feature (1)..( 3003): 2750-1469P.txt file - cDNA_ID_2708329; gDNA_ID_2214531; Annot_ID_184945

SEQ ID NO: 25797 - DNA, 3000 bp, Unknown
  misc_feature (1)..( 3000): 2750-1469P.txt file - cDNA_ID_2708346; gDNA_ID_2214532; Annot_ID_134316
agagctgtttctgttcgtcgtatgcggtctaagtaccaagattctgcaccttctaatgaaactcataacaaggtaattgattccctctccttctcgccacctcgttcatcattacactgagaccttttctctcatcaaatttcttttatatttttctctctatagcaaaatgaagataagaggaagttgaagctaattgaatcagttgcaaaagggtcttctcaaggtgagtcattatcagtatcttctataccacaaggaaaagagaaactcgagaacgttggcaccgcttcacgcagtaaaatcagtaaaaactttggtgagctcttggctagtgatgagaatacatgggaaccttcatccgagactcctgtggcagagaaaactctgtatgtagacattgtgcatctagtagataagaaggtacaagaagagtccaagaagcagcctatattgaaagagtctccttcactagacattgttcctgtaaaagatgaagaagctgatatctcgcagcctaaaagcattgagcaagagaatggtaacagagatgaggatttcactaaattctcaagtcagaaagttgaagaatgtcctgatcatcaagctattgttgcactgccagaatccgatgtggtagagattacaaaggagaagaagattgatcttgaagttcagttgcaagtaatcacaacaaatattgaaagttcaaggcttcatcatcgttcaagttatctcattgttcctccaccaccattaccaaaagctccttcagattcttggttaaagcgtacattaccaacaataccaccaaaaaacaactcattcgcatggttacagtctcttggcactgatgatgataatcactttaccaagactcaagctaatccaaagtgggaaactatggtcaaaacgtccaatacacagcaagggtttgtgtgcttctccaaggtaaaaaaaaaaaaaagaaacgtccaatactttcacaaatgtgtcttaattttcaaagtcaatgcttggcaaaatgtgttaatacttgttgatcctgttttgttctttcaggaaacactaaaccctataccagagtcatagcaagaccaaaacaaaattctcactggtggtaatgaagaaactgtaaaatttttcacaccaaattacatgtaaattttcaacaataaagaagggatgagccaataaagtttgggtattttgtctttaactatttgtgtaaatctgaatcaaaaagattccatgataaagagaaagcaatggagataaatgtcttaaatattgtctggcacttaaggagaggtttcttgttgaagtgatgtacagctcatgttaacggagatttcatggcaataattccatgtgacactgcttctttattctctactaatagacttttttttttcgttcttttgtaattatggtttcaaaatatagagctcactagaaaggaaacttgaaagctgcagaattgaattgaattgaataccttgactaaattagtcactagaggaattattgaaacaatattggtgtgaaaatgttcacatttcatctcttattctctttatatatatagtggcatggaagatcacatgcaaatatatgagtgaagagaaatttaaaaaacaatatagagagagagtgagaggtttctttatcagttagtttgacatgaaagaagctgctgcttttgggggtgttttgttcttgattttcatgtttcttctgtcgttgttacttgtaaccatggccgtatttgcttgctccaaaaagaaggaaaagaagaaggattcaagttgctgttgctgctgtaaaggtggcgtttttggcggttgcagtggtgatggtggtggaggaggagggggttgctagataagtagatatatcacttgggtactgtttccgtacgtatttgaatttatgaccaatttgcttagaacatctaggcattacctaaagaacaacatgtgcctaatcttattatcgttatgctaaagtaaaatcaaatatctatttgatattagtatgatcggatccgattcttgcatcatcctactatcagtttcattctactttaatagttccatcgtttgtattttttctgcacaaactaatcatcttaatgaataattttatcaccatatcatgttaaaagaaaatttcgacgtaaatatatcatgtcatgatgtatacaagagaaaaatatatctcaatcatagtttttgtatgtatatattttaacattgttttgatgttatttgtccatagtgttggtcgttggaatccaaatagcgagttattattaaacaaaatgttccaagaaattgattatgatcgtcattcgtccatgtgctaagtccactccccttattctaagacttttatccatcctttaaattggaccaaatattaaaagtcaaatatgtagccatctggctccagagaacaccaattttttttctaaaatgacaaaaacttagaagattcaagattcagaaaacacatacgtaacgtaagccaatatttttccattcaaagagtttaccgatagcgaataaaaactgttaaaaaaactagaatgaatactgtaaacaatttatattagtagatagattaaagagtttttaaaattgtggtaaaactccaaaacaactattaatctgaaagagagtagttgttgttagtttacccaaattatctgattgtgtgaatgtagtaatctccacaataaattgcattatggtattattacggagttatcagacttttcacttcaccaatcactgtgcttattaaataatgactacttaataaacagattagtgtttcattggagcgtaagaatcacgcgctaaacttacgcgtgggtttcctctttatctttaaaaattttctcaagtttagacagaacaccaggtaatagagagagaacaaaatagtctttactctttcagtgagagagagaagttagagctgtaaaagcacatg

SEQ ID NO: 25798 - DNA, 3000 bp, Unknown; identical to SEQ ID NO: 25797
  misc_feature (1)..( 3000): 2750-1469P.txt file - cDNA_ID_2708346; gDNA_ID_2214532; Annot_ID_184977

SEQ ID NO: 25799 - DNA, 3003 bp, Unknown
  misc_feature (1)..( 3003): 2750-1469P.txt file - cDNA_ID_2708350; gDNA_ID_2214532; Annot_ID_134315
taagaagttcgacaatgatgtttcacttgaaataatagcaatgagaacacctggatttagcggagcagatctcgctaacctcttgaatgaggctgctatattggccggaaggcgagcacggacatcgatatcatctaaagagattgatgactccattgatagaatcgttgctggcatggaaggaacagtgatgaccgatggcaagagcaaaagcttggtagcttaccatgaagttggtcatgcagtgtgtgggtaagtgagaaacatattaaaagcctgtctgtatattattactatcaaaaacttactttaaagttataaactttggttttttacagaacattgactccaggacatgatgctgtgcaaaaggtaacgttgataccaagaggccaagcaagaggtctgacttggttcattccatcagatgacccgacactcatctccaagcagcaactctttgcaagaattgttggtggactcggtggtagggccgctgaagaaatcatctttggtgattccgaggtgactactggcgcagttggtgacttacaacagatcaccggtttggctagacaggtacgcgacacgttcagcttcacattagttatgctggagcctgatgataagtttgatcttttactagttgatgaaactgagtgtttgagactgttgaatatttttactttgcagatggtaacaacatttggaatgtctgatattggaccatggtctttgatggattcttcggcacaaagcgatgtcatcatgagaatgatggcaagaaactccatgtctgagaagcttgcagaagacattgattctgcggtgaagaaactatcagacagtgcatatgagatagctctaagccacataaagaacaatcgtgaagccatggataagctcgttgaagtgcttctcgagaaagaaactattggcggtgacgaattcagggcaattctttccgagtttactgagatccccccggaaaaccgagttccttcttcaacaacgacaactccagcatcagcaccaacaccagctgctgtctaagtaatcaatctgtatacttgtgatacttataatttttctgtaaatttatcttcaaacttacactctagaaatgtgatactatctcaaaatttagtaacaagtaaatgtttaaaaaattgaatttgtaggcttgtttatgatattgtccagatttgcaacactcaaaccgaaattcaaaagtattttcaagtagcacaagcagaacaccaaaaactgttatggaatcatgttctttatacttacaaacttatgtacatttgcttacaattaacctcaaaccattagtccctaatgcttcagagtctttaatccaacaccatcatcatctctctgttcaatgaacatccaagaatagtagcattccagagctaagcagaaaacctgaaaccaaaatattctaaaagatcaatgtttgattccaaatcagtaaatagaaaccgtaaagaagcaacatttatcaaaccttaaaggaaacgttacgcattaaatggcttcacgccacttgcaattccatcaccagctctctcgttctgctctttcttcacccacaccattgtagaagaagaagctcctctcggcattggccgattacgatatctccatttggtttgtgtcttgagagttttggcttctcctctattgatagagaagttctcaaactgtgtttctatggccattgatttggtaatctctttagatttggtcgctttcatccaataaactggaaccacatctttcaccggagtattattctccgtcacgacggactcaggcggcacgattgatgatacacaaccgcaatcgatgacatcctcaaccacagctccatcttgatttttattcgtcttgctattatatcgtttcctccaagctcccttattcttcttcttcttcttcttcggtaatccatccgccgcatcttcacctccaccgctctcgatcgccaccgtgacttccggtttctccttctcaacgaatcgtgcttctccgccgtctatagattccttttttctcccaaaatgcttccgattacttcgattcatacgcttctcctcctccgctttcttcagatcttcttcctctatctttttctcttcctcagcctgtagtttccgtcgtctctcttcttcttcctttcgcttcttctctttctcattgagccaacgctcctggagctgaaggatgctgatgtagttagccggaatcagaggaacagtctttcttttgccgtatgtgttcttctcctccattgaaatcatttccttcacacgcttcacaaacaaacctcgtcgaagctgaaatagtgaaaagcgtactgtagtaataaaatgctgaaaggaaaagtaaaaaaagagaggtcctacgcaatagcattaactttttataccgcacttccttagaggcccattggctggcccgtaacttcctttacttttttgagattttctgataattttgttgtaaagttcacaaaacataattaagttggaagcacttaagttcacaaaacattctaatgaaatcatcttgttataattgactcaagttacaaataatatgataaaacagtcaaaattaaaaaattaactaccataaacatgtaagattctaaaataaatataaatgttttattactagattcaggtgttggaagactaactaaaagggaaataaatcagacacatagagccaagcaacatttattactttttatagtatttatcattagagtaaagcttattttattaaaatcaaaccttatctctcacacacacacagaccaaggccattttctaagcaacttgtgcgactctccttcgtcctcatctgccaaaaacttcgtacgagtcgctacttctctctctatatataaactccttaccactctctttttctgattttttgacgttaagagatagaaacagagagagatagagagatagagttatg

SEQ ID NO: 25800 - DNA, 3003 bp, Unknown; identical to SEQ ID NO: 25799
  misc_feature (1)..( 3003): 2750-1469P.txt file - cDNA_ID_2708350; gDNA_ID_2214532; Annot_ID_184976

SEQ ID NO: 25801 - DNA, 3003 bp, Unknown
  misc_feature (1)..( 3003): 2750-1469P.txt file - cDNA_ID_2708354; gDNA_ID_2214532; Annot_ID_134311
acatgaaactccctctccttcaaattaaaagcctggtctaccatgcattatagctaagtaactatcaccagaattttaaagcgaaggagacgaaccaggtatcagcaatggcagagaatttggcaagttcatcttcattcaaagatgttgttgacgatgtgcttcggcttttattagaagctttgccttcaagcgtttgtattttcggatgcgaagaagaaaaagatgcagccgaagcatcagtgtctgaagtcgagaatagccgctggtgaagtaaacgcgacggaggtattattggtgaagaagataatcgacgagcagagagaagaagtctttgcagctgattcacccgtaccgacgccaacattttcgaaagagaaagcgatcacgagtttcggaaactgcggtcggaagttactgacgtcggattcgtcgtcggcgaaattgaagaagacaagtgagtgagggcaaaagtggaatgacgaattctcgaaggatgtaattttaacgggctacatattaaactatatgggcctataaactatagtaaggcatattaaaaatttagattgatgataatcagtaaaacaattagagaaaaagaaatttagattttagggttaaagttatacgctaattttcacgattgagaatttagagttgagggtttctattttaggttttagtgtatttctttttattaatttctaaaatctattttcctactttcggtataaaattttggggctattacgagaatgagtattttctaacccaaaaactaaaaattggacatttttacaatggacttatggggaaaggtactttggtgagttgggttgacgaaattacccctgccctacaatttcactcaatcaaaagccatcttcttgagtcatcttctccgacaactcacggcatctaaatgttggttctgataaactcaaaaaatcaattaaaagttttttaatggaataatattaaaccctaaggagataatttatagggaacccaaagatttcaattaaaaaaataatcaaatcaattgaggaaattagctcttaaaattttcgtttgaatcaattgagcagattagctctcaatcagaattcgtttgaatcccaaaattcgttcgattcgagaaacccagaattcgtttgataatctcgtcattatcaatctctcaaatttaagaaataagcttagatttacctaattcatttgaatcaagctcgaaacccagaattcgtttcaaattcgcgatcttatctcaccacattctcttgcttctcagcctcaccaacccttctctttacagtttgatcggacttttatagagaaaatgatgaaaattattaatgagattaggttgtcaacgtctctgcaacaatgaaatcggaaaagaaaaaagattttgcaataaaattttagaaaactgtgaaaggtgtgaagggtgaaaacgtcaaacgacgaaaatataaatacctaaatctataagccatatgagatgtacctattttcacaaaaacatagacttaattgtaccaatcccataattgatccataaaattttagtatattttataatttttccataaaatgagttcattaataggatcgcacaaagttcaaaagagtagttggatttggatatgttggtatcagtttgtttcactttcagcttgtagtatttttctaacaaaggtcccacgatcaaatgagaaatctcattcttgtatataatcattataatttaaaagatccaggtaggctttcattatagtgtgtatataaatatatcacatcggcacatacaaaaactaatatattctggatacacaaaatattagagagcaaagacattggtaataaatcttatttgaaaatttgatatggcgtgtccacaaaatctttcttcttactagagattagcgatccacaacaattagttcaaagattagcgatcccctaattcattttgattgtgtttggaagcgtggagagaaaaattgtattcgaagcattaaattattttcttgccaatagattatgagttaccacttattaccaattgattttgagttgaaattccttataaaatttgatttaagctttagatgagatgtgtgtttgtgtctacggtgcactcgaaatcagaatatattcatttctaccatcgttcatgatagctcgggcattcgaactcttaatgccctaaaaatttattttcttcatctatttattatgttggatttagtgtgttcgatgtgttttgaatgagcgatacacatgtgtaccatcatttacggaaacttgaacgtttggagtgattgattaggtaagaatcctagaacaaaatgactactacaagtaacttttttgcaaaaaccttattttatgtatttcatcttaatactaataacaacttgacttttgttctaccttttcaatttcttattcactacaattttattacaccacactaatcacaagattcacaactaatggtgtatgaaccgttgtttgtgcttcaaactttgcagcgaatattcaaactttttatctatagaaaaagaagagtgtgggggcattaaaaggagctgtctcatagttggtaatgtcaattaagaagctggcaatacaatacatgtaggacaattcaatcatcgacccatttgaatagataatgcaacccaattatttcaccttattacaaagaaaaaaatacaccccaaaatatctcatcaataagcatattatactcatgatgacttttgttaattataaaaactaatgatgctaataaccaaaatcaagagttgataaaggaagtcacgtttggagattctgtctatagtgtttcgctggaggcgttgaaacagccctctttaacagctcacttcgtttcacattcctaaattcctctcaatcttcttcttacttaacttattatataagtctctgtttctctctgacaaaaatattccaccacaaaaaaaaatg

SEQ ID NO: 25802 - DNA, 3003 bp, Unknown; identical to SEQ ID NO: 25801
  misc_feature (1)..( 3003): 2750-1469P.txt file - cDNA_ID_2708354; gDNA_ID_2214532; Annot_ID_184971

SEQ ID NO: 25803 - DNA, 3000 bp, Unknown
  misc_feature (1)..( 3000): 2750-1469P.txt file - cDNA_ID_2708356; gDNA_ID_2214532; Annot_ID_134310
gcaaagatttggctccttctatacctctagaaaaagctttgtccactgcatccttagcctattcaaattaaaaacgtgtcttgttagttttgctgggacgataaaaaacatgtaaaagtttgtgaccaataccgacctgtgtagacacaccagacgctttgtctggtgcggctgcagcctcggtcttgaccgtttcaacagatgctgcaacggttgtctcggcgtcagttagagtgctcctggcggtttggttaacggttttctcagcatcagtgagagaagccgtgacggattcagcggtgcttgtaacggattctttggcttcgctgagagccgaagttgccttctctaagaattgagccatttttttttgtggtggaatatttttgtcagagagaaacagagacttatataataagttaagtaagaagaagattgagaggaatttaggaatgtgaaacgaagtgagctgttaaagagggctgtttcaacgcctccagcgaaacactatagacagaatctccaaacgtgacttcctttatcaactcttgattttggttattagcatcattagtttttataattaacaaaagtcatcatgagtataatatgcttattgatgagatattttggggtgtatttttttctttgtaataaggtgaaataattgggttgcattatctattcaaatgggtcgatgattgaattgtcctacatgtattgtattgccagcttcttaattgacattaccaactatgagacagctccttttaatgcccccacactcttctttttctatagataaaaagtttgaatattcgctgcaaagtttgaagcacaaacaacggttcatacaccattagttgtgaatcttgtgattagtgtggtgtaataaaattgtagtgaataagaaattgaaaaggtagaacaaaagtcaagttgttattagtattaagatgaaatacataaaataaggtttttgcaaaaaagttacttgtagtagtcattttgttctaggattcttacctaatcaatcactccaaacgttcaagtttccgtaaatgatggtacacatgtgtatcgctcattcaaaacacatcgaacacactaaatccaacataataaatagatgaagaaaataaatttttagggcattaagagttcgaatgcccgagctatcatgaacgatggtagaaatgaatatattctgatttcgagtgcaccgtagacacaaacacacatctcatctaaagcttaaatcaaattttataaggaatttcaactcaaaatcaattggtaataagtggtaactcataatctattggcaagaaaataatttaatgcttcgaatacaatttttctctccacgcttccaaacacaatcaaaatgaattaggggatcgctaatctttgaactaattgttgtggatcgctaatctctagtaagaagaaagattttgtggacacgccatatcaaattttcaaataagatttattaccaatgtctttgctctctaatattttgtgtatccagaatatattagtttttgtatgtgccgatgtgatatatttatatacacactataatgaaagcctacctggatcttttaaattataatgattatatacaagaatgagatttctcatttgatcgtgggacctttgttagaaaaatactacaagctgaaagtgaaacaaactgataccaacatatccaaatccaactactcttttgaactttgtgcgatcctattaatgaactcattttatggaaaaattataaaatatactaaaattttatggatcaattatgggattggtacaattaagtctatgtttttgtgaaaataggtacatctcatatggcttatagatttaggtatttatattttcgtcgtttgacgttttcacccttcacacctttcacagttttctaaaattttattgcaaaatcttttttcttttccgatttcattgttgcagagacgttgacaacctaatctcattaataattttcatcattttctctataaaagtccgatcaaactgtaaagagaagggttggtgaggctgagaagcaagagaatgtggtgagataagatcgcgaatttgaaacgaattctgggtttcgagcttgattcaaatgaattaggtaaatctaagcttatttcttaaatttgagagattgataatgacgagattatcaaacgaattctgggtttctcgaatcgaacgaattttgggattcaaacgaattctgattgagagctaatctgctcaattgattcaaacgaaaattttaagagctaatttcctcaattgatttgattatttttttaattgaaatctttgggttccctataaattatctccttagggtttaatattattccattaaaaaacttttaattgattttttgagtttatcagaaccaacatttagatgccgtgagttgtcggagaagatgactcaagaagatggcttttgattgagtgaaattgtagggcaggggtaatttcgtcaacccaactcaccaaagtacctttccccataagtccattgtaaaaatgtccaatttttagtttttgggttagaaaatactcattctcgtaatagccccaaaattttataccgaaagtaggaaaatagattttagaaattaataaaaagaaatacactaaaacctaaaatagaaaccctcaactctaaattctcaatcgtgaaaattagcgtataactttaaccctaaaatctaaatttctttttctctaattgttttactgattatcatcaatctaaatttttaatatgccttactatagtttataggcccatatagtttaatatgtagcccgttaaaattacatccttcgagaattcgtcattccacttttgccctcactcacttgtcttcttcaatttcgccgacgacgaatccgacgtcagtaacttccgaccgcagtttccgaaactcgtgatcgctttctctttcgaaaatg

SEQ ID NO: 25804 - DNA, 3000 bp, Unknown; identical to SEQ ID NO: 25803
  misc_feature (1)..( 3000): 2750-1469P.txt file - cDNA_ID_2708356; gDNA_ID_2214532; Annot_ID_184970

SEQ ID NO: 25805 - DNA, 764 bp, Unknown
  misc_feature (1)..( 764): 2750-1469P.txt file - cDNA_ID_2708367; gDNA_ID_2214548; Annot_ID_134615
ttaaatccaagaaaattgcttcatattgcatgactcatgagtatatacacatttatagctggaattagtattatctagttcatgagtgtatacatattttatagcttaatgttttatattatctacctaataaactttcattcatatggtaaactagatatagaactaattactaatgatggcagttaatgaaacagttaactatataagtttgtagaaaaattaaattaagttttaacgtatagatattcatgtgaacaaataatgattattaatacaaaaagttaactaccacatatttcttaatgaaacaggtaactagaccagttagtagaaaaatttaaattaaatactcatgagaacaaataaatgattagtaatacaaaaagatttaattttacattttcttttcccagtgtctaccacaaaattctaacactttttttctgattgcctaagcatatatcgactacaagtataggaaattaagccttaacgttgtagtattaactttctacgatagagaagtggaaacttgagccatgtaaaatgaagcaatttcttggattcaactttattgttcaaacaaaaccaaatcgatctggtggtccatttaaagtttttgcatgcatatatgttcgtgatttgaccattaattaacattcacatgattaatctctttataaataatccttcagccttgtactctttcttgttcctaagcaaaagcagagttataagcccaaagacaataataaaaaatg

SEQ ID NO: 25806 - DNA, 764 bp, Unknown; identical to SEQ ID NO: 25805
  misc_feature (1)..( 764): 2750-1469P.txt file - cDNA_ID_2708367; gDNA_ID_2214548; Annot_ID_185481

SEQ ID NO: 25807 - DNA, 3003 bp, Unknown
  misc_feature (1)..( 3003): 2750-1469P.txt file - cDNA_ID_2708406; gDNA_ID_2214533; Annot_ID_134331
aatgaaaatcacatttcaatacttttttaaaaatgtattcttaaagagaagacgcaaaaagtatttaagtgtacagtgaacaaataagattttgttttagtggtgaaagagaaaaattacactatatttctaaattagttttttttctttcttttcggtttttgaggtcatttaatcagataattcgaaaatatttaaataacttatgtactaggataaaaagcaaacatttttttttggtatgaattagtagtagagaatattacgtgattagacacttttttaaaagtttgttcctaattaggcactttaaatggagaagtcactttagataaattattttacttatttaccctttaactacattttttccatcggtcatttcttctctctccttttcccatctcttctctattttttttttttctcactttatcgaagaaaaaaacatttcccagaatatcttcaattccaaatctgcaattaatctccaaatccactctacgcgatggctttcttttttctctggactaattagagaatatgaggtcttggtttctttaagattgtaatttattttgcaatttaaatatttgttttgatataaatttgagattcaattatctaagaaacatcttcttcttcaacaatggcggcttgatttgatttttgctctctctcatgtgtcaaactcgtttcatctatgtagcatcgagattccggttaatcgaatttcctgttattatggacatgatatacaaaatggatatagaacagtaaaaaggtttccgaatggatatatttaaatggactcgttattatggacaccaaaccattgtttgttgatttttctttcggtttgcagagacctctaccttcaaaaccttatggacatggaactttggtttctttacaaaacacggttaatcgaatctcctgttattattgacatggtatatagaatgaatatagataagtagaaaggtttttgaatggatatatttaaatggattcgttattatggacaccaaaacattgtttgttgatttttctttcagtttgaagagacctccacttccaagaccttatggacatggaactttggtttctttacaaaccacggttaatcgaatctcctgttatatggacatggtatatagaatgaatatgaatcagtaaaaggttttctgaatggatatatttaaatggactcgttattatggacaccaaaaaattgtttgttgatttttcttacaatttgcagagaccccacctccaataccttatggacatagaacttttaccaaattcctgagataatcgagatcaaattgtttaagaaacttctccaaaagttatggagacgtggagagagagagagagaggcgctacaaatcatggagagagagagagagagattttatttattttgggtaaggatcgtggaagaggaataacaaaaaagagaaattaagaattaaaaacataaatattgaattgagggtaaaaaagtctttaaaaaaaaagaattaatagaaaaagtgtctatttcctataaactgcctcaaacggaaaaacattctctaaaagtgcttaatagtggaacattaatcgcatgacaatataataagacgtaaaatttttggtcttatcatatgcaaatacttattaataaggaaattttggtcttataatattgcaaaaactgatttttctttgtttactattcatccctatcacaattcacaacattaacaaaaactttctaatggatttttcttcaactctagaacattgcaattccttttcaactctagaatatcaaataccgtttaaaagacaaaactatcagttaatgatgtcacaaattactcaaaaaattaacactctcttaataagaagaagacttgtattttaataataagaagacctcgtgtgaaacgagatcaattacaactttatgtattagactttttgacaaattcacaacggtcatcaaatggaaacaaacaaaacgaaggctcctcttcaggctctcaacggtcacttgcttagaagctgcgactacgacaagcaaaaatactcatccaatgaaaacgacgacgtatagaacctaacggtcgttttaaattctttaagattctatttttcatttaatttaaaaaggagaagaaaaaaaaagtgagtcatcaatgaaacacttctttaacacagatacgttacccacatgcccaattattagcattcgtttccttttagacgtgtttttgacttcatttgaaatgtctgttttaacctcacagagcaaacccaataaatcgcttacttcatcgttttagctattttagactgtgaatgaccgttttaccctccaacattctcttttgtactatctgctgtgttttattgaattttattctacgttacaaagggcctttcttcttatttgcaatactcctctttttgtttatgatagttctagtctactagacataatttgtttttattattaaattgacataaagttaccaaaaattgaatgattcttattttggttatgaaaaaatattggaataaaaaatctcatggatatatacatttttcattattaagaaaaaatgatattttcctttattttgccaacaaaaaaaaactggtcaacaagagtaggattcaagctaattttgttttcctcaaaataatatccattttgtagaaagtaaaaggacaacataaataaaggaaatgaaagttgtaagggcataaatgttatttacaaagtcaaagagactgaaaaactttgaataaagctcgataaacacggactctaattcattcaatattcattaccttcttctttcctttatatttaaaaaccttcttcttctctctctgtacatcgtcacaacaaaaaaaaaacagaaggagaagaaacaaaaacaataatctcagcaaaaacaaatctctactcatcgaaatcgaaatcaaaatatagaaacgatg

SEQ ID NO: 25808 - DNA, 3003 bp, Unknown; identical to SEQ ID NO: 25807
  misc_feature (1)..( 3003): 2750-1469P.txt file - cDNA_ID_2708406; gDNA_ID_2214533; Annot_ID_185010

SEQ ID NO: 25809 - DNA, 3003 bp, Unknown
  misc_feature (1)..( 3003): 2750-1469P.txt file - cDNA_ID_2708417; gDNA_ID_2214516; Annot_ID_133951
catttgtgagagttaagacagagttaggtctgctttctgatttcacatgaacttatcgtgagagtttcttactaaacaattcacacactttatatgtatgcgtgttaaattttggtgagaaaaatgttagaagaaaagcaagattacgcttttatttaaccatcccctgattatcaaattctcgttatcaaaaaaatagttgccgataatatcttcacttgtctatacacatttaaataaaattatttaatttgaacagtcattattgtcagttggatgaggaaccctaaagataagaattattgccatttaagtattgataaagatatttaattaattgtaacttcagtgaaatttcatagaaagaaaaatatatattcatttgtttggttcttatcataatggtcccaagaattgctgcaccaaatggttgtatctcgaggcatcgatgccattacggtaaaagcaaatggtaaagtagctcataaagctacactccacaacatcaataccaatttaacattttcagatattctaattttttagctaacgtctgaattaacatattctaatttataatatgaagaaacgtaaatatttgaacatttatatccttaataactgcttagatataggagctctaaacataatctacactaattttcgcatgtgattatgcaaatatcaatactttgatgataaactattagtttgattaaagaatggcagtgtagtgatagataagttatctctaaacatagaaagagttggaccaaagtctcattctatcgctttcttttttcccatctatttgaatatttgactattcaggtggatattattctcgtataagaagttaaatatataattaactaaaattgggttcaaatatcttttattaattaagattatagtgaaacatgattttttttgtcataataaatctatagtgtcaagttcaatgtaaaatattttaagtcaaagtgaaatcatattaagacaaccgaacaaccacacaaaaaaatacataaaccattttgttttcatttctttatattcaaactaatcatcaccaaaataaaacctaacaaataaaggaagtgaaccttgtaatttaaaccttacttaacccctttatcagaataaggttttaattttaatgaaatctcacaaataattttttttctttctttcaccttaaattgactccaaacaaaaacggaaaccatgatgagccaaactaactgacatattcattactatatcttatttgttttgaattttaaaattaatagaaacctaaaagtaactctagtttttatgaacttatctctatttaacataataataactggtgtaatagttagtctttcgtataagtatggactgacatttgtttcttacccaattctagaatcacaatttaaaaacgtaggtttgcttcttcacttgaacaaacttgaaaaaaaatttcatcatttaactaagctcacttttaccaatcaacatatcctgcatactatttttcaccattacgatatatttatgtcgactaaaggaatctccaaggctaaacactattttggtgttcaaattacaccatttttagcactaaaacttctgttctatccaaccataacaccaaaaatcacactaaaaaaagaatctattattatataatttatttaaaagattttttttgttatttaatagttttgattagtatttattattagtataggattacataacattataaacatagtatattaaaatatatatttaaaaatacataaaattgtaattattttaagtattttcatacataataatataaaaatatcataattaaataaactatttcaagagatataatatattaatgtatccattcatttttatattttatatctattaatcatttgtaattttatatttattaattgaatttttattgatataataagtgaatagtgtttagagttatgaatagtatcacaccaaatttgatgtaacactgtagcattacactaaaatggtgtgaattttagagttccattggaaagcttttagtgcaaaaattacactaaaatggtgttttagagtcccattggagttggcctaagtagaaccactgaaccaatgcaacaaagttagacatatattataataatagacctctatctatgctatatatatgtaattttgcattaaataggccagtgtttgtggataactatcacgattaaatagtgctaatcatgtttaaatagtggtaaatttacccatcaaaaacaaaacaaaaaagattaaatagttctaaataacaaatattacagcccatcattagttgtcttgttacaaaggtagatgatgtagcaatagactaatagtacccattatatcgaagataaattactattcaactatacaaaactatacaattatatattatcacctttttttgttaggtttcttttgctgtttaattattattattcaaaaataaactctcaaaacattatcttatttaatcaacgcaacaaatatcgtaagcaaacatgctaaaattaaccactgtaaaacatatatttgtttctgtcgaacattttaataaaatattcttacaagactatttcaaaaaataacaaaaatataaaagtgtttgtcaacgaaaaataatttttaattaaataaggaaataatataataaaaaggtataaagtaaacttgaaatcggaaaaaaactaaaaaaggagaaagaacaaagcaataaatgaaaacctgcaaagtttcgtctttgcaccaaaaaacacatcaccactctcttcctctctttcctcacttcgctctttcttcttctcctcctacttcccaacttctctcctctctcttcacattattatattctctctgtttcttccaatccaatccaatctctctctctctctctctctcagaaactaaactgaaatattgcagagttttgaatacacggccatg

SEQ ID NO: 25810 - DNA, 3003 bp, Unknown; identical to SEQ ID NO: 25809
  misc_feature (1)..( 3003): 2750-1469P.txt file - cDNA_ID_2708417; gDNA_ID_2214516; Annot_ID_184443

SEQ ID NO: 25811 - DNA, 3000 bp, Unknown; identical to SEQ ID NO: 11773
  misc_feature (1)..( 3000): 2750-1469P.txt file - cDNA_ID_2708428; gDNA_ID_2214516; Annot_ID_133952

SEQ ID NO: 25812 - DNA, 3000 bp, Unknown; identical to SEQ ID NO: 11773
  misc_feature (1)..( 3000): 2750-1469P.txt file - cDNA_ID_2708428; gDNA_ID_2214516; Annot_ID_184444

SEQ ID NO: 25813 - DNA, 3000 bp, Unknown; identical to SEQ ID NO: 12152
  misc_feature (1)..( 3000): 2750-1469P.txt file - cDNA_ID_2708443; gDNA_ID_2214534; Annot_ID_134349

SEQ ID NO: 25814 - DNA, 3000 bp, Unknown; identical to SEQ ID NO: 12152
  misc_feature (1)..( 3000): 2750-1469P.txt file - cDNA_ID_2708443; gDNA_ID_2214534; Annot_ID_185036

SEQ ID NO: 25815 - DNA, 3000 bp, Unknown; identical to SEQ ID NO: 12157
  misc_feature (1)..( 3000): 2750-1469P.txt file - cDNA_ID_2708446; gDNA_ID_2214534; Annot_ID_134341

SEQ ID NO: 25816 - DNA, 3000 bp, Unknown; identical to SEQ ID NO: 12157
  misc_feature (1)..( 3000): 2750-1469P.txt file - cDNA_ID_2708446; gDNA_ID_2214534; Annot_ID_185028

SEQ ID NO: 25817 - DNA, 3003 bp, Unknown
  misc_feature (1)..( 3003): 2750-1469P.txt file - cDNA_ID_2708454; gDNA_ID_2214534; Annot_ID_134343
acgtaataggttgttttctttatgttaaatttagtatttgggacgaggaattgcgggaatccaaggacctacatatgcaggttcaggatgcttccacactagaagagttatgtacggtctatcaatagatgatttagaagatgatggaagtctttcttcacttgcaacaagtaagtactacaggcgaaaacaaaaatgcatatatcattaaaccaatattttagtattgaaaattctatttctcttttttttttttcaatttattctaacacttaaatctatgttctgttattcttctaacatgcaatgtatagtacttttgtgattcatcgttatataatacgttcagtaattttattattcaaataaatcattttaatggtattgttgttatttcattaagggaagtatttggctgaagagaatttagctagagaatttgggaactctaacgagatggtgacatcggtggtcgaggcattacaaagaaaaccaaatccgcaaaatacccttgcaaactccctcgaagcggctcaagaagtgggacattgtcattttgagtaccaaactagctggggcaaaactgtaattagatttaaactatatcacagtagactattaatctaaactcaaattttcttcttattcatagtaatgtcatttgtaatgcataaaatcctgcagattggttggttatacgaatcaacagcggaagatgcaaacacgagtatcggaatccattcgagagggtggactagctcatatatatctccgaaaccaccagcgtttcttggggctatgccaccgggaggtccggaagcgatgctccagcagcggcgatgggccacaggactgctcgaagtccttttcaacaaacaaagtccgttgatcggaatgttttgtaggaaaataagatttcgacaaagcttggcttatttatacattttcacttggggtctaaggtcaatccctgagcttatttattgtctcttgcctgcttattgcctactccacaacgctgccttatttcccaaggtgactctctcttagttctttctgtctcttcaacttcaacaaattaccgaaactcaatttggattatgacatggtgactgaactagcacaaccactaaattcttaatttgtatcattttctcattagtatagtttctatttatttcatataattgattaaaagggaaatgtctaatgttttattttgtttgtggctctagggagtttatttaggtatagtcgtcacacttgtgggaatgcattgtctttactctctatgggaatttatgagccttggtttctcagtacaatcgtggtttgcctcccaatcattttggaggataaaaaccacttgcagttggttatttagcatccctgatatcatactcaagctacttggaatctcgaaaactgttttcatagtcactaaaaagactatgcccaagacaatgtcaggatctggatccgaaaaatctcaacgagaagttgattgtccaaaccaagattccggtaaatttgaatttgatggctcgctttatttcttgcctggcacatttatccttttagtgaatctagccgctctagccggttgttcggtgggtctacaacgtcacagaggaggtggttcgggtttagcagaagcttgtggatgtattttggtggttatattgtttcttccatttctaaagggtatgtttgagaagggaaaatatggtatcccatggtctactctttctaaagctgcctttttagcagttttatttgttgttttctctgtgggaaactagtatactgatatggctttaatttgtagctaaaaactgctaatatgaaaataattattctctaatatacctctggctaaattttagtttctttgatacaaaataaatctaggactataaattcgtaaatagttgatgtacattctgaagtagtgagtagcgtattacttccaaaacaactgcatcgcctcttctacggctttgtctcgttctcacaattattagcttatatccatataagacactatttatttgactgatcaaaaaaaaaatacactatttatctttgtgggttttaaaactatgacaggacctgattgattttgtttttgtaagattcgtggtttttcgatttcatgaaaatgactcaatgatttcatcctttctacttttggggtttgaagtcaactgtttatgtggacgttatttttttgaaaatttaagagataaaatagggcatacgaagccaatatctagataagtgatttaggaacaaaaaccaataacaaaatgaagaaacattacttgacttcattttgtgtgtgacgagtggcgactagtcatcattcaccacaaagcgcaaacttgaatcaggagtaagaagacatactttatcgttatcctaatttgaatcggaccacacaataacccaccacaaatagacaaagatacatatattattgacaatcttttattatataagataacgttctatataattgaattgttttattaataacgaaaaaaaaacgacttcgatatgagtaattaattcgttgaaaaaagtttcttcgggtctagtttttttaaacttctaatatgatattaaaaaccaacatgatagctttcacttgatggtaacttaggatcagtatagtggtggtatctatctacaagtttaattccagtttacgtgaagttcataaattttattggtcatatcaatgtgtacaataaatatacgttttataaataaataatatttgcattttttattcatgtatctaaataacaaactagtccaatttcacttgactatgacctctttgttcttttttttgttaatagttttcacaaaaaaagcttactcaattttatatcttctcatcactcctttttattataagtgtatacaaattatatatatattttttacttaattcttagaaacatatccaaaaacctcaagaaatctccttccatg

SEQ ID NO: 25818 - DNA, 3003 bp, Unknown
  misc_feature (1)..( 3003): 2750-1469P.txt file - cDNA_ID_2708458; gDNA_ID_2214534; Annot_ID_134342
aattaacagaagcgcggatatctttgatagcacctggccaatcaaggccatccattagatgctgtgcctctgcagtatccaaaccaacctttcctcgatacaagctacaaaatataatattgtgagacgatactcaatgaaccataatttacaaaactgaatcttgcagttaaagaagcactcactcaggtataagggctttgaatccaggctcaagttgtgagattttaatagcatggttcttgatctcaaagtcaacaccccaccattcttgaatcaccacaatcccaggcgcatcatctttaccgaccacataggcatcaaatgtctaaccaacagaccacagtgtataagttttctttagagtaaaatcaagattatagaagaatcatacacaaaaaaatagctaaatcaaatgcatttttcacaatcctaataatcaagaaactccaatgttcaagagaaaccagtctatccatggagagagttacaagcaaagcataacatcgccgaaaactctgaccaaaacaatacctaaactgtttatcactatactgatcatttgtgaactgaaacctaaactcacaatcttccttcttaaatcaaccagttctataaccaaacctgataaggactatgattatacggagatcttcagaagtagctaagcaataataacatctcttactctcattcccagtttctctaccacagaacaacactacacaatcctgaagcagaaacgccattgaaatgataaatcaaatataatccatacatcatacacaacagattccgagatttgggggatatcaaaagaaatgatgattttcattcaacggaaaggataaccaaaatttttttttacttcaaaatcaggcactacggatacagtcgaagcttatgatacaccaaacacaaccataaaaatggcactaagtagaaaaaaaactcagggagagacaaaaaagagaagctcttacagtgtcatctctttggatctgaattttcctgaaagctgaatccgccattgatcgcactgataagcgagaaaacgaaggaatcgaggatctatagagcgaagaagtttttccgattgaagaagagaagaatctggatgaggatgacactagtgtacttaacattgtttttgtgtcttgtgaggaaagaaattcttcagagtcaaccccaaacgacacaaaaacgacgacgtatctgtgagtgtgaatctgggcccggtatatttttaaaaatatatgggccattaggcccaaataatcaagtccttttttgtatttgtatttgtatttgcgacgacgataatacgtaaatagtagtttggtaatatccaaaaagccagcatcgcctctgctacggcgttgtctcttttctcccaattattagcttatatcaatataagaaattattttttttgtggattttgtaaccatgacaggaccagcttgattttgtttttgtaagattcgtggtttctcgatttcatgaaaatgactcaatgatttcgtcctttctatagtattttgggttttaaagtcaactagttgacttcaaaacccaaacttaacgtccatatatatacacatacacagtactgtattatgtgtatatatatggacgttaagtttttgaaaataagagatatatagggcttacgaagccaatatctagataagtgatatcggaacaaaaatcaatcacaaaatatctaccaagagatgtcatatgtgatacgtattaactttatatacatatgattagttccatgaatttgaatttaaaaggtatagtgcatgtatcaaagggcatatatagccacatctcaattgggataaatgaaagagttcatcacgtttcttttcaattcccaaaatggcgatgcgaggaaataaaggcaagttattgatttcgctttctataataattttaaatttttgttgtataacaatgataaagaaacgttcttcaacaacaacaaaaaaatgttacgtacgtgactttaatttgcgtgacgactactcatcattcaccacaagagcaaacggaataaaaagacaaactttatcgttatcctaatttgaaccaaaccacaaaatagccaccacaaatagacaaagatatacatacagcgagacacatcatgcaaaaatgtatatatgtagcttagtggatcattaataatgtttagagaaacgatcgaatttaatgagacttattttcgttgaaaaagttttgatagggtgtaacttaatatatagtatcagtctagtgctaaacatctataagttcaaattccaatttctgtgtatattttggcctccattctacaaatctatatttatttaccacaatgtataatctagacatacaatacgttttacaaaaaaataatatgtagtacatacaccatttgtgaagtcatgtatctatttgacaaactagtccaatggaatttgactatgactaatttattattgtcctttctcttgtgtatctttttttttcttcctaactaaacactactacacattatgggttgattggtatccaataccgctgtagtatggagtatattgctttgataataatcaatcaaaggatgctactaaaaacgatattttaagttttatgatttttttttctttcgtaccgctactttatatcgtttttaaactatttttgtatctcttaccgttttttctacttgctaaaaaacttatacgattttgtgtggccaatcggtcctatattttatatatacaagcattcatagacgtgacgacgcattattttacttaaccctatataaacatatccaaaaaccgcaagaaagctcacaagaaatctcctcccatggcagattcaagttcttctctccctcctctttgcgagaagatctcatacaaaaactattttctaagagttgtggatctcacgattctaggctttctcttttctcttctcttgtaccgaattctacttatg

SEQ ID NO: 25819 - DNA, 3000 bp, Unknown; identical to SEQ ID NO: 12171
  misc_feature (1)..( 3000): 2750-1469P.txt file - cDNA_ID_2708481; gDNA_ID_2214535; Annot_ID_134364

SEQ ID NO: 25820 - DNA, 3000 bp, Unknown; identical to SEQ ID NO: 12171
  misc_feature (1)..( 3000): 2750-1469P.txt file - cDNA_ID_2708481; gDNA_ID_2214535; Annot_ID_185064

SEQ ID NO: 25821 - DNA, 3000 bp, Unknown; identical to SEQ ID NO: 12170
  misc_feature (1)..( 3000): 2750-1469P.txt file - cDNA_ID_2708489; gDNA_ID_2214535; Annot_ID_134366

SEQ ID NO: 25822 - DNA, 3000 bp, Unknown; identical to SEQ ID NO: 12170
  misc_feature (1)..( 3000): 2750-1469P.txt file - cDNA_ID_2708489; gDNA_ID_2214535; Annot_ID_185066

SEQ ID NO: 25823 - DNA, 3000 bp, Unknown; identical to SEQ ID NO: 12193
  misc_feature (1)..( 3000): 2750-1469P.txt file - cDNA_ID_2708511; gDNA_ID_2214536; Annot_ID_134392

SEQ ID NO: 25824 - DNA, 3000 bp, Unknown; identical to SEQ ID NO: 12193
  misc_feature (1)..( 3000): 2750-1469P.txt file - cDNA_ID_2708511; gDNA_ID_2214536; Annot_ID_185103

SEQ ID NO: 25825 - DNA, 3000 bp, Unknown
  misc_feature (1)..( 3000): 2750-1469P.txt file - cDNA_ID_2708519; gDNA_ID_2214536; Annot_ID_134385
caaagcagcgtcttacaagaacgtattctactatttgtcctacaaggacaaggatttgtcagtaccaaactccgatcagacaaacacctgcggtttgtggaaatggaaaagctttgcgcggtggtggagaggcgttgacatcggtaatgtcgaatgcgagggttggcgcgtttttcttgataaagaatcttgatacagggaaagagtttatagtgaatgagtatgatgaagatggaatgtggaataggcttagtgatctgcaaacagggaagcaattaactttggaggagtttgagaaatgtgttggttattcacctgtggttaaagagcttatgcgtagagagaatgtgaataggattaactacgaaccgttaatggatcttcgcaagtttaattcgtatctttccaagagtgtgaggttaagtaagagaagaggagctgcattgttgaagaacattaaaggtgtagctcattccatgagtttacgcgttgcggataaagatgtaagcgatggaagcactgatagtccgaaaaaggggaaagatcataaacatggtaaagctaatgagtgggtgaaagttagaccaacagggaaatcttacaaggagttaagtgctttacatatgtgtcaagagattcaagctcatgagggtgcggtttggactatcaagtttagtcaagatgctcattatctagcgagcggaggagcggatagagtcattcatgtgtgggaggttcaagaatgtgaactaatgtctatgaatgaaggaagtctcactcctattcatccttcactttgtgactcttctggaaatgagataactgtggtagagaagaaaaagaaaggaaagggatcatccgggagacgacacaatcatattccggattacgtacatgttcctgaaacagtcttctcgttttctgataagcctgtttgctctttgaaaggtcatctggatgctattttggatctttcatggtccaaatctcagcttcttctttcatcttctatggacaaaacagtcaggttatgggatatagaaaccaaaacatgtctcaaactgtttgcccataatgactatggtaagacaaatcttttgtatcctatcttcacatctagctattaattttctgcatgcacttttgactatattgtctcattgattcaacagtgacatgtattcagttcagtccagtggatgaaaattatttcttaagtggttcacttgacgctaaaataaggatatggagcatacaagatcgacatgttgtggaatggagtgatcttcatgaaatggttactgctgcttgctacacaccagacggtcaggtatttgctctgtttttttgctctgttttttgctctgtttcttggagtagtctacaaaatccatccattatggtgtttttataatgatggaagttttggttttttcggttgaagggtgcacttatcgggtcacataaaggaatttgtcgtgcttacgatacagaaggttcttcctaagctctttctgtatcaaacatcatgtttaccagttgaatacttcttttcattgcgacgcgcttttttcttctgtagaacagattgtaagctgagccaaactaatcagattgatgttcagagcaacaagaaatcacaagcgaaaaggaagatcactagttttcaggttcctttctttaaaagccaaaatccttcttaagactttagtaaactaaaatgttaacaagttgttgatgccattatatagttttccccggtgaatccatctgaagttcttgtcacatccgctgattcacggattcgaatactagacggttctgaagttattcacaaattcaaaggtaaattctctacaagcactagagccaagatgaacaaaaacaaaaactgatactttttgttgacaggctttagaaacacatgtagccaactctctgcttcgtatagccaagatgggaaatacataatatgtgcgagtgaagactctcaagtttacttatggaagaatgactttcaccgaacaagatcaacactcacgacacaatctcacgaacattttcattgcaaagatgtctcagccgctgttccttggcatggtcatgttagaggtgagccaccaccagttcagattcactctaaacgccactcaaagcgcatatctacttcaagccagccttcatccaccataagctcaccaacaaaagaagaaacctcggcgactggaccaactacatctaaccggaataaaaaatcagggttacctccaatgcctaagaaagccgctacaaagagtcagattcaaccagaggaagaggcaggaccggagctgggaagcagtgagtcgtttcggtcgagtatgaactcttcggagcagcattcatcgaggtttggggaatctccatcgataaacacatcgtcaaggttatcttcttggtcatggttcgacagtggagggcatggtccgcaaactatacagccaacggcttgggggatggtgattgtgacggctacagttcatggtgagatccgatcttatcaaaactttggtttaccgagaagaatcggtcgccaaactactctgttttgattttaaaaaggaaggaaccggtgttttatttttcttgatttgtatctttgttgcttgtagagtacgtaaagaaaccttcttatacagaaacaaccgtcttatagtgttgagaaacctctctcgacgttcaaaatattgagttgtatacacagagaaaaatttgtgtagttctccaaatataaatcaaacagtaaaactatgttacttcaattaattagatgttcttcgatcattcgtgggagataggccatggcccattttaaaatcaggcccgtttaaagcgtaattagaatgaaacaaaaagacaaatataattcaaaagataaggtgacgtggcgaaaatcggaaattttgcgatatttctcactctctcgtcttcttcgtctgagctatcaaactccagtcaatg

SEQ ID NO: 25826 - DNA, 3000 bp, Unknown; identical to SEQ ID NO: 12186
  misc_feature (1)..( 3000): 2750-1469P.txt file - cDNA_ID_2708530; gDNA_ID_2214536; Annot_ID_134374

SEQ ID NO: 25827 - DNA, 3000 bp, Unknown; identical to SEQ ID NO: 12213
  misc_feature (1)..( 3000): 2750-1469P.txt file - cDNA_ID_2708536; gDNA_ID_2214537; Annot_ID_134409

SEQ ID NO: 25828 - DNA, 3003 bp, Unknown
  misc_feature (1)..( 3003): 2750-1469P.txt file - cDNA_ID_2708540; gDNA_ID_2214537; Annot_ID_134412
gaaaaaactaacccaatttaggaaatctctctcgaagtaactcctccagaactcgttggtcaacctggggaaagtaaaatgttttatgatgagattactagtcggccataaaggataggaaaatactgtaacaaaaagattactattttacctgggactcgagcatctcttctgaataataatcatggaagtagtcatcaatgattcctgtaagcgaccttaaaatccgaagtaatatttagttaacttacatgtttgttaagaagagatttgaggaatgggctaacagtagttaatattcaaccaaaagaaaaggaagtcatagatacacgaacttcacacagaaccaaagagttggattttcattgacaaacaataatacaatattaggagttagagagtagtttccgaacataccaaaaagcattctcttcgggcatcagaagtaataaaagtgcagcgaagaaattcattgcctgcacatgatttattgatacaagataacaaataactgagatgttcatttttgtgagcatgtaaccatactaggatacagaagtgacagtattaaataaccgaatacctgacagtatccaacagagggattatgcctggcataagcagttagcaatcgcctcagagcatttctgaaatcatcatctagggcaggatgacctggaaatgtccggggtaaatcctgtaattgaaataagcaacagctgagaaaaatgaccaagatcaacaggagtccagtactgcaccattagttagaaaatgctggatgccaagtaatgtacagttgctaaccttttctatctgacctttccatttttccacaacagagagggggtctgtacttgaacctttctcatctgtatgctgcatgagctcctgctctatgtcgtttcctagactatctgcagctaatagattttggtaataattcttgacccgacgtttcttgactcccgcaaatgcttgccagagctgaatatttgtatatatattttcagattattgagcagaaaataaggataataagaactaactatcaatagcaggagaatgctagaaaagagaatgacaggatttattacctcacccctcagagccataggtgcaccgccatgaataagaacttcaagttcgtctttccaggggcatgcagatactagggaagctgcatcagcagcagcagacatgctggagacacttgtgccatctgaagaaccatcctgaattggatctgatctctccgcatcatagaactcgtcttcggaatcattctcacatactccctttgaagactcggtctcatcagttgaggctaaggaattcaatttctgagcttcttgctcgccatttgtggaatcccccttcattttgacacggacactcatcaagtcctcaattgcttgaagagatggcctgatctcagcccataactgaactttgtgcacattcttctctctattgggaacttcatcttcctctctcgcattcccaggagttaaatcagaacctggcttgtcagcattcagatcttttctttcagcacccttgtttaattccttttcttttttcttgtcactttcacttggattgacatgagtattttcagacgatccattcgtaggtgacacgccagattctgcatgaaattccaggaaattgctccaccttgccgacctctccacttcttcctcctgcagtttatcagtaaaaaacagcattagaatgttaaggtgaaacatcgagtgacagtgactgcgtcaaccatataagaaccaaaaaatgacttatgatatatgaagcctttcgatattgattaaaccaagaccactaagtaaacttctaagttaagtccacttctgaaatctttcacacagctgtaacaaagctactttaatggatcaccaaattttagacaaaccttccttttttcctaagaatgccagtgtgcactcaatcatgtaaaagaattttccgagtagaaaataaaagttatggagatagaaagaaccttgtagatattaacatattctcggtatctttgcacatgctgaggcctcacagaaaatccatatgcatccctgttcataaaaccaacctcattaacttccctaagtactaagaatatagatgaaatcaagatcaatgatcactagattctcaactagtgatctaaaaagacaacattttgctcagcaaatcgagagcagagagattaactgagaaaccgcaatttcaaaaaacaaattccatcaaatgtagtaaattagaaacaaaaacacaacgagataagcaatgtagcaatggagaagctcgaaaggcgataccttttgtggtcagacttagaaacggcgtcggcgatcataattccttagttggagaacgagatctctccgaatagaggcggtgatagttgaaagagatggctgagcgcagaagaagaagatccggtggagcaagaagcaatactactaattgaacatcattacaacacgcgactgaagttgaaaaaaaagatgaaaagttactacagtgtcggagagagagacgaagaaaaaggtccgagattgtagaggacgttattgcatcctttaattaatttatatacttatcatcaaatactcgaaacctttgtccttcttttgaaataaacttatactggaaattaataattttgggcctaaatcaactagagcccatttgtttcatgtttgattaaaagggatttatataccctattgagtccacgtcacaccgtcgtcgttaatcgtggattaatttgttttgggcctaactgaactataaatccacttgtttagtttttacggtaaagtcacttttgccctttagaatccaccaaagtcgccactgtctttcccaatttctttgaacttttcaggtacccttaaacttcatcttcttcgatttttaccatttttttcaatttgcaatcagaaatcgaagcgatccaaattagtaagctcgcccatg

SEQ ID NO: 25829 - DNA, 3003 bp, Unknown; identical to SEQ ID NO: 25828
  misc_feature (1)..( 3003): 2750-1469P.txt file - cDNA_ID_2708540; gDNA_ID_2214537; Annot_ID_185137

SEQ ID NO: 25830 - DNA, 3000 bp, Unknown; identical to SEQ ID NO: 12230
  misc_feature (1)..( 3000): 2750-1469P.txt file - cDNA_ID_2708542; gDNA_ID_2214537; Annot_ID_134414

SEQ ID NO: 25831 - DNA, 3000 bp, Unknown; identical to SEQ ID NO: 12228
  misc_feature (1)..( 3000): 2750-1469P.txt file - cDNA_ID_2708542; gDNA_ID_2214537; Annot_ID_185139

SEQ ID NO: 25832 - DNA, 3000 bp, Unknown; identical to SEQ ID NO: 12226
  misc_feature (1)..( 3000): 2750-1469P.txt file - cDNA_ID_2708545; gDNA_ID_2214537; Annot_ID_134416

SEQ ID NO: 25833 - DNA, 3000 bp, Unknown; identical to SEQ ID NO: 12226
  misc_feature (1)..( 3000): 2750-1469P.txt file - cDNA_ID_2708545; gDNA_ID_2214537; Annot_ID_185141

SEQ ID NO: 25834 - DNA, 3000 bp, Unknown; identical to SEQ ID NO: 12210
  misc_feature (1)..( 3000): 2750-1469P.txt file - cDNA_ID_2708550; gDNA_ID_2214537; Annot_ID_134405

SEQ ID NO: 25835 - DNA, 3000 bp, Unknown; identical to SEQ ID NO: 12222
  misc_feature (1)..( 3000): 2750-1469P.txt file - cDNA_ID_2708550; gDNA_ID_2214537; Annot_ID_185130

SEQ ID NO: 25836 - DNA, 3003 bp, Unknown
  misc_feature (1)..( 3003): 2750-1469P.txt file - cDNA_ID_2708558; gDNA_ID_2214537; Annot_ID_134410
aaacaatgcatctgacataagcaattgaaaactaaaagaaaaaagttgacgcaatacagaactagatagtcaagactcttctaggaaaattaaatgctttctgaatgccacttgcaaactacacattttcccatatctttgtttgttatgaacataaatagaagctgacctcagatcaggcaagcactcgtaaaatgtcttggtgtcttcgtcgtcccaaataggttccgggacagatgtatcttttacagtaccagagggtgaagcttcgtcccctgctgtgagcctagttgtaccatcctctggcataacaggaggttgcatatcaagtgcttcggccaaactgcaacaggacacaaaaattgcataattaatgaattagatgagaatattgttactgtagatattcctgtgccagatatccattccagccaaagatgtgggaagaaaggagaaacgccatatatctaaaatcacttccaaacttcagttcataaatattatagggttccagtgaatcggtaaacacatgtcacaatcatcataaaactattgcaaatgaactgatgcatgaccaagatctaagcaatgaaactatatgtataaactacaatgacagcaacttcaggaacatattaagaaagaattgagagctcaataatagtatgtgttataggtattttagttaatggccagtgagaagaaagctacgacgctaccaatatcctcattgatgaaacgtttcctttgtgcaattaactccacaacagctagacccaacaagaacaggaaaacctatgttgagttataggaatggtcaacttacgatgagatatttcgatagagatggtcgtatgatttcctcagcttttcataagaagatgcactgtcttcactaagctctcctttagcatttaccagctttgcattttctttctccatttggagaagtaactgtagaaaaaaactattacgaagatactacagaaagggaaaactagcaaaatgaaaagaaaagaaaagggagaggaaatgtttcatttttcaggcaagaaaaatcaaaattcctgcacataagctcatgggtaaacaattaaggatctaaccttgtgctcagactgaaggagatctgcaagagcatcataatatgtgttgaaagctttcttaaaactctttttctgatctgcagtgacgtcgagacccttgaaaaactagagaaaaccttagtcacatttagctacgtaccggaaaatatggggaaggcacagacaagagctcatcaaatatggaagtaaaacttcagttgatcttgaaacctacttacatcttcgtcttgtccagagataggaagccccagaaaaattcttccttgccgagcaaaactggtgagaagtgtcagatttgtttgggtcgtatctctgtctttcagttgttcaacactggtaagatccttaataatattgataaagatgttactatcttctattactccaacatagtagagctccagaagaagttttagggtactgcgctttttcatggcctttgagtttttatcagcttctaaatcttcggcagattttccaggaaagaagactttcaagagcccttgtgttagactggcagaaaattctttatacctctgatgaagtagcgagcaaatctgtcaaaatacatggatatcagcatagaaacaaattctgaacagagagtattgtcgtatgctactttctatgccccataagaaatacaaacagaaaagagacccaaatatcatctaaactaagaggaaaagatatcgttcaacagaaacctaaactgtggtagaggatttgccataccaagtggtggaaagcattaagaaactatctaaatataaagataacaactactgaaaatctcaatgtgacaagttgatgacgagagtcgcatgaaaaaacataagaaacaaggtgtaaatacagatacaaaagaacaaaacagggaaacataacctgaacagctgcttgtatatctgagcttttgagcttagcctcacaaatggcagtaacagcttcactaacgaatttgctaaggttaacacctcgcagatcatccatcaacccttctcgctgctcttcattgatctgctttaacttcttaataactgctgtattccgcttgatactagaatctagagtcctaagatatgctgaatctgtaacgtggaaggactcactatcagtaacaactcaaaactacacattctaaactagaaaagaattattgtaaaatcgtgtgctctcaagtcctgaatggctattataggtactcgattactaacagaagcattgtggaaatcctacatactcaattccatgaaaacaaaaactaaccaggtcgttcaggattgagattgttttgacgaagagtcagtttagcttcaattgacttcttaatctcttcaagacgagcaagagcttcctgcgataaccagagaaaacaattttcgaattgaagaatgagatcatagtttcaatttcatcgagtaagacaaatccgtaatctcgaaatcaaacctcgtcgtcttgtttctcgctgtgggattcatcttctggatgatccattagggttcagggagataaagtcgtgtgatttcgagtcaagtgatcgctttttcgatcggacttaggtttagtgtgttcccggagaaagagatgatagaacccggccaaggaatttttcaattaacacaaaaagagaattgagggaaaaagcccaaacgggtcaaaaagacccaataccaacgggttttacccggcaggactaagcagttaccaaaataattaccaaaccggaaccgaaaaaaaaacccatcgtgttggtaaaggaacctatgtctgaataggtaaagccatggaagcaaagagagggacagtgacataaaagacatgacacgtgttcctcacgagcctactaaaacaatcattatttcttcttcttcaccgtgttcttctctccatg

SEQ ID NO: 25837 - DNA, 3003 bp, Unknown; identical to SEQ ID NO: 25836
  misc_feature (1)..( 3003): 2750-1469P.txt file - cDNA_ID_2708558; gDNA_ID_2214537; Annot_ID_185135

SEQ ID NO: 25838 - DNA, 3003 bp, Unknown
  misc_feature (1)..( 3003): 2750-1469P.txt file - cDNA_ID_2708572; gDNA_ID_2214538; Annot_ID_134423
taatagtttagatacttatagaccgacattctgatcttcttctagcagctctcatataacccattgtcagtacattgtaaagaaaattttcggtttaccctcttagatttttgagagcgcacatcttcctggtgaaattcaagatataattgttatttcatgctcactaaaactttgaacacttatatgccatcatttcccattagagattgataattttatgttgtctctttgctgtgctttcgtttgatgtcaaaattccatactgaactggtgtttgcattgcagcaagcgggccagggagatgcacaatcaacaatggaggttgttggcatgaagagcgagatggacatgcgttctctgcttgtgtggttagtggtgtcttctgcgcttaagtgtataatctcacagtttagtaagatacttctgtctcaacttgtaatgccttcaggacaaggacagtgttaagtgcgagtgtcctccaggatttaaaggagatggtactaagaagtgtgaaggttagaccctctgaaaaaacttgaattacagtactactttgttctagttctaatcatcttataaggattttcgtgcttcctgcaccagacattaatgagtgcaaagagaagaaagcatgccagtgcccagagtgtagctgcaagaacacatggggaagctatgagtgctcttgtagcggggaccttctctacatcagagatcatgacacttgcatcagtgagtatttttttttgaatatggaagtctaaagtttgattattcaaatagtgtttctcccacctgttttccaattgttattggttctatttgtcgaaatctaggcaagacgggtgcacaagtgagatcagcatgggcggccgtttggcttataatgttatcattgggacttgcagctgctggtgcatacctcgtttacaaatataggctaagggtaagcttttttaatctcttctgctcttttgttttctgttgtgttaatagcgaagattaatcttgtatttgccatatccgttacttggggaaaattgttttaacattcctatgcccctggttttacagcaatacatggactcagagatcagagccataatggcacagtacatgccattggacagccaacccgagatcccgaaccacgtgaatgatgaacgcgcctgagaaagcaaaacagtccatctatttattccccgggaaggacccaaggtgacacgttcttttaactgatgtggcccttaacgacgatgttttctcgcctctgtatctttgtaactcttttttttttttttaccattacagtgtatttgcatacaaaagaggttcgagtgactttgtgcttttttttctcacttgtgtccatgggacttctgtaataggaaaactctgatgtaagtagcttcggctaacaagacaagagagagttacttgttttagagttcatgttgttaattgtttcctttttttttttttgtcgactaattgtttccttttatcttggaaaagtgtgattctcatttcatttatccctaaacaaaagaaggtccgattctttgtgtaagtcatcttctttttagttattaaagtaagaattatatttttgacttttgaaaatgtacttatacgttttatattcctaactttacaagtttaaattaatataataaattatgcaaaaacaaatttcaaaaaacaatatattggataaatatattgcatatatatttagttaatatttattgaataatttggtattaatataataaattatgcaatactatgtaactaaatatatattgattaaattttttacaaagatttttgttttaatatttataaattctagtttcatagatcgcgcatttcgcttatatcacagtttttttattaataggctatgttttttaaagtactttaatgttgtaatcttagtcactatttatttataagcataaaactataatttctatgtttttgtcgcctttaaaaaatcaatattaatactaaaatttaaactacatttaagtttgaatctctaaagcttgtgttaatggatagcttggaaagcttatctttccggagaacattattattgtacaatctattagctcttgattcttgaatttagttagtgcatctcctgattatgttccactttcattttcttctaattttaggaatctggatgcaaatccaggttaagtacatttagcttaatagaaagatgatttgactcggactgatgaaaatggtgccaagaccaaaactctaccactcggacgagtcaggtcaaaaacaactcaaattgactattgaaccatttttctaatctagaccagacaccaaaactctaccacagctctccgacattggtgggcctaataaattcccacaaatatttttttctgttttctttttctataaacggttggaattacatcttttgaacccatatttttttttgtactaaaatgattaaactcgagccaaaaaaatatcaatttattaggcaatcactacttgtataatgcaatttatggcgtgattagttccacaactgcatatagactatcgaatacttacacttttatgtttttaggaatgtgagtttggagtttgttaccgaaaaaccaatcaagttcaagcttaaagccttaaaccaatcaaaccatatcactttctatttttaggaatgtggatgcaaatcaacattaaatacatttagtttctaaaaccaatgttaccggttttgataattcccacaaataataagatgttcataaaaacgtggccaacaaccatttatgttcaccaacctaatcgcccctctctcaaaaaaaaaaaaatccaattttccaattttatttaacggtcacattttcctcattgcctaattaaaaacattcagacacaaatttagtttcttcttcttttggttctgtctgaatccaattttcttatattttatttcctccaccaccgtgagatatg

SEQ ID NO: 25839 - DNA, 3003 bp, Unknown; identical to SEQ ID NO: 25838
  misc_feature (1)..( 3003): 2750-1469P.txt file - cDNA_ID_2708572; gDNA_ID_2214538; Annot_ID_185154

SEQ ID NO: 25840 - DNA, 3003 bp, Unknown
  misc_feature (1)..( 3003): 2750-1469P.txt file - cDNA_ID_2708576; gDNA_ID_2214538; Annot_ID_134422
atgattcatttgatttgagtgtttagatcttcattatttagggtttaatagaaattgttgaaattagggtttcgtgaattgtggttttatgattgataattagggcttttatatgtaaacgaaattagggttttgtgttcacataatcagtcgttattacttttgatttttgccttttagattgatatgaatttgatttggtttgtgtatgaattgaaacataaacactcgtctattgcaatacgtggatttaattatttcagttgtgttcttgaatgaaatgagtttggttttatgaaatgagtttggactttagttattacgactaatgagtttggtctttaagaaatgagtttgtactttagttattactttgtgtttctgcttatgagtttgctctttatgaaatcagtttggactttagttattactttgtgtttcggataatgagtttggactttatcaaatgagtttggactttagttattactttcttttccggctaatagtttggactttagttattgctttgtgtttcggctaataagtttggtctttatgataggttgtattatatactttaagtgttttagttttgatcatgaatgaaatgagttttgagtttgtgtgttatataatttaagtgtttcagttgtgttctatgctttaagttctctaacttgtggttggtcttatcaaatgagttttgagttgcaggatcctgaagatttgagtggtgccgacatcacttgtacaagaagacaccacaagcaacaatttgtattgtgcgacagatgcggttgacaaatacctccggattggtgaaaacactttgatgtcttgtatgatacattcggttgaagcaatcatatatttgttcgggaaagagtatctaagaagacctacgcgacaagatcttaaacgactactgcgtattggagagctccgtggatttctcgggatgacaggaagcatcgattgtatgcattgggagtgaaagaattgcccgaccgcttggaaagaacaatatacacgtggatctggaaaaccaacaatcgaactacaggctgttgcttcccaaaatctttggatatggcacatatgttttggacctctaggtaccttaaatgatatcaatatacttaatctctcactagtttttgatgatataatataaggccgagctccaaaagtgaaatacgtcatcaacggaaacgactaaatcatttggcttactagctcacatatggtatttatcctaaatgacctacattatccaatctatttcacttcctcaaggtgacaaagattctttatttgctacaaatcaagaagtttgtcgtaaagatgtagagcgtgcttttggagttttgcaagctcggtttgccattgtcacaaatccaactcttatttgagataaagaaaaggtaggaatgatcatgcgagcatgtataatactttacaatatgatagttgaggatgaacgagatgagtatacttattttgatgcatccgaattcacacaaccggaatcaaccgcttcttcacaagtggatttcaactattttacagatatggcttcaaatctcggtaatattatggcgtctggagcctggttcgtgctcggactatgcatcaacaattgaaaaataatttaattgagcatttatggcacaaatttggcgggaatcaagctaaccactaatcgttattttggttttcaatatttatatcatgtatgtttaatatttaagtatttacattaataattaaattttatgaaataaaatatttgtaatttttaatttaataataatattttattttttaagaaacccgcttaaagacctaccattggacaaacaaaaaattaaagaaccaaaaaaatctcttaaacttttaaatttcaaaattatgattaaaaaaatatgaagagcccctaatggtctcttaccattggtgttgctctgagattgcatgtttatgtatctatgtttaggatatgcaaagttgattatgaacttgcttttgggataattgtcttctttttttatgcattaacaattttaaaatttttaggataacaactctattcaaagtcttttaacaaaaatactccattcaagctcaattgttactaaaatccaaaactttcgccaaaacttattttctcaattggttataattttcattgggtaggtttcaaaacaacatgttttgaaactatatttttttttacttttttttaaaattagatatctatattctaatctttaatctcctttgacaacattctaattataaattcacagaaaaattaactaatgctaaaattttcaataacatattttattattaataattaaattaattgttttgtcacatggaaagaggcaaaaagaaaagtatatatcatcacaataagatcttcatttcgatcctcacatgcattccatgaatgtgtattacatcaatttacaccttttttaaaaaacattatttcagaacagtattaaaacaaatttcgtggataattctaaagtattacatactctagaattaaatatatttccgtatttaaaaaactaagaatatatttttagaacaaaaacttaaaaataacaaagtaaatcgatagattgataaatatatcttctctttgctctttttcaatctgtaaccaaaatattaaaattcctcatgtatttatttctgatatcaactaattgttaaaaaatttttttactggttttaaatttaacccgtgcaacacgtggcttgatagcgttatataaaatattttgtttgacttgaatgggtcatctatagtcttcccagtcacacccaaaccgctcaacaagaaaaaccagatttattttctctggaaaacactcttcaagtcttttaccttccgagaatatatttcaaattctatcatatcatctttgatcattttccttgtccttcgaatttgttctttgttgtggcggagtcttgaagatg

SEQ ID NO: 25841 - DNA, 3003 bp, Unknown
  misc_feature (1)..( 3003): 2750-1469P.txt file - cDNA_ID_2708596; gDNA_ID_2214539; Annot_ID_134439
tatcttttcctcgcccattagtattttgaaaagttgctacaaaatgtcaaagaggaaacggaacagaaaatctcagaagctgcgagcaaggcaataagccagagactgcagaagctgcaaaccaggtttgacagatgtgtcaaagagaagcaatttcttgaagatgtgagtctctatctagctttcgttttaaaagtttttcttgatggcatatttacatctacttacatttctgtagagtattattgacttgttgttttctcatgtgtagttgaacgaaaatcttgtgaaaaataaggacgtatggagcaccaagattacagaaatgaaagaaaggtattatctatctagcaaatctcgtcatgggaaattgtgcatattcgctagcttgtgagaccatgctccatttctcattgatctttgatttagggagaagaaggcagttcgggcaaaggatgaaaagattcagggcttagaagaacaggtaaagaaacatctatagacaatacaaccccctgctttgttggttatataataaaacacctactaaatcggttattcacactctcagcttggaaacctaatggcccaaatggatggtgagagtgaagtctcagagacgaaagaggtccaggacgccactgtctcgaccaccaatacctcttcttctggggcagggaatgttatacatgcaaataaaaagaagagtaacagaagaaagggttagatcaagattcaaactctaccaaatctcgcttagactagtcgactaaagttcaagcaatctaactgcttagaatgtctagatctaacaattcattcgtgttataatgtgtgctatgatgagaatctgagagaaacgtttggtagttgttgtatcaaacctgatagaactatagccgttaccctcttggtgtatataatacaattggttgatatcaatattaaaaatcgtagttacttgacggtaatgccatcactatgcataccgttggaggtttcataagactttaccccatcttatggctttatcttctaatttcctcttttcgtttataatcaaattcaattatttttcatgtcactagaccggttagttatagttttacatttgaagcactaatttcaagagtcaatgatacttatgataaacaaattctatgggtttgaaagttaatccaagttaaatgactgaaacccatattgtaccaatttggaattagaagtccattatctctttcagatggtgtctactaacacacaagatcacaagaagaaggtgcaagctataaagagagtagacaccatctgaaagaaagacataattggactctcacataaaacacttggcttgaagcgaaaaatgcttttgttttccattcgttgttctatttgtcattggtggtgctatgttatgttcgtgttgatctacgcatccgggggccacatgaccatgggcctcgtttgctaccacgttgcttcattgccacttgtaagtcgtaagtattatcatgcggtacaacccttcaactatgtcctttttttttttttttttttttttctcttctaacaacaacctttcaaatatgtcatgtagaattattgggtatccgtattatgttcatgcaatttttaataatttgtaactacgattaaaaaatatatattttatgattatgcaatcacataattatgcgctatttttttatttaaaagcaaaataaaataaaattatcctatgttacatattttcacgctttgtgttggattactctacgcattaaactcttaaactaattatttgtgcatgaacaaaaaaattgtgttcttaaactaagttaaaggaaacatatatgagagggtccttttaatacatctgtaccacctcccctggaggataaggcttgtaagtggaatgcacttcatcgtcacatagttggggcaaagatatccagggaataaacgcattgagtaagttttggtccatgtctcttcttgtgtatcaatgtccatatggctaatttccaatcagaaagttcagcactgccactaaccatggctagaagatcttcaaggttgactagcggccaggtgtaggtaatgcgcgcggtcttgggacacatcatggaactgttcagtgtgaagatccaaagatagaatcttgtaaccattaagtacttcgaaccagtagatggaaccattcacaaagaccgaatgatgtctggcttcgacatagtaaggaggcggactcggcattgtccgccattcaccaatgtttaaatcgagaagttgtgcttgatctcggtttagttggatgagccacgaatgctaggcaatgcgtagggcattgaatatcatttggagtgaaggttttgaatccctcaggcagcttgtgaaagagcttccgtttagcgaagttatataaccaagacattcatgttgcttttcctttatgggctatgtatatcacggtttttccagtttcccggtttttcaaaatcgttatcattgcatctcgacaccgataagattcatagcttaaagttttgtcgatgcactgaagtttgagttgtttttgctttcatgtttactttggacctttaaaactggttttgcaatctgtaaaatctgtaaacgtacactgattaatgatatttacattcttagaaaagaaaaatgaatcatcagcccatgtgaacatatcgaacaatgtagcactttctcaaagccaacacaaccgcccgcttagcttacattagatagatcaggcagcctttcatatgtaaagataagtggcggagaaaccagccatcaactattgattagtcaacatcttatcttctatcattagctatttacgatttaatatctacttgacatgtaaaagactaactcttcaccagttcactataaatagaggttgatattgtgcttatatcttcacactacacacaaatacatacaaacatacattaattggaaactgaaagtaatataatcatg

SEQ ID NO: 25842 - DNA, 3003 bp, Unknown; identical to SEQ ID NO: 25841
  misc_feature (1)..( 3003): 2750-1469P.txt file - cDNA_ID_2708596; gDNA_ID_2214539; Annot_ID_185186

SEQ ID NO: 25843 - DNA, 3003 bp, Unknown
  misc_feature (1)..( 3003): 2750-1469P.txt file - cDNA_ID_2708603; gDNA_ID_2214539; Annot_ID_134452
ccttaagtacctgaaaatgcacaataaagacagccaaccaacggttcaaaattcatcccattgctgtattacaagtcactgtgcaaaacctgagctgtctagtacataatttgaagttacctttgacatgtgagactccaaaatctggcgtcgaccttccacgtctgggttaggtacaacaatatgacgatcaaacctcccaggtctaaccagggccttatccaaagactctgggaaatttgttgctgcgaccacaataattccttcattctgtttaaacccatccaactcaacgagcatctggttcaatgtcatcttcatgtattgctggtccttgggattgcgacttcctccaatagcatctatttcatcgataaatataatacacggggagcacttctttgcagcactaaaaagatctctcactcttctggctccaactccaacaaacatctcttcaaactcactaccactgcaggagaagaaaggcactccagcttctccagcaatagctctagcaagcatagtttttcctgtcccaggaggaccgacaagcaacacacccttaggaagctttcctcccagacgagtgaacctctatagtaaagatcaaaagatgaaagagtgaggcctaagaacaaaacagtactaactctagaaaaacctggcacagataattcagaggataaaggtctatatgataacttcacatgatttatgcttttgaatttacatcactagacagattttatacttaactagaaaaacactctagcactgtgaatttactttggggtcgcgaagataatgcacaatttcctctagctcagcctttgcttcatcaacaccctttacatcagaaaatttggtgctcgaatccatactaggttgcacttcttcgtgcaaaccaagtcctaacatgtattaagcataaattaatgagcacaaagtcattcaatacagctattggatcactgaagaaaacacaaccaaactctacctttgccaattcctctgtcctcgataagagctccaataccagaaatgagtaaaaaaccaactccaatagttcggattgtactccatagctgttctttaaagtgagtcctttctgtggatatcgtatggatcggtgcactagcagttccaaggacaccatcttttgttggttttcctacgtttctaaatgccccaagacctccaaaagtctcttcctcccttgcaacaccagcaatacctaaaagaaaaacagcaaaacatttcccaatattatatagagaaatggctcagaagctgctaatacaaatatgaaagcaaggacacaatccaagtatccattcagattcaaacaaacagtctctccctccttacccacctctttgcaatgttcgaaccagctcactttgatcgagcctatcaactttaaccaatgccttaatgtattccgataacgcagaggcattcgcatgcaaagaaggttggctttcaaacattctgataacagcctcaggatcatttcttcgaataagttctctcagatgtgcaacctcattaacttcttctctatcacggactctgcgagcaaagctaccaacataactcgattgaaacctcgttcgcggtaaagaagctccaccaccacccacagctatagataaaataaaaccaatttacatcaaaaacacttctaaaacaacaagaacaactcataaacggaatcagaatttacctccagtaactcccactctaggaaaagaggagtaagctctaacaagtaagcttcttaaactgctcaattccctttcatgactcgaaacctgtcatcggtgaagagaatcaatacagatgaagttaattactaatcccaaactcaaaatgacactagacaacacatgaaaacattttgataaaagtgaatacttttacccattttgaatcaaaaaaattgaaactttttataccaatttcaaaattaggtgacttgggtagtcaaataaatcaaatgacaatatcacagagacaatctagaatcctaaaagacaacattttgagggcagagaagaatttgagcttctagggtttgaaaaatatcatctttagcttatgaatcacaaagatcttgataaaacccatcagaaattattatctaattagatcaaatccactacagtatcaaaccaaagtcgaaacctttttcgtattaaaaattggataaaggggaaaagagaaaaatgaaacaaaaaccttggtgatgatgcgcctccaagccatcaatcaaatctctccttcacgatatcttaaaaattggtgttaatgtctgataaatcgaagttcctcgatctatatcggaaacaaaagacttcttcgttgtgtttggggaagaaccgttctaatcttattccctaaagtcttaaaaacactaaattacacgtgagagacctgtttggttatcgggtgagagaaaaattgtgcagcaggtggagacacgcacgagatatgtaggtcgcctcttaagtacataaatacccttggacatacccaataattcattttagtaggctttttctggcggcccacattaaaaagaaggacctagaacataaattggcatcgttagaaatgggcttaagtaaaggcccatatgatatatatataaaaaaagagattctagattagtaacgaagtttctggaacattgtcttgtcttgtcgccacgtgctcacataaatgtcaaagaagcttcaatacagtgaaatgatcttgtcttgtctctagaaccttctcttctctccccttataatttcatttctctctcctccacgcctcaatctctcaactcaaaactcaacattttctgaagaaagtcgcaaactttacccaaaacccagtttctaattttagcaacaaaatcaaaaatatctacttttgtttctcgaaagttacgaaattcatacaatctagcttatctctgagcttatggatttgagataaacaacgaaaatg

SEQ ID NO: 25844 - DNA, 3003 bp, Unknown; identical to SEQ ID NO: 25843
  misc_feature (1)..( 3003): 2750-1469P.txt file - cDNA_ID_2708603; gDNA_ID_2214539; Annot_ID_185199

SEQ ID NO: 25845 - DNA, 3003 bp, Unknown
  misc_feature (1)..( 3003): 2750-1469P.txt file - cDNA_ID_2708610; gDNA_ID_2214540; Annot_ID_134465
aatgattgaggccaaactatctcccggaccttctatttacaatatacgccgacatggtgatagtagtcgtttgcatgaaacaggcgttagggtcgatactggtaacttctttgcagcaaaggtgagtttttcactttgttgatatgttaggttggatgtagattcttgtcatgttcgatctaattaattgtcatggcagagaagaggtgttgttgatggtgttgattttggagcaactggtttagtgaagaagatagatgtagatcgaatccgtgagaggcttgatagtggttctgtagttttattgaggaacttgggccattccagcaccggagaagtcttaaattgcaagtatgctctctttattggtaataatttacttgctaaatcttgacgacattaggtttttgtcaccctgatattgggacattacttctacactgcagtacctatgaggttgctacagcatgtgctttagctataggagcagataagcttatttgcataatggatggtccagttcttgatgagaatggacatcttgttcggttcttgactcttcaggaagcagatacattagtcagaaaacgggcacagcaaagcgagatcgctgccaattacgtgaaggctgttggggatggaggcataagtagttttcctgaacctcttggttacaatggtatggtgacgactcccaacaatcatattgggagaccgatttgggaaaaactcagtccgacctttcagaatggtgttggatttgacaacggaaatgggttgtggtctggggagcaaggttttgctattggcggtgaggagagaattagccgtttgaatggatatctctctgaactggctgcagcagcgttcgtttgcagagtgagtccttgagctaacccttgtgcctcttttttacatccagctctgattcgttgatttgttgaagggtggtgtcaaaagagttcacttattggatggtactataagtggagtgctattgttggagcttttcaaaagagatggaatggggactatggtggcaaggtatacacaactgttttcactttcgaatcatgcaaagttttgatttttcttacaaaactatggaccattcttgtcacagtgatgtatatgaaggaaaccgggaggcgaaagtggaagatcttgctggaataagacaaataatcaaacccctggaagaatctggggctttagttcgtagaactgatgaggaggtttgccttttagccatatcactagcttagattctacttctttttgtttaggtgttagcatcaaaggataattggtttttggtattcagcttctgcgagctttggattcgtttgtggttgtggaaagggaaggacatattatcgcttgcgcggctttgttccctttctttgaagaaaaatgtggagaagttgcagctatcgcagttgcatcagattgccgtggacaaggccagggagataaattgctcggtataatcacaaaacttttgagcattgtgtttcgaatctactggtaagaaaaaccccggtttcttgactgtgaaattttgcagattacattgagaagaaagcgtcagctcttggacttgagatgctatttctgctgacaacgagaaccgcggactggtttgtgagacgcgggtttcaggaatgtccaatcgagatgataccagaggcaagacgggaaagaatcaatctttcgaggagatcaaagtattacatgaagaagctgttgccagacaggagtggaatttctgttgttcgaacatttcagtatgattcttgagagtgtccagaagcagaaaattcaaacatagagcaaataaaatgtaattgacacagaaacatttagctgaatctctaagattctgctgagttttgaatcaatattttcaggaacagtgaacgagacaaatgtctttccaacgctatagtggcatctatcgatcgctttgagcttctccacgaacgattcctttgcttccgtcttctcctatgttgtcttgatctcgtgcagagaccgtcgtctactctttgtattgaatacactttgccttcaactgctttgtcttctgtttggttcaacttatataaatgcgaacctataaaatgaaaacaattctgtgtgatattgtgaagaagaaatagtttgatcagaatcctcaaagccgacaagaatccgtcgaaatcgcggtttgacttcccggagaattttccagataacaagaaagaaagtacactttcctggaaagaaaaacaaaatcataaacataacttttgagctcgttcaaattgaatcagttcacaaaacaaacccacattcacttgaaactcaccaagtgattgacgcaagcttggttttaatttcttctttcgtcagtttacaatccgatgcagctaatattgcagcagtagaatattaatatacaatcaaatttatcacttatactgtatatgatcccaattctaaatgtgatcagcaaagctctattattggtagtatatatgtgtatattcattagtggagactggagagtgggtgagtaaaataaacgatatgactagtacctcgcaaaacatgacgaaacctctattattacaaagatccttgtttcctatatgaggactttaatttttgatttattaaggtattaattcatccaaagttattttaaagatcctcaattttttttttttttttttttggtagttagatcctcaatatataacctactccttttcttttgtcgaaaatataacctactcctacatttgacgtcaggaaacctctattattgataatatatggtcctacatatgactatagtacaataaaacgccatcaaacgtctattattggtaattaattaagtaattaacttcttttttttgggataaaaattaaagatccttgtttcctaagatgactcgatctttagaaactaagagagaatgaaactaacactaaaattcctacaaaaaaaaaatg

SEQ ID NO: 25846 - DNA, 3003 bp, Unknown; identical to SEQ ID NO: 25845
  misc_feature (1)..( 3003): 2750-1469P.txt file - cDNA_ID_2708610; gDNA_ID_2214540; Annot_ID_185223

SEQ ID NO: 25847 - DNA, 3000 bp, Unknown; identical to SEQ ID NO: 12270
  misc_feature (1)..( 3000): 2750-1469P.txt file - cDNA_ID_2708623; gDNA_ID_2214540; Annot_ID_134456

SEQ ID NO: 25848 - DNA, 3000 bp, Unknown; identical to SEQ ID NO: 12270
  misc_feature (1)..( 3000): 2750-1469P.txt file - cDNA_ID_2708623; gDNA_ID_2214540; Annot_ID_185213

SEQ ID NO: 25849 - DNA, 3000 bp, Unknown; identical to SEQ ID NO: 12269
  misc_feature (1)..( 3000): 2750-1469P.txt file - cDNA_ID_2708633; gDNA_ID_2214540; Annot_ID_134453

SEQ ID NO: 25850 - DNA, 3000 bp, Unknown; identical to SEQ ID NO: 12269
  misc_feature (1)..( 3000): 2750-1469P.txt file - cDNA_ID_2708633; gDNA_ID_2214540; Annot_ID_185206

SEQ ID NO: 25851 - DNA, 3000 bp, Unknown
  misc_feature (1)..( 3000): 2750-1469P.txt file - cDNA_ID_2708652; gDNA_ID_2214542; Annot_ID_134497
tgtgatttgtgagaagcagtttagctctggtaaggcttatggtggtcacgtgaggatccactccattgagtacaataacaagggaaagatgaagaagatgaagaagatgaagttgaagaagaagaagaagagaaagattggtttggtgaagaaagagaaggagaaagagatagatctggctaggactgacgtggaaggtaagattaggtgttgtctttgtggaaaagagtttcaaacaatgcactctttgtttggtcatatgaggagacatcctgaccggacttggaaagggatacgacctcctccaccatcggagaagttcaatctaagctacttggatgatgatgtcgatgatgaagatgaggatgatgatgatgtgatgagtagatccatgatgatgagtgatgtacccgaggatgttcagggagctgcttgcattctaatgatgctctcttacgcttcaagaaattactgggctgggatagaggaatcaccaaaatccgaggtaagaagttcgagtttctacaaagatgatgaaggaaaagataaagtattaggagatagtaggatggatgaaaagaagggtttgattgtagatatgaagataaagatggaaatggaagtgaaggtgaatagtcctcgagatgaagctaagaggtcattagggtttgatctcaatcagcctccttaccatgaagatcatccttaattccagttggaactagttcaattggtttcgcagttcgatttcaatggaatggagtagattaaagttttaacatgtttctcaatgaatttacatcctcctacctagcttttgtacataatgaaatccttgtttggttctagtcatatttcattgctgttttttccttctagtccttttcttctgtgccaatttctcttgaatattttctttaatgttttgtgactttggtgtgactagaataaagttgttatgcttttatctactgaatattttcattcacaaggattgagatttctcaagttgtgagaattttcgtaaatcgagtagttcatatgcatcaaccatatgatacggatattccataggtgtatcaacttttcacatacaaaaaatgtataatttaggtgcatacttagagatagtaactaaatatattattgttaagatgtcaaaaatataattttagttattttaccaatataagttcaaacacaaccacatatttgcaagaaatgccatcgtaaccaaatacaaaatctttttaaaaatcttaacttattcaaaatgaaaacatatttctatatacaatgaacaaaatcttctcaaatatctaagggtctcaccggtgcaacatttagaagaaaaaaatttctgtcaaattcttctaaactcacaaggagagagtaattatctttttcatttttttttctatcaaagacaagtatttttttagaacaaaagcttctacttcaaaatggtggaagaaaacatattacttttcctttgtggaaatctaaagaattcaattgaaaagattttcttctaaatattgcactatcataccttaagttcatccacataaaaactttttaattaaaaataatacatttattcacattcaaggccgtctccacgaaaatgaaaggtaagtaaatgttatgggtctataatcaattttttgataagattaagtgtcatatgataaaaacgaataagatttatttccttatcataggaaagacaaaaaacataaatataactatatagaccctccacaaaaaggatattacgggtctgattggttgtcctacttagcgcaagagttgaaaaaaatacaagaagtgtaaaaagaccgaaagctaaaataaaagtaaaaactacaataaaaacgaacatcgaaaaaacacaagcgaaaaactcaacaaacaaagattcaagaagaaacactgattgcgaactacgaagcacaaaaatttgcatgatttttcaactccaaagagtttgagtcctcatcgttgttgcaacgaacaatcccaaacctaggccagtcttcaaatcgatatgatagagacgcttacagcttctctaaaggttaaagcaaaaattgggacaaataaagtggacttaatcatgcaatgcaatatagaagataagaaacatttttgaataataacaagaaaatgcatcatttttagtaattcatacaaatgaaggttaaccaagatatcttccaaatcctcacactttatgatttcctaaaatcttaccattgaccaatatgaattttaagggcaactttctcaagtgatttatgggatacaagtagtcttgtttgaaatgaacgtccttcataagaggatagtcttttatcaaaaatgattacacatttctgaaaattaaattttatgttcagagacttctgcatattgcatgaaaacctttagcaatgtatggacattcttacacttgagtgttgcagtgaagaagagtatcaacggtagatttcaataaaaatccactcaactttatcaaaagctttgctaatatcttaatttaaatgccacagaagattgggtagcttttttagtatgctctgaatgcaccaatttgcgatatcaacatactattagtaatcaatctacaaaaatagaaacagactgaagtttatgaaattatacaaatgagcttagaaataagcttatacgcagcgttgcataagcttatcatcctataatctataaccccaattgaagcatcagtttggagattaataagagaaagagattaggccaaattggtaaaggatagttattgtagttgactaattgaattgtctacctaaagtgcccaaatgtcatagagatgaaaaaatgtgctattgggccaatttctctatacaaaaacattttgattttttgttagaattgggctgattcttataaaaaaaaaaaaaataggtgacatatcagatcaaagagaaaaaaataaggtaggaagaaacaacaacaatg

SEQ ID NO: 25852 - DNA, 3000 bp, Unknown; identical to SEQ ID NO: 25851
  misc_feature (1)..( 3000): 2750-1469P.txt file - cDNA_ID_2708652; gDNA_ID_2214542; Annot_ID_185277

SEQ ID NO: 25853 - DNA, 3003 bp, Unknown
  misc_feature (1)..( 3003): 2750-1469P.txt file - cDNA_ID_2708654; gDNA_ID_2214542; Annot_ID_134487
atggaccatgtcaaccacatcaaataaaagcaatctagtctagcatatgctgtcacaaataaactatcttaacagaaattgctatagtacatacatatgtagttattgaaaatcttgatttttccaggaagaaaatgatgaaaggctaagggaagaagaaagggtgattgaatctaaaaaccgtgctgaagcagaactagcagagatgcaacagaatttactaatggaaaaggagaagttacaaatggaggaggcgaaaaacaaacagttgattgcacaagcggtaaattcatattctttaacaaacaatctaatgtattacgatatcacgaacaaactatcctttttaagttgctatagtacatagatttttattattgaaatactcatttccccaggaagcaaatgaaaagcttatggaacaagaaagggccaaaaaccgtgctgaaaccgaactagctgcagtaatggtggagaagttacaaatggaagaggagaaaaacaagcagttgattgcacaggcggtaaattcatattctttaaccttgtatacttgtacttaattgcattcaaatagaaattgatctcttgtacgttttgcctttagacaatgattttaaatgttagaaatccttcgtttgctaggaagaggagaaaaggctcaaggaacatcaaacgaatgagcttaagaaggttgtggtcatcagattcgatcaaatatgcctcctactttgtgtttgattttttttggtcatatatatatatatatgtatcatgtttcgtggactgaggtcggttatttatggacagaatcgcatgatctgcgcaagggatcttaacatcgaatggtctcatagcgaagagcattggaaatgggtaaatctggatcacaacatatcaaggtaaggatttatatatatttcctacaaacagttataatgggacaagtggtgggaccgtgttattgtctgatcttgtttaaccgatccaaaccaaaccgtaccgaaaaatctgaatcaaacgaacacatgatatgctttcatcatccctttaggcagaaagaaatgcttcaatttacaaatacatgatcaaatataacttttaaaaacaaataacttcatagaaaagagttaagttggcttatggccgaatcatgtatgtctcaaaaagccatgtagttaaccctcacttaaataagacttgttgattttaccagcaatacattcgtcgaagttgctgagcttctaggagtttattggtttgacgtaagtggaagtttggacacgacggaaatggcaccatggacacattacgaggttctgttcgttgttaatttaaaagactcagcttttaaatggaatgcagcggtgaaaatgaacctgttttacatcaacagtaggccaggaggtccaggaacgcaagagcgagctgttgacatgaggcagcatattgggaaaggatgggtaactatacacgccggtgaattcattacgacaccggagaatgtcggactgattgggttccgcatgtctgaggtcgactccggcgataacaggggagggctcattgtcaaaggtgttttaattcgtcctataaactaatgcatgtatcagtaattcagtatagtgtatgtctgacttctatcattcttagctgatgcatgcatgcttcgttgtttatcagttgatcacttattcaataataacgtgaaacataaataatcgcatctaaatttcgtggtaacgattacttaattctttcattaattattttcagtttgcatgatttgttttccagtatttaaaaagcttaaaattcaagttttgatatgcaacattgcaactcaattcgaataaatcgtcacttgtggttttaggcattggagtcagtggcggacccataattttttatcggggtcaaaatataattgaaaaatacaattaaaatcttgaaaacaataatgtaaaaacaaaaatacaatgcaagattgatacaagataaaggtgaaattaacttacttgaagctgattggagacagtagagctcaagaacatgagaaccaaacgtaaacttcgtcaactgataactgcatccgacaaagacaaaacaaacatgtataaggagaaaaccaaaagcagacacttgatctaagtttaaaaaccaaataaaacaaacatttgtttgtgtaacaaaattactcatcgttgatgaagaaagactccaagcagactatctcttcttcttcttcttcaacaattgcttctctacctttatcactttcactgcccatctttgactacagtatacagtcagaatcagatatttcagatcccaagcttcgaagtgtgttccaacaaatcaaattcggaaataacaacacatcagctaagggaatcgacgaagaaaggtattgattaacaaataccacctctttgttactttgttagagaggtgcgcttgttgatcaactgcggcggttccgtcaacttcgaaaagtaattagatttttagagcagaccatttcggttttctgatttgaaccggtttgagagagaaaaataaataaaaagaaatttgcacctataagttataaccaaacaaaattacaagtcaaatattttattttcgtcaaaaagattttattgatagaatgtgggatcgatttctaatgactgttatttttgtttctaggttctgataaaaatattttttagttaaaatcagtattgctttctgactttctcagacatcacaatctcataatacatcgtgagagatagattcaaacatccctaattccaaacttgtacggtatgtgttaaattaaaaacttaaaacgactgatccctaatatcaaaatgccgacataaaatataaatggaagcgttgaattagggaaaaaaaacagaatcaaaattaattgagatctgattacaaaaaaaaaaaaagagaatctttatttgtatttgcagaagaagaagagaaaaagtttgaaagaaaatg

SEQ ID NO: 25854 - DNA, 3003 bp, Unknown; identical to SEQ ID NO: 25853
  misc_feature (1)..( 3003): 2750-1469P.txt file - cDNA_ID_2708654; gDNA_ID_2214542; Annot_ID_185266

SEQ ID NO: 25855 - DNA, 3000 bp, Unknown; identical to SEQ ID NO: 12309
  misc_feature (1)..( 3000): 2750-1469P.txt file - cDNA_ID_2708662; gDNA_ID_2214542; Annot_ID_134493

SEQ ID NO: 25856 - DNA, 3000 bp, Unknown; identical to SEQ ID NO: 12294
  misc_feature (1)..( 3000): 2750-1469P.txt file - cDNA_ID_2708666; gDNA_ID_2214542; Annot_ID_134494

SEQ ID NO: 25857 - DNA, 3003 bp, Unknown
  misc_feature (1)..( 3003): 2750-1469P.txt file - cDNA_ID_2708670; gDNA_ID_2214542; Annot_ID_134495
tattcactatggttcataccacagaaattctatatttgaaaactgtgctgcaaaaacatatttattgatgttggaaaagtcaatcaagatgtagaaatatgctgaaaatatggtctatttccaccaaatgatttgcctctatttttactgtgaaaatagctttattagttagataaactcataaaatcaagacaatcacatgatgaagtattgatttaacacattttgaaacactacacgttaatttattcgactgaacaaatacaaagttttcattaaatgtgagtgctgagttctgtgacagtttgtttgaattttctggataatgattagcaccatgccccagccaagaaacccccatactttgtttgtaaccattaatattaatattttggttggcgacagacaaatctttggccgacgaagctgattttcactctttcactgccaaattttgtatgtttcatcgacatttttacatttgaaaatcttatgtttttggttttgttgggggatatgcataaatttcttaagagataaataataagtagaatcgtcgagagatgtataatctagtttatgtttcttggcctctactctacttttctttctttgcattctctttaaattcccattcttcgtttatttaaagatgcatgttcgaatcttctctacttctacaaactaaatggaatgacataaggttatgtctctctatgaatattgttggatataaacaagttgaactacaatgattcaacgcaggttgttcaacactcactctctcagctttggcatcttaagacacttttacgatatatccactcctagtttttaggaaaagaacaagactgtcacatctttcaaaagtcatcaacccgcaaccaaacttttatttcatttgtctcgttagattagatgcttgatgaattgagtctcaatacctcctaaagtgaagaaaggtctcgggaggaaacaaaatgaccttaagatattagatttttggttggaaatttggaatgttaaattttattcaacaaaaaattatctacatagtttgaaaggagattacaacaagagaggaccaatgaaataaaagcattaatagaatgctagcttaaaattcaaagaaatagatcagctatgatcggccatgaaaccaaagagaatggatccgatggctagtcatcaatctcttaatgttaacaaagagtagatctgattttgatcaaaacaggccagacccgtacttcgtcatcgtatatcattattttttattttctgtttcttgaaaacaaaaagaaaaaactatttgtaatcacataacaatttgttgaaagacaaaaaaaaagagagagagagactaatatctacttgtatactgttatttttttttaccatttctattaattattttgttattattcgttaaaaactttatctatcttttatgaccaataatgatgcataatttattctaaccaataaccactaaacatgttagaattgacttcatacttccattaatacatgagttgaaaattctaatcctaaaatgaaaatgatagaaccagaccagaccaaattgactcaaaagattccagctcatcttgatatttctagattacaagtcactctaaatacatgtttgaaatgttcgaaaaaaaacattgctataattaattaaaaaacagtagaaggaaaaattcggtgagaagaaagtagaatgttgctagaatcaataaattaatcaaaataggtacagtatataatagactagtatccctctaatctaacggtccatttatacctgtccccattacacatgtcaaagataataatacaaaacaagtatgtaaattgtaggtatttattagttgtgagaatgactattttattctactctttttcttttggaaaaatctaacgtggacatccgataatcgacttggctcagatcgattttgagtaaattgttttaaggggtttagaattcatatagaaccaaaaaacatgcggttcggatcggtagttattttacggtttgactatgttcggttatctctcagttcggaccgacatataaccaaattttattgggttcggtttgaattaaatatttgtacataaactatgtggaaaaaagaactaaataatttgttcaatctaatgaattagtttgcaaaaaatatttactctagacacatataagtatgtacattcatatattttagttattttgagcctaatcataactaaattttctggtttataaatatagttttgaatatttggattatctcaaacataaatataattaacattttctgatttttatgacattgactaatattttctgatattaagatattgatctccttaaattgtttttatcattctttaaagttcattatcttgtttggttccaatttcttgtacataaaccataaatttgaaatttcaattagaaaaataatttccttttatgagatacaatcatacaattgtatttcaagtagttcgaatactcattccgttttcggtttagttccaagttgttataaaagatgaactacactatttggatgtttatgattatctggttcggttcggtatctcttaattcggttatttcggttttagtaatccacataaaacagactataatctcttgcattatatccacatagacctaaataataaacaatttgtttcttcccgctaagtgattattaatgagcctcccttcttctcaactgttatttcactttaacgtacaaaaaaaaacacacacagagagaaagagagagagaaaagtttccgcattaatggtggcttcacctaccagttgtctagtggtgagagattaatgtgacgacgacgacgacacagaacaagagatagagggagaacaaaccaaaaccaaatctacactgcaatctcttccctcatcttctccaattatcatctctctctgattctgttgcgccgccgcggagaatg

SEQ ID NO: 25858 - DNA, 3003 bp, Unknown; identical to SEQ ID NO: 25857
  misc_feature (1)..( 3003): 2750-1469P.txt file - cDNA_ID_2708670; gDNA_ID_2214542; Annot_ID_185275

SEQ ID NO: 25859 - DNA, 3000 bp, Unknown; identical to SEQ ID NO: 12316
  misc_feature (1)..( 3000): 2750-1469P.txt file - cDNA_ID_2708688; gDNA_ID_2214543; Annot_ID_134509

SEQ ID NO: 25860 - DNA, 3000 bp, Unknown; identical to SEQ ID NO: 12316
  misc_feature (1)..( 3000): 2750-1469P.txt file - cDNA_ID_2708688; gDNA_ID_2214543; Annot_ID_185293

SEQ ID NO: 25861 - DNA, 3003 bp, Unknown
  misc_feature (1)..( 3003): 2750-1469P.txt file - cDNA_ID_2708699; gDNA_ID_2214543; Annot_ID_134519
gccatacaaaaatctataggtggtgtccgtcattccactaagtaggattttttgtttgaatcatttctatatagtaaattacattccatatagttgtagaaaaccctttatttactttgtatttccagtattttaagtttctcttttatagagcatagtttcagagaaatttcgttttctttcgactatatttccagagacatttaggtcattcaccggtttatgtttttctttttgaattttggattttggggatatttaatttttccatctgtttatgtaattttaaaatatatttttctatgtttttatatataaaattagatgacaaaaaagaatataaaatcttcgaaaacgattgcatcgtcattttgattatctgtttcccattatataaattatggttatattatggtttaggctgttttgatttcttgcattctttaatattttcagaatttattcgaataggtttaattagttccgtacaaccaacatagaaagatattattagtttttgttctattcaattttgatggaatgtctactcctaccaacaggtttgaacaaggattttgcatagttatagtattaaaaagtgactaaaaagtagaaagttagagagtgggtagtgttgctaaacactttattctttctcgtaccaaactgatgtgatatctaaaatgactttgaactgaaaagagagcatagcactcgacaataaaaagggttttgatagatcccactgattatctctgaagcgaaaaacccctttttttctctcaacttgacgattagggtttcttcttctccttgccgccgttggtgtggcctctcgcccaccggcgagaatcttcctctttctccctcctctcccttttttctatggctttagtgatgcttgctcgggctcctgctccacctttgctcctcccttctccgaatccgccgccgtgtgctctaccgcaagatttgaccagtttggtctctccttctgaacctcccgaccctccagacccaccagactatctcgttggagcttccaactcctttctctcgattttgctgttgaggtcttcagatctaggatcagatcttgttcagactttgagccctctagatctgggttttgctttacgatctattactgctgtgtgcagttcgtggtaccaagtatttcctctcgcttgtttggagctttggttctctattccacacctctctcatcctctagtcactctatcaaaaggttttgtctctctgaaaggtagtaatttctttgaatttttaccttcctttggaacatgccttcgtttatacttcagttccctcaccatgaggatgtgatgatttctactagttttaggctggttttacctcaatatgaggctgttatgatcttgcttaagctcaagctgttcttacctcattatgaggattgttgttttcgattggacttcgaattcagcttcttttacctcagtatgaggttggtttgattctgtataagcttaggcttctcttacctcattatgaggatgttatttaaaaactttggttaagagcaattcatgttattgtttctttggtttggtttcttgaaatttcacgcaggataaaggaaaagacatatgacgtcttaacaagaaatgatcttgggtcttggactccagatttgttcatcaagaagtggtggttttcgcaaccccacacctctccgaagttgaggtttttctcacatctcgtaagctcaagaagttggtgctttgtcgcctatgctattgtagccgtatttcatgatgcgttttatccactagaggatgttgcatctccggacagcagatcaccaagtgtgctctcttatttccgaaagctcatctcatgttgcagcactattggtgtctcgaactttagttgcttaactgttatgtatgcttctatttttttctttcgtgctttctgtatgtcatttgtagcagtggtttttttggcctttgtagcctctttgatgtacttgttgaaccatttctccattgttggagagtagaatcatttataaaaagctagtttgaccaaaaaaaaaagatcccactgattttgccaataccaaattttactattcccaattaactgtaccaagcaatatctttttggtttgtaacataattttggcaaagtttcgacatgtatcaaactatcaatcaaatttgcgatactgatttctatatatagtttcaattttatttggatatcacaaataaaaactaaaagtgggttgaagaatttacgaaataattaacataattttggtcggcgctgaccataataattaataaattgcgtcttttagctcttaagtatagtcaaacgttaattttttttagtaaagcaaaagacgtgtcaaagtcaaactaactaaaattagatgttctcatatactgatatacaatcatatttttaattatgaaactatattgcgtcgttgacaaaaaaaaaaacttagattgcatcaataatggttattcttacaaaaaaaaacccgttaataaatgatataaaacaaatgaaaaattaaaaaattcgatatcataaattcatgatattctcttttactcttttagtaattagatctccgaataataaataatcgtttactaaaaacgtcctccacaaaattcggcaagtaaaagaccaaaaccaaatctcttcagggtcaatttcgtaacttcacactaattccataaccatacataaaaacaaacaaaaaaacaaatcctgcgagaaaaatcccaaaaaatcaataatttaaatcactttccatagtttacagacaacacagagcttgcttacgtgttctccaaattttgtatacattattttcacaaaaccagttcctcaacaactagatccatcatctctagcgttcttaaagtttccaacttttttttttattaatttgggccaactttttttggtttgagaattgggcgagggagaaagatg

SEQ ID NO: 25862 - DNA, 3003 bp, Unknown; identical to SEQ ID NO: 25861
  misc_feature (1)..( 3003): 2750-1469P.txt file - cDNA_ID_2708699; gDNA_ID_2214543; Annot_ID_185306

SEQ ID NO: 25863 - DNA, 3003 bp, Unknown
  misc_feature (1)..( 3003): 2750-1469P.txt file - cDNA_ID_2708706; gDNA_ID_2214543; Annot_ID_134502
tcctcaatcttccctttcaaaaccgttataactgccaacaaaacaaacacaaacacttgtttcagccaactaccatcagatcataaaccatttgaataacactctaaacacatacataccatctgagaatccattcgacttaacaatctcctttgctgtgtcagccatttgagaacactcaacctaagaatcattagtcaaatcagatcaataagagccaaactttgattaacggagaagataaagagacatactgcgtaaacgtgagctgctcctgctttagcacagaagagagacaagattccagttccagctccaacatcaagaacaattttgtccttgataagaaacttgttcttgtaaataacatcttgataactctttgtcctcactacatcctttaacatttcctaataataataacatcaccatagaaaaactgttatacacattgcctaggtttcagaacaaaggattcaaaacaaaacaaaaaagcaggagactttacttacttcatgaatacctgcaaaaatcaatcaattggaaacagagtaagcactttgcagagaataagataacatgaagaaagcaacattatataatgaaagttcaagggtttataccgaaatgagagtaagaatcgaagtagtaatcggcgctggtaatgtcatcagcaacatcggcattgttgtcatctccatcgtgcattgattcatcagcatcctcgaagtgtaacttcgtcgtctgagtttcatcagagccgttgttgttgttctccgtactagtcattttttgcggcaaagagagaggttttggatggctaacagattcgaataagcaaaaagatttagggttttaggatggatacgaactttatgttatgtgtatgattctatttcagccgccggttcaattgtttttgacagataaaccggtttggtttataccgatccggttcggttattgtcgtaattataaggcagtgtagatgaaatttggaggaaaagattctgacgctggtagtggtgagtggtgagcacggccaaaaggtatggcttgcttacgatcaccgattcattcttcttttatttcgtttaagattctgatattttggtctaaaattcttcttcgctcttttggattttggtttttaggggtttaaagtttgtttttttatgtgtttgagtctcagatctaatttgaaatctcttcactgcgataatgctttttaggttttgaattgcttaatttttccataattcggattcgttcgatttgttagtctggaattgaggactagggttttagtgatttagcttgatatgtgtgaaaagccttatgcttttggatgccttgcttctgaaattacattttttcagtttcctgttttagttattgaattctatcgtggaggtgtataatgaaccatgctattgtatatgatgagctaatctttcttgtttaggcttagtttctgagactcaattggtaaatgctaaacttggtttctatgattttgtaggattttggtattgaaaaatggcatcaaaattggttcaacttcaatcaaaggcatgtcaggcttcaaagtttgtggccaagcatgggaattcgtactacaagcaattgttggagcagaacaagcaatacatccaagagcctgcaactatagagaagtgcagtgaattgtctaaacaattgctctacactcgtcttgctaggtcattaccattttcttctctctttatctcatggacatattttcaatggccatgctcaaactatcttttatgtatacttttgaaacattaatctttagagaatgctgatgaaatgtgcaagttgaatttgcattactcgcgagtaggtagccttttttgcctgaaaaaaatatgcttgagaatttgttatcctctagtagtttttgtcctcgatggaattgagcttgtaaatatcctttgattaggataatatatgtgcctgtcttgtttttcctgtctagataacacattataagcaccacattgtgttttgctatcagttgaagagttcggctttctgtgatacgcaatcttgcgtctatagctaatactcttcttactaactacagcattcccgggcgctacgaaacatttaggaaagaagtagactacgcaaagaacttattgaagaacagagcgaatctgaaggtggaagatgcaggaatcgctgcattgtttggcttagaatgctttgcttggttttgcgcaggtgaaatcgtcggcagaggattcactttcaccggctactacccttgaaattgagacaacaaacaaccaggtcgccggaatattcttcctgacgcttgtaactccctccatatgattcctcacttgaactatatatacttcctcgaatccatttatattttcagttttttcctgaaacagaagtgttggagctaagggaaaaaaaaacattttggtaaagctcttaataagttgagaaaaatgcatttgatacaagattcttctttagatatttattttatccacaaagtttaatatctgttcacaatatttaaaacatcagagaattattttttttaatatattaagtgattgttaattgtcgaataacttcaaaaatagaggaatatttgaaaaaaatgttattttgaagaatttatgatattcacaagaaaatgatttttgagtaaaaaactgttatttttattttgtttgagaaactgatatcatagttgaagtaaaaatttaattttgcagctgataaattcaaaaatagaaatatataatacatttatttgagtggacttaagataaaatattgaattaacttcaaatctcagcgagagaatattcaaaaaaataataataaaattttggtatgtgcgagaaagcaggaagaccaatgggatcttaaggagacccaattggaatctttagccacaatttcgaaaccttagcgaagaagacaacaacgatttacgagacgacgacgatg

SEQ ID NO: 25864 - DNA, 3000 bp, Unknown; identical to SEQ ID NO: 10350
  misc_feature (1)..( 3000): 2750-1469P.txt file - cDNA_ID_2708714; gDNA_ID_2213644; Annot_ID_132336

SEQ ID NO: 25865 - DNA, 3000 bp, Unknown
  misc_feature (1)..( 3000): 2750-1469P.txt file - cDNA_ID_2708714; gDNA_ID_1591721; Annot_ID_151437
cgactacagctccatgagacattctgatggaccttacggcgagaatatcgccgcgggatgggtccaacctaaggaccaaatgagcggtccgatagcggcaaagtattggttgacggagaagccaaactacgatcatgcgaccaacaaatgcaaagatgtttgcggacactacactcagatggtggccaatcaatcgttaagtctcggatgtggctcgttcaggtgtcatgagaatgagttgatttatattgtatgtaactattatcctatgccagtgggtgatgagaatacccgtccttattgattatattgatgcaaagaaatgatccatatggtaatgtgatttgacaattattaatatgttaagttactgatcaatatatatgtataagaatataaaaccaagtttatgatatacattggtttgtataagttgctgctgtgaaatgattcagaataaaatgtgatgttcaattggttaaacaaattgtgattacatatatttgatataataatatatgaactttttgttatagatgatttataatattttcgtaaattatattcggagttattttcctttgtatttagtccgttggtatctagagcaattgtgaaaatgagtagctaagacatgaaaaattgtgcatttagataatgatggtttatgtttctttttgaagagcatgcccaatcaatatacaaatagacacagctctactgctctagcagaaaatatggagcaaatttctgtcttggggagctttatgctgcggttaaagcggctatgagactctaagcatcctagtagagtagataacgaattctatagactatatagcgtgtggacatcaacatgtctttaactttaaaatgattaaaagttgtctaatgggtcggtttaatagcttatcatcttccttattttaacttctaagtactagagttaaaggaatcaaatgatgcgtatgctttaacttttcaagaaacacaatgatgcatagttttaagacactgtaactgtaagtgcaaatgaaccaaaaatgatgctttaacacgacgttgagttttggggaatcatttcatctgacatatatgggaggacatgttttgtttgtatatcgaaattcggaaaatgtatggctaagtgggaatattggatatcacataacttattagaatcagaagagattgcaaatttgtccaagaagcatatatcaagacactgtaagcgcaactctgaaaatttcattgttgatcaaaaatacaatatagtatgtggcaactggcaagtcatacaatcacatttgatcgtactagtgagcagagccatgccaaggttaatggttgacggaggcggtcaaaattttttttccccaactaaaaaaaacgatgcttataataatagaagtaaaaatgtctacaaagataaattgtcatatgacgaaaatacgaaaaaaaacaaaacataaaaatagttctaaagcgtaattcttcttcctttcttcccaacaaaatcattagccaaacgttcaaagtcaacttctctaaccaatgctctttcgatagataagatcgccaagtcacttaaccttttttgtgacatactcgaacgaagataagattttatcaatttcagctttgaaaaacttctttccgcagatgcaaccgaaactggaattgtcaacaatacttgataagcaatccatgaattaggataacaaccttcaactttttgcaagaagtctaacacttcaataggcctcctaacttccttgggtaaagcttctcttagaatttttagttcataaaagagatcactagcaagaatatctgaatgtgttccatgagttaaagcatctttaaggttggtacaagatgccatcaaactatcatcactcgccgactgcaactttttcaaatcaaacaaaaacccaaatatttgttcatacctttggaattgttcgaatcttgtctcaagcgagtaaagagcttgatccatgatttggatgaagtagtcaattctgtaaatttcgaacataagtgttacaaaatttctgattctaatttgggggaaaactacaacatgtataattaagaattacatcaaaccataggatagaacaaggataaataaagtatcaaacttactctaacgagtcaatgttaatacgttcaaggctcaagagtaacaggattagaaaaagtcttgtggaaagagacggcgattaaaaaataaaggaagaggattctctaacctaacttaataatgctttgttctgtttgtttccttattctttggatttttttttatttttattttattttcttattatttagataaatgcaaatgatctgtaatattggtctattaaactaagagtatcttatagaaaaatatgcttctaagttttttttcaaaaattttggacgtaagcgaaggtttctttcttatgccttgaggcacggctctgctagtgagttatagtttcaatgaccaaggagttccatgcgatacacaatgcaccaaatttggtgtgaagaagtaaacgtaacttatcaattgttcgaatttctgtggattttatgcaatcagtattcgtaaagtaacttggttttataagtctgttctcaatttccatggcatcaaaagaaaacgtttagtctgtttacttcgttatctcataatccaaattcaacggccacgatcagctagactactgtaaatcaggtggtcgtgacagcacaagatcaacgatctgagttcttccttcttcgctcatatgctaaattctgattgaaacatctgmcgaattcgttcttcccctttctaatttgattctccttggaacaaacaagctctgttacagagatcagagtcgaatccgtaacaccattgttgattctctaaagcatctactgatttcaatcgtgaaattagccggtggtgcatggaagctcctttagcggagagttagtttcaattttgattcatcaatg

SEQ ID NO: 25866 - DNA, 3000 bp, Unknown; identical to SEQ ID NO: 12338
  misc_feature (1)..( 3000): 2750-1469P.txt file - cDNA_ID_2708721; gDNA_ID_2214544; Annot_ID_134550

SEQ ID NO: 25867 - DNA, 3000 bp, Unknown; identical to SEQ ID NO: 12338
  misc_feature (1)..( 3000): 2750-1469P.txt file - cDNA_ID_2708721; gDNA_ID_2214544; Annot_ID_185350

SEQ ID NO: 25868 - DNA, 3003 bp, Unknown
  misc_feature (1)..( 3003): 2750-1469P.txt file - cDNA_ID_2708735; gDNA_ID_2214544; Annot_ID_134538
aatcaggtacatatatatactacattcatgtaactaataatgtaattgttctggctatgtatgtgattgtaggagctgcacaaatgtatgagaacggtgtgttagcgtacgtagatgttgaatttgtagcggatgttcacattcgagcattcgaggatacttcggcttgtggtagatacttttgcttcaaccaaattgtgaacacggaagaagaagctctcaagcttgtacaaactctatctcctttaatacctatgccaccaaggtaattattattactattattgttattatcattactactatataatttattattttatagttataatatatgatttaggcatgagaaagaaatgcaaggaagtgaagtttatgaagagagattgagaaacaagaaactaaacaagctggtggaagctggatttgcttgttaattacatgaagagagatgttataaattaaagggcaagaaaataacaaagaaattttatagtaagagttgtttgtttacttatttttttaattattgtactctcaattcagtattttatatatctatattttattttattttgaaatgaaaggaaaatatgtgttactcatagaaaagtgagtattttttttttggttttaatgtgagaaaagtgagtatttattacttgtatgtcattatttatggaatatatgatgaggctaggtagcaacaaataataagaaaatgagaaaagcattatacagttttgtactaaactacacatttgcaagctaagaaggaaataaattttgacatgtgcttgatgtaatttatgagttgtcaactttaaagtatatagctaactgttgatgaatgatttatcattaacatttttaaaaaaaattagatacaatttgaaacgtgtaataaatgatgagcatatatccatacattttgtttgtaatgggtttctgatttatccacacttcagtttctgcaagctgtgatgttagacatgataaaatcacacaaacaattcagagacatacaaaatcaggattgtgaagcaggatttaaagtatatagcttagttttttttgtatttttttttaacagcaaaatcaatattcacgttttagacatcagaaaatgaagcaggatttgcaagtttgagagttaaaagtcagtcattaacaaaatcaaaatctcaaatgcatccacgatttattaatacaacataaataatgcaatacgatccaaaagaaactacaaaaataaaatttaaggttcggtcttctcaaaaaagatcaaggttttgtcttcttggtatgtccatcatgaagtttcttctatgggacgttctttaaatttgcatgatatagatcaagatgggttgttgccatatgcgaggatgatgttgaattgcctctgctggaccaacgtttcaaggacactaaaattttaatgtctttggcaggaccggctataaaattttggggtcaaaactcaaacaaaataatttaagattattaaaaaaaaaagtggagccaattatcgtaaaataaaagtattattaacagtatattgaaattttaaagtcttgaaccacacttttgatcatatgagataatatgttttggtggtgttttaagagcaaaactaaaggagatgggaaactcgatatttggtcgatgtgggatgagtgtagacaacttcaaggctgtgaagatcccaacaccggctcttactccatttcttttcaaaactagtcgatacattctcatacacaacttattattaataggtttcagtgttttacatcaaccaattttatattaatcgtttatttatatttattttgttgtcgatgaatcggtattagaaattgagagcttgtggcatggtatatctgtacattcaagtattacagtggagaaatttttattttggactgatatattgttgttatcccgagctaaatttgtaaataggaaacacaaattgaaacttataaagtaaatcgcgagaaaaatcaattgattattagagaaatactaaacaatctgaaatgcaaatcgttcgctcaaagtaagctcacgattacacaacgatcaacatagactgctattgctacatcaccagagtatttctttgtctctctctcaacaatctagaaaagcataaagcttatgagatgtaaaggtagaaaaatttagagaaatatttatcatttttcaattaaaaatataataagagaaaaatgataatgcattatgtttaaataatatatatatataaagaaaaaaatttaaccttgtgaaatttataattttgttagtctaaatatagtatatgtagataaaatataaaattagtgagtataatagatgtgtcaccacttaccacttattacctaaattaaattcattataatgcatattggtggcagaaaaattgtatatgtaatgctgaaaaacaaaatggtatatgtaatatcattcgatagaaacaattcgaacaattggccgcattagaactacaatgacataaaaatgtcttcgtcattttaatttttttcttatcatttttgatgttgtggtgaaattttagtgtaacttttaaaatttatcgattggtgaaatcaaaaatatttgatcaattggttagacgctaaatatttgatcaattggttagaccacaacaaaaatatttaattaattggttagacgattgtaagatattacatcagattaatagcgtctagagaatacacttcgacgaaaaaggaaaatcacttaaaaaaaaaaaaaaaaatacacttcgacgaaacatgtcaatagtcatatgagttgggccttatagtttattgggcctgagtagattattgggcttaaaggagtagtaaaaaacaagaagacgctaacactagacttccaaaaatcaaaactttagggtttcagagcaaactctgtcttcttcaagccgagagcgaaaaccctaagctcaattccgattttgcaactatg

SEQ ID NO: 25869 - DNA, 3003 bp, Unknown; identical to SEQ ID NO: 25868
  misc_feature (1)..( 3003): 2750-1469P.txt file - cDNA_ID_2708735; gDNA_ID_2214544; Annot_ID_185336

SEQ ID NO: 25870 - DNA, 3003 bp, Unknown
  misc_feature (1)..( 3003): 2750-1469P.txt file - cDNA_ID_2708739; gDNA_ID_2214544; Annot_ID_134536
agcttgctccaaaggcagccgacggtggagtgcaactcattgttccaccaggaaaatggctaaccggaagtttcaacctcaccagccattttactttgttcatccaaaaaggtgcaactattcttgcttctcaggtatgaatgatttccatttttgcattatataaaactgaaattagataaatatattttgtgtaaggaattagtcatttatttacatgttttttattttgtggtttttcaaaaaataggatgaatctgaatatccagtggttgcacctttgccatcatacggacaaggaagagatgcagcaggaccaacatttgctagtctaatctctggcacaaacctaactgatgttgttatcaccggtaaggttaaccaaattaataatacaacaatttaatgaattagtagcaacagtttggtgctttaacgaccaagaatcaatgatataagatcttaagaatgtattttacgtataaagactagaattaatggaatttatttggttaggtaacaacggaacgatcaacgggcaaggaaagtactggtgggtgaagtatcgcagtggtggatttaaggggatcacaagaccttacacaatcgagatcatcttctctcaaaacgttcagatctcgaacatcacaatcatcgattcgcctgcatggaatattcatcctgtatattgcaacaatgtcatcgtcaaaggcgttaccattcttgctcctatcgattctcctaataccgatggaatcaaccctggtaagtccatatcccacgccacattatatcaaaacgctctgattttttgtttgtgtttctaatcatcatattggctttatattttcacatggcattgtcattttgttttgacacacttttttcttctttattagattcatgcaccaacacattgatagaagactgttacgtagtctcgggagacgattgcatcgccgtgaagagcggttgggatcagtttggtatcaaagtcggcatgccaactcaacaattgtctatccgacggctcacatgcatctctcccgacagcgctggaatagcactcggaagtgaaatgtccggtggaatcaaagacgttagaatcgaagacattacattacttcagacacaatccgctatccgaatcaaaaccgcggttggtcgtggtggttatgttaaggatattttcgccaggaggttcacaatgaaaacaatgaaatacgttttctggatgagcggtgcttataaccaacaccccgcttccggttttgatcccaaggctatgcccgtgattacgaatatcaactaccgtgacatgaccgcggataatgtcacgcaacctgcgaggctcgatgggttcaagaacgatcctttcacaaagatatgtatgtcgaatataaagattgatttggctgctgagccgaagaagttgttgtggaattgtacaagcatctctggagtttcgagcaaggttacacctaaaccgtgtagtttgttgccggagaaaggagcaccggtggactgtgcttttccggttgataagattcctattgaatctgttgtcctgaacaaatgctctgcttagagattgtgaacggagataatactaatttcctcataaatatatatacattgtctttttgcaatgtatattaattcccttagaagaaaatgtcccagctgttattttataaagctgatgggtacatgcaatggttttagaatacgcatacgaaattatacaatcagtttcgtggaattaaattaaagtttgaaacgacgattataagcatatgtatcgaattagagattaagctttcctagttttgtctaggattgaattcttatgcgagagatgaaaatgtgatctaagcatcgctagaccctaaacattaatggataacaaaaggatgtgtgttatatctacatggaatttttatgtcacatatcaaattttatgtatagtttaaaatgtaattaagtccttatcaaaacatatatgtttggttagtgttatactgtaattgatgttttttttacaaatatgttaaatagcgcattgcatggtttatcacattaaccaatgtttttgtgcttgatggctcgatttatgcgatgtgctaagttgtcttagaagacggatcctcggtatatattcttgtgacctaaagatatcccacgggcgacatcgcaactaattgatatgcagaatagactaatagtacaaaatttgtccgtatcacatattttttatgtcactagttactataaaaaataattaaaatacaagtcaacacataacaaaaagaattataaactaataaaatgattaaagtcgttgattagtttaaaatctgcaactaaaaatgataatatttgcaataatatttttcatttttatattccctttgttctactcgttttatctaattatgtttggttggcacaacatatatattcattttgataattctacctatctttcttttaagaacacttgtcagaattcagaacgtaagataaagctaactcacaatgtcatcgtaaatcatcttcacaccacaatcgctacctactaacttctagctactttgttgtcaacttctcatattaaccttctcttttttcactatagtatttgaatccaaattactaatttatttaaatataaactttagaaatattaaaataataatagtttaaaaataactaatactacaaaacattaaaaaaaaagaattacgtttttcaatcaattatttattattctgtttttttttccaccggtcaatggattaaccaacaacacaaagccatatagtaaaacaagaagatgagtaggttgggagcgtgcaacaatgaaatagttcacccacctttctcctatttattactacttccttctcctcacgtctctcctctacatagtaagacccaactaaatatcttcttttctctccatacactttttccagatatttctaatcaacaaaactgatg

SEQ ID NO: 25871 - DNA, 3003 bp, Unknown
  misc_feature (1)..( 3003): 2750-1469P.txt file - cDNA_ID_2708742; gDNA_ID_2214544; Annot_ID_134535
taccgtgatataatcatatgatctgatgatttggttgattgcaacatttcttttattaccatttttcaggcgtgtcttatagcagacatggtgcaatattttgttgacgccaaacttgagtttgatgcctctaacatctacaatgatgtcaatcgtgctattcaacatgtccatagaagtggattggttcatagaggaattcttgctgatcccaacagatatttgctaaaaaatgcaagtgaaagtccttcaaattatcttcacttgttatattacctttgattggtatattactgaaacagcaatttgcttctcagggtcagcttctacgtttcctgagaatgctaaaagataaaggaaagaagctttttttgctgaccaactctccgtataattttgttgatggcggaatgcgctttctaatggaggtaattcacattattgaatagatctaaaactcttttattttctcgttggaatatcactagggacaatcatttcaacactttttttattttaattagttgtccataatcttcttacggccagttccatatttttttttttttaagtggttcatgacctttattgggttgtgcttattgttcgttaggaatcttttggcttcggagattcctggcgagaactctttgatgttgtgattgctaaagcaaataaaccagaattttacacatctgagcaccctttccggttagttgtcattacgatataaccagaaacactatgttcttgtgtaaaacataatattttcttgtggaattgatcgcttaactcttttattgctattaatccttgtagttgttatgattcggagagggataatttggcatttacaaaagtggatgcatttgacccaaagaaagtttattatcatggttgtcttaaatccttccttgaaatcacaaagtggcatggccctgaggtactctttacaacaagctgatatattccattctgtaacttcatgcttttgaatgcatttaaagacagactaccacatgttttattcataggtgatttatttcggagatcacttatttagtgatctaagagggccttcaaaagctggttggcgaactgctgccataattcatgagctcgaggttagtttaccatacttgatgtctatatagctttttagttgattgtatcctcaaaagtgtttgtacatcatttaaagcccaaccttgtacactgagttctctttatgatgttatttttttggttcagcgagagatacagatacaaaatgatgatagctaccggtttgagcaggtatagtcacaccatcctcttttacttcccaagaatggctttttgcttatacgattttaacattcatgaccgtgatcgtagacatatagtagtttgagatactctaaataaagcaaagacgtatgtgttactaagtttgataagacaatttattgtgcttatattcaggccaagttccatattatccaagagttactcggtagatttcacgcgactgtatcaaacaatcagagaagtgaagcatgccaatcacttttggatgagctgaacaatgcgaggcagagagcaagagacacgatgaaacaaatgttcaacagatcgtttggagctacatttgtcacagacactggtcaagaatcagcattctcttatcacatccaccaatacgcagacgtttataccagtaaacctgagaactttctgttataccgacctgaagcctggcttcacgttccttacgatatcaagatcatgccacatcatgtcaaggtatataaacctgtgaccttaaaagagccggacattttgagttttattgattgatttgacttttgaattttggaattaaggagcttaacgaaaactcttttctacttttcttttcaggttgcttcaacccttttcaaaacctgagatagctttcattcccctaagaactgaacagatgatttcgctagacgagaaacttttcttgtatcgatgacgaatcagacgacaagaaggcttgcaattcaatctcagattcttgctgctgctgatgattcttttgcataacttaaagtggctaacacttgaaaacaaaggatgtaacaattagagattttttgttggttttagttagggattatggtgctactttgaagtttgatttctaaaaacatgaaatatctttgtagattatggtgcaagtttaataaaggcttaaaatgttttaagttgagccgtttattcataagttgcgaattcaattatgaaaaaaaaaaaaaaaaaaaaaacactacaattggagcaaagaagtagatgtatagggaatctagagcattagaatagtttagtcccaataagtaaaaaaattgctagtctcataaatattttacttataatataatatctcttaaaacggataaaatctcaatcccaaataataaatttaccccttcaacattacatgccaatttgaaaactaattaagagatttgtttttattataggtaactcaagatcttaatgatcttcttatagcccttataggaaggtccggatatttcattccaattgacatacaaattttcttcagtcaatttacctaatttaagatctataacttcagaagttggattattttctactaaaacgggaattgtttgtcttaacagaaataaataacaagattggtacataattgcaccttttttagctctacttatttttggtaaatcaattcaaggcttagatttagataaagtttaagcatgtttttctctattttgttcttctataaattactctgttttaagccaaataaaaaaacaaacacaaataccaaaaacaagtcataagaatcaaatggagttctctatcaatccttcaactctaaaggtaacgttattttaaacaatgtcatcctcctaaacatgttttgaaagtgagtttaatttgtgagaacattcaaaatatggtttaattttttcttctattcaacagatg

SEQ ID NO: 25872 - DNA, 3003 bp, Unknown; identical to SEQ ID NO: 25871
  misc_feature (1)..( 3003): 2750-1469P.txt file - cDNA_ID_2708742; gDNA_ID_2214544; Annot_ID_185333

SEQ ID NO: 25873 - DNA, 3003 bp, Unknown
  misc_feature (1)..( 3003): 2750-1469P.txt file - cDNA_ID_2708746; gDNA_ID_2214544; Annot_ID_134551
ttgcacccggacgcatcccaagatttctctctgcctcagaatggatttcattgattttcttcgctttcacctgccattgaataagtacaacaacacgtaagcacggataaagaactaaagactgttattaaaagatttgagatggaatgataaaatcttacctcctcacgccttggtacccatttattagctcgaagatcaacaacgttttggaccataaatctgagacgcagctctagctgagggtgccttgctagctccttcaaccgaccaaagtacgtgtcattaatacctcgagatcgtgggctgtcatcaagttgcttcccaatggttataaaaaattggcagagagcttcaacatctccctctgctgggcaagctttagtatcgtctcctaaaagctcctgaacaatatgatgaactatcttctcaggcaccatcttttgcttgagaagttcaccaatcagacggatatttccaagtgtccggagctttgccattttctccttatccattctttccatttcttggtctggattagtcatctgtctgatctcttccttcaatttgccagcaccttcaaatgcctcttggcaattattcaaaagcactcttttaaaggttatttctttcccaccgggttcctcagagggaaacgaaggtagctgtccgttaatatcaaaacacagaagagcatacatctcgcagaatgtgggctgcagtatagcattctcaaaaattagctgtatcacttcctgcaatcaaaggtaagagcaaatcaataccatgaaagagagaactacaacaatagagatcaggaattgaaacaaacctttaggatatctgcggaagtgatgccagcgtcaatcaattgacctttaagaagctcgtacttctccggagtaagcttgtttagaatactgcataaaattgtaaagaatcagtcagaatatacatcacatcaaccttcaaacacaaaagctgaaaagaatagtattagttgttgacaataccctttcacgctcttaacgactcgatctttatctgaaagagctcctcttttagctgaccacggaacctccgctttaatcagcacaggggtaggaccagactgtttcacaagatgatcatgttagcaagaagagaaaactagtaatgatatgccaacacataacaagtgacgaaaacttaccccttgccatgtacttttggcttcacgagggtcgtcccttaaccattctttaccagaggttggaatctgagaacgactatgccagtcacggttatcagtctcggtatgacgatgctgagtatgatttgttatctaataagaccaaaaccaagaatgaaagtttaaaagacagattccaaaacaggaggattacacacacacacacagacacacacttactttactctcggctgcatgattcccccaactctgctcttcgccaaaaagctcaactgcgatttccttacagcgtctaagaatttcatcagagacttgaacagactgcgatcaagaaaacacaaaggtgaatgatttggttcacaaagtcaaaaacagaatcagagaattaagttaaatacctctctgtgctgaagtatctcttctcgggaaaacctcacacgttcaccagaattttctctctacaaaaacataaaatgtcaagagcttaggattcaattacataacataaagtatcaatctttgtccatattcaaattcaacaaccctaaaaattcaaactttgtacaaaattcgattcaaaatcatggaaacgaatccaatcctcgtttaaactcgaattgcgaaaccaaattgaagagaaacagaggatttttcaatgtatttaccttgacgggaaaaggggtttcttcggagccgccattggtaagatcaaaagaggaagaggagctaaagcgagggacgaaaagcctgcttttgccgccgccaccgccgggtctcaaactcaaaaccgatggttcaccttgttgttgcattactcgattctcttgttttttcgcaattagaaggattcaataaaaaaaagttttgcagatagatagaggtatatagtgtatatatatgtgtctgtattgacggtggagaagataaaatcacttcgattccctttttttttttggctgaagctgtgttctgtggtttgccctaatttccttttcttcttctcacgtgtaaatgttattgttaattacgaaaatattctgtatatcaaaataattttatttattgaaaaagaattgatggaaaaatcttacgaaataaagacttaatattgtttttaatgcatcattatcaaaatacaagtctactttcacagaattaattaccaaagtatcctctgtctataatctccaacacaaaataattaatttttgggaaaaataattgatggaaaatcttatgaaatgaagacataattattttgtatttattgcatcactataaaaataaaaatctttgttgcatcattaaaagtgttgttggcatggctcttgcatgagttaagttagttaattcaaagattacctctatctataagttatttatttttgtttcctaaaattatgaatttttaagtaaatttgacaaatatacatatgtataataataaatatagttggtttattagattataatttcttaaaaaataaaaaaataactttatatgcatagattcctttgcaaattataactttattttactccctttaaaattaggaacatgatattcctcaaatttctcccatgttcaatgtgattatgctggttttagtttagatgttaaaataaaaatcctaaaaactaaaaagtaattgggccctttgttttaaagcccataagcccattaataaaaacattgacgtttagcttccaaacattggaaacgacgtagtttcattctccgttgcgttttattcttctggataagagcttcgtgatggtttgaaacctctgagtgaagaagaagcgccatg

SEQ ID NO: 25874 - DNA, 3003 bp, Unknown; identical to SEQ ID NO: 25873
  misc_feature (1)..( 3003): 2750-1469P.txt file - cDNA_ID_2708746; gDNA_ID_2214544; Annot_ID_185351

SEQ ID NO: 25875 - DNA, 3003 bp, Unknown
  misc_feature (1)..( 3003): 2750-1469P.txt file - cDNA_ID_2708750; gDNA_ID_2214544; Annot_ID_134532
tttaccaacaatcaataattccccatcaaaacaaggttttattatatcttagactggttagtaaaccaatagcaactatgagaaataatacctttgggaccttaagtaacttcatgtgtgcttcgtctgctgtcttctgtcctttccttgagttgcatcttgaacatgcagctacctatgtttcatgaaaccaattgaagaaaacaatttaacccatcttcaatattcttggctacaacatatatgctacttcgatatcaatcacatactaggttttgccaagtccattctccacctcgagaaaccggcataacatgatcaatggtcaaattttctcgcgaagaacaatatctatatcccaaataattaaagttctgtcagcaacaatagtttgattccgcaaaaacagagagatatgattgcgagtagagatagaaaaccactcactgacaagtataatcgtctcgtagtaaaatatttttacggctaagtgagtttttcactcttcttcttttaacaacctgaagcaaatgtggaacctgaagcaagacaatgaagtaagcttcaaactggcaacaagagataaaaactggctaactaaactcatattctacatacccttaatacagctggtatgtagaacgaacccgtaggagaactaacagtctgatcataatactccaaaacgtcggcctagacaatgcacaaaacctgaattaaagatcattatacaaataagcaactatatacctactttttacataatacaaatcctgcgtttttgttgattgggaaatttcttgcataatcgtattagaaaacgtcattatgtcattatgcgtgttaccaatcagaccctaagtatcaacatgagttaaaagtcttttggcctgaccttatccatgtactcgaggcagattgcgcgcttccagcaaaccacattgaccggcctacagtgacacaacatgcttgaacttgaataaagagagaactaatgcttcaatcaactatataactacatatattcgtaacacaaacgaagaatttccatatatctcttttaatatatcctgttctaagatcaatgaatacattgtaactaaaaataataaactaaaatgtaataatacaaaaaaaattgttgacctgtatgaaatatcaagaaccaagcctctgaagcaagaaagatgatcatcagtctctaaaccatcatcgtctccatcaaaatcccactcatcgttgtcttcgtcaatatcaagatttttctcggtgttatcgagatccctaattttctttctcttataaggaaaagagtaagatgagaagattctagcacaaaactttagtcggctcatgcgtattggaaccaaaggagatccaccaccggccatgtaaaggctctgccgaaattggtctctcgaatctacaccaaaagataatccatcgttgcttgagagaagcttaagtctagcagagaaatgtgccatttgattgaaacgaaacgaagaagttagggtgatccaaagtcttggaaaattattaggaagagaaattgtttacacaatttggacttgagcagagccgttaaccacaaactgatttctatagaaaaaatatcatgctctataaaatgacgaatatggcctcttatctttctaccaagaaattagaaaaaaaaaaaaaaaaaatcatattcgacgctgccgacaaatcacaaattttcgcgctaagctaagtatcgatttttagtttaaaatttggaataattgttactcgttatataaatttggaatttaataaaatgaaattaaaaatatgtatagtttgatagatcccaaaaagtattcaaatttacataaaaatagaatataattttgatactttttgttaaattttttctattaatataaaaatttgaattgtttaatagaaatttcagatatgttaattttcaatgataaaaataatatttcagatatgtgaagaaaaaaaattcagcatttcattacatttatataaaacacacaaagaatttttgtgtgtttgaaacagtacaaactatagttacaagttacaacgtatagcacctcatgaagaggcaaaagccaaaaagttgcagaacctgtgaaatagtgtttgatatttccatgtatgatgtattgtcttaagacctcatagtttcgaggttatgcggcttaaagttgcttctatagatccgtgaggttcattggtttggcaggtacacatcatctttaaactgcaaatgcaattcattggaaacgattcatatcctaaaattattggcttttatgcaagtttttttttgttgtctgattttaagtttataactatgtactactgctgctacttttctacttatcattttcgtttacgtttcgtggtttcatcataaagacaacatcaaatagaggttcttaccttcaccattgaagggttttgcttggttgaaagtgtatatttggcagttttaggtgaatcgatgatacatcaacgaacctgatcatgttaataagaacctttatcatggtaagaatcacataatcacacaaacagcaaaataaatatatactgatatgatgataccttttcagtacggcgcttcccatgaggaagagagtgcgttggacagaagagctgtacacaccagtttctggtggaccaaagaaagtatccattaggactttctttacgtctatgaacttctcgctgaaatagagtccctttgttgggatgcttgcaactgactcaaacgagtatgtcatcgtgaacgtgtatgtcggttctaagaatcaattacagataagaatgtagcattactaattaactcatacctacaagatattcgacagatacgttattgtctgccttaattaaaggcttaccttaaaggtaaaacaaagttttgggaatcattaaatagttgtgattagctcgtgtttctaaggcttctcgtgttttttttttgttttttttgaggttatg

SEQ ID NO: 25876 - DNA, 3000 bp, Unknown; identical to SEQ ID NO: 12343
  misc_feature (1)..( 3000): 2750-1469P.txt file - cDNA_ID_2708754; gDNA_ID_2214544; Annot_ID_134531

SEQ ID NO: 25877 - DNA, 3003 bp, Unknown
  misc_feature (1)..( 3003): 2750-1469P.txt file - cDNA_ID_2708758; gDNA_ID_2214544; Annot_ID_134530
ctcgttccttctttcactcgttctcatatccgatttacttactccgccgccggtgcttcttctcctaatcgagctattcactgcatggcttccgattcccctcaatccggagatggttccgtctcttctcctcctaatgtcgcggctgttccctcttcttcttcttcttcgtccgcttcttccgccattgatttcctctctctctgtactcgtctcaaggtaagctttgattgatccgccttacattttcgctaagatccggtggttttgtgtgattatacaacgcaatgttggttagatgatgcgattgttcttgttgatggattgtgtggaaatctgatttcgttagggaaatgaaacgatttcaagctatgtagttacttttgatgttcttgttgatggattgtattggaatctgtaaattcgtttgtgcaatgaaacgatttcaagctttgttgttactgtgtagatgtgaagtttttatgtgaatctggttagttttcgcggtggtttctgtcaatgaactatttctactcgtaacttttgtctatggaacctagaatttgatacagatgttggtttgaaacctctaacgcattgtttagatttatgtggatgttttttaccaatgtaagattggatctgtgttaagaatggagattattctggtgatggattgtagaaactcaatgcattgtaactgtttatataagatcatttgttttttagatttgtgtggatgtttgttatcaatgttatgatggatctgtgtggagatagcttgaaacgtttcgtgcttaatggattgtattggaatgtatagtggattgttacggaaatgaaacattgtcaagcttggctgcatctgttgacggattgtagaattcgtttaggggaatgaaatgatttcaagtttatgtgattaatggtctgtgattactaaatccttgaagatgtgaagtttgtcatgtgttttacttttttgtgaatcaagtgagtttttgtttgctgatttaacgatagagtttgtgtgctgtatcgtttggtaaaccatctttttatatcaaatagacaactccaagagctggatggattaagagagatgtgaaagatccagaatctatagcggatcacatgtatcggatgggtcttatggctctaatttcttcagatatccccggtgttaacagagacaagtaagtttcttgcttgcttctctcttttcaagtttcaactgctgtgaaaaaactcttcttatatacatacttttctttctatagatgcatgaaaatggcgattgttcatgatattgcagaaggttagttctttcacttttagagatttttaatcatcgattttcttaatcacgagttatttagtcgagttgttgttgagcagccattgtaggagacattacaccttcttgtgggatatctaaagaagagaaaaaccgaagagaaagcgaagcacttgagcacatgtgcaaactcttgggtggaggcgaaagaggtctgtttctcttctattgttgaaataccttatgtatcttcgttcgaccttcttatgctcatttgtataacacttatcatcacttctaaaaatgtatatatcgtaattgcagcaaaagaaatcgctgagctttggagagaatacgaagagaactcttcacctgaagccaaagttgttaaagatttcgataaagttgagctgatactacaagctttggaatatgaacaaggtaatgaatgaccaataaaagaaactctctttcgataagagatttagcagaaactaatactcatattgttttttgtttgctatttaacgcagatcaagggaaagatctagaagagtttttccaatcaacagcaggtaatttttgttgtatgtcattatactctaaatagataatctgaatatggttgaaggctttaagcttgttactgtttgattcagggaagttccagactaatataggcaaggcttgggcgtcggagattgtttcaagaagacgaaagcaacattagttctcacttgactctttctttttgtttcttaacgtctagctcagtggagttcaaatactcgtacgtttcaaatttaatcatcttaaggtttttctaataatcttcgtagctgtctttacttgttttgttactatcactaataaaagatagctagctagtgactatcttatagatagctaatgaagatcaaaaaacttaatcaagctcttaaattttattttaagaaagtatcattggttcctcaatataaattttcggatcgttaatagaggtcaaatgatttttctttgttttgttttgtttcaagattttgcacgggttaaaagttgaataagaataacgaatagagtatagacacttcataaagtgtagtttccctgccacacttagatctcctactaacctcacttagattagatttctctctagtctaaaagtctttaaaccttttaccattgggtttcacaaaattaacattagtagttatgtcttttctttttaaaaacatattttagaataaaccatatctccaaccgaaaactccaaactctctccgacgcttatccgcatagttcttttgtcgattttgagcttcttttatcttaacctttaagattttgattttttccgatgttcatgttattaaccacaagtctacaattaaattattatatttttttaaaaatgattcttgcgcgagaagctacttagtggactcggaaggagaagggaaattggtagaggttttaatttgcaaaacttataataatataatagtagtagtcgtaacaaatggtttagctgattattcaacatggaacttttcaaagaatgtttcagttttagttgaacagacaatttttacccttgtcgtaacaagacaaataacgatttttccgactctcttcattcgatctctctccctctccctctctcgatcggaaaagtttgaatctccggcgatcttctcaagatg

SEQ ID NO: 25878 - DNA, 3003 bp, Unknown
  misc_feature (1)..( 3003): 2750-1469P.txt file - cDNA_ID_2708769; gDNA_ID_2214564; Annot_ID_134916
gatgagacgggtttccagttaccaaatggacatttctaaaagagcattatagaagactctgttacctttagtattctgctaaaaagatggtcaagatctcaggtacaagttctagatgataagcggccaacaaaaagacgagtgttcctatagctatcatcataccgaggcattttcaaactacaaagttaaaaagggacaaaaagaaacacaaattttgatcataacccgtaagaaactatacaacaagaaaataacacttctctaactcaagacataagaaaaggccccaaaggaaagtaaaacttcaatcaaacgccactcagctaattcagagacaaggaagcaattaatcggaaaaaccgaaggtccgaagctaaggaaaccatcaccggagatacatcaaaccaatttaaaatcatgaatcctagctcggaaggcactaaatttcaatctaaattatcaaattcaaaagatttttgatacctaagaaggtgagcactgcgaaatcggaagccctaattttgaaacaaaatggggaagaagataagacgacaacgattgtttttaaaataaaaatctgtacaaataaataaattaatttgaaaatattaaatgggtgtaggagtactaatcggctcaacaaaagtttattctccttgactaatgggccagtgacttaccaattttaacatctactatcttaataagaaaatgtgttggaaatggtccagaacctctaggacttatactttttgtagattactacatctattttttttttaagttgattatgaaattttaattattaaaaatatattcatatgtcaaatctattttggttataaagcaaatgaaaggtgataggattacttatattttgaataaaatggcatgagcttgcatatttgttagagagcttgaattatgggtcacttaagtaaattttaatttataaactgtagttttgtatagaaagtttaaactgtttaaaatttaatattctttcacaaatatacacatttctattataagtttataactattagacttctaaaactgttaaaattatttgttatcagcaaaatcaaactatttatataaataaaacattaataaatgatgcaaaaatcgttaaatctttaaataaccaaaatttctattcaaaaattaaaactaatcaaacaaaaataaaagtatgtactaaagtaattttaagaacaaaataaaaatttccaatgaaatgttactacattatggctctgattggtgatgacaaaaagaacaataggaatatgaatgaaaaagaacaaaaaggaacaaaaaaaaggaaaatagtcataagtaggaaccaagaggaacataagaattgaacaaaatgattatggtaaatggtaaccaaaaaggtgaactaatatttaacataagaattactaaaaaaatcatttattgaattttgtttattaatttcatttaaaattaaagttctgtatgaatttaaaataaattaaattataaatttctcttcaaaacatttatttattttatagtaaaaatttaaattatattacaaatttaaaataaatttcactttaaaacatttatttatactaatttaaaataaattcataacattcattaaattgaaagtttgataaaaaagtatatatatatatatatatcaatatatactaaagatatagaaaatattatatatagaaatataaatattatcataaagctattttaaattgatttaataaataaaacgaattttatttttttgctcctcttggttcctgtacaattttggggtggaacaattttgttctatcattcctttttttttgaaaaatgatgatgaaaaatgtaggacccacatgtctgaaaatggaacaaaaatacgttgtaaatggtaaaaaaactaaggaacaaagaagaacaccactttcctactcattcttttcctcaaaagtggttatcaatcggaacctatgatatatatgtttttatataattcactaacaaaaaaaacaatcttaactaaaactttttgcaaacactattatttttacattaccttccacacatcttatatttttaaatataatgataagtgacaagtttatgatatatatatatatatatatatatactataatttaattcactaacacaaaaaaacatatacaaactttaataaaaaaccatacgataatacttacaacccgcataatatgcggtacacaacattagctattgtgtcataaataacactatacatttttctatgtacattataatttatacactacaatatatatatcactaaaaattattctaatatgtttattagaatataaaatctccaagtacgtgcgggtcagaatctagtttgttatataaaaataaaaaaccaaaatgtaataaaaaaatttataataaactctcataaaaacgaattaaaaaacattactacgttaaaataatcttaaacttcaacagtcaaattataataatgtttataaatatatatgatgatattcttagaatcaaatctcgattttggtagatttcgattcggttggattctcaacatttctttcaaattatctatgattttttttctttctttctttttttaaacatatctgaactctagaacaagcgaccgtgagtcataaataaaaggaaagagatccaaaaatataaatgcaactacttgaaatcgactaaatatatcgaaatcacgtgacaaatcagcattttatttattctattaactttatagttggttccacatcctttcactctattcgatgtattgtacacatctggcacaaatctgcatctctgtcttcttcttcgatcctcgatttcatccacaatatacaatagccaaatttccgattttctcctcactgaatctctagaatccatcgttgattcaaactcattttccgatcaaacggcatatttttccctctcgagagagcgataatg

SEQ ID NO: 25879 - DNA, 3003 bp, Unknown
  misc_feature (1)..( 3003): 2750-1469P.txt file - cDNA_ID_2708773; gDNA_ID_2214545; Annot_ID_134565
gtgaagcccaaattcaacgtgagggaattgaagccaatcatgttgcacccgaaatagttggaggcgatggagttgcaaagcgtggagttgcagaagatggagatataggtgatggagttgtagaggagatagtaaatgaggagggagaaggatatgatctcatgattctagtgttgatgaagatgattgtccggttattgtcgaagataatagcgggtacagagaggcagaacaatgtttggctgaaaatttagaggaagaagaagatgaatttgttgatgttgaaatctgcaataacttagaagaccattttgggtttgatgcgtgttaagatgatgctgttaataaatctgatgaaagcggagatgatgtttgggacagcgagaagattccagatccattatcagatgatgatgacaaatatgaagctgagaggccattcactcatggagaccattccgatgaaccgctagccttgaataatacaatcaacaatgcagacgaattcaagtatgcactcctcaggtattctctaaagactgaatacgatatcaaaatgtttaagtcatcatcgaataggcttggggcaaagtgtacacaacacatcaaagaaaagtgtccttggatagtgtattgttcttttgagaagaggaaaaacaagcttttgataaggagattctataataagcatatttgtgtaagatccggttaaacaaagtttttgaaaagtggaactattgcacaactttgggaagaaaggcttcgattgaatcctaaaattaaatctcaggagatggtagttgaaattaagagggagtttaatatgattgtgactgtgcatcagtgtaggagagcaaaacaattgctaagaaataaaagaaaggctagtcatgaatcacattttgcttgcaatgattctataggttatatgtttgttttgatgcattgaaaacagcttggaagaagtcttgttggcctattattcgtttagatgatgcatttatgaaatgggatatcaaagggaaaatgttagttgcagttggtaaagatggggataacagaatatttccaattacttgggcagtggtagaggtggaggatattgataattagatgtgttttgtgcaactgttgaaaaaagacttgagtcttggagatggagctgacattacaatgatatttgataaacatcatgtaagatttttggttctcgtaagttaaatgcaagattttatgatttcttgtgttggatattgatattatttacttgtggtgacaagatttattaaatgcagttcgtgatgagcttccccaagctgaacacagaatgtgtgcaagacacattttggaaaattggaagaagacaaacaaggatattgaatttgagcgtctgttttggaaaatagcaaggtgttacacatcacaatcctttgcaatatagataaattttgatgactttaattttgactataaaaataatattataaatgacaaatttaattacaatttattatattcatatttcataaaaaaaattatattatttatttactatcttcaaaaaaataaacatttaagatagtacttatttagttattgaatgtagcagatttatagttggaatatgtaaactgcaatattttacatgcatgccatttcaatatgtgtaaaacattttgacagacgatgcatgacacatatctctctcacaaatttccaaagtccttttaaatttttccacaacttctatttatatatatttgattatttattctgaagaatacttttagaattttatttatcttcatatttatggataattttggtatatttaaaaaatgagaaatgaaaaaatatttaacaatgtggataaagatcttctagaggttctaggtttaacagaaaaaaaaacaaaatcgtggcagttagctcaaattgagttccatgttgataattaaggttttcttaaaccagataaaaaagtttgggttagaaagatctcacataataatatatttatttaggattttggtgctttgtggacggatcacagagagaaaacaataagttttcaggaacagtgtggttctatacatcatcaaatacagagttgccaactatatgacgcgaatctctgtagaagtctatctctactccatacctaagtcgaaggtctactctggacgataaagtgtatgatttgtcccgaaaactaagatttagcctttttacggacagttcaaacctggtgaatatggtgtctttcccaaccgaatggtcggcgtttcaacatatttggaggattttcaaagcgacaaagaagaattcataagcttctttttattattaatctctcacaatgcaaatgtaaaagttgataattcggtatgaaaagttcgaaccgtttcgtatcatttatgtaaacaatattcctcaaaattggatcttttgaactctaaataaaaagataattaaaaaaatgttcatctatgatgagctacatatattatattgtattagcaacaaacctcatgatacgttcaacgtcgaaaatacacattctaagtaatagaaaaataactattaatattcccatccatgttgaagaaaatataagaaaagctaagaaactcaaaaagaagaaataaaaacaccatagaaaccggaagtgtctaaaattccaccacaaatctctaagtgactttctcaaaaataaagacttcgtcaacacaaactttcttttgatagaccacaaaaatttcttatgttgtctattcttggtatgctttgatagagacctctcctcttcaacactcgctctctctctttctttcctttttttcctctatcatttcatccatctcagattatcttcgtttttcttcatctccagagactctccttccatctacccttagagggcgcgcctcccgtgcgccttcttaactggttatggaatccaaatgtctcatgttcgtttccattgtatctgtcttcttcatg

SEQ ID NO: 25880 - DNA, 3000 bp, Unknown; identical to SEQ ID NO: 12380
  misc_feature (1)..( 3000): 2750-1469P.txt file - cDNA_ID_2708783; gDNA_ID_2214546; Annot_ID_134593

SEQ ID NO: 25881 - DNA, 3000 bp, Unknown; identical to SEQ ID NO: 12380
  misc_feature (1)..( 3000): 2750-1469P.txt file - cDNA_ID_2708783; gDNA_ID_2214546; Annot_ID_185432

SEQ ID NO: 25882 - DNA, 3003 bp, Unknown
  misc_feature (1)..( 3003): 2750-1469P.txt file - cDNA_ID_2708799; gDNA_ID_2214546; Annot_ID_134583
agacatatcaatccatccacggaagcggaaagaagcttgttgggcttgttaggaacaaagtgtacctataattaagaacagagttgacatctataaactaacaacaaactagttcctttcccgcttgagcagaaagaatgagagagcaacaaacctgagtgacgtcgtccatgtgggattcctctaaacaagcaacttgctttgagtttctccagtcccacaaaagaacctgcaccatcgcttcagattgtaacaagctgaaacatagaaaatgctcaaaactagccttttttctttctcaaagtgtactcctttttaaacatttagagaaacaaaaaaaaaaacacgattccacaggattgagatgcctaacctgctctttgcatccaccagccagaagattatctgcagcacctccataggagaagctgaaaatctcctgatcattcccagtatcaatacgcgaaacctgaaacacccatgatcaacttaaattcaatgagttccgaaaatggaatcacatttacgacagaatttatataaaaaaaaaaaaactcacctgttggaaacttcgagtgtcccaagatctaatggtaccatcggaggaacaagagtgcaaaacgtgaggagacgccgccgagtcggaggaaaacgcaatctgattgacggtatcggagtggcctttacattcgccgtagtactgaccagtcaccggcgagtaaagcttgacggtgttggttgataaggaaaccgcgattgctgtccaatcgattctgtcacaaaaccagagttgggttcactttcagtaaactaattagtatggttatcgaaaagagagaacagaaagcttttactttgggacaatctggaagacgtagtcagagccgaagttggtctgaatagagttcttgagcccaaatttcttcacgttttgagccggagaagaatccgaaagctgacgattttgaacctccacttccatctccgacgacacttcttccatttgccgtttcagcgaaattgataagggttttaacggtctagggtttgttcgttgatcaaaacgaaacgaggattagcacttacctctctaagtcatagagaaggttataactctataggtcaaaatttaggcctgttttaaccttttcggcccatttaacgcacggtccaatacgattattagcccaaggaaacaacaaccaactcgctcgctcaccgtgcgcttcttctaaacatgtccatagaaacataaacatactaaaatgtgaaaagattaaattaaaaaacggatagaaacatatagaaagccacgtgatggtagcaaacagatttagtggttacaaccagatatcatttgatattgagatttatgaaaatgtcctttttcaatggctccgatcggtcagtgatcggatctaatattataaaggtgtgttgacccataacataatattattactaatacaagtaacatgcggtaattaactctatgtcgatcttttttctctgcatatatatcttttagtcggttttttcgttcttgctaatcgttatattcctctacacatggcaatggaaaagaaacgagtaacaacaacaagtagcctgcaaataattaagtgcgataagacaactctgctctgattggaaactgatattccggcccgtcccccttttattacgtaggagtaataaaattgggaacgtcaacttatattaatcatgacgacgttttctcaagggagcaaattgtacgttacgtctcatattatcaccacttttttgcagcaacacagttttatttcacacaatacaacaacactttatattatatatgagagtgatagaattttatcattccatatttccatgatataaagggttccaataattggtccaatttttctaataagacttttcttattctcatagactcttcttattcatctttcttaatcaattcgaccaactcagtggaagacaaatctcacacgaccctttccactttttggtaactttattattaatttattagtatggtgtagttcctttctttcttctgctgatcttgtcaacaaaatactaaatttttcctaagcggctgtttatatattattaacaaaggtttccgcgtgtctcttgtttaactagtagactaaaaacaaatcgtaaactcgattttctcaaccaaatttagaagatactacggcatgtaattagctaatgataaaagattcgaattttcgttccaatggatttgtcttttcttttgcccaaaaccaagaatttgtcttctcttggcagtatttagctagacaacgcatatagctatatattttgtgtacactggtcaaggtcgtggatacgtcattaataatattatttccaataagtcctattaaaacattaaacaactttgagttttaaaacaaacttagtgtaaagaaaataaaaatagcagacagtttacgggtaagactagatgaccatatatgattgagtgcataaaacatcttttttctttctttttttgaaaaagcgaaactaaaagattattagttgttggaaatcagcttagcgtaatcttcgagaaaatgactctaatgctaaaatactgatttaatcaattttctaatggtttgacccaacagacttttttttttttctatcctctaataatatataatcatatagtagtaattatttagtagataatatgattaacacgtgaatagcaaagtttctatcatttttattcaaaaaaagattcataagtaataaaatgatagtcaacttttctttttctttttgtgtttggccttttgttgcagcgtcattgttgtacaccaccagtcacactattgtgggatgtgataatcggtaccttttaatgtcaggagcttctttcttacattttccacttcaaacaaaccgataattcagaggaattttctcttcctctctctctctcttttttatattttttcactgggaaaaatg

SEQ ID NO: 25883 - DNA, 3000 bp, Unknown; identical to SEQ ID NO: 12370
  misc_feature (1)..( 3000): 2750-1469P.txt file - cDNA_ID_2708814; gDNA_ID_2214546; Annot_ID_134569

SEQ ID NO: 25884 - DNA, 3003 bp, Unknown
  misc_feature (1)..( 3003): 2750-1469P.txt file - cDNA_ID_2708822; gDNA_ID_2214546; Annot_ID_134601
tttgtttcttagtagaaaataatttggctcctttgtagaagaagaaaaaaactaaacggctttaacatatggactacgccgtttgtatcttgttgttacaaaccattaaacgttactgtttgatcaatatgttaattcagaactgtttggtttaaagcataagtattgaagtcgtcaaatgaacaacttgcaatcttttgctttgtatgagatacaaataaaatcgtggtccgtttataaaatagctttctccaaacaatttcaattcccttttaactaacacaacaaacgacccggcccgtcaaaagaagaccaacagacgatgaaataaaaggaaaaactcaattttctaaactatttttgggggtcgtaaataagtgaaaagcctgccgacgaaaaaagaagaagtgaaaaaagaagtgaaaagcccttgtcttatttgtcttttactatttttctgatttaaaataaagaaacaaacatttacagtatttgtttataacgggggctaagtagagaatcatgagaagattaaaatccctaaaagttttgggggaaagaagaaagaaggaagacgatgatgatgctcagaatccgaagcagagatggactggagagagtcacagcggagggagctcatatcactgtttcccagctcaaaaccttgatcgcggatcagcttcagatccctctccataagcagaccttatccaccaatcgtgatctcctcctcgccaaaactcccgctgatctactcgccttcaccgacctcacggacccaaacctccccctctcctctctcaacctcggccatggctctatgctctacctcgcctacgatggcgagcgctccattcctggagctcctcccgttactcctgccggatccttcgggaggaagatgaccgtcgatgacttgatcgcccgccagatgcgcgtcactcgtcaggagacgtctcactgcgactccgtctccttcgatcgcgatgccgccaacgctttccagcactacgtcaatgagtctctagcttttgccgtcaagcgcggcggctttatgtacggcaccgtcaccgaggaaggacaggtggaagttgatttcatttacgagccgccccagcaaggcacggaggctaatcttattctgatgagagatgctgatgaagagaagcgcgtggacgcaatcgccatgggcttggggatgaggagggtcggtttcatttttaaccagaccgtggtgcaggacaagactgaatacactctgtccaacgccgaggtgctacaggcggcggagcttcacgccgagagcgagctgaaggagtgggtcacggcggtggtgaagcttgaggtgaatgaggatggtggcgccgatgtccatttcgaggcgtttcaaatgagtgatatgtgcatcaggctgttcaaggaagagtggttcgagacggagattatgccggacgatgatccaaagctctctaagatgaagaaggaggtggttgttggtgtgaaggatcttaaggaggtagataacgatttcttcctcgttctcgtcaggatcttggatcaccaggttcgtgtttttctctctacccttcctttgcatcaatcatcattgttctttgtactaatgctctgcttgggcaaataaagtaattgaatctggagcttttaagtcttaggttaatgaagcttgtcagtgtttgctttccatgagataattgaaaattagcatttcgtcaatggtccctgtgttttaacattaggctgctgtgatcaggggcctctgtcatcaacattcccaatagagaaccggagcagtcgagcaacgatgcgggctctaaaaacacatctggaccgggcaaagagcttgccgttggtgaagaagatgtcagattttcatctgcttctctttgtggctcagtttctggacgtgtcatcggacgtccctgctttagccgagtgtgtgcgtctgcagtcgcctgtcccagagggctatgcgttgctcatcgaatcaatggccaacacttgttaatttttgtgtcattgttttttggttcttgatacagtatatcatgttcgttttatggtccagaaaatcttttttactagttgacaaatgaaaaatctctagtgtactcgtgatgtatttgattcaagtttgggggttaatttaagttatcaacaacttgtagaaacaaagttaattcacagagtaataaatcattctaataggtatgctcaggggcaaattggcaaaacataaaaataaaaagagagctactaaagttttcgagcgaaagcgaaaatgaaaattttataattcgagcgaaatgttaaaaagctgaaaattgggggaagaagagagaagagtttcatcgtcactggaatcaatagagtcaattggcgggagaggttagtctcgaaaagaagtggaagccctagggggaaactttctcgctcactcgctcgtctgcaaacaccatggaagacagtcctcaaggccttgtgagtctctctttgcttgtttgattttgtttgggaattttggattactcttaagtttttctgctgggcgtgtagaaaaggagtagagatccggatcaggatcaggatgacgacagcggcgaggctggcaaggccgacggaagcggcggagagaatcaggagcgcagcagcgaccagattgagctcgatgacgacgatttccaggaaacccgtcccaagcccaagcgtagtcgcacccatcctcctcaacagaatctcattggtacaattcatattcctaaatcgctccaagctttgtgccaattgattgtttcctaaattgattgattgtttttcttagagagcttcatcttgtttgtttgggtagatctttcagctttcatattttttttgctaacagaggttgtcaaaggcaacggggatcttatttctaaagccgtcaagatttgggttgaaagatatgaagactctcccagccttgctaccactgagctcttgtcaatg

SEQ ID NO: 25885 - DNA, 3003 bp, Unknown
  misc_feature (1)..( 3003): 2750-1469P.txt file - cDNA_ID_2708826; gDNA_ID_2214546; Annot_ID_134588
agcaacatatatagcgtgagtacctttggtgtcctgttttcagtccggcattgacaatcattgtcgagacaacaaggccagctagaggatctaaaaaattaactccgagaatagaacctcctgcacacaagtcatatttcacgatttatgagaacttcatgtctccctttatcagtagttccgtacaatagctggaccgatgagagagacttggtaaaagtaaataaatggaattcagagatctacattgtctccagttctttagtagtagccatatgcgtgaccaggtctgggatattgaaacaaaggatatagttgatttacatatgtactgattggaaagaaaagcttaccaactccaacaagtgcaactagagaagaaatagcatctgatcgatgatgccaagcatttgccatcatcaaaccactcccttgtttttcacctgctcgttttgtgatccaataaagcctgagaaacataagattcagggatgaaggatcaaaataagtgaagagaatagggatgaaggatcaaaagaaaaggggcggtaggttctgagaagcaagtctaactaaagtgaaaatttgcaattgtctagtaagaagcgacggtagagcaaaagctgtagacgtaaagcaatggggtatgataaacttgattggattgaaaagagtgataaataaagtgatgtttgtacccttctttgatagaaatggaagcaatagtaacagtcaaagcgagaatgggatgattcatatcaatgccgtgatgatgtccactatgaattacctcaggagctgcggacagtgcaatctgcaaatgagaaaggaagggagaagaactctgtaaattgaatttattatatcccaaataaaacaaacaatggaggatcgataaaagataaacatgaagtgcaatatattctcatacaatgaagcaaggttgtggaggtggagatgagtaattaaaaaagaaagagaaaggagagagtggtggtcatacagataaaaggtctaaagcatgccaggcaataccagagccagtagccaaaagcatggcagagatgccaagtgctccaagcgtttcaaatttaccatgacctgcccttgtatgcatggggaaattcagttcattgttattataatgtatttacatcaaaggaaagagaagagaaaaggtaaccataaggatgttctttgtccttgggaacatttgcagctctgtaagacactagagcaacaccacttagaacctgagatataatgatgatgatcatgtgagaaacaaaaccaaaggaaggatcatctctcgtcctcagcaaatgagaattttcattaccacatcggaaacggaatgagcagcatcggcgataatggcggtgctgccgcagagataaccggtgagagcttttgcgacagataaacctatatctgcggtgagacctagccggaatatcttctccccttcttctccaggcttttgatattgctggtgatgatcagggtgaccaaaatgccaccttctggagaaatcgaaactaggtttttgcgatgaagaagaagatactcggagtggtgatgatgatgatgatgatgatggcagataacggcaagacatataatatatagtagacctacaaatcctcgtcggattcaggatttgaaatctgataatacccattttgatttcagctgagaaaccctctctccctcttttctccgatcagtttcccaaattgacttctcattcattgcgcggtaagatagacggcgctcatttttttaccgtttacttagttaccttttcaccgacgattgtaaaattatactcagtcaatgatagcttcattaaaggccccccatactgttctttcatattgggccaaatcaaatgttgggagtataacaaaaaatattttttttaaaacggtaatggttaattaacaacactgattgatttggtctctcttataaaccagaaataaccgattctagaatcgaaaacccgaacactgagtgaggtagatattggccggaattagagttgtctaccggcggcatcagcgacaaatggaatgtatggagttttgccgagtaaggagctgacgactccatacacaaaacacataaagctgaagacgaaaacccccgtgtgcccccacatcatcgccttcattccaaacccgcctccttgacccggatccagtattcgggtcagcagcaccggaaccgccaggagcacatccagcgtcaccgcctgcatcgcgttgaacctcacgtacctactgaaactcgtgttcctcaccactcccaggtacagcccgaagaatgccacgaagctcgcgtacggcaccgatctgtacaggttcaggattgggaagattggctcgaacagcaatcccagccttgggtactgcgcgaacaggaaccgcccgtactgcagagaattgaagaacggcagcgcgtacgacgctatcgaaatcacgcgctcagtcgccggcgtcggggtgtaggaggcgcgggtcgtcaaggcggttgcgcgtctgctagaggggcggatcgagaaggttgaggatccggggaaggagaggctgagtggtctgcatctgggagccgacaggggattagttagggtttggtggagagaaaggcacagagacgccattcttttatttttttgtttgggattttcgctgtttagtcggcagtgtcgatttgttgacaagaagagcaaaaaaaagtaacagctcaaacgctgccgttttcgaatctaaaatttggcccgcgcacactaacaacataattgggccgacttagctatataaatgggcctatatatggtactagagggcttcgtgaacaacagaaggtttttgtggcgccgacaaatgggaagcggaaacgaagaaatgtgatggcattgattgaaggcgagtcgagtcgagtcagactcggtcagagcgagttgagagagcagttaagaaacagtagcaggtagaaatg

SEQ ID NO: 25886 - DNA, 3003 bp, Unknown
  misc_feature (1)..( 3003): 2750-1469P.txt file - cDNA_ID_2708847; gDNA_ID_2214547; Annot_ID_134612
catcattgttttagagagggagaaagaaaaagagctcagctttctgatggagaggagtattcaaggacaaaacaagctctgtgtaatgtatcttatctcaatttggaacgttactagtttttatctttcttgtaatcttttctttcaactattgattcaaagatgtggacttgcatttactccttccaaaagagtccacaatggttgcattcaatgctatatgtgtttgttataccaaaaacaccaacaaatctgctctcaactgtttccctctctttgaaacattccatttttcattctaattttgtttcgctagactgacccactaaccaaaacccacactagtctacccaaatttaatatctctcttctcaatctcactttctcttcttactcacttggtaggtaactccttcccctgttttttcttttgttgcagtgtttggaccaaaaagtgaatgtgagaagaagcctacaagttcaagaaactgtagaggatcatcaaagctttgcccttgaagaggaagaacaacaactctcaactccgagcttgctgcaagacacaacaataccatttctacaaatgctgcaacaaagtgaagacccttcaccgtttttgtcattcaaagacccaagctttctagcactactatctctccagacacttgaaaagccttgggaactcgaaaactacctcccacatgaagttccagagtttcattcaccgatccattctgaaaccaaccactactatcataatccatctttggaaggagtcaatgaagccatctcaaaccaagaacttccattcaacccactagagaatgcgcgttcaagacgcaagcggaaaaacaacaacttggcatcattgatgacaagagaaaagcgaaagagaagaagaactaaaccaacaaagaacatagaagagatagagagtcaaagaatgacacacattgcggttgaacgaaaccgcagacgccaaatgaacgttcatctgaactcactccgctccatcattccatcttcatacatccagagggtataataaacaaaacccacaaatcaaagttccaacctttatcaaatgtcgaattttcttaactaatatctctcgtagggagaccaagcgtcaatagtaggaggagcaatagacttcgtaaagatcctagagcaacagttgcaatcccttgaagcacaaaagagaagtcaacagagtgatgataacaaagagcaaattccagaagataacagtctcaggaacatttcgtcgaacaagttgcgtgcgagtaataaagaagaacaaagtagcaaactcaaaatcgaagccacagtgatagagagtcacgtcaacctaaaaattcaatgtacgaggaaacaaggacaacttctcagatcaatcatattgctggagaaacttcgattcactgttcttcatctcaacatcacatctccgaccaatacatctgtctcttattccttcaacctcaaggtacttacttatataacaaaaaacccattattcaaaatcatcgacaatggtgaaaaaattcaatcttttttgtttgttgctcagatggaagatgaatgtaatttgggatcagcggatgagataacggcggcgattcgtcagattttcgacagctgattgactaatccaagtaaaaagtaaaataaaaaaagaaacgtttactttggtaacttcgttttcatgattaaattctttatttggtcgtatgtgattggagtcttctcggcatggaacttgactttggttttagggtactagtctctacagaagctgtggtccttctttggatagatttataatgaaagtttgacccctctctctttttttattgtctttttgttttgcttttgcctctctctcggggttttgacttttgtatcataaaactagaatataaaagtttacaaattatatttatctataaaatatttttattttatactttacgattgttattaagtaacgtcctcttaaattcgtcccgccaatctgtcccgtaaaaaaaactcactgattttatttatgatatgtttatgaatcattgtctaaatattttttaattttgtagtaattaaatgctatctaatatctctgcgatttgatgattataatcgaattattatagtcatgtagaaaaacaatatcaaaaatgataattttgtagtaattaaatgatattaaatatttcagaagttttattttagtaactaatcgtgtagttaatgtggagagattttgggaagattatcaaatatttaattcaaagattttctttctaattatcaaaaacaattattaaatgccagtggcagccactgtaaataaatctcaactctaggatttatttcacaaagtggctgcaaaaatgtatatataaatatctaatctttacttagatggcatgggtttgaaaagttctgagtaactgataggcccaatgactaaaagcccatatgtgtttctcatcataatggaaggcctacaagtagaagaattcgctcgtgtttatgaattatgatcttgattgtaatcttattatcaaaaaccaaccgtaaaagtatatgaattgcgtatttgtaaattgtaattattatatagtattgagattgtgattaaaagtaataatgaatttgttgaattattattatagactatagtatagtagcaagagtgaaattttgttttcaagaattgagtcctaattttataaaaggagccaaaaaacccaattctatctaatccaatgaaaactccaagatcgtctctacgtccgccacgtcagcactatcctgatcgggaaacccaaaacgagtggtcgaatagtttccgactggtaacagagaaagcatctccacaatccccaaaattctttcaacacttgctctccattaatcttttagataataaacctaattgtttctgttttgtttttgtttctgtgagattcttccgaggcttgaagctcaatagctatg

SEQ ID NO: 25887 - DNA, 3003 bp, Unknown; identical to SEQ ID NO: 25886
  misc_feature (1)..( 3003): 2750-1469P.txt file - cDNA_ID_2708847; gDNA_ID_2214547; Annot_ID_185470

SEQ ID NO: 25888 - DNA, 3000 bp, Unknown
  misc_feature (1)..( 3000): 2750-1469P.txt file - cDNA_ID_2708857; gDNA_ID_2214548; Annot_ID_134616
gacttctcctcttcatactaaattgtcgaaatgccatgagctcacttgcccttgcactgcagcttaacccagttaaggccaaagaacttacaaacattcgctctgctgggaaagacgaaaatgtgaagctatctccacctcgtcttgtatgtaccctttcctcttttaacatgacataagaaaactgttttcttgatcagaaaattttcttgccctttgtggtttaacttttgaattcttgtctattcagatgacacttgaggaagctataggatacgttgcctcagatgagcttatagaggtacattgttcatcaccaattccaaatctagctaatcatattatccatgacgaacattttgtttccggcttcctatgcatttactgttcttggtttaatgttgtactgttattggtttaatgtggtcaggtgacaccaaagacgattcggttgaggaaaagatgtctagacgttaacaagcgtaaatcccagagcaaacgagccaaagactaaaaagttatcttccacacttgactctctggtacaatttttatggaagctggtttagttcttgtcacaatcctagaaaaagaaaattattgaatatgtacgagaaacattcagattatatactagattcgtaacttatacgcaagaagatgcattcttgtattgataacaataagaagatagatcgatcccgatgctgtattatcattgtggaccaccggatttatcatcgttataaagaaagttttgttggtggccttggggtctatttaacgacccacatgacccaagttatatttttaatttataactgattccttttgttccaatcgtcgttctaattttatctcatcaaaagcatgtgtctccatttatgttaaataacatggtagtagaaactttaaaaagttaataactaatgttcagttcgagtatcatgaaaatatccaccgcacagtagtcgccagtttggttatgtcactccagaccaagcttaagccactccagacacaaggacttgaggccgcattgtaaggaagtgttgcaatcgttgcatcatctactggaagaacctcaagaggatcctctaaaggcttaggactaggagtaggtttttgattagaagaggatgggttgttaggttgaataatgggtgtattattctctagaaaaaactacaaaccaaagtctcaaacgtacgtaagaagttaaactaaaagaaaaaagacaaaacgtgtgtaaatatatcaaactaagatgagcaaagaaagtaaaggaaggaagcagagtccaatccaaacattagagtttgaagctgcactatgtggagctggtgatggtcccatctgatactgtactggagcatgattaaccggtgactcagccaacggagactgtgaaggagacgaaaaagagcttggtggtcggacgggtccaggaaccggagcagcgacaggtcccaatgaggctggtaatacatggatttgaagcttttgtcccatgtcacagtgaccaggaaatccgcatatgaagtgttggagtcccggtttggttagaatgacgatatcagacccggtctcgtatcttgctagcggtttggacggttcacacatctcgtaatcattgtgagtgacttcggtgacgtcgtggaagtctttgttgtatttgaagaccaaagagtctccaacttgaaaagttattgtagatgcccatgtctcgtagttgacgctcataatcgtccatccgtcggagtcaccaactttgtgaacggttcctccaacggaaattccaaaaagtgctacaagaataagcaaagaagtaaagaaggcgttgcttttgatcaaagccatgatcgattgttgtttgaaacgagagaattaagcagcaaagaaagaagaaaacaactatgtaagagatattataaagttttgagtttgtgttggtgagaagttgagagagcactacgttgtttatatagacccgaggtctcgtttaaggtaacccttttctctttaagaatttgacgattttatatgtttttctaaatcaaaaatatattatattttgataattcctagtgataattgttaaggtcattttttccctttttgttaaatatatccagaaatttattaattcttaaaggtattaatttattgagagattataataattttgtaattatttttaaaaaattatctcataagaagtttttttttgtaattaatatctttataaaattatattacttattaaattttaaaaacacacaaactttctcgatgtaataaaatattagaaatgaactatttcgaaaattaatacaaatttaagaaaaatatcatatttaatttttaccaattgtttatttcaccaattgttagagtcatatttagggtctaatttatactccctccgtcccatgaagatggattttttagaaatttcacattctttaaaaaataatatataatgacaattttaatctcttaatactatttaaaaataattattaccatttatttaattatttaataagggtaaaataggtaaacagttctaaaaattacattggaaatataaaaaattatttttgtgggacaaatttttttcctaaaaaatttatttttgtgggacggaaggagtattctttaacacacatacaacgattaggatttatatacaaaagatattatcttcttttaattaattaattaatttatttttatttatttatttattttttaattattgtaagttaagattccattttcgcatctttttttttccgaatttccttttttgtaacattttctcaaatttttaatgaaatgtttgtttttttggtgggaatatttaatgaaaatatcacgaagtccaaaattgccacaagctgagatttttattttattttgcatcatcatcatcaatatcattcatcatcatcagacatcaggtgcgtcataagctccacaaaaaactcatccatg

SEQ ID NO: 25889 - DNA, 3000 bp, Unknown; identical to SEQ ID NO: 25888
  misc_feature (1)..( 3000): 2750-1469P.txt file - cDNA_ID_2708857; gDNA_ID_2214548; Annot_ID_185482

SEQ ID NO: 25890 - DNA, 3000 bp, Unknown
  misc_feature (1)..( 3000): 2750-1469P.txt file - cDNA_ID_2708871; gDNA_ID_2214549; Annot_ID_134644
gaacaacatataaggatggatagaccaaataataactgaacaagtgaatggttcgacaattcaaaacgtaaagagtgctgacacaaagttaaatttagtaacagcagacaatccattgacatgaacaatatgcaaattcagatcaacttcagcaaatacagacatggaaagtcattaatatatgagatctattttcaaaagatcacttgctatttctttaccttttcttcaatctcaactcgaagtcgaaggcattgataagcctttgcaaactcagttcttcaatcttctcttgaatctctatccattctcgataaaccatatgctttgattgattggagactgaccagaacaaacagctcaaaccctggaactatctgcaaatttgtagacttgctctgcctccaattctctctactgcttcaagtgttactgatgtttgtgtttgaaaataaacatccaagtttttttacataaaaatttggttcattattcaactaaaaatttacatttttacattattgtaaaataataaacataggttattaggttaagatgattcttatgcatgaagctaaaagaaaaattcagaactatcttttaaccatatgtttggaccaaagaaaacgaatctatatatagattagtcaaaaagaattcagacacaaatacaacaataacaaagcatttgagctctctctctctctatctccctcgtttcctctgcagcctctgttttttacaagtcagattagcttacttacttgggacagaagttacatggagagaccaagccttgttaattgtttatataatccggattggtctttttgtcatctctttgtttcgttttctgataatttgtctctaagatctttaagagcatcaacgacttcagaatcaagattgtgtttaagcaatctcccttggaaagatgttgaccttgtttcttgcatcattttctcaacctccttatgcatcgatttaatctacaatatcatgtttcacaaaatcaaaatcacaaacaaaaaaaaaagaagcaaattgctttggtgatgatcttcatacctcagaaaccaatgccttgctactccaaatataagctccctgtcaagaatcagtcaccaaaatcaaaaacaagatatgaacataacgagtttataacatcgatatgatgccccaataccgctccatgtgctgcttgttgttgacagacatcagatgttacaacccaaaccttggggcatccatcttctctcaatgcaaccacctatcaatatcagaaatgaagaaacatcaacaattattctcgtaaagccgtctatttgaacaggctttgggggtaaagagatcatttttccttgcctccttttcaatccaagcgtcagcacaagtttctcctgagaaaatcacatcaacactggccaaaaaggataaaactttttgagttgtcaaagtaaataaggatatcgaaaacagacagaaaagggccaaatgactgtaccctgcaaagtcttccttgtgagtaggaagaccagacatgagagcatcaaacacaaccactaccttaacctctacaacaatttcaaatcaaattgtctcattactcattagccatagatgaaatcaaatgtagattcgtccaaagtttgtacctttaaccatactgaaggacacaagttcatcaactaacttctgccgagcaacgtcaagccttcctttcatgaaatgtttctttaacttcatccaatatccacacacattataaccatcaacaagcaaaaccggaactgcgtcatccaatagaccttggttcgtgctgtaaaacccctttcagggaatcacaaacattccttaaactttcaaacctcaaaatacattctaaaaacaatatgaagatagtaaaaatagagtgtaattactagtaaagcgtatttgtaggatcccggtagagctcgctatcatccggtaactcgtctttctctactttcttcttcctgtaactagtcgctggcttagccatgccagatcctctgctctgaaactcctacaatatatatcatacaattccaaagattgtaacttagacaaattcttgaacactaataatgtttagacttagacacagtagtaatgaaacaaaaagatcacactactactacatgccttccataacttgagaagctgcaagttatgcttaacattggatttgattctcggtggttctggctctgactcctgccatcaaaaaccaaaatcaagtgaatggtttgcaaaatgctcaatgaacaattcatcatatccgtaactccgatactagagatctaaaaggaaccaaacagagaagaatttcagaattcaattattcaattcaaatcagtaaaccaattgatcataaaccaagaagaaaagactggcaaatccatttcagaatcaattcaaaacaatgaatgttatgatggattagttgatcacaaacccccgcttcgaattctcaactattttggattaaaaagagacttttagttctcaaagaagaaacctttacataaatgtgcatctatgtgtggaccttaaaagaagaagattgatgaggcttcttgctttttcctcccatcttcaccaccaaaactctacagctatcgtaagaacaagatgatgaagaccagttaaagtatacggcggaggaggaagaggaaccacctctctgcggcggcgctccggcggtcttcatctatttgactactgaagaattgaaaattctctcctttttttgaaaagtctataaaactagtggataatatcatgtcaacgttacgcttttgtatcaacgcattatatctttaagagagaaaaaaaaatccattttttacgtgtaagaaaaaaacaaaggatccttttttactggaaagatgttttttttttcttatcttctgagataaattgcgatagagagagagaacaaaaaaattctcagtgagcgcttattgatcaacaatg

SEQ ID NO: 25891 - DNA, 3000 bp, Unknown; identical to SEQ ID NO: 25890
  misc_feature (1)..( 3000): 2750-1469P.txt file - cDNA_ID_2708871; gDNA_ID_2214549; Annot_ID_185522

SEQ ID NO: 25892 - DNA, 3003 bp, Unknown
  misc_feature (1)..( 3003): 2750-1469P.txt file - cDNA_ID_2708879; gDNA_ID_2214549; Annot_ID_134642
tcaacagagatcatctgtcatcgccatcgctggagactacacgaaagaaaatgttcaatcgaaataaaatatcaagggacatattttttcttctctttcctctcaactaatagcaacttgccacgtaggggtccttagttgtcgacaaaatccctaaacatagaaacgtccctctctaataaactgattaatgatttaattttttgctatattactcaagagatcaaccctcaagagcccattaggaactgccgttgagcttggtctaagatttccggttcagtttgatagtattaaaattaaaccgagtgtatttggattaccaaaataacatttaacgttcacatttttaaaattttacattagcattgtactattgggttttaatatatggatttttgttttcaacatattattacataaaaagcattctaaactcaaatcaaaagctaaaacaaaaacaattgaaagacccaaatctgtcatggccattaggcatgactcgacgaagagaactacaagctttgtctagaacatcgttgatagcctaaagagttttaccataaataaaaggttgaattgccttcataaatgaaggggaaaaaaacacttttctaaagaaacttcaacatatttgagcgttcgaccaaagttggtcacaacttaatccttctgagtcatcagagagaagctacgctaatgtattgatcaatcccaccttctcatgactaagcttcacgcattcaaacaaattttaatcagcttatcaagacatcgtattgttgctcggatctcatctttagaggtattacaagaaaaaaaatatcatatcacactatttctataacaagttgttaataatacatgtcgaagtttaacatacagtgtttcagatagaatctctagtctcctttagttcctttcaaaatatgttcatacatggagaaatatatgtcttcaaagcgtttgcatcttgactatcatgaacaaatgatgaaccggacaatgctacatcctgatcaaaactagatgaatcatgagtttctatgatcacctccatgtccataaccaaaagaatcatgggcgtcaaagaaaagaaaaaaaaaaacactttatttcatatgatttgtagatttggttcttataatatactctttaaccaaattacagcggcaaaatttatatttttgtagaatttacactctaaaaaaatacaattttctaacattgatagaacatttagttttagtataatgaatattcaaacaaatttggaacatggagcaaagcgtagaatgcatgttccaaatattttaaaattttgatattcagacttctaaaaactttagaaacgaaaacttgtataaaattcgtagaacatgtacaaaaatataaaatacatactctatttttcgtagaactctagaaaatgtgttctgataaaattagacgaaacattttctatcaaaaaatcaattgcatctaatcttcaatgatttcaaaaacttttccattcaaattctctatgtaaatcaatcatatttttctgattattgttttaaaagtctgattaaaattagaacaattcttgggtttaccccctaaagggtgaatccattcattcacccccttttaattgatcaattagaattttacatgtaatctatttaaagaataaataaattaaatcacaaaatctaaatcttaactacaattttatcaacccaaaccaaaatatatttcgtttaatcacaaaatttaaactttaaccactattttatcaacccaaaccgaaatataatttcgttttaatcacaaaatctaaaccctaaccactattttgtcaacccaaaccgaaatataatttttttttaatcacaaaatctaaaccctaaccactattttatcaaccaaaaccgaaatataattttgtttaatcacaaaatctaaaccctaactactattttatcaacccaaaccaaaatataatttcgtttaatcacaaaatataaaccctaaccactattttataaacccaaaccaataattttcttaataaaaattctacagaatttgtttccttaatttgttttgttttactaattttaatttttatttattctttaaatagatgacatgttgatttctaatcagtcatcaggctatcaacaatggttttttcattcaacaccctccacgtcatcttcttttttccacatcatttcttctctcttccacataataattcaatacccacttaaattttatactctactatggtttgcttaataaaattcaacactctacccactatttttatttcatttttctttcttttatgttttaaatggataattagtaaaaatagatgtatttttttgtatccaaatcaaataaaacaagtctttatttatagagtttgaaatatggtgaattttaatataaaaaaaaattaaaacaaatatatattttataagataattgatctataataactcagaggaaaagtaaatatcagaaatttcagtaacaaataaaagaataacacatgtcctatctatatttaactcttctctcacaatttctgtctccaattatttaatgacaaatagcagtaaggggttcatttttaacaattcaaaattgttgaatccgttcaacaccgttgaatccacataagattcatttctttatttaatattccactgtaagcattcaattattgaattaattttttcaatagcccattgtatatagtcttaaaaaggggtgagtgaatgtgaatgaatggattgtattttcttaaaataatgtgtaagtcatacgtgacaatttcacaacaaaaatatttatatggacaaaagaaatttggtagacatatttgatattcccattaaaaaattgcatgagaaaaagaatatatatgaaatggtttggtttcctttctaaacaagaaaaaaaaaagtaatctccgaagaagaacaaattccttgctgaatcatg

SEQ ID NO: 25893 - DNA, 3003 bp, Unknown
  misc_feature (1)..( 3003): 2750-1469P.txt file - cDNA_ID_2708904; gDNA_ID_2214550; Annot_ID_134653
catccttttggtaagaactgcatcttttgaatgctattcttgaaaacttgtttggacttctagatgaaaagaaaattcgtttgaaaatgactcaatcattcggtgtttgttatgcttgacttgcaggcaggactatttttctatgatatcttctgggttttctttactccagttatggttagtgttgccaaatccttcgatgctccaattaaggttagtaaaaatgcctcaaaagtacacaccataccaaattgattctgatttgttcttagtcaatttttcagtaatctcattgttacatatttctttcagctcttattccctacgggtgatgctctaagaccctattctatgcttggtcttggtgacattgtcattccgggtatgttctctaatgcttaacccaatagctatattcagcttatggttatgcattcttgaatcatatttttggatatgatatgaatataagatattaatttttgttttcctttaggtattttcgttgcactagctctaagatttgatgtgtcaagacgtagacaaccacaatacttcacaagtgcatttatcggatacgctgttggtgtgatcctcacgattgtagtcatgaactggtttcaagcagcacaggtcagtttttgtgtcttaattgttgtcatctatttattgcaaccttattttgggatttctctctgataggtttttgtttttgttttgcctttgtttcagcctgctttgttatacattgtcccagccgtaattgggttcttggcttctcactgcatttggaacggtgacatcaaaccggtttgttttctagtccttctagatttcgatgtatctattgttgtaaacgcaattatgcaacccaaacagaagaaccttcctgttaccttctgtttgcttatcgtgtttttggttgtagattaagatgtaaaggattagtgagcttatggtcttcttcttcttctttgttttgttgctgttgcagttgttggcgtttgatgaatcaaagacagaggaagcaacgactgatgaatcaaagactagtgaggaggttaataaagctcatgatgaatgaggaaaaatcgagaaagaagggcagaggagaaatatatacacataaatgtgtcttaatatatggaacaagaaggaaaacaattttgtttccaaatgatcatcaatcagtcccttctaaccccttttttgtttttttagattttcaaactttcttttggccaagacttgtgtaagttactataagttacaacaaattttctttgacttttctttctgttttatgttaaattcgttaggagactggaagttatatatcatttcgaacagaattcgaaatatgagctttttagctattgtagacaacgtggtaaggatatgaacagtgagaggcaaagaatagcacatgatgatgataaagttatgaacataatctgtgctgagaaagggacatttttgcttggggagctatttggagacaaaaaaaagctagatagaaactctacacttaatgttttttttttttttttttctgacatctagtacaattattgcttggagagcaagttgtgtgtttaataatatataacgtatatgtaagttgaataaaaatgtagagaaaaatcttaatgttaaaaaaaaagagagtaggtttggggtttaagtttgtgattaggtctagagctaaagccaaggaacaagcacgtatcaaagatcaaacaaaatgagagtactgagggacggccaaagtggtggtggtgccaatgagggagctaaagcggagaagactgtgtttgaggttaaacttgagtctttcgaggcacgtgcgaaaatcaagatcattaaggaggtaaggagaatcattggtgtgggtcttaaggaagctatgaaattggtggtgaaggctcctacggttttgaaaacaggactttcaaaagaagaaggagaggaggtcgttgagaagttgaatgcacttggtgctgaagctgttttacagactagagtgagtgatattccaagtctgttttggaacagtttgttccatctaataagctgatggatgatgataccgttaataagagcttattagctcaattaggctttctcattgctaatgttttttttttataaagagattaactaaaccaatgtatctttgcttgtttaacatgtatcgcaagtccttcttcttggcataataataatcgataaatttgggaactttgttgttattccatggctttaatgatctccagtgagagttctcttactttgctcatttatttggcctgactccacagcacaactaatttgtgttgatatcaagatcttgcaagatatgcaagattagaaactgaaaaaatgtagcaaacacagaaaaatgtcattgtacctaaacacaaaggttacaaaactagggacataccaaaaaaaacaaacctccaacactttgtttgcgtgttgaaagttaaaagacatataacaatagattttaccaagaagtgaaatattctcacttggagatgtcaatatttacatctccgaacttaggcctaggaggatccgttgccatatccacatgacccgaccaattagtttactaaaacagtgtgattgttcatttccttctaccatctttggttgctatctcaagtcaaatcttgaacttttatttcccatcaaaaatattcagcttctctgtttcaagcacttacactaatgggctatatgagcccatttaaagttggtacatttgacaatgtgcgtgtccttttctttttttttgtttaacaatgtgcgtgtcctatttaacatcgttgtttactcccaacaaaaattaaaaaactctacaatgttggaatcgagtgtattcttcttcacaaacaaacttattatcttcaacaaattcggaagattcacaattgcttgttcctctcttatgtctacttcccagaaaaatttctgcttttgaaattcaagatg

SEQ ID NO: 25894 - DNA, 3000 bp, Unknown; identical to SEQ ID NO: 12428
  misc_feature (1)..( 3000): 2750-1469P.txt file - cDNA_ID_2708920; gDNA_ID_2214550; Annot_ID_134661

SEQ ID NO: 25895 - DNA, 3000 bp, Unknown; identical to SEQ ID NO: 12428
  misc_feature (1)..( 3000): 2750-1469P.txt file - cDNA_ID_2708920; gDNA_ID_2214550; Annot_ID_185546

SEQ ID NO: 25896 - DNA, 3003 bp, Unknown
  misc_feature (1)..( 3003): 2750-1469P.txt file - cDNA_ID_2708937; gDNA_ID_2214551; Annot_ID_134670
atgagttgctatgtcagtcagatcaatggaggctaagtgtttttagaaatgtacatacctaacatcaccaggctgtcgtttaccaagattgagcaagatgattgaaaatccagtccctagtatctgaaaccccccgtgataacaaagaaagccatcaaaggagattaaacagaaacgacttgttagagacactacctctctatacaaaatgtctcatattcaatggcattgcaaaaacgttgggcattttcaggaatccagacattgaagataaagatgacttacaaatatagggcccagatcccaccgatgtgcaataggcgccaagataaaccacaaggtgataataacccacatctttagacttaaagagaaaagtcccataagaatgatatctagaagatcatcacacaaccacagatcaataaactatttgtttcataagttcttggacattgcagatgatgcacatatcaaagattaaagagttctcacctggcagcttcaacttgttacgcagaaagtagtataacttcctcttccaccggcttgctgacggtgggagtttaaacttctgcaatgccaaaagagattttataaggacagaaactaaaaaaccattctttaccagttaagaaaccattctttaccaaatcatcatcatcatcatcatcaaatgactcaactccagctggtggatttggtattacagcaacaataaaggaatctacacaataaaatcaagacttgtgcataacctaaagacgcatttaacaaacacagataagcattgatgcttataacattttcagcagaacctgtttaccttggtccttgagcgtaacgtataaatcatctccatcttcttcgtcttgcaatgcctttccacgaagaatcatccttaaagttgaaacgggaaatttacccttttccgcaattgcatttctcaaatcacgaatctaaaatcagcccaaggatcaatcaatcattcccttcgtacaaaggaattcacttagagagataaagaagaagaaaattctttactttgatatgagacgccactcgaatttgagacggccgagctgggccgatggttttgtacgtgatctcgacggtgccattgttggttgaatctgagctcagctcttcggttgaattcatcatctcaccacgaattgtatgcaatcaatgagaaattgaggattagggtttcgaatttgggaattgaaaaaaacagagtttgttttctcacttgctacttctccgatgacggagagtcgacttgagttttcaatattttcatatctgtccttacatatgtttttaattccacttttaaccccaaaggtttcagagagtataaaaaactccaaaacattggaaaagcaattgtaagagcttctgcgtcaaaaagaaggtttgggttacacttttcatacacaccatatgcataggatgaggccttcaatttctgccttacatatcaaaagatagaacacacacacaaataaagcaaagaaacagaatatctttgagatctcctctttatttggagaagacaaaacacagaacaagaattagaaagaagggagagaaagcaaaaatggcactaagaatgtgggcttcttctacagcaaacgctctcaagctttcttcttctgtttccaagtctcatctctctcctttctccttctctagatgcttctccacaggtgtttgtaattgtgtatgtagttgtgtgtgcatagctttatctgaaactgttgatgaatgtctctgttatttttttagttttggagggtttgaagtatgcaaattcacatgagtgggttaaacatgaaggctctgttgccaccattggcatcactgcccatgctcaggttcttatttttgtaatctaagtgttaaaatagctcagaaactagatagatgtctctttggacttttggagaatggttataaagataatgatagttttgtaagattattggctgaaatgggaggagaaatgacattgatgttgcaggaccatttaggtgaagtggtgtttgttgaactgccagaggacaatacttcagtgagcaaagagaaaagctttggagcagtggagagtgtgaaggcaacaagtgagatcttatcaccaatctcaggtgaaatcattgaggttaacaagaagctcacagaatcacctggcttggtacagttttaaagtcttaaggaaattaagtaagttaccactcatgtgacaacatataagcaatgatttggcaattgtgtgttgtttagatcaactcaagcccctatgaagatggttggatgatcaaagtgaaaccaagtagccccgcggagttggaatctttgatgggtccaaaggaatacaccaagttctgcgaggaggaagatgctgctcactaggagggtttctctctgtcttttatgttccaagttctatcaattctcatgcttgttttctaaatttgcatacactctatgaccaacttcacaaaataagagttcaagaagatgaaacagagacctaacaaacacattaagattttttctttcatatatcttgttatcctcaaaatgcatttaccatcaccccaaaagccagtccaataaaaaaggtgatcctaatcaaaaattattaataaaaatttggtaaccttaaagatataaccattactttaaaataaataattggtcataagaaaagaaactggtcgtccaaatattacaatctgctccattatattgaaatcacgtattcaagctcataaggcaagttaggtccctattggtcaatttggttgtatctaccgttgacaaaactgtaacatccattgtggtaaaaattgggcatgaaaacaaacataacgacatatgataacatacaaggaacataatattaacgaagcacacacatgacacgtatatatatattcatatgcacacaaacacagatagagatgaacagaaacacatgacataactttccaaatg

SEQ ID NO: 25897 - DNA, 3003 bp, Unknown; identical to SEQ ID NO: 25896
  misc_feature (1)..( 3003): 2750-1469P.txt file - cDNA_ID_2708937; gDNA_ID_2214551; Annot_ID_185560

SEQ ID NO: 25898 - DNA, 3000 bp, Unknown; identical to SEQ ID NO: 12437
  misc_feature (1)..( 3000): 2750-1469P.txt file - cDNA_ID_2708951; gDNA_ID_2214551; Annot_ID_134679

SEQ ID NO: 25899 - DNA, 3000 bp, Unknown; identical to SEQ ID NO: 12437
  misc_feature (1)..( 3000): 2750-1469P.txt file - cDNA_ID_2708951; gDNA_ID_2214551; Annot_ID_185566

SEQ ID NO: 25900 - DNA, 3003 bp, Unknown
  misc_feature (1)..( 3003): 2750-1469P.txt file - cDNA_ID_2708953; gDNA_ID_2214551; Annot_ID_134682
tactaccaaagaatacagagccaagcatagacaaggcgaaaagagtattacaatcaacccgtcttaaaccacatgttaacacgcagactcctcagaaccgtgaggttgataggaacttgttcatgtccttgaggaactttcggtccaaataccccattgcttcgatgatgatgatcaaacctccaagatccacgggaactactactcagtacaggccttacagtgttggtgaatccagtctgattaaaccaatttatgctagaggcgggttcaacagcgtcatcaggaaggacattttgcagtggatggtgcagaagagataaagccgccaaaattcatcaaaggcccttctgtttcttagattacaacatactcagaaggaaacacttgtctcaaccgtatcactttgtatgagtttttaataaccggtggattgataggaaaatctcctggacaactaaaaattgtgactagtattacttacttgactaacacgtctatctgttcttcttcttcttctaattacaaccaggaatgtcttctgagagattttgggttctataatcaataacaaaacaatcaggtttacttttcgggttttcactctcgattggatccaattggcctatagactgactcgttgtctcatatcagtcctccaattttgctgaatcattctttttagttttttactactgaccgaaactgaacttatctaatttcgtgacagacaaatgagtacataattaaaatttaagattaggcccaataatctgcattcagcattattctgaagatgtctctactgtagtggttacggtttttacatgaagcctgctatatatatactttatcaaatatttcagagctcaagcagagagcttccttctctggcaagcacgaaaaggccaccatctcctctagaaatcctgagatccttgtcgagataagtggtcaagagccaagagctgcctcggtttcctggaaacggaagcttgagaggtggctgaccagagagtgcccgtgaaatgtttgctgccacatcttgtaaggggttcaaagactgctttaacaacgaaaggctaatctgctgcccaaagacgcccacactctctgggagatctacacttgatttgatcaccgggggttttagcgtgccttctttgaaagaaacctgacatttaccaaacattaagacaaccagatggtgataccaatacaaattcaatctacaaagaaacctttttaacatagctttgttttaatggtaaggtttgattgactggaatgtaatcaaaagtacaaactgttaatgcttcagtgaccttaatactcaaactggtgtttgtaagtttagttacctcaattcttgaagggcttcgaacttcaaatgaagcagtagcactgaaggagaagtctgcaaaagggctggagagtgtagtggagttgtcgataatgagattgtttgtgtctattgactgacttatgcttttaactttcaacaaaggtgtcgaacccgcagctagtagaggaatcaactcagagaaagcagtgtacctatttcataacccaagaaaatacacaaaattggaacaacagtaacaattcctggattattatcattcttcatcaaagatttcacaatgtctcattctcaattcacagtgttgaaattctcagcgacaactaaaggttcctacatcatcgaaacaagatcatttaacttacagcaaaacccagttgccgtcgagaagttctggattctctaacggagccggagtaggattcagagcttccagttgattcacaagctccaaaacctccgctcggacttctgacccagctttgaaacctaattcagttccgtacaccgaatccgccaaacaccttttcagctcccaagtcgggtcagacaccgcacttccatttccagcgtcggcttcagtttctcctccaatttctcctccccactcgtcttcgttccttggaggatccgattccataaaccgggtcccggattcctcaagttcgggtccggatttctcgccccattcgtccgtaatcacattcacggtcacattatctggctgagagtcgggctcatttgcatctccaggtttctcaccccattcatctgtaactgcagacgcatctaggtcggattccgattcagattccgagggcagagaagatcggattttagaaaaccggagtggcttgggacgataaccaaaagagaaagagagagagttaagttttagggagatagaaggagagaaggtcttgcttggatttatggaggaaacatagaggagtgaagaaggacgagcgacggtgaagagcgtagccatggccgatctttgtgttcgagcttggtgagaaaatttcggaaaacaagattactcaagtcttagaaaatcacacgaaatttagatgaccccagaaaaaacgcaattttaaaacttcaaaaaaaaaaaaactttaaactaatgggcctgacccaggcccattataacgatttgtattcgtctctttcccttatccccgtagtgatactttgtctgagtgagtgagtttgaaatcaatcatcaatggctgcttttgcttctggtttggctataatcttcaactctccttcactaaaccctgtcacaactcaagcgaccttcctttcttcgaatcggattcgttcctctcctcgcgttttcagtggatttcacagcctccgacgtcgcggcttccggcgattctctcaaaatgttatccccgaccggtttaatagcttctcatgtaattgcttatccgccgtatccaccagcactatcgattacgaggtgaattttcgtattcacgtctatactagtgttgctggtctatcagtctgagtgataaaatggagaattgcgtataaatggctggttccaaggtctatgtatatataccatgatcatgtagttgttgtacattagttagataaaaattgaatcgttttcatatatgatg

SEQ ID NO: 25901 - DNA, 3000 bp, Unknown; identical to SEQ ID NO: 12449
  misc_feature (1)..( 3000): 2750-1469P.txt file - cDNA_ID_2708977; gDNA_ID_2214552; Annot_ID_134696

SEQ ID NO: 25902 - DNA, 2046 bp, Unknown; identical to SEQ ID NO: 12244
  misc_feature (1)..( 2046): 2750-1469P.txt file - cDNA_ID_2708993; gDNA_ID_2214539; Annot_ID_134432

SEQ ID NO: 25903 - DNA, 3000 bp, Unknown; identical to SEQ ID NO: 12245
  misc_feature (1)..( 3000): 2750-1469P.txt file - cDNA_ID_2708997; gDNA_ID_2214539; Annot_ID_134433

SEQ ID NO: 25904 - DNA, 3000 bp, Unknown; identical to SEQ ID NO: 12245
  misc_feature (1)..( 3000): 2750-1469P.txt file - cDNA_ID_2708997; gDNA_ID_2214539; Annot_ID_185178

SEQ ID NO: 25905 - DNA, 3000 bp, Unknown
  misc_feature (1)..( 3000): 2750-1469P.txt file - cDNA_ID_2709003; gDNA_ID_2214554; Annot_ID_134737
tatgagtactattgtttaggtttcaatttttgaagtattgatatgaaaacacatatttttttaagtaatgatgtatggtggattttaaaattttgaatattttatctgcagtataccgtgggtcgattttttatagctaaattttttaagtttcaagttatattcgttttgttaatattatatggttttttgtgtttacggttgtataattgtattttaattgtaaattttaagaattcatccgtgatatacctttctttattgatatcgatcaaaacccgtcatcccatataaactcgtctatattatctcgttagctaaatattagtattataaaatccaagaaaataaattatttttgttataaatacaataattttaggatctcacccgtgttataccgtttcttgaatgattttaaatttctactactaatatagattttaaatttatcatagaaagtatatgatttcaattttttgtatttttttttatttaaataaagcaacggcttaaatgatgatatatataattctttttctgtatgtgtatatgattttttatgtgaatattttcattattataaattagtatttttattgctatgcaaaatgttaatataaatatttgctataaatcgaatttatgcatatttgtggagtaaaattcacggaattttgtttttgaaaatatatgaaaagattgtgtagagatttttagaaacaaattaagcaagatatcgtttggttaatatcttttaaaattttgtaaaactaaataataaatgtgagtggcagccattgtaaataagtctcaactccaggatttatttcacaaaatggctgcaaaaatgtatatgtagatttacaaacaaaaacaatactgaagggaagatgttgggagcattaagaaacaattttaaaagtataaataataattatatgaattacttatgatttgatttagggaaaaaagtagtagagtaacttagaacatagtagtgggcatttaaggtactattttagtaaaataattattaattagaattatacatagttacaattttatttttaaaattttaactatacggttaaccgtacaattaaccgtactgttaaccaacggttttgatatggttacggttaattaaccgttactgttaatatacttttttaaccgtaactgaactattttcacggttaatggttacggttacagttaataaacggtacgaaatacggttacggttagattttggtgatacctaattgttaattcgtttcttctttgattagttttttatttctaatccgagaattcttggctatgtcttcagtcttcaccggtccataaacccaaaattgaaatgataggaattaaagataccgacacgtcttatctacacccaaccaagagagaaatttggccatcattatttttcattgttttcagaagattcatttgccaatattagaactttctgtcaggtaattgattctcatatagttttaagaatatatatatatatatatatatatatatatacttgttttgtaaaattaaacaaaattttgaacaaatacgttttatttatataaataattaataatagatagaagacttaattcttttttttacggagttaaaaacaattattaaagccatgttagtattatttttttccgtctaaagtcatgttagtatttgtaacaaaattgaatagtttcgttgatggaatcaatttgcccactgaatgcgaacacgaaagttacttaggtcctgtttgtttctccatccaaatggatcatctagatggaaatgaaaaatgatgtttgtttttgacaatttaacataccatttgtatgaatcacttggataatcaatctaaatgactttataagtttaggcaaatttttaaaactcatttaaatggacttggttgaaccatttggccggagatagtttagtcaaaaagaataaatgacaaatataacatttgtaataataatatttttttataaattttttatttaatatttttttaaatgacatattgcaccaaaaaaataaaaattgggaaatcacggactattattttacgtcaaaattatattcattttcccgccaaaaccgcaaaaatcatatttttccgccaacaccataaaatcatgttttcctccaaaaccgccaaatcatttttttcctccaaaaccgcaaaatcatatttttccgttaaaaccgtaaaatcatgtttcccgccaaaatcgtaaaatcatgttttcccgccaaaaaccgtaaaatcattttttcccgccaaaactgcaaaatcatgttttctcgccaaaactgcaaattcatgttttctcgctaaaaatcgcaaaatcatgttttcctgccaaaaaccgtaaaatcatgtttttccgccaaaacttcaaaatcatgtttttttgccaaaatcgtactatcatattttcctattcaaacgcatcatttaaattaaatatcaaatgatgaaacaaacactacaaatatcattcaaatgcatcattcaaattaatcatttatatgattaatttgaatgaaaatgctaaatgatgaaacaaacatggccttaaattttttaaagttgcaaattgatcatttcgattgtttttttttgtaagagttaaaatcttaaaagtttaaagccgaagtggttgctatccagttttgttaaaaaaaaattaatttcatgcacaaaggattgaccactgaaccggacatggaattacaaaaccgggctcgtaccgaccacaataaccggtcaccactaataagccgtgttcgttgacgatgttgttgtattcatcgtttttgtcacgttccggattgttttgtggctgacgataaaacagagcacaaaagaagaaaaatctagggtttgtttgagactaagaggaagagaaagaagaagaagagaaaattcgtacaattccgccattaaagcttcaacctttaatg

SEQ ID NO: 25906 - DNA, 3000 bp, Unknown; identical to SEQ ID NO: 25905
  misc_feature (1)..( 3000): 2750-1469P.txt file - cDNA_ID_2709003; gDNA_ID_2214554; Annot_ID_185657

SEQ ID NO: 25907 - DNA, 3000 bp, Unknown; identical to SEQ ID NO: 12506
  misc_feature (1)..( 3000): 2750-1469P.txt file - cDNA_ID_2709020; gDNA_ID_2214555; Annot_ID_134752

SEQ ID NO: 25908 - DNA, 3000 bp, Unknown; identical to SEQ ID NO: 12506
  misc_feature (1)..( 3000): 2750-1469P.txt file - cDNA_ID_2709020; gDNA_ID_2214555; Annot_ID_185679

SEQ ID NO: 25909 - DNA, 3000 bp, Unknown; identical to SEQ ID NO: 10381
  misc_feature (1)..( 3000): 2750-1469P.txt file - cDNA_ID_2709024; gDNA_ID_2213646; Annot_ID_132382

SEQ ID NO: 25910 - DNA, 3000 bp, Unknown
  misc_feature (1)..( 3000): 2750-1469P.txt file - cDNA_ID_2709028; gDNA_ID_2214555; Annot_ID_134767
ctaaattcgtgtcagataccattttgttctcttctgtgagctgggagtgctccaagttcactggagagtcactaggctgagatttaatttccacttgttcctttacagcctctttctctgcactggcgcaactatttttcaaggagtcaagcttgtcttgaatgcttgagagctctgtggccaaagctttcctgaactctcttatactaggatgcaatccctggaagataaacatcagtataggaaactgtcagcaaaaatcctacacagcagtacatactgagataaactatctcggccaaccaatgaaattagtctttcatgcattacctcgacagcatccaatttcaaaagaaggttcatcaccagttctccattaacaacaatctccttctcttcaatgtgctgatcagtagaagcttctagcgcctcaatacgctttttaacatctcccatctgctcacggacagtggctatctccttcaatttcttaattggctcccatcttctcacgtcatatccacggtacatagattggataattctagcagcttcctcttctgtaaagctcttctttgcaggctgttctctattctccttagcttcacaaggtttaataatctcaccgtttgattcttcttgaagattagaattgctctcaactgatcctttttctgttcttaatgcgtttaggcttccctcagccatcttcatttctgcgtttgcgtcttcacattttacattacaagcctcaggaacagtccttgattcagccttcttggaggacagtggagccgcgatcttagtctccttagatttttccatccgtttaggatgacttactgatttggaaccaccatttctctctttcggtaatgggtcaacacgcagacaaaccggaggcaacttggatgcttctgatgatgacgaagactgctctttttttgtgctcttaactggctcattctttgcaatccttttggttggctccgttggtttaggcagatggttttctgatagtttcactggaatatttcttggttcctgtagatggttcgccactgggatatttattacagagctcttctcctccgcatctgaaagtacattgcactcaaaattcccttctttgccttttgcttgagttatctgcccttcatttctgtggagatcagaggggcaagactccaagttacgcccttcattactactctccttactctcagaagcttcaacatctttccgtttcccataagatggtatccaaaaaataggatacggaacctgtccaggctcttccttgttcttctggttctgcgcttccttcacatcttgaccctggattaaggattttatcatgctgatatcaaacgggtattccaccgttttcccattctgcatctttttcctgtcttcattactactctcagaagcttcaacatcatctcgtttccgacgagatggaacccaagaagtaggatacgtaagctgtcccagctcttccttgttcttctggatttgcgcttccttcatgtcttgaccttgcaataaggatttgaatttgctgatatcaaacggggcttccacggttttcccattctgcgcctttttactgtcttgattctgtaccaacgacttcatgctgctctcatcaaatggaaaacaaccacgccaagattcaggaaaacttttctgaatcgtcatattgtcaggagctctaacttcagcaggaggctggttatgcttccctaacccaagagagcttctatattcctgattcctagcattctcatgaggaatccatataattgggtaagggcagttagtagaacgaactggaagtacagcttctcctttctcaatctcaggctcatgctcttcaatcacaacgcctctgtctttcttcaaatcacacatctgggaagaacatttcccgcagtgatgcttcccaggcacatccttctcaacatcaaaccaaggttgataaccaactggaaatggtggatgaacgtaacaagacggagcgtaagacgcgtgaggaggatggaaagcggaacgattcatgcagcattgatggtacggtacttgtgggggataacaaggaggccagtaagcaggaaagttgccgtgaacgcagcttccatgacacggtggtggagcatccattgccatatgctgagagttattaccaaatccttgataatagtattcctgtggtctcatttgacatggttgtgatggatccatgtacacaggcatcatctttaatcaagatcacttaaccaattccagtaaaactgcagcaaatacccaaatccatatatcattagaaaaatacaatgtgaatttggttcattcagaattatttcgttaccacaatcaccaaaatctgccaaactaaatcaatcgcatcttcattaaactaagagcaatgaactcaagattctcaaagctattcattaaactaagaagggaaaatgacggagcttacacgaaacagaaacgatccgtaaattccgatgactcagttcctgcgaagctctctcactctctccaccaattaaaaaaagcagatttcttcttcgaattactttctgattcagatgattgcagctttttctatgggtagtgaacaatccaaagacatttcttgatttatagaaagacgaacaacaacgttcagagggaaaagatatttcttctgctctccagatcattctcgcatcactttgaaaaatctggaattttctcttcgtttcttaacctttactaacacgtgatttaagaaactcgcttcgcttatgggccatataaattaggcccatttattttattattgggcttataattaggctgtatattgagcgttagtctccgtctctgatacccaattcgaaaaccacttctcagcctccgccgattcagacctcgcatattcagcttcccagtctttctctctgcgtcgttctagggtttttgttactctttgcttcgaagatg

SEQ ID NO: 25911 - DNA, 1853 bp, Unknown; identical to SEQ ID NO: 10379
  misc_feature (1)..( 1853): 2750-1469P.txt file - cDNA_ID_2709039; gDNA_ID_2213646; Annot_ID_132380

SEQ ID NO: 25912 - DNA, 1853 bp, Unknown; identical to SEQ ID NO: 10379
  misc_feature (1)..( 1853): 2750-1469P.txt file - cDNA_ID_2709039; gDNA_ID_2213646; Annot_ID_181438

SEQ ID NO: 25913 - DNA, 3003 bp, Unknown
  misc_feature (1)..( 3003): 2750-1469P.txt file - cDNA_ID_2709073; gDNA_ID_2214557; Annot_ID_134798
tttcctatggtcaaacaagttttaagtttaaagttcgtatttgtcctccaggtgtagcaaatgcaatagaccttgcagatcgtttccttccaaaattgaagtctcttaattgtaagaatttctccatcactgtgtggtgccatttgaacactcttctttcttcaccatatgtacctaagctttgatgaagattaaaagttgagtatacttctgtaacttatacttccatccaatgcaggcaaacctttggttgtcactttccgtgcctattctaaagatcagatccttaggattctgcaggagaggcttgtggtaagtcttaaaagatgcctttaatgagagaggaatggctgattaatggtattcaaggaattatgaagaaaaaatgcatagtagattaacatgtcaataacaatttttgacccatttaaggaccttgaaactatatgatgatatatctaatctaaacttatggtacttctatgttgatcttaaattattattttcactatttgtaacaggcacttccatttgttgcatttcagtccaatgccttggaaatatgtgcaagagtaagaaaatatatgtcatttttttatttctctcaaccttgttttcattttgatattctttaattgatattcataatgtttgcattgttccagaaagtatcagctgcatcaggagacatgagaaaggctctatgtgtctgcaggtgaaatctcttacgaatttcgtttcctttgagtttgttcttgtattgcatatgatgaatgagatagaaatgggctttatactgtaaattcactcttaaaatcattacattaaagatgacaatctcagttaactcacattttttttcaatttccaggagcgctctagaaatcttagaaatagaagttagaggatcaatagatcaagaaccaaaaggtccagttccagagtgtcaagtggttagtattttactctctactttactcagttcacttactgacgatgcaaatatccatagaaaccgttgtcttatcccataattgtttttatcgaatctataggtcaagatggatcatatgatagctgcattgtccaagacgtttaaatctccaatagttgacaccatccagtctctacctcaacaccaacaagtaagttacacatcaaaacacacacacttattgatatctggttcttctcgtttttaactattaagtaactgttaggatatgcttacaacatgatcttacctagaattagcaaaatcgtagtattaagagaacaaacttgaagtcacaaagaaactaaagacccgtgttggttctctgacttagtggctaataagacctactctgaaagtatgtaatggactgaaataacatgcttctattgaaaacttgcagatcatagtctgttctgctgcaaaggcttttcgagggagcaaaaaggatagaaccattgcagaggtaaatcttcattgaatgagcaatacacaaacacaactcatgaatttatagacattgtacataatattcatctctgtcttcacactttgatgcagttaaataagctatacttggaaatctgtaaatcttcgatgataactccagctggaattactgagttcagtaatatgtgtacagtgctaaatgatcaggtacttatctaatcctataagattaactctcatgtttgtgtatggtttatgcattatataatagacatttgattgaaatgtcattgttttgtttggcacaggggattctaaaacttagtcttgctcgagacgataaactaaagagagtgagccttagagtagatgaagcagacatcacatttgctcttaaggtatatacattacactctttgtttattattccgaaaatgcagtttcttaagttaacaccttctcttttcattgcaccacaggagattcgattcttccgcaactgtcttctatgatgaagttactgagttatagtcttatagatgggttggttccttcattctttacagaatacaaagagttatatatatataaaaaaatcagtacacataaattgtttattctgtcatgtaaatgcaggaacataaacaaaatataatctttattagtttttactggttagcgcaaaagctgaactcatattatgtaattcttctctttttgtactattagtcatgctctcaatgaaattaatgccatcaagtgattgtccttgactccttgattcctgagtgttcgtctgatgcattgtggctattaattccgttcaaaatcttggaggtctcagctttagtctaaggcattttacagccactatgcgccgtggttcacaaaagccctcatatactgaagactcttttccatttgccatattcttattcattataatataaacaatctattaatctttttaccaactttgtcatgaacgaattcaccccaacggaaagttagaagtgtttaaaacatctccaaggtgctctggtgcaccattggttaaaataacatgtgcatcaagtatattacaactttttgttgatttgctatgattgaaaatgtttttcttcgtattttttaattttaaaatctctatgaaattattaaaatatccatgaaattattaaaatctatagcttaaatttcaaaatcatggattaaatattttaaattattgattgaatagcacataatttcaacttggaaattgaaaattaccaaaaattctgattaaattttaaaattaacacagatcatgaatccagcaaacccctaaggaataaatgttggttataaaactatgcttgactgttttttggcaataaaatccagatatgctttcgtttgcggtcccattcggtccgatcgccggtccggtttagaaaacattgctttatgggctttgtatttgtagtactgtagtgtatatattcttctcccagtccacacttaaaaaggtttaaactggtatcgaaagacttaaaatcaacgagctcacggggatg

SEQ ID NO: 25914 - DNA, 3003 bp, Unknown; identical to SEQ ID NO: 25913
  misc_feature (1)..( 3003): 2750-1469P.txt file - cDNA_ID_2709073; gDNA_ID_2214557; Annot_ID_185758

SEQ ID NO: 25915 - DNA, 3000 bp, Unknown
  misc_feature (1)..( 3000): 2750-1469P.txt file - cDNA_ID_2709077; gDNA_ID_2214557; Annot_ID_134801
tgctatgttttgcctatctatagttacttacccaaacttcagattttctttgcgatgtttttttaattgataaagtgttcctttggtgtgttgttctaagatattacaataaaaacaaagattgattcaataataataaaaatcaaatctcagcaaaattcattcgtagctctttcaaaaacaagttttagtacaaagtaacaaggttatagcttattggacaagaaaaggctagggcttaattcctatcacgtcatatatgaatttctcaattgcggcaaacgaagatccaccattcttcgtagctctctggatcatctgcgagatatccatcactcgtttcctcacaacattattatccgtgtccattacataacgaatagcggtctctatctcgtttgcgtttactatctcatcactatgtaccctgtaatcaagcttcagctccacagctagcttcagttccttcaccatcagaaacgcattgagttgttgctctgcatacattggccatgtcacaattggcacgccaaaccacaaactctctactattgagttccatccacagtgagaaacaaagcctcccactgccttatgggccagtatttctacctgaggagaccaaccacatatcattccacgtccatcgacacggtcaaggaacccctctggcaaatcatcctttgtcacctcttctttacggagtgaccagaggaatctatattgacatagctcaagtccatgagctatttccttcactagagaacctcttaaccttgccatactcccaaaacaaaggaatacaaccgatgcctcgggttgatcatcaagccatttcatcaactcgtcacgacgggttaggtcctgctctggatgaggctgggctttcaagtcaaatatggggccaacagcataaacagaaggataattctgttcttgaagaaaatgattcacagagtaaggctcaatatcaaaggagctattcactaggattccattggcctttgtaaacaatatggccagcttaacgtaagcatcataaccatcttcaacaaacagagctgacggcagaacattggctgggacagggtttacaaatccaggtatcgacaacatttcttccgagtttcttacaaaaaccgatgtatctctactatgtcgatctgctagatactgcatcatagctaagaacccggaatttgtagtcaagaacacatagaaagggagacttatatctttagcaacgtcaatcatagggagacagaaaaagtcaacaactaatcccttgaccttaactccatccaatgcaagagaagttaaaatatccatgactatattcctcacaagagggatatttctctcaataacatcatacacataagcttccacagattgtgtactaccaagtgtaggtttctcctctaactcagggacatcaatgaatctaacaaacggttgagaggaggcaattgatttaacataagtgtctagatgagactgaccttgtagtttcatcaagaggattgtgatacggatcctatcatcttgctcaatgagacgcctagcaaattcaagaaacggaacaagatgaccaacggttggtgtggggatgaagatgagctctacattccgcatctctaacaacaagagatagcttttgattttctcttcctcaatctacattcaaagaagagaattagctaccttaatgttgacttttgtcacatgtgatgattactgatgtgttgcttctacctaatgttgaggtggcccttagcaagcacgagagggaagataatggccggcagataaagatggtagagtgggatccacaaccaaagaaagcttctaattatttattagagagttatttgaacatgttatcagagaatctccattttatacaagattttcagttaacatgtttttggctgagtcactttatatatttcaatccattagacatttctatctttaatttttaatctattagacatctcctgatgattgaaactgaatattaccaaggactcaaattgtgacttagataatcagcaagttttatataaaaatgtcaaatgcaactatggaatgaaggagatccatttgaattatcataactcaattacattaattatttaaatagtgatagagtcttactcgaagactcttaactctgagtgaactaaaaagccgacacaccaatccagtgaggctcaacaccaacacacaatgaagtaagatcttaacgaaagttgctgcaagctgaaattcactagagatcatggagatgggccaaaccaccacatgaatcccacatctttcctacttttatattcaatcaactaactttaaaatccatgattgattaacactccttcatgaattgaaattgaattctctagattttacaattcgatattattgtgtggatttcaaaatctatacaattaccttgggtttttattctaataatttacttatgaaactttatgagatttcatttcaaatgacttcatatacacatatttcaaaagtaatttagttttgaataacattggattttaatgaagtatttaaattttaaaatatattaagcacaattaacaaatataagattttgaataacagtgctatttaacacttgtagaaatgggtaagtcgaaacttctaagatttcaaagtcaaaagacaacattgttagttattgacatttcttttcaaactgaaattggagttgacgccataaaagaccaataggccaaaaattaaagggcatatacactttttctgagttataaatttgtagcctcaactcttaaggacccaacattgactcatatgctaaatctaaatatccccaagatacttttcaacgacaactattgatgttcaaaaataaaataaggtctatataagtttaggcaattttgtgactacaatttaatattgattatagaaaagtgaatccacttgacctcctcttggaacgcggctatg

SEQ ID NO: 25916 - DNA, 3000 bp, Unknown; identical to SEQ ID NO: 12549
  misc_feature (1)..( 3000): 2750-1469P.txt file - cDNA_ID_2709126; gDNA_ID_2214558; Annot_ID_134843

SEQ ID NO: 25917 - DNA, 3000 bp, Unknown; identical to SEQ ID NO: 12549
  misc_feature (1)..( 3000): 2750-1469P.txt file - cDNA_ID_2709126; gDNA_ID_2214558; Annot_ID_185815

SEQ ID NO: 25918 - DNA, 3003 bp, Unknown
  misc_feature (1)..( 3003): 2750-1469P.txt file - cDNA_ID_2709140; gDNA_ID_2214558; Annot_ID_134828
tggaggcgttgtgcagggttgctggagaagctgatgactatgagagagagtcagtaaatgctagtgatcctttacgtgttgctgtctcagtggaatcactgatgtttgagaaattgggtcgctcaactggagctcagaagcttaagtacagatctataatgttcaacctgagggatagtaacaacccggacttaagaaggagggttctcactggggagatttcaccagagaaactcataacattgtctgccgaagatatggcaagtgacaagaggaaacaagagaacaaccagatcaaagagaaagccctgtttgattgtgagcgtggtcttgctgcaaaagcatctaccgaccagttcaagtgcgggcggtgtggtcagcgcaaatgcacctactatcagatgcaaacaagaagtgctgatgagccaatgacgacttatgttacatgtgttaactgtgacaaccactggaagttctgttgaggagatctctgtgtcttttatttcatgagaccatgttaagacatagaggctctgattgattaatcaggagcttcgtgtccatttgctagcagcattcctagaatgctctggctccgatgtttgtttaaggatatcattcaatgtcttagagattagtaagtaggggtatttactaatttaggtgtttgtagttcttatttcttttgcttctcttcttccaaactgtcaactcaactttcttgcagattttaccaaattttgaagtttttttttttagttttagaattgctatttgtgtcctccatttaatcatcttgtacggctgaagcttcacagcctaatgtatgtgatattggtcgataagtatcattacttgaaactgattctgactcaactgcaacacaagagaacatatacagcttaaagttcccatcgcattgcgaacaagtcctgtttctttctgtttcattttcactatcaaatacagccgaagatatatgtcaagatgaatggcaacaaatggatgtatcacttctagcggaatatgtcccattcttcatcatccaaatctctcttttttcggttggatcgattgtttctccttcgccgtcttctatcagatgaactttcaagatcttcaacatcagggtattcactatcaaactgagcatcccagagtccctgtaattaaaagtctttcttcaatcatccatttgaaaagtgatgaaaatcccaaggcatgccattacaagacatatatataccttagtcaacctctgttttctagaagctgcatcttcttgaaccacaactatatcttgtaagacctcgattatatcctcgacatctaatctgtatgtactcacctgcattatcacataccaggtaggtaatcataacattatgctattccaagattaaatgcttgtgcttgtatctcacataaaccatttcaactttattagaaaaaagggaattaagttacccaccaggcttgatggtataatagttaccccgaaggaatcgagctcaagcgattcaactattcccgagttaatgttgaatgagtaacctcgaacctaaaaccaaccatgtgcattcagctaatagcaagatataagcaaagagacagatatcattaccgaagaagatctttattaacacacctttccaatgtttctccctcctggtgtaactactctgtaacctacctaaacaaaagatgagaattcaatcttagacttgcttaaaggccagtgattcacaagacatcacataaaaagagactatataccagtgtttcaagtccaaccatcttgaattcagtatccaagacagtctcattatcaacaaggacaacatcacccacctacagagatcttaatataaactaagatgtaagtaaacacatttccaaatgaaacaactttcaacgtagcagaaaccaaacatagtagtacccggacaatgtctgtgagcagaaatctctcagattctccagatagcaagcttggtttaacatcaaccaccaaaaccaaccactgaaatttcagaatgatagagctcattgcacttacttaaacagtcacaaatttggtaaaagagcagactttagactcgctaaggtgattggattcaagaaggaacttacagaagtagtgtcaacccaaagctgagagataaatcctaaactcaaagctgattgtatactaacaacttgcttagcaacaagattcgatcttgtcgtcgactgcttgaatcctcgcgaacccgtaatgctcagatcattatcacctactagtcgaaccaaatcactttctccaggtaattctacactatcactccccacagtttgatgcactacatcttcttcattagatagtgaagaactcaagcaacagatgaaattgtctctcggtttctctataaaactgaattgcccgagaaagggagagtttttcgaatcaatccaaaagcaattgaggattgaatgctgaatccgtttgagcctccatcgacaagtttctgaattgggtttcaccaatcgagcattgagaactggaagagaacagaagaaggaagatgagcaattgcacatttctaaagaaccctacaaattcaactctacgtggacaaggaaaagatggttttttttgttctttctaaactcttattaaattgagagagaagccaaaaaaaaaaaaaaactcttaataaaattgttcgctccgactaaaagaaaggactttaacatttcccgttcggcgaccactttctcgtttgtcctttctccgttttcccgttcggcgctaaggtttcgatttcgtgtcgtattatcactcgccttcatcgcaaagtaagcttaagaatcacgcatttctcttcttcgtcctcctattgttcaaatcattcagatctgacttcgttgagataaagtttggattttgatgagataaagtttggatttttgttttggggtttgaatcgataactgatacgttgggaagctggatcaggtatg

SEQ ID NO: 25919 - DNA, 3003 bp, Unknown
  misc_feature (1)..( 3003): 2750-1469P.txt file - cDNA_ID_2709148; gDNA_ID_2214558; Annot_ID_134830
tgatctctaatcttccaagggttttgatagaggagattttttttagggttcctttgaaatctttgagagcagtgagattaacttgcaaaagttggaacactctatccaaaagtaggagctttaggaagttgtacattagtaaaagagcaacaagagaagaggagtccatgatgatcgctatgatgaatttcgatctttattcaatgagggtcgtagttgacgacgacgttgatccatctaaagcgtttaaaaaaaaaaggaataaaaaatctatagcgtttaaacgtcaacctattttccttgatgaacaagtcaagatatctcaagtttttcactgtgaaggtttattgttatgcttcttaaaagaagacgatacaagggttgtcgtttggaatccgtattgcggacaaacaaggtggatccaactcagatattctcaccgtccacacaaagacaggttcatttacgctctaggatacaaggataaggaatctcgtggtagcttccaattattgaggtttgtagattatttcctaggagcacccaaaaatcaatatttttggtatgaaatttacgattttaactctgattcatggacaactcttgatgtcactccacactggtgtatatactgttgtgaccgtggtgtttctctcaacggaaacacttactggtgtgctaaagaaaggaaagcagaagacgatattgtcgatcacatcatatcttttgattttacaaacgagagatttgggccgcttttgcctttgccgtctaaggttatggaacatgaatatgaaattgtaactttatcttatgttaaagaagagaagcttgcagctttatttcagcattacgaagcagattggaatgagtttgatatatggattacgactaagattgatgctgaagtggtgtcgtggagcatgttcttgagaatggatacgggacctaggatagaggttccacatatatgtgaaggtttcttcattgatgaggagaagaaagtcgccatgggttttgaagaagacttcgatcgcaaaacatttatcatcattggagaagctggatacgtaagaaaattggatatcaaagcacatgtagacagaaaatgtcggccaactgtgtgttcttatgttccaagtttggtccaaatcaagaaacctgcacgaggcaaaaggaaaagacaaagcagcttagaaaagcgtctatttgatcaaaacatgttgagacttgaagcatttaaaaagctaggcggctacttctagaagcaatatgcaggaggagttagaagtgaaagggatgacttgtctcaatatataatttattatgttacaaaacttctatttattttctcaattactttattttggcatgtacgtcaatagatttttgaaccagaatctgccccacatgtgataattttctccaaatattttcttaatggtttagttttgataattataatatatatatatatatataaatatatatatacaggtttaaactccaaatctatttctaaaatatgaaaatctaaattttattaattatgaatctataattcgatatgtctaatatatattgtttgattttatttaaatatttaactcgtctaaaacaccacgattagatctctaagagttgggttgccgcccctccaacaacgaacaaatataaagcacaaagcattttcttcaacattgtctcacacaatattttttttggtaaagagatagaagaagaaagtgttgcgagtggcattcaaatctatgaaaattcaaagggacaggagaacatgaaaaaaaatatctaaaggagtgttaatgagatgagctaattggttagtgtgcttaatgggaatgttttagacttttagctgaattattctttttaagtttttaatgattaaaccaaagcaactcttaacggaattgccactttagtatatcgttgacaactcttagtttccattagactactacgtacgtgtcatccacttttctgttgacaaaaactaataacaatcccattccttgtcagcatccaatccataaatgtagttggtcggtccattttttgttggtttgacacatttgtgcacaatcccattaatttcttgataattagcaataaggcaatcctagttagctaagaaactatacgattatatttttggtttgtctactatataacatgtactgtgggagacacttacacatgtaactagtttaaccaaactagatgatcgttcaaaacagcatccagcttatctctcgagtgaaatcctaaaacttgggtagaatagtaccatggaaattgctttaagtgggtttatatcataaacatagaaatttatattatacgtgaggaaaaaactagtgagatcatccacttagtgttgttatatactaactaaaagatatcatatgcgccacttagtaaatgcaatgatgtattattagagatagtagaggattaacgtgaatgtgtttggaatacatatagtggcgatagatgtgtgttagtgaatatgttcggtgctggttttgaccccatatcataatttttaatgtaataaattcttttgcttacttcataattattaagttaattggtcgtaaaaatggtgctacttagtggatgaaacctcatccagaatcttctaccgaaccaaaactctttaaatactaatctataacacggctacattactattaagctgatccgatccaccaccacatcataggtattattactctgatcttcccttttcaagcattactactttctcctcttagttttcttgtttcaccaaccaagctctctttcttgatctctatctttatgtcaactctatgctctcttgtattgtgttcttttccttttcaacaaattttgttcactagtcactagtatttcctaacactttgtactcatgatgatctctacctatctttgcataaaaccctcacgggtacttaggaagaatattcaagagcaatg

SEQ ID NO: 25920 - DNA, 3003 bp, Unknown; identical to SEQ ID NO: 25919
  misc_feature (1)..( 3003): 2750-1469P.txt file - cDNA_ID_2709148; gDNA_ID_2214558; Annot_ID_185800

SEQ ID NO: 25921 - DNA, 3000 bp, Unknown; identical to SEQ ID NO: 12553
  misc_feature (1)..( 3000): 2750-1469P.txt file - cDNA_ID_2709152; gDNA_ID_2214558; Annot_ID_134834

SEQ ID NO: 25922 - DNA, 3000 bp, Unknown; identical to SEQ ID NO: 12553
  misc_feature (1)..( 3000): 2750-1469P.txt file - cDNA_ID_2709152; gDNA_ID_2214558; Annot_ID_185804

SEQ ID NO: 25923 - DNA, 3000 bp, Unknown; identical to SEQ ID NO: 12563
  misc_feature (1)..( 3000): 2750-1469P.txt file - cDNA_ID_2709156; gDNA_ID_2214558; Annot_ID_134835

SEQ ID NO: 25924 - DNA, 3000 bp, Unknown; identical to SEQ ID NO: 12565
  misc_feature (1)..( 3000): 2750-1469P.txt file - cDNA_ID_2709160; gDNA_ID_2214558; Annot_ID_134838

SEQ ID NO: 25925 - DNA, 450 bp, Unknown; identical to SEQ ID NO: 12545
  misc_feature (1)..( 450): 2750-1469P.txt file - cDNA_ID_2709173; gDNA_ID_2214558; Annot_ID_134847

SEQ ID NO: 25926 - DNA, 3003 bp, Unknown
  misc_feature (1)..( 3003): 2750-1469P.txt file - cDNA_ID_2709189; gDNA_ID_2214559; Annot_ID_134857
gaccaccttcccgaggatgaacagccatccgataaggcagatcagagccaaccacaagcctacccagctgaaaataagtatccgatctagttataggaaatacaaaaccttgcaaatgcataagatctgctcctatacactcatataagaacagaatataaaacctttcctacttacaggttgttccgagagagaattggtgtttagatcaacacggcatattaatatgacattagagattccacttcgtccctctccgcctccgccggacaaaacgatgcagctccgggaagaagaagaagaagaagacgactcatcatcatcttcagatttctccggatccattatgattttggatctgacatctacctccggaatccagtcggcggcgtaaatcggtacaccgtaagtctgcatattcgacggttgattcgtctctgtactctgattcgccatcctccgtgtctgtctctcgagctcaatgccaagtccccactgattcgtaaaaatactaaatacaaaaaaaaatattaatgggctaacttaaggcccattacagtatttataggcccatcataatatttcatttatcgctgaattccggtaaagtgatagcggttggacccggttcacgggatagagacgggaaagagtacggcggtacggaggtcaaactcggcgagaaagagtacgtataccggatcctttaatttttataatattttcatttatcaccccaatactattgatttgatctaaaaacaccctatagttgtgtaaaattcttaaatcgatgtgttggtgatttttgacgtaggtatcatctgtttcgggacgaggacatccttggtacattgcacgagtaaaatgcaaaggaagtctctgagtcagctagtgggtttcttggtggaataataatttttcagtgactcgtttcgatacatgttgttgaaatttgaaagttttgttatttctcatcattttgttcctccttaaatttggcccttttataactgtctttatcttatgtctaatcgttttctgtgatttatatctttgtatttagtgtgctacttatataagttaaaactctacacgaataaaactcaagtagtgagatttcgaagatcaaatagtttgtaaactacgacgaaaattacaaaaattgcaacttgcaagtgtcactaactataaatcacgacattcttccctttcgaaaaatcttcatttctcgacaaaaaatttaggtttccaatgatgaccacaaaaagtggaaaaaaacgattctcgtttctgaaacgtttcgcttccgcgttttcattactgtttctatgctagagagtattagtgccttgttgtcatggtcatatatctcaattgaaaatctcctaaaactatatataaaatgacatatagtattttactaaatttaggaatcttttcatttatatagtaaaaaaataaaatagtgtcgctgttgccaaccactctctatccatctcagtttgcacatgcaacacaaccacatgctaattgctagtgaaactctcatactgtttaattaactccctaaatatttatcaaacaaatgatatctacgttttttaaaaaaaaaacatatctttagattatagagttatacaataatttccacatacataagcttccacgtatccaaatttaaataaatattttttgtgtataaaatgtaatccaaagatggagatctaaatctactaattaactcacaagtcaacatttaaatatgcttagaaaaataattgttttcgatctatgaaattatgtggctgcattatagtattaacaagcaatcatgcttagaaaattataatattgttatcaatacaattacaccctaattccttaccaaaaatacgtgccgtttcaagattagctaaatagagcatggaatcaacattgcttgtcgtgttggctttctcttcggagttgttaatttttaatttaatatttttactattttcatcacattattgaatacgaataataattgtattaaacaatcattattggaataagacttagatgataaagatattctaatcatttataaaatacgtagatgttgactttttttttttggcaactatttgaaatatatttgtttccaacgattattattttataaaaaataatcataaaatttgtgacctgcaatatgacattaatagttaaaaaaaatttcgtcaaaaggaataattcacaattttaaatagataaaaattgtaaccagaagatataccatcatatatatttacaaattgtattattatctattcataatacaaaacatgacaaaagaaattggttgagttcttgtcgggtattttccatatctcacacaaataaatcaaaaattgaaaaagattacaagacacaaacaatccaaaaaattaagtatcaaaaggcaaattttttatttttatctttagtttctcgtagtgcaaatattaaagcggttaatttgatacgtaaaattcgtgttcaaccgcaacatattatttacgtaaacaacatttttcaaaaattgcattaattaattttggataataaaaaaaaaggtatatactactaaaatatggagattaactaaaactgttcatcaagaatcttcaatatatatctttaaagagatttatttcgaattttattaaagaaaaaaatttgaaatctaaagggcaaccaaaaaaaaaaaaaaaagacaagaggagaaagaaaagcaaaggaagggcatgtgactgatcacggctttgcctccaccgcataaagctcccttcacagatacatacactctctttctctctcttccggcgtttattcttcttatttcgccaccgtcctccgccgccgtggtggacttatatctctgcgtttcacgacctgccgccaccgccggcgataggtttcaatgatgaattaaggcgttggccagagagagaagagagattgagatctgtcgatatg

SEQ ID NO: 25927 - DNA, 3000 bp, Unknown; identical to SEQ ID NO: 12572
  misc_feature (1)..( 3000): 2750-1469P.txt file - cDNA_ID_2709197; gDNA_ID_2214559; Annot_ID_134851

SEQ ID NO: 25928 - DNA, 3000 bp, Unknown; identical to SEQ ID NO: 12572
  misc_feature (1)..( 3000): 2750-1469P.txt file - cDNA_ID_2709197; gDNA_ID_2214559; Annot_ID_185834
